United States Patent Application Publication US 2011/0014706 A2 - sequence listing, part 34

SEQ ID NO: 85203 - DNA, 679 bp, Arabidopsis thaliana columbia
gaatattaatgcttcagacaatgtttctgaggttggttctgttgtctctcatactgagaatcatgaagaggatgtgcaggaaggtgggaagaagcataggcgatacccgcccaagaaaacagagattaagcttgagggtaagatggtagtggagggagttgatgcatcccatgggcaatatgatgatgatgatgatgctagtgattggagacccgcagtcagtagaagtactcactcaaagtatcttacaagaaaggcaaggtgggaacattacaatgccttggctgaacaagaaattcagaaagatcaagaagctgacaaagctcgacacactaaagaggccaatgaaacccacgcagaagatagtggaaagaatggtgaggatatatcttccatccttaaagatatgaggttggaggaagagtcattaagggctctccaagaagagactgaagagacgaatgctgaagcaactttgatcaatggtgaggatgatattgatcatgatattgaagtcgaagctgaggggatcgatgttgcaaatcaagcgctagagaacttggagattgctagtgaggctgaggataccttcgaggcatcatcgattggagatgatggtagcagcgagcagagttggtcattgagagctttatctgagtccagtgtagcttgtataact

SEQ ID NO: 85204 - DNA, 584 bp, Arabidopsis thaliana columbia
  unsure (1)..(584): unsure at all n locations
aataatagactttgaacttttattcacatgtatcaatgacaaaaagttcagagttcattaacaaaggtggcctagaagagagataaaaatttgaggatagttctgtaaatagaaacatataaacaaatttatgtgataccgcatgataatatttcatgtaatctacctagccgttgggctcacatcagtatcaaatgtcaagcttacctctagggaactctttgagtccatgtccctactcgctcctccccntgaattttcagataccaaacattcgtttaatgcaataagaacttgagacatggtaggtcttctcgttgaagaaggattcagacaagacattgctagttcaacagctttccacacagaaccagaatcatagtctccatttagacttggatccataatgctaatgatgtctcctttcgtaagcattatccccacccattctgaaatatatggcttttcacggctttggtctatcactggccgatttgtgatcatctccaacagtacaatcccaaaactatatacatcactcttctctgtcaaccgatttgttttgtaatattcaggatcgagat

SEQ ID NO: 85205 - DNA, 960 bp, Arabidopsis thaliana columbia
ctttagcccatcagcaaatatcatgaatcttacagaatattcccatattttgtttctttcactatgcaccctcaacttctgcttgtactccataaactccgacgacaacggaggctgggagagaggccatgctaccttctatggtggagctgatgcatccggcacaatgggtggtgcttgtgggtacggtaacttacacagccaaggctatgggctacaaaccgcggctttgagcacggctttgttcaatagtgggcagaaatgtggggcctgctttgagctaacgtgtgaggatgatcctgagtggtgcatccctggttccatcatcgtctcggctacaaacttctgtcctccaaactttgccttagctaatgataatggtggttggtgcaatcctcctcttaagcactttgacttggccgagcctgccttcctccagatcgctcagtaccgagctgggatcgttcctgtcgcattcagaagggttccatgtgagaaaggtggagggataaggtttacgataaacgggaatccatatttcgacctcgtgctaatcacgaatgtgggtggtgctggagatataagggccgtctctttgaaaggctcaaagacagatcagtggcaatccatgtcaagaaactggggacagaattggcaaagcaacacttacctcagaggtcaaagcctttctttccaagtcactgatagtgatggtcggactgttgtgagctacgatgttgtgcctcatgattggcagttcggtcagacttttgaaggcggacaattttagatttatgatcaagtgaaactaatagacgttatatccaagaaaagtcaatgattgtgtttaagataaaactctgcttttcattgatcataaccactcttcgatatataatagtcataagaaagaaatacaatgaaaccaatttcaagcactctttgactctcttttcaaag

SEQ ID NO: 85206 - DNA, 521 bp, Arabidopsis thaliana columbia
  unsure (1)..(521): unsure at all n locations
cnnnnnntaatacgactttcttagggaaagctggtacgcctgcaggtaccggtccggaattcccgggtcgacccacgcgtccgttataattcacctgagaaaaacaatatcaatcggctcgttttctctcctcagtgtttcttcagtagtcctgcgagatcgtataagagattcgaaaccctaatctatcaatttgatcctgtccattctctgtgtaatattgtttgagaattgtgcaatccgatggggacgatgcaccggagtggtgctcccagaaggacaaatgaaaatgcgaagcttatcataacgacaatcgtgggagtggtgtttggtttttttgttggtatcacattaccattaggttcctttagaaagattagcttaccttcaggccttatgtcatctcttgatgtagccatgtcagatgggaaattgttttctggtggcagatcacctgaagatattggttcaagaaagtctcctaagatatatgttccaaccaatccgcatggtgcagaact

SEQ ID NO: 85207 - DNA, 645 bp, Arabidopsis thaliana columbia
ccgcgccggaaccggtcccgcgtaaaaaagtgggagaaaatgacttaagctaaaaccacaccaaccccttcctcctccattttttagtagttgaagcttccttcttcttcttcacctaatacttcttctctatctctctcgccaaagaatcgtacttcttctctcaggttttaaggagatgggatctggtcaatggcacgttgagaaaaggtctacgtttaggaatgattcgtttgtgagagaatatggtatagttccagaaactggttgtctttcaatcatagttcttggtgcttctggtgatcttgctaagaagaagacttttcctgctctttttaacttataccgtcagggatttctcaatccagatgaagttcatattttcgggtatgcgaggactaagatttctgatgaagagctgagagataggattcgtggatatcttgttgatgagaagaatgctgagcaagctgaagctttgtcaaagtttctgcagctgattaagtatgtgagtggcccttatgatgctgaggaggggttccagagattagacaaggcaatttcagagcacgaaatctccaaaaatagtactgaagggtcttctagaagactgttttatcttgcacttccaccgtctgtttatcc

SEQ ID NO: 85208 - DNA, 684 bp, Arabidopsis thaliana columbia
  unsure (1)..(684): unsure at all n locations
cnggttcccccccccgaaaggnaaaatcngccnacccaatgcctnntnctgaaancacccgagantccagattcactagaacngcanattttgttgctgctttgnccggatcaagatgttcctgattaccttttccattcagcaacagcggttcatttcactagctactaattcaattccctgtgaagnaaattcaggactcgtgcaaccatagattccaaacaatcccggtattgttaaagacgctagtgaatgcagtgcatgattgaaactgctgatgttgggttcaaaaaggcgcaagatagagcccaagagtgcattccttttccaggggcctcccgcaagaaaatgagccacctcctcccataagcatctgaagaaaagttgcaatgatagcttccttctcgttattccatcctggcacttnaaaagcaagcgcaaaatgtgtagcctctccacccgtatgttgacggaaatctccaccgacatattgaaactttgctccgcaggtcggggtacattagggaggtcagatagtaatggctcaaccacttttagaagttcttcatgatcaactccactagctgctaggaccattcgtgaagcagtgtaattctnaaaaaaaaaattctccaagacctccccagtcaatccagtaattgcagantcaggtgcatacaatgg

SEQ ID NO: 85209 - DNA, 400 bp, Arabidopsis thaliana columbia
caaaattcgaaaaaaaagcttcccagagagaagagaaaaaacttctctgaggcggccatgacgttgcagagaggtttacctcttctcttgcaacagtacacggcgttgttcaagaaaaaccttttgctttcatggcggagcaaacgagccacgtttcttcagctcttcgcttctttcttcttcatccttctcatcttctgtatccaagcagccatggagaagagtttcgcttcctccacggctctcaaaactgttacggatccgacggcgctgatatcgccgccgattccgccttgtgaagataaattcttcgtgaatcttccttgctatgactttgtttggagcggtaatcgtagctccaaggtcacgcagattgttaatgcgattatgaagaataatc

SEQ ID NO: 85210 - DNA, 558 bp, Arabidopsis thaliana columbia
  unsure (1)..(558): unsure at all n locations
catcaaaaatcccatagccttcgagagncggtggtgctactgtcaaggtaactgcatcaccttctggaacaccatcatgctcaggagcggcccccattgtttggtctacaaccagctccatcatctagcttagcctcttgctcatcaccttcaatgtggtctaaagccacagcttcctcagaaccttcaatgtgatctgaagccatagcttcctcagaaccttcaatgtgatctgacgacacagcatttagagcctcaggtgaattgtctggattgggagacgaagatccttcatctcgtgtttctgtctccattttggcaccagcatttgacgacactttttgcagttccttttgggatgtgtctgaatctgatacatccgnaattttcatatctgttgcctcaattgaactatttccattccttgcatcattcagatcatcattgttttcaactttaaccaagttggaaggaggcacttgaggagcctcgtgatttttgacatttggaagaccctttatttcaaatctttgctccttgtagaaatccatagcaatc

SEQ ID NO: 85211 - DNA, 444 bp, Arabidopsis thaliana columbia
ggtcgcacacgcgtccgcccacgcgtccgggattttcgtgatatgtaggatcgggcgaatgagttatataagacgctggaggatcagaagtcaagcaggggaagaaatcaggatgcactttatgcagcctggcggtacgtggcttgtcgccaagaggacaagccacgagctattaagggtacatttcacagatttctcatttgagagaggcttgttacctcttgatttagctttgacataagtcaatcaaactcgcgaaccttgtgaatagaaatatgcgttattgccaatggggcgacaaacaaggaaattggccgagcaaaagactacattgttaagacattgggactggagcctggtcagtctgtggatttaggaactatacacgctggtgatttcatgagaaggctctgctccaaccttgcaatgtctaaccatgcggtg

SEQ ID NO: 85212 - DNA, 1353 bp, Arabidopsis thaliana columbia
catctctcgtgttttgttttctttgtctccgatttttttcgcgacgaagaagaagacgagagatagagagagaagtagagaaatcgaaggaatctgtaaccgattttaagatctcaatttttagggttgttgatttttcaatttctgggttaattttttttagggttttcatttggaatcatgtcggatgcgtattgtacggattgtaaaaaggagacggagttggttgtcgatcactcagccggagataccctttgctccgagtgtggtttggttttggaatctcactccattgatgagacctctgagtggcgtaccttcgctaatgaatcttccaacagcgatcccaatcgtgtcggtggtccaaccaacccgcttctcgctgatagtgctttaaccactgttatcgctaagcccaatggttcatctggtgatttcttgtcttcttctctcgggaggtggcagaatcgtaactccaattccgatcgtggtttgattcaagcttttaaaaccattgctaccatgtctgaaaggttgggacttgttgcaactatcaaggatcgggctaatgagttatataagaggctggaggatcagaagtcaagcaggggaagaaatcaggatgcactttatgcagcctgtctgtacattgcttgtcgccaagaggacaagccacgaactattaaggaaatatgcgttattgccaatggggcgacaaagaaggaaattggccgagcaaaagactacattgttaagacattgggactggagcctggtcagtctgtggatttaggaactatacacgctggtgatttcatgagaaggttctgctccaaccttgcaatgtctaaccatgcggtgaaagctgctcaggaagctgtgcaaaaatctgaggaatttgatataaggaggagtcctatatcaatagcagcagtagtcatctatatcataacccagctgtctgatgacaagaagactctcaaagatatatcgcatgcgacaggagtagcagaagggacaataaggaattcatacaaagacttgtatccacatctgtcaaagatagcaccaagttggtatgcaaaggaagaggatctgaaaaacctgtcaagtccttgaagtcgtttcttgattcttctatatgcaatagagaactatctatatctataaatctatatcgactgaggaagatacaaagcaattgttctctctctctagtagagccttttgtttctttttcaaatcttttttgaagtcctttgcttaagattcttgtaatggcgttaaaaaacttgaagaaaggacccgctctagaggatccaagcttacgtacgcgtgcatgcgaggtcatag

SEQ ID NO: 85213 - DNA, 573 bp, Arabidopsis thaliana columbia
  unsure (1)..(573): unsure at all n locations
ggtgccaaanggagaagcaccagaccccataaaccgacccgnccacccaagntttcctttttattttgttgaacaccagcttgccccaaaatgcagaaggagtccgcccattaatgatcgcttgcttctttgagttataggcaatttcgaaaagcctttttttcacaaacccccagatggttttccggccctttgtaatgccatcatatattcgatttatacaagcgagggacccctacagaaatattggtggccttaacacagggaaaatcatccatcagcttgaagacatccccctgatagaaaccgacagcaacaccaccatacacccccataatctgatttgcacgttcatatatgtgcgccaaaggnagatatgatatgtaaacatctgaaggaaagaattctgcttccacactggaaccagcnanattngcgatcaagtttccatgagtcaacacaacaccctttggtgttcctgtggttccacttgtgtagcatatggttgcaatgtcttctggctttggaggcnnaaatggatgtaagctacttcgaccctgactcaatagcttt

SEQ ID NO: 85214 - DNA, 496 bp, Arabidopsis thaliana columbia
  unsure (1)..(496): unsure at all n locations
cctgnngaaaagctnatnangtaccctgtaactgacccccnaagaaccctnacgccggaatatggaacnccnaaactgttgtnaaacctatagttggtgtttgctggaaatggcctgcttgatggatttaacagcatttagataaccaccactgcacagtgaacctagttcatcgatgaccaagcaatgaaacgttggatatatcaacacccttcaaggttacaatctccaaaagtctctcaggtgtagcaactataaattcaggctcaacgctttttaatccggaaatctgatgatctagtggtgctccttggtgtaagctcacagtatgaattccaatacctttcagtgccttgcaaaccgatcgaacctgagaagctttagactgagatggcacaaggtacaaaagnaaaggactgtttcccaacaactcctcctcctcctccacctcgtctttctcccgtctagcaatagcatcagcagcagtagaaacaat

SEQ ID NO: 85215 - DNA, 702 bp, Arabidopsis thaliana columbia
gattattctttatctggatagagaagataatgagctccttggggttttcagttggaactggttctcctccaagtgagaaaagaaaatgcagatttcttgtgaataatagcttaaacaaagcagaggctattaacttgagaaacaagcaaaaagtttcttctgatcctgagttaagttttgcccaattatcctcatgtggtagaagagaagcaattattggttttggtttctctattggcttgcttgataatgtttctgcattagccgaaacaacttcttgtgaattctctgtgtctccttctggtcttgctttttgtgataaagttgttggttatggtcctgaagctgttaaagggcaactaatcaaggcacattatgtagggaagttggagaatgggaaagtctttgatagtagctataatcgagggaaacctcttactttccgaattggtgttggtgaggtgataaaaggttgggatcaaggaatccttggctctgatggaattcctcctatgcttactggtgggaaacgaacattgaggattcctccagaactcgcgtatggtgatcgaggcgcaggttgcaaaggaggctcatgccttattcctccagcttcggttcttctctttgacattgagtacataggtaaagcttgagagagcttttttgcttttgctttgccttttctgagccatatcatac

SEQ ID NO: 85216 - DNA, 409 bp, Arabidopsis thaliana columbia
tccacctaatatgaatggtgccgaaaacttcaggcgcgtggtaactttgggtatgcaccccagtctattcgaacggtttcggttctcctactgaagagctcatcaagcaacgaatctgatgcaggttgtcgcgttaaaatcttgtatgtcatatctgttttactatatttccttagaattgagatgcatgagaatggaattagaggatcttcaagggttcccaccaaagctggaacatctgaaagcgatttcatcccaaagtatcctgggtttaaaagccccctcacaaatgtcgtgtgcgtgtgttgtagttctctcttaggaattgagatcgtgggtgagaactgaatatcccttcgtctaatggtgtggctactactgtgacatcacacttgtagctgtttccttt

SEQ ID NO: 85217 - DNA, 633 bp, Arabidopsis thaliana columbia
  unsure (1)..(633): unsure at all n locations
anaacncccanganccctatttntggaccggnccancgctcctggggttnttcccgcacaattcataggcccggcttgaaggtaatgnganctttccaaaactttccagcattttggcaaaagccagcagcgggtncattccaattaggcgaactggaatctgcattgaaggaatatggaaatgggagatgatgcaaccaatccaaaagaggttttgtcagatgccgactccgataaccgatggtagaatcaactatgaagagttctgcgcaatgatgagaagtggaaatccacaacaacaacaacctcggctgttctagtggacattgttgctggattaaaagtctttttgtttgtatctaatccagaaaaatcaggagctgaattaatgtttgttcagacaaaaaccacgtaaagaggaagatactcaaaactctgattgcttgtgttttgtattttgttcttcacttcttctgttttgtcctttgtgttctgtactcaggctgttgtgatatgagagaaagagaggtttcatttttaccgttaacgattttgatcaaaatcnggccgccaanacnggtatcaaccattaccaacaccagcanccctcanctgggnggcnntnggnnnnac

SEQ ID NO: 85218 - DNA, 2154 bp, Arabidopsis thaliana columbia
agacaattttaaaaaaagatcctgactttcaattttctctcttgtttcttctttggatcatcttcaacaaaaaaaagttacgatctttctctccgggtcatcggaatttgagctagcttagctaaagttccgatctttcctctctgggtcgtcggaatttgagctttttaaaatcatgggaaattgttttgccaagaaccatggattgatgaagccacagcaaaatggtaataccactagatcagttgaagtaggagtaaccaaccaagatccaccgtcgtatactccacaagcgagaaccactcagcagccggagaaaccaggttccgtgaatagtcaaccaccaccgtggagggcggcggctgcagcaccaggactaagtcccaagaccaccactaagagcaattcaatactagagaacgctttcgaagacgtgaagctcttttacacattgggtaaagagctaggtcgtggtcaatttggggtaacgtatctgtgcacagagaattccacggggaagaagtacgcttgcaaatcgatctcgaagaagaagctggtgactaaagctgataaggatgatatgaggagagagattcagataatgcagcatttgagtgggcagcctaatattgtggagtttaaaggagcttatgaggatgagaaagctgtgaatttggtgatggagctttgtgctggtggtgaattgtttgatagaatcattgctaagggacattacactgagagagctgctgcttctgtttgtagacagattgtgaatgttgtcaagatttgtcatttcatgggtgtgttgcatagagacttgaagcctgagaatttcttgctctctagcaaagatgagaaggctttgatcaaggctactgatttcggattgtctgtctttattgaagagggaaaagtatatagagatattgttgggagtgcatactatgttgctccagaagtcttacgtcgcagatatgggaaagaagttgatatctggagtgctggaatcatcttatacattctactcagcggtgtgcccccgttttgggctgagactgagaaaggaatatttgatgctatattggaaggccatatcgactttgagagccaaccatggccgtcaatctccagcagtgccaaagatttggtacgtagaatgttgactgcggatccaaaaaggcggatttctgctgctgatgttcttcagcatccatggcttagagaaggtggagaagcatcagacaagccaattgacagtgctgttctctcaaggatgaaacaatttagagcaatgaataagctaaagaaacttgctttaaaggtcatagcggagaatattgacacggaagaaatccaaggattgaaggcaatgtttgctaacatagacactgacaacagtggcacaatcacttatgaagaactgaaagaaggattagccaaattgggatctaaactcacagaggcagaagtgaaacagctcatggatgctgctgatgttgatgggaacgggtccatcgactacatagagtttattacagcaacaatgcataggcacaggcttgaaagtaatgagaatctttacaaagctttccagcattttgacaaagacagcagcggatacattacaatagacgaactggaatctgcattgaaggaatatggaatgggagatgatgcaacaatcaaagaggttttgtcagatgtcgactccgataacgatggtagaatcaactatgaagagttctgcgcaatgatgagaagtggaaatccacaacaacaacaacctcggctgttctagtggacattgttgctggattaaaagtctttttgtttgtatctaatccagaaaaatcaggagctgaattaatgtttgttcagacaaaaaccacgtaaagaggaagatactcaaaactctgattgcttgtgttttgtattttgttcttcacttcttctgttttgtcctttgtgttctgtactcaggctgttgtgatatgagagaaagagaggtttcatttttaccgttaagattttgatcctgactgtgttaacatttttacctcagttcctccacttttaatgtgattctccattccatcaatgtcaaatcaacgaaacaactgctaaagcagagctttcctatattttaacata

SEQ ID NO: 85219 - DNA, 552 bp, Arabidopsis thaliana columbia
  unsure (1)..(552): unsure at all n locations
tataaacattgaggctatatgaaacactactttccactatcagtcacccccaaaagaaaaccaaaatagagaacgagattcatattatacacacaataaaaccatataatatacatatgattaacaaatacttggaatgaataatttggattgttctgacaaatccatcaaagcctcctccactaactcctccagcaacttcaattctaattcctctcccatggaatccatttccaatctcaaactctcctgtgaaccaatctcagctacttcaatcctcaccactttattcaccgccaaactgctcaagtctccgtcttcatcccaccaccggtcttccactcttccggtacccggtaaacactcttgcattctggttatcacataaacccccaatgggttaccagagagggtatgggctactacggggccaagatggcccggggtacgccccaagggagcgtgtggcggggggaaacccaggtctccgggtggtccggggctttcgggcggtgggcnggaggttcccnaatggnagggggcntgggaggc

SEQ ID NO: 85220 - DNA, 612 bp, Arabidopsis thaliana columbia
  unsure (1)..(612): unsure at all n locations
ttttttttttcatataacaaaaattgaaggaacagatgagttaaggcattacaatattcagtttaaacgttgtatcaaaaaatctgaaacagcctttgaaggtcataacaatcagacattgtcaagttgtcgaaactaacagagaacaagatgtggaaccaaaatcagcatcaccttcctttatatttacatggctaatatatgttcgagaagtacatgttaggaccatgaagctatgagtcatgttgagtcacctattcccttatgaaccagcatatcatatactctgtctactttactcggctctactttgaagaagctataagcatcagactttttctttatctgccccttctttatttctcttgttaagatatccaacatcttcaaatagtgtacaggcagtattctgggcccattgcacatcttcctttcgggcnctgagagtaagtcagcnccaaggggnccatcacatccccagngnccaaacgggggaaaatcctngggggggggccttggnagngggccgaccaagggggnaaattttggggaacccctgggctttangggtaccgggaaaagccgggcccggggaanngggnggaattnnng

SEQ ID NO: 85221 - DNA, 2142 bp, Arabidopsis thaliana columbia
atgggtaatgcttgcgttggaccaaacatttctggaaatggtttcttgcaaactgttacggctgcaatgtggaggccacggatcggagctgagcaagcttcttcttcttcccatggtaatggacaagtttctaaagaagcagcttcagaaccagctactgatcaagtccagaataaaccccctgagcctatcacaatgccaagctcaaagaccaatcccgaaactaaactgaaacccgatctagagatccaacctgaagaaaagaaggagaaagttcttgcagaagaaaccaagcagaaagttgttcctgaagaaagtaagcaggaagttcctcctgaagaaagtaagcgggaagttgttgtgcagccggagtcagcaaaaccagaaacaaagtctgaatccaagccagagacaacaaaaccagaaacaacgtctgaaaccaagccagagacgaaagctgaacctcagaagcctaaacatatgaggagagtgtccagtgcagggcttagaactgagtcagtgttgcagaggaaaactgaaaactttaaggagttctattcattagggaggaaacttggacaagggcaatttgggacgacgtttttatgccttgagaaaggtactgggaacgaatatgcgtgcaagtcgatttccaagaggaagcttttgactgatgaggatgttgaagatgtgagaagagagattcagataatgcatcacttggctggtcatccgaatgttatatctattaaaggtgcttatgaggatgttgttgcggtacatcttgtgatggagttgtgttcgggtggcgagctttttgatagaattattcaacgtggacattacactgagaggaaagctgctgagcttgcgagaaccattgttggggttttagaggcttgtcactctcttggtgttatgcatcgggacctcaagccagagaattttctatttgttagtagagaggaagattccctgttgaaaacgatcgactttggactctcaatgttctttaagccagatgaggtttttacagatgttgttggtagtccgtattatgtagctccagaagttcttagaaagcgttatggtcctgaatcagatgtgtggagtgctggtgtgattgtttacattttgttaagcggagttcctcctttctgggccgaaaccgaacaaggtattttcgagcaggtccttcatggagatcttgacttttcatctgatccatggccaagcatctctgaaagcgcgaaagacttggtaaggaaaatgcttgttcgagaccccaagcgaagactaaccgcacatcaagtattatgtcatccatgggtacagattgacggtgtggctccagataaacctctggactctgctgttctgagccgtatgaagcaattttctgcaatgaacaagttcaagaaaatggctcttagagtcatagctgagagcttatctgaagaagaaatagccggtttaaaacaaatgttcaagatgatagacgcagacaatagtggtcagatcacttttgaagaactgaaagcaggactaaaacgagttggtgccaatctcaaagagtcagagattcttgatctaatgcaagctgctgatgtggacaatagcggaacgatagactacaaagagttcatagccgccacattgcatctaaacaaaatagagagagaggaccatttgttcgccgccttctcttactttgacaaggacgagagtggctttatcaccccggacgagcttcaacaagcttgcgaagagtttggtgttgaagatgcccgcatagaagaaatgatgcgcgatgttgatcaagacaaggatggacgaatagactacaacgagtttgtggcaatgatgcagaaagggagcataatgggaggacctgtgaagatgggtttagagaacagcattagcatttctctgaaacattagttacaaacccaaatcaagaagtacttcgtctatttattttgttatgaatgatgatgatcatgattgtgtttatctcaacattttgatgagatttttgttcgttagactggtttaggtaaatctgtttctgtactatgtacttttatgcatatacacatagcttttgtctgtaacttttggtcataagttatctttttaaaa

SEQ ID NO: 85222 - DNA, 425 bp, Arabidopsis thaliana columbia
cccacgcgtccgcgttaacatgggctttctcttctctatctcctctacctatgaagtcacttgacatttcgagatcctcatcttctgtctcaagatctccttaccattttcagagatacctattgagacgtctacagctaagttcccgttcaaacttagaaatcaaagattcatcaaacactagggaaggttgttgttccagcgctgagtcaaatacatggaagaggattttgtctgcagcaatggcggcggctgttatagcctcgagctccggcgttccggccatggcagagcttaacaggttcgaggccgatacacgtggcgagtttgggattggctcggctgctcagtacggttctgctgatctcagcagaacagttcactccaatgaaaatttcagaagagccaactttacttctgccgac

SEQ ID NO: 85223 - DNA, 543 bp, Arabidopsis thaliana columbia
  unsure (1)..(543): unsure at all n locations
angggtgagaagaggnttggaagcccattgangntctcaccgggaaanctgggaagncatggggttaaaagatgttgtagctgctgancancgtcagcctcttncctttcatcttaagcctaagatagtggagctaaaggtgtcaatgcattgctacggatgtccgaagaaagtcgagaagcatatttctaaattagacggagtgacatggtacaaagtggagctagagagcaagaaggtggtggtgaaagggaacatattgccggtagatgtgttagagagtatttgtaaagtcaagaatgctcagctttggtcttctccttgaatcactcttttctttccacatgggcctttcatgtcaatctccatctttcatgttatattattgtcattatctaattttgcgtacatacacatgcatgcatctattttctctgaatctctaatctatatcccttttttgttttgttcaattccactctattttgtaacattttgaatctatctcgtttgtcatatatacaaattagtggggatgctttt

SEQ ID NO: 85224 - DNA, 589 bp, Arabidopsis thaliana columbia
  unsure (1)..(589): unsure at all n locations
cgccaaataaaccgattgatggaccactagatgatttgacaataatgaaggaaactctgcgtgtcaaagatgaagaattacataatttagccagggaacttcgttctcgtgactcaatgataaaggaaatagcagataagctatctgagactgctgaagcacctgtagctcgagcatctgctgctcattacaatggatgaacaaaggaaaatcgtttgtgtggaatttgagcgcttgactacagactcacagagacagcaagaagccacaaaattaaagctcaaggaattgggaagagaagacctttactttgagtaagggaaaaaggtccaattgggttaagggaaagagacgctgctctccaagaggcacatatgtggcggtctgagcttgggnaagccagagagcgtgttgtcatacttgaagggagctnttntnagggccgagagnaagttagggtttcagaagcaagcggtnaagcaaattcaaaggggcttttcagaggaagcacctctttggccaggnngcaagncttttgcctntntantttnttcacctagcttaaaggnggctnttgatttttcccgga

SEQ ID NO: 85225 - DNA, 304 bp, Arabidopsis thaliana columbia
gagcgagagagatgcagcgcgtacgagctttaaacatgttaggaaggtctgtgaatagtctaaaatctacatcaaatgagtgaagggaaatgggcagcaacacatgtggtggatgcggagaaagggcagtcagtaatgaggcagaaaggagcattatccaagatattgttaccgcagtgattgtgtactcgaaggaaagatatatatttgacatggtatccatattttgttctagcctaagaaggattcataatctggaaatcatactattagtaattatttggagagatgctccacgacgtta

SEQ ID NO: 85226 - DNA, 398 bp, Arabidopsis thaliana columbia
taagtatatataaaccatatattagttttacatcaaaaccattgatataggttgatatttttaaaaaaaaaaaaccttgtgacagtttcatgcatggctttaacagtcataaaagaaggcattacacatataatcaaagtcccaagcacccttattagacaagctaaatcacattctcagatcttgagatagagtaatccagaggtaccatcgaatcctttggatctgtagaactttgcatactctgtaatagtagtgtctctataattaggagggttttcttcagacaaaatctctttgatgggtccataaactcgaggattcgccatcaaatacgagctgaagaaacatgccactgaaattctcggtccagctacattggccaaaaccctatgctc

SEQ ID NO: 85227 - DNA, 906 bp, Arabidopsis thaliana columbia
cgtgggtcgacgcaagtctctatagtgagtcgtaataacgacagaagtttccaccactgtgactaaatctaaacaatttcatggcgagtctctgtctctcatcgtcccggatcgtttctcttcaccaccagaaaccattcctctctcttaaactccggtctcgtccttcagatctctccggtctaggtcgccacacgagtcctgtttgcttcaatccgcttaggttatcgggtgatcgtcagcgaaccgctacggtatcaacgagggtggagaagcggcgaaagagaggatcgagtgtggtctgttatgctgctccgatttctgccaatagtctacaatggatctccaccatttcttgccttgcattgatgcttgcaaggggtactggtatacataagtcagttgttgttccactattcgctctccacgcaccatcgagcatcgtcgcctggattaagggagagtatggtgtatgggcagcattcttggcgcttattgctcgacttttcttcacttttccaggtgaacttgagcttccattcatcgcattactcttggtgattgtggcgccatatcaagtcatgaacataagagggaagcaagaaggggcaatcatagcaatagcaatatctggttttctggctttccaacatttctcacgagcagggagcttggagaaagcatatgagaagggttcagttcttgcccctgtagccattattggtgtcacagttgtatcgctccttttgttgctataactatatgctcctgaccaaaaatgttaatcagtgtaagaatgtgtgtgaaggaaaaaaaagaaagatgtgcttgcatttatccgctctttaagaaatgctggtacatttttggcaactattcgctggcaataaaaatgatctttcatgt

SEQ ID NO: 85228 - DNA, 407 bp, Arabidopsis thaliana columbia
ttttttttttttttttttaggtaaacgaactatagaatctgaagaatagaatcgtaaaatcagagcatgaaattgcatcttatgtcaaccgataagaaaagcatatttgtactttaaagaaaacttatactaaatggctaattacggccacgtttcttgacgggtacggcatgtaacgggttggtcttgtgcaatgtgagaccgaaagtctcgtccatgtccaaatcctctgaaccgacaccgtttggaagcttccagtcaaatgaataaagaagagaagcaagcataagaggcactgttttcacagccaaaggaaatcccgggcatattctacgtccggctccgaatggtgtaagctcataatctctacctctcaggtcgatatctttccctaaaaacctctctgg

SEQ ID NO: 85229 - DNA, 692 bp, Arabidopsis thaliana columbia
  unsure (1)..(692): unsure at all n locations
cgaaagaggcatgattctnatgttagcgagcctgaatcggaggataataaacaaccactgcgaaagaaagaagaagcttaccgtggaggacagaagcagaaaagagatgatgaagacgtggaggctgatcatttgaaagacagatatactagagatgacaagaaagctgcaagagactctgatgacagtgagattgagtatcagaacaagaaacaactgcgcagtaaggtagaagtttacagtgcaggaatgagccagaaaagaaaagaggaagaagatgtgaccaaacatggcaaggacaagtatagaagtgattctcgtggcaaggaagttgctagagactctgatgacagtaaggctgagtatgaaaataggaagaagctaaagaatgaaagttaccaacgaggacgtaaacacaaaagagaggaggatgaggacaacgataaccatgggagggacagatattagaggtgatgatgctgttaaaaggtattggaaccacttaagggagacggcggtaggtattggaggtcgggccctttaggaagaaggagatgatgataggggtagatacagaccgagacgngaaagtttnaagnatgntgaggnaggnntttaancntgggggagncaggtacagngggttattgaagaccggncaacgggttaggaaggttnttattnttgtttgg

SEQ ID NO: 85230 - DNA, 393 bp, Arabidopsis thaliana columbia
cccacgcgtccgtggctaacttatgtgttgtatcctcgcatacggtgaatggcgttgctcagttacacagtgatatcttgaaggctgagttattcgcagactatgtctctatatggccaaaccaggttcaaaacaaggcttatggcatcacacctcggaggggggtaccgttctgcagccctgagctcagtgatattatcacaaaggggtttaaggccgacaaatggattaccgatcttgacctacttaccggtcttcgccagtttgcggacaatgaagaactccaatctgaatgggcttctgcaaagacagccaataagaaacgtttggctcaatatatagagcgcgtgactggtgtgagtatcgatccaacaagcttatttgacatacaag

SEQ ID NO: 85231 - DNA, 357 bp, Arabidopsis thaliana columbia
gattgccacggagagagcgcaaatattgaaagttgttttgaaaggagagagtgttgaatcagatattaactatgatccgtatagctcgtttatgtgaggactatacccggatcagatatttttgaacctctgcaaaaaagcagcttacttcccaatccgagaaatcctagaggcaagagaaagagggcaaaccgagtttctgttcctagaccattgacacaactggccttggaggaggttcttgctacctcaaaggaggcacaagttgctgcaagggggtacactggtttaagctcttcaatcttctgtctgggggagtccagcaatgccgttgaggtccagcagctataaacggca

SEQ ID NO: 85232 - DNA, 1063 bp, Arabidopsis thaliana columbia
  unsure (1)..(1063): unsure at all n locations
cttctttcattgaagaaatgaaagtgttctataaagagagattgagtggttactacggcgtttcggtttatatcatatcgaattacgtctcttctttcccgttcttggtagccattgcgctcatcacagggagtattacttacaacatggtgaaattccgtcctggtgtctcgcattgggctttcttctgtctcaacatattcttctctgtctccgtcattgagagtctcatgatggttgtggcttctcttgttccgaatttcttgatgggtcttatcacaggagctggcatcatgggagtcatcatgatgacttctggattcttccgtttgcttcccgatctgccaaaggttttctggcgctacccgatttccttcatgagttatggttcttgggctattcagggagcatacaagaatgattttcttggtctagagtttgacccgatgtttgcgggggaaccaaagatgacaggagagcaagtgataaacaagatttttgggagtgcaagtcacacattctaagtggtgggacttatcagcgatcgtgttgatccttgtgtgttaccgcattctatttttcatagtcttgaagcttaaggagagagcagagcccgctttgaaggcgatacaagcaaagcgaacgatgaagagtctcaaaaagagcccttctttcaagaaagttccatctctatcatccctatcttcaaggagaccccaccctttacattcccttttttttcaaaaaggtcttccctctcccattaattaaagattatatctatttggggaaaccctttgtttcttaatttgttttgcccatccgatagtttcaccatttataaatatgtatccttatcagcatctaatgattttatgattcagccttgttatttttggagaataaacatgaaactctgtatctttcgtctnnnnnnnnnnnnnnnnnnnnnnnnnnnnnnnnnnnnnnnnnnnnnnnnnnnnnnnnnnnnnnnnnnnnnnnnnnnnnnnnnnnnnnnnnnnnnnnnnnnnnnnnnnnnnnnnnnnnnnnnnnnnnnnnnnnn

SEQ ID NO: 85233 - DNA, 398 bp, Arabidopsis thaliana columbia
cctgtgtgtaaaggatttgctcatgttgatttcaaaactgagattgatgcaaacaggtttgtgaaacagttcacgggacagagcttagcatttgggaaggttataaagcaaatcaaatgtcaggttgtggagtttacttctgatgattctgtatcgaaggaagtgtacttagataacggtttcaaggtgcagaagcttccgtattctggtcttgaaggagattctagtgctgatgttgttgaagaagaggttttgttgggttcaggggaagaatcggatgattcagaagaagaggtagatgaaagagaagtggaagacgatgagcggaatcatatctctggtagcatagaatcttctccccttgaaatgacacgtgattcgatacccagttaaagttt

SEQ ID NO: 85234 - DNA, 980 bp, Arabidopsis thaliana columbia
gcggtcccggttccggattcccgcggacagagatcaacgaggacaagaagcttctcagagagatccgtggaggagaattctctcaggcggatctgtttgtcggagcttttgtgaatcatcatcatcaatgggtttgttggaagcttttctcaattggcttcgtagcctcttcttcaagcaagaaatggagctttctttgataggacttcaaaatgcaggaaagacatcacttgtaaatgttgttgcaactggtggatacagtgaagacatgattcctacggtcgggtttaacatgaggaaagtaacaaaaggaaatgttacaatcaaactatgggatcttggtggtcaaccaagattccgcagcatgtgggaacgttactgtcgcgctgtttctgccattgtgtatgtagttgatgctgcagatcctgacaacctaagtgtgtcgaaaagtgaactccatgatttgttgagcaagacttcgcttaatggtatccctcttctcgttcttgggaacaagattgacaaacctggagctctgtccaaagaagccttaacagacgaaatgggacttacatcacttacagatagagaagtctgctgtttcatgatatcatgcaagaactctaccaacattgatcaagtcattgattggctcgtaaagcattcaaagtcgaagaactaatcttcaccaagaacatatattctctcttcttgattcttcttagtcttcctgtattgtctagttgatgatgatggtgacaatttttcgtgtgaaacaagagtgtctttatttttcgccttccgtctctccttcttctgctggtctggtcttgtttggtcctccagtcttgtctttgtatattagatgtggattgtttttctattcccaaggctttgcaatttttgaaacacaaaaaaaaaaaaaaagggcggccgctctagaggatccaagcttacgtacgcgtgcatgcgacgtcagg

SEQ ID NO: 85235 - DNA, 1127 bp, Arabidopsis thaliana columbia
  unsure (1)..(1127): unsure at all n locations
atgatcctccagcactaatcgactacnatagggaaagctcggtacgcctgcaggtaccggtccggaattcccgggtcgacccacgcgtccgagcggaacaaggattgagaaaaggaacctttcccttttaataagccgatatagatccttggaggagaatttgtagcagaccgatctctgtctgttgtctctgtttctacgagtctctgtgtttgtcggaaatcgtaaattatgggtttgtgggatgctcttctcaattggcttcgcagcctcttcttcaagcaagaaatggagctttctttgataggacttcaaaatgcaggaaagacatcacttgttaacgttgttgcaaccggtggatacagtgaagacatgatccctacggttggtttcaacatgaggaaagtgacaaaaggaagtgtcacgatcaagctttgggatctcggtggtcaacctaggttccgcagcatgtgggaacgttactgccgttctgtttccgcgattgtgtatgtagttgatgctgctgatcctgataacctcagtgtctcgaagagtgaactccatgatttgttgagcaagacgtcgcttaatggtatccctctcctagtccttgggaacaaaatcgacaagcctggagctttgtccaaagaagccctaaccgatgaaatgggtctcaagtcactgacagatagagaagtctgttgcttcatgatatcttgcaagaactctaccaacatcgatcaagtcattgattggcttgtaaagcactccaaatcatcgaattaaactttaccccaaaaggagagaagtcaactctctgcagttgttgatctttcttgtgtttttggtcatttgatgatgatgatggtgattgtggaagaagacacagcttttttcttttatcctgtgaaaaacaagatttgtctatgttctctgtctgattctttatctgtctttcttctgcgtatgtggctgtgttctctgtatattagatttgattggtgctccctcttcttaaagccatgatgagatcccttaaaaaaaaaaaaaaaaaaaaacaaagggcggccgctctacaggatccaagcttacgtacgcgtgcatgcgacgtcatagtgttctatagt

SEQ ID NO: 85236 - DNA, 512 bp, Arabidopsis thaliana columbia
  unsure (1)..(512): unsure at all n locations
tggnattacagattacaaagatacgaggntcttcatagacgttgtggaccattcactagatcctataacttaacacttgacaaactcaagtcgggagatcggtctgacggtgaagtttctggttgtagatatgtaatatggttganttccaatggtgatcttgggaataggatgctgagtctagcttcagcttttctttatgctctcttaacaaataggttttaacttgtcgaactaggagttgacatggctgaccttttctgcgagccatttccaaacactacttggtttctccccccagagtttccgctcaacagccacttcaacgagcaagtctctttctaacgcaaattcttggcaaccccgatgggtgcataatcgaccatgtagttccgtgattcccagtgaccaacaaaaagctttttctttttgtgaggatagccaagtttttttnggggaaaccccctggttgtcttaaaancgggtagnttttttttcccaactttttttna

SEQ ID NO: 85237 - DNA, 610 bp, Arabidopsis thaliana columbia
aaaaatataatcgagctctggcaaagttaaaccctaattcccaaattggagtcacgaaagcaatctccaaatctatctcattcggttcgaagaagcttcaaaggcgattcctttgctttagctaactagtagtttcgtcatgtcttggtgcacgattgagtcggatcctggtgtatttacagagcttattcaacaaatgcaagtcaaaggagtgcaggttgaagaattgtattccctggattctgattctctcaataacctcagacccgtatacggtctgatctttcttttcaaatggcaagctggggaaaaagatgagcgtccaacgatccaagatcaagtttcgaacttatttttcgcaaatcaggtcattaacaatgcttgtgcaacccaagcgatccttgctatcctcttgaactctccagaggttgacatcgggcctgaactatcagcgctgaaagaattcaccaagaactttccatccgacctcaagggtttggctatcaataacagatattcaatccgggctgcgcacaacagtttcgcaaggcctgagccatttgtcccagaggaacagaaagctgctacaaaagacgatgacgtataccat

SEQ ID NO: 85238 - DNA, 447 bp, Arabidopsis thaliana columbia
tcgaaccccgacaacatcaggagggtaggttctaccggaaatttctgggtcgcctctgtcgtgaacaaggttgttatgcctaccgaccctagggcggtcaaactagacgctaatggaaaagtgctccagaccattttcctcaagaatgagtttgggaatactttgcttagtgaagtcaacgagttcaacggccatctttacatcggaactcttactggacctttcgccggagtcatgaaactttaaattggtatcaactatatggttctttggtgattaccatttttgatatcattttgaaaggtctgtttacagttattttaaccataataatatcccctcaaatgtcctgcttgttacgtgggtgacacaattgttcggtgattccttgaataggctactactacttattgtttcatattttcgaagagattatctctagttctt

SEQ ID NO: 85239 - DNA, 446 bp, Arabidopsis thaliana columbia
ccgagaagccgcgatcgcgtacttaaacgacgctcttttgccacacccttggcttagagctatatgcttagataacgaccgtccgattggctcgatctccgtaacgccagtcgatgagatcagaggagagattggttatgtcctcggaagcaagtattgggggaaagggatcgccactgaagcggtgaggcttgtggcgggggagatattcaaggagaagccagagatgcagaggcttgaggcacttgttgacgttgacaatgttggatctcaaaaggttcttgaaaaagttgggtttgtgaaagaaggtgtgatgaggaaatttatgtatcttaaaggaaatgttagagatatggtcatgtttagtttcttgccttctgattcgttgcactgatctgatttgaattaacaaatatcaaatatatatattaagtttgtttgatgtc

SEQ ID NO: 85240 - DNA, 690 bp, Arabidopsis thaliana columbia
  unsure (1)..(690): unsure at all n locations
atatctatggttttattcaaaatgatataatcagtcagaattttaagtcatgaggtggatgtctccactgttgtatctgtttgtaatgcctgtgatgatataataatacgacttgtgaaaaaaagaagaagatttcgtttctgagtcaagacactacctatatatagaactacagtgtgatttttatgaagaccattgtcagaactgacatgacttgttctacggtagatcttgcacttttagttggtttacatttgtgagatttctgattcttgtacattgttggtgtttcgtctccgaaccagggccgggcttgggcttgagtattctgcatcatcaccagcagatgatatgtttgatgcgacagattcagatattgtgcttganatggagtgtgatggagattgctgtctataggtttgggaagctgataagtctggaacttcctgtgttgtttttccttgcggttcttccgcaagctttcttaggaggttcataaccagttggaagnaacttcgaccgtgatggacagtactccagcaacttcgccatgttgaaattcccncggaattncaaagttgacccctaaggnntttgngggaaaaacgccacggnggaacccaaangnccaaagggttttnaaaagnatcattggntcnttnaaaccaggccatcattanaggnnnccaa

SEQ ID NO: 85241 - DNA, 390 bp, Arabidopsis thaliana columbia
cttgctcgtctgaaagctcttgcaaaatttgcttttggcatgggactaactcaggggttgttatgcacggctgcattcactgcttttgaactcccaccaaatggagccatcggaacaaaaattctggaattcctctttcattcaaggcctgacttggtcaacattagaagcattgatgaggccgttgtcattggcgctgctctatcattgtcatcttcagcttttgttctacagcttcttgcagagaaaggtgagctccctacaagatttggctcagcaaccttgggaattcttcttctacaggatatagctgttgtgccgttactagtcattcttccagtgttggaaagccaggatattggtggggaaagcataaggccaatgcttgca

SEQ ID NO: 85242 - DNA, 891 bp, Arabidopsis thaliana columbia
  unsure (1)..(891): unsure at all n locations
ctctaatactaaaatctaatctcttccttgctcactcaccaatcaaactcaaaaaactcttgaatttttcaagaacaaaagaaaaagacatctttaatggcggccatgaactcgagtgttctcacttgcagctacgcaattnctggctctggctcggtagagcttaaccagaaagttggtttggtgaattcatcagttgggtttggtcagaagaaacagatgattatncctgtnatcaaagctcaacgcgttgttggtgatgatgttgatggatctaatggaagacgatcagccatggttttcttagcagctacactcttctccactngctgcttgtttctgcttctgctaatgctggcggcaattgacggaatacctcgagaggagcaaaacccacaaagaacttaatgataagaagagattggcaacaagtggagcaaactttgcgagagcattcactgttcaattcggaagctgcaagttcccctgagaatttcactggctgccaagatcttgccaagcaaaagaaagttccatttatctcagaagatattgctttggaatgcgaaggcaaggacaagtacaagtgtggttccaatgttttctggaaatggtgaagaactttgtttgttttcatctattcttatataaatccaacaatgtatctatctctctctattcatgaaagttctcgcatccatttgaatctatcaagctaaaactctattgagagattaggatgcattattttgcattaagttcagcctaagataaaaaacctgactgaatacaaaaaaaaaaaaaaaagggcggccgctcnnnnnnnnnnnnnnnnnnnnnnnnnnnnnnnnnnnnnnnnnnnnnnnnnnnnnnnnnnnnnnnnnnnnnnnn

SEQ ID NO: 85243 - DNA, 751 bp, Arabidopsis thaliana columbia
  unsure (1)..(751): unsure at all n locations
acttttgccaataggactgaagggaaatctcaccttatccacactccaaccacaatcccttattacatcttagtccacgtcatcatcatcatcctcattcatctctaatactaaaatctaatctcttccttgctcactcaccaatcaaactcaaaaaactcttgaatttttcaagaacaaaagaaaaagacatctttaatggcggccatgaactcgagtgttctcacttgcagctacgcaattgctggctctggctcggtagagcttaaccagaaagttggtttggtgaattcatcagttgggtttggtcagaagaaacagatgattatgcctgtgatcaaagctcaacgcgttgttggtgatgatgttgatggatctaatggaagacgatcagccatggttttcttagcagctacactcttctccactgctgctgtttctgcttctgctaatgctggcgtcattgacggaatanctcgagaggagcaaaaccaaccaaagaacttaattgataagaagaagattggcaacaagtggggcaaacctttgcgagagnattcantggttcaattcggaagctgcaagttcccngagaatttcactgggtggccaagaattttgccaagcaaaanaaggtccattntcccngaanaaatnnctttgaatgcgaggnaaggcaagncaaggggggccaangttntggnaaggggagactngttgttcacantggggcggattcngngcncantgc

SEQ ID NO: 85244 - DNA, 782 bp, Arabidopsis thaliana columbia
  unsure (1)..(782): unsure at all n locations
nnnnnnnnngtacgcctgcaggtaccggtccggaattcccgggccgacccacgcgcactcaccaatcaaactcaaaaaactcttgaatttttcaagaacaaaagaaaaagacatctttaatggcggccatgaactcgagtgttctcacttgcagctacgcaattgctggctctggctcggtagagcttaaccagaaagttggtttggtgaattcatcagttgggtttggtcagaagaaacagatgattatgcctgtgatcaaagctcaacgcgttgttggtgatgatgttgatggatctaatggaagacgatcagccatggttttcttagcagctacactcttctccactgctgctgtttctgcttctgctaatgctggcgtcattgacgaatacctcgagaggagcaaaaccaacaaagaacttaatgataagaagagattggcaacaagtggagcaaactttgcgagagcattcactgttcaattcggaagctgcaagttccctgagaatttcactggctgccaagatcttgccaagcaaaagaaagttccatttatctcagaagatattgctttggaatgcgaaggcaaggacaagtacaagtgtggttccaatgttttctggaaatggtgaagaactttgtttgttttcatctattcttatataaatccaaccaatgtatctatctctctctattcatgaaagttttcgcaaaaaaaaaaaaaaaaaagggcggccgctctagaggatcccagcttacggacgcgtgcatcgacgtca

SEQ ID NO: 85245 - DNA, 464 bp, Arabidopsis thaliana columbia
gtcgacggtatcgataagcttgatatcgaattcggcacgagttgggatacccatttggcctaatggcctcgattctctttgggcgacaccacaaggcattctctcatcccctaaacccaaactcttcgtaatgggaacacaagacgggttcactagcgttagccagctaaagaagaagctgaaatctgcagtcggacgcactgaaacacacctcattgaaggcgttagtcatttccagatggaaggacctgaatatgattctcaggtgaccgatattatatgtaaatttatttcatccctgtaaaataccacatgaaaagatagaccttaggggattattacatcctcgtcgaactacgttggtgtatgtccggaaattacttggataaatctttactagcacgataggagtttgatgtccctgtacactacgcactaaaagacttgttttcatatgttgagtt

SEQ ID NO: 85246 - DNA, 477 bp, Arabidopsis thaliana columbia
  unsure (1)..(477): unsure at all n locations
gaaacatgcgtgtggatacgaaaganctctagattcctccactcctcaatttctcatcttttgcttcgtcgtgacgcttcttgatttcagcaataatgggttctgttatgagtttgagctgttccaagaggaaagcaacgagtcaggacgttgagtgttcaagcgaatctcgtaaaagacgaaagatatcttcagagaacgatgaagaagagtgttgtagattgattccaagtcttcctgatgagttatctatacagattcttgctaggcttcctagaatttgttactcgaagtgttcggttggtttcctcggaggtggagatccggctgtttcgaccttcttgaggtgtatagtttgaggaaaagaactttgggaggacctgaggcagtggctctattgtgttgcccaaaggtcatgagggtaagctttttgtgggattccttaanaccccngggtctactnaattgncagngntt

SEQ ID NO: 85247 - DNA, 454 bp, Arabidopsis thaliana columbia
aagatctctgtggggtttgatcgaatttaatagcgaaggagagagtgagagagagattgaagcagtaatggcaggaacatctggattgctcaacgcagtatagccaaagatccaaacgattgatattcaggccgccgctggatggggaatcgccgccgcagccggtgccatctgggtcgtccaaccatttggttggataaagaagacattcattgacccacccccaactgaagagaagtgagatatcaccaagattcaagactaagtgaagagttttccagtttctaagtttgttaccgcctctttggcgtggagctgaataaatttttggttcttttcttgggggcttttctggtttcaatttcttcaaatggaaggttgactgatttgtcctttctcaaatgtttttacccaaccaaggaaagcactttctccaaaaaaaaaaaaaaaaaaa

SEQ ID NO: 85248 - DNA, 404 bp, Arabidopsis thaliana columbia
cggacgcgtgggcggacgcgtgggcggacgcgtgggcgctgatccttcacacgcaagctaatgaagcctctcactaatggcgatctggtcaaatccccaactctgatcaagatctccgccttagttttcgtcaccgtcgctttcttctacttaggcaagcattggtccgacgatggctaccaacagctcgtcttcttctcctcttccacctccggtagctcgatcccggaggtctccgtttcaccgaatagtaacagagtctttaatttatcagcgataattcctactaaccatacccagattgaaatccccgccacaatacgacaacaacctccgtcggtggtggcggacacggagaaggttaaggtggaagctaatccttctccttctccaccttcttttct

SEQ ID NO: 85249 - DNA, 1128 bp, Arabidopsis thaliana columbia
atggacattccgtattaccactacgaccatggcggagacagccaatatcttccaccgggtttcaggtttcatcccacggacgaagagctcatcactcattaccttctccgcaaagtcctcgacggttgcttctcaagccgtgccatcgcagaagttgatctcaacaagtgtgagccttggcaacttcccgggagagctaagatgggagagaaagaatggtacttctttagcctccgtgaccggaagtatccgacgggactgagaactaacagagcaactgaggctggttactggaaagctaccggaaaagacagagagatctttagttcaaagacttgtgcacttgttgggatgaagaagactcttgtcttttacaaaggaagagctccgaaaggagagaagagtaattgggttatgcatgaatatcgtcttgaaggcaaattctcttaccatttcatctcaagaagctccaaggatgaatgggtgatctctagggttttccagaaaaccactttagctagcaccggagccgtctccgaaggaggaggaggaggaggagcaactgtgagcgtaagcagcggtactggtccatctaaaaagacgaaagtaccctcaacaatctcaagaaactatcaagaacaaccaagctctccttcctccgtctcactcccacctctcctggatccgaccactaccctcggctacaccgacagcagttgctcctacgacagccgtagcaccaacacaaccgtcacagccagcgcaataaccgagcacgtgtcctgtttctccactgtccctactactactacggccttgggcttagacgttaactcattcagccgtcttccaccgccgctagggtttgactttgacccttttcctcgtttcgtttctagaaacgtctcgactcaatctaacttcagatcgttccaagaaaacttcaatcaatttccttactttggatcgtcttctgcatcgactatgacctccgccgttaatctgccttctttccaaggcggcggaggcgtctccgggatgaattactggctaccggcgactgccgaagagaatgagtcaaaggtcggtgtgcttcatgctggacttgactgtatttggaactactga

SEQ ID NO: 85250 - DNA, 1445 bp, Arabidopsis thaliana columbia
  unsure (1)..(1445): unsure at all n locations
caggtaccgggcccgaattcccgggtttacccacgcggtncgcggacgcgtaaaactaaatcttgccttcctgactttctctctacgacagaatttttgaagcttctctctgcttatcgacacgatggttctcgaggcgactatgatatgtatcgacaactccgagtggatgcgaaacggagattactctccgtctaggttacaggcgcaaacggaagctgttaatcttctttgcggagccaaaacccagtcgaatccggagaatacggtggggattttgacaatggctggcaaaggagttagagtattgactactcctacctctgatcttggcaaaattctggcctgtatgcacggccttgatgtgggaggagagatcaacttaaccgcagctatccagatcgcccagctagctcttaagcatcgccaaaacaagaatcaacgccaaaggattattgtttttgctggaagtccaatcaagtacgagaagaaggccctagagatagttggaaaaaggctgaagaagaatagtgtctctcttgatattgtcaatttcggggaggatgatgatgaggaaaagcctcagaaactcgaggcgctccttacagctgtgaataacaatgacggtagccacattgttcatgttccttctggagccaatgctctctcagatgtgcttctcagcacacctgtattcacgggtgatgagggtgcaagtggctatgtttctgcggcagctgctgcagcggccgcaggtggggacttcgactttggtgtggacccaaatatcgatccagaacttgctcttgcccttcgggtctccatggaggaggagagagcaagacaagaagctgctgccaagaaggcggccgatgaggcaggtcagaaagacaaagatggggacacagcttccgcctcacaggagacagttgctaggacaactgacaagaacgctgaaccaatggatgaggacagtgcgttgctagatcaggcaattgctatgtctgttggtgatgtgaatatgtcagaagcggctgatgaggaccaggatctggctttagctctgcaaatgtcaatgagtggggaagagtcaagtgaagctacaggtgctggaaacaacctcttgggaaatcaagccttcatatcgtctgttctctcatcgcttcctggggtggatccaaatgatccggcagttaaagaactactagcgtctctgccagacgagtcaaagcgtaccgaggaggaagagagtagtagcaaaaaaggcgaggatgagaagaagtgaagaaggatctgagagtctcaataaaaattcctcttgtttctttggtttgatagagattggaactgaatttaactaatctctctgccttgtgaaatttgtttttttctctctctctcgcctttttataatgttgttattgtacgagtcaaggactagcttc

SEQ ID NO: 85251 - DNA, 831 bp, Arabidopsis thaliana columbia
caaaaatggcgattctatcagcgagctctactatagtgagagctgctttagatacgcagccgaagctccgatacaatcccaatgcgccacgcaatgttaagaaaaattctaatttgagttcttttgttccaccgtcgtctccttcttcatcttctccggcgacaaacttaagcgtctccgtttctgatttactcaaacgtcctgcaagcaaagatattggtgatggatttgatgatacttgtgttggatatgagaaatggtttccaagtccaccaaaagtggagaaacctagatctgtcttcaatgctgcctcattagcttatattggcgattcaatctatgagatatatgctcgtaggcattttctttttcctccacttagtattgaagaatataatgaccgtgttagagcagtggtgcgatgtgaagcacaatatgctttgctgcagaagcttgttgatgatgacttcttaacgaaagatgaaagagatatacttcggtggggaaaaaacgtaggctcggttaaaacacggtcaactagacgtgccggtgttgctgtttataacaaggcctcatcattggaaacactaattgggtatttgtatctatcaaacgggaaaagactggaagaaatgatgcagaagctaggattctcaagtggttcttcaacagagagaatggttaaggaagctggctcaaacaaaccatctttcaaataaactttactatattgtagttacagtctgtatcattaaaaatggtgggaatatatatatttttttttaacaaaaaaaaaaaaaaaaaaaaagggcgggcgctctataggatcca

SEQ ID NO: 85252 - DNA, 647 bp, Arabidopsis thaliana columbia
  unsure (1)..(647): unsure at all n locations
cgactcactattgggaaagctggcacgcctgcaggtacctggtcacggaattccacgggtcgacccacgcgtncgacttagtattgaagaatataatgaccgtgttagagcaagtggtgccgatgtgaagcacattatgctttggctgcagaagcttgttgatgatgacttcttaacgaaagatgaaagagatatactttcggtggggaaaaaacgcacgctgcggttatatacacggtcaaactaagacgtggccgagtgttgcctgcttataaccagagcctcatcattcgaaaacactgattgggtatttggatctatcaaacgggaaaagactggaaagaaatgatggcagaggctaggatcctcaggtggttcttcacagaaagaaaggtaaaggagcttgctcaaacaaacatcttaaaaaactttctatttgaagtacaggcggttataaaacgttgaattaagatttttttacaaaaaaaaaaaaaaaggcggcccttaaggacaaggtactacgggctgcaaccctagtttgttggggcctaaataaaaacggcgccgttccaacgggaatggaaccctggttcccaatatagctgaacatcccctttccaagggcttatgaaagcccgcccatgcct

SEQ ID NO: 85253 - DNA, 570 bp, Arabidopsis thaliana columbia
  unsure (1)..(570): unsure at all n locations
nngngaaatangnttcgatgggtggattacacaggtgcatcnccggcggttcttgaaggaagcttaaagatcaatngctccagccgtctgaatngctctggaagagtngcggtggctcaaaggtctagacttgtcgtctgagctcagcagagtgaggagacttctcgccggtccgtgattgggcttgttgctgctggtttagctggtggctcgtttgttcaggctgtcctcgccgatgctatttcgatcaaagttggccctcctccagctccttccggtggcccttcctggggacagataactcagaccaaagcaagagaacttttgcatttggcattgaaaagacaggttttacttacagccattggccaccaacagaagcctgcacgctagagccaaagaatctggcaaaggggtatcataaaatgtgaaagccattggatcgacaggaaagcctttggccatatggtcaaaaacgatctttcgtcccaaggcttcttattttcggtatgatcttaacacaatcatttcctccaaacccaaggatgagaagaagtcactcaaggatct

SEQ ID NO: 85254 - DNA, 665 bp, Arabidopsis thaliana columbia
  unsure (1)..(665): unsure at all n locations
aaaacaaaatggcttcgatgggtggattacacggtgcatctccggcggttcttgaaggaagcttaaagatcaatggctccagccgtctgaatggctctggaagagtggcggtggctcaaaggtctagacttgtcgtcagagctcagcagagtgaggagacttctcgccggtccgtgattgggcttgttgctgctggtttagctggtggctcgtttgttcaggctgtcctcgccgatgctatttcgatcaaagttggccctcctccagctccttccggtggccttcctgggacagataactcagaccaagcaagagactttgcattggcattgaaagacaggttttacttacagccattgccaccaacagaagctgcagctagagccaaagaaatcctgcaaaagggatatccataaattgtgaaggccatttattcgacaggaaaacctttggccataatggtccaaaaccgatccttccgttccaaggggctcctcaacctcccgaaactgaccttaaccccaancactttccccccaaaacccaagggtgngaanaaagcancccaaggggtttnccaccaaangcnttnngaccaaccggnaaannttgggttttcggggggnaaaaaaaaaangnccttccaaggggtgnaaagnaccatt

SEQ ID NO: 85255 - DNA, 731 bp, Arabidopsis thaliana columbia
  unsure (1)..(731): unsure at all n locations
cnangcnnccagntgggngctttncccggcncgggntgggntttgtcctctggtttcctgggggccgtttgtncagggttccnncccngtnnntttcnngcnaaaggttgcccntcctccangtccttccggtgccttccctgggccagttactnaggcccaagccaaggggcttttccattggcattgaaagccaggttttacctaccagccattgccaccaacagaagctgcagctagagccaaagaatctgcaaaggatatcataaatgtgaagccattgatcgacaggaaagcttggccatatgttcaaaacgatcttcgttccaaggcttcttatcttcgttatgatcttaacacaatcatttcctccaaacccaaggatgagaagaagtcactcaaggatctcaccaccaagctcttcgataccatcgacaatctggattatgcggcgaagaagaagagtccttcgcaggctgagaagtactatgctgagacagtctctgctttgaacgaagttcttgccaagcttggttaagcattttaatttctgcatttttcttgtaaattattattcttggtttttgttcttgagtactttagactcaaattcgtgaatctgaatttatgtttcacgaaaaaaaaaagtaatgaaaaaacaaaaaaagcggccgctctagaggatccaagcttacgtacgcgtgcatgcgacgtcataactcttctagagt

SEQ ID NO: 85256 - DNA, 697 bp, Arabidopsis thaliana columbia
caatcatataagcataaccaataatcatcggcttccatttgcgtcttgagaaagaaaaacaaaatggcttcgatgggtggattacacggtgcatctccggcggttcttgaaggaagcttaaagatcaatggctccagccgtctgaatggctctggaagagtggcggtggctcaaaggtctagacttgtcgtcagagctcagcagagtgaggagacttctcgccggtccgtgattgggcttgttgctgctggtttagctggtggctcgtttgttcaggctgtcctcgccgatgctatttcgatcaaagttggccctcctccagctccttccggtggccttcctgggacagataactcagaccaagcaagagactttgcattggcattgaaagacaggttttacttacagccattgccaccaacagaagctgcagctagagccaaagaatctgcaaaggatatcataaatgtgaagccattgatcgacaggaaagctttggccatatgttcaaaacggttttcgttccaagggttttttatctccggtatggccttaacacaatcatttcctccaaacccaagggttggaaggaggcccttaagggtctttccccaaaggttttgggccctttggcaaatttggttttcggggagaagagggccttcaagcttgagcctttcttgaaatttttttttcc

SEQ ID NO: 85257 - DNA, 477 bp, Arabidopsis thaliana columbia
gccggtgcgattttgtttcaacttgttactgggaaaccaccttttgatggaaataatcacatacagctttttcataatattgtgagagacactgagctgaaatttcctgaagatactaggaatgagattcatccagattgtgttgatctgtgcagaagtcttctccgccgaaacccaattgaacgcttgacattccgagagtccttcaatcacatgttccttcgagagccaagacaaattccggatgttgagcattctggttttagtacctgtacggggaaatcactgttgccctccgcacaaccgagtactagtacaaaccgtttttaaatcaagtgcagaggaatgttcacaaacatgggagttcctctagtgcctcaaattctcaaatttcaaatgccacatacctcttttgagaagactagaaaagatactgagggacaatgctcatcaaaccaatctggagttgttgattca

SEQ ID NO: 85258 - DNA, 329 bp, Arabidopsis thaliana columbia
attctccgcctccatctccagtacactacagctctccaccaccgccaccatcagctccatgtgaagaatctcctccaccagcaccggtagttcaccacagtccaccaccgcccatggttcaccacagcccaccacctccagtgatccaccaaagcccaccaccgccatctcctgaatatgaaggaccactaccaccggtcatcggcgtatcatacgcttctcctccaccaccgccgttctattgattcttttggaaaacacgagactgaaacgattgacgtgacacgatacagatcgaaacactatacgacgtcgttgtcaattcttac

SEQ ID NO: 85259 - DNA, 407 bp, Arabidopsis thaliana columbia
gggcaacggagaaatttgttttagggctttttgcttatcatcgtcgtctcagatcctgctaaaaggaaaaatcttttgttctagatttcttcactctcgtcttttgatctcttgggtttttccctgttggtgtcaccatcgttctcgtttcttcgatcgatcgttgagtcaccggcgttaagcccgacttgagttccttagataattttaagattaggttgtaaaaatttgaatttggtgggtttggtttgatgatgttgacccaaactgttggggtttgaagtaatatggaagtggaagattaacaaagaagaagataatgacgctttatattcgccgcgaagcttccaagctatggaggagattttgttcggaaataacaacggagattggtctcctcgctgaga

SEQ ID NO: 85260 - DNA, 567 bp, Arabidopsis thaliana columbia
  unsure (1)..(567): unsure at all n locations
gacaaaataagtgtaatcttactcaagaaaacatatatacttgcatggtacgtcacaacaaggacttgatccatatctaatacacaaaatcgagtaaaaatcattcttcatcaccgcgatttccattgacacgggctcccgaaaccatttcggattcggacattactctctcgtacttaacagaacgagaagggagaatcctaaaccgtccaaaggataaagcttgtgaaagcttgtcatagtcccatctctgctgaacaaacacaatgacagcaagtagaatcgcggtaaacaggtatggcgatatctccaaacttaggagaaggaagtccgaaattcgggtttaccaaaactcatggtccttctccaatgaagtaaggggtcagggacagagccaacgatggtagccttaggcatnncggggaaagtttgacagtntgatncccgaggtaatanagcttccttagtggntgccgggnatcatntgccacttaggctttggcanaacctgggggggcagaagattntggctaaccattncccccngttcagttgcccattgnggtt

SEQ ID NO: 85261 - DNA, 592 bp, Arabidopsis thaliana columbia
  unsure (1)..(592): unsure at all n locations
caatgatcatgaagaatnttgtggcaacgtttctaaagaactataactcaacctcgtnaccgtttttttgggcggcggagaaaaaaggtgttgacgccgttaaagtgaagncgtgtaatccacgcgccggttttcggatgccggctttgctcgcggagtggaggcagccggggcggttgtaagggaatataatcggagttgataccggtggtgtggagaaagtatacgtcagggatgatgttagcggagagatagccgtgggagatttgaggaagtttaacggtgtgttgacggacttgacggaatgtgaggctgagacttggtgggacgctgacgtccttatctcgggctgatggaatccttgacgagagaaaatattggttgggacggttttgtcttaaagttaagaggacggacgaaagattcaacgccaaaaagaagtgtttaaagattaatgagaacgtcgcaacgttttgtaaataatttgtctgtttgcttctctgcgatttttattttaaaattttagttttgattgaataaaaatcagcgtcagattaataaaagtgtttgtgtgtttggtcggttactagtt

SEQ ID NO: 85262 - DNA, 1212 bp, Arabidopsis thaliana columbia
  unsure (1)..(1212): unsure at all n locations
nnnnnnnnnnnnnnnnnnnnnnnnnnnnnnnnnnnnnnnnnnnnnnnnnnnnnnnnnnnnncccagagagacataagaaagaaagagagagagagatactttggtcatttcagggttgtcgtttctctctcttgttcttgagattttgaagagagagagatatgggaagaggtagggttcagctgaagaggatagagaacaagatcaataggcaagttactttctcaaagagaaggtctggtttgctcaagaaagctcatgagatctctgttctctgcgatgctgaggttgctctcatcgtcttctcttccaaaggcaaactcttcgaatattccaccgactcttgcatggagaggatacttgaacgctatgatcgctatttatattcagacaaacaacttgttggccgagacgtttcacaaagtgaaaattgggttctagaacatgctaagctcaaggcaagagttgaggtacttgagaagaacaaaaggaattttatgggggaagatcttgattcgttgagcttgaaggagctccaaagcttggagcatcagctcgatgcagctatcaagagcattaggtcaagaaagaaccaagctatgttcgaatccatatctgcgctccagaagaaggataaagccttgcaagatcacaacaattcgcttctcaaaaagattaaggagagggagaagaaaacgggtcagcaagaaggacaattagtccaatgctccaactcttcttcagttcttctgcctcaatactgcgtaacctcctccagagatggctttgtggagagagttgggggagagaacggtggtgcatcgtcgttgacggaaccaaactctctgcttccggcttggatgttacgtcctaccactacgaacgagtagaactatctcactctttataatataatgataatataattaatgtttaatattttcataacattcagcatttttttggtgacttatactcattattaataccgatatgttttagctagtcatattatatgtatgatggaactccgttgtcgagacgtatgtacgtaagctatcattagattcactgcgtcttaagaacaaagattcatatcttggtaatgatttctcatgaataaaaaaaaaaaaaaaagnnnnnnnnnnnnnnnnnnnnnnnnnnnnnnnnnnnnnnnnnnnnnnnnnnnnnnnnnnnnnnnnnnnnnnnnnn

SEQ ID NO: 85263 - DNA, 723 bp, Arabidopsis thaliana columbia
  unsure (1)..(723): unsure at all n locations
actgctcctcctccagcaaatccaccaccaccagtctcttctcctcctcctgcttctcctccaccagctactcctcctccagtcgcttctcctcctcctcccgttgcttctcctccaccagcaactcctcctcccgtcgctactcctcccccagctcctctagcttcccctcctgctcaagttccagctccagcaccgaccacgaagccagattctccatctccatctccgtcatctagcccacctcttccatcaagcgacgntcctggncctagcaccgattctatctctcctgctcctagccccactgatgtgaacgaccagaaatggagctagcaagatgggtttcgagcttaggtatttggcgttctggttctcggtctgggtttatgaatctaaggtgggaatcttttggtgacttggggttactcgcatttaatttttatggtgggctttggtttgttccactgtattgccttcggccccaattcttttgggggtttattatcttttcgggagggggtactatttgagggcttgagatggggatagcaggatattttgattgcagatacttttgtggcttcatttctcattccatttgattattagtgtantacattccttttctccaaaaaaaacggacgcatggnnnnnnnnnnnnnnnnnnnnnnnnnnnnnnnnnnnnnnnnnnnnnnnnnnnnnnnnnnnnnnnnnnnnngg

SEQ ID NO: 85264 - DNA, 571 bp, Arabidopsis thaliana columbia
  unsure (1)..(571): unsure at all n locations
tccaggtccgaccacgcgtccgattctcactaacagagagaaaaagcaaaagcaaaaatggctcgatctttcgctattgctgtgatctgtatcgtcctcatcgccggcgttactggtcaagctccgacttcaccaccaaccgctacaccagctccaccaactccaacaactcctccaccagcagcaactcctcctcctgtctcagcaccaccaccagtcacaacatctcctcctccagtcaccactgctcctcctccagcaaatccaccaccaccagtctcttctcctcctcctgcttctcctccaccagctactcctcctccagtcgcttctcctcctcctcccgttgcttctcctccaccagcaactcctcctcccgtcgctactcctcccccagctcctctagcttcccctcctgctcaagttccagctccagcaccgaccacgaagccagattctccatctccatcttcgtcatctagcccacctttttcattaagcttggcaaccttttcataagggaggtnttgggcttggacggtttttttttctgttctggcaatgntgnanc

SEQ ID NO: 85265 - DNA, 914 bp, Arabidopsis thaliana columbia
  unsure (1)..(914): unsure at all n locations
ctctctcattctcactaacagagagaaaaagcaaaagcaaaaatggctcgatctttcgctattgctgtgatctgtatcgtcctcatcgccggngttactggtcaagctcccgccccctcctcctgcttctcctccaccagctactcctcctccagtcgcttctcctcctcctcccgttgcttctcctccaccagcaactcctcctcccgtcgctactcctcccccagctcctctagcttcccctcctgctcaagttccagctccagcaccgaccacgaagccagattctccatctccatctccgtcatctagcccacctcttccatcaagcgacgctcctggacctagcaccgattctatctctcctgctcctagccccactgatgtgaacgaccagaatggagctagcaagatggtttcgagcttagtatttggatctgttctcgtctggtttatgatctaagtggaatcttttgtgactgtgttacttgcatttatttttatgtcgtctttgtttgttccactgtattgcttgggactgaattcttttgggatttattatctttcggagaggatactattgagagcttgagatggagatagcaggatattttgattgcagatacttttgtggcttcatttctcattccatttgattattagtgtactacattccttttctccatgccttatttctttcttttgtctaaaaaaaaaaanaaaaaaaaaaanggngggcccctcctagnggnncccaagttttaggtacggggtgnatcnngcggncaaaggccttntatagggnnaccnaaatccaattnactggccgcggttttnaacgcnngnctggggaanccctgggggtncccanctaaaacgctttaagnaaanccccctttgccancttggnaaan

SEQ ID NO: 85266 - DNA, 561 bp, Arabidopsis thaliana columbia
  unsure (1)..(561): unsure at all n locations
gagatttacttttagtcttttagacaagactcctaatgtatattcaaaatgtcatgaactaaagtagataacaaagcccaacgaagtccacaagctaaaaaaaaaaaaaaatatcactagcgaggaaatcagactaggcaacgctcattttctgccggttgctccaactcttggcttggccttaacctcgctttcctgtggcaggtgcaagaaaatgctgctttttgcagtcgccgggttgtgattttctgcacctttgctccagtcatagcaagccgcatatgcatatatcgatccatcgtggttgaacgagctgcatggaattggctgattgcacctcgaaatggccttgagtctttggtttacaaanctttggncccagaaattgnaagcnccatctgacccagcagttgcnaaagngccatgtaccnggggggnaattccagngngttgncagaatatatancatttccaccccgggggattgaatggaagttttgnccngtgggacncccagtgnnaaccaaccgccccattgccaccaaaactgngtaggggggg

SEQ ID NO: 85267 - DNA, 535 bp, Arabidopsis thaliana columbia
  unsure (1)..(535): unsure at all n locations
cttctgcttaccggaaaagtctatatctccgacggaccttcttctctctagttaatcagacctcgcgctcgtgataatggcaacttttggtgcgcctgctaccgccaacagtaaccctaacaaatcctacgaggttactccatcaccggcagattctatttcgagcttaagttttagtccaagagctgatatacttgtggccacttcatgggacaatcaggtgaggtgttgggaaatatcccgtagtggagcctctctagccagtgctcctaaagcatcaatatcacatgatcagccggttttatgttctgcttggaaagatgatggaaccacagtctttagcgggtggatgtgataagcaagcaaaaatgtggcccttgttgtctggtggtcaacctgtaactgttgctatgcatggggggtcctatcgcagctatggtttggttcccggggataanntcccnttnnaactggangttggggtaaaacttttnaanttttgggcanaggcngnaaancttttnatcccacgggc

SEQ ID NO: 85268 - DNA, 457 bp, Arabidopsis thaliana columbia
  unsure (1)..(457): unsure at all n locations
gaagagttctgtgcggctgcggtcagtgtttaccaactggaggctcttgaagaatgggaacagattgcaacttcagcatttgagcactttgaacatgaaggaaaccgaatcatatctgtccgtgatctcgcccgggagatgagcgtggggccgagtgcatatcctctgctcaaggattggatccgaagttcggatggaaagctgagtttcttggggtacgctaagttcttgcatggtgtgaccgtacgaagctcaagctcgagacctaggtgacacaccatgatgtaaaaagtcttctaacatgtgaattgagtttcaaggaaacatcctaaaacaatgttcgtccgtcagagaccttgggattcaaagatttaaaaaaaaaaacttgaaatggaattgaagtcaggtaggtntttcctttgtaaatnatnctttgancattttgttttcgaaacaa

SEQ ID NO: 85269 - DNA, 424 bp, Arabidopsis thaliana columbia
acgcgtccaagaaaacacaaagtagcttctccaagacgcggttcccaatatctgcgtttcccgtttgcgttttccggcaatggctctccaagccactactactacgttctgcttctccggtccaactttccgatcaactcctcactcactcacttcaaaacgtcctatctccatcaaagctactacttcttctccttcaagactctccaattcacgatctaatctcaaaggaagagcattgtctagtgatggttcaacacaagaatctccttatgtagtctgttttggagaaatgctaatcgattttgtaccgacgacaagcggactttcattagccgatgcaccggcttttaaaaaagctccaggtggtgcacctgctaatgtagctgttggtattgctcgtcttggtggttcttcagctttc

SEQ ID NO: 85270 - DNA, 527 bp, Arabidopsis thaliana columbia
gtggaattacaattacagcaatttgtattcaattgttgaatctaagcctggcttcatctctttggcctggaacgatttacctctcctcactctttcttcctggcgataaccaaaccaaaccgatccggtattcttagttttgttttgttttcaatgttatttttggttagacaaatattcaattgttaatatactccgtggtcagagtgttttgtttttcttttagttcgaacgttgaattaattcaggggtaggttttgaattctctgaaccttatgtgttttttggtaacatcatttggatttgtgaactaggtttaaaaactggtcttagtcttgttgttttctcattagataatttaaactggtttgcttctttatttttggttgggataaagtgaccggttctggtcatctgtttgagatgtaattactatttcataaaattaggaagttgaaagccaaatatatttgtaactactcttttatttgtaattttgctcaaaaaagtgatgaaatgtagttttg

SEQ ID NO: 85271 - DNA, 446 bp, Arabidopsis thaliana columbia
  unsure (1)..(446): unsure at all n locations
aaaagaagctcaaataatcaatgatatcgtctctgcagatatatgaatctgtacagaaangatcagccagagaaattcaactacaaaaagctcaaaagcctttttttttttaatttacacgggtaaagtattacacaacaaggtattctgcgttcgctggtcacgaaatcaaaatcgaaataatgaatcaattgaaattgtaaccccttgatcctctttgctggtaaaggtccagtcctctctttgcctcctgcaacaaagcttctaagctctccagctgcgttacccatgactgcttcgaagcccattccaacactgccagaacctcgtccttggccagctgttcgctgtctgggacattgagtgctatgtaacagaggagctctaatgccggaatctgtacgccaccctctccaaagtaggccaactgaaccagatgtttgccc

SEQ ID NO: 85272 - DNA, 383 bp, Arabidopsis thaliana columbia
tctctttctttcaattccactgcaatggcgaaaacagagaagagagtccgagaaggactcggatcttcttcgtatttcctcggctgtttcggattctcccggaaaatatactccgacaagccgatggttacgaagggagacggtggtgagaagaagaagatgaagaagaagcgaatccctcggtggtttttgtgtcccatgttccgcctgaagaacagcgagatctaaccgtcgccgatcgaggaaacagagaaacctacttcgagagtagaagatgaaactgatgataagcagaaacccctctccgtgatacgtcgtataactgatcgtaaaaatattccggttgatgataaagccatgaatcaggaaacaaaagagacaaa

SEQ ID NO: 85273 - DNA, 962 bp, Arabidopsis thaliana columbia
  unsure (1)..(962): unsure at all n locations
nnnnnnnnnnnnnnnnnnnnnnnnnnnnnnnnnnnnnnnnnnnnnnnnnnnnnnnnnnnnnnnnnnnnnccacgcgtccgcggacgcgtgggctgcgagaagacgacagaagggggaggatttttcagtaaatggatagcctgacacgagaaagctgacctcactcgctacttgggttgattgtgtaaatatatgaaagtatcgtcgttgagaaattgggactctgatctgttgcagaaagccgaaagctttggtctttggagctctaacctctgcctctgaacacacacagaatctcccatggctgcatttgcaacggcagaagcgtgtgacagcaacgcagaactaatatcaaatggagacttacgcgctcttcacccaatcttcaagatctatggccaaagaagatgcttctcaggaccaatcgtgactcccaaggtctttgaagacaatgtcctcgtcagaaaccaactagaaacgaaaggagaaggcggagtcttagttatagacggtggtggaagcatgagatgcgcgcttgttggaggaaacctcggacagttagctcagaacaacgggtggtcggggattgttgtgaatggatgcgttagagatgtggatgagatcaatgactgcgatgttggggtcagggcattgggatctaacccgttgaaatctactaagaaaggtcatggtgagaagaatgtgccggttcatattggaggaactttgattagagatggagagtggctatatgctgatagtgatggtatcttgatctccaggaccgaactctctgtttgagtcagaacgtttccgtgatagtgctaagagactacagcttcttggagcaaggtggtttattcgaattcttaagaatctgtttaatactccaaataatcatttttattacaatatacttacgttttatgaaattacaaaataaaagtctatttagttcaccc

SEQ ID NO: 85274 - DNA, 677 bp, Arabidopsis thaliana columbia
cacgccccccctcggcttcgacggtatcgataagcttgatatcgaattcgcggccgccgaagttgatacaagttcggtcaatggcatgtgaggcttcaaagtttgtggctaagcatggaacttcctactacagacagctgttggagaagaacaagcagtatatccaggaacctgccactgttgagaagtgccaagagttgtctaagcagttgctctacacccgtctccgctagcattgccggacgctatgaaaccttctggaaggaagtagactacgcaaagaacctatggaagaacagatccggtctgaaggtagaagatgcaggaatcgctgcattgtttggtctcgaatgctttgcatggtattgcgcaggtgaaatcgccggcagaggattcaccttcacaggctattacccatgaaggagagtaacaataacttgaagattgtgtaatcccctccgtttttagttttcatgattctctcttgaatcaattttttttccagtttatccctgaaacggaggctttgaagctgagaaaaatccattttgctataactctttgataaaggttgctctcaataagaacaaaatttcccaggaaaaaaaaaaaaaaaaaaaaaagggcggccgctatagaggatccaagcttacgtacgcgtgcatgggtcgtcatag

SEQ ID NO: 85275 - DNA, 639 bp, Arabidopsis thaliana columbia
  unsure (1)..(639): unsure at all n locations
anagaggtttgttnaaatggcccaagttgtccagatcaccggcgtctggggcttcaaagtttgtggctaagcatggaacttcctacttcagacagctgttggagaagaaccaagcagtatatccaggaacctgcccactgtttgagaagtgccaagagtttgtcttaaggcagttgcttctaccacccgctcttgcttagcattccccggacgcttatgaaaccttctggaaggaagtagactacgcaaaggaacctatggaagaaccagatccggtctgaaggtagaagatgcaggaatcgctgcattgtttggtctcgaatgctttgcatggtattgcgcaggtgaaatcgccgggcagagggttcaccttcacaggctattaccccatgaaggagagtaaccataacttggagattgtggaatcccctccggtttttagttttcctggttcccccctggcatcaatttttttcccagtttatcccctgaaacggaggctttgaagctgggaaaaatccattttgcgataaccctttgataaagggggcccccaataagacaaataggccgggatccncgggggggngccttttggggaaacccnnntttgggggantcgaaaacntttgnngcttg

SEQ ID NO: 85276 - DNA, 763 bp, Arabidopsis thaliana columbia
gctggtacgcctcaggtaccggtccggaattcccgggtcgacccacgcgtccgcggacgcgtgggcgaaatctcgaatcgactcatctctcagctcaccggtgctgcattatcaaaactgcaggaaggatttggttgtgaagatggcatcgaagttgatacaagttcaatcaaaggcatgtgaggcttcaaagtttgtggctaagcatggaacttcctactacagacagctgttggagaagaacaagcagtatatccaggaacctgccactgttgagaagtgccaagagttgtctaagcagttgctctacacccgtcttgctagcattcccggacgctatgaaaccttctggaaggaagtagactacgcaaagaacctatggaagaacagatccggtctgaaggtagaagatgcaggaatcgctgcattgtttggtctcgaatgctttgcatggtattgcgcaggtgaaatcgccggcagaggattcaccttcacaggctattacccatgaaggagagtaccaataacttgaagattgtgtaatcccccccgtttttagttttcatgatcccctcttgaatcaattttttttccagtttatccctgaaacggaggctttgaagctgagaaaaacccattttgctataactctttgataaaggttgctctaaaaagaccccatttcccaggaaaaaaaaaaaaaaaaaagagggggccctttaaggaatcaattttctcccgggcgtggaaggattattttttt

SEQ ID NO: 85277 - DNA, 498 bp, Arabidopsis thaliana columbia
  unsure (1)..(498): unsure at all n locations
cactaggaaagaggagactttattactcacggtcttcgtttcaatctagtaagcgtttaagcaggttcacaatgttacgtagaagtaaatacatcactcgcgtgggaactaactgacacatagaccagtcaggccgtagagacattcggtctggtttagtttgattaaccggtttggaatcagcatacatatcttaagctttcccggatttgctaaaggaaacaagttgtttctctctgtgcttctgaacaagtgcttccagattcttcgccttctcgtctccatctttgaaatgtactcttcttccatgtcccggtattagccaattgaaatccaggttgatcaatttttctacgttctcgagctggagaggcactgaaccgtgattgtactgctcaaaatgctcatccagatcggcataatannggcgcaggaanaangcctgaggnctatggacagcaacgacctcgatgncaganggaaagcgcacccaaganc

SEQ ID NO: 85278 - DNA, 778 bp, Arabidopsis thaliana columbia
catgagtgcaggttggtatcgaagatgtgagagcagaagtaatgccagctggtaaagctgacgttatacgttcgctgcaaaaggacggaagcacagtagccatggtaggagacggaatcaatgactctcccgctctagccgctgcagatgtgggaatggcaattggtgcaggaacagatgtagcaatagaagcagcagattacgttctgatgagaaacaacttagaagccgttataacagccatcgatctccccccgaaaaaccttaacacgaatccgattaaattacgtcttcgcaatggcgtacaatgtagtgtcaatcccgatagcagcaggagtgtttttcccggttctgcgggtgcaattaccgccttgggcagccggagcatgtatggcactctcttcggttagtgttgtttgctcttctttgcctcctagaagatacaagaagccaagacttaccactgttttgaaaatcaccacggagtaaaaagtcctttgttttcttacattggagtgactcgactacttttgttctgaaaataatttgtatttacttttcttttgtgctgttgttgttgtaatcatgtaacaacgatattggtcttggagaggtttctttttttctgtaagaaatgtgtcctctcggcctttgttgtaaaaaaatggtttcgatgctttgtgctcgattattaatgtaaaatggtgccgcgaatttcttcaagcccggggatcccactaagattaagaccgcccccccccccgtgagctccgcgttg

SEQ ID NO: 85279 - DNA, 1333 bp, Arabidopsis thaliana columbia
  unsure (1)..(1333): unsure at all n locations
nnnnnnnnnnnnnnnnnnnnnnnnnnnnnnnnnnnnnnnnnnnnnnnnnnnnnnnnnnnnnnnnnnnnnnnnnnnnnnnnnnnccacgcgtccgaatcaatcaaatcaaagcatccatttttgattcagacttcagagagacagagaaggaagaagaagaagaagaagaagaagaaaaaactatggagaatgagagggaaaagcaggtttacttggctaagctctccgagcaaaccgaaagatacgatgaaatggtggaggcgatgaagaaagttgctcagcttgatgtggagctaactgtggaagagaggaatcttgtatctgtagggtacaagaatgtgattggtgcaaggagagcatcatggagaatactatcttccattgagcagaaggaagagtccaagggaaatgatgaaaatgtcaagaggcttaagaattatcgtaagagagttgaagatgagcttgctaaagtttgtaatgacatcttgtctgtcattgataagcatctcattccatcgtctaacgctgtggagtcaactgtctttttctacaaaatgaaaggagattactatcgctatcttgcggagttcagttctggtgctgaacgcaaggaagctgcagatcagtctcttgaagcatataaggctgctgttgctgctgcagagaatggtttggcacccacacatccagttagacttggcttggcgttgaacttttcagttttctactatgagatcttgaactctcccgaaagcgcatgccaattggctaagcaagcattcgatgatgcaattgctgaacttgacagcctcaacgaggaatcatacaaagacagcactcttattatgcagctacttagagacaatctcaccttgtggacttcagaccttaatgaggaaggagatgagagaaccaaaggtgctgatgagcctcaagatgagaactaaatcctctgtgagaagagaaacgactcttgctgcatcctgaatcttgaagtgaagacagtaagtgtcgttgtttgttactcgaatgtgtaatttttaatctatgtctttcttgatggtgttttccagattcttgaacttttcacaacacaacactgcgttgcgtatcttcaaccctcttatgatgtggttgaattctgttttacgcttagtttgcttcttttgttgttgaattgagccagcaggcatgatttgggtttttgtttatcagaatattaggcgtaaaaaaannnnnnnnnnnnnnnnnnnnnnnnnnnnnnnnnnnnnnnnnnnnnnnnnnnnnnnnnnnnnnnnnnnnnnnnnnnnnnnnnnnnnnnnnnnnnnnnnnn

SEQ ID NO: 85280 - DNA, 1033 bp, Arabidopsis thaliana columbia
  unsure (1)..(1033): unsure at all n locations
atgannnnnnnnnnnnnnnnnnnnnnnnnnnnnnnnnnnnnnnnnnnnnnnnnnnnnnnnnnnnnnnntctctctctctctctaaacccattaaagtaatttagctcctcatagattctcgagaagaacacttccatggcgactaaagtatatatcgtgtactactctatgtatggtcatgttgagaaattggctgaagaaataaggaaaggagctgcttctgttgaaggtgttgaagctaaactatggcaggtaccagagacgcttcacgaagaggcactctctaagatgagcgcaccaccaaagagtgaatccccaatcataaccccgaatgagctagctgaagctgatgggtttgtctttggtttcccaacaagatttggtatgatggctgctcagttcaaagcctttttggatgcaaccggtggactctggagggctcaggcactcgccggtaaaccagctggtatcttctacagcactggctctcaaggtggtggccaagaaaccacagcattgacggcaataactcagctggttcaccacgggatgttatttgtcccaatcggttacacatttggcgcgggaatgttcgaaatggagaatgtgaaaggtggaagcccatatggagctggaacatttgcaggagacggttcaaggcagccaacagagctggagctacagcaagcatttcaccaaggccagtacattgccagcatcaccaagaagctcaagggatctactgcttagagcttaaaaagattatggtatcaataagaaaaaaagaaaaaaacagtttggttctgcttttttttatattctttctctttgaatttgggggcttttgtgatttttcgggtttaattatcttaaaatacatgatattatttcacagcaataattcttatcttggttttacgtaaaaaaaaaaaaaaaggnnnnnnnnnnnnnnnnnnnnnnnnnnnnnnnnnnnnnnnnnnnnnnnnnnnnnnnnnnnnnnnnnnnnnnnnnnnnnnnnnnnnnnnnnnnnnnn

SEQ ID NO: 85281 - DNA, 602 bp, Arabidopsis thaliana columbia
  unsure (1)..(602): unsure at all n locations
cagcgatgaaagcgagaagatgattgtgaaccatagtctcaacatactcgaatctcgattacctccctggtaaaatccttgctgcagagtcagctaggcagaagaagctgagtgaaacattagctaacgcattgagttcaaatggaagaatcattaatctccaagggagagagaggattcctgtcgagtttttacctggtaggagagctgaacaaaccgatgtcaaagcggaaatcccaaaagctgaaccgatcaagaggaagactcatggtcaagagtcgaaagaagagaagaaagagcggaaaaatgctgtaaaagccgaaaagcgagaagcaaggataattaagaaacagacaaagatgctgtattgcggtgaaacgcagcgtgctcaaagagcttgttgcttacctctggtccatcgtcgagacctcttaaataatatgttccttaggtaaaccaaaccaattcttcagcctgtttaaaaccagtttttccagccatttcgtggaatatttgcctggttgtttttttctttttcaccaaggtttgaaactcttgaaccttgttttggttgggcctttttttttttttttnctttcctt

SEQ ID NO: 85282 - DNA, 482 bp, Arabidopsis thaliana columbia
ctttgtttatcttagggtttgtagataaaggaagaagatcgttgtggcaaagaaggaaatcgatggctccgacggcgacgctggacaacaatgaggagctccggcgactcagggaggttaatattgacgaagctccggggcgtcgtcgtgttcgtgattccttgaaagatattcagcttaatctcgatcatatcctcttcaagacaccagaaaatgggattaagacaaaggagtcttttgaggtgaattcgagaggagttgagattttctctaaaagctggcttcctgaagcttctaagcctagagctttggtttgtttctgccatggttatggagatacttgcacatttttcttcgaaggaattgcaaggagattggcattgtctggatatggagttttcgctatggattatccgggattcggcttatcagagggcttgcatggttatatccctagctttgatctccttgttcaagatgtt

SEQ ID NO: 85283 - DNA, 422 bp, Arabidopsis thaliana columbia
  unsure (1)..(422): unsure at all n locations
caataattgaaaaaaactaactatttaaggaacaatgttacacgtcagaattcgctggctcaaagtagactttcaaaattttaacataagttttgngttcccacaattatgttttaaacccttatagtttcttatatttacaggttaaccccattattacataacagagcaaccattgggattctcgtcgctgaacattccaggagcgttcacgtttggctgcgcgtacggcacgtaactctcacttgcgttgtggtatcctgaacctggataactctgacctcccactgggataatcctgacctgtcatcgaataactcggaccgtacacggggcccttctggccaatgcataggggccgtgggataagctagtaccataattatccatcttattcaacatcgccacccgagccggcacaa

SEQ ID NO: 85284 - DNA, 933 bp, Arabidopsis thaliana columbia
ctctctttgtgtttattttactgatcctattagaagataaaacggtcttcttcttcttcttcttcttcttcttcttgtaagaaccagtcatgggaagatctccagcttcttcttgtctccgtctcatctcttgctccggcggtgatgatacctccgccgatcctaactccaccgccctcgagaacaagagctctggggataagcgtggatggagtttcaggaagaaatctgggaaacagcgagggttgattactagtgtagtttctgaaactactcctgcttctaggactagagagactcttgaatctgctctccttaaatctccgtctcctgataataacaatgtttctgaaaaacagcagcagtctttctctgttgatgaaaagaagagtcagttacctgttgttacctatgtggctgagcctgtggatgagaaaaaaacacagtctgttattgaggagaagacggagttgttgtcagtggaggaacagattgaccatagaactgaggtgtcgcctgttattgtggaatcaaaagggactgaaactgaggaagatgatttgattggaactgaattgcaaggaccaagtgctgctgatgccgccaagatagaggaagatgttacttccgaggttgaaatggctagtaaggttgagccggaagaatctgaatccgatgatgtgattatagttagaaaagaaagtgatgaaaaagttgatgagaagctggatgagtctgttatcgttgtcatccaagctgctgttcgtggttttttggcgcgaagagaacttttaaggagcaagaaagttattaaactccaagctgcagttcgtggccacctggttaggagtcaggccatgggatcactgcgttgtgtccaagctattgtcaagatgcaggcgatggttcgtgctcgtcattccacaaaagatg

SEQ ID NO: 85285 - DNA, 565 bp, Arabidopsis thaliana columbia
  unsure (1)..(565): unsure at all n locations
ccgatcatcaaattagttatcttcagctcaaattggatttggtttggtattacacccacaccagaccaaattgaaccaacacacaaaggctttacatgcagaggcagtagaagcatttaagccaaaatagcataaagagacagaaagtcaccatcacaaaacaactaagattgtgtccccatgtatacaaaaaagaaagggactctgctcataaccaaaatagaagacaaactgtaatatatcattcacttcctgcatctccaagctgataccgagtatagaggtcgatcttgccagcaaattactgcgcacccgctctcttccttgattctatacccatcaaaaccgcacccttgaagcaatctcctaggctgcaacatcgcataatagctaagngggacattccaaaaccagncaaatcgntcctctggtccatttntaagnttnttggggctttttcttctntaaatcccngnagggtatgatgtcttgantcctcccgaagggatttttcactttgtncatttgngggtttgncttttgttccaggataaaaatgtggngg

SEQ ID NO: 85286 - DNA, 512 bp, Arabidopsis thaliana columbia
  unsure (1)..(512): unsure at all n locations
aatggtttttttttttttnccttttctacagaacagaaacattctacatacaaagaagccgagtcaagatttacatccacaatagatgttaaaaatgtacctgagttggttttatattttnccccaatttcttggtgaagccaaaattagatttgattttttaccactctcttattggatatcctatgaggacccttcacattcagtttccttgacgaggtgtggtctttnctcttcatcatctctgtctctgtgaaaagaagggttcttcccgctgctgctgctagggctattcggatcatatttagaagaggctaagaagttgagtgccaatactacatcaggtaccactggtctcatggtaggctgctcttgaacgcacattgctgatattgctagtgcttggtacagtcctctaactgggtattgtccctgaagcaatggatcaaccatttttgggaagttcctcctgtctttgaacaatggtcgtgcccatccaaccaaattctcgg

SEQ ID NO: 85287 - DNA, 363 bp, Arabidopsis thaliana columbia
  unsure (1)..(363): unsure at all n locations
catggctacaacagaaacaatcatacaaggagcaattctggtgttaaccttggttatgttctgggcgattaagtatctctctcaacgaggcctaaccaaattccgaaccaaacaccgagccacactccaaacccagcgtcagctaatccaagcctcacgtctcctagctcgagcccgaaccacacccaagaaatctcaatctcaatctctcgccaaaacggcgctcaccgaagctgataatgtgatcgcgatttctccagatgatgccgccggtcacatcgtccgtgccctagctctagatctgctcggtcaccatacttctgctctcaaatcgttcgatatggcgntgacttatccgcgttt

SEQ ID NO: 85288 - DNA, 507 bp, Arabidopsis thaliana columbia
  unsure (1)..(507): unsure at all n locations
ctcaaattgtcataacatttttaaaagcataattgaacacactttaaatctgagggaaacgaaagcgttcgaggtcataatgtaaataatggggaatagcaggatacaaagtgaaattcttagaagttattctaaaaggaaacaaagccacgacctagtccggtccatcgcgattcatcacgtgccgtttacggaactaggttgagcttttaaagcttcattaaaggcccactgggctttctctttcaagcccttgaactcataacactctcccaacagccgggaacaatctcgccggtatctgtaccggcgggcgagcctcaccggcctcttccagatcctcgaccggccgaatcaatcctccgtngccgattcaaagccagtttaattaaggtttttttaaaagggatggggnnnnttcccaaccgnaagggntttaacggggaaaatcnncccaattnaannttttnnnccaaaatttggtcccggaaatttanatngggncgg

SEQ ID NO: 85289 - DNA, 242 bp, Arabidopsis thaliana columbia
aaagaacacaaagagatgatgaaagcaaaacaactactcgtggttggccttttgtggtctctactccttttaatcattcacacaacagagtccatatcagactatgaggtgaagtcaaacgttaacgtagaagctttaaccgtagaggagcaaaagcaatcaaacagaggaagacgcagcagtggtagcagtcgtaatcgcggacgcagaagctgcgatcctctgtatcaatacttgttcgc

SEQ ID NO: 85290 - DNA, 665 bp, Arabidopsis thaliana columbia
ggctgaaaaagtaaagtctggtcaagtttttaacctattatgcatattctcgatctttttcttcctctttgtgttatcagtgaatgtttcggctgatgtcgattctgagagagcggtgccatctgaagataaaacgacgactgtttggctaactaaaatcaaacggtccggtaaaaattattgggctaaagttagagagactttggatcgtggacagtcccacttctttcctccgaacacatattttaccggaaagaatgatgcgccgatgggagccggtgaaaatatgaaagaggcggcgacgaggagctttgagcatagcaaagcgacggtggaggaagctgctagatcagcggcagaagtggtgagtgatacggcggaagctgtgaaagaaaaggtgaagaggagcgtttccggtggagtgacgcagccgtcggagggatctgaggagctataaatacgcagttgttctaagcttatgggttttaattatttaaataattagtgtgtgtttgagatccaaatgacacagttttgggggagtatatctccacatcatatgttgtttgcatcacatggtttctctgtatacaacgaccagatccacatcactcattctcgtccttctttttgtcatgaatacagaataatattttagattctac

SEQ ID NO: 85291 - DNA, 474 bp, Arabidopsis thaliana columbia
cggacgcgtgggttcatctctctcccctctctccctctatagctctctctcccttttcgacttgagagtttgggtcctttgggagaaagaagaagaagaagaaaaagattggattttgttcactttaacatcttcaatctctaaacccacctgagttttctccatttctctgtttggtttcttgtcagttttcaagaaagcgtccaaatcctagatcctctgttttctcttctctgtttgctttcattttctctggattcggatctgaccactaaagagaggtttatcgtttcagacaacaaaactcaaagatcgaatctatcttttgtccttagagtctggaaaaagcagctctcttttgatctcctctttagattcttcaaagctttagatgcttatctctctttctctctcagattccatttgaataaatgccattttgacagatcaaatatctcccacttttctctctct

SEQ ID NO: 85292 - DNA, 1752 bp, Arabidopsis thaliana columbia
  unsure (1)..(1752): unsure at all n locations
atgatactccagcgnnnnnnnnnnnnnnnnnnnnnnnnnnnnnnnnnnnnnnnnnnnnnnnnnnnnnnnnnnnnngggtcgaccacgcgtccgcccacgcgtccgcccacgcgtccgcttcctctttaacatcccccccctccccagcgttctgatcaaaactccagtgaaagttcaaagtacacagagagaaacaaaaaaagaagaagaagaagttgaagaagaagaagccatgaatgctttagcagcaacaaacagaaacttcaagttagctgctaggcttcttggtctggattctaagctcgagaaaagtcttctcatccccttccgagaaatcaaggtggaatgtaccataccgaaagacgatggtacactagcatcattcgttgggttcagagttcaacacgacaatgcaagaggtcccatgaaaggtggaatcagatatcatcctgaggttgatccggatgaagtgaacgcattggctcagctcatgacatggaaaacagcagtggctaagattccttacggaggagctaaaggagggattggttgtgatcctagcaagctcagtatctccgagctcgagcggttgactcgagttttcactcagaagattcatgatctcattgggattcatactgatgttccagctccagatatgggcactggtcctcagacaatggcttggattcttgatgaatactctaagtttcatggatactcgcctgcagttgtgactggaaaacccattgatcttggtggatcgctagggagagacgcggctactggaagaggagtgatgtttggtaccgaagctttgcttaacgagcacggaaagaccatatcagggcagcgttttgtcatccagggatttggtaatgtgggttcttgggcggcaaagctgataagtgaaaagggtgggaagattgttgccgtgagtgacattaccggagcaatcaagaacaaggatggtatcgatatcccggccttgctcaagcatactaaagaacacagaggtgtcaaagggtttgatggtgcagatccgatcgatccaaactccatactggttgaggattgtgatatcctcgtccctgcagcacttggtggtgtcatcaacagggagaatgcgaatgagattaaagcaaagttcatcatagaagcagctaatcatccaactgatccggacgcggatgagatcctaagtaagaaaggtgtggttattctcccggacatatatgcaaactctggaggagtcactgtaagttacttcgaatgggttcagaacattcaaggctttatgtgggaggaagagaaggtgaacgatgagctaaagacttacatgactcgctctttcaaggacttgaaagagatgtgcaaaactcactcttgcgatctccggatgggagctttcacactcggtgttaatcgtgtggctcaagctaccattctcagaggctggggagcttaaagattatctaatctcttatgcaatctctttagcagctcctgaataagaattgagccaaactttaatctactttttgttttatcctcctactttggcttagaggtcatcctgagttaacagatatgtgtttacaagtactagaagacgcttctgtatgtaataaaaccttggactctaatagttaatgagcttttttactctagggggatcccctaggtctaaaacggccgcccccccggttgagcttcagcctttgttccccttagttaaggttaattcgagct

SEQ ID NO: 85293 - DNA, 437 bp, Arabidopsis thaliana columbia
ctaatgtctttacatgtcaagggacctgtttgtcaaacttgtggcgacataggttgggaagaagcacttgtcttttgtgactcttgtatgtttgagtctattcaccggtgagttcaattctcgatttcccctgtgcgtcgatcaaattgtgcctattaggtttctcctgtggtttgattgaattatgcatatacctatttctcttgttcttcagctattgcttagggataacaccgattccttttacggaatacataacttggatttgtgaggattgtgataacagtgagagtgattctgattgcaatgaagttgatcagactgttaagaagaagatgaagagtagaaatcaaccccttgtggttttagctgaggacaatgtgctccaggaacctttggaggggtctaagagagaagaaagctcatgtagcagaaaa

SEQ ID NO: 85294 - DNA, 617 bp, Arabidopsis thaliana columbia
  unsure (1)..(617): unsure at all n locations
gactcctcaagcaaatcactcctcacaccacagaaaaacaaataattgaagaaatgaagtcaatagtcttcttcttcctcctcctgctctttgccgtagcaacctccgataacgtgataaatggttggtataatctcacagccgtccatgacgatgaagtgatttggagttcttttgcggcgccaatgatgaaaggtggttcgtcgtacataacctatccggtcttgcgacctcagcaggcatgtaatccttgtagtggagccgttaaatataccaataagaagaattgtcttgcctacaccagatgcaaacgcggtcttaacggcatgtaacatactcccttatatattctctatgtttcaggtttgtgtcgttctaagcgtttggggaataaacttgcttgtaaccaaaattgtaccgggtggcttgtttgttgcccaaattattcgggggggttggttnnttaataattttcnttttaaaggcagcggggnatttttnctttaaaaccctanggggttncnntaaaaaaaaaaaaanggggggccnccnttngggncccagntttggnccggggnnatnggcggaataggcnnnttttnggccccaattaattc

SEQ ID NO: 85295 - DNA, 1468 bp, Arabidopsis thaliana columbia
  unsure (1)..(1468): unsure at all n locations
cccacgcgtccgcggacgcgtgggctctctatctcactctttgcttctgcaactcacagtcaatggcggctgaaatggcgttagtgaaacccatctccaagttctcttccccaaagctctcaaacccgagcaaattcctctccggccgacgtttctccaccgtgatcagaatgtcagcctcttcctcaccgcctcctccaaccaccgccacctcgaagtccaagaagggaacgaagaaagagattcaagagtcgcttcttactccgaggttctacacgacggacttcgaggaaatggaacagcttttcaacacggagatcaacaagaaccttaacgaagcagagttcgaggctctgcttcaagagttcaagaccgattacaaccagacacatttcgtgaggaacaaggagtttaaagaagctgcagacaaattgcaaggacctctccgacagatcttcgttgagttccttgagcggtcttgtactgctgagttctctggtttccttctctacaaggagcttggtcgaagatctaagaaaacaaaccctgttgtggctgagatcttctctcttatgtctagagatgaagcaagacatgccgggttcttgaacaagggattgtctgatttcaacttggctcttgatttgggtttcctgacaaaggcaaggaaatacactttcttcaagccaaaattcatcttctacgcgacttacttatccgagaaaatcgggtactggagatacatcacaatctacagacacctcaaggaaaaccctgagttccaatgttacccaatcttcaagtactttgagaactggtgtcaagacgagaaccgtcatggtgatttcttctctgctttgatgaaagctcagcctcagttcctcaatgactggcaagccaagctctggtctcgcttcttctgcctctcggtttatgtgacaatgtacctcaatgactgccaaagaactaatttctacgagggtatcgggttaaacacaaaggagttcgatatgcatgtcatcatcgagacaaaccgaaccacggcaagaatattccctgcggtgctggatgttgagaaccctgagttcaagaggaaactggatagaatggttgtgagctatgagaagctgctggctataggagaaacagatgatgcttccttcatcaagaccctcaagaggattcctttggttacttctttagcctctgagatcttggctgcttatctcatgcctcctgttgagtctggctctgttgatttcgccgagtttgagcctaatcttgtctattagtagctgcaatgtcaagtcttgagtttacggctggttcttgatttcttgtaattgaatgatcgaaactgagaaacatcgtctttttttttttcgcaataaacttttactgcatatatttgatcnnnnnnnnnnnnnnnnnnnnnnnnnnnnnnnnnnnnnnnnnnnnnnnnnnnnnt

SEQ ID NO: 85296 - DNA, 580 bp, Arabidopsis thaliana columbia
  unsure (1)..(580): unsure at all n locations
gagattttgtctttaaaaaaaaaaaatacaaagacagaataatctctgtctcttcctttttatcttagaagataagtatgtctagttgggattataagttgtttagcagatcttacgatttctcattatctgttttaattactgtgtgaataaaaagagatttagatttttggtcggtctttgtttgggatcatggagttagttgcttgaggattaggattaattaattagctgattagtctaatgcaaactctgttttactatctcttgcagctcctactactcctcttcctgggctctcatgctatgtgggtgcaaattttacgacccaccaactttacttgtcaattgccggtggaggatgtgacaaatgaagggttatgcccgctttcccaacaaagatctccggagcctatctgcgaatcctccctgcaactggtcggcctcttattgtcaatcntgggcaaccncccccgnagggggaaccttanaattaagggccgggngggaaactaancgtnacttggtccccccntcccccccaantgggganaaaaggcggctgngggnggaaatcntt

SEQ ID NO: 85297 - DNA, 586 bp, Arabidopsis thaliana columbia
  unsure (1)..(586): unsure at all n locations
catcaaaaccatttcatccgtagtggtcaatggcggcttctccgttggtggttcagaaaacagaggaggagtggcgtgcggttctttctccggagcagtttcgtattcttcgtcaaaaaggcactgaaaagccaggaactggagaatatgacaagtttttcgaggaaggaatcttcgattgcgtaggatgcaagactcctctttataaatcaaccacgaagttcgattccggatgtggctggccagctttctttgaaggactccctggtgccataaaccgaacccctgatccagatgggagaagaactgagatcacttgtgctgcgtgcgatggacatttaggcccatgttttcaaaggaggagggttacggtaatccaaccgatgaacgccattgcgttaacagtgtttcgatcaagttttaacccggcaaaatcttccccctaataatcctgagggtatgtttgatccgatcatacaacatcttcnaaaccagattgnggtggtnaaaattggccaccatggagnggatatgccncttccgggggggggcaatttaatgccncaaatnataggccccctttggt

SEQ ID NO: 85298 - DNA, 501 bp, Arabidopsis thaliana columbia
acccacgcgtccgaacataaccacttttcaaacattggaactatctaagtattgaacacatagatggccaaagtgttgacactacttgttcttcgactactcatgaacctcttacttatcggttggatttctctctggatcatcaaacccacgaccatatggatacaatcttggcgtcaagctgaagataccgccagacacactttcttcggctattacggtctcaactttgccgtattttcattccctcctattgctctctctatcgttggactcatttacttgagtttactgccacaacatcatcatccaacaagaggagggaggggtgcagctattactgtctcaagaccagccattatcaatagcttcattggaattgcgtcctgtttcgagatacttgctcttcttttgttcctactctttcttgcttggaacttctatgcccgtgtctctaacgacttcaagaagctgatgcctgtcaaaaccatgaatcttaac

SEQ ID NO: 85299 - DNA, 739 bp, Arabidopsis thaliana columbia
  unsure (1)..(739): unsure at all n locations
atgattcgccggcactaatacgactcattaagggaaagctggtacgcctgcaggtaccggtccggaattcccgtgtcgacccacgcgtccgcggacgcgtggggaaagttttaacccaaaaaagcaaaaaaaaaaaaacttttgttcactcgatggcggcgaagagaatcggagccggtaaatctggcggcggagatccaaacatattagcgaggatttcaaactccgagatcgtgtcccaaggaagacgcgcagcaggagatgccgtcgaagtatcgaagaaactgctccggagcaccggaaaagcagcgtggatcgctgggacaacttttctcatacttgttgttccattgatcatcgagatggatcgagaggcacaaatcaacgaaattgagcttcaacaggccagtctcctcggagctccaccatctccaatgcaaaggggattgtaagaatcccttattatggattagggtcctctgttttacgagtttttttggttatatgttgttgtttgaatttgaacttcgtataagagtggtttaactcccatcgttggattcataaagttcaggctttgttgttttatatattatcttgagattgatttggcaatcaataattctggtttctcggatttnnnnnnnnnnnnnnnnnnnnnnnnnnnnnnnnnnnnnnnnnnnnnnnnnnnnnnnnnnnnnnnnnnnnnnnnnnnnnnnnnnnnnnnnnnnnnnnnnnn

SEQ ID NO: 85300 - DNA, 846 bp, Arabidopsis thaliana columbia
accggaattcccggggcgccccacgcgtccgcagagagcctttacccaggacagcaaaaaaaaaaaaacttttgttcactcgatggcggcgaagagaatcggagccggtaaatctggcggcggagatccaaacatattagcgaggatttcaaactccgagatcgtgtcccaaggaagacgcgcagcaggagatgccgtcgaagtatcgaagaaactgctccggagccaccggaaaagcagcgtggatcgctgggacaacttttctcatacttgttgttccattgatcatcgagatggatcgagaggcacaaatcaacgaaattgagcttcaacaggccagtctcctcggagctccaccatctccaatgcacaggggattggaagaatcccttattatggattagggccctctgggttacgagtgcttttggtatatgttgttgctcgaatttgaatttcgtataacagcggataattcacatgttggattcatatagaccggccccgttgtttatatcgtcatccgggaccgaaaacaaaaaaaacaggggggccgttttgttaagaacccaaccttacctcccccgtgcatgccagggtaatagcttctctgatcgtggccacctaaaattcaatttcactggcgcgggcggtttttcaaaccgacctggggctgggaaaaacccccctgtcagtttaccccccactttagatggcaactttgtgcatacctccatttcccccccctttctccccgcccaccctttcggtctcgtctacactcccgctgcaaagagagagcgcctctgctggactcgataatcctcccctcccttttctcccccc

SEQ ID NO: 85301 - DNA, 423 bp, Arabidopsis thaliana columbia
cccaagcgtccgcacactctctttacttcgtcgctttttttttctttagactttccggtgatcggagccaaatcaaggaaacattcaccggccaaatggacgaatcttggcgtatgaagatgggtttaagcgttgatccattcttctccattgctcgtaaatcaatggatgctcgtatcgacgcggaagacttcgctgatgttttcggcggtccgccgcgaagcgttctcacccgaaaattttccggcgacttctctcgttccgactgtttctacgacgagatttttcagcctccgggaactttctcctccggcggctctcttgcgtcttcgaaatctcacggaagaaacttaccggcattcagaattccgtccggcggggaaggattttacgacggcgtgtttggtggtcgcggcggttctg

SEQ ID NO: 85302 - DNA, 1923 bp, Arabidopsis thaliana columbia
cttcttccttcttcctcttttattataagaagagaaagaaaaaaacatcatcttttttggcgcgccccgcagagcgattgctcttatctcagttgattggccatggcttcttcagtcgtcttcgcgccaactgggtctctctccgttcctccattgaagtctcggagattctatgttaattcttcactcgactccgatgtttccgacatgagtgttaacgctccaaaggggttatttcctccagagcctgtaccatacaagggacctaagctgaaagtagccattataggagctggacttgcaggcatgtcgactgctgtagagcttctggatcagggtcacgaggtggatatatatgattcgaggacattcattggtgccaaagtgggttcttttgtagatagacgtgggaaccatattgaaatgggattacatgttttcttcggatgctacaacaatctcttccgtttgatgaaaaaggtgggtgctgagaaaaaccttctagtcaaagaccatactcatacatttataaacaaagacggcacaattggagagcttgattttcggtttcctgttggagctccaatccatggtattcgcgcatttttggtcacaagtcaactcaagccctatgacaaactaaggaattcactggctcttgcattaagccctgttgttaaagctcttgtcgaccccgatggagcaatgagagacattcgcaaccttgacagcataagtttctcggattggttcctgtcaaaaggtgggacacgggcaagtatccagagaatgtgggatcctgttgcttatgctctaggtttcatagactgcgataacatgagtgcgcgatgcatgcttaccatattctcattattcgctaccaaaacagaagcttctctgttgcgtatgctcaagggctctcctgatgtttacttgagtggtcctatcaaacaatatatcacagatagaggtggcagaatccatctaaggtggggttgcagggagatactttatgataaatcagcagatggagaaacttatgtcactggactagcaatttctaaggctacgaacaagaagattgtgaaagctgatgtatatgttgcagcatgtgatgtgccgggaatcaaaaggttacttccaaaagaatggagggaatctcggtttttcaacgatatatatgaactcgagggagtacctgtggttacaggacagctcagatacaatggttgggtcacggagttacaagacattgaacttgctaggcagttgaaacgagcggttggcttagataatcttctctacactcctgatgctgatttctcgtgctttgcggatcttgcactagcttcgcctgcagattattacatcgaaggacaaggcactttacttcagtgcgttctaacaccaggagatccgtatatgcgaatgccaaatgataagatcatagagaaagtagcgatgcaggtcactgagttgtttccatcgccacgaggcctagaagtcacttgttcgtcggttgtaaaaatcgctcagtctctgtaccgtgaagcacccggaaaagatccattcagacccgatcagaagacgcccataaagaatttcttcctcgccggttcatacacaaagcaggattacatagatagtatggaaggagcaacattatcagggagacaagcttcgtcatacatctgtgatgctggtgaagaactagcagagctaaacaagaagctttcttcttctgcaactgcagttcctgatgagctaagtctggtctaatgatgaaaaatgtttgaaagtagttaccaatggctaattgatgaaggatttgagacactatgggtacatgaagaagaagcatatgtagaaaccctttatatagtgttcataagaggaagtatttgtaatattacaccatcctcc

SEQ ID NO: 85303 - DNA, 555 bp, Arabidopsis thaliana columbia
ccccaatgtcaaaacctttgtccgtgcacatgacgttgatcatggtctcaatcttgaaaaagccggcgctcccgctgttgttcctgagacgctgggaccaagtcttcagttagcagctgctgttcttgcacaggccaaattaccttcatcgggaatggcaaccaacgatcaacgagttcagatctcgtcacttgtctgaacttgctgagctatgtgaggcaagtggaagctctctaggttacgggttctcaaggaagtacgagcaaacccaaaaccaccatcaccatctgaaacatctgacgataaccagattattgaaggcacactcgcttatctaacccttttttctcgcttctgggtaagaccacacaaatttcaacttctttttgcttaaaacttggtacaggaacccaaaatcctttatttttgaaggatctttagcgggggaaaaaggtaacaaactctcaaaattttgatgggatgatgatgtgttgaaatttctctagtttctttcctctgggggaaaaacaaaggcaaataatatttgtattcaac

SEQ ID NO: 85304 - DNA, 545 bp, Arabidopsis thaliana columbia
  unsure (1)..(545): unsure at all n locations
nnnnnnnnnnnnnnnnnnnnnnnactgacacaaaagggaatgcgcttcatgcgggtcatcctcttaatctcaaactctctaggactacactaaatctaactttttgcagagagcaaaagattcaataattgagattgatctcaaaaccaaagctctcgtgctcttgtcgttgatgttggttgtgtagactttgtatacaatgatgaaaagtttggcgaatgctgttggagcgaagacggcgagggcttgcgacagctgcgtgaagagacgtgcacggtggtactgcgcggccgacgatgcttttctttgccagtcttgcgacagtttggtccattcagcaaaccctcttgctcgccgccacgagagagtccgtttgaagacggctagcccggcggtcgtaaagcatagcaaccactcatcagcttctcctccacatgaggtcgccacgtggcatcacgggtttactcgtaaagctcgaacgccacgtggctctggtaagaaaaacaattcgtcgatatttcatgacttggttcctgatattagta

SEQ ID NO: 85305 - DNA, 462 bp, Arabidopsis thaliana columbia
  unsure (1)..(462): unsure at all n locations
ctaacgcataaatatgtcagaggagctgcaactacaaaaattgaatcgtctttcttagttatttagggttctttagagaagcaagaaggagaaggagaagatgggattacagttggagagtttgatggagacgataaagtcaaaggtgagtttgctaaggaagaagaagaaaacttacatcaaaatggacaaaagctccagcgtcagagtcgccatccgtcgtaagaagactagagatctcatcgataagaccttaaaggtcgctgatcgtcctggcaaacgaactcttttctaataatacttcttcttcttcttttttttctctcatattttgccatcattttttggttgttcttccgttccagtggatttggtgtttttggattcaggggtccatgtttgtgataatatggataggttctgggaataaataaaaggaaaaccatttttgggnaaanaaaa

SEQ ID NO: 85306 - DNA, 724 bp, Arabidopsis thaliana columbia
  unsure (1)..(724): unsure at all n locations
acccacgcgtccgaaaggattagatgaactcttcaaagtagcacagttacttgcagatggtgtaatcccaaatgagtatggcatcaatccgcaacaaaagcttaaaatcggttcaaagattgctcggcgcttaatggggaaaatcttgatagacttgaggaatactcgagaagaagcactgagcgttgccgagttgaaagaaagccaagaacaagtcttgtcattatccgcctcgcaaagggaagatagaaataccccgccgccgctatttatcaatagcgatgaattgagacgacctggcacaggtgataaagatgaagatgatgataaagaaaccaaataccgattagatccaaagtatgcaaatgtgaagacacctgaacgtcatgtgaggactcgactttactttcactatctgaatcgcatattcattcgctcatgaacgtccttcgatactgtaaccttgatgaatctctcctaggagaagaaagcctcatttgccaaaacgccttataacgtatctgtaaaaccaaggaactcgattacatgagttacattgtcctaaggctctttgagaacaccgaggtatcacttgaagacccgaaaagattccgcattgaacttacatttagccgnggagctgatttggctcccttaaggaataatgaccaccaggcagagacattgcttagggaacacacactttcgataatgggaccagaga

SEQ ID NO: 85307 - DNA, 774 bp, Arabidopsis thaliana columbia
  unsure (1)..(774): unsure at all n locations
acggacgcgtgggtggcgcattcatgagatgatccagcacgccaacttgagtagactagccgatcctaactcgacggctgtatcagttgatccattcatgcaaatcggagttcttaacttctcggaagttagatttagagtatccatggcgatgtcccccagtcaaaggccgaggggagtgcttggattttggtcatccctgatgactgctcttgggaatacagaaaacatgccagtacgcataagtgagagatttcatgagaacatatccatgcgccaaagtactatgatcaataatgctattaggaacgtaaagaaagacctccttggccagcctcttcagttgctctcaggtgttgatattcttggcaatgcaagcagcgcgcttggacatatgagtcaaggcatagctgcattatcaatggataaaaaattcatccaaagtcgacagagacaggaaaacaaaggtgttgaggactttggcgatattatcagagaaggaggtggagctctagcgaaaggcctgtttagaggagtcacaggcatattgacaaagcctctcgaaggtgcaaagtcttctggtgtcgaaggctttgtctctggggtttgggaaagggaatcattggtgctcntgcccagcctntnagcggagtcttgatcttcttncaaaagnccctnaaggtcaaattcccntgngggttnaanngnnnttccctcaccccagntgncaacttttttccggngnttcnaaggngggtnggcttnaggtttttg

SEQ ID NO: 85308 - DNA, 858 bp, Arabidopsis thaliana columbia
  unsure (1)..(858): unsure at all n locations
agcagatctggaagcagctccngcngtagttgcnattctctttnctgnngannggtacaaaagaccgaattaacggtaagcaagaggttatgatcggttattcggattcagggaaagatgctggacggttatccgctgcttggcagttatacaaagctcaagaagagcttgtgaaggtggcgaaagagtacggtgtgaagctaacaatgtttcacggtcgtggtggcacggtcggaagaggaggtggaccaacccatcttgctatattgtctcagcctccggatactattaacggttccctccgtgtcacagttcaaggtgaagtcatcgagcaatcgtttggtgaagagcacttatgctttagaacacttcagcgtttcacagctgctacactcgagcacggtatgcgtcctccaatttcgcctaaaccagaatggcgcgctttgctggatgaaatggcggttgttgcaaccgaggagtatcgctcagttgtgttccaagaacctcggtttgtcgagtacttccgcctcgctacaccggaactggagtatggacgtatgaatatcggaagcagaccttcgaagcgtaaaccaagcggtggcattgaatctctccgtgcaattccatggatcttcgcttggactcaaacaagattccatcttcctgtatggcttggattcggatcagcaattagacatgtgatcgaaaaagacgtcaggaacctccatatgctccaagatatgtaccaacactggcctttctttagagtcaccattgatctaatcgaaatggtgttcgctaaaggagatcctggtattgctgctttgnacgataagcttcttgttttcaanaggaact

SEQ ID NO: 85309 - DNA, 788 bp, Arabidopsis thaliana columbia
ctggtacgcctgcaggtaccggtccggaattcccgggtcgacccacgcgtccgatctaatcgaaatggtgttcgctaaaggagatcctgggattgctgctttgtacgataagcttcttgtttcagaggaactctggccttttggtgagaaactcagagctaacttcgaagaaaccaagaaactcatcctccagaccgctggacacaaagatcttcttgaaggtgatccttacttgaaacagagactgagacttcgtgattcttacattacaactctcaatgtctgtcaagcttacacattgaagagaatccgtgatccgagttaccatgtgactctgcgaccacacatttctaaggagatagcggaatcgagcaaaccagcaaaagaactcatcgagcttaacccgactagcgaatacgcgccaggacttgaagatacactcatcttgacgatgaagggtattgctgctggtctacaaaacaccggttaagctacaaagagatggttaaacaaactttgaatctctctttctctctcaagtctctcctttttttaactacagatttggaaaataaggttggattctggtttattttatgtatccaccgtcaaaatgttgattttcgtgtacgagtacttcgagatcattgaacacatgctctgtttttttctcaagtttaataaaacagaacaagagaatcttttcttgtttattttcctaaaaaaaaaaaaagcggccccgaattcgatatccagcttatcgattccctcgaccacaagggggggcc

SEQ ID NO: 85310 - DNA, 457 bp, Arabidopsis thaliana columbia
agaagatgtttcgaaagcttcatggaaagttcctcttagagactgtgtggacattagtgaaaatagacaacagaaaccctcttctttaactgaccgtctatcttcatatccaacaagtctaagagaaaaaggcatcagcgaagacgaatttacattggacacaaacttctggagagaacaagtgaatcagtactgggagttgatgaatgttaataagactgaagtgcgaaatgtgatggacacaaatgcattcattggtggatttgccgcagccatgaactcatatcccctttgggtcatgaacgttgtacctgctacaatgaacgataccttatccggaatttaccagaggggcttaaccggtgcttatcatgattggtgtgagccattctcaacatatccccgtacttacgatctgctacacgcggaccatctcttcactcactataaaatctac

SEQ ID NO: 85311 - DNA, 568 bp, Arabidopsis thaliana columbia
aacgactcatttatagggaaagacggtacgcctgcaggtaccggtccggaattcccgggtcgacccacgcgtccggaagagtctaaagagacggagagtgagagaagagagaaacatttcgagacaaatggccgccgccgctgctcgtcctctcgtcaccatccaaaccttggatggtgacatgtccaccgatcaatcctccaccgtcgtacttcccgacgtcatgacggcgccagttcgaccagacatcgttaacttcgttcacgcccaaatctccaacaacagccgtcagccatacgccgtatcgaagaaggccggtcaccagacctccgccgagtcctggggaaccggacgtgccgtgtctcgtatccctcgtgttcccggtggtggtactcaccgtgctggtcaagctgcgttcggtaacatgtgtcgtggtggtcgtatgttcgctccaaccaagatctggcgccgctggcaccgtcgtgtcaatgtcaacatgaagcgtcacgcaatcgtctcagctatcgctgcaactgctgttcctgcgcttgtgatggctcgtggtcac

SEQ ID NO: 85312 - DNA, 659 bp, Arabidopsis thaliana columbia
  unsure (1)..(659): unsure at all n locations
agctcacnnnnnnnnnnnnnnnnnnnnnnnnnnnnnnnnnnnnnnnnnnnnngcgtccgcccttcgtttacagcacaaaatcgaaaatggttgcctcagccgccgcacgacctcttgtcaccgtccaaggacttgacggtgacatgagcaccgatcaatccaccaccgtcactttaccagacgtcatgactgctccagttcgacctgacattgtcaacttcgtccacgcccaaatctccaacaacagccgtcagccttacgcagtctccaaaaaggccggtcaccaaacctccgccgagtcctggggaaccggaagagccgtgtcacgtatccctcgtgttcctggtggtggaactcaccgtgccggtcaagcagcgttcggaaacatgtgtcgtggtggtcgtatgtttgctccgactaagatctggagacgctggcaccgtcgtgtcaatgtcaacatgaagaggcacgcgattgtttctgcaatcgctgctactgctgttccagctcttgtgatggctcgtggtcacaagatcgagaatgttcctgagatgcctcttgttgttagcgactcagctgaagctgtggagaagacatcagctgcgatcaaggtattgaagcagatcggtgcttacgacgatgcggagaaagctaagaac

SEQ ID NO: 85313 - DNA, 1237 bp, Arabidopsis thaliana columbia
gctcttcccatggcttcttcactgaagaagcttatctcaagctttctacttgtcttatactccaccaccatcattgttgcttcatcagaatctcgatgtaggcgttttaaatcgatcatcagctttggtgattccatcgcagacaccggaaattatctccatctctctgatgtcaatcaccttcctcaatccgcctttcttccttatggcgaaagcttcttccatcctccctccggtcgtgcctctaatggccgtctcatcatcgacttcattgccgaattcttgggactaccatacgtaccgccttactttggatcccaaaacgttagcttcgaacaagggatcaattttgcggtgtatggagcaaccgcattggaccgagcgtttcttttgggaaaaggaattgaatctgatttcaccaatgttagtttaagtgttcagcttgacaccttcaagcagattttgcctaacttatgcgcctcgtctactcgtgattgcaaagagatgcttggagactcgctgatactcatgggagagattggaggaaacgactataattacccattttttgaaggaaaaagtatcaatgaaatcaaagagcttgttcctctaatcgtcaaagctatttcttctgctattgtggatttgattgatttagggggcaaaacatttttggtacccggaggcttcccaacaggatgttctgcggcgtatcttactctatttcagaccgtggcagaaaaagaccaggaccctttaacaggttgttacccattgctcaacgaatttggcgagcaccacaacgaacagctaaagacagaactcaagcgactccaaaaattctatcctcatgtcaacatcatttacgctgactaccacaactccttataccggttttatcaagaaccagctaaatacgggtttaagaacaaacctttagctgcttgctgtggagtcggaggtaaatacaacttcactattggtaaggagtgtggatacgaaggagttaactattgtcaaaatccttctgagtatgtgaactgggatggttatcatttaaccgaagccgcctaccagaagatgactgagggtatactcaacggtccctatgcaactcctgctttcgactggtcctgccttggctctggtacagtggatacataaagggtattctttcagcagtaagaattcattcgttgtaaaaaatcaaagaggaagaaaattatgtgatgatgat

SEQ ID NO: 85314 - DNA, 509 bp, Arabidopsis thaliana columbia
cacgcgtccgcccacgcgtccgcccacgcgtccgcggacgcgtgggtttccgtgaatgttgtgattagcttattattatcttcgttgcccaaaaacttaaaagatccaaacttcgaacaattttggtgtctgctatacagaatccaaatccaccttctccgattaaaaatcccttctctttcgatcatggatgtgtctaaagttgtcagcttttcccggaatttcgccgtcttggtcaaagtcgaaggccctgatccaaagggattgaagatgaggaagcatgcttttcatcaataccattctggcaatgcaacactttcagcttctgggatcttgcttccaagagatatttttttgagtggtgaggtcgctgctaaggttctgtttgaagctggtcaggacatggccctggttttgaccgttgcatctgttgttgagccattcttaacattaggtcacagaactagtagtagtatctctcaggatccggtgaagcttattccgggtgc

SEQ ID NO: 85315 - DNA, 490 bp, Arabidopsis thaliana columbia
  unsure (1)..(490): unsure at all n locations
gaggatggttgcatgttgagtcaagtgactgcaacggcaaaagttgcaaggaagtgtctcaatctgaaagggagaaaacgaccaagcatgagagaagtgtcgatggagcttgatagtatccgtatgccttgtggagatatgcaactgcaagaatgtgttagcgaaaacgaggaaggggaaggacaaaacaaaggacttgtggaagatatcatgagggcagaatcaaggagcaaagagtttgttaccgctccagcttctcactacaataatattgctgctgcctcatcttcttcgtggtcagatgtttgaaccattgttccctctttcaaacacggtaaaacttcatcttcggacacgaccgtttaatatctggtctttgctttttatattggttttcggtgttttgcaagtgtctgtaataaggantcttgtttgtatccatttccaaacaaaaaagnaaacacgnaaataattttatagtttggttaaa

SEQ ID NO: 85316 - DNA, 477 bp, Arabidopsis thaliana columbia
  unsure (1)..(477): unsure at all n locations
aagaaaagaaaaaaaaaccctcctacggtatatttnacgaccattatcctcataatgggtctactgtcacttgaagacaccataaaagagaagctaaaggaccgcaaaaacgctcacttcatgttggttgacggaatgtctaagctactgacggaaaaagttaagacttgtcagtcattggatttccaagtttctggtgtcaaatggaggttggttatacgcttatctaggggaagaaaagaccatctatcttttgtcctggagatcacagatgaaaagtgtaccgggtctacttgggacgtcaaattcaactttaaaatcgggatagtccctcagaatggacccaggttatttgctctcgttttgggtggggcatcaaacgggaaaaaaacgtgtcaaaggggtagccactttcatntcacacacggnttttagggggggttttttttnancgccaaanggggttnttttccgngt

SEQ ID NO: 85317 - DNA, 469 bp, Arabidopsis thaliana columbia
ttttttaagagagcatgccaaatccaaaagtaaaccactattgatccagctagattgaacagtggataccggtcccactaggggtcaccaggcgtgttctaacttgtttcaaacccacggttaatgattttgaggagaatcttccttcatcaagtcctttacctcattgattatctttggtcccatgtcttctctttaaccaaccaaacatgccttatcaataggacaaaaggggttgtaggtttttcaccaatggttattcaaaccctttgatgagtttaagctttgcttcagcaacttgaggtaatcaatggcttcgtctagtagtaaaagagcttcttttccctttgcccctggaactacactctccaggattctcagagcggtgtgaatcttgtcttttcttgactgctcgtcgctcaaaccagaacccgtttcttgtttgcttgaaatgtttgattcaggaagg

SEQ ID NO: 85318 - DNA, 561 bp, Arabidopsis thaliana columbia
atctctctacttctcggtcgtcttcttcgtctccactctagggttttactctatcttcttcttcatcatcatcttctacaccaatctctagcgttaatctgtttctgctggagaagatttacgcttgttcctcggttctcttacttctgctccggttcgatcgcttgctaagtgtttcgagttggttcgcacttcggtgggcgatatcatgactgtgaggaacggtggtttcccaggagattataatcgtaacagttttgactctcccggcggctgtgatgatagccccaatgcttccaaggatgatgaaacttttggtgtcccgagaatagttttacccttgtctgacttgtcatcatcagaaaggagaaagtggattcatacgcttcgtcaggagctggaacaactacggtcctttcagaagagtgttggggaccttcttcctatatctaagattgttactagtacacctgcaagtaatgtgtctcgccccaagagttttggaatgtcacgatgctctactggccctggaaaaagggtgctccccttcacagcaaccaa

SEQ ID NO: 85319 - DNA, 299 bp, Arabidopsis thaliana columbia
  unsure (1)..(299): unsure at all n locations
tttttacacaccaatatattatttggatgtaggagctctaaacacaaatccagttcatatgtacaaacaatcctctatggtctctactcatctcaattcaaaaccaaaaaaaaacaaacaaacaggaaatgcataagaacaagttcaaagaatagctcataatcatgaaacgcgttgaaagcttacgcggatttgataaattttggtcgccccttgcgctggggatctttgaaactnggnggtacnccatgnncaggggnccgggggtttnacccccaaaantccccttttcgggggnt

SEQ ID NO: 85320 - DNA, 570 bp, Arabidopsis thaliana columbia
  unsure (1)..(570): unsure at all n locations
cactgatccttctctcatcctcagaaagaatggctcaaaccatgctgcttacttcaggcgtcaccgccggccattttttgaggaacaagagccctttggctcagcccaaagttcaccatctcttcctctctggaaactctccggttgcactaccatctaggagacaatcattcgttcctctcgctctcttcaaacccaaaaccaaagctgctcctaaaaaggttgagaagccgaagagcaaggttgaggatggcatctttggaacgtctggtgggattggtttcacaaaggcggatgagctatttcgttggtcgtggttgctatgatccggtttcgctgcatcgtttgctttggtgaggcggttganggggaaaaggggtatttagctcagcttgaatntggnggacaggggtacccgtttncggagccagagccattgcttctctttcttaaacttggtccactcttttgggggccattggcgctttgtggcgcanaggaaaattnntggcggcctccaccggggttngnaaaccgnattctncggaaaaagccactttcctgggttaa

SEQ ID NO: 85321 - DNA, 1121 bp, Arabidopsis thaliana columbia
  unsure (1)..(1121): unsure at all n locations
nnnnnnnnnnnnnnnnnnnnnnnnnnnnnnnnnnnnnnnnnnnnnnnnnnnnnnnnnnnnnnnntcgcgatctagaactagtcctgatccttctctcatcctcagaaagaatggctcaaaccatgctgcttacttcaggcgtcaccgccggccattttttgaggaacaagagccctttggctcagcccaaagttcaccatctcttcctctctggaaactctccggttgcactaccatctaggagacaatcattcgttcctctcgctctcttcaaacccaaaaccaaagctgctcctaaaaaggttgagaagccgaagagcaaggttgaggatggcatctttggaacgtctggtgggattggtttcacaaaggcgaatgagctattcgttggtcgtgttgctatgatcggtttcgctgcatcgttgcttggtgaggcgttgacgggaaaagggatattagctcagctgaatctggagacagggataccgatttacgaagcagagccattgcttctcttcttcatcttgttcactctgttgggagccattggagctctcggagacagaggaaaattcgtcgacgatcctcccaccgggctcgagaaagccgtcattcctcccggcaaaaacgtccgatctgccctcggtctcaaagaacaaggtccattgtttgggttcacgaaggcgaacgagttattcgtaggaagattggcacagttgggaatagcattttcactgataggagagattattaccgggaaaggagcattagctcaactcaacattgagaccggtataccaattcaagatatcgaaccacttgtcctcttaaacgttgctttcttcttcttcgctgccattaatcctggtaatggaaaattcatcaccgatgatggtgaagaaagctaaattatcatgtacttaaatttagtagagagtgtgtgaccttctcttcatgttgagacaaaaggaaatggacagcttaaattgttgtaatacttatatccttttgtttttaacttggaattttctgattatatatagttttattacacctaagtgactaggtgattgataaaaannnnnnnnnnnnnnnnnnnnnnnnnnnnnnnnnnnnnnnnn

SEQ ID NO: 85322 - DNA, 1832 bp, Arabidopsis thaliana columbia
  unsure (1)..(1832): unsure at all n locations
atgatctgccnnnnnnnnnnnnnnnnnnnnnnnnnnnnnnnnnnnnnnnnnnnnnnnnnnnnnnnnnnnnnnnnnnnnnnnccacgcgtccgcggacgcgtgggcttgtcttcatcttcatctaataaagttaacaacactctcatcaatttttattatgttcaaatctgtctgacttttcgttcttttctcttacacccaagcgttttaacaatctaacatctgtctctttgaatacttagatatccaacttcaatttctctcctttctcttcccaactttgattcctgatttgggtctttgttaaagttcaagaaagttcttttttctttttttttcctcctttaatggacgaagtttctcctgcagtcgctgttccattcagaccattcactgaccctcacgccggacttagaggctattgcaacggtgaatctagggttactttaccggaaagttcttgttctggcgacggagctatgaaagattcttcctttgagatcaatacaagacaagattcattgacatcatcatcatctgctatggcaggtgtggatatctccgccggagatgaaatcaacggttcagatgagtttgatccgagatcgatgaatcagagtgagaagaaagtacttagtagaacagagagtagaagtctgtttgagttcaagtgtgttcctttatatggagtgacttcgatttgtggtagacgaccagagatggaagattctgtctcaacgattcctagattccttcaagtttcttctagttcgttgcttgatggtcgagtcactaatggatttaatcctcacttgagtgctcatttctttggtgtttacgatggccatggcggttctcaggtagcgaattattgtcgtgagaggatgcatctggctttgacggaggagatagtgaaggagaagccggagttttgtgacggtgacacgtggcaagagaagtggaagaaggctttgttcaactcttttatgagagttgactcggagattgaaactgtggctcatgctccggaaactgttgggtctacctcggtggttgcggttgtctttccgactcacatctttgtcgcgaattgcggcgactctagggcggttttgtgtcgcggcaaaacgccactcgcgttgtcggttgatcacaaaccggatagggatgatgaagcggcgaggatagaagctgccggtgggaaagtaatccggtggaacggggctcgtgtatttggtgttctcgcaatgtcaagatccattggcgatagataccttaaaccgtcagtaattccggatccagaagtgacttcagtgcggcgagtaaaagaagatgattgtctcatcttagcaagtgatggtctttgggatgtaatgacaaacgaagaagtgtgcgatttggctcggaaacggattttactatggcataagaagaacgcgatggccggagaggctttgcttccggcggagaaaagaggagaaggaaaagatcctgcagcaatgtccgcggcagagtatttgtcgaagatggctttgcaaaaaggaagcaaagacaatataagtgtggtagtggttgatttgaagggaataaggaaattcaagagcaaatccttgaattgaaaaagaaggtttggaagaaaagtgaaaaaaaaagttttgatggtgggtaaaaattctctttagtgaaaaaagaaagataaaacaacaggtaataattacattgtaatattaatttcctgcttaaatttgttatttactttctcaaaaannnnnnnnnnnnnnnnnnnnnnnnnnnnnnnnnnnnnnnnnnnnnnnnnnnnnnnnnnnnnnnnn

SEQ ID NO: 85323 - DNA, 865 bp, Arabidopsis thaliana columbia
gatcgtgatttacttttagttcgtcggagagatttgatcagaatgagcggaggaggagacgtgaacatgagtggtggagacagacgcaagggaacggtgaagtggtttgatacacagaaggggtttggtttcatcacacctagcgacggtggtgacgatctcttcgttcaccagtcttccatcagatctgaaggatttcgtagcctcgcagctgaggaatctgttgagttcgacgttgaggttgacaactccggccgtcccaaggctattgaagtgtctggacccgacggtgctcccgttcagggtaacagcggtggtggtggttcatctggtggacgcggtggttttggcggcggtggtggaagaggagggggacgtggtggaggaagctacggaggaggttatggtggaagaggaagcggtggccgtggaggaggtggtggtgataattcttgctttaagtgcggtgaaccaggtcacatggcgagagaatgctctcaaggtggtggaggatacagcggaggcgggggtggtggaaggtacgggtctggcggcggcggaggaggaggtggtggtggcttaagctgctacagctgtggagagtctgggcactttgcaagggattgcactagcggtggtgctcgttgaagcaaaccagactgtgaagaaggggtaaatcagtcatcgatccctcttctccgtgacttctatcaaattattatctatcttttgttattcgactctcttcaatgttgttttcggaatttattaattaggacttgtggttgttatggttatggttccttgtgatttgagaaagaaactggataagttttccccgcatgtttatcataacttttgctca

SEQ ID NO: 85324 - DNA, 704 bp, Arabidopsis thaliana columbia
  unsure (1)..(704): unsure at all n locations
caaaacatggctttcacaaaaatctccttagtccttcttctctgcctcttaggtttcttttctgaaactgtcaagtctcaaaactgcggttgcgctccaaacctctgttgcagtcagttcggttactgtggtaccgacgatgcatactgcggtgttggatgccgatcaggtccttgtagaggtagtggaaccccgaccggagggtcggtcggtagcattgtgacacaaggtttctttaacaatattatcaaccaagctggtaatggttgcgcggggaaaagattctacacccgtgactctttcgttaacgccgctaatactttccccaactttgccaattctgttaccagacgtgaaattgctaccatgtttgctcatttcactcacgagaccggacatttctgctacatagaagagattaacggagcaacacgtaactactgccagagcagcaacacacaatacccatgtgcaccgggaaaaggctacttcggtcgtggtccgatccaactatcatggaactacaactacggagcgtgtggtcaaagtntcggtcttgaccttctacgncagcccgaacttntgggtagcaacccaactgtagctttnaggacgggtttttggttttggatgaatagcgtaaggccggttntnnaccaaagggttttgagncaccnattagnagctattaaatngaatngaat

SEQ ID NO: 85325 - DNA, 778 bp, Arabidopsis thaliana columbia
atttcccacctcaacagaggcccggagaccatttttttgctacaaaaagaaaaaagatttatgcgggaggaaacaaggtaaaatacttgccaaaagcagccgccacccccttttcccatgtgccccgggaaaaggctacttcggtcgtggtccgatcccaactatcatggaacttcaactacggagcgtgtggtcaaagtctcggtcttgaccttctacgccagcccgaacttgtgggtagcaacccaactgtagctttcaggacgggtttgtggttttggatgaatagcgtaaggccggttctgaaccaagggtttggagccaccattagagctattaatggaatggaatgtaacggtggtaattccggtgcagtcaacgcaaggattggatactatagagactattgtggacagcttggtgtggaccctggtcctaaccttagttgctaaaaaacctttgaacccaaacacggacatatgtgacgtggcatgtaataagtgagatatactaaaatttcacacgtatgtactttatgtcgggtctcggtgttccctgcgtcacaagcaaaaaattgttgtaataaacttgtgaaagtgattttcttttcttatgtgacttcttatgaaagagaattttaagattgatagatgtttgagtttgacacttgcagtatctgattttgggatactcgcataaataaaaattaaaataaaaaaaaaaaaaaaagggcggccgctctagaggatccaagcttacgtacgcgtgcatgccacgt

SEQ ID NO: 85326 - DNA, 352 bp, Arabidopsis thaliana columbia
cttcaacctcgtcctccacatcttcctcatcatcatcaaagcccttgacggcattagaagacggagctggattcctggcttctccaacgatcttcattatgtcctctacgctttggagggaaaagcttggggtttctctcttgtagtcacgccgcttgagcaggctctgtaagctcctttggcaagttctttaagtaccatggatgcttcttgatctctttaagtgtgattctcttagctgaattagtgacaaatatgcgagagagaaggtgtctgcactcctgcgatatatgaacgtaatccgggatcttgtactggacagccattatacgttgggattgttttcctgaag

SEQ ID NO: 85327 - DNA, 1494 bp, Arabidopsis thaliana columbia
  unsure (1)..(1494): unsure at all n locations
nnnnnnnnnnnnnnnnnnnnnaaaaccctaaaaaaccctaaaaaacccatctctttgtctctctttcttctctgccacgcgtccgagtaaacaatggcgataattccgttagcacagcttaatgagctaacgatttcttcatcttcttcttcgtttcttaccaaatcgatatcttctcattcgttgcatagtagctgcatttgcgcaagttctagaatcagtcaattccgtggcggcttctctaaacgaagaagcgattcaacaaggtctaagtcgatgcgattgaggtgttccttctctccgatggaatctgcgagaattaaggtgattggtgtcggtggtggtggtaacaatgccgttaaccggatgatttcaagcggtttacagagtgttgatttctatgcgataaacacggattcgcaagctctgttacagtcttctgctgagaacccacttcaaattggagaacttttaactcgtgggcttggcactggtggaaacccgcttcttggagaacaagctgcagaagaatcaaaagatgcaattgctaatgctcttaaaggatcagaccttgttttcataactgctggtatgggtggtggaacagggtctggtgctgcacctgtggtagctcagatttcgaaggatgctggttatttgactgttggtgttgttacctatccgtttagctttgaaggacgtaaaagatctttgcaggcactggaagctattgaaaagctccaaaagaatgttgatacccttatcgtgattccaaatgatcgtctgctagatattgctgatgaacagacgccacttcaggacgcgtttcttcttgcagatgatgttttacgccaaggagtacaaggaatctcagatattattactatacctggactagtcaatgtggattttgcagatgtgaaggcagtcatgaaagattctggaactgcaatgctcggggtaggtgtttcttccagcaaaaaccgggcagaagaagcagctgaacaagcaactttggctccattgatcggatcatccatacaatcagctactggtgtcgtctacaacatcactggtggaaaagacataactttgcaggaagtgaaccgagtatcacaggtcgtgacaagtttggcagacccatcggccaacatcatatttggagctgttgtggatgatcgctacaccggagagattcatgtaacgataatcgccacaggcttctctcagtcattccagaagacacttctgactgatccaagagcagctaaactccttgacaaaatgggatcatcaggtcaacaagagaacaaaggaatgtctctgcctcaccagaagcagtctccatcaactatctctaccaaatcgtcttctccccgtagacttttcttctagttttctttttttccttttcggtttcaagcatcaaaaatgtaacgatcttcaggctcaaatatcaattacatttgattttcctccaaaaaaaaaaaaaaa

SEQ ID NO: 85328 - DNA, 553 bp, Arabidopsis thaliana columbia
  unsure (1)..(553): unsure at all n locations
caatctccacgattcctctcttctctctaacttccagagacaagttgtatccctcgtttgctttctgcgaaactaaggtgcaatggcgaagataaaaccgcagcttcttctaaatcaaagcaagaagaagaagggtccaagtcgcataagtatttccactattattgtctgtaatcttgtagttgctgtagtcatattatcgttggtcacaacctatcgccattggtcccaaaggtcaagaaacacaattgaacatgaaactcggagtcagagatttgaggacactaatactgcgtcagggcaaaaaacttacgatcttcctggttttgctgatataaacacatcaaaaggccttataactgtcggaactcttcaaagaaggttcccctgaacgttgtgggacaagtttctagatctatgtcaaaaagatcacttcaagggaatgccgtttcagcgggttataaagaactacttggtacaagcttggncactcaccgagctctatacctntagaagaatggacagctaaaggnaagctcagaggtcgncttca

SEQ ID NO: 85329 - DNA, 556 bp, Arabidopsis thaliana columbia
gcaaaacctaaactttcgtcttctcaacaaaatctgcagttccttgctcctttctcagtccaaattctctgatttttgattttttcgattcaatgggtttcaccaaagatcagttgcttgatcgacttcaggaacttgagattgattattccaagtatgaacatccgcctgtactaaccgtcgaagaacaggccaagtatgttagcagtagtaagggtgcactgagtaagaatctcttcttgaaggacaagaaacatcggtattatattgtttcagcgatggtggatacgaaagttgacatgaaagttttatctcagagacttggtcttggaaaaggagggattagaatggctccagaagaagcacttggtgagcttttgcaggtatccctcggatgtgttaccccgtttgcagttgtaaatgaatcagcaagagacgtgtctctcttgttagaccaaaaattcaagaaccaaacgcgttgcatcttccacccattggtctaacgatgtctcagtctctcttgaacacattgggtctggacaagtttcttgaaggt

SEQ ID NO: 85330 - DNA, 425 bp, Arabidopsis thaliana columbia
gacccaagcgtccactctctcaaagtcaccccccaaatttttttatttttttttttaactttgaatgtgactcaggatagagagagggcgagacagattaagagagcttgaggaaggatttaagcagatctgcaagaaacactctctcaggttagaatcaaaccggcggcgacagtgacggcggcgaaaagcggcggtgttggccgcaaaaacgatgcaaaaccagctatgggcattaccgcgaacgagttatcaaaatgggaaaattttcctaaaggacttaaggttcttcttctcctcaacggctgtgacagcgacggagatggctcctcagccgccgagactcgatcagagctcgaatcaatggactatatcgttactacattcaccgatgaaactgaagcactctctgcggttgtcaagaa

SEQ ID NO: 85331 - DNA, 570 bp, Arabidopsis thaliana columbia
tatacgacttactatagggaacgctggtacgcctgcaggtaccggtccggaattcccgggtcgacccacgcgtccggttttatcgaaagtgcaacttatgatttgatcacaattctttttctctctggggtttactttttttccgtagaatcaaaccggcggcgacagtgacggcggcgaaaagcggcggtgttggccgcaaaaacgatgcaaaaccagctatggtcattaccgctaacgatttatcaaaatgggaaaattctcctaaaggacttaagggtcttcttctcctcaacggctgtgacagcgacggagatggctcctcagccgccgagactcgatcagagctcgaatcaatggactatatcgttactacattcaccgatgaaactgaagcactctctgcggctgtcaagaaccccggagagcttccacattgccatcggcgaggtgaatatgagcgctgagagggaggagttcaagtttcttgaggctgccaaagacgctcttcccactataaaggtttcaccggacattggatcactactacaatgaaatgcatagcgcttg

SEQ ID NO: 85332 - DNA, 538 bp, Arabidopsis thaliana columbia
  unsure (1)..(538): unsure at all n locations
ctctcaaagtcaccccccaaatttttttatttttttttttaactttgaatgtgactcaggatagagagagggcgagacagataaagagagcttgaggaaggatttaagcagatctgcaagaaacactctctcagtgtttactttttttccgtagaatcaaaccggcggcgacagtgacggcggcgaaaagcggcggtgttggccgcaaaaacgatgcaaaaccagctatggtcattaccgctaacgntttatcaaaatgggaaaattttcctaaaggacttaaggttcttcttctcctcaacggctgtgacagcgacggagatggctccctcagcccgccgagactcgatcagagctcgggatcaaatgggctatatcggttactacattcacccgntgaaacttaagcacttctnttgcggttttaaagaaccccgnggnggttccanaattttccatcgtcgnggtgaanattnccccttnggggtngggttttnangttntttggnttccaaagcggtttccccctanaaggttt

SEQ ID NO: 85333 - DNA, 547 bp, Arabidopsis thaliana columbia
  unsure (1)..(547): unsure at all n locations
gacctaacaatggccgttcctccattattcttcctcctcacactcctctctctcccttctcttcttatctccgccggtgcttccaatgcctatccttctattcccggaaccgctcctatcgacggaggtttcaccgatgaacttaaacccattcgccgtgaagtctacgggaatggcaaaatctatgacatcagtcaccgttacactccggagatgccgtcgtgggactcatcggaaggaatcggacggttcctatggttagctgcgagtatgaagaacggatctcttgctaataactctgaaatgaagattcccacggacactggtactcatgttgattcacctggtcacgtctatgacaagtattacggatgcttggctttgatgttgacttcgctttgatctttcaaaggcctcaaatgggtcttgcgttgtctcggttgatgttcccaaagggttaaggaccatttncttgcttggaggngatgnaaancttttnanattccaaaaggggttagncgggggcttttnananaattgacaattg

SEQ ID NO: 85334 - DNA, 471 bp, Arabidopsis thaliana columbia
gtctgttctttaccaatatacatacaaataccctttgaaagctcagctttcacaactggaacacagaaattgaaattaagtggaaatgacgaagaggaagattcatcatagcgacgacgaagaggacgacactttctactatcgctattcctccgtcgcggcaccaccaccttcgaaccctaaacaccaaccttcttcctccgccaaatcatcagctcccggcggcggatctggcggcttagctccttcaaaatcaacactctacgtctccaatctcgatttctccctcaccaattccgacatccacactctattctccactttcggcaaggtcgcgagagtcactgttctcaaagatcgccacactcgccaatctcgtggcgtcgcgttcgtgctctacgtctctcgtgaagacgcggctaaagcggcgcgttctatggacgccaagattcttaatggtcggaaactgac

SEQ ID NO: 85335 - DNA, 424 bp, Arabidopsis thaliana columbia
  unsure (1)..(424): unsure at all n locations
tctaatttggggtcacgggtgggagtaccctcganttatgatgacatttctaaatcaagaggaggctacagagatncctacagtttgccacagagtgcaacaacagggaccggntcgctttggtccagacagccctttnagcagtttggtgtagcggagaggaatggtgctgttggtgaggagctcaggaatagatcgaatccgatcaatatagacaacaaacgcttcttctaatgttgatgcagaggctaagcttcttcagtcgttcaggcactgtattctaaagcttattaaacttgaaggatccgagtggttgtttggacaaagcggtggagttgatgaagacctgattgacccgggtagctgcacgggagaaggtttttctttgaggctgaagctcgagaaataaaccaggtgggtcaca

SEQ ID NO: 85336 - DNA, 533 bp, Arabidopsis thaliana columbia
  unsure (1)..(533): unsure at all n locations
ctgttgacggcggcgattggccgtcgcggcgaaacgtggtggcttgtgccggcgtttgtngtagctggaggattctnaccaaggagattgtagctgttcctgaattctcctctaaattgactttccctatctccctcaagcagtctggtccaagagattctctagttcaatgctttataaaacgtaatcgaaatactcaatcgtatcatctctatctcggattaactacctctttgacggataacgggaagtttcttcttgctgcttctaagctgaagcgcgcaacttgcactgattacatcatctctttgcgttcagacggtatctcaaagaggagcaacggtattcttgggagaatgagatcgaacttccttggaacaaaattcacggtctttgatggtagtcagaccggagcagcgaagatgcagnaagagccgctcttctaatttcatcaaagtttcacctagagttcctcagggaagttaccccatcgcttcacatttcatacgagttaaacgtcttaggctctcggg

SEQ ID NO: 85337 - DNA, 487 bp, Arabidopsis thaliana columbia
acaatggttgacaatctcatcaagaaaacacttctatgggaggacgaaacacggaaatcatttctatatgatggtgttcgattggtatccatacttgaagattataaattgacaaggaaacaacaggaagaggaaaagagacgataccgggatcaaaagaagatgcaggatctgttaataaagcggagggaatcaatttatggatcaaaaccgagtccaagaagaagcaacagtgtaagaaagaccaacggatacaatggggatgcatctgtgcctcctacgccccgcagaaactcagctggagcaacaaataacgacataatgaccaccccaagatcatactcaagccatcgccaaaacggatatttcaaggaagtaagaagactgtcaacagctcctttgaactttgtggcaataccaaaggaagactctgtctctacatacacttcggtttgcggctctgaaccagattcaccgttatataact

SEQ ID NO: 85338 - DNA, 575 bp, Arabidopsis thaliana columbia
gcgatggaacaagaagaacgttatcagtctcgtctcaaagtctcatcatcttccggcgccgattacgccaccgttacctgagatttaccgaatacctaatcctccaccaaagcttccggagatctcaattcctccgacacttacgctctctccatctcccaaacactccaatttcgtcaatttcctcgagaacaatctccctcaccatcaaacactaacgccacaaactcttcttggattcctccgttccaagatccgtaaccatccgctctacgctcattatgacttcgccgtctttaattgggcagctacactcgacactttccgtcatgatcacgattctttcctctggatgtcgagatcactcgccgccacgcaccggtttgacgatctttatcggcttctctcttttgtagctgcgaatccatgtccttgttcctcaggtatattctcttgtccagagcttgaacctattttccgatccgccattgatgcgtattgtagagctaggaaaatggattatgctttgttagcgtttgatactatgaagagattgatcgatggtaaaccaaatg

SEQ ID NO: 85339 - DNA, 410 bp, Arabidopsis thaliana columbia
acggacgcgtgggcggacgcgtgggcggacgcgtgggatccgctttttgattccaaaccaaaccctaatttctcagctcgaagtttccatttcattgcttcttcttacctcgatttttcccgggtattagaattcggtcaatttactgaattatagtgttctcacatgccaactgattctacttcaaaatcgctgcgaatttctgcgatcagttacgaaaattttgtcaatgggttcgggtaatcatgttgatatagtcgatgtgagctcaggcgaagaggatgtcgatacacggggagacgtagaatacaccgattggctaaacggtgttatggaacccgtcgatgatacatctgacagtaccgatatagtcgaggttctttctgaggttagaggtggtgtaaattctc

SEQ ID NO: 85340 - DNA, 417 bp, Arabidopsis thaliana columbia
  unsure (1)..(417): unsure at all n locations
gctacaccccgaaatccacattgatataaagccattaaaggtgttgataacagaggaaatttaaatgtaaaggaccaaattttaccaaaaggggacaataacagttgcagtattagacgactttaaacatagacatactgaggaaaagaataaatccttgcttaccaaggaaaatcctccattgtatgcttttcaaagctcaaactcttcgtccctaagggccaaagcagcagcttcttcttcatcatcatcaacagcaaagtactcattcttctcctcaggcctaaacatatgaaacatgatcacatagaacaccaaactnacaatctcctcaagctgcaaanccggacgcagtgggttgacccagggaanttccagggcccggtccctnacgctgtgcnccgtnggancgtnggc

SEQ ID NO: 85341 - DNA, 2516 bp, Arabidopsis thaliana columbia
  unsure (1)..(2516): unsure at all n locations
aagccacacaatctcttttcttctctctctctctgttatatctcttctgtttaattcttttattcttcttcgtctatcttctcctataatctcttctctctccctcttcacctaaagaataagaagaaaaataattcacatctttatgcaaactactttcttgtagggttttaggagctatctctattgtcttggttctgatacaaagttttgtaattttcatggtatgagaagatttgcctttctattttgtttattggttctttttaactttttcttggagatgggttcttgtagatcttaatgaaacttctgtttttgtcccaaaaagagttttcttttttcttctcttctttttgggttttcaattcttgagagacatggcaagagatcagttctatggtcacaataaccatcatcatcaagagcaacaacatcaaatgattaatcagatccaagggtttgatgagacaaaccaaaacccaaccgatcatcatcattacaatcatcagatctttggctcaaactccaacatgggtatgatgatagacttctctaagcaacaacagattaggatgacaagtggttcggatcatcatcatcatcatcatcagacaagtggtggtactgatcagaatcagcttctggaagattcttcatctgccatgagactatgcaatgttaataatgatttcccaagtgaagtaaatgatgagagaccaccacaaagaccaagccaaggtctttccctttctctctcctcttcaaatcctacaagcatcagtctccaatctttcgaactcagaccccaacaacaacaacaagggtattccggtaataaatcaacacaacatcagaatctccaacacacgcagatgatgatgatgatgatgaatagtcaccaccaaaacaacaacaataacaatcatcagcatcataatcatcatcagtttcagattgggagttccaagtatttgagtccagctcaagagctactgagtgagttttgcagtcttggagtaaaggaaagcgatgaagaagtgatgatgatgaagcataagaagaagcaaaagggtaaacaacaagaagagtgggacacaagtcaccacagcaacaatgatcaacatgaccaatctgcgactacttcttcaaagaaacatgttccaccacttcactctcttgagttcatggaacttcagaaaagaaaagccaagttgctctccatgctcgaagagcttaaaagaagatatggacattaccgagagcaaatgagagttgcggcggcagcctttgaagcggcggttggactaggaggggcagagatatacactgcgttagcgtcaagggcaatgtcaagacactttcggtgtttaaaagacggacttgtgggacagattcaagcaacaagtcaagctttgggagagagagaagaggataatcgtgcggtttctattgcagcacgtggagaaactccacggttgagattgctcgatcaagctttgcggcaacagaaatcgtatcgccaaatgactcttgttgacgctcatccttggcgtccacaacgcggcttgcctgaacgcgcagtcacaacgttgagagcttggctctttgaacactttcttcacccatatccgagcgatgttgataagcatatattggcccgacaaactggtttatcaagaagtcaggtatcaaattggtttattaatgcaagagttaggctatggaaaccaatgattgaagaaatgtactgtgaagaaacaagaagtgaacaaatggagattacaaacccgatgatgatcgatactaaaccggacccggaccagttgatccgtgtcgaaccggaatctttatcctcaatagtgacaaaccctacatccaaatccggtcacaactcaacccatggaacgatgtcgttagggtcaacgtttgacttttccttgtacggtaaccaagctgtgacatacgctggtgaaggagggccacgtggtgacgtttccttgacgcttgggttacaacgtaacgatggtaacggtggtgtgagtttagcgttgtctccagtgacggctcaaggtggccaacttttctacggtagagaccacattgaagaaggaccggttcaatattcagcgtcgatgttagatgatgatcaagttcagaatttgccttataggaatttgatgggagctcaattacttcatgatattgtttgagattaaaagattaggaccaaagttatcgatacatattttccaaaaccgattcggttatgtaacggtttagttagataaaaaccaaattagatatttatatataccgttgtctgattggattggaggattggtggacaaggagatattattaatgtatgagttagttggttcgtcaaaaaaaaaaaaaaaaaaaggnnnnnnnnnnnnnnnnnnnnnnnnnnnnnnnnnnnnnnnnnnnnnnnnnnnnnnnnnnnnnnnnnnnnnnnnnnnnnnnnnnnnnnnnnnnnnnnnnnnnaagatcat

SEQ ID NO: 85342 - DNA, 354 bp, Arabidopsis thaliana columbia
  unsure (1)..(354): unsure at all n locations
ggacttgcgtttatattaaagttaaaaaccgnaacgaggaataataaaaccctttagcgtttatataaagttacaaagattacaatttttgaagtaagtggtgattaacgtgccagaatttgcaagtaatccaaagattctaactttcgttatccaaaactttgttgttaccaaacaaatgatctcttctattaccaaacccgtttgaatcaagacccgagccaccaccgcgataattgttatgatcctgtgcggttgttctatagtttccatcaaccggagctcttgaactcgggtcgttagctccaactgaccggtatgagccaccagcgtaccttctccgtaggatccatg

SEQ ID NO: 85343 - DNA, 544 bp, Arabidopsis thaliana columbia
taggtgcactatagaagagctatgacgtcgcatgcacgcgtacgtaagctcggaattcggctcgagtttctcctcaaaatatcagatcgataaccaacaagcgaaactagggttctctaatctcgacgaagatggcgatgcagaaagctaaggagatcgttaacagcgaatcagtcgttgttttcagcaagacttattgtccatattgcgtgagagtgaaggagcttttgcaacaattgggagctaagttcaaggccgttgagctcgacaccgaaagtgatggtagccaaattcaatcaggtctcgcagaatggacaggacaacgtaccgtgcctaatgtgtttataggaggaaatcacatcggtggctgtgatgcaacatcaaactttgcataaagattgggaagttggttccgctgttaactgaagctggagcgatcgcaggaaagactgcaacaacttctgcttaagggcacatccatatgtgattgcttctatcaagaataaagaggtttgagtcataaatgtgaacttgttttcgtgtc

SEQ ID NO: 85344 - DNA, 454 bp, Arabidopsis thaliana columbia
  unsure (1)..(454): unsure at all n locations
cccacgcgtccgcccacgcgtccgcccacgcgtccgcggacgcgtgggcgagaagcagagcagagagaaagagattccgagagagagagagaaggagggagagaaggagcttagtggtctcattaccattaccagctccatacgaaccgaaacgacgccgttcgctcagcccttttctctgcaatctctcttcctcccacgagtttctcagcttttctcggatcatctaattaagagaggagatcttgtctcacggtgggattgattttcctcttcacggagatcgtgttccaggcaattaactgcaggataatggtgatgtgggtctttggctatggctcctcttgtgtggaccccagggatttcacctacgatgagaaagttgttaggtttcatcaagggggtntaaacggggcttttaatcnttnccttgcatttnatcataggggggttc

SEQ ID NO: 85345 - DNA, 603 bp, Arabidopsis thaliana columbia
  unsure (1)..(603): unsure at all n locations
tctctacgactcactattgggaaagctggtccgcctgcaggtaccggtccagagcagagagaaagagattccgagagagagagagaaggagggagagaaggagcttagtggtctcattaccattaccagctccatacgaaccgaaacgacgccgttcgctcaacccttttctctgcaatctctcttcctcccacgagtttctcagcttttctcggatcatctaattaagagaggagatcttgtctcacggtgggattgatttttctcttcacgaagatcgtgttccaggcaattaactgcagaaaatggtgatgtgggtctttggctatggctctcttgtgtggaacccaggatttcactacgatgagaaagtgttaggtttcatcaagggatataaacgtgtctttgatcttgcttgcattgatcatagaggtacaccagaacaccctgcaagaacttgcaccctcgagaaagctgaagaagccatatgctggggtactgcattctgtgtccgtggaggaccagaaaaagaacgtctggctatggagtacttggaacgtggaggggttaatttgattaagcaagttggttttaaggngttcc

SEQ ID NO: 85346 - DNA, 613 bp, Arabidopsis thaliana columbia
catcgattttttacctttctgtttgatcggctttttgtttttctgtaaaaagccatcttttgtgtttgatcctttctttttttttacctgattaaacaacttttctcctctgcattttttcgtgacccttttaaatatcttgtggccggtcctaaaagttctttatgcaaaggtttcttctttataagataaacaaaaggtgaagaaaccacaaccaaaaaaaataacttcttgttgagaaaagtttttttgagatgagagcagatttgattactatacagcaaacgctgacgccggaagcagcgacggttttaaaccagtcgattgctgaagccacacgtcgtaaccatggccacacgacaccgttacacgtggcagctactctcttatcttcttcctctggttatctccgacaagcttgtatcaaatctcatccaaactcttctcacccacttcagtgtcgagctctcgagctctgtttcagcgtcgctctcgaacgtctccctacaactagtacaacaacaaccactacttcgtcgtcttcttcttcttctccgtcgcaaacgcaagaaccgctactttcaaacgctttgaccggggctttaaaacgtgc

SEQ ID NO: 85347 - DNA, 402 bp, Arabidopsis thaliana columbia
  unsure (1)..(402): unsure at all n locations
caaattagtaagctcgcccatgctcagatccggtctggcttcgttaatcgtcgatgtcaatttgcggcgcacggttacgtccatccccaaccttttcttttccggcgcatcttagccgttgcattatcaacttcccgttactcctcccgtacatctctaaggtttccgattcaaatatctcgccaccaacaccgtctatcctacttttcttcatcctcttcgtcggagcaaagcagaccaacttcctcttcccgaaacagtttcagtggtcacggtcagcttgatagtgatgataattcttccaccgcctccgtcgcaatcatctttcccaaagttctttacattggcttaaccgttatttaacacttnggtcgngtttnnccggccggtccccggtttcct

SEQ ID NO: 85348 - DNA, 3167 bp, Arabidopsis thaliana columbia
tctagagaatactataccgacgatgactacacacacaaggaaatatatatatcagctttcttttcacctaaaagtggtcccggtttagaatctaattcctttatctctcattttcttctgcttcacattcccgctagtcaaatgttaataagtgcacacaacgttttctcgaagcattagaatgtcctcctcttaattaatctccttctgattagattctcaatagagtttaaatttgttaatggagagatatattgggaccctcaaggcttctaattataccacgtttggcataattctctatcgtttggggccacatctttcacacttcattaccttatcaccaaaacataaaatcaatcaacttttttttgccttattgattgtgttggatccctccaaaattaaaacttgtgttccccacaaaagcttacccaatttcacttcaatcttaacaaataggaccaccactaccacgtacggtttgcatcatacaaaccacaaactccttcttcattacaattattatatcatctactaaaacctctttctccggcgctctttcttgttcttagtgctaaattttctttgttcaggagaaatataatggacctcaagtattcagcatctcattgcaacttatcctcagacatgaagctcaggcgttttcatcagcatcgaggaaaaggaagagaagaagagtatgatgcttcttctctcagcttgaacaatctgtcaaaacttattcttcctccacttggtgttgctagctataaccagaatcacatcaggtctagtggatggatcatctcacctatggactcaagatacaggtgctgggaattttatatggtgcttttagtggcatactctgcgtgggtttacccttttgaagttgcatttctgaattcatcaccaaagagaaacctttgtatcgcggacaacatcgtagacttgttcttcgcggttgacattgtcttgacgtttttcgttgcttacatagacgaaagaacacagcttcttgtccgtgaacctaaacagattgcagtgaggtacctatcaacatggttcttgatggatgttgcatcaactataccatttgacgctattggatacttaatcactggcacatccacgttaaatatcacttgtaatctcttgggattacttagattttggcgacttcgaagagttaaacacctcttcactaggctcgagaaggacataagatatagctatttctggattcgctgctttcgacttctatcagtgacattgtttctagtgcactgtgctggatgcagttattacctaatagcagacagatatccacaccaaggaaagacatggactgatgcgatccctaatttcacagagacaagtctttccatcagatacattgcagctatatattggtctatcactacaatgaccacagtgggatatggagatcttcatgcaagcaacactattgaaatggtattcataacagtctacatgttattcaatcttggcctcactgcttaccttattggtaacatgactaatttggtcgtggaagggactcgtcgtaccatggaatttaggaatagcattgaagcagcgtcaaactttgttaacagaaacagattgcctcctagattaaaagaccagatattagcttacatgtgtttaaggtttaaagcagagagcttaaatcagcaacatcttattgaccagctcccaaaatctatctacaaaagcatttgtcaacatctttttcttccatctgttgaaaaagtttacctcttcaaaggcgtctcaagagaaatacttcttcttctggtttcaaaaatgaaggctgagtatataccaccaagagaggatgtcattatgcagaacgaagcgccggatgatgtttacataattgtgtcaggagaagttgagatcattgattcagagatggagagagagtctgttttaggcactctacgttgtggagacatatttggagaagttggagcactttgttgcagaccacaaagctacacttttcaaactaagtctttatcacagcttctccgactcaaaacatctttccttattgagacaatgcagattaaacaacaagacaatgccacaatgctcaagaacttcttgcagcatcacaaaaagctgagtaatttagacattggtgatctaaaggcacaacaaaatggcgaaaacaccgatgttgttcctcctaacattgcctcaaatctcatcgctgtggtgactacaggcaatgcagctcttcttgatgagctacttaaggctaagttaagccctgacattacagattccaaaggaaaaactccattgcatgtagcagcttctagaggatatgaagattgtgttttagtactcttaaagcacggttgcaacatccacataagagatgtgaatggtaatagtgctctatgggaagcaataatatcgaagcattacgagatattcagaatcctttatcatttcgcagccatatcggatccacacatagctggagatcttctatgtgaagcagcgaaacagaacaatgtagaagtcatgaaggctcttttaaaacaggggcttaacgtcgacacagaggatcaccatggcgtcacagctttacaggtcgctatggcggaggatcagatggacatggtgaatctcctggcgacgaacggtgcagatgtagtttgtgtgaatacacataatgaattcacaccattggagaagttaagagttgtggaagaagaagaagaagaagaacgaggaagagtgagtatttacagaggacatccattggagaggagagaaagaagttgcaatgaagctgggaagcttattcttcttcctccttcacttgatgacctcaagaaaattgcaggagagaagtttgggtttgatggaagtgagacgatggtgacgaatgaagatggagctgagattgacagtattgaagtgattagagataatgacaaactctactttgtcgtaaacaagataatttagaagttgaaaaattataacgaaatgaagtttgagataagagagagcgtgacaaaaaaatgaaaaacaaattgtaatatttatatgcgtccatcaaagtgagatgtaacacatatttgggtaagaaacgttccaaatccctgacgtagctcgag

SEQ ID NO: 85349 - DNA, 402 bp, Arabidopsis thaliana columbia
actttttctggaaatggatagtgaaggagcttcaagcgagtcttcttcttctggagatcagctcgagaagtggacagaagagcaggatgagctgaagaagaaactgatcgcgtacgatgacttcacatggaagttatcttcatcaacggaactgtctcagggatcggagatacttaagtatgttggaggtgtagacatgagcttttgcaaagaagattcttccgtcgcatgcgcttgtctcgtcgttcttgagcttccttctctccgtgtagtccaccatgacttctctcttctccgcctccatgttccttatgtccctggatttcttgcctttcgtgaggctccggttctttttgcagattctgcagaagatgagagatgagaagcatccattctatcctc

SEQ ID NO: 85350 - DNA, 810 bp, Arabidopsis thaliana columbia
  unsure (1)..(810): unsure at all n locations
cagcactaatactgactcacattagggaaagctcgtacgcctgcaggtaccggtccggaattcccggtgtcgacccacaggtgcgcggacgcgtgggcgagaagtggacagagtagtttcacatttgatttcagtttcattccgcacaatcaaatcggttgatgatttgtttgacttctttcagagagcaggatgagctgaagaagaaactgatcgcgtacgatgacttcacatggaagggatcttcatcaacggaactgtctcagggatcggagatacttaagtatgttggaggtgtagacatgagcttttgcaaagaagattcttccgtcgcatgcgcttgtctcgtcgttcttgagcttccttctctccgtgtagtccaccatgacttctctcttctccgcctccatgttccttatgtccctggatttcttgcctttcgtgaggctccggttcttttgcagattctgcagaagatgagagatgaggaagcatccattctatcctcaggtactgatggtggatggaaatggaatacttcatccacgaggatttggcttggcgtgtcatttaggtgttcttgcttaacctaccaaccattggggtcggaaagaatcttgcatcaatgtgggatgggcctgaatcaaatcttgaggggttaaacaaggcgggttcaanttcccaaatnaaacggggcattnggnaaaactttncncttttggggangggaaacctttnggaattaacaatngggggggtnggggtttttnggccccanccttngggtttnttnaaagnncccntnatttg

SEQ ID NO: 85351 - DNA, 883 bp, Arabidopsis thaliana columbia
  unsure (1)..(883): unsure at all n locations
nnnnnnnnnnnnnnnnnnnnnnnnnnnnnnnnnnnnnnnnnnnnnnnnnnnnnnnnnnnnnnnnnnnnnnnnnnnnccacgcgtccgaaaatcgtagggtttttttttggtcatcacgagagaaccgcacattgaaaagggaaggaagagagatatttggcagagagagaaaacgttggaggaaggattgatatttgttggactttggatcgaaaaattgaaaggtaaaagaggtagagaagctctggattccgtctcttcccgtcgtcggcgacggtggttttgcccgttggctctgaggttatatcaggctttaatttaagtggattgtcatcttctgagatatggaacaagtttttgtctggccaagctgctaccactatcggctttttctcatttccaagaagcgctcgattggcgggtttcttgccccgtccttatttcccttgggggctcttttcgttaaccggcacttaatgggcaaaccccttttctttaatctttaagggaaaggggtaggcaaatttctgagacggggcttaaatctgcaaatctttccttccataggcctaaaaaaacccctttgtcccctttttcaattctgggccttaggggcccgggtagaaaaaaacactaaattcttttttttttaattaaaaagggggttcccttgtcttacccctgatgaaatggtggaactaaggcccttcctttgaccaaacgggctttttggtgtccttcccgctttgggtccacggggggttcccccttcttgggcttttttcttgcccaggggcaccccttatttcaaaaaataccggcccccccccgcgggaattttgttttctcctgggggagcctccacacccgggaaaatggcttt

SEQ ID NO: 85352 - DNA, 803 bp, Arabidopsis thaliana columbia
  unsure (1)..(803): unsure at all n locations
ttgccctcctcgagtcgacggtatcgataagctggatttcaaatccgcggccgcgtggacctttggatcgaaaaatggaaaggtaaattaggtaaagaagctctggattccgtctcttcccgtcgtcggcgacggtggttttgcccgttggctctgaggttatatcaggctttaatttaagtggattgtcatcttctgagatatggaacaagtttttgtctggccaagctgctaccactatcggcttttctcattccaagaagcgctcgattggcggtttcttgtacgttctgatttccttgtgggctctttcgttaactgcacttagtggtcaaaccctcttctatgatctttaggggaaggtgtgaggcaaatttctgagacagggctgaagtctgcaaattcttccttcgcatagtcctagagaaacctctttgttcctctctttcatatcttgttcttatgggtgctggttgaagaaagatacatcaatttcttttctttttcagtttacaaatgtcgtttccttgagtctgaacccctgagtgagatgttgtgagcatagggtccttcctattagccaaaacagtctttcttgttggttccttcgcgtctttgagttctcagtatgtgttttcctcttctcttgctctctttcttttgcctaaatggtcaacccgtttatgttcgaagtaaataacggtcagtctacccagctggagaatcattgattttactgccttgggtgtcagtacttcctacgaacgactgggaganntatgctatataatcttcagaagtca

SEQ ID NO: 85353 - DNA, 530 bp, Arabidopsis thaliana columbia
  unsure (1)..(530): unsure at all n locations
ttgtttataaaactaaatttattgaggtcaatctttgattaatttttattgatctaaatcgtcgttgcaaagaaataacttcgagcagaagtccacacacttaggactcagcaattcaaaataagcatagaagccatagcaaacgtttggtttctaagcatctaagttcatctttctagctacaaacttgagagagagacacccgcttgttgttttgagtgaacatcgtcaggagcctgatttacccatgctgagatcaggtggtgcgcgatggcaaatggccccggggataaacataggagcaagctcaccgctttcaagattgaaatcagttgatagactctggcgttctctccacaccctttacagatctgccctacctttgcagctgcggttcctttgagcctcccggaatctggaaccgccnaagnttttttnacccctnncaaaggggcattgggacctcaaacnccctggnaaggtnancgggggnttggggaaaaaaaaaccgggncaatgggnggggggnt

SEQ ID NO: 85354 - DNA, 469 bp, Arabidopsis thaliana columbia
  unsure (1)..(469): unsure at all n locations
aggaaatctnttttgatatgtcactcagccattaacgcgaaatgcagtgaaggacaaacacagaccgttactcgggagtcaccgactataacacaggctcctgtacactctaaggagaaatcaccatgcctagacgatggaggagacgggttcccaccgcgagatgatggagatggtggtggaggaggagggggtggaggcaactggtcgggtgggttcttcttctttggttttctggccttcttgggtctattgaaggataaagatggcgaggaagattaccgagggagcagaaggcgataataatatgggccactcttggttatcttattacagctacaggactcattttgtatctgtttcgttgagtgggggatgatatgccttgtattcaagagaagagagacacggttgatttcaacaaagcttatattgaaaactttaaaaccaggaaaaaanaaatnggcct

SEQ ID NO: 85355 - DNA, 601 bp, Arabidopsis thaliana columbia
  unsure (1)..(601): unsure at all n locations
cgtcaagctgctttagccatggctatggcggcgtctattatccaatcttctccgctctccttcaatagcaacaacgcaaagccacggattcatagttcaggatcgctcggcggaatcaaaagccaaaatagagtctctccattgagtgcggttggattaagctcaggccttggaagtagaaggaaatctcttttgatatgtcactcagccattaacgcgaaatgcagtgaaggacaaacacagaccgttactcgggagtcaccgactataacacaggctcctgtacactctaaggagaaatcaccaagcctagacgatggaggagacgggttcccaccgcgagatgatggagatggtggtggaggaggagggggtggaggcaactggtcgggtgggttcttcttctttggttttctggccttcttgggtctattgaagataaagagggcnaggaagattnccgagggagcagaaggcggtaataattnggcaccctggtacctattacagctcaggcccatttgaaccngttcgttaatgggngtaaatccttgattcagananaanaccggttatttaccggcgaatcctcacccgggnc

SEQ ID NO: 85356 - DNA, 802 bp, Arabidopsis thaliana columbia
tccctttgcggtaccggtccggaattcccgggtcgacccacgcgtccgaagattaaagaagggttacgtctacggtggaacagctgacatgtgtttcgatggaaacgtggcgatgatcccacggttgataggagatcttgtgtttgtgttcactagaggagttgagatacttgttccgaaagagagggttttggttaacgtaggaggtgggattcattgcgttggaatcggacggtcgagtatgcttggagctgctagtaatataatcgggaacgttcatcagcaaaatctttgggttgagttcgatgtgaccaatagaagagtgggtttcgctaaagctgattgtagcagagtagtgtgaggaaaagggttctgctacggttacaaacaagggtcttatggtggactcggttaaagatcgtcgttcgatgatgttaatcggacggtacatattaaaatagcagttttgtatgaaggaacttttattaggggctctgaacaatgtcctacaaataattaaaagtgttcacgttagatttttatgttgtaccgtttgtatattatatggttcatattaacttgttacataaaaatatcttttattacttgactcgtgttgaaagacttgtggatgaagagaattaaatttgagaattttatgagtgtttttgttctgtttttatatttatggtaccacttctacttttggtttaataaaaaaaaaaaaaaagggcggccgctctagaggatccaagcttacgtacgcgtgcgtgcgacgtcataatcttctatagtgttccta

SEQ ID NO: 85357 - DNA, 988 bp, Arabidopsis thaliana columbia
aagatttctaaattctcttactgtatcccaacccggtcaaaccgtcccggtttagcctcaaccggctcgttttacctcggagataacccgaattctcgtggtttcaaatacgtttctcttttgacttttcctcaaagtcaacgcatgccgaatctagaccctttagcttacactgtaccattacaaccccggtatcagaatcggacaaaagagactcaacatacccggttctgttttccggcccggcgcaggtgggtcgggtcaaaccatggttgattcgggttctgaatttactcacttagtcgacgtggcgtatgataaagtcaaagaagaaatagtgaggcttgtgggaaagattaaagaaaggttacgtgtacggttcgacagctgacatgtgttttgatggtaaccattcgatggaggagatcggacggttgataggcgatcttgtgtttgagtttgggagaggtgttgagatactcgttgagaaacaaagccttttggttaacgtaggaggtgggattcactgtgttggaatcggacggtcaagcatgcttggtgcagctagtaatataatcgggaacgttcatcagcaaaatctttgggttgagtttgatgtgaccaataggagagttggttttagtaaagctgagtgtagattattgccgtgagtaggtgaatattcttctacggtcgtgcgtattagttttgagttgtatctcattatgatgatcgttggatgtttgatcgaatggtgtataggaaatctgggatttttgtgggtcccgtagaaggacaactgtctgaagcaaacttctcaatctttattaggctctggaactatgtataaatgtttgtactatgataattacaagcttgtatattaaatggttaatataacttgttatcaaaaaaaaaaaaaagggcggccgctctagaggatccaagcttacgtacgcgtgcatgcggcgtcatagctcatctatag

SEQ ID NO: 85358 - DNA, 1645 bp, Arabidopsis thaliana columbia
  unsure (1)..(1645): unsure at all n locations
tccacaaaactcaaaaaaatgtctcccattccaaaaccactcttcttcttcttcttcctcaactatgtgtctctctcagacctcactctctcttcacctcccactcacatctctccctatctccaccaccacaaactctcaccgcttcaccacctccctcctctcccggaaaaacccatctccgtcgtctccaccatacaacttccgatcaagattcaaatactcaatggctctaatcatctcactccccataggaacaccaccacaagctcaacaaatggttcttgacactggaagccaactttcttggatccaatgtcatcgtaaaaagcttcctccaaaaccaaaaacatcatttgatccatctctttcttcttctttctcaactttgccttgctcacatcctctttgtaaaccgagaattcccgattttacccttcctacttcttgtgactccaacaggttatgtcactactcttacttctacgctgatggaaccttcgctgagggtaatctcgttaaagaaaaaatcactttctcaaataccgaaattacccctccttttgattcttggttgtgctactgagtcttctgatgataggggcattttcgggaatgaaccgtggcgtctctcttttgtttcttaagctaagatttcgaagttctcttattgcatccctcccaaatnaaaccggcccggttttactccaaccggttcgttttaccttggtgataacccgaattcacacggtttcaaatacgtttntttgttgacttttcctgaaagtcaacgaatgccgaatcttgatcctcttgcttacactgttcctatgattgggattagatttggtttgaagaagcttaacatttccggttcggttttcagacccgatgcaggcgggtcgggtcaaacaatggttgattcgggatccgagtttactcatttagtagacgcagcttacgataaagtaagagcagagataatgacacgtgtaggacgaagattaaagaagggttacgtctacggtggaacagctgacatgtgtttcgatggaaacgtggcgatgatcccacggttgataggagatcttgtgtttgtgttcactagaggagttgagatacttgttccgaaagagagggttttggttaacgtaggaggtgggattcattgcgttggaatcggacggtcgagtatgcttggagctgctagtaatataatcgggaacgttcatcagcaaaatctttgggttgagttcgatgtgaccaatagaagagtgggtttcgctaaagctgattgtagcagagtagtgtgaggaaaagggttctgctacggttacaaacaagggtcttatggtggactcggttaaagatcgtcgttcgatgatgttaatcggacggtacatattaaaatagcagttttgtatgaaggaacttttattaggggctctgaacaatgtcctacaaataattaaaagtgttcacgttagatttttatgttgtaccgtttgtatattatatggttcatattaacttgttacataaaaatatcttttattaaaaaaaaaaaaaaaaaaaagggcggccgctctagaggatccaagcttacgtacgcgtgcatgcgacgtcatagctcgtagatggtgta

SEQ ID NO: 85359 - DNA, 458 bp, Arabidopsis thaliana columbia
  unsure (1)..(458): unsure at all n locations
cagagaacgacaacgaggctaaacacgtgagacagctaattgccgaggtagttgttagcggcggcgcagggaacgcagcagactacttccctatccttcgttacgtaacgaactatgagaaacatgttaagaagttagcaggtcgtgttgatgagtttttgcaaagtctagttaacgagaaacgtgtggagaaagtaaaaggtaacacaatgatcgatcatttactttctctacaagaaactcagcctgattactacacggatgtgatccatcaaaggaatcatacttgttatgatacttgccgggactgatacatcagctggaccgttagaatgggcgatntcgaattttttganccatncagaagtnttncggnagncaaaggccgaattgncggccaatcgggtttggccngttagnngnggncaagccatttttgaacnttccnttnctttagg

SEQ ID NO: 85360 - DNA, 2148 bp, Arabidopsis thaliana columbia
agatcccaacggattcaaacagcaaatttgtgctttgctcttctctcttattataatatcctctcaaaaaccctctcctatatcctcctaaagccccccttccttgtttctctaccgcaacaaagaaaaaacaaaagtttgagaaaaatggtgtgttcgttgtgtaaccaatgattgggttttagcttactactgcgtgagttttttagaaagagagagtgaagatacattatagaaagaagagaagcagaaaccaaaaaaagaaaccatgaagtctttttgtgataatgatgataataatcatagcaacacgactaatttgttagggttctcattgtcttcaaatatgatgaaaatgggaggtagaggaggtagagaagctatttactcatcttcaacttcttcagctgcaacttcttcttcttctgttccacctcaacttgttgttggtgacaacactagcaactttggtgtttgctatggatctaacccaaatggaggaatctattctcacatgtctgtgatgccactcagatctgatggttctctttgcttaatggaagctctcaacagatcttctcactcgaatcaccatcaagattcatctccaaaggtggaggatttctttgggacccatcacaacaacacaagtcacaaagaagccatggatcttagcttagatagtttattctacaacaccactcatgagcccaacacgactacaaactttcaagagttctttagcttccctcaaaccagaaaccatgaggaagaaactagaaattacgggaatgaccctagtttgacacatggagggtcttttaatgtaggggtatatggggaatttcaacagtcactgagcttatccatgagccctgggtcacaatctagctgcatcactggctctcaccaccaccaacaaaaccaaaaccaaaaccaccaaagccaaaaccaccagcagatctctgaagctcttgtggagacaagcgttgggtttgagacgacgacaatggcggctgcgaagaagaagaggggacaagaggatgttgtagttgttggtcagaaacagattgttcatagaaaatctatcgatacttttggacaacgaacttctcaataccgaggcgttacaagacatagatggactggtagatatgaagctcatctatgggacaatagtttcaagaaggaaggtcacagtagaaaaggaagacaagtttatctgggaggttatgatatggaggagaaagctgctcgagcatatgatcttgctgcactcaagtactggggtccctctactcacaccaatttctctgcggagaattatcagaaagagattgaagacatgaagaacatgactagacaagaatatgttgcacatttgagaaggaagagcagtggtttctctaggggtgcttccatctatagaggagtcacaagacatcaccagcatggaaggtggcaagcacggattggtagagtcgctggaaacaaagatctctaccttggaacttttggaacccaagaagaagctgcagaagcttacgatgtagcagcaattaagttccgtggcacaaatgctgtgactaactttgatatcacgaggtacgatgttgatcgtatcatgtctagtaacacactcttgtctggagagttagcgcgaaggaacaacaacagcattgtcgtcaggaatactgaagaccaaaccgctctaaatgctgttgtggaaggtggttccaacaaagaagtcagtactcccgagagactcttgagttttccggcgattttcgcgttgcctcaagttaatcaaaagatgttcggatcaaatatgggcggaaatatgagtccttggacatcaaaccctaatgctgagcttaagaccgtcgctcttactttgcctcagatgccggttttcgctgcttgggctgattcttgatcaacttcaatgactaactctggttttcttggtttagttgctaagtgttttggtttatctccggttttatccggtttgaactacaattcggtttagtttcgtcggtataaatagtatttgcttaggagcggtatatgtttcttttgagtagtattcatgtgaaacagaatgaatctctctataacatattattttaatgaatctcctttgct

SEQ ID NO: 85361 - DNA, 1175 bp, Arabidopsis thaliana columbia
  unsure (1)..(1175): unsure at all n locations
atacgactcctatagggaaagccggtacgcctgcaggtaccggtccggaattcccgggtcgacccacgcgtccggagagatgtatctgaagagaccgatatggagcgatggcgcgtcagcaacgccggagaatccatcagaatcggagaccggagaagaatcagacgcggcgtcgatggtagtcgaagagctggtgacttctctcaatacacagagactttacagggagctgacactatccctcaggaccggtttacgcgatgcttgcgctgaattctccttccttcgcatccgtggtcttagatctcttctcaaaactctccgaactgtcgctgattcagattcaatcattcgtctcttctctcatacccaaaccatttccgatctccaactggttccggtgctttttcaacattcattgaaagaagcggaggatgataaagtgacgagcttggatcatatattcagtgtggagccgatgaagataacaagtccttctacggatgctgaggttgctgttgctcttagagttctcgaaggatgctgccttctccatcctcagagcactgtcctggctcataagcatggtgcagtccgcgtaatgatgaatgtattatcaacacgaggagtacttgagcaaggagcctgcttggatgccttaatctcagtattgctggattcatcagcaaatcaggtggattctggagcttgcaatgcattgaagaggttgcaatgctcatgcgagacaaacaagctgatgataacctaggttaagatgcggagagttcttactactggtagttgggcacgtaaatgggaaggatcgatctccaatagcgagtgtaaatgaagacatcaggcgcctcttgggtgaaaaatctgcttctttaatatgggcggngagtcaattcggttcaacaggtgatcctgaacaaagaatcacggcgcttcatatccaggctggtagagtgctcgagtctcttgacttgtactaactgtcaaactacttttgttttttccttatttacataataccaagttattattatgtgtaacaatgtaacaacactcatgaaaatagagttgtttaatgaaaaaaaaaaaaaaagnnnnnnnnnnnnnnnnnnnnnnnnnnnnnnnnnnnnnnnnnnnnnnnnnnnnnnnnnnnnnnnnnn

SEQ ID NO: 85362 - DNA, 917 bp, Arabidopsis thaliana columbia
  unsure (1)..(917): unsure at all n locations
agacctatgcagtaaagctagatacccaataacatacagctcagctcaacctcaatcgctcttgatgcaatccaaagcccacctgttagccttcgatcaccaccacnatgtagcagtaggattcaatgtagcaaatgnagtatcaggacagagatgcacagttagatcggacttaagggctccggttccaaaagaatataaagtgtgcagcggttaatacagtgttttcacccaaatcagactgaattgatatctggagaccaaaatggaaatatacgtgtatgggatctcagagcaaattcgtgtagctgtgaactggtaccagaagttgatacagctgtacggtctttaactgttatgtgggatgggacaatggtagtcgctgctaacaaccgtggaacatgttatgtatggcgcttgttgcgtggaaaacagagtttgagccccttcataagctgcaagctcataatggccacatccttaaatgtctcctctctcctgcaaacaaatatctagcgactgcatcatctgataaaactgtcaaaatatggaacgtcgatggttttaaactagagaaagttttaacaggacatcaaagatgggtttgggactgcgtcttctcagtggatggagaatttcttgtaacagcatcatcggacatgacggctagattgtggtcgatgccagcaggcaaagaagtgaaagtgtaccaaggtcatcacaaagccactgtgtgctgtgcacttcacgattaaaaccttaataagaatcaaagctaaattatgaacaaactacgattgtgttatttgtgttttagtaaactcttgtacatttcaaaaaaaaaaaaaaagattgctcttatgttccctctctgatcaaacatttctcactatctcaccacnnnnnnnnnnnnnnnn

SEQ ID NO: 85363 - DNA, 626 bp, Arabidopsis thaliana columbia
attattttttattattataaatctaaaaaagttttttttttttttttttttgttctcgaagcagtaaaatctactacaacagtcaaagagagagagcaaacatgctcgcttaattcacggaatcgagacgtttctacaaactcaattttatattttcagctggaatccgaactctgatatagaaagcacacaacgttcacctccagtgacttctctctatctctaaatctctcttgcgtcacttaaaaagtcggtgcttcctacttaagtgttcttgagagtgagacgtttcatttctgggttcaagggtgtagaataaacacttgagtgaagtttaaagcttgagaaagacagaggaaagaaaaatgggtcaaagactgaatctagtcttctggatttttgtctccattcttgcctttttgaattttggtatggctagcaagattgggatatgttatggaagaaatgctgataatcttccaagtcctaacagagtctctgagctaatccaacatctcaacatcaaatgtgttcgaatctatgacgccaacattgatgttcttaaaagcttttgcaaacactggaatcgagcttatgattggtgtccctaacgctgatctacttgc

SEQ ID NO: 85364 - DNA, 627 bp, Arabidopsis thaliana columbia
  unsure (1)..(627): unsure at all n locations
ttttttacaaaaaaaaaatacaaataaattaataatgggatcatttgatttcagtatacacatgggaccatgttctttaaaagaaatttatcttctcttcactccatggaaacagagaaaacactctcaaacacacaaacaaacaaattctgcagatgaatttgaatataccatataccactcttcaaacctgaaattaataatatacttaagaatgtgtatatatatatgggagatgttttttatacaattgatttggaatggtctgcaatgtgagtaagtcgaccaaatctttaagggcaattagggtttcgaccaggaccaccatagtagaagtaacttccccaagaacctccattcccacttttcacattggtaacagttctcttggatcagtaaacaccttggaagattctcccgggggttccccagttcattcnggtccatcaactacttgnacggtccttgaagtaacccgctttncccaaccttcctctggnaacctcccacttcccacngggggggtggggggtggcctccccnggctgngggtaaccattgggcncccattngnnannggggcttcnggaagaaggaaggggagggggcagacccataggatcccca

SEQ ID NO: 85365 - DNA, 294 bp, Arabidopsis thaliana columbia
ttttttttttattattgcatatgtctggtttcttttttcaattatgcacaatgatatataatgcgcatcacaatgtatagtaagcttcatcttctagtttgatgtgtaaagttaattcattgctgcttaggcaacttatcacaccatatcagttgctattttccatcacgtggttatactccaatagctgatgcagctgaatccacataaagtagcaagcaagaatatattttcttcttccatcgttctatattctctaacaagattatcactagagagattgtcatttaactt

SEQ ID NO: 85366 - DNA, 209 bp, Arabidopsis thaliana columbia
agaggagaaatttagctgctctcatagccgcagaagtgcaaagagaggcattggctgcttcacatctcatcaaatgcatcagtatgtttgctgaactcagctcaaatacctcaccaaagaatccacacacctctctcagaaacctcttccttcccccctcccagagttatcccttgaaccaagtacaagttccagtgtagcatccgaag

SEQ ID NO: 85367 - DNA, 614 bp, Arabidopsis thaliana columbia
  unsure (1)..(614): unsure at all n locations
cttttacaaagacaagccttttcaacacactactgatcttgagaatcctctcttcaaagccatggcgttagaactatggcaaactctcaaagaagcaatccatgcttacacaggtctttctcctgttgtcttcttcactgctctagctctcgccttcgccatttaccaagtcatctcaggctggtttgcctcgccgttcgatgatgttaaccgacatcagagagctagatccttggctcaagaggaggagccaccgattcctcagcctgttcaagtcggtgagatcacggaggaggagcttaaacagtacgatggctctgatccctcaaaagccccttcttatggctatcaaacatcagatctatgatgttacacaaagcaggatgttctacgggtccagggggaccatatgcttttgtttgcagggaagagacgctagccgagctcttgcaacagatggcattttgcaggngaaagccttgacttggggtatctctggctttggccctttgagctaggttcgcctcaagaattgggggtcaagtcatggaaagnttnaaaggtngactgcaaagtggtggnaaactgaaccgantntntnacccaannatttg

SEQ ID NO: 85368 - DNA, 707 bp, Arabidopsis thaliana columbia
  unsure (1)..(707): unsure at all n locations
tcgctaaacccaactactctctatcttgcacaaacgcctgacttttacaaagacaagcgcttttcaacacactactgatcttgagaatcctctcttcaaagccatggcgttagaactatggcaaactctcaaagaagcaatccatgcttacacaggtctttctcctgttgtcttcttcactgctctagctctcgccttcgccatttaccaagtcatctcaggctggtttgcctcgccgttcgatgatgttaaccgacatcagagagctagatccttggctcaagaggaggagccaccgattcctcagcctgttcaagtcggtgagatcacggaggaggagcttaaacagtacgatggctctgatcctcaaaagccccttcttatggctatcaaacatcagatctatgatgttacacaaagcaggatgttctacggaccaggaggaccatatgctttgtttgcagggaaagaacgctagccgagctcttgcaaaagatggcatttgaagggggaaagacttgactttgggatggcccctgggncttgggnccctttgaagcnagatgcncttcaaagaattggggggnccaangtccattnnggaaaggnttgccnnaangggttnggncctggccaaaagtggngtgggtcaanaaccctggaaaccggnaactttggnccttgnaccccccngnggaattgtttng

SEQ ID NO: 85369 - DNA, 521 bp, Arabidopsis thaliana columbia
cacgcgtccagagcaaatgaagaagacgaagcacactgagaattcaccggccagagatcaccaataagtgttgtagtttccggttacttcgaataaccttcaatggagcttccgttactctcgtatgctagctccgcgtcgttttcacggacaggcttatgctcttcttcttcttcctcctcaactagtatctatgagtttccggagagaagacggagtttaaaattgagattcaatggtggagaaaggtcacgaagcgttatagcttccgctgaacggagcagtgaagggattgagaagacaacagacaccgtcggtggcggaggaggaggaggagcaggcagatttgctggtactgccatggaggttactacacttgatcgtgggttttgctaactccaccaccgttgattttccgatctgggacaaaatcggcgccgtcgttagacttacttatggaatcggaatatatggagcaatggctgtagcaggaagatttatatgttcagtgactggaattg

SEQ ID NO: 85370 - DNA, 603 bp, Arabidopsis thaliana columbia
  unsure (1)..(603): unsure at all n locations
ctcttccttcatatatgctttaagtttgagngacgtttcttctcaaagatgggtttctccgacgctggaatttacctctccgacccaaacaatctctgccaaaccgaactaggtttctttcatgaaccatctctagggttttnagaccagagcgatccacaaaacgagttccacatcactcctcctatatatcaagaattacaagatcagggtcttgaacctaaatcccaagagacgaataattgctcacgcaaagaaggagcaaccgtcaagaaagaaggaggaaggaggaggcggttattgtaaaacttccgacttcgttcagaccagattctcttcgcgggtgccaagaatttgtccaccggcgcctaggaaacctaaaagagtcccgtcgagaagccttaaggttagaaattcatatagaagcaagagaatgatcattctaaatgtttctagagagattgattgtttgtttaatccaacatcactatgtaanaaaattaagaaagccagatacatctaatgttttgtacgtactgtatttgtataacgtagcaacctaataaccaaattgtaatacactacgactttacataaaaaaaa

SEQ ID NO: 85371 - DNA, 655 bp, Arabidopsis thaliana columbia
  unsure (1)..(655): unsure at all n locations
ttttttttgtgggtggttcttgtggtttccgaatcatttctttgtttgggaccaagataatggacatatttctgtccctgaagtttttgctctcttcagtgggcaagctcccctatttcggtttggaaacgtctgaggagttcaatagcgatatttctgaactcgttttctcgtccttgcatgctcacaatcaccttaaccttgtcaccatcttgcaagaacttttgggcagcccttagacgaacggaataatcatgctgatcaatattataacccattttaagctcctttaaatccatgcgagttgttttcttttgctgatcttttttcctcttttgctgtncgnatctgtatttactgnaagtccatcattttaacaaccggggggtctggcatcaggggntagtataaccaggatcaagtccagncatccatcagccattcggaangggttcggcctttaggcaccaaanccagcatggtttggtgnccancggtaagcccaacaggagntggccnaattggggggggatncaangggttaccaattcaaggtnttcgggggaacccctcaatnggcccanngnacgggaacccnccacaacggggngggggaantcnggggnaaccgggggggaaagggngggttgtaaaa

SEQ ID NO: 85372 - DNA, 648 bp, Arabidopsis thaliana columbia
  unsure (1)..(648): unsure at all n locations
gcgccatggctgggattaccagcagcaccgttggattcaacgccgtcttcaccggaataaccaaaacagtatcatcacattcactcttctctgttgattccaaactctgtagtcttcgtctctccaaaaccgaactgtctttcactaatctcactccttctcctcgccgtgctttcgccgtcacttgccgcttcggcggtggtggtggaggttatcgattctctggagacaatagaagaggtaggccgaaagaagctgaaattgatgaagctcttgatatctcctcaattaggtcagctactgttaggcttatcgatgggcaacaaaacatgcttggtttaagtgtctaaaagacggagcccgttcggaatggcttgatggatgcctgaaactttgatcctgggttaatactatcggcctgatgcaagatcctccgggttgttaaaaatgcatggcctccagtaaattncaggttccggccagcaaaaagngggnaaaaaggtcagcaaaaggaancaacncgnatgggttttaaaggggcttaaaatggggtataantttgcnngcattggtattccggncgcntaggggttcccnaaagtntttcaaggtgggcaaggttaggggtttngnttaaggcgggaccgg

SEQ ID NO: 85373 - DNA, 481 bp, Arabidopsis thaliana columbia
  unsure (1)..(481): unsure at all n locations
ctcaaataatgaccacgttattcctccttattgctctattcatcacaaccatcctcaacccaacaagtggagaatcagtaggtgtatgctatggaatgatggggaacaaccttccttctcaatcagacacaatcgctctctttagacaaaacaacatccgacgtgttagactctacgatccaaaccaagccgctttaaacgctcttagaaacacgggtatcgaagtcatcatcggcgttccaaacaccgatcttcgttcactcactaacccttcttccgctagatcatggctccaaaacaacgtcctcaacttttaccccgccgttagcttcaagtacatcgccgtaggtaaccggagtatctccgtcgaacggcggtgatgttgtgctccctgccatgcgtaacggtttaagggtgcttctaagggggtggcaaatnttcaagatcggatttaaaagttttttacncncatttgntaatt

SEQ ID NO: 85374 - DNA, 537 bp, Arabidopsis thaliana columbia
  unsure (1)..(537): unsure at all n locations
tttagaacgtaaataaccaaaatttattaaatttgtagggtttcttctgcctaaacctcgactacatgctgttttttgcaccagtgaaataagcgaaactacatagaaagaaacaaggtcttacttccacagaggaaagtttagagaagtagaaaagccacaaagcaacaccagcaaatacatatagcttaagctgctcagacacaattcaacgagacacttagtgagagagtagcaaatgacttactcttcctgggacggcaaatttagcttcaactttaagaaatcattggtctttgcaatcttcacaatctcctcagcttcttctctctttagnccctttcaaccaattcaatcaaactaactgctgcaacggttgttttaccgncaagatacccgttacttgaatggctccttttagggntcaatcgnagnctnaaaggcacctgntttcacatngcaggaggaattangcaaggtgnttttttaggcggtancctgntannatntttttgccccgntnagttggnccntttc

SEQ ID NO: 85375 - DNA, 312 bp, Arabidopsis thaliana columbia
  unsure (1)..(312): unsure at all n locations
tagcacatgacttcccttacaaagataacatggtttaaaaagaacttaccgggacatcgaggttgaagagacctggtcagcctatataacgcgaagagaaggaaatagtttcgaatcattagtaggggtatgttgataagaggagaagacaaagtgaatgtatttctccttacatggttaagatagtgcccttggctatacccttgtaatcacaagttgtaacattacagacagcgctagtcttctgcaccctgatgttacccagcatanaggttgctgtnttctacactgcatacttnagcaagagacggc

SEQ ID NO: 85376 - DNA, 432 bp, Arabidopsis thaliana columbia
cccacgcgtccggaagccccattttcacatctaaatctcacaaatctctctcaagcttcgatctttcttctagagacgagctagtgcttccacaaaccctaaactatgtccggcggtttcttccggggtacttccgccgagcaggatactcggttttctaacaagcaagctaaattgatgaaaagccagaaatttgctccggagttagagaatctggtggatatcactaaagtgaagatggatgttatgaaaccttggattgcgactagagtcactgagcttcttggtattgaagatgaagtgctgattaactttatctatggtctgcttgacgggaaggtagtgaatggtaaggagattcagataacgctaactggattcatggagaaaaatactggcaaatttatgaaagaactttggacacttcttcta

SEQ ID NO: 85377 - DNA, 354 bp, Arabidopsis thaliana columbia
  unsure (1)..(354): unsure at all n locations
gaaggacaaatacaccagtttatttatattaattatatgctggagatgcatgttaataggtgatattatatgtattgtacatttttttatgcatcaagctaaatgttctcatcacccacaacattagtgttgttgcgtctcgaagacttaatgttccaacgagaccaaaagagatagctaagaaagttcaagagactaagaaccgctaaaagccagtaaaaatagatccgagcctgtccttatttaggtccgtttctccccgagccaccctttagagtcggcctnnggtgggaggtnttcttttttangcccgaaangggcaccgangttgaggtaaaccccaaggngntnggc

SEQ ID NO: 85378 - DNA, 483 bp, Arabidopsis thaliana columbia
  unsure (1)..(483): unsure at all n locations
agagggaaagtacatgatcaagtcagtgcagaaactcgcggttgtagccaacctttgccttactagaaacgcaaaggcgcgtccaaagatgagcgaggtgttagagatggtgacaaagattgtggaagcttcatcgcctgggaatggtggcaagaagccgcagctggttccactaaagagtcaagaaacttctagagtcgaggaagggaagaataagaaggttcttgatggtgctgaaggaggttggttagaaaagttgtggaacccaaagaatgtgagagcttgttgattcggggtctacgtcagaaacaaattagtgaatttcaatgcctttgtttaaatactgtaatttaacaaacttatgagttttcttacattccattttttggtgtgattattaaacgatttatttgatattccgagtgatttccgaagattacgnaatnanaatncnangggcgggccgcncctnngangncccaa

SEQ ID NO: 85379 - DNA, 509 bp, Arabidopsis thaliana columbia
acttttcttctctttctagaagaagaaaaccagagatacagagagattctctctctaccaaacccctggaaaaatctccagattcatcttccatagaccaaactaaactctgttcactgtactctctgtcattgtcctgtaagagaaattgaaaaccctaggagattttgaatttcgtaaaaccctaaacacaaaaatgaaaatcccagaaaaacccatcttcttaatcttcgtctctttgatcctagcttcgagcttaaccttcacagcgacagcgaaatcaacaatcgagccttgctcaagcaacgacacttgcaacgctttactcggctacacactctacaccgacctcaaagtctcagaagtcgcatctctcttccaagtagacccaatctctatccttttagctaacgccatcgatatctcttacccagacgtcgaaaaccatatccttccttcgaagctcttcctcaaaatcccaatcacttgctcctgcgtcgacggaatca

SEQ ID NO: 85380 - DNA, 452 bp, Arabidopsis thaliana columbia
catatattctcctcatcgtcttcttcgtcgtgacgtctctcctccatcatcgtcacttgcaaatccagctctccatttcaactccacatcttcttcttctttagatccctcatctttctctccttctcctccttcctctcattcttctacttcgtcttttcctttgttcatttctctctctctctctagcttccaccttcactttaacttctcattaccctaatttttcaagacatatcaattgaaattgaaaagttgctcagaactctaatcatccccttcgttctcagttcttccaatcttcaatttcataaaaaccctaattttaactggtttgttttttggaaattggatttgtctacgttttggaattggctggaaacgcagcgaaggataacaagaagactaggcttgtgccacatcacatacatcttgcagtgagaaacgatgag

SEQ ID NO: 85381 - DNA, 506 bp, Arabidopsis thaliana columbia
tcgctcgactctctctgtggacggcggctagtttcaaccaacagattcgagaatgcctaagcaaatccacgagatcaaggacttccttctgacagctagaaggaaagatgcacgatctgtgaagatcaagagaagcaaggatattgtcaagtttaaggtcagatgctcgaggtacctctacacgctctgcgtctttgaccaagagaaagccgacaagcttaagcagtctcttcctccaggtttgagtgtacaagacctttgaagatgaagcaaagttcttctgcagattggagttcctttggtgacgaatcctttgcatcattttataatttccttaggagagtttattttgtgtcgttaaatttatgttgagacttttcgagtttgagtgtgttttggatttaattcagtttgaaaaaccaaatacgttctcaactctggattcaatttggatttttattttcagaaaaaaaaaaatttttattaaataattattttattaatat

SEQ ID NO: 85382 - DNA, 481 bp, Arabidopsis thaliana columbia
  unsure (1)..(481): unsure at all n locations
gcatcaccgtcgtcgtcctcctaacatgctccatctccttcttctctccgacgaagaacattccaccaccaatagcatgcccccttcctcctccgcctctagatccgcctccaatcacagctcctcttcctcctcctcctcctcctctctccacctctgcaagcactctccttccgcgactntngacctcctcatcctaatcctcgtcctcttctccggcgctttcctcctctcctcttacttctcctatctnttccactccttttntctcctctcctctnacttcccttccctctcctccttgatcttctccgacgatgaagatctctcctcggatcccctccgggtttcctacttcttcggcttcggcggtcttcttcgccggtctcaattggggtttttgggaccttttggttgtggnaccaagatcggagggaagtgtnggaaatccaaggggtaaagggtttnaaggaaagnanat

SEQ ID NO: 85383 - DNA, 509 bp, Arabidopsis thaliana columbia
  unsure (1)..(509): unsure at all n locations
ctggagcgcctcctgagctaagagccatttgcgggctgtggaaagggctcgattcaaagtttcaataggagagctatggcgatccttgaatatncgttggttccgagagatccaaatcgaccatagtacccaagggaggattgtncctgcacctattccagttggtggtgctgattgccaaacgtctgcatcaaaggagcaagtgaagaagaggtgaaaggtggattcctcctctccgcagaaagggcaacgagcttctgcatttatccctcttctgcgtaagtnctctcccggttggtagagctcctcgcatagccttccacatgcaaaagttttgttttttgggaagtattaaccttccaaaatctttttggtccaattgaaatcagcagtaggtcctgcaaagaagttagggacatntccctttaaaaaaactttggtggccanttgaaccccnttacccttntttnnncncntttttggnntngccgggaaataattntttnnng

SEQ ID NO: 85384 - DNA, 583 bp, Arabidopsis thaliana columbia
  unsure (1)..(583): unsure at all n locations
cggacgcgtgggcggacgcgtgggagaggacacagcatctgaaatcgtacaagtatctgaagaacataaattaaaaatctttactttgtaataatggcatcagagttttgatcggagaatctaaaagtctcgacttttcgaattttgttggtcgctttcttaaggacatgaatctcgcggtggctagttttcgcggcaatttcggcgtcttgtcgcaatgcagctcatgttgtagtcttcagtttcagccttttgtagctgctacttccagtctcaattttgggcaaacaggaacatctcgaaggaagaaggatctgaagcttgaaagagttttcagaaagagagagactttggttagagtgaccggagacgcaaacggaaccagaaggcaatgatgatgagggataataaagaaggcaaagagagctctgcagatgatcctcctacaaaaatttcctactgagttgaattcacagtccaacggttgttaattaagcgcccggncaatnagggggaaacaaagcccattcagttncnaggccgggnaaattggggtacaggggttcccctncnggggnacctt

SEQ ID NO: 85385 - DNA, 426 bp, Arabidopsis thaliana columbia
  unsure (1)..(426): unsure at all n locations
ggacattaatctaacaaaatctgtcgatacaaaagagaccatgaagccaaaggatgaaggnggagaggaagaggatggagaaaaatccaaaaaaagcatctgacgttcatttaaacattcgattacctgatggtagtagccttcaggagaagttttctgtgacaagtatattgagaatggtcaagggttatntgaacagtaatcaaacaatcggactgggtgcttatgatcttgcggttccttacccacgtaaggtgtatactgaccaagatctggataagtctctatcccgngttgagattgttcgatagtcaaagcacttggtagtagttccccggaaaaagagcaaccgtctatcaaaggggaccatcttnctcggngtntaacnaacaaccacagnccctaatagtggcggttacttttnta

SEQ ID NO: 85386 - DNA, 499 bp, Arabidopsis thaliana columbia
  unsure (1)..(499): unsure at all n locations
caaaagaacaaagatgggaatcattggtaagagtgtttctntaactctntttgcacttttntgcttcacttcctctgttttcaccttaggagtgaatcaacctggttcatcagatcccttccatagccttccccaacaccttcccctacctccaatcaaactaccaactcttccaccggccaaagctcccatcaaactaccagcctacccaccagccaaagctccgatcaagctaccaactctcccaccagccaaagctccgattaagttaccaactctcccacccgatcaaacctccctgttctcccaccagtttaccctcctaagtacaacaagaccctagtgggcagttagaggtgtggtctactgcaaaggttgcaagtacggcgggcgtcaacaacgtccaagggggctaaacccggtaaagatgcggtggtgagacttttgtgcaagacnangaaggactcaattatcggngcnaaaggnnggncaagaacgg

SEQ ID NO: 85387 - DNA, 1051 bp, Arabidopsis thaliana columbia
  unsure (1)..(1051): unsure at all n locations
ggtgtacgtcttttgcataagaagaaacagagagcattatcaattattaacaattacacaagacagcgagattgtaaaagagtaagagagagagaatggcaggagaggcagaggctttggccacgacggcaccgttagctccggtcaccagtcagcgaaaagtacggaacgatttggaggaaacattaccaaaaccatacatggcaagagcattagcagctccagatacagagcatccgaatggaacagaaggtcacgatagcaaaggaatgagtgttatgcaacaacatgttgctttcttcgaccaaaacgacgatggaatcgtctatccttgggagacttataagggatttcgtgaccttggtttcaacccaatttcctctatcttttggaccttactcataaacttagcgttcagctacgttacacttccgagttgggtgccatcaccattattgccggtttatatcgacaacatacacaaagccaagcatgggagtgattcgagcacctatgacaccgaaggaaggtatgtcccagttaacctcgagaacatatttagcaaatacgcgctaacggttaaagataagttatcatttaaagaggtttggaatgtaaccgagggaaatcgaatggcaatcgatccttttggatggctttcaaacaaagttgaatggatactactctatattcttgctaaggacgaagatggtttcctatctaaagaagctgtgagaggttgctttgatggaagtttatttgaacaaattaccaaagagagggccaattctcgcaaacaagactaagaatgtgtgtgtttggttagcgaataaagctttttgaagaaaagcattgtgtaatttagcttctttcgtcttgttattcagtttggggatttgtataattaatgtgtttgtaaactatgtttcaaagttatataaataagagaagatgttctcnnnnnnnnnnnnnnnnnnnnnnnnnnnnnnnnnnnnnnnnnnnnnnnnnnnnnnnnnnnnnnnnnnnnnnnnnnnnnnnnnnnnnnnnnnnn

SEQ ID NO: 85388 - DNA, 425 bp, Arabidopsis thaliana columbia
aaatgaaactacaaaaacatccaactattaacatgacaaatcgtatattatccatttttaaaagttatggtgaggacatgaacatgtttcaaattaagtgtacctttcaagatttgtagtgttcaacacaagtcacaataacttaaagaaaaaatgtaattttcttgaaaaagatacataataatctaacgtacaaaaatgaaaaacagacatggcaagagcattagcagctccagatacagagcatccgaatggaacagaaggtcacgatagcaaaggaatgagtgttatgcaacaacatgttgctttcttcgaccaaaacgacgatggaatcgtctatccttgggagacttataagggtaattattacttgttatagtctcttcaaagacttcaatcttcagaaaaaaaaaaaaaagagggcg

SEQ ID NO: 85389 - DNA, 1195 bp, Arabidopsis thaliana columbia
  unsure (1)..(1195): unsure at all n locations
agctctctacgactcactatagggaaagctggcacgcctgcaggtaccggtccggaattcccgggtctgacccacgcgtgcgcggtatcccacaggactacaggcacatggaaggcgctggggtcaacacttacatgctaatcaacaaagctggaaaagctcactatgtgaaattccactggaagccgacttgtgggatcaaatgcctgtcggatgaggaagctatcagagttggaggagccaatcacagccatgccaccaaagatctctatgactcgatcgcagccgggaactatccgcagtggaatctcttcgttcaggtgatggatcctgcccatgaagacaaatttgacttcgatccgcttgatgtcacanagatctggcctgaagatatcttgcctttacaacctgttggtcgcttggtcttgaaacaaaaaacatcggacaaacttcttttatgaagaacggacagaattgcatttctgtcctgcttcttgtggttccaggcatccactatccagatgataagttactcagacccggatcttctcctacgctgatagtcagagacaccgtcttggaccaaactatctgcaactacctgttaatgcccctaaatgtgctcaccacaacaatcaccatgatggttttatgaacttcatgcacagggatgaggaggtcaattacttcccttcaaggttggatccagttcgccatgccgaaaaataccctacaactcctattgtctgctctggaaatcgtgagaagtgcttcatcgggaaggagaacaacttcaagcaaccaggggagagataccggtcctgggattcagacaggcaagaacgattcgtgaagcgttttgttgaagcgctttcggagcctcgtgtcacgcacgaaatccgcagcatttggatctcttactggtctcaggcagacaaatctctgggacagaaactagcaactcgtcttaacgtgaggccaaacttctgaatgatatcatctctaaagactaagtgaaatcctataaactcaatatgctcctcttacggtttggtttctaagtaatctcgtttattgacaatgaaacgcttaaagaagggtactagttcctgtttaaaaaaaaaaaaaaaaagggcggccgctctagaggatccaagcttacgtacgcgtgcatgcgacgtcatgctcgtttata

SEQ ID NO: 85390 - DNA, 2053 bp, Arabidopsis thaliana columbia
  unsure (1)..(2053): unsure at all n locations
atgatcttnnnnnnnnnnnntacgactcacctcnagggagaagaacgtacgcctgcaggtaccggtccggaattcccgggtcgccacgcgtccgcaaaaaaaaaatcgacaacagtgcagacacacgccgatttgcgagatacacacagtctcacctaaaaatcgcaaaagaagaaaaattcggatcaaaattgtcttcaagcatcatggatccatacagggttcgtccttcaagcgctcatgattcccctttcttcactacaaactcgggtgctcctgtctggaacaacaactcttctttgactgtcggaactcgaggtccaatccttctggaggactatcatctgcttgagaaactcgctaactttgacagggagcggattcctgagagggttgttcatgccaggggagccagtgctaagggtttctttgaagtcactcatgacattacccaacttacttctgctgattttcttcgaggacctggtgttcagactcctgttatcgttcgtttctcaactgtcatccatgagcgtggcagtcccgagactctcagagatccccgtggttttgctgttaagttttacaccagagaggggaactttgatcttgttgggaacaacttccctgtattcttcgtccgtgatggaatgaaattccctgacatggtccatgcattgaaaccgaatcccaagtctcacattcaggagaactggaggatactggacttcttctcccaccacccagagagtttgcacatgttttcatttctctttgatgatctcggtatcccacaggactacaggcacatggaaggtgctggggtcaacacttacatgctaatcaacaaagctggaaaagctcactatgtgaaattccactggaagccgacttgtgggatcaaatgcctgtcggatgaggaagctatcagagttggaggagccaatcacagccatgccaccaaagatctctatgactcgatcgcagccgggaactatccgcagtggaatctcttcgttcaggtgatggatcctgcccatgaagacaaatttgacttcgatccgcttgatgtcacaaagatctggcctgaagatatcttgcctttacaacctgttggtcgcttggtcttgaacaaaaacatcgacaacttctttaatgagaacgaacagattgcattctgtcctgctcttgtggttccattcatccactattcagatgataacgtactccagacccggatcttctcctacgctgatagtcagagacaccgtcttggaccaaactatctgcaactacctgttaatgcccctaaatgtgctcaccacaacaatcaccatgatggttttatgaacttcatgcacagggatgaggaggtcaattacttcccttcaaggttggatccagttcgccatgccgaaaaataccctacaactcctattgtctgctctggaaatcgtgagaagtgcttcatcgggaaggagaacaacttcaagcaaccaggggagagataccggtcctgggattcagacaggcaagaacgattcgtgaagcgttttgttgaagcgctttcggagcctcgtgtcacgcacgaaatccgcagcatttggatctcttactggtctcaggcagacaaatctctgggacagaaactagcaactcgtcttaacgtgaggccaaacttctgaatgatatcatctctaaagactaagtgaaatcctataaactcaatatgctcctcttacggtttggtttctaagtaatctcgtttattgacaatgaaacgcttaaagaagggtactagttcctgtttgtaatcttcttttcaaaatattaacgattattttctaaggcaaataaataaaaagctatgactaatatagcttagtaaacaagtatcactatcatccatttggttcgactttaaaaatggatttttatttgtattttaatcttctgcatctatgacgtgagcttatagttggaattttattggggtctaatgtcagacgcacgatcttgataaaaaagttttatgtctgtccatattttgata

SEQ ID NO: 85391 - DNA, 1463 bp, Arabidopsis thaliana columbia
aaaggagatgaaaagcttcaatctcaaaacatagcagctctctcaataaaccaaacccaaatgcaagctgtgtagagagaaacggagtgaggaaggaaggagatgggaggggtgacgtcatcggtggcggcgaagtttgccttcttcccgccgagtccaccgtcttacaaggtggtgaccgacgagctcaccggactgttgcttctcagccctttcccccaccgcgaaaacgtagaaatcgtaaagcttcggaccaggagaggcacagagatcgtgggcatgtacgtgaggcatccgatggctacctccacgctcctctactcccatggcaacgccgccgatctgggacagatgtatgagctcttcattgagcttagcatccatctcaaggttaatcttatgggatacgattactccgggtatggacaatctactggaaagccgagtgagcataacacgtatgctgatatcgaagctgtttataagtgtcttgaagaaacctttggctctaagcaggaagatgtcatcctctacggccaatctgtaggcagcggacctacgttagatcttgcttcccggttgcctcaacttagagccgtcgtccttcacagccccattctctccggtttaagagttatgtattccgtcaagaaaacctactggttcgacatctacaagaatatcgacaaaatcccatatgtcgattgcccggttctcatcattcatggaacttcggatgaggtagtggattgttctcatgggaaacaactatgggaactctgcaaagaacaagtacgagccgctctgggtgaaaggagggaaccactgtgatcttgaacactaccctgaatacattagacacctcaagaagttcatagcaacagtagagagattaccatgtccgaggatgagcagcgaccaatcagagagagtgagagatgcgcccccgaggagaagtatggacaggagagtgaagccgaggcagagcacagagcgtagagagaaagagaagcccccaaagagtcagtcgaagatgagtagcagcagcagcaagctcaagatctcgtttgatcaacttgatcgctcgcggaggagcgttgactgccatgaaaagactcggaagagcgttgaccagattgagagggggaggaagagtgtggataggttggatagagttcgctccgagtaaaaaccacacactcacactcacacacgtataataggtatgtagatgaaaagagtacataactgtttctatttaccgaacaaaataacatgtggatgtcgctcctcagattattgatttgtaatcttttatgcaatttgggatctctctcgccatctccttttgaatcaacaaccttttgtggtgggcttggttttaaaaaaaacaaaaataaataaaaaaaataaagggcggccgctctagaggatccaagctcacgtacgcgtgcatcccacgt

SEQ ID NO: 85392 - DNA, 469 bp, Arabidopsis thaliana columbia
  unsure (1)..(469): unsure at all n locations
gtaagtgtgagaaatggattcgtgatgatgacaattactcagaagggtcgagggcaagatggtggttgaatagacttataggaaggaggaaaagggtcaaagtagaatggccgtttccttttgtggaagagaagctgttcgtcctaactcttagcgccggtttagagggttaccatatcaatgttgatggaaagcatgttacttctttcccttatcgcactggtttcaccctttgaggatgcaacagggctaacagtaaaccggagacaatttgatgtccattcctgtttttgattgcctctcttgccaacaatcacaatcctaagtttttgcttccccaaagggcattcccgcaatttttcaaatagagattgccaggcttccctgtaaggttcccccactgggccttttgggggaccttttttanggcatttcttttcccgaggnaattnaatttctntgttgcgga

SEQ ID NO: 85393 - DNA, 721 bp, Arabidopsis thaliana columbia
  unsure (1)..(721): unsure at all n locations
ccagaaccggtttcgactccgaaatccaatcctcaaccggaacaagtaatgcaacagagtaatctcccggttaactcgcaatggcaatatgcccctggcccaggccaacaggttcattaccagggtcataccattcaccaatcaccggtttattacgttcctggttcggttccgggtaatcatatggtccagcaaggaaatcatatggttcaaccgggtaatcatatggtacaaccggttcaaatgccgggtcagtatcttcaacaataccatcatgtaccaatgggataccaccaacctcagactcatcagatggctggtccgggtcaaggtatattggtggaccggttaggccggttatgatggccagttgatgggatgaaccggacgggttatttttggaatgaaaacacccggtccggttcaaatgtatcagcatcacactggtatggttgttcctggtgtagaaggacaacaacaatacaggacccgaaacggatttcggatacggggtcgggcttcttagctgtttgaaggaggaatatgaaaaaattatcacatccgggggtttccgccttttcaattggagtcgttcttattcgttactggtgtgaaccttgggtattatttttgggtttacttttggaaaatttatttttgggggtaataattttgtttcaaatttatggcngaaacccctatnatacctttnactttcttt

SEQ ID NO: 85394 - DNA, 304 bp, Arabidopsis thaliana columbia
  unsure (1)..(304): unsure at all n locations
gcttaacaacttcgggagtagtgctgccggagttaccgtcggaaagtacatgctcaccgaaacttgtagtgttagtgtttgacnaattaagaggtacttaacggtgacggtggtatcggtcacggattttttcattattaataacgtcatatcttttatatataatcccgtagtagttaagttttataactttttttttcctacgtcatagagaaataatatcaagaattgcaatcggttgcgttattgttatgacgagctgtaaaagattcaaaggaaacactnaaatatagtaaaagacaaa

SEQ ID NO: 85395 - DNA, 1271 bp, Arabidopsis thaliana columbia
ccaaaacacgtcctcaagacgctatttatccatttaagtctcttctcttttcgtcctcataatactcttatagaattccgggtttttcattcataacaaaaaatgggttttataactcgatttttagttttcatgtcactcttcaccagtttggtttctggatttgctctacaaaagcttcctcttatacagttcgacgaaggttacacacagctctttggtgaccagaatcttattgttcacagagatggaaaatctgtccggttaacgcttgatgaaagaaccggttctggatttgtctcaaatgatatttacttgcatggcttcttcagttcctctatcaaattgccagcagattactctgcaggagttgttatcgccttttatttatcaaatggggacttatatgagaagaatcatgacgagattgattttgagtttttggggaatattagaggcagagaatggaggattcagaccaatatatacggtaatggaagcacacacttgggcagagaagaaagatacaatctttggtttgatccaacagaggatttccatcaatacagtatcctttggtctctatctcacatcatattttatgtagacaatgttccgatcagagaagtcaaacgtacggcgtcgatgggcggtgacttcccggcgaagccaatgtctttatattcaaccatatgggatggttccaaatgggcgactgatggaggcaagtacggtgtaaattacaaatatgccccttacgtctctcaattcactgatctgatcctccacggctgcgccgttgaccccaccgagaagtttccgagctgcaaagatgaagcggttcagaatctccggctagcatcggagataacggagtctcagaggaacaagatggagattttccgacagaaacacatgacttattcgtattgttacgatcatatgaggtacaaggtggttttgtcggagtgtgttgtgaatccggctgaggctaagcgtctcagggtctatgatccggtcacgttcggtgggattcctcacggccaccgtcgtgggaagcatcggagcaggagccgattagctcgaactgagtcgatatgaatcggtgtatattgttcggctagagggcatttttggcattttctgtcttgtataggaatactatgaattatggactgaataatggaatgacaccgctatattttgatttcctccattttatgaacattatcgttttaacataataataaaatttcatttttctataagta

SEQ ID NO: 85396 - DNA, 489 bp, Arabidopsis thaliana columbia
  unsure (1)..(489): unsure at all n locations
acaaaatggtgaccttaacttcatcttcttcaactccaaacgtatcttttgatttcatgatgaacaataataataacagtaacaatctctatggtcctttctcttcttcttctacttctttctcttacttgacaagcaaggaagatgctctcacccagaagaacctaatgagtggtatcaccaatgatgttcttggaattaacaagaaagcttctgaagatttggagatcagtgtgtttggagctgagaagtacttcaatggagatatggattctgaccacagtcctagacttgtgtctcctcttgccagatccagaaggttccaataggggagaatcttttgttnggtccgtagcaaaggttcgaaggaattcccccgggaaactccctaggcctccggtctggatctcccaggtttggataggccagnagtttntttgcttnaangngaaatnttttggggnnggaggagggccntncnggaaaact

SEQ ID NO: 85397 - DNA, 410 bp, Arabidopsis thaliana columbia
ctcaattttttacgtttttatccgcttgtttgatcgttttctcacgtaatcaaaccaaaataacacagatctaccactaaaatacatattcatgatcaaaaagaagataattaagtagattctcatgaacgccgatttgttcaccgattgagccaaaatcgcggcggtccacgcagaaatagcgcttttttcgacgcctagtcgaccgattagtccgatgtttagaagcgtttgttttagagaataattatgccttcatttttgtcaagtttgtttggtttgggcattcaagcctcttttagaataggtttggttcttcctcgagtagtagcatctacagagagacagatttcctctacggttttaaaaagagcttctgaaagtgtctctttttcattcgctccgtacat

SEQ ID NO: 85398 - DNA, 920 bp, Arabidopsis thaliana columbia
  unsure (1)..(920): unsure at all n locations
caaagcccaccnaaaaagaaaacaatcacttagcaatggcgatgatcagttactccaccattgtggttgctctgcttgcttcttttatgatttgctctgtttccgccaattttcaacgagacgtagagataacttggggagacggacgtggacagatcacaaacaacggcgatcttcttacactctctctcgacaaagcttcaggctcaggattccaatccaagaacgaatatttgttcggtaaaatcgacatgcagatcaaactcgttgccggaaactccgctggaactgtcaccgcttactatttgaaatcccctggatctacatgggacgagattgactttgagttcttgggaaacctaagtggtgatccttacacacttcatactaatgtctttacgcaaggaaaaggcgatagagaacaacaattcaaactctggttcgatcccactagtgatttccacacttactctatcctctggaacccacaacgcatcatattctccgtggatggaactcccataagagaattcaagaacatggaatctcaaggaactctgtttcctaagaaccagccaatgagaatgtactctagtctatggaacgctgaagaatgggccacaaggggtggtctcgtcaaaaccgactggtctaaagctcccttcactgcttcctaccgcggcttcaacgaagaagcttgcgtcgtgatcaacggccagtcttcatgccctaacgtgtcaggacaagggagtactggttcgtggttgtctcaggagctagactcgacgggtcaagaacagatgagatgggtacagaataactacatgatttacaattactgtacggacgctaaaaggttccctcaaggtcttccacgcgagtgcttagctgcgtaaagcttttaaacaaatgatccaaag

SEQ ID NO: 85399 - DNA, 770 bp, Arabidopsis thaliana columbia
  unsure (1)..(770): unsure at all n locations
gggaagcacgcacgcctgcaggtaccggnccggaattcccggttcgacccacgggtccgcgcacgcgtccgtacggctgcgagaagacgacagaagggggagcaacaatggattttttcgacgaagacaggcctagattcgttttccaatctcgtccttcttcttctcacacggcggaggaagaagaagaagctagaatccctaacaagcttttcatttcaatctccgtctcaatctccctcatcatattatctctctccttcttctacttcgaatctgaacctgccaaatcgctactattatggctttccctctctttcctcgtcggtcctttcgctcctagctcgctcaccggaggtaagattcgcgtcggttatggtcagatcttggagccagaacagattcacgatgagtcatccacggataacgaacgtgaatccaggaggaaatcggtgaataagcgatctaaaggttcgacgaagagcgataatccgccggaaaatgcttctccggtgactgaagtttcgaggaaagtggtgattccncagtctaaggagagtggatctntgaatnaaactaaagattggnctnctgaagagatcgaaattttaaagaagcagttgattaagcatccagctggtaaacctgggagatgggagacggtggcttcagcgttcggaggaagatacaagacagagaatgtgattaagaaggcgaaagagataggtgagaagaaaatctatgagagtgatgattacgctcagttttta

SEQ ID NO: 85400 - DNA, 761 bp, Arabidopsis thaliana columbia
  unsure (1)..(761): unsure at all n locations
ggagcgtacaaagatccgcctgtatattgtgtcctcacgcagtatttacctgaaggatctttaagatcttttctgcacaagcctgagaataggtctcttcctttgaaaaagcttatagagtttgctatagatattgctagagggatggaatatattcactcacgacgcataattcatcgggatcttaagccagaaaatgtattgatcgacgaagaattccatttgaagatcgctgactttggcatagcgtgcgaggaggagtactgtgacatgttggctgatgaccccggaacatataggtggatggcacctgaaatgataaaacggaaaccacatggacgtaaggccgatgtatacagctttggactcgttttatgggaaatggtagctggagcaatcccatatgagggccatgaatccctattccaaagctgcttttcgcagtcgtaccataaggaccattagggccagctttccccgggagggttgtcccgtagccattgaaagctctgttagagcagttttggtcggtttcaccccgtaaggggcccgtgttcttgcagatagtgcaagtcctttnaccagtttcgntatcacttngaccgtnaaagggaccntnatctttntttgggcaanacttttaaggcccaaggaaaggcttaaccttggtccnaaggtttgnccctncncggagnngagggggtgaaaaaaaaggcctttgnggtaccttccagcctattttttnaanaaaagntttttnc

SEQ ID NO: 85401 - DNA, 695 bp, Arabidopsis thaliana columbia
gacaatacccgatgatggatctcccgtcgccatggccatcgattcttccaccgccgtaaccgtcgccaccaccaccactcgaagagttcctcctccgtgctggaccgacgaggaaaccgctgcgcttgtcaatgcctacaaggataaatggttcgccctccgccgcgggaacctccgtgcggctgattgggatgacgtcgccgcggctgtttcgtcctcgtccaccgttggaggtccgccgaaatcagcaatccaatgtcgacacaagatcgagaagcttcggaaacgttatcgcggcgaaaaacaacgagctcttaatcgaccaggcaagttctcttcctcttgggatttgttccctatcttggatgctatgggattcgctccggtgactccggcagccgtagaaacttacgatcccgatgtggatcatgatgatgagagtaacggtttggatggatttagggttagatcgaagaggtctgggaagtttagcggtggttactctgattcacctcgagaagtaggagatggatatggggtttagatctagggcaaggagtaacatgaaaatgttgggtggtttcaagtctgagtttgattcagatcacgattcaggaagtggatttggattgaaaaggaaatacaatgggaatccaaaggttagtgctgatttcgatgctgattctgatgatgag

SEQ ID NO: 85402 - DNA, 583 bp, Arabidopsis thaliana columbia
  unsure (1)..(583): unsure at all n locations
cacaaagctctcatcttctttaagtttccaaactcacccccacaactttcatttctatcaaccaaacccaaatgggtccaagttcgagcctcaccaccatcgtggcgactgtncttcttgtgacattgttcggttcggcctacgcaagcaacttcttcgacgagtttgacctcacttggggtgaccacagaggcaaaatcttcaacggaggaaatatgctgtctttgtcgctggaccaggtttccgggtcaggtttcaaatccaaaaaagagtatttgttcggtcggatcgatatgcagctcaaacttgtcggccggaaactcggccggcaccgtcaactgcttactacttgtcttcacaagggggcaacacatgacggggtagnctttgagtttcctaggtaacggggcagggaagccttatgttcttaacaccaatgtcttttcttcaaggggaaggggccaaggggcaacagtttttttttttggtgtgtccaaccaagctttcaaaatttntccattntttgggccnaaaaaaaaaattttttggggggaanttcnccttttnggggnttanaattttt

SEQ ID NO: 85403 - DNA, 1138 bp, Arabidopsis thaliana columbia
aacacaaagctctcatcttcttttagtttccaaactcacccccacaactttcatttctatcaaccaaacccaaatgggtccaagttcgagcctcaccaccatcgtggcgactgttcttcttgtgacattgttcggttcggcctacgcaagcaacttcttcgacgagtttgacctcacttggggtgaccacagaggcaaaatcttcaacggaggaaatatgctgtctttgtcgctggaccaggtttccgggtcaggtttcaaatccaaaaaagagtatttgttcggtcggatcgatatgcagctcaaacttgtcgccggaaactcggccggcaccgtcactgcttactacttgtcttcacaaggagcaacacatgacgagatagactttgagtttctaggtaacgagacagggaagccttatgttcttcacaccaatgtctttgctcaagggaaaggagacagagagcaacagttttatctctggttcgacccaaccaagaacttccacacttactccattgtctggagaccccaacacatcatattcttggtggacaatttacccattagagtgttcaacaatgcagagaagctcggcgttcctttcccaaagagtcaacccatgaggatctactctagcctgtggaatgcagacgattgggccacgagaggtggtctagtcaagactgactggtccaaggctcctttcacagcttactacagaggattcaacgctgcggcttgcacagcctcttcaggatgtgaccctaaattcaagagttcttttggtgatggtaaattgcaagtggcaaccgagctcaatgcttatggcaggaggagactcagatgggttcagaaatacttcatgatctataattattgctctgatctcaaaaggttccctcgtggattccctccagaatgcaagaagtccagagtctgatgaacacatattacctcatatttctctgcttgtttgatgcaattcttaaattcctctgttattccattgtacattgtcaagatcaataaagcattcctggtttcaaaataaaaaaaaaaaaaaaaacaaagggcggccgctctagaggatccaagcttacgtacgcgtgcatgcgacgtcatagtgttctatagt

SEQ ID NO: 85404 - DNA, 494 bp, Arabidopsis thaliana columbia
taacttttgttgtttagttaaaaaagtcttctcatcctaaaaagtggtgtaaaaaatgagcgaatttctcatacacgtgaaatcggatccaatcgatgattccggcgaggaggtttctcttatctccatttgtcggcgtcacgtttatcgtcgttctcgtctctctctacttcagatcttccttcaagtctccacaacaccaatatcaaaagaggttattttctgctgaagaattggcattgtataatggtactgatgaaacattacctatactcttagggattcttggatctgtgttcgatgtgacgaaaggaaaatttcattacggtagtggaggagggtacaaccattttgctggaagagacgcttctcgtgcatttgtttctggcaactttacaagagatggacttacagattcgttacaagggttatctagcagtgaggtgaagagcattgttgactggcgaggtttctactccaggacctacactcct

SEQ ID NO: 85405 - DNA, 554 bp, Arabidopsis thaliana columbia
  unsure (1)..(554): unsure at all n locations
atgatactccnnnnnnnnnnnnnnnnnnnnnnnnnnnnnnnnnnnnnnnnnnnnnnnnnnnnnnnnnnnnnnnnnnnnnnnnnnnnnnnnnnnnnnnnnnnnnnnnnncggccgcttcctcgcggcccgctcttccagaattctcttaaagtttcctactttcctggaatttcgtcctcaatctctcaagtttcatcggttttgatttgggtttgatcggaaaagtcatgggtaattgttgcggaacagcaggatcattggctcaaaacgataacaaacccaaaaaaggaaggaagaagcaaaaccctttctcgattgattacggtcttcaccacggtggtggagatggaggtggaagacctcttaagcttatcgttttgaatgatccaacaggtcgtgagatcgagtctaaatacacgttggggagagagctaggtcgtggagaattcggtgttacgtatctatgtactgataaggagacagacgacgtttttgcttgtaaatcgattttgaagaagaagctgaggacagctgttgatattgaagatgttagg

SEQ ID NO: 85406 - DNA, 639 bp, Arabidopsis thaliana columbia
  unsure (1)..(639): unsure at all n locations
gttttgtcactatacatcatctatctgtcttctcactgacttttttttatatgccaagtgatcatcatacaggtctgtctctaattatctgggtgattcagaatttgtactcacagtaggtttcttgcagagaaaacaactgttcaaaccctaaacctccaaatcatttcttccctgcatgaaagatggaaactggagttgtcaccatccaagaaccagtctctacaaagactgatgttgggggagttcctgcagaagtaatacttgaaaaatcatccatggaagtacaaaaggtaaacctgagtactgttcttgatgatgagatcacaagtggcgccgatcgtggaaacaatattattacgggagaagcagatgttgcagaggttgtaaatggttcaggggataaagaaaccgaagaattaaaacgcgaaaatggagaagcgacaaagactatctcggttctagatgacagtaagatcgttaaagatgatcaagaatctattgtcgttccgtgaacctcaaagcctcaacgaaaaaaaaggagatgggaaggttatcttaagggaggggctttnngannttnnnanangagggnntcccccgggnancccaaangggtttttcccaaacccgggnttt

SEQ ID NO: 85407 - DNA, 522 bp, Arabidopsis thaliana columbia
  unsure (1)..(522): unsure at all n locations
nnnnnnnnnnnnnnnnnnnnnnnnnnnnnnnnnnnnnnnnnnnnnnnnnnnnnnnnnnnnnnnnnnnnnnnnnnnnnnnnnnnnnnnnnnnncggccgcaaagaacttcttcaacttctctcctcaacttttaagtattccacacatacaaacacacacacacacttgacttttctcatataatttcgacagctcgtgaaggacaaagacatggagccttctcggaggagaatgaccagagacatgttgcttctaatcgtaacgatggcatggctcgtaaccggagacgaaggaggcataaagcaagaggagcgactgtttaatcttgggaagcttgagatgttcgttgacaagcttcctcatataccaacacttcatggctaccacttcgtcaatggcttcctcaaacccaaatctcttcacataggcatgttcttcaagaaatggaaattccacagagacttgcctgccacgccagtgttcgcatatggtacatcaaagcgttcagcaacagttcctggg

SEQ ID NO: 85408 - DNA, 743 bp, Arabidopsis thaliana columbia
acccacgcgtccgtgaacaaaagaggagctcctcttcaggaagtgacaatactggtgggataactttcaaggccgatggcgaggatctcaagggaaatgattgtgtccgtgcccaacctgacaacggaatggacgaggaacaaagacaaaagcggagacgcatagaagttgctttgatagagtatcgtgaaactcttgaggaacaggggatgaaaaaccccgaagagatagagagaaaagtagaaataaacagaaagaggcttgaagtcgattatggcttatcaggacctaacgagggcaacagaaatcagaaatcaatactagagcggaaggagaagcgtgaagattcacaagagtcctctaaaaagcggcaccgtggggaaaacaagagccaaagtccgccacggaaatcatcaacgagggagagagatcatgacttggggagagacagggatagagagagacacagagacagagataggcaacatgatttgaacagggatcgagatcgacgtgaaaagagttcaagccacgatcgagacgataatgatagaagcaaagagagagacagggattggcgcagacgaggcacgagatgataatgatgattatgcttgttctcacctcatggtctgttctcaagattttaaccttttgtgtttttaaatccagaagatattgtagaacttgttctcagacacagcttgtaattttgtatcccaatttctgaaagatttctccct

SEQ ID NO: 85409 - DNA, 568 bp, Arabidopsis thaliana columbia
  unsure (1)..(568): unsure at all n locations
ctgaacaacgtcaagtgtttggacccgatcaaagatggatcaacccgacccgaaaaatggctctggtctgattctctccgccactgaaccgctgcgatcgtttctcgctctcgcctccggtgatcgtcgtctctccgacgagctcagaggaattgcttccgatcttcgctcgaagaacaccattccgtacaaattgctccgcgctatatggaccggatccgatccgtcgaccagaccggatttgttgggacttttctccggctccaattttcgtcttcaccagtcccaaacccagagaaaagagcgaagaacttgaaactgagatttagtgaagctcagagaaatagcagagaggaaggggtatgctgagcttgttaaaggtataacaccaaggaacaagtcgnagagctttcttttttacaagnccagntcggttttgggttanatgttggnttaccatgtcactggntatttggttgntaggttccttagagtttntnaacgaanccngttagnntntggngggtttngctagtttgggtntttgaacgtttttttaaaaacggta

SEQ ID NO: 85410 - DNA, 427 bp, Arabidopsis thaliana columbia
  unsure (1)..(427): unsure at all n locations
gaaactaattttccatatagccattggaatgatccatccagctttattgataacttatcctcacttaaaagagaagccgaggacgatggaaaattgtttctcggagctcagaacggagagtccgggaatcgtatgcagttactgtcgcatcatttgagcctaccaaagtcatcatcgacagcctcggacatggtttcagtggataagtatcttcagctacaagattctnttccttgtaaaatcagagccaaacgtggttgcgctacacatcctcgaagcatccgtgaacgggtaagaaggacgcgggtaaagcggagcgnatttngggaggttcaaagagntttttcctaaacattggncaaggcaaacccaacactttcgggttattntttggntttagcttntggggttncaatcnaagnntttt

SEQ ID NO: 85411 - DNA, 555 bp, Arabidopsis thaliana columbia
gttttaataatcttttatcatacaatttgttctctctctctctctctctctctctaccataaagcaaatgtgatcagagacaaagcatacaaagaagttcctcattcaaaaaagatttctcagccatcaaaattctctttctcttcatccaacaaaaaaaaagcatacctctttttcttccatatagataagttaattaagaaaacgaattatcaggttttgtttcggctgatctgaggaagttcatctatggatacggctcagtggccacaggagattgtagtgaagcccttgggagaaatagtaacaaacacatgcccaaagccgcaaccgcaaccgcttcaaccgcagcagccaccgtcggtgggtggagagaggaaggcaaggccagaaaaggatcaagctgtaaactgtccgagatgtaactcaaccaacacaaagttttgttactacaacaattatagtttgacgcagccaagatacttctgcaaaggttgtagaaggtattggaccgaaggcggttcgcttaggaacattcctgttggcggtggctca

SEQ ID NO: 85412 - DNA, 1140 bp, Arabidopsis thaliana columbia
ggaattcggcacgaggatgaggtcgtttgtctcgttgatttctcttctccttcttctctcattttcttcatctgttctctcaaccaaaaagtcatcatttcaaaaacttccggtgccaggaaacagaacaggccctgaagctttcgcttttgattccaccggaaaaggatttctacccggagtcaccggcggtaaaatcctcaaatatcttccaaagaaaggttatgtcgactttgcccagatcacaaactcttcgaagtcttcgttgtgcgacggagcacttggaaccactaacgtcgaaaaatgtggtcgaccagccggaatagccttcaacacgaaaacaggtgatctttacgtcgcagatgctgcattgggtctccacgtcatccctcgccgtgggggtttggctaagaagatcgccgacagtgtcggcggcaagccctttttgtttcttgacgggcttgacgtagatcccaataccggcgtcgtctatttcacttccttcagctcaacatttggccctagggatgtgttgaaagcagtggcaacaaaagactcgaccggtaagttcttcaaatacgatccatcaaaaaaggtcgtgactgtattgatggacggtcttagcggctcagccggatgtgccgttagctcagatggttcattcgtgctggttggtcagttcacaaaaagtaacatcaagaggtattggatcaaaggatccaaagctggtacttctgaagacttcaccaactcggtctcgaaccctgacaacatcaagaggatcggttctactggaaacttttgggttgcttcggtcgtgaactcagccaccggaccgacaaacccttcggcggttaaagtcagttctgccggtaaagtgcttcagaccattcccctaaaagacaagtttggggatactttggttagtgaagttaacgatcaaaggacagctttatatcggagctctttttgggcctttcgccggaattccttaagctttaaagtgaacatggtattagtatgggttagaattaaagtgattgaatcgaaataaatatggttacaaagtcttgacggatcaatgtacgctcatgttgattctgttcaaataaatatgaattttttttaaagaaaaaaaaa

SEQ ID NO: 85413 - DNA, 1613 bp, Arabidopsis thaliana columbia
  unsure (1)..(1613): unsure at all n locations
nnnnnnnnnnnnnnnnnnnnnnnnnnnnnnnnnnnnnnnnnnnnnnnnnnnnnnnnnnnnnnnnnnnnnnnccacgcgtccgcccacgcgtccgcccacgcgtccggtttcagattccccacagattttttagcacaaatcaaaatgtttctttttcgaaaatttatttaaatgataacgaaatttacatctccatttcgattgattcgcttcttcaactctctctcttcttcttcttctatttgcttctgtgaaaccctagattttggtgtgaggaagaagacttcaatggcggaagaagtagcagagaacgttaacgcagtcccggtttcggaagacgagctttacggatttaaacgatcggagatgtacagtggtactctcgccggttccgttggtccgtacggtcgtcatgttttcctttgttacaagagtcatgagacttggcttcctcgtgttgaaactgaaggacttcctcagcgtttcgcgaagttgtttaaggatcgtaaagctgatttcgctgttgagacgaagcttacggtgtgtggtggtggtggtgaatctgatggagatgtgttgattttcccggagatggttagatacaaggcgattcaggacacagatgtggatgcttttgtggaagatgtgcttgtgaaaggaaaaacatggacttctgggattcangaagagttgacctggtcctttgtgtttgtgtgcgctcatggtagccgagacaagagatggtggtgtttgtggaccagttcttatggagaagttcgagcagcgagatagttcacgtggactttcagacaaatcttttgtttgccgtgttctcatattcgtgggcacagtatgcttgaaatttgattgtcttcagccctgattcagctggaaatgtttctggccattggtatggctatgtgactcctgatgacgtgcctgcaatgcttgatcagcatattgcaaaaggagaaatcattcaaaacctttccagaggccagatgagactaagacccgagggtgaggaagctgagaaagaggatgagcataaaatcccaaacggaaacagtgtaatggtggaagaacgcgaacctgtggagcagaaagggttcacaggaggttgttgccaaggtgcaaacggagtttcatgttgccaagaacaagctgcagagccagtcaagaaagaaggatgcatgaagctaaactggttgaaatcgatggggaaagaagaggttctcttgggagcagcagtagtttcagctgtcgcaaccgttgccgtggcttacagcatttacagaaggtcaggttaagaacctgaaccaccctcctctttttacacttttaagaagaaactttatttttggtagccatattatagaagtaaaggaagaaaagaaaacatggagaggtaataatcttttggaactatataaccatcatttggtttcggtatgggcaatgcaggaatgggatgtaatcttgcttttgactcggtttagtttggtttatcttattatgttgtcattggaatatatcaatcttaaaaaaaaaaaaaagaagggcggccgctctagaggatccaagcttacgtacgcgtgcatgcgacgtcgtag

SEQ ID NO: 85414 - DNA, 562 bp, Arabidopsis thaliana columbia
aaaaggaggcactggtatcgttgccgcagccacaggcatggatggacagataaaggtctcggagagagatgaaagggtgatatgctacatagttaattctgctgagtattgccacaaaacatctggtgaactggcagaaaacgtctcagaaattattgacccacattatgctgatggtgtagacatgtcagaggtccaggatgaattttcagccgtcataacgaaagcattggtaacgctggtccttggacttgagactaaatttgacacagaaatggcagtgatgacacgtgttccatggagcacacttgagagtgttggtgaccagtctggggtacgtgaatggaataaataccagtccttagcggcagatacctgtcctcgggaaccttctaacaccagtttacttccagtttttcccttgacaaagctggcatcatccctgggaccacggttctttgctaatattttcagatgcaagcaactatccgaaactggagctcaacagatgttactagatacgcaagctgtgaagtcgattctactagaaattccttccctt

SEQ ID NO: 85415 - DNA, 702 bp, Arabidopsis thaliana columbia
  unsure (1)..(702): unsure at all n locations
ccagctannnnnnnnnnnnnnnnnnnnnnnnnnnnnnnnnnnnnnnnnnnnnnnnnnnnnnnnnnnnnnnnnnnccacgcgtccgcggacgcgtgggcggacgcgtgggtcaagatgaaaaagtgaatacgctcacggagttgccatccaacgaggatttgctcattctctacggactctacaagcaagccaagtttgggcctgtggacaccagtcgtcctggaatgttcagcatgaaggagagagccaagtgggatgcttggaaggctgttgaagggaaatcatcggaagaagccatgaatgactatatcactaaggtcaagcaactcttggaagttgctgcttccaaggcttcaacctgatgaatcaaatcctcatctgcagtaactttatcttaagcatcaaaataacattgcataagacttgttcttgctcttgtgtttctatcatatttaagctatctactttgtgacatggtgtgatctcttaaaaatgcttgatattggttaaaacagagaatcatgatgcaaactaaatccataagttatttttggtccgtcctcgatatggtcttagttaaaacagttgaattcaagatgaaaaaaaaaaaacaaaaaaagnnnnnnnnnnnnnnnnnnnnnnnnnnnnnnnnnnnnnnnnnnnnnnnnnnnnnnnnnnnnnnnnnnnnnnnnngatcaatcg

SEQ ID NO: 85416 - DNA, 733 bp, Arabidopsis thaliana columbia
  unsure (1)..(733): unsure at all n locations
acgcaacctctatacgactcacttagggaaagctggcacgcctgcaggtaccggtccggtattcccgggtcgacccacgcgtccgcccacgcgtccgcccacgcgtccgagaagacgacggaggggggtcttacactgatttaattctcctaccaatctcaacttccgacgtctattcatcatgggtttgaaggaggaatttgaggagcacgctgagaaagtgaatacgctcacggagttgccatccaacgaggatttgctcattctctacggactctacaagcaagccaagtttgggcctgtggacaccagtcgtcctggaatgttcagcatgaaggagagagccaagtgggatgcttggaaggctgttgaagggaaatcatcggaagaagccatgaatgactatatcactaaggtcaagcaactcttggaagttgctgcttccaaggcttcaacctgatgaatcaaatcctcatctgcagtaactttatcttaagcatcaaaataacattgcataagacttgttcttgctcttgtgtttctatcatatttaagctatctactttgtgacatggtgtgatctcttaaaaatgcttgatattggttaaaacagagaatcatgatgcaaaaaaaaaaaaaaaaaaaaaacccaaacgcggccgctctagaggatccaagcttacgtacgcgtgcatgcgacgtcatagacttcntatagtgtgttgtctaaatt

SEQ ID NO: 85417 - DNA, 713 bp, Arabidopsis thaliana columbia
aggctacgcgcgagcactaatacgactttatatagggaacgctggtacgcctgcaggtaccggtccggaattcccgggtcgaccacgcgtgcgcccacgcgtccgcggacgcgtgggaaaactcaaaaagactcaaatccgtccttccattttcctcgtctctcttcttccccgtaaacccaaaaacaatctctgcaaagtcctcggttctgatggagctttcagaaacctatgcttgtgttccatcgacggagagaggtagaggaattctgatctctggtaactcgaagtccgataccatcctctacactaatggtcgatccgtcgtgactctcgaccttaacaatcctttaaaggtctctatctatggtgagcacgcttacccagctactgtggcgcgatattctccgaacggagagtggatcgcgtctggtgatgtgtcggggactgttaagaatctggggagcttacaacgatcatgtgttgaagaatgagtttaaggttttggctgggcggatcgatgatcttcaggggtctgtaatgggatgaggatcgttcctctggggatggcaaggcaaatttcttggtcggcttcttggggaatcaggacaaagggggaaattggtgggcatttaagaaagtcttactggtattaaccacttgggcgtccttttggacttgggggaggtttctggggattctatagaggcccc

SEQ ID NO: 85418 - DNA, 529 bp, Arabidopsis thaliana columbia
  unsure (1)..(529): unsure at all n locations
caaaaaaaggcccaaagagtattttcctccgaattcgccgtcgactaatcacgagatggcgccgccggtgacggagcggtggtgcttagctttgattcttctctttctctccttgttcgtccaatcttcaacggcaatttactgcggtgctgaagattgttatgctcttctcggagtcgctcaagatgcgaacgcatcggatatcaagagatcttattataagctctctcttcaacatcatccagataagaatccggatcctgaatcgaggaaactgtttgttaaaatcgccactgcttatgagattttgaaagataatactactcgggcacaatatgattatgcaattgaacatccagaagaggtattttacaacaccgctcaatattaccgcgcgaaatatggacataaatcggatccccgtgctgttcttgttggtctattggtggtttatctgcatttcaatatctgancacggggcaaggtntaatnaggcataggncngttagngaccccgctacaaaaaaag

SEQ ID NO: 85419 - DNA, 453 bp, Arabidopsis thaliana columbia
  unsure (1)..(453): unsure at all n locations
acgcgtcaacaaagatccttctcctcctcttttgttttcccttgccgtcgattttaaggttttatcttctccgtactgaaaccgactgataattttctccagggaatctacgaggaggatttgttgtttctccgtcgttttagagtttaacgatttctccgtcgtttgatttcttaattctatcctgttgagggaaacgagaatttggttttcgttttcgaatttagggttagagaagcggtttcgcattgggttcgttgactattgagccaatttgcgagaggaatttaaacgttacgagtttcttctttttccttccggaggtccgaagtgcgaaatctgttttgtttgatgaaattagggttttggaatcggaatttggatagtcgtttatgttgaataggcgaggattgcttangtangatatgattttgaaacggaccttgacgacat

SEQ ID NO: 85420 - DNA, 611 bp, Arabidopsis thaliana columbia
  unsure (1)..(611): unsure at all n locations
acgcgtcaggataaagatgaaattagcgaatcttgggcacgcacaaaagtcagtaccggtttttcgtttgcttttaaacctgttggagcttttggtttttgttatcataatactatcttcccaaatttgcatgatttttacagcaaggagacacggatgaagattggagagggagtgcggatgcgatgggcaaggaggaaggagaggagaaaagtgcaggagacatgtcatttcgagtggcaaaacttgttagcggaggctgctaaacaaggatatacagacgaagaagagcttcagtgggattcttacaacatcttggatcaacagaatcaactggaatggctggaaagttttgagcagaggaaagccattaaaggagctaaaagtaacagaagagcgccaaaatctcctgancaaagaaggagaattgcagaagcaatagctgctaaatgggctgntccatcttaccgtgaaagantttnctccggcttggcaaaatatcacggtataccttttggtntcgagaaggcgtcgtagnaagnccaagggagcggttncagaacccttgaaagaaggcctcctccaangaaaagttccanggggtttcaggg

SEQ ID NO: 85421 - DNA, 720 bp, Arabidopsis thaliana columbia
ggtttatcaaactgtacactgatcaaagaactatacctagctgggaacaagatcagcaatgtagaaggcttacacagattgctgaaacttattgtccttgaccttagtttcaacaagatcgccaccaccaaagcaataggccagcttgtagccaactacaactctctcgttgctttgaacatcctcggaaacccgatccagaacaatgtaggcgaggaccagctacgcaagaccgtttcccagccttctccctaagctagtttaccataacaagcagctcattaagccacaacgagccagggaagttctcaaagatagtgtagcgagagctgcgtttggtggtggagattctttgcaccacaggcgcaaaaggacatccaccaagagtggttgttggatcagcctcccctagcggttcaccacccgaggccacattgcaaaaggacgtggatccaaaaacagaagccaacgtcaactaagaaaaacttcagctgcagggacgccatcacattgaattgttctttttgtttgaatctcatgaattggccaatgcaaattgcaaagccatctccattctttgattttataattcagcatcttttctaacgcttatgtttccggttcggtttcaattctggtttactgtctttttactttttagttgatccggttctcggaaacatgtaaaaccgaataacactttccggtttaactcaattt

SEQ ID NO: 85422 - DNA, 506 bp, Arabidopsis thaliana columbia
agtaccggttcgggattcccggctcgacccacgcgtccgaaaatggcgtttctctgttcgtctctcccaagttcatcctctatcgccattttcggcgacccaaacacagatggatcatcacgctcgtatctttcgattccttcattgaagttacggttccgtcccgtcgctgcttcctcacacatttgtgctccagcgatcgacaagtcgactttcgtcatatccgaatcggtgtcagaagatgagctttgggctgcagcttgtctccgcgtacgaaccttcaacgaactcaatccttctgcttacaatatccaagatcatagaagatacttggcagagcgtgaattcgaggcgcttaaggagagaacttcagggaagagggaaggggtttacgcgggtcgcttgcataaatgctacccttccattggcgcaattatcaagctcttctgaggatttatgctctgcatggtagtctctgatggcatagaagacagagttgggggggg

SEQ ID NO: 85423 - DNA, 657 bp, Arabidopsis thaliana columbia
  unsure (1)..(657): unsure at all n locations
aagtccatgattaatcactctttaatcgtctctttatttctctctctctctcttcttcttcttcttcttcctccagagagcaccttatgctgattcctctccttttcttcctcaactcataaacccgatcggccgattccttcacaattatccttaaaattttcgattttgattattgggtttctctctgatcatggcggttgttgagactggagcagcagctactgctgctgatgcaggaggagtcgtgatccagccgccgccgtcttcaccaccatcttcaatgactagtcaagattccggcgtttcttccgatgatcagaaccatcactctaggatcgatcaagttctccggcacgatcaaggtctttacagcaagatcgggtcacacgtggcgagatccgacggcgttgacggtggtgagagctttaagcgtgatatgagagagcttcaggagcttttctctaagcttaatcctatggctgaagagtttgttcctccttctctgaataaacaaggaggtaacggtgttaacggtggttnttcaactctnctgggtccttnttccgaaaaatggnttttctggaccggaaatgggggtacggtaacgaaanngntggttccgccggagaagagttttnnaaaggaaacgnaggt

SEQ ID NO: 85424 - DNA, 1513 bp, Arabidopsis thaliana columbia
  unsure (1)..(1513): unsure at all n locations
gtccgtccgcagtaccggtccggaattcccgggtcgacccacgcgtccgttaaaattttcgattttgattattgggtttctctctgatcatggcggttgttgagactggagcagcagctactgctgctgactgcaggaggagtcgtgatccagccgccgccgtcttcaccaccatcttcaatgactagtcaagattccggcgtttcttccgatgatcagaaccatcactctaggatcgatcaagttctccggcacgatcaaggtctttacagcaagatcgggtcacacgtggcgagatccgacggcgttgacggtggtgagagctttaagcgtgatatgagagagcttcaggagcttttctctaagcttaatcctatggctgaagagtttgttcctccttctctgaataaacaaggaggtaacggtgttaacggtggtttcttcacctctgctggttccttcttccgcaacaatggctttgctggtaccggaaatggcggatacggtaacgaaaacggtggtttccgacggaagaagagttttggtcaagggaaacgaaggatgaatgctcgaacaagcatggctcagcgagaagatgttatccgtagaaccgtctacgtctctgatctcgatcaacaggtcactgaagagcagcttgctggtttgtttgtgagctgtggacaggttgttgactgtcgcatatgcggtgacccaaactcggtccttcggtttgcattcatagagttcactgatgaagagggtgcgatgactgctctaaatttatcggggactatgttgggattctttccctgggaaagttttcccatccaaaacagctatagccccggttaacccgacatttttgcctaggactgaagatgagcgtgagatgtgtgcaagaactatctactgtactaacatagacaagaaggtgactcaatcagacgtgaagatcttttttgagtccttctgcggagaggtttatcgcctgaggctgcttggagattatcaacactcgactcgtattgcttttgtagagttcgtaatggcggaaagcgcaatagctgctctcaactgcagtggagttgttcttggttctttacctataagggtgagtccttcaaagacgcctgttcgtccgagatcaccgaggcatccaatgcattgatcttagctttacaggttttcacatatctcatgtctccgcaatatatatatcgctgtgtcgtcttaaaaacagcattacccggacatgtaaagatgtttgtctgcatctctcatctcttgttttcgaaatgtaactctgggatctgatgatgcttctttcttcttcctttacctgagaatcttttgggtaaaaaaaacctcgtagagagtttttatttatctcttaaaaagaaaagagcttaaaacataaaaaaaaaaaaaaagggcggccgctctagaggatccgagcgagcgcacgcgagcacatagctggtttattgtgtannnnnnnnnnnnnnnnnnnnnn

SEQ ID NO: 85425 - DNA, 1489 bp, Arabidopsis thaliana columbia
  unsure (1)..(1489): unsure at all n locations
cattgtattcctcaaatctctttacttgatcgttggttctctcaaaaatcagatttttatttctgggttttgttcgattttgtgatcatggcggtcattgagagcgtcggagctaatactactgtggaagctggtggtttgatctcgccgtcgccgccgtcttccgtcaccagtcaagaatcaggagcttcttctaacaacgatcacggtggaaatggaatccatgatgagatcggagtccacgtggcgagatccgacggtggtgagagttttaagcgtgatatgagagagcttcacgagctcttgtctaagcttaatcctatggctaaagagtttattcctccttcacttactaagccagttgttaatggttttaacggcggtttcttcgccgttaataatggctttgttgctgccggaaatttccccgtcaacgaagacggtagctttcgtcggaagaagtcgttcggacaacaagggaaacggagaatgaatcctaggacaagtttggctcagcgtgaagagatcataagaagaactgtctatgtgtctgatattgaccaacaggtcactgaggagcagcttgctggtttgtttatcggctttggacaggttgttgactgtcgtatatgtggtgatcccaactcagtacttaggtttgctttcatcgagttcactgatgaagtgggtgcaaggactgctctgaatttgtctgggacgatgcttggattctatcctgtgaaggttatgccgtctaagacagctattgcaccggttaacccaaccttcttgccaaggactgaagatgagcgtgagatgtgtgcaagaactatctactgcactaacattgacaagaagctcactcaaaccgacattaaactcttctttgagtctgtgtgtggcgaggtgtaccgtctgaggctactgggcgattatcatcatccaactcgcatcggcttcgtggagtttgtcatggctgaaagcgcgatagcggctctcaactgcagtggtgtccttcttggttctttaccgataagggtgagtccatcaaagacaccggttcgttcccgtgctatcccgcgacatcaaatgcattaaccgtagctacaagttttatatatatttctgctcctcacagacatgtaaagaatgtttgtctgaaacttctggttcttctgttttcccgtatgtaatgctagaagcttgatgatgcttctgttgccttttgcttttgggtaaatctcttagggagagttttttcgatttgggttcctacgtttagtagtttacacagagcagaagagtaaaacactgagagaggcttttgaagattgtctctgttttttagttatttatactcttacccctgaagttattagaaacttgctttggtgcttaaaagtttcttcnnnnnnnnnnnnnnnnnnnnnnnnnnnnnnnnnnnnnnnnnnnnnnnnnnnnnnnnnnnnnnnnnnnnnnnnnnnnnnnn

SEQ ID NO: 85426 - DNA, 582 bp, Arabidopsis thaliana columbia
  unsure (1)..(582): unsure at all n locations
nnnnnnnnnnnnnnnnnnnnnnnnnnnnnnnnnnnnnnnnnnnnnnnnnnnnnnnnnnnnnnnnnnnnnnnnccacgcgtcncggggcgcgtgggtgaagttttgacggagtccctgactctaaaagagacatcaattccaaccaaagttgctagactcatgcttgtgtctgatattcttcataatagcagtgcacgtgttaaaaatgcatctgcataccgaaccaaattcgaagcaactctacctgatataatggaaagcttcaatgatctgtaccgaagcataactggaagaattactgctgaggctctaaaagaacgggttctcaaagtactgcaagtatgggcagattggtttctcttttcagacgcatacatatatggactacgttccacatttctccgatcaggagtctctggtgttacctcatttcattctatctgcggtgatgcacctgaaatagagaacaaaagttacgctgacaatatgagtgatattgggacgataaatccagatgctgcactgtgcaataggcaaacgagctgcaacgcaagagctgatgaatttaccaattgctgagct

SEQ ID NO: 85427 - DNA, 673 bp, Arabidopsis thaliana columbia
  unsure (1)..(673): unsure at all n locations
gataatgttttgtgatagttttgcatttncccaagtnatgagttgcttcgggtgttttggtggctctnagagatcaagacattcaccaaatccatatgatgatgatacatattcccatgatagtggtgaaaccagcaatccgggaggagatgatgaagaaggagaagaggaagaggaagtagaggagctaagtcgttccaaacgatctgaagaaattttgaaatgtaaactacaaaatggactagtctgcaggcagtttccagtcaaggaaactaataaacttacacgcggagaggatgaagatggaaacaagacaataaatgagtttgttcgtgagcgtaaaattgggtctggtagttatgggaaagtggttctctatcgaagcactgtcgatgacaagcattatgctattaaggcttttcacaagtcacattttatccgaggctacggggtttcaccttcaggaacctgctattgggtgatgtcctccgtgaggttatggttttgtgaaaacccctgggggcatccctaataccgtaaaccccatttggggtccccggatattgtttatgggaaatgggcctttgatcgtttttggccccccgggtcccttcnggggaatttcctccttcgaaggcctttccgggtttatgttccgccccatgccccntca

SEQ ID NO: 85428 - DNA, 438 bp, Arabidopsis thaliana columbia
tttgcatttaaccttcttttgtatatctctcttcctatatcattaacctgcgctggttaaagctcttcacctacgcacatcgccggcgatttatgatcatctgagtctttcgggtatattcacaggctagagaaagagatcttaatcggaaaagtttatatggaggttatggttggttcgtcgtttggaatcggcatggcggcgtacgttagagatcatcgcggtgtttcggcgcaggataaggctgttcaaacggctctgttcttggctgatgaatcaggacgtggtggatcacagatcgggattggattaaggatgagtaataataataataagtcgccggaggaatcttcggatagttcgtcgtctatcggagaaagcagtgaaaacgaggaggaagaagaagaagacgacgccgtttcgtgccaacgaggaaca

SEQ ID NO: 85429 - DNA, 963 bp, Arabidopsis thaliana columbia
  unsure (1)..(963): unsure at all n locations
tgtgtttcnngttttgtttttgtttctgtgagattcttccgaggcttgaagctcaatagctatggcttctctttcagtctcttcctcttcaaccatcatcgattcaagagcncctccttctcgacnagcctccgcctccgcctcttcnccgtcgtgcatntcacntcccacacntccgattcaagtctcatnacccgtgccgctaaagccactggcttaactggtcggaagattgtgnaggaacgttgtgacgagagcaacaactgaagttggtgaagctcctgccactactaccgaagctggagactactgagttacctgaaatcgtcaagactgctcaagaagcttggggagaaagtgggatgacaagtacggctattgggtcctcttgcctttgctagtggaggggctctttggggttctgctggaatgatttcggcaatcgataggcttccattggttcctggtgttcttgaacttgtaggcatcggttacacaggatggttcacttacaagaacctggtcttcaaaccagacagggaggctttgtttgagaaggtcaagagcacatacaaagacatattagggagcagctgaatcaaaggaggaagaagaagaagaagagcctttttgaggccattcatgaattggaatgaaggatatcaaaagaatctaacacaaaggccacgtccttccttcaatctttccttcttgtaactaaataattttcatcctttctctctctctgtctctggtcttttttagctcaaagtatcatccatttatgtcaaagtgttgtaaattcctcaagactatatatgagatgttttgtttcattttaaaaaaaaaaaaaaagggtccccatttagtcaaaaaaaaaaaaaaaaagnnnnnnnnnnnnnnnnnnnnnnnnnnnnnnnnntgacctannnnnnnnnnnnnnnnnngagagctggagtatca

SEQ ID NO: 85430 - DNA, 741 bp, Arabidopsis thaliana columbia
  unsure (1)..(741): unsure at all n locations
nnnnnnnnnnnnnnnnnnnnnnnnnnnnnnnnnnnnnnnnnnnnnnnnnnnnnnnnnnnnnnnnnnnnnnccacgcgtgcgctccacaatccccaaaattctttcaacacttgctctccattaatcttttagataataaacctaattgtttctgttttgtttttgtttctgtgagattcttccgaggcttgaagctcaatagctatggcttctctttcagtctcttcctcttcaaccatcatcgattcaagagctcctccttctcgactagcctccgcctccgcctcttctccgtcgtgcatttcacttcccacacttccgattcagtctcatacccgtgccgctaaagccactgcttactgtcggaagattgtgaggaacgttgtgacgagagctactactgaagttggtgaagctcctgccactactaccgaagctgagactactgagttacctgaaatcgtcaagactgctcaagaagcttgggagaaagtggatgacaagtacgctattggttctcttgcctttgctggtgtagtggctcttttgggggttcttcctggaataatttcggcaatcgatagggttccattggttcctggggttcttgaacttttagggatcggttacaacaggatggtcactttcaagaacctgggtttaaccaccaagggggtgtttttttgtggaaggaaagagccatcaaaggcattttggggggaccttttaaagggggagagg

SEQ ID NO: 85431 - DNA, 556 bp, Arabidopsis thaliana columbia
catgcacgcctgcgtaagctcggaattcctctcgagctgggttaagcagtgctttacccttatttggccattcctgtcttccactttgtcatcttttccctttctgatgggatccgccgccgaactcacggagcccaccaccgggaccgagaagcttcaccagccaatagaagttgaagaagatgacgaacaaattgttgatttggagaggaaaacattccgtcatggaaagggacacgatactagtgtggacagtagtacaatcaccaacaccagctcgtcgtcgtcttctagcttttccggtgatggtggaacggaagagacccccgatttccacagcaacggcgatggagaacatacccgatttaataaaattgggaagggccccgaactagaaactggaaatgggttttcaccaaaaagcttgacgacgggaaagaaatgcttcggcttcttcgacggaaaacaagggttttaagggaggtgggggccatacctgagggtcataaggaggttaaaccgcgggccttgaagggggacgaaccccaatataaac

SEQ ID NO: 85432 - DNA, 404 bp, Arabidopsis thaliana columbia
  unsure (1)..(404): unsure at all n locations
aattcatggaagaagtagattccntggtctatatatttggttaaggaatggagagaaggttgcggttaaagttccggtaggctgtctcttgattcaagctggaaagcagatagaatggttaactcctggagaatgcattgctggaatncatgaagtggttgtaacgagcaagacgaaggatgccatcacattagcaaaggaacaaaaccgaagcctatggagagtttcctcgactttttttgcccacattgccttctaatgcggactgaaacctttgggacatttcgcagaatcatctttggcaagtaaatatccggcgntacccgcaggggngtttnttgaccaagnactctcggcatcnattctcaaagggnattaagggntcttcatngtttcngtgttca

SEQ ID NO: 85433 - DNA, 489 bp, Arabidopsis thaliana columbia
  unsure (1)..(489): unsure at all n locations
nnnnnnnnnnnnnnnnnaaaaaaacaaacaaattgaagagcgattatactatcacggagaactcaagatccggtgacgaatccaacttcttgtgacggagctcaagtcgagagagagaagactgtactagtagtagtagctgtggatttttgtgtcatcatcggagatcggaatcttcttcttcttcttcttcttggagcttctagaagtggagagaagggggaagatcaagcgacggatagtgataggttttgctgtatgtcagtggattgtgttgaaactgattttggtggatttggagaacttgtgaaccctattcaatggcctcagcttcgaaaaagacgtcggcatgtcctcaccacggtggctctcttccgcctcccaaactcgtctccgctgctcccgataccgctgctgtatggtccgacgctgacgatcagcgagcctctaaagtttctttggaatccgctatccgccctgtcgattcgt

SEQ ID NO: 85434 - DNA, 571 bp, Arabidopsis thaliana columbia
gtcagagatccattcgatagcactttcctctctttctctcatcgtaaaaccgttcttcgttttctctatttctctcgtctctttcttctacccagatcactgattgattagtcgtgaattttactctactctttcatcaattttactgtgtttaattcataaaacaaaacaaacgatcgatttttgtttttttttggggatgaagatcagaagcaaaagcaaaggctatcgtcaagagatcaaatcaacttgcaccgactccaacactctgttctcaaaagatgtggttgcaacttcggagcttttttcatctgtgatatcgtagcgtgtgaaagacggataattctacagagacaatgcatcatcccattcggctagggcaattttcatctctatcttgtttataatctataatcttatagataggttaatttcaaaaaaggtttttatactatttttggtttttccaaacaaaatatttttctcaaaaaaattatttttaatgggttccccctccctctttcttcccccttctcaaataatttgtggggatgaacttcccggtttgggc

SEQ ID NO: 85435 - DNA, 846 bp, Arabidopsis thaliana columbia
  unsure (1)..(846): unsure at all n locations
gagagacttcgtgtgtctgtactgcaatgaattgtgccatccatttagtagtttggaagctgttcgtaagcatatggacgccataggtcattgcaaagtgcattatggtgatggtggtgatgaagaagatgcagaacttgagcagttctatgactacagcagcagctatgtcaatggagacgagaatcagatggttgtgtccggtgagtcagtgaacactgtagagctttttggtgggtctgagcttgtgatcaccatgagacccgataacagagtaacgtctaggactcttgggtctcgagaattcatgcgctactacaaacagaagccagcaccgtcttctcagaagcatattgtcaactctctaacctccaggtacaagatgatgggtctagcaacagtgcagtcaaaggaggccatagtgaggatgaaggtgatgagagagatgaacaaaagaggagcgaaaagcagtgtcaggctcggaatgaagagcaacgtcatcaggaatctgcccaacaatgtcacctattagtcttgctcctcgattttcaggtctctcctctttgtttgattttgtgaccagagttttggtgagtaaatctatctaagtttttcactagtactcaagtatcttaggcccatttgggtctctgttttgtctgatttagtcttttgaaaatgttacgttttggctgagtttgtatctcttgcccagtgctttgtacactctacattaatctatatttcatttggtagaaaaaaaaaaaaaaaaaaagnnnnnnnnnnnnnnnnnnnnnnnnnnnnnnnnnnnnnnnnnnnnnnnnnnnnnnnnnnnnnnnnnnnnnn

SEQ ID NO: 85436 - DNA, 754 bp, Arabidopsis thaliana columbia
  unsure (1)..(754): unsure at all n locations
gatttatgcccttctggaaattnctcttacgaaaaanctggagggaacgataccctgggaaattnccctatttgtggaaaggatgtnccgcgtggatactacatgttttnccgtggcagcaagaacgatactcgcggatttagctgtggattatgggttctaatgcattcnctttccgtnagaattgaggatggagaaagtnattttncattcacgacaatatgcgatttcgtcaacaacttcttcatgtgtgatgaatgccgcctgcatttcaatgacatgtgcttgagcgtcaaaacccctttcaaaaaggcacgtgatttcgtattgtgggtgtggagcacacacaacaaggtcaacgagagactcttgaaggacgaagctttcccttggtacaggtgaccccaagttccccaaggttttatggccaccaaaggagctttgcccattgtgttatcctttcaagtaatcagaaaagcatagagtgggaccatgaacatgtctacaaagttctttgaaggacctacttatggggctaaagctcggtatcttttttacaaagggaaaagaggtgttcaagccgggagccaaagggaaggggncccgnttttaggccacttgaaggcctttancagntgggccacccaattngttcttggtttntnccngntttggngcttcaatttgnaaattgncntttgccaanttnttgaattttgggggngntttnttttttacttggggggcaanncag

SEQ ID NO: 85437 - DNA, 556 bp, Arabidopsis thaliana columbia
taggaagccactactagaagagttatgacgtcgaacgcacgcgtacgtaagctcggcttttgttgcgacttttcttcttcttcttcctcaggaacttaagtttctgagtccatgaagatgccagtggcattggtctggctactggcattcactattctactgatcagtggggaaggcaataatgccatctgcaaggagaattttaagttagaccctagacctcatagtgtttcgatcctcgagtttggagcggttggtgatgggaagacgctcaacactattgctttccagaacgctgttttctatctcaagtcttttgcggataaaggcggtgctcagctttatgttccaccagggaaatggctcaccggaagcttcaatctcacaagccatctcactctcttcttggagaaaggagcaacaattcttgcatcaccggatccgtcgcattgggacgttgtcagtcctctaccgtcctatggtcgcggaattgaacttcctggaaagcggtacagaagtttgatcaatggagacaatctaatagacgtagtcatca

SEQ ID NO: 85438 - DNA, 626 bp, Arabidopsis thaliana columbia
cccacgcgtccgtttgtactcgaagtaacatactttttacaatcacatttttgaagaactttcattccataaatctacagatctttgtgtatcaagtaaagagatgtcaggaagaggaaagggaggaaaaggattgggaaagggaggagcgaagaggcacaggaaggttctgagggataacattcaaggaatcaccaagcctgctattcgtcgtcttgctcgtagaggtggtgtcaagcgtatcagtgggctcatctacgaagagaccagaggtgtcctcaagatcttcctcgagaatgttatccgtgacgccgttacctacactgagcacgccaggaggaagacggtgaccgccatggatgttgtctacgctttgaagaggcaaggtcgtactctctacggtttcggaggttaatccgatttgggggattagggtttatgcaagtttggggatttcttcttgtttctgagatccgtgttaaatggtttgaattagtcaaaagtaaattcaggagttagtttttgtttctcgtttttcgttgttattagccaatgtgatgtagtagttaattatcttttgcaagctttgtgctaagaaaatctactcccaattatccatttgcttg

SEQ ID NO: 85439 - DNA, 734 bp, Arabidopsis thaliana columbia
  unsure (1)..(734): unsure at all n locations
ctataggaaaagctggtacgcctgcaggtaccggtcggaattcccgggtcgacccacgcgtccgaatcatcttaaaatcacagatctttgggtatcaagtaaaactgtgaagtgatgtcgggaagaggaaagggaggaaaaggattgggaaagggaggagcgaagaggcacaggaaggttctgagggataacattcaaggaatcaccaagcctgccattcgtcgtcttgctcgtagaggtggtgtcaagcgtatcagtggtctcatctacgaagagaccagaggtgtcctcaagatcttcctcgagaatgtcatccgtgacgccgttacttacactgagcacgctagaaggaagacggtgaccgccatggatgttgtctacgctttgaagaggcaaggtcgtactctctacggtttcggaggttaatccgatttgggggattagggtttatgcaagtttggggatttcttcttgtttctgagatctgtgttaaatggtttgaattagtctaaagtaaatctaggagtgttagctactgcttttgttttctattgtgatgtcgttgttagccaatgcggtgtagttgaaaatctttgcaaacttaaagctaagaaaatctaatgaggatgaacaattttctccaaaaaaaaaaaaaaaaaaaaagnnnnnnnnnnnnnnnnnnnnnnnnnnnnnnnnnnnnnnnnnnnnnnnnnnnnnnnnnnnnnnnnnnnnnn

SEQ ID NO: 85440 - DNA, 523 bp, Arabidopsis thaliana columbia
  unsure (1)..(523): unsure at all n locations
nnnnnnnnnnnnnnnnnnnnnnnnnnnnnnnnnnnnnnnnnnnnnnnnnnnnnnnnnnnnnnnnnnnnnccacgcgtccgcttttttcttaatttccaagaatcgtctcttttctctcaatcctccaattcccaaatttcaacaacaagacgaagcaaacgatgtggattgaaatcatctgcggtctcgtcatctacaaactcgtccgccgtttcttctacgacgacgaattctccgacgtcgaaacttccgattccactgctctcttctccgttgctcacagacttgagaaactttatggtggaaaagcttatgtaggacttcgaattccagatgccgacactgcttctagacaagacattgatgttgttcttgttactaaaggagatgttgtagtgatttctgtgaagaatctatcggggattgttacggtaactagtgatggtagctgggtttgtgaaggtggcaagcatcatactactgagactttcccggatcctctggcggaggtcaagaaacaagc

SEQ ID NO: 85441 - DNA, 402 bp, Arabidopsis thaliana columbia
ggtgtgcaaaagccaaagctttgatctttcattaattcttctcaagatcttcagagtctacaagggaagatcaaagtaattaaataagctgaagtaagaggaagtgatgttttctcttatgtctggactatggagttacatgtttagcaagactgagtttaatgtgcttattcttggtatcgacaaagctgggaagacgacatttttggagaaactgaagacgatatactcaatctcggaaggtcttcctcatgatcgaattgttcctactgtggggcttaatattggtcgcattgaagtctccaatgctaaaattgtgttctgggatctgggaggtcagcctggtttgcggtctatttgggagaaatactatgaagaagcacacgcgttgatatatttgat

SEQ ID NO: 85442 - DNA, 1082 bp, Arabidopsis thaliana columbia
ccacgcgtccgcttatttttcttgtttctcaatcgatgtaaaataaaattcagttgttgatgattttaccatgtttcgggagcttgtgttgatctagttcttcgctctcactaggctaattttgatcttcctgatgtgcacaatgtgaatgggtcttagacaagggaagatcaaagtaattaaataagctgaagtaagaggaagtgatgttttctcttatgtctggactatggagttacatgtttagcaagactgagtttaatgtgcttattcttggtatcgacaaagctgggaagacgacatttttggagaaactgaagacgatatactcaatctcggaaggtcttcctcatgatcgaattgttcctactgtggggcttaatattggtcgcattgaagtctccaatgctaaaattgtgttctgggatctgggaggtcagcctggtttgcggtctatttgggagaaatactatgaagaagcacacgcgttgatatatttgattgatgcagcttgcccaacccgctttgaagattctaaatctgctttagaaaaagccctgcggcatgaggatttgcaaggagcccctcttttaatattggcaaacaagcaagacctcacaaatgctgtatcggctgaggaactggaccgataccttgatttaaagaaattggatgaaagagtgtacatgtttgaagcagtttctggatatgatgggcgaggaatcaaagaaagtatagaatggctggttggagtaatggagaaaagcaagagaaccgaatcattaagagcccgtgcagggtacactcctgtgccaaattcatagacacgagaaaggactcgcaaactcaactctccagtcaactggtttcctttgaaatacatttgtagataagaacagaccacaatctttgcatcattttggctagcatcaaattcacatgatgagtaggaactagtaatctccttattgccaccttcatatgtttactaatgttataattcaattgagactttgtggtgatgattgcatttagttactgcaaacccaataatgtaatcaagtttcttcatttgcaaactc

SEQ ID NO: 85443 - DNA, 472 bp, Arabidopsis thaliana columbia
  unsure (1)..(472): unsure at all n locations
attgcaggagcttcatagctttgcgttagcagactagagtgggtgttcttaagcaggttaagaaggaaatncacgcttcattgttgtggattttccaacgtgtgttctctcagacacctactttgatggtttatgtgatgatccttttggcgaactacactgtgcattcagttgcatcaaacctacctattgcagcatctcctccagttgttaataaaggtccggatcagacgcaacaaaggattgattttccttcgttaaaggagtctacgaagcttgatgggtccaaatggttaggatcgatcaattttgacaaggtttcccacttgccgagacatcgngactcggtttcaggagaagggnttagagaagaggaggtgagtctnntggattcgatggtgggaggagcngtcaaatgcaagattncnctgttnatccgnnacatnaggtttannctttgtttnanccgtca

SEQ ID NO: 85444 - DNA, 1463 bp, Arabidopsis thaliana columbia
  unsure (1)..(1463): unsure at all n locations
atgatttnnnnnnnnnnnnnnnnnnnnnnnnnnnnnnnnnnnnnnnnnnnnnnnnnnnnnnnnnnnnnnnnnnnnnnnnnnccacgcgtccgtttgctttcttattttgtcttctcacaatctgttcctatcaatcacacagataataatcctcagcttctctctcgctggatttcaacattcttccactcatcgcttctctttaccaaatcaaactcaacacttcactcaactcttatcggaccttccaaactatatccttcaatggatctatggactcttcaattaaaagacgtcacgatccgaaaccctatcttctcatcatcgatccctgagaaatcatcgtcgttttctaggaaactttgtgaattggagtttaggtttctcaatcgtaaggtttctgcttctccgtatcgttccttggttgttcgagctacctcgaagaagagtaacgacgattcttcttctcctggagatgcttctcaggaaaacaaaccttctaacggcaacaagtccggcgattccgcggctccgaaatcgttcggtttaaacacggattggagagagttcagagcgaacttgtttatgaaagagcaggaagaaaaggcggaagctgagggtcatgaatcggaacctataggtttgaaatgggcacatccgattccgtttcctgagactggttgtgttctagttgctacagagaagctagatggttatagaacatttgcgagaactgttgtgcttcttcttagagcaggtactagacacccacaagaagggccgtttggtgttgttatcaaccgtccacttcataaaaacatcaagcatatgaaatcaacgaaaaccgagctcgctactacgttttctgaatgttctttgtactttggtggtcctcttgaagcaagcatgtttttgttgaaaactggtgataaaaccaagatacctgggtttgaagaagtcatgccggggcttaactttggtactcgaaatagtttggatgaagctgcagtgcttgtaaagaagggagttcttaagccacaggagtttagattctttgttggttacgccggttggcagctagatcagctcagagaagagattgaatcagattactggcatgttgctgcgtgcagctcggatttaatatgcggagcttcttcggaaaacttgtgggaggagattttacagttaatgggcggtcaatactccgagcttagccgaaaacctaagctggatatctgaagttttctaagagaacttgaggcttttttataacttatatatattttctctattaagccgatttgtatagcttactttcgttggcttgtacgtgagaataatgcacttctatgctatttataaagatttgctttgtaaaaaaacaaaaaagnnnnnnnnnnnnnnnnnnnnnnnnnnnnnnnnnnnnnnnnnnnnnnnnnnnnnnnnnnnnnnnnnnnnnn

SEQ ID NO: 85445 - DNA, 611 bp, Arabidopsis thaliana columbia
  unsure (1)..(611): unsure at all n locations
aagaaacccataactctacataaaacactagcaagcttctccattctcagtttcatcttccattttcacctgccaccaaaacacaagaacctgttatacaaaaactcatttcaaaaaacagattttnttgagatatgagtgcagactggggcccttggattgtaccagtggccctgttcaccctactctcccccggnttgctattccagctaccggcaaggacaggagtgatggaattcgggaacatgagcacaagcggggatttcgattttggtccacgccattatttacttctgtatactcactatcttgatcattgccatacaaattcacatccatttctgatcatgtagtgtaacaaagacagcttctttgggctcaacttcgccttcatctattttttcttttctttttgttcctaatctctgattcttggctcatagggtctcaagcngggaaatttaaaaaggttgtacacaaataaataatcggtaattttgttttccacaattcaaatgagataacaatatcctctgatctctcgtagcttcagcatgtaataacgtaacataaagcatcttcatttagttacaaatttggtttgttcccac

SEQ ID NO: 85446 - DNA, 854 bp, Arabidopsis thaliana columbia
  unsure (1)..(854): unsure at all n locations
accctaaaaaaattcaaaagacgatcctcttctcgaagaaactcgattcttgtggattcgatttcattaaggaattttgaattgttgcctgtnatgggtggtttggctatggaggaaatgcctttatcggtgctattcgagcaagctaggaaaattcatcttgctgcttcagagtctggtgttgatcaggatgttgtgaagaaaggatgtgagatgtttcagaagtgcgaagatatgatcgggaagctggcgctgttttcgtctaacgagactaaagaagatattagcaccaacaatctcaaatatctttttggtgccttattatcttgcggagttgacagggaaaatccattcaggaggacccggattcagaattgtcaaacgcctcgtattgctaaagtctgaaggagttcctttccctctgtgaggcaatggagcttgttccggatgaggagttggaggcttcttcacgaggaggttctggtgcacctgctgatcgaacggctctcaagatagctcggttcatacgtcaaaaggctgcagaggcaaagcttcttgaaattaaagagaggaaggagcgacgtggacgttccactaaagcatcagctttgtcgactccggttgaatctggagaagatgatattccagatgatgacagcgaagaagagagagaggcctggctctcctcaattaacttggctatttgtaaggctattgatctgttggaaatgctaaagagagaagaggaaatgctctctgcaataaaggaaagacagttgaaggatggagaaggtggattttctcgggatgctcttgatgatcgtacaaagaaagctgaaacctggcacagagac

SEQ ID NO: 85447 - DNA, 1137 bp, Arabidopsis thaliana columbia
  unsure (1)..(1137): unsure at all n locations
nnnnnnnnnccnnnnnnnnnnnnnnnnnnnnnnnnnnnnnnnnnnnnnnnnnnnnnnnnnnnnnnnnnnnnnnnnnnnnnnnccacgcgtccgctcgaaatcaaaaagcacgtcggtgacttgtactcttcaatctcttcttcctctctttcacatctccttctctcgaacccatcgacctgcgctaattcatcatcgaccttgctcaaattcatcaaccatgtcttacgattatctcttcaagtacataatcatcggagacacaggtgtgggaaaatcgtgtctgcttctgcaatttactgataagaggttccaaccagtccacgatctcaccattggtgttgagttcggtgctcggatggtcaccgtcgatggacgccccatcaaactccaaatttgggacaccgctggacaagaatcttttagatccatcaccagatcatactacagaggagcagccggagctttactggtttatgacatcaccaggagagagacgtttaaccatctggcaagctggttggaggatgctcggcaacatgcaaatcctaacatgagtattatgctgattgggaacaaatgtgatcttgctcacaagagagctgttagcaaagaggaaggtcaacagtttgccaaagaacatggcctgctattcttagaagcatctgcaagaactgctcaaaacgttgaggaggccttcatagagactgctgccaagatcctccagaacattcaggatggtgtctttgatgtatccaacgagtcatcaggtatcaagattggttacgggcgtactcaaggtgcagctggaggaagagatggtacgatctctcagggaggtggctgttgtggttaaaaaatcctcgagagaggtgtcacatatctgctgtaatctggtgattcgagaaactactattgcttctatttacctctgcaaatggatacaccagaatgtatagtttctctttctttctttctttttttctctttttcccagattgtcttttatcaaaaaaccaaacgggtgcatttaagagtgaacaggctgatctttataaaccaaacaggcgttggcttatttaaaacgttgtcgctttgtatgacgaccgctctagaggatccaagcttacgtgcgcg

SEQ ID NO: 85448 - DNA, 462 bp, Arabidopsis thaliana columbia
ccgcttctcttcttcgcctttttctttcaccgatctgtgttgccgagtgccgactcgccggaggcttatctccggcgccgggctggatctcgtcgtcgaattcgccttaatccaccgctgattctgaattttccgtgttctctcgtcgtctctgccaccgtcaccgtctcccgtcgccgtgttcgaccgctgattctgaattttccgtgttctctcggcgtctctgccaccgtcactgtctcccgtcgccgtgttccatttagccgaaggagtgatggatttggaactaggcgaaggcgtgatggaaaaactcgtgagcccttcaggggaagacatgaactcgcgagctcagcaaaattggaagaatgtaactgctgaagtgacccgtaattactctcggatcaccttttacttaattcgctaccacaggtgtcatcaccattctcggtgggttcatctttg

SEQ ID NO: 85449 - DNA, 587 bp, Arabidopsis thaliana columbia
  unsure (1)..(587): unsure at all n locations
cgagggagaccaaagagagttgacgctggtggtgcttcctctgttgctccaccaccaccaccaccaactaacgtagagagtggaggagaggaggttgcagtcaagaaacgaggaagaggacggcctcctaagattggaggtgttatcaggaagcctatgaagccgatgagaagctttgctcgtactggaaaacccgtaggaagacccagaaagaatgcggtgtcagtgggagcttctggacgacaagatggtgactatggagaactgaagaagaagtttgagttgtttcaagcgagagctaaggatattgtaattgtgttgaaatccgagataggaggaagtggaaatcaagcagtggttcaagccatacaggacctgggaagggatccgcagagacaacaaacgggccaaagcacattggatgaagttcaacttccagacggggacccctttaaacccgacccgaagcagagggtcaaggcagccaggagcagngcaattcaaggagttttttcttaagntaagncttgcattnaaagtttcaagtggtggttcttttgnggttcatgaattttanctttangggc

SEQ ID NO: 85450 - DNA, 1042 bp, Arabidopsis thaliana columbia
  unsure (1)..(1042): unsure at all n locations
aattccacttacttttggggaaggttggtcccctggcaggtcccggcccggatttccgggcctaatcctcctttatctctctctctctctaagactatcgagcttctttcttttttcctgagtcttttagtctgatctcttacaagaatggcgttcgcaggaacaacccagaaatgcatggcatgtgacaaaacagtttatcttgtcgacaagttaaccgccgataaccgggtctaccacaaagcttgtttccgatgtcaccattgcaaaggaactctcaagcttagcaattacaactcctttgaaggagttctctactgcagaccacatttcgatcaaaacttcaagagaactggaagtcttgagaaaagcttcgaagggacaccaaagattgggaaacctgataggcctttggagggagagagacctgctggaaccaaagtttcgaatatgtttggtggaacacgagagaaatgcgttggttgcgacaaaaccgtgtatccaattgagaaggtatcggtgaatggaacattgtaccacaagagctgcttcaagtgtacacatggaggctgcacgataagcccttcgaattacatagctcacgagggtaagctatattgcaagcatcatcatattcagctgatcaaggagaaaggaaacttgagccagctcgaaggaggaggagagaatgccgccaaggacaaagtcgtcgctgcttaaagaaacaattcaatctctctgggatgattttgactatcgaagaatcaaaagagtcactacttctccatcgatcgataacatatattggttttgtttcttcctacgtttgtgtttttctttttggtctttaatatgtttttttttttttgggacctttgttcactcttttattgggtttcttgaaatgaaactagagaaacaaagaaataatggatgtttgcttatgagatatatatgtattacgttaagatgatataaattaattttcgtgaaaaaaaaaaaaaaaaaaaacnnnnnnnnnnnnnnnnnnnnnnnnnnnnnn

SEQ ID NO: 85451 - DNA, 817 bp, Arabidopsis thaliana columbia
  unsure (1)..(817): unsure at all n locations
tacctctctctctctggtcatcaatcaattcaaaggtattgtncttcttcatcaaaccagtaagagtgacttgagagtctgatgattccttggggtggagttacttgctgccttagcgccgccgctctttatcttctcggccggagtagtggcagggatgctgaagtactcaaaactgtcactagagttaatcagctcaaggaattagctcaattgctagaattagatagcaagattctgcctttcattgttgccgtatcaggaagagtcggctctgagacacctatcaaatgcgagcatagtggcattccgcggtgttattgtttgagggaacggcggaacaacaatttcctgaaacataattgagaccgggttcttgggtgcaagatcagtgcgttgatgctatcaaatgggcaaggaggtccctgggtttctggccggtgggccaagccgggtcccggtattgggagctcgtggtgcgacgggttttgccttgactgttggtagtgaagttttttgaagagtcaggacggtcgctttgtacgaggaccacttgattatcttcaaggacttnagatgcttggagttaagccgcatttagcggtgttcttccaacctggaatanccgctaancaattgtttggtnagggaatgnccggattccccaagtgtttccggggcccccccttttgcttaaggtggaacccnnttnntaggggttcaattgcccactaacncctncaacaagcctggnatttnccccttgaaatttcnnaaaagtcccttaattgcaaaatttttggggggggggtttttc

SEQ ID NO: 85452 - DNA, 448 bp, Arabidopsis thaliana columbia
tgacgagagagcagagagagcttcttcttccggacactgagcagtgagagcacccatctccaacctcttcctgaacaagatgggaagcactgtgattttaagctcagatgatgaagattcagatattactgaatctgaaatggatgagtatggagacagaatgtacctaaaccttaaaggtgggaagctgaaagtgagactctctcctcaagcttttatctgtccttattgtccaaacaagaagaagactagttttcaatacaaagatcttcttcaacatgcttctggagttggtaatagcaattctgattaaagaagtgcataggtgaaagcaagtcaccttgctcttgtcaaataccttcaacaggatcttgctgattcagcttcagaagcagagcctttatcaaagtgtcagaaaaacggaaactctattcaagagtgcgatcat

SEQ ID NO: 85453 - DNA, 455 bp, Arabidopsis thaliana columbia
  unsure (1)..(455): unsure at all n locations
agaaagagacttactttggatatcaaaacatgtcttgctctctattctaattaagtctagcctatctacaacatacataaacctctatctacgattatatttggttctacaagtgaagattgatcgatgttagctctgtctccggcgacaagagatggttgcaacggagcgtcagagtttcttgatacgtcgtgtggattcacgattataaacccggaggaggaggaggagtttccggatttcgctgaccacggtgatcttcttgacatcattgacttcgacggtatattcggtgtggccggagatgtgcttcctgacttngagatcgnccatgagatcttatncggggggtttntccgntccaaatgaaccgttttttcaacggttannnnggncgncgggtnaanccttttagncaaggggggcctcntaaggggtattccggggnaagttaa

SEQ ID NO: 85454 - DNA, 2992 bp, Arabidopsis thaliana columbia
  unsure (1)..(2992): unsure at all n locations
atggcgatgagacttttgaagactcatcttctgtttctgcatctgtatctatttttctcaccatgtttcgcttacactgacatggaagttcttctcaatctcaaatcctccatgattggtcctaaaggacacggtctccacgactggattcactcatcttctccggatgctcactgttctttctccggcgtctcatgtgacgacgatgctcgtgttatctctctcaacgtctccttcactcctttgtttggtacaatctcaccagagattgggatgttgactcatttggtgaatctaactttagctgccaacaacttcaccggtgaattaccattggagatgaagagtctaacttctctcaaggttttgaatatctccaacaatggtaaccttactggaacattccctggagagattttaaaagctatggttgatcttgaagttcttgacacttataacaacaatttcaacggtaagttaccaccggagatgtcagagcttaagaagcttaaatacctctctttcggtggaaatttcttcagcggagagattccagagagttatggagatattcaaagcttagagtatcttggtctcaacggagctggactctccggtaaatctccggcgtttctttcccgcctcaagaacttaagagaaatgtatattggctactacaacagctacaccggtggtgttccacgcgagttcggtggtttaacaaagcttgagatcctcgacatggcgagctgtacactcaccggagagattccgacgagtttaagtaacctgaaacatctacatactctgtttcttcacatcaacaacttaaccggtcatataccaccggagctttccggtttagtcagcttgaaatctctcgatttatcaatcaatcagttaaccggagaaatccctcaaagcttcatcaatctcggaaacattactctaatcaatctcttcagaaacaatctctacggacaaataccagaggccatcggagaattaccaaaactcgaagtcttcgaagtatgggagaacaatttcacgttacaattaccggcgaatcttggccggaacgggaatctaataaagcttgatgtctctgataatcatctcaccggacttatccccaaggacttatgcagaggtgagaaattagagatgttaattctctctaacaacttcttctttggtccaattccagaagagcttggtaaatgcaaatccttaaccaaaatcagaatcgttaagaatcttctcaacggcactgttccggcggggcttttcaatctaccgttagttacgattatcgaactcactgataatttcttctccggtgaacttccggtaacgatgtccggcgatgttctcgatcagatttacctctctaacaactggttttccggcgagattccacctgcgattggtaatttccccaatctacagactctattcttagatcggaaccgatttcgcggcaacattccgagagaaatcttcgaattgaagcatttatcgaggatcaacacaagtgcgaacaacatcaccggcggtattccagattcaatctctcgctgctcaactttaatctccgtcgatctcagccgtaaccgaatcaacggagaaatccctaaagggatcaacaacgtgaaaaacttaggaactctaaatatctccggtaatcaattaaccggttcaatccctaccggaatcggaaacatgacgagtttaacaactctcgatctctctttcaacgatctctccggtagagtaccactcggtggtcaattcttggtgttcaacgaaacttccttcgccggaaacacttacctctgtctccctcaccgtgtctcttgtccaacacggccaggacaaacctccgatcacaatcacacggcgttgttctcaccgtcaaggatcgtaatcacggttatcgcagcgatcaccggtttgatcctaatcagtgtagcgattcgtcagatgaataagaagaagaaccagaaatctctcgcctggaaactaaccgccttccagaaactagatttcaaatctgaagacgttctcgagtgtcttaaagaagagaacataatcggtaaaggcggagctggaattgtctaccgtggatcaatgccaaacaacgtagacgtcgcgattaaacgactcgttggccgtgggaccgggaggagcgatcatggattcacggcggagattcaaactttggggagaatccgccaccgtcacatagtgagacttcttggttacgtagcgaacaaggatacgaatctccttctttatgagtacatgcctaatggaagccttggagagcttttgcatggatctaaaggtggtcatcttcaatgggagacgagacatagagtagccgtggaagctgcaaagggcttgtgttatcttcaccatgattgttcaccattgatcttgcatagagatgttaagtccaataacattcttttggactctgattttgaagcccatgttgctgattttgggcttgctaagttcttagttgatggtgctgcttctgagtgtatgtcttcaattgctggctcttatggatacatcgccccagagtatgcatataccttgaaagtggacgagaagagtgatgtgtatagtttcggagtggttttgttggagttaatagctgggaagaaacctgttggtgaatttggagaaggagtggatatagttaggtgggtgaggaacacggaagaggagataactcagccatcggatgctgctattgttgttgcgattgttgacccgaggttgactggttacccgttgacaagtgtgattcatgtgttcaagatcgcaatgatgtgtgtggaggaagaagccgcggcaaggcctacgatgagggaagttgtgcacatgctcactaaccctcctaaatccgtggcgaacttgatcgcgttctgacccaagcaagataaatangaaaataagatgcgaaatgtggtgatcattt

SEQ ID NO: 85455 - DNA, 1112 bp, Arabidopsis thaliana columbia
  unsure (1)..(1112): unsure at all n locations
ctacaattcctctgtcgctctcaccagttaacagctacagcacaaaactgtaaccacgcttccgatctctaaaacctgagagagagagagagagagagagagagagacagagagaagtgtttcaatagtttggcgtgaagatggccggaggaggcggatacggcggcgcatcggggaaagttgattacgtcttcaaagttgttctaatcggagattcggctgttgggaaatcgcaactacttgctcgattcgctagagacgaattcagcatggattctaaagccaccatcggcgtcgagttccaaactcgtaccctctccattgaacaaaaaagcattaaggctcagatctgggataccgctggtcaggaaagatacagagccgttacaagcgcatactacagaggagcagttggcgcaatgctggtttatgatatgacgaaacgtgagacctttgagcatattccgcgttggcttgaagaactgagggcgcacgctgataagaacattgtcatcatccttattggaaacaagtctgatctagaagatcaaagagctgttcccactgaagacgctaaagagtttgctgagaaggaaggactctttttcctcgagacctctgctttaaacgcaaccaatgtcgaaaactccttcaacactctaatgactcagatatacaataccgtgaacaagaagaatcttgcatctgaaggcgactcaaataaccccggttcattggctggtaagaagattctcatcccaggttctggacaggagattcccgctaagaccagcacttgttgtacttcttcttgatctgtctcctactcaagcaagattcattttttttcctcctgaaatttgtgatagagaatgctactttcattgtatattctttttcgaatctggcttgtttgctagttcattaaacattggtgtgcaattggacaccgatagaaagtattggaacaaatagcttttgaatgaaatatgaaacaaacagtctttgagagttaaaaaaaaaaaaccaagcccggccgctctagaggatccaagcttacgtacgcgtgcatgcgacgtcatagnnnnnnnnnnnnnnnnnnnnnnnnnnnn

SEQ ID NO: 85456 - DNA, 453 bp, Arabidopsis thaliana columbia
caacattcctaacactacactccaagcaactagcttctctactactcaatactatgtttctatcggcatctatggcttcttcttcacttcacgttgctatcttctctttaatcttcttattctcactcgccgctgcaaatgaagtcaccgtcggtggaaaatccggcgactggaagatccctccttcctcttcttactcattcactgagtgggctcaaaaagctcgcttcaaagtcggcgactttattgttttccggtatgaatctggtaaagactctgttttggaagtaacaaaagaagcttacaacagctgcaacaccacgaaccctttggctaactacactgatggagaaaccaaggtgaaattggacaggtctggtcctttctacttcattagtggagctaatggtcactgtgagaaaggtcagaagctgagccctgttgtgatcagtc

SEQ ID NO: 85457 - DNA, 506 bp, Arabidopsis thaliana columbia
  unsure (1)..(506): unsure at all n locations
ttacctttttccattgggaactggtctttcactaaactggaccaccacgaagacaatatagtctacgactgcaatcgcctcttccccgagcctccatatccaagagaggttaaaataatggaacctgatccgtctaaacgaagaggtctaattttnagtttggaatgcatgaatacattgaacgagggactcatactgcgtcacgcagaaaatgggtgtccaaaaccaaagtggaccaaatacttgagctttctgaagagcaaaactttcatggagttaacaaggcctaaacttgctttgcaccagggagtgtacatatcctgccaggccaacacgggcccgccacccattggttggattcaaagggactttttccaaagnttcacacaatgtttttttacttgggtgcnncgnnttntttcggtttgggaaacagtgggntttattgaanagttttccgccangggggcaanctngggaattaactcgggttttaagtnnnnagt

SEQ ID NO: 85458 - DNA, 426 bp, Arabidopsis thaliana columbia
aagaaaaaaagaataagattttgtcattcttcaaaatacgttctcgccatttgcgccattgattaattcaagtgcgttgaaggtagaggttagttctacacaaagcttgatcttttaggggttttctctagttattggagagtggtgagaattacaaactgcattatccgatctaaaatgggtgatacagagaagtgtaacagtgatatgatccagagacttcattcatctttcggcactacttcttcttccattcccaaaaatcccatttctcagctcgatttaaaccctaatttcatccgctcatcagctcctcaattctccaagcctttcagtgacagtggcaaacgaatcggtgttcctccgtcgcaccccaacttaatcccaccgacttctccgttttctcagatcccgaccacccgacaa

SEQ ID NO: 85459 - DNA, 503 bp, Arabidopsis thaliana columbia
atacgactcacttagggaaagctggtacgcctgcaggtaccggtccggaattcccgggtcgacccacgcgtccgcggacgcgtgggttcgatttgttgattcgcgtgtgttggagctaaatttcgatggcggagatttacgaggaaggagatgaatcagtggatgtgaataaagaatcagaagtgaaaactgagctgggaaaagggggaggagatgagaatgttttgcagtttctagattcgttggatggatatttaacgcttatggattctgtgaattctaagcttcgagagggatggtttgatctagctagtgctcgacattctatgggaactttacgcatcaacagcactctcttagatcttaagtatcatcccgcttcttcaacattgcaagtgactgaccaagatggtgaatctttggggatcagtacctcatttttgctttgtccaagtgggcttccaagtgtgccggtagcaggaaaggcaaaggcttctctactg

SEQ ID NO: 85460 - DNA, 1157 bp, Arabidopsis thaliana columbia
  unsure (1)..(1157): unsure at all n locations
gcaagatgtccattcagttatataattatggagaaggattgatgggtaaagttgcttctgataaatgtcacaagtgggttttcaaagaaccatctgaatctgaaccaaatcttgctaattactggcaaagttcttttgatgctcttcctccagaatggaccgaccaattcgaatcaggcattcagacaattgctgtgattcaagctggacatggtctgttacagctaggttcttgcaagattattccagaagatcttcattttgtgctaaggatgaggcaaatgtttgaatcaattgggttacagatcaggctttttaccctctcaacagcttcttctcttcaaaccgaaccgcgactccatcttcttccacggttccaaaccagatacctcagtctcaaggttttaactggggatcacactcacctttgttaccttcccctagctttcagaaccaactacctgcttcagctagattcggtttccttcaagataacaatgttcctcctcagatgcttcctccaatggaagagcatgaagacgacatcaaatggcctaatggtttgtcgttgttcaatgcgttgactggacgtgcagatgaagctagtaggcttttgtttaaccaggagcagaacccgatgaatgtcgaaaaccagaacgagttcttgaaccttgaaggtcatcatcctaacaagtttagaagaagctatacattgccagctcgaatggattcttcgtcatcatcaacctcgcttgatcagcaacaaccactggagtttaggaacaataactctggaagcaactcgggtttgttccctgacgttatggagacgtttttgaggtgattgacatgttcaagattcaggtttaaggacagattaaactaaaagctctcgatgctagttattagcttatgcttgttataaatacatgaaactctctgttcgttgtttcttccttcttgttgttgttgttgttattgtaccatattgtctgattgtttctccttttatgtcaacactcttttaacatttgaagatactttaaaaacaaaaaaaaaaaaaaaagnnnnnnnnnnnnnnnnnnnnnnnnnnnnnnnnnnnnnnnnnnnnnnnnnnnnnnnnnnnnnnnnnnnnnngcaatctcaaaccttttacc

SEQ ID NO: 85461 - DNA, 631 bp, Arabidopsis thaliana columbia
  unsure (1)..(631): unsure at all n locations
aaagccgttgtggattcatcgcctcgcacaagcactcttgtcgtgtctgagtttattggatgctcaccttctttgagtggtgccattagggtgaatccatgggatgtggatgctgttgctgaagcggtaaactcggctcttaaaatgagtgagactgagaagcaactacggcatgagaaacattatcattatattagcactcatgatgttggttattgggcaaagagctttatgcaggatcttgagagagcgtgccgagatcattatagtaaacgttgttgggggattggttttggtttggggttcagagtttttgtcactctctccaagttttaggaagctatctgtgggacacattgttccagtttataggaaaacacagagaagggctatattccttgattataatgggactcttgttcctgaaagccccattgttcaagatcccagcaacggggttgtctctgtcctgaaagccctctgtgaaggccccaataacacggtgtttattgttagtggaagaggtagagagtctctnagcaattggctatctccttgtgaaaatctttggnataagcagcttgancatgggtaccttccattagatnggagggncaaaagattnagtggg

SEQ ID NO: 85462 - DNA, 586 bp, Arabidopsis thaliana columbia
  unsure (1)..(586): unsure at all n locations
aaaaaacatgacagagaattctgaaaaaatcgatcgtttaaacgatctcacgacttttatctcgacgaagacaggagtgaaaggactcgtcgatgccgaaataaccgaagttcctagcatgtttcatgtcccttcttctattttatcaaacaacagaccttctgatatctccggcttaaacctcaccgtcccaatcatcgacctcggagatcgtaacacatcttcaagaaacgttgtcatttcgaagatcaaagacgcagctgagaattggggatttttccaagtgatcaatcatgatgttcctttaactgttcttgaagagatcaaagagagtgttcgaaggtttcatgaacaagatccagttgtcaagaaccaatatcttcctaccgataacaacaagagatttgtttataacaaatgatttcgatctctatcattcctcctcctttggaattggggngnctntttcacttgtaatattggtccagatcccccgaattcntgggggaatcccnctagctttcaggggtcgggngntcgnntncanggggatttaattggattaggggtgtgtnttccnacttct

SEQ ID NO: 85463 - DNA, 521 bp, Arabidopsis thaliana columbia
  unsure (1)..(521): unsure at all n locations
cccacgcgtccgcgcaacttcttccttatcgacacctacactctcctgctacaatggcgactttcctaacaaatgttgtttcaatcaaacctacaatcttctcattccagtccgaatccttcactcctttgcatacacgggtcaatgtattctcctcgaaaccctttccttctctcgctggaactttctcccggagctctagaacgagattcattccttatgctgtaacggagacggaagaaaaacccgccgctttggaccctagttcagaagctgccaggcgtgtgtatatcggtaacatacccaggacggtgaccaatgagcagctcactaaacttgttgaagaacacggtgctgttgaaaaagttcaggtgatgtatgataagtattcaggaagaagccgtcgatttgggtttgctacaatgaaatcagttgaagatgctaatgctgtggttgagaaatttaattggaantnccgttaaaggnggtanntnaaaggtaanctttnaaggganccttta

SEQ ID NO: 85464 - DNA, 592 bp, Arabidopsis thaliana columbia
  unsure (1)..(592): unsure at all n locations
ccccccttgagttcggaggtgttgattagcttggtatcgaattcggggtctcgctgtcggcatgttctcctccactccgccgcactcgtcgtgccggttttcgaacaagctgctcgatcttcgcgaatccagcacagcgagccaagaggaagctgcttgagctgatctccgaggaggatcgaggtctgagaacccagaaagaccccaagaagcgagatgaaatcgtgaacgccatcgaatccatgacggttatcgggcgcagctccatcaccacagacgactctctatctgccacgtggcggctcttgtggacgacggagaaggaacagttgttcatcatagaaaaggcaggcttgtttgggacgaccgccggagacgttttgcaggtgatcgatgtgaataaacggatcctcaataacgtcatcactttcccgccggacggggttttcttcgtacgctccgatatcgatatcgcttccccgcagagagtcaatttcagattcaaaaagtggggaatttaaangggaaaacttggnggtcccaatggcaacaatttnggaagggntggtttaaaatgggaaattgncgggga

SEQ ID NO: 85465 - DNA, 338 bp, Arabidopsis thaliana columbia
  unsure (1)..(338): unsure at all n locations
ggagtcgaagaagagacaaaagagagcggttaaatcggagtctactgtttctccggttgtttcagcgacgacgactacgacgggagagaagaagttccgaggagtgagacagcgtccatggggaaaatgggcggcggagataagagatccgttgaaacgtgtacggctctggttaggtacttacaacacggcggaagaagctgctatggtttacgataacgccgctattcancttcgtggtcccnacgntcttactaatttntcagtcaactccgacaaacagcganggagaagaaagcccccaccanccgttttccngtgnaagaagaagaagaagg

SEQ ID NO: 85466 - DNA, 568 bp, Arabidopsis thaliana columbia
  unsure (1)..(568): unsure at all n locations
ccgggaaggaacgggccggccgacgcatgcgtgcgggaatagcgtatacagtttcgacgatgtcattgctgagaactgccagaagagcaagagcttgttcattgcatggtctccggacactgccaaagtgagagacaagatgatttacgcgagctctaaagataggttcaagagagaactagatggaattcaagtggaacttcaagctactgatccaacagaaatgggtcttgatgttttcaaaagccgccccaactaagtaaaacaaaaccctgtaagggcatttgaataagtttggtttctggagtgaatatgtttcctctgcctgttatgaaaaccttttaacaccttcaacttcattctacttggtattattgtatgtctttgatgtgttatgtgtgccttgtgatggttttcaattagttttacatgtccaatacttgnnatccaaaaaaaaaaaaaaaaaaaaaaaaaaaaaaaaaaaacaaagcggccgctctagaggatccaagcttacgtacgcgtgcatgcgaggtcatagctctactatagtgcagttaaatcaagc

SEQ ID NO: 85467 - DNA, 919 bp, Arabidopsis thaliana columbia
  unsure (1)..(919): unsure at all n locations
nnnnnnnnnnnnnnnnnnnnnnnnnnnnnnnnnnnnnnnnnnnnnnnnnnnnnnnnnnnnnnnnnnnnnnnnnnnccacgcgtccgtacggctgcgagaagacgacagaagagtgaagaagaaaaaaaagaaggtcattttcattttctccatttgatttttgccgaccggagaaaatatcttcttgccgtcttcttcttcatttcaccaggaacttttatttgaaatcggtttgatttagccatggcaaacgcggcatcgggaatggctgtgcatgatgattgcaagctgaaatttatggaactgaaggcgaaaagaacattccgtaccatagtctacaagattgaggataagcaagtgattgtagagaaactcggtgaacctgaacaatcatatgatgactttgcagctagtcttccagctgatgattgccgatattgcatttacgatttcgactttgtcactgcggagaactgccagaagagcaagatcttcttcattgcatggtctccggacactgccaaagtgagagacaagatgatttacgcgagctctaaagataggttcaagagagaactagatggaattcaagtggaacttcaagctactgatccaacagaaatgggtcttgatgttttcaaaagccgcaccaactaagtaaaacaaaaccctgtaagggcatttgaataagtttggtttctggagtgaatatgtttcctctgactgttatgaaaactttttaacaccttcaacttcattctacttggtattattgtatgtctttgatgtgttatgtgtgccttgtgatggttttcaattagttttacatgtacaatacttgaaatcagattgttgctaggcttcaagccttgtctcagttatctatctgataatttattcgtatatgtttggagtccta

SEQ ID NO: 85468 - DNA, 368 bp, Arabidopsis thaliana columbia
  unsure (1)..(368): unsure at all n locations
cacaaccaaaaaaaagaaaacacaaaaacaaagattataatggcttcctcaaccatggctttgtcctcccctgccttcgccggaaaggctgtgaagctgccgcatcaaatgtcctcggaagcggccgtgtgaccatgaggaagactgtcgccaagccaaagggtccatcaggcagcccatggtacggttctnaccgagtcaagtacttggttccattctccggcgagcccccgagctaccttaccggtgagttccccggtgactacggatgggacaccgctggtctatccgccgacccagagacctttgccaggaaccgtgagctagaagttattcacagcagattggccattttnggagccctaggt

SEQ ID NO: 85469 - DNA, 789 bp, Arabidopsis thaliana columbia
  unsure (1)..(789): unsure at all n locations
nnnnnnnnnnnnnnnnnnnnnnnnnnnnnnnnnnnnnnnnnnnnnnnnnnnnnnnnnnnnnnnnnnnnnnnnnnccacgcgtccgatacgcgcttccatcaaccctttggtcttggaagccaaatcaaacctttccttcaatcctcaaattttcgaaaattttctcttttgctttacgttctctcaattcttatttgtaagaaagtttgttcctttaatcaatcaaatcaaagagacttttgaagattgtttcccaatttgcgtcaatcgggatcgagtcaaatctgaaatcttctccactcatcatctgactataagacttaatcaagggactttttgttcgggtttggttttaaacgtcttggattcgaagtggttaaggtatggatgaaaataatggaggttcaagctcacttccacctttccttactaaaacatatgaaatggttgatgattcttcttctgactcggtcgttgcttggagcgaaaacaacaaaagcttcatcgtcaagaatccagcagagttttcaagagaccttcttccgagattcttcaagcataagaatttctcaagtttcatccgtcagcttaatacatatggttttcgaaaagtgggtcctgaggaatgggaattcttggatggtggttttgttagaggtcggcctaccttatgaagacattcatagacgaaaaccggntcatagccactcgttagtggatctacaagcgcaaatcctttgacggaatcagaaagacggagcttgggaggtcagatagaaagactgaaaa

SEQ ID NO: 85470 - DNA, 420 bp, Arabidopsis thaliana columbia
  unsure (1)..(420): unsure at all n locations
ccaacaggtcgcctgcaaaggctgttggtaaggtccttccggaactcaatggaaaactaacaggaatggccttccgtgtcccaacaccaaatgtctctgttgtggatttaacttgtcgacttgagaaggatgcatcgtatgaagacgtcaaggcagccataaagtttgcatcagaaggaccacttaggggcattcttggatatacagaagaagatgtcgtctctaatgatttttttggagattcaaggtcaagtatctttgatgctaatgctgggatttggattaagcaagtccttcaatgaaacttgtcttcctgggtatgacaacgantcgggggttacaagcaaaccgtgtccttttacctgttagnnacacattggnngttagntttgcagncagncngctaaaanccattatncc

SEQ ID NO: 85471 - DNA, 489 bp, Arabidopsis thaliana columbia
aaaaggagtgccgccacccctgttaatccattcctgggtgttcttcgtcttctcaaagaactgcatgtggggtttgaagccctcccccgggggaagtctgccatatcctcggtcagaaactcctctgttcttccaaaggctgctcagcaatatgttgagaggattgaagaactcgtgggtgtgcccattcattaccattggtattgggcccggtcgtgatgcccttatatataaatgatttttagtgttaggcttttttggttcctccacaaactcaaaaattgatcaagtgtcaagttactgagaattattactctctttggaatgactagtgtatctgttgcattgtttctaatattggaatgaagaggaattctgtgcttaagcagtgaggttgctatattcataatgtttaagctttcgtgtttgatcttaaaggaaaaaacaaaaaggcgaaccgctctagaggatccaagcttacgtacgcgt

SEQ ID NO: 85472 - DNA, 1698 bp, Arabidopsis thaliana columbia
gcctgcaggtaccttttgatacctcttctcttctctctcttcgaagatgtctctctcttccctcactctcgactccaatccaagattcgctgttggtggaccttatcaccgccgttatcctcctcttcaccaccctcgaagcttcgtctcttgctctgctaaacgtccagctgtctccgcttcactgagcgtcgccgctgattcagccgccactgagtctcttggacggattggatcactgagtcaagtatctggtgtactcggttgccaatggggagatgaaggtaaaggcaaactcgttgacatcttagcccaacactttgacatcgttgctcgttgtcagggtggagctaatgctggacacactatatacaattcagagggaaagaaatttgcacttcaccttgtgccttcaggtatcctgaatgaggatactacttgtgtcattggaaacggagttgtggtgcatttgccaggtctcttcaaagagattgatggtttggagtccaatggtgtctcctgtaaaggaaggattttggtctctgatcgcgctcacttgttattcgatttccatcaagaggttgatgggctcagggaatctgagcttgccaagtcgttcattggcaccaccaagaggggaattggtcctgcctactctagtaaagtgataaggaatggtattagagtaggtgatctcaggcacatggatactttacctcaaaagcttgaccttttactatcagatgcagcggcaaggtttcaagggttcaagtatactcctgaaatgcttcgggaagaagttgaagcatacaagagatacgctgacagattggagccctacattactgacactgtccatttcatcaatgactcgatttcgcagaagaaaaaggttttggtcgaaggtggtcaagctacaatgttggacattgactttgggacttatccttttgttacttcctccagcccctcagccggtgggatctgcacaggtcttggtattgcaccaagtgttgttggtgatctaattggagtggtaaaagcatacactacaagagttggttcaggtccattcccgacagaaaatttgggcacaggtggtgaccttcttaggttagctggacaggagtttggcactacaactggtcgtcctcgtcggtgtggctggcttgacattgttgccctgaaattttcttgccaaatcaatggatttgcatcacttaatctcactaagcttgatgtactttcggatctgaacgaaatccagctgggtgtggcttacaagaggagtgacggcacccctgttaaatcattccctggtgatcttcgtcttctcgaagaactgcatgtggagtatgaagtcttacctgggtggaagtctgacatatcctcggtcagaaactactctgatcttccaaaggctgctcagcaatatgttgagaggattgaagaactcgtgggtgtgcccattcattacattggtattgggcccggtcgtgatgcccttatatataaatgatttttagtgttaggcttttttggttcctccacaaactcaaaaattgatcaagtgtcaagttactgagaattattactctctttggaatgactagtgtatctgttgcattgtttctaatattggaatgaaggcggccgcgaattcgatatcgagctggtcgatgcaatcgacaacggggg

SEQ ID NO: 85473 - DNA, 429 bp, Arabidopsis thaliana columbia
ccacgcgaccgcaataactgattactcttcttcttcttcctccgtcgttgtttcatgcgacgaatcggtttcagattcagtcgtggtatctctcgatcttctctatctttgtcatggatgatctgttacaccagcgagtcgagcagtctcaggtaactcctcctcatgacgattctaatatccatggtgattttgataacgaggctacggatgaatcgcgatccgaaacttgttctgttgtgatagagggaaactgcgacatggtgattgaattaggattggaatctggaagtgttatcgttgagaatttaggtgatagtgatattgatgttagcaatgattttgatgaacctgatgacgacgatttctttgtggggaggactgattttgggctcgagttccgcgatattgcatcttcggggaatgata

SEQ ID NO: 85474 - DNA, 489 bp, Arabidopsis thaliana columbia
  unsure (1)..(489): unsure at all n locations
gcaacatacaacgtcgcgaagggacaatcgttcccaccgaaaaccctctcttctctctcctcaactcagatcgtagatctactttttnctcttctttctttttcaattaaagatcttcatcgtcgcttgatgggttggagggtaaaacggtggtgagcttctttcttctccgatggtgtgacggtggctctccttcacggtggcctgaaaattggttcctttgttctgctagttatggacaacagcggattggttcttgttattacggtttggcgatttgtgattgtacctccggcgagtagcggaagttgagtttttggatcggtgggtttcaccacttttgtnaagaggttaacggtggctcctttggctggagcctagatggctagttcggggtnatctttngccgantntcgggtaggtnattggattntttaagccggtngtcaacannttncgccntaantggttcccctttncngaacntaa

SEQ ID NO: 85475 - DNA, 410 bp, Arabidopsis thaliana columbia
  unsure (1)..(410): unsure at all n locations
gcagctagcgtgaagacgatgaaatcgattgggaggagatagataagcgcgaatttgagagtgaaaattctaaattcagacccattttcaccggcgcgagtcatcgttgaaccatgtcttggcttcctgtagaatctgatcctggtattttcactgagattatacaacaaatgcaagtgaaaggtgtgcaggttgaggaattgtattccttggacttcaactctctggatgaaataagacctgtctatggattgatattgctttacaagtggcgtccagaagaaaaggagaatcgtgttgtcatcacagagccaaacccgaatttcttcttttgcaagccagataaatcaacaatgcttgtgcgncccaagcgatnttntcagtcctcatgaacctcttcgngtattgat

SEQ ID NO: 85476 - DNA, 395 bp, Arabidopsis thaliana columbia
cccacgcatccgcacacgcgtccggatcgtttggattattctctctggatggaacgcttgatgggttatgctttgttcttaagttaagtgaaaatacttggctaaattataggggggaagacttctatgtccctttccttacttcacgtagctcgcccgttgaaactgaagctgcccaagtgagtaaacccagacgaaaaacagataaagaagtgtctgctagtggatttactaaagaaatcatcacggagataaggaacttggcaattgacatttcctctcataagaatcagaagacaaacgtcaaagaagtgcaggaaaacattctacaagaaattgagaaactggctgcggaggcatatagcatatttagaagcacaactccagctttttcc

SEQ ID NO: 85477 - DNA, 530 bp, Arabidopsis thaliana columbia
  unsure (1)..(530): unsure at all n locations
anggatcgaacctccgggatttttccttggccgtatgngggcgtccagtcccctagccgaccgtgcctccctatggatcccaattccaggaaggccttccaaaccgtcctgccccccccagagaacccggtttgtttncctccaggtgtttatccggaggaactcacattggtgccgtggaggagattatgccagctaaatgatggtggtgaattagccagagatgttgaaagatttcccctgcttgtgaacgcttggggacatgccggagctgtggtgatgcaaggtttgtgccttgtactaactgtgatggtagcaccaaagtgtttgaagaacaagatgaacggtttaagcggtgtcctaaatgcaatgagaatggattggtgcgttgtcgtgtgtgttgtctctaagtgatcagtttgatcaaaagatgtgtgtgagaaaggggatatagattgattgactaaacatggtatttggttagtaatgtatattcaaataagtaagttggctcaagccttttattattt

SEQ ID NO: 85478 - DNA, 700 bp, Arabidopsis thaliana columbia
  unsure (1)..(700): unsure at all n locations
aaagtctctctcttgtagcccatcatcaaatccatccatcttaataagcgaagaaccaaaatctgtatcctctagtcaattgatttcatcaccagccaaaccgagattaccaggaacagaagacaagattgtgccccccctccccaccctcaggggaatccgaaagacatacggaggattgttgttgcgttagagcgatattgaggggaggtcaagtgcccgtaagacggaacgtgacatctctatggattcccaaatacaggaaagagcctccaaagcgtgcttggcgccgcaagaagaaaccggtttgtttgcctcaggtgtttatcagaggaactcacattggtggcgtggaggagattatgcagctaaatgcatggtggtgatttagcagagatgttgaaagatttcccctgcttgtgaacgcttggggacatcccggagctgtggtgatgcaaggtttgtgccttgtactaactgtgatggtagcaccanagtgtttgaagaacaagatgancggtttaagcggtgtcctaaatncaatgagaatggattggtgcgttgtcgtgtgtgttgtctctaagtgatcagtttgancaccagatgtgtgtgagaaaggggatatagattgattgactaaacatggtatttggttagtaatgtataancaaataagtaaggtgnctcaagccttttagca

SEQ ID NO: 85479 - DNA, 525 bp, Arabidopsis thaliana columbia
tgagtggaactgttgaatcagtgttgagaccattgaatgttcttgatatcgatcccttctttaaccgtttcatagagcgggctcatttccctcaacttctcaacttgtttaaccgtaagctcgcccgctttatcaatctcgtccttcgtggtagccctaccaatcccgagcctaatcgaagtgtgagccatgtcttcatccacacccaaagctctcaacacataagaaggctccggactcgcactagtacaagcactgccactagacactgcaacttccttcaatcccatcaacaaactctctcctgcaacataagcagtcgacccattcaaattccctacatatcgactatccattgatccattcacctctacaccatcgagcttctctctaaccccattcagcaacctctcctgtaaccccttaatccacttctcatcatactccatccggacgcgtgggtcgacccgggaattccggaccggtacctgcaggcgtgcgtgctttccctaacgtgagtcgtat

SEQ ID NO: 85480 - DNA, 562 bp, Arabidopsis thaliana columbia
  unsure (1)..(562): unsure at all n locations
gtccggatctaaatccgcgagcggccgcccttttttttttttttttttttaagctcacaacacctaaaaattaatcattcaatttcaaaggatatcacaatctaaccagaaatgaacctttgtttctgttttattacaagaccacacaagaaactctcacatgcaattctctctagaaagcactatagatagattacttaccaacagatcatagtaagaacacacgatcatatcatcgttcatactcacatctcagtatggctctcatataccccggctgaccacagactggagattccctcttgtcccgcacagtttgagtggaactgttgaatcagtgttgagaccattggatgttcttgatatcggataccttctttaaccatttcataaagcgggntcatttccctcaacttctcaacttgtttaaccgtaggtcgacggnttatcnatctctncctcgggggaacctaccaatcccaacctatcggnggngngcatgctnatccaacncaaggtttaaacatagagggncnaatcggcnagtaagncttcntaggnt

SEQ ID NO: 85481 - DNA, 238 bp, Arabidopsis thaliana columbia
gattcaaataatttggccagaatatttcctgctgttcccttttgtttacatgtatcactcaccagtcaccagttaactttcttcatcaacctggtgcactggcaaaataattttaaggtactatgtttttttatattccacttgcttatcatcttatgcttcttggctctgccatggattgttccgtgtatcatcattatttgttaacaagatctgtctgtaactctgttctcttttt

SEQ ID NO: 85482 - DNA, 460 bp, Arabidopsis thaliana columbia
  unsure (1)..(460): unsure at all n locations
catacccattttcccctgttcttgttctgttttctactagttgtgtctgaaagtaaagtcctctgtttttgctctgtttatgtcgtctctgaactcctacaatggcgtttaatcacagaaagatgcttctttcatgtctacagtttaaagatttacgcttttgtttccggcaataccctctcccgccaccaccaccaccgccaccgagggagctctctctcctactccccacctcgatctgcgtcgtcgggctcaatcatactctttctatttctagtcttcttcctctacctccacatcacggaacaacggcgggttttagccggcagcgtaaactcccgggtgncaaaaaaccaacaagggagggtgacggccgggaacaagaggggggagatttttttgctggttttttaaaaaggtttgggaaantcccaancggggggtttncancgntncgggg

SEQ ID NO: 85483 - DNA, 307 bp, Arabidopsis thaliana columbia
  unsure (1)..(307): unsure at all n locations
caagccaaagnncaagaaaatatgagangactctttctcttctctctcctctttttattcttttactcatcctcctcctcaagatcttcatcagaatctcacatcttcatctacggaggatgttcaccgggaaaatacacaccaaacacaccttttgagtcaaaccgcggcactttcctctcctctgtcgtcacttcctcctctgacgcgtccttcaacagctttgccgtcggaacgactcctcctcctcctcatcctctttcgncgtcttcggnctctatcaatgccngtgaaggtctccgatcat

SEQ ID NO: 85484 - DNA, 535 bp, Arabidopsis thaliana columbia
  unsure (1)..(535): unsure at all n locations
ataatcacattgcatgattgatcaaatactcgattttccgtgaaatctctttgaatatttcgattccttgttaccatggcgcttcatgggtctggagttttttgtaaagtttcaaacatggtagagatcacttctccgtttggtggttccatgaggctgcttcacttgcctaaatcttatccgattcactgcaacatggtttcagctagcaatacatttgggtcagctcatctcaagctgcaaaacaaagaaccgtgctcccgtttaagggccttgtcgagtcaaacgcggagaaaataaccaaactgcggatgttgaaagcatttcaatggatgagaccacgttgaagcaagatctcgagactgccggtccagggagaggattttttggggggagcttaaaatccgggataaactaaaagagctttcngnaggcaacaaagcctctttttttttagccaattnttgggtctnccatctttcagnancgggggttttgnttngnttnnattactttngnnaaaanaaggaccccg

SEQ ID NO: 85485 - DNA, 469 bp, Arabidopsis thaliana columbia
aaaatatcaaatgtgggcaacgaaactcgtctcggaaccaatcgttccttctctgaagctctctttgcaattgaaaatcaacaacatacgatacgagagaggattcttcgagagatgagcagcacaagcactagttctgctcttatccaccatttccgcctcaccactcgcaacttgggttcgcctacaaagcagcgttgtccttacgctgtaactttctgcaattcgtggagggaagctggactccgatactccgtcacgcaacgccggagcaaaggctttgggccggtgtcagctctcaatgacgacgattcaccaacagagaccacccccggcgttggctctgctgtagaagacagaccaccagattcatctgaagatagatcaagttcggtctatgagtttctgtatccccgtaaagaggagctccctgatgacaaagaaatgactattttcgaccatctcgagg

SEQ ID NO: 85486 - DNA, 428 bp, Arabidopsis thaliana columbia
cccacgcgaccgcacacgcgtccgggatcccaccatgaatccaactccaactccaagctccgccggcaacagtgtctgcacagatgaattgaccaaccttcccccggaggactcgccactcgacagcgagaaggatgatagcgttgacttcagccaggagcaaggatcggagtcaaatgaagctattgacactgagaatggttcaagatccgtagacaagaaccaatactctgaaactgaagttgtagttagagcaaaagatttacagacagaacctgattcactggatgatgatgtggagattgtgatcaaaaaccaacataagtattacatatactgcccttgctgtggtgaagatatcaccacaacagtcaagctcgtgaagatatcagatcccaaacacacaacagaccatgacaaagctgttg

SEQ ID NO: 85487 - DNA, 814 bp, Arabidopsis thaliana columbia
cagtaccgctccggaatttccgggtcgacccacgcgtccgggggtttgcttgtggacgatgaatttatacacggagaagaaagttcctgactgttcggaaaacatctctgtttttcgccggcgatggtttcacagtttacgactgcaagggaagtttggtgtttcgggttgactcttacggtggtcccaacacccgcgacaccgacgaggttgtcctcatggacgctcacggccgttgtctcctcaccctccgacgaaagaggccgagtttgcgacggagatgggaggggtatctcggggagagatcggacggccagaaaccgatcttcggggtaaggagatcttcgataatcgggaggaacagtgtgacggtggaggtgtacggggactaccagtgcagcgagtacctgatagaaggtagtttcggggcaaggaactgcacggtggtggaggcggagacgaggcggaaggtggcggagataaggcgcaaagtggatgcgtcaacgaacgtgatgcttgggaaagacgttttctcgttgaacgtgaagcccggttttgatggagcctttgcaatgggattggttcttgtgcttgatcaaatctacggcgacgatctccttgaggttggtgaggaacaggtgcaccctttccgaaaaaaatccttgattttgattttttcacccctttttttgagtttttggcttttctttcttttttttgggtgggggaccgccaaacccaaaaattcggaggtggggaaaaaaataaattcaatttaatttggtgaaggtttgggtggttccgggtttgggaa

SEQ ID NO: 85488 - DNA, 604 bp, Arabidopsis thaliana columbia
  unsure (1)..(604): unsure at all n locations
cttctttcacgtctctcttccctgaaactttcccgagaaaattctcaatcctctattttctcgagaaaattctcattctcattttctttcagggaaaagttttgttgttgaatacagatttggaaacttcatttgtttttttccgtttttaaccaaaatttttaaaaaagctttcttctgaacgttaatcgtggagagtttcgggtcgggtcgggtcgtaaaaggcgggtttcacggtggtgatagattcacctcctgcttccttctgagggggttagccccgaggctcttcgcctcggcgggtttcaaattcccccaaatctaacaaactcacagattcattttctccattttttttgtttgttgaaaatttgaatccacaaattttgaattcatttgtaaccgttccgttgaagnagnagnagntgcctnctctagcttttgttgataccnccatcgntaccttttncagnatcttacaccggcggcctgtttcaccgccggttgtnacgggtncctccattggctccggcccntcccccgttttaccgatggcggnttgggggncnnattnggaggnatccncgganatttnttggccagg

SEQ ID NO: 85489 - DNA, 838 bp, Arabidopsis thaliana columbia
  unsure (1)..(838): unsure at all n locations
nnnnnnnnnnnnnnnnnnnnnnnnnnnnnnnnnnnnnnnnnnnnnnnnnnnnnnnnnnnnnnnnnnnnnnnccacgcgtccgcggacgcgtgggcggacgcgtgggcggacgcgtgggcggacgcgtggggaaagctgccttctttatgtcgatcagctgaagcagaggtgtgttgaaggtttcaaagaaggtgttttgagcatcgagcagttagcttctgttgatggtttatgcgagtgggtgttgaaggctataggcgcatcggatccggttcatacttacaatatcaatctatcagttttcacttcgattcctgatctctgggggattgatcagctgttccctatagttcctatccataagctcgatcaaaggcccggggctcgcggaatcctttcagatttaacgtgtgatagtgacgggaagatcaacaagttcataggcggtgaatccagcttgccgttgcacgagctggacaagaatggcagtggaggaaggtactttttgggtatgttccttggaggggcttacgaggaggctctcggtggagtccacaatctgtttggtggaccaagcgttgtnccggtctcccagagcgatggaccacacagctttgcagtgacccgagcggtgcctggtcagtcctcagcggatgttctccgagcantgcagcatgagccggaactatgtntcagaccctaaagcaccgagcagaggatatgatgcatacccaaaggtggtagcgaaggtgaaaatgaagaggaagaaagagatgatgagttcaacattgtggcggcttctctcgaccgnntcgtccacaacatgccggatcttgca

SEQ ID NO: 85490 - DNA, 3106 bp, Arabidopsis thaliana columbia
  unsure (1)..(3106): unsure at all n locations
aatacgactcatatagggaaagccggtacgcctgcaggtaccggtccggaattcccgggtcgacccacgcgtccgcttcatttccgtcttttccgctaggtttccgtctctgttttttcttgcattttccccagaattccttcacattctctccttttcctctttttaattcctcaccacctcaaattcttcataaacaaatccacttctgcatggttgggagaatctgttagagaatttttgttgttgttgggttcagatttggaaaatttcctttttttcgagtttcttctgaattattcatcgtggagattctcggatcgggaagggctgcgagaggtggttttcacggcggggatagattcatcttctgtcttctcctgagggggtagccgaggctccggcctcggcggtttttaaacccctacctttacaaattctgggaaattagaaaaaaaaaggtttgatttttcagtttttgctctgttcttctctcgaaagtttttgttttgttcgagaatttctgtaaagtgagattgttgatcgtttgctgataagagggtgaagataaagatgcctgctttagcttgcgttgatacgtcctttgtacctcctgcctacgccttctccgacaccgccggtgatgtttttatcccggcgtcatcaccaacttccgccgccgttgttgttgaccgttggtctccgtcgctctcatcgtctctctatcgaatcgatggatggggagccccttatttcatagccaattcgtctggtaacatctctgttcgtcctcatggctctgaaactttgcctcaccaagacatcgatttgctcaaaatcgttaagaaggtgacgggtccgaaatcttccggtggtttaggattgcagcttccgttgatcgttcgtttccctgatgtgttgaagaaccgtctcgagtgtcttcaatctgcgtttgattacgcgattaaaagtcaaggatatgattctcattaccaaggtgtttatccggtgaaatgtaaccaagatcgattcgttgttgaagatattgtcaagtttggatcttcgtttcgatttggattagaagctggttctaaacctgagatccttcttgctatgagctgcttgtgtaaaggtagccctgatgcctttcttgtgtgcaatggattcaaagatgctgagtatatatcattggctctgcttgggagaaaactggcgttgaatactgtgattgtgcttgagcaagaagaagagcttgatctggttattgagctgagccagaagatgaatgtgaggcctgtcattgggttaagggctaagctgaggactaagcattcgggtcatttcggatcaacttctggtgaaaagggtaaatttggattgactactactcagattgttcgtgtggtgaggaagctgcgtcaatctggtatgcttgattgtctccagcttctgcattttcatattggttcacagattccgtcgacttcgttgctctctgatggtgtcgccgaggctgctcagctttactgtgaacttgtgcgtcttggtgcacatatgaaagttattgatatcggtggtggtttggggattgactacgacgggtctaaatctggagaatcggatctctctgttgcttatagtctcgaggagtatgctgaagctgttgtagcttctgttcgggttgtgtgtgaccggagctcagtgaaacatccggtgatatgcagcgaaagcggtagagcgatagtctctcatcattctgtgctgatctttgaagctgtttcagcagataaaccaatggttcatcaagcaactcccggcgatattcagttcctgcttgaaggtaatgaggaagctcgagccaattatgaggatctttatgctgctgtgatgcgtggagaccacgaaagctgccttctttatgtcgatcagctgaagcagaggtgtgttgaaggtttcaaagaaggtgttttgagcatcgagcagttagcttctgttgatggtttatgcgagtgggtgttgaaggctataggcgcatcggatccggttcatacttacaatatcaatctatcagttttcacttcgattcctgatctctgggggattgatcagctgttccctatagttcctatccataagctcgatcaaaggcccggggctcgcggaatcctttcagatttaacgtgtgatagtgacgggaagatcaacaagttcataggcggtgaatccagcttgccgttgcacgagctggacaagaatggcagtggaggaaggtactttttgggtatgttccttggaggggcttacgaggaggctctcggtggagtccacaatctgtttggtggaccaagcgttgtccgggtctcccagagcgatggaccacacagctttgcagtgacccgagcggtgcctggtcagtcctcagcggatgttctccgagcaatgcagcatgagccggagctaatgtttcagaccctaaagcaccgagcagaggaaatgatgcataccaaaggtggtagcgaaggtgaaaatgaagaggaagaagaagatgatgagttcaacaatgtggcggcttctctcgaccgttcgttccacaacatgccgtatcttgcaactgagcaggcatcgccaagtaactctctttcagctgcgatcagtaaccttgggttttactactgcgacgaagacgtctacgattacatctctgcgtgagaaaaggtggtcgtcgtgtggtttgttgttgcattatattatcgtaaaatcgtcattgtacgatttctttaaataaaagttattaaataagaacatgatgagatccatgatccatcgttgtttaaggttttaagtaagaagatccgaattatgaaagccttttgtgaaattcggatctttttatatttatttcccccttcaaatgtagccgttcccgtttgcggccgcgtaaaaataataaaaaagtttgccccnnnnnnnnnnnnnnnnnnnnnnnnnnnnnnnnnnnnnnnnnnnnnnnnnnnnnnnnnnnnnnnnnnnnnnnnnnnnnnnnnnnnnnnnnnnnnnnnnnnnnnnnnnnnnnnnnnnnnnnnnnnnnnnnnnnnnnnnnnnnnnn

SEQ ID NO: 85491 - DNA, 2715 bp, Arabidopsis thaliana columbia
catctttcacgtctctcttcaattcgcggccgcgcggccgcgtctcaatcctctattttctcgagaaaattctcattctcattttctttcagggaaaagttttgttgttgaatacagatttggaaacttcatttgtttttttccgtttttaaccaaaatttttaaaaaagctttcttctgaacgttaatcgtggagagtttcgggtcgggtcgggtcgtaaaaggcgggtttcacggtggtgatagattcacctcctgcttccttctgagggggttagccccgaggctcttcgcctcggcgggtttcaaattcccccaaatctaacaaactcacagattcattttctccattttttttgtttgttgaaaatttgaatccacaaattttgaattcatttgtaaccgttcgttgaagaagaagaagatgcctgctctagcttttgttgatactcccatcgataccttttccagtatctttacaccgtcgtctgtttccaccgccgttgttgacggttcctgccattggtctccgtccctctcctcctctctttaccgtatcgacggatggggagctccgtatttcgcagcgaattcctccgggaacatctctgttcgtcctcatggctcaaacactttacctcaccaagacatcgatctgatgaaagttgtgaagaaagttacagatccgagtggtttaggattacagcttccgcttattgttcgtttccctgatgttctgaagaatcgtcttgagtgtcttcaatccgcgtttgattacgcgattcagagtcaaggatatgattctcattaccaaggtgtgtatcctgtgaaatgtaatcaagatcggtttatcatcgaagatattgtcgaattcggatccggttttcgattcggtttagaagctggttccaagcctgagattcttcttgctatgagttgtttgtgtaaaggtaatcctgaagcttttcttgtgtgtaatggttttaaagactctgagtatatctcattggctttgtttgggaggaaacttgaattgaatactgttattgttcttgagcaagaagaagagcttgatttggttattgatttgagccagaagatgaatgtgaggcctgtcattgggttaagggctaagctgaggactaagcattcgggtcatttcggatcaacttctggtgaaaagggtaaatttggattgactacggttcagattcttcgtgtggtgaggaagctgcgtcaatctggtatgcttgattgtctccagcttctgcattttcatattggttcacagattccgtccacggctttgctttccgacggtgtggctgaggctgcgcagctttactgtgagcttgtccgtcttggtgctcatatgaaggtgattgatattggtggtgggttggggattgattacgacgggtctaaatcgggggagtcggatctctctgttgcttatagcctcgaggagtatgctgcagctgtcgtggcttcggttaggtttgtttgtgatcagaagtctgtgaagcatccggtgatttgcagcgagagcggtcgagccattgtgtctcatcactcggtgttgatctttgaagctgtctcagctggtcaacaacatgagacccctactgatcatcagtttatgcttgaagggtactctgaggaagttcgaggtgattacgagaatctttatggtgctgctatgcgtggtgatcgtgaaagctgcttgctttatgttgatcagctgaagcagagatgtgttgaagggttcaaagaagggttccttggcattgaacagttagctggtgttgatggattatgcgagtgggtgattaaggcgattggtgcatcggatccggttcttacttaccatgtcaatctatcggttttcacttcgattcctgatttctgggggattgatcagctgtttcctattgttccaatccataaacttgaccaaaggcctgccgcgagagggatcttatcggatttgacgtgtgacagcgacggaaagatcaacaagttcataggcggagaatcgagcttgccattgcacgagatggacaacaatggctgcagcggtgggcggtactatttgggaatgttcctaggtggagcttatgaggaagctctcggtggagtccacaatctgttcggtggaccaagcgtggttcgcgtattgcagagcgatggacctcacggattcgcagtgacccgtgctgtgatgggccaatcctctgcagatgtcctcagagcaatgcagcatgagcctgagctcatgtttcagactcttaaacaccgagccgaggagccgaggaacaacaacaacaaagcttgtggtgataaggggaacgacaaactagtagtcgcatcgtgtcttgctaagtcattcaacaacatgccttatctttccatggaaacgtcaacaaacgctctcaccgcagcggtcaataaccttggcgtttactactgcgatgaagctgcagctggtggcggcggcaagggcaaagatgagaattggtcttatttcggttgattgagagagacttgacaacatcctctgtctttgatcttcaccgtacgattgattacgatcctagttcttatttgtctttaagttcagttttaaagttttaagttattttcttgtaataagacaaactcttagcaaaatttaataatattatcatttatcatcacggaaaaaaaaaaaaaaaa

SEQ ID NO: 85492 - DNA, 765 bp, Arabidopsis thaliana columbia
  unsure (1)..(765): unsure at all n locations
nncacacgagtccgccaaatcctttacttactaacaaaaccttgagagcattttttatgaagatgatcactttggaatgttgtcggccgcacccagagtcaatatacataagcaacgagaagaaagattgttattaataccgagtgtgagataatgtgggcgccaatttcagtttcaagctttcatcttcgtcttcctctttaagttctgagatctagggtttttctgggtttctttgttctcactcttaaattctctttctgactctgtaagattggtcatgcccctgccctttgagcaatttcaagggaagggggttctgggtttcttagattcttcttcttctccgggatacaaaatctgggctaatccagagaagctccatggacgagtagaagaagatctctgctttgttgtcaacaatggtggtttctcggagccgacgtctgttttagactctgttagaagtccaagccctttcgtctcttcttcaaccaccacgctgtcttcttctcacggtggtcccagcggcggcggcgctgctgctgctactttttccggcgccgatgggaaatgcgaccaaatgggtttcgaggatctcgatggtgttctcttcggtggctcggccgggacaaagaacagagtatttttaggaataaatcatgggcttggccaaggtaatgggattccggggttccggaattttgggggggttttggaccattcgggttcttggattcccgaaccccgggttaattggataaa

SEQ ID NO: 85493 - DNA, 566 bp, Arabidopsis thaliana columbia
  unsure (1)..(566): unsure at all n locations
gaaatttgtnctgagctcaacgccatttttaacgatttcgaatctctgtcttctctgagttgttccaagtaatcggagggaactcgtaaagtggaagaataggagaaagagagaaggaagaagatttntgaatagctcttgatctggtgaagaatggatgcaattagaaaacaagctagcaggttgagagaacaagttgcgagacagcagcaggctgtctttaagcaatttggaggagggggatatggctctggtttagctgatgaagcagaactcaatcagcatcagaagctagaaaagctttacatatccactcgtgctgctaagctttaccaaagaggtatttgttcgtggtgtggaaggtatatagttacaggggcaaaacaagttgaaataggtccggaattntctttgggttgcagggaatttggtnccgggnttcatgtccggntngtaccgntttacnccggggtcacctnaccnttgggggcccccnccccaattgggnggaccctggaaatttttaaggcccttggccccaggttctnnccttcgggatgnttggg

SEQ ID NO: 85494 - DNA, 480 bp, Arabidopsis thaliana columbia
  unsure (1)..(480): unsure at all n locations
acgcgtccgcacacgcgtccgcccacgcgtccgcccacgcgtccggagagttttgtgaactcaagaaaataaaaaaagttatagttaatgggattcggcttagagagtatcaaatcaatctccggcggatggggcgcggcggcgcgttcctgtgacgcttgtaaatcagttaccgccgccgtgttctgtcgagttgactcagctttcttatgcatagcatgtgacacaagaatccattccttcactcgccacgagcgcgtgtgggtttgtgaagtttgtgaacaagctcccgccgccgtcacttgcaaagccgacgccgccgctcttttgcgtcactttgtgaatgccgatattcactctgcctaaatcctctcgctaggccgtaacggaacggtntccccgntngaaacttttttttgggnttnanccngaaaacccnccnttgtcaaaaattttaaggttttttnggctttttgggta

SEQ ID NO: 85495 - DNA, 718 bp, Arabidopsis thaliana columbia
catccaagcaaatcaaatacccaactctcacacgttctcaaacaaaaacttcaaagagagagagagagagagttttgtgaactcaagaaaataaaaaaagttatagttaatgggattcggcttagagagtatcaaatcaatctccggcggatggggcgcggcggcgcgttcctgtgacgcttgtaaatcagttaccgccgccgtgttctgtcgagttgactcagctttcttatgcatagcatgtgacacaagaatccattccttcactcgccacgagcgcgtgtgggtttgtgaagtttgtgaacaagctcccgccgccgtcacttgcaaagccgacgccgccgctctttgcgtcagttgtgatgccgatattcactctgctaatcctctcgctagccgtcacgaacgtgtccccgtcgaaactttcttcgactcagccgaaaccgccgtcgccaaaatctcagcttcttcgacttttggtatccttggctcgtccgccaccaccgttgatttaaccgctgttccggttatggctgatgatctcggtttatgtccgtggttacttcctaatgatttcaacgaaccggctaaaatcgaaatcggaactgaaaacatgaaaggttcttctgactttatgtttgctgatttcgatcggcttattgatttcgagtttccgaattcgttcaatcatcatcaaaacaacgccggaggagatagt

SEQ ID NO: 85496 - DNA, 847 bp, Arabidopsis thaliana columbia
  unsure (1)..(847): unsure at all n locations
nnnnnnnnnnnnnnnnnnnnnnnnnnnnnnnnnnnnnnnnnnnnnnnnnnnnnnnnnnnnnnnnnnnccacgcgtccggatttctgcagatcaaagctctctgctttcacttacccttctcaatcagtcagccacagtgtttcgacttcttctattgaatacggtgtagttcctgacggaaacacaaacaactctgttaaccggagcacgatcactagctcgacgactggtggtgatcatcaagcgagctctatggatagagaagctagggttttgaggtacagagagaagagaaagaacaggaaatttgagaagacgattcgttacgcttcgaggaaagcttatgcagagtcacggccaaggatcaaaggccggtttgcgaaaagaacagagacagaaaacgacgacattttccttagtcatgtttatgcttcagcagcacacgcacagtacggtgtcgtaccaacgttctgattcgaatctacggtggataaacaatcaacctgaagacttcatatcttccaccgttgatttacagtcggtgtataataagtatagtgagtcttaccgtagacaaacatcttatcctctttaccgttttaattacttttttcttacgcgctctcactgccactgtaactctttttttttttcttcctatatatgtatgcttatttttatttagaaaatgttatgaaatcatataatttgggaaattataggtttctaattggctgaaaaaaaaaaaaaaaaaaaggaaagggcggcccgttcnnnnnnnnnnnnnnnnnnnnnnnnnnnnnnnnnnnnnnnnnnnnnnnnnnnnnnnnnnnnnnnnnnnnnnnnn

SEQ ID NO: 85497 - DNA, 1132 bp, Arabidopsis thaliana columbia
tcgattgtatcgatcagcttgatatcgaattcgcggccgcgtcacgaacgtgtccccgtcgattctttcttttcgactcagccgaaaccgccgtcgccaaaatctcagcttcttcgacttttaggtatccttggctcatccaccaccaccgttgatttaaccgctgttccggttatggctgatgatctcggtttatgtccgtggttacttcctaatgattccaacgaaccggctaaaatcgaaatcggaactgaaaacatgaaaggttcttctgactttatgttttctgatttcgatcggcttattgatttcgagtttccgaattcgttcaatcatcatcaaaacaacgccgggggggatagtcttgttcccggttcaggcgaaaacagagctctctcccgttaactaacagtgatcattgcttcgatattgatttctgcagatcaaagctctctgctttcacttacccttctcaatcagtcagccacagtgtttcgacttcttctattgaatacggtgtagttcctgacggaaacacaaacaactctgttaaccggagcacgatcactagctcgacgactggtggtgatcatcaagcgagctctatggatagagaagctagggttttgaggtacagagagaagagaaagaacaggaaatttgagaagacgattcgttacgcttcgaggaaagcttatgcagagtcacggccaaggatcaaaggccggtttgcgaaaagaacagagacagaaaacgacgacattttccttagtcatgtttatgcttcagcagcacacgcacagtacggtgtcgtaccaacgttctgattcgaatctacggtggataaacaatcaacctgaagacttcatatcttccaccgttgatttacagtcggtgtataataagtatagtgagtcttaccgtagacaaacatcttatcctctttaccgttttaattactttttttttacgcgctctcactgccactgtaactctttttttttttcttcctatatatgtatgcttatttttatttaggaaaatgttatgtaaaaacagacagagggatccactagttctagagcggccgccaccgcggtggagctccagcttttgttcactttaaaagggt

SEQ ID NO: 85498 - DNA, 473 bp, Arabidopsis thaliana columbia
gccacccacgcgaccgcatttcacggatatatttaatttggagccatgatgaattcaagaatttctattatcattgcgttatcttgcattatgatcacttcaattcgtgcatacgatcccgacgctcttcaagatctctgcgttgccgataaatctcacggaaccaaactgaatggatttccgtgcaaggaaacattaaacatcacggagtccgacttcttcttcgccggaatctcaaaacccgccgtcataaactctacgatgggttcggccgtaacaggagccaacgtggaaaagatcccaggcctcaacactctctccgtctccttagcacgtatagactacgcgccgggaggtttaaacccaccgcacactcacccacgcgccaccgaagtggtctacgctctagaaggagagcttggggttggatttatcacaacagcgaataagcttttcactaaaaccataaagat

SEQ ID NO: 85499 - DNA, 372 bp, Arabidopsis thaliana columbia
  unsure (1)..(372): unsure at all n locations
ggctcaatcaactgcatagacaataataatctggtaacaaatcaagctgctttgttcgtgttcggagattctctttttgatgccggaaacaacaactacatcaatactgtctcaagtttccggtctaatatctggccgtacggtcaaaccactttcaagtttcccaccggaagattatccgctggacgtttgattcccgacttcatcggtaacataacaaaactactctgctttgttattttnatttcctaggaatgtttaacatttttttnattcactgacttggaagccgaaaaggcatggttgccgttgatcccgncaaatctacaaccagacaacggtaacantcaatttacctatggagtaagtttt

SEQ ID NO: 85500 - DNA, 407 bp, Arabidopsis thaliana columbia
  unsure (1)..(407): unsure at all n locations
tntcttcgaacaaagctagcagcttggcgggacaatgttaggaatgtaccccgcccgaccgaaccgaatagggccaccgggggaaggtacccaggccttcatcagccagctccggggattggcctgcccgttgaaatatatctctgaggaagaagcttctcaatctaaagagtgatctgatattgtcatctcaaaagctttattgaattctttgcagagttcttttgaccgttggatctttttgattccggccttcttctttgtgttggcctctttttgtcccttaaatttatgcggagacttgcgatacattgtttagataaatttatcaccaatgcatgaatatttgggagtggctaataacagtggcgcaaaatcattggattaaaaaataagagctttgtttt

SEQ ID NO: 85501 - DNA, 429 bp, Arabidopsis thaliana columbia
  unsure (1)..(429): unsure at all n locations
cacgnttactatttaactgtcgacgaaattagagagcaaaagagtcactcaaaagtgtgtgtgtgtcaaaatctctagcaccgattttcctaaataacgtcgtctcacagtcacacacacacagctctaaaatccctctacgaggttttctttcaaactcgccgaaaaatctaatctttacgaagacccagatcggcggatctagagttgaaatggcgagacacacggcggcgctgaagatcgggctagcttttactggggctgagcatggctggttacacttcttggtccgcctctctactggcatctcactgaggcttttggccgccggttccggctcctctttgtccttctttgcccctgtgaaaggttttacccntttcggtgtaaacattttcccaaagggttngtaaaggtttttttttgntg

SEQ ID NO: 85502 - DNA, 1209 bp, Arabidopsis thaliana columbia
  unsure (1)..(1209): unsure at all n locations
tcggtgatcgccgtaccgccaaagattcacttcagtttcttattcaatggcttcaccggtttccgagatacaaccaccgggaaatctacatcaccggcgagagttacgccggacattacgttcctcagctggccaaagagatcatgaattacaacaaacgatcaaagaatccgttaaatctcaaaggaatcatggttggaaacgcggtgacggacaatcactatgagaacctaggaacggtttcgtattggtggagccacgcgatgatctctgatcggacgtatcatcagttgataagcacttgcgattttagtcgtcagaaggaatctgatgaatgcgaaaccctttattcttacgctatggagcaggagtttggtaacattgatcagtacaacatctatgcgccgccgtgtaacaagtcaagcgacggtggtggtagctacaatggttcttccggccgccggagtatgcggcttcctcaccttccccactccgtattgaggaaaatttccggttatgatccatgtaccgagagatatgcagagatctattataaccggcctgatgttcagaaagctcttcacgccaacaccaccaagattctcgtataaatggacagcttgcagtgaggtgctaaaccggaattggaacgacacagattcaacggttctccctatataccgggaaatgattgccggcggaattagagtttgggttttcagtggtgacgtcgattcagttgtaccagtgacagctactagatactcactagcaagacttagtttgagtaccaaacttccttggtatccttggtatgtcaagaaacaggttggaggatggacggaagtgtatgaaggactaacgttcgtgacggttagaggagcaggtcacgaggtgccattgttcaagccacgtgctgcttttgagctttttaagtatttcttgagaggcaagccacttccaaaggcttaaaaaaattgaagtcaagagagagattgtaacatttgaaatcatgcccgagaaaaatgaaaatgtaaagtttgggttatgagatggtatttaattaaatctagtctattaatgacagcaagtatttaattaaaaaaaaaaaaaaaaaaaaacaaagggcggccgctctagaggatcccagcttacgtacgcgtgcatgcgacgtcatagttcatctatagtgcagctcaatcannnnnn

SEQ ID NO: 85503 - DNA, 532 bp, Arabidopsis thaliana columbia
  unsure (1)..(532): unsure at all n locations
gcttatcactttcaaggtggtttaagacaacactgattacatgattttgtattaacctatagtctaactgaaatggcataaaattaggtgtcttgacaaagccgcggtggttatagaaggtgacctaacacccgagggacctcccgcagacaagtggcggttatgcagcgtccaagaagtggaagaagtgaagtgtttgatccgaattgttcctatctggtcggccggaataatctcactcgcggccatgacaacacaaggcactttcacggtctctcaagctttgaaaatggatcgaaacttaggtcctaaattcgagattccggctggttcactctccgtcatctctctcctcacaatcggcatctttcttcccttctacgaccgcgtttttgtaccattcatgcggcgaatcaccggccataaatccggaatcacactcctccaaaggatangaacagggatcgttttcgcgatcttttctatgatcgttgcgggcattgtggagcgtatgagacgcatacgctccatc

SEQ ID NO: 85504 - DNA, 455 bp, Arabidopsis thaliana columbia
cacacgagtccgcggacgcgtgggcggacgcgtgggttgatttttatttttctctctcaaagtttttcttgggagagcaacaatggcgatgaggaagcttttatcgaagaaactcttcaatatcacgaatgttgcttcacagagtcttatgaattgtcgcatttcgtcttcttcgttagccgtacgaaccagagttccgaatgattcaacagatacaaccaaaatcgcaccggagcctggagatttggcgatgtcgcgaaggttcatgcataacagtgctatgattaggccggcggagattatgcagatgccggtgggagagagtttgattgagaaactccgtgagattgatggaagcaaggatcggattcgattagacggactttctccgccggagagggagacgagtttgacggtggcggatacgaagaagctgcttagagcggcgcagatcg

SEQ ID NO: 85505 - DNA, 454 bp, Arabidopsis thaliana columbia
cacacgcgtccgcgaacagtcgccgaaacattttcgccggcgttacaccggagaattcatccttctttgtcttattactctactacccaatttcagtttaaactcactatcttcccaatttgatgattcagtgattcaaattcgaaacttcaagcaatgttatcgacattgcaaccgccgcgttctctatcactcctccctctacgccggttccaaatatctaaaaccatcgtctccgcagcttcttcgaagaccatcgacacttccgttatctctccaccacaatctcaaattctcaccactcgtcgttcactcctctccggcgaaaccacagctgtcgaaatcgcaaaatcttacctttctcgtatccgtctcactgaacctcagctcaaatgcttccttcacgtatcggagaatgttctcaaagatgctcaagagattgatcaacgaatcg

SEQ ID NO: 85506 - DNA, 1096 bp, Arabidopsis thaliana columbia
  unsure (1)..(1096): unsure at all n locations
ccgggtgcgagcccacgacgtcacgnnatgagccccatgggttgacgtattttgtcccaacactctaagttctacccagggcgaaccagagatggaggtgcgagaacagtgattgggttgtcctggggagnagtgcccttgaagttggtggtcatnggaccaacgaacttagggagtctaatgcaacgctttggaaggcaagtacgtcgagcctgtccccggaggtgatcccatcagaaacccaaaggtcttaccaaccggtaaaaacatccatgccttagatcctcaggctattcccacaacagcagcaatggcaagtgccaagattgtggttgagaggttggtagagagacagaagctcgaaagcgaagggaaatatcccgagacaatcgcgcttgttctttggggaactgacaacatcaaaacatatggggagtctcttgggcaggttctttggatgattggtgtgagaccaattgctgatacttttggaagagtgaaccgtgtcgagcctgtgagcttagaagaactaggaaggccgaggatcgatgtagttgttaactgctcaggggtcttccgtgatctctttatcaaccagatgaaccttcttgaccgagctatcaagatggtggcggagctagatgagcctgtagagcaaaattttgtaaggaaacacgcgttggaacaagcagaggcgcttggcattgatattagagaggcagcgacaagagttttctcaaacgcttcagggtcatactcagccaacatcagtcttgctgttgaaaactcgtcatggaacgatgagaaacagcttcaggacatgtacttgagcccgcaaatcgttttgcgttttgatagtgatgctcctggagcaggcaaattggctgagaagaagcaaggtctttgcagaatggctcttagcactgtcaagaagtccacccttccagaccctgggtttcttcagaagatttctttgactgatgtgagccactacttcgattctgaccctacaaatctagttcagagtttgagggagggataagaaggaaaccaagctcttacattgcttgacactacaactgcaaaacgcgcaggt

SEQ ID NO: 85507 - DNA, 493 bp, Arabidopsis thaliana columbia
ggagattgaatcaaggacttttacgtgcgggcttcacgtcattggagagcctccatccgccatggaagctgtggccacactggtcaacattgctgctctagatcgtccggagatgagatttcagctcttccttctatattagctgagtgtgttggaagggagatagaggatgtttacagaggaagcgacaagggtatcttgagcgatgtagagcttctcaaagagatcactgatgcctcacgtggcgctgtttccgcctttgtggaaaaaacaacaaatagcaaaggacaggtggtggatgtgtctgacaagcttacctcgcttcttgggtttggaatcaatgagccatgggttgagtatttgtccaaccaccaagttctacagggcgaaccagagataagctcagaccagtgtttggtttccttggagagtgcctgaagttggtggtcatggacaacgaactagggagtctaatgcagcttggaaggcagta

SEQ ID NO: 85508 - DNA, 678 bp, Arabidopsis thaliana columbia
  unsure (1)..(678): unsure at all n locations
aacccttcatngtccnttcactnaacccccgggggcccttntgnccntggctgcccagaccaagctctgancnaagtgtccgnaggattgttccaggggtttgaggggttcgtgagatagagaaggggctgtccaacactgtgggatggagtgcaacgtcaggtcaagtagacaattgggtctacgaggaggccaactcaactttcatccaagacgaggagatgctgaaccgtctcatgaacaccaatcccaactccttcaggaaaatgcttcagactttcttggaggccaatggtcgtggctactgggacacttccgctgaaaacatagagaagctcaaggaattgtactcgcaggtggaagacaagatcgaagggatcgatcgataaacaatgggatataagcctttcttcttgtaaatgaacttaaaactttatttttgtgtattacagtattctaccaaacgacatcatctctctgtgaataagagaatgttttggctgacattttctgactttatatgaatgttgtggagcttcttctttcccctccatttcttatatcatattcatatgtgtgtattttatatgcgaagaaaatgaaaaagtagttaagtgtaaacnnnnnnnnnnnnnnnnnnnnnnnnnnnnnnnnnnnnnnnnnnnnnnnnnnnnnnnn

SEQ ID NO: 85509 - DNA, 1016 bp, Arabidopsis thaliana columbia
tatacgactcactttagggaaagctggtacgcctgcaggtaccggtccggaattcccggtgtcgacccacgcgtccgcgagaagacgacagaagggaagagttttctcaaacgcttcagggtcatactcagccaacatcagtcttgctgttgaaaactcgtcatggaacgatgagaaacagcttcaggacatgtacttgagccgcaaatcgtttgcgtttgatagtgatgctcctggagcaggaatggctgagaagaagcaggtctttgagatggctcttagcactgcagaagtcaccttccagaacctggattcttcagagatttctttgactgatgtgagccactacttcgattctgaccctacaaatctagttcagagtttgaggaaggataagaagaaaccaagctcttacattgctgacactacaactgcaaacgcgcaggtgaggacactatctgagacagtgaggctggacgcaagaacaaagctgctgaatccaaagtggtacgaaggaatgatgtcaagtggatatgaaggagttcgtgagatagagaagagactgtccaacactgtgggatggagtgcaacgtcaggtcaagtagacaattgggtctacgaggaggccaactcaactttcatccaagacgaggagatgctgaaccgtctcatgaacaccaatcccaactccttcaggaaaatgcttcagactttcttggaggccaatggtcgtggctactgggacacttccgctgaaaacatagagaagctcaaggaattgtactcgcaggtggaagacaagatcgaagggatcgatcgataaacaatgggatataagcctttcttcttgtaaatgaacttaaaactttatttttgtgtattacagtattctaccaaacgacatcatctctctgtgaataagagaatgttatgaatgaaaaaaaaaaaaaaaagggcggccgctctagaggatccaagcttacgtacgcgtgcatgcgacgtcatagctcgtttat

SEQ ID NO: 85510 - DNA, 897 bp, Arabidopsis thaliana columbia
  unsure (1)..(897): unsure at all n locations
gggggctactacgcctccaggtaccgggccggaattccctggtctacccacgggggcgagggcgcgtccagctaantgtgttggggccagaatttccgggacgacccacgcgtacgacaagggtatcttgagcgatgtagagcttcttttagagatcactgatgcctcacgtggcgctgtttccgcctttgtggaaaaaacaacaaatagcaaaggacaggtggtggatgtgtctgacaagcttacctcgcttcttgggtttggaatcaatgagccatgggttgagtatttgtccaacaccaagttctacagggcgaacagagataagctcagaacagtgtttggtttccttggagagtgcctgaagttggtggtcatggacaacgaactagggagtctaatgcaagctttggaaggcaagtacgtcgagcctggccccggaagtgatcccatcagaaacccaaaggtcttaccatccggtaaaaacattcatgccttagatcctcaggctattcccacaacagcagcaatggcaagtgccaagattgtggttgagaggttggtagagagacagaagctcgaaaacgatgggaaatttccctagaccatcgcgcttgttctttggggaactgacaacatcaaaacatttggggaagtctcttgggcaggctctttggatgattggtgtgagaccaattgctgatacttttggaaagagtgaacccgtgttcaagccctgtgagccttaaaaaaaaacttatggaaatgctctgaaggattccgatgttacgtttgttttaacccgggtttcaagggaggtccttttccggtggaatcctttcttttaattcgcaaccccaggaaaggaaacccttttttttttggacacccgattcc

SEQ ID NO: 85511 - DNA, 372 bp, Arabidopsis thaliana columbia
  unsure (1)..(372): unsure at all n locations
cagaggtttctatgtgaaacttgctaaaatagatacaacacacatctcatatcgacaataaaaatttgttttcaaagatcagtattttttgaagcttgccaagtgaagcatcttttgggtaattagaaccagagaagcttcaaaaaatggcttagagtgaagcatcttgtggcatttcgacggcatcatcttaggacgacttatcttgttcgttttctttctcgtctctgttgtaattttgctataagtttctcatatatagtttcattttgtcttttgttcgtccgtatttggtagtttgtccaaatacagaacatatgaaattttacaagagtggatattttcaattccanataaaattnnaaanaaaaa

SEQ ID NO: 85512 - DNA, 330 bp, Arabidopsis thaliana columbia
  unsure (1)..(330): unsure at all n locations
gccggcaaaacgttactacggagacggtgttgaggatgatccggaggctaaacgtgtccggcagcttatagcggatgtggtggcttgtgctggtgctggaaacgctgttgattacttaccggttttncggttggtttcagcttacgagacacgggttaagaagttggcgggtaggctcgacgagttcttgcaaggcttggttgatgagaaacgagaagctaacggagaaaaggaaacactatgatcgatccacttgctttactctgcaagcattcccaacccggttttacttcacggatcgnatcattaaaaggnaacaatnattcactt

SEQ ID NO: 85513 - DNA, 573 bp, Arabidopsis thaliana columbia
  unsure (1)..(573): unsure at all n locations
ggaaggaaagcgccaggacggtgctccaagtatgttaatggcgctagtgttgctggaatgtcgggatacgaggcatatattgtgagccataacatgcttctagcgcacgcagaagcagtggaagtgtttagaaaatgtgaccatattaaaaacggacaaattgggattgcgcataatccactttggtacgagccatatgatccgagtgatccagatgatgtcgaaggatgtaatcgagctatggacttcatgcttggttggcatcagcatccgactgcttgtggagactatccagaaacgatgaagaaatcagttggagatagattaccgagttttacaccagaacaatctaagaaacttataggctcttgcgattacgttggtataaactactatagctcgcttttcgtgaagagtatcaaacacgtggatcctacgcaacctacttggagaactgaccaaggcgttgattggatgaaaaccaacatagatgggaaacaaatagcaaaacaaggaggatcagagtggagtttcacatatccaacaagactcagaaacantttgaagtatgtg

SEQ ID NO: 85514 - DNA, 468 bp, Arabidopsis thaliana columbia
ttccaaagtctgtttatttttttaatctctctctcttctctctcacccaatttcacaaacccgaaaccctaattttctcgggacactgaaatttttacagcttctttcctcttcttcaccggggagatttgtcggtactaaatctagggtttttgggtatcaccggagggttgaagagagagaaaaaaactcacaatggaatcagatcagggaaagctatttatcggcgggatttcatgggataccgacgagaatcttctgagagagtacttcagcaatttcggcgaggttttgcaggtcactgttatgcgagagaaagctactggtcgtcctagaggattcggattcgtcgcattctcggatcctgctgttattgatagggttcttcaggacaagcaccatattgataatagagatgttgatgtgaagagagcaatgtctagagaggagcagagtcctgctgggaga

SEQ ID NO: 85515 - DNA, 607 bp, Arabidopsis thaliana columbia
  unsure (1)..(607): unsure at all n locations
gacgcatttaacagcgacttgcagtatgagtttgttgaaaagaagtttgccactttattgcaccagtgtttacactgcaccaagaaagggtctactaaggagacttcattagcaactcatgtcattgggttgctagcgttaactgttggactcggggatcatgcacaagaggttttggaagaatctgtcactcctctgtctcaagcccttaaatctggtcgtgaaatcttgaaaataacttcgatacttgagtgtttagcagtcataaccttcgttggcgggaatgatccagagcaaaccgagaaatctatgcagattatctggcaaatgatccaccccaaactagggtctaattgttgtggcaactaaacctttcacctgctgtaataaggtgctgttgtatcttcctgggcgggtccggtcacaacagttgattcggtggcctctagggccgaacttttttcaaggggctggaacttatcctccctccattgttgggaaaggatgcccgcctgnccggtagctcctgggaagggttcagtatatgggtggtccgccngcggaaggtgttccacgcaaanggttctntgccattaaaagggggttc

SEQ ID NO: 85516 - DNA, 607 bp, Arabidopsis thaliana columbia
  unsure (1)..(607): unsure at all n locations
tatccgagctgatgacaccactcagttcttggaggtcatccgagcctctnaagatactaatgtctatnatgacttggtcagataccttctnatggttagacagaaggtgaaggaacccaaggtggatagtnagctcatctatgcttatgcaaagattgaaaggtggggtgagattgaagaatttattctgatgcccaacgttgccaaccttcaacatgttggtgaccgtttgtacgatgaagctctgtatgaggctgcaaagataatatatgcattcatatcgaattgggccaagttagccgtcacccttgtgaagttgcaacagttccaaggtgctgttgatgctgcaaggaaagcaaacagtgcaaagacatggaaggaagtctgctttgcttgtgttgatgctgaggaattccgactggctcaaatctgtggacttaacattatcatacaggtggatgacctggaagaagtaagcgagtactaccagaacagaggatgcttcaatgaattgatctcccttatggagagtggacttggtctggaacgtgctcacatgggtatcttcaccgagttgggtgtactctatgctagatatcgttatgag

SEQ ID NO: 85517 - DNA, 392 bp, Arabidopsis thaliana columbia
ggctggcggtggttccctaggtccccagagactaggaagggcgtaccaggcgacgaattgcttcggggagttgaaattaagcttagatccggggattcccaaataggtcaaccttttgaactgcctgctgattccatgagcaggcaagagacaccggcgaccatgaacttgcagaacaactactgggtgtttttcattgaacagggcaaaaaggaatgctttgctacatgtctctttgtatgttatgacttaatccgaccagacgtggctctagaacttgcctggatcaacaatatgatggactttgccttcccgtatctcctccagtttatccgagagtactctggcaaagtggatgagctaataaaggacaagcttgaggcacaaaaaga

SEQ ID NO: 85518 - DNA, 388 bp, Arabidopsis thaliana columbia
cccaagcgtccgcccacgcgtccgctccaagttcttacctttttcccatttacaatcgttcgaattttttatagagaagaaaccatgaatgctttagctgcaacatacagaaacttccgtcatgcatctcgaatcctgcgtttggattcgaagatcgagagaagtcttatgatcccatttagagaaatcaaggttgagtgtacgattcctaaaagacgatggcactctggtttcatacatcggatttagggttcaacatgacaatgctcgtggacccatgaaaggtggaatcagatatcatcctgaggttgatccagatgaagttaacgcactagctcagctgatgacttggaagactgctgtagcagatattccatatggtggtgct

SEQ ID NO: 85519 - DNA, 1829 bp, Arabidopsis thaliana columbia
ggcccaccgtctaggacgacggtgtcaataagcttgatatcgaattcgcggccgcgcggccgcaaaagataatatatgcattcatatcgaattgggccaagttagccgtcacccttgtgaagttgcaacagttccaaggtgctgttgatgctgcaaggaaagcaaacagtgcaaagacatggaaggaagtctgctttgcttgcgttgatgctgaggaattccggctggctcaaatctgtggtcttaacattatcattcaggtggatgacctggaagaagtcagcgagtactaccagaacagagggtgcttcaatgaattaatctcacttatggagagtggacttgggcttgaacgtgctcacatgggtatcttcaccgagttgggtgtactctatgctagatatcgttatgagaaacttatggaacacatcaagttattttcaactcgcctcaatattcccaagcttatacgggcctgtgatgaacaacagcactggcaggaacttacctatctgtacattcaatatgatgagtttgataatgctgcgaccaccgtcatgaaccattctcctgaagcatgggagcacatgcaattcaaagacattgttgccaaggttgcgaatgttgagctgtactataaggccgttcacttctacttgcaagagcaccctgatataatcaacgatcttctcaatgtgcttgctctgcggttagatcacacgcgtgtcgttgatattatgcgcaaggctggtcacttgcgccttattaagccatatatggttgcagttcagagcaataatgtatctgctgtaaatgaagctctgaatgagatatatgcagaagaagaagactatgacaggttgcgcgagtctattgatttgcatgacagttttgaccagataggtctcgctcagaagattgagaaacacgagcttgttgaaatgagacgtgtggctgcttatatctacaagaaagctggtagatggaagcaatcgattgctttatcaaagaaagataacatgtacaaggactgtatggaaacggcttcgcaatccggcgaacatgaacttgcagaacaacttctggtgtatttcattgaacagggcaaaaaggaatgctttgctacatgtctctttgtatgttatgacttaatccgaccagacgtggctctagaacttgcctggatcaacaatatgatggactttgccttcccgtatctcctccagtttatccgagagtactctggcaaagtggatgagctaataaaggacaagcttgaggcacaaaaagaggtgaaggccaaagagcaggaagagaaggatgtcatattcccaacagaacatgtttgcccaaatgttgccacttgctttacctgcaccaccgatgccaggaatgggaggtggtggtgggtatggtcctccaccacaaatgggcggtatgccaggaatgcctcccatgccaccatatggaatgccaccgatgggcggctactaaagcagaccagcttatgctttaatatccgcatttggaaaagtatcagtagcgcatagagtcggcccaatttgctagggcggtgttcatctgctagctagcttatatgtctgaccagaatttgtctgggaataatgtggataataacctcctttcgttgtaatattctgttgggtttaggtgagtaatttttttttaactttttgtcaaaagccatttttgagtacatatactcaactctcttactcaaaaaaaaaaaaaaaaaaaaaaacccaaaggtcgaccgctctagaggatccaagcttacgcacgcaacggcattgaacttcaaggttccg

SEQ ID NO: 85520 - DNA, 907 bp, Arabidopsis thaliana columbia
  unsure (1)..(907): unsure at all n locations
gtgatgtcatggtatgaatcaagcaacgagatcacaggttgagtcaagtaatcatagtttgacaaatcctggctcaagtcaccgaactctaatccataaccattgcttcccaagctaccgattgaatcgccgaactctaagccatgaccattgcttcccaagctagcgattgaatcgtcgaactctaagccatgatcattgcgtccaacgccagcgattgaatcgtcgctgaatcgagttagctcagaatctaggtcaggtggagtggaaaagaagcgggattggaaaagagcgagcgcgattgacggttgggtcgtggcggagacatggtgaggagagagagaggagcaagtgtggtgagatcggcggaggtgagggcttacggtggatacctaggcacccagagacgaggaagggcgtagtaagcgacgaaatgcttcggggagttgaaaataagcgtagatccggagattcccgaataggttaaccttttgaactgctgctgaatccatgggcaggcaagagacaacctggcgaactgaaacatcttagtagccagaggaaaagaaagcaaaagcgattcccgtagtagcggcgagcgaaatgggagcagcctaaaccgtgaaaacggggttgtgggagagcaaaaaaaagcgtcgtgctgctaggcgaagcggtggagtgccgcaccctagatggcgagagtccagtagccgaaagcatcactagcttatgctctgacccgagtagcattgggcacgtggaatcccgtgtgaattcagcaaggaccacctttcaagggtaaatactccctgggtgaccccttaccgaagtagtaccctttgggaaggcgttnaaaaanccccnatnngggngttnaatttnacntttaaccgtaagcncccaa

SEQ ID NO: 85521 - DNA, 1755 bp, Arabidopsis thaliana columbia
actcacttagggagaagctactacgcctgaatactcaattctttcttcttcaattcatcacaacaaatcaaaaactccaagttcttacctttttcccatttacaatcggtaaatttctccgatcacgagatacaaatttcactttctgatatcttggatcttccgatcactttgaattttttggtttgttgattttttttttttttttttgttccataaagttcgaattttttatagagaagaaaccatgaatgctttagctgcaacaaacagaaacttccgtcatgcatctcgaatcctgggtttggattcgaagatcgagagaagtcttatgatcccatttagagaaatcaaggttgagtgtacgattcctaaagacgatggcactctggtttcatacatcggatttagggttcaacatgacaatgctcgtggacccatgaaaggtggaatcagatatcatcctgaggttgatccagatgaagttaacgcactagctcagctgatgacttggaagactgctgtagcagatattccatatggtggtgctaaaggtggaattggatgtagtcctcgtgacttgagtttgagcgagcttgagaggttgactcgtgtgtttacacagaagattcatgatcttatcggtattcataccgatgtgcctgctcctgatatgggcactaacgctcaaaccatggcttggattcttgatgagtactccaagtttcatggtcattcccctgctgttgtcactggaaagcccattgatcttggtggttcattaggtagggaagctgccacaggtcgtggtgtagtatttgccaccgaagctcttcttgctgagtacgggaaatcgattcagggtttgacatttgttattcagggttttgggaatgttggaacatgggctgcgaagctgatccacgagaaaggcggtaaagtggttgcagtaagcgacattactggtgcaatcaggaaccctgaaggtatcgacatcaacgctctcataaaacacaaggacgcaactggaagtctcaatgatttcaatggtggagacgctatgaattcagatgaattgctcattcatgagtgtgatgttctcattccatgcgctcttggtggtgtcctgaacaaggaaaatgctggagatgtgaaggcaaagtttatagtagaggcagctaaccatccaacagatccagatgctgatgagattctgtcgaagaaaggagtgattatacttccagatatctacgcaaacgcaggaggagtgacagtgagttacttcgagtgggtgcagaacattcaaggattcatgtgggaagaggaaaaagtgaacttggagctgcaaaaatacatgactcgagcctttcacaacatcaagacaatgtgccatactcattcttgcaacctccgtatgggagctttcactcttggagttaaccgagtcgctcgagccacccagttgcgtggttgggaagcttaattcagttgaatcccccttatatactctgtttcttgcttgctctgttttccatttttttttttttggtttcattgttactgaaaatcattgagctttccgaaatggaaaaggaaacaaatggattgaataaaaactaacaaattggaataaaaaaaaaaaaaaaaaaaaaaaaaaaaaaaaaaaaaaaaaaaaaaaaaaaaaaaaaaaaaaaaaaacccaaaagggcggccgctctagaggatccaagcttacgtacgcgtgcatgcgacgtc

SEQ ID NO: 85522 - DNA, 558 bp, Arabidopsis thaliana columbia
  unsure (1)..(558): unsure at all n locations
cttagatttgcttatccttcttcactttctcaattttgaatctgagaattcgtgcctccgatctctctccctctcgccgtggatagagatggagagcttaccaacgacggtctcagggaaatcagaccggcgaggtaggttttccaagtctcagaacacctccaagccctctcttatcttggccttcttctcttgtcttgcttggctctacgtcgctggccggttatggcaagatgcgcagtacagagcagcactcaatactgtgcttaagatgaattatgatcagaggcctaaggttcttacggtggaggacaaacttgtggtccttggatgcaaagatctttgagaggagaattgttgaaactgaaatggagttngcacaggcaaaggagtcaaggctatctttaaaaaacaggaaagtgtctcttcttcaaggggaaggaaattcctagcttgttaattggnggtttcaccaggctttgggaagnacctttttgagcaattaattttgnggcttttgntcccgcgtgnttcctnaaaactttggaagggggttgc

SEQ ID NO: 85523 - DNA, 956 bp, Arabidopsis thaliana columbia
  unsure (1)..(956): unsure at all n locations
gcgnnnnnnnnnnnnnnnnnnnnnnnnnnnnnnnnnnnnnnnnnnnnnnnnnnnnnnnnnnnnnnnnnnnnntccacgcgtccggtcccttcttccacatcagaacccatttgtctttgagtgagagaatcagctttcagagaaaaaagtatacctacagagagagttatggcggagagtggtggacgaaggatcggagtggcggtggatttctcggactgcagtaagaaggctctgagctgggcgatcgataacgtggttcgcgacggagatcatctgatcctaatcactattgctcacgatatgaattacgaggaaggcgagatgcagctctgggagaccgttggatcaccttttattcctatgagtgaattctctgacgctgctgtgatgaaaaagtatgcattgaagccagatgctgaaacccttgacattgtcaatactgccgctaggaagaaaacgattacagtagtgatgaagatatattggggagatcctcgtgagaagatttgtgcagcagctgaacagattcctctctcaagccttgtgatgggtaacagaggccttggtggtcttaagaggatgattatgggaagtgtaagcaaccatgttgtcaacaacgttgcatgccctgtgaccgttgtcaaggctcacatctgagtttgctcggagaactctaaataacaccaccgtgtattctataatttgtgtttttgtggtcggaatttctattgttaactgttgtgtgactggtgttttgttcatctgtatggataaacaacactccaccttctaataaatacagactcttttgatttttgggccaaaaaaaaaaaaaaaaaggntnnnnnantnnnnnnnnnnnnnnnnnnnnnnnnnnnnnnnnnnnnnnnnnnnnnnnnnnnnnnnnnnnnnnnnnnnnnnnnnnnnnnnnnnnnnnnnnnnnnnnnnnnnnn

SEQ ID NO: 85524 - DNA, 819 bp, Arabidopsis thaliana columbia
atgatatgccagctctatacgactcatttagggaaagctggtacgcctgcaggtaccggtccggaattcccgggtcgacccacgcgtccgcgacgaacacagatacggcgtgtggtaataaataatgtcttctggcttgaaaatcatagaagaaccgcaaaaaccgattgagaagctgcagatttatccgacggctaatgctggtgtttctcccttttggcgagacaagtatgagcgagatgctaaaaagtattgggatatattttacaagcatcatggagacagatttttcaaagaccgccactacttggataaggaatggaatagctatttttccgttagtgggaaaagtgtcattcttgaggttggctgtggagctggaaacaccatctttccattgatcgccacatatccagacatttttgtttatgcatgtgatttttcaccacgagccgtcgaattggtcaaggctcatgatgaatacacagagacacgcgtttgtgcatttgcttgtgacttgacaggggatggtcttgacaagcatatttctccatcttcagttgatattgtgaccatgatatttgttttatctgcggtatccccagagaagatgtcctcagtattgcagaacattaggaaagttcttaagccaaatgggtgtatcctcttccgtgactatgctgtcggtgatcttgctcaggagaggttctctgggaaggatcagaggatcagcgagaacttttatgtgagaggtgatggcactcgtgcattctacttttctaatgaattcctagaaactttgttttctgaacaaggatt

SEQ ID NO: 85525 - DNA, 489 bp, Arabidopsis thaliana columbia
  unsure (1)..(489): unsure at all n locations
caantctatcgcccttnggaactgtcgctgcagtncggtcggaatcccggncgcccacgcgtcggacaaaggaagaaccaaataggaagaaaaaggagaggaacattcaaatggcaccaagaagttctttgaatccgcgtcgccttcatctgcattgtcttggccgtgatggtcatgactgctgagtcgaacaacgggaacccaccaccatggtccggctatggcttccaatgccacccatggctaaggctccggtctccaagtgcccgccactttctctcgcctaccctcagctcaatcgccaccgcattggtcgctgctatgtctttcgtcttctgatgagatgtgttgccattcatcttcagaatatgttttactctctatgagtttttattttaattttcacatgtattccttcttttttttttacttcttcaaagattgtgatgttgtgttcctatcataataaaacatttatctcttgatgtt

SEQ ID NO: 85526 - DNA, 428 bp, Arabidopsis thaliana columbia
accacgcgtccgagctgcccttgcagagatccaagagaatagtactagtcccatatttgaaatcaatagtaccatcctcacaaagctccttacagctttgaatgaatgtactgaatggggtcaagtttttatattagatgctttgtcgaggtataaggcatctgatcctcgtgaagctgaaaatattgttgagagagtcactccaaggttgcaacatgccaactgtgctgttgtgctttcagctgttaagatgatccttcagcagatggagcttattactagcacagatgtgattcgaaatctttgcaagaagatggctcctcccctagttacattgctttctgcagaacctgagatacagtatgttgcacttcgtaacattaaccttattgtccaaaagagacccactattcttgcccatgaaatca

SEQ ID NO: 85527 - DNA, 571 bp, Arabidopsis thaliana columbia
  unsure (1)..(571): unsure at all n locations
tataaaacagcccccagttcttctcagataccggtcctggcctcgtatcctcgttgtaaagctcgtagatgtatgtagtaactgcagttcccgggtgttttggcgttccagtcttgttgatcacatgctggatcaaattgctattgtaagtgtttgcattctctaccgttgcgtcgtgctcagaagggcctcctttagatggccatccagattctgtgaccacgattggaatgttggtgaagttaagataagacattgcaaaataagcagcgtctacggttgcatcaaaaacgttttgtgtaatgtaaccaattgtgttggcgtctacaagcttctttttgttggctttggaggaggctggaaaagcgccgtagtcaaagcgggtttaacccccattgggctggaccataggcggaaattcgggggaaaccgttggccagcaattggcggtccctgtggcctgtagggaattttaagggnnaggggcaaatancctggttcccaangctttntttgnagaaancttcgatggggngaaagatnannatgntgggttnagngtnngtantgc

SEQ ID NO: 85528 - DNA, 979 bp, Arabidopsis thaliana columbia
  unsure (1)..(979): unsure at all n locations
nnnnnnnnnnnnnnnnnnnnnnnnnnnnnnnnnnnnnnnnnnnnnnnnnnnnnnnnnnnnnnnnnnnnnccacgcgtccgggtcgctctctctctctctctctcgatcggataatatttgagctttgtggttggaggatctgagttagtcatgttcatgatcgattggttctatggcgttctcgcttcgttagggttatggcagaaagaggctaagatcttgtttctgggactcgataatgctggtaaaaccactctgcttcacatgttgaaagacgagagattggtacagcatcagcctacgcagcatccaacttctgaagaactcagcattgggaaaatcaagtttaaggcttttgatttgggtggtcaccagattgctcgcagggtctggaaggattactatgctaaggtggacgctgtggtctacctagttgatgcttacgacaaagagagatttgcagaatcaaaaaaggaacttgatgcacttctctcagacgaatccctagccagcgttccattcctcattctaggaaacaagatagacataccgtatgctgcatcagaggacgagctccgttaccatctcggcctctccaacttcactacaggaaagggtaaagtgaatctaacggattcgaacgttaggccattggaggttttcatgtgcagcattgtcaggaaaatgggttacggagaaggtttcaaatgggtttctcaatacatcaagtaagacaaacacacgctgtgttattattaagccgtaagcttgcttctataaatcctgttttttgtatcgtcttgcttcgttttttcctctctttaattgtgttgtaagaaaatgtcttaaaccgtacctagctttttctcgtttgtctgatcctcgactggtttgttcttgtagtgaattttttacacgtttcgtaatttattcaaataagggaagaaaaaaagattagattaaaaaaaaaaaaaaaaaa

SEQ ID NO: 85529 - DNA, 375 bp, Arabidopsis thaliana columbia
aataaatccttttgtggaataatttcgtgatttcgtttgtgggttatccgaattttgtctgaatttgagtttttgagagggaaaggtttgttttggcgggggatggtggaaatgaggaaatctggaggtttaagaccggagtctgaatcggcggccaggtgccgagatgagctaccggcgaaattggagattgctgaagatgatttagaagaagagcatggtcctctcaacaaacgatctaggttatggagtcctgggacaagctcatcgacaatggcaccagctaagtataacccgcttgatgagcccagtcctcttggattgagtcttaagaagagtccatctttgttggagttgattcagatgaagataacg

SEQ ID NO: 85530 - DNA, 742 bp, Arabidopsis thaliana columbia
  unsure (1)..(742): unsure at all n locations
aggacgcgtgggcggacgcgtgggctctttgtccctctctctttctctattactctgtctcctctgttccggcgatgttccaacacgcgccttcttccatttccctcatcatcatcttcctcttcaccattctatcacccgtttcacctgaaccggtcacagtccagccattccgggtcaaatcatccccacccgcaaccatacccgctttcccggagcaatccgatttctccggctgcccactcgatttaccagaagacctcttccacggcatcaagtcagcttgcagcggcaaaaagctccacaaaggaaaatgttgccccgtactaggcgcgtggctctactctgcttactcaaccactgctctaagccgttcgatttccgccgccgcaagaaactcatcctcctcctccgccgcggtaacgactcctgaagaagatatgcctttgcttcccgatgactcggagacttgcgttgacggattagggaaatctctgaggcagagagggattgagctcactagaccgaacgagacttgcgacgtcgtttactgttactgtggaatcagattgcatccgttgagctgttccgaggcttttagagtgaatgatgaagggagactcgtttggagacgggagagtttgatagattagaggcttgtttttttttaggtggaagccccaacaattctnntggttctnaaccnnttctttggttnaacaagngntttnnccagnctttt

SEQ ID NO: 85531 - DNA, 529 bp, Arabidopsis thaliana columbia
  unsure (1)..(529): unsure at all n locations
tacatgaagggactggtcctcttgctttgctatttcattattgccatctgtttcttcgtcgacaaacttccccagaaacaaaatgccattcacttgggacatcaagcgatgaacaatgtcgtcactgcaacaggaggaggagttttctcatcttaaacgaagacaagtaccaatgtgttgaaacaaaatttccaaagcgagagacaatggagaaaggaaaacaaaaaccaattttcttgattcatttatcaatattgaaagatttgtcagagagattcctgagattcagtgagtattatttcatttttcaaaaatgttgggtgtcttgatgaagatgagttttgagaactttataaattcttcttgtggccgggtctcccaatgaactatctatgaatgtcttgtgtcaaatgttctatctctttttattaatggttttatcaaaaaaaaaaaaaaagnnnnnnnnnnnnnnnnnnnnnnnnnnnnnnnnnnnnnnnnnnnnnnnnnnnnnnnnnnnnnnnnnnnnnnn

SEQ ID NO: 85532 - DNA, 1910 bp, Arabidopsis thaliana columbia
atgatactccagctctcctacgactcactattgggaaagctggcacgcctgcaggtaccggtccggaattcccgcctcgcgcccacgcaatcagcaaagcaaaattcgaagagacacaaaaaaaccttcgtttgtgtctcagaatttacaaagttttgagtcagtagagaaatggcgggaatcgtgacagagccgtggtcagtagctgagaacggaaacccaagcataacggcgaaaggatcgagcagagaactaagacttggaagaaccgctcacaacatgtcttcttcttctttgaggaaaaaatcagacctccgagtgattcagaaggttccatacaaaggtcttaaagattttctctctaatctccaagaagtcattctcggaacaaagcttgccattctttttccggccattcctgccgccattatttgcacctattgtggcgtcagtcagccttggatatttggacttagcttgctaggactgacacctttggctgagcgagtcagctttttgacagagcaactagctttctacaccggtcctacattgggtggtctattgaacgcaacgtgtggaaacgcgactgaattgataatcgcgattcttgctttgaccaataacaaagtcgcagtggtgaaatattcgctgctaggttcgattttgtcgaaccttttattggttctagggacttcactcttctgtggaggaatcgctaatatccgaagggaacagcggttcgaccggaaacaagccgatgtgaacttcttcttacttctactgggtttcttgtgtcacttgctgccattgttggtgggatacttgaaaaacggagaggcttcggctgctgttttgtccgacatgcaactgagtatatcgcgaggcttcagtattgttatgttgatcagctacattgcatatcttgttttccaactgtggactcaccgccaattgttcgatgcacaagaacaggaagatgagtatgatgacgatgtggagcaagaaaccgcggtgattagtttttggagcggttttgcatggttggttgggatgacactcgttatcgcattgctatcggagtatgttgtagccacgattgaggaagcatcggataaatggaacttatcagtgagtttcataagcatcatattgcttcctattgttggaaatgcagctgaacatgctggagccgttatttttgcctttaagaacaagcttgacatatctttgggagttgcattaggctctgcgactcagattggcttattcgttgtccccttgaccatcaccgtggcgtggattttgggaattaatatggatctcaattttggtgccctcgaaactggctgtcttgctgtttccataatcatcacagccttcacattacaggatgggagttctcactacatgaagggactggtcctcttgcctttgctatttcattattgccatctgtttcttcgtcgacaaacttccccagaaacaaaatgccattcacttgggacatcaagcgatgaacaatgtcgtcactgcaacaggaggaggagttttctcatcttaaacgaagacaagtaccaatgtgttgaaacaaaatttccaaagcgagagacaatggagaaaggaaaacaaaaaccaattttcttgattcatttataaatattgaaagattgatcagagagattccatgagattcagtgagtattatttcatttttcaaaaatgttgggtgtcttgatgaagatgagttttgagaactttataaattcttcttgtgggtgggttttgcaatgaactatctatgaatgtcttgtgccaaaaaacaaaaaaaagaaaaaaaaaaaagcgaccgctctagaggatccaagcttacgtacgcgtgcatgcgacgtcatcagtcttctatagtg

SEQ ID NO: 85533 - DNA, 643 bp, Arabidopsis thaliana columbia
  unsure (1)..(643): unsure at all n locations
cctaactcaggtatgtatcctgcaggcagggaagaagcccttgacagaaagantctcggttaccccagaggntccagctacattagtggagaatccgaaaaccaaagtgtaaattcgttggaaagaattcacatgaagttgcagtggatgaaactgcagcaaaatgccccccttgaagagaataaacgcataccatatcaacagacaccactgtctcgatctaccggggggaccctttttgggccggctctaggcgatcaattcaagaggcttcagccgccaagttttgggggnaccagtttatggtggtccagcagcagcagcaacaaccaacaacgttctcaacccgctaacacaaatgtgctacctgtctctaccatgaatgcatcctttacccggagcagcagcagcaggcagcggttggcaccctgcaaatagatctgaggcggcccaatctaacgggtacttgccctcaagaagtctgcctcctaatgatctgaactcaaacctgatgtaccagcaacttcagtatcaacaatatcaaggccaagtgaacaacaatggtcacagaatggcaggatcttctgtccgcctgctgtggctccagctgcttctcttgggctcttctcggggtttggatcac

SEQ ID NO: 85534 - DNA, 510 bp, Arabidopsis thaliana columbia
  unsure (1)..(510): unsure at all n locations
caaacaaaatttcagctcctccatatccatcaagaaagatcaagaatcaagaactaatcaatatcgatcgatccgttaaaaaaaaatggatatgattccccaattgatggaaggctcttcagcttacggaggtgtcacaaacctcaacatcatctcaaacaactcctcctccgtcaccggagccaccggaggnaatgcaacgcaaccactgtnttcctcctcctcaccatcggcgaactcaagccgttacgagaaccagaagaggagagactggaacacgttcggacagtacttaaggaaccatcggccaccgntttcgntttcccggatgcaagtggagctcacgtgctcgacgttcctccgttacttgggccagttcggtaaggcaaaaagtccacacggacatttgtcacttctatggccatcctaatccttcgggaccgtgtccgtgtcctttcggcaaagtttggggaggctttgnggttttatcggtggtttgggttcctttgc

SEQ ID NO: 85535 - DNA, 670 bp, Arabidopsis thaliana columbia
  unsure (1)..(670): unsure at all n locations
tacgacttctatagggaaagctggtacgcctgcaggtaccggtccggaattcccgggtcgacccacgcgtccgcgatgaggaatcaaatcagaacgaagaaacttctgccgaagatgaagatcctgagatctccaagtgggaagctatcatttggctttcaatattgactgcttggggctctcttctttctggctatcttgttgatgccatagagggtgcctccgtctcatggaatataccaataagctgttatcagtaccatcttgcttccctttagttgggaacgcagctgaacatgcaggggctatcatgtttgccatgaaagacaagcctggatctgtctttgggagtggcgtttgggtcctcgatccagatttccatggttgcgggcccattctgcggggtgattggatggatggtgggtcaacagatggacccttaacttccagctttttgagacgggcgatgctgctcctcacggttttagtagtagcattttttctcccggaagggggcatcgaattccttcaaaggattggtggctgattcttctggtttttgatagtacctgccagttcctttggccacgaagatcctcaccaagatggtatatanacccgaagaagagtctngtgtgaagcataaaagggtcttacttaatgatctaag

SEQ ID NO: 85536 - DNA, 633 bp, Arabidopsis thaliana columbia
taatcgactttcttagggaaagctggtacgcctgcaggtaccggtccggaattcccgggtcgacccacgcctccgcgatgaggaatcaaatcagaacgaagaaacttctgcccggaagatgaagatcctgagatctccaagggggaagctctcatttggctttcaatattgacctgcttggggctctcttcttttctggctatcttgtttgatcccttggggggggcctcaatctcatggaatataccaatagcttttatcaaagcccatcttggcttccttttgtgggggaccccaactgaacattcaggggggtttcattgtttggcatgaaaagacaaacctggattctgttttttggggaggggttttatggggtcctccattccagtattcccctttggttgcgggtcccattttttcttaggtcgtttggttctggtgtaggtgttaatcatgatgggcgcttttctttccaattctttttttgaaacgcggcggctcgttcctttcacggatttaaccggatgtgattttttttctccagaaggggggtattattttacttgaaggggtttgggtgcgtgtattttggtctcttgttagatgtgtgtcatggttttttgtgcccta

SEQ ID NO: 85537 - DNA, 1617 bp, Arabidopsis thaliana columbia
atggagcaaggatcactttctacaagtttcccccagcacacgcctaaagcaccaaagaacagcgtacttaatagcataaagatcgtgattttttgtaataaactcaatctactactacctttcggtcctctagccatattggtccactacatgatagatagtaaggggtgggtgttcttgctgacgttagtaggcattacaccattggctgaacgtctaggatatgccacagagcaactggcttgttacacgggtccaactgttggaggcctcttgggtgctacattcgggaatgtgacagagctgatcatatcaattttcgctttgaaaaatggaatgatacgtgttgttcagctgacgttactaggctcaattctgtctaacatgttacttgtacttggcctgcgcttcttttgtggtgggctagtcttttaccaaaaagaccaagtctttgacaaaggaattgctactgtgaattcaggattgcttttgatggctgtcatggggatactcttcccggctgttcttcactacacccatagcgaggttcatgctggatcatcagagctagccctgtcaaggttcagcagttgcataatgcttatagcttatgctgcttacctcttcttccagttaaagagccaatctaattctccacgcgtccgcgatgaggaatcaaatcagaacgaagaaacttctgccgaagatgaagatcctgagatctccaagtgggaagctatcatttggctttcaatattgactgcttgggtctctcttctttctggctatcttgttgatgccatagagggtgcctcagtctcatggaatataccaatagcttttatcagtaccatcttgcttcctatagttgggaacgcagctgaacatgcaggggctatcatgtttgccatgaaagacaagctggatctgtctttgggagtggctattgggtcctcgatccagatttccatgtttgcggtcccattctgcgtggtgattggatggatgatgggtcaacagatggaccttaacttccagctttttgagacggcgatgctgttcatcactgttatagtagtagcattttttctccaggaagggtcatcgaattacttcaaaggattgatgctgattctttgttatttgatagtagctgccagtttctttgtacacgaagatcctcaccaagatggtatataaaccggaagaagagtctggtgtgaagcataaaagggtcttaattaatgatctaaggaacacgaattgttggggaagagatgtgaagatgtaaatctgattctcaagtggtatccacaaactcgaatctgctaaacgtattatttgatttacttgttcgtctgactaaaagtctttgttcgaacaagtgaaggtttatttattcctttttggctttccctccccaaccaaaatcaacattcttagaaggttacaagttttgataatattacaatgattccatattacaaatgatattatgaaagattgaagatttgttttaaaaaaaaaaaaaaaaagggcggccgctttaaaggattccagcttacggacgcgtgcatgcgacgtcaaagtcttctatagtgtcacataaatcaatcg

SEQ ID NO: 85538 - DNA, 519 bp, Arabidopsis thaliana columbia
  unsure (1)..(519): unsure at all n locations
acgactcactatagggaaagctggcacgcctgcaggtaccggtccggaattcccgggtcgacccacgcgtgcgctctctctctctctctgtcgtcaacaatggatagtccgacgagcatacgtagtaaaccactaccggagactctttctccatgcggtagtcaacgacggagaagcagctgcgactctaacccacctgagttcgagttctggcgtttaactaactcttcatttcctcaagctgattcagatctcctctccgccgacgagctttttcacgacggtgttcttctccctcttgacctcctctccgttaaatcagagcttcagtccgacccgaatatcgcagaatgcgacccggatccatctccttcgactggtagtttgattacagagcaaaaaagtgatcttgaacccggtttaggatccgagttgacccgagaaacaacggtttcgaagcggtggagagatattttcaggaagagcgaaaccaaaccgccggngaagaaagagaaggtg

SEQ ID NO: 85539 - DNA, 460 bp, Arabidopsis thaliana columbia
accacgcgtccggcaaaggtaaaaatgacaactccagcagtgaagaccggtttgttcgttggattgaacaaaggacacgtcgtcaccagacgtgagctagctcctcgtcccaattctcgcaaagggaaaacgagcaagaggaccatattcataagaaaactgattagggaagtagctggaatggctccttatgagaagagaatcactgagcttctcaaggttgggaaagacaagcgtgctcttaaggttgctaagaggaagttgggtactcacaagagagctaagaggaagagagaggagatgtctagtgttctccgcaagatgaggtctcttggtggtgctgctgctgctgagaagaagatgtagacatcttattaggcttctgtgttatggcatatttctttctattggaaatcaagttttggcttctgtatgctcaaaaagcgtttatgtgttgtgc

SEQ ID NO: 85540 - DNA, 551 bp, Arabidopsis thaliana columbia
  unsure (1)..(551): unsure at all n locations
actataaaatcnattttntntcacaaatctnattctctttngactncagtggcggcgcattcagagattcaaactcagagaaaatggtggcgacaggcttattcgtggggctaaacaaaggacacgttgttaccaaacgcgagcaacctcctcgccctaacaacagaaaagggaaaacaagcaaaaggactatttttatcaggaatctcatcaaggaagttgcgggtcaagctccctatgagaagaggatcactgagcttttgaaggttggtaaagacaagagagctcttaaagttgccaagcgaaagttgggaactcacaagagagctaaacgaaagagagaggagatgtccagtgttctccgcaagatgaggtctggtggtgctggtgcatccgagaagaagaagtgatgcgctgactctggttcagcgctctgtttcttctaaaccagttttctgttttttgaattttttgcagtaccntgtgtttcccctttggntatttttgtagcagagntaattaaatgttaaaacgggaccccttatggcttt

SEQ ID NO: 85541 - DNA, 573 bp, Arabidopsis thaliana columbia
  unsure (1)..(573): unsure at all n locations
ccgggccggcccacgcggaaccaccggaggagctcgatccattgattagaagatgacaactccacaagtgaagaccggtttgttcgttgggttgaacaagggacatgttgttaccagacgtgaattagctcctcgtcctcgttctcgcaaaggaaaaacgagcaagaggacaatctttatcagaaacttgataaaggaagttgctggtcaagctccctatgagaagagaatcactgagcttttgaaggttggtaaagacaaacgtgctcttaaggttgctaagaggaagttgggaacccacaagagagccaagcgaaagagagaggagatgtccagtgttctccgcaagatgaggtctggcggtggtggtgcaactgagaagaagaagtgaacgtcatcttaagtttgtgaatcgctcgtaaagagttatggtttcttgttgcaaaatcgttattatgattcctaagcttctcgaattatgtttttgttagaatatcggccttaaaggagggtttttgtttgaacccagtgtctcttttctccttatacctattttcccgcttttgnccaatt

SEQ ID NO: 85542 - DNA, 2168 bp, Arabidopsis thaliana columbia
acgcacatttgcatcgataataactcaccaacactctctctgtctccatcgaatgtttcctctaactctcaacaaaaatgcgcaaacaatttgtttttcttctgcctttcttgtcacgtctctaccatgtagttatagccggaggagaacggttaactaacggcggtttttcaccggagataaatccgttcacacccaaagcgtctttagtacgttactggaacaaacagatccatcaccaatcacccggctcagcctttctcctctccaaggcttcaccacttaccgccgtcgcctccgccaccttcgccaaactcgcctccgaaaacgctcttccggatcgcctccccgacttctgctccgccgcaaacctcttctgttttccagatttaggtccaaccctcgagaaacacagcaacgacgttaaattctctgtttacgaccaacgaaacttcaccaactacggcacgattcaccccggcggtgctgactcgttcaagaaatattcacaaaacggtaacgcagtaaccgactctttccggcgatacagccgagacgccgccggtcacgaagataaattcacaggctacgctgataacagcaacgtcgtcgaggaaaaattcaattcttacggcacatcagccaccggcggctccggcgattttaaaaactatcaatccggtgttaacaatccgacgactcgtttcaaggcctattccgacgaaggaaatggccgtgctcagacgtttaaaacctatactcacgaagccaactccggaccgggtcaatctttcaccagttacggcaaaaacggtaacggagctccaaacgagttctcttcttacggtgtctcctctaacgtaatcggatctgatttctcaaactacggtgaaaacggtaacgcagccaacgacactttcaaaggctacggtggtgacggcaatgttcctcagaataacttcaaaagctacggtgcctccgggaacgctgccgttgacacgttcttgaattatagagacaatgctaacgttggtgatgattcgttctcgtcgtatgccaagaactcaaacttcgagaaggttgatttcgtaaattacggcaaatctattaacccgggttcagagtcgtttagtggttatggtaaaggagctgagggaaacaaaattgatttcaaaacgtatactcagaactctacgttcaaggactacgcgaaaaccggagtcgaatttgcgaaatataaccggagtagtctcggtggtggcaaaacggtaaataagtgggtggagcctggcaagttctttagagagtcgatgcttaaagaaggtacattgatttggatgcctgacattaaggataaaatgccgaaaaggtcgtttctaccttgtagcattgtctcgaaactaccgttttctacatcgaaaatcgcggaaatcaagcgtgttttccacgctaacgataactcgacgatggaagggataattactgatgcggtaagggaatgtgagagaccgccgacagtcagcgagactaaacgatgtgtcggatcagcggaggatatgatcgatttcgcgacatctgtgcttggtcgaagtgtggtactccggacgacagagagtgtagccggatcaaaggagaaagtcatgatcggtaaagtcaatggaatcaacggtggaagagtgacaaaatcagtgtcgtgtcaccaaagtttgtacccttacttactctactactgtcactctgtgcctaaagttcgggtgtacgagtcagatcttttggatcccaagagtaaagccaagatcaaccatggtattgctatatgtcacatggacacatcagcttggggtgcgaaccatggagccttcatgttgcttgggtcccggccaggtcagatcgaagtatgccattggatctttgagaatgatatgaattgggccatcgccgattaaccatgttgtagccaaatgaataatgaatgttaatgttttgtatctctatatttcagtaacgataccaaaaaaaaaaaaaaaaaaaattctgttaactaaatatgttgtgtcaggattatgttaaccttctaaaccaatgaagttaaaaaaaaaaaccaggggaatgtaaattttctaaaaaaaattgaattcccctagccaatttaagttgtgggggtttgg

SEQ ID NO: 85543 - DNA, 515 bp, Arabidopsis thaliana columbia
  unsure (1)..(515): unsure at all n locations
ttttcttcttctccttcttctcactgtaaaaaagaaaaaaaaatggcggaaactgagagaccccaccggtcttcaagtattaacagtagtagcaacaacaacagtggttcatcaaccgatctattcatttgtttcacatctngtttctnttcttcttcctctatgcgtctntnttctaaatccatccatagcccagctcgttccgcttgtttcaccacttctnttagccgtcgtctccgtactagcggtagcttgaagaacgcttcagctggagttttgaactctcccatgtttggtgctaatggaggacggaagagatctggatctggctacgcggaatagtaacaacaacaacaactaattaccatagagccgtcgtttccgaagtgacggtgtattgggnaagntagngtnaaggctaggaagcatgtgaggagaggttagngctngatcttgaagggaanggaggtgngattgttttaggnganccgttgtcaaacgncgggggtggtggg

SEQ ID NO: 85544 - DNA, 787 bp, Arabidopsis thaliana columbia
  unsure (1)..(787): unsure at all n locations
atacgactcaacttagggaaagctcgtacgcctgcaggtaccggtccggaattccgggttctctgcaatacacagcaatggcggcgagaggtgctatgcttcgatacctgagagtcaacgtcaatccaacaattcaaaaccctagagaatgtgtacttcctttctccattctccttcgtcgtttctccgaggaagttagaggctctttccttgacaaatctgaggtcacagatcgagttctctctgtcgtcaaaaacttccaaaaagttgatccttctaaggtaacaccaaaagccaatttccaaaatgatctagggttggacagtttggacagtgtggaagttgtgatggcattggaggaggaatttgggtttgagatccctgataatgaagcagacaagatccagtccatcgatctagccgttgactttattgcttctcatcctcaggctaagtgaaaagagaaacaaattcttcggtgttcatgcgtgcctcagctgtgtctacagattttgttaaagcctaataagaagtaaagaagcaaacaacattttctttttgtcatgagaatggataagcttttgtgttggctctactactctggtttcataagtattagatgtgtttctgcatgaattacgaggcctttcaaagaactttgttttctcttgattttatcttattaaacgcatcagacaaaaaaaaaaaaaaagnnnnnnnnnnnnnnnnnnnnnnnnnnnnnnnnnnnnnnnnnnnnnnnnnnnnnnnnnnnnnnnnnnnnnnnnnn

SEQ ID NO: 85545 - DNA, 975 bp, Arabidopsis thaliana columbia
  unsure (1)..(975): unsure at all n locations
ctcaaatctctcctctcttctttcttcttcttcaatacaatacaatcaaaagaacagagagataaggttagagcaaaacactgtctgaaacaaacaacaaaaaaatggcttgctctaatctaacaacaatgtgggtttcatcaaaaccatctctttctgctgattcatcttccttatcattccgatctgttctcaagtgcccaactaacacttcctcacctccttcacgagcttcctctgtttcaccactccaagcgtctcttcgtgagctcagagaccgtatcgattcagtcaaaaacactcaaaagatcaccgaagctatgaagcttgtcgctgcagctaaagtcaggagagctcaagaagctgttgtcaatggacgaccattctcagaaaccctagttgaagttctttacaacatcaacgaacagcttcaaaccgatgatgtcgatgttcccttaaccaaagtcagaccggttaagaaagtagctctcgttgtcgtcaccggtgatcgtggattatgtggtggattcaacaatttcatcattaagaaagcagaggcaagaatcaaagagcttaaaggtctaggtcttgaatacacagtcattagcgtgggcaagaagggaaattcttatttcctccgtcgcccgtacatccccgtcgacaaatacctagaagccgggactttacctacggctaaagaagctcaagctgtggctgatgatggcttctctctggtttataagtgaagaagtcggcaaagtcgggcncttgtacacaaagtttggccctttgggcaaatcagaaccgggntccanacggaatggccttttcccctnaagggnaactggggcattaatgggacccgtgtgggtcctcngaaaatnggntttccgggtancggcaaanagggganttccngttnaaaagggctttgggnccanacggtttcccggtttgnatcngaaaccngtnngt

SEQ ID NO: 85546 - DNA, 581 bp, Arabidopsis thaliana columbia
  unsure (1)..(581): unsure at all n locations
gaacctttacagatcagaggatccaatgtcgagattctcgctactaagcgctgaatttgatcaatctctgttctctttttccttcatttgattcccttttctgggtctctctaatttattggcgtcgttgtttccttatcctgaatccttatcttcaatcctctgttctgtttctcaaacctaaaaaagtttgaaactttcctgaaaaaatggcgactagaggaagcagatcggagaaagttaagagaattttccagcaattcgacgggaatcatgatggtgggcttaaccgtgaagagatggcggctcttgtcgtagctgttaaccctagggttaaattcagtgacgagcagatcaacgccattctcgatgaagtttttcgaacttacgctgaattcatcgatccaaacaagggtttgacctacgacggtctcctacgtacttacgacgacggtgccggagatgttgacagagatttcacgcattggggcttnagtaaacnctgttntancgnggttaaagggctnangggggtcggctnttccgntacggtnnaacctgtaannngaagaananaacac

SEQ ID NO: 85547 - DNA, 538 bp, Arabidopsis thaliana columbia
  unsure (1)..(538): unsure at all n locations
ctactatcccccgtgtccacaacctaatctggttacgggtctaattccgcattccgatgcagtcgggctcaccatacttttgcaggtgaatgaagttgacggtctccaaatcaagaaaaatggcaagtggttttttgtcaaacctctccaaaatgctttcattgtcaatgttggggacgtattagagatcataacgaacgggacataccgaagcatcgagcaccgggcaatggtgaacttggagaaagagaggctctccattgcgacatttcacaacacgggaatggataaagaaattggtcccgccgagaagccttgttcaaagacaagaggctgcaaagtttaggaggcctgaaaacttaaggcctactttgaatggcttgttttcccgtggacctcaaaggaaaggctttttcttgatgctattgggaattttaggggagtggtctctttgtttncccagaaatttggtttttcaaccggcaatgccgggctaaatttgttttcccccccccaaagnnttgggnnaaactntnag

SEQ ID NO: 85548 - DNA, 526 bp, Arabidopsis thaliana columbia
aatacgactcacttagggaaagctcgtacgcctgcaggtaccggtccggaattcccgggtcgacccacgcgtccgccaattttgttatttttgttctctcttctctctcgttcatgtttcaaatctgtttctagggtttcacaaaccagagatagagagaggtttagcgaaaaatggcgatggccatggctcttcgaaggctttcttcttcaattgacaaacccattcgtcctcttattcgatccacttcatgttacatgtcttctttgcccagtgaagctgttgatgagaaggaaagatctcgtgtcacttggccaaaacagcttaacgcacctttagaggaggttgatcctgagattgctgacattattgagcatgagaaagctagacaatggaagggacttgaacttattccatctgagaacttcacatctgtgtcggtgatgcaagctgttgggtctgtcatgactaacaaatacaagtgaaggctatcctggtgccagatactattggaggaaatgagtat

SEQ ID NO: 85549 - DNA, 536 bp, Arabidopsis thaliana columbia
  unsure (1)..(536): unsure at all n locations
agaggtttagcaaaccagagatagagagaggtttagcgaaaaatggcgatggccatggctcttcgaaggctttcttcttcaattgacaaacccattcgtcctcttattcgatccacttcatgttacatgtcttctttgcccagtgaagctgttgatgagaaggaaagatctcgtgtcacttggccaaaacagcttaacgcacctttagaggaggttgatcctgagattgctgacattattgagcatgagaaagctagacaatggaagggacttgaacttattccatctgagaacttcacatctgtgtcggtgatgcaagctgttgggtctgtcatgactaacaaatacagtgaaggctatcctggtgccagatactatggaggaaatgagtatataggcatggcaggaaaccttttgccacaaagggggggtcttttaagcgttttccggttagatcccccaaaattggggggggaattttccaacccttgttttggtgttcccggccaaatttcctgggnttcancgnnnttttt

SEQ ID NO: 85550 - DNA, 510 bp, Arabidopsis thaliana columbia
  unsure (1)..(510): unsure at all n locations
taagacatcactcggtagaggccaggaancctttgatgtgttgngancaaattggtgcgcggccaagaccgggggggaaaccagtgcgaacacgcctgaaaatggttcagaggagtcggaatccccgcggccaaagcgtccgagaaatgaagaatgaagggaacctttcttccggatggtagatcataaaactgtggttttggtggagttgtagagtatgacttattaggagtagagctttcagtcttcttcaggccttttctcttttttttttctttcttaaaactctaattttctgattctcagctctctaggaagaaacaaataaagagcaattccatctttgtgatgtaattctgagtgcagagattttagatttagtgtttaggtggattttaaactagcttttatttcgagtttcttcctgtatactgcgttaatttcataattgcatgtatggaatcaactcatgtaagttagattaatcttcgaaaatatttttgcttttgc

SEQ ID NO: 85551 - DNA, 501 bp, Arabidopsis thaliana columbia
  unsure (1)..(501): unsure at all n locations
cacagaatgtggcaattccggattacagaagtcccaatggagcatacagttctggtttcaaancaattacccatcaggtgatctgaaggagtttactcgatcaagccgagctcgtaggcggtattgggcgaggagttacgctggatggaggaggttcactgcagcacaaccaggaccagctcatactgctttagcatcactaggaaaagctggacggataaatttttatggtcacacaaaatgttgccaggttgcatcatcgtgcttgggagcggtcccctttggatttacatggcaaccagttttttactgtnatcgtgcttagagtgcggcgtcttttttttttcccccgagacttgtttcaggatcaagctaaaagcaatcaaatcctaagtggggcttnaagctntngaaaggntttgtccatgggggtccngggtcannggaggggntttgggattaaacaaaggnccttntnggtggtatcggggtttncggaaa

SEQ ID NO: 85552 - DNA, 505 bp, Arabidopsis thaliana columbia
cggtcgcgtgggtttatatattgtaacggtgaaaaatcgtcatctacttcttcttgaaaccctagttccaaaatctgcacacacactcagaagaagaagacgtcatctctctatctctgtctttctgctaatttcacgaagaatctgagaatatgccaaccatcagtgttggcagagaccgtttgttcgctgctcttggagaatcctatactcaggaaaaattcgaggaactgtgtttcagtttcggtatcgagcttgacgatgtgactactgaaaaggcaataatcagaaaagagaagcacatcgatgaagaagctgatgatgatgaagaaatcatctacaagattgaaattcctgccaacagacctgatttgctttgcctcgaagggcttgctcaatctcttcgcgttttcatcgagaaacaggagataccaacgtatactcttgctgacattagcaaagacaagatccttcaaatgaatgttaaacctgagacatcgaagat

SEQ ID NO: 85553 - DNA, 1068 bp, Arabidopsis thaliana columbia
ggatcttgtcttggagtcgatcagtcggctgttagtatatttactgaagagatcattcgagctggatctgcagcagcattgtcgtcacttgttaaccgacttgacccagttcttaggaagactgctaacttgggaagttggcaggttattagtcctgtagaggtcgtcggatatgtcattgttgtggacgaattgctcactgtacagaataaaacctacgatagacctacaattatagttgcaaacagagtgagaggagaggaggaaatccctgatggtgcagttgcggtactgacacctgacatgccggatgtactatctcatgtttctgttcgagcaagaaatggaaagatctgctttgccacatgttttgattctggtatcttatctgacctccaaggaaaagatggaaaactgttgagcctacaaccaacctctgcagatgtagtctataaagaggtaaacgatagtgagctttcgagtccaagttcagacaacctggaagatgcccctccaagtatttctttggtcaagaaacagtttgcgggtagatatgctatatcatctgaggagttcacaagtgacttggttggtgctaaatcaagaaatatcgggtatctgaaaggaaaagttccttcttgggttggtatcccaacttcagttgcgttgccatttggtgtttttgagaaggttatctccgaaaaggcgaatcaggcggtgaacgataaattgctagtattgaagaaaactcttgatgagggagaccaaggtgctctgaaggaaatccggcagacactgttggggctagttgcacccccagaactggttgaagaactgaaaagtactatgaaaagttctgacatgccatggccgggtgatgaaggtgaacagagatgggagcaagcttgggcagccattaaaaaggtctgggcttcgaaatggaacgagagagcatacttcagcacgaggaaagtaaaactggatcatgactatctctgcatggctgttttggtccaagaagtcatcaatgcggattacgcattcgtcattcacacaactaatccatct

SEQ ID NO: 85554 - DNA, 483 bp, Arabidopsis thaliana columbia
  unsure (1)..(483): unsure at all n locations
caagattaaaaagaaggagaaaatgagagaaggatctcatcttatcgtcttgcctttcccaggacaaggccacataactccaatgtcccagttctgcaaacgcttagcctcaaaaggtcttaagctcactctggtcctcgtctccgacaaaccctctcctccatacaaaacagagcacgactcaatcactgtcttccccatctccaacggcttccaagaaggcgaggaaccattacaagacctcgatgattacatggaaagagtagaaaccagcatcaaaaacaccttaccgaagttggttgaaggccatgaaactgtcgggaaatcccacctacgggctatcgtgtacggctccacccatgccatgggtttcttcgatgtaggctcatagttatggggtttagccggtnccgngtttttcaagggaacccttggttttnnaaagttttttacttcccatntttnnaagggntcggtntttng

SEQ ID NO: 85555 - DNA, 584 bp, Arabidopsis thaliana columbia
  unsure (1)..(584): unsure at all n locations
tttatatataaagagagacgcatctttttatttnattcatcgcttctccaaaatttttttcaaagaacaaatctcccaaatctaaaatctttctccttctctcttcgtttccataaccatgtctgcgaagaagattgtnttgaagagttccgatggtgaatctttcgaggttgaggaggcggtggctctcgagtcacaaaccatagcgcatatggttgaagacgactgcgtgacaacggagtccctcttcctaacgtcacgagcaagatcctcgccaaggtgatcgagtattgcaagaggcacgtcgaggctgctgcctctaaggccgaggccgtcgagggtgctgctacctccgatgacgatcttaaggcctgggacgctgattttatgaaggtcgntcaagctactctctttgaactcattctggctgctaattacctgaatatcaagaacttgcttgntctaacatgtcaagacagttccggntnttntcaaaggaaggctccngagggntccganaaggtcaaattaggccgggttnanccngggnaggggagggtncaagggnccatgggtttntttta

SEQ ID NO: 85556 - DNA, 623 bp, Arabidopsis thaliana columbia
  unsure (1)..(623): unsure at all n locations
gttncgggtnnaaacccatccccattggttaaacccccnncttnaaaacgggccccntttcaancgttccgggnaaanacccnnccccaaggntacccgggttttcaaaggggccccttccggggcttctccccccttaaggcccggcccccctcgggggtgctcgacccccccgcatgccggtctttaaggccctgggcccccgggtttttatggaggaccgatcaagctaccctctttgggaaccccattctgggctgctaatttcccctggaataccaaggacttgcttgatcttaccatgtcaggccagttgcggatatgatcaaaggaaagactccagaagagacccgcacaacgttcaacattaagaacgacttcacaccagaggaagaggaagaggttcgcagagagaaccaatgggcttttgaatgattgatcttcagagagaagaatcaaaagcagcaagcaaccagtttcttcttccttatgtttattgccgttttcaagtgttgttgatgacttgctttttaatattcttcatgaatcatgactatcttcttcctcttctttctttcttatcaagaaccaatgtttcttactctttgtgggatggataattt

SEQ ID NO: 85557 - DNA, 876 bp, Arabidopsis thaliana columbia
  unsure (1)..(876): unsure at all n locations
tttttaggacacactatagaagatcttatgacgtcgcctgcacgcgtacgtaagctcccactcgtccgaaattttcttcaaagaacaaatctcccaaatctaaaatctttctcttctctcttcgtttccataaccatgtctgcgaagaagattgtgttgaagagttccgatggtgaatctttcgaggttgaggaggcggtggctctcgagtcacaaaccatagcgcatatggttgaagacgactgcgtcgacaacggagtccctcttcctaacgtcacgagcaagatcctcgccaaggtgatcgagtattgcaagaggcacgtcgaggctgctgcctctaaggccgaggccgtcgagggtgctgctacctccgatgacgatcttaaggcctgggacgctgattttatgaagatcgatcaagctactctctttgaactcattctggctgctaattacctgaatatcaagaacttgcttgatctaacatgtcagacagttgcggatatgatcaaaggaaagactccagaagagatccgcacaacgttcaacattaagaacgacttcacaccagaggaagaggaagaggttcgcagagagaaccaatgggcttttgaatgattgatcttcagagagaagaatcaaaagcagcaagcaaccagtttcttcttccttatgtttattgccgttttcaagtgttgttgatgacttgctttttaatattcttcatgaatcatgactatcttcttcctcttctttctttcttatcaagaaccaatgtttcttactctttgtgggatggataatttgtgcttttagataatcttcaagagtgatgttggtttgtcttaccnnataacttctttnnnnnnnnnnnnn

SEQ ID NO: 85558 - DNA, 520 bp, Arabidopsis thaliana columbia
  unsure (1)..(520): unsure at all n locations
gaaacatctcagagcacaagagattgctgctcggtgcagacttccttgcatatatcttgttgatagtggtggtgcttaccttccaaaacaggctgaggttttccctgacaaggagaattttggtagggttttctacaacgaatcggttatgtcatctgatggaattccacaaatcgccattgttttaggctcctgcactgctggtggtgcctacattcctgccatggctgatgaaagtgtaatggtcaaagggaatggtaccatatttttagcaggaccgccacttgtcaaggctgctacaggagaagaaggttcagctgagggttttaggaggcgccactgttcactggacctgtgtccggtggtgtcanattattttnccctaggcggggctacatggcctcnctattggaggaacatttgtcaagantttcccatggctgcaaacaagggttggaaggacnttttgnggaaaattttgtttnaagggnccctctttgcataanngnttgncccnttg

SEQ ID NO: 85559 - DNA, 858 bp, Arabidopsis thaliana columbia
  unsure (1)..(858): unsure at all n locations
cgccttgtataatccgtttcactataggcaaagctggtacgcctgcaggtaccggtccggaattcccgggtcgacccacgcgtccgcggacgcgtgggagaacttcctcgctcgtatgcatatgaaagccatatctactcgccttcgcagatacggtctgaggtacgatgatctgtacgatcagtattacagtatggacatcaaagaggctatgaacagattgcccagggaggtcgttgatgctcgtaaccagcgtctcaagcgtgccatggacctctccatgaagcacgagtacctccccaaggatcttcaggcggtgcagaccccattccgtggctatcttcaggacatgcttgctcttgttgagagggaaagcaaggaacgagaggccttgggagctctaccactataccagcgcacactcccataagcattcctttccccttttcttgtggtcaacgctgcttctctgcataaatctgcaacattgatattttggtgctcactttctgaacagagctatttactatttgaaaaagcataaatctgtgatagttttcctaagtggatatgttgctagttacatttttatcgcttttgctggcttgaataaaatcgacgacgcaactcaagtctgtctcgatgatttatcattttcgaggtctggtttgctcttttattcttataattggtctctcagaggcgtttaagttttatgcattgaaatgtagaagtgccatgattccatattcttgggaatttggtcgagccatgttgatgtatcctttgcattgacagtttcatgtgagaaattaatgggagagaattatgagtttattaggcaccgatnaaaaaaaa

SEQ ID NO: 85560 - DNA, 760 bp, Arabidopsis thaliana columbia
ggagttgttgtagacacagcagcttggtctctttcattggcacaaagagagaaaatctgaaattgagagagacagagaaaaatggcgtcgcttctgaaagcattcatcgatccaaagaagaacttcctcgctcgtatgcatatgaaagccatatctactcgccttcgcagatacggtctgaggtacgatgatctgtacgatcagtattacagtatggacatcaaagaggctatgaacagattgcccagggaggtcgttgatgctcgtaaccagcgtctcaagcgtgccatggacctctccatgaagcacgagtacctccccaaggatcttcaggcggtgcagaccccattccgtggctatcttcaggacatgcttgctcttgttgagagggaaagcaaggaacgagaggccttgggagctctaccactataccagcgcacactcccataagcattcctttccccttttcttgtggtcaacgctgcttctctgcataaatctgcaacattgatattttggtgctcactttctgaacagagctatttactatttgaaaaagcataaatctgtgatagttttcctaagtggatatgttgctagttacatttttatcgcttttgctggcttgaataaaatcgacgacgcaactcaagtctgtctcgatgattaaaaaaaaaaaaaaaaaaaaaaaagggcggccgctctagaggatccaagcttacgtacgcgtgcatgcgacgtcatagctcaactggagtgt

SEQ ID NO: 85561 - DNA, 511 bp, Arabidopsis thaliana columbia
cagctctaatacgactcactataagggaagctggtacgcctggcgggaccgggcccgaatttccgggtcgagccacgccttcggggacccgttcggcccgcgttcggccaaccgttcggccaagccttcggccaaggcttccgaagaacctggggttaaagaaccagttccggtttggtttggttcatttctcacctcaccccggcacggagtccaaaccaccggtttatttctggcgttggtcgggaaatcagagttgagtataataaacacccttcacgacattctttgcttgtccaccttggtatctgaaattgggggactcttattataaaagatatgatgatttgttactctccaattacaacatgttctaggaatgctatcagtatcaagaggcatttaggctctcgcctctacggcgttgtggctcacggatcatctaaattctcctgctacagtcttttatcaggactttcaagaagacattataccggttttcgtgtatcgg

SEQ ID NO: 85562 - DNA, 774 bp, Arabidopsis thaliana columbia
gcagcaccggatctggattcccgggtcgacccactcgtcaaattttcaacaaggataagagccggaagctcatcgccggtgaacggaactagggtttcattcatccccaaattgataacaagaaaatggctcatgcttgcgtctctacatcggcttcttctctcagattcacagctggattcgtctccgctagtcccaatggctcctctttcgattctcccaagctttctcttcctttcgagcctctccgttcaaggaagacgaataagttagttagcgatagaaagaattggaagaattcaactccgaaagctgtatattccggcaatctctggacaccggagattccgtctcctcaaggagtttggtccattagagatgatttacaagtcccttcttcgccgtattttcctgcttatgctcaagggcaaggaccacctcctatggtgcaagaacgtttccagagtatcattagtcagctcttccaatataggattattcgctgtggtggtgctgtggatgacgatatggcaaacataattgtagctcaactcctgtatcttgatgctgttgatcctactaaggatattgtcatgtatgttaattctcctggtggatcagtggcagctggcatggctatattcgatactatgaggcacatccggcctgatgggtccactgtttgtggtggtctccctggtcgtatgggagcttttctgcttaggggtggaacctaagggaaaaagataccgggtacccaaactccaggattat

SEQ ID NO: 85563 - DNA, 735 bp, Arabidopsis thaliana columbia
cgatcaaagatgatatctcatcatctagatagtatttgtctcgatattagagacgtacacactttgtttagactcaaatcaatatgggatctttcgtgaaagaagagacgtcgtcgttgatgacagattttttggagaagtgcggtggttatgcggtggtggatggagggtttgcgacggagctacagcgccacggagctgatatcaatgatccactttggagtgctaagtgccttattacttctcctcaccttgttacaaaggtgcacttggattaccttgaatctggagcaaatatcatcataacagcatcttaccaggcgacgatacaaggttttgtggcaaaaggtctatcggtgggagaagcagaaaatttacttagaaggagcgttgaaatcacgtacgaggcacgtgagattttctacaacagatgcaccaagggttcatgggatttcgcctacgctggaaaagcttcccggagaccaattcttgtcgcagcttccgttggtagctatggagcttatctcgctgacggctccgaatacagtgggatatatggagattctgtgagtaaggagacattaaaggatttccatagaagaagagttcaaatcttagcaaaatctggagccgacctaatagcattcgagactattccaaataagctcgaagcagaggcttatgcggatcttcttgaggaggaagatatcgatattccggcatggttctcgttca

SEQ ID NO: 85564 - DNA, 1969 bp, Arabidopsis thaliana columbia
cgatcattccacttccttcttcctctctctcaacattttcccctgaaaataaggaaactaaagattcttcctctctctttctacactcttctgacaatactaaaacactttatcagatcagatcccacataaactttctaggagaagaagaatggcaagggaacaattacaagtgttgaatgcacttgacgtggccaagacgcaatggtaccatttcacggcgatcataatcgccggaatgggattcttcactgatgcttacgatctcttttgcatctctctcgtaacgaagctcctcggtcgtatttattaccacgtggaaggcgcacaaaagcctgggactctccctcccaacgtcgcagccgccgtcaatggcgttgccttctgtgggactctcgccggtcagctctttttcgggtggcttggtgataagctcgggaggaagaaagtttacggtatgacgttgatggtcatggtcctttgttcaatagcctctggtctctctttcggacatgagccaaaagctgtgatggccacgctctgtttttttcggttttggcttggatttggcatcggtggtgactaccctttatccgcaaccatcatgtctgaatatgcgaacaagaagactcgcggagcctttgtctctgcggtttttgctatgcaagggttcggaatcatggctggtggtattttcgctattataatttcctctgcttttgaagctaagtttccatccccggcctatgcggatgatgccttgggatccacgattcctcaagctgatttggtatggcggataatcctgatggctggtgctatccctgcggctatgacgtattactcaaggtcgaagatgcctgagaccgcaaggtacacggctttggttgctaaggacgcaaagcaggcagcttcggacatgtctaaggttctgcaagtggagatagagccagaacaacagaaattggaagagatctcaaaggagaagtccaaggcctttggattgttctcaaaggaattcatgagtcgccatgggcttcatttgctaggcactacatcgacatggttccttctcgacattgctttctacagtcaaaaccttttccaaaaggatattttcagcgcgatcggatggattcctcccgcgcaaagcatgaacgcaattcaagaggttttcaagattgcccgtgcgcaaacgctaatcgccttgtgtagcacggtacctggttactggttcacagttgcgttcatcgacgtcattggaagatttgcgattcagatgatgggtttctttttcatgacggtctttatgtttgctctggctattccttacaaccactggactcacaaggagaaccgaatcggatttgttatcatgtactcgttaacattctttttcgccaactttggacccaatgctacaaccttcgttgtgccggccgaaatcttcccagccaggttcagatcaacctgccacggtatctctgcagcatcaggaaaattaggagcaatggttggtgcgttcgggttcttgtacttggctcagaacccagacaaggacaagaccgacgcaggataccctccagggattggggtcaggaactcgcttattgtgttgggtgtagttaacttcttaggtatcctcttcactttcttggtacctgaatctaaaggtaagtcactcgaggaaatgtccggtgaaaatgaagacaatgagaatagcaacaatgatagtagaacggtcccaatagtttaggtgatataatacgccttttgtaataattttcgttttttctttctccttgtctctagcaactcaagttgttctttgtgtaatccattgatacctaattaatgctagagaaatcaaaattttcaaaaaaaaaaaaaaaaaaaaaaaaagggcggccgctctagaggatccaagcttacgtacgcgtgcatgcgacgtcatagctctacgaagtgt

SEQ ID NO: 85565 - DNA, 413 bp, Arabidopsis thaliana columbia
gtccgctctatttacttatccagaacgaagagagattcaaatttcgcaatgcgattctagtgaagcttctttttcttctgtacatggttatcgtcgtaaaatggcgtctatagacaatgttttctcactcggtactcggttctcaatcccagaaaaccccaagagatcgatattgaaacacgcgactacatcgagtttctccgcgagaactcaaactcgatggagagctccaattctgcgtcggtcgtttacagttttgtgcgaattgaaaactgggtcatctagctccggcgagacgaacaattcccctgctgctgacgatttcgtaactagggttttgaaggagaatcctagccaagtggaacctcgttaccgagttggtgataagctgtataatctgaaggagagagaag

SEQ ID NO: 85566 - DNA, 505 bp, Arabidopsis thaliana columbia
  unsure (1)..(505): unsure at all n locations
cgatttcagatttgatggcaatctccaatggcgccgtggaatttctccggcgacgactcctcccaactacactaatccacgtcacggctatagacggcatcgtgaacgttaattcactcttctcgcttgcccttttcctcggcctaaccacaagtggaaacatcactttcccggtttcctcatcagcctccgagaaccaccatctccgccgatgtatctctgcaaaaggtcccgcattagcggagaggctagtatcaagccatgttttactccttcagtttaatttcctcttctccagtctcatcgctatgtctctcaagcaaagcaattaggncaacaacaacaacaacaaacggggactggntttagaaggaggaggcgcgtntgttgaacncgggaaaaggggngttgtgaatttggaagtttaaaggggttggnatngtnccttncggggnttcgnccggntttnggattnggggtnnttnnaatggggtagggggcnttt

SEQ ID NO: 85567 - DNA, 575 bp, Arabidopsis thaliana columbia
  unsure (1)..(575): unsure at all n locations
gcagattgaagagatagctgaagccttggaactcaccggccacaggtttctttggtcaatacgtacaaatccgacggagaaagcgagcccgtacgatctgttgccggagggatttctcgatcggacggccagtaagggattggtgtgtgattgggccccgcaagtagaagttctggcccataaagcgctcggaggattcgtgtctcactgcggttggaactctgtactggagagcttatggttcggtgttccgatcgccacgtggccaatgtacgctgagcaacagttaaacgcattctcgatggtgaaggagttagggttagccgtggagctgcgtttagactacgtttcggcgtacggagagatagtaaaanctgaggagatcgcgggagccatacggtcattgatggacggtgaggatacgccgaggaagagagtnaagganatggcggaagcggcgaggaatgctttnatggacggaggatcttcgtttnttgcggttaaacgatttctcgncgagttnatcgncggagatgtttagttctattataaacgtcgtcgttcgtncncntttt

SEQ ID NO: 85568 - DNA, 635 bp, Arabidopsis thaliana columbia
  unsure (1)..(635): unsure at all n locations
agcttcnnnnnnnnnnnnnnnnnnnnnnnnnnnnnnnnnnnnnnnnnnnnnnnnnnnccacgcgtccgccccacgcgcccctgaacgacaactaaaaatataatttacaaaagaagaacaaaaaaatgtcgaaaacattcaaagccataagagaccggacatattcaggcgtaggagacctcatcaagctcctcccgaccggaaccgtcttcttgttccaatttttaaaccctgtcctaaccaacaatggacattgcctcctcatcaacaaatacttaaccggagttctcatcgttatttgtgccttctcttgttgcttcacttgcttcaccgatagttaccgaacaagagacggttacgttcattatggagttgccaccgtgaagggtctttggccagattcatcttcagtggatttgtcttcgaaaaggcttagagttggaggttttgtttcacgntgttcttctctcttatcggggttcagtgttattcccttgttggnngnaaanaaccgngnatttnttttatnctgggtttgggtcccctgggnaggctttntaaggtttttcccccggggntcggggaanttccgggggggttttaagggggtcccntgnanaggnncggnattgggg

SEQ ID NO: 85569 - DNA, 370 bp, Arabidopsis thaliana columbia
  unsure (1)..(370): unsure at all n locations
tccttcgtcgctaaaactcgccggagaatcccacaccatcaagaaaacgtcgtcttgcaagtngaagccacgaccacatggacgggcatctccggttatnatctacgcgcattctccaaaantaatccacacgcntgccgaagacttcatggccctggttcaaaggctgaacgggtctagacgagattattagacggaacactagtgaatctccctcttctnttgtaacggaagaggttaacgtcggggatgataacacggcggctccgtttagtcaggatagagcacaacgacagaagttaactgatatgccgttnttcacaccgagctcgatgaccttntttggttctccaactcaacttatgtatat

SEQ ID NO: 85570 - DNA, 507 bp, Arabidopsis thaliana columbia
  unsure (1)..(507): unsure at all n locations
cattaagaagtcaaaagtcgccggtgccgtttccgttaaggataaatctcacccacccgctctaggtttccgtaccagagccgccgccgctaaaaacctcgccctccaccgtctccgttctcattccgacgaagcagactcctttaactacctccagctccggagccgccgtctcgtgaagcttccattactcactaataccagaaaacagcagaagcaacagctcattcctagtgtcaatcaatgtcaaacgaaaaaccctagggctagttccggtccggcgaagaaattagagccggatacggcggcggaaggaagcttgtggtgataattgagagaatatctagggctngatttgnaatttttggggttaaagggttttaaatttcggattcaggaaaacaagggggtttgttaaggggttcaaaattaattttnaaaggggggtttnnaggcctttttttttngggggggnccgggnannanngggttttttttttnaaaang

SEQ ID NO: 85571 - DNA, 406 bp, Arabidopsis thaliana columbia
actgagaacaaagacatccgcagaatcgatatccccagaatcactactctacaaattcgaatccaaagttcaaaccctattcttcgattttcgtagagcagattattgtttccctttaggtgtctccatagtttctgaagagagaaggatggattgggacagcgttgctgctgaggatgtgattgaggcgttaagagaggttgaatggtcggcgagtcctcgttccttggccgagttcttctccagattcgcgtttcctcgctctttctctaaatggatgagccgtctcaaatgcaatctctactactataggacgaattacttcatcctcttcgttttcgttctgggtcttgcacttatcactcgacctctggcaattcttggtgctgctcttacagctttaagc

SEQ ID NO: 85572 - DNA, 563 bp, Arabidopsis thaliana columbia
tgattcttcagctctctacgactcactatttggaaagctggcacgcctgcaggtaccggtccggaattcccgggtcgacccacgcgtgcgaatcaaactcatcggagtctctcgaattcgtctttgaagaggaagagaagagaagaggcgagggagatatggattgggacaacgtagcagctgaggatgtgattgaggcgcttagagaagttgaatggtcgacgcctcctcgttcgtttggcgagttcttctctagattcgcgttccctcgctctttctctaaatggaagagccgtctcaaatgcaatctctactactataggacgaattactttatcttggtgattttcgttctgggtcttgcgcttgttacgagacctctggctcttgtgggtgctgctctaacagctttaagtatagctttccttaacgacagttttgcagctagttttaatgagaagtttataagaacgattaggcatttctccccacacatggctgcaaaaatgagacctccccacatgcctgtcatccgtggaagatcgacagcaagaaagacagta

SEQ ID NO: 85573 - DNA, 510 bp, Arabidopsis thaliana columbia
  unsure (1)..(510): unsure at all n locations
tgcatacaacgcaccgtttttcgtaacacggtttcgcgaagtctatttcatttctcctcgatttttgacatgcttgagacaattgtgccacgagaagacgaagagaggatgttccttgagatggaggtctttgggagagaggcactgaatgtaattgcttgcnaaggttgggaaagagtggagaggcctgagacatacaagcagtggcacgtacgggctatgaggtcagggttggtgcaggttccatttgacccaagcattatgaagacatcgctgcataaggtccacacattctaccacaagggttttgtgatccgtccaagataaccgggtggctctttcaaggctgtgaaggggaaggacctgtcatgggtcttttcttttttggaaaccagagtcccaaggttttncccggaaatcccccttgggattttgangccccttttgttgtttttttccccggnaatttcccnggggnagtttccagtttnaggngngtttttncnaaaa

SEQ ID NO: 85574 - DNA, 442 bp, Arabidopsis thaliana columbia
cccacgcgtccgcggacgcgtgggctttctctctctttcgtttcccattttttctcttattactcatagatcctgattgatctgaaaaaatggtgaagaagcaatcgccattacacgttgtcggtgtgtctgttttgatggtgttgttatgcagtgttaattacagtctctgtgaaaagatcaaaacgtataagctcacaagaggaagcttaagtgttactttcactaactatggtgctgtcatgacctctcttctcctccctgacagacatggaaaacaagacgatgttgttcttggatttgatactgttgatggttacaagaatgatacaacatattttggagcaattgtgggaagagtggctaatagaataggaggtgctaaattcaagttaaatggtcatctctacaaaaccgatcccaacgaaggccgtaacactct

SEQ ID NO: 85575 - DNA, 686 bp, Arabidopsis thaliana columbia
ctacgatcgaccatcgccgagtctgcttcttcttctctctctctctctctagtggtcacactcacttcacacccgtgaaaaaaccctaggaaccaaatatggtgaacctctcgagatccgtcgcgttgatctctgtattcctccttcctttacttagcttctctttctccgtcgataatccgacggatcggcgtgttcttgttcttctcgatgatttatcactcaaatcctctcattctatcttcttcaacactctcaagtctcgtggattcgatctcgatttcaagttagctgaagattcgaagcttgcgcttcaacgatacggccagtacttgtacgatgggttgatcatcttcgccccatcaacagaacggtttggaggatccttggattcgaaatccattgctgattttgttgattccggtcgtgacttgatcttatcggcggatactgctgcatctgatttgattaggggtattgccacagagtgtggggttgatttcgatgaggattcttcagctatggttattgatcatactagcttctccgtctctgatgttgacggcgaccacaccttgattgctgccgacgatttagtgaaatccgatgtcattttgggaaaaaccaagattgaggctcccgtgctcttcagaggagttgcacattcgttgaaccctactaacaat

SEQ ID NO: 85576 - DNA, 507 bp, Arabidopsis thaliana columbia
  unsure (1)..(507): unsure at all n locations
cgagaatgatttagtgatcactccagggcctgcatacagtggttgtcaaacagatggtggacttacttttccactgaaccctcctggaataattaactcatataatgaggacccacacagcatagctgggggaagttcaggcttaggtcttttcaatgatgatgatgaatttgatacgcccctttggtcatttccttctgaaactccagaagcccctgggttccaactatttagatctgatgctgacgtttcaggaggtttagttggtttgcatcatcatagtccactaaactgttctcctgaaataaatggaggttatacccatggctcctgagacatcaatggcatctgttcctgtggttcctgggtctactggccgatctnaagcaaacgatggnctagttgacaanccccttgcattggtagggncggtcccncannttaaaaattttttgncaacaaaaccagatgttaantcagnngggtttnaaaccaantgntatttgc

SEQ ID NO: 85577 - DNA, 454 bp, Arabidopsis thaliana columbia
tcattacctaaaagaaggatttattacggtgacgccgcttggagctctatctcagactgatgtggattgccaaaactactacaaagaatggcttcccaagattacaaaccagtcatgctcctcctcatccctttgatgctccaacatgagagaaaataaaaactctattaggaaattacccattgtggaccacaatttgtggtagacctattattatatcagtaccagttctttagttttcttaagtcttgacttactattgttgtgagcagcaaaatagttgttgttacaagtccattaattatcgtgagcagcaaaatagatatcgagtccgcgacactatgttgaaatatcaaggattcttaacaaaaacaaaaaaaaaagggcggccgctctagaggatccaagcttacgtacgcgtggatgcgacgtcaaagtcttgtagagtgcacct

SEQ ID NO: 85578 - DNA, 430 bp, Arabidopsis thaliana columbia
cttcatcatcttcttctatatatacctctttaagcttgcttctctttgtctttatcggggccgatggttcaaacagagagccgatcaaaggatgggtcttaatctgaatttgtctatctactctttaccaaaacccttatctcaatttctcgatgaagtgtcgaggatcaaagacaatcattccaaactgtctgaaatcgatggttatgtcggaaaattagaggaagaaaggaacaaaatcgatgtttttaaacgagaactccctttatgcatgctcttattgaacgaagagattgtttttctctgtgtagcgattggggcgttgaaggatgaggctagaaaagggttatcactgatggcatctaatgggaaattcgatgatgttgaaagggcaaaaccggaaactgataagaagagctggatgagctct

SEQ ID NO: 85579 - DNA, 1550 bp, Arabidopsis thaliana columbia
  unsure (1)..(1550): unsure at all n locations
nnnnnnnnnnnnnnnnnnnnnnnnnnnnnnnnnnnnnnnnnnnnnnnnnnnnnnnnnnnnnnnnnnnnnnccacgcgtccgcttcttcagcatcttcatcatcttcttctatatatacctctttaagcttgcttctctttgtctttatcttccccgatggttcaaacagaaaccgatcaaaggatgggtcttaatctgaatttgtctatctactctttaccaaaacccttatctcaatttctcgatgaagtgtcgaggatcaaagacaatcattccaaactgtctgaaatcgatggttatgtcggaaaattagaggaagaaaggaacaaaatcgatgtttttaaacgagaactccctttatgcatgctcttattgaacgaagcgattggggcgttgaaggatgaggctagaaaagggttatcactgatggcatctaatgggaaattcgatgatgttgaaagggcaaaaccggaaactgataagaagagctggatgagctctgcccagttatggatctcgaaccctaattcccaattccgatcgacaaatgaagaagaagaagatcggtgtgtgagtcagaacccatttcagacatgtaattaccctaatcaaggaggggtatttatgccgatttaaccgtcccccacctcctccaccaccagctcctctgtctctcatgactccaacatcagagatgatgatggattatagcagaattgagcagagtcatcatcatcatcaattcaataaaccttcttcacagagtcatcacattcagaagaaagagcagagaaggagatggtcacaggaacttcaccgtaaatttgttgatgctcttcataggcttggagggccacaagttgctacaccaaagcagattagagatttgatgaaagttgatggtttaaccaatgatgaagtcaagagccatttacaaaaatatagaatgcatatccgtaagcatccgctgcatccgacaaagactttgtcatcgtcggatcagccaggtgtgttagagagagaatcgcagagcttaataagtttgtcgaggtcggattcgccacaaatcccacttgttgcaagagggttgttcagtagtaatgttggtcatagctcagaggaagatgaggaggaggaggatgaagaggaggagaagtctgatggacgtagtagctgtagaaatgatgaaacaaagaagaagagacaagtgttggatcttgagctttgaaagtctgcatagtgaatgatataatctttaccaacttatgttatatatgctcaaaactttgagtttgttcgggagtttttgtagatgtaaacatgagagttgaaataaggaagaggattttgagcaaaaagtagggtttgtttttgcaagaggaaatagatagagaagagtggttcgaaatcctctgtgttttttttttttttttttttacttcataagtaagataaactcatatatcaaagattttgtttttatactnnnnnnnnnnnnnnnnnnnnnnnnnnnnnnnnnnnnnnnnnnnnnnnnnnnnnnnnnnnnnnnn

SEQ ID NO: 85580 - DNA, 715 bp, Arabidopsis thaliana columbia
  unsure (1)..(715): unsure at all n locations
gttgcccaaccnttttgacccggggtccttttcccccgggnccagggngtcngttnccaataaaaaacccccgtccccgggncnccccntgggnccntttgttaaaacctnngcctaccctgnagnccccntacccngatcatttggccccnaacncaaaaccccaatttcagccccaaaactttgtcnaacaaatcaatggggtgaccggtggataaatggttgcaaggnccgaaggaggtctctcttgtccgttgagcctttctgcattgccacataagaagacccttaagaccaaaaaggggtaatttccaaagaagcataaattaagcttatgacattatctatatatgtgtatatggtagtcgagtatgtgtttttctcgaatatatatgcatattaacccaataattgttgttgaatcatggttttttctaccttatttttttcctctatatgtttttaccacttaatcccttgttggtttgtgggtaaaaagaaagatatttataaaaagaaaataaagaatcaagagtaggagagggaagaaagttgaggagtgaaaattagaagtataatttattgtttttaatgaggttttttcccttttaaaaaaaaaaaataaaaaaaaccaaacccgaagggcggccgctctagaggatccaagcttacgtacgcgtgcatgcgacgtcatagatcttgtagagtgcaccta

SEQ ID NO: 85581 - DNA, 919 bp, Arabidopsis thaliana columbia
ctgaatttccgggtcgacccacccgtccgagtggttcgacgaggaggaagaagaagaagaggaggagggaggatgaagaagaagaggcaccagacgagtttgcctacaagcccaatgggcttctctataagatggcacaaaagcccatttctataactgttcataggttggcccataaaccaattggtgtaccaaagagaaactctcgatggcctatggctgatgaattcgacaccaaatccgatctgtcgactccggtggttcactctctgccgccgaggccaagggtggctcagcttgctcgatcaacaaaaccaccgtccacggtggacgacaccgttggggccgcttgcttcaacacatgtgactactcttggaagtccactaacactgaatcatttggcccaaacacaaaaacccaatttcaagcccaaaactttgtcaacaaatcaatgggtgacggttggataaatggttgcaaggaccgaaggaggtctctcttgtccgttgagcctttctgcattgccacataagaagacccttaagaccaaaaaggggtaatttacaaagaagcataaattaagcttatgatattatctatatatgtgtatatgtagtcgagtatgtgttttactcgaatatatatgcatattaacccaataattgttgttgatcatggttttttctaccttatttttttcctctatatgttttaccacttaataccttgttggtttgtgggtaaaaagaaagataattataaaaagaaaataaagaatcaagagtaggagagggaagaaagttgaggagtgaaaattagaagtataatttattgtttttaatcaggttttttaccttgttggagtaagaaatatttaatgatgaatgttgtgtgttgtgcaaaagagatgaattatat

SEQ ID NO: 85582 - DNA, 452 bp, Arabidopsis thaliana columbia
  unsure (1)..(452): unsure at all n locations
ttgctttctgtcaaaccctaataatcctcgattgttttctttcaaattcatgtcgatgatggcgggtatacaaggccagattctcgaggtcactgttgttgggtgccagaaattgaaagacacggaatggttttcaagacaagatccatacgtcgtccttgagtatggtggcagaagtcaccgtaccagaacctgcacagatggtggaaagaacgctgttttccaagagaagtttatcttcactttgattgaagggcttagggatcttaaggttgctgtctggaatagcaacactctctccactgatgacttcattggcaatgcaacgattcaattgcagaaagttctttctcaggaatacggcggctgtacctgggctttgcagagtaaacctgggagatccgctggcgaagtaaactcctacttcatatggggncaatggaaccattatt

SEQ ID NO: 85583 - DNA, 897 bp, Arabidopsis thaliana columbia
acgactcactatttggaaagctggtacgcctgcaggtaccggtccggaattcccgggtcgacccacgcgtgcgcggacgcgtgggctgttttccaagagaagtttatcttcactttgattgaagggcttagggatcttaaggttgctgtctggaatagcaacactctctccactgatgacttcattggcaatgcaacgattcaattgcagaaagttctttctcaggaatacgacgactgtacctggactttgcagagtaaaactgggagattcgctggagaagtacaactcctactgcattatgcgggagcaaagaaacataattacgggtctgcgccatcagcaccgtatgcacctcacgtacctcaatactcagcaccgccttctgcatctccgtattcaacagcaccaccatactctggaccatctctatacccacaagtacaacaataccctcagccatcaggataccctccagcttcagggtatcctcctcagccatctgcctatccacctccctcaacctcgggctaccctccgatcccttcagcttacccacctcctccgccatcctcagcttaccctcctcaaccataccctccgcaaccatcatattacccacaaggtccatatccaggacaatacccacctcctccatactagagcgtttggcgtttagaatttgacgggaagtggtcatgatgtatagattatagttatggtgttttctagaatttggcagacgaatttctttgttttgttttttttatatcatcttccttgtgctattgctagcgtgatggttaatttttgagttggtcagtgaaacttattgagaaggttggatcttttcatgtttaaccagatcgcagatatattgaatattactctaatcct

SEQ ID NO: 85584 - DNA, 395 bp, Arabidopsis thaliana columbia
  unsure (1)..(395): unsure at all n locations
agcttcatgcttcatcaaatccggaaaatnattggacttgctgttgctatcatgaggaactatgctcctgaatcactgatcgaagcttctttcaagaaggatgtgagaataaatgtaccgatggcgccagaagttggattataccttcatgaatgcttcttcacgtcttacaacaaaaggtttaaaggcagtcatgaggaggtgtcaatggaagagtacaaggaagtagctgaagagttcaaatggaagtatggttattcaccatattggctctgctgaaggaaaagatggagctgtggcggtttggttgcattctctgnaccnnggaactatcctgnnctncggngcaattgntttnccancccggntgaaggcattttctttaagaaggnttt

SEQ ID NO: 85585 - DNA, 966 bp, Arabidopsis thaliana columbia
  unsure (1)..(966): unsure at all n locations
ctccgtcgacccacgcgtccggaagttgcagagcacacacacacactttcaagtttcaatacagagatggcgagcactgagccagagcgtgagaaccgtgaagatgaaaccgaagtcaacgaagatgaagacaccggagctcaggtagctccgatcgttaggcttgaagaggttgcagtcaccaccggcgaagaagatgaagacgccgtcctcgatctgaaatcgaagatgtatcgattcgataaagaagggaaccaatggaaggagagaggagctggaactgtgaagttattgaagcataaggaaactggaaaagttcgtcttgttatgagacaatctaaaaccctaaagatctgtgccaatcacctcatttcgtctgggatgagtgttcaggaacatagtgggaatgaaaagtcttgtttatggcacgctactgatttctccgacggcgagttgaaagatgagcttttctgcattcgatttgcttccattgagaattgcaaaacatttatggagaagttcactgaaatagctgaaagccagcaagtagggaaagagagcacccagggcgacgaggctgctggtttaatagagaatctttcggttgaggaaaatataagtgaggagaaagccaaggaagcagaagagaaagagcctgcaaaggaagataaagaaacaaaaaaggagaaggtagaagaagagaagaaaacagaggcaagcacttaagtgatcaaattaaaattggttgttggcatcactaagtgtgctttgctttattttaatatattatacttggcactgaacatgatggtagcttcaaaagtttgagtctttgcgctgtgttagagaaagagaatcttaagatttttttttatgttgttgctgtgtaagtgtttgactattgtgtcgtctctttactgtgtcaatttggtttaagatnnnnnnnnnnnnnnnnnnnnnnnnnnn

SEQ ID NO: 85586 - DNA, 382 bp, Arabidopsis thaliana columbia
  unsure (1)..(382): unsure at all n locations
atcatatcttgcctaaagttgatcacttcatgagaagctatcttgatcagtggaatgagcttgaggttattgatatccaagataagaccaaacatatggcatttttatcttcactgacgcaaatcgctgggaacttaggaaaaccatttgttgaagaattcaaaactgcattcttcaagcttgttgttgggactttatccgttccgattgatcttccgggcacaaattatcgttgcggaatccaagcaagaaataacattgataggttgctaagagagctgatgcaaagaacgtagagattctggtgaaaccattcacaagncatggttaaggttaccttgttgaagaaggnagggtaaccggatacccgttaaaaccgttg

SEQ ID NO: 85587 - DNA, 996 bp, Arabidopsis thaliana columbia
aacgatctgatgagtagcagttttgtcatctctctcactctctcccgacgatggctcgcttagtattttctttaaaccttccatctagtcatggattcaatctcagtcctcgaaatcttcaatctttcttcgttacccaaacaggagctccacgatttcgcgctgttcgttgcaaaccaaacccagaatcttccgaaaccaaacaggagaaattggtaatagataatggtgaaacttcatctgcatcgaaggaagtggaatcatcatcatctgttgctgactcttcttcttcttcttcttcgggattccctgaatctcccaataaggatatcaatagaagagttgcggctgttactgtaatcgcggctttgtcgttatttgtatcgacaaggctcgattttgggatttctttgaaggatttaaccgcttctgcgttgccttacgaggaggcgttatcgaatgggaagccgactgttgttgagttctatgcagattggtgtgaagtttgtcgagaactagctcctgatgtttataaaatcgagcagcaatacaaggccaaagttaactttgtgatgctaaatgtgggcaacacgaaatgggagcaagagttggatgagtttggtgttgagggtattcctcatttcgccttcctcgatagagaagggaacgaagaaggtaatgtggtcgggaggctcccaagacagtatttagttgaaaatgtgaatgcgcttgcagccgggaaacaatcaattccttatgcccgagccgtgggacagtactcaagctcagagtctcgtaaggtgcatcaggttactgatcccttaagccatggataaagagagtggcatcactatcatgcttctggcagatgatagaagttgtttctaactctatagtgcacaaaaaaagtagacaggaaaggaaagtcggaaagtagcaatgtttcaaattgatcaaaagaatcccattggaactataaaaattgatatcggtttg

SEQ ID NO: 85588 - DNA, 586 bp, Arabidopsis thaliana columbia
  unsure (1)..(586): unsure at all n locations
agctcctagcaatcagcctaatgaggtctatcttgtatgggatgatgaagcgatgtctatggaggaaagaagaatgtccttaccaaaatacaaagtgcccgatgaaaccagccagatgaactcgataaatgcagcgatagacagacgaatctcagagagtaggcttgctgggcggatggcgttttagaatttggcaccaaaccaaaccagcgtcaaagaaaaggcgatatggatgaaggctttgttacaacaacaagtcttcactcacttttgttcagatactgaatttatgatctgattttaagttattaactttccatctgttgtattctttagccaggtgagttagtttaccattacattgtttagggatctcagagatgttttttctcagaagtttagtcctttttttttttggtcgttggagacttggaggaagaactttgtctccttttcttctgaattgatcaaagtattatattatacagattcacccaaaaaaaaaaaaaaagnnnnnnnnnnnnnnnnnnnnnnnnnnnnnnnnnnnnnnnnnnnnnnnnnnnnnnnnnnnnnnnnnnnnnnnnnn

SEQ ID NO: 85589 - DNA, 504 bp, Arabidopsis thaliana columbia
gtgtgagttgacgacagaagggggagaaacgaagagttaaaaaaaaagagaagaaaagccaaaagcttcggtcgcgcaagatcgcttcatttgtttctagagtgattcatggattctttaaactactaataatggatttttgttgtgtcttaatgaaataatgggagcagctgaagcaagagcattgtggcaaagaacagctagtcgttgctttgttgttcatgaggatgctaagatggctccgaggttagcttgttgccaacaccaacaatcttcttcgggcaacaccgaaaaaaacagcttttcttccggaagttttggagattcctctgatttctcttgtgataccaaatggtggcttaagggatcaactggttttgatgaggaggttacaaactcctttcttgaagataccaaatgcaagaaattgcatgaatttgtcgacttaatcggaatacgagaagaagaagactacagctttattagcaagaaagctgacgctac

SEQ ID NO: 85590 - DNA, 595 bp, Arabidopsis thaliana columbia
  unsure (1)..(595): unsure at all n locations
cggacgcgtgggctcacttactttggcaacaaacaaacaacaacaaagagagaaattaacatggcgtcttttgcaaccatcgccgccgtacaaccttctgccgccgtgaaaggacttggaggtagctctcttgccggagctaaggctcttcatcaaaccttctcgccaaagcttcaaaaaccccaaatccaccagagctggtgctgtggtggctaagtatggagacaaaagtgtatactttgatttagaagatttgggtaacacaacaggacaatgggatgtgtatggttctgatgctccttctccttataacccacttcagagcaagtnctttgagncatttgctgctnctttcacaaagagaggttttcttctcaaattttttgattcttggagggnggctctttgcttacanatgttagtgcggacctttaccggggntgtcttcccgttaagggggggncncaaggggcncctaagtcggncntgggggaaagntttaaatnggnttctaaaactttaaaaaggcagaacttttcccaattttttgncccnttttggnntggncccggnngggaatcctttaagggggtnt

SEQ ID NO: 85591 - DNA, 641 bp, Arabidopsis thaliana columbia
  unsure (1)..(641): unsure at all n locations
gcttttttccttgcccggaaagcttaaaggcttttttcatccaaaacctttcttggcccaaaggcttccaaaaccccaaatccccccaaaagctgggttcttgtgtggcctaagtatggaagacaaaagtggatacttttatttagaaaatttggggaacacaacaggacaatgggatgtgtatggatctaatgctccttctccttataacccacttcagagcaagttctttgagacatttgctgctcctttcacaaagagaggtttgcttctcaaatttttgattcttggaggaggctctttgcttacatatgttagtgcgaactctaccggcgatgttcttccgattaagagaggtcctcaagagccacctaagctcggtcctcgcggcaagctttaaattagctttctaaaatctttcaaaaagtcagaaactttctccccaattctatgaaccctatttatgtatattgtactgtgttgtgttaattgctttgtaagctagtgattctgaaaatcagttatgatgaatcaatgaaattgccggccgagtctgctacancanannnnnnnnnnnnnnnnnnnnnnnnnnnnnnnnnnnnnnnnnnnnnnnnnnnnnnnnnnnnnnnnnnnnnnnnnnt

SEQ ID NO: 85592 - DNA, 859 bp, Arabidopsis thaliana columbia
  unsure (1)..(859): unsure at all n locations
cccaatggactggccgttggaggggcccgtggcaggattccgggcggaattcccgcgtccgccacaaagagagaaattaacatggcgtcttttgcaaccatcgccgccgtacaaccttctgccgccgtgaaaggacttggaggtagctctcttgccggagctaagctcttcatcaaaccttctcgccaaagcttcaaaaccaaatccaccagagctggtgctgtggtggctaagtatggagacaaaagtgtatactttgatttagaagatttgggtaacacaacaggacaatgggatgtgtatggatctgatgctccttctccttataacccacttcagagcaagttctttgagacatttgctgctcctttcacaaagagaggtttgcttctcaaatttttgattcttggaggaggctctttgcttacatatgttagtgcgaactctaccggcgatgttcttccgattaagagaggtcctcaagagccacctaagctcggtcctcgcggcaagctttaaattagctttctaaaaactttcaaaaaggcagaaacttttctccccaattctatgaaccctatttatgttcnagaaaccttcccggcgcgaaaaattgctttcccggtcatttattttcaaaagggggcggccccctttaaaggaacccaactttcctccccccgtgccttgccaacaaaaaaaaaccttttttaataggggggcccccctaaaaattcacaaattccccgtgggccgcggggttgtttaacaaacccctccgggggacctgggggaaaaaaacacccgggggggtttccccccccacacttaaaaatcggcccttggggaagaaaaaaaa

SEQ ID NO: 85593 - DNA, 911 bp, Arabidopsis thaliana columbia
gcgacaaaagaatagtgatcgaagctcatggcgtctcttgcatccgtcgccgctgtgaaaccatccgccgccatggaaggactcggcggcagctcactcgccggagctaagctctccatcaagccttcccgcctgagctttaaacccaaatccatccggtaactaaaacttttcatttattcattaattaggatcaaaatgccactataaccacactataaattcaaaatatattaatagatttttgctggctgaagtgtgttttaaacgatagatatagtgatgattaattagctttaaaaggattaaattctgataatttcatctcttgtttgtgattaaattagcttgaggttgttgtgttcatgtgtaatagggctaatggtgtggtggtctaagtatggagacaaaagtgtctactttgacttagaagatttgggtaacacaacaggtcaatgggacgtatacggctctgatgctccttctccttacaatcctcttcagagcaagttctttgagacattcgctgccccattcacaaagagaggattgctcctcaagttcttgatccttggaggaggctctttgcttacttatgtcagcgctacctctaccggagaagttcttcccatcaagagaggtcctcaggagccgcctaagctcggtcctcgcggcaagctctgatctatattcatgttacctttctggtcttccttttaaaactcatcaacatttttcaatactgcaaacccttttaagtaattttatgtatattatgtttatctgttacatttgagacgttttttcttcccctaaaaaaaaaaaaaaaaaaaaaaaaaaaaaagggcggccgctctagaggatccaagcttacgtacgcgtgcatgcgacgtacatagctggtggatagt

SEQ ID NO: 85594 - DNA, 687 bp, Arabidopsis thaliana columbia
gcaggtaccggtctcggattcccggctcgacccacgcgtccgcaaaattcccactcaccacacacaacaaaagaatagtgatcgaagctcatggcgtctcttgcaaccgtcgccgctgtgaaaccatccgccgccataaaaggactcggcggcagctcactcgccggagctaagctctccatcaagccttcccgcctgagctttaaacccaaatccatccgggctaatggtgtggtggctaagtatggagacaaaagtgtctactttgacttagaagatttgggtaacacaacaggtcaatgggacgtatacggctctgatgctccttctccttacaatcctcttcagagcaagttctttgagacattcgctgccccattcacaaagagaggattgctcctcaagttcttgatccttggaggaggctctttgcttacttatgtcagcgctacctctaccggcgaagttcttcccatcaagagaggtcctcaggagccgcctaagctcggtcctcgcggcaagctctgatctatattcatgttacctttctcttcttccttctaaaactcatcaacatttctcaatactgcaaacccttttaagtaattttatgtatattatgtttatctgttacatttgaaacgttttttcttcccctaattttacaaaaaaaagaaatcttttttt

SEQ ID NO: 85595 - DNA, 396 bp, Arabidopsis thaliana columbia
cgcagattgagctccagagagggagagagagagaaagggggcgctttagggtttctgcagttcctggttcagtctcaccattctatttaagggttttaatctctctgcttcatttggtgactaacatttatcgtcgagggttgtgacgatctccgagaatgtatagcggatctagcgatggtgagagtcatgatacatcgacgcagaggaagatcccaccggcgtcttcgatgctttgggttagaaatctacgacgatatattggttccggtgccggattaggatccgaagctctaatggagcttgagacgaagagaatcttgctcgagatttttaaagagaaacaacaaaaaagccaagtagcatgcacaataccgagtttctacaagaagaaac

SEQ ID NO: 85596 - DNA, 1075 bp, Arabidopsis thaliana columbia
  unsure (1)..(1075): unsure at all n locations
gcgttactgtgtgaaaaattcttcttcttcttcttctcagcgattgaatcgaaccaagagcgaaaatgagaaatttcagtgtcttcgagagattctctaaagcttttaaagatcatccttctctcaccaggattctcgtcgtctccacgatcagtggtggtggacttatagcgtattctgaggcaaacgcatcttatggagcaaatggtggtgctgttgttgaaactggaaccaagaagaagaaggtggtgctgctcggaactggatgggctggaactagtttcttgaagaatttgaacaattctcaatatgagggtcagattatatcgcctcggaactactttgctttcactcctttactacctagtgttacttgtggaactggtgaagctcgtagtgttgttgagccttttcgaaacattggatgtaagaatgttgatacttcttacttggaggcagaatgtttcaaaattgatccagctagcaagaacgtttactgccgatccaaacaaggccttagttcaaatggaaagaaagaattttctgttgactatgactaccttgtaatcgctactggagctcagtctaacacctttaacattcccggcgtggaggagaactgtcatttcctcaaagaggttgaagatgctcagagaatccgtagtactgtcattgattcatttgagaaggcaagtttaccnggnctaaacgaacaagagagaaagagaatgctacattttgtagttgttggtggtggaccnacaggtgttgagtttgcttctgagcttcatgattttnttaacgaggatctagtcaaactatatcctaaagccaaaaacttagtgcagatcactcttctagaggctncagaccacatcttgacccntgtttgncaagaggatcnncagagttttctnaaggnaaatttnnctagagntggtatttatgtgaaattagggtctatngggggcaaagtgaatgctaagggaatttcttcaaaaccccagcnngggngggctaacntttncctnntgggttaatttttggcacctgnatttgggccnncccnngccaa

SEQ ID NO: 85597 - DNA, 1433 bp, Arabidopsis thaliana columbia
  unsure (1)..(1433): unsure at all n locations
nnnnnnnnnnnnnnnnnnnnnnnnnnnnnnnnnnnggtcgacccacgcgtccgctatctctctctctgctcagactctctggtgttgaagactaacactgaagcagatctattatacggaggacgaagaagatgtatgagcagcagcaacatttcatggatttgcaaagcgattctgggtttggggacgatagctcctggctcgccggcgatgacgatcttcgtctctctcctcaccaatctgccgccggtacgaactccggcaatgagaatctagatcgtcgtctcttaaaagatctcgtcgagatggttccccttatcgagcattacatggaacataaagaaaggagttcgtttaagcggcgtggttccatgatctacactaagatgccttcaaaagaatccttgtccgaaggggaagaaatgcttctcaaacagtcccaggaagaaagaagagagaccaagagggaaatgacgatgttatgaacaattctagggaagatgatgaaaacgcaaaggctttggctggtgcagaaaaggaagaaatgagtagactaagagagcaagtgaatgacttgcagacaaaattatcggagaaagaagaggttttaaagtcaatggagatgtcaaagaatcaggtaaacgagatacaagaaaagcttgaagcaacaaatcgattggttgctgagaaggatatgttgatcaagtctatgcagttacaattatcggacacaaagatcaaacttgctgacaagcaagcagcccttgagaagactcaatgggaagcaaagacaacaggaacaagagcaatcaagcttcaagaacagctagatgctgttgaaggagacatctctacattcacacgggtgttcgaaactttggcaaaaactgattccaagaaacccgatagggattatgatgcagtcccatatgaatttgatcatcttccatatttagacgatgtagatgaaactgacctgaggaaaatggaagaagcaagattagcttatgtagcagcagtgaataccgcaaaggaacgagaagatgaagaatctctggtcatggctgctcaagctcgagcttacctgcaatcactagcctttacatattaatcatcttcaggtacttacttctttataggatatttctctccttgggttgttttaggagtatgtagatttgtaccatgaagaaattggagaagaaaagcttatgtgagaaacataaagttatggttttcccctaaaccaatgaacgcaactctgagtttttgtttcttcatttgagcatgtatgtatctatatgatcttctacattattgggaacataaaatcagattgtataaaaaaaaaaaaaaatagtttactttaaaaaaaaaaaaaaaaagcgcggccgctctagaggatccaagcttacgtacgcgggcatgcgacg

SEQ ID NO: 85598 - DNA, 599 bp, Arabidopsis thaliana columbia
acattaagaaaatagttgaggagacaagggctcgaataaagattctcgatggtcctccaggcacaacagaaagagctgttatggtttctggtaaagaagagcccgaatcatctctacgaccttctatggatggccttcttagagtccacatgcggatagttgatggtttggatggtgaagcttctcaagcccctccgccttcaaaggtgtcaacaagattactagtcccagcatctcaggctggaagtttgattggaaaacagggaggaacagttaaagctattcaagaagcatccgcttgtatagtcagagttcttggatcagaggatttacctgtttttgctcttcaagacgatagggttgttgaagttgtggcggaaccaacaagtgttcatagagccttggagctgattgcgtcacatctcagaaagttcttggttgatcgtagcatcatcccattctttgaaaatcagatgcaaaagccaactcgccaaatggaccatatgccaccaccacaccagtcatggggtcctcctcaaggtcatgccccaagtgttggtggaggaggctatggtcacaacccacctccatatatgcaa

SEQ ID NO: 85599 - DNA, 2805 bp, Arabidopsis thaliana columbia
gtttttcaaaaccccgtcaggctcatcttcttctagcaccttcttcttcccttaaagtattcaactttatctgaatttgaccattttctcttcatttctccgactaatttcccttcatttcgatctttaagcatctgggtatctccctttctccatctattcatcggaatttgcgcttagattttgaatagaattcggcacgagcggcacgagaggagattgaaaatggggaaatctggaggaaggaagaagaagagtggtggttcgaattcgaattcgagtcaagtcaattcatctgaaacttcaggattatccaaaccgtcaacgattgttaatggtggtgttgatttcgatgcttcgatattcttgaaacgtgcacatgagcttaaggaagaaggtaataaaaagtttcaagcaagagattacgttggtgctcttgaacaatacgagaatggtattaagcttattcctaagagtcatccagatagagctgtgtttcatagcaatagagctgcttgtttgatcgagatgaaaccaattgattatgaatctgtgatttctgaatgttcaatggctcttaaatctcagcctggttttactcgtgctttgcttagaagagctagagcttttgaagctgttggcaagtttgatttagctgttcaggatgttaatgttttgttgggttctgatcctaatcataaggatgctggtgagattttcgaagcggttaaaaactgcttgggtcctcaccaagatttgcagagccgtcctttcacctgcagctcttggtgcttcggctgctttaggcggtcctattgctggacttggtcttgtttgccttctcgtaatgttcataaaaagggagttacttcgcctgttgggtctgtttcgttgcctaatctagtaatggaaggtttgagaggccgacaggtggtgaatcctgtgactgaaaatggtggttcggtgagtaagggacaggcgtcgagagttgtgttgaagccggttagtcattcgccaaaagggtcgaaggttgaggagttgggttcttcttctgtggcggttgttgggaaggttcaagagaagaggattcggtggaggccgttgaagtttgtttatgaccatgacataaggttgggtcagatgcctgtgaactgtaggtttaaggaattgagagagattgtgagcagtcgtttcccgtcttcaaaggcggttttgattaagtacaaggacaatgacggagatttggtgactataacttctactgcagagctgaaattggcggaatctgctgctgattgtattttgacgaaagagcctgatactgataagtctgattctgttgggatgttgagattgcatgttgttgatgtgagtcctgagcaagagccgatgttggtctcgaggaagaagaggaggaagatggaagagaagcctgttatagaagaagtcatatcatctcctacagaatcactatcggaaacagagatcaacactgagaagacagataaggaagttgaaaaggagaaagcaagttcttctgaagatcctgagaccaaggaattggagatggacgactggttgtttgattttgctcatctgttccgtactcatgtcggtattgaccctgatgctcatattgatttacatgagttgggaatggagctttgctcagaggcgcttgaagaaactgtgacaagcgagaaagctcaaccactattcgataaagcttctgcgaaattccaagaagtcgctgctttagctttctttaactggggaaatgttcacatgtgtgccgctagaaagaggattcctttagacgaatctgcgggaaaagaagtggttgctgcacaacttcaaaccgcttacgagtgggtgaaagagagatacacattggcaaaggagaaatatgaacaggctctctcgatcaaaccagatttttacgaaggtttgcttgcgttaggacagcagcaatttgaaatggcgaagctacactggtcttacttgctagctcagaagatcgatatctcaggttgggatccgtcggaaaccctaaatctctttgacagtgcagaggcgaagatgaaagatgctacagagatgtgggagaagcttgaagagcagaggatggatgatttaaaaaacccgaactcgaacaagaaagaggaagtttcaaagaggagaaagaagcaaggaggagatgggaatgaagaggtttcagagacaatcacagctgaggaagcagcagaacaagcgactgcaatgagatcacagatccatctgttttggggaaacatgctgttcgaaagatcgcaagttgaatgcaaaatcgggaaggatggttggaataagaatcttgattcagctgttgaaagattcaaacttgcaggtgcttctgaagctgacatagcaacagttgtcaagaaccattgttccaatgaagccgctgctaccgaagagatgagaaaaaggtacctgcgccttgaaaccctttatccgaacaagaattacgatatcaaaagctatgaaacaaaaaccgattctcgcttaatgaatggttgtgtgactggaaaataaccctgaagatgtagactactgaatcttgcttgatttgatgattctcagatgttttttttaagtttatcttcttcacctcaaaggtgataaattttccagggcatttgttagataaatttgtaaactctgtttaagtttcaaccttttaagtaaaaaaaaaaaaaaaacattagtgattgattcttctgaacttccttcttcttctttaatgataaaaaaaactttagcttc

SEQ ID NO: 85600 - DNA, 452 bp, Arabidopsis thaliana columbia
atcactttctctcttcctttacagagaaagcagagagagagacaaagggaaagctaaatccgtgacccggatccgaaataatcgggttttcaaaatctaattcctcttatcttctctcttcttcttcttcctgggttcttcccaaaattcaatttcattaaaagggcactgccctttatcatgcctaaaattctcaggatctaaataaaagtatagaacaatgggtggatgtgtgtcaacccattcaaaagcgattaggcctaggaggaaaggccgtcgtagatcttccaaacacttttctaaagtgtctgatattgttcctcatgctaatattagaaggcctagtgacgttgggagccgagtttcttttgctatctcgcaagatgatgcatggtttgactctgtcagtgttcttgattcggatgaggatgaggactttatcagcttacctg

SEQ ID NO: 85601 - DNA, 577 bp, Arabidopsis thaliana columbia
  unsure (1)..(577): unsure at all n locations
ccctcgttttcgacgtatacaaagcttgattcaaatcgggccgcccgaatatcgggtgtatcaaaatctaattcctcttatcttctctcttcctctcctccctgggttctttcccaaaattcaacttccattaaaaggccactgccctttatcatgcctaaaattcctcaggatctaaataaaagtatagaacaatgggtggatgtgtgtcaacccattcaaaagcgattaggcctaggaggaaaggccgtcgtagatcttccaaacacttttctaaagtgtctgatattgttcctcatgctaatattaggaaggcctagtgacgttgggagccgagtttcttttgctatctcgcaagatgatgcatggtttgactctgtcagtgttcttgattcggatgaggatgaggactttatcagcttacctgaagaaaacgtaccatcaacgccatcagcgggtggtgcgactggtaacaatataccaaatggtcaagtagttcagtttgaatcttcttcgtgcttcgtggatgggtaaggaaagtacgaagaatccttgggcttcttcagnagcgggggga

SEQ ID NO: 85602 - DNA, 519 bp, Arabidopsis thaliana columbia
aagaagcggaaacagagaaaaagagagaaaaatgctgagtagatcagttgcttctgctgttacaccggtctcatcttcttctctcttaccaaactcaaagcctatcttctgtctgaaaaccctctccggttatcgttcttcttctttctgtggcggctgtattcgtaaaatcaaccataagcctcttcgaatgacgagttccaatattacaccaagagctatggccacacaacagcttgagaacgctgatcagctcattgattctgtcgaaacttttatcttcgattgtgatggtgtgatttggaagggagataaattgatagagggagttcctgaaactcttgatatgcttcgtgccaagggaaagagattggtttttgtgacaaacaactcaacaaaatctaggaaacagtatggaaaaaagttcgagactcttggcctgaatgttaacgaggaggagatatttgctttcatcttttgctggttctgcatacttgcctattattaatttcccaaaag

SEQ ID NO: 85603 - DNA, 542 bp, Arabidopsis thaliana columbia
  unsure (1)..(542): unsure at all n locations
cagctctactacgactcactatttggaaagctggtccgcctgcaggtaccggtccggaattcccgggtcgacccacgcgtgcgccacgcgtccgcggaaacagagaaaaagagagaaaaatgctgagtagatcagttgcttctgctgttacaccggtctcatcttcttctctcttaccaaactcaaagcctatcttctgtctgaaaaccctctccggttatcgttcttcttctttctgtggcggctgtattcgtagaatcaaccataagcctcttcgaatgacgagttccaatattacaccaagagctatggccacacaacagcttgagaacgctgatcagctcattgattctgtcgaaactcttgatatgcttcgtgccaagggaaagagattggtttttgtgacaaacaactcaacanaatctagganacagtatggaaanaagttcgagactcttggcctgaatgttaacgaggaggagatattngcttcatcttttgctgctgctgcatacttgcagtctattaaatttccaaaagat

SEQ ID NO: 85604 - DNA, 655 bp, Arabidopsis thaliana columbia
  unsure (1)..(655): unsure at all n locations
gcggtccgaacctcaatctccaaggatttgaagtcatagacaacgccaaaacgcagctcgaagccgcgtgtcctggagttgtctcttgtgctgatattttagcattagccgctcgtgacacagtcattctcactcaaggaacaggctggcaagtaccaacgggacgtagagatggtagagtttctttggcttcgaatgctaacaatctccctggtccccgtgactccgttgccgttcaacaacagaaattctccgccttgggactcaatactcgtgatctcgtcgtcctcgtcggaggacacacgatcggaacagcaggatgtggtgtattcaggaacaggctattcaataccaccggacaaaccgcagatccaaccatcgacccaacatttttggcgcagtttcaaacacaatgttcccaaaacggcgacggttcagtgcgcgtggttcttgacaacggagcgggaagcactttgggacacttttttacttcaacaaacctaaggccgtgggggtggagttttcccaaatccggttcaagtcccttttggccngttccagncaattnnggcccnttggggaaaatttttnggnccctnngaagctcctttaaaggttttttttnngnggtaaatggnaaaanntaaatttnggg

SEQ ID NO: 85605 - DNA, 513 bp, Arabidopsis thaliana columbia
cacacacttcatcttctctaaaaccctaaaatttaaacacaagatgggtttggttagatcattgtgcttattaataaccttccttaattgtctcatcatctcggttcatggccaagccaccgcaaggcctggtcctgtttccggcactaggattgggttttacttaactacgtgtcctagagctgagactattgtccgaaacgccgtgaatgctggtttcagttctgaccccagaatcgcacccggaatactgagaatgcatttccacgactgttttgtccaaggttgtgacgggttcgatccttatatccgggagctaacaaccgagagaaccgccggtccgaacctcaatctccaagggatttgaagtcatagacaacgccaaaacgcagctcgaagccgcgtgtcctggagttgtctcttgtgctgatattttagcattagccgctcgtgacacagtcattctcgtaaaccttaattatttcataaacgttatacgtaattaatgcatta

SEQ ID NO: 85606 - DNA, 510 bp, Arabidopsis thaliana columbia
  unsure (1)..(510): unsure at all n locations
ctctgtactgctcgtntgcgtttaaccaagactctcccatcatttccccgagataagtctctctcaagccgcagaaatgggagtaattgtccatcataaagatgcaagaaagagcggtttctttgttggaacttgaccatgcgtccaagttcaaagcaatctctctcagtatgttgtagatgtnacctgtgagaagctcttcttgatactttgcgttcttccatcccaaatcaatttcgaggaccttcgacaagattggcttgttgttgttccccagtagcttgttgcagtactcagtcacaacgcttacaagctttgggacacctccatcaagaggtgggcaatttggtctctgtagctctacctgacaaggtaactcccagaagatctcggcgacacccttaccgngattcctgattagntcccgtgtaactttgcggattctttttgacatttgttccccccggaaatagccgnttaacctntctccgaaagtgnccctttttgggg

SEQ ID NO: 85607 - DNA, 851 bp, Arabidopsis thaliana columbia
  unsure (1)..(851): unsure at all n locations
cctcctcgaacaaaaacaacaaacgcagagaaactcaaaactcgaaaacgtttcatatagcaacgatgctttcttcatctccaacttcctttactcatccatttctctcttcttctccgcctctatctccgatatctccgccgtctcgcacggctcggatctctccacctctcgtctccgcctcttgctcatacacctacacggaagattcgccgagactgcatcagatcccgcggcgattgacgacggtgccagcttcgctttacgatgttcttgaggttcctttaggcgcgacgagtcaggatatcaaatcggcttaccggagattagccaggntctgccaatccagacgtggcgggaactgatcggacttcttcttcatcggcggatgaattcatgaagatccatgccgcttactgtacgctttctgatcctgagaaacgctccgtttatgatcggaggatgttgcgacggagccgtcctttgaccgtcggaacctccgggttgggaagctacgtcggacggaactgggaaaccgatcagtgttggtagtgagttaactcggtgaccgagttagtagaacgagttaattagtgtaaatacgaagccataaaatccttgtaatttaatcatagtaagctaacatggacgggaactagtgtgctaacatacgccatgtgcttaccgtacgctccctcccccacgagcgatcggtgccgtttgtatccgtgtttacgtaggatctacgcgttttttttaccttgtgaatcctattagtttaaataatcaatgaaaatcatataaaaagatattttcttttggtttaaaaaaannatnnanttnantannag

SEQ ID NO: 85608 - DNA, 717 bp, Arabidopsis thaliana columbia
  unsure (1)..(717): unsure at all n locations
tcaatacgactcactttagggagggctggtgcgcctgcaggtgccgggccggaattcccgggtcgagccacgcggtgcgctcgaacaaaaacaacaaacgcagagaaactcaaaactcgaaaacgtttcatatagcaacgatgctttcttcatctccaacttcctttactcatccatttctctcttcttctccgcctctatctccgatatctccgccgtctcgcacggctcggatctctccacctctcgtctccgcctcttgctcatacacctacacggaagattcgccgagactgcatcagatcccgcggcgattgacgacggtgccagcttcgctttacgatgttcttgaggttcctttaggcgcgacgagtcaggatatcaaatcggcttaccggagattagccaggatctgccatccagacgtggcgggaactgatcggacttcttcttcatcggcggatgaattcatgaagatccatgccgcttactgtacgctttctgatcctgagaaacgctccgtttatgatcggaggatgttgcgacggagcccgtcctttgaccgtcggaacctccgggttgggaaggtacgtcggacggaactnggaaaccgatcagtgttgtagtnagtaactcggtaccnagtaagagaccggtaattagtgaaaaacgagcataaatcctgaattaanangnagaacatgncgggacnatnta

SEQ ID NO: 85609 - DNA, 577 bp, Arabidopsis thaliana columbia
taggtgccactatagaagagtctatgacgtcgcatgcacgcgtacgtaagctcggaattcggctcgagcaagtttagagattttttgaaagaacaaacagatatcgaattcgagttttgcaaaaatggtatcggtggaggaacctttatctcattccaattccactcgctttccgttaacaaccgatttctacggttcatcatcgccgtcggcggcgaggttacaccgtcaagctggccggtcgatgagaacagtgagatctaacttctatcaaagcggagatcaatcttgctcattcgtcggctcaatcggcgataaatcagagtatgcgtcggagtttctctcggattccgtcatcgacatgagactcggcgagcttgctttgaaaaacagtaattctctcaattcaaacgcttcctcaatgaaagaggaagcgtttctcgacatttctcaggcgtttagtgatttttccgcttgtagtagtgatatctccggcgagttacagcgtcttgcttgcttgccgtcgccggaggctgatagaaatgagagcggcggagataacgaagcggagcatgat

SEQ ID NO: 85610 - DNA, 629 bp, Arabidopsis thaliana columbia
  unsure (1)..(629): unsure at all n locations
ccaggcanancccaatctnctctctcgaagctgtctaaaattaatcaatcaatcattgagctaatcatattctaggttttntttttaaggatttgtgtagactttcattgctgctacgtttttnaaagggtaatttgaagggcttagcttcccaaaggcactaggtggcaatcttatccaagatgaacagtcaaaatcctgatgatcattagggcccaacggttgtgggatttgaagtccctgtatcaccggtttcaagttacaacaatgtgtattcctcaaccgaagatgagacaagagatcctccagcagtaccgccacaccttcaacactctctattaggcaatcagggtagcatggaactggcttatgcgccncagaatgttgtcctgaaccacctctntatcgggaaccgagacgccccaagatctgttgtagcactcggtttctcgcatcggttcagggctaagtttgtcnctgtggtgatatacaagcctgtccaaagaagagggngcnccaatgtttgaataatgatacctctttttaagtagtgttgggaatttgcttctttatggattgaatttggtatacaaaaccatntggtccgtactgaattttattcttctctt

SEQ ID NO: 85611 - DNA, 551 bp, Arabidopsis thaliana columbia
ctcaaaaaaatctaacattactctctcaacacatctctctttcttctccatttccttcttctcgttcattctcttatttaagatttaaatctgctcaaatgcttgtaaacaaatttcaagttctttaaacgatttccttttcaagaaaaatccttctccttcttctttttaccacatagatcttcttgatctacaatggattctgtttctctttctgaggttactgtcattaaaggaacaacacatttgggttttatgcacagtttcagacagccattttgtggtgtcaaaatatctccaaagttctatttatccaaagttgatggaccaaaggcaatatcttcgagcagcaacacaaagagtcaatttgtttatggaggaggaagcatagctgcaacttcagattcaggttataagatgaatggagtaaacctaaaaagcagaacattgatgacttctgcagttaaagaaagatcattacttgatgcttatgatgatgagtatggtggagtaatagtagatcatggagaattaccatcaaacccttatgc

SEQ ID NO: 85612 - DNA, 485 bp, Arabidopsis thaliana columbia
aaactcagcttcaaaacctatacaccaaactctactttcaaggactacgccaaaaagggcgtcgcttttgctaaatacaacgtttcatcaaccaccgcgaacaccatctgtcacatggacacgtcatcatggggtccgagtcatggagctttcttagctctcgggtcaaaaccgggtcggatcgaagtttgtcactggatatttgagaacgacatgaactgggctatcgctgattagaccggtggttatggacttatcaaatagtatgattattactatcttatcgccgagttttaattacatagaggaatgttaattttctattatcattactataatattttgaagttttttcagtaacatgtaaagaatgcctgttactgatttgtggtggtgcccaataatttttatgaagattttagtgaaaaaaaaaaaaaaaaaaaaaagggcggccgctctagaggatccaagcttacgtacgcggc

SEQ ID NO: 85613 - DNA, 2138 bp, Arabidopsis thaliana columbia
aaacaagcccaccaatctcttcttctctgctcttctctctctgtagacactagaagaagaacaaaaatgctcaaacagtttcttcttctccaatccttctccttcttcctcttcaatgtagttatcgtcggaggaagaacattcggcggcggtttctcagcggaggagaatccatttactccaaaagcatctctagttcgttactggaacaaagagattcgtggccaatctcccagatcggagtttttaatctcaaaagcttcaccactcaacgccgtagactcagcaactttctcaaaactcgccgccgcgaactcgctgccgactcgttttcccgatttctgctccgccgcgaatctcttctgttttcctgatttaggagcgagtctcgagaaacacgacgacgacgttaaattctccgtttatgaccagaagaacttcactaactacggcaatgctcgtgccggaggagcagattcgttcaaaaactactcgaaagacggtaatgtcgtaaccgattcgttccggagatacagccgtaacgcggcgggtcacgacgataaattcactgtctacggtgaaaacagtaacgtggtagaggaaggattcaattcatacggaacattcggaaccggcggcgccggagatttcactaactaccaaaacaacgtgaacaatccaacgagtcgattcacggcgtattccgacggaggtaacggtcgatctcaaacattcaaaacctacacacacgaagctaacgccggtaacggtcaatcattcacaagctacgccaaaaacggaaacggagttcctaacgagttcacttcttacggcgtctcctccaatgtaatcggctccggtttctctaactacggcgagagtggaaacgcggcgaacgataccttcacaagctacggaagcgacggtaatgtacctcagaacaattttaataactacggtgcttccggtaacgccgccgtggataccttcgcgaattacagagacaaggccaacgtcggagacgattcgttctcatcctatgcgaaagattcgaattcggagaaggttaatttcgtaaattacggtcaatctttcaatcccggttcagaaactttcaccggttatggcaaaggagctgaaggaagcaaactcagcttcaaaacctatacaccaaactctactttcaaggactacgccaaaaagggcgtcgcttttgctaaatacaacgtttcaacaaccaccgcgaacaccgtcggcgatggcaaaaccgtaaataaatggatcgaaccgggtaaattctttagagaatcgtcgcttaaagaaggtacagtgattcctatgcctgatattaaagataaaatgcctaaaaggtcgtttttaccccggagtataattacgaaactacccttctctacttctaaactcggtgagattaagagaatcttccacgccgttgagaattcgacgatgggaggtataatcaccgacgcagtgacggagtgcgagaggccaccgagcgtcggagagacgaaacggtgcgtaggatcagcggaggatatgatcgatttcgcgacgtcggtgttaggtcgtagcgtggtgcttagaacaacggagaacgtagccgggtcaaaggaaaaggtagtgatcgggaaagtcaacggaatcaacggtgggaaattaacgaaagctgtgtcgtgtcatcagagtttgtacccgtatctattgtattactgccactccgtaccaaaggttcgggtatacgaagctgatcttctagagttgaatagtaagaagaagattaaccacgggattgccatctgtcacatggacacgtcatcatggggtccgagtcatggagctttcttagctctcgggtcaaaaccgggtcggatcgaagtttgtcactggatatttgagaacgacatgaactgggctatcgctgattagaccggtggttatggacttatcaaatagtatgattattactatcttatcgccgagttttaattacatagaggaatgttaattttctattatcattactataatattttgaagttttttcagtaacatgtaaagaatgcttgttactgatttggggtggtgcaaaataatttttatgaaaaaaaaaaaaaaaa

SEQ ID NO: 85614 - DNA, 529 bp, Arabidopsis thaliana columbia
  unsure (1)..(529): unsure at all n locations
ccccaaaccccccggggnnntnnttcccaaaagggggnccggatttgaaggggtttaagtccgaccccgccggcccattcccggggggggtttgttccccttaaaggggggcgcccttttttgctccggctccccgagaatccgccaagggaatggggttcaaatcctttggcccctttcggtcgtttgaaggaaccaagttgccccggatgttgacggttaaaagagagagggagatcaaagaagggataaagaaaaggttgtcgaggaaacttgacagacaatggaagaaaagcatagtaccaagaccacctccgtctctgaagaaacttcaagaagaagaagctgcagaagaaacagctgaagctgctaaatctgcttgaaaaaacccgctattgatttatggtctcttccttgttgtttcctcgagatgttgttaatctctgttatttgttgctgaaccatcttgtatttgtttttcttttggtgtaaacactttccttatcaagtagtttacatgaatccctta

SEQ ID NO: 85615 - DNA, 571 bp, Arabidopsis thaliana columbia
  unsure (1)..(571): unsure at all n locations
cgctcganagtgagaactctactcttcttcttcttcctccgccatagctacaatgcttagtctctcaatcgctacgccggggacgngggcgattttccgtagaggaactgcttcggcgacttcaacttcgtcttcattccatggtgtcagaatccagcaccaggtttctgctcgcgtccccgcggcggcgacgatatcgtcgtcgtctcctaaaccgtcggtggtgatgatgtcgaaaagagaggcggaattgaaagagataagatcgaagacgacggagcaagttacaagaggaggttgttgaccttaaaggtgagctctttatgcttcgtctccagaaaatcggcaaggaatgagttcaaatctagcgactttcgtcgtatgaagaaacaaggttgctcggatgttgaccggtaaaagagagaggggggtcaaagaaggggtaacgaaacggttgtcgaggaaccttgcagccattggngaaagcttcgtcccagcccccctccgttttgaagaacttcagagaaaantccgaaaanactgaccntaacctntnaaaaccncatttttt

SEQ ID NO: 85616 - DNA, 648 bp, Arabidopsis thaliana columbia
  unsure (1)..(648): unsure at all n locations
gagaagtgagaactctgctcttcttcttcttcctccgccatagctacaatgcttagtctctcaatcgctacgccggggacggggccgatttttcgtagaggaactgcttcggcgacttcaacttcgtcttcattccatggtgtcagaatccagcaccaggtttctgctcgcgtccccgcggcggcgacgatatcgtcgtcgtctcctaaaccgtcggtggtgatgatgtcgaaaagagaggcggaattgaaagagataagatcgaagacgacggagcagttacaagaggaggttgttgaccttaaaggtgagctcttttatgcttcgtctcccggaaatccggcaaggaattgagttccaaatctaagcgacctttccgtcggtacttgaaggaaacaaggttgctccggatgtttgaccgggtaaaagaggacantgggcgttcaaaggaaggggggttaaagaaaagggttntccaggaaacttggcagcaatgggagaaaagctttgnccaagaccanctccggntctgaagaactncagaagaaaanctccnaaaacaccttaacnggaaacttnttaaaacccgattnttttggcccccctgtgtccccnaaangggaanccnggaattntgggnnaccttgt

SEQ ID NO: 85617 - DNA, 902 bp, Arabidopsis thaliana columbia
  unsure (1)..(902): unsure at all n locations
nnnnnnnnnnnnnnnnnnnnnnnnnnnnnnnnnnnnnnnnnnnnnnnnnnnnnnnnnnnnnnnnnnnnnnncaaaccacgccgagagtgagaactctgctcttcttcttcttcctccgccatagctacaatgcttagtctctcaatcgctacgccggggacggcggcgatttttcgtagaggaactgcttcggcgacttcaacttcgtcttcattccatggtgtcagaatccagcaccaggtttctgctcgcgtccccgcggcggcgacgatatcgtcgtcgtctcctaaaccgtcggtggtgatgatgtcgaaaagagaggcggaattgaaagagataagatcgaagacgacggagcagttacaagaggaggttgttgaccttaaaggtgagctctttatgcttcgtctccagaaatcggcaaggaatgagttcaaatctagcgactttcgtcgtatgaagaaacaagttgctcggatgttgacggttaaaagagagagggagatcaaagaagggataaagaaaaggttgtcgaggaaacttgacagacaatggaagaaaagcatagtaccaagaccacctccgtctctgaagaaacttcaagaagaagaagctgcagaagaagcagctgaagctgctaaatctgcttgaaaaaacccgctattgatttatggtctcttccttgttgtttcctcgagatgttgttaatctctgttatttgttgctgaaccatcttgtatttgtttttcttttggtgtaaacactttccttatcaagtagtttacatgaatcccttnnnnnnnnnnnnnnnnnnnnnnnnnnnnnnnnnnnnnnnnnnnnnnnnnnnnnnnnnnnnnnnnnnnnnnnnnnnnnnnnnnnnnnnnnnnnnnnnnnnnnnnnnn

SEQ ID NO: 85618 - DNA, 755 bp, Arabidopsis thaliana columbia
  unsure (1)..(755): unsure at all n locations
attttngttcaggtgtttatnaatggtggaagagaagaagactcaattcagggagagtttatncctgtgggatcagatgggaagattgtcctttcgttcagtcttttaaatnccaatccacgtgattgggtctacgattggaactttcagaggatagatgaggcattgttggctccggtgactaaggccttagcacctatagctaatataactnttgaaagtcaggttttgtatcatacaccgaagtcttcgttttcatcttgggataaaaaacttcagagctacatctttaggaccagtgatcttccgctttttggtgaattcggacgaatggcacttgggtacttctcctggggccagtggacgggcccaaatactgcaatttgtgggatatattccatccggaaaagaatgcccccttcttttgcagttcccaaatggggagatatctaaaacaaatggcttcatatctccgatgtggggtggtgtgattgtntggaacccgggaaattgtgacaaggactctgaaagcccaagtaggnacacgatatcgcttcaggatctcgggcaaataggtcggaaattttctttgggncaaattccggcaactatttggctttaagtcttaagccaaatataccccctgggatttgggcactttcnaaggttttaacctagntgaaagngggntttacaagggtggggattttggntntcttttcnnngggngccanatttnntaaaatcccnntctt

SEQ ID NO: 85619 - DNA, 1896 bp, Arabidopsis thaliana columbia
cacgcacacggcatctacggcagctggatcggtggttgctaacgcgagtttgtaccagtacgcgcgcggaacagctactgggatggcgtcaaaggcgagaatcgccgcttacaaaatctgttggaccggcggatgttacgattccgatatcctcgccgccatggatcaggcggttgccgacggtgttcacgttatctctctctccgtcggagccagcggttccgccccggagtatcacacggactctatagcgatcggagcatttggagccacgcggcacggcatcgtcgtttcttgctccgctgggaattctggtcctaatcctgaaaccgcgacgaacatcgctccatggatcttaaccgttggtgcgtccaccgtcgatagagaattcgccgcaaacgcaatcacgggagacgggaaagtcttcacgggaacatcactgtacgcaggcgaatctctaccggattctcaactttctctggtatattccggcgattgcggaagcagattgtgttaccctgggaaattgaattcatcattggttgaaggcaaaatcgtgctctgtgacagaggaggcaacgcaagagtttagaaaggaagtgcagtcaagctagccggtggtgctggtatgattctggcgaacacagctgaaagcggtgaagaattaaccgccgattcgcatctcgtcccggcgacaatggttggagctaaagctggagatcaaatccgcgactacatcaaaacatcagactctcccactgcaaaaatcagtttcctaggcactttgatcggaccatctcctccttctcccagagtcgccgctttctccagccgtggaccgaatcacttgacaccggttattcttaaaccggacgtgattgctcctggagtcaacattttagccggttggaccgggatggttggtcctaccgatttagatatcgatccaagacgggttcaattcaacatcatctccggtacatcgatgtcgtgcccacacgttagtggactcgccgctctcctccgtaaagctcatcccgattggtcacctgcagcaatcaaatccgcccttgtaaccaccgcttacgatgtcgaaaactccggcgaaccaatcgaggatctcgccaccggtaaatcatcgaactcattcatccacggagctggacacgtcgatccaaacaaagctttgaatcctggtttggtttacgacatcgaggtcaaagagtacgtagctttcctctgcgccgtgggatacgagtttccggggattctagtctttcttcaagatccaactctttacgacgcatgtgaaacgagcaagctaagaaccgccggcgatctcaattacccatctttctccgtggttttcgcatcgaccggggaagttgtgaaatacaaaagggttgtcaaaaacgtgggaagcaatgtcgacgctgtgtacgaagtcggagttaaatctccggcgaatgttgagattgatgtttctccaagcaagcttgcgttcagcaaggagaagagcgtgttggagtatgaagtcacatttaagagcgttgtgctcggcggaggagtcggatccgtgccgggtcatgaattcgggtcgatcgaatggacagacggtgaacacgttgttaagagtccggtggccgtccaatggggtcagggatcagttcagtccttctgattgatcattgaaattgggctctggttgtatgttttcattaaaaagaaaaaagtcctgtcgggtttgttaaaagggccatgttgttaatgggccgatctgtatactcattaatgagccctcactcttgggttagaccactatgcatggggtgtgaatgagcagaaaatccgattggcagaaaaaaaagttcatccgaataaaataaagcggccgct

SEQ ID NO: 85620 - DNA, 745 bp, Arabidopsis thaliana columbia
aaaacgttaaactgtgtgagacttcggagataaaatttcccagaaagcgtgaaaggttaaccggaagaaaatgccgtcacaagatgatgttcaaaatcttccaatcgatatcaccttcgctcaacttgaagaatggttggtggatcggaagagaattccggcggattggaggaagagggttgctgtgatcagagtcaaaatcttaaaagagttctcttctttgcctaaagagatcgatccattctttcaaaccctagatcctgaagtgatcggttacttggaggtcaaaaaggtgtatgagattctcctgaagacaactccggaaagccgcaacatctttggtcgactttcgggtgcttctggtgtttgggaagcaattgttcgtgcgtttgaaaaagatcacatttatcttggggaggcagctcagataataattcagaatgttaattacgaaatcccttatctgaaaaagcaagtgcaaaaggttcagcaacaaatgacagaacttgatcgtaaagaagctgatatcaaaaggagcgttgcactctcagcaacaaaatacgaggatgcttgccgagagcttggattgcagggaaacaatgtgaggcgtgagcttttggagactgcgagttcgcttcctagtacctttagcaagattctggaagttatcaacagtgactcagtaacaggggcaatggagtactactctgcctatgttcaagatgttcatactgagaaagataag

SEQ ID NO: 85621 - DNA, 526 bp, Arabidopsis thaliana columbia
  unsure (1)..(526): unsure at all n locations
cccacgcgtccgcccacgcgtccgcccacgcgtccggtcttctcccatctctctctcttcctcctcagatctcacactctgaaaaatcccccaaagccatgtcttaccttcttcgctccgatccggtttcacgaatccacccagaacctcaatctctaacctctttcgaccacttcgatctcctccctgactctctcctcctcttaatcttcgacaaagtcgccgacgtcaaagatctcggccgttgctgcatcgtatctcgtagattccactctctcgtccctttcgttgagaacgttctcgtccgtgttgattgtgttatctccgacgatgattcctcttcctccgacgagaatcatcgattctctttaaacactgcatcgatctcagacgccggcggtgctggtggctccttcttccgccttgttccgtctcgtattcggttcaaatttcaaaccgtttaaatgttagggagatttaggncgaaaggtcgttttnttngtngatgggcggttttagggttacg

SEQ ID NO: 85622 - DNA, 523 bp, Arabidopsis thaliana columbia
  unsure (1)..(523): unsure at all n locations
agatactgaatgagtggttcttgtttaatggagttttaaatttaaaaatatttggtaaccgagtggatcatcatgttattgagaagcacatctgctccgatactgaactcgtggcttccacaacactgctcgagagaatcgtctccggaaccggagtcacagctctggcgccggtcaacatcattgtctcttttctcatcaaagtccatagatggacacactggggagcagctgcaccaagctctctctgacaacaaggagattattattcttaaatcaaaaagcaacgagcacagctacaaaactccaacatcaagcaggcaacgcaggtcatctttagatgaaacacggtacacaaaaaaggcttttggttcggtcgtcacctttcttaggtggagaggcttttcttgngctcttggcaggggggtaagggcccctaggaatgtncgcttggggccgtcttttgagtgggtggtggttgcgggnttgnggggaccggngggaanttttttacggnggggnt

SEQ ID NO: 85623 - DNA, 675 bp, Arabidopsis thaliana columbia
  unsure (1)..(675): unsure at all n locations
aagaagagtgaagttatgtgatcaagaggcgcagagagatagatcttcccacctgtcttccttcttctgacaccgacacttatccgtctgtcaccctttaaaccctatctttttctcaactaagcttgtgtttaatctcaccattaatcttgtcactacgcatcatctcatctccttcctttattggaaactccgactttacctggaatcgtacccgatttgatttcactcgagataaaataattagtgcaaaaaagttctcaccatctttctccgtcttgtcggtcacgtttttgtcctcgtagctaaaaaaatcagctttctacaactccgtaaggtggaagcttgagattatgcagaagaaacgagagatctgtggttatagagacaaattagacaagaccttatcttctcctgaactcactaatcacgagactctcaaatctcttctcagaaaccagcttgaagagtgtgatgaggaatatatttggataaaagaacagntgatgtatccangttnacttagcaaagcttagggagtgtttccatgacttgnccncnaagntttctaaattaaaccaaccgntgggtgnttggaaatttgaaccattntctttnnagntttgccgggntaatttncccgtnaaggccttggttggaggcctttnaaanant

SEQ ID NO: 85624 - DNA, 900 bp, Arabidopsis thaliana columbia
  unsure (1)..(900): unsure at all n locations
nnnnnnnnnnnnnnnnnnnnnnnnnnnnnnnnnnnnnnnnnnnnnnnnnnnnnnnnnnnnnnnnnnnnnnnnnnnnnnnnnnccacgcgtccggaaggaatcnaagaacagatttaacaatggcggcagttcaacagcaacaagcgatgcagaagaacactttatacgtaggaggtttagctgatgaagttaacgaatcgatccttcacgccgcgtttatacctttcggcgatatcaaagacgtgaagacgccgttggaccaagcgaatcagaagcatagatccttcggattcgttacttttcttgagagagaagacgcttctgctgctatggataatatggacggtgctgagctttatggtcgtgttctcactgttaattatgctctccctgagaaaattaaggggtggtgaacagggttgggctgctcatccactttgggcagatgcagacacatggtttgagaaggcagcacaggagaaggagattctgaagatgcaagctgagaacaaggctgccatggagactgctgaggagcttcacaggaagaaattggcggaagatcgacaaggagagatggaggatgatacagataccaaaaatgatcctatggccagagcagaggctgatgctctaagtcacggcgaatgcctaatgaaagtaagcgttaccggattctcttatgcaccttgtcctgtaggataacaagtatgttttcgcctgagtgtgtacactgtcactatcacctcatagagtttttgaggtagattgttcttgaggtgataccatgtattgtatagtaatagattgtagttggtgaaaaaaaaaaaggcggcgtctaagatcagctacgnnnnnnnnnnnnnnnnnnnnnnnnnnnnnnnnnnnnnnnnnnnnnnn

SEQ ID NO: 85625 - DNA, 563 bp, Arabidopsis thaliana columbia
accaagcgtccgcccacgcgtccgcaaaaaaaaaacagcttctaaaaataaaaaacaaaacaataatccagccaccgtaggggtaattccgtaaatttgtaacagaaactccattcccgcggcgtatgcagagggcaatcccgtaaacttaacccatctccggtgatgaataatatcaattccttcacgccggagtgattttccacaaaaaaataagatatgaaagcaaatcgcggcggcggagagcacggccaacacgaggctctaaagctttccagtttcttcttcatgccggagcggccacgtgattacctcgtgcttttcacacgtttctccgtcctcacgtgcctcatcgtctccgtatctcttgttctccgcgccacttttttatccccttccgctcgagactatttccaccacctacgggtctcaaattcaaccgccgtaccctcaaaaagccctagctctccctccgtccgcatccgtcggaccaaccaatatctcccatatcttcttctctatcgccggagcagctgagacatggatcgatcggagccagtaca

SEQ ID NO: 85626 - DNA, 542 bp, Arabidopsis thaliana columbia
  unsure (1)..(542): unsure at all n locations
agtgaacatgccagctcaagcccaccacaaactcggccaagacaacgaggaatcaggaacggtcgagctctttgaagtatatgatgtggttgtatacatgggcatcattgacatcctccaagagtacaacatgaagaagaaagtggaacatacttgcaaatctatgaaatatgatccaatgacaatttcagccatcgagcctacactttactctaaacgattcatcgatttcctccttaaggtattcccagaaaaagcatagagagagagagatatcaacggaccattgatcttcctaaagatgaaaggttccatgatttgactcggcccgataatattctttcctggttcataacccataaaaagcttttaaggaattgggttggtattcttctttggccctaaggtccacttaccattataggattcttaaaaaacttgaaaaagttttcgtaaaaaaaaaaaaaaagnnnnnnnnnnnnnnnnnnnnnnnnnnnnnnnnnnnnnnnnnnnnnnnnnnnnnnnnnnnnnnnnnnnnnnnn

SEQ ID NO: 85627 - DNA, 480 bp, Arabidopsis thaliana columbia
  unsure (1)..(480): unsure at all n locations
actgattcantcaactgagacgtgcatagcaaagaagaagaaaattattttttgtcaattggaggtggaacgaaatcaaggntcagaagagaatcagaaacgtagctctttcttcagaagaattgttgggactgttgtccggtcggttcaagatgaccaaaaggaacaagacataaaaatattggaagcggaggtggaagccttagaggagctgtcaaaacagttatttttggaagtatatganctgcgtcaagcaaaggatgctgctgcttatcctagaacttggaagggtcatgtgcagaacttacttggttatgcatgtccccatttatttgtgtgtataaaatgttgaagtctctccaaagtgtttgtcttcaaagagggccggtccaaaagtccctgtcacggccggtgntccnccatattctttcngggtnntttnntntngggggaggtcctncccccccntcncaggttnna

SEQ ID NO: 85628 - DNA, 481 bp, Arabidopsis thaliana columbia
  unsure (1)..(481): unsure at all n locations
aatttnctcgagaaaaatgtcttgctgtggaggaaactgcggatgtggatctggctgcaagtgcggcaacggttgtggaggttgcaaaatgtaccctgacttgggattctccggcgagacaaccacaactgagacttttgtcttgggcgttgcacctgcgatgaagaatcagtacgaggcttcaggggagagtaacaacgctgagaacgatgcttgcaagtntggatctgactgcaagtgtgatccttgcacctggcaagtgaagaagcctttttaaataagcagaggttaatcggagtctcctttaattaatttaagttattcaataaggtaaacccttttttagggttgggggtttttagggtttggggttatgggggaataaatngcctcccccctaaacttttttcggccggtccaatggccctttggggttttttttngcccaaacttttaggggcntngaacnttcccctnngnt

SEQ ID NO: 85629 - DNA, 497 bp, Arabidopsis thaliana columbia
ttccgggtctacccacagcagtccgcggacgtaagctcggcaattcggctcgagtaaaattgccggcctgtgcaggaaactgcggatgtggatctggctgcaagtgcggcaacggttgtggaggttgcaaaatgtaccctgacttgggattctccggcgagacaaccacaactgagacttttgtcttgggcgttgcaccggcgatgaagaatcagttcgaggcttcaggggagagtaacaacgctgagaacgatgcttgcaagtgtggatctgactgcaagtgctgatcctttgcacctggcaagtggaagaaagccttttttaaataagcaggaggttaatccgagtctcctttaattaattaagctattcaataagtaaaccatatatatgagtggtgttgttaggtttggtttatgggtaataatggctacagcttatcttttaagcaatcattgcctttggtgttacgtcgggacatatgtttcagatgggtg

SEQ ID NO: 85630 - DNA, 805 bp, Arabidopsis thaliana columbia
  unsure (1)..(805): unsure at all n locations
aaaaatgtcttgctgtggaggaaactgcggatgtggatctgtttctattttcggcaacggttgtggagggtaagtggccaacgtctcggttggatttatattttccggggaaatcgttgcatgcaagtatgcaacaactgtgaatcgatgatgatatcttgttttgatgaatggtttcttggagattttttcttgtaaaaaagatacaactcttttgaatttacacgatctctgttttcataggatactgatgggttttttctttcgattgttgcagttgcaaaatgtaccctgacttgggattctccggcgagacaaccccaactgaagacttttgtcttgggcgttgccccggcgatgaagaatcagttcgaggcttcaggggagagtaacaaccctgagaacgatgcttgcaagtgtggatttgactgcaagtgtgatccttgcacctgcaagtgaaaaagcctttttaaataagcaaaaaaaaccgagtctctttaattaattaagttattcaataagtaaaccatatataggatggggtttttaggtttggtttatgggtaaaaaaggcttcagcttattttttaaccgaacattgtcttttgggtttgttttgatcaaatcttttaaaagtctagcaactttgccatgtgatgagtttgtacttccaggggaatgataataaaattatagtttttnaaaaaaaaaaaaaaaaaaaaaaaaaaaaaaaaaaaaaaaaaaaaaaanaaagggcggccgctctagaggatccaagcttacgtacgcgtgcaatgcgacgtca

SEQ ID NO: 85631 - DNA, 712 bp, Arabidopsis thaliana columbia
  unsure (1)..(712): unsure at all n locations
nnnnnnnnnnnnnnnnnnnnnnnnnnnnnnnncattcataaatttttcttcaatttgaattttctcgagaaaaatgtcttgctgtggaggaaactgcggatgtggatctggctgcaagtgcggcaacggttgtggaggttgcaaaatgtaccctgacttgggattctccggcgagacaaccacaactgagacttttgtcttgggcgttgcaccggcgatgaagaatcagtacgaggcttcaggggagagtaacaacgctgagaacgatgcttgcaagtgtggatctgactgcaagtgtgatccttgcacctgcaagtgaagaagcctttttaaataagcagagataatcgagtctctttaattaattaagttattcaataagtaaaccatatataggatggtgtttttaggtttggtttatgtgtaataatggcttcagcttatcttttagccgatcattgtcttttgtgtttgttttgatcatatcttttagatgtctagcaactctgccatgtgatgagtttgtacttccagtggaatgataataatattatagttttaaaaaaaaaaaaaggcggccccccccggggcccctccgcnnnnnnnnnnnnnnnnnnnnnnnnnnnnnnnnnnnnnnnnnnnnnnnnnnnnnnnnnnnnnnnnnnnnnnnnnnnnnnnnnnnnnnnnnnnnnnnnnnnnnnnnnnnnnnnnn

SEQ ID NO: 85632 - DNA, 933 bp, Arabidopsis thaliana columbia
  unsure (1)..(933): unsure at all n locations
ccacgcgtccgctttatctatcttcgtacattatatataatgggatcaaccgtggccgccgctctcctcctcttcctagcggcagtccctgccgtctttgccgcaactttcaaggtcggcgatatttctggctggaccagtaatcttgattacacggtttggctcactggaaagactttcagagtcggtgacactctagagttcgtatatggtctttcacactcggtgtccgtggtggataaagctggctacgataactgcgacagtagcggagccacacagaactttgccgatggagacactaagatcgatcttaccacagttggaacaatgcacttcctttgccctacttttggtcactgcaagaacggcatgaaactcgccgttcctgtcctcgccgccgctccatctccttcgactccttcttcgcctccctccactccttcgactccttcttccccgccctccactccgtctaccccttcttcgcccccctcccctccttcgcctccttctccatcgctcccccctagctctctgcctccatctgcatctccgccgaccaatggcacgccggattcagagacattgacgcctccgccagctccattgccgccttcgctgtctccaaacgcggcatctaagggagtcatgagctatggaataattggagtcacgatgatattgatgtacgctgttatgacctaaataacagggtggaaacagagcattgttttgctccatgtcttttttggtcggcggcctttggaaatactacaccactacgtgctcttttgtgtgtaacggaatttttttgccattgacaatttttccttcttccttctttttttaattacttgtaggggttgataaacgttatagccatctccaagctattttatcttattcttnnnnnnnnnnnnnnnnnnnnnn

SEQ ID NO: 85633 - DNA, 588 bp, Arabidopsis thaliana columbia
  unsure (1)..(588): unsure at all n locations
cacctatccacttctcatctcttcgttatcccctctctctaatggctaacgaagaactcactgagtcacagcaacaagaagacccaagtcaacaattacccaatgcagatgaagaaaagggctcagactccgactcaaactcagactcagacgcatcatcccaatcctccggcgacgatttctacatctccgagtcagaaaatgaagcagaaggagacaacacaatcttcaactacgtaagaccaagtgacatacctcctgacccaaacgcaaacccagaaaccaacattcgccgattcaatcgagtcctcgatggcaaacgagtgaagcgtatgcaagaagaagaagaagataaatacactttctatgaagatcttttcgatttccctagagacccagaacgttggaaggagcaagatttaagagagatttgggctgatggtccatttgggatgcggaacctggttgggatcntctttggnttatgaagntgnttggnatgttgttaacgntgggttaaggaggtngngtncttggtttaacccttttttgtncgattggaacntttncagtttncagnanatttgg

SEQ ID NO: 85634 - DNA, 511 bp, Arabidopsis thaliana columbia
tctattccaattaatttaagggaaggttggtccccttgcaggtcccggtccggatttccgggttggaccaaggggtccggccgtcggaattttctctccccgacgctgataaccctagcggcttcaaattacagtcgcttaacgccgagttaggccaccgagtccgatacgaacctgattcggtcgctgtcgcgaagatccccgtagttttccaatttctggaaagagacgaagaaacccttttccagatgcaatgcctaatggctgatggagctctaattactttagattccgacgatattttagctacagaacatgttttagcagttggtaaagagtttcccgatgtggaaacttgcagaagaactttgaaagatttggctatagctctgcattttgatcttcggattgtgaaatcagatcgtagtcgattcatagccaaatgctctaaagaaggttgtccttggcgtatccatgctgctaaaggtccaggtgttcagacatttacggt

SEQ ID NO: 85635 - DNA, 470 bp, Arabidopsis thaliana columbia
  unsure (1)..(470): unsure at all n locations
cctgcaggnaccgggccggaattcccgggttgacccacgggtacggccatgctctctcgtgtctgcccaaccctccgctataatcgtatctggtctgctcatgcgcgtgaaatgccacgcgccaccctccttctcctccaacccaacttcttccactcttcccccaaaactgctcttgtgaatcgtctcgatgttacttcatcggagttttcttccatgttccgtcggagcttccacgctttacgcagcaccgtaggagactggagaaagcttccgaaaccgccgggtcaggtttttgcggagaggagagaatacaggaagattagaaggagagctccgaagaagaaacaggaattggagcttagtgttagtatctgcatcgaagaacagcttcctgatgatctcgagattcagattattgcagaaatgcttcggctcaatggacctatggcaatgacattggctttcaa

SEQ ID NO: 85636 - DNA, 622 bp, Arabidopsis thaliana columbia
  unsure (1)..(622): unsure at all n locations
ctgaacgatcaaagagtgcaaaatatgaaagttatacaggagaagatgcagctcaaccagaaagaagttaaacgcttcaatccgatagatgcatttcctggtgatattgttatttttgcgagggtcattaatttactcagaggactttcatctactatgaatgttcggattgtttatctggacatcatgagaccatttgccgaatctgttctgttagggagtattagtcgaggaccaactgtggatgctcattggatacatgactcgccaatccattctgatgtagagtccaaagtgaggaagctgctcgcttgaacttgggaggtatccagaaaatacttgggattcagggtgtgtgcatattaaagatgggaaagtcataattggcacctgcttgcttggagtgcttcggaagatatgaccctcggtccagttcaacccgataggttaatttcccggtttctctgtgancaaaggggtgtcactngcttggaatnntacattnggctttnttgacaaaaaggaaactccagcttcgnccagnctttgggaaannatttggccaggggttcggntcaaattgggaaaagtncccntaaagggccccnattgtgctnaacca

SEQ ID NO: 85637 - DNA, 615 bp, Arabidopsis thaliana columbia
  unsure (1)..(615): unsure at all n locations
cggaagcgtgggcggacgcgtggggggaaacaagaacaaaaacgtttgcttcattctctgaaagactctaatggcagccaccacgagacggttgctttactatgtgtccaaaagattctctaccgccggagtgcggcggagctatggcggtctgccacaatcgaattccaaatctcctccgtcttcttctcaacgattgatggaattggaatctgaattcagtgcccacaattaccatcctgttccggttgtgttttctcgcgcgaatggctcaactatatgggaccctgaaggaaagagatacattgattttcttgcagcttactctgcagttaatcagggacattgtcatcctaagatcatgaaggcattgcaggaacaagtggagaagctcactttaagttcacgagcggtttacaacgataaattcccggtatttgcctgagcggctcacaaaacatgttcgggtatgatatggtggtcccatgaacanggggcngaagggccgaaactgctttgaacagcaagaaatggggcatgaaagaaaanatncccaaggcgngggacatggccctggtgngggggttanggggnnataggaatggtccagggntc

SEQ ID NO: 85638 - DNA, 736 bp, Arabidopsis thaliana columbia
  unsure (1)..(736): unsure at all n locations
cttcccttcaaccttcataatcagtggctccttcgcttattagtctttgtcaatcttaaatcgttgagtatccaaaaatcttaaactcaatggatccgtgctctttcgtacggatcatagtcggtaacttggccgttaggtttccgtcgtcgtcttcttcttcttcttcctcatcaggaccgtctgtttccggaatcaatccaacggctcctaactgttactgtaaaatcagattcaagaactttcctcgtgagattgtttctgttccggttatgttccgaactgaatctgaatccgagactcgttgctcctcctccggtaacgtatccaccgttgctgcttgtttcagtttaagtaaagctcagatcgaagcgtcgttgaagaaacctaaatttagtgttctctccgttgaggcttattcccgcggaaatagcgacggagacgacggtgttagcggcgcgtcgtgtggactcgctacggcgggtgagaagttgcttggtcgatttgaggtttcgcttgatttgaaatcggcggagacgaagagttttttggcgcataacggttgggttnctttnccgtctaagaaaacgagagtaaaactggntccnatccggngctccacggtaagcgtacgggtcgaaccntaacccgngattcgggtttnaattcgncggtnaaccntanttagnccncaggttttttaaagttcaaggaaaccanaaagaaagncgtnttc

SEQ ID NO: 85639 - DNA, 1552 bp, Arabidopsis thaliana columbia
cgtatttgctttcaccaacccactcgacggagtctccaacgccttcctcctcattctccactctcacaccaccaacttctgattccagatctcaacgatgcaaagctccgccgtattctccctctctccgtcgcttcctctcctaaaaccacgtcggctctctctccgccaccatcccataaccaccgccgcttcttcaagcgatctaaacgtttctccaaatgttgtctctattccttctttatctcgtcgatcttggcgtctcgcttcgtctgattcgcctctccgtgcttggtccggtgttccttctccgatctctcactccttagacacgaatcgtttcagaaccgccgctactgcagttcctgaaagtgctgaggaaggtgataacagtggtaaattgacgaaggttttggaacttggcttgttgttcgctatgtggtaccttttcaatatctacttcaacatctacaataaacaggttttgaaagctctacatgctccaatgactgtgactttggttcagtttgctgttggtagtgtgctcattactatcatgtgggttcttaacctgtacaagagaccaaagatcagtggtgctcagctagctgccatcttgccgcttgctgttgtgcacacacttggtaatctgtttacgaacatgagtattgggaaagtttctgtttcctttactcacaccattaaagccatggagcctttcttctctgttttattgtctgctatgtttctcggggagaaacctactccatgggtactcggtgccattgtaccaattgttggtggagttgcacttgcttcaatttcggaggtctcattcaactgggctggattttcgagtgcaatggcatcaaacttgactaaccaatcccgtaatgtgctgagtaagaaagtcatggttaagaaagatgattctcttgacaacatcactctcttctcaattataacattgatgtctctcgttctgatggctcctgtgactttctttacggaaggcatcaagttcactccttcatacattcaatcagctggtgtgaatgttaaacaaatatatacaaagtctcttatcgctgcactctgcttccacgcataccagcaggtgtcgtacatgatattggcgagagtatcaccggttacacattctgtcggaaactgtgtgaaacgtgttgtggttattgtgagctctgtcatcttcttcaagacacccgtctcgcctgttaatgctttcggaactggaatcgcccttgcgggtgtcttcttatactccagagtgaagggtattaagccaaagccaaagactgcttaagcaaatatcggctaatacctaatgtcatatcactcccgcgctttggatttgtatacaatttctcgagctaaagttttcagatagatggttttattcttttgcgggttttttcacgaagtttcatcatccctttctaagcttttcgctgcagccatcggttctcttagagtttgttataagttctcttctgtgtctagacaaatgccaaactcttaaatttcttaccgg

SEQ ID NO: 85640 - DNA, 389 bp, Arabidopsis thaliana columbia
  unsure (1)..(389): unsure at all n locations
attccaatagcttctaatattttaactacaaacattttaagtttccactaacaatgggtctaatcgccggtaaagtgcgtgtgtttgttttggggtttgctttggtcacagattttactatgggagaagcagagtttggtgatgagaagcccttgtttcctcaccctcaccctcatcctctcctccacaagaagggctttaaaaaagaattcggcgacttaggtggtggtggtggtatcagcggtggaggcggctttggagcaggtggcggttggattggaggcagtgttggaggctttcgtggaggaataggcggtggattttcgttgnggagggttnngaggtcgaagccngtanaagnagtttacggtcgctttcngcaaaaggac

SEQ ID NO: 85641 - DNA, 331 bp, Arabidopsis thaliana columbia
  unsure (1)..(331): unsure at all n locations
cntagtagcgttctaagatcactgaggggaaggttggtcataaatttggagagtacacggaaactcagactttcgagaacaaatattgtaccgggaagaaaaaagggacagaaatccataaagtcaaaaaatatggcacgaaaaggaaatccgattttggtaaganttggaaaaaatcgtagttcagattcaagtcggttcagtnccgcggcactgtnagggtgtttatactttttaatatatttngtagccccaacattggggcctgtcctgtttctactgcngttaanacatttggttttngggggcttaggtttggntttggggaatt

SEQ ID NO: 85642 - DNA, 1403 bp, Arabidopsis thaliana columbia
  unsure (1)..(1403): unsure at all n locations
nnnnnnnnnnnnnnnnnnnnnnnnnnnnnnnnnnnnnngcctgcaggtaccggtctggaattcccgggtcgacccacgccacgcgtccggaaaaacaaacgtactcaaatggctctttcttcaccttcaagaatcctctgttttgctcttgccttatccgctgcttctctctccctctctttcgcttcttcccacgattactccatcgttggatactcccccgaggatttggaatctcatgacaaactcatagaactcttcgaaaactggatctcaaattttgagaaagcttatgaaaccgttgaagagaagtttcttaggttcgaagttttcaaggataatctaaagcacatcgatgagactaacaagaaagggaaaagctactggctcgggctcaacgagtttgcggatttgagccatgaggagttcaagaaaatgtatttagggctcaagactgatatagtgagacgcgatgaagaaagatcttacgcagagttcgcttacagggacgtcgaagctgttcctaagtctgttgactggagaaagaaaggagctgtggcggaagttaagaaccagggctcttgtggaagttgttgggcgttttcgacagtagcagctgtcgaaggtataaacaagattgtgacaggaaacttgaccacattgtcagaacaagaactcatagactgtgacacgacctacaacaatggctgcacacggtggtctcatggactatgcctttgagtacattggtaagaaccggaggtctacgcaaggaagaagattatccttactctatggaagaagggacttgcgagatgcaaaagggtgaatctgaaacagtaaccattaatggacaccaagacgtacctactaatgatgagaagagtctcttgaaggcattggctcatcagcctctcagtgtcgccattgatgcatctggtagagagttccagttctatagcggcggcgtgtttgatgggcggtgcggggttgatcttgaccacggtgtggctgcggttgggtatggatcaagcaagggttcagattacatcattgtgaagaattcttggggaccaaaatggggagaaaaaggttacatcaggctgaagaggaacactgggaaaccagagggtctctgtggaatcaacaagatggcttctttccccaccaaaactaagtgatcatcagatcattctctcttatctgcatttgatcagcatcttacagtgtcttcgttttttctcttttgatttatcaacggaagtcttgtaacaactatgtgcaataatacctatatataagaagcagagaattgccaaattaaaaaaaaaaaaaagnnnnnnnnnnnnnnnnnnnnnnnnnnnnnnnnnnnnnnnnnnnnnnnnnnnnnnnnnnnnnnnnnn

SEQ ID NO: 85643 - DNA, 636 bp, Arabidopsis thaliana columbia
ggcttatctctccgacgatcttcgtataaaacttagtccggcgggaaatcgactttcaaattcgcaggattctgtcgatattcttgtatagttgcgagtctacaagattcttcttcaccatctctgttaatttttccctaattctttcatctgagtgaaggaaatggatcctgaagctgtgaaggagtttatacgaagggaagttccagattgggacgatgaggtggtggcgatggctagattcaaggcgtttagtggtcagaggtccgattgggaacttaaatttcagttttggcgtgatttgatcatcaaggtttcgcgtcagtttgggttgttcatcattgatcctgtccaggtgaagaaggcgtggtttgatcgaggaggaatgacgcctttatgcattgatgatgttgtgttattgatgcatagtgaaggtgatgttgtgcggattagtgatctcgatgatcccggtagtggtcgtattgctcgtttattgaggacagtgaagaacttaatggttcaacagccagtgaagcaggaagagattctggaaaatacacttgttcttgttccactcttgaaggagaaggcggctgacgtggtgaagatattatctgagggacactggacttctac

SEQ ID NO: 85644 - DNA, 565 bp, Arabidopsis thaliana columbia
tcaatacgactcactttagggagggctggtacgcctgcgggtgccggtccggggttcccgggtcgagccacgcgtgcgggaaaatctgaaacggaagctcagagagacaaggatgagatttttctcttcctttgataaatcccaatacctaattcccaaattcccttacttttaggcgccgaaagatagagagaaacatagatacgcattggttttttcttttttgaagattctcgcttcttactacatgtgtatcaatcgatctctacccagattctccggaggagctttgagtcttgtcgtatagatgcagtgaaggtcctttgttagatgggaaaacttgttcttgagttgtcaaaaggtattttctatgtttttggagtagaactgtttacaaggaagcagccaatatggagtttgattttggagaaatgtttttagtgttgttgtgaagaaatatcagttttgattgtttttggatttgatgggtaaagagaatcagttggagactaccgattgtggagtcagtgatcacggttctccacctatcaagaatgaagaacat

SEQ ID NO: 85645 - DNA, 578 bp, Arabidopsis thaliana columbia
atgattctccaggtctctacgactcactattgggaaagctggtccgcctgcaggtaccggtccggaattcccgggtcgacccacgcgtccggagactctctgtagagaaaaaccctagacattttccggtgagaaatgagtatcactcgtagcgcgatcagatcgagtttgtgtctccggaaattggatccggaaatcagtcgtagctcgcttccgtttcttcaagagtggaggaaatgcctatctaccgccacggagcagcctcctcctgcctctccgttaccaccgcctccgggaggttctccgggagaagggaggttttatgggaagttttcaggcttttcaaaacatgctctgaagacagacataatgaacgtactcgagggctgcagtctgacatcagatgatctcaaattcaactatccgcgtggcggaaacttaactcctgcggcagtctttgtgcagttcccatccctttccgcatatgataaagcactgcggaatatcgcaaagaaaggaaagctttatagattagaaaaggctgctcgtgctaagtgggatcccattgttccttatga

SEQ ID NO: 85646 - DNA, 685 bp, Arabidopsis thaliana columbia
aaccatataaagcttgttcttctccttccttctccaatttcgtaagctcaaagatttcgatttcgattttgattattgccaaaggtttaaagatggatattttcgacaactctgatcttgaataccttgttgatgaatttcacgctgatttcgatgatgatgagccctttggagaggttgatgtcaccagtgagtctgattccgattgcatggactccgattttgatttcgagctgagtcagagtaagacgaacaatgaaacatcagcgttagaagctaggaatggaaaagatattcaagggattccatgggagagcctgaattacacgagggatagataccgtgagaatagattgctgcactataaaaactttgagagtctgtttcgatccagagaagagcttgataaggaatgcttgcaagtagagaaaggaaagaacttttatgactgtcagttcaacacaaggcttgtcaagtccacaatagcgcattttcagctgaggaacttggtatggccaacatcaaagcacgatgtgtatttcatgaacaactactctctcatgcactggtcatctttgttgcaaaggggcaaagaagtacttaatgtggcaaagcccattgttccttcaatgaagcagcatggatcgtctgtcacagtctgtatcaagagtccagataagcacat

SEQ ID NO: 85647 - DNA, 497 bp, Arabidopsis thaliana columbia
  unsure (1)..(497): unsure at all n locations
aaaatggcttcctcatcaacgagaaagtacgagacacgaaagcnagatccaaactctaaaatcgcagctcttctcgttatcgacatgcagaatcacttctcctccatggccaaacccatcctcaacaacgttctcaccaccatcgacatctgccgacgcgcctcantccccgtattctttacgcgtcacaaccacaaatccccgaccgaccacggcatgctcggcgagtggtgtaacggcgatgtaatccttgacggaaccaccgattctnaaatcatccaggggatacaagggccaagtaaccggcccagacgggatggttggagaagaacacgtacagtgcgttttcaacaaaacccggctccaggnaaacctggaaaagatcggagtaaaggaggtgatcgtnatcggagtnatgacgnacttttgcttttngacaacggngcgtnaaggttttttaaggggttttngggtttttttnttgacgggcggggctt

SEQ ID NO: 85648 - DNA, 394 bp, Arabidopsis thaliana columbia
ctttttgcactctttgggttttctaacgatgatggcgtgaaagaaagagagagagagaacaagcagtgttcaagaagagagagagagaggaacaaaagtgtctctttttttcttctctgcattgcccatttatcctgtcgtctttgacgcttttgtaaaagctaaaaaagaaaaaagatgccaaacgacgacgaagactagagagagatagactaaagaaccagttgtctttattcttcttcttccttcttccttcttcactcttgagattctctgtttcttggtcttgagtttatccataaagatccggagataaaatgacgaaagtgtgtcctgaaatagaagggacattatctttatcagtggttccagtatcagtagatgtgagctttgc

SEQ ID NO: 85649 - DNA, 736 bp, Arabidopsis thaliana columbia
  unsure (1)..(736): unsure at all n locations
tatgtcactcccacgtccaataaatcaatagttatcagtgatagacatgacatagctatgagcaaaacccgagtcaaggttgagagggatattgagatggaagtagataatcagtttagctctcggtcattgttttctgttgaaaacataaagtctgatgatcatggtgagcagaagccacgaagaagaaataaaaaccagtacctagcaatccaagaaatttctgatgagaccaagcttggttgcacataacctaatcggccgcttgctagagaaatttggccagaccgtcaacgtctaaacttagaaacggatgaacgttcatatcttggaggtgaatccaggcttcaagaaaaagtagaagtgagtgaaaaaaagcaagcttcatcgcaggcgaagtcagatgaggcgatcattctttcagttgtcaaagagcaaataacgtccctagaagagagtgtcttgatgagattaaaagagttgatggaagtgagctagcatcagcaaagttataacctttcctgcctaagtgaagtagcaatggaatcaagagagaatcggcaaaggatattgagatgaacacaacaaggaatacgattttgcatcacattgtattcatttttacttcgttctcaatccccctttagggaagaacttaagagtgtactcatttttttctttatatgataagatgatctttgccatacattnnnnnnnnnnnnnnnnnnnnnnnnnn

SEQ ID NO: 85650 - DNA, 649 bp, Arabidopsis thaliana columbia
acgcgtccgaccaagcgtccgggtttttttgtctagcgggcattggaatttacaacctcgtaaaatatgacagcagcgtttttaaagcgttcaatcctgcatatatctatttctttttcaagagaaactctgtaaatgcttggtatgcacttgggggttgcgttttatgtgcagctggatcggaagctatgtttgcaaatcttagctatttctctgttcactctatccagcttacttttatccttctggtgttaccttgcctcttgctgggttatttgggtcaagccgcatgcctctctgaaaacttcagcgctgccggggatgctttcttttcgtcagttccaagttctttgttctggccagtctttctcatttctaatgttgctgctttaattgccagtcgtgcaatgacaacagccacatttacatgcatcaaacagtcaatagcactaggctgtttcccacgtcttaaaatcattctcacctcaaagaaattcattggacagatttatataccggttcttaactggtcccttctggtggagtgtctgatcgttgtctgctcttacctcaaatatcttcccgattggaaacgctaatggcatcccagagctgtgaattttgatgactacaacaattttggtgaccc

SEQ ID NO: 85651 - DNA, 1627 bp, Arabidopsis thaliana columbia
  unsure (1)..(1627): unsure at all n locations
cgttccggtttgttttgtggctgacgataaaacagagctcaaaagaaaaaaaaatctagggtttgtttgagactaagaggaagagaaagaagaagaagagaaaattcgtacaattccgccattaaagcttcaacctttaatggcgacaacgactctttcttccttctctctttctcttcctcaacttctccataaacccacaaagcctcttcctttcctcttccttcttcctcgattcaatcggagatttcgaagtctcactatcacttcttcttctacaacttcttcaaacaatttcagtagtaattgtggcgatgatggcttctctcttgacgatttcactctccattctgattctcgatcacctaaaaaatgtgtcctttctgatcttatacaagagattgagccattagatgtgagtttgattcagaaggatgttccagttactactttggatgcaatgaaaagaacaatctcaggcatgttgggtcttcttccatctgataggtttcaggttcatattgagtcactttgggaacctttgtctaagcttttggtatcttcaatgatgactgggtatacattgaggaatgctgaatatcggctttttcttgaaaaaaaccttgatatgagtggtggaggcttggacagccacgcttcgggaaacactgaatatgatatggaagggacgtttcctgatgaagatcatgtttcatccaaaagggatagcagaactcagaacctttctgaaacgattgatgaagaaggtttgggcagagtatcctctgaagctcaagaatatatcttacgtttgcagtcacaattgtcttctgtgaaaaaggaattacaagaaatgagacgaaagaacgctgccctacaaatgcaacaatttgttggcgaagagaagaatgatttgttggactatttacgatctttgcaacctgagaaggtagctgagttgtcagaacctgcggctcctgaggtgaaagagactattcattctgttgttcacggtcttttggcaactctatcaccgaagatgcactctaagtttccagcatcagaagttccacctactgaaacggtgaaagcaaaaagtgatgaagattgtgctgaacttgtagagaacacttcgttgcagtttcagcctcttatctcactgactcgggactaccttgctcgtcttctcttctggtgcatgctattgggacattatctcagaggtttggaatatcgaatggaactgatggaggtcctgtctttgacatgcgatgccaatgggtctgagaacgtcgcttgaagctatctttatacatctcaacattgtcttacatgcgtatcagcggccttgacactcttaaaccaacaaagtgggcaagtgactaggagacaggccagcctttgagctttagctcttgcacatatatgcagctttgtgctggcctgaaaattcatgggcgaggtaaagtgtaacataagaaatcacttctactaaaattatttttcgttgcattatcgtgtgatggatctgcaaagcaataaagctaagtgtaattgtattcaggaatatactcgtttggtcattaagtatagtttgtcctacaattantggctcagaaatagcaat

SEQ ID NO: 85652 - DNA, 576 bp, Arabidopsis thaliana columbia
  unsure (1)..(576): unsure at all n locations
atacgactcatantgggaaagacggtacgcctgcaggtaccggtccggaattcccgtgtcgacccacgcgtccgattaaatggtgctccagaatttgtaagatcgggtggtgctatttaaatccaatatcagaaacacgtcgaacgagaccaatagagctagcttctgatacatttcgactttggcgtttctcgatctgttgtttctgctcccaaataaaaataaaaaaaaatcggatcggggatttccccaaatcgtaaaattaggttttgttcttcatttctagccctagcttagttttatcgttatcttattcattaaggtttgattctacctttgtttcgcttccctcctcgaattttgcaattccgttattaaaggatcctagtttttctggctcttgtactacgtcaagtttcatggattctcgagtttcgattctcttcgtctgtgcaatagccgtgtcatgctttacgtctgggtctgcttcatcaccagtggacttttccgtttgcaattacgaattcgagctgtttcgattcgatttagaggccaaatgtcctccttctctgtatc

SEQ ID NO: 85653 - DNA, 686 bp, Arabidopsis thaliana columbia
  unsure (1)..(686): unsure at all n locations
acggaagtggacagtctcagtaaactgaaagcaagcagaatgaaggagcttgtaatgaaacgaagatccgagttagaggatctttgcagactaactcacattcaacctgacacaagcacttccgctgagaaatcaacggcattaatagattctggattagtggacccttcagagcttcttgcaaatattgaaatgcaaataaacaaaattaaagacgaagcacagagtcgaaaagatatcatggacagaattgaccgttggctctctgcatgtgaagaagaaaattggctggaagagtataatctggatgagaaccggtatagtgctggaagagggggacatgtaaacctcaagcgtgcagagcgagctcgggttacaatcaataagatccccggaatggttgacactcttatcaagnaaacacttgtgtgggaagaagacatgcagaagtcatttctatacgacggtgttcgattggttaacatactagaagactataaactgacaaggaaacaacaggaagaggnaaagnaaagntacagggntcaaaaggaggggcaggntctcctacttaaccccaaagggantccattttcnggntcaaaaccggtcccaaggaggagcagcaanttnagnaagccccattggntttaacatttgcantngggatgnttcaantccnccca

SEQ ID NO: 85654 - DNA, 724 bp, Arabidopsis thaliana columbia
  unsure (1)..(724): unsure at all n locations
gcannnnnnnnnnnnnnnnnnnnnnnnnnnnnnnnnnnnnnnnnnnnnnnnnnnnnnnnnnnnnnnnnnnccacgcgtccggaaaatggcgtcgtacacagtctcctttatccctttgacgctctctaatcctcggatctttgtttcgagacagaatggatctccctcgtcttcttctcggattcctctaacgtcttctctgttaggtaagaagcttctggcgacacaaccgtcgcatcgctgcttcgtccccaagctccggtgcttgacctcggccagcacggtcttaaacgtccctattgcgcaaccggagaatggttcttcggataagatcccaaaatggtcggcgagagctataaagtcacttgcaatgggagaattggaggctaggaagctcaagtatccaagtaccgggaccgaagccattctcatgggtattttagtcgaaggcactagcacagttgctaagttcctgagggggaatggagtcacacttttcaaggttcgagatgagacgttaagcctgctggggaaatcagacatgtactttttcagcccagagcatcctcctctaactgagccggctcaaaaggccattgcctgggccattgatgagaagaataaatctgatgtggatggggaactaaccacggcctacttgcttctgggggtttggtctcaagaggattcagcaggccgccaaattttggagaagctcgggttt

SEQ ID NO: 85655 - DNA, 1322 bp, Arabidopsis thaliana columbia
gaaaaacaaaacaaatccattttttttattactctgttttttcccctgtttttaagtttatttacttcttactctgttttctgctcaaaagagtctttaaacagaagactaaagaagatggttgcggttgaaagagttgagagtctagcaaaaagcggaatcatatcgattccaaaagaatatattcgtccaaaagaagagctcgagagcatcaacgatgttttcctagaagagaagaaagaagacggtcctcaagttcccacaatcgatctaaagaacatcgagtcagacgatgaaaagatccgtgagaattgtattgaggagctgaaaaaggcatctttggattggggagtgatgcatttgatcaaccatggaataccagctgatctaatggagcgtgtcaagaaagccggagaagagtttttcagtttgtctgtggaagagaaggagaagtatgcaaacgatcaagccactggaaagattcaaggctatggaagtaaattggctaacaacgcgagtggacaattggaatgggaagattacttctttcatcttgcgtatcctgaagagaagagagatctatcaatttggcctaagacaccaagtgattacatagaagcaacgagtgagtacgcgaagtgtcttcgtttgctagcgactaaagtcttcaaggctctctctgtcggtctaggtttagagcctgaccgtctagagaaagaagttggtggtttagaagagcttcttctacaaatgaagataaattactatccaaaatgtcctcagcctgagctagcactcggtgtggaagctcacaccgatgtaagcgctttaactttcattctacacaacatggttccgggtttgcagcttttctacgagggcaaatgggtcactgcaaaatgtgttcctgattcgattgtgatgcacattggggatactttggagattcttagtaatgggaagtataagagtatacttcatcgtgggttggtgaataaggagaaggttaggatttcttgggctgtgttttgtgaacccccaaaggataagattgttcttaagccgttgccggagatggtgagtgttgagtctccggctaagtttcctccacggacttttgctcaacatattgagcataagttgtttgggaaggaacaagaagaattggtatccgagaaaaatgattaagtttctgtgtttactcttatttttgaaactctatgtgcgagtttcttttataatgtgtttgtgtctttctcatgaatttgatgtgtttgtgccttttatagtgaatattgcggagcttaaaaaaaaaaaaaaaa

SEQ ID NO: 85656 - DNA, 1014 bp, Arabidopsis thaliana columbia
  unsure (1)..(1014): unsure at all n locations
nnnnnnnnnnnnnnnnnnnnnnnnnnnnnnnnnnnnnnnnnnnnnnnnnnnnnnnnnnnnnnnnntaaaacagagccacgcgcaagagaggatttagcgagagagagacgttgaagaagatgactagtggaggaggatacggagatccgtcgcagaagattgattatgtgttcaaagtggtgttgatcggcgattccgcggttgggaaatcacagatactggctcgttatgctagagacgaattcagtttggattctaaggccaccatcggcgttgagtttcagactcggacgcttgttatcgatcacaagagtgttaaggctcagatctgggataccgccggccaagaacgatacagagcagtaacaagtgcatattaccgaggagcggttggggcgatgttggtgtatgacataaccagacgccaaacctttgaccatatcccaagatggttagaagatctacgtgctcatgcagataagaacattgtgataatccttattgggaacaagtcagatcttgtggatcaacgagctataccgacagaagatgcgaaagaatttgcggagaaagaaggtttgttcttcttggagacatctgcatttaacgcaaccaatgttgagagcgctttctccacggttttgactgagatccttcaacattgtgaacaagaaaagtctggctgcgagtgaagatcaagagaatggtaatcccgggtcgcttgctggtaagaagattgatattgttcccaggtcctggtcaagtgataccaaacaagagtaacatgtgttgtaactcttagataaaccaattcaattcttgaatgttacttgataacaacaatatatagatgttttaaagactctgattgggatatttctcctatctagagctgtgtgattcatttgttgcttaatgagcagtttttgtggggttttggggtgttgaatccaagtataacaaaccnnnnnnnnnnnnnnnnnnnnnnnnnnnnnnnnnnnnnnnnnnnnnnnn

SEQ ID NO: 85657 - DNA, 380 bp, Arabidopsis thaliana columbia
  unsure (1)..(380): unsure at all n locations
attttaaaaaacacaaacccattcgtgcgtctctggctaattaagttaaaacactaatggacacttctncttcacttttgtccttctccttcttcttctttatcatcatcgtcatcttcaacaagatcaacggtctcagatcatccccagcttcaaagaaaaaacttaatgatcatcatgttacatcccagagtcacgggccaaagtttccacacggaagcttnggatggcccgtnatcggtgaaaccactcgagttcgtctcttctgcttactcagaccgtcctgagagtttcatggtcaagcgtcgtctcatgtatggggtgagtgtttaaagtcgcatattttttgggcacggcggngntccntntngacggntgct

SEQ ID NO: 85658 - DNA, 410 bp, Arabidopsis thaliana columbia
cccacgcgtccgatgggattgagttttcccgggaccagcatttctcatgggaccgtaattccgaatcgatctctcactaggaatttgccatggtacagtcattggtatcgctctcaagatcgttgtttctcttcgaacacaaaggatactgatgaagatgaagaaagcagtgaaggagaggatgatgatgaggacgagggggaagactttgaggattcggcggatatggaagtagaaagggaatattcaccggcggagaaagtggaagaggcggaggagatagggtacaaggtgatgggtcctcttaaaccttcggagagacttttcaaaccctatgaaccagtgtttgccattgttcagattggttcgcatcagtttaaagttagcaatggggactccattttcaccga

SEQ ID NO: 85659 - DNA, 316 bp, Arabidopsis thaliana columbia
acgtagataggaggaaaccaagcgttgatggcacatgcatgtagtaagccaatcgcatgcagcttgaaaaggaggatgagtgctcattgggtctaagaagaagtgataacaaagattcttgctttcttttttttttgttgttgttgtaattaggagatgaacttaccaaatgtaatctcaagaggatttgaacaatgtttcctcagattaccgttaatcatgtctagtctctaccctttaaccttaatctaattagaaaacaaaaaaggcccaataagaagcccatttttccaagtttattttctgaaaaaaaaaa

SEQ ID NO: 85660 - DNA, 824 bp, Arabidopsis thaliana columbia
  unsure (1)..(824): unsure at all n locations
anncaggttncggagnanangtttgggaaaaancccnaatttgggaattncntngaaaatccngtttccatgaggccanaggggaannaaaantgcctaggaaggagaatcccagaaancaacgngttaacggncgaacccagtgctttttcgatacatncgatttattccatggtgggcttggattaagagataccacttacctgaagctgaactcttaaatggtcgtgcggcgatgataggattctttatggcttactttgtcgatagtcttaccggagtaggacttgttgatcaaatggggaatttcttctgcaagacactattgctttgtggctgtggctggagttttcgtttattcgctaagaccgcgcgtccggataaactcaagaacttgtttgatgagactacattgtatgataagcaatggcaagcagcttggaaaaatgatgatgatgagtcattgggttctaagaagaagtgataacaaagattcttgctttctttttttgttgttgttgtaattaggagatgaacttaccaaatgtaatatcaagagatttgaacaatgtttcctcagattaccgttaatcatgtctagtctctactaanaaaaaaaaaaaaaaaaaaaaaaaaaaaaaaaaaaaaaaaaaaaaaaaaaaaaaaaaaaannnnnnnnnngggggggcccctntaaaggggccccgcttatgaaacgccaaatctcacgtacataggtctctaatagcatcaccttttttaaaggcgccggccgtcgtttacaccgcccggattggaaaacccctggagtggcaaacttatgg

SEQ ID NO: 85661 - DNA, 464 bp, Arabidopsis thaliana columbia
  unsure (1)..(464): unsure at all n locations
attcaaactaactctgcaaaagaaaaaaaaactcagagcagaggagatcgagagagacaaagagagacaaagagagagagagagagagagagagagagagagagagagagatcttcaacaagcaatgtctatatccatggcgttattctctccgccgatctcttcctcacttcaaaaccctaatctcatccccaagatctcaacctctcttctctccaccaaacgtttctttctaatctccgtccctagagcttcctcccggcaatcggtacggctttcccccgtcgtgaaaattccgaagcctgcgtctgtagctgtagaggaagttccggttaaatctccgggcgggaaagntcctccgnttcttnaaacggnggcgttggaggtgannggctttttggggtcnnnngcggtatcaaatttcaaaatcngngtgggttnatgggncttgggtctaaacantt

SEQ ID NO: 85662 - DNA, 1169 bp, Arabidopsis thaliana columbia
atggccgttcgcagtaccgcacctgaatttccggtgcgccccacgcgtccgaactctgcctaagaaaaaaacgctcaatcgctgaaaaaaaaaaaaaaactcagagcagaggagatcgagagagacaaagagagagagagagagagagagagatcttaacaaaaaaatgtctatatccatggcgttattctctccgccgatctcttcctcacttcagaaccctaatctcatccccaagatctcaacctctcttctctccaccaagcgtttctctctaatctccgtccctagagcttcctccgacaatggtacgacttcccccgtcgtggagattccgaagcctgcttctgtggctgtagaggaagttccagttaaatctccagccgaaagctcctccgcttctgaaaacggcgccgttggaggtgaagcgactgattcgagtactgagacggtaatcaaatatcagaatgcgaagtgggttaatggaacttgggatctgaaacagttcgagaaagatggcaaaactgattgggattctgtaatcgtttctgaggcaaagaggagaaaatggcttgaagataacccggaaacaacgagtaacgacgagcttgttgtcttcgatacttcgattattccatggtgggcatggatgaagagataccatttacctgaagctgaacttctcaatggtcgtgcggcgatgataggattctttatggcttactttgtcgatagtcttactggagtaggacttgttgatcaaatggggaatttcttctgcaagacactattgtttgtggctgtggccggagttttgtttattcgtaagaatgaggatgtggataaactcaagaatttgtttgatgagactacattgtatgataagcaatggcaagcagcttggaaaaatgatgatgatgagtcattgggttctaagaagaagtgataacaaagattcttgctttctttttttgttgttgttgtaattaggagatgaacttaccaaatgtaatatcaagagatttgaacaatgtttcctcagattaccgttaatcatgtctagtctctacttaaaaaaaaaaaaaaaaaaaaagggcggccgctctagaggatccaagcttacgtacgcgtgcatgcgacgtcaagctcatcgaaggtcacggaatcca

SEQ ID NO: 85663 - DNA, 907 bp, Arabidopsis thaliana columbia
  unsure (1)..(907): unsure at all n locations
aaaacgggcccccccgtttgaaagggtaaaaaccgactctaattcgaaaggttcttaaaaccgggttaatccaaattatccaaaattgcgaaagtggggttaaatggaaccttgggaatcctgaaaacagttcgaagaaagaatgccaaaacctgattgggtttctgttatcgtttctagggcaaagagagaaaaatggcttgaaaataccccggaaacaacgagtaacgacgagcttgttgtcttcgatacttcgattattccatggtgggcatggatgaagagataccatctacctgaagctgaacttctcaatggtcgtgctgcgatgatagggttcttcatggcttactttgttgatagtcttaccggagtaggacttgttgatcaaatgggaaatttcttctgcaaaacactcttgtttgtggctgtagctggagttctcttcatccgtaagaatgaagatttagacaaacttaaggatctgttcgatgagactacgttatatgacaaacaatggcaagctgcatggaaagagccagattcatcaacagtttcttcaaagaagtgaacaagttcttacaatctttcattttcctttttttgttatgcaataatctgtgaatcagtgaaagtttatctctactgaactactgatcttcagattttgtaatctttctgctttaaaaatctctatgaagtagtctcaaagataatgtatcgaaggtctttgacttgtaaagcagacctatttcgttttgacgcttgatagtttaatcaataagagattttattttttttaaaaaaaaaaaaaaaacccaaagnnnnnnnnnnnnnnnnnnnnnnnnnnnnnnnnnnnnntnnnnnnnnnnnnnnnnnnnnnnnnnnnnnnnnnnnnnagaaatcg

SEQ ID NO: 85664 - DNA, 768 bp, Arabidopsis thaliana columbia
agaaaatggtggtcaaagtatatgggcagataaaagcagctaatccacaaagagtattgctctgctttttggaaaaagacatcgagtttgaagtaattcatgtcgatctcgataaacttgaacagaaaaaaccacaacatcttcttcgtcagccgtttggtcaagttccagctattgaagatggatatctgaagctttttgaatcgcgagccatagcgaggtactacgcgacaaagtatgcggaccaaggaacggacctattgggcaagactttggagggacgagccattgtggaccagtgggtggaagttgagaataactatttctacgctgtggctctacccttagttatgaacggcggtctttaagcccaagtcttggtaagccatgcgccgtcgctttgggttgaggggctaaaaggtcaaagttcgacaaggtcctggatgtgtatgagaacccgttagcttcgaaccggtacttgggcggtgatgaattcacattggctgatttggcaagtcatatgcccggtatgggatttatcatgaatgaacccagtttgagtggtttggttacgtctcgagagaatctcaaccggtggtggaatgagatttcggctagaccggcttggaagaagctcatggaattggctgcctattaatttgtctagtagttcttgtagtcctccgttaatggcttgagtcaagccgcttgacgcttgtactccattcaaatatttgatgatatactaatttaaatttggatcgtcta

SEQ ID NO: 85665 - DNA, 550 bp, Arabidopsis thaliana columbia
  unsure (1)..(550): unsure at all n locations
cagtccngtccggaatcccggncgccccagggnccgccgggattcaagcccccccaacttaggccaggtggttttccaccagcttttgccagggaatgttgtaaagcccgaagagtgggaccaggtttgggacccaaagagagttgatataacccggcctgatgttttacttgcgtcgagctggcttgacccaaggctgttatggccattgttagtgacacaagcagcatgagtgatgcgcttgcacttcttggtggtgacgacattgggaacagttacgtgactgttgggtcatcatcaggtcaagcaccacgaggcgtcgggtcttatggatggaccaatatgccttctgtttggtcgctgtaacaaaatgaaccatatcacacaattttgaacctttctgtattttcatgcaaccctggcttacatgactttgggggtttgttaatagttgtagggaaggatttgtgggcctttggtaaaaatttggattttcttcacctgatttttcttatacttgaaggcatttatatatactcatttcttgttc

SEQ ID NO: 85666 - DNA, 616 bp, Arabidopsis thaliana columbia
cggaagcgtgggcgcagtagggttgaagcggatagtacgccacctctatctctctctcaccctatcgaactcgcgaagaacatcttcttcttcttcttctccgtcttcgtcttcgcgagctctctcagtagcgcaataaaatgggggcttcgcttcctcctaaggaggccaacctcttcaagctcatcgtcaaatcatatgagactaagcagtacaagaagggactcaaggcagctgatgccatattaaaaaagtttcctgatcatggagagactttatcgatgaaaggactgactctaaactgtatggaccgcaaaactgaagcatatgagcttgttcgacttggagtgaagaatgatatcaaaagccatgtttgctggcatgtgcttggtcttttgtaccggtcagacagagagtatagagaagcaatcaaatgctaccgaaatgctcttagaatagatcctgataaccttgaaatactcagagacctctcacttctgcaggcacaaatgcgggacttatccggttttgtggagaccaggcagcagcttttgaaattgaagcctaatcaccgaatgaactggattggctttgcagtctctcagcatttaaacgc

SEQ ID NO: 85667 - DNA, 879 bp, Arabidopsis thaliana columbia
  unsure (1)..(879): unsure at all n locations
cgcgtccgcccacgcgtccggttacctcgatgttaagcaaagactcaaagctgctcaagttgttcgttctctcctgaggcctaatagctacgtcattgttgtggagcatgatctcagtgttcttgattacttgtcggatttcatttgctgtctgtatgggaaaccaggagcctatggtgtggtgactctccccttctctgtcagagaaggaatcaacattttcttggctggatttgttcctacagaaaatttacgttttagagatgaatctttgaccttcaaggttgctgagactccacaagaaagtgctgaagagatacagtcgtacgctaggtacaaataccccacgatgaccaaaactcaaggaaacttcaggttgagagtgtcggaaggtgaattcactgactctcagattattgtaatgcttggggagaatggtacagggaagacaacatttattcggatgctggccgggttgttgaaaccagacgatacagaaggaccagacagagagataccagaattcaatgtttcgtataagccacaaaagatcagcccaaagtttcagaattcagttaggcacctgctacatcaaaagattcgagattcttacatgcatccacaatttatgtcggatgtgatgaaaccacttcagattgagcagttgatggttcaagaaggttgtcaatctctccaggagggggaatttcaaagggttgcattaacttctgtggcctcggaaagccttcgggtatnataccctgatncggtggngccaagtgnaatatntcgnttntaggcaacggnttttttnnttnntaaaggcnataaaggnggttttttttcccgnaaangaaaactncanttntngtcggggat

SEQ ID NO: 85668 - DNA, 951 bp, Arabidopsis thaliana columbia
  unsure (1)..(951): unsure at all n locations
nnnnnnnnnnnnnnnnnnnnnnnnnnnnnnnnnnnnnnnnnnnnnnnnnnnnnnnnnnnnnnnnnnnnnnnnnnnnnnccacgcgtccgcccacgcgtccgcggacgcgtgggattcgagattcttacatgcatccacaatttatgtcggatgtgatgaaaccacttcagattgagcagttgatggatcaagaagttgtcaatctctcaggaggagaattgcaaagggttgcattaactctgtgcctcggaaagcctgcggatatatacctgatcgatgagccaagtgcatatctcgattctgagcaacgtattgttgcttctaaagtcataaagcgatttattctccacgcaaagaaaactgcatttgtagtcgagcatgactttataatggcgacctatttggcagaccgggtcattgtgtatgaaggacaaccatccattgattgtactgcaaattgtcctcaatcactgctcagtggaatgaatctcttcttatctcatctgaacatcacattcagacgggatcccaccaatttcagaccaagaatcaacaaattggagtcgaccaaagacagggaacagaagtctgcaggctcatactactacttggatgattaggacaactaccaagagaatatagggcattgttcgaattccagaagggtcttttgctcagaggaagttgatctatgagctcggaatattttacgcagccatctgttttccgagtgcataagcacagatgtttctttctggtcaagcttttaattgttgtttcatcagttttacttctacattttctctctcacagcttttattaactgagcaataaaagtttaagaatctgtaacctttttttctttttggctttgtacttcctgagttgatgatttcaacatttactgtgatgttactactttggattttacaatctattgcctatttttac

SEQ ID NO: 85669 - DNA, 381 bp, Arabidopsis thaliana columbia
gccttttctcgatttcaaaactgaaagataaaaacagagagagctctagggtttcaaattaaccagagggaaacaacgaagaagaagaccaattctctctctttctcttcctctttttttttttggtttccctctgattccaaacacgattattttttctttttctttctcttttttcttttgcttttcgtttaccagaaaaagcgataagagaaaaattataggtgggtctgttattttcccggaagttatcattgagattcaataagagaaggagatatcattagctttcctggaaaaattcgacttttgggtttagttttcgtgttcttggtggttcaacggtgaacgagctctatattggcgctagttttggctatc

SEQ ID NO: 85670 - DNA, 497 bp, Arabidopsis thaliana columbia
  unsure (1)..(497): unsure at all n locations
ttctgataaacctcgtggagatgatgttgagaaagcacgagacaaatccttggaacgtcatggtagagaacgctcagttgagaagggtctagataaaggaacaactaggagttatgatagaaacaaggatgaaagaaacaaagatgatagangcaaactncgtcatagtgaagcatcacttgagaaatctcatcctgatgaccattttnattctcaaggtttacccccacctccacctttacctcctaacatcattccacattctatggccgcaaaagaagacctcgaaagaagggctggcggtgcaaggcattctcagaggctttccccgcggcatgttaggaagagaggaacgccgctctttaagggaattttttcagtttctgtgggtgatgcaaaacggtagaagggatgatgatattaggggcccgaagcgagatnaccntggaacaatcactgttaagggnggngganggggaaaggggaaggggnaagag

SEQ ID NO: 85671 - DNA, 1497 bp, Arabidopsis thaliana columbia
aggaatcccacctgatactcagaaggagacctcggaacaagaacagaagacagtaaaagaaaccctggtttcagcttatgagaagaacatttctactaaactgagagctgaactatgcaatgcggaatcccacagctatgaatacaccaaagctgctggtaattttcactttttgaagtagttttgttatattctgcttctgctcttttacaccactaataatctgatgttatctgttctttaaatggagcagccaaaaacctcaagtcagaacaatggtgcacaacttggtggtatcagttcacccggctcctcccacgcggccgcagagagaggagattcgaatctttcaacaagctcaggattttccaagtcatcagtgttgcttttcttggtggccttttatggtggcatactccaaaatctcacatccaagatagaactgctttgctcttcttcttctcggtcttttggggcttctacccgctatacaacgcggttttcacatttccacaagagaaaagaatgctaatcaaggaacggtcttccggaatgtaccgtctttcctcctatttcatggctagaaacgttggggacctgcccttggaacttgcccttccaactgcttttggtgttcataatttacttgggatggggggacttaaacctgacccaacaacgtttatcctctcgctactggttgttctctattctgtccttgttgctcaaggtcttggcttagccttcggtgctctgcttatgaacatcaagcaagccacaacgttagcatctgttactacactcgtttttctcatagccggaggatactacgtgcaacaaattcctcccttcatcgtatggctcaagtacctaagctacagctactactgctacaagctgcttttgggtattcaatacactgatgacgactactatgagtgttcaaaaggagtctggtgcagagttggagacttcccagcaatcaagtcaatgggattgaacaatctctggatagacgtgtttgttatgggagtgatgttggtgggttatcggctcatggcttacatggcactgcatcgggtgaagttgcggtaaacgtgcagccgaaggtaacaacaactaagtaactccaagaagctccaaagaaaattttccccactgcaaccaaggaataatagtagtattagaaaagataaaagtcgtcgaattttggtcgattttacttacgtatccgagatatatatccgacgactttctttttattttaggctagatgatgatagtactcctaagtttgagaataaaacagtgagataatgtatgagataagaagggaaaccaagtatatactaattcccatttgcaaaaacagtgactaaactttcggtccactcttccatggaaatgattgttgtaaaaaaaaaaaaaaaagggcggccgctctagaggatccaagcttacgtacgcgtgcatgtgacgtcatagatcttctatagt

SEQ ID NO: 85672 - DNA, 377 bp, Arabidopsis thaliana columbia
cccacgcgactggcttctcaacaatggcggctattccttcccacaacaaccttcttaccatcaaccacaagaactccataaccggttcttcttccctaaataccaatttctcagaaatcagttttcccgccaaattccgagtagctacgagagctttgtccagaaccgacgagtcgtcgttatccgccgtgatgtctcgcctcgagcgagaaaggcgggaaagacaaggtttattaatcgaggaagcggaaggagctggagaactatggatgacggcggaagatattcgccggcgagataaaaaaaccgaagaagaaagaagactaagagacacgtggcgtaagatccaaggagaagacgattgggccgggttaatg

SEQ ID NO: 85673 - DNA, 467 bp, Arabidopsis thaliana columbia
  unsure (1)..(467): unsure at all n locations
gaaagcagctgctgaagtgagttgcttgaaattggcctcctcttccttgcaactggaactcgagaaagaaaagtctactcttgcctctatcaaacagagagaaggaatggcctctatagcagtagcttctatagaggctgaaattgacagaacgaggtcggaaatagcttcggttcagtcaaaggagaaagacgcgaganagaaaatggtggagctaccgangcaacttcagcaagcagcagaagaggctgatgaagcaaagtcacttgctgaagttcctcgcgaagagctacggaaggcggaagaaggagccagaccaagnnaaagccttgggccaagttccattggggggnaagcttttttccttcncaaaagggaattcgagcagcttaaacttncanagngggcttgnccttacttncccctaaaggnttttggggggggntnttncccctttnaagtttttc

SEQ ID NO: 85674 - DNA, 417 bp, Arabidopsis thaliana columbia
actttgccagtatttcatccttaatccattcttgtggtcactttttcgtccttaacccatctagattttgattctaaagtcttgtgaatcggcagcggaagaagagtgaattgttcatccttatcttgccatggctatgtatattcgtgtgaagcgcatgaaaactacttactttatccaatgtgatccaacagagactgttttggatgttaagcaaaaactgtttgctctcattgagcaaccagttaacaatcagcgtctggtcttaatgtctaccgaagaagtattagaggattcgaaatccttagcagatcagaaggttgagaatgatgcagttgtggctttgactttgaagaaagatgataacgagtttgaggatgtcaacattgcacagcccaacgacttctcactttcatg

SEQ ID NO: 85675 - DNA, 449 bp, Arabidopsis thaliana columbia
  unsure (1)..(449): unsure at all n locations
cccacgcgatccagtctctttctccgtcgccaccgttcctaaaacgtctcccgtcttcttctaatggcgatcaatcgtagctccgatcatgaatccgacgaaaacacccgtctttaccatccttaccagaactaccaggtcccgatcaaatctcagtatctatacaagcttccgacttctccggaatttctattcacggaagagtctctcaagcagcgtcgatcatggggagaaaatctcactttctacacagggacgggttatctagccggctctgtagccggtgcttcagctgggatcttctctggtatcaagagtttcgaaaatggagacacgacgaagctgaaaatcaacaggattttgaattcgtctggtcaggcaggtcgtaccttcgggtattagggggttggnntttttngggtnaacctnngangggnttttaaaaaggg

SEQ ID NO: 85676 - DNA, 537 bp, Arabidopsis thaliana columbia
  unsure (1)..(537): unsure at all n locations
nnnnnnnnnnnnnnnnnnnnnnnnnnnnnnnnnnnnnnnnnnnnnnnnnnnnnnnnnnnnnnnnnnnnnnnccacgcgtgcgcaattttcctctctttacccagaagatttcatcagaacctcttcgccattaatgggttagtgttactttccccaaatgtagaattaagggtttagggtttttagttccaaattcaattcttaacgaagcaatttcaaatctttttttcatttcagttacagcgatgttttgtgcatcatcttctccaattacatctcctctctacccaaaagcttataaattttctcaaacaaaatcgaattcgaagagattttcctctctgcgtgcttcgttgcctgtttctgataacaagcttcttaaatttgaatacacaccatggcttattgttggacttggtaaccctggattaaagtattacggaacaaggcataatattggttttgagatgattgatcataatagctcgagccacggatttttttaataaacacatttaaccccagggttttatgtgg

SEQ ID NO: 85677 - DNA, 469 bp, Arabidopsis thaliana columbia
aatcttgttcctttttgctctctctacccgattcacccactctgtttctcgattagtacggtgaaaactcactttggtttggtttgattcctctttagtctgtttttcgatttcgttttctctgattggtttggtggtgagatctctatcgtagtttgtcctttgggttaagatatttcatttgattggtgggtttgttttattgaagcttattgttgtgaaagttggagtctttctcagtttttaggttgaattattaagagaaagggaagatttttggtgtgaagttaggttatttggggtttgagaagtttgcaagtgaaaaaggttgtgaattgtgagtgatgaagagagggaaagatgaggagaagatattggaacctatgtttcctcggcttcatgtgaatgatgcagataaaggagggcctagagctcctcctagaaacaagatggctctttatgagcagct

SEQ ID NO: 85678 - DNA, 952 bp, Arabidopsis thaliana columbia
  unsure (1)..(952): unsure at all n locations
nnnnnnnnnnnnnnnnnnnnnnnnnnnnnnnnnnnnnnnnnnnnnnnnnnnnnnnnnnnnnnnntgacctttaggacccacgcgcccgaacgttattaaccgattaaagaacgacatcaaattgttgtactctttgggagcgagtaaattcgtggttcaattgctagcaccattgggatgcttaccgatcgtgagacaagaatacaaaaccggcaacgagtgttacgagctgctcaatgatttggccaaacaacataacggaaaaatcggtccaatgttaaacgaatttgctaaaattagtactagcccctatggttttcagttcaccgtcttcgatttctacaacgccgttcttcgtaggattgcgacaggaagaagtcttaactacagattcttcgtaacgaatacttcgtgttgcggtgttgggacacacaatgcatatggttgcggaaagggaaacgtgcactcgaagctatgtgagtaccaaagatcttacttcttcttcgatggacgtcacaacacagagaaggctcaggaggaaatggctcatcttctatatggagccgaccctgacgtggtccagccaatgacggtccgtgagctaatcgtctacccaactggagaaactatgcgtgagtattgggaacccaacaacttggctatccgtcgtcggccgtctcgtgacttttacttgggcctcgccgcctattattagttggatggctttgagctgaatatttcgatatatatgagagctattgtcttataatgtataatcgatatcgtaacgtggaattatgcctatatgacgtcaaattatgcctttgacgttgtcgaataaactgcttttgaatatctgttgtatcctctaattttggtaatctatgccaaatagaataaatttataattgtcgttgtttgtaccaaaaaaaaaaaaaaaaannnnncaagc

SEQ ID NO: 85679 - DNA, 428 bp, Arabidopsis thaliana columbia
  unsure (1)..(428): unsure at all n locations
agcggcggaggattctccgaatctaagtctcagtccaaggctgatgaagtcgatagctgggtctccactaagccatcggagccccggagattcgtttctagcaacggcggcggcggtgacagatttaagaaaaggggaagttttgaatccttgtntagaaaccgggattctnaatacggtggtggtggtggttctaaatcggatacctggggaagaagaagagaagaaagcggtgctgctaatggctcgccaccaccgagcggtggttcacgcccaaaattggtgttacagccacgtacacttcccgtggccgttttggaggtcgtaaacgccggagagtcccggtctttggtcatttttnggggaaaccttaaaggtgcttaatcccttttttggganacgcaaagccctttgggagggaagttntt

SEQ ID NO: 85680 - DNA, 669 bp, Arabidopsis thaliana columbia
  unsure (1)..(669): unsure at all n locations
atcgaaaatnagatgagagagagaggaggagtctctcatcgtgagtagggcttttaactccctccctactttgcctacttcttcttcttcctctgtggccactctacactgtccacacctacttcaagacacctttctcatccttgagatcggcgtcagatcctccgccgcttctcctcttcactatctccgtgttaaagatgatggaatctggcgctggtttcgtggccatggaagagaggatctctcctggaagtttcttccagtatcctctttctggattccgtgcttctcctaatcgatccccttgtcctccctctgatcgtgaaaggtacttgactgaattattgcaagagagacaaaagttgggtccctttttgcaagttatgccaaattgctgcagactgcttaatcatgaaaatcaggagggtctctagttttcctgatcttgatagatatgagcatggcagtccatttagatcccttggtcagccgacaaatgggaagctttgatttagagggattggtcgatgatgcaaagccgaggaaaactgtcaaccttccagagagcttcttccattttggcggggccttncccaattggggcttggttttgggattcccgggnnntccctaaacccnccccatttttgaaaaaaggggttnana

SEQ ID NO: 85681 - DNA, 878 bp, Arabidopsis thaliana columbia
cggaagcgtgggaaaaatcatccggagctgttccctttggaacaatgtttgctctgatcttcctctggtttggaatctcggtccctcttgtctttgtcggcgcttacctcggattcaagaagccaccgctcgatgaccccgtgaaaaccaacaaaatcccgcggcaaatcccggagcaagcttggtacatgaacccaattttctcaatcctcattggaggaatcttaccgttcggtgcagtcttcatcgagctcttcttcatcctcacatccatctggctcaaccagttctactacatcttcggtttcctcttcctcgtctttgtgatccttatggtcacctgcgccgagatcaccattgttctctgctacttccagctttgcagtgaagactatctctggtggtggaggtcttacctcacctcaggctcttctgcggtctatctcttcctctacgcagccttctatttcttcacaaagctccagatcactaagctcgtctcagctatgctctactttggatacatgctcatcgcctcttacgcgtttttcgtgctgaccggaacaatcgggttctacgcttgtctctggttcacaagactcatctattcctcggtaaagatcgattgattcagaaaaacattcaaggagaagtacggaagaaagaaggcaagggaatataggtaattgattttcacaaggtttgttttttgctcaaataggggggctcttcctggttttcgctctgggttttggtttacaaggaaccaaaaggaaagggttttatatggaaaccttttctttttttagagtgtattctgtttgattttcccaaatgtcactttggattatcttccttaattgacaattatgtgattc

SEQ ID NO: 85682 - DNA, 527 bp, Arabidopsis thaliana columbia
  unsure (1)..(527): unsure at all n locations
aaatccgattgnaagaaaacactaacttcaaattcgagatctgaattagggattctagaggatgacgaaggattttccaattccaccggttgttttccccaccagtggatcatctccggccaccgcaaatnttcagcaacgccgagttcccacagctccttaccaaccaccacgtcaatcctccgcttcatcttcaatccctttcattccatttgaaatcggatccgccgccgtttcaatgccggcgggaccattcgacggaacaatcgcttcatctgcatctttcggtagagggagtctctgcttcggttnagggttgaggagcctttantcggnnggactcgggtatccatccagttcaaaatntggaagaaaacttagctcggtttctaaanccttttnggatnaatcagatttncaaaaaggttnagatttttttgggccgtttttttaaaacctggggntttgttaatnaaaattnctcgtngggaganaaanttngggtnaaacttggtggggttnttttt

SEQ ID NO: 85683 - DNA, 1537 bp, Arabidopsis thaliana columbia
  unsure (1)..(1537): unsure at all n locations
atgatcctgccnnnnnnnnnnnnnnnnnnnnnnnnnnnacccacgcgtccgcccacgcgtccgcccatttctctccttctccaccagttttcccccaatcgctcctccttaaaccctaacatttttgcttcccctgtttcgattctcgagagttatcagagatgagttcggacgatgagagagacgagaaggagctgagtcttacctctcctgaagtcgtcaccaagtacaagagcgccgctgagatcgttaacaaggcgttacaggttgttttagctgaatgcaaaccaaaagctaagattgttgatatctgtgagaaaggagactcttttattaaagagcaaacagcaagcatgtacaagaattctaagaagaagattgagagaggtgttgcgttccctacatgcatttctgtgaacaacactgttggtcatttttcaccgcttgctagtgatgagtctgtgttggaagatggtgacatggttaaaatcgatatgggatgtcatattgatgggttcattgcccttgttggtcacacacatgttcttcaagaagggcctcttagtgggcgtaaggctgatgttatcgctgccgcaaatactgcagctgatgttgctctaaggctcgtacgtcctggaaaaaagaacactgatgtaactgaagctattcagaaggtagctgcagcttatgactgcaaaattgttgaaggtgttctttcccaccagctgaaacagcatgtgatagatggaaacaaggttgtgcttagtgtatccagccctgaaacaactgttgacgaagtggaatttgaagagaatgaagtctatgcaatagatattgtggcaagtactggtgatggcaagccaaagctattagacgagaagcaaacaactatttacaagaaagatgaaagtgttaactatcagttgaagatgaaggcctccagattcataatcagcgaaattaaacagaacttcccccgtatgccattcactgcaaggtcactggaggagaaaagggcacggcttggacttgtggagtgtgtgaaccatggtcatttgcaaccatatcctgttctttacgagaagcctggggattttgttgctcagattaagttcacagttttgctgatgccaaatggatcagataggatcacttcacatacacttcaggaacttcctaaaaagaccatcgaagaccctgagatcaaagggtggttagctttgggcatcaagaagaagaaaggtggtggaaagaagaagaaagcccaaaaggcgggagagaaaggagaggcttcaacagaggctgagccaatggacgcaagtagtaatgctcaagaatgagtaggaagatttgtctttgtttcttttaaagaatttttgaaacttgaggtacctctttcgttgtatgtttgggtttcaagagagtctcttcttaaacaaaaaaaaacaaacaatagtttaccacctttgtgcatatttttgcacaaagcacttttcatcatcatttctttgcttgtcctaatcttatctcattctct

SEQ ID NO: 85684 - DNA, 809 bp, Arabidopsis thaliana columbia
acccactatagggtaagctggtacgcctgcaggtaccggtccggaattcccgggtcgacccacgcgtccgaacctctctctgctcagcttttccgaccaaaagatccaagcgcaagatcaactcaaaatcaatggattatctcggaatcgacatgagctgcgcgatcggatctctccggaacggtgacttcccggagaaagattgtcttcttcctctaatttcaaagcttctcggttattgcctcgttgctgcttcaatcaccgtcaagctccctcagataatgaaaatcgttcaacataagagtgtacgaggcttaagtgttgtggcatttgagcttgaagttgttggttacacaatttcacttgcttattgtttgcataaaggtcttcccttttcggctttcggcgaaatggcttttcttttgatccaagctttaatcttggtggcttgtatctattattattcacaaccagtacctgtcacaacttggattagaccacttctatattgcgctgtggcgccaactgtgcttgctggacagattaatccgacgcttttcgaagctctttatgcttcacaacatgcgatatttctctttgcaagactccctcagatatggaagaactttaaaaacaaaagcactggagaacttagtttcttaactttcttcatgaactttgccgggtcaatagtgagagttttcaccagcttacaggaaaaagctccaattagcattcttacgggtttcgctcttggagtcgtcaccaacggaagcatcctgacgcatattctcttgtactcgaagcct

SEQ ID NO: 85685 - DNA, 735 bp, Arabidopsis thaliana columbia
atgatctccagctccctacgactcacttagggaaagctggcacgcctgcaggtaccggtccggaattcccgggtcgacccacgcgtccgtacggctgcgagaagacgacagaaggggatctaatcacttttgcaattcaccggaacttagccgacgagcgctgatcaaatcaaccggagaagcaaagctatagatctactatctccttcacagttgctatcagagatgtataataatatgggaccccggcctggaatggcaatgcctcaggcaaatcctcagcctagcccatttgggaatccgttctctggacctggctctggacttatccggagtggcttgggagcttatggggagaagattttcggttctagctctgagtatgtgcagagcaacataagtcgctacttctccgatcctcaatactattttcaagtgaatgaccagtatgtgaggaacaagttgaagattgttctacttccattccttcacaggggacactggactcgaatatcagaaccagttgggggtagactttcatacaaaccaccgatatacgatataaatgcaccagacttatacattccgcttatggcctttggcacttacgttgttcttgctggtttgtcactaggactctatggaaagtttactccagaagctctgaactggctttttgtgaaaggaatggttggctggtttttgcaagtgatgctgctgaagataacattgctt

SEQ ID NO: 85686 - DNA, 1969 bp, Arabidopsis thaliana columbia
atttttcctattttgaaaaatttatttgaaatctcataatttacgttaatggagattgctccatctacaagtagattcaagctctacgatcaattcgagcttctggagtttcctgacaagtacgtcgtcaaacccatcgaatcgcctgaggaaggcttctccgtcaatcggcgcgatggcaatatcaaacctcttgatgaaaacgcatcttctgggagtcctactagagtctctactatctatggcgtaggaggaactattaggctcttagcaggaacatacttgctagttataacgtctcgggaggaagttggaaattttctcggtttaccgatttttagagttacggctatgaaattcttaccttgcaatgaggctttgaggtttgctactgctcaagaaaaaaaggacgaaacatattttaggactctgttacaagcacttgagacaacccctggattgtatttttcgtatgaaacagatctaacattgaatcttcaaagaaggtgcaagctagctgaaggttggaatcgtaagcctatgtggaagcaggctgaccctcgatatgtttggaactggcatcttttggaggacttaattgaatgcaaactggatggttttattattcctatacttcaaggaagttaccaagttgctgagctaaagctcaagaattctcctgctgtggtatcgataatgtccaggcgctgtacacgacgtctaggtacacgtatgtggagaagaggagccaatcttgaaggggacgctgctaattttgtcgaatctgaacaaatagtggagattaatggtttcaagttctcattattgcaggttcgaggttcaatcccacttctttgggagcagatcgttgatttgagttataagccacggcttaagataaataagcatgaagagacgccaaaagttgtacagcgccatttccatgatctttgccaaagatatggagaaattatggcagttgacctaacagatcagcatggagatgaaggtgcattaagcaaagcatatgccaccgagatggagaagcttcctgatgtgagatatgtctcctttgacttccatcaagtctgtggaactacaaacttcgacaacctgggggtactgtatgagcagattggggatgaatttgaaaagcaaggatatttccttgtagacgcagacgagaacatcctagaagagcagaaaggagttatcagatctaactgcatcgactgtcttgaccgcacaaatgttacccagagtttcatgggccaaaaaagtctgaatctacaacttcaaaggatcggagtgtgcgattccacagagtgtatatccacgttcgaagatgattacacaaagttcagaacaatttgggctgagcaaggggacgaggttagtttgcaatatgccgggacatatgctcttaagggcgacctcgtaaggtacgggaaacagactatgactggagctatcaaagatggcctcagtgcaatgtcgagatattatctgaataatttccaagatggtgtaaggcaggatgctttggacctcataagtggtcgctacacagtgggcacacacagcccttcacaactccagcccattggatcacaaccgtcttttctgccggtagcatcagcattgttgataggtggtgtaacagtgacatctttcacaattcatcaagcgggaagaaacacgcagcagtatctggcgtcggctttgtgggctggagtgactgcaggagttgtggcgatgatcaaagccaatggaaggcacttgacttcaaggcctcgtctttgccatctaatttgattccatttgaattgagattatttgcgtctcacattcttcccaaaacccacacccactgtccctctttgctttctcgttcaacgtccgcacaaaccaaaaatcgaactaaaagtctatattactgaacttctttattcaatgcaatcagttttat

SEQ ID NO: 85687 - DNA, 412 bp, Arabidopsis thaliana columbia
  unsure (1)..(412): unsure at all n locations
gcaactnttgtacgacttcacgtaattactcagagtattagggagttcattaatgaagtcaacacattggcgtcgctgcaacaccagaacctttgtaagctggtaggctatcatgctcgtgacggttctgacacaagaatgttggtgtacganaggcttgctctgggcagcttggaccgtttactgcatgggagatcagatgggcctcctcttgattggaacactagaatgaagattgcactatgcgcagctcaaggtctaaccttccttgcacgaaaaaaaggcccttttccaggcaatgttcaatgaattttcgacgggcaaatatccaagtccgtatagtttcagccccaagttctcaggntacggttntccagncatgngccttaaaacagngccttttnttgtccgg

SEQ ID NO: 85688 - DNA, 597 bp, Arabidopsis thaliana columbia
cccacgcgtccgctttgcaaatccttgaagaaatccaaaatccatagcaatggcgacttcgatagctcgattgtctcggagaggagtcacttctaacctgatccgtcgttgcttcgctgcggaagcggcgttggcgaggaagacagagttacctaaaccgcaattcacggtgtcgccgtcgacggatcgtgtgaaatgggactacagaggccaacgacagatcattcctttgggacagtggcttccgaaggtagccgttgatgcttacgtggcacccaacgttgtgctggctggtcaggtcacagtctgggacggctcgtctgtttggaacggtgccgttttgcgcggcgatctcaacaaaatcactgttggattctgctcgaatgtacaggaacggtgtgttgttcatgccgcctcggtcttccccaacaagggttaccagcagcggcaataattcgaccaggtatgtgacagtaggtgcctacagtctttctgaggatcatgtaccatcggaaccagagtgcatcatcggtcaacactcaatactaatggaaggctcactggttgagacccggtcaatcttggaagcgggttcag

SEQ ID NO: 85689 - DNA, 658 bp, Arabidopsis thaliana columbia
  unsure (1)..(658): unsure at all n locations
aaatccagtaccacnnactttcaanctggacgtcaancgtttctaagggtgcncccngcagctnttgagccggncagatgccccaggcaacccatttnagaaagccatgnattcntcaaaancgagagaaaccctcgctaggtcggnaataccttggtgggaatggaattctagcagatttttctggtagccaaaggctttctgtgacccttaaccccatttatcacatacgaagggacttatgatataaacacccttagtaaccagggagggaagtaacgggtattgcgagtttcaaaccggctacacgtagccgtctctaagttaaaaggttgtccattgtttgttgttgtctgttggttagtcccgcgcgtccgatgtggggtttacatctacaaatgtgccaaataatctgacccaaaaagatttagggtccaatgggggaataatatcgttgttgcaaaacttaatccagttattgcttcttgcaatatggattcgtcttgtggcttgtactgggggaaataccatttgttaaccttttattaattcaaattgccaatgtcaataactaaaaaaaaaaaaaaaaaagggcggccgctctagaggatccaagcttacgtacgcgtgcatgcgacgtcatagtattctatagtgc

SEQ ID NO: 85690 - DNA, 523 bp, Arabidopsis thaliana columbia
atacgactcacttagagaaagcacgtacgcctgcaggtaccagagtccggaattcccggtttcgacccacgcgtccgcacgttgaaggaggttggaaaattaatggacaaaagcgttggattggaaacagcacctttgcagatctgttgatcatctttgcgaggaatacaacaactaaccaaatcaacgggtaagtcagattattggctttcttagatctctcagattttgtatcttaggcgtagaggtcgttcccagaaaactgaaggtaatgaggtggctcttgatttcatcttatggtagtgctgtaaaaatccattttcataaagaatgctaaataggttgctacgcaattgaatgttctgaacaataaatttggtaaggaccgttatcaagtgcatactggactaatgtctggctcctcattcatcttatatagactatatttcctgcattagaaacttatcagcaaccctctttcagattcataggcaagacagaatgccctggcctaaaggctact

SEQ ID NO: 85691 - DNA, 1843 bp, Arabidopsis thaliana columbia
  unsure (1)..(1843): unsure at all n locations
atgatactccnnnnnnnnnnnnnnnnnnnnnnnnnnnnnnnnnnnnnnnnnnnnnnnnnnnnnnnnnnnnnnnnnnnnnnnccacgcgtccgcggacgcgtgggcacgaagccaaagaacaatttctccgtcactatcataaccatggcggtgctttcatctgcagatcgagctagtaatgagaagaaggtgaagagttcatactttgatttgccacctatggaaatgtctgtagcatttcctcaagcaactccagcctctacatttccaccttgtacttcagactattatcatttcaatgatctactgactccggaagaacaagctatccggaagaaagtgagggaatgcatggagaaagaagttgctccaataatgacagagtactgggagaaagcagaatttccattccatatcactccaaagcttggggctatgggtgttgctggtggctcgatcaagggttatggatgtcctggtctctccatcaccgccaatgcaattgccacagcagaaatagctagagttgatgcaagttgttcgactttcattttggtgcattcttctttgggcatgctcactattgcactctgtggatcagaagcacagaaggagaagtatttgccttctttggctcaattgaatactgtggcttgttgggctttgacagagcccgacaatggaagcgatgcaagtggtctaggaacgactgcaacaaaggttgaaggaggttggaaaattaatggacaaaagcgttggattggaaacagcacctttgcagatctgttgatcatctttgcgaggaatacaacaactaaccaaatcaacggattcatagtcaagaaagatgcgcctggcctaaaggctactaagatcccaaataaaataggtttacgtatggttcaaaatggagatattctactacagaatgtctttgttccagatgaggatcggttacctggggtaaattcttttcaggacaccagcaaggttctggctgtctcacgtgtaatggtggcctggcaaccaatcggcatatcaatgggaatctacgatatgtgccacaggtatctgaaggagaggaaacagtttggagcaccgttggctgctttccagttaaaccaacagaagcttgtgcagatgctgggtaacgttcaagcgatgtttctaatgggttggcgtctctgcaagctgtatgagacgggtcagatgactccaggtcaagccagtttaggaaaggcatggatttcatcaaaagcgagagaaactgcttcgctaggtcgggaattacttggtgggaatggaattctagcagattttctggtagcaaaggctttctgtgaccttgaacccatttatacatacgaagggacttatgatataaacaccttagtaacagggagggaagtaacgggtattgcgagtttcaaaccggctacacgtagccgtctctaagttaaaaggttgtccattgtttgttgttgtctgttggttagtattgatattgtgatgtggggtttacatctacaaatgtgccaaataatctgacccaaaaagatttagggtccaatgggggaataatatcgttgttgcaaaacttaatccagttattgcttcttgcaatatggattcgtcttgtggcttgtactgggggaaataccatttgttaaccttttattaattcaaattgccaatgtcaataacttttggtgaatgtcaaagtgtcaattaagttgtgtttctttgtttaaaaaaagattaaaaggaagggcgaaggctctagaggatccaagcttacgtacgcgtgnnnnnnnnnnnnnnnnnnnnnnnnnnnnnnnnnnag

SEQ ID NO: 85692 - DNA, 751 bp, Arabidopsis thaliana columbia
cggagacaaggaagcagagaaggagaaggagaagaagaagaaggaagaggaagtcaaagctattcggattccagtggtgaggcttaagtttggagaagtagcagaagcgacctcggtggtagttttaccggtttgtaaagcagaggaaggggaaaagaagattcttgaagctccaatggagatcatagccggaggggattttaaggtggttgaggcggagaaaggatggaagagatgggtagtgcttccgtcgtggaacccagtggcagccattgggaaaggcggtgtggcggtttctttcagggatgatagaaaagtgctgccttgggatggaaaggaggagcctttactggtagtggccgatagggtgaggaatgttgtggaggctgatgacgggtattatctcgtggtggctgagaacggacttaagctagagaaaggatcagatttgaaggcgagagaggtgaaggagagtttagggatggttgttttggtggtgaggccgccaagagaagatgatgatgattggcagacaagtcatcagaactgggactgaattaatagaatcaatactcatatgctgtaactgattacggagtcatcatggtcatgtaaaaattttggataaaggtgggaactttttgtttttagattcccaaaaaaaaaaaaaaaaaaaaaaaacaagggcggccgctttaaaggattcaagcttacgtacgcgtgcatgcgacgtcataggttattgtaaaag

SEQ ID NO: 85693 - DNA, 364 bp, Arabidopsis thaliana columbia
gcgaactatacattacattcccttttcttcgtcttcatcttcgtcttcctttcctccttcattcctcttttcttcgtctcccaccatttctgcagaagaagacaaataaaaaagctctcatttatcttcgtggagatctaaaagaaggaggaagacatttcttccctctggatctccaaaaaaaaacgagaggtttgggtggggaaggaaagaaggaggaagaggcaatgtcagctaggtattggtgtcacatgtgttcacaaatggtgaatccagttattggtgccgagatcaaatgccccttttgccaaagcgggtttgtcgaggaaatgagccgtgagattaatggcggcagcagtagcag

SEQ ID NO: 85694 - DNA, 667 bp, Arabidopsis thaliana columbia
  unsure (1)..(667): unsure at all n locations
nnnnnnnnnnnnactatcgggaaagctggtacgcctgcaggtaccggtccggaattcccgggtcgacccacgcgtccgtcatcttcgtcttcctttcctccttcattcctcttttcttcgtctcccaccatttctgcagaagaagacaaataaaaaagctctcatttatcttcgtggagatctaaaagaaggaggaagacatttcttccctctggatctccaaaagtaagaacatttacaagaaacgagaggtttgggtggggaaggaaagaaggaggaagaggcaatgtcagctaggtattggtgtcacatgtgttcacaaatggtgaatccagttattggtgccgagatcaaatgccccttttgccaaagcgggtttgtcgaggaaatgagccgtgagattaatggcggcagcagtagcagtctaagggaggttcaagaccctgagattgattttggtacagaccgtgcattgtctctatggggtccaatcttgcttggaatgatgagtaatcctcgtagacgtagaaggtttaggaggacagagtttggtgtggataatgatgaggtcaatgtatctgatgatgttgatggaaatgacagcgtcgatattgatcgacatcatcatcgtcgtcatcgccacaggcaacaaggtagcagagcattg

SEQ ID NO: 85695 - DNA, 409 bp, Arabidopsis thaliana columbia
cacatatcggagatttgaagccatgggaagaagaaaaatcgagatcaagcgaatcgagaacaaaagcagtcgacaagtcactttctccaaacgacgcaatggtctcatcgacaaagcgcgacagctttcgattctctgtgaatcctccgtcgctgttgtcgtcgtatctgcctccggaaaactctatgactcttcctccggtgacgacatttccaagatcattgatcgttatgaaatacaacatgctgatgaacttagagccttagtaagtaattagctaagaacgtcattctaatattcttctggatgcggtttttggtgttatgaacgatagaagcgctgttcaagccggagaaacctcaatgttttgaactcgtaacaccgaacttaattctctagagttacagtt

SEQ ID NO: 85696 - DNA, 532 bp, Arabidopsis thaliana columbia
aaaaaggagagagagagagagagagagagagagagagagagaaacgaagaaaaaaaaagaagcaaaaaacattgtgggtctccggtgattaggatcttattagggcaccagccttatcggaggaatgaagccatgggaagaagaaaaatcgagatcaagcgaatcgagaacaaaagcagtcgacaagtcactttctccaaacgacgcaatggtctcatcgacaaagctcgacaactttcgattctctgtgaatcctccgtcgctgttgtcgtcgtatctgcctccggaaaactctatgactcttcctccggtgacgacatttccaagatcattgatcgttatgaaatacaacatgctgatgaacttagagccttagatcttgaagaaaaaattcagaattatcttccacacaaggagttactagaaacagtccaaagcaagcttgaagaaccaaatgtcgataatgtaagtgtagatactttaatttctctggaggaacagctcgagactgctctgtccgtaactagagctt

SEQ ID NO: 85697 - DNA, 1212 bp, Arabidopsis thaliana columbia
  unsure (1)..(1212): unsure at all n locations
cnnnnnnnnnnnnnnnnnnnnnnnnnnnnnnnnnnnnnnnnnnnnnnnnnnnnnnnnnnnnnnnnnnnnnnnccacgcgtccgaaaaaaaaaaaaaaaaaaaggagagagagagagagagagagagagagagaaacgaagaaaaaaaaagaagcaaaaaacattgtgggtctccggtgattaggatcaaattagggcaccagccttatcggaggaagaagccatgggtagaaaaaaagtcgagatcaagcgaatcgagaacaaaagtagtcgacaagtcactttctccaaacgacgcaatggtctcatcgagaaagctcgacaactttcaattctctgtgaatcttccatcgctgttctcgtcgtctccggctccggaaaactctacaagtctgcctccggtgacaacatgtcaaagatcattgatcgttacgaaatacatcatgctgatgaacttgaagccttagatcttgcagaaaaaactcggaattatctgccactcaaagagttactagaaatagtccaaaggttagcacaaagacacttttatctccctcttcttctgatgaaaaatacttttttttttcttttcttttggcgaattatgaatacagcaagcttgaagaatcaaatgtcgataatgcaagtgtggatactttaatttctctggaggaacagctcgagactgctctgtccgtaactagagctaggaagacagaactaatgatgggggaagtgaagtcccttcaaaaaacggagaacttgctgagagaagagaaccagactttggctagccaggtggggaagaagacgtttctggttatagaaggtgacagaggaatgtcatgggaaaatggctccggcaacaaagtacgggagactcttccgctgctcaagtaatcaccatcatcaacggctgagctttcaccttaaacttacagcctgattcagaagtttttacaaatttgtaaattataaaaagcttcataataatctcaacctttttatcttcctcgcgccaatgtggaaattaaggttaaaaataaaataaaacagaagctcatgcgaaagaattgtaaaactaagataaagctatagtagatctttattgtaccttcgtagacgatataagatttattcgtgtgttaaaaaaaaaaaaaaagggcggccgctctagaggatccaagcttacgtacgcgtgcatgcgacgtca

SEQ ID NO: 85698 - DNA, 466 bp, Arabidopsis thaliana columbia
  unsure (1)..(466): unsure at all n locations
ttttttaatacaaagtcttatgcatatacagtggcagtctcatacaaatctataagtagagttacaagctgggatacaaaactgtagatacatattaacaagatatttttcggccttttagtgtagggtacttgttgagccagtgacagtcttcgaacgagcacctagaatcattcctcctttgcagctccacattgttggggtggatgaaccgaggggcccatgccggtgtcccatcttcataagagttatgcgttagcctcctcacattagggccatctaaatttcaccgtgaaggtatcaccgtatggctgggaatgatgcggggtcgaaaacggttccgccgagattccagcataatcagaagtgaagacnaaaggattactgtccnggntgaaaaccggggggttgttcccccaccgncccgcttnggagagctccctaaccngtnccgtgggggggacaa

SEQ ID NO: 85699 - DNA, 584 bp, Arabidopsis thaliana columbia
  unsure (1)..(584): unsure at all n locations
cctttgcaggcacgccaggttacgtaccaccagagtattaccaaagtttcagatgtaccgcaaaaggcgacgtgtactcaatcggagtagtgatgctcgagatcttaagcgggaaaagaccaacggataaagaagagtttngtgatacgaatttagtaggttngtcgaagatgaggccaagagaggggaaccacatggaagtgattgatgaagaccctcctaaaagagggtcccttcggagcctctgaatgagaaagaaggttttgaaggaggagtgattgtgaaagaaatgttgaggtatttggagataccgttacggtccgttgacgatttcccatcaaagagacctaatatgttacaagttgttgcttcgttgagagacctccgtggaagtgaaaataatagncacagtcacagtaatagcttgtaacaacatgaagatctctgtttttttttgttttcctggttttttcaatgcattttttttncctgtgagaatgtgtatgtgtggttgatcaatgattaaaatttcatgatgtatcaagacttaattaatgtaatttaaattctgattcctttaaaaa

SEQ ID NO: 85700 - DNA, 435 bp, Arabidopsis thaliana columbia
  unsure (1)..(435): unsure at all n locations
aaaggtgagcgtcgcagtaaagaccagagggtaagcagtttttatttcttttgtgtgtgtgggtgtttaaagaagatagataaacagtgtttcgatcttctggtctcatcgagatattaaaagaaaatccagattacaaattctttttctatttttttgtggagtttgaatctatccatcttctgagagaagaaaagggaacaactttttttctccatttcacctaaaaaattgttcatcccaagtttctgtctttggtttcatctagtttcactcttggtgattctggaagataagtcgctgagttaaagttgcagatcttgaggttaagagaaagaaagtgagtgttgtgtaatggggggggtaaaagggcccaagaggaagtggnccccannggcanttttttttttcnannggggnnngnggaaaaaggtt

SEQ ID NO: 85701 - DNA, 551 bp, Arabidopsis thaliana columbia
  unsure (1)..(551): unsure at all n locations
aagcaccgtaccaaaccgtagcagcttgagccgaccgagttcgatccgttcgcctagtacaacaccatcacagtcaccaccaacccatccaaaatcatgatgtctccactggttgttgtaattgggttcgtagccatgtgctcggccagcccttcactgtacttcagcggtccacaatactacagcggttactacgcagcccccgccgccgttgtcagcccgatcaagagccaataccacacccaaaacgaattcggacagtacggctacggctaacaacgacggattctccagcaaatccgagaccaagcacggcaacggtctgaccgaaggcggcgtactcgtacgtcgacccggaacggggttnttcagcaattcaaattcgtgtcccacgagaacggtttccgggtatntggtaccaactttgcagtgggttcaaccgttccccgagtagaggttcccgcggtcccgngtcccgcgtcgagtccttattgaagtaaggcggccccgggccggccaaagggttttcagtnggtccannatnaaaacgc

SEQ ID NO: 85702 - DNA, 428 bp, Arabidopsis thaliana columbia
gactcaccacataaagtaaaagtctcatctcttcataaaatagctttaaaccaatcaagtagagtttcttctcaagtctttttattttatttttatcaatggcttcttcagcagtgtctctccaatccatctctatgacaactctcaacaatctttcatgtaatcaacaatttcatcgaagctctcttcttggttcctctaaatccttccaaaatcttggtatctcatctaacggttcagatttctcctatccatcaagtttcactgccaagaagaacctcactgcttctcgagctctctcccaaaacgggaatatcgaaaaccctagaccaagcaaagttcaagaactgagtgtgtacgaaatcaacgaattagatcgacacagccccaagattcttaaaaacgcattcagcttaatgttcggtctc

SEQ ID NO: 85703 - DNA, 513 bp, Arabidopsis thaliana columbia
  unsure (1)..(513): unsure at all n locations
tgaggactgcctttcaggaaggaagctcagatcaactctccgagtctgtccattcacagatattttcattgccaaaggacacattgatctatcctgctcacgactacaaaggtttcgaggtaagtacagttggagaagagatgcaacacaacccgcgtctaactaaagataaagaaacattcaaacccattatgtcaaatctgaatctgtcgtatccgaagatgattgatgttgcagtaccagcaaacatggtctgtgggttccaagatgtcccttctcaagaccaataaaaaaaaactcttacatataatgtttgtcttttatcgatgtcattctatatttaccaaagccaataaaaactcttgagagtaatttctacaataagatttgcttccgttgtagataaaaaaaaaaaaaaaaaacaaaaaaaaaacccaaagggcggccgctctagaggatccaagcttacgtacgcgtgcagnnnnnnnnnnnnnnnnnnnnnnnnngtcctaa

SEQ ID NO: 85704 - DNA, 517 bp, Arabidopsis thaliana columbia
cttctaccaacccaaattcctctcttctcaacctcgtcctctccgttctcctcctccaacatttctccgatcagtgatgggttcgtcttcttctttctcctcttcttcctcgaagcttctctttcgtcaactctttgagaacgaatcttccacctttacttatcttctcgccgacgtttctcatcctgataaacctgctttggtatgtttttgcttcctaaagattgaatttttcgacatgggttttggttttttcgtgtctggtctttgtttttcgaatcctagttctgatcttcatgatgaataataggaactggattcatttagttttgaaaagatcatcaattttggatcaagttatgttctttgttcatctgatttgttgaatttggattgttttatgtgatgtgatgagcagttgattgatccggtggacaagactgtggatagagacttgaaactgattgatgagttaggactaaagcttatctatgctatgaacactcatgttcatgct

SEQ ID NO: 85705 - DNA, 1199 bp, Arabidopsis thaliana columbia
ataccaattaatttaagggaaggtgggacccctggcaggacccggcccgaatttccgggttgaaccaagccttccgccaagccggccgtttttttccaaccaaaattctttttttttaagcctggccttttcggtattctgcttccaacatttttccaatcagggatgggttcgcttcctcctttctcctgtactacctcaaagctactctttcgtcacctctttgaaaacgaatcttccacctttactaatcttttggccgacgtttttaatcttgataaacctgcttggtggatggatccggtggacaagactgtggatagagacttgaacctgattgatgagttaggactaaggcttatctatgctatgaacactcatgtccatgctgatcatgtcactggtactggacttcttaagacaaacctcccgggtgtgaaatccgttatttcgaaagcaagtggttccaaagctgatttgtttcttggacctggtgacaaagtatctattggtgatatataccttgaggtatgaaaccacaatttcaaaccggtacaataaatgagaggctagaaagtgaagagtgtacatttgtctcaggttcgtgctacacctggacacactgcaggatgtgttacatatgtgactggtgaaggagctgatcagccccaaccaaggatggcttttaccggggatgctgtactcatccgtgggttgtggggaggcctggcttttcaggggggaagcctcagaccaactcttcgggtctgtacattcacagatattttcattgccaaaggacacattgatctatccagctcacgactacaaaggtttcgaggtaagtacagttggagaagagatgcaacacaacccgcgtctaactaaagataaagaaacattcaaaaccattatgtcaaatctgaatctgtcgtatccgaagatgattgatgttgcagtaccagcaaatatggtctgtgggttacaagatgtgccttctcaagccaactaaaaaaaactcttacatataatgtttgtctttttatcgatgtcattctatatttaccaaagccaataaaaactcttgagagtaatttctacaataagatttgcttccgttgtaaaaaaaaaaaaaaaaaaaaaaagggcggccgctctagaggatccaagcttacgtacgcgtgcatgcgacgtcatag

SEQ ID NO: 85706 - DNA, 1173 bp, Arabidopsis thaliana columbia
  unsure (1)..(1173): unsure at all n locations
nnnctatacgacttactatagggaaagctgctacgcctgcaggtaccggtccggaattcccgggtcgacccccgccgtccgcccacgcgtccgttcttctccaacccaaattcctctcttctcaacctcgtcctctccgttctcctcctccaacatttctccgatcagtgatgggttcgtcttcttctttctcctcttcttcctcgaagcttctctttcgtcaactctttgagaacgaatcttccacctttacttatcttctcgccgacgtttctcatcctgataaacctgctttgttgattgatccggtggacaagactgtggatagagacttgaaactgattgatgagttaggactaaagcttatctatgctatgaacactcatgttcatgctgatcatgtcactggtactggacttcttaagacgaagctcccgggtgtgaaatccgttatttcgaaagcaagtggttccaaagctgatttgtttcttgaacctggtgacaaagtatctattggtgatatataccttgaggttcgtgctacacctggacacactgcaggatgtgttacatatgtgactggtgaaggagctgatcagccccaaccaagaatggcttttaccggggatgctgtactcatccgtggttgtgggaggactgactttcagggaggaagctcagatcaactctacgagtctgtacattcacagatatttacattgccaaaggacacattgatctatcctgctcacgactacaaaggtttcgaggtaagtacagttggagaagagatgcaacacaacccgcgtctaactaaagataaagaaacattcaaaaccattatgtcaaatctgaatctgtcgtatccgaagatgattgatgttgcagtaccagcaaacatggtctgtgggttacaagatgtgccttctcaagccaactaaaaaaaactcttacatataatgtttgtcttttatcgatgtcattctatatttaccaaagccaataaaaactcttgagagtaatttctacaataagatttgcttccgttgtagataagttcattagaaaattgtgtaaattagattgaacatgtggaatttgttatgaagatgaagacagtatttgcgtgttcgactaaaaaaaaaaaaaaaannnnnnnnnnnnnnnnnnnnn

SEQ ID NO: 85707 - DNA, 341 bp, Arabidopsis thaliana columbia
ccgcataaacccaaatacctgagaaggttgcttctgcagccaagagcagtcctgcatgggatgaagattggggctccccgagcaaagattctgctgtgggaaatcctgcttcttctcgtcataacacagacgatcagtttaacaaatccacagatcagtcacagccatcgatcatgtctactctgcccaacaagacaacagcgccaacaacatgccctgcagtggacatcgagtggcctccaaggcaatcttcaagcctcactgctccagcaactgataatcagacacaactaaacacaggaacatcatttgcttcgggtttcgatgagttagatccgttt

SEQ ID NO: 85708 - DNA, 717 bp, Arabidopsis thaliana columbia
ggcgatgctttttcgacctcctccttcacaatgtagaagcttctctccttttgtcttcaactacagctccagagaagtttcttcgtcgtctcgtctctccttgaaaacctccggcgacgaagaaaactgggtttcacgtttccggtcgaaatctctcagttcggtgttctctggagctcttgctctcggtttatctctatcaggcgtggggtttgcagatgcaaaagttggtgttaacaaaccagaattgcttcctaaagagttcacttctgttatagatgttgctgatttcctctctaatggtcaggagaagagaattgctcaagaaatcgctaatcttgagaaagatacaggattcaagttgagagtcttggctcaaaactatcccgttacccctggactagcaatcaaagatttctggcaggtggatgatagcacaattgtgtttgtcgctgacccgacttttgggaacatattgaatttcaatgttggagctacggttgatttagacatacctcgtagtttctggagtcgactggctgggaaatacggcaatatgttttactggaaagagaagggagaagatgcatctattgaagctgcagtgatggcgatatcaagttgcttacgagaaccagttggtcgaaacaactgtgcagagatccaatgaagtatatgaccccatcaagcgtatatgttattatcataatatcattg

SEQ ID NO: 85709 - DNA, 622 bp, Arabidopsis thaliana columbia
  unsure (1)..(622): unsure at all n locations
gatatattgccactagaaaaaccggctgcttccgtgccgcctccaaaaaagcaaggaaaaggaatgttaaagtccatgttcaaaaggaaaacatctgactcctcttctaatatcgagaaagagtacgcagaacctgatgtagttgaagaactctttgaagagggctctgctatgctatcagagagattagacacaaagtacccgctttgcaatatgtttaagttgttcatgtgtgctgtgtgtcaagtagaagtgaaacctggagaaggtgtctcgatccatgccgggtcggataattgccgtaagcttcgtccctgggatggtccattcctttgtgcaagttgccaagataaggaagacgcaatggaaggggaaagatcatcgggggatagaccatagtagtgaaagcggctagccagcaatcttgcaaatttatttgcaaaanaacctatccaaacagtatttttgggaaatttggggcaggtctaagggtcttcgggggtgtaaatttttcccccctgggggggtttgaggttccttgctaancccccacattttnccnttttccngnagctccaaggngtttttttttttttccccttangggggtnnaacaactntt

SEQ ID NO: 85710 - DNA, 537 bp, Arabidopsis thaliana columbia
  unsure (1)..(537): unsure at all n locations
caagagactgtaacttatctctctacattgttggaaaaggatgaccgatctgtacgtatagctgctggtgaagcgcttgcagtaatatatgagttgggaactctagagaagttcgctgccgaagtcaaagggtctgctaatggatccagtgaaagaaggaggtgtctctcaggaagcattgatgcacatgcatggcttgaaagctaaagtcactaaacaagttagagagctctctgtagaggcaggtggtaaaggttctgctaagaaagatctcaacacccaccgacaatttgttcaaagatcttgttgaattttcttgtggatgggtatgctcctgaaacctcaccaaaagtcggaggggggctatttacagacggcaacgtggtatcagatgttccagttgnattattttgaagcatttcctaggggggtggctttntttagcatttccagggggattaatccctcnctgatgatttaggttcnncccaagaaggnttggtggggaagtttctttttcggaaaagggtntttngc

SEQ ID NO: 85711 - DNA, 492 bp, Arabidopsis thaliana columbia
cggacgcgtggggtttatatatagagaattagatatcccctccaattactcaaaattattatcaaaataagaaagagctcaacattgttctctgactctataaataactgttcttggaaattttccaagagaacaagaaacaaaaacaaaacgttgtttaagtgtggttctatagatttcttgtgaatgtcttctgaacaaggaaatggatcgaatccttccacgtcaccggaggtagaagggactaaaacaatcccctttcgccggagattgcaaagaggacaaagagttttcgctccaaagctgatggaggctctacgtcgatcaagggtaagctctgaagaagctccggtaaggcatcttagtcgtagatggagagccacaacggcgcagaaggtatattccctaaagctctacgacgctcttcaacgatcgcggcggagcgcaacagtccgggacacggccgacaaagtccttgcgacgaccgctcgt

SEQ ID NO: 85712 - DNA, 627 bp, Arabidopsis thaliana columbia
tctaccaaaacttctttctttctctctttttctatatctctagagcgcgttactgcgcgtcgtgagtatgtttttattgacgccattgaaattgggttaaatcggtttgaatcggattgaacaaaaactgtattaataataattcttcctctacttttctctctgattgattccaatcttctttcattttcttcttcttcttcttctggggaaggggcaggttaaaattatgccatctattcaaatcgtgcctatcctcagatcttaactcttttctctacgagattcggcatctgggttttattcttcttgagcaaaatgcaatcggataatggaaagcttttcatcggtgggatatcttgggacaccaatgaggaacgtctcaaggagtatttcagcagttttggagaagtgatcgaagctgtcatcttgaaagatcgtaccactggtcgtgctcgtggtttcggttttgttgtttttgctgatcctgctgttgctgagattgttatcaccgaaaaacataatattgatggcagattggttgaagccaaaaaagctgttcccagagatgaccaaaacatggtaaatagaagcaacagcagtagcatccaaggttctcccggtggt

SEQ ID NO: 85713 - DNA, 557 bp, Arabidopsis thaliana columbia
  unsure (1)..(557): unsure at all n locations
taatagctcactggtctagctccatggcaccgaaaatntatcagggctcaagtgattcaccgaagcgacgagaccttgaaagctgctttttcaagtgtcagtagcggaacgttctgtcaatcggggaaggtttttggtgacaagacctggagatatcagaagtgagaatgctgacatgagtaacgataaatcctgtgaaaaacacgatcgcctgccagtggaaggctttctgcgttcagtcaatctacgcagagtgaatcggtccctaaggaacccccgaaaggcctnccgtccgatggggacacggaagtaccgaagttgcttttgactacaaaaccatgcctctttcttggagcgnattggatgatcgggccgagggcagcgtagacttcttccnctnantctcctttccctaatatgaaccttgagtcatcaaagcctttctgactcggcctggnccggtcgncctangntactngngnttcaaaaggcggaagttttcgtcgtagtttttgcgaccttcagtaggggcctttaggctttttgataggagtngg

SEQ ID NO: 85714 - DNA, 422 bp, Arabidopsis thaliana columbia
gatcacatcctcacacacaaaaataaatcatcacaagaccagagttaaaagagagacatgtcgacttcattcacaatgatcggcggtgaaggtcccaacagttaccgggaacattcgaaataccagggagcactggttatagctgcaaaggaaaagatcaatgaagccatctccacgaaactcgatatcgactttacttcaaatcttgttaacatagctgattttggttgttcctctggaccgaacactttcaccgcggtacaaaccttaattgatgctgtggaaaacaagtataagaaagaaagtaatattgagggaatcgagttccaagttttcttcaatgattcttcaaacaacgattttaacactctcttcaagacacttcctccggctagactgtatttcgcaagtggagtaccggg

SEQ ID NO: 85715 - DNA, 461 bp, Arabidopsis thaliana columbia
aaataataatagtgtaattaagtcggaggaaaacaacaagaacccagaaagaggaacgaagaaactaattcaaaggatcaagttcaccgcttcattttagtcattaaacaaagatggtgatgggaggagaagcatccatggaactggaccagtgttttcagaagatgaagatggaaggaatctcgatcaaagagtgggaagatatccctgtggagcttctgatgaggatcctttcccttgttgatgatcgtaatgtcattgttgcttctggtgtttgcactggctggagagatgctatctcttttggcctcactcgtctccgtctatcttggtgcaacaacaacatgaaccagctttggttcctttctcttgttcccaagtttgtaaagctgcagactttaaatctaaggcaggacaaaccgcaactagaggacaatgcagtggaggccatagcatatcac

SEQ ID NO: 85716 - DNA, 636 bp, Arabidopsis thaliana columbia
  unsure (1)..(636): unsure at all n locations
ggactttacttgctggtgataagtttcaagggaatggtgttaactatcanatagcttctncttttnttgaagagcttaggccgttnctnccattaaggaaagaggttttggaactnctctttgctccttttgtgaagattatgggtgttgttaatgataagattttggtggggaagattaagagtaatttgtttgatgagttactgaagatggggaagaagctactgataattaaacaatctggggatgatgcagtgcctgaggatgatgatgttgtggttttgggatctattgctttgtctatggagtttgcaaagaggttttatgagttgggttcttcctccggaggtgtcatcaggggtaattaggaaatttgatattgccccttcacaaggagtttttgcagttggagaaggttatgtcgagttctagtatcgaagtatctatcgtagaagcttctcgtcctggcaacgatgaagttccngaatcggttccngtgtctnagtctaatacaaaatnttggtttctnaggctaaggaagaattntttnctaaatgggnccttcttcaaaagaagaaagggttttaaggaantgttcaaangcctnnaaaaagccagtntcaaagaaagggtnnt

SEQ ID NO: 85717 - DNA, 612 bp, Arabidopsis thaliana columbia
  unsure (1)..(612): unsure at all n locations
tggacatttatcgatacggcgattcttgttgcgtctcttgactatggtcaagaactgaaacgtcggagagataacatcgtcgagcgtctctacgctacgtcgatggctaacaagtgtagaaactncgattttggcggcggtggtaacgttacggaggcggcgattggtagggttaataatgggagggttcacgaggagacggaggaggaagatgaagaaggagtaacagcagcagcagaagaagaagttagagagaaatctgttaatgttgaagacgatgacgatttcgatccctttgctggtttgtttgatgatgagcaagaagagtattgtttgaaatcaaggggcaacctttgaagatcccgatcctgtcctgaagaatccttttggttgaggttncttcagaatcctggaagntattgggtataacatttccaagctcttcaagggaaccttgtnntttgggggcattntnaatcgagntcggaagcatccttccgaccaattttcgagnttntgctaancaccttncaaaaattgnnggacccgtggtgattggcaaattacccncctgggccttaccccagtttncccttgggtnccgccnagggc

SEQ ID NO: 85718 - DNA, 566 bp, Arabidopsis thaliana columbia
cggcgttcttcaatcgaaaggtaaagagtttgaagaagtaagtcacagagaaagagaagatgtctgagaaaaagggaaggaaagaggaagtgattaccagagagtacaccattaacctccacagacgccttcacaaatgcacctttaagaagaaggcaccgaaagccatcaaggaaatcaggaagttcgcagagaaagctatggggactaaggacgttagggtagacgtgaaattgaacaagcaaatctggagcaagggaatcagaggtccaccaaggaggatcagggttcgtgttgcacgtaagagaaacgacgatgaagatgcgaaggaagagttcttctcccttgtcactgttgctgaaatccctgcagaaggactcagtggtcttggcacaaaggtcatcgaagaggaggattaagagaatcagtaggacaagttttgtttggttttttacttttgttgctgtgtttcaatttaaaagtcttgaccctttcactttcttcattgtagtgcatcttgaatttacttatgcagttttttgaagagaccctttttcttcttcatg

SEQ ID NO: 85719 - DNA, 531 bp, Arabidopsis thaliana columbia
  unsure (1)..(531): unsure at all n locations
tggctcttgagaactatgaagaactctttggttcagccttcaactcatcaagatatctcttcgagcacggtggaattggaagtcttttcgagaaagatgaagctcatgagggctcaatgcagcagccagcattaagcaataatgcatctncagattcgttcatgacttgtagaaccgagccaataatttgctattcatcaaagccagcacattcgaatatctccttctctggcatcactggagaaagtaatgctgggagatttccaagattgtgggggcggcatcgatgaagcagctttcaagggagccacaaccatcggtggccatccaacagcacagggcattattgcttcctcacatgcaacaacacggtaataaccggtgttatncggttccaaggcaaggaggagggctcgcaagttttccaagcggggaaaggtttncccttcggaagaaagggctntttttngccgnggtntnaagnccggttttnaagcccggggggtttttttncgnccnntnnccncagng

SEQ ID NO: 85720 - DNA, 522 bp, Arabidopsis thaliana columbia
  unsure (1)..(522): unsure at all n locations
ttcctcgagctgtgttgtacctggtattggtcttcatctaaacgccgttgcaatgtctgcaaaggacagtaacatcagtgtcatacatggctattccatatctggagagattcaaaagagtttctcaggctctaccactccaattcagtcccaagacactgtgcaagaaacttcggaccaggcagaaaacgaacctgtagaagaagttcccaaagcattggtgttcccagagttgaatcttggcagccttaagaaaaagatgcgtaaatcttgaacaagcttggggaggggtgggtcatgttaaacgatgcaactgcaaaaaggcttagggtttgtagcgttactgtgaatgctttgctgctggggtttnttgcatagngccatgttcatgtatagnttgcttcaacaaacctttccatgangnacctnttttggttcccggaaacaggttgntnccggaatccncttgcatttgcncccaaagncttngaattgnggttccctcntggnggctngtnttgt

SEQ ID NO: 85721 - DNA, 396 bp, Arabidopsis thaliana columbia
  unsure (1)..(396): unsure at all n locations
gggaaaacaagtttgtaatctccacaatctcaacaagttgtgcctgagacggaggtggctggacaagttaagacaggtttgccaactatatactcagctgagacagttacaccttgtcaaattttcccatatttggaaaagtagtatcacaagatgggactggtatatttttatgcagaggacctagtaaaaacactgcttgtaaagtagtagttttccccttttctgataaatcctataaacagcaacaacttaacagggaaaggattaatgnccttttcacaaaatggtncatcctattgcagttatgggnaaaccntggttcaaagntncntgnggncctgattttaatggaaaaaaccccttttttttnagncaaggatttccnntttnggg

SEQ ID NO: 85722 - DNA, 1491 bp, Arabidopsis thaliana columbia
  unsure (1)..(1491): unsure at all n locations
nnnnnnnnnnnnnnnnnnnnnnnnnnnnnnnnnnnnnnnnnnnnnnnnnnnnnnnnnnnnnnnnnnnnnnnnnnnnnnnnnnnccacgcgtccgggaacgatgaattctcgtagtaacaacacaagcactttggttcatcctggaccatctagtcagccttgtggtgtggaaagaaacttatctgtccagcatcttgattcttcagccgcaaaccaagcaactgagaagtttgtctcccaaatgtccttcatggaaaatgtgagatcttcggcacagcatgatcagaggaaaatggtgagagaggaagaagattttgcagttccagtatatattaactcaagaagatctcagtctcatggcagaaccaagagtggtattgagaaggaaaaacacaccccaatggtggcacctagctctcatcactccattcgatttcaagaagtgaatcagacaggctcaaagcaaaacgtatgtttggctacttgttcaaaacctgaagttagggatcaggtcaaggcgaatgcaaggtcaggtggctttgtaatctctttagatgtatcagtcacagaggagattgatctcgaaaaatcagcatcaagtcatgatagagtaaatgattataatgcttccttgagacaagagtctagaaatcggttataccgagatggtggcaaaactcgtctgaaggacactgataatggagctgaatctcacttggcaacggaaaatcattcacaagagggtcatggcagtcctgaagacattgagtaatgatcgtgaatacagcaaaagcagagcatgcgcctctctgcagcagataaatgaagaggcaagtgatgacgtttctgatgattcgatggtggattctatatccagcatagatgtctctcccgatgatgttgtgggtatattaggtcaaaaacgtttctggagagcaaggaaagccattgccaatcaacaaagagtatttgctgttcaactatttgagttgcacagactgattaaggttcaaaaacttattgctgcatcaccggatctcttgctcgatgagatcagttttcttggaaaagtttctgctaaaagctatccagtgaagaagctccttccatcagaatttctggtaaagcctcctctaccacatgttgtcgtcaaacaaaggggtggctcggagaagactgacccaacataaaaattgggaagctcagcttgagaacggagtttgggagggttggcaaaatcaagggcatcatcaccaatccaacttcaatgccttttgcaaacaaccccacccggcttcaccggctccaaatggatattgctttcctcctcagcctcctccttcaggaaatcatcagcaatggttgatccctgtaatgtctccctcggaaggactgatatacaagcctcacccaggtatggcacacacggggcattatggaggatattatggtcattatatgcctacaccaatggtaatgcctcaatatcac

SEQ ID NO: 85723 - DNA, 422 bp, Arabidopsis thaliana columbia
  unsure (1)..(422): unsure at all n locations
aaccngaaaagctaacgggacgtggcatcgcatcgaccgagtttgcttatggagctggacatgtcgacccgatggccgctttaaatcctggacttgtctatgaattggacaaagctgaccacatcgcctttctctgcggcatgaactacacttcgaagacccttaaaatcatctcgggtgataccgtcaagtgctccaagaaaaacaaaatcttgcctagaaaccttaactatccttcaatggtcggccaaattgtcagggaccgntagtaaccttcccctggtgacttttcaaacagaacggtggcccccgccgggacggcaaactttttcatacaaatcaaaggtagtnggngggtcacgggtcttaaggtttgnatcanggtnacgcctagtgtttctgnattttaaagncagtnaccg

SEQ ID NO: 85724 - DNA, 565 bp, Arabidopsis thaliana columbia
  unsure (1)..(565): unsure at all n locations
ctcagagccacaccaacaacaatggcgtctctattcgcacacggtatctccagcttctctccacaacccacttccgattcctcaaaatcaccaaaagggtttcacccaaaacccgaatccttaaaattcccatctcccaaatccctaaatccaacgagaccgatcttcaaactcagagccgatgttggaatcgattctcgtcccatcggagcttctgaatcatcatcatcaggtacatcaaccgttagctcaactgataaacttcaacagtatttccaaaatctcgattacgataagaagtacggattcgttgaagatatcgattccttcacaatccctaaaggtttatctgaagagacgattcgtttgatttcgaaattgaaagaggaaccagattggatgcttgagtttaggttcaaagcttatgctaagtttctgaaactagaagaacctaaatggtcagataatagatatccttcgattaatttccaggatatggtgttattacctctgctcctaaaaagnaaccnacctttgaatnggtttaggtgaaggttggtccnca

SEQ ID NO: 85725 - DNA, 403 bp, Arabidopsis thaliana columbia
attatcttctgcatcgccacatcgtctaaaaaaaatccccaaattcgtttctcttcgattcaaaatccctccgcaaaaaacccccaaacacgatcttcacccttgtgagatttccaatcgaaatcgagaagccatggataacagcagcagcatcaattccaccgcttccacggcctcaaatctgagcacggcttctctggaaaagctagatcaagcggcgagctgggtcagcaccaccgttatttccgccttcttcgcctccctcgagcgttgctcatgcgttaacctatctacctccgatgatgacgatgacggcgaagaatctcacaaccgtccccttgcgctctccgccgctcctcacccagacgacatcgtttagattcctttcggcggtaaatccttc

SEQ ID NO: 85726 - DNA, 1784 bp, Arabidopsis thaliana columbia
gtcgccacgcgccgacttgatccgtcgtcttctctcagtctccatctccgtcttccaagttttactgtcaggtagaagaatccatgtcgatttacgtcgcgtcgcgacagctctccggcggaacaactgtgacggcgctgcgttatgccacctctctgagatcttattcgacctcgtttagggaggagagggacaccttcgggccgattcaagttccttccgataaattgtggggagcccagacgcagagatcgctgcagaacttcgaaatcggtggtgagcgcgagcgaatgcctgaaccaattgtccgcgcttttggcgtcttgaagaaatgcgctgccaaggttaacatggaatacggtcttgatccgacgattgggaaagcaattatgcaagctgctcaggaagtagctgagggaaagctcaatgatcatttcccccttgttgtctggcaaactggtagtgggactcagagtaatatgaatgctaatgaggtcattgctaatagagcagctgagattcttggtcgcaaacgtggtgagaaatgtgtgcacccaaatgaccatgtgaacagatcacaatcttctaacgacacttttcctaccgtcatgcacattgcagctgcaaccgagattaattcgaggctcatccctagtttaaaaactttgcatcgcactttggaatctaagtccttcgagttcaaagatattgtgaaaattggaagaactcacactcaagatgctacacctttgacactaggacaagaatttggtggctatgctactcaagttaagtatggactaaatagagtcacctgcactcttcctcgcctctatcagcttgcacaaggtggaactgcggttgggacaggattaaacactaagaaagggtttgatgtaaagatagctgctgcagtagctgaagaaacaaacttgccatttgtcactgcagaaaacaagtttgaagctctggctgcacacgatgcttgtgttgaaaccagtgggtcacttaacacaatcgccacatcgctgatgaagatcgccaatgatatacgttttcttggaagtggcccaagatgtggtcttggtgaacttgtactacctgaaaatgagccaggaagcagtatcatgcctgggaaggtaaatcctacacagtgtgaggccttgactatggtttgtgcacaggttatgggaaaccatgtagctgtgacagttggtgggtcaaatggtcatttcgaattgaatgtattcaagccggtgatcgcgagtgctcttttacattccgtcagattaatagcagatgcttcagcttcgttcgagaaaaactgtgtgaggggcattgaggccaacagagaaagaatctcaaagctattgcacgagtctcttatgcttgtgacatcattgaatccgaaaatcgggtatgacaatgctgcagcagttgccaagaaagctcacaaagaaggatgtacattgaaggaagcggctctgaatttaggcgtgcttactgcggaagagtttgatacacttgttgttcctgagaagatgattggtccctccgattgatagttgtttttggagccaaagcttcaagtaccattattcttctgatgcttttatttaggttataataaaaatgagcaaatccagaaacaattcaaattttcttgggagggcaacattgttcttcatcttacggctaaactatgatcttctttatgtatcaattttttttttgtgttgaataagagagtgagtactcagcgagaagaatttctgagtttcgtt

SEQ ID NO: 85727 - DNA, 359 bp, Arabidopsis thaliana columbia
  unsure (1)..(359): unsure at all n locations
gttgtgtctccataggacccggggcatacgatatcgatatacgaaatatcacttgtggaccaggagggcatggaattagcattggaagtttgggagaaaaaaactcacatgcgtgtgtctccaacgttacggttagagactcgttcataaaattttccgaaaatggagtacgaatcaagacatggcaaggtggatcagggtccgtttcgggtgtaacgtttgacaatatccatgtagatactgtccggaatccggtaatcatcgatcaatactattgcacggctaaaagttgtgctaacaaaacatcagcggtttttgtgaatgatatagtatatcaaagtntaaangggcannnaant

SEQ ID NO: 85728 - DNA, 1015 bp, Arabidopsis thaliana columbia
gatacatcggtttttgtaagaaactcggaagaaatgttgtcgatacctggatttgtaaaccctgtcccagccaatgttctgccgtcagctctgtttgttgaagatggttatgatgcttacgttaagctggccatattgtttacaaaggccaatggaatcctagtgaatagctcctttgatattgagccttactctgtgaatcattttcttcaagaacagaattatccttctgtttatgctgttggccccatatttgacttgaaagcccagcctcatccagagcaggacctaacccgtcgtgacgagttgatgaaatggcttgatgatcaacccgaggcatcggttgtattcctttgttttgggagtatggcaaggttaagaggttctctagtgaaggaaatagctcatggacttgagctatgtcaatatagattcctctggtcactccgtaaagaagaggtgacaaaggatgatttgccagaggggttccttgaccgtgtcgatggacgtggaatgatatgtggttggtctcctcaggtagaaatactggcccataaggcagtgggaggctttgtttctcactgtggatggaactcaatagtagagagtttgtggtttggcgtgccaattgtgacatggccaatgtatgcagagcaacaactcaatgcgtttctgatggtgaaggaactgaagctacctgtggagctgaagcttgattacagggtacatagtgatgagatagtaaacgcaaacgagatagagcccgctattcgttatgtaatggacacggataataatgttgtgaggaaacgagtgatggatatctcgcagatgatccagagagctacgaagaatggtggatcttcgtttgccgcaattgagaaattcatatatgacgtgataggaattaagccctagccttttcttgtccaataagctacccccttgtttctttgtactacaccttgtttttgaaagagctacgaatgaaaaaaactgagatttgatttttatt

SEQ ID NO: 85729 - DNA, 733 bp, Arabidopsis thaliana columbia
  unsure (1)..(733): unsure at all n locations
ggagcttatattattccttcgtccacaccattgactccttcttccaatactattccagcacaaggtggagatggtggagttgcttgggatgatggtgttcacgacagtgtcaagaagatatatgttggacaaggtgactcttgtgtgacctatttcaaagctgactatgaaaaggcttcaaagcctgtccttggaagtgatcatgggaagaagacattgcttggagcagaggagtttgtgcttggaccagatgagtatgtcactgccgtgtcgggctactatgacaagatttttagtgtagatgccccggcaatcgtctcgcttaagtttaaaacaaacaagagaacatctatcccgtatggactcgagggaggaactgaattcgtactggagaagaaagaccacaaaatcgttggtttctatggacaagctggtgaatatctttacaaacttggagtcaatgttgcgcccatagccaaatgatgtgaaaccaatctggatatccctgaaatttgaataaggttatgttgtgagtttatgaagttgtggtctagtgttgtattttgtttttcttaaggataatgcatctgtgtgctttgcttatctaaaatctaaataaagtgggtttctgcaaaaaaaaaaaaaaaaaaaaaaaagnnnnnnnnnnnnnnnnnnnnnnnnnnnnnnnnnnnnnnnnnnnnnnnnnnnnnnnnnnnnnnnnnnnnnnaaagtc

SEQ ID NO: 85730 - DNA, 529 bp, Arabidopsis thaliana columbia
  unsure (1)..(529): unsure at all n locations
ccagataaaacctaaataaaatccctttctgcgcatgtnagcaagatatggttccagagtaaactgaagaccaaacaaaacaaaactnttttctctccttcaatttctccgtctctctctcgttttccatggccgagttacagttagtagaaggtcaccagattaacggcggttttatcccgccggcgataataaactcaatcgaagcaccggaaacatccgccgcagccggagtttcagtcggatcgaaacgattgagaagacctagcgttaggttaggagacatcggcggtgaccagtaccaccaacacgtggttgcggcgtacgatttctccgcaagtccgacggccgaaatggaggcctagtggtggtggtggtggtggtggtggtaacaaggagggggccggataatcagagtgggaagacgacgtcttcttcgaggactcgaactatgacgaatttgagctccggtgggtatgagaatactggaaccctagatgaagaccggtttcnattgggagttggcggg

SEQ ID NO: 85731 - DNA, 576 bp, Arabidopsis thaliana columbia
  unsure (1)..(576): unsure at all n locations
ttnggccccnnggacatnaaccccccnttnnccanaagnccaggttagttaagatttggccctgaagttaacccgggattagagtagtccctgagttgtttgatggcaaaaggatccagtancagtggancaggttcttcgggtcattttattngatgcggaccgccccaagtgctgcattggagaaactgaaacgtcaattggatgaagctgaagctgcagttgaagcaagaaagaagcctcccccagagacagggcctcgagttgtcggggagggtcttgtcataggcgaatggaaggagagaagagagaagtaccttgctcggcaacaagtcgaatctgtagattctttgtcctaaacgcagagagcaatgtggatttgttatacgcttatagcagaggtaaaagaagctccttcttcttattcttcatcttctgcagatcatgtacataatttattatccctcggttatgtatttatctccagacgattactttgtggttcctgtatgtctctgtttgttgtgttattcaatacaggtttttctccttcaaaaaaaaaaaaaaagggcggcc

SEQ ID NO: 85732 - DNA, 1287 bp, Arabidopsis thaliana columbia
  unsure (1)..(1287): unsure at all n locations
nnnnnnnnnnnnnnnnnnnnnnnnnnnnnnnnnnnnnnnnnnnnnnnnnnnnnnnnnnnnnnnnnnccacgcgtccgcccacgccgtccggtaaaacgccaaaacgcacgagatttttttgtcgattcttcgtcgtcctcctttgaaattcacaccaatttgtctctcttcctagagaaacaaaagattattcgaaactcgggaaagtatcatccggtcaccggaaaattgattatttccgatgccaataggtgaccgtcagaatccgagtgtggagaagaagaagaacctcttcaggctatgtccgttttggcagaggagaagcaccacttcttcatcttcaacacagaatccaaaccaaaactaccgtagccgccatggaaatcggaatacagatatttccgccgtctctaagcctccgttgactatgtcttccgtcgccagatcacttcttccagctcgccgtcgtctccgactagatccttctagttatctgtatttcccttatgaacctggaaaacaagttcgcagcgcaataaagcttaagaacactagcaaatctcatactgcatttaagttccaaacaacggcacctaagagttgttatatgcgtcctcccggaggtgtttggctccaggagagagtgttttgctactgtgttcaagttgtggaacatccagagaacaatgaaaagcagccgttgaatcagaagagcaaggttaagtttaagattatgagcctgaaagttaaaccaggagtagagtatgtgcctgagttgtttgatgagcaaaaggatcaagtagcagtggagcaggttcttcgggtcatttttattgatgcggaccgcccaagtgctgcattggagaaactgaaacgtcaattggatgaagctgaagctgcagttgaagcaagaaagaagcctcccccagagacagggcctcgagttgtcggggagggtcttgtcatagacgaatggaaggagagaagagagaagtaccttgctcggcaacaagtcgaatccgtagattctttgtcctaaacgcagagagcaatgtggacttgttctgcagatcatgtacataatttattatccctcgattatgtatttatctctagacgattactttgtggttcttgtatgtctctgtttgttgtgtgattcatgccggttttttctccttcatcaaattttgtttcggtcgtttttagttgatctagaatcgaaccagagtttgttcagtatttagttacaaatgaaaaatcctgttataccaaaaaaaaaaaaaa

SEQ ID NO: 85733 - DNA, 482 bp, Arabidopsis thaliana columbia
actctctctctctcgtcaggaatcgtctctgctctttcatcatcctccgagaattatcacacaaggtcactgcaaggtgtgtacgagagggctaaagtaaatggtgttgttgtgatattcatcttatttttgacagcttgaaatagaggagtttagcaatgcaaggagttcctggatttaatactgttccaaatcctaaccattatgacaaatcaatagtgttagatattaaaccgttgcgaagtttgaaacctgtttttccaaatggtaatcaaggtccaccttttgttggttgtccaccttttggtccttcctcatctgagtattcgtctttcttcccatttggagcacaacaaccaacgcatgatactccagatctcaaccagactcagaacacgcctattccatcatttgttccacctcttcgatcgtatagaacacctactaaaacaaatggccccagcagctccagtggaactaaa

SEQ ID NO: 85734 - DNA, 359 bp, Arabidopsis thaliana columbia
  unsure (1)..(359): unsure at all n locations
tggaaaggattgtnagatatcaaggggatgtcattaacaagcaaccgggaatcacctattgttttcttaaaatnagagaaatctagcggttcagctaaagatgatttgcttctacttgagaaaatggctgaccgtgctctgaaggaagactcattgttggttgtgagttctaaaagatcatttcttgataaatgccggttacctgtgggaatcaaactctacgtctcagcgggacattcggaatccgatcttcttaaagcgtcggagtcactgagagagacttgcttcagagcttctactcaaggccctgaaaaaaccgaaaccttttttttttaaaggaccancaacccntnggggna

SEQ ID NO: 85735 - DNA, 997 bp, Arabidopsis thaliana columbia
tgacctaagcgttttgagatgacaacaaagtattcgtcgcgacggagagagagcgagagagacgatggaggaagaggagcacgaggtttacggtggtgaaattccagacgtcggagagatggatggagatatggaggctctcaaccccgatttggatatggctgctgctgatgatgatgcggttaaggagttggatgaaatgaagaaacgattgaaagagatggaggacgaagctgctgctctgcgtgagatgcaggctaaggtcgagaaggaaatgggagctcaagatcctgctagtattgcagcgaatcaagcaggcaaggaggaggttgatgctcgatcagtttttgttggcaatgttgattacgcttgcacacctgaagaagttcagcagcatttccaaacatgcggcactgtccatcgggtgaccattctgacagacaaattcgggcagccaaagggatttgcatatgtagaattcgtcgaagtggaagctgttcaagaggctctacaactgaatgaatcagagctacatggtcgtcaattaaaggtcttgcagaagagaacaaacgttcctggattgaaacagttccgtggtagacgattcaatccatacatgggttaccggttccgcagacctttcatgtctccttatatgtattccccatatggatacggaaaagctcctaggtttagaaggcctatgcgttacatgccgtaccaataaaaccgtcatcatggttaagcatagaagggattcgctaccagtgtggatgcgtgtattggctatacccatccttcattgagctttctttatgactttggctctttcgccttttagaactttgcgcgtaaacattttcgaacctagactggtattataagtttcatatcgttttgatatgatgcatataatgattggatcaagtgttgcttatataattgggactattgggttatagctgaaatctgttaaatgaaagtgttgactcttttt

SEQ ID NO: 85736 - DNA, 447 bp, Arabidopsis thaliana columbia
cttcctcccactactgatactacaccgattttttcactcctctttttttcacaatgctcggtgttcaaaggattttccaggagcacatcatccgcagaggccggtggtgtattaggagggtctactcgtggttttttaacttgttgatgcagtcttattggaacgagattgaggattgcaaggtgaagatatttgataaactgagtgaaaaagctgaaaaggttttggagattggtattggcacaggtcctaatatgagatactacgctgctcgcaatagtaacgttactctatatgggttggatccaaatcccaaaatgaagaaatacgcacgcaaatccgctaccaaagcaggattgaaacctaaaaactttagattcaagcaaggagtacgagaagctataccattaaaagataactctgtggatgcagttgttgcaacactgg

SEQ ID NO: 85737 - DNA, 509 bp, Arabidopsis thaliana columbia
  unsure (1)..(509): unsure at all n locations
ctgcaatgattcctcttcagaaagatcttnanattncttctaatcaattgtngggcgtacctaacagtgccacaacgacagctctttcacctcttggcgaagatgccctaagatcagatctaactgccatacatgagatcattgagaagcttggatataaggatgacgagggtgcaaccacagagctttctttccagatgtggaccgaccagatgcaggacacattggtcttcaagaaaaagggggattctgcattccgacataaaggctttgcaaagggccatcggatgcttttcttagttcatcgaggtaggtacaatgggttccccaactgttcatgcangacagagtctgtgttacctaatgaatgatatncctagagaagcactaaacaatgcaatgcaagcacaagtcatatctcccngcttgggnatatcgcatcgtatctnccagctgtagctttgtcaagctnttnggncanggggacggggnncanacngttctnaaag

SEQ ID NO: 85738 - DNA, 302 bp, Arabidopsis thaliana columbia
aaggcggccagcgattttatccaacaagacctcaagatggactatgtgtatgactacatgtaccatcttttaaccgaatactcgaaactcctccagtttaaacccgagattccgcggaatgccgtggagatttgctcggaaacaatggcatgtctgaggagtgggaatgagcggaagttcatgacagaatcactcgtgaagcaacctgcggattctggtccgtgtgccatgcctcctccttatgatccggctacggattacgaggtttttaagagggaacagagtactaatatgggaatcct

SEQ ID NO: 85739 - DNA, 634 bp, Arabidopsis thaliana columbia
tcagggaccgggcctgaatttcctgggccgcccactgcgtgagcgcaaaaaatcaaaaattcgccgagagcacaaaccctaatggcttctctctcaatggcttccgttaacgttagcttctgtcatcctttacgctcttcttctccaaaggtctcacttcgcagttccgttcatttcgcgacgagtctttcctcaagtcactccatttctgggcttcgcgctgttttgcctctgaagatttctacagttgcttcccccaattctcaaaagcttcattcttttaccgttttcgctcataagggctacaagatgaagacccacaaggcctcagcgaagcggttcagagtgacgggtagagggaagattgtgaggaggagatctggaaagcagcatttgttagctaagaagaacaacaagaggaaattacgtctatcgaaaatgacggaagtgaaccggagcgactatgacaacgtgatcggagctctgccctacttgaaagtcaatcgaaaggcgacttaagcagagcaggcttgatccttttcttacctgcaattctcattttgtaatctaaagttgtggtaatatccttttgtattgtgatataatttggtcaatgagttgatttttgtttcat

SEQ ID NO: 85740 - DNA, 591 bp, Arabidopsis thaliana columbia
  unsure (1)..(591): unsure at all n locations
ggaaacttccggagacatcggaggaaccctaaattgaatgagaagaggagagtgagacgggagagaaagccagagcgagcgatagagcaaagacatggagagagaggaggagaagacgaaagagggctcatcgtataggtactgggtgagagaagccacctcagacgcagctcctcctcctctgccccaaaagctcagcaacaacgacgtctctctcaatactgctcctgcgtcccttggctctctctggaatcgggctggcacttgggaggagaagagtctcaccaaatgggctactgaccgattaaaggagctgttgggatcagtgggttcattgcagttctcttctggaaaagctgagattatagatgttaacagatgtttttggagatgctttcttagtcacagttcggaacaagaaaagagttggctatacttacgggctttcccttaaagtttagggagagtggtcattttaaggggatttttaaggaggtaaagggggcccccgcgatnccangttttnatttggggggctttangcccttanggnggttttaacncccccggggnaagggntttcccnnanct

SEQ ID NO: 85741 - DNA, 527 bp, Arabidopsis thaliana columbia
  unsure (1)..(527): unsure at all n locations
aaggaaaaaataaaccttgttcattagaataacctgctgaatcagctggagggttttaagcaatgcatataaaggtacaaacctataaacagagatctctctacaaagcagacgaaggagaagagaaggctgtacaattttttatacactaaaagctctgtataaaccaaacaacataactttgcctagatttatacatatatgtatggacactgaaacccaaaatcacacttttatttatctatcctgaggttatgacagagatgtccaagttccggccgtgacttcatccatcccatgcatttcatttcttccggcgacgtgctatagaggtatgatctgaatgttatcaggtaaaagtagcgccttaaggnnttaacacccatgtccatgatggtatgaccgggtttccaccttttggaananggaagtttggtcagcccttacnggaggnaacgagncctcnccgcaaagncctgaccagnacacatacagtcgggtatccancaaggccgattgncnggggg

SEQ ID NO: 85742 - DNA, 3087 bp, Arabidopsis thaliana columbia
  unsure (1)..(3087): unsure at all n locations
aattcgcggccgctctctttctctctcctccatttcagtaataaacactccttcctctttaatttttctgggtttcttcttcttccctcttttgttgtttctgtgtgattcagttctcgatccatcttttcgtgaaaagtatcaatcttttaattctctagttgtttgtcaaatctggttagtttcttctcttgtatttatttgatgaacttcggtagtctcttcgataacacacccggtggtggctctaccggagcaagacttctctccggtttaagttatggcaaccacaccgccgcaactaacgtcttacccggtggtgctatggctcaagcggcagcggctgctagtctcttctctcctcctctaacgaaatctgtttacgcttcttctggcctctctctagccctcgagcaaccggagagaggaaccaaccgtggagaagcatcgatgaggaacaataataacgtcggaggaggaggcgatactttcgatgggagtgtgaacagaagaagccgagaagaagaacatgagagtagatctggtagtgataacgttgaaggtatctccggtgaagatcaagacgctgctgataagcctcctcggaagaaacgttatcaccgacacactcctcaacaaatccaagaactcgaatctatgttcaaagagtgtccgcatccagacgagaaacaaagattagaactaagtaagagactttgcttagagacaagacaagtcaagttctggttccagaatcgtcgcactcagatgaagactcaattagagaggcatgagaacgcgttattgagacaagagaacgataagttaagagctgagaacatgtctattcgtgaagcaatgaggaatccaatctgcaccaattgtggtggacctgccatgcttggtgatgtctctcttgaagaacatcatctccgtatcgaaaacgctcgtttaaaagacgagcttgatcgtgtctgtaacctcaccggtaagttccttggccaccaccataatcaccactacaactcctccttagaactcgctgtcggcaccaacaacaacggtggacatttcgctttccctcctgatttcggcggtggtggtggttgcttacctccgcagcagcagcagtcgacggtgattaatgggattgatcagaagtcagttttgctggagctggctttaactgctatggatgagttagtgaagcttgctcagagtgaagaaccgttatgggtcaaaagcttggacggtgagagagacgagcttaaccaagatgagtacatgagaacattttcatctactaaaccaaccggtttagctactgaagcttctagaacctctggtatggtcatcatcaatagcttagctctcgtcgagactttaatggactccaatcggtggacggagatgttcccgtgtaacgtcgcaagagctacaaccaccgacgttatatccggtgggatggctggaacaataaatggtgcacttcaactgatgaatgcagagctacaagttttgtctccactggttccggttcgtaatgttaatttcctccggttctgcaaacagcacgcggagggtgtgtgggcggtggtggatgtatcaattgatcctgtcagggaaaactctggtggtgccccggtaatccggcgactaccatcaggatgtgtggtgcaggatgtgtctaatggatactctaaggtcacgtgggtggagcatgcagaatacgacgagaaccaaatccaccagctgtacaggccgttgctacggtcaggccttggttttggctctcaaagatggctcgctacacttcagagacagtgcgagtgtctcgccatcctcatttcttcctccgttacatctcacgacaacacatcaataacgcctggtggtcgaaaaagcatgctgaagttagctcaacgcatgacgttcaacttctgttcgggaatctcggcgccgtcggtccacaattggagcaagctcactgttggaaatgttgacccggacgttcgagttatgacccgtaagagtgtggacgatccaggagagcctccggggattgttttgagtgctgccacttctgtttggctacctgctgcaccacagcgtctgtatgatttcttgcggaacgaacggatgagatgcgaatgggatattctatccaacggtggtcccatgcaggagatggcccatatcaccaaaggtcaagatcagggtgtctctctgctccgctccaatgcaatgaacgcgaatcagagtagtatgctaattcttcaggagacatgcattgacgcatctggagcgcttgtagtatacgcgcctgtcgacattcccgccatgcatgtggtgatgaacggtggtgattcatcctacgtggctctccttccgtccggtttcgctgttcttcctgacggaggcattgacggtggtgggtcaggtgatggtgaccagcgaccggttggtggtggatccctcttgacagtggcgtttcaaatccttgtaaacatctcccaacggcaaaactcacggttgagtcggtggagactgtcaacaacctaatatcatgcaccgttcagaagattcgtgccgctttacaatgcgaaagctgatcttgatcaagactggcgcgtgcgtgtgtttctttttcttaatgaattgtgaatttttatataacttgtttttttggtcttgtactatgggagggagggggtgtcgagtcaagaacgaaccgcgcgagtgggcgagatccaactcctttgtcaccgtgatgggacaacgacgtaaaagggttcgggtccgatcacggtggaggagttggtggttcgggtattgactggggtttggaaaccccctctttactctttttgtttgtgtttgttatttttattatgtagcgcgagtaagccacacgcgtggggtgtgttgtggttagaaaacgcgaactgtgaggtgatgatgttatgttggatgggatctgtatcgtttcaagttaaaaaaaaaaaaaaaaaaaaagnnnnnnnnnnnnnnnnnnnnnnnnnnnnnnnnnnnnnnnnnnnnnnnnnnnnnnnnnnnnnnnnnnnnnnn

SEQ ID NO: 85743 - DNA, 532 bp, Arabidopsis thaliana columbia
  unsure (1)..(532): unsure at all n locations
aaaagtaagaatttttatacaacacttacatatgtgtcaaattccaatatagttttaacaacaatataggattaactatgaaactcaactgcaaaaaagccgcaagtttgttcaacctcatacattcaatagtaaatataccaaccatataaatttttacaagtaagacatgttgttacaacaacacaaaaaccccataatctcaccatgtgcgaatcaatcaagttgatgagtgacttcctatgagagactgaaccatttccctccatgttcttttaaacaatctgctcccaaagtttcaagcaaaaacctccacaaggcagtgtgtttttcctccgggttttttatggtggnctcctattatcggggnagattacagggggtttacatggatttagctagccattgnctgnacatatcgggancggggtgcgaattggnatgnaggggttgntgngcaccaattggacanagccanngtccgggttttagntngaccgggatngggttccnggggggantnccancagnc

SEQ ID NO: 85744 - DNA, 417 bp, Arabidopsis thaliana columbia
  unsure (1)..(417): unsure at all n locations
cccacgcgtccggaaaaccctaatttctccatttcgaaactccaacgaattctctggtgattttaccaatggcgatggcaacatcgatgagtttgaatctaattggggcattcaaaggcttgtctctttcttcgacttcgtcttttcttagaggcgatttgagtttttcccccaaaacctctttcacggtgactcttcctctggaaaatcttcaagctccgattccgttgacaattgaatcggcccataagaaaggagctggtagcaccaagaacggtcgtgattctcctgggcaacgactcggcgtcaagatctacggtgaccaagttgctaaacctggtgctatcattgttcgtcaacgtggcactaagttccatgctgggcaaaaatgcttgggattgggaaagntccatacca

SEQ ID NO: 85745 - DNA, 431 bp, Arabidopsis thaliana columbia
acaagagcgaaactagaaaaaacaataaggtgcctatgaggtgacgacctgcttgaacaagaggaagcgaaaggatgtgttaccctttctcttgttttcgtatagctattgaatgagtttcatccgatccacgattccgtctctgagctcagaatcataaaagcggaatccgaatctgatctcatgtctttctcattcttcaagccctctaggcctaaaacgcctcaagaggttgttaaagccatcagagacagtcttatggctctcgacaccaagaccgtcgtcgaagttaaagccctcgagaaggctttggaagaagttgagaagaatttttcttctctaagaggaatactttctggagatggtgagactgaaccaaatgctgatcaggctgtacagttagcattagagttttgcaaagaagatgttgt

SEQ ID NO: 85746 - DNA, 850 bp, Arabidopsis thaliana columbia
  unsure (1)..(850): unsure at all n locations
cggacgcgtggggtgcttttttagtcgttctcgtcgagagacttatttatacacgaaaaaggaagaagaagactgttgaaagcgagagagagagagagagagagagagagagagagagagagagagagatggaggatatacaggaggaagagaacggtacggacgaggaggttctgggatcgagcttgaccatggagaaagtggccgcagcgaagcagtacatcgagaatcactacaaagctcagaacaagaacattcaagagaggaaagagagacggtggatcttagaaagaaagttggcgtcttctggagtgccaaaagaggagcatatcaacatgattaaagacctggagagaaaagagacagagtttatgaggcttaaaaggaacaagattagtgtcgatgactttgagcttttgactatcattggaagaggtgcttttggtgaggttcgcttatgtcgggagagaaagtctggaaatatttatgccatgaagaagttaaagaaatctgaaatggtcatgagaggacaggttgagcatgtcagagcagagaggaacctgctggctgaggttnaaagccattatattgtgaagctttactattcatttcaggatcccgagtatctgtatctgccttatggantatctccccggtggtgatatgatgaccttgctcatgagngaggncacattacgggaagatgttgccagnttttatattgctcaaagtntcctggccattgaatccatacaccgatacaactatatttcataggggtatcaaacctnataacctcnttttnngccaaagttgggcncatgaanctntcgccctttggggnnnaaaa

SEQ ID NO: 85747 - DNA, 433 bp, Arabidopsis thaliana columbia
aaaaattcaaaaaaaaaaaaagaattaagttaaaaaaaaaaaggtaaccaaaagagaaaagaaggtataggcagagaaagcattggtggtggtattttgagtgagcttggatgatgaccaaagctcaatatgcgtcatcaggatcataacttgaagattgaaatgatttatataatgtctggatgatgaatgcttttttttttttattattcggctgtttcaagactctggtcctcttagggctttgacttgaatccgtttgtgcttttttaattttatttccgcgttatataagatcctcatacatccttgtctctcgtttttggagttatgctgtcaaaactaaagtgagagtagttgcaatgaaaggctttaaaattaaaggtttctgatctatatcaaggtcaaaacactgtttcttttaaaaaaaaaa

SEQ ID NO: 85748 - DNA, 431 bp, Arabidopsis thaliana columbia
  unsure (1)..(431): unsure at all n locations
gacagtgcgaacaatactcggagccaattgactgaagctcctgacctcattgccaaatgatgaaaaggttgtgctcgttggtcacagctttggtggcttgaacttagccatagccatggaaaagtttcccgaaaaaatctctgtcgctgtattcttgactgctttcatgccggacaccgaacactcaccatccttcgtcttggacaagtttggaagcaacatgcctcaagaagcatggaatgggcaccgaatttcgaaccttatggttcagacaattccggactgagtatgttttttcagccctggtcttcaatgaaaggttgggncctctacccagcntttcctccagtttgaaggatccttngaacctgggggttaccttttaaatgangggcaaggggtccgttattttaatttaaacggnttttatc

SEQ ID NO: 85749 - DNA, 601 bp, Arabidopsis thaliana columbia
gctctctagtgaagaatccgccatggctgttccatttctaagctcttctctacaactcacacccacttctccgattctcttcactaaagtaacaccaacaccaataatccacaaccacagatcaacatgcactatacccacaaagcctcgtctacgtctcctccgccgctccgccgtcgctggaaccgccgtatctgatcaaacagaaggaggtggagatgttcttttaaaccctgaagaagagaaacgtgttgaggtggcggattatgattggacagaggaatggtatccattgtacttaactaaaaacgtccctgaagatgcgcctcttggcctcaccgtctacgatcgtcaaattgttttgtataaagacggtgaaggaacacttcgttgttacgaagatcggtgtcctcatcggttggctaagttgtctgaaggacaattgattgatgggagattggaatgtttgtatcatggttggcaatttgaaggagagggcaaatgggtcaagatttctttagctttctgcaagtgctaaaattccaaaggctgattgtgtgaagacgtttgttgtgaatggatcatcttggtgtttgtgtta

SEQ ID NO: 85750 - DNA, 832 bp, Arabidopsis thaliana columbia
  unsure (1)..(832): unsure at all n locations
ggnnnnnnnnnnnnncttactatagggaccgctggtacgcctgcaggtaccggtccggaattcccggcccgacccacgcgtccgatcccaatcacttcgcttctaatcttaaagcctttaatttagtcttcgagccctctaatggcggatcagagcaaaaacactccagagatcttcgagctcaacaatggcaccatgcaggtcaagatctcaaactacggcaccaccatcacctctttgtctgttcccgacaagaacgggaaactgggggatgtagttctcggattcgactcggtggatccatatgtgaaagggcttgcaccatactttgggtgcattgttggtcgtgtggcaaatcggatcaaggagggaaaattcagtctcaatggagttaactacactttgcctatcaacaagcctcctaatagtctccacggtggtaacaagggtttcgataagaagatatgggaagttgcagggcacaagagagacggcgaaaaacctttcatcactttcaaatatcacagtgccgatggagaagaaggttaccctggtgcggtttctgtcacggcgacatacactctcacgtcagccacgacaatgagacttgacatggaagctgttccagagaacaaagatactcccatcaacttagctcaacatacatactggaacttagcaggtcatgactcagggaacatttttgggccctaagnttcagatattggggncttatatnangccggttgccggnntcacaagtccttcaggggnggtttttcctnnaangggctcccttcggtttnctttgggggggggtagggggcttttt

SEQ ID NO: 85751 - DNA, 570 bp, Arabidopsis thaliana columbia
  unsure (1)..(570): unsure at all n locations
aatccagctggtcttattgagtatagggcacatcccttttggatgcaaaagtattgtccttcacatgagcgtgatggaactcctcggtgttgcagttgtgagcgaatggagccaaaagatacaaaatatctcattcttgatgatggtcgaaaactgtgtcttgaatgtctcgactcagccattatggacactcatgaatgccaaccattgtaccttgagatacgtgaattttacgaaggcttacatatgaaagtggaacagcaaattcctatgcttttggtggagagatcagctctaaaacgnagctattggaaggagaggaaccacggaccatcatcaatttacctggaactaggagggctttgtttgtcctgaagaaccaaactgtcaccacgggtgttaaaggnggcccagnatttngggcaggctccaagttaattggcatggtcacagngccttcaggcttntncggcggtnttaagcacttcggttcncanttttnnttggctccccggttttacccgggcaancttncnangngttgtcatnatgnttcnctaatggggccaa

SEQ ID NO: 85752 - DNA, 649 bp, Arabidopsis thaliana columbia
tacgactcactttgggagagctggtacgcctgcaggtaccggtccggaattcccgggtcgacccacgcgtgcgatttttttctcccagacccagttatcgagaagcttctctcgaatatgttttctgacgccggcggaggcgcaaatcgtcggcgtcgggacttagctcttccgatcaatttgctttggttacttcttatgcttttgtttacaacttctgtccgctactcgaaaactctgtttcaaccctctcgaatcatttctccttcaccggttttcaacggcggccaaaaaaccagctacggaggaagacgatgtggtccggcgtttgccctcctgttccaccctcttctcgcaaattcttcgccaaaatctttcttttccagcgatgcaatccctcaatcagaagcttttatcatctctccgccttttatttacagatctagatctgtttcaaccaccccaagagaatactcacaccggaattcgttgatggcaagagatgtctcttggaccgtcagatgcgccatctccggtggagtcgtcgtcggcgcacgacgttttcttcttatgggtgatggttccatggctctccgacaagcttacaaagcagctgcacgcttcaccgacgagggagacaacaaaagcc

SEQ ID NO: 85753 - DNA, 611 bp, Arabidopsis thaliana columbia
  unsure (1)..(611): unsure at all n locations
ctcgccggtcggaataaaggttttacaaattcctcttgtctcatccgtgatgttgaagcgtactgacaaatggaaatcttcgcatggatctcgaatccatcaattcggacttgttttcgttgttgggatcttcctggtggtggttctgttatttggctttcagtgggcaagaatcagagcacgaaaatgcaactaccgaaacagatctctaacaatgtcaagcccgaattgcaatctcagccaacattagagattcagaacgggcctcaattgatatggacgataccaaattcaccaaaagcgggtctgtttatagctcatgggtggcacaggaaagcttcagacttttggggacaaatcttcagattggcctcaatgtactggcctaccagaggagagggttctttatgngatttgggcctagctcgaaagttggtggnntnaacttgnttttggaatggacanactggcattgggaaggaaaaacgatggngggngntttaaaatcgnggtcgggaagatagtcgaagatcccttggggggaagggtcactggggtantggttggtttggaaaaataagtngganggnttntggngggtggaanntaaa

SEQ ID NO: 85754 - DNA, 798 bp, Arabidopsis thaliana columbia
agacaaagtaaggaggccagatagcagacccgtctctctccgtctccgtctccgtctccgccatgaccagctcttccgctccttcacgcaaggctttaagcaagatcgcgtgtaataggttgcagaaagagctttctgagtggcaattgaatcccccctctggatttcgtcacaaagtcactgataatcttcaaaaatggacaatagatgttaccggagctccagggacgctttacgctaatgagacttatcagcttcaggttgaatttcctgaacattaccctatgggaagcaccccaggtagtgtttggttctccggcaccttcacatccacatatttacagcaatggccatctttggtttagatcttctatatgactcatgggcaaccagcaatggcaggggactcagcctgcatcagcatcctttcggtgcttatcaagttcacccgcaaagcaacgccctgcggataacgatcgttatgtgaagaactgtaagaatgggaggtctcctaaggagacgaggtggtggttccatgacgacaaggtttgatgcaccaccaagattaaagagaagcctttatatgttaatgatgacatttaaaaatgtcaaaacctaactttttgtctcactcttactgtggaatatgtcaagtgaagagctctgaattatataagagaacactgagagccggaatctacatttcgtactgaacatgtgcacaaaaagattaattaatgctaaacaataagttgtcattaatgccaatagttattacacaaaaaaaaaaaaaaaaaa

SEQ ID NO: 85755 - DNA, 323 bp, Arabidopsis thaliana columbia
acgcgtcacactgagggatactgagttgatgggtctctgcacactgaaaacttgaacacaccaaatctacatggacgaagcagagagctttgtcccgtttcagggtataaagaaagatgtcaaagggagactcaactgctacaagcaagattggatcagtggtctcagagctggatttaggattctggcaccaacaacttacatattctttgcatccgctattccggtgattacatttggagaacagttggcaagagatactgatgggaagattaccgctgttcaaaccttagtttcgactgcattatgtggagtgatacatt

SEQ ID NO: 85756 - DNA, 413 bp, Arabidopsis thaliana columbia
cggacgcgtggaggaaagttatcaaatcagtttttgtggaattttgaatctcgtcgcttctgtgttggctatgactgaagttgcgagctcagtggtgtatgaagtgctcggacgcagagctcaggatgtggacgagccgattatggactacatcattaatgtcctcgctgatgaggatttcgacttcggtgaggaaggtgaaggcgcctttgatgccgtcggtgagctcctcgtcgctgctgaatgcgtttccgatttcgaagagtgccgtttggtttgtagcaaactgtcggataagtttggaaagcatggattggtgaagcctacacctactgtgaggagtcttgctatgcctgtgcggatgaacgatgggatggatgatggacctgttaagaagaagagccagagcctgt

SEQ ID NO: 85757 - DNA, 651 bp, Arabidopsis thaliana columbia
gagaaagcgaatttgccgcatggacgcttgtctacggctacacaatgaaccatcttgctttcgcggttcatcgtcttaaacaccgtttcagcgacatcaaatgcgtcaaagagtattttgaagaaaagggtttcgaactcaacaaggatggaggagtcctcaaagtgagtgaagacggtctactgttacaagtgtcggctatgtcggagaaacttgtggttgaatttgcagacggagtaactcaaatcgtcccggcttcatacattgagttcgttgaacgtctagttcttccacagttcaaagatatgccgtgtgatgagatcaaagagtttcatagacgcgagggcttggagcaagctagcgcctaccacataatggaaagcacccgtttcacagcgtaaatatagaaccagcttgttttgttccgctcaatatgtcaagtatgtgtacgtactattaaaatgttttgtatcttatttggacaatttgtgtgtgagatatttctgttcttgtgttgtgaagtgacggtatcacttaatattacccgttaccgacgaataatggcaaacaaagtgtcatggtggggtgtggtatttgtggtgtttttgcatgtaatatcttttgatagtaacgtgacaaaagattttggtg

SEQ ID NO: 85758 - DNA, 650 bp, Arabidopsis thaliana columbia
acgcgtccgagacaactaatgattgaagaaaatggatacgttgaacttgctggaagtaaccaattgtcaaagctttcattaccactagcacgggtctgtctctcaaatggtatatatctgctcaatgagtctctctcgaatgattctaaatcagatcttggatcaatattatccgtggggatgaatgagaccaaagaaggatcatcctctgatcatgaggaaggttacacgaacacagactcgaaagaggcaaaaggaggaatgagccaagaaataattcaaaactcactctctgcttttgaggatattcgtaatagagaaaagcagttgatgagacaggctctctttgccaatatggcttatgtagaattggagttggcgaatcctatcaaagccttgtcagctgctacttcactcttgcaacttgcagattgttcgaagatttatgttttcctaggccatatctatgcagcggaggccctctgcttgctcaatcgacccattgaagctggtgcacatttatccgcctatctactcggacaggatgattttaaactgccatatgcgcaagaagactttgaccagtggtggaagcacacaagttctgattgtgaagagacattggatcccttcacgggaaatactccgga

SEQ ID NO: 85759 - DNA, 413 bp, Arabidopsis thaliana columbia
  unsure (1)..(413): unsure at all n locations
ctttatgaaggcttggactggttatcatctactcttaaggatgttaaagccgctggattcacatcggttggccactcgttttaaatcttccaggtatactttgatatcaatggccagtgtcttcttcttggctttatcacgaaatcagaatctctgaagactttttttgttaaggaaagaatgatcttctcattgtggcaatattagactccattagactatttttgaattttgatcatgctgccatgaaagcttctttgtatatgcngctgatgaagagttgtatcatctggaaaaaccttctcttttggggggcatctttgtccgattaagaccttttggtagatggatataccatgccctccggaaatcatggttatatttgntgaataacaattataaggtttnccntt

SEQ ID NO: 85760 - DNA, 396 bp, Arabidopsis thaliana columbia
  unsure (1)..(396): unsure at all n locations
ggcaacagctcgtacgacctcctgtngaccnggatgggtctacccaacggacccggattccaagtcgcatgcacagacccagcgctcttnagtggtgacccgcaacccgtgggagtaaccattccgagtgcgccctactccttcggcatcatctcggtcctcatggactacacgacgttgcccgagccacttcccacctccacttcgtcctggaccaccagcaaagggcgaggaggcggagaatgcgtcggcaccaaacggattccaccgataccggattcgagatgacccgttcctcaaccggtcaaacgnactaaccgnttttttganaaccaactactngaccttaaanttttgggacttngattcggttttggttgaaatttggcggcnaaa

SEQ ID NO: 85761 - DNA, 485 bp, Arabidopsis thaliana columbia
  unsure (1)..(485): unsure at all n locations
ctgatgtaacgcaatcaggcgacccttcctaaggaaataactcttagggaagagtgcttcaaattttcattagcccacgcaagcgaatttgatgaacttctagcttttctggacgaactgtcggaactatcgagattcaaggcactagaggagagtcttcagtcgtgcctgctctgtcatctagggggtttaatgagaatattctcaggttcaagaatgaataaattgtttgacgatgtctcttgctttgtagtctcgctatcatcagaccaaacatatagctgtgatcagaagagctcactgagggtctcttgttggaagggtctgagtcaagtgtcttgaaggaaacttcactgtgaatcttccagaataccgccacaaaaggttggaaaaatggcttgggngtttctttttggctntcctnnncccagnagcatcaanaatnntccttggggcagaccaaatggggtncggtaaaagagttg

SEQ ID NO: 85762 - DNA, 646 bp, Arabidopsis thaliana columbia
  unsure (1)..(646): unsure at all n locations
ccatctcagtcgaagctcaaggcaaaggtgagagtgccacggctaaatggggaacggaagggagtctttgctacgcggtcccctcatcgaccttgtcccattggcctcaccgttgctaaggtggaggaaatccaaaaggataaggttctcctctctggtgtcgatctggtggatgggactccggtgctcgacatcaaaccatatttaccatactcggacagtattcaaggagcctcagtgccaaactgggtaaaggaggactgctcattggctgtggcttctgtgactttctcagataccttctcttcatccatcaccagctgctggaaactcgatagaaaaagaaagtctctatataggttcaagcaagatgacgtttaggggctttgatcacggcaggtcccgtctcatggggcatacggctcaaattgttcggaacgggaccaagccccaaggttcatttggttgngggaattttttncnccttgggccttgngggggctanncgggttttcatggtagtnntnaagnaatttnncggcagggtttttntttcccaaaccttaangttttaaggaggtgccttnaagtttagggccctggntaattntnaaaaaaaaggggccttnggccngtttggngggtt

SEQ ID NO: 85763 - DNA, 437 bp, Arabidopsis thaliana columbia
cggacgcgtgggcggacgcgtgggcggacgcgtggtttaagccctcactatcctctctctcaaatcgcggagtctccgaagtttctctgtcagacaaaatgcagtcgtcaacgtatgcggttaaaggaaacgctgcgtttgcgtttcagagacggaccttctcttctgacagatcgacgacttctaccggaattcgcttcgctggttataagagcttagccaccaccgggccactctactgttctggttctgaagccatgggagcgacgcttgctcgtgctgataacgggatccagagcgttatgagtttctcttctgtcaaagctcgatcggtcagagctcaagcctcatctgatggagatgaagaagaagctatacctctgagatctgaagggaaaagctctggaacagttttgccttttgttggtgttgcttgt

SEQ ID NO: 85764 - DNA, 495 bp, Arabidopsis thaliana columbia
  unsure (1)..(495): unsure at all n locations
atcagaagtagacaagcttgttgacaagattgattttggggaattatgcaacgattttaagtgcacaagtagtccgcaggtggaatccacagctagacaacttgttcgcgacattcttgaaatcagagaaggaaatcgtgcctttgcatgctatgcagtttccgttaaatataaggttccggttagaagttttacaggtcgtgagaagtacaaaagaccaatgtggataactagtggattagagaatcctaccgtgacggtacaagagatggtaatgttatcggccagcgtcttgcgaattaaaatggccagtgaaaggaaaacccaaaaatcttattccttggcttgctgtaagtgggcggattttgttagtaaaagtgcaaatcctgnantttcccctttaccccgntttattgggcaaagtttttttngcntttangggtttttgggccttttttttnaanaancccccttttncccaagcctttttttggg

SEQ ID NO: 85765 - DNA, 480 bp, Arabidopsis thaliana columbia
  unsure (1)..(480): unsure at all n locations
ctctctcagagtactctcttagtttctttcttctncttctttgtaatacggtgccgtttgacatggataaccatcgcaggactaagcaacccaagaccaactccatcgttacttcttcttctgaaggtaagctgaaaacttaaacaccttcgttttctcattttnccatgtttttttatacttatctatatataatgagaaatctgaattttggtgatgacaaggaacagaagtgagtagtcttgagtgggaagttgtgaacatgagtcaagaagaagaagatttggtctctcgaatgcataagctttgtcgggtgacaggtttgatctttttacctaataatggattcctatttcgtagggaaattaattttaaattggaacccccattaggtaaaaggctggaatttggggggggttattaattttgatnaaaaggtggggacntgaatagcctggggngggtcccnnggnaggaccc

SEQ ID NO: 85766 - DNA, 478 bp, Arabidopsis thaliana columbia
ttaatctctgtgtttccttctgttgatctttttggcacgatctctatttttcttccaaaaaaggaaaaataaaaagatcataacttcagaatcaaagtttctctttgttcacattgttctatccatctgcacatttgattcatgtagtgactaatctcacagtctcgttctcaaatttactttatctgcttgattcgtttcgtgaatccaaatttagtctgaagagaattaagcttggcgcttctttggtgagaagcaagatggatatcgggtgtaaagttctcgtcgttttcacatgtttcctcactgtgacagcagagatttacattgtgactatggaaggagaaccaatcattagttacaaaggtggtgataatggatttgaagcaactgctgtggaatctgatgagaaaattgatactacaagtgaactggtgacatcatacgcccgtcaccttgagaggaagcatgatatgct

SEQ ID NO: 85767 - DNA, 599 bp, Arabidopsis thaliana columbia
  unsure (1)..(599): unsure at all n locations
ggaaaacgtgttgccgagactcttatgtttgattaccataggcaacatgggattgagatacgcatagcgagcgatattcaacacatatggtcctcgtatgaacattgatgatggtcgcgttgtgagcaacttcattgctcaggctctcaggggagaagctctgactgttcagaaaccgggaacacaaacccgcagtttctgttatgtttcggacatggtggaaggtctaatgcgtttgatggaaggagaccaaaccggaccgataaacataggcaatccaggcgaatttcacgatggttgaagctcgctgagaccggttaaagagcttattaaacccggaccggtgggggtataaagatggttagagaacacaccttgattgatcccaaggcaaggggggnaacccggccttaagcaaaagcttaaagaaggtcctttggtttgggaacccaaaggtgaaacgtcatgagggttcccncttnttgganaaattttccgcccaagngttggtgtncccaaaagtaaantntttcccaaaaaaaaggggggnaantttccatttaatcccngatgngggccacattgttgtnttaaacggt

SEQ ID NO: 85768 - DNA, 443 bp, Arabidopsis thaliana columbia
  unsure (1)..(443): unsure at all n locations
taaatcttttccacacaaaaaaaagagaaggaaaaggttaaaacctttatttncaaaccaccctaatcacttctctttggtttacaaaaatgggtcgaccagtccaaactccgagcccgaggatgaacaataactttaatccggtctttcatgcacaatctgaacaaccggttgacgagaaacgggttctgcaagctgagcagatatatcccaacaacggtggagtggttaaccaaccaaaccaagtaccgatgagacctggtccacctacgtatatcaatcaaaagtgcaacatttaaccaacccttttggagtatccaaatgcgccggacccggtccataccaacaggccattcggaacttgggccttcagggncttatttttnattgcatgnancganggggaaaatgcnctcattaanatgctgttttccaattggtca

SEQ ID NO: 85769 - DNA, 581 bp, Arabidopsis thaliana columbia
  unsure (1)..(581): unsure at all n locations
atcaagaccgttagattgactcgtgatcgagtcaaagatggtcaagccatggagaaattgctgagccagggagatctcgtggtttgtccggaagggactacgtgtagagagccttacttgcttcggtttagtccacttttctctgaggtttgtgacgtcatcgtacctgttgctattgactcacacgtgactttcttctatggcacgacggctagtggtcttaaggcatttgatcccattttcttccttttgaatcctttcccttcctacaccgtcaaattgcttgaccctgtctctggaagtagctcgtccacgtgtcgaggagtccctgacaatggaaaagttaaacttcgagggggctaatcacgtgcaagcatgagatcggggaatccgttgggggtttatgtcaccaacccacgggaaggggtaagtactttatctttggcccgtaanaacggggttntnaaagaaaaaataatttgttttnggaggttnntttcntaaanaggggcctttttttgtacggcnctttatttnctaaaaggttttttcccaagnggaccaccttttaggaaaanngc

SEQ ID NO: 85770 - DNA, 371 bp, Arabidopsis thaliana columbia
tcatcctgtaaagctaaacaaataatcagaggaacgaaggagacagcttctgcgaaatcagcatgagagccaagtggaagaagaagcgtatgaggagattgaagaggaagagacgaaagatgagacagcgatctaagtagattcgggagtttgttttgtctttcttctttttagaaccaactcttatgtgagttttgttggttttgcaattttcaatttgaatgttttgttggaccaaatcgaatctatgttttctattagaattatgtttattacatggaatgatccttatgagttactgattctccttaaagttcttcaatctgcttaaaaaccacaaaaaaaaaaaagggcgcccgctcgcgatttag

SEQ ID NO: 85771 - DNA, 632 bp, Arabidopsis thaliana columbia
ccagagaaaaagtttgcagtgagaaggagattgattaatcgatctgagaaagatgggagattcggagtcatttgttgggaaaaattggaatggattgaaggatttctggagtgataggttatcatttttcgaaaattacaccagattcaccaaacgcgacgcgcctcttccttcttggtcttcctccgacgtcgaggaattcattgcctccgatcccgttcatggacccaccgtaatttccttctatctttctctcgctctgtgttttggaatctatagatattgttggtccattatctatgactcggctggtactcgattttactctgctgtcatcggtttatttttttcttcttcatttgattttccattggaaagtttctgttactttttgatataataaagttccactaggctaggtttttctggctttagtccttggaagcacagatacaagaggactaagcccactgcatcgtcgtcggatggcataaaaaacctagcaaaaactgaactgttggtttggtatttggtattcttactgaagatcttacgtttggtactcattgtgtatttgtggtcatcctatccagctgaaaacggctagggaagctgtgacgtttggtgttacc

SEQ ID NO: 85772 - DNA, 492 bp, Arabidopsis thaliana columbia
  unsure (1)..(492): unsure at all n locations
cccacgcgtacgcccacgcgtccgcccacgccgccgcccccgcgtgcagtgagaaggagattgattaatcgatctgagaaagatgggagattcggagtcatttgttgggaaaaattggaatggattgaaggatttctggagtgataggttatcatttttcgaaaattacaccagattcaccaaacgcgacgcgcctcttccttcttggtcttcctccgacgtcgaggaattcattgcctccgatcccgttcatggacccaccctgaaaacggctagggaagctgtgacgtttggtgttaccggagctgcacttggagctgtctctactgctgcttttgcctggaaatactccaggagtccacatggtgctgcattgtccttctaaggaggaggtgtttttggttggncctttgggcaagaggtcgncaaccacaaaattgnaactntacaagtngggccacaatggcaacccnaagtaangtcatggaattg

SEQ ID NO: 85773 - DNA, 800 bp, Arabidopsis thaliana columbia
  unsure (1)..(800): unsure at all n locations
ccatttggattttttccccattgggaaaaaggtttccggtttaaccttttttgaataaaaaaaaaaagttcccccctaggctcagggtttttttcgggcctttaagtccctgggaaggcccagaatacaagaggggttaaggccccctggcattgtcgtgggatggcataaaaaacctagcaaaaactgaactgttggtttggtatttggtattcttactgaagatcttacgtttgggactcaatgtgtatttgtggtcatcctatccagctgaaaacggctagggaagctgtgacgtttggtgttaccggagctgcacttggagctgtctttaatgctgcttttgcctggaaatactccaggagtccacatggtgctgcattgtccttcttaggaggaggtgtttttggttggacctttgggcaagaggttgccaaccccacactggaactttacaagttgggcacaatggcagccccagttaagttcatggaatggggggaacgtaagtttcaataaagggcccgaatttaaaacgaaaacggggggtgcttttttgtccagaggatttttttggggacaacatggaaaggtgattatccccccctttcccgacttttggctttgaaaccttttttaatttcccttttggaacaagtttgccctgttttaaaaaaacaacaagcctcatgaaaggtttgaaaattttaggaaatggattcccaggaaacnaaaaaaaaaaaaaaaaaaaaaaaaaaaaagggcggccgctttaaaggatcccagggtacggaaggggg

SEQ ID NO: 85774 - DNA, 414 bp, Arabidopsis thaliana columbia
acgcggacgcgtgggaaaattccggccttgttcttggaaagcttagtggacgtcacgctgtgaaagatcggctgaaagagttgggatatgaactcgatgatgagaaattgaacgctgtcttctcactattcagagatttaaccaagaataaaaagagaatcacggatgctgatttgaaggcattagtaacatctagcgatgaaatctctttggagaaattaaacggcgctaacggtttaaagtctaacggctatataccagttcctcaggtttcatcgaatgtgtaaacacgttgtatctcttgtatatttgtgtaccacagtaatatcaatttccatttgataatgccgtttttgttgtaatgtattaaaaacagtattaaataaaaggacctgctttatttcctaaaaggag

SEQ ID NO: 85775 - DNA, 427 bp, Arabidopsis thaliana columbia
  unsure (1)..(427): unsure at all n locations
gtggataatccaaatctcaggaagaagaagaacccatgagagtcttcctcgtgatcatggttgtccttgagattctttagtctgttttctctcgggtctgtgtctgtcggatgagcgttttagccactgtagttcaatgagtaacctctatttgctacgaactctcattcctagatcgtgggttaccttttggtttctccaagcaatttgaggctagcctccaataaaaaatagtatttctagtatttgaaaaaacgctactttcgtggtatagagaaagataaagagagagagagagagagagagagagagagagagagagagagagagagagagagagagagatgctcttgataattgctcttgatacaactctattattatngctcttaaatccataaatgnaagntctttatgaattgtaatt

SEQ ID NO: 85776 - DNA, 724 bp, Arabidopsis thaliana columbia
  unsure (1)..(724): unsure at all n locations
aagaatttgattgtgcaatggtgtactgcgagtggtatatcttatgagtcagagtttacggattctccgaatgagtcttttgcttctgctcttcccacgaaagctgcggttgaagcgaacaaagcgacggtgtcgatacttattaagtatctagctgatggttctcaagcagctcagactgttgcagcacgggagattcgtcttttagctaagactggaaaagaaaacagagcatatattgctgaagcaggcgcgataccgcacttgtgccgncttcttacatccgaaaatgctattgtcgcaagagaattcaagtgacccgcgcatgctgaatctctccgatatatggagaaggcaccaagagtcggatcatggaagaaggtgattgtttggagtctatagtaagtgttcttgtttctggtctcacagtggaagcgcaagaaaatccagcggctacattgttcagtctctctgcagtacacgagtatatgaaccggatagcgattgtgggtccagtgcgttgaggcattagcgttgcctgctttcaaaacgggacgccgagaggcaaggaaagatgcggttactgcgttgtataacttatcgacacatccagataactncagtaggntgattgaaggaggaggtgttgtctagtctttgtttggagctttaaagaancgaaggtgtagcagagnacgcaagcanggnncttttggncntttgt

SEQ ID NO: 85777 - DNA, 942 bp, Arabidopsis thaliana columbia
  unsure (1)..(942): unsure at all n locations
accaattctnatattaaaatccacaatactcaaatccccaaaataaacaaaccctaaaattcaaaacaatgaaatgttacaaaagctcatcaattcgctcaaccagtcaccacccattcttctacaaacaacaaccaatctcctctcttcaaccaacttcaatcccaacaactatctcttacccgacccgaacccgattctcctccacccggntccaatctcgattaacccacgacgatccagtaaaacaatcggaagacttatccttctacgatcttctcggcgtcaccgaatcagtcacactcccagaaatcaaacaagcttataaacaacttgctcgaaaatatcaccccgatgtttctcctccggatcgtgtcgaagaatacacagatcggtttattcgagttcaagaagcttacgaaactctctccgatcctcgccggagagttttatatgaccgtgatttgtctatggggttttctttttctttctccggtcgacgccggaaccgttacgatcaggaagtggtggaagagaagagtgagtggaaagcaaaatggcaaactcagctctcagggttaaggagaagaagcaatcagaaagataataacacgatgtcttgggctgcaagaatgcgtcgtcaacaccaagaattttcttaacatacgacatcgagtctttagccctgttatgtatagtcttttgattgttggtgtgtaatatagaaaccatagcatcagtaccccagcaaccttgtatagatgtaatgtagatactcttcgatgtgcttattccaatcggcggaagctctttccgttagataaataccctcattacgaaataagctttctttggtggtgcgtgtaaaaaaaaaaaaaaaaaaaagggcggccgctcctagaggcatccaagcttacggtacgcgtgcatgcgacgtcagag

SEQ ID NO: 85778 - DNA, 1522 bp, Arabidopsis thaliana columbia
  unsure (1)..(1522): unsure at all n locations
atttttcgctttgcgtgccttcttatcaacttgtaaacaaagctacaaatatctttaaataaggacccaactctttttcaattcctcccatcaatcttcttcatttgttcttctgttggtggtggtgaatctagttttcaaagaatcgattttgccaagtgggttcttcttgataacctttcttcttctttgaaatgggttcttctgtggagcagaacattcttgttactggtggtgctggctttatcgggacgcatactgttgttcaacttctcaaagatggttttaaggtttcgatcatcgataattttgataactctgttatcgaagctgttgatagagttagggagcttgttggtcctgatctctccaagaagctcgacttcaatctgggtgatctaagaaacaaaggggacattgagaaactattctccaagcagagatttgatgctgtgattcattttgcgggtcttaaagctgtgggtgagagtgttgaaaaccctcgccgctactttgacaataacttggttggaacaatcaatctatatgagaccatggcaaagtacaactgcaaaatgatggtgttttcatcttctgccactgtttatggacaacctgaaaagattccatgcatggaagactttgaattaaaggctatgaatccttatggtcgtactaagctgtttcttgaagagatagctagagacattcacgctgcagaaccggaatggagaattattctgctgaggtacttcaatcctgtaggagcacatgagagtggcagtattggtgaggatccaaaaggcatccccaataacctcatgccttacatccaacaagtggccgttggacgtttaccggaactcaatgtctatggacatgactatcccaccgaggatggtagtgcggtaagagactacatccatgtgatggatttagcagatggccatatcgctgcgctcaggaagctatttgctgatccaaagattggttgtactgcttacaatctagggactggtcaaggaacgtctgtgttagaaatggttgcagcttttgaaaaagcttccggcaagaaaatcccgattaagctctgtccgagaaggtcaggagatgcaacagcagtttatgcttcaacagagaaggctgagaaagaacttggctggaaggcaaaatatggagtggatgagatgtgcagagatcagtggaaatgggcaaacaataatccatggggttaccagaataagctttgaatttacttcttttgtttggagttaccatttctaattactcaaatctaaaagaaagaaatatacatacatatgatgatatagttgtgctttatattccacatgtatcgaactgatctcttacttcgatgaataaaatggaaagttgatttgattgaaaaaaaaaaaaaaacgggcggccgctttaaaggatatccaggttaaggaggggggcatagccaaggtaaagattcctttcaaaaggtgtcccctaannnnnnnnnnnnnnnnnnnnn

SEQ ID NO: 85779 - DNA, 449 bp, Arabidopsis thaliana columbia
tcggcgtgaagacgacagaagggggaggaaaagcaatccacacgattcgattcaaagttttcattttttctctaaaagtttggattttgatttcgttgctgaacggaaaaagaatcagctcctttcagtttagggttttgggtttctgtttggtctctatcagatgatgtgtgaggagattcttcctctgtttgtgtctgtttcagatggaagacaatgataagtctccccctaaggattactataagattctagaagttgattacgacgcaactgaggaattgatcagactcaattatcggaagcttgcattgaagtggcatcctgataagcacaaaggcgatagtgcagctacagaaaaatttcaagagattaatgaagcttataatgtgctgatggaccctgctaaacgttttgagtatgatttcactggtatatatgagatccac

SEQ ID NO: 85780 - DNA, 707 bp, Arabidopsis thaliana columbia
  unsure (1)..(707): unsure at all n locations
tgganagnccccccccaagggnttccnttngggtncnnggagntngnttccgccccacctgggnatttncccggccccaattnncgnancntttccattgaagtgccancctgntanccccaaaggcgattggtcagctacagaaaatttccaagggtttaatgaagcttataatggtgctggtggcccctgctaaacgttttgaggtatgatttcacctggtatatatgagatccacaaatacactttacgggaatatctcgccagatttaagggaatgatactcacttgcaatgggctcggtatcagccaatcctcatcaccatggacacatcaattggctgagaccaccaaacaacagacgagcaaggatactgtataaactgaagcagaagttagaagagggctgtaaaactgtacaaaactggagctatagcgcttttatcgcgcattgatgatatagtgaaatgctttgattaggtctgttgtattgtttctttatcaatgtagaattagagaagcttgtattgtctctggcttctattaatacattcacacattggtgatggttcaaatcttttaccactctactattctcagcaaaaaaaaaaaaaaaaaaaaaaaaaaaaaagcggccgctctagaggatccaagcttacgtacgcgtgcatgcgacgtcatagtaacttctatagtgcgtcctaaat

SEQ ID NO: 85781 - DNA, 446 bp, Arabidopsis thaliana columbia
cgacgaacagagcaaaagtttttgggaggcatgctctgaacaccatctgctccagggggaaggcattgttgggaaagcatttgaagccaccaaactcttttttgtgcccgaagtggccacatttagcaagactaactacccccttgcacaccacgccaagatatctggactacatgctgctttagcagttccattaaagagcaaatctggtttggttgagtttgtgttggaatttttctttccgaaagcatgccttgacactgaagcgcaacaggaaatgctcaagtcactatgtgtgacactgcagcaagatttcaggagttcaaatcttttcatcaaagacctagagttagaagtcgtattacctgtaagagagacaatgctcttctcagaaaacctgctatgtggagcagaaaccgtagagtcgttgacagaaattcaaatgc

SEQ ID NO: 85782 - DNA, 488 bp, Arabidopsis thaliana columbia
caagaccttttctacaagttcaatgtaaattatcttcttttgatgtttcacaaactcgggtgtggaatatatatgcgtctgctggttcgtttagtagacgttacttgagtaattccacaatagagctaagaacagatgataatgtggttaggtttgctttcaacaatgtctctagtagtggtaacaatgttgtacctacaagaaaagagaagaaatggaaacgggctataattgtcaagaaaagcttaaagtgaatgagttaaggttttatcgtctgaaggctaaaaagaagatgaattctccaaaccctgaagttagaattcgttacaagcttgaaaaggctaagaggaaagaagaatggttgattgagaaactgaggaaatacgatgttccgaaatcaccagcggagccttatgatccagagagtttgacagaggaagagcagcattacttaaaacgtacaggtgagaagagaaagaactttgtac

SEQ ID NO: 85783 - DNA, 523 bp, Arabidopsis thaliana columbia
  unsure (1)..(523): unsure at all n locations
tctccagctcatcnnnnnnnnnnnnnnnnnnnnnnnnnnnnnnnnnnnnnnnnnnnnnnnnnnnnnnnnnnnnnnnnccacacgancggtgcttcctatcttatttcctcctccttggtcaactctcttttcgattaaagttgcaaactttcattagttgtcttaggctcttgtgaatttctctatctaggggggtttagtttgagggaggaggaatcaagggagaggttttggaaaagggggggggggttcagtgaaagtgcggcagcaacaacaaacctcctccagcatggcctgggagagctgtccctcaggcccctcgtcaatcttgggatggaccaaaacccatctctatcggtggatctactggttctattggccctcagacattggatattgtgggctgagaatcctgacaatttcagagtgggggttctagcggctgggtcaaatggtactttacttgctaaacaaggaaagaaaattaagcctgctttgggtgctgaaaaaccaagcccttgtt

SEQ ID NO: 85784 - DNA, 837 bp, Arabidopsis thaliana columbia
  unsure (1)..(837): unsure at all n locations
acgtctatctctcacactgtttatctgattcgtcttctctgataatcaagagtagtagtgcggttctctggaaaatattcgatttttaaaagactctgatgatgacattaaactcactatctccagctgaatccaaagctatttctttcttggatacctccaggttcaatccaatccctaaactctcaggtgggtttagtttgaggaggaggaatcaagggagaggttttggaaaaggtgttaagtgttcagtgaaagtgcagcagcaacaacaacctcctccagcatggcctgggagagctgtccctgaggcgcctcgtcaatcttgggatggaccaaaacccatctctatcgttggatctactggttctattggcactcagacattggatattgtggctgagaatcctgacaaattcagagttgtggctctagctgctggttcgaatgttactctacttgctgatcaggtaaggagatttaagcctgcattggttgctgttagaaacgagtcactgattaatgagcttaaagaggctttagctgatttggactataaactcgagattattccaggagagcaaggagtgattgaggttgcccgacatcctgaagctgtaaccgttgttaccggaatagtaggttgtncgggactaaagcctacggttgctgcaattaaagcaggaaaggacattgctcttgcaaacaaagagacattaatcgcaggtggtcctttcgtgcntccgcttgcnaacaaacataatgtaaaagattctnccggcagattcagaacattntgncatatttnaaatgtattcaagggtttgcctnaagccg

SEQ ID NO: 85785 - DNA, 576 bp, Arabidopsis thaliana columbia
  unsure (1)..(576): unsure at all n locations
aaaaaaactaanccncttttggcaaaagaaaaactttgaattgtataactcttcactttcttcggtcatatctttaatggggtctgaagagagaatgatgataagttcttcttcagttctagacgaagagtatgaatatacagatgatgggtttcattacgagacaaggcaaaacagtttgtctagattatctatctgcacaaactccttccacgaagacgacgaagatcatccttcagaattgggtaatttcttctctacgttgtcgttagagagcttcaacgacgacgtcggagccgaagctgacgtagaaatctccgatgacggtggcgaatcggattccgacaaagactcttccggattttactctctaccgacgatcacatctcgccggagaagaaaactcacagtttccggcggtttagaaacgagcaaagagagtnagacggaagtcgattgggagtaagtgtaatatagttagtcaacggagggtattaagggaaaaaagtaaaanggggatcagttcggncantnggtttancggcgttgnngagnggccantttccggccggnagg

SEQ ID NO: 85786 - DNA, 570 bp, Arabidopsis thaliana columbia
  unsure (1)..(570): unsure at all n locations
ggaaaaagatgctatctattccattatgcggcaataccgccgcgaggagtagagtgagtccatgcttcctaattttctgactgaaaagtcttttggctcgatgcgcttaacaaaagggaactctctagattaagaatgaatttccttctccattaagccggaccggcgacgaataataaataggtacgtacccccaccccaggcagagttagtgagccgtgtaataggcgaccatttcgcgcggttcggggggcacttgagtaagccgccggcgcccgactgccgcttgacccctatccaatttttcgggccatttcccccctcgtactatccaaaaaatgggattcttcccgaatcccggttttgcggccccaaccttttcccaactaatacctattctgtttagtacttcaggtgcttttnttgcngatnatgtnaatcccgtngggggtcaattccaacgngcctttcaaactnggactttttgnaacggctcttnggttcttcaataaanggtggtcttcgtcaagttttattncttcttgtnaaccgtccccgttgggnaaaaat

SEQ ID NO: 85787 - DNA, 5113 bp, Arabidopsis thaliana columbia
  unsure (1)..(5113): unsure at all n locations
aaattgatctcatcttcaatcaaattcatcatcttcgatactcgtttcttctctctttggtttcatacagatcccaaatttctagggctcctagtcctttgatttcttcgactggaatcgcaattccccactacgtcaagctggacagacaccgaagggatcgccatgagagtggcggctacgaggattcctaccataaccaccgagcccatcccagaggtccatctcgtccctcagattcacgcttcgaagaggatgatgatgattttcgccgccaccgtcgtcgtcgtggaagcagccctagcaattatcgaattggaattgggggcggaggaggaggtaatggtggtcgacgctgggaagatgacactcctaaggattttgatggtcccggagatggaggtttccggcagatgaatggtcccccagatagagtagattttaagcctatgggtcctcaccatggtggaagttttcggcctatggggtttgcctacgatgatggttttcgtccaatgggtcctaacggtggtgtgggaggagaagggacacggtcaattgttggagctcggtataactatcccgcgaagtatcctccttcagagagtccagacaggaggagatttatcggtaaagcaatggagtctgattattctgtaagaccgactacaccgccggtccagcagcctctttccggtcagaaaagagggtatcctatctcagaccatggcagctttactggaactgatgtctctgatcgtagcagtacagtcaagctttttgttggatctgtaccaaggacagctacagaagaagaaatccgtccctatttcgaacagcatggaaatgttctggaggttgctctgatcaaggacaagagaactggacagcagcaaggtatgtcaatctccattttattaggaaatagtcgtgaattatactttttaaaatttcaggtctccctgaaaaggctgatgggaagcaaccccagtctcatcattggcctccaattgtttgcaacaattttcgggcttattgcttatgcttgccagcgtcttatctgtgttcgattctgtcacagaagaaggctacctgtgctaagaaagggtttatgtacttatgttgggcaaatagatttcgctacttgtgtgtattctagaactttagatgtgtttgaaaagtgtagaatttattgagggtgttttagagttggagttaatgtacagagaactgaattttgctgttgcctttatagtgggaattggttataagaacatcgctattttcctctccctattgaaattcattttctttactcttcctctagatggattgaagatgttgtgtatggtcttgacaggatgaatgtatttttttaagttggtagtttgataaggacatgaggttcaaaagatggtttcttgatttgccactcctgctggtcaaagatttggccgtctttctaattttatcatgttggaggtttggcgtcttcattttctttcatatcaatttatgggtgtgctgtctattggttaatgatggcattccttttacctttttggatgagtgatgctggaatgaatgcgtttctccttttcttttgttgatggcctgaggaactatgatggctatatttctttccactctctttgaatggcctgaaatgtgtgctttctgtatggtcgtccctctcaatttcttggatggcttgtgatgtgatataccatctctcgtcataggtgaatgaatgatttgtttagtagttcttatgtatgtattttgtatgttcccacgtctctattccttggatggcttgtgatgtgatataccatctctcgtcatagatgaatgaatattttgttgagtagctcttatgtctgtatggtggcccttgcagtgctgatcgatatttatgtggaagaaatgtttgatgatagattttttttgtatgctcccttttcgctaatcaagcctttgtgcttgcaaggtgcaactgttattttattattgaatttcctgttctactactccatttagttctgtctctattttgtcagtgtgaagaaatactagacgatgaatggtgtgtttgtacgtgcatagttatttataaattcttgactttccaagaagttattatttctataactgctacacctttgtggatggcagaacaaatgcatctgattgtggtgacataaacacttttgatcgcggttgaatgtactagattccatacaactctttcttcagccttgtgaaatattattatgttaggtggtgcaaacatatggaaggaacctgattgttttagtttcttagaatagtttctgatgttaatacagcatgttgacttcactctcttgcccttgatcaatcagcatcaggcaggggcctaattatgtattacatgaagcaatcgtattcttttctgaattagatttttttccaatgagttatcttgcccataactgtagttctttatttgaagtcttcaaatgcttgatgtatggtgacgaaaatgtgtatatgttttggttttgattatccgctactcatcaattattgagattcttacatactgaatccgttactttggacctatagttatgttttatgttgctaattaacttgtacatgtttctagattttctttcaaatggatcctgcttggacaaatgcagccaccctttgtctgaaaggccctcttgtagatatgttatctgcagatactgactgtgttcaattttttaatatttgtttttgccatattctccatttgaagacattaatttattctctccaacaactttacatcaatatttaagtggaggctgtcagacatgtcttatgattttcctactgaacttatgtgctttgagtagtacatcttgttactagtacaatttgatggtagaaggaaaagttgaaccctgaaacagatagcttaagtatcagtctttaatgcaggctgttgttttgtaaaatatgcaacttcgaaagatgcggatagagccatcagagcactgcacaatcagatcactcttcctgggggaactggtcctgttcaagttcgatatgctgacggggagagagaacgcataggcaccctagagtttaagctttttgttggttcactaaacaagcaagccactgaaaaagaagttgaggagatctttttacaatttggtcatgtggaagatgtctatctcatgcgggatgaatatagacagagtcgtggatgtgggtttgttaaatattcaagcaaagagacggcaatggcagctatcgatggtctcaacggaacttataccatgagaggttgcaatcagccattgattgttcggtttgctgagccaaagaggcctaaacctggcgagtcaagggacatggcacctcctgttggacttggttcagggcctcgttttcaagcttcaggaccaaggcctacctctaactttggtgactctagtggggatgtaagccacacaaatccttggcgtccagctacttcacgaaacgtaggcccacctagtaacactgggatccgtggtgccggtagtgacttttcccctaaaccaggtcaagcaacattgccttcaaatcagggtggcccgttaggtggttatggtgttcctccccttaaccctctcccagtccctggagtttcatcttctgccacattgcaacagcaaaatcgggcagctggccagcatataacaccattaaaaaaacctcttcacagtccacagggtctccctctccccctccgtccgcaaactaatttccctggggcccaggcacccttgcagaatccttatgcttatagcagccagttgcctacctctcagctgccaccacagcaaaacatcagtcgtgcaactgctcctcaaactcctttgaacattaatctacggccaacaactgtgtcttctgcaactgttcaatttccccctcgttcccagcagcaaccgctacaaaagatgcaacatcctccttctgagctagctcagctcttgtcgcagcaaactcagagtctacaagcaacattccaatcgtctcagcaagcaatttctcagctgcagcagcaggtgcagtctatgcagcaaccaaaccaaaatttaccactctcacagaatggccgagctggtaaacaacagtgggctggatctgcaattccaagagtggctagcaccactggttcgacaccagtgagctatgtgcaaacagctgcacctgcagtaagtcagagcgtaggttctgtcaaatgtacctggaccgagcatacctcgcctgatggatttaaatattattacaatggtctaacgggtgaaagcaagtgggaaaaacctgaggaaatgatagtgttcgaacgagagcaacagaaacagcaacaacatcaagagaagccaactatacagcagtcccagacccaattacagccgttgcagcaacaaccacaacaagttcagcagcaatatcagggccagcaattacagcagccgttttattcttcactgtatccaactccaggggccagccataatactcagtatccatcattgccagttggtcaaaatagccagtttcctatgtcaggaattggtcagaatgctcaggattatgctcggacacatatacccgtgggagctgcttcaatgaatgatatatcaagaactcaacagagccgtcaatctccccaagaactcatgtggaagaataaagcttgaggtacatgagacgaggagctaaactatctcagtagctagatagaaatttctggaactaattagtcaaggagaggaaaagcagcaatggtagtgtccttagtctctgatttttttagttaaccccttcagttataatagataggcgatcgtagaccatctgcattctatcttttctctaatcagatatctcctcctttttcattttaagagctgccaaacaatggcctgttgtaacataactagcgcaagttatgtctcatgttgtgttactagtagtaacttagctgggtaaaccaaactttgatccagattaggagtcatatataattatataaatagaatatgtacattcatagatnnnnnnnnnnnnnnnnnnnnnn

SEQ ID NO: 85788 - DNA, 1817 bp, Arabidopsis thaliana columbia
  unsure (1)..(1817): unsure at all n locations
cacataagttgtcgaaggcttgagcgttgttccttcttcttcaggtttttgttctattgttaagatgggagacaaaaacgatgacgacaagaacattgagatatggaagattaagaagctgatcaaatcacttgaagctgctaggggtaatggaaccagcatgatctcactcatcatgcctccgcgtgatcaggtctctcgtgttaccaagatgttgggtgatgagtatggaaccgcgtcaaacatcaagagcagagtcaatcgtcaatctgttttgggggccataacttctgctcagcaaaggttgaaactttacaacagggtccctcctaatggtcttgtactctatactggaaccattgttaatgaggatggtaaggagaagaaggttactattgactttgagcctttcagacccatcaatggttctctctacctttgtgacaacaagtttcacacggaagctttgaatgaattgttggagtctgatgacaagtttggtttcattgtaatggatggaaacgggactctctttggaactcttagtggtaacacccgtgaggtacttcacaagttctctgttgatcttccgaagaaacacggaagaggaggacagtctgctcttcgttttgcccgtctccgtatggagaagcgtcacaattatgttaggaagactgctgagctcgccacacagtactacatcaatcctgctacaagtcagcctaatgtgtctggactgattcttgctggttcagcagatttcaagactgagttgagtcagtctgatatgtttgatccccgactggctgcgaagatactgaatgtggtggatgtatcatatggaggagaaaatggttttaatcaagctattgagctgtcagctgaaatccttgcgaatgtgaagtttatccaagagaagcgtctgattgggaagtactttgaggagataagccaggacacggggaagtatgtgtttggtgtggaagatacgttgaacgctttggagtctggtgctattgagacactgattgtatgggaaaatctcgatatcaacagatatgtgatgaagaacagtgcgactggtgaaactgtgatcaaacacctgaacaaggaacaagaagccaacactgagaacttcaaagtagccgacagtgacttggctttggacgtggaggagaagctgtcgttactggagtggcttgccaatgagtacaggcgttttggttgtgcgttagagtttgtgaccaacaagtcacaggaaggttctcagttttgcagagggtttggaggaatcggaggaatacttcgttaccagcttgacatgactgcctttgattccgaggatggagaagctcttgatgatgattcggaatgacaatcaatcaaatcctcaccatcgctggttggggaagatggcgctccgccatgcctgaaccagcttgcgcgggctgtcggggtcgcgctgaagaatttgaaaataaattgaagaagcatcttttgtgaaggtgatgaatgaaggaacatgtggagagtgaagaagccttggctttggtagcgttgttggtgcctagacatttatggagttttattttgagttggtgtttctttaataatttactttggtcagttttatttccagaattggaatactcttgtctgagagaatttgggtttttattacatggatgtctttaaaaccttaattaaatcctaaattctataagttcaaagaattaatcctaaaattcggcaaaaaaaaaaaaaaaannnnnnnnnnnnnnnnnnnnnnnnnnnnnnnnnnnnnnnnnnnnnnnnnn

SEQ ID NO: 85789 - DNA, 1823 bp, Arabidopsis thaliana columbia
  unsure (1)..(1823): unsure at all n locations
gccatttttatttttctctttcttctctcatttttattttcttttcttttttttcacctttttttttttcctttttttttctttcttcttcttcttacttgattttgaaccctagcttaaggggaattttctcgggaaacaaaagagatatttttatcgcagtgagaaagaaacacaaaaaatgcagaatcaaaggcttattaagcagcaacaacaacaacaacaacagcaacatcaacaagctatgattcaacaagctatgatgcaacaacatccttctctttatcatcctggtgttatggctcctcctcagatggagcctttaccaagtggaaaccttcctcctggttttgatccaactacttgccgtagtgtgtatgctggaaacattcatacgcaggtcacagagattcttcttcaagagatttttgcaagtactggtcctattgaaagctgtaaactcatcagaaaggataagtcatcatatggatttgttcactactttgatcgaagatccgctgctctggctatactgtctctgaacggaaggcatctgtttggacagcctatcaaagtcaattgggcgtatgccactggtcagagggaagatacatcaagtcatttcaacatttttgttggagatctcagtccagaggtcactgatgcaacattatatcaaagcttttctgtcttttccagttgttcggatgcgagagttatgtgggaccaaaaaactgggcgctcgagaggctatgggtttgtttccttccgcaatcaacaggatgctcaaactgccattaatgagatgaatggtaagtggttaagtagcagacaaatcagatgcaactgggccacgaagggcgctacttctggtgatgataagctcagttctgatggaaaaagtgttgtggaacttacaactggctcatcagaggatggtaaagagacattaaatgaggaaacacctgaaaataattctcagtttaccactgtttatgtgggaaaccttgctccagaggtaactcagcttgatctacaccgttacttccatgctcttggcgctggagttattgaggaggtccgtgtccaacgagacaaaggctttggtttcgtgagatataacactcatcccgaagctgctcttgctattcagatgggtaacactcagccttacctctttaacagacagataaagtgctcatggggaaacaagccaactccaccaggtacagcctcaaacccacttcccccacctgccccagctccagttcctggtctatctgcagctgatctcctaaactatgagaggcaattggcacttagcaagatggcaagtgtgaatgcgttaatgcatcaacagggtcaacaccctctaaggcaggctcatggaataaatgccgctggagcaactgcagccatgtatgatggtggctttcagaatgtagccgccgcacagcaactcatgtactatcagtaataaacctcagttcgtggcgccgatctcaagtttcaatctctttgctttttctcttttttttttgtttgtctagaacttgtttgtgtgtgtctgtttgtctctcacttaagttatctatataaagttttatctgcagttgtatgattagttatgtattcccatggattgtaagacaagcgaattacattcaataaaagggatttggatatccattctatgtgaaaaaaaaaaagaaaaaggnnnnnnnnnnnnnnnnnnnnnnnnnnnnnnnnnnnnnnnnnnnnnnnnnnnnnnnnnnnnngtcctaaannnnnnnnnnnnnnnnnnnnnnnnnnnnnnnatatca

SEQ ID NO: 85790 - DNA, 362 bp, Arabidopsis thaliana columbia
  unsure (1)..(362): unsure at all n locations
agggggaccnccccaaagggaaccccccttggcttaataccccaaccgttttttagcgtcaaagaggaggtgggatgatgatgttagtattcaaaacccaggcacgtggtgaaatgaaagctcctaagcgcttcatcaatgatacaatcaggaatgacttccacagaaaattcctgcatagatacatgaagtgattgtttgtcaagagtgttattgctacttctttgtatgatgattatgactaaaagcttttattctgtctggaattacgatgtctctgtactcaaacaacaaatgtttttaagctttatatcaaaaacttatgcatttgattttaatgtaatatctcacaaaanagnaaa

SEQ ID NO: 85791 - DNA, 505 bp, Arabidopsis thaliana columbia
  unsure (1)..(505): unsure at all n locations
gtgacaaggacccttatcccaaaaagattgtgggagagggaaatctcgagagacgaatnctagaaatgaacaggaagagaataaaggttgtgaaaccaggttcaaagacgtctttcgcaactactgaagtccgtggaagctatggtcctcctttccacgtggagacatttcgtaacgaccaaagaaggctaaggatagttgtggatagtgagaatgaagtagacatagtggtgcagtcgcgccatctccgcgatgttatagtacttgtcattcgcggctttgctcagcggttcaacagcacttcactcaattctctacttaagatcgatacatgaaaccttaaagagcgacacgtccattgcaactttatttcagtgtgccattcaaaatctcattcgctttgttgatggaattgtctctctgtttgtttttggtgctttcatctttccaatatgctggcctgttttcccaatgggttttaaaatccaaatttnnantcaggttt

SEQ ID NO: 85792 - DNA, 493 bp, Arabidopsis thaliana columbia
tgttttaggtgcactatagaagagctatgacgtcgcatgcacgcgtacgtaagctcggaattcggctcgaggacagtttttagatggctaagatatattccccttcttttcccggtactctctgtctttgcatttttactctcttgacgctaatgttcattcgggtttccgctcgacccgcgacattcgtcgaggatttcaaagccgcctggtcggaatcgcacatccgtcaaatggaagacggaaaagctatccagctcgtccttgatcagagcactggatgtggatttgcttccaaaagaaaatatctattcggacgagtgagcatgaagatcaaactcattcccggagactctgccggtacggtcaccgctttctacatgaactccgatacggccacggtgagagacgagctagattttgagttcttgggaaacagaagtggtcaaccttactcagtgcaaacaaacatatttgctcatggcaaaggaga

SEQ ID NO: 85793 - DNA, 551 bp, Arabidopsis thaliana columbia
atgttttaggtgacacttagaagagctatgacgtcgcatgcacgcgtacgtaagctcggaattcggcgcgagattccccttcttttcccggtactctctgtctttgcatttttactctcttgacgctaatgttcattcgggtttccgctcgacccgcgacattcgtcgaggatttcaaagccgcctggtcggaatctcacatccgtcaaatggaagacggaaaagctatccagctcgtccttgatcagagcactggatgtggatttgcttccaaaagaaaatatctattcggacgagtgagcatgaagatcaaactcattcccggagactctgccggtacggtcaccgctttctacatgaactccgatacggccacggtgagagacgagctagattttgagttcttgggaaacagaagtggtcaaccttactcagtgcaaacaaacatatttgctcatggcaaaggagatagagaacaaagagttaatctttggttcgacccatctatggattaccacacttacactatcttatggtcacacaaacacatt

SEQ ID NO: 85794 - DNA, 616 bp, Arabidopsis thaliana columbia
  unsure (1)..(616): unsure at all n locations
acctttgcccaggttgggctgaccacccngcattggnttcacgtctggtgagnctccnagtgcaagttggaccaattgaaccngccaaacttttgcccctgaaaggaggattactggtgggaatatcttctggagctgctgcagccgctgcgataaaggtggcaaagcggcccagaaaacgccggcaaactcataggttgtgattttcccctagccggtggggaacgttacctatcgacctcattgttcgaatcagtcagacatgaagcagagaatttgccaattcaatgaggcttttacacgacctgacttggttcgttttggtgaaaaagtaccaagatttcggttcgacatttacactgtcatagtttcatgaactttaaccctccagatgatgtatgatctctaatctctagcctctaaggtggactgtcctttgacattctattggtggtttttttctagctaatatatgtgtaagtctgtaaaacttttgttgacaatgaatctagaactatataatggccaaaaaaaaaaaaaaaaaaacaaaagggcgaccgctctagaggatccaagcttacgtacgcgtgcgttcgacgtcatactcttcgagagt

SEQ ID NO: 85795 - DNA, 752 bp, Arabidopsis thaliana columbia
  unsure (1)..(752): unsure at all n locations
ccatgattccgccaggctctaatccgactcacaaaaggaaaactgggaccccctgcaggtaccggtccggaattcccgggtcgacccacgggtccgacacatttgatccaaggtattggggttggactcttcccagccaatttgggtttcaacgttcttgataaagtcatccaagtgacaagtgtggaagcaattgaaacagccaaacttcttgccctgaaaaaaggattactggtgggaatatcttctggagctgctgcagccgctgcgataaaggtggcaaagcggccagaaaacgccggcaaactcatagttgtgattttccctagcggtggggaacgttacctatcgacctcattgttggaatcagtcagacatgaagcagagaatttgccaattcaatgaggcttttacacgacctgacttggttcgttttggtgaaaaagtacctagatttcggttcgacatttacactgtcatagtttcatgaactttaagatttcagatgatgtatgatctctaatctctagcctctaaggtggactgtcctttgacattctattggtggtttttttctagctaatatatgtgtaagtctgtaaaacttttgttgacaatgaatctagaactatataatggccatgtaggatttcaaccaaaaaaaaaaaaaaaaaaaaaaagggcggccgctctagaggatccaagcttacgtacgcgtgcatgcgacgtcatagnnnnnnnnnnngtaacgg

SEQ ID NO: 85796 - DNA, 874 bp, Arabidopsis thaliana columbia
gtggaacgctttccggatcaggaagattcctcatggtgaagaataaagactttaaggtttatggtgtggaacctacagaaagtgcggtaataagtggaggcaaaccgggtacacatttgatccaaggtattggggctggactcatcccagacaatttggatttcaacgttcttgatgaagtcatccaagtgacaagtgtggaagcaattgaaacagccaaacttcttgccctgaaagaaggattactggtgggaatatcttctggagctgctgcagccgctgcgataaaggtggcaaagcggccagaaaacgccggcaaactcatagttgtgattttccctagcggtggggaacgttacctatcgacctcattgttcgaatcagtcagacatgaagcagagaatttgccaattcaatgaggcttttacacggacctgactttgggtcggtttttggtgaaaaaagtacctagatttcggggtccgacatttacaccttgtcataaggtttcctcgaactttaagatttaatatgatgtatgatctctaatctctagcctctaaggtggactgtgctttgacattctattggtggctcttttctagctactatatgctgtagtctgctaaacttttgttgacactgaatctagaactatataaaggccatgttggattttaaccatcggaaacatgaaaattccagtcgggcgggccccttctaaaggattccaaggcttacactacgccttgcatgccgaccgccaatagtctccttcttaatggtgtgtaacccctaaaaattacaatgtaacctgtggccattcgctttttaacaaaaccggtgttggtcattgggggaaaaaccccctttc

SEQ ID NO: 85797 - DNA, 457 bp, Arabidopsis thaliana columbia
aattaaataatttattttcatcaactgatgaaacatcaattcaaccaagaacgaaacttcctctcgctcgcgctctactgacaatctgagatccagggattctattccagatcactctcaattctctcctccatatactatcgagcaaacggattcatcatcatactctgcgttgtctccagcagatcagaagaagaataagtagagaagaaacctcaatcaaagtcgttgttctttcttatttcggttatgcttgatttggtttctcctacttgttcaccaattcttcttctctgacccttcgttgactgcaaggttgctgcagaagcggacgctgtagttttatccttggtccatgtgttggtagcacaagggtatgagttgttgtaaagtgccagttcttattgaagcacaagttgaaatggtgtcggctaatgaacttgagaacaaaagccta

SEQ ID NO: 85798 - DNA, 581 bp, Arabidopsis thaliana columbia
  unsure (1)..(581): unsure at all n locations
ttgggtcctagaggaaacnccctcaaacgagttgaagcgagtactgattgtcgtgttctaataaggggtagaggcagcattaaagatccgattaaggaggatatgatgagaggtaaacctggttatgagcacctcaatgaaccactccacatcttagtcgaggcagaattacccattgaaatagtggacgcacgtctcatgcaagcccgtgaaatactcgacgatctacttactcccgtggaggaaacccatgatttctacaagaaacaacagctacgggaattggcccttctcaacggcagtcttcgagaagaaggatctccaatgtctggttccatctcaccttacaataggcctcggcatgaagagagctaagncaaggggctaaaaaccacgccttaatttcataatttttngcttgcctctctcacctttccaaggaggtatatatccaccgtaacagcttccttcaaacaaggaggatttgganttttgtttccatcccattcctcctttcctggggtaccggactgnntntaatccctgggttaaaaccaaaaggcagnntgntntnattttgc

SEQ ID NO: 85799 - DNA, 699 bp, Arabidopsis thaliana columbia
  unsure (1)..(699): unsure at all n locations
gctggnacgcctgcaggtaccggtccgtaatncccggggcgacactcgcgttcgcaagcagctaaggatcttctgagacgttagtcgcgatgagtatgcctacaaacagctcctcaaggatcttattgttcagtgtttgcttcggttgaaagaaccttctgtgnngangcgnngccctcctattacgggnnggnagnggaagcngnacttgangacgcaaaggacgcanatgctggtgaagcaaaggcccatgccccagaggttgctgttgacacaaaaatattccttccccctcctcctaaatctaatgatcctcatggtctccactgctctggaggtgttgggttagcttctcgtgatgggaaaatcgtgtgcgagaacacccttgatgcgcgtcttgatgtggcattccgtatgaaactcccagtgatccggaagtcgttgttcggccaagttactgcctgatgaaagaaaggtaaagagaatagagtttattccataccggtttgcggtgtggttattgacctattttggaagagatttctctttgatgaagttctttgaacaagaccttatcttagtttggtgccaaaccaatcgaacgcttctttttttcgaattcctttttttcattcctcctcgaatgtgtgtcatcatggctatacaacccactcaaatgaaagacttcttttctttttc

SEQ ID NO: 85800 - DNA, 1158 bp, Arabidopsis thaliana columbia
  unsure (1)..(1158): unsure at all n locations
nnnnnnnnnnnnnnnnnnnnnnnnnnnnnnnnnnnnnnnnnnnnnnnnnnnnnnnnnnnnnnnnnnnnnccacgcgtccggtgaaaatccgatctacgtctctgtctctctccaatctctctgcgccacagaattgtgcgatttacgaaaatctctgaaacctccgatcgttaacggcgaccgccgattttcccggtaaaaatgaacgacggagatgtatcgaggcagatccagcagatggtgagatttatccgccaagaagcggaagagaaagcaaacgagatctcggtttctgctgaagaagaattcaacattgagaaactccagcttgttgaggcggagaagaagaagatcaggcaagattatgagaagaaggagaagcaagctgatgttcgcaagaagattgattactctatgcagctaaatgcatcaaggatcaaagttcttcaagcgcaagacgatattgtcaatgccatgaaagaccaagcagctaaggatcttctgaacgttagtcgcgatgagtatgcctacaaacagctcctcaaggatctaattgttcagtgtttgcttcggttgaaagaaccttctgtgttgttgcgttgtcgtgaagaggacttgggtttagtggaagctgtacttgatgacgcaaaggaggaatatgctggtaaagcaaaggttcatgccccagaggttgctgttgacacaaaaatattccttccccctcctcctaaatctaatgatcctcatggtctccactgctctggaggtgttgtgttagcttctcgtgatgggaaaatcgtgtgcgagaacacacttgatgcgcgtcttgatgtggcattccgtatgaaactcccagtgatccgtaagtcgttgttcggccaagttactgcctgatgaaagaaaggaaaagagaaaagagattattcaaaccggtttgcgtttggttatttacctattttgggagagatttctctttgttgtgattctttgtattttgcaaaatcttactttggtgccaaacccatcgaacgcttctttttttcgaattcctttttttcattcctcctcgaatgtgtgttatcatggctatacaaataaataaaatgaaagacttcttttctaaaaaaaaaaaaaaaaagggcggcccccacgcgtccg

SEQ ID NO: 85801 - DNA, 302 bp, Arabidopsis thaliana columbia
  unsure (1)..(302): unsure at all n locations
cttagcagaatctagccttgatccatctagttcttctactgttgtttcacttcttgaagatgctcttaaatncccctctgataggttgcgcaaaggtcaggctctgaacaatctcgggagtgtctatgtcgattgcgagaagctagatttagctgcggattgctatataaacgctctcaaggtaagacacacgcgtgcacaccaaggtctagctcgtgtccacttccttagaaacggcaaagctgcagcctacggagaaatgaccagcctaatcgnaaaggntcaaaacaatgnatccggct

SEQ ID NO: 85802 - DNA, 408 bp, Arabidopsis thaliana columbia
gataaacgaaacctttgttgataaagatggagaggaaattcatatcaaggttccagtaggaatgaacatccttgaagctgctcatgaaaatgatatagaactcgaaggggcatgtgaaggttctctagccgtgtttcacacctgccatgtgattgttatggacaccaaatactacaacaaactcgaagaaccaacagatgaagagaatgatatgctagatctcgctttcgggttaacagcaacgtcgcgattgggatgtcaagtcatcgcaaaaccagagctagatggagtacgcctagccattccttcagctactacaaattttgcggttgatgggtttgttccaaaacctcactagtcacttaatagtctcagagcaaatgatttttcgaaaaaaaacccattaca

SEQ ID NO: 85803 - DNA, 503 bp, Arabidopsis thaliana columbia
cagctactaatacgactcacttagggaaagctggtacgcctgcaggtaccggtccggaattcccgggctttgcgctatcattgtctctgatttgcctttgttattgctgctgtgcccgtcaatcttatggttattcccgggttgcttatgctctatcccttatcctcctcatctcgttcacaatcgcagcaatgatgtgtttttctttacactggtcaagggaaatttcatgctagcacaaccgatactttggactatgtcgtgagtcaagcgaatctcacgtcagaaaacctcaggaatgtgtcagattatcttaatgcagctaagaaggttgatgtgcaatccagcattttgccacaagatgttctctcgagtatcgacaacatacagggaaagataaactcgtccgccacaactctttctgtgaaaacaatggagaaccaagacacgatacaaaatgtcttggacatcatgagacttgctctcgtcatcatcgctgctga

SEQ ID NO: 85804 - DNA, 554 bp, Arabidopsis thaliana columbia
cccacgcgtccgccgatcttctcctcataaaaacacctcttcctcaacgaattttttatccatgagtcgcataatgggattgttcgatctcgagaaacacttcgccttctacggtgcttaccatagcaatccgatcaacattctaatccacatcatcttcgtttggccaatcttcttctcagttttacttctcctccactcgtcgaccccaattttcgacccctctcaattagggttttctcaatcgttgaccctcgacggcgttttgcgatttaacgttgggtttatattcgccttgatttatgctctgttctatatcggtttggataagaaatctggatttgtagctgctcttatgtgtttctcttgctgggttggttccagttttcttgctgttcgactaggatcttctcttgccttaaaggttgggttagcatctcagcctgttaatgttggaccgggcaagtttgttggccatgggggttttagggaaacgggcacctgcgctgttagacaatttactacaagctattcttatggttcctctcttcgtg

SEQ ID NO: 85805 - DNA, 457 bp, Arabidopsis thaliana columbia
gtcgactttatcgataagcttgatatcgaattcgcggccgcccaacacgatgggacgaagacttgcgagatgttaccgtcagattaagggaaagccatacccgaaatcacgatactgtcgtggtgtgccagatcccaaaatcaggatctacgatgttggtatgaagaggaaaggtgttgatgagtttccattctgtgttcatttggtttcatgggagaaagagaatgtgtcaagtgaagcacttgaagcagcatcgtattgcttgcaacaagtattatggtgaaatctgttgggaaagatgcttattatttgaggattagggtttatcctattcatgttcttaggtttatcaagatgcttttgtgtgctgtagctgtttggcttaatactgtaattataggagctttttatagatttttgtttttttgttttagtttcaattgttctggattttttg

SEQ ID NO: 85806 - DNA, 734 bp, Arabidopsis thaliana columbia
  unsure (1)..(734): unsure at all n locations
ttttgggccatgaaggataaagagagacgccatgggaagaagacctgcgaggtgttaccgtcagatcaagggtaagccatacccaaagtctcgctactgtcgtggtgtgccagatccaaaaatcaggatctacgatgttggtatgaaaagatgcttttcatttgaggattagggttcatcctttccatgttctcaggattaacaagatgctttcgtgtgctggagctgataggcttcagactggtattgaggaggtgccttttttggtatatagcttttgggtacctttgtgccttcgtgttgcgtagttggaccaaggttcttttggtgctggtgtcgttgcaagggggatgcccanntggtcaccatgcctcnnaagaggctcnnttcgtcgtgccttaagttcaaaagttccctgggggtcgtcaaaaggattattgggtcagcnnaggaaatgggggctttcaaacgaagtttaacccagagctgnnacttcaccannagttgaggcaagaagaanngcgtgttgtccctttgatggtgtcaaccgctannagttcctctcatgnnccatggacctttgtgcttaaccgtcaagccgggaaggtgcctttttgcccagcccacttactgaagagtatcnagaactgaagtatnccttctcattccggtgaagaagaattataatcagcctgaatctttttacttatcgntatctctggtgttgttttaag

SEQ ID NO: 85807 - DNA, 662 bp, Arabidopsis thaliana columbia
  unsure (1)..(662): unsure at all n locations
ctctacgactttattagggaacgctggtacgcctgcaggtaccggtccggaattcccgggtcgacccacgcgtccgcgaagatccaacacgatgggacgaagacctgcgagatgttaccgtcagattaaggggaaggccatacccgaaatcacgatactgtcgtggtgtgccagatcccaaaatcaggatctacgatgttggtatgaagaggaaaggtgttgatgagtttccattctgtgttcatttggtttcatgggagaaagagaatgtgtcaagtgaagcacttgaagcagcacgtattgcttgcaacaagtattatggggaaatctggctgggaaaagatgcttttcatttgaggattaggggttcatcctttccatggttctcaggattaacaagaatgctttcgtgtgctggagctgataggcttcagactggaatgagaggtgcttttggtaaagctcttggtacttgtgctagagttgcgattggacaggtccttttgcctgtnaggggaaggntaancatggggtccatgcccaggaancctccgaaagccaaggttaagtnccctggcgcaaagacattgtnncagaatgggntnccnaatcaccggcgngacncgactnaccntnaagntnccnatgggcaaccaagtcnn

SEQ ID NO: 85808 - DNA, 781 bp, Arabidopsis thaliana columbia
  unsure (1)..(781): unsure at all n locations
atgatacttcagctctctacgactcactatttggaaagctggcacgcctgcaggtaccggtccggaattcccgggtcgtcccacgcgtgcgcgatgttggtatgaagaggaagggtgttgatgagtttccattctgtgtccatttggtgtcatgggagaaggagaatgtgtcaagtgaagcacttgaagctgcccgtattgcttgcaacaagtacatggtgaagtctgctggaaaagatgcttttcatttgaggattagggttcatcctttccatgttctcaggattaacaagatgctttcgtgtgctggagctgataggcttcagactggtatgagaggtgcttttggtaaagctttgggtacttgtgctcgtgttgctattggacaggttcttttgtctgttcgttgcaaggatgcccatggtcaccatgctcaagaggctcttcgtcgtgctaagttcaagttccctggtcgtcaaaagattattgtcagcaggaaatggggcttcacggagtttaacagagctgacttcaccaagttgaggcaagagaagcgtgttgtncctgatggtgtcaacgctaagttcctctnatgccatgggcctttggctaaccgtnaccgggaagtgcctttttncagccactactnagngntcagacctgaggntcctttcattccggtnaggggattttaannacctgatncttttactatnggaaccctggggcggttaagtttagntggcaaanagtttctnancttttgnncnttttttaagta

SEQ ID NO: 85809 - DNA, 645 bp, Arabidopsis thaliana columbia
  unsure (1)..(645): unsure at all n locations
ctcgcgggtccacgcaagactctatactgagtcgtaataacgacagaaggggagggttttgcaaaaccaacaccgaagatccaacacgatgggacgaagacctgcgagatgttaccgtcagattaagggaaagccatacccgaaatcacgatactgtcgtggtgtgccagatcccaaaatcaggatctacgatgttggtatgaagaggaaaggtgttgatgagtttccattctgtgttcatttggtttcatgggagaaagagaatgtgtcaagtgaagcacttgaagcagcacgtattgcttgcaacaagtatatggtgaaatctgctgggaaagatgcttttcatttgaggattagggttcatcctttccatgttctcaggattaacaagatgctttcgtgtgctggagctgataggcttcagactggaatgagaggtgcttttggtaaaagctttgggtactttntnctcgtgttgctattggccaggtncttttgncttttccgttcaaaggatncccatggtnaccatgnnnaaagggctttttcggccggnnnaagtcaaattncccngggcggcaaaaagttttttcaaccaggnaatggggtttncggggttacagnnttgctttcccagttgggggc

SEQ ID NO: 85810 - DNA, 1041 bp, Arabidopsis thaliana columbia
  unsure (1)..(1041): unsure at all n locations
ggccgaggaaggataaagagattttttcggccagcagccgcgctttttggccgaggaaggataaagagagacgccatgggaagaagacctgcgaggtgttaccgtcagatcaagggtaagccatacccaaagtctcgctactgtcgtggtgtgccagatccaaaaatcaggatctacgatgttggtatgaagaggaagggtgttgatgagtttccattctgtgtccatttggtgtcatgggagaaggagaatgtgtcaagtgaagcacttgaagctgcccgtattgcttgcaacaagtacatggtgaagtctgctggaaaagatgcttttcatttgaggattagggttcatcctttccatgttctcaggattaacaagatgctttcgtgtgctggagctgataggcttcagactggtatgagaggtgcttttggtaaagctttgggtacttgtgctcgtgttgctattggacaggttcttttgtctgttcgttgcaaggatgcccatggtcaccatgctcaagaggctcttcgtcgtgctaagttcaagttccctggtcgtcaaaagattattgtcagcaggaaatggggcttcacgaagtttaacagagctgacttcaccaagttgaggcaagagaagcgtgttgtccctgatggtgtcaacgctaagttcctctcatgccatggacctttggctaaccgtcagccgggaagtgcctttttgccagcccactactgaagagtatcagaactgaagtatccttctcattccggtgaagaagaattataatcagcctgaatctttttacttatcgttatctctggtgttgttttaagtttttagttggacacaatcagtattctgaatctttttgtgactcttttgtttaagctctgaaatgattttgttccttcgttcttggccatataaaaacaaaaaaagggaggccgctctagaggatccaagcttacgtacgcgtgcatgcgacgtcaaagctcttctatnnnnnnnnnnnnnnnnnnnnnnnnnnnnnnnnnnnnn

SEQ ID NO: 85811 - DNA, 497 bp, Arabidopsis thaliana columbia
  unsure (1)..(497): unsure at all n locations
gtaannaacgggcccggccacccgtctgaaaaaatctttgtgcgaagcatgaaaaatgtcgtcgacccatcagttagtttcttcgatgatctcttcttcctcatccactttcttagccccttcaaattttaatctcagaactcgaaatgcttgcttacccatggcaaaacgggtcaatacttgcaaatgtgttgctacgccgcaagagaagatcgagtataagaccaaagtgtcacggaattcaaacatgtccaaacttcaggctggatacctattcccggagattgcaagaagaaggtctgcacacttgttgaaatatccagatgcacaagttataagtcttggaataggcgacacaactgagccaattcctgaagtgatcacttctgctatggcaaagaaagctcatgagttgtcaacaatagagggatattgttggttatggtgctgaacaaggtgcaaagccactgagagctgctattgcgaaaacattctac

SEQ ID NO: 85812 - DNA, 1746 bp, Arabidopsis thaliana columbia
  unsure (1)..(1746): unsure at all n locations
nnnnnnnnnnnnnnnnnnnnnnnnnnnnnnnnnnaccacgcgtccgcaaaaaacagagacaaaagaatggcgcgaaaatccctaattttcccggtgattttgctcgccgttcttctcttctctccgccgatttactccgccggtcacgattaccgcgacgctctccgtaaaagcattctcttcttcgaaggtcaacgttccggtaaactccctccagatcaacgcttaaaatggcgccgtgactcagcattacgcgacggttcctccgccggcgttgacttatccggtggttactacgacgccggagacaacatcaagttcggttttccgatggcgttcacaacaacgatgctttcatggagtataatcgatttcggtaaaaccatgggacctgagcttagaaacgccgtgaaagctgttaaatggggaacagattacctccttaaagcgacggcgattcccggagtagtcttcgtccaagtcggagacgcttactccgatcataactgttgggaaaggcctgaagatatggacactctccgtactgtttacaaaatcgatagagctcatcctggttctgacgtcgctggtgaaaccgcagccgctttagccgccgcttcaatcgtttttagaaaacgcgatcctgcttattccagacttctacttgaccgtgccactagggtattcgcgtttgctaacagatatcgcggcgcgtatagtaacagtctctaccacgcggattgtcctttttactgtgatttcaacggttaccaggatgagttactgtggggagcggcatggctacacaaagcctcgaggaaacgagcgtacagagaattcattgtgaagaacgaggtcattcttaaggctggagataccattaatgagtttggttgggacaataagcatgctgggattaatgtcttaatctccaaggaagtgttaatgggaaaagcagagtattttgagtctttcaagcagaacgcagatgggtttatctgttctatattgcctggaatttctcacccccaagtccaatactctcgaggagggctactagtgaagactggagggagtaacatgcaacatgtaacatcactatctttcctcctattggcttactctaattatctgagccatgccaaaaaggttgtgccttgtggcgaattaactgcttccccatctctcctccgtcaaatcgccaagcgtcaggtggattacattctcggagacaacccgatgggactgtcttacatggttggatacggtcaaaagtttccacgtaggattcatcaccgtggtagctcggttccttcggtttcagcccatccaagccacatagggtgcaaagaaggctctcgctatttcctaagcccaaatcctaacccaaaccttttggttggtgctgtagtcggtggacctaatgtcactgatgcttttccggattcaagaccttactttcagcagtctgagcccacgacttatatcaatgcaccactagtgggccttctcggttacttctccgcccattctacttggcgatgagggagggccttattacttattactctctatcctattagaggtgtgctggaaactttaggccaccctaaaacccttttttttcttttttaatgttattgccactctttattttctactacttaaccaattgtattgtaagcccgtaattagcggccgcgaattcgatatcaagcttatcgataccgtcgacatcgagggggg

SEQ ID NO: 85813 - DNA, 420 bp, Arabidopsis thaliana columbia
cttttgttctttgagagacttatttctctctcggtttcttactcttttcggatcagaaatttaaaagcttttaacttttgtcttgctctgtttcatggacactgatttctcaattggtctctgtttttgttgagtgggttgagaagagagatggcgagaagtagatcgattagtggttatgggatatggaaatatttgaatcctgcgtattatcttagaagaccgagacgtttggctttgcttttcattgtcttcgtctctgtttctatgcttgtctgggatcgtattaatcttgcccgagaacatgaggttgaagtttttaagctaaatgaagaagtttcacggttggagcagatgttagaagagcttaatggtggtgttggcaataagcctttgaagactctgaaggatgccccagaa

SEQ ID NO: 85814 - DNA, 279 bp, Arabidopsis thaliana columbia
atttgattcctgggataaacacagagtattctagattgtgcaagtcctctagcgcacagacacatctgaatcagaccaacgcaaacaccccccagaggaccggttttatctagtactagtagtatttacctgtagtgaaatttaacgaataagactgcactttcgcaggtgtattttgatattcgttgactaaaaaccttttactactatgtaatacgactttttcttctagaaagtttgaaaatcggaatttaaagttatgcttgagtaaaaaaaaaa

SEQ ID NO: 85815 - DNA, 368 bp, Arabidopsis thaliana columbia
atctctctctatatctctctctctcttcactctctctttctttcaaaatggaaaaactcatggttccgacatggagacccgacccggtttaccgtccaccggaaacaccactcgaaccgatggagtttttagctcgttcatggagcgtctctgctctcgaagtctccaaggctctaacaccacccaaccctcagattctcctctccaaaaccgaagaagaagaagaagaagaacccatctcctctgtcgtagacggcgacggcgacacggaagacaccggacttgtcaccggaaacccattctccttcgcttgttcagaaacttctcaaatggtcatggatcgtatcttgtctcactctcaagaagta

SEQ ID NO: 85816 - DNA, 416 bp, Arabidopsis thaliana columbia
  unsure (1)..(416): unsure at all n locations
gaaacgccgaagctgacttcttcttccacgcgttctccaaatccaaatgcacactcgtataaattgatcggagacgatctctatcaaatcaatctgagataacaaaaaaaaaacccagattccattaacccagctcgagaatataatgcacgatttctgcttcactatcccgtacgggatccttctcgatcgtcggaggatctatcgggtatctgaagtttggaagtattgcatctctcgccggaggagcaggcactggattgcttgtagttctctgctggtttcatcagccttaaagctttcgagangaagnagncatccgttactcgntancttttctcggaaacantcattncagctggctctnacattttgnaatggggcaacgggttttttcnagcctcagaaggttttnc

SEQ ID NO: 85817 - DNA, 437 bp, Arabidopsis thaliana columbia
aaagttacttatcgatggatgcattcatgtatatgagcaaattttatttgagttcttattggtaaatctgcagaatggtgaaatgacaaaatgaatctgccaattacacaacgtaactagctagctagtaggaatcgttaattgtgaacttgtaatttttgttcataatcagttaatcgctatgcaaaaattgtataattagtgacaaaaaattaaatttcaccacatcttatgttcataacatggttcaaatctaattgcatgtttatgtgtgtgtgacttgtaaccacatattttgttcataatcaatcgtttcttatcttgatataaattgttgggattcgtaggtcaagattctaaggagagaatcctattggttcaagaacgttggatcagttgttgccgttgatcaggtaacgcatttagtctccaatcaa

SEQ ID NO: 85818 - DNA, 558 bp, Arabidopsis thaliana columbia
  unsure (1)..(558): unsure at all n locations
cggcacgaggaagagagagagagaaagaaaaccagagatggcgatgacgacagcatctacggtatttgttctaccggccaatgtcacctcggtcgccggcgcttcgtcgtccaggagctccgtgtctttcttgccgatgagaaacgccggttctaggctcgtagtcagggcagccgaagatcctgctccggcttcctcttcttcaaaagattctccggcagctgccgctgctccggatggagctactgccaccaaacccaagccaccaccgattggtcctaagagagggtctaaggtcaagattctaaggagagaatcctatttggttcaagaacgttggatcagttgttgccgttgatcaggacccttaggactcgatacccggttgtgggccggttcgaaaagtcaattacgcaacatattggccacaactatngattggttggggcgagaagttaccttaatggggattnaaacctgggattattccggttcccggtgaactgccaacggtgtcgaaagtcattttcccactaccttccggtttttcttccaaat

SEQ ID NO: 85819 - DNA, 649 bp, Arabidopsis thaliana columbia
  unsure (1)..(649): unsure at all n locations
gaaagggntttattccnccgnattccggccngaacccannnttgcnttgccgccagnattttcggnatttgttttcccggcaaatgnaccntcggtccccgcggttcgtcgtccagggncccgtgnctttcttgcccgatgagaaccnccgggttctaggctcgttagtcaggncagnccggaagatcctgctccggnttnccttcttctttcaaaaggattctcccggcagttgccgcttgctccggatggagctactgccaccaaacccaagccaccaccgattggtcctaagagagggtctaaggtcaagattctaaggagagaatcctattggttcaagaacgttggatcagttgttgccgttgatcaggaccctaagactcgatacccggttgtggtccggttcgcaaaagtcaattacgccaacatatcgaccaacaactatgcattggatgaggtcgaagaagttgcagcttaaatgggagaattcaaaaactctgtgtattctataccggtttatccgtttgtaacttgacccaaaccgtatgtaccgcaaaagtttaccaattatttctcctcatctgaagcggccgcgaattcgatatcaagcttatcgataccgtcgacctcgaagggggctaaaggc

SEQ ID NO: 85820 - DNA, 763 bp, Arabidopsis thaliana columbia
  unsure (1)..(763): unsure at all n locations
taggggaactatagaagagctttgacgtcgcatgcacgcgtacgtaagctcggaattcggctcgagaaaagaaaaccagagatggcgatgacgacagcatctacggtatttgtcctaccggccaatgtcacctcggtcgccggcgcttcgtcgtccaggagctccgtgtctttcttgccgatgagaaacgccggttctaggctcgtagtcagggcagccgaagatcctgctccggcttcctcttcggcaaaagattctccggcagctgccgctgctccggatggagctactgccaccaaacccaagccaccaccgattggtcctaagagagggtctaaggtcaagattctaaggagagaatcctattggttcaagaacgttggatcagttgttgccgttgatcaggaccctaagactcgatacccggttgtggtccggttcgcaaaagtcaatttacgccaacatatcgaccaacaactatgcattggatgaggtcgaagaagttgcagcttaaatgggagaattcaaaaactctgtgtattctataccggtttatccgtttgtaacttgacccaaaccgtatgtaccgcaaaagtttaccaattatttctcctcatctgaatctcgagccggttttcttattctttcacagaactgtgtttgggaaaattcaagttaaaaaaaaaaaaaaagctnnnnnnnnnnnnnnnnnnnnnnnnnnnnnnnnnnnnnnnnnnnnnnnnnnnnnnnnnnnnnnnngtac

SEQ ID NO: 85821 - DNA, 860 bp, Arabidopsis thaliana columbia
gccccctttggaaattcgataggaccgtccgcggtaccggttccggaattcccgggtcgacccacgcgtccggaaaaagaaaaccagagatggcgatgacgacagcatttacggtatttgttctaccggccaatgtcacctcggtcgccggcgcttcgtcgtccaggagctccgtgtctttcttgccgatgagaaacgccggttctaggctcgtagtcagggcagccgaagatcctgctccggcttcctcttcttcaaaagattctccggcagctgccgctgctccggatggagctactgccaccaaacccaagccaccaccgattggtcctaagagagggtctaaggtcaagattctaaggagagaatcctattggttcaagaacgttggatcagttgttgccgttgatcaggaccctaagactcgatacccggttgtggtccggttcgcaaaagtcaattacgccaacatatcgaccaacaactatgcattggatgaggtcgaagaagttgcagcttaaatgggagaattcaaaaactctgtgtattctataccggtttatccgtttgtaacttgacccaaaccgtatgtaccgcaaaagtttaccaattatttctcctcatctgaatctcgagccggttttcttattctttcaccgagaaacagagcgtccatttgcccgtgcaaaacaattctcctgtacacgggggcggccgcttttagagggatccaagtttttcgtacccccgtgcattgcgaaccgtcattaacttcttgtctattaggtggtcccccttaaaatttaaaatttcacttggggcccggtcgttttttaaccaaccggtcgggggaccttggg

SEQ ID NO: 85822 - DNA, 788 bp, Arabidopsis thaliana columbia
  unsure (1)..(788): unsure at all n locations
attgtccgtctgcaggtccccgtccggaattcccgggtcgacccacgcgtccgaggaaccactctttcgtgtcgcaataacaataagaaagaaagaaaaagaaaaccagagatggcgatgacgacagcatctacggtatttgttctaccggccaatgtcacctcggtcgccggcgcttcgtcgtccaggagctccgtgtctttcttgccgatgagaaacgccggttctaggctcgtagtcagggcagccgaagatcctgctccggcttcctcttcttcaaaagattctccggcagctgccgctgctccggatggagctactgccaccaaacccaagccaccaccgattggtcctaagagagggtctaaggtcaagattctaaggagagaatcctattggttcaagaacgttggatcagttgttgccgttgatcaggaccctaagactcgatacccggttgtggtccggttcgcaaaagtcaattacgccaacatatcgaccaacaactatgcattggatgaggtcgaagaagttgcagcttaaatgggagaattcaaaaactctgtgtattctataccggtttatccgtttgtaacttgacccaaaccgtatgtaccgcaaaagtttaccaattatttctcctcatctgaatcccgagaaaaaaaaaaaacaaccccgcgtacgtggtgccgtctcccccgaatggggggcgactgcctttatattgggggcgggggccgttttnnnnnnnnnnnnnnnnnnnnnnnnnnnnnnnnnnnnnnnnnnnn

SEQ ID NO: 85823 - DNA, 1222 bp, Arabidopsis thaliana columbia
attcatttcatacatatttgtctctcttaaatgtgtttatttccccttttgtagtaaccactcagaaggttttccttcactcaaaatggctttgtctcttatctttctagctctcgtagtgttgtgccctagtagtggtcacagccaacgttctccttcaccgggatactacccgagttcccgagtaccgacttcaccttttgatcgtgaattccgtactttatggggctctcaacaccaacgtagagagcaagacgttgtcactctttggctcgacaaatccactgggagtgggttcaagtctcttcgtccataccggtcgggctactttggtgcttccattaagctccaaccaggcttcactgctggagtggatacatccctctatctctcaaacaaccaagagcatcctggagaccacgatgaggtcgatatcgagtttctagggacaacgccagggaagccttattcccttcaaacgaatgtcttcgttaggggaagtggcgaccgaaatgtcattggaagagaaatgaaatttaccttgtggtttgaccctactcaagattttcaccattacgcaattttgtggaaccctaaccaaattgtattctttgtagacgatgtaccgatacgtacatataatagaaagaatgaagctatattccccacaagaccgatgtgggtttacggatcgatatgggatgcatcggactgggccacagaaaatggaaggatcaaagctgactaccgataccaaccatttgtggctaagtacaagaactttaagctagcgggatgcacagcggatagctctagctcatgcagaccgccatcgcctgcacccatgcgcaaccgtgggttgacccggcagcagatggcggcattgacatgggcacagaggaacttcttggtctataactattgccatgacccgaaaagagaccatacccaaacaccagaatgttaaaacaaacaaacaaaacaaccaaagaaaggttataataattttattttgcattacccaacatacatgaataatgggaggtcttgtgacgggtccacactggaaactaaattgaagcagttgagcgtccggtcctctatgatttgagattaaaaagaaaaggttttgtttttcaaaactttgtaatgtttccatttggtatctttcttataattgtaatattgtgtgatcacatatattaatatctggtattgtatt

SEQ ID NO: 85824 - DNA, 381 bp, Arabidopsis thaliana columbia
ttcctctctccttgtctctgtaccgcgtcgaaatatgagaaacgaatgatttgatcatcaatcaacgagaaacacacacggagaaagagaatctcaaattagctccagctcctgatcgattccgattttcacaattctttccttggatctgctcttaccttgtcacgatttcacttccctgtgtttttgatttatacttggtcatccaataacgaaactttgatcaaactggaactacagtttattggaactccctgaagcatttagatggcagaaaaagcttgtataaagcgtcttcaaaaagaatacagagcgctttgcaaggaaccagtctcgcatgttgttgctcgtccttccccaaatgacattcttgaatggcat

SEQ ID NO: 85825 - DNA, 478 bp, Arabidopsis thaliana columbia
aggaaacgcctcatgtctttacctcaggtgatcagtcacatccacaggtaaaggaaatctatgagaagctggagaagcttgaagggaagatgagggaagctgggtaccaacccgagactgagttggccctgcatgatgtggaggaggaagaaagggagctgatggtgaaggttcacagcgagaggctagccattgcctttggactcatagctactgagccaggaactgaaatccggatcataaagaatcttcgagtctgtttagactgtcacaccgtaaccaaactcatctcaaagatcacagagagagtgattgttgtaagagatgccaaccgcttccatcacttcaaagacggtgtctgttcatgtggagattattggtagtgactcgtttttggcctcaacacaagtcatagtgtactcatcctgtaacattacctcactcataattgatttcttttttgacaataaaaaaaaaa

SEQ ID NO: 85826 - DNA, 247 bp, Arabidopsis thaliana columbia
  unsure (1)..(247): unsure at all n locations
ttttttttttcggaaaacaaataatgtatattcttagcaagtatcaaggttatatgagctacatccatcgatcccctgatttctcttacaacttatataatcgtaaaactgacttagttacgccgccttccaactaaattattcttgagttttacttttgtaatttgatatatctctttcagcgtctgcttcatatctattaccttccccgttgtaaggctcactggagattcatcatgattnccat

SEQ ID NO: 85827 - DNA, 409 bp, Arabidopsis thaliana columbia
  unsure (1)..(409): unsure at all n locations
tttttttcgagctgaaaattcttattgttagatataacaacggaaatgtagtaaaacagatagaaatgagtaggctacaacaacatatggtttcatcaaataagacacacaaaaaagagtttttggttgttttcactgacaaccgctcaatcttgcccaatccacaaactgcattccgccgtagatgttattggccaaccgtacaccaactgtgaaggccatagccgccggaggaatttcttgggcaaaaggtgatgcttcgaccactctttctagaccattggatggtttggataacgagtattcgaagaaacactccaagaatacaccccagagagctggcactcttgattagcggtggtacggggagttccctcnggattattanggtttcgttgggcagtcaggt

SEQ ID NO: 85828 - DNA, 631 bp, Arabidopsis thaliana columbia
  unsure (1)..(631): unsure at all n locations
gaggatacattctactgaagtaatgccattgttgctacggattctttccacatccccctttgatataaggaaagaagttgcctatgtcttgggaaatctctgtgtagaatctgcagaaggagacagaaaaccagggataattcaagagcatttagtctctattgtcagtggcggttgcctccggggtttcattgagctggtcagatctcctgatatcgaagctgctaggcttggtcttcagttcattgagctggttttaagaggaatgcccaaacggggaagggccaaagcttgtggaaaggagaaagacggtatcgatgccaatggaacggttntcagtttcatgagaacgaagagctgagagtacatggcgaacagtcttgtggataaatactttggtgaagattatggaatcgatgaatgaaatcgcctcggattttagggtgagaatacaaagaaagncggatgatgaaatcaaaaggaaactagtcatcttagcgtttgcttgtaacgatagtgagtgagagagaaagacaatagtctttaggttttgtcttntgggttgttgttgtaactacttgtaatacagttttgtntcacngaaggtttgattcctttttgtcgtaaaaaa

SEQ ID NO: 85829 - DNA, 395 bp, Arabidopsis thaliana columbia
agcgttaggacaaagagatcgccgaccagatgctctcggtagtctcagtgttctaccagatgagaccatctgtgttcttctcgaataccttgctccccgagatattgctcacctcgcttgtgtcagcagtgtgatgtatattctatgtaatgaagaaccattgtggatgagtttgtgtctcagaagagcaaaacgtcctcttgaatacaaaggttcttggaaaaaaacagcattgcatctagaacgagttactcaagaaaatgacgcatacagaaaatgttttcattttgatggattcatgtcgttgtacttgtataaacgattctataggtgtaatacatctcttgacgggttctcttttgataatgggaatgtggaacgtaggagaaatatct

SEQ ID NO: 85830 - DNA, 556 bp, Arabidopsis thaliana columbia
gaggaacaatccaattcttcctcaagatccttacgagaaggccatggctcgattttgggcaaagttcatcgatgaccagatcctaacactagggtttaggtcccttgtaaaagcagagaaaggaagagaggttgctattgaagagactcgggaactgcttatgtttcttgagaaagaagtcactggaaaagatttcttcggtggcaagacaatcggattcttggacatgatcgcaggaagtatgatcccattttgtctagctagactttggaaaggtattggaattgatatgattccagaggagaagtttccggaattaaatagatggatcaagaatttggaagaagttgaggcagtgaggggatgtattcctccaagagagaaacaaattgagcgcatgaccaaaattgcagagacaattaagtctgcctaaattaaagatacttcttgcctacggaaatattttgatttatatgctttgcatcggttttttcatttatatttttaatttttttaaaggtttttccggaaaattggatggcctaatattttaggt

SEQ ID NO: 85831 - DNA, 322 bp, Arabidopsis thaliana columbia
ttttttaacacaaacacaccctttgaacaactttattaaacacatgtactttttacatttttgaaccagcaaacttgttttttacagtatacttatatattacatgaaattgtttacagtaattaaaatactggagaagctagcgccttgagcttggtggcttccgtgaaaccgcataaggggactgaaacccaactgtttctacgtctccaacagttttgaacaatcttctttttctagcctcttcccctggcgaccggtgcagtaactgtctctgcacgtctacaagtgatcggttccttgtaagtgtgcggtttgtctg

SEQ ID NO: 85832 - DNA, 743 bp, Arabidopsis thaliana columbia
gccgagcactaatacgactcatatagggaaagctggtacgcctgcaggtaccggtccggaattcccgtttcgacccacgcgtccgcggacgcgtgggcggacgcgtggggttcgaatcagttgaactaatcttagaagtgagaacaccgttgcttccataattcccggtgaatcatttgttgttcgatttctccggcggagatggtgagtccgacgagagacgctatccaatcttacatgagcatcactggcgcgtccgagtcactcgcgattcagagacttgaggaacatggcaataatctccctgaagcgatcaatgcccactttagagatgtcgaaagaagcatttatgatgactcaagcttagacactcgttcagactacaatgttgtggaagataacaatcacgttcgtggtagcgagactaggccagttaacgagtctaggccagtccctggcgcacttccatctatactctcggctgctcgggcttttagaccgtctttgcttctagatcccaattacagacggaatatccttaggcagctcagtggctcctgctctctcttggaagcccttctccatcaattctcacacttcggggaggtcacttgggttccctgctcactctacctggggaaatgatcacactcgtcctcctggacttggagcggttggagacggttatgctaggcattcaccaagctatggatcccaggtccatggtgggacacatagggatg

SEQ ID NO: 85833 - DNA, 376 bp, Arabidopsis thaliana columbia
cccacgcgtccgcccacgcgtccgcccacgcgtccgttcacagttgatgcaagatcatctccttcggttagtaaactcacacatcatattcggatgactagcaaagccatccttcaaagagttcctcgggtttatcagctctgcaatgatatagtacagctcttatcagactggagatcagagaattcgaacaaacctattatgagatggaaagcctttgcagacctctgccagtttaaggttccttccctgagaataaagtctcgcaacgagaacattcagattgtggagacaagacggcatgctatagccacatgcctccaccagatgggagaggtgatttactttgatgacttgggctttttgatactagact

SEQ ID NO: 85834 - DNA, 834 bp, Arabidopsis thaliana columbia
  unsure (1)..(834): unsure at all n locations
agggnccgccccgacttttgnaagatnctcaagggnttntgtncnccatgattttngccggggntcaaactngtttcagcttcagtggccccccacagngaatctcaactgacgctgtgagcataagcaatcagaatcacgtggaggaagtaaaattcgtgtcacgatgttgggttctcgcatgactgcaagcatcggcagtgtaaaatttgcaagcgaaggcgatatttttgggaaagagttgcaatgcactgctgagtctgggaacccttcgacaagccagaaagcagatattaacaaccgaactgtaccacctagcttcttaccactagaccacagtatggaaaacgagccgcagcagaaatacgcgaccctccaaacactttcgattggtaaagaaaaggaaaagaagaagacaaggaaagaagagagagaggaaagagagatccgttatctagagagaacggtaagaagggagaacgaaagggaaggaaatgcgaagctcgtgagcagcactacggatccagctaaaaagaagatagagagtgttgcggaggttaaagaagaagaaccaagtgatggtgccatgttgattaaggttgaaccaaagactgaaccatcaacagcagaagctagaccgcttcccaaattccgaatcaaactgaaaagcaaagcgttcaacaactcataaggttagatccgagccagtccctccccgccaaaatctgagtagtaacttttatttccaaaagctttgttgttacaacttgcaaggtgttgtgattatatgtcaatgtaatctgtttattcaatgcgcttaaacaaaaaaaaaaa

SEQ ID NO: 85835 - DNA, 3670 bp, Arabidopsis thaliana columbia
  unsure (1)..(3670): unsure at all n locations
cttctcttcacccaagtcttgtttttaatctgttcttcgaatctgaactctttgatttctatgtttgtattaataactctacaaaatcaagtagctacatagcccgagattgtgctcgtggaggcagtaaactatctgaagcagccactattaccatttcgtggcgatcacaaaaacgattcaaaaaatgtggaggaacattctgggaagagcttcattgagaaaggttaagtttttatctgattctagctcctccggtactcattatccagtgaatagagtccgtgggattctgtcttctgttaatctcagtggcgttagaaatggtttatctataaatccagtcaacgaaatgggtggattaagctcgtttcgtcatggtcaatgttatgtgtttgaagggtatgctacagctgcgcaagctattgattcgactgatcctgaagatgagtcttctgggtctgatgaagttaatgaattgataacggaaatggagaaagaaactgagagaatccgtaaaaaagctaggcttgcagctataccgccaaagagagtcattgcgggaatgggagcacagaagttctatatgctgaagcagagacaggtgaaaatggagactgaagaatgggaaagagcagcgagagagtgtagagagattctagctgatatgtgtgagcagaagcttgcaccgaatttaccttatatgaagtctttgtttctaggctggtttgagcctgtgcgtaatgctattcaagatgatcttgatacttttaaaatcaagaaagggaagattccgtatgcgccttttatggagcagttaccggctgataagatggctgttatcactatgcataagatgatgggattgttgatgactaatgcggaaggcgttggcattgttaagctagtgaatgctgctactcagatcggggaagctgttgagcaggaggtcaggatcaacagttttttgcagaaaaagaataaaaaaaatgcaactgacaagacgatcaatacagaagctgagaatgtttcagaagaaattgtggccaaagaaacggaaaaggcgaggaaacaagttactgtactgatggaaaaaaataagttgaggcaagtaaaagcattagtgaggaaacatgactcattcaagccatggggtcaagaggctcaagtgaaggtcggcgcacgtttgattcagctgctgatggaaaatgcatatatacaacctccagctgaacagtttgatgatggtccacctgacatccgacctgcttttaagcaaaatttcagaactgtcacattagaaaatacaaaaacgagcaggagatatggttgcatcgaatgcgatcctttggtcctaaagggccttgacaaatcagctagacatatggtcattccctacttgccaatgctaatacctccccagaactggacagggtatgatcaaggggctcattttttcttgccttcgtacgtcatgagaacacatggagctaaacaacaacgcactgttatgaaacgaactccaaaggagcaactggagccagtatatgaggctttagatactctaggaaacactaaatggaagataaacaaaaaggtgttaagtttggtggacagaatctgggctaatggaggtcgcattggtggtctggttgaccgtgaagatgtacccattccagtagagccggaaagggaagaccaagaaaaatttaaaaattggagatgggaatccaaaaaagcaattaagcaaaataatgagagacattcacaaaggtgtgatatagagctcaaactcgaggtggcacgtaaaatgaaggatgaggaaggtttctactaccctcacaacgttgattttcgtgggcgagcatatcccatacatccatatctcaaccatctcgggtctgatctctgccgaggcatccttgagttttgtgagggaaagcctcttgggaaatcagggttgcgttggctgaagatacatatagcaaacttatatgctggtggagtcgataagctggcttatgaggataggattgcgtttactgagagtcacttggaagatatatttgattcttctgatagacctcttgaaggaaaaagatggtggcttaacgcagaggatccctttcaatgtttggctgcttgcattaatctttcagaagccttgagaagcccctttcctgaagctgcaatatcccatatccccatccaccaggatggttcatgtaatggtttacaacactatgctgctcttgggagggataagttgggagcagatgctgtcaaccttgttacaggtgaaaagccggctgatgtttatacagaaattgcggctagggttctcaagatcatgcagcaagatgcagaggaagatcccgaaacatttccaaatgccacatatgccaaactcatgctcgaccaggttgacagaaagctggtaaaacagactgtcatgacatcagtgtatggtgttacttattctagcgcacgtgaccaaataaagaagagattaaaagaacgtggtacctttgaggacgattcactgacttttcatgcatcgtgttatgcagcaaaaatcactttgaaagcattggaagagatgtttgaagctgcaagagctatcaagagttggtttggtgattgtgcaaagataatagcttcagaaaacaatgcagtttgttggacgactcctcttggacttccagttgtacagccttatcgaaagcctggtagacatttggttaagactacccttcaggtgttgactctaagccgtgagactgataaggtcatggcgaggaggcagatgactgcttttgcaccaaattttatacattctcttgatgggtctcacatgatgatgacagcagttgcctgcaacagggcgggcttgagtttcgcaggggtgcatgattcgttctggacgcatgcctgtgatgttgatataatgaacacagtactcagagaaaagtttgtcgagctctacgaaaagccaatcttagaaaacttgttggagagtttccagaagtccttcccagacataagttttccgccattaccagaacgaggcgactttgatctgaggaaggtcctagagtcgacatacttcttcaactgagctgcagcacattcaggttacttacatactggaagctccaatactccacatctaacattcaggacagagtaagtttgcttcttcaggccaatacatcagccacattgatcaaagtggaaaagattcttaataaggaatgttgatggttaacctcaacttagaggtgggcttcgggttacttgtaaatatacacagaaagagtgtttcaaagcttggcaggagggaaggcgttggatcggactgatggatcgggttatcgaaccagtgactgtggcactccggattactagcagtttcttatcgaccacacaaaattaccaagagatacatgcagtcttgtaggaactgaaaacgggtgctaaaggataatcatttaaatggtcttagtagacactcttttttgattgacttgtaatttattatatactctaaaatgcattttatttaataatatatgaacttgaacaaaaaaaaaaaaaaaaaannnnnnnnnnnnnnnnnnnnnnnnnnnnnnnnnnnnnnnnnnnnnnnnnnnnnnnnnnnnnnnnnnnn

SEQ ID NO: 85836 - DNA, 560 bp, Arabidopsis thaliana columbia
  unsure (1)..(560): unsure at all n locations
gggttcctttttcgatggatatgtgaatcagcagacaacccttccgatgttctttaggctgtacgaaagggctatggagagctggttcgagatggagattgaagcagatcttgacactgtcaacacacctccagtcttgaagacgccatcacccatggagaatcaggctgcaaatctctttacaaggaaaatatttggaaagttccaggaagagttggtagagacattcgctcacacggcaaacagaattgtagatgatggtactaccagcacatttagggttgcaaattttggaaatgacancaaagccttatatagtaacggtttgctaccctgaaatgtgngcaaacttcagctgtcaaatgtttgagcactccggcatactttgccgacatgtttttncgggggttactgtcactaatatanccancttttgcccccacattatatttttngggcggtggcaaggaattcccagnggatggtggggttnggttngcttnccagtgaaatgggattntagctgnncaccgttnaccgnttntnggggcgntcaaggt

SEQ ID NO: 85837 - DNA, 612 bp, Arabidopsis thaliana columbia
  unsure (1)..(612): unsure at all n locations
caacctcaacaccgtacttctctctcgccgtcgagaaaagcttccgagtaaaaagttgaggatgcacttgtgctgttgtttgagttgtaccaatcgttgatgtgcttttagctgggccgttgacccaatccggtaatcccaaaccgccggaaccgggttttgattccgtcacggtgacgctaagagtcgtgagtgctctgtatccgtacgattcgacaccgtttagctcctcagcgagcgatcgatggagtttaaagctcgcgcgtgctaaatcgcgcaacaggacttccatcgcacccaattcgaaagcgggaaatccccccccggtaccggaagcagcgcacggancgggctgattttctcgacgagagtaacgggngattcctttctttggcgaggaaataagcagtacaagacggcgattactcaccgccggatacaaaggcccgtttgaggttnttnaccgattttgttttttagnccccaattatttngatgagtttggnaaattgngattttncgtcgggtnanaccgggggatnntacggtgggcaccncntcccgngtgggnagttgtgctnccggcnncggttttgaattttttttggtnnc

SEQ ID NO: 85838 - DNA, 408 bp, Arabidopsis thaliana columbia
agatggcttctgctatggacttatcttctcctccaacgtttttcttatccggaacttctacatcttccccatctctccgtcgtctctcctccatttccgtctctggattccgccgtcactctaatcggaagttacagatactttgccaagccacagctggaactgagcctcagagcggtctctctgtctctggctccaaattagccgcccgttctggtcaagaccgtcttttgaaggttccaatttcgaacatcaggaattttagtattatagctcatattgatcatgggaaatctacgttagcggataagttgcttcaggtgactggtactgttcagaacagagatatgaaggagcagtttcttgataacatggacttagagagagaacgaggcatcactatcaagc

SEQ ID NO: 85839 - DNA, 352 bp, Arabidopsis thaliana columbia
actcagctcacctttagcttcttcttcttcctcttccgatttcaacgttgtgtttatcttcttcttcataattccgacgaatttcaccagagagaatcaaacccccgaggaatcttaattttctctctgtattatcatcttccaattcaagtgaagaaactcgtacgtggtcgtagtggagatgagttcggctctacctttgaagcttttgttgcctcttacaacaacttcattgctaccttctcctttccgatcggataaccctaacttctatcgccgtcgttcctcttcctctacttcgtgttcttctcaatcccaatcgtttcagcttttctctgttagacgacgccga

SEQ ID NO: 85840 - DNA, 391 bp, Arabidopsis thaliana columbia
  unsure (1)..(391): unsure at all n locations
caagattggntcacttcagatgtttactgagaacgatggcagctgtgaagatatgggtccactttnatttccagtagaagaagttcataagatttctgtgttggatattagactggccaacgcagacagacatggtgggaacattttnatgaccaaggacgaaagcgggaagctcgttttggttcctatagaccatggatactgcttgcctgaaagctttgaagattgcacgtttgagtggcttattattggccacaaggccgggaaaccgtactttgcagagacccaagaggtacataaggtccccgggccgagaggaagatattgatctactaaagtttcatgggatggaaaatnccggcagaggcggnttaaaacggttaggactttt

SEQ ID NO: 85841 - DNA, 894 bp, Arabidopsis thaliana columbia
aacgtccagggcatttggttgacaaggtcttggacaaaaccggcatgaaaggcacaggaaagtggaccgtgcagcaagctgctgagctatctgttcctgctcccaccattgaatcctctcttgatgcgaggttccttagcgggcttaaagatgaacgtgtgcaagcagctaaagtcttcaaggcaggtgggtttggagatatcttgaccgatcagaaagttgacaagaaacagctagtcgatgacgtgaggaaggctctttacgcatccaaaatctgcagctacgcacaaggcatgaaccttatccgtgccaagagcatagaaaaggggtggggattgaagctaggtgagttagctagaatctggaaaggaggctgcatcatcagagcaatcttcctagaccaggatcaagcaacgccttatgccagggaacgcagagctagcctaaccttctttggtggatccagaggtttgcgaaaagaggttaatcggagagacagtcccgcgttggagaagagtcgtctgcttagctatccaactccgggtatcagcacaccgggtatgtctgcgagtctagcctactttgattcttacaggagagtagagattgccggcaaatctagtccaagcacagagagactactttggtgctcatacatatgaaaggactgatgtggaaggatctttccacaccgagtggttcaagattgcaagacaatctaagatctgagatctctcatcctcttgtattcttcttctccttcaataataagttccacacagtatgtttctttcctcaatgtgtgagataccttggcttatttatgattgtagcaactgagtttctcatctttgtgtttctttttcttaaaaagattaaaactgaagtctttgg

SEQ ID NO: 85842 - DNA, 556 bp, Arabidopsis thaliana columbia
  unsure (1)..(556): unsure at all n locations
gaaaaacaaattaataaaaaaaaaagatcagaaattagtttgtgcagaaatcgaattggagaaaccgagtaactatggtagccacagatgagttcatcgtttttgaccagatctgattgttttcgtctttgccgttgaaataatcctccgctccttcttctcatcgatttctccgatcgcgattttggtttctcgctctcctctctcgctgtggattttgactccgagagaaggtttgattttcggtggatttcatctgacagacatgtcagacgctctttctgcgattccggccgcagttcatcgcaatctctccgataaactctatgagaagcgcaaaaattgcttgcgcttgagcttgagaatattgtgaagaatctaacttcttcgggtgatcatgaccaagatctcgaaaggcattgaggatgtttgttaagggnttttgccaaatctccnnaaagctaattcatcggaaggggtggccnaatttggctagntgctgaaacngtttgggtttctcanaaggtgncnaaaatnttnggnaaatagngccctc

SEQ ID NO: 85843 - DNA, 461 bp, Arabidopsis thaliana columbia
tacgggtgcgagaagacgacagaagggtgcggctgcgagaagacgacagaagggtacggctgcgagaagacgacagaagggtacggctgcgagaagacgacagaagggaggtgaaagaacgaatctagagaagaagggtttgtgaaatggagtccagtgaggatgtggagaatctgagtagagctattgagaagcttcttcatgagaagaggaagagagaagcttctggtgacgccttcattgaagacgctgatgatcagcttttcctctctagccttatctctcagttggaatcaccaaaccccaaggggaaagaagatgtcataaccggagaagaagaagaaaaagaagaagaatctgcagattcttcaccatccaaaggaaaaagcgagggccagagacaattggaagaaagtatagaagaaatagctaaagacatcaagaaggtgaagaagcagaac

SEQ ID NO: 85844 - DNA, 395 bp, Arabidopsis thaliana columbia
ggactcgaatccgatgaggacgagatacctgagcatcgcctgatccgtactggtccacgtgttgattccttcgacgtggaagcgcttgaagttcctggtgctccgagaaatgattacgaggacttgaccgttgggaggaaagtgttgcttgcatttcaaacattaggggttgtctttggagatgtaggaaccagcccgttgtatacgttcagtgtaatgttcagtaaatcacctgtccaagaaaaagaagatgttattggagcactgtcactagttttatacactttacttttggtcccccttattaaatatgttcttgttgttctatgggcaaatgatgatggtgaacgggggacctttgcgttatactcattaatctctcgtcatgccaagat

SEQ ID NO: 85845 - DNA, 957 bp, Arabidopsis thaliana columbia
ctttttttagttcccaaaagatcgaacttggcgctactttcattttctcatctctgtttttccaacatcctaagaacagagttcgttgctccttttgttttctttaaagaaaaagtcagattcagatacatacatactctgaagaacatgtcgacgcgaagacgaactttactcaaagttataattcttggagacagcggggttggcaaaacatcgttgatgaatcaatatgtgaataacaagtttagtcaacagtacaaagctacgatcggagctgattttgtcactaaggagcttcaaattgatgacaggcttgtcacattgcaaatatgggacactgctgggcaagagaggtttcaaagtcttggtgttgctttctatagaggtgcagattgttgtgttcttgtctatgatgtgaatcacttgaagtcatttgaatctctcgacaattggcacaacgagtttcttacacgggctagtccacgtgacccaatggcattcccttttatacttcttggtaataaggttgatattgatggaggaaatagccgagtggtatctgagaagaaggctagagaatggtgtgctgaaaagggaaacatagtctatttcgagacatcggctaaagaagattacaatgtcgatgactccttcttgtgcatcacaaaacttgcccttgcaaatgaacgcgaccaagatatatatttccagccagatactggttcggtgcctgagcaaagaggaggttgtgcttgctgaatgctgaagaaacatttcttactctcttgatttatgcattacttgttgtgtgtgtctataatcttaatgctgagaaggaccaataaaacttgtattgttccctaagtaaggttttgttacctttctggttcttcatctttgacatttggtggttcacgatttgtatgtaacaacagttcaagtgtaaaaaaaaaaaaa

SEQ ID NO: 85846 - DNA, 670 bp, Arabidopsis thaliana columbia
aagttcaacaaaagaaaatggagaatatgggaactagagtgatagagccattgataatggggagagtggtaggagatgttcttgatttcttcactccaacaactaagatgaatgttagttataacaagaagcaagtctccaatggccatgagctctttccttcttctgtttcctccaagcctagggttgagatccatggtggtgatctcagatccttcttcactttggtgatgatagacccagatgttccaggtcctagtgacccctttctaaaagaacacctgcactggatcgttacaaacattcccggcacaacagatgctacgtttggcaaagaggtggtgagctatgaattgccaaggccaagcatagggatacataggtttgtgtttgttctgttcaggcagaagcaaagacgtgttatctttcctaatatcccttcgagagatcacttcaacactcgtaaatttgcggtcgagtatgatcttggtctccctgtcgcggccgtcttctttaacgcacaaagagaaaccgctgcacgcaaacgctagtttcatgattgtcataaactgcaaaaatgaaagaagaaaatttgcatgtaatctcatgtttatttgtgttctgaatttccgtactctgaataaaaactgccaaagatgagttgaatccg

SEQ ID NO: 85847 - DNA, 388 bp, Arabidopsis thaliana columbia
aagactagcagtgccataacaggaaggcgtgcaaagagggcaatgaagcgtgaagctgcaaacaaagctgcggaagcagtagcagctgcaaagcatgaggcccttttggttaggttgggaaggaagtgactgtggttgtatctctgtaattacatcaacccaccccaaccccaaatgaccaaatcctttgacttcgatacttgagaatctgtacatcagtagaatttaataatggtagaacttgttgaacctttgtcgttaagatgctttgtgctagatttgatttatttatctgcaactttcttgatcccttgcttgatgagtgaaaaatactctcgcttatgatgtgggaattgatcatatggaatgaagattaagtggttatggt

SEQ ID NO: 85848 - DNA, 1019 bp, Arabidopsis thaliana columbia
  unsure (1)..(1019): unsure at all n locations
gaaaacaatgaatggtcattgctttcttccgagttttgtggaggaacccacataacaaacacccgcgaagccaaagcatttgctcttctatcggaggagggaattgctaaaggtattcgtagggtaactgctgtgactactgaatgtgcttttgatgcattgaatgcggcgtccttacttgaaagagaagtagaggatgcctccagagcggagggaagtgcattggaaaagaaagtttctgctttgaaaagccgagtagatgcagcaattatcccagcagctaaaaaggcagatattaggactaagattgcttcgcttcagaatgaagtaagaaaagctcagaagaaaatagcggaacaaaacctgaaaaaatctgtcaaattagcaacagaggcagctgagtccgcagcatcagatgggaagactttctgcataatccagctggatgtgggtcttgatgcagcagctgtgcgagaggccgtttcaaaagtcatggaaaagaagggtatgtcgataatggtgttcagcacagatgaaagcacaaacaaggcggttgtgtgtgcaggagtgccagaaaaatcagaccagtttaagccgttagacgtcactgaatggttgacaactgcattgggtcctctaaaaggaaggtgcgggaaagggaaaggtggtcttgcatcagggcagggaacggatgcttctcaagtgcaggcggctttggatatggcttcatcatttgcatcaatgaagctcaactgatttggtcgggaggttacataatctgtgaggtcagaataacctctacttaatttgctttcattgtacaccgttttacacatgttttaagaatctgttaaatttctctgttcttgtgatggaatttgtggtatcacactcttttagtcaaagttaccaatggctgttataaaaaaaaaaaaaaaaagnnnnnnnnnnnnnnnnnnnnnnnnnnnnnnnnnnnnnnnnnnnnnnnnnnnnnnnnnnnnnnnnnnnnnnnnnnnaca

SEQ ID NO: 85849 - DNA, 429 bp, Arabidopsis thaliana columbia
acccacgcgtccgagaagaggttaggcatctaaagaactttgattacgttgtggtgaatgccaaagggaggcttgatgatgcggttaaccgcgtggaatcgattatcgatgctgagaaatctaaagttcatcaaaggattgtcaggatttgatgtgcagagatgccattgtctgtaacaacatattggcttgctgtctccagacacggatccatcgaagaccgagacaattttattatcggtatgtgcggcaacccattccaaccaaagatttagatgaatcctggcccctgactacagagaacccttttgattaagcatcgtatctttatacatagctacatggattatgttatcatcatacagtatgtgattcatactcgcattttgaattttgttacttcataaatgtttatggagcattgttcat

SEQ ID NO: 85850 - DNA, 642 bp, Arabidopsis thaliana columbia
  unsure (1)..(642): unsure at all n locations
caatagaaagagattttgggtctttcgaagagtttttggaaaggttcaagtcggctgcagcttcgaattttggttcgggttggacatggcttgcatataaggcgaatagacttgacgttgcaaatgccgttaatcctctcccaaaggaggaagacaagaaacttgttatagtgaagacgcccaatgcagtaaatccgctcgtatgggattattctccacttctcaccattgatacctgggagcacgcttactatctggattttgagaaccgaagagctgaatacataaatacattcatggaaaagcttgtgtcatgggaaactgtaagcacaaggttggaatccgcaattgctcgagcagtgcaaagagaacaagaaggaacagagacagaagatgaagagaatccagatgatgcaagtaccagagggctatttagatagtggcatcgatgtatctgagggtggctaaaaccggggccgggaaatcctgganncccggggggtccccnagttctanaccgncggcacccnnggtggaccncancttttgnccctttgtggggggnaattcggccttggggaacnntggngaaannggtcccnggggnaaatgttcccgncccaatccnccnaanaatngggc

SEQ ID NO: 85851 - DNA, 552 bp, Arabidopsis thaliana columbia
aatacgactcactttagggaaagctcgtacgcctgcaggtaccggtccggaattcccgggtcgacccacgcgtccgtacagactatggaaatggaatcattcatggacgaccttttgaacttctctgtaccggaagaggaagaagacgacgacgaacatacgcaaccaccgaggaatattactcgccggaaaactggattacggccaacagactccttcggtctctttaataccgacgaccttggagtggttgaagaagaggatttggaatggatttcaaacaaaaatgcttttccggtgattgaaacattcgtcggtgtattaccgtcggagcattttcctataacgtctcttctggaaagagaagcgactgaggtaaaacagctgagtccggtttcaagtacttgagacgggtagccatagctccacaacggcttacctcaaacaagtagccgccggggagtaaccggaagccacgggccgttgggctacggccaccacttcccactccaaccacttaatgaggctttgtgttttggtttttaaaagccc

SEQ ID NO: 85852 - DNA, 1326 bp, Arabidopsis thaliana columbia
  unsure (1)..(1326): unsure at all n locations
aacttccccacttccaaccaaaattaatttaaaatgtcaaatattttttcattttcctcttttcgaaattaaagaaaaccctaaacgccgttgtctgatattgagagagagagagagattaaaaacttcttctggttccttttatcaacattttttctctctcttaaaacttcgaagcgatttttgatttacagactatggaaatggaatcattcatggacgaccttttgaacttctctgtaccggaagaggaagaagacgacgacgaacatacgcaaccaccgaggaatattactcgccggaaaactggattacggccaacagactccttcggtctctttaataccgacgaccttggagtggttgaagaagaggatttggaatggatttcaaacaaaaatgcttttccggtgattgaaacattcgtcggtgtattaccgtcggagcattttcctataacgtctcttctggaaagagaagcgactgaggtaaaacagctgagtccggtttcagtacttgagacgagtagccatagctccacaacgactacctcaaacagtagcggcggaagtaacggaagcacggccgtggctacgaccaccaccactccaacaataatgagctgttgcgttggttttaaagcgccggctaaagcgagaagcaagcgtcgtcgtacaggacgccgtgatttacgagttttgtggacaggaaacgagcaaggaggaatacagaagaagaagacgatgactgtggcggcggctgcgttgattatgggaaggaagtgtcaacactgtggagcggagaagactccgcaatggagggcaggaccagcggggcctaagactctgtgtaacgcttgtggcgtgaggtataagtccgggaggctagttccggagtatcgtccagcgaacagtccaactttcacggcggagttacattcgaattctcaccggaagattgtagagatgaggaagcagtatcagtccggtgacggtgacggtgatcggaaagattgtggataaaaagtgattaggattaatttttattttttcggagaaacttttttttttttttttcgtttaatttctctttatttgtttttaaagtctgttttagggttttgcagttggaatttaggtttttaattttttgcttatcttttttatttgtgaaattagtggtaattacttatttagggaatattatggtcatggaatggaagataactttctcattaaaaaaaaaaaccaaagnnnnnnnnnnnnnnnnnnnnnnnnnnnnnnnnnnnnnnnnnnnnnnnnnnnnnnnnnnnnnnnnnnnnnnnnn

SEQ ID NO: 85853 - DNA, 497 bp, Arabidopsis thaliana columbia
  unsure (1)..(497): unsure at all n locations
gctctgctttgaaagaaccaagtttgcagtttgagcttctggatcctgtgctggttaaacggcgtgtgattccacatactccagccccgggacagaaaccgataacgttagaggacgaagagcttgttccgtcagcgctcatcaggttcagaccgatcgaaacagactctctcgtctttacaggactccgcaatgaactcctggagatcagtgaaccactctcgtgatcatttgtgttccactagatgatttagcttgagcccatgaaataagtttacaaatttaggtttctcctcttatatgggtgtggatttgatgatgattcttgtgtttgtgaatttcgagcaccattttttttagggttataaaggaaattttgtggccattttggcccaataacgggggaatcanaaatttgaaggcccttcaaaaaaaaaaaaaaaaangggggccgnccanagntccaaccttncgangcggnatnggngcaanccctc

SEQ ID NO: 85854 - DNA, 435 bp, Arabidopsis thaliana columbia
cccacgcgtccgccttcacgtctctgcctttatcttcttcttccttcttctccatcatcatcagagagacgaagacgaagaagaagaacttcactggttattctctctccgtagccaaccactatggattctagagctattctcgattccgctttgtttcaactcactcctactcgcactagattcgatctggttctattctgtgggagtaagaaggagaagctagcttcagggatttttgaaccattcgtctctcatcttaagttcgctagagatcagatctctaaaggcggttactccatttctctgactcctccttcttctcactcttcttggttcaccaaatccacttttgatcggtttgtgagatttgtaaacacgcctgcgattatcgaaagatttgcgactctggagaaagagattttgcagattgag

SEQ ID NO: 85855 - DNA, 325 bp, Arabidopsis thaliana columbia
agttgttcgtcaccaagacgaactttgtgagggagaaaaaatggcgaatttactggaaacatcaatctttttctcctctgctgataaattactgtctttcccgcctaagaattctcaaacccatcatctccctttctctgctttcatcaatggaggaagaaagatacgcaaaagctcaactatcacctttgctaccgacactgtcacttacaatggcactacaagtgcggaagtaaaaagctctgttgaggatccaatggaagttgaggttgctgaatgttacactatttcttcattttattactagattatttatttttttttt

SEQ ID NO: 85856 - DNA, 686 bp, Arabidopsis thaliana columbia
aaagaaagaaacaggaagtggttcagtagcagttgcaatagacaaagacaaaggaagccaacatgctcttaaatggacaatcgacaatcttgcttctcgtggccaaaccatttctcttattcatgtcctctgcagatctcattcttcttcagatcttgaagaaggaacgccacaacagaaacagcaaatggagaagatagctaaagatctctttgtatccttccactgctattgttcccgtaaccacgcgtccggtcgagacattttgctggaagacgcagacaaagttcgagccattaccgaatatgtttcatcttctgcaattgagaacttagtcgttggatctgcatcacgtaatggcttcatgagaagattcaagacggatttgccaacaacagtgtcaaaatcagctccagatttctgcaatgtttatgtcatttcaaaaggcaaaattgcttcagtacgaaatgcatcacgtcctgctccttaccaaaattcgatgcagcaatgtgaaattgacaatcatcacccacatactcctgacaaagcaccaaagtaccatgaccatcccaattctgcaggtagtacaccatctagaccgcgcaaatcagttgaagcagatagatcgccgttggtgaaaaggaagccatatggggacttctatgattcagatagtgacctttcgt

SEQ ID NO: 85857 - DNA, 527 bp, Arabidopsis thaliana columbia
gcgcatgtttatcagttacggggtggtattgttagaggttttaaccggaaagcatccgttagatccggatctaccaggaggtgcacatttggttaagtgggtgagagatcacttggctgagaaaaaagatcctagcaggcttcttgatccgagactcgatggacggactgactcgataatgcatgagatgcttcaaactcttgcggttgcgttcttgtgtgttagcaacaaggcaaacgaacgacctttaatgaaagatgttgtggcaatgctcacagaaataaggcatattgatgttggaagatcggagacagagaagatcaaagctgggtggttgcggaagaaaagagccacaacaatttatgtcgaattgagaaaatcatcaatttctcacggttcgtctaattgtttcatttccgttttcggatgactccgtttaaaaaagggacaagggtaccaaatgtaaacccgtgagcctatttgtttccaaagcctgtcgtgaatatatatccctttgttggggcctt

SEQ ID NO: 85858 - DNA, 1160 bp, Arabidopsis thaliana columbia
  unsure (1)..(1160): unsure at all n locations
nnnnnnnnnnnnnnnnnnnnnnnnnnnnnnnnnnnnnnnnnnnnnnnnnnnnnnnnnnnnnnnnnnnnnnnccacgcgtcgacagagtcagagtcttcgtctgcaagagagaacaataccactcaatcataatctataacaatggacgtctatggcttatcttcaccagacttacttcgaatcgacgaccttcttgatttctccaacgaagacatcttctccgcttcttcttccggtggttccaccgccgctacttcctcttcttctttccctcctcctcaaaaccctagtttccaccaccaccatctcccttcctccgccgatcatcactccttcctccacgacatttgcgttcccagtgatgacgcagctcatcttgaatggctttcgcaattcgtggacgattctttcgctgattttccggcgaatccattaggaggaactatgacttctgtcaaaactgaaacttcctttccggggaaaccaagaagcaaacgatcaagagctcctgctcctttcgccggaacatggtctccgatgccactggaatccgagcatcagcagcttcactccgccgccaaattcaagccaaagaaagaacaatccggcggaggaggaggaggaggaggaagacatcagtcatcgtcatcggagactacggaaggaggaggaatgaggagatgtactcactgtgcatcggagaaaacgccacagtggaggacaggaccacttggacctaaaacactatgtaacgcttgtggagtccggtttaaatccggtagacttgtaccggaatatagaccggcttcgagtcctacttttgttttgactcagcattcaaactctcaccggaaagtgatggagcttcgacggcagaaagaagttatgagacaaccacaacaagttcaacttcatcaccaccaccacccgttttagttttcacttttcactgcctcgtccgtcgtcactcttttttttgtttttctttttggttcttggggttgggttttgggtaacgtcacgtgatgatgacgtgtcgcgatcctagcggcgttaatcacgtgaccgacgacgacgggagcctaaaatttttagtgaacgttggaaaatcaaacctcatttaattgttaattattaaaaaaaaattatatcaaaaaaat

SEQ ID NO: 85859 - DNA, 423 bp, Arabidopsis thaliana columbia
aaatcctccagggtaactagaggtgggtcatcagatctctagggtcttctcattcttcattcccagatccgtagaatagaaaatgtttggccgatctgcgattcgtggaggaggattccgtgcagagaatctaggtcaaaacgcacttaccttaatcggtaacataggcttctcactcttcgtcttcggagtactaatcttcaccataatcgccgcaacttacgaaccagaagatcctctcttccacccatctgacaaaatcacaactttcctcacttccacatcaaacgctacacttagatccgatgactccgttgttaaaaccggtgaagatttcatgctcgctaaccaaaccgcatttgcagagtttatcaacataaacgatgttgaagccagcaccaatgagactactacagagggaga

SEQ ID NO: 85860 - DNA, 605 bp, Arabidopsis thaliana columbia
  unsure (1)..(605): unsure at all n locations
atgaatnnnnnnnnnnnnnnnnnnnnnnnnnnnnnnnnnnnnnnnnnnnnnnnnnnnnnnnnnnnnnnnnnnnnnnnnnnnnccacgcgtccgcccacgcgtccgccaattccaccgctgcgacgagagaggagcacagagatctctcgtttcgtttttcccggaaaatctgaggaaataaaattaagcaaaagtttccatcgatcctctgagaaaaaattcgactctctagtccacgagttttttttttgttcacctctctctttttcgttaatctctctcaaacaacgcctcttcatcatttccttgtaattcactttcttctccgttttttttttttttgaatctctcttcgtccttcgccgtttcgatttcttgtttcctctacttgatgatgaaattttgatcagatctagtgtagaatagttaggatttacccagagagattatgtttatggatcgagagagacggagttctggtcgtaatgggactcctgaatatagcaatggcaaattccgagatgataatggttttggattcttagatcgattggaaaattgccgtgagaagagtcctcctagatcgaagatccttcggatcccgt

SEQ ID NO: 85861 - DNA, 441 bp, Arabidopsis thaliana columbia
cctatattgactatctaggttgctccagtggtacccgggagcaacctatattgactatctagtgactgatgagttcgtgtctcctctgcaatatgcacatatttactcagagaagctggtccaccttccccattgctactttgtcaatgattacaagcagaaaaatcaggatgtgttggatccaaattcgaagcccaagcgatcagactatggacttcctgaagacaaattcatatttgcatgcttcaaccaactgtacaaaatggatcctgagatcgttaatacttggtgcaacattcttaaacgagtacccaacagtgctctttggcttctccgttttccagcagccggagagatgaggtttcgcacatatgctgctgcccaaggtgtacagcctgatcaaattatcttcactgatgttgccatgaagagtgaacatat

SEQ ID NO: 85862 - DNA, 466 bp, Arabidopsis thaliana columbia
tctctcttcctctgtttcttcgccattctctcagcttttctccttcttcttcgtctttgtcaggtaaagagatacgatgagcatatcccacatacctctctcctcttctcatctttttagtttctcgaaagtttgcatgcgccgactttgttataggttataaactttagttttaagcctattttcgtatgtttatggttgttgtaatagttgagaattcagagtatgtcaagtgaaacttaaaaagaattctatatgtatgtgtgtatgcgttaaagagtgaatggagctgtggacagaagctagagccttaaaggcaagtctaagaggagaatctactatatctctcaaacatcaccaagtgattgtgtcggacgatttaagccgaacttcttccttgccggaagatttcttcgttgagtgtttcctcgatttctcagaaggtccaaaagaagaagaagacgaa

SEQ ID NO: 85863 - DNA, 1129 bp, Arabidopsis thaliana columbia
  unsure (1)..(1129): unsure at all n locations
nnnnnnnnnnnnnnnnnnnnnnnnnnnnnnnnnnnnnnnnnnnnnnnnnnnnnnnnnnnnnnnnnnnnnnnnnnnccacgcgtccggaatatctctcttcctctgtttcttcgccattctctcagcttttctccttcttctgtatgtgttaaagagtgaatggagctgtggacagaagctagagccttaaaggcaagtctaagaggagaatctactatatctctcaaacatcaccaagtgattgtgtcggaagatttaagccgaacttcttccttgccggaagatttctccgttgagtgtttcctcgatttctcagaaggtcaaaaagaagaagaagaagaagttgtctctgtttcttcttcacaagagcaagaagaacaagaacatgattgtgtctttagttcacaaccttgcatctttgatcaacttccttctttgccggatgaagatgtggaagagcttgaatgggtatctcgtgttgtggatgattgttcatcaccagaagtttcacttctcttaacacaaacacataaaaccaaaccaagcttctcaagaattccggttaaaccaagaaccaaacggtctcggaacagtttaaccggtagtcgtgtttggccactcgtttcaaccaatcatcaacatgcagcaacagagcagttgaggaagaagaaacaagaaactgtccttgtgtttcaacgaagatgcagccattgtggcacaaacaacacaccacagtggagaaccggtccggtcggtccaaaaaccttatgtaatgcatgtggagtccggtttaagtctggtaggctctgcccggaatacagaccggcggatagtccgacgttctcgaatgagattcactcaaatcttcataggaaggttctggaattaagaaagagtaaagagttgggtgaagaaacaggtgaagctagtactaaatcagacccagtcaaatttggcagcaagtggtagataagacttaggtaaaacctactttttgtaacattatctgtagtgttgtaatttaacaacttgcttcttaacaaaaaaaaaaaaaaaaagnnnnnnnnnnnnnnnnnnnnnnnnnnnnnnnnnnnnnnnnnnnnnnnnnnnnnnnnnnnnnnnnnnnnnn

SEQ ID NO: 85864 - DNA, 442 bp, Arabidopsis thaliana columbia
attgggagcaaattcccgttcttcaaccgccaccagttaaccatgacaaaattcattcagttgcgggaagtagaacaaggggctggtaagtcaccaccaccagttctagtcctccatgggcattacggaggctgcgttggcgaccttccaagctacgatgcttttgtcctcggtggtccgtactctgtccgtggctacaacatgggagagctcggtgctgctagaaacattgccgaggtcggtgctgagatcagaatacccgtgaagaacacacatgtctacgcttttgttgagcatggaaatgatttaggaagctcaaaggatgtgaagggaaaccctacagcagtgtacaggagaacgggtcagggttcatcctatgggcaggtgtgaaactcggttgggtcgagctgagtatgctgagatcacaacaatggaaccgggc

SEQ ID NO: 85865 - DNA, 621 bp, Arabidopsis thaliana columbia
aacagaaacatgtccatggagctcaccgttctcggacccctcgccggtcggagtttcgcaatcgccggaaaacctaaacttctgcttcttcgaccaacaaacctccctcttctccgtctctcactcccgctttctcttcccaatttctcttcgtcctctcgttttaattcgcccatattcgctgcacaggagagtaacttgagtgtatccaacgaaaacgaaaccagtgagtggctgatgcaagatttttatacattgagaaaagatgtagaaatagcatcagctcgtgttgaagagattagagcttctgctaatttacaacaactagaacaagagattacaaatctggaatcaaaagctactgatacatcgttttgggatgatcgtactaaagctcaagaaactttatcgtctttaaatgatcttaaagatcgtatgcggttactctctgagttcaaaacgatggttgaagatgccgaaacgattgttaaactaacagaagagatggactctactgatgttagtttacttgaagaaagccatgggaaatcattaaaagagttgaaataaaatcttttaagataaaattttgaggctttacttcaagctttttaatcaggg

SEQ ID NO: 85866 - DNA, 363 bp, Arabidopsis thaliana columbia
  unsure (1)..(363): unsure at all n locations
ggaagtttgcnacgaacttgcaaaggaaataggagaagataaagctgagattgaagcattgaagagagaatccatgagcctcagagaagaagtggacgatgaaagaagaatgctacagatggctgaggtctggcgtgaggaacgtntccagatgaagcttattgatgccaaagtagcactcgaggaaaggtactcacaaatgaacaagcttgtaggggatttggaatctttccttaggtcacggggtatcgtgaccanatgtcaaagaggtgagagaagctgngttattaagngaaaccncagcatcagttaatntcccaggnaatcaaggattttccgnntgtccctncaaacccggntgtt

SEQ ID NO: 85867 - DNA, 299 bp, Arabidopsis thaliana columbia
accacgcgtcagggcgactttgattctatcattcttgcttcttcttctagcaacaaagcttcctgaatcactagctggtcactgcaccaccacgacggcgacgaaaagcttcgagaaatgtatctctcttccaacacaacaagcgtcaatcgcgtggacataccatccacacaacgctactctcgacctttgtttctttggaactttcatctcaccttccgggtgggttggatgggggattaacccggattccccggcgcagatgactggttctcgtgtcctcatcgcctttccagatg

SEQ ID NO: 85868 - DNA, 934 bp, Arabidopsis thaliana columbia
aagccgagtcaacaatggacgtctacggcatgtcttcaccggacttgcttcgtatcgacgaccttctcgatttctccaacgacgaaatcttctcttcctcttccaccgtcacttcctccgccgcttcctccgccgcttcttccgaaaaccctttcagctttccttcttccacctacacttctcctactctcctcaccgacttcactcacgatctctgcgttcccagtgacgacgcagctcatctcgaatggttatcgcgattcgttgacgattcattctccgatttcccagcaaatcctttaaccatgaccgttagacccgagatttcattcaccggaaaacctagaagtcgccgatcaagagcaccagcaccttccgtagctggaacttgggctccgatgtctgaatcagagctttgtcactccgtcgctaaacctaaaccgaagaaagtctacaacgctgaatcggttacggcggatggagcgaggcggtgcacgcactgtgcctcggagaaaacgccacagtggagaactggaccgcttggacctaaaacactttgtaacgcttgtggagttcgttacaaatcagggaggcttgtaccggaatacagaccggcgtcgagtccgacgtttgtattgactcagcattcgaactctcatcggaaagttatggagctccggcgacagaaggaacaacaagaatcttgcgttcgaattccgccgtttcagccgcagtaaatttgggggttttcttttcaagggtttttgtgatttggtgacgtgtcgtaatcttaacggtgatgatcacgtgaccgacgggaggggttaaggacttaattatcagtattagtttaaagtttgcaaatctctgctaattaatttgttggtaatttctattgatttttttcttgcttttgtttaaaaaaaaaaaaaaa

SEQ ID NO: 85869 - DNA, 457 bp, Arabidopsis thaliana columbia
ccgatcttctcgttccattcttcttcctaattacaccatgcccaacatcaccatgggtttgaaacccgacccggttgctccaacgaacccgactcatcatgagagtaatgctgccaaagagattcgttacagaggcgttaggaaacgtccatggggaagatacgccgctgagatccgagatccggttaagaaaactcgagtctggctcggtacgttcgacaccgctcagcaggcggcgcgtgcttacgacgcagccgcgcgtgactttcgtggtgttaaggctaagaccaatttcggtgttatcgttggtagtagtcctactcagagtagcaccgtcgtcgactcttccacggcggcacggtttataacacctccgcaccttgagctcagcttatgcggcagcggcgcgtgtcgtcgtaagatcccgcttgtgcatccagtttactactataacatg

SEQ ID NO: 85870 - DNA, 528 bp, Arabidopsis thaliana columbia
  unsure (1)..(528): unsure at all n locations
aggtncgaacggtgatcgcatcaagcttgnatcatcgtaattacgcggccgctatgtctatgggccaggagtgctttgagcagaatgtggtggagtgtgtcttctggggaaatggtgttgtctgcttgacagaaggagggcagttgatctgtattttcgatttcaagacaatgaagccttctaagttgcctgatgtgccggggttagcagaagatgatctgcttcagccaatctgcttgactgtgagggaacctaagtacacgatgtctgggatttgctgaggtgttggtagcagtttggcgatgataatttttgttgtggaggaggacaatgggtcaaaactatttagggttttgatgagcctaagtggttgattgactcctgagatgccagaatgaattgatttcttggggaatttgaatttggagttggcccagaaggtgacttgtatcccccctaatgggaaaaatttctaacaactcttcactcattaattgcccgatttttttnttttncnatngancaaaa

SEQ ID NO: 85871 - DNA, 642 bp, Arabidopsis thaliana columbia
  unsure (1)..(642): unsure at all n locations
cttcttcttcactttcctatctctttcccaataaaaggagtctctcgctttctccaacttcgctatccaaaggcgtcgacgcctccaacattgcatcatggcttggtcgatagctcttcttacacctcctttttttggtcccggaaggcatgtgcaggccaaagaatacagggaaccaagagggtgtgtgatgaagatgagcagtttaaaagcacctgttctgagaattcaggccacagaatacagagaaccaagagggcgtgtgaagatgatgtccagtttacaagcacctcttctgacaattcagagcttctcagggttaagggcccccagtgcattagattatttgggaaggcctagtccaggtttccttgttaagtataaacttgcaaaatcatctgggagagaaaaagctagccgatgtgtacccaaagcaatgtttgagcggtttaccggggaaagcatttagggccatnatgctggctccagaggaancccggnacttngccaaaactttgttggnnctgngcaanacnggttggggcnnaattggnaagggctgggattcccccaagggnttaaaccctgggggnaancttaanttcccccgggggntaaaanaatttggggggggggggtnga

SEQ ID NO: 85872 - DNA, 565 bp, Arabidopsis thaliana columbia
ctagatgtctggtttcctcttttgtttcgtccaaatctctactttttagggatcttgtccttctcttttctgctgattaaaaccctcgaatttgctccaattcgacgcgaaaaagggcattgagatggtgaatggagaatcatcaactagtacgtcttactctgatagtaacaatgacacaaatgatcaaggaggagactttgaatgtaacatttgtttcgaactagctcaagatccgattgtcactctctgtggccatctcttttgctggccttgcttataccgttggcttcaccaccattcacattctcaagaatgtccggtttgtaaagccgtggttcaagacgataagcttgttcctctttacggtagaggcaagaaccagactgacccgagatcaaaacgttatccgggtttacggattcctaaccgaccaacaggtcaaagacctgagactgctgctcctcctcctcagcctgaagctgcgagtaattttttcaactacggtattggtttgatgggtggaattatgccgatgatggcgactacgaggtttgggaatttc

SEQ ID NO: 85873 - DNA, 383 bp, Arabidopsis thaliana columbia
ctcgcctcgaggttgaaggaacagcgtgacaggaggagtgagagtttggcaaagaagaggtcgagactctcttctgctgcatgccaagccctctgtcacagcttaaaaaagcttgagaatcaaatcaaagatgtcacctttctagtcttgttctcttttcttccccggctattaaaaagttagttcgagttcatattcagctgtttttgttccaagacatgggtacacaatcgctttgggcttctttcatgatttatgcttttagttgaagaccattttaaactccatttttaaaaaaaaaaaaaaaaaaacaaagcggccgctctagaggatccaagcttacgtacgcgtgcatgcggttgtcatagctaaagctatagtgt

SEQ ID NO: 85874 - DNA, 591 bp, Arabidopsis thaliana columbia
  unsure (1)..(591): unsure at all n locations
gcgtcgagagcattttatatcttcaatcatcttacgcaggctgttgtagcagcagtgtctatcggagacgatgaagttcaacgtcgccaatccgaccaccgggtgtcaaaagaaactcgagatcgatgacgatcaaaaactccgcgcctttttcgacaagaggctctctcaggaagttagcggagatgctctaggcgaggaattcaagggatacgtattcaagatcatgggaggatgtgacaagcaaggtttcccaatgaaacaaggagttctcactccagggcgtgtccgtctttttgcttcaccgaggtactcctttgtttttagagggacacgggaaggaaggncttggagaaaaggagaccgaagcttgtcccgtgggtgcatttttgagccctgacctgtcttgttcttaaactgggccaattttgaagaagggtgtaaggaatcttccccggggttnccgacaattaggngcccaagaattannggncccaagngggnattaaagnnccnnaattttttaaccttngnaaaaagggntttttttanggaagttggtaaaatttccggcgttcctttaaaaaaaag

SEQ ID NO: 85875 - DNA, 893 bp, Arabidopsis thaliana columbia
  unsure (1)..(893): unsure at all n locations
cgccaagctctacttctgacttacatctagggaaagctgtgccgcctgcaggtgccgggccgcaattcccgggtcgacccacgcgtccgtacggctgcgagaagacgacagaaggggagacgtcaaatatgaagttcaacgttgagaatccaactactggatgccagaccaagctcgtgatccacgatgaccatgaactacgcgcgttttacaatcatgaaatcgggggggaagacagaggagatgctttgagcgaggagttcaaaggatacgttttcaagatcaaggatggttgcaataagcacgggttcccaatgaagcagggagttctcactccaggccgcgtccgccttctgcttcaccgaggtactccttgctttcagaggacacggaaggaggtctggtgagaggagaccaaagtctgcccgtgggtgcattgtgagccctgaccgctctgttcttaacttggtcattgtgaagaagggtgtaagtgatcttcccgggcttaccgacactgagaagccaagaatgagaggtcccaagagggcatcaaagatccgcaagttgtttaaccttggaaaagaggatgatgtgaggaagtacgttaacactttaccgncgtaccttcaacaaacaagaaggggcaagaaggttagcaaggtccctaagatcccagaggcttgtgacnccattganccncccagagnagagagcaagaattttgctggcaagaagaanggaatcgccaagggtaanccttggttnagctggttttccannaagtnttttcccccaanactaaaaggggcccgntattccccggantnaaaattttgcccaaaagggttanncctttttggncccnggaaacccggtggngntaaannccccaa

SEQ ID NO: 85876 - DNA, 1022 bp, Arabidopsis thaliana columbia
gagagcattttatatcttcaatcatcttacgcaggctgttgtagcagcagtgtctatcggagacgatgaagttcaacgtcgccaatccgaccaccgggtgtcaaaagaaactcgagatcgatgacgatcaaaaactccgcgcctttttcgacaagaggctctctcaggaagttagcggagatgctctaggcgaggaattcaagggatacgtattcaagatcatgggaggatgtgacaagcaaggtttcccaatgaaacaaggagttctcactccagggcgtgtccgtcttttgcttcaccgaggtactccttgttttagaggacacggaaggaggactggagagaggagacgaaagtctgtccgtggttgcattgtgagccctgacctgtctgttcttaacttggtcattgtgaagaagggtgtaagtgatcttcccgggcttaccgacactgagaagccaagaatgagaggtcccaagagggcatcaaagatccgcaagttgtttaaccttggaaaagaggatgatgtgaggaagtacgttaacacttaccgccgtaccttcacaaacaagaagggcaagaaggttagcaaggctcctaagatccagaggcttgtgactccattgaccctccagaggaagagagctagaattgctgacaagaagaagagaatagccaaggctaactctaatgcagctgattaccagaagcttcttgcctccagactaaaggagcagcgtgatcgccgtagtgaaagtttggccaagaagaggtctagactctcttctgctcctgctaaacccgttgctgcttaaactgcctcaagattaagaaatttctttctctctagtttgtttctggtcgtatttaagttgctccacagacatgagaacgccattttgaacactatttttggtttctgttttgtgtcaacttttcaagccttttattatatcaaagttttgaacctcttagtagtacgtttgttatatttagttattatttaaaaaaaaaaaaaaaaa

SEQ ID NO: 85877 - DNA, 1191 bp, Arabidopsis thaliana columbia
  unsure (1)..(1191): unsure at all n locations
nnnnnnnnnnnnnnnnnnnnnnnnnnnnnnnnnnnnnnnnnnnnnnnnnnnnnnnnnnnnnnnccacgcgtccgcggacgcgtgggcggacgtcgagagcattttatatcttcaatcatcttacgcaggctgttgtagcagcagtgtctatcggagacgatgaagttcaacgtcgccaatccaactactggatgccagaagaagctcgagatcgacgatgaccagaaactacgtgcgttttacgacaagagaatctctcaagaagtcagtggagatgctttgggcgaggagttcaaaggatacgttttcaagatcaagggtggttgcgataagcaaggtttcccaatgaagcagggagttttgactccaggccgtgttcgccttttgcttcaccgaggaactccttgcttcagaggacatggaaggagaactggtgagaggagaagaaagtctgttcgtggttgcattgtgagccctgatctctctgttctgaaccttgtcattgtgaagaagggtgagaacgatcttcctgggcttaccgatactgagaagccaagaatgagaggaccaaagagagcctccaagatccgtaaactgtttaacctcaagaaggaagatgatgtcaggacctatgtcaacacttaccgccgcaagttcacaaacaagaagggcaaggaagttagcaaagcccctaagatccagaggcttgtgaccccattgactcttcagaggaagagagctagaattgctgacaagaagaagaaaattgctaaggctaattctgatgctgctgattaccagaagcttctcgcctcgaggttgaaggaacagcgtgacaggaggagtgagagtttggcaaaaaagaggtcgagactctcttctgctgctgccaagccctctgtcacagcttaaaaaagcttgagaatcaaatcaaagatgtcacctttctagttttgttctcttttcttctccggctattaaaaagttagttcgagttcatattcgagttcatattcagctgtttttgttccaagacatgggtacacaatcgctttgggcttgtttcatgatttatgcttttagttgaagaccattttaaactcaatttttatagggcggccgctctagaggatccaagcttacgtacgcgtgcatgccacgtcatagcttttgtgatagttacacataatt

SEQ ID NO: 85878 - DNA, 699 bp, Arabidopsis thaliana columbia
  unsure (1)..(699): unsure at all n locations
nnnnnnnnnnnnnnnnnnnnnnnnnnnnnnnnnnnnnnnnnnnnnnnnnnnnnnnnnnnnnnnnnngaaaaaggtaactgctttttcatctcttaattataactcctttcctctcttctctctctctcttccatggtgggttcttcttttagtagatctctgcaccacccaaagcccaaagctcaaagctttgcacagaagatacagagagaaagaaccacatacaaaaaaaaagagtctacttttctttttgtttctacttgctatttattacttttcacaccacaccctctggtcaaatgtctttctctctactcttctttcctttggtctgagacaacagtagcaagagtccgtgaaagaagaaaacaaaatgttagaattttgaagaagatgagggaaaaggaagcaactttatctgtttatttgacttgagtctcttcgatctacatctggattttgcagcatttcttcttgaggaaaaatgaggaaacatggatggcagcttccataccatcctcttcaggtggtggctgttgctgtgttcttggctttagggtttgctttctatgtcttctttgctccatttgttgggaagaagattcatcagtacattgcgatgggcatttacactcctctgattacgtgtgtggttggactgtatatatggtgtgcggcttcagatcctgcagaccgtgg

SEQ ID NO: 85879 - DNA, 701 bp, Arabidopsis thaliana columbia
  unsure (1)..(701): unsure at all n locations
ccaccaaccccattnnccccgtncccngggaatntggcccccatnttttcnccaaaaccggccttncggtcccnccaaagaagccgngnanccacccnnaagggccgncaaanattggaagggcttcgtncnccgtaancctnccgntcagaatcgtcaagctaaggtacccgtggttccatctgctgcagctctcgtcatcaaggcgttgaaggagccagagagagaccgtaagaaggtgaagaacattaagcataacggtaacatctctttcgatgatgtgactgagattgctaggattatgaggcctagatctattgctaaggagctgagtgggactgtgagggagattcttggaacgtgtgtctctgtgggatgccctgttgatgggaaagcccctaaggatcttcagcaggagattcaagaaggtgagattgagattcctgagaattaaggaacaatggagtttcctttttcttcttatgggaatttgaaatgcgtctggttgttatctttcccgtttcaccaaattttgtttttgtttgggaacttaacggctatgatgtttcacttagaatgcctctccaaaaaaaaaaaaaaaaaaaaaaaaaaaaaaaaaaaaaaaaaaaaaaaacccaaagggcgaccgctctagaggatccaagcttacgtacgcgtgcgtgcgacgtcataactcttct

SEQ ID NO: 85880 - DNA, 960 bp, Arabidopsis thaliana columbia
cccacgcgtccgcggacgcgtgggcggacgcgtgggtttcgcagctgcctccttttcgtttgccactttttgatcaagcgaaactccaaaacacagagccatgccgccgaagttggacccgagccagatcgtcgatgtgtacgtccgtgtaaccggaggagaagtgggagccgccagttctctagctccaaagatcggtcctctcggtctcgcaccaaagaagatcggagaagacatcgcgaaagagacggccaaagaatggaaaggacttcgtgtcaccgtgaagctgacggttcagaatcgtcaagctaaggtaaccgtggttccatctgctgcagctctcgtcatcaaggcgttgaaggagccagagagagaccgtaagaaggtgaagaacattaagcataacggtaacatctctttcgatgatgtgactgagattgctaggattatgaggcctagatctattgctaaggagctgagtgggactgtgagggagattcttggaacgtgtgtctctgtgggatgcactgttgatgggaaagaccctaaggatcttcagcaggagattcaagaaggtgagattgagattcctgagaattaaggaacaatggagtttttttttcttcttatgggaatttgaaatgcttctgttgttatctttctcgttttaccatattttgtttttgtttgggaacttagctgctatgatgtttcacttagaatgactctcaagttttggattcttattattctctgtttcaaaaccccaatggttctctatcatcactgtttaatttctgcttttggtgagctctttgtttgattatggtgatgagaatctgaacctgcattggtgttgttgtatgtttgctaacaaaaaaaaaaccaaagggcggccgctctagaggatccaagcttacgtacgcgtgcagtcgacgtcatagatcttctatagttgtc

SEQ ID NO: 85881 - DNA, 602 bp, Arabidopsis thaliana columbia
  unsure (1)..(602): unsure at all n locations
ttccccagctctattcgcccactttggggaactggtccgcctcagtcccgtccgnatcccgntcgnccacgcgtccgaatgcacaggcttaaggcacatcaaaaattgaaaggagaaagaagatgggtttgttgccattggtgaagaaactaggtttcatcatctttcttctagtttcagcttcagcgtttgctctctgttctgcaggccgatcatccattttaatctatagccaagaagatgatcatcccgaggtagtagaaagaagaatacatgagcatgagagaattctgagaatgaattcaagagactatggccactccagtcctaaaccaaagctcgtgagacctcctttcaagcttattcccaactgatcatgcatatcaccgatcgactatatatagatgccagactttctgagatgtataatatatgtaaacctaaatactaacactgcaataagtttgaatgataatcatatatataagtttcaagatatgttttctagtaaattaatgattagatagtgctctttgctatcatgcagaatgtaaatttggtgaatagtcatcattagatgaatattacaatttatctgatag

SEQ ID NO: 85882 - DNA, 602 bp, Arabidopsis thaliana columbia
  unsure (1)..(602): unsure at all n locations
ggaaaacttccttgacaatgtgggagaaacggtggctctaactagaagagnggttttcttggttcagggattttggtcatcagcattggtcaagttatattgattgcaagaaagtttactattgaactagatgatctcagtttgtactattttnctttaggccttgtccatctttgactctttaagtactggttcatgagccttggtattattttggaattgttttttttggtaaattttatcttttaccaaaaaaattacatccatctgactacaaacatgaacacgagagagaacctaataaatgaagggtttttataggacccgtggttggaaggggagaggaggccagttttgtgatagtctgagcttgctttcaaggcttaagaggaagttgtagngggcatgntttgatgggtgaagatctgtgtgtcccgttcccgtatttggtggacccctnacccttggattcctggcattgggccaatggggcccaccatgcaatgggtttgctnaccctttccctncattggggggggttccccaagcttgtgggaaaggggnccaacnttttggggggttccctccggggnngttnttta

SEQ ID NO: 85883 - DNA, 1013 bp, Arabidopsis thaliana columbia
aggtgcactctacaagactatgacgtcgcctgcacgcgtgcgtaagctcggaattcggctcgagaagaaacggtctcaatcttattttcagcgatggcgatgtcaattctaaagctaagaaatttatcggcactaagatcggcggcaaatagtgcccggatcggagtttcatcgaggggtttctcaaagctcgcggaaggcactgacataacctcggcggcgcctggcgtttctctccagaaagctcgcagctgggacgaaggtgtttcctccaaattctccaccacgccattgtcagatatcttcaaggggaagaaagtcgtcatctttggtcttcctggggcttacacgggagtttgttcacagcagcatgtgcctagctacaagagccacattgataagtttaaagccaaaggcattgattctgtcatctgtgtctctgttaatgatccctttgctatcaatggttgggcagagaagcttggtgccaaagatgcaattgagttttatggagattttgatgggaaatttcacaaaagcttggggctagacaaggatctctctgctgcattgctcgggccacggtctgagagatggtcggcttatgtagaagacgggaaggttaaggcggtgaatgtggaagaagcaccgtctgacttcaaggttacaggggcagaagtcatcttaggacagatctaaaaagtatttccagagttgctgtttcttctgagttgcaactgataataagtttgatccgaacatgtctcaaggatcagaccaagtaacagcttcacttcttttgttttgtttccacagtttcagtttaaataaaacttatgtgtcttgccgtttctcaccaaatgtaaatctggttcatattatgaataagacacccaatgtggttgagggatatgattttttgtgtccccattgtcaacaaaaaaaaaaaaaaagggcggccgccgactagtgagcttgttgacccaggaattaatccgggccgggacctgcag

SEQ ID NO: 85884 - DNA, 464 bp, Arabidopsis thaliana columbia
ccccccttgaggtcgactgtatcgataagcttgatatcgaattcgcggccgccttcgtcttctcgggaatggtcctcgttggtcacctcttaagtcgagcggcggattatctagtggagaaacaagaggctttgctcgttagggctttccatttgcgtcaaagctttggtccaacagacattctcaaggagttgcatactaacaagttgagatacaaatgctatgctacatgccttgtccttgtagtcctcttcattgttggcacgattttccttgtaatggttgagaatattctttttatctcagctaactacttcatgggcgtggactgttacaacattggggtatggatataagagctataactagtaagccggacgcctttttgctgtgttttggatcttgacgagcagcatatgtttgtctcagtttttcctttatgtagttgttctaaattcagattt

SEQ ID NO: 85885 - DNA, 1510 bp, Arabidopsis thaliana columbia
  unsure (1)..(1510): unsure at all n locations
agaacatcatcaatgaagaccaattgcgagatccgacaacaccgcttcttttgatttcgatcttactttccctggatctcatagttaatctggtttgagtctagaaatgtcgagtgatgcagctcgtacgccattgttacccactgagaagatagataccatggctcaagatttcaacctgaactcaagaacttcttcttcaagaaaacgaagattgcgtcgctctagaagtgctcctcgtggtgattgtatgtacaatgatgatgtcaaaatcgacgaaccacctcctcatccgagtaaaatcccaatgttcagtgatctaaacccgaatctcaggcgagtgatcatgttcttggctttatatcttaccattggtactctctgtttctacctcgtgagagaccagatctccggtcataaaaccagtggtgtggtagatgctctctatttctgtatagtaacgatgacaactgttggatacggtgaccttgtccctaatagttccgcctcaaggctacttgcttgtgccttcgtcttctcgggaatggtcctcgttggtcacctcttaagtcgagcggcggattatctagtggagaaacaagaggctttgctcgttagggctttccatttgcgtcaaagctttggtccaacagacattctcaaggagttgcatactaacaagttgagatacaaatgctatgctacatgccttgtccttgtagtcctcttcattgttggcacgattttccttgtaatggttgagaaaatgccggttatctcagctttctactgcgtctgctccacggttacaacattgggttatggagataagagttttaactcggaagccggacgcctttttgctgtgttttggatcttgacgagcaccatatgtttggctcagtttttcctctatgtagctgagctaaatacagaaaacaaacagagggcgttggtgaaatgggttttaacgcgaagaatcacaaacaatgatctcgaagcagctgatctcgatgaagatggagttgttggagctgcagagtttattgtgtataaactgaaagaaatgggtaagattgatgagaaagatatttctgggataatggatgagttcgagcaacttgattacgatgaatcaggaactctcacgacttctgacatcgttttagctcagaccacgtctcagattcaaaggtaagcctcattatcatcatcatcatcatcttgcgaagcgaatcagaatgtttgtttagttataccttcacacaacaaaagccaaagagagtgaccgttttttgaaattttgtttgtttttcctgtttgtgtttgtaatgtaatgccacagtctaactctttgtcgtttcttgatgctgagtgtataatttcatctctatctataaatatgaagcgcggccgnnnnnnnnnnnnnnnnnnnnnnnnnnnnnnnnnnnnnnnnnnnnnnnnnnnnnnnnnnnnnnnnnnnnnnnnnnnnnnnnnnnnnnnnnnngtt

SEQ ID NO: 85886 - DNA, 759 bp, Arabidopsis thaliana columbia
ctcggtggagactattgatggaggaaacactattgtgaaaggtaaacatatcattgttgctactggctcgtgttgttaagtccttgcctggtattacgattgatgaaaagaagattgtttcgtcgactggagcgttgtctctatcggaagttccgaagaaattgattgttattggtgcggggtatattgggcttgagatgggttctgtttggggtaggcttggatctgaggttacggttgttgagtttgctggagatattgttccttcgatggatggtgaaattcgtaagcagtttcaacgttctcttgagaagcagaagatgaagttcatgctcaagactaaagttgtttctgtggattcctcctctgatggtgtgaagcttacagtggaaccggcagaaggaggagagcagtctattctggaagctgatgtggtacttgtctcagcgggaagaacaccgttcacttctggacttgatctggagaaaatcggagtggaaactgacaaagccgggaggattctggtgaatgatagattcttgagtaatgtcccaggcgtgtatgctattggagatgtgattccaggaccaatgcttgctcacaaagccgaagaagacggtgttgcttgtgtggagttcatagcaggcaaacacggtcatgttgattatgacaaggttcctggtgttgtttacactcatcctgaggttgcttcggttggtaaaaccgaagaacagctgaagaaagaaggtgtgagttacc

SEQ ID NO: 85887 - DNA, 429 bp, Arabidopsis thaliana columbia
ccacaattcaccacggccacaattctactttgattcaataaacatctttttccataacggttcttcaacctccagaggtggttgggccaacattttttgacccggtggatgactactttgctaagggcagttggagcaccatgcaacaactaagttctcccccatcctcagcacagaaaagtttagctccaggtagcacctctgatgctataaatgaagtccgcttaaaaagacctatgagtcgcacagaggttccttccaacgacccatctaatcaatcgtcatcagaaaccaaggaaaaagagagtcttgaagtctccagtagttcatcttctgatatgatcagttttgatttgtcgaatggagatccatatcctcctcatcttcgcagtagctttagatgatgatcaatatgtggagtttcacgta

SEQ ID NO: 85888 - DNA, 418 bp, Arabidopsis thaliana columbia
cacgcgcctctcgggtaattttcgcaggtgggtgtctctgttgatgatatgaaccaagaaaatggcttcaaattattgaacacaagaggtaagaaaaaagtgagataataaggaaattaaaacaataaattatcctttcggtgggattttttttgtcgtcttctattgtttttgtgagtgtgtgtgtttatataatggtaagagatctctgatctctcaagcttctctatagagagagtttcttctcatgctctttctaccaaggagaagattctctcgttaattttgtttgacttgcctctgccaagcaacctgagtctgtggtctgaatcttttcaaggctagagaagatatcctaaacacgagaatggtgacaggttgtggtgatctgcatcaatctttcaaatctgcagattca

SEQ ID NO: 85889 - DNA, 511 bp, Arabidopsis thaliana columbia
cgcctgcaggtaccggtccggaattcccgggttgacccacgcgtccgtacggctgcgagaagacgaccgaaggggatagagagagtttcttctcatgctctttctaccaaggagaagattttctcgttaattttgtttgacttgcctcttcgaagcaacctgattctgtggtctgaatcttttcaagggaagagaagataagctaaacaagagaatggtgacaggttgtgttgatcttcatcaatctttcaaatctgcagattcatcttctgtgccaattcctcctcctcttccatcaaaatctgatggactcaagaaaaaacttgggcatagcagcgtttcgacagccacaagagatatgtgggatcgtcttttcaatgacggatacaaagctgatgtagtcatctatacagataatggcagtatcatctatgctcatgccaacatccttggaactgcttccactgtgatcaaaggcatgttgaagcaagccaagagacatggcaagtgg

SEQ ID NO: 85890 - DNA, 620 bp, Arabidopsis thaliana columbia
  unsure (1)..(620): unsure at all n locations
cccacgcgtccgcccacgcgtccggtctttatatgcttgctaataagtggatggttgatgacagtaaacttcacgtcattcactacactctaggccctcttaagccttgggactggtggacagcatggctcgtgaaacctgttgatgcttggcatagcattagggtaaagcttgaggaaactcttcctggaactggaggtggtagtaaccaacatgatgaactcgtcgtcaagttccttttcttgttacctctttgtgcacttttgttctgcatttaccgatccattcagggccgtgagggttcattgtgctggagctcgttcagcaatcagattagatatctttattacaaagttagatctaatggaacacttggttatggcggtgtatctaccatgagtcccagctatcaaccccacagtggcaacggacagtccaaggntcctcaacacttaggcgcaggttcagttgtcgnctgttttactgctggtcctgttaacnnttggatttcctttgcgnttgtgccaggaaatnatgcatggctngnttgcttggggattaatnggcnttncaantcttcctttgttgggnntcctnctttgtnanacaggaagaaggtg

SEQ ID NO: 85891 - DNA, 578 bp, Arabidopsis thaliana columbia
atactcaggttttattccaattattttagggaaggttggaccccttgcaggacccggtccgaatttccggggccgacccacccttccgttaagcaaacctaaaccaggctatggctggtatgcttcccggagttgagtgtgcaaggaggcggcccttccacggtggtgctcctccgattgaatcctcgaacacagcttctgtggcggctgcggcgggacacgtctggacacggcgaccatcgttctctctttacactaccaatcatgagagccaccaggcccatgtctccttctcggagagaagtgttaggaataaatcttatggagaagacaacgatgagaaacttgacggagcagccaaagaggcaaagcagaggcttaacaagcggctgagaatcccaccacgtacaagttcaggcaaaatggtaaagacaaagggaataaattggagcaaggaaagggtaaacctctcggggacttaccgaccgaggtggtcgggttaaagaagagccgaggaaggttgatggaatggttcaagcgccgagttagggaacaacacgattgtgctatatgtctag

SEQ ID NO: 85892 - DNA, 608 bp, Arabidopsis thaliana columbia
cccacgcgtccgcctccctaagcaaaactaaaacaagctatggctggtatgcttcccggagttgagtgtgcaaggaggcggcgcttccacggtggtgctcctccgattgaatcctcgaacacagcttctgtggcggctgcggcgggacacgtctggacacggcgaccatcgttctctctttacactaccaatcatgagagccaccaggcccatgtctccttctcggagagaagtgttaggaataaatcttatggagaagacaacgatgagaaacttgacggagcagccaaagaggcaaagcagaggcttaacaagcggctgagaatcccaccacgtacaaggttcgatttagtaaaaaacggcgtgtgatagtaaaaccaactcgtaaatttaccttaaaatgcaccgaagaagcttcaagcctttagctttatttgtcatgataatgacgcatgatgatgtattctaattcataacatgtggtatcacatgagcaatactattgtgagtttgtcttttggcggacaattatttcattacccctttagggttaaccccactttgtggccttgcgagcgcattttagcaggttctcgctatttattgtt

SEQ ID NO: 85893 - DNA, 654 bp, Arabidopsis thaliana columbia
  unsure (1)..(654): unsure at all n locations
cncccccttgnctgggcccatttccagtcccctntnntgtaagtccccttttgtttgatggccgaactccccggaactncttggccgcttccaaggannccnaattttggncatacnccctttggaattggcattccatttttaagttcaggcnaaattggtaaggccaaagggaataaattggagcaaggaaagggtaaacctctcggggacttaccgaccgaggtggtcgggttaaagaagagccgaggaaggttgatggaatggttcaagcggcgagttagggaacaacaagattgtgctatatgtctagaccggttcaagaagggtgagaccttggtacacctaccatgtgcccataagtttcactccatatgcttattgccttggctagacaccaatgtttattgcccatattgtagaactgatatttggaattaaatgttatatttttgatgtcatatttcgagatgtttttttatggcttatcttaggttttaggaatttaaacataaaatgactagcgcaatcaataaaattttaactaaatttagcctcttttttaaaaaaaaaaaaaaaaaaaaaaaaaaaaaaaaaaaaaaaagggcggccgctttaaaggatcccagcttacggaagggggcattcgacctc

SEQ ID NO: 85894 - DNA, 1488 bp, Arabidopsis thaliana columbia
  unsure (1)..(1488): unsure at all n locations
atgaatncccagtggaagaaagggaagctaataggtcgtggtacttttggaagtgtttacgttgcaagcaacagcgaaactggagcattgtgtgcgatgaaagaagttgagctatttcctgatgaccccaaatccgcagagtgtataaagcaattagagcaggagatcaaacttctaagtaaccttcaacatccaaacattgtgcagtattttggtagtgagacagtagaagatcgtttctttatatacctggaatatgttcacccgggttcaataaacaaatatatccgtgatcattgcggcaccatgacagaatctgttgttcgcaattttactcgtcacattttgtctgggctggcttatttgcacaataaaaagactgtacatagggatatcaaaggtgctaatctccttgttgatgcttctggggttgtcaagcttgctgatttcggcatggctaaacaccttactggacaaagagctgatctctcgttaaagggaagcccgtactggatggcaccagagctcatgcaagctgtgatgcaaaaagatagcaacccagatctggcttttgctgttgatatatggagtttaggatgtacaatcattgagatgttcactgggaagcctccttggagtgagtttgaaggggctgcagctatgttcaaggtcatgagagatagcccaccgatacctgaatcaatgtcacctgagggtaaagacttcctgagattatgcttccagagaaacccagctgagcgaccaaccgcatctatgttgctagaacaccggttcctaaagaactctttgcaaccaacctcaccaagcaacagtgatgtctctcaattatttaatgggatgaacataacggaaccaagcagtagaagggagaagccaaatttcaaactagaccaggtcccgcgagctagaaacatgacatcctcagagagtgaaagtgggcaacagcagcagcaacaacagtaccggtctcccgatctaacaggaaccgtgaaccgtctgtctcctcgttccactctggaggctatcccaagcccgtgtccttcccaacgacctaagcccagcagcagtgacaggagaagaacgggcgtcacttcagatcacctttgatttgcagctcgagaggttaaccaatagaagctacttctatacgtattcttgtacacgtaagtgtatgtcaatgtacgtatttagagtttggggtcgcgtgggggaatacaattgggatgaaatgaaaatcctatgggtggtagatgaagaatattgtgtctgtaaaattataattcaatgttgaatcgatagaagaagcttttttctttcttcctctttgtttttttttttttgcttgagagagttgtgtataaattattttaacgacgtcttgtgtacctttggtttcgggtctgtatccacttttagatttagatccatttaaaacaaaattaatctctgaaaaaaaaaaaaaaaaaa

SEQ ID NO: 85895 - DNA, 835 bp, Arabidopsis thaliana columbia
  unsure (1)..(835): unsure at all n locations
gcgatgaattgggtaggtttgttgagcttacggggatccctgttgcgagtacgttggtggggctgggatcttatccgggtgatgatgagttgtcgttacatatgcttggaatgcatgggactgtgtatgcaaattacgctgtggagcatagtgatttgttgttggcgtttggggtaaggtttgatgatcgtgtcacgggtaagcttgaggcttttgctagtagggctaagattgttcatattgatattgactcggctgagattgggaagaataagactcctcatgtgtctgtgtgtggtgatgttaagctggctttgcaagggatgaataaggttcttgagaaccgagctgaggagcttaagcttgattttggagtttggaggaatgagttgaacgtacagaaacagaagtttccgttgagctttaagacgtttggggaagctattcctccacagtatgcgattaaggtccttgatgagttgactgatggaaaagccattataagtactggtgtcgggcaacatcaaatgtgggcggcgcagttctacaattacaagaagccaaggcagtggctatcatcaggaggccttggagctatgggttttggacttcctgctgccattggagcgtctttttgctaacccctgatgcaatagttgtggggtattgccggggatggaagctttttaaatgaatgtccaagagctggcccaatccctgtaggggaacttcccgtgaagaacccctttttaaacaaccagcattttgggatgggttatcaattgggagaccggttacagggaaccggccannattcccggggncggcnngnggc

SEQ ID NO: 85896 - DNA, 506 bp, Arabidopsis thaliana columbia
  unsure (1)..(506): unsure at all n locations
ttttttgttcattcacctaattttatcgttacaagtagcaacaacaatgatgataataataatagttacaaagggttaagaatagggctttttcttttcttgttgagctcccacttcgattgaactccacaagcttttccccaacccatcaatctttttttgtttgtctcctctcgtctgaccgtaataacaaaaagaacaaaaaaaagcaaagaagaatggcaatccccacccgttggctctttgaaccagaccaggtaaggcaacatcttctgtctaacgtatcttacatcaaactttcactcgtattcgctctggtgcttatgtttagaccctgaagccgcttcaaactttgcatcagctgtgtaaacgatggccggaaatgcgggtccgtttgccaaattcacggatatcggngccanagtaaatcggaancanccgggattcaagggncgtccnggacccaaggccacgantgancgggntaaccttcaggggcgggaaga

SEQ ID NO: 85897 - DNA, 353 bp, Arabidopsis thaliana columbia
tttttttaagcaaagagcagagacttatcggttatcagatttacatttacattcatcactccaatccaatcactgacttaacacacgatgatccatggtacaaacgacagacgaaaagtaaagagttgaagcttgaaggtttttggtcattcaaatgatatctggacaaagcgtgtgaaataaaaactagctaataagcgaagtagcagccaaggatgacttccctttttttgtaggaacgtacacatcaccagattccaccgggctcagatatggacagagaaatggtgtgtgttcctacctccatgcatggtcatttgattggccatggaaccatatcattggttggggtt

SEQ ID NO: 85898 - DNA, 485 bp, Arabidopsis thaliana columbia
  unsure (1)..(485): unsure at all n locations
caccagtnttcaagactcaanccggccggagtggggcctcagaaaaaggaagacgtgggagaggccgncgagaggaaggttcgaagccaaagcaggaagggagatccacccattgcttcacgttctaaactaaagaagagactaccaaagattcacaagaagaaaacaagtcttggtaagatcgcaattggaacggatagggttgtttcagttgcagctaaactggagaaactggatttggatttgataaggaaagagcgaacaagaggagatatctcacttgctgatcagatccaagctgctaagaaccaacgaggaagtgatgttttatcgagatttggtctttttgccatgaaatcgatggattttgattaactcttttctactcctagtttatagctttctctttttttcttgtgccactaaataaataaacaaggttgacttgaggatataataaataaatagattgacgaaaaaaaaaa

SEQ ID NO: 85899 - DNA, 501 bp, Arabidopsis thaliana columbia
ttttttttttttggcagagctaaagatcggttattattctcataaattgcatctcatatcatacaatgttatgaattctcaataaatgcagagcaaaacaaaacatctcaaggtcaagatgtgatcaaatattaagctgaaagataaagagttaacattagcctcgtcaccacaatgcttttttaagttagctccataacttttgctgtcttcatgatgcaaagacccgttgacgagtggaaacatgagcttgagacttgacggatacatgagaaacaataggcttcaacaatgccttcacttcctccggtaaatcgagttgcttcctaacctcattcgctaactcaatcacatactcttcctcatgctcaatgtcgaacattgctttctctagcttgaaaagatactctcggttgttcccacaaggtcccgaagccgtagcgatttgcctcgccatttcttccaatggagctggacctaagtagtatttgttcgacactt

SEQ ID NO: 85900 - DNA, 553 bp, Arabidopsis thaliana columbia
  unsure (1)..(553): unsure at all n locations
accttgggccatgggggggggggnnnttagtatcgccgnnnnnnnnnnnnnnnnnnnnnnnnnnnnnnnnnnnnnnnnnnnnnnnnnnnnnnnnnnnnnnnnnnnnccacgcgtccgcggacgcgtgggcggacgcgtgggcggacgcgtgggcggacgcgtggggagaaatgggtgttcatggtgacggcgcaaactccgacgaacattgcggtgattaagtattggggaaagagagatgaggttcggattctccccgttaacgatagcattagcgtaactcttgatcctgatcatctctgcacagtcaccactgttgccgttagtcctgcttttgatcgggatcgaatgtggctcaatggcaaggaaatatctctttctggaagtaggtaccaaaattgtttgagggaaatacgaggtcgtgctggtgatgttgaagacatggaaaaggggatcaagattaggaagaaagattgggagaaattgaatctacatattgcttctcataataacttccctactgctgctggcttagcatcttcagctggtggat

SEQ ID NO: 85901 - DNA, 799 bp, Arabidopsis thaliana columbia
  unsure (1)..(799): unsure at all n locations
aaaaagaattcaaattttttccctttttttaaaaaaataaagggtgttcaaaccagtaaaccaagtttcaatgcgggttggtatggaatacatctcccacccatattctacagaaatgccactccccccaggataacaagcttagttgaaaattggacccgttctgccggtccaccaaaaatggttaatacatttaatgctggcccaaatgcattcatgtttgcaaaaaacagaaaagtagcagttaatttgctgcaggggctgttctactgcttccctcctaagcctgacacagacatgaagagttacgtactgggggatacatcgatagtaaaagaggcagccttggaaggagagcttccccaagggattaaagccaaaattggaagtcaggatcaaaaaggtgaagtgagttattttatatccagcagacctggaagaggtcctgtggtgcttcaagaccaaactcaagctcttctccatcctcaaactggcctccccaaataaccatttctatgtcttgttgttacttcaactctgagatttgcaacagcttcatcttttgctttgccagctccaactcttgtcctaagagagcactcttctgaatcttttcccaattatttgtgtttacgtacaattcttctgcatcgggtgcaaaaaacaaaacaatcaatattgcaaacgaataagatctggatgctaaaaaaaaaaaaaaaaaaaagaaaaaaaaaagggcggccgctctagaggatccaagcttacggacgcgtgcatgcgaagtcatagctcnnnnnnn

SEQ ID NO: 85902 - DNA, 1742 bp, Arabidopsis thaliana columbia
cgcatctgattcgtaccaatgtgatcatcctccttattttaatctcccacctgatttgagctgtttctttctctttcgaactctccgtcacttccatttcatttctatttgaatcttctcaaagctacacagatctctgaaatcgaaaaagcttgagctgtgttaatggcggaggagaaatgggtggtgatggtgacggcgcagactccaacgaatatcgccgtgattaagtattggggaaagagagatgaggttcggattcttcccattaatgatagcattagcgtcacgcttgatcctgatcacctctgtactctcaccaccgtcgctgttagtccttcctttgatcgagatcgaatgtggctcaatggcaaggaaatctcgctttctggaagtaggtaccagaattgcttgagggaaattcgaagtcgtgctgatgatgtagaagataaagaaaagggtatcaagattgcgaagaaagattgggagaagctgcatctgcacattgcttctcataacaacttccctactgctgctggcttagcatcttctgctgctggttttgcttgcttagtttttgctcttgccaagttgatgaatgtaaatgaagatccaagccaactttctgctatagcaaggcaaggttcaggaagtgcttgccgtagtttatttgggggatttgtcaagtggaatatgggaaacaaagaagatggaagtgacagtgttgcagttcaactggtagatgataagcactgggatgatcttgttatcattattgctgtggttagttcacgacagaaggaaacaagcagcacctcgggaatgcgtgagagtgttgagacaagtttgcttttacagcatagagcaaaggaagttgtcccagtacggattttgcaaatggaagaagctataaagaatcgagatttcacatcttttacaaaattgacgtgttcagacagtaatcagtttcatgctgtttgtatggatacatctccacccatattctacatgaatgacacctcccacaggataatcagcttagttgaaaagtggaaccgttctgccggtacaccagagattgcttatacatttgatgctggcccaaatgcagtcatgattgcaagaaacaggaaagtagcagttgaattgctgcaggggctgctctactgcttccctcctaagcctgacacagacatgaagagttacgtactgggggatacatcgatagtaaaagaggcaggcttggaaggagagcttccacaaggaattaaagacaaaattggaagtcaggatcaaaaaggtgaagtgagttattttatatgcagcagacctggaagaggtcctgtggtgcttcaagaccaaactcaagctcttctccatcctcaaactggcctccccaaataaccatttctatgtcttgttgttacttcaactctgagatttgcaacagcttcatcttttgctttgccagctccaactcttgtcctaagagagcactcttctgaatcttttcccaattatttgtgtttacgtacaattcttctgcatcgggtgcaaaaaacaaaacaatcaatattgcaaacgaataagatcatcccagtgcttatcatctaccagttgaactgcaacactgtcacttccatcttctttgtttcccatattccacttgacaaatcccccaaataaactacggcaagcacttcctgaaccttgccttgctatagcagaaagttggcttgatc

SEQ ID NO: 85903 - DNA, 470 bp, Arabidopsis thaliana columbia
cggaaaacgcgagggtaattaaaagtcagtgtttcatgacacaaggaacacctaacttctacatgcgtccgatcgaaggtttaaccattctcatcgatttagatacaaagcaagtgatcgagataaccgatacaggtcgggctatacccatacccggttcaaccaataccgattaccgcttccaaaagctcgcaaccaccgacaaaactcggcctctaaacccgatatccattgagcagccacgtggtccaagcttcgtgatagaggacaaccatctagtgaaatgggcaaattgggaatttcatctaaaacctgacccgagagcaggtgtggttatatcacgggtaagagtacacgacccggatactcatgagacacgtgacgtgatgtacaaaggtttcgtgtctgaactttttgttccgtacatggatccatcggacgcgtggtactttaagacttacatggacgca

SEQ ID NO: 85904 - DNA, 864 bp, Arabidopsis thaliana columbia
aggaggtggttaatgcgagtcggaagtacagattacgtgtacatgtctgtgctccatcaaactctgcacttgatgacattgtgttgcggcttctgagttcgggtcttcgtgacgaacacgcccagacatatacacccatcaatagtacgaattggtctcaaggctcatcactctgttgcgtcagtatcactggatcaccttgtggcacaaaagcgtggctctgccatcgataagccaaaacaagggactacaggaactgatatagatagtatccgcactgcaattttggaagaggctgcgattgtgttcgctacccttagcttcagtggctctgcacttcttgctaaatctaaccgtggtttcgatgtcgttataatagatgaagctgcgcaagctgttgagccagcaactcttatccctttggccactaggtgcaaacaagtatttcttggtaggggatccaaagcaactcccagctactgtaatctcaactgttgctccggattctgggtacggtacaagcatgttcgagagacttcaaaaggctggctatccagtaaaaatgttgaagacccaataccggatgcatccagagataagaagctttccgtcaaagcaattctatgaaggggcactagaagatggatctgacattgaagctcagactactcgtgactggcataaataccggtgctttggtccattttgcttttttgatatacatgaagggaaagagtctcaacatccaggagcaactggttctcgggtaaatctagacgaggtggaatttgttcttctcatctaccacagacttgtaaccatgtacccggagctgaagtctagttctcagctagctattatatc

SEQ ID NO: 85905 - DNA, 537 bp, Arabidopsis thaliana columbia
  unsure (1)..(537): unsure at all n locations
ttttttttttgatagctaaaaatgatcttatatatagagagaaacataccaaacttcaaataactcgctctaattactgctgatcaatgattaatacaaggggttatcaagagtttgaaggaacaagaagcctaatcgtcaagccaatccacggtgaagcatttttttggcgacttcaatgcaaagttcaggaaccaccttcttgaccatttcccacatagacgaagtcccctcatcgcaaatgacatggcgttgagacacaagtgcagctacagaacttggtaaacccaataaactgcattctctcatgtcaattttctcaagactccctagctttccaaacttttcagggaagggnaaccaggctgacacactgtggaaatgtcaacgtactttaggccatggcagctcacaaactttggnccgggnggggtttcagcttgggggcaggnatttaaccttnggcggtcaangggctntncggtacnnnaaattttttgggaatncaagnatccgnnggcatttggttntnctnng

SEQ ID NO: 85906 - DNA, 522 bp, Arabidopsis thaliana columbia
  unsure (1)..(522): unsure at all n locations
agaaacaacaaaaaggtgaatagatctttttcagctacgaaatacttttttaaatctcaacaaaaatttaaaaactaacagcacttacaacaaccaatttaggcaattacacaagaaaacgagaataaccaaaaattgggattccacccctcagatctcaatcaaatttataattcatgccatggtattgatgaagtatttcaagactcaaactgcaattacgcttccctgtgcttcggcaatgagtctcttcttattcgatttacctttggatttctgagactttcgtttcctcgaaggagtctcctgcttttagctcgtctgtggcttgttccattgcagcaatgacatccttttctttttccttcctcgnccttaggganacnctgnctcnaaagtccctggatcgatcacagncatccaccaagggggaggccaacaagaacgggtcttanaaactggnatcnacggaaggccngncaaanggggtancctccagggtcccatccttacggaatcggg

SEQ ID NO: 85907 - DNA, 857 bp, Arabidopsis thaliana columbia
gccccctttgaggtcaatggccgtctccagtaccgctccggaatttccgggtcgacccacgcgtccgctcttctttatctctcatctcaatctcagccatcattatcatcatcgttgtgacatcggagttgacgtcacgttgtggtcgtgattgttatacgtggttggtttcgtcgtcgttcatcaccggattgttagaagaaaacagttcaagtggtggaattggtgatccgtttcccgtcacgtctgaaggattttgggcgagttctcaacggttctgcgtagatctcgttcccaagttttcagaatagttttcggatctaaaatcggaggtagaggttttaaagatctatttcccgacggatctgaaagaatcagatcgtgagtttggtgtcgttggaaagatcttgaggagagaaaaaagtagcaaatttcgttttcacgatccaagtttcatcttaaggtttttaggaagcgtttctggtcaccccggagcataattagaccaagcgacggtggataccggtagaggaagtgttagggaagacacggaactttttgtcgtcactaggaaaggtcacattgagaattgtgtgtagtcgctcaaattcgtcttgcttatggtgtattttggaaacctcagatttatttttctaatattgggatttttctttatacgaatttatttaacatagtttttccaagtggattttaaaaacttttttttggtaaagaacaaatcttcttggttttcttgaaaatttaaagaataattggataattttgacccgaaaaggattgtttatttttaaaaaaaaaaaaacataaaaagggggcgggtcggttttctaaaaagg

SEQ ID NO: 85908 - DNA, 668 bp, Arabidopsis thaliana columbia
  unsure (1)..(668): unsure at all n locations
gttattgggcccgttaaagcccgtaactgttaaaagcccattaacaagctgcttctaatctccgaggccaagtgaaaaacaatgatagagatataacatcaatccaatcgaattatcttttaacacttctgtataagatatttaggtaatctcggaattctcaatctactatcaaactccgtttggactttctgcactcggtaattggaaattgttttcggttttagaattatagcaccattgcaaagggcctcatcatcatattgtcttcatggtccaatatgtgacagtgcgtaaacatagcctggctcttgagttgcgtcaaaggagtaagattcgtttgagtgaatgtaagaaaatctaacgagtatcttcgttacatgtcccggcatcatcttgaatacgtttttccatccccgctcgtgtaccgtaaccgcggttttgttccctcgtgcgtatttgctaatctcacacttcacagcatcgtttcttttagtcatgcactctatgaactcctcactcttcaccaatgccgtttgctccaatactttaaacaatcccaagtgaatatgcaacggatggttatcctccgttaaatttatcacttccccaaaacctaggtttgtnccngnttttttgggngttncggntacggggngngttttnta

SEQ ID NO: 85909 - DNA, 598 bp, Arabidopsis thaliana columbia
cccacgcgtccgcccacgcgtccggttggcggatatcccaaagttgctaaccgaagcagagtctctccacactctgttgaaatcgcctaatttcattttttccccagttttgcctcacacacaaatatatacacacatacgcaaaaaactcatgatgcatcattgctcaattacgaaacccactttctcaatttcgatctcgacccagaagcttcatcatcattccagtaaattcttgaatttgggtttcagaatccgatgcgaatccggggatgtttcgtcgccattgcggaccaaggcggtgtctttgtcgtcggagatggaggattcgtcgtccttgaagaagagtttgatggagttagaagggaagaagagtgagccttacccaggaggaatgccgaagatgggtccattcacagggagagatccgaatgtgaagaaacctgcttggttgagacagaaggcaccacaaggcgaaaggtttcaggaggtgaaagagtccctttctcgtctcaatctcaatactgtttgtgaagaagctcagtgtcctaatatcggcgagtgttggaatggaggtggtaatggtgtagcacctgca

SEQ ID NO: 85910 - DNA, 502 bp, Arabidopsis thaliana columbia
  unsure (1)..(502): unsure at all n locations
cnnnnnnnnnnnnnnnnnnnnnnnnnnnnnnnnnnnnnnnnnnnnnnnnnnnnnnnnnnnnnnnnnnnnnnnccacgcgtccgatttctccaataataatacaattagaaatacaatcacattgatctttttttcacaaagcttcccagctgaggaggtttcggaaataggagataaagaggagaaaacagagaatacgaagaagaagaagagtcgaggctctgctttgaaactgtcgagaaaggagaaaaaggaattggcttcttacgcgcatagtttgggtgataaattgaaatgtcaactcgtcggcaaatctggtgttactgattctgtcgttttctcattcctcgagactctcgagaagaacgagctctttaaggtgaaaatacgcaagacatcgcccgatgagctagaggatgcggtgcagcatttggaggaagcgactggttccgtagcagtagggcaaatggggcggactgggattttgataaggcccgtccca

SEQ ID NO: 85911 - DNA, 1008 bp, Arabidopsis thaliana columbia
ccaagctacaatacgactcacctaagggaaagctcgtacgcctgcaggtaccggtccggaattcccgggtcgacccagagtgacagcgtcagcgtcttgttcatcgactcaccttatccacaatcttctccgacatcccaaaccaccgtctccggtctgtctcttcctcagacccttttgcttctccgcttcagtctctcaatccaatcaccgtaacaagcctcgatttcaatcattctcctcaaagccgcttccttgtcattctgcttcactcgtagtgaaatccttctcttccatcgatgaaccagatctcgaagaagacgaagagagcgaggatgaagatttcagcgcagaagaatacgaatacgaagacgaagaagaagaagatgagcaggacagtggagtggtggtttccgagagaggaattgaagattcggaagcatctgaggaggtttcggaaataggagataaagaggagaaaacagagaatacgaagaagaagaagagtcgaggctctgctttgaaactgtcgataaaggagaaaaaggaattggcttcttacgcgcatagtttgggtgataaattgaaatgtcaactcgtcggcaaatctggtgttactgattctgtcgttttctccttcctcgagactctcgagaagaacgagctcttaaaggtgaaaatacgcaagacatcgcccgatgagctagaggatgcggtgcagcatttggaggaagcgactggttccgtagcagtagggcaaatagggcggactgtgatattgtataggcccagtcccaccaaaattgaaatgcagaggcgaagaagaatggaagttgtagagattgtcaattactagaaggcagaaatacgcatacactagacccactaaaccctttagaagagaatattcagagagacctgatggacgtggacgcagaggcggaagtagagttccaacggcgtaaatttttacccggtttgtttgttttcattcttaagagtagtgat

SEQ ID NO: 85912 - DNA, 604 bp, Arabidopsis thaliana columbia
  unsure (1)..(604): unsure at all n locations
anttaattcaccgcgnaatctggttccggatcggcgtttcccatccccggnactccgggaagaccgaccttttaagggtgaaattccgcaagacatcgcccgatgagctagaggatgcggtgcagcatttggaggaagccgactggttccgtagcagtagggcaaatagggcggactgtgatattgtataggcccagtcccaccaaaatgaaagcagaggcgaagaagaaggaagttgagagaatgtcaattactagaaggcagaaatacgcaaacactagacccactaaaccctttagaagagagtattcagagagacctgatggacgtggacgcagaggcggaagtagagttccaacggcttaaatttttacccgtttgtttgttttcatctcaagagtagtgatgcattttcatttctccaataataatacaattagaaatacaatcacattgatcttttatgccaaattctcctttgctgggaagctttgtgaagagtcgatctatcagtgaaaaaaaaaaaaaaagggcggccgctctagaggatccaagcttacgtacgcgtgcatgcgacgtcaagactcttctatagttgcaccta

SEQ ID NO: 85913 - DNA, 1184 bp, Arabidopsis thaliana columbia
  unsure (1)..(1184): unsure at all n locations
ccgggnncgacccacgcgttgcggcagctctgcattcttgttgttttcttctagtactcttgcagtcacacgaaatacgggcagtgaggagagagtaggagtgataatggcgagtggactaagcgagatcgggagcacgaagatgttcgatggctacaacaaaagatacaaacacttcagtgagacacttggatgttccatgaccttttccatctacttccctccttctgcttcttcttcccataaatctcctgtgctttactggctttctggcctcacctgcacggacgagaacttcattatcaaatcaggagctcaacgtgctgcttctactcacggcattgctcttgttgctccagacacttctccaagaggactaaatgttgaaggggaggcagacagttacgactttggtgtaggagccggattctacctcaatgctactcaggaaaagtggaagaactggcgtatgtatgactatgttgtcaaagagttgccaaaactcctgagtgaaaacttttcccagcttgacacaacaaaagcatctatatctggacactccatgggtggacatggagctcttactatatacctgaggaacctcgataaatacaagtctgtatctgcgtttgcaccaatcacgaatcccataaattgtgcatggggacagaaggcattcaccaattatctaggtgacaacaaagctgcttgggaggaatacgatgccacttgtcttatttcaaagtacaacaatctttctgcaacaattctaattgatcagggagaaaacgaccagttctaccctgatcagttattgcccagcaagtttgaggaggcgtgcaagaaagtgaatgcaccgctcttattgcgcctccatccaggatacgaccactcctactatttcattgccaccttcatcgaagaccacattagtcaccatgctcaagcccttgagctatagctcacttcatctgcttggaaaccggctttgggtttgtccaagtattagtatctcaataaagcaagtggacttgtaatgttttatgttcaataactcccctgtgtgctcttttgtctacgataataataagaaaatcatctttgattcaaaaaaaaaaaaaaagggcggccgctctagaggatccaagcttacgtacgcgtgcatgcgacgtcatagctcggct

SEQ ID NO: 85914 - DNA, 1734 bp, Arabidopsis thaliana columbia
acaggaagaggtttcttctccatttattgcatttgtctctccaaaatgtctaattaatggttttgatcttccaaccagatcttcttctctatctcttcgacaaacccttttttctgggttcttcggagaggtgatttatcaccaaaaaaaaagattttaaaagtctaaatccttttttctttctttccttcaacatgcctttaccttggaagaaatctaaatctagtcggatctctagattcgtatcagactttcaacaatctcctaaacatggtggatctctcgttgttgaaactggtttcccaacttctttaatcgatctctttgttaagaatcgcgatcgtctcaaaaaacaatcttcaaaacgtaacaacaagaacaacaaagcccagactgaaacgcgtgttttgtctccacctcctcctcatatgtctttgcagcgtcgtatgtctcttccttccaagcttgatccagctttggttacagaggattctcctttggtgagaaagatcgaggaaacttctgttccggagattatccatgaagacgacggtggtcatcgcggtggaggaggaggagggtgtgttttgatagtggtggtgtttaaggtttttatggtggctgtgcttgccttgagcacgaagaagctcgccgtggggatcacgctctctgcttttgcccttctcttcctcgagcttgcggtggcgcgtgtcttcacgtacttgaatctctgtcccgacgcgcagattcggatagattctttgatcgataagctcatagggaagcgacataaagagaagctagaagaagaagaagaagaagaatcaacatcgacgcatgacagaagaaacaatgtctactttgaaatcatcgaagaacctagagaggagattagagtcactcctcaatcggattcgtcgtcattggagaaggcgaaacttgtggtggatgagaagaaagaaatgcagacgataagagatgttatgtttaagactgagaaaagcaaaagcgcgaagctgaaatcaaagattgtgaagaagattgtgccaaagaagctaaggagttataagaagaagaagaagatgaagaacaaagaaaaagaagaagaagaagttgaacttgaaactgaagaagaagggtctatgacagaagtttctagcttgtattcagatgagagaatcgggagtgaaatctctgagagggatgatttaagttcgaatccgccatttttagagagttgtacagaggttgaagaagaagaagagactggaccaaaagaggatctaacgaaagtgattggtttgatagtgattgttcttgttggattgctgtgtgggaaagtctttgctattggtctgacactctcttggtgtctgattctcagagttttctgttgcaaatctcaaaccagtttctgaaacagaggaaaacatgattcagactttgggttcttttttttttgtggaagtccgtggcagtggtgggccttagggatcgccgttagttgttgacggtgacggtgttgacggtagagagacggtgacgggagtgttgttgttgggggtggttggcagttcgaagctagacaattggtttgcttatgaaactgtgtaaatttgttttgttgttaacagagatatatatcgtgttattatgatggtcaaagagtcaaagttgttgttatgaagaaccaaaaaaaactgagtaatatattcttaaaaaaaaaaaaaaaaa

SEQ ID NO: 85915 - DNA, 398 bp, Arabidopsis thaliana columbia
atcgacttccagatcataattgctctagtgaataactaaagaaaatagatgaatagatggaagatagaagagaaagaaaaaaaaaattctaagtatctatcatcggttcactaattacttgagtgactgttggcgggtttctttgtatgtgttgtccggaaagaggaggactcaatgattattcgttcgccggaaccagaagtcaaaattttggtagatagggatcccataaaaacttctttcgaggaatgggctaaacccggtcatttctcaagaacaatagctaagggacctgatactaccacttggatctggaacctacatgctgatgctcacgattttgatagtcataccagtgatttggaggaaatctctcgaaaagtatttagtgcccattt

SEQ ID NO: 85916 - DNA, 736 bp, Arabidopsis thaliana columbia
  unsure (1)..(736): unsure at all n locations
ccnnnnnnnnnnnnnnnnnnnnnnnnnnnnnnnnnnnnnnnnnnnnnnnnnnnnnnnnnnnnnnnnnnnnnnnccacgcgtccgcccacgcgtccgcccacgcgtccgctcttctccgtactctcttaactttcaaaacctcacgaaatcatgcttttaaacatttcttcttctccaatttctcatcgaattcctcatttcctctctgattttaacaatcccacttcaaatttccctccgaaatccaaaacccatctcccaaaatctaatctctccactttatcgaaccatagcctctacggcaccaagaacagagctttctataaaaacaagagaaacccttataacagaacacaagctctcggtcgattcgatttcggaagtctcgaatcagttctcgaagcttccgctgttctcactgcgatcatcgtcgtacacgagaccggtcactttttagctgcttctcttcaaggtatccgtgtgagtaaattcgcgatagggtttggtccgattctagctaaattcaattccaacaatgtcgaatactctcttagggcctttccattaggtggatttgttggattccctgataatgatcccgacagtgatatccctgtagacgacagaaatcttctcaagaatcgaccgattttggatagagtgattgttgtttcagctggaattgtcgctaacgttatcttcgcttacgctataatctttactcaagtggtatctg

SEQ ID NO: 85917 - DNA, 472 bp, Arabidopsis thaliana columbia
ctactatttggtttctcccacttctctttctctcttgtcttcggcttgccgctttaagactcaagaagcggcggcaacatcaacggaaaccaccgtctccaccgggctttccgatcatcggaaacttgcatcagcttggggagctaccacatcaatctctatggagtctctccaaaaaatatggtcctgtaatgcttttgaagtttggaagtatcccaacggttgttgtctcttcttctgaaacagcaaagcaagctctgaaaatccatgacctcaattgttgtagccgtccaagcttagcaggaccaagagcgctctcttacaactacttggacatagttttctctccttttaatgattactggaaagaattgaggaggatttgtgtgctagagcttttcagtcctaagccagttcatttgattcaccccatcagggaagaggaacgtaagattctgcttaattcactctt

SEQ ID NO: 85918 - DNA, 532 bp, Arabidopsis thaliana columbia
accaagcgtccggtctgaggcccgaaagctgcttcttactcgaaagtcgaaacccttgtgagagaacttggtgatgccgaagatggtaactccgacgagtactggaaccagtttattgagccattcgcagaatctgagggtcaagtggtctcttctctctcattgctttatcttaattaagactttccaggtattgagtaatgtaatacacgtatctacatgaagatgaggatataaatatccatttatgagaaaagaaaaaaagggacaaacaaaagttggcaagtttaactaagtgaaaagtctatggcggagacaacgagttggatcccagtatggtttcctctgatggtgttgggatgttttggtctgaattggttggtcaggaaggtgaatgtgtggctctatgagtccagccttggggagaacaggcactatctgccaccaggtgatttgggttggcctttcattggcaacatgttgtcttttctcagagctttcaggacttctgaccctgactccttcactcgca

SEQ ID NO: 85919 - DNA, 657 bp, Arabidopsis thaliana columbia
  unsure (1)..(657): unsure at all n locations
atgtcattgctcgtggtgcttatggtattgtctacaaaggcatatatgatggtcaagatgttgctgtgaaagtacttgattggggagaagatggttacgcgacaacggctgagacatctgctctacgtgcttcatttcgtcaagaagttgcggtttggcataaacttgaccatcctaatgtcacaaggtttntgggagcatcaatgggaacagcgaatttnaagataccttcatcagctgagacggagaactcgttgcctcaacgagcttgttgtgtcgttgtggagtatatccctggaggaactctttaagcagtattttgttccgaaacagggcggaagaaaactcgcttttaaagccgtgggttcaactcgctctcggtctcttcccgaggggttaagttcatttgcattcagagaggattgttccatcgcgatgttgaaaacagggaactatccttttggggttatcagaggaatctcaaagattgctgattttggggttgctagagttgaagctcagaatccaaaagacatgactggagaaactggaactcttggatacatggctccagagggttcttggatggcaaagccatacaacagaagatgtgatgttttacagcttttgggatatgcttggtgggaggatttattg

SEQ ID NO: 85920 - DNA, 470 bp, Arabidopsis thaliana columbia
cggacgcgtccgcccttgggttttagcagtgaagtttgcgaaaatggcgtcttcggtttttctatccagtttctcgtcatcgtcttctttgcaactctgctcttcctttcacggcgagtacttagctccgtcgagatgctttctcggagctccggtcacttcctcttctttatcactctccggtaagaagaactcatattctccgagacagttccatgtttctgccaagaaagtttctgggttagaggaagccattagaatcagaaaaatgagagagcttgaaactaaatcaaaagttaggagaaatccaccattaagacgtggaagagtatcgcctcgtcttcttgtacctgatcacattccaaggcctccttatgttgagtctggtgtattaccggatatatcaagtgagttccagattcctggtcctgaaggcattgcgaaaatgagagctgcttgcgagcttgctg

SEQ ID NO: 85921 - DNA, 469 bp, Arabidopsis thaliana columbia
cggacgcgtgggcggacgcgtgggccttcttccatttttcaaattacaaacatacacaacaacaacaaaacctcttactcactccaatggctcgccttctctttcgtcttctcgtagaatccaacactccgtctccggcgattgataactccaccgccgcgttgaattctgatctcgtcgtcatcctcgctgctctcctctgcgccttgatttgcgttctcggcttaatcgccgtttctcgatagtgtctggctccgtcgtctcgcagccggaaacagaacagtctccggatctcaaactcaatctcctcaacctccggtggcagcggcgaacaaaggcctgaagaagaaagtccttcaatctctcccgaagcttacgttctcgccagagtcacctgagtcggagaaattcgcagagagcgcgatctgtctagctgcattctctgccggcgacgttgctcccagcctta

SEQ ID NO: 85922 - DNA, 1145 bp, Arabidopsis thaliana columbia
ggtgatgaactcgatggttgaggagcaatgctttaaccaatccctggagaaacagaatgagtttccaatgatgcccttaagtttcaagagtagtgacgaagaagatgacgacaacgctgagagttgtctgaatggtttgttcccaaccgacatggaactagctcagttcacagctgacgtggagactctactcggtggaggggatcgagagtttcattccatagaagaactagggttaggtgagatgttaaagatcgaaaaagaggaggtggaggaagaggaaggagttgtgacaagagaagtgcatgatcaagatgaaggtgatgagacatccccatttgaaataagctttgactacgagtacacacacaagaccacattcgatgaaggagaagaagatgagaaagaagacgtgatgaagaatgtgatggagatgggagtgaatgagatgagtggtgggattaaagaagagaagaaggagaaggctcttatgcttagattggactatgaatcagtcatttccacttggggaggccaagggatcccatggaccgcccgggtgccatctgaaatagacctcgacatggtttgtttcccaacccataccatgggtgaaagtggagcagaggctcatcatcacaaccacttccgcggcctagggttacacctaggagatgctggggatggaggaagagaggctagggtttcaagataccgagagaaaaggaggacaaggttgttctccaagaagataaggtacgaggttcgtaaattgaatgcagagaaaaggcctcgcatgaaaggaaggttcgtcaagagatcttcaattggtgttgctcactaaagaacttaattaattatggatattaaattactttgctctcatcttgcttttttgttgctatagttttggtgattgttagctttctttttctgcattcatagagaattttgcacgtttttgtgagctacgtatgtacataaatatatcaccaaaaaatgtgactatcttgtaagcactgatttactatagtccatataacgtgaattttgattgaaggtaaaaaaaaaaaaaaagggcggccgctctagaggatccaagcttacgtacgcgtgcatgcgacgtcatagctcgtctatggtct

SEQ ID NO: 85923 - DNA, 556 bp, Arabidopsis thaliana columbia
  unsure (1)..(556): unsure at all n locations
atttaccggtgacggaatcttacctctgacctaccaatcacgtcattccacgtcatctccccgtatcttctcacgtccttccacgtgtcccctctactcaccgacgccgtctccttcccgtttacccctcccgaacagaatattaacccaaaccctaaccctatctccctctttcacgagcttctgactcagatccggcgatatcgaattccatggaggacgatgaagacatccgatctcagggttccgattcacctgatccgtcttcctccccgccggcgggactgaatcacggttacggtggcttcggcaggtccgccttcttattctctgactcctccgggtaattcgtcgcagaaggntccggatgcgttggctctggcgctgcttccgattcaggccagcggtggagggaataacagcagtgggagaccaaccggcggcggcgggaanggaggattgttggagctnacagcttacggctntgttgattgattcntgggtgtngagagatacttggagcttngcagaggggaactnaagcagtaanccacta

SEQ ID NO: 85924 - DNA, 2124 bp, Arabidopsis thaliana columbia
  unsure (1)..(2124): unsure at all n locations
gagtggtggcactgtaataacgacggagaagaacgaacgaacgcgagagatcgagagagagagaaatatttaatggatcggattctgaaagcagctcgaacatctggttcgctgaatctttccaatcgttctctcaaggatgtacctactgaggtatatcaatgtttggaaacgaccggagaaggagaaaactggtgggaggctgttgatttgcagaagttgattttggctcataatgacattgaggttttaagagaagatctgaagaaccttgcctgtttggttgtgctaaatgtcagtcacaataaactctctcaacttccagcagctattggggagcttactgcgatgaagtctttggatgtgtcctttaactcaatatcagaacttcctgagcaaattggttcagcaatttctcttgtcaagcttgactgttcaagcaatcggcttaaagaattgccagattctattgggagatgtttagacttatccgatttaaaggccacaaataatcaaatttccagtttgccagaagacatggtgaactgttcgaaattatctaaactggatgtggagggaaacaagctcacagctctctctgagaaccacatagcatcatggaccatgcttgcagaacctaatgcatgtaaggatatgctgggtgttctgccacaaaacatcggaagtctttcgcgtcttatccggcctgaccctcatcagaacaaaatttcgtctgttccaccatcaataggcggttgctcctctcttgtggagttctatttgggaataaactcactatcaacattaccagcagagattggagatctatcacgtctaggaacattggatcttcgttctaatcagctcaaggaatatccagttggggcatgtaaattgaagctctcgtacctagatctttcaaataattccttgacaggattgcatcctgagctcggaaacatgactactctgagaaagcttgtgcttgttggcaatcctttgagaacccttagaagctcattagtaaatggtcctacagctgctctattgaagtatcttaggagccgcctttctaatagtgaagaaacaagtgcaagcactccaacaaaggaaaatgtgattgcttcagcagctcgtatgtccatttcttcaaaggaactttctctggaaggtctcaacttgagtgatgttccttcagaagtttgggaatctggtgagatcacgaaagttaatctttctaagaactctatcgaggaattgcctgctcaactttctacatctgtttcccttcagacattaattttgtcaaggaacaaaattaaagattggccaggtgcaatcttgaaatcacttcccaatcttatgtgcttgaagctggataataatcccctgaatcagattccactggatgggttccaagtagtctctgggcttcagattctagacctaagtgttaatgcagtttccttcagagagcatcctaagttttgccacttgccacaactgcgagagctttatttgagtcgaatccagctatctgaagtccctgaagatatcctcaacttatctaacctgattattcttgacttgaaccagaattcacttcaatcgattcccaagggtatcaagaacatgacttcactcaaacatctagacatatccaacaacaacatttcaagtcttcctccagaactgggtttgcttgagcctacacttgaggttctacgacttgacgggaacccattaagaagtatcaggaggccaattctagaaagaggaacaaaagctgtgttgaactacctgaaagacagacttccagatcagtagcttctacaacattaacatcaacacctatgttgttgtttgtaagatttgtgtgaacaccagattgattttattgatgagaaatgcgtgtgtcccttgtctaagatattttcacttttgttggtgtgtaatccagtacgtctggttctgtgatatgtactacaagtctataaactccaatggcctcaacaggagaatttttttgtaacaaaaaaaaaaaaaaaaagnnnnnnnnnnnnnnnnnnnnnnnnnnnnnnnnnnnnnnnnnnnnnnnnnnnnnnnnnnnnnnnnnnnnnnnnn

SEQ ID NO: 85925 - DNA, 1086 bp, Arabidopsis thaliana columbia
  unsure (1)..(1086): unsure at all n locations
gtcttgttttgtgatttatcaaacttccgtccaaagtggaacatgattaaagttaggtttcaattgattggataaggacaaagactggttgttgtgtcacatttcctctctctctcagattttacaggcaaatcgatttcactcgaagactggttgttgtgtaattgtgttcgtcgtctcaggttttcaatatctgtctctttgagttgtattgatgggttctgaaggaccaacgggtgtgacgattcatatcacagggttcaagaagttccatggagtagctgagaatcctacagagaaaatggctaacaatttgaaagaatatttggctaagaattgtgtttcgaaagatgtgaatcttggaagttgtactgtgcttgagactgctggtcaaggagctcttgcttctctctatcagttgctacaatccgcggttaacacaaaagagtcagagtcgttgaccggaaaaaccatatgggttcactttggagttaatagtggcgctacaaaatttgcaattgagcaacaagctgtgaatgaagcgacttttcgttgtcctgatgaattgggttggaaacctcagaatttgccaattgttccctctgatggtccaatctcaactgtaagaaagactaatcttcctgttgaagagataacaaaggcgttggagaagaatggctttgaagtgataacatcagatgatgcaggtcgatttgtgtgtaactatgtctattaccattctctgagatttgcagagcagaataagcccagatcactctttgttcacgttcctcttttcgttgccgtggatgaagaaacccaaatgagattcactgtttctctgctggaggtactcgcttctatttgcaagtaatgttatcccaaatgtggctattcttattcatgaaatgtgcatcatgggccgattgtctccccacgggaaaaattcgcttatcaataaatggaatataagttcccttctagtaaaataaaaaaaaaaaaaggaaaaaaaagnnnnnnnnnnnnnnnnnnnnnnnnnnnnnnnnnnnnnnnnnnnnnnnnnnnnnnnnnnnnnnnnnnnaacgg

SEQ ID NO: 85926 - DNA, 591 bp, Arabidopsis thaliana columbia
  unsure (1)..(591): unsure at all n locations
atgatctnnnnnnnnnnnnnnnnnnnnnnnnnnnnnnnnnnnnnnnnnnnnnnnnnnnnnnnnnnnnnnnnnnnnnnnnnnccacgcgttcggcggctgcgagaagacgacagaaggggggagccgaagtgttgttttcttatagaaggattttgatttcttctgcaaaattcgatcgatagtgacgagaaagatcctaagatggcgaccgcaagcgagagttcttcatctaagagatggcttccacttgaatctaacccagatgttatgaatcagtatctctggggacttggtcttgcccctgatgaagcagagtgcaatgatgtgtatgggttagacgatgaacttctagagatggttccaaagcctgttcttgctgttctcttcctttacccaatcaccaaaaagagtgaagaagagagaatcgagcaagacaaggaaattaaggaaaaggtgcatagcgataaagtttactttatgaaacaaactgttggtaatgcttgtggaaccattggtcttcttcatgctattgggaatattacctctgaaatcaaactctccgacggatcattcttggatagattcttcaaa

SEQ ID NO: 85927 - DNA, 2633 bp, Arabidopsis thaliana columbia
  unsure (1)..(2633): unsure at all n locations
ctctctttctccaatttcttcattttatcagcttcctctcttctttagtttctgggtcactttagtttcgctctttccgaggaaaaacaaaacaaagatttgatttttctttttggtgggtttaaacagtgatttcttcttttgcccttttattggttcttattgttctcctcaaaagtctacaggattgtcggaagcaaacacacttgtccatgttcgggttatgaatttccctctaattggtgaagaagacacatgaagcagtgaaatctctgtttgtattgaatcttattagtctcaaactatgaatttccgacaagagaagtttgtaaggtttcaagattggaagtcggataagacttcctccgacgtggaatattccggtaaaaacgagattcaaactggaatattccagagaacaataagctcaatctccgacaagttttacagaagctttgaatcaagctctgcaaggatcaaactattcaaaagatcttacaagtcttactcttttaaagaagctgtttcaaaagggattggttctactcacaaaattcttgacccacaaggaccttttcttcagagatggaacaagatctttgttttagcttgtatcatcgctgtctcgcttgaccctttgttcttctacgtgcctatcatcgatgatgctaagaaatgtcttggtattgacaagaaaatggaaataacagcaagcgttttgcgctctttcactgatgttttttatgtccttcacatcattttccagttccgtactggctttatcgctccttcgtctcgtgtttttgggagaggtgttcttgttgaggacaagcgagagatcgctaaacgttacttgtcctcacatttcataattgacattcttgctgttcttccgcttccgcagatggtgattttgataatcattccacatatgagaggttcatcgtctttgaacacgaagaatatgttgaagtttattgttttcttccaatatataccgaggtttataagaatatatccgctctacaaggaagttacaagaacttcaggcatactcactgagacagcttgggctggagctgctttcaatctcttcctctacatgcttgctagtcatgtgtttggtgctttctggtatttgttctcaatcgaacgcgaaacggtgtgctggaaacaagcttgtgagaggaataaccctccgtgcatttcgaagttgttgtactgtgaccctgaaactgcaggaggcaatgctttcctcaatgagtcttgtccgattcagacaccaaacacaacactcttcgactttgggatattccttgacgcacttcaatccggtgtagtggaatctcaagatttccctcaaaagtttttttactgtttctggtggggtctgcagaacctcagttcgctcggtcagaaccttaaaacaagtacatatatttgggaaatctgtttcgcggtgttcatttctattgcggggctggttttgttctccttcttgattggaaatatgcagacgtatctgcaatccactaccacgagattggaggagatgagggtaaagagaagagacgcagaacaatggatgtcacaccgtttgctacctgagaacttgagaaaaagaatccggcgatacgagcagtacaaatggcaagagacaagaggtgttgacgaagagaatcttcttagtaatcttcccaaagatcttagacgcgacatcaaacgtcatctctgtctcgcccttctcatgcgggtccccatgtttgagaaaatggacgaacagcttcttgatgcgctctgtgaccgtttgcaacctgtgttatacacagaggaaagctacatagtaagagaaggagatccggtagacgaaatgctcttcataatgcgcgggaagcttctaacaatcacaacaaacggtggaagaaccggttttttaaattccgagtatcttggagccggtgatttctgtggtgaggagcttttaacctgggctttagacccacactcatcctcaaacctcccaatctcaacaagaactgttcgagctctcatggaagttgaagctttcgcacttaaagctgatgacctcaaattcgtggcttcccagttcagacgtcttcacagcaaacagctaagacatactttcaggtactactcacaacaatggaagacttgggccgcttgcttcatacaagccgcttggagaagatacattaagaagaaactcgaagagtctcttaaagaagaagagaatcggttgcaggatgctttggctaaagaagcttgtggaagttccccaagcctcggtgctacaatatacgcatcacggtttgctgcaaatatcttgcgcacaatacgtaggagcggatcagtaaggaaaccaaggatgccggaacgaatgccacctatgctacttcagaaaccagcagagccagatttcaacagtgatgattaattaattagcatatatgtatatgaaagattttattgcgaaccatagagccaatatataaatataagtctttttataaaaaaaaaaaaaaaaaagggcggccgctctagaggatccaagcttacgtacgcgtgcaggcgacgtcaagactnttnctatagtgtgtccctaaatagaattc

SEQ ID NO: 85928 - DNA, 706 bp, Arabidopsis thaliana columbia
gcctgcggtccggtccggaattcccgggttacccagcgggcgacgcctgccggaagacggagggagggggagagattggagctagttggagatgggaataaggttcatattgatggtgaacaagcaaggccagactcgtcttgctcagtactacgaatggctcactctcgaggaacgtcgcgctctcgaaggcgaaatcgtccgtaaatgcctcgctcgcaacgaccaacagtgttcgtttgtcgagcatcgcaactacaagatagtctacaggcgttacgcatctctcttcttcatggttggggttgatgacgatgaaaacgagctggcgattctagagttcatacatcttttggtcgagacaatggacaagcattttggaaatgtgtgtgagctagacataatgttccatctggagaaagctcatttcatgctggaagaaatggtgatgaatggttgcattgtggagacaagcaaagccaacatactttcacctatacaacttatggacaaagcccattaatgctaaacaccctgtttctatttctgttaatccgtttcatcactttgttacacacttcttcttgtattattattaacgatgcttcaaagagaggataatacaaaagaagcaggaaatcgaaaagtaccaattgggagtacaattcacaagaacccgatgataataaggatagttacattgtct

SEQ ID NO: 85929 - DNA, 401 bp, Arabidopsis thaliana columbia
  unsure (1)..(401): unsure at all n locations
aagaagctcangatcatcttcgtttggtcgttgtcttggggtcctccgaatcaagaacccacaaataacattcgaggaatctgtgaacgacgacccaattgaacctaaagttgaagactttggacggatttagaaagaaagacccaacaagatgctgtagagcgaggcatctctctcgatttactgcgactctggagatgggttcaaatccgaagatccggtgactggaatcgaggagaatttggagagaacggttacgattggtgatgctattgacggcggcgagttcagttttgcgaaacacaaggaagaagatagtggtgaaggtgagagaggtgtttttgaagaggttattaagaagcttgggattggtgtgagagatgaactacgttttgagattg

SEQ ID NO: 85930 - DNA, 2399 bp, Arabidopsis thaliana columbia
ctccctgcaaattttcttctctccctctcccatggtggttcctctatttcaatcatgccctctcaccccaacttcatcttcaggtggattggactgttttccgataagttccgtcgacaaacgactgggatcgatgaaaacagtaacctccaaatcaacggtggagattcgagcagcagcggcagcgatgagacgccggtgctaagctccgtcgagtgttacgcttgcacacaagtaggcgtcccagctttccattcaactagctgcgatcaagctcacgcgccggagtggcgtgcctccgccggctcttctctagttccgatccaggaaggatctgtccctaacccagcccgaaccagattccgacgtctcaaaggtccgtttggtgaagttctcgatcctaggagcaagcgcgtgcagagatggaaccgcgcgttgcttttagctcgtgggatggctttagcggtggatccgctcttcttctacgcgctttccatcggccgaactaccggaccggcgtgtctttacatggatggtgcgttcgccgcggtggtcacggtgctccgcacgtgtctcgatgctgttcatctttggcacgtgtggcttcaattcagactggcctacgtctcgagagagtcgcttgtcgttggttgtgggaagctcgtttgggatccacgcgccatcgcgtctcactacgcacgctctctcactggcttctggtttgatgttatcgtcatcctccctgtccctcaggcagtgttttggttagttgtgccgaaactgataagagaagagaaggttaagctgataatgacgattctgctgctaatattcttgttccagttcctccccaagatttatcactgcatctgtttgatgagaaggatgcagaaggtcactggttacatttttggaactatttggtggggttttgctcttaatctcatcgcatatttcatcgcttctcatgttgctgggggatgttggtatgttctcgcaatacagcgtgttgcttcttgcataagacaacaatgtatgagaaccgggaactgcaatctgagtctggcttgcaaagaagaggtctgttaccaatttgtgtcaccgacaagcacagttggatatccatgcttatctggaaaccttaccagtgtggtcaataagcctatgtgcttagactctaacggaccattccgatatggtatctaccgttgggcacttccagtcatctccagcaactctcttgcggttaagatcctttaccccatcttctggggcctaatgactctcagcacatttgcgaatgatcttgagcccacaagcaactggctcgaggttattttcagtatagttatggttctaagtggcttgttacttttcacgctgttgataggaaacattcaggtgtttttgcatgcggtaatggcgaaaaaaaggaaaatgcagatacggtgtagggatatggaatggtggatgaaacgtaggcagttaccttcccggttaagacagagggttaggcgatttgagcggcagagatggaatgccttgggtggtgaagacgagctagaacttatacatgatttgcctccgggtcttcgaagagatatcaaacgatatctttgctttgatctcattaacaaggtgccattgttcaggggcatggacgacttgatcctcgacaacatttgcgatcgggctaagcctcgagtcttctctaaagacgaaaagatcatccgtgaaggagatcctgtacagagaatgatattcatcatgcgtggacgagtcaaacgtatacagagcctaagcaaaggcgtcctagccactagtacactagaaccaggcggttacttgggcgacgagctactctcatggtgcctacgtcgcccgtttctggaccgtcttcccccttcctcagcaacatttgtctgcctagaaaacatcgaggcattctccctcggatccgaagatcttaggtacattaccgatcatttccgttataaattcgcgaacgagcggcttaagcggaccgcaagatactattcctcaaactggaggacgtgggcagcggtaaatattcagatggcgtggcgccggcgtaggaaaagaacccgtggtgaaaacatcggcggttcgatgagtcctgtgtcggagaatagcattgaaggtaacagtgaacgccggttacttcagtatgcagctatgttcatgtccattcgaccgcatgatcatctcgaataataataaaaagttccaattttatatcggtccaaataattgtgtgttcattgttcctcctcaattgtttacctttacttctttaaaaaatctttcttggaatgatacttcaacctcttacggttaagttcaaagtagattttttgagcaacaaaatcttggaggag

SEQ ID NO: 85931 - DNA, 607 bp, Arabidopsis thaliana columbia
  unsure (1)..(607): unsure at all n locations
aatgtactggttgcttaaaacccaggaggttcgagcagacaaagaacactacgggaaggagttaactggggatatatatgaatccggttggatcagcgaaatgtatggttattcatttggtgctgcagagctgaatttgcggcatagcataaacaaagaaattatgatttatcccgggtatgttcctgaacctggtgctgactatcgagttttccactacggtcttgagttcaaagtcggaaattggagctttgacaaggcgaactggaggaacactgattttatcaacaaatgctgggcaaagtttccagacccgcctagtccttcgggcagtccatcaaacaggcaatggtcttcgggcaaaagaggcccttctcagcttctgaatgtggcacagaagctaaacggggctctaatttctgcatcacaagagaagaaattgncctgnaacctgnatcagaaancgactgggaagatctccggtttcgngaaagttnggaacnttgaacggaccaaccccaggnagcggtnaccnaaagagccagtgggncgccnntncgnaggggntnccccgttnattttggggttcccgggggnacngngangg

SEQ ID NO: 85932 - DNA, 692 bp, Arabidopsis thaliana columbia
  unsure (1)..(692): unsure at all n locations
aacaagaacaacagacacatagagatgagccgctgcggctctcttgggctctatgccccaaatgctttgccatctctctccttgaagccacgcagcgtcaaatctcctttctgtattacattctcacaccaaacccaacgacactcttcttcataatgttaacaagatgagagcaaaggcctgtgatatacttggagcaaagaagacaatcttggcagctcaactcggggcagttcttgccacgattgaccatccagccttagcaataacaggagttaacaaccagcaggaattgngcagtgttgtgctcgatatcgggatcatatccgtttggtacttcctagtaatgccaccaatcatcatgaactggctaagagtaagatggtacagaaggaagttcttcgaggtgtatttacagttcatgttcgtcttcatgttcttccccgggctactgttatgggcaccatttctcaacttcaggaagttcccaagagatcctaatatgaagaatccttgggacaaaccaacagacccagactctataaagaacgtttacctcaaatacccatatgcgacgccagaagattacgatctcgattaacagatagatccacaagtctgtttcatatcttgagactgtatgtatatactctgcattcacatgaacacaatggtatggcttgtgcatacac

SEQ ID NO: 85933 - DNA, 580 bp, Arabidopsis thaliana columbia
  unsure (1)..(580): unsure at all n locations
ttccccctggcccnggttcntngcccngccntttttgggattggccggtacatttcccccgggaccgtttgccntgttccccnagctttanccgccccattagggaacctggtccccctgcaggtaccggtccggaatccccgggtcgaccccaggcgtccgcagccattgaatggctataaccgaatccgcttgccagagtgtgatgaatttggggacaaggttgaaagagctcgagagtatttgcaacccgatcattagccaaagatgtacccaaggcggtgaagctggtggtcccagctgctggaggaatgggcgggggtgttcctccttctgccggaggtgcaggtcccaagattggggaagtcgactaataactttctctcttactctcttactctcagtctttatgtgggtgcatttcaacattttcctggtttgtcccctagttgtttttttctttttctttcttgtatggactctattgtgagggctcgcttgtttcgatgagctccttattttttttaatctataacaggaatgttttggttaaaaaaaaaattttaaaagggagaaggtc

SEQ ID NO: 85934 - DNA, 638 bp, Arabidopsis thaliana columbia
  unsure (1)..(638): unsure at all n locations
caaaaatgcagggagctctgtttatcaaaccaactattcttcttcctcttccttcttcagtttcttctccaaaactcacttttcttcttcctcacgcaaccaaagcttcaagactctcatctctcagatcaaacaactcatcatcatcatcatccttaacgtctgaccctaacaccgtcgacccacgcgtccgcagccattgaatggctagaagcgaatcagctagcagagtgtgatgaatttgaggacaagatgaaagagctcgagagtatttgcaacccgatcatagcaaagatgtaccaaggcggtgaagctggtggtccagctgcaggaggaatggacgaggatgttcctccttctgccggaggtgcaggtcccaggattgaggaagtcgactaataactttcccccctaacccccctaaccccagcctttaagggggttggaattcaacattttcccggtttgccccccaagtttttttttccttttcccccctggaatggccccaattttgaggggccccttgtttcgntgaggcccctaattttttcaaccanaanaggatgntttgggttaaaaaaagggnnaaaaaaaaaaaaaaaaangggggnccccnnaaggggnccaactttgga

SEQ ID NO: 85935 - DNA, 2280 bp, Arabidopsis thaliana columbia
  unsure (1)..(2280): unsure at all n locations
tcggaattnccggggcggaccacaggcgtccggccgcaattcacaattcctctttcacaatctttctttcgattttttagcttaatcctgagtagcgttaacaatggctggtaaaggagaaggtccagcgattggtatcgatctcggtaccacttactcttgcgttggagtttggcaacacgaccgtgttgagatcattgctaatgatcaaggtaacagaaccacaccgtcttacgtcgccttcactgatagcgaacggttgattggtgacgccgcaaagaatcaggtcgccatgaacccgattaacactgttttcgatgcgaagaggttgattggtcgaagatttactgatagctctgttcaaagtgacatcaaattgtggcccttcacgctcaaatctggacctgctgaaaaaccaatgatcgtcgttaactacaagggagaagataaagagttttctgctgaagaaatctcttctatgattctcatcaagatgcgtgagattgctgaagcttaccttggtacaacgatcaagaacgctgttgttactgttccagcttacttcaatgactctcagcgtcaggctactaaggatgctggtgttattgctggtttgaatgttatgcgtatcatcaacgagcctactgcagctgctattgcttacggtcttgacaagaaggctacaagtgttggtgagaagaacgttttgatctttgaccttggtggtggtacattcgatgtctctcttttgaccattgaggaaggtatatttgaagtgaaggcgactgcaggagacactcatcttggtggtgaggatttcgacaacagaatggtgaatcactttgttcaagagttcaagaggaagaacaagaaggacattagtggaaacccgagagctctaaggaggttgagaaccgcctgtgagagagcgaagaggactttgtcatctacggctcagaccaccatcgaaatcgactctctgttcgatggtattgacttctacgctcctatcacccgtgccagattcgaggagcttaacatagatctcttcagaaagtgtatggagcctgttgagaagtgtcttcgtgatgctaagatggacaagaactcaatcgatgatgttgtccttgttggtggctcaacccgtatccccaaggtccagcaattgctcgttgacttcttcaacggcaaggagctttgcaaatctatcaaccccgatgaggctgttgcatatggtgctgctgtccaggcagctattctcagtggtgagggtaatgagaaggttcaagatctcctcttgcttgatgtcacaccactatctcttggtcttgaaaccgctggaggagtcatgactgtcttgatccagaggaatacaaccatccccacaaagaaggagcaagtcttctcaacttattcagacaaccaacccggtgttttgatccaagtctatgaaggcgagagagcaagaaccaaggacaacaacctgttgggtaaattcgagctttctggtatccctccagcaccaagaggtgttcctcaaatcactgtctgttttgacattgatgcaaacggtatcctcaacgtctcggctgaggacaagacaacggggcagaagaacaagatcacaatcaccaacgacaagggaagattgtcaaaggacgagattgagaaaatggttcaagaggcagagaagtacaagtcggaggatgaggagcacaagaagaaggtggacgccaagaatgctcttgagaattacgcatacaacatgaggaacacaatccgtgatgagaagattggcgagaagcttgctggagatgacaagaagaagattgaagactcaattgaagcagccattgaatggctagaagcgaatcagctagcagagtgtgatgaatttgaggacaagatgaaagagctcgagagtatttgcaacccgatcatagcaaagatgtaccaaggcggtgaagctggtggtccagctgcaggaggaatggacgaggatgttcctccttctgccggaggtgcaggtcccaagattgaggaagtcgactaataactttctctcttactctcttactctcagtctttatgtgtttgtatttcaacattttcctgttttgtcccctagttttttttttctttttctttcttgtattgactctattttgagggctcgcttgtttcgatgagctccttattttttttaatctataacaggaatgttttgattaaaaaaaaatacccactaaagcaattaatnnnnnnnnnnnnnnnnnnnnn

SEQ ID NO: 85936 - DNA, 518 bp, Arabidopsis thaliana columbia
  unsure (1)..(518): unsure at all n locations
acgcgcnnnnnnnnnnnnnnnnnnnnnnnnnnnnnnnnnnnnnnnnnnnnnnnnnnnnnnnnnnnnnnnnnnnnnngccacgcgtgcgcccacgcgtgcgcccacgtcgtccgcccacgcgtccgcccacgcgtccgcccacgcgtccggattacaggaagttctctatattcttgaggagagatgccgctttgaaaccagggtttgtggttaagaagctgaggaggggggaaaccaggaaagattgtgaagtaccaaaaggttatgaaagaggttaggcgatattttgactatacacatctaaatggaagtgtgaacgagatctggagacaagttactaagaagataccgctaatcaaactgatgattaatcgggagaagcgcatgatcaagagagatggaagtgaccctcaatggtcttggttatgctcaaaccaaaccgggatcatccatggggtctagtaaggttaaatgcctaccaagctcatgctaagcaacaaagtgtgatcattattaat

SEQ ID NO: 85937 - DNA, 1089 bp, Arabidopsis thaliana columbia
  unsure (1)..(1089): unsure at all n locations
cgactaatttaggcgacctatagaagagctatgacgtcgcatgcacgcgtacgtaagctcggaattcggctcgacaacaaacacaaaaatcaaaaggggtcatttactatcttttaagagacgacatatatagttctcgaccaagaaaagaaaagggggtgacctgagttcttcaacacataacataatggccggagttttcaaaacggttacgtttcttgttttggttttcgctgccgttgttgtcttcgcggaggactacgatgttggtgatgatacggaatggacgagacctatggaccccgagttctatactacttgggctaccggtaaaactttccgtgtaggcgacgagctcgaatttgatttcgctgctgggaggcatgatgtggcagttgtatcagaagctgcatttgaaaactgtgagaaagagaaacccattagccacatgaccgttcctccggtcaaaattatgctaaacaccactggaccacaatactttatctgcaccgtcggtgaccattgtcgttttggtcaaaaactttccatcactgtagttgctgctggtgcaactggaggtgctactcctggtgccggtgctaccccagcacctggatcaaccccaagtactggaggaaccactcctcccactgcgggtgggaccacaacaccttcaggctctagcggaaccactactccagctggaaatgccgcttcctcattaggtggtgctacttttctggtcgcttttgtttctgctgttgttgctctcttttgagtcacactcgaaacctagttatgtatttgttttaccttactctccttatttaaatagtcatgtatttgattatttgtgagaataaggacttgttttcaagtcattataaacgtcttatacttgtgattagtattgagtttcaatatatgattattcggttgcaaaataaaaaaaaaaaaacaagcccaaaaaaaaaaaaaaaaaaaaaaaggnnnnnnnnnnnnnnnnnnnnnnnnnnnnnnnnnnnnnnnnnnnnnnnnnnnnnnnnnnnnnnnnnnnnnnnnnnnnnnnnnnnnnnnnnnnnntagctg

SEQ ID NO: 85938 - DNA, 429 bp, Arabidopsis thaliana columbia
  unsure (1)..(429): unsure at all n locations
accacgcgtccggaaaaatgtcagagaaaggaggcaaggggctcaaatcctctctcaagtccaaagatggagggaaggatgggagctcaacaaagctcaagaagggtagaaaaatccactttgatcaagggactccacctgctaattacaagattctcaatgtttctcctgatcaacaaccatttcagagttctgctgctaaatgtgggaaaagtgacaaacctaccaagtctagcaaaaactctctgcattcgtttgagctcaaagatcttcctgagaatgctgaatgcatgatggactgtgaagcttttcagatattagatggaattaagggccaatttggttggcttgtctggaggtccggcaaattaaaattcccggtatccttttgccaggcattggcttatgttngngngttgtntcncttca

SEQ ID NO: 85939 - DNA, 428 bp, Arabidopsis thaliana columbia
cggaatataaactctcgacgacgaaaatctcaaaaaccccaaaatctcctccaactccgagttatggctacatgttccctcttaccaccaccgtctttttctccgcgccggcgattctgtagtttttctcacaatcgccggtctctaccttcaatattcagtttcaacaaagagcgtgtctcacgaagagtcttctgtagctccaaagagaacgatataaacagagatcggaatcagtctacaggaattcaagtctacggcgaaatcgagaggttattaacagagactgtaaaaaattctcagagtagctccggtggatcctctgattggtcagaagttgagggagcatgggtgctgaaaccaagaaactcgaaaccgaagatggttgttcatttcattggcggtatatttgtcggtgcagcaccaca

SEQ ID NO: 85940 - DNA, 553 bp, Arabidopsis thaliana columbia
cccacgcgtccgctgtctctcacttcttcttcctcacggcggcgacaatggcgacgttcactcatcaaaccccacaaacccatttcctctctcgccttcctctcagagctaaacctagacacttctccgcaagagtcaaaatgtctctccaagaatctgcgccttcactcgccgtcgttggcgttaccggagccgtcggacaagaattcctctccgtcttatccgatcgagacttcccttatagctccatcaagatgcttgcatcgaaacgctccgcagggaagcgtgttgccttcgatggccatgaatacacggtggaggagctcacggcggatagcttcaacggtgtagacatagctttgttcagtgctggtggatccataagcaaagagtttggtcctctggcggcggagaaaggaaccattgttgttgataatagctcggcttttagaatggttgatggagttccgcttgtgattcctgaagtgaatccagaagcaatgaaagggatcaaagttggaatgggcaaaggggctttgattgcaaaccctaa

SEQ ID NO: 85941 - DNA, 1056 bp, Arabidopsis thaliana columbia
  unsure (1)..(1056): unsure at all n locations
ggtacactatagaagagctatgacgtcgcatgcacgcgtacgtaagctcggaagtcggctcgtgccaaattccaccgtctcttatatattcttaataccaaaaactaaaactcaaaaggaaaaaagaaaaagaagaagaggagctaaaaaaacgacgtcgtagaaggagattcttgccatggccacacatagtctctccttcttcttcagagttcttctcctcctctttcttactctctcagagagaattaaagggcaaggtgtgggaatcaactacggccaaatagcaaacaacctcccatctccggcaagagtcgccgtgctccttcgatcactaaacatcacaagagtaaaactctacgacgcagatccaaacgtcctcttctccttctcaaactcacaagtagatttcatgatcggtttaggcaacgagtatcttcaaaacatgtcaacagatccaaccaaagctcaagattggttacaacaaagacttgaaccacatatctcaaaaacacgaataacctcaatagttgtcggcaacgaaatcttcaaaaccaatgatcatgtcctcatccaaagcctattaccggctatgaaatcggtttacgctgctttaaccaaatcttggtttagagaaacaagtaaccgtaacttcagctcattctttagacattctttcaacatcttatcctccttcttcaggatcattcaaagaagagtttattcaatatcttcaaccacttcttgattttaattctcaaatcgaatcacctttcttgataaatgcttatccctttttngcttataaagatagtcctaaagaagttccattagagtatgttttgtttcaaacctaatcaaggtatgggttgntcccaacacttaatccttcattatggccaccatggtngttttggctcaagttngatgggggtttnacntcngncctttaaggcctttnggggcnatcccgttttcgggggtttcggggttttcgggaacccggtttggcnttcttanngggggtgggggttgnggtttgggggnttcncccgt

SEQ ID NO: 85942 - DNA, 683 bp, Arabidopsis thaliana columbia
gtgacctatagaagagctatgacgtcgcatgcacgcgtacgtaagctcggaattcggctcgagcgcagttcaattagggtttcaatctctctgctctgcttgtcatcaccaccaccaccaccaccgtcgtcgtctctctgtatctctccggcgggttctctctctacttcccccggaggattaaaagatggaccagtcttttattttgatattccgttagcttgttcagttattgtagaagctgtaccgtcaagacttttaatatctcaaatggatgatggtgggcatcgtgagaatggtcggcataaagcagcagttcagggccagtggttgatgcagcatcagccgtcgatgaaacaagtgatgtcgataatagcagagcgcgatgcagcgattcaggagagaaatctggcgatatcagagaaaaaagcagcagtagctgaaagggacatggcgtttcttcagagggacaccgccattgctgagcgcaacaatgcgataatggagagagacagtgctcttacagcactccaataccgtgagaactctatggttactgctcctgctgccaatatgtcagcatgtccaccaggatgtcaatatcacgtggtgtaaacacttgcaccatccgacatgcatcatcatcataacaacatacatacctcagttgactgaaatgcata

SEQ ID NO: 85943 - DNA, 606 bp, Arabidopsis thaliana columbia
aggtttttagatctttttggtctcttcagtcggaactgaaaattcatggcgactcgctcgctcttccatagtcttagatgtcgattgacgaataatggtgttctcggaagcaatttcattcgaaacgccgaatcgtcacgattctccaagtcgtacaatgctgacgcagcaatcggaaactcccttgtcgaggaatcggaggagaaagacgatctgaagagcaggattttcagattgagacttccgaaacgtagcgcgactactgttctcgagaaatggattggagaagggaatcaaatgactatcaatgaactccgagagatctccaaagagcttaggagaactcgccgttacaagcacgctcttgaggttacagagtggatggtacagcatgaagaatcaaagatctcagatgctgattacgcctcacgcatagatctgatttcaaaagttttcgggatcgatgcagctgaacgctactttgaaggtctggatatagattcaaagacagctgaaacctatacttctctccttcatgcttatgctgcctccaaacaaaccgaacgagccgaggccttgttcaagagaatcatttgagagtgatag

SEQ ID NO: 85944 - DNA, 603 bp, Arabidopsis thaliana columbia
  unsure (1)..(603): unsure at all n locations
aacaacttgtcatagatcttcatgctaatctcggcaataattacttatggtccgacgaaactactaaagatgaggcctcttggagtgatagtaactttggtgttggtggaacattatatgaccacaatatctccggcgccgatgcagattttccgatatggtcaccggaaagaatcaatgacgagaagatgtttttggattattgtcaagactttggtgttcatgattttgggttttgactgttcaccattgacatattggcaactctatggagatgaacacaagcattgagttgtcatgtttatacatacgtgggcatatacatatatatatatatggtccattataatggaaaccatataccccgcataccaatccataaaccatggtaaggggtaataaatccatggtaaagccagtaaggggtgccccctgggtttccaggatttattaatctagggggttggaaggtttccgccaaggccaggatcccggttgaggtaccttccttggttggaaaantatccccnatcccaaccggggnttttntttgaaaaggtgatgntgtccgaatngggccncttcggtaaccaaccnaaaggc

SEQ ID NO: 85945 - DNA, 703 bp, Arabidopsis thaliana columbia
  unsure (1)..(703): unsure at all n locations
tgatctccnnnnnnnnnnnnnnnnnnnnnnnnnnnnnnnnnnnnnnnnnnnnnnnnnnnnnnnnnnnnnnnnnnnnnntccacgcgtaccaccaatcttctctcttcttcttcttttatgtttcttcttttagtttttgttttttcgatttaatctgatcatcaaaaccctgctctctcaagatcatgcttactaaaagaacccatcccatgatcggaaagatatcggagctcctcgtcggtgtcaaccgatccacggcggctcctttcttcgacgtcttgatgacgagccctaaaagcccactggatttcaagattctccctcagatatctcaaagaaacagctcaaagagattctacgatgacaatcttggtggctctgttggtctagggattgtagccgcgctcgagaactcaaacactcgtcgaatcacgagcgtttgtagatcggaaccgaaccaacccggccggtctgatccggtttcagttcatgagccatggtggaagcacggacggagaaggccgaggagattttcataatggccggggggggtttcaacgtttggtgcaattcccccatgggccaagtggggcttttttggtcaaagggttttgcaaaaatgggtttagtgtttnaagaaggcaacggtgcnatcgnnaanttttgggncnttcgaaggattcncnaattccaagttttnggc

SEQ ID NO: 85946 - DNA, 453 bp, Arabidopsis thaliana columbia
cacgcgtcccaataatcgaaggatataactctggagatttgtgtaagcattcttctttgagattttccgaggtcacaagtcagtacacaaaggaagttccttttttgggttttggggtctgctttgtgtcagtgattttaggattgcttcatttgccacacatttccaatctcttaagtagttggcggcgaagatgggtttcctgatagggggctcttgcttcgtcccttctgttcctctacactctcgattcctttcatctccttcttcttcttcttcttcttctccttcttcgtctcagtttgggcttctgtgttcgagtaatgtcgccaagttcaagcgccgacgaccaacattggcttctttaaaccaggaagatgggtacgagtatgacgttgcttccgccaaaatgagggctttccttcttgtgggtatctctgttcttcccttttt

SEQ ID NO: 85947 - DNA, 494 bp, Arabidopsis thaliana columbia
cccacgcgtccgcccacgcgtccggcttttttgagctgtcagcagcattcttatcaacaaagacgagacgacagtgactgttccgagtagcaccgctaaaacagtaagaggtgtgtgttgggataatgtcggaagtagagggcgaaaaccgggctatcgtgtgtgacaatggaactggaatgatcaaggcaggatatgctggagaagatgcaccaagtgttgtgtttccaagcactgtgggtcgtccaccacatacgggagggatggtaggaatgaatgagaacgatttatttgtgggagacgacgctgaagccaggagcggtatacttacacttgactacccaatggagcacggggttgttagcaattgggatgacatggagaagatttggtaccattacgttttacagggagcttcgtgtggctcctgaagaacaccctgtgcttctcactgaagctcctcttaacccgaaagccgatcgtgagaagatgac

SEQ ID NO: 85948 - DNA, 526 bp, Arabidopsis thaliana columbia
aagattctaaaaccgtaacccacaaatctcgtctttaaagacaccattaaagctcaagaatctctgtgtgagagacttcaagaacttggatccgagccatatccaagaagaaaaatggcgggattcaccatgagcttgaacttgcttctactagtagcaatggtagctacaaacatcctctcactctaccacctctcctccaccacaaatttcttccaatccaccgtcaaatcctcacaatcctctgttcccacagttcccgatcacctcctccgtcagctccacactatccgcgccgctattaaccacctcacaactcaccaaccagacaaatcaacttcaacctcgacctcacgcgccgccgtctcctcctcctcctcctccaccgcgcctaaagagcttttaatctactctaagctctcacctatagcttcagcttgtcataactaccctgaccttcttcatgagtatatgaactacactcctttctctctttgtccttctgacaccgatctcgtcgagaaac

SEQ ID NO: 85949 - DNA, 448 bp, Arabidopsis thaliana columbia
  unsure (1)..(448): unsure at all n locations
aattcacaatcacacacataagttacacacttgacgcataatattcaacacgcacagatgatttcacagagaaaagggactaataaaaaacttcaaatgatatcttcaggtaactttgttcaccagaggaatgctctgttcatcgcagaagaaatctgttggatcaaccctagtcttcactctcaccaatctctcgaaattgttcttgaaatacttcactccccaactctttccttcctcgtactttgtcttcctcctttccaagatacatacccaaatccatatccttgaaattgacataagctccctcttggagatttcgaaacatattgggngtcataaaattccgtaaacggctatccgnccccattttcagatatttatctgtctccggcttgttcttggcttcctcttctntcagtagcacatnntgatctatagggtccgc

SEQ ID NO: 85950 - DNA, 633 bp, Arabidopsis thaliana columbia
gtgatcaacaaaacaccccaaaaagtaaagaaaatggccgcaattacatcagctaccgtcaccatcccttctttcaccggcctaaagctcgccgtcagctcaaaacctaagacattatccaccatcagtagatccacttccgccaccagggcgccacctaagctcgctttgaagtcctctttgaaggatttcggtgtcatcgcagtggcaacagcagcttcgatcgttttagctggaaatgcgatggccatggaggttcttttaggatccgacgacggttcccttgctttcgtaccatctgaattcacggtggctaaaggagagaagatcgtgttcaagaacaacgcagggttcccacataacgtggtgttcgacgaagacgagatccctagtggtgtggacgcaagcaagatctctatggatgagacagcgcttctaaatggtgcaggggagacttacgaggttactttgacagagccaggctcttacggtttctattgtgcgccgcaccagggtgctggtatggttgggaaactcaccgtcaagtaaattgtctagatattctcttgttcgtgtaggagcttacatattcatgatttataaatctaatttggaagagaatgttggattgat

SEQ ID NO: 85951 - DNA, 1121 bp, Arabidopsis thaliana columbia
  unsure (1)..(1121): unsure at all n locations
cgacttttttagggaaagctggtacgcctgcaggtaccggtccggaatttccgggtcgagccacgcgtgcgcccacgcgtccgtaaggtgatagttaaggatcttgtaaagcagaggattgcaaccattggagaaaacatcaaagtgaagagatttgtgaggtacactctcggagaaggccttgagaagaaaagccaggactttgctgctgaggttgctgcccaaactgcagctaaaccgaaagctaaagaagagccaaaagctgaagaggccaaggaagctgttgcaagcccaccaactacagtggtttcagctgctcttgtaaagcaactgcgtgaagagacaggagctggaatgatggattgcaagaaggcattggcggcgacaggaggagatcttgagaaagcacaagaattcctcagaaagaagggtctctcatcagctgataaaaaatcaagccggcttgcatcagaagggagaatcggttcgtacatccacgattctcggattggagttctgatagaagtgaactgtgagactgactttgtcggaagaagcgaaaaattcaaggaattggttgatgatcttgcaatgcaagcagtggctaatccacaggtgcaatatgtttcaatagagggcattccagaggagataaagcagaaagaaaaagagattgagatgcaaagagaggatcttttgtcgaaaccagagaacataagggagaagattgtggaaggaagaatctcaaagaggcttggagaatgggcattgcttgagcagccttacatcaaagacgacagtgttctggtgaaggatctggtgaagcaaacagtggctactcttggggaaaacatcaaagtcagaaggtttgtgaagtttactcttggagaagataactgatgagacagacgaagtaaagttttcaaataagggagctctgttttgtgtcatggagtttaaagtaaaagtcttcctttttgttttgtagacaaaatcttcagtattccccttttgattaggttgcggcccgggaaattcctcaaggccgggggatcccactaattttaaagcgccccccccccggttgagnnnnnnnnnnnnnnnnnnnnnnnnnnnnnnnn

SEQ ID NO: 85952 - DNA, 1450 bp, Arabidopsis thaliana columbia
tctctctttcgctgtccgattccgacagatagacagagggcgcgaaacagagagaaaataagaagaagaaggacgatccagatatggaggatccttctaactcacaaccaaaccagagcaatctctcgcaatgcccgcctttagccacagctccgacacctgcgccagttcgtggtccgtaccaccggagagcacattcggaggtccaattccgtctccctgaagatctggatctctctgaaccattcggaggattcgatgagcttggatccgaagatgatctcttttgctcatacatggacattgagaaacttggatccggatccggatccgcatccgattcggctggtccttctgctcctaggtctgataacccgttttccgctgagaatggaggtgcggaggctgggaattcgagacctcgacacaggcatagcctctccgttgatggctcttcgactttggagtcaattgaggctaagaaagctatggctcctgataagctcgctgagctttgggtcgtcgaccctaaaagagctaaaaggataattgctaatcgacagtctgctgctcgttcgaaagagaggaaggctcggtatatcttggagctcgagaggaaagttcagaccttgcaaactgaagctactaccctttcagcacagttgtctttgttccagagagacacaactggtttgtcatctgagaatacagagctcaagcttcgtttacaggtcatggaacaacaagctaagttgcgagatgcactgaacgagcaactgaaaaaggaagttgagaggctgaaattcgccacgggagaagtctcacccgcggatgcttataacctcggaatggcacacatgcaatatcagcaacaaccacaacaatccttctttcaacatcatcatcagcaacaaaccgatgctcaaaacctgcaacaaatgactcatcagtttcatctcttccagcctaacaacaaccagaaccaatcttctcgcacaaaccctcccaccgctcatcagcttatgcatcacgctacttctaatgccccggctcaatctcattcctattcagaggcaatgcatgaagaccatcttggccggttacaggggcttgacattagcagctgtggcagaggctcaaactttggtaggtctgacaccgtcagtgaaagcagcagcactatgtgaggctgcctttcccagattcccctttgtcgataaacctattctttcgccctcccttgaaatctttagctaaaaagtaacatcttcgtgacagtcggattcattttttattctgtaaaactggttttttggggggggttggggtttcaactttagagaccacagttgttttaacttgtctgatttctcatttcctgattcatcttgttctcctggggagctactgaattataaacagatcatatttctgtttctttatgttgtca

SEQ ID NO: 85953 - DNA, 554 bp, Arabidopsis thaliana columbia
cgggtatcttaaatgtcgtgatggacggtggagacagcgtcggaggaggaggaggagatgatcaccaccgtcacctccaccatcaccaccgccctactttcccttttcaactactcggaaaacacgaccccgacgacaaccatcaacaacaaccttccccttcctcctcctcctctctattttctctccatcaacaccaacaattatctcaatcgcaacctcaatcgcaatcgcaaaagtcacaaccgcagacaacgcaaaaagagttattacaaacgcaagaggaatctgcggtggtggcagctaaaaagccaccgttgaaacgagcgtcgacgaaagaccgacacacgaaagtagacggaagagggaggagaataaggatgccggcgttatgtgcagctagggtttttcagctaacgcgagagctaggtcataaatccgacggtgagacaatagagtggcttcttcaacaagctgaaccatctgtaatcgccgccaccggaaccggaacaatcccggcgaatttcacttctttaaacatctctctccgttct

SEQ ID NO: 85954 - DNA, 415 bp, Arabidopsis thaliana columbia
gcccctcaaggtatcttccagaagcaacgtgaagacctgcaagagaaaattttcagattcagctatggcggacgaagcaaaagctaaaggaaacgcagctttctcctccggtgacttcaattccgccgttaatcacttcaccgacgcaatcaacctaacaccaaccaatcacgttctcttctcaaaccgttccgctgctcacgcatcgcttaatcactacgacgaagctctctcagacgcgaagaagactgttgaacttaaaccagattggggaaaaggttatagccgtctcggtgctgctcacttaggtctaaatcagttcgatgaagccgtggaggcgtattcgaaagggcttgagattgatccaagtaacgaaggtttgaaatcaggtttagctgatgcgaaagcttctgcg

SEQ ID NO: 85955 - DNA, 586 bp, Arabidopsis thaliana columbia
  unsure (1)..(586): unsure at all n locations
ttttgtaaaatttataagacttacttttttgtttcagaggttttgaaatttacgaatttgcaaatgattaaacggaaaagagttccacaaagctttttgtggatgtgaaagcgccaaagttcttttgtacaaactcaaaggagaaagccaacaatattcaaaaaaaagaaacgaagaaaacaaaaacctctctcgctgcaaagttttatattcacagaaggaaaatatgattgagagaaagttagcaaagcgaatactcacaatccagcaaacgagagagtatctcattgcaactcggtctttgttccggttctgtccaacaatctgcaataagctttcccagtggtccttcagggatctcaagccgagctccctcgtaagcaatagcataaacaacccgttcaggcggtctccttcccaagggcttggttaaagtggataggtcccccatttttacccctaaactggaggtttcccccttttctgagaaggggccattgcggttaggtccgggggcctccctgttggggtccgcaggggctttgtttcatggtgnccnggntttttttgnagccnantanagttc

SEQ ID NO: 85956 - DNA, 698 bp, Arabidopsis thaliana columbia
  unsure (1)..(698): unsure at all n locations
cctgcaggtaccggnccggaattcccgggttgacccacgcgtgcgaaaccttcttcaagatcttcttggtgttgatttatcgcagccttcagcacaacctggtgccatgcagccatcgcaagctggtgcggatattcttatggatctgttgtcaatcggaactcctgcccctgtgcaaaatggctcggcgaatggagacttattatctattcaagataacaatgctccaatagcgccttctttgacttctcccactgcgccttcttcgatgatggatttattggatggatttggtcccaccccaccaaagagcgaggacaagagtgcagcatatccgtccattgttgcatttgaaagcagctccttgaagattgagttcaacttcacaaagcaatcagaaaatcctcaaacgacagacattgtggccaatttcataaatcttactcctaacgtgtacacagaatttcttttccagggtgcaagtttccaaaggtttctncnaactttaacctgggtccccggtnagcagnaaatttntttttccagnttaacggggaacatcaanncaaactttgggggtnccaaattggccaaaaggggnaggaaccccttttttttnggggttgggggtggtnnaaaggtttatggnaaggtnttttgggggngggcnaanctaaanttccccgggggnttttttc

SEQ ID NO: 85957 - DNA, 732 bp, Arabidopsis thaliana columbia
  unsure (1)..(732): unsure at all n locations
cnnnnnnnnnnnnnnnnnnnnnnnnnnnnnnnnnnnnnnnnnnnnnnnnnnnnnnnnnnnnnnnnnnnnnnnccacgcgtccgctcttctttctgactcataacccaaatttctgagaatcagagccttattcaagagaacaccaagagtttggtggaagttgttgaaattcgaagccgatcgcggactcgtttgctcttgattacgtcgcaatccgtacgattttccgatcaaacttaagagtgaaggagatagatttgtagaaaaaggaagagaataagagtgagcttgtggccaaaaaagggatgcctttgaacttaggcaacgatggcgatgggtcttcccggattattttgactgagcctcgcggatctactgctgaggtgcttctatttggaggacaagtcatttcttggaaaaatgaaaggagggaagaactgctttatatgagcagcaaggctcaatataagccacccaaggcgatcagaggaggaatacctgtttgctttccacagtttggaaactttgggtggactttgagcgaccattgggatttgccccggaacaaatttctgggtcaacattgttgaaagatcccttcggcctttanctcctncttaacaaaccaatcatcctgttgatcctggtatttgaaggccncagaagnttgccttttnagngccttgggccgnatnagtttttaaancncccggaattnggaattttntattt

SEQ ID NO: 85958 - DNA, 815 bp, Arabidopsis thaliana columbia
aaggttagagctgcaaaatgacactgacagagcaatagtaacagatgaaaaacctttgggcacagaaaatgaaaaatgttacgagtttgaagatgtggaacagttgatgtcagaaataggaaacatccgggacaacttgcgattgatgcctgatttccagaggagggaaatagctgcaaatttagcgatgaaaatggcttccatgtttggaggtgacactgatgacgaggaagaacctgagtgagtctgtttatatcagatattgtaaaagatcagcgtgagctacggtttaatcctttctttatacaatctttatcaaagtccgtgtcttgttttttgatagattctggcagtaatagtcagttgcacgatgtaatacttatctgggccgacctgttatgtatcgctttactttttctttagatacgtaagagctctaaaatacagccttatacagaaaacctagttggtaacacttggcgaagcaattgttggcatacatgtaatagaaaataaagaccggatgatggatttgttctgcattcattttgaatattagtcaatatcattagcaggaacgttcttcacaaaggagaattggtttccaggactaatatctccagtatattctatctctgtgttctgatcaccaaccctgacgagagtgtgcccctctattggttcaggggataatggctcagcttcaagatcagacatgctttggtcctcgaaattactcatataagaggctgtcgagtgaccagtggtcttggagcggagtagagtggctccagaggcgtgaaaggatgaggtag

SEQ ID NO: 85959 - DNA, 818 bp, Arabidopsis thaliana columbia
  unsure (1)..(818): unsure at all n locations
gcaagtaccgctccggaatttccgggtcgacccacgcgtccgtctgaatatgaattggagtatgaagtgctatcagcaggctcaggtgatccatgggataatattgaagaaagatgggtttctgcaagtgaaacgcattcacatgccgatgctggcggatccacttcacaggaaaacctccatgtagaaaatagtatggtgaaaccgaataaagttgatgaagagctgctgccgtcagggtcaaggttagagctgcaaaatgacactgacagagcaatagtaacagatgaaaaacctttgggcatagaaaatgaaaaatgttacgagtttgaagatgtggaacagttgatgtcagaaataggaaacatccgggacaacttgcgattgatgcctgatttccagaggagggaaatagctgcaaatttagcgatgaaaatggcttccatgtttggaggtgacactgatgacgaggaagaacctgagtgagtctgtttatatcagatattgtaaaagatcagcgtgagctacggtttaatcctttctttatacaatctttatcaaaaaaaaaaaannatnannaaaanaaaaaaaaagggggaggaaaagnaagggtttgggcaagaaggaatgttttataagaaaaaagggtgtgttcttgaatagcgtctttttccagagtatgaatttcctttatatcctctcgaccgggcaaaaatttaagggggggggccgcgcccctttttttaaagaagaattatcaaaatgttttttttttcccgccgtggttgttcgtaaacagcgntttaacgtcttttttt

SEQ ID NO: 85960 - DNA, 1131 bp, Arabidopsis thaliana columbia
ttacccaaaagaacccataatgtttagagtgaccggaactctctcggcggcatcatctccagcggtggcggcggcgtctttctccgccgctctaagactttccataactcccactctcgctatcgcctctcctccccatctccgttggttctcgaagttttctcgtcaatttctcggcggacgcatctcttcactccgaccacgcattccttctccgtgcccgattcgactctctggtttcccggctctcaaaatgagagcttcgtttagcagtgggagtagtggaagtagtgcaagtagagagattctggtgcagcatttgcttgttaagaataatgatgttgagctctttgccgaactccaaaagaaattcttggatggagaggagatgagtgatcttgcggctgagtattcgatttgtccttccaaaaaggacggtggtatacttggatgggtaaaactgggtcaaatggtaccagagtttgaggaagctgcgtttaaagcagagctgaatcaggtggtgaggtgtagaacccaatttggcttgcacttattgcaagttctatctgagagagaaccggtgaaagatatccaggtagaggagctgcattccaaaatgcaagatccagttttcatggatgaggctcagttaattgatgtcagagaacccaatgagatagagatagcatccttgccaggattcaaagtgttcccactccgccaatttggaacatgggcaccagacatcacttcaaagctgaaccctgagaaggatacatttgtcttgtgcaaggttggtggcaggtcaatgcaggttgccaactggttacagtctcagggcttcaagagtgtgtacaacattactggtgggatacaagcttattctctcaaggttgacccatcaattcctacttactgaaattgagcatcttagtctctttttcttgtatcctcctaattccaaattagatttgcaaattcgtattcaataaactatataatataaggttcatttttgagaatatagataccaaatttagaataaaaaaaaaaaaaaagggcgaccgctctagaggatccaagcttacgtacgcgtgcaggcgacgtcataatcttctatagtggtaccta

SEQ ID NO: 85961 - DNA, 428 bp, Arabidopsis thaliana columbia
gacgacacacaaaggcaacagtggagctactcacaagcttgaccaactggttaactccgacgactctcttcctcctcctcaatttcacgatcgccaccattttcatcaccaaccggttcagttcctgttcaagaaaacacaacccgacgagactaaccgggtcgacccgatcgacaagatcccggaggatgacgtcacgaccgaacctagattcggagctccatcactcttgcagcgggtgaaatccataaagcttccttctttatacagatccgacccagatccaacaccagaagtgcaaacacatacgaggacgacatcggagtcgagtaaaccggcgacgaagaagaagaagaaagctacaaagaagatgatgaaatctgctagcgagagacacatcggccgtgaagaggaggagacagtttagg

SEQ ID NO: 85962 - DNA, 528 bp, Arabidopsis thaliana columbia
taatacgactcacttagggaaagccggtacgcctgcaggtaccggtccggaattcccggttcgacccacgcgtccgtacggctgcgagaagacgacagaaggggacgacacacaaaaacaacaatggagctactcacaagcttgaccaactggttaactccgacgactctcttcctcctcctcaatttcacgatcgccaccattttcatcaccaaccggttcagttcctgttcaagaaaacacaaccaacatcaagatggttacgggtcgtcgggtcatgaccaaaatcaggcacggtttggcagacctccttcgctcatagacagagtaaagtccatcaacttccatctgtacaattctccttcaccagaatccgagatccactactccgggtcggatcctaacccgaacccacctccttctctcttgcaacgggtcaaatccatcaacatgccttacttcaagttcccacaacacaattctgaaagagagtacgctgctggtttacggggttatgacccaacccga

SEQ ID NO: 85963 - DNA, 286 bp, Arabidopsis thaliana columbia
gagaaaagataaagaaaatgggtttgagaagaacatggttggttttgtacattctcttcatctttcatcttcagcacaatcttccttccgtgagctcacgaccttcctcagtcgatacaaaccacgagactctcccttttagtgtttcaaagccagacgttgttgtgtttgaaggaaaggctcgggaattagctgtcgttatcaaaaaaggaggaggtggaggaggtggaggacgcggaggcggtggagcacgaagcggcggtaggagcaggggaggaggaggtgg

SEQ ID NO: 85964 - DNA, 2144 bp, Arabidopsis thaliana columbia
cccacgcgtccgcggacgcgtgggttcttcgacatgacctttggtccttcttctcttttctctctctcttaaacccaatttgagattgttcgatttcgatctacgagattcttacaagaacataagcagcttcggttttttgggattatcttatttggtcggatgatgatcttctcgatgtctgtgctaggctttgggaattagatatatttggggttaagctcgagtctctccggttttgagtttacttgagtttgttagtatttatggctgaggtgggaaaagttctggctagtgatatggagttagaccattcaaatgagactaaagcagtggatgatgttgttgccactactgataaagcggaggtcataccagtggctgtaactagaactgaaaccgttgttgaaagtttggaatctactgactgtaaggagcttgaaaaacttgttccacatacggtagcttcgcagtcggaagtagatgttgcttccccggtatccgagaaagcaccgaaggtttctgaaagtagcggtgcattatctttgcagtctggttcggaagggaatagtccttttattcgtgagaaggttatggaagacggatacaactggcggaaatatggacagaaacttgtgaaaggaaatgagtttgtaaggagctattacaggtgcactcaccctaactgcaaagcgaaaaaacagttggaacggtctgcgggtggacaagtcgtggataccgtttactttggggaacatgatcacccaaagcctcttgctggtgctgttcctatcaatcaggataagcgaagtgatgtcttcacagctgttagtaaagagaaaacatctggatccagtgttcagacacttcgtcaaaccgaaccaccaaagatccatggaggattacatgtttcagttattccaccagctgatgatgtgaaaactgatatttcacaatcaagtaggataacgggggacaacactcacaaggattataatagtcctaccgcaaagcgaaggaagaaaggagggaacattgagctgagtccagtggagaggtcaaccaatgattcacgcattgtggttcacactcagactctgtttgatattgtgaatgatgggtaccgatggcgtaaatatggtcagaaatcagtaaaaggcagcccatatccaaggagctactatagatgttcaagccctggatgccccgtcaagaaacacgtagagaggtcatctcatgacacaaagttgcttataacaacttacgagggaaaacacgaccacgatatgcctccaggaagagttgttactcataataacatgctggactcggaagttgatgataaagaaggagatgccaacaagactccacagagctcaactcttcaatccattacaaaagaccagcatgtcgaagatcacttaagaaagaaaacgaagactaatggctttgagaaaagtcttgatcaaggtccagttttggatgagaagctgaaggaggaaataaaagagagatcagatgcaaacaaagatcacgcagccaatcacgccaagccggaagcaaagtcagatgataaaaccactgtttgtcaagagaaggcagtaggaaccctggagagcgaggaacaaaaacccaagacagagcctgcccaaagctaagcattcagtgttgtaccgagtggtaatttatatggctgttttaacatagattagtacaggcgatatggttatagactgtacagttgttgttcaggcgggaccagatttagattagtgtttaatggaatagtatgctttaatacctttatgtaaccacttccatttggttcaaataagagttacaggaagagaaggtaacacaacaagagcccttctttgttgatggagcctgtgtaatagttgtagcatggggatgtatatgatttgattcaaccttattaatggttatgagacaaaactatctattacttccagttctgtcttttgcattacattcttggagacgtttattctttcacttccatgcacaagatgagaccaagattcggtccatccaaccaaggtacagagcaccatctctttcttcaatcgcatacccgttgctgtaatctctcaagagggctctaatggtggctgaaatgattg

SEQ ID NO: 85965 - DNA, 521 bp, Arabidopsis thaliana columbia
tttacttgtaatgccaaatgacgatttatgataatgttatcatattccacaatgcaaaaattcaaggaatcagaaccagatagctttaggtgaaatatgaatcatcccaatgattttatatttattcaacaaagaaagagagacgttggaatgcaaaacaacatggaaatttccaattcttgcttttggtctgaagagaattcaaaaagaagaaagctcattcctctactggcctttgacccaacacagagatgtcttcatatcgtttcccaacattgttgcgttcccagagcttatgaacaccgtaatccacagcccgttcaccgaaaaatgcgccggcgatgatgaaagtgacgtagacggaattacggcgcatgataagtttgtaaaagccttcgaaagcgcctttctgatttctccgagcagcgtactccatgattgattggttgttttcaggtatctgatctctctacgtattttagggttagagaaagcgatctacgacaatggcgagagcgaag

SEQ ID NO: 85966 - DNA, 430 bp, Arabidopsis thaliana columbia
tattgacttgtcaagattctcttcttcttcttattcttcctgctactccaaactcaggtccctccgtccatggcagcaaccttacctctatctccgatcaatcatcagttgtgtcggttcgggaacaactctttgacgactcaccggttctgttctcctggcttcttgatttcttctccttgtttcattggtttgaccggaatgggctctgctactcagttacgtgctcgtcgttctctgatctcttcagcagttgcgacgaattcgctgttgcatgacgtcggagccaccgtggcagtgcttggtggagcatacgcgcttgtcttaagcttcgagagtctcaccaagcgaaacgtcattcaacagagtttgagcagaaagcttgtgcatatactctcaggtctgcttttcgtacttgcgtggccaatct

SEQ ID NO: 85967 - DNA, 375 bp, Arabidopsis thaliana columbia
gcgtccgcccacacgtccgcccacgcgtccgcccacgcgtccgcacgggagtcctgttcaggcgccgcagcagcattcagattattgtctgagttcggtcagcgatggaatctctggtcatttcgaggattctggctttcggatgtgatgaagaaagggggagacttattgggatggctttagtttaatagggttttactcattttatgtgaatagggaaagaaataggattgggtattttcttatacagatgatgatgatgatgatcaaagaataaaaataatgtatagggaagctttttgtaaacacaaatatgtttggtaaccattttggtattttgaatcaatgcatatggtttgttttctcgattaaaaa

SEQ ID NO: 85968 - DNA, 565 bp, Arabidopsis thaliana columbia
  unsure (1)..(565): unsure at all n locations
atatgataccgttttacattggtaagctctttagacaaagtggagcatcagatgatgtttgttcaaagctcggtatagttaaagagaaagcgttaagcattactcaggcagtccaaaagtatggcaacctctcaggttttgtggaaagattttctgtgggaatgaggaatcctacagcgttcttcgccggggctcttggaatatctccagagtgtttctttgcaggagtttgttgcggtggtttgattactcttccacttcagcttgtgattgggtttctccttagagaacgccccatgtttgctcttgcagcagtagcaactgcagtgggaatatggacaatctttccctatgtggtggctgcatctacggctttgttcctctacattcgcagtcggtactccacgaaagataagtcctcctggtactacccaatatcaatacatagaaagatgaaggccatatgaaaagacaattatagacccagcancaattaatggttatgtgactgngatatgacaagntttgnacaactgccattggtttaaacaaaaaaagggggggt

SEQ ID NO: 85969 - DNA, 1078 bp, Arabidopsis thaliana columbia
  unsure (1)..(1078): unsure at all n locations
cgcgtctcgccacgcgtccgcgacaaatccctaattccaaaatcctctcggatctaaaagagtgtgtgataacataagatgtcgtcttctcgggaagagaatgtgtacttagccaagttagctgagcaagctgaacgttatgaggaaatggttgagttcatggagaaagttgcaaagactgttgacaccgatgagcttactgtcgaagagagaaacctcttgtctgttgcttacaagaacgtcattggtgctaggagagcttcctggaggatcatatcttccattgaacagaaggaagaaagcagaggaaacgatgatcatgtttccattatcaaggactacagaggaaagatcgaaactgaactcagcaaaatctgtgatggaatactcaatcttctggattctcaccttgttcccactgcatctttggccgagtccaaagtcttttacctcaaaatgaaaggagattaccacaggtaccttgctgagtttaagactggagctgagaggaaagaagctgctgagagcactctggttgcttacaagtcagctcaggatattgcacttgctgatttagctcctactcatccgattagactgggacttgctcttaacttctctgtcttctactacgagattctcaactcacctgatcgtgcctgcagtctcgcaaaacaggcttttgatgaggccatttctgagctggatacattaggagaagaatcatacaaagacagtacgttgataatgcaacttctccgtgacaatctgaccctttggaactctgacatcaatgatgaggcgggcggtgatgagatcaaggaggcgtcaaaacatgagccggaagaggggaaaccagctgagacagggcagtgaccagagagagagggagagacatttctaagtatgtatggtatggattttccaaaaacatatgatatgattaggggatttgtagaagcagagagaaagatctttatttgattttctccaaaaatctctgttcccttttttttttattgggttattaaagctgtttgagtccnnnnnnnnnnnnnnnnnnnnnnnnnnnnnnnnn

SEQ ID NO: 85970 - DNA, 1252 bp, Arabidopsis thaliana columbia
  unsure (1)..(1252): unsure at all n locations
agctctcctacgactcactattgggaaagctggcacgcctgcaggtaccggtccggaattcccgggtccgacccacgcgtccgacttcccctaatttcgcttcgaattcaaaagccctaattcgaaaattcccatttctcaaggtttttaaaagagtattgcaaagatgtcttctgattcgtcccgggaagagaatgtgtacttggccaagttagccgagcaagctgagcgttacgaggaaatggttgagttcatggagaaagttgcaaagaccgtggagaccgaggaacttactgttgaagagaggaatctcttgtctgttgcttacaagaacgtgattggtgctaggagagcttcttggaggattatctcttccattgagcagaaggaagatagcaggggcaacagtgatcatgtttcgattatcaaggattacagaggcaagattgaaactgagctcagcaagatttgtgatggcattttgaaccttcttgaggctcatctcattcctgctgcttctttggctgagtccaaagttttttacctgaagatgaagggagattatcatcggtaccttgctgaattcaagactggtgctgagaggaaagaagctgctgagagcactcttgttgcctacaagtctgctcaggatattgctcttgctgatctggctcccactcacccaatcagactggggcttgctcttaacttctctgttttctactatgagattctcaactcatctgatcgtgcgtgtagtctcgcaaagcaggcttttgatgaggcaatctcggagctagacacattgggagaggaatcatacaaggacagtacattgatcatgcagcttctccgtgacaatctcaccctctggacttctgacctcaatgacgaagctggtgatgatatcaaggaagccccgaaagaggtgcagaaagttgatgaacaagcccaaccaccaccttcgcagtgataaaatcagatccatggaatgatttgcagacaaaaaaatatatggcttggttctgtgtttttaaacagaaaaaaaccttgtagtttccttaaacatgggctgtagtttccttaaacatggatttgtagtagtaattgtagctgcatgatttggttatcgatggttaaaactaaaaaagtgcttctcacaaaaaaaaaaaaaaaggannnnnnnnnnnnnnnnnnnnnnnnnnnnnnnnnnnnnnnnnnnnnnnnnnnnnnnnnnnnnnnnnnnnnnnnn

SEQ ID NO: 85971 - DNA, 940 bp, Arabidopsis thaliana columbia
  unsure (1)..(940): unsure at all n locations
gcactatttgctacgacaaatgggtaaagaaatcctccatacagaatcaaagaagactgacaaattagtcgacaatattcagagttccatgatcgcaacaaaggaaatcgagatcactcgttcaaagagtcgccgaaagaacaacaaggaaaagagagtggtttgcgtagtggatcgaggcagccggtccagtgacctatgggtttggcgaaagtatggtcaaaaacccatcaaaagttctccttatccaaggagttactatagatgtgccagctcgaaaggttgttttgctaggaaacaagtcgaacgtagccgcactgatccaaatgtttcagtaattacttacatctctgagcataaccatccattccccactctacgcaatactcttgccggctccactcgttcctcttcctccaaatgctcagatgtaactacttctgcctcatcgacagtctcccaagacaaagaaggaccggataaatcccatttgccttcctcccctgcttctcctcccttaatgcggccatggtggttaaggaggaggacatggagcaatggggcaatatggagttcgatgttgacgttgaagaagatacctttcatacccgaattatttccagaggataccttcgctgatatggacaagcttgaggaaaattctcagactatgtttctctctcgcagaagcagcggaggcaacatggaagcccaagggaagaactctagtgatgatagggaggtcaatttacctagtaaaattctgaatagatagttactattatgcaatgttaataataatctgtttgattttttaacatttgttcggacatccaaaccggccgnncncaatttattnctttancgataatatatcnnnnnnnnnnnnnnnnnnnnnnnnnnnnnnnnnnnnnnnnnnnnnnnnnnnnnnnnnnnnnnn

SEQ ID NO: 85972 - DNA, 857 bp, Arabidopsis thaliana columbia
cttttctgtccagagagagaagcttttatctttcatcgccgttaacagggctattccgttgccgtgttcttgccgtcaacatgattttttcattgccgtagacatggctttccgttgccgtgtttttatgtcgtcgcttttgttaggtgttgtttgtttgcttccaataaaggggaattgtctttcgtctctgtctttacagagttttatgagagatgacacacctatcttatatgtttatagtttatacaagtgtttttatgtttgttggatttgaagcgaagcttaaccatcttatggtgacttagatctatttagaacctttagttggtggcttttctccggatcgtcatgttgggtatacggattactgaaatttcaaggatagtttgcaaataaaattgaagaaaagaaagaaatttccttcgcgattttaagatgccttttagccgtgatttcaattgttcggagttttgattcgttttgcaaccagctttgtcggtgaaaatcagaagaatcaatagtcgaatttcagttatcggcaatgattttcttcaccagaatcagcatcttagatggcggtggtgatgtcggaaagcttttagaattttcatccaacacgtgtaccactgttgacacgtttgtttgggaatgaaactaatgataaactttcttcaagttgaagcaatatattgtgtgggcctttatgggctgtaatctgttttgtaacccatgttgttatgaataaaatcctaatcttgcgaaaaaaaaaaaaaaaaaagggcggccgcttctagaggatccaagcttacgtacgcgtgcatgcgacgtcatagctcatcgataggtcacgaaat

SEQ ID NO: 85973 - DNA, 416 bp, Arabidopsis thaliana columbia
cgcacgcctacgtaagctcggaattctgctcgaggagaggttaagcggaagtgacgaaagcgaagaaggtttcggaagtaaatatgtcttccttggggagcagcaaatccctgagggatgagatggaggtaacaaccgccgatgtttttccggaggttaacgccgccgctgtgacggaaaatcttgatcggaacgagcttgtgcttgctgacggagtcgtgtcggctgaggaaaggaatattgagccagacaatcgtggagagaggaagatagagagcgagtcgcctccagaggatgatgtttgcccgatctgtttcggctcctttacggggccgtgtcgggggaattgtggtcattggtattgcggaaatggcatcttgcaggactggaactatgctgcaatatctaggccttgc

SEQ ID NO: 85974 - DNA, 766 bp, Arabidopsis thaliana columbia
  unsure (1)..(766): unsure at all n locations
nnnnnnnnnnnnnnnnnnnnnnnnnnnnnnnnnnnnnnnnnnnnnnnnnnnnnnnctatccaattggagacgaatcatatcgagcgatggatttggcagaactgtgggcgattttcggacccggattctccggcgccgttttcggaaccgggtggtggttttgggtcgacgccgtcgtttgcagttccatccaagttcccttcgtccattaccttcccggcatattcgcttctctcggagctttgatgttcaattgcgtcagaaaagaagacattgattactctccttacgacgaaggcgagtggagattgaagctgtggcttttcatagcgtatgtcgtagcatttgtttccttagctgcttctgttggcttgctgattcaagattcggttgtgaagactgggccttcaacttggactggtgtggctggtgtctttcaatgtgtatttgtattgataagtgggctaatgtattggacatcgcactcagagtagcgcacaggcacatacttcatctccgactcagattcatactgtgacaacttacaagttcctctcgtttctctactatgtaaattcctgtgtcttgtcttgtcaccttggcattgtgtgcgagattcctctgttgcatcagtgtgtgtttctgttaaaactttgtgtgaatgttattgaaaatactccaaatcaaccagttgtccaaagaaaaaaaaaaaaaaaaggggcggccctcttgaggatccaagcttacgtacgcctgcatgccnnnn

SEQ ID NO: 85975 - DNA, 962 bp, Arabidopsis thaliana columbia
  unsure (1)..(962): unsure at all n locations
nnnnnnnnnnnnnnnannnnnnnnnnnnnnnnnnnnnnnnnnnnnnnnnnnnnnnnnnnnnnnnnnnnnnnnnnnnnnnnnnnccacgcgtccgaagatacccaaacaaaaaaaaacttcaacgccgtttcttcttccattaatctcatctctcaatcaaccaaaagcttcccatctcaaatccctcagtttgattttctaggcaaacaatcatctgccaccatgtttatgaatcggctattcgggaaacccaaacaggagactagtactctccaaacgttagacaagctcaatgagactcttgagatgttagagaagaaggagaatgttcttctcaagaaagctactggagaggttgagaaagctaaggaattctcccgggcgaagaacaaacgcgcggctatacaatgtttgaaaaggaaaaggttatatgagcaacaagttgaacagctcgggaatttccagctccgtattcatgatcaaatgattatgttagaaggtgctaaagcaacgaccgagactgttgatgctttgaggagtggagcttctgcaatgaaggcaatgcagaaagcaacaaatattgatgatgtggataagaccatggacgagatcaatgagcaacccgagaacatgaaacagatccaagaagcattggcgactccaatgggggcagcggctgacttcgacgaggatgagcttgcagcagagcttgatgaactagaaagtgaagagcttgantcgcaacttctacagccggcaacaacagctcctccattgccttcagttccagtgcctgcagggcgtcaaccggctcgtcctgttccccagaagcggnctnctgaggaagaagnactcgctgcattanaggcttgagatggccctctaagggttattnacctttccgngcagngncatgttttcatttgntaggcancgnccagncggtgttttntaaggttctt

SEQ ID NO: 85976 - DNA, 574 bp, Arabidopsis thaliana columbia
  unsure (1)..(574): unsure at all n locations
ccctngntcggtcggatccggtaccccggncggggntntccatgaggcatcggaancaccaatntgggntgggatagccctggcngggtcatgggcaaccggggacntgaaccngaccnaggagccttggcgactccaatggggccaccgcccacgcgtccgggatgagcttgcagcagagcttgatgaactagaaagtgaagagcttgaatcgcaacttctacagccggcaacaacagctcctccattgccttcagttccagtgcctgcagggcgtcaaccggctcgtcctgttccccagaagcggactgctgaggaacaagaactcgctgcattacaggctgagatggccctctaaggttattcacctctccgagcagagacatgtatgcattgatagacacgaacagacgatgtatataaggatctgaatcagattaattcggagcgaaaaacttttataatccccgtcgttaatgttatctgcaatttgagtgttcttcacataatttatcttttgtaatttttgtatctttttatgacactttttcctttggttaataatcactttact

SEQ ID NO: 85977 - DNA, 604 bp, Arabidopsis thaliana columbia
  unsure (1)..(604): unsure at all n locations
caaacaaaaaaaaacttcaacgccgtttcttcttccattaatccaacgccgtttcttcttccattaatctcatctctcaatcaaccaaaagcttcccatctcaaatccctcagtttgattttctaggcaaacaatcatctgccaccatgtttatgaatcggctattcgggaaacccaaacaggagactagtactctccaaacgttagacaagctcaatgagactcttgagatgttagagaagaaggagaatgttcttctcaagaaagctactggagaggttgagaaagctaaggaattctcccgggcgaagaacaaacgcgcggctatacaatgtttgaaaagggaaaggttatatgggcaacaaggttgaacagctcggggattttccagctccgtattcatggtcaaatggattatttttaggaggtgcctaaggaacaccagagcctntagnttgcttttagggctggngcttnttcaattgaagctttcaggnagnaacaaaccttgttgtttttgccaggcaattggtnggncnntgccanctngggcntgnccggtcccgngnattgtngcccnttgggnnnntnttttgggtgttgt

SEQ ID NO: 85978 - DNA, 686 bp, Arabidopsis thaliana columbia
gcagcacccgaccggaattcccggggcgacccacgcgtccgcgtctacgcttacaatcgatcgtcccccatctccaattcagttttggacagagcaacctgtgatcgtgtcggttggggtagaagagatcgaagtgggagcaaaatcatgatgaatcggctattcgggaaacccaagcaggaggctaatgctctccaaactttagacaagcttaacgagacgcttgagatgctagagaaaaaggagaaagtactcttgaagaaagctggtgcagaggttgagaaggcaaaagaatactcccgggctaagaacaaacgagcggctatacagtgtttgaaaaggaagaggttatatgagggacaagtcgaacagcttggggatttccagctcgcgtattcatgaccaaatgattatgttagaaggtgcgaaagccacaaccgaaactgttggtgcatcgaggagtggagcttctgctatgaaagtcatgcagaaagcaacctacattgatgatgtgcggtaagacactggggcgggattcactgcagtaaaaccgccgaacttgatatccaggttcccaagaaggaatttgggctgagctccctaatggggggggcaatactggtttagacatttctaactcaagggattggaaggcctttgccattttatttaacgcttcggcttgt

SEQ ID NO: 85979 - DNA, 800 bp, Arabidopsis thaliana columbia
  unsure (1)..(800): unsure at all n locations
atgannnnnnnnnnnnnnnnnnnnnnnnnnnnnnnnnnnnnnnnnnnnnnnnnnnnnnnnnnnnnnnnnnnnnnnnnnnnnccacgcgtccgcccacgcgtccgcccacgcgtccgcccacgcgtccgcggacgcgtgggacacaacttccaacgatcacacacaaatggcgatgacgtcagcagctaccggatttattctcacggccaacgtcccggcggcaataggcggtggttcttcaaagagcaccaccattgtgtctttcttgccgatgagaagcttcggttcaaggctagtagtcagagcggcggaagatacacctccggcaaccgcctcgtcggatagttcttccaccaccgctgctgctgctccggcgaaagttccggccgctaaggctaaacctcctccaattggcccaaagagaggatccaaggtcaagattctaaggaaagaatcatactggtacaagaacgttggatcagttgtggccgttgatcaggacccgaagacccgatatccggttgtggtccggttcgccaaggtgaattacgcgaatatatcgaccaacaactacgcattggacgaggtggaagaagtaaaatgagagacatggtttatctctaaaccggttcgtctgtttgtaatcttaaacaaaaccgtatgtaccaaaaagttaaccaacaattcatcttttatcttttacaatctcaagatcgatttaaaaaagaaaaaaaaaaaaagggcggccgctctagaggatccaagcttacggacgcgtgcatgcgaagtcatacgcctaa

SEQ ID NO: 85980 - DNA, 672 bp, Arabidopsis thaliana columbia
  unsure (1)..(672): unsure at all n locations
atcgantgtaatnttccaaacacaatcaataagcttgcatctnataagcttcagtngaccttagctgtcagcttacatgcgccaaatcagagcctcagggagaaaattgtaccaagtgccaaggcttatccgctggaagcaattatgaaggattgtggtgattacttccaagaaacaaatagacgagtctntttcgaatatgcccttctagctggagtcaatgatcaagttgagcatgcggtggaacttgcagagctactccgtgaatggggtaaaagttatcacgtaaatttgataccttacaacccgatagagggatcagagtaccagcgaccttacaagaaagcggtcctagcgtttgcagctgcgttggagtcgcgtaagataacagcaagcgtaaggcaaacaagaggacttgatgcaagtcctgcttgtggtcagcttgaggaataagtttcaggaaaagccctttgcttacttgagacggatagtcaagagtctcagccagatgcagaaagcttgtccctttgctttgatgtcctgggtttgcaccaaatttcccggtttttgcccctttggattggcctctggttcaaacttttgggttttaaagnggnggccattgnttcntaaagggttttgtttggnnagtttnnaanccnaaggtttnna

SEQ ID NO: 85981 - DNA, 805 bp, Arabidopsis thaliana columbia
cccacgcgtccgagagattgtaaaaaaatctcaaatcttttccttcacaactttcaaatctaatggctcctgctttgagtagaagtctctacacatctcctttgacttcagttccaatcactcctgtctcttctcgtctctctcatctgagaagctcgtttctcccacacggcggcgctttaagaaccggcgtttcgtgtagctggaatctcgaaaagagatgtaaccgattcgccgtgaagtgtgacgccgccgtggcggagaaagagaccactgaagaagggtcaggtgagaagtttgagtaccaagctgaggttagtagattgtgggatttgattgtccatagcttatacagtcacaaggaggtgtttctcagggagcttgtaagtaatgcaagtgatgctttggataagctgaggttcttgagtgtaacagagccttctttgcttggggatggtggagatcttgagattaggattaagcctgatcctgataacggcaccatcaccataactgatactggtattggaatgacaaaggaagaacttattgattgccttggaactattgctcaaagtggtacttcgaaattcttgaaggctctaaaggaaaacaaggaccttggtgctgacaacggtttgatcggacagtttggtgttgggttttactctgctttcttagttgctgagaaggttgttgtgtccaccaaaagccccaaatctgacaagcaatatgtttgggaatcggttgccgatagtagctcgtatctgatcagagaagaaacagaccctgataacattctacg

SEQ ID NO: 85982 - DNA, 2203 bp, Arabidopsis thaliana columbia
  unsure (1)..(2203): unsure at all n locations
nnnnnnnnnnnnnnnnnnnnnnnnnnnnnnnnnnnnnnnnnnnnnnnnnnnnnnnnnnnnnnnnnnnnnnnnnnnnnccacgcgtccgcccacgtcgacccacgcgtccgccctttcttcatttccttcctctgcttcttctccggtggatgtcctctttcatcaatggcggcgaggataaacacttcgcttcataacgccctctcttttttaaagccttttaacactcccctcaataccaaaccattctcttttagaagaaacagcttcagattttccaaaaagcttccttattattctcagttttcctcagggaagagagctctctattgcacttccagttcccaggaaagtaccgtcgatgaaggcgagacatttgtcctcaccactcctctttattacgttaatgcccctccccacatgggtagtgcttacaccactatcgccgccgattcaatttctcgtttccagagattgcttggtaagaaggttatctttatcacaggaacagatgaacatggtgagaagatagctacttcagcagctgctaatggacgtaatcctcctgaacattgtgacctcatttctcaatcttatagaactctttggaaagatctcgatatagcttatgacaaattcattagaactactgatcctaagcatgaagctattgtaaaagagttctacgctcgtgttttcgcaaacggcgatatttacagagctgattatgaaggtctttactgtgttaactgcgaggaatataaggatgagaaagagttgcttgaaaacaattgttgccctgtccatcaaatgccatgtgttgcaaggaaagaagataactacttctttgctttgtcgaaatatcagaaaccacttgaagacattttggcccagaatcctcgttttgtgcagccttcgtatcgtcttaatgaggtgcaaagttggataaagagtggcttaagagatttttccatttctcgagcattagtggattngggaattcctgttcccgacgacgataagcaaaccatatatgtttggtttgatgctctacttggttacatatcagctctaacagaggacaacaaacaacaaaatctagaaactgctgtttcatttggctggcctgcttcattgcatttgatcggaaaggatattctacgatttcacgctgtctactggcctgccatgctaatctctgctggtcttgaacttcccaagatggtgtttggccatgggtttctgacaaaggatggaatgaagatgggaaaatcgttggggaatactctagaaccgtttgagttggttcagaaatttgggccagatgccgtgaggtatttcttcctacgggaggttgaatttggaaacgatggggactattcagaagaccgatttataaaaatcgtcaatgcacatctcgccaacactataggaaatcttcttaaccgtactcttggtcttcttaaaaagaactgtgaatccactttagtggtagactcgacagttgcagccgaaggagttcctttgaaagacacagtggagaagctggttgagaaggctaggacaaactatgaaaatctgtcactatcatcagcgtgtgaagctgttttagagattggaaatgcgggaaatacctacatggatcaacgagcaccatggtttctgttcaaacaaggtggtgtctcagcagaagaggcagccaaggatctggtgattatactggaagtaatgagagtcatagcggttgcgttatcccccgttgcaccttgcctaagtctgagggtctattcacagcttggctattcagaggatcaattcaatagcataacctggagtgacaccaaatggggagggctaaagggaggacaagtaatggagcaagcgagtcccgtatttgcaaggatcgagctgaatccagagaaagaagaagatgagaagaagccaaaggttggtaagaaaactggcaaagccaaggtcaaagtagtagagcaaactcctacagtagctgaagcttaaaaccaactccacaaaatcctgaaaaactgattacagcattcctctgatctcttcaattttatgaaatactgtaaatttatggttgttatgtaaacttgagaagctcttcatagttttgagggattataaaatttatcttcttatggtaaattctttttaacacatcnnnnnnnnnnnnnnnnnnnnn

SEQ ID NO: 85983 - DNA, 681 bp, Arabidopsis thaliana columbia
aaaaactgtatcttctgcaatctctgagtcctttcagagaggaataggtgacaaagcagttaatcagcttgacaaatctgttaatataaagcttgaagcaaccgtagctaggcaaattcaagcccaatttcagacctctggcaagcaagccctccaggaaggtcttaggtcaagtgtggagtcctcagtcataccttcctttgagaaggcatgcaaggccatgtttgaccaaatagactcagccttccagaaaggtattgctgagcatacaaatgcagcccagcaacggtttgactctggacactcccagcttgctcatactctaaaggaatcaattacttctgcgtcgtcagttgctcaagccttaagtcgtgagttagccgagacccaaaggaatctcttagctctcgcagctgctggagcaaattctggtgggtctaattccttggttactcaactaagtggcggacctttgggtgctcttcttgaaaaggttgaagcacctatggacccaacaacagaactatcgaggttgatatctgaacggaagtacgaagaatctttcacttcggccctacagagaagcgatgtctctatagtatcatggctttgctcacaggtggatctacgtggattactggcgatgaatccgcttccactgagccaaggcgtgcttctttc

SEQ ID NO: 85984 - DNA, 388 bp, Arabidopsis thaliana columbia
agagaaactccgataccagagcttggtggagcagtggagacgcttccacgcgaatctcgcagtcccactcgtcttcctccttccctctcttcctttgaataccttacctctctcggtctcgctccctccctcgattcaagcctattcgtcttcttacgctgtgtcttgaaacccttatctttttcatttcaatccctgaaggggtgattttgagattatggccaaagctaggaaggcaggacgtaaggttccttcacgacccttcagggcaagagcaaaaccatacaaatttccatcttctaaaagacttgtggcgagaaacatgtttgcggaagattggtcaaagggtctagagaagagggattgggagaatgttatatgttcgggt

SEQ ID NO: 85985 - DNA, 990 bp, Arabidopsis thaliana columbia
  unsure (1)..(990): unsure at all n locations
aaacaatnnnnnnnnnnnnnnnnnnnnnnnnnnnnnnnnnnnnnnnnnnnnnnnnnnnnnnnnnnnnnnnnnnnnnnnnnnnnnnnnnnnnnncggccgctgattctccatctgtttgctttccataacttgtcgatttggttttgtcattgtgttagttatcttgtgagtttgaatcacttttctaggcttccaagctagtgaggtgtgattttgagattatggccaaagctaggaaggcaggacgtagggttccttcacgacgcttcagggcaagagcaaaaccatacaaatttccatcttctaaaagacttgtggcgagaaacatgtttgcggaagattgttcaaagtgtctagagaagagggattgggagaatgttatatgttcggtttgcatggagtgtccacacaacgctgtccttcttctctgctcatctcatgacaagggatgtcgtccttacatgtgtggaaccagtttccggtattctaattgcttagatcagtacaagaaagcgtcagctaagctgaagacatcgggccatcaacagatcaataagtctgagcttggaaatctcacatgcccactttgtagaggacaggtgaaaggttggacaatcgtacagcctgctcgtgactttttgaatcttaagaagaggatctgggtgcaggagaactgtgtgggatgctggaaccttcaaagagctgaggaaacacatgaaagtggaccaccctagtgcgaagccgcgtgaagtggatcctgatgtggagcagaattggagaaggcttgagatcgagcatgaccgggacgatgttatgagcacgattaggtcgacaatgcctggtacagtggtgtatggtgattacgtaattgaaaggaacaatgccaacggttcatattcagacgagggtggtgatgatgattggatcgatgctgcatttggtaggaaattttgtgaatgttttcctttctgttacatgctttttggggca

SEQ ID NO: 85986 - DNA, 528 bp, Arabidopsis thaliana columbia
  unsure (1)..(528): unsure at all n locations
atgannnnnnnnnnnnnnnnnnnnnnnnnnnnnnnnnnnnnnnnnnnnnnnnnnnnnnnnnnnnnnnnnnnnnnnnnnnnnnnccacgcgtccgttcgcttttcgtagctctttcgcgcataataataactgaggttgttgtttaatcaagaagagtgtgcaaaaattggaaggccagggaatgcagaaacatgtatttgaaagctgaactcaattgctctacaccaccctctcagatcctttgtccctttgggcccttgttctccctcatcccttatgtggacacccattttctaaacccctgcttccacaccttccagccttcctctcacaatgctagaaaataatgaagagctcttggttccgtaaaggcctacaagaggaggtgaaagaatcagttgaggaagagacagaagtggacgcagaggcagagggaaacgcatgtgcagagaaggaaaagaagcggtgtatcaacctgaacgcgtttgagatcatatctctgtccacggggtttgatctctcgggact

SEQ ID NO: 85987 - DNA, 2183 bp, Arabidopsis thaliana columbia
cgcagtgaaagctatttggcatatacttgtcttcgcttttcgtagctctttcgcgcataataataactgaggttgttgtttaatcaagaagagtgtgcaaaaattggaaggccagggaatgcagaaacatgtatttgaaagctgaactcaattgctctacaccaccctctcagatcctttgtccctttgggcccttgttctccctcatcccttatgtggacacccattttctaaacccctgcttccacaacttccagccttcctctcacaatgctagaaaaaacgccacttggaagcatgatctttgcgaagacggttgatccgacactaacagcctcctcctgagttcctcctctaccctttatgttgtctgcgttttagtatattctagggtggtctttttatttagtggtattagtagtgctctaagctaaccagttagtcaatggagaagaaaggatctgtgttgatgctccgttatgaggttgggaagtttctcggtcaaggtacctttgctaaggtataccatgctaggcatttgaaaactggtgatagtgtagcgattaaggtcatcgacaaagaaagaatcctcaaagttggcatgaccgagcagattaagcgagagatctctgccatgagactcttgaggcatcccaacatcgttgagctccatgaagtcatggccaccaaatctaaaatctacttcgtcatggaacatgttaagggtggtgagctcttcaacaaagtgtcaactgggaagctgagagaagacgttgcgagaaagtactttcagcagcttgtacgcgctgttgacttctgtcacagccgtggagtatgccacagggacctgaagccggagaatctcttgttggatgagcatgggaatcttaagatctctgattttggtctcagcgctctttctgactctagaaggcaagacgggttgctgcatactacatgcgggacccctacatattgtgcaccggaggtgataagcaggaacgggtatgatgggtttaaagcggatgtgtggtcctgtggagtgatattgttcgtcttgctcgctggatatcttcctttccgtgattccaatctgatggagctgtataagaagataggcaaagctgaagtcaagttccccaactggcttgctccgggggcaaagagattgctcaagaggatcttggatcctaaccccaacacaagggtatcaactgagaaaataatgaagagctcttggttccgtaaaggcctacaagaggaggtgaaagaatcagttgaggaagagacagaagtggacgcagaggcagagggaaacgcaagtgcagagaaggaaaagaagcggtgtatcaacctgaacgcgtttgagatcatatctctgtccacggggtttgatctctcgggactgttcgagaagggagaggagaaggaggagatgaggtttacatcaaacagagaggcatctgagataacagagaagctggtggagattgggaaggaccttaagatgaaagtgaggaagaaggaacacgaatggagggtgaaaatgtcggctgaggctacagtggtggaagcggaagtgtttgagattgcgccgagctatcacatggtggtgctaaagaagagcggtggagatactgctgagtataagagagtcatgaaggagagtataagaccggctttgatcgactttgtattagcttggcactgaaacatattctatcctttttatgtgtcttcttcttttagaatgtttttcttgttttgttttgccaatgtgtttagtttatgtattttctcttgagtctcatcttaagacgtgtttcgtatttttctaggtgtcagtgtaacaataataatatgtgaggaccaattatatagtttgagacaaaataagtagatttctttatcagataaaataaaataaattgagccttaatgaaataagccaatagaccgacaacggttttaggaagcattatactactattttgtagttatttcgtattattgtagtcttttggatgatcctttttgtgtattaacaaagtcaaaacaaatttataatttaccttacggtacagaaaaaaaaaaaaaaaaaaaacaaagggcggccgctctagaggatccaagcttacgtacgcgtgcatgcgacgtcaagatacttctatagtgtcgcctaa

SEQ ID NO: 85988 - DNA, 1104 bp, Arabidopsis thaliana columbia
acgactcactatttgggaagctggcacgcctgcaggtaccggtcagagtcttttattgcagaaatttcgatcgtttttgttgtgtgtacagagagattatcgtgttttgttggcaatcgccattaaaccttcttccctctaacccaatcaaatttgcggctctttcttttatcttctcgcctcggttttagcaaaccctttagttatcttcttcctcaagcaatttttcttttggattagattggtgttttcttttggtttgtgtggtgatgatgagaaggcaacgagatgaacaacaatctagggttttctacgatctatcatctcttgttttgaatcttctccgttctcctcctatgccgatttctttacctgatcatttccccgatccgcccgctagaattcgtcctcccttttcttcgcatcgtttttcgtcttcttcgccttctttggctcatatttctccgtctggattcgcgtcgttgctgcttggtatatctgtggctcttatgctatgtggatctgtgactttcttcatcgggtttctcttgatgccttgggttcttgctctgattttggttttctatgtcgctggcatcgtttctgccatttctatggtcgggaggtcgattctctgttacgtcttgacgccaccttctccttccggaaaggagatttctgaatggaagcttctgtgaaatgattaaacaacagaggtgaagaatctatacatcatccggaagcagagcagagcgaagcagaacaaaaaaaagaagaagaaggattgattatataaacacatatatccgatagagtttttctatgttctttatctgtattttgttgggggggtttgggaaaatcatgtggatatcagggagttttatatttctttacatttcgaaaaaagaatttttctatttaactactgttagaaatagagaagccttgttatttgtgctttcatgtatgtcgtttttatgtaacatgatcatttcttaaagcatacaaaaagattttaggaaaaaaaaaaaaaaaaaaaaaaaaaagggcggccgctctagaggatccaagcttacgtacgcgtgcatgcgacgtgcatag

SEQ ID NO: 85989 - DNA, 548 bp, Arabidopsis thaliana columbia
  unsure (1)..(548): unsure at all n locations
gatatgattagctcaccaagcaaattttttaaaaaaagatgattacaaactctacaaagacattattcttgtctacagactaatcagcaattactctccctaacttcaatcagccaagctttatgaacaatcaaatcatcaatcaacatgaaacgaaaaaacaagaatcgtcgttcggaaaatatatgattcttcttacatacaggttaaaaacgtatcctgcgcagtctcttatggccttgtaaagacgccccaaatcttactccgggaaagattctccgccagtttcttagctccttcggtatccatatccacaagcttttgcaaatgcaagcaagcaccagcagctacgacttggtttcctggcatttctttggagttaccagcaggtccaacggcgngactggggtacgggttatccaatttccttaatcttcgggggcccagaggtggactagnntggcaaacccctggcaaccttcctggaaaccttctggaaccggggnncccaaagggggaaagggtttgagggggtctttcctcaaggc

SEQ ID NO: 85990 - DNA, 642 bp, Arabidopsis thaliana columbia
  unsure (1)..(642): unsure at all n locations
gtctaattccaaattcttccctagtttgaaaaatcttctgtattctgaaaagagattttatgcgtatcgctgaggtacgaagaaaacagattccttgccatttcccaaattttgtcattgagtcttggcatttcaaccaatcgcaatttattgaaattccggcgagtcattagatttttttggattccgtttcaaggtacggtgctttttcgcagattgagaagagcttaataagaaagatgacattgacgatcccaaacgcacctgggagctccgggtacttggatatgttcccagagagaaggatgtcgtattttgggaattcttacattctgggtttgactgtcactgccggaatcggtggccttctgttcggttatgatacaggtgtaatttccggtgcccttttgtacattaaggatgatttcgaagctgttaagcagagcagtttcttacaggaaactattgtaagtatggctttagttggtgccatgattggtgctgcagctggaggttggatcaatgactactacggtcgtaaaaaggcggctnttttttcagatnttgtctttttcaagcttggangctnatccgtaaatggttgttgcttcctnaaccccgaatgttttnaanatnnggngc

SEQ ID NO: 85991 - DNA, 891 bp, Arabidopsis thaliana columbia
gccggccctatacgactctcttagggaaagctggtacgcctgcaggtaccggtccggaattcccgggtcgacccacgcgtccgcccacgcgtccggtaatttccggtgcccttttgtacattaaggatgatttcgaagttgttaagcagagcagtttcttacaggaaactattgtaagtatggctttagttggtgccatgattggtgctgcagctggaggttggatcaatgactactacggtcgtaaaaaggcgactctttttgcagatgttgtctttgcagctggagctatcgttatggctgctgctcctgatccgtatgttttgatatcgggtcgtctcttggtcagtttaggagttggtgttggttttgtgactggtccggttatttagcggaagcatctccatcggagttagagggggacttgtgagcaccaacgtattgatgatcacttggtggacagtttctttcatatctcgttaattctgctttcacacaggttccaggaacatggagatggatgcttggtgtttaggcgttcccgctgggattagttaatcctcatgcttttcatgccagaatcccctcgatggcttttcatgaaaaatcgtaaagcggaagccatccatgtgctcgccagaacctatgacatcttggcgggtagaagacgagatggatcatcttttagcggctggagaggtggaaaacaacgaagcgcctggtggctactggatgtttaagatcccagactgagactgctttttgccggagaggacttaagcgttcagggggaatggttcatacagttttcctcagcctcgatgtcatggtgggattactttccacccacttgttctggtttattgcgttgctgaagtggggaaagggggg

SEQ ID NO: 85992 - DNA, 426 bp, Arabidopsis thaliana columbia
  unsure (1)..(426): unsure at all n locations
gcaacagtctggttatgcttcttctggctctgactactctcctcctagcttaaactctgatgctcaggaccgcactggaaagatagtctttaaactacttgataaagatccaagtcagctccctgggactctacgatctgagatctataactggctttcgaacattccatcagaaatggagagttatatcaggcctggctgtgttgttctatctgtttatgtagcaatgtcacctgcagcctgggaacaacttgagcaaaaattgctgcaacgggcttggtgtttttgctacaaaattntccttctgnattttnggaggaacggcaagttttttaggttaaacacggggaaggcaacttggatcnnnnnaaaattgggnangtncgtttttggnaancntttgggggccttggnttttncccnggg

SEQ ID NO: 85993 - DNA, 667 bp, Arabidopsis thaliana columbia
  unsure (1)..(667): unsure at all n locations
atagagaacctcacaggttaagtggacagggttaagttaatagtaagacatatgaaaacttagttaaggtgtttgtttgaattatgttaagaaagaagaacaaaaggacatcatatgcttagttacacaattagctaccaaacaacatcagatcaaatccatcacaaatcttcttcttccagccctcgagatgaatcttgtgtcttcaccgccttctattgagtggtttcgctgaagatgaagtgctaattgttggccttttagcacctgttaaagccttagaggaggagctagtggcaattgacagacgagacggtctggtttggcctggtggtttcaaggtctgctttggaatcctcgatgggaatattagtcctgtcttttggctcgggtttccccattttcactgatttctcgaggttctcagaagtcatgcgtgcttcagggccgttctattaagttcaagaggcttagcagtttcaggggatagagtcaactcnaactgnactgctaatggntncaaccaggttctgntccaatggaaggcaactatcngggtatcacccanctggcncanaatctggtctggaannccanngggnaacaactcacancaaacggaccnttgcggcagaaattantggtgggnaacctttggtgncggngc

SEQ ID NO: 85994 - DNA, 464 bp, Arabidopsis thaliana columbia
aaaaaaaaaaaaaaaaaacatctgtctctttcacttcacgtttgcgactgtgtcgtcgtccacctccggatctcatcggcgtttcatcataattatctgtccatctattcaccgtacgactccgttttaggaatctgtggatgtcaatttgagagaaaagactgtcttcattacaacacatttgggacaacaaggatcactcatggcagtggtggatgttcatcgtttcgctgagtcaatcacttgccatgcttggagtcctgatctctccatggttgctctctgtcctaacaacactgaagttcatatctataaatcattgtctcaagaccactgggagaggttacatgtcctccaaaagcatgaccaaattgtttctggaatagattggagctcaaagtccaacaaaatcggcactgtttctcatgacaggaactcgtacgtctggagcctggaaggagctg

SEQ ID NO: 85995 - DNA, 711 bp, Arabidopsis thaliana columbia
ctatacgacttacttagggaaagctggtacgcctgcaggtaccggtccggaattccccggttgggacaacaaggatcactcatggcagtggtggatgttcatcgtttcgctgagtcaatcacttgccatgcttggagtcctgatctctccatggttgctctctgtcctaacaacactgaagttcatatctataaatcattgtctcaagaccactgggagagggtacatgtcctccaaaagcatgaccaaattgtttctggaatagattggagctcaaagtccaacaaaatcgtcactgtttctcatgacaggaactcgtacgtctggagcctggaaggagctgaatgggtaccaactctcgttattcttagactaaatcgtgctgcactttgtgtccaatggagccccaaagagaacaagtttgctgttggaagtggtgctaaaactgtttgtatttgctattatgagcaagagaataactggtgggtcagtaagctaatccggaaaaggcacgaatcttcagtcacatctgtggcttggcatcctaataatgtccttctggcaacggcatcaaccagatggaaaatgtcgggtattttcaaccatttttcaaaaggagttgacaccaaagggttccaaaagcaggcttcaccagcggaaacgaaatttggggagcaaattcttcagcttgatctctcatattcttgggca

SEQ ID NO: 85996 - DNA, 1223 bp, Arabidopsis thaliana columbia
  unsure (1)..(1223): unsure at all n locations
nnnnnnnnnnnnnnnnnnnnnnnnnnnnnnnnnnnnnnnnnnnnnnnnnnnnnnnnnnnnnnnnnnnnnnnnnnnnnnnnnnnnccacgcgtccgcaaggatctcagaaaattgcttatctccctaatttcttcatctccctctaaactctcttccagaatccttgctcaattctcttcatttgtgatctcggctctcttatcacgaagacttctcccggcggcaccgtcttcacatttctgctcgtcattctcaaggaaccaaggtagaagctcactctctgtgaacgaaacatttgccttttgttcggaacgaaatctcacaaattggttctatgatctgcgcgattcgcgtcgtcttctctctggatctgaagtaattgattgccattcgttagctactgtctgccaattttttatgtttgtcctctctctggaacccttgaatgattcaactccatccaagtctcgtcgtccttgtaattaccacccgtccggcgattcatggaaggcattgttgtattggttaagaaacacagccattgaagcgatgctatcatcaaggttttcctttttggggatcggcagttccagtgaagtcaatgactccgtgggtgtttctggaagcaagatcaaaccatctctaagtgttcaaacggataaagatgtgtataggcctggagattccatttttgtaactattgaggttgctaattctcatgacaacgcctctaatccctccattttggttgaaaagcttagttttgaggttaaaggtctagagaaattggacattcagtggttttctactcaaaaaccttcaccaggaagcaaaggacgaagagattttcaggtgaacacatcttcctagacagttcaacaccatctttgatttcaaatcaaatcctatcccctggtgctaagatgacattaatggttcgagctatactcccacagattataccaccttcttataaaggtgctactttacgttacctttactacattaagagcacattatgcggaagatggatggcattagaaaacagtcaattttacaaagactcaacacaagatttcattgaagtggagactcgaataccattacaagtatgggtaattcagaagaacaatgggctgctattagaggaagatcaaatcgatggtattgttccaaccagtaccattcagacagaaatatattggaaagagatggatggggac

SEQ ID NO: 85997 - DNA, 779 bp, Arabidopsis thaliana columbia
  unsure (1)..(779): unsure at all n locations
nnnnnnnnnnnnnnnnnnnnnnnnnnnnnnaaagctggtaccgcctgcagggtaccggtccggaatttcccgggtcgacccacgcgtccgaaaacacaagcgtagaaaacaaaactcaactaattgtgttatcacccaaaagagaagagcaaacacaatggctttcgctttgaggttcttcacatgctttgttttgacagtgttcatcgttgcatcagtggatgcagcaataacatgtggcacagtggcaagtagcttgagtccatgtctaggctacctatcaaagggtggggtggtgccacctccgtgctgtgcaggagtcaaaaagttgaacggtatggctcaaaccacacccgaccgccaacaagcatgcagatgcttacagtccgctgcaaaaggggttaatccaagtctagcctctggccttcctggaaagtgcggtgttagcatcccctatcccatctccacgagcaccaactgcgccaccatcaagtgaagtggggaataacgacatcatttgcctgaagagtatggtttcgtatacgtaaaataagacggctatctaagctgatatttaccttgtctttgtttgtcttgatggctttgtaatcttttgctttgttatgttgtatacttgtgtcttaacatgtttaagatatgataatatatagtatcggtaccttattaaaaaaattaaaaaaaaaaggcaggccgctctagaggatccaagcttacgnnnnnnnnnnnnnnnnnnnnnnnnnnnnnnnnnnnaacgaagt

SEQ ID NO: 85998 - DNA, 3126 bp, Arabidopsis thaliana columbia
  unsure (1)..(3126): unsure at all n locations
nnnnnnnnnnnnnnnnnnnnnnnnnnnnnnnnnnnnnnnnnnnnnnnnnnnnnnnnnnnnnnnnnnnnnnnnnncggcgcgtgcggtgaacgattgaatcttttcttcttcgttggttccaaccctaatctagggttactctctctctcgcttccttctgttcttcgttcttaccgagttccacgagcattagcttcagagaccttgaattggagtgcggttggatcaaaaacagttgagcgaagatgaggattatgattaagggaggtgtttggaagaacaccgaagatgagattctcaaagccgccgtgatgaagtatggtaagaaccaatgggctcggatctcgtctcttctcgttcgtaagtctgctaaacagtgtaaagctcgctggtacgagtggctcgatccatctatcaaaaagactgaatggaccagagaagaagatgagaagcttctacatcttgctaaacttctgcctactcaatggagaactattgctcctattgtgggtcgtacaccatctcaatgtcttgagaggtatgagaagctccttgatgcagcatgcactaaggatgaaaattatgatgcagcggatgatccacgaaaattacgtcctggtgagattgatccgaacccagaagcaaagcctgctcgtcctgatccggtagacatggacgaagatgagaaagaaatgctttctgaagcaagagctagattggctaacacgaggggaaagaaggctaaaagaaaagctagagaaaaacaacttgaggaagctagaaggcttgcttctctgcaaaaaagaagagaactaaaagcagctgggattgatggaaggcataggaaaagaaagagaaagggaatcgactataatgcagaaattccttttgaaaagagggcacctgcgggattttatgatactgcggatgaagatcgtcctgctgatcaagtaaaatttccaactaccattgaagaacttgaaggaaaaagaagagctgatgtagaagcacatttacgcaaacaagatgttgcaaggaataaaattgctcagagacaggatgctccagcagctatattgcaagcaaacaagctgaatgatccggaagttgttaggaagaggtcaaagctgatgttaccaccaccgcagatttcagaccacgagctagaagaaattgctaagatgggctatgccagtgaccttcttgccgagaatgaggagctaacagaaggcagtgctgctactcgtgcacttttggcaaattactcacaaacaccaaggcaaggaatgacacccatgaggacacctcaaagaactcctgctggtaaaggtgatgctattatgatggaagcagaaaacctggccagattaagagactctcagacacctttgctaggaggagaaaatcctgagttgcacccttctgacttcactggggtcactccgagaaagaaggagattcaaacgcctaatccaatgttgaccccttcaatgactcctggtggtgctggtcttactccaagaattggcttgacgccatcaagggatgggtcttctttttctatgacacccaaagggactcccttcagggatgaacttcacattaacgaagacatggacatgcagcaaagtgcaaaacttgagaggcagagacgagaggaagctagaaggagtttacgctctggtttgactgggcttcctcagccaaagaacgagtaccaaatagttgcacaacctcctcctgaggaaagtgaagagccagaagagaaaattgaggaagacatgtcagacaggatagcgagggaaaaggcggaggaagaagcaagacaacaggcattgcttaagaagagatccaaggtcttgcagagagatcttcctagacccccagctgcttcattggcagtaattaggaactcgttgctttcagctgatggagacaaaagttctgttgttcctcctactccgattgaggttgcagataaaatggtaagagaggagcttctacagttgctggagcatgataatgcaaagtatccgcttgatgacaaagctgagaagaagaaaggagccaagaaccgtaccaaccgttctgcttctcaagttcttgcaattgacgattttgatgaaaatgagctccaagaggctgacaaaatgataaaggaggaggggaagtttctgtgtgtgtcaatgggacatgagaacaagacacttgatgattttgtagaagctcacaacacatgcgtgaatgatctcatgtatttccccactcgaagcgcttacgagctctcaagtgttgctgggaacgcggacaaagttgcagcttttcaggaggagatggagaatgtgagaaaaaagatggaggaggatgagaagaaggcagaacacatgaaggccaagtacaaaacttatacaaagggtcatgagaggagggcagagaccgtgtggacccaaatagaggcgacattgaagcaggctgagattggtggaacagaagtagagtgctttaaagcattgaagaggcaagaagagatggctgcatcttttaggaaaaagaatttgcaagaggaagtgataaagcaaaaggaaacagagagtaaactgcagactcgctatgggaatatgttggcaatggttgaaaaagcagaggagataatggtcggtttccgagcacaggcattgaagaaacaagaggatgttgaagattctcacaaactgaaagaagctaagctagccactggagaggaagaggacatagccatagccatggaagcttctgcataaaaacttgagttttgtattgcttacaagttttaaggagacgtagcttgactttgtattggtaagtttttttaatatgagtcatgactttgtaaaaaggttatgatatattctctgtttgtatgctttgcaagagtcaagaaatttgaatgcttcaggatctatttggttccaaatgtaagtacaatctgaagatgtttaatcctcctctctttcaatgcaaattttatccttggctagaaaaaagaaaaaaaacacaaaaacccacccccctagaggatccaagcttacgtacgcgtgcgtgcgacgtcataactcttctatagnnnnnnnnnnnnnnnnnnnnnnn

SEQ ID NO: 85999 - DNA, 722 bp, Arabidopsis thaliana columbia
  unsure (1)..(722): unsure at all n locations
caataagcatttaatattacatagttggaaaattaaggattattatgcaagaaacgtaagaaacaaaaacgagattctggcatttctgaatatacaacacataacggacatgcatgaagctttaaagctaatacaacaagacctttgtttcatgaagaagagagctattgaatcttatattttttacctcagctatagacatcttcttctcttcttgatggtcattcatctatttcccataagaaccgagcgtactctccaagaataatgctatcatttggagaggcttcaacggccttctcaaagtagaacaaggccttctcatggtcattattaatactccagaacgccttcgcgtatctgcatagcgtttctccatcttctgtcttggacaagcttgatttgccttttcccgctgcatcagcctcaaattcggcttttccttggccagaagatcatcatcatcctcatcatcaacctcatcatcatcatccggngttatctcccagaggaactagcatntggtggaagancaatggaaccancaggngatggttgactgacggtcaaagngnccatgggttangtnaccttgggaaggtcatacaacnaccaanggtggaaagaaccacncanggnacnnagngcccttttggaatngngggganctgnncccggggggcccaaggttnngggggggccngggggggccangnttgccc

SEQ ID NO: 86000 - DNA, 421 bp, Arabidopsis thaliana columbia
gacttgtgcacagaaagttaaagttaaaaatgtctcaaagtatgtcataagtgcagcaaagaaccctgaatttgcgcagaaattacatgctgtgttgttagaaagtggtgcatcacctcccccagatttgtttatggatattaacccacataacttgagggggaagaatttgcttcaagagctccgccaagaaagtagcaattctatggtttctggtattccatgctacccagaaaaggtagctgaacaactgagagaatctgaaaggaaccccacagccgagagttaccaacaatcagtggaggtcgatttgtcaatgaagaggaactttgatttggataatactggtaaagcttcttcatccgaaaatatggaggttggcactgctgatggggagtctgctgtttgtgatagtcatgac

SEQ ID NO: 86001 - DNA, 524 bp, Arabidopsis thaliana columbia
aaccccactcactttagggaaagcacgtacgcctgcaggtaccggtccggaattcccgggtcgacccacgcgtccgggacaaacccaagatctgaaaaagtttttgtcttttctctcccaatcgcctgattcaagcctaaagctcggtttttttcttctgggtatttaggggttaagtgtattgtagaaaagcatggcgagtttgagtgggagttggagagatgcgtataaaggaatgtcatcggataatataaagggtttagtattggctttatcttcaagcttattcattggtgctagtttcattgttaagaagaaaggtctcaagagagctggtgcttctggtctcagagcaggttctggaggttattcttacctgcttgagcctctctggtgggtaggcatgataacgagtgagttcccttcatatttaaagtgatgggaggggaattggcaattttgctggttatgcctctgcccctgccatttaataactcctttggggctctaagcaaattatcagg

SEQ ID NO: 86002 - DNA, 629 bp, Arabidopsis thaliana columbia
  unsure (1)..(629): unsure at all n locations
ancaccccaaagntttaaaccctttntganngntttataagttgacttaccatannaacgacttaaataccggggaaatacaggtggatataatgatacagtatattcatggtaatatgaacaaatccttgtaccagaaactctcaatctcttgtttttctccaatgcgttaagtttcagagcagcactgttgaggcaatatcgttttccggttgggcgtggaccgtcgtcaaagacatgaccaagatgggcgttacaaacagcacagacaacttcttgtctaggcatgaagatgatagagaggtctagctttgtcttcacattgtttccaattggttggtagtaagatggccaccctgttccactatcaaactttgttgatgaatcaaatagaggtgtgtcgcaacatacacaatttatatactcccagggggtctttgagttccaatactcccccagtggaaactctcccctgggggcccttctggccnaggtggatgtaaganctggtcccggggggttaanccggttcttcccattccnattttnccctttggggggnaaancccnttnttttnaaagccccttggganggtngcnngggtncgggnnaaaacnttggnnnaccc

SEQ ID NO: 86003 - DNA, 582 bp, Arabidopsis thaliana columbia
  unsure (1)..(582): unsure at all n locations
ttcaggtctctacgactcactattgggaaagctggtccgcctgcaggtaccggtccggaattcccgggtcgacccacgcgtccgaggagatgctctttatggcatggagcttgctctgtcactggagaaactagttaatgagaagctcttaaaccttcacagtgttgcttcgaagaacagtgatgtccacttggcagattttattgagagcgagtttctgacagagcaggtggaagcaatcaagttgatctcagaatatgtggctcaactgcgacgagttggcaaaggacacggaacatggcatttcaatcagatgcttctggaagggtaagcagcttcgagggactcttgtgtctactgtgtttctatatgtgtctactttatgtttagttctttagctcttacgattttgtgaggtagtagacttctttctctgtaagagacaaaagacatgatcacataactttatattctggtataaggttcatcacacccaaaaaaaaaaaaaaagggcggccgctctagaggatccaagcttacgtacgcgtnnnnnnnnnnnnnnnnnnnnnnnnnnnnnnnnnn

SEQ ID NO: 86004 - DNA, 1147 bp, Arabidopsis thaliana columbia
cggcactatacgactcacttagggaaagccggtacgcctgcaggtaccggtccggaattcccgggtcgacccacgcgtccggcgaagaaaactttcctactttgtttcaatccaaacgagtcaaaatgcttctcaagactgtttcttcatcttcttcttcagctctctcgctggtgaatttccatggcgtgaagaaggatgtgtctcctttgttaccttccatttcatcgaatcttcgagtttcttctggaaaatctggaaacttaactttctcttttcgcgcatctaaaagctcaaccaccgacgcgctaagcggcgtctgtcttcgagccgtttaaggaagtaaaaaaggagctcgatctcgtccctaccagctctcatctctcactcgctcgacaaaagtactcagacgagtgcgaagccgccattaacgagcagatcaatgtggaatacaatgtctcgtatgtgtatcacgctatgtatgcttactttgatcggataacatcgcgctcaaaggtcctgccaagttctttaaggaatcaagtttggaagaaagagagcatgctgagaagttaatggagtatcagaccaaacgtggtgggagggttaagttacagtccattgtaatgcctctttcagagtttgaacatgttacaaaggagatgctctttatggcatggagcttgctctgtcactggtgaaactagttaatgagaagctcttaaaccttcacagtgttgcttcgaagaacaatgatgtccacttggcagattttattgagagcgagtttctgacagagcaggtggaagcaatcaagttgatctcagaatatgtggctcaactgcgacgagttggcaaaggacacggaacatggcatttcaatcagatgcttctggaagggtaagcagcttcgagggactcttgtgtctactgtgtttctatatgtgtctactttatgtttagttctttagcttttacgattttgtgaggtagtagacttctttttctgtaagagacaaaagacatgatcacataactttatattctggtataaggttcatcaaaaaaaaaaaaaaaaagggcgaccgctctagaggatccaagcttacgtacgcgtgcatgcgacgtcatagactcttctatagtg

SEQ ID NO: 86005 - DNA, 451 bp, Arabidopsis thaliana columbia
cggacgcgtgggcaaacaccaacgataaacctcatccaaaatactctgacgttaagcctgctggacatttggtgcagccaactgccccttctgaagttgtggaaagacctaagctgaacctgcttcctcggacaaaaccacttgaaagtgtggagaaacctgtgaatgacgaaaaactggaaaatagtgcttcagtccttatacaacgtgaaaatgcgacacagaaaagtttcaacaattcaaaatctggtttgtctacagatgagattcctaaccagccggctgagcggcccaagttgaatctgaagcctgtggcacagttgcttgagcagccagaagttaaaactgaaaaggacagaagtgcggtttttggtggtgccagaccacgagagctgttgttgaaggagagaggcattgatgagcccgagcatacaaattggatcaaccgaca

SEQ ID NO: 86006 - DNA, 1304 bp, Arabidopsis thaliana columbia
  unsure (1)..(1304): unsure at all n locations
cgccnnnnnnnnnnnnnnnnnnnnnnnnnnnnnnnnnnnnnnnnnnnnnnnnnnnnnnnnnnnnnnnnnnnnnnnccacgcgtccgcccacgcgtccggaagaagctgaaccagacgaaccataaaccgaggcgagagaggagagagcgagggaggtgatctcttaccacctcttcgtctccggcggcgagaaattcagtttcaatcggagaagagaggaaaaacaaagcgatacgcgagagaaaaagttgtgcaacgatgtcaaagaagaaatcggctgccatgacgcttaaggacttccatggcggctcaataccatctgatctccctctcccttccgctcctggagtgactccgaaggttattccggatcgacctgtttttgatagagcgccttgggggaattcaattggcaggccagatcagagagcaagaccgagttcgtctcatgctattagaaatctcgatgataaatcactgtttctgcctcacaatgtcaatatcggacgtaatttcagtgaagatgaacggaagcctctggatggtcactctgctcctcgtagagtggtcagtgatgatgtttttcggtttgcgaataaccgtttggagatgaaagcagactcggttttagctgggaggcatagtggttgggcagctggtcctttgactcattctgggactggtaatattgagaacccagtggcaggaaatcactctaatatttggaatgggaggaaggaggtatcagttgctaacaatgagcctggacagtctccatggactaaacaaccagctgtttcgaatttggtccatacaagtgcgcttgaccaagtgtcttcaggaggatggcagtccaagcttttggttccttctcagatgggttttgatgttgttaagcattcagagatagataccagagtttataagactaatagccctgtgattagtcaaggggttgagccacatggaacacatgtagaacgggcactgattgctgaagatgggatccagcgtgggaaaaaactctcccgtgagtatgggaaaatccctggtccaacttatgtgggtgctaagggaagcggaaattgtagccaaacaccaacggttaaacctcatccaaaatactcttgacgttaagccctgctggacattttggtgcagccaactgccccttcttaagttttggaaanccctagggtgancctgtttccttgggcaaaacccctttnaaagttttggggancctttnattncggaaacntgnaaagngtttaggcctttnaacnggaanttgncaagaanta

SEQ ID NO: 86007 - DNA, 738 bp, Arabidopsis thaliana columbia
  unsure (1)..(738): unsure at all n locations
nnnnnncggacgcgtgggctctctgtttcttttctttttgtttcattttcttatctcctcacactcttcgaacaaggaagaaccctaatctcaagatgaatagggagaagttgatgaagatggctaataccgtccgcactggcggaaagggtactgtcagaagaaagaagaaggctgtgcacaagaccaatacaactgatgacaagaggcttcaaagcactcttaagagaattggagttaactccattcccgctattgaagaagttaacatctttaaggatgatgttgttattcagttcatcaaccctaaggttcaagcttcaattgctgcaaacacatgggttgttagcggttctcctcagaccaaaaaattgcaagatatccttcctcagatcatcagccaacttggaccagacaacatggacaacctgaagaagctagcagaacagttccagaaacaggcttctggtgaaggtaatgccgcctcagcaaccatacaagaagaggatgatgacgatgtcccagagcttgttggagagacattcgaaactgctgctgaagagaaagcaccagctgctgctgcttcttcttagagagaaaagagcgagaccacatccaaaaaaaaaccgcactttgatttttacatatctttataatatgtttgttcgctcgatcctttttgtagtttccgaccagaatcttgttttccatctaatgacttaaggtttttatccaatt

SEQ ID NO: 86008 - DNA, 537 bp, Arabidopsis thaliana columbia
  unsure (1)..(537): unsure at all n locations
aaaatggatgttttcagacggagactcatgacatattcatattgctatgatcgggctaggtacaatgttgctttatcggagtgtgtggtgaatcccgctgaggctcaaaggcttagggtttatgatccggtcagatttggcggcattccgaggcgccaccgcaatggaaagcaccggggcaagagaagccgggttgatggaaccgagtcgatatgataacatatataggcaaaatagtatgggtgagatttgggggttctataataagtccattattttggttatttatgattcaatgcattttcacatatagaggaggcatttttgtcatttgttagttgtatatcattataagaaaagaaaaaataattaatttatttatttgtgatattttttttatatatgataaattgtttcttgttcaaaaaaaaaaaaaaaaaaaaaaaaaaaaaagcgaccgctctagaggatccaagcttacgtacgcgtgcatgcgacgtcataactcttctataggtnnnnnnnnnnnnnnnnncg

SEQ ID NO: 86009 - DNA, 1373 bp, Arabidopsis thaliana columbia
tcttcttcattagcctttcgtctccttcttctcttctctatctctctttagcttctctacgcaagcttattatctctttctcttaaagctttttctatatacaaacagaagcgtttgatactgtaaaaaagatttagaaatggagactctgagtcgtttattggttttcatgtctctgttttccggtttagtttctggatttgctctgcaaaatcttccaatcacatcttttgaagaaagttacactcaactttttggtgacaagaacttatttgttcatcaagatggcaaatctgtccggttaacgctcgatgaaagaaccggttccggttttgtttcaaatgattattacttgcatggattcttcagtgcttcaattaaattaccttctgattatacagctggagttgttgttgccttttatatgtctaatggagatatgtatgagaagaatcatgatgagatagattttgagtttcttggtaacattagagaaaaagaatggagagttcagacaaacatttacggtaatggaagtactcattcaggaagagaagagagatataatctctggtttgatcctactgaagattttcatcaatacagtatcctctggtctgattctcacatcatattctttgtagacaatgttcctattagagaggtcaaacgtactgcggaaatgggtggtcactttccatcaaagccgatgtctctctacacaacaatatgggacggttctaaatgggcaactaacggtggaaagtacggtgtaaactacaaatatgcgccttacattgcgcggttctcggatctagtcctgcacggctgccccgtggaccctatcgagcagtttccgaggtgcgatgaaggcgcggctgaggatatgcgtgcggcgcaagagattactccttcacaaaggagtaaaatggatgttttcagacggagactcatgacatattcatattgctatgatcgggctaggtacaatgttgctttatcggagtgtgtggtgaatcccgctgaggctcaaaggcttagggtttatgatccggtcagatttggcggcattccgaggcgccaccgcaatggaaagcaccggagcaagagaagccgggttgatggaaccgagtcgatatgataacatatataggcaaaatagtatgggtgagatttggccggaattcaataagtccattattttggttatttatgattcaaggcattttcccaaaaaaaggaggcatttttgtcatttgttagttggaaatccttataagaaaagaaaaaataatttattttaaaaaaaaaaaaaaaaaaaagggccgcccgtttaaaagaatccaggctaaggtaggggggcttgcgcctta

SEQ ID NO: 86010 - DNA, 474 bp, Arabidopsis thaliana columbia
cgacctccattctcttccacttctttcttgttccaaaaacctaaacctctctctctctctctctctatctcttgaaaaatcaacaaaacattggaatcaatttctctatgttttgattctattttaaagatccaatattctttctccattgagattaagcttctttctcgctgtcgtctctctatagatcttggttcttagtcccttttgaataataatgatggtggagatggattacgctaagaaaatgcagaaatgtcatgaatacgttgaagcacttgaagaagaacagaagaaaatccaagtctttcaacgcgagcttcctttatgtttagagcttgtcactcaagcgatcgaagcttgtcggaaggagttatctggtacgacgaccacctacatcagaacagtgttcagaacagaccacaagtgtttgtggtggtcctgtctttgaaagagttattcctatcaagaaaa

SEQ ID NO: 86011 - DNA, 585 bp, Arabidopsis thaliana columbia
  unsure (1)..(585): unsure at all n locations
gagcctttaaataatttccatttcattctcatatatacaagaaaaaagagaggcctntagatcacaagaccaggtctacaaaattatcacagacctttgtttgtttgtgttttttcttatttatcctataaatctatataatccttcttcctttgctcccatcctaaagatctttccttctgtgtctactacatcaacaacctgtaaccgcaactaacccgagcttcatgtgcttcttttgtgaccatcatcgtcttcttcttcttcttcttctttatctcttataacatctatcaccgtagcattgcagaaaaaacatctctgacagttgagaagatgtctagttatgcagccataacatgatcgatgtggacacggggcaatcattgcattagcctcccccgngtagaggcttacagcaagtgggggcctccaaaacctggccgggcctttgttgaaggccccctccttttccttcgggggtcttggggttgaacccgggtcatgtgaggggccaagaaggtcccaaggggccaaggtttttaaaaagggcaatccccggttaaaaagggccaattanttcca

SEQ ID NO: 86012 - DNA, 565 bp, Arabidopsis thaliana columbia
aaaatttccagagaagtcgttcatcatttgcaattttctcgattagttctgaatcatggcgttgagcaccagcatcagatctgtctctaagatcattgcttcttccgaagcatcagtctccagatctgtgactagaagcttccactcgactggagttaagaagatgagcggaggaggacatggtggttacgatgaatactacctccacgcaaaacacatgtacaatttggaccgcatgaagtaccaagctctcaagatgtctctcggtgtattcaccgctttcagcatcggtgttggggttcctatcttcgcagtcgttttccagcagaggaagactcaatctggttaagtccctcaggatgctcttgttcacagcttgaataatttgtatgaattctcaaactctgcttttgcaagagagtttttctttctccctttggatcttagccacaagtcttatcgttatgggtaagtcttctgtgtcttcctcttttgctggctgtttgatgctgtaataatgataatctgacagatatatttttttttactttgattggaagtgaaa

SEQ ID NO: 86013 - DNA, 544 bp, Arabidopsis thaliana columbia
  unsure (1)..(544): unsure at all n locations
aatttccagagaagtcgttcatcatttgcaatttctcgattagttctgaatcatggcgttgagcaccagcatcagatctgtatctaagatcattgcttcttccgaagcatcagtctccagatctggtcagtaccaatagaagtatctgctgaattggttttgcatttctttgtttttccccttttttgttgtctagggttttggttgatttcccaggaatcgattattctaaggtttttgtttgattgcctagatatcaatgtttctgattagccgcggattgattccgatgcgattcttcgttgattgaattctgggatttgaaacttctctgctcgcgaatttgtcatagaaacacgctttaatggcgtgatgcgaaacagcattgtttatgattaggctgaaaaattgtcatcatgaaattaggaaatgcatattttgatgtttccttggtttcatggaaattttccatggtccgtgttttgataggttttgggttgaccacgtgaaaggctccatgtcaacctattgacaactttgnttt

SEQ ID NO: 86014 - DNA, 761 bp, Arabidopsis thaliana columbia
  unsure (1)..(761): unsure at all n locations
acgcgtccggtcttctttagctagcctcaaagagctggatgtgagtttcaacgagctcgagtcagtgccagagagtttgtgttttgccactacacttgtgaaactgaatattggaaacaatttcgctgacatggtatcgctcccgagatcaataggcaaccttgagatgcttgaagagcttgatataagcaataatcagatccgtgttctacctgactccttcaaaatgcttacaaagttgcgtgtgtttcgtgctcaggagaatccactacacattcctcctcgtgatatagctgaaaagggccctcaggccgttgttcaatacatgaatgatcttgtggagacgagaaacgcgaaatctctaatggttaagccaaagaagagctgggtccagatgtgcttcttctcgaaatccaacaagagaaaacagagcagcatggagattgtctaacacagctgataatgtctctgaccctaaatcaggtaattctgttaaagctgttgacagcacaagtgacaaacatatccagctatcttcttcacacggcaatgcattgatttgcattgcaactccaaggtactgtaggttggttcactattcattctttggtttggtttctttcnttcactntttcancatgggatccaatgnggcacaaccattngtttcaatccagggttttcccnaattttnanagggggccttnccnaaaaaaggattgggcccntngcccnttgnnggttgngggttttnttnaagg

SEQ ID NO: 86015 - DNA, 1006 bp, Arabidopsis thaliana columbia
tttgtgtttgccactacacttgtgaaactgaatattggaaacaatttcgctgacatggtatcgctcccgagatcaataggcaaccttgagatgcttgaagagcttgatataagcaataatcagatccgtgttctacctgactccttcaaaatgcttagtaccggaccggaattcccgggtcgacccacgcgtccgcacattcctcctcgtgatatagctgaaaagggccctcaggccgttgttcaatacatgaatgatcttgtggagacgagaaacgcgaaatctctaatggttaagccaaagaagagctgggtccagatgtgcttcttctcgaaatccaacaagagaaaacagagcagcatggagattgtctaacacagctgataatgtctctgaccctaaatcaggtaattctgttaaagctgttgacagcacaagtgacaaacatatccagctatcttcttcacacgacaatgcattgatttgcattgcaactccaagtactgtagatgtttcactattcattctttgtttgtttctttcttcactattcacatgtatcaatgtgcacaacattgtttcattcatgtctctccacatatcatagagcccatcccaaaacagaatcgaaccatgtcccttgtagattgaggttttcattaagctcttaccatgtttgtctatcgcctctggttttgtttctttggttcgaaacttaagacactcacatctgtgtatatggatagagatgtgatgtaaatgtgatggctttgaagtttagaggagagatgtgacatgagttggccttgaacgtggttttgtctacagagtaacttggttaaattaatacttcccttggaaataatgccaactttttttttttgggttccagagagacccactttaaaggggtgcggctcgcgttcttagaggaatcccaagctttaccgttcccgccgtggccatggcgaacgtcaataccttttttcttatagggggcccaccc

SEQ ID NO: 86016 - DNA, 458 bp, Arabidopsis thaliana columbia
cactatcacaatcataaccacaaaaacaaacactatgggacacctcaaaagtctcttcacaattcttttcctaatagctatgtcttcaaccgtaacatttgccggtaaaatacccgcgatcatcgtgtttggcgactcttccgttgatgccgggaacaacaactatatcccaactgttgctagaagcaactttgagccatatggacgggactttgttggtggaaagccgaccggacggttttgtaacggaaagattgcgacggattttatgtccgaagccttagggcttaaaccaatcattccggcgtacttggatccttcttataacatttcggattttgcaacaggtgttacctttgcttctgctgccactggctatgacaacgccacttctgatgttctgtcggtgcctcctctctcccaacaactcgaatactacaaagaataccaaacaaaac

SEQ ID NO: 86017 - DNA, 614 bp, Arabidopsis thaliana columbia
  unsure (1)..(614): unsure at all n locations
aagccctttctagtctgcgcttgagtttgattgcagctagcgccgcgctttactaagaagtgcgaaagggcttttctcgcttgtttagtaaagtcaagtttttgacccaggtgacgacgacgtcgagttggcggcggagaaagactcggcattcaggcgagccgcccggtggtgtgggacgaagtaagtgggtttagtacgccctgccaaaacggctccgaaacaaacaaaaaggtgcgtgccgcactcacgagggactgccacatgatatactggaggaaggtggggatgacgtcaaagtccgcatggcccttatgggctgggccacacacgtgctacaaatggcaattacaatgggaagcaaggctgtaaggcggancgaaatcccggaaagaattgcctcancttcgggattgttcttctgcaactcggggacatgaagttggaatcgctagtaatcgcggntcaanatnccgcggtgaatatntacccggggccttttcaaaacgnccgtaaaaccttggaattggttngcccaagattggccattntcacccttgcttntttttcnctngtgccaaaaggttttggggcttntttgggnnnccggtngg

SEQ ID NO: 86018 - DNA, 463 bp, Arabidopsis thaliana columbia
acccacgcgtccggaaaaattctcaaattctctaacaaagagctctgtgttttttggaaatctgaatcgttgttcgaggtttaatgttaccatttccggcaatgaacttgaagaagtctcgatcggaaaactcatcagttgcttcatctggaagtaagattgaggagcagactgagaaatcagctgaaccaacaaccattaaggtgcagaaaaaagccggttctccagggaggtcgatagatgtctttgctgtgcagtgtgagaagtgcatgaagtggtggaagattgatactcaagatgagtatgaagatatcagaagtagagtacaagaggacccgtttttttgccagacgaaagaaggtgtgtcctgtgaagatgttggagatctaaactatgattcctccagaacatgggtcatcgacatgcctggcttgttctggacaccaagagggttcaaaaggat

SEQ ID NO: 86019 - DNA, 1094 bp, Arabidopsis thaliana columbia
tcagaacattaacgtaacaaaacaaagatgagccaagagcaaccaaggaggccaagagagccagtcaaatacggcgacgtttttgaagtctccggtgaactcgctgataagcccatagcacctgaggatgcaaagatgatgcaatccgcggagacacatgtgttcggccatactcagaaaggcggtccagctgcggtcatgcaatctgcagccaccaccaatatacgcggtggctttgtccatccagatgacaaaactgagcttgtcgctgaacgaggcgccacagtggagcaaacggtccctgctgcaactgttacaaccgaattcgtcggtggacaggtcgttggacaacacgttgaaccgaggcgtgtagtcgctgctgcgcgtacggacgaagaagctttgcaaagtacaataacgattggagaagcactggaagcaactgtgaagacagctggaaacaaacctgtggatcaaagcgacgccgcagcgattcaagcggcagagatgagagcttccggtaccaacgtcattgctctagctggagtcgccgcttcagctcaatctgcagcggatcacaacgctaccgtagatcgtaacgagaggaaaatcaagcttcgtgatgttttgacgggtgcagcagggaagttatcggcagacagagctgtgacgagggaagatgccgagggagtggtgagcgcagagatgaggaataaccctaaattgtgtactcaccctggtggtgtagcggcttctcttaccgtcgctgccaggcttaacgagagatttgatatatgacaagacaaatccggcgagaggatcgatgatcttccttttttttgtttgtttgtttgtttgtccgtctccctttcacaacttaggaaacttgttatgtaaaaccgtctacagcttttggtcctttagccgatatgttagaaaatccggcggggagaggatggtgttcacaagcttgtgacatttaatcgactagcttttttgttcttttttgtatcttactgcttaaaaacttcccaaggatgatgttggaatgaataatggggactttttagatttgaagttaaaatccattcttt

SEQ ID NO: 86020 - DNA, 419 bp, Arabidopsis thaliana columbia
  unsure (1)..(419): unsure at all n locations
ggtacgacttctgtaaatncnattcgtgacttatggcctcgcgtttgctatcgacgacgacactcgtcacaccgccggcttatttcaacaaatcgccggcgtttttaacggccagagttggggtgagaagaggaagggctaacgttaaggctgtgagcaatagttcgcaaggagccgtcgatggaaccgtttacaaaggtgtttacggtccttggaccattgaccaagccgatgtcaaagaggttattttgtacagatcaggactagtaactgctgctgcatcttttgtagctgcttcttctgctgcctttttaccaggagactcttggttaagtgaaacaatcaagcaaaaccatgatctgttttactttgttggtgctagtggtttggggctaatctctgttctaatacatatatat

SEQ ID NO: 86021 - DNA, 880 bp, Arabidopsis thaliana columbia
  unsure (1)..(880): unsure at all n locations
ttttaggtgccactatagaagagctatgacgtcgcatgcacgcgtacgtaagctcggaattcggctcgagcgaagaagattctccttctctccgtcagacaaatctacgaacaagcgagcctgagcttaagaccaaactcatagagatgggtttcttctcttttcttggaagagttctcttcgcttctctctttatcctctccgcttggcaaatgttcaatgatggtggtcctgcagctaaagaattggctccaaagcttgatttggttaaggcacatttatcttctagattaggagtaacattgcccaaaatagaggtgagacaagtcgttgctactattattgccctgaaaggagtcggaggcttactctttgttatcggaaacaccttcggtgcttatcttctggcttcctacttggtggttttcggtcctattctctatgatttctacaactacggacctcaggaacgtcatttctctcttctgttgacagagttcttgcagagcgttgcactctttggagcgttactcttctttatcggaatgaagaactcgacacccgccaagaagaatttgttagaagagggcaacctaagccgcaaagctgcctagtatcaatattagttttcttctggttttgccatgagcaagcaataccttgccttttccttttttcccgacaaaatctttccttagaacttttgttttctttctgttttaggattcttagattagctcatgatcttatactaatactgtgatttgatattggggatcttgaaagttttggtttgttgaaacnggaaaaaaaaaccannnnnaaanaaaaaaggggggccgntctaggggtccaagtttcgnncgngncatnngcggna

SEQ ID NO: 86022 - DNA, 1817 bp, Arabidopsis thaliana columbia
gaccgaccatcgatgcttgcttgcttatgtcttagctcttaagtcatgccatgaacactcaagaatcatgatccatgcatgaaaagtccacgtgtcataccacgtccgtagaagataaagctaagtaaattgtacgtggcagctgttgcgtccctctatctaccacgtagcgtctcaacagaaacagagcattactataagaagtaacaaaagcagctcaactgatagcacaagttaaagaattctaaaatcgtaaagttctaaagcggtttttcatcaattttcaagcaatcgagaaaaaagcaatggcgtcagacaaacaaaaggcggagagagccgaggttgcggcgaggctagcggctgaggacttgcatgacattaacaaatccggtggtgctgatgtcacaatgtataaggtgacggagagaacaactgaacatccaccggagcaagataggcccggtgtgataggatcagtgttcagggctgtccaaggaacgtatgagcatgcgagagacgctgtagttggaaaaacccacgaagcggctgagtctaccaaagaaggagctcagatagcttcagagaaagcggttggagcaaaggacgcaaccgtcgagaaagctaaggaaaccgctgattatactgcggagaaggtgggtgagtataaagactatacggttgataaagctaaagaggctaaggacacaactgcagagaaggcgaaggagactgctaattatactgcggataaggcggtggaagcaaaggataagacggcggagaagattggtgagtacaaagactatgcggtggataaggcagtagaagctaaagataagacagcggagaaggcgaaggagacttcgaattatacggcggataaggctaaagaggctaaggacaagacggctgagaaggttggtgagtataaggattacacggtggacaaggccgtggaagctagggattacacagcggagaaggctattgaagcaaaggataagacagctgagaagactggagagtataaggactatacggtggagaaggcgacggaggggaaagatgttacggtgagtaagctaggagagctgaaggatagtgccgttgagacagcgaagagagctatgggtttcttgtcggggaagacagaggaggccaaaggaaaagctgtggagaccaaagatactgccaaggaaaacatggagaaagctggagaagtaacaagacaaaagatggaggaaatgagattggaaggtaaagagctcaaagaagaagctggagcaaaagcccaagaggcatctcaaaagactagggagagtactgagtcgggagctcaaaaagccgaagagaccaaagattctcctgccgtgaggggaaatgaagcgaaagggactatttttggtgcattagggaatgtaacggaagcaataaagagcaaactgacaatgccatcagacattgtggaggaaacacgcgcggcacgtgagcatggagggacgggtaggactgtggttgaagtcaaggtcgaggattcaaagccgggtaaggtggcgacttcactgaaggcgtcggatcaaatgaccggtcaaacattcaacgacgttggacggatggatgatgatgctcggaaagataagggaaagctgtgagaatactagaaaaatgacaatgttttttgggccttttgttctggatgaatatctctgttgttttttgggccttttgttttggatacgtctgttatagcagataacgttttctgatagtttctatgtttgtattcttgttttggaataggaaagctttcttcagtt

SEQ ID NO: 86023 - DNA, 538 bp, Arabidopsis thaliana columbia
  unsure (1)..(538): unsure at all n locations
aatgattatnagatgacactgaatgaaaattcagaggttgaggaagctagtagcgaagaaatgttcatccctgagacaaacattcaacttcgtacccattgaagagttgggtctgtatgttaatcagaaggaacttattgatcttattggagttgttcaaagtgtatctcctaccatgagtattagaaaggagaactgacaatgtgatgattcctaagagggatataaactttggctgatgagtcaaggaaaactgttgtggtgtccctntggaatnatcttgcaactngcataggtcaggagctactagacatggctgatcagtcacctgtgattgcaatcaaagtctctcaaaaggtttggggntttttcaaagggtngtttccggttggctanccatcagcaggaagcaattttnggttatttancccgggatnaccaggangctaaaaagttggaaancttngtttgattcttaaggcanggaaatntccatggctnctttggcnagggnttggcccttcttccaaaaatnggc

SEQ ID NO: 86024 - DNA, 439 bp, Arabidopsis thaliana columbia
tcttcataatttcttatccgctcttactctctctacaatcaaagcatggcttctgcgaccgccacgtggacacctacctccctccagcttcgtctcgctttgagctccggcgtgcgtcggaaatctcccgccgtttacttacgaccatcgcgattggccaggaaatcgggttatggaattgtctgtgtttcgcagaagcctgaagttgatgcgtggaccggatcggattcgtcaaagtcgtcggctgataatttggctgggtgggatgattccgataacgatgacaagaagtcttccagagttaagaagaagagtttgattgaaggtgtacttggggctggagtggctggaatcattttgtttcttgggctaagctatgcagcagcatcttttagcaagcgaacaaaaaaacaggaaatgcattcgttgacttctcagc

SEQ ID NO: 86025 - DNA, 763 bp, Arabidopsis thaliana columbia
  unsure (1)..(763): unsure at all n locations
gtgataatggattttttatacacactttttatttaaaaacaaaacaaaaaaaaaaaagttgagaagaaaaactctcacaatatagaaatggcaaaatgggtgcaaaatacaaccacattttctttcttttttttgtattgattaaataaaaactatctcttataagttgcaaccaagctcacatcttcttcttcaagtttttgctcctcaagctctataagtctcgcaaacacaccgaccaaaggagcagtattgtacgtacaagcctccgtttgaacgtaattacccctccggtcatcaaaatcatcctggtgatccggtcctccaaccaaagccccgactaaaacactcggatttggctcggaccgtccataccaattatcatatccttgagtacatcctataaaacctttgtgctctttaaaagaagcgatagacgcgcctcgatgatgaaccctaatcgggtattttggaccgtacccgactagataacttgtttccattggatttgatcctaaaatgtaatcgatttgagatttcgcaaagccaagcatctcgtcaggagttacggttccttcgtgacactcgagatcggtgtttgattttcggagatgatcagaatatacggttaggaggaccggatcaccaggatgattttgatgaccggaggggtaattacgttcaaacggaggcttgtacgtacaatactgctcctttggtcggtgtgtttgcgagacttatagagcttgaggagcanaaactt

SEQ ID NO: 86026 - DNA, 422 bp, Arabidopsis thaliana columbia
ccgcggcttaggacaatatgatccgaatcgttgaagaaactgtctccttgtgtctatgtttcggtttgatcccacattcctaaagctccagaaattgatcaaaatgggacaagctggtcaatccagagacggagaatctgtcacgcctcttgttggcggtggtaatggggacaatgcggttgcaccacaagtgtttaattctttaccagctcttaatgaagctgcttcttatataactcaagcaacgtcttacttagggagctgtttttctgactattcgagtagaatatggtggcaaggatactatttcccacccccatgagttgttacgatcaacttccggggttgacgggaattccccagtgagtgtatgcatttcgcctggtgaaaggttttcaacttcttcagaggcatctacattt

SEQ ID NO: 86027 - DNA, 735 bp, Arabidopsis thaliana columbia
  unsure (1)..(735): unsure at all n locations
nnnnnnnnnnnnnnnnnnnnnnnnnnnnnnnnnnnnnnnnnnnnnnnnnnnnnnnnnnnnnnnnnnnnnnnnnnnccacgcgtccgcggacgcgtggggttttgatcccacattcctaaagctccagaaattgatcaaaatgggagaagctggtcaatccagagacggagaatctgtcacgcctcttgttggcggtggtaatggggacaatgcggttgcaccacaagtgtttaattctttaccagctcttaatgaagctgcttcttatataactcaagcaacgtcttacttagggagctgtttttctgactattcagtagaatatggtggcaaggatactatttcccacccccatgagttgttacgatcaacttccggagttgacgggaattccccagtgagtgtatgcatttcgcctggtgaaaggttttcaacttcttcagaggcatctacatctgatgccaacagcccgtcgagggaatctacagagattcttgcacaggcaacaaatgcaatagtgacttccaatcggttaaattaaatggaatttaaatgttccagggctcattgagcnggcacggaggactgttcgtggcttcggagatgacatangatgggtacagcgtgccccggagatgcctcctggtnaangatgcacctgataggctcaataaattctggagacatcgggcatgggttcacaggcctccaatacaggggtgacttattggtcca

SEQ ID NO: 86028 - DNA, 450 bp, Arabidopsis thaliana columbia
  unsure (1)..(450): unsure at all n locations
ctggaagtaggatcattgtgaccacggaaaacaaacagctattgagagcgcatgggatcacttgcatatatgagttgggttttccatctagaagtgattctcttcagattttctgccaatatgcatttggagagagttctgcaccagatggttgtatcgagcttgctactgaaataacaaagcttgctggctatcttcccctagctctaaaggttttggggtcctctctgcgaaggatgagccaaagatgagcaaaaatcagcattgcctccactccagaaccaatctttaatgaagatattanaaatgtttttacgantccggttatgatgggtttacatgacaangatnaaggtcntatcccctccatattgcttggtttnttccatggtgaaaacnttgaatatntttaaacaaatacttgcaattcctggnttggatnttccattg

SEQ ID NO: 86029 - DNA, 728 bp, Arabidopsis thaliana columbia
  unsure (1)..(728): unsure at all n locations
ccatcaaattcacncacgaaaatntcaaggccatgatatnggttcgtaacnctatatatctaacccttattgcaattctctaagttagttaaacntcaatattattatnaactcggtttgtttgtaatttcatcaggatattgttgtgccgggaacngacacggcggctgcagtggtggtatnggccatgacttaccttattaagtaccctgaagcaatgaagaaagctcaagacgaagtgaggagtgtgataggtgacaaaggatatgtctctgaagaagacatacctaatctcccttacctaaaggcagtcatcaaggagtctcttccggctcgaaccaagtcatcccccattcttctacacagaggaactatcgcagacgcaaagatagggggctatgatattccggccaagaccatcattccaggtgaacgcatgggcggtttctcgtgacacagccgcgtggggagacaaccctaatgagttcattccagagaggttcatgaacgngcacaaaggagtggncttnaaggggccaaagatttttagctccctaccttttngggttcggggccggnagaatntgncccggcccatgcattcttttgggggtttnccaaattgggtnggaggtanccttttnggnttaaacctttcttttaccaanattttaacntgggagtcttacctaaaanggntttaaancnagagggttttaaaaggtttg

SEQ ID NO: 86030 - DNA, 1780 bp, Arabidopsis thaliana columbia
cggacgcgtgggcggacgcgtgggaaagacttaagtaagtcaaacagaaaaaaatggatctcttattgattatagccggtttagtagcggctgcagccttctttttcctccgtagcacgaccaagaaatctctccggttacctccgggaccaaaaggtcttcctattataggaaaccttcaccagatggagaaattcaacccccaacacttccttttccgtctctccaagctatacggcccgattttcacgatgaaaatcggtggccgtcgcctcgcggtgatctcctcggccgagctagccaaggagctactcaaaactcaagacctcaacttcaccgctcgtcctctcttgaaagggcaacaaaccatgtcgtatcaaggccgtgagcttggtttcggacagtacaccgcgtactaccgtgagatgaggaagatgtgtatggtgaacctcttcagcccgaaccgtgtcgcaagtttcagaccggttagagaagaagagtgtcaacggatgatggacaagatctataaagccgctgatcaatcaggcaccgttgatctaagtgagcttctcttgtctttcactaactgtgtcgtatgtagacaagcttttgggaaacggtacaatgagtacggcacagagatgaagagattcatagatatcttgtacgagacgcaagcacttttgggcactctgtttttctccgaccttttcccttatttcggattccttgacaacctcactggtctcagtgcacgtctcaagaaagctttcaaggagcttgacacttaccttcaagaacttctagacgagactcttgaccctaaccgccctaaacaagaaacagagagtttcattgatcttttgatgcagatctacaaagaccaacctttctccatcaaattcactcacgaaaatgtcaaggccatgatattggatattgttgtgccgggaactgacacggcggctgcagtggtggtatgggccatgacttaccttattaagtaccctgaagcaatgaagaaagctcaagacgaagtgaggagtgtgataggtgacaaaggatatgtctctgaagaagacatacctaatctcccttacctaaaggcagtcatcaaggagtctcttcggctcgaaccagtcatccccattcttctacacagagaaactatcgcagacgcaaagataggtggctatgatattccggccaagaccatcattcaggtgaacgcatgggcggtttctcgtgacacagccgcgtggggagacaaccctaatgagttcattccagagaggttcatgaacgagcacaaaggagtggacttcaagggccaagattttgagctcctacctttcgggtcgggccggagaatgtgcccggccatgcatcttgggattgcaatggtagagatacctttcgctaaccttctctacaaatttgactggagtctacctaaagggattaaaccagaggatataaagatggacgtcatgactggactcgctatgcacaagaaagaacacctcgttcttgcaccaacgaaacacatctgatgctatatatatcattaggacgtttctgctggtagatatggcgtgaccaatggttatttttcattgcaatatccctttttgttttaatgagtactatgttctcattttaacgaataaaaatgtatcagtgctcttgtttttggactagaaaagaaagtagtccgatgtttaatattcgggtccctttaatattccctctggtttacaataaaaaaaaaaaaaaaaaa

SEQ ID NO: 86031 - DNA, 576 bp, Arabidopsis thaliana columbia
ttaaattcaaagaagtagaaactaatttcaagacatggttgtcgaaacagtcgattccggtggaagccgccgtcgtatccaccatgagcggtgtacaaggagctttcattggtggtctcatgggaacactctctcctgaaatgcctcaagccggcgttgaccctcaagccatagcttcgatgaaacaagctcaggctcttgtgggtggtccttgggtccaagctcggaattttgctgcaattactggtgtgaatgctggaattgcttctgttatgaagcggattagaggcaaagaggatattgaatctgcagtggtggcagcgttaggatctggatttgcatactcattggtgagccaaggattgcaaggacaacctttgaatgcaatcactactgctgctggttttgctgtttttcaaggagtgttttttaaattgggggaaagattctctaaaccgagtactggagatccatttttcacaagaggaaggacaatgctagtgaagctaggtttggggaaatacgggaagaacttcaagaaaggccttttaactgatcccacattgccattgctca

SEQ ID NO: 86032 - DNA, 1321 bp, Arabidopsis thaliana columbia
  unsure (1)..(1321): unsure at all n locations
cctcgacatgaaaactcgtgcccccttcgtttctccccctagtatcgccggctcctnnnnnnnnnnnnnnnnnnnnccgggccggcccacgcgtccgcagagaaccgaaagaagaaaacaaaactctcgaagtcgcaacagaaaagaaacgagagagatatggtggtaggcggcggaggagaaggagatcagaagagaagcagcggagaaatgatggcgatggcgagtttattcaacgatcagcagaatccaattcaacagtttcaggttaaattcaaagaagtagaaactaatttcaagacatggttgtcgaaacagtcgattccggtggaagccgccgtcgtatccaccatgagcggtgtacaaggagctttcattggtggtctcatgggaacactctctcctgaaatgcctcaagccggcgttgaccctcaagccatagcttcgatgaaacaagctcaggctcttgtgggtggtccttgggtccaagctcggaattttgctgcaattactggtgtgaatgctggaattgcttctgttatgaagcggattagaggcaaagaggatattgaatctgcgtaagtttcattctttgtgatttggttaccattgagaatgaaagtaatggttttaagtttgcagagtggtggcagcgttaggatctggatttgcatactcattggtgagccaaggattgcaaggacaacctatgaatgcaatcactactgctgctggttttgctgtttttcaaggagtgttttttaaagtgagtgatcatattgaaaactctctctactcatggaaacctgtttataagcattttttttggtttgattccctagttgggagaaagaattctctaacccgagtactgaagatccattttccccaagaggaaggccaatgctagtgaagctaggtttggagaaatacgagaagaactccaagaaaggacttttaccggatcccacattgccattgctccactgataagcgcgctgaaaagatgcgaacatcccccccagggccaagacttatgatactagatcatatccagagggacccggagataaagggcaaacgaaagtaggagccatgttgtttaatcaaatatgttttgatggtaacgatcttcaaacacatatgtaatgccttttacttttagctgctattgccatgaagagctcttgttagatacttctgtttctattaccaatgtttgattatctttaaaaaaaaaaaaaaagggcggccgctatagaggatccaagcttacgtacgcgtgcatgggacgtcatagctattctatagtgcgcctaaa

SEQ ID NO: 86033 - DNA, 428 bp, Arabidopsis thaliana columbia
  unsure (1)..(428): unsure at all n locations
tgtttccatgtgcttcgcaagagcgatcctccgtttgtcccatcaacaacattcatcaaacaaggactttcatcatttatcactttcgtagttacacacttcaacgattcaaggatatcgaatacagatcttaaagatctacttctccagtcaatatccgtcctggtacagtacaaagagtacttggaagctttcgagaacaatgaggcagctactcgacacatgcctgcagcactactggcagcgtttgacaacagatcttggatccctgtcacaaatatatttcttcgtctttgcaaaggttctgggtttaggttctttaaagaacgngggagtcttcggtttttngtcntactgttttcctgggngtttctangnggttgcttgtntcaattnnttggnngnntttnactttnttactttttttt

SEQ ID NO: 86034 - DNA, 577 bp, Arabidopsis thaliana columbia
  unsure (1)..(577): unsure at all n locations
aggcccgggatacccgtngggaaccatttgtaganacgagcaaaaccgangccctttccgactgcataacaccgggactcccaganaanagaaacgccgatgaagcagtataggcacttcttagatgcaaatgtgtacccaatgctcagttactcatccatcattctccttctttcaccaattaaagacccctgagtttgcgtgattcctccaaaagcgtattagacaaaatcacaacatatgaaggaatcttctcaaatgtgaatgagatgcatatacagacaactatttcgttacctatataatgtattatagtaaaggttccttttatggttagaagaatctgaatggggtacctttggtcggcttcagatatgcccactcattgttaatagattcctttatcgtctgttaatccaatcaaaagcttgttacatcggtttccggaaaaaaaaaaaanaaaacggggggcgcccnagaggatccaagcttacgtacgcgtgcatggggncgtcatagctcttctanagnggccccaaantcaattcaccgggcggcggtttacaancgccgtncc

SEQ ID NO: 86035 - DNA, 622 bp, Arabidopsis thaliana columbia
  unsure (1)..(622): unsure at all n locations
tgagacgaagcttgatgagaacaatcgggcaaggccttatagagattacacaacacagatagattacacactgagaaacagataatggtagctgaggccttgcccaaatgccctgaagctccactcgtacttggactccaacccgcagctcttatcgataacgtcgctcctgttgattggtctttactcgatcaaattcccggtgatcgcggtggctccattgccgtgcaaaaggatgagttagagcacatgctaaaagagcttgatgcacatatcagtgtggctccattaaagaagatggctggaggaagtgtgaccaatacagttcgacgcttgagtgttgggttcggtgtagccactgggattattggtgcctatggagacgatgaacaacgccaattgtttgttagcaatatggggtttagtggtgtgagtatctcaaggctncaggaaggaggaaggttncactgntcagtgtgtttncttggttgatgacccttggtaatcggaccaatgcggccatgtctctcgggtcctntnaagatcaaggcaggtgnattaagcaaanagggtttcnnaagggcctnagggggtgggnctnaanaaaancngnncttaattt

SEQ ID NO: 86036 - DNA, 337 bp, Arabidopsis thaliana columbia
  unsure (1)..(337): unsure at all n locations
gaaatgttttgtttagagcttttgtgtgctgtttgttcgaagccgacccctaagttaactctctaggtataaaattccatctgagcctttctcttctctatgattgaatgactcagtctccacggttcaatggagatgatcttcaactatctctagaaccttttttttttttaaacaataaaaatatgttccatttcatatttgttgaacacncttatctttattattggagatctattaaaagtttgcatctttggggtgttcttgttcttcatccaataatcaaacaagagagatcatttatggaaatttaaggataagccttgacaaattaant

SEQ ID NO: 86037 - DNA, 541 bp, Arabidopsis thaliana columbia
gttcaagaggtttcagtattcttgggttcattcatcgtcagatggcaagagtactaacacttgattttcagctagattgtctagattacgatactgagaattggtaccatgctgatctcgatttcgagacattccagttgcttcagaaggagaaaggagaaagcttcttctcatttgccagggacatgactattagatcaacaaaagcaatgatacagccagctttggtaactgaaggtcgtgatacttggaggtcaaagcttctatgggtttcacgggtttttcctatgcctcttgtgggtcttttcctaatcggggctttttgtgctgactttggagatcagacctcagactatccagaattagaagcactttcacggcttgactttggagctgctatgaaggttttccttgctaagagattgacatccgagctaacactagagacatcagatatagaggaaaaatctgtcatcattggtgagagaaaccgagcagctacggaagctttaagaagagcaatagagcaaggacacaagag

SEQ ID NO: 86038 - DNA, 767 bp, Arabidopsis thaliana columbia
agtataattacattctttgcctttctccttcttcttctttagatcctaagtatcttactttcctttttcatcatcttcttcgatcatggaggttttcttagagatgcttctcacggcggttgttgctctcttgttttctttccttttggccaagctcgtttctgttgctacggtggagaacgatttgagttctgatcagccgctcaagcccgagatcggtgtcggtgttacagaggatgttcgttttggtatgaagatggatgctcgtgttctcgaaagccagaggaatttccaagttgttgatgagaatgtggaacttgtcgatcggtttcttagcgaagaagctgatcgagtttatgaagtcgatgaagctgttactggaaacgctaaaatctgtggtgaccgtgaagctgagtcctcggctgcagcctcgtcggaaaattatgtgatcgccgaggaggtgatcttagttcgaggacaggacgaacagagcgactcggctgaagctgagtccatttcttctgtctcgccggaaaacgtggtagcggaggagattaagagtcaaggacaagaggaagtaacagaattaggaagaagtggttgcgtagaaaacgaagaaagtggtggagatgtcttagtcgctgaatctgaggaggttagagttgaaaagagtagtaatatggtggaggagagtgatgctgaagcagagaatgaagagaaaacagagttgactattgaagaagatgatgatggggaaggaattgaga

SEQ ID NO: 86039 - DNA, 529 bp, Arabidopsis thaliana columbia
ttaggagcactatagaagattatgaggtcgtactgccgcgtacgtaagctcggaattcggctcgagttttgatgagaatgtggaacttgtcgatcggtttcttagcgaagaagctgatcgagtttatgaagtcgatgaagctgttactggaaacgctaaaatctgtggtgaccgtgaagctgagtcctcggctgcagcctcgtcggaaaattatgtgatcgccgaggaggtgatcttagttcgaggacaggacgaacagagcgactcggctgaagctgagtccatttcttctgtctcgccggaaaacgtggtagcggaggagattaagagtcaaggacaagaggaagtaacagaattaggaagaagtggttgcgtagaaaacgaagaaagtggtggagatgtcttagtcgctgaatctgaggaggttagagttgaaaagagtagtaatatggtggaggagagtgatgctgaagcagagaatgaagagaaaacagagttgactattgaagaagatgatgattgggaagga

SEQ ID NO: 86040 - DNA, 389 bp, Arabidopsis thaliana columbia
cataaaggtgtttttgcagagtaatcgccaagccaaattcacaccaagagccatcgcgagaataatgcacggagttggaagtccagcttttccgaattcagtctggtccaagactcatttctggggaaggtatatgaacgtagacttccgagtgataatggaagcggcacaaacagagttgttcaattttgttgacaggaacgcagctttagctacataacataagattagaggctttgagtaggttcttaggatatttaaatttatttgtattgtattctagattcattgaaagtacccagtaaagagaaattgtgtcatatgagagttgagagaattgttttgcatccgcaaggaaaggtggaagttaacctttaggattttaaagg

SEQ ID NO: 86041 - DNA, 550 bp, Arabidopsis thaliana columbia
  unsure (1)..(550): unsure at all n locations
gggttttggatttagaactagtgtgattggatttagaacaaccagtggaattggatttagaactagtgcgaagatgatggttgatacttctgctggagagaaacgtatatccttagttgatatgccgcctgagaaagttgatgatggtggatacatcggtggtgggtggaaaaatgatgatggaagcttgagctgtgggtactgtagtttcagagggaaaagatctacgatggaagatttctatgatatcaaagcttccactattgaaggccaagcagtttgcatgtttggaatatttgatggccatggtggttcacgtgctgctgaataccctgaaggaacaccctggtttaacaatccccatgaagccatccccaattttttgacagaccccaagcggcattaaatggacccttttaaccaaccggggtggccttcccccgggccccaaaagggttcttccaaggatttgggcccccaaaaatctcccccttttttgggggggcccccttttttttnnaatttttggccctggggcnaatttttaanc

SEQ ID NO: 86042 - DNA, 424 bp, Arabidopsis thaliana columbia
  unsure (1)..(424): unsure at all n locations
tnatcggggcagcccacagggtcctggagaaatttaccggcgtcaagttcatacatcctgaaaacacaccaggtcttttccattgggctgacagattctacgcccatgaagcggtcaagcctgtcatgcccgatatcgaaaaactggtccagttcgctaggctcaagttcaatacttcaatctttaaatgaaaaccaaggacttataaatatatatacgacgactaaattaacataatcgagttcatggaattaataagatgtaaactcgtttagttaaaaggcgtagtcaaaaagttctttcgtttgtttgttttttccgtcttcctacatttcatatgtatgcagagataaccaatcgtgccacgtaaaaaaaaaaaaaaaaaaaaggggctactaacgccgggagggggcgccctaggggg

SEQ ID NO: 86043 - DNA, 475 bp, Arabidopsis thaliana columbia
  unsure (1)..(475): unsure at all n locations
cgcatcagaattgtcccgttagagtcgtaggcgacgaaaacgttggaacatcgaagcactttgagtacacattctacgtcgacttcgaagcgtcgatggcggaggcgcgtgcacaaaacgcgttaggatggtgcaagagtacacgtcattcctcagggtgctgggaagttacccaatggatatgacgccatggtccacgttacctagcgaagacgtatgacacaattaaaaaatttatctgaattttaaataacattatggtaaaattatcataagtaaaatacatggaaactaaagtagaatttgtagaactcgttttgcatgtgaagccgggaggataattattattttatttccccttaaacccaaatattttgtgtgtatgtatttgctaactacttgggaccaagaccgggtttgtaggtttgggtcctggtgattccaaattggatgatattaccttgangcnangcng

SEQ ID NO: 86044 - DNA, 892 bp, Arabidopsis thaliana columbia
  unsure (1)..(892): unsure at all n locations
nnnnnnnnnnnnnnnnnnnnnnnnnnnnnnnnnnnnnnnnnnnnnnnnnnnnnnnnnnnnnnnnnnnnnnnnnnnnnnnnnnnccacgcgtccgaccacgcgtccgcaaaaacataagctaagaaaacgaaactcaactaattttgttatcacccaaaaagaagttcaaacacaatggctttcgctttgaggttcttcacatgccttgttttaacggtgtgcatagttgcatcagtcgatgctgcaatctcatgtggcacagtggcaggtagcttggctccatgtgcaacctatctatcaaaaggtgggttggtgccaccttcatgttgtgcaggagtcaaaactttgaacagtatggctaaaaccacaccagaccgccaacaagcttgcagatgcatccagtccactgcgaagagcatttctggtctcaacccaagtctagcctctggccttcctggaaagtgcggtgttagcattccatatccaatctccatgagcactaactgcaacaacatcaagtgaaatggaagcttacgtcgtcgttttggcgttaagagtatggtttaccagaagtactagaataaaatacggctatatatcttagctgatattaccatgtatttgtttttgtctcaatgctttgtcttattttcatatcatatgttgtattgatgtgctaaaactatgataatagtaccttattagtcatcttctttctagatatctcctccaacgcatacgaacgtaataataatatgtgaagagttttataactattaagtaaccaataatattaagttcctagttttggagtgacattatttaaaaaataatattaacgaagaaacatgctaatgattttctccttaacccaaaaaaaaatctctatcat

SEQ ID NO: 86045 - DNA, 410 bp, Arabidopsis thaliana columbia
gggaggtgaagctggcaaagatgctgagatgggggaggagcttaaaatgagttttacatcccctcagtcagcagtgcaagaagatgatggaggggagtcaaagacggaggggagtagtgaaagcagcaaagcaagatctggaagtcacagagattttcagcaagaagaggacgttatttaagataagcattcttctcgaccagctaacaataggaaacagtacgataacaatgcacctcatcagagcagaaagaatcaggacagagggaaggaaatggaaagaacacgagcggcgagcataggtggtagagagaactctaatccacatatggagctcgattctacttagatctactcaattgcaagtcgcgaggattttgataaaagaaaagagcgagatgtttattgcg

SEQ ID NO: 86046 - DNA, 597 bp, Arabidopsis thaliana columbia
gatcttgagcgtgattttggcgaaagaagagatggcagaagacgtagacttagaagcaatagcaaatatgacagatgggtactcagggagtgacttaaagaatctttgcgtgaccgcggcacatcttcctatccgagagattcttgaaaaagaaaagaaggagagaagtgtggctcaagccgaaaaccgagcaatgccacagctatatagcagtacagacgttagacccttgaacatgaatgatttcaaaaccgcacatgatcaggtatgtgcgagtgtggcgtctgattcatcgaacatgaatgagctccagcaatggaacgagctctatggagaaggaggctcgaggaagaagacatcactgagttacttcatgtaaagagaaaaccagagaggttgtgttttgttagtttatatatatatatatatatatatataaatctctctctaatttatatgttgtacagagagattgagagagaagagagtcagtccccccttgaattgcctaaaaaatgttttccccggacctgcctcaattcttttctttctttctccaaaaaaatattctaatatcagatgtacaatcaatttaaa

SEQ ID NO: 86047 - DNA, 1973 bp, Arabidopsis thaliana columbia
cacagatggacataatctcagggcaagctctgttactcctcttttgctttatcttatcatgttttcttatcttcaccaccacaagatctggacgaatctcccgcggggccaccgcgctgcctccaggacctccacggttaccgatcatcggaaatattcacctcgtcggaaaacatccacatcgctcattcgccgagctctcaaaaacttatggaccagtcatgagtcttaagcttggaagtttaaatacagtggttatagcttcaccagaagctgcgagagaggttttacgaacacatgaccagattttgtctgcccgtagtcccactaacgcggtacggtccatcaatcaccaagacgcttcccttgtctggcttccttcgtcgtccgctcgttggaggctgttgagaaggctgtcggtgactcagctcttgtcaccacagcgtatcgaagccacgaaagccttgaggatgaacaaggtgaaggaacttgtgagcttcataagtgaaagcagcgatagggaagaatctgttgatatttctcgtgtagccttcatcacaactcttaatatcatatcgaacattctgttttccgtcgatctcggtagctacaacgcgaaagcttctattaatggggttcaagacacggtgattagtgttatggatgctgccgggactccagacgctgctaattactttccatttctgaggtttcttgatctgcaaggtaatgtgaagacttttaaggtttgcacggagaggctggtaagggttttccgtgggttcattgatgctaagattgcggaaaaatcatcgcagaataaccctaaagatgtttcaaaaaacgatttcgttgacaaccttctcgattacaaaggagatgaatcagaactctccattagcgatattgaacaccttctcttggatatgtttacagcaggcacggatacaagctctagtaccctggagtggccaatgacagagttacttaaaaaccctaaaacgatggcgaaagctcaggccgagatcgattgtgtgataggtcaaaacggtatcgttgaagagtcagatatctccaaactgccgtatttacaagcagtcgtgaaggaaactttccggttacatacgcctgttccgcttcttatcccgcgaaaagccgaatccgatgcggagattcttggtttcatggtgcttaaagatactcaggttctagtgaacgtctgggccataggacgagacccgagcgtgtgggataatccgtcccagtttgagccagagaggtttttggggaaagatatggacgtgagaggtagagattatgagcttacaccattcggcgccggacgtagaatttgcccgggaatgcctttggctatgaaaacagtgtctcttatgcttgcttctcttctttattcctttgactggaagcttccgaagggtgtcctttcggagggatttggacatggacgagacctttggtctaactttgcataagacccaacccgttacatgccgtacccgtccaagaaacgcgccaatattaattagtcgtggttttataattaaaaataaacagagaaataatctccaaagctttgtttattacccaaaaactatctgttttcggttctagagtttgtttgtttctctctcttgaggtggctagagcttgaagaagtcaaaagtatccatattgatgcctagcttcggtcctcggtttaggctaggaaggaaacgaagaagtttctgcaaaccgatgcagatcatcaatggaataatgaaatgttaattttatcatttactcatataggtttccgcctcattatcatttacttgatgtttctcctaaatcttgtcatttaattgactaaggaaataacgaagaaatctcgtgttacttaaaaaaaaaaaaaaaaaaaagggcggccgctatagaggatccaagcttacgtacgcgtgcatggtacgtcatag

SEQ ID NO: 86048 - DNA, 821 bp, Arabidopsis thaliana columbia
  unsure (1)..(821): unsure at all n locations
atgannnnnnnnnnnnnnnnnnnnnnnnnnnnnnnnnnnnnnnnnnnnnnnnnnnnnnnnnnnnnnnnnnnnnnnnnnnnnnccacgcgtccgcccacgcgtccgatttggtcacgtgagctgcgtcatgccgttaacggaagagaatgtggagagagtgttagacgaagtacgaccatctctaatggccgacggaggaaacgtggcgttgcacgaaatcgacggacttgtggtggttttaaagctacaaggagcttgtggttcgtgtcctagctcatcaatgacgttgaagatgggaatcgagagtcgtcttcgagacaagattccagagatcatgtccgttgagcagtttcttgaatccgagacaggaggtttagagctgaacgatgagaacattgagaaggttctctctgagttaaggccgtacctatccggtactggaggtggggggcttgagttagttgagattgatggttacgtggtcaaggttcgactcactggaccagctgctggagtcatgactgttcgtgtcgcgttgactcaaaaactgagggaaacaattccttctataggtgcagtccagcttctagagtgacattaacctttttattttgtaacttatatacaaggcccatttttgattcaatatattttatttcccattatataattaggacaactaatccaataaccctttttgtttgnnnnnnnnnnnnnnnnnnnnnnnnnnnnnnnnnnnnnnnnnnnnnnnnnnnnnnnnnnnnnnnnnnnnnnnnnnnnnnnnnnnnnnnnnnnnnnnnnnnnnnnnnnnnnnnnnnnnn

SEQ ID NO: 86049 - DNA, 513 bp, Arabidopsis thaliana columbia
acgactcactatagggaaagctggcacgcctgcaggtaccggtccggaattcccgggtcgacccacgcgtgcggatgggtcatgctcgaactcgtaccggtatcatctccgtcgcttttaaattcttcaggtctctgttccctcgccatcaccgtactaacagcatgaagataaaaacaggaacgtttttgggggtttcgatatcattgattcttataaacttagctgcgatcatggaacgtgcagacgagaatctattgccttcggtttataaagaagtgagtgaagcatttaacgcaggaccatcagatttaggctacttaacattcgttagaaactttgttcaaggacttgcatcaccattagcaggagttcttgtcattacctatgatcgtcccattgttcttgcaataggtactttctgttgggctttatcaactgctgcagttggagccagcagctacttcattcaggttgctttatggagagcagtgaatggttttggattggcaa

SEQ ID NO: 86050 - DNA, 537 bp, Arabidopsis thaliana columbia
acgagggatctctctctaattggcgctcctttactaattgccctttaattccatccatcttcggattcttttcaaatcaacaaaaaaagtacaaatcggatccctacaatatcctctccactcttcacaaatccttctccgagatctacaaacgctgtttcattcttccgattacaatggcgacgagaagacgtactttgctcaaggtcattgtcctcggtgacagtggggttggaaaaacctccttgatgaatcaatatgtgcataagaagtttagtatgcagtataaagcaacgattggtgctgattttgtaaccaaggagcttcagattggggaaaagcttgttactttacagatttgggatactgctggacaagagagattccagagtcttggtgctgctttttatagaggagctgattgttgtgctttggtttatgatgttaatgtgtttgaggtcttttgataatcccgaaacttggcatgaggggtttcttaaacgggcaagtccatcagattcaaagacatttccgttt

SEQ ID NO: 86051 - DNA, 513 bp, Arabidopsis thaliana columbia
ggaagtgaaagcattattaggaggcaaaaaattgtcggtccttccaagtgtccagcccttccatgcaatagcatatcctattgaccctattcttgcccttgaaatcagtcgtaaatacgctgcacactgctccataatcgcttctcgttttggactacctccttttacccatccagctgggctccctgtaaaacgtgagggaggatttaagagattaaggattggatacgtgagcagtgattttggtacccatccgttgtcacacctcatgggatcagtgtttgggatgcacaacagagaaaacgttgaggttttctgccatgctctgagtgcaaatgataatactgagtggagacagcgaatccagtcagaagccgagcattttcctggacgtttctgctatgtcatctgatgctatcgccaatattataacccaggacaaaatccagatgctcatcaatctaaacggttataccaagggggctagaaatgaaatatttgccatgcagcctg

SEQ ID NO: 86052 - DNA, 1549 bp, Arabidopsis thaliana columbia
aaactatgtcgattcttctgtatttcttctttctccccgttattttatcgttaatattcatgaagaaattcaaagactcgaaacgaaatcttcctccgagcccaccgaagctaccaattatcggaaacttacaccagcttcgaggattgtttcatagatgtcttcatgatctctccaagaaacacggtccggtgttacttctccgtctaggttttatcgatatggttgtgatctcatcccaagaaacaacggaagaagttctcaaagtacatgaccttgagtgttgtactagacctaagaccaacgcctcatcaaaattctcgcgtgatggtaaagacatcgcctttgcgccatacggggaggtttcgagagagttgcggaagctttccttaatcaactttttcagcacgcaaaaggttcgatcttttaggtacatcagagaggaagaaaatgatttgatggtcaagaaactaaaggaatcagctaagaagaagaatacagtggatttgagccaaacacttttctatctagttgggagtatcatattcagggctacctttgggcagcgtttagaccagaacaagcatgtcaataaggaaaagatcgaagaactcatgtttgaggtccagaaagttgggtctctaagcagctctgatattttccctgctggtgtgggatggtttatggactttgtgtcaggacgacataagacacttcacaaagttttcgtcgaggttgatactttgctaaatcatgtaattgatggtcacttgaagaatcctgaagacaaaacaaatcaagatcgccctgatatcatcgactcgatcttagagactatttataaacaagaacaagatgaatctttcaaactcaccattgatcatctcaaaggaattatccaaaatatatatcttgctggagtagacacaagtgccatcaccatgatttgggcaatggcagagcttgttaagaacccacgggtaatgaagaaagctcaagaagagatccgaacatgcattggaatcaaacagaaggagagaatcgaagaagaagatgtcgataagcttcagtacttgaagcttgtgatcaaagaaaccttaagactacacccaccagcacctcttttacttccaagagagacaatggctgatatcaagattcaaggctacgacattcctcggaaaaccattcttttggttaatgcatggtcgataggacgaaaccctgaactctgggaaaaccctgaggaatttaacccggagagatttatcgattgtcctatggattacaaaggaaatagttttgagatgttaccatttggttctggtcggaagatatgtccagggatagcttttggaatagcgaccgttgaactgggactattgaacttgctttactactttgattggagattggctgaggaggataaagatattgacatggaagaggctggtgatgccacaattgttaagaaagttcctcttgaacttgtcccaattattcatcattgaatgatgttccaactctataaataaaaatgaagttatat

SEQ ID NO: 86053 - DNA, 793 bp, Arabidopsis thaliana columbia
  unsure (1)..(793): unsure at all n locations
agctctcnnnnnnnnnnnnnnnnnnnnnnnnnnnnnnnnnnnnnnnnnnnnnnnnnnnnnnnnnnnnnncccacgcgtgcggaagagagtccggcggagagagaggaaagtgaagaagcaatcgtgagagactctctcgagtcttccctgagtcactcctctcctctcacacctttttgcttcgcgattaagagtcagagagagagagatagtaaacatcgaacgtcttccatttcatcttccttcgattaccttgttagggttttgtattttggcttctggattcttcttcactatgcataagttgagcagaagcaaccgtgacaaacttcagcagttcgtggctatcacaggagctagtgagaagaatgctcttcaggctctcaaagccagtgattggcaccttgaagcagcgtttgatgtgttttacagccagcctcaaccaagaagcaatgctgctgaagtaagacgcttggaggagctctacaatagatataaagacccgtattctgatatgattcttgcggagggtatctcggttctgtgtaatgatcttgaggtggaaccgcaagacatagtcacgttgggtctttcgtggcatatgaatgcttgcaacagcgtgtgagttttccaggcaaagaattttatcagtgggttacaaggcattaggtgtagattcaatcggggaagtttcaggaaaaantgccatttttncgttctgagcttaaangttgccaaaaagtccntgnggtttcaacttttnctttttgggtgccgaaaaangggcannana

SEQ ID NO: 86054 - DNA, 499 bp, Arabidopsis thaliana columbia
aactcattttagggaagagctggtccgcctgcaggtaccggtccggaattcccgggtcgacccacgcgtccgacaggagctagtgagaagaatgctcttcaggctctcaaagccagtgattggcaccttgaagcagcgtttgatgtgttttacagccagcctcaaccaagaagcaatgctgctgaagtaagacgcttggaggagctctacaatagatataaagacccgtattctgatatgattcttgcggagggtatctcggttctgtgtaatgatcttgaggtggaaccgcaagacatagtcacgttggttctttcgtggcatatgaatgctgcaacagcgtgtgagttttccaggcaagaatttatcagtggattacaggcattaggtgtagattcaatcgggaagttgcaggaaaagctgccatttatgcgttctgagcttaaagatgaacaaaagttccatgagatatacaactttgcttttgggtgggcgaaag

SEQ ID NO: 86055 - DNA, 512 bp, Arabidopsis thaliana columbia
  unsure (1)..(512): unsure at all n locations
tggtgtcctgggtcgcgnacttctctggggagttacgangttcaaccgctntgacgttncggagattttggagagggtattnccgttgtaaagncgngcagcttcaggaaatcggggaaaagaatcagtgagcatgcggaaaagttcggctacaccgttgtggagcggtttgttgggcatggtgttggaccngtattccactccgaacctcttatatatcattaccgaaatgatgagcctggactaatgggttgagggacacgccattcccaattggacccgattctcacgattgggacccaccagaatgtgtaacatggcccagacaactggacttactctgacagcagatggtggcgtcgctgctcagtttgagcataccattctgattactagaactggttcagagattcttaccaaatgctaaaactattcacattgatcatttccatttcaccttttatttgctgatcatttaaggtccatagtataaattcattatctttgagacc

SEQ ID NO: 86056 - DNA, 1846 bp, Arabidopsis thaliana columbia
  unsure (1)..(1846): unsure at all n locations
tgcactatacaagactttgacgtcgcatcgccgcgtacgtaagctcggaattcggctcgagaaaaaagcagagcacaaaccagaggaacgacaataatggtgagtcttctatcttttttcttgcttctactcgtccccattttcttcttgttaatcttcaccaagaagatcaaggagtcaaaacaaaatcttcctcctggcccagcaaagcttccgatcatcggaaacctacaccagctccaagggttgcttcataaatgtcttcacgatctctccaagaaacacggacctgtgatgcatctccgtctagggtttgccccaatggtcgtaatttcatcaagtgaagcagctgaagaagctcttaaaacacatgaccttgagtgttgttcaagacctatcactatggcctcaagggttttttcgcgtaacggtaaagacatcggatttggggtttacggtgatgaatggagagagctgcgtaagctttcggttcgcgaattctttagcgtgaaaaaagttcaatccttcaagtatattagagaggaagagaatgacttgatgatcaagaaactgaaagaattggcttcgaagcaatctccggtggatttgagcaaaatcctctttggtctcactgcgagtatcatattcagaaccgcctttggacaaagtttctttgataacaagcatgtcgatcaggaaagcatcaaagaactgatgtttgaatctctgagcaatatgacttttagattctctgattttttccctactgctggtcttaaatggtttataggctttgtgtcaggccaacataagaggctttacaacgtcttcaacagggttgatactttttttaatcatatagttgatgatcatcactcgaagaaagcaactcaagatcgtcctgatatggtcgacgctatcttagatatgatagataatgaacaacaatatgcatctttcaagctcaccgttgatcatctcaaaggagtcctctcaaatatatatcacgctggaattgacacaagcgccatcaccttgatttgggcgatggcagagctcgttagaaacccgcgggtaatgaagaaagctcaagacgagatccgaacttgcattggaatcaaacaggaaggaagaatcatggaagaagatcttgataagcttcaatacttgaagcttgtggtgaaagaaaccttaagactacacccagcagctcctcttttacttcctcgagaaacaatggctgatatcaagattcaaggctacgacattcctcagaagagagctcttcttgttaatgcatggtctataggacgagatccggaatcctggaaaaatcctgaagagtttaacccggagaggtttattgattgtcctgtggattacaagggacatagctgtgagttgttaccatttggttctggtcggagaatttgtccaggaatagctatggcgatcgcaaccattgaattggggctcttgaatttgctctacttctttgattggaatatgcctgagaagaagaaagatatggacatggaagaagctggtgatctcactgttgataagaaagttcctcttgagcttctgccagttattcgcatcagtttgtagatgagcttggagaaaaacatatggtatgcttattgtataaaccagaacgctttttcttgtttattttgtttttttgaatctaatgttaaattatattcaaaaaaaaaataatcgttgttacaatcagaactctttttttttatctnnnnnnnnnnnnnnnnnnnnnnnnnnnnnnnnnnnnnnnnnnnnnnnnnnnnnnnnnnnnnnnnnnnnnnnnnnnnnnnnnnnnnnnnnn

SEQ ID NO: 86057 - DNA, 637 bp, Arabidopsis thaliana columbia
acgacaaatctcctcctttcgtacataaaacaaagaaaccctctctttttctcatcttcttcaattttcaaaactcagaatccttcttcatcgtcgctacatttttctgtgcttctcggcctcgcctcccgaacaacaagactcaaaaggtagaaagaatcggacatggaagaagcagttgtaacgaggtattggtgtcatatgtgttctcaaactgtgaatccagtcatggaagctgagatcaaatgtcccttttgtcaaagtgggtttgttgaagaaatggaagatgacgacgatcatgattcttctgatccggctgatgttagagcaaacaactctctttgggcgcctatcttgatggaacttatgaatgatcctgtgcgtcgtaggagaaaccagagtgttgagtctgttgaagataatcaaaacgaggtacagaccgagaacaatgaagacgatggagaaaatgatttggattggcagcttcaagagattctcaggagaaggagaagacattccgctgctgttttgcagttgcttcaggggatacgagcagggttgtctgtagaatctgagagtactggtaatggaggtaataatccgggacgggtgatcttgatcaatacctccaatcaga

SEQ ID NO: 86058 - DNA, 561 bp, Arabidopsis thaliana columbia
  unsure (1)..(561): unsure at all n locations
ttggncccaacggnccttaactttgggaaccnttttccagnttnccctngaaatttttcccgggnccnaaattttgggaacctttaaagggntccccccggttcggacccaattccgcgaaatttccggggtgccctcacccttttcgcggcttcccggaaaagggaaagggggccaccggttccaaaggtttgggaatcagggatcggattacccttaagccagtggccggttccttctggggaaccaaattacgcaaggacatttgctttcttctacacattgggattgcacggtccttgtcttcacttgtctctacccgtatgtctgcttacagttatctcagccatggagcagaggagactctaatgacagaagcaaccacaaacccttcctcacggtctttaagctctcaccctagggacttattcgtttttggtcgttatgttctttcttgtccttgtagtgttccgtgggcaattctaaaacggttgaatatttgtacagagggatccgaatcactcgatacatatataaagccacagaaaaaacttccttcag

SEQ ID NO: 86059 - DNA, 573 bp, Arabidopsis thaliana columbia
  unsure (1)..(573): unsure at all n locations
accccngnttttccaagtggcccntggnaatttcccnggggaattccctcnccttnaanggcctccgngntttaaattttgcngggcaatttttgggcccttgaccncaattncccatggcctcnccccacngaattccggnttgaccattcttaggccccattcttcggtagtgactcaagacttttctcccttttccaaccaggcattnggtactacaagatccttggaggcagatcatattattgtccattattaacccgggaccgagccangtntggaagtccgatttgatctacgacagtatcttttgagcggtgcaggaaaccttgttttcagggaaggctcctcaggccttgccttacggagcttcacccccaggaaggaggaggcccaggaggagtaggggagccccaaatgtgatcaacaaatgtatagcttcgtttgtaacaagaagaatccccaaagctcgagatttttggtgtctcataactctgaccagcgtcttaagattactggattaggatctggaattggcagtgttcactatttatgataatatcctattcgaag

SEQ ID NO: 86060 - DNA, 351 bp, Arabidopsis thaliana columbia
  unsure (1)..(351): unsure at all n locations
gggtcagcccacngngtcctnacaggcatttaaagaagggaatgcaacggttgatgtattggacatgcgtttatttgttggccattcacatgctaattagaagatcgtactagaagcaaaaacaaattgagagagcttctaagtgtaaatagagagtccactaatgcggtccaatttttcaacgagaagaattaaattattctcgaaagtgtctcagatgattctttaaaaggggaaaaaaacactcagaaaaattgagaagggaatgcagtactgcaaagcgaatcctatgtataaaaaactgacgattcatattatagaactttatttgtatttgtggcnttnnaaaaa

SEQ ID NO: 86061 - DNA, 417 bp, Arabidopsis thaliana columbia
agatcagctgggctatacggatcgttgattgtggacgtggctaaaggaaagagcgagagattgagatacgatggtgagtttaatctcttactcagtgactggtggcatgaggctattccctcccaagaactcggtctttcttccaaacctatgcgctggatcggtgaagctcagagcatattgataaatgggaggggacaattcaattgttcattagcggcgcaatttagcaacaacacatcattaccaatgtgcacgtttaaagaaggtgatcagtgcgccccacagatactcccacgtggagccgaacaagacttaccgaatcagactctccagcaccaccgctcttgccctccctcaactttgggctgtttccaggggccacaagctagtggtggtcgaagccgacggcaacta

SEQ ID NO: 86062 - DNA, 299 bp, Arabidopsis thaliana columbia
  unsure (1)..(299): unsure at all n locations
actnccagggcagcccacngcngcctnagactgcagacggtgagcctcacagatttatggagcaacttcaacagctgagaaacaaagttgtttgaaacctcaaattcccaattactaggatgaggatgaattttctgttacattttactaccccttttgagcctgaaatcctaatagatttttttccttataaaaataaaagatgcaatattttaaggtcattcaagggatgtggcaattatgtgaaaaaacttgtactctaattagatatataattatacttaaacannaaaaaaaaa

SEQ ID NO: 86063 - DNA, 537 bp, Arabidopsis thaliana columbia
  unsure (1)..(537): unsure at all n locations
aanccgctccnaggggnttccccaatcanctttcnaagtnngctgcncccncaagtatgncctcatcccagnttggcaacatttcccggntcncaatatatccntcatgccccccagactctccaagtcgcttagggcagcaacctcctcaacggtataatcatgggagaccaaatgctggaagaactatggatcggaatcacatgaacgctcagcttcctccttccaatacaaattctgggggtcaacaacgttcacccagaagtagctcatatacaaatggtgtcccttggggtcgtaggactaacaatcatgtcccgaatgttccatcgacgtcccatggaagggtagactacggaagtattgcttaattctgcagtctttcttctcatttattttgttctttcccttggtgtgcaatcttcttgttagaagtgtgggaacaaagttgtactggggcaaggaacaaacttagttcatggcttgtgggcttctgatcggaccgngcttttcctttgggctttttgccaaataacc

SEQ ID NO: 86064 - DNA, 1692 bp, Arabidopsis thaliana columbia
caaccaacaaaaactacaagacgataacaacaaaatgtctcttttctccttccccatctccactgagttgcttccatggcttctcctacttttgattcctccacttcttatcttctttcttcttcgttcccctaaaaatcttccaccaggtccaccaagattacctatcttaggaaacatccaccagctcggatccctccctcaccgcagtctcagagatctctctctcaaatatggcccagtcatcaccgtctatctcggcagcgtccgtaccgtggttgttcactctccggagacggcggaggaagttctaaaacttcacgactccgagtgttgtactcgtccaaagctatctatcaccaaaagctttttctatgatggacttggtctagggtttactaaatggggtgattactacagagatgtgcggaaactctgtgttcttgaacttttctccgttaaacgagccaactcgttccggaacataagagaggaggagctgagtcgactcgttaactcgttttctgactcggcgtcatctggatcttccgttgaccttaccgcaaatttggctaagttcgtcgcgagctttacgtgtcgaatggcgtttggattgagttttcaaggaagtggaatggataacgagacgtttctggagctgttcacggaggcgaacagagtgatcggaaaattcgcggcggcggatatattccccgggtttggctggatcttggatcggatcagtggtcttgattctagccggaggaagagttttcaagatcttgatacgttttaccagaaagctattgttgaccatcgggagaagaagaaaactgaagaccgtgaagatctcattgacgtcttgctcaagttacagagtcaagaaaccaaacttggttcttcaagaatcaccgatacacatatcagagctattattatggatttgtttgtagcaggagtagacacatctgttatcactttggattggacaatggcagagctttcaagacatccaagagtaatgaagaaagtacaagccgagattcgtgaacacgtaggagacaaaggtatagtgacatacgatgatctcgaggctctagtctacatgaaaatggtgatcaaggagacttggaggttacacgcaccgagtcctattctgattccaagagaagcaatgactaacttcaagatcaagggttatgatatttaccctggaacgcgtattcatgtcaatgcttgggctattggacgtaaccctgatgtatggaaggatcctgatgagtttataccagagagatttgttgatagcaatgtggaaactaaagggacaagttttgagctgttgccgtttgggagtggacgcagaggttgtcccgcaatgtacgtgggattaagtacggtggagtacacattggcgaatcttttgtatcattttgattggaaagcgactgaggaagtgagtgttgaagaagcacctggtctcactagccacaggaagcatcctcttcaccttgttcctgttaatgtcatcaaccgcaagctttagagtgcggaaagcacaaacatttagttttcgacgaataaggcttaataatgtttctgtttattgaatagtcgatactttctgtttagctttcaaacaataattctcattacatgaataaaactttggcttatctatctccacacaaa

SEQ ID NO: 86065 - DNA, 467 bp, Arabidopsis thaliana columbia
  unsure (1)..(467): unsure at all n locations
cagggacttacgtctgaaacgctattttnctgagcggattaacagagaactaccagaaccaatctcggggcttgctgaggaggttatgtatgatacagttgaagctataaacggagacccactgagctctatctttgtngtcgacactttgattgaaaacgaacactatggaacaagatgtacgacagcattggttgtgagacgcaccatgcaagtgaggttctttgagaggtacagggcgagatttaatgatgactggaacgtgcacgacttccggttcaccatctagttacaaggagcattccgcagcatccgaatattattatctatactaaacaatcttgttgatgctgtaattaattaataggtcataatctttctcggttcaggggaacctattcaccttgggcacaggtatttatctctgggctatgaaacaaataaataaaaagtaggtggttttctgg

SEQ ID NO: 86066 - DNA, 933 bp, Arabidopsis thaliana columbia
aaaccactgcgaaaaatatgataagccttaggtttcaaccaagcaccaccgtcggtgttttatcggcgtcagtgagccgcgccggttttatcaagcggtgcggttcgactaaaccgggaagggttggccggtttgttacaatggcgacggcggcgagtcctcttgaaatctgcgttaaagcttctatcaccactcccaacaagctcggagactgccctttttgccaaaaggtgttactgacaatggaggagaagaatgttccttatgacatgaaaatggtggatttgagtaacaaaccagaatggttcttgaagattagtccagaaggtaaagtcccagttgtgaagtttgatgagaaatgggttccggattcagatgttataacacaggctttagaagagaagtatcctgagcctcctcttgctaccccacctgaaaaggcttcagttggatcgaagatcttttccacatttgtcgggtttctgaagggcagaagattcaggggatggaactgagcaagttttgttgggtgagcttacttcattcaacgattatatcaaggacaatggccctttcataaatggagagaagatctcggcagcagatttgtccttggcaccaaagttataccacatgaagattgcattgggacattacaagaactggtctgttccagattcacttcctttcgtcaaatccaacatggagaatgttttctcgagggaatcattcacgaacacacgggcggaaacagaggatgtaattgctggttggagaccaaaggttatgggttaagagattttgatgttgacctcaagcttccttgtcttctactaaatgtaaaaaacataataatcaaatcttcttcaactgttaccaatgatatataccttgaatccttgatcgcttatatgatgaaaactatattgtgtc

SEQ ID NO: 86067 - DNA, 675 bp, Arabidopsis thaliana columbia
  unsure (1)..(675): unsure at all n locations
atgtctnnnnnnnnnnnnnnnnnnnnnnnnnnnnnnnnnnnnnnnnnnnnnnnnnnnnnnnnnnnnnnnnnnnnnnnnnnnccacgcgtccgtatttttaaaatgaaaattttaatatagaaaaatatattcttaacaatttcagatttttgtgataaaaaccgaatctagtttgaattagtatgatacggttttggactcaacatcgtttttgttatgaagacgcaatataacttcatttacatttcttaaaggaagtttaattttggtgtagtttttcttcatttattttggttgctcttcagttttgttattggttttttaagatgtgaatgtaaaaatattatttgtaattagaaaaaaaaaactatttaaactgaattaaaatcatccagttggccttttatgaatttcactacttaattaagattgaaccaattttacttaattaagattgaaccaatattatttggttagcctccctagtgaaacattttcataatgaaatgattgttacttaacattgtgaataaatatgttatgaatgtgagtagggacacgacgtcgttgcgatggcaagtcctgaacgcttcgttgttggattggatatttccgaaagcgcactcgcgaaagctaatgagacttacggctcctcaccaaaggcagagtacttta

SEQ ID NO: 86068 - DNA, 1006 bp, Arabidopsis thaliana columbia
  unsure (1)..(1006): unsure at all n locations
ccaaccctgaaacatggctggtctttctttctcgtctttctatcaaagtgtcattaatagaaagacgagaaagaaagaccaaccctgaaacatggctgaagaacaacaaaactcagatcagagcaatggtggaaacgttattccaactcctgaagaagttgctacgttcctgcacaaaactgttgaagaaggtggatgggaaaaatgttgggaagaagagataacaccatgggaccaagggagagccacacctctcattgttcatcttgtcgacacttcctcactcccacttggccgtgctctggtccccggctgtggtggaggacacgacgtcgttgcgatggcaagtcctgaacgcttcgttgttggattggatatttccgaaagcgcactcgcgaaagctaatgagacttacggctcctcaccaaaggcagagtacttttcgttcgtgaaggaagatgttttcacgtggcgtcctactgaattattcgacctcatcttcgattatgtgttcttctgtgccattgaaccggagatgagacctgcatgggctaaatctatgtatgaactcttaaaacctgacggcgaactcataactctcatgtatccgattaccgaccacgttggtggacctccctacaaagtagatgtctctaccttcgaagaggtgttggtgcctataggatttaaggcagtgtctgtcgaggagaatcctcacgccattccaactcgtaagggcaaagagaagctgggaaggtggaagaagatcaattgatccctaagaaagagatcttactgtttggtaagagtgttatatgtgtgatctacaaagagtaaaatgattatcttcctttatttgctctatgtatgtttcaatgttgatccttattatgagtaacaataatgtttattatcaaaaaaaaaaaaaaagnnnnnnnnnnnnnnnnnnnnnnnnnnnnnnnnnnnnnnnnnnnnnnnnnnnnnnnnnnnnnnnnnnnnnnnnnnn

SEQ ID NO: 86069 - DNA, 557 bp, Arabidopsis thaliana columbia
  unsure (1)..(557): unsure at all n locations
tgagaaccccttcaacaaaggaatagtggggaactttatggaagttttctgcacaaatgttgccgtatctcagaacagtttcagagaaaaggtttcaaaggagccagcaataccaccaaggacagtaaatggagggatgtcaagcccgagcttacagaaagtttccaacgacatagagatggggagaaaaccagtgtggcacgagacagtagaagaagagcccggtgacatcgaaaaggacatggaagcaggggttgcatcacgggatttgagcagaatgcttcctccagaagaatctgaaggacgagggattatgcattcaagagagtcaagcaggggacgcgggattatgcattcaagagagtcaagcaggggaagaacaggagggaccttgggaattgtcaagccgtgtaaccaaggattttagaaccacagatgagtctgtgtcaaaagtcggtgaaacagccccagcctcaacaattgtgcctcaaggtttcctgtgggattttttccgnccanttnggnaccngcngttttggggtttcnccggttaacct

SEQ ID NO: 86070 - DNA, 444 bp, Arabidopsis thaliana columbia
  unsure (1)..(444): unsure at all n locations
ggtttacaagaaggttttggtggttcacatttcgctatcgctttggttctcaccaccattgttatgtatgatgcaactggtgtaaggttacatgctggacgccaagctgaggttctaaatcagattgtgtatgaccttcctgcagagcatcctctggctgaaaccagacctttgcgtgaacttctaggtcatactcctccccaggttattgctggtggaatgcttggaatatctacagcagttgttgggtacttagtcatcttgttagccaagtagcttaagcngggaacagcaaaatctcgccttttcngctccattggggtggcnaagncgctgccaagggantttaaaagnnagccatggcatgnaaatagaattttggnattgggctaaattcccccgggtttttttngccgncccggtcctggcntngccaaaaanttt

SEQ ID NO: 86071 - DNA, 490 bp, Arabidopsis thaliana columbia
acccacgcgtccgataaaaaaatggcctcaaagagctcaaccaccatttccctcatcatcatcctcctcatcagcctcgcagaagcaaacctcttaagctcgcctacaccgaccaacaactttggctcatgtcccagaaacccattgcaactaggcgtatgtgccaacgtccttggcctagccaatgttacagctggcgaccccagagcacgacagtgttgcactgccctcaatggcctcactaatgttcaagtaaccgattgtctctgctttatcttcaggccgattccgttggttttcggtattgatgtggccgttagagaaatcttttttgcttgcaatagggtttttcctatcggtttccagtgtccaccaccacagtaactactacttaattcccctaaataagagccctatccggtgtttccttgcactataagtttgctggtaccaaaagtatgggtttatctattaatgttttacagtgttg

SEQ ID NO: 86072 - DNA, 640 bp, Arabidopsis thaliana columbia
  unsure (1)..(640): unsure at all n locations
cacagagtttggtgtgtctgcacatgaccctggtttcaacacgtctttccgtgacatgatgttgaacacagtgtacaagatgaccctcaactcaacaaggaaaggaggggctggtgccgggagtctggtctggcaggtcttccctcagggggcagagttcatggatgacggctatgcggtttacctcacaagagctcacacagcttcaaaaatcatatctctgcagtcaaagcgactagccatcttcaactccttgtgtagctggagatgcagatggggatgcaagaaaaagaatcagattgctcttgatgccctcctctcgcacggcgggctttaagtatcacaatcttttgtggattacaactgcgtgaatacaaaggtcagtgtattcaagtttttaacaaattttttttttgtaaaggatcagggtggttggtttaaacattcccaaccttggagggggaaaacaaaaaaaaaaggggggncnggnctngagggtcaagctttcgancggggnatnggcgnaaagcnctccaatgngcccnaatcaantcctggnggngtttaangnnggatggaaccggggccacttatggttgggatccttccaccggnatcgaagnccccggtnctcaaagtg

SEQ ID NO: 86073 - DNA, 1620 bp, Arabidopsis thaliana columbia
gaaaaacaaaaatgacgatcttgctctgtttcttcttagtttcacttcttactatcgtatcatcaatctttcttaaacagaataaaacctcaaaattcaatcttcccccaagcccttcaagccttccgatcattggaaacttacaccatctcgcaggattgcctcacagatgttttcataagctctctatcaaatacggacccttggtctttcttcgtctcgggtctgttccggttgttgtgatctcatcgagtgaagcagctgaagcagttctcaaaaccaatgacttggaatgttgcagccgaccaaagacggtggggagcggaaaactctcttacggtttcaaagacatcactttcgcaccatacggtgagtattggcgagaagtgcgaaaactcgcggttatcgagctttttagctctaaaaaggttcaatctttcaggtatataagagaggaagaggtcgacttcgtggtcaagaaagtgtcagaatcagctttgaagcaatctcctgtggatttaagcaaaacctttttctccctcaccgctagtatcatttgtagagtcgccttaggacagaatttcaatgaaagcggctttgttatcgatcaagacaggatcgaagaacttgttaccgaatcagcagaagctctagggactttcactttctctgacttcttccctggtggacttggaagatttgtagattggttgtttcaacgacacaagaagatcaacaaagtctttaaggaacttgatgctttttatcagcatgtgattgatgatcacttgaagccagagggaagaaagaatcaagatattgtcaccttgattttggatatgatcgataaacaagaagattcagattctttcaaactcaacatggataatctcaaggcaattgtcatggatgtatttctcgcggggatagatacaagcgcggtaacaatgatttgggcgatgacagaacttattagaaaccctagagtgatgaagaaggctcaaggaagtattcgaaccactctgggtctcaagaaggaaagaatcactgtagaagatttaggcaaagttgagtatttgaaccacatactcaaggaaacttttaggttacacccggcacttccatttgtggtgccaagggaaacaatgtctcacatcaagatccaaggctatgatattccaccgaaaacacaaatccagcttaacgtgtggacgatcggacgtgaccctaagcgttggaatgaccctgaagaattcaaccctgaaaggtttgcaaatagctctgtagattttagaggacaacattttgacctattaccgtttggttctggtcgaaggatttgtcccggaatgccaatggcgattgctagtgtggaactagcattgatgaatttgctttattattttgattggagtatgcctgatgggactaaaggtgaagacattgatatggaagaagctggtaatatctctattgtcaagaaaatacctcttcaacttgtgcctgttcaacgttattgatgagcaataatataagctcgataacatggaaagtgtatgaagcaaaaaacataagattctttagattttgttgtgttatataagaaagaaatgttccaat

SEQ ID NO: 86074 - DNA, 501 bp, Arabidopsis thaliana columbia
agaaacctgggcaggacccacgcgtccgaataaatatcacttgttaaatggcctataccgaaatccaatccacaatgattttgctacacagaaactagcaactaaaaagaaaagtaagtggtcgaccatcgatcatggaccagcctcacgcgcttctagtggctagccctggcttgggtcacctcatccctatcctggagctcggcaaccgtctctcctccgtcctaaacatccacgtcaccattctcgcggtcacctccggctcctcttcaccgacagaaaccgaagccatacatgcagccgcggctagaacaatctgtcaaattacggaaattccctcggtggatgtagacaacctcgtggagccagatgctacaattttcactaagatggtggtgaagatgcgagccatgaagcccgcggtacgagatgccgtgaaattaatgaaacgagaaccaacggtcatgattgttgactttttgggtacggaactgatgtccg

SEQ ID NO: 86075 - DNA, 658 bp, Arabidopsis thaliana columbia
ttttttttttttttttttgctgaaattttcttcaatttcgagtttttctttgtgggtttgtttagctattcaaagctttcaattgaagtcgttctctttctgtgttttctagttggtggtggatttttgattttgagttaaggaattgagtagcaagaaggtgagatatggagcacggttcgttcacgaatgttagtcatgcttcgtttactttatcggaagaagatcacacacttgctaatgctgttagattcgtcttaaaccaagatcccagagtaaccgtggctgcatacaccatcccacatccttcccttgaacaggtcaatatccgggtccagacaacaggtgatccagcaagagaggtttttaaagatgcatgtcaagagctcatgcaaatgaacagacatgtgagaagcgtttttgataaggctgttgctgagtataaggatgaacaaaagcgtaaggaggaggctgaagaagaagagcttaagaggcagagggatctatttgggtccatggacattgaaaacaactgataaccattgtattctcctatggagtttatactatttttatcttaaatccagattcgtccttcaaattgactcgtcaaattcataatccacaccaaaatttaaccaaaaaaaaaaaaaaaaaa

SEQ ID NO: 86076 - DNA, 1580 bp, Arabidopsis thaliana columbia
aagaaaccaacattagagttgttctctactccattttctctctcatcttcttgataatctctttcaagttcttaaaaccaaagaaacagaatcttccaccgtctccgccgggatggttgccaataataggccatctccgccttctgaagccacccatccaccgcaccctccgctccttctccgagaccctcgaccacaacgatggtggcggcgtgatgtccctccgacttggatcccgtctagtctacgtggtgtcgtcacataaggttgcggcagaggagtgctttggcaagaacgacgtcgttctagctaaccggccacaggtgatcatcggaaaacatgttggttataacaatgcaaacatgatcgctgcaccttacggtgatcactggcgtaacctccgtcgcctctgcactatcgagatcttttcaacacaccgccttaactgctttctttatgtccgtaccgacgaagtacgtcgccttataagccgcctctctcgtctcgcaggaaccaaaaaaactgttgtggaattgaaaccaatgcttatggacttgacattcaacaacataatgagaatgatgaccggaaaacgatactacggtgaagaaacaaccgatgaggaagaagcaaagcgtgtccgtaagttggtagcagatgttggggctaacacgagttcaggcaacgccgttgactacgtccccatcctcagactgttttcaagttatgaaaatagggttaaaaagttaggagaggagacagataagtttttacaaggtctcattgacgataaacgtgggcaacaagaaaccggtactacaatgatcgatcatttgcttgtcctccaaaaatctgatattgagtattacactgatcaaatcatcaaaggcatcatactgataatggtaatagcagggactaacacatcagcagtcactctagaatgggcactttccaatttgcttaaccatcctgacgtaatatctaaagcgagagacgaaatcgataaccgggttggtttagaccggcttatcgaagaagcagatcttagcgagctaccatatctaaagaacattgtccttgagacccttaggctacacccagctacaccattgctagtcccacacatggcatcagaagattgcaagataggatcctacgatatgccacgtggtacaacgttgttggtgaatgcatgggccatacatagggatccaaacacgtgggatgatccggatagctttaaaccagagcggtttgagaaagaagaggaagcacaaaagcttctggcgtttggattaggtagaagagcgtgtcctggatcgggtctggcccaacgaatcgtgggactagctctcgggtcattgatacaatgctttgaatgggagagagttgggaatgtggaagtggatatgaaggaaggagttgggaatactgtacccaaagcgattcctttgaaagctatttgcaaagctcgtccatttctacataagattatttcctaaaattgttgaaactacgaataaaagatgtgtgacatgttaatgcaaatcaatgattctctctaaaaaagaaaaaag

SEQ ID NO: 86077 - DNA, 593 bp, Arabidopsis thaliana columbia
acccacgcgtccggctgctgctgctgctccagtgagtgctcctgtgacagctaaccaattactggcaaatggtggcgggcttgctgccatgccaggtgtccttccggttactgttcctacccttcctagtgaaggggcaggccgtgctgcagccatggttgctgccatgaatctgcaacataatctggcaaagattcaagctgatgcaatgcctgagcactatgaagcagaacttgaaatcaatgacttcccacaaaatgctcgttggaaggtcacccataaagaaactttgggtccaatatcagagtggactggagctgctattaccaccaggggtcagttttatcctacaggacgtataccgggacctggggaacggaagctgtacttattcattgaagggcctagcgaaaaatcagttaagcacgcaaaagctgaactcaagcgtgttcttgaagacattacgaatcaggccatgtcctcacttcctggaggagcatccgggagatactcagtcctttaatgaaagcaacattgaggtgtgtgtttataaggggttcaaatcactgagagttttattaaacaagtattat

SEQ ID NO: 86078 - DNA, 436 bp, Arabidopsis thaliana columbia
ggagacgagagaaagagaaggtaatcggccacgatgacgatggcgacgcctttcagtggggctgcgaactctattgtggcggcgaggaccgttctgataacgggagtgagcaaaggtctgggaagagccctagctctcgagctggccaagaggggtcacactgtgataggatgcgctcgtagtcaagagaagctcaccgctcttcaatcggagctttcctcttcgaccaatcatctcctcctcaccgctgatgtgaaatcaaacagcagtgtcgaagaaatggcacacacaattgtggagaagaagggtgtcccagatatcatagttaacaatgctggtaccatcaataagaacagcaagatttgggaagtctctgctgaagattttgacaatgtcatggatacaaacgttaaaggagttgcaaatgtgctgcgcc

SEQ ID NO: 86079 - DNA, 390 bp, Arabidopsis thaliana columbia
ctctcttcttccttctccagttactttggtctccgccatggctacacagagtttactttcctctttcgtcacttgactatgactgacctaccatagttagttagatagggagagatacgaagaccaagaagatattttctcagcttggtttctcttatatccttctgggtttcgcaaaactgcaagcaaaattgtctctttttacgatttgcggcggcgttagggtttcgtttagattttgtgattcgtgagtgtgttcacgctttgggaggaagcagttatggtgaggaaacatggttggcaacttcctgctcacaaatttcaggtggttgcgattacggtgttctgcttattgagtgtagcatactatgcgtttttcgctccttttgt

SEQ ID NO: 86080 - DNA, 504 bp, Arabidopsis thaliana columbia
  unsure (1)..(504): unsure at all n locations
gaaaattattataattaccagattttttatctatcgtcgaacttgggactgagaaagtagcagcttcgtttgcttcctctgatatttttctacactctctgtctctctctaaagatgaattgtcttcagaatcttcccagatgttcagtctcacctctgctgggattcgggtgcattcaaagagatcattcttcttcttcttcttctttgaagatgctaatatcgcctccgatcaaagccaatgatccaaaatctcgacttgttttacattatcagagtcaaaatccagctcagagatgagtggtgtttgcaaaggatgaagagaaaatctgatgaatatagccaagacatgactcaagctatggggtgctgtttctaacttaccaggcacgagttagggatgaactacaaactttatttcgtccagatctaatttgttgggtccnggctttcangancccctnangatgttnncaaagcttnggaaaaattggggtnaaaacc

SEQ ID NO: 86081 - DNA, 785 bp, Arabidopsis thaliana columbia
  unsure (1)..(785): unsure at all n locations
nnnnnnnnnnnnnnnnnnnnnnnnnnnnnnnnnnnnnnnnnnnnnnnnnnnnnnnnnnnnnnnnnnnnnnnnccgagcgtgcgcccacgcgtccgcggacgcgtgggtttacatgcagtatcagagtcaaaatccagctcagagatgagtggtgttgcaaaggatgaagagaaatctgatgaatatagccaagacatgactcaagctatgggtgctgttctaacttacaggcacgagttaggaatgaactacaactttattcgtccagatctaattgttggatcctgcttacagacccctgaagatgttgacaagcttcgtaaaattggagttaaaaccatattttgcttgcaacaagatccagacctggaatattttggagtagacataagcagcatccaagcctatgctaagaaatatagtgatattcagcatattcgctgtgaaattagagactttgatgcatttgatttgagaatgcgtcttccagccgtggttggtactctttacaaagctgttaagggaaatggaggggttaccataatgtgcacctgcactgctgggaatngggaggggctcctgctgttgcggttgacatacatgttccttgggtnaaaggctataagctttttggagctcataaaattccttttgggcaaaaggcgggntttccgagnttggttctttcggaaatnaccaattgnttntttccaggccnangggggaggcttttccntgcnctaaganaggggtncccggggaattttgcctcatggtgggcaggt

SEQ ID NO: 86082 - DNA, 637 bp, Arabidopsis thaliana columbia
  unsure (1)..(637): unsure at all n locations
tatacgactcatatagggaaagctggtacgcctgcaggtaccggtccggaattcccgtgtcgacccacgcgtccgtacggctgcgagaagacgacagaagggcacggctgcgagaagacgacagaagggtacggctgcgagaagacgacagaagggtacggctgcgagaagacgacagaaggggggatttttcaggaatttcattttcgtgagcttacttgttcgttcatttaaagaggtggaatttgatttatatgaattttgatttctgggtttacgaaattgatcgggttctgggttggaacttgaagttatgagcattcttcgagctatctgtagaccatactctgtgttctcttcgattgtgtgttgtagtagacatcaaagtcgatcactttttagggtttcgattaaaaacgtcgcctttagaacccagagttcgaattcgtcttggtttaggtctaaaatttcgaatctttggtttcgtttgaatcagaggaagactctagttagagcatccgaattngagcccaggggaatctnccttacggtactcncggatttgggtagaaatcccagggganggcccagtttaaggntgcnatnccagnntttcgcccanattttnnnaccccgg

SEQ ID NO: 86083 - DNA, 580 bp, Arabidopsis thaliana columbia
  unsure (1)..(580): unsure at all n locations
gaaatgagaaaattcaattgaagaaaagagtaaagaagaagtctcttgttcggttggatttttcaggaatttcattttcgtgagcttacttgttcgttcatataaagaggtggaatttgatttatatgaattttgatttctgggtttacgaaattgatcggtttctgggttggaacttgaagttatgagcaatcttcgagctatctgtagaccatactctgtgttctcttcgattgtgtgttgtagtagacatcaaagtcgatcactttttagggtttcgattaaaaacgtcgcctttagaaaccagagttcgaattcgtcttggtttaggtctaaaaattcgaatctttggtttcgtttgaatcagaggaagactctagttagagcatcgaattggagccaagagaaatctccttacggtactctcgcgttgggataggaaatgcagaggnagnaccagattaaaggtagcatacagaagnttagcccaaattctantccatcctcatngtttatnattggaaagggggccncttnaagaagnaggggcancagangcangttcnttaagntncagnct

SEQ ID NO: 86084 - DNA, 523 bp, Arabidopsis thaliana columbia
  unsure (1)..(523): unsure at all n locations
tcacacgcctctcacgttacacacaaacctccaacgaaagcaacgatttcactcacatcgagctagaaccgctcttatctgattgtttttgaaattgtgaagtcgatgatgctcgccggaactgagacctccgctgtgacattagagtgggcgatggcgaatctactgagaaatccagaagtactggagaaggcgagatcggagatcgatgagaagatcggaaaagatcgactaatcgacgaatcagacatcgcagtgcttccttacctccaaaccgtcgtctccgaaacattccggctatttccggtggcgccgtttctaatccctcgatcaccgacggacgacatgaaaatcggaggttacgacgtcccgcgagatacgatagtgatggttaacgcttgggctatacatagagatccagagatttgggcggacgcgtggnnnnnnnnnnnnnnnnnnnnnnnnnnnnnnnnnnnnnnnnnnnnnnnnnnnnnnnnnnnnnnnnnnnnnnnnnnnnnntcat

SEQ ID NO: 86085 - DNA, 608 bp, Arabidopsis thaliana columbia
  unsure (1)..(608): unsure at all n locations
cgccatgtatagcggcgctaatcattccgctgattacttaccaatactaaaactattcggaaacaaattcgagaaagaagttaaagctataggcaaatcaatggatgatattttgcagcgtttgttagatgaatgtagaagagataaagaaggtaacacaatggtcaatcatttgatctctctacaacaacaacaacctgagtattacactgacgttatcatcaaaggccttatgatggtaaaattctataaacttctgtgagatttcaatgaagtgaattgtgagattcggttttaacccggattgtttttgcaaattgtgaagtcgatgatgctcgccggaactgagacccccgctgtgacattagagtngggcnatggcggatccactgggaaatccagaagtaccggngaaggcgagatcgggntcgatgagaagatcggnaaagatcggcctaancgccgatcagncatcgcagngnttccctacccccaaaacggcggcncccgaacatcccggnanttccnggggggcggttcnaancccncngnaccggcggcggatgaaccgggggtcncgnccccganacgtnggtggacccctngga

SEQ ID NO: 86086 - DNA, 1652 bp, Arabidopsis thaliana columbia
cacaagtagaaaaaaacacaaacatcctgaaactagaagagagagacaaaatgttatacttcatccttctccctcttctatttcttgtaataagttacaaatttctctactccaaaacgcaacgtttcaaccttcctccaggaccaccgtcacgacccttcgtcggccatctccacctcatgaaaccgccgatccaccgtctcctccaacgctactccaaccaatacggcccaatcttttccctccgtttcggctcccgacgcgtcgtggtcataacatccccttctctcgcccaagaatccttcaccggccaaaacgacatcgttctctccagccggccgctccaactcaccgccaaatacgtcgtatacaaccacacaaccgttggtacagctccttacggcgaccactggcgtaacctccgccgtatgtgctcccaagagattctctcctctcaccgtctcatcatcttccaacacatccgcaaagacgagatcttacggatgctcacacgcctctcacgttacacacaaacctccaacgaaagcaacgatttcactcacatcgagctagaaccgctcttatctgatctaacattcaacaacatagtaagaatggttacagggaagagatattacggcgacgacgtcaacaacaaagaagaagcagagctattcaagaagctagtctacgatatcgccatgtatagcggcgctaatcattccgctgattacttaccaatactaaaactattcggaaacaaattcgagaaagaagttaaagctataggcaaatcaatggatgatattttgcagcgtttgttagatgaatgtagaagagataaagaaggtaacacaatggtcaatcatttgatctctctacaacaacaacaacctgagtattacactgacgttatcatcaaaggccttatgatgtcgatgatgctcgccggaactgagacctccgctgtgacattagagtgggcgatggcgaatctactgagaaatccagaagtactggagaaggcgagatcggagatcgatgagaagatcggaaaagatcgactaatcgacgaatcagacatcgcagtgcttccttacctccaaaacgtcgtctccgaaacattccggctatttccggtggcgccgtttctaatccctcgatcaccgacggacgacatgaaaatcggaggttacgacgtcccgcgagatacgatagtgatggttaacgcttgggctatacatagagatccagagatttgggaggagccagagaagtttaatccagatcgatataatgacggatgcggaagcgattactatgtttacaagctgatgccgtttgggaatggccggagaacttgtcccggcgccggattaggtcagaggattgtgacattggcgcttggatcgttgattcaatgctttgaatgggagaatgtgaaaggggaagagatggatatgtctgagagtactgggttgggtatgcgtaagatggatcctttacgggccatgtgtaggcctaggcccattatgtcaaagcttttactctaataagatgagtagaggttaaaaaaagaaaaaataacttattcggatgtaactggtaattatctttaagataaagatgaataaaatgaatctttgcctcat

SEQ ID NO: 86087 - DNA, 435 bp, Arabidopsis thaliana columbia
aggacgcgtgggctcactaaagctgtagttgtgcgttaaccctctaaggagcttgtaaaaatgctaatactgtttgagacgccaggtggttttgccatcttcaaagtattaaacgaaggaaagctctctaatgttgaggatttgggtaatgagttctcgaccgcaaagttagcccgaaagatggtgaagctagtagcttttgacaagtttgacaacacagctgaagctcttgaagcagtggctaaattgcttgagggaactccaagcaagggtctacgcaagtttttgaaagctaactgtgttggtgaaacattagctgttgctgattctaagcttggaaatatcatcaaggagaaactgaaaatagtctgtgttcacaacaatgctgttatggagctgttaagaggtatcagaagccagctaacttaacttata

SEQ ID NO: 86088 - DNA, 502 bp, Arabidopsis thaliana columbia
  unsure (1)..(502): unsure at all n locations
tttntttcagttaagaggncgggntccccctntagcttcacctctcgcttntntcancnccccgtgnttcnggccgtttaagngagaagccaaaggagaggaagaaggctgntgttggggaggacccaaaactgggnnccntcaaggaggaatccgattaggaggaaggccggaagcagaccntgaanccgccgaagagccctgcaaagaagggagaagaagaagaagagaaaacacgaggaagaggaaactgaaatgcctgctaagaagaaggaaaagagtgagaagaagaagaagaagaaaactgaggtctgaagagacctttaatatttttgcgtggtctagtttactttgttatcagaaacaaagaaaatcttttgtggcgttaggtgttaagtaaggtttttgttttgtttgaaacttaaaaaaaagaactactcttcgttttgtaaggttataatatgtttggtttagtccttatcccagaaacttgcattttgcc

SEQ ID NO: 86089 - DNA, 338 bp, Arabidopsis thaliana columbia
cacgcatccgctctttcaagtttaacacatgagctgaggttaattaaatcacctgcagaactcaaattgatgagagagtctgcatcaattgcgtgccagggtcttctgaaaacaatgttacattcaaaggggtttcctgatgaaggcatcttatcagcccaggttgaatatgagtgccgggtaagaggtgctcagcgaatggcgttcaatcctgtagtccgtggtggttcaaatgccagtgttattcactattcacgaaatgatcagcgtattaaagatggtgatcttgtcttgatggacatgggttgtgagttacatggttatgttagtgatcttac

SEQ ID NO: 86090 - DNA, 1439 bp, Arabidopsis thaliana columbia
  unsure (1)..(1439): unsure at all n locations
ctcccaaccctctatatataacaacgcgtcgacctaattaagttctcatacccgctttattcattgattcattcaatttttgttcatcgttttctctagatctctcttctatatagtcctctcggaggttttccgatgaagatcgtcactgatctccttccgatctacagatcggcgtcttatacgaagagatccagaggctccggttgattcctcgtcagaagacggatcgtcgcggttgagctccgaagatcggttgaagatctgatctgatcttagatcatgaaccggcctcgaggttcgtcagatctgcgttactgagcttttgatgaggtgatgaatgatgaatccgtcaattctctatggagctagagagatgagagggtgaagaagagagaagaagctgatatgtgatattgatgtgagttaagttgattgatggatgtatgagatgtttatagggacgatatagtcctccgtaaacatctttgtcatccgacctttgccatgacaggtgcgcttgcatggcaggtcaccaaaatccttaataaaaaaaaaaaagtttcgtgttgtcgaggggagttcgcacgggggattttttttgcccgggttctcccctcttgcgtgtgtgtcttgcttctcgctcttcgtacacactacctttgatctcgattcattcacgtaaattctctcaataccacaggaatattctcgatccggatcttaagatcagcggatctggagacaagctggccaaatcttaatccaacatcctccaaccaaggtaccgtcaattttgagtttaaattctccgttattctctttatttgcatcatataacaaacctgacaccaaatatttattacaatctcgaatcggcctttatttttgagcatggaaatagttgcctcattttcaaattgactgtnataatacattattcacaaagtacttctaccaaagtattcgtaggaccttaaattgtctaatcgaacggttccatggcagtttgtnatattctccactttatctatctactgttgtttgatgtttgtacttttcctgtaagaattctcattggaagaaattgtacccagttttatgattacgtaaagaaatatcagtagtgaatattctgacctattctagaaaatagcgctgtagtatttagtctctcgtatgggttttacgatttggatttatcacggctgcattcattagcaagagctatggctagagtagctagctcctggagaagtaatacgagtatcgaaggtctctgatttttgatatgatggcgtttggactcgattcgagcctgcagtttccgattgatatatactctgtttgttgtatcatttcgtacaagtaggttttttttagaccttttgcattctgatgggatctttcaaatttaataaggcagnttcaggttatgc

SEQ ID NO: 86091 - DNA, 564 bp, Arabidopsis thaliana columbia
  unsure (1)..(564): unsure at all n locations
atntgttgtccnagnatttggtttggccnntngcccccttggaaggttttcncaacggccattaaacttacggttaaaggcacaaggctnggtcttggtgcgaggttgcatggggtgacatatggtgcttctgccttggaacaacccatttggccttcgcctgccgcagctccagaccggttgtggaccccctttgccaaattggcctaaaaatccccaaccatgtaacgacgaggttggctccacttcagatgtctattgaatcaaagaggagttgcagctgcacctttggttggtggcggacgagttgtgccttttgaacccaggttcttgtctcgctcagtgattcgaaagattagcattgtagaatatattacagtcagcaacaccttggtcaattcaggttgaaatgaacccctacaaaaaagggatactttgaatttttttcttggttgattttttagtggtagaaatattccttcttatttgggaataattgttgcaacattcatgtataaaaggccttaccaatttcaggcttgaataagaatacatagtttgcac

SEQ ID NO: 86092 - DNA, 381 bp, Arabidopsis thaliana columbia
acggacttggctcaattcagtaccagcacatccagcctaacctagacatggataggcgggccccctttttgggggcggaattccgcgcccttctccaacaaacgtcatcaaacaaccatgctttgcggttgaagcggagcgccaagatgtcttactacggagccaacggctttgacccccgagaccctcctaccgatgatgtctcctcctgcagcctccatgaatcctcctgcttgaccacatacgacttaggatacttgcaagccactcaaccttgcggactacgatctttaaaacacaaaattgccttcgattttatgtttttcaattttaataaaattatgttctcagtcacaattttaacatttaatttttttgccc

SEQ ID NO: 86093 - DNA, 857 bp, Arabidopsis thaliana columbia
  unsure (1)..(857): unsure at all n locations
cataccactcactatagggaaagctgctacgcctgcaggtaccgggccggaattcccgggtcnacccacgggtgcgggcacgcgtccggagatcgagaaaggagaagaaggaatcaagagagtagaaaggaaatgaatctatacgcgcacgatctttctcttctcgatttcaattacaacgtctccggtcccttcggcgagccactatctcaccgcttcctctctcctggccctttcttccaaggcgaagaagacgattaccgccgtaatacgagctacagtcacgacggagctaatggacgagaaccggacacagattcaagagcatctccgccgcatcgccacgacgggaggtctccgttacctctgggaatggattggagttctcctcctcgtcatttggaaggaagggacacggtttggccacatgatcatcgaactggttggagttactgtgtcactgtcccttcttgggttgaccttcccaagtcaagcgtttcagatcctgccgtgttttatagagtgcaagtagcgatacaatctcctgagggaatcacttctgctaggctggtacttaggaggttcaatgatttcttggagttatattcgtctattaaaaaggagtttgtgaagaaaagcttaccccaggcaccaccaaagaagattctgaggatgagaaaccagacacttttggaagagaggaggtgctctctggaagattggatgaatagacttttgtcagatattgatatatccagaagcgctcttatagctacatttcttgagcttgaagctgctgtcaggtcttattttaatgatgaatatcaagaaactgaagatacctctggggacattcc

SEQ ID NO: 86094 - DNA, 919 bp, Arabidopsis thaliana columbia
acccacgcgtccggaaggacacagatcattgatctttttaaccaagacaagtatctgaatgccatccaaactagtgctccacacttgctgcgctacttggcaactgctttcattgtcaacaaaaggagaagaccacaattgaaagaattcattaaggtcattcagcaagagcactactcctacaaagatccaattatcgagttcctggcatgtgtgtttgtcaattatgactttgatggggctcaaaagaagatgaaagagtgtgaagaggtcattgtgaatgatccattccttggcaagcgagttgaggatggaaacttttcaactgtaccactgagagatgaatttcttgaaaatgcccgcctattcgtctttgaaacctattgcaaaattcatcaaaggattgacatgggggtacttgctgaaaaattgaatctgacctatgaggaggccgagagatggattgtgaacctaatccgcacctcaaagcttgatgccaagattgattctgagtcaggaactgtaatcatggagcctactcagcccaacgatgcatgaccagttgataaaccacaccaaaggcttatcaggacgaacatacaagttagtgaatcagctcttggaacacacacaggcgcaagcaactcgttagtcaaaattttgctgtggaagcctttccttcataaaactcacattcggttgactggaattattttctttttcttgctctgagttcaccttttactttgaaaaagattattatggagttgttctatttgaaatgttggatccacagattggacacattttcccccccgaaaaaaaaaaaaaaaaccacaaacccgaagggcggccgctctagaggatccaagcttacgtacgcgtgcaggcgacgtcaagatcttctatagttgtccta

SEQ ID NO: 86095 - DNA, 783 bp, Arabidopsis thaliana columbia
  unsure (1)..(783): unsure at all n locations
nnnnnnnnnnnnnnnnnnnnnnnnnnnnnnnnnnnnnnnnnnnnnnnnnnnnnnnnnnnacggacgcgtgccaccgtcttcgacgacggcaaattcgtggaagctgtttcatcgattccggcttcactgaagcggcgtcgctcgacgtttattattccgacgactaggcctttgaggcagtttctgattaacttcaggcgataatggcaaacagaacagatccgttggcaaagaatataagaggaacgaatccgcagaatctggtagagaagattgtgcgaacgaagatttatcagcacaccttttggaaggagcagtgctttggtctcacggcggagacattggtggacaaagctatggagctcgaccatctaggtggtacctttggtggtagccgcaagcctactccgttcctttgcctcatattgaagatgcttcaaactccaccctgagaaggaaattgccggggagtccataaaatggtgacctccaatatttcgaattcttgggccgttctaccggcggccactgggacggaggtgagggtatcgctacctgaaccctttaaataactaccggaggggaaaaaaagtatctgggggaaggtcccctgccacatgggacaagcccttgggacctttaccaggatattctggtaattgcacgcccctctaaaaagggggccccttaacaaagggtttttgacccgggaaaaggtttggaacccccttgaaaaagaagaagggggaacagggcgccctggggcccgaaggagaggacccc

SEQ ID NO: 86096 - DNA, 587 bp, Arabidopsis thaliana columbia
  unsure (1)..(587): unsure at all n locations
acccacgcatccgacgaaaccctagttctctctccggcgaaaaccatggtggcgcaaaacagtcggcgggagcttctagcagcttccctgatcctaactttagctctaattcgtctaacggaagcaaactccgaaggggacgctcttcacgcgcttcgccggagcttatcagatccagacaatgttgttcagagttgggatccaactcttgttaatccttgtacttggtttcatgtcacttgtaatcaacaccatcaagtcactcgtctggatttggggaattcaaacttatctggacatctagtacctgaacttgggaagcttgaacatttacaatatctgtatggaatcatcactcttttgccttttgattatctgaaaacatttacattatcagtcacacatataacattttgctttgagtcatatagtgaactctacaaaaacgagattcaaggaactataccttctgagcttggaaatctgaagngtctaatcagtttggatctgtacaacaacaatctcaccggggaaaatcccatcttctttggggaaaattgaagncacttgtttttttgcggntttac

SEQ ID NO: 86097 - DNA, 703 bp, Arabidopsis thaliana columbia
  unsure (1)..(703): unsure at all n locations
aggttgagactttggagacaagagttgagaaacttgaagaagagctaagagaagttgcagcgctcgagatttcgctctattcggttgtaccagaccactctagctcagctcacaagcttcacacacctgctcgaagaatttcaagaatctatattcatgcttgtaaacattggagtcaaggaaaacgagcaactgtcgctagaaactctgtgtctggtctcattttagctgctaaatcttgcggaaatgatgtttcaaggttgaccttctggttatcgaacatcatttctctcagagagatcattttgcaggcttttggtaaaactagtgttcctagtcatttcacagagacctctgcatcaaatgggagtgaacataatgttttagggaaggtaagaaggaagaagaaccaatggactaagcagtcaaatggttttaagcaggttttcgaagattggcaggaatcacaaaccttcactgctgcattagagaaagtcgaattctggatttcctctagaattgttgaatctgtttggtggcaggttttcactcctcacatgcaatcacccggaaaatggcggtaaaacaanggggcatatctttggggngntnnttgngncaaggnnggttttncatccagcctnttggaaaacggttttcaaagttncactttcgggggttttnccntttnnggggagcccgg

SEQ ID NO: 86098 - DNA, 544 bp, Arabidopsis thaliana columbia
  unsure (1)..(544): unsure at all n locations
gcccggcccccnggtttccccgttcgggccttngtcacattcccttcccgggttccatccccatccaagttccncccccggggaattttcccgttttggatttgtttncttgggattctaccctcaaggccccccgttggaggaagattttggtgaagggattagatttggtgaaatgggcccatggcgcttcagccggggggagaacccccggaccagttactcgatgccaagctttaggccccgtgtcttttgcttggaggagagagatgcttgcagctctgaaagttgcattgctttgcacagacatcacacctgcaaaaaggccaaagatgaagaaagtagttgaaatgcttcaagaggttaagcaaatcaaatgagcaaatgaatatatagtttcctcttgtgacattcatatacaaaagaaaacgcattcctatatatgcgagcttctcctctgtgtattatataggtttttatgataaaattgatccgcttatggttgatttacttatccaatgacacaaattataaattagatcat

SEQ ID NO: 86099 - DNA, 357 bp, Arabidopsis thaliana columbia
tggctgtgtgagtaaagcagagtatgtgatatacaaactgaaggagatggagaaaataaccgataaggacatactaccaatctccaaacagtttgacaaactcgaccgatgcagcaacggaaagatcactcctttagatctcttggaaggtggcagtggcgattgatcaatcctctgcaactttttgttttagcttagaattacagttactaattacaacggatcaacgatcctaatgatgctaatggtgatgatgaggagtccagtctccagtttatgtaaactggtttggtccgatattatgtctttggtcttgtcttgcataattggttaagcaggattcactggattcacatc

SEQ ID NO: 86100 - DNA, 260 bp, Arabidopsis thaliana columbia
cgagtatgagccaaaggagacgcttcggacaattccacagtgtcaacattgttttcatgctgattgtatcgacgagtggctgaagttgaatgggacttgtccggtgtgtcggaactcaccggagcagattttgccgcctgcttaagctattatcttttgtgttctctttttcgttacatcatttgtactttttgtagttagttcaatactccgtccgttttatttaaatgtcgttcttaagattttttttaatacatatc

SEQ ID NO: 86101 - DNA, 554 bp, Arabidopsis thaliana columbia
  unsure (1)..(554): unsure at all n locations
ggcccaaagggncnttnaccggggggnggtggtttatccccntntttnaaanattgnggcttcttcaacccgggngtntcttttnatggacccncnncntggaaatcttttgaaaaccaatcgccgtgtctccagagacaactgcaatgaattnccgaccgattgttttacgacccagcccgtttcccaagaaattcttcttgataagattgggtttagaacagtggaagatcttacatcaagcttgtccggtgcaagcaaagggtttgatagacagattcttgcgttccagaaatgaacataacaaaccagatgcctcattgaagaagaaggacaagttgttgagtttttgaatagccttgtgaaaatcaaattatgacatggttgaacacaagatataaaaggcaactaaaagtcgcttcatatctaatatgtaatctttttgctacagcttaggctcactaatctaattccattggtcctctttttgtacgcggttttatatgataatgacataaaactttgaatcgataaatgaaagaatctttgaatac

SEQ ID NO: 86102 - DNA, 559 bp, Arabidopsis thaliana columbia
  unsure (1)..(559): unsure at all n locations
tcnncgccccctgccgtcgttnccccatattctcccagntntcgntttnagggacccnagaaagtgtggtgcagtttttcggagataatgtggagaaccagtggaggttgggactttgncccgaaaatcgctaccttctggattgaatctggcaggttgaaaggtgttctagtagaaagcggatcgcctgaggagttccagcttctaccaaagctagcaagaagccaaccacttgtcgataaggctaaactcgcaagcgcatcttcagtcgaagaagctctcgagattgctcaagccgctctacagagttagagaaggaaacttcatggagtttttttaatagcttttgggttcagagaaatcaacatcttttattcccggtgagagttattcatctttccattggaaaaatgatctatagagagcactgttgtcaataatctcctcgaataatttataacctctttttgggataatcatattttgctcattaaaaagctttgtttctaataaaatctatgttagtcacccaaaaaaaaaaaaaaagggcggccatatt

SEQ ID NO: 86103 - DNA, 1923 bp, Arabidopsis thaliana columbia
gcgtccgctttgttatagagccatcacttcagagtgactcacacacttgtttcaagaattaaatctgaatttggctcttcttataaactaatgtctgcagttcgtagagtcatggcgttagcatcaaccacgttgccgacgaagtccggattatctctttggtgtccgtcttctccgtctctcgctcgccgatttcccgctcgtttttctccgatcggttctagaatcgcttccagaagcctcgtcactgcttcgttcgctaacgagaatcgcgagtttgtgattgttggtggaggaaatgctgctggttatgctgctagaacttttgtggaaaatggaatggctgatggtcggctatgcattgtgaccaaagaggcttacgcaccttatgagagaccggctttgacaaaagcttacttgttcccaccagagaagaagccagctcgtttaccaggatttcatacttgtcgttggaggtggtggagaaaggaaacaccagattggtataaggaaaggattgaggtaatatatgaagatccagtggctggagctgattttgaaaagcaaacactcaccacagacgcagggaagcagttaaaatatggatctctaattatcgctacagggtgtacagcctcaaggttcccagataaaatcggtgggcacttgccaggggttcactatattcgggaggttgcagatgctgattcactgatagcatctctgggaaaggcaaaaaaaattgtcattgttggtggtggctacatcggcatggaggttgctgctgcagctgttgcgtggaatctagatacaacgattgtattccctgaagatcagcttttgcaaagattgttcactccatcgcttgctcagaaatatgaagaactgtaccgtcaaaatggtgttaagtttgtcaagggcgcttccataaataacttggaagcaggttcggatgggcgtgtatcagctgttaagcttgctgatgggtctacaattgaggcagacacggttgtaattggaattggagctaagcctgctattggcccctttgaaactttggccatgaacaaatcaattggaggaattcaggtcgatggcttgttcaggacaagtacccctggaatttttgctattggagatgtcgcagccttccctttgaagatatatgataggatgactcgagttgaacatgttgatcacggccgccggtctgcacaacactgtgtgaaatcactactcacggcacacactgacacgtacgattatcttccatatttctactcaagagtattcgagtatgaaggaagcccaagaaaagtgtggtggcagttttccggagataatgtgggagaaacagtggaggttgggaactttgacccgaaaatcgctaccttctggattgaatctggcaggttgaaaggtgttctagtagaaagcggatcgcctgaggagttccagcttctaccaaagctagcaagaagccaaccacttgtcgataaggctaaactccaagcgcatcttcagtcgaagaagctctcgagattgctcaagccgctctacagagttagagaaggaaacttcatggagtttttttaatagcttttgggttcagagaaatcaacatcttttattcccggtgagagttattcatctttccattggaaaaatgatctatagagagcactgttgtcaataatctcctcgaataatttataacctctttttgggataatcatattttgctcattagagagctttgtttctaaaaaaaaaaaaaaaaaaagggcggccgctctagaggagttttctcatgatctatgggttgtttcgtggatcattaaaatatttatttatttagatttcttttatcgactgtaaaccataaacgaaatttgtataaacaataatgaagactttgttata

SEQ ID NO: 86104 - DNA, 428 bp, Arabidopsis thaliana columbia
cgcgtaccgctcattactcccctttctcaatgatcataaaacctacttcgattctactccttatcaactgaatgaccgaaaaacctcaccttttttctttttccgatcatggggaatctgatcagtttgatcttctgctgcgggagacggcagaggagcaatattcctccggcgatggaaacggctcctcttgaactcccaccgaacagatttgtattcgccgccgtgccaccatatctggaccctatccctaactacggttgaccaggatccaggtaactgccttcctccgccagtaactgagccgccgatgctaccgtacaatttcaaccatttgcatcactatcctcccaacagttaccaactacctcatcctttgtttcacggcggtagataccctatactgccgcctcctacgtacgtccacc

SEQ ID NO: 86105 - DNA, 518 bp, Arabidopsis thaliana columbia
  unsure (1)..(518): unsure at all n locations
agngnggcccccattntggggttcccccctttgccccccnggttnnctttngctcccnccccattttttngggaatttgggcggntacaattttccccccgggaacacntttgcccntggtttcnccnaggccttattccnncccccctnttggggaaagctggtccncctncaggtaccnggtccgggattccccgggtcgaccccacgcgtccggagaagtctaaaccggaattcggccaaagacaagcgacccagaccgcgagaaacagcatgaacataaggagtttagcggttaggcgttctggggttgagattgctttgtgagcaatttgctgtctctgcttttgttctttagtactattggcctcaaatgtgtcttttgtgtttgtgtttctaggatgtaatgagtagaatgttacatcatagaaacgcaaaatacaaataaacaatcagaacctatgtaaccttatgttagaatcaccattgcaccaataaatctttaatagcttataact

SEQ ID NO: 86106 - DNA, 384 bp, Arabidopsis thaliana columbia
acgcaggtaacaaagcttccttcaatttctcctttttcagatcaatcaatttccttctctggttccctttcctgacgcaagtttcctcctttggtttttgtcgatctctaagctcagacagagattcgaatgacctaattgtatcccgtcttatcgagactttacacagattcttctgggattttagcttacacagtcgttatctacttgttgcgtccaattgatttctctgaatcagaaaccctaatttcgtgggtcttgtgcagtctctaaagtttgcacactctctcagaatcgagccaaggtttcgtctagaaattagggtttcttagttttttcatggtggaggatatattttaggccgatttgagggctttccatcag

SEQ ID NO: 86107 - DNA, 548 bp, Arabidopsis thaliana columbia
  unsure (1)..(548): unsure at all n locations
gggnttnctccttnccaacagttngaccttgacaacccccaacctccnncaccttatctagtgacaggaggtttctagagagaccggctcggaccggtgtggatgttgtgtgcctggactggacctgtggacatggctgaaggaagagaccggctaggaagagacatagcagttccagggaaccgttgatccgggagttctatttggatccgaaaggaatttatcacaagccggattcatgatactgtgaagaaagctgggagagataaacacattctcaacttggggcatggtattaaagttggaacccctgtaagagaatgtagcacacttctttgaggttgctcaagcaaattagatattaagagaaaggaatgaaatgtgatggttattatgcctttttgttgttaatttccggccttccccacctttttttctttttcccattttgggagggggaattttatttttcaatattttaactgtaattttttttttgtagactacttggaagaaagtaatgattaacgtgcaatggatattcatat

SEQ ID NO: 86108 - DNA, 387 bp, Arabidopsis thaliana columbia
cccacgcgtccgcgaaggttctctcgccggagaagaaattatgcagggtttggcggcgaccaccaccaaccgtggctctctcaccttcctcgctcccaggaaccatagtccaatttcaaagaaatttgtgaatccaagagtgttctttcccaacgttgattcatccgcaaaattaagattatcagctagctcaatttcacggagatgtccacgacagattgctcctctttcagcaactgcatctgtggactttgcagcagcagcaacatcatccaaccagctctttgctaatggcttgccaccattagctcctggtttgagaagacaccggagaccgatagagcctgcaggagtggctaaagatgacttctttaaaatcaaactgcc

SEQ ID NO: 86109 - DNA, 437 bp, Arabidopsis thaliana columbia
ccgtccgacatagtcctttttttttataaaggttttttcacaaccaaatttccattataaatcaaaaaataaaaacttaattagtttttacagaagaaaagaaaacaatgagaggtaaatttctaagtttactgttgctcattactttggcctgcattggagtttccgccaagaagcattccacaaggcctagattaagaagaaatgatttcccacaagatttcgtttttggatctgctacttctgcttatcagtgtgaaggagctgcacatgaagatggtagaggtccaagtatctgggactccttctctgaaaaattcccagaaaagataatggatggtagtaatgggtccattgcagatgattcttacaatctttacaaggaagatgtgaatttgctgcatcaaattggcttcgatgcttaccgattttcgatc

SEQ ID NO: 86110 - DNA, 641 bp, Arabidopsis thaliana columbia
tttcaccattaaaaatcccaaagagtctggagaaatgggaaagattcttcatcttcttcttcttcttcttaaggtctctgttcttgaattcatcattagtgtttctgctttgtacttcacctgcttcacatccttctctttctcctgtttacacttccatggcttccttttctccagggatccacatgggcaaaggccaagaacacaagttagatgcacacaggaaacttctaatcgctctcataatcacctcatcttctctaggactaatacttgtatcttgtttatgcttttgggtttattggtctaagaaatctcccaaaaacaccaagaactcagaaggtgagagtaggatttcattatccaagaagggctttgtgcagtccttcgattacaagacactagagaaagcaacaggcggtttcaaagacggtaatcttataggacgaggcgggttcggagatgtttacaaggcctgtttaggcaacaacactctagcagcagtcaaaaagatcgaaaacgttagtcaagaagcaaaacgagaatttcagaatgaagttgatttgttgagcaagattcaccacccgaacatcatctcattgtttggatatggaaatgaactcagttcgagttttatcgtc

SEQ ID NO: 86111 - DNA, 561 bp, Arabidopsis thaliana columbia
  unsure (1)..(561): unsure at all n locations
aacggaattaatagtaatctaatcggaagattcaagcgagaaatcgatttggttgtctgttaatttgttgggaaataaattgaaataggagattgattggatggtgagaaggcaagaggaggagaagaaggcggagaagggaatgcgtctggggaaatacgagctagggaggacgctcggcgagggtaatttcggtaaagttaaattcgctaaagataccgtctccggtcattccttcgccgttaaaatcatcgacaagtctcgtatcgccgatctcaacttctcccttacagataaaaagagagatcccggcctctgaaaaattttgaaacatcccccccattgttaggtttccatgagggtccttggcttgccaaaacgggaattttattttgggaatnggacccttttttccccggggggattttttccgccaaattttttttccccccggaaattttccagaacctttttgggggaaaaatntttcnncagnttttcngtnggacnccctnctttcntggaaaaggttttnccccngggtnttaaagntnggaattt

SEQ ID NO: 86112 - DNA, 534 bp, Arabidopsis thaliana columbia
gaaagataaaaatttcaccgcggacttctcgtatggcgtcactagattctctagtgagcttctttatatctactcttttaatcactgtcgtgacctcgcaaactcgatgccgaaatttcaagtcgatcatcagtttcggcgactcgattactgatactggaaacttactcggcctctctagtcctaacgatcttcctgagtcagcctttccgccatacggagaaaccttcttccaccatccgtctggtcgtttctccgatggccgcctcatcatcgacttcattgctgaattcttagggattccacatgtgcctccgttttatggatctaaaaatggaaactttgagaaaggagttaattttgcggtgggaggagcaacagcactagaatgttctgttcttgaggagaaaggaactcattgttctcaaagcaatattagtttaggaaaccagcttaagagcttcaaagagagtttaccatatctttgtggctcctcatcaccagaatgtagagatatgattgaaaatgcattta

SEQ ID NO: 86113 - DNA, 538 bp, Arabidopsis thaliana columbia
  unsure (1)..(538): unsure at all n locations
gntnanccccgatgttttcccttggngngtcttccttaacccnttnctggaaaaaccctgtgatccttcgctcccccaccccccccagctggccaaacctgatactccaaggtggagagattgagaacctggtggatcccgaggancggtgaagaatttgatctgcaacaacttccatcgcattgctttcgccgcgtctctctgcatccgatcttcttctctatgtcgaccttccatgatcgaggtcttagaagtactacaaggagaagatatagagaaagagaaatggaaaatggaagaggaagaagaagttaaagaagagttttggggatatgaagatcttgaggattgtgaatgtgattcttcaatctcactttctcctcctgactctatctctaatagaagttcttcgcatcgtagtcgctagatctaaatttagttgtaaaatgttgaaaaatcaattttgttttgttgtatatatttgtttagagttgtctatttcataaacaattgtagtattcaatgaggtgttttattt

SEQ ID NO: 86114 - DNA, 380 bp, Arabidopsis thaliana columbia
  unsure (1)..(380): unsure at all n locations
gcacgagcacttatctctcttcttcattncttctctcttcaagctccaagatgtgtttaagttcttcagaaacattttcagacacacccacgagattaggtttatacctcaaaacacaaagtcacgttcgtatccctcgtctctccaggaggagacggatgtggcgggaagagaaaaagatggagatgatcaatctaaagctttacgtggagaatcaatacatcataagagagaacgagaaacttaagaagaaagctcttcttcttcaccaagaaaacaaaactctcttctctctgcttcagaccaaaaaactctcctctggtccataaataaaatcttaccatcatcaccaatcactaagatcatcatattcttctttc

SEQ ID NO: 86115 - DNA, 518 bp, Arabidopsis thaliana columbia
ctccccctgcaggtcccggcccggaattcccgggtctacccacgcgtccgagatccttgtatcctaagatgactcattctttagaaactaagagagaatggaattaacactaaaattgctggttctgcttctgtttatcttaaatcatcatgttggttctggctctatcgtcaagtttcttcccggttttgaaggccctcttcctttcgaacttgaaaccgggtttgttagttctctcttttgcaacaatgtgttttgagtttggagtttgtaattagtcattcttttgactaaaggtacattggtattggtgaggaagaggaagtgcaattgttctattatttcatcaaatctgagagaaatccaaaagaagaccctcttcttctctggttaagtggaggacctggatgttcttctatcactggcctttttttccagaatggacctttggctttgaagtccgaggtttacaatggaagtgttccttccttgtctctactacatattcgtggactaag

SEQ ID NO: 86116 - DNA, 544 bp, Arabidopsis thaliana columbia
aggtctctacgactcactattgggaaagctggtccgcctgcaggtaccggtccggaattcccgggtcgacccacgcgtccggtaacgcggagctactttgtaattataaagatttattgtttcccataaactggttaaatgattttagaaactaaagtaaaatgagcttgacactagagtttctgcttcttctgattgtacttatcttgagtcaccatgctcattctggctctattgtcaaattccttcctggttttgaaggcccccttccttttgaactcgaaaccgggtacattggtattggtgaggaagaggaagtgcaattattctactatttcatcaaatctgagaagaatccagaagaagaccctcttcttctatggttaagtggaggacctggatgttcctctcttactggccttctttttgagaatggaccggtggctttgaagttcgaggtttacaatggaagtgttccatctttggtctctactacatattcatggacaaagatggggaacataatattcttggatcagccagt

SEQ ID NO: 86117 - DNA, 508 bp, Arabidopsis thaliana columbia
  unsure (1)..(508): unsure at all n locations
nnnnnnnnnnnnnnnnnnnnnnnnnnnnnnnnnnnnnnnnnnnnnnnnnnnnnnnnnnnnnnnnnnnnnnnnnnnnnnnnnnnccacgcgtccgcccacgcgtccgaatttttgcaaaagcaacgtacccatcttatcattattttataaagatcctatgtctatccgtaaatggactaatctttagacacacagagaatataatgagtttgaaaataaagtttctgcttctgcttgtcttgtatcatcatgttgattctgcctctatcgtcaagtttcttcctggttttgaaggccctcttcctttcgaacttgaaaccgggtttgtaatttttttttttttttaaccaatgcatttatttgtgtatgtaaacaagcattcttcttaatgaaggtacattggtattggtgaggacgagaatgtgcaatttttctactatttcatcaaatctgaaaacaatccaaaagaagatcctcttcttatatggttaaatggaggacctggatg

SEQ ID NO: 86118 - DNA, 1029 bp, Arabidopsis thaliana columbia
  unsure (1)..(1029): unsure at all n locations
nnnnnnnnnnnnnnnnnnnnnnnnnnnnnnnnnnnnnnnnnnnnnnnnnnnnnnnnnnnnnnnnnnnnnnnnnnnnnnnnnnnccacgcgtccggttgattctgctgctatagtcaagtctcttcctggtttagaaggccgtcttcctttcgaactcgaaaccgggtttgtaaaatgtacattggtattggagaggaagaggacatacaattgttctactatttcatcaaatctgagaacaatccaaaagaagaccctcttcttctatggttagatggaggacctggatgttcttctctcggtggccttctttttgagaacggaccggtggctttgaagtctgcggtttacaatggaagtaatccttctttgttctccactacatattcatggacaaagatggcaaacataatatacttggatcagccagttggatctggtttctcttactcaagaactccaattggaaaatctagtgacacaagtgaagttaagaatatccatgagtttctccaaaagtggttaagcaagcatccacagttttcttccaatcctttctatgctagcggagattcttattccggtatgattgttccagccctcgttcaagaaatttcgaaaggaaattatatatgttgcaaacctcctataaatctacagggctatgtactcgggaacccgataacgcactttgaagtcgacccaaactatcgcattccattttctcatggaatggcacttatttcagatgaactatacgagtcaattaggggagcctgcaaaggaaattatttcaacgtggatccacgtaacacaaaatgtttgaaacttgtcgaggaatttcataagtgtaccgacaaactaaatgaattccatatactatcaccagattgcgacacggcatctcctgattgctatttatatccattttatctcattagcttttgggccaatgacgagagcgtccgcgatgctcttcatgttaataagaggagtattggaaaatgggagcgatgtaactatctgagt

SEQ ID NO: 86119 - DNA, 538 bp, Arabidopsis thaliana columbia
  unsure (1)..(538): unsure at all n locations
atatcatatggattacagcatccatggatatcgatctcttatttacagtggtgatcatgacatcacaatgcctttccaagcaactcaagcctggataaaatctctaaattactccatcgttgatgactggaggccttggatgataaacgatcaaatcgctggatacacgagaacttattccaataagatgacatttgctactgtcaaaggaggtggacacacggcagagtatctaccaaacgagagttccatcatgttccaaaggtggatcagtggccaacctttgtaatagaaggcctcttttagaggcttattgcctgtacgtattacatatattaatattcacgctacgcgcaattcttttgttttgagatgtttacagaaaataggataaaaagtttgtccttgacattttgccttcctcaggattgctatttggtatcagggaatcaaaaaaacacaaaaaagnnnnnnnnnnnnnnnnnnnnnnnnnnnnnnnnnnnnnnnnnnnnnnnnnnnnnnnnnnnnnnnnnnnnnn

SEQ ID NO: 86120 - DNA, 868 bp, Arabidopsis thaliana columbia
  unsure (1)..(868): unsure at all n locations
nnnnnnnnnnnnnnnnnnnnnnnnnnnnnnnnnnnnnnnnnnnnnnnnnnnnnnnnnnnnnnnnnccacgcgtccgcccacgcgtccgcccacgcgtccgcggacgcgtgggtgagtttgaaaataaagtttctgcttctgcttgtcttgtatcatcatgttgattctgcctctatcgtcaagtttcttcctggttttgaaggccctcttcctttcgaacttgaaaccgggtacattggtattggtgaggacgagaatgtgcaatttttctactatttcatcaaatctgaaaacaatccaaaagaagatcctcttcttatatggttaaatggaggacctggatgttcttgtcttggtggtattatttttgagaacggaccggtgggtttgaagtttgaggtgttcaacggaagtgctccttctttgttctctactacatattcatggacaaagatggcaaacattatattcttggatcagccagtaggatctggcttctcctactcaaaaactccaattgataaaactggtgacataagtgaagtaaagaggacccatgagtttcttcaaaagtggctaagcaggcatccacaatatttcttccaaccctttatatgtagttggagattcttattccggtatgattgtcccggccctcgttcaagaaatctcacaaggaaattatatatgtngcggacctcctataaatctacagggtatatgcttggaacccctgtaccatatttgggccttggaccaaacnttcggattccaatgcttanggtttgggttaatcnccggcgggaattttttggcccattnggggntttgnaacngggatttttttncaatggggggcccnttttna

SEQ ID NO: 86121 - DNA, 981 bp, Arabidopsis thaliana columbia
  unsure (1)..(981): unsure at all n locations
agctctctacgactcactatatggaaagctggcacgcctgcaggtaccggtccggaattcccgggtcgacccacgcgtgcgctcatggaatggcattaatctctgatgaactatacaagtcattggagagaatctgcaaaggaaattatgtgaaagtggattcacttaacacaaaatgctataaactaatcaaagattatcaaaagtgtattcataaactgaataagtatcatatattattacctgactgcgatataacatctcctgattgctttttatataggtatactctcataaccttttgggccaacaacaagagcgttcgcgaagctctgcaagtcaataagggaagtataggaaaatgggtacaatgtaactataaaaatatttcctacaattacgatatcaagagcagcgtcgcataccatatgaagaatagtattgatggctaccgatctcttatctacaatggtgaccatgatatgatggtgcctttccttgcaactcaagcctggataagatctctcaattattccatcactgatgattggaagccttggatgataaacgatcaaattgctggatacacgagaagttattccaataagatgacatttgctactatcaaaggaagtggacacacagcagagtataaaccaaaagagacctctatcatgttcaaaagatggatcagtgcccagcctttgtaaaagaggatgatggtctttgcgtatgtagaataaaactatgtaacataaaaaatgtttgtatacaatataatcatctacttggtaattaagtcctaccgctacacgtgattttttgttttgatgtagactactgaatcccttgcctgcttgaattcaaaattttaatttgtnnnnnnnnnnnnnnnnnnnnnnnnnnnnnnnnnnnnnnnnnnnnnnnnnnnnnnnnnnnnnnnnnnnnnnnnnnnnnnnnnnnnnnnnnnnnnnnnnnnnn

SEQ ID NO: 86122 - DNA, 1375 bp, Arabidopsis thaliana columbia
  unsure (1)..(1375): unsure at all n locations
nnnnnnnnnnnnnnnnnnnnnnnnnnnnnnnnnnnnnnnnnnnnnnnnnnnnnnnnnnnnnnnnnnnnnnnnnnnccacgcgtccgcccacgcgtccgaaaaaaacaaaaatttaggaccggtgggtttgaagtttgaggtgttcaacggaagtgctccttctttgttctctactacatattcatggacaaagatggcaaacattatattcttggatcagccagtaggatctggcttctcctactcaaaaactccaattgataaaactggtgacataagtgaagtaaagaggacccatgagtttcttcaaagtggctaagcaggcatccacaatatttctccaaccctttatatgtagttggagattcttattccggtatgattgtcccggccctcgttcaagaaatctcacaaggaaattatatatgttgcgaacctcctataaatctacagggttatatgcttggaaaccctgtaacatatatggactttgaacaaaacttccgcattccatatgcttatggtatgggattaatctccgacgaaatctatgagccaatgaagagaatctgcaacggaaattattacaatgtggatccatctaacacacaatgtttgaaacttactgaagaatatcataagtgcactgccaaaataatatccatcacatattaacaccagattgcgatgtacccaatggaacatctcctgattgttattatatccatatcatctaattgattgttgggctaacgacgagagcgttcgcgaagcttttatattgaaaaggtagaaaggaaaatggcgcgatgtatcgactatttctacaatcacgacattgtaagcagcataccatatcacatgaataacagcatcagtggatcccgatctcttatttacagtggtgatcacgacatcgcggtcccttttcttgcaactcaagcctggataagatctctcaattactcccccattcataactggaggccatggatgataaacaaatcaaatcgctggatacacgagagcttattccaataagatgacatttgctactatcaaaggaggtggacacacggcagagtatagaccaaacgagacctttatcatgttccaaaggtggatcagtggccaacccctgtaacaaaaggcttatgaccttcacctataattatctaccaactaatatccacgttaagcgcagttgtttgtgttgaaatgtttttgttgtttgctttgttgcattcttttgtgctttatgttacaattttatgtgttttatgtactacagttcattattgtgcgttaaaaaaaaacaaaaaagggcgcccgctttagaggatccaagcttacgtacgcgtgcatgcgacgtcat

SEQ ID NO: 86123 - DNA, 513 bp, Arabidopsis thaliana columbia
  unsure (1)..(513): unsure at all n locations
cccacgcgtccgattaaattctctcattttcaagaaaatatctgaaaaaacagaaacttaacagaagcagcttcgatcaagagatggcttcacttacttcaatagccacgccttacccatcttcatcgcaggctttgcgtctgaaatcctccggaaacactcttttctctgccggagttcgatcggcagcaatggtttccggtcacaaaacgcttaagattcaatgcacttcaaccaaacctgccaaacctgcagctgaagtcgattggagacagaagagagagcttctattggagaaaagggtgagaagtgtggacgtgaaggaagctcaacggttacaaaaagaaaacaactttgtgattcttgatgtaagaccagaggcagagtacaaggcgggtcatcctccgggagctatcaatgtggagatntacagactcataaggnaatngncggnatgggacatagctcnccgtcttggctttnctttctttggtatcttnnctatgcacanaa

SEQ ID NO: 86124 - DNA, 467 bp, Arabidopsis thaliana columbia
  unsure (1)..(467): unsure at all n locations
ctcnnttttccccccncgnannntccccccgngggnttnaatntcccnacggggnttgaaacccggcttcaaaataatcccgngngtcccccggcggggaatttttagacccaagtggttaaaggagccgttagccaacccgtggctgcccctacccgctcgggcttaaacccgccgtcccgcggagagcgttttggctggantaaccgcgtcaaggcatctcagccgtcccttcttcttcttgtctaatcaacggctctcatcgtctccgctgacgtgtccatgatgaaacagaacccgcagatatgatgacgtcatgcgtggcgtacttgtccgtgtctgacgatccgaagcgggaactgattcggatcctgagagttgttttttaattgttgtttttaattttttgttgtcataaaaacatttgtctctattggtattattaaagaagatcggacggtggagat

SEQ ID NO: 86125 - DNA, 509 bp, Arabidopsis thaliana columbia
  unsure (1)..(509): unsure at all n locations
ccntgccaggcttcacgttttcggtgagaacctggccncatgggatctatcccgccgcttttggaggatggttccagaggaattgagttcccgtcgagaaagtggataatgatgagtccaccggaaagtcaaagtttccccggtgaggtttgtacccgagaaagaaatggtgtttgaagagtatatgaccgtatctgaggtcatcttccggcgtatccagacggctaaggagaaaggtttagagcttttgacggctgagatggaaggagagtttgctggttcgtggaaagaagatgggaaagagaagaaagttgttaggtatccgatttatctgttgatcggaagagttgcagaagaacgtgtataaattgatatctctcagttaggcatttcgtcgaacaccttgtacttacacacaagaagacattagttttgattggttcaatgtaaaaataaaactttgtcgttccagcattcctggggatctctaatctttccttttttacccc

SEQ ID NO: 86126 - DNA, 425 bp, Arabidopsis thaliana columbia
attaaagaacaaaatcgtagataatgatcatgcaaaaccgaccgttggatcttactttcgatttcaaaccacataaatcttagtgactgagctaaaaaactgaaattttttaaaaggcaagacctcctctgtttccatattctcaccacagaagaactcttgaggctttctcttttctctaccatggcgaaaccggtgtccattgaagtgtataatcctaatgggaaatacagagttgttagcacaaaaccgatgcctggaactcgctggatcaatctcttggtagaccaaggttgtcgcgttgagatatgtcatttgaagaagacaatcttgtctgtagaagatatcattgatctgatcggagacaagtgtgatggagtcatcggtcagttgacggaagattggggagagactctgttctcagc

SEQ ID NO: 86127 - DNA, 754 bp, Arabidopsis thaliana columbia
  unsure (1)..(754): unsure at all n locations
cgcctgcatgtaccggtccggaattcccggctcgacccacgcgtccagctctgacatggaaacgagcttcgtccatggaggaggtgctgcgtgaggctgatctgataagtcttcacccggtgctggacaaaaccacttaccatcttgtcaacaaggagaggcttgccatgatgaaaaaggaagcaatccttccctccggtaggagaggncctgagatcgatgaggcagctttggtcaaacatctcaaagagaacccgatgttccgagctggtctcgatgtgttcgaggaagagccattcatgaaaccagggcttgctgatacgaaaaacgctattgttgtccctcacattgcttctgcttccaagtggactcgtagaaggaatggctacccttgcagctctcaacgtcctcgagaagagtcaaagggtacccgatttggcattgacccgaaccggagtcgatccatttcttgaacgaaaccgcttcaccgcccaatgccagtccaagcatcgtcaactcaaaggccttaggattgcctgtttcgaagctatgagttaagtatgaagaaggggagatttggaagaatccttttagtgaatatatgatggtgtcaagttgtgtttatgtattgtatatgaaacaaccatgttggatcatataaatcactcctttaaaaaaaaaaaaaaaaagggcggccgctctagaggatccaagcttacgtacgcgtgcgtgcgacgtcataactcttctatag

SEQ ID NO: 86128 - DNA, 777 bp, Arabidopsis thaliana columbia
caaactgaagaaacgtttctttgtgtctaaatagataattaacagaactgaccttaacttaacttcttctgatgatgacagtggactcgtgaaggaatggctacgcttgcagctctcaacgtcctcgtatgtattttcattccaagaaaactcattcttataagattcaaaatgactaaattctgatcagcctctgaaaatgtttaacagggaagagtcaaagggtacccgatttggcatgacccgaaccgagtcgatccattcttgaacgaaaacgcttcaccgcccaatgccagtccaagcatcgtcaactcaaaggccttaggtactacaacaacacttacactcatgcctcagattgtttcaaacgctaattttatgcttgcatttcctgttaacaaaatatttaaacataaacagaaacaaaagaacattgactaatccacttaaacaaatttgttcccattctctctattaaaattactctcatatatatattctttgggttttttcaggattgcctgtttctaagctatgagttaagtatgaagaaggggagatttggaagaatccttttagtgaatatatgatggtgtcaagttgtgtttatgtattgtatatgaaacaaccatgttggatcatataaatcactcctttaaagtgttacattgttgatgagtctattagacgattacccactctctttatttcataaatttgctaagaaaacaaaatctaagtcatcaagaaaaaaaaaaaaaaaaaaaaaaagggcgg

SEQ ID NO: 86129 - DNA, 1746 bp, Arabidopsis thaliana columbia
  unsure (1)..(1746): unsure at all n locations
acgccagctctaatacgactcatttagggaaggctggtacgcctgcaggtaccgggccggaattcccggggggagcgcggcggtgcnaaaaaaaaacaaaatcntanataatgatcatgcaaaaccgagccggtggatcttactttcgatttcaaaccacataaatcttagggactgagctaaaaaagtgatcgacccacgcgtccgagacctcctctgtttccatattctcaccacagaagaactcttgaggctttctcttttctctaccatggcgaaaccggtgtccattgaagtgtataatcctaatgggaaatacagagttgttagcacaaaaccgatgcctggaactcgctggatcaatctcttggtagaccaaggttgtcgcgttgagatatgtcatttgaagaagacaatcttgtctgtagaagatatcattgatctgatcggagacaagtgtgatggagtcatcggtcagttgacggaagattggggagagactctgttctcagctttgagcaaagctggagggaaagctttcagtaacatggccgttggttataacaacgttgatgttgaagctgccaataagtatggaattgctgtcggtaacactccgggagtgttgactgagacgacggctgaactagctgcttctctttccttggctgctgcaagaagaattgttgaagccgacgaattcatgagaggtggcttgtacgagggatggcttcctcatctgtttgtggggaacttacttaaaggacagactgttggagttattggagctggacgtattggatctgcttatgctagaatgatggtggaagggttcaagatgaatttgatctactttgatctttaccaatccactcgtcttgagaaatttgtgacagcttatggacagttcttgaaagcaaatggagaacaacctgtgacatggaaacgagcttcgtccatggaggaggtgctgcgtgaggctgatctgataagtcttcacccggtgctggacaaaaccacttaccatcttgtcaacaaggagaggcttgccatgatgaaaaaggaagcaatccttgtgaactgcagcagaggtcctgtgatcgatgaggcagctttggtcgaacatctcaaagagaacccgatgttccgagttggtctcgatgtgttcgaggaagagccattcatgaaaccagggcttgctgatatgaaaaacgctattgttgttcctcacattgcttctgcttccaagtggactcgtgaaggaatggctacgcttgcagctctcaacgtcctcggaagagtcaaagggtacccgatttggcatgacccgaaccgagtcgatccattcttgaacgaaaacgcttcaccgcccaatgccagtccaagcatcgtcaactcaaaggccttaggattgcctgtttcgaagctatgagttaagtatgaagaaggggagatttggaagaatccttttagtgaatatatgatggtgtcaagttgtgtttatgtattgtatatgaaacaaccatgttggatcatataaatcactcctttaaagtgttacattgttgatgagtctattagacgattacccactctctttatttcataaatttgctaagaatacaatttctaagtcatcaagaatttcatctctaaaaaaaaaaaaaaagnnnnnnnnnnnnnnnnnnnnnnnnnnnnnnnnnnnnnnnnnnnnnnnnnnnnnnnnnnnnnnnnnnnnnnnnnnnn

SEQ ID NO: 86130 - DNA, 549 bp, Arabidopsis thaliana columbia
  unsure (1)..(549): unsure at all n locations
nnnnnnnnnnnnnnnnnnnnnnnnnnnnnnnnnnnnnnnnnnnnnnnnnnnnnnnnnnnnnnnnnnnnnnnnnnncttttttttttttttttaattaattacttaattcataatataacaaattttaaattacatttcaagataaccaaacaaggacgtttttcttgtgattttgttattcataattggacatgactcgtaggccaccttttataaaaaaccagctgatttttttcttgggaaaaaagaaaaatacagaaaaaattacataaagaccacaaaactcaagaatacaaaagtaaaaataagaaaagtaaaaaaagtaaaaatatgaggggtcaaagagacctattgaaaatcttttgacccggtgaaagtatagccatgggatcaaacatagctttcctatcaacaaatctcgaccatcggtttccaaaatggcgaatccattcctcttgagacttgtgatgaggaagatacaattttgaaatcaattccgtttttgacacaccattgaacgatctcttggttttgagctaccattttctt

SEQ ID NO: 86131 - DNA, 604 bp, Arabidopsis thaliana columbia
  unsure (1)..(604): unsure at all n locations
cggtcttggctnccgtccttgccaaggtctccacttgatctcctggtccgcaaggaagcgcacncncgccaacgggagcgcaaagccgaactgcagatccacgtncagaatntcnttcccccattccactggtggacantctatgctgctccacatgncctgcaggtccaaccatcccantacacgcaccaccacaantaccgcgggacccagccacaacttctatgggaagccgcgtggtccacctggtccaaaccgctaccctcctagcggaaaccagagcgggggttataatcaaagccgaggaggttacagcagtggatcatatcctccacaaggacgtggagctccttatgtggctggtcctagagggcctagtggtggcccgtacggggttggacctcctaactacacacaaggtggtcagtatggtggctctggtagctcgggaagagggcagaatcagagaaaccagcaatacggatggcaacagtaaagagctctaatgatttgttgatctgatatcttactcttacatttaatgtgatactagtaataagctaataatagattaatatgagaaactgaatctctttcttttccc

SEQ ID NO: 86132 - DNA, 1604 bp, Arabidopsis thaliana columbia
  unsure (1)..(1604): unsure at all n locations
cccgcgngaccggnccggatncccgggttancccacgcggcgaggttaggtttttaagtcgcacctctctctctcactgccgcatcttttcttagggttcttgtttcgctatctcttaaacacaaacagctctgtccgaataatctctcttcaagtacctcttttttctgattctgtatatcgccatgaattactgatttccctctctataaacccatcaaagtaaaccaatttctcctgtgacttgtacctaactcgatcttaccagactggtgatggcgtctttgaaccctttcgatcttctaggagatgatgctgaggatccaagccagctcgctgtggctttgtctcagaaagtcgagaaagctgctgctgctgttcagcctcctaaggccgctaagttcccaaccaagccggctcctccttctcaagcagtgagggagtcgaggaatgctcctcaaggaggtcgtggtgggactggtggacgtggtggattttcccgtggcaggggtaatggtggatacaaccgggacaacaggaacaatgatgctcctggaaatgagaatggattttttggaggatacaggagaccttctgaagatgctgatggagcaagccgtggtgggtctgttggtggataccgtgttggcggtggtcgtgaaggacctcgccgtggtggagttgccaacggggaatctggtgatgttgaacgcccaccgaggaattatgaccgccatagcaggacaggtcatggtactggcatgaaacgtaatggtggaggtcgtggaaactggggcactactgaagatgatatccctccaacgtctgaggaacctaccacagaggttgagaagagccctgttgctgagaagcaaggaggtgaggatgaaacccctgaagcaaagaaagaactcactgcggaagagaaagcacagaaagaagctgaagaagctgaagccagggagatgactctagaagagtatgagaaaattctggaggagaagaagaaggctctgcaagccacaaaggttgaggaaaggaaagttgacaccaaagtgtttgagtccatgcaacagctctctaacaagaagaacaccgatgaagaaatcttcatcaagctgggatctgacaaggaaaaacgcaaagatgctactgagaaggccaaaaagtcgttgagcattaatgagttcttgaagccggctgatggaaagaggtacaacgggagaggtggaggctcccgcggaagaggaggtcgcggtggtcgtggtgaaggaggaaaccaaaggtatgcaaaagaagctgcagctccggcgattggagacacagctcagttcccttcgttgggctagtaaagacccctggtccttcagcctcgctatctctgtctttcgtttctctttggttgaattttgttagttttataattttttgttacactttctgaaggtcttttctgcgaaactattacgttttttaagttatgaaaaaaattattaagataaaaaaaaaaaaaagaaaaaagnnnnnnnnnnnnnnnnnnnnnnnnnnnnnnnnnnnnnnnnnnnnnnnnnnnnnnnnnnnnannnnnnnnnnnnnnnnaatcg

SEQ ID NO: 86133 - DNA, 499 bp, Arabidopsis thaliana columbia
  unsure (1)..(499): unsure at all n locations
tgcgttagttctnccgtnaactgatgcaccacgcgcgagcntcntcattcccttcacttntcnctcgtggcgggancattttgatcggcatctgntttcgttcaggttggaggacggctgaaaccggaagagtttatatgaacttggaagagaagacccttgcaaaggaagttggaagaagcccaatttgcaggccgaaatccaaaaggagaccccggaagaagaggtccaaaggttgaggaagagcttgacgttcaaggctgggcccatgcccaagtttctacaaaggaccccccacctaaggttgaattgaagaagataccaactactcggtcctaagtctccaaagctaggacgcagaaagagtagcagtgatgcaacaggaggtgaagccgctcctcgcgtgacaaaaccaaaagactcatcatcatctacagtgaagaaaccaataacaaagtctcagccaaagcttgaaactcaagagaaatcagtgaaggcc

SEQ ID NO: 86134 - DNA, 471 bp, Arabidopsis thaliana columbia
  unsure (1)..(471): unsure at all n locations
tncccgggaaaattttggnnttaatccncaaggatttgngcccccaattnccagtttcnttgggaggaagggttttccttagccggtttgattatgnaaaatcccccnccactnggnttntccagntttgnaccattnaaccncctgcaaaggtttcctttgttgacgagaaggaaaaaaaggtcccccatggntcnggataaagacaggttccagttataaatttactccgcaacatagcttacatcattggggaagaagggggttcctcggaaaagtggatcttggggaatctacagtttcaaagttgtgcctcacttgtgtgctcttacgttccaagctcagtgcaaatctagcaagcttcaccacgaggcaaccaatcgattcaattgttttcttttcttatgtatctgatttgtcttggagattttttatctttgtctagttgttgtgcccagaactctaagttcc

SEQ ID NO: 86135 - DNA, 1437 bp, Arabidopsis thaliana columbia
atgtctcttcttgctttcttcctcttcaccatccttgtcttttcaagttcatgttgttccgcaactcggttccaagggcacaggtacatgcagaggaaaacaatgctagatttggctagcaagattggtatcaactatggaagaagaggaaacaacctcccatctccatatcaatccatcaacttcatcaaatctatcaaagctggtcatgtcaagctctatgacgccgatccagagagtctcacactcctctctcaaaccaatctctacgtcaccataaccgtccctaaccaccaaatcaccgccctcagctctaaccaaaccatagctgacgaatgggtcagaactaacatcctcccttactatccacaaacacaaatccgttttgtccttgtcggaaacgaaatcctcagctacaattctgggaatgtctctgtgaatcttgtaccggcgatgcgcaaaatcgttaactcactcagattacatgggattcacaacatcaaagttgggacacctctagctatggattctctccggtcgtcgtttcctccatcgaacggaacattccgggaagaaatcaccggaccggtgatgttaccgttgctgaagtttctcaacggaacaaactcttacttcttccttaatgttcatccttacttccgttggtcaagaaaccccatgaacaccagtttggattttgctctgttccaaggacactcaacctataccgatcctcaaaccggtttggtttaccgtaatcttctagaccaaatgttggattcggttctcttcgccatgaccaaactcggttatccacatatgcgcctcgcgatctctgaaaccggatggcctaatttcggtgacatcgacgaaaccggagccaacattctcaacgcagctacctataaccgtaatctgatcaagaagatgagcgcaagtcctccaatcggtacaccatcaagacccggtttaccaataccgacatttgttttctccttattcaacgaaaaccagaaatccggttcggggacacagagacattggggaatcttgcatcccgacggttcaccaatctacgacgtagatttcaccggtcaaacacccttaaccggtttcaacccgttacctaaaccgacgaacaacgttccttacaaaggtcaagtgtggtgcgtaccagtcgaaggagccaacgagactgagcttgaagaaacattgaggatggcttgtgcccaaagcaacaccacttgtgcagctttagctcctgggagagaatgttacgaaccagtctccatttattggcatgcaagctacgcgcttaattcgtactgggctcagtttcgtaaccaaagcattcaatgtttcttcaatggattggctcatgagacaacaaccaaccctggaaatgatcgttgcaagtttccgagcgttactctgtga

SEQ ID NO: 86136 - DNA, 3684 bp, Arabidopsis thaliana columbia
  unsure (1)..(3684): unsure at all n locations
aacgcgtcgtgagaggaggggaaattcgaaaagagaaagaaaaaaaattgaaaacgccgattcactttttttatatatataatataaaaaatttcttttacggaattaaatattctgtgatggatgcgattggatagaaggaaacaaaaaggaaaggaggaagataaaagagagaagaaggaattattctcttctctcttctctttcatctctgtctacatcgctgtttttttttttcttcacggatcgtgatacctgaagaagaagaaggttttttcaggggaagtgatatggttcgttgaaataagtttaaagttttaaaagattttgattctggttttattagtcaaattttgtaagatgccgtctgatataatggaacagagaggtgttcaacacctcccactttcatgaagatattcatattacttcagagaggcaatttgggtttatgaaaacagacatgatgcctgaaaaccaaggtggtcgtgatagactttcaagtatgccaaagagttcctggacatctgaaagttaccagctgaagccacaatctagtttttctgggtcgcacccctctggtagccctaacgcaagaaacactacaaatggtagtcagtgggaaagcagtttattttccagctcaatgtctgatttatttagtagaaagctgcggctacagggaagtgatatgctatccactatgtctgcaaacacagttgttacccaccgtgaagaagaaccgtctgaatctttggaagagattgaggcacaaactattggaaatcttctcccagatgaagatgatctttttgcagaagtgacaggtgaggttgggcgtaaatctcgtgctaatacaggagatgagttggatgagtttgacctcttcagcagtgttggtggcatggaactagatggagatattttttcttctgtgagtcatagaaatggtgagagaggtggcaataattctgttggcgagcttaaccgtggggaaattccatccagaacacttttggtcggaaatatcagtagcaatgttgaagactatgagctgaaggtcctttttgagcaatttggagacatccaggctcttcatacagcttgcaaaaatcgtggctttatcatggtatcgtactgtgatataagggctgctcagaatgcggcgagagcactccagaataagctgttaagaggaacaaaacttgacattcgttattctatctctaaggaaaatccttcacaaaaagatacaagtaaaggagccttgttggttaataatctcgattcttctatttcgaatcaagagctgaatcgactggtcaaatcgtatggagaggtcaaagagattcgtaggaccatgcatgataactcacagatatacatagagttctttgacgttcgagctgcagcagctgctcttggtggactaaatggacttgaggttgctgggaagaagcttcaacttgtgccgacctatccagagggtacaagatacacgtcgcagtgtgctgcaaatgatactgaagggtgtctacctaaaacgtcttatagtaatacatcatcgggacacataggtagacatttcccaggaatgatttcttcaacctccagtgatggtggatctatgcgggttatacataattctattggatcacctgtgaattccttcattgaacgacatcgtagtctcagcattcctattggattcccaccttcggcaaacggcatctcagcaagtaagcctgtaggacttcaggagcatggccaccattttgataattcaaatatggggatccaaagcatgccaaatctccatcctcattctttttcggagtacgtcgacaactttgcaaatggtagtccatatacgtcctctgcattttctgaaatggtcagtgatggctcaaaagcaaatgaaggctttatgatacataatgttcgtggagtggaaggctttagtggaggcggtataggatctcccatgcatcaaagctctcgccgccctattaatttatggagcaactctaacactcagcaacaaaatccgtcaagtggcatgatgtggcctaactcgccatctcacatcaacagcattcctactcagcgcccacctgttactgtattctctagagcacctcctataatggtgaatatggcatcttcccctgtgcaccaccacattggatctgcgccggtattaaattctcctttctgggacagaagacaagcctatgtagctgaatctctagaatcatctggcttccacataggttctcatggtagcatggggattcctggctcttcaccatcacatccaatggacattggttctcataagactttctctgttggtgggaatcgcatggatgtaaattcccaaaatgctgtcctgcgatctcctcaacagttatctcatctctttcctggaaggagtccaatgggttcgatgccagggtcatttgactcgccaaatgaacgatacaggaatctctctcaccgaagaagcgaatctagctctagcaatgctgacaaaaaactgtatgagcttgacgttgaccgtatattacgtggggaggacaggaggacaacattgatgattaaaaacattcctaacaagtacacttcgaagatgcttctatctgctattgacgagcattgtaaaggaacttatgatttcctttatttgccaattgacttcaagaacaaatgcaatgtgggatatgctttcatcaatcttattgaacctgaaaagattgtcccattttttaaggcatttaatggcaaaaagtgggaaaagttcaatagcgagaaggtggcaacgcttacgtatgctcgtatccaagggaaaacagctcttattgcccatttccagaactcaagcttaatgaacgaagacaaacgttgccgacctattctcttccacactgatggtccaaatgctggtgatcaggaaccatttccaatgggaagcaacatacggtcaagaccaggcaagccacgaagcagtagcattgacaactacaacagctttagcatctcttccgtttctgaaaaccgagaagaaactcctaatggaactgatccgttcttgaaggagaactaaccaatgagcaaaacaagcagaggtaaaacaaagaacacataaaaagagacacgaagataacaagaaggttaaatatatataaagttattattatatgatatcatccacacaccctagagttctgtaaatcggggggtgttagatttaccctgacaaaactcattttgcagtgaagaaattttttggagagatgaaaaactttggtgaccaccaacctttacccaggttgttgttgcttcaccagttttgttgtattacccaaatcccctgaaaaaaattgcaggttttttttttttgttcctctttttttttgggttttggggttatattcaaggatttttggttcttgctatcaatgtataacagccttggattacactcatcttctttgctggctatttgtggccattctacgttgtactcttttggacccttttttgaatgcttctattttgggatatataaaaatattatttttcctnnnnnnnnnnnnnnnnnnnnnnnnnnnnnnnnnnnnnnnnnnnnnnnnnnnnnnnnnnnnnnnnnnnnnnnnnnnnnnnnnnnnnnnnnnnnnnnnn

SEQ ID NO: 86137 - DNA, 715 bp, Arabidopsis thaliana columbia
  unsure (1)..(715): unsure at all n locations
cnnnnnnnnnnnnnnnnnnnnnnnnnnnnnnnnnnnnnnnnnnnnnnnnnnnnnnnnnnnnnnnacctgaacccacgcgtccgcccacgcgtccgggttcgctgccgccgaaatttccgatcaaccttaataaggaatatgacgtctctgtcggtaaatgatcggaaggattttgtagatgggcagatgaagtactggcgtcaaatagccgaatccgatggtttcgatatcgatgatgttccagtaccaagaggaaccagagctggactgtggtctgtcgactgtaaacacccacgttttaggcttagggcttgtttacccaagatttatgctatggttggtcttcaccgttacaatttgctcagggggacaaacttcgagcaccttgagttactaaaatacaacgagtcaatgaactgtgtgtgctcttactatataaacttcgttgcagtagatctttctagccagttgcagaaaacttttcagattcgagttgatgaaaaaagttttggagatttggatttgacggtctctgttgctaaacctaatgatgaatagaaagtgaccaccgagaagcgtttcacacatcactttcattgggaagcagctgccgatgatttctacagatgtgcactgcctgaatggccgtcagttggtgatctgaagcagcaaaagctactttacatggtgaagaaatgcgagttgcagtccaatg

SEQ ID NO: 86138 - DNA, 768 bp, Arabidopsis thaliana columbia
acggacgcgtgggtgaacagcaagaatctcaactctcttcaccggcaatttcacccgatgagctctacaagtttgtatttacttctgtggaggaaatgatggttgaggaatcagagtacctagttgctatcatcaccgagttccttcgcagtataagtgcagaaaaactcaaagtggatttgaacatctatgtgatgaccatcaaacttttagcttacagtaagcgatttgcagaactgtcgctattcaccacaaacaagataatcgaaccatcaaaggaagtcgcgttccaacttctggatagtggtcgtcaaaatatccgggtaagaaaacttgggcttgatatgttgagacagctctccttgcaccatgattacatctcctcccttgtgcaagatggatactatcttgaagctctgcgatatgctcagaagcataaggtgacgagtgtgcgatcgtcgatgttcctagaagcagcattcgcgtcgaatgatatgcagcatttggctgcaattttgagggtcttgtcggaattgattcccgggtttaaagaaacttctgaatattacaccttttatggtcttctcaatgacaccagttcctcagttgctgtctgaagagaatctcataccacattttatgttcaagaaagtaaaatgatctctggttcttcgactggatcttgataaataaatgctgttgaacattttctggttcctatataagaataactataagaattggttttaagacatctataatgacgag

SEQ ID NO: 86139 - DNA, 665 bp, Arabidopsis thaliana columbia
  unsure (1)..(665): unsure at all n locations
ctgtccgtttgcggtaccggtccggaattcccgggtcgacccacgcgtccgcatggtctgttatactgatggatcatgtgctgcttgcacttatcatgtatatatagcgaaagcttggaagaatctgccttgacatactgaaagacaagtggagtcctgcactacaaatacgaactgtgctcttgagtatccaagctctttgataagtgcaccaaacccagatgatcctctgtctgagaacatagctaagcattggaagagcaatgaggcagaagctgtggaaacagctaaggaattaggactcgtctctacgcaagcgggtgcttaaagaagactgcatatgggggaaagatcattgtcctttaagcaacattcttatatgggggaactcttatctcaagggtttatcctgaatcccttcttctgaaaacagggggaaaaggtttgtaccccccggcattttgtataactagggggatctaagactcgtttacccatatctggaatataactttcttcaaaacacaaaatacagagnnnnnnnnnnnnnnnnnnnnnnnnnnnnnnnnnnnnnnnnnnnnnnnnnnnnnnnnnnnnnnnnnnnnnnnnnnnnnnnnnnnnnnnnnnnnnnnnnnnnnnnnnnnnnnnnnnnnnnnnnnnnnnnn

SEQ ID NO: 86140 - DNA, 842 bp, Arabidopsis thaliana columbia
  unsure (1)..(842): unsure at all n locations
cgaaattccgggttggacccacgcgtccgagctccgggtataagggcctctccatctgaggataatatgcggtttttcaacgttatgattctgggtcctacacaatcaccttatgaaggaggagttttcaagtgggagctctttttgcctgaagaataccctatggcagctcccaaggttaggtttctcacaaagatataccatcctaacattgacaagcttggaagaatctgtcttgatattctcaaggacaaatggagccctgcactacaaatacgaacagtgctcttaaggtatatgagctgattacataagattatttcctgctaaaaactattggtttcttggagcttgacttctgctcctattttattaacgtgtgcaatccttataaagtattcaagctcttctgagtgcaccaaacccagatgatccgctttctgagaacattgctaagcactggaagagtaatgaggcagaagctgtggatacagctaaggaatggacccgtctttatgcaagcggcgcatgataaattggagggtgaaaactgaaaagatctctttcatccaaataacattacatttgctgaaatctatctcaacatcaaagttataagaaagcttatattttgctggttatttccccccgccactgctctgtaatctctcttaatcacactgtatcattactcctaggatcaatactcgttcttatatttgaagttcgtcaaagtcttttgagtaataaatatctataaaaaaaaaaaaaaagnnnnnnnnnnnnnnnnnnnnnnnnnnnnnnnnnnnnnnnnnnnnnnnnnnnnnnnnnnnnnnnnnnna

SEQ ID NO: 86141 - DNA, 913 bp, Arabidopsis thaliana columbia
  unsure (1)..(913): unsure at all n locations
gaaagatagagaaaggaaatcgaattaaaatcttcgtcagattcgagagacgacgacgacgaacttgttgttctcgattatcatcagcagctcccttcaaaaaccctaactctctgagctcgatcgacaagtgataatggccaacagtaatttgccgcgaagaatcatcaaggaaactcaacgtctgctcagtgaaccggctcccggtataagtgcctctccatctgaggataatatgcggtatttcaacgttatgattcttggtcctacacaatcaccttatgaaggaggagttttcaagttggagctctttttgcctgaagaataccctatggcagctcccaaggttaggtttctcacaaagatataccatcctaacattgacaagcttggaagaatctgtcttgatattctcaaggacaaatggagccctgcactacaaatacgaacagtgctcttaagtattcaagctcttctgggtgcaccaaacccagatgatccgctttctgagaacattgctaagcactggaagagtaatgaggcagaagctgtggatacagctaaggaatggacccgtctttatgcaagcggcgcatgataaattggagggtgaaaactgaaaagatctctttcatccaaataacattacatttgctgaaatctatctcaacatcaaagttataagaaagcttttattttgctggttatttccccccgccactgctctgtaatctctctgaatcacactgtatcattactcctaggatcaatactcgttcttatatttgaagttcgtcaaagtcttttgagtaaaaaatatctatatttctctnnnnnnnnnnnnnnnnnnnnnnnnnnnnnnnnnnnnnnnnnnnnnnnnnnnnnnnnnnnnnnnnnnnnnnnnnnnnnnnnn

SEQ ID NO: 86142 - DNA, 858 bp, Arabidopsis thaliana columbia
  unsure (1)..(858): unsure at all n locations
ttnnnnnnnnnnnnnnnnnnnnnnnnnnnnnnnnnnnnnnnnnnnnnnnnnnnnnnnnnnnnnnnnnnnnccacgcgtccggcacgaaactagagacgacgaagcgtactcgattattatcagcctttggtagcttcgttctctctcaaaaaccctaacttctctgtgacgatcgaatccgatagcgtgcgataatggccaatagtaatcttccccgacgaatcatcaaggaaactcaacgtctgcttagtgaacctgctcctgggataagtgcgtctccatcagaggaaaatatgagatatttcaatgttatgattcttggtcctactcaatctccttatgaaggaggagttttcaagttggagctctttttgcctgaagaatatcctatggcagctcccaaggttaggtttctcaccaagatttaccatcctaacatcgacaagcttggaagaatctgccttgacatactgaaagacaagtggagtcctgcactacaaatacgaactgtgctcttgagtatccaagctcttttaagtgcaccaaacccagatgatcctctgtctgagaacatagctaagcattggaagagcaatgaggcagaagctgtggaaacagctaaggaatggactcgtctttacgcaagtggtgcttaaagaagactgcaaatggagaaagatcattgtcatttaaataacattatatatggtgaaactctatctcaaggttttatctgaatcctttttctgaaaacagaggaaaaagatttgtcctctctgaatttgtataactgggggggtctaagactcgtttacccatatctggaatctaactttcttcaattgtccttgctttttg

SEQ ID NO: 86143 - DNA, 1109 bp, Arabidopsis thaliana columbia
ccggttgctctcgattatcatcagcagctcccttcaaaaaccctaactctctgagctcgatcgacaagtgataatggccaacagtaatttgccgcgaagaatcatcaaggaaactcaacgtcgggacaacccagccctccgagctcccggcataagtgcctctccagctgaggataatattttgaattataacgctacgatgctgggtcctacacaatcatcttatgaaggatgagacctcaagccggagctcttttcgcctgaagaataccctatggcagctcccaaggctaggttgctcacaaagatataccatcctaacattgacaagcttggaagaatctgtcttgataattctcaaggacaaatggagccctgcactacaaatactaacagcgctcttaaggtatatgagctgattacataagatcatttcctgctacaaactattgttttcttggagcttgacttccgctcctataatattaacgcgagcaatccttatcaagtattcaagctcttctgagtgccccaaaaccaaatgatccgctttctgataccattgctcagcactggcacgagtactgaggcaaaagctgtggatccagtttaaggatggaccccgtctttctgcaactcggctccaatgaattaaattggaaggtgtgaaccaacagcgaaaagtatcttctttctaatcgccttagatgaacaatattacccattcttgcgccgaaaaaatatcttatattcttcacaacagaactccaagtaggctttcattcgaatcgcaagaaagcgctctttacactaatcttctatcggcactgggagcttatatttatacgtacaacgctctctgtatcaaacttggacctatctgtagtggaaattctctctctcctattaaaatccaaccccctcgggtgaatcttttactcactctccccgaaatggaaatcaaaataacgttccgcttacttttattaatttttggaacgattctcggtgacacacggtcccttcttggccgcgtatcaacacaatcctcctcactaacaatatatacaagcagcattggggcccggccccctcacctttaaaaggca

SEQ ID NO: 86144 - DNA, 587 bp, Arabidopsis thaliana columbia
agcggcacatgccaaaggaacgcagcttgctggtgaagccatagctaatgtcaggacagttgctgcatttaactcggaggcaaagattgtccgtctctacactgcaaacctcgaaccaccattgaaacgatgcttctggaaaggacagatcgctggaagtggttatggtgtagctcagttctgtctttatgcatcttatgctctcgggctatggtacgcatcatggcttgtgaaacacggcatctctgacttctccaaaaccataagagtcttcatggttctgatggtctcagccaatggtgcagcagagacactcacactggctcctgatttcatcaaaggtggtcaagctatgcggtctgttttcgaacttcttgaccggaaaaccgagattgaacctgatgatcctgataccaccccggtcccagaccggttacgtggtgaagtcgagctcaaacatatcgatttctcttacccttcaaggccagacatccagattttccgtgaccttagccttcgtgctagagctggcaaaaccctagctcttgtgggtccaagcgggtgcggaaaaagctcagttatctccc

SEQ ID NO: 86145 - DNA, 511 bp, Arabidopsis thaliana columbia
  unsure (1)..(511): unsure at all n locations
tngtgtaccnntngagtagtgaggaatttgtctgngaggcccncnaccncagtnggattccgagtccgctgatcattggcnatgattatgtggnggcccccnccctgaagatgaccagttcagccncctgnggagaccactgatgcaggagcagagactaatggggcccccctcctaatgtagctgtagaggattaagaaacccgaagttgaagcctgattttgatgatatggggtatatttcaagccgtgttgttttgagttacttttaaaaaatgttcgaaagcttgtccactttttcatagactatttatgttccaaaatgttggttcatgctttcttggttgtttttgaattaactctttgaacttaaaaggtcatcactgtggtaggtgcttggtcattgatattccggcattagagaacagtagcatctttgattattcgtgagactcttttctgatcgagaatatgctttttctcaagtgtttatatatcagttttctcaagcc

SEQ ID NO: 86146 - DNA, 454 bp, Arabidopsis thaliana columbia
  unsure (1)..(454): unsure at all n locations
accccgnatncttctccggntcagggccttccggtttggacactcgcgggccgggtccaatggctctgcctctacctaaacttggttcaccgatccccccaaaatacgatgtgtactttaaaagggagtctccggtgttgatgcttagggagacgattatagcttccatttcatcgcctacccccactcctgcacccgaagattccagcagtcgaacttcaagtccaaacctccattcaagaatgttaaaaagtttgatttttgcatgatatatgctattttttgtgcttttacgtttctgcggttaactttttctctaccgtgtcttgcaaactgattgaatcttcacttgccaagatttcgaagatttttgttatgagaattttgtgtagatctaattagaagaaaccaaactgcaaaagccttggctcaagtatatatgtattttacgatt

SEQ ID NO: 86147 - DNA, 598 bp, Arabidopsis thaliana columbia
  unsure (1)..(598): unsure at all n locations
accagtggnctaaaagnagtggaagnnttccaattcnatanaatnccatgnacagagaactaggggnnctgttaggaaatgcngttccggnctgcattgggttgaacagatggtcaccttggaataagtgttgttgagtgtcatggctgctggtgcaaccccattggctcccaactcggctggccctaaaaatggccattgtgttggaagaagccggccacaaaaccgggtttcttgctgagcctgtggagggattacnctgaagcgatcccttgggattgtgaaggatggaattgaaaccagggaggctttaaaatggctggaatctgcttagaaaacgagcgccaaggttctctgaacaacggttttgtgaggacttcaaaactgcgattcgacccattttcacaggtcctcttaaatgacagttcttaaaccctcaaaacctgcttactgcactagcttttaaacgcacaagacaagctaggttataccttttatcctctctttatagattttttttttaattctggttaaaggtctgacgtagacgttgtaagaaacagtttggtcaaaagaaacgagttagacgtccgggggc

SEQ ID NO: 86148 - DNA, 531 bp, Arabidopsis thaliana columbia
  unsure (1)..(531): unsure at all n locations
aangcngnttnaagacccgtttcccttaaccaaatttccccctgggggcgcccctttttnttcaacttccccccccngccccccaaaagttgccgggaaagagttggtttttaaaccccggggtcatctcccagtcccgttgagattgggggcaacccngtgccagggattgggggaggaccatcgagcttccccgatgaaagtgatgatgagtctgatggagatgacccatgtggagatctctcagaaagaagtcccctgccgctgtttttggaggacttgctagaaagagagacgaagacggcgaagaagctggagaagacggtgctgcccagaaattgggtgcacttgagaggatcaagagacagaagcttaatcagtgaacaagcgagtcgtagacaattagtcttgtgcttagtgattctggaaccaaacttcattgtaatacccagaaacgtgaaacttagagaaaaattttgtattctgttttgttttataattcgacactttgtttacataagagttctctgt

SEQ ID NO: 86149 - DNA, 496 bp, Arabidopsis thaliana columbia
  unsure (1)..(496): unsure at all n locations
cgctccatgccggtataatctccgccctgactnagtccaacgtgtggcggcatcnccccagtatcgggttactgtgatatggtgcggcatatggagagttgatgtaggatgtccagtggtgtcttgactctagaccagaggttctggagataagaggggacaaagctagagtaataaggcgcaaccgtgacagacttcatgaacttcaggttgcagattacatttaaaaaaaagaaccagactctcatgttcaagattcaaactttatcaccgtatttgtcatcatacacataataaagcatcagaaggtttcagtctttcagacaaggtccagatgcagttgagcgaggccatactttgaactctatgtacgtatctatgtatatatgtgtgtgaatcatcagatacaacatactatactcatcaagtaaaggttttgtatagcaaaaacactgggttagtgttacttaaagagtggtgaaattctctggttttt

SEQ ID NO: 86150 - DNA, 548 bp, Arabidopsis thaliana columbia
  unsure (1)..(548): unsure at all n locations
ttncggtttcccacatttttgccaaaggggcaagccngtctacacctccttngtcncntaccgggggttncaccccccgttgtaaccncggnggncctggataatagtggccaaaaaggcncaaaggcttncnccctcaacgggatgctttgttcttggggtggctggttgccgaggatccttttgtttatcttcttctttgttcacatgtacctccatttccatcaggtgaagcaagtgtttccactgggattttacagccttcttacgataccaccggctctagcagtgatgaatctcctttggttctggaaaatcaccaaaggattgatcaaaacactctccaaggcgaaaacatcggggatgaagaaacagtgatggttaccctgaaaaagatttttcaactgcattcactttgatgtgtccatgaaaaattgattgatattcatgttgtggttgtcttggatgcccttttgggttttatggacaaagagtgtgcaagctaatgggggattgtatattcaaacttttcagctgtttctttaggt

SEQ ID NO: 86151 - DNA, 568 bp, Arabidopsis thaliana columbia
  unsure (1)..(568): unsure at all n locations
ccaactntttggncgctatcgtntttcccgnntcctanaacatttctcacaattcctctccaaaagtgttcgcagaggtcaccctgtgcttcagccaaaacgggcaagccagcttgtaaggtgaagagcgtcgctgaaaattcagctccatcagcttacaagaccccggagaaatttgtgcaggagattttggacaaaacttcggctctattattgtccgaggctaagggagagtgcgtggaggctttggcagaaacactaagaaaacgacttacctcagagttgacccacctctctattatgtacaagaactcagcgtacgcagaaggtttttatgctggtacacgccaccagccgaagcgattgtaagaggtttggtttacatgttgaaccggagatatttgggagagaaacattacccggttcagcaatatattttcctttcgttgggcagcaaactttttggttaaggccttgaaatggtttacattttacatggaaagctccgaccctttttttcacttanttgntgctttgntttgtcaatnaaaggtaaaccttttctttt

SEQ ID NO: 86152 - DNA, 602 bp, Arabidopsis thaliana columbia
ctcctacgacttactatagggaacgctggtacgcctgcaggtaccggtccggaattcccgggtcgacccacgcgtccgcggacgcgtggggttttataaagagttactttggcaaaatggaaaatccggcgaagagagtgttgatgacatccaacggcgacgaggtgtcccgaaacatcgctttccatctagccaaacacggttgcaagttggtaatgatgggaaatgagggttccctaaggagcattgtagacaagattagagattccattgagggagccttccctgccgatgttatagcactcgacatggaatctgactctgaagttgcttttcatgccgctgtccaaaaggcatgggaactttccggccatttcgatgcttttctcaactcttatacctaccaaggaaaggtgcaggacattcttcaagtctctcaagatgagttccacagaatcacaaagatcaatctcaccgctccatggtttctcttgaaggctgtagccacagggatgaaggcccatgggtcaggagggctcattgtcctcatggccactatcgccagcggagagagggcgctttaccctggcgctgatgcctac

SEQ ID NO: 86153 - DNA, 500 bp, Arabidopsis thaliana columbia
  unsure (1)..(500): unsure at all n locations
ttgctgcccntgatcgcaacaacgcccctgnnnagaagcccnctagtttgggccggccttcacgcgtggattggnccgngtctggaaaaagaattgccgttanncccaagcgaaagagtcaggngtgnngtatctactgggacatggggncataagggctcctaaggattcttggtttctgaagaagctggtaataaattacttgtatgctttcttgaggaagaactccaggagagggataacaaaccttaangttccgcatacacatttgatgcaagttggaatgacttatatggtatgaacaagaccccgatcaaactactggttttcatctactcgcaagtctcatgaattgtcgaagaacatgaaacacttaccaattcaagagattttttttttcttttacacattgttgcaaaagtgtgatggagttataaaagtacaggagaaacaaaatgatttttttgtattgagagttgctatttgattctgtgtttgtt

SEQ ID NO: 86154 - DNA, 492 bp, Arabidopsis thaliana columbia
  unsure (1)..(492): unsure at all n locations
taccaaggcaatcagtgttgtgatncctgnccacttaggatgccgttgtgaaggattgtttgaccccagagtgaagaaagttagttatggagatgccccttcgaggttatgggaaggacctcttttggtgttgatgtattcccttgtgacacttatagagtcgatgatgagtgcagtgttctattttagctgccgagtttattatagtatggaagcttctagaggtgaaactcacccaatcatggaaacggttacggttgtggatgctgagtaatggtgcgttgtgcggatcacactcggtgaatggacatggaaacgtattagctgaagaagaagttgtatatcatcacatggggttttattgagcactttttgtttcactttgaaacttgatgcatctttaaggtttttgttatatatggtttctctgtttacattgtttgaagattatatagcatcccaagttcgttcatagttctgctcttgtttctt

SEQ ID NO: 86155 - DNA, 455 bp, Arabidopsis thaliana columbia
aaaaagaaaatcgagatcggaaactccgcacggttcccgcctcaaccaaatcaaaaaccctaatttccccaccaatcagatcctccacaattatcccaccgacgaatcctatcaatctctctagatgactgaagatagcagcaaatcagtgtcggaacaaacccgacccgttttgagtgatttgacgaatcttccaaagaaaagagggatttcatcgattttgggtgatttgcttgatgaatctggtaagaccgttgctcatgaagtttcaaaagagaagttttcaaagaggttgtgtttagtcgtagatgatttggttaaggaaaatgctacacctttggatacaattcaagggtcttgttcgtttgataagaatacttctggtgatgctgttgacaaagaagagtatcatgatgctgtaatggaattctccagtggagattgcaaagcattga

SEQ ID NO: 86156 - DNA, 749 bp, Arabidopsis thaliana columbia
tccgcaatttcgggtcgacccacgcgtccgaagatttgctctgtccagagctccaaatttcaagaacataaacactacacacaaaacactgaatacgatgttgcttggaaagagacaacgaccaccgatcaacagaaccacaagtctatcggagataaagttcgatctaaaccttcccagcgagtcagagccatcaaatcaacagaagccaaccgttgcgagcccgtacggttccaacggtcaagctgtaacagcagccgttgatcaaaaccgtgggttcttagatcaacggctcttatccatggtcacaccgagaggtaacctgaggagacactcaggcgatttctccgacgctggacatttcttgagatcttgcgcactttgtgaacgccttcttgttcctggccgcgacatctatatgtataggggagataaggctttttgtagctcagagtgcaggcaagagcaaatggcacaagatgagaggaaagagaaaggtaaatcggcggcaccggcgaaagaaccggcggtgacagctcccgcgagagcgaaaccccccaatgggagagctgcacccgccgtgtaatccccattttcatatactttctagctctatatatgtgtgggttgctatggggttgtctatgaattatcaggggtaatacatttttgaagctttaggcgtttaaaaaaaaaaaaaaggcggcccctcttaaggatcccagcttacgttcgcgtgcatgccacgc

SEQ ID NO: 86157 - DNA, 461 bp, Arabidopsis thaliana columbia
acttcccttgagcttccttggtgttcttcgtattgtcgtcgcgactgagagaaggccacaaaagcttcgtttatttccttcagatccgatatagtgagagagagagagagagaggcagcttacggcggataaatatgagcagcagcaaggtcggcggcggagcaaggaaaggaattcaggatattccgtcagggtctagaaaaatagtacaaagcttgacggaaattgtaaactctcctgaggctgagatctatgctatgcttaaagagtgcaatatggatcctaacgaaaccgttagtcgcctcctctctcaagatccatttcacgaggtaaagagcaagaaagaaaagaagaaagagactagggatatatcagattctcggccgcgtggtgctaataacacctacaaaccgggtgctagaggtggttctgctcgctacgccggacgaagtggatctacc

SEQ ID NO: 86158 - DNA, 839 bp, Arabidopsis thaliana columbia
  unsure (1)..(839): unsure at all n locations
nnnnnnnnnnnnnnnnnnatacgactcactttagggaaagctcgtacgcctgcaggtaccggtccggaattcccgggtcgacccacgcgtccgcgagtaacgacgagagatgcttcttcaggcggcggtgcagaaccgcaatgttccactggcttcttccgcctcctactctcgtctccttcgctgcagatctcctgtcgtctccgtagctgctctctcgaagaagacggcagcaatcgtgtgctccatctcccaggtttatggctacggcacggtggactacgagagaaggccgattgtccagtggaatgccatctacaagaagatttcgctgatggagaagccagagcttggcgctgcttccgtcttgaatcagtgggagaaagccggccgcaagcttaccaagtgggagctctgtcgggtcgtcaaggagcttcgcaagtacaagcgtgccaaccaagctctcgaggtgtacgactggatgaacaacagaggcgaaaggtttcggttgtctgcaagtgatgctgcaatccagctcgacttaatcggcaaagtgcgtggcattccagacgccgaagagttcttcctccagctccctgagaattttaaggaccggagagtttatggttccctcctcaatgcctatgtgagggccaagtcgagagaaaaggctgaagccctgctcaacaccatgagggacaaaggttacgccctgcacccgcttcccttcaacgtcatgatgactctctacatgaacctcagggagtatgacaaagtcgacgctatggtcttcgagatgaagcagaaagntatacgtctcgacatttactcctacaaca

SEQ ID NO: 86159 - DNA, 1039 bp, Arabidopsis thaliana columbia
  unsure (1)..(1039): unsure at all n locations
cgccggcannnnnnnnnnnnnnnnnnnnnnnnnnnnnnnnnnnnnnnnnnnnnnnnnnnnnnnnnnnnnnnnnnccgggcgtgcgcccacgcgtccgtacggctgcgagaagacgacagaaggggagagcgcatcagataaacggctaaaaagcaaattctctggaagaagaagaagacgaagatgcaaccgacagagacgtcgcagccggcgccgtcggatcaaggccgccggcttaaggatcagttatcggagagtatgagcttcagtagccaaatgaagaaggaagacgatgagttgtcgatgaaagctttgtcggcgttcaaggccaaagaagaggagatcgagaagaagaagatggagatcagagaaagagttcaagctcagcttggtcgtgttgaagatgagtccaagcgtctcgctatgattcgcgaggaacttgaaggttttgctgatcccatgaggaaggaagttactatggtgaggaagaagattgattctctcgacaaagaattaaagccattggggaatacagttcagaaaaaggaaacagagtacaaggatgctcttgaagcattcaatgaaaagaacaaggagaaggtggagctgatcaccaagctacaggagttggagggagaaagcgagaaattcaggttcaagaagctggaggagctaagcaagaacattgatctaaccaaaccttagtgttggacgagcagagtcgctgggatttggctattcaaagttctaaaaaagtcactttttagagtattttcattgttcttttatgattctagtaatatatataatttataaaataaaaagtaagaagatatgtgtttgaactagatgttgcaaagaaaatgtaacaaagttacgatggcactacattatcgacgtgattggcagaattgtaatagtaatgtaaagaaactatgtttgttccggagcattttcgaaaaaaaaaaaaaaaaaaaccccccccccagcggccgctatagaggatccaagcttacgtacgcgtgcatggtacgtcaag

SEQ ID NO: 86160 - DNA, 1214 bp, Arabidopsis thaliana columbia
  unsure (1)..(1214): unsure at all n locations
nnnnnnnnnnnnnnnnnnnnnnnnnnnnnnnnnnnnnnnnnnnnnnnnnnnnnnnnnnnnnnnnnccacgcgtccgcggacgcgtgggcggacgcgtgggcgttattatctcatcttggtccgaaaactatggagatccatctgaaaacaaagaccttcttacccagttcaagaacgctgcatctgccattgcttctgatgagaagatcgcattactcggtgctattcagtctctgtttgaagggtccatgtacacctttgtgtttctctggactcctgctttgagcccaaacgaagaggacattccacatggtttcatatttgcaacattcatgctggcttcgatgcttggtagctccattgcctctcgtttgttggcacattcgtctccaaaagtagagagctatatgcagatcgtatttgtgatatcttctgctgctctaatgcttcctgttgtaacaagcttcttggtggcgccctcaggtgtaaaaggtggaagcatatccttctctggatgcattcagttaatgggtttctgcacatttgaagcgtgtgtaggaatcttctggccatctataatgaagatgagatcgcaatacattccagaggaagctagaagcaccatcatgaattttttccgcatcccactcaacatctttgtctgccttgtattatacaatgttgacgcgtttccaatgaccgtgatgtttggaatgtgctctgtattcctttttgtggcctctatattgcagaggaggttgatgaatgtagccgagatccacaagtcaagatcacaagagtggtcagcagaaaaggagatgacctcagaagctgaccctctaaacccataataaccaaatcaaccatgacataagaaaaaagaagaaacgccgttccgtttctcttgatgattttcctacttgtcttaatatgttcgttggtcataaagtctttccacttgtttagttatatttggattttgtgccttcaccagatgtagcaaacacaccctaatacctctgcacgtcagcttatttgggctttggccactattcttcttgaatctttcaactttttttttatgtgcgtcaaaaacaatctttataagtcgattttggccctaaaccataaaaaaaaaaaaaaaaaaagggcaggccgctctagaggatccaagcttacgtacgcgtgcgtgcgacgtcntagctcttctatag

SEQ ID NO: 86161 - DNA, 1598 bp, Arabidopsis thaliana columbia
acccaagcgtctattcagctaaacagacattgcgccgccgttaagtcgaaaggatagaaagaaattaaagaaagaagaagcttgttgtctttgcttcttgaggctctcttcttgtcttgatcatctgttacgttgttccacgaaaagaacagtagctttgtctctccatatagggttattatctgaaatgggtaattgtttagattcatcagctaaagtggataatagcaaccatagcccacatgctaattctgcttcttcgggctctaaagtttcaagcaagacaagccgttcaacgggtccttcaggactaagcacaacttcttacagcacagatagtagttttgggccattaccaacacttaggacagaaggagagatactttcatcgcctaacctaaaagctttcactttcaacgaactcaagaacgcgactaagaactttcgtcaagataatctactaggggaaggaggtttcggttgtgtattcaaaggatggattgatcaaacatctctcactgcttcacgtcccggttctggaatcgttgttgctgttaagcagcttaagcctgaaggttttcaaggtcataaagagtggttgactgaagtaaactatcttggtcaacttagtcacccaaatcttgtattactagttgggtattgcgcggaaggcgaaaaccggcttcttgtatatgaattcatgccaaaaggaagcttggagaatcatctttttagacgtggggcgcagccacttacatgggcaataaggatgaaagtggcggtaggtgcagctaaagggctaacttttcttcatgaagcaaagtcacaagtgatatacagagactttaaagctgctaacattctactcgacgctgacttcaatgctaagctttcagatttcggattggcaaaagcaggtcctactggtgataatacacatgtgtcaacaaaggtcattggtactcatggatatgcagctcctgaatatgttgccacaggtagattaaccgcaaagagtgatgtgtacagcttcggggtcgtgctactagaactaatatcaggacggcgtgccatggacaattcgaatggaggaaacgagtatagtcttgtagattgggcaacaccgtaccttggcgataagcgaaagctttttcgcataatggacacgaaactagggggtcaatatccacaaaagggagctttcacagctgctaatcttgcattgcaatgcttaaatcccgatgcaaaactccggccaaaaatgtcagaggttttagtcacattagaacagctagaatccgttgctaaacctggaaccaaacacacccaaatggaatctccaagatttcatcattcttctgttatgcagaaatctccggtaagatatagtcatgatcggcctctgctgcacatgactcctggtgcatcgcctttaccttcttacactcaatctcctcgtgtaagatgaaacacatttaagaaaacagatcgtgctttatgcttgtatgtgtactatatgtaaaaatgcaggcttgtctgtgtaattagagaggagtgattgcaaaggtttatacagagattaactatttacttcaact

SEQ ID NO: 86162 - DNA, 639 bp, Arabidopsis thaliana columbia
  unsure (1)..(639): unsure at all n locations
cnnnnnnnnnnnnnnnnnnnnnnnnnnnnnntggtacgcctgcaggtaccggtccggatttcccgggtcgacccacccgtccgccgcacgcgtcccgcccacgcgtcccgcccacgcgtccgtacgggctgcgagaagacgacagaaggggattcaggacatggctaaccgaacagacaactcgaatcgctgttcgaatggtaaaaagccaaatgatggaatgagactcattatagcgacattcgtaggaatagttgtcggtttcttcttggggatatctttccctacactatcactaacaaaactaaattttccctctggcattcttccctctgttgatattacttacgtagaagatgagacaccagaaacatcgagtgaaacgcttttgcatacatggtcatctaggggtccgttacatggggctaattcaagtgatgcaccgcattggaagatttgggttccatcgaatccccgaggtgcagagatgctgactcctggtatcattgcacctgaatcagattactacttacgcagactttggggattacctgaggaggatgttcctgtgaagccaaagtatctcattgcgtttactgtcgttttggcagaagtgacgttgtgcttggtcaagagttt

SEQ ID NO: 86163 - DNA, 538 bp, Arabidopsis thaliana columbia
  unsure (1)..(538): unsure at all n locations
tattcagcccaactggtgncatggtatatccacnacacttttccccccccagaggagngcccttcaaatgttcctccgcccatccggcccagaaatgggacccgtaccatcaagcctgttccaagccccccatatccggtccagaatcccccgggtccgggtataatggaattgaaggatgaagtggctaagaggctgaaagttgatccaggaacgtccgatatcaagtatcttgacgatgataccgaatgggttttaatagcttgtgatgctgatcttcaagaatgtctcgagatccctagatcctcccgcacgaaaatcgtaaggctcttagttcatgatgtaacgacaaatctagggagctcctgcgagagcactggagaattgtgacctgataattcattcgaactcttttgtaaatatgttttttgaattttattattgtttagggtttctttggacaaattaaagttgtaaaagaaaacatttgtttgtaacttttaactgtaaaagtgtaagagagagagaggttagaagt

SEQ ID NO: 86164 - DNA, 643 bp, Arabidopsis thaliana columbia
  unsure (1)..(643): unsure at all n locations
agcaaagctccatcctttgtggttgtgtcgtagatagccattcgagtggttaaaagttaaaaacttttatgtccacttgaatccttttttgtttctttttggattttatctgatcactcgttttgtgtctctgaatctctatcccgtggattcgcatctggatttgtttttttttcatttttattcgagcggctaacctttctcggatccatctgatatcgattggattctctctaatcaatcgttgaaatggcggatgcgtggaaggatttagcttcagggactgttggaggagctgctcaactagttgttggtcatccatttgacactatcaaggtcaaacttcagagccaaccgactccagcaccaggccaacttccaaggtacaccggtgcaatcgatgcggttaaacagaccgttgcttctgaaggnaccaaaggtttgtataaaggtatgggagctccacttgcaancgttgctgccttcaatgcggtttgttcactgtgaaanggcaatggaagggctgctaaggctgaagtggagtncctttgnccattagcaacagttgtggcggtnagngntggttcgcggtcgtcctgctgccaccgngtgnnaggcggtnaancagggtacgggcnncagc

SEQ ID NO: 86165 - DNA, 406 bp, Arabidopsis thaliana columbia
gtcctagtcctgttggtactttgaatgtatcatacgcatgtgacatgaaaggtgactgcaaatctagtccagattctgttttggctgttacagatgcttctatattcaagggtgacgaagatggttcttcccatcacattaaaaagggttcacttattgaagttctttctgacgatagtggcatcagaggttgttggtttaaggctctggtattaaagaaacacaaagataaggttaaggtccagtaccaagatattcaggatgcagacgatgaatctaaaaagctagaggaatggattttgacatctcgggttgctgctggtgatcatctgggggatcttagaatcaaaggacgggaagtttgtgaggcccattgctgaagcccagcaaagaaaatgatgtatgt

SEQ ID NO: 86166 - DNA, 511 bp, Arabidopsis thaliana columbia
  unsure (1)..(511): unsure at all n locations
atcaggagaccttgcccncngngcccccattgccngncttttatgccgngntgaccnccacttggcccagtacttttccccctgggnggtccatattcccccngggggcctccgccccaagccgatttggggctttaaggattcctggtaaccccgcaaggattcctggggatggattatagggattagctcgtaatggccatcccaaattccgtttgtgtacttatgttgtgaccagtagggcatagtgctttaattcaatcagcaaaattttggatgcagtagaagtaggtaataataacattacctcgctagtgttttaggcttaatcagtgtttttctcttagaattaagttatcattttactctctttagcatagagatgattcgttttcttttggtctggtgggatctttcttttcatgtaacctatgtaacattaaataaaattatcttgttaccttgatctcaacttcattgtctatatgatacgtacctttcttacttgttg

SEQ ID NO: 86167 - DNA, 1301 bp, Arabidopsis thaliana columbia
  unsure (1)..(1301): unsure at all n locations
gaggctgaccgcctgcagtccggccggattccgggtctaccagcgtcgatggatttgacatctcgggttgctgctggtgatcatctgggggatcttagaatcaaaggacggaaagtagtaagaccaatgctgaagcccagcaaagaaaatgatgtatgtgtcatcggggttggtatgcctgtggatgtgtggtggtgtgatggatggtgggaagggatcgtggtgcaggaagtttctgaagagaaatttgaagtttacttgccaggcgaaaagaaaatgtctgctttccatcgtaatgaccttagacaatctcgggaatggttggatgatgagtggctaaacataagatcaagatctgatattgtgagttctgtcctatctttgacgaagaaaaaagagatggaggtgaaacatgatgagaagtcgtctgatgttggtgtttgtaatggtaggatgtcaccaaagactgaggctaaacgcaccatctctcttccagtagctacaaccaaaaagtcactacctaagcgaccaattccagatcttctaaaaagatgtccctagtcacttcttgaccttaaaagtgggaaaaatccatcgagggagcggaatcgagttgtcagttgctgtccacacgatcctagcttgaatgatggtttctctagtgaaagatctttggattgtgagaactgtaagttcatggaagatacttttggctcttcagatggacagcatttgacaggtctattaatgtcgagatgatcatcagcttggacctagttacttttcttcttgtgaggtacatattaccctgatgggcatctgctcaatgcgattttgggttttaagattactggtaactcgcaagatttcttgggatggattataggattagctcgtaatggcatccaaattcgtttgtgtacttatgttgtgacagtagggcatagtgctttaattcaatcagcaaaattttggatgcagtagaagtaggtaataataccattccctcgctagtgttttaggcttaatcagtgtttttctcttagaattaagttatcattttactctctttagcatagagatgattcgttttctttttggtctggtgggatctttcttttcatgtaacctatgtaacattaaataaaattatcttgttaccttgatctcaacgccgccgtctatatgatacgtacctttcttacttgttgaaaaaaaaaaaaaaaagnnnnnnnnnnnnnnnnnnnnnnnnnnnnnnnnnnnnnnnnnnnnnnnnnnnggnnnnnnnnnnnnnnnnnnnn

SEQ ID NO: 86168 - DNA, 420 bp, Arabidopsis thaliana columbia
  unsure (1)..(420): unsure at all n locations
ccaagatcccatcttcaactcacgttcaagangagagccaagtggagaaagaagcgagtncggcgtctgaagcgtaagaggagaaagatgagggctagatccaagtaaacaactcgcctcaactcggcctactggatctgccacccaccccaccatgacaactggcaaacccacacgttgcggaatcactcgcgtcatccgctgtttcgacacctcgaatcaacctggcggcacgctcttgtggcatttggaggatggaattggtctgaaggaaactgtagcttgtcaagacagtcggtgtcgtcaagggcatgtttgcaaggaatccgagttggaagcttttttgcctccgccttggatgcagaccggttncccccaagttggcagagagagggaaatcacctatgcngtnttgcttcc

SEQ ID NO: 86169 - DNA, 1539 bp, Arabidopsis thaliana columbia
gaaaatcttctttttcttttctttagttggataatttagtgattattattattacaatcagcttttgcgccgcagagtaaacaaaaaaagctcgttggctttgttcctttgaatctgttgattgtgttatcgagtgagaaatgggtaattgcttagattcatcagctaaagtggatagtagcagccacagtcctcatgctaattctgcttcattgagctcaagagtttctagcaagacaagtcgttccacagttccttcaagcttaagcataaattcttacagcagtgttgagtctttacctacaccaagaacagaaggagagattttgtcatcaccaaatcttaaagctttcacctttaacgagctcaagaacgctacgaggaactttcgacccgatagtcttttaggtgaaggaggttttggttatgtgtttaaagggtggattgatggaactactttaactgcttcaaaaccgggttctggaattgttgttgccgttaagaagcttaaaactgaaggttatcaaggtcataaggagtggttgactgaagtgaactatcttggtcagcttagtcacccaaatctcgtcaaactagttgggtattgtgtagagggagaaaaccggttactggtatacgagttcatgccaaaaggaagcttggagaatcatctttttagacgtggcgctcagccacttacgtgggctataaggatgaaagttgcaataggagcagccaaaggactaacttttctccatgatgcgaaatcgcaagtgatatacagagactttaaagctgctaacattctacttgatgcggaattcaacagtaaactttcggacttcggtctagctaaagcaggtcctaccggtgacaagactcatgtgtccacacaagttatgggtactcacggatacgctgccccggaatatgtagctacaggtcgattaactgctaagagcgatgtatacagtttcggtgtggtactactggaattactctcaggacgaagagcggtggacaaatcaaaagtgggaatggaacagagtctagtggactgggcaacaccgtatctcggcgacaagcgaaagctctttagaataatggacacgagattaggcggacagtatcctcaaaaaggagcatacacagcagctagtcttgcattgcaatgcttaaaccctgacgcaaaactgagaccgaagatgtcagaagttttggccaaactagatcagcttgaatcaacgaaacctggaactggagttggaaacagacaagcacagattgattccccaagaggtagtaatggatctattgtacagaaatctccaaggaggtatagttatgatcggcctctcttacacataactcccggtgcttctcctttgcctactcacaatcactctcctcgtgtaagataggaatcactgtaatagttttcttttgtcttttgtctgttgtatgctgctctgtgtaaaatgtgttgtgtaacggaccaaagtttcattcttggctcaatttataaaatttggtttcagt

SEQ ID NO: 86170 - DNA, 532 bp, Arabidopsis thaliana columbia
  unsure (1)..(532): unsure at all n locations
ccggaccnctgccatgttccccnancnaatcngcccctttgggnaagctgtnccccncaggtccggccggatccccgggcgncccacngncactaagggcctttcttccgcaaaatccccggagccttccacatacatgaaggaatggagggaattttggcggctcatgtcccccaaggaatgacagggaattggattgtgatgtctttggggattggttcccagattatccgttcttaaagagattatcttgtttctcctctgaaaccaagtaaacatcttttgggatctaaggaacactctcgatcatcatcacccggttaatgcaatgaattagtgtgggctaaaaaaaaggtctttccttttatcttctttgttttatgaataagaacttgatgcaatgttgcatttttaccttcaagcttttgttgtgtgttgtttcagtttctggtttcgtgtatttgattctgtaaggcttaaaatggaattctaagcctgttaatcttttgattgaataatgacaacttttctc

SEQ ID NO: 86171 - DNA, 426 bp, Arabidopsis thaliana columbia
ataagtgataatctattaatcatctaggtggcagaggcagcatcgttgagaacgaagaagcttgaaaaagttgcgagctcagagaatctggaagtagcaaaatttggcggctttaactcagcaatttgttctgtacatggtattttgagaagagagcattcagctcacagttacgctctgcctatccagcttctaaatctactcactttggtcgagtcatggcttcttctggatctgaggcaaaagctaattacgcacccatatctaccaatgaacctgttgtgtctgttgattggctccactctaatcttggagatgctgatataaaggttttggatgcctcatggtacatggcacatgagcaaagaaatccaatccaagagtatcaagttgctcatattccaggtgctctcttctttgatttga

SEQ ID NO: 86172 - DNA, 622 bp, Arabidopsis thaliana columbia
gctggaattaattaagtactctcttgttttctaattcaatcactggagaaggaagacttgttggtttcaccaaaaagtctcttcttcaatttttttaattcagaggcagtagtagtacactcagatataaaagaaaccaaaacgatcggaatcttcttccacttgttcttttaaaagattaaagcttttttttttctcttaaagcaaaaaaaggaaaactttccccctcgcgtctctctcttttgacctcacattcgctgaatcactcttctgggttttttttttttttgcttttttctttgccctagatcttaaagacaaggaggatcagattatacttttttgagatctgggttcggacaaagattctgtctttctgcattctctaccgtttcgattcagctcgaggcaatgccaatctaaaaggagtaggtgaaaaaagattcaatttttgtatgcctatcaattagaaaggagaacaggggacgtggttagattggtttcaatgggtgagacgcagaagattttgcaagggccacgtcaccacacatctctgaagaagcccttatgggttgttttgacagtctcagtgaccatcatgcttctaatctgtactcacatg

SEQ ID NO: 86173 - DNA, 216 bp, Arabidopsis thaliana columbia
tccggataaaaacgggttggatcagcaacatcctcagaactacagttataccacagaggaattattagagaacccgcttgtttcgttagagtgtttcatatttctttgaaaaagaagaatttcgatgggaataatatttctcattttgacgttggatttataattcgtaaagttacttacttaattacgttacctctgtaattcatttgtgtgttg

SEQ ID NO: 86174 - DNA, 430 bp, Arabidopsis thaliana columbia
  unsure (1)..(430): unsure at all n locations
gtgagagacccgggtgagagatccggaagaaggtcaagatcgccggcgacgaatagatcggtgatggattcgaatcagagtagtcgggtgggtggggcaaagactaggaagaataatcagtctccgggtcgggttagactagatccggctaaaaacgggttggatcagcaacagcatcagaattacggttataccacagaggaattgttagagaacccgcttgtttcgttagagtgtttcatatttctttgaaaaagaacggatatttcgatggggataaatgtcttcccatttgacggttgggattcatcaattcggtaaaagcgacctttactttaatttaccggttacccccttgtaaatttcaatttcctggtggttggtaatttncctggatttaaaggtattaattccgggttgaatngnttgt

SEQ ID NO: 86175 - DNA, 314 bp, Arabidopsis thaliana columbia
  unsure (1)..(314): unsure at all n locations
atgtacttgctttcgcaggcagctttcccaacaggaggattgtatttcaagaacaaaacatgggttaaagaaacaaagggaaaacatgcgataatccacaataactacatagtcggttttgagaagaagatcaaacgtttccgtgactttaatctatggctagtcgatgatcatgcttccgagtctcctttagggaaattagagtaaattccaatggcagaaaaagatttttggtcgctccatctttctccttgttattggaatattcaggctgcagaaaggaagnnagntccatcgngtaaattcttttacnt

SEQ ID NO: 86176 - DNA, 383 bp, Arabidopsis thaliana columbia
  unsure (1)..(383): unsure at all n locations
ggaaagctaaaaatacctgttgaaaaaacatttccaataaccgatgttgtagcagctcatgaagccaaggagaagaaacagattccgggtaaggtggttctagagttctgaactacatatacatagtagaaataataacacctgcatagttctctagcagttgttctttctagaatttacacgcagagaaacaaatgtttcgcgtctggagttttctgtaaatgagatctatcaggcttagattcagatcaagaacttgaagtgtctgtatagactttccaaagggttcgtttttatttggattttgtctgtgtttgcaaacctctttagccaaggtaatgggaatgggtttggaaggtccnaaaaaaannnaaantnntnnt

SEQ ID NO: 86177 - DNA, 514 bp, Arabidopsis thaliana columbia
cactactctagggaaagctggtacgcctgcaagtaccggtccggaattcccgggtcgacccacgcgtacgattttgagagggagaaaaagggcgatcgattagggtttttgtgttttcgtcttagtatcgaagatgatcggagctgtgaactcggtggaggctgtgataacgtcaatccaaggtttatcggggagtccagaggatttatctgcacttcacgatcttttgagaggagctcaagactcgctccgagccgaaccaggtgttaatttctctactcttgaccagctcgacgcctcgaagcactctctcggttacctgtatttccttgaggttcttacctgtggtccagtgtcgaaggagaaagctgcttatgagataccgataattgcacggttcatcaattcttgtgatgctgggcagatttcgtttggggagctataaatttgggtctctttggaaatttttgaaagaccttgttctagccctgggaaacccgttggaaggattggg

SEQ ID NO: 86178 - DNA, 564 bp, Arabidopsis thaliana columbia
  unsure (1)..(564): unsure at all n locations
atgatatnnnnnnnnnnnnnnnnnnnnnnnnnnnnnnnnnnnnnnnnnnnnnnnnnnnnnnnnnnnnnnnnnnnnnnnnnnnccacgcgtccgcacttctctgcatatatttgcttctccgtttctcatttctcaactctcaaactcaaatcacttcctttgtctcagtgactctagtctatctccaatggctgaacgagtctatcccgccgattcaccaccacaaagcggacaattctccggcaacttcagctccggcgaattccccaaaaaaccagcaccaccaccatcaacatacgtaatccaagtcccaaaagatcaaatctaccgtataccaccgccggaaaacgcacaccgctttgaacaactctctcgtaaaaaaaccaaccgcagtaactgtagatgctgcttctgctcattcctcgccgcggttttcatcttaatcgtcctcgccggaatatccttcgcggttctctacctaatctaccgtcccgaagctcctaaatactccatcgaaggattctctggttccggcttcaatctgaaatcaacatcttcgatttc

SEQ ID NO: 86179 - DNA, 288 bp, Arabidopsis thaliana columbia
  unsure (1)..(288): unsure at all n locations
aaaacatgtcacaatctcatcttcaagtgagatgacaaatgacatatactcttcaaactcaaacagcttacttgattcttataccatactaccattagtaacaacaattcctgaaaaaccgcatttcatcttttacataatatgtgctatttcgactcaaataaagttagtttttcgtgtgttttgtttaatccttggattcattgtattctaatacacaaagcatcagactctgcttttcataaaagggtaactgatttcatatgtgatttgtngaattgggtgcta

SEQ ID NO: 86180 - DNA, 763 bp, Arabidopsis thaliana columbia
  unsure (1)..(763): unsure at all n locations
atgatctccnnnnnnnnnnnnnnnnnnnnnnnnnnnnnnnnnnnnnnnnnnnnnnnnnnnnnnnnnnnnnnnnnnnnnnnccacgcgtgcgtgccgattcatcaactgagagagaagaagaattgagaaatgatgaagcgtctgatcccaacgttcaaccgcatcttggtgcagagagtcatccagcccgctaaaaccgaaagcggcattctcctacctgagaaatcctccaagctgaactcaggcaaggtgatagctgttggacctggatcaagggataaggacgggaaattgattccggtctctgtgaaggaaggcgacactgttcttcttccagagtacggtggtacacaggtcaagctcggcgagaacgagtaccatctcttccgggacgaggatgttttgggaactttgcacgaggattgaaaaggctaagcttgccaacttaaccacgagggttcatgttggtgtttgtgttatgaggagaagtcatttataaattagtttatcttgaagatgtggttggactttgttgtcgtttatcattgaatctacctttatgaacctgtctttgaatttttacaaatgggcatcaatcacatggataacccaagtgttgcatcttctcattttgtgcttttccgtaatctgtggatgcttttcgtttacgtttaggcagcaacttcaatagccaatgtagacgatagcttagttgactttgcttattcnnnnnnnnnnnnnnnnnnnnnnnnnnnnnnnnnnn

SEQ ID NO: 86181 - DNA, 367 bp, Arabidopsis thaliana columbia
tgaacctatagagccaacgaaaccagaggacagtgaacaaagaattgtataattcgatctcaactcgttcctttgttgattctttactccgactattatgaggattgtacgtgcgacggagacgttctcggcggagcttaaagagttcatgtgcgccgctgtgcaaaggaggaaagacgacgacggattcagaggctctcgtggcggtggtaaatctagaaatgccatggatcttgattctgacgccggaaacagattggtttgtgttactggtggtgtttcttaccttggtcgtgccattgttaaacgtcttcttgttcatggatactccgttagaatcgtcgttgattgtccagaggacaaagag

SEQ ID NO: 86182 - DNA, 369 bp, Arabidopsis thaliana columbia
  unsure (1)..(369): unsure at all n locations
cgctgtactctgtcgttgaatcatcctcataaccatcaacaaagatggaaaagcaatgcttcatcatcactcagtgaaacaagcgaagaggtctcatcttcttctggtccattcatcttcagagattgttttgcttcttcgaagattgatcttaatcttaatcnctccttttctctactccatagctgaagctttgttcagctttgttcctttgtnctaaattttagcgtagtgaacatttagattgtttttaaaccaccttaaaagttcctaatcttttagttaggcctcttgatttgtgattgtaaatgttttttttttttggctgtctacaatgtcacaattacatcgggctttatttaaccaagg

SEQ ID NO: 86183 - DNA, 944 bp, Arabidopsis thaliana columbia
ttttaggtgccactatagaagagctatgacgtcgcatgcacgcgtacgtaagctcggaattcggctcgcggatgcattgtacaaggtgaaagaccccgaggttaaatgtttcattgagaaatgcttggccaccgtatcgcttagagtctctgctcgtgagttactagatgacccttttctccgtatagacgatggtgagtttgatttaagatcagttgatatggaagattcggtcgggccactctataggcagccgcaccatcttcctgactactacaattacccgtcgaatagtagctctttgaatcgtcagtactcaaatggcaactacccgtcgaatagtagctcattgaatcgtcagtactcaaatggttataatagtcatcacgagtatcagaatggatgggcgtataatccagctgagacagaggagactcacggcatcgagctctttgaatctcgaaacaatgatgatcaagaagaagaaaagaaatctggtaatgttgacataaccatcaaagggaagaggagagatgatggtggcttgttcttgcgtcttaggatcgctgacaaagaaggacgtgtccgaaacatttacttcccatttgacattgagacggacaccgcattgagcgttgcaacagagatggtagcggaactggatatggacgatcatggagtcacaaaaatagccaacatgattgacggtgagatatcttctcttgtacctagttggagaccgggacctgaattcgaagaatgtcttgcggctgcggcggcggcaaatgctgcgagcatttgcaacaactgcgtatcaaaccgcacctcaatgggctcggtgaatggatttcctgagaaccaatcctggggcaaatgtgatacaatgttgcagaaacgggtgcggtgagactcatggtcggtttgaagagatcacgatccagaga

SEQ ID NO: 86184 - DNA, 766 bp, Arabidopsis thaliana columbia
acgcctgcaggtaccggtccggaattcccgggtcgacccacgcgtccgagaacgttgaatttgatgctttgcgcattgtctacaacaagttccattcagttgtcgcatttctgccaactgtgtccactgttttgtcacctgagattattgagaaggagtctgaaattggaggaaaacttggcgagcttgactcatatgagattgaaggtggggaaacaaagggagaaatattgcagaatctggccgagttccaattctcttgtgtgatgttcaatccggttctggagaatgcatgtagtgagatgggagcaagaatgtctgccatggacagctcaagcagaaacgcaggagaaatgctcgaccgtcttcaccctcacatacaacaggactcgtcaagcttctattacaacagagcttattgagattatctctggagcttctgctcttgaagcttgctaaataagcccaacccgggttagttctcttttcttcgctttgatatttaccccccccttggaggagaagagtgtgtttaaattttactgaatcagtttcctttgctggcttcttgttgagacccaccaatggttgctcaccgatttttaataaacaaacctgtaatttccaccagggttttggtttaaaaaaaaaaaaaaaaaaaaaaaaaaaaaaaaaaaaaaaaaaaaaaaaaaaaaaaaaaaaagggcggccgctctagaggatccaagcttacgtacgcgtgcatgcgacgtcaaagctcttctat

SEQ ID NO: 86185 - DNA, 1434 bp, Arabidopsis thaliana columbia
  unsure (1)..(1434): unsure at all n locations
nnnnnnnnnnnnnnnnnnnnnnnnnnnccgggtagactgagaaataaagaagcccttgattttgcccattgcagtcatctctctcgaatctctctctataatccgatctgagaaatttcgccggagctaggttttgttgtttaccgatcaatcctttaatcaatggcaatggctgttttccgtcgcgaagggaggcgtctcctcccttcaatcgccgctcgcccaatcgctgctatccgatctcctctctcttctgaccaggaggaaggacttcttggagttcgatctatctcaactcaagtggtgcgtaaccgcatgaagagtgttaagaacatccaaaagatcacaaaggcaatgaagatggttgctgcttccaagcttagagcagttcaaggccgagctgagaactcccgtggactttggcagccatttactgcacttctaggagataatcccagcattgatgtaaagaagagtgtggtggtcactctctcttctgacaagggtctctgtggtggaatcaactccactgtcgttaaagtgagcagggctctgtacaaattgaatgctggtcctgaaaaggaagttcagtttgttattgtcggagagaaagcaaaggctataatgtttcgtgactcaaagaacgacattgtcctctctgtaacagagctgaataagaacccactcaattatgctcaggtgtcagttctagctgatgacatcctgaagaacgttgaatttgatgctttgcgcattgtctacaacaagttccattcagttgtcgcatttctgccaactgtgtccactgttttgtcacctgagattattgagaaggagtctgaaattggaggaaaacttggcgagcttgactcatatgagattgagggtggggaaacaaagggagaaatattgcagaatctggccgagttccaattctcttgtgtgatgttcaatgcggttctggagaatgcatgtagtgagatgggagcaagaatgtctgccatggacagctcaagcagaaacgcaggagaaatgctcgaccgtctcaccctcacatacaacaggactcgtcaagcttctattacaacagagcttattgagattatctctggagcttctgctcttgaagctgctaaataagcccatccgtgttagttctcttttcttcgctttgatatttacccccaccttgaaggagaagagtgtgttaaaattttactgaatcagtttcctttgctggcttcttgttgagacctaccaatgtttgctcaacgatttttaataaacatacctgtaatttccagcaggatttcgaataattgcattaacattttgttctgaaaaaaaaaaaaaaactccagagtctgtagtgttgttttgtgcaaaaaaaggaaaccattaacgggaaggccatcgttaaaccgggcagcaaac

SEQ ID NO: 86186 - DNA, 464 bp, Arabidopsis thaliana columbia
  unsure (1)..(464): unsure at all n locations
aacttgtcccccntcnggtcccgtccggattcccggtngccccnagggtccatcgatgggccatggacccccgggaaccggtcccggatgctttgaccattaccatggccatttgtattccaggtgtggaccaatgatggagttattgggagtgctgaaccttagagtggtcgtgaatacaagccaaagggagattctcaataccattcttcttcttcccatcacatgaagccaatattgagccattggaggagcttataagtgaggaaaacccgccttgttataaaaagtacaattggggaaagttctttgtttcaagaaacagaagtgatttcaagaaactcgaggttgagaatatccagattgatcacttcaaggcttagttaatcacattataattaaaccttatgttgatttctaattggttctttttcatataagttagccaaggtcataatttcccc

SEQ ID NO: 86187 - DNA, 576 bp, Arabidopsis thaliana columbia
  unsure (1)..(576): unsure at all n locations
tttcttaaggaaancccttccgctcagctggnaaccagccccgagcacantnttgcncggaatggcccccgntgttttccnaacccggtgngtttgcccgttgatggcccaactcttttccnggggtattccnatcatgatcatgatcacccatctcattgcgcttggggatcctaaggttcccagaaaaggtaaactttcccagagtatgctgcgccagagtcacgttactgccccagccccgtgtttaccgaatatatcgaagacgaagagggtaagccaaaactgcagatcaacgctcaaaactgtttgcactgcaaggcatgtgacatcaaagatccaaagcagaacatagagtggacagtgcctgaaggtggtggaggccctgcctattccctcatgtagtccttaagattcaacatacctctctcactttaccatatctggtaaataaggggggctcaacaaaatccttaattcgtctggggtttttctttttactaaaatggtttgtaaatcattagggtggttaccgggtggttttgttccanntttcaatttgacgggntttttccc

SEQ ID NO: 86188 - DNA, 439 bp, Arabidopsis thaliana columbia
  unsure (1)..(439): unsure at all n locations
acaccgtttcattagaaattaagaacatttggtttgaaagaagacggtttgcatttacctccaagtttcgactatttgccccgtacactcaaactattgtgctggtccaaatttccaatgaggtgtatgccttttggttttcgtcctgaaaaccttgtcaagctcgaaatgcagtacagcaagctacataagctatgggaaggagttgcgccacttacatgtctaaaggaaatggatctgcacggatcatcaaacctgaaagtaattccagatctttctgaagctactaatctcgagatacttaatcttaagttttgcgagagtttggtcgagctcccgtcctctatacggaatcgcaataaactgttgaacttgggcatgcgaaccggcaaaaggtctgaaaattcctccaaccggnttcaacggccnaaaaaaaaaa

SEQ ID NO: 86189 - DNA, 507 bp, Arabidopsis thaliana columbia
agggattgcgtttcccccccgaggaggaagagaatgatttagccgctttcgggggatccttggggcagggaagaaaaatctctgtggaccaaaagattgatccaaggagctccggtgggctaatcgtagaggttccaaccaaaaggtgttggacatgtcaatcaggccaagggcccaacagatggagagggctcctccggggaacctgttgactttcaacaacctctggaaattcttgagagaaatttcccccaagaaaacacccccctgatgcatgccccccattgccaaataaatatggaccctcctgggaaacaatataatagctgggccacttctctccctttgaattttgtcatttgctttttacatattgttgtttgcttcgaaataaagcttttcgagacatcaaatttcaaaaaaaaaaaaaaagggcggccgctctagaggatccaagcttacgtacgcgtgcatgcgacgtcatagtattctatagttgtcctaaat

SEQ ID NO: 86190 - DNA, 1126 bp, Arabidopsis thaliana columbia
  unsure (1)..(1126): unsure at all n locations
atgatcctnnnnnnnnnnnnnnnnnnnnnnnnnnnnnnnnnnnnnnnnnnnnnnnnnnnnnnnnnnnnnnnnnnacggacagcagctgagcgacttttgcacatttctagggttccaatcaaaatctatctgcaacaaaaatggctaatcgtttcagatcagggatctccttcttcaagaccatcgccgtaacagattctgtctcctccgttagatccaagtcgcttttcccagcgttgagaacttatgcaactgcttctgctcaaacaaccgctaatgttaaggtgcctattgctttagttggtgaaaatgggaactttgcttcatggctatacattgcagctgtgaaaatgaattccttggaaaagattgagacggatctttctgagatgattgaggcaatgaagacagctcctatttttgctcagtttacaaaggatccctctgttcctagagggacaagattggctgctattagggatgcttgtgatcaagcaaagtttgccgaacccactaagaacttcctctctttgttagctgagaatggaaagctgaagaacctagatgccattgtgaagaaatttatgcagctgacaaacgcacataggggagatgtcaaagttttggttaccacagtcattccgcttccccctgctgaggagaaagaactgactgagacgcttcaggagatcattggagcagggaagaaaatcactgtggaacaaaagattgatccaagtatctacggtggactaatcgtagagttccaacaaaaggtgttggacatgtcaatcaggacaagggcacaacagatggagaggctcctccgtgaacctgttgacttcaacaacctctgaaaatcttgagagaaatttcccccaagaaaacatgcttgtgatgaatgccaccaattgacaaataaatatggaccctcctgggaaacaatataatagctggccacttctctccctttgaattttgtcatttgctttttacatattgttgtttgcttcgaaataaagcttttcgagacatcaaatttcaatgagattgtttttgtttagatttgnnnnnnnnnnnnnnnnnnnnnnnnnnnnnnnnnnnnnnnnnnnnnnnnnnnnnnnnn

SEQ ID NO: 86191 - DNA, 273 bp, Arabidopsis thaliana columbia
agcgggtcgcaaaggtgcaccgccaaaggaaatggttttggacgtggcattactactgcatttggcagcaccgggcctaaaccgtgaggtgatcatgctcatttctccgcctatatatcataatactctacaaacccaacaataatctctttgtattcataaataagactagagattgccacctttattaattatgatgaaagtgctactctttgtgtgatgtctattgttaaataaaataaatgcaataattacggctttaatagtcttttt

SEQ ID NO: 86192 - DNA, 235 bp, Arabidopsis thaliana columbia
caaaaaacaaaaaaaaaaccccggaagaatgctcgctttttaagtccaagctggaaaaatcagcagcagttcacaaaagcacaacttctccgggtcacaacatcaatcaaggtaattgtataaaggaacacaaggaacaaaaaatgtatgtatgaaaaaatgaagagagtttttttttgtaaaagagttgttgaggtttgcagcacaaaagtgtgtcttgcaccttacatccgag

SEQ ID NO: 86193 - DNA, 519 bp, Arabidopsis thaliana columbia
ctcacttttcctcggatgcattattgtccgtgagatcagagattcaccctctttagattttgcgcagaaacttttgcccacaattttgtattcgtcaaatctgagctgagatctctagagtgagaaaatgagcatcactaatgaagaagcagtgaagcaattgcgtgctttaatggaagatgttgatgattcactcagagagtcgtatcggaacattcatcaagggtatccgacagagaatttgttacgctttcttaaagccagggatgggaatgtccagaaagctcataaaatgttgctcgagtgtttggaatggaggactcaaaacgagattgacaagatactaactaaacccattgttcctgttgacctgtacagaggaatcagagacacacatcttgtcggtgtgtctggttactctaaagagggtctccctgtcattgccattggtgtggggcttagcacatatgataaaggccttcgtcactactatgtacagtctcacattcaaatgaatga

SEQ ID NO: 86194 - DNA, 499 bp, Arabidopsis thaliana columbia
cacgcgtccggaatctgatttctccacaaaaaaactacatcgatcatcgataatagatcgtactacaatactatattctcaaaacgatggtgtttccggcgtgtgtacagtgcggaacaagacaaaacccctgtcggtgcaaagtggttggaccaactttagggttcgtggcttttctgataaccggaatcatcgagtggccagttggtgcggtggtgtatatctttaaacacgccaagggtcgtcgtataatgggtcatccggccagaaaagtttatcccaaagtctctcgatctattcccatttgactttcttgtcattaattataatcatgctttgtatttgcttgacaaataatgattccactttttagatatatgtgatcacataagggatctaagtccagaattagtatccgttataatgaccaaataatgttatgttaaaattgatactttgtttcttggctttcaagttgatttacttgatgtgacccttt

SEQ ID NO: 86195 - DNA, 1079 bp, Arabidopsis thaliana columbia
  unsure (1)..(1079): unsure at all n locations
atgatactgccnnnnnnnnnnnnnnnnnnaggacgcgtgggcggataatttccccaatttctcagagagactcaaaatcaccaccaccaccaaatcgccgccatgtttaaacaagcttctcgtctcctctcccgatctgtcgccgccgcatcttccaaatcggtgacgactcgtgccttttcaacggaacttccatcgacgctcgattccactttcgtcgaggcatggaagaaagtcgcaccgaatatggacccaccgcagactccttctgctttcatgaaacctcgtccttccactccttcttctatcccgacgaagctcaccgtcaattttgtcctcccttacacatctgagcttaccgggaaagaggtcgacatggtcatcattcccgcatcaacaggacaaatgggtgtcttgcccggacacgttccaacaattgctgagctaaaacctggcatcatgtccgtccatgaaggcactgacgtgaagaaatacttcttgagcagtggttttgcattcctccacgcaaattccgtcgctgacataatcgcggtggaagctgtgccgcttgaccacattgaccctagccaagtccaaaagggtttagctgagttccaacagaaacttgcttctgccacaacagatcttgagaaagcagaggcacagattggtgttgaagttcacagtgccatcaacgcagctctctcgggctaaaagaaggtttctttctttatttcttcgaagaaacaaaaaaaaaactaaatcatttggcttttcaagtgattagtgaagtccctttttactactgcaaaggatggaatattgattcttcttgtttaatcgtgttggacttttgtttgaataaatgattttgtttaacgggcacaaaaacccacaaaagtttcttgtgttcatatctctgcacctttgtttttgtgtatgactttgttgtgttgagaaactaagttggaatttctttaaggtttcgtttactaataaaaaaaaaaaaaaaaagggcggccgctttaaaagaatccaggctaaggaagggggccagnnnnnnnnnnnnnnnnnaatcg

SEQ ID NO: 86196 - DNA, 244 bp, Arabidopsis thaliana columbia
cagcatcgtacttcacggtgctggatcttgcgaacaatcgtcttcagggaccgattccggcgagtatcacggcggcgtcgtttattggtcaccttgacgtgagccataaccatttgtgtgggaagattccgatgggatctccgtttgatcatcttgacgcgacgtcgtttgcttacaatgcttgtctttgtggaaagcctcttgggaattgtaggaaataattaattaaattattggtttaaag

SEQ ID NO: 86197 - DNA, 391 bp, Arabidopsis thaliana columbia
  unsure (1)..(391): unsure at all n locations
cagnaaaagtcaatatgaattgattaaaaggtgtctggcgtatcctgatggagcagtgtatatggctgcaaagaagtactatttcggggtcggtggagggacaaggcaattcttgtctatgatagagaaagacggtgctcttgcttcaacgttggtgtctcaagtcacagatggttcctcaaatgtcagagaggtatggaagctttcgtacaagtaagtcgaagctatactggaattcagtgtccaacgatctgattttagtggatttgggttgctcataaaaatgagtggaaattcaaaatctctcatccatgtgtttagcttatagactctcctgactgtgttataataattgcttaggtttttccatttttggaccattttctgggct

SEQ ID NO: 86198 - DNA, 1003 bp, Arabidopsis thaliana columbia
  unsure (1)..(1003): unsure at all n locations
gatgtactccgcggcccggggggggaggattcgccgagctcctatacgactcactatagggaaagccggtacgcctgcaggtaccggtccggaattcccgtgtcgacccacgcgtccggggggaaagagcagagaagagagaagaggaagcttgtagaaatcgatggcgacgatagtgcagtgtctttcttcctgtgcgaccctcgaatcccaattcaaagtcctttcgcttaagggaatctcttgttcgtcaccatcttcttccttctccaatcgtcgtggtgcttcggctaccttatcctcttcccttagcttctctcagagcgtttctcaatgcgtcgccttctcaaccgggaatttgtgggtacagaagccaatgaggcaattgattgtgtgtgaggctgctgctcctaccaagaaagctgattcagctgcaaagagagctcgccaagctgagaagaggcgtgtttacaacaaatctaagaaatctgaagcccgtacccggatgaagaaggtcttggaagcacttgaggggctcaagaagaaaactgatgcgcaagctgatgagattgtgacggtggagaaactgataggagaggcttattctgcaattgacaaagcagtgaaggttaaagcactacacaagaacactggtgcccgtaggaagtctcgattggctaggaggaaaaaagccgttgaaattcaccatggttggtacgtcccagacgcagctgctgcagcaccatcagaagctgtgcccatggctgcataagaacatggggataacggaaatttgtttttgttactagatctttcaaaatcaaaatctgtttctttataatgtacatttagtcgctttcagactcttcgcttgttaagttcgatctaagcattttgtcttctactctaaaaaaaaaaaaaagggcggccgctctagaggatccaagcttacgtacgcgtgcgtgcgacgtcatagtcttctatannnnnnnngtcctaaaaa

SEQ ID NO: 86199 - DNA, 509 bp, Arabidopsis thaliana columbia
  unsure (1)..(509): unsure at all n locations
aggggccttggtgtgaagtttntgcncactgtttgngaagacccgtagagccttcnccagccgtacgggctcttatcagagaaaccgaagtaacaatgcttctcaaacgatttcgttcaggctcggttcttcagcttcatcagcacctagagagtttgctgttccaagctcctccattatgacgagaagccaaactgtaaaccctactgaagtggttacttcgagtacttcagcttcatcgtctaggagaagaacagaagatgtaaacaatggacctcggaccaggtctagaaggaggctgaggtaaaaaggaaaaacggtcgccggaatcttgacaccatccattctcaaccattgctccatcattactaaaacctcatcataactctgttcttgtctgaatactgaatgtatatgtacattctatgtctacttgtaatttctgctagcctctgaaactttggatatcatatctttgttttttttttgggaaaataatttaacttgat

SEQ ID NO: 86200 - DNA, 288 bp, Arabidopsis thaliana columbia
tagggtttccaggaaatgtttgtatagaggatgatgataaaatcggagcaacatcttctgctcttaatgtttttcttcatttgtgtctttttttcgattaattttatttttatttttgtgttctatttgagttcctaatttcgtagtgaaaactcgaccacatttttctcttttgagtttgtgtttgatctattagaaagatctttaggctgttacatttttattttgttccttgtttgctatcgaaccgatttgagacataaacaataataacattcataatttgtc

SEQ ID NO: 86201 - DNA, 593 bp, Arabidopsis thaliana columbia
agaaacagctctttgtctctctcgactgatctaacaatccctaatctgtgttctaaattcctggacgagatttgacaaagtccgtatagcttaacctggtttaatttcaagtgacagatatgccccttattcatcggaaaaagccgacggagaaaccatcgacgccgccatctgaagaggtggtgcacgatgaggattcgcaaaagaaaccacacgaatcttccaaaatcccaccataagaaatcgaacggaggagggaagtggtcgtgcatcgattcttgttgttggttcattgggtgtgtgtgtgtaacctggtggtttcttctcttcctttacaacgcaatgcctgcgagcttccctcagtatgtaacggagccgaatcacgggtcctttgcctgacccgcccggggttaagctccaaaaaagaaggtcttagggcgaaacatcctgttgtcttcattcctgggattgtcaccggtgggctcgagctttgggaaggcaaacaatgcgctgatggtttatttagaaaacgtttgtggggtggaacttttggtgaagtctacaaaaggcctctatgttgggtggaacacatg

SEQ ID NO: 86202 - DNA, 662 bp, Arabidopsis thaliana columbia
cgcctcactttagggaaagctgctacgcctgcaggtaccggtccggaattcccgggtcgacccacgcgtccgtgcttagaatcggaacggacgaagaaggaagacaaggaagaagatcggagatggcatcgaatgcggcggttccgttctggagagcggcggggatgacatatatatcgtattcaaacatctgtgcgaatatcgtgaggaactgtctcaaggagccacacaaagctgaagctcttactcgcgagaaggttcacttctctctctccaaatgggctgatggaaagccccagaaacctgttttgcggtcagacacacctgaagtttgaagtcaactttgagcttatgttcttaagggattcaaaagtaactgagttaccaagatttgttttctttttattgtcaacaatggagcttgagtgaaaaactcatttccgatcataataatgacacactgagtcttgtgtatctcttttcttcttttgctattctgtttcactttttgtatgcgaacaatgaaaaaaagcctttaaagactcttctggctaaagacaagttcttttgattgttttttaaaaaaaaaaaaacaaaaaagggcggccgctctagaggatccaagcttacgtacgcgtgcatgcgacgtcaaagctctctat

SEQ ID NO: 86203 - DNA, 524 bp, Arabidopsis thaliana columbia
aatacgactcacctagggagagctgcgtacgcctgcaggtaccggtccggaattcccgggtctacccacgcgtccgaacctttgtagagagaacccatagttcgataaaacattctttttgcaactgagacttggcaacttggttttactcaaagtaagatttcttcttgttgatggtgataagttcaatatgatgaaaagtttggctagtgcggttggagggaagacggcgagggcatgtgatagctgcgtgaagaggcgggcacgttggtattgcgcagctgatgatgcctttctttgccatgcttgtgacggttcggtccactcggcaaaccctcttgctcgtaggcacgagagagttcgcttgaaatcggctagcgccggaaagtatcgccatgcctcgccgcctcaccaagccacgtggcatcagggatttacaccgtaagctcgcgcccctcgccttggatggccagaagaacccaccacaacgggtttcttcatgaatccttgtgcccgacaatgtc

SEQ ID NO: 86204 - DNA, 565 bp, Arabidopsis thaliana columbia
acccacgcgtccgtctcacttcttttcaacgacacaacacagaaactattttttcctttcgatttttgaatcccatagacgttacgttgacgagaaatacactctcatcagaaaatcaaaaaaaattctcatcctcagaaaataaaataaaagcttcaacttttttctgggttttttttttttagaatttggttttgtgtttttgatcttgaggttgtaaaatgggtgaatctgcagttctggttcattcttattccttcgcagctcctattactcgtaacgattctcatgaggagaatacgattcatgcgttaagtcaatcaatatcatttgggaaattcatgacagagaatctagaatgggggaaatggtcaagcttttcacataaaaagtatgttgaagaagcagagaaatactcacgccctggatctgttgcacagaaaagagcccgctttgaagctcattacaagagaacagctgaagctaagaaagctgcaacggaagaacaaccatccgttactcctgctgaagttttgcttcatactttggaaacacagcctcctcc

SEQ ID NO: 86205 - DNA, 521 bp, Arabidopsis thaliana columbia
  unsure (1)..(521): unsure at all n locations
acgggtcntntntnctacctcgtgatttttttggtccttttccgggacgtcatggctatgcatcggaccaaaggcactttcatcggtttacttgaaggagggagagttaacgaatgggtcgtcaccgagaaattaggtgatgcgcttgagactaagttacttccccaagtaagaaaacctcgcaacgggtttctcgaaaggataaactcaaaagagatgatggtggggatatacatattgtgctgtgcatcatataaccttgtctttgggaagacagtgttatatatctatcctttacatgcagggctccttgcttttattaattgcccggaattgggttttaataggnaccttgttaaggggtaatcggtaatttgatataatccggtaggattccccgtcctttcccttttcaaaattccagataaggagggggaattattttaattaanancaaatnctaatccntnaattccaaaaaaaaaaaaaaaaagggngggccnccnnnggggccaancttc

SEQ ID NO: 86206 - DNA, 377 bp, Arabidopsis thaliana columbia
  unsure (1)..(377): unsure at all n locations
caaggagnagaaggntgccagggaagtcccngngaggatcncccagcggatgcctcgttggcttngccgtaatgttggtcctgtgtgtgatgccggtgtcgttttgccgtcatgagtgtaatgctcgcatggttttatttgtgatgaaaagctttttttttttttgtgctgataaattgttattttttattactcatgattttctgccatgtgggtgattttggggatatatttgtgtcttggttttcatacgattttgtgttaatcaatccatttgttttttatatttccgtttatttttattaatacaaatcatattttccgttttcgtgcgagtgagaattgtgtttttgttaatatctcgtttatctttgctt

SEQ ID NO: 86207 - DNA, 295 bp, Arabidopsis thaliana columbia
ccttttgaagctatctaaggctttcaaaggcattggacgtttttacaatgctaacaaacattccaagaaagcttgaaaaggagatgaataataaaactttgtattaattgggatctataaacaatgtaacttgtaagtttccattgttttgggcaagttctatgaacaatgtaagggaaaataaaaggtaaaggctaggattttgccatatgtgtttagctttgatcttaactttctttcctatccttgtatattttggggcgggtaacccgtaatggcccgtatcgattggggg

SEQ ID NO: 86208 - DNA, 1564 bp, Arabidopsis thaliana columbia
atttcacaaaccaaaccaaaaccaaaaaaatagcttatctctctcttatcaccggttcaatcactaaaccatggcgacctccgtcgataaccgccattatcccaccatgaacggcgtcgctcacgccttcaaacctcctctcgttccttctcctcgctcattcgaccgccaccgtcaccaaaaccaaactctcgacgtcatcctcaccgaaactaaaatcgtcaaagaaaccgaagtcatcaccaccgtcgtagacagttacgacgactcctcaagcgacgacgaagacgagagccataaccgtaacgtcccttactacaaagagctggttaaaaaatcaaacagcgatttagaaccgtcgattttagatccgagagatgaatcaacggctgatagttggattcaacgtaactcatccatgctccgtctcaccggaaaacatccattcaacgccgaagcacctcttcctcgtcttatgcaccatggattcatcactccagttccactccattacgtccgcaaccacggtgcagttcccaaagcgaattggtcagactggtcaatcgaaattaccggactcgttaaacgtccggctaaattcaccatggaagagctaatctccgagttccccagccgcgaattcccggtgacactcgtctgcgccggtaatcgccgcaaggaacagaacatggtgaaacaaacgatcggattcaattggggatccgccggagtatctacttctctatggaaaggtattccgttaagcgaaatcctccgtcgatgcgggatctatagccggagaggaggcgcgttaaacgtttgcttcgaaggagcggaggatcttcccggcggcggcggatctaaatacggaacaagtattaagaaggagatggcgatggatccggctagagatattatcttagcttatatgcaaaacggcgagcttttaacgccggatcatgggtttccggttcgggtcattgtaccgggtttcatcggtggtcggatggttaaatggttaaagagaatcatcgtcacgcctcaagaatctgacagttactatcactataaagacaatcgagtccttccttctctcgttgatgctgagctggcaaattccgaagcttggtggtataagcctgaatacataatcaacgagcttaatataaactcggtgattacaacacctggtcacgcagagattttaccgattaatgcattcactactcagaagccgtacacattaaaaggctacgcttattctggaggaggtaagaaggtaacgagggttgaggtgactctagacggaggagacacgtggagtgtttgtgagcttgaccaccaggagaaaccgaacaagtacggtaaattctggtgctggtgtttctggtcacttgacgttgaggttcttgatctgctcagtgctaaagacgtcgcggttcgagcctgggacgagtctttcaatactcagcctgataaactcatctggaacctcatggggatgatgaacaattgcttggtcaagattaggaccaacgtgtgcaagcctcatagatgagagata

SEQ ID NO: 86209 - DNA, 1178 bp, Arabidopsis thaliana columbia
  unsure (1)..(1178): unsure at all n locations
ccacaaagagtcttttttttttttctcttcgacttagcttatacatagttttattacaagatgtcattgtcagcctcggagaaggaggagaataacaagaaaatggcagcggacaaggctgagatggggaggaagaagagggcaatgtgggaaagaaagtggaagagattggacattgtgaaagcttttgcatctctctttgtccatttcctctgtctcttggcgcctttcaatttcacttggccggctttaagagtcgccctcattgtctatacggtgggtgggctcggtatcaccgtctcttaccaccgaaatttggctcaccggagcttcaaagtccctaaatggctcgagtatttcttcgcttattgcggccttcttgccattcagggagatccgattgattgggtgagcacacatcgataccatcaccagtttacagattcggatagggacccacatagtcctaacgaaggattttggttcagtcacctcctatggctatttgataccggttatcttgtagaaaagtgtggaagaaggacaaatgtggaggacttaaagaggcagtggtactataaattcctccaaagaacagtcctttaccacattctaacatttggtttcctcctctattactttggtggtttgtcttttcttacttggggaatgggtattggggtagcaatggagcatcatgtgacttgcctcataaactctctttgccatgtttggggaagccgaacttggaagactaatgacacttcccgtaacgtttggtggctatcagtattctcgtttggagagagctggcacaacaatcaccacgccttcgaatcctcggcgagacaaggcttagaatggtggcaaatcgacatttcttggtatattgtccgctttctcgagattatcggtttggctactgatgttaagttgccttccgagagtcaacgtcgtcgtatggcaatggttcgttgaagatatggaacgacgtctcgtctcatttaagcattagttaattaatgtctacgtacgttttaagtttttggtaaacgtaacacttgtaatattgtgcgatgcggtgttgttttgtgacttgtggtgtgtgtttgaaccaacttgcttaattaagataacgttcgttttgatatgagcgnnnnnnnnnnnnnnnnnnnnnn

SEQ ID NO: 86210 - DNA, 478 bp, Arabidopsis thaliana columbia
  unsure (1)..(478): unsure at all n locations
ccaacctttacccgtgcgttgtgtacgtggtgcagggaggagccattccgtatagctgttgcaatggcgtcaggatgctcagcaaacaggcaactagcgcatcagacaaacaaggtgtgtgtcgctgcatcaagtctgtggtgggaagagtgtcttactcgtcaatctatctcaagaaagctgctgctttgccaggcaagtccggtgtcaaacttccttacaagatcgacccttccaccaactgcaacagcattaagtgagagaaataagttacggggaccgaccaagaataaaggccatgtatttccgtctaatgtaacccgggagttttagtgcttttcaagctttctttccttaatataatggtggaatggacccattccaaattataacccaattgaccnattttatctccaaaaaaaaaaaaaangggggggggccggcntnngaggggnccaaaccttttcgganccccggg

SEQ ID NO: 86211 - DNA, 1813 bp, Arabidopsis thaliana columbia
  unsure (1)..(1813): unsure at all n locations
aggaaccggaaaaaggttcaaaaaaggcaggccgatgtcggcggcgagatcgtttttcgcctgtgcttctgttggttcgacgaaggtttacgtcgccggaggacatgatgatcagaagaacgctctccgatcggcggaagtgtacgatgtagagaaagacgagtggtcgatgcttcctccgatgacggaaggaagagacgagtgtcacggattctcgatggcgacggatcctggattttgtgttttgagcggttatggaacggagacgcaaggccaattccgatctgacggcgagatttacgatccgattacgaattcatggtcgacaatcgagaatgtctggccgtttcccgatttgagtccgagaggtcgcaccgccgcggctgctgctgaattccccggagattttagaggttgtcggttatggtgttttattgatagcgagagacagagtcagcctcattgggaagttgaagacgattcgatgaaatggaaggtaattatggatacgattcggcttccggtgacgacgatgacttcggtttttgctggaagtttgagtggccaagcggtggcaatgattggcggtggtggtgaagaaagtggaacgatgatggtgaagacgacggcggagaagaatggcgggaagtggagccacgtcaacactccctctggtttttcgagtcttcctttctcgtgttcttcaatctacgtttgaagaatctctgttgtagaacactttgacttaagtcaacgttaatagttaatacttaatacataaatcaagtgagagtgggtgatactttaatctgggtttttctttatttatacaacatcaaatcttagtatcgatgtaaaaagaatggtattttgataattgaacaaagtcacacaatgaaaagaatggctaggagaagtgttcaaagtaattgccagtcatcttcatgttcctcaccagagatctctgtagatgtctctgtactgctgctggtttctgcaatcccgcagtcatttcttctgtgagattgagtcacagtgaagagaggagcacccattagagtctccggctagctttgttgctcggatacagaaatcatcaaaatcatctttgtgctggcaatagaatccgagagctagtgacgggtcgagtgactcaagtggaacataacggagggtattgcaatggtaagacgatgtgccaacatcttgattttctttcttgactgtcacttaccttaccaacccattaccgataaggctcaatcagtgagactgaaatatgatatgaagcacatggactgagtaatatcagtccccaaaccaattagacaatagataaatgaatgtgatggagacaatataaggaaaatatatatggaccaccttatatgtctcaaacttcagatcgaagtgttaagttttttcttggaactacaataattctagtttgattctaaaataaagatttataaggagtgatcaagaaaacctgttgaacatcatgcggatcaaggtagaaacctttgtcttcttgaactccaactatgtaagttgatgcacctggtttgccgcccaaaatgccgaggctttgagggaacgtgaaagtggctatcagagatggaatgtacctggggttcactctgtcaagcccgagaaccagagggaccaagagaagaattggcggccactcagtttctccttctgaaaattccaaacaagttttggtcggacgcgtggnnnnnnnnnnnnnnnnnnnnnnnnnnnnnnnnnnnnnnnnnnnnnnnnnnnnnnnnnnnnnnnnnnnnnnnnnnnn

SEQ ID NO: 86212 - DNA, 561 bp, Arabidopsis thaliana columbia
catcattcagtctccttctatcctctaaaactcttctaaagaagaaaacagaggaacgagaagaagaagaagagtgaacaatgaagatcggtgcagggaacacgaacacaaaactaatccttcttcatccttacatccaaaaacaaacgagcacgactcgtttatggcttctcgctttcgtctctttcttcaccatagtttttctcctcactcttctctacactagagacacaatcccttccaaaaacacctccgtcgccgcagccgtagctgcagtcgtcaccggaggatccacaccttcagcatcatctcccatctccaactccaacttaccaactagtgcaatcaacgctttgcttcactacgcgtcaagatccaacgatagtttccacatgtcttacggagagatgaaatcaatctctgacgtcctccgccgctgcgctccaccgtgtaatcttctcgttttcggactcacacacgagactctcctttggaagtcgttaaaccacaacggtagaacagtgttcatcgaggagaatcgttactacgcggcttacttcg

SEQ ID NO: 86213 - DNA, 229 bp, Arabidopsis thaliana columbia
tctcaatatggtgatttgatctgatccttctgggttttaaaacactgaaccagaactgttttttgtaaactcattgcaaagattgtaaaagaaaaaaaggagttttgtgagaggaaatgattagagatgtgcaaggcttttttaccttgatcactgccattgatcaatgactctgtacttcttggctttttgctttggtactaatgtgaaagtgaagcatattgatttg

SEQ ID NO: 86214 - DNA, 1259 bp, Arabidopsis thaliana columbia
  unsure (1)..(1259): unsure at all n locations
aaaaaagagagagagaacctaaaaagaagagaagagaaagagagatccgaaatgtcggtgacatcaacggtggaggagaaccaccagaaaaatccatcaacgccggcggcggtggaggagaagaagaagaggagatgggtgttttgggatagaaggtggaggagattagattatgtgaaattctcagcttctttcactgttcattctcttgctctcttggctccgttttatttcacttggtcggctctttgggttacgtttttgttttacaccatcggtggtcttggtatcaccgtctcttatcatcgcaacttggctcaccggagtttcaaagtccctaaatggcttgagtatctcttagcctattgtgcccttctcgctattcagggagatccgattgattgggtgagtacacatcgttaccatcaccagttcacggattcagaacgtgatccacatagtcctaaggaaggtttttggtttagtcatcttctttggatctatgactctgcctatcttgtttcaaagtgtggaagaagagcaaacgtggaggatttgaagaggcaatggttttataggtttcttcagaaaacagtgctatttcacattttaggattgggtttctttctcttctaccttggtggcatgtccttcgttacttggggaatgggggtaggagcagcattggaagtgcacgtgacttgcctcataaattcactctgccatatttggggcactcgaacttggaagaccaatgacacttctcgtaatgtttggtggttatcggtattttcatttggagagagttggcacaacaatcatcatgcgttcgagtcatcggctagacaaggacttgaatggtggcaaatagacatttcgtggtacattgttcggtttttcgaaattatcggtttagcgaccgatgtgaaagtgccaacggaggctcaacgacgtcgtatggctatagttcgttgatggaaattgcgggaagagcatagaaaaagggatctattctatgtaattagaataatttctaatcctaaaagagagttattgttttattttctttattactacttttgaagttttgggttaacgcaaaggacgtttccgatgtgttttggtgttggaccaagttgattaagatatttgtcgtaaaaaaaaaaaaaaaaaaaaaactcgagaacannaaggcgagccgctctagaggatccaagcttacgtacgcgtgcatgcgacgtcatactctcagctcaatc

SEQ ID NO: 86215 - DNA, 917 bp, Arabidopsis thaliana columbia
  unsure (1)..(917): unsure at all n locations
agnggggggaaatnnngccggatttcggcttgatgttacacggccttgnaacccngcaannanccgggcttctcnccccaaactcggtgcaaaagaggtcccttaccctagccgttgtcgtactggtcgccaatccaaccagttctgataaagacgcggagagccgagtagagaagccattacctatgtatgtgccacgagacgagcaatttgaagagtcgaagcaggactcttttgctgcagggaggctaagagcagtcttacaccacctaattccgtcgctcaaagccagtattgtagctgaggactttgcagacttcggcgagatcgatcgtctttataaagaaggcttgttactcaagttagggtttcaagatgacatctttaagaagtttcctctccctaaggtcgtagttgataccctccaagaatctactaaaggactcctcaaatacgacactcccaaaatattatcgaaggataaaaacgcatggttaagagatgacgaattcgcacgtcaagccatagctggaatcaatccagtgaacattgagagagtcaagacttttccaccggtcagcaatcttgaccccaagatctacggtccacaacactccgctcttactgacgaccatatcattggtcacctcgacggattctccgtacaacaagcgttggaagagaatagattgtatatgttggattaccatgacatattcttaccgttcctagaccggattaatgcgctagacggacgcaaagcctatgctactcgaactatcttcttcttgactcgtctaggcacacttaagccggtagccattgagctaagcctccctccccatggtccaaaacatcggtccaagcgtgtgcttacacctccagtcgatgcaacctctaattggatgtggcagctc

SEQ ID NO: 86216 - DNA, 566 bp, Arabidopsis thaliana columbia
  unsure (1)..(566): unsure at all n locations
tagttaaaccttggaatgggtcggccggtccgcctttggtgtgcattggtcggcttgtcccttcggtcggcnatacgctcctggtcttaattggccgggtcgtgcctccggcgctgtaactttaaagaaattagagtgctcaaagcaagcctacgctctggatacattagcatgggataacatcataggatttcgatcctattgtgttggccttcgggatcggagtaatgattaacaagcaacatcaaatggccacaacttgatttcaaagaacaaaagtcagaggctgaccccaatgtgcaaagcaatgagttaaaagaagaagaagaagaggactcagggaaaggtgaacatattgtggagacaacaaagtttgaggagttcaaggcaggtaaagaagcgagtctcaaggcatggcttggagatatggatgggaatgtggatgttggtggncgtgttgccgagagaatttagatgttttttcattaatgccgctgtggttccgggaacctgcttatttatgnaatcatccncttccccgggnaaaagngttaaantttgncttt

SEQ ID NO: 86217 - DNA, 551 bp, Arabidopsis thaliana columbia
  unsure (1)..(551): unsure at all n locations
tacaatctaaatcccttaacgaggatccattggagggcaagtctggtgccagcagccgcggtaattccagctccaatagcgtatatttaagttgttgcagttaaaaagctcgtagttgtcccttcggtcggcgatacgctcctggtcttaattggccgggtcgtgcctccggcgctgttactttgaagaaattagagtgctcaaagcaagcctacgctctggatacattagcatgggataacatcataggatttcgatcctattgtgttggccttcgggatcggagtaatgattaacaggggccagtcggggggcattccgtatttccttagtccagaggtgaaattccttcgggttttttggaaggacggaccaactgcggtaaactttttgccaaggggtgtttccattaacccagaccgaaattgggggggcccaaaccnntcagataccggcctagccncaaccataaacgatccggccagggntcagcggnttttcttaagnncccgtggncctttggaancanntttggccngggggatgnccca

SEQ ID NO: 86218 - DNA, 1297 bp, Arabidopsis thaliana columbia
  unsure (1)..(1297): unsure at all n locations
gcgtcttggccagctagcgaaatggaaaactgcagaagaggttgctgcacttntccnatctctccctgttgaagaacagccaaagcagattattgtnacacggaaaggaatgttggntccccttnaggttcacttgcttgatttccccaacattgtcattaagggaagcgagctgcagctgccgttccaggcttgcctaaagatagagaaatttggtgacctgattttgaaggctacagaaccgcagatggtcttgtttaatatatatgatgattggttgaagagtatttcttcttatactgccttttcaagacttattttgatccttcgtgcgcttcacgtgaataatgagaaggctaagatgttgttgaagcctgacaagtccgttgtcactgagccacatcacatctggccctctctcactgatgatcaatggatgaaggtggaggtagcacttagagatcttattctttctgactacgcaaagaaaaacaatgtgaatacctcagctctgacacaatcagagatccgagatattattcttggagctgagattactccaccctctcaacagaggcaacagatagctgagattgagaaacaggcaaaggaagccagccagcttactgcagtcacaacaagaactacaaatgttcatggtgatgagctcattgtcaccaccacaagcccttacgagcaatctgcattcggttccaagacagattggcgtgtacgtgcaatatcagccactaatctttacctttagggtcaaatcacatatatgtgaactcagatggcataaaggaaaccggatacaccttcatcatgccaaagaacattttgaagaagttcatatgcgttgcggatcttcgtactcaaattgctgggtatttatatggtattagtcccccggataatccccaggtgaaggagatccgttgtgttgtgatggtgccacagtgggggaaatcatcagctagttcacctgccgtcatctcttcctgagcatgatttcctaaatgatcttgagcccttggggatggttgcacacacagcctaacgggctgccccagctatcaccacaggatgtaacctctcattcccgtattctggagaacaacaagcaatgggatggagaaaaatgcatcatcctgacctgcagtttcactccgggctcctgctctttgacgtcatataagttgacccaaaccggatatgaatgggggcggcttaacaaggacaatggcagcaatcctcacggttaccttcccacccattatgaaaaggttcagatgct

SEQ ID NO: 86219 - DNA, 522 bp, Arabidopsis thaliana columbia
  unsure (1)..(522): unsure at all n locations
ttntgggacacaagcatggtgnnaaaatcacacctgcctgcattcnnccggccctntcttgcgcataaagttccccaaccggatatgaatgggncgcttacaaggacaatggcagcaatcctcacggtnccttcccacccattatgaaaaggttcagatgctgctgagtgaccggttccccgggttttacatggttcctgagagtggaccgtggaactatagcttcactggagtgaagcactcgttgagcatgaaatccagtgtcaaactcggatccccaaaggagttctatcacgaggagcatcgacccactcatttcctggagttcagcaacatggaggaggctgccattacagagggagatcgcgaggacccatttacttgagatatactcaattttcttaccgtgtgtgtgatttagctttattttgcagtatagacttgtaagatgttgtactgtcttgtgctttcctcagatagatagtaaggtccctaaatcttaaaaagatggtttgccactat

SEQ ID NO: 86220 - DNA, 360 bp, Arabidopsis thaliana columbia
ccaacgcgtccgcggacgcgtgggcggacgcgtgggcggacgcgtgggcgaaaagggcaacaaacaaaaataaactcggcgaatctcacaacaatcatggcggctacgacgaactctttccttgtcggaagcaacaacactcagattcctgctttgaaacccaaatcatcatctcaatcctttcttcacctcagcaaaccatacaccgtcaacttcgtcagcaaaaccaagcccgtcgctgttacatgcgtcgcttcaacgactcaagttcaagatggagttagatccggctccgtcggatcccaagaacgtgtcttcaacttcgcggcgggtccagccactttgcctgagaacgttctc

SEQ ID NO: 86221 - DNA, 1649 bp, Arabidopsis thaliana columbia
  unsure (1)..(1649): unsure at all n locations
gacaaaactagtaccacctaacacaaacgctgtcgttttcaagctacatttatatatctcccaccaactctttctcagatcttttgtctaagtaaaagcgaaaagggcaacaaacaaaaataaactcggagaatctcacaacaatcatggcggctacgacgaactctttccttgtcggaagcaacaacactcagattcctgctttgaaacccaaatcatcatctcaatcctttcttcacctcagcaaaccaaacaccgtcaacttcgtcagcaaaaccaagcccgtcgctgttagatgcgtcgcttcaacgactcaagttcaagatggagttagatccggctccgtcggatcccaagaacgtgtcttcaacttcgcggcgggtccagccactttgcctgagaacgttctcctaaaagctcaggcggatctatacaactggcgtggatctggcatgagtgtgatggagatgagtcacagaggcaaagagtttctctcgattatacaaaaagctgaatcggatcttcgtcagcttctcgagattcctcaggaatattccgttttgttcttacaaggtggtgccactactcaattcgctgctttacctctcaatctctgcaaatcggatgatacagtcgatttcgttgttactggttcgtggggtgataaagctgtcaaggaagcgaagaagtattgcaagactaatgtgatttggtctgggaaatctgagaaatacacaaaggttccatcttttgaggagttggagcaaactccggacgctaagtatttgcatatatgcgccaatgagactattcatggagttgagtttaaagattaccctgttcctaaaaatgggttcttggttgctgatatgtcttctaacttctgttcgaaacctgttgatgtatctaagtttggtgtgatttacggtggtgcacagaagaacgttggtccatctggtgtcacaattgtgatcattcgtaaagatttgattgggaatgctcaagatattactcctgtgatgcttgattacaagattcatgatgagaatagttcgttgtacaacacgcctccttgctttgggatttacatgtgtggtcttgtgtttgaagatctgttggagcaaggtggattgaaagaagtggagaagaagaaccagaggaaagctgatttgctttacaatgctattgaagaaagcaatggctttttcagatgtcctgttgagaaatcagtgaggtcgttgatgaatgtgcctttcacattggagaagtctgaattggaagctgagtttatcaaggaagctgctaaagagaagatggtgcagctcaaaggacatagatcagtgggaggtatgagagcttctatttacaatgcaatgcctttggctggtgttgaaaagcttgttgctttcatgaaagatttccaggctaagcatgcttagttttaagggtttttgcattttggttatgtttgttgaaagatgataagctttaaagatgataagctttaaagcttatgatttgtttttttttcttcttttcagaatgaataatgtttaacaatgtatcaaaatctttctccatcaattggaaaaacaagtttgttaacaaaaaaaaaaannnnnnnnnnnnnnnnnnnnnnnnnnnnnnna

SEQ ID NO: 86222 - DNA, 493 bp, Arabidopsis thaliana columbia
  unsure (1)..(493): unsure at all n locations
tcacacgacattgagctggtcctctcactncnccatccacaccaccgagcgaatgangctatttgttgatgcgtcagaaggatttatttaccttgtgagctcattggattgactgttcacgatcatctgtaagcggaaaggttcagtcgctctgaaggatatcaagaggcgacagacaagccggtggcagtcggttttggaatatcaaagccggagcatgtgaaacagatagctggatggggagctgatggagtgatcgtaggcagtgcatggtaaagctattgggtgatgcaaagtcgccaactgaaggacttaaggagcttgagaaactaaccaagtctcttaaatctgctcttctttgaaacacaaacatttgcagacaacatctttagattgtgtttttgattattatcggtgtgtgacaatgatgtctcaatcttttgatacatttcaagtatgattaataagttactgtgactcaagccacacaacc

SEQ ID NO: 86223 - DNA, 506 bp, Arabidopsis thaliana columbia
atttctccggtccgattctcccaaatctctgccagaaccctaaaaacactctgcaggagctttaccttcagaacaatggcttcaccgggaagattccaccgactttaagcaactgttctgagctggtttcgcttcacttgagcttcaattacctctccgggacaatcccttcgagcttaggctctctatcgaagcttcgagatctgaaactatggctgaatatgttagaaggagagatccctcaggagctcatgtatgtcaagaccttagagactctgatcctcgacttcaacgatttaaccggtgaaatcccttccggtttaagtaactgtaccaatcttaactggatttctctgtcgaataaccggttaaccggtgagattctctaaccggttaaccggctattcgacagagaaatccagttaagattggcacagttacttaaaccggaagggatttcaccggttaaatcgttgaagtcgaggatcagagtctctaaggtcttg

SEQ ID NO: 86224 - DNA, 468 bp, Arabidopsis thaliana columbia
cttttaataccttcaaatttatcaacaacaaaaagccaaagaaacacaatgctaaattcttcatatctatccttcgcacttatctttttctgctgcattttgttctccgctctcgcttcgtctttgcccgtttccgaccctgagcttgttgtcgaggaagtacacagaaaaataaacgagtccatatcaagaaggaagctagggttcttctcgtgcgggagtggtaatccaatcgatgattgttggcgatgcgacaaggattgggagaaaaaccgaaaacggttagcagactgtggtatcggttttggcaagaacgctattggcggtcgtgatggtgaaatctatgtggtcacggatccaggaaacgatgatccagtaaaccctagaccgggaacactaagatacgcagtcattcaagatgaaccgctatggatcatttttaagcgagacatgacgattcaactaaaa

SEQ ID NO: 86225 - DNA, 957 bp, Arabidopsis thaliana columbia
  unsure (1)..(957): unsure at all n locations
ccggcttagacggcgaggcgccgaggcgcgcgcaaaactgtgtccgtctctctctctctggcttttgtcttagcattcatctctctaacggcgaggcaatgggttttccggtgggatattctgagctacttctcccaaaaatctttttctacttgttatctttcttagggttgatacgtaaactcatctccacaatgttcaagatcattggtctaccagatttcttagaacctgaaccggtttcaacctcatggcccgacccaccacccacgttgaccaaacctgactcagcagcaatactagccggagagatgttaccggttgttcgattctcggatataaaccgaccggcatccgagtggtgcgcagtgtgtctctacgatttcgagaacgacgacgagatccgacggctgacgaattgttgacatatatttcatcggggatgtttggaccgttggatgatgggttataatcagaagacgtgtcccctttgtcgtacacagtttatacctgatcatcttcaactggagtttaatcaaaggctctggtctcaatcttctgctgtttcttctcaacttcttgatgaatcatcatcttaggacgtattaaatctttgtccaaacaaaaaaaaaagacatattaaatcctttttttttggtactttcattgggaattgggtttggtgtgagatcgatgtaaatattaaacaaaaaaaaaaaggtagtggttacaggttaatgaaaaaagaaagaagaagaaaatttgtacttatccatccctgaaagatgaaattacattttgagttattataaagttgtaaactttttttttttttgttaaggaaaaaaaaaatcatttgctataacagataaaaaaaaagtgtgttagtttttnnnnnnnnnnnnnnnnnnnnnnnnnnnnnnnnnnnnnnnnnnnnnnnnnnnnnnnnnnnnnnnn

SEQ ID NO: 86226 - DNA, 670 bp, Arabidopsis thaliana columbia
  unsure (1)..(670): unsure at all n locations
atgatacgccagctctatacgacttacttagggaaagctggtacgcctgcaggtaccggtccggaatttccgggtcgacccacgcgtccgcccacgcgtccgtctctctctgtctcttgtcttatcatttatctctctaacggcgaggcaatgggttttccggtgggatattctgagctacttctcccaaaaatctttttctacttgttatctttcttaggtttgatacgtaaactcatctccacaatgttcaagatcattggtctaccagatttcttagaacctgaaccggtttcaacctcatggcccgacccaccacccacgttgaccaaacctgactcagcagcaatactagccggagagatgttaccggttgttcgattctcggatataaaccgaccggaatccgagtgttgcgcagtgtgtctctacgatttcgagaacgacgacgagatccgacggctgacgaattgtcgacatatatttcatcggggatgtttggaccgttggatgatgggttataatcagatgacgtgtccactttgtcgtacacagtttatacctgatcatcttcaactggagtttaatcaaaggctctggtctcaatcttctggctgttctctcaattcttgtnanaacactagggggtaatntntcaaaaaaaaanggc

SEQ ID NO: 86227 - DNA, 390 bp, Arabidopsis thaliana columbia
gcttttagtctttattaacgccaaaagcggaggtcaactcggtccttttcttcacaggagacttaatatgctattgaatccagtacaggtctttgaacttggctcttgtcaagggccagacgctggtttagacctatgtagcaaagtgaagtattttagagttttggtgtgtggaggagatggaacagttgcatgggtgcttgatgctattgagaagcgcaatttcgaatcccctccacctgtcgctattcttcctttaggcacaggaaatgatttatctagagttttgcagtggggaagaggtatttcagtagttgatggacaaggaagtctaagaacgtttttgcaagacattgatcatgctgcagttacaatgttggatcgatggag

SEQ ID NO: 86228 - DNA, 474 bp, Arabidopsis thaliana columbia
acacccccaaacaattactcttatagagagagtagaagaagacgacgcttaccccaaaactcgaatccctaggaggtaacagcttaagctctccgattaccccaaactgcaaaatttctcatctttctctctctttatcttgttttcaacagcagcctttacctttttcttttaacctctgatcttgttatcttccatggatccatttccttaaaggttttggtaatatgaattgagaagtccacgcacgtgtgtatctctattaccgtcagattttggtttaaaagcagttatttttactagtcttgtaagaatgagtttaacaaagaaagcaagtgaaccaaagctaagtggtactagtatcaagccaacaactttaaaccctcatgctgctgagtttgttccgtttactctacgttctccttcatctggaggtacaagtactttggatacaagacttttagcttcttctag

SEQ ID NO: 86229 - DNA, 505 bp, Arabidopsis thaliana columbia
gctcgtgttacctctttagccaaacaacacccccaaacaattactcttatagagagagtagaagaagacgacgcttaccccaaaactcgaatccctaggaggttttggtaatatgaattgagaagtccacgcacgtgtgtatctctattaccgtcagattttggtttaaaagcagttatttttactagtcttgtaagaatgagtttaacaaagaaagcaagtgaaccaaagctaagtggtactagtatcaagccaacaactttaaaccctcatgctgctgagtttgttccgtttactctacggttctccttcatctggaggtacaagtactttggatacaaagacttttagcttcttctaggtctgtttgggaaagcggttttggacaggacagattcatctgcgtcacatcattcagatggaggagcacgtcaggctctggagtcatcaacttcctgatgatataactccagatttgctttgatgactcaagaatgacaattct

SEQ ID NO: 86230 - DNA, 601 bp, Arabidopsis thaliana columbia
  unsure (1)..(601): unsure at all n locations
ggggagaaaaagagatggaaagaaaaaagttttcttcaaaatttattcatttgctcattgtgtttttgcttctttgtacgtttctttctcgtaccgaatctgctcttccttatcaccatgaactgttcttggggaggaagcggatgaattattataagcccaacagtgccataggaacaccatcatcaactagtgaccacgctccaggcagtaatgggaggaagttgatgagtatatatagacccaatggagacatatttacaggaccatcaggcagtgggcatggtgggggtcgcactccagccccctagtatatatatattaatgtgtaatcaaggactcacaagcgaagcttttaattctcgatcacgtataacgtatgcgttggtgtagtatatgtttaatttctgttttcacaagccaagtttttcattttctcgaattatgtaatgtataattatgtgtgttggtgggccccggtatctcctagtggttcttaaattaatttcccaaattggtgtggttttaaaaatttaataatggtgtttttggttggtnaaagttttncattntncggttttaanaaaaaaaaaaanatntc

SEQ ID NO: 86231 - DNA, 1314 bp, Arabidopsis thaliana columbia
accacgcgtcagcccacgcgtccgttcctcagaacaattacatttcgattcgattcgattctcttatcatcttgatctctgtgtgttcatctgtggtggatctccacacgttggatttgagaattttgtcgcaagtaacccgcaacgcgggcatacgcacatctctatctgccgtcactcttccggcgaggaatcaaacgcctgatttctcgagccggtttcactacggaccccacgatttctcgcataagcttgttccagctcagatgtctatgatggattcgtttgcactgcaaaggttcaatttttcttcctctacctcgcctgaatcagatgagaagaagacccacactgaggcctcaaagacaagtgaagagaaacctacagctgaggcaaaccaaccaggtcttgactctgaatctaaagattctgtgacagattctgcaaaaagaaagcggaaaggtgctaaaggagctgcatcttcatcttctgaatcagattctgagagtgatgatgatgaattgtcagccgatgatttggtgaagctcgtagctgagaaggaagagctactgtctgagaaggaagaagagattaagcagttgaaagacaaagttcttcgcacttatgctgagatggagaatgtcatggacagaacaagacgtgatgctgaaaacaccaaaagtatgccgtacagaattttgcaaagagcctattggatgtggcggataatcttggaagagcttcttcggttgtcaaagaaagcttctcaaagcttgaactcagaagattctgctggagcagctccactattaaagacccttttagaaggagtggagatgactgagaaacagcttgctgaggtatttaagaaatttggtatggagaagtatgatcctataaacgagccatttgatccaaacagacataacgcagtgttccaagtccctgatgcttctaagccagaaggcacagttgctcatgtcttgaagtctggatacacgctgtatgaccgagttataagaccagctgaggttggtgttacccagggaggagagaaccaagaagaaaagaaagagtctgatgcttaagaagaagtcagctggttttcataaattttgttacggttctatgtttccattaacatcttctcgagtcttcgagtcatagttttcttttgtggtttggttatcattagatgaacaagatctcccataagttgctggacatggcattttcaggggaaatcctgcttctgtgtctgttttctctatccccattctataattggacgaggaaaatatcattttacatccc

SEQ ID NO: 86232 - DNA, 547 bp, Arabidopsis thaliana columbia
  unsure (1)..(547): unsure at all n locations
tcaaagcactaacaaaggtcaatgggaaagaagacttcagacagacattaacatggcaaaacaagctctttgtgaggccttgtctttagacaaaccatcatccactctttcatcatcttcatcattaccgacaccagtaatcacacaacaaaacatccgtaacttctcatcagctttgcttgaccgttgttatgatccatcctcttcttcttcatctaccacaaccaccactacaagcaacactactaatccatacccatcaggggtatatgcgtcaagtgctgagaacatcgcccggttgcttcaagatttcatgaaagacacacccaagggtttaactttatcatcttcatctccggtttcagagactggaccactcactgctgcagtctcgggaagaaggtggagaaggggttggaacaatctttcttcaggttcaattcaatggcgnaactcaaaactgtctcaggggcaagctncttccatggtcaagtggcaancgggaanacatggccagntctgggcaantccangggcctgctttntt

SEQ ID NO: 86233 - DNA, 772 bp, Arabidopsis thaliana columbia
ccggatccgccaccggaacttctggttacatcaacatcaccgatataaaaggcggtaaagtcgcttttggtgtccaagacgacgatagcaagctcacagctcactacgtcaaatccgtctttgaaaagccttacaacatctctgttcttcacatcagccaagtcttaacctcgccggaagcagaagctcccacggcgagtcccagcgacctcatcctcaccacaatcctcgaaaaacaagggtgcaaagctttctccgacatcttgaagtcaaccggcgccgacaaaacgttccaagataccgtagacggaggcttaacggtgttctgtccctccgacagcgctgtcggtaagttcatgccgaaattcaaatccctttctccggcgaacaagactgcgttagtgctttaccacggcatgccggtttaccagtcgttacaaatgcttagatcaggtaacggcgccgttaacacgttagcgacggaaggtaacaacaagtttgatttcaccgttcaaaatgacggagaagacgtgacgctggagacggacgttgtgacggcgaaggtaatggggacgttaaaggatcaagagccattgatagtttacaagatcgataaagtgttgttgcctagagaaatctacaaggccgttaagacgtccgctccagctcctaagtcgagtaagaaaaagcctaagaacgcggaggctgacgccgacggacctagcgccgatgctccgtcagatgatgatgttgaggtggctgacgataaaaa

SEQ ID NO: 86234 - DNA, 678 bp, Arabidopsis thaliana columbia
  unsure (1)..(678): unsure at all n locations
ccccggnncncctttaaatngtncccccggttcagaattccgaccccgccatgccggtttcccagccgttacaaatccttagatcaggtaccgcccccgttaccccgttaccgccggaaggttaccgccaagtttgagtccaccgttcaaaatgacggagaagacgtgacgctggagacggacgttgtgacggcgaaggtaatggggacgttcaaaggatcaagagccattgattagtttacaagatcgataaagtgttgttgcctagagaaatctacaaggccgttaagacgtccgctccagctcctaagtcgagtaagaaaaagcctaagaacgcggaggctgacgccgacggacctagcgccgatgctccgtcagatgatgatgttgaggtggctgacgataaaaacggcgccgtatcagcgatgattactcgaacaagtaatgtcgtaacggccattgtcgggctctgtttcggagtttggcttatgtgaagtgacgtggcatttacctcgctttgggaatcttgttttcctttttctttgtgatctgtcggtttaatttattttacatattcttttttttgttcacgttgatacttggtgtggagatttggaataattaattgttcccacttgtgttggatctgatatgttttattctaaaaanatgtgaatt

SEQ ID NO: 86235 - DNA, 920 bp, Arabidopsis thaliana columbia
  unsure (1)..(920): unsure at all n locations
ctctatcaaagccgcccaatcctccactccaaaaatggcttatctccggcgagcagccaccgcattggttctcattttccagctccatctctttctctctctctcaaatgcacataacataacccgaatcttggccaaagaccctgatttctccactttcaaccactatctctcagcgactcatctcgccgacgagatcaaccgccggcaaacaatcaccgtcttggccgtcgataactcagcaatgtcctccatcctctctaacggatactcactctaccaaatccgcaacattctctctctccacgtcctggtcgattacttcggcaccaagaaacttcaccagatcaccgacggctccaccttcactgcctccatgtttcaatccaccggatccgccaccggaacttctggatacatcaacatcaccgatataaaaggcggtaaagtcgcttttggtgtccaagacgacgatagcaagctcacagctcactacgtcaaatccgtctttgaaaagccttacaacatctctgttcttcacatcagccaagtcttaacctcgccggaagcagaagctcccacggcggagtcccagcggcctcatcctcaccacaatcctcggaaaacaagggtgcaaagctttttttccgacaattcttgaaggtcaacccggngccgncaaaaacggttccaaggttaccgtnggacggaggggttttaacgggtgttttntnccttccggcaaggggttttgggaaagtttattncggaatttaaaatccnntttttccggggnacaagncttnngtagggttttcccgggattcgggtttccagtggttnaaatggtttgtnaggnacggggggttaaangttgggcggnggtnaaagttttttccgnaaattnggggggngnntgc

SEQ ID NO: 86236 - DNA, 1027 bp, Arabidopsis thaliana columbia
  unsure (1)..(1027): unsure at all n locations
agaggaatgggttgctccgccggattaatctcaatcgatctcgctaacaatctcctcaaagcaaaccctaattcttacgctgtcgtggtaagcacggaaaacataaccctaaactggtacttcggaaatgaccggtcaatgctcctctgcaactgcatcttccgaatgggcggagctgcgattctcctctctaaccgccgtcaagaccggaagaagtcaaagtactcgctggtcaacgtcgttcgaacacataaaggatcagacgacaagaactacaattgcgtgtaccagaaggaagacgagagaggaacaatcggtgtctctttagctagagagctcatgtctgtcgccggagacgctctgaaaacaaacatcacgactttaggaccgatggttcttccattgtcagagcagttgatgttcttgatttccttggtcaaaaggaagatgttcaagttaaaagttaaaccgtatattccggatttcaagctagctttcgagcatttctgtattcacgcaggaggtagagcggttctagacgaagtgcagaagaatcttgatctcaaagattggcacatggaaccttctagaatgactttgcacagatttggtaacacttcgagtagctcgctttggtatgagatggcttataccgaagctaagggtcgggttaaagctggtgaccgactttggcagattgcgtttggatcgggtttcaagtgtaatagtgcggtttggaaagcgttacgaccggtttcgacggaggagatgaccggtaatgcttgggctggttcgattgatcaatatccggttaaagttgtgcaatgattggttgaaccggataatcatatatgtaattgtgttcttcttgattttattttttaattgttgatgtaagttgtcgattgaaaatcatataatttaattaatttatggatgtgtgtttggtatacgttagttgattattcatcctnnnnnnnnnnnnnnnnnnnnnnnnnnnnnnnnnnnnnnnnnnnnnnnnnnnnnn

SEQ ID NO: 86237 - DNA, 2259 bp, Arabidopsis thaliana columbia
  unsure (1)..(2259): unsure at all n locations
atttctccaagtcatcaaaattctcgccgtcaaatcaaatcataaatttttgtttctccaatttgttgagaaacatcacattccgtgtttgatcatcggacaatgaaataaacccactcaaaaagacagaatcaaactcctttttgttctctttctcttaaacccattaaccattttcgtatctgctaccaacttcctgtaatttttctcgggaaaaacanaaaaacataaaacccggtactttaagcgattttttcatggcgtttctgatggaggtcgatgaagaagaagagatatgatttagtcgttcttcaaattgagaatcttggggtggttgttttttattggtagtcatgattattaccacacacaaaagagatataaacttgttggtgcttcaattaggagcagctcttgctgtatcttttgctggatttctctttgcccgatttagaaagaatacaaaaagaattggacctactttgcctcctcttccacctcactcttctgataatggatacagagactattccaacaaatccattgatagacgagatgagggcacggagaagacggatgaagagactttaattggtgtttcgccacgaagggaatgtgatcttgatgaaaaagatgtgtttcttttaccggagtttgaagaggaagctaaaaagttagatttgttggtttgtgatgactgtgaaacaccgaggtcagatataactgctcctttagcatttcctagcgaagaggaagctgatcatgagaatgagattaaccggttgagaaacacggtgagagcgctccgtgagagagagaggtgtcttgaggataagttgttagaatactacagccttaaggagcagcaaaagattgcaatggaactgagaagtagattgaagctaaaccagatggagactaaagttttcaattttaagatcaagaagttgcaagcagagaacgaaaaacttaaggctgaatgttttgagcattctaaagttttgttggagctggatatggctaagtctcaggttcaagtgcttaagaagaaactgaacatcaatactcaacaacacgtagcgcagatcttgtcgcttaaacaacgagtggcgaggctgcaagaagaagaaatcaagcctgtgttacctgatcttgaagctgataagatgatgcagaggttaagggatttggaaagtgagatcaacgagcttacggatactaacacgagattacagtttgagaattttgagctttctgagaagctggagtctgttcaaatcatagcaaattcaaaactggaggaaccagaggagattgagacattacgcgaagattgtaaccgattgaggagtgaaaatgaagagttaaagaaggatgtcgagcagcttcaaggggatcgatgtactgacctcgagcagctcgtttatctcagatggataaatgcttgcttaagatatgagctaaggacttaccagcctcctgctggtaaaactgttgctagggatcttagtactactctaagtcctacttcagaggagaaagcaaagcaactgatcctcgaatacgcacatagcgaagataacactgattatgatcgatggtcatcttcgcaggaagagtcatcaatgatcactgactcaatgtttttagatgattcttctgttgacactttgtttgcaactaaaaccctaaagacaggaaagaagaagctgatgcataagttaatgaagatcttacatggtaaagatactaaagacagcaagaagagagctggttcatcggaaccgagcagctcaaacactggtgttcattcaactcctaggcagcttagatcaacacattcaatggacttccaaatgttgatgcgtggcaaagacgaggaagaagacttcaagaatcacattgtgatgctgcgtcgtaagagtgaagcagcaggttcttccacttatggagaagaacactgtttggaaacagatcaaaacgggaagaaagagctgattaaattagcagatgcgcttacgaaatctcgttctacaaagaaactgcataagaaatctgtgtccttctttttctgaaagtaagtagaaacactaacttacttgttactgtaacacgcatcgcctaaagctacatgtatgtgtatatagatatagcttaaagtttgtaaatttgtgaacccaaacataagaaaagagtggagagaatctgatatgaagcttgagagaaatgagtaacgcttggtgaggagcattgaaactt

SEQ ID NO: 86238 - DNA, 543 bp, Arabidopsis thaliana columbia
ccggaactatacgactcacttagggaaagccggtacgcctgcaggtaccggtccggaattcccgggtcgacccacgcgtgcgctctgacctcactgatctccaatggcgaaaaccctagctcgctccacagcgtcacgcatcaccaagcgcttaatctccacctccggagccaccactccttccccttcttatatcctctcccgtcgatcaaccccggtgttctcccatgccgtcggattcatctcttccttgaatcgtttcacaacgattcgaactcgaatggataggtccggtggatcgtactctcctctaaaatccggttcgaatttcagcgaccgagcacccactgagatggcgccgttgtttcctggctgcgattatgagcattggttgattgtaatggacaaacctggaggcgaaaacgctactaagcagcaaatgattgattgttatgttcaaaccctagctaaaattatcggcagtgaggaagaagctaagaaaaagattataatgttatctgtgaaaggatttttgatttggtt

SEQ ID NO: 86239 - DNA, 588 bp, Arabidopsis thaliana columbia
tttttcttcttcttgtttctgtgttaccgatctggctctgtcttcttcttcttcttcttcttcgtttacgtctctgtgaaatgctcaagctgattagggtttatcaactttttctcaactttcttgttatctccttcgttatcctctctgtcttctcagcttagcagctattgtgcatttgaagctgtactcggaagaaaagcccatagaagagtcaaatataacaaaaaatggctgcggagcttgtaagttctgcaacaagtgagaagcttgcagatgtggactgggccaaaaacattgagatctgtgaattagctgctcgagatgaaaggcaagcaaaagatgttatcaaggctatcaaaaaacgcttgggaagcaagaacccaaatactcaattatatgctgtccagttgctagagatgttgatgaataatattggagagaatattcataagcaagttatagatacaggtgtactccctacgcttgtgaagatagtaaagaaaaaatcggatttgcctgtaagagagaggatttttcttcttcttgatgcaactcaaacctcgcttggtggcgcttcagggaaat

SEQ ID NO: 86240 - DNA, 616 bp, Arabidopsis thaliana columbia
  unsure (1)..(616): unsure at all n locations
tttggagtgatcttacgaatctaatccaaaaaaactttccctaatactctgacattatacacataatctgatgttgagatcaaaagagtttacacaactgacttgacacaaacgaacacttcaccacaaaggatatgataattttacattgtcaatgttttcttccacctttactctctttttgtaaggcatgaaccctctcatgttgttcatctcagtcaccgacgattttaactgagaggaagctgatctctcacttcttttgaactccgacactaccactttctgtttcagcgttttctgaagtagaagaagaacattggaagagactcgtgtttctgagtatagcttcttcttgccatcttcagaatccatcacaactcacttgaaggggtgtaatcaccaacttcaaaaggttttccaaagngcttaagggtccggtttgggccccnggttctagnggcaatgatcccccggggtgagatggtaacncagctggaagnaaggttagggggatttggnccaagggncccaaacccancggggcccangngcgganaaaccggntgttggngnccggggacctcnncccngnaannnctgggccggggnggcc

SEQ ID NO: 86241 - DNA, 619 bp, Arabidopsis thaliana columbia
caaatcagtttttaaaaataagggaaaatcctaataaaggagaagaaaaacagatctgaaatcccgcttgatactccaccgactttaaactactggtttttgtttgatttaagtatagtgttaatgactcctctctccaccttcctttgattctacctatcacttcccttgccgttgctccatcttcatcactagtcactatacaccaatcttagatccgggaagctaatttctcttctccgatcggtgaatgcagttacattgacctcggatctaaccaagctcttctggtttccagctctctggaattcaaaaaaatggaggagaaatccaagtcaagaggttggtgcggttggttcatcgccattattgtgctagcttctgttatcctcgccgtcgtttacactgttaaattgagaacgaagaaatccggtgacgatgacggtggcggtcccgttcctggacctcccggcgccattgataagaaatacgccgacgctcttaagctcgctttgcagttcttcgatatccagaaatctggtaaattggagaacaataagataccttggagaggagattcaggtcttaaagatggaagtgaagataatctggatctttc

SEQ ID NO: 86242 - DNA, 561 bp, Arabidopsis thaliana columbia
caataccgaacctaccttcgatatctctagtctgtttttgtcgtaaatccattgatcatgccgcctggtgccaaaaagagaaaggctttgaagaagaagcagcaggagcaggaagccactggagtcgctaccaacaacaaaggcttcaatggtcatggacatgatgaacatggaagccaagatgagagagacagtgatggcaatttgagttcccctggatctcaaggaaatgaagaatttgggactagagatccatcacctcctccattatctagtttagggaaagacattgttaaagagaaagcagaagatgcagactttactgggggacaagtagcgaaaggtgaagacgttattgaagttggaagaggaagaacggatcacgaggagaatggtgtaaacaaacaactcaattcctgtcctgaaaatttttctcaaacttcttggggggctgatagtacttcaaggtttggaaatttcacctcctccttgattctgtcaagcctatgggttcttctgtctcaaaagttgtgatggctgacaaaagtaagcaagttgaga

SEQ ID NO: 86243 - DNA, 1032 bp, Arabidopsis thaliana columbia
cacgttctcctcgcagattcagatatcttcccctcggaatctaggccttaaaagaaggaagagtcaggcaaagaaggtggtgtgccggccccggctgcaatgaacagccgatcaagcggagaagtggttccatcggatctatgggcttggcgtaaatacggtcaaaaacctatcaaaggctctccttttccaaggggttattatagatgcagcagctcaaaaggttgttcagcaagaaagcaagtcgaaagaagccgaaccgatccaaacatgttggtgattacatatacctccgaacataaccatccttggcccatccaacgcaacgctctcgccggttccacacgctcctccacctcctcctcatctaaccctaatccttccaaaccctcaaccgcaaacgtaaactcctcatccaatgggctcccaaaacaacatcttacttgggcttcctccaccactcctcctcctcctcctcctaccctctcatcctccgccatcaaagatgaacgaggggacgatatggagttggaaaacgtagatgatgatgatgataaccagattgctccatacagaccggagcttcatgatcatcagcaccaaccagatgatttctttgcagatcttgaagagctagaaggagattctctaagcatgttgctttctcatgctgtgacggcgacgggaaggataaaacgaccgcgtccgatgggatcagcaatttcttcgggtggtcgggagataataattataataattacgacgaccaagactcaaggtcgttatagtatagtgttaattacaggtaaacaaattatattaaattaagttgagcttgtgaaaatgaagatcatatggtctggtcaggttgggggtaatgactaatgagctggtacatgacagaccgtaaacagtatttatcgtcatttgttatacatttgttttttttcggaagatccgtctgtagttaaaaaaaaaaaaacggcattttttctatgcgttgttataattcctctaaagttcttttaagag

SEQ ID NO: 86244 - DNA, 492 bp, Arabidopsis thaliana columbia
  unsure (1)..(492): unsure at all n locations
acgcgtccgaatgattgtctgactaaaatttagggttatgcgagcaacatgtgtaaaattaatctgtagttagaagaaatatcatgataatccttaatttaagtatctaattatgtattaatcaaagaattttggtctcttctttttcatttgttttgtttaatcaagtgtagatctaatcatattcacttataagttataatctatagtatttgtcagtttgattgtacttattataatggcttgatccaatggttggtgtaatttaggtgtcatcatcgtcgatggaagtgggagtggtgccagatggtggttcggtggcttgatgtatcgtatccttacggtggtcctgcaaccagtggagctgatccggggacacagcgggctgttcccctgacttcagcctgagagagaagcgcgggtaatgaggtcccagaggaagaggaggacaggaagtttagaaggctttnaggnntcctcaagggaagcntt

SEQ ID NO: 86245 - DNA, 559 bp, Arabidopsis thaliana columbia
  unsure (1)..(559): unsure at all n locations
agncccaagggncggccantaccgaccttcgggcctcaaccaggacctnaccgggcgacaacggctntcccctacccccccccaaaaaaaacccgggatattggggccccgaaagcaangggaagacccggaagtttgaaaaccccataagggtatcctccaaggaaaccgtatccggaaatgaaaccccgaatcaagggacggtttcccaaacggaccggatacaaatgagagcaatgatgtggttggccatggtggtacctttagtgggttcggacttgtacctacattttagatattgagagagggagagactctaaaatggaagatggtgggtggtttggtgtttgttttagtaataaggtttttaacgaacgtttaatttaaacgagtttgtttgttttttgttgatgagtatttttagttgttgtgggcgatgaagaggaagagaagtgagtgggtggtgtttaactgtttataagtaacttgttttgtatatatcgtgattttgaatatgttcttgtttaaaaaaaaaaaaaaaaaagggcggcccgctcgc

SEQ ID NO: 86246 - DNA, 858 bp, Arabidopsis thaliana columbia
ggtttaaccaacgcgtccgccgaggtggaatcgttagagccgaatacctccggtactgatggtgttgttccggtggagaatcggacggttagaatcccgacggtgaacgagaattgctttgaaatggattttaccggaggatctaaaggctttgcttatggaggtggttacaattgcatcagtcacagcgtgtcatcatcgtcgatggaagtgggagtggtgccagatggtggttcggtggctgatgtatcgtatccttacggtggtcctgcaaccagtggagctgatccggggacacagcgggctgttccgctgacttcagctgagagagaagcgagggtaatgaggtacagagagaagaggaagaacaggaagtttgagaagactataaggtatgcttcaaggaaagcgtatgcggaaatgagaccgagaatcaagggacggtttgcgaagcggacggatacaaatgagagcaatgatgtggttggtcatggtggtatctttagtgggttcggacttgtacctacattttagatattgagagagggagagactctaaaatggaagatggtgggtggtttggtgtttgttttagtaataaggtttttaacgaacgtttaatttaaacgagtttgtttgttttttgttgatgagtatttttagttgttgtgggcgatgaagaggaagagaagtgagtgggtggtgtttaactgtttataagtaacttgttttgtatatatcgtgattttgaaaaaaaaaaaaaaaaagggcggccggctcgcgatctagaacctcgagccgaattccgagcttacgtacgcgtgcatgcgacgtcatagctcttctatagtgcaccta

SEQ ID NO: 86247 - DNA, 701 bp, Arabidopsis thaliana columbia
  unsure (1)..(701): unsure at all n locations
aaggagaggaaaaaaaaaatacaagctcttttgttataaacacacactctcaggagagaaggtgtattgatcgtcttctctttccctaaacacactgattattttctctccgacgccgccatgtctctgctctcagatctcgttaacctcaacctcaccgatgccaccgggaaaatcatcgccgaatacatatggatcggtggatctggaatggatatcagaagcaaagccaggacactaccaggaccagtgactgatccatcaaagcttcccaagtggaactacgacggatccagcaccggtcaggctgctggagaagacagtgaagtcattctataccctcaggcaatattcaaggatcccttcaggaaaggcaacaacatcctggtgatgtgtgatgcttacacaccagctggtgatcctattccaacccaccaagnagnacaaacggttgctaagatcttttagccaccccgncgttgccaaggaggggcctttggtattggggtttnagcaagatacactttgnttgaaaaggntgtgaccttggccaattggttggcctttttggtggtaccctgggccttagggcctttctanttnggtttgggggtgcaaancatttngtnggnattttgggggncctnaaggcttttttngnggnttgnttttggtaatnggggatcngncnngggcctgta

SEQ ID NO: 86248 - DNA, 933 bp, Arabidopsis thaliana columbia
  unsure (1)..(933): unsure at all n locations
ctgcagtaccggtccggaattcccgggtcgacccacgccgccgtctctttccctaaacacactgattattttctctccgacgccgccatgtctctgctctcagatctcgttaacctcaacctcaccgatgccaccgggaaaatcatcgccgaatacatatggatcggtggatctggaatggatatcagaagcaaagccaggacactaccaggaccagtgactgatccatcaaagcttcccaagtggaactacgacggatccagcaccggtcaggctgctggagaagacagtgaagtcattctataccctcaggcaatattcaaggatcccttcaggaaaggcaacaacatcctggtgatgtgtgatgcttacacaccagctggtgatcctattccaaccaacaagaggcacaacgctgctaagatcttcagccaccccgacgttgccaaggaggagccttggtatgggattgagcaagaatacactttgatgcaaaaggatgtgaactggccaattggttggcctgttggtggctaccctggccctcagggaccttactactgtggtgtgggagctgacaaagccattggtcgtgacattgtggatgctcactacaaggcctgtctttacgccggtattggtatttctggtatcaatggagaagtcatgccaggccagtgggagttccaagtcggccctgttgagggtattagttctggtgatcaagtctgggttgctcgataccttctcgagaggatcactgagatctctggtgtaattgtcagcttcgacccgaaaccagtcccgggtgactggaatggagctggagctcaatgcaactacaagcactaggccaatnagaaaccgtttggagggttagaagtgatcaaagaaagcggtaaggaagatcatctgaaagncaaggncaatttt

SEQ ID NO: 86249 - DNA, 1850 bp, Arabidopsis thaliana columbia
  unsure (1)..(1850): unsure at all n locations
aaaccacgcgtccgcttttcttatatctgctttccaaaacagagaaaccccaagaaaagaaaaagaaaagatccgggatgggaaagaagcaggaggagactttttggaatggagagacaaaagagcatggaaaaagggttactcaggaagagcttaagcatacgtgagagaaagttccctaacgaagacgctttcttagaatccggtttatcgaggaagtctccgcgagaggtcaagaaacctcaaaacgacgatggtgaatgtcgtgttaccgcctctgttttcctcagcacctttgttgccgtatcaggctccttctgtaccggttgtggcgttggtttttcatcgggtgcacaagcagggattaccaaagatttatctctctccgttgcagaatactcaatgttcgggtcgatcttgacattaggaggcttgatcggtgcagtattcagcggtaaagtcgctgatgtcttgggaagaaaacggacgatgttgttttgcgaattcttctgtatcacaggctggctttgtgtagcattggctcagaatgcaatgtggctggactgtggaagattgttacttggaatcggcgttggtatatttagctacgtgattccggtgtatatagccgaaattgcacctaaacatgtccgaggatcgtttgtgttcgccaatcagttgatgcaaaattgcggaatttcactcttcttcatcattggcaattttattccatggagactactaacagtagtcggattggtgccatgtgtgttccacgtcttttgtttatttttcatccccgaatctccaagatggctggcgaagttaggtcgtgataaagaatgccgatcttcgttgcaacgccttaggggatctgacgtcgatatttctcgtgaagcaaacacaattcgagataccattgacatgacagaaaacggtggtgaaactaagatgtctgaattgtttcagagacgatacgcatatccgttaattatcggagttggtttaatgtttttgcaacaattgtgtgggagctccggtgttacctattatgctagtagcctcttcaacaaaggaggatttccaagtgctattggcacatccgtaatagccacaattatggttccaaaagcaatgctggcaacagtcctagtcgataaaatggggaggagaacgctcctaatggcttcttgttctgcaatgggtttgagtgctttgctcttaagtgtttcttacggtttccagtcgtttggcattcttccagaactcactcccatcttcacttgcatcggcgtcttgggtcacattgtgtcatttgccatgggaatgggaggactaccatggattataatggctgagatatttccgatgaatgtgaaagtgtcagctgggaccttagttactgtaaccaattggttatttggttggattatcacatacactttcaattttatgctagaatggaatgcatcaggaatgttcctcatcttctcaatggtctccgccagttcgatcgtatttatatactttttggtacctgagacaaaaggccgatcacttgaagaaatacaagcactgctcaacaactctgtgcaataatatcatttttctttttctttttgggtaaatgatcatatatataagtcgattgttgttatttggtgtgagtttgaatgtgatccgtgtgcgtatcaaattttggatgggaaatttgaaacagtaaaaatttgtatattcctcgtttgggaaaaatgtatgttttggttagttatatgcaaaaatgttgttgaagaagtttatacataaaaagttaaatacaaaaaagggtggattggaaacccnataaaant

SEQ ID NO: 86250 - DNA, 2088 bp, Arabidopsis thaliana columbia
cttccaaccgccaaagaaaaaaatcaaaaactccaacaaaaaaaaactcccaaaccctacccgagcagtcgccagatgggcacggaggactacacattccctcaaggagcggaggagcttcaccgccgccaccacacggtggaggctccacaacctcaaccgttcttgaagtcacttcagtactcagtgaaggaaactctgtttccagacgacccttttagacaatttaagaaccaaaatgcatcaagaaaatttgtgttaggcctcaaatacttcctcccgattttcgaatgggcaccacgctacaatctcaagttcttcaaatcagatctcatcgccggaatcaccatcgctagtctcgccatccctcagggcatcagttacgccaaacttgctaacttgcccccaattcttggcctttattcgagttttgtaccgccattggtatacgcggtgctagggagttcaagggacttagcggtgggaacggttgcggttgcgtctctgttgacaggtgcgatgctgagcaaagaagttgatgctgagaaagatcctaagctttaccttcaccttgctttcaccgccacttttttcgccggcgttctcgaagcctctcttggaattttcaggttagggttcatagtggactttctatcgcatgcaacgatagtaggattcatgggaggagcagcgacggtggtgagtctgcaacagcttaagggtattttcggacttaaacatttcacagactctaccgatgttatctctgtcatgcgttccgttttctcccaaactcacgagtggagatgggaaagtggcgttcttggatgtggttttctattctttcttctctccaccagatatttcagcatcaagaaaccaaaattcttttgggtggcggcgatggctcctttgacctcagtgattcttggaagtctcttggtttacttcactcacgctgagagacatggtgttcaagtgataggggacctgaagaaagggttgaatccactctccggttctgatctcatctttacttccccttacatgtccacagctgtcaaaactggcctcatcactggcatcattgctctcgctgaaggaatagcagtggggaggagttttgcgatgttcaagaactacaacatagacgggaacaaagagatgatagcgtttggaatgatgaacatcgttggttccttcacatcttgttacctcacaaccggaccattttcaaggtcggcagtgaactacaacgcgggttgcaagaccgcaatgtccaacatagtgatggcgattgcggttatgttcacactcctcttcctcacaccgctttttcactacacaccactcgtcgtcctctctgccatcatcatatccgcaatgctcggactcattgactatcaagctgccatccatctctggaaagttgacaagttcgacttcctcgtctgcatgagcgcctacgttggggtcgtattcggcagtgtagagattggactcgtcgtagcggtggcgatatctatagcgaggttgttgctgtttgtgtcgaggccaaaaactgcggtgaagggaaacataccaaacagcatgatctataggaacactgagcagtacccatcatcaagaaccgttcctggtattctcatcttggagattgatgctcccatctactttgctaatgccagttacttgcgtgaaagaatcataaggtggattgatgaagaggaagagagagttaaacaatcaggagagagcagcttacaatatattatactcgatatgtcagctgttggtaatatcgacacaagcggtattagcatgatggtggaaattaagaaagtcattgacaggagagcgttaaagttggtattgtcaaatccaaaaggagaggtcgtgaagaaattaaccagatccaaattcatcggtgatcatttgggcaaagagtggatgttcttaacggtaggagaagcagtggaggcttgtagctacatgcttcacacgtttaaaaccgaaccggcctccaaaaacgagccttggaacaacgtatagttcctttattttttgctgtcgttctgtgactactcg

SEQ ID NO: 86251 - DNA, 598 bp, Arabidopsis thaliana columbia
caaaagggtcgggattcccgttttaaggttccgagcggatacatcctcccgggggagaccctaggtgtgacccgtttcaaaagcctttcaccccatcttaagctctggttgttccagaaggccctaatggctgtagatactcccctcgggcgtttaaaggtagagttgctggagtaaaagtgaagccccgttgatacaaccggtgcagggagatgcattcgtgagcgggttattggaaccagctttagcttctgatcttactcttctcaaggatgagaaggaaactaaggagaggcgcttctatttgcaaacgcatgtggagccattacagtaacagagagaggagcgataccggcgatgccaagcatggatgctgttcaagatcttctttcttctactcgctcctaaaatgcttcaaaagtctcttttgagtgtatcaattcattaccttttacagtgtttttgtttttttaaatatttttccccaatttgtaggaactcaagaatgttgtgtgtgtttttttagtttgttgttgatctcccggagttttagtattggggtggtttggttttactattatcaagttaggttttctac

SEQ ID NO: 86252 - DNA, 1144 bp, Arabidopsis thaliana columbia
cacatttcttttccttattttaatcaaaacatttgtttgcatcattcacaggcaaataaaaagcctccctttttcttagattgctactacgtataaagtagagagtgcacatagatgtaattatcaaacgaggaagcatcattatcattatcattatcatcattactgcttcatagattcatattattgcttatctaaaagtttgcttttgtagtagttggtggtcaagtaggatttgatttgatcttctagaattacagatcgagaaacagcaaatctgaggttttagaaaatgggatcttcttctgggcaaagtggatacgatctgtcttttaagatcttgttgattggtgattctggtgttggtaaaagcagtttgcttgtcagcttcatttctagctccgttgaagatcttgctcctactattggtgttgatttcaagatcaaacaattgacagtaggaggcaaaaggctaaaactcacaatctgggacacagctggacaggaacggtttagaacactgacaagctcttactacagaggcgcccaaggaatcattctcgtttatgatgtgacgagaagggagacatttacaaacttagtagatgtgtggggtaaggagattgagctttactccacaaaccaagaatgtgtaaggatgctcgttgggaacaaagtcgatagagaatctgagagaggagtaagcagagaagaagggattgctctagcaaaagaactcaactgcatgtttcttgagtgtagtgctagaactcgacaaaacgtggaacagtgtttcgaagagttggctttgaagataatggaggtacctagtctcttggaagaaggatcaagtgctgtgaagagaaacatcttgaagcagaaaccagaacaccagactaatactcaatccggctgttgcagctagtgaccctagtcgatgttgcatataaaatactcgaatctttatcttgtgtattgcaaactgaacctgattcttctctctgtggttgcctcttttgtgtgtagaacataatgtagcttcaatgtaaatttgtgggattacttgtattcttcttttgcttctgaaatgagatttgtgataataacatcatataatagaataaaccccatcaagtgttttctt

SEQ ID NO: 86253 - DNA, 497 bp, Arabidopsis thaliana columbia
ctgcaggtaccgggccggaattcccgggtcttcccaccggtcgtacgttactggagctgatctcacgtatattttggatcgtaatcatggacggcgaagattttgccggaaaggcggctgctgaagccaagggattgaacccgggattaatcgtgctgcttgttgttggaggtccgcttcttgtgttcctaatcgccaactacgtgctttacgtttatgctcagaagaacctacctccaaggaagaagaagcccgtttccaaaaagaagctcaagcgggagaagctaaagcaaggagtccctgtccctggagaataaaagccagcttaagcttccttcacttgtgcctccttcaaagcggtttttgttcggttaccaaatttcacccttgcgggttttttcttcctttacttctgtcatgaggattatcttgagtcctgtatgatttcacatggagagtgtagactattgttttggtctgacttgtttttccttcat

SEQ ID NO: 86254 - DNA, 669 bp, Arabidopsis thaliana columbia
  unsure (1)..(669): unsure at all n locations
tttgttcattttgatgggaggtactttcatgtcactgcctgctgagtatcgggatttcttcatacggaatcttcatgatgctttatcaggacacacttctgccaacgttgaagaggcagttgcttactctgaacatagtgcaactaaatgcattgggatgacaattgaaacgaggccagattactgccttggacctcatttacgacaaatgctgatttacggttgcacccggctagagataggtgtccagagcacatatgaagatgttgcccgtgacacaaatagaggtcatactgttgctgctgtagctgactgcttctgcttggctaaagatgctggtttcaaggtggttgcacatatgatgcctgatcttcctaatgttggggttgagagagacatggaaagtttcaaggagtttttcgagagcccatcttttagagcagatgggttaaaaatatatcccacccttgtgatccgtggaactggactttatgaactatggaaaactgggaggtaccgaaattatccacctgagcagcttgtggtatagttgcaaggatctttcatggtacctccatgggcacggtatntagngtncagcgtgtattccatgccnttggtacggnaggggtggaaaggaatnttcgtacctgcnttccgaatggtttg

SEQ ID NO: 86255 - DNA, 3229 bp, Arabidopsis thaliana columbia
ctattcgtttagagaacacttaaacaaacgcaggaggcctggaaaaaagaaagataacgggactcgagagattgagattacggagccacccactttcatggagtctacactctcagctttctcaaccgtcaaggcaacagcgatggctcgaagtagtggtggtccttcattacctctcctcactatttctaaagcacttaaccgccactttaccggcgccagacacctccatcctttattgctcgctcgctgttctccctccgtgcgacgtcttggtgggtttcatggcagtcgatttacttcgtcgaattcagctttgagaagcttgggagctgctgttttgccggtaatccgacaccgtttagagtgtttgtcgagctcatcgccgtctttcaggagtatctcaagtggcggcggttctggatttggggggtataatggtggaagcggcggtggtggtggcggaggatcggagagtggtgattccaagtcaaaactgggtgctaatgcaagtgatggtgtctctgttccgtcgtcagatatcattattctcgatgttggagggatgacatgtggagggtgttcagcaagtgtgaagaagatactggaaagccaacctcaagttgcttcagctagtgttaatctcaccaccgagacggcaattgtgtggcctgtaccggaagctaaaagtgtacctgattggcaaaagagtttaggcgagacgcttgcaaaccatctgtccaattgcgggtttcagtctactcctcgagatttggtgacagagaatttcttcaaagttttcgaaacacagccaaaagacaagcaggctcgcttaaaagagagtggccgcgagcttgctgtttcatgggccccatgtgctgtatgcttggttggccatttaactcactttctaggggttaatgctccctggattcatgcgatccattcaacggggtttcatgtgtctttatgtttgattacgttgcttggtcctggacgcaagctagtacttgatggtatcaagagtcttttaaaaggttccccaaacatgaacacgctagttggtcttggtgctttgtcatcattttctgttagctcactggcagccatgattccaaaattgggctggaagacattttttgaggaaccagttatgttaatagcttttgtattgctgggaaggaatcttgaacagagagctaaaataaaagccaccagtgatatgactgggctgctgagtgttttggcttcaaaagctcgccttctgcttgatggtgatctgcagaattcaactgttgaggttccttgtaatagtctctctgttggtgatctagtcgtcatactaccaggagatcgagttccagcagatggtgtggtcaagtcaggtagaagcaccattgatgagtcaagtttcacaggtgaaccattgccagtgacaaaagagtcagggagtcaagtcgcagcaggatctataaacctgaacggaactcttactgtcgaagtgcatagatcagggggtgaaactgcagttggggacattattcgtctggttgaagaggctcagagtagagaagcaccagtacagcagttggttgacaaggtcgcagggcgcttcacgtatggagtgatggcactctctgcagctacatttacattctggaatctatttggtgcacatgttcttccttctgccttgcataatgggagcccaatgtctttggcccttcaactatcttgcagcgttctggttgtggcttgtccttgcgcccttgggttggctactccaacggcaatgctggttggtacatcattaggagcaagaagaggattacttcttcgtggtggtgatattcttgaaaagttttccttggttgatactgttgtcttcgacaaaactgggacactgacgaagggacaccctgttgtgactgaagttattattcctgaaaatccaagacacaatttgaatgatacttggtcagaagtagaggttttgatgttagcagctgctgttgagtcaaacactactcaccctgttgggaaagcgattgtaaaagcagcccgggctcgtaattgtcaaacaatgaaggcagaggatggaacatttactgaagaaccagggtctggtgctgttgctattgtcaacaacaaaagggttacagttgggactctagaatgggtcaagagacatggagccaccgggaactcattgcttgcattagaagagcatgaaattaacaaccagtctgttgtgtatattggggtggataatacacttgctgcagtcatccgttttgaagataaagtcagggaggatgctgctcaagttgttgagaatttgactcgccagggaattgatgtgtacatgctgtctggtgacaagaggaatgctgccaattatgtagcttctgtcgtaggaattaatcatgaacgggttatagcaggagttaaaccagctgagaaaaagaattttatcaatgaacttcaaaaaaataagaagattgttgcaatggtgggggatggaataaacgatgctgctgctctggcatcatctaatgttggagtggccatgggtggtggtgcaggagcggccagtgaggtgtctcctgttgtcttgatgggcaatcggttaacacagttgcttgatgcgatggagctaagtcggcaaaccatgaagaccgtgaagcaaaacctttggtgggcgttcggatacaacattgtaggaatcccaattgcggctggagtgttgctaccattgactggaaccatgttgactccatcaatggcgggggctctcatgggtgtaacctctctcggtgtcatgactaattccttacttctaaggtacagattcttctcgaaccgaaacgacaaaaatgtcaaaccggaaccaaaagagggaacaaaacagccacatgagaacacaagatggaagcaaagctcttagacggggaatttccacttcactgaggcactatatcatgatttttgcagagataaatctctttttagttttttacttttcattcttaacgataatttcggctcttggtcttgagagggtttgttaggacttagggtattgataatttggagaatcatctcaacgtgatttttcaaacaattgctttgagcttgtaacacagccacagtaacacatgtccaaactctgcattggctttggcatttgatactctgaaatttgattttgtgtataattatagtgaac

SEQ ID NO: 86256 - DNA, 595 bp, Arabidopsis thaliana columbia
  unsure (1)..(595): unsure at all n locations
aaaatnccgtccntccnngggatttccccatnttnncaaanactttcaaaccggtttaacaggatccccgtccaatnccnatccgtttcggtcatccnnggtttcccntccatgaaaacttccaccattcccccagcgtggttagtggttaccggcattagttttacagctgcccctggttccggcttacttcaagggctcatcatcttccacttatacggtcaggaaccacttacaccgattccggaaactggaaactccaagaaaccaatggggaaccaacaacaacaacaaacaaaggggaagttctcgtcgttccggaccattggattacagctcgagccataaaggagggtcaggatcaaacagcacaggtcctagtcctcttcctaggtttgctgtctcaagatctggtcccatctcatataaacagcataactaagtaacaacactcccacattctacaaaagagacaaatttgtttctttttccccaaaagaaaaagacaattatgtagagagattagatttgtacaaatccctcgcaacagtcttcttgttatgtattggattgtaattcagaaaacctattatgc

SEQ ID NO: 86257 - DNA, 382 bp, Arabidopsis thaliana columbia
caactaggagaaacgacgaccacatggatcttcggagaagatacgtttcgccatctcggcatcctcctggagcagcaacaggtgcttaccgttcagtagggtctaacgacccgagctcaagagctccggtggaaactactaactacagaacaaccgcacaggagatgaagtatcgtggtgggtcaggtcttgattctggcggatttggtaaaagaagagagagtttgtttggtaataacaaagctttagacgacgaaagttagttcctttttttttcatagttcgttatgttctttttttaccggtcaacgcttgaaaaattttctaattgtgtaaaaccgccggccgaggaaataaaaatttttacccggttgctttgttt

SEQ ID NO: 86258 - DNA, 496 bp, Arabidopsis thaliana columbia
  unsure (1)..(496): unsure at all n locations
aggacctgngaataccaccgtgnctatattcaaatnaacacgngaccagcttgttnctctcaaggcgaaatccaaggaggatnggaacactgtcagctatagctcatatgagntgttggcaggccatgtgtggagatcagtgggaaaggcgcgagggnttccaaacgaccaagngacgaaactgtacattgcaactgatggaaggtctagactgcgtccgcagcttgcctcctggttactttgggaatgtgatattcactgcaacaccattggctgttgcaggggatctgctatcctaaaccaacatggtatgctgcaggacaggttcatgatttctttggttcgtatgggatgataactatctgagggcagctcttgacnacctggagatgcagcctgatctgtaacccttgtccnggggganaaacnncaagngncaaatttngggatcncaagcngggcanttnccnntttnggggnananttggaanggggc

SEQ ID NO: 86259 - DNA, 939 bp, Arabidopsis thaliana columbia
  unsure (1)..(939): unsure at all n locations
cacgcgtccgggtacgaagagcttgtgggaatagctgtgctgattttgtttatggatttctcgataagtcttcaaagaagggacctgagtattggctgttatggaaatatgaaggagaatcaacacttgctggtttgatgcagagtaaagaatttccttataatgtagaaactatcatccttgggaaagttcaagacttgcctaaagggttggaacgagaaaacaaaattattcagactatcatgagacaactcttgtttgcattggatggtcttcactcaactgggattatccatagggatgttaagcctcagaacattattttctcagaaggttctcgttctttcaagattatcgatcttggagctgcagctgatttgagagtgggaattaactacattccaaaagagtttctccttgatccaaggtatgcagcacctgagcaatacatcatgagcacccaaactccatctgcaccttcagcacctgttgcagctgcactttcccctgtcctgtggcagatgaatttgccagataggttcgatatctatagcattggcctcatcttccttcaaatggcattcccatccttacgatctgacagcaacctcattcagttcaaccgccagctgaaaagatgtgactatgacttaacagcttggagaaaactagtggagcctcgtgcaagcgctgatctccgtagagggttcgagctttgtagatcttagacgggtggnaatcggatggggaacttttaacatcgatggtccggtacaaagcaagncaaagaatcagcggaaaaagcagctcttgctcaccatatttcgnttgncaaggattttctcgcgttgtccgcaatgcaaaantttngnatgcaantanttnaggggtnnacaacnagggcttcagttnngngnaaatttgggaaacagttattgc

SEQ ID NO: 86260 - DNA, 525 bp, Arabidopsis thaliana columbia
acgactcactatagggaaagctggcacgcctgcaggtaccggtccggaattcccgggtcgacccacgcgtgcgtcggaagacgacagaagggggatcatcaaaagtcgggtgaattgtagccactatggcagtctcctcactctcaatccgctgtggtggtttctcaccaacaatctcccacaagacagaaattctctgtccaaatccatcactcaaagcttgttgtttactttcatccggtggtaaggccgactcctcggagagtacttaccaaaaaggcagcggaaacaattggaagagaaggcaagctcttgtgggagtaggaactttagtggcaacttcaattccagcaactttgcttcttgctgaagagataccaaaaagctactcgccttttgtggatcgagaagacgggtattcttactattacccatcagactggagggaatttgacttcagggcacatgattcagccttcaaagatagatacttgcaactgcagaatgtgcgggtcaggttcatac

SEQ ID NO: 86261 - DNA, 515 bp, Arabidopsis thaliana columbia
attcgactcacattatggaaagctcgtacgcctgcaggtaccggtccggaattcccgggtcgacccacgcgtccgcccacgcgtccgggaacaggatcgcttctacagatatttcacccatgtcaagtttaacagtgagaagggtatcgcgcgaagatatacaactggtataattttgttacagagggatgcgttgaatcagtgaaaggaaataattttgttagccatgagatcttctctttttttttgtgtgtttctcttcacctgtgcattggaattattaaggaaggccttcagcttttgtgtgtaaacctctttagaatatgtgacatactaattctttctggcctgtccttgtttctttgcaggttcagaatctaattgaacgatgcctccagctttacatgaaccagaaagaagttgttgacactcttctagaacaggctaagatcgaacctggttttacagaactaggtaacctccacacttgctggatttttttgaacctgattggg

SEQ ID NO: 86262 - DNA, 387 bp, Arabidopsis thaliana columbia
  unsure (1)..(387): unsure at all n locations
ggaccnggccnggacnnccagggcatcccacaatttgtgcaaagacaagagtggtttgctacacaaggagacagtgagagccgtctatgatggttctcttttcgaacaactcgagaaacaaagatcttctaaaaccccttagaatataatcatccaaaaaaaatcctaatgtaaattcattgttatgctcgtgaatctgttttagttaaatctttagtagttacagtaatctatggtgtgaagatcgggatgtgtttgattttcaagaattatagtttatttgtgtaagcacctgtgtgattggatcctattccaataaaaggttatatggtttttttttaaaaaaaaaannaaaanggggggnccccagggggcccggaaaaannc

SEQ ID NO: 86263 - DNA, 388 bp, Arabidopsis thaliana columbia
acttcattgactctttttctctatctctctagatcgaaagggaaaaggagatagagattgaagatgcgtgacgcaatcatcgccgatcctcttctggccatcgaccatgaaacagtcgcagagaagaagaaacagagcaaaaatctaaagatttctcttttactgcttctgattctcttagcaacttcaggttattatagctttagtgacaacattacaacagttttcttatcaagacaagctattgatgatgatcatagtcttagccttggaaccatcagtgacgtggttgaatctgagaatggtgttgtggctgctgacgacgctcgatgttccgagatcggtgcctctgttcttagaagtggcggtcatgcggtggacgccgccg

SEQ ID NO: 86264 - DNA, 497 bp, Arabidopsis thaliana columbia
  unsure (1)..(497): unsure at all n locations
caattcaagaacgaaatcgaaatcttgaaatcactaaaacatccgaacctcgtgatcctctacggatgcacatcaagacacagcagagagcttctactagtctacgaatacatctcaaacggaactctagccgaacatctacacggcaaccgcgcagaagctcgtcctctctgctggtcaacccgattaaacatcgcaatcgaaaccgcaagcgcattatcattcctccacataaaaggaatcatacacagagacatcaagactactaacatactcttagacggtaacttaccaagtcaaagtcgccgattttcgggcttttcacgggtggtttccaatgggctcaaacccacattttcaaaccggaccccaacgggnaccccgggttacggggggcccaggggtttcccaatggttaccaattaaacggggaggagcgnttntnttcaannttngggngtngtaccttancgggnccttattntnattcaaaaaga

SEQ ID NO: 86265 - DNA, 419 bp, Arabidopsis thaliana columbia
atcgtggcaatggagccagcgccagagatcacacttcgtggagttttgaacggccattccggctgggtgaccgctattgcgacatctccagagaacagcaatgtcttagtctctgggtctcgcgacaagaccgttcttatttgggacttgaccaaagaggatcccgccaacttcggaactcctcgccgtgctttcactggccactcccacttcgtctccgatgttgtcatctcttctgatggccaatttgttttgtctggttcttgggacggaactcttcggctttgggacatcaacgctggtgtctgccaccgtcagttcgtcggacacaagaaggatgtccttagcgtcgctttctccgctgataaccgccaaattgtgtctgggtctcgtgacaagaccatcaagctctggaacac

SEQ ID NO: 86266 - DNA, 1930 bp, Arabidopsis thaliana columbia
  unsure (1)..(1930): unsure at all n locations
tgtgagtaatttaggaaataagatcggtggcaattaataattatgcgcaagcgaagacgtttcgtgataactgtgaacattagaggttaagtgacgacaagtgatcgagagagacagagagagccaaaaggggaaactacaaaaatggcgaaaccggaagaagtatcagtcccgatcttcacatctcttgagcctgtctacggcgaaggatctctgctccaagaagctacacaacgattcgatgttttgaaggccaatttcaacgatgtcttcggtgcttctccccaactcttcgctcgctctcctggaagagtgaatctgataggagagcacattgactatgaaggatactcagtgttgccgatggctattcgtcaggatacaattatagcgattcggaaatgtgaggatcaaaagcagcttcggattgcaaatgttaatgataagtacactatgtgtacatatcctgccgatcctgaccaggaaattgacttgaagaatcacaaatgggggcattacttcatatgcgcgtacaaaggatttcatgagtatgcaaagtcaaaaggtgtgaatcttggttcaccagttggacttgatgtgcttgttgatggaattgttcctacaggttctgggttgtcaagttctgctgcatttgtttgctcagcaacaattgctattatggctgtctttggtcataactttgagaagaaagaacttgcacagcttacatgtgaatgtgaaagacacattggaacacaatctggtgggatggaccaggcaatctctataatggctaaaactggatttgctgagcttattgacttcaacccagtccgcgcaactgatgtgaaactccctgatggagggagttttgtaattgcacattctcttgcagagtcgcagaaggcggtcacggctgctaagaattacaataacagggtcgttgaatgtcgacttgcttcggatcaatacttggtgttaagctcggaatggaaccaaaagaagcaatatcaaaagttaagactctttctgatgtggagggattatgtgtgtcattcgctggtgatcgtgggtcatctgatcctcttcttgctgttaaggaatatctgaaagaagaaccatacacggctgaggagattgagaaaatcctagaggagaaattaccatcaatcgtgaacaatgatccaacatctttggctgtactcaatgctgccacgcatttcaaattgcatcagagagctgcacacgtttattccgaagcccggagggttcatggtttcaaggacacagttaattcaaacttaagtgacgaagagaagttaaagaaacttggtgatctcatgaatgaaagccattacagctgcagtgtcctatacgagtgcagttgccccgagctagaagaacttgttcaagtttgcaaggagaatggagcacttggagcaagactgaccggagctggatggggcggttgcgctgtggccttggtcaaggaatttgacgttactcaattcattccagcagtcaaggagaagtactacaaaaagagagtagagaaaggagtggtaaaaaaagaagatatggagctttacctctttgcctccaagccttcaagtggtgctgccatcttcaacctctaaacacatctctctccctccttattaattttactcaaatccgaattgtttgcagcaattgtgcccattgaattcccagcttcatttttaataaatatttttggattaatatgtaggagttgacgacaataataaattgaagtttcattcccaactttttcttcattttttcagagttttaaactntnactancccaagnactcantttcaattttaatgtaaatcttaaatctcnnnnnnnnnnnnnnnnnnnnnnnnnnnnnnnnnnnnnnnnnnnnnnnnnnnnnnnnnnnnn

SEQ ID NO: 86267 - DNA, 646 bp, Arabidopsis thaliana columbia
agtaaactactcaagtccctcccttttccggcgtcgctattctcagtctcattctgtctcccccatggaagctcggattttgcagtcttcttcttcctgttattcgtctctttacgctgtcaatcgatcccggttctcttctgtgtcatctccgaaacctttctccgtcagctttgctcagacgacgagaacaaggactcgtgtattatccatgtcgaagaaagatggtcgcactgataaagatgatgacactgatagtctcaattacaaagattctggtgttgatatcgatgctggtgctgagcttgttaaacgaatcgcaaagatggctcctggaattggtggatttggtggtctctttccattaggtgatagttatcttgtagctggtacggatggtgtagggactaaattgaaattggcatttgaaactggaattcatgacaccattggaatcgacttggttgctatgagtgtgaatgatattattacttctggtgcaaagcctctgtttttccttgattactttgctactagtcgtcttgatgtagaccttgctgaaaaggtcattaaagggattgttgaaggttgtcggcaatcggaatgtgctctcttagggggagagactgcagagatgcctgacttt

SEQ ID NO: 86268 - DNA, 590 bp, Arabidopsis thaliana columbia
  unsure (1)..(590): unsure at all n locations
acgcgcnnnnnnnnnnnnnnnnnnnnnnnnnnnnnnnnnnnnnnnnnnnnnnnatcaaaatttttgtcaatttgaagcctcgcggccgcttctttcaccgccgcagttaaaaacctcgtgtgattcttcttcttcatatagattcccagaaacatcgaaactggtgaaccgtgtacgcttcgtcgttagtgatgcggagacgaaagatatcgccggaaaatcattggcctagattcaatccattagagactcatcggagacgtctacgttagcgtacccaatcctcctcctcttctgggttgtttgctgatcacacatatcttctttcttcgattctctctcagggcgtgtcctgtgtaatcgtttagtggatgtgcaatgcaaaggtcgtgtagaactagaagaagagtttctgtgaacaagtttaatggaaggaacagcttttacaaagtctctttgtctcttgtttttctcctttgggttcttctcttcttttccaccttgttgattagtcatggagatggtgccaaagatgagcctttgaacgactctatgggaatggctgatccggatgatggtcagtcagatga

SEQ ID NO: 86269 - DNA, 532 bp, Arabidopsis thaliana columbia
  unsure (1)..(532): unsure at all n locations
cgacgaagcagctcgctaccaaggcggcaaggaaatctgcaccgactaccggaggagtcaagaaacctcaccgtttccgtcctggaaccgtcgctcttcgtgagattcgtaaataccaaaagagcacagagttgttgaaccgtaaacttccattccaacgtcttgttcgtgaaatcgctcaagatttcaagacggatctgagattccaaagccatgcagtgttagctcttcaagaagctgcggaggcatatttggttggtttgtttgaagacacaaatctctgtgccattcatgcaaagagggttaccattatcgcctaaagatgttcaatttggcaagaagggttcgtgcagaccgtgcttagcaaattagaatttaatcccttcatatgaccggggttttttttttccataaggggttccgattgttttcgctttgcgcttttaacaaaatcattanggcacatcccctttgagagatggattgcttatganatnacccttttaaaanaaaannaaaaaaaaagggggtc

SEQ ID NO: 86270 - DNA, 443 bp, Arabidopsis thaliana columbia
aggtcttttattggtttgaatgagattagtgaaggcagcttctcttctgatttcttcaaccaaacctccgtctagggttttttactcttcccatctccgccgcccttttttctctcacttccgtttttcttcctcttcgtcgacgtcttcctccgtcgcagtcatgccgggttccgaaccatcggagactcagtggccagcaaagagagtccgggatacttatgtcgatttcttcagaggcaaaggccacaagttctggccatcaagccccgttgttcctcataatgatcctactcttctcttcgctaacgctggaatgaaccagtataagccaatatttttgggtacggccgatccaaatactgagcttagcaagctatctcgggcatgtaacacccaaaagtgtattcgtgctggtggaaagcataatgatttggatgatg

SEQ ID NO: 86271 - DNA, 919 bp, Arabidopsis thaliana columbia
  unsure (1)..(919): unsure at all n locations
cacgtgggacgacgcaagactctatactgagtcatatgacgacagaaggggatcaaaggggtttttagggtttcgtcactcgccgataatcctctctctctagaaaacatgactgccgaacagaaagtggagctcgccgccaaattggaagagcagaagatcgatcttgataaacctgaggttgaagatgatgatgacaatgatgaggatgattccgaggacgatgacgaggcggagggacatgatggggaggccggtggccggtcaaagcaaagcagaagtgagaaaaagagtcgtaaagctatgttgaagcttgggatgaaaccaatcactggtgttagccgtgtcaccgtcaaaaagagcaagaatatcttgtttgtgatatcaaaacctgatgtgttcaagagtccagcttcagatacatatgtgatctttggtgaggccaagatagaggatttgagctcgcagctgcagagtcaagccgcagagcagttcaaggctcccaacctcagcaacgtgatttcacagggagaaacatcgaatgctgcaactgcagctgctgttcaagatgatgaagatgaagaggtagacgaggagggagtagaggcaaaggacatcgagcttgtgatgacccaagcaggagtgtctaagccaagggcagttaaggcgctcaagctcgctaatgnagatatagtctctgccatcatggagcttaccacctaaatccgaaacttttccgtactttgatgtgctttcgtgttttgtttcccatttccttcaagtgatttgcatgtgatcatatatctatacgttgactcattcaatttagaattgatgcatttcatgaaaaaaaaaactcgagctgaattccgagcttacgtacgcgtgcatgcgacgtcatagctcttctatagttcac

SEQ ID NO: 86272 - DNA, 774 bp, Arabidopsis thaliana columbia
  unsure (1)..(774): unsure at all n locations
atgatatcacttttaatggctttcccgggcttgggaaatgttgggggggggaaattggtgaaaccggaataaccaatttcccccccgcgtccggaaaaagagtcgtaaagctatgttgaagcttgggatgaaaccaatcactggtgttagccgtgtcaccgtcaaaaagagcaagaatatcttgtttgtgatatcaaaacctgatgtgttcaagagtccagcttcagatacatatgtgatctttggtgaggccaagatagaggatttgagctcgcagctgcagagtcaagccgcagagcagttcaaggctcccaacctcagcaacgtgatttcacagggagaaacatcgagtgctgcaactgcagctgctgttcaagatgatgatgatgaagaggtagacgaggagggagtagagccaaaggacatcgagcttgtgatgacccaagcaggagtgtctaagccaagggcagttaaggcgctcaagctcgctaatggagatatagtctctgccatcatggagcttaccacctaaatccgaaacttttcctactttgatgtgcttttcgtgtttttgttttcccattttcctttcaagtgattttgcatgttgtatcattatatactatacgtttggactcatttcatattttagaaatttgagtggattttcatgagtttaaaaaaaaccaaaaaagnnnnnnnnnnnnnnnnnnnnnnnnnnnnnnnnnnnnnnnnnnnnnnnnnnnnnnnnnnnnnnnnnnnnnnnntcattcg

SEQ ID NO: 86273 - DNA, 879 bp, Arabidopsis thaliana columbia
  unsure (1)..(879): unsure at all n locations
cccgcgcttccgcacgaatcacgaatctctctctctttcacacacttcacactttcaatatacactctcattatgactaccgaagagaaagagatcctcgccgccaaattggaagaacagaagatcgatctcgataagcccgaagttgaggacgatgatgataacgaagacgatgactctgatgacgatgataaggatgatgacgaggctgatggactagatggagaggcaggaggtaagtcaaaacaaagcagaagtgagaagaagagtcgcaaagccatgctcaagcttggcatgaaacccatcactggtgttagccgagtcaccgtcaaaaagagcaagaatatcttgtttgtcatatcaaagcctgatgtgttcaagagtccagcatcagacacatatgtgatctttggagaggcgaagatcgaggatttgagctctcagatccagtcgcaagcagcagagcaattcaaggcaccagatctcagcaatgtgatctcaaagggtgagtcatcgagcgctgcagtggttcaggatgatgaggaggttgacgaggaaggtgttgagccaaaggacattgagttggtgatgactcaagcaggagtgtctaggccaaatgctgtgaaggctctcaaggctgcagatggagatattgtctctgccatcatggagcttaccacctaaaccaaagtcttttctacttagatgtggtttaacctgagttatgtgccagagattgtccaaagaattcggaaatttttggtttcaatgtttttcatgaagtgattttcgatgttgtatcagtataaacctcataagtttttgattttcagtttgattttatattgaatatcaagtccnnnnnnnnnnnnnnnnnnn

SEQ ID NO: 86274 - DNA, 575 bp, Arabidopsis thaliana columbia
  unsure (1)..(575): unsure at all n locations
attttttaaaaactacttctttctagagacaacaacaggctaatcaagagactagatatatggccatggagctcgagcttgatgatgatgtcttctttgctgacataagcaagcaactcaatctcttaatcacagatgaagatgaacaaaaccctatttcactttcctcttctgtctctttccaggggttgttcagaggaaacgagccaaaccatcagcaacaccactatatggtggacaatggaggcaggtcaattacaacgtaattcgagagggcaaagggacaggagtgtttatccccaagatctttttcagccaaggaagggaaccataaatcatcatcctcatcaggaggngcaaaggggggattcatcgggttcctttatncccaagnaacaagtttcctcataatggccatgccaacaatntttcaaatnttaacaacaccacccnggangnttccctttatnnggnttttntncccagggggcctccanggtgnggatttttttcncttggcaanaagttttngnggatgggtttggctaattcaatntttaatggtttggntttgg

SEQ ID NO: 86275 - DNA, 427 bp, Arabidopsis thaliana columbia
aaaagagttcataaacaaaaacctactcccagaaagttcttccaaatctctcgccatggttgctctcttctttcgtgaggtggagtttttctaaatttaattatactttaaattgctaagtccaaactctttcgcttttgattcatcggtaatacaagtttaagaaaaaaaattcttatatttatctctcaaatcgagtttcgagtgtttgatttgattcgtaaaatcaatggcgacgagcaaacctcaaagatcgccggctgaaattgaggatataatcctccggaagatattttgtgtaaccctaacggaatcaactgattccgatcctcgtattggttacttggagatgacggccgctgtgattctcagcgaaagtaaagagcttttgctttctcgcgaattgatggagagagttcttatagat

SEQ ID NO: 86276 - DNA, 530 bp, Arabidopsis thaliana columbia
  unsure (1)..(530): unsure at all n locations
gctttcaaccacattgctagcaacattgacaagatctataagcaactaaccaagagtaatacgcacccactgggtgggactgcttatctaaacctagaaaatgaggatgatccgtttctacatggtataaagtatactacaatgcccccaacaaagcgatttcgtgacatgggaccagctcttctcgggggggaggaaaacagttgcggccttggcgttgctcttctccatacatagctatagggccttcacccttttttcatacttgatgaagtggatgctggcgcttgataatctaaacgtggcaaaagtggctaaaatccattcgtagcaaagccatggccaagccgnacgtggacaatcaggatgcaganggatgggaatgncttcccaaggattggnaatatccccccaagggangntcntattggcaaggcggaggcnctnggttggggntnnaaagccnccgganggggttgcccaggacantgcatttggcctnnggacaccaanaancggnttgggtnaaa

SEQ ID NO: 86277 - DNA, 857 bp, Arabidopsis thaliana columbia
  unsure (1)..(857): unsure at all n locations
nnnnnnnnnnnnnnnnnnnnnnnnnnnnnnnnnnnnnnnnnnnnnnnnnnnnnnnnnnnnnnnnnnnnnnnnnnnactcaaaccacgcgtccgctccgatcatatggcgtttgccggcgttttgccgattgttttcttgcttatattatcatcagcggatctagcagcgagtcaatcacagcccggtccaacaaatcaaccgtataactacggcagactaagtccagccatggcagtgatcgtcgtgatcctaatcgctgctctcttcttcatgggcttcttctctatctacttccgtcactgctcaggcgtaccagacgccggtgtttctccagctggtggagctagatccagagcaaccgtcaacgcggcggcgcgtggtctcgacgtttcagttgtcgagacttttcctacgttcttgtactcagatgtgaaaacgcagaagcttggtaaaggagagttagagtgtgcgatatgtttgaacgagttcgaagacgacgaaacgctgcgtttgcttcccaagtgtgatcacgtgtttcatccgcactgcatcgatgcttggctcgaggctcacgtgacttgtcccgtttgcagagcgaatcttgctgaacaggtagctgaaggtgagtcagttgaaccgggaggaactgaaccggatcttgaattgcagcaggttgtggtgaatcctgaaccggtggttactgcaccggtaccggaacaattggtgactagtgaagtcgattcgaggagattacctggtgtaccggtggatcttaaaagagttaaattctcgagatcgcatacgacgggacattcggtggttcaaccgggagaatgtaccgaacggtttactcttc

SEQ ID NO: 86278 - DNA, 488 bp, Arabidopsis thaliana columbia
  unsure (1)..(488): unsure at all n locations
ttctccgccgcccttctatctctctattatccacttttggcttataataaggatcctcaatctttgtaagtgggttttttcttgatggtttcgaattagaactcttctttgggttttgctacttatggtgggttttatttatggtccttgtgatatgggtaaaatgctctccttgttgctttgtttcaagtgttcataatatccgaccaaatattctgggttttgtttcagtcttctgaatgattcgtaagatctggatacttaattcttgagagatctccgttttatggttgaattatttatggattatgtaccgattcccatagatccaaaatctatctgctcatgtttggcatttaatggcatttaagttccatggactggaaggaattgaatcctaaaaaaaaaaaaaaaaaggccgtnnnnnnnnnnnnnnnnnnnnnnnnnnnnnnnnnnnnnnnnnnnnnnnnnnnnnnnnnnnnnnnnnn

SEQ ID NO: 86279 - DNA, 1045 bp, Arabidopsis thaliana columbia
  unsure (1)..(1045): unsure at all n locations
gttttttttttttaaaagatttagagagaaaagtgagttattaagagattccaatcaaaatgagcggagacaacggcggtggtgagaggcgcaaaggctccgtcaagtggtttgatacccagaagggtttcggcttcatcactcctgacgacggtggcgacgatctcttcgttcaccagtcctccatcagatctgagggtttccgtagcctcgctgccgaagaagccgtagagttcgaggttgagatcgacaacaacaaccgtcccaaggccatcgatgtttctggacccgacggcgctcccgtccaaggaaacagcggtggtggttcatctggcggacgcggcggtttcggtggaggaagaggaggtggacgcggatctggaggtggatacggcggtggcggtggtggatacggaggaagaggaggtggtggtcgaggaggcagcgactgctacaagtgtggtgagcccggtcacatggcgagagactgttctgaaggcggtggaggttacggaggaggcggcggtggctacggaggtggaggcggatacggcggaggaggtggtggttacggaggtggtggccgtggaggtggtggcggcgggggaagctgctacagctgtggcgagtcgggacatttcgccagggattgcaccagcggtggacgttaaaaccaacgccggttacgcggtggagaagagtgagttggttatctcacaagtgatcggttctttctcccgccgccttctatctctctattatccactttttgcttattatgatggatctctatctttgttagttggttttttcttgatggtttcggattaggactcttcttttggttttgctacttatggttggttttatttatggtacttgtgatatgggtgaaatgctctacttgttgctctgtttcaagtgttcataatatgcgaacaaatattctgggttttgtttcaaaaaaaactgtgtgttggccgtatctgatagggatacttnnnnnnnnnnnnnnnnnnnnnnnnnnnnnnnnnnnnnnnnnnnn

SEQ ID NO: 86280 - DNA, 447 bp, Arabidopsis thaliana columbia
  unsure (1)..(447): unsure at all n locations
ataataagagagttttaagcatttgaaacaaaaaaaatggcttccaaggctttggttctgttgggtctctttgctgttcttctcgtcgtctcagaagtagccgcggcatcttctgccacagtgaattcagagagtaaggaaactgtgaaacctgatcaacgtggctacggtgacaatggaggaaattacaataacggaggaggttaccagggaggagggggtaattaccaaggaggaggaggtaattaccaaggaggaggaggtaattaccaaggaggaggaggaagataccaaggaggaggaggacggtaccaaggaggaggaggacgataccaaggaggcggtgggcgacaaggaggagggggaagtgggggaaagttacttgccgccacggctgcttctacataaaaggggttacaacggcttctncaanatcntnctcgtatt

SEQ ID NO: 86281 - DNA, 461 bp, Arabidopsis thaliana columbia
  unsure (1)..(461): unsure at all n locations
cgactcactatanggaaagctggcacgcctgcaggtaccggtccgggattcccgggtccgcccacgcgtccccccacgcgtccggagagttttaagcctttgaaacaaaaaaaatggcttccaaggctttggttccggtgggtctctttgctggtcttctcgtcgtctcagaagtagccgcggcatcttctgccacagtgaattcagagagttaggtttcttgtgaaccctgatcaacgtggctaccgtgacaatggaggaaattacaattaccgaggagggtacccagggaggagggggttattacccaggaggaggaggttattaccaaccaatgaggaggaggtaatttccaaggaggaggaggaagatccaaggaggaggaagaaccgtcccaaggagagggagacgattcccaagaagccgtgggcgaccaggaagaaggggaagtgggggaaatt

SEQ ID NO: 86282 - DNA, 474 bp, Arabidopsis thaliana columbia
tccgccataataagagagttttaagcatttgaaacaaaaaaaatggctttccaaggctttggttctgttgggtctctttcctgttcttctcgtcgtctcagaagtagccgcggcacattcttctgccacagtgaattcagagagtaaggaaactgtgaaacctgatcaacgtggctacggtgacaatggaggaaattacaataacggaggaggttaccagggaggagggggtaattaccaaggaggaggaggtaattaccaaggaggaggaggtaattaccaaggaggaggaggacgataccaaggaggcggtgggcgacaaggaggagggggaagtgggggaaagttactgccgccacggctgctgctacagaggtttacaacggctgctccaagatgctgctcgtatgccggagaagctgttcagactcagcccggtcactaaaacaattttttaaccaatcaccaccatgc

SEQ ID NO: 86283 - DNA, 875 bp, Arabidopsis thaliana columbia
  unsure (1)..(875): unsure at all n locations
gaagacgacagaaggggatgcatcacttgtttctccataataagagagttttaagcatttgaaacaaaaaaaatggcttccaaggctttggttctgttgggtctctttgctgttcttctcgtcgtctcagaagtagccgcggcatcttctgccacagtgaattcagagagtaaggaaactgtgaaacctgatcaacgtggctacggtgacaatggaggaaattacaataacggaggaggttaccagggaggagggggtaattaccaaggaggaggaggtaattaccaaggaggaggaggtaattaccaaggaggaggaggaagataccaaggaggaggaggacggtaccaaggaggaggaggacgataccaaggaggcggtgggcggtaccaaggaggaggaggacgataccaaggaggcggtgggcgacaaggaggagggggaagtgggggaagttactgccgccacggctgctgctacagaggttacaacggctgctcaagatgctgctcgtatgccggagaagctgttcagactcagcccggtcactaaaacaatatattaaccaatcaccaccatgcatgtattgcattatgtatgtatgattttaagtaaaccatggtgcgtttgtaatgaactgcctcaagtttttgaggcactatagattaagaagagaactatgggaataaagtttgattatgtaatgttttatgtggtttgagttgtaatacttgctgtttgcataataaaatcgtttgtagtttaaaaaaaaaaaaaacacaacaccgaaagannnnnnnnnnnnnnntaagagattcnnnnnnnnnnnnnnnnnnnnnnnnnnnnnnnnnnnnnnnnnnnnnnnnnnnnnnnnn

SEQ ID NO: 86284 - DNA, 807 bp, Arabidopsis thaliana columbia
aagaagaagttttttagagggcatttttaaaaacccaaaaaaaaaaaatgggctttcccaaagccctttggggttccggtttgggggtctccccccactggttcttcctcggtcgtttcaagaagtaagccccgggccttctttttcccccagtgaattcagagagtaagccccctttataacctgatcaacgtggctccggtgtcaatgcaggaaattacaataacggaggaggttaccagggaggagggggtaattaccaaggaggaggaggtaatttccaaggagcaggaggtaattaccaaggaggaggaggaatataccaagcaggagcaggccggtaccaaggagcaggaggtccataccaaggagccggtgggcttcaaggaggagggggaagtgggggaagttactgccgccacggctgctgctacagaggttacaacggctgctcaagatgctgctcgtatgccggagaagctgttcagactcagcccggtcactaaaacaatatattaaccaatcaccaccatgcatgtattgcattatgtatgtatgattttaagtaaaccatggtgcgtttgtaatgaactgcctcaagtttttgaggcactatagattaagaagagaactatgggaataaagtttgattatgtaatgttttatgtggtttgagttgtaatacttgctgtttgcataataaaatcgtttgtagtttaaaaaaccaccccccaagggcggccgctctacaggatccaagctcacgatgcgggcgcgtgcgtcatagctcgtaccagagtgtaaagg

SEQ ID NO: 86285 - DNA, 566 bp, Arabidopsis thaliana columbia
cttcctgtatattttttccttcataatatattactatccttctcgtttattaatacaaacttgaattcttcttcttcttaactttgtctgtcaattcacatatatatagggccaccatcacataagtggcgtcataacacatcatggtgaacgaagaaatggagtcatcacttaaagtcatcgacgtggcacgagtcacaccatcaaactccgactcgtccgagtcactcactctcccactcaccttcttcgacctcctctggtacaaacttcacgccgtcgaacgagtcatcttctacaaactcaccgacgcaagtcgtcctttctttgactcagtcatcgtcccaaacctcaaaacatctctctcctaatccctctctcactacctcccactcgccggaaaactcgtgtgggaaccacttgatcccaaaccgaaaatcgtctacaccccaaacgaccccgtttcattcaccgtcccccagtcaaacgccgacttctcaccttttaccggcaaaaaaccgttccccaccaccgagttataccctgtagttcccgagttacatgtc

SEQ ID NO: 86286 - DNA, 558 bp, Arabidopsis thaliana columbia
atgatacttcagctctctacgactcactattgggaaagctggtccgcctgcaggtaccggtccggaattctcttctctgtaaattactctgatttttgtagaaatcgaaactgggcttgatcaattttgactctttgcatccaatttcgattctaatctccgtaattgttctccgaatcgggtcaatttcaagttgggaaacaaaccctagcgaacctccattgatgtgatctctctctctctctcacaacttgagaatcaactctctagaaaatatcagaaaatcgttgaaaaaatctggtcttttctggagggaaatgccaggggtagctgtgaagctctatagcgtcttctttaagttactattgaaacatcgtcttcagaatctgatttcaatttcagctgctgatggcttatctgattcctttggtgtttcgacccgatccgatgaatccgtcgccgccgcgaatccgtctttcaccgacggtgttgccaccaaagatatacacattgatccaatgacgtcactcaccgtagggatctttcttcccaatctgc

SEQ ID NO: 86287 - DNA, 454 bp, Arabidopsis thaliana columbia
  unsure (1)..(454): unsure at all n locations
gaacntcaatccggggccttntcnctttttggaatncccncntgnngggntttacccttncggagnggggnttttacaggcattggaaaggtcactcgatgatccngaaccggaaagttcgagaaggaagctattnggtgcagacaggcttgggcgtcaatcacatccggaagtaacatattctgaagttgaattgagagattaacgaagccaagttatcttcttcaaagtaatattcttttttacatttgtgacatttgttagagagccagcgaatcagtgtcttgtgacacatttaacgcataccaaccaataccatctaacatttgtgatacagtgagtgacacttacactttagttgagtagtctttagaagagtttattggtcagcgaattttaaataattnnggaattcaaaccaaaattataggtgttattaggatcatttggtttt

SEQ ID NO: 86288 - DNA, 726 bp, Arabidopsis thaliana columbia
  unsure (1)..(726): unsure at all n locations
ctntacgactcactatggggacagctggtacgcctgcaggtcccggcccggatttcccgggtcgacccacgcgtccgagccaacactagtcactgcaatatcgagcttggagaaatggagaaggaaagccatgaggagaacaaccacactatctcaggtgatttaacggcaaaacggaaacgaggtcgtccgaggaaacaattgaagctggaatcgaatgagcactctcttggtcattctccaagttttagcaggagtcagcagcagtctcgccagaggaatgacgatgaagctatggttggacagccgattagtggtgtgattgaggcgacatttgaagccgggttcttgctttctgttaaggttgggaattcagatagcatgcttagaggtgtggtcttcaagcctggtcactgtgatcctgtatctgttgataacgatgttgctcctgatgttccaatgataagaagaaacagtgatgtgatgcctcatgatggctcagctaaaagaggtcgggaaatctagatccccggagaagccggggtagtggtggtagaagcagagcattggttcctggcccgattcagcccgctcatccaacaataccaaatattcttatttgtccccgtggtgcttcaccccggccatctagagaatggggtgagcgggtcccgatcgacacagtccatgcaaccgaacagggttcaagcgagggagcgagaacgg

SEQ ID NO: 86289 - DNA, 569 bp, Arabidopsis thaliana columbia
  unsure (1)..(569): unsure at all n locations
tttagtgaggatagcttgcataacccaaccaaggaagtttatactcaagatattggggataaaacagaggagattgattcaaagctgagaaggtctaacgagactnttagagatggaaaccactatgatggccaaggagtacttaaccctgttgagaatcttactcagtggaaatccgctaaatccaaagggagaacaaagcagaaacagtctcaaaaggagaactctaacttcatcgcaggtcaagaaggaaaaagggattcctcttctttcggtacagaccctcagattgatgatataacactcagcgtcaaaccggaatgcagaattgaacccaagnaactngcggaaccaaggactnggccgttgatgcttggcctttcaacatgggttatcaaccatctgnggcntggtaggtgaattnnaacagcggccnctatgtatacctttacacccggggaactnaagttttccagttgntcnttaaanccgtttggngttaattatngcgggtggcccntttttttnggntttcaattggggggttttaannanttttgggtnaattt

SEQ ID NO: 86290 - DNA, 852 bp, Arabidopsis thaliana columbia
  unsure (1)..(852): unsure at all n locations
atgatcctnnnnnnnnnnnnnnnnnnnnnnnnnnnnnnnnnnnnnnnnnnnnnnnnnnnnnnnnnnnnnnnnnnnnnnnnnnnccacgcgtccgtacggctgcgagaagacgacagaaggggggcgtgacatttcagatgctcattacaaagcttgtttatatgctggaattaacattagtggtactaatggcgaagttatgcctggacagtgggagttccaagttggcccgagcgtaggaattgatgcaggtgattatgtttggtgtgctagataccttcttgagagaatcacagaacaagctggtgttgtcctaacacttgaacctctcgcttcgccacaaggagcacatcagtgcctacggtgaaggaaacgagagaaggttgaccggaaagcacgagacagctagtattgaccagttctcatggggcgtggctaaccgtggatgctctattcgtgtgggacgtgacaccgaggcgaaaggaaaaggttacttagaagatcgccgtccagcatctaacatggacccatacattgtgacctcacttttggcagagaccacactcctgtgggagccaactcttgaggctgaagcccttgcagctcaaaagctttctttgaatgtttaaaattagtcgaaactttcatgaatctnatgaacacacgtgtctatgtggtctctcaagttgtttaaacattcggattaagacattgtttgtngtctttncatttgcatttttaaaactcagaatttgtatgggcaatgttcatcctttttaaaaaaaaaaaaaatgggncggcccgttcttagnnggntnccaagttttcggacnggggnaantncggcggnaa

SEQ ID NO: 86291 - DNA, 587 bp, Arabidopsis thaliana columbia
  unsure (1)..(587): unsure at all n locations
ctagcattcttgatctgttgttcttgtcacttgttttgttttctgggatcatcaatccaatggctcagatcttagcagcttctccaacatgtcagatgagagtgcctaaacactcatcagtcattgcatcatcatccaagttatggagctctgttgtgttgaaacagaagaagcagagcaacaacaaagtcagaggctttagagttcttgctctccaatcggataacagtactgtcaatagagttgagactcttctcaatttagacaccaaaccttactctgacaggatcattgctgaatacatttggatcggaggatctggaattgaccttagaagcaagtcaaggactatcgaaaagccggtggagggtccttctgagctacctaagtgggactatgatgggttcgagtaccggtcaagcanctggtgnagatagtggaagtggntctatacccggcaagctatcttccggggtcctttccggggnggcataaaatcttggntatcggggaacttngncaccactgggggccattccacaacaaangntaaagtgngngtttcgaanaaaggnnggnngnccttt

SEQ ID NO: 86292 - DNA, 662 bp, Arabidopsis thaliana columbia
  unsure (1)..(662): unsure at all n locations
cggaancccgggccgttcttgcttccgagcaagtcagggactatcgaaagctttttttgttccttctgagctacctaaggggaactatgatggtttgagtaccggtcaagcacctggtgaagatagtgaagtgattctatacccgtcaggctatcttcagagatcctttccgtggaggcaataacatcttggttatcggtgggacttggacaccagctggtgagccatttccaacaaacaaacgtgctaaagctgctgagatcttcagtaacaagaaggtcccttggcgaggttccatggttcggcattgaacatgagtacactttacttcagcaaaacggtcaaatggcctttaggttggcctgttggagcgtcccctggtcctcagggtccttactactgtggagttggagctgacatgatttgggggccgtgacatttcagatgctcatttacaaagcttgtttatatgctggaattaacattagtggtactaatggtgaagttattncctnggcagtggggagttccaagttggncccagcgttgggatttnatcaaggtnnccangtttgggnggctaagaaccctntttggggggtcnaggacaaactgggtntccnaaacttgnnccaaaccgangngggnccttgacggtnttc

SEQ ID NO: 86293 - DNA, 896 bp, Arabidopsis thaliana columbia
  unsure (1)..(896): unsure at all n locations
cggaanngtaccggtccggaattcccgggtcgacccacgcgtccgctctttctttgccatctgttacaaacaccaaactcttctgattcatcagttttaagtcttcttcaagtcccagggatcatcaatccaatggctcagatcttagcagcttctccaacatgtcagatgagagtgcctaaacactcatcagtcattgcatcatcatccaagttatggagctctgttgtgttgaaacagaagaagcagagcaacaacaaagtcagaggctttagagttcttgctctccaatctgataacagtactgtcaatagagttgagactcttctcaatttagacaccaaaccttactctgacaggatcattgctgaatacatttggatcggaggatctggaattgaccttagaagcaagtcaaggactatcgaaaagccggtggaggatccttctgagctacctaagtggaactatgatggctcgagtaccggtcaagcacctggtgaagatagtgaagtgattctatacccgcaagctatcttcagagatcctttccgcggaggcaataacatcttggttatctgtgatacttggacaccagctggtgagcccatttcaacaaacaaacgtgcttaagctgctgagatcttaaaaaccaagaaggttcttggccgagggttccatggttccggcattggaacaagaagtacccctttttcttttcagccaaaaaccgtccaaatgggccccttttaagggtgggccctggttgggaacccgtctcccctgtggtcctctcgaggggcccctttacctaccgtgggggaagtgtggggcacctatcccaaaaattttgggggggccggggaccatttttccacaaaggcctctatttccca

SEQ ID NO: 86294 - DNA, 1724 bp, Arabidopsis thaliana columbia
  unsure (1)..(1724): unsure at all n locations
aagatttttccctttttatatattaaaaataaagattcttaaggctcttcatattttgctttttgtcaactctttctttgccatctgttacaaacaccaaactctcctgattcatcagttttaagtcttcttcaagtcccagggatcatcaatccaatggctcagatcttagcagcttctccaacatgtcagatgagagtgcctaaacactcatcagtcattgcatcatcatccaagttatggagctctgttgtgttgaaacagaagaagcagagcaacaacaaagtcagaggctttagagttcttgctctccaatctgataacagtactgtcaatagagttgagactcttctcaatttagacaccaaaccttactctgacaggatcattgctgaatacatttggatcggaggatctggaattgaccttagaagcaagtcaaggactatcgaaaagccggtggaggatccttctgagctacctaagtggaactatgatggttcgagtaccggtcaagcacctggtgaagatagtgaagtgattctatacccgcaagctatcttcagagatcctttccgtggaggcaataacatcttggttatctgtgatacttggacaccagctggtgagccaattccaacaaacaaacgtgctaaagctgctgagatcttcagtaacaagaaggtctctggcgaggttccatggttcggcattgaacaagagtacactttacttcagcaaaacgtcaaatggcctttaggttggcctgttggagcgttccctggtcctcagggtccttactactgtggagttggagctgacaagatttgggggcgtgacatttcagatgctcattacaaagcttgtttatatgctggaattaacattagtggtactaatggtgaagttatgcctggacagtgggagttccaagttggcccgagcgtaggaattgatgcaggtgatcatgtttggtgtgctagataccttcttgagagaatcacagaacaagctggtgttgtcctaacacttgatcccaaaccgatagagggtgactggaacggtgctggttgccacaccaattacagtaccaagagcatgagagaggaaggaggatttgaagtgatcaagaaggctatcttgaacctctcgcttcgccacaaggagcacatcagtgcctacggtgaaggaaacgagagaaggttgaccggaaagcacgagacagctagtattgaccagttctcatggggcgtggctaaccgtggatgctctattcgtgtgggacgtgacaccgaggcgaaaggaaaaggttacttagaagatcgccgtccagcatctaacatggacccatacattgtgacctcacttttggcagagaccacactcctgtgggagccaactcttgaggctgaagcccttgcagctcaaaagctttctttgaatgtttaaaattagtcgaaactttcatgaatctgatgaacacacgtgtctatgtggtctctcaagttgtttaaacattcggattaagacattgtttgttgtcttttcatttgcatttttaaaactcagaattgtatggacaatgttcatccttttatattggttcttttgactgttagagcatgtccaaacgaaaaaaaaannaagggcggccgctctagaggatccaagcttacgtacgcgtgcatgcgacgtcaagctcttctatnnnnnnnnnnnnnnnn

SEQ ID NO: 86295 - DNA, 357 bp, Arabidopsis thaliana columbia
  unsure (1)..(357): unsure at all n locations
gtactcnntttttntcaacnagttgtgttggtcctgcctgacatngttgcaccaccttngagaccagttggctttaagtaacaatcccttattggatgaaattgtcagaaaccactacccttcttttgctcaactccaatcactttgccacccaattttatctcattcattttgcaaaaaagatcaaagagagagagagagagagagagagaaagaaaaaaaggaaaaaaccttcctccgttacaacctcacaattgcaacaaagtttcatataaaagaggacagaaatttcgcaggttcctccgttgtctgaggatcttggagaaggaaggaaacaacaacaaccaaaaaaaaacc

SEQ ID NO: 86296 - DNA, 598 bp, Arabidopsis thaliana columbia
caagctctaattctactcacttatggaaagctggtccgcctgcaggtaccggtccggaattcccgggtcgacccacgcgtccgcgagaagacgacagaagggtacggctgcgagaacacaacagaagggggataacgaaaagctcgccgagaaagcacaaatggcgggcgtgaaatctctgcaacctagactcatatcttcctttctcggcaacaattctattagatcaacgcaaccacttattcatctctttcgcttcgatttaggaagaagacatgtttcgatgcaattatcaagaaccttttctggattaaccgatctcctgtttaatagaagaaatgaagatgaagttattgatggcaagagaaaacgtctgagaccgggaaatgtatctcctcgtcgtcctgttccgggtcatataacaaaacctccttatgttgattctcttcaagctcccggaatctcaagtggacttgaagttcatgataagaaaggtatagaatgcatgagagcttctggaatacttgcagctagggttcgagattacgctggcactttggttaagccaggcgttacccctgatgaaattgattaagca

SEQ ID NO: 86297 - DNA, 1483 bp, Arabidopsis thaliana columbia
aggacgcgtggggcctatctgaaacaacaacctccgtttgaggttttgccgggaaaatataaagttcacaggctttggtctctgcatttgcaatatatttaaaatggcagcagctttcttgaatcttggcggctatgttttcgttttcttctcttcgttcttagctatagtggccccacaggttcgaggcaatgttgctgtctttgatagctactggacgcaacgacaaagtgatgcattgaaacaaaccatcggctcttacgatcctcatccacttaacgtcaccaaccattttaattaccatgtcaatatagcagtggatgcatcggaatcaaggaacgatacaaggagagagcttactcaggtgagaagtggtcgtaaaacgcacaaaagcagcggaaaatgcctagcttataacccgatagacaactgctggcgatgcgatcgtaactgggctaataaccggaagaaactagccgactgtgtgctcggattcggccggagaaccaccggaggaaaagacggaccgatatacgtcgtcaaagacgcgtctgacaacgatcttatcaaccctaaaccaggaacgttaaggcatgcagtgactcgagacggaccgctttggatcatattcgcaagaagcatgatcataaaactgcaacaagaactgatgataacgagcgacaaaacaatcgatggaagaggagctagggtttacatcatggaaggtgctggattaacgttgcaatttgtgaataatgtgatcattcacaatatttatgtcaagcacattgttcctgggaacggtgggttgatcagagactctgaggctcacatagggcttaggacaaaaagtgatggtgatggaatcagtttgattggagcaaccaatatttggatcgaccatgtctcaatgacaagatgtgcagatggtatgatcgatgctattgacggctccactgctgtaactatttccaacagtcatttcaccgaccaccaagaggtgatgttgtttggggcgagggacgaacacgtgatcgacaagaaaatgcagataacggttgcgtttaaccacttcggtaagcgattggaacagagaatgcctcgttgcagatacggaacgatacatgtggtgaacaatgactacacacattgggaaatgtatgcaattggtgggaacatgaaccctacaattattagtcaaggcaatcgtttcattgctcctcctaatgaagaagccaaacagattacaaaaagagagtacacaccatacggtgaatggaaatcttggaattggcaatcagaaggagattactttctcaacggagcttattttgtgcaatccggaaaagcaaatgcgtggagctctaaaccgaaaaccccgctcccaaacaagtttacaattcgacctaaaccgggaacgatggtccggaaacttaccatggatgcaggagtacttggctgcaaacttggtgaagcttgctga

SEQ ID NO: 86298 - DNA, 1711 bp, Arabidopsis thaliana columbia
cccctgcgaaattatcctcctccgccgtcgcataaccggcgcacattagtgaaatcggaaaaatccgtctctcctccttcgtaatggcgtcgacagtctcagttcaaccgggtcggatccggatcctaaagaaaggctcatggcaaccgtcggatcaaacggtgggtcccgtcgtttactggatgttcagagatcaacggttgaaagataactgggcgttaatccacgccgttgatctggcaaacagaaccaacgcgccggtggccgtcgttttcaatctgttcgatcaatttctggacgcaaaagcgaggcaattagggtttatgttaaagggtttgcgtcagcttcaccaccaaatcgattctctccaaattccgttttttctcttacagggagatgcaaaggagacaatccctaatttcctcacagaatgtggagcttcacatctggttactgatttctctcctttacgggaaatccggcgttgtaaagatgaggttgtcaagagaacgagtgattcattagcgatacatgaagttgatgctcacaatgtagttccaatgtgggctgcttcgagtaaattggagtacagtgctagaacaattaggggtaagatcaacaagctactacctgattacctcattgagtttcctaaacttgagccgccgaagaagaaatggacggggatgatggataagaagcttgttgattgggatagcctcattgataaagttgtaagggagggtgcagaagttcctgaaattgaatggtgtgtgcctggagaagatgcagggattgaagtattgatggggaataaagatggttttttgacgaagaggttgaagaattattcaactgaccggaataatcctataaagccgaaagcactctctggtctctctccttatctacatttcgggcaggtatcagctcagcgttgtgccttggaggcgcgtaaagtccggagtacttcccctcaggcggtagatatattcttggaagaattgattgtgcgaagagaactctccgacaatttttgctattatcaacctcattatgattctttgaagggagcttgggagtgggcacgcaagtcactaatggatcatgcttcagataagagggaacacatttactcgttggagcagttagagaagggactgacagcagatcctctatggaatgcttcacagttagagatgctttatcaagggaaaatgcacggtttcatgcgaatgtattgggcaaagaagattctagaatggaccaagggacctgaagaggctctctcaatatccatctatctaaataacaagtatgagattgatggtcgtgacccgagtggatatgttgggtgcatgtggtctatatgtggcgttcatgatcagggatggaaagagaggccggtttttgggaagatacggtacatgaactacgcgggttgcaaacggaaattcaatgtggatagttacatctcttatgtcaagagtttggtgtcagtaacaaagaagaagaggaaagctgaagaacagctcaccagagactctgttgatcccaagataactattgtttaggttaactttgaatgccttggtattgttacttgttagactactttgccctgtgttgggcatttttatattcaacgtattcagattcaaaaaaatctaattgaaaaacttatataagagaagattctgaaaaaaaaaaa

SEQ ID NO: 86299 - DNA, 1058 bp, Arabidopsis thaliana columbia
  unsure (1)..(1058): unsure at all n locations
acacagcttcacgtcgtcgtctttgagtcgccggagctgtagctactgatttggtaccagaaagagagtgcgacggtggacgatgacgctttttcacttcttcaactgtgcgattctcacattcggtcctcacgccgtctactactccgccactcccttatctgaatatgatacacttggaacctccgtgaaagctgctgttgtttaccttgctactgcattggttaagcttgtttgtttggcgacttttctgcaagtgtctgagactgaagtgtttgacccataccaggaagcattgaaagcgatgattggattcatagatgtcgctggtctgtattatgctctggcccagctaacacacaggaacatctcccagaatcataagtttcaggctgttggtcttgggtgggcattcgcggattctgttttgcacaggttggcacccctcttgggttggtgctcgaggactggagttcacttgggattatgttttgcaagggcctgaaccccaatgcaaatctggtgttcacgatatctctagctgcactaggttcattaatgtggctacgcaagaacaagccgaagagtctgatccccatcatatacacatgtgcagtcatcattgcaacaatgccttcgatcacaagctatctaaagagagtcaatggatggcatttcccgaaaattgttgggtttgagctggcgacttctctggtaatggcttttatcagttgtcaactcttcatcctctgtcagagaccgtctttgtgagtgattccacttcccagcagagctttttgttaatgggaaactcttgcgacgcacttgccttgttttccacaggactcggttccatgaaaactttgatctttcccatctttatttgtagaagaatattgaaccatcttttcataacttattgatttgggaagtgtcattcgttagagcatagccttagcaaaaataacaaaaaaaaaaaaaaagggcannnnnnnnnnnnnnnnnnnnnnnnnnnnnnnnnnnnnnnnnnnnnnnnnnnnnnnnnnnnnnnnnnnnnn

SEQ ID NO: 86300 - DNA, 474 bp, Arabidopsis thaliana columbia
  unsure (1)..(474): unsure at all n locations
ctagtccaagatcgttgcctctgtctccaacttcagtgttatctccattgatgaagaacagattgctgcaaaccttgtcaagaacggacctcttgctgtagccatcaacgctggctatatgcagacttacattggaggagtctcatgcccttacatatgcaccaggaggctcaaccacggtgtcttattggttggctatggagcggcaggttacgctccggctaggttcaaggggaagccttacttggatcatcaaggactcggtgggggagagncctttggggctgaaaatgggttttccaaaaatctttcaaagggccgaaacatttttggggggttacaagattgggccccccccttttacaagccagccgtttttaaaccancggccnttttaaggaatttcgggcaanaaaggttttaaatnancttttgggggnnttttntttgnccggggccnctttttttgcgggn

SEQ ID NO: 86301 - DNA, 716 bp, Arabidopsis thaliana columbia
  unsure (1)..(716): unsure at all n locations
actcgtgggtcgacgcaagactctatactgattcgtaataacagaagggggcaaatcaaatggatcgtcttaagctttatttctccgttttcgttttgtctttctttatcgtctcggtttcgtcgtctgatgtcaacgacggcgatgatctcgtgatccgtcaggtggttggtggagccgggcctcaggttttgacctcagaggatcacttgtctctcttcaggcggaagttcgggaaggtctacgcttccaacgaggagcatgactatagattctcggttttcaaagcgaatctcaggcgagcgaggcgtcaccagaagttggatccgtcggcgactcatggtgttacgcagttctcagatctgactcggtccgagtttccgtaagaagcacttgggggttagaagtggctttaagcttcctaaagatgccaacaaggctccgattctccctaccgaaaatctccctgaggattttgattggagagatcatggcgccgttactcccgtcaaaaatcagggatcttgcggctcttgctggagtttcagcgccactggagctttggaaggtgctaacttcctcgctaccggcanactcgtcagcctcagcgaacaacagctcgtcgactgtgatcacgagtgtgatcccgaggagggctcatganagaagaagactatccttacaccggaaaggacggcaagacctgcaagctagac

SEQ ID NO: 86302 - DNA, 1578 bp, Arabidopsis thaliana columbia
tgtcaactttatcttttaaaattatcttaaaagaaaccgaaagctaatctccaaagggaaaaagacgtgtagcagagacctatacatacacctatacattcacgttgcgtgtgataatctactgagggttctatctatattaatccttctctgcttccttcaatctaattgcaaatcaaatggatcgtcttaagctttatttctccgttttcgttttgtctttctttatcgtctcggtttcgtcgtctgatgtcaacgacggcgatgatctcgtgatccgtcaggtggttggtggagccgagcctcaggttttgacctcagaggatcacttttctctcttcaagcggaagttcgggaaggtctacgcttccaacgaggagcatgactatagattctcggttttcaaagcgaatctcaggcgagcgaggcgtcaccagaagttggatccgtcggcgactcatggtgttacgcagttctcagatctgactcggtctgagttccgtaagaagcacttgggggttagaagtggctttaagcttcctaaagatgccaacaaggctccgattctccctaccgaaaatctccctgaggattttgattggagagatcatggcgccgttactcccgtcaaaaatcagggatcttgcggctcttgctggagtttcagcgccactggagctttggaaggtgctaacttcctcgctaccggcaaactcgtcagcctcagcgaacaacagctcgtcgactgtgatcacgagtgtgatcccgaggaggcagattcctgcgactctggttgcaatggtgggctaatgaacagcgcttttgaatacacccttcaaaaccggagggctcatgaaagaagaagactatcccttacaccggaaaggacggcaagacctgcaagctagacaagtccaagatcgttgcctctgtctccaacttcagtgttatctccattgatgaagaacagattgctgcaaaccttgtcaagaacggacctcttgctgtagccatcaacgctggctatatgcagacttacattggaggagtctcatgcccttacatatgcaccaggaggctcaaccacggtgtcttattggttggctatggagcggcaggttacgctccggctaggttcaaggagaagccttactggatcatcaagaactcgtggggagagacttggggtgaaaatggtttctacaaaattgcaaaggccgtaacatttgtggtgttcccagtatggtttccctgttgaagcccccgtttcaacccaccgccctttaagcttctgggcaaaaagttttaattaccttgggtgatttgaataagcaagctctttttgcggggctgaccccctcaaaaaaaatccgctttttgcttgtaaaaaaaaggggttctattaagcaaaaccgtacaatgttcataaacaaagagcccccttttccggggttaagaaaaaaaaaaaaaaaaaaaaaaaaacaaaaaaaaaaaaaaaaaaaaaaaaaaaaaaaaaaaaaaaaaagggcggccgctctagaggatccaagcttacgtacgcgtgcatgcgacgtcata

SEQ ID NO: 86303 - DNA, 756 bp, Arabidopsis thaliana columbia
  unsure (1)..(756): unsure at all n locations
agaatttaccccaaggttttaataccgcctcaacaatagggaaaaagttgaaccgctggcaggtaaccggtccgaaaattcccgggttgaacccacgcgtccgatagtccaagatcgttgcctctgtctccaacttcagtgttatctccattgatgaagaacagattgctgcaaaccttgtcaagaacggacctcttgctgtagccatcaacgctggctatatgcagacttacattggaggagtctcatgcccttacatatgcaccaggaggctcaaccacggtgtcttattggttggctatggagcggcaggttacgctccggctaggttcaaggagaagccttactggatcatcaagaactcgtggggagagacttggggtgaaaatggtttctacaaaatctgcaaaggccgtaacatttgtggtgttgacagtatggtctccactgttgcagccaccgtctcaaccaccgcccattaagcatctcgtcaataagttttaattactttggtgatttgtatgagcgagctctctttgcgctgctgactctctctatttatctctgcttcttgcttgtaaataaaatgcgttctattgagcaaaaccgtacaatgctcattagcaatgagcccactttaacaagtatcagtttatggcccaatatatgaaagttaaattgagtctgggccgtttaatgagcctttttatcnnnnnnnnnnnnnnnnnnnnnnnnnnnnnnnnnnnnnnnnnnnnn

SEQ ID NO: 86304 - DNA, 1291 bp, Arabidopsis thaliana columbia
  unsure (1)..(1291): unsure at all n locations
ctagctctctacgactcacttagggaaagctggtacgcctgcaggtaccggtccggaattcccgggtcgacccacgcgtccgcccacgcgtccgcccacgcgtccggacgacagaaggggaccctaacatagcccttgcaaaccataaccaaaccatcatcatcatcatctcttggtgacagaagaaaagagttgaggaacagagaaaatggcagcacaagcacttgtgtcttcttcacttacctcctctgttcagacagctagacagatatttggctcaaaaccagttgcgtctgcctcacagaagaagagttcctttgttgttaaagctgctgcaactccacctgtcaagcaaggagccaacagaccattgtggtttgcttcatcgcagagtctctcttacttggatggcagcttacctggtgactatggattcgaccctcttggtctttcagacccagaaggtactggaggattcattgagccaagatggctagcatacggagagatcatcaacggacggttcgccatgttgggtgcagctggagctattgctcctgagattttaggaaaggctggtctgattccagcagagactgctctttccttggttccaaaccggtgtgattccaccagcagggacatacacttactgggcagacaattacacactctttgttctcgagatggctctgatgggattcgctgagcaccggaggttacaggactggtacaacccaggatctatgggaaaacagtacttcttggggttagagaagggtttggccggttcaggtaacccggcttaccccggtggacctttcttcaaccctcttgggtttgggaaagatgagaagtcactgaaggagttgaaactcaaggaggtcaagaacggtagactggctatgctcgccatcctcggttactttatccaaggactagtgaccggtgtgggaccttatcagaacctgcttgatcacttggctgatcccgtcaacaacaacgtcttgaccagcctcaagttccactgaggtgatcatcatctcatgtgtttttatgtctcttgtatcgtacaatatttccatctttcgctaccattggcttcttcgtattgtaacaccctgtgtaaacatattcgtgttttgtaagaaatgacaatgtcaatggccaaacgaaaaaaaaaaaaaaanaaaggnnnnnnnnnnnnnnnnnnnnnnnnnnnnnnnnnnnnnnnnnnnnnnnnnnnnnnnnnnnnnnnnnnnnnnnnnnnnnnnnnnnnnnnnnnnnnnnn

SEQ ID NO: 86305 - DNA, 584 bp, Arabidopsis thaliana columbia
aaaagccatgtgatgtaaccaagataatgaaaaaaccccacaaggatggttccagctggccaattctaaggaacaaagctcctagatggcacgagcacttgcagtgctggtgtctgaacttccatggacgagttactgttgcttcggtcaagaactttcagctggttgcgaccgttgaccaaagtcaaccgagcggtaaaggcgatgaagaaacagttcttctacagtttggtaaagtgggagatgacactttcactatggattatagacagcctctctctgcatttcaggcttttgctatctgtctcacaagtttcggcactaaacttgcctgcgagtgaaacccaacaaaaggcaacagaaaagaaaaagtgaactggctttgcaaaaatgtaatgttttgatgtaatcatgtgtaagtgtaaacacaaaggtatgtggaaaggagaagcacataagtattattatgtaagaaacattatttaaaacccataatcataatgtatctcttaagtaaaaaaaaaaaaaaagggcggccgctctagaggatccaagcttacgtacgcgtgcatgcggcgtcatag

SEQ ID NO: 86306 - DNA, 1247 bp, Arabidopsis thaliana columbia
  unsure (1)..(1247): unsure at all n locations
tcctacgactcactatagggaacagctggtacgcctgcaggtaccggtccggaattccccggttctctctatttccagatcgaaacatctctcttcacaaaatgcctttgtcacggtccctcctttcgcggaggatctcgaactcttttaggtttcatcagggagagacaacgacggcaccggaatccgaatcgattcctccgccgtcgaatatggccggttcttcgtcatggtcggcgatgctccctgaattattaggcgagatcattcgtcgcgtggaggagactgaggaccgttggcctcaacgtcgtgatgtagttacttgcgcttgcgtttctaagaaatggagagaaatcactcacgatttcgctagatcctctcttaactctggcaaaattactttcccttcttgcctcaaattgccaggtcctagagacttttctaatcagtgcttgataaagaggaacaagaagacatcaacgttttacttgtatcttgctctaacaccatcattcactgataagggaaagtttcttctggcggcgcggaggtttaggaccggtgcttacactgagtacatcatatcacttgatgctgatgatttctctcaaggaagtaatgcctacgtcggaaaattaagatcagattttcttgggaccaactttacagtatacgatagccaaccaccacacaacggagcaaaaccttcaaatggcaaagccagtcgcagatttgcatcaaagcagataagccctcaagttccagcaggcaactttgaagtcggtcatgtttcttataaattcaaccttttgaaatcaagaggtccaagaagaatggtaagcacactccgatgcccatcaccatcaccttcatcatcatccgctggactctcgtccgaccaaaagccatgtgatgtaaccaagataatgaaaaaacccaacaaggatggttccagcttgacaatactaaagaacaaagctcctagatggcacgagcacttgcagtnctggtggtctgaacttccatgggcggggttaccgttgcttcgggcaagaactttccagcttggttgcggccggttgaccaaagtcaaccggagcggtaaaggggttgaagnaaccagtttttnttcagtttggnaagnggggggttgcacttnnctttgggttttggnnaaccttttttnaatttaanggttttngantttttttcaaaagtttggnnanaatttttcctgggggtaancc

SEQ ID NO: 86307 - DNA, 356 bp, Arabidopsis thaliana columbia
  unsure (1)..(356): unsure at all n locations
taagaacatacttgcttccaactttcctgatggtgaagaaaaccacccacaaactctcttgtacaagantctctggctcgaaactgaagctgccttatgttccacaacttgcatggctcggtatcatcggntcaagaacgagattggtaatctcaaattgaacaataaagagatctctgcggatgcagtaagctttatgcaggaaccttctcttaacacacagaaatcggttcccatcatgaatgcaaatgcaggacaaggntacacctgaatcttttcatcaaaacatggaagcaattgtggggaaaatgcagcaacaatggggctcgtggcttccattccgnaaagtnctaggg

SEQ ID NO: 86308 - DNA, 512 bp, Arabidopsis thaliana columbia
ccggcactaatacgactcacttagggaaagccggtacgcctgcaggtaccggtccggaattcccgtgtcgacccacgcgtccgcggacgcgtgggcggacgcgtgggcggctgcgaggggacgactgaaggggaccaagaaaacaaagacttatcgatcatgaagatcagacttagcataaccatcatacctttatcatacacagtggctacggtggccggacatcaatgcggtcgtcaaggcggtggtcgaacttgtcccggtaacatctgctgcagtcagtacggttactgtggtaccaccgcggactactgttctccgaccaacaactgtcagagcaattgttggggaagtgggcctagcggaccaggggagagcgcgtcgaacgtacgcgccacctaccatttctataatccggcgcagaataattgggatttgagagccgtgagtgcttattgctccacgtgggatgctgataagccgtacgcatgggcggagcaagtgtggctgga

SEQ ID NO: 86309 - DNA, 941 bp, Arabidopsis thaliana columbia
  unsure (1)..(941): unsure at all n locations
tatccgtttcactatagggaaagctggtacgcctgcaggtaccggtccggaattcccgggtcgacccacgcgccccaaagacttatcgatcatgaagatcagacttagcataaccatcatacttttatcatacacagtggctacggtggccggacaacaatgcggtcgtcaaggcggtggtcgaacttgtcccggtaacatctgctgcagtcagtacggttactgtggtaccaccgcggactactgttctccgaccaacaactgtcagagcaattgttggggaagtgggcctagcggaccaggggagagcgcgtcgaacgtacgcgccacctaccatttctataatccggcgcagaataattgggatttgagagccgtgagtgcttattgctccacgtgggatgctgataagccgtacgcatggcggagcaagtatggctggaccgccttctgcgggccggcaggacctcgtggtcaagcttcttgcggcaagtgtttaagggtgaagaacacaagaacaaatgctgcagtaactgtgagaatagtggaccaatgcagcaacggaggcttggatttggatgtagcaatgttcaatcaaatagacaccgatggttttggctatcaacaaggccatctcattgttgactaccaatttgtcgactgtggcaatgagctcattgggcagcctgattccagaaacatgcttgtttcggccattgatcgcgtttgatattatgtaatgattttgaggtcaatatcgatcggtctacataaaaataataaagaccgctatatatgtattgtcgagggatatatgtttcgtatcaataaggaaattttaaatattattatcattcgttaaaaaaaaaaaaaaaaagaaaaaaaaannagcggcagctctagaggatccaagcttacgtacgcgtgcatgcgacgtcata

SEQ ID NO: 86310 - DNA, 1375 bp, Arabidopsis thaliana columbia
  unsure (1)..(1375): unsure at all n locations
acgtcaggcttccccgagaaattgggataaaaagaagcaacaccgatcacaacgtctccctataccatctccttcagatccacacactctctcttatatctctccggcgaaaactttccgatcaccgacaaaaaaaaaaaatggttgcagacgcaaacggttcatcatcaagctcatttaacttcctaatctacggtaaaaccggatggatcggtggtttactcggtaaactctgcgaagctcaaggaatcacttacacttacggctccggtcgtcttcaagatcgtcaatcgatcgtcgccgacatcgaatccgtgaaacctagccacgtgttcaacgctgctggagtcaccggtcgtcctaatgttgattggtgcgaatctcacaaagttgagacgattcgtactaatgtcgccggaaccctaactctcgctgacatttgcagagagaaaggacttgttctgatcaattacgctacgggttgtatatttgagtatgattcgggtcatcctctcgggtcgggtattggattcaaggaggaggatactcctaatttcaccggatctttctactctaaaaccaaagctatggtggaggagctgctcaagaactatgaaaatgtatgcacgttaagagtgcgaatgccgatatcatcggatctaacaaacccgagaaacttcatcacgaagattgctcggtatgagaaagttgtggacatcccaaactcgatgacaatcctcgatgagcttctcccgatatcaatcgaaatggcgaagaggaacttaaccgggatctacaatttcactaacccgggtgttgtgagccacaacgagatcttggagatgtacagagactacattgacccgagttttacttggaagaacttcacattggaggaacaagctaaagtgattgtggcgccaaggagtaacaatgagcttgatgcaactaagttgaagactgagttccctgagttgatgtctatcaaagagtctctgatcaagttcgtgtttgagcccaacaagaagactgaagttaaagcttgaaatgtggttttgtaaggtaaacggttcttaaccccaaaaaaacaaatcaaatgaaagacaaaaaaagtttgggtttttaaaagaagtatcttttttttttttgggtttatgggctgaaaaaattgttgtgttttttgtattttatttttttgtttttctttttcccaatgttgttgtattgttaaaataaacttttgtttcattacaaataagaaatgtactattttgcattaaaaaaaaaaaaaaaaaagnnnnnnnnnnnnnnnnnnnnnnnnnnnnnnnnnnnnnnnnnnnnnnnnnnnnnnnnnnnnnnnnnnnnnnnnnncatt

SEQ ID NO: 86311 - DNA, 1030 bp, Arabidopsis thaliana columbia
  unsure (1)..(1030): unsure at all n locations
cagctctatacgactcactatagggaaagctggtacgcctgcangtaccggtcccgaatttccggggtcgacccacgccgtccgccacgcgttccttccggttgggaaaaccaccaaagggaaaagaaggtccttaacttaaaggggagcttcagaacagggttttaaccttattaaggttcctgccaaatctccaaatggccttggccaggaaggataccggttggccacttaagtaccaaaatgaattctcaaacctggaggcaaattcataacctgtttctgcaaaagccttggcttttgaaaaagcaaagtatgcatttcgtttgggacagaaacttaaacacaaaacttttggttaccggcctgtagtgtgtggtatggatccaatttgcagtgaatcaagctcttggatggaagctgcagaggttgaaaagttacctcgtggatccaatcagccattttatcaggttctagtcgatgttcggacgcacccagatctactagtggcatatgttgctgaagacaatctgttagctcctgaaaaacccgataaggaaaggtttgatcatccatacatttcttttctctactatggagctgacacagctggagatttcatccctgtcaaacaattgcgtgagaagtacaacagacctcggcatgaagttccttttgattcacaagacgaagattaagatgaaaacctaagagttcacaaccgcagactcgagcacaaaccacaaaaaaaacagaactctagcatagctcaaagcatctagcatccagcttagagatgttctgttggttttatacccatgtagatgtagttatcacttagcagttagcacgactgttcttgctatatacactgaaacaagtcaactttattcaagaatgctttgtgtataaatgcttctttgttcgccctaactgacttatccagaaaagccaagacaactaacttactgctaaaaaaaaaaaaaaaacaaatnnnnnnnnnnnnnnnnnnnnnnnnnnnnnnnnnnnn

SEQ ID NO: 86312 - DNA, 904 bp, Arabidopsis thaliana columbia
aaaagagggtcatcagctaaaagtgaagctcaagacaagggtattagcattataaggctacgtgcagatctccagaatgccattgacagtgaggattacggtttggcagctaagttacgagatgaaatctcaaagcttgaggcagaatcattagctgtatctgcgaaagccttggcttttgagaaagcagagtatgcatttcgtttgggacagaaacttagacacaaaacttttggttaccgggctgtagtgtgtggtatggatccaatttgcagtgaatcaagctcttggatggaagctgcagaggttgaaaagttacctcgtggatccaatcagccattttatcaggttctagtcgatgttcggacgcacccagatctactagtggcatatgttgctgaagacaatctgttcgctcctgaaaaacccgataaggaaaggtttgatcatccatacatttcttttctctactatggagctgacacagctggagatttcatccctgtcaaacaattgcgtgagaagtacaacagacctcggcatgaagttccttttgattcacaagacgaagattaagatgaaaacctgagagttcacaacgcagactcgagcacaaaccacacaaaaaaaacagaactctagcatagctcaaagcatctagcatccaacttagagatgttctgttggttttaaaccccaggaaaaggaaggtagcccctaggccggccggttctggtaaaaacccttgaaccaagccaccttaatccaagaaggcttggtgaataaaggcttcttggtccaccctaaaaaaaaaaaaaaaaggccggcccgctctagagatcccaagcttacgtacgcgtgcatgcgacgtcatagctcttctatagtgtcacataaatcaatc

SEQ ID NO: 86313 - DNA, 1120 bp, Arabidopsis thaliana columbia
  unsure (1)..(1120): unsure at all n locations
nnnnnnnnnnnnnnnnnnnnnnnnnnnnnnnnnnnnnnnnnnnnnnnnnnnnnnnnnnnnnnnnnnnnnnnnnnnnnnnnnnccacgcgtccgcccacgcgtacgcggacgcgtggggaaaaatctgtgaggacgaaaactctccgtcgttccggcgagtttctccagtgatcggcaaagtctttccggcatctattgaatttctctaaaccaattagaatattatcggtcttgataaaataaaatggttcaaagtcagtcgttaagcacattaacaatctgtggaagtgtaaaagtttcaagcttgttgaggaatcgtttaaattcagtgaaagcttcaagcttgatcggtgatcgatgtgtttcgtgtcagtttttgcgtaaatcaccgtcctttagaagccattggaagtcattaaagcaaagaaatttgttgagggttgaagctagatggccatttcaaggaggtggtgaacaaggtttagacccgagctctgagagaagcgagagtcctaatgaaggtatattgacctttttctttcagctggatttggctactcgtgtacagtatgcaatgaatctggagcagtacgacattgcgcaacaactaagagaaaagctaactgaggtggaagaggagtcgataaggctgcaggaagggaaaagagggtcatcagctaaaagtgaagctcaagacaagggtattagcattataaggctacggtgagcagtttcattcgtcatcatcttgtttctcttgtgtatgtgtaaacattggagtataccatcttcactgtttatttgatatcattgcagtgcagatctccagaatgccattgacaagtgagggattacgggttttggcagctaaggttacggggatgaaatctcaaaagcttnagggcangantcattaggctgtatcttncgaaagcctttggctttttnngaaaagcagagtatgcatttcggtttgggcagaacctttnggcacaaaactttttgggtaccgggctttagtttntggatggcccnatttcntggaacnaagcccttggntggnccnccaggggttaaaagtncccggggcccctnancctttatnagggntgggntagaa

SEQ ID NO: 86314 - DNA, 695 bp, Arabidopsis thaliana columbia
gcctgcaggtaccggtctggaattcccgggtcgacccacgcgtccgacgtttgagaattacggcggaccggctaagcatcaggccgtggcactccgcgttggtggagaccaccctgaggtttaccgtggcaacagtatcggttaccaagacgcgctttacgtacattctaaccgacagtttttccgcgaatgcgaactttatggaacggtcgattttatattcgggaatgcggctgtgatcttacagagttgtaacatttatgcgcgtaaaccaatggctcagcagaaaattactattacggctcagaaccgaaaagatccgaatcacaatacggggatttggattcatgcttgtaagctactagcaacaccggatcttgaagcctctaagaggaagttatacgacgggtctcggacgtccgtggaagtagtattctagagttgtgtacacgatgtcggatatgggcgaccatattgacccgcgacgatggatggagtggaatgagacgtttggcttggactcgctgtactatggagagtttatgaacaaagggttgggatcatgagatggtcaacgaactaaatggcctagatatcatgttgatagctcaccggatgacgctattggattgacaggtggatcagttcattgctgtgtcttggtggcggccatacagcggagtggccttcttttc

SEQ ID NO: 86315 - DNA, 469 bp, Arabidopsis thaliana columbia
tatacatcaaccaactttttcttttgttgttgttttttagcttacgtggttcttcttcttctccttatgagttcaatatctgcaaatccacaaatctggattcacacctgagaagtttgttaatcggtacatctctagatttttgcaatcggagatggagatcgaatccgtcgcagctggttcttgttccaaggagaatcaaatgatctacaaggaatggttcgaattctccgattcagacggcgatggccgtattactggtaacgatgcgatcaagttcttcactatgtcgaatttgcctcgtccggaattgaagcagatctgggctattgcagattcaaagagacaagggtatcttggtttcaaagagtttattgttgccatgcagcttgtttcgttggctcatactggacatgaaatatcgcatgaagctcttattagcgatgttgatttcaaaaatatcaatcct

SEQ ID NO: 86316 - DNA, 2899 bp, Arabidopsis thaliana columbia
  unsure (1)..(2899): unsure at all n locations
atacgactcaccttaggggaagcacgtacgcctgcaggtaccggtccggaattcccgggagtaatttagaacacacatattttacgaattcgaatttcaagtttccgattctctaaatccaattgatttcactcttcctcaaatgaaaaagccctaattttgatcgtctaaatttcatacatgggtgcgaacgagtttcgtttcttcctctcctgcgatatcaattcgccggtcacttttcgtatcgagaagcttgatggaaacctccccgtcaagaaatcgtctgattcgggagttgtctccatcgcagaggagaaaaaaccagagctttacattgagtgtgcattgtacattgatggagctccttttggccttcccatgagaacaagattgaaaactacaggaccaccatactgctggaacgaactcatcactctcagttctaaataccgggacttgactgcccattcacaacttgcgattacagtatgggatgtttcgtgtggtaaaactgagggactgattggtggggcaacagtccttcttttcaacagcaagatgcagatgaaatcaggaaagcagaaactaaggctctggcaggggaaagaagcggatggttcatttccaacctctactcctggaaaggttccacggcatgagcgtggagagctagagcgtttagagaagctcatgaataagtatgagagggggcagattcaaagcattgattggctggatcgacttatgttgaaatccttggatacgattaaggagcaagaaagcaccaaacatggaagctcacatctgtttgtggtcattgatttctgtagttttgaacatcgggttgtatttcaggagtctggagccaatttgttcataactgccccaataggttcaacaaatgaatttgttactgtctgggatacagaactgggaaagactaatccttcagagaacaagcaactaaagctggcaaggagcttggatcgtggcattatcgacagggatctaaagccaagtaatatcgagcggaaatccattcaaagagttttgaaatatccgccaacaaggacattgagtggagatgaaagacaacttctttggaagtttcgtttctctctaatgtctgaaaagagagctctaacaaagtttcttcgctgtgtggagtggagtgatgttcaggaagcaaagcaagcaattcaactgatgtacaaatgggaaatgatagatgtatgtgatgctttggagctattgtctcctctttttgagagtgaagaggttcgagcttatgctgtgagtgtcctggaaagagctgatgatgaagagcttcagtgttacttgcttcaactggttcaggctcttcgttttgaacgctctgatagatcttgcctttctcaattccttgtccagagggcattacagaatattgagttggccagttttcttcggtggtatgttgctgtggaacttcatgaccatgtctatgccaagagattttacagtacatatgagttactcgaggagaatataatcaactggccgcctggtgttaacggcgaagatggatatcaattgtggcaaagtttggtgcgccaaacagaattgactgctcagttatgttccattacacgagaagtgaggaatgtacgtggaaacacccagaaaaaaattgagaagctcaggcagcttttaggtggactgcttagcgaacttacctacttcgaagagcctattcgatcaccgcttacccctaatgttctcataaaggggattgtggcaggagaatcatcactctttaaaagtgcattgcatcctctgcgccttactttccgaacaccagaagaaggaggaagttgcaaacttatatttaagaagggagatgatctccggcaagaccaactggttgttcaaatggtttggctcatggatagactacttaagctggaaaatcttgatctgtgcctaacgccttataaggtgttagcaactggacatgacgaagggatgttggaattcataccgtcccgttctttggctcagattctctcagagcaccgaagcataacaagttatctgcagaagtttcatcctgatgagcatgcacctttcgggataacagccacttgtcttgatacatttataaaaagctgtgcgggctattctgtgatcacatatatacttggcattggagacagacacctggacaacctcctcctaacagatgatggtcgtcttttccacgtcgatttcgcttttattctcggtagagatcctaaaccattccctccacctatgaaactctgcaaagaaatggtggaagccatgggcggagcagaaagccaatactacacaaggttcaaatcctactgttgcgaagcctacaacattctgcggaaatcgagcaaccttattttgaatctgtttcatctcatggcgggttcaactattcccgatatagcttcagacccagaaaagggcattctcaaactccaagaaaagtttaggcttgacatggatgatgaagcatgcatccatttctttcaagacctgattaatgaaagcgtaagtgcgctgttcccgcaaatggttgaaaccatacacagatgggctcaatactggcgttgaacccacagggtttaacaacacaaccatgttaactcctccagtttagccgaaaattgtagatgcattatacttttctcacgttaataacactgaaatgtttgattactgttctatgcttttacatctgcgacatctgcggtgataacattatctgtaaataacgttaacgttgaaactagatacgttttatcttcattcatatatttgcgaaattaaaaaaaaaaacaaaagggcgaccgctctagaggatccaagcttacgtacgcgtgcnnnc

SEQ ID NO: 86317 - DNA, 361 bp, Arabidopsis thaliana columbia
acggtgctttgagggatcagagagatggtgttggacctagccctgagatcttggtgaaaattggagagaacactggtcttagatcaaaccaggagattctgattgaagctgttgctctagagaggcagaaagagatggctgagcagtctgagaataatgcagaagtcgagttccttgaccaactgattgttattgtaaaccgcatgcatgaacgtcttcttctgatcaaacagactcagacttctagtgtcgccattcttgccgacttcttttgccctctgtcacttgaagtaatgactgatccagtgattgtgtcatcaggacaaacatatgaaaaggcgtttatcaagagatggattga

SEQ ID NO: 86318 - DNA, 240 bp, Arabidopsis thaliana columbia
  unsure (1)..(240): unsure at all n locations
tacagctccccaccaccaccatactattcaccctctcctaaggtagaatacaagtntcccccaccaccgtatgtttacagttctcctccaccaccatactactcaccttcccctaaggttgactacaaatntcctccaccaccatatgtctacagttcaccaccaccaccatattattnaccttcccctaaggtagactacaagtgtccggcaccaccgtatgtttacagttttccacca

SEQ ID NO: 86319 - DNA, 382 bp, Arabidopsis thaliana columbia
acatgttgagaacattgggattcattactaccaaacattgagattgtggaggaagaacttcttggcgagacagaaacaaatcatggctcttggatttgatgacaaattcgtaaggacgtgggaatattattttgattattgcgcagctggattcaagcctcttactcttggaaactaccagttggtgttctcgcgtccagggaacgtagctgcttttgcggattcatacagaggattcccttctgcttattgtgtcccctgagaggcatccacaacgtttgattgcttatatttttcgatctatacaatgtttgattgacctaaaacactagtattgattattgatttgtttggtgtaaaaaattgtgaaagtttgttgaat

SEQ ID NO: 86320 - DNA, 579 bp, Arabidopsis thaliana columbia
  unsure (1)..(579): unsure at all n locations
ggacattaatgctgtctcatccagaagtagaatggatttggtggatggatagtnatgctttgttcactgatatactgtttgaaatcccgttgcctcggtacgaaaatcataatctggtgatacacggttatccagacttgctgttcaaccaaaaatcatgggttgcattgaacacgggtatctttctnttgagaaattgtcagtggtcattggatttattagatgcttggnccccaatgggaccaaaagggaagatccgtgacgaaactgggaagatactgccacctatctgaaaggcaggccagcattttaggccgatgatcaatcggcgttgatatatcccttgctttcgcagcaaggaaaaatggnttagaggaaggtttatttggaggatcaatacttcttgcacgggttttggggaaggtttngttnacaggtttgaaggggttgnttgngnagtntcatccagggttggccgtganagatgncctttttacacatttttttagggtnaacccgtntgcagctttctgttccgagcggtagttnttaagggcattggggggntttnantttcng

SEQ ID NO: 86321 - DNA, 532 bp, Arabidopsis thaliana columbia
  unsure (1)..(532): unsure at all n locations
caatcactctcacccacttccctcctctcgctggccgtctctcaacctcctcctccggccacgttttcctcacctgcaatnacgccggcgccgatttttttttcgcccaagcaaaatccatccacgtgagcnacgtgatcgccggaatcgacgttcccgatgtagtcaaagagtttttcacctacgacagagctgtgagctacgagggacataacagaccaatcctcgccgttcaagtgacggaactgaacgacggcgttttcatcggatgctccgttaaccacgccggtgactgacggaacctccgctgtggcaatttcattaaacaccttccgcggagggttcttgtggggctgagaatgtgacacgtcagcctgattttacgcgggagtctgtgctaatctcaccggctgtgctcaaagtccctcaaggtggtccaaaggtgacattttacggaaacgggncgtttacggtgaacggntnttcagttncaattggggatnggttnnanagnnttnaaanttttgngnac

SEQ ID NO: 86322 - DNA, 403 bp, Arabidopsis thaliana columbia
  unsure (1)..(403): unsure at all n locations
acaacaaatcttaaacgttttactttgtgctgcactactcaacctcaatggccgcctcaacaatggctctctcctcccctgccttcgccggtaaggccgtcaagctttcccccgcggcatctgaagtccttggaagcggtcgtgtgacaatnaggaagactgttgccaagccaaagggcccatcaggcagcccatggtacggatctgaccgtgtcaagtacttgggtccattctctggcgaatcaaccgagctaccttancggagagtttcccggagactcacggatgggacaaccgccgggcctttcaagttgacccccgggacaatttgcaaggaaaccgttgaacttngangtttatccancaancagtttgggncattgnttnggagcccttnaggatt

SEQ ID NO: 86323 - DNA, 427 bp, Arabidopsis thaliana columbia
  unsure (1)..(427): unsure at all n locations
ttggaacatcgtataaggcggtgttagaggaaggtaccacggttgttgttaagcggcttaaagatgtaatggcgtctaagaaagagttcgaaacacaaatggaagttgttggtaaaatcaaacatccaaatgttattccattaagagcttattactactctaaagatgagaaacttctcgttttcgatttcatgcctaccggaagcttatctgctcttntccacgggagccgtggatcagggcgaactccgttagattgggataaccgtatganaatagcggtaacttgcagcgagaggtttggcgcatctttcacggtttcaagccaaatttggtacatnggaaccatttaaggctttcaaaacaatccctcctttcaacccaaacccaaggacaatttgggtctctaatttttggggcctaaatt

SEQ ID NO: 86324 - DNA, 745 bp, Arabidopsis thaliana columbia
  unsure (1)..(745): unsure at all n locations
acccacgcgtccgctgaaaacaagatacagattgatgaagatcagtggtgttgttatctgtattgttggtgtcgtcatggtagttttctcagacgtccatgcaggggatcgagctggtggaagtaatcctgtcaaaggagattttcttgttatagctggagctaccttgtatgctgtcagtaatgtcactgaggtaagcaagagttcctagtgaagaatgcagacgtgactgagctcatggcttttttgggccttttcggcgcaattattgctgccattcagataagcatatttgaacgtggtgcagtcagagctattcagtggtcaactgaggcgattttactttacattggaggcgcactcgggttatttctgttttacacattaatcacaatcttaatcaagaataatggttcaacaatgttcaacctctcgtngctcacatcagacatgtgggctattttaanccgcacttttggttaccacgaaaaggttgattggctctacttcttggcatttgctactacagctactggactgatcatatactcaatgaaggagaaagatgaggaggaacaaagaagtggagaagtggtaagtgngaggaggaagctgttcgatgaggaggatggtgactcgntccacagcaaacccttataggntnttccacctgaaaccntaatcaaatcaaaagncnncngggtttancnttggctttnaancatttccntgnacctttgggggt

SEQ ID NO: 86325 - DNA, 564 bp, Arabidopsis thaliana columbia
aggtttaccaggtgttcgagaaaattcctctgtggaaccaaatgttgaagatgtattagaagtgaatgagactgatagcgtcaaggaaactgttgtaagtgcgattgtgccggttgatgaagtggaagagaatcgtcaggtagaaacatctccttctctggctgcatcgtcagactcattgacagtgacgccatgtctatctttggatcctgcaactgcttcaaccgcacaagatttaccactggtttcagttccaactaaacaagagcaatccgcagattcgccggtggttaacagattgtcggttactcctgttcctaggacaccggctcgtgatggttataattggagaaaatatggacagaagcaggttaagagtcccaagggctcacggagttactacaggtgtacatacactgaatgttgtgctaaaaaaattgaatgctccaatgattcaggcaatgtggtagagattgttaacaaaggtttacatactcatgaacctccccggaagactagcttctctccgagagagattagagttacaacagctatccggcctgt

SEQ ID NO: 86326 - DNA, 350 bp, Arabidopsis thaliana columbia
attccccagaaccaagcggctacatgaaattcgtcaagagcttggttgctgacatgggaaacctcgttaccaaaacttaatcatcattcccacagtcgtcgtcgtcgtcatcatcatcatcatcatcatcatcatcatcatcatcatcatcatcatcatcatcatcactatctcgatttataagttaagatgttttcagtataataaatggggtcttgtggatcgttcatttctatgtgtaaaccgtttggttctgtatgatgcttcgatatattgttatgttcatgatcatatgtcgggttcgatataatgattcttaagattaaaatactacaccatttcagattttc

SEQ ID NO: 86327 - DNA, 406 bp, Arabidopsis thaliana columbia
aaacttacaagatctggtgaaaaccatggaagaaggagattttttcaactgctgtttcagcgagattagtagtggcatgaccatgaataagaagaagatgaagaagagcaataaccaaaagaggtttagcgaggaacatgactctcacgggtctatcaggagttgggactacacatatgatggaaagaaggagatgttcaaagagaagagagagatagatgatgagaataaaacattgacggaaaagaggactggatggtcacgtgatggagcatctcaaagtatttggtatcatctacggatttcattccccaaatcttgagggttagctcgcggtctgcaaaattcacttattgatttgggggggaagcgcaacgatgactttcccgaaccaagcggctacatg

SEQ ID NO: 86328 - DNA, 440 bp, Arabidopsis thaliana columbia
  unsure (1)..(440): unsure at all n locations
attccaggngaggagntagtggccggtgngaatacccccatgaaggtttttaggactggcaaggtccccgtgatggagccagctccaaggtgtatgagatccgatttccaattttattccccagtctggaagaagattgcgtctgcaaaatcactatgatatgggagaagcgcaacgatgattcccccgaaccaagcagctacatgcaactcctcaagagcatggttattgatatggaggatcacgtccttaaagcttaatcaacatcaccatcatccctatatgtttattaagttgttttcaattatatctaataaagtgtgtttcctttcggaatactatattttcaattatatagaataaagtgtgtttcctttcggaatactatatacgtaccatgtggtttcttaaatcaatatataagaaaatgggttttgtgg

SEQ ID NO: 86329 - DNA, 1042 bp, Arabidopsis thaliana columbia
  unsure (1)..(1042): unsure at all n locations
cagctctctacgactcacttagggaaagctggtacgcctgcaggtaccggtccggaattcccgggtcgacccacgcgtgcgcccacgcgtccggaaaacaagtagaaactttaaaacgagagagagagaatgaaatggcgacatcgggaacgtacgtgacggaggttccgttgaaaggatcggcggagaaacactacaagagctggaagagcgagaaccatgtcttcgctgacgccattggccaccacatccaaaatgtcgttgttcacgaaggcgaacatgactctcacgggtctatcaggagttgggactacacatatggtatacatttagtcatttacttatactttctctctatatatttatcacttttacggcctatgtgcgtccgaaactatggttttggtggtctactgccaaatatgaaatactacatatgatcattaattaaggaatttgttctataagaccaaaaacatatataataatcatattttgcatttatgtttacatatgaaaacggaagtcatatgtttaaaagtaaaaagtattttcatatttgagaataattttgaaaaatataaacggaaaaacatggtggccggatattaatccttatggtataactagctagtgggatgttggaaattgtaactaataaacacatgtgtgtaagatggaaagaaggagatgttcaaagagaagagagagatagatgatgagaataaaacattgacgaaaagaggactggatggtcacgtgatggagcatctcaaagtatttgatatcatctacgaatttattcccaaatctcgaggatagctgcgtctgcaaaatcactatgatatgggagaagcgcaacgatgactttcccgaaccaagcggctacatgaaattcgtcaagcaaatggttgttgacattgaaggccacgtcaacaaagctttaccccaaccatcaccggcatcactttctcggtccgtattggntttntanggggctttttcgggaanccnttnnatnaggggggcttttgggggntnt

SEQ ID NO: 86330 - DNA, 622 bp, Arabidopsis thaliana columbia
  unsure (1)..(622): unsure at all n locations
aaaacaagtagaaactttaaaacgagagagagagaaagaaatggcgacatcgggaacgtacgtgaccggaggttccgttgaaaggatcggcggagaaacactacaagagctggaagagcgagaaccatgtcttcgctgacgccattggccaccacatccaaaatgtcgttgttcacgaaggcgaacatgactctcacgggtctatcaggagttgggactacacatatgatggaaagaaggagatgttcaaagagaagagagagatagatgatgagaataaaacattgacgaaaagaggactggatggtcacgtgatggagcatctcaaagtatttgatatcatctacgaatttattccccaaatctgaggatagcttgcgtctgcaaaatcactattgntattgggggaagcgcaccgattgacctttccccgacccagcgggttcacatgaaattcggccacgccaaatggggtgttgcattnaaggcccggcaccaagcctttccncaccatcncngnatcccatnccggtcgnatggatatatgggccttcggaaccnttataaggggctttgngtcttcccgaacgttggttggatnccggnatnntgtccccccngc

SEQ ID NO: 86331 - DNA, 748 bp, Arabidopsis thaliana columbia
  unsure (1)..(748): unsure at all n locations
gaaccccccccagggcgactgnatcgataagcttgatatcgaattcgcggccgcggcgacgtcgggaacatacgtgacgcaggtgccgttaaaaggaacggtggagaaacacttcaagaggtacaggaacgagaactatctcttccctgacactatcggccaccacatccaaagtgttactgttcacgatggcgaatgggacactcaaggaggcatcaagatttggaactacacactcggagatggaaaggaggaggtattcaaggagaggagagagatagacgatgacaataagatagtgaaggttgtaggattggaaggtcacgtgatggagcagttcaaggtgtatgagattgacttccaatttattcccaactctgaagaagattgcgtctgcaaaatcactatgatatgggagaagcgcaacgatgatttccccgaaccaagcagctacatgcaactcctcaagagtatggttattgatatggaggaccacgtccttaaagcttaatcaatatcacaaccaccaccatcatcacaaccaccatcaccatcatcctatatatttattaaattgttttcatttatatataatagactagataagaacctgtataatgtgcgggataaaatgattgaaataaattattatgtataaaattattatatgagatatcatatatgtttgtatacaagaaaatatgtaactaaagttttcgttttatttaaatttacgtttatttcgtat

SEQ ID NO: 86332 - DNA, 733 bp, Arabidopsis thaliana columbia
  unsure (1)..(733): unsure at all n locations
gacccacgcgtccggcactatgaaatgatttaaagaaacggtagaaaccttgtttttaaccgtcacggtccctatataaacctatgagctagcgacgacaagtattcagtataatcaatcagaaaacaagtagaaactttaaaacgagagagagagaaagaaatggcgacatcgggaacgtacgtgacggaggttccgttgaaaggatcggcggagaaacactacaagagctggaagagcgagaaccatgtcttcgctgacgccattggccaccacatccaaaatgtcgttgttcacgaaggcgaacatgactctcacgggtctatcaggagttgggactacacatatgatggaaagaaggagatgttcaaagagaagagagagatagatgatgagaataaaacattgacgaaaagaggactggatggtcacgtgatggagcatctcaaagtatttgatatccttctacgaatttattcccaaatctgagggtagctgcgtctgcaaaatcactatgttatggggagaagcgaaaccggttgcctttccccgacccaagcgggttccatgaaattcggccaacgcaaatggtttttgccattttaggccccggtaaccaaggttttcccccccccttccccgatcacttttttggcccggttttgttttttatggggcttttcggnaaccaattnaaanggggctttngggtttttcnnaacctttgtttnta

SEQ ID NO: 86333 - DNA, 635 bp, Arabidopsis thaliana columbia
tgacgtcgcctgcacgcgtacgtaagctcggaattcggttcgaggaagaaacacgagtggaagcttttaaacaaaattaaaaaagagagagagaaatggcgacgtcgggaacatacgtgacgcaggtgccgttaaaaggaacggtggagaaacacttcaagaggtacaggaacgagaactatctcttccctgacactatcggccaccacatccaaagtgttactgttcacgatggcgaatgggacactcaaggaggcatcaagatttggaactacacactcggagatggaaaggaggaggtattcaaggagaggagagagatagacgatgacaataagatagtgaaggttgtaggattggaaggtcacgtgatggagcagttcaaggtgtatgagattgacttcccatttatttcccaactctgaaggaagattgcggtctgcaaaatcactatggatttgggagaagccgcaaccggtggtttccccgaaccaagcaggttcatgcaactcccccagggtttggttttttgttttgggggcccgcctttagattattatttcccaaccccccctttttcacaacccctttcctacctttctttttaattgttccttttttattgcttggttttc

SEQ ID NO: 86334 - DNA, 760 bp, Arabidopsis thaliana columbia
aaaaaccgggccgacccacgcaaccataaaaaacaagtggaagctttaaaacgagagggagagagcaaaaatggcgacgtcgggaacgtacgtgacggaagttccgctaaaaggatcggccgagaaatactacaagaggtggaagaacgagaaccatgtcttccctgatgctatcggccaccacatccaaaatgttaccgttcacgaaggcgaacatgactctcacgggtctatcaggagttggaactacacatgggatggaaaggaggaggtgttcaaggagagaagagagatagacgatgagaccaaaacgttgacgttaagaggacttgagggtcacgtgatggagcagctcaaagtgtacgacgtcgtctaccaattcattcccaaatctgaggatacctgcatcggcaaaatcactttaatatgggagaagcgcaacgatgattccccagaaccaagcgggtacatgaaattcgtcaagagcttggttgctgacatggggaaccacgttagcaaaacttaatcatcattcccacagtcgtcgtcgtgatcatcatcatcatcatcatcactatctcgatttataagttatgatgttttcagtattaataaatggggtcttggtggttcgttaatttttatgtgttaacccgctttgggttcctgtactgactgctccggtattatttgttattgttcatgggtccctatgtccgggtgccggtataatgattcttaagattaatttacttcacat

SEQ ID NO: 86335 - DNA, 662 bp, Arabidopsis thaliana columbia
  unsure (1)..(662): unsure at all n locations
aaacaagtanaaactttaaaacgagtttgatttaaagaaatggctacatctttaacgtgcgggacatatgtttcgttggaaggatcgtcttataaacactacaagagctggaagagcgagaaccatgtcttcgctgacgccattggccaccacatccaaaatgtcgttgttcacgaaggcgaacatgactctcacgggtctatcaggagttgggactacacatatgatggaaagaaggagatgttcaaagagaagagagagatagatgatgagaataaaacattgacgaaaagaggactggatggtcacgtgatggagcatctcaaagtatttgatatcatctacgaatttattcccaaatctgaggatagctgcgtctgcaaaatcactattgatatttgggagaagcgcaccgatgactttcccgaaccaagcgggtaccatggaattcggccaagcaaattggttgttgaccatttgaanggccaccggccaacaaaagnctttacccacaaccatcaccggncatcncnatccccgntccgggaattggattnttangggggccttttccgngaacccnttttantnaagggggncttttggggttccaatcccnggaaccgnttgggtttggaaaccgggaangtggnnccccccna

SEQ ID NO: 86336 - DNA, 1150 bp, Arabidopsis thaliana columbia
  unsure (1)..(1150): unsure at all n locations
acgcgtccgcaacgcgtccggaaaacaagtagaaactttaaaacgagagagagagaaagaaatggcgacatcgggaacgtacgtgacggaggttccgttgaaaggatcggcggagaaacactacaagagctggaagagcgagaaccatgtcttcgctgacgccattggccaccacatccaaaatgtcgttgttcacgaaggcgaacatgactctcacgggtctatcaggagttgggactacacatatggtatacatttagtcatttacttatactttctctctatatatttatcacttttacggcctatgtgcgtccgaaactatggttttggtggtctactgccaaatggaaaatcccaaagaattcccaaaacttttttaggaagaaaaaaaattgaataacctttttgaaatccgaaattcggtggtggatttgctttttccccccaccaggtaatttttgggttttggggaataatcgaaaaaaaaaagccgcccgggaattccgcggccgcgcgagaaccatgtcttcgctgacgccattggccaccacatccaaaatgtcgttgttcacgaaggcgaacatgactctcacgggtctatcaggagttgggactacacatatgatggaaagaaggagatgttcaaagagaagagagagatagatgatgagaataaaacattgacgaaaagaggactggatggtcacgtgatggagcatctcaaagtatttgatatcatctacgaatttattcccaaatctgaggatagctgcgtctgcaaaatcactatgatatgggagaagcgcaacgatgactttcccgaaccaagcggctacatgaaattcgtcaagcaaatggttgttgacattgaaggccacgtcaacaaagcttaaccacaaccatcaccgtcatcactatctcgatcgatattgtattattatggtgtcttttcgataatcaatataataaagggggtcttgtggagtttctattctctgtaactgtttggttttggaatatgctgtgatatgttgttatgctcatcatatatcggtttcggcggccgannnnnnnnnnnnnnnnnnnnnnnnnnnnnnnnnnnnnnnnnnnnnnnnnnnnnnnnnnnnnnnnnnnnnnaaaccgttag

SEQ ID NO: 86337 - DNA, 1001 bp, Arabidopsis thaliana columbia
ggattccagaaagaaagaaaaaaaagaaacaaataattccaaaaccttctctcttaatcaaaatcaagaaacttacaagatctggtgaaaaccatggaagaaggagattttttcaactgctgtttcagcgagattagtagtggcatgaccatgaataagaagaagatgaagaagagcaataaccaaaagaggtttagcgaggaacagatcaagtcacttgagcttatatttgagtctgagacgaggcttgagccgaggaagaaggttcaggtagctagagagctagggctgcaaccaagacaagtggctatatggtttcaaaacaagagggctcgatggaaaactaagcaacttgagaaagagtataacactcttagagccaattacaacaatttggcttcacaatttgaaatcatgaagaaagaaaagcaatctctggtctctgagctgcagagactaaacgaagagatgcaaaggcctaaagaagaaaagcatcatgagtgttgtggtgatcaaggactggctctaagcagcagcacagagtcgcataatggaaagagtgagccagaagggaggttagaccaagggagtgttctatgtaatgatggtgattacaacaacaacattaaaacagagtattttagggtccagggagagactgatcatgagctgatgaacattgtggagaaagctgatgatagttgcttgacatcttctgagaattggggaggtttcaattctgattctctcttagaccaatctagcagcaattaccctaactggtgggagttttggtcataaaagcatataagaaaaaaacagaacataagcgaagagaaagagtgtgaatagtttgtaaattatgtgttaagaaaataaatttagtttagtttaaatcttgtttcgatctatgtatctactatgttcaatactctttgtagctaattagtagcttataatgagactagaaaagttttgaagtcaaaaaaaaaaaaaaaaaa

SEQ ID NO: 86338 - DNA, 868 bp, Arabidopsis thaliana columbia
  unsure (1)..(868): unsure at all n locations
aacactactcactatagggtatgctggtacgcctgcaggtaccggtccggaattcccgggtcgacccacgcgtcagaaaacaagtagaaactttaaaacgagagagagagaaagaaatggcgacatcgggaacgtacgtgacggaggttccgttgaaaggatcggcggagaaacactacaagagctggaagagcgagaaccatgtcttcgctgacgccattggccaccacatccaaaatgtcgttgttcacgaaggcgaacatgactctcacgggtctatcaggagttgggactacacatatgatggaaagaaggagatgttcaaagagaagagagagatagatgatgagaataaaacattgacgaaaagaggactggatggtcacgtgatggagcatctcaaagtatttgatatcatctacgaatttattcccaaatctgaggatagctgcgtctgcaaaatcactatgatatgggagaagcgcaacgatgactttcccgaaccaagcggctacatgaaattcgtcaagcaaatggttgttgacattgaaggccacgtcaacaaagcttaaccacaaccatcaccgtcatcactatctcgatcgatattgtattattatggtgtcttttcgataatcaatataataaagggggtcttgtggagtttctattctctgtaactgtttggttttggaatatgctgtgatatgttgttatgctcatcatatatcggtttcgatataatgagtattaaataaagtacgttcagttatctaaaaaaaaaaaaaaaaaagccgccgccnnnnnnnnnnnnnnnnnnnnnnnnnnnnnnnnnnnnnnnnnnnnnnnnnnnnnnnncccnnnnnnn

SEQ ID NO: 86339 - DNA, 1381 bp, Arabidopsis thaliana columbia
  unsure (1)..(1381): unsure at all n locations
nnnnnnnnnnnnnnnnnnnnnnnnnnnnnnnnnnnnnnnnnnnnnnnnnnnnnnnnnnnnnnnnnnnnnnnnnnnnnccacgcgtccggtcccaattcccaacactgtcactcaaaaagaatcttcaaacaatgaatctcaacgtcgtcgttttactcctactccttctaatctcatccgccacgtgttgtccgccgtcagaccgccgtgcacttctagctttccgatcagctcttcacgagccttacctcggcattttcaactcatggacaggccaagactgttgccacaactggtacggtattagctgcgactcgctcactcaccgagtcgccgacataaatctccgcggcgagtcagaagatccaatcttcgaacgagctcaccgaaccggttacatgaccggacacatctccgcctcgatatgtgagctcactcgtctctccgccattacaatcgccgattggaaaggtatctccggcgaaatccctaaatgtatcactcgtcttccttttctccgtacactcgacttaatcggaaaccaaatctccgggggggattccatacgacattcggaagattaaaccggttagctgttttaaacgtagccgataaccgaatctccggttcaattccaaaatcattaaccaatctctctagcttaatgcatttagatctccgtaacaacttaatctccggtgtaatcccgtcggacgtcggaagattaaaaatgctcagccgtgcgttattatccggtaaccgaataaccggtcggatcccagaatcattaaccaatatctaccggttagctgacgtggatctctccggtaaccaactctacggtacaatcccaccgtctctaggacgtatgtcggtactagccacacttaacctcgacggaaacaaaatctccggcgagatacctcaaactctgatgacgtcgtcggtgatgaatctgaatttgagccggaacttgctacaagggaagatacctgaagggtttggaccaaggtcttacttcacagttcttgatttgtcgtataataatctgaaaggaccaataccgagatcgatctcaggtgcgtcgtttattggtcatttggatcttagccataaccatctctgtgggaggattccggtaggttcaccgtttgatcatcttgaagcggcgtcgtttatgtttaacgactgtctttgtggtaaacctttaagagcttgcttgaaaaattgatttttatatgtaatttgagttttttcattagagaccattattatatttatggttatgcattttataaaaaaaagatttaaaattgtatgctacgtttagttgaattatgggatgattaacaaaatatataaacttccagtttcattcgtc

SEQ ID NO: 86340 - DNA, 980 bp, Arabidopsis thaliana columbia
gtcgacccaagtctctatactgagtcatgataacagaaggggggatgaatctaaagcaattgtcagatttcagcatctcccatggaggaatcaagattcgattctgaagatgttgattatgctgagattgttgttgttcgtcatggtgaaacatcttggaatgccgagagaaaaatccagggtcatttggatgttgagttaaatgatgcaggaagacaacaagcacaaagagttgcagagcggttatcgaaggagcagaagatatctcatgtatactcttctgacttgaagagagcctttgagactgctcagatcattgctgctaaatgcggcaagcttgaggtgcttaccgatcgtgatttgcgggaaagacatttaggagatatgcaaggacttgtgtatcaagaagcttcgaaaattcgcccggaagcttacaaggctttttcatctaaccgcacagacgttgatattccaggtggaggagaaagtcttgacaaactttacgatagatgtacaactgcattacagagaatcggcgacaaacataaaggtgaaaggatagtagtagtgactcatggaggtgtgatccgatctctctacgaaagagctcgtccaagtgcaagaaaagttgaaaagatactcaatacatcggtcaatgtgttccgtttattcgacggagacaaatggaccatccaagtttggggtgatgtgagtcatctggaggaaaccggcttcttacaatcaggttttggtggtgatagaacctctggttagagagattctatactcttagtcttcttccccttggaagagcatttatgtaatttaagtttcactccataacttttcaatttttaacatttgaccccattactttgataaagtgatttgggaggattgataaagtaaattgctataaatttctacagtcaaatgttatatggttcactaagtacattgaatccaaagcattcgtgatt

SEQ ID NO: 86341 - DNA, 362 bp, Arabidopsis thaliana columbia
ctcgattacttcctttttaatttccatggctctctaaaaatctctctctctttctctctctcttacttgtattgttacgatctctgcttgaagattatggacggcgccgatggaaccgttcgcgtcaagcctggtcgcggattcgaaacggagacggatgttgcggtttcgtcgccagtgacacgtcagaaagctgctgcagctaagcaattcatcgagaatcattataagaattacttgcaaggcttgctcgatcgtatggagagactcagggagttttatagtatatgtgcagaagcttaaatatctgttgttgatcatgacgatgatttttggatatttattattgtgtttaacttttt

SEQ ID NO: 86342 - DNA, 3126 bp, Arabidopsis thaliana columbia
cgccgccggttgccgccaatccgctttcccgccaaattcgacaccataaatttcttctagtcgctttcgattccagttccactgaaaaaccacgaaagaagaacatttgcaccgtagttgcagaaggtaggtgaaggatttagctttctctatcttccaatggagggtaatttcgaggaacagaacaagcttccggagctgaaattggatgcaaagcaagctcaagggtttctctcgttctacaaaaccctaccaaatgatacgagagctgttagattctttgatcgcaaggattattatacagctcatggtgaaaattcagttttcattgcaaagacttattatcatacaaccactgctctacgtcagctcgggagtggttcaaatgctctttcaagcgtaagcattagtaggaacatgttcgaaacgattgctagggatcttctcctggagcgtaatgatcatactgtagaactttatgagggaagcggatcgaattggagacttgtgaaaacaggttctcctggaaacattggaagctttgaagatgttttgtttgcaaacaatgaaatgcaggacacaccagttgttgtctccatatttccaagttttcacgatggcagatgcgttattgggatggcctatgttgatctgactaggcgagttcttggactagctgagtttcttgatgatagccgcttcaccaatctggagtcttcgttgattgctctaggcgcaaaagaatgcatttttccagctgaatccggcaaatccaatgaatgcaaaagcctgtatgattccctggagaggtgtgccgtgatgataacagagaggaagaaacacgagttcaaaggaagagatttagattcagatcttaagagattggtgaaggggaatattgagcctgttagagatttggtatccgggtttgaccttgcgactcctgctctaggtgcattactctcgttttctgaacttctctcaaatgaggataactatgggaacttcacaatccgcagatatgatattggcggattcatgagacttgactctgcagctatgagggctttgaatgtgatggagagcaaaactgatgctaataagaatttcagtttgtttggtctcatgaacagaacatgtaccgcagggatgggtaagagactgcttcatatgtggctgaagcaacccctcgtggatttgaatgagattaagacgagattagatatagttcagtgctttgttgaagaagctgggttaaggcaggatcttagacagcatctgaagcgaatctcagatgttgagaggcttttgcgcagtctcgagagaagaagaggtgggttacagcacattattaaactctatcagtcaactataaggcttcccttcatcaaaacagctatgcaacagtacaccggagaattcgcatcactcatcagcgagagatacctgaaaaagcttgaggctttatcagatcaagatcaccttggaaagttcatcgatttggttgagtgctctgtagatcttgaccagctagaaaatggagaatacatgatatcttcaagctacgacaccaaattggcatctctgaaagatcagaaagaattgctggagcagcagattcacgaattgcacaaaaagacagcgatagaacttgatcttcaggtcgacaaggctcttaaacttgacaaagcagcgcaatttgggcatgtcttcaggatcacgaagaaggaagagccaaagatcaggaagaagctgacgacacagtttatagtgctggagactcgcaaagacggagtgaagttcacaaacacaaagctaaaaaaactgggggaccagtaccaaagtgttgtggatgattataggagctgtcaaaaggagctcgttgatcgtgtagttgagactgttaccagcttctctgaggtatttgaggacttagctgggttactttctgaaatggatgttttgttaagctttgctgatttggctgccagttgccctactccatactgtaggccagaaatcacctcttcggatgctggagatattgtactagaaggaagcagacatccatgtgtagaagctcaagattgggtgaatttcataccaaatgattgcagactcatgagagggaagagttggtttcaaatagtaacagggcctaacatgggagggaagtccactttcatccgccaggttggtgtgattgtgctgatggctcaagttggttcctttgttccttgtgataaagcatcaatttccataagagactgcatctttgcccgtgtaggagcaggcgattgccaactgcgtggagtgtcaacttttatgcaagaaatgcttgaaaccgcatcgatattgaaaggcgctagtgataagtcactgataattatcgatgaacttggtcgtggaacatcaacttatgatggttttggtttagcttgggctatatgtgagcatctggttcaagtgaaaagagcaccaactctgtttgctactcacttccatgaacttactgccttggctcaagcaaactctgaggtctctggtaacactgttggtgtggcaaacttccatgtcagcgctcacattgacactgaaagccgcaaactcaccatgctttacaaggttgaaccaggggcctgtgaccagagctttgggattcatgtggcggaatttgccaacttccctgaaagcgtcgtggccctcgcaagagagaaagctgcagagctggaagatttctctccctcctccatgataatcaacaatgaggagagtgggaagagaaagagcagagaagatgatccagatgaagtatcaagaggggcagagcgagctcacaagtttctgaaagagtttgcagcgataccacttgataaaatggagcttaaagattcacttcaacgggttcgtgagatgaaagatgagctagagaaagatgctgcagactgccactggctcaggcagtttctgtgaagaacccttgacgttttttggtttttggttttgtaaatagcttaaatcggttcttgtagttgtggtcgttgcttgggatgaaactaaatgaagggcaaaaacataattctacaatttttgttagtaaagctcgtttaatttaaaaaaaaaaaa

SEQ ID NO: 86343 - DNA, 465 bp, Arabidopsis thaliana columbia
  unsure (1)..(465): unsure at all n locations
cacacataagaaaagaaattaacaaattatcacaaaaatacgttttcttgtataataatttttctctagatttgtcgcttaccttttgaaattctccggcgatgaatctcgccgggaaaaggaatattccggttattatttctgtttccgttactagtgactcttaccatcgccgtcatgtcttccgtgaacatcgtcggacctgaaaaatccttctcctagactttttttttttctttcttctctttgttattattattctttgcttcgtttttgtgaagaagatgatccgctgatttcagaagttttcttcttctggtttttagctgagaggttttggtagattctgtttctccttcttcctctgtgggttttcgaatccagttttgggatttttgaacggattttgttaaagtcccctttnagagagccctgagatnttttnccgagcagngngtttttgna

SEQ ID NO: 86344 - DNA, 454 bp, Arabidopsis thaliana columbia
  unsure (1)..(454): unsure at all n locations
aantcggtgaaaatnaacgtgtcgtggctaaagacagcggtaacggaactggcggaggcggtggagtatttcgggcagtacgacacgncgaaggtggagaaagaggtgtgcnagaaanatctgacggcgaaaaagggggagatggaggagatgacggcggactggtgaagagggagaaggaaatcaaagantgcagagagaaggtnacggtggtcgcagggaggctagggcagctggagatgaaaggttcgaaattnaacaagaatctcgacctcttccagtccaaagtccacaaattccaaggngaagcccgtccttctccacctttagctccgtctccaaattttttcccgttttggttctcatttatttcaattattttccttatttgaccatgnaatgtttatnaatttaaanggttttggggccattagtgtaatttttttaaaangtt

SEQ ID NO: 86345 - DNA, 389 bp, Arabidopsis thaliana columbia
  unsure (1)..(389): unsure at all n locations
agtatctgtatatatatatgcctttcgctctactcatgtgttctgcttctnataacatcaatccgtagcggagatctctactgtccgcgtggagttaacccatgctgaactgacttggtgttgcattgcaataccccgaatgcaaatncctatgactccttgtaagtttcattccctgttcagtgtgtcttgcctcaagtgtcaccattttnatgtgatgtgaatgtgtgatgaatgcaggatgcaacnttgcctcattgtatgctgatgatttgattgccactcttgacaaatgcanaaacgnacgcngctttgtcctgtgtcagcatactaagctttttnttnncctttccggngcgttctatttttccgntcccaggtntacaana

SEQ ID NO: 86346 - DNA, 342 bp, Arabidopsis thaliana columbia
agaagagccaatcgggttgatgtcttgattccagatattattcagtcgtctgagagtgtactcattctggagtacatggatggagtacgtttgaatgatgtggaatctctagatgcttttggtgtggataaacaaaagatcgttgaagagatcactcgtgcatatgcccatcagatatttgttgatgggtttttttaatggcgaccctcatccaggaaattttcttgttagtaaggaaccacaacatcgtccaattttacttgatttcgggctttcaaagaaaatctcacactccttgaaacaagcactagccaagatgtttctagcatcggcagagggaga

SEQ ID NO: 86347 - DNA, 449 bp, Arabidopsis thaliana columbia
cccacgcgtccgttttcatttgagcttctctctgataaggtcacttcctctgacccttttatctaagctcaacgctgcaactctcgccgtcggttacttccccattttccttccttcttccgattcaaagactcaatttttattctccggcgttgaggattcatctcctaaaaatctctgctttatcttttgatttgagctgatttggagaggagaagaagatagatagataggtaattcggattgatatctcgaaaaatggctcagattcagcatcagggtcaaaatgccaatggtggtgtagctgttcccggtgctgctgcggctgaagctgcggcggctgcggctggagctgcggcggcggctgccggagctgcgcagcaagggacgacgtctttatatgtcggtgatcttgatgcgaccgtgacggattcacagctggttgaggc

SEQ ID NO: 86348 - DNA, 847 bp, Arabidopsis thaliana columbia
  unsure (1)..(847): unsure at all n locations
gataaatactaaactcactgttaaaactttctcaacaaagcttcctgtttctctacaaatggcatctgctctcgctcttaagagactcctatcatcctccatcgctccacgttcccgtagtgttcttcgtccagctgtttcctctcgcctcttcaacaccaacgccgttaggagctacgacgacgacggcgaaaatggagacggcgttgatttatatcgccgctctgttcctcgccgccgtggtgatttcttctcagatgtgtttgatccgttttcgccgacgaggagcgttagtcaagtgctgaatctgatggaccagttcatggagaatcctctgttatcagctactcgtggcatgggagcttcaggagctcgtcgtggttgggatataaaagagaaagacgatgctctgtacctgagaatcgacatgcctgggctgagcagagaggatgtgaagctggctttggagcaggacactctggtgattagaggagaaggaaaaaacgaggaagatggtggcgaggaaggagagagcggtaatcggagattcacaagcaggattggattaccggataagatttacaagatcgatgagattaaggcggagatgaagaacggagtgttgaaagttgtgatcccgaagatgaaagaacaagagagaaatgatgttcgtcagatcgagatcaactaaaaacgtcgacgtttttttctgttctagttttgttgataggtctttgaataagaagtgtgtgtagtttggcacggtcgatgttgagtcatgtagtctctaaagactaaaaggttatatgtttctttcttgaaaaaaaaaaaannnnnnnnnnnnnnn

SEQ ID NO: 86349 - DNA, 396 bp, Arabidopsis thaliana columbia
  unsure (1)..(396): unsure at all n locations
ggaagtagatctctcttttctctttctctttctcctctctctctctttccttactcagcttttgtggtgaatattgaagaaagtttctctgatatttgttagatggaagaagattgcgagtttcgacattgggatgagttgattccagatgctcttggtttaatctttagccacttacctcttcaagaagtactaacagtggtgcctagagtttgcaaagcatgggacagagctgttactggaccttattgttggcaagaaattgacattgtcctgtggagtaaccgttttcaccagtctgatcatcttgaccggatgcttgagatgttggtcnctagaagcgctggctctttgcgaaaactctccgttactgggcttcganatgactctatcttc

SEQ ID NO: 86350 - DNA, 591 bp, Arabidopsis thaliana columbia
  unsure (1)..(591): unsure at all n locations
gccnnnnnnnnnnnnnnnnnnnnnnnnnnnnnnnnnnnnnnnnnnnnnnnnnnnnnnnnnnnnnnnnnnnnnccccacgcgtccgcggacgcgtccgcccacgcgtccgctcagcttttgtggtgaatattgaagaaagtttctctgatatttgttagatggaagaagattgcgagtttcgacattgggatgagttgattccagatgctcttggtttaatctttagccacttacctcttcaagaagtactaacagtggtgcctagagtttgcaaagcatggaacagagctgttactggaccttattgttggcaagagattgacattgagctgtggagtaaccgttttcaccagtctgatcatcttgaccggatgcttgagatgttgatccctagaagcgctggctctttgcgaaaactctccgttactggccttcgaaatgactctatcttctccttcattgcacaacatgctggttcacttaagaccttggaaggtgccaagaaggggtctgactaattcgggtgtgggaaaccgagctgaaaagctttcgtctctcacttttttggattgagctactggtggaaaatag

SEQ ID NO: 86351 - DNA, 500 bp, Arabidopsis thaliana columbia
accgccgtgacttagccactccgcttatttattgcagttcacgaccaccgtatcctcgtaatctccgttatctcgaaccgaatcgaaaaatccctaaattcctgtgaatttattactaaaattagctcaccttatagatttaccagagatgatgggctcagagaatgacgaagagtcccatctccactcatccaaagaagagatggagaaactctttctccgcgaagatggcgatcccttgaccaaaagcaatgtcaacggcgataaatccaactctaattatcgcagcgctatgtcaactctcttcgactcgcgtcacccgtcgattgtcgtaactccagctgattccgatccactttttgcgccaccgtcttactacagcgaatctcggagtcctcgttctaaaccaaacggcggcgactgagtcagctcttacctcgagcctccgtcttacgcggatgttatcttcagccctttcgatgatatcttcgagatcaatg

SEQ ID NO: 86352 - DNA, 405 bp, Arabidopsis thaliana columbia
gagagagtctcctctctcttctctctctatatcgctcctcatgatccgattttttatataatttataaaaaatttatgtgataattacagatacacgttatttgtgtgtatattgatagagacaataaccattggaatctgaccatggatctcttttcttcttgagatatttttcatttctttctcctgttctcgtctcccagatctgttcgtcaatcttaccattggaaagcttcaagcttcctttttttctctatctggggacgggaccgttgtataaaagagttagaccagacgacggcacaatgtatttcttcggtttgtccaaagaagaagtgttgtcacagaaacatgttgtatcatataaagagacttctaagcagaacccaatcaatatggtcactc

SEQ ID NO: 86353 - DNA, 496 bp, Arabidopsis thaliana columbia
acaaagacaagttcggtagagcgctggggctagccatgggcttaatctcgatcatgtacggtgcgttcgggctgctacggtacatggcttacggagaggagacgaaagacatcatcaccaccaacctggggacaggagtggtgagcactctggtgcagctgggcttagcaatcaacctcttcttcacattcccccttatgatgcaacctgtctacgaggtcgtggaacgccgcctttgcagctcccgttactctgtatgggtgcgctgggccactgtgctggtggtcacgctcgtggccctgctcgtcccaaattttgcagacttcttatctctggtggggagcagcgtctgtttggtgctgggctttgtcttgccatcactatttcacttgcaggctttcaaaaacgagttgagcatcacaagaatagtggtagacgttctcgttttcctcattggtgttatgatagccattaccgggacctggactgcagtaca

SEQ ID NO: 86354 - DNA, 686 bp, Arabidopsis thaliana columbia
  unsure (1)..(686): unsure at all n locations
aggtgacacttacaagactttgacgtcgcatcgccgcgtacgtaagctcggaattcggctcgaggcaacctgtctaggaggtcgtggaacgccgcctttgcagctcccgttactctgtatgggtgcgctgggccactgtgctggtggtcacgctcgtggccctgctcgtcccaaattttgcagacttcttatctctggtggggagcagcgtctgcgtggtgctgggctttgtcttgccatcactatttcacttgcaggctttcaaaaacgagttgagcatcacaagaatagtggtagacgttctcgttttcctcattggtgttatgatagccattaccgggacctggactgcagtacatgagatcctgacatccaaggcctgagcttcttccattgtttatttttgtcagtatgaaaagagaagcattgttacctccagcgaacacggcattattattgttattctgttactctcctcacttgtttatttgagtcttattactctatttgtaagaaagacgcaccatggaaaaccaataagaaaaatactcttagaatcaaaaaaaaaaaaaaaaggnnnnnnnnnnnnnnnnnnnnnnnnnnnnnnnnnnnnnnnnnnnnnnnnnnnnnnnnnnnnnnnnnnnnnnnnnnnnnnnnnnnnnnnnnnnnnnnnnnnnnnnnnnnnn

SEQ ID NO: 86355 - DNA, 502 bp, Arabidopsis thaliana columbia
  unsure (1)..(502): unsure at all n locations
ccttttatagcttgtcatagttgctttgagctgctttacttgcctaagaagaagcttttgtctcaggaaaggttacataagctgcagtgcggtgcttgtcctgaagttattagtttcacaatcgttgataggaaactcgttttctcttctggtaatgaggaaacaaaaccggtctctctagaggttgaagatagaaacacaacaaacacagtagtgatagagggaggaagtctctcctgttggatttcaacagctcaggtagagatattccacgtaaggatgaagaagaaccagtgcaagaactgngaaatcatcaggatactattactacgcaaaggtcccgctctgaatctcancactcagatgatnaaggnaagatcgagcaattcttagtgancaccaccagaaggnaggtcaaatctttttngtccgggcgnagggtaaaagggtcaaaaaggaccttaaccccggtnntnctnnntanttnccagtttccttnnac

SEQ ID NO: 86356 - DNA, 635 bp, Arabidopsis thaliana columbia
tacgactcactttagggaaagctgctccgcctgcaggtaccggtccggaattcccgggtcgacccacgctgccgctctgaagctctgaggaagacatgatttcgtctctctcagcttcttcttcattggtttcttctttcgtcgccgttaaagcgactccggtcaccggacctctgattccccgtcgcgatcttctttctattcgtatcagagctagctcgaatcagaatagttctggttattgttttccagaaaagtttaaatcttttgccaaatcagcgattctcatcggtgctgctgtttcaatgaccggaaagttttcaactttaccggataaagccgagtctccggttacgactatcgaaaagacctacgaggaagtgaaagaagagaaactgtctgagatcacgccattatctgagcttttggattccactcctgaggccgtcgagacgctgagatcactcctgcagcagaagctagagaagggagaagatgtataagcttttaagctattatagagactagtttctggacaaccagaagaaactgagtggattttcttatttggcttttcttttatgtttatatttttttttctttttattctctatttctttttcttttaagtattt

SEQ ID NO: 86357 - DNA, 2350 bp, Arabidopsis thaliana columbia
ccaaggcatcgtttaataaatcctcccgtttcttttctgcatctttcttctcttctaatccagatgggaccgcgacagtgtttggtagtctggttggttctgtcaaacagcaatggcccaaactagttcttgggcttgctcttcttggagcaggactgacattatactccaatggagtaggggggaacaaccagttgcttcaacagccagatgttaccagcactagtacagaagatgtctcttcaagtacgaagccactgatccggcaagtgcagaaacttcccaagagaattaagaaactacttgagatgatccctcaccaggaggtcaatgaggaagaagcttccctctttgactttttgtggttactgctagcaagcgtcatatttgtgcctctatttcagaaaattcctggaggcagccctgttcttgggtatttggcagctggaattctgattggtccgtatggtctttcgataatccgtaatgtgcacggaaccagggccatcgcagaatttggagtagttttgttgcttttcaacatcggccttgagctatctgttgaaagactgagttccatgaagaaatatgtttttggattaggctcagctcaggttctggtgacggcagcagtagttggattgcttgcccattatgttgctggtcaggctggtccagcagcaatagtgattggaaatggcctggctctgtcgtccactgctgttgtccttcaggttctacaagaacgaggcgagagtacatctagacatggaagggcttcattttccgtcttgcttttccaggatctagctgtagttgttttactgattctcatcccacttatttcacctaattcatcgaaaggagggattggatttcaagccattgctgaagctcttgggcttgctgcagtcaaagcagcagtggctattactgcaataattgctggtggccgtctacttcttcgaccaatctacaagcaaattgcagaaaatcgaaacgccgagatattctctgccaacacgcttctcgttattcttgggactagtttactgacagctagggctggactttccatggcattaggagcgtttttggctggtctactccttgcagagacagaattttcgttgcaagtagaatcagatattgctccatatcgtggtcttctgttgggactcttcttcatgacggttggaatgtcaattgatccgaaattacttctctccaacttccctgtcatagtgggaactttgggactcttgatagtgggcaaaactatgttagtcgtgattatgggaaaattgttcggcatatcaataatatctgcaattcgggtcggtctactattggccccaggcggagagtttgcatttgttgctttcggagaagctgttaatcagggtataatgtctcctcagttatcttcgttgctattccttgtcgtgggaatctcaatggctatcacaccctggttagctgctggtggccagttaattgcatctcgttttgagttgcatgatgttcgaagtttattgcccgtcgagagtgagacagatgatttgcagggtcacataattatttgtggatttggtcgagttggtcagataattgctcaacttctctcggaaagacttatcccatatgttgcccttgatgtcagcagtgatagagtgactatcgggcgttccttggatcttcctgtttatttcggagacgctggtagtaaagaggttctccacaaaattggagctgggagagcatgtgctgctgtggttgccttagacgcaccaggagcaaactacagatgtgtttgggctttgagcaagttttaccccaatgtcaaaacttttgtccgtgctcacgatgttgttcatggtcttaatctagaaaaagccggtgctactgcagttgtcccggagactctggagcctagtctacagttggcagctgctgttcttgctcaggcaaaattaccgacatcggaaattgcaaacacgattaacgagttcagaacccgtcacttgtctgaactgaccgagctatgtgaagcaagcggaagctctctaggctatgggtactctaggacgagtaagcctaaacctcaaccatcggatgcatctggcgataaccagataatcgaaggaggcacagtcgtaatctgatgacgttctccattctggtgagaaaaagaagagtatttctcctttggtgttcttcttaaaccaccatcaccaacttgggttgcagtgcgtggtgaagtgatggatccatcagatgatgtgtagtgtgactaatatattcattatatgttcagtacatatctctcatttaaaaaaaaaaaaaaaaa

SEQ ID NO: 86358 - DNA, 480 bp, Arabidopsis thaliana columbia
aaaagaattcatcaaaggagagagagatcgacaatggcaccttcgtcatcaagcggtttaaccttcaagctacatcctttggtaatcgtcaacatatcggatcactacactagggtcaaaactcagctcaatcctcctgcttcaatctgcgcaagcggccatggctcaaacaacggcgaagcaatgttccagcaaaaccctagggtttacggatgtgtgatcggtgtccagagaggtcgtactgttgagatattcaacagtttcgagcttttatatgatccttctactcaaacccttgatagatctttcctcgagaagaagcaagagctctataagaaggtgttccctgatttctatattctgggatggtactctacgggaagtgatgctgaggaatctgatatgcatatccataaagctttgatggatatcaatgaatctcctgtttatgtgcttttaaaccctgctatcaatcacaca

SEQ ID NO: 86359 - DNA, 432 bp, Arabidopsis thaliana columbia
  unsure (1)..(432): unsure at all n locations
aatggagtgtcttaggccccaccggtcctggtctcctttgtatcaccggcgttcttggctccgcctcttntccgccgtaaacnccttcctatggctcggaagctggctctgctcgatccggacaagcggaaactcattctcatggagcaccacttgggtagcgacgttcctctcaagaatccagaacgagatgtctcctcttttgcaatgcagctcaattatgaaagaacaacttataaatcctcactgggaaagctgtggttcgatgaggctggatcaaaactggactttcaggaggatgatgatgatgctttcacaaaatctttggtggtgcttttaaagaacctcggggtcttgcaatgagggagtttggcttttccctaggcncgtttttttcgaacagggagtttggnggnggnttttnttngngag

SEQ ID NO: 86360 - DNA, 520 bp, Arabidopsis thaliana columbia
atacgactcatttagggaaagccggtacgcctgcaggtaccggtccggaattcccgggtcgacccacgcgtccgctgagcggtacggttaattcatttcttatctatcacacaaagttgaatcgtaaccctaagcgaattcaacaatcgagagagcgagagagatcaattaaccccagcgaatcgaatatgccgaagaagatgggtctgaacagcaaggcggaggtcgccaaatctcgtaagaacgccgcggaggctgagcagaaggatcgtcagactcgggagaaagaggaacaatactggcgcgaggcggaaggtcccaaatccaaagcggtgaagaagcgagaagaggaagcggagaagaaggcagagaccgccgctaagaaattggaggcgaagcgtctggctgagcaggaggagaaagagttggagaaggctttgaaaaagccagacaagaaggcgaatcgcgtcactgtgccggttcctaaggtcacagaggctgagctcatccgaagacgcga

SEQ ID NO: 86361 - DNA, 592 bp, Arabidopsis thaliana columbia
  unsure (1)..(592): unsure at all n locations
tntgtttccnnatncnccgangtccnggagccacncccccntcttccccaaacccttagggccgtcccatcccccggtttggccnaagtntgtggttgaaaaggctaatgttcccagttgaagaaagcttgttggggaccggagagtgaaagagaaaaagaagtgaaagaggcttatgagggtttgaaatgtttagaaaaggagcttggagataaactttttttcggaggagagacaattggatttgtcgatatagcagctgatttcataggatattggttagggatttcccaagaagcttcaggcgtcacgattcatgaccgcggaggagtttccaaaacttcaacgttggtcggaagatttcgtgggaaataactttattaaggaagtcttgccccctaaggagaagctcgtggctgttttgaaggccatgtttggaagtgttacatctaattaaacgtaataagaccatcgtaattcattgtttggtaacagaaaaaattgatatctatgtcatctttatttttatattttcgtcttctttggtaaatgttttcttctatatggttattctataaataacactttcccc

SEQ ID NO: 86362 - DNA, 739 bp, Arabidopsis thaliana columbia
  unsure (1)..(739): unsure at all n locations
ccggaatttccgggtcgacccacgcgtccggagaaagccaaaccggtatattttctttaaacaggatatatagatgaaccaagaagagcacgtaaagcttctgggcttatggggaagtccttttagcaaaagagtagagatggtcctaaaacttaagggcataccttatgagtacattgaagaagatgtttatggaaacaggagccctatgcttctcaagtacaaccctatacacaagaaggtccctgtcctcatccacaatggtagatcgatagccgaatcattggtgattgtcgaatacatcgaagatacgtggaagacaactcacacgatcttgcctcaagatccttatgaacgtgccatggcccggttttgggctaagtatgtggatgaaaaggtaatgttagcagtgaagaaagcttgttggggaccggagagtgaaagagaaaaagaagtgaaagaggcttatgagggtttgaaatgtttagaaaaggagcttggagataaactttttttcggaggagagacaattggatttgtcgatatagcagctgatttcataagatattggttagggattttccaagaagcttcaagcgtcacgatcatgaccgcggaagagtttccaaaacttaacgtagtcgaagattcgtggaaaaacttattaagaatntgccctangagactcggctgttgaagctgttgaggtcattataacgatagactgatatgtgtaaaa

SEQ ID NO: 86363 - DNA, 567 bp, Arabidopsis thaliana columbia
  unsure (1)..(567): unsure at all n locations
cggacgcgtgggcggacgcgtgggcttaaaaaccaaatctttcatcatcttccttcaccagttgactctctttcaatctatctctgaatctctcactctcctacccgaaaaccatgaactccaacgaccaggatccgattccgttcagacccgaagacaacaacttctccggttccaaaacctacgccatgagcggcaaaatcatgctaagtgcaatagtaatcctcttcttcgtcgtcattttaatggtcttcctccatctttacgctcgttggtatctcctccgtgctcgtagacgtcatctccgtcgtcgtagccgtaaccgtcgcgctacgatggttttcttcaccgctgatccttccaccgccgcaacttccgtcgtcgcttcacgtggacttgatccaaacgttattaaatctcttcctgttttcactttctccgacgagactcataaagatccgatcgaatgcggccgtttgttttcgggatttcgagagagccagaccgggtcgggttttttcccaattgtcaaaaatantttttaatgttgattggnanttnaaatgg

SEQ ID NO: 86364 - DNA, 543 bp, Arabidopsis thaliana columbia
  unsure (1)..(543): unsure at all n locations
tgcctaaacacaattctctccaacataagattgatgaatatgatgcttgagttcttgaaccgttgacgtttaatcgggaagattttgaagttgaattttcatgaagttgaagatttgtttttagagctttggaattgacaattgctatcaccggattcaacatgcatatcgcggtgttctgggtttcaatggagtcaacaatcttcttcggcggcgaccagtgattctccgatcttcttcttctcacgtgtcttcagcacctaaccttttcatgacacgtgttttaggttctgtttcaatgattcttctttcttcctgatgcggtttcctacttgggcttcatagttgggcttgaaaagtcttacacttatgtttagttgaatttggctctgttgtttgtctcaaactttggcttatgttgatataacaaaatggaatttgcatttaaaaaaaaaaaaaaaaaaaaaaaaaagnnnnnnnnnnnnnnnnnnnnnnnnnnnnnnnnnnnnnnnnnnnnnnnnnnnnnnnnnnnnnnnnnnngtc

SEQ ID NO: 86365 - DNA, 580 bp, Arabidopsis thaliana columbia
  unsure (1)..(580): unsure at all n locations
cggatattagattgattcggttggaaggggaaaagatcaatttctctctcttctctctcttcaattattcagagagaggaacacgatctttgtttctccatccggtttgtttactagttttgtctctggtatggttcagctttgtctccggcgaggtccggctttgtttcggctatctgttgccgctttttgttttttctgttgaataaattatgcgatctatgttagtgttgtggttttaggtgattcgtctttgcctaaacacaattctctccaacataagattgatgaatatgatgcttgagttcgtgaaccgttgacgtttaattgggaagattttgaagttgaatttccatgaagttgaagatttgtttttagagctttggaattgacaattgctatcaccggattcaacatgcatatcgcgggggtctngggttctaatgggggcaacaaatctccttcgggcggcgaccacggagttctcccgaccctccttcttctcacggggctttcaagcaccccaaacccttctcatgacacggggtttaagggcctgttaaaaaaaacccnccttnct

SEQ ID NO: 86366 - DNA, 2245 bp, Arabidopsis thaliana columbia
ctctctctctctctttcatcttcaaactctacaaacccagaaaccaccacacagtaattaatgtctctttctttcttcccatgtgatctttaacagacttttcttcttattctccatctctgaagttgtggggattcatcaagacttccttatctgtttcttttataaaacaagagagagataccacttttggtgttctttatttgcaactctttcaggttaaagaaatcgataggctctgttcttgattgtggtggaagagacatgatgatgtttaacgagatgggaatgtatggaaacatggatttcttctcttcctccacatctctcgatgtgtgtccattaccacaagctgaacaagaacctgtagttgaagatgtcgactacaccgatgatgagatggatgtggatgagcttgagaagaggatgtggagagacaaaatgcgtttgaaacgtctcaaggagcaacagagtaagtgtaaaggaggcgtcgatggttcgaaacagaggcagtcgcaagagcaagctaggaggaagaaaatgtctagagcccaagatgggatcttgaagtatatgttgaagatgatggaagtttgtaaagctcaaggctttgtttatggtattattcctgagaagggtaagcctgtgactggtgcttcggataatttgagggaatggtggaaagataaggttaggtttgatcgtaatggtccagctgctattgctaagtatcagtcagagaataatatttctggagggagtaatgattgtaacagcttggttggtccaacaccgcatacgcttcaggagcttcaggacacgactcttggttcgcttttatcggctttgatgcaacattgtgatccaccgcagagacggtttcctttggagaaaggagtttctccaccttggtggcctaatgggaatgaagagtggtggcctcagcttggtttaccaaatgagcaaggtcctcctccttataagaagcctcatgatttgaagaaagcttggaaagtcggtgttttaactgcggtgatcaagcatatgtcgccggatattgcgaagatccgtaagcttgtgaggcaatcaaaatgcttgcaggataagatgacggcgaaagagagtgctacttggcttgccattattaaccaagaagaggttgtggctcgggagctttatcccgagtcatgccctcctctttcttcttcttcatcattaggaagcgggtcgcttctcattaatgattgtagcgagtatgacgttgaaggtttcgagaaggaacaacatggtttcgatgtggaagagcggaaaccagagatagtgatgatgcatcctctagcaagctttggggttgctaaaatgcaacattttcccataaaggaggaggtcgccaccacggtaaacttagagttcacgagaaagaggaagcagaacaatgatatgaatgttatggtaatggacagatcagcaggttacacttgtgagaatggtcagtgtcctcacagcaaaatgaatcttggatttcaagacaggagttcaagggacaaccaccagatggtttgtccatatagagacaatcgtttagcgtatggagcatccaagtttcatatgggtggaatgaaactagtagttcctcagcaaccagtccaaccgatcgacctatcgggcgttggagttccggaaaacgggcagaagatgatcaccgagcttatggccatgtacgacagaaatgtccaaagcaaccaaacgcctcctactttgatggaaaaccaaagcatggtcattgatgcaaaagcagctcagaatcagcagctgaatttcaacagtggcaatcaaatgtttatgcaacaagggacgaacaacggggttaacaatcggttccagatggtgtttgattcgacaccattcgatatggcagcattcgattacagagatgattggcaaaccggagcaatggaaggaatggggaagcagcagcagcagcagcagcagcagcaagatgtatcaatatggttctgaatattacacaatctctgtaatattcattctttcataataactctgttacctacttacctgacttgggtatgtattctattgcaccaaacactcatctatattgttgatgatgatgaagccatctattttttttttgtgtctgaaagtcatttaactcgcttcattgttttaataatgtcactatccattgaacatcattctcatgctacaagtttgattctttgag

SEQ ID NO: 86367 - DNA, 2525 bp, Arabidopsis thaliana columbia
  unsure (1)..(2525): unsure at all n locations
agctggtacgcctgcaggtaccggtccgttattcccgggtcgacccacgcgtccggaaacgcaaataaacaaaagtcgctttctagccacgtgatctttcgtcgacttttcttcttcttcttcttcttcctcttcctcatctcgtatctctaacttttgtcgaagttcttttgatgaaactagggtttattatcttctccttctttttcccatcaccatagaaaaggcagagacctttttcttcatcatttttattctccttcttcttctgctgttcatttctccaggttacaatgatgtttaatgagatgggaatgtgtggaaacatggatttcttctcttctggatcacttggtgaagttgatttctgtcctgttccacaagctgagcctgattccattgttgaagatgactatactgatgatgagattgatgttgatgaattggagaggaggatgtggagagacaaaatgcggcttaaacgtctcaaggagcaggataagggtaaagaaggtgttgatgctgctaaacagaggcagtctcaagagcaagctaggaggaagaaaatgtctagagctcaagatgggatcttgaagtatatgttgaagatgatggaagtttgtaaagctcaaggctttgtttatgggattattccggagaatgggaagcctgtgactggtgcttctgataatttaagggagtggtggaaagataaggttaggtttgatcgtaatggtcctgcggctattaccaagtatcaagcggagaataatatcccggggattcatgaaggtaataacccgattggaccgactcctcataccttgcaagagcttcaagacacgactcttggatcgcttttgtctgcgttgatgcaacactgtgatcctcctcagagacgttttcctttggagaaaggagttcctcctccgtggtggcctaatgggaaagaggattggtggcctcaacttggtttgcctaaagatcaaggtcctgcaccttacaagaagcctcatgatttgaagaaggcgtggaaagtcggcgttttgactgcggttatcaagcatatgtttcctgatattgctaagatccgtaagctcgtgaggcaatctaaatgtttgcaggataagatgactgctaaagagagtgctacctggcttgctattattaaccaagaagagtccttggctagagagctttatcccgagtcatgtccacctctttctctgtctggtggaagttgctcgcttctgatgaatgattgcagtcaatacgatgttgaaggtttcgagaaggagtctcactatgaagtggaagagctcaagccagaaaaagttatgaattcttcaaactttgggatggttgctaaaatgcatgactttcctgtcaaagaagaagtcccagcaggaaactcggaattcatgagaaagagaaagccaaacagagatctgaacactattatggacagaaccgttttcacctgcgagaatcttgggtgtgcgcacagcgaaatcagccggggatttctggataggaattcgagagacaaccatcaactggcatgtccacatcgagacagtcgcttaccgtatggagcagcaccatccaggtttcatgtcaatgaagttaagcctgtagttggatttcctcagccaaggccagtgaactcagtagcccaaccaattgacttaacgggtatagttcctgaagatggacagaagatgatctcagagctcatgtccatgtacgacagaaatgtccagagcaaccaaacctctatggtcatggaaaatcaaagcgtgtcactgcttcaacccacagtccataaccatcaagaacatctccagttcccaggaaacatggtggaaggaagtttctttgaagacttgaacatcccaaacagagcaaacaacaacaacagcagcaacaatcaaacgttttttcaagggaacaacaacaacaacaatgtgtttaagttcgacactgcagatcacaacaactttgaagctgcacataacaacaacaataacagtagcggcaacaggttccagcttgtgtttgattccacaccgttcgacatggcgtcattcgattacagagatgatatgtcgatgccaggagtagtaggaacgatggatggaatgcagcagaagcagcaagatgtatccatatggttctaaagtcttggtagtagatttcatcttctcttatttttatcttttgtgttcttacattcactcaaccatgtaatattttttcctgggtctctctgtctctatcgcttgttatgatgtgtctgtaagagtctctaaaaactctctgttactgtgtgtctttgtctcggcttggtgaatctctctgtcatcatcagcttttagttacacacccgacttggggatgaacgaacactaaatgtaagttttcataatataaatataaaaaaaaacaaagcnnnnnnnnnnnnnnnnnnnnnnnnnnnnnnnnnnnnnnnnnnnnnnnnnnnnnnnnnnnnnnnnnngtcccaa

SEQ ID NO: 86368 - DNA, 1170 bp, Arabidopsis thaliana columbia
  unsure (1)..(1170): unsure at all n locations
cnnnnnnnnnnnnnnnnnnnnnnnnnnnnnnnnnnnnnnnnnnnnnnnnnnnnnnnnnnnnnnnnnnnnnnnccacgcgtccgcccacgcgtncgaacagctgcaagaagacgacagaaggggatgactcgagacattaacgacttttaaaactaagggacgaaccttaagcaaaagctcttgcattactcaaattcttctgccacttggtttgcgatggacagttctggagcagatctagatagaattgaggcacaaaggtcaatgttagtttctcatgatcaacggaaagatttctctcacagcggaggagttggcaccacgtcacctacgggcgacaccgaacctgtgccaaagttccgtactaaccttaaattgtcggatcttttcgctctccctggtgaagatgtcgagatgactccggagatttttggtggaatgagtaatggggaaaaagaatgtctggagaagttgagaagcaatggaacgccaatggaacgtgtcaagagcaatacaggagattcaattcttcatattgctgctaaatggggtcatctagaactagtgaaggagattgtctttgaatgtccatgccttctattcgagcaaaactcaagccgtcagacaccgctacatgtggctgctcatggcggtcataccaaagttgttgaggctcttgttgcatcggtaacatctgcttcagctagtctgagtactgaagagagtgagagactgaatccacatgttcttaaggacggagcatggaaatactgctctgtactacggccattgaaaggaccgctatttggcagttggctacctgtcttggtgaacccggccaaggatgctccttttcttggaaataacaaagggattaccttccttgtacgaagccgtagacgctggaaataaatttgaagaccttgtgaaagcaattttgaaaaccacagacgacaacgtggaccctgaagtgaggaagtttaacttagattcgaaattgcaagggaacaaacatcttgcacatgttgctttgaaggccaaaagtataggtgtccttgatgttattcttgatgaatatccaagtcttatggacgagcaagatgaagatggtaggacttgtctttcatacggagcatccattgggtattataaaggactatgcaacatctt

SEQ ID NO: 86369 - DNA, 362 bp, Arabidopsis thaliana columbia
actcgattgctctcaaaaaccctaattcccaacggaagattcctcctccgtcgtttcaacgagccggcgattacgacaccaccaaacgtcgtctgtttcagccgccgcttttcatccatcccacaagtcatcgagcttgaaatcgattctaaaaacgaagcggaagcagcaattctcaaaaagctaaacgaattcgtacgaaggatcatcgttcataattcgactccagattggcttccttttgcacctggctcttccttttgggtacctcctcatcagattacggctacaaagatcgccaatttggtcgataaggtgactaatccgttgacggaggaagagtctctttcgctttcgtctcc

SEQ ID NO: 86370 - DNA, 335 bp, Arabidopsis thaliana columbia
  unsure (1)..(335): unsure at all n locations
agggaccgggcctggaattcccagggtnaacccactgcgtccggccgcattttggttctgcaaatgtgtggagcttatggattggaacaaaaggtttganattgccacggatatagcaaaaggcatcgagtttnttcaccattgttgtnatccaattataatccatggagatattaaacctagtaacatccttctcgattctaatttcaaagccaaaatcggagatttcggtctcgcgagagtaaagtcggaggatttcgatactaggattctaattgnggaagaagataagagcaaggatgttgttgangntaaatgggtcgattcttgaggng

SEQ ID NO: 86371 - DNA, 694 bp, Arabidopsis thaliana columbia
tcgttgtacgcgtgggcggacgcgtgggggcgtatcccggttcgcctatcttgatgaagctcctcgtcttcatctttttatcaacttttgtagtcactaacgtgagctcggaaactaagtgccgggagttcaaatcgatcatcagtttcggagattccattgccgacactggaaacttgcttggcctctcagatcctaaagatcttcctcacatggcgtttccaccgtatggagagaacttcttccaccacccaactggtcgtttctccaacggccgcctcatcattgatttcatcgctgaattcttgggtttaccgcttgtgcctccattctatggatctcataatgcaaactttgaaaagggagttaatttcgcggtagggggagcaaccgctttggaacgttcctttcttgaagacagaggaattcattttccttacactaatgtgagtttaggcgttcagcttaatagcttcaaggagagtttacctagcatatgtggctctccttcagactgtagagatatgatagaaaatgctttgattctcatgggggaaattggagggaatgactataactacgcgttcttcgtggacaaaggcattgaagagatcaaggagctgatgcccctggtgatcactactatttcttctgcaatcacggagttgatcggtatggggggaagacacatttt

SEQ ID NO: 86372 - DNA, 377 bp, Arabidopsis thaliana columbia
ggtaattctctctatccagaagtggagttagcagtaaacgttggtctttgttgtgggtctgaaagtattagcgtcgctgtttccaagtaatcctaaatcagttcacaagaatctgatttgaacagattgtgatgttctgttttctttctcttttttccttttaattctcgcaatatgcaaaagtatgagtctttttacccgagaaaatagcagttttcccgagaaaataaaccagaggtccctaaagctaaagctaaaactaaaagcttaagtagtgtggattttctagatgccaagtttcgttttttgagccttttaagctcttttctggatttcgtttttctcgtttcgctctattcttcgccgagcaagtaatc

SEQ ID NO: 86373 - DNA, 526 bp, Arabidopsis thaliana columbia
  unsure (1)..(526): unsure at all n locations
gagtttgtcggctagaccgtcctcattggtggcttcagtcacgtccaatgctggtgcactcttttgtagaaaaggatcacgatgttaatccaatccatcttttcaaaattatatatataatccatccaatctaattaattaaaaagataaagaagaggatgcatgttgtccctggtatgtcaatttttcgttaccctttagtttttttttattgtggggagggttaaagtagtaagatggattcgatgtgtatactaaagttatgtgtggattccctttggaccaatgggtttctttaaaactttttggagtagggaccaatgtttatgttgtggtggggataatgtctgtacaattgctaagcgattattgttgatttcttatatattgtatcaacatcttaattattaacatccgtgtgttaacagaaaaaaaaaaaaaagnnnnnnnnnnnnnnnnnnnnnnnnnnnnnnnnnnnnnnnnnnnnnnnnnnnnnnnnnnnnnnnnnnnnnnnnnnnnngaatcg

SEQ ID NO: 86374 - DNA, 911 bp, Arabidopsis thaliana columbia
  unsure (1)..(911): unsure at all n locations
nnnnnnnnnnnnnnnnnnnnnnnnnnnnnnnnnnnnnnnnnnnnnnnnnnnnnnnnnnnnnnnnnnnnnnnnnnccacgcgtccgagacaagaacatgcaagtcaccattgcctttaatcactttggagaaggtcttgttcagagaatgccaagatgtagacatggatattttcatgtggtgaataatgattatacacattggcaaatgtatgcaattggtggaagtgcagctccaacgattaacagtcaaggcaataggtttcttgctccaaacgaccatgtctttaaagaggtgactaaatacgaagatgcaccacgaagcaaatggaagaaatggaattggagatcggaaggtgatttgttcctaaacggtgcgttttttacgccttcgggtggaggagcctcttcaagctatgctaaggcttcgagtttgtcggctagaccgtcctcattggtggcttcagtcacgtccaatgctggtgcactcttttgtagaaaaggatcacgatgttaatccaatccatcttttcaaaattatatatataatccatccaatctaattaattaaaaagataaagaagaggatgcatgttgtccctggtatgtcaatttttcgttaccctttagtttttttttattgtggggagggttaaagtagtaagatggattcgatgtgtatactaaagttatgtgtggattccctttggaccaatgggtttctttaaaactttttggagtagggaccaatgtttatgttgtggtggggataatgtctgtacaattgctaagcaattattggttaattctttaaaaaaaaaaaaaaaaaaaaaaaaaaaaaaaaaccaaagggcgaccgctctagaggatccaagcttacgtacgcgtgcgtgcgacgtcatagctcttctat

SEQ ID NO: 86375 - DNA, 293 bp, Arabidopsis thaliana columbia
tgttacggaccaagaaaggtggaacaccagtgaatacaaatgcggctgaaaaaattgtgagtatgttatagtttggaagttgtgacagtttggtttgtgatgattgttaggttagtgatggtttgttaaattggataggttagtgatggaacataaattggactggtttgtgatggttttgaaatgaatgtgataggcaataggttagccagtgattgtgtggactggtttgtgattgtgtgtgatggtttgcagaaaaaggcagctgagattgttagcagtggtccgtaaca

SEQ ID NO: 86376 - DNA, 583 bp, Arabidopsis thaliana columbia
  unsure (1)..(583): unsure at all n locations
aaaaagacttgtttgagagatctcaaggaagaagaagaaggggggaagcagataacatgtctgcgattgtttgcgggaagagatctctgttcgaggacttagccgccgcttctcctcccgtctccaagaaactccgttgcttttcttcatcttcttcgtctcgtttttctcctccgattcctccttcttcctcacttcttctcgatcacctcgccgcgattttccccgatatggataagcagattcttgagagggcaatcgaggaatgtggagatgaccttgattcagccattagatgtttgaatcagcttcgtttagaatctgccaataagaattctgattctgctacaaaccaatctcctgttgtaatccaggaaccaaatgttgaacctcaacagcaaggatcagccaaggagggaccaaatgtcttgaacttggatggtacagagtgggttgagcttttttgttaggggaatgatgaatgcttctgacatgaaagacgcaaagcccgtgttgcaaaagcattggaagctttgnggaagcaataatggacgactggnnctgcgaatgaaatccaacagga

SEQ ID NO: 86377 - DNA, 436 bp, Arabidopsis thaliana columbia
accgacgagaagaatatgactacggaggaggagtccctttctgcggcggaggagtccctttctgcggcggaggagggttacaatgtacagagagactattggcgtcaagcggaggaatccgatggtttcgatatagagaacattaaactaccaccaggtatgcatggacgggtcatgggactgattacctataactgtcaactttgttaccgttatccgtttcctgtcttggtcaaactttatgctaagtttgggcttcatcgttacaatttgatcaagggaacaagcttcgagctcgctgccttaatgaagttcaacatgttacaaaactatatgtcctctttctacatgactctgcttgcacatgatcccgatccagctgctagctcatcgcagaaaacctttcaggttcgagttgatgaacaaacaattggca

SEQ ID NO: 86378 - DNA, 509 bp, Arabidopsis thaliana columbia
  unsure (1)..(509): unsure at all n locations
ctcagatcgagtctcttaagaactcgatcattcgaaatcaactcgaagatcttcaattccatcaaactcaaggagtttcgtttctctgatttcttcgattgagataaggagtaaatggcgacagatgatttttttagcttgcagagagaatattggcgacaagtggcggaatccgatggtttcgatattgagagtgttcaaataccaccatctatgtatggaaggatcaatggactgattccccacaactgtgaaatcaatacgccgcttccttaccgtgtcttgggcaagcactatgctaagcttgggcttcatcgttacaatatgttgaaggggactaaattcgagttcggtcgcctaatgaaattcaacatgttacaaaactgtgtggcctctttctacataactttggaagcatacgattacggtgttcctggcacatcacatcctcaaacctttcaggttcgatttgctgaaaaaaatttggaagttggnttgccgggcctttt

SEQ ID NO: 86379 - DNA, 1496 bp, Arabidopsis thaliana columbia
  unsure (1)..(1496): unsure at all n locations
nnnnnnnnnnnnnnnnnnnnnnnnnnnnnnnnnnnnnnnnnnnnnnnnnnnnnnnnnnnnnnnnccacgcgtccgcccacgcgtccgcggccgcgtcaccgccaccaagacgagaagaatatgacgacggaggcgaattctacggcggaggagggttatagtgtacagagagacttttggcgtcaagcggcgaaatccgatggtttcgatttagagaacatctcacttccaccaggtacgaatggaattgtcatgggactgattccctacgactgtcaacgtgcaaggcattatccgtttcctgtcttggtcaaactttatgctaagtttgggcttcatcgttacaatatgttgaaggggacaagcttccagctcgctaccctaatgaaattcaacatgttaccgaactatatttcctctttctacatgactctgcttgcacatgatcccgatccagctgctggctcatcgcagaaaacctttcaggttcgagttgatgaacaacaatttggcactttgggtataaactgctccattgctagacctaaacacgaagtgtccaccaagacgcccttcatacctcactttcatggtggcgcattgggcgatggtatattcaaaggtgaattgcctgattgtctctcagatgatgctttgaatgcactgatggaggctgtctccaaagatgaattgcctgagcatgtcttagatgatgctttgtatgcacgggccggtggtatcttccaaggtgaattgcctgattggccctcagatgatgctttgaatgatggaaaacgattttacatggtgaaggaatcagagtggcaagccactgattggatttctatgtatttggaacttgtaattactacaactgataagtcgatcagtatcaagccagaagttctgtccaagttggagattgtgaaagtggcgatagaaactgctaccaaagatgaggagccgtctaatgagagactcaaagcctacagggcacatgtctacataacgtttaagggcttggcagagcctcgagcccatgagcgggtttttgagattggggagcatgttgaacgccaagctatagttagaagagtcatgggccatagaggagacttgactctcaagggtaagctttgtggtggtcaatatatcaaaaagcgttctctggctctcaagagtggaaaaaagtcccagaagtgtaaaaagcaagcgctcgtcggctaggcgttcgtatacatgggcgtctgcgtaatgttaagatccattttgaaaatgtggatcagataaataaactaagctattaattttgtgcgtttggattctttgacttatggttttatttaagtgtgacgctttttttcttttttaatacaatgagttaatctaaaaaaaaaaaaaaaaaaaaagggcggccgctctagaggatccaagcttacgtacgcgtgcatgcgacgtcatagctctactggagttcacaggnnnnnnnnnnnnnn

SEQ ID NO: 86380 - DNA, 2089 bp, Arabidopsis thaliana columbia
ccacaattcgcagccattttttactctcttcttcccctgagaacgacaggagaaagaataaaaaccctaaatttctttaatttcggcgcttcagattatcgttgttaaaggtttttgattgattttgtttaaatgggcgatcttgctatgtccgtagcagacatcaggatggagaatgagcctgatgatttagctagtgataatgttgctgagattgatgtgagtgatgaagagattgatgctgacgaccttgagagacggatgtggaaagatcgtgtcaggcttaaaagaatcaaagagcgacaaaaagctggctctcaaggagctcaaacgaaggagacacctaagaaaatctctgatcaagctcagaggaagaaaatgtctagagctcaagatggtatccttaagtacatgttgaagcttatggaagtctgcaaagttcgcgggtttgtctatggtataataccggaaaagggcaagcctgtgagtggttcctctgacaatataagagcttggtggaaagagaaagtgaagtttgataagaacggtcctgctgctattgctaaatacgaagaggagtgtttagcgtttgggaaatctgatgggaataggaattcacagtttgttctccaggatttgcaagatgctactttagggtctttgttatcttctttgatgcaacattgtgatcctcctcaaaggaagtatccgttggagaaagggacgcctccgccttggtggccaacggggaatgaagaatggtgggtgaaactcggtctgcctaaaagccagagtcctccttaccgaaaacctcatgatctcaagaagatgtggaaggttggagttttaacggcagtgatcaatcatatgttacctgatattgcaaagattaagaggcatgttcgtcagtcgaaatgtttacaggacaagatgacagctaaagagagtgcgatttggttggcggttttgaaccaagaggaatctttgattcagcagcctagcagtgacaatggaaactccaatgtgactgagacacatcgtaggggtaataacgctgacaggaggaaacctgtggtcaacagtgacagtgactatgatgttgatgggacagaggaagcttcaggttcagtttcatctaaagacagtagaagaaatcagattcaaaaagaacaaccaacagccatctcacattcagtaagagatcaagataaagcagagaaacatcgcagaaggaaaagacctcgaattagatccggaactgtcaatcgacaagaggaagaacaacctgaagctcaacaaagaaacatcttacctgatatgaatcatgttgatgcccctctgctagaatataacatcaacggtactcatcaagaggacgatgttgtcgacccaaatattgccttaggaccagaggataatggtctggaactagtggttcctgagttcaataacaactatacttatcttccacttgttaatgaacaaactatgatgcctgtagacgaaaggccaatgctttatggaccaaaccctaaccaagagcttcaatttgggtcagggtacaacttctacaatccctctgcagtgtttgtacataaccaggaagacgacattctccatacacagatagaaatgaatacacaagcaccacctcacaacagtgggttcgaggaggccccaggaggagtacttcaaccccttggtttactcggaaatgaagacggtgtaacagggagtgagttgcctcagtatcagagtggcattctgtctccattgactgacttggactttgactatggtggttttggtgatgatttctcatggtttggagcttagtgtcttgccattttttttgggagattacatagttcaaaaggacatggcaatagtctggctagtacagttactttctcttcttcatttcttctgatcttatattcttcctctttttttcttataatattttcttagatttgttaagagaaacaattttccttttgaataagttgccagaagaactgctttgcccgttgtaatggtctctagggaaagcagttagcgtatcatcatttgtaaatttacctgtgag

SEQ ID NO: 86381 - DNA, 821 bp, Arabidopsis thaliana columbia
  unsure (1)..(821): unsure at all n locations
nnnnnnnnnnnnnnnnnnnnnnnnnnnnnnnnnnnnnnngcggttgcgggtcgcggttcgggggtcgagccacgcgtcgcgcgagagatcttaacacaaaacaaagcaaacaccaaaaaaaacagagatgggtttggttacagatgaagtgagagctagggcagagaaatacacaggagatgagatatgccgtgagaagacaaaggagtttctcaaggaagtttctatgcctaatggtttattgccattgaaggacattgaagaagttggttacgacagagagacaggtattgtctggctgaagcagaagaagagcatcacccacaagtttgaagccattggtaaacttgtctcttacgccaccgaggtcattgcacaggtggaggtcggaaagatcaagaagcttaccggtgttaaggccaaggagcttcttatttgggtcactctcaatgagcttgtcttggagcagccgacaagttcagggaagatcaatttcaggacaccaactggtctgtccaggactttcccagtgtctgctttcgttgttcctgaagttgagaagcctgcaacggagaagaacaatggaaccactgaggtcaaagaagctgttgcagtcacagatgcttagtctctctaatcttattaatcttatccttccaatcatgaattactttctgctatttgctgcttaatttccttttatcaataagatgatacaatttcagatttggaattaatagatacctgtagggatcaatatccttttnnnnnnnnnnnnnnnnnnnnnnnnnnnnnnnnnnnnnnnnnnnnnnnnnnnnnnn

SEQ ID NO: 86382 - DNA, 476 bp, Arabidopsis thaliana columbia
  unsure (1)..(476): unsure at all n locations
aaagaagagccaagtcgaaacgatggagtttgaggttaagaagttatttgaaaccgtgaatggaatccacgatgagatgttctatctccgcgacagggaagaagaaatgcacaatctgaacatagcgacaaattcgaagatggcatggttgagtttcgtgtcgcttgcagtttgtttatcggtcgcaggtcttcagttttggcacttgaagactttcttccagaaaaagaagcttatctgaaaacccattaaccatcttcctgaggggcagagatttgtatttgaaaaccccatggctataggctttatatacaactactcgacctcactttttcattttgttactgaatttttcgggaacaggctttttttcctgtctgctatggtatgaacttctcattnaccctgcaaacttcaattccaatccatgtaaccaaccaattaaaggtttccttatctcacanctcttttaaagg

SEQ ID NO: 86383 - DNA, 461 bp, Arabidopsis thaliana columbia
  unsure (1)..(461): unsure at all n locations
ttggaatctatgatggccatggcgggcctgagacgtcgcgatttgttaatgatcacctttttcagcatctaaagagatttcctgcagagcaggcctctatgtcggtggatgtaattaaaaaggcgtatgaggcgacagaagaaggtttttnaggggttgtgacaaagcagtggccaactaagccacagattgcagcggttgggtcttcctgcttggtgggtgttatatncggagggatgctttacatagctaatnttggggattcccgtgcagttcttggaaggnctatgaaggcgacaggtgaggttattgcccttcaanctctctgctgaacataatgtgnagtatagagtctgttagacaggagatgcacttccttgcancccagatgacctcggcatattgncaatgttnaangcccaattntntggcgttgttaaaggncccttnattcaagatat

SEQ ID NO: 86384 - DNA, 401 bp, Arabidopsis thaliana columbia
  unsure (1)..(401): unsure at all n locations
accacgcgtccgattgacctgacagtttcttacgccggcgagcgaactcgacgaagaagacaacttccttttgttgcacctgtgagtctgcgaccatggctatgcaatctggtattgggttatcgaagattttgattctagctggagcaggttatactagtacgattctggttaagaatgggaagatggcagatattttgggtgagcttcaggctttggttaagcgatttgagaaatctggagatcatgtagatgatgattctgatgccatgactactcagatgcaacgattagcaatggaggttcggcaattggcttcgtcgcggcagataactgttatgaatggagctcaaggagctgattttacaccgtttattgtcncggcagcgacattgggagca

SEQ ID NO: 86385 - DNA, 547 bp, Arabidopsis thaliana columbia
  unsure (1)..(547): unsure at all n locations
aagtggtaggaagaatagcagcttcggcgagtcagacggtgcacaagacttgctcacacatgcttggaggctttggactaacaaaaaagcattagacctcgtggatccacttatagcagagaattgccagaatagtgaagtggttcgatgcatccatatcggtcttttatgtgttcaagaagatcctgcaaagcgtccggcaatatcaaccgttttcatgatgctcactagtaatactgtgaccttaccagtgcctcggcaaccagggtttttcattcaatgtagagccgtaaaggacccgcttgattcagatcaagtctaccacggccaagtcttttccagcggtctattgatgatgcaatcgatcacaggatttatatccgcgctaaatatgaccttaaaccttcatgcttggaatcaggttacggaaatgtttacataatttgtaggattgtgggtgtggcaaccctataaatttttaaggtttaaatttgggtgtaaacccatgggttggttgctttggtttttaaaaatggtaanttggctt

SEQ ID NO: 86386 - DNA, 657 bp, Arabidopsis thaliana columbia
aaaaattacttctctttccttcgatcatcgtcttcctctggttctcagatctttgaatcgagcagaagcaattttaaatctcctatcagtgaatttttattactggagaagtaataaggcaaagatggtgaaaatgacattgatagctcgtgttactgatgggttacctctagctgaggggctcgatgatggacgtgacttaccggattcagatatgtataaacaacaggtcaaagctttgtttaagaatctgtccagaggtcaaaatgacgcttcaagaatgtccgttgaaactggcccctatgttttccattacatcatagaaggacgtgtttgctacttgacaatgtgtgaccgctcttacccaaagaaactcgctttccaatacctgggaggatcttcaagaatgaatttgaacgtgttcaatggggcctaaacattgaaacagctgctcggccttatgcctttattaaatttgatacattcatacagaaaaccaagaaactgtaccaagacactcgtacgcaacgaaacatcgccaagttgaatgatgaactctatgaggttcatcaaataatgacccggaatgtgcaagaagtcttaggtgttggtgaaaagctggaccaggtgagcgagatgtcgagccggttaacatct

SEQ ID NO: 86387 - DNA, 430 bp, Arabidopsis thaliana columbia
atctttcttcctcttctctcattgaaatcgaacgaggatggggaagaagaaatcgaaggtaacggagccggaatctcaaaacgatgaatctcagacaatcttctccactctcttctccggcgaggttgaaagctctggctttgcgagtctcttctccgctgataaccctttccggcgaaaacaacctcaagaaatcaaagagtcgtcaattcctgatgagaagaaaggggataaacgaaatgcagagaacgaagaagaagaagaagaaacagatttgcctgtgaagacgaagaaatctaaaaaggaaaaaaagcttacagattccggcgacgagaaagagacgatttcggaggctgtagaagaaagtgggttggtttcaaagaggaagaagaggaagagagatgagattgagaacgaatacgagacgaag

SEQ ID NO: 86388 - DNA, 373 bp, Arabidopsis thaliana columbia
gcgagagaccgatagcgaacaagtaccgcgaggtaaagatgaaaaggactttgcctgagaaaaccgcgaggaagaagaaacggctcaagcagatcaatatgagttttgttaagaaaccgcacaataagatgagacggagaatgtgatgctgatgaatcttcaacatctgatagaattttctaaagattattgtctttgtcctttcctttttaagatattgtcaagagtactcatcattttgcttgatcatgagcaaattgtcccaataatcttttgttttgtctcagtgtaacgtttactaagagttcatgcttggctccaagggtccgggaggtaaaattacggttccttgggtaatttggaaaaaaaaaaa

SEQ ID NO: 86389 - DNA, 536 bp, Arabidopsis thaliana columbia
  unsure (1)..(536): unsure at all n locations
cccgggaggacccactggggcccggagggattacccgctgagtttaagcatatcaataagcggaggaaaagaaactaacaaggattcccttagtaacggcgagcgaaccgggaagagcccagcttgaaaatcggacgtcttcggcgttcgaattgtagtctggagaagcgtcctcagcgacggaccgggcctaatttccctggaaaggggcgccagagagggtgagagccccgtcgtgcccggaccctgtcgcaccacgaggcgctgtctacgagtcgggttgtttgggaatgcagccccaatcgggcggtaaattccgtccaaggctaaatacgggcgagagaccaatagcgaacaagtaccgcgaggtaanagatgnagaaggggaaagagagtgagagcaaagatttggtggtggaagcaggagagcaatgttnaaacaagggacagttaaaagagtttgnattcaatggttttggttcncaaggtaangannggnnnccaagcanaagtgattgntttacgcgcactttttc

SEQ ID NO: 86390 - DNA, 624 bp, Arabidopsis thaliana columbia
attttggtgcagtgaaggttcaaagctggcatgcatgatgcatataataactgctctggacctaatacttactacgcatttaaattaatatttatggataatatggttaataaataaggaacttctatttatatcacaaaaggtcactggtcttcttcgtgtgacttcaccactttctcatctcccacaaaaatggctctctcacttctttcagtctttatctttttccatgtctttaccaatgttgtttttgctgcttcaaatgaggaatccaacgccttagtttctttaccaacgccaacacttccatcgccatctccggctaccaaaccgccgtcgccagctctcaaaccgccgacgccgtcgtacaagccacccacgctgccaactactcctattaaaccacccaccacaaaacctccggtcaaacctccaactattccggttacaccagtaaaacctccggtttcaactcctccgatcaaactaccgccggtacaaccacctacgtacaaacccccaacgccaacagttaaaccaccgtccgtccaaccacctacgtacaaacccccaactccaacggttaaaccacccactacatcaccggttaaaccacccactacg

SEQ ID NO: 86391 - DNA, 948 bp, Arabidopsis thaliana columbia
  unsure (1)..(948): unsure at all n locations
gagttttccattttccaanctaattccctccttaaggacaaanttgacttcncccgttcgncctttnnanctngtgaccccccggcttcaggggaaaagaacttacaaggattcccttagtaacggcgaccgacccgggaagaccccagcttgaaaatcggacgtcttcggcgttcgaattgtagtctggagaagcgtccttcagcgaccggacccggccctaagttcccctggaaaaggggcgccagagagggtgagagccccgtcgtgcccggaccctgtcgcaccacgaggcgctgtctacgagtcgggttgtttgggaatgcagccccaatcgggcggtaaattccgtccaaggctaaatacgggcgagagaccgatagcgaacaagtaccgcgaggtaaagatgaaaaggactttgaaaagagagtcaaagagtgcttgaaattgtcgggagggaagcggatgggggccggcgatgcgtcctggtcggatgcggaacggagcaatccggtccgccgatcgattcggggcgtggaccgacgcggattacggtggcggcctaagcccgggcttttgatacgcttgtggagacgtcgctgccgtgatcgtggtctgcagcacgcgcctaacggcacaccttcgacatcgtcgagactcaggagagctacaaggaggccatgatcatggacgttggtgccgaggagaacaacgcaaattgcaagtgcaagtgcggctcctcttgcagctgcgtcaactgcacttgctgccccaactaatgaagcttctttaatcaaaatgtaatatgaataaaagttgatgtgggctcatctattgagctcatgtctctcttattactactctctagtatggtgtgatgtaatgggttatgacccttctttcccttccctataaaactaaagaaacttgcaaaaaaaaaaaaaagaa

SEQ ID NO: 86392 - DNA, 701 bp, Arabidopsis thaliana columbia
  unsure (1)..(701): unsure at all n locations
ctcactattagggaaagcntggtaccgcctgcaggtacctggtccggaattcccgggtcgacccacgctngtccgggcnngggattacccgctgagtttaagcatatcaataagcggaggaaaagaaactaacaaggattcccttagtaacggcgagcgaaccgggaagagcccagcttgaaaatcggacgtcttcggcgttcgaattgtagtctggagaagcgtcctcagcgacggaccgggcctaagttccctggaaaggggcgccagagagggtgagagccccgtcgtgcccggaccctgtcgcaccacgaggcgctgtctacgagtcgggttgtttgggaatgcagccccaatcgggcggtaaattccgtccaaggctaaatacgggcgagagaccgatagcgaacaagtaccgcgaggtaaagatgaaaaggactttgaaaagagagtcaaagagtgcttgaaattgtcgggggcgaacctgacgtggaagaggaggaggacgtggtgngtgatggtgggtttcaacacagatcagatggaccaccagtccaggcagctgcttgagagtgaggtttctcttacacaaacataaaaagaagaaaaaagccccaagtcgtggatgttnnttttctatctcctttgtctctcactttctttctatgtttgcttcttctgtccatcaagaagacatgttt

SEQ ID NO: 86393 - DNA, 585 bp, Arabidopsis thaliana columbia
  unsure (1)..(585): unsure at all n locations
atagaagagctttgacgtcgcatgcacgcgtacgtaagctcggaattcggctcgaggaactcaaacacttcgtaactgaaacatcctttaaagccttttcaaaaactcaatcatgtcaagcaactgcggaagctgcgactgtcctgacaagacccagtgcgtaaagaagggaaccagctacaccttcgacatcgtcgagactcaggagagctacaaggaggccatgatcatgggcgggtggtgccgaggagaacaacgcaaattgcaagtgcaagtgcggctcctcttgcagctgcgtcaactgcacttgctgccccaactaatgaagcttctttaatcaaaatgtaatatgaataaaagttgatgtgggctcatctattgagctcatgtctctcttcattactactctctaggatgggtgtgatggaatggggttatgacccctctttcccttccctataaaacttaaaggaactttcaaggttnaaaaaaaaananttaaaaanaaagggggggccgctttngggggtccaggtttnggccggggtnattnagnggnnaanggttttttttggggcccnaaat

SEQ ID NO: 86394 - DNA, 671 bp, Arabidopsis thaliana columbia
  unsure (1)..(671): unsure at all n locations
nnnnnnnnnnnnnnnnnnnnnnnnnnnnnnnnnnnnnnnnnnnnnnnnnnnnnnnnnnnnnnnnnnnnnnnnnnccacgcgtccgcggacgcgtgggtgcgagaagacgacagaaggggagaacaacaacaacaacaacaaacaagaactcaaacacttcataactaaacatcctttaaagccttttcaaaaactcaatcatgtcaagcaactgcggaagctgcgactgtgctgacaagacccagtgcgtaaagaagggaaccagctacaccttcgacatcgtcgagactcaggagagctacaaggaggccatgatcatggacgttggtgccgaggagaacaacgcaaattgcaagtgcaagtgcggctcctcttgcagctgcgtcaactgcacttgctgccccaactaatgaagcttctttaatcaaaatgtaatatgaataaaagttgatgtgggctcatctattgagctcatgtctctcttattactactctctagtatggtgtgatgtaatgggttatgacccttctttcccttccctataaaactaaaggaacttgcaaggttaatttgaaaagatggtttctttttattatcaatcgcatcagcatgggattttgtatcaaatcgatcccattatctccttgcttttatacccctnnnnnnnnnn

SEQ ID NO: 86395 - DNA, 523 bp, Arabidopsis thaliana columbia
gtcacgctaaactttgcgtgcctcgaaggagaaactaatctggttgctctagagaggcttgttgctaggtctccaaacctaaagagtctgaagctaaatcgtgcagtaccgttagatgcactcgcaaggttaatggcgtgtgcgccgcagatagttgacttaggagtagggtcttatgagaatgacccagattccgagtcttacttgaaactcatggctgtcataaagaaatgcacctcgttgaggagtttgtcgggttttctagaggctgctcctcactgtctctcagctttccacccaatatgtcataacctcacctccttgaatcttagttacgcagctgagattcatggtagccaccttattaagcttattcagcattgcaagaaacttcagcggttatggattttggatagtataggtgacaaagggcttgaagttgtagcttctacatgtaaagagttacaagagcttagggtttttccatctgatttactcggtggaggcaacacagctgtgaccg

SEQ ID NO: 86396 - DNA, 531 bp, Arabidopsis thaliana columbia
  unsure (1)..(531): unsure at all n locations
aaagcatctaacttacaattaaagacaatccatggcgatcagaatccctcgtgtgctgcaatcatcgaagcagattctccgacaagccaaactgttgtcatcatcttcttcttctagctctcttgatgttcccaaaggctacttagcggtttacgtaggagaacaaaatatgaagagatttgtagttccggtttcgtacttggaccagccttcatttcaagatctattaagaaaggcagaggaagagtttggatttgatcatccaatgggtggcctcacaatcccttgcagtgaagaaatttttatggatcttgcttctcgcttcaactgatcatgactcactcggtaaccttactttttggcaattgattttgggaccattttgttttcccaattaaggtttcctccaaggggttgggatgccctttgaaccagatctntcccttgaaaggggaccaggggctttgtaccactctttttcccnaacttcaagggggttgggctcaaacctattaaaaccntcattttggc

SEQ ID NO: 86397 - DNA, 503 bp, Arabidopsis thaliana columbia
  unsure (1)..(503): unsure at all n locations
atgactcaaccaccaccatatcctcctccaggcgttaactaccctactccagctgggaatttaccaaattaccctcctccggttgggaatatacctaactacccttctccaccgtatggtgccgggagacagtagtggcagcagcttctatggccctccaccgccgaatgctattttgccgtacttcccttactactttagaaaacctcctcaccaaacggatcaaacgtcctcgtctttcacacgtggcggttccagggaaatgggccggtgagggatcgtagccgtggcaaatctttgtggttgttggagttctcgggtaacatttctggtttcataactttaattaaactacggaaactcttgtttgggggggttttttttgtggggtaaatgtatgaaagggtattttcgaaatcctttaggattatcctgagggggnctttttgcagaaaaaattgttggtttcctaaaaccnttttcgtgggtttnttggttttttt

SEQ ID NO: 86398 - DNA, 491 bp, Arabidopsis thaliana columbia
cctgcaggtaccggtccggaattcccgggttgacccacgcgtgcgagagacagagtcattccactatggatgatagttcttcaacttgttctaatgattctatccgatcgggggtaaccaatgggtcctaccaagggaattccttgaatttccgaaaccagaagtcgccgaacaaaggaaagaaccaacaagtgcctgcaatgactgatgcccacagtttagcgagtgaaacagatgatcaaccctcaacacttggaacagaccccaagggtcagaattattcttccgaggcaagcaacgttggtgaatctgattgggttgttgtctcccacatccaggagccagagggttctcgaaatcgtattcctgttgggagggaacgcaaaacggttcaatccattgtgaactcggtcgacatggatcgacctaaagagaaaagcactgctgtactttcttctcccagaaatgttgccaagaatccttcaccatta

SEQ ID NO: 86399 - DNA, 526 bp, Arabidopsis thaliana columbia
  unsure (1)..(526): unsure at all n locations
nnnnnnnnnnnnnnnnnnnnnnnnnnnnnnnnnnnnnnnnnnnnnnnnnnnnnnnnnnnnnnnnnnnnnnnnnnnnccacgcgtccgaaacggagagaggcggagaggagaaggaagacggcgtgaagcaatggtgtcgctgaagatccagaagcggctcgccgcatccgtaatgaaatgcgggaaaggaaaagtttggctcgaccccaatgaatcgggcgatatctctatggccaattccaggcagaacattaggaagcttgtgaaggatggtttcattatcaggaagcctactaagatccactcacgttctcgggctagggctttgaacgaggccaagcgaaagggtcgtcactctggatacggtaagagaaagggtacaagagaggcaaggctaccaaccaagattctttggatgaggagaatgagggctgtgagggcgtttcttgagcaagtaccgtgaggtcaagaagattgatagggacatgtaccatgacatggtcatgaaaaggaaggggtatttttt

SEQ ID NO: 86400 - DNA, 499 bp, Arabidopsis thaliana columbia
caagaaaataaaaataaaaatggaattagttgaagagaccattcctaaagaagggaaaaagatgggagaaagaattgtggtcgacaaagcttatctttaccaagaagacaaaccactcaccgtctgcaagacttctctcttctacaccggcgatggcttcgccgcctatgactgccgtggtgatatcatcttcagggttgattcttatggacctgacacaagagataacgatgagattgtcctcatggacgcgaccgggaagtgtctccttaccgttaaacgaaagagaccaactctacaccaaagatgggaaggttttctcggcgagagatcggaaggtcagaaaccgatattcagcgtccgtagatcgtcgataatcggacggtgtacgatggaagtagaagtttacgacggaacaggagaagagtacattatcgatggagacttctcgcaacgaagctgtctcatatacgacacgaagaaatgtactgtggctgag

SEQ ID NO: 86401 - DNA, 1464 bp, Arabidopsis thaliana columbia
agcgtatcttctttccaaaagttagcgttttcgtctccgtccccaaatctctcagctaccttaaatcagaattctagggttcttccgattagggtaaaatcgaatccagatttcccaaaattctgatctttgatttataaaagatgtctcaaaacgggaagataatcccaaatctggaccaaaacagtacgaggctcctcaatctcacagttctccagcggatcgatccatacatcgaggaaatcctcatcacagccgctcatgtcactttctatgaattcaacattgagctcagccaatggagtcgtaaggacgttgaaggatctttgtttgttgtcaaaagaagtacacaacctcgatttcagtttattgtgatgaatcgtcgtaatacagataatctggtggagaatctcctgggagattttgagtatgaagtacaaggtccatatttactttaccgtaatgcatctcaagaagtaaatggcatttggttctacaataaacgtgaatgcgaggaggtagcaactcttttcaacagaatactcagtgcatattccaaggttaaccagaagccaaaggcctcatcttcaaagagtgagtttgaggaattggaagctaagcctacaatggcagttatggatggtcctcttgaaccatcatcaactgctagggatgcccctgatgatcctgcttttgtcaacttctttagctcaacgatgaatcttgggaacactgcgagtgggtcagcaagtggaccttaccaatcatcagcgattcctcaccaacctcaccagcctcaccaacctcaccaacccaccattgctcctcctgtagcggcagcagcacctccacagatacaatcaccaccgcctctacaatcctcctctcctctgatgactctctttgacaacaaccctgaagttatcagcagcaactccaacattcacacagatttggtgacgccgtctttctttggccccccacgaatgatggcacagccacacctcattcctggtgtatctatgcccagtgctcctcctctcaatcctaataatgcgagtcaccagcagcggtcatatggtactccggtgctccagcctttcccacccccaactccaccaccatcactcgctcctgcacccactggtccggttatcagcagagacaaagtgaaggaagcccttttatccctgttgcaggaggatgaattcattgacaagattacccgaactttacaaaatgcacttcaacaatgaagctgcgctggtcagcatctacgtgtgggatagtggctgtttgatctagaatgtgtagttaaaatgtagttttgttccctctgaaagtgttgttggaaccttataagatactgcactgccccctttgtttaactcttggaattactttttcattttatctactttcaagtttttaaaaaaaaaaaaaaaaaaaaaaaaagagcggccg

SEQ ID NO: 86402 - DNA, 697 bp, Arabidopsis thaliana columbia
aatgaattgggcaaaattccgtgaaactgggagcccagaagacaccgacatgtcttctactccgatctcgtccgacacgacggcggtgtccaaagtgatcgatccaaattacgtattaatggttgctgatttcttcaaagctatttccccagacgaatcttgcaacgatttcacctctttcgactctttctccgtcttatttcaaaacaataccagagctctctccatcgcacgcggccgtgtctcgtgctccgtcaccgtcacgccaggcatatccaatttctttaaggggttacatggaggagcggtggcatcaattgcagagagagtagcgatggcttgtgtgaaaactgttgtgtctgaagacaaacatctgttcattggtgaattgagtatgtcttatctctcttctgctcctatttcgagtgaattgttggtggagggaacggtggtgaggactgggaggaatctgtcggtggtgactgttgagttcaagatcaaggagaccatgaaagtcacttacctatctcgtgctactttttaccattctcccatctctaagctttaaagctttttcacatgctcagtgatcttttgctgatctatttacattcttctgttcaataaaacaagattctgtatacagatattactgtctttaatcagtttatacaacactactacattatcatccaaa

SEQ ID NO: 86403 - DNA, 930 bp, Arabidopsis thaliana columbia
  unsure (1)..(930): unsure at all n locations
acgcgcannnnnnnnnnnnnnnnnnnnnnnnnnnnnnnncgcctgcaggtaccggtccggaattcccgggttgacccacgcgtccgtacggctgcgagaagagacagaagggggccctccatctttcttcgtgattgagagaatcttcaacgaaagaaagcaactttttttgggtgaaattcacagaacaaccaaggtttttcttcttcttcttcttctccagttcctacagaatcatgcctgacaagaacatcgtagaggacgttatcggtgatttggtggataacttcacggagactgttcagaagaacgaacatggttcctccttcttcgaacaagaagattccgtcagttctcgtttcaaccgtttgtttgatcgccagaagccaattcatcatgtcttaggcggtggcaaatctgctgatgtgttgttatggaggaacaagaagatctctgcaagtgttttgatgggagctaccgcaatttgggtgctttttgaatggatcaatttccatttcctgcctctcgtttgctatgccctcttgcttggtatgattgcacaattcgtttggtctaacgcctctggattcttanaccgctcacagtctagagggccctccctagttcttccaaaggatttctttgctggagtcggggtgggccgtggaaaagaagttaaccgcggtttggtgtttcttcaggacttggcttgtaaagggaatttgaacaagtcctattggtgtattcgactatggtagctgcatgggtcggagcttgtgcatttcccaactgtttgatatccggttgtgggccccccatgccggttctttgaaagatcagacaaacggatggttttggatctatgatctgaattatatcttacagaactgaactggttctataaatcaagggagttgatagaacgggtgc

SEQ ID NO: 86404 - DNA, 548 bp, Arabidopsis thaliana columbia
  unsure (1)..(548): unsure at all n locations
tcggcttnnncccccggttganaccccngttccctnaattcccccgnacgggnttgtccccacncgttccgggngattggtgatctggtgcggttgacccggacccgaggagagtttagccccacgggtcgtcctaaggtgacaagtccaagttcgaccccagtcaataaccgggcgtttgtcacaagtgttttagtccaagagtgagtggaatcaggttgggtcagatgagtcctcgagtcgtcgggaatagtccaaagccggcgagttgtgggaggagtcccttgaacccgtcgtcatcgaactgagattatatattcaggaagcttaataaaacaactaatctaatgaggatggattaagaatgtttaattagttaattaatttgatctttagctcttgaaaaagaaaagagcttcttgaatctctctttagtttatgttttgtgtgtttaatcccctttcgtggtgtttcatcttcagtcttatgtaaaatactaaaatgtctgtcttatttcgttatatatgtaaaattcgttaaatattttc

SEQ ID NO: 86405 - DNA, 777 bp, Arabidopsis thaliana columbia
  unsure (1)..(777): unsure at all n locations
tacgactcctatagggaaagccggtacgcctgcaggtaccggtccggaattcccgggtcgacccacgcgtccgccagtattaagttttttttttaataattcagaattgaaagcaaaggaaaaagaagaaatcgaaatcggaaactgtatattgttgttcttcgattcctcctcgctctacgccgcgtcctctctctcaaattcatcggaagcaaccttcttctcccatcatcgcctgaatccaatggcaacgataaggaacttgaagataaaaacatcaacatgtaaaaggattgtgaaagagcttcactcttatgagaaagaagttgagagagaagcggctaagactgctgatatgaaggacaaaggtgctgatccctacgaccttaaacaacaggaaaatgtgttgggtgagtctaggatgatgattccggattgccacaaacgtctcgagtctgcattggctgacctcaagtccactttggcggaatttggaagagaccgggttgagaagggaaggtccagaggttccgaaggcttccaaagaaagacagtcgcggatgtggagaagcagtttcccactgaagatgcctgatttagccagcgatgagtgttaaatctgtattctgagaatggctatcatctgtaagaatctttatatctaaggttgcttggcgactgtatacactananaaaaaaaaaaaaaaaaaaaaaaaagggcggccgctctagaggatccaagcttacgtacgcgtgcatgcgacggcatagctcttc

SEQ ID NO: 86406 - DNA, 845 bp, Arabidopsis thaliana columbia
  unsure (1)..(845): unsure at all n locations
ctcacttagggaaagctcggtacgcctgcaggtaccggtccggaattcccgggtcgacccacgcgtccgaaagagaagtcgaaatgccagtttcagctccatctccgcctcgtcttcattctccgttcattcactgtcccatcaatttcactccttcttctttctcggcgaggaatctccggtcgccgtcaacatcttatccccgaatcaaagctgaactcgatcccaacacggtagtcgcgatatctgtaggcgtagcaagcgtcgcattaggaatcggaatccctgtgttctacgagactcaaatcgacaatgcggctaagcgagagaatactcaaccttgttttccctgtaatggcaccggagctcagaaatgcagattgtgtgtgggaagtggtaatgtgaccgtagagcttggtggaggagagaaagaagtctcaaactgtatcaactgtgatggtgctggttccttaacttgcactacttgtcaaggctctggtgttcaacctcgataccttgatcgaagggagttcaaggacgatgactaaataccttgctctaaggaacatttcttttcttctcccttctcacatttcttcattggacaatggctgttttgttccccaaacatgttgagagaacatcatgacatggatattgtaattgtgaaaaaaaacccccagagttcaatcaaatgtttttttttgtnnnnnnnnnnnnnnnnnnnnnnnnnnnnnnnnnnnnnnnnnnnnnnnnnnnnnnnnnnnnnnnnnnnnnnnnnnnnnnnnnnnnnnnnnnnnnnnnnnnnnnnnnnnnnnnnnnnnnnnnnnnnnnnnnnnnnnnnn

SEQ ID NO: 86407 - DNA, 1436 bp, Arabidopsis thaliana columbia
  unsure (1)..(1436): unsure at all n locations
ctctcttttctcctcaccttctctctctcaacatctctctctttctctgtcttctctctgtctcaacgagaatatgactaaccagaatgtcatcgtttccgacaggaaacccatcttgggtttgaaaaccatcactgtctctgtctctaactctcctctgttctctaattcctttcccacttactttaacttccctcgtcgaaagctcttgaaacttcttgaagcagccgacaaaaacaacttagttgttgctccaaagattacgtctatgatcgattccatgcgtgattcttcccctacacgtctcagatcctcttcctatgactctgattcagataacgacgacaaaacatcttggatcgttcgttttccttcggctttaaatatgtttgatgagattgtgaatgctgcgaaagggaaacagattgtcatgtttcttgattacgacggaactctttctcccatagttgaagatcccgacaaagctttcataacccatgagatgagagaagtcgtaaaagacgtggcttcgaatttcccgactgctattgtcaccgggagatccattgagaaggttcgtagttttgtccaagtaaacgagatttactacgccggaagccacggcatggacattgaaggtccgaccaacgaaaatagtaacggccagagtaatgaaagagtgctattccaacctgctcgtgaatttttaccgatgatcgagaaggtggttaatattttagaggaaaaaacaaaatggatccctggggctatggtggagaacaacaagttttgtctgtccgtacattttcgacgtgttgatgagaagagatggcctgcattagctgaagtagtaaaatcagttcttattgattatccaaagctgaaactaacccaaggtagaaaggtacttgaaatccgccccacaatcaaatgggacaagggccaggcactcaattttttactaaaatcattaggatatgaaaattcggatgatgttgtgccggtgtatatcggggatgaccgtactgacgaagatgcgtttaaggttttacgtgaaaggggacaaggttttgggattcttgtctcaaaagtaccaaaggacaccaatgcctcttattctcttcaagacccttctcaggttaacaagtttctggaacgtttagtagaatggaagaggaagacagtgggagaagagtgaaagacatgcaacataattacacaaataacacctgagttttgagtagattattaatttatataaacaccctttttaaattagtagatgcctggagggtgtttcggccagaagttttcttttaatctacatcgaaccgaaaattgtaaatttcgtgtaacgatttagaaatggaaaaatatattaataatttactcattcttatttgaccnnnnnnnnnnnnnnnnnnnnnnnnnnnnnn

SEQ ID NO: 86408 - DNA, 635 bp, Arabidopsis thaliana columbia
  unsure (1)..(635): unsure at all n locations
attttttaagtcggaacctgaagtattttagtccgtttgtgataaagaaaaccgagactgtaccggtttatcttcagacccggttgtttgtccggtttggtaaaattagaacctaacctttttatccagaactggagactttggaagaactgtagaagtgttgttctcttcgtatcgtcctcaatcctcatggagactattatcaggctgttttgagcaaacgctgtgataaagaggctttctttcttgctagcaagtacacacgagtgacatggcggcatcaacttcaacccgattccttgttctgctcaaagatttttctgccttcagaaagatatcatggacttgtgctgcaactaattttcaccgccaatctcgttttttatgccatgttgcgaaagaagacgggtctcttactcttgcaagccttgatttggggaacaaaccacggaaatttgggaagggtaaggcgatgaagcttgagggaagttttgttactgaaatgggtcaaggtaaggtaagagcggtcaaagaccggtaaaaattgaaaagttntccaagggaaaaaaggccnnctgngatnagnggctnccntttggttttnttncaaaaacccntttnngggggctttgccc

SEQ ID NO: 86409 - DNA, 530 bp, Arabidopsis thaliana columbia
acgactcactattgggaaagctggcacgcctgcaggtaccggtccggaattcccgggtcgacccacgcgtgcgcccacgcgtccgtcttctcttccggcgatattcccaaggcttgggagcaataacaataacaacgctatgttattaagcaacaacatcatttccattgaatcgatatctccgacgagaagctttcagattccgatgagtaaaatgagctgttgctctcggtgtttgcagagttatgaaaacgacgtagctaaggtggaaaaagatttaaccggagataaccggtcggttttgccacagtggttgcagaacgctaaagctaatgatgatggtgacaagaaactgacgaaagatcaacagattgtggagttgcagaagaaatggaacgacttatgtttgcgtttacatccgaatcagtctgtgtctgaaagaatagctccttctacgctgtctatgatgaaaataaacacaagatcggatataactccaccggggagtccggccgggaccagattggttt

SEQ ID NO: 86410 - DNA, 5319 bp, Arabidopsis thaliana columbia
tggcgcgcctgcaggtaccggtccggcctacccggggcgacccaccgtccgcgcatccatttatcatcatctccttataaatctcgaatctgccacagagagagcgtgtgacaaaatgagttcataagattccggtatcgtcttcctgattcctccaaatctccggcgaatttgcactctttacctctctttgactccgtgagattcgaggattgttagtttcttgtgatgtgtagtctttgaagcaggggatttttattgtattgaggaagaagatggggtttgagccgttggattggtattgcaagccggtgccgaatggtgtgtggactaaaactgtggattatgcgtttggtgcatacacgccttgtgctattgactcttttgtgcttggtatctctcatctggttctgttgattctgtgtctttatcgcttgtggctcatcacgaaggatcacaaagtggataagttctgcttgaggtctaaatggtttagctattttctggctcttttggctgcttatgctactgcggagcctttgtttagattggtcatgaggatctctgttttggatttggatggagctgggtttcctccctatgaggcgtttatgttggtccttgaggcttttgcttggggttctgctttggtcatgactgttgtggaaactaaaacgtatatccatgaactccgttggtatgtcagattcgctgtcatttatgctcttgtgggagacatggtgttgttaaatcttgttctctctgttaaggagtactatggcagttttaaactgtatctttacataagcgaggtggcagttcaggttgcatttggaaccctcttgtttgtgtatttccctaatttggacccttaccctggttacacaccagttgggactgaaaattccgaggattacgagtatgaagagcttcctggaggagaaaatatatgtcctgagaggcatgcaaatttatttgacagtatcttcttctcatggttgaacccattgatgactctgggatcaaaacgacctctcaccgagaaggatgtatggcatctggacacttgggataaaactgaaactcttatgaggagcttccagaagtcctgggataaggaactagaaaagcccaaaccgtggcttttgagagcactgaacaacagccttgggggaaggttttggtggggtggcttttggaagattgggaatgactgttcacagttcgtggggcctcttctactgaatgagctcttaaagtcaatgcaacttaatgaaccagcgtggataggttacatctatgcaatctcaatctttgttggagtggtattgggggttttatgtgaagctcagtatttccaaaatgtgatgcgtgttggttaccggcttaggtctgcactgattgctgctgtgttccgaaaatctttgaggctaactaatgaggggcggaagaagtttcaaacaggaaaaataacaaacttaatgactactgatgctgagtcgctgcagcaaatctgccaatcacttcataccatgtggtcggcgccatttcgtataattgtagcactggttctcctctatcaacaattgggtgttgcctcgatcattggtgcattgtttcttgtccttatgttccccatacagactgttattataagcaaaacgcagaagttaacaaaagaagggttgcagcgtactgacaagagaattggcctaatgaatgaggttttagcggcaatggatacagtgaagtgttacgcttgggaaaacagttttcagtccaaggttcaaactgtacgtgatgatgaattatcttggttccggaaagcacaactcctgtcagcgttcaatatgttcatactaaacagcatccctgtcctcgtgactgttgtttcatttggtgtgttctcattgcttggaggagatctgacacctgcaagagcgtttacgtcactctctctattttctgtgcttcgcttccctttattcatgcttccaaacattataactcagatggtaaatgctaatgtatccttaaaccgtttggaggaggtactgtcaaccgaagagagagttctcttaccgaatcctcccattgaacctggacagccagctatctcaataagaaatggatacttctcctgggattcaaaggcggataggccaacattgtcaaacatcaacctggacatacctcttggcagcctagttgcggtagttggcagcacaggagaaggaaaaacctccctgatatctgctatgcttggggaacttcctgcaagatctgatgcgactgttactcttagaggatcagtcgcttatgttccacaagtttcatggatctttaacgcaacagtacgtgacaatatattgtttggggctccttttgaccaagaaaaatatgaaagggtgattgatgtgacagcactccagcatgaccttgagttactgcctggaggtgacctcacggagatcggagaaaggggtgttaacatcagtgggggacaaaagcagagggtttctatggctagggccgtttactcaaattcagacgtgtgcatcttagatgaaccattgagtgcccttgatgcgcatgttggtcagcaggtttttgaaaaatgcataaaaagggaactagggcagacaacgagagtacttgttacaaatcagctccacttcctatcacaagtggataaaatcctacttgtccatgagggaacagtaaaagaggaaggaacatatgaagaattatgccatagtggcccgttgttcccgaggttaatggaaaatgcagggaaggttgaagattattccgaagaaaatggagaagctgaagtacatcaaacatctgtaaaaccagttgaaaatgggaacgctaataatctgcagaaggatggaatcgagacaaagaattccaaagaaggaaactctgttcttgtcaaacgagaagaacgtgaaactggagttgtgagttggaaagtcctggagaggtaccagaatgcacttggaggtgcatgggtagtgatgatgctcgttatatgctacgtcttgactcaagtatttcgggtttcaagcatcacttggttgagtgagtggactgattcaggaaccccaaagactcatggacccctattctataatattgtctatgcgcttctttcgtttggacaggtctctgtgacattgatcaattcatattggttgattatgtccagtctatatgcagctaaaaagatgcatgatgctatgcttggttccatactaagggctccaatggtgttctttcaaaccaatccattaggacggataatcaatcgatttgcaaaagatatgggagatattgatcgaactgtggcagtctttgtaaacatgtttatgggttcaatcgcacagcttctttcaactgttatcttgattggcattgtcagcactctgtccctgtgggccatcatgcccctgttggtcgtgttctatggagcttatctgtattaccagaacacatctcgggaaattaaacgtatggattccactacaagatcgccagtttatgctcaatttggtgaggcattgaatggactatctagtatccgtgcttataaagcatatgacaggatggctgaaattaatggaaggtcaatggacaataacatcagattcacacttgtaaacatggctgcaaatcggtggctgggaatccgtttggaagttttgggaggtctcatggtttggtggactgcttcattagccgtcatgcagaacggaaaggcagcgaaccaacaagcatatgcatctacgatgggtttgcttctcagttatgcgttaagcattaccagctctttaacagctgtactgagactcgcgagtctagctgagaatagtttaaactcggttgagcgtgttggaaattatatcgagataccatcagaggctccattggtcattgaaaacaaccgtccacctcccggatggccatcatctggatccataaaatttgaggatgttgttcttcgttaccgccctgagttacctcctgttcttcatggagtttcgttcttgatttctccaatggataaggtgggaattgttgggaggacaggcgctgggaaatcaagcctcttaaatgccttattcaggattgtggagctggaaaaaggaaggattttaattgatgaatgcgacattggaagatttggactgatggacctacgtaaagtggtcggaattataccgcaagcgccagttcttttctcaggtaccgtgagattcaatcttgacccatttagtgaacacaacgacgccgatctctgggaatctcttgagagggcacacttgaaagatactatccgcagaaatcctcttggtcttgatgctgaggtaactgaggcaggagagaatttcagtgttggacagagacagttgttgagtcttgcacgtgcattgttacgaagatctaagatacttgttcttgatgaagcaactgctgcagttgacgtaagaactgatgttctcatccaaaagaccatccgagaagaattcaagtcatgcacaatgctaatcatcgctcatcgtctcaatactatcatcgactgtgacaaagttcttgtccttgattctggaaaagttcaggaattcagttcaccggagaatcttctttcaaatggagaaagttctttctcgaagatggttcaaagtacaggaactgcaaacgcggagtacttacgtagtataacactagagaacaaacgtaccagagaagctaacggtgatgattcacaacctttagaaggtcaaaggaaatggcaagcttcttctcgttgggctgcagctgctcaatttgcattggctgtgagcctcacttcatctcacaacgacctccaaagccttgaaatcgaagatgataacagtattttgaagaaaacaaaggacgccgtcgtcactttacgcagtgtccttgaagggaaacatgataaagagattgaagactctctaaaccaaagtgacatctctagagagcgttggtggccatctctttacaaaatggtcgaagggcttgccgtgatgagcagattggcgaggaacagaatgcaacacccggattacaatttagaagggaaatcgtttgactgggacaatgtcgagatgtaaacgatgaaaggcttacactaatagacctaaaactcccattttgatggaacttttatttgtattgcttgggatacacgtaacaaaatgcccattaatcgtggtgtaactatataggctatgcttcttttgggaaaaagagagtttgattacagaggatgtgatgataacacaattg

SEQ ID NO: 86411 - DNA, 5661 bp, Arabidopsis thaliana columbia
  unsure (1)..(5661): unsure at all n locations
aaaaatctccaggtaaagcttctccctttttctctgttttctctgttttgttattctcccctttctccattgcagctttttcctgtaaagtgggattgatagttttgtttcatggatttcaaatttgtgttatttgactcgataccatcttaaatgcagagtcttttcgtgataataaaattatggattcgtttcaaagtttttttttttcgtatggaaaacacttgagctctctcaatcttgtagtcttgactcttgatgattcttctatgttctcgttgtgattgcttgtcactgttctatcttttatatatgattaaatgcaattttgcccctttttacgcgcgaatgtatttattatctttcgcactctgggtccatttcttgtcacttgagcacataatgattgatttatgactttttaaagttatgaaaatttattatttttgttgctatggttttttggaattagaagctcatttcaaagttgttgattttctttgcagggtagggaattggtgtggtagcttgtgatgcactgtgtttgagggaaaggaaaggataacgatggggtttgagtttattgaatggtattgtaagccggtgcctaatggtgtgtggactaaaacaagtggctaatgcatttggtgcatacacgccttgtgctactgactcttttgtgcttggtatctctcaactggttctgttggttctgtgcctgtatcgtatatggctcgccttaaaggatcacaaggtggagaggttctgtttgaggtcgagattgtataactatttcctggctttgttggctgcgtatgctactgctgagcctttgtttagattgatcatggggatttcagttttagattttgatggacctggacttcctccttttgaggcattcggattgggtgtcaaagcttttgcttggggcgctgtaatggtcatgattttaatggaaactaaaatttacatccgtgaactccgttgctatgtcaggtttgctgtcatatatgctcttgtgggggatatggtcttgttaaatcttgttctctcagtcaaggagtactatagcagttatgttctgtatctctacacaagcgaagtgggagctcaggttctgtttggaattctcttgtttatgcgtcttcccaatttggatacttaccctggctacatgccagtgcggagtgaaactgtggatgattatgagtatgaagagatttctgatggacaacaaatatgccctgagaagcatccaaatatatttgacaaaatcttcttctcatggatgaatcccttgatgactttgggatctaaaaggcctctaacagagaaggatgtgtggtatctagacacttgggatcagactgaaactctgttcacgagtttccagcattcctgggataaggaactacaaaagccgcaaccgtggctgttgagagcattgaacaatagcctgggaggaaggttttggtggggaggattttggaagatcgggaatgattgctcacagtttgtgggacctcttttactgaatcaactcttaaagtcaatgcaagaggatgcgccagcttggatgggttacatctatgcgttctcaatctttggtggagtggtgttcggggtgctatgtgaagctcaatatttccagaatgtcatgcgtgttggttaccgactgagatctgctctgattgctgctgtgtcccgcaaatcgttgaggttaactaatgaaggtcgtagaaagtttcaaacaggaaagataaccaacttaatgacgactgatgccgaatctcttcagcaaatatgccaatcacttcataccatgtggtcggctccatttcgtataattatagcactgattctcctctatcagcaattgggtgttgcctcgctcattggtgcattgttgttggtccttatgttccctttacagactgttattataagcaaaatgcagaagctgacaaaggaaggtctgcagcgtactgacaagagaattggccttatgaatgaagttttagctgcaatggatacagtaaagtgttatgcttgggaaaacagtttccagtccaaggtccaaactgttcgtgatgatgaattatcttggttccggaaatcacagctcctgggagcgttgaatatgttcatactgaatagcattcctgttcttgtgactattgtttcatttggtgtgttcacattacttggaggagacctgacccctgcaagagcatttacgtcactctctctctttgctgtgcttcgtttccctctcttcatgcttccaaacattataactcaggtggtaaatgctaatgtatccttaaaccgtcttgaggaggtattggcgacagaagaaagaattctcttaccaaatcctcccattgaacctggagagccagccatctcaataagaaatggatatttctcttgggattctaagggggataggccgacgttgtcaaatatcaacttggatgtacctcttggcagcctagttgctgtggttggtagtacaggcgaaggaaaaacctctctaatatctgctatccttggtgaacttcctgcaacatctgatgcaatagttactctcagaggatcagttgcttatgttccacaagtttcatggatctttaatgcaacagtacgcgacaatatactgtttggttctcctttcgaccgtgaaaagtatgaaagggccattgatgtgacttcactgaagcatgacctagagttactgcctggtggtgatctcacggagattggagaaagaggtgttaatatcagtggaggacagaagcagagggtttccatggctagggccgtttactcaaattcagatgtgtacatctttgatgacccgttaagtgcccttgatgctcatgttggtcaacaggtttttgaaaaatgcataaaaagagaactggggcagaaaacgagagttcttgttacaaaccagctccacttcctatcacaagtggacagaattgtacttgtgcatgaaggcacagtgaaagaggaaggaacatatgaagagctatccagtaatggccctttgttccagaggctaatggaaaatgcagggaaggtggaagaatattcagaagaaaatggagaagctgaggcagatcaaacagcggaacaaccagttgcgaatgggaacacaaatggtcttcaaatggatggaagtgacgataaaaaatccaaggaaggaaataaaaaaggagggaaatctgtcctcatcaagcaagaagaacgtgaaaccggagttgtaagttggagagtcctgaagaggtaccaggatgcacttggaggggcatgggtagtgatgatgctccttttatgttacgtcttaacagaagtatttcgggttactagcagcacgtggttgagtgagtggactgatgcaggcactccaaagagtcatggaccccttttctacaatctcatatatgcacttctctcgtttggacaggttttggtgacattgaccaattcatattggttgattatgtccagtctttatgcagctaagaagttacacgacaatatgcttcattccatactgagggccccgatgtccttcttccataccaatccgctaggacggataatcaatcgattcgcaaaagatctgggtgatattgatcgaactgtggccgtctttgtaaacatgtttatgggtcaagtctcacagcttctttcaactgtagtgttgattggcattgtaagcactttgtccttgtgggccatcatgcccctcctggtcttgttttatggagcttatctttattatcagaacacagcccgtgaggttaagcgtatggattcaatttcaagatcgcctgtttatgcacagtttggagaggcattgaatggcttatcaactatccgtgcttacaaagcatatgatcgtatggctgatatcaacggaagatcaatggataataacatcagattcactcttgtcaacatgggtgccaatcggtggcttggaatccgtttagaaactctgggtggtcttatgatatggctgacagcatcgtttgctgtcatgcagaatggaagagcggagaaccaacaggcatttgcatctacaatgggtttgcttctcagttatgccttaaatattactagcttgttaacaggtgttctgagacttgcgagtttggctgagaatagtctaaacgcggtcgagcgtgttggcaattatatagagattccgccagaggctccgcctgtcattgagaacaaccgtccacctcctggatggccatcatctggatccataaagtttgaggatgttgttctccgttaccgccctcagttaccgcctgtgcttcatggggtttctttcttcattcatccaacagataaggtggggattgttggaaggactggtgctggaaagtcaagcctgttgaatgcattgtttagaattgtggaggtggaaaaaggaaggatcttaatcgatgattgtgacgttggaaagtttggactgatggacctacgtaaagtgctcggaatcattccacagtcaccggttcttttctcaggaactgtgaggttcaatcttgatccatttggtgaacacaatgatgctgatctttgggaatctctagagagggcacacttgaaggataccatccgcagaaatcctcttggtcttgatgctgaggtctctgaggcaggagagaatttcagcgtgggacagaggcaattgttgagtctttcacgtgcgctgttacggagatctaagatactcgtccttgatgaagcaactgctgctgtagatgttagaaccgatgccctcattcagaagactatccgagaagaattcaagtcatgcacgatgctcattatcgctcaccgtctcaataccatcattgactgtgacaaaattctcgtgcttgattctggaagagttcaagaattcagttcaccggagaaccttctttcaaatgaaggaagctctttctccaagatggttcaaagcactggagctgcaaatgctgagtacttgcgtagtttagtactcgacaacaagcgtgccaaagatgactcacaccacttacaaggccaaaggaaatggctggcttcttctcgctgggctgcagccgctcagtttgctctggctgcgagtcttacttcgtcgcacaacgatcttcaaagccttgaaattgaagatgacagcagcattttgaagagaacaaacgatgcagttgtgactctgcgcagtgttctcgaggggaaacacgacaaagagattgcagagtcgcttgaggaacataatatctctagagagggatggttgtcatcactctatagaatggtagaagggcttgcagtgatgagcagattggcaaggaaccgaatgcaacaaccggattacaatttcgaaggaaatacatttgactgggacaacgtcgagatgtagataagttcatgttaaactaggaatcattgtctcttccgtaagaaacatatatttatcttaaccaaaattattagtttggtttccatttcataaacttaattttcacctgcaaagaaaatcaaaccctgttgtgttcttcgtgataagtagagaaattacttgagtatccttctaactcnnnnnnnnnnnnnnnnnnnnnnnnnnnnnnnnnnnnnnnnnnn

SEQ ID NO: 86412 - DNA, 334 bp, Arabidopsis thaliana columbia
gcgtccgttctggtgagaaaacggagtcggttgaggttttaatgttttttgatgacaaaaatggtgagggggagggaaaaattggagacggtgggaaagacacggaatcagaaagtgatgaaaccaagcaaaaagagaaaacacaactggaagagagctcagaagaaaacaaatctgaggatagtaatggaaccgaagagaatgctggtgaatctgaagaaaacaccgagaagaagtcagaagaaaacgctggtgaaactgaagagagcactgagaagagtaaggatgttttcccagctggtgaccaggctgaaatcacaaaggagtcaagcac

SEQ ID NO: 86413 - DNA, 543 bp, Arabidopsis thaliana columbia
cggacgcgtccgcccacaaattctctttttctgtgcaaacactttggaggattcttctaggcttctttctaccacaaacacaagagcgcgttttcttcacgccggcgaacaacgtcagagtcatggccaccggagatgggaaatcggtgatggtcgtcggagttgacgacagcgagcagagcacttacgccttggagtggacgctcgatcgtttcttcgctccttacgctcccaattatccttttaagctcttcatcgtccacgccaaacctaacgccgtctccgccgttggtctcgctggtcccggaactgcggaggttgtaccttatgttgatgctgatctgaagcataccgctgctaaggttgtcgagaaagccaaagcaatttgtcagagcagatcggttcatggcgcggtgatcgaagttttcgaaggtgatgcaaggaatatcctatgtgaagttgtagataagcatcatgcttctattcttgttgtgggaagccatggatatggagctatcaagagggcggttctcgggagtacga

SEQ ID NO: 86414 - DNA, 497 bp, Arabidopsis thaliana columbia
  unsure (1)..(497): unsure at all n locations
ccccntgcccntncccgactcgngtncctttgtgatctgactgagcncccntgctaggtttcgggaanccaagccattgtcagagcagtccgttcatggccccgtgatcgaagtttccgaaggtgatgccaggaatatccctatgtgaagttgtagataagcatcatgcttctattcttgttgtgggaagccatggatatggagctatcaagagggcggttctcgggagtacgagtgactactgcgctcatcatgctcattgctcggtgatgatcgtgaagaagcctaagatcaaggtctgaaacctaagggaaggctactcggtcaaagcaaagtctctgcatagtcttctaattcagaagaataaagtgaaataatattagcttgatgtgaaacaacgattcaagaccaattatacatttgcatctatatgtgtaattgtttactacatacaatgttttggtatccttagacaatcaatattcgtgtgttataat

SEQ ID NO: 86415 - DNA, 619 bp, Arabidopsis thaliana columbia
gctggtacgcctgcaggtaccggtccggaattcccgggtcgacccacgaaccctaaatccccaaaatggaataatcaaaatttcatcaggagatctctaaaatcgaaatctacttgatcccgcaacgaagaaatgttaagaagaagactcttgtcgatcatatcaacatcactcatcaattcttcgtttcatcaaaccgcgaaacccagattcatcatttcttcaccacttcttcaatgccgtccttctccgatctctactcaaattccgacctctacgagcagggctttgtcgtttcaaggaatcagggcttatagtttattgagcttgaacgatctgagagacaatgtgccgagaaaactcaagacgaggaaaggaagaggtattgggtctggtaaaggtaaaactgctggaagaggtcacaaggggcaaaaagcgagaggaacgatgaagtttggtttcgaaggtggtcagactccactacgacgtcgttaccccaacgggggctcaagaacaaatttaagctccattttcagccggggcgtctaggaagattgctaactcataacgctggaagatagatctcatgattgattcatgaaacctcaggtgtgggagc

SEQ ID NO: 86416 - DNA, 413 bp, Arabidopsis thaliana columbia
  unsure (1)..(413): unsure at all n locations
cttcgactaaatattataatttagcttctttttttttctaattctcgtctcggttttcctagtaatggcgacgattaatgtttacgtttttccatttatctttcttttgactatnagtgttggttcaattgaaggccgaaaactcaccaaattcaccgtaacgacgtctgaggaaatcagagctggtggctctgtattgtcgtcgtcacctccgactgagccacttgagtcgccgccgagccacggggttgatacccttcagaccctacggaacctggtcatagccccggtattggacattcccggacataaattaaccggggagggaccaatagcantcgccnatgggnattacatgttgaaaatatnntttggccctgggggnntttttttttccnaanangcntttccgg

SEQ ID NO: 86417 - DNA, 758 bp, Arabidopsis thaliana columbia
tgtgtccttctggtagaatcgcgattccgataaccaccaccgcgaatccaaatttccgaccagctttcgaaatcatcgacacagatcacgacggtaaaatcagcagcgacgatctccgtgcattctacgccggaatcccttccggtgaaaacaacgacgagacgatgatcggaacgatgatatcagtagcggacgcgaacaaagacggattcgttgagttcgatgaattcgagaaagttctagaaacgaccgcccgttttcctagatctggtaacggaggagaccaatggattcgatgaaagccgcgcgtccggtgatggataaagacggagatgggagactgagttacggagatctgaagagttatatggattcggctggtttagctgtaaccgacgatgaaatcaaatctatgattcgattagccggtggtgatttaaacgacggcgtttcgttcgacggtctgcttaagatctttgggtgttgaaaaaaaaagttcgtttttttttgacaccgcacattttccaactttattttgtttctcagttttgtttgtttgtttgcagaagtgtatttgtgtccacccagattttgttttatgttgttataaaaatgtgagaaaactaatgttggaaccctaaaaaaaaaaaaaaaaaaaaaagaaaaaaaaaaggggcggccgttttaaaggatccaagtttacttccccttgcttgcaacgtattagttttcgttttgcaacccaaccgggggggcgg

SEQ ID NO: 86418 - DNA, 981 bp, Arabidopsis thaliana columbia
  unsure (1)..(981): unsure at all n locations
cagcaacattcgactcacattagggaaagctcggccgcctgcaggtaccggtccggaattcccgggtcgacccacgcgttcgcaatctcaaaagccatttttcaaatttcaaactcagagagagagagatgtgtccttctggtagaatcgcgattccgataaccaccaccgcgaatccaaatttccgaccagctttcgaaatcatcgacacagatcacgacggtaaaatcagcagcgacgatctccgtgcattctacgccggaatcccttccggtgaaaacaacgacgagacgatgatcggaacgatgatatcagtagcggacgcgaacaaagacggattcgttgagttcgatgaattcgagaaagttctagaaacgacgccgttttctagatctggtaacggaggagacgatggattgatgaaagatgtgtttaaggtgatggataaagacggagatgggagactgagttacggagatctgaagagttatatggattcggctggtttagctgtaaccgacgatgaaatcaaatctatgattcgattagccggtggtgatttaaacgacggcgtttcgttcgacggtctgcttaagatctttgggtgttgaaaaaaaaagttcgttttttttgacaccgcacattttccaactttattttgtttctcagttttgtttgtttgtttgcagaagtgtatttgtgtccacccagattttgttttatgttgttataaaaatgtgagaaaactaatgttggaacactattcatatattttgtgatttacagcaacggctctcaaaagttttttgggcccaacccaccaacgaatgatacatatcttgtttgatgttgatactatgtttttaagcagagcaatcaaaaactagttgtacatctttcttcactatcattgaaaactatgtttttaataccaaacattgcaaacattttagaggnnnnnnnnnnnnnnnnnnnnnnnnn

SEQ ID NO: 86419 - DNA, 485 bp, Arabidopsis thaliana columbia
cccacgcgtccgggatccttcctgatttcaaaatttcttctgcccaccagcagcagcagcagatgaagaaggttaaacagattcgtgtcttaaagcctttcgatcttctctcggaagagctcgtctttatcatccttgacctcatctctcccaacccttccgatctcaaatccttctctcttacttgcaaatctttctaccagctcgagtccaagcaccgcggatccttaaaacctctccgctccgactatctccctcgcatcttgactcgttaccggaacaccaccgatctcgatcttaccttctgcccgcgtgtcactgactacgcgcttagcgtcgttggctgtctctccggacctacgcttcgctccctcgacctctcgcgctctggctccttctccgccgcgggactactgcgattggccctcaaatgtgtcaatttagtcgagattgacctgtccaatgcgactgagatgagagacgcc

SEQ ID NO: 86420 - DNA, 648 bp, Arabidopsis thaliana columbia
  unsure (1)..(648): unsure at all n locations
aaaaaaacaggatccgctgggtcttttttataatgatgaagttcctcgctttcaacgccaaccaaaaacctccagaaagctaattagggaaacatttgaaaaaactcagtgatctgctcttctctctaattgcaatggattcattgagattaatatctaagagcatcaagattgaaggaaccccatttggttcctctcaccaacgcaatcaaattttcctcaaatccgtcgctttcttccttttgatcggtctcgcttaccgttttctcatcactaattccacccgtttctccggttcccaccgttcgatcctcgccggaatctctcccgccggatccttcaggtctcactgccatcactcaaacttcagcctctgtcgattccccagcaaacatcacaaccattgcttcacagaatgtttcaaccaagtgtgatatctttatcgggaattgggtaccagacccatcagggccaatctacancaatgtctnttgccgtcatatncaaggttaccaaaattngcttgaaaaacgggaggncagatntgaattacctngntgggggatggnaccntgggttgangttttcccggggttnaccctgggaattccttgaaatntgggggcaaagggnngggnttnncggggg

SEQ ID NO: 86421 - DNA, 507 bp, Arabidopsis thaliana columbia
  unsure (1)..(507): unsure at all n locations
aattccaaccctcattttaatggatttctcaaaaaaaaaagcccaaaaatattgaaaactgaaaacgaaaccggagaatcggctgtctccataaccaaaccggaaaatcaaaacctaaaccggttttctccaaagtagaaaccaaaaaaaaaaacgaaaccaatgtacacacagcaaatcactaattcagaaactaagaactctgtttcaaacttttcataaatacctatttacacacttttaaatccatttcttagaatcttttatcgggccgtacacatgatcatcatcttcaaactcgggtactccgngcatcgcaaggttcaaggtggcatttccatcccggggtttgggntggtggcaattggggataaggggccatccctacccggaaactatttgtaggtttcccgcctggaatggggttccggggccaaaccctttttcggctttccaggttggggcattcccttcccacccgggggtttgggggccccccttgntnnc

SEQ ID NO: 86422 - DNA, 676 bp, Arabidopsis thaliana columbia
  unsure (1)..(676): unsure at all n locations
atgatactgccnnnnnnnnnnnnnnnnnnnnnnnnnnnnnnnnnnnnnnnnnnnnnnnnnnnnnnnnnnnggctcattgacacaaagagagtgggagagagacatgacgggctgtgtgaattctatttctccgccgccggtgactttataccggcatcgtgcctctccgtcacggtcgtccttctcattatccggcgatgccttacactctctttaccggcaccgacgtgtatcaagatctccgtcgattatcgctcccaaatttcagattgtggcggctgaaaaatcggagcctctgaaaattatgatatcaggagctcctgcttctggtaaaggtacacaatgcgagctgattactcacaaatatggtttggtgcatatctctgctggagatttgctgagggctgaaatcgcttctggaagtgaaaatggaagacgtgctaaagaacatatggagaaaggacaattggtccctgatgaaatagttgtaatgatggtaaaagatcgtttatcacagacagattcagagcaaaaaggatggcttttggatggatatccaaggagtgcatcacaggcaacagctcttaagggatttggattccagcctgatctattcattgtcctcgaagttcctgaagaaattctaattgaaagagttgttgggcgtcgattggat

SEQ ID NO: 86423 - DNA, 908 bp, Arabidopsis thaliana columbia
tcatagcctaaaccaaagaaaacccttatttgcgatccccacttgttgttcatcaccaagccaagctccatgtcctagtcactccacagattccctatcatcatcaattcgtttcaaacttagttcctttcaaagtcttgtacatatatacacacacctattattctcttggtgtgtttgtgtgttacatatacgtgtgagtacatactttgttgtaaaagtggatcggaggtatggaaagggaccggttccaccggaaacatcggcggcggcggatgataattcgtcttggaacgagactgatgtcaccgccatggtctccgctctcagccgtgtcatagagaatccgacagacccgccggtcaaacaagagcttgataaatcggatcaacatcaaccagaccaagatcaaccaagaagaagacactatagaggcgtaaggcagagaccatggggtaaatgggcggcagaaatccgcgatccaaagaaagcagcccgtgtctggctcgggactttcgagacgggcagaggaggctgctttagcctatgacccgagctgccctcaaattcaaaggcaccaaggcttaacttgaacttccctgaacgggctccaaaggccctactatccaccacaaccatttctcatgcaccaagaggagttagtgaatccatgaactcacctcctcctcgacctggtccacctttaactactactacttcgtggccaatgacttataaccaggacatacttcaatacgctcagttgcttacgagtaacaatgaggttgatttatcatactacacgtcgactctctttagtcaacctttttcaacgccttcttcatcttcttcttcctcccaacagacgcagcaacagcagctacaacaacacaacagcagcgtgaaga

SEQ ID NO: 86424 - DNA, 398 bp, Arabidopsis thaliana columbia
agattatgttgcttcttcactagatatgtttgcattcatttgcttcttttcattacagccaaaagacaaacctgttccaaatgcaacattacaagttacaggtgctgttggttggagaagagagggccttgcttacaaaaagaatgaggtgtttctggatattgcggaaagtgtaaaccttctgatgtcctctaaaggcaatgttcttcggtgtgatgtgacggggaaggttttaatgaaatgttttccttttccgggaatgccctgattcgaaagttcggggttgcatgatcaaaattggtcttgtggagggggctgaaatgaaatctcgcccagctaagagtggtaaaaccattgagcttgatgatgtcacatttcaccagtgtgtgaacctgacc

SEQ ID NO: 86425 - DNA, 1734 bp, Arabidopsis thaliana columbia
cccacgcgtccgcgcattcgacccacgcgtccgcttcgtcgtcgtcttcttcctttgctccgtcgtcgagatctcgtcgaacctcaaatctcaaatctcctgtaaccagatcgtctaattatccgatctgcgtttcgaatctcagatcgaagatgccggtggctgcttccgccatctattttctgaatctccgtggcgatgtactcataaatcgcacctaccgagatgacgtcgggggaaacatggtggatgcatttcgtacgcatataatgcagacgaaagagttagggaattgtcctgtgcgtcagattggtggctgctcctttgtttatatgcgaatcagcaatgtctacatcgtcattgttgtcagtagcaatgctaacgttgcttgtggattcaaattcgttgttgaggctgttgctttgttcaaatcatactttggtggagcttttgatgaagacgctattagaaataactttgttctgatttatgaattgttggacgagattatggactttggctatccacaaaatctctcccctgaaattttgaaactttatatcactcaggaaggtgtacggtcaccattttcatcgaagccaaaggacaagcctgttccaaatgcaacattacaagttacgggtgctgttggttggagaagagagggccttgcttataaaaagaatgaggtgtttctggatattgtggaaagtgtaaaccttctgatgtcctctaaaggcaacgttcttcggtgtgatgtgacggggaaggttttaatgaaatgtttcctttcgggaatgcctgatttgaagttggggttgaatgataaaattggtcttgagaaggaatcagaaatgaaatctcgcccagctaagagtggtaaaaccattgagcttgatgatgtcacatttcaccagtgtgtgaacctgaccagattcaactccgagaagactgttagttttgtaccaccggatggagagtttgaactgatgaagtatcgaataacagagggtgtaaatctgcctttccgtgtattaccaacaatcaaagaacttggtcgtacacgtatggaagtaaatgtcaaggtcaaaagtgtgtttggtgctaaaatgtttgcccttggggtcgtcgttaaaattccagtgccaaaacaaacagccaagaccaatttccaagtgacaactggtcgcgctaaatacaatccatcaatcgattgcttggtttggaagataagaaaattcccagggcaaacagagtccacgctaagtgcagaaattgagttgatctcaacaatgggagagaagaaatcttggacaagaccaccaatccaaatggaatttcaggtgccaatgttcacagcatctggtctgcgagttcgttttctcaaggtttgggagaagagcggttacaacacggttgagtgggttcgatacataacgaaagcgggatcttacgagatcagatgctgaacattaaacacagttcaggttcagtgacatcagacttaaaaagtttcatggcttctagttttttgttccttatgcaaaacaaacacaaaagagttaaatatgttttataccttgttttatgtttgtttgtcgattagagatatctgtgttaatatgatttcttatgtcttaatttggtattgaattctgtttttctaaaaaaaaaaaaaaaaaagggcggccgctctagaggatcccagcttacgtacgcgtgcatgcgacgtca

SEQ ID NO: 86426 - DNA, 690 bp, Arabidopsis thaliana columbia
  unsure (1)..(690): unsure at all n locations
atgatatcgccgnnnnnnnnnnnnnnnnnnnnnnnnnnnnnnnnnnnnnnnnnnnnnnnnnnnnnnnnnnnnnnnnnnnnnnccacgcgtccgcccacgcgtccgcccacgcgtccgcccacgcgtccgtacggctgcgagaagacaacagaagggtacggctgcgagaagacgacagaagggtacggctgcgagaagacgccagaagggtccggctgcgagaagacgacagaagggtacggctgcgagaagacgacagaggggtacggctgcgagaagacgacagaagggtacggctgcgagaagacgccagaaggggagagaagcaaaagaaagtgacactaacgtgtacatattccggtgaccggggagtctctaaatcctatggtgaagctcttctctgcaaaatctcaaccatcaagcgtttgatatgtccttcaaggaaacaataactcagagttgcttgatgtttgcttttattatcattttctctttccaataaaatgaatcttttatgtcgaatgtgattggatattgtttagataaacaaaaaactctcaatagcaataataatcataggccaagtggaaaaaaaaaaaaaaaaaaaaaaaaaaaaaagcggccgctctagaggatccaagcttacgtacgcgtgcaggcgacgtcataactcttctatagttgtaccta

SEQ ID NO: 86427 - DNA, 530 bp, Arabidopsis thaliana columbia
  unsure (1)..(530): unsure at all n locations
tgggcaattttgactcggataccatttttccccaggggaacaccctatgcccccgtttttcgccaagcttttatcacccttccctttagagaaaaatttgtatcccccccaggtacccgttccggaatttccgggttgaaccccgcgtccccggacccgtgggcggacgcgtgggagacgacagaagggttcggctgcgagaagaccacacaagggtccggctgcacaagacgacagaagggttcggctgcgagaagacgtcagaagggtacggctgcgagaagacgacagaagggtacggctgcgagaagcagacgcagaagggtacggctgcgagaagacgacagaagggtacggctgcgagaagacgacagaagggtacggctgcgagaagacgacagaagggtacggctgcgagaagacgacagaagggggctaaaaaaaaaaaaaaaaaaaaaaaacaaagcggccgctctagaggatccaagcttacgtacgcgtgcatgcgacgtcatagaacttctatagtn

SEQ ID NO: 86428 - DNA, 516 bp, Arabidopsis thaliana columbia
  unsure (1)..(516): unsure at all n locations
cgcctcgtttttttttgnnnnnnnnnnnnnnnnnnnnnnnnnnnnnnnnnnnnnnnnnnnnnnnnnnnnnnnnnnnnnnnnnnnnnnnnnnnnnnnnnnnnnnnnnnnnnnnnnnnnnnnnnnnnnnnnnnnnnnnnnnnnnnnnnccacgcgtccgtacggctgcgagaagacgacagaagggtacggctccgataagacaacaggagggtacggctgcgagaagtcgacacaaggatacggctgcgagaagacgacagaagggtacggctgcgcgaacccccccccagggtacggctgcgagaaccccacagaagggatggcatgagctttttgttatttgtttctaatatttggactcctatgtgttgtgtgtatatgattcataattaatactatatttatggattgatttctttctatagaaaaaaaaaaaaaaaacaaacccaaaaagcggccgctctagaggatccaagcttacgtacgcgtgcgtgcgacgtcataactctnctatag

SEQ ID NO: 86429 - DNA, 671 bp, Arabidopsis thaliana columbia
  unsure (1)..(671): unsure at all n locations
gccgagcactaatacgactcatatagggaaagctggtacgcctgcaggtaccggtccggaattcccggtgtcgacccacgcgtccgcccacgcgtccgcccacgcgtccgctgcgagaagacgacagaagggtacggctgcgagaagacgacagaagggtacggctgcgagaagacgacagaagggtacggctgcgagaagacgacagaagggtacggctgcgagaagacgacagaaggggagaaaccacaagagaaaaaggtgagtttgagggaacttccaaggtataaatgggtcgatgtcagagttggcgagttcgtacctgagaaatccgctgccggagagatcactttctcaatgtatgagcatgcggctggtgtttggaagaaagggctctccctcaaaggtgttgcaattcgtcccaaacagtaataattgttatggcatagaaaaacataaatctccatatgcaccaatggaccttctcaacatatatttcacatcatgtcatgtgtgtataataaggttgttctatcgtatttttagttttaataataactttaatgttggtgttgnnnnnnnnnnnnnnnnnnnnnnnnnnnnnnnnnnnnnnnnnnnnnnnnnnnnnnnnnnnnnnnnnnnnnnnnnnnnnnnnnnnnnnnnnnnnnnnn

SEQ ID NO: 86430 - DNA, 411 bp, Arabidopsis thaliana columbia
tacggctgcgagaggacgacagaagggtacggctgcgagaagacgacagaagggtacggctgcgagaagacgacagaagggtacggctgcgagaagacgacagaaggggacgatgaatcgattttatagctccgatattgttattcatgatatttctttcattcgatatcatcgcaatctaattcatctgagtaagtttacaagcgaaagatttctcatctctatgggattaaatcccgagatattccaaagaaaaaaaaataataataataaacgattaaattatggaagtaaatattcttgcatttattgctactgcactcttcattctcgttcctactgcttttttgcttataatttacgtaaaaaccgttagtcaaaatgattaatttgaataaaattttcctatcc

SEQ ID NO: 86431 - DNA, 812 bp, Arabidopsis thaliana columbia
ccgctctcccataatttcgtgtaggaaaatggaataggatcgcgtgtaggacatttgccaagagtacctatatatacttttctttctatgaagtcaaggaattttaaatagttcgaattcaaccaaggaaagaggtttttttttaataaagataaaatgtgtcttccctaatgaataggctctttttaaagattagagtcgatgtcgaataaaaaactcgtaagaaaaattaactcgttaattttttttgaatattttcgtttttttaccgggactcgtctttgtcacattccctttctttgttttccaaaaagatgataaaccctttcaatttttttatttcaaattgaacttcgtacttgttttctctatattgatttctattgtttatttaaggttctttagaaactctttttgtaaagaatcgaagttttttatgatacttcatcagatgattgtacaaggaaagtaaactactaggttttagaaaggaaagccgggaaaaagaatcataaagaacttttttttttattggatcgggaatctcattatgtattcggtgtggataaaagatcttcctatgttatactattaaattcttgacgatgaatcgattttatagctccgatattgttattcatgatatttctttcattcgatatcatcgcaatctaattcatctgagtaagtttacaagcgaaagatttctcatctctatgggattaaatcccgagatattccaaagaaaaaaaaaataataataataaacgattaaattatggaagtaaatattcttgcatttattgctactg

SEQ ID NO: 86432 - DNA, 506 bp, Arabidopsis thaliana columbia
  unsure (1)..(506): unsure at all n locations
cggtcggttacncgggtcgagacacacgtttgangaaaaaaaggtaagggtgcgaaaaaaacacaaaaagggaaaggttggatatactcttaaattcgggacgatgaatcgattttatagctccgatattgttattcatgatatttctttcattcgatatcatcgcaatctaattcatctgagtaagtttacaagcgaaagatttctcatctctatgggattaaatcccgagatattccaaagaaaaaaaaaataataataataaacgattaaattatggaagtaaatattcttgcatttattgctactgcactcttcattctcgttcctactgcttttttgcttataatttacgtaaaaaccgttagtcaaaatgattaatttgaataaaattttactatcaaaaaaaaaaagatttcaatttctcgtcttaaatcaaaggaacgcattagactcagtagtagtatcctaaggggtccgctagtatggtagaaagagatctcttt

SEQ ID NO: 86433 - DNA, 517 bp, Arabidopsis thaliana columbia
ttgtttacgaggtagtctttaaggtgaagctagaggatccggcctatggatgggacacgccggtgaacctaaagctagtcttgcctaacggtaaggagaaaccacaagagaaaaaggtgagtttgagggaacttccaaggtataaatgggtcgatgtcagagttggcgagttcgtacctgagaaatccgctgccggagagatcactttctcaatgtatgagcatgtggctggtgtttggaagaaagggctctccctcaaaggtgttgcaattcgtcccaaacagtaataattgttatggcatagaaaaacataaatctccatatgcaccaatggaccttctcaacatatatttcacatcatgtcatgtgtgtataataaggttgttctatcgtatttttagttttaataataactttaatgttggtgttgaataaactcaaaacgagtgttttgacggttgttaggttccaagcttacgtacgcgtgcatgagacgtcatagtcttgtataggtcac

SEQ ID NO: 86434 - DNA, 614 bp, Arabidopsis thaliana columbia
  unsure (1)..(614): unsure at all n locations
nnnnnnnnnnnnnnnnnnnnnnnnnnnnnnnnnnnnnnnnnnnnnnnnnnnnnnnnnnnnnnnnnnnnnnnnnnnnnnnnnnnccacgcgtgcgtgaagacgacagaagggtacggctgcgagaagacgacagaagggtacggctgcgagaagacgacagaagggggaaatttgagtaccaagagagctctttttcatcctaaagagatcttcaaatttagatttcaacacataaaagttggtgacatgaagaatgaaggaaaggaagtgtgcagaagctaaggtttaagagaccccactcctcccatttcgagtttttgggtatctttgaacatttgggagtgtgtgtttttgggggtaataggatacaaaacttaaaagctgtttgttttgtttgtactgttttgttcttgggtttgtctcgtactaatcaagtaaaacaaatgtctcgtactctatgactctctctttctaaattggtattagatgaaattaccccatatattttgatggcaataagaggaataaacaccataaaagcggccgctttaannnnnnnnnnnnnnnnnnnnnnnnnnnnnnnnnnnnnnnnnnnnnnnnnnnnnnnnnnnnnn

SEQ ID NO: 86435 - DNA, 694 bp, Arabidopsis thaliana columbia
  unsure (1)..(694): unsure at all n locations
aggnnnnnnnnnnnnnnnnnnnnnnnnnnnnnnnnnnnnnnnnnnnnnnnnnnnnnnnnnnnnnnnnnnnnnnnnnnnnnnnnnnnnnnnnnnnnnnnnnccacgcgtccgcccacgcgtccgtacggctgcgagaagacgacagaagggtacgaaaagggtacggctgcgagaagacgacagaaggatacggctgcgagaagacgacagaagggtacggctgcgagaagacgacagaagggggaaaacgaaagttccgaagaagaagaagaagaaggagaaaagatgatttaccgaaagtggagtttgctgtccggcccaccggttatcctcggcggagcggtaattgctgccgtcgccgtcggattcgtcttgcaaaacgtaacgaaaggggagcagaagaagaatgtctcaacaaacaagtgagaagacaaatggagagatgctacaaaatgtggtgatcatgtgatttgatacaatttagttcttgcagtgtataagctcaataatgcttttgtaagcttttgaatacacagatctttgtggtgtttttagattcttgttactaataatgatatttcattttccaaaaaaaaaaatgaaatttattcggtgcatnttnaggnntttncnancnnnnnnnnnnnnnnnnnnnnnnnnnnnnnnnnnnnnnnnnnnnnnnnnnnnnnnnnnn

SEQ ID NO: 86436 - DNA, 501 bp, Arabidopsis thaliana columbia
  unsure (1)..(501): unsure at all n locations
gaagacgatccatcagctttcttctttcttttcatgcttcgagccgctggttttctcctcccgtgttacatcatggcttgggctattagtatattacaacgtcgaagcacaagacaggaagctgctgctctagctgcggcagaagtagcgtttatgttacatagcggtgggggcgggggaggacaacgcagaggaggtttgcactttgctgtaccaccagagcttatatctaatccacaccaccaacctgaagcttcaccgcagtgattatatattcccgtcaccggtaagagaaatcaatcatcatctacggcgtttggtttctctctatcgtctcacttctctctctcgtgtagtagcttgtgtggtttgtttgtgtcccggcctttgttcttttaccaaacacacaaaactgggggttttacaaacacggcaagtttctttggctataccttttnacaggcgggaaagnaaggttttnncctttnggtttnggntnac

SEQ ID NO: 86437 - DNA, 632 bp, Arabidopsis thaliana columbia
  unsure (1)..(632): unsure at all n locations
ctcttattaaacacgggattacatcatttgtgacgttgaaccacttcgactatcctcaagaactcgagaaccggttcaagagttggttaagctccgagatgcagaaagatttcgggtacttagctgatatatgtttcaaacattttggagaccgagttaaacactggatcacgattaacgaaccaaaccaacatataagcttagcatatcgaagtggtttgtttccaccagcgcggtgctccatgccatacggaaattgtactcacgggaactcagaaactgagccttttatagccgctcataatatgatcctcgcacatgcaaaggcgattcaaatataccgaaccaaatatcaaagagaacaaaagggaatcattggcattgtggtacaaacatcatggtttgaacccataagcgattcgattgctgataaaaatgctgccgngagagctcaatcattttattcaaattgggttctagatccccgttgtgtatggggaattatccgggaggaatggtgatctccttggtcagctttgcnaaaatttttngggcaattnanttgccngcntattgggctttaaannngcctttttggggtttanncccgttccaaggttcntcntcaagnt

SEQ ID NO: 86438 - DNA, 488 bp, Arabidopsis thaliana columbia
  unsure (1)..(488): unsure at all n locations
aaattgcagaagcagcttctttcttccaaagagaaaccaaaaacaaaagaaaatggaaatggtgacaagttttgtatatccaccacctccatcgatattgctcaattgtatgagcgtcgttggtgtagccgctctggccaatatcggttggtctgaaatcagaggaaagcatctcaaatactccaaattcggcgtatcatcatcatcaccacaaccacaagaaggagcgattcggcagcatctctagcagaaatggaatgctttttgctatacacaacctgcggtttcttagccccttgcggtcttcttttcttcgtcttaccttctgatggatctcaagggttcttccttcttcaaatcccggacttgccctcccatttttttccaagggggggtttcggggggtnttttcccaaaaaaaaantaccagggggggggggttgcctttnaggcncagtttttncccaaagggggggngtttttttttt

SEQ ID NO: 86439 - DNA, 1035 bp, Arabidopsis thaliana columbia
  unsure (1)..(1035): unsure at all n locations
gcagaaccagcttctttcttccgaagagaaaccaaaaacaaaagaaaatggaaatggtgacaagttttgtatatccaccacctccatcaatattgctcaattgtatgagcgtcgttggtgtagctgctctggccaatatcggttggtctgaaatcagaggaaatcatctcaaatactccaaattcggcgtatcatcatcatcaccacaaccacagaaggagcgattcggcagcatctcaagccgaaatggaatgcttttgctatacacacctgcgtttctagcagctgcgtcttctttcttcgtcgtaccttctgatgatctcaggtttcttcttctcaaatccgcacttgccctccatttcttcaagagggtattcagaggttctgttcatacataaatacagtggagggatggctttagactcagctttcaccataagtagcagctatttctcatccacagcattgatgttatacagtcaaaatctcaccttgggacttaccgagccgagtttcgatatgaaactcgccggagttgtgatgtttgtggtgggaattgttgggaatctgtatcaccatgttttgctggctaagctaaggaaagaagatgggaagaaagagtacaagataccaaaaggaggtctctttgatataatcatatgccctcactatctatttgagatccttgtgttttggagcttctttctcatctctcagaccatttattcattttctttcgctatgggaacaatgctctatctcattggtcggagttatgctacaagaacttggtatctttccaagtttgatgacttccccaagcatatcaaggctctcattccctttgtattctagagttttgttgttgttgtttcaagtgtctgaataaaactaagagaccttataggctcatttgtttaagttgaatttaataataaatcattagaaaaaaaaaaaaaaaaaagnnnnnnnnnnnnnnnnnnnnnnnnnnnnnnnnnnnnnnnnnnnnnnnnnnnnnnnnnnnnnnnnnnnnnn

SEQ ID NO: 86440 - DNA, 472 bp, Arabidopsis thaliana columbia
  unsure (1)..(472): unsure at all n locations
tnaatttttttttgaatctccagagttgtttcccgttgttagattcatcgatttcgaatcctatcccgaagaattgttcttcaatctcgtgtttctccgacggcttctccggatatatcagtcgactgagaagagaaggatttgtttcggttgtgaaatcggagaatcgctgcataggaaagcgatgataacaagatcgaatctagcagagcagctgagggaatatcagattcgatctaagcatgattgggcttctgtctctttcttctcgtcgacctcgaatttttcttcttctagggtggatgttgtagtctttgtcatctgggagctagtcatcttagcattcttncgtgtttcagcgggtttccntgtacttcaagcgggtacaactcgcattcatcttngnatgggcactttnctgcnacnaatttcatgaggcacaaagcaagtaaggtnagccnggggnagaatt

SEQ ID NO: 86441 - DNA, 391 bp, Arabidopsis thaliana columbia
cgaaaatctcaaaactttaagatcctttatttctgatctctcttcgaagtttcggtttttggtttcttaattgtcaagtcatttcatcgatgtcaggatatcctccgactagccaaggttacggttacggttacggcggcggtaatcaacctccaccacctcaaccaccttactcttccggcggaaacaatcctccctacggatcatcaacaacctcttctccttacgctgtaccctacggcgcatctaaaccacaatcatcatcctcttctgcgccgacgtacggatcttcatcatacggagcaccgcctccttcagctccgtacgcgccttctccaggagactacaacaagccgccaaaggagaaaccatacggaggaggctacggagc

SEQ ID NO: 86442 - DNA, 483 bp, Arabidopsis thaliana columbia
  unsure (1)..(483): unsure at all n locations
ccggcactatacgactcatatagggaaagctggtacgcctgcaggtaccggtccggaattcccgggtcgacccacgcgtgcgtacggctgcgagacgacagaaggatacggctgcgagaagacgacagaagggtacggctgcgagaagacgacagaagggtacggctgcgagaagacgacagaagggtacggctgcgagaagacgacagaagggtacggctgcnagaagaggggggaagggtacggctgcnagaagacgacagaagggtacggctgcnagaagacgacagaagggagaatcagagaagggtgggaagaaggaaaatttcatcagaaccagattacatgcctttgtggagtatgaaacggtggacgcagctgaaaaagcggcagctactttgaataatgagcaagactggagaaatgggttgcgagttaagcttcttgaacaagcagcacgaaagtttgcacagagaagaccag

SEQ ID NO: 86443 - DNA, 771 bp, Arabidopsis thaliana columbia
gttcccgaattaaatttaagccaaagaacttgaaaaaaaaatggggtttgcgaagttaaaagcttctttgaacaaagcagcaaggaaagttttgcccagagaaagaccagctaggaagggagtcggataaagaaaaggacactccaggccgagttcatgatcaaactggaggagataaaaacaaaaagacgcgtgaacatcaaaatcaccgtctccatcattctgataatcctgcttgatgacgacggtggcaataataaattggaaacaaaggcagaggtggaggacaaggaatggcgacaggattcatcaaggccgggcaaccggacattggaacagctttcatccatctttcctcattcataatttttcatcccctgttggggtcccaaagcgtccacctggcccgagaatgcctgatgggacgagagggttcacaatggggcgtggtaaagtgattcctcctcccacatctactcaaactagtcatgaagtttgatcggttctgcatgttcggttgtatcattgtgtggttttatttacattaaaaaatgtgaaatttgtatgtaattagaattgagatgttgttttggatttgagtttccttttggcatattcaagtcctccaaatcttcactttggtagttagttttgtgttgtaagttttggtgaatgaaaaaatgatccatttgataaactaaaaaaaaaaaaaaaaaaagggcggccgctctagaggatccaagcttacgtacgcgtgcatgcgacgtgaag

SEQ ID NO: 86444 - DNA, 901 bp, Arabidopsis thaliana columbia
ttgaagaatcagagaagggtgggaagaaggaaaatttcatcagaaccagattacatgcctttgtggagtatgaaaaccggaccggcattcccggttcgacccacgcgtccgataatgagcaagactggagaaatgggttgcgagttaagcttcttgaacaatcagcaggaaagtttgcacagagaagaccagctaggaaggaagtcgataaagaaaaggacactacaggcagagttcatgatcaaactggaggagagaaaaacaaaaagacgcgtgaacatcaaaatcaccgtctccatcattctgataatcctgctgatgatgacggtggcaatcatcagaaggataaaaatggaaacaaaggcagagttgtaggacaaggaaggcgacagaatcatcaaggcggcaacggcattggacatggaacagcttcatcatcttctcatcctaattatcatcctgttgaggtctcaaagcgtccacctggcccgagaatgcctgatgggacgagagggttcacaatggggcgtggtaaagcgattcctcctcccacatctactcaaaccagtcatgaagtttgatcggttctgcatgttcggttgtatcattgtgtggttttatttacattaaaaaatgtgaaactttgtatgtaattagaattgagatgttgttttggatttgagtttccttttggcatattcaagtcctccaaatcttcactttggggagttagatttgtgttcgcagttttggtgaatgaaaaaatgatccatttgataacactaaaaaaaaaaaaaaaaaaggcggccgttctaaagatcccacttacgaccgtgcatgcacgcataccttttttttgggtacctaaatcaatcctggctgcgtttaaacgcggatgggc

SEQ ID NO: 86445 - DNA, 2709 bp, Arabidopsis thaliana columbia
ccccccctcgattacggacggtatacataagcttgatatcgaattcgcggccgcggatatgagaatggcatgtgcgtgaatgtggcctactttgttctcttccttctaatttgagaacagagtttggctgtcctatttattgctactttgtaagattcactcttttcgacattacttttcaattgcttcagattcataaatctatcttcttctttctttttttgttcagctttagcgtgttacgctgaacatttaagaaccatggatctcaatctcggaaaatgctgtggttctcgttcttctaagaaggaatcatggaggtcggttttgcttcttgcttatcagagtcttggtgttgtctatggagacttgagtatctctccgctttatgtctttaagagcacttttgctgaagacattcagcattcagagaccaatgaagagatctacggtgttatgtcttttgttttctggactctaactttggttcctttgctgaagtatgtcttcattgtcctccgagctgatgataacggagaaggtggaacttttgctttgtactcattgatctgccgtcatgtcaaagttagcctcctcccaaaccgacaagtctctgatgaggcactgtccacttataagctggagcatccaccggagaagaaccatgactcgtgtgtgaaaagatatctggagaaacacaagtggttacacactgctttgctgcttcttgttcttcttgggacttgtatggttattggagatggacttctcactccagctatctccgttttctctgctgtgtcaggtcttgagctgaatatgtctaaagaacatcaccaatatgcagtaattcctattacctgcttcatactagtctgccttttctcgcttcagcattttgggacacatcgtgttgggtttgttttcgcgcctattgtcctcacttggctgctctgtataagtggtattggcttgtacaatataatacagtggaatcctcatatatacaaagctctttctcctacatacatgttcatgttcttgagaaagacgagagtaagcggatggatgtctctaggcgggatcttgttgtgcataactggtgctgaggccatgtttgctgatcttggtcacttcaattacgcagcaattcagattgcgtttaccttcctggtttatccggctcttatattggcatacatggggcaagctgcttacttatcccggcatcaccattctgctcatgcaattgggttttacgtctctgtaccaaaatgtttgcactggcctgtgcttgctgtagcaattcttgcttctgttgtgggaagccaagcgatcatcagtgggactttctcaatcataaaccagagccagtctctcggatgcttccctcgagtcaaagtcattcacacgtccgataagatgcatggtcagatttacataccggagattaactggatgctcatgattctctgcatcgctgttactatcgggtttagagatgtcaaacacctgggaaatgcatcaggtttggctgtaatggcggttatgctagtgacaacatgtcttacctcattagtcattgttctttgctggcacaagcctccaattctagcgctagcgttccttctctttttcggttcaatagaacttctctacttctcggcctcactcaccaaatttcgtgaaggcgcttggcttccgatcctcttatctctaatattcatgatcatcatgttcgtttggcactacaccaccattaagaaatacgagtttgatctccagaataaagtctcgcttgaatggcttcttgcattgggtccaagcctcggaatttctcgagttccaggtatcggtttagtcttcacggatttaacctctggaatccccgccaatttctcccggttcgtcaccaacctccctgccttccaccgtgttcttgtctttgtctgcgtgaaatctgtccctgtcccgttcgttccacctgctgagagatacctcgtgggtcgtgttggtcccgttgaccaccgctcttacagatgcatcgttcggtatggataccgtgacgtccatcaagacgtggactcattcgaaacagagctcgtaagcaagctggcggatttcatccgttacgattggcacaaaagaacacaacaagaagacgacaacgctcgttctgtccagtccaacgaatcctcaagcgagtcaagactagccgtgatcggaacagtagcttacgagatcgaagacaatctccaaccagagagtgtctccatcggattctccacagtcgaaagcatggaagacgtcatacaaatggccgaaccagccccaaccgccaccataagacgggtgaggtttgcggttgaggaaaacagttacgaggacgaaggatcaacatcgtcagcagaagcagatgcggaactgagaagcgagctgagggatttgctggcagcgcaagaagcaggaactgcgtttatattgggacattcacatgtgaaagcgaaacaaggatcatcggtgatgaagagattagcagttaatttcggttataatttcttgagaaggaactgtagaggacctgacgtggctcttaaggttccacctgtttctcttttagaagtcggcatggtttatgttgtttgaacttatgaaaaaaactaaatatatgaaaacctaattcctctgttgtaaatcgtcagttagata

SEQ ID NO: 86446 - DNA, 259 bp, Arabidopsis thaliana columbia
aaaaaattccagttctcgagaagaacaagaatctgctctgctctcgtttctgtttttcgctctccggccaatctactaaagggtgcggacgtgattctcgagataaaggagagaaagaagaagatggagatcgataaagcgatcggagaaagtgacgataagaggttgtagactaagtacaatatcgccatcttcgtcattaaaagagctcttgctctttactctattgatgaggtccgctttagttttaaaggaaaga

SEQ ID NO: 86447 - DNA, 394 bp, Arabidopsis thaliana columbia
  unsure (1)..(394): unsure at all n locations
tccacctttggaacttccaccgtttctaaagaagccatgtccacctaaatacagtcctcctgtggaggttccacccccggtaccagtttacnagccgccgccaaagaaaganattccccctccggttccggtttacgatccaccgcctaagaaagaggttccaccacctgtcccagtttacaagccaccaccaaagggatgcttccaccgcntattcctaagangcnttgtccacctaaaccgccgaagatagagcacccacctccggttccggttttaaagcccccgccaaagatagagcacccacctccggttccggtttanaagcccccgccaaagatagagcacccacctccngttccggtacacaagccaccgaagaagncatgtccgc

SEQ ID NO: 86448 - DNA, 548 bp, Arabidopsis thaliana columbia
  unsure (1)..(548): unsure at all n locations
ctctctgaaccatagaactccaagcttgtactgtactctactaatacgtcgtcgtttatatcttactcttttgtttcctcttaccagaaaaaataaataaacagcaatattttcaattttcgactcaaatcatgcaaaccatttcgcctgcgttctcgtgcgatctcaaatccgtaattcaaccgaatctaacggctaagaacgcgcgttactcgcacgtaaatggaaagcgcgtgtctgttcgttgcagttacaggtctgagtcgtttagcttccctaacggtgttggctcaagccgagccgattggcaaagctcatgcgccatcttagccagtaaagtagtttcggctgagaattcaagctccgtcgccgtcgttaacggacacagtaacgggtccgttgatttaagccttgttcccgtcaaagtcgcagcacaacggaagcctgggtttgtttcagccgtaacggtaacagtntntttcccgggcgtttatggtntactttcgngncggnntaagngttncggggggnctncgagggcccggatt

SEQ ID NO: 86449 - DNA, 588 bp, Arabidopsis thaliana columbia
  unsure (1)..(588): unsure at all n locations
cccccccctgaatgtggagggaatcaataggctggatatcgaattcggggccgcgcgaagcatcttcctctaccctggaagggaaaagtaaagaaatgtcaacatctgagctctcgggtggagcaagaattctctacattttccaatcagtatttgttaagagcttagaggaggttgatccatgtgaagacttaacagctgatgatattcggactgcaatacaaaatgcaactggtcccagatctgcattatttgttccagatgttccatttgaagttcttgtcaggaggcaaatatctcgtttattagatcccagccttcagtgcgctaggttcatcttcgatgagctagtaaagattagtcatcagtgtatgatgaaagagttacagcggtttccagtcctgcaaaagcgcatggatgagggtattgggaactttctgcgagaaggtcttgaaccttcgcaggcaatgatccgagatcttattgaaatggagatggattatataacaccccacacccaattttatcggggggccaagccgggggncagcatgcaaccgccaatctctaggtccgatctgtgngggc

SEQ ID NO: 86450 - DNA, 2706 bp, Arabidopsis thaliana columbia
acccacgcgtccgcccacgcggcttgattaattcggcacgaggtcttctcttctccacgaacttaattttttcaaaaccctagcaactttgattcattcaaaatccgatccaacgatgactattgaagaagtttccggtgagactcctccgtctacgcctccttcttcttctacgccttctccgtcttcctccaccaccaacgccgcgccgttgggatcctctgtgattccgattgtaaacaagctacaagacatattcgctcagctcggaagccagtctacgatcgcgcttcctcaggttgttgttgttggaagccaaagcagtggcaagtctagcgtccttgaagcactcgtcggccgtgactttctccctcgtggtaatgatatctgcacacgtcgtcctcttgttctccagctcctccagactaaaagccgcgctaatggcggatccgatgatgagtggggggagtttcgtcaccttcctgaaactcgtttctatgatttctctgagattcgtcgagaaattgaggctgagacgaatagattagttggagagaacaaaggtgtagcagatacacagattcgtcttaaaatttcttcacctaatgtattgaacatcacgcttgtggatctgcctggtattaccaaggtgccagttggtgaccagccatccgacattgaagcacgtataagaacgatgatcttgtcttacatcaagcaagatacttgcttgatattggctgttacccctgctaataccgatctagcaaactctgatgcccttcaaattgctagcattgtagatcctgatggtcacagaacgataggtgtaatcacaaagttggatattatggacaaaggtactgatgctcgaaaactccttcttggaaatgttgttcctcttcgacttggatacgtgggagttgtaaatcgttgccaggaggatattttgctaaaccgcacagtcaaggaagcacttctcgcagaggagaagttcttccggagtcacccggtttaccatggtcttgccgatcgtttgggtgttcctcagctagcaaagaagttaaatcagatccttgttcaacatatcaaggtcttgcttccggatctgaagtcgcggataagtaatgctttggttgctacagcaaaagagcatcagagctatggtgaattaacagaatcaagggctgggcaaggagctcttctcctcaactttctctccaaatactgtgaagcatactcttcattgctggaagggaaaagtgaagaaatgtctacgtcagagctctctggaggagcaagaattcactatattttccagtcaatctttgttaagagtttggaggaggttgatccatgcgaggacttgacagatgatgatattcggactgcaattcagaatgcaactggtccaagatctgcattatttgttccagatgttccatttgaagttcttgttaggaggcagatatctcgtttgttagatcctagccttcagtgtgcccggttcatttttgaagagctaataaagattagccatagatgtatgatgaatgagttacaacgatttccagtcctacgaaagcgcatggatgagttatcggggagggatttcctgcgagaaggtcttgaaccctcagaaacaatgatcggggatatcattgatatggagatggattacataaacacttcacatccaaattttattggtggaaccaaggccgtggaagctgcaatgcatcaagtgaagtcttcgaggattccccatcctgtggcacgaccaaaggacactgtggagcctgatagaacatcttcttccacgagtcaagtgaaatctagatcgtttctcggcaggcaagctaatggagttgttactgatcagggagttgtatctgcagatgctgaaaaagctcaacctgctgcaaatgcgaatgatacaaggtggggtatcccttcaattttccgagggggtgatactagagcagttactaaagatagcttattaaacaaaccattcagcgaagctgttgaagatatgtctcacaacttatccatgatctatctaaaggagcccccagctgtcttgaggccaaccgaaacccattcagaacaggaagcagttgagattcagataacaaagctgttactaagatcatactatgacattgtaaggaagaatattgaggattcggtaccaaaagcaatcatgcatttcctggtaaaccacacaaaacgtgagctgcataacgtcttcatcaagaagctttacagggagaacttgtttgaagaaatgttgcaagagccagatgagatagcagttaagaggaaacgcacacaagagactctccacgttcttcagcaagcttacaggacactagatgagttgccactggaagcagattcggtgtcagcaggaatgtcaaaacatcaggagttactgacatcttcaaagtattcgacaagcagctcatactcggcatctccaagtacgacaagaagatcgagaagagcaggagatcaacaccaaaatggatacggattctaacaggatccaaatatcttgcatatctctcgactgtgataacgcatttcattcatttaatggctctttcaggttttggtattaaattatgtgttggtcatatgaagaatttatataggaaaccagtacacagtgtgggttttggtcaaagaaaaaaaaaaaaa

SEQ ID NO: 86451 - DNA, 455 bp, Arabidopsis thaliana columbia
  unsure (1)..(455): unsure at all n locations
tccctttcgaaaatcgaaacaaatcggtgcgattacnccgttttnaatttnaccggcgacgatggctttnaacaatccgcgaagaacacggagatatctcgctttaggtttagccgatgaaccaatcgccgtaccagaaaccgtttacgctcaagtccgtnagaaaaaccgtcaaagcttggtttgtcgagttcttagccctagaagacaagatctctactctgtgatcgataacnccgtcttgagtggtgtctcggaggatatgaatgtnatggacgcattatcggcggcgggaagtgtcagttcgtgtttgagaaagagccggggttttagaaatgggtcttttggtcttggtcccttacacggttgtaatgggatggctcccgttgtgttgcagaaatgggaagatnagcaagttccngagnttttaaagtccggtgccnatntggtttaaa

SEQ ID NO: 86452 - DNA, 710 bp, Arabidopsis thaliana columbia
  unsure (1)..(710): unsure at all n locations
ctaggtttgttgtgtgtacttagttatttacaggaagctgcctgactctattatccgacgacttgaaatggagaaggaactacttgaaatagaatggcctactgttaatttggatggtgatctgaagcaaatggcgctcagactatttgataaagggatgcgttccgtacaacatggtaccaacaatggaatacaaaagcgacctgctgggctatttgctctgaactacgccctgtttatgattgcagtagatgagttagaaagccgtacggacattttgaaggcatctgttcaactctacccaacatgcttggagctaaaattgttagcagttaggatgcaatcaaatgagttaaaggatatgttttcgtctgggtttgaagagcttctcaagcaggaagcaaaagaggcgtcatgcatacagtgtatttggaatcagtatgctgaatatgctttggaaggaggaagctacgatttggcaagagaactcatgtcccggtggtaccggttcagtatgggatgttttgtcccatacgtttaaggcagtacggggcantgaagnaggaagggggtgtaatattctggnatcagctttnttcaggnncttaaattttnaatcgggnncaggtggntttgtgttttgggtnccttaancccccncttnaaaaacnctncttcagggaaccttgccttngggtcnnttnncattt

SEQ ID NO: 86453 - DNA, 275 bp, Arabidopsis thaliana columbia
caatctttctctttctctctgttcttgctctcgcaaatcgcaatggattcgtttgatttcgatgacgtgaaagcagagagggcgcagggcgttgcggcgtttcaaccgcttctgtagaattggccgtttcttccgtgcggcggaggtttgcgtcgctctactcttcatcttttggacattttcgcaacttcctttcgtcgttcaaatctccggagcgtttctccgccgtagcgccgccgtcatatctactcctctgttcgttttcctcctcggga

SEQ ID NO: 86454 - DNA, 2675 bp, Arabidopsis thaliana columbia
gaaactttttgttttcttcttgtctccttttgctcttaaaagagaagctttttcaatggaatttgacttgaatactgagattgcggaggtggaagaggaggagaatgatgatgtaggagtaggagtaggaggaggaacaagaattgacaagggtaggcttggaatttcaccatcttcttcttcttcatgctcttccggatcatcatcgtcatcatcttctacaggctctgcatcttccatttactctgagctttggcatgcttgtgctggtcctctcacttgtcttcccaagaaaggcaatgtagttgtctatttccctcaaggtcatttggagcaagatgctatggtttcatattcgtctcctcttgaaatccccaaatttgaccttaatccccaaatcgtctgcagggtggttaatgtccagttgcttgctaataaggacaccgatgaggtctacactcaagtcactctgcttccacttcaagagttttcgatgctaaatggggaggggaaagaggtcaaggagttaggaggggaggaagagaggaacggaagctcatccgtcaagcggacacctcatatgttctgtaaaaccttaacagcgtctgacacaagcacacatggaggcttctctgtacctagaagagccgctgaagattgttttgctcctcttgactacaaacaacagaggccatctcaagagctcattgcaaaggacctccatggagtagagtggaagtttcgccatatctatagaggtcaaccaaggaggcatctactcaccactggttggagtatctttgtcagtcaaaaaaatctcgtctctggtgatgcggttctctttctgagagacgaaggaggagagctgagattaggaatcagaagagcagcacggccaagaaatggacttcctgactcaatcattgagaagaattcatgttcaaacattctgtctcttgtggctaatgctgtatctacaaaaagcatgtttcatgtgttctacagtccacgagcgacgcatgcagagtttgtgattccttatgagaagtatatcacaagcatcaggagtcctgtttgcataggcacaagatttagaatgcgatttgaaatggacgattctcctgagagaagatgcgctggtgtagtgactggagtctgtgacttggacccgtataggtggccaaactctaaatggaggtgcttgttggtgcgatgggatgagtcttttgtgagtgatcatcaagaaagagtttcaccttgggagattgatccctcggtttctctcccacacttgagcattcagtcatctccaaggcctaaaaggccatgggcaggtttactggatactaccccacccggaaaccccataacaaaaaggggtggttttttggactttgaggagtcggttagaccctctaaggtcttgcaaggtcaagaaaatataggttctgcatcaccctcacaggggtttgatgttatgaaccgccggatactggattttgcgatgcagtctcatgcaaatccagttcttgtgtcgagtagagtcaaggatcgatttggtgagtttgtagatgctactggcgtgaacccagcttgttcaggtgttatggacctggataggtttccaagggtcttgcaaggtcaagaaatttgctcgcttaaatcattcccgcaatttgctggtttcagtccagctgctgctcctaatccctttgcttaccaagccaacaagtcaagttactatccgctagctttgcatgggattaggagcactcatgttccgtatcagaatccatacaatgcgggaaaccaatcctcgggtcccccttcacgtgcaataaactttggtgaagagactagaaagtttgatgcacaaaatgaaggtggcctaccaaataatgttacagctgatttgccattcaagattgatatgatgggaaaacagaaaggcagtgagttgaatatgaatgcttcatcaggatgtaaacttttcggattctccttaccagtggagacacctgcatctaagccgcaaagctcgagcaaaagaatctgtacaaaggtccacaagcaaggaagccaagtggggagagctattgatttgtcgcgacttaacgggtatgatgatctccttatggagcttgaacggctgttcaacatggaagggcttctcagggatcctgaaaaaggatggaggatcttatatactgatagtgagaacgatatgatggtcgttggcgatgatccatggcatgatttctgcaatgtggtgtggaagatacacttatacacgaaagaggaagtggagaatgcgaatgacgataacaagagttgtttagagcaagctgctctcatgatggaagcatcaaagtcatcttctgtgagccagcctgattcttctcctacaatcactagggtttgatacccataaagaagcttatttcctatgttttaaagtgtgttttgctcacaaaagaacttcaactttatctttgtctttgaatccatttatgtgtttgtttgtgtttcttctggtctccatggatgtctcatgtgtaccgttttactcgagagatatgtgagtttatgggatgtgtaaagcatgccattggattttaaggttttcaaaattacaatatatatattagttttgaagttaaaaaaaaaaaaaaaaa

SEQ ID NO: 86455 - DNA, 543 bp, Arabidopsis thaliana columbia
caacttaaacacaaaaaccaacaattatcaatcttcgatgacgcatctcaacaaaaaacagaggttagagaataaccataacaatactgtgaacaaccatttcgaagacttacatgacgatctcatcatctctatccgccgcaaactcgcttcctccgcttcttctccttccgatttcctcaccgttctctccacatgcaagagattgaatcggttaggattacatcctctggttttatctaaagccggtactcaaaccctagccgtcacggcggagaaatggtcagattcttctcataaattcctcaaactctgtgttaatgccgggaaacatcggcgcttcgtacttctctcggaatgatccgattttactgtctacaaaatccagtgagcggcgcgtcattaatggctaaagcggcgattaaatcacacgcgccggcgctttattcgttatcggggattcagtttaacggaagcggcggttcaaaaaccgataagaatctacgcgccggcgttgctctttgtgcacgctctgcttattta

SEQ ID NO: 86456 - DNA, 884 bp, Arabidopsis thaliana columbia
  unsure (1)..(884): unsure at all n locations
gaaagccgcagaaggaagaaaagccggttgatgcagctacggcgaaggaaatnagaaagcaagaggagattgctaaagccaagcaagccatggaaaggaagaagaagctggcagagaaagctgctgctaaagctgctataagagctcaaaaggaagctgagaagaaagaaaagaaggagcaagagaagaaggccaggaagaaaaccggaggcaacacagaaaccgagactgaggaagttccagaagcttctgaggaggagattgaagctccggtgcaggaggagaaaccgcagaaggaaaaagtcttcaaggagaaaccaattaaggaacaggacccgcggtaggggaccagaaacgatcccaagagcgatccttaagcgtaagaagtcgactaattactgggtttatgctgctccagcggctctggtggtactgttgcttcttgtcttgggttactactacgttctctagatcgaacggagtgatcaagcgaagctgtcttgttgtagtttggaatactttaaaactgggatttttgccttcttgactcttaaaaaactcataagcttatgcatcttttacatacgagtagagactcttttcttttaagtactttttacaatcttctcttctgttgttgaggctttaaactttgaaggaaggaaaagatacaacacacttacaaataacaatttgtctttttggagnccggatttttttttttttggtctctgnttttcncgctttcttttgatgcaacatgcaaccaacccaatnagtgttnaggggctangcaaaggtttaatntaaaggggaaggggtacnaccaaaggggccaccaaatgggggnatttcncccctttangnaccggagntttntnnag

SEQ ID NO: 86457 - DNA, 823 bp, Arabidopsis thaliana columbia
  unsure (1)..(823): unsure at all n locations
tagagacttggctgcacaaaagaacataagcgagcttgaggcgctagccaatgctgaggttgagaaatttatatccctttggtgcagtaagaagaatttcagagaagattatgagaagagaatcttgcaatcacttgattctaggcagctgagccgagatggacggatgaggaaccccgatgagaagcctctgattgctccagaggcagcaccatcaaaggcaacgccttctgaaaccgaggttgtccctaaagctaaggcaaagccgcagccaaaggaggaaccagtttctgcacctaaaccagatgctactgttgctcagaatactgagaaagctaaagatgcagtaaaagtaaagaatgttgctgatgatgatgatgatgaagtatatggtcttggaaagccgcagaaggaagaaaagccggttgatgcagctacggcgaaggaaatgagaaagcaagaggagattgctaaagccaagcaagccatggaaaggaagaagaagctggcagagaaagctgctgctaaagctgctataagagctcaaaaggaagctgagaagaaagaaaagaaggagcaagagaagaaggccaagaagaaaaccgggggcaacacagaaaccgtgacttaggaagttcccagaagcttctaagggaggagatttnaagctcccggtgcaggggggtggaacccccaggaagggagaaaattttttcaagggggggacccctttagggaccagggccccccgggtngggggcccctaaacggttccccagggggntcctttagggttanaagtcggcttatttctttgggtttt

SEQ ID NO: 86458 - DNA, 490 bp, Arabidopsis thaliana columbia
  unsure (1)..(490): unsure at all n locations
ttcttcctttagtcaaatcagctttagagacttctcaagttacncctgaagaaatcgactgtatttgttatacgaaaggtcccgggatgggagcgccgttgcaggtttcagccattgttgttagagtattgtcacagctttggaaaaagccaattgttgctgtgaatcattgtgtggctcacattgagatggggagagtagttactggagctgatgatcctgttgtgttgtatgtnagtggtggtaacactcaggtgattgcttatagtgaaggtaggtaccggatttttggtgagactattgatattgctgttggtaattgtttggatcggttttctaagagtcttgaagctttctaaatgatcccagcccccgggtataaacattgaccagctttcttaggaaagggggaaaacttttattganctncccgaatccctgttcaaaaggnttgggatgatccgttcaacgggattnttgngttatntcg

SEQ ID NO: 86459 - DNA, 852 bp, Arabidopsis thaliana columbia
  unsure (1)..(852): unsure at all n locations
acgcacacnnnnnnnnnnnnnnnnnnnnnnnnnnnnnnnnnnnnnnnnnnnnnnnnnnnnnnnnnnnnnnnnnnnnnccacgcgtccgcatttttcatcgttgatcagtcgtcgatcctcttgagtgatttgattttagactttctagttatcaaactcgaaagatggattctgtccttgtagtgggcattgcatcggttattctcggtgcgttgatcgctgtactcttcttcggtagctacttccggaagcggacatcggaggtgcaatccatggccaaagcggagcctcaggatccgatccggaatccaaagtcgaatcatcctgctccgaagaagaatcatcccaaatctcaagcgtccgataagaatcagaacaaacggcatcatcctttagatttaaacacgttgaaaggccacggtgatgctgttactggactctgtttctcgtccgatggaaagagcttggccacagcttgcgctgatggagtaatcagggtgttcaagctagatgatgcatcaagcaaaagcttcaaatttttaaggataaatcttcctgctggaggacatccaaccgccgtggcatttgctgacgatgcctcatctattgttgggggctttcatcatatgtctggttcatctttgtacatgtacggtgaagantagcaaaaggatcagcaagggaagccttctcttcctagtatcaaatgggaccaccatcatattcatgagaagagatcagtgcttaccatctctggagctactgcaacttacggtactgctgatggaagtgttggcattgcctcttgttctgaaaggactgatatcgtncctttggcatgggaaactggga

SEQ ID NO: 86460 - DNA, 572 bp, Arabidopsis thaliana columbia
  unsure (1)..(572): unsure at all n locations
tttttnccgggaaccgcgtttncccccggggtgccctggccggtttntgaccncgttggccattaggtactgccccccaaggagtgcaccaaatgggaaaaagaggccctggagcttctcaaccccgcgccatcttccaccaatgtcgataagctcccgagcaacgggaactgtgacgactttgggacccggtcagaccccgaggaatctcggtaacggtatcgcatcagttgggggttcattcaactactagaagtagatggaaacctccctttttattcaagttaagtttcaatcttataaattagtagtgagatcatcttagtttaattcccacgcaaaaatctctctttattacttataaaaaagggagatttgcctttgcctttgatggaaacaaaaactatataatccctctgtcgactcgtaatactgtaattataagatcttttggtctttttcttatatgaatatttttactgaactctatatatgtcacttgggcggccgctctagaggatccaagcttacgtacgcgtgcgtgcgacgtcataatcttctatagttgtcct

SEQ ID NO: 86461 - DNA, 1417 bp, Arabidopsis thaliana columbia
ggccccccctcgggtcgactgtatcgataagcttgatatcgaattcgcggccgctccgcgccatcttccaacaatgtcgataagctcccgagcaacgggaactgtgacgactttgggaaccggtcagacccgaggaatctcggtaacggtatcgcatcagttgggggttcattcaactactagaagtagatggaaacctccctttttattcaagttaagtttcaatcttataaattagtagtgagatcatcttagtttaattactagcaaaaatctctctttattacttataaaaaagggagatttgcctttgcctttgatggaaacaaaaactatataatccctctgtcgactcgtgagaaccaaatccggaatacaaagtcagacatatatataaacaactatgtcttttagaaaccctaacaaccagaaagcacaataagtcaataacagaggataatctaaacctaaactaacaaaggtcagggcacaaaatgtcatttattcataatgaaaactctctcctactctgtaacctagatctttcactcaatttctcttaatctcctgtacaggtagcactatcctattacattaatcccaagctaggagtctggttcatccgttcttgttgcttcatccttcaccatggtccggttaatgtccttctcaagcattgccttttgctgccccacggtcgcttcgacgtttctttcagctcattcttctgcatttccaccatttcagcctgttttttctgcagttcttgattcgttttcttgagcttttcaatttcggcttccagttccaatgtataagcctgctttcgagctcttgatctagcagctgattcccgattcttgatcattctcctttgcctcctctcgataaccttctctagacctgtattgcttcttcgtcctcgattaagcacatacggaactggtgataaagaattattttctgcgctgcttgttcctggagaagttgctgcaacagtgaccccggttcctccgtaactagctaatccattattattgttgatagaattatttgcagccccagcaaaacccttgttggttatattcacaggcgcagaaaatgctacgtttgcttgtttaggaaaaatggtttgaggcagccgctgctgtggatgaggctgattcagcgcggccgtctgctgttgttgctgctgaagcaactgctgttgttgttgttgctgctgcattgttccacccattttgagccctaaaccaggtggctgattcaagatcatagaatcattagtaccattgaatgttatgctgttttgatttggctgaccaaatccaaaacctaagccgcacagcagcagtgctgttaccataaaacccattgttattgtttcccggacgcgtgggtcgacccggaaattccg

SEQ ID NO: 86462 - DNA, 3832 bp, Arabidopsis thaliana columbia
  unsure (1)..(3832): unsure at all n locations
gtaaaatttagcagagagaagaatgaaacaaataattatagcaccgtcacgtcgccgccgtatttcgttaccggaaaaaaaaaaatcattcttcaacataaaaataaaaacagtctctttctttctatctttgtctatctttgattattctctgtgtacccatgttctgcaacagttgagcaagtgcatgccccatatctctctgtttctcatttcccgatctttgcattaatcatatacttcgcctgagatctcgattaagccagcttatagaagaagaaacggcaccagcttctgtcgttttagttagctcgagatctgtgtttctttttttcttggcttctgagcttttggcggtggtgggtttttctggagaaacccaaacgactatcaaagttttgttttttacaattttaagtgggagttatgagtggggtggattaagtaagttacaagtatgaaggagttgaagattcgaagaagcggttttgaagtcggcgagaccaagattgcgagcttatttggctgatgatttatttcagggaagaagaaataaatctgttttttttagggtttttagatttggttggtgaatgggtgggaggtggagggaaacagttaaaaaagttatgcttttagtgtctcttcttcataattacatttgggcatcttgaaatctttggatctttgaagaaacaaagttgtgttttttttttgttctttgttgtttgctttttaagttagaataaaaaatgagattatcttcagctgggtttaatcctcaacctcatgaaggagagaaaagagttcttaattctgagctctggcatgcttgtgctggtcctcttgtctcactacctcctgttggaagcagagttgtgtattttcctcaaggtcacagtgaacaggttgctgcttcgaccaacaaagaagtagatgctcatataccaaattatccgagcttgcatccgcagcttatctgtcagcttcataatgttacaatgcatgctgatgtggagactgatgaagtctatgcacagatgactttgcaaccgttgaatgcgcaagagcaaaaagatccttaccttcccgcggaattaggtgtcccaagtagacagcctacaaactatttctgtaaaactctgactgctagtgatacaagcactcacggaggtttttctgtacctcgccgagctgctgagaaagttttccctcccttggattactcgcagcagccaccagctcaagagttaatggcgagggatctgcatgataatgaatggaagttcaggcatattttccgaggccaaccaaagagacatctccttaccacgggttggagcgtatttgtgagtgctaaaaggcttgttgctggtgactctgttcttttcatctggaacgataagaatcaattacttcttggtataagacgagccaaccgaccacaaactgtcatgccttcatctgttttgtcaagtgacagtatgcatttaggccttcttgctgcagcagctcatgctgccgctacaaacagccgattcaccatcttctataacccgagggcgagtccatcagagtttgttatacccctggctaagtatgtgaaagcggtttatcacactcgcgtctctgttggtatgcggtttaggatgctgtttgaaactgaagaatctagtgttcgtcggtacatgggtacaataactggcatttgtgatctagatcctactcgttgggctaattcgcattggcgatctgtcaaggttgggtgggacgaatctactgcaggagagagacagccaagggtttcattgtgggagattgagcctttaacaacattccctatgtatccatctccttttcctctcaggcttaaacggccgtggcctcctggtctcccatctttccatggccttaaagaagatgatatgggtatgagtatgagttcaccgcttatgtgggatcgaggactccaatctctaaactttcaaggtatgggagtaaacccgtggatgcagccgagacttgatacgtcgggcttgcttggtatgcaaaatgatgtgtaccaagcaatggctgcagctgcccttcaagacatgagaggcattgatcctgcaaaagctgctgcttcacttcttcagttccaaaattcgccggggttctcaatgcaatctccgtccttagtgcagccgcagatgctgcagcagcaactctctcagcagcagcaacaactctctcagcagcagcagcagcagcaacagctctcccaacagcagcagcaacagctctctcaacagcagcagcagcagctctctcaacagcagcagcaacaactctctcagcagcagcagcaacaggcgtatcttggcgttcctgaaacccaccagcctcagtctcaggctcaatcacagtcaaacaatcatctttctcagcagcagcagcaagtagtggataatcataatccgtctgcgtccagtgctgctgttgtttccgctatgtctcaatttggttctgcttctcagcccaacacgtcaccactccagtccatgacctctctgtgtcatcagcaaagcttctccgataccaacggaggaaacaatcctatttctccacttcacactcttctcagtaacttctctcaagacgaatcttctcaactgctccacctcactagaacaaactctgcaatgacttcatccggttggccatcaaagcgtcctgcagttgattcatcgttccagcactctggagccggtaataataacactcaatccgtattggagcaactgggacagtcccacacaagcaacgttcctccaaacgctgtctcgttgcctccatttcccggtggtagagagtgctcgatcgagcaagaaggaagcgcctcagacccgcatagccatcttctctttggagtcaatatagattcatcttctcttttgatgccgaacggaatgtcaaaccttagaagcattggtattgaaggtggtgactccacgactttacccttcacatcatctaatttcaacaatgatttctcgggtaatcttgcaatgacaacaccttctagttgcatagatgaatcgggttttctacaatcctcagaaaacctcggttccgagaacccacaatctaacacctttgtgaaggtgtacaagtcagggtcttttggaagatcgttagatatatcaaagtttagcagctaccacgagctgcgaagcgagcttgctcgcatgtttggcctcgaaggccaattagaagaccctgtgagatcaggctggcagcttgtatttgttgaccgagagaacgacgttcttctcctcggcgatgacccttggccggagtttgtgagcagcgtgtggtgcattaagatactgtcaccacaagaagtgcaacaaatgggaaaaagaggccttgagcttctcaactccgcgccatcttccaacaatgtcgataagctcccgagcaacgggaactgtgacgactttgggaaccggtcagacccgaggaatctcggtaacggtatcgcatcagttgggggttcattcaactactagaagtagatggaaacctccctttttattcaagttaagtttcaatcttataaattagtagtgagatcatcttagtttaattactagcaaaaatctctctttattacttataaaaaagggagatttgcctttgcctttgatggaaacaaaaactatataatccctctgtcgactcgtaatactgtaattataagatcttttggtctttttcttatatgaatatttttactgaactctatatatgtcactttccttnnnnnnnnnnnnnnnnnnnnnnnnnn

SEQ ID NO: 86463 - DNA, 388 bp, Arabidopsis thaliana columbia
ctcgatttctctgctccatcttcttcctcgtcttctcattctctctcgctctggcacagtagaaactgagctcacgaaagcaggtagtcagtgtttttgtttcgaactcttccaacatgcagaaggaaattgctggtgatgctccatcagcaccaaccactcgtgttcggcatcggcagcgaaacagcgatgttggtgcaggggcaggcaaaccaaatggaaaccatttacttgtcaatgacagcaaaaaatacaaatcgtttctcattcgagcatactccactttctggatgataggtggttttgctcttatagtttacctgggtcatctctacattacagccatggtggttgttattcagatattcatggcacgagaactttttaa

SEQ ID NO: 86464 - DNA, 460 bp, Arabidopsis thaliana columbia
  unsure (1)..(460): unsure at all n locations
ttcccccaagcttttattccggcccccctttggggnaaancttgttncccctttcagggttcccnggtccgggaattccccngggtcggncccnacggngtcccgcacnancaccttggttggggacccttttagcgttcgggatcccgttgtgcttcttaccggggtgcctggaatttgtttccagcatatctggaagtttttccgaggatttataaggtaaggtatattatttgggtaaggcccataggaaatcccagtgatgcaatttcaggggatgagttcaggaactcaaagcacaatgaagcattggtattggcttctgtatgtgtgcagatactgttgatttcactttttgtaatctccgtactaaatctttgcagatgatgaaacaacaaaaacaaggaaaaaaaaaccctctgttggttttaactaaacaaccttttgaccggcttgaaac

SEQ ID NO: 86465 - DNA, 533 bp, Arabidopsis thaliana columbia
accacacgtccgcccacgcgtccgcggacgcgtgggcggacgcgtgggcggacgtctcagaagctttgcgctccaagttctggtctctgtgagtgaatcaaatcatggttgagcgggcgaacaccgttggaattccggtgaaccagatctcattgttgaaggatgagctcgatatcgtgatccccacgatccgtaatctcgatttcctgtagatgtggtggccttttcttcagccttaccatctgatcatcgtccaggacggagatccatcgaagaagatccatgttcctgaagggtacgactacgagctctacaacaggaacgacattaaccgaatcctcggacctaaggctttttgtatctcgtttaaggattctgctcaagactactggtggctaccaggagaatggcccggacccccatccccccctttgaaattgctctgatgatgttgggcttgatgctgacaaatgcaaagtgctagttaacattgagcaacagaacctttctgcccattgcttcctttttttcac

SEQ ID NO: 86466 - DNA, 476 bp, Arabidopsis thaliana columbia
tgcttaatcataaactactctttcttccttgtcgtttcaaatggcgcaattgtattcttccgtgaaacccacgccaatgttgaaagatgagctagacattgtgatacctacgattcgaaacctcgacttccttgagatgtggcgacctttctttgagcagtatcatttgatcattgttcaagatggtgatccttcgaaagtcatcaacattccagtagggtttgactacgagctctacaacaggaacgacatcaatcgaatcttgggtcccaaggcctcttgcatttccttcaaggactctgcttgtcggtgcttcgggtacatgggctccaaaaagaagtacatctacaccattgatgatgattgctttgttgcaaaggatccaacagggaaagagatcaatgcgcttgagcagcatatcaagaacctcttatctccatcaactccgcatttctttatcacaacttatgatccat

SEQ ID NO: 86467 - DNA, 550 bp, Arabidopsis thaliana columbia
  unsure (1)..(550): unsure at all n locations
ttttgaatggttggaccgaggcgtccgcccacgcgcccgccaaattctcttctctctgaatcaatccaatcatggttgagccggcgagcaccgttggaattccggtgaaccacatcccattgttgaaggatgagctcgatatcgtgatccccacgatccgtaacctcgatttcctggagatgtggaggccctttcttcagccttaccatctgattatcgtccaagatggagatccatcgaagaccattgctgtccctgaagggttcgattacggaactctacaacaggaacggcatcaaccgtatccttggtcctaaagcttcctgcatttcctttcaaggactctgcttgtcgttgcttcggctacatgggctccaagaagaaggacatcttcactattggtggcggttgcttcgttgctaaggatccatctggaaaagctgtgaacgctcttggaacaaatcagancctttttgccataaatcatttttttaaaactntcgccanccggaaggnctgcttggccggggaccttnaggtcggnggnntt

SEQ ID NO: 86468 - DNA, 641 bp, Arabidopsis thaliana columbia
  unsure (1)..(641): unsure at all n locations
cagccacacagggaacnngtaaccncattcagttgtcgtaccantgacaccaatttcacaaacttgtcggacgcgtgggtcgaccaacgcgtccgcgacgatatgtgggctggatggtgtatcaaggtgatctgtgaccatttgggattgggagtgaagacaggtttgccctacatttaccacagcaaagccagcaacccgtttgtgaacttgaagaaggagtacaagggaatcttctggcaggaggatatcatncctttcttccagagcgcaaagctcacgaaagaagctgtgacagttcaacaatggctaacatgggagctggtccaagtttggtgaaagggagaagctaaagcccccatttgatccttaacttttgacaagcttgcagatgctatggtcacttggattgaagcttgggatgagcttaacccacccactaaagcttgagcagcaaaaaaaaccaccaccgcagttttggttatnaagctcaacattatcatctatcttccnccgttttgtttttgttttngctttcnccaaatttnccgggcgtncngccaggtccggtttnaagnngcccgggnggtttanttaaaaaagtgnantgggggagccccanttnncggcccgggncaanc

SEQ ID NO: 86469 - DNA, 778 bp, Arabidopsis thaliana columbia
  unsure (1)..(778): unsure at all n locations
aggtgcactatagaagagctatgacgtcgcatgcacgcgtacgtaagctcggaattcggctcgagcaggaacgacattaaccgaatcctcggacctaaggcttcttgtatctcgtttaaggattctgcttgtcgatgctttgggtacatggtgtctaagaagaagtatatcttcaccattgatgacgattgcttcgttgccaaggatccatcaggcaaagcagtgaacgctcttgagcaacacatcaagaaccttctctgcccatcgtctccctttttcttcaacaccttgtacgacccttaccgtgaaggtgctgacttcgtccgtggataccctttcagtctccgtgagggtgtttccaccgctgtttcccacggtctgtggctcaacatccctgactacgatgccccgacccaactcgtgaagcctaaggagaggaacaccaggtatgtggatgctgtcatgaccatcccaaagggaactcttttccctatgtgtggtatgaacttggcctttgaccgtgagctcattggcccggctatgtactttggtctcatgggtgatggtcagcctattggtcgctacgacgatatgtgggctggttggtgcatcaaggtgatctgtgaccacttgggcattgggagtgaagaccggtttgccctacatctaccacagcaaagccagcaaccggttgtnacttaagaaggggncaagggatctctgcagggganacatccttctccagangaaagccacgaaaaactgtncagtcaanagc

SEQ ID NO: 86470 - DNA, 1553 bp, Arabidopsis thaliana columbia
  unsure (1)..(1553): unsure at all n locations
nnnnnnnnnnnnnnnnnnnnnnnnnnnnnnnnnnnnnnnnnnnnnnnnnnnnnnnnnnnnnnnnnnnnnnnnnnnnnnnnngacccacgcgtccgctcaaatctccacaatcttttctctccaaattctcttctctctgaatcaatccaatcatggttgagccggcgaacaccgttggaattccggtgaaccacatcccattgttgaaggatgagctcgatatcgtgatccccacgatccgtaacctcgatttcctggagatgtggaggccttttcttcagccttaccatctgattatcgtccaagatggagatccatcgaagaccattgctgtccctgaagggttcgattacgaactctacaacaggaacgacatcaaccgtatccttggtcctaaagcttcctgcatttccttcaaggactctgcttgtcgttgcttcggctacatggtctccaagaagaagtacatcttcactattgatgacgattgcttcgttgctaaggatccatctggaaaagctgtgaacgctcttgagcaacacatcaagaaccttctctgcccatcaactccatttttcttcaacaccttgtacgacccataccgtgaaggtgctgacttcgtccgtggataccctttcagtctccgtgagggtgtttccaccgctgtttcccacggtctgtggctcaacatccctgattacgatgcccctacccaacttgtgaagcctaaggaaaggaacacaaggtatgtggatgctgtcatgaccatcccaaaggggactcttttccctatgtgtggtatgaacttggcctatgaccgtgagctcattggtccggctatgtactttggtctcatgggtgatggtcagcctattggtcgctacgacgatatgtgggctggatggtgtatcaaggtgatctgtgaccatttgggattgggagtgaagacaggtttgccctacatttaccacagcaaagccagcaacccgtttgtgaacttgaagaaggagtacaagggaatcttctggcaggaggatatcattcctttcttccagagcgcaaagctcacgaaagaagctgtgacagttcaacaatgctacatggagctgtccaagttggtgaaggagaagctaagccccattgatccttactttgacaagcttgcagatgctatggtcacttggattgaagcttgggatgagcttaacccacccactaaagcttgagcagcaaaaaaaccaccaccgcagttttggttattagctcaacatatcatctatcttctccgttttgtttttgttttgtcttttctcaaattttccggcgattcttcagttcgtttttaagttgccggagtttatttaaatagtgaatggtgtagttctatttatgaccgagacaatctctcttttgaggtttttcgtttttgtttcaataataaaaaatcatatcccttaaaaaaaaaaaaaaaaaaaaaaagggcggccgctctagaggatccaagcttacgtacgcgtgcatgcgacgtcaagactcttctatagtggtcctaa

SEQ ID NO: 86471 - DNA, 1528 bp, Arabidopsis thaliana columbia
  unsure (1)..(1528): unsure at all n locations
aggtacggtccggaattcccgggtcgacccacgcgtccgcatctctctcatttcgaaaccatggttgagccggcgaatactgttggtcttccggtgaacccgactccgttgctgaaagatgagctcgatatcgtgattccgactatcagaaacctcgatttcctcgagatgtggaggccttttcttcagccttaccatctgatcatcgtccaggacggagatccatcgaagaagatccatgtccctgaaggttacgactacgagctctacaacaggaacgacattaaccgaatcctcggacctaaggcttcttgtatctcgtttaaggattctgcttgtcgatgctttgggtacatggtgtctaagaagaagtatatcttcaccattgatgacgattgcttcgttgccaaggatccatcaggcaaagcagtgaacgctcttgagcaacacatcaagaaccttctctgcccatcgtctccctttttcttcaacaccttgtacgacccataccgtgaaggtgctgatttcgtccgtggataccctttcagtctccgtgagggtgtttccaccgctgtttcccacggtctgtggctcaacatccctgattacgatgcccctacccaacttgtgaagcctaaggaaaggaacacaaggtatgtggatgctgtcatgaccatcccaaagggaactcttttccctatgtgtggtatgaacttggcctttgaccgtgagctcattggtccggctatgtactttggtctcatgggtgatggtcagcctattggtcgttacgacgatatgtgggctggttggtgcatcaaggtgatctgtgaccacttgagcttgggagtgaagaccggtttaccgtatatctaccacagcaaagcgagcaacccttttgttaacctgaagaaggaatacaagggaatcttctggcaggaggagatcattccgttcttccagaacgcaaagctatcgaaagaagcagtaactgttcagcaatgctacattgagctctcaaagatggtcaaggagaagttgagctccttagacccgtactttgacaagcttgcagatgccatggttacatggattgaagcttgggatgagcttaacccaccagcagccagtggcaaagcttgagagcagtatgagccaaaaagaaaaagccaccaaagttttggttatttttagctcaaattatcgttacttttaaatttctgattttacgaacctttcttgctttttttacacatttgagtagttttcatcatcagtactttctcattgtccggttatggtttttgcatttggtttaaatatcaccggtttatttataaacagtggtggattagtagtactattttctgagtttttttctttgtttcattaataaaaaggccttttcataggtgtttgcaattaaaaaaaaaaaaaaannnnnnnnnnnnnnnnnnnnnnnnnnnnnnnnnnnnnnnnnnnnnnnnnnnnnnnnnnnnnnnnnnnnnnnnnnnnnnnnnnnnnnnnn

SEQ ID NO: 86472 - DNA, 351 bp, Arabidopsis thaliana columbia
  unsure (1)..(351): unsure at all n locations
ctttnggttcaacggaactnctggcgtctggagaatctcagcattgaatgagtccgggggatggaatgaccagacaacagtagaagacatggatttagctgtacgagctacactgagaggctggaagtttctatatatcgatgatctcaaggtaaaaagtgagttaccttgttccttcaaagctctgcgtagcagcagcatcgatggacttgcggccctgccaatcttttaagggaaatggctggacaaataataagaggcgagaatgtatctctntggaagaggtggtatatgttgtacagcttctnctttcaatgcgcaagatcgtggggtcanattcctaaaattctg

SEQ ID NO: 86473 - DNA, 798 bp, Arabidopsis thaliana columbia
  unsure (1)..(798): unsure at all n locations
ggcaccatacgactcactttanggagagctggtacgcctgcaggtaccggtccggaattcccgggtcgacccacgcgtccgggaaaagcagctctcaagagaagttcatcagttagaggaagcgggatcgagactcctttcagcgaaagaccttctccgaggtctgaatcgatgagatcatatgcagtgggggaggttcagtgccatgcaccagactctcctactgagtttataagtagagatactaggaaacttttggcagagagattgaagaatgttttgagaaaagagatgactccttcacatgattctgtgaccaaatctagtagccgtttgcgacctactgtgtcggatgcagcgaaacaagctgaggaaatcaatcaagaagatgttcctaagaaagagtctttatcaccaagaaatctcaaaagatcactatctgctcctgtctcagggacatcgtttggggtagctttggttagaggaccggcatgttttgacaggcgcacagatcatgaggaagcacgaggctacaataacagagcgagaagaaacagaatcagaaacagaacctgttgttgttgatccaatcaggaggaaagaaagattcaatcttaggaagaaagtgtccagctttagatcaactcttagaggaagaatctttggtaagaagatacgttcaatgatcgaatcaaacagtttcgaggatgaatcaatcaaagacttcgtgaccggatcgaagtttaacaacttttacgatcgaaatgagaattcaacagaagtgcctccaagccctgc

SEQ ID NO: 86474 - DNA, 538 bp, Arabidopsis thaliana columbia
atccttttattttattttattttgtcttaaagcttttggcgagtttgcttgtgtgtgagtgtgtggttatggactctccgttcaaacctgatgtcgtcagaggtcaagtggctctcatcaccggtggtggatccggtatcggttttgagatctcttctcagtttggcaaacatggagcttctatcgctatcatgggacgacgaaaacaagtcctcgatgacgccgtctctgctcttcgatctcttggaatccaggctattggattggaaggtgatgttcgtaagcaagaagatgcgagaagagttgtggaagcaacttttcagcattttggtaaacttgatattcttgttaacgccgctgctggcaattttctggctgctgctgaggatttgtctcctaatggcttcagaacagtcttagacattgatgcggtaggaacattcaacatgtgtcacgccgctctcaagtatcttaagaaaggagcgcctggaagagacttcataagcggtggaggtttcgttttttacaatagcgcgac

SEQ ID NO: 86475 - DNA, 531 bp, Arabidopsis thaliana columbia
  unsure (1)..(531): unsure at all n locations
cccacgcgtccgctcacttttctgaaaaagttgtacgtccaaaatctccaaacccttttttaagaacaaatctcaatccatggcaatcatcgatcaaaattgagaatcacacaagcttcacaatgtcatcatcatcatcaacgacgacgaacacaacaacagaatcagattcatcatctctacctactcacatcggtagatcaaattccgacggaatcatcgacactacaccatttcttcctcccaccgttacaagaaccataagcgtagatgaagaatccaatccaattcatcgatccgctagacgacaaggtctaagagaagcagcgaggttcctccgtnacgntggtagccggagaatnatgcgtgaaccatcgatgctcgtnagagaaaccnctnctgngcaattagaagagagncaaagtgattgggcgtatttctaaaacctgtggtgtttntttgacatttttgtggaatctttgcttttttttngccatcggnttttgcctgttntagatanttttgcccggt

SEQ ID NO: 86476 - DNA, 431 bp, Arabidopsis thaliana columbia
  unsure (1)..(431): unsure at all n locations
ccgaccgacgcgnccgaaaaaaaacagcttcttcttcaaagcgagacctatctgagtcgactcgtaacgagttgatttttttttgttttcttctctactggtttcgcttttcgagcttctcgtctccgttaatcgttaaatctagctcattgatccgatatccattgttttctctcgccggcgcgtcattgtcattcgtcgtcgagttctgattgttttaactatggaagctcgtcgtggagtctaattcattattgagcttgaggattggttcggttgatggtcttttccaccgtttgaaagagttcttcagtttaacatctggtgttggatctagtcacctgtattgaaagtgggaagaaactaacttgtgcagccatagtcgcaaaggctgtgattttttgtctccacactcatgtcacgtaagcttg

SEQ ID NO: 86477 - DNA, 369 bp, Arabidopsis thaliana columbia
acccacgcgtccggttcgtagaaactagaaactcttcccctcacgatcttgctttctttattttgcttcaaccctagtttatttgaagtctctagtataaagttctctgtttcaagttactttctcagcacgagcaaccaaaagtaatcatatggcgaatctaatttcgtttcacgatgtggctaaacataagtgcaagaacgattgttggattctcatccatggaaaggtctatgacatcagcactttcatggacgaacatcccggaggtgacaatgttctcctcgccgtcaccgggaaagacgcgtcgatcgatttcgaagatgtgaaccatagcaaagatgccaaggagctaatgaagaaatactg

SEQ ID NO: 86478 - DNA, 713 bp, Arabidopsis thaliana columbia
  unsure (1)..(713): unsure at all n locations
gccnnnnnnnnnnnnnnnnnnnnnnnnnnnnnnnnnnnnnnnnnnnnnnnnnnnnnnnnnnnnnnnnnnnnnccacgcgtccgcccacgcgtccgcccacgcgtccgtacggctgcagaaaacgacagaaggggacgagcaaccaaaagtaatcatatggcgaatctaatttcgtttcacgatgtggctaaacataagtgcaagaacgattgttggattctcatccatggaaaggtctatgacatcagcactttcatggacgaacatcccggaggtgacaatgttctcctcgccgtcaccgggaaagacgcgtcgatcgatttcgaagatgtgaaccatagcaaagatgccaaggagctaatgaagaaatactgtatcggtgacgttgaccagtcgacggttccggtgacgcaacagtatattccgccgtgggagaaggaatctacggcggcggaaacaactaaagaagaatctggaaagaagctgcttatctacttaattcctctctttgatactcggcggttgcttttcggttctcaagattcttcaaacaacaagttnggccnaaattnttgatgancaggattgataagggggttcttaccttgtnccttggntttccgtttgttgggaaataacggggctttttnttttnaaggttttgggcnatttgcccatngnnnagaatttggccttaaaggcctaattncttc

SEQ ID NO: 86479 - DNA, 717 bp, Arabidopsis thaliana columbia
  unsure (1)..(717): unsure at all n locations
ccacaggtctatgacatcagcactttcatggacgaacatcccggaggtgacaatgttctcctcgccgtcaccggtacgtacgagtacgagttggtttattccggtttagtttgaatttatcggtttgtaattttgtgagtttttatgaaaatttaaagggaaagacgcgtcgatcgatttcgaagatgtgaaccatagcaaagatgccaaggagctaatgaagaaatactgtatcggtgacgttgaccagtcaacggttccggtgacgcaacagtatattccgccgtgggagaaggaatctacggcggcggaaacaactaaagaagaatctggaaagaagctgcttatctacttaattcctctcttgatactcggcgttgctttcgctctcagattctacaacaacaagtagaccaaattatgatgaacagattgataagagtttcttactgttcttggttttcgtttgttggtaataacgggcttcttatgtgaagatttgggccatttggcccatcgctcagaattggactataatgtcttatttattttatgttaatgggccgtatcagtaggccctttgttgatatatgccaatcccaatttcttttagtnnnnnnnnnnnnnnnnnnnnnnnnnnnnnnnnnnnnnnnnnnnnnnnnnnnnnnnnnnnnnnnnnnnnnnnnnnnnnnnnnnnnnnnnnnnnnnnnnnnnnnn

SEQ ID NO: 86480 - DNA, 323 bp, Arabidopsis thaliana columbia
cgacatgcacctcctgttgccctccctgactcctccaaccgtaggatgccccagcccaattcttaatactatttagactcgtttcgtctctagttagtactgtgttgtgctcagctcctactctattagttaatgtttgtttgggacaccaagtccttccaaccatgagtgctagtaggctggccattttggtttttgtttagattcggtttggttcagttttaataaatctctggctgaactctaaccgaagttatttcgcttttggtttggttttactttggttcggtttccatttggttaggtttgttttagtttgttcc

SEQ ID NO: 86481 - DNA, 418 bp, Arabidopsis thaliana columbia
cggacgcgtggggtcgacgcggccgcgctaagattttgatttattgttaaatcacttatatttaaatgattcctgcatttcgagctcgtctaatggaattcatgtttggaatcgatgtctcgacatacgtttttttgttcgattagacatagtagcaaaaacaagtgaagcacaatggggatcatcgaaaggattaaagaaatcgaggccgagatggctcggactcagaagaataaagctacagagtatcatcttggtcagctcaaggcaaagattgcaaaactcaggacacaactgttggagcctccaaaaggtgctagtggaggcggggaaggttttgaagttaccaagtatggtcatggacgtgttgcacttataggatttcctagtgtcggaaagtccacgcttttgactatgt

SEQ ID NO: 86482 - DNA, 1534 bp, Arabidopsis thaliana columbia
aaaagggactgtaatccttgacccacgcgtccgtacaggcgtgctctctctcctctctccatctatctccctctcttcgccggagatcgcccttcaccaattccactatagtagcaaaaacaagtgaagcacaatggggatcatcgaaaggattaaagaaatcgaggccgagatggctcggactcagaagaataaagctacagagtatcatcttggtcagctcaaggcaaagattgcaaaactcaggacacaactgttggagcctccaaaaggtgctagtggaggcggggaaggttttgaagttaccaagtatggtcatggacgtgttgcacttataggatttcctagtgtcggaaagtccacgcttttgactatgttaactggaacacattctgaagcagcctcatatgaatttacaacacttacatgcatccctggtgtaattcactacaacgacacaaagattcagcttctcgatcttcctgggattattgaaggtgcttcggaaggaaaggggcgaggaaggcaggttattgctgttgcaaagtcttccgaccttgtattgatggttcttgatgcctcaaaaagcgaaggccacaggcaaatattgactaaggaacttgaggcagtgggcttgcgactaaacaaaactcctccgcagatatactttaaaaagaaaaagactggtggaatctctttcaacactacagcacccttgactcacattgatgagaagctctgttatcaaatcctgcatgaatacaagattcacaatgctgaggtgctatttcgtgagaatgccacagtggatgactttattgatgtcattgaaggcaaccgcaagtatattaagtgtgtttatgtctacatcaaaatagatgttgttggaattgatgatgtggatagactatcccggcagccaaattccattgttattagctgcaatcttaagcttaacttagacagactacttgctaggatgtgggacgaaatgggccttgtgagagtttactcgaagccgcaaggccagcaaccagatttcgatgagccttttgtcctctcatctgatcgaggtggctgcacagtggaagacttctgtaaccacgtccacaggactctggtgaaggatatgaagtatgcactcgtttggggcacaagcacaaggcacaatccacagaattgtggtctttctcaacatcttgaagacgaagatgttgttcagatcgtcaagaaaaaggagagagacgaaggaggaagaggccggttcaagtcacactcaaacgcccctgctagaattgcagacagagagaaaaaagctcctcttaagcaataagcttttagctgataagtcatctccatacatccatctccaccatcatagtcgtggatggtttcacctgagtaagatttactatgttgtatctgaatccgttttgttgttttctctcacaatataagttttggaacaattttacttttttgagatacaaatggaagtacgagttcctatttaaaaaaaaaaaaaaaataaaaa

SEQ ID NO: 86483 - DNA, 375 bp, Arabidopsis thaliana columbia
cgaagacttcgtcgcatagactttgtagatttatcgttgagagtacctcaaacaaaaaaaaattgaaaaccaaattagggtttttaatttccagattgttttgtttatttgaataaatctccgcaagtttcaattaggttgcaaaaatcgaggaaattttcttcgattcaaaaaaaatgggaaaattttgttgcttcacttccgcttctgaggttgtgggaggacaatcatcatcacgatcaggtaaaggaagaagtgatgaagggatgatcaagtatggttttagtctagtgaaaggaaaagctaaccatccaatggaagattatcatgttgctaactttaacaacatccaagaccatgaattgggtcattttg

SEQ ID NO: 86484 - DNA, 1975 bp, Arabidopsis thaliana columbia
  unsure (1)..(1975): unsure at all n locations
ccccccctcgatgtcgacggtatcgataagcttgatatcgaattgaaagcaaagcagagagcagctcccttcccctcggcgaggaggaaggaagaagaaagccagagagagagagagagatcatcgcagcttctcctccgaccatttgactgcgactgtgattacaacacaccgttgatcctacgaaaaagaggtaatggatactggcggcaattcgctggcgtccggacctgatggtgtgaagaggaaagtttgttatttctatgaccctgaggtcggcaattactactatggccaaggtcatcccatgaagccccatcgcatccgcatgacccatgccctcctcgctcactacggtctccttcagcatatgcaggttctcaagcccttccctgcccgcgaccgtgatctctgccgcttccacgccgacgactatgtctcttttctccgcagcattacccctgaaacccagcaagatcagattcgccaacttaagcgcttcaatgttggtgaagactgtcccgtctttgacggcctttattccttttgccagacctatgctggaggatctgttggtggctctgtcaagcttaaccacggcctctgcgatattgccatcaactgggctggtggtctccatcacgctaagaagtgcgaggcctctggcttctgttacgtcaatgatatcgtcttagctatcctagagctccttaagcagcatgagcgtgttctttatgtcgatattgatatccaccacggggatggagtggaggaggcattttatgctactgacagggttatgactgtctcgtttcataaatttggtgattactttcccggtacaggtcacattcaggatataggttatggtagcggaaagtactattctctcaatgtaccactggatgatggaatcgatgatgagagctatcatctgttattcaagcccatcatggggaaagttatggaaattttccgaccaggggctgtggtattgcaatgtggtgctgactccctatctggggatcggttaggttgcttcaatctttcaatcaaaggtcatgctgagtgcgtcaaatttatgagatcgttcaatgttcccctactgctcttgggtggtggtggttacactatccgcaatgttgcccgttgctggtgctacgagactggagttgcacttggagttgaagttgaagacaagatgccggagcatgaatattatgaatactttggtccagactatacacttcacgttgctccaagtaacatggaaaataagaattctcgtcagatgcttgaagagattcgcaatgaccttctccacaatctctctaagcttcagcatgctccaagtgtaccatttcaggaaagaccacctgatacagagactcccgaggttgatgaagaccaagaagatggggataaaagatgggatccggattcagacatggatgttgatgatgaccgtaaacctataccaagcagagtaaaaagagaagctgttgaaccagatacaaaggacaaggatggactgaaaggaattatggagcgtggaaaaggttgtgaggtggaggtggatgagagtggaagcactaaggttacaggagtaaacccagtgggagtggaggaagcaagtgtgaaaatggaagaggaaggaacaaacaagggtggggcggagcaggcgtttcctcctaaaacataagactcggagcttctaatttcttgctactttttctgtctatcaaatgttgctagttaagtttctggagttgttgttgttgtaagcactcctctgttttagaggattgagcacggatatgtatttattcgttgcatgtctgaatgatgatatgatatgacaagcggccgtattcctttnnnnnnnnnnnnnnnnnnnnnnnnnnnnnnnnnnnnnnnnnnnnnnnnnnnnnnnnnnnnnnnnnnnnnnnnnnnnnnnnnnnnnnnnnngggagtg

SEQ ID NO: 86485 - DNA, 649 bp, Arabidopsis thaliana columbia
  unsure (1)..(649): unsure at all n locations
ctgaggccccctttcgaggtcgactgtatcgataagcttgatatcgaattcgcggccgccgcgatctctctctctctctcagatagctccgaaactttcacgcagagttaagtgaagcaggatgggattgtcattcgccaagctttttagcaggctttttgccaagaaggagatgagaattctgatggttggtcttgatgctgctggtaagaccaccattttgtacaagctcaagctcggagagattgtaaccaccattcccactattgggttcaatgtggagactgtggagtacaagaacatcagtttcacagtgtgggatgtcggcggtcaggataagatccgtcccttgtggaggcattacttccagaacacccaaggtcttatctttgtggtggacagcaatgacagagaccgtgttgttgaggctagaagatgaattgcaccgnatgttgaatgagnccgagctgcgtgatgctgtcctgcccgaatttgctaacaagcaggnnntcccaaatgncatgaatgcanctgggatcccgggaaccttggcccaanntctccggcagggcactggaaatccagagccatggcactcagnggggggtttcnaggctactggtgcaaaaattcggaagggtagggangc

SEQ ID NO: 86486 - DNA, 1030 bp, Arabidopsis thaliana columbia
cctgcaggtaccggtccggaattcccgggtctgacccacgcgtccgtacgcgcgagaagacgcgaggaggcggcgtcgtgcgtttagcgttgttttgaagctctctctttcaaattctgttcgtctctcgcgatctctctctctctctcagatagctccgaaactttcacgcagagttaagtgaagcaggatgggattgtcattcgccaagctttttagcaggctttttgccaagaaggagatgagaattctgatggttggtcttgatgctgctggtaagaccaccattttgtacaagctcaagctcggagagattgtaaccaccattcccactattgggttcaatgtggagactgtggagtacaagaacatcagtttcacagtgtgggatgtcggcggtcaggataagatccgtcccttgtggaggcattacttccagaacacccaaggtcttatctttgtggtggacagcaatgacagagaccgtgttgttgaggctagagatgaattgcaccgaatgttgaatgaggacgagctgcgtgatgctgttctgctcgtatttgctaacaagcaggatctcccaaatgctatgaatgcagctgagatcacggataagcttggtctccactctctccgtcagcgtcactggtacatccagagcacatgtgccacttcaggcgaggggctttacgaaggtcttgactggttgtccaacaacattgccggcaaggcgtagagggaaagttcgtggtggagttgatttgctgagcaaatctggatgcaggggcaaacattatctgaattttttttttggtttccgttttcgttattgttctgcttttttttttgggatatgtcgatggattttgtgattgtacgtagaacttagaaaaaaactaccttttatatagttttggtaaaactgtaatcgaagatttcacctactgctttcgtggttttggtcacagaagtcatataggaagtacgcacgcgtggagcggccgctctagaggatccaagcttacgtacg

SEQ ID NO: 86487 - DNA, 335 bp, Arabidopsis thaliana columbia
  unsure (1)..(335): unsure at all n locations
gagggaaaacagttccaaggaagaaaggtngggattttgattgctgtcattggtggagctgttcttgtnctggtgttttttgtattagttatcctcctcctgttatgcacaaaccgctgctctagctgttgtncaagagaaaagtcagtgccgcaaactcggcttaaggttgtgacagataactcacacaccagtctctcctctgaggttcttgctagtgcaaggttaatctctcaaacagcaaagctaggtgcacagggtgtgccctctatgccggtccttttcttttgaagattttaaatggaagccacagncgntttttannttcatcacgg

SEQ ID NO: 86488 - DNA, 599 bp, Arabidopsis thaliana columbia
  unsure (1)..(599): unsure at all n locations
aggagggggggagaaaagagnggggggaacgtgnttgngtgacactctaanaaaatctatgacgtcgcatgcacgcgtacgtaagcttggatcctctagagcgggcgccctttgtgtgtttgggtttgttctgtataaacattcatcttcgactgggggaccactactgtgatgaagtaaagtattgagctttctatgtaccaaaactatattgaaagtggctgagatgagatgaataaagaggctaagtgtgatacagagaagatcagacaatagaaaagggggtgcaaattggctagtcttgcaagatgagggacccttggattggtttatcgatagaagattgataaaggatgttcaaagcagacaagttttcgttgatgctcgatgatgtcgctggcttgaactcgtacggaccttcctttggtccccaaacctggtttcgattctcatcaaagccgcgatcccagaggggtatctcattgtttttcaaaactgcaagatctgaagtaccatagctagccccggtccatgaatttggaaatccaccaggtgaagttgagccttcgtacaagcaacgtttcccacggtcacaacaa

SEQ ID NO: 86489 - DNA, 778 bp, Arabidopsis thaliana columbia
  unsure (1)..(778): unsure at all n locations
cttctctcttctcctctgatcccaccacacttttgaactttcactcaatggcgatgcagcttcctccgacgacactttacgccggaagatcctccgtggtcttacctccgacgactccaaccctccagagatcatctttcttgccttattactcgatgaggctactcggaaacaagaagtctctttccaaatcctctgctcctagattctccatgcgtgtctcctctaagcaagcctatatttcccgtgattgcgggtatatttacaatgatagaactccatttgacaagttacctgataactatttctgtccagtgtgtgctgctcctaaacggcggtttagagcttacatgcctgatgtgagcaagaatgtcaacgacaaagatgtgagaaaggctagaaaaggtgagctccaaaaagaggaagccgtcgggaaggctctacctataggaattgcagttggggttttagctctcgcagctctttacttctatgtcaatagcccctcatgaatgcagtatcaagagagactacactctgcttttggaatcatttttttgttctggataaacattcatcttcgacttgttgaccactactgtaatgaagtaaagtattgagctttttatgtgccaaaactatattgaaaggggctgagatgagatgaataaaaaggctaagtgtgataaaaaataaaaaggaaaaaaaaaaaaaaaaaaaanaaagggcggccgctctagaggatccaagcttacgtacgcgtgcatgcgacgtcatg

SEQ ID NO: 86490 - DNA, 449 bp, Arabidopsis thaliana columbia
cccacgcgtccgcgattatgaaattctcgaaaccgaccctggtcttacggagacgatgataccttcctcaagtcccatggagtcaagacatcgactctcgttctcaaatgagaagacaagtaggaggagatttcaaagaattgagaagggtgtcaagttcaacactctgaaacttgtgttgatttgtataatgcttggagctttgttcacgatctaccgttttcgttatccaccgctacaaattcctgaaattccaactagttttggtcttactactgatcctcgctatgtagctacagctgagatcaactggaaccatttgtcaaatcttgttgagaagcacgtttttggttgaagcgtgtttcatggtattgctcttataaatcttaacgataacaagattgatcgtttcaaggaggttactaaaatctactttgttcatgtatctt

SEQ ID NO: 86491 - DNA, 435 bp, Arabidopsis thaliana columbia
  unsure (1)..(435): unsure at all n locations
agatcaaacagattccacggtcccatttntnctcctgaggtctctntttcatttacggcactgcggataattnanatttcccgtaacagcttcaacgggagcctaccgcaaaantactttncnaattggagtgcacctttggttaataccccacaaggatatcgttggccagagtacacaggagatgaacactctaaatatgagaccccgctttggtcttatccttccattcatttgagaataaaaggacgaagcatagagttgggaaagattccagatacatacacgtcgatagatttntnaggaaatagttttgaaggacagattccagaatcaataggtgatttgaaatcgttgnttgtcctggncttatnttaacaacctttttaactggtcggtnttcccatngggggttggccaanctttaaanaanct

SEQ ID NO: 86492 - DNA, 900 bp, Arabidopsis thaliana columbia
  unsure (1)..(900): unsure at all n locations
nnnnnnnnnnnnnnnnnnnnnnnnnnnnnnnnnnnnnnnnnnnnnnnnnnnncccacgcgtccgcccacgcgtccgcccaaaacaagatgagctcctctgactcttcttccgccgaatcccgtctagccacggctaagacggttctcaccaccgcggcttcggtggctgcgaccgcaatgctagctcgatctttagtccaagattatttgcctgacgaggtgcatcactacatttcctatggattccgttccatctttggttacttctcatcccaaatgacgataatcatcgaagaatttgaaggttttgctcacaatgaagtctttgaagctgcagaggcctatctagccaccaagatctctccttctaacaaaagaatcaaagtgagtaaacatgagaaagaaaacaactacaatgtcaccgtggagcgtgacgaagaagttgttgacacctacaatggcgtcaaattccagtggatcctccattggcgtcatgtcgagtccagcacttccacacccacgggatctaaactccacactgagatctgaggtncgatcattcgaactcaacttccacaagatattcaaagacgtagctcttgaatcttacttgccattcatggtgaaaagagccacgttgatgaaagcagagaagaaaacactcaagatcttcactctctccccagataacatgtatgggaactactctgacgcgtggacctctgtactcttgacatccttctacctcaaactctagcatggatcagatgcaagcccaggtgatggaagatcagacaattcgtaagcgaaagacttataaagggctggaagcttgaagaaggtactgctgacggtcacagccaggaagcagctgtcgaccctgcatcattacttgatttc

SEQ ID NO: 86493 - DNA, 431 bp, Arabidopsis thaliana columbia
  unsure (1)..(431): unsure at all n locations
agaagctgaagagaatgctgagacttctgacaatgagactcttggagcttggaagagtaaagtgggtaagtcaatctcgaggacagcaatataggtttcccgtatgccgtaatgtagaagaaattccggtgattgtcctcaaaaattggtggtctctggattnctgtggtgtatatgtggtaaaaatgtgagacttgtagggttagtgatacatacttgtcctaaccaccatgttggaaagaataataggcagaaagaagctcctccagaagcttttttggtcatgtattgtagcctctgtgtgtgtttatttgtaggnntgttttacgtttttcctnttnctgtantatttacancttatatncctttaccccaaggactattctnttgttgaacttaacctctttcccaantnttttttttaaccaanc

SEQ ID NO: 86494 - DNA, 393 bp, Arabidopsis thaliana columbia
cataaaatatcttcgcgacaaagaaccatcggagaagaggaagaagatcagtgtagagctatcgggaaatttatctgaagaggaaactgaaattgagatcgaagttttgagtttgggtaaaaaatggtaggaggagtagaagaattgagtattgaacagttagcttcgagtatctctacctacaaagaacaactcgaacaggttaggcagcttttgtcagaggatcctaggaactcggaatatgcagacatggaaaaggagcttaaagaggtgattgcattgacagaggaagttcttgcaactgcaaagcaaaatgagatttctctatcagatgccggagttagtgctgaagcaactcctggctcacccgatttagagggtgcttgggaaaag

SEQ ID NO: 86495 - DNA, 508 bp, Arabidopsis thaliana columbia
tatacgactcttatagggaaagctggtacgcctgcaggtaccggtccggaattcccgggtcgacccacgcgtccgggaatctgcgtgttgtttgaaatagcaacatcatttaacagctagcagataaagtggagttttctttcagttctggggtttgaaaggtgagtatgtttttgagtggcatgtaactccggcagtggagtttgggtcagccaaaagcagttgttggcgtatacataaaagtaggagagttagcaaagaattcatcatttctatcttggttatttgtgttgtgcaggtgtgcttatatgggtcatgatggccagcctgcttctatctcctgatttctcgtgtttgatccctgaagttctacttctgaaaatctttactgatatattgtgtataattgctagaaatcctcaattctctgaaactttgtttttgcaccatataggtgattgcattgacagaggaagttctttgcaactgcaaagcaaaatgagatttc

SEQ ID NO: 86496 - DNA, 531 bp, Arabidopsis thaliana columbia
atacgactcactttagggaaagctcgtacgcctgcaggtaccggtccggaattcccgggtcgacccacgcgtccggaaatcctcaattctctgaaactttgtttttgcaccatataggtgattgcattgacagaggaagttcttgcaactgcaaagcaaaatgagatttctctatcagatgccggagttagtgctgaagcaactcctggctcacccgatttatagggtgcttgggaaaagacgggtttaaggaatgacccaatccatgagggtaagttccctgttggaactaaagttcaagctgtctttagtgacgatggcgagtggtatgatgcgaccattgaggcacatactgcaaatggctattttgttgcttatgatgagtggggaaacaaggaagaggtggatccagataatgtgaggccaatcgagcaaaatgctatttgtcgaagctgagagattacctcaagcctccaaaaatgctctcaaaagaaagattgagaaagctgcaagttctgattatcagacaaa

SEQ ID NO: 86497 - DNA, 427 bp, Arabidopsis thaliana columbia
cacaaacgaagcagaacaagaagaagaagaagaatagagagagacgtagagagagagagacatacgctgagccttttgggtttctcttagacagaagatctttagtgtgtgtccctacaatgtctgtcaagagtaataccttctcgtcggctgagattcccgatgtggcagaccaaccacgcgaccgagttaaccccgaagctacacaggatctacaggagaaggatgagacgaacgacgagaaagatggagatgaggaagtgaaacacgacgaagcggaggaagaccaagaagtagtgaaacccaacgacgccgaggaagatgatgatggtgacgatgcagaggaggacgaggaagaagaagtagaagcagaggaagatgaagaagcagaggaagaggaagaagaagaagaggaagaagaagaaga

SEQ ID NO: 86498 - DNA, 553 bp, Arabidopsis thaliana columbia
  unsure (1)..(553): unsure at all n locations
atattctctcttttncttctttacccggaaaaataaagtttctntnctnctttttncttctctgggtttnagaattggtgtaagagaaacgattgaggttttctcttattatctaaacccaccaagtctttcaggattttagccagagaagcttgagtctttgattagggacatgtcaacctccgccgcttccttgtgttgttcatcaacccaggtcaatgggtttggtcttaggcctgaaaggtcgcttctttaccaacccacttccttttctttctccagaaggaggactcatggaattgtcaaaggccccatctcggggtttgatagggtttcggaaaagtggtatcaatggnttcncccccctaattcctctcggggttaaatttcggccaaaattaaggggnggcaaggtaaaaagccagntggaagtttggcaaaggttnttgaattttgggatccaatgtttaanggtcnantgggncggggccggttttttttncccaaaaantnacntttnngggccccttcgggggggtaaangccttttggg

SEQ ID NO: 86499 - DNA, 620 bp, Arabidopsis thaliana columbia
  unsure (1)..(620): unsure at all n locations
caacattactatcggacctctcgtggttgatgctttgcgccctgtgacagatcttcctttggatgttcatctgatgatagtggaacccgagcagagagtaccggatttcatcaaagcaggtgcagatattgtcagtgtacattgtgaacagcaatccaccatccatttgcatcgtaccgtcaatcaaataaaaagcttaggggctaaagctggagttgttctaaaccctggaaccccattgagtgcaatagaatatgtcttggatatggtggatctggtcttgatcatgtcggtcaaccctggttttggtggacagagctttattgaaagccaagtaaaggaaatctcggacttggggggaaatntgtgcagagaagggagtaaacccatggattggaaagtttgatggtggtgtcactccagcggattcgtacaagggtatttaggcttggggcaaatcctctagtggctggttcacctgtctttggggctagggccttcggagagctttaaagggctttaggcccgcaacggcccccactttcnttttcatttttnaccccaagcgaaggcctttttaaccttggccgtaaggttcgccnngccatttngtttncttc

SEQ ID NO: 86500 - DNA, 873 bp, Arabidopsis thaliana columbia
tggttgaaaaaggacatattccccaccacattcccatttttggccatttggacaccccgttcctatttcaaatattaaagaaaggctttaaggggggctttacaaaactgggaaagttttgttttattaaaaaccccgtggggaacccccccatttaagagtgccaaataaaaaaattttgttctttggatataagggggggaatcttgggttcttgaatccaaggtcgggtccaaacccttggtttttgggtgggacaaaagcttttatttaaaagcccaaggtaaagaaaatcctgggactttaggaaaaatgtgtgcacaaaagggagtaaacccatggattcaagttgatggtggtgtccactccagcgaatgcgtacaaggttattgaggttggagcaaatgctctagtggctggatcagctgtatttggagctaaggattacgcagaagctataaaaggaattaaggccagcaaacgaccagcagctgtagctgtgtaatgtgaagcaacagcaagcgaaaagactctgttaaacttaggaacagttaaaaagtgaatgacgatcaccagaagtcccagatgttgtcgttgtgtctccattcgccataacattcacaagaatcaaactcaatatcttcaaagtaggctcctctatactattctgtaccattgtcttgtaaattgaggatatgcagattccatacattttgcaatgaaacactgtgataagaaatatgttgttacatatgtgtttttgacttataataaagcatttcgtttgaaaaaaaaaaaaaaaaacaaagggcggccgctctagaggatccaagcttacgtacgcgtgcatgcgacgtcatagtggtctatagt

SEQ ID NO: 86501 - DNA, 1369 bp, Arabidopsis thaliana columbia
acgcctgcaggtaccggtccggaattcccggctcgacccacgcgtccgtacctttcttctctgggtttgagaattggtgtaagagaaacgattgaggttttctcttattatctaaacccaccaagtctttcaggattttagccagagaagcttgagtctttgattagggacatgtcaacctccgccgcttccttgtgttgttcatcaacccaggtcaatgggtttggtcttaggcctgaaaggtcgcttctttaccaacccacttccttttctttctccagaaggagaactcatggaattgtcaaggcctcatctcgggttgataggttttcgaaaagtgatatcattgtttctccctctattctctcggctaatttcgccaaattaggcgagcaggtaaaagcagtggagttggcaggttgtgattggattcatgttgatgtcatggacggtcgttttgttcccaacattactatcggacctctcgtggttgatgctttgcgccctgtgacagatcttcctttggatgttcatctgatgatagtggaacccgagcagagagtaccggatttcatcaaagcaggtgcagatattgtcagtgtacattgtgaacagcaatccaccatccatttgcatcgtaccgtcaatcaaataaaaagcttaggggctaaagctggagttgttctaaaccctggaaccccattgagtgcaatagaatatgtcttggatatggtggatctggtcttgatcatgtcggtcaaccctggttttggtggacagagctttattgaaagccaagtaaagaaaatctcggacttgaggaaaatgtgtgcagagaagggagtaaacccatggattgaagttgatggtggtgtcactccagcgaatgcgtacaaggttattgaggctggagcaaatgctctagtggctggatcagctgtatttggagctaaggactacgcagaagctataaaaggaattaaggccagcaaacgaccagcagctgtagctgtgtaatgtgaagcaacagcaagcgaaaagactctgttaaacttaggaacagttaaaaagtgaatgacgatcaccagaagtcccagatgttgtcgttgtgtctccattcgccataacattcacaagaatcaaactcaatatcttcaaagtaggctcctctatactattctgtaccattgtcttgtaaattgaggatatgcagattccatacattttgcaatgaaacactgtgataagaaatatgttgttacatatgtgtttttgacttataataaagcatttcatttgtcttgaataaaaaaaaaagggttaacaaaacccagacgaaccgctctagaggatccaagcttacgtacgc

SEQ ID NO: 86502 - DNA, 828 bp, Arabidopsis thaliana columbia
ggggccgctggtcgcctgcggtaccggtccggtattcccgggtcgacccacgcgtccgtacggcgcgagaagacgacagaagggggcgccgcgctttctctctctaaacttagctcagcctatcgattaattcctctccggaataaggaaatttcacctcgatttattgattagtcggaagaattcggaaccaattctgaaccagacctgaaattttccaatggggcggaagaagccgagtgctcgaggtggagatgctgagcagcaacctcctgcgtcatctctcgttggtgctactaaatctaagaagaaaggtgctcaaattgatgacgatgagtactcaataggtactgagttgtctgaggagtctaaagttgaggaagagaaggttgttgttatcactgggaagaagaagggtaagaaaggtaataagaagggtacgcagcaggatgatgatgatgatttttctgataaggtttcggctgcggggggtgaaagacgatgttccctgagatagcttttgttgggaagaagaagtcgaaaggtaagaagggcggtggttctgttagctctgccttgcttgatgatgaagatgagaaggaggataatgaatctgatggtgacaaagatgatgagccagttgcacctgtggagaatgctggtgagaaggaaggagaagaagagactgctgctacgaataataaaaaaaaaaaacaaaaaaaagcggccgctctacaagatgctagcttacgtactcgtccatgatacgtcataacacttctacaatgtcacctaaattcatctcattggccgtcgtcttacaacatc

SEQ ID NO: 86503 - DNA, 442 bp, Arabidopsis thaliana columbia
  unsure (1)..(442): unsure at all n locations
gcaaggtgctgtttgtggtgcgtgtggcgacaactatggaggagatgagttctggatatgttgtgatgcttgcaagaaatggttccatgggaaatncgtgaagatcacaccagcaaaggctgagcatatcaaacattacaaatgcccaagttgcactaccagcaagaaaatgaaagcctgaaagtgataataacattagagcctgtgaaagaggaaaacgttttcacagtttaagaagacagtacaagagtttagctgtgggaagangaagnaacaaaaggcttctgattgcntagttttaaatgggnttgngacagcttaccagttagtaatgtccccttccncttncctttnctnntttttttgctgttaatgttaaaatgttantgnctaatttgtcttaaggttctggggaaattcctgnccttttaagcccncnctt

SEQ ID NO: 86504 - DNA, 435 bp, Arabidopsis thaliana columbia
caagattcctcaaaaggaaagaagagaaagaagataagagatatctggttggtcggagatggagatgatcggaggagacgatacagatacagagatgtacggagctctagtgacggcacagtccttaaggttgcgtcatcttcaccactgcagagagaaccagtgtacctctgttctcgtcaaatacattcaagctcctgttcatcttgtttggtcactggtgcggagatttgatcagccgcagaaatacaaaccatttataagcagatgcactgtaaatggtgatcctgagatcggttgtctcagagaagtaaatgtcaaatctggtccagcaaccaccagtacagagagattggaacagcttgatgatgaagaacacatcctcggtatcaacatcattggtggtgatcatagacttaaagaatactcttcgat

SEQ ID NO: 86505 - DNA, 690 bp, Arabidopsis thaliana columbia
  unsure (1)..(690): unsure at all n locations
cgcctgcatgtaccggtccggaattnccggttcgacccacgggtgagtgcgtgtgttgtaaaaaaggggacagagacgacgaggagttcgatgaagccaagccggagcgacgaaatatccgacccgggacagctgatcaagaacgcgaaccagatcagaggtgttttcgattccttgggtgcaaaactatttttttttcgggaggggaagcgaaccggggaggcccggatctttatatgcttcccgacaaaatggccggccgtcccgaagctgacaaaatccaatcttctccagagacaaaactcatgggaaagttctggggggaggagatcatctgcgagtcaggatgattccgggaaacaggaggttactgaagtctgccgggcttggttaggcacagcgcccgaccggaagtggggtttataaatgggggggaaggaagacatcggggaagaagccggggccgttgccgccgccgcaatcggagacggaggagaaaaagcggtttacagaagcaatccggcgacgaacgaatggattcctgcgacggaggaagattttgattcggaatcttcgtctaaaccaaaccggagcgagagttcttgaactgatctttcgaaaatgttttatcttcttgtttcagatgttctgtttcttgatattatggcaataaaatattaaataaataaa

SEQ ID NO: 86506 - DNA, 693 bp, Arabidopsis thaliana columbia
  unsure (1)..(693): unsure at all n locations
nnnnnnnnnnnnnnnnnnnnnnnnnnnnnnnnnnnnnnnnnnnnnnncccacgcgtccgcccacgcgtccgcccacgcggccggggttgtaaagcagtggacagagacgacgatgagtacgatgaagccaagccggagcgacgaaatatccgacccggaacagcagatcaagaacgcgaaccagatcagagctgatttcgattccttggctcccaaacgacccactaaacccactcgaagcgaaccgggatttcctggatctttctctgcttccgacaaaatcaccgaccatcctgaagctgacaaattccaatctctccagtcacaaactcatggtaaagttctaggtgagggagattcatctgcagttcaagatgagttcctggaaacagagtattactcaaatctcaccgccattgataagcaacatcacacgaccggaagtgggtttataaatgtggtgaaggaagacaacggtgaagaatccgaggccgtaaccgccgccgtaatcggagacggaggagaaaaagcggtttacagaagcaatcccggcgacaaacgaatggatttcctgcgacgggagggaagaattttggatttcgggaatactttcggtctttaaacccaaacccggggtagcggaggaggtttccttggaaaccgggatcccttttcgagaaaaaatggggtttt

SEQ ID NO: 86507 - DNA, 566 bp, Arabidopsis thaliana columbia
  unsure (1)..(566): unsure at all n locations
acaaaccnngaacagccagggncnaaacaaaatccgccgnantgatantnggtngtnaaccanggccanagggtaaaaccagnggaagaaaacgggtttccagcaagaattaaaaagaagacgtgtggccttgattccttggaaagggatttaaaggaaggaacctctcccgcaaaaaaagaagctaaagatcagaattaagagcggtggaaatgttaagaaagatagtaaaaacaaaaccaagagaacttagaaagtagcagtgtgggtaaaaagaaggccgaggtagagaatactccggtgaaaagagcccccgggagaccgcagaagaaaacagcagaggcaactgcatctgcctcaggaaaacggggtagggatacaggaagcacggggaaggacaataaacagccaaagataagaatcagaaaatggccattcaaaacatgtttgcccctttagtggcatttcttaagggctcaagttattgtatatgcttttggggtttttttttttttaaaccttaattcttaactttggacgccccattctcatagttatggattaga

SEQ ID NO: 86508 - DNA, 484 bp, Arabidopsis thaliana columbia
atgaactccagctccactacgactcactttagggaaagctgctacgcctgcaggtaccggtccggaattcccgggtcgacccacgcgtccgctcgtcgtatttggcttgctttcaccgctctctctgctttttccgtttgttcaacctccaataaatcctcggttaataacggttcctctaaaccggtcgaagaagaagcattttcacgagctagtgataaagttacagagaaagagatggatgttgtgacagagaaggatttagagcatttgttgcatctgcttgaagctggaaatgctagttttgagtggcaatctatgatggataagtctactccgaatatgagctatcaagcttggcgtcatgagcctgagataggtcctgttgtttatcgtagtcgaactgtttttgaggatgtaacaccagacattgttagggatttcttctgggacgatgagtttcgacctaaatgggatactatgc

SEQ ID NO: 86509 - DNA, 468 bp, Arabidopsis thaliana columbia
  unsure (1)..(468): unsure at all n locations
ggatcgcttccgttcaatgtaacccgaaacagagcaatctgaaattatcttagggctatagttatggatattttcatggatttcttcaataaaccttctgttacagagacattcgtcgacgttttgctatgtgtagttccgatttgggtcgctgttatgatcgggcttctgatcggttggtcttggcgtcctagatggactagcttggtttatttaggtttccgttctaagcttcggtttctatgtactgttcctcctggatttggtgctcgtcgtatttggcttgctttcaccgctctctctgcttttcccggtcgttcaagactcggtccaacctccaataaatcctcggttaatgacggtttctctaaaaccggtcggagaagaagcattttcacgagctagtggtnaaagntacagggnanggggaaanntttttttaccanaaagggtttanngcaatttttt

SEQ ID NO: 86510 - DNA, 444 bp, Arabidopsis thaliana columbia
accacgcgtccgcagacttacaaatctagtccatataatacaataagcccacttttcttcttctctcatcagagctttttcttctctcctcatttttcgtataattcgatttgcgaaaaatggtcgagggagagtccaaggcattgtggattattttggccaccgtgtttgcagtcgcggcggtggcaccagcggtgcatggacagcaaacgccgtgttacttcgtgtttggagactctgtcttcgacaacggtaacaacaatgccttgaacaccaaggccaaggtcaactatttaccttatggtatagattactttcaaggtccaaccggtcggtttagcaacggtcggaatattccagacgttatcgctgaactagcgggtttcaataacccaattccaccatttgcccgagcattacaggcacaagctaacatcggactca

SEQ ID NO: 86511 - DNA, 579 bp, Arabidopsis thaliana columbia
gaatggttcagtgcctcccacgcctcgtagaggctcggtagggacaacaactcctgacgttcttctaaccccaagatcttactctggtcatcatcgccaaaacgggtatttcaaagaagttagaagactctctactactcccttaaactatgtggccatgcaaaaggaagatactgtttctactacctacacatcgatttatagctctgagccagactcgcctctccaaggctgacttgactctcttttccaccggatttgtggagtaatgttaatggtaaaaaaagaaggaagtgaagaagaaggaaggagacttgtgaatacagaaggtgactgacttttaggagatatggtgagataagagtaaatgcaatccatgtgaaattagttattctttagaggttacaagttttctattttgaagtgaagaatactattgttttgtgtaatgccagtgtgaaagtgtgtgaatggtcattgttgtgcgtacgtatttgtgtataatatacgtatttgctataaaaaaaaaaaaaaaaaaagggcggcagctctagaggatccaagcttacgtacgcgtgc

SEQ ID NO: 86512 - DNA, 407 bp, Arabidopsis thaliana columbia
acccacgcgtccgctttctaaaacctctggggttcttgttaaagatgatgtctttgctcccaaatcccgacccgattccaatacaaacccatctttcgtcattccgtggggaaaaggtgattgaagcaataaaaaatgagctggatcgtggtggccaagttttttatgtcttgcctcggattaaaggactagaagaagtgatggattttcttgaagaagcatttccagatattgacattgctatggcacatggaaagcaatactcgaaacaactagaggaaaccatggagagatttgcgcaaggaaagatcaaaatcctcatatgtactaatattgttgaaagcggacttgatattcaaaatgcaaataccataatcattcaggatgttcaacaatttgggctcgct

SEQ ID NO: 86513 - DNA, 687 bp, Arabidopsis thaliana columbia
  unsure (1)..(687): unsure at all n locations
aaaaaatgaaactccgttatatataatatatgttgaaacggtgattaactagttaataaattttgtgggactagttcgtaaattacatttttattatgtaacatgaattacaattatccattaatgtagtatattcaaccgaatgagtcaacgaccccaactttcatcctcggagtttcccaaccgctaccagcctaacgtcatcgatcaccggaccacatagcgagccagagtgatcgcttttcatgtggtaaaacgtgctcaagaaagtgacacgtgtcctggccgacactgccttgaacacaagcctcccacgtctaaacccgccttttcctttagaagcgtagtccaccatgaccttggcctcgtccagcgaacgcttccacaatcattggtccctcacaaccgtctctggcgtctcccacgtcggaacgtgagggcgtagaatttgttcagtgacgtcctcacttatcttgaggaaatggngctctctttggctccaaacaagctcgatggttcggtggtccttccggggaaagagaagntgtgctttnggcttacngtactttaacgggtttggggagattcgttcaatccaaccgggnaatngnttnttnccgcctcgatggacnggnggattcanncactccccanttgggngnggaaaaangtaagtcncctccgnat

SEQ ID NO: 86514 - DNA, 616 bp, Arabidopsis thaliana columbia
  unsure (1)..(616): unsure at all n locations
gncngnggnnnngggatcaataattccattatttatacattagataccaacataaagcaaaatcaacacacactgaaacaatgaaatcaacacaaaaacaaacacaaacacaaacaacatgattacatctgcacacaagatgtaacctcaaaacacaataggaatcaaacttatacaagtttaggatttaggcctcttgccttccttgtcttccccacaaacagatccttagacttgatcaaaccagggaggcaaccaacaactgtcacaaacggaaactgagccaccgagtcctttcttcctaaagatacaatggccaactctggaccgggcttgtaagtcgacatcttcttctttttcccacctgacatcattacctttatgttcttcacaacgacattagcatgagtctctgctatatatcctngnntcatctcagggatattagtgatatctccaacagngaatacatggttcgacctctaatccgaaagtctcatcgaccatgatcttccctttaccatccaagtttctttcagacaagtcccatgggcccatgggaagnaangttccccacaagnggagggattntggggtttggttctccccgaggcgg

SEQ ID NO: 86515 - DNA, 575 bp, Arabidopsis thaliana columbia
agttctagatcgcgagcggccgccctttttttttttttttttttttttttttttttttttttttttttttttttttttttcttttcaatgtcgacaatggcatcaatgaaatccagccaaaagtcttggaccagcaatagtgatacataagtacatacaacaacaactaaaacttattcaccaagacaatttattaccttgtttctaatgaatcaagaatctgatccttatttcactgaaaatggccaaacctccaaagaatatccggctaagagaccccgaaacaacaacaagacacataaacaactaatttggattatacgttaaatgaaggagtaatgaagttcgagaagagacttatgaggaggagatgaattgtttatatgttggagccgaatccgccaccgcctggagtaagaatctgtaagatttcaccggcttctacgtgtaccgtattcttgcctccaagatagattcttcgtttgtctttagtgatgagatagtttgctccacggagtccattttggccaccgttcaatccacgtggcgagtgaactcttctctctgagaggatg

SEQ ID NO: 86516 - DNA, 558 bp, Arabidopsis thaliana columbia
  unsure (1)..(558): unsure at all n locations
ctcaattgggctgttcatcgccatatcttctaccgtgacgcttctnatctgcgtgagaagttcaatgtcaaccaagatgtggaggatgtcgacagaatcgacaaactgattgcncatggtgaagcagaatacaacaaatggcggcaccctgatccttatatcgttccatgggctcctggtggctcaaagttctgtagaaacccgactccgcctgctgggattgagattgtgtacaactatggtctagaagacaacccataataaaccttagcttccatattgtcacacccatcaattaaaattcgaagcatccggtggctatggtttggaggtaaatttaaactggcctttcaagggttgaaactttgtgggggcccatttgtaattttcaaaagactgtttcggttcccgtcaaggcaaattctttgtttcaaactttgggtttatatcctttctatctcatttccggttgtctgaggcatggtnttcgccntgaaactngcagaaacacaaattntgggttttttcttttacntggtgaatggacngnttngggtc

SEQ ID NO: 86517 - DNA, 654 bp, Arabidopsis thaliana columbia
  unsure (1)..(654): unsure at all n locations
cgaaaatcaatcggaatcaggaagacaaaaatgagcggagtttcgacggcggcgtactttgcgcggcgagcggctcagaaggagagagttcgaatcctttaccgtcgtgcccttaaggatactctcaattgggctgttcatcgccatatcttctaccgtgacgcttctgatctgcgtgagaagttcaatgtcaaccaagatgtggaggatgtcgacagaatcgacaaactgattgctcatggtgaagcagaatacaacaaatggcggcaccctgatccttatatcgttccatgggctcctggtggctcaaagttctgtagaaacccgactccgcctgctgggattgagattgtgtacaactatggtctagaagacaacccataataaacctagcttccatattgtcacacccatcaataaaattgaagcatccggtggctatggtttggagataaattaaactgacttttcaaggggttgnaacttttagggggccaattggtaattttcnaaaaaggttccggncccagaaaagnaaatcttggttcaaacttggggtaaaaaccttcanccaaaaaaattccggggggnccttaggcaanggnggtnccccctgaaactttcngaaaanngggggaatcctganccngggtc

SEQ ID NO: 86518 - DNA, 673 bp, Arabidopsis thaliana columbia
  unsure (1)..(673): unsure at all n locations
ccagattcagtnttgatncctctttagccggtgcaatcatnnggaaaggcggagtcagttcaaagcagatatntcgtcagcgggagtaaaattatcaattcaagatcacgagagagacccaaacttgaagaacattgtgcttganggaacacttgagcagataagcgaagtgatncaatggtaaaagatttgattgggaggcttaattcagcagctaagaaaccacctggtggtggtcttggtggtggtggtggcatgggttctgaagggaaaccacatccagggagcaacttcaagactaagatatgtgagagattctcaaaaggaaacctgtaccatttcggtgatagatgtccactttgctcatcggggaagcagagctacgcaagtccaggaatcgtctaggtgttgcttgcaagatagggaattttcctggtaaaacctaggttcttatttagggggtggtgatatctgagatcatcttcacctactttgtttttgtttgttatgagagaatacaattttagtttcattatcattgtaagnctatttngtgtttttttnaaaagtttagnttttgggttaatnctgngtatgantttagatnggaggaagctttnangggaattntttncaaaccncngaaccagtggtaaggatntntgccgccttt

SEQ ID NO: 86519 - DNA, 553 bp, Arabidopsis thaliana columbia
agagaaaacaccggtccggtaattcccgggtcgacccacgcggccgcaattcctttcaactttcaaaatcgaagatctcttaagccatgaacgatcttctctccggctcgtttaaaacctccgtcgcggacggttcatcgccgccgcactcacacaacatcgagatgtcaaaagcgaaagtctccggcggaagttgccacggtggtaacaacctagacacgttcttcctcgacgtggaggttgtaaacgaagaccttaaagagctagatcgtctctgtcacaacctccgatcgagcaacgaacagagcaagacgcttcataacgctaacgcggtgaaggagctgaagaagaagatggacgctgacgtcactgctgcgcttaagacggcgaggcgcttgaaaggaaacctcgaggctttagatcgggctaatgaagtcaaccgaagtttaccggaaagtggaccgggttcgtcgtcggaccggcaaagaacttcggtggttaacgggttgaggaagatgcctgaggatgagatggaaaaatttagtcgagtgag

SEQ ID NO: 86520 - DNA, 457 bp, Arabidopsis thaliana columbia
  unsure (1)..(457): unsure at all n locations
ataaatctaatggatgcttctccagcaccaatggagataacaacaacgacggcttctaatgttgtggatcacggcggaggaacggagacgacgcgtggtgggaagagtgttgatgagatttggagagagatggtatcaggagaaggtaaagggatgaaggaagagacgtcggaagagataataacgttagaggattttttagcgaaactgcggtggaagacgaaacaccggtgacggcgtcggcggaggatttggatgtaaagattccggtgacgaattacggattcgttccattctgcaccnccgcataatccgtttccaaatggattgataaaagtggaaggtccaatagttgccgttttgggaatggttttaaaatgttttccggggggggggcctctagggggaagagaccccgattaatntttaaccccttggtaaagcncttcacanngcc

SEQ ID NO: 86521 - DNA, 927 bp, Arabidopsis thaliana columbia
  unsure (1)..(927): unsure at all n locations
ttttgggagaggngaaagaaaaagaaaatgggaagagggagagtagaattgaagaggatagagaacaagatcaataggcaagtgacgtttgcaaagagaaggaatggtcttttgaagaaagcatacgagctttcagttctatgtgatgcagaagttgctctcatcatcttctcaaatagaggaaagctgtacgagttttgcagtagttcgagcatgcttcggacactggagaggtaccaaaagtgtaactatggagcaccagaacccaatgtgccttcaagagaggccttagcagttgaacttagtagccagcaggagtatctcaagcttaaggagcgttatgacgccttacaaagaacccaaaggaatctgttgggagaagatcttggacctctaagtacaaaggagcttgagtcacttgagagacagcttgattcttccttgaagcagatcagagctctcaggacacagtttatgcttgaccagctcaacgatcttcagagtaaggaacgcatgctgactgagacaaataaaactctaagactaaggttagctgatgggtatcagatgccactccagctgaaccctaaccaagaagaggttgatcactacggtcgtcatcatcatcaacaacaacaacactcccaagctttcttccagcctttggaatgtgaacccattcttcagatcgggtatcaggggcagcaagatggaatgggagcaggaccaagtgtgaataattacatgttgggttggttaccttatgacaccaactctatttgaatctttctcacttaattaatctctcttttttttgacatttttaagatgatgtttctattttattacctctctcacgttttctgtcttgtgtgcatgtgtctgtgtaatgtttattgcccttctattattcaatgatttctcgac

SEQ ID NO: 86522 - DNA, 360 bp, Arabidopsis thaliana columbia
ggaaacgaaacgaactatggatttgaagaaagcatctttgtttttattccttcttctctgtctccacctgcaactgcaacaccactttgctcacgcggtctcgcgatcttcaacaagtttagccttcgttgatccaaaccatgatgatctcccgtttcaagaagtagaattgaagccagacggtgacgtaatcgaagccaatttaccgaaattaacagtcgttgttaagaaaggcggcggaggaggaggcagaggtggaggcggtttcggcggagggggacgcagtttcggcggaggagggagttctagcagaggcggtggaggaagttctagcagaggcggaggagggagttctagcag

SEQ ID NO: 86523 - DNA, 644 bp, Arabidopsis thaliana columbia
  unsure (1)..(644): unsure at all n locations
atctaaccctctcgatcctctctcgcctgttgaaaaagcacgacgcaagagctaaggatcaaaaaggaagacgaagaaagagatggatccagacgctgttgcaaaggctttcgttgagcactactactccaccttcgatgcaaatcgtccagggttggtttctctataccaagaaggatccatgttgaccttcgaaggccagaagatccagggctctcagaacatcgtcgctaagctcaccggcctccctttccagcagtgtaagcacaacatcaccaccgtcgattgtcagccttctggtcccgccggtggtatgctcgtctttgtctccggcaatcttcagctcgctggtgaacaacacgctctcaagttcagccagatgttccatttgatatcgaatcagggaaactactacgtgttcaatgacatattcaggttgaactatgcctgaggaatttgatgccagaggtacatggaaccatttttggaagcttgaaaagagagtggtggaaagtttgggacttttcaaaaactgtttgagttggttttaggtttggaacattaagctttgtttcaggtggtttgctgtctgtttttattttaatcaatgggctatttaacctttttangnccctttttttggg

SEQ ID NO: 86524 - DNA, 429 bp, Arabidopsis thaliana columbia
gcttaaagaaaaaaattcaaagtttcatcaaacattcggaacaacataattggaggggacatatatatgcacatgcatataaaattgagaagatgtgaaatggattaggaacatcttgaaaacattatcatctcaacaaagactgttattatctcttctcagtttgaaacacagataatactagtataaactaaaaagccttacatcattctaaaatatcatcactcaagtggcttcgtatttgggatcagcagttacgtagtgataagcaattaccaatgcgaagatgaagatgccaagaaagttggcaataaaccccaagtcctgatcatcgatcatcgttttatcgggacggaatcggtgggaaaggatgagatctccagactccagggaccagaagcgcggacgcttgggcggacgcctggtcga

SEQ ID NO: 86525 - DNA, 542 bp, Arabidopsis thaliana columbia
  unsure (1)..(542): unsure at all n locations
cgaacgcaaatacacaactngttactttaaatttttttttttcaacgaagagagagagaaaggcacgccgtgatgaacatgaaggggccggcagtagacttgtccaagctcaatggggaagagagagaccaaaccatggctctaatcaatgaagcttgtgagaattggggcttctttgtgatagtgaaccatggattaccacatgacttaatggacaagatcgagaagatgacaaaggaccattacaagacatgccaagaacaaaagttcaatgacatgctcaagtccaaaggtttggataatcttgagacagaagtcgaagatgtcgattgggaaagcactttctacgttcgtcacctccctcaatccaatctcaatgacatttcagatgtgtctgatgaatacaggacggccctgaaagactttggtaagaggcttggggatcttcctggggttttttggtntcctnttttggatntngggtttgngangggttttntgaanttttttttggccaaangccccctttggccaangtggga

SEQ ID NO: 86526 - DNA, 984 bp, Arabidopsis thaliana columbia
gtaaatattttattgttaaaacccatttaataattattattttacttaaaagtaacttgagacttgcatagtgaagcataagtgatgtcttttttgggaaatattatgtaatatattctgatttggcaggacggccatgaaagactttggtaagagactggagaatcttgctgaggatttgttggatctactgtgtgagaatctagggttagagaaagggtatttgaagaaagtgtttcatggaacaaaagggcccaacctttgggacaaaggtgagcaattatccaccatgtcctaaaccagagatgatcaaaggtcttagggcccacactgatgcaggaggcatcatcttgttgtttcaagaccacaaggtcagtggtctccagcttcttaaagatggtgactggattgatgttcctcctctcaaccactctattgtcatcaatcttggtgaccaacttgaggtgataaccaacgggaagtataagagtgtgctgcaccgtgtggtgactcaacaagaaggaaacaggatgtcggttgcatcgttttacaacccgggaagcgatgcggagatctcaccagctacttcgcttgtcgagaaagattccgagtacccgagtttcgtctttgatgactacatgaagctttatgcaggggtcaagtttcagcccaaggagccacggttcgcagcaatgaagaatgcttctgcagttacagaactgtatcctacagcagccgtagagactttctaaaaatggatttgagattcaagtgaagcagagaaagaaagatgagtttgtgttgtgtgttatggcaataagttaaaacttgtattagtgttgattaattgttggtcaattggtgtgttttaaagtgtggggtgtttgcggccgcgaattcaaacagccaaggggatccactagttctagagcggccgccaccgcggtggaggtccagcttttgttacctttagaagggttgttg

SEQ ID NO: 86527 - DNA, 449 bp, Arabidopsis thaliana columbia
  unsure (1)..(449): unsure at all n locations
cagaatacccggggggtcccacgcgtgcgcaaatacacaacttgcaacttctatatatattactttcaaagaagagagatggtgttaaagatggagttgggcatgaagtttccagtagtagacttgtccaagctcaatggggaagagagagaccaaaccatggctctaatcaatgaagcttgtgagaattggggcttctttgagatagtgaaccatgggttaccacatgacttaatggacaagatcgagaagatgacaaagggcccttacaagacatgcccagaacaaaagttcaatgacatgctcaaagtcccaagggttttggataatcttgaggacagaagtcgaaggatgtcggatttgggaaagcaccttttcttccggttcggcaacctccctcaaatcccattcctcaaattggcatttcaanatggtgncttnatngattt

SEQ ID NO: 86528 - DNA, 1004 bp, Arabidopsis thaliana columbia
  unsure (1)..(1004): unsure at all n locations
gtagattgtatcgataagcttgatatcgaattcgcggccgccaagctcaatggggaagagagagtttaaactatggctctaatcaatgaagcttgtgagaattggggcttctttgagatagtgaaccatggattaccacatgacttaatggacaagatcgagaagatgacaaaggaccattacaagacatgccaagaacaaaagttcaatgacatgctcaagtccaaaggtttggataatcttgagacagaagtcgaagatgtcgattgggaaagcactttctacgttcgtcacctccctcaatccaatctcaatgacatttcagatgtgtctgatgaatacaggacggccatgaaagactttggtaagagactggagaatcttgctgaggatttgttggatctactgtgtgagaatctagggttagagaaagggtatttgaagaaagtgtttcatggaacaaaaggcccaacctttgggacaaaggtgagcaattatccaccatgtcctaaaccagagatgatcaaaggtcttagggcccacactgatgcaggaggcatcatcttgttgtttcaagacgacaaggtcagtgggctccagcttcttaaagatggtgactggattgatgttcctcctctcaaccactctattgtcatcaatcttggtgaccaacttgaggtgataaccaaccgggaagtataagagtgttgctgcaccgtgttggtgactcaacaagaaaggaaacagggatggccggttgcatcgttttacaanccggggaagcgatgcggagatctcaccaagctaacttcgcttgtcgagaaagattcccgagtaccccgagtttcggctttgatgccacatgaagctttatccaggggcaagttcagccaaggggcacggnncnagcaatgaanatgctctnagtacagactgatccnnagancgangcttcnaaaatgggttggntcagtancnggnaaaanntggtttggttggggntc

SEQ ID NO: 86529 - DNA, 680 bp, Arabidopsis thaliana columbia
  unsure (1)..(680): unsure at all n locations
gatatnnnangaancttccatatcccaancncaattaccncccaagggaaaaaactngaccccacccggtgcgccccctaaacctagggacccccggctgcagaatccncggccccttgaggtgataaccnaacgggaagtataagagtgtgctgcacccgtgtggtactcaacaagaaggaaacaggatgtccggttgcatcgttttacaacccgggaagcgatgcggagatctcaccagctacttcgcttgtcgagaaagattccgagtacccgagtttcgtctttgatgactacatgaagctttatgcaggggtcaagtttcagcccaaggagccacggttcgcagcaatgaagaatgcttctgcagttacagaactgaatcctacagcagccgtagagactttctaaaaatggatttgagattcaagtgaagcagagaaagaaagatgagtttgtgttgtgtgttatggcaataagttaaaacttgtattagtgttgattaattgttggtcaattggtgtgttttaaagtgtggggtgtttatgtttatggaagatgataataattataaaaatcaaaaaaaaaaaaaaaagnnnnnnnnnnnnnnnnnnnnnnnnnnnnnnnnnnnnnnnnnnnnnnnnnnnnnnnnnnnnnnnnnnnnnnnnnnnnnnnnnnng

SEQ ID NO: 86530 - DNA, 1411 bp, Arabidopsis thaliana columbia
gcggccgcgcaaccctctctcattttacaagtctcacatcaaagcaattcaaatacacaacttgtaacttcaaatagattactttcaaagaagagagagagaaagaaagatggagaagaacatgaagtttccagtagtagacttgtccaagctcaatggggaagagagagaccaaaccatggctctaatcaatgaagcttgtgagaattggggcttctttgagatagtgaaccatggattaccacatgacttaatggacaagatcgagaagatgacaaaggaccattacaagacatgccaagaacaaaagttcaatgacatgctcaagtccaaaggtttggataatcttgagacagaagtcgaagatgtcgattgggaaagcactttctacgttcgtcacctccctcaatccaatctcaatgacatttcagatgtgtctgatgaatacaggacggccatgaaagactttggtaagagactggagaatcttgctgaggatttgttggatctactgtgtgagaatctagggttagagaaagggtatttgaagaaagtgtttcatggaacaaaaggcccaacctttgggacaaaggtgagcaattatccaccatgtcctaaaccagagatgatcaaaggtcttagggcccacactgatgcaggaggcatcatcttgttgtttcaagacgacaaggtcagtggtctccagcttcttaaagatggtgactggattgatgttcctcctctcaaccactctattgtcatcaatcttggtgaccaacttgaggtgataaccaacgggaagtataagagtgtgctgcaccgtgtggtgactcaacaagaaggaaacaggatgtcggttgcatcgttttacaacccgggaagcgatgcggagatctcaccagctacttcgcttgtcgagaaagattccgagtacccgagtttcgtctttgatgactacatgaagctttatgcaggggtcaagtttcagcccaaggagccacggttcgcagcaatgaagaatgcttctgcagttacagaactgaatcctacagcagccgtagagactttctaaaaatggatttgagattcaagtgaagcagagaaagaaagatgagtttgtgttgtgtgttatggcaataagttaaaacttgtattagtgttgattaattgttggtcaattggtgtgttttaaagtgtggggtgtttatgtagtataaactaaaaagccttacatcattctaaaatatcatcactcaagtggcttcgtatttgggatcagcagttacgtagtgataagcaattaccaatgcgaagatgaagatgccaagaaagttggcaataaaccccaagtcctgatcatcgatcatcgttttatcgggacggaatcggtgggaaaggataaggcggccgc

SEQ ID NO: 86531 - DNA, 553 bp, Arabidopsis thaliana columbia
  unsure (1)..(553): unsure at all n locations
nnnnnnnnnnnnnnnnnnnnnnnnnnnnnnnnnnnnnnnnnnnnnnnnnnnnnnnnnnnnnnnnnnnnnnnnnccacgcgtccgatttgttatctctcatctctctctctctttctctctgagctttgctttttatcaaacaagcatcatcatcacatccacttccttcttcttcctttctctgtctgtctcttaacccaaatgtggactctttgagccgttattagatctctgccgcttcaataatggggagcttatcttctgaggaagacgacgaagtctcttccgagagatgcggaagttacagtcccagcgccgacattagcgagtccgagagttccagcagcttctcctgccaccgcttcgacggcgagggtgcctctagctccatcccttcttcccctcgagttgtcgctggtagaggattttacttcccggccccagtcatgccttccggtgatcggcggcaaagatgtggtctgggatgacaaacaaccagacaacgatttatccgaaattgagatgatgaaggagagagttgcttagcttcttt

SEQ ID NO: 86532 - DNA, 427 bp, Arabidopsis thaliana columbia
  unsure (1)..(427): unsure at all n locations
agggaccnggccnggaatnccngggnagcccacgcgtccgggagaaagagaagggagtnaagcgcaaaagaactcctaagaaaagttcacctgcagctggaagttcatcttcaaaacgatcagcaaagagccaaaaaaagaccgaggaagcaacaaggactaacaaaaagagtgtagctcattctgatgatgagtctgaggaagagaaagaggacgacgaagaagaagagaaagagcaggaggtttaggaggaagaggaggagaatnaaaatgggattcctgataaatcttaggacgaggctcctcagctttctgaaagtgangggagaatttttgantcccgtggaggagtcagangggatggaanctnaaaaaggangaaaccgtgggttctnaggncatcatntttttnngaaaaggattcncc

SEQ ID NO: 86533 - DNA, 1025 bp, Arabidopsis thaliana columbia
  unsure (1)..(1025): unsure at all n locations
ccnnnnnnnnnnnnnnnnnnnnnnnnnnnnnnnnnnnnnnnnnnnnnnnnnnnnnnnnnnnnnnnnnnnaaccacgcgtccgctttaaccatcacttcaaagttcaaactcttttttttttttttgtttgatccaaattttaacaaaattatggatcgcaatttcctcctaacagttacattgatctgcattgtcgtcgccggtgtcggtggccaatctcctatctcttctccgaccaaatctcccaccactccttctgctccaactacttcccctactaaatcccccgccgttacttctcccactacggctccggcgaaaactccaactgcttcggcttcttcaccggttgagtcaccaaaatctccggctcctgttagcgagtcgtctccaccaccgacacctgttccagagagctctcctccggttcctgcaccaatggtttcttctccagtgagctctccaccggttccagcaccagtagctgattctcctccagctccggtagccgctccggttgctgatgtaccggctcctgctccaagcaagcataagaagactacaaagaaatcgaaaaagcatcaagctgcacctgctccggctccggaacttctcggtccacctgcaccaccgactgaatctcccggacctaactccgacgctttttctcccggtccttccgccgacgatcagagcggagcagcgagcacaagggtgttgaggaatgtagcggtgggagcggttgcaaccgcatgggccgttctcgttatggcattctaaattatttatcatttcacctctgatattttttagtttttatatttttgaccctaccattgtctctttctttacgaatttggtaatgagtattatttaattgattatacagtttgttttcttttattttatttacctggaaataataagaattcatnnnnnnnnnnnnnnnnnnnnnnnnnnnnnnnnnnnnnnnnnnnnnnnnnnnnnnnnnnnnnnnnnnnnnnnnnnnnnnnnnnnnnnnnnnn

SEQ ID NO: 86534 - DNA, 683 bp, Arabidopsis thaliana columbia
cccacgcgtccggagagagttttatttttctttccgagaaaattcgagaaaaataatctgggacaaaaaccatcgttcatttcttatagagaaagcttgagtgagggaaaagctttctacacgaaactagtctccagctttttgctctgtatttgtccagatttgtttgttgttgaggccaacatttgaagatattttcaagaaaatgggagtgaaagtagcaacaagctccaccttccatcaatgggtggctcatcctatagttcatcattcctcttccctttctcaaaccctagcttcctccgccgtttcttctccttcaagacgacggatcatcggaaacgacggacgttcttctctgtcttgtcgttccgtgatgcagagccagaggcttaatccttcttctcccttcggcacttcttcgacaaatctccgtcactccaagtcctgtgagctctgggaatcaacaaaacgacctaaaacacagttgattcgcagagcttttagcgcaaacgtcgatccgttttccgaggaagagtttgcgaaaaagatgcaggagctaactctcaaattccaagtctctaacgaagaagaagacaacgaatcggatacacgcattgacgattacactcgaaagatggacatagtaggaagccataataatttcaggtcagattcaatgg

SEQ ID NO: 86535 - DNA, 539 bp, Arabidopsis thaliana columbia
  unsure (1)..(539): unsure at all n locations
tggttggagattgancggaaaccccngtttnnttcgggctntcngcatcccatttcagtggtggcaatggactcaggngngcatgcgntgcgaacagacccgatcaggaccgntncatacttaccccngtacccgtctaaaatgaaagtgcttgagaaagtgttaagaggtatgaaaacacctgtcacttatctaaacatcacgagattaacggactacaggaaggacggtcacccgtcagtataccggaaacagagcttatcggaaaaagagaaaaagtcgccattgctgtaccaagactgcagccattggtgcctccccggggttccagactcttggaatgaaatcctctacgctgagctgatcgtcaaactcaatcagctcagccaaacacaacgaaaaacttaaggttcttccacccccaatacttgtttgatctcaacacttttactttctattttgatggtaattgttggttataggatgtgtagggtaaaaaagganggtgggntatanttggttcactcggtnncctttgt

SEQ ID NO: 86536 - DNA, 983 bp, Arabidopsis thaliana columbia
  unsure (1)..(983): unsure at all n locations
nnnnnnnnnnnnnnnnnnnnnnnnnnnnnnnnnnnnnnnnnnnnnnnnnnnnnnnnnnnnnnnnnnnnccacgcgtccgcaaaaatggaagtgaaagggaaagagacagcttcggttctgtgtctgagcaaatacgtggatctatcgagtgaagagagtcatagatactatcttgcgcggcgaaatggcttgcagatgctccgagacagaggctacgaagtctccgacgaagatatcaatctctcccttcacgattttcgaactgtttacggtgaacgtcccgatgttgatcgtcttcgcatctccgctctgcatcgctccgattctaccaaaaaggtaaaaattgtcttttttggtactagtatggttaaagtcaacgcaatccgcagtgtagtagcggatatacttagccaagaaaccataactgggctgatattggttctgcaaaaccatgtaaccaatcaagccttgaaagccattgaacttttttctttcaaggtcgagatattccagataacggatctgctagtcaacataaccaaacattcactgaagccacaacatcaggtgttgaatgatgaagagaagacaacacttctcaagaagttcagcattgaggaaaaacagcttcctcggatttcaaagaaagatgctatcgtccggtactacggattagagaaagggcaagttgtgaaggtgaattacagaggcgaactcacggaatcgcatgttgccttccgatgtgtgtggtgaagaaaccaattaaaaaccatcttgtgaacttattttcaggaaaaaataacttgtatgtttctaaggttttgtttttaatcctagaagatccgttgctttgaacacaagaaaaaaagttaaggaaaaaaaaaagatcctttgcttgtaaaaaaaaaaaaaaagggcggccgctctagaggatccaagcttacgtacgcgtgcatgcgaggtcatagctctactatagttca

SEQ ID NO: 86537 - DNA, 474 bp, Arabidopsis thaliana columbia
accgcgtcatgtagcagaagtcgtgtgctgctactggaaggatcagagtgagagtgagtccatgtcccagctgaagaaatacatcttccaagttgaagaaggcaaagaaggtagcgatggaagaccatcagttggtccagtgtaccggagtatctttgccaaggacggatttcccgacccgatcgaaggaatggatagttgttgggatgttttccgcatgtctgttgagaagtatccaaacaatccaatgctgggacgccgcgagattgtagatggaaagccgggtaagtatgtctggcaaacataccaagaagtctacgacattgtcatgaaacttggaaattctctcagaagtgttggagttaaggacgaagcaaaatgtggtatctatggtgcaaattctcctgagtggattatcagcatggaggcttgtaatgcacatggactctattgtgtaccgttatatgatacact

SEQ ID NO: 86538 - DNA, 707 bp, Arabidopsis thaliana columbia
ggaaaaaaaaaaaaaagaggcagaaccaaaaaactttagggttcgatttcgctccttggtaatcaccatgtccggagaagaagaagagaacgccgccgaactcaagatcggagatgagtttttgaaggcaaagtgcttaatgaactgtgaagtctctttgattcttgagcacaagtttgaacagcttcagcaaatctcagaggatcctatgaatcaagtttctcaagtgtttgagaagtccttgcaatatgtgaagcgattcagccgctacaagaatccagatgctgttagacaagttcgagaaatactaagcagacatcaactcactgagtttgagctatgtgttcttggcaatctctgtcctgaaactgttgaagaagcagtggcaatggttccttctcttaagacaaaaggaagagctcatgatgatgaagctattgagaagatgctcaatgatctctcacttgtcaagagattcgagtagtgcagaagattctcaagatctaagattctgaacatttagcaggatgctttacttgccttctagctgatctggagttaattcgccacgtctgaaattataaagctttaatgcctagaatttctggaatgataccttcatgttaaatgaatgtaatttacaacggatgatccaagcttttaatgaaatataccatctctttttcactaaaaaaaaaaaaaaaaaa

SEQ ID NO: 86539 - DNA, 1014 bp, Arabidopsis thaliana columbia
  unsure (1)..(1014): unsure at all n locations
nnnnnnnnnnnnnnnnnnnnnnnnnnnnnnnnnnnnnnnnnnnnnnnnnnnnnnnnnnnnnnnnnnnnnnnnnnnnnnnnnnccacgcgtccgcggacgcgtgggccgattcagagagaacaccgaatatgaccgccgattcaaccgtcgcactcgttcatagcgtcgtttctaacggtgatgtctccaacggaaacacctccgcttcctctaagaaatctcgtgagattgaccgtcgccgccgcagacggaagcagaagaagaacaacaaagcatcccaagccgatgtagatgcatcggacgtttctgctgcttctgaatccaaagagaatacagatccccagccacaggtttgtgagcagattgtgatagagtatgttccagagcaagctgaatttgaagatggttttaacgatgagtttaaggaaatcttcgagaagttcaacttccgcgaacctcttgcctctgaagaagacggtacgaaagatgagtctgaggagaaagaagatgtcaaaaagaaggttaactctgattctgattcagacgacgacgagcaggataatcagaacaaagagaaaggcatctctaataagaagaaaaagcttcaacggagaatgaagattgctgagctgtagcaggtttccgctaggcctgatgttgttgaggtctgggacgcgacttcagcagatccaaagctgttagtgtttttgaagtcgtaccggaatacagttcctgttccaagacattggtcgcagaagagaaaatatttgcagggaaagcgtgggatagagaagcagccatttcatcttcctgatttcattgctgcaaccggaattgagaagattagacaggcttacattgagaaagaagatggtaagaaattgaagcaaaagcaacgggagagaatgcaaccaaaaatgggaaagatggacattgactaccaggtacttcatgatgcatttttcaaataccaaacaaagcctaagctgtcagctctaggcgatttgtattttg

SEQ ID NO: 86540 - DNA, 306 bp, Arabidopsis thaliana columbia
  unsure (1)..(306): unsure at all n locations
gcgagaagaaggaggagatgagcaagatccgttcgtctgcgacaatgccacatcgcgaccagccgtcaccggcgtcgcctcacgtcgttacactcaactgtatagaggattgtgcgctcgagcaagactccctcgccggcgttgctggtgtcgaatacgtcccgctcagccgcatcgccgatggtaagatcgagtccgccaccgccgttctcctccattccctcgcgtatcttccacgagcagcttaaacggcgacttcgtccttaacagctcattctctgccttggntctgctgatcgcccttgt

SEQ ID NO: 86541 - DNA, 438 bp, Arabidopsis thaliana columbia
accacgcgtccgcgaagcagcaaccttcgcgccgccgagagataacgagaaaaaatggggaagaggtcgaaaacatcaaggaaagggaaaaaagcatggagggctaacattagctccgaggacattgaagatttcttcgagaaaactaccagagatgctctctccggtggcaatctctccgctgctcccagcgaagacttgttccacgtcgataaatcccatgaccttccggtgaagcgaaagattgagaaacatagagagagagtgctccgtgttgacagtatcttaaagaagaatccatttgtccagttagtgccatcttcaaagccaaagttgaagaaaagtaagaagacaatcgttatagaagacaaagcacctaaacaagttcaaaaaagtgttggtgacgattctgtaatggccgacttgtggggtgatgat

SEQ ID NO: 86542 - DNA, 284 bp, Arabidopsis thaliana columbia
actcaatactctaagatatgctgatcgagtcaaaagtctatctaaaagtggaaatagcaagaaagatcaaactgcgaattcaatgcctccggttaataaggatcctttgttgggcccaaatgatgtagaagatgtctttgagcctccacaggaagtgaatgtaccagaaaccaggaggagggtggtcgagaaggacagcaacagcagtacgtcgggtattgacttcagacagcctacaaattatcgtgaggaaagtggagtcccatcattctcaatggacaagg

SEQ ID NO: 86543 - DNA, 521 bp, Arabidopsis thaliana columbia
gctcattgcaatgttcaaagcttccattttcatttgaatatgaacggttgtaactgatatttgtgcataaatcagtttggttttcttggttttattgtctactaaacagaatgagaaaactaaactgtttatttttttactgaaaaatctgaaagttgtgttctatttttgtttacacacgataaccaagcaaaccggaactttatggaaaaaccggattggttaggtccagcttgttactacttaatcctatacaatgtcaatgcatatgttgctttggtacatagaattgccggaaattgggaacagtagtggctgcactgactcaaaagctctccaataatctctcctttagaattcattgcaaatatgtgaatcacaaaccaaaaatcgatctctgaaactctgctctctagtcaccgttaagttccatagttttggtggactcctgtgaacttgtgaattgccttcaaaagggaaccatatctcatatacttcaaagttcccatatgtactatctc

SEQ ID NO: 86544 - DNA, 1194 bp, Arabidopsis thaliana columbia
  unsure (1)..(1194): unsure at all n locations
nnnnnnnnnnnnnnnnnnnnnnnnnnnnnnnngagtaatttagcatctatccacgcctgaacccgaaaaactctgaaagctgagctctggtaatggcgggtttagcaatttcacctcctctcggtctttccttctcttctcgaactcgaaaccctaaacccacttcctttctatctcacaatcaaaggaatcctataagacgtatagtttctgctctacagagtccatatggagattctctgaaagctggactttctagtaatgtttctggatccccaataaagattgacaacaaggctccaagatttggagtgatagaggcgaaaaagggaaaccccccagtaatgccttcagtgatgacccctggaggacctttagacctctcttctgtgttattccgtaaccgcataatcttcatcgggcaaccaattaacgcacaggttgctcagcgagtcatatctcagcttgtaacccttgcatctattgatgataaatccgacatcctgatgtacttgaattgtcccggtggcagtacttactccgtcctaacaatttatgactgtatgtcttggataaagcctaaagttggaacagtggcgtttggagtagctgcaagccaaggagcattttttcttgctggaggtgaaaaaggaatgcgttatgcaatgccaaatactcgtgtcatgatacatcaaccacaaactggatgcggaggacatgtagaggacgtgaggagacaggtcaatgaagccatcgaagcccgacaaaaaattgacaggatgtatgcagctttcactggacaacctctggagaaagtgcagcaatacactgaaagagatcgtttcttatcagcatctgaggcgcttgagttcgggctcattgatggtctattggaaacagaatactgaagcagcatacaggacaatgcacaacaacagctcattgcaatgttcaaagcttccattttcatttgaatatgaacggttgtaactgatatttgtgcataaatcagtttggttttcttggttttattgtctactaaacagaatgagaaaactaaactgtttatttttttactgaaaaatctgaaagttgtgttctaaacccccccaacaaaaaagaacaaagnnnnnnnnnnnnnnnnnnnnnnnnnnnnnnnnnnnnnnnnnnnnnnnnnnnnnnnnnnnnnnnnnt

SEQ ID NO: 86545 - DNA, 604 bp, Arabidopsis thaliana columbia
  unsure (1)..(604): unsure at all n locations
taggtgcactatagaagagctatgacgtcgcatgcacgcgtacgtaagctcggaattcggctcgagcaaaattttcttgagaactttttttgaagagttatgattgcattagctgcttcttcgttggggaatacaccgattgcttcgtttaaccgtcattttagattccggttacatccacgaaaccctctgatacaagcagcggtttcaccttcgtcttcttcttcttctcctactgcttcatctggctttgatttgagttctctcgaatccgccattaacaagaaagatagtaatggtgttaaggaagctctcgataaattgagtgaagaaggttgggctaagaaatggagctcccagccgtatctttcgcgccgtacgacatcactgcgggagctgacaactctcggtatcaagaatgcagagactctggccatccctagtgtcaggaacgatgcggcttttcttttcacagtagtcggatcaactgggttcatagctgtacttgccggccaacttcccggggactggggattctttgtgccttacttagttgggngcatttcnttggtagttttagcccgtcggaagcgtttcancaggg

SEQ ID NO: 86546 - DNA, 683 bp, Arabidopsis thaliana columbia
  unsure (1)..(683): unsure at all n locations
taggtgcactatagaagagctatgacgtcgcatgcacgcgtacgtaagctcggaattcggctcgaggtctgttgacagtatgcagacaagtaatgctggagggtctgtgtcaatgtctgtcgataacagtagcgttggttcgagtgatgctcttattggccatcctggtttgaagcctatgcgccatccctactctctctcggatggccaaagcgtatttcggccaggaaaagttactcatgcacttaacgatgatgccttagcacaagcgttgatggatagtaagtatccaaccgagggactggtgaactatgaagagtggacaatagatctgaggaaactacatatgggtcctgcttttgctcaaggggcttttggaaagttatacagagggacttacaacggagaagatgtagccattaagctactcgagaggtcagatagcaaccctgaaaaggcacaagccctcgaacagcagtttcagcaggaagtttctatgcttgcatttttgaagcatcctaacatcgttaggtttattggtgcgtgcatttaaacccgatgggtgtcggtgcatcgtggccttgattatgcaaaaggaggggccttttaaancagttttttgcctnnggggcaaanccgggtttgcctttaaaggtttgctgttttcnagnngttggtttttc

SEQ ID NO: 86547 - DNA, 510 bp, Arabidopsis thaliana columbia
aagaaaaaatccaaacaaatagaattttgccgtctgaaattcctaaaactataaaacacagcttccttcttctcctatatatccatcggcgacgcctggatcatgattctttccggaaactgataagaggaacaaaaatggcttcttcttctctggagattgttaaattgtgtggctctcctgtatcgtttccccgccataaatctcccataaaattggaatgtagaaaaagggttttcagattacccaattctaggagttggcatcgtcttagggtttcttcatctgctctcaatggtggtgataatcagtccaaaggtgaagaacctccagaatctttatttatgaaagaattgaagagacgtggtatgactcctacttccttgcttcaagactatgaagtggatcaggatgagatcaaaaccggtaaagaaaccggaaacagctctaaaacgactgcaactactccggccttcgataaaagcttgttaaatcagagagagagatctt

SEQ ID NO: 86548 - DNA, 741 bp, Arabidopsis thaliana columbia
aacgctttcgaattgtgctgatgggcttattgatgctgttatggcttctactgctattactatctccaataattacttcacacaccacaatgaggttatgttattgggacatagtgatacctatacaagggataaggttatgcaagttacaatagcttataatcattttggtgaaggtcttattcagagaatgccgaggtgtacgcatggatattttcatgtagttaacaatgactatacacattgggaaatgtatgcgatcggtggcagtgcgagtcctaccattaacagccaaggaaatagatatctcgccccaagaaaccggtttgctaaagaggtgacaaagagagactatgcagggcaaatggcaatggaggcattggaattggagatcagaaggagatctttttttaaacggagctttcttcacacgttctggatcaggtcttggacgctcgctacgctggagccttcaagtttagcagccaaatcatcatctcttgttggcgtcattacctacaatgccggtgctcttaattgcagaggtggtcgccggtgttaatagttactaaagtctatcttcttttggtttcttgcattatacatggcaatagcactattgaatgtcgaggcttgatttaaaattgcctcaactgtattataaagttgtaatgatttgtttcaccgccaattattgatgtatctataaaagcaaacaaagttggaactctccaaaaaaaa

SEQ ID NO: 86549 - DNA, 1545 bp, Arabidopsis thaliana columbia
gaagtttcttacaatttgtaaagagatctgttttagggttttgccttgttcttgtggcgggaataacaaagacatcgccgatatggggaaagacgaagaggaaatgcgaggtgagatcgaggagcgactaatcaatgaagagtacaagatctggaagaagaacactcctttcctctacgatctcgttattactcacgctctcgagtggccttcacttactgttgaatggcttcctgaccgtgaagaaccttccggtaaagactactccgttcagaagatgattctcggtacccatacctccgagagcgagcccaattacttgatgctagcccaagttcagcttcctcttgacgataccgagagtgaagctcgtcagtacgatgatgaccgctctgaatttggtggctttggctgtgcaactggaaaggtacaaattatccagcagataaatcatgatggtgaggttaatcgagctcgctatatgcctcaaaaccctttcataattgctaccaagacagttaatgcggaggtctatgttttcgattacagtaagcatccatctaagcctcctcttgatggggcttgtaatcctgatttaaagcttagaggtcacagctctgagggatatggtctctcttggagtaagttcaagcagggtcatttgcttagtggctctgatgatgctcagatctgcttgtgggatattaacgctactcctaaaaacaaatctctggacgctcagcagatttttaaggctcatgaaggggttgtggaagatgttgcatggcatctgagacatgagtacctgtttggatcagttggagatgaccaataccttctcatatgggatctgcgttctccatctgccagtaaaccagtacagtctgtggttgctcattcgatggaggttaactgcttagccttcaatccatttaatgagtgggttgtggcaacaggatcaactgacaagactgttaaattattcgatctacggaagctaagcaccgctcttcacacatttgatagccacaaagaggaggtttttcaagttggttggaacccaaagaacgagactattttagcttcatgttgccttggtagaagacttatggtttgggaccttagcaggatcgatgaggaacagacagtggaggacgcagaagacggcccacctgagctgctgtttattcacggtggtcacactagcaaaatttcagatttctcgtggaacccttgtgaagattgggttatttccagtgttgctgaggacaacatactccaaatatggcaaatggctgaaaacatctatcatgatgaggatgacgctccaggggaagaaccatcaaaagcttcttagcttgttatttagtatccaaagcgcactgatcttatgggacagtatttatttatacatctctgctattgtttagttcaagtatttagtgttcattgtgtaaaatgaggcatgagaggatggtagcaagtgggaatttttctttataacatgaaggagttgattctaatctcactaaaaaaaaaaaaaaa

SEQ ID NO: 86550 - DNA, 527 bp, Arabidopsis thaliana columbia
cactattgggaaagctgacccgcctgcaggtaccggtccggaattcacatatctctccaacactaaaataattgtaccgactctctctctctctctctccgtaacaaaaaaatcaccaatggcaaaacaatatctctttgtactcctctcaatctcctatctcttatcactggagctcacggcggccaccgcagcctcacagaccggagcttccaaaaaagccataaacttcatccaatcttcttgcaaaaccaccacataccctgccttatgtgtccactcactctccgtctacgcaaacgacatccaaacaagccctaaacgtttagctgagaccgctatagccgtgacactaagccgagcccaatccacgaagctcttcgtctcgcgtctaacacgtatgaagggtcttaagaagcgcgaggtcgaagccatcaaagattgcgtcgaggagatgaacgataccgttgaccggttgaccaaatctgtcaagacctgaagttgggtgggagcgcccaagaccaaac

SEQ ID NO: 86551 - DNA, 1673 bp, Arabidopsis thaliana columbia
aagaagaacgatcgagagcgagagagagagtgatggcggcagaagagggtaaagatgaggcgggattggatcaggtggaagaagagttctctatttggaaaaggaacacaccttttctctacgatcttatgatctctcacccactagaatggccttctcttactctccactgggttccttcgacgccgattccgtactcgaaagatccttactttgccgtccataagcttatccttgggactcatacctccggtggtgcccaagattttctaatggtcgccgatgtcgttattccgacacccgacgctgaaccaggattaggtggaagagatcaggaacctatcgtccctaaggtggagattaagcagaagatacgtgttgatggagaagtgaacagagcgaggtgtatgccacaaaagccaactcttgtgggtgctaaaacaagtggctctgaggtgtttctgtttgattacgccagactctctggaaagccccaaacaagtgagtgtgatcctgatctgaggctaatgggacatgaacaagaaggttatggattggcttggagttcctttaaggagggttatcttttgagtggctcacaagatcagagaatctgcctttgggatgtctcagcgactgccactgataaagttttgaacccaatgcatgtgtatgagggacatcaaagtatcatcgaagagttagcatggcacatgaagaatgaaaacatattcgggtctgcgggtgatgattgtcaattggtgatatgggacttacggactaaccaaatgcaacaccaagtcaaagttcacgagagagagataaactatctttctttcaatcccttcaatgaatgggtactagccacagcttcctcagactcaactgtcgccttgtttgaccttcgtaagctgactgcgccattacatgtcctgagcaaacacgagggagaagttttccaagtggagtgggatcccaaccatgaaacagtgcttgcatcttctggcgaggacagaagactcatggtctgggatatcaacagggttggggatgagcagcttgaaatagagttggatgcagaagatggtccacctgagctgctcttctctcatggaggccacaaggccaagatatcagactttgcctggaacaaggacgagccttgggtcatctcaagtgtagctgaagacaacagtcttcaagtctggcaaatggcggaaagcatctaccgcgaagatgacgaggatgaggatgatgatgatgaaggcaaccaaaatgcacaacattccaatgaaaaccagaaatgattcaagtctttggcggatgatgatgacttacaattgttgttgttaacgtgtttgagccaatatataataaacaagtttggtgtatgtgctaccctaagtatgaaacgctcgtttattccaggacgtctgttatgattcttgagtttaataatagttcagtaaaccctaaaaaaaaaaaaaaaaatgagattggttcaagtaaaagttaagctatattatcacatttaagtcaacaaagcaacttgggatcacaattgtgagaacgttgcaatgttacagtaaggctagatcagagacagcccctcaagctcaatgtacaaaacagtgtgcttaatgggcatacctggttctcaccaagcaacatga

SEQ ID NO: 86552 - DNA, 1620 bp, Arabidopsis thaliana columbia
  unsure (1)..(1620): unsure at all n locations
atgatttgccggcactaatacgactcacttagggaaagccggtacgcctgcaggtaccggtccggaattcccgggtcgacccacgcgtccggagagagagagaagtagattgagaggcgagagagataatggcagatgaaggtaaggaggagacaggaatgggtcaggtcgaggaagatttttctgtgtggaagaagaacacaccatttctctacgatcttttgatctctcacccactcgaatggccatctctcaccgtccattgggttccatcgacgccaaatccttacgtagcagactcttacttcggtgtccacaagcttatactcggtactcatacttccggtagtgctcaagattttctcatggtcgccgacgtcgttaccccgacaccaaacgcagaacctgggataggcggcgctaatcaggatccctttattcctaaggtggagattaggcagaggatacgtgttgatggagaagtgaacagagcgcggtgtatgcctcaaaagccgacgcttgtgggtgcaaagacgagtgggtgtgaggtgtttctgtttgattacgccaaacatgctgcaaagtctcaaacgagtgagtgtgatcctgatctgaggctagtgggacatgacaaggaagggtatggattgtcttggagtcctttcaaggaaggttatcttttgagtggttcacaggatcagaagatctgtctttgggatgtttcagctacaccgcaagataaggttttgaatgcaatgtttgtgtatgagggacatgaaagtgctatcgcagatgtgtcatggcacatgaagaatgagaacctttttggttctgcgggtgaggatggccgattggtgatatgggacacacggacaaaccaaatgcaacaccaagtgaaagttcacgagagagaggtcaactatctatctttcaatccgttcaacgaatgggtattggccacagcttcctcagactccactgttgctttgtttgacctccggaaacttaatgcgccattgcatgtcatgagcagccatgagggagaggtcttccaagtggagtgggatcctaaccatgaaacagtactcgcatcttcaggggaggacagaaggctgatggtctgggacctgaacagggttggagaagagcagcttgagatagagttggatgcagaagatggtccaccagagttactcttctctcacggaggccacaaggctaagatatcagactttgcttggaacaaaaacgagccttgggtcattgcaagtgtagctgaagacaacagtcttcaggtgtggcagatggcagaaagcatctatcgcgatgaagaggatgccgaggacatcaaagaagatattacacaacaatcatgaaaattaagaaacgatttggtctctccattacttaaagtgtcttatcttgctttagccagtttctgaaagacaagctttgcgtctgtattaggattaacatgaatcatctctgtttgttaatgtaaccatgttggattttgttggtttcctatcaaaaaaaaaaaaaaaaaaannnnnnnnnnnnnnnnnnnnnnnnnnnnnnnnnnnnnnnnnnnnnnnnnnnnnnnnnnnnnnnngtcctaaa

SEQ ID NO: 86553 - DNA, 340 bp, Arabidopsis thaliana columbia
cccacgcgtccgcccacgcgtccgtctctccacaatttgctgctttaacctctctctctctctctctcatcacaccatgtgggatgtggctatagcagtcttcactgcatcttcctcctcactttcttctctctctttctcttaatttctttttttccagatttttctctgattcccatcttttccctcgaatgatcggttgagagaagatggtttcagagacttggtttcgtaatctgtggaggtttccaaagaaacatgatggtcataaagataaggcggttctaggagtattagcgtttgaggttgcgagtttgttgtcgaagcttgttcatttgtg

SEQ ID NO: 86554 - DNA, 509 bp, Arabidopsis thaliana columbia
gcgacgcgtcagcggacgcgtgggcggacgcgtgggtttagatttgaggactctctgtcttttcttatttcggagaatgttctttttctagggttttgaaattctaagagattttctgaagaagaaaacaaaatgggtcctcttgtcgaagcgactgagttctcgaaagaacaagcactcaccgacgctgcagaaaatctccttaaacctcatttctcaactgatgcgactctcagtcttctcgaggtaatggagtctctgctcgccactgtcgagcaagatctttcttcatcagtacaaaaggccctacatccaccaatgagggctttggtatccgctgatcttttgagaaaccctgattctgatgttagggtttctgttgtctcttgcttgaccgaaattatgaggattactgctcctgaggccccttacaacgatgagcaaatgaaggacatcttccaggtgacaatagaagcctttgaaaaacttgctgatgcttctagtcgcag

SEQ ID NO: 86555 - DNA, 869 bp, Arabidopsis thaliana columbia
  unsure (1)..(869): unsure at all n locations
nnnnnnnnnnnnnnnnnnnnnncataaaagggatgcatgtgtattcaacaaatacgtgtgacaaaacaatttcaaccaactggaataaacttttcaacttttttttgtttgtttttgttaaagaacaaaaaaaggaaaggagaaggatcaagaaatatctctctccaaaccccaaatcgaaaaagtataaaaaaattggactctttgtaatcgacttatgttctcttttcactgcacataaaaaaaaaaaaggtttttcatttggaacccctgtgagctgatggcttggattgagttgaatttgctgctgatgacattactcgtaagcgaccagctatctctgtgaaaaatggtcttgccattgggtttggtgcccaacattcctccattagtgttctccattcatcgtcacagaagcctggtatggttggtctcagtgtgttgttcactatcccacctattattgccccatagtgcatattggcatatggttcctctccggttaaaatctcccacagaacgataccgaaagagaaaacatcaaccttttcagaaactttgctactgctcccgtttaaaactctggtgccatccacggtaaggttccacgtacaccaccagataccaacgtatttctcttgatttttgacaaagccaaatcaccaaccttgcagattgggcgaaaaggatctttcntttcacanttaaattgtccatttcaaatcaaantgaacagtgttttggantgtaaatatcccnccaaatgcncctccatggaatnatatctcttacaananaaaaaactgtcttccggacaaaaatnctcaaaaaacancaccttttttcttcacntcccangtcctccnncc

SEQ ID NO: 86556 - DNA, 463 bp, Arabidopsis thaliana columbia
cccacgcgtccgctcaaattgaagtttccatgggaggccacgaaggtttcagcaaccaacgcctctcctccgccacatggttctctcatttccgtgcttcagctctccgatctaaatcactgccccctccgtcctcgcagactgccgttcgctccacctctggcgactctctggttcgtcgcctcggccttttcgacctcatactgttgggcgtcggcgcttccatcggcgccggtgtcttcgtcgtcaccggaaccgtcgctcgcgatgctggacctggagtcacaatcagcttcttgctagctggagcatcgtgtgtgttgaacgctctctgttatgctgaactttcatctcgtttccctgctgttgttggtggagcttacatgtactcttactcagctttcaatgggtaatcccagttttttttagtttatatttcatctcttggcttttgcttttttta

SEQ ID NO: 86557 - DNA, 766 bp, Arabidopsis thaliana columbia
  unsure (1)..(766): unsure at all n locations
cnnnnnnnnnnnnnnnnnnnnnnnnnnnnnnnnnnnnnnnnnnnnnnnnnnnnnnnnnnnnnnnnnnnnnnccacgcgtccggtgataaagaataaagagagccagtcgagggtaaaacgaaaggccaccattttcaatctttccacaataatggcggctactagagtgttaactgcagcgacggccgtgacccaaaccacctcctgtttcctcgccaagcaagctttcactcttccggcgaagaaatcctgcggcggatttggtggtctctgcttcagcagaagagctttggtgttgaaatctaagagacctttctcctgcagtgccatttacaatcctcaggttaaggttcaagaagaaggtccggccgaatccctagattatcgagttttcttcctcgatggttctggaaagaaggtttctccatggcatgatataccattgaccttaggcgatggagttttcaactttatagttgaaatacctaaagagtcaaaagcaaaaatggaggttgctactgatgaagatttcactcctattaagcaggatactaagaaggggaagctcagatattatccgtataacattaactggaactatgggttgcttcctcaaacatgggaagatccatctcatgcaaattctgaagttgaaggatgttttggggataatgatccagttgatgttgttgagattggtgaaacacaaaggaagataggcgatattctaaagataaagcctttagcttgcttagctatgattgat

SEQ ID NO: 86558 - DNA, 528 bp, Arabidopsis thaliana columbia
actcaagctcctggttcggaactatttacttttctatgcgattggttgtttataagttgatttcagagttcggattcttgtactcattagatgtccatataggtcttgtttactggtttaattggggttttatcaaggaaataaagagtgtttagggtttgaatttccgtgtcgtcttttctatctcctttgcagatggcgagcaatatcatcttgttcgaggatatcttcgtggtcgatcagctagaccctgatggcaaaaagttcgataaagttactgcgcgttcaagctacgagccacaactttggaaatgtctatgcatttagatgttaacactgaggtttatccattggctgttggtgataagttcacgctggctatggctcccacgcttaatctcgatggaactcctgataccggatactttactcccggagcaaagaaaacacttgcagattagtatgaatacatcatgcacgggaagctttacaagatctctgagcgtgacggcaaaaactcaaaagcag

SEQ ID NO: 86559 - DNA, 665 bp, Arabidopsis thaliana columbia
ttgggagattaaagtctgaactttttagatctcaaagcttctccatctctccctcaactcaagctcctgatggcgagcaatatcatcttgttcgaggatatcttcgtggtcgatcagttagaccctgatggcaaaaagttcagattaaagttacatcagcagttcaagctacagagccacaacttggaaatgtttatgcatttagatgttaatacagaggtttatccattggctgttggtgataagttcacacttgcgttggctcctacgctgaatctcgatggaacccctgataccggttattttactccgggagcaaagaaaacacttgccgataagtatgaatacataatgcacgggaagctttacaagatctctgagcgtgacggcaaaactccaaaagcagagctatatgtttcgtttggcggcctcctgatgttgcttaagggagatccagctcatcatttctcacttcgaactcgaccagaggctcttccttctcatgaggaagctgtgcggtgccattttttctggataaaaactgaattaatagagagcttgatctaatgtttaacttttactactttcaactcttgcaattttcatgaagcaactcttgtgcaaaagcaagtttttccgttccaaacaaaaaaaaaaaaaaaaaa

SEQ ID NO: 86560 - DNA, 263 bp, Arabidopsis thaliana columbia
  unsure (1)..(263): unsure at all n locations
aagaagaagaagaagaagagatcagctgagcaacaatggccaccgcgatacctctcttcgcctctttcaagtatgccgatagtctcaccgtcgttggaatctctttctgcacggcgttggtctgcgaagcattctcatggatcctaatctatcgcacaagctcttacaaatcgttgaaatcttccattgacaaagcctctaagaagcttgagacgatgaagacagataatccttcctcgaagctaacaaacaagaaatcgnag

SEQ ID NO: 86561 - DNA, 618 bp, Arabidopsis thaliana columbia
  unsure (1)..(618): unsure at all n locations
aagtcattcccagagaagaatccagatatagatatgctgggatgccagatacagaagcagtgaccaaccccacagacagaactgtggctcatttgctctttcataggccttttgatatgttggcggcaaagcgaatggaaggaccagaatcacccgcttcttcgaagatgggaactgaagaaaaagggaattttcctaaatgcagcatacgagagactcacttaactaagcagaaagctcaaaaggaagaaggacctgcagattcacttgctttggggaatgcacccaactctggatctagtagtactgttggtgagagggttgttgaagcatcccaaggaaacaaaagaaaattgtgaaatttagaagtttaggttgccgtgttagagaggagctttgggtatttctgcagactagacagcatctttctgcggctctttgaaacaatctcctgactgcncctttcttgtgaagcccttattccttgtaattagatttttttttttttgttncttttcgaaaacctcttttgttatacgcattttggaaaacgtgtngtttgcaatgtttttccccnnttcgaaaccngattcaatctcttnatacaattgtnngnnc

SEQ ID NO: 86562 - DNA, 967 bp, Arabidopsis thaliana columbia
gccacgtgtcatcttcctgaaatattgttttttgtttggaggtaactgtatcttctcaagctttcttcttctacaacacatctagagctttgcaacaatggaggcgagtgcgaatgaaccagctatgaaaagcttgaaatccaatccttcaggaccgataccgaactttttcgtatcgctctcttcggcatttacgcaaacacctcttgtgcgttcgaacaaacccaatttgcttcttctaccaccagttgcagactccgtcaaattgattcaagactttcatcagtctctgatttctgctactgagaaatttaaaggattcctccattcgctcgcctctaagaaccctctctttcaggaagcggttcgcctatcttccgaatttcacattttgtgcgacgagattcgtttgagaaacactacaagggtgaggtttgcgatgtctaatcacggatttgcagcggttctgcctggagattcagttgcaggattggtggttgctaatggtttgatcaatttcctcaacatatataacaccatccttgtcgtccgtctagtactcacctggttcccgagtgctcctcctgccattgttaaccccctcagcactttatgtgatccatacttgaacattttccggggattcataccgcctcttggaggattagatttgtctcccattttggcgttccttgttctcaacgccttcaccagctcggctatggcacttccttgcgaactcccgtcagctgatggagccgtttctccagcttctagtgagacaaagtggatgagaaggagaaggttgagcagccacaaagaccacagaccgagctcagcttctatgacctgaacctgtctaaaatatctactcttttctgcgcttcaaatgtaaaatctacctttcgagtaatttcattactctgcatctttggatttctgagttttgtataaattttctttagaa

SEQ ID NO: 86563 - DNA, 1036 bp, Arabidopsis thaliana columbia
  unsure (1)..(1036): unsure at all n locations
nnnnnnnnnnnnnnnnnnnnnnnnnnnnnnnnnnnnnnnnnnnnnnnnnnnnnnnnnnnnnnnnnccacggtgtgagtaatttaggccgcttcttcttcttcttcttccactgtcgttctctctgtaaatcgcttcttcaatcatctctgtggatttgtctctattcataacttggtgaagaagatgttgacggaagaggagctcaaaagattgtacagaatccagaagacgttgatgcagatgttaagggatcgtggatattttatcgcggattctgaacttacgatgactaaacaacagtttattaggaaacatggtgataacatgaaaagagaggatcttgttactcttaaggctaagcgaaatgataatagtgatcagctctatatattcttccctgatgaggcgaaagttggtgtgaagacgatgaaaatgtacacgaacaggatgaaatcagagaatgtgttcagagctattttggttgtgcaacagaacttgaccccgtttgctcgaacttgcattagtgagatctcttctaagtttcatctggaagttttccaggaggcggaaatgctagtgaacattaaagaacatgttcttgttcctgagcatcaagttcttaccactgaagagaagaaaactttactggagagatacacagtgaaggagacacagcttccaaggatccaagtgactgatccaatcgcaagatactttggactaaaacgtgggcaagtcgtgaagatcattcgtccgagtgaaacggctggtcgttatgttacctatcgttatgttgtataagccaaagcaaaaggcttttgtggattgtaatgcgaattgaacgctgagagttgtgaaacataagagtaatgcttttgtactaaaccaaactgatgactgtgttttatttttgtttgtccgataggagaaattaaagcttgaaacaacttatttgctaaattactcacactgnnnnnnnnnnnnnnnnnnnnnnnnnnnnnnnnnnnnnnnnnnnnnnnnnnnnnnnnnnnngtc

SEQ ID NO: 86564 - DNA, 389 bp, Arabidopsis thaliana columbia
cgagaaatctttttgggcgacgttggttgctcggtgctctttctccgatctgtctccattttcggtgatttaaagtcaggatttggctgtggagatgtcttcacttacctccgtcgaattgaattttctggttttccgatatcttcaggaatcagggtttacacacgctgcattcactctaggttatgaggcagggattaataaatccaacattgatgggaatatggttccacctggtgctcttatcaaatttgttcagaaaggtcttcagtacatggagatggaagctcatttgagcaatagtgaagtggacattgatgaggatttctcattctttcaacccttggatctgatttcaaaggatgcaaaggcactgcacgatatgctca

SEQ ID NO: 86565 - DNA, 750 bp, Arabidopsis thaliana columbia
gagcttgtataagtatttgtgacaataatcccaaagaaaacccaataaaatacagataaacctgtcgaaccggttgatttagcacaataagcggtccatgaaacgtcttctacatcaaagttcgtaaatttccatgaaacgtctttgagcaccgaggaagaaagtttaaaattcctaaagaaacacacaaattaaaaaaggcaaaacctaaaccccatatttatttgtctttttttctttatcagagaattttaaaaaggtaaaaatagattatattctattccttcagaaaatttttatcgtcctaaaatcttcgtagcctgcaacaaagaaagactaagaaagaactaaaatattttgcttcgtctaattacttttttcctttggatttaattctcagccatcgccgccgttttcggcggtgtaaaaaatgaagaaccgtaggaaacgcggtggtttaagcagtgtcgacgtcgttgtttcatggagaagatttttccgatttgtttctttgttcgtcttctccttcgttctcttctctgctttcttcatcttcttaggcaaaattcgaccggtggtgcggtcttcggtcaaccgcagttcttcgtggttctgtaccggtggttaaggtgatcacgatccatgaagcagttgagttttccgaccaaacattgattttcctaaaataccctccatcttctcggttttttacgaaagaggacctcttttgcgttttctccgacgtaaacg

SEQ ID NO: 86566 - DNA, 554 bp, Arabidopsis thaliana columbia
aaagcacgtacgcctgcaggtaccggtccggaattcccggttcgacccacgcgtccgtgcttcctcaatctaaggatttccatgaacaaggaactaaaatgagatctcttctctttgtactatcactcatttgcttttgctctcaaacagcactttcatggaagaaggaagagtttcgcagctgtgaccaaactccattttgtaaacgcgctcgatctcgtactcccggcgcgtgttctctaattgtcggcgatgtttccatcactgatggagatctcgtagcgaagcttctaccgaaagcgcctaatcaaggcgatggggatcagatcaagccgttgattctttctctctcagtttacaaggatgggatcgtgcggcttaaaatcgatgaggaccattcgttgaacccgccgaagaagaggttccaagttcctgatgtggtagtgtctgagtttgaggagaagaagatctggctgcagaaagtagcgacggagacgatctctggagacactagtccgtcttcacgtggttatgtatccgatggttacgaggcg

SEQ ID NO: 86567 - DNA, 618 bp, Arabidopsis thaliana columbia
  unsure (1)..(618): unsure at all n locations
aangnaacttgnccctcagtccgtccggatcccggccccccccgcccgagttcgcttactctctcgttaaagctctcagagagggtatctcgatctggttggttcctttaaccatctgtaactatggcggcagaaccgaaggcagcgactgctgaagtagtgaagatggatctgtttgaggacgacgatgagttcgaggaatttgaaatcaacgaagattggttggagaaagaagaagtgaaggaagttagccagcagtgggaagatgactgggatgatgatgatgtcaatgacgacttctcacgtcagttaaggaaggagcttgagaatggtactgacaagaaataaggtcgaagattgtgaaagacaggtcttcacatttaggaaatctttgttttcttttatgatctggaactttgtttgtactgcatcattttgggtttatgttatcggttctgcttttcctttgcacattttactattccttggatgcaaatttcttatctttgcaagataatacatttacgctggtgcgttcaaaaaaaaaaaaaaaaaaaaagggcggccgctctagaggatcctagcttacgtacgcgtgcatgcgacctcataacttga

SEQ ID NO: 86568 - DNA, 726 bp, Arabidopsis thaliana columbia
aacctccttcgtacttcatcgttgctggctttgtatttacaactgtctctgttccatatcttcgatctgagtatggaaaagaatatgaatttgacgcgcctgtcaagctattggagaaacatcttcatgcaatggctcaatccgtggacgagcagcttgttgtagtttcacaggttcttgtttctgacattaacattggttatgaagagattgtcaacacccaggttgtcgcctttaatggcaaacctgtgaaaaacttgaaaggtttagctgggatggtggagaattgtgaggatgaatatatgaagtttaatctggattatgatcagattgttgttctggacactaagacagcaaaggaagcaacattagatattctgaccacacattgcataccttctgctatgtctgatgatctcaagactgaagaaagaaactgaaacagaaggaaccataaccagaaggagagaaagagagatttttgtccatggaaggacataaaagcaaatacagtcatggaaagacaaagagaagctcaaaccataatttgatttttcttgattctgttttgtatttggaaaaatatgcaagaagaaatacgttggttattttttctctcatttattttctttgaagtttgaacttggttgaacaaaaaaaaaaaaaaaaaagggcggccgctctagaggatccaagcttacgtacgcgtgcatgcgaagtccagac

SEQ ID NO: 86569 - DNA, 496 bp, Arabidopsis thaliana columbia
aaaaaaaagaagggcataaaaataagagcttcaggaaccagcaaagggaaaaatcggttcgcggcttcttctgctttgccgagaccctaagcttgattcgatctaactctggcttatcaattctgatcttgtcgtttcgcaatggtggtctgcaaatgcaaaaaggctaccaggctgtattgctttgttcacaaggcccctgtttgcggcgaatgcatttgtttcccggagcatcaaacttgtgtggtccggacgtattcagaatgggtgatagatggagagtatgatcagccaaagtgttgtcaatgccaagcaacatttgatgagggggcaggtcatcaagtcactcggttaggttgcttgcatgctatacatacaagctgcctggtttcgcttatcaagagttttcctcctcatactgcacctgctggttatgtgtgcccagcatgtagcacacctatatggcctcctatgatggtaaaagatgcaagatctc

SEQ ID NO: 86570 - DNA, 528 bp, Arabidopsis thaliana columbia
  unsure (1)..(528): unsure at all n locations
cttctcgccccctttatcttgttctttgggtcaggatcaatccctttgtggacgccaatcccaatgccaccaacttcaatggcaaaggaggtgtcttttacaccctatttatatacttgtgtgtgcatatatcaaaaacgcgcaatgggaattccatgtcccagattagctttctccgagtagccacagaaggtgaaattgttcgtaacactattgtaatgattttccagtggggaacaagatgtggacccaaatgatacatagtctacaaaaagaatttgttattctttcttatatttattttatttaaagcttgttagactcacacttatgtaatgttggaacttgttgtcctaaaaagggattggagttttctttttatctaagaatctgaagtttatatgctaagcttttcactttcctccntnttntntnagcggccgaccccctgatcaacgctctataggatcccagcttnnnnnnnnnnnnnnnnnnnnnnnnnnnnnnnnnnnnnnnnnnnnnnnnnnn

SEQ ID NO: 86571 - DNA, 668 bp, Arabidopsis thaliana columbia
  unsure (1)..(668): unsure at all n locations
ggggnccncggggcccctttngggnnccttcccccnnggggtttccccnntnccccnttttggaaggcttttgggnagccaaaccgggccccaccccggcattgncgggctggtntncccgccnccatttcccgttgctttgggtccggnacaatccctttgtggccgccaatccccaatgccaaccactccaatggcaaaggaggtgtcttttagcccctatttatatacttgtgtgtgcatatatcaaaaacgcgcaatgggaattccaaatcatctaaacccatcaaaccccagtgaaccgggcagttaaggtgattccatgtccaagattagctttctccgagtagccagagaaggtgaaattgttcgtaacactattgtaatgattttccagtggggaagaagatgtggacccaaatgatacatagtctacaaaaagaatttgttattctttcttatatttattttatttaaagcttgttagactcacacttatgtaatgttggaacttgttgtcctaaaaagggattggagttttctttttatctaagaatctgaagtttaaaaaaaaaaaaaaaaaaaaaagnnnnnnnnnnnnnnnnnnnnnnnnnnnnnnnnnnnnnnnnnnnnnnnnnnnnnnnnnnnnnnnnnnnnnnnnnnncatt

SEQ ID NO: 86572 - DNA, 704 bp, Arabidopsis thaliana columbia
  unsure (1)..(704): unsure at all n locations
tcctttnacccccaacccccgccnctgggccccaaggattgggtgggcnctagctaaaccagnggaccagccgggggccnctttncggnagcncttntccccttangggtaatccccanntnaacccctttcttgaaagggnctgttgggaggccaaacccggacaccaaccnatcggncattggtctggtctgtccttctcgcctccatcttctcgttgctcggggtcaggatccaatccctttgtggacgccaatcccaatgccaacaacttcaatggcaaaggaggtgtcttttagaccctaatttatatacttgtgtgtgcatatatcacaaacgcgcaatgggaattccaaatcatctaaacccatcaaaccccagtgaaccgggcagttaaggtgattccatgtccaagattagctttctccgagtagccagagaaggtgaaattgttcgtaacactattgtaatgattttccagtggggaagaagatgtggacccaaatgatacatagtctacaaaaagaatttgttattctttcttatatttattttatttaaagcttgttagactcacacttatgtaatgttggaacatgttgtcctaaaaagggattggagttttctttttatctaagaatctggcggccgcgaattcgatatcaagcttatcgataccctcgacatcgagggggggccgtggc

SEQ ID NO: 86573 - DNA, 1171 bp, Arabidopsis thaliana columbia
  unsure (1)..(1171): unsure at all n locations
nnnnnnnnnnnnnnnnnnnnnnnnnnnnnnnnnnnnnnnnnnnnnnnnnnnnnnnnnnnnnnnnnnnnnnnnnnnnnnnnnnnnnnnnnncggccgcaccgacagattcatcatacccgagataagcaactacgcgagtatttggttcattctactcttcatctcaattgctgtgactggaatcctggagctgagatggagcggtgtgagcattgaggattggtggaggaacgagcagttctgggtcattggtggcacatccgcccatctttttgctgtcttccaaggtctacttaaggttcttgctggtatcgacaccaacttcaccgttacatctaaagccacagacgaagatgggatttttgcagaactctacatcttcaaatggacagctcttctcattccaccaaccaccgtcctacttgtgaacctcataggcattgtggctggtgtctcttatgctgtaaacagtggctaccagtcgtggggtccgcttttcgggaagctcttcttcgccttatgggttattgcccatctctaccctttcttgaaaggtctgttgggaagacaaaaccgaacaccaaccatcgtcattgtctggtctgttcttctcgcctccatcttctcgttgctttgggtcaggatcaatccctttgtggacgccaatcccaatgccaacaacttcaatggcaaaggaggtgtcttttagaccctatttatatacttgtgtgtgcatatatcaaaaacgcgcaatgggaattccaaatcatctaaacccatcaaaccccagtgaaccgggcagttaaggtgattccatgtccaagattagctttctccgagtagccagagaaggtgaaattgttcgtaacactattgtaatgattttccagtggggaagaagatgtggacccaaatgatacatagtctacaaaaagaatttgttattctttcttatatttattttatttaaagcttgttagactcacacttatgtaatgttggaacttgttgtcctaaaaagggattggagttttctttttatctggccgtctgaagtttatatgctaaaaaaaaagcggccgnnnnnnnnnnnnnnnnnnnnnnnnnnnnnnnnnnnnnnnnnnnnnnnnnnnnagtgatttcnnnnnnnnnnnnnnnnnnnnnnnnngtt

SEQ ID NO: 86574 - DNA, 1726 bp, Arabidopsis thaliana columbia
caaagctttggactctcaggccaggaagactatgggattgggcggcgatcaatcctttgttcccgtcatggattccggccaagtccgcctcaaggagctcggctacaagcaagagctcaagcgcgatctctcggtcttctccaatttcgccatctccttctccatcatatcggtgctcactggtatcaccaccacctacaacaccggtttaagattcggcggcactgtcactctggtctacggatggttcctggccggctccttcacaatgtgcgttgggttatctatggccgagatctgctcctcttaccctacctccggtggtctctactactggagtgctatgctcgctggccctcgttgggctcctcttgcctcttggatgactggctggttcaacatcgttggtcagtgggcagtgacggccagcgttgacttctctctggcacagttgattcaggtgatcgtccttctctccaccggcggtagaaacggcggcggttataaaggatcagactttgttgtgattggtatccatggtgggatcctcttcatccacgctcttctcaacagcctccccatctccgtcttgtctttcattggacagcttgctgctctttggaatctcctcggggttttggtgctcatgattctgattcctttggtttctacggaaagagcaaccactaagtttgtctttaccaatttcaacactgataatggccttggcatcaccagctacgcttacatattcgttttgggactcctcatgagccagtacaccattacagggtatgatgcctctgcccacatgacagaagagacagtcgacgcagacaagaacgggcccagaggaataatcagtgcaattggtatatcaattctgtttggatggggttatatattgggcataagctatgccgtcacagacataccttctcttctgagtgagaccaacaactctggtgggtatgccattgctgagatcttctacttagctttcaagaataggtttgggagcggtactggtggaatcgtgtgcttaggcgttgttgcggttgctgtgtttttctgtggcatgagctctgtcaccagcaattccaggatggcgtatgcgttttcgagagatggagcgatgccaatgtcgccgttatggcacaaagtgaacagcagagaggtccccattaatgcggtttggctctctgctctcatatcattttgtatggccctcacctcactggggagcatagtggcgttccaagcaatggtgtcgatcgcaacgattggactgtacatagcatacgcaatcccgattatattgagagtgacgcttgcgcgcaacaccttcgtacctggaccattcagcctgggaaaatacggaatggtagtcgggtgggtggcagtcctgtgggttgtaaccatatcagtcctcttctccttacccgtggcatatcccataacagcagagacactcaactacactccggtggcagttgctggtttggtggccataaccctctcatattggcttttcagtgcccgccactggtttacgggtcccatctccaacattcttagctgaaacaacgtttcaggggttgatttatagtaaagccattgttagctagctgatatttacccttttatacattcaacaagcaacaacacatctgtcacatttttatttcatcgccaaaactttaaactttaaaaaaaaaaaaaaaaa

SEQ ID NO: 86575 - DNA, 437 bp, Arabidopsis thaliana columbia
gcagaatggttacgtgggtttatagcagattatggtgttccagtaatggtggtagtgtggacttgtatatcatacataccttggaaaagtgttcctcaagggataccaagacgtcttgttagtcctaatccatggtctcctggtgcatatcagaattggactgtcattaaggagatggtggatgtacctgtgctttacattcttttagcggttgttccagcgtcaatgattgcggttctttactactttgaccatagtgtagcctcgcagctcgcacagcaggaagatttcaatctgagaaagcctcctgcttaccattatgatctgtttcttctaggtttcttgacaatcctttgcggtctcatcggaattcctccatccaatggtgtcatccctcagtctccaatgcacacaaaaagcttggcaacactgaatca

SEQ ID NO: 86576 - DNA, 513 bp, Arabidopsis thaliana columbia
  unsure (1)..(513): unsure at all n locations
ctcaggcaatgagtgaggcaagtccaactcgcccagttacaatacagtggtatataatgaccagtccatttactcatgaaccaacacaaaaattcttcaagagtcacaagtattttggccttgaaccagatcaagtcaccttttttcaacaaggaactctgccttgcatttcaaaggatggcaagtttatcatggagacacctttcagcctatccaaggcgccggatgggaacgggggagtttatacagctttaaaatcttcaaggttattagaagatatggcttcgagggggattaaatatgtggattgctatggtgttgacaatgttctggttcgagtagctgaccctacttttctgggatacttcatcgacaaaagtgcagcttcagctccaaaagtagtgcgaaggcatttccacaggaaaagttgggtattgtaaggnggggaaaggtggccttgctgtggttggtcacaggnttnccgctntgntntcaactatacaacaggcggtc

SEQ ID NO: 86577 - DNA, 616 bp, Arabidopsis thaliana columbia
atcaaactcgtacctaacgagccttatactctttacactgaagatgtttcagctatcaatcttaacactgacctttatggttcgcatccgatgtatatggatctaagaaacgttggaggtaaagcttatgctcatgctgttcttcttttgaatagtaatggtatggatgttttctatagaggtgattctttgacgtataaagttatcggaggtgttttcgatttctatttcatcgccggaccgtcgccgttaaatgttgttgatcagtatactcagttaatcggaagacctgctcctatgccgtactggtctttaggatttcatcaatgtagatggggataccataatctatcagttgttgaagatgtggtggataattacaaaaaggctaagatcccacttgatgtgatttggaacgatgatgatcacatggatggtcacaaagatttcacgttgaatcctgtggcttatcctcgtgctaagctattggcgttcttggacaaaatccacaagattggaatgaagtatattgtgatcaatgatcctggtattggtgtcaacgctagctacggtacatttcagagagccatggctgctgatgtgtttattaagtatg

SEQ ID NO: 86578 - DNA, 759 bp, Arabidopsis thaliana columbia
  unsure (1)..(759): unsure at all n locations
ggccccccctcgaggtcgactgtatcgataagcttgatatcgaattcgcggccgcaagacctgctcctatgccgtactggtctttaggatttcatcaatgtagatggggataccataatctatcagttgttgaagatgtggtggataattacaaaaaggctaagatcccacttgatgtgatttggaacgatgatgatcacatggatggtcacaaagatttcacgttgaatcctgtggcttatcctcgtgctaagctattggcgttcttggacaaaatccacaagattggaatgaagtatattgtgatcaatgatcctggtattggtgtcaacgctagctacggtacatttcagagagccatggctgctgatgtgtttattaagtatgaaggaaagccattcttggctcaagtgtggcctggtccggtttacttccctgatttccttaacccgaagacggtttcttggtggggtgatgaaatcaaacggttccatgatttagtccctattgatggtttatggattgacatgaacgaggtgtcgaacttttgttctggtttatgcacaatccctgaaggaaagcagtgtccaagtggggaaggtcctggttgggtttgttgcttggactgcaagaatataaccaagactagatgggatgatcctccttacaagattaatgctactggtgtcgtagctcctgttgggttcaagactattgctacaagtgctactcattacaatgggtgttcgnggagtacgg

SEQ ID NO: 86579 - DNA, 631 bp, Arabidopsis thaliana columbia
  unsure (1)..(631): unsure at all n locations
ctttttttagtggcagccaaaataatgacaagaatttatattacaaacgcaccggttaggttcagtcacactaatcacataaccattttaaaagcaaaacattcgacacccaaaaggcccaaagcctctatctctagttctctacacaacacaatcctcctaattggttttgttcctgactgtacaaaagcagagctccaagaaaaataaaatttctagagctgcagcctaggttcatgatttgttttacacacacagctaagagaaaaaaaagcttcagtttgttagcccaaaaaatgacatgccggcaattatcagaaaccaacccactgtttctgtaagttccttaaagccgcaccattcccgcagaaaaaggagaaggcgggaccgagttatttcacatttctggtgntcccttcggnaactctttactatcaacaccttttcttcaggaccttcagntctcaaccaaaattcagggagggtttaatatcnccaaggnggncagnttgccaaaggggtggcnccncgggggcatatctgnattttggctggcggggcccccgggtggaactttaggaacgggccaggatcnanggatggcnttccttcccaaatncctcncccgggc

SEQ ID NO: 86580 - DNA, 418 bp, Arabidopsis thaliana columbia
cccacgcgtccgctaggccagtcaattctgggaggagagaggccgccggaggagagagaaaaagagttgggggatagctttttgatttctccttctccatcttcgacctcgagagaagctaaaaatggcagaagaagcggatacgaacatcgagatctggaagattaagaaactaatcaagggacttgaatcagctagaggtaatggaacgagtatgatctctcttattatgcctcctcgtgatcaagtatctcgtgtcacaaagatgcttggtgatgaatatggaactgcttcaaacattaagagtcgagtcaatcgtcaatctgttttgtctgccattacttctgctcaacaaaggttgaagctttacaacaaggttcctactaatggtcttggtctctataccggcaccattgtt

SEQ ID NO: 86581 - DNA, 626 bp, Arabidopsis thaliana columbia
  unsure (1)..(626): unsure at all n locations
angnanctttagancntacctttggcccgancccttncaaacccaagnttcacccacttccnggccaaatccccaaacagcgcgcggggggaaatgttaaggccccctgacccttggaaggcccccctggggagggatttacccaaaccggacttgggtctggcggtctgttgggctgaagtccggcccacccggccggaagatacccggtgggaattaccaccctggatattcnccaaatacccttgggaattccccccattttaggccgagggctgctgctttagccggaggttggcaatattggtatctccagaatatccattccatgctttcctttattccactttggagggtcccgtggtgatttgtgaagatgattttcctcctttcgcccactgagaatccttgcaggtttaatgtgttcacaagctaggctggccagttagtgctatggctttctgacagtgcttgttttgtaagacaatctccaatgtatagctctatatcttactctaaaatagagttgctttctctccaatgtatatttctattttctagtctaaaaaagaatatttttagaaatattctatttctatttatatactaataccttttaattatat

SEQ ID NO: 86582 - DNA, 508 bp, Arabidopsis thaliana columbia
  unsure (1)..(508): unsure at all n locations
ggnccccgccggaatcccngggtnnccccaggncccnggaaaatccgggtttgggcccccgggggcgtacaaaggcccgggaaaggccaaaggtcggatccacggctaggagccgatgccgaaatccaggcatcctaaggtcggaaactgaaccaggaaccagtcaaatctctcacatttttccagctcaaggacgcaatgtccacccgagatccattgtagcccttgtatgcgggtttgttgtttttctacaggtccaattctctgatgcatcagactttggagacaggtcttgaagctaattttgttgagagtttataatagagtgagatcatgtaaagagtagcctctgatgtttttcctacttgttgggttcgaattttcctttatctttgtacacattatacttacgggtttggtgtatacttaggacagaatgccaaaaaacataacaaagaatcttcctttgtgcctctaatcatttaattggtcatttatataaaaaaac

SEQ ID NO: 86583 - DNA, 516 bp, Arabidopsis thaliana columbia
cagctacaatacgactcacattagggagcgcgcccacgcctgcaggtaccggtccggaattcacgggtcgacccacgcgtccggttgatgaacccagacttgcatttaggtgatgacgcaaaagcaaggatggctactatcacaatttctaccattgcagacaaatgtggagattatatacgtacgggctggaggaacatattggactgtatcttacggatacataatcttggacttctgccagctggtgtagcacagtgatgcagctgatgaatcagaacattcatctgagcaagggcatggaaagcccctcgcgaattccctatcctcagctcatctacacgcaatgggaactccgaggagatcttccgcattgatggggaagatttagccagcttctttcactggatacagactagctctagatcaccgcctactggagcaacagcttgcagctcatcgacgaacacttgaaacaattcagaaatgtcgcattgacagcatatttaccgaaag

SEQ ID NO: 86584 - DNA, 4835 bp, Arabidopsis thaliana columbia
ccctcctcgagaatttccgatcgtgctttcctcaaaagcatttctgtttctcgtcgtcggagcccgacgacagatctctgaatcgctggagaaacataatgattgagtttggcctctatctgtgaagggtatatgctccggctgtatctactttatattctgccaggaagattgtgagcattgaagtgccttgggctctggctgaagatttgagcagattaaatgggtcgcctaaagttgcattctggaatcaaggccattgaggaagaacctgaggactttgagtgtactgattcaagtaatacaaccactttagcatgcatgattgatacggaaattgctgctgttttagcggttatgagaagaaatgtaagatggggaggtcgatacatgtctggtgatgatcaactagaacactcgttgattcagtcacttaaagctcttagaaaacaggtgttctcatggaaccagccgtggcatacaattagtcccatgttgtatcttcagccctttcttgatgtgatacggtcagatgaaactggagcaccaataaccagcattgctttgtcatcagtttacaagatcttaaacctgaatgtaattgatcaaaatactgcgaatattgaagacgctatgcacttggtagttgattctgtgacaagctgtcgatttgaggtgacagatcctgcatcagaagaggttgtgctaatgaagatacttcaggttcttctagcatgtatgaaaaataaagcatcagttatgctaagcaatcagcatgtatgcactgtcgtcaacacttgttttcgtgttgtccaccaagcaggaatgaaaggtgagttattgcaacgagtagctcgccacacgatgcatgaattagtgaggtgtatcttctcgcatctcccagatgttgaaagaacagaaactacacttgtcaacagagctggtagcatcaaacaagagaaagctggagtagacagtgattatgccattgtgagtaaaccagtcgaggatggaaatgctaattccgagtatgatgttgaaaattctatggcaacttttgcaactggtgctcaaagtttgatggatgatggaccagttggccctggaagcagaaagccggcttctccatatgatttgcatataatgacagagccatacggagtcccaagtatggtggaaatttttcacttcttgtgctctttgttaaatgtggtcgaacatgttggtatgggatcccgatcaaacaccatagcatttgacgaagatgtgcctctgtttgcgttgaacttgatcaactcagccattgaattgggtggatcgtccatccgccatcacccaagattgttaagcctaattcaagatgagttatttcgtaacttgatgcagttcggattgtcgatgagccccctgattctttcgatggtttgcagcattgtgctcaatttgtatcaacatctacgaactgaactcaagttgcagcttgaggcattcttttcatgtgtgattctaaggcttgctcaaggaaaatatgggccctcgtatcagcagcaagaggttgctatggaggctcttgtgaatttttgtaggcagaagagttttatggttgaaatgtatgccaatctcgattgtgatataacttgcagcaacgtgtttgaggagctgtctaatcttctctcgaagagcacatttcctgtgaactgtcctttgtctgcaatgcacattcttgctctggatggcctaatcgctgttattcagggaatggccgagaggataagtaatggattgactggtttggatttgggtcctgtccatcttgatgagtacacgcctttctggatggttaagtgtgacaactatagtgatccaaatcactgggtttcatttgtccgcaggagaaaatatatcaagagaaggttaatgattggagcagatcattttaacagggatccaaagaaggggttagagtttctccaaggcacacatcttttgcctgacaaactcgatccccaaagtgttgcttgcttttttagatatactgctgggcttgataagaaccttgttggggattttcttggaaatcatgacgaattttgtgttcaagttctcaatgagtttgctgggactttcgatttccagtacatgaatctggatactgcactccgactcttcttggaaaccttcaggttgcctggagaatcccagaaaatacagagagtgcttgaggcgttctctgaaagatactatatgcaatctcctgagattctggccaacaaggatgctgctcttgtgttatcatactctattatcatgcttaacactgatcagcacaacgttcaagtaaagaaaaagatgacagaagaggatttcattcgcaataataggcatatcaatggaggaaatgatctacctcgagaattcttgtctgaactctttcactccatctgcaacaatgagatcaggactactccagaacaaggtgcaggctttcctgaaatgactcccagccgttggattgatttgatgcataaatcaaagaaaactgctccatatattctggctgattcaagggcttatcttgaccatgatatgtttgctatcatgtctggtccaaccattgctgccatatcagtcgtttttgaccatgcagaacatgaagacgtttaccagacatgcatcgatggattcttggctatagctaaaatttctgcctgtcatcatcttgaagatgtgcttgatgatctggttgtctctctctgcaaattcacaactctgttgaatccatcatctgttgatgaacccgttcttgcatttggtgatgacgcaaaagcaaggatggctactatcacaatttttaccattgcaaacaaatatggagattatatacgtacgggttggaggaacatattggactgtatcttacggctacataaacttggacttctgccagctcgtgtagccagtgatgcagctgatgaatcagaacattcatctgagcaagggcaaggaaagcccctcgcgaattccctatcttcagctcatctacagtcaatgggaactccgaggagatcttccggattgatgggaagatttagtcagcttctttcacttgatacagaagagccaagatcacagcctactgagcaacagcttgcagctcatcaacgaacacttcaaacaattcagaaatgtcacattgacagcatatttaccgaaagcaagtttctacaagctgaatctttgttgcagcttgcgcgtgctctcatttgggctgcaggtaggccacagaaaggaaccagttctccagaggatgaggatactgcggttttctgtctggaattgcttattgcaatcactctaaacaacagagacaggatcgttctcctatggcaaggcgtctatgaacatatagctacaattgctcagtcaacggtgatgccctgcaacttagtggataaagctatttttggtctacttcggatctgccagagactacttccttataaagaaagcctagctgatgagcttttgagatctcttcagcttgtgctgaaactggatgcacgtgttgcagatgcctattgtgagcaaattgcaattgaagtcagccgtcttgtgaaagccaatgctaatcacatcaggtctcaggcgggttggagaacaatcacatccttactctccatcacagcgcggcacccagaagcttctgaatcaggatttgatgccgtatcctttgttatgtctgaaggaactcacctgtatccagccaattatgtactctgtgttgatgctgcaagacagtttgctgaatcccgcgtgggacagtccgaacgctctatccgtgcccttgatctaatgggagattcattagaatttttggctaaatgggctctctcagctaaggaaaacatgggagaagaagatttcgggaagatgtcacaagatattggggaaatgtggttaaggcttgttcaaggactaagaaaagtgtgtttagaccagagggaggatgtccgaaaccacgctttacagtcattacagaagtgtttaggcggagtagacggaatcaacctagctcatagcatgtggtctcaatgctttgacaaagtaatcttcacggttttggatgacttacttgagatagctgctgggtcacagaaagactaccgaaacatggaaggcacattgcttctcgcaatcaaacttctctccaaagtgtttcttcagcaactccaagagctatctcagttatcaaccttctgcaagctatggctcggtgttctaactcgaatggagaaatacatgaaagtgaaagtaagaggcaaaaaaagcgacaagctacaagaatcagtaccagagcttctcaaaaacatattgctggtgatgaagacgaaaggcgtgctattgcaaagaagtgctcttggtggagatagcttatgggagctaacatggcttcatgtgaataacattgcaccgtctatgcgactggagctattccctgatcaagaatcctcacaacttggtgatgatgaaaccgtatcgaatggcttatcttctcctgaaaacacaactggttcgtgaccttacaagtgagatcattaggtgagtttctttcgaatatccatataagtactgtgaaagtgaaagcttcttatgtaacacctctctacgtttttttttgtaatatataagtctttctaattcagagactcgtattaattaagcaagtttcttaattacgactttgttaatcacggacctttggaacgaggtagaaggtcttgaacatgtgtggaacccaccaaaggaaaaatatcagtagattcaggagagttgtt

SEQ ID NO: 86585 - DNA, 784 bp, Arabidopsis thaliana columbia
  unsure (1)..(784): unsure at all n locations
cactggtatcgtcttcaaggttagattttctccatacatgaatactggtctatagttttgtaatagcaactgatagacaacgttttgtgatagggatttgatcgaaaagggaagctgcgagctatatgtggtggtgggagatatgataggttactctctacttatggaggtgatgactttcctgcttgtggttttggtttcggcgatgctgtaatagttgaagtaagttaaatttgcttctggtcactattataacccgcagcgaatagttatgtgtctctgaatatctggttcttatttttgccactttcatttagttgctcaaagagaaggatttgttgccagaactgggacaagaagtagagaacatagtgtgtgcgttggacaaagatctccaaggagctgcagccaccgttgcaaccgctctcaaagacaaagggcaaaccgttgatttagtattggagagtaaaccgctgaaatgggtgttcaagagagcggctcgggtaaacgcaagaaggccggttctggttgggaagttggttcggtcagtgtcaaggttttgtcttcaggtgagcaatttcaagtcaaacttaatgacttggagtagtagtatctaaggcttgaacaaattgttcaattgtcctttttttcaaaagcaattgatttgagattggatttttattttgtccgcgaaggtttcaaaaaaaactaacatgatggatcttcaatactccgatttaggtaatnnngnaaaaaaaaaaaaacaacaaaaaagggcggccgc

SEQ ID NO: 86586 - DNA, 515 bp, Arabidopsis thaliana columbia
catacgactcactttagggaaagctgctacgcctgcaggtaccggtccggaattcccgggtcgacccacgcgtccgcccacgcgtccggctgaagaagcaaacaacaatagaaaagagatgcgagcaattcacatcgtgacgacgcgattgagctccagctttattaggcctgttcttcttgacttcgtttcttgttcgcctctacgccagttctctacccctaggcgctttatctgtgccgcgagcaaggtcaatggaggaggcaggtcaggttcgattgttgctccattggtagtgaatgaagaatttcagaacatcgatgtcaatcctcctaaaggaactcgtgatttccctcctgaggatatgcgactccgcaactggctcttcaaccacttcaaagaggtctcacggttatttgggtatgaggaagtggattttccagtactggagacggaggcattgttcatcagaaaagctggggaggagattagagaccaagtttgtctttctacgt

SEQ ID NO: 86587 - DNA, 566 bp, Arabidopsis thaliana columbia
  unsure (1)..(566): unsure at all n locations
aacctggtccccctccaggtcccggcccggatncccggtcgnccccacgcgtccgcgatgcagtaattgttgatttgctcaaggagaaggatttgttgccagaattgggacaagaagtagagaacatcgtgtgtgctttggacaaagatctccaaggagctgcaaccaccattgcaaccgctcttaaagacaaagggcaaaccgttgatttagtattggagagtaaaccgctgaaatgggtgttcaagagagcggctcgggtaaacgcaagaaggccggttctggttgggaagttggttcggtcagtgtcaaggttttgtcttcaggtgagcaatttcaagtcaaacttaatgacttggagtagtagtatctaaggcttgaacaaattgttcaattgtcctttttttcaaaagcaattgatttgagattggatttttattttgtcctcaaaggtttcattaagaattttattgatggatcttcaatactcaaaaaaaaaaaaaaaacaaagggcggccgctctagaggatccaagcttacgtacgcgtgcatgcgacgtcatagtt

SEQ ID NO: 86588 - DNA, 1575 bp, Arabidopsis thaliana columbia
cccacgcgtccgcccacgcgtccggcagaaagagagatgcgagcgattcatatcgtgacgacgcgattgagctcgagctttagacctattcttcttcttgacttggtttcttcttgttcgcctcctcgacagttctctatccctaggcgcctaatctgtgccgccgccaatggaggaggcaggtcaggttccattgttgctcctttggtgactgaagaagactttcacaagaagatcgatgtcaatcctcctaaaggaactcgtgattttcctcctgaggatatgcgtctccgcaattggctctttaaccacttcaaagaggtctcacggttatatgggtatgaggaagtggattatccagtactggagacggaggcattgttcatcagaaaagctggggaagagattagagaccaactttactgctttgaagatagaggaaatcggcgtgtagcattgaggcctgagcttacaccttctttagccaggcttgtcatacagaaaggaaaatctgtttcccttccattgaagtggtttgcaattgggcagtgttggcgatatgagagaatgacaagaggaaggcgacgtgagcattaccaatggaatatggatattattggtgtgcctcaagtaactgctgaagcagaactaatttcatctatagtcaccttcttcaagcgaattggaatcactgcgtcagatgtgggttttaaggtttcaagccgcaaggttttacaagaattgctaaaaaagtatggtgtacccgaagacctgtttggaagagtttgtatcattatagacaagatagaaaagataccaattgatgaaataaaaaaggaacttgggttcacggggatatcagaagatgctattgaacaattactgcaagtgctttctgtgaagtccttggatgatttggaagatataattggtggagcaggagaagccattgcagatttgaaacaactcttctcacttgctgaaaagtttggttattcagagtggatacagtttgatgcatctgttgtgcgcggtcttgcttattacactggtatcgtcttcgagggatttgatcgaaaagggaagctgcgagctatatgtggtggtgggagatatgataggttactctctacttatggaggtgatgactttcctgcttgtggttttggtttcggcgatgctgtaatagttgaattgctcaaagagaaggatttgttgccagaactgggacaagaagtagagaacatagtgtgtgcgttggacaaagatctccaaggagctgcagccacagttgcaacagctctcagagacaaaggccaaaccgttgatttggtattagagagtaaaccgctgaaatgggtgttcaagagagcagctcgggtaaacgcaagaaggctggttctggttgggaaaacagagtgggaagatggttcggtcagtgttaaggtgttgtcttcaggtgagcagttccaagtcaaactcagtgacttagagtagtatcttaaggctttattaacatgatgaaccattgtttcattctcttacggcttactatagtaaaagaaccaatcattc

SEQ ID NO: 86589 - DNA, 1172 bp, Arabidopsis thaliana columbia
  unsure (1)..(1172): unsure at all n locations
gggtatgccattcaaggatctggcaactgttgattcaatcttattaaagagagctaccgcctgtagatgatcaagtggctcgtttggctctaaaacggttgattgatgtcagtatgggagttatagcacctttatcagagcaactaacaaagccattgcccaatgccatggttcttgtcaacctcaaggaactatctggtggcgcttacaagcttctccctgaaggtacacgcttggttgtctctctacgaggcgatgagccttacgaggagcttgaaatactcaacaacattgatgctacgatgattctccatgatgtacctttcactgaagacaaagttagcagagtacatgcagctcggaggctattcgagttcttatccgagaattcagttaactttcctgttattcatcacataaacttcccaaccggaatccacagagacgaattggtgattcatgcagggacatatgctggaggccttcttgtggatggactacgtgatggcgtaatgctcgaagcacctgaccaagattttgattttcttaggaatacttccttcaacttattacaaggatgcagaatgcgtaacactaagacggaatatgtatcgtgcccgtcttgtggaagaacgcttttcgacttgcaagaaatcagcgccgagatccgagaaaagacttcccatttacctggcgtttcgatcgcaatcatgggatgcattgtgaatggaccaggagaaatggcagatgctgatttcggatatgtaggtggttctcccggaaaaatcgacctttatgtcggaaagacggtggtgaagcgtgggatagctatgacggaggcaacagatgctctgatcggtctgatcaaagaacatggtcgttgggtcgacccgcccgtggccgatgagtagatttcaaaacggagaaagatgggtgggccattctttgaaaactgtgagaggagatatatatatttgtgtgtgtatatcatctgtttgttgtgtattgcatcattcattttggacaaatgtccaaattctcttaagttgataaaagttcttaggccaaattaaatttaatataaaaaaaaaaaaaaaaaggcnnnnnnnnnnnnnnnnnnnnnnnnnnnnnnnnnnnnnnnnnnnnnnnnnnnnnnnnnnnnnnnnnnnnnn

SEQ ID NO: 86590 - DNA, 647 bp, Arabidopsis thaliana columbia
  unsure (1)..(647): unsure at all n locations
aangcccttttgnngccaggntgcgaatncggacccntccnantttgatttctaggaaaccccccncactttttccagggtccagatccgtacactaagacggaatatgtatcgtgcccgtcttgtggaagaacgcttttcgacttgcaagaaatcagcgccgagatccgagaaaagacttcccatttacctggcgtttcgatcgcaatcatgggatgcattgtgaatggaccaggagaaatggcagatgctgatttcggatatgtaggtggttctcccggaaaaatcgacctttatgtcggaaagacggtggtgaagcgtgggatagctatgacggaggcaacagatgctctgatcggtctgatcaaagaacatggtcgttgggtcgacccgcccgtggctgatgagtagatttcaaaacggagaaagatgggtgggccattctttgaaaactgtgagagaagatatatatatttgtgtgtgtatatcatctgtttgttgtgtattgcatcatcattttgaacaaatgtccaaatctcttaagttgataaaaattattaaagcgtacgtacgcgtgcatgcgacgtcaagactcttctatagtggtacctannnnnnnnnnnnnnnnnnnnnnnnnnnnnnnnnnn

SEQ ID NO: 86591 - DNA, 466 bp, Arabidopsis thaliana columbia
  unsure (1)..(466): unsure at all n locations
ctctctctcatcttttatttttcttttagaaaccaaacttttcagatttctctctctccatttggcgatagaagaagtcatgtaccaatcatcatcctccacgtcatcatcatcgcagagatcatcgcttcccggcggcggaggactgatccgttacggctcagctccgggatcgtttctaaactctgtggttgacgaagtcatcggaggaggctcatcaaacgctcgtgacttcaccggctatcaaccgtcgtcggataacttcatcggtaactttttcaccggagctgctgactcatcctcgctgagatccgattcgacgacttgtggagtcaacaactcatccgacggacagaaacagctaggcaataacaataataataatagtaataaagatatcttcctcgacagatcctacggtggattcaacgagatctcgcaacaacacangagcaacgacatcgga

SEQ ID NO: 86592 - DNA, 578 bp, Arabidopsis thaliana columbia
  unsure (1)..(578): unsure at all n locations
nnnnnnnnnnnnnnnnnnnnnnnnnnnnnnnnnnnnnnnnnnnnnnnnnnnnnnnnnnnnnnnnnnnnnnnccacgcgtgcgcttaattccttgattaagaaaccccagaaaaaccctaaacccttgaagcgtctccttctctagttctttgcaagcggaaatgtatcgagtgctatcaaagttatcttcttcaattggctcgtctacttccaggaaactggtttctgggcggattataagtagcagaaactatgcggccaaggatatcagtttcgggatcggagctcgggcagctatgttgcagggtgtatccgaggttgcagaagctgtgaaagtcactatgggaccaaagggaagaaatgtgataattgagagcagttatggcggaccaaagatcacaaaggatggtgtcaccgtggcaaaaagcatattcatttcaagctaaagctaagaacattggtgccgaactcgtcaaacaggttgcaagtgccactaacaaggttgctggagatggtaccactgtgccactgttttgactcaggcgatactcatcgaaggctgcaagtccggggctgca

SEQ ID NO: 86593 - DNA, 423 bp, Arabidopsis thaliana columbia
cggacgcgtgggttcgccttcaagcttcttcacaaatccataagtcagtcggagaataaagaggaaaggtctgataaacacggaagctgcaagagaatttatcaatcatctagttgctgagaggcattcgctgttgttgctggttcctttggtcttagctttctgggcaattgaaagatgggtctttgctttctccaattgggttcctctcgttgtcgccgtctgggcttctcttcagtatggaagttaccaaagggcactacttgcagaagatctaaccaagaagtggaggcaaaccgttttcaatgcgtcgacggtaactcccattgggacattgtccaatggctgaacaagttactgtcttgaaattttggctaaactatatggaccaggaactctctcttagggtttcttctatggtgg

SEQ ID NO: 86594 - DNA, 1235 bp, Arabidopsis thaliana columbia
gatacataaatcttcaacacaactctttaattatctagtttaatacaaatggcggcgatagaggacagtccaacgttttcctctgtggtaactccggcggcttttgagataggcagcctcccgacaaccgagataccggtggatccggtggaaaatgattcaacagcaccgccaaaaccggtgagaatcacctgtccaacagtcgccggaacttatcccgtcgttttattcttccatggcttttatcttcgcaactacttctactctgacgttcttaaccacatcgcttcgcatggttacattcttgtagccccacagttgtgcaaattattgccgccgggagggcaagtggaagtggacgatgctggaagtgtgataaactgggcatcggaaaacctcaaagctcacctaccaacttcggtaaatgctaatggaaaatacacctcactcgtgggccacagccgcggtgggaaaacggcgtttgcggttgcgctaggccatgccgcaacattagacccatccatcacgttttcagctctaataggaattgatccagtcgcaggaactaacaaatacattagaaccgatccgcatatcttaacgtataaaccggaatctttcgagctggacataccggttgcagtggtgggaaccggactcggaccgaagtggaacaacgtgatgccaccatgcgcaccaacggacttaaaccatgaggagttttacaaagagtgtaaggcgacgaaagcccatttcgtggctgcggattacggacatatggatatgttggacgatgatttgcccggttttgttgggtttatggccggttgtatgtgtaagaatgggcaaagaaaaaagtctgagatgaggagctttgtaggtggaattgtggttgcgtttctcaagtatagtttgtggggtgaaaaagcggagattcgattgattgtgaaggatccttccgtttctccggccaagcttgatccttcacctgagttggaagaagcttctggtatcttcgtctagatttgtgttatgtactattatcagaggggtcttgaatatttgaaaaacctatcaatgttttctagctccaagctagctattgttcatgtcctaagttgcatgtgtatttttattaaactcgatcaaaacatttgttatagttttaccccaaaaaaaaaaaaaaaacgcccgctctagaggatccaagcttacgtacgcgtgcatgcgacgtc

SEQ ID NO: 86595 - DNA, 426 bp, Arabidopsis thaliana columbia
gttgttttttttgaatatattgacgattcgttggcctccgagatctaaggcatctctcacaatcaacggtccagattccatctagaagatatattacaccgaccttgttttctctatctaattctcacacacacaccaacgcaaacctccaaaacagggccggggcgattcattcacaatctcggcgattctctcttccgtctcgagtcgctgagatccatcagtaaaaggtctgcaaaatggttgctcagggattcactgtggatcttaaaaagccccttgtatttcaggttggtcatcttggagaagattatgaggaatgggttcaccaacctatcgcgaccaaggaaggccctcggtttttcctgagtgactttttatgaggtatttactatctctcaattctttactttttttcatcctact

SEQ ID NO: 86596 - DNA, 1122 bp, Arabidopsis thaliana columbia
  unsure (1)..(1122): unsure at all n locations
gctctctacgactcactatatnggaaagctggcacgcctgcaggtaccggtccggaattcccgggtcaccaacgcaaacctccaaaacagggccggggcgattcattcacaatctcggcgattctctcttccgtctcgagtcgctgagatccatcagtaaaaggtctgcaaaatggttgctcagggattcactgtggatcttaaaaagccccttgtatttcaggttggtcatcttggagaagattatgaggaatgggttcaccaacctatcgcgaccaaggaaggccctcggttttttcagagtgacttttgggagttcttgacacttacagtttggtgggcagttcctgtcatttggttgccagttgtagtctggtgcatatcaaggtcagtaagtatgggatgttcactttccagaaatcgtcccaattgttgtcatgggaatattcatctggacattttttgaatacgttcttcaccggttcgttttccacataaaaacgaagagttactgggggaaacactgcacactatcttattcacggatgccatcataagcacccgatggaccaccttcggctcgtctttcctcctactgcaacagcgattttatgctttccgttctggaacattgcgaaggctatctcaactccttcaaccgcacctgcattgtttggtggaggcatgctcggatatgtgatgtacgatgtcactcattattaccttcaccatgcccaacctactagaccagtgaccaaaaatctcaagaagtaccatttgaatcatcacttcaggattcaggacaaaggatttggtataacttcgtcgttatgggacatagtctttgggacacttcccaccacaaaagcccccagaaaagagcaatagtagtaaaaggcaaaaactaaaaagatgtttgtaatacatttaatttaatcttaagttattaatcatccttctgaattttgagatgtttaatctgaggtttcatttggatccctgtcttttgtagtttgtaaatcaatacttcccaatcctaatataatatttttctgcaaagccctaaaaaatctactnnnnnnnnnnnnnnnnnnnnnnnnnnnnnnnnnnnnnnnnnnnnnn

SEQ ID NO: 86597 - DNA, 647 bp, Arabidopsis thaliana columbia
  unsure (1)..(647): unsure at all n locations
nnnnnnnnnnnnnnnnnnnnnnnnnnnnnnncttctctgaatcgctgccgcttcaacgatagactaaaagaatccaaacctcagtagccatggaaggcgaagagaagaatgattatagaaacgaggaagaagatttcaatacaccacaacaactacaaaagaagcaaaggaaagggaaaaaaatagcaacggaaacagaggatgaaaacgaagaagacaagagagttactctcaaagtcacgcaagtcgccgagagacccgatagaatctctccgatcgtcgcctatttctctacaggatacgatccttgtaaagtagatccaaaaacaggcaagagagttcatgaaactcccaaggttactgtttacaagcataaggatgattctaagaagaggattcaggttgttgtaagtcctccaggcgcaagagttgagttcgtcggaactaattacacaggcgagcaagctgctatgcagacgaatacttatagagttggtggttttaatagagaggctaaaactntgaggattcttcctgttgctcacaataagataatcagattggagcctagagttaaagctcaagaaacatatgaggaagatgcttcaggaagtgctgtcgcaaagaacttgaagactaaaacagga

SEQ ID NO: 86598 - DNA, 1799 bp, Arabidopsis thaliana columbia
gtcgacccacgcgtccgctcatctctcatcgttccgggagaagagaagagagacccatccctcacttcaaagttcaaagtctcgaaggatcttctccaactctctctaaacaagattccaaattttcaaaggtgaatttgtttgatagaatcaagaacaaacctttaaaatggcgcatctactttcagcttcatgcccttcagttatctcacttagcagcagcagcagcaagaattcagttaagccgtttgtttcagggcagaccttcttcaatgctcagcttctttcaagatcttctctcaaaggacttctcttccaagagaagaaaccgagaaaaagctgcgttttcagagcaactgctgtacctataacccaacaagcaccacccgaaacatctaccaataactcatcctctaaaccaaagcgtgttatggtcattggtggagatggttattgcggttgggctactgctctccacttgtccaagaagaattacgaagtttgcattgttgacaaccttgtaagacgtcttttcgaccaccagcttggacttgagtcattgactcctattgcctccattcatgaccgaatcagccgatggaaggctttgacagggaaatcaattgagttgtacgttggtgatatctgtgatttcgaattcttagctgagtctttcaagtcttttgagccggattcagttgtccactttggggaacagagatccgctccttactcgatgattgaccggtccagagcagtttatacacagcacaacaatgtgattgggactctcaacgttctctttgctataaaagagtttggagaggagtgtcatcttgtaaaacttgggacgatgggtgagtatggaactccaaatattgacatcgaggaaggttatataaccataacccacaacggtagaactgacactttgccataccccaagcaagctagctccttttatcatcttagcaaagttcatgattcgcacaacattgcttttacttgcaaggcttggggtattagagccactgatctcaaccaaggagttgtttatggagtgaagactgatgagacagagatgcatgaggaactccgtaaccgactggattacgatgctgtgtttggtacagcacttaaccggttctgtgtgcaagctgctgttggtcacccacttacagtttatggtaaaggtggtcagacgagaggctacctcgatataagagacacggttcaatgtgttgagatcgctatagcaaacccggcaaaagctggtgagttccgggtcttcaaccaatttacagaacagttttcagtcaatgaactggcttcactcgtcactaaagcgggttcaaagcttgggctagacgtgaaaaagatgacggtgcctaacccgagagtggaggcagaagaacattactacaacgcaaagcacactaagctgatggaacttggacttgagcctcactatctatctgactcacttcttgattcgttgctcaactttgctgttcagtttaaagatcgtgtggacacgaaacaaatcatgcctagtgtttcctggaagaagattggcgtcaagactaagtccatgaccacataaagtgcagaccaatattacacataaggagagattatgaaagagatgatgtgttgtttggtatcttcaaacttcatttctgcaaaagacttgctaggcttaagaggttttgtccatattacattgtgcaggttctttaatgttagatcttaatttcgatgaaaaaaaaaaaaaaaaaaaaaaaaaaaagggcggccgc

SEQ ID NO: 86599 - DNA, 4370 bp, Arabidopsis thaliana columbia
gcgtccggaagaaaaagctgttcctgtgctttagcagaccttttggtagttgtcctggtcgctgatcatccctttccgacaactctgttgctctttctctcacgtttgagtcttaatcttcgattgtccttggtcatccttaagttttgtttttctctttcgattcattttccagatttctttttatagaaacccgtctctttgatttgattccccccaagaaaggaaagcaaaacaaagaagagcagctgaatcaagtaactttgtgggtgtttttgaattatctgactcgagataaagagcttcgttaaaaacggaatcttttttaaggtcgtatgctttgtttgtctctccggagattccgcgtgtgaaaagtcgtggtttttgatctctttgagatacttaaaatttccgagaaattggcggctctgtcggagataaaaagctgagatcttggagttccccatttctgattaacgattctctctgctgttacttgagctaggaagctattaacaacttgagtgaaagtttagggcttttgatgaagctctcacgcaaagagcttagctttgtataagctcagattcagattatttattgggtttattcttcagagaaagtaaagttgagtgatcatgaaagctccttcatcaaatggagtttctcctaatcctgttgaaggagaaaggagaaatataaactcagagctatggcacgcttgtgctgggccattgatttcgttgcctccagcaggaagtcttgttgtttacttccctcaaggtcacagtgagcaagtcgcggcttcaatgcagaagcagactgatttcataccaagttacccgaatcttccttccaagctcatatgcatgctccacaatgttacactgaatgctgatcctgagacggatgaggtctatgcgcagatgactcttcagccagtaaacaaatatgacagagatgcattgcttgcttctgacatgggtcttaagctaaacagacaacctaatgaatttttctgcaaaaccctcacggcgagtgacacaagtactcacggtggattttctgtaccccgacgagctgctgagaaaatctttcctgctctggatttctcgatgcaaccaccttgtcaggagcttgttgctaaggatattcatgacaacacatggactttcagacatatttatcgaggtcaaccaaaaaggcacttgctaactacaggctggagtgtgtttgtcagcacgaaaaggctctttgctggagactctgttctttttataagagatggaaaggcgcaacttctgttggggataagacgtgcaaatagacaacagcctgcactttcttcatctgtaatatcaagtgatagcatgcacatcggagttcttgcagctgcagctcatgctaatgctaataacagtcctttcaccattttctacaacccgaggtgggctgctcctgctgagtttgtggttcctttagccaagtataccaaagcgatgtacgctcaagtttccctcggtatgcggtttagaatgatatttgagactgaagaatgtggagttcgtcggtatatgggtacagttaccggtatcagtgatcttgatccagtgagatgggaaaactctcagtggcggaatcttcagattggatgggatgagtcagctgctggtgataggcccagtcgagtttcagtttgggacattgaaccggttttaactcctttctacatatgtcctcctccatttttccgacctcgcttttctggacaacctggaatgccagatgatgagactgacatggagtctgcactgaagagagcaatgccatggcttgataatagcttagagatgaaagacccttcgagtactatctttcctggtctgagtttagttcagtggatgaatatgcagcagcagaacggccagctaccctctgctgctgcacagccaggtttcttcccatcaatgctttcgccaaccgcggcgctgcacaacaatcttggcggcactgatgatccctccaagttactgagctttcagacgccgcacggggggatttcctcctcaaatctccaatttaacaaacagaatcagcaagccccaatgtctcagttgcctcagccaccaactacgttgtcccaacaacagcagctgcagcaattgttgcactcctctttgaaccatcaacaacagcaatcgcagtctcaacaacagcaacaacaacaacagttgctgcagcagcaacaacaattgcagtctcaacaacacagcaacaacaatcaatcgcagtctcagcaacaacaacaattgctccagcagcaacaacaacaacaactgcagcaacaacatcaacaaccgttacagcaacagactcagcagcagcagctaagaacacagccattgcaatctcactcgcatccacagccacaacagttacaacaacataagttgcagcaacttcaggttccacagaatcagctttacaatggtcaacaagcagcgcagcagcatcaggcgcaacaagcatctacacatcatttgcaaccacatttagtttcgggatcaatggcaagcagtgtcatcacgcctccgtccagctcccttaatcaaagctttcaacagcaacaacaacagtctaagcaacttcaacaagcacatcaccatttaggtgctagcactagccagagtagtgtaattgaaaccagcaagtcttcatccaatctgatgtccgcaccgccgcaagagacacagttttcacgacaagtagaacagcagcagcctcctggtctcaacgggcagaatcagcaaacacttttgcagcagaaagctcaccaggcacaggcccaacagatattccagcagagtctcttggaacagccgcatatacagtttcagctgttacagagattacaacagcaacagcagcagcaatttctttcgccgcagtctcagttaccacaccatcaattgcaaagccagcagttgcaacagctgcctactctctctcaaggtcatcagtttccgtcatcttgcactaacaatggcttatcgacgttgcaaccacctcaaatgctggtgagccgacctcaggaaaaacaaaacccaccggttgggggaggggtcaaagcttattcaggcatcacagatggaggagatgcaccttcctcttcaacgtcgccttccaccaacaactgtcagatctcttcttcaggctttctcaacagaagccaaagcgggccagcgatcttgatacctgatgcagcgattgatatgtctggtaatcttgttcaggatctttacagcaaatccgatatgcggctaaaacaagaactcgtgggtcagcaaaagtccaaagctagtttaacagatcatcaactagaagcatctgcctctggaacttcttacggtttagatggaggcgaaaacaacagacaacaaaatttcttggctccaacttttggccttgacggtgattccaggaacagcttgctcggtggagctaatgttgataatggctttgtgcctgacacgctactctcgaggggatatgactcccagaaagatcttcagaacatgctttcaaactatggaggagtgacaaatgacattggtacagagatgtctacttcagctgtaagaactcaatcttttggtgtccccaatgtgcccgccatttcgaacgatctagctgtcaacgatgctggagttcttggtggtggattgtggccagctcagactcagcgaatgcgaacttatacaaaggtgcaaaaacgaggctcagtggggagatcaatagacgtcaaccgttacagaggttacgatgagctgaggcatgatctagcgcgcatgtttgggatcgaaggacagctcgaagatcctcaaacatctgactggaaacttgtttatgtcgatcatgaaaatgacatcctcctcgtcggcgatgatccatgggaagaattcgtaaactgtgttcagagcattaagatcctttcatcagctgaggttcagcagatgagcttagacgggaactttgccggtgtaccagttactaatcaagcttgtagtggcggtgacagtggcaatgcttggagaggtcattatgatgataactcagccacttcgtttaaccggtgatggcagaagagttctctcacagacaaagattcttttttcttcgttttgtaatataacttctcgttgataacatgtctcaagtttccactgggcactgtagagcatttacctgtaaaatatcttccactaagtttacacggagattttatttgctgtgagtcactgtttctaccaagtttaactgatcaactgaaaccgcttgtaaccaaaaagagaaggaaaaacatgaaatca

SEQ ID NO: 86600 - DNA, 374 bp, Arabidopsis thaliana columbia
gtctcgttctcttctctttaccgccgtcatctaggtctgctaatatcaagtgaaggagctcgaaatggccacagttccaggacagttgatctgggagatcgtgaagagaaacaactgtttcttggtgaagcaattcggtagaggtaatgccaaggttcagttcagcaaagagagcaacaacctcgtcaacatcaactcgtacaagcactctggtttggccaacaaaaagacagtgaccattcaggcggctggcaaggaccaaggtgttgttctcggtaccaccaatgactatgagacaaaacatgcctatgctctctgttaacaagtctatcctcaataatgagttctcgttgtttattaatgtttttgttata

SEQ ID NO: 86601 - DNA, 715 bp, Arabidopsis thaliana columbia
  unsure (1)..(715): unsure at all n locations
aggtctcnnnnnnnnnnnnnnnnnnnnnnnnnnnnnnnnnnnnnnnnnnnnnnnnnnnnnnnnnnnnnnnccacgcgtgcgattgcggctcagcaaaagttacctaaggaagcagaaactgcagtaaatggtgatgttgaacttggatgttccccgtcttttcgggatcccgagaagcagatatatggatgcgagcattacaagcgtaactgcaagcttcgagctgcttgttgtgatcagttgttcacttgtaggttttgccatgacaaagtaagcgaccactccatggatagaaaattggtgacggaaatgctctgtatgcggtgcctcaaggtgcaacctgttggtcccatctgcacaacaccttcatgcgacggattcccaatggcaaagcactattgcagtatttgcaaactttttgatgatgaaagggccgtttaccactgtccattctgcaacctttgccgggtcggggaaggactaggaatcgattttttccattgcatgacatgtaactgttgcctagggatgaaattagtaaaccacaagtgcctcgagaagagcctcgagacaaattgccccatctgctgcgaatttcttttcacatcgagtgaagcagttagagccttaccatgtggtcactacatgcactcagcttgcttccaggtttgcaaatctctctttctctcattaaacttaaattaacttttaacgc

SEQ ID NO: 86602 - DNA, 938 bp, Arabidopsis thaliana columbia
  unsure (1)..(938): unsure at all n locations
ctttcttctcaatttagaacttagtagctagtcttcaagataatggcacttgaaactcttacttctccaagattatcttctccgatgccgactctgtttcaagattcagcactagggtttcatggaagcaaaggcaaacgatctaagcgatcaagatctgaattcgaccgtcagagtctcacggaggatgaatatatcgctttatgtctcatgcttcttgctcgcgacggagatagaaaccgtgaccttgacctgccttcttcttcgtcttcacctcctctgcttcctcctcttcctactccgatctacaagtgtagcgtctgtgacaaggcgttttcgtcttaccaggctcttggtggacacaaggcaagtcaccggaaaagcttttcgcttactcaatctgccggaggagatgagctgtcgacatcgtcggcgataaccacgtctggtatatccggtggcgggggaggaagtgtgaagtcgcacgtttgctctatctgtcataaatcgttcgccaccggtcaagctctcggcggccacaaacggtgccactacgaaggaaagaacggaggcggtgtgagtagtagcgtgtcgaattctgaagatgtggggtctacaagccacgtcagcagtggccaccgtgggtttgacctcaacataccgccgataccggaattctcgatggtcaacggagacgaagaggtgatgagtcctatgccggcgaagaaactccggtttgacttcccggagaaaccctaaacataaacctaggaaaaactttacagaattcattttataggaaattgttttactgtatatacaaatatcgattttgattgatgttcttcttcactgaaaaattatgattctttgttgtataattgatgtttctgaaaaagatataactttttattnnnnnnnnnnnnnnnnnnnnnnnn

SEQ ID NO: 86603 - DNA, 484 bp, Arabidopsis thaliana columbia
agaaaactaacacaagtagataaatataaagaaaaatgcttgataagcttattattggggttgccggagggattaccggagggattcttggaacggtcgatgggtttgccaaaggggtcgggatatggcccaataattatcagagcaccggtcgcttcgagaacaacaatatgacgagtccgggaaactacggcaatggtaatggcggtgcagtgaaggcatccgagaactccggcggccgccgccagaaagacagggagtaaaggactcctgaccacacccagtaatgattatgtatccaaaataataaatgtatacgatgtatgtataagatggacatgtttcagtatcttaccaaaaatataggagacttttaatgaaaagtcttcttgtttaattttatgaactttatgattaataaaaggagtgtgtttaataaaaaaaaaaaaaaaaaaaaaaaaaaaaaaaggcggccgctcgaatt

SEQ ID NO: 86604 - DNA, 360 bp, Arabidopsis thaliana columbia
  unsure (1)..(360): unsure at all n locations
agactttaaaatgtctctctatcactctcttagcatttncctcctcctatctctctgccatggctctnacagtcttcaaccacgtcgagttcctcatctagacgggattctcccaaatggaaacttcgagataacccctctnaaatnaaacatgaagggtcgacaaataatcggggctaactctcttcctcattgggaaatcgccgggcacgtggagctagtctccggtggacctcagcctggaggattctatttccccgttccacgggggagtccacgcggttagactcgggaactttgggccaccatcttnttaagaaccgtgaagggttgaagagttgttttggacttacntctnnt

SEQ ID NO: 86605 - DNA, 753 bp, Arabidopsis thaliana columbia
cccccccttggtcgattgtatcgataagcttgatatcgaattcgcggccgccttcttcctctagacatgaatttcaaccatttcctcttctcacccatggccatacggtttctggagagattcgcacgcctgatacacaatctgtgcgaactacatcaggtcctttgggtccttctgacaggaatgctatttcatctccatatattgatccacggcaacctgtccctgtaagaatcgtggacccgtcaaaagacttgaactcttatgggcttggtaatgttgactggaaagaaagagttgaaggctggaagctgaagcaggagaaaaatatgttacagatgactggtaaataccatgaagggaaaggaggagaaattgaagggactggttccaatggcgaagaactccaaatggctgatgatacacgtcttcctatgagtcgtgtggtgcctatcccatcttctcgcctaaccccttatcgggttgtgattattctccggcttatcatcttgtgtttcttcttgcaatatcgtacaactcaccctgtgaaaaatgcatatcctttgtggttgacctcggttatctgtgagatctggtttgcattttcttggcttcttgatcagcttcccaaatggtaccccattaacagggagacttatcttgtccgtctcgctataagatatgaccgagacggtgaaccctcacagctcgttcctgttgatgtgtttgttagcacagtggacccattgaaag

SEQ ID NO: 86606 - DNA, 875 bp, Arabidopsis thaliana columbia
ttaggacacactatagaagatctatgacgtcgcatgcacgcgtacgtaagctcggaattcggctcgagaacagacagcagaggaagaacagttgacttcaaaaacacacttctcatcatgacatcaaacgtcggaagcagcgtgattgagaaaggaggaagacgtatcggattcgacttagactacgacgagaaagacagcagttacaacagaatcaagagccttgtaacagaggagctgaaacaatacttcagacccgagttcctaaacaggctagacgagatgattgtgttcagacagctaacaaagctggaagtgaaagaaattgctgacatactgttgaaggaagtgttcgagaggttgaagaagaaagagattgagcttcaggtgaccgaaagattcaaagagagagtagtacacgaaggttataacccgagctatggagccaagacccgttgagaagagccatcatgaggcttttagaggatagtatggcagagaagatgcttgcgagagagatcaaagaaggagactcggtgattgtggcgtttacgctgaaggtaacgtcacggtgctaaatggtggaagtggcactccaactacttccttggaggagcaggaagattctctccctgttgcttaaataaaaaaagcaaagtgcgtgcgtttctctcttcttttgctttggcccttaaatgaattatggcaagagaaggttatgaattgagatacatgggggctttcttaatatacattttctaaatatatgaaaaatgtaatgtataaaaaaaaaaaaaaaaaaaaaaaaagggcggccgctctagaggatccaagcttacgtacgcgtgcatgcgacgtcatagtaaatctatagg

SEQ ID NO: 86607 - DNA, 3173 bp, Arabidopsis thaliana columbia
gggtccacccaaacgtccgcacacgcgtccgaaaataagcacacaccattatccatctgttttttttttcatctctctctctctcttttcttcttcgattcgtgttttctccatttcattctctgttacgcttcaatcgaactcggaagtcatggctatggccacaagggtgttggctcaatcgactccaccgtctttagcttgttaccagaggaatgttccttcacgtggatctggaagatcgagaagatcggtgaaaatgatgtgtatcatttttaatgtctggttaccaatgcaagggtttatgggattacgtggtaacaatgctttagacactcttggaaaaagtcgtcaagattttcattcgaaggtgcgacaggcaatgaatgtgcccaaggggaaagctagccggtttacggtgaaagcaatgtttgaaagatttacggagaaagctatcaaagttattatgcttgctcaggaggaagctagaagactaggccacaattttgtgggaaccgaacaaattcttcttggtcttattggtgagggtactggaatcgctgctaaagttttgaaatccatggggattaacttaaaagatgcacgtgtggaggttgaaaaaattattggaaggggaagtggctttgttgctgttgaaatcccattcactcctcgtgccaagcgtgttcttgaactctctcttgaggcaactcgccaacttggtcacaattacattggatccgagcaccttttgcttgggttgctacgtgaaggtgaaggagttgcagctcgagtccttgaaaatttaggtgcagatcctagtaatattcgcactcaggtgatacgcatggtgggtgaaaacaatgaagtaactgctaatgttgggggaggaagcagcagcaataagatgccaactcttgaagagtacggaacaaacttgacgaaactggctgaggagggtaaattggacccagttgttggaaggcagccgcagatagaacgtgtggtgcaaattcttggcaggagaaccaagaacaacccttgtcttattggagaacctggtgttggtaagacagctattgctgaaggacttgcacagcgtattgccagtggcgatgtccctgaaactattgaagggaagaaggttataacactcgacatgggtcttctagttgctggaacaaaatatcgtggagagtttgaagagagattgaaaaagcttatggaggaaattagacagagcgatgagataatcttatttatcgacgaagtgcatactttgattggggctggagcagcagaaggtgcaattgacgcagctaacattttaaaaccagctctcgctagaggtgaattgcagtgcattggagcgacaacattagatgaataccgaaagcacattgagaaagaccctgccttggaaagaagattccagccagtgaaagtacctgaacctaccgtggatgaaactattcagatccttaagggtctgcgagagcgatatgaaattcaccacaagcttcgttacacagacgaatctttagtagcagctgcacagttgtcataccagtatataagtgatcgtttccttcctgacaaggcaattgacttgattgatgaagctggttctcgggttcgacttcgtcatgcacaggtccctgaggaagctagggagcttgagaaggagcttaggcagataacaaaggagaagaatgaagctgtccgtggccaggactttgagaaggctgggacacttcgggatagagaaattgaactcagagctgaggtatctgcaatccaagcgaaaggcaaggagatgagcaaagcagagagtgagaccggtgaggaaggccctatggtcacggagtcagacatccaacacattgtgtcttcatggactggtattcctgttgagaaagtatcaaccgatgagtctgaccgtctcctcaagatggaagaaaccctccacaaacgtatcataggccaagacgaagctgtgaaagccataagccgagccattcgccgtgcacgtgttggactcaagaatcctaaccgtccaatcgctagtttcatattctcgggtccaaccggtgttgggaaatctgagcttgccaaagctttagcagcttactacttcggttccgaagaagccatgattcgtctagatatgagtgagttcatggagaggcacactgtctccaaactcatcggttcacctcctggatatgtcggatacaccgaaggaggtcagttaacagaagcggttagacgtcgcccttacaccgtcgttctattcgatgagattgaaaaagcccatccagatgttttcaacatgatgcttcaaatccttgaagatggtagattaacagacagcaaaggaagaacagttgacttcaaaaacacacttctcatcatgacatcaaacgtcggaagcagcgtgattgagaaaggaggaagacgtatcggattcgacttagactacgacgagaaagacagcagttacaacagaatcaagagccttgtaacagaggagctgaaacaatacttcagacccgagttcctaaacaggctagacgagatgattgtgttcagacagctaacaaagctggaagtgaaagaaattgctgacatactgttgaaggaagtgttcgagaggttgaagaagaaagagattgagcttcaggtgaccgaaagattcaaagagagagtagtagacgaaggttataacccgagctatggagcaagaccgttgagaagagccatcatgaggcttttagaggatagtatggcagagaagatgcttgcgagagagatcaaagaaggagactcggtgattgtggacgttgacgctgaaggtaacgtcacggtgctaaatggtggaagtggcactccaactacttccttggaggagcaggaagattctctccctgttgcttaaataaaaaaagcaaagtgcgtgcgtttctctcttcttttgctttggcccttaaatgaattatggcaagagaaggttatgaattgagatacatgggggctttcttaatatacattttctaaatatatgaaaaatgtaatgtatagatgacattgtgtagcttctttttcttccatgctttttaaggcctttagttctagagcggccgccaccgcggtggagctccagcaactgttac

SEQ ID NO: 86608 - DNA, 614 bp, Arabidopsis thaliana columbia
  unsure (1)..(614): unsure at all n locations
accctttcgtcgtcaaggtctagctttctcaaatcctctctctctcgtttctccgattccgatatcaccgtctcctccaccggaaaatccataacgcgattaggtttttagcctagttccttaatctctggttattgattctttcaatttctgatcgatgacattgtccaagcgattggctctattgggagctcaatctgcgattactctcgctaaacctcgaggtctcggttcctctctcgggttacttgatcgtcgtccatttccgtatcgtcaattttctgagctcacgaaagctaatgggagacgtgcttttctcgttgatacattggctctggtgaggagtcttgaagctcaaggagttccatcgaaacaagctgaggcaataacttctgctattactgaggttttgaatgatagcttggaaaatgtccctgggccttttttgcgccgaaaggggaatccagaagnattgaaatgttcaaggttcaaattttctcggaatttaaatctgaggcaaaagttcntaggggnacaatttnactnttttcaacggggggctgaaaattnngggnggnattgngaagntcgagtngcnaggccgnantttnagg

SEQ ID NO: 86609 - DNA, 501 bp, Arabidopsis thaliana columbia
tattccaatcactattaggaaaggtgggacccctggcgggacccggcccgaatttccgggttcaaccaagccttccgaaaaaggggagtttttttctctgctctcatgtcgattctggtttatgtagcaaaatcagtagatggggacccatgacatgattgtcttgccaacagttgggatgaatgggttagtgcggatagattgttgaaacataccgaggagattcttgtcaaacagaaagctctagacaaaaagcaaggagttgaaaaaggtaccaagtctggccgttccgttcagacaaaaactagaagctctgcaaacacaaaggctgataaagatgacaccaagaccaatggtaggcaacatattaatttacgctccctttgtagttcagggttctcccaacaatttccaaggaaatgatttggtagactgggtgcaacttaaattatttaagctggtgtatagatgattacattttctgttgcagctgcaaaaggg

SEQ ID NO: 86610 - DNA, 727 bp, Arabidopsis thaliana columbia
  unsure (1)..(727): unsure at all n locations
ccngctctctacgactcactattgggaaagctggcacgcctgcaggtaccggtccggaattcccgggtcgacccacgcgtccgctcgctttcggtgacaatgggaagctcgtcgaaggaagagacggcgagtgacggagatacggcgagcggtggcgcctcaccgtccaacgacggcagactcttctcggagggcgagcgtgttctcgcttaccatggtcctcgcgtctacggagccaaggttcaaaaggtcgagcttcggaaaaaggagtggaaatactttgtgcactatcttggttggaacaaaaattgggatgaatgggttagtgcggatagattgttgaaacataccgaggagaatcttgtcaaacagaaagctctagacaaaaagcaaggagttgaaaaaggtaccaagtctggccgttccgctcagacaaaaactagaagctctgcagacacaaaggctgataaagatgacaccaagaccaatgctgcaaaagggaagaaacgaaagcacgagtcaggcaatgagaaaggataatgtacggcggagaagctaatgaagatccaaattcccgcatcacttacaaagcaactcactgacgactgggagtatattgcgcagaaggacaaggttgtgaaacttcctcgttcacctaacgtcgatgagatattggtccaagtcccttgaattcaaaaccaagaaaggatggaatggaactgattcg

SEQ ID NO: 86611 - DNA, 483 bp, Arabidopsis thaliana columbia
  unsure (1)..(483): unsure at all n locations
cggctcgagattttgtcgatctggtaggaagaagaagtacaagagaacaagaaaaagtcaattcctttcgttagtcggcgaattctagaaacgatgttcaatttctggggatcaaaagaccaacaacaagggcaatctcgtcctcaggaagcttcttcacagtcgccatggtactcgccttctttagttagctcgccaagctcatcccggcctcaaagttcaggtcagatttcagcacaagtatcaccgggtgaagcagctggcattatcgtcttcttgaaagacaaaagcgtggatgaactcaggaagcttctctctgacaaagatgcgtatcagcaatttctgctctctcttgaccaggtcaaagtccagaataatatcaaagatgagctccctaggggaaccattgcagctagcttggggcaacttgggggagggggcccccgtaattgggcctanaanccatttnnganttttcggana

SEQ ID NO: 86612 - DNA, 539 bp, Arabidopsis thaliana columbia
  unsure (1)..(539): unsure at all n locations
gagaatttctgcaaaagatactgccactgctgctcagactgtttcttcaagtggtaagatcgacgtaggagcaatcgcgagtgtacgggctgcaaatatctatggtctagatattcttgctgagaacatacaagatgatgttaacaatgtgactcgctttctgatacttgcgagagagcctatgattccaagaacagatcgaccatataagacaagtatcgtgttctcgctagaagaaggtcctggtgtgctgttcaaggccttggctgtttttcctttacgaagcattaacttatctaaggtaagttccaaggaaaagttgggatcctattatcagtaattcattnccaaaaataggaaatatatgacggtaactttttgctcttccttttagataggaaagtcgtccccagnggaaggagncccgttagggggttgtttgatgggtctaaccaatggagccgctaagtcctttttttttccttattctccattngtttttaagccncntggtntnanggcgnngnggtctttgccat

SEQ ID NO: 86613 - DNA, 421 bp, Arabidopsis thaliana columbia
ccaaaactaagagaaactaaacaaattcaaatgaccaccaccgataaatccgccggaatcgtaactgactcggaagccggaccggagacttctcttctcctcaatcctcacgaaggatctaccaaaaaagctccttctgattcctaccacttcgcttacatcatctacttcaccctcggcgttggctttcttcttccatggaacgcattcatcaccgccgtcgattacttctcttacctctatccttccacggccgtcgatcggatcttcgccgttatctacatgctcgttgctcttgtttgtctattcgttatcgttgtcttctatgcacataagagcctcgctagctttagaatcaatctcggtcttttactcttcgtaatcgccttgcttgtggttcctgttttggatctggtttatg

SEQ ID NO: 86614 - DNA, 827 bp, Arabidopsis thaliana columbia
  unsure (1)..(827): unsure at all n locations
gttcaaaatcatttcttctctcttccgtcaaaattattattctctcgcagtcgtcaagagcttcttctacaacaatgcagacgacgagaagtgttcaagtaaataatgtctcagatctagccacagagagagagattcacgagtttttctccttctcaggcgacatagaacacattgaaatccaaaaagaatttggacagtctcgaatcgcatttgttacatttactgatcccaaagccctcgaaattgccttgttattatcgggtgcgacgattgtggaccagattgttacaataacacgagctgaaaactatgttcagaggcgtgagacacaggaagtaagaatgttggacaacgcgatgcctcttggtcttcaagagagtactacacagactaaaacgaacatggatggtaatagtagagcatacgttagcaaagcacaagatgtggtggcaacggttttggcaaaagggtctgctcttggacaagatgcagtgaataaagccaaggctttcgacgaaaagcaccaattaagagccaatgcttctgctaaagtttcatcttttgacaagcgagttggtcttactgagaagttatctggttggaattcctgctggttaatgagaaagttaaaccggttgtcaaaagcttcaagtctccggttaaaccnatnggcaggcaataatttgcagccgananggaagttaaaccggcncnggggtcagctggccaatccaaccnaggnacgtnnctcctggaacctncttgggttaagnggncctttaggnaaanggcgaanttggccagggttccnggccnaaacccaa

SEQ ID NO: 86615 - DNA, 408 bp, Arabidopsis thaliana columbia
  unsure (1)..(408): unsure at all n locations
cccggagtgcgcacccacgcgtccgcaacaaagaaacatttccattgagtctctctcaatgttcttcttcttcttcttctaagattaattcaaagtgtttaatacttttaaaattttaagtttctttttggtcagtttcaaatgggtgacatcatcggtcacaaggataggcaaatatggccaccctctcatcatgttcttcaagatccattgtttgatcattccaacaaacatcagttgcagaaatatgtcaagaaccaccatcaccacggcaacggtgaatttggtcggcccggggcacctcctcttaggcaaacatttcctttgaactttaattcaaggcaaaagcacccaagcaattggcaaagggggtaanggggggggttcgtttnnangcattttttnttt

SEQ ID NO: 86616 - DNA, 477 bp, Arabidopsis thaliana columbia
ctagttacatatcttcaacaaagtgaatctcatgaggatattaccgaaaagcggaggaggtgctctttgcctcctctttgtgtttgctctttgttcgggggctcattcccttagctgtgacgtcaaggttgttggcgatgtcgaagtcattggctactcagaaatcagcaaaatcaagatccccaatgcattctcaggacttcgagttacgatagaatgcaaggcggccgattcaaaaggccattttgtaacgaggggaagcggagaagtggacgaaacaggaaagtttcatcttaatattcctcatgacattgtcggtgatgacggaactctaaaagaagcttgctatgctcatcttcaaagtgccttcggcaacccttgtccggcccacgatggccttgaggcctccaagatcgtgtttctatcgaaatccggccaaaaccacgttttgggtctcaaaaaaagtcttaaattctc

SEQ ID NO: 86617 - DNA, 3330 bp, Arabidopsis thaliana columbia
  unsure (1)..(3330): unsure at all n locations
ctaacgattatcattttcgatgagacattgttttacagagatatttttgttgcaatgatatctctgtatcaaatattggccgagaagaagaagaagaagaaaaatgatcttaacatctttgcatttcctgtttttgccatcatttgcttcaaattttatagtgtaaatgctatcaaattaccgcagcaagaagtcgatgctctgcagcaaatcgctaccacattgggctcgaaattctggaaattcgatgctgaaaattgtaagattgaaatggtggggttaactgaaactcctcctccaacagctaagcaagaaatagaatgtgaatgcagtcccactaacgacactgattgtcatgttgtcaaatttgcattcaaggaccataatcttccaggaactcttcctcaaatagtcaagcttccctaccttcgggagatagacttggcctacaactacatcaatgggaccttacctcgtgaatgggcttcttcaaatttaacttttatttctcttcttgtgaatcggttgtctggagaaattccgaaggagtttggaaactcttctctaacatacttggatctcgagtcaaatgcgttttctggaactattcctcaggagcttgggaacttagtccacttgaaaaaactgttgctttcctctaacaaattgaccggaactttgccagcttcactagctagactacagaatatgacagatttcaggattaacgatcttcaactcagtggaacgatacctagttacatacaaaattggaagcaactcgagagacttgaaatgattgcatctggtctcactggtccaatcccatcggtcatctcagttctgagcaatcttgttaatctgaggatcagtgatatacgtggaccagtccaaccattcccttcgttgaagaacgtgacaggtctaactaaaattatattgaagaactgtaacatttctggacaaattcctacttatctttcacatttgaaggagttggagacactggatttgagttttaacaagttggttgggggaattccgtcgtttgcacaagcagaaaatttacggtttataattttggctggaaatatgctcgagggagatgctccagatgaattactaagagatggaatcacagtagatctttcatataacaatctcaagtggcagagtcctgaaagtcgtgcttgtcgcccaaatatgaatctgaatctaaacttgtttcagagcacttcgacaaaaaatcgagcaaatttctgccgtgtatcaagattcaaatgtcctcgatattctagctgcttgcatgtgaactgcggtggaagcgatatgtatgttaaggagaaaaaaccaaaagaattatatgaaggagatggaaatgttgaaggtggtgctgctaagtattttttgaagcctgacgctaattggggatttagcagcacaggggacttcatggacgataacaatttccaaaacactagattcaccatgtttgtcccggcatctaaccagtctgatctctacaaatcggcacgaattgctccagtatctctaacttacttccatgcctgcttggaaaatggaaattacactataaatctagacttcgctgagatacggttcaccaatgatgaaaactataaccggcttggaaggcgtctgtttgacatttacattcaggagaaattagtggcaaaggactttaacatcatggatgaagcaaagggagctcaaacacctataatcaaaccacttactgcctatgtgacaaaccactttttaaccatccggttgagttgggccggtaaaggaactaccaggattcccactagaggggtttatggtcctatcatatcggctatttccatagtttcagattccaagccgtgcgaacgtccgaaaactggaatgagccctggagcatatattgcaattggaattggagcaccatgtcttattatctttatactgggatttctgtggatatgtggctgcctcccaagatgtggtcgacaacgaaaagatccgtatgaagaagagttgccttctggaacttttacattgaggcaaatcaaattcgctacggatgacttcaatccaactaacaagattggagaaggtggtttcggtgctgtctttaagggtgtgttagcagatggaagagttgtagcagttaagcaactctcatctaaatcgagacaagggaaccgagaatttctaaacgagataggcgcaatttcttgtcttcaacatccaaatctcgtcaagcttcatggtttctgcgtcgagcgggctcagctattactggcgtacgaatacatggaaaataacagtttatctagcgcgttattcagtccaaagcataaacagataccaatggactggcctactaggtttaagatttgctgcgggatcgcaaagggtctcgcgtttctccatgaggaatcaccgttgaagtttgtacatagagacatcaaggccacaaatattttattggacaaggacttaactcccaagatatctgatttcggattggctaggcttgacgaagaggagaaaacacacatcagcaccaaagttgctgggactataggatatatggcaccagaatacgcactgtggggctacctaactttcaaagcagatgtctacagcttcggtgttttggttctagaaatcgtcgccggcataaccaacagtaatttcatgggggcaggagattccgtttgcctcttagaatttgctaacgagtgcgtagaatcggggcacttgatgcaagtagtggatgagaggttgaggcctgaagtggatagaaaagaagcagaggccggtataaaagtggctctcgtgtgctcgagcgcttctccaacagatcgtcctttaatgtcagaggtcgttgctatgctagaaggtctatatccagtgccagaatcaacaccaggagtaagcaggaacgcaggggatataaggtttaaggcatttaaagatttaaggagaggcatggagaacaatagtaagacgcagtgttctgttaaaagctatccgtcttcttcttcgacttcttctggggcaggacaagcagttcaagaaagaaagaaagaagagtcaaggccttgaagaggttttgaatccttccctctcttttttttttttttgtaaaatgtctgtctttagtaaaatgtttatgagtttattctgtgattagtcatttactgtaattccccatatctgtatttaggttctgttagttggggattgaatgttgtgaaaactcaaaactcaaatgatatataatcagtgatctttcnnnnnnnnnnnnnnnnnnnnnnn

SEQ ID NO: 86618 - DNA, 511 bp, Arabidopsis thaliana columbia
  unsure (1)..(511): unsure at all n locations
nnnnnnnnnnnnnnnnnnnnnnnnnnnnnnnnnnnnnnnnnnnnnnnnacacacaacaacaacacccacgcgcgaattttcgatttccgaataacataaccgatcggcggagacatgacggcggcacaagggaactctaacgagactctgttttcttcttacaagatgggaagattcgatctctctcatcgagtggttctggcgccgatgacgcggtgcagggcgttgaacggagtaccaaacgcggcgttggcagagtattatgctcaacggaccactcccggcggttttctcatctccgaaggcaccatggtctctcccggatccgcagggttcccacatgtgcctggaatctattcagatgaacaagtagaagcatggaagcaagttgtggaagcagttcacgctaagggaggtttcatcttttgtcaattatggcatgttggacgtgcttctcatgcagtgtatcaacctaatggaggatcaccaatatcgtcaacgaacaaaccat

SEQ ID NO: 86619 - DNA, 593 bp, Arabidopsis thaliana columbia
  unsure (1)..(593): unsure at all n locations
cccacgcgtccgcccacgcgtccggttcactgacatgaagacttcagaggacacaatgcgtgggttttatgcagtcaccccgagctttcagaaggacctacacttattgttcaggtacttacaactggttcttggccaacacagcctgcagtaccttgtaatctcccagctgaagtttcagttctctgtgagaagttccgttcttactaccttgggacacataccggtagaagattgtcctggcaaacaaacatgggcacagcagatatcaaagccatctttggaaagggtcagaaacatgaactgaacgtgtcgactttccagatgtgtgttctcatgttgttcaacaattctnatcgactcagctacaaagagatcgaacaggctacagaaatcccggcagcagatcttaaacgctgtttgcagtcgctagcttgtgtaaagggcaaaaacgtggtnaaggaaggaccccatgtgcaaaggcataggnngaggnnggnttttttngttttgacggccaagtnccttggcangtttttccaaaggggaggntcggganntttggtttccccaaagggaaccanaccccgngg

SEQ ID NO: 86620 - DNA, 373 bp, Arabidopsis thaliana columbia
atcaaattcaaacagataacatttttcgtcaaaagaatcagtaaaaactaaacattttgactatatcctacttgaatcaattcttcggctgattttgaagttttgtgacattcagatattctaaggttttgtggtaaatggaatcgaatcacgaaggcaacgcgatacaagtgattgaccaagtaacaaccatgacccatctgtctgacccgaatccgaaaaccaaaccgggtatgatgctcatgaaacaagaagacgggtatttgcagccggtgaagactaaaccggctccgaagagaccgacttctaaagaccgtcacacgaaagtagaaggacgaggtcggaggatccgaatgccggcgggttgcgctgc

SEQ ID NO: 86621 - DNA, 2160 bp, Arabidopsis thaliana columbia
cagaaacagaggattcatcgatgttatactctatcaaaaattgcagatttgcatatggaaagacttcttcttcacgattcatgatcacacgtcgtccgatttctgatgcaaatttgtgcttcgatcgctcaattcctcgcttgggtttcattccttgtactattagcgacggtgggctcttcttcttcttcggaatctctcctaaattgtcaacctttagatcaccaccttgtaaaccctagtcgtctgcttggtttcctcagagcaatgtcttccgtcaatgatttcataaccaacgacaagctttgggtcgtttcttccatcaccgatgtatctccacctatctatgtgtttctacagtgcagagaagatctctctgtttccgattgtcgacattgcttcaacgagagcagattggagctcgagagaaatgttcgggttccggttggtcgaatccatagtgatagatgcttcttacggtttgatgatcgagatttctctgaggaatttgttgatcctacatttgataaagctaactgtgaggaaacagggacagggtttggagaattttggagatttcttgatgaggctttggtgaatgtaactttaaaggctgttaaaaatggagggtttggtgcagcttcagtgattaaaaccgaggccgtgtatgcattggctcagtgttggcaaacacttgatgagaacacgtgtcgagagtgtttggttaatgctagatcgagcttgagagcttgtgatggacatgaagctagagctttttttactgggtgttacttgaagtattctacacacaagttctttgatgatgatgctgcagaacataaacctgacgctgatcagagaaactttataaggtcatcgttttttccacatttgagtgatcgtgatgttacgagattagcaattgctgcgatttcgttgtcgattcttacttctcttggagcctttatcagttacagacgggtttcaaggaaaagaaaagctcaagttccatcgtgtgtaaatttcaaatacgagatgcttgagaaagcgaccgagtctttccatgactctatgaaactaggccaaggaggggccggttctgtatacaaagggattcttccagatggcagaatcgttgcagtcaaaaagctcttctttaacacacgtgaatgggcagatcaattcttcaacgaagtgaatctgatcagcggagttcaacacaagaaccttgtgagactacttggttgcagcattgaaggtcccaaaagtcttcttgtctatgaatatgttcataacagaagccttgatcaaatccttttcatgaagaacacagtccatattttgagctggaagcaacggtttaacatcattataggaatatcagaaggtctagaataccttcacagaggatctgaagtaaaaatcatccatagagacatcaaaaccagcaatattctccttgatcgaaacctaagtcccaaaatagctgattttggactcatacgttccatgggcactgacaaaacgcaaaccaatactggaattgctggaacacttggttatctggctcctgaatatctgatcaaaggccaattaacagagaaagctgacgtttacgcatttggagttcttatcatcgagatagtaactggcaagaaaaataacgcattcacgcaaggaactagctcggttttatactctgtatgggaacattttaaagcaaacactttagatcgctctatcgatcctcggttgaaagggagtttcgtagaggaagaggccttgaaggttcttcaaatcggattgttgtgtgttcaatcttctgtagagttgagaccgtcgtcaatgtctgagatagtcttcatgttacagaacaaagatagtaaatttgaatatccgaaacagcctccgttcttgagtgccagtgttctaatgccagatgaggagactagagtctgatattatcagtttcttaggattgttaatgttcttctgtaaatgctcaaaaatggattttacaccatttctttctccttttcaaatcttttatcgttcatattttattatgaaggtcaacaaaaatggaaccaaggctagattctaaaagttttgattcgtttacatcattattcattttacaatctaaaaaaaaaaaaaaaa

SEQ ID NO: 86622 - DNA, 334 bp, Arabidopsis thaliana columbia
aggacgcgtgggctcatcgtctctgactcgctgcacttagtttcagatcatataaacgaatttggtgattgatcggtgcatgacgagcgcatcggaactcttctctacacgaagatcacgtccgggtcgatccgacccggctttagaatccgacacttcttcctatcgacaccactcacaccatcatcatcgccgtcacggcgtccatcatcataatcagcgtcatgattccgacggctgtgatcctctccggcgacccactccccgtctccgacgcttctttcaccatccgattcacgaacgtagtagacctattcgtgatgttcaaggcact

SEQ ID NO: 86623 - DNA, 1262 bp, Arabidopsis thaliana columbia
  unsure (1)..(1262): unsure at all n locations
cccacgcgtccgcggacgcgtgggtgaagaagctccagaacacgccatagctatggctcttctctgtccttctcttccctctccgaattctcgtcttttcaggtgcaggagcagcaatatttcgagcaagtatcatggagcctcaaaggagctgatgattgctcgttctggtgtgtctacgagatcaatttcttcggaaaaggggctttctcgtagggatttagtgctcattggtctctcttctccgttgtctatgttcttgccattgtcttctccagtcactcatgcagaagaagacgtgaaaatgagtggagaagaattgaaaatgggtacaatggtggatgatattaatgcttattcttatgcttacccattggattatccatctgagaagcttgtcttcaaatgggttgaatcaagaaagcctgaaagatactcttcagctgcaccactctctcctgatgcacgtttacggattgtttctgaacgagttgacctaactgacaacctcgtcatttctatttcgataggtcccccaaactcaagattaacatcaaaagaaaagaaaacatggtccgctaaagaagttgctgattctgttttgtctgataaatcagcattgcgtgtcacctcaagtcagcgtcttgaagagagttcggttcttgatgctcatgctagtgatattgatggggagccttactggtactacgagtaccttgtccgcaaatcaccaaccaaaattgctgaagcatcaaagctttacagacactatatttcttcaacagctgaacgtgatggatacttatacaccataaatgcttcaacccttggcaagcagtgggacaagatgggaccggtgttagaaagagcagtaggatcctttaggcttcttcctcctactgatagttatgttcctccatacaaggacccatggagggtttggggatgcttccatctgccccatgaaatttcttttttcgaaattgtcgttaattttgataggagaggaggttatgaaagttgtagggtgagaaatgagccaagcgaagtgatttttccaaatccgcatatcttgttccccatcagagggattgggattgagatataactagccttttttttttcgccccnnnnnnnnnnnnnnnnnnnnnnnnnnnnnnnnnnnnnnnnnnnnnnnnnnnnnnnnnnnnnnnnnnnnnnnnnnnnnnnnnnnnnnnnnnnnnnnnnnnnnnnnnnnnnnnnnnnnnnnnnnnnnnnnnnnn

SEQ ID NO: 86624 - DNA, 2266 bp, Arabidopsis thaliana columbia
agcgctacacgactcactatatggaaagctggtccgcctgcaggtaccggtccggaattcccgggtcgacccacgcgtccgaacaaagagagagagagagagagtgttatgttatgtctttattgtcaattagtaattttcttcgaattagatgttgtttctccgtcgaatcgccgtcgtcttctttgtcttcacctctttctccgccgctcagaactccacgtgtcctctggacttttccgtccttgaaccgttccggcgtccgaaacccgatggcgccaccacctgccagtacctcctccaagggctacgcctcctctactctcaccatctccgtcagacgggttcctttctcccgccacctgagtctgctgcttcttgctgggctgctctccagtcttccgtcgccggtttcctccctcgctttgacgtccgatccacctgcggtttccagacgccgtggatttcgcaggggtgcatggacatcaccaccaggtctcaattcgaatcccttatccctaactcctccctcgccaccaccgccatgcgctgtaacacctctctcgagagcaataccccttgcgcctcctgcactcagagcctctccgcgtttcagccctatctctccggtccatccctcggtaatgtctccgactgtgcttcttttccctctatctacgccgctgctttcgccaattccttgggccccaccgacaaaggcaccgccaaatgcttgtttcagctcgatttggcttctcccactagctccggtgctaacaaagtcaaagttctagtttcttctttctctgttttgctcgtcgcctctgttctggttatcaccgcttggttctggtactgccggaggaagaaaagcaagcttctcaagcctcgggatactagtttagaagctggcacgcagtctagacttgattccatgagcgagagcaccactcttgtcaaattcagcttcgacgagatcaagaaagccaccaacaatttctcacgccacaacatcattggccggggaggttacgggaacgtcttcaagggcgccctgccagacggcacccaggttgccttcaagaggttcaagaactgttctgctggaggggacgccaacttcgctcatgaggtcgaggtcatcgccagcatccgccacgtcaatctccttgccctcagaggctactgtactgcaaccacgccctatgaaggtcaccagaggatcattgtctgtgatcttgtcagtaacggtagccttcatgaccatctctttggcgacttggaggctcagcttgcctggcctcttaggcagaggatcgcccttggcatggccagaggactggcttatctacactacggcgcacaaccctccatcatccacagggatatcaaggccagcaacattctcttggacgagaggtttgaggccaaggttgcggatttcgggctggccaagttcaaccccgaaggaatgactcatatgagcacgcgggtcgcaggcactatgggatacgttgctccagagtacgcactgtacgggcaactgactgagaaaagcgacgtgtacagctttggggtggtgcttctagagcttctgagcaggagaaaggcgattgtgacagacgaggaggggcagcctgtgtcggtggcagactgggcgtggtcgctggtaagagaaggccagacattggatgtggtggaagacgggatgccagagaagggacccccagaggttctggagaagtatgtgctgatagcagtgctgtgctctcaccctcagctccacgcaaggccaacaatggatcaagtggtgaaaatgctggagagtaatgagttcactgttatagccatacctcaacggccaatccctctggtggcttgtagggaagagattgaccgctctgttagtagcagcagtggctcagggaagctcactagccccacgggatatcaggccttctcattcggaggtgatggcccctcagggaacacgaataccacttagatgagatatgtatgttgtagatattaatttagtgtgcattcatttcattctttgatgcttcttctgtcacttatgtaagtacagttgctttttccaataaactcatcttgttgtaacagctttggaaaaaaaaaaaaacaggcttagaaatatatatatccccctaaaaaaaaaaaaaaaaaaaaaaaaaaaaaagggcggccgctctagaggatccaagcttacgtacgcgtgcatgggacgtcatagctaatctatagt

SEQ ID NO: 86625 - DNA, 391 bp, Arabidopsis thaliana columbia
cctttatccaatctctcctccatagttctgaagcctcgagagagaggggccagaaggtcaccctgaacagaggttttgcagacaatagaaagcagtaagcaagcatgttaccaaagttcgatccaacaaaccaaaaagcttgtctgtctcgtcttgaggatttgaccaccaacgtaaagcagattcaagattccgtattggaagcaatactttcacgtaatgctcaaactgagtatcttagaggtttcctcaaaggccaagtcgttaagcatgacttgaacaaatacataccacaacgtgacctacgaagattttaagtcttatatcgaccgtatcgctaatggagagccgtctgatctcatctgtgatcgacccatcagtgtactcttga

SEQ ID NO: 86626 - DNA, 539 bp, Arabidopsis thaliana columbia
ctcatccacaattttacgccaccgaacatttcgccaaaccacacattttgtctgctttctacttcgccagggaaagtggccagagctcatctacttcgcaagaactaagcaatctcttgtaagtcaaaaggcagcacaagcaatcatgttgccaaagttcgatccaacagaccaaaaagcttgtctgtctcttcttgaggatgtgactaccaacgtaaagcagattcaagattctgtcttggaagcaatactttcacgtaatgctcataccgagtatcttagtggtttcctcaacggtcaagctgataagaaaagcttcaagaagaatgtacccgttgtaacctacgaagatattaagccttatatcgatcgtatcgccaatggagagccgtctgatctcatctgtgatcgacccatcagtgtactcttgactagctcaggtacttcaggaggagttccgaagctgattcctttgacaacagaggatttggaacagaggattacgttttcttctctctatgcacctctactctacaagc

SEQ ID NO: 86627 - DNA, 436 bp, Arabidopsis thaliana columbia
  unsure (1)..(436): unsure at all n locations
tgaacgttggggatagtcgggctatcttagcccaagaaaggctccatgatcgtcactctaatcctggctttgggaatgatgagggtatcgggcataagagtaggtctcgagaatcacttgtgctgtattgaactggatagaatatcagaggaattctccaatacacaatcaagcaactccaatcagtgtgtcaaacaaaaacagagatgtgacctcttaccggttaaagatgagagcagttcaactatcaagtgaccatagcacaagtgtggaagagggaatttggcggnttagatctgaacatccggaagntgnccagtcgggtacttaaaggtagggtcaaagggccacctaaaagtcanttcgggcttttgggtgcttgggtttntcaaaaaggcccattttnnatnnagnntttnttttngntnttcccngt

SEQ ID NO: 86628 - DNA, 787 bp, Arabidopsis thaliana columbia
ccgccccctttgatttgcactgtgccgtctgcagtaccggtctcgaattcccgggtcgacccacgcgtccgcaaaaacagagatgtgacctcttaccggttaaagatgatagcagttcaactatcaagtgaccatagcacaagtgtggaagaggaaatttggcggattagatctgaacatccggaagatgaccagtcgatacttaaagatagagtcaaaggccaactaaaagtcactcgagctttcggtgctggatttctcaaaaagccaaatttcaatgaagctttgcttgagatgttccaagtagagtacattggaacagacccgtacatcacatgcgaaccgtgtaccgtccatcacagactgacttcaagcgatcgtttcatggttttatcctcggatggattgtatgaatacttcagcaacgaagaggttgttgctcacgtgacttggttcatcgaaaacgttcctgaaggcgatcctgctcaatacctcattgcagagcttctctctcgtgctgccaccaagaacggaatggagtttcatgatctgttggatattcctcaaggagatagaaggaagtaccatgatgatgtctctgtcatggttgtgtcacttgaaggaaggatttggcgctcgtctggacaatattatccagagagaaaacaaaaattcaatagataaattaaccaaacacaaaaaaaaaaaaattaggttttggcttattgttttcaaacaatctttcaatttcccggaagttcaaaaaaagaagaaaataattctgttt

SEQ ID NO: 86629 - DNA, 515 bp, Arabidopsis thaliana columbia
  unsure (1)..(515): unsure at all n locations
nnnnnnnnnnnnnnnnnnnnnnnnnnnnnnnnnnnnnnnnnnnnnnnnnnnnnnnnnnnnnnnnnnnnnnnnnnnnnnnnnccacgcgtccgcatatgggtagctacatggcaatggaggtaaccagggcagtgtgtagacaaaccatatttgacgagttgaatgtaaatagtttcaaagtccaaaatgtacaccctggttttcttggacgctgtttcattgaggtggagaatggattcaggggtgacagttttccattgataattgccaatgcatccatctgcaaagagttgaatcgtctcggagaagagtttcaccccaaaagtcaagatatgacagaagagcaagcgcagagctcaaatcgtggtcccacatcaagagaagaagttttgtgcttcttgaacgagcttggttggcttttccagaagaatcagacctctgagcttcgggaacaatctgacttttcccttgcccgcttcaagtttttgctagtttgctcagttgaaagagattac

SEQ ID NO: 86630 - DNA, 601 bp, Arabidopsis thaliana columbia
atgacctccagctctatacgactcacattagggaaagctcgtacgcctgcaggtaccggtccggaattcccgggtcgacccacgcgtccgaaccggtctgagcaagagattaagtttagagaggaacgagtcatcatcatcttgtgcctcgtgtgcaacggtggctttgaagtatcaaaggagagtttcaggttcacaacgtttgttcccaactcctatcattcactcaatgcttgcggttgcaacggtctgcgtttgcgtctgcgttttcatgcatgctttcccaatcgtcagacaagggtctcacttcagttggggaggtttggattatggctcaatctagagaactatactatataaaagtattataatttattcttttggtttctcgaagacaaaaaaataagaaaaagagaagagactttggtacaaatagaaggaaaagctcagagacatgactgtgacacacgaccaatagtgactccagtattactcgaggaagtttcaccgtcgggatgttttttctttctttctttcaattatatatatattttggttttgctaatttgttctgtatttccttgtacgtttcctacttttt

SEQ ID NO: 86631 - DNA, 1117 bp, Arabidopsis thaliana columbia
tggccgtcgtctgccgtaccggtcctgaattcccgggtcgacccacgcgtccgagtcaagatatgacagaagagcaagcgcagagctcaaatcgtggtcccacatcaagagaagaagttttgtgcttcttgaacgagcttggttggcttttccagaagaatcagacctctgagcttcgggaacaatctgacttttcccttgcccgcttcaagtttttgctagtttgctcagttgaaagagattactgtgctctcatcagaacgctcctcgacatgttagtagagagaaatttggtgaatgatgagctgaacagagaagccctggatatgcttgctgagattcagttgttgaatcgtgctgttaagaggaaaagcacaaaaatggtcgaactactcattcattacctggttaaccccttgacactcagttcctccagaaagttcgttttcttacctaatataactggacctggcggtatcacacctttacatctagctgcatgtacatctggttcagatgatatgattgatctactcaccaatgatccacaagagattggattatcgagctggaacactcttcgcgatgcaaccgggcaaactccatacagctacgctgcaataaggaacaaccataactataactcattggtggctcgtaaacttgcagacaaaagaaacaagcaagtctcactaaacatcgagcacgaggtagttgaccaaaccggtctgagcaagagattaagtttagagatgaacaagtcatcatcatcttgtgcctcgtgtgcaacggtggctttgaagtatcaaaggagagtttcaggttcacaacgtttgttcccaactcctatcattcactcaatgcttgcggttgcaacggtctgcgtttgcgtctgcgttttcatgcatgctttcccaatcgtcagacaagggtctcacttcagttggggaggtttggattatggctcaatctagagaactatactatataaaagtattataatttattcttttggtttctcgaagacaaaaaaaaataagaaaaagaaaaaaagggcggccgctctagaggatccaagcttacgtacgcgtgcgtgcgacgtcataatcttctatag

SEQ ID NO: 86632 - DNA, 1247 bp, Arabidopsis thaliana columbia
catttcttcgatacttcccaagttcaccgcaatggccaccgcttcaatcttcgccgccgccgtgaccgtcaccagagatgtgacatctcttcttaatccatcttctctgataatcggaaaatcattatctccttcaaagttcagctcaatcaaatcctccgtttcattttcccgcaaaaccctaactccaattcgatactcttcatctcccgccgatcactcacccgccaccgccgtggaagcgatcacgaatcgatccaaaacctccttgaaatctcgtctccgtggaggagaaactctctacggtctctttttactctccttctcgccgacattagccgagatcgctgctcacgccggttacgattacgtcgtcgttgatatggaacatggtcccggaggtataccggaagctttggattgtattcgagctcttaacgccgccggaacatcagccattctccgattaccggaaaactcaccaacctgggctaaaaaagctctagatctaggtccacaaggaatcatgttcccaatgatcgaatctcgtaaagacgctaccaaagcggtgtcgtattgccggtttcctcccgacggtatccgtggatcggcgcacacggtggtgagagcttctaactacggaatcgatgaagggtatttaagtaattacgcagaggagattctgattatgtgccaggtggaatcaggtgaaggagtgaagaaagctgatgaaatcgcagccgttgatggtgttgactgtgtgcaaatgggaccgttggatcttagtgcgagtttagggtatttgtgggatcctggacataagaaagtgagagagatgatgaagaaggctgagaaatctgtgctgaccactgatccggcgaaaggcggggcttacttgtcgggtttcgcgatgccgcacgacggagctggtgagattcggggacgtggttaccatatggtcgccggagctgttgatgttggattgtttaggaatgctgctgttgaagatgtgaggagattcaagatgggtttggtcaatgaatcggacagtgaggattcgtcggaacatgataaagatgttgatgatgagaagtactggagcgataagcaaaatttcaaatttcgttaatgttgtttccttttaactttccataaagatttacaaaatcatgatgccacaaatgtttcaaaaacgaaagcaacatgaatccaacaaagctgagacatttggctttaaaaaaaaaaaa

SEQ ID NO: 86633 - DNA, 329 bp, Arabidopsis thaliana columbia
  unsure (1)..(329): unsure at all n locations
agatggtgaatgagaagaagatgctcccaaaacgcatcatactaatgcgtcacggtgagtcagccggtaacatcgacgcaggggcttacgcgaccacacccgatcacaagatccctctaacggaagaaggaagagcgcaacgcggtnaggccgggaagaaaatnagagccctcatatcaacccaaagcggcggtgcgtgtggagagaattggcgcgtgtacttctacgtgtcgccttacgagagaacgaggacgactttgaggngaagtaggaaaaggattctcgaggaagcgcgttataggagtnagggaagagtntaagnatcagng

SEQ ID NO: 86634 - DNA, 426 bp, Arabidopsis thaliana columbia
  unsure (1)..(426): unsure at all n locations
ggaaaattccaagcttcgagattttnttatggntcgtggtcagattgttgataccttacaaggagaaatttctgtnatctgtcaagatgtgaagctgttgaaagaaaaatttgaaaaccgagtgcctttaaccaaatcgatctcctcaagcttcactagttcatgcggatcatctatgaaaagcttggtgctcgagaacccttctnagcgattgantggagtgactgaaacctcaaacaacaacaagttcccagaagcagcagctttcttcatgaacaaagagaaagatgattgtagagatcttcttgaagatggatgggncatcttttgtcaaggngaccgcacaagttgtttgggacctgaaggaatgaagtaattgtacatataggggaccttaatncttaaaaataaaatgggttggtttcc

SEQ ID NO: 86635 - DNA, 580 bp, Arabidopsis thaliana columbia
  unsure (1)..(580): unsure at all n locations
taggtgccactactagaagagctatgacgtcgcatgcacgcgtacgtaagctcggaattcggctcgagaaaaagaagccaattggttctctctctctctctctctctctctgattgattgatccagcgattcgtctggctggctcggtttccgcgggaaaaccttcttcttcgttgaccttacacgagttttgttgattcggcagggggatcgacgacggagatggcgattctgtacgccctcgtggctcgtggcacggtggttctttctgagttcaccgccacctctacgaatgcgagcaccatcgccaaacagatccttcgagaaggtccctggagacaacgacagcaacgtctcctactctcaggatcgttacgtcttccacgttaaacgcaccgatggcctcaccgttctctgtatggccagaagaaaccgccggaaggagaaattccttttgcctttttgggggttttcaccagagattcgtacgggctttttgcaagggnttttcannanagaactagcttttnaatnaatggggatttttagngttnttagtaaganntngcttttcntatgc

SEQ ID NO: 86636 - DNA, 734 bp, Arabidopsis thaliana columbia
  unsure (1)..(734): unsure at all n locations
gttcgagcgattgttactgaatggcttggtcacattgcgtggaaaactctctctagatctacacgctacacgagttttgttgattcggcagggggatcgacgacggagatggcgattctgtacgccctcgtggctcgtggcacggtggttctttctgagttcaccgccacctctacgaatgcgagcaccatcgccaaacagatcctcgaggaaggtccctggagacaacgacagcaacgtctcctactctcaggatcgttacgtcttccacgttaaacgcaccgatggcctcaccgttctctgtatggccgaagaaaccgccggaaggagaattccttttgcctttttggaggatattcaccagagattcgtacggacttatggcagggctgttcatacagcactagcttatgcaatgaatgaggaattctctagagttcttcagtcagcagatttgactattactctaaatgnttcctaatgccgntaggattaaatcgtattaaggggtgaaattgaattcagggtncgggggtgtcaatggnttaggaaaaccatttggccaaaagtccctaggatangagggttgaaccggttttggnnccttcttttttcgggtaaaaccccgnccaatttttccagggggnatnacaattccngtttnaagnaagcaaagctccnnncggtttttgnaagcaaccgncttggttgggaaacttcaaagtcangggncc

SEQ ID NO: 86637 - DNA, 693 bp, Arabidopsis thaliana columbia
  unsure (1)..(693): unsure at all n locations
taggtgcactatagaagagctatgacgtcgcatgcccgcgtacgtaagctcggaattcggctcgagtcctaatgccgataggatcattagagttaagggtgaaatgaatcaggtgcggggtgtcatgatagaaaacattgacaaagtcctagatagaggtgaacgtttggagcttcttgtcgataaaaccgccaatatgcaggggaatacattccggttcagaaagcaagctcgtcgttttagaagcaacgtctggtggagaaactgcaagctcacggtcctcttaatactactactactggtgatcatatacattgcagtggcctttctctgccacggacctactctaccatcttgcatttaagtgcatctgtctcttaaggaatccatcccgattctgcgcgttgccacgactttttatctcctcatctgattgtaaaccttgtgttttcctgagcattttcatgtggcttaaaaagcttatgtttccaactcacgtatatgaaaaaggatacttatttatagagcattgtaaaagctcattgctttgcggaaaaaaaaaaaaaaaaaaaaaaaaaaaaaaaaggnnnnnnnnnnnnnnnnnnnnnnnnnnnnnnnnnnnnnnnnnnnnnnnnnnnnnnnnnnnnnnnnnnnnnnnnnnnnnnnnnnnnnnnnngagacgctgaagtatca

SEQ ID NO: 86638 - DNA, 1250 bp, Arabidopsis thaliana columbia
  unsure (1)..(1250): unsure at all n locations
gtcgacccacgcgtccgctccaagaggagagagagagaaagagattcaattatatgcagagagaaaaagaagccaattggttctctctctctctctctctctctctgattgattgatccagcgattcgtctggctggctcggtttccgcgggaaaaccttcttcttcgttgaccttacacgagttttgttgattcggcagggggatcgacgacggagatggcgattctgtacgccctcgtggctcgtggcacggtggttctttctgagttcaccgccacctctacgaatgcgagcaccatcgccaaacagatcctcgagaaggtccctggagacaacgacagcaacgtctcctactctcaggatcgttacgtcttccacgttaaacgcaccgatggcctcaccgttctctgtatggccgaagaaaccgccggaaggagaattccttttgcctttttggaggatattcaccagagattcgtacggacttatggcagggctgttcatacagcactagcttatgcaatgaatgaggaattctctagagttctcagtcagcagattgactattactctaatgatcctaatgccgataggattaatcgtattaagggtgaaatgaatcaggtgcggggtgtcatgatagaaaacattgacaaagtcctagatagaggtgaacgtttggagcttcttgtcgataaaaccgccaatatgcaggggaatacattccggttcagaaagcaagctcgtcgttttagaagcaacgtctggtggagaaactgcaagctcacggtcctcttaatactactactactggtgatcatatacattgcagtggcctttctctgccacggacctactctaccatcttgcatttaagtgcatctgtctcttaaggaatccatcccgattctgcgcgttgccacgactttttatctcctcatctgattgtaaaccttgtgttttcctgagcattttcatgtggcttaaaaagcttatgtttccaactcacgtatatgaaaaagtatacttatttatagagcaatgtaaaagctcattgctttgcgaagtgtgtgaatctttgttgacatcatgttctataaattacatacatagtggaaaagtgaacaggcttgctttgtctgatatgttcatacaaaaaaaaaaaaataagaagggcgggcgctctataggannnnnnnnnnnnnnnnnnnnnnnnnnnnnnnnnnnnnnnnnnnnnnaacggatttac

SEQ ID NO: 86639 - DNA, 725 bp, Arabidopsis thaliana columbia
cccaggcgtccgggtgctgttaaattatttgattccaggtgttatgacaagggtccctttgacacatttctggtgggtggggatactgctgaggttaacgatataaaattcagcaacgatgggaaatccatgctcctaacgactacaaataacaatatctacgttcttgatgcatatcgtggagagaagaaatgtggttttagtttggagccttcacagggtacacccatagaggccaccttcacaccagatggcaagtatgttctgtcaggttcaggtgatggaaccttacatgcgtggaacatcgagaacccatctgaggtggcgaggtgggaggacaaccattaggagtagttgtcgtgtctggaaatgggcccccacgtagagccatggttcgttgctgcttctacggttctcacattctggatccccaaacgacggtgaatcaccagcccccgccgatcctcctaccgatcaacaacagtgacgacatatatgtttccattatgcacttgtgtatcgttttttaatgttgacaattagaaaaatttggaagcagtagtatgttaatccaatttagagtttatgaatttgagtctagatggttaccatatgttttttttaaaaaaaaaaaaaaaaaaaagggcggccgctctagaggatccaagcttacgtacgcgtgcatgcgacgtcaggctgttctataaggaacgaataacaaccgg

SEQ ID NO: 86640 - DNA, 555 bp, Arabidopsis thaliana columbia
  unsure (1)..(555): unsure at all n locations
nnnnnnnnnnnnnnnnnnnnnnnnnnnnnnnnnnnnnnnnnnnnnnnnnnnnnnnnnnnnnnnnnnnnnnnnnnnnnnnnnnccacgcgtccgctctttccttttctcacgccgagatttctgcgactgctctaatcttacgaccttataagaaacgacgcttattttcactctgcttgagctcttcatcgtgtcacacagcacgatcttggacgtcgttttaagcgcaaaacaaaggaaaaagactgacgtttatacatactaaatactggtttggagttttgccttttggactcagaaaactcaaaagagagagagagacatttctgtatcttatcgggttttgtgttgtcagaaagaagctcaaggacaaaaaaaaaagcaattatttttagggttcaaacgaagcaaaatttggaactttcagaagttgtgggtggtggcttcttgaacaataaagctttttcttagactcttcttccaatttgtgactctacctatctctctctccgtatggaattctctagagacgctggaatgatgatggagaataag

SEQ ID NO: 86641 - DNA, 427 bp, Arabidopsis thaliana columbia
cttcaacaacatttgggggtttcatttcaatcgcatttctagggtttctttctctacgattcaatagattcggacgaattgggggattctgaccagagagaagctatggaggaaaacgaagaggaagaagaattgcggccaacggcgctatacacggtcggtggttcagacgaatttacctttgtttctcccgatgggctctccggtcaatacacgggccctgatcacgacggcgtagttcttcagactgaaaatccggcgccgactaactgtcttgcttactacttcgaggttcatatcatgaatgctggtgaaaaaggagagatcgcgattggtttctccaaggaacacatctatagcgaaggatatactgtcagaagctgtgcctacattggtaacagtggactcatatgctctcaaaatggag

SEQ ID NO: 86642 - DNA, 445 bp, Arabidopsis thaliana columbia
  unsure (1)..(445): unsure at all n locations
tcgaagcaattggngggaagggagggaaacggtgggatgacggtgcgaatgataatgtagcaaaggtttacatacgaggtgatcatgaaggcattcagtacatcaaattcgactatgtcaaggatggacaatcgtttaatggatcagtccatggtgtttcagccgacggtttcacacagacgtttgagattgaccatctccagtatgaacaaattgtatctgttgagggttactacgactggaagaccggtgtgatgcaagcactccaattcaaaaccaacctcacagacttcagaatttatttggatttcacaaggggtactaatgttttcaccttggaggtcgatgggaacaatcatcgttggcttccatggatcctnctttggcgtactcccgatctctttggtgcatannnaaagnctccnncnaccaaaaaaaancccng

SEQ ID NO: 86643 - DNA, 435 bp, Arabidopsis thaliana columbia
attgaaaacacgagcttcctaaaccctagcagcagagtcttccgtaaacccagctctcttagctctcacgcctcgtcaattgttgacctgtaggatagatatgggcaacgagagcaaaacctcggctttggaatcggagcagaaggctcttcttctccgttcggtagctcaatacttggaacgatgtggtttttccaaatgcttcaagaaattgctctccgaagctgaaatcgagaagaaggaattgaacactagtttacctgatttagaggaaattttcagcgagtttttgaacaagagagatcatgaagctgcagctaatggaaataccgaggcgaatgtagtggaagctgtagagaatgtaaagaaggataagaggaggaagaaggaccaggaaacaaaggtgggaggttactgagggagggagggtcaaag

SEQ ID NO: 86644 - DNA, 3461 bp, Arabidopsis thaliana columbia
  unsure (1)..(3461): unsure at all n locations
cagagagccaaacaaaaaagccattgaagctggaagacaaaaaaaacagaggagattgaagaagaagagggagtaagaagatggagagttacctaaacgagaatttcgatgtgaaagcgaagcattcttcagaggaagtgcttgagaaatggcgtaatctctgtggcgttgttaagaaccctaaacgtcggtttcgtttcaccgctaatctctctaaacgctatgaagccgccgcgatgcgtcgcaccaaccaggagaaattaaggatcgctgttcttgtttccaaagctgctttccaatttatctctggtgtttctccaagtgactacactgtccctgaagatgtcaaagctgctggctttgagatttgtgctgacgaattaggatcaattgttgaaagtcatgatgttaagaagctcaagttccatggtggagttgatgggcttgcaggtaagctcaaggcatctcccacagatggcctttctactgaggctgctcagttatcccaaaggcaagagcttttcggaatcaacaagtttgcagagagcgaaatgaggggtttctgggtgtttgtatgggaagctcttcaggatatgactcttatgattcttggtgtttgtgctttcgtgtctttgattgttgggatagctactgaaggatggcctaaaggatcacatgatggtcttggcattgcggctagtattctcttggttgtgtttgttacagctactagcgattaccgccagtctttgcagttccgtgatttggataaagagaagaagaagatcactgttcaggtgacaaggaacgggtttagacagaaactgtcgatttacgacttgcttcctggtgacattgttcatctggcgattggagatcaggttcctgctgatggtcttttcctctcgggattctctgtggtgatagatgaatcgagtttgactggtgaaagtgagcctgtgatggtgaatgcgcagaatcctttccttatgtctggaaccaaagtgcaagatggatcttgtaagatgatgattactacagttgggatgaggactcaatggggaaagctaatggcgactttgaccgaaggaggggatgatgaaactccactgcaggtgaaactcaatggagttgctaccatcattggcaaaattggtcttttctttgcggtggttactttcgcggttctggtgcaaggaatgtttatgaggaagctttcaacgggaactcactgggtctggtctggtgatgaagcattggagctcttggaatactttgctattgctgtgacaatcgttgtggttgcggttcctgaaggattgcctttagctgtgactctaagtcttgcgtttgccatgaagaaaatgatgaacgataaagctcttgtgaggcatttagcagcatgtgagactatgggatctgcaacgacgatttgcagtgacaagactggtacactcacaaccaatcacatgaccgttgtgaagtcttgcatttgcatgaatgtgcaagatgtagcaaataaaggttctagcttgcaatcagaaatcccggaatctgcggtgaagttgttgattcaatcgattttcaataacacaggaggcgaagttgttgtcaacaaacatgggaaaaccgagcttttggggacgccaacagagactgctatattagagttggggttatctcttggaggtaagttccaagaagagaggaagtcttacaaagtgatcaaagttgagcctttcaactccacaaagaagcgaatgggagttgtaatcgagcttcctgagggaggacgtatgcgtgctcacacgaaaggagcttccgagattgttttagctgcttgtgacaaagttgtaaactcgagcggtgaggttgttccacttgatgaagaatcaatcaagtatctgaatgttacaatcaacgagtttgctaatgaagctcttcgaactctttgccttgcttatatggatattgaaggcgggttttcgccggatgatgcaatcccggcttctggatttacttgcgtagggattgtgggaatcaaagatcccgtacgtcctggagttaaagaatctgttgagctttgtcgccgtgctggaatcactgtgaggatggttacaggagataacattaacaccgcgaaagcaattgctagagaatgtgggattttaactgatgacggtatagccatcgaaggtcccgtattcagagagaagaatcaagaagagttactagaactgattccaaagattcaggtgatggctcgttcttcaccaatggataagcatacacttgtgaaacagttaaggacaacgtttgatgaagttgttgctgtcactggagatggaacaaatgatgcacctgcacttcatgaagctgatattggactagcaatgggaattgctggaactgaagtggcgaaagagagcgctgatgtcatcattctcgacgataacttcagcacgatcgtcacagttgctaaatggggacgttctgtttacataaacatccagaaattcgttcagtttcagcttaccgttaatgttgttgcactggttgttaacttctcttcagcttgtttaaccggaagtgctcctttaactgctgttcaattgttgtgggtgaacatgatcatggacacacttggagctcttgctttagctacagagccaccaaacgacgagctgatgaagcgtttacctgttggaaggagaggcaatttcatcactaatgcgatgtggaggaacattttaggacaagctgtttaccaattcatcgtaatttggattctccaagccaaagggaaggctatgtttggtctcgacggtcctgactcaactctcatgttaaacactcttatcttcaactgcttcgtcttctgtcaggtgtttaacgagataagctcgcgagagatggaagagatcgatgttttcaaaggaatactggacaattacgtctttgtggttgtgatcggtgcaacggttttctttcagatcataatcatcgagttcttgggcacatttgcaagcacaacaccactcacaataacacaatggatcttcagtatcttcataggtttcttgggtatgccaatcgccgctggactgaagacgattcccgtttgatcgttccatcaaaattggctcgaaaccactctttaaagatctctatattagaccagttacttcaaagtttagaacggacaagtcttctaacaaagtttttgcattatgcaatgactctgttttttattcttgacttttatttttcagtttgattagtgctattaaggacaaatatctgatttcctccatttttgtaaaactctctgtatctttgaaatgacacttctcttttctttctnnnnnnnnnnnnnnnnnnnnnnnnnnnnnnnnnnnnnnnnnnnnnnnnnnnnnnnnnnnnnnnnnnnnnnnnnnnnnnnnnnnnnnnnnnnnnnnnnn

SEQ ID NO: 86645 - DNA, 670 bp, Arabidopsis thaliana columbia
ttggcggcggctgcgcccctgccgtaggctgggttcctttgaagcggccgcccttttttttttttttttttaaacaggctttttttttgggataaaaatccccgaacaggcttctcgaacccaaacaaattccaaacatttttaatattcccctcctctattttccctcttcacgtcaaaaattcaaaaaccccaaaaccctataatctcctatataaatatccagccctagatcttataattcatcaatcacacaatctcttcaatcaaatctcttcttcaatcaaatcttcaaatcccttcaaagatgccttcaatgccagaagagccgctcctaacaccaaccccagacagattctgtatgttcccaattcactacccacagatctgggaaatgtacaaaaaagccgaagcatcattctggaccgccgaagaagtagatctatcacaagacaaccgcgactgggaaaacagtctcaacgacggtgaacgtcacttcatcaaacacgtcctcgctttcttcgctgcatctgacggaatcgtactagagaatctcgcttctcgcttcatgtccgatgttcaagtctctgaagcgcgtgctttctacggtttccagatcgcgattgaaaacatccactcggagatgtatagtctccttttcgatacttat

SEQ ID NO: 86646 - DNA, 662 bp, Arabidopsis thaliana columbia
  unsure (1)..(662): unsure at all n locations
ggcgcacgcgtcacgcttcacagaccagtgtcttctgtagagcaaagtnttcataatcccttcaaagatgcgcttcaatggccagagagagccgctcctaacaccaacctccagacagattcntgtnnatgttcccaattcacttacccacaccgatctgtggaaatgtacacaaaaaggccgaagcatcacttctgggaccgccgaagaagtaggatctatcacaagacaaccgcgactgggaaaacagtctcaacgacggtgaacgtcacttcatcaaacacgtcctcgctttcttcgctgcatctgacggaatcgtactagagaatctcgcttctcgcttcatgtccgatgttcaagtctcggaggcgcgtgctttctacggtttccagatcgcgattgaaaacatccactcggagatgtatagtctccttctcgatacttatatcaaagataacaaagagagagatcatctctttcgtgccattgaaacaatcccttgcgtcgccaagaaagctcaatgggctatgaaatggatcgacggttctcagactttcgccgaacgaatcatcgctttcgcttgcgtcgaaggtaccttatatttactattcggacgcgtgggtcgacccgggaattccggaccggtacctgcaggcgtacca

SEQ ID NO: 86647 - DNA, 820 bp, Arabidopsis thaliana columbia
  unsure (1)..(820): unsure at all n locations
aggtttnattccaaaaaaaaccnttaaaaanncccttaaaaaaccttaaaccccttcaaagatgccttcaatgccagaagagccgctcctaacaccaaccccagacagattctgtatgttcccaattcactacccacagatctgggaaatgtacaaaaaagccgaagcatcattctggaccgccgaagaagtagatctatcacaagacaaccgcgactgggaaaacagtctcaacgacggtgaacgtcacttcatcaaacacgtcctcgctttcttcgctgcatctgacggaatcgtactagagaatctcgcttctcgcttcatgtccgatgttcaagtctctgaggcgcgtgctttctacggtttccagatcgcgattgaaaacatccactcggagatgtatagtctccttctcgatacttatatcaaagataacaaagagagagatcatctctttcgtgccattgaaacaatcccttgcgtcgccaagaaagctcaatgggctgtgaaatggatcggcggggctcagactttcgccgaacgaatcatccctttcgcttgcgtcgaaggtaccttcttctccggaagcttttgttcaatcttctggctgaagaaacgaggactcatgcctggattaacattctcaaacgaattgatctcacgtgacgaaggtttacactgtgatttcgcttgtctactctacacgctactcaaaacaaagcttagcgaagaacgcgtgaaatcaatcgtctgcgacgcggtccaaatctagagagagtttgtgtgcgacgccctttcctgcgcgttgtttgggattaac

SEQ ID NO: 86648 - DNA, 773 bp, Arabidopsis thaliana columbia
  unsure (1)..(773): unsure at all n locations
cttgccatgttcgccagctttatccgctcccttaggaaagttgtacgcctcaggtacggtcgaatttcccgggtgaccccacgcgtccgcttctccggaagcttttgttcaatcttctggctgaagaaacgaggactcatgcctggattaacattctcaaacgaattgatctcacgtgacgaaggtttacactgtgatttcgcttgtctactctacacgctactcaaaacaaagcttagcgaagaacgcgtgaaatcaatcgtctgcgacgcggtcgaaatcgagagagagtttgtgtgcgacgcgcttccgtgcgcgttggttgggatgaaccgtgatttgatgagtcagtatattgagtttgttgcggataggcttttgggtgcgcttgggtacgggaaggtgtacggtgttactaatccgttcgattggatggaacttatttcacttcaagggaaaacgaatttcttcgagaaacgtgttggtgattaccaaaaggcttccgttatgtctagcgttaatggtaacggcgcgtttgataaccatgtcttctctctcgacgaagatttttaaagagcgtttgttttgatgctataattacgattctactcttgtattattaccgtgtattatccttggtttttgaattaatgaataattagttgcttttaaaaaaaaaaaaaaaaaaaaaaaagggcggccgctctagaggatccaagcttacgtacgcgtgcatgcgacgtcatagtcttcntataagtcacctaattaat

SEQ ID NO: 86649 - DNA, 545 bp, Arabidopsis thaliana columbia
  unsure (1)..(545): unsure at all n locations
gcttgtggacctaaatcaaaaggaatgactcctcttcaccttgctgccaaaggaggtcacatcgaagttatggacttgcttcttgaacgtggagccaacatggaagctagaacctctggtgcttgtggctggactcctctccatgctgcagctaaagaacggaaaagagaagctgtcaagtttcttgtggggaacggtgctttcttacctgatgatataaccgacagtaggttcaacccgccggttcagtactgtcacggcttggaatgggcttatgaagagaggaagaaactcagtgaagatacttctttatcttgtggagacacttcttgcagttctgcgaattgattcttgtcttttgttatctttcttgcaatggctcataagtcgaagagacacaaaaccaaaggtttgtaatcatgttgtattgaaatatgaaatgatacatttatcaaaaacaaaaaaaaaaaaaaagnnnnnnnnnnnnnnnnnnnnnnnnnnnnnnnnnnnnnnnnnnnnnnnnnnnnnnnnnnnnnnnnnnnnnn

SEQ ID NO: 86650 - DNA, 532 bp, Arabidopsis thaliana columbia
  unsure (1)..(532): unsure at all n locations
catttttcgtttcttcacattcacaaaacatctctctctttcttctcccattcactcactatcttgctcctagaaaaagatggcgagaatgagtttgatgatcatgatgattatggttgctgtgaccatgattaacattgctaagagtgatcccattgcaccatgttacttcatatttggtgactctttggttgataatggcaacaataatcagcttcagtcattagctagagctaattactttccttacggtattgactttgctgccggtccaaccggtcggtttagcaacggcttaaccactgtcgatgttatcgctcagcttttgggtttcgaggactacattacaccttacgcttctgcaagaggacaagacattctccgaggagttaactatgcttccgctgctgccggaatccgagacgaaaccggcagacaattgggaggtcgaatagcatttgcagggcaagtagcaaatcacgtgaacactgtntcacaagtagngaacatacttgggtatcaaaacgaagcc

SEQ ID NO: 86651 - DNA, 680 bp, Arabidopsis thaliana columbia
  unsure (1)..(680): unsure at all n locations
gcgacgtattactggaaaaatgtaaccctcttttttcggcgcttctcccctctcagccggacctttgcccttgcgggaccaaacccacttacattcattgtctctctcaaaacccaccaccttctccggtcctaaacacctctccacccggttcactaaaccggaatcaagaaactggttaatagatgcaaagcaaggactagctgctttagctttatctctaactctcactttctcacctgttggcactgctttagcctctgagttcaatatcctcaacgatggtccacctaaagaaacttacgtagtcgatgacgctggtgttcttagtcgagtgacgaagtcagaatcttaagaagcttttgtctgatcttgaatacagaaagaaactgagactcaatttcatcactgtccgaaagctcaccagtaaagcagatgcgtttgagtatgcaagaccagggttttggaaaaatggnatccttctatttgaggagggnaccaatangggggattgttgttttntaccaggcaggaggangggctttactggtggncctcttttattaagcttttggngaacaatttttntggnnccnctncgaaaatttcccgtccttgaacggcggaanncaacggggggttttnagtgaaagttgtccctnggggacnnnccggcncna

SEQ ID NO: 86652 - DNA, 1215 bp, Arabidopsis thaliana columbia
  unsure (1)..(1215): unsure at all n locations
cccacgcgtccgaaatcttacatttccaccaatccttcacttcctttcacgatccaaaacaaaacacaagaaaatgcaacaaaatcttctccatctctgaactcaaaaactcattcactgagaaaaatggagacccttctctcccctcgtgcgctctctcctcctctcaatcccaaacctttgtcccttcaccagaccaaacccacttcacattcattgtctctctcaaaacccaccaccttctccggtcctaaacacctctccacccggttcactaaaccggaatcaagaaactggttaatagatgcaaagcaaggactagctgctttagctttatctctaactctcactttctcacctgttggcactgctttagcctctgagttcaatatcctcaacgatggtccacctaaagaaacttacgtagtcgatgacgctggtgttcttagtcgagtgacgaagtcagatcttaagaagcttttgtctgatcttgaatacagaaagaaactgagactcaatttcatcactgtccgaaagctcaccagtaaagcagatgcgtttgagtatgcagaccaggttttggaaaaatgggatccttctattgaagaagggaacaataaggggattgttgttttgataacaagtcagaaggaaggagctattactggtggtcctgcttttattgaagctgttggtgaaaacattcttgatgctaccgtctccgaaaatcttcccgtactagcaacggacgaaaaatacaacgaggcggtatatagcagtgcgaaaaggttggttgcagctatagacggtcaaccagatcccgggggtccaaccgtaaaggatagcaagagagaatcaaatttcaagacgaaagaagaaaccgatgagaagcgaggacagttcagtcttgtcgttggaggattacttgtaattgcctttgtagttcccatggcacaatactttgcttatgtctccaggaagtaagtaagtaaactcggttcactctcgtaaaccaaaccgatcaggtcagaactttgatttacctcggttatttggttatggtttcttggtaaattggtttatttgaccggtataagtaaataataacagaaacctnnnnnnnnnnnnnnnnnnnnnnnnnnnnnnnnnnnnnnnnnnnnnnnnnnnnnnnnnnnnnnnnnnnnnnnnnnnnnnnnnnnnnnnnnnnnnnnnnnn

SEQ ID NO: 86653 - DNA, 1071 bp, Arabidopsis thaliana columbia
cttcaagtcttcttctcttgccttttctttcttcttctttatccattaaggtttgatcctctcacttaaattaggattatatatggctacatctgctagaagagcatatggattcgggagagctgacgaggcgactcacccggactccattagagccactttggctgagtttctttccacgttcgtcttcgtctttgctggagaaggctcaatcctcgctctagacaagttgtattgggacacggcggctcacacggggacaaacacgcctggagggttagttctggtggcgttagctcatgcattggccttgttcgcggctgtttctgcagccatcaatgtctctggtggccacgtcaaccccgctgtcacttttgctgctctaatcggaggcaggatctcggtcattcgagctatctactattgggttgctcagcttataggtgctatcctcgcttgtctcttgttgaggcttgccactaatggcttgagaccagtaggtttccatgtagcatcaggagttagtgagcttcatgggctactgatggagatcatacttacatttgctttggtttatgttgtctactcgaccgcaatcgatccaaagagggggagtattgggatcatagcgccactagccatcgggctcatagttggggcaaacattttggtgggaggacctttcgatggagcctctatgaatccggctagagcctttggtccagcattagtgggatggaggtggagtaaccattggatctattgggttggaccgttcattggtggtgcactcgccgcactgatctatgagtacatgatcatccccagcgtgaacgaacctcctcaccacagtacccaccaaccattggctccggaagattactagaccggagcagtcttcatgtagagggttctctctttgtataaatagtctctgtgtttgcttgtgttgtttgtctctttacttgttttgttttcctgccatttcctatgtataattgagtccacaccaaaatctgttttcttgtattgtatatcttacagaataataaagattttcaatgatcggat

SEQ ID NO: 86654 - DNA, 356 bp, Arabidopsis thaliana columbia
ctctctcgttcccttgcccctctccctctctcgtcctcggatttttctcgtgcttcactgataatccagcttgacgatgtcgttgacggagctagacgacgggctggttcgcaagatggccatgggcgcactcttctcggattttggagggaagatacattcggtgggtttccataggactgatgatctattggtcacatccagcgaagatgattcacttcgcctcttcgatatcgccaacgctaaacagccgaagattacataccataagaaacatggcaccgatcgtgtatgctttacccatcatcctagctctctaatttgctcttctcgatacaatttggagtccactggtg

SEQ ID NO: 86655 - DNA, 585 bp, Arabidopsis thaliana columbia
  unsure (1)..(585): unsure at all n locations
tgatgaatcaacaggcattgttgactacgatatgctcgagaaaactgctacacttttcagaccaaagcttattatcgcaggagctagtgcatacagccgagattttgactatcctcgcatgaggaagatcgcagactcagttggtgcttttctgatgatggatatggctcatatcagtgggcttgtggctgcttctgtggtagctgacccttttgagtattgtgatattgttacaacaacaactcacaagtctttgagaggtccgagaggtggcatgatcttcttcaggaaggatccaattaatggggttgatcttgaatctgccgtgaacaatgctgtcttccctggtttgcagggggggccctcataaccacacaattggaggattagcagtctgcttgaaacacgcacgatcaccggaattcaaggcgtaccagaaaagagttgtgtctaactgtagagctctagctaaccggttggttgaactcggggttaagctaggtttctggtggcagcgntaaccactttggttntcgtcgntcttngacccatgggnatggattgtccncgggttttgaaaatntt

SEQ ID NO: 86656 - DNA, 1142 bp, Arabidopsis thaliana columbia
  unsure (1)..(1142): unsure at all n locations
caatcactggcctcattgctcactttgtgtagtgcttacaagaaggaacttgactatactgtgctgtcaaatcttattgctataagctacaaagttgtgaagattggagcagatgcaaatcaagaactgatgtctgggattaaacatttcttcattggcgttttccagtttgctgctgggaaacttggttgggatcctaagcaaggcgagagccatctagatgctatgctgagaggggaagtcttaactgcacttgctgtgtttgggcatgatgagacactaaaggaagcagttcgaagatttgatgcatttttggctgataggaacactccgcttctgcctcctgacattagaagggctgcttatgttgctgtaatgcagagagctaacaaatcagacaaatctggttatgagtctcttctgagagtttatagggaaaccgacctgagccaagagaaaacacgaatcttaggttctttagcatcttgcccagacccccactatagttcaagatgttcttaacttcgtaaggtctaataaggtccgtaatcaagatgcactttatggacttttccggtgtaagttgggaagcacgtaaaagtagcttgtaaatggctacagaaaaagtgggagtatataggaaacacatggggctccggatttctcataacacgcttacataagtgcagttgtatcgccgtttgcgtcgtttgagaaagccaaagaagtggaggagttttttgcaacaagatcaaagccttcgatggcaagaaccttgaagcagagcattgaaagggtacatatcaatgccaattgggtggagagtatcaagaaggaagataatctcccgcagctcgttgctcagctctcttcaaactaaaagaactccgctactcgagaattaactaatcatctgtgactcgtgatgctcatgttttctataagccaaaaacatctgttgtttcttcttctcaacaccgaattttaaaagcacttttcgaacttttggatttgccatcaataaagtttgcctttcgaggtccgttccgaaaaaaaaatgagaaactaagggcggccgctctagaggatccgagcttacggacgcgtgcatgcgaaatcaagcnnnnnnnnnnnnnnnntaa

SEQ ID NO: 86657 - DNA, 510 bp, Arabidopsis thaliana columbia
  unsure (1)..(510): unsure at all n locations
cccacgcgtccgcccacgcgtccggtctgagctgattgcgtgttctcttaaaactccagttcaccgacgaacaacgaagtatcgtggaatccatttcatgggccgaagatttctcacttctcttcagtgaatctgggaaagtaatcgtttttggcttaattctgatttgggttcttacttatatagtcaacatgcttctggtttctcctgcttgtagaggtgtttatcttcagaccatagatccaaagccaattgatttctcagctagagcctcttatgcactttgctttcagattcctacttcaatccctaaaagagagtgtttgatgaggttaggaacggtcttttgttttaatcagaagcatagagagcagacaagttttaagaaacggtatgtatctacgcagaatgtggatcttcctcctattttaccaaagaacaggaggaaaccttatcctattcttttaagaaatccaagnagnggttggaaggtaggaanttntcagatgt

SEQ ID NO: 86658 - DNA, 492 bp, Arabidopsis thaliana columbia
aggcggttttggaagcttctctctccattttctccttctcttcttcttcttcctcttcaaaaccttatctcttttctaaacgctcttcttccttaaaacttactgcccttagtcttcgaattcccagcaatctctctcccgtcttctctctacgttccggcagcgataactcacggcggctcgtctccgtactctgttccgtcgcggagaaagaaacatcggcggatgaagaaacgtcgcaggaggagaagactgaagaaacccagaattcaaatctgaaaaggaagctttttgtattcaatcttccttggtctatgagtgtaaatgacatttccgagctctttggacaatgtgggactgtgaacaatgtcgagattataaggcaaaaagatggaaagaaccgaggatttgcttttgtaactatggcttctggagaagaagctcaagcagctattgataagttcgatacttttcaagtgtcaggggggatca

SEQ ID NO: 86659 - DNA, 631 bp, Arabidopsis thaliana columbia
cgaatctctctctctctcttcaacccctcttctcaatctagggttagggtttcgattctgctagaggttttttttctcccaacttatacttctaagccctctcgtcataagccttgttgactcttcttcttaatttgaagaacttcgtaggctaagcatgtcgtgattatcccaaatttctggtgtttattcaaactccattgttacaaagattttctttgataagttaaagcaatgtatacctccgaggcagcccctgattttgttgttgaccagggcatgtattaccccgttgatgccagttatggctattactgtacaggttatgagtcacccggtgattgggagaaccatcagatgttttttggtgtagatggttcagaagtccaatacacaggtgggcagaatgaaaattctccctatatatgctatacacctagttatggatatgcacagtctccttataatccattcaatccttacatacctggcgcttcaattggcgttgattctgcttttgttgctcctcaacaattttactctattcctccttaccagagtgttgcaacgtcgcctacttttgttccatatgcaattcaacctgagattgtctcgaatagctctacaaact

SEQ ID NO: 86660 - DNA, 526 bp, Arabidopsis thaliana columbia
atctccaggtctctacgactcactatagggaaagctggcacgcctgcaggtaccggtccggaattcccgggtcgacccacgcgtgcggaagtgggttcctttctgcaagatatattgtattgagcctcgtgctcccgaatggtatttctgccataaaatggactacttgaagaataaagttcatcccgcatttgttagggagcggcgagccatgaagagagattatgaagaattcaaagttaggatcagtgctttagtagcaacagcacagaaagtgcctgaggatggttggactatgcaagacggttcaccttggcccggtcatagtgtgcgagatcatcctggcatgattcaggtcttccttggaagtgacggtgttcgtgatgtcgaacacaacgagttgcctcgattagtttacgtttctcgtgagatgagacccggatttgatcaccataagaaggctggagctatgaatggcctgatacgagtctctggggatctatcaaatgctccttaccttctgaat

SEQ ID NO: 86661 - DNA, 554 bp, Arabidopsis thaliana columbia
  unsure (1)..(554): unsure at all n locations
cccctcgatgtcgacggtatccataagcttgatatcgaattcgcggccgctaaagatcaatgctttagtagcaacagcacagaaagtgcctgaggatggttggactatgcaagacggtacaccttggcccggtaatagtgtgcgagatcatcccggcatgattcaggtcttccttggaagtgacggtgttcgtgatgtcgaaaacaacgagttgcctcgattagtttacgtttctcgtgagaagagacccggatttgatcaccataagaaggctggagctatgaattccctgatacgagtctctggggttctatcaaatgctccttaccttctgaatgtcgattgtgatcactacatcaacaatagcaaagctcttagggaagcaatgtgtttcattggatggatcctcagtcaggaaagaaaatctgttatggtcagttccctcaaagggtcgatggggttgttttggcacgttccggactcaaatcgcaatgttgggttttttgaaaccaatnttaaagggttnggggggcaaaagggcntttnncggggga

SEQ ID NO: 86662 - DNA, 592 bp, Arabidopsis thaliana columbia
  unsure (1)..(592): unsure at all n locations
cccccctcgaggtcgacggtatcgctaagcttgatatcgaattcgcggccgcgctttagttgcgactgcacagaaagtgcctgaagaaggttggactatgcaagacggtactccttggcccggtattaacgtgcgagatcaccctggcatgatccaggtattccttggaaataacggtgtccgcgatgtagaaaacaacgagttgcctcggctggtttatgtttctcgtgagaagagacccggatttgaccatcacaagaaggctggagccatgaactccctgatacgagtctctggagttctatcaaatgctccttatcttctaaatgtcgattgtgatcactacatcaataatagcaaagctcttagagaagcaatgtgtttcatgatggatcctcagtcgggaaagaaaatttgttatgtccaattccctcaaagattcgatgggattggataaaggtggcaggtactcttaatccgtattgttgtattcttccgatattaatttgaaagggtttggttgggttaaagggcctttttcggtgggaccnggtttnttttnngggnaagnccttttnggttngtncgngta

SEQ ID NO: 86663 - DNA, 3771 bp, Arabidopsis thaliana columbia
  unsure (1)..(3771): unsure at all n locations
gaattcgcggccgcgtcgatacggctgcgagaagacgacagaaggggattgtcgattcggtttatttcgtctccttcgtcttccactcttactagtgcatgctctgaatctgtatgtaatgggagttcaacagtctggatccattatcctagccgggtcgggtcaaggtctttgagtaagagagacaattcgttttgattcggtgtagaagacatcatgaatactggtggtcggctcattgctggctctcacaacagaaacgaattcgttctcattaacgccgatgagagtgccagaatacgatcagtacaagaactgagtgggcaaacatgtcaaatctgtggagatgaaatcgaattaacggttagcagtgagctctttgttgcttgcaacgaatgcgcattcccggtttgtagaccatgctatgagtatgaacgtagagaaggaaatcaagcttgtcctcagtgcaaaactcgatacaaaaggattaaaggtagtccacgggttgatggagatgatgaagaagaagaagacattgatgatcttgagtatgagtttgatcatgggatggaccctgaacatgccgctgaagccgcactctcttcacgccttaacaccggtcgtggtggattggattcagctccacctggctctcagattcctcttttgacttattgtgatgaagatgctgatatgtattctgatcgtcatgctcttatcgtgcctccttcaacgggatatgggaatcgcgtctatcctgcaccgtttacagattcttctgcacctccacaggcgagatcaatggttcctcagaaagatattgcggaatatggttatggaagtgttgcttggaaggaccgtatggaagtttggaagagacgacaaggcgaaaagcttcaagtcattaagcatgaaggaggaaacaatggtcgaggttccaatgatgacgacgaactagatgatcctgacatgcctatgatggatgaaggaagacaacctctctcaagaaagctacctattcgttcaagcagaataaatccttacaggatgttaattctgtgtcgcctcgcgattcttggtcttttctttcattatagaattctccatccagtcaatgatgcatatggattatggttaacgtcagttatatgcgagatatggtttgcagtgtcttggattcttgatcaattccccaaatggtatcctatagaacgtgaaacatacctcgatagactctctctcaggtacgagaaggaaggaaaaccgtcaggattagcacctgttgatgtttttgttagtacagtggatccgttgaaagagccacccttgattacagcaaacacagttctttccattctagcagttgattatcctgtggataaggttgcgtgttatgtatcagacgatggtgcagctatgcttacatttgaagctctctctgatacagctgagtttgctagaaaatgggttcctttttgtaagaagtttaatatcgagccacgagctcctgagtggtatttttctcagaagatggattacctgaagaacaaagttcatcctgcttttgtcagggaacgtcgtgctatgaagagagattatgaggagtttaaagtgaagataaatgcactggttgctactgcacagaaagtgcctgaggaaggttggactatgcaagatggaactccttggcctggaaacaacgtccgtgaccatcctggaatgattcaggtgttcttgggtcatagtggagttcgtgatacggatggtaatgagttaccacgtctagtgtatgtttctcgtgagaagcggcctggatttgatcaccacaagaaagctggagctatgaattccttgatccgagtctctgctgttctatcaaacgctccttaccttcttaatgtcgattgtgatcactacatcaacaacagcaaagcaattagagaatctatgtgtttcatgatggacccgcaatcgggaaagaaagtttgttatgttcagtttccgcagagatttgatgggattgatagacatgatagatactcaaaccgtaacgttgtgttctttgatattaacatgaaaggtcttgatgggatacaaggaccgatatatgtcgggacaggttgtgtgtttagaagacaggctctttatggttttgatgcaccaaagaagaagaaaccaccaggcaaaacctgtaactgttggcctaaatggtgttgtttgtgttgtgggttgagaaagaagagtaaaacgaaagccaaagataagaaaactaacactaaagagacttcaaagcagattcatgcgctagagaatgtcgacgaaggtgttatcgtcccagtgtcaaatgttgagaagagatctgaagcaacacaattgaaattggagaagaagtttggacaatctccggttttcgttgcctctgctgttctacagaacggtggagttccccgtaacgcaagccccgcatgtttgttaagagaagccattcaagttattagctgcgggtacgaagataaaaccgaatggggaaaagagatcgggtggatttatggatcggtgactgaagatatcctgacgggtttcaagatgcattgccatggatggagatctgtgtactgtatgcctaagcgtgcagcttttaaaggatctgctcctattaacttgtcagatcgtcttcatcaagttctacgttgggctcttggctctgtagagattttcttgagcagacattgtccgatatggtatggttatggtggtggtttaaaatggttggagagattctcttacatcaactctgtcgtctatccttggacttcacttccattgatcgtctattgttctctccccgcggtttgtttactcacaggaaaattcatcgtccctgagataagcaactacgcaggtatactcttcatgctcatgttcatatccatagcagtaactggaatcctcgaaatgcaatggggaggtgtcggaatcgatgattggtggagaaacgagcagttttgggtaatcggaggggcctcctcgcatctatttgctctgtttcaaggtttgctcaaagttctagccggagttaacacgaatttcacagtcacttcaaaagcagcagacgatggagctttctctgagctttacatcttcaagtggacaactttgttgattcctccgacaacacttctgatcattaacatcattggagttattgtcggcgtttctgatgccattagcaatggctatgactcatggggacctctctttgggagacttttcttcgctctttgggtcattgttcatttatacccattcctcaagggaatgcttgggaagcaagacaaaatgcctacgattattgtggtctggtctattcttctagcttcgatcttgacactcttgtgggtcagagttaacccgtttgtggctaaagggggaccagtgttggagatctgtggtctgaattgtggaaactaagatcctcagtgaaagaagagcaaaggagtttgtgttggagctttggaagcaaatgtgttgatgatgatgcaagtgtgtttgtagacgaagatgtgcagtttttactttttacgacttgttaaaccttttttgttacccctaaattaattcttttgttatcatggttatactaatagaattgtttgtttttcttttttacatgtacttttagttattccgtagttattgtataatactgataacgatcatatatacacactttgttnnnnnnnnnnnnnnnnnnnnnnnnnnnnnnnnnnn

SEQ ID NO: 86664 - DNA, 448 bp, Arabidopsis thaliana columbia
  unsure (1)..(448): unsure at all n locations
ctatctatctcttatcaggtaattcgaaagacatcaaaagcaagcaaaagatggctcaaaaggtggaagcacaaggaggtattggaggagatgtatgggatgatggtgctcacgacggcgttagaaaggtgcatgtagggcaaggccttgatggtgtttcgtttatcaatgtcgtgtacgagaatggttcacaggaagttgtaggaggtgaacatggaaagaagtcactaattggaatcgaaacgtttgaggttgatgcagacgactacatcgtagcagtgcaggtgacctacggcaaaatatttggctatgactccggcatcatcacatccataaccttcttttacattcagggggaaaaacccttggcccccctngggtttggttccccccaaaaaagttttttccnnanggaaaaaacgggnggaactttttgggtccntggcgg

SEQ ID NO: 86665 - DNA, 357 bp, Arabidopsis thaliana columbia
agcaaagatgcaggtggtgacaacaatttaattggtcaatttggtgtagggttctattcagcatttttggttgcagatcgggtaattgtgtcaaccaagagccctaagtctgataaacaatatgtatgggaaggagaagcacattcaagcagttttaccattcacgaagatactgacccacaatctctcattcctagaggaactcgtattactttgcatcttaagcaagaagccacaaactttgcagatcctgagcggattcagaagctcgtgaaaaactattcccagtttgtttctttccctatttacacttggcaagaaaaaggatacacaaaagaggttgaggttgaagatgat

SEQ ID NO: 86666 - DNA, 679 bp, Arabidopsis thaliana columbia
  unsure (1)..(679): unsure at all n locations
tgattcgccagctctattcgactcttatagggaaagctggtacgcctgcaggtaccggtccggaattcccgggtcgaccggggcgtgcgctcttcgtcttccttataaactatctctctgtagagaagaaagcttggatccagattgagagagattcagagagtcacatcaccacactccatcttcagatctcatgatttgaactattccgacgtttcggtgttggaagcaactggggggcaaatggaatccgaaggggaaaccgcgggaaagccgatgaagaacattgttccgcacacttgccagatctcgagtgacaatgttggcaagactgttgatgggagatcgtgttgggggcttgtgatatttggtcattcccaggttgtcggccttgctacgaagtatgagaggaaagatgggaatcaatcttgtcctcagtgccaaaccagatacaagaggctcaaagggaagtcctgctattcctggtgntaaagacgaggatggcttagctggatgaaggactgttgagtccaacaacccccgaaggggaaatttctnaacgggtccttggttggnccttaccngngggaaggggngaaatggggacccccnntnaaaaaagggcccccaaanaantccccggccccgggggananaacttccggggnttntggncnnc

SEQ ID NO: 86667 - DNA, 3756 bp, Arabidopsis thaliana columbia
  unsure (1)..(3756): unsure at all n locations
ggactcgcgcgcctgcaggtcgacactagtggatccaaagaattcgcggccgcgtcgactacggctgcgagaagacgacagaaggggatcccaagattctcctcttcgtcttccttataaactatctctctgtagagaagaaagcttggatccagattgagagagattcagagagtcacatcaccacactccatcttcagatctcatgatttgaactattccgacgtttcggtgttggaagcaactaagtgacaaatggaatccgaaggagaaaccgcgggaaagccgatgaagaacattgttccgcagacttgccagatctgtagtgacaatgttggcaagactgttgatggagatcgttttgtggcttgtgatatttgttcattcccagtttgtcggccttgctacgagtatgagaggaaagatgggaatcaatcttgtcctcagtgcaaaaccagatacaagaggctcaaaggtagtcctgctattcctggtgataaagacgaggatggcttagctgatgaaggtactgttgagttcaactaccctcagaaggagaaaatttcagagcggatgcttggttggcatcttactcgtgggaagggagaggaaatgggggaaccccagtatgataaagaggtctctcacaatcatcttcctcgtctcacgagcagacaagatacttcaggagagttttctgctgcctcacctgaacgcctctctgtatcttctactatcgctgggggaaagcgccttccctattcatcagatgtcaatcaatcaccaaatagaaggattgtggatcctgttggactcgggaatgtagcttggaaggagagagttgatggctggaaaatgaagcaagagaagaatactggtcctgtcagcacgcaggctgcttctgaaagaggtggagtagatattgatgccagcacagatatcctagcagatgaggctctgctgaatgacgaagcgaggcagcctctgtcaaggaaagtttcaattccttcatcacggatcaatccttacagaatggttattatgctgcggcttgttatcctttgtctcttcttgcattaccgtataacaaacccagtgccaaatgcctttgctctatggctggtctctgtgatatgtgagatctggtttgccttatcctggattttggatcagtttcccaagtggtttcctgtgaaccgtgaaacctacctcgacaggcttgctttaagatatgatcgtgaaggtgagccatcacagttagctgctgttgacattttcgtgagtactgttgaccccttgaaggagccaccccttgtgacagccaacacagtgctctctattctggctgttgactacccagttgacaaggtgtcctgttatgtttttgatgatggtgctgctatgttatcatttgaatcacttgcagaaacatcagagtttgctcgtaaatgggtaccattttgcaagaaatatagcatagagcctcgtgcaccagaatggtactttgctgcgaaaatagattacttgaaggataaagttcagacatcatttgtcaaagatcgtagagctatgaagagggaatatgaggaatttaaaatccgaatcaatgcacttgtttccaaagccctaaaatgtcctgaagaagggtgggttatgcaagatggcacaccgtggcctggaaataatacaggggaccatccaggaatgatccaggtcttcttagggcaaaatggtggacttgatgcagagggcaatgagctcccgcgtttggtatatgtttctcgagaaaagcgaccaggattccagcaccacaaaaaggctggtgctatgaatgcactggtgagagtttcagcagttcttaccaatggacctttcatcttgaatcttgattgtgatcattacataaataacagcaaagccttaagagaagcaatgtgcttcctgatggacccaaacctcgggaagcaagtttgttatgttcagttcccacaaagatttgatggtatcgataagaacgatagatatgctaatcgtaataccgtgttctttgatattaacttgagaggtttagatgggattcaaggacctgtatatgtcggaactggatgtgttttcaacagaacagcattatacggttatgaacctccaataaaagtaaaacacaagaagccaagtcttttatctaagctctgtggtggatcaagaaagaagaattccaaagctaagaaagagtcggacaaaaagaaatcaggcaggcatactgactcaactgttcctgtattcaacctcgatgacatagaagagggagttgaaggtgctggttttgatgatgaaaaggcgctcttaatgtcgcaaatgagcctggagaagcgatttggacagtctgctgtttttgttgcttctaccctaatggaaaatggtggtgttcctccttcagcaactccagaaaaccttctcaaagaggctatccatgtcattagttgtggttatgaggataagtcagattggggaatggagattggatggatctatggttctgtgacagaagatattctgactgggttcaaaatgcatgcccgtggatggcgatccatttactgcatgcctaagcttccagctttcaagggttctgctcctatcaatctttcagatcgtctgaaccaagtgctgaggtgggctttaggttcagttgagattctcttcagtcggcattgtcctatatggtatggttacaatgggaggctaaaatttcttgagaggtttgcgtatgtgaacaccaccatctaccctatcacctccattcctcttctcatgtattgtacattgctagccgtttgtctcttcaccaaccagtttattattcctcagattagtaacattgcaagtatatggtttctgtctctctttctctccattttcgccacgggtatactagaaatgaggtggagtggcgtaggcatagacgaatggtggagaaacgagcagttttgggtcattggtggagtatccgctcatttattcgctgtgtttcaaggtatcctcaaagtccttgccggtattgacacaaacttcacagttacctcaaaagcttcagatgaagacggagactttgctgagctctacttgttcaaatggacaacacttctgattccgccaacgacgctgctcattgtaaacttagtgggagttgttgcaggagtctcttatgctatcaacagtggataccaatcatggggaccactctttggtaagttgttctttgccttctgggtgattgttcacttgtaccctttcctcaagggtttgatgggtcgacagaaccggactcctaccattgttgtggtctggtctgttctcttggcttctatcttctcgttgttgtgggttaggattgatcccttcactagccgagtcactggcccggacattctggaatgtggaatcaactgttgagaagcgagcaaatatttacctgttttgagggttaaaaaaaacacagaatttaaattatttttcattgttttatttgttcacttttttacttttgttgtgtgtatctgtctgttcgttcttctgtcttggtgtcataaatttatgtgtagaatatatcttactctagttactttggaaagttataattaaagtgaaagccaatatttttttgttaaaaaaaaaaaaaaagnnnnnnnnnnnnnnnnnnnnnnnnnnnnnnnnnnnnnnnnnnnnnnnnnnnnnnnnnnnnnnnnnnnnnnnnnn

SEQ ID NO: 86668 - DNA, 1128 bp, Arabidopsis thaliana columbia
  unsure (1)..(1128): unsure at all n locations
nnnnnnnnnnnnnnnnnnnnnnnnnnnnnnnnnnnnnnnnnnnnnngtcaaataacgataaccacccccgcgtccaacgagatactctcttcttaaaacctcatccacccaaacacaaatgtcttgtaatccttctcttatctttctccttgtgattcctttttatattcctctgatattttctctcagtttgatctcatttgctctgcaatggcgactaccatgaatgctgctgtttctctcacatcttcaaactcttcttcttttcccgctacaagttgtgccattgctcctgaaaggatcaggtttactaagggtgctttttactacaaaagcaacaatgtagtgacaggtaaaagagtgttttccataaaagcacaaatcacaacagaaacagatactcctactcctgcaaagaaagtagagaaagtgtcaaagaagaacgaggaaggtgtgattgttaacaggtacagaccaaaagagccttacactggaaaatgccttctcaacaccaaaatcacagctgatgatgctcctggagagacctggcacatggttttcagccatcaaggagaaatcccgtacagagaaggacaatctgttggtgtgattgcagatggaattgacaagaatggaaagcctcacaaggtcagactttactccattgcaagcagcgctcttggagatctcggcaattctgaaaccgtttctttgtgtgttaaaagacttgtttatactaatgaccaaggagagactgttaaaggagtttgctcaaatttcttgtgtgatttggcacccggaagtgatgttaagctgactggtcctgtacgcaaagaaatgcttatgccaaaggatccaaacgccaccgttattatgcttgccacagggacaggaattgctcctttcaggtctttcttatggaagatgttctttgagaaacatgatgactacaagttcaatggcttagcttggttgttcttgggtgtaccaaccactagctctttgctctaccaagaggagtttgataagatgaaagcaaagggcccccgagcaacttcaagggtgggtttacgcggttnagnangnggaccangcggancgnttaaagggggggaaantttntttncc

SEQ ID NO: 86669 - DNA, 653 bp, Arabidopsis thaliana columbia
  unsure (1)..(653): unsure at all n locations
taatacgactcacttagggaaagccggtacgcctgcaggtaccggtccggaattcccggtgtcgacccacgcgtccgcaaccactagctctttgctctaccaagaggagtttgataagatgaaagcaaaggcccccgagaacttcagggtggattacgcgataagcagagaacaaccgaccgataaaggagagaaaatgtatatccagactcggatggcgcaatacgcagctgagttatgggagttgttgaagaaagacaacacttttgtttacatgtgtggactcaagggaatggagaaaggaattgatgacattatggtctcattggctgcaaatgacggtattgactggtttgattacaagaagcagttgaagaaggcagagcaatggaacgttgaagtctactgatcaaaaagcctttgacatttctgtagcaaagtatagctgaacaaaactgtaattttcgcttctgaatttctgtattttgaagataagttttttagatatgttatactaaaaaaagagttctttaatcattatcatttacttcttcccaaaaaaaaaaaaaaaaagnnnnnnnnnnnnnnnnnnnnnnnnnnnnnnnnnnnnnnnnnnnnnnnnnnnnnnnnnnnnnnnnnnnnnnnnnnnnnnn

SEQ ID NO: 86670 - DNA, 526 bp, Arabidopsis thaliana columbia
  unsure (1)..(526): unsure at all n locations
ancccccaggccaacttgggtatngattccttttggcngannnctnggnttctaggcaaggttcgaggaccggnnaccatggaatgcntgagacgagtaaggcaattgagtgagctgaattggagacagtatgcagcagaggaagtcccagagatgtcaggtcatcttcttaagtatccagttcaagttgatagaacaggcaaagtgagttctcttcctggatgcgagacattcccagatctgggtggcaagatcataggatcgttccttgcactacaagaaaacctcaccatatgaaacttaccttgtaggcttgtagtgatcaacatttgttctttatttcttccacttcaagaaatctctctcagtgtgatctgattgaaagtgtgcctttagggtctagttgtgcttttcaaatttatgagctgtaaatctatttattacaaaatttcaattgatctatcaaagtgtgtgttttggatttttactatatgatttaatttagtattgtggtcatatctttagt

SEQ ID NO: 86671 - DNA, 981 bp, Arabidopsis thaliana columbia
  unsure (1)..(981): unsure at all n locations
atgannnnnnnnnnnnnnnnnnnnnnnnnnnnnnnnnnnnnnnnnnnnnctgcaggtaccggtccggaattcccgggtcnacccacgcgtccgcgctggatggcttcaaaacctcggggaatagggaaaggaagaacttcttttgacgattctttgcttaggataaacagaattcctgacatcatgggactttctgaagcttcttctgctaatgataatgatccagagtcttggcatgttcaggttttccgttctattgattcgacttcagtcaaagggtttccaaaggacccagaggaagctactggaagaaatcttctatgtgggaagaacattctcatagatatgagcatacatgcagcttatgttaaggcgatacgatctgctcagcacttcatttacattgagaaccaatattttcttggatcttcattcaactgggattcaaacaaggacttgggtgctaataatctaatcccgatggaaatcgcgctgaagattgctaacaaaattagagcatgggaaaagtttgctgcttatattgtcattccaatgtggccagaaggtgctccaacaagtaatcctattcaaagaattctctactggcagcacaaaaccatgcaaatgatgtatcaaaccatctacaaggcacttgtggaagttggtcttgatggccagcttgagccacaagactttttgaactttttctgtcttgggaccagagaggttggaaccagagaggttcctgatgggacctgttagcgtatataatagtccccggaaggccacctcagcagctaaatgctgcacaggtacaagctttgaagagtcggggattcatgatatatgtccattccaaagggntggtagngggtgatnagttntcnttaattggtncccggattttaancccngggtnntttggnggnccttggggcccctttaaacccttttggggggggtttnnccccccccttttgc

SEQ ID NO: 86672 - DNA, 4119 bp, Arabidopsis thaliana columbia
  unsure (1)..(4119): unsure at all n locations
gaattcgcggccgccccttcgtttcctcccaccttcttcttcacaaaaatctgagatttcatataaatttgcccatatttttagatctccatttgatctgagtttgtattatcacaaagttttatcttcttttttttcactcttcagtcttgatctctcgattattgcccaccaagtgatcgatcttttgtctcactgaactcggttagcccaccaagtgatcgatctttgtctcactgaactcaggttacgctgagattgatctaacagctgaaagtttctgactttttgggtttttgatttcgattttcatggcgtatcatccggcttatactgagactatgtctatgggaggagggtcaagccatgggggcggccagcaatacgtgccgtttgctacgagtagtggctctttgagggtcgaattgttacatggtaacttagacatttgggttaaggaagctaaacatcttcctaatatggatggttccataacagacttggtgggatcgttgtctgggttaggtcggaagaaagtggaaggtcgagagtcttctaagatcactagtgatccttatgttactgtctctatctctggtgctgtgattggtagaacttttgttattagcaatagtgagaatcctgtgtggatcgagcattttgatgtaccggttgctcatagtgctgctgaagtacattttgttgtgaaagatagtgatattattggatcacagatcatgggagctgttggaatcccaacggagcagctgtgttcggggaataggatcgaagggctctttccgatacttaatagtagtgggaagccttgtaaacaaggtgctgtgttgggtttgtctattcaatacactccaatggaaagaatgagactttaccaaatgggtgttggttctggtaatgagtgtgtaggagttcccggtacatacttccctttgaggaaaggcggtagggttactctgtatcaggatgctcatgttgatgacggtacccttccgagtgtacatcttgatggtgggattcagtatagacatggaaagtgctgggaggatatggctgatgcaataaggcaaggcagaaggttgatttatatcacaggttggtcagttttccatccggttaggctggttcgtcgtaccaatgatcccaccgaaggtacattaggggagttgcttaaagtcaaatctcaagaagagttagagtgttggttttggtgtggaacgatccaaggagtcttctgggattcgaaaacacaaggagttatgaacacaagcgatgaggagactcgccgttttttcaagcattcgtcggtgcaagttctcctttgtcccagatctggagggaaaggtcacagcttcataaaaaaatctgaagttggaacaatctacacgcatcatgaaaaaactgtgattgtagactctgaagcagctcagaaccgaagaaagatcgtagcatttgttggagggctagatttgtgcaacggacgatttgatactcccaagcatcctctcttcaggacattaaagacactccataaagatgacttccacaacccaaattttgtgactactgcggatgatggaccaagagaaccatggcatgatcttcacagcaagattgatggtccagctgcatatgatgtacttgctaatttcgaggaacgctggatgaaggcttcaaaactcgcggaattgggaaacgaaaatacttcttctgatgattctttgcttaggatagacagaattcctgacatcgtgggactttctgaagcttcttctgctaatgataatgatccagagtcttggcatgttcaggttttccgttccattgattcaagttcagtcaaagggtttccaaaggacccaaaggaagctactggaagaaatcttctatgtgggaagaatattctcatagatatgagcatacacgcagcttatgttaaggccatacgatctgctcagcacttcatttacattgagaaccaatattttcttggatcttcattcaactgggattcaaacaaggacttgggtgctaataatctaatcccgatggaaatcgcgcttaagattgctaacaaaattagagcaagggagaagtttgctgcttatattgtcattccaatgtggccagaaggtgctccaacaagtaaccctattcaaagaattctctactggcagcacaagacaatcgaaatgatgtatcaaaccatctacaaggcacttgtggaagttggtcttgatagccagtttgagccacaagactttttgaactttttctgtcttggaaccagagaagttcctgttggaacagttagcgtatataatagtcctcggaagccacctcagccaaacgcaaatgcaaatgctgcacaggtacaagctttgaagagtcgaagattcatgatatatgttcattccaaaggtatggtagtggatgatgagtttgtcttaattggttccgcgaatatcaaccagagatccttggaaggaactagagatactgaaatcgccatgggagggtatcagccacactattcatgggctatgaaaggttctcgactcatggtcagatcttggtatagaatgtcgttatgggcagaacatctagggtttctagagcaaggtttcgaggaaccagagaacatggaatgcgtgagacgagtaaggcaattgagtgagctgaattggagacagtatgcagcagaggaagtcacagagatgtcaggtcatcttcttaagtatccagttcaagttgatagaacaggcaaagtgagttctcttcctggatgcgagacattcccagatctgggtggcaagatcataggatcgttccttgcactacaagaaaacctcaccatatgaaacttaccttgtaggcttgttagtgatcaacatttgttctttatttcttccacttcaagaaatctctctcagtgtgatctgattgaaagtgtgcctttagggtctagttgtgcttttcaaatttatgagccggtaaatctatttattacaaaatttcaattgatctatcagagcacaatgttcagcctccccagtggttactgatcaaagaaagaatgttgcagcaagtcaagatgataacattgtgctaatgaaccaatacaatacatctgaaccgcctccaaatgctccaagaagaaacgacaccagcttttacactggagctgattactaaacggtgggcggccgtgaattcctgaattcttggccgggacagagttcataccctacgatgaactctgtcaacaatatacagttcagagatcccaacacagcttatacatctgcaatggctcctgcttcactctccccaagccctagttccgttagcccgcatgagtacagttccatgtttcacccattcaacagtaaacccgaggggttacaagaccgggattgttccatggatgtagatgagaggagatacgtctcttctgcaaccgaacatagtgcaataggcaatcacattgatcagcttattgagaagaagaacgaagatggctattcattatccgtcgggaaaattcagcaatctcttcaacgagaagccgctttaaccaaattccgaatgaagcgaaaggacagatgttatgagaaaaaggttcgttacgagagccggaagaaattagcagagcaacgaccacgaatcaaaggccaattcgttcgtcaagtccaatccacacaagctccatagtgatccaacaaattgatatattatatacagttcaattttgtatcatcaactagaggaattttgttttctccgatgcagaagctgttctttgtacaactaattccacatacgttagatttggtgacacatttgtgtgtacatacacatctttcgagcttgttgttgagttttagttagaatctacgttagatctgtaactacatacatttggattacgtttctgtaacttgcaagacgaattagaaagattgacaaaaaaaaaaccaaagggcggccgctctagaggatccaagcttacgtacgcgtgcaggtgacgtcatagatcttntatagtgtgtaccccattattatcccccccccgcggcggcgccttctaccccgctctga

SEQ ID NO: 86673 - DNA, 414 bp, Arabidopsis thaliana columbia
gcgtccggatgaaagagcgtgtcaagtttcttcacatgttattgcttaccattgaagatatcaacggttaccctcttgttcttgggggtagcgtcaacaagaacatggttccggttcttgattatctcgggaaactaggcgtcaggaaatcgactttcactgagtttcttagaagatacccgcaggttcttcactctagcgttgttatagatcttgcaccggtggttaagtatcttcaaggactggatattaaacccagtgatgtacctcgggtgcttgtgaggtatccagaagttttggggtttaagctggaagggactatgagcacatcagtcgcttatttggttggtataggtgtagctaggagggagattgggggtattttaacacggtaccctgagattttgggaatgc

SEQ ID NO: 86674 - DNA, 763 bp, Arabidopsis thaliana columbia
  unsure (1)..(763): unsure at all n locations
gccttccgaacatttgaagcgtttaagattccatcntatgaagagcaactctctagatgggaatgacctgaggatgatcttatatggtggcctatcgtgggaataaaggacccatgtcgcccagtggtaaaaattcaagtttacctggtgaaccagcctgaatcaagggtcggatggtgaccggtgagaacattcagactgccaaagcaattgcactggagtgtggtatattagcttcagactcagatgctagtgagcctaatctgattgaaggaaaagtatttcgatcctattcagaagaagaaagagataggatttgtgaagagatatctgtaatgggtagatcatcacccaatgacaaacttcttcttgtgcaatcgctgaagaggaggggacacgtcgtggctgtgactggtgatggaaccaatgatgctcctgcactgcacgaggcagatataggtctcgcaatgggtatccaaggcaccgaagttgcaaaggaaaagtcagacatcattatcttggatgacaactttgaatccgttgtgaaggttgtccgttggggtcgatctgtgtatgcgaatattcaaaagttcatccagtttcagctcacggttaatgtcgcagctcttgtcatcaatgtggtggctgccatatccgcgggtgaagttcctctaacttgcagtacagctccttttgggtcaatcttataattgggtactctttggggctcttgctttnccactgggcnccaaccgntnaattt

SEQ ID NO: 86675 - DNA, 2079 bp, Arabidopsis thaliana columbia
  unsure (1)..(2079): unsure at all n locations
gtcgacccacgcgtccgcatgactagtcataacctttaaatcacttctgctttttttctgtttctcttttgatttattcaaagacaacaaagttttgtttttgacaaaaaatctgatctttgtttgttcgtttgtttgttacatggggatgaagaaacaatggcaaccggagaaaacagaacggtgccggacaatctaaagaaacagctcgcagtttcagttcgaaacattcaatggagttatggaatcttctggtctgtctctgcttctcaaccaggagtgttggagtggggagatggatattacaatggagacataaagacaaggaagacgattcaagcagcagaagtcaaaattgaccagttaggtcttgagagaagtgagcagcttagagagctttatgaatctctctccctcgctgaatcctcagcttccggtagctctcaggtcactagacgagcttccgccgccgctctctcaccggaggacctcaccgacaccgagtggtactacttagtatgcatgtctttcgtcttcaacatcggtgaaggaatccccggaggagcgttatccaatggagaaccaatatggctttgtaacgctgaaaccgccgatagcaaagtcttcactcgttctcttctagctaaaagtgcttcgcttcagacagtggtttgcttcccgtttcttggaggagtccttgagattggcacgaccgaacatattaaagaggacatgaacgtgatacaaagtgttaagacgttgttccttgaagctcctccatatactacaatatcgacaagatcagactatcaagaaatttttgatcccttaagtgacgataaatacactccggtgtttataaccgaagcttttccaacaacttctactagcgggtttgagtaagaacctgaggatcatgattcgttcatcaacgatggtggtgcgtctcaggtacaaagctggcagtttgtgggtgaagaaatcagtaactgcattcaccaatcgttaaattcaagcgattgcgtttcccaaacgtttgttggaacaaccgggagacttgcttgcgatccaaggaagagtaggattcaacggttaggtcagattcaagaacagagtaaccatgtaaatatggacgacgatgttcattaccaaggcgtgatatcgacgattttcaaaacaacgcatcagctaatactcggaccgcagtttcagaacttcgataagcggtctagcttcacaaggtggaagcgatcatcatctgtgaaaacattgggagagaaatcgcagaagatgataaagaagatactcttcgaggttcctttgatgaacaagaaagaagagttgttaccggacacaccagaggaaaccgggaaccatgccttgtccgagaagaaacgccgcgagaaattgaatgaacggtttatgacattgagatcaatcattccctcaattagtaagattgataaagtgtcgattcttgatgatacaattgagtatcttcaagatttacagaaacgggttcaagagttggaatcttgtagagaatctgctgatacagagacacggataacgatgatgaagaggaagaaaccggatgatgaggaggaaagagcatcagcgaattgtatgaacagcaaaaggaaggggagtgatgtgaatgtaggagaagatgaaccagctgatatcggttatgctggtctaacggataacttaaggatcagttcattaggtaacgaggtggttattgagcttagatgcgcttggagagaagggatattgcttgagataatggatgtgattagtgatctcaacttggattctcactcggttcagtcgtcaaccggagacggtttactctgcttaactgtcaattgcaagcataaagggacaaaaatagcaacaacaggaatgatccaagaggcacttcaaagggttgcatggatatgttaaggattcaaggtttagatttgacaaaattagctttttctctggtttggtttcccaattttcggtaatcagtgattctaaccgagtttttgtgattttggnnnnnnnnnnnnnnnnnnnnnnnnnnnnnnn

SEQ ID NO: 86676 - DNA, 445 bp, Arabidopsis thaliana columbia
  unsure (1)..(445): unsure at all n locations
ctngaanttcgctacgtcgatcttcttccggaaaatggatgggagatcgatcttgatgctgtcgaggctcttgcagacgaaaacacggttgctttggttgttataaaccctggtaatccttgcgggaatgtctatagctaccagcatttgatgaagattgcggaatcggcgaaaaaactagggtttcttgtgattgctgatgaggtttacggtcatcttgcttttggtagcaaaccgtttgtgccaatgggtgtgtttggatctattgttcctgtgcttactcttggctctttatcaaagagatggatagttccaggttggcgactcgggtggtttgtcaccactgatccttctggttcctttaaaggaccctaagatcattgagaggtttaagaaatactttgatattcttggtggaccagctacatttattcaggctgcagtt

SEQ ID NO: 86677 - DNA, 711 bp, Arabidopsis thaliana columbia
  unsure (1)..(711): unsure at all n locations
ccggcccgtaatcccggtcgccacgcgtccgaatctctctctctcacactcactgtaataaacacaaatgacgagttcttctgaatcaactcgcaagggtctgaccaaaatcgccacgaaccggttgcagaaagagttcatggagtggcaaaccaatcctccttctggtttcaagcacagagtctctgataatctccaacgatggatcattgaagtgcatggagttccaggaactctttacgccaatgaaacttaccaacttcaagttgagttccctgagcattatcctatggaagctccacaggttatctttcagcatccagctccacttcatcctcatatttacagcaacggtcacatttgtttagatgtcttgtatgattcgtggtcaccggcgatgaggctaagttccatctgtctcagcattctctcaatgctctccagctcatccgtgaagcaaaagccgaaagacaatgaccattacttgaaaaactgcaaacatggaagatctcccaaagaaactaggtggcgtttccatgacgataaagtataacatctcctataatattgtgatttcaaacgaattgtaagatctcaggtcgagttcttgatctgttgctatctttaaaacaagaacagcttctttctncagttttaaaaaaaaaaaaaaaaaaaaaaaaaaaaaaaaaaaaaaaaaactcgctcgtgccg

SEQ ID NO: 86678 - DNA, 375 bp, Arabidopsis thaliana columbia
gaactcttgttgcttccctctcttcatctttgcattcgttatctttctccggtgtttaagtcccattgaagctgccacgtgtcatcctgatgacgaggcgggtcttttagcttttaaatcgggtataactcaagatcctacgggtattctcagctcttggaagaaaggtactgactgctgttcatggaagggtgtcggttgtctcaccaaccgcgtcaccggactcactatcaacggacaatctgatgttactggaagctttctttctggcactatctcgccgtcattggccaaactccaacaccttgttggtatttacttcaccaatcttcgaaacatcactggttcttttcctcaattccttttccaattacc

SEQ ID NO: 86679 - DNA, 1920 bp, Arabidopsis thaliana columbia
  unsure (1)..(1920): unsure at all n locations
atgatctannnnnnnnngcgtccgcccacgcgtctgggaaaatggagagcgacgaagcagcagcagtgtctcctcaagcaacgacaccgagcggaggaaccggagcttctgggccgaagaagagaggtcggaaacctaaaaccaaggaagattctcagacgccgtcgtctcagcaacagagcgatgttaaaatgaaagaaagtgggaagaaaacgcagcagtcgccgagtgttgacgagaagtactctcagtggaaaggtctcgtccccattctctacgactggctcgctaaccataacctcgtctggccttcactctcttgcagatggggtccgcagcttgagcaagcaacctacaagaatcgccagcgtctgtacctctcagagcaaactgatggaagtgtgcccaatactttggtcatagcaaattgtgaagttgttaagccaagggttgctgcagcagagcacatttctcagttcaatgaagaagcacgttctccatttgtgaagaagtacaagaccatcattcaccctggagaggttaacagaatcagggaactcccacagaatagtaagattgttgctactcacaccgacagtcctgatgttctcatttgggatgttgaaacccaaccaaaccgtcatgctgtgcttggagctgcaaattcccgtccagatttgatactaactgggcaccaagataatgctgaatttgctcttgccatgtgcccaacggaaccctttgtgctctccggaggcaaggacaagtcagttgttttgtggagtatccaagatcacatcacaacgattgggacagattccaaatcatctggatctatcatcaaacagactggtgaaggtactgataagaatgagagtcctactgttggcccacgaggtgtatatcatggccatgaagatacagttgaagatgtggcattcagcccgacgagtgcacaagaattctgcagtgttggtgatgattcttgccttatactatgggatgcgagaactggcacaaaccctgtcacgaaggttgaaaaagcgcatgatgctgatcttcattgtgttgattggaatcctcatgacgacaatctgatcctgacagggtcagcagacaacactgtccggttgtttgatcgtaggaagcttaccgctaatggagttggttcgcctatttacaaatttgagggacacaaagctgctgttctttgtgttcagtggtctcctgataagtcatccgtctttgggagctctgcagaagatggtctcttgaacatctgggattatgacagggtcagtaagaagtctgatcgtgcagctaaaagccccgctgggctcttcttccagcatgctggtcacagggacaaagttgttgatttccactggaatgcttcagacccttggactattgtcagtgtttctgatgactgtgagactactggtggaggtggaacattgcagatatggcggatgagtgacttgatttacagaccagaagaagaagtcgtggcagaattggagaagttcaagtcgcatgttatgacttgtgcctccaagccttaagagtaaagaaaacccattgtctatctatctatcgcctatggtaaactaatgcgggttttagcgaggagtcttggtttttgtaaggctggtttgtcttttgagatattggtggtagcttttaggacctttccatatcagttaggggtacatggttctggttcatgatcctgtttcatcagactcttaggtgctgttttgttcaactgagatgttaatcaaatcggaccaactttatgtgttttggtttaaggtttcaatacttggcctgaacctnnnnnnnnnnnnnnnnnnnnnnnnnnnnnnnnnnnnnnnnnnnnnnnnnnnnnnnnnnnnnnnnnnnnnnnnnnnnnnnnnn

SEQ ID NO: 86680 - DNA, 737 bp, Arabidopsis thaliana columbia
  unsure (1)..(737): unsure at all n locations
aattcccgggntcgagcccaacgcccgtccgggcaagaaagcttccaaattggcananntgagaagaaagtctctgtatgtaatnncgactanttcatcntnnccaaaatgggagagagtnnactaacantnnatcgcggacgctgnnngaacggctttaaatacnnncctcgagaaacccnnaaggtnnatggacccagccanngaaannggcagccnnngcatcaaccagcaannnaataatnngcaacttgngnnattcaagggtggcnnagcaatanntgggttctcaatggtnngtaaacgatgcagttattcggnnggccggacagtttcaaattatggacaaccttacanagttctcgggtgggatggtcagcccgtccttcagtcttccggttttacaccgcctctgctttacactgctacccaaacggcttatatgacttcaccagctcatgtctataacatgcagtctcctgctgtttattctcctcagtatggttatggaccatacaccaacatgatccctcagtttatgcctggatacccttcccatggttctgttcctgttgttgtcagtccagatttcattcctcagttatctgggccaagtgcaggaagtgtggtccatggaggtgaaatgcagtatgcggagaagctctatgttccaccaggacaaccttcttttccagattctatgtatatgcagtactgtcaacagtcatttgggcaga

SEQ ID NO: 86681 - DNA, 589 bp, Arabidopsis thaliana columbia
cccacgcgtccgtggaaatggttctatgctggttactggtgttggagtcaacactgaatggggattgctgatggccagtatttctgaagacaaccgcgcggccgctcccttgcaggtgcgcttaaatggggtagctacttttattggttcaattggcttagcggtggctgctgctgtgctagtgattcttctgactcgatatttcactggtcacactaaagacaataatggaggtcctcaattcgttaaaggcaagacaaaagtcggtcatgttattgatgatgtggtcaaagtccttaccgtagcggttacaattgtcgtagtggcagtgcctgagggtcttcctttggctgttactttaacccttgcctattcaatgaggaaaatgatggcagataaggctttggtgcggaggctatctgcttgcgagacaatgggctctgccaccactatttgcagcgataaaactggaacactaactctgaatcagatgactgtggttgagtcttatgctgggggcaagaaaacagatactgaacaattgccagcaactatcacttcgctagtagttgaaggaatatctcaaaac

SEQ ID NO: 86682 - DNA, 323 bp, Arabidopsis thaliana columbia
acaacactgagagagacttttcttttaaattccttcaatttttttttgttgttgtaaagaataataatttattcgattgaatttgtttattcgtgtctttgtttttactcaatcccctgtttccggttctgttcgattcttctctgtctctgttttgtttttcgtcattttgcctaaagccacatgcaacagtgattaactgaatttttattatccatatccattttgattcgccggaaagtttattcttttccggcgacaaatgcgaaagattccgaaaacccattttaaccaaatcaattctatgacgatgtctatattca

SEQ ID NO: 86683 - DNA, 1132 bp, Arabidopsis thaliana columbia
  unsure (1)..(1132): unsure at all n locations
nnnnnnnnnnnnnnnnnnnnnnnnnnnnnnnnnnnnnnnnnnnnnnnnnnnnnnnnnnnnnnnnnnnccacgcccacgcgtccgtctttcttcttcctgattggaattttagggcttttgaaagcacgaacgcgtgaagctctaatcgagaaaaaaatggaggttttggataggagagacgatgagatcagggactcgggaaacatggacagcatcaagtcacactatgttaccgactctgtttccgaggaacgccgctctcgtgagctcaaggatggtctccatcctttacggtacaagttttcgatatggtacactcgtcgcacaccaggggttcggaaccagtcttatgaagataacatcaagaagatggtagaattcagcacggttgaaggattttgggcctgctactgtcaccttgctcgttcttctctcttgcctagtccaacagatcttcatttctttaaggatgggattcgtccattgtgggaggatggtgccaactgcaatggaggaaagtggatcatacgtttctcaaaagttgtatctgctcgcttctgggaggatctgcttcttgcgttggtaggcgaccagcttgatgatgctgataacatatgtggggcagtactgagtgtccgtttcaacgaggacatcattagtgtatggaatcgcaatgcttctgaccatcaggcagtgatgggtttgagagactcaatcaagcggcatttgaagttgcctcatgcatatgtcatggaatacaagccacacgatgcttctctccgcgacaactcttcctacagaaacacatggctgagaggataggcccaaagtcgatgattgtatcatgtaatgtggagaagatttgggaagctcatctgcaacctgggaagatatctggattgaaccctgtatccaataccatactgtaccggaggcttacaatatcagaaaaacaaaatccgggctacttctgtgtcagtatgtgttcatttcgtttttcttttacagtacatcttgttaacttcaatggtttgactcttgatcaaaactataagggttaattttcaaaaaaaaaaaaaaaagggcggccgctctagaggatccaagcttacgtacgcgtgcatgcgacgtc

SEQ ID NO: 86684 - DNA, 1000 bp, Arabidopsis thaliana columbia
  unsure (1)..(1000): unsure at all n locations
atacgactcactttagggaaagctcgtacgcctgcaggtaccggtccggaattccctgggtcgacccacgcgtccgcagcgttgaaacagaaaccgatctcgtcgctgattctcttttcttcggatccttctagataatggctcgatctttctctcgttcactttctctatccaaaggccgtttcgccgccgcgtcatcctctctcctcccttcgtcgcaccttgtttcattccgatctcaatcttccgatcgtcggggagatctgtacgagattgatacctccgcggcttctcaatcgccgtcggatcctttaatacagaagctagaagacgccgttcaccggatttttgtgcgccgagctcagcctgattggctcccttttgttcctggtgcgtcttattgggtccctcctcctggatctggatctcagtctcatggaatcgctcagctcgttgtgaaactcgcgaatccgttaacacacgaagaatctttatctaccaattcttctcatggatggccttcctccgattatttccttaaaggtgttcaacctcaattgatgggggccaagcccgggacaacttcaaattccgagtctcactctgaggacgaggaagtgtaaaaatgacactgcttgtttgggctcttcaggatctcttgtcaagaccaagagctgccgaattcggacaaccaagagcaagtgaaaagacgtgaaatagaacgaccatatttctatacctgataccaaaatgtggaatatcgaataagactagtgttgtaggcttgtgtagcatgtcccgctgtttctcttttaaacagttgttgtatatgtatatctctgtttccttgctctttcacttatttaacaaagagttcatgttaatgaaattggaaatgaggtactcttagataaaaaaaaaaaaaaaaaaagnnnnnnnnnnnnnnnnnnnnnnnnnnnnnnnnnnnnnnnnnnnnnnnnnnnnnnnnnnnnnnnnnnnn

SEQ ID NO: 86685 - DNA, 341 bp, Arabidopsis thaliana columbia
atggcgacgacgacgagttgttcgcttctcctttcttccactctcttccttcactctcctccttcttctcacctctccttcttcaatctcgcttcttcacgatcctctccaatttctcgttacccaatccgatccaaacgctatttccgaatcctctcgaagctttcactaaacgacaacaacagagacgacgatgatgatactcttcattttactccgttctccgccgttaaacctttcttcctcctctgtacctccgtcgcgttatcgttttcactcttcgccgcttctcccgccgttgaatctgcctcggggtttgtagttagtactccgaagaaact

SEQ ID NO: 86686 - DNA, 1588 bp, Arabidopsis thaliana columbia
  unsure (1)..(1588): unsure at all n locations
cccacgcgtccgactaaatggcgacgacgacgagttgttcgcttctccttcactctcctccttcttctcagctctcaaattcaacctccttcttcaatctctcttcttcacgatcctctccagtttctctctacccaatccgatccaaacgctacttccgaattctctcgaagcttccactaaacgacaacaacggtgacgatgatggagatactcttcttcttactccgttctccgccgttaaacctttcttcctcctctgtacctccgtcgcgttatcgttttcactcttcgccgcttctcctgccgttgaatctgcatcggcgtttgtagttagtactccgaagaaacttcagactgatgagctcgcgacggttcgtttgtttcaagagaacactccttccgttgtttacatcactaatctcgccgtgaggcaggacgcgtttacattggacgttcttgaggtacctcaaggctctggttcaggatttgtgtgggataagcaaggtcatattgttaccaattatcatgttattcgtggtgcttctgatctcagggtcactcttgctgatcaaacaacatttgatgcaaaagttgttggatttgaccaagataaggatgttgcagtattacgtattgatgcaccgaaaaacaaattaagacctatacctgttggagtctctgctgatctgcttgttggccagaaagtctttgccattggcaatccttttggacttgatcatactctcacaactggtgttataagtggtttgcgaagagaaattagttctgctgcaactggtcgtccaattcaagatgtgatacagacagatgcagccattaaccctggtaacagcggaggacctcttctagatagctcaggaacgttaattggtataaacacagccatttattctccttctggtgcatcttctggagtgggcttttcgatcccagttgatacagttggtggtatcgttgatcagctggtgagatttggtaaagtcaccagaccaatcttaggtatcaaattcgcaccggaccaatctgttgagcaattgggagtgagcggtgtgctcgtcttggatgctcctccaagtggtccagccggcaaagccggacttcagtcaacgaaacgtgatggttacgggagactaatactaggagacataatcacgtcggtgaacggtacaaaagtctctaacgggagtgatctgtaccggattctcgatcaatgcaaagtcggtgatgaggtgaccgtagaggttctaagaggcgatcacaaggagaaaatctctgtaactctcgaacctaagccggacgagtcttagaaacgtcgttgaaagaagtaaatatataacgtgtagtaaaaaagaaagtccggtgggttatttctgtatatcaattgttcggaaaatagatcgtccaattgtgtacataaaaaatcagtttacatttgcatacatgcgaaaggtaaccggaaataaccaaaaaaaaaaaaaaaaaagggcggccgctctagaggatccaagcttacgtacgcgtgcatgcgacgtcatagnnnnnnnnnnnnnnnnnnnnnnnncaa

SEQ ID NO: 86687 - DNA, 1195 bp, Arabidopsis thaliana columbia
  unsure (1)..(1195): unsure at all n locations
ccnnnnnnnnnnnnnnnnnnnnnnnnnnnnnnnnnnnnnnnnnnnnnnnnnnnnnnnnnnnnnnnnnnnnnnccacgcgtccgcggacgcgtgggcggacgcgtgggttttgcacaacttcaattttgtccctcaagattctccttattacaaaacgtccccttttcccacatcatccttcttcaacgttcgctttcccatcaagaacaaccaaatctcttgtaacaaagcaaagaatttgagaatggatccgtctaagggaatccaagaacagaggattgtgattccaaacagacacaacgagaagctggttggtctgcttcatgaaactggttctacagacatcgtagtcttgtgccatggctttcgatcaaacaagagtaaccaaataatgaataatgtggctgctgctatacagaaagaagggatcagcgcttttcgttttgatttctccgggaatggagagagtgaaggcagtttctattatggtaactataaccatgaagctgatgatttacattctgttgtccaatacttctctaacaagaaccgtgtggttcctataatcctcggtcacagtaagggaggtgatgttgtcctcctctacgcctccaagtatcatgatgtccgcaatgtaatcaatctctcgggacgttatgatcttaaaaagggtataagagagcgtcttggagaagattttttggaaagaattaagcaacaaggattcatcgatgttggagatggaaaatcggggtatcgtgttactgagaagagcttaatggacaggttaagcactgatattcatgaagcttgcctcaagattgacaaagagtgcagggtcttgacggttcatggatcggaggacgaggtaatacctgtggaagatgcgaaggagtttgcgaagatcataccaaaccacaagctggagattgtggaaggagctaatcatggttatactgagcaccaaagtcaattagtttcaacagttatggagttcataaagacagtcattgtgaagaacaactagaattgagttacgtttgccttttaaatcatgaaagtttgtaattcatttttaagctacgaaaaactgagaaaatccaaaaaaaaaaaaaaaaaagggcggccgctctagaggatccaagcttacgtacgcgtgcaggcgacgtcataagctcttctatagttgttccta

SEQ ID NO: 86688 - DNA, 421 bp, Arabidopsis thaliana columbia
agaaaaacgcgtctccgagaggaaaatttagagaaaagcttctcgcgatcgcatcgggctcgtagatcgatctcctcctccatccaatcttccgttttcgtattcaccgtccggtaagaccttccggtacttgtgaatcggagaagaggaaggagaaaaattatcgcgttcctggaaattgaatttctagggtttcgtttttttctgaattattctgattctgatttcgtcaagggtgtttttcttaattggttgattgatcgtctttctagttcaattgttggaaagtaattgaacatctattgaaatctgcttctcgtgatttgattctgggtttcgttgattggtttttttcgaggggtttgtttgttttatccttttttatttctataagatcaatttctcattgagaagaatacga

SEQ ID NO: 86689 - DNA, 618 bp, Arabidopsis thaliana columbia
gcaaaactgaatctggaattgtcgtcgggatgggttctaagtccgttgttgacatgatcgaagctgccgcgcgggcagatttttctggtttacacgtgaatgggcacatgaatgggttggcaccaggtgcacttaacgaaaccacgtctgcatcagaagatatccacaggcagccttttgtaataggtgttgctggaggcgcagcatcgggaaagactactgtttgtgatatgataatccagcaactgcacgatcagcgtgttgcacttattaacctggactcgttctatcataatctgactgaagaagaacttgctagagttcatgaatacaactttgatcatccagacgcatttgacacagagcatttattgtcttgtatggagaaattgaggcaagggcaagctgtagatattccaaaatatgattttaaaacttacaggagcagtgttttcagaagggtaaatcctacagatgtaataattcttgaagggatacttttgttccatgatccacgcgtccgaaagttgatgaacatgaagatttttgtttgcacagatgctgacgttcgtttggcaagaaggataaaaagagatactgtcgagaatggtagagata

SEQ ID NO: 86690 - DNA, 618 bp, Arabidopsis thaliana columbia
gccgccccccgggtggactgtatcgataagctagatatcgaccttgctgccaatggacgcgtaccaaccaccacctcaatacctgagaccgccgtctggaccaccgcctccgacggatccttaccaccaatactatcagcatcaggcgagaccaccggtgcctcctcctacgcagcccggtggtcctcctgcatggtactccaaccaatttcatcaccctcactctccatcgccaccgcctccacctccgccgcagtgggggccaccttcaccgcattatcctcaaggccaaccttactcttctcccgcttatcctccttaccagccgccattcaacgccggcgctaacggtaacagtcagttttcctcctccatctaccgggtgcgccgattcctctcgccatattcctcaggctaactgaggaatggcgccatccaagttgggtgtatcaacagcaacagtggcacacccctgagactaagtatcatacatcccaagactgtgctgtgaaagcccaaataatggggccgtgccaacaaggatcagctgtcacagcaggtcgcaccctaaccgaacctgagggggccaaattcttaccagccagccaggcttcccta

SEQ ID NO: 86691 - DNA, 386 bp, Arabidopsis thaliana columbia
ctctgtgtttctattattcacatgaaacaatggaaccacatgaccaaactcacggcggcgacggaggagaaggagagaactgttcagtttccggattcgattcagctgaaaaagtcatcatccgatgggacgcgacggcgtcagaagaagcaagagagaagatgatattcaacgatccacaagaagttaacctttacctcaacgccgtcgatgaaatccagaaatatgtatcttccggcggagagattgagaatcgagctaattcagctatccagatagctatggctcgtcttgaagacgagttcaggaatattctcgtttctcatagttctccgatcaactctgattcgttaatgctgtcttcttcatcttcttctcaccttgag

SEQ ID NO: 86692 - DNA, 345 bp, Arabidopsis thaliana columbia
gcagctaaaaacatggccacgcgatatacagccgggcttcccaagaaatggagctattgcactaaatgttcttccccgagatcttgtatgatatgtggtggtagtggaaagacaagcatctagctccttacgcagagtttacaagtacgttaaactcttttcttcagaagccgattcaaaggtttagcatagctttcttgttttgtttcatttatgaaagattctgcaatgtttgaaacctttcatataactttaagttttacatttgcaatcttcacctgtcatactagttaagttgcttcttactctttccagattctttaatgtgatctgtttctcagacgt

SEQ ID NO: 86693 - DNA, 851 bp, Arabidopsis thaliana columbia
  unsure (1)..(851): unsure at all n locations
nnnnnnnnnnnnnnnnnnnnnnnnnnnnnnnnnnnnnnnnnnnnnnnngaagtcatgaggatgagagaaatgataattcttctgttgtgatggagcttagtctcatcaagctgcaatctttttcgttcccttcttcagtttcaagtgtgaaggatgtgaggttcttaaaccttgatttgaaatcctcacatcagagagctaagagatcatcaactgttgttcctgctttagctgaaacagctgtttctatagcgattgcagccacggttgttggtactgcagctactattcttgttaggagaaataacaaagcctccgaagaagccgaggcttctatgaaagaatgtgaagcttgtctcggttcaggaatatgtcctgaatgcaaaggtgaaggatttgtattaaagaaactatcagatgcaaatgctgagaaagcaagacttgcagctaaaaacatggccacgcgatatacagccgggcttcccaagaaatggagctattgcactaaatgttcttccccgagatcttgtatgatatgtggtggtagtggaaagacaagcatctagctccttacgcagagtttacaaattctttaatgtgatctgtttctgagacgtaaaccccactantattaaatgcttcttcttaaggtatgactagttgtgcctcaaaacactcttctcattttcagtatttgatcgattttgttaaatcaataatatgatcttggaagacttttaaagacaaaataataaacaataagattttagaaaaggatttaaacaaagggcgaccgctctagaggatccaagcttacgtacgcgtgcgtgcgacgtcataatnctctatag

SEQ ID NO: 86694 - DNA, 551 bp, Arabidopsis thaliana columbia
  unsure (1)..(551): unsure at all n locations
gcctgcaggtaccggtctcggaattcccgggtcgacccacgcgtccgcgtcttctccgttctctctatatttctcctcaccttcaacgcagctttctcgttctcgtctcagatcgtgttactaacaaacaccgtttctccggcgaaaagctctctgttactaaaaactcacagaacctaaaaatggcggatcaagctatgacggatcaagatcaaggagctgttactctctacagcggcacagccattaccgacgcgaagaaaaaccatccgttctctgttaaggtcggattagctcaggtacttcgtggcggcgccattgttgaagtttcctcggttaaccaagctaagctcgctgaatccgccggcgcatgttctgtaactcgtctcagatccggttcgatcttcgcggcgggtgttcgtcgtatgccggatccgggttctcatcaagggggtaaaacgagctgggtctgtccctgtgatggcacgagctcgcgttgggcattttttgaggccaattttgaatccttnggtgttantggnggggnattt

SEQ ID NO: 86695 - DNA, 1394 bp, Arabidopsis thaliana columbia
  unsure (1)..(1394): unsure at all n locations
aagcccacttagtttcctttttctgcatacgacgccgttttgcgattccaccctaaccatttctcagtgacgaacagtctcagaagtttctagaccaaaccacactcttcttcgtcttctccgttctctctatatttctcctcaccttcaacgcagctttctcgttctcgtctcagatcgtgttactaacaaacaccgtttctccggcgaaaagctctctgttactaaaaactcacagaacctaaaaatggcggatcaagctatgacggatcaagatcaaggagctgttactctctacagcggcacagccattaccgacgcgaagaaaaaccatccgttctctgttaaggtcggattagctcaggtacttcgtggcggcgccattgttgaagtttcctcggttaaccaagctaagctcgctgaatccgccggcgcatgttctgtaatcgtctcagatccggttcgatctcgcggcggtgttcgtcgtatgccggatccggttctcatcaaagaggtaaaacgagctgtgtctgtacctgtgatggcacgagctcgcgttggtcattttgttgaggctcagatcttggaatctcttgcggttgattacattgacgagagcgagattatctctgttgcggatgatgatcatttcatcaacaaacataatttccgatctccgttcatttgtggttgccgtgatacaggagaagctttgaggagaatcagagaaggtgctgctatgattaggatccaaggagatttaaccgcaacaggtaacattgcagagactgtgaagaacgttaggtcattgatgggtgaagttagagtcttgaacaacatggatgatgatgaggtgttcacgtttgctaagaagatttcagcaccgtatgatcttgtggctcagactaagcagatgggtagggttccggttgttcagtttgcatcaggtgggatcacgactcctgctgatgcagctttgatgatgcagctaggttgtgatggggtttttgtgggttctgaggtttttgatggtcctgatccgtttaagaaacttaggagcattgttcaagctgttcaacattacaatgatcctcatgtgttggctgagatgagttctggattggagaatgcaatggagagcttaaatgttcgtggtgacaggattcaagactttggccaaggcagtgtttgatgaaaaggttcgaagctgcaaactttttgggacttctaaagtcgtaatcttttttggttttgagtctcaaaatatcggttgttttttgttaatgctggtgcatatgatccgtttggtttaatcgaaacttgcaacaactaaaacctcaatgaaaagttgcagaatttttgaaaaaaaaaaaaaaaaaannnnnnnnnnnnnn

SEQ ID NO: 86696 - DNA, 861 bp, Arabidopsis thaliana columbia
  unsure (1)..(861): unsure at all n locations
nnnnnnnnnnnnnnnnnnnnnnnnnnnnnnnnnnnnnnnnnnnnnnnnnnnnnnnnnnnnnnnnnnnnnnnnnnnnnnnnnnnccacgcgtccgcggacgcgtgggttttgataggagcgactctgttccttcgccgccgatacgcactcttcttcatcggatttgttcctctggtgggattgtagctctccatgtgttgtactagtgcctcttaggacaatgttttggagcttatagtcaaattctgtgaaaactttgaggtgggaattgtgagatcctgtatgatgaagatatccttgaattgcatatatggctttgttgattgatgttctcatctcttgccacctaagggttttgattcggccactgtatctgctaggggttcgcttctggaagaaatatgggtgagactctcatcaccaccctgtctatggagaactatcacccgtcaacactgctatccatggattcaggtgcttttactcatgaagaatcagagagggatatgaatgggtctctcatacttactggaccgcctgatattaatctaccactctcttctgaagctaggccatctctgcttttgtggaacgaacactgtgacatcttagacgttggacttggacctcagctatatgagcctgaggctgttgttcatgtgcctaaggttgctaagaagtacaacaagcgtgttgatagtgcatggggtgcttggcttttcttcagtttctacttcaaacctgttttggatgagaagtctaaaagtaagttaacgaggggcagcaatggcttgtctggggatgataaatctgatttgcagctcgactcgttcttggttcagcatgacatggagaatatgt

SEQ ID NO: 86697 - DNA, 582 bp, Arabidopsis thaliana columbia
  unsure (1)..(582): unsure at all n locations
anccgcagtgactttgagggacccgctgtaccgtgcccngntntcncctngctattaggccatgctaggagagtcgtatagctacgtgcttcagcttgcgattccggttgcccagctctacggatgtttggtttattccattactgctatcttggaaggagaccaactttgcccacaaactctttctactattactcctactaccatcggggctaactggtggtgggtcttgataccttcactcatttctttccgttgctggaaaaagatttgtgcagctgctgccattgccaacaacaacgtcgagacaaagacgaagaagaaaacccgttgaaccaaggatcaaactctcttttatctcttcaggttactgctgctatagcaaatgaacatgagtctccttttgcggataatttatccattttaaaaactttagctatgttgtctgtctctcttacagcaataaacttgtgaggataatttatccatttttcataaaaaaaaaaaaaaaaaaaagggcggccgctctagaggatccaagcttacgtacgcgtgcagtcgacgtcataattcttctatagt

SEQ ID NO: 86698 - DNA, 1054 bp, Arabidopsis thaliana columbia
  unsure (1)..(1054): unsure at all n locations
nnnnnnnnnnnnnnnnnnnnnnnnnnnnnnnnnnnnnnnnnnnnnnnnnnnnnnnnnnnnnnnnncagtgccacgcgtctgcgttgaccagaaaaacacacagagaaaggagaaaaacatggaggagttggcgcatccgtacgttccgagagatctgaacctacccggatacgtaccaatctcaatgtcaatgtcctccatcgtctctatctacctcggttcttccctccttgttgtctccctcgtctggcttctcttcgggaggaagaaagctaaacttgataagttgcttatgtgttggtggacattcactggtctcactcatgttattctcgagggctatttcgttttctcccctgagtttttcaaggacaacacttctgcttatcttgctgaagtttggaaagaatatagcaaaggtgattcgagatacgtaggtagagattctgcagttgtatctgttgaagggatcactgctgttatcgttggcccagcttctctcctagctatttatgccattgctaaggagaagtcgtatagctacgtgcttcagcttgcgatttcggtttgccagctctacggatgtttggtttatttcattactgctatcttggaaggagacaactttgccacaaactctttctactattactcctactacatcggggctaactgttggtgggtcttgataccttcactcatttctttccgttgctggaaaaagatttgtgcagctgctgccattgccaacaacaacgtcgagacaaagacgaagaagaaaacccgttgaagcaaggatcaaactctcttttatctcttcaggttactgctgctatagcaaatgaacatgagtctccttttgcggataatttatccattttaaaaactttagctatgttgtctgtctctcttacagcaataaacttgtgaggataatttatccatttttcatatgatatttgcgcttttgttaaaaaaaaaaaaaaaggactcacactnnnnnnnnnnnnnnnnnnnnnnnnnnnnnnnnnnnnnnnnnnnnnnnnnnnnnnnn

SEQ ID NO: 86699 - DNA, 517 bp, Arabidopsis thaliana columbia
  unsure (1)..(517): unsure at all n locations
ccggcannnnnnnnnnnnnnnnnnnnnnnnnnnnnnnnnnnnnnnnnnnnnnnnnnnnnnnnnnnnnnnnnnccacgcgtccgcggacgcgtgggcggacgcgtgggcggacgcgtggggtttgtgaaagggagagagaaatggaggaaggtctaaagattcaatctttggtcatttatccgatcaaatcttgccgtggaatctctgttcctcaggctaccgttactcatactggttttcagtgggaccggtattggttagttgttaactataaaggaagagcatacactcaaagagttgagccaacccttgctcttgttgaatcggagttgcctaaggaagccttcttggaagattgggagccaacaaatgactcattgttggtgataagagctcctggtatgagcccgttaaaggtacccgttgactagggccaagctcggtagcagaaggtgtgtcgatgtggggatgtggccttgggcccctcgtttttaaatnnaagggggaaganncttcg

SEQ ID NO: 86700 - DNA, 765 bp, Arabidopsis thaliana columbia
  unsure (1)..(765): unsure at all n locations
ttgcagtacccgtccggaatttccgggtcgacccacgcgaccgggagagagaaatggaggaaggtctaaagattcaatctttggtcatttatccgatcaaatcttgccgtggaatctctgttcctcaggctaccgttactcatactggttttcagtgggaccggtattggttagttgttaactataaaggaagagcatacactcaaagagttgagccaacccttgctcttgttgaatcggagttgcctaaggaagccttcttggaagattgggagccaacaaatgactcattgttggtgataagagctcctggtatgagtccgttaaagataccgttgactaggccaagctcggtagcagaaggtgtgtcgatgtgggaatggtctggctctgcttttgatgaaggagaagaagctgcgaaatggttttcagattatcttggaaaacaaagccgcttggttcggtttaaaaaagatactgaaactagaccttcacctcctgagtttgcagcgggttactctacaacattcatggatatgtttccgttcttggttgcatctcanggttctttaaaccatttgaatacccttctgccagaaccggtgcctataaaccgttttagacccaacattctttgtgataattgtgatccttttggtgaagatctttgggatgaaatcaaaataaacgattttatttttcaaggaatttaggctatgtacccgctgcaaagtacccactgtgaatcaagaaaccggggttttg

SEQ ID NO: 86701 - DNA, 477 bp, Arabidopsis thaliana columbia
  unsure (1)..(477): unsure at all n locations
gctcacttgggatggaattccgccgttggagagtttgtaccccggtgttcccgatgatctgttggcccatttttttgctgatccagttgccgaatcgaaaagtnctgttgcgaggattgggggcattgggatggagatcggcgaggaggtgaagagggagagagtggagaaggtggttaaagagctcatggacggagagaagggaaagaggttaagagagaaggtggtggagtggcggcgcttggcggaagaagcttcggcgccaccgttgggatcatcgtacgtgaattttgaaacggtggttaataaagtccttacatgtcacacgattagatcgaccctaattgggctttcccgattccaaactaggccctttagaaaaaggcctgtttgttttcccctatcaatttgggctggctttaatgacaattttaaaagatgtacttacaagttgcaataatctttagtgttcttctc

SEQ ID NO: 86702 - DNA, 782 bp, Arabidopsis thaliana columbia
cacttttgttttttctctctctcacagagaaaaagaacacaaggccagtttctgcagagccttcttcatcttcttcaacaacaatcggtcaacacatgagactctaacgacctaggaatcatcgacatctcccacccatttccaccgccgacgaacctctaatccccaaacctagccgcgtctctaaatccgccatgtcgtccttcttcctcttgccagaaactactaacacgaaacccaacggaacggcgtcgtttcgtggtctaggctgcacaacctccgcatctcagcaagtttcagtcccggcagtgattcgctcctccgcggattgggatgctagtaatttcaaaattaagaagacgaagaagaagaacaagaacaagggtagtagtagctacaatggtggttcgattaagatcttgagcgaagctagtactagtagtagcgtcgcttgcgcagcgattcctgatgtttggtgtggtcctggagttgggttttcaacggatgctgtcgtcggaggctccattgacacagttgtttcagatcctccgagaaggaatattccggtgagacgcaaaatcgatggagataaaaccaatagtaacagtaataatcatagagcagggttcttcttctcttcttcctagcacgatctctaatcaagagtctaatccttattttgattctattcgagttttttgacatcgcgggctgagcagactgatagaatcatcgtcatctaagactgccttaccctgatggactcctgagatgatgatgat

SEQ ID NO: 86703 - DNA, 384 bp, Arabidopsis thaliana columbia
gcgcccaaatcgaagcgaaggtctctcaacaatggcgaaatcagtgtcgacggcggcttcctcgcttgtgcagaaaccttaggcggtacatcaagaagccatggcagatcaccggaccttgcgctcacccagaatacctcgaagctgttccaaaggcgacggagtatcgtctccgatgccccgctacgattgatgaagaagcaatcgtgccttcctcggatccagagaccgtatacaacatcgtataccacggcagagatcagcgcagaaaccgcccaccgatccggcgatacgtattgacgaaggacaacgtggttcagatgatgaacgagaagaagagttttgacgtctcggacttccctaaggtttacttgaccaccacag

SEQ ID NO: 86704 - DNA, 526 bp, Arabidopsis thaliana columbia
taaagtttcattttttttttttttgaatttgattatccttgtgtgtgtgtgtttaggtgttcacattatagaagacgatgcaagattagagcaccatgttgtgatgagatttttgattgcagacattgccacaacgaagctaaggattctcttcatattgaacagcatcatagacatgagcttcctcgacatgaagtttcaaaggtcatatgctcgctttgtgagacagaacaagacgttcagcaaaactgctccaattgtggtgtatgtatggggaagtacttctgttcaaaatgcaagttcttcgacgatgatctttccaagaagcaatatcactgtgatgagtgtgggatttgcacgaccggaggagaagaagactttttccattgcaaaagatgccgatgttgctactccaaaattatggaggacaaacaccaatgtgttgaaggcgctttgcatcacaattgcccggtttgttttgagtatctgttagattcaacaagatatattactgttctacgatgta

SEQ ID NO: 86705 - DNA, 441 bp, Arabidopsis thaliana columbia
aacttcctctgtttctgattaccaaacgtcgtcaatacatttcttcaaattacgtttcttttattctttcgttactctcaacaaattttgatatctgattggtgttgattccaagtaagaaagatcaaaactttaggtaaagtatggatatgggtttccatgaaaatgagcaaaatcaagaatttgcgaatctaatggagattggatctgggcattacgggtgttcacattatagaagacgatgcaagattagagcaccatgttgtgatgagatttttgattgcagacattgccacaacgaagctaaggattctcttcatattgaacagcatcatagacatgagcttcctcgacatgaagtttcaaaggtcatatgctcgctttgtgagacagaacaagacgttcagcaaaactgctccaattgtggtgtatgtatgggga

SEQ ID NO: 86706 - DNA, 630 bp, Arabidopsis thaliana columbia
ctcactatagggaaagctggcacgcctgcaggtaccggtccgtcgagagattgattataaaatccggtcggcgacgagacttactttcgccgcaaaatttgttctccggtaccggatatttacgtatctgttctcaaattttaccattcccaccactaaaaccctagattaaaagcttcaattaccggaaaaagtctctacttaagagatttatctgtttgttgtcttaaatcacaggaagagaatggattttcttaaggcaacgattatagttgccctaatttgcaatttcgcctcactggcgtcttctgttcctttcatagttctgcatggaattggggataaatgcagtaatgcaggagtgacacaattcacagagcttttaagcgattggtctggttctcaaggatattgcttggagattgggaatggctcatgggactcatggactatgcctctccttgatcagacatcagttgtttgtgagaaggtgaaaagtatgccagagcttagtgacggttacagcattgtggggctttctcagggtaacatgattggtcgagctctcattgagttctgcgatggagcaccacctgttaagagttctgtttcggtagcgggtcctcatgc

SEQ ID NO: 86707 - DNA, 764 bp, Arabidopsis thaliana columbia
  unsure (1)..(764): unsure at all n locations
aaaagagagaagcaaaaaagaatttttatagaaagaaaggaaaaatcagaaaaggagagaaaaattaaaaaagtctctcttttctctttttcttcttcgtctcccatattctccgatcaaaaatatatttctctctcactttccttggttttctcggcggcttcttcttctcctatttctccctcaaatcgttttctccagttttcttgggataaatcttcctcctttctgcagacgccatgtcggacaaaggtcgtcccttgccaaaatttggtgaatgggatgtgaatgatccagcatcagcagaaggttttacagtgatattcaacaaagctagggatgagaaaaagaccggtggcaaaccgggatcacccggtaaatccagtgagggtcatgttaaatctggaggaggagatcctagtaaacctcagcctaaaaaatggctctgctgcatgcaagctccagctgtggactcttgacagacacaaagatggatttgcttgctgctaaaaaaaaagtcacagtgcttacacatctaaaagcaatgggtctttttatgttttattgtcgtctttcttgaaattacccacacacccaaaaaaaaaagggttcctaagatgatttggagctcacccaccctttggtatcaccgatttgagtccctctcctttgaagtggttctnctctaaatnntgnaaatcgggccccatttttttgggaaaaaanggggnaaccgnnaaaaccagtccgngcnanganggtnc

SEQ ID NO: 86708 - DNA, 507 bp, Arabidopsis thaliana columbia
  unsure (1)..(507): unsure at all n locations
tgannnnnnnnnnnnnnnnnnnnnnnnnnnnnnnnnnnnnnnnnnnnnnnnnnnnnnnnnnnnnnnnnnnnnnnnnntaggccacgcgtccgctttttcccttctctctttctatttctccctcatacctttgtttattctgatgaagttgtgagcactgaaagaaaagaagagaggagaagagagatatgcacaagaagaattaaacttagggacacaaaacaacatgacttggtgcaatgaccgtagcgatgttcagaccgttgaaagaatcattccctccccgggggcggctgagtcccccgtagcctcacttccggtctcttgtcacaaaacttgcccttcttgtggccataacttcaagtttcacgaacaggctgggatccatgacttgccgggacttcctgctggagtaaaatttgatccgacggatcaagaggtcttggagcatcttgaaggcaaggtaagagatgacgcaaaaaagcttcatcctctcattgatgagtt

SEQ ID NO: 86709 - DNA, 772 bp, Arabidopsis thaliana columbia
  unsure (1)..(772): unsure at all n locations
agaacttggtcatgtgtccatttttagaaatcaataaaatattataccatatatttatagtatctaactttaagagaataaatatttttatttgccgattcatagacacacacatgcgtgtggtatctatgtctatccattaaactaattatatataaacttattttctggccacaatttttgtttcgtgtatagagagagctcaaagatggaaccaacagaaaaaccatcgaccaaaccatcttctcggactctacctagagacactcgtggctctctcgaagtattcaacccgtcaactcagctgacccgacccgataacccggtgttccgtcctgaaccaccagcgtggcaaaacttgagtgatccacgtggcaccagtcctcaaccccgaccacaacaagaaccagctccatccaaccctgttcggtctgatcaagaaatcgctgtcacgacctcatggatggctctgaaagacccatcaccggagacaatctccaagaagacgatcaccgccgagaaaccacagaagtcggcggtggcggctgagcagagagcggcagagtggggattggttttgaagaccgatacaaagacgggaaagccacaaggagtaggcgtgaggaactctggtggactgagaatgatcctaacgggaaaaggtncatcgagngnactcgnaaantttgccggngctccggtgaattttggcgngatgttcggnggtggntgggttcagggttggngtttaantngtntgcgttanaagngc

SEQ ID NO: 86710 - DNA, 3356 bp, Arabidopsis thaliana columbia
  unsure (1)..(3356): unsure at all n locations
gtcgacggtatcgataagctagatatcgaattcgcggccgggaaaaatcgaaggataatctgtttcttccagcacaagttaacttgcaagagagagctcaaagatggaaccaacagaaaaaccatcgaccaaaccatcttctcggactctacctagagacactcgtggctctctcgaagtattcaacccgtcaactcagctgacccgacccgataacccggtgttccgtcctgaaccaccagcgtggcaaaacttgagtgatccacgtggcaccagtcctcaaccccgaccacaacaagaaccagctccatccaaccctgttcggtctgatcaagaaatcgctgtcacgacctcatggatggctctgaaagacccatcaccggagacaatctccaagaagacgatcaccgccgagaaaccacagaagtcggcggtggcggctgagcagagagcggcagagtggggattggttttgaagaccgatacaaagacgggaaagccacaaggagtaggcgtgaggaactctggtggaactgagaatgatcctaacgggaaaaagactacatcgcagagaaactcgcaaaactcttgccggagctccggtgagatgtcggacggagatgttcccggcgggaggagtgggattccaagagtatcggaagatctaaaagatgcgttgtcgacgtttcaacaaacgtttgtggtctcagatgctacaaaacctgattatccgattatgtatgcaagtgctggtttcttcaatatgactggttacacttccaaagaagtcgtcggcagaaactgccgatttttacaaggatcaggtacagatgcagatgagttagcaaagataagagagacattagctgctggtaacaattattgtgggcgtatattgaattacaagaaagatgggacctctttttggaatcttctcacgattgctcccattaaagacgagagtggcaaagtcctcaaatttatcggaatgcaagtggaggtgagcaagcacactgaaggggccaaagaaaaggctttgaggcccaatgggcttccggaatctctgattcgatacgatgcccgccaaaaagatatggcgacaaactcagtgacagagctagtagaggcggtgaagagacctcgggcactaagcgaatcgacgaatctccatcccttcatgacaaaatcggagagcgatgaacttccgaaaaaaccagctcggcgaatgtccgaaaatgttgttccgtcaggccgaagaaactctggcggcggaagaagaaactcgatgcagcgaatcaacgaaattcccgagaaaaaatctagaaaatcttccctttccttcatggggatcaagaagaagagcgaatctttggatgaatctatagacgatggatttatagagtatggagaagaagacgatgagattagtgatagggacgagagacctgagagtgtggatgataaagtgagacaaaaggaaatgagaaagggtattgatctagctactacactcgaacgtatcgagaagaatttcgtcatcactgatcctaggcttcccgataatcccattatttttgcatctgatagtttcttggagctcacggaatatagccgtgaagaaattcttggaagaaattgcaggtttctacaaggtccagagactgatctaaccacagtgaagaagattcgaaatgctattgataaccaaaccgaagtgacagttcagctcatcaactacaccaagagcggaaagaagttctggaacattttccacttgcaacctatgcgtgatcagaagggagaagtacaatactttattggagttcaactagacgggagcaagcacgtagaaccagttcgcaatgtcattgaagaaaccgcagtgaaagagggagaagacctggtgaaaaaaacagctgtgaatatcgatgaagcggttcgagaacttcctgatgccaacatgacaccagaggatttatgggcaaaccactcaaaggttgttcattgtaagcctcacaggaaagattcaccaccatggatagctatccaaaaggtgttggaaagtggtgaaccgattggtttgaagcatttcaaaccggtgaaacctttgggttctggtgacacaggaagtgtgcatctagtggaactcgttggaacagatcagttgtttgcaatgaaagcaatggacaaggctgttatgcttaaccgaaacaaagtacatagagctagagctgagagagagatcctagatttgcttgaccatccttttcttcctgcactctacgcttcttttcagacaaaaacacatatatgtcttataacagattactatccaggaggagaactcttcatgctcctagatcgacaacctaggaaggttctcaaagaagatgctgtaagattctatgctgctcaagttgtcgttgcactcgagtatcttcactgtcaaggaataatttaccgagacttgaaaccggaaaacgttttaatccaaggcaatggcgatatctctttgtcggattttgatctgtcttgcttgacatcttgcaaacctcagctgttgattccgagtatagacgagaagaagaagaaaaagcaacaaaagagtcaacaaactccaatcttcatggctgaaccaatgcgtgcatcaaactcatttgttggcactgaagagtacattgctccggaaattatatccggagcaggacatacgagtgcagtagactggtgggctcttggtatacttatgtatgaaatgttatacggatacactccttttagaggaaaaacaagacagaagactttcaccaatgttcttcaaaaagatctcaagtttccagctagcattcctgcaagtcttcaagtgaaacagctgatttttaggctgttacaacgagatccgaagaaaagactaggttgttttgaaggagcaaatgaagtcaagcaacattctttcttcaaaggcataaattgggctctgattcgatgcacgaaccctccagagctcgagactccgatattttctggtgaagctgaaaacggagagaaagttgttgatcctgagctagaagatctgcaaacaaatgttttttgagatttggactaaacgtttatcgttttcttttcaagaattgtttgaaactctttgttctccaaaaatctcgtttttaattattttcattttaccattatctttatttatttataatgccaagtgtttctaataatttgtgtgagtttcttaagaatatgttttttatatatgtcaataaaattaatcaagttttnnnnnnnnnnnnnnnnnnnnnnnnnnnnnnnnnnnnnnnnnnnnnnnnnnnnnnnnnnnnnnnnnnnnn

SEQ ID NO: 86711 - DNA, 354 bp, Arabidopsis thaliana columbia
  unsure (1)..(354): unsure at all n locations
cccacgcgtccgcccacgcgtccgcccacgcgtccgattgaattatgttatcatcatcaccggcggtcaccaccgcctcacacttacatcctcctccgtcgccggaaacctaccaaattcctctgaatttactttcctcgccgcatattacccgccgagaccttttcaaaactctctccgtatgtattgccacaccatcactctccgtctccatcgccgcaccagctaacgcacgcggtctctttcagatgccgcctctccggctctctaatcgttattaccttgtgagagctggggaatcagattacggaagcttngggntaatcaacacaaaaccccggttggccaaaacat

SEQ ID NO: 86712 - DNA, 469 bp, Arabidopsis thaliana columbia
  unsure (1)..(469): unsure at all n locations
agaattacgtatggntggtctttttaaactgaaggaacatgcggtccagttaacaaaagagtttactgctctatatacaaacggaccagctggtggtggtggaattagtaccggacacaagatggaaattgtccttgaaaagcgtttggtcagccgtgaatctgtaatgtggaaaactggacttcagcacaccaacacttcagagccagagacctctgaacatcattctccagagaaaatgccaaagttacctaaggaaaatccaaagaaccttacaatgggaggctttcaatctgggtttccatcacttttcctgnttccttttgggccaaaagttcccccttttactcttgttggaanatnagccggggttgggggttaagggaccggccattaattttttcaaaaaatncccgantttttccccaaatgncccnggtttnaaacccaaaattnccccnnnatgggg

SEQ ID NO: 86713 - DNA, 530 bp, Arabidopsis thaliana columbia
  unsure (1)..(530): unsure at all n locations
aacaaaaccaaaggggaaaaacncttnggnccccaagcaaaaacccaaaccncngggtttccacctggttnaaaagggntgcaccccntttggcnattacccncccttgacatancttttaatnctgcagtttgacttggtgagataagatttncgagggtggtttttttttgtttgttttggaatattagcntttttgaatttncgtagtcactttgttggtttttagagtgctagttgttattgtctttttgaaatttctggcactagagacttttttagtttgtgtcgtttttgtttgaatatcatcaagtatgtacttcaactggatctttagttgaccggttagtgtcaaattgtgtttttgtttgaacaccattaattgcatttcagacgtacggatctgttatttagagttttgggttattattcaggttgactcggtccgaatttatttatacgggttggttttgttactgaaaacctttaaacttcgctagttaaatgaaaattgaaagtttagttaaaaa

SEQ ID NO: 86714 - DNA, 1433 bp, Arabidopsis thaliana columbia
aaaatgaaaagaaagattgtcaacccacggattattcttcttgactgtcctcttgagtacaagaaaggtgaaaatgaaacgcaatgctgagttggttagagaagaggactgggaagtgttgttgaagttggaagaggaatatatcgagaacatttgcgttcaaatactaaagttcaagcctcctcgcgtccgcacagagaagggtcttagtgacttggcctgtcactatttcagtaaagctggggtaagtgcaatccgaaggttgagaaaaactgacaacaacagaatcgccaaggcttgtggagcagtaattgtgaacaggcccgacgaactgcaggagtctgatatcggtactggggctggcttgtttgaggtcaagaaaattggagatgatttcttttctttcattgttgattgcaaagaacccaaagcctgtactgtactcttaaggggaccaagtaaagatttcatcaatgaagtggaaagaaatttacaggatgccatgtctgttgcaagaaacattatcaaaaacccaaagctagttcctggtggaggagccacagagctaaccgtttctgccacattaaaacagaagagtgcaacaattgaaggcatagaaaagtggccttatgaagcagctgccattgctttcgaggctattccacgtaccctggctcaaaactgtggggttaacgtgatccgtactatgactgcattgcaagggaagcatgcaaatggtgaaaacgcatggactggtattgacgggaacactggtgcaatagctgatatgaaagagagcaagatatgggattcgtacaatgtgaaggcgcaaactttcaagacggctatagaagcagcgtgtatgcttctaagggatcgatgatatagtgagtggaatcaagaagaagcaagctcctggatctggaccttcaaagcctaccattgagacagaaggagatgcagacaacgaacaaattcttcccgactaagcgaagggagaaacactttggtctcagcataactcaatctctgttttcacttgtttaatggttgcactcttttggctattatcttcccttgacatatcttttaattctgcagtttgacttggtgagataagattttcgagggtggtttttttttgtttgttttggaatattagcttttttgaattttcgtagtcactttgttggtttttagagtgctaagttgttattgtctttttgaaatttcctggcactagagactttttttagtttgtgtcgtttttgtttgaatatcatcaagaatgtacttcaactgggtccttaaggtgcccggtaggggccaaattgggttttggtttgaaaaaaaaaaaaaaaggccgcccgctctaaaggatccaagcttacgtacgcgtgcatgcgacgtcaaagctcttctataggtcacct

SEQ ID NO: 86715 - DNA, 482 bp, Arabidopsis thaliana columbia
cccacgcgtcagcccacgcgtccgcggacgcgtgggccctaaaatccttaagagcaaccaaaatcatggcgcttcatctcgccagacgccatcaaaggttaccatcaaacacatctttgattcgatttttctccaattcctcatcggactcacctccccaattcacgaacgcaccggttgaaaaaccgtctcagtcaccatcttctccgtcaccgtcagactcttctccgatcttcgacatcaagaacactctgaaactgaaattacagaaccagcacgagcaaggaaggaaaccatttgacagatccgatgcacaatctcagaatcgcggatcgactagtttctcccaaaacttggggaagaatctcgccaagtttcagcggagatccaccgttccacctccgagggattcaagcggcgtacagcctccgtcttatatttccttagcgggcctctttaagcagagcgctgcaacaaactca

SEQ ID NO: 86716 - DNA, 1407 bp, Arabidopsis thaliana columbia
  unsure (1)..(1407): unsure at all n locations
ctcgttgcaagagtagattagtgatctgcaaggtttttgctttttggattcaggtgtagattttaggtcatggagctgtatactagaaattgatcaatttcgttacaacttttttttgttttaagactttgagaatctaggccaaagtattgatcttgaagctactgtgttttgtttttgctttttataaaggatgattttgattataaggtgtaaatctgtgacttgtgattggtgtttcaggattatgtgccaactgttttcgacaacttcagtgctaatgtggttgttgatggcaacactgtcaatcttggattgtgggatactgctggtcaagaggactacaacaggttacggccttttgagttaccgtggtgctgatgttttcattcttgctttcctctcttattagcaaggctagcctatgagaatatagccaagaagtggattcctgagcccagggcattaatgctcctggtgttcccattatcccttggtgggccaaaaactcgatcttcgagatgacaagcaattcttcatagaccatgctggggcagggcctatttctacaaaccagggagaggactaaaaaaactgatggcgtccaccacctttgcaagattggagnnnnnngggggcccnncaaaaaaaaaaagcccggggcgggttggtggctggcttaccccccccgcgtctcccccacaaaagatttctaatttgactatgaaaaacaccggcccctgatattcttcaaatttctcgggtggggggagccggcaccacctgtgcggcctccccaccggcgggcttctaccctcccattaacccccaccggggggggagggccggaggaaacccctctttctccgtcgcttctgtctcctgccgtttattcgtaagaaacacactctcagcgtcctcatacttgtgcggccccataatttcatccccacggacaactacctgcctccgccccctcttattatgctctctcccgccctctcgccctcttcttgcacgttttccctcccctccccttctaccccatttcgtcccccctctctggtttttcctctcccctccgccccgctcgctgctgtctgcagagctgattcttgcttgcttcttcccaccttgctctctcagtggcgctgtcttttatgcccgccccccccccgacaccgggcctgcacctccccccgtcgctgagtaccccttctctgcatctctgacattcaaggtacaactctccctcccccgtcacctctctcagatttcgcccgctttctcttcgcctatccatcctggtgtttccgttcgtatctgctcctcttgatcccacgcccccgcctctcctcctctaatacctcacccagggtatgtggtctgtccctttttccgcctttt

SEQ ID NO: 86717 - DNA, 1199 bp, Arabidopsis thaliana columbia
  unsure (1)..(1199): unsure at all n locations
cagagttctttttctactagtcccctcctcctataggctcctctcaaagtcatctatcaaccgccaaatcaaccttcttcttcttcttttccttctctcttcgattctttttcgaatttgggtgattctcagattcacaagcttttagagctcgaatttgattggcgagctagaaatgtcgaggttttgaggaagaagcaaccacaaaagaggattgattttaagggcttttttgtttgtttccgatcttgcggcagagatggcgtcaaggtttataaagtgtgtgaccgtcggagatggtgccgtcggaaaaacttgcatgctcatttcttacactagcaatacttttcctactgattatgtgccaactgttttcgacaacttcagtgctaatgtggttgttgatggcaacactgtcaatcttggattgtgggatactgctggtcaagaggactacaacaggttacgacctttgagttaccgtggtgctgatgttttcattcttgctttctctcttattagcaaggctagctatgagaatatagccaagaagtggattcctgagctcaggcattatgctcctggtgttcccattatccttgttgggacaaaactcgatcttcgagatgacaagcaattctttatagatcatcctggtgctgtgccaattactacaaaccagggagaggaactgaagaaactgattggatctgctgtctacattgaatgtagttcaaagacacagcagaacgtgaaggcagtgtttgatgcagctataaaagtggtgcttcagccaccaaagcagaagaagaagaaaaagaataagaaccgttgcgcgttcttgtgataagaaaaacctctaagactaggtaaaaccaactaaagaaagaagcagaagatgatttcaactatttgattcggcccattttaatatgataatttcgacgtgaagggagacatttctagtagcttttttgtatagttgctaaaacgagctttgttgttgttgtgtcttttactctttgctggtgaatctttcgagtccacagactaagagaccgtgtgttgtactcttgctatgtagactaatctctgtctctcttctcttttgttcttgaggatcattttgtattaacaaatgaatctaattaatatttgcaaaaaaattttttgtttttaacaaaaaaaaanaaaaaggg

SEQ ID NO: 86718 - DNA, 1234 bp, Arabidopsis thaliana columbia
aaagaaaaagcaaagattttcctcattcttttgccattattatctctcatcgatttggcttgctacttttgaatttacccgtgttctactacgattcgggattagggttttttcttgagttagaaaagattgtttcttgattcttgggaatggctgggatttgaggaagaagaagtgcaaaagggttctttttttgagtttgtgaatttgctgcggagatgagtgcttcgaggtttataaagtgtgtcaccgtcggcgatggtgccgtcggaaaaacttgtatgctgatttcttacacaagcaacactttccctacggactatgttccaactgttttcgacaacttcagtgctaatgtggttgtagatgggaacacggtgaatcttggattgtgggatacagctggtcaagaagactataacaggttaagaccgttgagttaccgtggtgccgatgtcttcattcttgcattctcgcttattagcaaagctagctacgagaatgtagccaagaagtggattcctgagcttaggcattatgcccctggtgttcctataatcctcgttggaacgaaactcgatcttcgagatgacaagcaattcttcatagaccatcctggtgcagtgcctattactacaaaccagggagaggaactaaagaaactgataggatcaccaatctacattgaatgtagttcaaagactcagcagaatgtgaaagcagtctttgacgcagccataaaagtggtgcttcagccaccgaaacagaagaagaagaaaaagaacaagaaccgctgcgtgttcttgtgatcgaacatctcttaaaacgaaaaaaggtttaggtaacaaaagaagctgaaggaaaacgaacacctgcaacattgtatagttgttgaatccggcttgtttcggtctttactcttctttttgctggtgaatctaatgagtgaactgaggccaagaggaggattctgggtaagagaaggggatgtgttcttttcttggtgtgttgttgttgttgttgtacttttgctatgtagactaatctcttaatactatgttgtctttgtttttgctgttggggtccattttgtattttctttaacagaaatcttaattaattttttagtgacttttttaaagcttccgttgatcttatggtcttgtattggtatgtaattagattcagacaacgaagaacatcttgagatagatctctatatacaataagatta

SEQ ID NO: 86719 - DNA, 511 bp, Arabidopsis thaliana columbia
  unsure (1)..(511): unsure at all n locations
gnnnnnnnnnnnnnnnnnnnnnnnnnnnnnnnnnnnnnnnnnnnnnnnnnnnnnnnnnnnnnnggctcgagtatatcaaacccgttctctttgctttctcacactgaaatcaaactcctttggtaattaaagatggagaagaatggtcacacggaaagtgaacttcaaactcaaatggttggaaatgagagactacctcaagtaacgtggcaacggaagttgaacagcaaagtgaagaacccttctgagttcaagatgagtataagagatgttcttcatctgtttcctctaggctatagattgtggcgttacactaaagaagaggcataaaaaggaagattttcgatgtacgatatcttcaaaaagcgccatgtaagaggcgaccatggtgtcccattaggtggaattggtggaggaagcatcggaaggagttacaaaggtgaatttcagcagtttaagctcttccctaaaatttgtgaagaagctccaatcctcacaaaccagttctctg

SEQ ID NO: 86720 - DNA, 490 bp, Arabidopsis thaliana columbia
ctcttacgaagatgatcatcctcatcaatctccatctcttgctcctcttcttccttcttgctctctacctcaagatctccatggatttgccccgtttctaggtaagagacctccaagggaagggtgttgggttttagaaccagggaccggtatgattggagaagaggttttttcagatgatgggtcacaaatgggagagaagaagaggagattgaacatggaacaagtgaagacactagagaagaactttgagcttggaaacaaacttgaaccagagaggaaaatgcagctagctcgtgccttaggtttgcaaccaagacagatcgcgatttggtttcaaaatcgaagagctcgttggaaaacaaagcagctagagaaagattatgatactcttaaacgacagtttgatacacttaaagctgaaaatgatcttcttcaaactcataatcaagaactccaagctgagataatgggttaaaaaacagagaac

SEQ ID NO: 86721 - DNA, 421 bp, Arabidopsis thaliana columbia
ctcgataattggcgctccaccaaggaacgttttgcattttcgcattgtacagagtgtacagcctttttcaaactccgagccaatgtgcctgctgatagatggtggttgagattgagatttcagctgctggttgctagagatcatgccttcatcttcatttctgtccagatgattgtagcattcttggggttactagtttacaagttctacggtgaagaactacgagaaatgtttggttatgaggaacatccttatgggttctacacattggctgttttggccattgtcttggtaggactgctatatggattcttcatcgccataatatgtggccaaaagatcaacgagcggcattaccatgttctcgccaaacaagaactcacaaaggaatatatagtggaagaccgcgactgcaagaatg

SEQ ID NO: 86722 - DNA, 883 bp, Arabidopsis thaliana columbia
tctccccagcagagagaggggaagtctctaaacccttgcttgtcatcaaatcgattcctcgagtgaggaaacatttctcttttcgtggatcttacgagaccgagaagagagtaagatatgtccggcgcatcgtctgaggatagcagtattttcgctcgctgtgaagacgtagactgtaacaagaaaatacctgtagagcttgtaaggatgcacatttgttatgctatgttccataggactctggcagctcgaggttttgggacacaaactcaggctaagaagaaacctacaaacaagaagaagtcaacaacatctcttaccgattttgctgtcttcatgaatcatttccgtaaatcttttagaacagattataatggtgcattggtgaaagaaggttcaaagatcggttgggaaatgtggaagtctatgactgaggatgagaagaaagattatctcgataaagctgctgatgaggaagatgaggatgaggatgccgtggaggaacaagctgatgattctgatgatgctgaggacaatgaagttaaggaaacagatgatgtcaattgaccacaacaaagtagctcaagtaaaaaagtaaagattttgggtgacgactactaaatatgttagttatgcttgttcagttgttcttggggggtctttaatcttattgaaatggatttaaggtagtatataaaaacagactgatacgaatatgggcttaaaagcccattcgagttgacattagtacgtaggtttggcccatttatgttataactactataagaagaaaacaagtttagaaaatttccaaaaaaaaaaaaaaaaaagggcggccgctctagaggatccaagcttacgtacgcgtgcatgcgacgtggag

SEQ ID NO: 86723 - DNA, 508 bp, Arabidopsis thaliana columbia
cagctacatacgactcacttagggaaagctggtacgcctgcaggtaccggtccggaattcccgggtcgacccacgcgtccgggggaaacaggtcctattcactggacagatgatgagagatctgcctttatacagggtttttcgctttttggcaagaattttgcttcaatatcaaggtactgtcgggacaagatctccagatcagtgtaaggttttcttcagcaaagttcggaaatgtcttgggttggaatctataaagtttggatctggaaatgtaagcacatccgtaagtgttgataatggcaatgagggtggtgggagcgacttggaagatccttgtcctatggagagtaactctggcatagtgaataatggagtttgtgccaagatgggtatgaattctcctacctcaccttttaatatgaatcaggatggtgttaatcaatcacgctctgctaatgggacagccgaccttagtagatcagacgatgagaatgggcagaaattt

SEQ ID NO: 86724 - DNA, 514 bp, Arabidopsis thaliana columbia
  unsure (1)..(514): unsure at all n locations
nnnnnnnnnnnnnnnnnnnnnnnnnnnnnnnnnnnnnnnnnnnnnnnnnnnnnnnnnnnnnnnnnnnnnnnccacgcgtccggtcgacgatctccctccgtcgtcggcctccgccgtaacgccactaggctcctccgtgattccgattgtgaacaagctccaagacatattcgctcagctaggaagtcaatcgacgatcgctcttccgcaagtagctgtcgtcggaagtcaaagcagtggcaaatccagcgttctagaagctctcgtcggccgtgactttcttcctcgtggcaatgatatttgcacgcgccgacctctccgtctccagcttgttcagacgaaacctagctctgatggtggatccgatgaagagtggggcgagtttcttcaccacgatcctgttagacgtatctacgatttctctgagattcgccgtgagattgaggcggagactaatagagtatcaggagagacaaaggtgtatcagatattccgattggtttgaagatatttt

SEQ ID NO: 86725 - DNA, 494 bp, Arabidopsis thaliana columbia
ctcctttgttcccttaacaaactctaaaccaaaaaaaaaaaaaaaaactatgggttacgacaggctcggtccatccggaccatcaaacccgaaccagaaggaccctgccacgtcactcccggaactacagaagaaaactaaaacgaagctgattctcttcactttggccgttttggtagttggagtagtctgcttcggtatctttgccggcatccgagccgtagactcgggtaaaaccgagccgaaactaacccgtaaaccgacccaagcaatctcccgaacctgtagcagatccttatacccgaacctatgcatcgacacacttcttgactttccgggatctttaaccgccgacgagaacgagctcattcacatatcattcaacgcaacgcttcaaaaattcagcaaagctctttatacttcttcgacgatcacatacactcagatgcccccacgtgtacggtcagcttacgattcttgccttgagttacttg

SEQ ID NO: 86726 - DNA, 625 bp, Arabidopsis thaliana columbia
  unsure (1)..(625): unsure at all n locations
caagaccttntgtatccctcacggaggtggaggtcccggaatgggccctatcggtgtgaagcaacatttggctccattcctaccttctcacccagtgatacctaccggtggtatccctgaacccgagcagacatcaccgctgggaaccatttctgcagcaccatgggggtctgcgcttatcttgccaatctcgtatacttacattgccatgatgggatctggaggactcaccgatgcctcaaagattgcaattttgaacgctaactacatggcaaagcgtctggagagccactacccagttcttttccgtggtgtcaatggaacagtcgctcacgaattcatcattgacttgagaggattcaagaacactgctggaattgaaccagaggatgtggccaaacgattgatggattatggtttccatggaccgacaatgtcttggcctgtccctggaacgcttatgatcgagccaaccgaaagcgaaagcaaggctgagttagataggttctgtgatgctctcatctcgatcagggaagagatttcacagattgagaaaggaaacgcagatccaaacaacaacgttctgaagggtgctccacatcctccgtcattgctaatggcagat

SEQ ID NO: 86727 - DNA, 743 bp, Arabidopsis thaliana columbia
  unsure (1)..(743): unsure at all n locations
gtnatttcccgnggttgccaacgtttgtggtttggtccatggccgcaatttttgcctgccctggacnttntgangncccaccngaagcgaagcaaggctgatttgatnggttctgtgatgctcncatctcgatcaggnaagagatttcncagattgagaaaggaaccgcagatccaaacaacaacgttttgaagggtgctccacatcctccgtcattgctaatggcagatacatggaaaaagccgtattcacggggatacgcagccttccccgctccatggctccgctcctccaagttctggcccactacagggcgagtggacaacgtgtatggagaccgtaatctggtgtgcactctccaaccggcgaacgaagaacaggctgcagctgcagtgtctgcttaaatgaagccactatgaagcgattcgcactcgcaccaaaacccacaatggggcgattcggactcataccggatccagaaacgtatctttactggcttttacttctcttcccagcctcatcatcactttcactttcacttcctgtacaatgtacatacgtagtcctaagttcttccctcatttatttaataaaatacatttctttatgttccactttcttatacgtataacattccatttggatgatgtgatcaccatcgtggttatatttatgccatatgatctctttgnnnnnnnnnnnnnnnnnnnnnnnnnnnnnnnnnnnnnnnnnnnnnnnnnnaa

SEQ ID NO: 86728 - DNA, 469 bp, Arabidopsis thaliana columbia
  unsure (1)..(469): unsure at all n locations
tttttttttttttttttttgataaagatttgtgatttcttgcatataaaggaggaaaatgagagttatataaacacatttcctttaagtatacctcttcccaaaatgcaaataaccccaaataaattcatgaatcaaatatgataataaccaattgtgaaaaaaatccttaggactctccaatgactttggtagcatcatgaggtgtgtcataaaacatccttagatcgagatttcttgacaccagcagtgaaccagagcttgtcagacttggggctctcggcctgagcattgttgggcctttaacccacaccaacactttngtgtccattcccttccacacccatcagcttccctctaagnaaaatcccttttnanangggtggcnatcttnttggtggtcccnnctttggatggggcttccncatggggaggggangnagncggngggttttttttngggcccaccg

SEQ ID NO: 86729 - DNA, 1190 bp, Arabidopsis thaliana columbia
  unsure (1)..(1190): unsure at all n locations
acaagggcctctcgtttcatgagagaaacaaaaaatcttatctttctgacaacggtggtggtgtgtgatgttgtcagccatggcaaagacagagctacaacgatctctctctcttttcttcttcttctgtgtctgtctttaaatagagtctctttgaaacgaagcagctttgtcctgttctgatatccatggctttaccttcgtgcttaaagactggagctttaatgtctccggccactggatttaatttttccggcagtcttatgaagtcagacagcggcttcgccgttccgacaaagttacagagtactcgaaaaggtgatcgagagagattgagagtccaagctattttcagtttccctcctgcgtttctgacaagaaacggtcgagctgagaaacagaaacagctcaaacaagaacttcttgaagccattgagcctcttgaacgtggtgctacggcctcgcctgatgaccagcttcggattgatcagttagcgcgtaaagtggaagcagttaatcccaccaaggagcctttgaagtctgatttggtcaatggaaaatgggagctcatttatacaacctctgcttcgattttgcaggcaaagaaaccaaggttcttaagatcaataaccaactaccaatctatcaatgtgggtacacttaaggtgcaaaacatggggacttggcctttctataactcggtaactggagacataaaacccctcaattcgaagaaggttgctgtgaaactccaagtgtttaaaattctcggatttattcctataaaagcacctgatagcgcccgcggtgaacttgagattacctatgtggacgaggaactacggttatcaagaggtgacaaagggaacttgtttatattgaagatgtttgatcccacttatcgaatccctctttgatctaccaaacaaatggtaccgagccatccatcatacatacttgctacaacctgctatgtctctcttcatcatgtatgtaatctaacataagaaaaattaataagagggaaaaaatgagacgagcttctgtcattgtttcaacttgttcaaatcaaagattctgaatcttgatttggttgagcngttngttccaatcctaaactatgtgatgctcaagcngtacaacaagaagaccttgaagctcctcaaaaatgcttngatnattttctctct

SEQ ID NO: 86730 - DNA, 1290 bp, Arabidopsis thaliana columbia
  unsure (1)..(1290): unsure at all n locations
gtgtgagtaatttaggcacaacacaaacaaacaataactaaaatggctttgtcttccaaaaccctaaagtcaactctcgtcttcctctctattattttcctctgtttctccttgatcctagctcacggcggcatagacgacggcgacgaagaagaggagaccaaccagccacctccggccaccggaacaaccaccgtcgtgaatctccgatccaaaggcttggtgcttgtgaagatctactgtattataatactcttctttagcacattcttagccggaatttcaccttacttttaccgatggaacgagtcgtttctcctcctaggaactcaattctccggtggtatattcctcgcgaccgctctaatccatttcctcagcgacgctaacgagactttccgagggttaaaacacaaagagtatccttacgctttcatgttagcagccgctggatattgccttacaatgctggcagatgtggcggttgcgtttgtagcggctgggagtaataacaaccacgtcggagctagcgtcggagagtcgagggaggatgatgacgtggcagtgaaagaggaaggacgtcgtgagataaagagtggtgttgatgtgagtcaagcgcttatacgaactagtggatttggagacacagctttgctgatttttgctctttgttttcactccatctttgagggaatcgccattggtctctcagacactaaaagcgacgcttggagaaacctatggacaatatcgttgcacaaggtctttgcggccgtagcaatgggaatagctcttctcaagctaatccctaaacgtccattcttcctcactgtcgtctactccttcgcctttgggatatcgagtcccataggtgtcgggattggcataggaatcaatgccactagccaaggagctggtggtgactggacctacgcgatctctatgggccttgcgtgtggagtttttgtgtacgttgcggttaaccatctcatctcaaaagggtataagcctcgtgaggaatgttacttcgacaagccaatctacaagtttattgccgtcttcctcggtgttgctttgctctctgttgtaatgatttgggattgatttttggtgatatatacttagtttcaataattagtttttttttcccaatccctttgttcatgttcttcggttttattaattttgcagaatttcacaattcaatgtaacagttgtcaaaaaggatgtaacatttatgataccgntgtggtaatgaatgtantgngcncccagcnccncangggtngg

SEQ ID NO: 86731 - DNA, 519 bp, Arabidopsis thaliana columbia
aaaaaatcagaaaaacaaaatttggtttgctccacttctcagttcggtcggtctcgcacactgagacgcaaagcaagaacacaacaacacaacaatactgccaacaaaatccaaatcttccccattttgtcttctcaaccaaaaccctaaaactctccttccttcttctccctagagatgtcttcaacaatatccctaaagccgacgcaccttatcctctcctctttctccacaggcaaagtcctccaattccgccgctcccgtttcagccacacaccgtcgtcgtcgtcgtctcgttatcggactctcgtagctcaactcgggttcagaccagattcttttgatttcatcaaggaccatgccgagaatctgctgtacacgatcgctgatgccgccgtttcgtcctctgaaacctttgaatctgtcgccggcactactaccagaacgacccagagcaatgattggttctctggtattgctaattacatggaaactattctcaaggttttgaaagatggg

SEQ ID NO: 86732 - DNA, 515 bp, Arabidopsis thaliana columbia
  unsure (1)..(515): unsure at all n locations
aaactacttccgtgtctccctctctgtctacacaacactcttctctattttctttctttctctctatatatattcatatctcttctccattctctcttacttcaaaattcatcacaaagagagataagagagatggagaacggtgagaaagcagctgagactgtcgttgttgggaactatgttgagatggagaaggatggtaaagctttagacatcaaatctaagctatctgacatgttttggcatggtggctctgcttatgatgcttggttcagctgtgcttccaatcaggtggcacaagtgctgttgacactgccatactcgttctcacagctggggatgctctcagggattctgtttcagctcttttatggcatcttaggtagttggactgcttacctcatcagtatnctctatgttgaatacagaaccagaaaggaaagagagaaagttaacttcagaaaccatgtcattcagtggttgaggttcttgatggattgccttgggaagccatt

SEQ ID NO: 86733 - DNA, 509 bp, Arabidopsis thaliana columbia
  unsure (1)..(509): unsure at all n locations
nnnnnnnnnnnnnnnnnnnnnnnnnnnnnnnnnnnnnnnnnnnnnnnnnnnnnnnnnnnnnnnnnnnnnnnnnnnnnnnnnnnccacgcgtccggtccttaccgaattcatgaaactctcaaaggtaaactaatattcatcttacatgaagatgaaatgttgaaacttgatccatgtaatgcttgctgttgattgtgattttacttggtttgaatcaggtgcctggattccgtcctaaaacaagagttccagagaatattattgttggtttcgttgggaggcaatatgttctgagagcaactgttgaatctatcttaaagagaacacttcctcacgccatggaatcagtgactggaagggctttaaaagactcgatacagattgtaagcagttttccagatatggagaaggcttattctaagctcaagactcttagttatgaggtggttgttgatgttgtacctgaactaaaatggaatcctgaggatgggtataaaaatatgaaggtc

SEQ ID NO: 86734 - DNA, 1118 bp, Arabidopsis thaliana columbia
  unsure (1)..(1118): unsure at all n locations
atgatcctgccnnnnnnnnnnnnnnnnnnnnnnnnnnnnnnnnnnnnnnnnnnnnnnnnnnnnnnnnnnnnnnnnnnnnnnnccacgcgtccgcggacgcgtgggttcattagctctgttcagtataagcaagaagagagagcgaaaatggagctctgtgttatcagcacgactacgacggtgaaggcaattaatccgtttcttccgtctattacacgtcgtgttagttcccgtctcttccaatcagatagtgtgctacagtttggtgggaggttgaagaaaccaattagcaggcctttggacatgtcttgtgtctctagaaaaattggatttttcggagattttatgtcacatggtggtaattttaggctattcgcggcggcttctccagcggttgaaactagtgtaaaggaagacaaacttccagctgatcttaaggtcacggagactgtacaggcgaattcaagtgtgaaattgagtgtggaagttccagaaattgtctgtgaagattgttaccaacgagtccttaccgaattcatgaaactctcaaaggtgcctggattccgtcctaaaacaagagttccagagaatattattgttggtttcgttgggaggcaatatgttctgagagcaactgttgaatctatcttaaagagaacacttcctcacgccatggaatcagtgactggaagggctttaaaagactcgatacagattgtaagcagttttccagatatggagaaggcttattctaagctcaagactcttagttatgaggtggttgttgatgtggtacctgaactaaaatgggatcctgaggatgggtataaaaatatgaaggtcgttgtagaactaggcgatgagatagatgcaaaaaaagcttgtgaaagacaactaagacagaaatacaagtctcttggtgcgttgaagattgtaaccgagcgagggctacaggtgggagatctagcagttgttgatatttctgctacaactatagatgaggactggttaacgggtcatgcgattccagatgcttgtaagcaaaggtttttactttgcttctgaatatgggaattgttcactttctggttttcttttatgctataatattgtatttt

SEQ ID NO: 86735 - DNA, 623 bp, Arabidopsis thaliana columbia
aaagaaagaagaaaaaaacatatgagctgagtttgttaaccaccgtgagcgtcatccatgggacgtggttgacgcgtgcgtgattttattttaataaatgaattaacagtggaaggaaaaaacaacaacggagctgtaactgtgaggcgccgtctctcttcaacctcttcccctccactttgcttctctctctcctccccgggggttttacagtcatatcatcgtcggagactctgcgattcttcacggaatcgtatttctctctcagcgatttttttcgattctcgaagctgcaaggaccacccatcaaacattgaaactcaagcgggagaaattttctggctcgggagggaaactatggagccctaatgcccattttctgctgtctatgaggttatgtttggacgatagatacattttgactttctcatacagtgagtacacgaggaaatggcatttccaagcatcagcgaggtgataaatattgtggtgaagggccaaactggatactaattgcagggggtgcattgttgagcacatagtccattcgctttggatacaagctaaagcagtcgcttgatccgaaacctcaatcaaatggctctgctggattaaaacctaat

SEQ ID NO: 86736 - DNA, 498 bp, Arabidopsis thaliana columbia
tactcactttagggaaagctcgtacgcctgcaggtaccggtccggaattcccggttcgacccacgcgtgcgcggacgcgtaggaaaaaatggctgcttcatcttcctctttctctctctgttttcacaccacacttccgtactcgccctctgagaaagacccttggcaccaaaacccaattttcagttcccacaaaatcatcaagaatctaacttttttggctccgcgctcactcactcatcgtatatctccccaggctctttctcttctctcaaaggcttaatctttgcccagaacggtaacacggggccaggctggaccataccttcacactaaaggataaaaacggagaggcggtgagccctaaaaagcattaagggaaccctgttgttctctacttataccctggagaaaaaacccctggctgcccaaaggaggctttgggttttagagacttttatcaaaaattcaagaaagctggggcaaagggcattggct

SEQ ID NO: 86737 - DNA, 873 bp, Arabidopsis thaliana columbia
  unsure (1)..(873): unsure at all n locations
tgcnnnnnnnnnnnnnnnnnnnnnnnnnnncgaccacatgctctaatcacgtccttgtagaggaaaagaaaaaaaatggctgcttcatcttcctctttcactctctgtaatcacaccacacttcgtactctccctctgagaaagacccttgtcaccaaaacccaattttcagttcccacaaaatcatcagaatctaacttctttggctccacactcactcactcatcgtatatctccccagtctcttcctcttctctcaaaggcttaatctttgccaaggttaacaagggtcaggctgcaccagacttcacactaaaggatcaaaacggaaagccggtgagcctcaaaaagtataaagggaagcctgttgttctctacttctaccctgcagatgaaacccctggctgcaccaagcaggcttgtgctttcagagactcttatgagaaattcaagaaagctggtgcagaggtcattggcattagtggagatgactctgcttctcacaaggcgtttgcaagcaaatacaaactaccgtatacattgttaagcgacgaagggaataaggtgagaaaagattggggagtgcctggagacctgtttggagcattgccagggagacagacttacgttcttgacaaaaacggtgttgttcagctcatctacaacaaccagttccagcctgagaaacacatcgacgagaccttgaagtttctcaaagctgcttgatcattctctctttctcttctttctcttctttcatgcatgtctcatgtctgtctccatgagaccatgaccttcttatattgtttctgttgagtatgaattttcaataataccatgttataccaatgagaagggagttggctttggtct

SEQ ID NO: 86738 - DNA, 528 bp, Arabidopsis thaliana columbia
  unsure (1)..(528): unsure at all n locations
nnnnnnnnnnnnnnnnnnnnnnnnnnnnnnngacgcctgcaggtaccggnccggaattcccggttcgaccccccccggcgcccacgcgtccgtacgggcgagaagacgacagaaggggaaagaagaagaagaagaagaagccgattctaggaaaaatccgatactctttggacagtctatggccaccgatctctacggcgatctctttccggttatcacttcgtcactacacatttgcttcttccgttttcgtatcggatcgaatactattcatctttcttcgaatcgggtttctttgaacctttgaagctatgggtgatgcaatcgatttgagtggagatggtggcgtcttgaaaaagattgtaaggagtgccaaacctgatgctatttcaccctctgatgatcttcctgttgtcgatggtatgttcttaagattgactagtgatcagggtcaatatattgttcatctactgcttatgctactcctaattatatgtgttgatgaaggaccataaccttgtttgattt

SEQ ID NO: 86739 - DNA, 728 bp, Arabidopsis thaliana columbia
  unsure (1)..(728): unsure at all n locations
acncccctaaccnatttgngnncnntttaaaggagcanccttttaaaccggggaanntttttnttgcccgtanatttgaaattctgagggccttgntataaccctgnctgaaccaaaaaaanannaaaaaaaaaaccncgaggacgagggtatcgctatcacggctgacaaaaatcgcgaccttggttgaaagctgctggtgttagtattgagtcatactggccaatgctattcgccaagatggctgagaaacgtaacgtgactgatctcatcatgaacgttggtgctggtggtggaggtggtgctccggttgcagctgctgctccagctgctggcggtggtgcggcagctgctcctgctgctgaggagaagaagaaggatgagccagcagaagagagtgacggagatttgggtttcggtttgtttgactaaacgcagtcacttgtctttcttctttgtagttggatattggagactatattttgtcgtatgagttattattacttgtttgatctggctaaaggactattagttggtttatgatgcgtatgttgtataactcaagtttcctagcaaaccaatcggctcgggcttttgttagaattgattttgtttattttctaccaaaaaaaaaaaaaaaaaaaaaaaaaagnnnnnnnnnnnnnnnnnnnnnnnnnnnnnnnnnnnnnnnnnnnnnnnnnnnnnnnnnnnnnnnnnntgtcctaaat

SEQ ID NO: 86740 - DNA, 592 bp, Arabidopsis thaliana columbia
catcactgaatcaaaaaccctagcgatactacaacactcgagccggagccgcgttgcgaaagcatttcaatcgtagtctaagagaatgtcgacagtgggagagctcgcttgcagctacgctgttatgatcctcgaggatgagggtattgctatcacggctgacaaaatcgccactttggtgaaagctgctggtgttaccattgagtcatactggccaatgctattcgccaagatggctgagaaacgtaatgtcactgatctcatcatgaacgttggtgctggtggtggaggtggtgcgcctgttgcagctgctgctcctgctgctggcggtggtgctgccgctgctgctcctgctgccgaggagaagaagaaggacgaaccagcagaagagagtgatggagatttgggttttggcttgttcgattaagtgcattttacttgttttttcttcttcgatttgagactatttttttttcgtatcgagctattacttgttttggtctggctgaagaactataattagttgttttctgaaccatatgttgtatgacacaagttttcaagcaaacccatcggctccttctttccttag

SEQ ID NO: 86741 - DNA, 759 bp, Arabidopsis thaliana columbia
aaaagctttgtgatccccgcctctccaaaggttatcccggggtccgcgaaaaatatttcccgggggttcgaactcccgacgcggttccgaaattttgttattcattctttcccccccctctcgccgccttgcgaaaagcattttcgatcttactcttaggataaaaaaatgtcgacagttggagagcttgcttgcagctacgctgttatgatcctcgaggacgagggtatcgctatcacggctgacaaaatcgcgaccttggtgaaagctgctggtgttagtattgagtcatactggccaatgctattcgccaagatggctgagaaacgtaacgtgactgatctcatcatgaacgttggtgctggtggtggaggtggtgctccggttgcagctgctgctccagctgctggcggtggtgcggcagctgctcctgctgctgaggagaagaagaaggatgagccagcagaagagagtgacggagatttgggtttcggtttgtttgactaaacgcagtcacttgtctttcttctttgtagttggatattggagactatattttgtcgtatgagtgattattacttgtttgatctggctaaaggactattagttggtttataatgcgtatgttgaataactcaagtttcctagcaaaccaatcggtttgggcttttgttttttaaaaaaaaaaaaaaaaaaaaaaaaaaaaaaaagggcggccgctctagaggatccaagcttacgtacgcgtgcatgcgacgt

SEQ ID NO: 86742 - DNA, 988 bp, Arabidopsis thaliana columbia
tatacttctcactataggcgaaagctggtacgcctgcaggtaccggtccggaattcccgggtcgacccacgcgtccggattttcttcctctctctcacacctatcaccaacaagaatcatgacgagctctgttagagagaagaagatcaagaccaacgggatttggttaaacgttgctgagaaaggagacgaagaagggcctttggttctgttactccatggtttccctgagacatggtactcttggcgtcaccagatcgatttcttgtctagccatggttaccacgtggtcgctccagatctcagaggctacggtgactccgattctctaccgagccacgagtcttacactgtgagtcacctagtcgctgatgtcatcggtttactcgatcactacggcactactcaggcttttgtggctgggcatgactggggagcaatcataggttggtgtctatgcttgtttagaccagaccgagtcaaaggtttcataagtctctctgttccatatttcccaagagatccaaaactcaaaccttcagattttttcaaaatttttggagatggtttatactccgctcagtttcagaaacccggaagagctgaggctgcatttgccaagcatgattgtttatcggtaatgaagaagttcttgctaataacaagaacagactacttagtggctcctcctgacacagagatcatagatcatcttgagataccgtcgacgattccagattggataacagaagaagagattcaagtgtatgcggaaaagtttcaaagatctggattcactggccctttgaattactacagatccatggatatgaattgggagatattggcgccgtggcaagactccaaaatcgtcgttcctactaagtttatagcgggagacaaagatatcggatatgaaggacctaatggaacaatggagtatgtgaaaggagaggtgttcaagattgttgtgcctaatcttgagata

SEQ ID NO: 86743 - DNA, 724 bp, Arabidopsis thaliana columbia
  unsure (1)..(724): unsure at all n locations
gttttagatcgcggccggccgttcgtgttttagcggacgcgtgggcaagaacagactacttagtggctcctcctgacacagagatcatagatcatcttgagataccgtcgacgattccagattggataacagaagaagagattcaagtgtatgcggaaaagtttcaaagatctggattcactggccctttgaattactacagatccatggatatgaattgggagatattggcgccgtggcaagactccaaaatcgtcgttcctactaagtttatagcgggagacaaagatatcggatatgaaggacctaatggaacaatggagtatgtgaaaggagaggtgttcaagattgttgtgcctaatcttgagatagttgttattgaaggtggtcatcattttatccagcaggagaagtctgaacaagtctctcaagagattctctctttcttaaacaagttaagcaaaacagagtaaaatcatcccgttctctgtggccttatagaagaaccatgatgctctagtcttaattaaactactaataatgtgtattcaagaacgaaacccgagtgtgatctcggcaataataatggttcttaaagtaaaggaaaaaaaaaaaaaaaaaaacacccacaaagggcggccgctctagaggatccaagcttacgtacgcgtgcatgcgacgtcatagtaatctagagtnnnnnnnnnnnnnnnnnnnnnnnnnn

SEQ ID NO: 86744 - DNA, 460 bp, Arabidopsis thaliana columbia
agaggaggctaaaaatatcttttgtataaacaaggttttgattcatcctgtgttttggagaagtaatattacagtatgcagacccaaaaggcaagaaatggatctccggatgttcctaagaaggtgtctcctcgagctgctcggccactgaagatcgcagcgctagagcctgaatcttcttcatctcctatctcagctactaacagaacaccaaaggataagagtccaaacgttctaaatcgtaggtctcctcgaagccctgtctctgagaagaagaggccgagtagaataacggagctagagttgctagtctcgcagcttcaggaggagctaaaaaaggcgaaagatcaaatctcagtgtctgaaacatcaaagaagcaagcagaacaagaagcagaggagtccaggaaacagctccaagaagtttcttctaagcttgaggagagccagaatcagtttg

SEQ ID NO: 86745 - DNA, 1034 bp, Arabidopsis thaliana columbia
  unsure (1)..(1034): unsure at all n locations
nnnnnnnnnnnnnnnnnnnnnnnnnnnnnnnnnnnnnnnnnnnnnnnnnnnnnnnnnnnnnnnnnnnnnnnnnnnnnnnnnnnccacgcgtccggaaagagagagagagtgagagctgagaaaatcaccagaaagctacttgagagagagagatagagataagtgagctctgagaaaatccagcaatggcttcgaagcttgtagtgataattgtgtttatcctcgatctcatcgccgttgggttagccattgccgccgagcagagaagaagtgtcggcaaggttgaaacagacagagacaagcaatatgattactgtgtgtatggtactgacattgctacaagttatggagctggtgcatttgttcttctctttgtaagccaagtccttattatggctgctagtcgttgcttctgttgtggaaagtctcttaaccctggcggttcaagagcttgtgccattattctcttcctcatttgctgggtgtttttcttgatcgctgagatgtgtttgcttgcggcatcaatcagaaatgcgtaccacacacagtatagaaagatgtggaaagttgaagatccaccaagctgtgaagttataaggaaaggagtttttgcagctggtgctgcattcacactcttcaccgccattgtctctcagttctactacgtttgctactctcgtgctagagatgcgtaccagaatccctcctactaaaaatgtcaacttccacagcaagcaaacgtttaagcatcaagagttggaatttgtctttttgtgtttgtttagtattgtccagtgtttagttatcctatcaggatgtttaggttttatgttgtctcttaagcaaacactgatatgttatattctaagattcgtatattgttatgttctctgttgtaatgtgtgaatgaatactaaagaatagaaaaccatgatttgttgtgaaaaaaaaaaaaaaaaagnnnnnnnnnnnnnnnnnnnnnnnnnnnnnnnnnnnnnnnnnnnnnnnnnnnnnnnnnnnnnnnnnnnnnnnnn

SEQ ID NO: 86746 - DNA, 271 bp, Arabidopsis thaliana columbia
cccacgcgtccgtgtatttcaagtttcatgagcgtttgccaccacaacattgtcttttcgggttaatttcttcttcttcttccttttcttactaaattctcttagggttgtggtcatacttaatggcttccggggcggacaaaaatcctcttctttcagatgagaaacccaaatcgacggaggagaattagagttctaagccggaatcagcttctgggatgttcaacctcatcagctttgcctggcttgaatttcaatgcttttgatttct

SEQ ID NO: 86747 - DNA, 470 bp, Arabidopsis thaliana columbia
  unsure (1)..(470): unsure at all n locations
cgatcgcgtccgccgacgcgtgagctgtggttcgggttgcgtcggcgtttgccaccacaccattgtcgtttcggggttttagtcatacttaatggcttccaattcggagaaaaagccgcgtctttcagatcagaaacccaaatcgacggcggagaataagagttctaagccggcatcagcttctgggacgttcaacttcatcagctatgcctggcttgaatttcaatgcttttgatttctctaatatggctagtattctcaacgatcctagcatcagagaaatggctgagcatatagctaaagatcctgcggtttaaccaattgggctgagcagcttncagagntctattcctaacggttggccangnaagggtnggtttccctaaacttttnatnccnnaacaagtnatgtcaattncaaattccaacanggtttttgnattancccttnggnttaaggccaaattgcc

SEQ ID NO: 86748 - DNA, 476 bp, Arabidopsis thaliana columbia
  unsure (1)..(476): unsure at all n locations
atttctttgtcttcctcatcgcttatcttcgttgaatctcttgtttacaccttttcctgaaaacaaaattgtgttttttgtagggttttagtcacacttaatggcttccaattcggagaaaaatcctcttctttcagatcagaaacccaaatcgacggaggagaataagagttctaagccggaatcagcttctgggagttcaacttcatcagctatgcctggcttgaatttcaatgcttttgatttctctaatatggctagtattctcaacgatcctagcatcagaggaaatggctgagcaaatagcttaaagatccctgcgtttaaccaattggctgagcagcttcagagatctatttcctaacggtggccagggaggtggtttccccaactttgatccccaacagtatgtcatacatgcaacaggtatgcataacctgagtttagacanggccgggaactggaccgctagtcag

SEQ ID NO: 86749 - DNA, 1240 bp, Arabidopsis thaliana columbia
  unsure (1)..(1240): unsure at all n locations
gaannnnnnnnnnnnnnnnnnnnnnnnnnnnnnnnnnnnnnnnnnnnnnnnnnnnnnnnnnnnnnnnnnnnnccacgcgtccgctcaatgatccaagtatcaaggaattggctgagcaaatagctaaagatccttcatttaaccagttagctgagcagcttcagagatctgtgccaaccggatctcatgaaggaggtctacctaactttgatccacaacagggtatgcagacaatgcagcaggttatggagaatcctgagcttagaacaatggctgagcgtcttggtaacgctttggtgcaggatccacaaatgtctccctctttggaggcttcttgtaaccctgcagcatcagagcagtttgcagagcgtatggcgcaaatgaaagaagatcctgaattgaaacctatactagctgagattgatgcctgggggccttctgctatgatgaagtactggaatgataaagatgtggtggcaaagcctgggtgaagcaatgggtatagctggtggagcagaccagactgttgcagctgaacctgaagaggccgaagaaggggaagaggccccaagagtctattgttcaccagaccgctagtcttccggtgatgtccacgcgtccgggtttgaaagctgccttggcatctggtgggaacaaagatgaagaagactctgagggaaggactgctttgcattttgcatgtggatacggcgaggtgagatgtgctcaggttcttctggatgctggagcaaatgcaaatgcgattgacaaaaacaagaacacaccattgcactatgctgctggttatggaaggaaagagtgtgtaagcctcctcctagagaatggtgctgcagtaactcagcaaaacatggacaataaaaatcccattgatgtggccaggctaaacaatcagctagatgtggtgaaactacttgaggaggacgctttcctctgagcttgctgctttgactcttgaaggatatgtttcttctctgtcatgtaatagtgtcacagagtctgattgcaaccttgtcttctgtgggggttttcatcattaaatctggaaaaaaaagatggagaaaatggatgttattatggttttgtaatgaattattttcttcttgaattgggtttttcttttggctcttaaagtcttttttggcaaaaaaaaaaaaaaaaaaagggcggccgctctagaggatccaagcttacgtacgcgtgcatgccgacgcatagctct

SEQ ID NO: 86750 - DNA, 739 bp, Arabidopsis thaliana columbia
  unsure (1)..(739): unsure at all n locations
aaaagaatatccgttttctttgccacaaaaacattttcatttgggggttttcataatttttggttcttcagctcctcaagcttcgatagggttttagtaattttccgatggcttcaagctcagagaaaacacctcttattccttcagatgagaaaaacgataccaaggaagagagtaagagtactactaaaccagaatcaggctcaggagctccaccttcaccttcaccgactgatcctgggcttgatttcaatgcttttgatttctccggcatggctgggatcctcaatgatccaagtatcaaggaattggctgagcaaatagctaaagatccttcatttaaccagttagctgagcagcttcagagatctgtgccaaccggatctcatgaaggaggtctacctaactttgatccacaacagtatatgcagacaatgcagcaggttatggagaatcctgagtttagaacaatggctgagcgtcttggtaacgctttggtgcaggttccacaaatgtctcccctttttggaggctcttggtaaccctgcaagcatcagagcagtttgcagagcgtatcggcgcaattgaagggaggttccggattttgaaccctttacttacttggggttttactcctggggggcccntcctcctgatgattnagggncctgggaattgttnaaagattttttttggaaaaacctgggnaaaaaaaatggggttnancttttnggggaaa

SEQ ID NO: 86751 - DNA, 840 bp, Arabidopsis thaliana columbia
  unsure (1)..(840): unsure at all n locations
ggtacgcctgcaggtaccggtccggaattcccgggtcgacccacgcgtccgcatgaaggaggtctacctaactttgatccacaacagtatatgctgactttgcagcaggttatggagaatcctgagtttagaacaatggctgagcgtcttgggaacgctttggtgcaggatccacaaatgtctccctttttggaggctcttggtaaccctgcagcatcagagcagtttgcagagcgtatggcgcaaatgaaagaagatcctgaattgaaacctatactagctgagattgatgctggtggtccttctgctatgatgaagtactggaatgataaagatgtgttggcaaagctgggtgaagcaatgggtatagctgttggagcagaccagactgttgcagctgaacctgaagaggccgaagaaggggaagaggaagagtctattgttcaccagaccgctagtcttggtgatgtcgagggtttgaaagctgccttggcatctggtgggaacaaagatgaagaagactctgaaggaaggactgctttgcattttgcttgtggatacggcgaggtgagatgtgctcacgttcttctcgatgctggagcaagtgctaatgcggttgacaaaaacaagaacacacctctgcactatgctgctggttacgggaggaaagagtgtgtaagccttctcctggagaatggtgctgcagtcactctgcaaaacctagacgagaagccgcaatgatgtgcgacncaacagccagctggaggtggtnaccccttaaaaggtcctcccttagccnccngtaaggaanccaanccaatgccttaggttgcttngngc

SEQ ID NO: 86752 - DNA, 801 bp, Arabidopsis thaliana columbia
ggggggccccttctcgcctaagaatagaaggtctcggaatattgttaaaaaattttttttggcccaaaagctggggttaaaacccattggggttataagccttttgggacccaacccaagacttgttgccagctgaaaccttaaagagggcgaaaaaaggggaaaagggaaaagttttttttttccccagccccgctattctttggttaatgtcgagggtttgaaaacccgcctgcgcattgggtgggaaccaagattaaagaagcctctgagggaaggactgctttgcatttggcatgtggatacggcgaggtgagatgtgctcaggttcttctggatgctggagcaaatgcaaatgcgattgacaaaaacaagaacacaccattgcactatgctgctggttatggaaggaaagagtgtgtaagcctcctcctagagaatggtgctgcagtaactcagcaaaacatggacaataaaaatcccattgatgtggccaggctaaacaatcagctagatgtggtgaaactacttgagaaggacgctttcctctgagctgctttgactcttgaaggatatgtttcttctctgtcatgtaatagtgtcacagagtctgattgcaaccttgtcttctgtgggggttttcatcattaaatctggaaaaaaaagatggagaaaatggatgtttattatggttttgtaatgaattattttcttcttgaattggttttttcttttggaaaaaaaaaaaaaataagggcgtccgctctagaggatccaaggttgcggaggcgtgcaagccaa

SEQ ID NO: 86753 - DNA, 1491 bp, Arabidopsis thaliana columbia
aatacgactcactttagggaaagctcgtacgcctgcaggtaccggtccggaattcccgggtcgacccacgcgtccgcccacgcgtccgtgtatttcaagtttcatgagcgtttgccacgcacgaagctcgtgccgaattcggcacgagcttcttcttccttttcttactaaattctcttagggttttagtcatattaatggcttccaattcggagaaaaatcctcttctttcagatgagaaacccaaatcgacggaggagaataagagttctaagccggaatcagcttctgggagttcaacttcatcagctatgcctggcttgaatttcaatgcttttgatttctctaatatggctagtattctcaacgatcctagcatcagagaaatggctgagcaaatagctaaagatcctgcctttaaccaattggctgagcagcttcagagatctattcctaacgctggccaggaaggtggtttccctaactttgatcctcaacagtatgtcaacacaatgcaacaggttatgcataaccctgagtttaagacaatggccgagaaacttggtaccgccttagttcaggatccacaaatgtctccttttttggatgctttctcgaatcctgaaacagcagaacactttactgagcgtatggcgcggatgaaagaagatccagagttgaaacctatactagatgagattgatgctggtggtccttctgccatgatgaagtactggaatgatccagaagtgctgaaaaagctgggtgaagcaatgggtatgcctgttgctggcttaccagaccagactgtttcagctgaacctgaggtagcagaagaaggtgaagaagaagagtctattgttcaccaaactgccagtcttggtgatgttgagggtttgaaagctgccttggcatctggtggtaccaaagatgaagaagattctgaaggaaggacagcattgcattttgcttgtggatacggcgagttgaaatgtgctcaagttcttatcgatgctggagcaagtgttaatgcggttgacaaaaacaagaacacacctctgcattatgctgctggttacgggaggaaagagtgtgtaagccttctcctggagaatggtgctgcagtcactctgcaaaacctagacgagaagacgccaattgatgtagcgaagctcaacagccagctggaggtggtgaagctgcttgagaaggatgctttcctttgagctctgctggttaaaggaaagctctaagctcatattgtctttgaggcatttgtcttgtgtgtgtcctgaaccagtttcacaggctttttgtgtacactttttattagttcctctcttcttctaaatttgtctcttatgttgttttaaaagtcaataaagaaagaaatagcaatcaatgatttaattaaaaaaaaaagggcggccgctctagaggatccaagcttacgtacgcgtgcatgcgacgtcatagctcgtctgatagtta

SEQ ID NO: 86754 - DNA, 1676 bp, Arabidopsis thaliana columbia
  unsure (1)..(1676): unsure at all n locations
gtggatctgcgataatgaatcgtttctagtcagatttggttattggttcattgtaatttgtttacgtagatgagaaacccaaatcgacggaggagaataagagttctaagccggaatcagcttctggttcggcccacctctgaaggttccagatcgatagtgaattcgtgtttaaaaaaaaaagattatctgtatttcaagtttcatgagcgtttgccaccacaacattgtcttttcggggttttagtcatacttaatggcttccaattcggagaaaaatcctcttctttcagatgagaaacccaaatcgacggaggagaataagagttctaagccggaatcagcttctgggagttcaacttcatcagctatgcctggcttgaatttcaatgcttttgatttctctaatatggctagtattctcaacgatcctagcatcagagaaatggctgagcaaatagctaaagatcctgcgtttaaccaattggctgagcagcttcagagatctattcctaacgctggccaggaaggtggtttccctaactttgatcctcaacagtatgtcaatacaatgcaacaggttatgcataaccctgagtttaagacaatggccgagaaacttggtaccgccttagttcaggatccacaaatgtctccttttttggatgctttctcgaatcctgaaacagcagaacactttactgagcgtatggcgcggatgaaagaagatccagagttgaaacctatactagatgagattgatgctggtggtccttctgccatgatgaagtactggaatgatccagaagtgctgaaaaagctgggtgaagcaatgggtatgcctgttgctggcttaccagaccagactgtttcagctgaacctgaggtagcagaagaaggtgaagaagaagagtctattgttcaccaaactgccagtcttggtgatgttgagggtttgaaagctgccttggcatctggtggtaacaaagatgaagaagattctgaaggaaggacagcattgcattttgcttgtggatacggcgagttgaaatgtgctcaagttcttatcgatgctggagcaagtgttaatgcggttgacaaaaacaagaacacacctctgcattatgctgctggttacgggaggaaagagagtgtaagccttctcctggagaatggtgctgcagtcactctgcaaaacctagacgagaagacgccaattgatgtagcgaagctcaacagccagctggaggtggtgaagctgcttgagaaggatgctttcctttgagctctgctggttaaaggaaagctctaagctcatattgtctttgaggcatttgtcttgtgtgtgtcctgaaccagtttcacaggctttttgtgtacactttttattagttcctctcttcttctaaatttgtctcttatgttgttttaaaagtcaataaagaaagaaatagcaatcaatgatttaatttatgattatattctttatttcgtcgacctctacagaatgattcaatttggaagaatcattctggtttggaggatatgtaagaaaaactacttgatctccaagttattccattcttctgttgaaaaaaaaaaaaaaaaaaagnnnnnnnnnnnnnnnnnnnnnnnnnnnnnnnnnnnnnnnnnnnnnnnnnnnnnnnnnnnnnnnn

SEQ ID NO: 86755 - DNA, 536 bp, Arabidopsis thaliana columbia
agctactacgcctgcaggtaccggtccggaattccccgatagccctctcccttctgttcgctctactatcgccggttcttctaccttgctccggcgattccaccggcggcgtcgaggatgattctccagcgaccgtatgtatcgtcgggagtgggatcggaggctcatccgtagctcacttcctccgtaactactctgtttccaccggcttaaatcaagccaagatcctgatgtttgagcgtcacgagatagtcggtggacgcatgaggaccgtcactgtcgccggtgatactttcgaagccggcggttcgattctccatccgaagaactaccacgttaaggatttcgtcgaaaggttcaatctgacggttcgattaccgacgccgattgaagaatcttcagcgattggaatctgggatgggaagagatttgtcgtcaagacattcggttccggtaccaaatttccgtttttggataccatcgtctcttgggtgaagaatctctacttgttcttacgttatgggttatcactgctg

SEQ ID NO: 86756 - DNA, 696 bp, Arabidopsis thaliana columbia
  unsure (1)..(696): unsure at all n locations
ttttttaaattttcaaccagaaaagtgtactctactgcaactacttctnctctacttctctaccttaaaacttccccaaccatttncttcttcaaatcatcatcatcatccctcgtacaaagaaaatggccatgagcatactcgcgaagatctttctcgtctttgccatctattgcgctatcgatcccttcagtcacagctccatttccaagttcccggatttcagaacttacaagattgacatgcctccgttatcgtcacttccaaaggagagagaccgccagaatctgttgcagaattcacagatcaggtttcttaacgaggttcaaggtcccgagagcattgctttcgatccgcaaggtcgtggtccttataccggagtcgccgacggtcgaattctcttttggaatggcactcgttggacagatttngcatatacttcgaacaatcggtcagagctatgtnatcctaagccatcgcttttggattacttaaaggatgaagatatctgtggtcggcctttaggtcttcgattcgacaagaaaaatggggttttgtacattncagatgcgtatttggggntaatnaaagttggtccggaggnggtttgcaacttctgttacaaacggggcttatggtgtcccttaaagntttccantgtncttncaattgtnntgnagcaatntttcctttcct

SEQ ID NO: 86757 - DNA, 1069 bp, Arabidopsis thaliana columbia
gtacgcctgcaggtaccggtccggttttcccggggcgacccatgcgtccgctcgtagacatgctttgtgcttgagacgattcccagtttctgcgattccaagtcgaagatataacctctcctatttgcgtctcagcttctacagagcttttagcattaaaagttgttaaaatggctggggggtcaaagaggtctaaaagagcaagacttgacagtgaatcggaagacataagcgaccaagaaaaccttaaggccgaaagcgacaatgaagatgatcaattacctgatgggatagaggatgatgaagtagatagcatggaagatgatgagggagagagtgaggaagacgatgaaggagataccgaggaagatgatgaaggagatagcgaggaagatgatgaaggagagaacacggaagacgaggatggagaaagcgaggactttgaagatggaaatgataaagagagtgagagtggcgatgaaggtaatgatgacaataaagatgctcagatggaagagcttgagaaagaggtcaaggagcttcgttcacaagagcaggatatattgaagaacttgaagcgtgataagggtgaagatgctgttaaaggtcaagcggtgaagaatcagaaggctctttgggataagattctggagttcagattcttacttcagaaagcatttgatcgttcaaacagattaccacaggagcctgtgaaatcgttattttgttcagaagatgaggatgtctcaacagcatatacagatctagttacttcatctaagaagacattagattccctcttggagttgcaagaggctttgtttgagaagaacccctcggttgatcaacaagtgaatgcaacagctagtgaagaatccaataaatcagatgccgaagatagcgatgaatggcagcgaatatctgacttgcagaaaagaatgtctgtgttccgaaacaaggctgtggacaaatggcagagaaaaacacaagtcacaactggtgcagctgctattaaaggaaagctccacgcctttaaccagaacgttagtgaacacgttgcttcctacat

SEQ ID NO: 86758 - DNA, 1813 bp, Arabidopsis thaliana columbia
ggcacgagctgcatactggtcattgattggttaatcagagctctctcttttcttttcctatctctagagactagagaaatggctctctatctctcttcttcacgactcatcacctttctctctttcatcttgcttctctccaatggcttctcgtcctcttcctctcgccctagcatccaccatcgtcaccacctggacaaccacaattacaaagacgctctctccaaatccattctcttcttcgaaggtcaaagatccggaaagcttcctccaaaccagagaatgacttggagaagcaactctggtctctctgatggctctgctctcaacgtggatttggtgggaggatactacgatgcaggggacaatatgaagtttggattcccaatggcattcacaaccacaatgctctcatggagtttaattgagtttggtggtctcatgaaatctgagttaccaaacgcaaaagacgctattcgttgggctactgactttctcctcaaagccacttcacatcctgataccatttatgttcaggttggtgatcctaacatggaccatgcttgttgggagagaccagaagacatggacacaccaagaagtgtgtttaaagtcgacaagaacaatcctggttctgatatcgccggtgaaatcgccgccgctcttgccgctgcttcaattgttttcagaaaatgtgatccttcttactccaatcacctcctccaacgagccattacggtttttacatttgcggacaaatacagaggaccctacagtgcaggtctggccccagaagtttgtccattctactgttcttactctggatatcaggatgaattgttatggggagctgcttggttacaaaaagcaacaaataacccaacatatctcaattacatcaaagctaatggacaaatccttggagctgatgagtttgataacatgtttagttgggataataagcacgttggtgctagaatccttctctccaaggagtttctgattcagaaagtgaagtcacttgaagaatacaaagagcatgctgatagtttcatttgctctgttatacctggagcatcctcttcccaatatacaccaggtgggctattgttcaagatgggtgagagcaacatgcaatacgtgacgtctacatcgttcttgctcttgacctacgccaaatacttaacctctgctcgcaccgtcgcttattgcggtggctccgtcgtcacccctgcccgcctccgctccatcgcaaagaaacaggtggattatctacttggaggcaacccgttgaagatgtcatacatggttggttatggtctgaaatatccacgtcggattcaccaccgtggctcatctctcccctccgttgcagtccacccgaccaggatccagtgccacgacggcttctccttgtttacctctcaatctcctaatcctaacgacctagtcggtgcagtagtcggtggtccggaccagaacgatcaattccctgacgaacggtccgactacggacggtcagagccagcaacttacattaacgctccacttgttggagctttggcttatcttgctcgatcctaaggccaactttaactaagcttaaaccgcatttaattgttggtttacaatgttaattagtagtaatgattttataaatgaatggccaagattgtccgatccggctgaatgaatgttttagatgatgtggtatttgattttaattttctaaaaaaaaaaaaaaaaaagggcgaccgctctagaggatccaagcttacgtacgcgtgcgtgcgacgtcataactcttctatag

SEQ ID NO: 86759 - DNA, 491 bp, Arabidopsis thaliana columbia
gcatatatctatggagctggtatcaatggaaccatcacagagttccctttcacagctgcgagatacaaaaggaatcgatgtttgggtagagaagaagtaccaccttacatgttaccagttaaccccggtggcctcttaaacgttatgagtcctctgtccttacctccagcacaagctccaaaccaggatttcatagaggctgatgtcactgagccaccactatctccggttatagcaaaagctccaacctcaacccctggaactccctcaaccattgctcaagcacctagcggaacaaacccgacttaagctatctcttctcctctctgtttttttcctctctcttctacttctatgatcaacgctatatcacatctcttcactgtttataatgtcttccaccctcataaagatttccttgtgtgagagagagtagagcttatatgtgtgcatgtttacccctttgttttatatatgtcatttggttccgg

SEQ ID NO: 86760 - DNA, 627 bp, Arabidopsis thaliana columbia
taggtgcactatagaagagctatgacgtcgcatgcacgcgtacgtaagctcggaattcggctcgaccaaaaattcaaacttttttctctttggaaaattctgaggcaaaaatgcggcgtaattgctgccatgtttcatttgcttcaaccctcaagatccttaattttgtccaagctttcattggtgtttcgatcattatctactccatatggatgctccatgaatacagccgtcaccttcccgtggacccgcctccgtcagcttcatcaagctccggaaccgagatcgctactagtgtatctgagcccttgaagaatcctattgattttgtggcgagtatcattctcgggtctaatggtggtgatcatgggtttaacctacgctcgttggaccttcctgctccatggttcatctactctttcatggcggttggtatattggtctgcattgttaccttcattggtttcatagcagctgaagcaatcaatggctggtgcttgtgtttttactctatcctcaaaactctgctcattctacttgaagctgcacttgttgaatacatcgctattgacccgcactgggaaaaggatcttccgtatgatccaactggagaacttagtagtctta

SEQ ID NO: 86761 - DNA, 801 bp, Arabidopsis thaliana columbia
tcgtgtctctattttgcacactatctctcgaaatcgtcctacatttctttcttcacattcattactgagcttcgcattctgggtttctatctaaaaattttccagatttcgtgtgtgaagaatcatttcaagccatgtctccggctaaagttgatactaccaagaaggctgatcctaaggccaaggccttgaaggcggcaaaggctgtgaagtctggtcaagccttcaagaagaaggacaaaaagattaggaccaaggtcaccttccacaggccaaagactcttaccaagcctagaactggtaagtacccaaaaatcagcgctactccaaggaacaagttggatcactaccaaatccttaagtacccactcaccactgaatctgcgatgaagaagattgaagacaacaacactcttgttttcattgttgacattcgtgctgacaagaagaagattaaggatgctgttaagaagatgtatgacatccagaccaagaaagtgaacacactcatcaggcctgatggaaccaagaaggcttacgtgaggcttacaccagactatgatgctttggatgttgctaacaagatcggcatcatctaagtctatctatctctgcagttataaagactattgtggttttgtctcttgtagtctcagttttgcttttaagatatttattattactatcatctggtaattgtagtattttggagcaaaaacgttttacaatacattcatgttgcagtttattgttgaattcaagttctatgtttttgacttaaaaaagaaaaaaaaaaaaaaa

SEQ ID NO: 86762 - DNA, 584 bp, Arabidopsis thaliana columbia
aggtctctacgactcactattgggaaagctggcacgcctgcaggtaccggtccggaattcccgggtcgacccacgcgtgcgtacggctgcgagaagacgacagaaggggggaacggataaaataatttgctcggcttcctcagctccaatggcggcgacgatgatcggaattaacctctcctgcttcaaatcaacatcgttcttctcaccggacctcaattctctccaatcaaagctctctctcctatctctcaaaccctctccaacacagccacggaaatcaacagtcatccgtatgggcggtggtccgagaactttccccggcggtgtatcaaaatggcaatggaaaaggatgcaagcgaagaaacagaaacagcttctcaaagcaaggttatgcagagaacgtcagatctacgagatgcgaaaacgcgccgagctaaaagcggcggtggctgagctagaacgaccatgggaaccgattcataaaccaccgaatctattctcagtttgtgctgatgagcaagttaaagtactcgcggatcggtttcagaaacctggtggatttgatttatggactgatagag

SEQ ID NO: 86763 - DNA, 695 bp, Arabidopsis thaliana columbia
  unsure (1)..(695): unsure at all n locations
cccacgcgtccgcggacgcgtgtccgcacatacaagactctcctcacagaacgatttagatttaatcgggaaaaagttcagtcagtgacactaatgttcgaatcgaacatggttcttcaaacactatcttcttcttctcctccaattcaccgtctctatcttcaccattctcagattctcccttcttctgggtcacccagcaagatttctcttcagatacatggaaggactttggccattcgatcttttcatgaaatttctgctagaggtttaccggctttgaacaaagcttccttgaagaagctaccaatcaaaggatctacctttctgctggggcagagcttgttgatggtttctgctcacccacagttggcagcagcagcagaaatcataaagcctgaaccgatttacgaagttggagagttatttgaacttagtattcagctttcttacttgctgttactactggggttgcttggagttggtactttctatgtgatccgtcaagtacttgtacgcagagaactagacctctccgctaaagaattgcaggagcaagtaaggagcggagatgcaagtncaacanagctctttaagcttggtgcagtgatgttgagaaggaagttttatcctgcagcccacaaggtttttgcaacaaggtttccagaaatgggncggtgatgntcaanattttc

SEQ ID NO: 86764 - DNA, 2506 bp, Arabidopsis thaliana columbia
cgtcagtcatcaaggctaattcgtcgcgagttgctacgacgccgtttcggttgcttctggtttctttatgtctatcaaccttcgctcctccggttgttcgtctccgatctcagctactttggaacgaggattggactcagaagtacagacaagagctaacaatgtgagctttgagcaaacaaaggagaagattaggaagatgttggagaaagtggagctttctgtttcggcctacgatactagttgggtagcaatggttccatcaccgagctcccaaaatgctccacttttcccacagtgtgtgaaatggttattggataatcaacatgaagatggatcttggggacttgataaccatgaccatcaatctcttaagaaggatgtgttatcatctacactggctagtatcctcgcgttaaagaagtggggaattggtgaaagacaaataaacaagggtctccagtttattgagctgaattctgcattagtcactgatgaaaccatacagaaaccaacagggtttgatattatatttcctgggatgattaaatatgctagagatttgaatctgacgattccattgggctcagaagtggtggatgacatgatacgaaaaagagatctggatcttaaatgtgatagtgaaaagttttcaaagggaagagaagcatatctggcctatgttttagaggggacaagaaacctaaaagattgggatttgatagtcaaatatcaaaggaaaaatgggtcactgtttgattctccagccacaacagcagctgcttttactcagtttgggaatgatggttgtctccgttatctctgttctctccttcagaaattcgaggctgcagttccttcagtttatccatttgatcaatatgcacgccttagtataattgtcactcttgaaagcttaggaattgatagagatttcaaaaccgaaatcaaaagcatattggatgaaacctatagatattggcttcgtggggatgaagaaatatgtttggacttggccacttgtgctttggctttccgattattgcttgctcatggctatgatgtgtcttacgatccgctaaaaccatttgcagaagaatctggtttctctgatactttggaaggatatgttaagaatacgttttctgtgttagaattatttaaggctgctcaaagttatccacatgaatcagctttgaagaagcagtgttgttggactaaacaatatctggagatggaattgtccagctgggttaagacctctgttcgagataaatacctcaagaaagaggtcgaggatgctcttgcttttccctcctatgcaagcctagaaagatcagatcacaggagaaaaatactcaatggttctgctgtggaaaacaccagagttacaaaaacctcatatcgtttgcacaatatttgcacctctgatatcctgaagttagctgtggatgacttcaatttctgccagtccatacaccgtgaagaaatggaacgtcttgataggtggattgtggagaatagattgcaggaactgaaatttgccagacagaagctggcttactgttatttctctggggctgcaactttattttctccagaactatctgatgctcgtatatcgtgggccaaaggtggagtacttacaacggttgtagacgacttctttgatgttggagggtccaaagaagaactggaaaacctcatacacttggtcgaaaagtgggatttgaacggtgttcctgagtacagctcagaacatgttgagatcatattctcagttctaagggacaccattctcgaaacaggagacaaagcattcacctatcaaggacgcaatgtgacacaccacattgtgaaaatttggttggatctgctcaagtctatgttgagagaagccgagtggtccagtgacaagtcaacaccaagcttggaggattacatggaaaatgcgtacatatcatttgcattaggaccaattgtcctcccagctacctatctgatcggacctccacttccagagaagacagtcgatagccaccaatataatcagctctacaagctcgtgagcactatgggtcgtcttctaaatgacatacaaggttttaagagagaaagcgcggaagggaagctgaatgcggtttcattgcacatgaaacacgagagagacaatcgcagcaaagaagtgatcatagaatcgatgaaaggtttagcagagagaaagagggaagaattgcataagctagttttggaggagaaaggaagtgtggttccaagggaatgcaaagaagcgttcttgaaaatgagcaaagtgttgaacttattttacaggaaggacgatggattcacatcaaatgatctgatgagtcttgttaaatcagtgatctacgagcctgttagcttacagaaagaatctttaacttgatccaagttgatctggcaggtaaactcagtaaatgaaaataagactttggtcttcttctttgttgcttcagaacaagaagag

SEQ ID NO: 86765 - DNA, 583 bp, Arabidopsis thaliana columbia
  unsure (1)..(583): unsure at all n locations
cggacgcgtggggaaaccagaaatagtcttcttcttcttcctcacacacatacttctctcaccttatcctccgagatcggaaaatatggagaaatccggctacggcagagacggaatttaccgatcacttcgtccaacactcgttcttcccaaagatccaaacacatcgttagtctctttcctcttccgtaactcctcatcttacccatcaaaactcgctatcgccgattccgataccggcgattccttaaccttctctcagctcaaatccgccgtcgctagactcgctcacggattccaccgtttaggtattcgcaaaaacgacgtcgtgttgattttcgctcctaactcttaccagttccctctctgtttcctcgccgtaaccgcgatcggcggcgttttcaccaccgcgaatcctctttacactgtgaatgaggtttcgaaacagatcaaaggttcgaatccgaaggttatcatatccgtaataaactgtttgntaagggcaaaagggtttgatcttcccggtggtctacttgggcttaagaaacggnggggtccncngggccgattcgngggtttaggt

SEQ ID NO: 86766 - DNA, 2137 bp, Arabidopsis thaliana columbia
gaagatctgaaagtgaacgcgaaatcacttcgccagcgttattgttaacaagaatcatcagattagtcgccgtagatctgaatcaacgtcgtaacagtagcagaattttgcggtgaaacgatggttttggttacgtctgtgcgtgattacattaaccggatgcttcaggacatctccggcatgaaggttctcatactcgactccgaaacggttagcaatgtaagcattgtgtattcacagtcagagctgcttcagaaagaagtgtttctggtggagatgatagattcaatatctgtgtcaaaagaatcgatgtcacatctgaaagctgtttatttcatccgtccaacttcagataatattcagaaattacgataccagcttgcgaatcctagatttggagaataccatttatttttctccaatctgttgaaggatactcagattcatattttggctgattccgatgagcaggaagttgtacagcaagttcaggagtattatgcagactttgtttctggtgatccatatcatttcacattgaatatggcatcaaatcatctatatatgatccccgcagttgtcgatccctctggtttgcaacgcttttccgatcgggttgttgatggaattgcggcagtgtttctggcgttgaaacgaagacctgtcatcagatatcagaggacctctgatactgcaaaaaggattgcacacgaaacagctaaattgatgtatcagcatgaaagcgctctttttgactttagacggactgaaagctctccgttgctacttgtaattgacagaagagatgacccggttaccccattgctgaatcagtggacatatcaggcaatggtgcacgaactcataggacttcaagataataaagtggacttgaaatccattggaagtcttccaaaagatcagcaagtggaggtggttttatcatcagaacaagatgcatttttcaaatctaacatgtatgaaaattttggggatattggaatgaacatcaagcgaatggtagatgactttcagcaggtggccaagagtaaccaaaatatccagacagtagaggatatggccagatttgttgacaactaccctgagtacaaaaagatgcaaggcaacgtttcaaagcatgtaactctggttactgaaatgagcaagctagttgaagcaaggaaactgatgacggtttcacaaatagagcaggacttggcttgcaatggtggccaaggagctgcatatgaggcagttacggatctcttaaataatgaaagtgtgtctgacatcgaccggctgcgtttggtaatgctatatgctttgcgctatgagaaagaaaatcctgttcagttgatgcaattgttcaacaaattggcttcacggtctcccaagtacaaaccagggctagttcaatttctcttgaaacaagccggtgtggagaagcgcactggtgatctatttggaaacagagatcttttgaatatagcacgtaacatggctcgtggacttaagggtgttgagaatgtctacactcaacatcagcctcttctgtttcaaacaatggagagcataactagagggagattacgagatgtggattacccatttgttggagatcattttcaacagggacggccacaagaggtggttatttttatggttggtggaacaacatacgaggaatcacgctctgttgctctacagaatgccaccaactccggggttcggtttattctcggcggcaccgcagtgcttaattccaagagatttctaaaggacttggaagaagcacaaaggatatcaagatcaggtagccatatggtgtgaagaagatccaaaagaattttgtgtaaattattttttaagtcttaagattcttccggggagcacatagaagaaagagacaaatgaaagaagaagattgtggtcaggttcgtcgaatctttcgtatacatgatgatgattaccccaccagagatttaatttttggggtttgtgtgtgtattcatcgtggtacagtttaattggaccgttcttcttacacaattatggctaatcaagaaaatgtaacctgaggaaattttactcctctatcataattgcacaaaacagaattaataaaaaaaaaaaaaaa

SEQ ID NO: 86767 - DNA, 522 bp, Arabidopsis thaliana columbia
  unsure (1)..(522): unsure at all n locations
tccggtgtagtctacacaagaacgtcgcgaatccacatggtcaaggtacagcttcgtatacaacgaatggattgaatatncgtcgatctgcnatgacgaattctcttgtaagaattggtggtgttgaaggtgaatgggtgcnaagagctttgactactttaattagaccatcttcacatcaactaaagagaagatctgcttatgagcctcgtcgtagtagactcgcatctatgtcgaaagcagaagatctttgaatctctcttcaggtttgtccttgtttttgatatactcagatctgcccatgaacgaggttgaatcaagggagcagaatcggcagctgcagtcataccggaccgagtcaaattcggagctgagttataccggaccgagttatgtaaaacggtgactaagacgacaccgtttttgttttgttgggtgggagatgagatgatgatgatgcattgtacatacacatattgcttattgaagcagaacaaaaaaatttcgcaagtcgaaagtatc

SEQ ID NO: 86768 - DNA, 1563 bp, Arabidopsis thaliana columbia
aagaaagagagagagccccaaaacaaacaaaatggatttgaaccaaatcttgatcctctcatttctctctctttttaccttagccatattcttgctcacaagatccaaacggaaactaaaccttcctccgtcgccggcgatctccttgccggtgatcggacacctccatctcctcaagccaccgcttcaccgtaccttcctttccctttccaaatccatcggaaatgctccggtcttccatctccgactcggaaatcgcctcgtttatgtcatctcttcacgttccatcgctgaagaatgtttcacaaagaacgatgtcgttctcgcgaaccgccccaagttcaccataagtaagcacctcggctacaacgccacctacttactctcggcatcttacggcgatcattggaggaacctccgccgcatagccgccgtcgagatattctccactcatagactcaattcgtttctgtatattcgtaaggacgagatccgacggctcatttcacatctctctcgtgattccttacacggatttgtggaggtagagatgaaaacattgttaaccaatttggcatccaacaccaccatcagaatgttggccgggaagagatatttcggtgaggacaacgatgacgctaaactcgtgaagaaccttgtgtcggaggcggtgaccagcgccggtgcaggaaaccccattgattatctttccattttacgttgggtctcgagttatgaaaaacggatcaagaatttggggaataggtttgatacggttttgcaggaaattagtcgacggaaaacgtgccggggaagggaaaaggtggaactactgatccatcacttgctttgccctcccaagacattcaacctgattactatacggatgtcatcatcaaaggaatcatacttaccctgataattgcagggacagatacgtcatcagtaacactagaatgggcaatgtcaaatctgttgaaccatccagaaatacttaagaaagcgagaatggaaatcgatgaaaaagtcggtttagaccgattagtagacgaatcggacattgtaaatctctcttatctccaaagcattgtattggaaacactacgtatgtacccggcagtcccactactactacctcatttgtcatcagaagattgtaaagttggaggctacgatataccaagtggaacaatggtattgaccaacgcatgggccatgcatagagatccagaggtatgggaagatcctgagatattcaaaccagaaagatttgaaaaagaaggagaggctgagaagctaatctcatttgggatgggacgaagagcttgtcctggagccgggctagctcatcggctaataaaccaggctcttggaagtttggttcaatgttttgagtgggaaagagttggtgaggattttgtggacatgaccgaagacaaaggagccacattgcccaaagctataccattaagagccatgtgcaaagcacgttctattgttgataaactgatataaatgttttacgttgaaaaatgtattctatttaatgacatgtttttaatt

SEQ ID NO: 86769 - DNA, 2293 bp, Arabidopsis thaliana columbia
  unsure (1)..(2293): unsure at all n locations
nnnnnnnnnnnnnnnnnnnnnnnnnnnnnnnnnnnnnnnnnnnnnnnnnnnnnnnnnnnnnnnnnccacgcgtccgctcttccatttttcccctttcgaatttttgcatttcatcatccttttcgtgtgcttcacaacttcatctctctctcgagagaatttgcgtcatcaattcaaatcctttacgcaaagtttcagtttttattcactttcttacataacccatcaaaccaaatcctcgatcggattatgttaatcaattgctaagagctttttcttctacttcttcgcaatccgccatggccgcagctttaaggtcgaatacgtcaagagaaaccgcttctcttacactttctcattttagatactttatcttcaaccgtatccacaccgctcgaaccgccacaagtcctcctcactgtaatcaccgttctaaatccgatgagaaattcccctataaaatttcctctcttggaacgagtttcttggataatcgaggaggaggagagagacgtaattcgactaagtgttatgctgctcagaagaagctcagcggtgttggttcttctgttgttattctgagctcacaaggagacccaccggatctatggcagcctcctggtgatggagtttccgttagggttaatgggtccagtgttaatctcggtcgtggtggtggtggtggtggaagtaatcctggtggtcctggtaacggaacagggtcgaattcgaaagaagattgttggggtggatccaatcttgggtctgattttccgacaccaaaggagatatgtaagggtttgaacaagttcgtgattggtcaggaaagagccaaaaaggtactttcagtggcagtttacaatcactacaagaggatatatcacgaatcatcacagaaacggtctgcgggagaaacagatagcactgcagcgaaaccagcagatgatgatatggtagaactagagaagagtaacattctcctgatgggaccaactgggtcagggaagacactacttgcgaaaaccttggcacgatttgtaaatgttccttttgtcattgcggatgcaaccaccctgactcaggctggttatgtgggagaggacgtcgagtctatattatacaaacttctcacagttgcagattataatgttgcagctgcacagcaagggattgtttacattgatgaagtcgacaagataacaaagaaggcagaaagccttaacatcagcagagatgtatcaggagaaggtgttcaacaagcattgctaaaaatgctggaaggaacaattgtaaatgtacctgagaaaggcgctaggaaacaccctagaggtgacaatatccagatagacacaaaggacatactcttcatatgtggtggtgcttttgtagacattgaaaagactatctcagagaggcgccatgattcttccatagggtttggtgctcctgtacgtgccaacatgagggctggtggtgttacaaccgccgctgttgcctcaaacctaatggaaactgtggaaaccagtgacctgattgcttatggtttgattcctgaatttgttggacgatttccagttctcgtcagtttgtctgctttgactgagaaccagcttatgcaggtgttgacagaacccaagaacgctcttggaaagcaatacaaaaagatgtaccagatgaatagtgtaaagctgcatttcacagaaagcgcactgcggcttatagctagaaaagcaataacgaaaaacacgggtgctcgtggcttaagagctcttctagaaagcatcctcatggactctatgtacgagattccggacgagggtacaggcagcgatatgatagaagcggttgtggtggatgaagaagcagttgaaggagaagggcgtcgaggctctggagctaagattctccgtggtaaaggagcattggctcggtatctctctgaaaccaattccaaagattccccacagacgacaaaggagggatcggatggagaaactgaagtggaggcagagattccatctgttgtagcaagtatgtaatgatcaccaccaccatcatcatcatcatcatcagaaaatgtggtgaatgtatctttgtatgcgtaatatttaccgttctttgtacataaatgaaggaaagaaaaacaaagttggataagaaaacacaaggatgcacaacttgcacattgataaatgatgatgtaacaaactttttatcgtatacaatgtaaaagggcggccgctctagaggatccaagcttacgtacgcgtgcatgggacgtcatagctaatct

SEQ ID NO: 86770 - DNA, 856 bp, Arabidopsis thaliana columbia
  unsure (1)..(856): unsure at all n locations
nnnnnnnnnnnnnnnnnnnnnnnnnnnnnnnnnnnnnnnnnnnnnnnnnnnnnnnnnnnnnnnnnnnnnnnnnnngaatgaggccacgcgtccgaggaaaccaagtctgaaacacaatgattgattaatcacttataaggcctaaactcacttttcctagttttgcccttcttttagctcatcaacagagagagagatagatccatggagggtcttcaaagatcaacaatctctttccgccgtcagggatcttccggtatagtgtttgacgatcgtctcatcgccgaactcaacaaatcgggaaacaacgagcagaaagacgaaagtcaacgcgacgaacaacctaagcctatgtcggaaagctctgaacaggtcaaaccaatcgatgagaaagacaagcttagaccgattaaaaccggtggaggagcaccaggaggaatagagaggagtcgatctaacggtggaggagctcaacgacatcatagaacaaccggaagagtttctccggcagtggacccgccgtctccgagaatttcgtcatgcggttgttgctctgcgtttggaaagaatccgccggggaagaaagttaatccgaggaaaaggccgccgaaacgtagatcgaggtaggcgtcaggattaataatattcatgaggaaaaaatagtatacacctgtctttcaatctttcttcttcttctttttttgtatgtgtgggggtctttcgttataaaaaactttaaatttgatttttcgatttgatcaacagactctggttatttgtaaattatctgtctttctttgttttcggacaatttcccatttctgtgcagaatcgaaaaaaaaaaaaaaaaagggaa

SEQ ID NO: 86771 - DNA, 579 bp, Arabidopsis thaliana columbia
  unsure (1)..(579): unsure at all n locations
nnnnnnnnnnnnnnnnnnnnnnnnnnnnnnnnnnncaggttttgtatgctcaaatccttcaaacgagtgatcaatccctcgcgcccgttaaaaactttcagatttatatagaatttgttttgtctgttacttatttaggacaaatctttagtgtaaattgagttgagagttttgttttttcttctctcgtaatgatgacttgccgtttggccaaaagttatggtttaatcaaattgttgttgtgtaataagaataatggccgtcgtcttcgttttcctccggctgatgggttctctgcgtttcacagttgctccaccacgaggaacagatccatgtctgcttctagttcctccacaaatcccatgtcccgtgaggacgcaacaacactgcttccgtctgttcaagacaagtacggtggcgtgatgaccgagatgactcatcccatggatccttctctcttctccacacttctccgatcctctctatctacctggactcttcagggcaaaaagggagtgtggatcaagttgccaaagcacttattggcttgctgaacctgctgttaaggagggttctggt

SEQ ID NO: 86772 - DNA, 891 bp, Arabidopsis thaliana columbia
  unsure (1)..(891): unsure at all n locations
tcnnnnnnnnnnnnnnnnnnnnnnnnnnnnnnnnnnnnnnnnnnnnnnnnnnnnnnnnnnnnnnnnnnnnnnnnnnnnnnnnnnnnnnnnnnnnncggccgcgttgaaccccccctagatcttctgatttagaatcgagggttttcgtctgattctcgaagtcttttctttattggtaagaaaatggagcagaagagcgtgttgttgtcagctttaggtgttggtgttgggttagggattgggttagcatcaggtcaaagtttgggaagatgggcaaacgggtcaggttctgttgaagatggactcaccggagaacagattgagcaagagttgattagacaaattgttgatggtagagaaagtactgtcacttttgaagagtttccgtatttcttaagcaagagaactcgagaattgttgacaagtgttgcatatgttcatttaaaagagtatgatatatcgaagcacactcggaatcttgcacctgcaagtaaagccattctactttctggtcctgcggaattttatcagcaaatgcttgcaaaagctttgtctcattactttgaatcaaagctattgttgttagatataactgacttctctattaagatacagagtatatatggatgcaccaagagagaaccttttcacaggaggtctatttctgagttaacattacataaagtgtcgagtttgatgggttccttctctatgctctctcaacgcgaagttgaaccaagagggacattgcgtcgacacaccagtggaaatgatcttaaatcaaggagtactgagagctctaatcgtcttccaggacacaggaaaaatgcttctgctgcttctgatatcagtagcatatctttccgctcttcgaggtctggttcagctttc

SEQ ID NO: 86773 - DNA, 512 bp, Arabidopsis thaliana columbia
  unsure (1)..(512): unsure at all n locations
cccaaatcttctagattcatattcaaatcaagaaatgactctcgctaagaaccaaaaatcatcattgtcacgactatacaagaaagtttcctcgaagagatcagaatcgtcaagaaaccttgaagacgaatcaagaacgagcagtaatagtagcggaagacgctcgttaaacgttaacgagctaaganccgtttttaactatatggatgcaaactcagacgggaaaatctccggtgaagagctacaaagctgcgttagtctcttaggcggcgcgttatcgtcacgtgaggtggaggaagtggtgaagacatcagacgttgacggagacgggtttatagattttnacggagtttttgaagcttatgggaagggggaagatggtagtgattgaaggaaagggcggaaggcagtttaaagaagcgctttgggatgttttgttatggagggggaaggagtttttnncggccggccgnntttncggaggnccgttnagtcncctcntngantcnntg

SEQ ID NO: 86774 - DNA, 2304 bp, Arabidopsis thaliana columbia
  unsure (1)..(2304): unsure at all n locations
aaatttgattccatcgtcccactttcttcttcttcctcccaatccgcctcttcttcctacgcgtgtcttcttctccctcactctctcaatctctagtcttctccgattcaccggatctttcctttcttacttctttcttctcactctggtggttatgtgtggatctgcgacctcgatttcaattcgaagtcgtcggtttcttctctaaatcgaatctttccaggattcgtttgtttttttcttttgtttttttttcgatccgatggaggatcctgatatcaagaggtgtaaattgagctgcgtcgcgacggttgatgatgtcatcgagcaagtcatgacctatataactgacccgaaagatcgcgattcggcttctttggtgtgtcggagatggttcaagattgattccgagacgagagagcatgtgactatggcgctttgctacactgcgacgcctgatcgtcttagccgtcgattcccgaacttgaggtcgctcaagcttaaaggcaagcctagagcagctatgtttaatctgatccctgagaactggggaggttatgttactccttgggttactgagatttctaacaaccttaggcagctcaaatcggtgcacttccgacggatgattgtcagtgacttagatctagatcgtttagctaaagctagagcagatgatcttgagactttgaagctagacaagtgttctggttttactactgatggacttttgagcatcgttacacactgcaggaaaataaaaactttgttaatggaagagagttcttttagtgaaaaggatggtaagtggcttcatgagcttgctcagcacaacacatctcttgaggttttaaacttctacatgacggagtttgccaaaatcagtcccaaagacttggaaaccatagctagaaattgccgctctctggtatctgtgaaggtcggtgactttgagattttggaactagttgggttctttaaggctgcagctaatcttgaagaattttgtggtggctccttgaatgaggatattggaatgcctgagaagtacatgaatctggtttttccccgaaaactatgtcggcttggtctctcttacatgggacctaatgaaatgccaatactatttccattcgcggcccaaatccgaaagctggatttgctttatgcattgctagaaactgaagaccattgtacgcttatccaaaagtgtcctaatttggaagttctcgagacaaggaatgtaatcggagataggggtctagaggtccttgcacagtactgtaagcagttgaagcggctgaggattgaacgcggtgcagatgaacaaggaatggaggacgaagaaggcttagtctcacaaagaggattaatcgctttggctcagggctgccaggagctagaatacatggcggtgtatgtctcagatataactaacgaatctcttgaaagcataggcacatatctgaaaaacctctgtgacttccgccttgtcttactcgaccgggaagaaaggattacagatctgccactggacaacggagtccgatctcttttgattggatgcaagaaactcagacgatttgcattctatctgagacaaggcggcttaaccgacttgggcttaagctacatcggacagtacagtccaaacgtgagatggatgctgctgggttacgtaggtgaatcagatgaaggtttaatggaattctcaagaggctgtccaaatctacagaagctagagatgagaggttgttgcttcagtgagcgagcaatcgctgcagcggttacaaaattgccttcactgagatacttgtgggtacaaggttacagagcatcgatgacgggacaagatctaatgcagatggctagaccgtactggaacatcgagctgattccatcaagaagagtcccggaagtgaatcaacaaggagagataagagagatggagcatccggctcatatattggcttactactctctggctggccagagaacagattgtccaacaactgttagagtcctgaaggagccaatatgatatgacccaaaaaacaggtttgtatataaagatttttagtctcgagttttggggtttccacaaactgtgtactatactactttggttctttttttgtttcatgttgtgtcgtcgatgtttttgggagattacatagagtcagtcttgtttgttgtatggtcattacttctttatttttcctcaggggtctgtttactttaatttctttaataaaaccccgaagattttgagagaaaaaaaaaaaaaaaaaactattanntnaa

SEQ ID NO: 86775 - DNA, 594 bp, Arabidopsis thaliana columbia
  unsure (1)..(594): unsure at all n locations
acttctttacttttgtgttttcacaatttgagaaacgaaatggagccaaagtttcatgcttttatgtttccatggtttgcttttggtcatatgattccatttctacatcttgcaaacaaactagctgaaaaaggtcaccgagttactttcttgctacctaagaaagcacaaaaacagttggaacatcacaacttgttcccagacagtattgtctttcaccctctcacagttcctcctgtcaatggcctccctgctggtgccgagacaacctcgggtatccccatctcgttggacaacctcttgtccaaagccttggatctcactcgcgatcaggttgaagctgcggttcgtgctttgaggcctgactttgatcttttttcgntttttgctcaatgggntttccaggatatgggtaaaaggaccatattgttcaaggngtgtgagttaacantcattgtattttngggnaacaattagntcaannnaaaatgtccccnggggggnaaaannngggtttttgnnccnccggggttttccggcaatcaaangggnttttccnggnaaaagggttttntatgcctttgggaacctttt

SEQ ID NO: 86776 - DNA, 549 bp, Arabidopsis thaliana columbia
aacaacaaaacacaaatcttggttcattttaaatctctccaagaaacaaaatggcagcttccatgaaatttctctgcattcttggtctgatcctcctcatcggaacagtcgttgacggtgcaggggagtgtggtagatcttcgccagacaatgaggcgatgaagctggctccatgtgctggtgcagctcaggacgctaactccgccgtgccaggaggttgctgtactcagattaagagattttctcaaaaccctaaatgtctctgcgccattcttctttcggatacagccaaagcctccggtgtcgatcctgaggttgcccttaccatccctaaacgatgcaacttcgctaaccgtcccgtcggttacaagtgtggagcatacacacttccataaaatgttaacgctgggccttatgtggaagcttggagtttactactacgtctccatgaccttataatatatgaataacggtaatgtttatatgggtaccagtgtgattgtggttattgaacctatatcaataaatatataaaaatgattccactct

SEQ ID NO: 86777 - DNA, 522 bp, Arabidopsis thaliana columbia
ccacaattctcaactttggagctgcagacacaattccggcgacgtttacgattctgacaccgccgaacccacttgtagcaaatggaagaagttcaaaaaagagttgcctttatactaattgatggtttgggagatgtatcaataccaagattaggttacaaaacaccattgcaagcagcagcaatacctaaccttgatgcaattgcttcagctggaatcaatggtttaatggatccagttgaagttggattaggttgtggtagtgacactgctcatctttctctaatgggttatgatccaagagtgtattaccgtggacgtggcgcgtttgaatctatgggtgcaggattagctatgtcacctggtgacatagctttcaagtcaaattttgcaactttggatgaggattctggagttgttgttagtagaagagctgatcgacatttcgaagaagaaggacctatactttgtgctgctcttgatggaatgaagcttccatcattccctgagtatgaagttaga

SEQ ID NO: 86778 - DNA, 2504 bp, Arabidopsis thaliana columbia
  unsure (1)..(2504): unsure at all n locations
tcgaaataaacgaaaatgaaaataggatctccttcttccccgattctcagcgttgtctccagctcaggctcattggatccgaaaattagtggatcacttggatctcgaatccttccggctactcaaagatcatccccatcggagaatcttctcctccataggaaaatgtcgtctaattccctgaggcatgtcgagtccatgtcccagctaccctcaggtgccggaaagatctctcaattaaacgccgtcgtgttaggagaatcccttgcatcggaggagaatgatctcgtctttcccagcaaggaattctccggccaggctcttgtttcctcccctcaacagtacatggaaatgcataagaggtcgatggatgaccctgctgctttttggtctgatattgcgtctgagttttactggaagcagaaatggggtgaccaagtgttttccgagaatctcgatgtcaggaagggtcctattagcatcgagtggtttaaagggggaatcaccaatatttgctacaactgtttggacaaaaacgttgaanctggtttgggcgataagacagccatacactgggaaggaaatgaacttggggtagatgcttccttaacttattctgagttgctccaacgagtttgccagcttgctaattacttgaaagataatggagtgaagaagggtgatgctgttgtaatttatttacctatgttgatggaacttcccatcgctatgcttgcatgtgcaaggatcggagctgttcattcggtcgtatttgctggattttctgcggactctcttgcccaaagaatcgttgattgcaagccaaatgtaatactgacttgcaatgctgttaaaagaggccctaagaccataaaccttaaagctattgttgatgctgcacttgaccaatcttctaaagatggagtctctgtaggcatatgcttgacctatgacaactcattagcgacaacaagggaaaacactaaatggcagaatggaagagatgtgtggtggcaggatgttatttctcaatatccaacatcgtgtgaggtggaatgggttgatgcagaagatcccctgtttttgctctacaccagtggaagtactgggaagccaaagggtgtcctacacacaactggagggtatatgatctacactgctacaacgttcaaatatgcatttgactacaaatcaacagatgtatactggtgtacagcagattgtggttggataactggccatagctatgttacttatggaccaatgcttaatggagccactgttgttgtccttgagggggctccaaactaccctgaccctggacgctgtcgggatattgttgacaaatacaaggtttcaatattttatactgccccaacattggtgaggtctctcatgcgcgatgacgataagtttgtaacacgtcactcgcgcaaatcgctgcgggtccttggaagtgttggtgagcccatcaatcctagtgcctggagatggttcttcaatgtagtcggtgattcaaggtgtcccatttcagatacgtggtggcaaactgaaactggtggcttcatgataaccccattgccaggtgcttggccccagaaacctggttcagccactttccctttctttggtgttcagcctgtcatagttgatgaaaagggcaatgaaatcgaaggcgagtgtagtggttatctttgtgtcaaaggttcatggcccggggcgtttcgaactctgtttggggatcatgaaagatacgaaaccacatactttaaaccttttgccggatattatttcagtggtgatggttgcagcagagacaaggatggttactactggcttacagggagggttgatgatgttatcaacgtcagtggccatcgaatcggaactgctgaagtagaatctgctctggttttacaccctcaatgtgcagaagcagctgttgtaggcatagaacatgaggtaaaaggtcagggaatttatgcgtttgtcactcttctggaaggtgttccttacagcgaggagcttcgtaaaagcctagtactaatggtccgaaatcagattggggcttttgcagcaccggacagaatacattgggcaccagggttgccaaagacgagaagcggaaagataatgaggagaatcttgagaaagattgcttcgaggcaattagaagaactcggagatactagcacactcgcggatcctagtgtagttgatcagcttattgcacttgccgatgtgtgatgactaaccatagcatatgagccaatggagagtaatggagttttgtgcatctatatatgttttcaggtgtcttatagagggaatggtacaaaaatctgaaacaagattcaggtgttttggagggaataaagtaagcagactatattgttgtgtttttgaataaagaaatttcagtctcatgaatttggttttggataagatggtcataggattatcaaattaattaaaagttacaaaaatataaaaaaaaaaaaaaa

SEQ ID NO: 86779 - DNA, 452 bp, Arabidopsis thaliana columbia
  unsure (1)..(452): unsure at all n locations
tacgattccttaagaatctccttctagcttatcttgtattaattttaagttttgtagggtttaggttgtttgattaagttagcaagtnagggattagttacgtnacgagatttctctccaaggaatctattactaaaaagatggagcaatctgaaattgtgattgcataatccactagtaaacgtcacaaagcaattgggcatgcccatggacgttnatggagctctagggcttctccgttttgggtatcttgctattggctctcatattccattgccttgcggacgggcgtcgctgcttttaacccgtttggaaccggccatgggtcctatatccccccgtattttgggtttaagntttatctagttaggattgtatttagccaatnaggacatcagattataaaagaacaccatctttngggnctgattaacattgntggntacttctgc

SEQ ID NO: 86780 - DNA, 692 bp, Arabidopsis thaliana columbia
gtggtgtggtgaaggaggctggtgatatgaatggagaggaagaaaatgaaaaggagaagttacaagctgctgttcccactggtggagctttttatatgcatgatgataggtttcaggaaatgtctgctggcggaaacaggcgaatgcgtggtgggagaagacagtggggctctggagaggaaagaaaatggggacatgacaaatttgaagagatgaatactggggaaaaacattctgataggatgtctagaggccgattcagaggtcatggtcggggtaggggacaagggcgtggatacgctagagggagcagttctaacacattaaccagtagtggacagcaaatttatgttcctaaagctgtctcacgagggagaggacccaggaaatccgacactcccctgaggaatgaaaatcaagcacattctgagcaaagcaaacagttacgaaattctaatgggtctcaaaactctcgtgagaaaatgccacacctcgattcacggcgttcaccaactgcccctgctaaaactgagaatcaaggtgcccatgccaaaaagaatgtagctgtgtcaagtttgagttccgcttctcctccattttatccttcagcgccgtccagtaatgtggtacatggtatacaagttagtatggaaagactccacacaaatgaaagtgtcacgccttctgggaag

SEQ ID NO: 86781 - DNA, 1204 bp, Arabidopsis thaliana columbia
  unsure (1)..(1204): unsure at all n locations
ggaacacggaaatattggcgcccagataatcttcttctgtgaagcattttaagtcgccgactccaatcaacagagcccagttattccattttatcgaattaattagggttcagagagatgggtaggaaaaagaaatctagggcttcgacaaccgaagaagatgagattgagatggataatgctggcccatcctctgagacaagtctttacgaggttcttggagttgaaagaagagccacttcacaggaaataagaaaagcgtaccataagttggcattgaagcttcaccctgataaaaatcaggatgataaggaagctaaagacaagttccagcagctgcaaaaagttatatcaattcttggtgatgaagagaaaagggcagtctatgatcaaactggctcaattgatgatgctgatattcctggagatgcgtttgagaatttgcgggatttcttccgggacatgtataagaaggtcaccgaagctgatattgaagagtttgaggcaacctacaggggatctgagtcagagaagaaagacttgcttgagcttttcaacaagtttaagggtaaaatgaacaggctattctgctcaatgctttgctcggaccccaagcttgattcacaccgtttcaaagacatgcttgatgaggccattgcagcaggagaagtgaagtcaagcaaggcatatgagaaatgggcaaataaaatttcagaaacgaaaccgcccaccagtccattgaggaagaggaagaagaagaagtcagcacccaaggattcagagacagatctttgcttgatgattgcgaaacgacaagaggagaggaaagggaaggtggactcgatgttttcatcacttatctctaggtatggtggtgatgcggaagcagagcccactgaagaagaatttgaagcttcccagagaaggattgaaacccaaagaaaaccatccaagaagtctagaggaaagtagaggtcttaaagcagagttgtcttctagtagtatttgtgatggaacaagaatgtttattttctttccaaatttcatcaatttccaaaatcagtaaatatttcgattattgctttataaattgaggaattatcttctccaaaaaaaaaaaaaaaaaaaaaaagnnnnnnnnnnnnnnnnnnnnnnnnnnnnnnnnnnnnnnnnnnnnnnnnnnnnnnnnnnnnnnnnnnnaacg

SEQ ID NO: 86782 - DNA, 1420 bp, Arabidopsis thaliana columbia
  unsure (1)..(1420): unsure at all n locations
nnnnnnnnnnnnnnnnnnnnnnnnnnnnnnnnngnnnnnnnnnnnnnnnnnnnnnnnnnnnnnnnnnnnccacgcgtccgcccacgcgtccgcgagcttccgtgtccaagagctcctcgaccatggcgtcttgtttacaagcatccatgaattctctgcttccacgctcttcttctttttctcctcatcctcctctatcttcgaattcatccgggagaagaaacttgaagacttttcgttacgcctttcgcgccaaagcctctgccaaaatccctatgcctccgataaatccaaaggatcctttcctctccacgctcgcttctattgccgcgaattctccggaaaagcttctcaatcggccggttaacgctgatgtgccgccatatcttgacatctttgactcccctcagctcatgtcttctcctgcacaggttgaaagatcagtggcttataacgagcaccgaccgagaactcctccaccagacttgccatctatgcttcttgacgggagaattgtttacattggaatgcctcttgtgccggcagtgactgagctagttgtcgctgagctaatgtatcttcagtggctggatcccaaggaacccatttacatttacatcaactccacagggaccactcgtgatgatggagagacggttggaatggaatcagaagggtttgcgatctatgactctttgatgcaacttaaaaacgaggtacatacagtatgtgtgggagcagccataggtcaggcctgtctattactttctgcgggaaccaagggtaaacggtttatgatgcctcatgccaaagcgatgattcagcaaccacgtgtaccttcttctgggttgatgcctgccagtgatgtcctgattcgggccaaagaggtcattacaaatagggatatacttgtggaactactatcaaagcatactgggaattccgtggagactgtagctaacgtaatgagaaggccatattacatggatgcaccaaaagctaaagaatttggagtcattgacaggattctttggcgcggtcaagaaaagattattgcggacgtggttccttcagaggaattcgacaagaatgcagggattaaaagcgtagtatgagtctagtcttaagttttcttggcctaaatcatactgcgtcatggagaagaacaaatagactgaccaaaatcacattggccgcagactgccttgtttcaaatcacttggtaaatgtgaacatgcgattaggagagtcatacttaaaggatcttgaaatattatgataaaattgtaatgtgtttgttcgttagcaatagtaaatacaatcttcaactctcttcttcacccttcaaatttgaatattgaacagtttcttacttgtttccatttggcggccgcgaattcgatatcaagcaaatcgataa

SEQ ID NO: 86783 - DNA, 539 bp, Arabidopsis thaliana columbia
ggtcacatacgactcactatttggagagctggtacgcctgcaggtaccggtccggaattcccgggtcgacccacgcgtccggaagatagaacaatcccaagattctcctcttatttgatcaaccatgtcgaatgtcttgctatccccaaacggctacgtatttgcatcgcctaaacctcttggcagattcatcaattcaaagtccggcggacggaaacttttcttctccgtcgttagagcttcttccgatgatgctgattgtaatgccgaagaatgtgctcccgagaaggaggtaggaacagtgagtatggaatggttagctggagagaagacgaaagtggtgggaacatttcctcctcggaagccgcgtggttggactggctatgttgagaaagatactgctggtcagactaatgtttactccattgagcctgcagtatatgttgcagagagcgcgattagctcaggtactgcaggatcatcggctgatggggctgagaacacagcagcaatcgtagcaggcattgctcttatcgcag

SEQ ID NO: 86784 - DNA, 1014 bp, Arabidopsis thaliana columbia
  unsure (1)..(1014): unsure at all n locations
gcaaaatcacaagaaaagtataaaaaaagaagctagttggactatctcgaatatgactgctgggaatagggttgggatagaggctgtggttggcgctggaataatcctccctcttgtgcacttgctccaaaacgcggagttcgatataaagaaggaagctgcttgggctatttccaatgccacatcaggagggtcacatgagcagattcaatatttggtgacccaaggctgcatcaaaccactttgtgatcttctaatctgccctgatccaaggatcgtgacagtgtgcctcgagggtcttgaaaacattctcaaggttggtgaggctgacaaggaaatgggattaaacagtggggtgaatctctatgctcaaataatagaagaatctgatgggttggacaaagtcgaaaaccttcaatcccatgataacaacgagatatatgagaaggccgttaagatattggagagatattgggctgaagaagaggaagaacagattctgcaggacggcgggaatgacaattcacaacaggctttcaattttgggaacaatcccgctgctcccgttggtggattcaaatttgcctgaaaaaggtatacagtagtccaaattgaaatcctttggtttgggaaacatgagattcagcttttgcaactgttattgacaattgccaggttcaagttcgactttttgagttttggtgcaaaaaggcttatttttctgtttttttttctttttgttgttgatgttgtccttatttgtctgaatcattctctgattctgaatcttaaactctgctatgaattatgtgtagtgtggtttctggtttaggatatggtacactttgtatttgtcactttaatctttgtcgtcgttatagtttaataacttttacttggcccnnnnnnnnnnnnnnnnnnnnnnnnnnnnnnnnnnnnnnnnnnnnnnnnnnnnnnnnnnnnnnnnnnnnnnnnnnnnnnnnnnnnnnnnnnnnnnnnnnnnnnnnnnnnnnn

SEQ ID NO: 86785 - DNA, 597 bp, Arabidopsis thaliana columbia
  unsure (1)..(597): unsure at all n locations
acntccagtggngctccagatggttacngggggacctgcccaatatggagactgaggntggcaaagcgaaccttcatccatgctaccacgggtattgagagcccgttaagatattggagagatattggcctgaagaagaggaagaacagattctgcaggacggcgggaatgacaattcacaacaggctttcaattttgggaacaatcccgctgctcccgttggtggattcaaatttgcctgaaaaaggtatccagtagtacaaattgaaatcctttggtttgggaaacatgagattcagcttttgcaactgttattgacaattgccaggttcaagttcgactttttgagttctggtgcaaaaaggcttatttttctgtttttttttctttttgttgttgatgttgtccttatttgtctgaatcattctctgattctgtatcttaaactctgctatgaactatgtgtagtgtggtttctggcccacgatatggtacactttgtatttgtcactttaaaaaaaaaaaaaaaaagggcggccgctctagaggatccaagcttacgtacgcgtgcaggcgacgtcatagatcttctatagt

SEQ ID NO: 86786 - DNA, 3106 bp, Arabidopsis thaliana columbia
gattccatgaaatggctttgtctataattcctctggtttgtcctggatttatcttcttgtagcctctttgctcaatagagctctttttgtctcttcttgtattaaataaaataaaatgaagacttagtaaagaaaaagaaaaactcttgagtcttgctaaagcctagttagtgttgagtgtgggagagacaaaacagaacattgaaaaactctctgtatgatggcttcattgtcttgtgttgaagacaagatgaaaaccagttgtttggttaatggtggaggaactataacaacaacaacatctcaatctaccttgcttgaagagatgaagctgttgaaagaccagtcaggtacaagaaagccggtaataaactcggagctatggcacgcttgtgcaggccctttggtgtgtctccctcaagttgggagcttagtgtattacttctcacaaggtcatagcgagcaggttgctgtttcaaccagaagatcagcaacaacacaagttcctaattatccgaaccttccatctcagttgatgtgtcaagtccataatgttactcttcatgctgacaaagacagtgacgaaatctatgctcagatgagtcttcaacctgttcactctgagagagatgtgttccctgtaccagactttggaatgctgagaggaagtaagcacccgactgagtttttctgcaaaacacttactgcaagtgacacaagcacacatggaggtttctcagtgccacgtagagctgcagagaagctatttccaccattggattactcagcacagccgccaacgcaagagcttgtagttcgagatcttcatgagaatacttggacatttcgccatatctaccgagggcaaccaaagagacatctcctaactacaggatggagtttgttcgttggatcgaagagattgagagctggggattctgttttgttcatcagggatgagaagtcacaacttatggtcggtgttaggcgtgccaatcgccaacaaacagcacttccttcatcagttctctcagcggatagtatgcacatcggtgttcttgctgctgctgctcacgcaaccgccaaccgtactccttttttgatattctataatccaagagcttgtccagcagagttcgtgatccctctagctaagtaccgtaaggcgatatgcgggtctcagctctcagttggtatgagatttggaatgatgtttgaaactgaagattccgggaaacgaaggtacatgggaactattgttggaatcagcgatttggatccgttgagatggcctggttctaagtggcgtaaccttcaggtagaatgggatgagcctggatgtaatgataaacctactcgggtcagtccatgggatatcgaaacacctgaaagtctcttcatttttccttctctgacctcaggactcaaacgtcagctccatccatcttactttgctggtgaaactgaatggggtagcttgataaaacggccacttatacgtgttcctgattccgcgaatgggattatgccatatgcatctttccctagtatggcttcggagcagcttatgaaaatgatgatgaggcctcacaacaaccaaaatgtaccatctttcatgtctgagatgcagcagaatattgtaatggggaatggaggtttgctaggagatatgaagatgcagcaacccctgatgatgaaccagaaatctgagatggtgcagccacaaaacaagctaacagtgaacccatctgcttctaatacgagtggccaagaacagaatctttcacagagtatgagtgctcctgctaaacctgagaactctacactctctggttgcagctctggtagagtccaacatggacttgagcagtcaatggaacaggcaagccaggttactacatccacagtgtgtaatgaggaaaaggttaatcagctacttcagaaaccgggtgcttcgtcgcctgtacaagctgatcaatgtcttgacattactcatcagatttaccaaccacagtctgatccaataaatggattctctttcctggaaactgatgagctgacatcacaagtctcttccttccagtctcttgccggatcatacaagcaaccattcattctatcctcccaggattcttcagctgttgtgttaccggattccacaaactcaccgctgtttcatgatgtgtgggacactcagttgaacggtctcaagtttgaccagttcagtcccttgatgcagcaggacctttatgctagtcagaatatctgtatgagtaatagcacaaccagtaacattctagatcctccactctcaaacacagtccttgatgacttctgtgccatcaaagacactgatttccagaaccacccttctggttgtttggttggaaacaacaacactagctttgctcaagatgtccagtcgcagatcacatcagctagctttgcagactcacaggccttctctcgccaagattttccagataattctggaggcactggtacatcttcaagcaatgttgattttgatgattgtagtctgcggcaaaatagtaaaggctcatcatggcagaaaattgcgacaccccgcgtccgaacctacattaaggttcaaaaaaccgggtcagtcgggagatcaattgatgtcacaagctttaaagactacgaggagctaaaatctgctatcgaatgcatgtttggattggaaggactactaactcacccacaaagctcgggttggaagcttgtatatgttgattatgagagtgatgttctgcttgtaggagatgatccatgggaagagtttgtgggatgcgtaaggtgcataaggatattgtcgccaactgaggtccagcagatgagtgaagaagggatgaagcttttgaacagcgcaggcattaacgatcttaagacttctgtttcataaatgtaacaatataaaaatgatctcatgctgatttgtaagaagaaaaagagagtaagaaatgttcttttctccaactggtagaggagaaaccatcttgttgtaagcatttgatgtgttgttccgatttgagacctgaaactatattcatattatgtagtagagtgatgaatgaatgaatca

SEQ ID NO: 86787 - DNA, 593 bp, Arabidopsis thaliana columbia
cttattttttttttacatacacaaaaaaaaaaaaccatcggacctgaaatctttgtaagctcttcctccttgctcaagcaaacctctttttatatatttgctctctctctctcagatccgattcaagctttccgatttgcgatggacggtggagcggaaggatctcagcagcctcactcttattctagccaacaagctcttcctcctcactcatccagatgttccagacatcgagaaagtccagctcaagtctgaggttttggatttcatcagatcccatggtatggctcctttgtacgaaaccctaattgcctcttcggtgctggatttggatcaaagcttgttagagtctatgcgggccgctaatgaagaggagcttaagaagctcgacgagaagattgcagatgcagaagaaaatttgggtgaaagtgaagttcgtgaagctcatcttgctaaggctctgtatttcatcaggattagtgataaggagaaagttttggagctatttaaatttacttgagtgtaaactgtatgttgtggactaaatattggcgttgcttttttttcatttcttttcacttttttttattttt

SEQ ID NO: 86788 - DNA, 960 bp, Arabidopsis thaliana columbia
  unsure (1)..(960): unsure at all n locations
ccggctctatccaactcttatagggaaggctggtccgcctgcaggtcccggcccggaattcccgggtcgacccaggcgtccggttcttcctccttgctcaagcaaacctctttttatatattggctctctctctctcagatccgattcaagctttccgatttgcgatggacggtggagcggaaggatctcagcagcctcaccttattctagccaacaagctcttcctcctcactcatccagatgttccagacatcgagaaagtccagctcaagtctgaggttttggatttcatcagatcccatggtatggctcctttgtacgaaaccctaattgcctcttcggtgctggatttggatcaaagcttgttagagtctatgcgggccgctaatgaagaggagcttaagaagctcgacgagaagattgcagatgcagaagaaaatttgggtgaaagtgaagttcgtgaagctcatcttgctaaggctctgtatttcatcaggattagtgataaggagaaagctttggagcagctaaaactcactgaagggaaaactgttgctgttggacaaaaaatggacgtggtgttttatacgttacaacttgcttttttctatatggactttgatctggtatcaaagagcattggccaagcaaaaaaattgtttgaagagggtggtgactgggagaggaagaaccggctaaaggtctatgaaggtttgtactgcatgtccaccagnaattttaaagaaggctgccagctttattcctgggttctatatcaaccttcacaacatatgnaatttttnccatatgaggcctccatattctncaccgtcctgncaaggatcataactttngccagagttccctnagnaaaaggccgttgttgacctnggtcttacccgncttggnggntncntnccttntnggtnttnnccctgatgggcccncaagggttttta

SEQ ID NO: 86789 - DNA, 435 bp, Arabidopsis thaliana columbia
agacgaaagaaaaaaaaagaagcaaaacaaaatagagaaagagaaagaaagagaggatggtgataaagaaaatcgagctatgcatagagattacgaagataacaatggagttcttggtggtggtggctgacgccgtcacaatcttcttaaggcaatcttctccacctcctccggctctactccgccatggtctctactcatactctgcctcccctaatcctccttcttcccattacatcatcggctttcttccctaagtttgtaatcgtttcgttttaatgctttgtacatactatacatatgtatatcctggccttttttttttaaaaaggaatgcccctggatataaatttcttaattttcgaataaatcacctctcaccttactttctctatatgtatgtttatttttataaacaagaactagtttttagcc

SEQ ID NO: 86790 - DNA, 364 bp, Arabidopsis thaliana columbia
gcatgatttgggcttagctttttcgtccccaaatattgcgcttcatcgagattgctagggtttctcctcttcgatcttcgctgctcatcaacatctattgattcaattttcgtgctattgtttccctctctgatttcgtaatcggaaatttcgtctcgattcgattcattaggttccatcactcttttctgatcggtgaaaggaggagaagacctgttgttttcttatgtaagtgattctgatattcgttatctgttggctggtttgatgatgaataagcggaaaggtagtgaaactgagggttgggagaatttaccagatgatttagcatgttcaactgcatcacgatcatccaacttcatgt

SEQ ID NO: 86791 - DNA, 422 bp, Arabidopsis thaliana columbia
cacaaacataacaacaaaccaaaaaaaaaaagtatgagagagagagagagcaaatctccatcatcatcatggactcgtctccaaacgacggcgtacaccaaccgcttctccatcctcaaccatctccatctccgccggagtcaaccaacggcgagctagaaactgtcctctccgacgtagaaactcctctgtttctccgcctacgtaaagccaccataatcgaatcaaagcttctctttaacctcgctgcaccagccgtcatcgtctacatgattaactacctcatgtccatgtctactcaaatcttctccggccatctccgtaacctcgaactcgccgccgcttctcttggtaacaccggtaatcaagtcttcgcttacggtcttatgctaggcatggtgagtgcagtggagacgttatgt

SEQ ID NO: 86792 - DNA, 712 bp, Arabidopsis thaliana columbia
  unsure (1)..(712): unsure at all n locations
gcacgcctgcaggtaccggnccggaattcccgggtctacccacgcgtgcgcactaatactctatagtttgtttttgttcttcttataatctttatattttcagcaaacgaaagggaagtgtgtcagaaatctcagagggtgagaatcccaatgaggatcttacccgaacctcgaggttcggttccgtgtcttctccttcttgtgtcggttctcttatcagcgactctctcactcgctcgtgtcgtcgaagttgtcggttacgccgagagcaagatcaaaaccccccatgcattttcaggacttcgagtgacgatcgactgtaaggtgaataaaggccattttgttacaaaaggttcgggaaacattgacgacaaaggaaagtttggtcttaatattcctcatgacattgtctccgacaacggagcgttaaaggaggagtgttacgctcagcttcacagcgcggcgggaacaccttgtccggctcacgacggccttgagtccaccaagatcgtgtttttatccaaatccggggataaacacattttgggtctcaaacaaaatctgaaattttcaccggagatttgcgtttccaaattcttctggcctatgcctaagttgcctccttttaagggctttggtcatcctttccctttacctccacctttggaacttccaccgttttctcaagaagccatgtccacctaaatacagt

SEQ ID NO: 86793 - DNA, 493 bp, Arabidopsis thaliana columbia
  unsure (1)..(493): unsure at all n locations
ggttttccnacccaattgcggccttttcacggggncccaggtnccggttcggtnanggcttttggnccaggttattggtccaggggaagggatttggttacggttttgggacggggtggccctagtgtagtagtcccaggcacaagattccctccgttagtggtttccaggcgcacagattcccggttttgtgattccaggtatcacagttcctggctacggtactggatgccaaacaggtggctgcaatccgaacccaccacactactatatcccaccaagctgtccccattgtccacctttcacatcaggacaagacaaacacatgtcagacaaaggagccatgaccgaagctcttgcacccacttcaccggagatacatgtttaagctttaagagtccatgaaacaccagtctaataaatcactcataatgaaatctattttggtttataaaagcttcacagaaagttgaataatacaactttcttgctc

SEQ ID NO: 86794 - DNA, 1807 bp, Arabidopsis thaliana columbia
gaaagaaatggcagcagatcggagcttcaactcatcgtctttccatttggattccggtgcagctgctccagcgatataaaccttccctctgttcacagaggctactagagctatgcgttcttcatctctaccaaactcgtagaagtagtaatttcttaaaccttcttcttcctttaccttgattgtacgagcagagtaaattgttgccgcacctggaacaaaaagtcttgcagctgccttcaatgatcccaaatcagatatatctttagcctctaagaaagtgatcttaagttggtacagcaggatcaacttattacatagaaataatggctcagggacaccaaggcttatgctttgggtttatcttcttactatgcttcttcagctctacttttgcactcaggattcttaaggacctccctatgatggagccaagaaagctagatctgaaccatgaaatgatgcctgggatggttatgctacagccagatcatgaggtccaacctgagcacacggtcaagcctggccatacactccagtccatgtccggtgtatcagaacatccagagcacacggttaagcctggccatacactccagtccatgtccggtgcattagaacatcctgagcacaaggaaaagcctgaccataaactccagtctatgttgggagaacatcctgagcacaaggaaaagcctgaccataaactccagtctatgttgggagaacatcctgagcacaaggaaaagcctgaccataaactccagtctatgttgggagaacatcctgagcacaaggaaaagcctgaccataaactccagtccatgtctggtgaatcaaaacatcctgagcacaaagtcaagcctgatcagataatgcagaccatggcgagtgaactggaagaggaagatcctgaccacacaagtaagcctatggggtatggtgtaggtaggggctatggaagtggtgggtctggtgttggctatggcgttggaattggctctagtggaggcagtggctttggagaaggtattggctctagtggaggcaacggctttggagaaggaattggctctagtggaggcagcggctttggagaaggaattggctctagtggaggcagcggctttggtgaaggaattggttctggtggtggtacaggtattggcattggagaaggaataggatccgggtctgcccaacccaattgcggccctgtcacgggagctccaggtagcggattcggtgaaggcataggacaaggtagtggtccaggggaagggattggtatcggtataggacagggtggacctagtgtagtagtcccaggcacaagaatccctccgatagtggttccaggcgcacagattccctccgatagtggttccaggcgcacagattcccggttttgtgattccaggtatcacagttcctggctacggtactggatgccaaacaggtggctgcaatccgaacccaccacactactatatcccaccaagctgtccccattgtccacctttcacatcaggacaagacaaacacatgtcagacaaaggagccatgaccgaagctcttgcacccacttcaccggagatacatgtttaagctttaagagtccatgaaacaccagtctaataaatcactcataatgaaatctattttggtttataaaagcttcacagaaagttgaataatacaactttcttgctcaagtaaaaagatatataagggaaatgcatataagaataagtgagaagtactcagagacagaaaaagattgattaagaaaaaaaaaaaaaaaaaa

SEQ ID NO: 86795 - DNA, 969 bp, Arabidopsis thaliana columbia
  unsure (1)..(969): unsure at all n locations
atgatactccagctctctacgactcactattgggaaagctggtcacgcctgcaggtaccggtccggaattcccgggtcgacccacgcgtccgagacaaagaagaagacaagagtcaaacttgaaggcgacaatcggagcttccatggccgtttcttcctctttcaccaaaccctaatttcaatttcatcttcttttcccttctttctcaccggaaaatggatctctccgacatccgaaacaacaacaacgacaccgccgccgtcgccaccggaggaggagcaagacagctagttgacgcatctctctcaatcgttcccagatctacacctcccgaagactcaacactcgcaacaacctcatctacggcaacggcgactacaacgaagcggtcgactaaagaccgtcacacgaaagtcgacggaagaggacgtcggattcgtatgccggcgctatgtgcagctagagtttttcagttaacgagagagttaggtcataaatccgatggtgaaactattgaatggcttcttcaacaagctgagccagctattgttgctgctacaggtacaggaactattccggcgaactcttctactttaagtgtttcgttacgaagtagtggatcgactctctctgctccgccgtcgaaatcggtgccgctttacggtgctcttggattgactcatcatcagtatgatgaacaaggaggcggcggtgtgtttgctgctcatacgtcgccgcttttagggtttcatcatcagcttcaacaccaccagaaccagaatcagaatcagaatcagaatcaagatccggtggaaactattcctgaaggtgagaatttctctaggaaacggtatagatcggttgatttgtctaaagaaaacgatgatcggaaacagaacgagaataaatctttgaaaggaaagtgaacggcggggtcctangggnggngcnattttnggcggttnccc

SEQ ID NO: 86796 - DNA, 2013 bp, Arabidopsis thaliana columbia
  unsure (1)..(2013): unsure at all n locations
gattttctcaatcaccttcactatactgcttcgatggactctcactcttcccacctcaacgccgccaatcgttcccgcagttctcagactccttctccttctcattccgcctccgcctccgtcacttcttctctccacaaacgcaaactcgccgtccaccacggcagcgaatgcagccgcttctgaagatcacgcccctccttcttcctctttccctccttcctccttctctgccagtactcgcgacggcgctttaacctccaacgatgaactcgagagcatctccgctcgcggcgccgatacagattcagatcctgatgaatcagaggatatagtcgtggatgatgacgaggacgaatttgctcctgaacaggaccaggactcttctatccgcacattcaccgccgctcgactcgattccagctctggagtcaacggttcgagtcgcaacactaaacttaagacggaaagctccacggtgaagcttgagagctctgatggtggaaaagatggtggatccatctgtggttgggactggtgtgagtggcactgttggaggaagctcaatctcagggctcgtgccaaaggatgagtctgttaaggtattggctgagaatttccagactagcggagcttacattgccagagaagaggctttgaaaagagaggagcaagcaggacgactcaaatttgtttgttactcaaatgattccattgatgagcgtatgatgtgcttgattgggttgaagaacatttttgcaggacagttgccgaagatgccgaaggagtacattgttcgtcttctgatggataggaaacataagtctgttatggtactaagagggaatctagttgtaggtggtatcacgtatcgtccatatcacagtcagaagtttggggaaatagcattttgtgcaatcacagcagatgaacaagtaaaaggttacggtaccagattgatgaaccacttgaaacaacatgcacgtgatgttgatggattgacgcattttcttacttatgctgacaacaatgctgttggttacttcgtcaagcagggttttactaaagagatttacttggagaaagatgtatggcatgggttcattaaagactacgacggcgctctccctatggaatgcaaaattgatccaaagctgccatatacggatttgtcaagcatgatacgccagcaaagaaaggcaattgatgaaaggataagagagttatcaaactgtcagaatgtgtatccaaaaattgagtttctaaagaatgaagctggaattcctagaaagattatcaaagttgaggaaatacgtggcttaagggaagctggttggaccccagatcagtgggggcacactcgtttcaaattattcaatggttctgctgatatggtgacaaatcaaaaacagttgaatgcactcatgcgtgcgcttttaaagacaatgcaagaccgtgctgatgcttggcctttcaaagaaccagtggattctcgcgatgtccctgattactatgacatcattaaggatcccattgatctgaaggtaattgcaaagagggtagagtcggaacagtattacgtgacattggatatgtttgttgcggatgcgagacggatgtttaacaattgtagaacttacaactcccccgataccatttattacaaatgtgcaaccggttggaaacacacttccatagcaaagtacaagcaggtctccaatctggtgctaaatctcaatagaagaagatggtagaggttatattaatatcattttctagatctttcattttaagatactttcattggaactgggaatacatgtatactattttaggcccatgtatactggagcttaattgtttgtatgtttttttttcggataggtaaatatttgatttagttagattcagaatgtttaagtttttactttgtaggtttnnnnnnnnnnnnnnnnnnnnnnnnnnnnnnnnnnnnnnnnnnnnnnnnnnnnnnnnnnnnnnnnnnnnnnnnnn

SEQ ID NO: 86797 - DNA, 736 bp, Arabidopsis thaliana columbia
aacacaaagcctggtagcctccatccgcggttgcgcgggccgctactagaaactatgtggactcccccgtttctgcttgcaaaacattttcttgagaaagaagccactttctctatcactctctactatggatcttgttgagagtttttcccatggcgatcctgatactccgcgtttcagtgacgacttcggttctggctctgcttgctctactccgttcgttagcgctccgtctaggcccggccgcggtcctccgcctggttatttcttcagtgcaccgtcgagtccgatgcatttcttccttcgctctgcttcttcttcatcggagaatcctaaaaagcttgacacgtcttcatgcggcgactttgagtttgacttgtcgccctgggtggcttccagcagtggttcctttaggcggtgtttccatgactgcagctgaagagctcctctctcatggccacatcaagccaatgaacccttcttcgcatcttaagagaacctaaaacctatctccggttctagatctggagaacgaggaagaacacgaccattattataccaaaccccaccgtgagatgaagcgtgggagataatcttaaacttataagcagttctgatcacccggaaagcccgaataccaccttttccggttcctaatacgccaatttgtattaaattggtgacccccccccaagaaaatggccatactaaaggatatttatagttcccccccgcc

SEQ ID NO: 86798 - DNA, 829 bp, Arabidopsis thaliana columbia
  unsure (1)..(829): unsure at all n locations
aatacgactctcttagggaaagctggtacgcctgcaggtaccggtccggaattcccgggtcgacccacgcgtccggtttttcagcttcaaaccctccttgcactctccgcttccctccgttacctttacttctctattgcttagctcgaaaaatggcatcttcagccgcccaaatccacgttctcggcggaattggattcgcttcttcttcttcttccaagagaaatctcaatggtaaaggcggtacctttatgccgagaagtgccttcttcggtacaagaaccggtcctttctccacacccacttctgcttttctcagaatgggcaccagaaatggcggcggcgcttctagatacgcggttggtccggttcgtgtggttaacgagaaggttgttggaattgatttgggtacgactaactctgcagtagctgctatggaaggaggtaagcctacgattgtgactaacgctgaaggtcagaggacaacgccttctgttgtggcttacacgaggagtggtgataggcttgttgggcagattgcgaaaaggcaagctgttgttaatcccgagaatactttcttctcagtgaagaggtttattggtaggaagatgaacgaggttgatgaagagtctaagcagggttcttacagagttgttagagatgagaacaataatgttaagcttgagtgtcctgccattaacaaacaattngctgctgaggagatttcagctcaggttctaaggaaactngnggatgatgcatcaagattcttgaccacaaagtaaccaaggctgtcatcactgtgcctgcttacttcaaccgatcacag

SEQ ID NO: 86799 - DNA, 607 bp, Arabidopsis thaliana columbia
cacattgaaggaactgttccgtttctggccaaagaaagacgaggaagaaccgcccaagtggacatctcgacttttctacacagtagtggctattgttgttgtcatgctgcttaggcgtcatgcccctgatgaagctgctcgggccaggtaccaaagaaggatgtccaacatcattgatgatgtccttgagtggtcaccaaagctagcactttctggtttgatggagaatcagcaacctgtaaacatcacagatgcggcaaacaacttcctcagattcagcaggaggtcccgaccagactgaagaggtcgacctagatgaaactcaaggcgaggacctagacgaaacgcaaggcaaggaggaagctgaaggttggactgactctgatcttaaaacataaaaaaaccaaaatatagaaacgaaagttcattgtaacaataagtcaacttaagtgaccaagacgaggtgagttctttataagaaagtcttgaaagattttgtggtactccattactcctttacattttgacacaatctggaatttagctctcaatcacagttttgtattccaaacttcaattccagctaagaaatgtttagttaagatag

SEQ ID NO: 86800 - DNA, 853 bp, Arabidopsis thaliana columbia
atccgagtaagaaggaaacatgagaactacatgtgttcattaaactaagccatgcataataaactccaccttagaaacgaattgattgctatatatataatatatagatatagatttctgttcgtacacgaatcatatatatcaccttcgctagctagtgtactgagttcaatgaagatacatgccatattggtagtagcgttcttggtcctgatgaagaccgccgtttcccaggacaataatccgctggaacattgcagagacgtgttcgtgagtttcatgccctgcatgggcttcgtcgagggaatatttcaacaaccttctccagattgctgcagaggcgtgacccacttgaacaacgtcgtcaagtttacgtctccaggatcgaggaataggcaggatagtggagaaacagagagagtgtgtctgtgcattgagataatgggaaatgcaaatcatcttccttttcttcccgccgctattaataaccttcctctccgttgttctcttactctcagctttcccatctccgttgatatggactgttctcagttcagaaacaccaagaatcccgacgttgagaaattaaattaactaccaggatatatatctatgaatattgggaagggaagccttgtaacagttctatatagttacaaatgatatataatcgagtttattgtagatgtaatagtgactagtgttacaaaagtacgaagaattttctgtaagcgattatatatatgtatattcatcagataaaaaaaaaaaaaaagggcgcccgctctagaggatccaagcttacgtacgcgtgcatgcggcgtcatagctctactatagtgcagctaaatca

SEQ ID NO: 86801 - DNA, 1958 bp, Arabidopsis thaliana columbia
  unsure (1)..(1958): unsure at all n locations
cccacgtttacacttcttcaagttttccatatactaatggggaggtttcataaatttcctctcctaggtttagttctgttcctcggtctgaccggctcacttatcgccgccaatgagtatgcctgttctagtaccgatatacactttactcgtgccaatttccctaaaggtttcatttttggtaccgcaactgctgcttttcaggttgaaggagctgtaaatgaaggatgtagaggtccaagcatgtgggacgtatacaccaagaaattcccacataaatgtaattatcacaatgccgacgttgctgtcgatttctaccatcgttacaaggaagatatcaagttgatgaaaaatctgaacactgatggctttagattttccattgcatggcccagaatattcccccatggtaggatggagaaaggaataagcaaagcaggtgtgcagtattaccacgatttgatcgatgagctcctcgcaaatggtataacaccattagtaactgtttttcactgggacactcctcaagacttagaagatgaatatggtggctttttaagcgaccgcataataaaggattttacggagtatgcaaacttcacattccaagagtacggagacaaagtgaagcattggatcacatttaacgaaccatgggtgttcagtcgagctggctacgacattgggaacaaagcaccgggacgttgttctaagtacatcaaagaacatggagagatgtgtcacgatggtcggtcaggacacgaagcttatatcgttagtcataacatgctcttggcacatgccgatgccgttgatgcctttaggaaatgcgacaagtgcaaagggggtaaaattgggattgctcacagtccagcttggtttgaggctcatgagctctcggatgaagagcacgaaactcctgtaactggcctgattgacttcatattgggatggcatttgcatccgaccacatatggagattatccacaatcaatgaaggatcacatcggacatcgactgccgaaattcacagaggcacagaaagagaagttgaaaaattcagctgattttgtaggaatcaactattacacatcagtgtttgcattgcacgacgaagagacagatccttcgcagccaagttggcagagtgattctctcgtggactgggaaccaaggtatgtggataaattcaatgcttttgctaacaagcctgatgttgctaaagtggaagtctacgcaaagggtttgaggagcctcttgaaatatatcaaggacaaatacggcaatcctgaaatcatgatcaccgagaatggatacggagaggatctaggtgagcaagacacaagccttgtagtggcgctgtcagatcagcacagaacatactatatccagaaacatctcttgagcttgcacgaagcaatttgcgatgataaagtaaacgttacagggtattttcattggtcattgatggacaattttgaatggcaagatggatacaaggcgagatttgggctctactacgtcgattacaaaaataatttgacgcgccacgaaaaattatcagcccagtggtactcgagtttcctccacgatggatcaaaagagttcgaaatcgagcacgagttcgaacacgatgagttgtagagtgaattctctacaaacagactttgaaaatttgagtcatatatatattatatattcataaactatttgtttacagtttgctgcagtgaatgcatttccatattcaagtaaataaatcagatactcaatatacagacaagtaaagtttggattgtgttgtagtaagtatttggatagttgaatattgagatcaagggtattcacgaagattccgtactagttattgatattttctattaaaaaaagnnnnnnnnnnnnnnnnnnnnnnnnnnnnnnnnnnnnnnnnnnnnnnnnnnnnnnnnnnnnnnnnnnnn

SEQ ID NO: 86802 - DNA, 641 bp, Arabidopsis thaliana columbia
  unsure (1)..(641): unsure at all n locations
gnnggcncntncagctntcttttttttnnnaagngnccccctcanaggcaacnggaactaaaaacgttgatatccgaacttcgcggccgcgccaccctccgtgagtgctcgctccggcgatattctctgcggcttgtttcgcaaaaaatccgtcgcgccttttcgttttactcagcctgtctatcgtacgtcgctgtgtccaagtttcgttgctgttcgagccatggcagagtctcagactgctcagaggaatcagccgcaatcctcaggctcctctggggagaagcaagctttgatatctctatctgacaagagggacttggcttctcttggcaacggtctgcaagaattgggatacactattgtttctactggaggaactgcctctactttggagaatgctggagtctctgtgaccaaagtggagaagcttactcattttccagaaatgcttgatggccgtgtgaaaactttgcatccaaacatacatggtggtatcctcgctagaagggatgtggagcatcatatggaagctcttaatgagcatgggattggtacatttgatgttgtgggtggcaatttgtacccgctcaatgaaaaagtactgcccaggnggncaagtttngggngggtnaaaattt

SEQ ID NO: 86803 - DNA, 391 bp, Arabidopsis thaliana columbia
atgctggtgttccaatgtcttccatcatcgaacaaggctatggagtgggtgatgtcatttcccttctatggttcaaacgtagtctacctcgttactgtacaaaattcattgagatatgcataatgctgtgtgctgatcacggtccatgcgtctccggcgctcacaacaccattgtaacagcaagagcaggcaaagacctcgtctcaagtcttgtctcaggtttattgaccattggtccccgatttggtggtgccattgatgacgctgctcgatacttcaaagacgcgtgtgacaggaatctcacaccttatgaatttgttgagggaatgaagaaaaagggaatccgagtccccgggattggacacaggatcaagagcagagacaacagaga

SEQ ID NO: 86804 - DNA, 388 bp, Arabidopsis thaliana columbia
aaccggttgggttgaaaaaccggtccttttctgcgaatgattgtctgcgaaaaacccgtgttctgtctcgatccaagttgggacaagaaggagacttcccggggagtggttctgacaatgctttctcctctgaggatgatatggaggattacacttgtatcattgcacatggtcctaacccgaaaaccactcatatctatggtgaccgagttttagagtgtcacaagaatgagttaaagggagatgaagataataaagagaagtttggttctgtgttcccctccgataacttcctcggcatctgcaacttctgcaacaagaaactcggaggtggcgacgacatatatatgtatcgagagaagtcattttgcagtgaagagtgtcgttc

SEQ ID NO: 86805 - DNA, 704 bp, Arabidopsis thaliana columbia
  unsure (1)..(704): unsure at all n locations
cagctctatgcgactcatatagggaaagctggtacgcctgcaggtaccggtcccgtccgcccgggctatttcttctcccttgtactgttttttgttttttaccaaagaccaaccgttcataacaatgatcgcgcgacggatctggcgaagccaccggtttctccgcccattcagctcgtcatctgtttgctctccgccgttccgggtaccggagtatctttctcagtcgtcttcctctccggcgtcgcgcccattctttgttcaccctcccactttgatgaaatggggtggaggaagtagaagctggttttcgaacgaagccatggccactgattcaaattcagggttaattgatgtgccactagctcaaactggggaaggtattgctgaatgggaagcttctcaagtggtttggtcaaagggggagattctgggggaagaggttcaagccactctgtgaaagttcagagccataaagccacctatagggaatcacaagtccgttttaaaaggggaaagtggctcttgattttaacattctccaggggacattattaagggttgggngccnctggtaaggtttgcggnttaaggctcnaggnttcggtntnaccccttgaaggttanaaatttnaccctggggggttaancaggnccanaaanttnttggggctttaacntggggttgacctttaaanncntga

SEQ ID NO: 86806 - DNA, 1847 bp, Arabidopsis thaliana columbia
ggctggtccgttctgcagtaccgcgtccggaatttccgggtcgacccacgcgtccgatttcttctcccttgtactgttttagaaacaaacacacggaccaaccgttcataacaatgatcgcgcgacggatctggcgaagccaccggtttctccgcccattcagctcgtcatctgtttgctctccgccgttccgggtaccggagtatctttctcagtcgtcttcctctccggcgtcgcgcccattctttgttcaccctcccactttgatgaaatggggtggaggaagtagaagctggttttcgaacgaagccatggccactgattcaaattcagggttaattgatgtgccactagctcaaactggggaaggtattgctgaatgtgagcttctcaagtggtttgtcaaagagggagattctgtggaagagtttcagccactctgtgaagttcagagcgataaagcaactatagagatcacaagtcgttttaaagggaaagtggctctgatttcacattctccaggtgacattattaaggttggagagactctggttaggttggcggttgaagactcgcaggattcgcttctaaccactgatagttcagaaattgtaactctgggaggttcaaagcagggaacagaaaatcttcttggagctctctcaacgcctgcggttcgtaaccttgcaaaagaccttggcatagatatcaatgttataactggaactggtaaagatggtagagttttgaaagaagatgttctccggtttagtgaccagaaaggatttgtaacagattcagtttcttctgagcatgctgttataggaggagactcggtttccactaaagctagtagtaactttgaagataaaacagttcctctaaggggattcagccgagcaatggtcaagacaatgactatggctacaagtgtaccgcattttcattttgttgaagagataaactgcgactcacttgtggagctcaagcagttcttcaaagagaacaatacagattccaccatcaaacacacttttcttcctactttaatcaagtctctgtcaatggctctaaccaaatatcccttcgtgaatagttgcttcaacgcggaatctctcgagatcattctcaaaggttcacataatattggagttgcaatggccactgaacatggccttgtcgttcctaatataaagaatgttcagtcattatctctgctagagataaccaaagagctgtcccggttacaacatttggcagcaaacaacaaacttaaccccgaggatgtgactggtggaaccataactctgagtaacattggagcaattggtggtaaattcggatcccctcttttaaacttaccggaagttgcaatcatcgctcttggaagaatcgagaaagttccaaaattctcaaaagaaggaactgtctatcctgcatcgataatgatggttaacattgctgcggatcatagagttctagatggggcaacggtagctcggttttgctgccagtggaaagagtatgtcgagaaaccggagctgctgatgcttcaaatgagataagaaggaaaggttcatgtttatttgtgaatcattatgtatgaaaccttcatgttcgaataagatcaagaactgagctagcagttgtaaactaaacaagaaagtaaaagtcatatctaataaaaaaaaaaaaaaactgccacatatggaccctagctaacctccttagtttttacccgggacggtttgttaataattgaaatggatttattgaaaaaaaaaaaaaaaaaagggcggccggtttaaaagattccaggctacggaagggggccaggcacgttcaaa

SEQ ID NO: 86807 - DNA, 788 bp, Arabidopsis thaliana columbia
cggaccggaatttccgggtcgacccacgcgtccgatctgttacgtacgaagagctaagggaacgcctccaccgcaaaattgatgagctcaaaggtggtcgtggaggttcagatagaccaagaagcaatgaaagaaggaagaagaatctgccaaataagagaaagagggatacagtttctgaggagaagactgtggaggagattaagtcagcagataaaggtaagggtaagttggatgtggaggaggctgctaaggaccttacatttggttatgtcaagattgatgacgatgaagaacacggaaaagagaaaaagaaacgaaggctttcaaaggcaagagaacttgaaagggctatgaagttagaggctgcaaagaaggatccagaaaaaggtgatgtaattgcaaagaagcactcatggaaggcagctacaagcagagcagctggtatcaaggttcatgatgacccaaagctattgaagcaaagcatccacaaagacaaaaagaggcaagagaagaacgcagagaagtggaaagagagaattgaagggcaaccaaagttcaaggtggagaagcagcaaaagagaacaaggaatattgccgttagattgaacagaattagatgcgccaaatcgccaagagagaaaaaaaagctcctgcgtccttggttttggagggccgcaaagaaagggttttttccttgaaaggggggaaacctagaaatttaagtgtttcccccaacgccctttttggtggtctccaaccattttttaaccgaatggtggatccct

SEQ ID NO: 86808 - DNA, 3029 bp, Arabidopsis thaliana columbia
  unsure (1)..(3029): unsure at all n locations
cagtgatcactgtcgtggttgtccatgtcatttcccacgttttccttccatttctcaaaagtttccctctgttttctcccgaagctccctctccgctgtgcgttcttttgctcagtgaattgggttctattgagcttcatcattgttcttggtggtgggttgctactttcagagggagcttctagttctaggcctcctgttattaaagttggtgctatatttggtttaaacaccatgtacggtgaaactgcaaatatcgcctttaaagctgctgaggaagatgttaactctgatcctagcttccttggtggatcgaaattgcggattttgatgaatgatgctaaacgtagtggcttcctcagcatcatgggagcattgcaattcatggagactgatgtagtggctataattggtccacagacatcaataatggctcatgtgttgtctcatcttgccaatgagcttactgttccgatgttgtcatttacagctcttgaccctaccctctctccactccaattcccattctttgtccaaacagcacctagtgatctgtttctgatgcgtgccattgcagagatgatcacttactatggctggtcagatgtggtggcattatataatgatgatgataatagtagaaatggcgttacagcgttaggcgatgagcttgaagagaggcgttgcaagatttcttacaaggcagtacttcctttggatgttgtgattactagtccagttgagattatagaggagttgattaagatacggggaatggagtctcgggtaatcgttgtgaacactttcccaaatacaggcaagatgatctttaaggaagcagagagattagggatgatggagaaaggttatgtttggatagctacaacttggttgtcttctgtgctagattcaaatttgcctttggataccaaattagtcaatggagttcttacactgcgtcttcacacgccagattctagaaagaagagggactttgcagcacggtggaagaacaagttgagtaataataagactattgggttaaatgtctatggtctgtatgcttatgatactgtctggatcattgctcgagccgttaagacacttttggaagctggaggcaatctttctttctccaatgatgcaaagttaggcagcttgaaaggtgaggcgttgaatctaagtgcattaagcagatttgatcaaggatcacaacttcttgattatattgtgcatacaaagatgtctggtctaactggtccggttcaatttcatccagacagatcaatgctacagccttcatatgatattatcaacttggttgatgaccgggttcaccaaataggttactggtctaactattctggtctttctattgtaccgcctgaatcattttacagcaaacctcctaaccgttctagctcaaaccaacatctgaactctgtaacttggcctggtggtacttcagttacgcctcgtggatggatttttcgtaacaatggaaggcggctaagaattggtgttcctgatagagcaagcttcaaggactttgtttcaagggtcaatggaagtagcaacaaagttcaaggatattgcattgatgtatttgaagctgcagtgaaactgctttcttatccggttcctcacgagttcatctttttcggagatggtttgacgaatccaaactacaatgagctggtcaacaaggtcaccactggggttgactttgatgctgttgtaggcgacatagccattgtcaccaaacggaccaggattgtggatttcacccagccatacattgagtcaggccttgtcgttgttgctcctgtcacaagacttaacgaaaatccttgggcctttttacgcccgtttactcttcctatgtgggcagtaacagcatctttttttgttattgttggagctgcaatatggattcttgaacaccgtataaatgatgagtttcgtggtccaccaaggagacagatcattaccattctctggttcaccttttcgacgatgtttttctcccatagagagactacagttagcacacttggtcgtatggtgcttctgatatggctttttgtggttctgatcattacatctagctacacagcgagtctcacatcaatacttacagtgcaacagcttaattcacctataaaaggagtagatacactcatcagtagcactggtcgtattggtttccaggttggttcttttgctgaaaactacatgaccgatgagcttaacattgccagctccagacttgtgcctctcgcctcccctgaagaatatgctaatgcgcttcaaaatggcactgttgcagcgattgttgatgaacgtccttatattgatctcttcctctcagattactgtaagtttgccatcagaggccaagaattcaccagatgcggttggggatttgcattcccaagagactctcctttagcagttgacatgtcaaccgcgattcttggtctatccgaaactggagagcttcagaagatccatgaccgatggctttcgaaatccaactgcagcagcccgcatgggtctcagtcaggtgactcagaacagctcaacgtgcgtaccttctggggtatgttccttgtggttgggatagcctgtctcgtcgctctctttatccacttcttcaaaataatccgcgacttctgcaaagacacacctgaagtagtagtagaagaagctataccttcaccaaaatcttcacgtttaacaaagctacagacttttttagcatttgttgatgaaaaggaagaagaaaccaagcgaaggttaaagcgcaaaagaaacaacgatcattctatgaatgccaatagcattatctcgaggactgcatctagaagacccatatgattatccttatgattttgttcatctgtacatttcaacacacacctcatttgcaacaaaaatgagattttgtttatataccaccatttacaatcatttaagctaaagccaaaccaaagtggacaagcttnnnnnnnnnnnnnnnnnnnnnn

SEQ ID NO: 86809 - DNA, 388 bp, Arabidopsis thaliana columbia
cttcttcttcattcttctcaatatctcctaatgggttttggtacatcttcttcttcatcttcttcctcagctctgaaatggctaggtttcgttactgccgtttgggtccaatccatctccggcaacaattacaccttctcaaattactccggcgcactcaaatccttaatgaacctcactcagttagaactcaacagtctctccgtcgctaaagacgtcggaaaagcattcggaatcctcgccggacttgcttccgaccgtctttcaactccggtgatcctcctcatcggttctttcgaaggtcttcttggttatggtgtacaatggcttgtcgttagccgcacgattcaacctataccttattggcagatgtgtgtgtttctctgta

SEQ ID NO: 86810 - DNA, 314 bp, Arabidopsis thaliana columbia
aacgcgtgggttcgtcgccttaatttcgttcaagcttcgacagaagtcccagatttgttcacctttttcggtattgaatcatgatgaattcaatcttcggaaagcgaaaaactcccgcagaacttctgcgggagaacaagcggatgctggataagtctatcagagagatagagagggagagacaaggcctacgaacacatgaagggagacgcattagcgagattaggaagaccgcagagcagggccaaatgggagctgttagagtgatggcaaaggatcttagaagaacgcgggaccagattgagaagttttac

SEQ ID NO: 86811 - DNA, 642 bp, Arabidopsis thaliana columbia
  unsure (1)..(642): unsure at all n locations
cggcccccccttaggtcgactgtatcgataagcttgatatcgaattcgcggccgccgaaatttcacggtaggtatttgtaatggcgacagttccaggacaattgatctgggagatcgtgaagaacaacaactgtttcttggtgaagcagttcggtagaggaaactctaaggttcaattcagcaaggagactaacaacctcaccaacgttcactcttacaagcactctggtcttgcaaacaaaaagactgtgaccatccaggccgctgacaaggaccaagctgttgtgctcgccaccaccaagaccaagaagcagaacaagcctaagctctctgtcaacaagtctatcctcaagaagggattccccaggatgtcaaaggctgttgctaacccaggtggtggncaactactacaggccggnctttgaagaaagctgnactttgctaagactcaagggcatcagcaaagggctcaggggttgccaannccggtggcaagcaaaggaaccaggcaagcttaanttcttctttnaaaanctggttttttttgnaggnaaagttttgtttnanaggttttttaaggtgntcntttnangnacccaaatgantcncttgggnggaatnctaaccngggggcctntttta

SEQ ID NO: 86812 - DNA, 726 bp, Arabidopsis thaliana columbia
cggacgcgtgcacaaaaggggggcgccaccattaaaatctctcgatctctatctgcgaaatttcacggtaggtatttgaaatggcgacagttccaggacaattgatctgggagatcgtgaagaacaacaactgtttcttggtgaagcagttcggtagaggaaactctaaggttcaattcagcaaggagactaacaacctcaccaacgttcactcttacaagcactctggtcttgcaaacaaaaagactgtgaccatccaggccgctgacaaggaccaagctgttgtgctcgccaccaccaagaccaagaagcagaacaagcctaagctctctgtcaacaagtctatcctcaagaaggaattccccaggatgtcaaaggctgttgctaaccaggtggtggacaactactacaggccggacttgaagaaagctgcacttgctagactcagcgccatcagcaaaggtctcagggttgccaagtccggtgccaagcaaagaaacagacaagcttaagcttcttctttcacaatctgttttttttgaagtaaaagattttgttgaacaggttttatttaagttgttgctttgaagttgaaccataatgctattctcctttttcattatccttattataaaggagttagaagtttatcttgttatgcttgatgtttctggtgtgcttgtgttacattttgttagatccttttatcgaatcaagaactttctt

SEQ ID NO: 86813 - DNA, 818 bp, Arabidopsis thaliana columbia
caaacgaaaaaaaacatggccatctctttcctctgtttttgcctcattaccctcgcttcgttaatctttttcgccaagaagattaaacacttgaaatggaatcttcctccaagccctccaaagtttccggtcatcggaaatttacaccagattggagaattgcctcacaggtcacttcaacatctcgccgaaagatacggacctgtgatgcttcttcactttgggtttgtccctgtaactgtggtctcatcaagagaagcagctgaagaagtgctcagaactcatgacctagactgttgcagcaggcctaaacttgtcgggacaaggttactctcgcggaattttaaagatgtctgttttacgccatacggtaacgagtggaaggcgcggcgtaagtttgccctgcgtgagcttttctgtttgaaaaaggttcagtcctttaggcatatccgagaggaagaatgtaactttctggtcaagcaactgtcggaatccgcggttaatcgctctccggtcgatttgagcaaatcacttttctggctaaccgctagtatctttttcagagttgccttaggacagaattttcatgagagcaattttatcgataaagaaaagatcgaagagctcgtgttcgaagctgagactgccctagcaagtttcacttgttctgatttcttccctgttgccggacttggatggcttgttgattggttttccggacaacacaagagaactcaacgatgttttttacaagctcgatgctcttgttcaacatgtcatagatgatcatttaatccaggaagatcaaaagagcacga

SEQ ID NO: 86814 - DNA, 542 bp, Arabidopsis thaliana columbia
  unsure (1)..(542): unsure at all n locations
agctctcctacgactcactatatggaaagctggtccgcctgcaggtaccggtccggaattcccgggtcgacccacgcgtgcggtgtttctaaggcttgcagagagacgtgctattagtttaggggacagtcctacccttgaacgaaggcgagacgacctaagtcaagcagttttacaggccaagaatgcgagtaatagcgatggtttagtaggttctgctcaaggtgtttctgacagtggattgcttgatctgcttgaaggaaaactcgcagttcttcagttccaaattaagatcagggacaaacttgaagctatagcttccaattttgagtcctcggttgccatgcaggactctgaccagaacgggcaagtactggatggtgattctagtgatgataccaacttagcaaatgcagcaaatgaaatggccatggaggtctcctcggaacttaaaagtgtaacacagctggataatgagtatgctgtcccatttgagctctgggagatctgtctggaaatgctntactttgccaactattctg

SEQ ID NO: 86815 - DNA, 532 bp, Arabidopsis thaliana columbia
gtccacgcaagactctatactgagtcatattacgacagaaggggacacaaaacacaaaaaagaacaaatatggagaaacaaatctctctattgctctgtctactcctcttcatcttctcaatatcatcctctctccatgaaaccgaagctcgaaaacacaataaatataaacccgcaccgatcatgagcctagtcccaagaactctctacgaccaaatcttcatccacaaggacaacaacgcatgccctgcaaaaggtttctacccctatgaagctttcgtggaggctacaagatccttcccgaagttcgggagcgtaggaaacttttggacaaggcgacgcgaagtggctgcgtttttggcgcagatatctcacgagacaacaggtggttgggccacggcaccagacggaccatatgcgtggggattgtgttttaaagaggaagtgagtccacagagtaattattgtgatgcttctaataaggattggccttgtgtttctggcaagtcttacaaaggaagaggtcccattc

SEQ ID NO: 86816 - DNA, 532 bp, Arabidopsis thaliana columbia
cggcttgtgtcctctctatcttactagttataaactaaagccggtcaggtgcctctttagctcttccccaccactccgattcatctttatcctctctctcatctcgtccgttgttgcataagtgctatggatctcgcgtcgaatcttggtgggaagatcgataaatccgatgttctcaccgccgtcgaaaagtatgagcaatatcatgtcttccatggaggaaacgaggaagagagaaaagccaattatactgacatggttaataagtactatgaccttgctactagcttttatgagtacggatggggagaatccttccattttgcacaaagatggaaaggagaatcgcttcgagagagtattaagcgacacgagcactttcttgctcttcagcttggcatccaaccaggacaaaaggtactggatgtaggatgtggaattggtggaccgttgagggaaattgcaagattcagcaattcagttgttaccgggctcaacaataacgaataccagatcaccagaggcaaggaac

SEQ ID NO: 86817 - DNA, 605 bp, Arabidopsis thaliana columbia
  unsure (1)..(605): unsure at all n locations
tgcnnnnnnnnnnnnnnnnnnnnnnnnnnnnnnnnnnnnnnnnnnnnnnnnnnnnnnnnnnnnnnnnnnnnnnnnnnnnnccacgcgtccgatttgcttcactgtcttgtcgattctgcttctccaaaaaatttcttctttagttctgagtttttctctgttctgaaaaaccccaaattttgttttttttggccattcaaaatttcagaagaaggcgatacaaaatcgtctttgaattctctttgtttatgatctgttcaagtaaaggaacggtcgtaattgctactagaagctcatttcccagattactaaaccggattcaaaatcgaaatgatgttccgattagtgtcatagctactcgacgatcatcaatgtcggtggaggcgtttccgatgaggttaaaatcatcacagaagaagaggaagatgaacattggttgcggtgtttccccttcttcgccgacgacgacggtggtagatgaggaagtagccattaggcggaaattggcattgacacgggttgtgaaggataacgcgggcgatggaagctccggcagagagtgctcgctatgcaccgaccacagaggtgacaccttcttcactgag

SEQ ID NO: 86818 - DNA, 420 bp, Arabidopsis thaliana columbia
ggaccacaaagttttctactttgcaatttagataaatctttctatccactttgagaataaattaagggctctcaatttcgaattctgcttctccaacgaaaaaaacgaaatctttaatggcgaagaaaggaggagcgacgctagctgaggatgcaccatggcgagtttcgtcaggaagaccagtgcctaagatcagtcgctctccggttttatctatctctcaaaacccagaaaccgattacgccatttccgtcatgaagcatccgaatcctgtgggaggtgggtttgcgatggaagctgtacttgaatccgcaggacctgaatgcgttgttcctggccaagtaacacctcttcggttacttggtgttaaggtgtggcctgttgaaattgatcttaaattcttgggaccaatgggaaaag

SEQ ID NO: 86819 - DNA, 548 bp, Arabidopsis thaliana columbia
  unsure (1)..(548): unsure at all n locations
ttcgtttctcgtcggcgttttgagagacatgtgggaatcgatttgcctaacgcttgcggccaccgccggaaacaatatcggcaaggttctccagaagaagggcactattatcctccctcctctctcccttaagcttaaggtgttaagagcatatgctgaaaacaaaccatgggcgttaggttttcttatggacattgttggtgctttgttgatgctgagagcactatcacttgctcctgtgtcagttgttcagccagtctcgggatgtggccttgccattctttccgtcttttcgcatttttatttgaaggaagtcatgaatgtttttgactggattgggattactgttgccggcattgggaccataggnagttngggctggtggtgaaggagcaaagaagcantcaattaaatatntgtntttccagtttnctgtggctaagcattgggtttttgcccacctngtttgaacnacctnaaatgcggtggnttcanaattttnaaaacgccaacccaagggngnagnacctnggggaaaataaagnngg

SEQ ID NO: 86820 - DNA, 784 bp, Arabidopsis thaliana columbia
gcccccgcgccccctttgaagccctttggagaccctctggcagtaccggtccggaattcccgggtcgacccacgcgtccgcaaaaaacaaaaacagagccaggaataatgtcagtcttcctctgtttcctctgcctcttaccccttatcttaatcttcttgaaaaatctcaaaccatcgaaatggaagcttcctccaggcccaaagaagcttccgatcatcgggaacttacaccaacgccgggaattacatcccaggaacagtcggaatctttccgaaaagtacggaccaatcgtgtttctccgatacggattcgtccccgtggtcgtgatctcgtcaaaagaagcagcagaggaagttctcaagacccacgatcttgagtgttgtagccgaccagagacggttgggaccagagcaatctcttacaactttaaagacatcggattcgcaccgtgcggtgaagattggagaacgatgcggaagctctcggtggtcgagctcttcagctcgaaaaagcttcaatctttcaggtatatcagagaggaagagaacgacttgtgtgtcaagaaactctctgatttagcttcgagacgatctttggtgaatcttgagaaaaccctttttactttagtcggaagtatagtgtgtaggatagggtttgggataaatctccgtgagtgtgagttcgttgatgaagatagcatcgatgatcttgtgcacaagtctgaagatgtcataaggaaattctatcttctctgatttctttcccgaataatgggtaggct

SEQ ID NO: 86821 - DNA, 781 bp, Arabidopsis thaliana columbia
  unsure (1)..(781): unsure at all n locations
aagtcaaatnatttcaaagcgaaaggaaaaggagaaacgtaaagagggcaaagcccttntncttcttgttcgagaaggagctgcagcctcagataaggattcttttgatgcccagttgataaaggaagcgactttattttaaccaacgngattttatcatcaggntcattgatcaccctcttgagaacatctcgagctttcccagatctatctgagctcctgggtttataaatcgcttccttcacatatcgatgggagcagtggctgcgtgggttgctacagagaacacagatcaactgccgccagtcttgaaggatccaccttcccaattccaattggctcgaccgtgtaagcaaaccgagtgtctctcgaagcatttctggtcaacaagcacaagtttgatatgggcaacatcaaccttcccttcacaggggagcttatcatcatccaatcagacttttgattctcaatctgctgctagaaactctaatgctcctcctgaatatgtaaatcaaggtcttcttctttggaatcagacacgggagcgttgggtgggaaaggataaacccaacaacccggtgggatcacaatcaaggngccaagttaaatttggnncacagcaacgtatgntngctttctgggggggaacaaggtntttcccaacccattccttttaccgaaatggngggtttntngnggcatttgggcaagaggcttttgctnacaggcttggggnccanatttggtcgggttttgttatttcctttggttnttnttccna

SEQ ID NO: 86822 - DNA, 984 bp, Arabidopsis thaliana columbia
aaaaccgggccgacccacgcgaccggaaacggaaagagggcaaagcccttcttctttttgttcgagaaggagctgcagcctcagatagggattcttttgatgcccagtcgacaaaccaagcgactttattttaaccaacgagattttatcatcagggttggttaattggtttgctatttgacaaggatcattgatcaccctcttgagaacatctcgagctttcccagatctatctgagctcctgggtttataaatcgcttccttcacatatcgatgggagcagtggctgcgtgggttgctacagagaacacagatcaactgccgccagtctgaaggatccaccttccaattccattgctcgaccgtgtaagaaaccgagtgtctctgaagatttctggtcaacacgcacagttgatatggacaacatcaccttcccttcacaggggagcttatcatcatccaatcagacttttgattctcaatctgctgctagaaactctaatgctcctcctgaatatgtaaaatcaaggtcttcttctttggaatcagacacgggagcgttgggtgggaaaggataaacccaacaacccggtggatcacaatcaaggagccaagttaaattggaacacagcaacgtatgatagcttgctggggagcaacaagaaatggtggattttctagtggacatttgggaacaagaaggtctatatgactgaacaagacttggaagacacacacacatactggttcgggcatttctgatttattttttcttttcggttttcttttcttttctcaaagcccttgttgttaccacttatcatcttccatttggagttgatcgagaatactgggaaatgtggcttatacgttttcaccgtaaatgagaaatatcctttgtttaccatctttcagtccaaaagaattaagagcaatatctcggtttgactaatcagtatcttaatatgggacatgttcttgtgt

SEQ ID NO: 86823 - DNA, 786 bp, Arabidopsis thaliana columbia
  unsure (1)..(786): unsure at all n locations
ctttaagcagacaactaaagtaccctagagatatgtagctccagatatgcatgcaagctgggatcagccaacagtatgcatcgtcgtccatgaagtgcaacacagcagtattacaatcattggctttccagttaacggcggaaactctcgattttggcatatagcaatgagagggcaatggaatctagaaccggtggaggtggtctggatctgagttcaaggagaagggacaacagtcaggactatgcaggagcagcatcaggtggtggtggatattggcaagacaaggcgaattacggacaaggaagacaaggcaacagatcaggttatggtggaggaagatcatctggacaaaatggtcagtggtcagggcagaaccgaggaggagggtatgcaggaaagattggttcaggaaacaaaggtttgcagatggatggctccaaccgtatggtgagtcttaacccaggtggttcgtacttaaaagaggatgaggagaaatctgcagtggtggccttagtctccaccctttggtaatggtttgggatccctttgggttaccaaagggttctttctaaaaaaggttcttcccattttctcgccatgggactggtttattttctttggtaaaacccccagtggtgggaaaagaccttttaagaatgcattacctggaaggtttaataagtttttttttaaaaaaaaaaaaaaaaaggcgnnnnnnnnnnnnnnnnnnnnnnnnnnnnnnnnnnnnnnnnnnnnnnnnnnnnnnnnnnnnnnnnnnnnnnn

SEQ ID NO: 86824 - DNA, 3049 bp, Arabidopsis thaliana columbia
aagcatctccttcgcaaatctccatctccatctccatcttctgaattcaggttcttgttgcttacgcttccagctaaaaagatgacgtctcgttttttcactcaggttggaagtgaaagtgaagatgaaagtgattatgaggtagaggttaatgaggttcagaatgatgacgtcaataaccgttaccttcaaagtggtagtgaggatgatgatgatactgatacgaaacgtgtggttaagcctgctaaggataaacgttttgaggagatgactaacactgttgatcagatgaagaatgctatgaagatcaatgattgggtcagccttcaagaaaactttgataaggttaacaaacagcttgagaaggttatgaggattactgaggctgtgaagcctcctaccttgtatatcaagacgcttgttatgttggaggatttcttgaatgaagctcttgccaataaggaagccaagaagaagatgagtactagtaactccaaggctttgaactcaatgaaacagaaattgaagaagaacaataagttgtacgaagacgatatcaacaagtatcgtgaggctccagaagttgaggaagagaaacaacctgaagatgatgatgatgatgacgatgatgacgatgaggttgaagatgatgatgattcttccatcgacggacctaccgtagatcctgggtccgatgtggatgaacctactgataatctcacttgggagaagatgctgagcaaaaaagataagcttttggagaagctaatgaataaagatcctaaagagatcacttgggactgggtcaacaagaagttcaaggaaattgtggctgctcgtgaaaaaaagggcactgctcgatttgagctagttgatcagcttacgcacttgacaaagattgccaacactcctgcacagaagcttgaaatcttgtttagcgttatttcggctcagtttgatgtgaatccaggtctcagcgggcacatgcctatcaatgtctggaagaaatgcgtgcttaacatgctcaccatactggacattctcgtcaagtacagtaacattgttgtggatgacacagttgagcctgatgagaacgaaacttcaaagccaacagattatgatggaaaaattcgggtctggggaaatttggttgcattcttggagagggttgacactgagtttttcaagagtttgcaatgcattgatcctcacacccgtgagtatgttgagaggctaagggatgagcccatgttcttggcccttgctcagaacatccaggactactttgagcggatgggtgattttaaagctgctgcaaaggtagccttaagacgtgttgaggcaatatactacaagccccaggaagtttatgatgcaatgaggaaattggctgagttggtggaagaagaagaagaaactgaggaggccaaagaggaaagtggacctcctacttcatttattgttgttccggaggttgttccccgtaagcctaccttcccagagagcagccgagctatgatggatattcttgtgtcccttatctacagaaatggagatgagcggaccaaagcgcgtgcgatgctatgtgatatcaatcaccatgctttaatggacaactttgtgactgctagagacctgttgctgatgagtcatctgcaagacaacatccagcacatggacatctcaacacagattctctttaacaggaccatggcgcagcttggtctttgcgccttccgggctggaatgatcactgagtcccatagctgcctttccgagctgtactttggtcaaagagtgagagagttgcttgcccaaggtgtctcgcaaagccgataccatgagaaaaccccggagcaggaaaggatggaaaggagaagacaaatgccgtaccacatgcacttaaaccttgagcttctggaggcagttcatctcatctgtgccatgcttcttgaagtcccaaacatggctgcaaactcgcacgatgccaaacgcagagtgattagcaagaatttccgccgcctgctcgagatcagtgaaaggcaagcattcactgcaccgcctgagaatgtacgtgaccatgtcatggcagccaccagagccctgaccaaaggggatttccagaaggcgtttgaagttttgaactctcttgaggtctggaggctgctcaagaaccgtgacagcatccttgacatggtgaaggatagggttcaagaagaggctctaaggacttacctattcacatactcaagctcttatgagtccttgagtcttgatcagctggccaaaatgtttgacgtctctgagccgcaggtccacagcattgtgagtaagatgatgattaatgaggaactgcatgcaagctgggatcagccaacacgatgcatcgtcttccatgaagtgcaacacagcagattacaatcattggctttccagttaacggagaaactctcgattttggcagaaagcaatgagagggcaatggaatctagaaccggtggaggtggtctggatctgagttcaaggagaagggacaacaatcaggactatgcaggagcagcatcaggtggtggtggatattggcaagacaaggcgaattacggacaaggaagacaaggcaacagatcaggttatggtggaggaagatcatctggacaaaatggtcagtggtcagggcagaaccgaggaggagggtatgcaggaagagttggttcaggaaacagaggtatgcagatggatggctcaagccgtatggtgagtcttaaccgaggtgttcgtacttaaagaggatgaggagaaatctgcagtgttgaccttagtctcaaccttttgttatgttttggattccttttggttatcaaatggttctttctaagagatgttcatcacattttctcgcggccgcgaattcgatgtcaaggtttgggataatggcagttggtggaaaacgccttttaggaagctttaaaacaaaaaacaaaagggcggcccgctctaaaagatcccaagcttacgtacgggtgcatcacgtcaagtctttaaggtcact

SEQ ID NO: 86825 - DNA, 461 bp, Arabidopsis thaliana columbia
gtgaattagggattcgagaatgacgatgaactcgcttccgaggagatttgggaagaatcatggctatttggatcgagattatcgaaacggaagacgatctggttcagattccgatgaagaattgaagggattgagtcacgaagagtataggaggcagaaacggcttaagatgaggaaatcagccaagttctgcttttgggagaacacaccgagtccacctagagatcagaacgaggattccgatgagaacgccgacgagattcaggacaagaacggcggcgaaagagatgataattcgaaagggaaagaaaggaaaggtaaatctgactcggaatctgaatctgatggtttgagatctaggaagaggaagagtaagagctcgaggtctaagcgcaggagaaagagatcttatgacagcgattgtgaatccgaagggagtgagagtgattccgaagaggaag

SEQ ID NO: 86826 - DNA, 421 bp, Arabidopsis thaliana columbia
aaaaaaaaaaactttatttctctctacaaatttcatttgttccattttctcaattttagaacttaagaaacccaaaaagcaaatttttagtacattttctggtttaacgaaagtaattaatttgtgtgttttccatcaaaattccactggttttctttagaatttttttatctctctttaagacatgaactgtctgttcttgttcaaatcaaagaaacccagaaagcaacagaaagacaacaacaagaacaaaagaaaaggtaaagagttgttacaaaactcagctccagaactgacgaatcggagtgaaacgtcttcgtttaatctccagacaccaagatcgttgccttctccaagaagtatcaaagatttgtatacagagagagaacaaaatcttagggttttttcttacgaagaactc

SEQ ID NO: 86827 - DNA, 737 bp, Arabidopsis thaliana columbia
ctagactaaacacagacaaggtaaaaaaaaaaaaaacagcttaccaaatttttctcctccttcacggcaaatcgtcaccgccacattatctcccaaactaagaatctagggttttctaagggtttttaatcttcgtccttctctccttctccagttttaggtttcagtttcagatggcgagatacgctgctggtgcggttgattgtcctggttctcccaaatctgtgcgaatcgttgtggttggtgataagggcactggaaaatcaagcttgattgttgctgcagccactgattctttccctcccaatgtccctcctgttttgcctgattacaagttgcctattgaattcttccctgatggtatacccgtcaccattgtcgacacttcctcgaggccagaagatagggacattgttgctgaggaattgaagcgcgcagatgcagtagttttgacatatgcctgtgatcgacctgagactctcgaacgtttgagtgaatactggcttccagagcttcggcgattagaggtaaaaattcctattatcgtagcaggatgtaagcttgacttcagagacgacaataaccaggtcagcctcgaacaagtgatgtcacctataatgcagcagtttcgggagatagagacttgtatcgagtgttctgccctgaagcaactccaggcacaagaagttttctattatgcacaaaagactgtccttcacccaacaggacctctgttt

SEQ ID NO: 86828 - DNA, 533 bp, Arabidopsis thaliana columbia
  unsure (1)..(533): unsure at all n locations
ngctaaaggtctcaatctctcagtcaaaaacanaaggtctctcctttattaaactatctatcactaactagaagaagagattaccgcgcgtccgagaagatgttgtttcaggtgggaggtgaaggcacacgccccaccttctttgagatggctgctgctcagcaacttcctgctagccttcgcgccgctctcacctattccctcggcgtttttgctttgagacgatcgtttctccataagattttagactatgaggatgaattctttgctgctctgatgcttattcttgaaggacacagcttacgaaccacagatggttcctttgctgaatcattgtatggtttaaggaggaaatcagcgagattgagattgaggaaagacagtgccaggaaggattctagcgaagaagttcaacattctggtttagagaagcgtcagagaatcctttctgttgtgtttctggttgtgttaccgtatttcaagtcaaaattgcatgctatatataataaagaaaggagagctagggctccggg

SEQ ID NO: 86829 - DNA, 521 bp, Arabidopsis thaliana columbia
cccacgcgtccgcccacgcgtccgaccaaacacaaaaatggtactcttcactttatcaacaacttcttcttcttcttctaagctaaaacaacattcacaccaaagcttctcagagtctctgagggaacacactatcgaagacgctgaatccatcatccatcgatggatttcaccagaacacgtccactcttcttccttctgcttcatctcatcgctattttcaaccgaaaaccgcgaagaagcgaaacgattcatcgacgctgttaccaccttacactccggtatgataagactaatctcagtgaatccaacgtcaatgaaactcgttaaagcagagaatctaatgcgtatctcaatgactcatctctccaaagagttttaccgcattctcaaatcgaaccgacgttatctcgaccccgaaatccgtctctatccggtccttcaaaagcttccgattccgactccgattccgattccaacaccatggatgatctaaagatgatcgcggattgtatgatatc

SEQ ID NO: 86830 - DNA, 550 bp, Arabidopsis thaliana columbia
  unsure (1)..(550): unsure at all n locations
nnnnnnnnnnnnnnnnnnnnnnnnnnnnnnnnnnnnnnnnnnnnnnnnnnnnnnnnnnnnnnnnnnnnnnnnnnnnnnnnnnnccacgcgtccgatcaaacttaatctttcacccataatgggtttacaaatattatgtttatttcgcaaaatattcatcatcacatacatcttccatgcctcgtgttctccagataaagttttatgaaagatgcaacattagcaccaatgttcgctcggtttgattacataatcatcggaggagggacttcgggttgcgcgttagccgcgacgctatctcaaaacgctagcgttttggttcttgaacgcggtggtgctccctacgacaatcctacggcaacagatatcgaaaactttgccaccacactctcaaacacatcaccgaaatcttggtcgcaactttttatctccgaggacggcgtttacaacactcgtgcacgcgtcctcggtggtggctccgtgttaaacgccgggttctacacacgtgcgggagatgagtacgtgaaggagactgagtggaagactgatg

SEQ ID NO: 86831 - DNA, 2928 bp, Arabidopsis thaliana columbia
  unsure (1)..(2928): unsure at all n locations
tttgtacttccggagctaaagagttatagctactgtagtagctggaagtgaagaagattttttaatagattgtacggaaaaattagggttttcaaagtttggtttcttgaagttgaattagacatgaagctgtcaacatctggattgggtcaacagggtcatgaaggagagaagtgtctgaattctgagctatggcatgcttgtgctggaccattagtctctcttccatcatctggtagtcgagttgtttactttccacagggtcacagtgaacaggtagctgctacaactaataaggaagttgatggtcacatacccaattacccaagcctaccaccacaattgatatgccagctccataatgttacaatgcatgcagatgttgagacggatgaagtctatgctcaaatgacacttcaaccattgacaccggaggagcagaaggaaacatttgtaccgattgagttggggataccgagtaagcaacctagtaattatttttgtaagactctcacagctagtgataccagtacacatggagggttttctgttcctagacgtgctgctgagaaagtgtttcctccattggattacacactgcagccaccagctcaagaactgattgcaagggatctccatgatgttgaatggaagtttaggcatatctttcggggacagcccaaacggcatctcctaactactggatggagtgtctttgtcagtgccaagcgactagtagctggagattctgtcattttcatcaggaatgaaaagaatcaactctttttgggaattcgtcatgccactcggccgcagactattgtaccatcatctgttttatctagtgatagcatgcatattggactccttgctgctgctgcacatgcttctgcaactaatagctgtttcactgttttctttcatccaagggctagccaatctgagtttgtgatacaactttccaagtacattaaagccgtttttcacacgcgtatttcagttgggatgcgctttcgcatgctcttcgagacagaagagtcgagtgtccgcaggtacatgggtactataactggtattagtgatctagattctgttcgttggccaaactctcattggcgatctgtgaaggttggttgggatgaatcgactgcaggggagagacagccaagggtttctttatgggagattgagcctctgactacctttcctatgtatccatctctttttcctctcagactaaaacgtccatggcatgctggcacatcatctttgcctgatggaaggggtgatttgggaagtggtctaacatggctaagagggggaggtggagagcagcaaggtttgcttcctctaaattatccatctgttggtttgtttccatggatgcaacaaaggctggatctcagtcaaatggggactgataataatcagcaataccaagcaatgttagctgctgggttgcagaacatcggcggtggagatcctttaagacagcagtttgtacagctgcaagagcctcaccaccaatatcttcaacaatcagcttcccataattctgatttgatgcttcagcagcaacagcagcaacaagcgtcacgccatctcatgcatgctcaaacacagattatgagtgagaatcttccgcagcagaatatgcgacaagaagttagtaaccaaccagctggacagcagcaacagctacagcaaccggaccaaaatgcatatcttaatgctttcaaaatgcaaaatggccatcttcaacagtggcagcagcaatcagagatgccatctccctcgttcatgaagtcagattttactgactcaagcaacaaatttgcaacaactgctagtccggcttctggagatggcaatcttttgaatttttctataaccggtcagtctgtactccctgagcagttaacaacagagggctggtctccaaaagcatccaacactttttctgaaccgttgtcacttccacaagcctatcctgggaagagtcttgctctagaacccggaaatccgcagaatccctctcttttcggtgttgatcccgactctggactcttcctccccagtacggttccccgctttgcttcttcatcaggagatgctgaagcttcccctatgtcactaacagattcaggatttcagaattccttatatagctgcatgcaagacacaactcatgagttattgcatggagctggacagattaactcgtccaaccaaaccaagaactttgtaaaggtttataaatctggttcggttgggcgttcattagacatctcccgattcagcagctaccacgagctgcgagaagagttagggaagatgtttgctatcgaagggttgttggaagacccccttagatcaggctggcagcttgtattcgttgacaaggaaaatgatattcttctccttggtgatgacccatgggagtcatttgtgaataacgtttggtacataaagatactatcaccagaagatgtgcatcaaatgggagatcatggagaaggcagtggtgggttattcccgcaaaacccgacccatctctagaagctgcttcggtgttagtctcatcatgctacaacgcgggagccctttgtttcccatttgaagtcgtttccactcatctttatatgccattcgttcgcatctctctcgttttgacgtttttagaaagaaacataatcatatttgtgagtatgggtcctgaaactttaggacgtactttagcttgtattagacagacactctcgtcataaacataagaacctttatgtagctgtctcagggtaactaaacttttctagtatttattcttattctatttttgtagccacatcgttacacagtaagtttcctcacaccaattagattccataaannnnnnnnnnnnnnnnnnnnnnnnnnnnnnnnnncgcc

SEQ ID NO: 86832 - DNA, 468 bp, Arabidopsis thaliana columbia
aacaaagagaaaatggcaaaggctatcgtttccatcttccggtggtcttttttcatcttcctccttagtcatttccgatgtgcccggagatagaagcgcaaggtaacgagtgcttgaaagaatacggaggtgatgttggtttcggcttttgtgcgcctcggatatttccgacgatttgttacacaagatgccgtgagaacaagggagctaaaggtggaagatgccgttggggacagggcagtaacgtcaaatgcttatgcgacttctgcggcgatactccacagtaaaatctaaagcaatcgctaatcaatgcactaagcctgccatagacgcaattattatacacgttgtctttacgtacattcacaagttttagtcatggtttgtgtaataaatgaatgtgaatggtctaacccaagtgatgtaatgtgaaatcagaaaataatgaaagtgtgacttttgctacta

SEQ ID NO: 86833 - DNA, 878 bp, Arabidopsis thaliana columbia
  unsure (1)..(878): unsure at all n locations
cccacgcgtccgcccacgcgtccgagtaaactcgtcaaccactgcgcccatgacctcccaacgatactcttcccttatattcttcctcttccttcttcctttctgcgatccaaaccttcaaacacatctccggtagatatgaaaatccactcttgcctctccgccattcttctgttcctcttcttctctgcttcttccgctaaacaaaatgttcggacagagcgaatttcaggaagtgctggtgatgttttggaggatgatccagtgggaaagcttaaggtttatgtatatgagcttccaagcaagtacaacaagaaattactgcaaaaggatcctcgatgtcttacacacatgtttgctgctgagatttttatgcacaggttccttttatctagtcctgttcgaacgcgtaatcctgatgaagctgattggttttacacgccaatttatcctacttgcgacctcactcctaccggcttgccattaccgcttaaatcgccgcgtatgatgagaagttcgatacaactaatctcatcaaattggccttattggaatcggactgaaggagctgatcacttctttgttgcgccccatgactttggagcttgcttccattatcaggaggaaaaagccattgaaagagggatacttccactactccagcgtgccactttggttcagacatttggccaaaggaaccatgtctgtttggacgaaggctcgatcactattcctccttttgcacctncacagaagatgcaggcccattttattccttcagatattccacgctctatctttgtctacttccgcgtgttattttatgatgttaacaacgaccccgaaggtggatattatgcatgaggtgcaagagcagc

SEQ ID NO: 86834 - DNA, 719 bp, Arabidopsis thaliana columbia
  unsure (1)..(719): unsure at all n locations
nnnnnnnnnnnnnnnnnnnnnnnnnnnnnnnnnnnnnnnnnnnnncccacgcgtccgcccacgcgtccggagaaagtcgacgctacttcttcttccgcccgctttcttctggatctgattcggatccatcactctctctttctctacatcaatttgttttctcagatcttcatctttttttcgtatacctgtatttgtcgaccttttctctcaatcactaaaccctcaaatcctttttttggattataagattgcttctctgattgtaattgctttgatgtgtatcagttgacttgtgaaaagtctgcgagtgacttcttcctgtttacacatcagctactccagaatctctcagattcttaaaagcttaaatcttttttcgactttgattgtttctgtgcatcgctttgacggatgtggaggaaaaaaggggtgtcttgatgaaatgagggatgttatcaacgttaatgaaactcttgagtgcttgtctgtggccgtcttcttcctcgggcaagtcctctgattcaactggaaaacaagatggattgctttggtacaaagactttggtcagcacctcgttggtgaattctccatggcttgtgttcaaaccaacaacttggctttgaggatcagaagccaagtttgagtcttgggcccttttgaagttacttcttgaacttcttgggtcccttaatgggaaaacttttttaatttgggg

SEQ ID NO: 86835 - DNA, 1506 bp, Arabidopsis thaliana columbia
  unsure (1)..(1506): unsure at all n locations
atgatcttnnnnnnnnnnnnncaagaacccaaagatctctctctatttgtttgccttcttctttctttctgactcaaaccctcccacgcgtcctcgcgattaagcaaaaccctagatttattctactcttcgaagtcgatttcaatggaaggttcctcgtcagccatcgcgaggaagacatgggagctagagaacaacattctcccagtggaaccaaccgattcagcctccgacagtatattccactacgacgacgcttcacaagccaaaatccagcaggagaagccatgggcctccgatcctaactacttcaagcgcgttcacatctcagcccttgctcttctcaagatggtggttcacgctcgctccggtggcacaatcgagatcatgggtcttatgcagggtaaaaccgagggtgatacaatcatcgttatggatgcttttgctttgcctgttgaaggtactgagactagggttaatgctcagtctgatgcctatgagtatatggttgaatactctcagaccagcaagctggctgggaggttggagaacgttgttggatggtatcactctcaccctgggtatggatgttggctctcgggtattgatgtttcgacacagatgcttaaccaacagtatcaggagccattcttagctgttgttattgatccaacaaggactgtttcggctggtaaggttgagattggggcattcagaacatatccagagggacataagatctcggatgatcatgtttctgagtatcagactatccctcttaacaagattgaggactttggtgtacattgcaaacagtactactcattggacatcacttatttcaagtcatctctcgatagtcaccttctggatctcctttggaacaagtactgggtgaacactctttcttcttccccactgttgggcaatggagactatgttgccgggcaaatatcagacttggctgagaagctcgagcaagcggagagtcagctcgctaactcccggtatggaggaattgcgccagccggtcaccaaaggaggaaagaggatgagcctcaactcgcgaagataactcgggatagtgcaaagataactgtcgagcaggtccatggactaatgtcacaggttatcaaagacatcttgttcaattccgctcgtcagtccaagaagtctgctgacgactcatcagatccagagcccatgattacatcgtgaagttggtctattcttttgttttttggctgcggaaattgactatcggtttgacccggtttatgaggcaatgcccattgttccctatatctctagtgtagtatctgcttcagacaaagatctttgggttattaaatgacattaacataaatcgatcattatgttttagcgaaaaaggtanatctcgggncatctatgnatcgtagataatgagnnncccgcaattaatatcaanaannnnnnnnnnnnnnnnnnnnnnnnnnnnnnnnnnnnnnnnnnnnnnnnnnnnnn

SEQ ID NO: 86836 - DNA, 449 bp, Arabidopsis thaliana columbia
cttcttctcttcagagaaaactttgcttctctttctataaggaaccagacacgaatcccattcccaccgatttcttagcttcttccttcaatccgctctttccctctccattagattctgtttcctctttcaatttcttctgcatgcttctcgattctctctgacgcctcttttctcccgacgctgtttcgtcaaacgcttttcgaaatggcgattttggattctgctggcgttactacggtgacggagaacggtggcggagagttcgtcgatcttgataggcttcgtcgacggaaatcgagatcggattcttctaacggacttcttctctctggttccgataataattctccttcggatgatgttggagctcccgccgacgttagggatcggattgattccgttgttaacgatgacgctcagggaacagccaatttggccggagataa

SEQ ID NO: 86837 - DNA, 2353 bp, Arabidopsis thaliana columbia
  unsure (1)..(2353): unsure at all n locations
agttgattgcgaaatttaaaatcgaaaaagctaaaaggggtagtttcgtcattaaatttgaattttttctttcactgccagctctgctttagagcttctctacttcttcttcttcttcaagttcgcttaagagatcgatcggagattcggagtagagaaaaatgtcaggattcgtcgggattttggtatcggatccatggttacagaaccaattcacgcaagtggagcttcggagtttgaaatctcacttcacgagcatgaagagagagagcgggaagctaacagtatcagacctcgcgtcaaggatggggaaatcaaaagtagttggagatcagaatctaagcaacgaagaacgagcgactttgatccaaaattttcatccgaatttgaatgatgaagtcgatttcgagttttacttaaggatttatctgaatcttcaagcgcatgtaaacgcaataatcggaagcggtgttaaaaactcatctgcgtttcttaaagcagctacaacaactttgttgcatactattagtgattctgagaaatcttcttatgttgctcatatcaataattatctctctggagatgagtttctaaacaagtgccttccgattaatccgtcttcgaatgatctattcgaagttgcaaaagatggtgttttgctttgtaagcttataaatgtggcggttcctggaacaatcgatgaacgagcgattaatactaagagtatgcttaatccatgggagagaaatgaaaatcatacgctttgtcttaactctgccaaggctattgggtgtactgtggttaatataggaacacaagatatcattgaaggaaggcgtcatcttgtgctcggtgtgatctctcaaatcattaagatacaattgctagcagacctaaacttgaagaaaactccccagctggtggagttggtcggtgatagcaaggatgtggaagagctaatgagtttaccacctgagaagatcttattgagatggatgaattttcagttgagaaaaactgaatacaagaaaaccgtcacaaacttctcttctgatgttaaggatgcggaagcttacactaatctattaaatgtcctggcaccagagcacaagaatccatcacatttagcagttaaaagctcatttgagagagcaaaacttgttctcgaacatgcagacaaaatgggatgtaggagatacttgacggcgaaagatattgttgagggttctccaaatcttaatcttgcttttgtagcacatatattccagcacaggaacggactttcaacacaaacgaaacagatatcttttcttgaaaatctagctgatgacattcaaatttcaagagaagaaaaagcattccggttttggattaacagctttgatggttcagtatacataaacaacgtgtttgaagatctcagagatgggtggatactattgcagacactagacaaagtgtctccaggcattgttaattggaaagtatcaagcaagcctccaatcaaattgccattcaagaaagtagaaaactgtaatcaagttgtgaaattagggaagcagctcaagttctctttggttaacattgctggaaatgacattgttcaaggaaacaagaaactcatactagcatacttatggcaattgatgagatacaacatcctgcaacttcttaagaacttgagactacattcaaacggcaaagagataacagacgctgatatattggaatgggcaaatgctaaagtgagaaacaacggatgcaaaacacgcatgtacagtttcagggacaagagcttatccgatggggtatttttcttggagctgctgagttcagtgcagccaagatccgtaaactggagtcttgttacaaacggagttacagatgaagagaaaaagatgaatgcaacttatgtgattagcatagccaggaaacttggttgctccattttcttactccctgaagatataatcgaggtgaatcagaagatgatgctgacattgacggcgagtataatgtattggactctaaagcaacctcttcatctgaataagcctatcggatctcctgatagccacaatggaagtttactcgatgattctacgtcagattcctctatagaataaaattgttttactgtgaaattatatattcttaagaactttatatgaatgatgttattaattattttgctcctttgtattttttgggtgtaaaaactatattaaaattgaaatgtcatcaacgaatattgacaaaaaaaaaacaaaaagnnnnnnnnnnnnnnnnnnnnnnnnnnnnnnnnnnnnnnnnnnnnnnnnnnnnnnnnnnnnnnnnnnnnnnnnnnnnnaat

SEQ ID NO: 86838 - DNA, 651 bp, Arabidopsis thaliana columbia
  unsure (1)..(651): unsure at all n locations
accacgcgtccgcccacgcgtccgcccacgcgtccgattaattatccaggcttcactggaatcgacgacccttacgacgcaccagtgaattgcgaggttcgtcacgtgaatgatcagatagattttggaacgtaaatttgtactaataaagtattgatgtaatatcctccaggtagtgctgaaacacacaggagacgacgagtcgtgttcgccacgtcagatggctgagaacatcatctcttacctgcaaaacaaaggttatcttgagggctaagtcaaagtcggaaaaatcacccccattggtcgattctatatatggctagaggattgttctccctgattcggtcagaagcttgagacctggaaaacgaggtcgtctcgctttgtccccccatcatttgtttttgaattgccccccagtcaaaaaccaaagggaaaatatgtatatttgttctaatcaccctttagttagtttataaagagtttttgctccaatgatatagactgtgttgtataatgtgaattaataaagtggattttgtggaaagtaaaaaatttaataannggcccctccccggggggcgaccgctctagaggatccaagcttaggtaggcgtgcaggccacgtcataatcttgtagagtgttccta

SEQ ID NO: 86839 - DNA, 1088 bp, Arabidopsis thaliana columbia
  unsure (1)..(1088): unsure at all n locations
ccggccgggacgcgtgggcggacgcgtgggaatgcatttccctccattctcttacgctttctctcactctcgtcaatggcgaccaccgcatcttcatctctcccccgtaattactccttcacaactccgcgaccttcatcattcatccgaggaccgccattagctagaacgctgcctctctatctccgccgtaaccgtcgagtagctctcacttaccgattggaccagaattcgaagcagagaagtggtggaaacgtaagatgcgaggcgacggaggtatcttcttcttcttctgtatccacacctggaaggaattgggtgccggtggtgccgttatcggcgcttccgaaaggtgaacggcgagtggttattcaagacgatgagacgatattgttgctttggtataagaacgatgtttttgcaattgagaatcgttcaccagctgaaggagcttatagcgaaggacttctcaacgctaggctcactcaggatggttgcattgtgtgtccatcgacggatagtacgtttgatcttagaactggagagatccgggaatggtacccgaaaaacccggttctcagagtcttgacacctgcactgaggaaactatttgtataccctgtcaaatatgatgaggaaaacatctatatcagcattagagacagcgggaaaacagaggcagctgctgagatcgtcttcagtggaaaagctcagcctgggctcacagcaacaaacgtcaatgtagacgaggtgagaatgattgtggacgagggttctgaaggatttggtttcacgaagaagaacgaagtgataaacgggaaggcggcagtgataggattcttgctgctgttagatttcgagctattgacaggtaaaggtctattgaaaggaacagggttcttggacttcctttactctgcttcagatgctttcaagtagaggtaatatctttgttggtctggttttgcttgcctcctttgtgcagtttgccgagaaacaaaaaaaaaaaaaaagnnnnnnnnnnnnnnnnnnnnnnnnnnnnnnnnnnnnnnnnnnnnnnnnnnnnnnnnnnnnnnnnnnnnnnnnnn

SEQ ID NO: 86840 - DNA, 537 bp, Arabidopsis thaliana columbia
  unsure (1)..(537): unsure at all n locations
ccggtccagncttncccccctgggnacttttttcccctncaaattggtggggaacccctttnccncattngngccgccggaaacccgaggccgctgctgagatcgtcttcagtggaaaagctcagcctgggctcacagcaacaaacgtcaatgtagacgaggtgagaatgattgtggacgagggttctgaaggatttggtttcacgaagaagaacgaagtgataaacgggaaggcggcagtgataggattcttgctgctgttagatttcgagctattgacaggtaaaggtctattgaaaggaacagggttcttggacttcctttactctgcttcagatgctttcaagtagaggtaatatctttgttggtctggttttgcttgcctcctttgtgcagtttgccgagaaacaaaaaaaaaaaaaaccatgtaatagtatatagagatggctttgctctgtctttctttgtgtttaccccttatacgagatattctttcttctccttgagttcaaattataatcttcaagctttcccact

SEQ ID NO: 86841 - DNA, 654 bp, Arabidopsis thaliana columbia
  unsure (1)..(654): unsure at all n locations
attccccggaccgctngccctgntccccaagctttatcggcccccttntggggaagctggttccccntcangtcccgntccggaatccccggtcgnccccacgcgtccggaattattatccaggcttccactggaatcggcgnccccttacgaggcccccagtgcattgcgaggtagcgctgtaaccacacaggaggcggcgagtcgtgttcgccacgtcagatggctgagaaccatcatctcttacctgcaaaacaaaggttatcttgagggctaagtcaaagtcggaaaaatcaacccaatttgtcgattctatatatggctaaagcattgttctccctgattcggtcagaagcttgagacctggaaacgatgtcgtctcgcttcgtcacaccatcatttgttcttgaattgtgctgaagtcaaaagccaaaggggaatatatcgagatttgttctaatcatcccttagttagttcataaagagtttttgctccaatcatatcgactgtgtcgtaccatgtgaattaataaagtggattttgttgtggggtttacagtttcgaacgcgtggcagaacgcataggtcggccgctctagaggatccaagcttacgtacgcgtgcatgcgacgtcataagtcttgtaagtgtcac

SEQ ID NO: 86842 - DNA, 1407 bp, Arabidopsis thaliana columbia
  unsure (1)..(1407): unsure at all n locations
caactctctgcgactcactatagggaaagctggtacgcctgaaggtaccggtccggaattcccgggtcgacccacgaattcgccgccgcgtccgaaaactgtaaacccccacacagttattggccgtcggattcaatggaaggattagctatcagagcatctcgaccgtcggttttctgttctattccaggtctcggcggcgattcccaccgaaaacctccaagtgacggtttcctcaagctgcctgcgtcgtctattccggcggacagccgaaaattagtagcgaattctacttcctttcatccaatctcagccgttaacgtctctgctcaagcttccctcaccgctgattttcccgccctttcagaaactatactgaaagagggaagaaataacggaaaagagaaagcagagaacatcgtgtggcacgagagttcgatatgcagatgcgacagacaacaacttcttcaacaaaagggttgtgtcgtttggatcactggtctcagtggttcagggaaaagcactgttgcttgtgcactaagtaaagcattgtttgaaagaggcaaacttacttacacactcgacggcgacaatgtccgtcacggccttaaccgtgacctcactttcaaagcagagcaccgcaccgaaaacattagaagaattggtgaggtggctaagttgtttgctgacgtcggagtcatttgtatagcaagtttgatttctccgtaccggagagacagagacgcgtgccggtccttgttacctgacggcgatttcgtcgaggtcttcatggacgttcctcttcatgtgtgcgagtcgagagatccaaaggggttgtacaagcttgcacgtgcaggcaaaatcaaaggcttcactggaatcgacgacccttacgaggcaccagtgaattgcgaggtagtgctgaaacacacaggagacgacgagtcgtgttcgccacgtcagatggctgagaacatcatctcttacctgcaaaacaaaggttatcttgagggctaagtcaaagtcggaaaaatcaacccaatttgtcgattctatatatggctaaaggattgttctccctgattcggtcagaagcttgagacctggaaacgatgtcgtctcgcttcgtcacactatcatttgttcttgaattgtgttgaagtcaaaagccaaagggaatatatctatatttgttctaatcatcatttagttagtttataaagagtttttgctccaatgatatcgactgtgttgtataatgtgaattaataaagtggatttcgttgtaaaaaaaaaaaaaaaaaaaaaagtcgacgcggccgcgaattccagatctatgaatcgtagatactgaaaancccgcaagttcacttcaactgtgaattcaccnnnnnnnnnnnnnnnnnn

SEQ ID NO: 86843 - DNA, 762 bp, Arabidopsis thaliana columbia
cgacagaaggggactcaaaatggtttttatctatcttccgacaaaattccgtgcttcattgctcttctccacaagacaacatttctctggctcagaatcgacgccatggaaatgtaaagaagaaacaaagacgagctctcaaatccagcagcaatggcttttcttctttctaatctatcatctccgtcaatccatcttcaaaccggaaaatacccaaaccttaaacccattttcagtcaatctctatcgtcttcgtcttctgttagctacgaatttgtagaagagaatctatctacactctctctattgagcatccagtctcctcctcttaaagacacgcaagttcagacaagacacagttcgcaagataagcataataaccacgacagagatgaattctatatcaatcttggtgtcgctgtccgtacacttcgtgaagatttgcctttgctcttcactagagatcttaattacgacatctacagggatgatataacatttgtggatccgatgaacacattcactgggatggacaactacaagattatcttctgggcactcagatttcatgggaagatattgttcagagatatctcacttgagatcttcagagtatggcaaccatcagagaacatggttctcatcaggtggaatctcaagggtgtgcctagagttccatgggaagctaaaggagagtttcaaggcacttccccgtataaactcgaccgtaatggcaaaatctatgagcataaagtcgataac

SEQ ID NO: 86844 - DNA, 423 bp, Arabidopsis thaliana columbia
ggtcattctcacgggcacaaggcaactagggctggtatgccagaacaactcgcagtcaatttcttggacaacaacatgaaagaaaaccctgccttcacatatggttatgagatgcctgcagatattctctgctaaatggattgcacataagtctcaggtttacacacaacatgcttacatgagaccccttggagtacttgccatggttctaggtattgatgaagagagaggacctctactatcatcaaattctccaacatcgattcttgctcaaatcaatacaccatgttcaccatctatgctctctagcgttacaggttgcacgagttttctaaccggaggtggtagttttccgacctcagattgttgtggggctcttaaatcgttaaccggaaccggtatggactgtttgtgtctgatagt

SEQ ID NO: 86845 - DNA, 1191 bp, Arabidopsis thaliana columbia
  unsure (1)..(1191): unsure at all n locations
gnnnnnnnnnnnnnnnnnnnnnnnnnnnnnnnnnnnngccgtaccggttcggaattcccgggtcgacccacgcgtccgcttgaagacaaagaaagctttcttctataatacatctttctctacagatcacacagaagcaaaaattccatctccgatttcggaagagagttgttctcttctctgagaagaagaagatgagcagaggaagcggcgctggttacgatcgtcacatcactattttctcaccggaaggtcgtctcttccaagtcgagtatgctttcaaagccgtgaaagcagctggaatcacatcgatcggtgtccgagggaaagattcagtatgcgtcgttacgcagaagaaagttccggacaagcttttggatcagtctagtgtatctcaccttttccctgttaccaagtaccttggattgttagccactggcatgacagctgattcaaggtcattggtacaacaagctaggaatgaggctgctgagtttaggttccaatatggttatgagatgcctgcagatattcttgctaaatggattgcagataagtctcaggtttacacacaacatgcttacatgagaccccttggagtagttgccatggttctaggtattgatgaagagagaggacctctactttacaagtgtgacccagctggacatttttacggtcacaaggcaactagtgctggtatgaaagaacaagaagcagtcaatttcttggagaagaaaatgaaagaaaaccctgccttcacatatgatgaaacagtacagactgctatatccgctctccaatctgttcttcaagaagacttcaaagcaactgaaattgaggtgggagttgtgagagctgatgaccctctcttccgttccctgagaacagaggagatcgacgagcacttgacggccattagtgaacgtgactgatcactttcactggaacattcagtcgggactttgcatctctttcttttgctttaaatctatctaagatgattcacgtttcagagaaacgtgtttccattagtcatgagtcgtgtagttttcatttgaatcatctgcttcctcctaataggagttacatgtaagggtgtcaaattaaggtcgaatgagatggtttaaggttttgaattttaaaaggcaaaacaaagaaagttatttacaaaaaaaaaannnnnnnnnn

SEQ ID NO: 86846 - DNA, 1108 bp, Arabidopsis thaliana columbia
  unsure (1)..(1108): unsure at all n locations
ggggggggggngggtagtatcgccnnnnnnnnnnnnnnnnnnntacgcctgcaggtaccggtctggaattcccggccacgcgtccgcccacgcgtccgcaactccaccgaattcagaagatcgaagaagatgagtagaggaagcggcgctggttatgatcgtcacatcactatcttctcaccggaaggtcgtctctttcaagttgaatatgccttcaaggccgtgaaaacagctggtattacttcaatcggagttcgtgggaaagattcggtttgcgtcgttacccagaagaaagttcctgacaagcttttggatcagtctagtgttacacatctgttccctatcaccaagtacattggattggtagctactggcattacagctgatgcaaggtctttggttcaacaagcaaggaatcaagcagctgaatttcggttcacttatggatatgagatgcctgttgacattcttgctaaatggatagcggacaagtcacaggtctacactcaacatgcttacatgagaccccttggagttgtcgctatggtaatgggtgttgatgaagagaatggtcccttactttacaaatgtgacccagctggacatttttacggtcacaaggcaactagtgctggtatgaaggaacaagaagcagtcaatttcttggagaagaaaatgaaagaaaacccatctttcacatttgatgaaaccgtgcagactgccatatcggctttgcaatctgttcttcaagaagacttcaaggctactgagattgaggtaggtgtggtgagagcagagaacccggaattccgtgcattgacaacggaggagattgaggagcatttgacagccattagtgaacgagactgatcaacttagtgaaacaagtgtgagttacgttgcttcgcttctatcagacattcctctaaagtgaccactctccatcgatcttttgtttggtcttccttccataatttaatttacttagtcaacccagcaaacttgaaaaacaaaaatgcactgtaatgcttaaggctgtgagagtttccgagtcttttgactcttccagaaatgacaccaactttactcaaaaaaaaaaaaaaaaaaa

SEQ ID NO: 86847 - DNA, 442 bp, Arabidopsis thaliana columbia
aaaaaaaaaaaaattcttcttctactaacttacgcttcaatggcgactccaactccatctctatctcctcctccattgaatctctggataatcttatcagaatcaaaacgaatcatcaacgcacactcacgtcacttcctagctctctccgttctcttcctcctccctctctgcttctccatcacagtttacccttccgtcttccttctcatcaccgatcaatcatccgcttctcacaacaccgtctctctcctccgcggcggactccacaacaacaaccgatgatgacatcgataccaaaaacaaacggtcttacttggtaatcgggtacatcgttgttatcaccgtcttcaatctcttagctattggatcaatcgcttatagtgtgtttcaagggatctatgggagacctgtgaaagtgaactctgcagtgaaatcgagc

SEQ ID NO: 86848 - DNA, 410 bp, Arabidopsis thaliana columbia
aagaccttaagaaattaaggatttttgatgtgaaatcgtaattaatgaggaatgcaccacaaaattgggtttattatttataattaaaactatgcggtaaatattgtaacaaaatgaaaggatttgggctttatttgcaataatgttattatatgaattagtttaatgcataatgctgataaattattaaaatcagcaaccaataatgaaagattctggattgttctgtttcagctgattatttacattagatatctgagttgttgtttgaattcgagaagttcccggaaacatccctccgtagaaaattcatcggaggcgacttgaggagaaacacggaagctccgatctcacaatttcgcgacgaactcgcttcagcgattgtttctgttcatccgattaagatgaac

SEQ ID NO: 86849 - DNA, 556 bp, Arabidopsis thaliana columbia
acgactcactatttggaaagctggtccgcctgcaggtaccggtccggaattcccgggtcgacccacgcgtgcacccacgcgtccggttgtttgaattcgagaagttcccggaaacatccctccgtagaaaattcatcggaggcgacttgaggagaaacacggaagctccgatctcacaatttcgcgacgaactcgcttcagcgattgtttctgttcatccgattaagatgaacggaggtccttccggtttcaataatgctccggtcacgaaagccttcgtcatcgcgactgctcttttcactgtgttcttcgggatccggggaggttcttccaagctcggcttatcttaccaggatatttttgagaagtttcggatttggaagttaattatatcggcttttgccttctcgtccacaactcaattgctttctggcttatatttgctatacttcttccgagtctttgagagacagattggttcaaataagtattcggttttcatcttcttctctggatttgtatcactaatactagagaccattttgttatcattgac

SEQ ID NO: 86850 - DNA, 557 bp, Arabidopsis thaliana columbia
atgatactccagctctctacgactcactatatggaaagctggtccgcctgcaggtaccggtccggaattcccgggtcgacccacgcgtccggcttttgtaggaatccctaagcttaaagtctctattattctctaatctcttcttcgccgacgacttctctcaccaaggcgacgttttgatcaggcgatgatgagtatcccaatggagttaatgtctatcagaaaccctaattccaccttgctctatagagctcactctcgtccgcctgtgaagctctgtgctccacctcgttctctcctccctagccgacgccatttcagtgctcctcgagctgttgtttcgtatccaggaatacgtttcggctttacctcgccggaagtcttgcttaatcgatccgtcgttgctttcgctgcatcccacgaggattcgggagaatcaggtgttgaggtggggaaggagaagagtgatatagatgttgaagatgatacatctaaggaagcatggaaacaaactcttgagtcttttaaagagcaggtatcaaagatgcagagtgtgt

SEQ ID NO: 86851 - DNA, 793 bp, Arabidopsis thaliana columbia
  unsure (1)..(793): unsure at all n locations
nnnnnnnnnnnnnnnnnnnnnnnnnnnnnnnnnnnnnnnnnnnnnnnnnnnnnnnnnnnnnnnnnnnnnnnnnnccacgcgtccgcttcttcttcttctaaatctcaccttttttcagattctgaaaattttggtttcattcttctccgagactctcttatggccgagttgactcaggccgatgttgtatactctcctcgttcgtttcaagtgtggaagactttggtgaactggctcgcttttttctatcagatctttcttcagatccttcgtgccgttggttatcatcctcttctctcttcttctgctaaagcctccgctgatggttttaaacctttgccggctattgagttgcttgatagggcttccgaatctcccaccaccgttgaaatcgcagccacgacgacttctgattcctgcagcgatggtgcacgcagccgttttcagaggcttaaggtagttctagacttggatgagacgttagtttgtgcatatgagacgtcgagtttacccgctgcttttacgcaaatcaaagcaatttgaaggccggattaaaagtgggtttgaagctggcagtgcttatcaacagacaaaggaatatgttggggagcctaagatcaattatgtcacggtgtttgtaccgtcctgggattgcacgagttcctagggcaacccagcgagtttgcagatcttattctgtttacagctggtcttgaaggatatgcgaggccgcttgtggataggatagataccaggaaagtgctcaccaaccgactttatcgaccctcaacag

SEQ ID NO: 86852 - DNA, 439 bp, Arabidopsis thaliana columbia
cttgctctcttttttccgaagaatctggcacagagagaagatggcgagtggcctcgaggatatcgtgaacgagaatgttgatttggagaaaatacctattgaggaagtgttccagcagttgaaatgcagcagagaaggtttatctggagcagaaggagaaaacagactccagatctttggccccaacaaactcgaggagaagaaggaaagcatgttactcaagttcttgggttttatgtggaaccctctctcttgggtcatggaagcagctgcaatcatggctattgccttggctaatggcggtggaaagccaccggattggcaagattttgtcggtatcgtttgtcttttggttatcaattcaactatcagttttgtcgaagaaaacaatgctgggaatgctgctgcttgctcttatggctggtcttgctcccaaaac

SEQ ID NO: 86853 - DNA, 553 bp, Arabidopsis thaliana columbia
aatacgactcactctagggaaagctcgtacgcctgcaggtaccggtccggaattcccgggtcgacccacgcgtccgcggacgcgtgggaagaaactttctacataatataaaaagtcacacattctctctattaattaaacatgttgcttgttgcgtttgtgactcttttggtagcagtagctttgcagccactaccgtcagtgttgtctttggacgttcaccttcttcggcagctagccgcaaagcacaatgtgacatcgatacttgtgtttggagattctagtgtcgatccagggaacaataatttcattaaaaccgaaatgaaagggaattttccaccttatggtgaaaatttcatcaaccataaacccaccggtagattatgcgatggattactcgctcccgattatattgcggaggccatgggttaccctcccataccggcttttcttgatccatccctaacccaagctgatctaactcgcggtgcaagttttgcctctgctggttctggctatgacgatctcacagctaatatatcaaacgtatgga

SEQ ID NO: 86854 - DNA, 500 bp, Arabidopsis thaliana columbia
agctctatacgactcatataggaagctggtcgcctgcagtacgggccgggatcccggttgtgcaagaaaccttgagagcttaaaaattcttcacttgggtctcttctctctctcttctcttgcgaccattccgttcgatccatatatcaaagcttgatttagttggttttcaatgggggacagtcagtactcgttttctctcaccaccttcagcccatcagggaagctggttcagatagaacatgccctaacagctgttggatcaggccaaacatcacttggaattaaagcttcaaatggagttgtcattgcaactgaaaagaaacttccttctatattggttgatgaagcgtctgttcaaaagattcaacatttgactcccaacattggaactgtttacagtggtatgggtcctgatttccgagttcttgtgcgaaagagtaggaagcaggctgagcaatatctccgtctgtacaaggaacccatccccgttactcaac

SEQ ID NO: 86855 - DNA, 1021 bp, Arabidopsis thaliana columbia
ccgtcttctctgcaagaaacctaaaagcctatttatttcacctctctctctctctctctgcaactaatcacttgttcgatctcgaagctgaagctaaagctttcgctaatttgcttaaggagctatgggagatagtcagtactcgttttctctcaccactttcagcccatctggtaagctggtgcagatagaacatgcccttacagctgttggatctggccaaacatctttagggattaaagcttctaatggagttgtcattgcaactgaaaagaagttgccttctattctggttgatgaagcatctgttcaaaaaattcagcatttgactcctaatattggagttgtttacagtggcatgggtcctgattttcgagttcttgttaggaagagtaggaaacaggctgagcaatatcttcgtctgtacaaagaacccatccctgttacccaacttgtaagggaaaccgctactgttatgcaagagtttactcaatcgggaggtgttaggcctttcggggtttccttgctggtggctggatatgatgacaagggtccacaattgtatcaggtggatccatctggctcttatttctcctggaaagcttcagccatggggaagaacgtttctaatgcaaaaaccttccttgagaaaaggtacacagaagacatggaacttgacgatgccattcacacagcgatactgacattgaaagaaggctttgagggagagatctcaagcaaaaatattgaaattggcaaaatcggtgctgacaaagttttcagggtactaacaccagcagagatcgatgattaccttgctgaagtcgagtaactcccagcatagtctagcaacaaagtttaagaccggaatttcgtggcatttacagtcttaaagagttgttttttctgtaaaactttggatctttaaatagtttgttgctgaacacaagctgagtgtctctcaataactaatgaaatctgtttctttttttctcaaaaaaaaaaaaaaagggcggccgct

SEQ ID NO: 86856 - DNA, 453 bp, Arabidopsis thaliana columbia
gtgcaaatttgtcatattgagtaactatataatagtataaagttacagttcattataaatgaaaaagtacaaaaaacaatctgatttccattacaaaacaacaaagcccagataggcttatggtacacttgggaactctcactgcacattccccaaaaccgtgacaattgtccatcatatctcttgaaaagaacaaaacccgttttttagatgcgttataatctctgattctccttgcatatagtgtgacaagtttcccatatatgtagaattgtatgatcgacttcaggcttgagaacagtttctatagtttcaggtaaataacatctctgagttccctctatacgtgcacttcgtacttccttgatcggttaaagccccagagatcattctctgcttcctcgcctgaaccgcctccattctctcttcaaccgttcccttaacgatgaatct

SEQ ID NO: 86857 - DNA, 1102 bp, Arabidopsis thaliana columbia
  unsure (1)..(1102): unsure at all n locations
nnnnnnnnnnnnnnnnnnnnnnnnnnnnnnnnnnnnnnngcctgcaggtaccggtctggaattcccgggtcgacccacggagagcaaagttctcagcaaaatcaaagaagaaccgaacgagagagagaaacgaattcttctcaggtgttaaagaatgtctcggagatatgatagccgtaccacaatcttctcgccagaaggtcgtctttaccaggtagagtatgctatggaggccattggaaacgccggttctgcgattggaatcttatccaaagacggtgttgtgttgatcggtgagaagaaagtcacctcaaagcttcttcaaacctcaacctctgctgagaaaatgtacaagattgatgaccatgttgcctgtgctgttgctggtataatgtctgatgctaacatacttatcaacacggctcgagttcaagctcaacgttacaccttcatgtaccaagagcccatgccggttgagcagctggttcaatctctttgtgacacaaaacaaggatacacacagtttggtggtcttcgcccgtttggtgtctcctttctctttgcaggatgggacaagcaccatggtttccagctttatatgagtgacccgagtgggaactatggtggttggaaagctgcagctgttggagcaaacaatcaggcggctcagtctatcctgaaacaagactacaaggacgatgcaaccagggaagaagcagtcgagcttgccttgaaggttctgaccaagacaatggacagcactagcttaacatctgagaagctagagcttgctgaagtgtatctgactccatccaagactgttaagtaccatgttcactcacctgagtcgctcaccaaactgttggtcaagcacggtgtgactcaacccgctgctgaaacatcttaagcccaaaagtatctctagtcttattcgcctggtacggtgtctccgctttatgtttgtagttctctgttttacagctttccttttggtttgaactttgaagttacctttggcgatgaaactagatttgacaatgttatgaatttatcttcaatgcatcatctttttacttaaaaccaannnnnnnnnnnnnnnnnn

SEQ ID NO: 86858 - DNA, 310 bp, Arabidopsis thaliana columbia
  unsure (1)..(310): unsure at all n locations
gggatttagggcttgcgtcgtgcttgatgctgaatctatgtcatccgagttatacgtaattgatatcaaggtatgttgtcgcttgagtggtaaacgcagcaacctctttgattccgctgactgtcgggatgccttctttacacctcagatggatagtcatttggttatatttgaccgttgtttccctctaaaccaagatnacnttcgtctagctgaactgaacaatgatnaggtggtcacanaagtttcagttcactantatttctcgctgcaaataacaggagtcggtatacgcttcctcagggactgt

SEQ ID NO: 86859 - DNA, 375 bp, Arabidopsis thaliana columbia
ctcagaagaagtagaagaagaagcttctccgatctctcttctctcatctcgatcttgaaatcaagcgatctagaagaatctggcaaaatcttagctgacgaatgttgggattgcaacgagaaacatcctcgatgtataagagaacgtcatcgagagattattctccgatgatcgacgtcgaagacagctcaggtcttttagagaatgatgtggacaatgaaatggaaactacaaatccttcatggaagtgttctcttccgcatgttctagtggctacaatttcgtcgtttctatttggttaccatttaggagttgttaatgaacctcttgaaagcatttcgtctgatcttgggtttagtggtgatacattagctg

SEQ ID NO: 86860 - DNA, 960 bp, Arabidopsis thaliana columbia
  unsure (1)..(960): unsure at all n locations
cnnnnnnnnnnnnnnnnnnnnnnnnnnnnnnnnnnnnnnnnnnnnnnnnnnnnncacacgcgtccgcccacgcctccccgcccgtattaaatcacttgttgttgtctttcttttttcaaaccttggaagcaaggaattcttttttgatgatttaatcgaaagcttcttcctccaaacaaacatcaatggcggtttatcctaacgttaatggcgataagaagcactggtggttcactcacagaaagcttgttgataagtatataaaggatgcaacaactttaatggcaagtgaggaggcaaacgacgtcgcttcagctcttcatttactagacgcagccttatctatctccccgcgtttggaaactgcgttagagctcaaggctagatctctcctcttcctccgtcgtttcaaggatgtcgccgatatgcttcaggattatatccccagtcttaaactcgacgacgaaggatccgcttcttctcaaggctcttcttcctccgacggtatcaaccttctctccgacgcctcttcccctggctcctttaaatgcttctctgtttccgacttgaagaagaaagtcatggcaggcatttgtaaaaaatgcgacaaagaagggcaatggaggtatgtggtgttgggtcaagcttgttgccatctaggactaatggaggatgccatggttctcctacaaaccggtaaacgcctcgcctccgccgagttccgtcgccggagtatttgcttggtccgacgatagctttccttctcctctccgaatcctcctctgcttcttctccaccaacccgagagcgggaacttaacccatctccttcggtcaacataaaggtttttctccgtggttgggccgtnaaaatttgccgttttnnacgttgggctntntcngggtnnancccgaaatttccaaaatcgngggtggccntgccttngctaaaggttntttg

SEQ ID NO: 86861 - DNA, 428 bp, Arabidopsis thaliana columbia
  unsure (1)..(428): unsure at all n locations
gaacagaaaatggaaatgatactgatctcgtcatcgacactcaggttccatccattgaggacatcacaaagaatcgccaccggaaccaatagaagacgaaccaccaccgtgtgtgcagactactacagaggaggaagaacggtggacganaacatggtggtccttaggaaacgaatccatgagatgaagatggttgaacgcaactttgaacctccttctcattggatgcaatgggagaaacgtttctactgcaactacgacgctactatatgtgatgcactcactcttctccaaacttttctcatgaactctcgtcccagcgtcgcgtttggaacgtgtcttcttctcctcgtcagcgttcccgtctcctccgcccgtttttgcttttcgcatccttgatctactctttggcttttggacgcccgttc

SEQ ID NO: 86862 - DNA, 551 bp, Arabidopsis thaliana columbia
  unsure (1)..(551): unsure at all n locations
ggagagagagatggctagatacgatcgagcaattactgtcttctcccccgacggtcacctctttcaagtcgaatacgcccttgaagccgtccgtaagggtaacgccgccgtcggtgtccgcggtaccgacaccgttgtcctcgccgtcgagaagaagtccacccccaagcttcaggattctagatcagccagaaaaattgtgagccttgacaatcacattgccttggcatgcgcggggctcaaggctgatgcccgagtcttgattaacaaagcaaggatcgagtgtcaaagccacaggcttacacttgaggaccctgtcactgttgagtacatcactcgctacattgcctggccttcaacagaagtatacccaaagtggtggtgtcagacccttcgggcctttctactcttaatcggtgggttttacccttactttggcctcccttcctcatataaactgttcctctggggctttttctntttggaaagtaatggttccggagaaatccacttttttgggtttctcgggggcctcaaaattcttgccanac

SEQ ID NO: 86863 - DNA, 1008 bp, Arabidopsis thaliana columbia
  unsure (1)..(1008): unsure at all n locations
tcgnagaagttgggattcgtctttttataatttgccctgaaaacgaaaacgaaaataaaaagcggagagagagatggctagatacgatcgagcaattactgtcttctcccccgacggtcacctctttcaagtcgaatacgcccttgaagccgtccgcaagggtaacgccgccgtcggtgtccgcggtaccgacaccgttgtcctcgccgtcgagaagaagtccacccccaagcttcaggattctagatcagccagaaaaattgtgagccttgacaatcacattgccttggcatgcgcggggctcaaggctgatgcccgagtcttgattaacaaagcaaggatcgagtgtcaaagccacaggcttacacttgaggaccctgtcactgttgagtacatcactcgctacattgctggccttcaacagaagtatacccaaagtggtggtgtcagacccttcggtctttctactcttatcgttggctttgacccttactctcgcctcccttccctatatcagactgatccttctgggactttctctgcttggaaagctaatgctaccggcagaaactccaactctattagggaattcctcgagaagaactacaaagaatcctctggccaagaaactattaaactcgctatccgtgctctgcttgaggtagttgagagtggcggaaagaacattgaggttgccgtaatgacacgggaggaaactgggctgcgccagctagaagaagctgaaattgatgcaatcgtggccaagatcgaagctgaaaaggcggccgcagaagcagccaagaaaggccctccaaaggaaacttgataaaacaataactgtttctgtttctcaatctgaacttaccttcttcgctgcttctgtttctcaatcttgttttgactcgagccaactctttggcaaaagaagaacctgaccccatcgttttgttaacttgaaaatgctccaaaaaaaaactgaagaaagggtttaaaaaaaaaaaaaaaaaa

SEQ ID NO: 86864 - DNA, 649 bp, Arabidopsis thaliana columbia
  unsure (1)..(649): unsure at all n locations
gccnnnnnnnnnnnnnnnnnnnnnnnnnnnnnnnnnnnnnnnnnnnnnnnnnnnnnnnnnnnnnnaaatcgcttccacgcgtccgagcatatcaccaattgggaagacagataaagtcactgatctgggtataacagttaagcttccagaatcttcgcaacctgatgattctctggatagagtgtcaggcgaggatcatgaaccgtctgctactgaacagagtttcacagatagtagaatacaagaaggtcctgaaggttccctccaatcagagatgaagagtgataaacctagacgaggtagaggtagaggtagaggtaggggtaagtctgttagaggaagatcgcaagcaacaaaagctgtgtccagagattcaaaaccatctgatggggaaactccaaggaagcggcaacgcgaacagacttctagaatcacagaaagtgaacaggcagctggtgatagtgatgagggtgtagacagtattacaactggtggacgtaggaaaaaaagacagatagcttgtccagtctctcaaacgcctggacaaacccgatatcagctcaggagacataggaatgtnnggaccgaagaaattanacccccgcctcaaggggtggccactgaaacaagaacgtgtcatgatgatatc

SEQ ID NO: 86865 - DNA, 461 bp, Arabidopsis thaliana columbia
acacaaacactctagtctcctctctttttctctgccttctctcttttatttattccctccttccctctggtcctccatcagatacaacaacagagactccaagatggccggaggaggaggagagctcacggcggctttgttgaaaaagacggcggagaacggcggagaagagaaggatgagttagggttgaagcaaaaggtttggattgaatcaaagaagctatggattgtggcggcgccagcgatcttcacgagattctcaacgttcggagtttcaataataagtcaatctttcatcggccatcttggtcctatagagttggctgcttactctatcaccttcaccgttctcctccggtttagtaatggtatcttgttaggtatggccagtgcattggaaacactatgtggtcaagcctacggagctaaacaaaatcatattgctcgggatcttacctcca

SEQ ID NO: 86866 - DNA, 1005 bp, Arabidopsis thaliana columbia
  unsure (1)..(1005): unsure at all n locations
ctccgattcgcagatcaattagctgggttttgattccgttgtgcgaaggactttaagaggttttgcagatcgaaatcggaagagaagaagaagatgtttctcactagaactgagtatgacagaggagtgaacactttttctccagaaggaaggctatttcaagtggaatatgccattgaagctatcaagcttggttctactgcaattggagtaaagacaaaagaaggagttgtgcttgctgtcgagaagcgtatcacgtcgccattgctggaaccgagcagtgtggagaagattatggaaattgatgaccatattggttgtgctatgagcggtttaattgctgacgcgcgcacacttgttgagcatgctagagttgaaactcaaaaccatagattctcgtatggtgagccgatgactgtagagtccacaacacaagcactgtgtgatctggctttacggtttggtgaaggagaggaagaatcaatgtctcggccgttcggagtatctcttctcattgctggccatgatgaaaatggaccaagcttgtactacactgatccttcaggaacattctggcagtgcaatgcaaaggcaattggttcaggttctgaaggagctgatagctctcttcaagagcaattcaacaaagatttgtctctacaagaagctgagactatcgctgtatctatcctaaagcaagttatggaagaaaaggtgactccaaataacgtggatattgccaaggtagcaccagcttatcatctctacactccacaagaagtcgaagcagtcatcgctcgtctttgattgaaaaaactcaatttgggtaatttacctatcagcttgtgtcacaaaacttgttacttttgtctgttagattgaggatcatgtcacattttagtcggttgtgtaagagaatcttttggctcccatgtcattcaataacctttcggatttgtgacttataaaatttcctttcctaccnnnnnnnnnnnnnnnnnnnnn

SEQ ID NO: 86867 - DNA, 891 bp, Arabidopsis thaliana columbia
  unsure (1)..(891): unsure at all n locations
nnnnnnnnnnnnnnnnnnnnnnnnnnnnnnnnnnnnnnnnnnnnnnnnnnnnnnnnnnnnnnnnnnnnnncccacgcgtccgactctagtctcacacaaaaagaaaaacaatagctaatttaatatcttcttgtgatcatcacaataccacattgatccaaggccagttaaaatctctttcaccatgaagataaagattatgagcaaaacacatgtgaaaccaacaaaaccagtactagggaagaaacaattccacctcaccacatttgatcttccttaccttgctttctactacaaccagaagtttctactctacaagttccagaaccttctagatctcgaggaacccacattccaaaacgaggtcgtggagaatctcaaagatggtttgggtttggttcttgaagacttctatcaactcgccggtaagctggccaaggacgatgaaggagtcttccgtgttgagtacgacgctgaagactcagagatcaacggcgtagagttctccgtcgctcatgctgctgacgtaaccgtcgatgatctaacggctgaggacgggacggctaagttcaaggagttggttccttacaatgggatcttgaacttggaaggacttagcagaccactccttgctgtccaggtgaccaagctaaaagatgggcttgcaatgggccaactttcatcacgcagtcttagacgggacatccacgtggcattttatgagctcatgggccgagatctgtcgtggagcccaatccatctcgactcaacctttccttgaccgatcgaaggcgcgtgacacgcgcgtgaagctcgacctcactgctcccaaggaccccaacgagacctccaacggcgaagatgctgccaatccgacggtggaaccgccgc

SEQ ID NO: 86868 - DNA, 1050 bp, Arabidopsis thaliana columbia
  unsure (1)..(1050): unsure at all n locations
acggacgcgtgggtttggtttctgcagcatcaacaacagccgagccctgttcgttagggttttcggtttttgttagcttttcttcttcttcttcttcgtttccttccacctgaattgttgtaaccatggcggagaaagtatcggaggacgttatgcttctacacggtgacctcgatttgaaaattgttaaggctaggaggttacctaacatggatatgttctcagaacatttgcgccgtctcttcaccgcctgtaacgcctgtgctagacccaccgataccgatgatgtcgatcccagagataaaggcgaattcggtgataaaaacatccgtagccaccgtaaggttatcaccagcgatccttacgtcaccgtcgtcgttcctcaagcgactctagctcgaacacgtgttttgaaaaactcacaagagcctctttgggacgagaaattcaacatttctatagcgcatccgtttgcttatctcgagttccaggtcaaagacgacgatgttttcggtgctcaaatcattggcacggctaagatcccggttcgagacatcgcatcgggagaacgcatttctggttggtttcctgtactcggtgcttcgggaaaaccgcctaaggcagaaactgctattttcatcgatatgaaatttactccgtttgaccagatccatagctaccgatgtggaatcgccggagatccggagcgtaggggtgttagacggacttatttccctgtgaggaaaggaagtcaggtgaggctttaccaggacgctcatgttatggacggaacgttgccggcgattgggttagataacgggaaagtttatgagcatgggaagtgttgggaagatatatgttatgctatatctgaggctcaccatatgatttacattgttggttggtctatcttccataagattaagcttgtttagggaacaaaaagttccaagagctaaggntattaccctttcgggaatttctcaaatacaaaatcccccggagggttcgccgtgttctnctccatngggtgggaggcttccatgnttg

SEQ ID NO: 86869 - DNA, 1119 bp, Arabidopsis thaliana columbia
  unsure (1)..(1119): unsure at all n locations
nnnnnnnnnnnnnnnnnnnnnnnnnnnnnnnnnnnnnnnnnnnnnnnnnnnnnnnnnnnnnnnnnnnnnnnnnnnnnnnnnnccacgcgtccgcccacgcgtccggtttgtttcttcgattcgtagatcaattctcagctgacattgaggtttatctcagatcgaaatcgagaagaagatgtttctcactaggactgagtatgacagaggagtcaatacattttctcctgaaggtcgtctctttcaggttgagtatgccattgaagctatcaagcttggttctactgctattggtgtaaagacgaaagagggagttgttcttgcagtcgagaagcgtattacttcgcctttactggagccgagtagtgttgagaagattatggaaattgatgaccatataggttgtgctatgagtggtctgattgctgacgcgcgaacacttgttgagcatgcacgagtagagacccagaaccacaggttctcgtatggtgagccaatgactgtagaatctacaacacaagctttgtgtgatcttgctttacggtttggtgaaggagaggaagagtcaatgtctcgtccatttggagtatcccttctcattgctgggcatgatgaaaatggaccgagcctgtactacacagatccatcgggaacattctggcaatgcaatgcaaaggcaattgggtctggctcagaaggagctgatagttctctccaagagcaattcaacaaggatataactcttcaagaagctgaaacaatagctgtatctatcctaaagcaagtaatggaagaaaaggtgactccaaacaatgtcgacattgccaaagtcgcaccagcttatcacctctacactcctcaggaggttgaagccgtcatcagtcgtctatgaagaaataaaccgccattctcttcctgttatcttaccttgtctgttcggtaatttatcaggcttctgtctgcttccggttctctaaaccaaaaattagtttcgtttaatcagataatggattttatcgagttgagttttattgagctttctatctacatttttttgtcgttttcaacaagaagttaaaactaataaatatctgtccaaaagaaaaaaaaaaaaaaaaa

SEQ ID NO: 86870 - DNA, 783 bp, Arabidopsis thaliana columbia
  unsure (1)..(783): unsure at all n locations
gcggaaaactttcccggttaagcataattcgccatggatgctcaacaacggagaactgatattcctcgtgcaccaccggtcggagaacccggtggcgatatatcttcgattctcattgctttcggtgttttcgctgcaatcgccgccttggttatgtttccctcatcgttggtgcaccaagttcctgaaggtcacgttggagcgtattggagaggtggtgctcttctaaacataatcacagagccaggttttcatctgaagctgcctttcataaccaactatgagcctgttcaagttactctacagacagatcaagtgagggatataccatgtggtaccaaaggaggtgtcttgattacctttgagaagatagaagttgttaatcgactacgtaaggattttgtttatgacactttgcttaactatggtgtgaactatgataacacatggatttatgacaagattcatcatgagatcaaccagttctgtagctctcattcacttcagcaagtctacattgacatctttgaccagattgatgaacgaatgaaagatgctcttcaagctgattgtacacgttatgctccaggaattgagattcttagtgtgcgtgtcaccaagccgaaaattccagagagtgtaaggcgtaactttgagcaaatggaagaggaacgtaccaaggtcttgattgctattgagaaacaaagagttgctgagaaagaggcacaaggaaatattgtcctttgggngcttnaggccccctttagaaagttttnttcanca

SEQ ID NO: 86871 - DNA, 1023 bp, Arabidopsis thaliana columbia
  unsure (1)..(1023): unsure at all n locations
cttgtctctggcttgagaacaaagaaaacccctttcttcgatctcagcttaaatcactcgacgcagaagaaatcagaaaagagtcagagaaaaaaaaaatcaaggaagatgagtagcattggaactgggtacgatctctccgtcaccactttctctcccgatggccgtgttttccagatcgagtacgccgctaaagctgtcgacaacagtgggactgttgttggaatcaagtgcaaagatgggattgttatgggagttgagaaacttattgcatcaaagatgatgctaccaggttccaacaggagaatccattctgttcatcgtcatgctggcatggctgttgctgggcttgcagctgatgggaggcaaattgttgcgcgtgctaagtctgaagcacgaagctatgagagtgtttatggcgatgctgtacctgtgaaggaactttctgagcgtgttgcaagttatgtacatctgtgtaccctgtattggtggctcaggccttttggctgtggggttattcttggaggttatgatagagatggacctcaattgtacatgattgaaccatcaggcatatcatatagatactttggtgcggccattggcaaaggaaagcaagctgccaaaacggaaattgagaaattaaatttatctgagatgacatgcaaagaaggcgttatcgaggtggcgaaaatcatctacaagctacacgatgaagccaaggacaaggcttttgaattggagatgagctggatatgcgaggagtcaaaacgagagcatcagaaggtccctgatgatcttctggaagaagcaaagacggcagctaaaactgcgctcgaggagatggatgctgactaaaactgaggagtgtgttgaatttagatccgtcttattgcgtcgtttgatgtttcttatgtactctgaattgaattttgtctggagggacagttgttgcagtttcgcatgaaccattggagtcttttatcttattgctatcaacnnnnnnnnnnnnnnnnnnnnnnn

SEQ ID NO: 86872 - DNA, 1023 bp, Arabidopsis thaliana columbia
gattcaagagtatttatatcgacatgtcgttttaagtagcataccgaaacaacttcactggtgagggcttaaactagccaacgaacactcgataaacgcagcggcgcgtctccagcttccagaagctgagcttgtccctatgttggtagacaacaactactttcactttgtcttggcttcagacaatattcttgcagcttcggttgtggctaagtcgttggttcaaaatgctttaagacctcataagatcgttcttcacatcataacggataggaaaacttatttcccaatgcaagcttggttctcattgcatcctctgtctccagcaataattgaggtcaaggctttgcatcatttcgattggttatcgaaaggtaaagtacccgttttggaagctatggagaaagatcagagagtgaggtctcaattcagaggtggatcatcggttattgtggctaataacaaagagaacccggttgttgttgctgctaagttacaagctctcagccctaaatacaactccttgatgaatcacatccgtattcatctaccagagttgtttccaagcttaaacaaggttgtgtttctagacgatgacattgtgatccaaactgatctttcacctctttgggacattgacatgaatggaaaagtaaatggagcagtggaaacatgtagaggagaagacaagtttgtgatgtcaaagaagttcaagagttacctcaacttctcgaatccgacaattgccaaaaacttcaatccagaggaatgtgcatgggcttatggaatgaatgttttcgacctagcggcttggaggaggactaacataagctccacttactatcattggcttgacgagaacttaaaatcagacctgagtttgtggcagctgggaactttgcctcctgggctgattgctttccacggtcatgtccaaaccatagatccgttctggcatatgcttggtctcggataccaagagaccacgagctatgccgatgctgaaagtgccgctgttgttca

SEQ ID NO: 86873 - DNA, 1101 bp, Arabidopsis thaliana columbia
  unsure (1)..(1101): unsure at all n locations
agctctctacgactcactatagggaaagctggcacgcctgcaggtaccggtccggaattcccgggtaaaagaaaggagagaggccgacttggggtataagccagagttcttcttctttttcaagcttcttcttctcatcagtcatcaccggaatctaatttatactcgcaaaactcagcgattcgtttcgtttctgacaagtttccaattctacagcaatggatctcaatctcgatgcacctcactccatgggaacgaccatcatcggcgtcacttacaatggaggtgtcgtcctcggagccgactcacgtaccagcaccggtatgtacgtagcgaatcgagcttctgataagattacacaactgacagataatgtctacgtctgccgctctggatcggctgctgattctcaagttgtatctgactatgtccgctacttccttcaccagcatacaattcagcatggacaacccgcaactgttaaggtttctgccaaccttatcaggatgctcgcatataataacaagaacatgctccaaactggtctcatcgttggaggatgggataaatatgagggtgggaagatctacgggatcccactcggtggaactgtagtcgagcaaccgtttgccattggaggctctggttcgagctatctctacgggttcttcgaccaggcttggaaagataacatgaccaaagaagaagcagagcaacttgttgtgaaggcggtttcactagccatcgcccgtgatggagccagtggtggtgtcgtacggactgtcataatcaactcagagggagtgacgagaaacttttaccctggagataagttgcagctttggcacgaagaattggagccccaaaactcactcttagacattctgaacgctgctggtcctgaaccaatggccatgtgatctgcaaacaacgatcattatcttactctgttgggcaaacattttagatatttcattacagtttccagtgtctttaagactttaaactctgtttgaggttctgttgtaatgaatgacccgatctttctgttttaaacggatatcgtgtttcttatggctatggttttaaaaaannnnnnnn

SEQ ID NO: 86874 - DNA, 538 bp, Arabidopsis thaliana columbia
  unsure (1)..(538): unsure at all n locations
attccggggtttcgtggctttcactcgtaaccggaagagaggacaagatcctccactaatttcacaaaaagctcatctttttattcgttttcgaatcgattcgttatctgggttcaagtatcaaattctctggtttcgtttttcgtttttgatttgttctctctctttcggaaaaagtttggttttttttttgtttgaaacaatgggaagaggcaagttcaagggtaaacctaccggccaacgccgattctctagtgctgctgatattcttgctggcacatctgctgcacgtcctcgatcattcaaacagaaagaagctgagtacgaagaagatgttgaagaagagtcagaggaggaatctgaagaagaatccgaagatgaagctgatgtgaagaagaaaggaggtggcttgaaacttggtttattccggagtttgnttaacccctaaacaggnggtaanggccnaaaaggccctttgnaaagncaaaaaggcccccganggctnagntaaaanccncttggnccccnnaagggcggg

SEQ ID NO: 86875 - DNA, 557 bp, Arabidopsis thaliana columbia
  unsure (1)..(557): unsure at all n locations
atgatcctgccagcannnnnnnnnnnnnnnnnnnnnnnnnnnnnnnnnnnnnnnnnnnnnnnnnnnnnnnnnnnnnnnnnnnnccacgcgtccgattcattgttccagtacttcatcgtagcgccgctcctctcttgtccagactccagaagattcaatggcacccaagaaagacaaagttcctcctccgtcctctaaacccgccaaatccggtggcggcaagcaaaagaaaaagaagtggagcaaaggaaagcaaaaggagaaagtgaacaacatggttttgtttgaccaagcaacttacgacaagcttctctctgaggctcccaagttcaaacttatcactccttctatcctctctgaccgtttgaggatcaatggatcgcttgctagaagggcgatcagagaattgatggctaagggaacaatcaggatggtctctgctcactcaagccagcagatctacactagggcaacccacggctaacttcctttcgaaggttttagttggttccttgtattttacctaatgtctttatgaaccattatctttctagaat

SEQ ID NO: 86876 - DNA, 458 bp, Arabidopsis thaliana columbia
gaagaaaactctccgtctttttgtaacttttgcttcacctctcttctcttgttctattttttttttcccgattcaagcaaaattcatcaagacttgtcaatttgaaaaaatgtcgcaatcaaccgtagatgttccgccaaagggtgggtttagcttcgatctgtgtaagagaaatgatatgcttacacaaaagggtcttaaagctccgtcttttttgaagactggaacaaccattgttggtttgattttcaaggatggtgtgatactaggggcagatacccgagcaactgaggggccaattgttgctgataagaactgtgagaagattcactatatggcaccaaacatatattgctgtggtgcaggaactgcggcttgatactgaagcaagtcactgatatggtcagctcacagctgcgattgcatccgttaccagactggtcgagactctcgggtca

SEQ ID NO: 86877 - DNA, 666 bp, Arabidopsis thaliana columbia
  unsure (1)..(666): unsure at all n locations
ctcaagctgagttttttttttttaatcattggtctcctccttcttcactctcgtacttctcttcttgaagtctctcttgatcgattcgattctacggtttctctcgatccgagggtttttgattgaaccttttattggtctctttgataatgaagaaattattcaaccctaatgtcaaattacttaactttttgttattctagactggtcaatttgaagaaatgtcgcaatcaaccgtagatgtgccgccaaagggtggggttagctttcgatctgtgtaagagaaatgatatgcttacacaaaagggtcttaaagctccgtcttttttgaagactggaactaccattgttggtttgattttcaaggatggtgtgatactaggggcggatacccgagcaactgaggggccaattgttgctgataagaactgtgagaagattcactatatggcaccaaacatatattgctgtggtgcaggaactcgggcttgatacttgaagcagtcacttgataatggtcaagctcaacagctgccgatttgaatcggttanccagacttggtccgaggnctnttcggggnccaattnncttgcntttnnnccctttntcaaaaaaancatcctttttcnagnntacccaaggncaatgnctcttgcttgnncttg

SEQ ID NO: 86878 - DNA, 1341 bp, Arabidopsis thaliana columbia
  unsure (1)..(1341): unsure at all n locations
ctcgattttggtgattcgaacacgattttacctatccttgagcgatctcgatcccgacgttttgagttgattttattgtcaggagttttcaaaaaatctgttgttaagtctcagcaaaaccttcaagtaaagagtggtgaatcggaaaatgtcgcagtcttccgtcgatataccgccaaaaggtgggtttagcttcgatctgtgcaaaaggaatgatatgctgacacagaagggtcttaaagcgccgtcgtttctcaagactggaacgactatcgttggattgatatttaaggatggtgtaatacttggggctgatacacgggcaactgaagggcctattgtggctgataagaactgtgagaagattcactacatggcaccaaacatttactgttgtggtgcaggaaccgctgctgacactgaagcagtaactgatatggtcagctcacagctgcggttgcatagataccagactggccgagattctcgagtcgttactgcattgacccttctcaaaaaacatcttttcagctaccaaggccatgtctcagctgctcttgtgcttggtggagttgatattaccgggcctcatcttcacacgatatacccacacggttctactgacactctaccatttgctacaatgggttctggttcccttgctgccatgtcagtgtttgaagcaaagtataaagaaggtctaactagagatgaaggaatcaagttggttgctgaagccatatgctctggtatattcaacgaccttggtagtggtagcaatgtggatatctgtgtgatcactaaggggcacaaggaatacttgaggaattacatggaaccaaacccaagaacctatgttagcagcaaaggctattcattcaccaagaaaaccgaggttctactcaccaaaattacaccattattggagcgagtcgaaattgtagaagtggctggtgaagctatggaggaatgaatctcgtgtgagagacagatactaagagtgaaaccattgttctacctcacatgacagtcatgtttacattttctactttgttcaatatgaacgactaaaatcgaatcgtagttgcctccatttcgtctttaaatttggcttgaacttgtgattaatgattatggatgattcggttttgaaatttagctctcacataattttcaaaaaaaaaaaaaaaaaaaaacaaaattgtgctctttctttttttgtccacaacatcttaagacaactcatcattcttactaaaaaaaaaaaaaaaaaagnnnnnnnnnnnnnnnnnnnnnnnnnnnnnnnnnnnnnnnnnnnnnnnnnnnnnnnnnnnnnnnnnn

SEQ ID NO: 86879 - DNA, 1164 bp, Arabidopsis thaliana columbia
  unsure (1)..(1164): unsure at all n locations
ctatacgactttattagggaaacctggtacgcctgcaggtaccggtccggaatttccgggtcgacccagcaaaattcatcaagacttgtcaatttgaaaaaatgtcgcaatcaaccgtagatgttccgccaaagggtgggtttagcttcgatctgtgtaagagaaatgatatgcttacacaaaagggtcttaaagctccgtcttttttgaagactggaacaaccattgttggtttgattttcaaggatggtgtgatactaggggcagatacccgagcaactgaggggccaattgttgctgataagaactgtgagaagattcactatatggcaccaaacatatattgctgtggtgcaggaactgcggctgatactgaagcagtcactgatatggtcagctcacagctgcgattgcatcgttaccagactggtcgagactctcgggtcattactgctttgacccttctcaaaaaacatcttttcagctaccaaggtcatgtctctgctgctcttgtactcggtggagttgatatcactggtccacatctgcatactatatacccacacggttcaactgacactcttccattcgccacaatgggttcgggttctcttgctgctatgtctgtgtttgaggcaaagtataaagaaggcctaactagggatgaaggaattaagctggtcgctgaatccatatgctcgggtatattcaatgacctgggtagtggtagcaacgtggacatctgcgtgatcacaaaggggaacaaggaatatctcaggaactacatggaaccaaacccaagaacctatgtcagcagcaaaggctattccttcaccaagaaaactgaggttcttctcaccaaaatcaccccattgctggagcgagtcgaaatcacagaagttggtgaagctatggaggaataattcaatcaatctcatatatcttcttttgcattgatctacatcaaggctctgtgtactctcatgatctcatcttcccagtcttgtcttcttcccatgtttaaggatcattcaaatcttgttactcctctctctccttcttagatttcaatagagagggtcagactcgagagacttcgtcctttcgaaataaaaaaacaactttccctnnnnnnnnnnnnnnnnnnnnnnnnnnnnnnnnnnn

SEQ ID NO: 86880 - DNA, 492 bp, Arabidopsis thaliana columbia
  unsure (1)..(492): unsure at all n locations
gaacgaaatgtgaacccttgtctcgcctaggttggatgggcgtgcttcgttggaaagcatggatccgcctaggctgtcccgagtgtgagcgaggtgtgagtgtcgcccatgggcatcgacaccttgcggctaggaactggaacgagacgggtagcaaagatttcgagtagcacttcatactaccgtgggttttttaaaccttcccctagttttgttgatgttattccgagaattagcaaaccgtaacgaagatgttcttggcaaccatcttttgatgggagtccggctgttcgaaagccggccaagggtgatgaacgaaatgtgaacccttgtctcgcctaggttggatgggcgtgcttcgttggaaagcatggatccgcctaggctgtcccgaaggtatcttttcgcttgtactgccgnnnnnnnnnnnnnnnnnnnnnnnnnnnnnnnnnnnnnnnnnnnnnnnnnnnnnnnnnnnnnnnnnnnnnnnnn

SEQ ID NO: 86881 - DNA, 521 bp, Arabidopsis thaliana columbia
  unsure (1)..(521): unsure at all n locations
atagctatagacagacacacccaaaccctagatctaaccccagccgtcagatcagattgatcgggcaatcgcttctagaccgttggaatcaagcaatggtagaggtagaatcgtatttgtgggtatctagaagaggcgttaggattgtctccaagctgggtgttttttcatcttgatggccaactaatcgaatctcctactctaaagatatttttgtttatttctgtcatgtgtgatttggtcgcgcgtacgggtcgtctccagcagcggtacgaggatggctctcgtctcgtcgccgggtgtattccgtttaggtatgtaaattctgacaaagatggtaattctgaatctgggaaagtgattcaaggtgttgatgatcagctcgtctagtggacctggacttttgtttcccaagggaggatggggaattattgagacagtcagggnggttcaccgagggaacaattgaagaagcagnnnccctgggntnttaangggttttttggggantnttgggtnaa

SEQ ID NO: 86882 - DNA, 516 bp, Arabidopsis thaliana columbia
  unsure (1)..(516): unsure at all n locations
caaaaaacctctcactgcaaagtgccaacaaacaacaagtcttcaccttcttcttcttcttcttcttcaaaatctcttgtacgcaaataatccatgagaaactagggtttaacttgagatctctcttccgaagtattaccatcaatggcgacttcttcttcttcatcgtcgtctctgcttttaccaaacatcaatttcaactcaagacaatctccaacaatcactcgttccgtttcaatcgccgggatcttcttacccagaaaccgattaagctacaatcacaatctccggattcgtacgagattaatcagagcttctaaagacgataatgtcgctgttgaagatcgtgataatgcagtgaagatcaacggtgattacaacggaagtgcacgtttaaacggtaacggctctgcgagaaaatccgtcaacgggggattttaaacgggaggtgctccgtttgaacggtaacggnnaggttttgggtgaagtattttancgggaaggnttnncggnngg

SEQ ID NO: 86883 - DNA, 429 bp, Arabidopsis thaliana columbia
aattcaccttctctctctctcctcctcatctcaccgccggcgttacgccggatctccggtgacttttgttgagcttttttgttgattcatgattcgatatagagaaaaaagaatttcctatttcagctctttgttcttagatttatctttttgtttgttcttatggataaaggattaggttgggggattaaaagagtagtttttgtttggttgtgagattacttgactttgttaaggggataaattaggcgactttgtagggacactgtaccgaaaaaccctagttctgatttatccatggaagtatcatagcacttactattgtcggctttacttcttctacttttgtataatccttttttttttcttaggttctgtgattagatattttttttgtgtgggtttagttgttaatctgatcatggattt

SEQ ID NO: 86884 - DNA, 930 bp, Arabidopsis thaliana columbia
gaaaaaaactccaaattctactctgaaaccctaagtttccgatgtcgatcttcgagtacaatggaagtgctgttgttgctatggtaggtaagaattgtttcgccatcgccagtgatcggagactcggtgttcagctacagacaatcgccactgatttccagaatctccaagatccacgatcgtgtcttcatcggtctttctggtctcgccaccgatgttcaaacactataccagcgcttggtgtttcgtcataagctttaccagcttagggaagagagagacatgaagcctgaaactttcgctagtcttgtctcagccatcctttacgagaagagatttggtccttacttatgccaacctgtgattgctggcttgggagatgatgacaagcctttcatttgcacgatggactctatcggagccaaagagttagctaaagattttgttgtatctggaactgcttcagaatcactctatggagcttgtgaggcaatgtacaagccagatatggaagctgaggaattgttcgagacaatatcgcaagcacttctctcatctgttgaccgtgattgtctgagtggttggggagggcatgtttacattgtaacaccaacagagattaaggagaggatcctaaagggaaggatggattgatctgcttcttctattcaagttgttttccgctgtaatccggttttaagtagtgtaaccttcacatcccggtttaattatatgatcattccttggctgaaattatgggttatgtatgaagtttgattttcctcttggataatggattatatgattttaattcgtagagttatcgaagaataacacttttaactaaaaaaaaaaaaaaagggcggccgctctagaggatccaagcttacgtacgcgtgcatgcgacgtcatagctggtcgatagtgtaa

SEQ ID NO: 86885 - DNA, 488 bp, Arabidopsis thaliana columbia
catggcttcgcttcctgttcaattcacgaggaatcaaatctcttcaccgtttttctctgtaaacctccgccgtgagcctagatctttagtaacagtacactgctccgcaggagaaaacagagaaaatggtgaaggtgtaaagaagagtctctttcctcttaaggagcttggatctatcgcttgcgcagctctctgtgcttgcactcttacaatagcttctcctgttattgctgctaaccagagacttcctccgttatcaacagaaccagaccggtgtgaaaaagcatttgttggtaacacgataggtcaagcaaatggtgtctatgacaaaccactggatcttaggttctgtgattacacaaatgatcaaactaatctcaaaggcaagactctctctgcagccttgatggttggggctaagtttgatggtgcagatatgactgaagttgttatgtcaaaagcttatgctgtagaagcaagctttaaag

SEQ ID NO: 86886 - DNA, 430 bp, Arabidopsis thaliana columbia
cacacgcgtcagaactttatcacgctattctcaaacaagcaaagaaccttaaccaaaaagaaaacgtctacggagacatatggagaggaaacatcacttcgtgttggtgcacaacgcttatcatggagcctccatctggtacaagctcaagcccctccttgaatcagccggccaccgcgttactgctgtcgaactcgccgccttctttatcgacccacgaccaatccaagccgttgaaaccgtcgacgaatactccaaaccgttgatcgaaaccctcaaatctcttccagagaacgaagaggtaattctggttggattcagcttcggaggcatcaacatcgctctcgccgccgacatattttcggccaagattaaggttcttgtgttcctcaacgccatcttgcccgacacaacccacgtgccttctcac

SEQ ID NO: 86887 - DNA, 839 bp, Arabidopsis thaliana columbia
  unsure (1)..(839): unsure at all n locations
gaacaaggcttgttctccaagacgctttttaataagctctctctcacaacgccggatctgtagacggaagatggagtgtgtattcggtcttgttgggaatggattcgccatcgttgctgctgatacatcggcggttcatagtatccttcttcacaaaaacaacgaagacaagatcatggtacttgactcacacaagcttgttgctgctagtggcgagcctggtgaccgggttcagtttacggagtacgttcagaagaatgtgtccttgtacaaattcagaaatggaatcccgttgactaccgccgctgctgccaatttcactcgcggagagctcgctactgctttgaggaagaatccgtattcggtgaatatcctgatggctggctatgacgatgagtctggtgcatcactttactacatcgactacattgcaactcttcacaaagtcgacaagggagcttttggttacggctcctacttctccctctccacgatggacaggcattaccgcagtgacatgtctgtagaagaagccattgaactagttgacaaatgcatacttgagatccggtcaagactcgttgttgcaccaccaaactttgtgatcaagattgttgacaaagatggagctcgtgattacgcttggcgtcagtccgtaaaggatgtcacaactgctgttgtctgagttggttttgtgtttggttttcagatgttatgtgtctgtgacatttgcttttgattttaagtcgggagttagtgttttgacactttttaatcgttgagcatcaatagtgtttgcgattccctnnnnnnnnnnnnnnnnnnnnnnnnnnnnnnnn

SEQ ID NO: 86888 - DNA, 981 bp, Arabidopsis thaliana columbia
  unsure (1)..(981): unsure at all n locations
taaaaagctcttaaactattcttccagcgaccggaagaaacgaataatcggaatcgaaaaattcgaaaaaggaactgagaagaaacagatctgaagatggagtgtgtatttggtctagttgggaatggattcgctatcgtggcggcggatacatcagcagttcacagtattcttcttcacaagaacaaagaggacaagatcatgactcttgactctcacaagctcgtcgccgctagtggtgagcctggtgaccgggttcagtttacggagtatgttcagaagaatgtgtcactgtatcagtttcgtaatgggattcctttgagtactgctgctgctgctaacttcactcgtggagaacttgccactgctttgagaaagaatccatattcggtgaacatcctgatggctggctatgacaaagaagccggcgcatctctatactacattgactacattgcaaccctccacaaggttgataagggagcatttggatacggctcatacttctctctctctacaatggacagacactaccgcagcgacatgtctgttgaagaagccattgaattggtggacaaatgcatactcgagatcaggtcaaggctggtcattgcaccaccaaactttgttatcaagattgttgacaaggacggagcccgtgagtacggatggcgtatcagcactgctgatgcctaagttgttttcattgtgtttattagtccatttatgttactcggctcacatttatattctctgttgaacttcaagctccctggatattaaagttcctagataatgatgatgatatgcatgtgttgaactttttctttccttattgcgtatatgaagcaaaagatagtgcaatgtttnnnnnnnnnnnnnnnnnnnnnnnnnnnnnnnnnnnnnnnnnnnnnnnnnnnnnnnnnnnnnnnnnnnnnnnnnnnnnnnnnnnnnnnnnnnnnnnnnnnnnnnnnnnnnnnn

SEQ ID NO: 86889 - DNA, 439 bp, Arabidopsis thaliana columbia
acgtcaactccccctcaaaaccagcagaaccagtctcactcgatccttaatccaccatggcaacgacttctcgccggtttaccaccggtttattcgcctcgatcacctcggtcaaatcccattccgcaaaccgacctcaatccatctccctaatccgtcgaaaccacatcgatcatcgtctaccgttgatcgttccaagttccaggcggtggattatccaagcggcgagatcctgggatggatttgacgacggagctgacgcggagattaagaagccaggcgcgtatggttacgcgatcggcgataacgagatcgaacggagcagtagtagtactgtccatgtgatcgacggagagcatgttaagacggcggagatagtgatatgggcggcggttacggcggcgtttggcgtcggaaacagagtgatgtataagctcgc

SEQ ID NO: 86890 - DNA, 566 bp, Arabidopsis thaliana columbia
acggacgcgtgggtatcaatcgaatcagacattgacgaggagctttggtcgtaatccgaggaagagattaaaatcggaaagtgcgaaaatgccggtcatggagaaattgaggatgttcgtggcgcaggaaccagttgtggctgcttcttgcttaatcggcggtgttggactatttttgcctgcggttgtgaggcctattctagactctctcgaggcttccaaacaagttaaagctcctccacttaccgatgtgattgctggtgtcacagggaagaaacagagttaaaacaagcaatgacttcccctgttttcttacattcagatgatccctattccttttttgtcttttactctctctattcacaatgaataagccagactcatttgtttgttatgaaacttaatataaaggcatgtgtgtacactcacttttgttcatcacttgatcagatgtattcatttcttaacaacaaatgaaaaaagcttgaaacttttcttgccaaaaaaaaaaaaaaagggcggccgctctagaggatccaagcttacgtacgcgtgcatgcgacgtc

SEQ ID NO: 86891 - DNA, 1086 bp, Arabidopsis thaliana columbia
ctacttcttcttcttctctgctaagcctttcctctcgacttgatacttttctccagtaagggtttgcaaagatgaagcttgatactagtgggttcgagacttccatgcctatgattggatttggctcgagcagtgatatgcttgatgagctttcttctgtaccctcgtttgatctaccccgtactaaagagtttgatggatttcagaaaaaagctaaagacatgttgaagcatgcaaaaggaacaaccactctcgcttttatcttcaaaggtggtgttatggtcgctgctgattctcgggctagcatgggaggatatatctcctcacaatctgtgaagaagattattgaaatcaatccttatatgctcggtacaatggctggaggagctgctgattgccaattctggcacagaaatcttggaattaagtgccgtctacatgagctggcaaacaagaggagaatctctgtttccggagcttcgaaacttcttgccaacatgctctattcataccgtggaatgggactttctgttggtacaatgattgctggatgggacgaaactggtcccggactatactatgtcgacaacgaaggaggacggctcaagggagacaggttttcagtcggttctggttcaccatatgcttacggtgtgctggacagcgggtacaaatatgatatgtcagttgaagaagcttccgagttagcgaggagatcaatctaccatgcgacattccgtgatggagccagtggtggagttgctagcgtgtaccacgttggtcccgaaggatggacgaaactatcaggagatgatgttggggagctacactaccattactaccccgtggcaccagctaccgcagaacaagtcatggaggaagcaacagccgaataaaaatcctgtttagttttctaatcgttcactccctttcttgttgttgcattttgtggtagtatatactgagttgtctctagctgaagctttggtattctattttactgatctgaaatgttgctcgcggattattctctataagattctctttttctgcaatcacaccccccccccccccccttcttctctt

SEQ ID NO: 86892 - DNA, 767 bp, Arabidopsis thaliana columbia
  unsure (1)..(767): unsure at all n locations
nnnnnnnnnnnnnnnnnnnnnnnnnnnnnnnnnnnnnnnnnnnnnnnnnnnnnnnnnnnnnnnnnnnnnnnnnnnnnnntcccccacgcgtccgctaactcttattatcctctcccaattgaatttttcaaagcttgaagaaactagtagtagtaatcttcgctctgtcgtctgatccatttttttatcaaaatctcgagctaaaaactcttgtgtttaagcaaatgaaatgcactgtgtttgattttgagatttgatggaagtgaagctgtttcttcgaagaatttcatggaggttttagttccctgttgtaggctctttgttagtaatcttagattcgtcatttcctgggtttcgttgattctattgttattgggagcgtctgatgcgaaagctaggcatcatcatcatcatcatcaacgaatagcagtggaaggtgtggaaagtggagtagcttcacactcgtgtattcatgatcagattatagagcagaggaagagaccgggtcggaaagtgtattcggttactcctcaggtttatcatgagccaaggagtgttgaaaaagcttttcatcataatggaagggttttgcttagtgtttttgatgaggagaaggatgtgaaacaacctattaggatttatttgaattatgatgctgttggtcattcgcttgaccgagattgtcaacgagttggcaatattgtgaagttgggtgagcctccttcaagtacttttcctgctgttcctgcttgtaatcctaatacaaa

SEQ ID NO: 86893 - DNA, 885 bp, Arabidopsis thaliana columbia
  unsure (1)..(885): unsure at all n locations
aatacgactcactttagggaaagcacgtacgcctgcaggtaccggtccggaattcccgggtcgacccacgcgtccgcccacgcgtccggtgatgataccggaaaccatttcttcaaggattgttacgtcgaaggaacattcgatttcatcttcggaagtggaacctctatgtacttgggaacacaattgcacgtggttggagacggtattagagtgatcgcatttcatgcaggaaagagcgcanaagaaaagagtggatactctttcgtgcactgcaaggtgactggaactggaggaggaatctatttgggaagagcatggatgagccaccctaaggttgtctatgcctacaccgagatgaccagcgttgtcaaccccaccggatggcaagaaaacaagactcccgcacatgacaagaccgtgttctacggagagtacaagtgttcaggaccagggtcacacaaagccaagagagtgccattcacacaagacatcgacgacaaagaagctaactgtttcctatccctcggctacatccaaggatccaagtggcttctcccaccacccgctttgtaaattctttaatatcaacctattaaaattaaaattaaaacgtaaaactaaaattaaaacttctacttacatccttttttcaccgaaatatgtttatcggtgtatattatttttgtcgatattttctttcaatttccagaaatcctctcttctttaaatatcatggaggagttgagatttatgtaattttggtttcattataataaaatgttgtttccgttcaaaaaaaaaaaaaaagaaagggcggccgctctagaggatccaagcttacgtacgcgtgcatgcgacgtcatagctcatctatgtcctaan

SEQ ID NO: 86894 - DNA, 619 bp, Arabidopsis thaliana columbia
  unsure (1)..(619): unsure at all n locations
nnnnnnnnnnnnnnnnnnnnnnnnnnnnnnnnnnnnnnnnnnnnnnnnnnnnnnnnnnnnnnnnnnnnnnnnnnntcgacgcgtgcgcggtcgcgtgggaaaaaaacgaaaaaaaacaaaaaaaaataataaaacaaaaaaaactttttatttttaaataaaaataaaataaaaaatgggatacacaaatgtgtccattttattaggcctgttgatggtctttgttacaccgatggtgttcgcagatgatgtgacaccaatcccagatggtaaaactaagggagcacaagctttatccatgagaatctccggaaattttgctgctttctacaactgcaaattctacggtttccaagacacaatctgtgacgatacaggaaaccatttcttcaaggattgttacgttgaaggaacattcgatttcatcttcggaagtggaacctctatgtacttgggaacacaattgcacgtggttggagacggtattagagtgatagcagcgcatgcaggaaagagcgcacaagagaagagtggatactctttcgtgcactgcaaggtgactggaaccgggggaggaatttattttggaagagcatggatgagccaccctaaggttgtt

SEQ ID NO: 86895 - DNA, 1656 bp, Arabidopsis thaliana columbia
  unsure (1)..(1656): unsure at all n locations
nnntgatttgccagcactaatacaactcatttagggaaagccggtacgcctgcaggtaccggtccggaattcccggtgtcgacccacgcgtccgaaaaaaaaacaaaaaaataataaaacaaaaaaatatcttttttttttctaataaaaaaaaaataataaataaatatgagatacacaaatgtgtccattttattaggcatgttggtgatctttgtttcaccaatggtgttcgcagatgatttgacaccaatcccagagggcaaaccccaagtggtgcagtggttcaatacccacgttggtccattggctcaacgtaaaggcttagatcctgctctcgtagctgctgaggctgctccacgtatcatcaacgtgaatccaaagggaggtgaattcaaaacactaacagacgcaataaagagcgttcccgcagggaacacaaagcgggtgatcataaagatggctcatggtgagtacagagagaaggtcactatcgacaggaacaaacccttcattacattgatgggacaacccaatgccatgcctgttatcacctacgacggtaccgccgccaagtatggaaccgttgatagcgcctctctcattatcttatccgactatttcatggccgttaacatcgtcgttaagaacactgcgccggcaccagatggtaaaactaagggagcacaagctttatccatgagaatctccggaaactttgctgctttctacaaactgcaaattctacggtttccaagacacaatctgtgacgatacaggaaaccatttcttcaacgattgttacgtcgaaggaacattcgatttcatcttcggaagtggaacctctatgtacatgggaacacaattgcacgtggctggagacggtattacagtgatcgcagcgcatgcaggaaagagcgcacaagaagatactggatactctttcgtgcactgcaatgtgactggaactggaggaggaatctatttgggaagagcatggatgagccaccctaaggttgtcgatgcctacaccgagatgaccagcgttgtcaaccccaccggatggcaagcaaacaagactcccgcacatgacaaaaccgtgttctacggagaggtacaagtgttcaggcccaggatcacacgaagccaagagagtgccattcacacaagacattgacgacagagaagctaaccgtttcctatccctcggctacatccaaggatccaagtggcttctcccaccacccgctttgtaaactcttcaatatcaagtctaaaatcatattttgcacatatatcacttttaacaaaaaaattatttttacatatatcacttttagcaaactttttctttacctagtcgtcactacttacgaccctatgtatgcttttatgcaaagaaccgagaggtcgataatctgagaaacatataagcaatcgagacttagccgaaataaattgattttctctctcaaataaaagtataaatggtaccctatatttatgtagcttttctaaaatagccgaggttttatttaattatcaaaaaagtcttttaagtctaaaagtaaaaaaaaaaaaaaaaaaaagnnnnnnnnnnnnnnnnnnnnnnnnnnnnnnnnnnnnnnnnnnnnnnnnnnnnnnnnnnnnnnnnnn

SEQ ID NO: 86896 - DNA, 487 bp, Arabidopsis thaliana columbia
cgcctgcaggtaccggtccggaattcccggttcgacccactgcgtccgataatacatctccatgaccaaaatctccacttctaccgtggtaatttcgatggttttgaaagcggatatgagcagcgtcgcaaggagatgaacaaaaaatttgatgtctacgacaaacagatgaaagcagcgaagaggactggaaaccggggtcaacaggagaaggtaaaggacagggccaagtttactgctgcaaaagaagcatccaagagtaagtcaaagggcaagacagtggatgaagaaggcccagcaccagaagctccaaggaagtggagagattacagtgtggtgttccacttcccagaaccaactgagctcactcctcctcttctgcagttaattgaggttagcttcagctatcccaacaggccagatttcagactctcgaatgttgatgtaggtatcgatatggggacacgggttgcgatagttgggccta

SEQ ID NO: 86897 - DNA, 506 bp, Arabidopsis thaliana columbia
cgcctgcaggtaccggtccggaattcccggtttttttgattgtttaggataaaggagattcctttacctcgattttttgcttttcatttttattaaatctccgatttttgatttttgggggaagaagtagaagaagaagatgattaagttgtggatgatgacttctctccaactcgcggagctcttcgtgagctctattgtgcatttgctttatgggttttatatatttagctccgccgttgccggagatatctctcagacgttgaatgattacttgtttaagtccaatgtcgctttcggagaaaccggtcaaaatcaaaccaatgttgagggtttgcctcctattgtattggttcatggcatctttggatttggcaaaggagattaggaggcttatcttactttggcggtggctgagaagaaagatcgagagggttcttgtccctgattccggcttcctaccacacctccctgcacggctcgggatttctcttcttatccgaaag

SEQ ID NO: 86898 - DNA, 1025 bp, Arabidopsis thaliana columbia
  unsure (1)..(1025): unsure at all n locations
tgacaacagctatcaagacaactggtttgacatctttcccagattatttggtcttggacatgcggaaatttgttatggaggaaggctgggtgccaaagaaacttgatgtatacattgatgttccggatgttattgatatcagccacatgcgtagcaaaggactccaacctggggaagaactgttgccagatggcgttccagaagaagtgatggaatcagcgcagcccgtggcaaatgaggagatagttgcacagctagtctcaatgggatttagccagcttcactgccagaaagctgccataaatacttccaatgctggggttgaagaggcaatgaactggttactttctcacatggatgatccagacatcgatgcaccaatctcccaccagacatctgacattgatcaatcaagcgttgataccttactctccctttggttttgctgacagatgttgctccggaaggcactaacaagcctcgtggaggagacattgcagaaagcaacagactgggtattcaacaaccctaatgcatctgtttcagacatggatgtatcctctagcaattcagcgcagactccggctcaaagtggattaccagatggaggagggaaatacaagctgtttggaatagtaagtcacatgggaacatcagtgcactgtggtcattacgtggctcacatattgaaagaaggccgctgggtaattttcaatgacgacaaagttggtatctcgactgatcctcctaaagacatgggttatgtctacttctttcagcggcttgattgattcgatggagccagtttcagagtctccacctcctccttattatttaaattgnngcttttaaggtcgatagggtttttaacatttggattgaggtgacccatgtaactagtttcggttccaaaatcttacatgtggattagtaaatttggttcacttgatgattttatctgtggaacttcgtcacaaaaaaaaaaaaaaaaaggcaaccgctctagaggaccaagcttcgtacgc

SEQ ID NO: 86899 - DNA, 465 bp, Arabidopsis thaliana columbia
gaaaatggaagagagaaaagtgaagagaattatcatgttccctctaccgtttacagggcgcttcaaccctatgatcgagcttgctggaatattccacaaccgtggcttctccgtcacgatactccacacttctttcaacttcccggatccttctcgccatccacagtttacttttcgaactatcactcacaaaaacgaaggagaagaagaccctctctctcaatcagaaacttcttcgggtaaggacctcgtcgtccttattagtctgctgaaacaatactacaccgagccgtctcttgcagaggaagtaggcgaaggagggacggtgtgttgtttggtctccgacgctctatgggggaggaacacggagattgtagcgaaagagattggagtgtgtacaatggtgatgaggactagtggtgcggcaacgttttgtgcttatacagctttccctctccttataga

SEQ ID NO: 86900 - DNA, 506 bp, Arabidopsis thaliana columbia
cgcctgcaggtaccggtccggaattcccgggtctgacccacgcgtccgattcaattagactcgccttgtggaataaaggcattttcgacgagaatttctgtagagatgaggccttcttgtgcttcttcctcctcctcctctgcttctccttcgttgaggctatcgtcagtgacagtggcggtggacaaagccccgcccgagcttctccgcactcctgattggaccatcatcatcgccatctgcgattctctcaattctaatcgctggcaatgcaaagatgccatcaaagccgtgaagagaagatcgcagcacaagagtgtctagagttcaattactcactttaaccgttgttggaggcaatgctgaagaactgcggtgacttttgtgccttctaatatagctgaagaaacatcttctttgaaactatggttaaccttcgccaggaaaaaacggtgattttgaacttaaggaaccaaccccttagatctcggctgggatccctggaa

SEQ ID NO: 86901 - DNA, 798 bp, Arabidopsis thaliana columbia
cgcctgcaggtaccggtccggaattcccggttcgacccacgcgtccgcccacgcgtccgggaaaagcttcaaacgatgtttacttgctggagaagatctggaaaattttagcggagattgaagatcttcatatgttgatggatccggaagattttttgaaattgaagaaacagttacagatcaaatcgtccgccttaaacgatgcgttttgtttcagatctaaaggattagtggagatgatgaagatgtcgaaagatctgagacagaaagtaccggcggtcttggcggttgaggtagatccaaccggaggaccaagattacaagaggcggcgatgaagctttacgcgaggaagacagagtgcgataagattcatttgcttcaggggatgcaaccggtggaagcggcggctaagagtttcttctttgggtataggcagttagtggcggctttgatgggaagttcggagatgaacgcgacggcgagtcaagagtcgtgtgactcactgagtcagatatttatggagccgacgtatttcccgagccttgacgcggcaaagacgtttctgggagagttttggggtcctttcgccccccttaaaatttagtatctgctggtataattatttaatataaatttaaattggtggtttggtttaatttagtttgtaagatagtgaaatttttggaacatttggcgatccatatttgaacacacattcatttttatatgttttaaaaaaaaaaaaaaaggttaacacacctgagcaaccgctctagaggatccaagcttacgtacgc

SEQ ID NO: 86902 - DNA, 763 bp, Arabidopsis thaliana columbia
  unsure (1)..(763): unsure at all n locations
cactcccatttgnnnnnnnnnnnnnnnnnnnnnnnnnnnnnnnnnngtgccgtaccggttccgaattcccgggtcgacccacgcgtccggaagattttttgaaattgaagaaacagttacagatcaaatcgacgggtaaaaacgatgcgttttgtttcagatctaaaggattagtggagatgatgaagatgtcgaaagatctgagacagaaagtaccggcggtcttggcggttgaggtagatccaaccggaggaccaagattacaagaggcggcgatgaagctttacgcgaggaagacagagtgcgataagattcatttgcttcaggggatgcaagcggtggaagcggcggcgaagagtttcttctttgggtataggcagttagtggcggctatgatgggaagtgcggagatgaacgcgacggcgagtcaagagtcgtgtgactcactgagtcagatatttatggagccgacgtatttcccgagccttgacgcggcaaagacgtttctgggagagttttggagtcatttgggatgattaaattttaatttctgctggtataattatttaatataaatttaaattggtggtttggtttaatttagtttgtaagatagtgaaatttttggaacatttgacgatccatatttgaatacaaattcatttttataaaaaaaaaaaaaaaaaaagaaggggcggcccgttccttnnnnnnnnnnnnnnnnnnnnnnnnnnnnnnnnnnnnnnnnnnnnnnnaacnttca

SEQ ID NO: 86903 - DNA, 528 bp, Arabidopsis thaliana columbia
  unsure (1)..(528): unsure at all n locations
gagagcaaccaaaatgcaactccaaacccaatccttcgctctcaatcttctgccatctccaaatttcgccaaacccatcgagagacgtgaattcatctctctaaaacgagacccatctcgtccaatttcactccgatgttccgtttccacgactttggatactccggcgaccgcttcgacccacaagccctttccggcggaggtttcaaggagtatcatggagctttcatctgttggaactctctccactttgacccacgacggttggcctctcggcgtaggagttcgcttcgccgttgacaaagatggcactcctgttctttgcctcaatcgctctgtctctcctgacaagaggtctgctcttcatgttcagttagaacaatgtggattgaggactcctcagtgtacggtacaaaggtaggattggtcgncctggggacggtactntttnaaaggggttanggctaantggaggaaaanntttgggagaagtttggagcagttnattttttcagtnccngtttcaaa

SEQ ID NO: 86904 - DNA, 1381 bp, Arabidopsis thaliana columbia
  unsure (1)..(1381): unsure at all n locations
nnnnnnnnnnnnnnnnnnnnnnnnnnnnnnnnnnnnnnnnnnnnnnnnnnnnnnnnnnnnnnnnnnnnnnnnnnnnnccacgcgtccgcccacgcgtccgccaaaatgcaactccaaacccaatccttcgctctcaatcttctgccatctccaaatttcgccaaacccatcgagagacgtgaattcatctctctaaaacgagacccatctcgtccaatttcactccgatgttccgtttccacgactttggatactccggcgaccgcttcgacccacaagccctttccggcggaggtttcaaggagtatcatggagctttcatctgttggaactctctccactttgacccacgacggttggcctctcggcgtaggagttcgcttcgccgttgacaaagatggcactcctgttctttgcctcaatcgctctgtctctcctgacaagaggtctgctcttcatgttcaggtcctcatttgctaattccactctgtttcttctttgaaaaaatggcanagtttacttctttntgaaggaacaatcatgaattgtggttgtttagggaatcagttagaacaatgtggattgaggcctcctcagtgtacgatacaaggtagcattggtcgacctggagacgatactgttctaaagcgtcttagtgctacatggagggaaaagtttggcgaagaagttaaggaagacagtttatatgttgttgcagttgaccgtgttctccaaatggaagatttcatggaggacggaatctgggtggcgtcatcagattacaaaaatgcaagtcctgaccctcttcgagatattgcagaagatattgtcaaccagattaacgctaacaacatggaagacatcttccgtttctgcaatgtatacgtggatctagactttgtggtttcagaaacaaagatgatatggatggataggcttggattcgaccttcgggtatggtctccacgaggtgtatatgatgtgaggattccatttccaatggaagtaacagatgaaaagggagcaaaatcatccttcaatggaatgtcacagctcgcttgggaagtagagaaaagctattgccctgcagatttcaacaaggtcaaactacttaagcaagttgtgggatcatctcattctcacaagggaggaggacaataacaatactaatgacttttttttgcttgtccccattattctttatttacaagttgatgccaaaattgtgcattggctctcgtggaatagtatatgtttacttgaagtaatgtttgtcatctttttttaaaaaaaaaaaaaaaaaagtnnnnnnnnnnnnnnnnnnnnnnnnnnnnnnnnnnnnnnnnnnnnnnnnnnnnnnnnnnnnnnnnnnnnnnnnnnc

SEQ ID NO: 86905 - DNA, 1202 bp, Arabidopsis thaliana columbia
  unsure (1)..(1202): unsure at all n locations
tgattctgccnnnnnnnnnnnnnnnnnnnnnnnnnnnnnnnnnnnnnnnnnnnnnnnnnnnnnnnnnnnnnnnnnnnnnccacgcgtccgcccacgcgtccgcaaaaccaaaaccatcagatcttaagaagaagaacctaaagctcactacgatatttttcgagaatatgacgactttttctgttccgattgataacggagattctatgaagatcgcagaagaagaatcacaaagaacactgtacccatatgttactggaacttcaattgttgcaatcaagtacaaagatggggttttgatggcttctgatatgggaggttcatatggatcaaccttaagatacaagaacatcgagagagtgaaggctattggtaagcattctcttcttggtgccagcggagaaatcagcgactttcaggagattctccgttatcttgatgagctcaccctgaatgataacatgtgggatgatggtaactctttgggaccaaaagagattcacaactatctgacccgtgtgatgtacaaccgtcgcaacaagtttaaccctctgtggaacactctcgtccttggaggcgtcaaaaatgggaaaagttaccttggaatggtgtcaatgattggtgttagttttgaggacgatcatgttgccactggatttggaaaccaccttgctaggccaattcttcgtgatgagtggcatgcagacctgagttttgaagatggtgtcaagctacttgagaaatgtatgcgtgtgcttctttaccgtgacagatctgctattaacaagcttcagatagcgaagatcacggaagagggcgtgacggtctcacagccatactcattgaagacatactgggaattctcgtcattccacaacccaactgctggtgctgcaggctcctggtaagaagccaagcaaccacatcggctggcgatcttttaaggaagcttttattttattttatgtgatgttgttaaacactttgtactgtagttgttttactattaaacttggtggtttctttctgacagtccagagtttagatcaatgaggatttataaaaagttctggatatctttgggtagtaatccatacctttgttcattgttaatcgttctccaaaaagaaaaaaaaaaaaannnnnnnnnnnnnnnnnnnnnnnnnnnnnnnnnnnnnnnnnnnnnnnnnnnnnnnnnnnnn

SEQ ID NO: 86906 - DNA, 628 bp, Arabidopsis thaliana columbia
  unsure (1)..(628): unsure at all n locations
ttccggtttctccagggtccgacccacagcgatccggttcctctgtctttctttcttccttattctactccattacgcttcttggttccaagacacgcacaagaaaaagaccgaatctttcaccttcccggtgaaccaaacgatgtctccttctctcacttctctggttacattaccgtcaacgagtcagcaggaagagcactattctactggctcactgagtcaccaccgagtgaaaaccctgagtctaagcctcttgtcctctggctcaacggtggacctggttgttcctccgtagcttacggtgccgctgaagaaatcggaccttttagaatcaatcctgatggcaaaactctttaccacaatccttactcttggaacaaattggcgaatttgctcttccttgaatctcctgctggtgttggtttctcgtattcgaatactacctccgatttgtatactgccggagatcagagaactgcggaagatgcttatgnggtttcttgtgaaatgggttnagagggttncccaatacaaaccacagggnggtctacaatgctgggggaagnttttcaaggncaannagttccccagttttnacanattttttntgggaaannngaatccc

SEQ ID NO: 86907 - DNA, 1116 bp, Arabidopsis thaliana columbia
  unsure (1)..(1116): unsure at all n locations
cgcgtccgcactaaagaaggagcgaattgctcttcggcagtggaaagaagcggatgccctctcacaaattgcagcacattgccttctaatccttcttctgctgaagctgagtccaacagcgattacattgtcccaaagaagccatcttcaaagaacgaagacaacaattctccgtcagtcgatgaaaagtctgcgaaaggataaagggcaccgactcagacatgtcagattagaggacgttacagattgtgttgttggatgatgaagaacaagaagctgttctggataagacggaatctgaaactccagtcgtggttactacgaaaagtcttgttggtaatcgaaacagttcagatgcgagtttgccaattactcccttcaggtcagatgaaatcaagaaccgtcaagctagaatcgaaatatcgatgagagacaactgtaacaacggtgatcattcagcgaatggaggaacagaaagtggattagagcattgtgtgaagatcataagacaactcgagtgttcaggacatatcgataagaatttcagacagaagtttctgacttggtatagcttgagagcaacgtcacaagagattagagttgtgaagatattcattgatacatttattgatgatcccatggctttggctgagcagctcattgatactttcgacgaccgtgtttcgataaagcgttctgcggttggtggtagcggtgcgtctgcagttgttccatctggattctgtatgaagttgtggcattagagaatgggaacttgtgctctgtttttttcaagtcattttcaaaacgttattctaattattgggaaatttgcattattggaacatttccatgcaagaacagtagtactgttgctatcgaatagatcgtctttgtcggattattaaaaaaaaaaaaaaggatttgattccatttataatttagtaattagtcctagactgaattattcttatttcgttgactattggattatgttattttatcaagtaggttatgaaaaaaaaaaaaaaaaaaaaaagnnnnnnnnnnnnnnnnnnnnnnnnnnnnnnnnnnnnnnnnnnnnnnnnnnnnnnnnnnnnnnnnnnnngctcctaa

SEQ ID NO: 86908 - DNA, 1048 bp, Arabidopsis thaliana columbia
  unsure (1)..(1048): unsure at all n locations
gccnnnnnnnnnnnnnnnnnnnnnnnnnnnnnnnnnnnnnnnnnnnnnnnnnnnnnnnnnnnnntttttttttccattccaaggcttcagtttcacttcatcacactctctgcaaaaaaacaaaaatgagctctcaaatctgcagatctgcttccaaagcagccaaatctcttctctcttcagctaaaaatgctcgcttcttctctgaaggacgagccattggtgctgcggcagcggtttcggcgtcaggaaaaattcctttgtatgcatctaactttgcaagatcatcaggttctggtgttgcttctaagagttggatcactggactcttagctcttcctgctgcagcttatatgattcaagatcaagaggttcttgctgctgagatggaacgaacttttattgctatcaagcctgatggtgtgcaaagaggactgatatcagagatcatttctcgattcgaacgcaagggattcaagctagttggtatcaaagtcattgttccttctaaagatttcgcacaaaagcattaccatgatcttaaggaaagacctttcttcaatggtttgtgtgacttccttagctctggtcctgttattgccatggtctgggaaggagatggtgtgatcagatacggacgtaaactgattggagccactgatcctcagaaatctgagcctggaacaatccgaggagatcttgcagttactgttggcaggaacataatccatggaagtgatggaccagagactgcaaaggatgagatcagtctgtggtttaagcctcaagaacttgtttcttacactagtaactctgagaagtggctctatggtgacaactaaatccctcttcctcttgtcttttgaaatcaaatcacattggtttttcttttcttttcttacccatacaataaaaacaagaaacagttgttacggatacaaacacattccgggttttgatttttccccggtgaactcagtaaacagagcataagcaataagtatgggatgtttgaatctatcttgccccattcttctctaacccagac

SEQ ID NO: 86909 - DNA, 797 bp, Arabidopsis thaliana columbia
  unsure (1)..(797): unsure at all n locations
agtatcgcgaggagcttagacaatggcagatcccatgagaaaggaagttaattgggtgcgtaagaagattgatagcgtcaacaaagaactcaaaccattaggctctactgttcaaaagaaggaaagggaatacaaagaagcattggatacgttcaacgagaagaatcgtgagaaagttcagctgatcaccaagctaatggagttggttggagaaagcgagaagctgaggttgaagaagctggatgagctaagcaggagcatagacacagagagtgaatctatctcacaagacaagaccataccaatcaagaactaatttggtgtattttttctattttatttttacgttttggaatgttttcttagtttctgggtgttttagttttcttttgctatgatttgtgggttgatttgtaaaattatgatggggtttttcgtgtttttgattaaccattattgttagggaagggaaatgggataatgcttcttctgcttaggctactgaatgctaaaagggtttgtaagtttgaatttttttcttgctttgttttttctaatattattttatttgttatattgtttagctttattttaatttcttttccccccccaaattatgtttagctttttgagaaagtagcctctcgccgtcgagcgtgtgtggtgggtgttttgaaattgaaacgacttcttcttgtcaaagtaaaaaaaaaaaaaaagnnnnnnnnnnnnnnnnnnnnnnnnnnnnnnnnnnnnnnnnnnnnnnnnnnnnnnnnnnnnnnnnnnnnnnnnnttca

SEQ ID NO: 86910 - DNA, 910 bp, Arabidopsis thaliana columbia
  unsure (1)..(910): unsure at all n locations
nnnnnnnnnnnnnnnnnnnnnnnnnnnnnnnnnnnnnnnnnnnnnnnnnnnnnnnnnnnnnnnnnnnnnnnnnnnnnnccacgcgtccgagagaaacaaacccactccattaaaaaccaaagctttaagcttagattcaatcccaagtcagtaaaaatagggttaatcgaagaaccccaccggaattccactgaggaattgcatcagtcgcgttcttgttgcggcttgaggaagaaaaagaacacctacactaaccaaaacaagaacaaggacgaattgaaaccgaagatgacaacaacgaatgaagctactacacagcctcctcagcagatgatgagcttgagttttagtagtcagatgtctaaagaagacgaagagatggctcgttctgctctctctgcttttagggctaaagaagatgagattgagaagaggaaaatggaagttcgtgaaagggttaaggctcagcttggtcgtgttgaggaagagactcgtcgtcttgctagtatccgcgaggagcttgagacaatggcagatcccatgaggaaggaagttaattgggtgcgtaagaagattgatagcgtcaacaaagatctcanaccattaggctctactgttcaaaagaaggaaagggaatacaaagaagcattggatacgttcaacgagatgaatcgtgagaaagttcagctgatcaccaagctaatggagttggttggaaaaagcgagaagctgaggttgaaaagctggatgagctagcaggagctagcacagagagtgttntatctcacaagacaggacctaccatcaagactaattggngatttttctatttattttacgtttggatgtttctagttctggggtttaagttctctgcttgatggggtgtttgaaatttatggggtttggg

SEQ ID NO: 86911 - DNA, 533 bp, Arabidopsis thaliana columbia
tggcggagtagtcactgctgttttctcgtgtacacgagcttcttgtgttcgttccacctcttgaagatgaagaagttcaactacgaaatcgttcttctctcgatctcggatttttctgatcgatggcggttcccacactctgtatcgccgatggaatctaccccactgcttttttctaccggaattcagtccgacgactgacctccgtcgcgcatgatcggtttacgaacccgaaattcggaatcgatggacgtctacggaacggaccgaaggtgacggcaacggtgaatccatatacgtacacggaggcggcgcagcccgaagagcggaagagtttgacggattttttggtggaagctagagatttcgttagatctgacggcggagatggtggtccacctcggtggttctctcccttggaatgtggcgcacgcgctccagaatctcctcttcttctctacttacctgggatcgatggtactggattaaggctcattcgccagcataagaggcttggagagatatttgacata

SEQ ID NO: 86912 - DNA, 530 bp, Arabidopsis thaliana columbia
  unsure (1)..(530): unsure at all n locations
aaaagtttggcccgggttacaactttaaccagacagtgggttgatactgctgtgagcacagagattcttgtgcaaggctttgaccaagaaactgctgcagtggttatggcaagattaacttccttaaaaatggaaacagaggagggatttgatgcaactcggtggctagatcggactctcattcgtctgtgttcaaaatttggtgaatatagaaaggatgatccaacctcgtttacgctgaaaccatatcttacattgttccctcaattcatgtttaacctgaggcggtcacagtttgttcaggtctttaacaatagtcctgatgaaaccgcatacttccgcatgttgctaaaccgggaaaacatttcaaatgcaattgtcatgatccaaccttctctgacgtcatattcattcaattcaggacctcaggcagctttgctggatggtggcttccattgcagctgacaagattcttctattagatgcatattttagtgttgttgtcttccatggantgnctatatcgcaat

SEQ ID NO: 86913 - DNA, 430 bp, Arabidopsis thaliana columbia
cctcaaactctctctttctctctctctctctggttccctagaatttgagcaaaatttctaccataattgctaattattaaaaggaaacataagtaatcgttgcttcgatcctttgttacatggatggatcctgaacaggaaatctcaaacgagactttggaaactatattggtaagttcaacagaaggaagcaataataacaataagaaaatggaagaagaaatgaagaagaaagtatcaagaggagaattaggaggtgaagctcaaaattgtccaagatgtgaatctccaaacacaaagttttgttactacaacaactatagtctctcacaacctcgttacttctgcaaatcttgtcggagatattggactaaaggcggtactcttcgtaacgttcccgtcggtggtggttgccgtcgaaacaaacgat

SEQ ID NO: 86914 - DNA, 360 bp, Arabidopsis thaliana columbia
cttttgcttttttgggtttcctccttctttctcatctttgctgcggtgcatttttttctcgggaaaatcctttctgggctttccgggaaagttttcttgtcagattcggaaaggtaccaaagaaaataaattaataaaaacttaccaaacagattttgtgtttatctctctctctatagattcttttgatcacaaatccttttcgtttttgatcatattttgattgagaacaaaacaatcttcaaagtctcaacctttaagtttgattgatctttttttggtaagtaaatcttctgtcgtagattcgatattttctgatcttctcttttcgaattcttcaatcttcaacgatcccaatct

SEQ ID NO: 86915 - DNA, 453 bp, Arabidopsis thaliana columbia
cccacgcgtcagcaaaaacaaagaacaagtgtgaagccaaacgcagaattttgggaaaccatcgttttctacttctcagtcatctactcagccttttgatgatccatttggtgactctcctttcaaagccatcacttctgctgacactgagacaagccaacatcagagttttggagttccttttcagccaacaccaccaacttcaaatcctaacaatgaacataactttggttttggggaagcattttcagctgttaccgattctgaacctggcgttcaaaatatgcaagctccaccgaacttatccgtctttcctcaagagcagtttgatacatcgcagagcgaaatcgatattcttgccggcattctcccaccatctggaccgccagtttctctgtctccacaaccagattccactatgccaacatcccaatttcatcccaatggtaactc

SEQ ID NO: 86916 - DNA, 455 bp, Arabidopsis thaliana columbia
tccggggccacccacgcgtccggagctctcggagattcaatcactcatggcgaacgaagacgacgacggtgagaaatccagaagtctgcaccaacagattgctagaaaacccaaaacccagatcgtgattggtgtgccatcgtaccaggaagttttggaaagctcacagacgaagtccacgcctccatctctcttcaagccttcccagagtttctctcaggctttcgctttcgtcaagtcgtccgacgtctactctcctcctcctccttcctccgcagccgcctcttcttctcagccgtcgggcgcttctcaggtgccccacagttcaagccaaacgcatcaaactgatggagcctcatcttcttctactcctgtagccactggctctgtaccatcaaacacaactcaaaatcgtaacgctattctcgttagccatcgacagaaaggaaacccgc

SEQ ID NO: 86917 - DNA, 891 bp, Arabidopsis thaliana columbia
  unsure (1)..(891): unsure at all n locations
gatacttccnnnnnnnnnnnnnnnnnnnnnnnnnnnnnnnnnnnnnnnnnnnnnnnnnnnnnnnnnnnnnnnnnnnnnnnnccacgcggtcgcggacgcgtgcgcccacgcgtncgctgcagaagagaagcctgaatcanacgaggaagatgagtctgatgatgaagatgagtctgaagaggatgatgactctgagaaaggaatggatgttgatgaaaatgactcanatnatnacnatgangaggggggtggaggatnaanaagaggaggagactcctaagaaacctgagccaatcaacaagaagaggccaaatgaatctgtatccaaaacacccgtctctggaagaaggcaaaaccagcagcagcaccagcttctactcctcaaaagacagaagagaagaagaaagggggacacaccgccacaccacacccagctaagaagggtggaaagtctcctgtgaatgctaacccagagccccaagtctggaggtcaatcatccgggtggtaacaacaacaagaagccattcaactcaggcaaacaatttggtggttccaacaacaagggttctaacaaaggcaaaggaaaaggtaaagcttaaggacgtggatcaaagaaaggttttgggtttttgagtaaattaataaaacccctggaaaggtgggtttggaattttattctaatttaataggaaaacctggtaacggaataaccaattttaggaattgccaatttcaccttcccaaggtaatccggaaaataaaaattggttaaaataaaaaaaaagcctcgaatgccaaccaaaaaaaaaaaaaaaggccgcccgctcaaaagaatccaagctaaggaaggggggcatgcaacgtcatagttcttctaaagtgtcacctaa

SEQ ID NO: 86918 - DNA, 1390 bp, Arabidopsis thaliana columbia
  unsure (1)..(1390): unsure at all n locations
atgatactccaagctccctacgactcactattnggaaagctggtacgcctgcaggtaccggtccggaattcccgggtcgacccacgcgtgcgaacccactgcctctttcccggccagtcctctctttcgcttctaaaaaaaaacctaacaacctctcttctctcttcctcgttcaacaacaatggagttctggggagttgcggtgacaccaaaaaacgctactaaggtgactcctgaagaagacagccttgtccacatttctcaggcttcacttgactgcacagtgaaatctggagaatctgtggttttgagtgtgactgttggtggggctaaacttgttattggaacactttcacaagacaagttccctcagattagctttgatttggtttttgataaagagtttgagctttcacacagcggtaccaaagcaaatgttcatttcattggctacaaatcccccaacatcgagcaggatgacttcactagttcggatgatgaggatgttcctgaagctgttcctgctcctgcccctactgctgttactgccaacggaaatgctggagcagctgttgtcaaggctgacacaaagccaaaggccaaacctgccgaagtgaagcctgcagaagagaagcctgaatcagacgaggaagatgagtctgatgatgaagatgagtctgaagaggatgatgactctgagaaaggaatggatgttgatgaagatgactcagatgatgacgaggaggaggattctgaggatgaagaagaggaggagactcctaagaagcctgagccaatcaacaagaagaggccaaatgaatctgtatccaaaacacccgtctctggaaagaaggcaaaaccagcagcagcaccagcttctactcctcagaagacagaagagaagaagaaaggaggacacaccgccacaccacacccagctaagaagggtggaaagtctcctgtgaatgctaaccagagccccaagtctggaggtcaatcatccggtggtaacaacaacaagaagccattcaactcaggcaaacaatttggtggttccaacaacaagggttctaacaagggcaagggaaagggtagagcttaaggacgtggatcaaggagaggttttgggttttcgagtagatgatgaaaacacttggaagtgtggttttggatttttatcttattttattagtataacttgttatcggatgagctattttgagtatttgcaatttctactttcctatgtaattcagtatatgaatatttgctgaaatgagaaagaagactcgaattgcaaacaaaaaaaaaaaaaaagcgcgcccgctctagaggatccaagcttacgtacgcgtgcatgcgaggtcatagctctagtatagnnnnnnnn

SEQ ID NO: 86919 - DNA, 551 bp, Arabidopsis thaliana columbia
tgagaatagtaattcattattcttaacaataggtcctggagatttcttggttcatcatgctattgctttaggtttacatacaactacattgatcttagtaaaaggtgctttagatgcacgtggttccaagttaatgccagataaaaaggatttcgggtatagttttccttgcgatggtccgggacgaggtggtacttgtgatatttcggcttgggacgcattttatttggcagttttctggatgttaaatactattggatgggttactttttattggcattggaaacacatcacattatggcagggtaacgtttcacagtttaatgaatcttccacttatttgatgggatggttaagagattatctatggttaaactcttcaccaacttatcaatggatataacccgtttggtatgaatagtttatcagtctgggcatggatgttcttatttgggcatcttgtttgggctacaggatttatgttcttaatttcctggcgtggttattggcaggaattgattgaaactttagcgtgggctcatgaacgcaca

SEQ ID NO: 86920 - DNA, 532 bp, Arabidopsis thaliana columbia
  unsure (1)..(532): unsure at all n locations
atgattctccnnnnnnnnnnnnnnnnnnnnnnnnnnnnnnnnnnnnnnnnnnnnnnnnnnnnnnnnnnnnnnnnnnnnnnccacgcgtccgcggacgcgtgggcggacgcgtgggcggacgcgtgggcggacgcgtggggaagatcgtgacattggtactcgtcgtcttcgtcatactttcgacatcattcccggctgccatcaaagccgaagacacgggagatacaggaaatgtgggagtgacatgtgacgcaaggcagcttcagccttgccttgccgcgattacgggaggaggacaaccctcaggtgcatgttgtgcaaagcttacagagcaacagtcatgcctctgtggtttcgctaagaaccctgcgttcgcacagtacattagctctccaaacgctcgcaaagtgctccttgcttgcaatgttgcttatcccacttgttgaaacttatctagagattttataaataaataaacgaaaggaaataaattacattatatcaaacgttatgatacaattcaaccgtttgt

SEQ ID NO: 86921 - DNA, 819 bp, Arabidopsis thaliana columbia
aaagaagccattgtcgatgctgttctggagaatccatcaccaggaaaatctcaagtttcttaatggggttgacagaaagagcttgagggcaagattgaatcggtctcaagtctgaggaaaccaaaagaaattcccttctgatgatcaattagaacattgatgctcttgatgatgatccatgggggaaatggggtgacgaggaagaagaagaagttgacaatagtaaagcagacgagtcctatgacgatatgcagctgaaactggatttgcgtgatagaggagacagcttatttaggttcctccacaagttatcgagcctaagaacaaggaacccaccaattaaagagaaggccccaattgccttcagagagcagctttccctggcgagcccttctggaaacaaaagggctagcctacagccttataacaaaaagtgttgagcaaacaagagatacccggtttagaataccattcttcaactgttggaagatttattaaaagcggatttggaaggtttggtcttggtcaggcaaaaccaagcctggcagaccagagtgtcattcttgtctttgtcattggaggtatcaacggtatagaggttttggaagctcaagaggctgtgtcagagagcggaagaccagacattaacttggttattggaggaacgacacttctaacccccgacgacatgtttgagttattgttgggacaattcagccatttttgatatcttgcgaactgacctacactctacataatcttctggtggtagcttgtaacaataaaagcggccgcgagttcgatatcaagctaatcgat

SEQ ID NO: 86922 - DNA, 1693 bp, Arabidopsis thaliana columbia
cgcgtccgaaacactacattttcacatcaaaatcacattccttccatggccttcttctccatgatctccattctccttggctttgttatctcctccttcatcttcatcttcttcttcaagaaacttctctccttctccagaaagaacatgtctgaagtctccactctcccctctgttccagtggtaccagggtttcctgttattgggaacttgctgcaactaaaagagaagaaacctcacaagactttcactagatggtcagagatttatggtcctatttactctataaagatgggttcttcttctcttattgtcctcaattctactgagactgccaaagaggccatggtgacgcggttttcgtctatctcaacgaggaagttgtcaaatgcgttgacagtccttacttgtgacaaatctatggttgctactagtgattatgatgatttccacaagttggtgaaacggtgtctcttgaacggtcttttgggtgctaatgcacagaaacgaaaaagacattacagagatgcactcattgaaaatgtgtcttccaagttgcatgcccatgctagggaccatccacaagaacctgtaaacttcagagctatatttgagcatgagcttttcggtgtagcattgaagcaagcttttgggaaagatgtggaatccatttatgttaaagaactcggtgtgactttgtcgaaagacgagatcttcaaggttttagtacatgacatgatggaaggtgcaattgatgttgattggagagacttcttcccatacttgaaatggattccaaataaaagttttgaagcaagaatccagcaaaagcataaacgtagactcgcggtgatgaatgctctgattcaagatcgactgaagcagaatggttcagaatcggatgatgattgctatctcaacttcttgatgtcggaagcgaaaacactaaccaaggagcaaattgctatcttggtttgggagacgattatcgagacagctgacactactttggttacaactgaatgggccatctatgagctcgctaagcatccaagtgtccaagatcgtctgtgtaaagaaatccaaaatgtctgcggaggagaaaagttcaaagaagagcaattgtctcaagttccttatctcaatggagtattccatgaaacgcttaggaaatacagtcctgctcctctagtccccattcgctatgcccacgaagatacgcaaatcggaggctatcatgtccctgcaggaagtgagattgcaataaacatctatggatgcaacatggataagaagcgttgggagagaccagaggactggtggccggagcggtttcttgatgatggcaaatacgaaacgtcggatcttcacaagacaatggcgtttggagcgggaaagagggtttgtgctggtgctcttcaagcatctctcatggcaggcattgccattgggaggttagtgcaagaattcgagtggaagcttagagacggtgaagaagagaatgtggatacatatggcttgacctctcagaagctttatcctcttatggctattatcaatccaaggcgttcttaagacagaaatctcttctttcttttgttagtttttaaccttgtatcaacttttatttgtaacaaatgctgttttgtagtactatttatgttttactgtgttatattttactatcctctga

SEQ ID NO: 86923 - DNA, 466 bp, Arabidopsis thaliana columbia
  unsure (1)..(466): unsure at all n locations
cacacgcgtccgcccacgcgtccgcccacgcgtccgcccacgcgtccggttggttcatgtgtggaagttctctaagaacaacagaaaatttcaaaatggtttctcagataatctcgtgtttatctcaatcttcgtctcttctatgtttatccgattcaaggaggttaattcttccgaagacttgtacttacggcggtttgagccggttttctccaggatttgctagccgccggttatttacggttaatcggaagaaatggagatcggcctgcattttcaactctggaaaggaacctggaggagagggaaagttacaaggaggtagctcagagtggccgatacttcagagatgggaagttccatggngatggcagacagtttccgtaacttcgtttgcttgtgcactaagggcagtttgttttgacaggattaaccgagatggcagtcataccgtttttaggaatcg

SEQ ID NO: 86924 - DNA, 756 bp, Arabidopsis thaliana columbia
  unsure (1)..(756): unsure at all n locations
caagctccctacgactcactatttggaaagctggcacgcctgcaggtaccggtccggaattcccgggtcgacccacgcgtgcgaaaaatgatgtcatcaatggcactctcttctacttccctctgctcttctttcatctctcaacatccaaaactctccatcactgcttctcctccattgttccatacccaaacaaccaaacccatctctgtaaaacggaaaatcataactctagcagctccagagacactcaccgctgaaacagtcaccggaattgatacttccgacaacactccacaacaaacaataaaggtggtgaagccagatgagaaatcaagagtggtactcaagtttgtgtggatggagaagaacataggattaggattggaccaacatgtacctggacatggcacaatcccacttagtccttacttcttctggcctaggaaagatgcttgggaagagcttaagtctactcttgaagctaaaccatggatctctcagaagaagatgatcattcttctaaaccaagccactgatatcatcaatctctggcaacaaagtggcggcaatttaacttctcaataatctcttttttgatttctgcatttcaagaattcactttgtctatgattattattgctattgagagttttttgtttatctaaaaaaaaccaaaaaagnnnnnnnnnnnnnnnnnnnnnnnnnnnnnnnnnnnnnnnnnnnnnnnnnnnnnnnnnnnnnnnnnnnnnnnnn

SEQ ID NO: 86925 - DNA, 964 bp, Arabidopsis thaliana columbia
  unsure (1)..(964): unsure at all n locations
atgattctccagctctctacgactcactatatggaaagctggtcacgcctgcaggtaccggtccggaattcccgggtcgacccacgcgtccgcggacgcgtgggcggacgcgtgggatttcacggaaaatagaagcgtcgagttcctcctctccctcaggttgtcaatggccgctaggttacttgctttgagacgcgctttgtctcttttcagcaaccaacaacatcgttttcctttgtctcaagtctcaacagagcagttgtcgctatcaaactcactcttcagcagaagtcatgtttatggaagattatttcagagacagttatctgtaatccgtgaggcaaatgaagcttctgtaaccaatgtctgcaactcgtcaaactctgctactgaatcggccaaagttccctcccctgcgacgccctctgaggaaatgatggtgaagtacaagtcccagttaaaaataaacccgaggcatgacttcatgatggtcttcacttgcaaggtctgtgatacaagatctatgaagatggcgagccgagaatcatatgaaaacggcgttgtggtggtacgatgtggagggtgtgataatctacatttgattgcagaccgtcgtggttggtttggagaaccaggaagcgtggaggacttccttgcttctcaaggggaagaattcaagaaaggatccatggattctcttaacctaactcctgaagatttagctggaggaaagatttctactgaataaggagtgatcttctttgcttttgctacttaaccattatggaacagaacttcaccttatgttccagtattataattgtttcttgtagttcactgtttggtaacatttaaatgcagaagatgtttaatacaaaaaaaaaaaaaaaaggannnnnnnnnnnnnnnnnnnnnnnnnnnnnnnnnnnnnnnnnnnnnnnnnnnnnnnnnnnnnnnnnnnnnn

SEQ ID NO: 86926 - DNA, 504 bp, Arabidopsis thaliana columbia
cgggctcgacccgacgcgtccggggactcttctctctaaattcctcagtctcgagaatcttcatcgtcttcacgagctcactcgaagatgttaacggcagatataccaccgaatcaatcaatctacatccaaaacctcaacgaaaggatcaagaaagaggaattgaagagatctctttactgtttgttctctcagtttgggaggatacttgatgtggttgctttgaagactccgaagctccgaggacaagcttgggttacttttagtgaagtcactgctgctggtcatgctgttcgtcagatgcaaaattttcccttctatgataaaccaatgcgcttacaatatgcaaaagcaaagtcagattgtctagctaaagctgagggaactttcgttccaaaagataagaagaggaagcaagaagaaaaagttgaaagaaagcgtgaagattcccaacgaccaaacacggctaatggcccaagtgctaatggtccaagtgccaataac

SEQ ID NO: 86927 - DNA, 699 bp, Arabidopsis thaliana columbia
  unsure (1)..(699): unsure at all n locations
gagagagactttagtttctttcccagttgagaaatctcgccgccgtttgaagaaagaagaagagatgggagttttctcattcgtgtgcaaaagcaaaggcggagaatggaccgcaaagcaacacgaaggagatcttgaagcttcagcttcttccacctacgatctccagcgcaagcttgttcagactgctctctccgccgattcatctggcggcgttcagtcttctttctctcttgtctctcctacctccgccgtcttcgtggtggtcattggtggtggtggtggtggaggatttgctgccggaggaggtgcagctgctggaggtggtggtggtggtgaggctgccgcagccacaaaggaggaagagaagaagaaggaagaatctgaagaggaagagggagactttggatttgatctctttggttaagagacctaaaacaactttgttagtgttctgaggtttttctatctcaattttctttttgttttctgatattttcgagactataatgtaatgtcagaaatatatgtttgtttctggtttcagcttttcttctgcaaaaacttatagtttaaatccataattttttgtcatttttggtcaatttgttaaattntgantncnnatataatcatcttattctcttaaaaaaaaaaaaaaaaaaactngagactngttctctctctctcctcgtgccg

SEQ ID NO: 86928 - DNA, 502 bp, Arabidopsis thaliana columbia
acgcgtccggaggattgttgggttatgtgattcagggttaaaagatgataagcctgtgttggagcttgtgcgtagagtaacatggggtttgttttgtgctgtttatgtggggatcatgttgtttgccttgttggtttctgcgtttatgattagtggttttgtgattacctatttggctcatgaaccacttgttatcaaagagagcttgaattttgattacaccaagagtagtcctgaagcttatgtgcccataagttcatgtgctggtgttgcctttggtttgagtggcaaggagagtattgaaactgggaaggtcaaagggttgaaagacaggacagagataactgtgtcaatgacattgcctgagtccgagtacaatagaaatctcgggatgtttcaggttcgggtggacttcttatccgcgagtggtcatgtgcttcctagttcaaggcggccctgtatggtaaaattttgtagcgggcctaacggctttccaaccttc

SEQ ID NO: 86929 - DNA, 1061 bp, Arabidopsis thaliana columbia
cccacgcgtcatgaaatctctgtagtttttttttgttcctttcttaaatttcgaaagaaagacatttattaaaccaaaataactctttagatcattgcaaggaaaaatgttgaaaagtgcaagtccaatggcattctacgatatcggagagcagcaatactctactttcgggtacattttaagcaaacctgggaacgcaggagcttacgagattgacccttcgatcccaaacatcgacgatgcgatctacggctcagatgagttccgtatgtacgcttacaaaatcaaacggtgtcctcgtactcgtagccacgactggacggagtgtccctacgctcaccgtggcgagaaagccacacgccgtgatcctcgccgttacacttactgtgcagtcgcatgcccggctttccgaaatggcgcatgccaccgtggcgactcatgcgaattcgcacatggcgtattcgagtactggctccacccggcgcgttaccgaacacgcgcatgtaacgccgggaacttgtgtcagaggaaagtgtgtttctttgcccacgcgccggagcagctaaggcagtctgaaggaaagcacaggtgcaggtacgcatataggccggtgagggctagaggtggtggaaacggcgatggagtgacgatgagaatggacgacgagggttacgacacgtcacggtctccggtgagaagcgggaaagatgatttagatagtaacgaggagaaggtgttgttgaagtgttggagtcggatgagcattgtggatgatcattatgagccgtccgatttggatttggatttgtcacactttgattggatctcagagttggtcgattaaatttgggaaatcaaagcagagaacaaaagaaacccgataaataaagtggattttgttaaaatccacaagatcaagattcaagatgagagatcttgtcatgtatatggtaaatttaattgtaatgatttattgcaatgtcgcaaaagaagttacttctctttgcatgtaaacagattcttgatcttctataagtctttgtattaaaaaaaaaaaaaaa

SEQ ID NO: 86930 - DNA, 769 bp, Arabidopsis thaliana columbia
tagggaaagctggtacgcctgcaggtaccggtccggaattcccgggtcaacccacgagaagaagaagatcaatgacgttgaagaagcttgacgcgaatccatcaaccttagaatcgagtttacaggaactgaaatcagacgagacaaatcgtagcaagatcaatttcatactcttcctcgccgacaatgatcccaccaccggtcaaagctggtgtccagactgtgttagagctgaacctgtgatttacaagactctagaggaatttccagaggaggtgaatctaattcgtgcttacgccggagaccgaccgacgtggcggactccggcgcatccttggagagttgattctcggtttaagctaaccggagtaccaactcttgttcgttgggatggtgactctgttaaaggacgtcttgaagatcatcaagctcaccttcctcacttgattcttccccttcttgcaccatccacttgatttgatcgatatcgatttctcgggactatcgtgggattgaggatcaaatatcttatatatatttctagttgtgaattgttttccaataaatcctttacaatggtaaaggaaagtttgtttcttcgatgatctttacgatttcgtgctcaatgtagtgttatttctctaataaattacggtgatattagctgaattctagactctggactcgagatttcgacttatatttggttttgaagttatagttgtaataaaactacgagatttgattaaaacctaagagccttgagttg

SEQ ID NO: 86931 - DNA, 424 bp, Arabidopsis thaliana columbia
ctttcttcttcgctctcttcctataaatctctctctgctctgtaagaaaaatatcttacaccaaacacaaacacaaaacacagattccttcttgttcttcttcttcctttgattgctttcgaagatggttggttctaggaagcgttcatcagccaagaacagacttgtttcttcttcaactcgttcttctgggaaggataaggtttctgatgctcgtaaatatggtgaagccttggtgggttcaaggatacgagtttggtggccgatggacagcaaattctataagggtgtggtggattcctatgtctcttccaagaagaaacatcgggttttctatgaagatggtgataaagagaccctggatctgaagaaggagagatgggagttgattgaagaagatgatgctgaatctgaatctgatgag

SEQ ID NO: 86932 - DNA, 603 bp, Arabidopsis thaliana columbia
  unsure (1)..(603): unsure at all n locations
nnnnnnnnnnnnnnnnnnnnnnnnnnnnnnnnnnnnnnnnnnnnnnnnnnnnnnnnnnnnnnnnnnnncccacgcgtccggctttttttcagatttctgataatcagacagacagacacaaacaaacaccggtatcgacgaacggaactaactccgatatccaaaacccactccaagtttcacgaacgaagggcttagtatctgccatggctcctgatgcttctactgctcttgcagcgagggagaaagttcagcaaatcctgaatgcagcttgtaccggaaatctcgaattccttaagaatgttgctaagcagcttgatgaaggaaaagacttgacgaaaactgtggagagtattaaagacgcaaacaaacgtggagcgcttcacttcgctgcgagagaaggacaaactgaaatatgcagatatcttttggaagaactgaaactcaatgctgatgcaaaagatgaaactggtgatactccgcttgttcatgctgcgaggcaaggacagattgaaacggttaagtatcttttagagcaaggagctgatcccaatatagctagtgaactaggagccacagctttgcatcatgcggctgggacag

SEQ ID NO: 86933 - DNA, 518 bp, Arabidopsis thaliana columbia
taactcgttatccgctgatttgctcgatgaagaagaagggactgatgcttcaaactctagagacgacgaaaatacaattgaagatgaagagagccctgaagtaacgttttcaggtaagaagaaatcttctaaaaagaagggcggcagtgttttggcctcagtaggtgatgactcagttgcagacgaaactaaaacctctgatactaagaatgtggaggttgtgggcactggaaagagtaagaaaaagaagaagaatcccaagagtggaaggccagtccaggaagaggaagatttggccaaacttcttgcagcgcttggggtaacccctgctaatgggaggactgcttcatttacgcctgtagaagagaaagcagctcagcctgagccagttgcacctgtggagaatgctggtgagaaggaagaagaagaagaggccgctgctggtaataaaaaaaaaaaaaaaaaaaaaagaaagcggccgctctagaggatccaagcttacgtacgcgtgcatgcga

SEQ ID NO: 86934 - DNA, 819 bp, Arabidopsis thaliana columbia
  unsure (1)..(819): unsure at all n locations
nnnnnnnnnnnnnnnnnnnnnnnnnnnnnnnnnnnnnnnnnnnnnnnnnnnnnnnnnnnnnnnnnnnnnnnnnnnnnnnnnnnccacgcgtccgaacatttggagcaaacccgaattattccatagaggaattttacaaggtatctaaactatagatggcaaagacctctaaattcttgtttaatagtttctcatgcaccatgtcatgctgtgtgatttagtgagtaagtgaaatgttgatgcttttccgaacttctgaacatgcctgctttttcttctaagtagaaaccgttcaagatgttcgtttttggcaatcatgatgcaggagcagctccctgaagatctggtgcgtgtcgatttgctcttcaggaaagcacatgaatctggcattattatacaggtaaaactgtttggccaaacgttgctacttgcccctgtctttaaaaaaagtgctggctattttttgttccattagtgttgcttgaaatacgtgggcaattcttctactcagagataccacgacatgatcttttgttgtagacactcccctttcagtcgtgcattgtttcaggattttctgcggaaagtcacttgtcataaaatcttcccttgtgtaatccattatttatatagaaatcaaattcaatcaacctcttcgtttttgcagtgcagatcagttagtatccatgagatttcttgtttgctattgtcggggaactatattgncattgcgttagtcgaccagaacaagctaagcangtcttggttggaggaagtgcttgtctctggtcttcactcccagcattcttgttacactgg

SEQ ID NO: 86935 - DNA, 834 bp, Arabidopsis thaliana columbia
ctggacacctcagtcactttatcaaaggtccttcctctcgcattatcatggcattgtcttttttggaccacgattatcttgattttcatactcacgtattgcttcattcatgctaaattatcttctctattactatctcctcgcttttccaggcttggttttagctaaatctcaatttactcgtgctttgtttgtccatgtaaatctgcgtctcaattctttaccatttatttgttcatgttttgtttttctttgtcctagttcattgagatgcttgaagatcacccgaagcttctattgtcaaaagcaagtgttaaacagggggaaaacactctctacatgcaaggcacctccggttctagaagagtttcacagaccaaagctaagcaagccgctttatgacctcatgggaagagtccagaaggacactatccacgtgtttggacaaagagccctcaagaacaatgagaaagagtcgtgcacaacgaaggtaagagttgtattcaaaggagccgatggtgttgcagacatggatacagccattggagcatgaaaaccgacagagaaaccctttgattgcagcttttagatccattgagataattgggcagcttgactagtccaggttttattttttggaccctttttggttggaagtcggttaataactgtggctgcaaaattttactgcctggggaaccaaaaattgcttccaacaattaagttcggccccggaattcttcaagcccggggattccctaagtttaaaacggcccccccccccggtgaaggttccggcttttgtccccttagtgagggttatttcgagctgaa

SEQ ID NO: 86936 - DNA, 1887 bp, Arabidopsis thaliana columbia
  unsure (1)..(1887): unsure at all n locations
nnnnnnnnnnnnnnnnnnnnnnnnnnnnnnnnnnnnnnnnnnnnnnnnnnnnnnnnnnnnngtcgacccacgcgtccgatcggctttgcgtcttttgagctctctccgccgtgatcaatctccgtgaatcgccgccactctctcggtttcaatggctgatctcgatgttcctcctcaagttcctcaaagtaaaactagagaccttgacaagcttcttctccgtcatgggaatctcgttgaccccggcttcgtacccggacccggcctgagggatgacataagggattatgtgagaatcttggtgattggtgcgggtgggttgggttgtgagcttctcaaggatttagctctttctggttttcgtaatctcgaagtgattgatatggaccgtattgaggttactaatctcaatcgccagttcctgttcaggattgaagatgtaggaaagcctaaggcagaggtagcagcaaagcgtgtaatggagagagtgagtggagtagagattgtgccgcatttttcacgtatagaagacaaagagattgagttttataacgattttaatatcattgctcttggtcttgattctatcgaagctcgcaaatacatcaatggggtagcttgtgggtttcttgagtataatgaagatgatactccgaaaagagaaacgatcaagccaatggtagatgggggaactgaaggtttcaagggtcatgctaaagttatcttgcctggagttacaccctgttttgagtgcactatttatcttttcccacctcaagtgaagtttccgttgtgcactcttgcagaaacccctaggaatgcagctcattgcattgaatatgctcatcttattcagtgggaaacggttcatcgtgggaaaacctttgatcctgatgaaccagaacatatgaagtgggtttatgatgaggctatcaggagagctgagctttttggaattccaggtgtcacatactctctcacacaaggtgtggttaaaaacataataccggcgattgcttccaccaatgcgataatatctgcagcttgtgcacttgaaaccttgaagattgtgtctgcatgcagcaaaacacttgtaaattatttgacgtataacggtggagagggtctttacactgaagtgacaaagttcgagagggacaccgaatgtcttgtatgtggtccgggcattctgattgagctggacacctcagtcactttatcaaagttcattgagatgcttgaagatcacccgaagcttctattgtcaaaagcaagtgttaaacagggggaaaacactctctacatgcaggcacctccggttctagaagagtttcacagaccaaagctaagcaagccgctttatgacctcatgggaagagtccagaaggacactatccacgtgtttggacaaagagccctcaagaacaatgagaaagagtcgtgcacaacgaaggtaagagttgtattcaaaggagccgatggtgttgcagacatggatacagccattggagcatgaaaaccgacagagaaaccctttgattgcagcttttagatccattgagataattgggcagcttgactagtccagttcttattttttgtaccttttttgtttgtatgtcgtttaatagctgtgactgcagaattttactgcttggggaacaaaaaatgactccaaacagtgagtttatatgattattcttaatctcggattgttcttaatctcaaagatgtgtcttgagattgttttcttaacagttcatatgatcaggattctacctgcgatttcagataaaaaaaaaaaaaaagnnnnnnnnnnnnnnnnnnnnnnnnnnnnnnnnnnnnnnnnnnnnnnnnnnnnnnnnnnnnnnnnnnnnnnnnnnncaa

SEQ ID NO: 86937 - DNA, 925 bp, Arabidopsis thaliana columbia
  unsure (1)..(925): unsure at all n locations
atgnnnnnnnnnnnnnnnnnnnnnnnnnnnnnnnnnnnnnnnnnnnnnnnnnnnnnnnnnnnnnnnnnnnnnnnnnnnnnnnccacgcgtccgatcagatagagacaaggaacaactatgcaacatcatggactatcaaagactctctatagacgcttgcgctcatgcttcccataacgataggttaccgcttagagttgttctccaagtactcttctttgaacaaatgcatctcagaaccgctcttgcaggtggtctaaatgttgcaaacaccgaaacagctcatgcagtgacgatccctggtggaagaacaggacaggagatagttcagagagatggttgggtgactgttgtgcgccaaaaccaggttttgaaagttgatatgcagaaaatgaggtcaagggttggagaactagaagaggagtttcagagtattaagcaggagatgaagaagagagttagtaagtcctctagctcaatgagctcgcctcgtctggtcaagctcggctgtaagtttcttcttccacgagcttctgatgctaagaatgatacagtccagaactcagtgtccagcactcctagatcagctaccgctgaccatacactccctcgttcctcccgccattccaaacaccgtaaaagcttctctttcttcggataatcttcattcaaaaacatttatcttcctctcttctcttaaagcccaacacagagaaagttctttcctgaggcattccctcgaagaagtttctctcttttcccgggaaaccacaacagaacatgttgctntgatgaacggaaagggcccagaataaactggcctttgaagagagagatctcctgctcgtttcagtattgccgggtttctccaggactacctcaagtgaaaatttcgaaaacggctatcgggggttttggggttttc

SEQ ID NO: 86938 - DNA, 411 bp, Arabidopsis thaliana columbia
cccacgcgtccgcaagctttcttgttggcattaattgcattacttgctacccaattgccttcactaatggctgcaggtttctctttatcgattttcctctgtttcttttctcttttaaagcttcattatttaatcctgttcttgcctaaatcaggataagattatgaatgttggattttgagcttctggattttgcaaattttgttgctttctttgactagatttgagtttcgatggaaattcgcataattttggttcattagttgcttacatgcaaaaatactctctttttaaattgaaatcagatcttgagaaaccatagaaattcaaactttgtttgttcttttcaagctattgtggttagaaagttaaaagcttgaaacttgcggaccaatctttataggttaccag

SEQ ID NO: 86939 - DNA, 501 bp, Arabidopsis thaliana columbia
acgcctgcatgtaccggtccggaattcccggttcgacccacgcgtccgtccacgcgtccggccagtgcagccaggcctaaccctcagggatcttaccactacggaaagatcaacatcacacgcaccatcaagcttgtgaacactcaaggcaaggtcgatggaaagctcaggtacgctttgaacggagtctcgcacactgaccccgaaaccccattgaagcttgcggagtactttggtgttgccgacaaggttttcaagtacgactccatcactgataacccaaccccagaacaaatcaagagcatcaagatcgtgccaaatgttcttaacatcactcaccgcaccttcatcgaggtggtgtttgagaaccacgagaagagtgttcagtcgtggcacttggacgggtactccttctttgccagtcgctgtcgagccagggacttggaccccagagaagagaaaaaacttcaacctgctggacgcagtgagccgtccccccgt

SEQ ID NO: 86940 - DNA, 631 bp, Arabidopsis thaliana columbia
ggttctgtttctggaaatttcacttttttcacttttttgggatcacatttagctttttttggttcctttattttgtaacgccatttatgcgttaaacttgtgtgaagtgtttgtttggtctgagctggagatggtgagaatctcactgcttttgttgtgtttactggtttcaacttgtctcttcacttcttcatcagcacaagctccaggttttgtgagcttggattgtggaggtgcagagccattcactgatgaacttggactcaaatggtcacctgataatcatctcatttatggagaaaccgctaatatatcgtccgttaacgaaacaagaactcagtacacgactttaaggcatttccctgctgattcaagaaagtattgctacactctcaatgtcacgagtaggaatagatatctcattagagctactttcttgtatggtaatttcgacaacagcaacaatgtgtatcccaaattcgatatctccctcggggcgactcattgggcgaccattgttatctctgaaacctatataatcgaaactgcagaactggtgtttctggcttcttctcctactgttagtgtttgtttgtcaaatgccacaactggacagccgtttatatctact

SEQ ID NO: 86941 - DNA, 494 bp, Arabidopsis thaliana columbia
acgcctgcaggtaccggtccggaattcccgggttgacccacgcgtccgattgatattttaggaatggacaagcgcaatgaagttcttgcagcgttatatatggtccggactgatgttagtttgtctgttcgtcaggcggcactacatgtatggaaaaccatcgtagcaaatacaccaaagacgttgaaggaaataatgccaattttgatgagaatgaatctgttcgtgatgcagccctgggggctggccatgtactggtggagcaccatgcaacaacgtctctgcctcttcttcttccagttgtggaggatggtattttcaatgataattggtcttggtgaacttattgaagttactagcgagcaagctttgaaggagttcgtcatacctataacagggcctcttattcgaatcattggagaccggtttccatggcaagtcaaaagtgctatcttggctacattaatcatcctaatacaaaggggtgggatggc

SEQ ID NO: 86942 - DNA, 1016 bp, Arabidopsis thaliana columbia
tctgcggtaccggtccggaattcccgggtcgacccacgcgtccgggcttgatgtttgtatgggaggccgggtagccgaagagttgttttttggggaaagtgaagtaacttcgggtgcatcttctgatcttgagcaggcaaccaaactcgcgagagcaatggtcacgaaattcggtatgagcaaagaggtgggtcttgtggcacataactacgacgacaatgggaaaagcatgagcaccgagacaaggcttctcattgagagtgaagtgaaacaacttctggaaaaggcttataacaatgcaaaaacaatcctcacggtttacaacaaagagcttcatgcccttgcaaatgctttgcttcagcacgaaactctgtccggtaagcagattaaagaattgcttaccgatctcaactctccactgctgcaaaagcgtcaagaagtggttacaaagcaaagcaacccggttcctccatcaacccctagctcagcatcatcagcagccgcagcagctgccgcagctgcagccgccgccgccgcagcagctgcaacagccgcaaccaaaggtaaagacatggcgccagtatcgtaaaaataaaggagctagcgtttggtagagaaggcgttttcatgtatttgtgtatgttggggtaattgaattgggaataactctttattttgagagtttttagaatcagtgagaggctggtgagggttaagagcattaagcttaggacaatgagattaacatctcaggtttttctctatctctatctcgtacacacggaatctcgctgcgaaatggtatgtgttcactttttctctaaatgttttcggaatctcgtgggatgttatttagaagtttggctcgtacagtttcaggttacactaaattctaaagcctgcttgtaagactcaatgcaataaattttatagtctctagaaaaaaaaaaagggcggccgctctagaggatccaagcttacgtacgcgtgcaggcgacgtcaagatcttctatagt

SEQ ID NO: 86943 - DNA, 465 bp, Arabidopsis thaliana columbia
  unsure (1)..(465): unsure at all n locations
cacacgcgtccgatttttggaacgaaatagattggccatcgagagaggagcttcattgacaaagagtcctatagccggaagtgaagaaatttccggtgcgtataatgctaaaggccgtccagatcttgggttggtcatcagggttaaccatctcacagagattgaccaagactcgcaagtcctctaccgtctctttcatctcgtcatctctcaatctctcctctgtcacttcgagctctcctcggagaatcttctctttcaagccaaccagaatgtcttcctcacttcccgggtctgacccagttgcaaattccccgactttcgtctctgttcaatcagctggagatgttcgtaagataaagttctgtcaatggtgtgggagggcccacccaagcatggaataccctgncggntgaggggaaatttnangggctttttnncccaaatttggggaaaatcngtttt

SEQ ID NO: 86944 - DNA, 534 bp, Arabidopsis thaliana columbia
ttcttcttcttcttcttaatctcagattcttgtctgaaaactttctctttcattttctctcaatttaacactttcaagatgccgatcaacaaagacccatcaacacctcctcctgttatcggaaaaatcggtccttacactgtctttatgactcctcctgcgactcctaaaccacctgaatctccctccgctgtgtctcagaagcctgtgatggcaccaccggttcttcctccgccgcagcagtttaaatcggtggcttcttctgaccaggacggctcagttttggggttctttaaaaacgccgtcacaaaggttcaaaatgcacattcaagtgtggatgatcatttggtgaggtggtttgggttaaaccaatctaagtatcagtgggctttggatgagtactacgaaagcaaagaatcagatatgaagaccgtgaaagcaaaggagatgccggggaaagtacagagtgtataagcaaccatgtataaactcatttcccctttggccaattctaaaatctgtttttctgagaga

SEQ ID NO: 86945 - DNA, 1108 bp, Arabidopsis thaliana columbia
  unsure (1)..(1108): unsure at all n locations
nnnnnnnnnnnnnnnnnnnnnnnnnnnnnnnnnnnnnnnnnnnnnnnngctcacaccaatcggtccgttcccatactccacgcgtccggcttctgagagatatttaagtttagcaaaaaaatcctaagcttctacaatggcgaatcttcccaccgttctcgtcaccggcgctagtggcagaacaggccagattgtgtataagaagctgaaggaggggtcagacaagtttgtagcaaagggtttagttagaagtgctcaaggaaaagagaaaattggaggagaagctgatgttttcattggggatataacagatgctgatagcattaaccctgcgtttcaaggaatcgatgcgcttgtgattctcactagtgctgtgcctaaaatgaaacctggttttgatcccactaaaggtggaagacctgagttcattttcgaagatggacagtatcctgaacaagttgattggattggacagaagaatcaaattgatgcagccaaggttgctggtgttaagcatattgtcgtggtcgggtcaatgggtggtaccaatccggatcatcctttgaacaaactgggaaatgggaatatactggtttggaagagaaaggctgaacagtaccttgctgattctggaactccttacacaattatcagagctggaggacttctagataaggaaggcggtgtacgagagctgctagttggtaaagacgatgagctacttcagacagacacgaaaaccgtccccagggctgatgttgcagaagtctgcattcaggcattgctgttcgaggaggccaagaacaaagctttcgatctcggctcaaagccagagggaaccagtaccccaaccaaagacttcaaggctctcttctctcaagtcacctctcgtttttaaatcattatctttgttgccaataagaacatttgggatcaaaccttctaaaataaattctgtagtgtctatttgaaaggatacgttctttcaattcaatgagaatattggggttgaatgttaaaaaaaaaaaaaaaaaaagnnnnnnnnnnnnnnnnnnnnnnnnnnnnnnnnnnnnnnnnnnnnnnnnnnnnnnnnnnnnnnnnnncacgt

SEQ ID NO: 86946 - DNA, 520 bp, Arabidopsis thaliana columbia
cacacgcgtccgtctctatcgacggtagcattaggaaactttgattacgaaagctacaccaattttacaaaattgccatcctcccagtggggtgatcagttcctcaagttttccattgctgactcggattttgatgtccttgaaagagagattgaagtactaaagcctaaagtaagagagaacatattcgtgtcgtcttccacagacaaagacgcgatgaaaaagacaattctttctattcattttctggacagtcttggtctctcttatcattttgagaaggaaatcgaagagagcctaaaacatgctttcgagaagatagaagatttgatcgctgatgaaaataaattgcacacaatctccaccatcttccgagttttcaggacatacggttactacatgtcttcggatgttttcaagatattcaaaggagacgatggtaaattcaaggaaagtttaatagaagatgtcaagggtatgctaagcttctacgaagcagtgcactttgggacaacgacag

SEQ ID NO: 86947 - DNA, 885 bp, Arabidopsis thaliana columbia
  unsure (1)..(885): unsure at all n locations
gccacnnnnnggttgataggcgctgccatatgtgttttggttgacctcctaagcttctcgagtcagaaaaggcaccacgcgtccgaaaggatcttgcaccatacgtgcagaataagtgttatgacagtgtctcagcacttcttgcagatgtagataaagaacttgaatttctatgtgctgccgtgaagaaagagaacaaggacagtgaagcaattccacctgctataataattgagaaatcactttttatgggacgccttttgtttgcattgctgaaccactcaaaacatgttcccttaattctcggttctccaagattgtggtgtagagaaactatgactgcagtttctgataagttgtcatccttgttgaggcagccaagatttagctcgaatactccagccactgctgacagccctggaaagcaattgcataccgatcttagaaagcagacttcattagctgttgctgcactactgggagcggaagagaaaacaagtccaaaatttgaagagcttaatagaactatgcgagatctgtgcatcaaggctcatacattgtggataaagtggttatctgatgagctttcagctattctcttgcgtgatcttaggagtgatgatggattgtctgctacaactcctttaaggggatgggaagagaccatagtgaagcaagagcaggacgagagtcaatctgagttgaagatatcacttccatcgttgccttcactctatatgatttcatttctctggccggcatcagaggaaattcatcgaattggaggtcacgtactggataggtctattttgcaaaatttgcttcagcctggtggagagatcacattattatgaggattctatctgcagggagccgcgacccaat

SEQ ID NO: 86948 - DNA, 425 bp, Arabidopsis thaliana columbia
ctctcgctttgctttctcgcggcaatggcggcggcgacgggaaatgacgacaacggctgcttcgataaaccagaatctgaaccggcaccggttaacgtttcgcctcccctgtcgaagaatgctcagaagaagcagctgaagcagcaaagatacgaagcgaagaaagctgagaagaaggcacaggagaaggagcataagagaaaagaaggagagagaaagcttaaggaatgggaagaaaccctagcgaacgcgacggaggaagagaggctgaagcttattgagtcgaggaagagtctgcggaaggagagaatggagaagagatcggaggagaaggagaagaagatagagaggctgaatcaagctaaagaaataggtcaaaagatcgtagtagatgttgattttgctcatctcatgtctgagtctga

SEQ ID NO: 86949 - DNA, 460 bp, Arabidopsis thaliana columbia
atcaaaactttgtctcatcgcatctttttccccaaattctcacaaaccttctcttctcaattccaccaaaccctcagattctcaatctccgatcgtcggaaattctcagcgatggccggagctggcgtcgatgatttcgttaaaggaaatgtttttccgaatggtgtcgctctcatcactctcgatcgaaccaaagctctcaacgccatgaatttagatatggatataaagtataaaagctttcttgatgaatgggaatctgatccgagagtgaaatgtgttatcgttgaaggaagcacatctagggccttttgtgcagggatggatattaaaggagttgctgcagaaatccaaaaggacaaaaacacacctcttgtgcaaaaggtatttacagcagagtatacactgatatgtgcaattgctgcgtacaaaaagccatatatttcattgatggtataac

SEQ ID NO: 86950 - DNA, 847 bp, Arabidopsis thaliana columbia
  unsure (1)..(847): unsure at all n locations
nnnnnnnnnnnnnnnnnnnnnnnnnnnnnnnnnnnnnnnnnnnnnnnnnnnnnnnnnnnnnnnnnnnnnnnnnnnnnnccacgcgtccgcaagaaagcaaatttttttgtaacgatgcctatcaacagaattgcgattggaacgccgggggaagctagtcgtcccgatgcgattagagcagctttcgcggagtttttctcgatggttatattcgttttcgcgggtcaaggctctggaatggcttatggaaaactaactggagatggtccagccacacctgccggtcttgtggccgcgtctttgtctcatgcgtttgcgttgttcgttgcggtttccgttggagctaacgtttcaggtggtcatgtgaacccggcggttacttttggggcttttattggtggaaacataacgttgttgagagctattctttattggatcgctcaattactcggagcagtcgtagcttgcttgttgctcaaggtaagcactggcgggatggaaacggctgcgttttcgctatcatatggagtgacgccctggaacgcagtcgttttcgagattgtgatgacgtttgggttagtttacacggtttacgctactgccgtggatccccagaaaggtgatattggaatcattgcgcctttggcgattgggttaatcgttggagctaacattctggttggtggtgctttcgacggtgcatcgatgatacccgcggtttcattttggcccggccgtggttagctggatttggacgaatcattgggtctattgggttggtccttttatcggtgcagcctttgcagctattggttatgattctatctttatcgggaggaatggacat

SEQ ID NO: 86951 - DNA, 529 bp, Arabidopsis thaliana columbia
cactcaccaaactgatcctcgaagacttcttgatcttgaagggcccttgcccaaactgtggaacagagaatgtatctttctttggaacgatactatccatccccaaatgatagtaacaccaacaatgtcaaatgctcaggctgtggaacggagatggtctatgactcaggttctcgtttgatcacattaccagaaggagggaaagcttaaatctaagagccaagggttatgtagaagtgtatgtaaaattaatactaacaaatgaagaaggtggagaaattgaagaagaaggagaaaaaccaaagtttgtatgctgttttgtataatcttcagatcttttcatgtagctctcattggcttgtgttgtgtttgtaagtaagtgtgaggcacattcaaagaaaaacatcatatgattacttctttgagaaactttgctctcattaggaaagtaaaataattcaagaaataagcacaaccttgtgtagttttgaaataatacttgtattttttttgttgttataaaaaacaa

SEQ ID NO: 86952 - DNA, 1126 bp, Arabidopsis thaliana columbia
  unsure (1)..(1126): unsure at all n locations
atgcnnnnnnnnnnnnnnnnnnnnnnnnnnnnnnnnnnnnnnnnnnnnnnnnnnnnnnnnnnnnnnnnnnnnnnnnnnnnnnccacgcgtccgcccgcctccactctatcctaccgccgacgtccgtgatcgccgaaatgactgaagcagagtccaagactgttgttcctgagtcagtgttgaagaagagaaagagggaggaagaatgggcacttgccaagaaacaggagcttgaggctgccaaaaagcagaatgctgagaagaggaaactcatatttaaccgggctaaacagtactccaaggagtaccaggagaaagaaagggaattaatccagctgaagcgtgaggcaaaattgaaaggaggcttttatgttgacccagaagctaaactgcttttcattatccgtatccgtggtatcaatgccattgacccaaagacaaagaagattttgcaacttttgcgtttaagacagattttcaatggtgtgttcttgaaggtcaacaaggcaaccattaacatgcttcgccgtgttgaaccctatgtaacctatggatacccgaacttaaaaagtgtgaaggaattgatttacaaacgaggttttggaaagcttaaccaccagaggactgccttaacagacaattctattgtagatcaggggctaggaaagcatggcatcatctgcgttgaggatctgatccatgagatcatgacggttgggccacatttcaaggaagccaataactttttgtggccattccagttgaaggctccattgggagggatgaagaagaagaggaaccattacgtggaaggaggagatgctggaaaccgcgagaacttcatcaacgagctcgttaggagaatgaactgaagcgtaagcgttattgctctgaaactccctaggaaacgttttgctataggtggaaaacttctgttcgcttgcttgtgttgccattgaggcgaagtaaacatttacggtgaaagactttgatattttataagtttgaaattgtaagaacacatcatttatttcaaaaaaaaaaaaaaaagnnnnnnnnnnnnnnnnnnnnnnnnnnnnnnnnnnnnnnnnnnnnnnnnnnnnnnnnnnnnnnnnnncagctcaat

SEQ ID NO: 86953 - DNA, 1570 bp, Arabidopsis thaliana columbia
acgactcactatttggaaagctggtcacgcctgcaggtaccggtccggaattcccgggtcgacccacgcgtccgctctctcacaaaaataaaatggagggaagcccagtgaccagtgtcaggctctcttcggtggtgcctgcttctgtggtaggtgagaacaagccacgacagctcacacccatggacttagccatgaagctccactacgtccgagccgtctacttcttcaagggtgcacgtgacttcactgtcgccgacgtgaagaacaccatgtttactctacagtctctactccaatcttatcaccacgtctcaggtcggatccggatgtccgacaacgacaacgacacttcagctgcagccataccttacattcgctgcaacgacagtggcatacgcgtggtcgaggccaacgtcgaagagttcacagtggagaagtggctcgagttggacgaccgttccattgaccaccgattccttgtctacgatcacgttcttggtcctgatcttaccttctcgccactcgttttcctccagataactcagtttaaatgtggtgggctctgtattgggttgagttgggcccatattcttggagacgtgttttcagcatcaacgttcatgaaaacacttggacagctggtatcgggtcatgccccaacaaaaccggtttacccgaaaacccccgaactaacctctcatgctcgtaatgatggtgaagctatttccattgaaaagatagattcggttggcgagtattggttacttaccaataaatgcaagatggggagacacatttttaattttagcctcaaccacattgatagcttgatggccaagtacaccacgcgagaccaacctttctcggaggttgatattttgtatgcattgatatggaagtcgctactgaatatccgcggcgaaacaaacacgaatgttataacaatttgtgaccgtaaaaagtcttcaacctgttggaacgaggacttggtaataagcgtagtggaaaagaatgacgaaatggttgggatatccgaactagctgcactgattgctggtgaaaaaagagaagaaaacggtgcgatcaagaggatgatagaacaagataaaggctcttcggattttttcacgtacggtgcaaatttaacgtttgtgaatcttgatgaaatagatatgtatgaacttgagatcaacggagggaagccggatttcgtaaactacacgattcatggggtcggagacaaaggtgttgttttggtttttcccaagcaaaactttgcaaggattgtaagtgtagtgatgcctgaagaagaccttgcaaaactcaaggaggaggtgactaatatgattatataactttgtatcttcttcttgttgttatacataaatgctgttttttactctttgtaatttcattatcgaattgttgggaagcctatcaataaattgtttgaactgtttttaaaaaaaaaaaaaaaaaaaaaaaaaaaaaaaaaaaaaaaaaaaaaagggcggccgctctagaggatccaagcttacgtacgcgtgcatgcgacgtcatagctctt

SEQ ID NO: 86954 - DNA, 2477 bp, Arabidopsis thaliana columbia
  unsure (1)..(2477): unsure at all n locations
nnnnnnnnnnnnnnnnnnnnnnnnnnnnnnnnnnnnnnnnnnnnnnnnnnnnnnnnnnnnnnnnnnnnnnnnnnnnnnnnnnnccacgcgtccgtctctctctatctatcttcttcatctttgtttcagcttctcctttgaaactagattatctccgttaatggcgcctcagatctaaccttgggagttatatatatatacttgttcaactcttcttcgaacgctgtccaacttcttcctctggttcgatcatcgagatctcgaggttatttggccgcaatgcagaagcgaatagccttgtcgtttccagaagaggtactagagcatgtgttctcgtttattcagctggataaggataggaactcagtctctctggtgtgcaagtcatggtacgagatcgagcggtggtgcaggaggaaagtcttcatcgggaactgctacgccgtgagtccagcgacggtgattaggaggttcccgaaagtgagatccgtggagcttaaaggaaaacctcactttgctgactttaatttggtacctgacggatggggaggttacgtgtatccatggattgaggccatgtcttcgtcttacacgtggcttgaagagataaggctgaagaggatggtggtcaccgacgattgcttggagctcatagccaagtcttttaagaattttaaggttcttgtgctttcttcctgcgaaggcttctccaccgatggtctcgctgctatcgctgccacttgcaggaatctgaaagagcttgacttacgagagagtgatgttgacgacgttagtggccactggcttagccatttcccagatacatacacttctttggtatcactcaatatatcttgcttagcatctgaggtcagtttctctgctctggaaaggctggtgactaggtgtcccaatctcaagtctctcaagcttaaccgagctgttccacttgaaaaattggctactttacttcaaagagcacctcaattggaggaattgggcactggtgggtacactgcagaagtgcgaccagatgtttactctggtttatctgtagcgctctctgggtgcaaggaattgaggtgcttatctggattttgggatgctgttcctgcctatcttccagcagtttattcggtttgcagtcggcttacaactttgaatctgagttatgcaacagtccagagctatgatcttgtcaagcttctttgtcaatgccctaaactgcagcgcctctgggtgcttgactacatcgaggatgctggtcttgaggtgcttgcttcaacctgcaaggacctacgcgagctgagagtgtttccgtccgagccttttgtcatggaaccaaatgtggcattgacggaacaggggcttgtctccgtctccatgggctgtccaaaactcgagtcggttctctacttctgccgtcaaatgaccaatgctgcattgataaccattgctaggaaccgtcccaacatgactcgcttccgtttgtgcatcattgagccaaaagccccagactatctgactctagagccactggatattggatttggagccatagtagagcactgcaaggatctccgtcgcctctctctatctggcctcttgaccgacaaggtttttgaatacattgggacatatgccaagaagatggaaatgctctcagtggcatttgcaggagacagtgacttaggcatgcatcatgttttgtccgggtgcgatagcttgaggaaactagagataagggactgcccgtttggagacaaggcgcttttggccaatgcttcaaagctggagacaatgcgatccctttggatgtcttcttgttccgtgagttttggagcctgcaagttactaggacagaagatgccaaagctgaatgtggaagtcatcgatgaacggggtgcaccggactcgagaccagagagctgccctgttgagagagtcttcatataccgaacagtggctggtcctcgatttgacatgcctggcttcgtctggaacatggaccaagactcaacaatgaggttttccaggcaaatcattactactaacggattataagacaaagaaacgaggtacatttttcattaatccttgttcatcatcccatataatcgtgttccggtttaggaacatgagagagctcggtcgccaataatttgaatctcggctgcttcatataaccatcaagctcatgagcaatgaataagtggagagagagaaagagagatctaagagagctttgttttatttatgtaagaattattgattgttgtatgtttatttggctacttacactgagagatcctggtggggtatttttcttaagaggataagagatttttttaaaagacaatgtcaaaaatgtaactgttcgacgtgttaaaaaaaaaaaaaaagggcggccgctctagaggatccaagcttacgtacgcgtgcaggcgacgtcaangatctctatagtgtgcacccaa

SEQ ID NO: 86955 - DNA, 1160 bp, Arabidopsis thaliana columbia
gttattttgacgtaaatcgaatatgctccctatatgtttctcagtctctttctccgattgatacatctctcgttactctcgaaataaagctcatcatctgaggaaattcatcaatttgccggtgactttagttcaattccgaccctccgatgggctcgacgttcagagatcggacggtggagcttcattcactgtcccaaacattgaagaagatcggggcaatcccgtccgttcatcaagatgaagatgatccggcatcatccaaacggtcgtctccgggatccgaattcaataagaaggcttcccggatcgggttaggtattaaggaaacgtcacagaagatcacgaggctcgctaaattggcaaaacaatcgacgattttcaatgaccggactgtggaaatacaggagttaactgtgttgatcaggaacgatatcacggggctgaatatggctctctcggatttgcaaacccttcagaacatggagcttgctgatgggaactattcacaggaccaagttggtcattacactgctgtttgtgatgacttgaaagccagacttatgggagctactaagcagcttcaagatgttctaactacgagatcagagaacatgaaggctcatgaaaaccggaaacaactcttttccacaaaaaatgcagtagatagtccgcctcagaataatgcaaaatctgtacctgagcctcctccttggtcaagttcatcaaatcctttcgggaatttacaacaaccactattacctccattaaatactggagctccgccaggtagccagctcagacgcagatccgcgatcgagaatgctccttcacagcaaatggagatgtccttgttgcagcaaacagtcccaaagcaggagaactatagccaaagtcgagcggttgcacttcacagtgttgaatcaagaataacagagctcagtggaatattcccgcagctagctacaatggtcacacaacaaggagagctagcaatcagaatcgatgacaatatggatgaatcgttagttaatgtagagggagcacgtagcgctcttctgcagcatctcactcgaatttcgtcaaatagatggctcatgatgaagatctttgctgttatcatcttgttcctgattgttttcctcttctttgtggcttaa

SEQ ID NO: 86956 - DNA, 328 bp, Arabidopsis thaliana columbia
cgccaacagcatcacaatcaatcacttgcttttctcaccaaaacggcaatctccccaaagcagggcatgcattggttataactcacaatggagcaagcggagactatccaggctgcactgatctggcttaccagaaagcaatcgacgatggagcagacataattgactgctctgttcagatgtccaaagacggaatcgctttctgccatgatgctgcagacctctcagcaagtaccaccgccaggactactttcatgtcccgagccaccagcgttcctgagatccagcctaccaacggaatcttctcttttgatcttacatgggccga

SEQ ID NO: 86957 - DNA, 497 bp, Arabidopsis thaliana columbia
acgcctgcaggtaccggtccggaattcccggtgtcgacccacgcgtccaggcttaaaaaccaatggcgctagttgtgatttgtgggcaaccttgtagtggtaagtcaatagctgcagtaactttagctgaaacattgaaagagtctgaaacgaaacagagtgttaggatcatcgatgaggcttcgtttcatctcctccgcaaccaaaactatgctaacatgcctgctgagaagaatctgagaggaaagcttaggtcagatgttgatagatcagtttcgacaggcgagattgttattgtagattccttgaatagtatcaaaggttacagatatgagctatggtgtatcgctcgggctgctgggattaggtattggggtgtttattgggatgtaaatgaaacttatttgctagcaatggaataagggaccggagtgatagaggggaagatggatttgacgatggtttattcgaacatctggttaaagatttgagaaacc

SEQ ID NO: 86958 - DNA, 1311 bp, Arabidopsis thaliana columbia
  unsure (1)..(1311): unsure at all n locations
atgatatctnnnnnnnnnnnnnnnnnnnnnnnnnnnnnnnnnnnnnnnnnnnnnnnnnnnnnnnnnnnnnnnnnnnnnnnnnnccacgcgtccgtctcgctcgcataaaaggttaacctcaaaacaagtagctcctccttccattaggatggcggcaggactctcaaccgccgttacattcaaaccactccaccgctctttctcctcctcctctaccgatttccgactccgcctcccgaaatccttatccggattctctccgtctcttcgatttaaacgcttttctgtctgttacgtcgtcgaagaacggagacagaattctccgattgagaacgatgagagaccggagagcacgagctccacaaacgctatagacgctgagtatctggcgttgcgtttggcggagaaattggagaggaagaaatcggagaggtccacttatctaatcgctgctatgttgtcgagctttggtatcacttctatggctgttatggctgtttactacagattctcttggcaaatggagggaggtgagatctcaatgttggaaatgtttggtacatttgctctctctgttggtgctgctgttggtatggaattctgggcaagatgggctcatagagctctgtggcacgcttctcctatggaatatgcatgagtcacatcacaaaccaagagaaggaccgtttgagctaaacgatgtttttgctatagtgaacgctggtccagcgattgggctcctctcttatggattcttcaataaaggactcgttcctggtctctgctttggcgccgggttaggcataacggtgtttggaatcgcctacatgtttgtccacgatggtctcgtgcacaagcgtttccctgtaggtcccatcgccgacgtcccttacctccgaaaggtcgccgccgctcaccagctacatcacacagacaagttcaatggtgtaccatatggactgtttcttggacccaaggaattggaagaagttggaggaaatgaagagttagataaggagattagtcggagaatcaaatcatacaaaaaggcctcgggctccgggtcgagttcgagttcttgactttaaacaagttttaaatcccaaattctttttttgtcttctgtcattatgatcatcttaagacggtctatgttgataaatcctatatgccgattttgattttaatgaatatctccaaaaatataaatacctctctttcttgcaaaaaaaaaaaaaaagnnnnnnnnnnnnnnnnnnnnnnnnnnnnnnnnnnnnnnnnnnnnnnnnnnnnnnnnnnnnnnnnnnnacc

SEQ ID NO: 86959 - DNA, 778 bp, Arabidopsis thaliana columbia
  unsure (1)..(778): unsure at all n locations
gctgcttcaagttggagagaccctcatggttgatggatgaatggcaggcatgcacgaggatggtaatgcccagtctagcacccaagaaaacagcaagtttccaggttatggttttaattactcttcatacaaagaggaatgctggaatacattccgagttaatccaagacccaaatgggtcacaacagagttcggtggacatgatatagcgaccaccttgaagtcatttggaagtaacatcattttctcaaatggtctgttagatccttggagtggtggcaggtaagaatattgttccctttactcaaatcccaagagctattttacaaatcgaatctcgtaatcgtgacaaatgcttgagtttgactcgtaatatgcagtgttctcaagaacttatctgataccattgttgctctcgtcacaaaagaaggtgcacatcacttggatctacgaccttcaacaccagaagacccgaaatggcttgtggaccagcgggaagccgagatacggttgattcaaggatggatcgaaacttatcgagtagaaaaagaagctaaggtttctctgttaaaacgttcttggtaagagagcaatgaaaagaatcgtctcagtgtgtaactcggaatctgcaaactttgtattgcgaacacatgctttgaataaatccatgtaactatgtaaactctcaaaaaaaaaaaaaaaaaaaaaagnnnnnnnnnnnnnnnnnnnnnnnnnnnnnnnnnnnnnnnnnnnnnnnnnnnnnnnnnnnnnnnnnnca

SEQ ID NO: 86960 - DNA, 730 bp, Arabidopsis thaliana columbia
  unsure (1)..(730): unsure at all n locations
atttggcggnnaatttcccggggaccctttccnttttcccaatnttaccccccctttgggaacttttccccntnaggtcccggccgggatcccgggntnccccccngtccccancnttttcccgggtttgggtttnaattcccccncatacaaagggggattctggaatccnttccggnttaacccaagccccnaatggntcccaacagagttccggggaccatggtatagcgacccccttgaagtcatttggaagtaacatcattttctcaaatggtctgttagatccttggagtggtggcagtgttctcaagaacttatctgataccattgttgctctcgtcacaaaagaaggtgcacatcacttggatctacgaccttcaacaccagaagacccgaaatggcttgtggaccagcgggaagccgagatacggttgattcaaggatggatcgaaacttatcgagtagaaaaagaagctaaggtttctctgttaaaacgttcttggtaagagaccaatgaaaagaatcgtctcagtgtgtaactcggaatctgcaaactttgtattgcgaacacatgctttgaataaatccatgtacctaggtaacctcccaatgatccctaatcttttctactaaaaaaaaaaaaaaaaaaaagggcgcccgctctagaggatccaagcttacgtacgcgtgcatgcgacgtcataatctttctatagtgtcacnnnnn

SEQ ID NO: 86961 - DNA, 1116 bp, Arabidopsis thaliana columbia
  unsure (1)..(1116): unsure at all n locations
nnnnnnnnnnnnnnnnnnnnnnnnnnnnnnnnnnnnnnnnnnnnnnnnnnnnnnnnnnnnnnnnnnnnnnnnnnnnnnccacgcgtccgctggactctgcctatagttatttggcaatggtggattatccgtatcctgctgacttcatgatgcctttgcctggacatcccattagagaggtatatttgggaagtaacactttatgagtttatacgaatattgtagaagaaatctgagaatgcattcgctagatcatttggattttcatctttacatcaacgatccggggaggctatgctttaaagatttgcttgttgcgtcaggctattgttcaaccacgtccgttaaagtctttgttcaatgtggtgtatctttctataggtctgcagaaaaattgacggtgctggtagtaatgctagcatcctagatcgcatatatgcagggataagtgtgtactacaactatactggaaatgttgactgcttcaagttggatgatgaccctcatgggttggatggatggaattggcaggcatgcacggagatggtaatgcccatgtctagcaaccaagaaaacagcatgtttccagcttatggttttaattactcttcatacaaagaggaatgctggaatacattccgagttaatccaagacccaaatgggtcacaacagagttcggtggacatgatatagcgaccaccttgaagtcatttggaagtaacatcattttctcaaatggtctgttagatccttggagtggtggcagtgttctcaagaacttatctgataccattgttgctctcgtcacaaaagaaggtgcacatcacttggatctacgaccttcaacaccagaagacccgaaatggcttgtggaccagcgggaagccgagatacggttgattcaaggatggatcgaaacttatcgagtagaaaaagaagctaaggtttctctgttaaaacgttcttggtaagagaacaatgtaaagaatcgtctcagtgtgttttccacgaaactcggaatctgcaaactttgtattgcgaacacatgctttgaataaatccatgcggccgcgcatccgagatctagcttaccgataccgtcgacccgagggggt

SEQ ID NO: 86962 - DNA, 521 bp, Arabidopsis thaliana columbia
  unsure (1)..(521): unsure at all n locations
nnnnnnnnnnnnnnnnnnnnnnnnnnnnnnnnnnnnnnnnnnnnnnnnnnnnnnnnnnnnnnnnnnnnnnccacgcgtccggaagttttaacttttaaaggataagagaagagtagctttcttcttcttcctctcggctactgcgacagagaagaagctgcgaactttaaatgtcacaggctgtaattttcaagccgtttgtttcagttccatcaagtaatcacagccagaggaaactacagaacaatattatcaatgttggtgttaaaatccaaaaccgattcagagttgtttgtatgggaatgttggctccaaggaaattcctgcaaaagaggaggaaaatggaggttttcaaggatgcagctgacgagacggatcagaagagatggagagggcttatgctagagattgaatcgacgggttctgctgttccggtgcttaggcaatacaaaactgacggtgaccaaggtcttccaagggatcttgttttgggtactttggttagatttaagcagcttaag

SEQ ID NO: 86963 - DNA, 605 bp, Arabidopsis thaliana columbia
gagaatctctcaattctcttttgtcgatttcgcagtagaagagtcctttcgccgtctccgagaaactcgttgcagcgtcacgaccagttggagaaaatgtcttctagaggaaaaaggaaagacgaagatgtcagagcatcagatgacgaatctgaaacccacgcgccggctaagaaagtcccaaagccagcagacgattccgaccagtctgacgatatcgtcgtctgcaacatatctaagaataggagagtctctgtaaggaattggaacgggaagatttggattgacattcgtgagttctatgtcaaggacggaaagactttgcctggcaagaaaggtatctctctaagcgtggatcagtggaacactcttcgggaccacgcagaggatatcgagaaggccctctctgacctttcttaggttttaaaacttgtatcattggttgtacgtctattagaatatggctcagttgttttggttgtttttgtagaacaacaccatgttctgctagtgtaagctgcttcaaattagttggtgtatggaatctttcacttttggttcagacaagctttggttggtattaagaatataatgattgctctttt

SEQ ID NO: 86964 - DNA, 505 bp, Arabidopsis thaliana columbia
cgcctgcaggtaccggtccggaattcccgggttgacccacgcgtccggaaaacaggtattaggtgcccccatcatactactcaggctctttgttttgctgcgacctacttatggcctctataagggaactttatgagaaggtttgtgctttgacaggggtaccacaagaaaaggctcatatctgggattacttcgataagaggaaaaacggactcttggattctttatcttacaagagcctggaagagtcaagccttcatatggaccaagatattctacttgaagttgatgggtcgtcttcctctcagtctgctatgagctcgacaggaaatgagttagctctggtacctctggaaccttccaggtcgagtgttacaattgctggggggcctaccctatcaaatggtcattccactaccgtcaacttttttttttttccgaaaataactctctaaaaacaacgggagaaatttttttaagatttcttggaaaaagaaaaaagggg

SEQ ID NO: 86965 - DNA, 473 bp, Arabidopsis thaliana columbia
ctgcaaccgagtcagaacgggaatgcatagctagtatatcttcaggaaacagaggaatggctgtatgaagatggcgtgggcggacccgtgggtgcgtacatcgagaagttgaatgatgtcaaaaagctcatcgatcctattgaaaaccggttcaaagatggagaagagcgagttcaagcatcaaaagatcttctgaaaactattgcagataaccgaatggctgcagagtctcttcctcctccaagaaagaatgcggttctcgatgaatgccataaagctgagaggtggctccacgagaaaaccacagaacaggaatctttacccaaagacgctaatccagagctgcaatctgctgaaatcaggagaaaagctgatgctctaaacgcgacatgcaagtacattgggaaatcaaactctccccccgcgaaaccggaacataacggatcatacggaagtagaaaatcagatgatat

SEQ ID NO: 86966 - DNA, 535 bp, Arabidopsis thaliana columbia
atacgactcagctaggagaactacaacgcctgcaggtaccggtccggaattcccgggttgacccacgcgtccgaaaaaaagtataaacaaaattcaaaactattcagtattgatatttgtttacattgaaaaaaaaattaacttaaaaaatatagtttacacaaaaaaagaaaaaccaaaaaaaaaattgttagagattttttcagagtagtgagaggaaaatggcgcagatgcagcgagaagaagtagagtccgtcacgacggagaagaaaagattagacggaggcggtggatcttccggcgctcaggcaacggcgttcaaattcaacgctcaagcgccggaatttgtaccgcgatcacataccaccgcaccagcaccgcaggtttctcctgtctccggttacttttatccttgttttcattacaacggtggttgcataggaggatgtggcggcggagtctgcggtggtggagggaccggcgttggtcctcaatggtcggattgggtctacgtgggagggggagaaccttctga

SEQ ID NO: 86967 - DNA, 504 bp, Arabidopsis thaliana columbia
cgcctgcaggtaccggtccggaattcccgggttgacccacgcgtccggaacacggcacagcgtttggtcaccggtgacccaaacgacgaagcatgcttgacgaatctccgtcagagtttagaagatccagctaataatctccgtaactggacaaaatccttcttcataaatccttgctccggcttctcttcttctcgccttggagtcatttgcaacaatggcagaatttacaaactctccttaacaaatctctctctccgtggctcaatctctccgtttctctctaattgcacaaatctccaatccctagatctatcttccaaccagatctccggcgagatcccgccgcaattacagtttttcgttaacccaagccgttcttaacctctcttctaatcgtctctccgggcaaatctcaccacaaatcgctctctgcgcttacttaaacgggatcggtcttcacgaaaaccactctgccgtcaaattccggttaagtccgggctt

SEQ ID NO: 86968 - DNA, 578 bp, Arabidopsis thaliana columbia
  unsure (1)..(578): unsure at all n locations
ccacgttaaatcgcttccagtgtcgaagattagtgatagatcgttctttggtgtcccgaggccgaccgcacgatgttagttacctgaaccgagtgtgcttccgtctttagccggtagatccgttgacttgctttcactgacgtgatctgttgcgagtttcttcgatagttttgagtggattgagtttacgcgagcctggtcgagtcttaggatctcgacatggtctggactcgtggccttgccattgtttagacgcgaacacgtgccgtgtctatgcgtcacgtgcagtgaagactttgtagtagacgctctgggagaaagaacacaagatgatgatgatgaagggaggagagagctgacttggatagtatgagaatcagtctctctttcttgagctccatcgttacaacccaaattgagacatatacaaaggattattatgatattcaacagattcctatttatgctcattttgctctcttaattccggacgcgtggnnnnnnnnnnnnnnnnnnnnnnnnnnnnnnnnnnnnnnnnnnnnnnnnnnnnnnnnnnnnnnnnnnnnnnggagtatcat

SEQ ID NO: 86969 - DNA, 846 bp, Arabidopsis thaliana columbia
tcaatacgactcaccttagggaaagctagcgtacgcctgcaggtaccggtccggaattcccgggtcgacccacgcgtgcggacgaaggagaagatcgagaaaactgtgatagagatactcagtgaatcggatatgaaagagataacagagttcaaggttcgtaaactcgcttcggagaaactcgcaatcgatctctcggagaaatctcacaaagcatttgtacgaagcgtcgtggagaaattcctcgacgaagagagagcgagagaatatgaaaactcacaagtgaataaggaagaagaagatggagataaggattgtggtaaaggaaacaaagagtttgatgatgacggcgatcttatcatttgcaggttatcggataagagaagagtgacgattcaggaatttaaagggaagagtttggtttctatcagagagtattacaagaaagatggcaaagaacttcctacttttaaaggaataagcttaaccagatgaccattggtcaaccttccagaaaaacatgccagcccttggaaaatggctgtcaagaaaaagggatcccgtgtctgaatgaaaaacatgtgatactttatctcttaaacatgggtaagtgttcttcttaagtagttagtttgttccaatggtcaaggtcttcttatggaaactggcccttttttaaatttacattcttctttcgaaattaggggccggttaatggtggtccttcggcacctggagggttggtgattccccattttccggcctttttaacccggtatttgcccaaaaaaaacctctttgggaccccataagattccacaaaaaccccttttcgtgaatcccggg

SEQ ID NO: 86970 - DNA, 812 bp, Arabidopsis thaliana columbia
gttccaaggaaaaaagaatcgaaaaaaaccttgttaataaaagaaaccccagtgttattgggtataatgacaaaaaaatccccaagagtttccaagggtttcgaaaacctcgttttgggaaaaaacttagcaattcggctctgtcggaaaaaattctcaacaaaagcattttgtaacaagcggtcgtgaaaaaatttcctcgcagaaaaaaagagcgatagaatataaaacttcacaagtgaataagaaagaagaagatgtagataaggattgtggtaaaggaaacatagagtttgatgatgacggcgatcttatcatttgcaggttatcggataagagaagagtgacgattcaggaatttaaagggaagagtttggtttctatcaaagagtattacaagaaagatggcaaagaacttcctacttctaaaggaataagcttaacagatgaacaatggtcaaccttcaagaaaaacatgccagccatcgaaaatgctgtcaagaaaatggaatcgcgtgtctgaatgaagaacatgtgatactttatctctaaacatgtgtaagtgtcttcttaagtagttagttgttcgaatgttcaggtctctcatgtaactgtcttttttattttcttctctcgaattggtcgttatgtgtctcgtactgagttgtatccatttcgctttagccgattccaaaaactctggaccaaagtacaaaaccatctgatccgatttcaaatttcaaaaaaaaaaaaaaaaggtcggccgctctagaggatccgagcttacgtacgcgtgcatgcaacggcaagct

SEQ ID NO: 86971 - DNA, 561 bp, Arabidopsis thaliana columbia
cgcctgcaggtaccggtccggaattcccgggtaaaatacttaaaggagacgattctcggactaccttgatgattaaaaacattccaaacaaatacacctcgaagatgttgttagctgcaatcgatgaaaagaaccaaggaacttacaactttctctatttgcccattgatttcaagaacaaatgcaatgtgggcctcgtcattcatcaacatgctcaatccagaactcatcattccattttatgaggcttttaatgggaagaagtgggagaagttcaacagtgagaaagtagcttcattggcatatgctcggatacaaggaaaatctgcccttatagcccattttcagaactcaagcttgatgaatgaagatatgcgttgtcgtccaattatcttcgacactcccaacaatccagagtctgttgaacaggttgttgatgaggaatctaagaatatggacctcctcgactctcagctcagggatgatgatggcagagagagaagctgacacaggagttgagagacgactcaatgttgtgataatggctgttttttttctttc

SEQ ID NO: 86972 - DNA, 850 bp, Arabidopsis thaliana columbia
  unsure (1)..(850): unsure at all n locations
atgatttnnnnnnnnnnnnnnnnnnnnnnnnnnnnnnnnnnnnnnnnnnnnnnnnnacgcgtccaaaaatctctcaataaccatgtgtgctccgcagccctccaacgagtttccgctgatttttcgcaaggatggtaagacatgtgtgttttgggatgtggaggattacccaatcccagctgatctccatcctcgttcgatccggcggagaatcgtaaaggatgtgaagaaatatggttgtgatgcggaggtgtcgattcatgcttatgctaatgataatacggtctcggtaacaatgaggcgtcaattttcggctgctggaatcaaattggaagtgttcacccaagcaggggataaatatgcgagacattgttccttgtatggtgacattatgctgtggtcactggaaaatcctccaccatcaaatattattgtcatcgcaaaaataatcgatgacgacttggctgatcgtattggatgtttgactaccgtctggtcatatgggcttctcatatcccaagttaagccagaatggctagaacggctttttcctgttggaagctatccctcgtttttggcagccatatttgatggaggattgccgaaatcatcgaaagcgaacaaggatcgctttcctctcgatgagtccgacgactaacttttgtgtctatgttattgttttgtgcctatagttgatatcaagtttggattgaaatgtttttagtattgtctatctataatatttatgtgattttggacaaaaaaaaaaaaaaaagnnnnnnnnnnnnnnnnnnnnnnnnnnnnnnnnnnnnnnnnnnnnnnnnnnnnnnnnnnnnnnnnnnnnnnnnnn

SEQ ID NO: 86973 - DNA, 634 bp, Arabidopsis thaliana columbia
aaggcagagctctttgcttctgaatattattattttcttaaattcttccgttttttttttttaatccaaccacaaggatcgataacgaaatcatcagatcgccagaaaaaaaaaaaaaaattgcgaaatggagaatctgagctgcagatctgcgtcaatctccatctagatgttgttgctacttcttcctctatagaaccataatttcatcagatctcgctgattaatcatccccatttggatctgatcgaaactcttagggaagaacatggcaggagctgcctccgcgctgtttctgcttgatatcaagggacgcgttctcgtctggcgtgattatcgtggcgatgtctccgctgctcaagccgagcgattcttcactaagctcatcgagaaagagggtgattcacagtcaaatgatccagttgcttacgataatggggtgacttatatgtttgtacaacatagtaatgtatacttgatgatagcatccaggcagaattgtaatgctgccagtcttctcttctttcttcaccgcgttgtcgatgttttcaagcattacttcgaggagttagaagaggaatcattgaaggataactttgtggtagtgtatgagctacttgacgagatgatggac

SEQ ID NO: 86974 - DNA, 493 bp, Arabidopsis thaliana columbia
cgcctgcaggtaccggtccggaattcccggttcgacccacgcgtacgaccagatacagtttgctcttgagcgtggtgtgcctgcaatggtggcagcattcacaacacggagattgttgtatccaagccaagcttttgatttggtacattggtcaagatgtagaatcaactggactcgggatgaggggactcctgctccttgaagtgaataggatgcttcgcgccggaggatattttgtttgggcagcacaacctgggtataagcatgaaaaggccttggaagaacagtgggaagagatgctaaacctgaccactaggctgtgctgggttcttggaaagaaggaaggatatatagctatctggcagaagcctgtaaataacacttgttacctaagacgaggagctggagtcagtccttctttgggcaattctgaagaagacccaaataatggttggtccgtggatctgaaggcatgcatcactaggaatgaaaa

SEQ ID NO: 86975 - DNA, 494 bp, Arabidopsis thaliana columbia
cgcctgcaggtaccggtccggaattcccggttcgacccacgcgtccagtacttttctcttcggtttggtttgttttcacgcatttcctagctcggagtaagctaatcgaagaaaacaagcttgttattgatcgatctttcggtttttgttttgacgttttgtgtgaacgagttacttttggatatgagctctgtctgtggtgggttggatttcaaagatgcagagagcagctctgcttccagtcccattatatgttctactggcgtaaagcatatctcttgtgttggatctgatgatgctcaagagtctgatggtgatgatagtggttatatacaccaaactgtgattgaagaatccaaagacaaggcgatcagcgaacccatccctgagtctttacctctcaattctttggatgatgaaagtgaagataagaaccttgctactgcattgcaagaaatgttctctgagaatatgagtgggggtactctgattct

SEQ ID NO: 86976 - DNA, 485 bp, Arabidopsis thaliana columbia
cgcctgcaggtaccggtccggaattcccggtgtcgacccacgcgtccagacggtgagagttcaagtgttccaacgatggcgaaatccccggtagaggtgaaactgatcccgatcgaagctactcctgagaatttcgcagactatggtcaagtcatcgaagcctctcgtgacggtgcaggtttcggtcccaacgacgctcaactggatctctccagaggaatcccacggttctatataatgcggatcagagatacaccctttgacttttccgtactcactcaccacgcgagcgtgacacagtgtctaggatcaataggaggtcatgtttggtaccttggagtggctaaaccgacacttattgaagatggtgatgatggaaagacggcagataaatcgaaaccaagggcggggcactggtaccccccccccggggaagaagaaaccgcggctccagggcctcgggacccaagcttacaaaccgaacc

SEQ ID NO: 86977 - DNA, 1663 bp, Arabidopsis thaliana columbia
cttatcaattcatctcacactcttcttcactctcttctctctacacacacacacacacacacacacaaaatggattcttcgaatgttgaagaaaacctaaacccagaaacaaaatccgcagaagaacaaaacccacttgccattttccattcttctctaccaatcgcatctctttctctgaccttgttcccatcctcgactcaatttctcaaattgtttgctcatcatccaaacaaggttaagatccctacgcaggcttcttctctcactcatctctctctttcttctgtctctccttttccttcttccagaatctctttcaaatccaccatcgctgctaaccctcttcaatcccctctctccatcgtccctcgtcgtcccgttgatccttcctccgccgccgctctccgccgtgctgctgtcgtctggttccgcaatgacctccgtgtccacgacaacgagtgtctcaactccgccaacgacgagtgcgtctccgttttgcccgtttactgcttcgaccctagagattacggcaagtcctcttccggcttcgacaaaacggggccttttcgtgcccagtttctgattgagtccgtttcggagctccggaagaatctccaagccagagggtcgaatctagttgtccgtgtcgggaaacctgaagctgttttggtggaattggctaaggagattggagctgacgcggtttatgctcacagagaagtgtctcacgacgaggttaaagcggaagggaagatagagaccgcgatgaaggaggaaggcgttgaagtcaagtatttctggggaagcactctctatcatttggatgatttgcccttcaaaattgaagacttgccgtcaaattacggagctttcaaggataaagtccagaaattggagattaggaagactatcgcagcgcttgatcaattgaaaagcttgccctctcgaggagacgttgagcttggcgatattccttctctcctggatcttggcattagccccactcctaggactagccaggaggggaaaccgacaatggttggaggagagacagaggcgttgactagactaaagagctttgccgcggattgtcaggctcggttgagcaagggaaaccagaaaggaggcaacaacagtgtctttggtgcaaacttctcttgcaagatatcaccttggttagccatgggaagcatctctcctcgttccatgttcgatgagctgaagaaaacaatctccgcatcaaccacctccacaactccaaggaacggaccgggagatacaggactcaactggttaatgtatgagttgctatggagggatttcttcaggtttataaccaagaaatacagctcagcgaagacgcaggtcgaggctggtccggctacagcctgtaccggtgcctttgcttaaacatttgaaaactttcaggtgaccggaaaagttagaagcgacctgtttctttgccctactctggtgtatggtggattaatttgctatccggacaggactttactgctctcttttgaaacttgagtgtcaggagaataaaatctaagcttctttttttggctcaatcaagttgtccgttccctgttctaaacatttcggatactcattccataaaaagtctctacaatttgagacgctctcctttgtggtt

SEQ ID NO: 86978 - DNA, 560 bp, Arabidopsis thaliana columbia
  unsure (1)..(560): unsure at all n locations
gttttatgttgcacaaaaaaattaaagatgtaatgattttttatacagtactatttcgtaattgatgtttgatttcgaagcaaaaaattcttggaaacttccttctcatcagaaagaagaagataaaaaggttggttgttgttgcatcgatctccaaatccagattgattcgtcacgaaatctgctcaccggttgtttcgtcgccgtcctctgttcacccaacgaagatgaacggcggtccctccggtttccataatgctccggtaacgaaagccttcgttattacgagcgctcttttcactgtcttcttcgggatccaaggtcgttcttctaagctcggtttgtcttaccaggacatttttgagaaatttcggatatggaagttaatcatgtccacttttgccttctcctccacaccagaattgatgttcggattgtatttgctatactacttccgagtttttgagagacagattggccaaaaagtccngggttatntgtcnagggctgntccatnccngggcatttgtnccngtnagnnccagaantntaccctggcc

SEQ ID NO: 86979 - DNA, 710 bp, Arabidopsis thaliana columbia
  unsure (1)..(710): unsure at all n locations
cccacgcgaccacggacgcgtgggctttacgtgaaaaaccccaaggtcatcccacccggggttctcgtctgtggtggttccaaacaagacgcgtattacaaggctggtaaaaaaatatacgaaccagcactacaagactgcgccaggataaggatcaacagcgcaaagccacgatggaagacggagatgatgccaaccccacgaatcatgagtgatactgtcatcctccctaacggagacatccttctagtcaacggagctaaacgtggttgttcaggctggggatatggtaaagaccctgcctttgctcccctcttgtacaagccccatgctgcacgtggcaagcgtttcagacagctcaagcccaccaccatcccacgtatgtaccactccagcgccatcattcttccagacggtaaggttcttgtcggtggcagcaacaccaacgacggttacaagtacaacgttgagttcccaacggagcttcgcgttgagaaattctccccaccttacctcgacccggctctagccaacataaggccaaagatcgtcaccaccggcaccccanaacaggtcanatacggacaattcttcaacgtgaaggtcgaccttaaagaaaagggagcaaccaagggaaatctcaaggttaccatgttagcccctgccttcacaacacacagtatctcaatgaacatgaggatgctcatctt

SEQ ID NO: 86980 - DNA, 445 bp, Arabidopsis thaliana columbia
cggacgcgtgggcggacgcgtgggggggaatttgggaaaagtatggagaagaagacgaaagtgctaattgtgggaggtactggatacttgggtcagcatcttcttcaagctttcgccggcaactatggcggtgaatgtgagctatacgacgtcgctttcactcaccattcttctccacttcccgctcgtttgctcgacgctttccctcattcccccgcgtttcctgtcgatcttaaatccggtctagggctcaattccatatcccaggactttcgtcagcctgatgtggtcgtgaattgtgctgctctgtctgtcccacgagcttgcgagcaagatccagattccgccatgtccatcaacgtacctacttctgttgtaaactggttatcaagttttgagactaacaaaaccttgttgattcatctctctactgatcaagtttatc

SEQ ID NO: 86981 - DNA, 432 bp, Arabidopsis thaliana columbia
ctctatctccggtcatgcctccattaccgtcctccacggcgccttcgtcttcgagacatcttcgatcgccggaaagtatcgcgaaatttgcagggagagcaatatttcctgctttacaggggaaatcgtgtccgatatgcctcgaaaatctaaccgagcgaagatccgccgccgtgatcacggtgtgcaagcacggatactgccttgcttgtattcggaagtggagcagcttcaagaggaattgtcctctttgtaacactcgttttgattcctggtttatcgttagtgattttgcttctagaaaataccataaggagcaattaccaattcttcgtgatcgtgagactttaacttatcatcggaataatccttccgatcgccggaggataattcaaaggtcgggggatgttttggaaaactctagctcaagat

SEQ ID NO: 86982 - DNA, 511 bp, Arabidopsis thaliana columbia
  unsure (1)..(511): unsure at all n locations
aaaagattttaagagagaaagggggagaagtgagagagatggagcataagagaggacatgtattagcagtgccgtacccaacgcaaggacacatcacaccattccgccaattctgcaaacgacttcacttcaaaggtctcaaaaccactctcgctctcaccactttcgtcttcaactccatcaatcctgacctatccggtccaatctccatagccaccatctccgatggctatgaccatgggggtttcgagacagctgactccatcgacgactacctcaaagactttaaaacttccggctcgaaaaccattgcagacatcatccaaaaacaccagactagtgataaccccatcacttgtatcgtctatgatgctttcctgccttgggcacttgacgttgctagagagtttggtttagttgcgactcctttttttacggagccttttgctgttaactatgtttattatccttctttcataaccaatggaggtttaanttncccttngggant

SEQ ID NO: 86983 - DNA, 501 bp, Arabidopsis thaliana columbia
taatacgactcatatagggaaagctggtacgcctgcaggtaccggtccggaattccccggtcgacccacgcgtccgcaagtgaagaggttccctcgtcagaaactcccaaggtagtagaagaagaagtgatagctaccaaagctgaagatgattcgccggaaaaagaagagcaaacggaaacacttgctgcagcagctgaagctgaagaggtggttcctccaattccagaaaccaaaagtgaagaggaaattgttgagaactctattcctccaaactcagccactgatgaagtttcatctccagaagctttagcaagtgaagaggttgagaaggagcaagtggttgccgaaacacctgttgatgaagtcaagactcctgcacctgtagtcacagaagcttcttctgaggaaagtggcaacaccgctactgctgaaagcatcaaaggcatttcaccagctctagtggagcagctgagagaaaaacaggggcaggaatgatgg

SEQ ID NO: 86984 - DNA, 528 bp, Arabidopsis thaliana columbia
  unsure (1)..(528): unsure at all n locations
cagtcgctgcacaagtaatcacagaaccaaccgaaacagaagcccaaaccaaaacctcattcaagacctctctctccatatgcatcgtaccctgacttgaagcctccttcttctccgatgccatcgcagccctgaaaccagctaagaacagtctctctctcgttacttagtctggttttgtcctccggcaaacagaagaacaaaagtggtcgaatattgtaacttgttcttttttctctcgttttttctcccgaacttagatgctactttgtgtcgaatctgagataagtggactttgttttgtttttctccctttataccaccattgagttcaaacaagagtctgtcatcgcgttaaaggggatcagaagctgtgtgaggggtgtattggacgaaataaaagttgtggggaaatttccaaaaaaaaaaaaaaaaaaaaaaaaaaaaaaaaaaagggcagccgctctagaggatccaagcttacgtacgcgtgcatgcgacgtcntagctctnctatannnnnnnnnn

SEQ ID NO: 86985 - DNA, 634 bp, Arabidopsis thaliana columbia
  unsure (1)..(634): unsure at all n locations
aaccgncctggcagacagtncagttcaacacccctntggtaacccgtccctgnccagngccagtncnggngccagnccagtgcccnggattgaagctgcactccctgcacaagtaatccccggaccccaccggaaccggaacccaacccaaaacctcattcaagacctctctctccatatgcatcgtaccctgacttgaagcctccatcttctccgatgccatcgcagccctgaaaacagctaagaacagtctctctctcgttacttagtctggttttgtcctcctgcaaacagaagaacaaaagtggtcgaatattgtaacttgttcttttttctctcgttttttctcccgaacttagatgctactttgtgtcgaatctgagataagtggactttgttttgtttttctccctttataccaccattgagttcaaacaagagtctgtcatcgcgttaaaggggatcagaagctgtgtgaggggtgtattggacgaaataaaagttgtggggaaatttccaaatatcttgtgattactggatcttgtgggatagatctctttctttctcttattctggattccctatacataacaaaaaggttaaatggggtaatgaaaagtgtgacatatactta

SEQ ID NO: 86986 - DNA, 975 bp, Arabidopsis thaliana columbia
  unsure (1)..(975): unsure at all n locations
tccnnnnnnnnnnnnnnnnnnnnacgccatggtcgaaacatctnnnnnnnnnnnnnnnnnnnnnnnnnnnnnnccacgcgtccggacggatagcatcagcggtgtatttggtgagagttctgatggtgtatctgtcgctcttggagtagctgctgctgctggattaagtgtttttgcatttacagagattgaaaccatactccaactactaggttcagctgcacttgttcaacttgcaggcaagaaacttctatttgctgaggaccgaaagcaaactctaaaacaggtggatgagttcttgaacacaaaggttgcccctaaagaacttgttgatgagttaaaggaaataggaaaggctcttcttcctcaatcaacaagcaacaaagctctcccagcaccagcaacagtaacagcagaagcagaatcagctacagctacaaccaccacagtcgataaaccagtacctgagccagaaacagttgcagctacaacaaccactgtagataaaccagtacctgagccagagccagtgccagagccagtgcccaggccagcgattgaagctggaatcgctgcacaagtaatcacagaaccaacccgaacagaagccaaaccaaaaccttattcaagaactctctctccatatgcattcgaccctgacttggagccttcatttttttcgatgccattgcagccctgaaaacaggtaaaaaccggtcttttctcggtacttaatctgggtttggccttctgcaaacagaaaaacaaaaaggggccgaaaattggaacctgggtcttttttctctcggtttttctcccgaacctagaaggcttctttggggccaaactgaataagtggactttgttttgtttttctcnnnnnnnnnnnnnnnnnnnnnnnnnnnnnnnnnnnnnnnnnnnnnnnnnnnnnnnnnnnnnnnnnnnnnnnnnnnnnnnnnnnnnnnnnnnnnnnnn

SEQ ID NO: 86987 - DNA, 2992 bp, Arabidopsis thaliana columbia
  unsure (1)..(2992): unsure at all n locations
gcggccgctatggagaggccaagagcccctccatctcctttgaatgatgcggagtcattaagtgaacgtagatctcttgagattttcaacccttcgagtggaaaagagacacatggatcaacttcttcttcttcaaagcctcctcttgatggcaacaacaaaggtagtagtagtaagtggatggagttttcaagattgccgctaagattacagaaagaacccgctgaatggggattgtcagctgttaagccggattcgggagacgatggcattagtttcaagctgtccagtgaagtggaacgaagcaagaacatgtctaggaggtcatccgaagaatctacatcttctgaatcaggggccttccctaaagtatccgaggagctcaaaactgctctatccacgttgcagcagacttttgttgtctctgacgctacacagcctcactgtcccatagtctatgccagcagtggattctttaccatgactggttattcttccaaggaaattgttggaagaaactgccggtttctgcaagggccagacaccgacaagaatgaggttgccaaaatcagagattgtgtcaagaatggaaaaagttactgtggaaggctgttaaactacaaaaaggacggaactcccttctggaatcttctcacagtcactcctatcaaggacgaccagggcaataccatcaagttcattgggatgcaggttgaagttagcaaaaacacagaaggggtaaatgataaagcattgaggcctcatggattctccaaatccttgattcgatatgatgctcgccagaaggagaaagctttggattccatcacagaggttgtgcaaactataagacatcgtaagtctcaagttcaggaatccgtgagcaatgacactatggtaaagcctgatagttctactacacctacacctggtagacaaacaagacagtcagatgaggcttcaaagtctttcaggacacctggacgtgtttctactccaacggggtcaaagctcaaaagctcgaataacaggcatgaagatcttttacgtatggaacccgaagaattgatgttgagcacagaagtaatagggcagagggacagttgggacctatcggatagagaaagggatatacgccaagggattgatctagctaccactcttgagcgcatagagaagaatttcgtcatcagtgatcctcgtctccctgataatcccattatctttgcatcagacagctttcttgaattgacagagtattcacgcgaggaaatattggggagaaattgtcggtttcttcaggggccagagacagatcaagcgactgtccagaagataagagacgcaatcagagatcagagggagattactgtgcagttgataaactacactaaaagcggaaagaaattctggaactttttccacttgcaacctatgcgtgatcagaagggagagcttcaatacttcatcggtgtgcagcttgagggaagtgatcatgtagagcccctccaaaatcctttgtctgagagaacagagatggagaactcgaaagtggtgaaagctccggcaacaaatgtagatgaagctgtcagagagcttccagatgctaatacgcggcccgaaggcctgtgggcttcacactcgaagcctgtctatcctctgcctcacaataaggagagtacgtcctggaaagcaataaaaaagatccaagcgagtggagacacagcgggactacatcatttcaaaccaataaaaccgttgggctctggtgatactggcagtgtccatttggttgagctgaagggcacgggtgaactatatgccatgaaagcaatggagaaaacaatgatgttgaatcgtaacaaggctcaccgagcgtgcatcgaaagggaaatcatttcccttctggatcatccattccttcctactctctacgcttcttttcagacctctacgcacgtctgtttgattacagacttctgcccaggtggagagttgtttgcactacttgacagacaacctatgaaaatattgacagaagactctgcaaggttctatgcagcagaggttgttatcggcttagaatatcttcactgcttaggaattgtatatcgagacctgaagcctgagaatatactgctcaagaaggatggacacatagtattggctgactttgatttatcattcatgacgacctgcacaccccagcttattattccagctgcacctagcaaacgaaggagatccaaaagtcaaccactacccacatttgttgcagaaccaagtacccagtcaaactcgttcgtaggaactgaagaatacattgcgcctgagataatcacgggtgctggtcatacaagtgctattgattggtgggcactgggtatcttgttgtatgagatgctttatggtcgcacacctttcaggggtaagaataggcaaaagacatttgccaacatcttgcacaaagatctcactttccccagcagtatccctgtgagtcttgtaggtagacagttgatcaacacgttgttaaatagagatccgagcagtcggttaggatccaaaggtggggcaaatgagataaagcagcatgctttctttcgcgggatcaattggcctctcatacgaggcatgagtcctccaccactggatgcaccgttgagcataatcgaaaaagatccgaatgccaaagatataaagtgggaagatgatggagtgcttgtgaattctacggacttggacattgacctcttctaatcctattcttcctctctctgcctttgattctcaaattatgcaaaactcttcttctcaataaaagccaaggtgttgttgtacttgtagttgcttaaatataaacggctcttttcatgtttaaaaaaaaaaaaaaaaaaacaacaattcannnnnnnnnnnnnnnnnnnnnnnnnnnnnnnnnnnnnnnnnnnnnnnnnnnnnnnnnnnnnnnnnnnnnnnnnnnnnnnnnnnn

SEQ ID NO: 86988 - DNA, 430 bp, Arabidopsis thaliana columbia
agtctaacgcttgtgcaatggcagatagttcgtctaggaggaaccttaaacgatccttcttagaatgatgaagattccgataaacaacctcccgataagcgagtacggtttccaaaggggaagaagtcgaaacctgaacagctcttagaggaagaagctttagcccgccgcaaagcccgtgatgctgctaaggagcgtgcaaagattcgcaatcagaatactactaagctctttatcgaagatgacagtgatgatattaatcaggctcaggagacttatgaggatgatggcaatcgcacagaagatgggatccagattgaagcttttagtctggacagagagaaagaagaaggttactttgatgctgatgggaactttgtagaatatgttagagaaaaggaagtcaaggatgcatggcttgacagtattg

SEQ ID NO: 86989 - DNA, 535 bp, Arabidopsis thaliana columbia
tctctacgactcactatagggaaagctggcacgcctgcaggtaccggtccggaattcccgggtcgacccacgcgtgcgtcgaactcgtatgactaggcctgtgcctcgtattggagacagaagaattaggaagatattggcatctagacattggaaaggaggttcgaagaacaacacagatgcaaagccatggtattgctcaaagaggagttattacttgcaccatcatcagaggagttatcccatcaagaaaaggaaatactttgacagtgtttacgactcgaactctgatgattaccgtttgcaaggaaagactcataaaggaagcagaacaatatcttccatgaaaagtcgaaatgcgtcctttgtgtcaagggatcatcatgtgaagctgcggatcaagtcttttagggtgcctgagcttttcgtagagattccagaaactgctactgttggctccttgaagccggtggtgatggaagcagtgaccaccatactgggtgatggactgcgagtgcgcctgtggttcaaggaa

SEQ ID NO: 86990 - DNA, 389 bp, Arabidopsis thaliana columbia
  unsure (1)..(389): unsure at all n locations
ccctttctggaggtcccngggccccgggtttcccccccattggggtcccggttccccccaagggcctttgacccccggtagccccaagcccccctaantccccggttttaaacccagtatgtgccccgtgaatcccgggcaaaccaagtatggtccccatggatggctggatggctctgcactgtacataaaacagagtcctcactttcatttctctccaagataaactttaaggtgttgtggtttaatcactcgtttatctaaagtttacgctgatgaatagtaatttgtgacaaaactctgaaaacgggtatttgatcaaaactgattcggtgtggttcaaaaaacagaatgtgatttagtgtgtttaatacactcttgctttggag

SEQ ID NO: 86991 - DNA, 956 bp, Arabidopsis thaliana columbia
accaaagtttctgaatctgaccaccaatgttttcctgacttatgtcttctgaatctgaccaatgtagagtatttttgtgatcgtctttcctgacttatgtcttgtttcgttttgtttttcattaaaattcatgggttttgttttgttgcttgtttatatttcctgttatctacttaaaagctacgatgtatcttgtagtcaaggatgctgctgcaacctgaacttgtaatggaggatgttagccaagaccatgctcgtaaaacggtaaaaggaagacaatctcaactgcatcaattaccctttttgttattccaccaaagttttcctgacttatgtcttctgaatctgaccaatgtagagtatttttgtgatccgcctttcaaaaaatgcacagggcacaaatcggaggtccattccacaactttgcctcgggaaacatgcttcagttcatcccatgtcggcatggagctctgttttagagaaaatcatttggtgtattaatgtcgcgtggggtagaacctgaagtcgacaaggacctcttcctgttcttgaagttcatggcatcagttattccaacaattgagtgcgattacccaatggactttgatctcggtagctcaagcacctaatatcagatttaaacaagtatgtgctcgtgaatccgggaaacaagtatggtctcatggatggctggatggctttgccctgtacataaaacagagtcctcactttcatttctctccaagataaactttaaggtgttgtggtttaatcactcgtttatctaaagtttacgctgatgaatagtaatttgtgacaaaactctgaaaacgggtatttgatcaaaactgattcggtgtggttccaaaaaaaaaaaaaaaaaaaaaaaaaaagggcggccgctctagaggatccaagcttacgtacgcgtgcatgcgacgtcaaagctcttctat

SEQ ID NO: 86992 - DNA, 1414 bp, Arabidopsis thaliana columbia
cacaatctcaaatctctgattcttcgatacgataaattcttcctcgatatagaaaccactgattagatcctaattcgtcgcctagctcaaaagatggtgctttcgcaaaagcttcatgaagcatttaaaggaacagttgagaggatcacaggtcctcgtacgatctcggcgttcaaggagaagggagttctcagcgtcagcgagttcgtacttgccggagataatctcgtctccaagtgtcccacctggtcttgggaatctggtgacgcaagcaaaaggaagccatacttgccctcggacaaacagtttttgattactagaaatgtaccttgtctacggagagctgcttctgtggcagaggattatgaagctgctggaggtgaagtgttggttgatgatgaagataatgatggttggctggctacacatgggaaaccgaaagataaaggcaaggaagaggataacttaccatccatggatgccttggatataaacgagaaaaatactatccaatcaatacctacgtattttggaggtgaggaggatgatgatattccagacatggaggagttcgatgaggctgacaatgtggtagaaaatgatccggcaactcttcagtcaacttatcttgtggctcatgaacctgatgacgataacattctccgaactcggacatatgatctcagcataacgtatgataagtattacccaaactcctcgtgtttggctgacccggttattgatgagtcaaggatgcttctgcaacctgaacttgtaatgggggttgttagccaagcccatgctcgtaaaccggccacaatcgaagatcatccacacttgcctggtaaacatgcttcagttcatccatgtcggcatggagctgttatgaagaaaatcattgatgtattaatgtcgcgtggagtagaacctgaagtcgacaagtacctcttcctgttcttgaagttcatggcatcagttattccaacaattgagtgcgattacccaatggactttgatctcggtagctcaagcacctaatatcagatttaaacaagtatgtgctcgtgaatccgggaaacaagtatggtctcatggatggctggatggctctgccctgtacataaaacagagtcctcactttcatttctctccaagataaactttaaggtgttgtggtttaatcactcgtttatctaaagtttacgctgatgaatagtaatttgtgacaaaactctgaaaacgggtatttgatcaaaactgattcggtgtggttcaaaaaacagaatgtgatttagtgtgtttaatacactcttgctttggagaaaaaaaaaaaaaaaaaaaaaaaagggcggccgctctagaggatccaagcttacgtacgcgtgcatgcgacgtacatagctggtcgatagtg

SEQ ID NO: 86993 - DNA, 1322 bp, Arabidopsis thaliana columbia
  unsure (1)..(1322): unsure at all n locations
nnnnnnnnnnnnnnnnnnnnnnnnnnnnnnnnnnnnnnnnnnnnnnnnnnnnnnnnnnnnnnnnnnnnnnnccacgcgtccgcttatatacaagaacttgctcattcctcaaagcatccacacataatcacgatgaagctctttgttcatctctctatcttcttctccatcctcttcatcactctcccatcttcttacagctgcaccgaaaatgacaagaatgccctccttcaaatcaagaaagcacttggcaatcctccccttctatcctcctggaacccccgaaccgactgttgtaccggctggaccggcgtcgaatgcactaaccgtcgcgttaccggtctcagcgttacctccggcgaagtctccggtcagatctcgtaccagatcggcgacctcgttgacctccgtacactagatttcagctacctgccacacctcaccggaaacatcccacgcaccatcaccaaactcaagaacctcaacactctctacttgaagcacactagtctctccggtccgattcctgattacatcagcgagctcaagagcctcacgttcttggacctttcttttaaccaatttaccggtccaattcccggttcgctatctcagatgccgaagcttgaagccattcaaatcaacgataataagctaaccggttctataccaaactctttcggttcttttgttggcaacgtccctaatctctacttgtctaacaataagctgtcaggaaaaataccggaatcgttgtctaaatacgacttcaacgcagggaatttgtcgggaaatggtttcgaaggaggggcctttatgttcttcggacggaacaaaacaacagtacgagtggatttgtcgagaaacatgtttaatttcgatctcgtcaaggttaagttcgctagaagcatagtttcgttggatctgagccagaaccatatctacgggaagataccaccagcactgactaaactacacctcgagcatttcaacgtgagcgacaaccatctctgcggaaaaatcccaagtggcggtctacttcagacctttgaaccatctgccttcgctcacaacatctgtctttgtggaactccccttaaggcttgttaatttggtttaatcttggcggaagaataaaaataatgttgaatatgttatgatgatgtgttcattatcaccgccaaaccaagtttattgtttctttgttatgaatttaatttaatggcaagaattggttacgtaaaaaaaaaaaaaaaaagggcgcccgctctagaggatccaagcttacgtacgcgtgcgtgcgacgtcataactcttgtata

SEQ ID NO: 86994 - DNA, 529 bp, Arabidopsis thaliana columbia
accacgcgtccgcggacgcgtgggggaagataagccagaagggtttccatttgaaatcattgataattcaggggagagaactgtgttgctgacaaggaaatttgaggatgaaaccatccaagtggaagttgactctgttgcttcttatgatgatgaagatgaagaagaggaagcagaaccaaacaatgaagaagacgatgaagatcaagagagctcgggtaaagtccgggttccgatggttgttagtgtgcagaaaggtgatggtgtgtgtcttgagtttggagtcagcgcatacccggatgagattgtgattgatagtttatcgatcaaacaaccgcaagatctgataatgaccttgcttacgaaggacctgactttgatgaccttggatgagaatttgcagaaggctttccacaggtacttggagatcagaggtattaaaccaagcttcactacctttctggcagattatgtggccaacaaagatagcagagagtatcttcaatggctcaaggatctcaagtctttt

SEQ ID NO: 86995 - DNA, 510 bp, Arabidopsis thaliana columbia
  unsure (1)..(510): unsure at all n locations
aaagattgttcatatcaaatagttttcgttaattcactctacaaaggaaaataatgagctcgtcgccgttatcttcatctctctttcatcctctgtcgaccttgtcgactccattgccatggtcggagacagaacctctgtttcaatcggaagcaacaacctttcgttgtcagagccgcaaaacttcctgaaggggtgatagtgccaaaagcacaacccaaatctcaacctgcgtttctgggattcacacaaacagctgagatatggaactcacgagcttgcatgattggtctcatcggtactttcatcgtcgaactgattctgaacaagggaatacttgaactgatcggtgtagagattgggaaaggactcgatctttcctctataatgtatatcactgtttgtgttctttccaacaaaaacatctcttatgaaatgtaaaattctcaagtttattcacagaaaacgggcatttttgaaaagttgggtntttnggtccggtgncggntc

SEQ ID NO: 86996 - DNA, 602 bp, Arabidopsis thaliana columbia
  unsure (1)..(602): unsure at all n locations
nnnnnnnnnnnnnnnnnnnnnnnnnnnnnnnnnnnnnnnnnnnnnnnnnnnnnnnnnnnnnnnnnnnnnnnnnnnnnnnnnnnccacgcgtccgtttctctctcagcttacgaacaagaaaaaaagaagaatctttagccacctttgagatcaaaagatgaacatcgctcacactatcttcggcgttttcggaaatgcaactgctctgtttcttttcttggctccttcgataacattcaagagaatcatcaagaacaaatccactgaacaattctctggtatcccttatccaatgactctcctcaactgtctcctctctgcttggtatggacttccctttgtgtcaaaagacaacacacttgtgagcacaatcaatggcacaggagcagtgatcgaaacagtctacgtgttaatctttcttttctacgcaccaaagaaggagaaaattaagatctttggtatcttctcttgcgttttggctgtattcgcaacagtagctctcgtctctctctttgctcttcaaggaaacggtagaaaactcttttgtggtctcgcagctactgttttctccatcatcatgtacgcttctccactctccatca

SEQ ID NO: 86997 - DNA, 435 bp, Arabidopsis thaliana columbia
cccacgcgtccgcccacgcgtccgattcaagctgcgattgcgaggaagagaagagacttcagatctagcttgatccggtgataatggcgctcgagtgggtggttttaggttacgcggcggcggctgaagcgattacctggtgctattgacgatgccaggactcgacggactccgcaagggattagtcgccgtcacgcgtaatctcctcaaaccgtttctctccatagttcctttctgtctcttcctcttaatggacatctactggaaatacgaaactatgccttcgtgcgatggcgattcctgcacaccgtcagagcattttcctcaccagaagtccatgtattaattcctgcgaaacgcgcttttcattgcggcttgacttgtaatatactggatccttgtacgaatctcctatttggtcgataagatccctct

SEQ ID NO: 86998 - DNA, 568 bp, Arabidopsis thaliana columbia
tgaaggaagtctttactcagagaaccaaaagaaaaataaagagaaaagaacccaaaagaaaaaaagccattgtaaattcagaataaatggaagaacatctaaatccattagcagtgactcatcttcttcaacacacactaagaagcttatgcatccatgagaactctcaatgggtttatgctgttttctggaggatcttgcctagaaactatcctcctcccaaatgggatggtcaaggagcttatgatagatcaagagggaacaggagaaactggatcttggtttgggaagatggtttttgcaactttgcagcttctgccgcggaaatgagctccggagaaggtagtggtggcggtggtggctcagcggcttatggaaatagtgattttcaacaataccaagggcttcagcctgaattgttcttcaagatgtctcatgaaatctacaattatggagaagggtctgtgaggataatttttcagcaaaaattaaatgatatttacacaaagaaatataaccttttttctatttatatttttggatatagtactttctctcttttgggttt

SEQ ID NO: 86999 - DNA, 464 bp, Arabidopsis thaliana columbia
acaatttagtttaagatctcaaatacgatctgaaaaataatgatgatgggaaatacatttggttcaagtttggcgagtttattcttcttgtgggcaactattcaacaaatcttcccaaaccatctcagaatcgccattaaagagtttcttatctccacaatacaacaactctcatttgtccagagattttccgacagattcatcaacttcttttcgccttatgtcgaaatcagcttctctcaatacgaagattatcaattcaatcacgcatttgcagccattgagacttaccttggggcaaaagcaactgataaagccaagcatctaagagcaagccaagttaaagagagtaaaggtttggtcttgaaacgagacgagactaaagtccgagatgagtatgaaggaggtactgtctggtgggagatggaaaccgactccacaggatatagaacattcaaactcac

SEQ ID NO: 87000 - DNA, 793 bp, Arabidopsis thaliana columbia
caaactcgcaagttactctctcattcctcatcgtaccctctttactcaggtattttctgaagttaaaagatagaaataatgtctgaaaaggtgggagcgatgggtggtaacaagggtggagcattcgacgatggtgtttttgatggtgtgaagaaagtaattgttggaaaagacttcaacaatgtaacttatatcaaggttgaatacgaaaaggacggaaaattcgaaattcgtgaacacgggactaatcgcgggcagctaaaagagttttcagtggattatcctaatgaacatattacatcggtcgagggaacaatccatggttaccttccgcccctgaccggtttacgacatcaaaaggaagaacctcccctgtttttgggaatgtggtcggtagtaaatttgtgttcgaagaaacaagttttaaacttgttggggttttgtggtcgatccggtgaagctattgatgctcttggtgcacattttgcccctcttcctgctcccactccagctcccgcgcccgcgcccgcgcccgctccagctccagctccctcgcccgctcccgcttctgcgcccgttccagctcccgcacccacgcccgctccagctccagctcctcctaacaaagtggaagctctaggaggaaatggtggaacaatatttgacgatggtgctttcgatcatgtaagaaaggtttatattggtcaaggtgattctggtgtagcttatgtgaagttcgaatacagaaaagatgggaaaagagagacacgggagcatggaaaaatgacagtgt

SEQ ID NO: 87001 - DNA, 543 bp, Arabidopsis thaliana columbia
attccttgctatcactatccacaaactcgcaagttactctctcattcctcatcgtaccctctttactcaggtattttctgaagttaaaagatagaaataatgtctgaaaaggtgggagcgatgggtggtaacaagggtggagcattcgacgatggtgtttttgatggtgtgaagaaagtaattgttggaaaagacttcaacaatgtaacttatatcaaggttgaatacgaaaaggacggaaaattcgaaattcgtgaacacgggactaatcgcgggcagctaaaagagttttcagtggattatccgaatgaatatatcacagccgttggtggaagctacgacactgttttcggttacggatcagcgttgatcaagtcattactcttcaaaacctcttatggaagaacctctccaatccttggtcacacgacattactatggaatccagctgggaaagaattcatgctcgagtccaaatatggaggaaagcttcttggtttccatggacgttctggtgaagctcttgatgccattggacctcac

SEQ ID NO: 87002 - DNA, 634 bp, Arabidopsis thaliana columbia
tcggaacatatgagtttgatgttgagtctgatgattacatgacatcaattggagtttctgtcgacaatgtctgtggttttaagagtgaaatcgtcacttctcttgtcttcaagacctttaagggaataacctcacaaccttttggaatggagactgagaagaaattggaacttaaagacggtaaaggaggaaaacttgtgggattccatgggaaagctagtgatgttctttatgctcttggcgcttatttcgctccaacaacaaattcaactacgccatcgactccttctacatctaagaaactacaagcaagaggtggaaatggaggagcttcttgggatgatggtgtttttgatggtgttagaaagatacttgtaggtcaaggaaacgatggtgtagctttcgttacgtttgagtacaacaaaggctctcaagcaatcctcggtgatcgtcatgggaagcaaacattacttggaactgaaacgtttgagcttgattatccaagtgagtacatcacttcggtagaaggttactatgacaaaattttcggagttgaagctgaagtggtgacgagtctaacgttcaagactaacaagagaacgtctcagccgtttggaatgactgctggggaaca

SEQ ID NO: 87003 - DNA, 724 bp, Arabidopsis thaliana columbia
  unsure (1)..(724): unsure at all n locations
nnnnnnnnnnnnnnnnnnnnnnnnnnnnnnnnnnnnnnnnnnnnnnnnnnnnnnnnnnnnnnnnnnnnnnnnnnnnnnnnnnnccacgcgtccgcccacgcgtccgcccacgcgtccgcggacgcgtgggcaaaggctctcaagcaatcctcggtgatggtcatgggaagaaaacattacttggaactgaaacgtctgagcttgattatccaagtgagtacatcacttcggtagaaggttactatgacaaaattttcggagttgaagctgaagtggtgacgagtctaacgttcaagactaacaagagaacgtctcagccgtttggaatgactgctggggaacatttcgagcttaacgaggacggttacaagatcgttgggttccatggcaaagctggtgatttggttcatcagatcggagtccatgccgtgcccattttcaccaattacagatgtgttttctaggtttctttctctgatgattccgttaaataaggtccatggaccatggttatggatttgtgtgtgtttcactgttttagtgtcaatgctttatgcgatcatgtgatgttatgccttcatggtatttgatcactaataaaggatttttcttgtcaatctcaaaaacaaaggcaaccgctctagaggatccaagcttacgtacgcnnnnnnnnnnnnnnnnnnnnnnnnnnnnnnnnnnnnnnnnnnnnctaatcagaatatct

SEQ ID NO: 87004 - DNA, 1640 bp, Arabidopsis thaliana columbia
accaccacaacctcgcaagtaactctcatcctcgctgtactgatcagaagaaaaaactctgaaagatgtcgaccggaggaccccaaaaattagaagcacaaggaggaaaagaaggcaaagaatgggatgatggagccgaacacgatggtgtgacgaagatatacgtagcagctggtggtcttggaattgaacaaatcagattcgattatgtaaagaacggacaaccaaaggaaggatcttttcatggtgtgaagggtagaagtactatttctacgattgagattagccatccagccgagtatcttatttccatggagggttggtacgactctaccaatatcattcaaggaattcagtttaaatccaacaaacacacttcccagtactttggatatgaattttttggagatggtacacaattttcacttcaagttaatgacaacaagatcattggctttcatgggtttgctgattctcatctcaattctgttggggcgtattttgcacccatctcttcctccttgactactactcccaacaaagtggaagctcaaggaggaaatggtggagaaacattcgacgatggtgtttttgatcatgtaagaaaggtttatgttggtcaaggtgagtccggtgtagcttatgtcaaattcgaatatgagaaagatgggaaaagagaaacaagagaccatgggaaaatgacattgttaggaacagaggagtttgaggttgattcagatgattacatcacatcaattgaagtttctgtcgacaaagtctttggttataacagcgaaatcgtcactgctcttgtgttcaagactagtaagggtacaacctcaccgccttttggaatggtgactgagaagaaattcgaacttaaagatggtaacggaggaaaacttgccggattccatgggaaagctagtgatgttctttatgctcttggtgcctatttcgctccatcgacaacttcgactactccatctactaccaagaagctacaagcaagaggtggtaatggaggagcttcttgggatgatggtgtttttgatggtgttagaaagatacttgttggtcaaggaaacgatggtgtagcttttgtcacgtttgagtacaacaaaggctctcaagcaatcctcggtgatggtcatgggaagaaaacattacttggaactgaaacgtttgagcttgattatccaagtgagtacatcacttcagtggaaggttactatgataaaattttcggtgttgaagctgaagtggtgacgagtctaatgttcaagactaacaagagaacgtctcagccgtttggaatgactgctggggaacatttcgagcttaaagaagacggttacaaggtcgttgggttccatggaaaagcgggtgatttggttcatcagatcggagtccatatcgtgcccattttcaccaattacagagttgctatttaggtttttttcttctgatgattccgtaaaataaggtccatggaccatgcatgcttatggattagggtgtgtgttttagcgtcaatgcttctatgcgaacatgtaatgttctgcattcatgtgtcttatcatcacttgtcgattttaataaaggatgtttcttttttatctcaaaaaaaaaaaaaaaaa

SEQ ID NO: 87005 - DNA, 419 bp, Arabidopsis thaliana columbia
cggacgcgtgggcgcgactctactctactctactctactcaaaaccaatcaaaaacccaactttgaatcacaaccagtagaatcacgagtcatgcaattcctccagaactctcgtagaatcgctacggtcttaaaacccattgttaccaccgagactaatctgagattcttctcctctgcttctcaaatctcaagatccttccaatggcggagtcaagcatcttcgtcttcctctgtattaaaagggattgatagtagtagtcacttgtcctctatgagcttgttgatccccagatcgagctttacgtctgaagcggaaaagcttgcgggaaatcctacagtgactgtgaaggatttgcatgataaaatgcttaattctgtaaatgtcaagagatcaatgcctccaaatgcgtggttgt

SEQ ID NO: 87006 - DNA, 1150 bp, Arabidopsis thaliana columbia
  unsure (1)..(1150): unsure at all n locations
atgatactccnnnnnnnnnnnnnnnnnnnnnnnnnnnnnnnnnnnnnnnnnnnnnnnnnnnnnnnnnnnnnnnnnnnnnnccacgcgtccgtgggaaaggacttttcaccaaagaaatagacgaggccttgataaatggtcatattgacatagctgtgcactcaatgaaagatgtcccaacttacttaccagaaaaaacgattttaccttgtaaccttccgcgtgaggatgttcgagatgcggtggggtgtctaactgcagccacgttagctgagctaacagctggaagcgttgtgggaacagcttctctcaggagaaaatcgcagattctccacaaatatcctgcattacatgttgaggaaaacttcaggggtaatgtgcagacaagactatcaaaactacaaggaggaaaggtccaagcaactctattagcactagctggtcttaagagattgagtatgacagagaatgtcgcatctatcttatctctcgatgaaatgcttccagctgttgctcaaggagctattggaattgcctgtagaactgatgatgataaaatggcaacttacttagcctcactgaaccacgaggaaacaagactagcgatttcatgcgagagagcttttcttgaaacgctagatggctcatgccgtactcctattgctggatacgcatccaaggacgaagaaggcaactgcattttcagaggattggttgcttcccctgaccgtactaaagttcttgagacctcaagaaaaggtccatacgtgtatgaagacatggtgaagatgggaaaagacgcggggcaagaattgctatctcgtgctggtcctggcttcttcggcaactgagccattcgaagaagaggaggaagagatgtgacacggacaaagtctagtgtttaggagtgattcaacatcttgaagtcccgtttcttcctccgaactgttgtaacttttttgattttgagagaaacatgaccttttgtttattgattgttttgttgtatttagattaaattcatcttgcaattgtacccctttttttctgtcccacgatgaaactaggacccaagaaattagagagacaaaataaaatccaaaaaaaaaaaaaaagggcggccgctcgcgatctagatcttgacgcgtgg

SEQ ID NO: 87007 - DNA, 413 bp, Arabidopsis thaliana columbia
  unsure (1)..(413): unsure at all n locations
agaagagtttacttgttctggaaccctaaatctcgaatctggtaactcggatccgataaatcgttccagagatctgttacttctctattcaaggatctgttatcggtgcgaggatctacggattcttctgttcgcgcataatcggaaatggcagataacaattcaccacctggctctgtagaacagaaagcagatcaaattgttgaagctaatccattggtgaaggatgatacttcgctggaaaccatagttcgaaggttccaggattcaatgtcagaggcaaagactcataagttctgggagactcaaacctgttggggcagtttaagggatatttgggggtacggagtttgccctgaagggcccgtttgagccttcaaactcccttatttttnggntnaacaaangncgga

SEQ ID NO: 87008 - DNA, 3035 bp, Arabidopsis thaliana columbia
  unsure (1)..(3035): unsure at all n locations
tcaaacaccttttgagagcggttattttttctctatcaactaatacagtaaccttacgggtgtttatttgtatagatctctgtggttttcttggccaactctagtgagatctttttcgtttctcgaattcgatgaaaatgagacgaggcaattcaagtaacgaccatgaacttgggattctacgaggagctaactcggacaccaactcggacacggagagcatcgctagcgaccgtggtgcctttagcggtccgcttggccggcctaaacgtgcgtccaagaaaaacgcaagattcgccgacgatcttcccaagagaagcaatagtgttgctggcggccgtggtgatgacgatgagtacgtggagatcacgctagacatcagggacgactcggtggccgtccatagtgtccaacaagcagctggaggtggaggccacctggaggacccggagctagcccttcttacgaagaagactctcgagagcagcctcaacaacaccacctccttatctttcttccgaagcacctcctcacgcatcaagaacgcctcccgcgagctccgccgcgtgttctctagacgtccctccccggccgtgcggcggtttgaccgcacgagctccgcggccatccacgcactcaaaggtctcaagttcattgccaccaagacggccgcatggccggccgtcgaccaacgtttcgataaactctccgctgattccaacggcctcttactctctgccaagttttgggaatgcttaggaatgaataaggaatctaaagacttcgctgaccagctctttagagcattagctcgccggaataacgtctccggcgatgcaatcacaaaggaacagcttaggatattctgggaacagatctcagacgaaagctttgatgccaaactccaagtcttttttgacatggtggacaaagatgaagatgggcgagtaacagaagaagaggtggctgagattattagtcttagtgcttctgcaaacaagctctcaaatattcaaaagcaagccaaagaatatgcggcactgataatggaagagttggacccagacaatgctgggtttattatgatcgaaaacttggaaatgttgctattacaagcaccgaaccagtcggtgcggatgggagacagcaggatacttagtcagatgttaagtcagaagcttagaccggcaaaagagagcaaccctttattgagatggtcggagaaaatcaaatatttcatacttgataattggcagagattatggatcatgatgttatggcttggcatctgtggtggcctctttacttataaattcattcagtacaagaacaaagctgcctatggtgtgatgggttattgtgtttgtgtcgccaaaggaggcgccgagactctcaaattcaacatggctctcatattgttgcctgtttgtcgaaacaccatcacttggcttaggaacaagaccaagcttggtactgtcgttccttttgatgatagtcttaacttccacaaggttattgcaagcgggatagtcgtcggtgttttgctccatgcgggtgcccatttaacgtgtgattttccacgtttaattgccgcggatgaggacacctatgagccgatggaaaaatactttggggatcaaccgactagctactggtggtttgtgaaaggagtggaaggatggactggcattgtgatggttgtgctaatggctatagcctttacactcgctacgccttggttccgacgtaacaagcttaacttacctaacttcctcaagaagcttaccggtttcaacgccttttggtacacccaccatttgttcatcattgtttatgctcttctcattgtccatggtatcaagctctacctcacaaagatttggtatcagaagacgacatggatgtatcttgctgtacccatccttctatatgcatctgagaggctgctccgtgctttcagatcaagcatcaaaccggttaagatgatcaaggtggctgtttaccccgggaacgtgttgtctctacacatgacgaagccacaaggattcaaatacaaaagtggacagttcatgttggtgaactgccgagccgtatctccattcgaatggcatcctttctcaatcacatcagctcccggagacgattacctgagcgtacatatccgcactctcggtgactggacacgtaagctcaggaccgttttctccgaggtttgcaaacctcctaccgccggtaaaagcggtcttctccgagcagacggaggagatggaaacctcccgttcccgaaggtccttatcgacggtccatacggtgctcccgcacaagactacaagaaatacgacgtggtactcctcgtaggtctcggcattggagccacgcctatgatcagtatccttaaggacatcatcaacaacatgaaaggtcctgaccgcgacagcgacattgagaacaataacagtaacaacaatagtaaagggtttaagacaaggaaagcttatttctactgggtgactagggaacaaggatcattcgagtggttcaagggaataatggacgagatttcggagttagacgaggaaggaatcatcgagcttcacaattattgcacgagtgtgtacgaggaaggtgatgcaagagtggctctcattgccatgcttcagtcgttgcaacacgctaagaacggtgtggatgttgtgtcgggtacacgtgtcaagtcccacttcgctaaacctaactggagacaagtctacaagaagatcgctgttcaacatcccggcaaaagaataggagtcttctactgtggaatgccaggaatgataaaggaattaaaaaatctagctttggatttttctcgaaagacaactaccaagtttgacttccacaaagagaacttctagattaattatatacgttgtagaaaaataaaacaagaaacaactatacaaataaatatttattttaaattcttttcattttatgtaaaattatctgagttatctttttttgttnnnnnnnnnnnnnnnnnnnnnnnnnnn

SEQ ID NO: 87009 - DNA, 538 bp, Arabidopsis thaliana columbia
  unsure (1)..(538): unsure at all n locations
atgatattgccgnnnnnnnnnnnnnnnnnnnnnnnnnnnnnnnnnnnnnnnnnnnnnnnnnnnnnnnnnnnnnnnnnnnnnnccacgcgtccgtgcgagttttgatggaagcggttagaacttcaggtctctctactatctctgacacattggacgaaacagcatacggcgaggggaaagagcaagctgacagagaaattactagtgagatggaggctttggctgctgcttaccatgtcttcagaaatgttgctcagcccttcttcaattacatagaggaagaggacttgcttaggtttatgattaaggaagaggttgatcttgtgttcccattgtttgatggtgccgctgagaccgggagaattacaagaaaagctttcacagaatgggtggttaaggtgtacacgagccggagagctttagcgcattccttaaacgacacagaaacagcggttaagcagttaaacaaacttgtgacagcaatcttgatggtggttaccggtgtcatttggctgctccttctagaagtagcaacgac

SEQ ID NO: 87010 - DNA, 458 bp, Arabidopsis thaliana columbia
cttatcgtttcccagaatttgggtcgccattgattcgcacctcgcaagatggaaagcactagatcagatccagagcttgatgatgactttagtgaaatctacaaggagtatactggtcctgcaagtgctgtgaccaacaacaatatccaagacaaagacaaacctgtcaaacaacgttctgaagaaagatgtgatgaagaagaagagcaacttcctgatcccaactctgtaccaactgatttcactagccgtgaagctaaggtttgggaggctaaatccaaagctactgagaggaattggaagaagaggaaagaggaagagatgatctgtaaaatttgtggcgagtctggtcattttactcagggatgtccatctacacttggtgccaataggaagtctcaagaattctttgaaagggtaccagctagggacaataatgtgagagttttgtttactga

SEQ ID NO: 87011 - DNA, 496 bp, Arabidopsis thaliana columbia
  unsure (1)..(496): unsure at all n locations
ctacaatacgactcactttagggaaagctcgtacgcctgcaggtaccggtccggaattcccgggtcgacccacgcgtccgatctacacttggtgccaataggaagtctcaagaattctttgaaagggtaccagctagggacaataatgtgagagttttgtttactgagaaagttatggaaagtattgaaagggagaccagctgcaagattaaattggatgagaagttcataattgttagtggcaaggacagattgatcttgaggaaaggtgttgatgctgttcacaaggttaaggaggatggtgagatgaaaagttcttctgtttctcacaggagcagatccaggtcacctaggcgaacttctgttggaccatcacgtgctcgaaactctgaacctcaaaggcagcagctgccatcacatggttcgtcaagtttcccagagcgctctggaaggcaagataagtttgtggataatcgnttccgcgaagagactcgtg

SEQ ID NO: 87012 - DNA, 473 bp, Arabidopsis thaliana columbia
ctttatcggttttttgctttggtgctcgacgactctgattcgaaatctctctctctcggaaaagctgaatctggatcatcaaagtaagtctccatcgttacttttatctcttcgtgaagattctttaatcccatttatttgttcatatttgcaatcttcgaaaattcctgaagctaaacaaaaatgggatatagcgacaaagcactgaaattggacttgatcaacagtgtttctctgtaattagagcgaaatttggaaaaaagatgacatttttctatgatttgcgatgtctgattcattcattcccacatgtttaggttctcttgtgtaaagtttgttcctttcttatgtcttcttatccaatttttgcaggtatcattttaaagtttgatcatttcttctttgggtatatagggtagtattcaaaatggcagcttcagaaacagttctacgtgttccattaggatctgtat

SEQ ID NO: 87013 - DNA, 401 bp, Arabidopsis thaliana columbia
  unsure (1)..(401): unsure at all n locations
actttaccggattttggttttggtgctcgacgactctgagtcgaaatctctctctctcggaaaagctgaatctggatcatcaaagtatcattttaaagtttgatcatttcttctttgggtatatagggtagtattcaaaatggcagcttcagaaacagttctacgtgttccattaggatctgtatctcaatcttgctatctagcttccttctttgttaactcaacaccaaaacctctcgtttaaacccgttagtagaaacagaaagaccgtccggtgtacaaactcgcatgaggtctcaagcgtaccaaaacattcatttcatangtcaaactctgttttgaaaggtaaaaagtttgtttccacgatatgcaaatgccaaaaacatgatgttgaggagagt

SEQ ID NO: 87014 - DNA, 2579 bp, Arabidopsis thaliana columbia
cctcgatgacgacggtatccataagctagatatcgaattcgcggccgccttcccaacttctctcctctctcttcacattattatattctctctggttcttgcaatccaatccaatctctctctctctctctctctcagaaactaaactgaaatattgcagagttttgaatacacggccatgaaccaatcaccatctcttatcgaacagggtatttctcaacagcatttgaagactttgtcttgtgccaatgttcttactttggcttaccagagtcttggagtgatctatggtgatcttagtacatcgccactctatgtttataagaccactttctctgggaaactaagtcttcatgaagacgatgaagagatctttggagtgttctctttcatcttctggacatttacactcattgctctttttaaatacgttttcattgttctctcagcagatgacaatggagaaggtggaacatttgcgttgtactcgcttctttgtagatatgccaagctaagcattttaccaaatcatcaagaaatggatgagaaactatcaacatatgcaacgggaagcccaggagagactcggcaaagcgcagcggttaaatcattctttgagaagcatccgaaatctcaaaagtgtttgttgctctttgttcttttagggacatgtatggctattggtgatagtgtcctcactccaacaatctcagttctttcagctgtttctggagtcaaactcaagattcccaaccttcacgagaattatgttgtcatcatcgcatgtatcatcttggtggcgatattctcagtccagcgttatggtacgcatagagtcgccttcattttcgctccaatctccactgcttggcttctctccatcagtagcattggagtttacaacactataaaatggaacccgcgtatagtctctgcgctttcgcctgtttacatgtataagttccttagaagcaccggtgttgaagggtgggtttcacttggaggtgttgttctttcaatcacaggtgttgagactatgtttgctgacttaggtcacttctcttctctgtccataaaggtggctttctcgttctttgtatacccgtgtttgatacttgcatacatgggtgaggctgcgtttctctctaaacaccatgaagatattcagcaaagcttctacaaggcgatacccgagcctgtgttctggccagtgttcattgtggctacatttgcagctgtggtgggaagccaagctgtcatatccgcaacgttttcgatcataagtcaatgttgtgcacttgattgctttcctcgggtcaagatcattcacacttcaagcaaaatacatggacaaatctatatccctgaagttaactggatgctgatgtgtctttgcctggcggtcactatcgggttaagagacactaatatgatgggtcatgcatatggacttgctgtgacctctgtgatgcttgtgactacatgtttgatgactttagtgatgacaattgtctggaagcaaagaatcattacagttctcgcattcgttgtctttttcggttccatcgagcttctctatttctcgtcatgcgtctacaaagtacctgaaggaggttggattccgattctcctctctttgacattcatggcggtaatgtacatatggaactacggaactacaaagaaacatgaattcgacgttgagaacaaggtctcgatggaccggatagtttctctaggaccaagcataggaatggttagagttccaggaataggactggtctattcgaatcttgtgacgggagttccagctgttttcggacatttcgtgacgaatctgcctgcgtttcacaagattctagtgtttgtatgtgtgaagtcagttcaggttccttatgttggagaagaagagaggtttgtgataagcagagtaggcccaaaagagtatggaatgtttagaagtgtggttaggtatggatacagagatgttcctagagaaatgtatgacttcgaaagccggttagtatctgcaatagtcgaattcgttgaaaccgaaccgggacttgaagaagaagaaatgtcgagtgttcggagaaagaaagaggaatgtatggagataatggaagcgaaagaagctggagtagcgtatatactgggacattcatacgcaaaggcgaagcaatcatcgtcggtgttgaagaaactagcagtgaatgttgtatttgcgttcatgagcacgaattgcagaggaacagatgttgtgcttaatgttcctcacacttctctgcttgaagttggaatggtttattacgtctaaacagagtaatacttagctttagcataagatcagtacagtttttagtagtagtacagtatataagagagctctaacttcattttcagttgttttagcagagaagtttaatgtgtaaatatacttacagttaatgaagggaaattaagaaatttaaaaaaaaaaaaaaaaaaaaaaaaaaaaaaaaaaaaaaaaaaaaaagggcggccgctctagaggatccaagcttacgtacgcgtgcaggcgacgtcataactcttctaga

SEQ ID NO: 87015 - DNA, 421 bp, Arabidopsis thaliana columbia
cccacgcgtccgaaaaggctcatctttgcgactgctcccgtgttcttcgtctctctgtcaatggctcgcctcctcagatgtctgagaagaagtttcatatttagttcatcgacttcgattgcgtacagaaaccctagaatatgtgttcagtcaaatcaaagctatattttcttaagcagccgcaagtttctcagctcggggagttacgtttcagaaatgcggagaacagctttcgagggtaacattctcagattaattcgtttggagattcagtccgagcttgatcactcgcctattcttcagcctgaagagagttttggtccattcacggtggatgagcgtccgggggagcagtggattagcttgagaagaaaatttggggagaaggaagatattaagattgaagcaaccatgtttgatg

SEQ ID NO: 87016 - DNA, 403 bp, Arabidopsis thaliana columbia
atcatttcaactctgaacactctatgactaaaagaaaaaatcattcacctcgataccagaaagaagaaaagtcatcgcttttgggaaatttgatgaacaaagaccaaatcttaaaactcgaattcttctggttcctaaaaagtggctgtcaagaagagtgagacatgcatcaaactctctcttctcctgccatggcgtcaaacctccggaaaccctatttcctcaggtacttaactattcttccccaatcgatgatggtcgaaagctgaaacctttttctgcaaatcgattaaccgacaagaaaatccagcccaacccacccactttgttttgtttggatgataaaaatgtcggaaaagagtttgctttcttcaaaattcctcttttacacgataactgtttc

SEQ ID NO: 87017 - DNA, 547 bp, Arabidopsis thaliana columbia
  unsure (1)..(547): unsure at all n locations
tgatacttcnnnnnnnnnnnnnnnnnnnnnnnnnnnnnnnnnnnnnnnnnnnnnnnnnnnnnnnnnnnnnnnnnnnnnnccacgcgtccggcgtgtagcatatacaaggacatgaaagaaaaagacgtgacccctgacgaggtgttttttagtgcattgattgatgttgcaggacatgcaaaaatgttagacgaggcttttggcattcttcaggatgcaaaatctcaagggatacgtcttggaactatatcatatagctcactgatgggagcttgttgtaacgcgaaagattggaagaaagcactggagctctatgaaaaaatcaagtcaatcaaacttagaccaacaatttcaacaatgaatgcccttataactgctttgtgtgaaggtaatcaactgcccaaggctatggaatatcttgatgagataaagactttagggttaaaaccaaatactatcacttactctatgctcatgctggcaagtgagagaaaggatgactttgaggtaagctttaagctcctttctcaagcaaaaggagatggag

SEQ ID NO: 87018 - DNA, 602 bp, Arabidopsis thaliana columbia
  unsure (1)..(602): unsure at all n locations
tttaaaacacaatccatcaccaagtcatcagataaacaagaaacagagagagataaagagatcacacgtgggaatccaacttaccaattgcaatggcgtcaatgaccatgacatcttcatttctccctaccgtctcaaaccttccggcaaacatctccagcaacagcagacgaagcctcacggtggtcaaagcctccgggagtgaaaacacaaccagcttggagaacaagaagcaagaacagagcatgaagatgaggagggatcttgtcttcacagctgcagctgcagctgtgtgctccttagctaaggtggcaatggcagacgatgagccaaagagaggaacagaagctgccaagaagaagtatgctccagtctgtgtcacaatgcctaccgccaagatatgccgtaactgagtttgctatttaaccagcaactgtatctatgtcgtataactattctcagtgtggtttgtaaggatcatatttgattaaatctataaaacccgttgttaatgtattgaatcaacgaaaggatcccaaaccctttttaacttccaatctgganaaacttctctttnnnnnnnnnnnnnnnnnnnnnnnnnn

SEQ ID NO: 87019 - DNA, 533 bp, Arabidopsis thaliana columbia
caaggtctctacgactcactatagggaaagctggcacgcctgcaggtaccggtccggaattcccgggtcgacccacgcgtgcgagagagataaagagatcacacgtgggaatccaacttaccaattgcaatggcgtcaatgaccatgacatcttcatttctccctaccgtctcaaaccttccggcaaacatctccagcaacagcagacgaagcctcacggtggtcaaagcctccgggagtgaaaacacaaccagcttggagaacaagaagcaagaacagagcatgaagatgaggagggatcttgtcttcacagctgcagctgcagctgtgtgctccttagctaaggtggcaatggcagacgatgagccaaagagaggaacagaagctgccaagaagaagtatgctccagtctgtgtcacaatgcctaccgccaagatatgccgtaactgagtttgctatttaaccaggaactgggtgtatggggggcgagcacggtcgattgggagaggggcgcgggggggccttggatggct

SEQ ID NO: 87020 - DNA, 1323 bp, Arabidopsis thaliana columbia
caaaaacttcaattaaccagaaaaggtcagattctccgccgcctcacacgacgggcaacttcagttcctgccgtcgcgttagatcccgccgtcaatcggtcatggcgaccggtaaaacctcttccgccgcgaatcttttcactggctcgacgcgttttgatttatcatccgctgattcgcctccttcaaaactctctctctcctccgatcagctcaaccactgccaccaagctctcggcgttttccggggaaagatccaaaatcctgactcgatcgctcatgagtttactggtttacaggctaataggatgtggccatcggagctgctgctaaacagtacagtggctatgaacagtgtcaatgttgagaaaaacagatacagtgatgttgttccatttgacaagaacaggattgttctgaatccatgtaaagactcatctgcaaaaggatatgtgaatgcaagcttaattaagacgtcggagtctgagagtatttctcagttcatagctacgcaaggtcctttaccacacacgatggaggccttctgggagatggttattcagcagcattgcccaatcatagtgatgctcactcgattggttgataataataggactgttaaatgcggggactattttcaagacgaagatggacctagagaatttggcaacatatctcttacaacaaagtggataaagactactgacacttcattgatgttacggaatcttgaggttaactacaaggagacagaggatcagcccatgtccgttttgcatattcagtatccagaatggcctgatcatggagttcccaaggatacagtggctgtccgtgaaattctaaaaagactatatcaagtaccacctagtctcggcccaatcattgtgcactgcagtgcaggtataggaagaactggaacatactgtgcgatacataacacaatccaaagaattcttgctggcgatatgtctgcgttggatcttgctaaaaccgtggcactatttcgcaagcaacgcattggcatggttcaaaccatggatcaatacttcttttgctacaatgctattgttgatgaattagaagatctaaccgcggggacaaatgctggaacgagttcctaaagctgaagggttcgtctgcttagagagggaaaaaggcttctacccaactatatcaatttcgtaatgtgattcaagaagaaacccgcgtgaatctctacattcaagacttttcaatttctgtaaatttccatatctgataggtttcattgttacttttgttgtggaaatgctgattaaaaagcaaatgaagtcgccaatg

SEQ ID NO: 87021 - DNA, 416 bp, Arabidopsis thaliana columbia
ctaattttttagaaacactggagcgactttcttctagagaagccgatgggagagctaatgcctctgcgggtgaaaaagaggcccataaattactacaacccgcagacaaaactttaaggaccatggctattgaatttgctgaataccaggtctgtgtagatttgtttatcacaactcaagcgtatgttgacatggcttcaatttctgagatcccaagaacaactggaggacaggtttattgttattaccctttctcagctctttcagaccccccaaagttatacaacgatcttagatggaatatcacgaggccccaaggttttgaggctgtcatgcgagtcagatgcagtcagggtattcaagtgcaagaatactcagggaacttctgtaagcgcataccaactgacatcgatcta

SEQ ID NO: 87022 - DNA, 394 bp, Arabidopsis thaliana columbia
  unsure (1)..(394): unsure at all n locations
gggagctagctacgcctgcaggtaccggtccggaattcccgggtcgacccacgcgtgcggccttctgttggcattggagcactttcttctagagaagccgatgggagagctaatgcctctgcgggtgaaaaagaggcccataaattactacaaccccgcagacaaaactttaaggaccatggctattgaactcgctgaatactattttttggggagtgtgggaanccncaacccccgccttccaaaaaaaacacttccctcccctttttccccactttccccttttccattccgatcacccccaaattcccccatcctcccacccattccgaattttccctccaccctcctccccctttttttccccggtctctcccccttttgcgttctgcct

SEQ ID NO: 87023 - DNA, 1004 bp, Arabidopsis thaliana columbia
tgatacttcaggtctctacgactcactattgggaaagctggtccgcctgcaggtaccggtccggaattcccgggtcgacccacgcgtccgggctgaaatcacaaaggagtcaagcactggaagtggggcttggtctacccaattggtggaatcccagaacgagaagaaagcacaagtgtcctcaattaaatggaaagtctgcaatgtgacagctggaccagactacatcccttgccttgacaattggcaagctatcagaaagcttcattcgacaaagcattatgaacatcgtgagaggcattgtcccgaggagtctccacgctgccttgtttctcttcccgaagggtataagcgatccatcaagtggcctaagagcagagaaaagatctggtacaccaatattccacacaccaagcttgcagaagtcaagggacatcaaaactgggtgaagatgagtggtgaatacttaacattccctggtggaggtactcaattcaagaatggtgctcttcactacattgatttcctccaagagtcatatcctgatattgcttggggaaataggactcgtgttatattggatgttgggtgtggggttgctagctttgggggatatctttttgacagagatgtactcgctttgtcatttgcacccaaagacgaacacgaggcacaggtgcaatttgctctggaacgtggtattcctgcaatgtcaatgttatgggaaccaagagattaccttttccaggatctgtttttgaccttatccattgtgctcgttgtagagttccttggcatatcgaaggtggtaaactacttttggagttgaaccgtgcattgaggccgggtggtttctttgtctggtcagcgactccagtctataggaagactgaggaagatgttggcatatggaaagctatgtcgaagctaacaaaggcaatgtgctgggaactgatgacgattaagaaagatgaactgaatgaagttggtgctgccatttacca

SEQ ID NO: 87024 - DNA, 445 bp, Arabidopsis thaliana columbia
ccctcgcgtccggtgaagaatgggcactcgaggctttggtttctgggtcagtatgtgcttgagcttgctcttacggagtttttcttgcagaggtatccgagggaatctccgggacctatgagggagagagtgtttgctttgattgggaagaggtatctcccgaaatggattaaagcagcgagcttgcaaaatctcatctttccttatgatgatatggataagttgattaggaaagagcgtgagccaccggttaaatctgtgttctgggctttgtttggtgccatctatctatgttttgggatgccggaagtgtatcgtgtactttttgaggtgtttgggatggatccagatgctgatgagtgtcagcctcgaagcaggagacagctcgaggatgtagattatgtttctggtgaatttgaagggaaaaagctaggttggcaagata

SEQ ID NO: 87025 - DNA, 1326 bp, Arabidopsis thaliana columbia
  unsure (1)..(1326): unsure at all n locations
nnnnnnnnnnnnnnnnnnnnnnnnnncnnnnnnnnnnnnnnnnnnnnnnnnnnnnnnnnnnnnnnnnnnnnnnccacgcgtgcgcccacgcgttcgtccacgcgtccgaaaaaagacaaaaatatatataaaaaaaagaaaaaaaaaagaaaaaaaaataattgtcttgctctgttctatttaacttttcttatatataaaaaaaatggcgaaaaatttactagcaatatgtctggtgtttatggttgcatcaagtgtggtttatgaagtgcaagggactttcttgttaaagctttacttgaggaggaagtttcccagacgttgtatcgactttgccccttatgctggcaaaggtatgttgatgctcgtgagcaaccttgaaggtggatgtcccgcaactagagagttcaaacaattcttttcaacgttcaagtcttacatgagctttatcagctcagcatcgatatccgcatcgaaaaacatcgatgtggagatgaatgggagatgtgaattgctttccaaggctatgtctgcattgactggaagcaaaagcagccaatcatcggagttaaaaatgaccatgttgtcaatgggaaagactttggttgagcagaagaggcaaggttcaaggatgatgtcattgaagcaaaagaaagagttggttgtggctatggtgaaatggactcgaatggttataacattcgtaaagagtgtcgccgagaagagaggaaagtcgattgatgaatcgtcttacggtcttgatgttgatgttaatgccagcattggaagttctagtggaagtgatggctcctcttcatccgataatgagagttcctcaaacaccaaatcacaaggcacgtccagcaaatccggaagtgaatcaacggctggaagcatcgaaactaacaccggatcaaaaactgaggctggtagcaaaagttcttcttcagccaagacaaaagaagtcagcggtggaagttctggtaacacttacaaagacactactggttcatcttcaggcgccagtccaagtggaagccccacgcccaccccttctacacctactccttctacacccactccttctacacccactccttctacgcccactccttctacacctaccccttctacgccagccccttcaactcctgctgctggcaaaacctctgagaaaggaagtgagagtgcttcgatgaaaaaagaatctaattctaagagtgaaagtgaaagtgctgctagcggaagtgtttccaagacaaaagaaaccaacaaaggaagctctggagacacttacaaagacactaccggtacatcttcgggaag

SEQ ID NO: 87026 - DNA, 535 bp, Arabidopsis thaliana columbia
  unsure (1)..(535): unsure at all n locations
nnnnnnnnnnnnnnnnnnnnnnnnnnnnnnnnnnnnnnnnnnnnnnnnnnnnnnnnnnnnnnnnnnnnnnnccacgcgtccgactacatccaatgacagcctaagacgtaccttatcactcattgggtctgaaagtttcagctttacgcaaggtcttaaggacacggatccacaacatttgcatctcgaagaaggcactgtctcaggaagacctccatcgctgagcgcgtgggtggttgacaagaacaaagagaaaggacgactcggtttaagtaaaccaaacggattgggccctattgatgaaacaggtcctgtctcagcctttgatagtctctccatcaatagcagcaccgagcatcctgcgtcttcctattcgcctcctactccgtctgctccactactgcctgaagacgcttcttggtttcataatgacgctagtactaacaaagcagagagcttctatgatcagacacgatatatggaactccccggtatcatgaagccatacacaaacccaccctttgttgggatttct

SEQ ID NO: 87027 - DNA, 2309 bp, Arabidopsis thaliana columbia
cacaccacatatactcatctatatctctgatttttcttcttcttctctctctcgccggaaaaagtaaatcaaaatgatcaccggcaaagacatgtacgatgttttagcggctatggtgccgctatacgttgctatgatattagcctatggttcggtacggtggtgggggatattcacaccggaccaatgttccggtataaaccggttcgttgcggttttcgcggttcctcttctctctttccatttcatctcctccaatgatccttatgcaatgaattaccacttcctcgctgctgattctcttcagaaagtcgttatcctcgccgcactctttctttggcaggcgtttagccgcagaggaagcctagaatggatgataacgctcttttcactatcaacactgcctaacacgttggtaatgggaatcccattgcttagggcgatgtacggagacttctccggtaacctaatggtgcagatcgtggtgcttcagagcatcatatggtatacattaatgctcttcttgtttgagttccgtggggctaagcttctcatctccgagcagttcccggagacggctggttcaattacttccttcagagttgactctgatgttatctctcttaatggccgtgaacccctccagaccgatgcggagataggagacgacggaaagctacacgtggtggttcgaagatcaagtgccgcctcatcaatgatctcttcattcaacaaatctcacggcggaggacttaactcctccatgataacgccgcgagcttcaaatctcaccggcgtagagatttactccgttcaatcgtcacgagagccgacgccgagagcttctagctttaatcagacagatttctacgcaatgtttaacgcaagcaaagctccaagccctcgtcacggttacactaatagctacggcggcgctggagctggtccaggtggagatgtttactcacttcagtcttctaaaggcgtgacgccgagaacgtcaaattttgatgaggaagttatgaagacggcgaagaaagcaggaagaggaggcagaagtatgagtggggaattatacaacaataatagtgttccgtcgtacccaccgccgaacccaatgttcacggggtcaacgagtggagcaagtggagtcaagaaaaaggaaagtggtggcggaggaagcggtggcggagtaggagtaggaggacaaaacaaggagatgaacatgttcgtgtggagttcgagtgcttctccggtgtcggaagccaacgcgaagaatgctatgaccagaggttcttccaccgatgtatccaccgaccctaaagtttctattcctcctcacgacaacctcgctactaaagcgatgcagaatctgatagagaacatgtcaccgggaagaaaagggcatgtggaaatggaccaagacggtaataacgggggaaagtcaccttacatgggcaaaaaaggtagcgacgtggaagacggcggtcccggtcctaggaaacagcagatgccgccggcgagtgtgatgacgagactaattctgataatggtttggagaaaactcattcgaaaccctaacacttactctagtctctttggccttgcttggtcccttgtctctttcaagtggaatataaagatgccaacgataatgagtggatcgatttcgatattatctgatgctggtcttggaatggctatgtttagtcttggtctatttatggcattgcaaccaaagattattgcgtgcggaaaatcagtagcagggtttgcgatggccgtaaggttcttgactggaccagccgtgatcgcagccacctcaatagcaattggtattcgaggtgatctcctccatatcgccatcgttcaggctgctcttcctcaaggaatcgttccttttgttttcgccaaagaatataacgtccatcctgatattctcagcactgcggttatattcggaatgctggttgctttgcctgtaacagtactctactacgttcttttggggctttaagttattatcaaaacgtatttgcaaataaaaggcgatacgacccaaaggtgattttttttcaaacgaaaaagaataattacaagaacgaaaaaagactaattccaggtcaggcttaggtgtatgggaccatgcaatgtcgcattaattaaattatagcatatgatagtcgaaaatttagataactttgtataattaattatatgcacatgcatgtacgtgactttgtagtttttgttacatttattaaatttttgggatgtgcaagtacaattatttactaaaaaaaaaaaaa

SEQ ID NO: 87028 - DNA, 1391 bp, Arabidopsis thaliana columbia
  unsure (1)..(1391): unsure at all n locations
acgactcactattgggaaagctggcacgcctgcaggtaccggtccggaattcccgggtcgacccacgcgtgcgcccacgcgtccgcaaccctctctctctctctctcagtacaacttatcatccatcaccatatatagagaatatgagcaaaacggaagcaatcagcttgaccaaaaggggaatgttgccgccaagtagttgcaatagcctaatggaccgctctgagtcccttaagagggacagtgtgatgggcaatggtgcagccaaagtgagaggaagcttggagcgcaagaaatcaaagagttttaaggaaggagatagttattcttcgtggctcataacggaggctcctgggagtatagccgccgtgaggagagagcaagtggcggcacaacaagcactaaggaaactaaagattgctcattacggtagatccaaatcaaccattaatttcacttcttccaaagtcgtccctcttcttaaccctaaccctaaccctcatcctcagagatgcagcttcctcacccccacttctgatcctatttacgtggcctaccatgatgaagaatggggagttccagttcatgatgacaagacgttgttcgaactgctgaccctaagcggcgcacaagtaggctccgattggacttcaaccttgagaaaacgccatgactataggaaggcctttatggagtttgaggcggaagtggttgccaaactcaccgagaaagaggtgaatgcaataagcatcggatacaaggtagggatgagcaaagtgaggaggtgttgttggaaaacgcttaaaaagatccttggggtccagaaagcgtttgtgtcattagagaaatacctttggggatttgtgaaccacaaaccaatctccacgaactacaagcttggacacaagattccggtcaagacatcgaagtcggagagcatcagcaaagacatggttcgtcgaggcttccggttcgtgggtcccactgtggttcactcattcatgcaagccgctggtcttacaaacgaccacttgatcacttgctgtcgccacgctccttgcactctccttgcaaccaatccctaattattaatttttattttaattgaaagtggtgtttttatttaactttcgagtgcaaaatgtaggtttaggagaaaagagattgcagttttttaaaattggcaatgtaagataaaccagctggtttgatttttttcttgtgtgtgaggtgtttaaaatcacatgtataatggtttttgatgtatgtgtggtgtggcaaattgaaatagtaattgattttcataaaaaaaaaaaaaaagnnnnnnnnnnnnnnnnnnnnnnnnnnnnnnnnnnnnnnnnnnnnnnnnnnnnnnnnnnnnnnnnnnnaac

SEQ ID NO: 87029 - DNA, 1331 bp, Arabidopsis thaliana columbia
  unsure (1)..(1331): unsure at all n locations
tanttcagntttcctgnactncctgggcnacccactgngtcctgaaaaatatgggtatccaagaaactgacccgttaacgcaattgagtttaccaccgggtttccgattttacccgaccgatgaagagcttatggttcaatatctctgtagaaaagcagctggttacgatttctctcttcagctcatcgccgaaatagatctttacaaattcgatccatgggttttaccaaataaagcattatttggagaaaaagaatggtatttttttagtcctagggatagaaaatatccaaacgggtcaagacctaaccgggttgccggatcgggttattggaaagctacgggtacggataaaataatctcgacggaaggacaaagagttggtattaaaaaagctttggtgttttacatccggaaaagctcctaaaggtactaaaaccaattggatcatgcatgagtatcgtctcattgaaccttctcgtagaaacggaagcactaagttggatgattgggttctatgtcgaatatacaagaagcaatcaagtgcacaaaaacaagtttacgataatggaatcgcgaatgctagagaattcagcaacaacggtacttcgtccacgacgtcgtcttcttctcactttgaagacgttcttgattcgtttcatcaagagatcgacaacagaaatttccagttttctaacccaaaccgcatctcgtcgctcagaccggacttaaccgaacagaaaaccgggttccacggtcttgcggatacttctaacttcgattgggctagttttgccggtaatgttgagcataataactcggtaccggaactcggaatgagtcatgttgttcctaatctcgagtacaactgtggctacctgaagacggaggaggaagtcgagagcagtcacgggtttaataactcgggcgagttagctcaaaagggttatggtgttgactcgtttgggtattcggggcaagttggtgggtttgggtttatgtgatgatgaaatgctgacccaataaaaataagtcgttaatttttgtcccgtggcaaatcttatatgtatttgaatttcaattcttttgggttaagagggagactcatagatttagatgtagatttgtaatctttcatgcatagaaaatttgacgaatagatttcgtaactttattttgttgctgtttggttatctttgtattggtataaatttagtggattgaaattgcctattaatataaaaaaaaaaaaaagatcatccagggcggccgctctagaggatccaagcttacgtacgcgtgcgatgcgacgtcatagctcttctatagt

SEQ ID NO: 87030 - DNA, 2389 bp, Arabidopsis thaliana columbia
  unsure (1)..(2389): unsure at all n locations
cccacgcgcattgaaatggaatcgcggcgagagaagaatccgatgacggaggaggaatctgatgggctaattgcggcgaggcggatccaacgattgtctttacacctatctccctccttgacgccgtcgccgtcgttaccgttggtgcagacggagacgtgttcggcgaggtcgaagaagctggatgtcaacggcgaagctttgtcgctgtatatgagaggaaaacatatagatatacaagagaaaattttcgactttttcaattcccgacccgatttgcagacgccgatcgagatctccaaggatgatcatcgggaattgtgtatgaatcagcttatagggcttgttagagaagctggggtaaggccgtttaggtatgttgctgatgatcctgagaagtatttcgcaatcatggaagctgttggaagtgttgatatgtcccttgggattaagatgggcgttcaatacagtctctggggaggctctgtgatcaatttagggactaagaagcatagagacaagtattttgatggcattgacaatcttgattacaccggttgctttgccatgactgaattacaccatgggtcaaatgtgcaaggtcttcagaccacggcgacattcgatccacttaaagacgaatttgtgatcgatacacctaatgatggagctatcaaatggtggattggaaatgctgcagttcatgggaagtttgccactgtttttgccaggcttatacttccaactcatgattccaaaggagtctcggatatgggtgttcacgccttcattgttccgataagggatatgaaaacacaccagacactccctggtgttgaaatccaagattgtggacataaagtgggacttaatggagtggataatggtgcgttgagattccgttctgtgagaataccccgtgataatcttctcaatcgttttggagatgtgtcccgagatgggacgtatacaagtagtttgccaacaatcaataaaagatttggtgcaacactcggtgagcttgtaggtggtcgagttggccttgcctatgcatctgttggcgtccttaaaatctctgcaacgattgccattcgttattctcttctaagacaacaattcgggcctccaaagcaacctgaggtcagtattctcgattaccagtctcaacaacacaagctcatgccgatgttagcctccacctatgcataccattttgcaactgtataccttgtggagaaatattcagagatgaagaagactcacgatgagcaattggttgctgatgtccatgcactctctgctgggctcaaatcttatgtgacgtcttacaccgccaaggcgctctcggtctgcagagaagcctgtggaggtcatggttacgcagctgttaaccgatttggaagcttgagaaatgatcatgacattttccaaacatttgaaggagacaacactgtacttctgcaacaggtggctgctgatttattgaagcgttataaagaaaagttccaaggcgggacattgacagttacatggagctacttgagagaatcaatgaacacttatttgtctcagccaaatcccgttacagcgcgttgggaaggtgaagatcatctaagagatcctaaattccaactagatgctttccggtatcgaacatcgcgattgctacaaaatgtggcagcgagattgcagaagcattcaaagactcttggtggtttcggggcatggaacagatgcttgaatcatcttttaacgcttgcagaatctcacattgaaacagtcattcttgccaagttcatcgaagctgttaaaaactgcccggacccaagtgcaaaagctgctctgaaactagcatgtgatctttacgcattggaccgaatctggaaagatataggaacgtaccgtaacgtggattatgtggcgcctaacaaagctaaggcgattcataaactgacagagtatttgagttttcaagtaaggaatgtggccaaggaactagtggatgcgttcgagctccctgatcatgttactcgagcaccaattgctatgcagtccgatgcttattcccagtatactcaagttgttggattctaaaaacacaagaacaaaacatatatcatcacaatgatcttttaattcgaagcaaaaaaaagatgaaaaacaatttacagggggtacaaaagaatctgcagtcctttgtatgtgtttttagttgttgtttgttttcacaggagaataaaaaaaaacagagtaataaaaatgtcatttttttcgtagaccnnnnnnnnnnnnnnnnnnnnnnnnnnnnnnnnnnnnnnnnnnnnnnnnnnnnnnnnnnnnnnnnnnnnnnnnnnnnnnnnnnnnnnnnnnnnnnnnnnnnnnnnnnnnn

SEQ ID NO: 87031 - DNA, 369 bp, Arabidopsis thaliana columbia
  unsure (1)..(369): unsure at all n locations
ggagagctgaaaagatatgcaattcactatgacaaaaatgggcgtccaagtggatcggctgaagttgtgtatatgagaagaagtgatgcaattcaagctatgaacatctcttaaagcaagacttcgcatcttgtcatgtacttttgtgttctttattcgtagtctctgactaaatatgtgccaaagtctggtttggtttaattacggttaggatggctctactctgctttcgttttcctcttttcttgtttcacactttcacagtcacttttggttattgaagttaaaagagatttagctgtaaatgagaaagctgttcttgttagttggttgaatctaataatcaatattaccggattttttntcntt

SEQ ID NO: 87032 - DNA, 502 bp, Arabidopsis thaliana columbia
  unsure (1)..(502): unsure at all n locations
ctatttccccccttcgttcatcaaatcctcaagagaaaaaaaaaatccccaaaagcttcctcaaaaccctaacacagatctctcgatcttcgccgatctgtcttttctcctaatctggtttagtttgattttattggattgaagatgtcagacgctttgaatatgactcttgatgaaattgtgaagaagagtaagagtgaaaggtctgcagctgcaaggtctggaggtaaaggagtttcccgtaagagtggacgtggacgtggtggacctaatggtgttgtaggagctggaagaggaggtggacctgtttcgtaggaggtcctctttgctgttaatacttccggccatcatcattccttcttccataaacaagtggcaagctccggaaatctttgatttggaactcttgtgccaccaaaattcccgaggcatttttaaaaacttnaagatgggttgatctttttaatngccttanntgcccttggggnggnntnattaaang

SEQ ID NO: 87033 - DNA, 1402 bp, Arabidopsis thaliana columbia
cagctctcctacgactcactattgggaaagctggtcacgcctgcaggtaccggtccggaattcccgggtcgacccacgcgtccgcggacgcgtgggcggacgcttccccccttcgttcatcaaatcctcaagagaaaaaaaaaatccccaaaagcttcctcaaaaccctaacacagatctctcgatcttctccgatctgtcttttctcctaatctggtttagtttgatttaattggattgaagatgtcagacgctttgaatatgactcttgatgaaattgtgaagaagagtaagagtgaaaggtctgcagctgcaaggtctggaggtaaaggagtttcccgtaagagtggacgtggacgtggtggacctaatggtgttgtaggagctggaagaggaggtggacctgttcgtagaggtcctcttgctgttaatactcggccatcatcatccttctccataaacaagctttcccgcaggaagaggagcttgccatggcagaatcagaatgatttgtatgaagaaacccttagagctgttggggtgtcaggagtggaagtcggaaccacagtttatattaccaaccttgatcagggagtgacaaatgaagatataagggaactctatgctgagattggagagctgaaaagatatgcaattcactatgacaaaaatgggcgtccaagtggatcggctgaagttgtgtatatgagaagaagtgatgcaattcaagctatgaggaaatacaacaatgtacttttggatggaaggcctatgaaactggagattctgggtggaagtactgaatctcctcctgtcgcagctcgtgttaatgtgactggattgaatggaaggatgaagaggagtgtcttcattggacaaggagttagaggtgggagagtaggaagaggaagaggttcaggtccttctggaagacgccttccagtccaacaaaaccaacaaggtggtcaaggtggtcgaggcggggtccgtggtagaggcaggggtgctggtggaggcagagggaataaaagtggtggccgaggtggaaagaagccggtggagaagtctgctgcggatctcgacaaagatctcgaaagctatcatgctgaagctatgaacatctcttaaagcaagacttcgcatcttgtcatgtacttttgtgttctttattcgtagtctctgactaaatatgtgccaaagtctggtttggtttaattacgtttaggatggctctactctgctttcgttttcctcttttcttgtttcacactttcacagtcacttttggttattgaagttaaaagagatttagctgttaacaaaaaaaaaaaaaaaaaaaaaaaaaaagggcggccgctttaaaggatcccagcttacgtacgcgtgcatgcgacgtcagagc

SEQ ID NO: 87034 - DNA, 2519 bp, Arabidopsis thaliana columbia
  unsure (1)..(2519): unsure at all n locations
cccacgcgtccgtgcaattaaatcggtagagtgaggcattgtccttctttttctccctctgttttttttttttttttttttcctatcatctctgagagttttctcgagaaacttttgagtgtttagctactagattctgaattacgaatcatggaaggaattgatcacctcgccgatgagagaaacaaagcagagttcgacgttgaggatatgaagatcgtctgggctggttcccgccacgcttttgaggtttccgatcgaattgcccgccttgtcgccagcgatccggtatttgagaaaagcaatcgagctcggttgagtaggaaggagctgtttaagagtacgttgagaaaatgtgcccatgcgtttaaaaggattatcgagcttcgtctcaatgaggaagaagcaggaagattgaggcactttatcgaccagcctgcctatgtggatctgcactggggaatgtttgtgcctgctattaaggggcagggtacagaggagcagcagaagaagtggttgtcgctggccaataagatgcagattattgggtgttatgcacagactgagcttggtcatggctcaaatgttcaaggacttgagacaactgccacatttgatcccaagactgatgagtttgtaattcacactccaactcagactgcatccaaatggtggcctggtggtttgggaaaagtttctactcatgctgttgtttacgctcgtctcataactaacggaaaagactacggtatccatggattcatcgtgcaactgcgaagcttagaagatcattctcctcttccgaatataactgttggtgatatcgggacaaagatgggaaatggagcatataattcaatggacaacgggtttcttatgtttgatcatgttcgcattcctagagatcaaatgctcatgaggctgtcaaaagttacaagagaaggagaatatgttccatcggatgttccaaagcagctggtatatggtactatggtgtatgtgagacaaacaattgtggctgatgcttccaatgcactatctcgagcagtttgcatagctacaagatacagtgcagtgcggaggcaatttggcgcacataatggtggcattgagacacaggtgattgattataaaactcagcagaacaggctatttcctctgctagcatctgcatatgcatttcgatttgttggagagtggctaaaatggctgtacacggatgtaactgaaagactggcggctagtgatttcgcaactttgcctgaggctcatgcatgcactgcaggattgaagtctctcaccaccacagccactgcggatggcattgaagaatgtcgtaagttatgtggtggacatggatacttgtggtgcagtgggctccccgagctgtttgctgtatatgttcctgcctgcacatacgaaggagacaatgttgtgctgcaattacaggttgctcgattcctcatgaagacagtcgcccagctgggatctggaaaggttcctgttggcacaactgcttatatgggccgggcagcacatcttttgcaatgtcgttctggtgttcaaaaggctgaggattggttaaaccctgatgttgtactggaagctttcgaagctagggctctcagaatggctgttacgtgtgccaaaaatctcagcaagtttgagaatcaggaacaaggattccaagagctcttggctgatttggttgaggccgctattgctcattgccaattgattgttgtttccaagttcatagcgaaactggagcaagacataggtggcaaaggagtgaagaaacagctgaataatctgtgttacatttatgctctttatctcctccacaaacatctcggcgatttcctctccactaactgcatcactcccaaacaagcctctcttgctaacgaccagctccgttccttatacactcaggtccggcctaatgcggttgcacttgtggacgccttcaattacaccgaccattacttgaactcggttcttggccgttacgacggtaatgtgtacccaaagctctttgaggaagcgttgaaggatccattgaacgactcggtggttcctgatgggtaccaagaataccttcgacctgtgcttcagcagcaacttcgtaccgctaggctctgaagagttttctttgcttgatactcgatatggttaatcacattagacttgcttcgtccttcttcttcgtcttcttcttcttctcgctttgaataatttcgcagtttaaaaactggcgatgcccttatttatatgtagcaatgtaatagttaatgtacgatcgtcatatggcggaattttagtactatttttcgttttcaatgcaacattaatacaattgatcgtttctactctgagaaggatatgtgggatatttgtaatcttcgtatatattgacattttctctattgatttcgttaaaaaaaaaaaaacgaagggcgtccactatacaggatcccggacgcgggcagggggcgtcatagctcgtngatagtgta

SEQ ID NO: 87035 - DNA, 430 bp, Arabidopsis thaliana columbia
cccacgcgtcagaacgatactcaaagctcgtaatctccttctactctccagatccgaggattcccttcgtttacagatttgtaaacgttcgtgaaattggatttgttgatctctttggtaaacaagcatggctgctccagtgcctccaggagcatatagacctaataacaatcagcaaaactctggtggtcctccgaattttgttcctggttcacaaggaaaccccaattctttagctgctaatatgcagaatttgaacattaatcggccacctcctcctatgcctggttcaggtcctagaccatctccaccttttggtcagtcaccacaatcttttcctcaacaacaacaacaacaaccaaggccttctccaatggctagacctggacctcctcctcctgctgctatggctagaccaggtggacctcct

SEQ ID NO: 87036 - DNA, 642 bp, Arabidopsis thaliana columbia
  unsure (1)..(642): unsure at all n locations
nnnnnnnnnnnnnnnnnnnnnnnnnnnnnnnnnnnnnnnnnnnnnnnnnnnnnnnnnnnnnnnnnnnnnnnccacgcgtccggtaggcttgaagcatgatgacgacagtcgccgccgatctccaccgttatcttttcctgattaccgtttttcttttcttcctctgcgacaaaacctctcttgctctgaccacagacggtgttcttcttctctctttccgttactcaatcgttgacgatcctctttacgtttttcggagctggagattcgacgacgagactccttgctcttggcgtggtgtcacgtgcgatgcatcttcccggcacgtgactgttctgtcacttccaagctcgaaccttaccggcacactaccttcaaatttgggttcactcaattcacttcaaagacttgatctttccaacaattccatcaatgggtctttcccggtttcgcttctcaacgcgacggagcttcgatttcttgatctgtccgataatcacatctccggtgcactaccggcgagttttggcgcgctttcgaacctccaagtgttgaatctctccgataattccttcgtcggcgaattaccgaacacattaggatggaaccggaacttaacggagatttcacttcagaaaaact

SEQ ID NO: 87037 - DNA, 740 bp, Arabidopsis thaliana columbia
  unsure (1)..(740): unsure at all n locations
nnnnnnnnnnnnnnnnnnnnnnnnnnnnnnnnnnnnnnnnnnnnnnnnnnnnnnnnnnnnnnnnnnnnnnnnnccacgcgtccgtagctgcgagaagacaacagaaggggctctgctccgtcaagctgaggaggataaaaaccctagggtgagtgagacagagagaagcgaaaatggtgcagcgccttgtttaccgatcacgacacagttacgccaccaaatccaaccagcacaggatcgtcaaaactccaggaggtaaattgacgtaccagaccactaagaagagagctagtggacctaaatgtcccgttaccggcaagcgtattcagggtattcctcacttgaggccaactgagtacaagaggtcacgtttatcaagaaacaggaggaccgtgaaccgtgcttatggtggggttttgtctggttctgctgttagggaaagaatcattcgtgccttccttgtggaggagcaaaagattgtgaagaaggttttgaagcttcagaaggcaaaggaaaaggttgctcccaagtgatctagaccctattagtttttatgttttatggctctgttctagcgatagtactggttgcagagaaaaacattgtgtactcatcaaaaaatttaagcttttttgtattggttttggatctttggctctgtctacaattcgtttcggttttcgtttcttgttcatgttgagttcacatttcacgttttcaaannnnnnnnnnnnnnnnnn

SEQ ID NO: 87038 - DNA, 1297 bp, Arabidopsis thaliana columbia
  unsure (1)..(1297): unsure at all n locations
ccaaaaaccaataagccaagagcttttntcattttttttcttgaaacccatggctcgattttccttcttgaatgttgtaaaggatgttgtggctattctaaatgaatcccgcaaactgtttctcaagaacaaaaagttgatgttctcagtcttggtattccctctcttactcaattgtttagtttacttcttgaacatctttgtcatcgtaccggagatcacaaacttgatccttgaagcaagtttgttgccttcgacagatccaacctccccggaatacgcagcccgccttatgagagtctttacagattttcgccaatttgtgggttcttcatacattttcgcggctgtctcctccatcatcaacctcttttctgttctagtcatcgtccacgcatcggctattactcttaaagatgaaaacttcaatatcaaagattttcctgttctgagccttaaatcttggaagggacctcttgtgacatatttctacattgctcttttcagtcttggctttggcttcctcttctttataatcctttgtcctatccttttgttctctataaaatccggttccgtggaaaatatcggtttcttggcggtcgaggctggtgttttattgattatattcaccgtctctcagtcctattttggtatctattggaacttatctatggtcatatcgatactaaagggaaagttatgggttccaaagctttggggaaagcagcaaagattgttaaagggatgaagacaaaactgtttctcttgaatcttttctttggtttattggcatccggattagctcaaatcttgcagctgatcaatatgggaagatcgttagcggttaccttaaccacaggttttgtccttgtgtgtttggtctttgcggtgaggatgtttcagcttgtgacttacaccgttgcatatttccaatgtaaaagcctccaaggcagagacgttgagtcgctcagggatgtggaatatatggcattgtcttccactactctcacggaatgattgccttgatatttcaagagaagggcatatatgatatgatatttaatctgtggattgtttgtttgtttgagaatattgttgaacttcaccatggatttggtaaagtattttgaataatcaaaggttttgttacatatatgttttgttaatggttttaaggtttggttgaatatatttggttttatatatagaccaaaaaaaaaaaaaanaaagggcggccgctctagaggatcccagcttacgtacgcgtgcatgcgacgtcatgctggtctatagc

SEQ ID NO: 87039 - DNA, 583 bp, Arabidopsis thaliana columbia
gctctctacgactcactatagggaaagctggcacgcctgcaggtaccggtccggaattcccgggtcgacccacgcgtgcggagaatggagcaataacaaggattggacggacaatgtctgatcttccactagaaccatcattgtcaagaacattgatagaagcgaatgaaaccggttgcttatctcaagctctaacagttgttgctatgctgtcagcagagacaactcttcttcctgctaggagtaaacccagtgaaaagaagaggaaacatgatgaagattctaatcttcctaatggatccggatatggtgatcacattcaactgctacagattttcgaatcttgggaccgtactaattatgatcctgtatggtgcaaagagaacggcatgcaggtgcgagggatggtgtttgtcaaagatgttagaagacagttatgtcagattatgcagaaaatatccaaagatcgattggaagttggggcagttggtgggaaagagtcaagccgagccggctacaggaagtttggaagcctttgggttgggatttaaaccaatttttgggatttttcccaaaggaccgt

SEQ ID NO: 87040 - DNA, 708 bp, Arabidopsis thaliana columbia
accacgcgtccgcccacgcgtccgctgggtttttccttactctctaagaaaaaccactactttggttaattgggaagacagagagattcgtaatccatggataagcctctgctttcaggatcagagaaaacgaatgaatccgagaggttggattcataccaatacctgcagagaaatagctcatctgctcgtaacccatctttcgccggagctggcgtcgtcaccgtcgaagaaatccgtaccgcttctgctgtttcttctgatcctccgtctctttatcctcccgttatcaagacccctgtttcgttacccattcctcaagctattggttatccaagtgcatctggagcaggtcatgaattgcaacaaaggcagtttcttgatgagattgaaataagagagctgcttattgatcatattggtcatcgttgctgttggggaagccgtcctgctcgtacatggaagattcatgctgttgaagactgcaatgtttatgtcggaactcttgatactttcattgaggagagggaagctttgacacagactgtgcctttcactggtggtgaattcaatggaaagaaacatggatctgaaccggggttatgggaactggacctgagaccgcagtttcctactctgtttgtcccgtataaagaaactcaagtcctggttcctaattctgagactgttgagaagtgcacaggtttc

SEQ ID NO: 87041 - DNA, 511 bp, Arabidopsis thaliana columbia
  unsure (1)..(511): unsure at all n locations
agctctcnnnnnnnnnnnnnnnnnnnnnnnnnnnnnnnnnnnnnnnnnnnnnnnnnnnnnnnnnnnnnnnccacgcgtgcgcccacgcgtccgcccacgcgtccgcccacgcgtccggcagctgatttagatggttctgaggaatcctctgaaacaggggatgagaatggctcctctgattatgactctgaatcttctaatggttcggattttagcagtgaaggtgatgaaagaacggtgtctaatgacgccaatgacccagctgctcctttaattcaaatttcagagacttctgtttccgctgaccaggaagaactaaggtccagaagggccctggatttgtggttagatgatcagcctagtacatcaaaccaaactccatctgcattaaatagtaatcagagctcttatgcgaagatatccattggtgatgtaggaagccgagttaagcctaaaagctatagtctcgtagaccctggaaatggcagtggcttgaaggtagactatgcct

SEQ ID NO: 87042 - DNA, 471 bp, Arabidopsis thaliana columbia
gagaatccttttgaactcgaggttaaagctgcagataatcgcatcattcagcaaacactctatgaaaagacatgtgaatgtgaagtgttgcaagaagaagttgcaaatctaaagcagcagctctctgaggccctggaactagcacagggaactaagattaaagagctgaaacaagacgccaaggaactaagtgaatcaaaggagcagttagaactcagaaacaggaaacttgcagaagagagttcatatgcaaaaggtcttgcatcagcagctgcagttgagctcaaggcattatccgaagaagttgcaaagcttatgaatcagaacgagagactagcagctgagctggcaacacagaagagcccaatcgcacaacgaaataagacaggaacaacaacaaatgtaaggaacaatggaagaagagagagtcttgcaaagaggcaagaacatgacagcccatcaatggagctg

SEQ ID NO: 87043 - DNA, 862 bp, Arabidopsis thaliana columbia
  unsure (1)..(862): unsure at all n locations
tcgcttctttttcggagtcggagcagagaaaggttttggagatcgagaccaaactccgattgaaagaggatgcattcttttggttacagagcgaatgctctactcacattcgccgtcacgattctagctttcatttgcgcgattgcttccttctctgataacttcagtaaccaaaatccctctgctcagatccagatattgaatatcaattggtttcagaagcaacctcatggaaatgatgaggtcagcttgacactgaacataacagctgacttgcagtcactatttacttggaacacaaagcaggtatttgcttttgtagcagcagagtatgaaacctccaagaacgccctgaatcaggtttcactatgggatgccataataccagagaaagagcatgccaaattctggatacaaatctcaaacaagtaccgtttcatagatcagggacataacctccgagggaaggactttaacttgacattgcactggcatgtcatgcccaagccaggcaagttgtttgcggacaaaatggttatgcctggttatcgtttacccaatgcttacagatgaagatgaagagcctcctcctgcatcatctaaggttaacaaaaaatctcttaaattaggaaagaagagagttatatttcaggtgttaagttagacttgctgatctgtatactggcatgaagttaaaaacattgttttggaatgaattatgagccaagcacatatgagattgtcgtcgactctttgattaaaaaaaaaaaacaaaacacaaagnnnnnnnnnnnnnnnnnnnnnnnnnnnnnnnnnnnnnnnnnnnnnnnnnnnnnnnnnnnnnnnnnnnnnnnnnnnnnnn

SEQ ID NO: 87044 - DNA, 482 bp, Arabidopsis thaliana columbia
gagccaccttcattcacttcacaaaccgctcggcgacaaagacgaagaagccgaggaagcaccgatacgacgattgagacttagttttgctcagattcatttaaccaccggcgccaagtgacgacgacgacggagggagcagattcgaattgtgtgaagacagcaatggagtctactgagtcatatgcggcaggttcaccggaagagctggctaagagatcccctgaaccgcatgattcttccgaagctgattctgctgagaagccaacacacattcggtttcttgtatccaatgcggcagctggttccgtcattgggaaaggtggctcgaccatcactgaatttcaggcaaagtctggggcaaggattcagctttcacgtaatcaagagtttttcccggggacgactgacagaattattatgatatcgggatcaatcaaagaagttgtcaatggactggaacttatccttgataaattgca

SEQ ID NO: 87045 - DNA, 549 bp, Arabidopsis thaliana columbia
  unsure (1)..(549): unsure at all n locations
nnnnnnnnnnnnnnnnnnnnnnnnnnnnnnnnnnnnnnnnnnnnnnnnnnnnnnnnnnnnnnnnnnnntctccacgcgtgcgcggacgcgtgggcggacgcgtgggttgtgcttctgttaatgccggggacgtcgacgtccgtctctgtcatcgagtacacgatgaaaaaccacgagggaggttccaattcgaggggtccgaagaattacgctgtgatttttgatgctggaagttctggaagccgtgtgcatgtttactgtttcgatcagaatttggatcttgttcctttggagaatgagctcgagctcttcttacagctaaaaccgggtttaagtgcatatcctaatgatcctcggcaatcagcaaactctttagtaactcttctggacaaagcagaagcttccgttccccgtgagttgcgtccaaagactcctgtcagagttggggcaactgcaggtttgagagctttgggtcaccaagcctctgaaaacattttgcaagcggttagggagctcctcaaaggtagaagtaggctgaagactgaggca

SEQ ID NO: 87046 - DNA, 386 bp, Arabidopsis thaliana columbia
gttcagatcttttgcttcaatgccatataccacaaggatattcttgctgccgatgtggccattcacgggctgtgttatgttgggcatgtgggcttggtcaaagacttttcttttcagcttctataccctctggaacaatctttgtcagactcggggcgctcctagattcggatgccaatactccttaccggttgctacagacggaattaatgatcagattgaggctgcgattcttagagctgataagattggtgttaaagttataagcttggctgctctcaacaagaacgaagctctaaatggtggtggaacactgtttgtcaacaagcatcctgaccttagagttcgtgtggttcatgggaacactttaactgcagcagtgattc

SEQ ID NO: 87047 - DNA, 1053 bp, Arabidopsis thaliana columbia
  unsure (1)..(1053): unsure at all n locations
gactcactttagggaaagctgctacgcctgcaggtaccggtccggaattcccgggtcgacccacgcgtccgcttggctgctctcaacaagaacgaagctctaaatggtggtggaacactgtttgtcaacaagcatcctgaccttagagttcgtgtggttcatgggaacactttaactgcagcagtgattctctatgaaattccaaaagatgtgaatgaggttttcgggactggagccacttctaagctgggaagagctattgctctttacctttgtcgccgtggagtgagagttctcatgttgacattgtctatggaaaggttccaaaagattcagaaagaggctcctgttgagttccagaacaaccttgtacaagtgaccaaatacaatgctgctcaacactgcaagacttggatcgttggaaaatggttaacaccaagagagcagagctgggctcctgcagggacgcatttccatcagtttgtggtgccaccaatccttaagtttagaaggaactgcacttacggtgatctagcagctatgaagctccctaaagatgttgaaggactcggaacttgcgagtacacgatggagagaggggtggtacatgcgtgccatgcaggaggagtggttcatatgcttgagggttggaagcatcatgaggttggagccattgatgttgaccgtatcgatttggtgtgggaagcagccatgaagtatggtcttagtgctgtttcttcactcacaaattgagtgaagagagagacacgtttcattgttgtcttttgactctcccaagattggtcattctttgtacaggtgaaaggagatgcaagcaggaaaaaaaagtagaatttcaccttatgtattgttttatcttttattaatgatgtattactttctttttagatttccttaatattaatatatgcccctaatttccggggataaaaaaaaaaaagnnnnnnnnnnnnnnnnnnnnnnnnnnnnnnnnnnnnnnnnnnnnnnnnnnnnnnnnnnnnnnnnnnnnnnnnnnnnnnnnnnnnnnnnnnn

SEQ ID NO: 87048 - DNA, 521 bp, Arabidopsis thaliana columbia
acgactcactattgggaaagctggcacgcctgcaggtaccggtccggaattcccgggtcgacccacgcgtccgcccacgcgtccgcattgctaatctaacatctcattctccaaaaactcaggaactcgaactatcttccacaactcacgaaaatgtttctcttaaagacatggagatcaaccgcttttggggtttatggctacatgaatttcaccaagagtggtttcttagatcattcaaagaagtttaaacctgaagatatgcagttacaaattgaaggaaagaattgtgtagttactggagctaattcaggtattggttttgctgctgcagagggtcttgcttcacgtggagcaactgtttacatggtgtgccggaacaaggaaagaggacaagaggctctttctaagattcaaacctcaacaggaaaccaaaatgtgtacttggaagtatgtgatttgtcttccgttaatgaaatcaaatcatttgcttcgagtttcgcttccaaggatgttccggt

SEQ ID NO: 87049 - DNA, 536 bp, Arabidopsis thaliana columbia
  unsure (1)..(536): unsure at all n locations
atgannnnnnnnnnnnnnnnnnnnnnnnnnnnnnnnnnnnnnnnnnnnnnnnnnnnnnnnnnnnnnnnnnnnnnnnnnnnnccacgcgtccgcgatgtgaaacccaacttaaagcattactcttgtcttgtggatcttctttccaggtctggtaatttggaggaagctgaaagcacagtcatgtctatgccattctcaccagacggggtcatatggggaacattgttgagctcatgcatgacccatggggagtttgagatgggaattcgaatggcagaacgtgcggttgctagtgatccgcagaacgatgggtattatataatgcttgcgaacatgtacagtgctgcaggtaagtgggaagaagcggaaagggcacgagagatgatgagggaaagcggagttggtaagagagctggtcatagtgtagtctaataatctttgatacaatgaatatccttgtgattcatctgtttgaaacacatgttcaatggacaatgatgcatagattagaagattaattagctcaccaaataagt

SEQ ID NO: 87050 - DNA, 553 bp, Arabidopsis thaliana columbia
gactcacttagggaaagatcgtacgcctgcaggtaccggtccggaattcccgggtcgacccacgcgtccggagacagaaagaggacatatacagtaagaaaatataaagagagagacagtagtaagaaagaagaagaagaaaaatggaagatacgaagaagaaaaagaagaagaatattaacaacaaccaagattccaagaaaaaagagcgtcatattgttacttggtcacaagaggaagatgttatactaagagaacaaataactctacatggaactgaaaattgggcgatcattgcatcaaagttcaaagacaaaagcacaagacaatgcagaagaagatggtatacatacttaaactctgatttcaaaagaggaggttggtcccctgaagaagatatgcttttgtgtgaggcacaaagagtatttggtaatagatggactgagatagcaaaggtggtttcaggcagaactgataatgctgtgaagaacaggtttacaacactttgtaagaagagagccaagcatgaagctatgactaaagacagcaactc

SEQ ID NO: 87051 - DNA, 443 bp, Arabidopsis thaliana columbia
  unsure (1)..(443): unsure at all n locations
ttgtcatattaatcaagagaacaatgctaatccgaagagttgcgttgttttgtttctcattcaactgctttttctatcagtactagtcttatttcgtctctttctctctgtttttcttttttttttccgatgttcaaattgattctccaattcaagtgtggggttttccgatcaattcgtccaaatgacgatgaaatcgattaaagagagagaagttgaacaacttgcaactacttatgtgactgntccaagagctattatacgccctacaatttgttgtttttcaagtcacacccgctattcaagaaggtccttatccaaggagacagtcgattctgagtcggaagaagaggttgttgatctaaatcctcactaggtggttccgtttaagcttagcaacgccaaagatctagacaataattgcaagttaccgcgttgatcct

SEQ ID NO: 87052 - DNA, 563 bp, Arabidopsis thaliana columbia
tgatacttcagctctctacgactcactattgggaaagctggtccgcctgcaggtaccggtccggaattcccgggttttgagatgacgatgaaatcgattaaagagagagaagttgaacaacttgcaactacttatgtgactgtccaagagctattatacgccctacaatttgttgtttttcaagtcacacccgctattcaagaaggtccttatccaaggagacagtcgattctgagtcggaagaagaggttgttgatctaaatcctcactaggtggttccgtttaagcttagcaacgccaaagatctagacaataattgcaagttaccgcgttgatcctatcttccgtcccgaagccgtccttgatccagcccaagatgttttgtggtcagatgacaaagtagatccacgggtatatattatggtaaagttggcggccgaaggattgaagttcaataatgatatgttttctggtggttgcatcccatctgaagtgggtatagcccccaaaaacaaaaaatctctacaattttgaaaggtgttcgtggcaggaaatctgctaag

SEQ ID NO: 87053 - DNA, 777 bp, Arabidopsis thaliana columbia
gcgcatcgttaacatacataaagagtcactcctctagttgcaagataacgcctcattgtgttcagtcccgcatcaaagtcctatcaggagcatcgatctagtggaagaaaggttgttatctaaatcctcactaggtggttccgtttaagcttagcaacgccaaagatctagccaataattgcaagttccgccgttgatcctatcttccgtcccgaagccgtccttgatccagcccaagatgttttgtggtcagatgacaaagtagatccccgggtatatattatggtaaagttggcggcccaaggattgaagttcaataatgatatgttttctggtggttgcatcccatctgaagtggttatagcccccaaaaacaaaaaatctctacaattttgaaaggtgttcgtggcaggaaatctgctaagcaaggaaggatctccaagaatccaactgggaatagaaggatccatcaatcattctctaatgaggaggaatctgtttaactttgttattgactaataatcctattatcgcctaaagctgtttatcgttacaacttgttgttgctagttttgctacattcttattctaacccaatctataacaaatagtttatcatgctatgaatgataactcaataccctgtgttcttattgctaatataaaacggccattccaaaaaaaaaaaaaaaaaaaaaaaaaaaaaaaaaaagggcggccgctctagaggatccaagcttacgtacgcgtgcatggtacgtcatagtaatctatagt

SEQ ID NO: 87054 - DNA, 483 bp, Arabidopsis thaliana columbia
ggcggacgcgtgggctcatcctcaaaaaaaaaaaaaaaaaaaaaagtttaaaacaaaaactaaaaaaatagaataatggcaagagttcaactattgttatgcttcaccattctatttgcatctgtgacccttcttgacctagtatcagcacacctgaaatttaagccatctttgcctcaaatcgaagatccaaagacggtgaaggatgtagagccttacaccgttaaagtagtaatggtctttgtggccgacctcgagaaggaatgtcccaagacaaacaagttcaaggccttctttgagaaacttagaggattcgccaagtatgtttgcccaataagaaggattggccaagtagattacgaccgggacatgaaggccaaagccgggggtatcttcaaggccatatcttcttttgcgattggaaagattagggaggaaattcacgaggaaaaacaggaggctattgatacctttaggttcatg

SEQ ID NO: 87055 - DNA, 360 bp, Arabidopsis thaliana columbia
ctttcagcttgatgtgcgctctcgtcctcgtgatactctctctgacgaaccgggtgtctttgtcaacgatccgccacccacgcagcctacccaagcaccacctccgatgggtcataaactccttcttgaagacattaatgatcttcttgagatagggaagcgcatacgacgtcgcttgacaggtaagttgttttcttgcttcatgtggtgctttgcttattgtgttcttgccttgtgttttctggaattttgatgttgtggctcctgtagttgaggaagaacctaggaagaggaagaggaagaatttgatcctggctgagttactatagcttggggtctaagtataaggggaggaaatgt

SEQ ID NO: 87056 - DNA, 853 bp, Arabidopsis thaliana columbia
  unsure (1)..(853): unsure at all n locations
acccacgcgtccgcggacgcgtggggcagaaaatggtgggagcgactgtagttagtaaatggactcccctatgtgtggcttcgccgccggagagaaactcggcaagtctcaatccacactgttctccagccagggttaattttagaacagcgttggccgcatttcgtcctcagttccgtcttttctctcgcaattccgcgtctcgccgccgtcttcgcgcttccagctccgccgaatcgggaatcttccttcctcaccttgtagcttctatggaggacgttgaggagacttacattatggtgaaacctgatggcatacaacgaggccttgtaggagaaatcatttctcgctttgagaaaaaggggtttaaacttattgggctcaagatgtttcagtgcccaaaagaattggctgaggagcattataaggatcttagtgctaaatcattctttcctaacctgattgagtacatcacttcaggtccagttgtgtgtatggcttgggaaggtgttggtgttgttgcttcagccaggaagctaatagggaaaacagatccgcttcaagctgaacctggtactataagaggagatcttgctgtgcaaaccggaaggaacattgtgcatggtagtgacagccctgaaaacggcaagcgtgagattggtctgtggttcaaagagggcgagctatgcaagtggggattcggctctagctacatggctaaggggggtgtccntttgnaggcagagcaattataaatggngccccanttgttttctnttacccctntgantttggggtttttnccccatttgggggaannaattaacccccaacntttggnttntttncccat

SEQ ID NO: 87057 - DNA, 1043 bp, Arabidopsis thaliana columbia
  unsure (1)..(1043): unsure at all n locations
tcgcgactctatacgactcacttagggaaagctggtacgcctgcaggtaccggtccggaattcccgggtcgacccacgcgtccgtcatgacttgcatatttcacttattcgctacatttgcgtaagatgacgctgcctcatttttttttcatattcgattgacataattaatattcttgtgtgtttatctcaattgccaggagcattataaggatcttagtgctaaatcattctttcctaacctgattgagtacatcacttcaggtccagttgtgtgtatggtatgggtataactatgctctaatttgatttttacttgttttcaagttgtaattagatgagttaattgcatgtgatgttttaaacctggtaaaggcttgggaaggtgttggtgttgttgcttcagccaggaagctaatagggaaaacagatccgcttcaagctgaacctggtactataagaggagatcttgctgtgcaaaccggaaggttggacttctatcatctttaaaattgttggaagtaagcacttaaaataattctcatggtttgatatttttaaattatgccatttgcaggaacattgtgcatggtagtgacagccctgaaacggcaagcgtgagattggtctgtggttcaaagagggcgagctatgcaagtgggattcggctctaactacatggctaaaggagtgatccttgagaagacagagtcaattataatggtgtcttacttggtttcttgtaccgatgatgagcttggtgtttgttcctgatttgggcagcatataatataactgcatctatggctgattctctatatctgtgacacttgcatgtatcaaactagtcagatcatctgctttggtctacgtccagacactccaaaatcattcatcttcactctacaccgagcaatgaaaattttctaatctccnnnnnnnnnnnnnnnnnnnnnnnnnnnnnnnnnnnnnnnnnnnnnnnnnnnnnnnnnnnnnnnnnnnnnnnnnnnnnnnnnnnnnnnnnnnnnnnnnnnnnnnnnnnn

SEQ ID NO: 87058 - DNA, 528 bp, Arabidopsis thaliana columbia
  unsure (1)..(528): unsure at all n locations
nnnnnnnnnnnnnnnnnnnnnnnnnnnnnnnnnnnnnnnnnnnnnnnnnnnnnnnnnnnnnnnnnnnccacgcgtccgcccacgcgtccgcccacgcgtccgcccacgcgtccgagccggttgaagttctaccactgttgccatattttgataggtacgatgagcagtttgtggtagcgaattttgatggtgctcctatagctgattctgaattctttggcaagttggacccttcaattcgtgatgcacatgagtcacgggccattttgaaaagctatgtggtggctggatcagacactgccaatccagaaaaatttctggcgtacatggttccttccttggatgagttgtctaaggatatccatgatgaaaacgaagaaatctcttacacttgggttcgcgaatacctctgggatgtacaacccaatgcaaacgatcctggcacatacctggtatcatttgacaatgggaccgctagctatctgcccctacccatgagggtgaacttgaggaagaaaagggccaggg

SEQ ID NO: 87059 - DNA, 442 bp, Arabidopsis thaliana columbia
  unsure (1)..(442): unsure at all n locations
tccggaatcgccgcacgcgtccggagagatgggtgattctgacgtcggtgatcgtcttccccctccatcttcttccgacgaactctcgagctttctccgacagattctttcccgtactcctacagctcaaccttcttcaccaccgaagagtactaatgtttcctccgctgagaccttcttcccttccgtttccggcggagctgtttcttccgtcggttatggagtctctgaaactggccaagacaaatatgctttcgaacacaagagaagtggagctaaacagagaaattcgttgaagagaaacattgatgctcaattccacaacttgtctgaaaagaagaggaggagcaagatcaacgagaaaatgaaagctttgcagaaactcattcccaattccaacaagactggatanagctcaatgcttgatgaagctatagaatat

SEQ ID NO: 87060 - DNA, 1116 bp, Arabidopsis thaliana columbia
  unsure (1)..(1116): unsure at all n locations
nnnnnnnnnnnnnnnnnnnnnnnnnnnnnnnnnnnnnnnnnnnnnnnnnnnnnnnnnnnnnnnnnnnnnnnnnnnnnnnnnnnccacgcgtgaaacctccattaccttcgtctttcttcctcagtcgccctacaatggctttgcctttgtctggcacgcgccacctcacgcgcgctctcctctctaatgtcactcttatggctcctcctcggattccttcctctgttcactacggtggatctcggttaggttgttcgacccggttcttctcaattcgatgtggagctaaccggtcaggttctacttactcgccgcttaactctggctctaactttagtgatcggcctccgacggagatggctcctttgtttccgggatgcgattatgagcactggcttattgttatggataaacctggcggggaaggcgcgactaagcagcagatgattgattgttacattcaaaccctagcgaaagtcgttggaagtgaggaagaggcgaagaagcgaatctacaatgtttcatgtgagaggtatttagggtttggttgtgagattgatgaagagacatccactaagcttgaaggtttaccaggtgttctgtttgtgcttccagattcctatgtggatcctgaaaacaaagattatggagctgagctgtttgttaatggagagatagtccaacgatcaccagagaggcagaggcgggttgagccacagccgcagagagcccaagatagaccgagatacaatgacagaactcgttactctcgccgcagagaaaacacaagatgaactgtaactgaagatggtatacatacacctaagctaagccagtatgaggatgatgatgatgatgatgataatggtggtgaggatgatgttactgccgccacacgagggctctgtattccagtccgttgcagttaatggaccgggcttactttggatattgttgaaattctaagttttgtttctatgtaacaattttatttaataatgtaaattgaggtttcactgttttaggaaattactttgggtagaagattagttttcttttcaagaacaattcatgtgggaaatggtaaatttattttagtgatctttttaatacaat

SEQ ID NO: 87061 - DNA, 475 bp, Arabidopsis thaliana columbia
  unsure (1)..(475): unsure at all n locations
atactccnnnnnnnnnnnnnnnnnnnnnnnnnctccaaatatattttctccacactatctttgtcgtcttcttccccccacgcgccccatcgctcaccacataaaccctagcgatcgatttctccagaaatcaaccaacaatcgttcatggcgtcttcttccacctttctggaattaactccatttcaatggaatcaacctctcccatacacacaacgaccccatcatcgtactgttcttctctactccaaacctcaaaggagatcaaattcgattcgtctccaaatctccgtcaaatacaagcaatcaacatcttcttcagatccagatttgagatccaatttcaatccatttgaacaaatcgcgattcaggtcaaaaaagcgttagattcgttgaagaaacctgctatagctgcggttttacttggtttgcttttgttctatgatcctaattccgctttagctgcgtctgggg

SEQ ID NO: 87062 - DNA, 969 bp, Arabidopsis thaliana columbia
  unsure (1)..(969): unsure at all n locations
nnnnnnnnnnnnnnnnnnnnnnnnnnnnnnnnnnnnnnnnnnnnnnnnnnnnnnnnnnnnnnnnnnnnnnnnnnnnnccacgcgtccggagaatttcaaatttcatttctgaggcaatcgcataattcccaccggcgatcggagatgagcagcgcgagactgtgctctcttgtggcggagctaggttacgaaggcgccggaaaattggatcccgatagcttcgaatggccgtttcagtacgacgatgctcgacctatcctcgactggatctggtcctctcttcggccttccaatggcctctctctcggcgaactatcactatatgagcaatttcaacgagatgggaaactcttagagggcgatgacctaaaccaggcctatgatagcatatcagcattctcttcaagagaaacaaccaggaggcccgctcttgggccccgacaaacccttacagaaacgaccagaccccccttctccggccaaaggccggcagccctaacgcccgcccgcgccggcagcggggctccacgcgcgccgcgcgagcgtggccgggcgcgcgctccccgtggtcaccgcgcgcgcgcacacccggcgtcggggcgcgccgcccgcggctccccgggccggcgccacgcacgacccccgcccgcccccctccgccgcgcgcggcgccggcccgccgtcgcgtcgggcgccacgtgctcgctcgccgcatcgcggacgaggcggcgcgagggttggcgactccccaccggcccgcgcacgcgcgacgcgagccgcgcgcgcaccggccnacgccggacgcacggcgcgggcgcgggcgagcgccccgcgagcgccgcccacgccggccccgctccctcccgcccgcgcgcgcgcgccccgccacggccgtgtggcccgcggggagcgccncccaccgcgcgcgcactgcccccgccgccccgccgagggacagaggccgagcgc

SEQ ID NO: 87063 - DNA, 536 bp, Arabidopsis thaliana columbia
gcggggcattatggtaaaatatcacatatggtctgaaaaaaaaacagtttgtgtggggaggagcgagcagagtcggttcacgtgaaagcacagagacataaatctttctttcacagcctaaaacccctaaaaatgtctaatctctcttcttcttctccgtttctctttagattatctcaaccatacagccataaatccatcggaagaggaggaagataatgcaagaatcagtcgctgagtctgaatctgaaggggaagagttgcacaataagctcaagctcctcttcaatggctttcactagcatggtttccaccgttcctgttctcttcttcttcttcactcttcttttgatttctgcgaattcgtcgtctttatctcacaacattaaggttcaggaacaagacaaagatcccttcgttgctttcaacatcggcacagatgtctctaatcttctctcgccgacggaattagtcaaatttctccaagctcagaaagtaaatcacgtccgattatacgatgctgattcagaattgct

SEQ ID NO: 87064 - DNA, 541 bp, Arabidopsis thaliana columbia
  unsure (1)..(541): unsure at all n locations
nnnnnnnnnnnnnnnnnnnnnnnnnnnnnnnnnnnnnnnnnnnnnnnnnnnnnnnnnnnnnnnnnnnnnnnnnnnccacgcgtccggtaaagaaacacaaaaatgaagtgtccgtactgttcatcggcgcagggacggtgtaccaccacgagctccggtagatcaataacggagtgctcatcttgcggtcgcgtaatggaagaacgacagacgcaaaaccaccacctcttccatctccgagcccaagacactcctctctgcttagtcacttccgatctccaaacggcggcgcaaccgtctcctgaagacgaggaagatccgttcgaacctaccggattcattaccgccttctctacctggtccctcgagccaagcccgattttcgctcgctcttccctctctttctccggtcatctcgctgaactcgaacgaaccctagaactcgcttcgtcaacatcgaattcgaattcgtcgactgttgtggtggataatcttagggcttatatgcagattatcgatgtggcatcgattttaggattgg

SEQ ID NO: 87065 - DNA, 476 bp, Arabidopsis thaliana columbia
  unsure (1)..(476): unsure at all n locations
gaaaancgggtcgaccacgcgtgcgaacaatggtgaagtttctgaagcagttcatagcggtgatcctccttcaaggcccttgcgcgggcggaaaggcaggggtcatcagatccttctatcacggaaccagtgaccgtcgttacggacactgcctcgtcgccggactgaagaagtacccgagcaaagtcatccgcaaagactcagcgaagaagacggcgaagaaatcaagagtgaaatgtttcatcaagctcgtgaattaccagcatctgatgcctacacgttacacgctcgatgtagatctgaaggaagtagcgactcttgatgctcttaagagtgaggataagaaggtgactgctttaaaggaagctaaggctaagcttgaggaaccgtttcaagactgggaagaacaggtggttctttactaagctcaggttctgaagaagaacctttgagaattttatctatctatctacttt

SEQ ID NO: 87066 - DNA, 732 bp, Arabidopsis thaliana columbia
  unsure (1)..(732): unsure at all n locations
gnccccncccgggngnccctttnnaccnngnnaccccccggnttcagggattcnccgncccccttttttaagggccgttcccccnggaaagaaccccgtcatcatnaaacncttcggccgccggtacccgtgatccccttaccggccactgcctcgtcgccgggcctcaagaagtccccggancaaagttcatccgcaaagactcagctaaggaagacagctaagaaatctagggttaagtggttcatncaagcttgttaattaccagcatctgatgcctactcgttacacactcgacgtggatctcaaggaagtggcgactcttgatgctcttcagagtaaggataagaaggttgctgctcttaaggaagctaaggctaagcttgaggagaggttcaaaaccggtaagaacagatggttctttaccaagctcaggttctgaagaaattttctatttcgggaggaattcattttgagcgttgggggatcgtgttttttagttcctagggttcatttcccatggtgaaaaatgtggatcctgttttggattgtggaagatgttttgttgaattttgcactatacattttaacatttacttatattaatacttttgtgctccctttatatttatttcttgttttcgtactcttactttctaaattattactcttttttttttattcctttaatttatattattggggggggggggggggttatatttttctttt

SEQ ID NO: 87067 - DNA, 784 bp, Arabidopsis thaliana columbia
agctctacacgactcactatttggaaagctggcacgcctgcaggtaccggtccggaattcccgggtcgacccacgcgtgcgcgtggatctcaaggaagtggcgactcttgatgctcttcagagtaaggataagaagcttgctgctcttaaggaagctaaggctaagcttgaggagaggttcaaaaccggtaagagggatctaccaaacgaagcaacaatggtgaagttcttgaagcagaacaaggccgtgatccttcttcaaggacgttacgccggaaagaaggccgtcatcatcaaatccttcgatgacggaaccagtgaccgtcgttacggacactgcctcgtcgccggactgaagaagtacccgagcaaagtcatccgcaaagactcagcgaagaagacggcgaagaaatcaagagtgaaatgtttcatcaagctcgtgaattaccagcatctgatgcctacacgttacacgctcgatgtagatctgaaggaagtagcgactcttgatgctcttaagagtaaggataagaaggtgactgctttaaaggaagctaaggctaagcttgaggaacgtttcaagactgggaagaacaggtggttctttactaagctcaggttctgaagaagaacctttgagatttttatctatctatctactttttgtttagttctagaatgaatttggatcattgtttaagaccttttggtttggaattgattctggattttgtctcttacttataatcttttgctatattgatgcctcattttatataaaaaa

SEQ ID NO: 87068 - DNA, 759 bp, Arabidopsis thaliana columbia
  unsure (1)..(759): unsure at all n locations
tcggaattcccgggtcacccacggtccgagcagccagagagagagacaagtgagagggatctaccaaacgaagcaacaatggtgaagttcttgaagcagaacaaggccgtgatccttcttcaaggacgttacgccggaaagaaagccgtcatcatcaaatccttcgacgacggtaaccgtgatcgtccttacggacactgcctcgtcgccggactcaagaagtacccgagcaaagtcatccgcaaagactcagctaagaagacagctaagaaatctagggttaagtgtttcatcaagcttgttaattaccagcatctgatgcctactcgttacacactcgacgtggatctcaaggaagtggcgactcttgatgctcttcagagtaaggataagaaggttgctgctcttaaggaagctaaggctaagcttgaggagaggttcaaaaccggtaagaacagatggttctttaccaagctcaggttctgaagaaattttctatttcgtgaggaattcattttgagcgttttgttatcgtgttttttagtttctagggttcatttcccatggtgaaaaatgtggatcctgttttggattgtggaagatgttttgttgaagtttggattatggatttgatcttttattttgattctctaatgcattcttatttactcaaaaaaaaaaaaaaaaagnnnnnnnnnnnnnnnnnnnnnnnnnnnnnnnnnnnnnnnnnnnnnnnnnnnnnnnnnnnnnnnnnnnaac

SEQ ID NO: 87069 - DNA, 683 bp, Arabidopsis thaliana columbia
agttgagtatgaccgagcagggaggattataaaaggacaggaggtgatattgccaaagagtaaatatgaagaagatgttcatgctaacaatcacactagtgtgtggggatcatggtggaaagatcaccaatggggatataaatgttgccagcagaccattcgcaacagctattgcacaggttctgctggaattgaagctgcagaggcgtccattgatctgatgaaggctaatattgctcgcaaagaagcttctaaagagagtccgaagaaggttgaagagaagaaaatggcgacatggggaactgatattcctgaagatttggaattgaacgaggaggcacttgcaaatgctcttaaaaaggaggatctaagtaggagggaagaaaaagatgagaggaaacgcaaatacaatgtcaattacaccaacgatgtgacctccgaggagatggaagcttacagaatgaagagagttcaccacgaggacccaatggagaaatttccccggctgataaatgtcttttccctttcaccatattaagctgaagaaaaccttgtttttaagtttcatgtctttaaaataagacccttgttattcatggccattatttgtaaccggcttcatggccaccccaaggtcccatttttataccggtggaccccttaattcctttgcccaaaaacgc

SEQ ID NO: 87070 - DNA, 824 bp, Arabidopsis thaliana columbia
  unsure (1)..(824): unsure at all n locations
tttgatttaacccatacacacatctctctgttccacgattctcttcctcagcctccacgtcgtctctaaactcagcaaaaaccaatgtcgacggtgagaaaaatcactcttaagagttcggatggcgaaaacttcgaaattgacgaagcggtggcgctagagtcacaaaccatcaaacatatgattgaagatgactgtaccgataatggtatccctctccctaatgtcacaagcaagatcctttcgaaggtgattgagtactgtaagagacatgtcgaagctgctgagaaatccgaaaccacggccgatgctgctgctgctactactaccaccaccgtcgcgtcgggttctagtgatgaagatctcaagacttgggattctgagtttatcaaagttgatcagggcactctcttcgatcttatcctggctgctaactacttgaatatcaagggactgttggacttgacttgccagacagtggctgatatgattaaaggaaaaaccccagaagaaatccgcaagacgttcaatatcaagaacgacttcacgccagaggaagaagaagaggttcgccgtgagaatcagtgggcgtttgaatgaagaaaaatgaagacctaggttgctgtcatgtcctcgacccatttgtgtctccctgtcttatcttctttctttgactatatatccattctcttctacgtgatggtccagctaagacagtgggtcggatgttaatgttatgttatgtatgtcaaattaaagacttaactacgaaacatattgaagttgttgctcnnnnnnnnnnnnnnnnnnnnnnnnnnnnnnnn

SEQ ID NO: 87071 - DNA, 547 bp, Arabidopsis thaliana columbia
tcggtcctattatgcccggcaccaactacactgaccatttccagcctaaggatcagatcggaagctatttctactaccccagcaccgcgatgcaccgttccgctggtggattcggtggtctccgtgtgaacagccgtctcctcatcccggtcccttatgctgacccagaagatgactacaccgtcttgatcggtgactggtacaccaagagccacacccagttgaagaaattccttgacagcggtcgtactcttggccgtccagatggtattctcatcaacggaaagtccgggaaaggcgatggatccgatgcacctctctttaccttgaaacctggaaagacctacagggttaggatctgtaacgtgggtctcaagacatctcttaactttaggattcagaatcacaagttgaagcttgttgagatggaaggatcgcacgttctccagaacgattatgactctctcgacgttcacgttggtcagtgttacggaaccatccttaccgctaatcaggaagctaaagattactacatggttgcatcctc

SEQ ID NO: 87072 - DNA, 669 bp, Arabidopsis thaliana columbia
aaaagagaagccagtaaaaagggctggaaaagggaaagacaagccgagtgataaagtgctgaaaaatgcaatcgttgagatcttgaaaagagtggactttagtacggctacgttcacggacatccttaaagaacttgctaaggagttcacagaagatctcactccaagaaagtcatctataaagatgataatccaagaggagctcaccaaattagcagatgaggaggaggaggaggaaaagaaagaagaggattcagagaaggaggaagcaggagggtctggtggtggtgaggaggtgaaagcctaaactcctttctgatcacatcgcacatattgagtctctctgtcagatactgttgcctaatgcctagtagtcatctggcaaatgtgtaagttaaatctgtggatgtaatattttgttgttggagtctgaactgcgtaaagcagctttacttttggtagagacaagaggaagaagctgcatagccaaaggataggttgcttgtatgtctatagcatttaacataaaagcctccttggattgtctttgatttgtgaggctcccttttcgagacaaaaaaaaaaaaaaaaaagggcggccgctttagaggatcccagcttacggacgggtgcatgcgacgtcatagtttttctatagtgttcacctta

SEQ ID NO: 87073 - DNA, 586 bp, Arabidopsis thaliana columbia
  unsure (1)..(586): unsure at all n locations
cannnnnnnnnnnnnnnnnnnnnnnnnnnnnnnnnnnnnnnnnnnnnnnnnnnnnnnnnnnnnnnnnnnccacgcgtccggtaataaatgaataatatgtttctcttgaaaaaaaaaaaaaaaggattcagagaaggaggaagcaggagggtctggtggtggtgaggaggtgaaagcctaaactcctttctgatcacatcgcacatattgagtctctctgtcagatactgttgcctaatgcctagtagtcatctggcaaatgtgtaagttaaatctgtggatgtaatattttgttgttggagtctgaactgcgtaaagcagctttacttttggtagagacaagaggaagaagctgcatagccaaaggataggttgcttgtatgtctatagcatttaacataaaagcctccttggattgtctttgatttgtgaggctcccttttcgagacattgtcaaggtttcttttgtttatgccttttggtttgaaggaggccaatggtaataaatgaataatatgtttctcttgattccaaaaaaaaaaaaaaaaaggaaagccctctagaggatccaagcttacgtacgcgg

SEQ ID NO: 87074 - DNA, 497 bp, Arabidopsis thaliana columbia
cccacgcgtccgcaaggtaatgaggaagaggtctgatgaaactttgaagctgcttcacccaattctatttggtgggaggagagggaaggctgctcagatcaagacaaacatattgggcttctctggtttcgtttggcatggagatgagaagaaagcaaaagaaaaagtaaaagaaaagcttgagaaatgcaccaaagagaaactgtgggagttttgtgatgtgttggacatacacattaccaaggctacaacaaagaaggtcattatggttatcaatttctaagtttttgttcttgagattcatttttttcctctgtgaatagatacatgtgaaggtttaaatttctgtctttgttgagcagcttgattagccatttctggttgtccaagtttatgcttattcatttccccatttaatcgaatctggcaacttcttgttgcatgctttttcaacacaggaagatattattacaaaactgtttgagtttttggagaaa

SEQ ID NO: 87075 - DNA, 1108 bp, Arabidopsis thaliana columbia
  unsure (1)..(1108): unsure at all n locations
attggccgtctgcggtaccggtccggaattcccgggtcgacccacgcgtccggaagaaactacaatagttaatcaatcaaagaaaaagtaaaagaaaagcttgagaaatgcaccaaagagaaactgtgggagttttgtgatgtgttggacatacacattaccaaggctacaacaaagaaggaagatattattacaaaactgtttgagtttttggagaaacctcatgtgacaggtgatgtgaccggtgacactacagtttctgagaaagagaagtcaagtaagggagcaaaacgcaagagaactcccaagaaaacttcacctacagctgggagttcatcctccaaacgatcagcaaagagccaaaaaaagtctgaagaagcaacaaaagttgtcaaaaagagtttagctcattctgatgatgaatctgaagaagagaaagaagaagaagaaaaacaagaggaggagaaggcagaagagaaagaagagaaaaaagaggaggagaatgaaaatggcattcctgataaatctgaggatgaggcgcctcagccttctgaaagcgaggagaaagatgaatctgaggagcattctgaagaagaaactacaaagaagaaacgtggttctagattgtcagctgggaagaaagaatcagcagggagagccagaaacaagaaagcagtggtcgctgcaaaatccagtccaccagagaagattacacagaagcggtcatcagccaaacgaaagaagactgatgatgacagtgatacaagtccaaaggcgtcctctaagaggaagaagtctgaaaaccctatcaaggcctccccggctccttcaaagtctgcatcaaaagagaagccagtaaaaagggctggaaaagggaaagacaagccgagtgataaagtgctgaaaaatgcaatcgttgagatcttgaaaagagtggactttagtacggctacgttcacggacatccttaaagaacttgctaaggggttcacaggaaggtctcacttccaagaaaagtccatcttttaatgattggtnattcccaaggggggctttacccaattttgcaggtttgggnggtggnggngggtnngganggnggggtttt

SEQ ID NO: 87076 - DNA, 423 bp, Arabidopsis thaliana columbia
gagacttctctctctcttctctctaaaatatttcagagatgagagaagcatctcctttggccgaccaaatttcttctagttttgctgtcccaatatataatcgggttttatgtccagcatctccgacttccggagttgtgatggctggccctctgtttggcatcatccggcttctataaggagcgttggccagcttcgtcgttttttctagtcgtccggtgtatgaggttcgtatcacgtttaatattcgctgtttggttattataaatccagtagatccggttatgtctctacttttgttcaattatttcgaggattaataagttcctgctccggtggcccctctcaaggttatgtgttgatagctttgttggatctagatgtttctttcgatttagttgtcaagacagttctgcgcctaag

SEQ ID NO: 87077 - DNA, 504 bp, Arabidopsis thaliana columbia
acgcgtccgagacttctctctctcttctctctaaaatatttcagagatgagagaagcatctcctttggccgaccaaatttcttctagttttgctgtcccaatatataatcgggttttatgtccagcatctccgacttccggagttgtgatggctggccctctgtttggcatcatccggcttctataaggagcgttggccagcttcgtcgtttttcctagtcgtccggtgtatcagctttgttggatctagatgtttctttcggatttagttgtcaagacaagttctgcgcctaagttagctggttaaaagctcagtataattgatgtttttgtccctccataactcgtggattgccataatccggtgggggaaaaaaagaaggtttccgttgttccgggcttcggtttttccgacggccggttctatgattcaccgtgatttgaagtctcatccagcagagattgtggaagtaacacgtgtcctcagcttatctttatgattct

SEQ ID NO: 87078 - DNA, 873 bp, Arabidopsis thaliana columbia
  unsure (1)..(873): unsure at all n locations
ttcactacttgggaaagctggccctgggccggccggatcccggctgagaaacacagagggtcggtgcaaaacacagaggtcggtgcaaaacacagagggcggtggtaaacacaaaggctagtttgtgcccaatatataatcgggttttatgtccagcatctccgacttccggagttgtgatggctggccctctgtttggcatcatccggcttctataaggagcgttggccagcttcgtcgttttttctagtcgtccggtgtatgaggttcgtatcacgtttaatattcgctgtttggttattataaatccagtagatccggttatgtctctacttttgttcaattatttcgaggattaatagttctgctccggtggcctctaacaaggttatgtgttgatagctttgttggatctagatgtttctttcgatttagttgtcaagacagttctgcgcctaagttagctggttaaaagctcagtatattgatgttttgtcctccatactcgtgattgccataatcggtgagaaaaaagaagattcgttgttcggcttcgttttccgacgacgttctatgattcaccgtgatttgaagtctcatccagcagagattgtggaagtaacacgtgtcctcagcttatctttatgattctgacacgttccttgaactgtatctctaatgggcctatttcatggctgtctgttatgggcttttatgccctttgtagctttattcagaaagttcaaatggagacatatcaataaaataatacttatgagaataaaaaaaaaaaaaggannnnnnnnnnnnnnnnnnnnnnnnnnnnnnnnnnnnnnnnnnnnnnnnnnnnnnnnnnnnnnnnnnnnnnnnnnn

SEQ ID NO: 87079 - DNA, 333 bp, Arabidopsis thaliana columbia
aagagacactagatcggaaacacttggggatttttttgagagaaacattctctcggttcctctactaccacctctcaaatctcaattcgccgattagtaactccgtccaagaccattttccgccgtgacaccgtccacggtctctctcagtccggaagaagataccatagttagaagctggtgatcattttcaataaacctcgaacatgtttaagaagttttgtttggaggagatttcatcacaaaaccaagtgaaggcatctgttcaacgtaggatccgccagagtatccaagatgagtacccgggacttgaatcagtgatggaggatctac

SEQ ID NO: 87080 - DNA, 554 bp, Arabidopsis thaliana columbia
  unsure (1)..(554): unsure at all n locations
cactcactttagggaaagcacgtacgcctgcaggtaccggtccggaattcccgggtcgacccacgcgtccggaaaagcaaaatcaaagacaataattttttccccgagagagaaaatgcagaggttgaagcagcagcagcagcagcaacaagttatgatgcagcaagctcttatgcagcaacagtctctctaccatcctggtctccttgccccgccacagatagaaccaatcccaagtggaaatctcccccctggttttgatccaagtacttgccgcagtgtgtacgttggaaacatccatattcaggtgacggaacctctgcttcaagaggtttttgctggcactggtcctgtagaaagctgtaaactaattaggaaagaaaagtcttcttatgggtttgtgcactactttgatcgaagatcggctggtcttgcaatcctttctctcaatggaaggcatttgtttgggcaacctatcaaggttaactgggcttatgcgagtggccagagggaggatcactaggctcttaacntttttggggtttngccggggt

SEQ ID NO: 87081 - DNA, 695 bp, Arabidopsis thaliana columbia
  unsure (1)..(695): unsure at all n locations
gcgacccacgcgnccgcggacgcgtgggacaaaatggctcgtcgcgatgttctcctccctttcctcctccttctcgccaccgtctccgccgtagctttcgccgaagatgatccagactgtgtatacacattctacctcagaaccggatcgatctggaaagccggaaccgattcgatcatcagcgcaagaatctacgataaggacggtgactacatcggaatcaaaaaccttcaagcttgggctggattaatgggacctgattacaattacttcgagaggggtaatctcgacattttcagtggaagagcaccgtgtttacctagtccgatctgtgccttaaacctaacctccgatggctccggcgatcaccatggttggtacgttaattacgttgagatcacgacggctggtgttcacgcacagtgctcgacgcaggattttgagattgagcaatggctcgctactgatacttctccttatgagctcaccgccgtacggaacaattgtccggtcaagcttagggatagtgttagtcgggtcgggtctgagattcggaaaaagctttcttgggtcgtttaagtgatgtgttgtgattcgtgagacttgtctgtattgtttgtattctcgttgttcttgtgagtgtaatgtggcgttaatgaaatatgattcaataaaataaaacctttttagttaaa

SEQ ID NO: 87082 - DNA, 641 bp, Arabidopsis thaliana columbia
  unsure (1)..(641): unsure at all n locations
aggacgcgtgggcggacgcgtgggtgagaaaatgcgtaaagagattgagtctagtcaggaaaatgcgttaagtttgtgtaccgagaaggttttattggcccgacaagcgtatgatcttatagatagtcatgtaaaacgacttgatgaagatctgaataattttgcagaagatttaaagcaagagggaaaaattccaccagacgagccctctgttcttcctccactacctatagttcctaaagcggaaaagcgtaagtccttctatggcacacctcagcccaagaagattgattatagagatagagactgggatcgtgacagggattttgagctcatgcctcctccaggaagcaatcggaaagaccttatgccaattgaagagcagccaatcgatccaaacgaaccaacttactgtgtctgccatcaggtgtccttttgngacatgattgcctgtgacaatgngnatttcaaggaggtgaatggtttactatacaatgcggtggctaaaacctgnggcccgnttnaaaggggaatggacttgcccacctgaagnnttctccacagtaaactatatcanttgnccnctgagaggattntttcctttanagactaggttccctgaattcctgatttntggtnta

SEQ ID NO: 87083 - DNA, 479 bp, Arabidopsis thaliana columbia
cgacctaacattttcgttcgctgcaaactcatggctgtaagtttttaatcttccttcgctaatccacgatttcgattccgttatttctttttggaacccagttttagaatttacttctagggcttgcaaaagctctgaagttcgagctcttctcttgttaatttgtccaattagaactaattaatggagtgttcacgaatcagaactgatgggtttggttttaggtttcgaaaaaatttgcttttttcattattatatgtatgaatgaagcttggtttgtaattgaacgtctatagttgatttttaggttactactgttttagatgtaattaaagagtatattaatactaagtagtttcattcaattattcagtggaaacatgagcaatgatccatttttgtttattgttttgaagaccataccagttaacccgaaaccagcttaaatggggaatggaatacaaaggtattcctattct

SEQ ID NO: 87084 - DNA, 597 bp, Arabidopsis thaliana columbia
  unsure (1)..(597): unsure at all n locations
tgatttttccagctacnnnnnnnnnnnnnnnnnnnnnnnnnnnnnnnnnnnnnnnnnnnnnnnnnnnnnnnnnnnnnnnnnccacgcgtccgtgtaacagtgccatttgtatctctgaactccaaccatggctcctctggttctctaccttctcactctcctcatggctggccataccagtgcctcatggtgtgtgtgcaaaacagggctgagtgactcagtgctacaaaagacattagactatgcttgtggaaatggagctgactgtaacccaactcacccaaaaggctcttgcttcaatcctgacaatgttagggctcattgcaactatgcagtcaatagcttcttccaaaagaaaggtcaagcttctgagtcttgtaacttcactggtactgccactcttaccaccaccgatcccagctatacaggatgtgcattcccttctagtgctagtggttctagtggaagcggtagcaccaccgtgacgccaggcaaaaacagtccaaaaggaagcaacagcatcaccacatttcccggcggaaacagtccatactctggcacaccatccaccggcttattaggaggcaatatcactga

SEQ ID NO: 87085 - DNA, 427 bp, Arabidopsis thaliana columbia
agcggacgcgtgggcgcgggagactctctctctctctccactctctctctcttttttctttgttttttcgtcacttgctcgtaaaatcccaaatcgagtaatggaagaaaaatcaaatacgatgatttagcttcccttcttattcttcccctatattcactgcgataactttgcctctcatctcataaattaaaaaaagaacactcttctcacaaattctttataattccccttttgatgtgtacggacacaccaccgaagcagaagcaggagaagaagaacacttctatctccgccgccgccgtcgtcgtcatcatcatcgccgccgttaaatgggtgagcctaaagacagtctcgctctctttctctgtcactaatcggagtcttctctaaacgaagactacgtcgtgacgattgagagatctga

SEQ ID NO: 87086 - DNA, 623 bp, Arabidopsis thaliana columbia
  unsure (1)..(623): unsure at all n locations
accacgcgtccggttcggggccaaataactctttaattttctgcagtctcatttgttattcgaccaaaaataatttatatccctttcctcaagaaatcttcagaaccgacttatctagagcttcgagtctcctcaaatcttcttctacgattttttcttctaggtttagagcttttgattctccgatcaatttcgcgatttgttgaactaggatctgaaattagaatgggtggtgaagcagattcgaggcagccgctgactgctgaaggcgtagctgtttgccgtgaacgtcagatgctccaatggcacgaaatttagtgtgacgacgagcctcgattccacggtggagtctttcaaagagttaattgcgcagaacagcgatgtgccggcaaatcagcagcgtttgatttacaagggacgtatcctcaaagacgatcagactctcctcagctatgggttgcaggctgatnacaccggtcaaaatgggtccanggtttgtgccctcttccctnctggtcccgntgnaaatgctggaancaancaatggcccaagnggtggtcaatgnnanccaacccgnggggggaccttggcccggctgggtaaccttgggggaannaaggng

SEQ ID NO: 87087 - DNA, 2978 bp, Arabidopsis thaliana columbia
tttcttttggttctctctcccacttgtgaagaagctcctcaagaagaaccctaaaaaaatgattcttctttgattttgtgtatttttacctgttcttgttggtgtttgtttgcttagttctgaagcaaaagctagggtttttcttcttcttcttgaaaatgccattgaaagaagatgattgttgtttattcgctgaagaatacgatggtccaccattatcatacaatatcccttgtgctgttcctattaacgtcgagaaaatcccagtcgccgccgttgtttctccggtttgtatttccgataacatgtctttccctgtgattcaaccgattttatcagtagagagtaaaaagtttctgatagattcggtttctcctacttctgttatagctaattgtggatctaatcagcttgaattggtttctgattcaatcactgtttctcctacttcggttattgaacatactgaggaagaagaagaagaagaaggtggtgatggtgaggattgtgaattgagtagctctggagagttattgttgaggtcttgttcagtgaaagagagtttagacttgaatgagtcgtcttcgaatccgttagtaccggattgggaatcgaatgagtcagttttgagtatggattacccgtcgtctcgtgttactggagattgtgttagtgagactaatggtgatggtaagaagcaaccagttgttactttcttgggtattgcttctgatgatggatttgaggaagaggagagttgtagtaacctgaggcgggttcgggttgtaccggttaagaaacagccgcagacgaaaggtaagaagggttcttgttatcggtgttttaaagggagtaggtttacggagaaggaagtgtgtttagtttgtgatgctaagtattgtaatagctgtgtgcttagagctatgggttctatgcctgaaggaaggaaatgtgttacttgtattggctttcctattgatgaatcgaagcgagggagtttagggaaatgctctaggatgcttaagaggttgcttaatgatttggaggttaaacagattatgaagactgagaggttttgtgaagctaatcagttaccagctgagtatgtgtatgttaatggacaacctctttaccctgaagagctggttacacttcagacttgttctaatcctcctaagaagctgaaaccaggggactattggtatgataaagtgtctggactttggggaaaggaaggagagaagccttatcagataattagtcctcatctgaatgttggaggtcctattagtccggaagctagcaacggaaacactcaagttttcataaacggtcgggagattacaaaagtggagctacgaatgctgcagttggcaggagttcaatgtgcgggtaacccacatttttgggttaacgaggatggatcgtatcaagaagaaggacagaagaataccaagggatacatatggggcaaggctgggactaagttactttgtgctgtattgtcacttcctgtaccgtcaaaatctaccgcgaatgcttctggggaacaactctatagcgcaaatagcagaagcattctggaccatcttgagcataggactttgcaaaaaattcttttggttggaaacagtggttctggaactagcacaatattcaagcaggcaaagatcctttataaggacgtaccattcttggaagatgagcgtgaaaacataaaggtgattatccagaccaatgtgtatggttatctcggtatgcttcttgagggccgggagcggtttgaagaagaagctcttgctctcaggaacacgaagcagtgtgtccttgaaaatatacctgcagatgaaggagatgcgaaaagcaacgacaaaaccgtcaccatgtactccattggcccgaggcttaaagcattttctgattggctattaaagactatggctgctggaaatcttggggtcattttccctgcagcctctcgtgagtatgcgccactagttgaggagttatggagggatgcagctatccaagctacatacaaacggagaagtgagctaggactccttcccagtgtcgctagttacttcttggagcgggctattgacgtgttgacaccagattacgagccatcagatttggatatattatatgcagaaggagtcacttcatccagtggtctagcttgtctcgatttctcatttccacagactgcatcagaagagaatcttgatccttctgatcaccatgattccctgctcaggtaccagttaattagagtaccctcgagaggcctcggggaaaactgcaagtggatagatatgtttgaagacgtcggaatggttgtgtttgttgtttccatgagtgactacgaccaggtgtcagaagatggaaccaacaagatgttactcacaaagaaactctttgaaagcattatcactcatcccatctttgagaacatggacttcctcttgattctcaacaagtacgatctcttggaagaaaaagtagaacgcgttcctttggcacgctgcgagtggttccaagacttcaatcccgtggtcagtcgtcaccgtggttccaacaacggtaaccccactttgggtcagcttgccttccacttcatggcggttaagttcaagcggttttactcttccttgaccgggaaaaagctgtttgtttcttcaagcaaaagtttggacccaaacagtgttgattcgtcgctgaagttagctatggagatactgaaatggagtgaggagagaacaaacatctgcatgagtgaatactctatgtatagcactgagccaagttccttctcaaattgatgtttttcacagtcaacaaaagagtctaatgtatatggtaacaactttcttgtgtatagattgccacgtagattgtattaacagagtactcaagcatcagtttacaaaccaatctcggtgtactaaaactgttacaatttaaccgattcttct

SEQ ID NO: 87088 - DNA, 552 bp, Arabidopsis thaliana columbia
tctactacgactcactattgggaaagctggcacgcctgcaggtaccggtccggaattcccgggtcgacccacgcgtgcgccttctccaacttcatcatctctctctctctctctgtttttctttttcaaacaaaatattgaaatttcactagacccacatgaagctcctcctttatagtagtaattcttgaatccaactcaaaaatgtttgctatatacaaatcaacccttcttcttcttcctctcattctcattcttctcatcactccacaagtctcatcctttcttcaacctatccaacctcctatttctcctcaagtcgctttgattgaagataaagcaagattaggttcaacaccaccaagctgccacaacagatgcaacaactgccatccttgcatggctattcaagtaccaactctcccgactcgctcccgcttcacacgagttaacccgttttccggtggattcgtacgacctccttcttctctaaccaccgttcttgatcagtactctaattacaaacctatgggatggaaatgtcattgcaat

SEQ ID NO: 87089 - DNA, 503 bp, Arabidopsis thaliana columbia
ccacgcgtccgcagacgcgtggggtttccctgccttgataaagttatcaagtccgcaactgaagctagtgatggattcaattatctgggcatttagacatactgagagaaatattgctgaaaccgggcttaatcttttgcttgagatgctgaaaaactttcagcaatctgaattttgtaatcaattctaccggtcatactttatgcaaatcgagcaagaaatatttgccgttttgaccgataccttccataagcctggcttcaagctacatgtgttggtgctgcagcaactgttttgcctgcctgagagcggtgctttgacagaacccttgtgggatgctacaaccgttccttacccgtatccggacaacgttgcatttgttcgcgaatacaccattaagctactgagctcttcattcccaaacatgactgcagcagaggtcacacaatttgtgaatggactatacgagtctagaaatgacccgtctggatttaagaataaca

SEQ ID NO: 87090 - DNA, 519 bp, Arabidopsis thaliana columbia
  unsure (1)..(519): unsure at all n locations
ccacgcgtccactttctctcatcttcaaattaaaatcaaacagtttcttaataacattttacttcatggctcgtaccaagcagacggctaggaaatcaaccggaggaaaggctccaaggaagcagctggcgacaaaagcggcgaggaaatctgctccggccaccggaggagtgaagaagccacacagattcagacccggaactgttgctttaagagaaatcaggaagtaccagaagagcactgagcttcttatccgtaaactccctttccagaggcttgtcagagagatcgctcaggacttcaaaaccgatcttcgtttccagagcagtgccgtcgccgctcttcaggaagctgctgaagcttacctcgtcggactcttcggaggcaccaatctctgcgccattcacgccaagagggtcacggtcatggcccagggccccccctncgngcgagaagtatcagagggggancgggttngatnttagnatttttgggtaacccttgggttttttnttngga

SEQ ID NO: 87091 - DNA, 476 bp, Arabidopsis thaliana columbia
  unsure (1)..(476): unsure at all n locations
cgggggacacaaagagaagtagagtcctctcttcaatttcaaccggcactttcttctcttcttcttcttcttcccaatcttcctcgtctctttacctacacccatatatatatatatatatatatatatatatctccttccctcacacacatacctgcacagctacaataatctacttcccctctttcaataacggaattattagtaatctaatcggaagattcaagcgngaaatcgtattntgntgcctgtaaatttgtngggaaataaattgaaataggagattgattggatggtgagaaggcaagaggaggngaagaaggcggagaagggaatgcgtctggggnaatacgagctagggaggncgctcggcgagggtaatttcggtaaagttaaantccgctaaagatnccggctccggtcattccttcgncgtnaaaatcatnggcaagctcgtatcgccggtctcaacttct

SEQ ID NO: 87092 - DNA, 464 bp, Arabidopsis thaliana columbia
tcaccctgaactagactcaatacacaagaaactgaaggagttggagaagaagatgaaactagctggatacaaaccggaactagagtttgctttacacaatgtagaggaagagcaaaaagagaagctattgttatggcacagcgagaagttagctgttgcatttggttgcataaaactccctcaaggttcacagatacaagtgttcaagaacttgagaatctgtggtgattgtcataaagcaatcaaatttatctcggagatagagaaacgagagatcattgtaagagacaccacaaggtttcaccatttcaaagatgggtcttgctcttgtggcgattactggtgaaaagagaagagctttgactctctcatttggtcaaaccctgcctggtttttatatgcgttattgtgtggtaaagtttcgacctttgacttgacaagtctgccgtaagaagagagatgcg

SEQ ID NO: 87093 - DNA, 776 bp, Arabidopsis thaliana columbia
  unsure (1)..(776): unsure at all n locations
aaacatnnnnnnnnnnnnnnnnnnnnnnnnnnnnnnnnnnnnnnnnnnnnnnnnnnnnnnnnnnnnnnnnnnnnnnnnnnnnnnatcaagatcggccgcctcagtttcattttcatctctctctctcgtattgatcagctactcgaaactccggtaacggattttcacaatcccggcggcgaaactcttcttcccggctaagttttcattttcttcagattcctcgtaaagttgccggtggaccaaggtccaactcttgaacaccccaaatcatgaatcccttttcttctggtactcgtttaagggacatgatccgtgccataagagcatgcaaaacagctgcggaggagcgagctgttgtaagaaaggagtgtgccgatattcgagcattgattaatgaagatgacccgcatgatcggcaccggaaccttgcgaaactcatgtttatacacatgctgggttatcccacacactttgggcagatggagtgcttgaagctaattgcatctcctggatttccagagaagaggattggatatctagggctaatgttgcttcttgatgagagacaagaagtgttgatgcttgtcacaaattcgttaaaacaagatcttaatcactcgaaccagtatgttgtaggacttgctctctgtgctttaaggaatatttgttcagcagaaatggcccgtgatcttgcgccagaagtagaaagattaatccagtttcgtgaccctaatatccgaaaagaagcggcgctttgctctactagaataata

SEQ ID NO: 87094 - DNA, 3258 bp, Arabidopsis thaliana columbia
  unsure (1)..(3258): unsure at all n locations
gaaaaaaacgagcacatcgtccatcgagatccaaatcctcagtttcattttcatctctctctcgtattgatcagctactcgaaactccgattcctcgtcgtaaagttgccggtggacgaccaaggtccaactcttgaacatcccaaatcatgaatcccttttcttctggtactcgtctaagggacatgatccgtgccataagagcatgcaaaacagctgcggaggagcgagctgttgtaagaaaggagtgtgccgatatacgagcattaattaatgaagatgacccgcatgataggcaccggaacctagctaaactcatgttcatacacatgctgggttatcccacacactttgggcagatggagtgcttgaagctaattgcatctcctggatttccagagaagaggattggatatcttgggctaatgttgcttcttgatgagagacaagaagtgttgatgcttgtcacaaattcgttaaaacaagatcttaatcactcgaaccagtatgttgtaggacttgctctctgtgctttagggaatatttgttcagcagaaatggcccgtgatcttgcgccagaagtagaaagattaatccagtttcgtgaccctaatatccgaaagaaggcggcgctttgctctactagaataataaggaaagttccagatctagcagaaaacttcgtaaatgctgctgcttccttgcttaaagaaaagcatcatggggttcttataacaggagttcaactttgttatgaattgtgcacgattaatgatgaagccctagagtacttcagaacgaaatgcacagagggactgataaaaactttgagggatattactaatagcgcatatcagcctgagtatgatgttgcagggatcacagacccttttctccacatacggttgctcaggctcttgcgtgttttaggccagggtgatgctgatgctagtgatttgatgacagatatacttgcacaggtggcaacaaaaactgaatcaaacaaaaacgcagggaatgcggtactctatgagtgtgttgaaacaatcatggccattgaagacaccaatagcttgcgtgtgcttgctatcaatatcttgggaagattcttatctaaccgcgacaataacatcagatatgttgcattaaacatgctgatgaaagctatcactttcgatgatcaagcagtgcaaaggcacagagttacaattttggagtgtgtgaaggacccagatgcttctatccggaaaagagctcttgagcttgtcactcttttggtgaatgaaaacaatgtcacacaactgacaaaggagctaattgattatttggaaatcagcgacgaagattttaaggaagatcttagtgcaaaaatttgttttatcgttgaaaagttttctccagaaaaactatggtacattgatcagatgctcaaggttctgtgtgaggctggaaagtttgtgaaagatgatgtgtggcatgcacttattgttgtcataagcaatgcatcagagcttcatggatatacagttagggccttgtacaaatcagtcttgacttattcggaacaggagacccttgtccgagtggcggtatggtgcattggggaatatggtgatctgttggttaacaatgtggggatgcttggtattgaagatccaataacggtaacggaatctgatgcagtggacgttatcgaggatgccattactcgccataactcagattcgactacaaaagcaatggcattggttgctctactgaagttgtcatcccgctttccttctatttcagagagaattaaagacataattgtgaagcagaaaggaagccttctccttgaaatgcagcagagagctattgagtacaattctatagttgacaggcataaaaatatcaggtcttctctggttgacagaatgccggtactggatgaggctactttcaatgtgaggagggccggctcttttcctgcatcagtttcaaccatggccaagccttcagttagccttcaaaatggtgttgagaaacttcctgtcgctcctctagtggacttgctagacctagattctgacgatatcatggttgcacctagtccatctggtgcagatttccttcaggatcttctcggtgtagacttaggttcatcgtcagcacaatatggtgcaacccaggctccaaaagctggcacagatctgttgctggatattctatcaattggaacaccttctcctgcacaaaacagcacatcatctattcgtttattatcaatagctgacgttaacaataatccctcaattgcgctagacacactttcttcaccagctccacctcacgtagcaacaacttcgtccaccggtatgtttgatttgctagatggtctttctccaagcccatcgaaggaagccaccaatggtccagcttatgcacctattgttgcatacgagagcagctccttgaagattgagttcaccttctcaaagacaccagggaatctgcaaacgacaaatgtccaggctacttttactaatttatctcccaatactttcacagattttatattccaggctgctgttccaaagttcctccagctgcacttggatccagctagcagtaacacactcctggcaagcggtagtggtgccatcacgcagaatctaagagtcactaacagccagcaggggaagaaatctcttgtgatgcgcatgaggattgggtacaaactgaacggaaaagatgtattagaggaaggacaagtcagcaacttccctcgcgggttgtgaaactcatcgatcagccattgtattttcagcataaggacttgagtgtttctttctatcaaacccaactaaaaaagaaagacaagtcttgcccaagccgttgatgcagctttctccttccaattttttcatccgttttatgaaacaagtagtactttggcctttgcttgtgatttgaggttcttgggttttctttttgtacaaaagttttgatgtttggaatcggaaagtggtcaagaagtagaatttgtctctcatgtctctgagactataaaaaagatgtgatttatgacccataaccataactcatgatgtatctactacagttacaattttcgtcttgcaaagaaggagtattggattttggatccaaaaaaaaaaaaaaaaaaaaaacacagagnnnnnnnnnnnnnnnnnnnnnnnnnnnnnnnnnnnnnnnnnnnnnnnnnnnnnnnnnnnnnnnnnnnnnnnnnnnnnnnnn

SEQ ID NO: 87095 - DNA, 3310 bp, Arabidopsis thaliana columbia
  unsure (1)..(3310): unsure at all n locations
gaaaaaaacgagcatcgtccatcgagatccaaatcctcagtttcattttcatctctctctctcgtattgatcagctactcgaaactccggattcctcgtcgtaaagttgccggtggacgaccaaggtccaactcttgaacatcccaaatcatgaatcccttttcttctggtactcgtctaagggacatgatccgtgccataagagcatgcaaaacagctgcggaggagcgagctgttgtaagaaaggagtgtgccgatattcgagcattgattaatgaagatgacccgcatgataggcaccggaaccttgcgaaactcatgtttatacacatgctgggttatcccacacactttgggcagatggagtgcttgaagctaattgcatctcctggatttcccgagaagaggattggatatctagggctaatgttgcttcttgatgagagacaagaagtgttgatgcttgtcacaaattcgttaaaacaagatcttaatcactcgaaccagtatgttgtaggacttgctctctgtgctttagggaatatttgttcagcagaaatggcccgtgatcttgcgccagaagtagaaagattaatccagtttcgtgaccctaatattcgaaagaaggcggcgctttgctctactagaataataaggaaagttccagatctagcagaaaacttcgtaaacgctgctgcttccttgcttaaagaaaagcatcatggggttcttataacaggagttcaactttgttatgaattatgcacgattaatgatgaagccctagagtacttcagaacgaaatgcacggagggacttataaaaactttgagggatattactaatagcgcatatcagcctgagtatgatgttgcagggatcacagacccttttctccacatacggttgctcaggctcttgcgtgttttaggccagggtgacgctgatgctagtgatttgatgactgatatacttgcccaggtggcaacaaaaactgaatcaaacaaaaacgcagggaatgcggtactctatgagtgtgttgaaacaatcatggccattgaagacaccaatagcttgcgtgtgcttgctatcaacatcttgggaagattcttatctaaccgcgacaataacatcagatatgttgcattaaacatgctgatgaaagcaatcactttcgatgatcaagcagtgcaaagacacagagttacaattttggaatgtgtgaaggacccagatgcttctattcggaaaagagctctagagcttgtcactcttttggtgaatgaaaacaatgtcacacaactgacaaaggagctaattgattatttggaaatcagcgacgaagattttaaggaagatcttagtgcaaaaatttgttttatcgttgaaaagttttctccagaaaaactatggtacattgatcagatgctcaaggttctgtgtgaggctggaaagtttgtgaaagatgatgtgtggcatgcacttattgttgtcataagcaatgcatcagagcttcatggatatacagttagggccttgtacaaagcagtcttgacttatttggaacaggagacccttgtccgagtggcggtatggtgcattggggaatatggtgatctgttggttaacaatgtggggatgcttggtattgaagatccaataacggtaacggaatctgatgcagtggacgttatcgaggatgccattactcgccataactcagattcgactacaaaagcaatggcattggttgctctactgaagttatcatcccgctttccttctatttcagtgagaatcaaaggcataattgtgaagcagaaaggaagccttctccttgaaatgcagcagagagctattgagtacaattctatagttgacaggcataaaaatatcaggtcttctctggttgacagaatgccggtactggatgaggctactttcaatgtgaggagggccggctcttttcctgcatcagtttcaaccatggccaagccttcagttagccttcaaaatggtgttgagaaacttcctgtcgctcctcttgtggacttgctagacctagattctgacgatatcatggctgcacctagtccatctggtgcagatttccttcaggatcttctcggtgtagacttaggttcatcgtcagcacaatatggtgcaacccaggctccaaaagctggcacagatctgttgctggatattctatcaattggaacaccttctcctgcccaaaacagcacatcatctattggtttattatcaatagctgacgttaacaataatccctcaattgcgctatacacactttcttcaccagctccacctcacgtagcaacaacttcgtccaccggtatgtttgatttgctagatggtctttctccaagcccatcgaaggaagccaccaatggtccagcttatgcacctattgttgcatacgagagcagctccttgaagattgagttcaccttctcaaagacaccagggaatctgcaaacgacaaatgtccaggctacttttactaatttgtctcccaatactttcacagattttatattccaggctgctgttccaaagttcctccagctgcacttggatccagctaacagtaacacactcccggcaagcggtagtggtgccatcacgcagaatctaagagtcactaacagccagcaggggaagaaatctcttgtgatgcgcatgaggattgggtacaaactgaacggaaaagatgtattagaggaaggacaagtcagcaacttccctcgcgggttgtgaaactcaccgatcagccattgtattttcagcagaaggacttgtgtttattttcatcaaccggactgtaaaagaaagacaagtcttgccgaagccgttgatgcagcaaaagcagctttctccttacaaattttttcatccgtttcttgaaactactactatggcctttgtttgggattttgaggttcttggggtttctttttttgtacaaaagtttcgacgtttggaatcggaaagtgatcaaagaagtagagtttgtctctcgtgtctgagacttcaaaaaatacgtgaatcataacccatgatgtatctactacagtttcagctttgtcttgcaaaaaaaaaagttttggattttggatatgggaccatgtcgtagtttgcatgtacatttgcactcttgcttgatcaacaatatctcatagttgaaagtctnnnnnnnnnnnnnnnnnnnnnnnnnnnnnnnnnnnnnnnnnnnnnnnnnnnnnnnnnnnnnnnnnnnnnnnnnnnnnnnnnnnnnnnnnnnnnnnnn

SEQ ID NO: 87096 - DNA, 429 bp, Arabidopsis thaliana columbia
acaaactccgaaattataagaagtaaagacaaccatggtgagtgctaccttctccttctgtcccctctctcaatcccatccccattcttctctaatcaaaccgacaccgtttctcagatatggcaagaaactacaccatcttcaccaccacatcttcatcaccatctcttacccatctcaccattctcgctacttggccgtttcaagagacgatgccgcgacgcctctttcttcttccgaccaaacccaagagacagagaccaaagaagtggaagacactatagagaaacgaagaatggaggagaagtttgctgttctaaacactggaatctatgagtgtagatcatgtggttacacgtacgatgaatcagcgggtgacccatctgtacccggactcaccgggtttcagtttgataagttgcctgaaga

SEQ ID NO: 87097 - DNA, 536 bp, Arabidopsis thaliana columbia
  unsure (1)..(536): unsure at all n locations
cnnnnnnnnnnnnnnnnnnnnnnnnnnnnnnnnnnnnnnnnntaaaaacacaaactttcctgaaaaagtcgtccccgcgtgcgagcattgataaatccgacaagaagtccgattttgttccatagcttgcttgtgtttttagtggattgagtcactgaaagagaaatcataaggctttgttgatgatggatcatttggtggagacgaattcagttccgagcagattggtggaagaaaggcttgatgagattcgtagagtaatgggtaaagctgatgacgacccgttaaggatcgttggtgtaggagctggtgcttggggaagcgttttcattgcaatgttgcaggaaaattaccggtaagtttaggggcaaagttagtgtgagaatctggagaagaggaggcagagcattcgataaagccacagctgcacatttgttcgaagtgattattcgagggaagaatttgtgaggaggttgatagaaggggtgcttatctcaggattgggcagctagattaggggatagggtttatatgct

SEQ ID NO: 87098 - DNA, 1036 bp, Arabidopsis thaliana columbia
  unsure (1)..(1036): unsure at all n locations
nnnnnnnnnnnnnnnnnnnnnnnnnnnnnnnnnnnnnnnnnnnnnnnnnnnnnnnnnnnnnnnnnnnnnccacgcgtccgtgcaaacttgagctttgtattccgacaaaaaaatggcgactgcgtctctagttccgacatctaaaatcttctctgtctctccgaaatcctcagcttcgattaaagcaaggagcagagtagttgttgcatcgtcgcaacaacaacaacaaccaagaaggagagagcttctgctgaaatcggcggtggcgattccggcgattctgcaattgaaggaagctccgatatcagcggcgcgtgaggtggaagttggatcgtacttacctctgtctccgtctgatccttctttcgtcctgtttaaagccaaaccttcagatactcctgctctccgcgcaggaaatgttcagccctatcagtttgttctaccgccgaattggaaacagttgcgaatagccaatattttgtcaggtaattactgtcaaccgaaatgtgcagagccatggatcgaagtgaagtttgagaacgagaagcaaggcaaggttcaagtagttgcatctcctttaatccgcttaaccaacaaaccaaatgcaactattgaagatctcggtgagcctgagaaagtgattgcttctcttggtccttttgtcaccggaaactcttatgactctgatgaacttttgaagacttcaatcgaaaaaattggagatcaaacgtactataagtatgtgttggagacgccatttgcgctcacgggaagtcacaatcttgcaaaagcgacagcaaagggaagcacggttgttttgtttgttgtaagtgctactgaaaagcaatggcagagctcacagaagactcttgaagccattcttgattcttttcaactgtaaatcagagtttttgttatgactctggacttgagaaactaaagagcaaacagtttatgctaaaaaaaaaaaaaaagggcggccgctctagaggatccaagcttacgtacgcgtgcatgcgacgtcatagctctctat

SEQ ID NO: 87099 - DNA, 567 bp, Arabidopsis thaliana columbia
  unsure (1)..(567): unsure at all n locations
gccnccannntcttnaagnccgggaagcccccccttgggattctccccccccgcgggggtttattgccccctcttggaccgcttaccaactttcccccttccgggaacccgggattcccaaggtgtgacccccattanctttgatgggnaccggaactnccagtattggttttgaaagccccaggctgtatccccctgaaaccaggtttgatnccgttggaaaaccgagaggaatggatgtatgcatcagcacaaccggctaaaagcgatcaagaaggacagaaactattggctctaatgggaatgcctttcagggaaggaggtggtggcagcacaggcgcgatagtgcggaagaagaaactaaagtctcatcactttgatgctaaaggaaaaggaaagagatgatgaacatagctgcctattgtatgtatcgtcttctgtaaccaaccatttcatgtttcagaaaaaccatctccttttgtaatgctttatgagtcaatttgaaaataatatcagggatcttgttgttatggtaaaaatttatcaaggtttttctgtaatttattg

SEQ ID NO: 87100 - DNA, 1161 bp, Arabidopsis thaliana columbia
ggcagacggactatgcaccccccggccccgcgggcgtagtatcgccggcacatatacgactcatatagggaaagctggtacgcctgcaggtaccggtcctttatccacttggagcttcgacaatggcgtctccttcgcttctgcagtcttccgcttcttcgtttcacggacgtttctcaccattagcggctccatcctccgcacgaatgctctctccgccgctcagaaacgtggtgaaagtctcggcgtctggaactgtactggtcgagaaatctgaagccgagaaaactcaacgcctcaaaaccgcttacctcgagaggattatccctgcgctcaaagaagagttcaagtacgttaatattcaccaggttccaaaggtacagaagattgtagtgaattgtggtattggagatgcggcgcagaacgacaagggtttggaggctgcgatgaaggatatcgcgcttatcacagggcagaaacctattaagacacgagctagagcttccattgctactttcaagatcagggaagatcaacctcttgggattgctgtcactctcagaggagatgtaatgtactccttcttggatcgtcttatcaacttagcccttccgagaactcgagatttccaaggtgtgagtcccagtagctttgatgggaacggaaactacagtattggtgtgaaagaccaaggtgtattccctgaaatcaggtttgatgccgttggaaaaacgagaggaatggatgtatgcatcagcacaacggctaaaagcgatcaagaaggacagaaactattggctctaatgggaatgcctttcagggaaggaggtggtggcagcacaggcgcgatagtgcggaagaagaaactaaagtctcatcactttgatgctaaaggaaaaggaaagagatgatgaacatagctgcctattgtatgtatcgtcttctgtaaccaaccatttcatgtttcagaaaaaccatctccttttgtaatgctttatgagtcaatttgaaaataatatcagggatcttgttgttatggtaaaagcggccgaaggtttttctgtaatttaaaaaaaaaaaaaaaaaaaaagggcggccgctctagaggatccaagcttacgtacgcgtgcatgcgacgtcaaagtcttctataggttcacc

SEQ ID NO: 87101 - DNA, 1268 bp, Arabidopsis thaliana columbia
  unsure (1)..(1268): unsure at all n locations
ttaggtacactatagaagactatgacgtcgcatgcacgcgtacgtaagctcggaattcggctcgagaatggcatcaattctcaggtcagtggcaacgacttcagccgtcgtagccgccgcctctgcgattcccatcgcgatcgccttctcttcttcttcttcttcttcctctaccaaccccaaatctcaatctctcaatttctccttcctctcccgatcgtctccacgtctcttgggactttcacgaagcttcgttagctctccgatggcgactgctctcacttctgatcgtaatctccatcaggaggatcgagccatgcctcagcttcttactgagtttatggtggatatgacatgtgagggttgtgttaatgctgtgaagaacaaattagaaaccattgaaggtattgagaaagtggaggtggatttgtccaatcaagttgtgaggatacttggatcttcccctgttaaggctatgactcaagctttggagcaaactggtcgaaaagctcgcttaattggacaaggtgttcctcaagatttcttagtctcatctgcagtagcagaattcaaaggccctgacatttgtccgggggtagtccgatttgctcaggtcagtatgggaacttgcaagaatcgtaagccaacttttaccggtttgtcacccggaacccacagctggtgtatcaacgagtatggagatctcacaaacggagcagccagcacagggagcttgtacaatccatttcaagatcaaactggcacagagccattgggagacctgggaacactagaggcagacaaaaacggagaggccttttattcgggaaagaaagagaaactcaaggttgcagaccttatcgggagagccgtcgtggtgtacaagaccgatgataataagtcaggccccggattgaccgccgcagtgattgctagaagcgcaggggttggagaaaactacaaaaaactttgttcttgtgatggtactgtcatatgggaagctacaaacagcgatttcgtggccagtaaggtttaataacaagtcaacaaccatacattttataaaacgttacgttttttagtgattgagaacttgttttgtatcaaaacttgaggtttatattgaaacaacacaagctttttgttttgtaccaaaaaaaaaaaaaaattcaattgcgtaaaaaaaaannnnnnnnnnnnnnnnnnnnnnnnnnnnnnnnnnnnnnnnnnnnnnnnnnnnnnnnnnnnnnnnnnnnnnnngagtagct

SEQ ID NO: 87102 - DNA, 416 bp, Arabidopsis thaliana columbia
gaaaaaagcatatcaatctctgtgcctctctcaattctcaaattctgaattctgagcgtatcttcttctctttgaggttatcatttgaatatcttcttcatcttcttctccaagcccctctctctctgtatcgatcaatcatcaataggaggagctagcgaggggattcaataaagagatcttcttcttcttcttcgattcactttcctttcttttccattttccctttcgtcgtcgtcgtcaatggtgatggaggacaacgagagttgcgctagtagagttattttcgacgccttacctacctcccaggccactatggaccgccgtgagcgcatcaaaatggaggtcttcgatgaggttctccgccgtctccgtcaatcggacattgaagacgcccatctccctggtttcgaaga

SEQ ID NO: 87103 - DNA, 641 bp, Arabidopsis thaliana columbia
tgtgctggatatcgagttctcggccgcccggtggctacgtcatgtgtctttctcatattccggcaatcctcaagaggaaatctagaatcctccatacatttcttatttccttactagggttttgtgtgtgttggcaggtggaagctgacgaagaacaacatcatatatcattcaccaagtaagtaatgtaaagtaaagtagcagctctatttattttctttcctatgattgagatgaaaaattcgattgttgttgtgtgagacagtggtacgagaaaaagatatctgctgggaatacgcagagaaactagatggtaacaaggttaaatgcaagttttgctctagagttcttaatggcggcattagtagattgaagcatcatctctctcgccttcccagtaaaagggggttaatccatgttgccaaggttagggccggtgttacctcgatagagtccgttccattttatctgccaaggatgatccccccattaccaacaagtacaagcctccaccacctttatctcctccgtttgatgctcctgcgtccaaactaatctttcctagttctcctgctaatgcgcaggacattgcagagaggagtatttctctcttcttctttgagaacaagattgacttcgct

SEQ ID NO: 87104 - DNA, 846 bp, Arabidopsis thaliana columbia
  unsure (1)..(846): unsure at all n locations
cnnnnnnnnnnnnnnnnnnnnnnnnnnnnnnnnnnnnnnnnnnnnnnnnnnnnnnnnnnnnnnnnnnnnnnnccacgcgtccgcccacgcgtncgtacggctgcgaggacgacagaagggtacggctgcgagaagacgacagaagggtccactgttgttaagttgcagagcgccatcaaattcaacggcggaggtcatgtcaaccatttcgatttctggaagaaccttgctccttccagtgaaggtggtggagaccaccaaaggatctcttggtagtgccattgacgctcactttggctcccttgaaggtctggtgaaaagatgagtgctgagggtgctgcagtgcaaggctcaggatgggtgtggctcggactagacaaagaactgaagaagctagttgttgacacaactgccaatcaggatccattagtgacaaaaggaggaagcttggtacctctggtgggtatagatgtttgggagcacgcctactacttgcagtacaaaaatgtgaggcctgagtatctgaagaatgtatggaaagtgatctactggaaatatgcaagcgaggtttatgagaaggaaaacaactgaatcgtttacacgatgacataaggagatgaaccagttccagctcagcttttgttttaaggttgtctgaaacaaacttacagtgtctctttggtttttaagatttgcgccactcagctgtgtgggacgttgttttaccatgaaagttttccagaataaaaatttgctattattgtctccaaaaaaaaaaaaaaaaaaaaaccaaannagcggccgctttaaaggaatccagcttacggaagcggcacatccacgtca

SEQ ID NO: 87105 - DNA, 805 bp, Arabidopsis thaliana columbia
tacgacggtaactatgggtaccgtgagcagttcacttttacatttggtgctgagatctacggggggaaaccagcccagcgaagggagaaagtcacattcatatcaaaccctccagacaatgttttcacttggaagatacttcatttctctaccttggaagataaagtctatcagtctaacgagtttcttgttggagaccgatactggaaattaggattaaacccgaaaggaggcttagtcccaatctttctatatgctcaaggccttaaggcaaacgcagttgttacaaccacttgggcagggacggttaggctgcggttaaagaaatcaacgaagctcagcaaccacgttacaactatattctgcagcttggtacccgattccaagcggattatggtgtgggagtgtacactatcatattgatgtcagagctaaaagatgcatcaaaagggtatatggtgaatgatgccattatctttgaagctgaaatggtaaggtctctgtgcccacaaaggtctcccgcttaaaaaaaaacccctacttcttaaccacccaaaaaacccttccaaaaagaagtttgatgagtttaatttgtaatccgccaccgtaattaaggcttgtaaggtaatcgtggtttcggctctccgagttttcggtttttttccatgttttgctaccaatgaaataaaggtataaacctaaaaaaaaaaaaaaaaggcggccgcttctagaggatccaagcttacgtacgcgtgccatgcgacgtcatagctctctaatagtggccaccctaaagccaaacccg

SEQ ID NO: 87106 - DNA, 1323 bp, Arabidopsis thaliana columbia
gaatttccgggtcgacccacgcgtccgctcaaaaatggagtataggtttcatatctctcgcttttctcatatctcttcctcttccgctgagctcctcattaaacaggccacagaaggcagaggaatagaatacaacagttctcacagttcacgaatggagtgacaagagtgtggagggatgaccgaccatcggataagattctttcgataaccagcttctcaataattaggacgagacctgaaccctatgaatcctctgtttttgaggctgttggttacaaatggagattggttttgtacgtgaatggtaatgaaaaggacggtggaaaagatcatgtttcactttacgcgaagatcgtagagacagaatctcttccagtaggatgggaagtgaatgttgatctcaaactctttgtctacaatgggaagcaacgcaagtatttgattgttaaagatggaatagtgaaacgatacaatgatgcgaaaaaagagtggggatacggaaaattgattcctcttacaacattccttgacacgaacgaaggttatcttgagcaggacattgcttcttttggtgctgagatcttcagcggcacagcggtccaagtacaagagaaagtcacattcatatccaaccctccaaacaatgttttcacttggaagatacttcatttctctaacttggaagataaattctattactctgatgattttcttgttgaagaccgatattggagattaggatttaacccaaaaggtactggtgatggaagatcacaagcgatcccaatcttcctatatgctcaaggccataagccaaacgcagttgctacaaacacttggggagcggttaatctgcggttaaagaatcaacgaagctccaaccacgcacaaatatattctgcagcttggtaccctactcgaagcgattatggtgtgggagttaacactatcatatcgttagcagaattcaatgatgcatcgaaagggtattcggtgaatgattccattatctttgaagctgaaatggtgaaggtctctgtgaccaacattgttcccatttaaatatctctattctctacttttctgtcatcgatcaaacaaccttatgagttatgaataaggagacgtttgatgagttttaataagatgaagtttaaaatgcatgtgatgtaatcgttatttcttggtcggtccttctttgttctgctttgttttcaataaaatgaaactctattgcttttaaaaaaaaaaaaaaaaagggcggccgctttaaaagaatccagcctacggaggcgtcctgcacgtcaagctctcaaggtc

SEQ ID NO: 87107 - DNA, 830 bp, Arabidopsis thaliana columbia
  unsure (1)..(830): unsure at all n locations
gtgaagcgatacaacgatgcaaaaaaagagtggggattcacacaattgatttctcttccaacattctacaacgcgaacgaagggtaccttgtgcaggacacagcttcttttggtgctgagatcttcatcgttaacccgacagaaaaacaagagaaagtcacattcatatcaaaccctccgaacaatgttttcacttggaagatacttcgtttctctaccttggaagataaattctattactctgatgattttctcgttgaagaccgatactggagattaggatttaacccgaaaggatctggtggagggagaccacatgcacttccaatcttcctatatgctcaaggccataaggcaaacgcagttgttacaaacacttggggagcggttaatctgcggttaaagaatcaacgaagctccaaccacaaacaattatattctgcagcttggtaccccgattcgaagcgattatggtgtgggagtgaacaatatcatattgatgtcagaagctaaaagatgcatccaaaagggtatatggtgaatgatgccattatcttttgaagctgaaatggttaaggtctctgtgaccaacatagtctccgcttaaatatatctatcactacttctttatcccccgagaataaccttacaaagaaaagaagtttgatgagtttaatttgttatacgacaacgttattgatgcctgtgatgtaaccgttgtttccgctccccgagtttccgttttttttcatgttttgctatcaatgaaataaaggtataaaactaaattggttttaaagttnnnnnnnnnnnnnnnnnnnnnnnnnnnn

SEQ ID NO: 87108 - DNA, 1029 bp, Arabidopsis thaliana columbia
  unsure (1)..(1029): unsure at all n locations
cgcgcaannnnnnnnnnnnnnnnnnnnnnnnnnnnnnnnnnnnnnnnnnnnnnnnnnnnnnnnnnnnnnnnnnnaatcttcattccagcaatggcgattcgttgtgtagcgagtagaaaaaccctagccggcttgaaggagacatcatcgaggctattgaggatcagagggattcagacttttacgcttcctgatcttccttacgattatggcgcattggaaccggccattagtggagagatcatgcagattcatcaccagaagcatcaccaggcttatgttactaattacaataatgctcttgagcagcttgatcaagctgtgaacaagggagatgcttccactgttgttaagttgcagagcgccatcaaattcaacggcggaggtcatgtcaaccattcgattttctggaagaaccttgctccttccagtgaaggtggtggagagccaccaaaaggatctcttggtagtgccattgacgctcactttggctcccttgaaggtctggtgaaaaagatgagtgctgagggtgctgcagtgcaaggctcaggatgggtgtggctcggactagacaaagaactgaagaagctagttgttgacacaactgccaatcaggatccattagtgacaaaaggaggaagcttggtacctctggtgggtatagatgtttgggagcacgcctactacttgcagtacaaaaatgtgaggcctgagtatctgaagaatgtatggaaagtgatcaactggaaatatgcaagcgaggtttatgagaaggaaaacaactgaatcgtttacacgatgacataaggagatgaaccagttccagctcagcttttgttttaaggttgtctgaaacaaacttacagtgtctctttggtttttaagatttgctcaactcagctgtgtggtacgttgttttacaatgaaagttttcaagaataaaaaaaaaaaaagaggaagggcggccgctctagaggatccaagcgtacgtacgcgtgcatgcgacgtcatagtaatctatagttcgcc

SEQ ID NO: 87109 - DNA, 1297 bp, Arabidopsis thaliana columbia
  unsure (1)..(1297): unsure at all n locations
attcgttgtgtagcgagtagaaaaaccctagcttgcttgaaggagacatcatcgaggctattgaggatcagagggattcagacttttacccttcctgatcttccttacgattatggcacattggaaccgaacattagtggacagaacatgctgaagaatgaccaccatcatgtcaaatcgtgacattctcaagccaataagggattaaaggcagtggagcaccctatgaatactgtggatgtgaggctgctggttacaaatggagattggttttgtacgtgaatggtaataaaaacgacggtggaaatgatcatatttccctttacgcaaggatcgaagagacaaactctcttccattaggttgggaagtgaatgttgatctcaaactctttgtccataatgggaagctacacaaatatttgactgttacagatggcttagtgaagcgatataacaatgcgaaaaaagaatggggtttcggacaattgattcctcgatcaacattctacaacgcgaacgaaggttaccttgaccaggacactggttcttttggtgctgagatctttattgttaaaccggctcaacaacaagagaaagttacattcatatcaaaccctccaaacaatgttttcacttggaagatacttcgtttctctaccttggaagataaattctattactccgatgattttctcgttgaagaccgatactggagactaggatttaacccgaaaggggatggaggaggaagaccacatgcacttccaatcttcctatttgctcaaggccataaggcaaatgcagttgctacaaacacttggggagcggttaatctgcggttaaagaatcaacgaagtactaaccatagacaaatatattctgcagcttggtacccgattggaagcggttatggtgtgggagtgaacaatatcatactgttagctgatttaaacgatgcatcaaaaggatatttggtgaatgatgccattatctttgaagctgaaatggttaaggtctctataaccaacatcgtctccgcttaaatatctgcacttctttgtctacgatcaatcaaccttatgaataaaaagattttaatttgatgagtttgtaataagaaaacgttaatgtttgtgaattgtgaagttattacttctgttcttctgagtttttttatttcaatgaaaataaaactcttaccggtttaaattaaaaaaaaaaaaaaaaaagnnnnnnnnnnnnnnnnnnnnnnnnnnnnnnnnnnnnnnnnnnnnnnnnnnnnnnnnnnnnnnnnnnn

SEQ ID NO: 87110 - DNA, 1375 bp, Arabidopsis thaliana columbia
  unsure (1)..(1375): unsure at all n locations
tatngtccgcggaccgcgaatgggctctcaaaatatggatagtcacaaatggagtctaggtttcacattacttgctttcctcttcatcacttcctcttccgctgagctcatcattaaacaggtcacacagggcagaggaatagagtacaacaactcttacagtctcacgtcgaatcttggagtgacgacaagagagttgagagacgagcgaccatcaagtaagatagtgacaatcacaagcttctctgtgattaaggacagaggagaaccctatgaatcatctatttttgaggctgccggttacaaatggagattagttttgtacgtgaagggtaatccgaaaggcggtataaataatcatatttcactttacgcgaggatagaagagacagaaactcttccaagagggtgggaagtgaatgttgatctcaaactctttgtccacaatcggaagttaaagaaatatttgtctgttacagatggaacagtgaagcgatacaacgatgcaaaaaaagagtggggattcacacaattgatttctcttccaacattctacaacgcgaacgaagggtaccttgtgcaggacacagcttcttttggtgctgagatcttcatcgttaacccgacagaaaaacaagagaaagtcacattcatatcaaaccctccagacaatgttttcacttggaagatacttcgtttctctaccttggaagataaattctattactctgatgattttcttgttggagaccgatactggagactaggatttaacccgaaaggatctggtggaggaagaccacatgcacttccaatcttcctatatgctcaaggccataaggcaaacgcagttgttacaaacacttggggagcggttaatctgcggttaaagaatcaacgaagctccaaccacaaacaattatattctgcagcttggtacccgattcgaagcgattatggtgtgggagtgaacaatataatattgatgtcagagctaaaagatgcatcaaaagggtatatggtgaatgatgccattatctttgaagctgaaatggttaaggtctctgtgacaaacatagtctccgtttaaatatcactacttctttttcaacaacaaccttacgaataaagtggactttgatgagtttaatttgttatacgacaacgttgttgatgcttgtgatgtaatcgttgtttctgctctccgagttttcgttttactttttttttcatgttttgctatcaatgaaataaaggtataaaactctcttggtttttaaaagttttttaaaaaaaaaaaaaaaagaagggcgggccggttttagaggaatccaaagcttacgtnnnnnnnnnnnnnnnnnnnnnnnnnnnnnnn

SEQ ID NO: 87111 - DNA, 536 bp, Arabidopsis thaliana columbia
gctctctacgactcactattgggaaagctggcacgcctgcaggtaccggtccggaattcccgggtcgacccacgcgtgcggtgctcgtcgaagaaacttctccaacctaaaattttccgaagaagtaagagttgagcaagttatcaatggaaatcgatgaagaagagccaatggtgttcttggaccgtacaacaagagcaacacggggtaaacggatgaccaagttgcttgatgacgaagtagaagaagatgaacagttttggaatcaagaagctcttaaagaggaagaacatgatgatgaatatgaagcagaacgtgaggttgctgatgagtttgacagtgacttcaatgacgatgagcctgagcctgatgcagtcgctgtaaatgaaaaagaattgagggatctgccaaagaagcggctgatttaccctgggaaaactgcttcaaagaaaagaaaaaatggacgaaggtagtttcacaactagaatttatccctggagatgagaggcccaggtgaagaattggaaaacaggaac

SEQ ID NO: 87112 - DNA, 512 bp, Arabidopsis thaliana columbia
aatgaatttaggtgaactatagaagactatgacgtcgcatgcacgcgtacgtaagcttggaatctctatagagcgctcggcctctctgtcgcgctcccaatttctccgccggcgggaaaaccatgtcgcacttcgggagggcaggtccacccgttagcagcgacacctactcacttctcgtcctttacatcacctttcgtacgactgctgatgatctctatcccctcattcccaaagttttgaaaggggggggggcgcgcccattcccacagatctaaggaatggtgatttcaagggtatacgtttggttggtataagcctaaacacaaaggtgaaaaataggggaaaggtttgagggaaaaggtttttttgccgaaaaaaaactgttttttgtggggaaaatagggccaaatgctgaaaacattatcaaaggaaggagttgtggaacctccgcccgaaatctcaataatctagaccccccactcctaggcggagttttatttttaggaaga

SEQ ID NO: 87113 - DNA, 1015 bp, Arabidopsis thaliana columbia
  unsure (1)..(1015): unsure at all n locations
acgatattttaggtgacactatagaagagctatgacgtcgcatgcacgcgtacgtaagctcggaattcggctcgagcttcgtctctctctcgcgctcccaatttctccgccggcgggaaaaccatgtcgcacttcggaaggtcaggtccaccggatatcagcgacacctactcacttctcgtccttaacatcaccttccgtacgactgctgatgatctctatcctctattcgcaaagtatggaaaggtcgttgatgtgtttattcccagagatcgaaggactggtgattcgcgtggttttgcgtttgttcggtataagtataaagacgaagctcacaaagcagtggaaaggcttgatggaagagttgttgatggcagagaaataactgttcagtttgcgaaatatgggccaaatgctgaaaaaatttccaaaggaagagttgtggaaccaccgccgaagtcacgaagatctagaagccgtagtcctaggcggagtcgtagtcctaggaggagccgtagcccgcctagacgtcgtagtcccagaagaagccgcagtcctcgtaggaggtcccgagatgactatagggaaaaagactaccggaagcggagcaggagcagaagctatgacaggcgtgaaaggcatgaggagaaggatagagatcatcgtcgtcgcactaggtctcgtagtgccagcccagatgaaaaacgcagagtcagaggccgttatgataatnagagccgcagtcacagtcgttccttgagtgcatctcctgctcgccgcagccctagaagttcctccccacagaaaacctctcctgctagagaagtttctcctgataagcgtagaaatgngaggtctncatcttctcgtcgcagcctcagcccaagaagncctgcttttcaaaaangnctctccttctaaaggagatgttttcttgaaggcgtanaaatnnngaggtccccatntcctggtagccctgttccttttngnaaaanattattncttgttnttgaag

SEQ ID NO: 87114 - DNA, 480 bp, Arabidopsis thaliana columbia
acccacgcgtccgcaaatctcaatcatcctgcttcccattaagaaaccccttatcttggagtaatcagagagtttgaaaacaccagaaatcatggcgacaggaccagttgttcatcctcaaccagttagaggtgatcccatcgacctcaaaaacgcagcagcaaagaatcgtcgtgctcttggcgacattggaaacgtcgattctcttattggagtcgaaggaggaaagcttaaccgccccattactcgtaactttcgtgctcagttgctagaaaacgcacaagttgcagccgccgctaacaaaaaggctccgattcttgatggagttactaagaaacaagaagttgtaagagcggttcaaaagaaagcaagaggtgataagcgtgagccgtcaaaaccaatcgaagtgattgtgataagtcctgatacaaacgaggttgctaaagctaaagagaacaagaagaaagtgacatactcttc

SEQ ID NO: 87115 - DNA, 481 bp, Arabidopsis thaliana columbia
attttcttagcgtcgctctctgtcaccttcaagttcactatctccgacttatcttctgtcaagtactgaacaagaatcatggaggagatcaccaaaccggtccttgttggaatagttaagaaagaagctccacagctagcatccgtgttgagagaaatgaagaatgttctagatgtggttaggagcaaagtggaagctctgactgcattggtaaaagcaaacagttttccgacagcgggtgggataagttatcttgaggccaagcatctgttacttctaagttattgccaggatcttgtatattatattctaaggaaagcaaaaggactctctattgatggccatcctcttgtaaggagccttgtagagatacgtatgtttctggaaaagattcgtcccatagacaaaaaacttcagtaccagattcagaagctcaccacagccggtgggcctgtgacagagctagctcattccgagggaa

SEQ ID NO: 87116 - DNA, 1006 bp, Arabidopsis thaliana columbia
  unsure (1)..(1006): unsure at all n locations
gccggcactaatacgactctcttagggaaagctggtacgcctgcaggtaccggtccggaattcccccacgcgtccgctcatttcctccaaacgtcaaacatagcagcagccatggctgccaccaacacaatcctcgcattctcatctccttctcgtcttctcattcctccttcctccaatccttcaactctccgttcctctttccgcggcgtctctctcaacaacaacaatctccaccgtctccaatctgtttccttcgccgttaaagctccgtcgaaagcgttgacagttgtttccgcggcgaagaaggctgttgcagtgcttaaaggtacttctgatgtcgaaggagttgttactttgacccaagatgactcaggtcctacaactgtgaatgttcgtatcactggtctcactccagggcctcatggatttcatctccatgagtttggtgatacaactaatggatgtatctcaacaggaccacatttcaaccctaacaacatgacacacggagctccagaagatgagtgccgtcatgcgggtgacctgggaaacataaatgccaatgccgatggcgtggcagaaacaacaatagtggacaatcagattcctctgactggtcctaattctgttgttggaagagcctttgtggttcacgagcttaaggatgacctcggaaagggtggccatgagcttagtctgaccactggaaacgcaggcgggagattggcatgtggtgtgattggcttgacgccgctctaagtcagagggctaagcaagtactcttatgtctactgtgttgatcttgtctgtttgaacagatgtaagaatcttagcaaataatgtttggcttaataaactttgatgtttatgttcattgcatcaatttttctctttttgaatttgtgacagtaatgtgtttacttttgatacaactttgtgtttgatcgtttaagaacattttggttttttttnnnnnnnnnnnnnnnnnnnnnnnnnnnnnnnn

SEQ ID NO: 87117 - DNA, 598 bp, Arabidopsis thaliana columbia
atttttcactcatactaataattaaaagggactaggaaaaataaaggcacattttctccgttggaataatcaacggttacgtatggagaagattgtgtcacgtggaagctaatccaccacgatccagtttcatctctattaacaaagatcactccttccctcgcttcaattttagtttctattgttgttcatctctcaatcgtctctttcgatattttctcaggaaaatctttacaacatccgtggagaagcatcaccagaatccgaattcagcgatggatccagcgcgggaatgcgaaggcaaaggagcttgcgaattgaaatcgaacaagcgatttgctgataaaatcatgcctcatcttctcaacttgtacgggtctaggtgcaaaagccaacgattttgacatgtatgcaccaattgcttcattggaagaccctttgacccgcgctcagggagtgaagcatatcaaaccatcattttattcactccctaaagtgtttggtgagtctaaaattgttgaatatcatattcaagaaagtgaaacctctccggtgaagaaagagatactaatttacaacaaacaacacttcaagatca

SEQ ID NO: 87118 - DNA, 694 bp, Arabidopsis thaliana columbia
aaactcttctgtttactattactactatagttagctttttaatataaaacgggtgttagaattccgcaacaaagaaatcggcgggagtcgtgtgctttagcccaaaaacatcggcctcgttgtccaacgtgtgtatttggaggaaaacatcattagagggccacatatacatctctctaattacactctacgaatattaaacacatttaattgtacttaatcctcggcataacacttgtccattaagtcaccatgtacttgctataaatatggtcaagtccagtccataatatatgcatctctgatctttcttggtgagagtaatagacatgggagctcttgattctctttccgagtatatctccgactacttccgcgtcaccagaaaaaggaggaagcggaaagtcatgcagacggtgaatataaaggtgaaaatggactgcgatggttgtgaacgcagagtcaagaacgcggtttcctccatgaaaggttcgaatctccaactcgtagactacttatgtcatgaatggtttccgtaagtttttttgtaattttgatttccattaaacgagtactcatgtaagcacgccaaaccatttctacatacaacaagccaaattaacacggtctttatatcaatataaaaatcgcgcaggtgtgaaatcggtggaggtgaatagaaagatacataaag

SEQ ID NO: 87119 - DNA, 605 bp, Arabidopsis thaliana columbia
cagctctctacgactcactattgggaaagctggcacgcctgcaggtaccggtccggaattcccgggtcgacccacgcgtgcgatcagatcaaccaaaggaagcgaagaagaagaagactttatacactctcgacgctattgatttcgtctgtgcagttttgtttctctatcagttagttttaaagatgagttcttcagagagtgtggaaaacgagtgcatgtgttgggctgcaagagatccatctggtcttctttctcctcatactatcactcgcaggtctgttacaactgacgatgtttcactcacaatcactcattgtggagtgtgttacgctgatgttatctggagtagaaaccaacatggagactccaagtaccctttggttcctgggcatgagattgctggaatagtgactaaggttgggcctaatgttcaacgattcaaagttggagaccatgttggtgttggaacgtatgttaactcctgcagggagtgtgaatattgtaatgaaggacaagaaggtaattgtgcgaaaggagtttttactttcaatggcattgatcatgatggctctgttactaaaggaggctactctagtcacatt

SEQ ID NO: 87120 - DNA, 399 bp, Arabidopsis thaliana columbia
acgagccgagacgaaaaaaggctcagaatcgtatccgatcaggaccatcgtcgttttggttcaagagaatcgttctttcgaccacacacttggctggttcaaagagctaaaccgggaaattgacggagtcatgaaatcggaccagaaattcaacccgggtttttcctctgacctaaattcccacaacgtcgtctttggcgaccagtctcagtacgttgacccgaatccaggtcactccattcgggatatttacgaacaagtgttcggtaaaccatgggattcgggtcacccggacccaaacccgggtccagctacaatgtccggattcgcccaaaacgccgagcgaaagatgaaagggatgtcttctgcggttatgaacggatttaaaccggacgcttt

SEQ ID NO: 87121 - DNA, 867 bp, Arabidopsis thaliana columbia
  unsure (1)..(867): unsure at all n locations
agctggnacgcctgcaggtaccggtccgttattcccgggtggacccacgcgtccgcccacgcgtccgtacggctgcgagaagacaacagaaggggatgacgtatctaatgaagtacccacaagtgttgaagaaagctcaagcagaagtgagagagtatatgaaagagaaaggggcacctcccgttacggaggacgangncaagaaccttccttacttcagagccttagctaaagaaaccctaaggatcgaaccagtgattcctctccttatccctcgtgcttgcattcaagataccaagatcgccggttacgacatccccgcaggaacaacgggcaacgtcaacgcgtgggccgtgtccccgtgccgagaaagaaatggggcccccacccctcatgaggttagggccccagggggttcttgagaaggaaggtgacttcaagggcgcggaccacgagtttatacccgctcggctcggcacggagaatgggccccgggaatgcgtctgggggcccgcgatgcttgagggtccttaggcgaaccttctcctcagcttcagctttaagcttcttaatgggatggaccccgatgatatcaatatggatgtcatgactggtcttgctatgcccaagtcgcagcatctcaagcttgttccagagaaagtgtccnggttttcccccctatatacggaggaactcccccttctctgattatatagtatatgttcctcccagtgtattctgtttcaatgtttggtttctttcttaaatggcaatcgtctctctatctttctccccccagaaagaaaaaaaaaaaaaaaacggatagcgcccgctctagaggatccaagcttacgtacgcgtgctgcg

SEQ ID NO: 87122 - DNA, 1942 bp, Arabidopsis thaliana columbia
ctctatacgactcatatagggaaggcttggtccccctgcaggtcccggcccggatttcccgggtcgacccacccgtccgcggggcgagaagacaacagaaggggaccacccaaaagtagtaacaactaagaatggaagatatcatcatcggcgtggtggctctcgccgcggttctccttttcttcctctaccaaaaaccgaaaaccaaacggtacaagctacctccagggccatcaccacttccggtgatcggaaacctccttcagcttcagaagcttaacccacaacgcttcttcgctggatgggccaaaaaatacggtccaatcttgtcatacaggataggaagcagaacaatggtggtgatatcttcagctgagctagctaaagagcttctcaagacgcaagatgtcaactttgcggaccggcctccacatcgtggccatgagttcatatcctacggcaggcgtgacatggcattaaaccactacacaccgtattaccgagagataaggaagatggggatgaaccacttgttctcaccaacacgtgtggccacctttaagcatgtacgagaggaagaggctaggaggatgatggataagatcaacaaggccgcggataaatccgaagtagtcgatataagtgagcttatgttgaccttcacgaactcggttgtgtgtagacaagcgttcgggaagaagtacaatgaagatggagaagagatgaagaggttcatcaagattctttatgggactcaaagcgttttggggaagatctttttctctgattttttcccatattgtggctttcttgatgatttatcaggcctcacagcttatatgaaagagtgtttcgaaagacaagacacttatattcaagaggttgtcaatgagacgcttgatcctaagagagtcaagcccgaaaccgagagcatgattgatctcttgatggggatctacaaagaacaacctttcgcttctgagtttactgtagataatgtcaaagccgtcatcttggatattgtagtggcgggaacagatactgcagctgcggcggttgtgtgggggatgacgtatctaatgaagtacccacaagtgttgaagaaagctcaagcagaagtgagagagtatatgaaagagaaaggttcaacgttcgttactgaagacgatgtcaagaaccttccttacttcagagccttagttaaagaaaccctaaggatcgaaccagtgattcctctccttatccctcgtgcttgcattcaagataccaagatcgccggttacgacatccccgcaggaacaacggtcaacgtcaacgcgtgggccgtgtcacgtgacgagaaagaatggggaccgaaccctgatgagttcaggcccgagaggtttcttgagaaggaagttgacttcaaaggcacggactacgagtttataccgttcgggtcaggccggagaatgtgcccgggaatgcgtcttggggccgcgatgcttgaggttccttatgcgaaccttctcctcagcttcaactttaaacttcctaatgggatgaaaccagatgatatcaatatggatgtcatgactggtcttgctatgcacaagtcgcagcatctcaagcttgttccagagaaagtgaacaagtattagctaatatatatcaaataaatctaccttctctgattatatagtatatgttcctccagtgtattctgtttcaatgtttggtttctttcttaaatggcaatcgtctctctatctttctcttcacattttgatatgaaggaagcaaattcacatgatgtcttttgtgatccttatatatttcactgaatggctacaaaaataaaactaatttccaaaaaaataaaaaaaaaaaaaaccaaaaagcggccgctctagaggatccaagcttacgtacgcgtgcatgcgacgtcataatcttctatagt

SEQ ID NO: 87123 - DNA, 1027 bp, Arabidopsis thaliana columbia
  unsure (1)..(1027): unsure at all n locations
attgccctttcggtccggaattcccgggtcgacccacgcgtccgattgcctctgatgagaagatagcactattgggtgctatccagtcgctctttgaaggatctatgtatacttttgtattcctctggactcctgctctaagtccgaacgatgaggagattccccatggtttcatttttgcaacatttatgctagcttcgatgctaggcagttcccttgcatctcgtctgttgtctcgttcaactcccaaagtagagagctacatgcagattgttttcctagtttccggtgctgcactattgcttccaatattaatgactttgttcatagcaccttccaaggtgaaaggtggaggaatctctttctcgggttgctttcagctccttgggttctgtatattcgaggcgtgtgtaggactgttttggccatccataatgaagatgagatcccaatacatcccagaagaagccagaagcacaataatgaactttttccgcattcctctgaatatctttgtctgcgttgtattgtacaatgtaaatgcattccctatcacggtcatgtttggaatgtgctcgatcttcctctttgttgcaagtctcctacaaaggcggctcatgatgattgttgacaaaccaaaaacaaatgactggacaccccttgaagaaagaaacacagaagaagatcccctcaacatatgatgaattaactatacatatgcacattctggattcagtaatggagacagatagaagaagaggactttaaggtatatggtatatagaacgcaacaatgcatccaaagagatcatagcgttgtaagactcgatgcagtagttcgattgtttaatttttcttggctatatttttgaatatgttccattcaaacccacagtataagttttatgctgtcccatgtgttattctttctttctaaaaaaaaaaaaaaaaagnnnnnnnnnnnnnnnnnnnnnnnnnnnnnnnnnnnnnnnnnnnnnnnnnnnnnnnnnnnnnnnnnnnnnnnnnn

SEQ ID NO: 87124 - DNA, 461 bp, Arabidopsis thaliana columbia
cgattttccatttcaatttcttcttcagccggcgattaagcttcccaataagacaatctccgaccgccgcaacatcacgaaggattcttcaccgtgtgaactttacgcagtctttcctctttcgtagacgctaaagaagttgaaattgatctgatctcgtttagcagatctaccttcgattcgattcttctccttcctgatatcgcttcattgttcaaattcggcacaaaatggtttatcactcgagttttgtggatgaagaaggagtaacaaaggcatgtggttgtccattgcttcctctcaagagtcatataaaaggtcctgcacctgtttcagaacaagataaaactgatatagtagacgaggcaatcaccttctttcgtgctaatgtcttcttcacaaactttgatatcaaaagtcctgctgataagctccttatttacttgacgttttatataaat

SEQ ID NO: 87125 - DNA, 905 bp, Arabidopsis thaliana columbia
  unsure (1)..(905): unsure at all n locations
nnnnnnnnnnnnnnnnnnnnnnnnnnnnnnnnnnnnnnnnnnnnnnnnnnnnnnnnnnnnnnnnccacgcgtccgctgaatcagagaattggtaagtagtaagaaccctagctttagattcgtcagattctgattactcgaatcaaagcagggtttttgacactaaaaatccgatctcgtgaagtgtgttttgcatcgaatcggaaaatatgaaagaagggaaatcatcgaagtcgtcgagtcaacaagagcagcatgaacagatttatcatcaaaacagtcacttgggttctttcaacttcgccaaattgtttgattctgaagcttcctgggacaaggatcaactgggagatgtgttgcattggatcaggcaagtagttggtttactctgcggattgttgtggggtgcgatacctttggtaggaggcatatggcttcttctatttcttgcaatctcctctggcatagtatatggttactatgcattggttctaaagatcgatgaagaagacttcggtggtcacgcagctttgctccaggacggtctatttgcttctctaagtttattcctgcttgcgtggattctggtgtatagcttgtctagcttctgatagagacacagtatctcgcgcttgagctgctccgtgaagaagtttagcagaacgtacctttcatggtttctccaatttacgatgtgcccttcatgcttttgttttctgaagatgggaactagcattggtagattttcatttttctgatggaacttttggtttccttttgttcttgttaattactttgtgtaataaaaatgagtattattatgcaaggatacagtatgtgtttagtacaaaaaaaaaaaaaaagggcggccgctctagaggatccaagcttacgtacgcgtgcat

SEQ ID NO: 87126 - DNA, 1546 bp, Arabidopsis thaliana columbia
  unsure (1)..(1546): unsure at all n locations
tgatactctcagctctaatactgactcacttatggaaagctggtacgcctgcaggtaccggtccggaattcccgggtcgacccacgcgtccgttcttcacccaccaaaagtagcaaacctttgccacctaaaaatcttaccagttgggtgaaagttgccaaaatagagcttgcttttgtcgcaatcctatatttttcagattgattgttggtgggtttgtgtaaatggcggctcttttaggcagatcctgccggaaactgagttttccgagcttgagtcacggagctaggagggtatcgacggaaactggaaaaccattgaatctatactctgctattaatcaagcgcttcacatcgctttggacaccgatcctcggtcttatgtctttggggaagacgttggctttggtggagtctttcgctgtacaacaggtttagctgaacgattcgggaaaaaccgtgtcttcaatactcctctttgtgagcagggcattgttggatttggcattggtctagcagcaatgggtaatcgagcaattgtagagattcagtttgcagattatatatatcctgcttttgatcagattgttaatgaagctgcaaagttcagataccgaagtggtaaccaattcaactgtggaggacttacgataagagcaccatatggagcagttggtcatggtggacattaccattcacaatcccctgaagctttcttttgccatgtccctggtattaaggttgttatccctcggagtccacgagaagcaaagggactgttgttgtcatgtatccgtgatccaaatcccgttgttttcttcgaaccaaagtggctgtatcgtcaagcagtagaagaagtccctgagcatgactatatgatacctttatcagaagcagaggttataagagaaggcaatgacattacactggttggatggggagctcagcttaccgttatggaacaagcttgtctggacgcggaaaaggaaggaatatcatgtgaactgatagatctcaagacactgcttccttgggacaaagaaaccgttgaggcttcagttaaaaagactggcagacttcttataagccatgaagctcctgtaacaggaggttttggagcagagatctctgcaacaattctggaacgttgctttttgaagttagaagctccagtaagcagagtttgtggtctggatactccatttcctcttgtgtttgaaccattctacatgcccaccaagaacaagatattggatgcaatcaaatcgactgtgaattactagccgtactatctgtagtttactgtttacactaggactaatgtaatcgcatgtctttgttatcaattcgtctaatgtaacactaccgattaactttaatgaatttcaagataacgaaaaaaaaaaaaaaaaggactatctcacttaatgtgtacgaagattattatctaaaaaaaaaaaaaaagnnnnnnnnnnnnnnnnnnnnnnnnnnnnnnnnnnnnnnnnnnnnnnnnnnnnnnnnnnnnnnnnnnnnnnnnnnnnaaaat

SEQ ID NO: 87127 - DNA, 804 bp, Arabidopsis thaliana columbia
  unsure (1)..(804): unsure at all n locations
atcacattctaatccaagggaatctcctaaaagatgcatacattgtagtgaaggacaatgcgaagatgatctcacagcctactttaaagaaatttggcagagcttttatgatctcgggtaatattaatttagtgaatgatgttctgaaagtattgcatggttctggccacaaaatcgatcaggtaaatagccaaccggtaacaatttgatgctattttgccaacgttttacttggaaataattttcattacagttgagaaataaggaaaatttcgttctttaatcatactgaatctcatttcttgccttcactgtgtacttttgttttcaggttcagtttgagattgcgatttctcgatacatttcgcagcccgataaaaaggaattgcttcttcaacttctacaatggatgcctggtcaaggatatgttgttgactcctccacaagaaacctcattctcaagaactctcatatgtttggtcggctactcattgcagagatcttgtcaaagcatcatgtcgcttcaagaccgatgataaaatcacgaccagagcaaaaatttagatgtaaataagaatgtaaattttctgtttctttttttttttgtggcccgtcgtttggaatgagaaaaatgtatgtacgtagttcatgaaatagatgagagtctaatttgtagatgtgccaaattttatcgaatcttacatactaaaaaaaaaaaaaaaaagnnnnnnnnnnnnnnnnnnnnnnnnnnnnnnnnnnnnnnnnnnnnnnnnnnnnnnnnnnnnnnnnnnnnnnnnnnnncat

SEQ ID NO: 87128 - DNA, 499 bp, Arabidopsis thaliana columbia
gactcactatagggaaagctgctacgcctgcaggtaccggtccggaattcccgggtcgacccacgcgtgcggttccatctctctctctctttctcactgatctcatttcattccttatctttccaattttaccctcacgttaccttcgaattctccatctcctaccattcaaagcttctctcagatgtctatagtctctaagcttcgttctccggttaaaccaataggtgagtcacgagctatcctctgttcgaccgggaacagatttaaggttacgaaaacagaaatgacgaagaagccacaactgaatccacgagtgacgaaatctccggcgacgaagaagcccgattccaatttctcagtttcgactgatgattcctcttcttcttcttcatcctcggaacgttcgtcagtgaacacgacaaactctgggaaagtaaccactccgtcgaaacggaacggagttgagaagctcaataatgtcgttgcctccgtcgcc

SEQ ID NO: 87129 - DNA, 390 bp, Arabidopsis thaliana columbia
agaacctctaatggctttatctccgtcgtctcctccatgtctcagatctctttcgccttcgttttctcgccaaattggcttccttgttccacgcgtacagtctctagtctttggtagcgtccggaagcatgagttgcggaggccgagcgcactcagggaatggcgggagtacgaagatgctgtgaagagaaaagatctcgccggggctcttagattcctcaaatctattgaaaatgatgaacagcgtgattcggttgaatctattgtcacggctaagttaagcggcttgggagctcttgaattggggagggattggcaagttttagatgcgtgtttgaatgcagatgatatgagacttgttggaagtgcgtttggtttcttaaggagaga

SEQ ID NO: 87130 - DNA, 1361 bp, Arabidopsis thaliana columbia
gacaaagacatttaaaagaagaattttcgaagaaaaattagagagagtagaagaagcagaagcagtaatggtacgagcttcatcgtcgaagaaaggaggatcaaaaggaggagacaaagacgacgcagagtcaaaacagaggaagagattaaaaaccctagctctcgataaccaattgctctctgattctccggcgaaatctcattcctctctcaaaccttcaaagcaagttctcaaacaccatggcaccgacatcatccgcaaatctcagcgcaagaatcgctttctcttctccttccctggtcttctcgctcctatctccgccgctaccatcggcgatctcgatcgattatctaccaaaaaccctgtcctctaccttaatttcccacagggtcgtatgaaactttttggaacgattttgtatccgaagaacagatacttgactcttcaattctctagaggaggcaaaaatgtcttatgtgatgattattttgataacatgattgtgttctctgagtcatggtggattgggacaaaagaggagaatccagaagaagctcgtcttgatttccctaaagaactagctcaggcagagaatactgagtttgatttccaaggcggtgctggaggagcagcttcggtgaagaagctggcgagtcctgaaattggtagccaaccaacagagacagactcacctgaagttgacaacgaggatgttttgtctgaggatggagaattcttggacgataagatccaagtaacaccaccagttcaattaacaccaccagtccaagtaactccggtccgacagtctcagagaaattctgggaagaaattcaactttgcagaaacttcctcagaggcctcctctggtgaaagtgaaggcaatacatctgatgaagatgagaaacctctgttggaacctgaatcttcaacaagaagtcgtgaggaatctcaagatggtaatggtattactgcatctgcaagcaagttgcctgaagaacttccggctaaaagggaaaaactaaagagcaaagacagtaagctcgttcaagctactttgtctaaccttttcaagaaagctgaggagaaaacagctggaacttccaaggctaaatcatcctcaaaagcttaaagaaatcttttccagaagaaaatagaggtctgttgtttctttgctgtgagaatgaacagtttttagttcttttaggtatgtttgtgtgagaaattgctacaagactgatgtattcatcatgcagttggataatgtattcattatgcttattcgatagtttgtgttcatcgagctatgtataaatcatctctgctctttttaatacaacaaactgtctccatctaaa

SEQ ID NO: 87131 - DNA, 677 bp, Arabidopsis thaliana columbia
  unsure (1)..(677): unsure at all n locations
nnnnnnnnnnnnnnnnnnnnnnnnnnnnnnnnnnnnnnnnnnnnnnnnnnnnnnnnnnnnnnnnnnnnccacgcgtccgggagcttaataaacagaagccgttctccttcactttcgttcctctcacttccatacaacatttgaaacctcagctatgcctaaatcaaagcgagatagaccagtgactttgtctaagacgaagaagaaaggaagagagcataaggagtgtattgtgaatggaattagggaggctgttgaaaaatattcctctgtctatgttttctcttttgaaaacatgagaaatatcaaattcaaggagtttaggcagcagtttaggcacaatggaaagttcttcctaggttcgaacaaagtgatgcaggttgctcttggtcgttctgcagaagatgaactccgttctggtatctacaaagtctccaagctgcttcgtggtgatactggacttcttgttactgatatgccaaaggaagaagtcgaaagcttatttaacgcttatgaggattccgacttttcaaggaccggaagcattgcagtagaaacggttgaactgaaggaagggcctctagaacagttcacacatgagatggaaccacttcttcggaagccggaaatccctgtacgactaaacaaaggtactggggaggtggtcgctgactttg

SEQ ID NO: 87132 - DNA, 524 bp, Arabidopsis thaliana columbia
  unsure (1)..(524): unsure at all n locations
aatcaggggagcttccgattaatacgagttggttggtttttgctgaattttcgaagctttgtttcttcaatctttgatgctagaaaggtgttttctgcaacaagcaatatgcgacaaagaaatatgatgactggttcagacatggagcagaattctcaaagctttgttccccatcctgaacctcgcattggaactaactatctgtatccagatatcccaccagtgaacactgttcctcatttagaagctcattctctgcaagaaccttatgacaacaactcaatgttctacggggcctccacagtaccatcatcaacatgcttcaaatcttggttctggcatgtcaaccgcaccaaatttctatgtcccttatgtgaattatgaagctccgccgagttttctgttgtctcatggaagtaatggtgcagttgttgggggtacttccacttgaaaatgagtggaattgccccnntttttggttnnggnttntaaannatagnggtnttgangaatnnccgggantt

SEQ ID NO: 87133 - DNA, 603 bp, Arabidopsis thaliana columbia
atgatactccagctctctacgactcactatatggaaagctggtcacgcctgcaggtaccggtccggaattcccgggtcgacccacgcgtccggcaacctattcgttggttggttaatagaagctctctttctctgtctgtctttctctctcagagaaatggctcttcttctagtttcttcttcctcctcctatgccctcagagtcaccattttcttgtctttcttcttctttctctgcaatggcttctcttaccctactacttcttctcttttcaacacccatcaccatcgtcaccacttggccaagcacaactacaaagatgctctcactaaatcaatcctcttctttgaaggccaaaggtcagggaaacttccttctaaccagagaatgagttggagaagagactctggtctctctgatggctctgctcttcatgtggatttggttggagggtactatgatgcaggagacaatatcaaatttggtttcccaatggcattcacaaccacaatgctttcatggagtgtaattgaattcggtggactcatgaaatctgaattacaaaacgctaagatagcgattcgttgggctactgattatct

SEQ ID NO: 87134 - DNA, 2260 bp, Arabidopsis thaliana columbia
  unsure (1)..(2260): unsure at all n locations
attctctctcttcttctctatgccaacgaagcaatagctatgaaaagctaaaccctttccttcttcttcttcttcttcttcttcttcttcttcgattgtttagattacttgggtttgacccaagtttgcttctttctatgattcatcaatctagatcttgctatctgggtccagaaacgattcacgcgcttcattcatgatataaagttactaccttttttttattttaccttctgggtcatggttttgtctgcttttcgtcttttgcttttgtctggatgattcataatctctcgagatctattatgttcacaagagttgttcttatgcgtggtgagatgatcttaggagtgtttcactatctttcttcaattcgggtttttagtttctgagatctgtttttgaagaatctgatctgagtttgaggaagtttgactaaatagatcgaagaagatgtttaagcagatacttgggaagcttcctaagaaaacttctgctaagttttgggataatggtgaatcccaaactctagataacaacaacaatcaaggaggaggtgatgaagttttaagccagagaacgtcatcaaatggagatactagtttggattgtgtttcttcttttgatgtattgccaaggttgagagatgtttccatctctgagaagcaagaactgtttcttaagaagcttagactatgttgtctagtgtttgattttgtagctgagcctcaacagaacttcaaggagaaagagatcaaaaggcaaacacttcttgaagttgtggattatgttatctcttcagggaatggcaagttccctgaatcagttattcaagaagctaccaagatgatttcggcgaatctctttagtaatcctcatcgacaatggaagaacaaaactcctgaggcattggatttggaagaagaagaaggatctttgaatccttcttggcctcacttgcagattgtttatgagttccttttgagaatcgttgcatctcccaacacagaccccaagatatccaagaaatacatcgatcatacattcgttctcaagctattggatttgtttgattctgaagatccgagggaaagagagtatctgaaaacgatacttcaccgcatctacgggaggtttatggttcatcgcccgttcatcaggaaaactatgaacaacatcttgtatgattttatattcgagacagggaaacactcgggaatcgccgagtttcttgaagttttaggatccatcatcaatggattcgctttaccactcaaggaagaacacaagctctttcttactcgtgtcttgattcctctgcacaagctgaaatgcttaccaaattaccatcaacagctttcttactgcgttatacagtttgttgagaaagattgtaagctcgcggataccgttattagagggatgttgaagtactggcctgttactaatagcgctaaagaaatcatgttcttgaatgaattggaggagatactagaagcaactcaattaacagagtttgaacggtgtatggttccgctctctcgccaaattgctcagtgcttgagcagttctcactttcaggtagcggaacgggctttatacttatggaacaacgatcatgtcactaatttagtgagacagaacagtagaatcattttacctatagtgtttcccgctttggagaaaaacggtagcagccattggaatcaggctgtgaagaacttgacagagaatgttctcaaggttttgtccgatacaaatcctgatttattcgaagaatgtttgcacaagttccaagaagatcagcaaaaagcagaagatactaaaaagaagaatggagaaacctggagacagctagaggagattgttgcttcaatggcgaagtaagagttttttctgcactttacgtgattcaacaagaaatcggtttattgttttgttttgtttcctttacgcctgaaaggtatatacatttactttgctttgcttgcttcatttaagtatctggtttcgactttaagactagtttaattcagttaaacagtgtgagattttacctttttcagttcttgatttgtctgtatacttggttcatgtaaacatcttgttatgaaaacacgaattttctattgtctgaagtcacttagtttatcagtgaaagagattgctgcggccgcnnnnnnnnnnnnnnnnnnnnnnnnnnnnnnnnnnnnnnnnnnnnnnnnnnnnnnnnnnnnnnnnnnnnnnnnnnnnnnnnnnn

SEQ ID NO: 87135 - DNA, 521 bp, Arabidopsis thaliana columbia
gcgtctctacgactcactattgggaaagctggcacgcctgcaggtaccggtccggattcccgggtcgacccacgcgtgcgcttaatgttcctcgtaaggtgactcttttagatccgttatgtgatacaagaaactcaattcctgagaatttccctcgtgttctcgatatgtccaagtttaaggttcgagaattgggtcgtgaattcaagcttcattatttcaatactgttggtgatattgtagagagtttgtatttggagaaagctgttgttaagtatctagattgtgatggagattataaatttgtgttgcttacgattcatgtttcggggaagttagctgtgtttaggtcttgggatcgagcatggactgtgattaatgacatgccttctccttatgatgatgtgatgttgttcgatggacgtttctttgcggttgataacaacgggaggactgtggttgtggattacagttccttgaagttgacgttggttgcgagtcctgtgtttggtggtgataag

SEQ ID NO: 87136 - DNA, 648 bp, Arabidopsis thaliana columbia
gggtaagtaaagataataaatatgcggggtttgatctttacttatttattaggactcaaacttagccattattaactcaaaaatcaaaattactcctaaaacaagcagataggaaaaacacaaataaataaaaaaaaggaaattgaatgcagagttgtcagagtgtatttaaaaaagaaaaaaaaagcacgttaggaggagtatcctttagactagagtaagggagtgggtgctttaaagaagcagagaagcgggagaagagtgtgcagcagcaacagccaacagaagaaaatggcaaaagagaaagatctggagaagcaaatcggcggttgcatggccggcttcttcaacatcttcgatcgccccagtctcctctctcctaataagcgtctctcttcctctccgagcgctgaatctgaatctgcctcgggtaggacgaatcagcagagtgtgtactctacccctgagctacgctctcctgcgccggctcaacaaagatcttcttcttcttcttcttcttcctctaggccttggaggttctctaaagaagctccgaggctctccctcgatagcagagccgtcgtggatgccaagggctgcctcaaacacagacagatccgagccgatggcggtgaggctgagaaccag

SEQ ID NO: 87137 - DNA, 767 bp, Arabidopsis thaliana columbia
  unsure (1)..(767): unsure at all n locations
naatacgactcactttagggaaagccggtacgcctgcaggtaccggtccggaattcccgggtcgacccacgcgtccgggattgcgaaatagtaatattttataatcgccgacaaattcttcagatctccaaaattgaatcttattataaaccctaagatttgcatctgatctgctctcgaagacgaaagcttcgagtactggttgaagctaaagctatgggacacgtgaatctacctgcatcaaagcgtggtaaccctcgtcaatggcgtctcctcgacatcgtaaccgctgctttcttcggtatcgtacttctcttcttcatccttttattcactcctcttggtgattccatggcggcttctggtcggcaaacgctgcttctctctacggcgtcagatccgaggcaacggcagcgattagtgactttggttgaagctggtcagcatttgcaaccgatcgagtattgtcctgcggaagctgttgctcatatgccttgtgaggatccgagaaggaatagtcagcttagtagagagatgaatttctatagggagagacattgtcctttgcctgaggagactacgctctgtttgattccctccgccttctggttataagattcctgttcccgtggcctgagagtcttcacaaggtttggcattcaaacttgccctataacaaaattgctgcccggaaaggtcatcaaggatggatgaaaagggaggggggctttacttcccagcggggcacgnttttccttgggggggtc

SEQ ID NO: 87138 - DNA, 1486 bp, Arabidopsis thaliana columbia
cgcggtaccgttccggcatattgtctacttttagattttgatatctattggaactcttactagctcattcatccgtcggcctgtgaattgtgtttctgaagtttccccaatggctgcttttggagatgacattgtgattgtagcggcatatcgtaccgccatttgcaaagcgagacgtggaggtttcaaagacactcttcctgatgatcttcttgcttctgttcttaaggctgtagtggaaagaacatctttggatccaagtgaagttggtgatatcgttgttggtaccgtgatagcgcctggttctcagagagcaatggagtgtagagttgcagcttattttgctggttttcctgactccgtgccagttagaactgtcaatagacaatgctcatcaggactacaagcagttgctgatgttgctgcttccattagagctggttattacgacattggtattggtgctggagtggaatcaatgtcaactgatcatattcctggaggcggctttcatggctctaatccaagagcacaggatttcccaaaagcccgtgattgtttgcttccaatgggaattacttctgaaaacgttgcagaaaggttcggtgtcacaagagaagagcaagatatggctgcggtggagtctcacaaacgcgctgcagctgcaatcgcgtctggtaaactcaaggatgaaatcattcctgttgctactaagattgtggaccctgagactaaagcagagaaggcaatcgtcgtatctgttgatgacggtgtacgtccaaactcaaacatggcagatttggcaaagctgaagactgtctttaaacagaacggttccaccacagctggcaatgctagtcagatcagtgatggtgctggagcagtactgctaatgaagagaagtttggctatgaagaagggacttcccattcttggagtattcaggagttttgctgttactggtgtggaaccatctgtaatgggtattggtccagctgttgccattcccgctgcaactaagctcgcagggctcaacgtcagcgatattgatctattcgagatcaatgaggcatttgcatctcagtatgtgtactcttgcaagaagttagagctggatatggaaaaggtcaatgttaatggaggagccattgctattggccatcccctgggtgctacaggagctcgatgtgttgcgacattgttgcacgagatgaagcggagaggaaaagattgccgctttggagtaatctcaatgtgcataggcactggaatgggagctgcagctgtttttgagaggggagactctgttgataacttgtccaacgctcgtgtggctaacggggatagtcattagaacatcgaagagagcttgaataagtagaagtaatgatgcattgagtctaataaatatgatgctttagctctttcacattgctgaacaatgaaaacttttgtcattctgagtttaaaaaaaaaaaaaaaaaaa

SEQ ID NO: 87139 - DNA, 1691 bp, Arabidopsis thaliana columbia
tgagaacgatcgatcaaaaatctctcccacgataaaaatgaggaccctgaagctcattgtacttaacgtcttcccctttccagaaaaatcaaccaaacccatttcagtttccccggaaagtttttgtctttcaatcaccattagaattcagctgcaacacaagtgtttgcaacagagagaatcatggagagagctatggaaagacaaaagatattgcttcgtcatctcaatccagtttcttcttctaattcttctcttaaacatgaaccttctcttctgtctcctgtgaattgtgtttctgaagtttccccaatggctgcttttggagatgacattgtgattgtagcggcatatcgtaccgccatttgcaaagcgagacgtggaggtttcaaagacactcttcctgatgatcttcttgcttctgttcttaaggctgtagtggaaagaacatctttggatccaagtgaagttggtgatatcgttgttggtaccgtgatagcgcctggttctcagagagcaatggagtgtagagttgcagcttattttgctggttttcctgactccgtgccagttagaactgtcaatagacaatgctcatcaggactacaagcagttgctgatgttgctgcttccattagagctggttattacgacattggtattggtgctggagtggaatcaatgtcaactgatcatattcctggaggcggctttcatggctctaatccaagagcacaggatttcccaaaagcccgtgattgtttgcttccaatgggaattacttctgaaaacgttgcagaaaggttcggtgtcacaagagaagagcaagatatggctgcggtggagtctcacaaacgcgctgcagctgcaatcgcgtctggtaaactcaaggatgaaatcattcctgttgctactaagattgtggaccctgagactaaagcagagaaggcaatcgtcgtatctgttgatgacggtgtacgtccaaactcaaacatggcagatttggcaaagctgaagactgtctttaaacagaacggttccaccacagctggcaatgctagtcagatcagtgatggtgctggagcagtactgctaatgaagagaagtttggctatgaagaagggacttcccattcttggagtattcaggagttttgctgttactggtgtggaaccatctgtaatgggtattggtccagctgttgccattcccgctgcaactaagctcgcagggctcaacgtcagcgatattgatctattcgagatcaatgaggcatttgcatctcagtatgtgtactcttgcaagaagttagagctggatatggaaaaggtcaatgttaatggaggagccattgctattggccatcccctgggtgctacaggagctcgatgtgttgcgacattgttgcacgagatgaagcggagaggaaaagattgccgctttggagtaatctcaatgtgcataggcactggaatgggagctgcagctgtttttgagaggggagactctgttgataacttgtccaacgctcgtgtggctaacggggatagtcattagaacatcgaagagagcttgaataagtagaagtaatgatgcattgagtctaataaatatgatgctttagctctttcacattgctgaacaatgaaaacttttgtcattctgagtttaaaatcaactacttttctctg

SEQ ID NO: 87140 - DNA, 921 bp, Arabidopsis thaliana columbia
  unsure (1)..(921): unsure at all n locations
cggacgcgtggggtgctgctttgttaagtaaacccgagctaattcatgatattttggcaacacttaagaggaacttagacgtaccggttacttgcaagattcgtttattaaaatcaccagcagatactgttgaattggctaggagaatcgagaaacttggtgtaccagctcttgctgtacatgggaggaaaattgcagacaggccaagagatcctgctaaatgggatgagattgcagatgtggtggcagcattatccattcccgtcattgcaaatggcgatgttttagaatatgatgatttttctcgcattaaaaccgcaacaggcgctgcatcagttatggttgcaagaggagctatgtggaatgcttcaattttctctccaaaaggaaaatcacactgggaagatgtgaaaaagaaataccttagaaagagcatcttgtggaataacgatgttaagagcacgaaatacacgataaaggagatgatagcgcatcattcttgtcttgaactaccggaagggaagtctatcaacaaagcagacactttagaagatttagcgcggctttacgatttagaagattacttttggacagtgaagaacattggtccactgacacataacttaaaccatgttttatgatactgaaagaaaatgccaacactttgcattttcatttatatcattttgtaatctctattgatttttatatatagaggcatcccattgtttttactcaaatgagtaaattactaaaactagcccgattggtaaacaaactgtagaattctttattgtagtatagaaatcaaattcccatttgatnnnnnnnnnnnnnnnnnnnnnnnnnnnnnnnnnnnnnnnnnnnnnnnnnnnnnnnnnnnnnnnnnnnnnnnnnnnnnnnnnnnnnnnnnnnnnnnnn

SEQ ID NO: 87141 - DNA, 989 bp, Arabidopsis thaliana columbia
  unsure (1)..(989): unsure at all n locations
gttatgacggtgccacgaagaagaagaagacgaagatggatggtcagaacaagcttgttcttgctcccatggttcgtgtgggaacgctctctttcaggatgttggcggcggaatacggcgccgatatcacatacggtgaagagattattgatcataagcttgttaaatgcgaacccacgcgtccggttgcttctgggacatctgagtttgtggagaaaggaacagataatgtagtctttagcacatgtgatgaagaaaaaagtagggttgtttttcagatgggaacttctgatgctgttagggctctaaaggcttctgagattgtgtgtaatgacgttgcaactattgatattaatatgggttgccccaaggcattctctatccaaggtggaatgggtgctgctttgttaagtaaacccgagctaattcatgatattttggcaacacttaagaggaacttagacgtaccgggtacttgcaagattcgtctattaaaatcaccagcagatactgttgaattggctaggagaatcgagaaacttggtggaccagctcttgctgtacatgggagggaaattgcagaccggcgcagagatcctgctaatgggatgagattgcaaatgtggggncagcatttttcattcccgtctttggaaatggcgatgtttaaaatatgatgatttttctcgcttaaacccgcgcaggtaccctggtacctttctggatccgattctgaaactggcaattagccctcaacatttttatcgccctgggctaggttaatctgatcaaccctggttatatacccttactgttgctgttttttggtccctaaagccctgttatgtttggtgaaagagcttgtgatgctcaatttttctcaaagaaatcccttggaaatggaaaaaaaacctaaaagagctttgggataacttgtagacccaatccccgtagggaggtatccctctttttctttacctccggggagt

SEQ ID NO: 87142 - DNA, 670 bp, Arabidopsis thaliana columbia
  unsure (1)..(670): unsure at all n locations
atgagacgacaatggttgacctctggactctcgagtctccctggattactacactcgagctcgacgatccttagaccaacttcgtcttcttcctcgagagcttctctgatctccttcgccgttaataatttccacacgatcgcttcttcttcgtctactctctcttctcgcttgacaactgtatcatcgtccatggcttctggtgacgaaggagctgttttcaatttgtctgattctagccttcttaagatccttaaaggagacatcaccaagtggtctgttgattcttcctccgatgctattgtcaatccagcaaatgagcgtatgttaggtggtggtggtgctgatggagcaatacatagagctgctgggccacaactcagagctgcatgctatgaggttcctgaagttcgtcctggagtccgttgtccaactggagaagcaagaattactccgggttttaacttgcctgcatcgcgtgtnattcacactgttggacctatctatgactcanatgtcaaccctcaagaatctctcaccaattcgtacaaaaatagtctgagagttgcaaaggnaaacaatatcaaatacattgcatttcctgccatatcttntgggntttacggntatncctttttnatgaaagctgctncggtagggttttnaaacc

SEQ ID NO: 87143 - DNA, 574 bp, Arabidopsis thaliana columbia
  unsure (1)..(574): unsure at all n locations
ccctcgcgtccgattgaaatctctagatgtctcttatcttaagatcacaaatgattcgatccggtctatagcgttgctggtaaagcttgaggttttagatatggtaagttgtcctttgatagatgatggtgggttacagtttctagagaatggctctccttcattacaggaggttgatgtcactaggtgtgaccgtgtgagtttgtctggcttgatctctatagtcagaggccatcctgatattcaacttcttaaagccagtcactgtgtatcggaagtctctggtagcttcttaaagtacatcaaaggtttgaagcatctcaagactatatggattgatggagctcatgtttctgattcctctcttgcacgtttaagctctagctgtagatctttaatggagattggactgagcagatgtgttgatgtnacgnatattgggatganaagtcttgcacgcaactgcttaaacctgaaaacattaaatctggcgtgtngcggattcgtgacggatgtagccatctctgctgtagctcagtcttgccggaatctagggactttaaagttagagtct

SEQ ID NO: 87144 - DNA, 287 bp, Arabidopsis thaliana columbia
tagttcttctaacttcgccctgatctccatccgagcagagagtcagaaatcgattcgaattctcagtattttgaatcattcgttgggttgatgtagtttttaatctaatggtagtagtgttgcttagagcttaatggattgttgtttcttctttatgttccttgagactgctttcaaacaagtttaagtattcaacgcttttcttttcgagggaccgctatagaggatccaagcttacgtacgcgtgcatgggacgtcatagtaatctataggtgtcccaatcagtc

SEQ ID NO: 87145 - DNA, 542 bp, Arabidopsis thaliana columbia
  unsure (1)..(542): unsure at all n locations
nnnnnnnnnnnnnnnnnnnnnnnnnnnnnnnnnnnnnnnnnnnnnnnnnnnnnnnnnnnnnnnnnnnnnnnccacgcgtgcgcatcttttgtctcatagccatgggtctagttcaagatgagggaagcggtcctgttcatggctttcggttatcaaccgtgagtgcgtccctgccgtcagagacaggtacgacccacgagcccaccggtttagacctcgccatgaagctccactacctaaaggcggtttacatttactcggccgggacagcacgtgacttgactgtgatggacgtgaaggcgcctttgttttcagtgttctaccagatcccttgcatcattggcaggttcaggcgacatgaatcgggacgtccgtacctaaagtgcaacgactgtggcacacgtttcgtggagagtcattgtgatctcactgtggaggagtggctccgtgtaccggaccggtccgttgatgagtctttggtttaccatcaaccagttggaccagatttggcattctctcctttgctctatattcagatgacc

SEQ ID NO: 87146 - DNA, 499 bp, Arabidopsis thaliana columbia
  unsure (1)..(499): unsure at all n locations
accgntccggcaattncccgggnncgnacccacgtcgtccggtgagcttctgtctcgttcatctacacaatctgactcggttgagaagaaatggcaggacacaaggttgcgcatgccacattgaaaggcccgagtgttgtcaaggaattgattattggtttgacgcttggtttagctgctggtggtctctggaagatgcaccattggaatgagcagaggaaaactagaactttctatgatttgcttgagagaggtgagatcggtgttgtcgcctctgaagagtgaatgggaatgcctctctctcactctcaatgttgttggctcgatttttctgtttttatggtttcttgagatctcagataagttacctaagaaagttggttgcttgagaaataaacaaccactcagacatcaaaattggggtatttgttaacacattgttttccggggagtaccaagtggttgaaacttggagacatctggccttgacttttccctt

SEQ ID NO: 87147 - DNA, 599 bp, Arabidopsis thaliana columbia
  unsure (1)..(599): unsure at all n locations
nnnnnnnnnnnnnnnnnnnnnnnnnnnnnnnnnnnnnnnnnnnnnnnnnnnnnnnnnnnnnnnnnnnnnnccacgcgtccgctaaattttgcttctccttttcttaaaccaaccttaggatagttttcaaagaaagaaatatgcttaaaccaaaacatttttgagaagacgatggctcgataccgaccactgaagtcgttccaacctcttcaatggatagtactgtaatttttggtaatatttcaaaagttcaacactcaacagtcaacatctatattatttttttctttattcaacaagtcgaatccaaatttggtgtgttttggtttagctaatcacttgcgactaaactaaacacaatccactaatcatttaataacgaaacggtccaacccccattaaaccaaactatttttcatatttataacaaagcttttccctccacgcaacttcaatatccagaataacagaacatctcttcacttctcatcacaccatgcatcatcatcatcatccatgcaatcgcaaacccttcacaaccatcttctccttcttgcttctctatctcaatctccataaccaacaaattattcgagctc

SEQ ID NO: 87148 - DNA, 1303 bp, Arabidopsis thaliana columbia
  unsure (1)..(1303): unsure at all n locations
tacgactcactatanggaaagctggcacgcctgcaggtaccggtccggaattcccgggtcgacccacgcgtccgcggacgcgtgggaaaacatctcttcacttctcatcacaccatgcatcatcatcatcatccatgcaatcgcaaacccttcacaaccatcttctccttcttccttctctatctcaatctccataaccaacaaattatcgaagctcgaaatccatctcaatttacgaccaacccatcccctgacgtctctataccggaaatcaaacgtcacctccaacagtacggttacctcccacaaaacaaagaatccgacgacgtttcgttcgaacaagctctcgttcgttaccagaaaaatctcggtctaccaataaccggtaaaccggattccgacacgttgtcacagattctattaccaagatgtgggttccctgatgacgtggaacccaaaacggcaccgtttcacacaggaaaaaaatacgtgtacttccccggacggcccaggtggacaagagacgtcccactgaaactcacgtacgccttctcgcaggagaacctaactccttacttagcaccaacagacatacgggtgttccgacgcgctttcggcgagtgggcttcggtgatcccagtatccttcatcgaaacagaggattacgtcatcgccgacatcaagatcggattcttcaacggagatcacggcgacggagaaccgttcgacggcgttttaggtgttttagcacacactttctctccggaaaacggtaggcttcatctagacaaagcagagacgtgggccgtagatttcgatgaggaaaaatctagtgtggccgtcgatttggaatctgtggcggtgcacgagatcggtcacgtgcttggattaggacatagctcggtgaaagacgcggctatgtatccaactttaaagccaagaagtaagaaagtgaatttgaatatggacgacgtcgttggagtacagtctttgtacggaacaaaccctaatttcacgttaaatagtttacttgcgtcggaaacttcgacaaatctagccgatggttcgaggatacggtctcaaggaatgatctattcggctttgagtactgttatcgctctctgttttcttaattggtagttcgtagacttagataattttctttatacaagaaatccgaaaacgtatagaatcatacagacgcatgaatttgttgttcaaagtagtagtctaatcctatgtttctgtttagaataataccatgttcttttttagtttatattagattgggcttcaagttatc

SEQ ID NO: 87149 - DNA, 425 bp, Arabidopsis thaliana columbia
gtaaaacaataacagatcaagcgaagaagaaaagggaagatgctcagcaacattgtcgtggatgaaagatcaccacctcctgtgtttcctcgctccaatggaaaaatccagaagattgttctccctgaggatccttacgttcgtaaattcgctaataagcatcctggaaccaaaattgatgaccctgccaagatatcagcatttattccagatcaagcacgtgtgtatggttgccgggtacttgaattgaaggagcatggcatcagtgagggtgacgccatgtctgtagctaatatggaatatctctcagagagaaaggaaatgaagaaagcatacaaacgcttaaaggagcttgcggtaatgcaagataaggatccacctcctaaaccgtatcctagtgccaagaaagggttaataactcaatc

SEQ ID NO: 87150 - DNA, 736 bp, Arabidopsis thaliana columbia
  unsure (1)..(736): unsure at all n locations
atgctacgcgagctctaatacgacttacttagggaaacctggtacgcctgcaggtaccggtccggaatttccgggtcgacccacgcgtccggtaaaacaataacagatcaagcgaagaagaaaagtgaagaagctcagcaacaatgtcgtggatgaaaggtgatttactttccaaaaccaggaggcttgttggtggcttagctacacgagagcctgtttggcttaaagccatggaagcatcaccacctcctgtgtttcctcgctccaatggaaaaatccagaagattgttctccctgaggatccttacgttcgtaaattcgctaataagcatcctggaaccaaaattgatgaccctgccaagatatcagcatttattccagatcaagcacgtgtgtatggttgccgggtacttgaattgaaggagcatggcatcagtgagggtgacgccatgtctgtagctaatatggaatatctttcagagagaaagggaatgaagaaagcatccaaacgcttaaaaggagcttgcggtaatgcaaggataagggatccacctccctcaaaaccggatcctagtgccaaggaaaagggttaataaccccaattcgaaggccatccggctaaggggtcgcttccagcactccctangcggccgaagggtnggtaaccnagttgnaaaaatgggaaaannntgggttcctnaaanncaaganccggnggaanngcgtaccccgggga

SEQ ID NO: 87151 - DNA, 513 bp, Arabidopsis thaliana columbia
  unsure (1)..(513): unsure at all n locations
gtacatcaaacttacatcattaactgttgtttcacatcgtcgaagcaaaaatgattatatatctaatttcattactccctatcatcgtcgccaccctcatgctttatcaacgatggtggagatccaacataccgccgggaccaaaaccaaagtttctgcttggaaaccttcatcaaatgaaaccactttggacgcattctttctcggagtggtcagagacttatggtcctatcatatcggtgtggatagggtcacagctcactgtcgtggtctcgagctctgatctagccagacaagtgttgagagacaaagaccatcagttgtctaaccgacacaggatcgcaaggatgactcagaccggtactgatcttgtttggtccgattacagtccacattatgtgaaactgaggaaactctgtacatcgagccttctctctgaaaagcatcgaaaatttcaggtccttgagagagatggaccaaaccaaggttcgcccatctgatggntangngnat

SEQ ID NO: 87152 - DNA, 419 bp, Arabidopsis thaliana columbia
cccacgcgtccgcggacgcgtggggcaaattaagatcataaaaaggtttagagcttttctaacaaacgtcaaagcaaatcatcatcggagcaatcttcaaatcatcatgataacagtagccatcgcagccgagttgcttgaagaatatacggcggcgctcacacgcatcaccgccacactcctccctccaccacctacaagtcaccgtcgaagtgtccgagctcctactagcggccgagctgactcttccttgcctcgtaacgataacaactcatcatcatgcgctccaaattacaccgcttttctcttaaatttctgagtatttttttaatagacgaagagattttcgaattttctttgtcttgactgtaataatgtttgtgttattcaattggaactttctatttattttcgatatt

SEQ ID NO: 87153 - DNA, 1109 bp, Arabidopsis thaliana columbia
aatacgactcactttagggaaagctcgtacgcctgcaggtaccggtccggaattcccgggtcgacccacgcgtccgtacggctgcgagaagacgacagaaggggacaggaactctcttccttgcaaaaaaataaaacactatttcctccaaatacacgtagagagatacatatatacatatagagatcaacaaagatgggaagatcaccatgctgcgagaaagctcacatgaacaaaggagcttggactaaagaagaagatcagcttcttgttgattacatccgtaaacacggtgaaggttgctggcgatctctccctcgcgccgctggattacaaagatgtggtaagagttgtagattgagatggatgaattatctaagaccagatctcaaaagaggcaattttactgaagaagaagatgaactcatcatcaagctccatagcttgctcggtaacaaatggtctttaatagctgggagattaccaggaagaacagataacgagatcaagaactattggaacactcatatcaagaggaagcttctcagccgtgggattgatccaaactctcaccgtctgatcaacgaatccgtcgtgtctccgtcgtctcttcaaaacgatgtcgttgagactatacatcttgatttctctggaccggttaaaccggaaccggtgcgtgaagagattggtatggttaataattgtgagagtagtggaacgacgtcggagaaggattatgggaacgaggaagattgggtgttgaatttggaactctctgttggaccgagttatcggtacgagtcgactcggaaagtgagtgttgttgactcggctgagtcgactcgacggtggggttccgagttgtttggagctcatgagagtgatgcggtgtgtttgtgttgtcggattgggttgtttcgtaatgagtcgtgtcggaattgtcgggtttctgatgttagaactcattagagagtcaatcgagaattctttaggaatctttttatatatttagatcgtcaattgtgttttttttttgttcacatttgttatgtaacatcaagtaagaaactagcataattatttgatggcaaagccaaaagattgtgctc

SEQ ID NO: 87154 - DNA, 545 bp, Arabidopsis thaliana columbia
  unsure (1)..(545): unsure at all n locations
cagggtttttgacaaggaccagaacggtttcatctcggcggccgcgccccgtcacgtgatgacaaatcttggggagaagttgacggatgaggaagtcgatgagatgatccgagaggctgacgtcgatggtgatggtcagatcaactatgaagagttcgtcaaagtcatgatggcaaagtgagattcttcttatccctcgaaatcctaagcatgtttttcttttacatctttaaaactgagaaaagtaatttattgaaccaaaagaaacagagagatttgcttccttgtttgttttgttgatcgtgattttttggtaacgttgcttcttctttgccttttggttttgttattgtccgtgacgtttgaactcataatttgctttagtctctcgagtcatgaccacttgatgatgttattttctcttttctctaaaatattgcagtttattgagatcgactaaaaaaaaaaaaaaagnnnnnnnnnnnnnnnnnnnnnnnnnnnnnnnnnnnnnnnnnnnnnnnnnnnnnnnnnnnnnnnnnnnnnnn

SEQ ID NO: 87155 - DNA, 833 bp, Arabidopsis thaliana columbia
  unsure (1)..(833): unsure at all n locations
nnnnatacgactcacttagggggaagaacgtacgcctgcaggtaccggtccggaattcccggttcgacccacgcgtccgaagaaaatatcacagcaaaaattttctcgagaaaatccgaagaagacaaaaaaaatggcggatcagctaaccgatgaccagatctccgagttcaaggaagcttttagcctattcgacaaagacggagatggttgtatcaccacaaaggagcttgggactgtgatgagatcacttgggcagaacccgacagaagccgagctccaggacatgatcaacgaagtggatgcagacgggaacgggacaatagatttcccagagttcctgaacctaatggcacgtaagatgaaagacactgattcagaggaagagcttaaggaagccttcagggtttttgacaaggaccagaacggtttcatctcggcggctgagcttcgtcacgtgatgacaaatcttggggagaagttgacggatgaggaagtcgatgagatgatccgagaggctgacgtcgatggtgatggtcagatcaactatgaagagttcgtcaaagtcatgatggcaaagtgagattcttcttatccctcgaaatcctaagcatgtttttcttttacatctttaactgagaaaagtaatttattgaaccaaaagaaacagagagatttgcttccttgtttgtnttgttgaccgtagttttttggtaccggtgcttctcctttgcctttgggtttcgtaattgcccctnccggttgaccccataattggcttaggctctgggcatgncncttatntgtattncccttncnaaaaatgnngtttt

SEQ ID NO: 87156 - DNA, 611 bp, Arabidopsis thaliana columbia
cagctctctacgactcactatagggaaagctggcacgcctgcaggtaccggtccggaattcccgggtcgacccacgcgtccaatggcgcttccttatcaccaatcagatcacaccacgtggcagttatcggcgccggagccgccggattagtcgcggcgcgagagcttcgtcgggaaggtcactcggtggtcgtcttcgagagacaaaaacaagtcggaggaacctggatctacaccgatcatatcgaacccgatccattaagcgttgacccgacccgatccgttgttcattcgagcgtctatggatctctccgaactaatctcccccgtgagtgtatgggatacagggacttcccgttcgtggttcgttccggtgtgtcggaatctagagatccgaggaggtttccgagtcatggcgaagttttggcgtatttgaaagatttcgctaaggagtttgggattgaggagatggttaggtttgagacggaggttgtgaaggtttctccggcggcggaggaaggaatcgcgaagtggaggattgaatcgacggagaaggagaagaaagttcgtcgtgatgagatttatgatgctgttgttgtttgcggacgcgt

SEQ ID NO: 87157 - DNA, 423 bp, Arabidopsis thaliana columbia
catcttctgcatactgcgaggcaagagctaagtcacgctttgtatcagcatgatgctgcttgtcgtgtgattgctaggcttaaaaaagaaagagacgaatcacgacaattgcttgcagaggctgtaaggcagttgcctgcagcccccgaagttgccacatcgaatgctgctcttagtaatggtaaacgaggtatcgatgatggtgagcaggggcctaatgcaaagaaaatgcgtcttggaatttcggctgaagttatcacagaactcacagattgtaatgctgctctttctcagcagcgtaaaaagagacagatccctaaaacattggcttcagtcgatgctctggagaagttcacccaactctcaagccacccccttcacaagaccaacaaacctggaattttttcaatggacatcctacat

SEQ ID NO: 87158 - DNA, 604 bp, Arabidopsis thaliana columbia
  unsure (1)..(604): unsure at all n locations
atccaagtgccccaccaaatgcttcaatcctcttccactacacaaaaaaacaacttaatccctttatacccttttagccaaaaccctcgctaaaagccaatccctcaatataaaataacaagtagaattgatctgcctatatataagattttgagacgaaataagatctaaaccacaagaaagaaagtaaacataaaagtatgggaaggtcaccgtgctgtgagaaagctcacacaaacaaaggagcatggacgaaagaagaggacgagaggctcgtcgcctacattaaagctcatggagaaggctgctggagatctctccccaaagccgccggacttcttcgctgtggcaagagctgccgtctccggtggatcaactatctccggcctgaccttaagcgtggaaacttcaccgaggaagaagacgaactcatcatcaagctccatagccttcttggcaacaaatggtcgcttatttccgggagattaccgggaagaccaggttancgggntaaanaactttttngaccacgggtttttacngnggnaaggnttnttaaaccaggggggtttnttcccaacgggnttatnngccnnttccaagg

SEQ ID NO: 87159 - DNA, 1203 bp, Arabidopsis thaliana columbia
cagtaccggtccggaattcccgggtcgacccacgcgtccgcaatccctcaatataaaataacaagtagaattgatctgcctatatataagattttgagacgaaatccacgcgtccgcccacgcgtccgagtaaacataaaagtatgggaaggtcaccgtgctgtgagaaagctcacacaaacaaaggagcatggacgaaagaagaggacgagaggctcgtcgcctacattaaagctcatggagaaggctgctggagatctctccccaaagccgccggacttcttcgctgtggcaagagctgccgtctccggtggatcaactatctccggcctgaccttaagcgtggaaacttcaccgaggaagaagacgaactcatcatcaagctccatagccttcttggcaacaaatggtcgcttattgccgggagattaccgggaagaacagataacgagataaagaactattggaacacgcatatacgaagaaagcttataaacagagggattgatccaacgagtcatagaccaatccaagaatcatcagcttctcaagattctaaacctatacaactagaaccagttacgagtaataccattaatatctcattcacttctgctccaaaggtcgaaacgttccatgaaagtataagctttccgggaaaatcagagaaaatctcaatgcttacgttcaaagaagaaaaagatgagtgcccagttcaagaaaagttcccagatttgaatcttgagctcagaatcagtcttcctgatgatgttgatcgtcttcaagggcatggaaagtcaacaacgccacgttgtttcaagtgcagcttagggatgataaacggcatggagtgcagatgcggaagaatgagatgcgatgtagtcggaggtagcagcaaggggagtgacatgagcaatggatttgattttttagggttggcaaagaaagagaccacttctcttttgggctttcgaagcttggagatgaaataatattgtcaaattttaggcgtaactgtacaaaacttttgcctagataatttgaaagtatatcttcaacttgtatgagaaatttaactggtgaattataatatatagaatttgttttttaaaaaaaaaaaaaaaaaagggcggccgctctagaggatccaagcttacgtacgcgtgcatgcgacgtcaaagatctttctatagtgtgcaccta

SEQ ID NO: 87160 - DNA, 545 bp, Arabidopsis thaliana columbia
acgactcactatttggaaagctggtccgcctgcaggtaccggtccggaattcccgggtcgacccacgcgtccggttcccaaggaaaatattctgccaaaagaacctgctgctgcatatctggctttggctgaaggtattcctgaccaaaaagtattcttggatgatgccgcacttttgttatttgcagaagctattttcgatcaaaagttttcaccagaagttccggattccacgtatccttctttgaaagaaccagaaatgcatgttgccgcaccatgtgtagtaacagatcttcctgctaaaaacatcaaggtaaaagaaggtgaagtacataatgagccctacacagcatctgatgtttctatgaatcagaagagtggtttattggaaccagaatctactgaaagaacatttccctcgagcggtggtactgttacgatttctccagatactcagaattctcttccaaatggtacaagtgttgaatcaataagtatatggagcaatggaggactccttggactcgcgccattgaaacctccag

SEQ ID NO: 87161 - DNA, 522 bp, Arabidopsis thaliana columbia
ctttacgtctagagaaatatcctcaccaaaataataacatgtaatgtgtatacagtatacctaatcaatcattatctttctttaattttgttggattttttgcatattgcaaagtttagaacgcgagcgaattctccgcggaattggggttaaaaggaagaacttttagggtttttgattcttcgggttttctcgtgctttgattcctttcaagtcaaagcaaagcattaccttttctcgtccatatcttttgacgacctaagtttctgctgtgaattgttaaacagccatcagcctgggcttgattagccaaccctgttaaggcagggtttgaactaaaagtgagatagtgagatggatgtctcagcacttttaacgtctgctgggattaatatagcgatatgcgtagtgcttgtatcgctttattccattctacgaaagcagccagccaattattgtgtttactttggtcgattgctttctgacggaagagttaaacgtcatgatcctcgttggtatgag

SEQ ID NO: 87162 - DNA, 789 bp, Arabidopsis thaliana columbia
  unsure (1)..(789): unsure at all n locations
ccggcannnnnnnnnnnnnnnnnnnnnnnnnnnnnnnnnnnnnnnnnnnnnnnnnnnnnnnnnnnnnnnnnnnccacgcgtccgcggacgcgtgggctcaccaaaataataacatgtaatgtgtatacagtatacctaatcaatcattatctttctttaattttgttggattttttgcatattgcaaagtttagaacgcgagcgaattctccgcggaattggggttaaaaggaagaacttttagggtttttgattcttcgggttttctcgtgctttgattcctttcaagtcaaagcaaagcattaccttttctcgtccatccatcagcctgggcttgattagccaaccctgttaaggcagggtttgaactaaaagtgagatagtgagatggatgtcgcagcacttttaacgtctgctgggattaatatagcgatatgcgtagtgcttgtatcgctttattccattctacgaaagcagccagccaattattgtgtttactttggtcgattgctttctgacggaagagttaaacgtcatgatcctcgttggtatgagaggttcgcgccctctcctagttggctcgtgaaagcttgggaaaccactgaggaagagatgttggctgctgctggtctggatgctgtggttttcatcaggatggtcatttgcagcattcgtattttctcaatcgtcgcagtcgtttgccttgcctttgtgttacctgttaactattatggacaaaagatggagcacangggaagccatntnggagtcattgggagtattcacaat

SEQ ID NO: 87163 - DNA, 499 bp, Arabidopsis thaliana columbia
acgaagaaaataaaatttcaaaccaaaaaaaaaaaaaaatgagaactttagaagaatcgaagatctctattgtcttcttgttgcttcttctcttctcaatcttcatcagttccagtcaccaggcaaatgaggtattaccagctgaaggagataatgagatgatgatggtgccattgggggaggagaagtttatggtaatgaatgaaacaagaaggaaacttggaagttttcagatatgttcagtttgtacttgttgtggtggtgctaaaggtctttgcttgccttctccttgttgctatgctattaactgcaatatccctaatagaccctttggttactgttctttcactcccaaaacttgcaattgctttggttgccatatctgagatcttctacttcattgtaatttgggagagaaacaagtgaatctaaatcttgattcatcttcaagtgtgaaagggaggaaaaaaagaagaatatctgttcttggtttgagtct

SEQ ID NO: 87164 - DNA, 1447 bp, Arabidopsis thaliana columbia
ttgtactcagtaacttctctttctcacttacacactctctctctctctctccattgccttgacttttgtggtcagtggaataaacacatataaccgccggagaaaatgggaagagcgccatgttgcgagaaggtcggtatcaagagagggcggtggacggcggaggaggaccagattctctccaactacattcaatccaacggtgaaggttcttggagatctctccccaaaaatgccggattaaaaaggtgtggaaagagctgtagattgagatggataaactatctaagatcagacctcaagcgtggaaacataactccagaagaagaagaactcgttgttaaattgcattccactttgggaaacaggtggtcactaatcgcgggtcatctaccagggagaacagacaacgaaataaaaaattattggaactctcatctcagccgtaaactccacaacttcattaggaagccatccatctctcaagacgtctccgccgtaatcatgacgaacgcttcttcagcgccaccgccgccgcaggcaaaacgcagacttgggagaacgagtaggtccgctatgaaaccaaaaatccacagaacaaaaactcgtaaaacgaagaaaacgtctgcaccaccggagcctaacgccgatgtagctggggctgataaagaagcattaatggtggagtcaagtggagccgaggctgagctaggacgaccatgtgactactatggagatgattgtaacaaaaatctcatgagcattaatggcgataatggagttttaacgtttgatgatgatatcatcgatcttttgttggacgagtcagatcctggccacttgtacacaaacacaacgtgcggtggtgatggggagttgcataacataagagactctgaaggagccagagggttctcggatacttggaaccaagggaatctcgactgtcttcttcagtcttgtccatcggtggagtcgtttctcaactacgaccaccaagttaacgatgcgtcgacggatgagtttatcgattgggattgtgtttggcaagaaggtagtgataataatctttggcatgagaaagagaatcccgactcaatggtctcgtggcttttagacggtgatgatgaggccacgatcgggaatagtaattgtgagaactttggagaaccgttagatcatgacgacgaaagcgctttggtcgcttggcttctgtcatgatgatattgattgatccgttatgtaatcttttttgtgcattcacagtttgaatctattccacgtcgtatcatatcataaagtttaggatctaaatattagtccattagttaaaattatgtaatgcaataaaacccatgggatgtttggattgtacgtaaggttaaaatattgcagtttttgctttagtggaagaattaaactaatatgatgtttttatttgtatcgt

SEQ ID NO: 87165 - DNA, 548 bp, Arabidopsis thaliana columbia
  unsure (1)..(548): unsure at all n locations
nnnnnnnnnnnnnnnnnnnnnnnnnnnnnnnnnnnnnnnnnnnnnnnnnnnnnnnnnnnnnnnnnnnnnnnnnnnnnnnnnnccacgcgtccgcatttccaaaaggtcttaaccgccattggtaacttctgtatctgttcaatcggaataggaatgttgattgagataattataatgtatccgatccaacatcgaaagtatagagatggaatcgacaatcttcttgtccttctcattggaggaatcccaatcgctatgcccactgtgttgtctgtcacaatggctattggatcacataggttgtctcaacaaggtgccatcacaaaacgaatgaccgccatcgaagaaatggctggtatggatgttctttgcagcgataaaactggaactctaactctcaacaaacttacagttgacaagaacttgattgaggtattctccaaagacgtagacaaggactatgtgatactactttcagctagggcttcaagagtagagaaccaagatgcgattgatacttccattgttaacatgttgggtgacccaaa

SEQ ID NO: 87166 - DNA, 1186 bp, Arabidopsis thaliana columbia
cctacatccgtatgcctatatataggtggttgcaaggcttacccaaatctctcttcaacttgccataacatttactctctttggacaaagacacagacagagagatagataaaaacagagaattgtcatagaaccaattcagagagaacgagagagagagagagagaaatggggagacaaccatgctgtgacaaagtagggttgaagaaaggaccatggactgcagaagaggataggaagctcataaacttcatccttaccaatggacaatgttgttggagagctgttcctaagctttctggtcttcttaggtgtggcaagagttgcagacttcgttggactaactatcttagaccagaccttaagagaggtcttctctctgattacgaagagaagatggtcattgatctccattcccagcttggaaacaggtggtcaaagatagcttctcatttaccaggaagaacagacaacgaaatcaagaatcattggaacactcacatcaagacgaagttgaggaaaatggggattgatcttcttacacataaaccactctctatcgtcgaaaaagaagacgaagaacccttaaagaagctacagaataatacagttccttttcaagaaacaatggagcgtcctttagagaacaacatcaagaacatatcaagacttgaagagtctttaggtgatgatcaattcatggagataaatcttgagtatggtgtcgaagatgtccctcttattgaaacagagtctttagaccttatctgcagcaattcaacaatgtcttcatccacgtccacatcttcgcattcttctaatgattcgagtttcttgaaggatttgcagttcccggagttcgagtggtccgactatggtagtagtaataatgataataataatggtgtggacaacattatagagaacaatatgatgagcctgtgggaaattagtgactttagcagtttggatttgctgcttaatgatgagagttcttccacttaaaaaaaaaaaaaaaaaaattcttaagaatatggtttcttttgtaaaagaatggaaactatggggtgggggaaacagaaaaacctaaatacccttcgttactctagtttttgagggatttgagagaacgtttttttacttgtgagaaatttagaaacaaaaataaagtttatttattttgtac

SEQ ID NO: 87167 - DNA, 512 bp, Arabidopsis thaliana columbia
tgatactccagctctctacgactcacttagggaaagctggcacgcctgcaggtaccggtccggaattcccgggtcgacccacgcgggcgcttggatcttaatggccaaattatcttttggaactcgatggcggagaagctttatggattctcagctgcagaagcgttagggaaggactcgattaatatactcgtagatggtcaagatgctgctgttgcaaaaaatatctttcagcgttgcagcagtggagagaggtggactggagagtttcctgttaagaataaaatgggagagaggttttcggttgtgactaccatttctcctttttatgatgatgatggtttgcttattgggattatatgtatcacgaatgattcggcactttttcaacggccgagaggtcctcccgctaaaaacagggggcaagagggggattcaagcttttgccgggggactaatggggttgcttctaggcttggttttgattccaaagaggctgttgtgtcgaaact

SEQ ID NO: 87168 - DNA, 562 bp, Arabidopsis thaliana columbia
  unsure (1)..(562): unsure at all n locations
nnnnnnnnnnnnnnnnnnnnnnnnnnnnnnnnnnnnnnnnnnnnnnnnnnnnnnnnnnnnnnnnnnnnnnnnnccacgcgtccgcggacgcgtgggtcgccatcgtcgctaccgattgtcttgaggtttacgacttttggactaatctcctctgtggagagcaatgactaaaactcgtgggactgatatgacaaagaaaaagggtaaacatgtttctgaaatggatttcaagactcatcagcatactgaatttttcgataagttgatagagctcacgcctgctagattctacttacctgatgagacagaaaggaaatggtatccaggtcttagcaaggctcaaaaagctagagccaagaaaaaaacaaatgacaacctaaagaaggcgaagagagataagttggacccagagaagtctgctttgacgactctcgatttactgaaggagaagatagagaaggaaagattggcttcacagaagcagaagcttaagaagaaacacgcggatttacgggagcagaagctagagcaggaaaaatcaggtactgagcttcctgatgat

SEQ ID NO: 87169 - DNA, 591 bp, Arabidopsis thaliana columbia
gctggtacgcctgcaggtaccggtccggaattcccggggcgacccacgcgtccgaaaaaaaaattcacccaaaaaaaaaaaacctcgttgccttcttcttcgccgttacaggcctctttctttcttcaattcgccggcaaaatcttctctttctcttcccccgccggtccttcaccaatcctctgatctctctacacacgaacctttgattttgaccaacgtcgatgcatgttcatgactagtctcttcctcaatccttcaatttcatcaattcacgtcgatttcgtatccgattcgttgttctagctctttgtgtggtgttagggttttaagattttggaattggggtttggagtttgtgatgtttgaagtcaaaatggggtcaaagatgtgcgtgaacgcttcatgtggtacgacttctactgttgaatggaagaaaggttggcctcttcgatctgggcgtcgcgctgatctctgttatcgttgcggatctgcgtatgacagttctctattctgtgaacaatttcataaggaccaatctggttggagggaatgctacgtgtgtagcaagagactacattgtggatgcat

SEQ ID NO: 87170 - DNA, 475 bp, Arabidopsis thaliana columbia
cccacgcgttcgcggacgcgtgggttgtgatcgcatagatcgattccttttgcggagaaatgcaattgattcgtggcagtacaaggttgcttcagaggcatcgtttctccatctccaacactcttcctttcacttcttcttcttgtggaagctggtctgctaatgaatcgaggaagctaggctttgattctttccctagtactagagctgcgacatatctcattagctcgttgaaaaatgccggcttttcctctttggcagtagtacctaaacaaaacttttcgtcgaggtgtttttccaccactggagattctgttcaaggatccctgagtcagattgtgttgtgcctcagagaatcaagtttaagcggcttgataaaccgctaagcatattgcagattgtagacaaggaagcagttgaggaagtgagactcttagagagattccagagataagcctgtacattgtgcagctaa

SEQ ID NO: 87171 - DNA, 776 bp, Arabidopsis thaliana columbia
  unsure (1)..(776): unsure at all n locations
atgatcttnnnnnnnnnnnnnnnnnnnnnnnnnnnnnnnnnnnnnnnnnnnnnnnnnnnnnnnnnnnnnnnnnnnnnnnnnnnccacgcgtccgcccacgcgtccgtacgggcgagaagacgacagaaggggaaaaaccctaaaccctaatctctaatttgagaaattaggttagttcacctttttgtcgattcctcttgcggagagatgcaatcgattcgtggcagtacacggttgcttcagaggcatcgtttctccatctccaacactcttcgtttcacttcttcttcttcttgtggaagctggtctgaaaatgaatccagaaaactagggtttgattcttgcccttctagcagagctgcgacatatctcattagctcgttgaaaaatgcaggcttttcctcttcagctatacctaaacaaaactttacgtatgcgtcgaggtgtttttccaccactggagattcttctgttcaaggatctcctgagtcagattgtgttgtgcctcagagaatcaagtttaagcggcttgataaaaccgctaagcatattaatgcagattgtagacaaggaagcggttgaggaagtgagatctcttagagagattcccagagataaagcccgggttacattgtggcagctaaaagtgggaagtgccggaggaacaagagacgggtatcaatcgggaaaggcgtgtcatagcaaggggaaatcctggcngnacccacnattnggantanaggcttttnccgagngggngtgaccagttccctttc

SEQ ID NO: 87172 - DNA, 543 bp, Arabidopsis thaliana columbia
atgatactccagctctctacgactcactatagggaaagctggcacgcctgcaggtaccggtccggaattcccgggtcgacccacgcgtgcgcggacgcgtgggcggacgcgtgggttcgcattgttaattaaggtcgccggacttttggccactgtcaccgttggagccaacgtagtttcctactctcgtttccgtcgccagaatctcgcgaagtttcgctctccaatcgacgaatctaaagaagttctcgctgatttcaattccattgaacacgaggaaggaaaattcttctttgggttagctactgcacctgctcatgcggaggatgatttagatgatgcttggctccagtttgctaaagaaacaccatgttcagcagaagaagcagaggctgctgataagaaagctaggaggaagaaggttaagcttgctgtgggagctataaccaaaggcttggccaagaacactcatggcaaagaagataagaatgcagctgataagcccccctctaaaaagtgttgccgcgtggcataacgctcctc

SEQ ID NO: 87173 - DNA, 652 bp, Arabidopsis thaliana columbia
  unsure (1)..(652): unsure at all n locations
atgannnnnnnnnnnnnnnnnnnnnnnnnnnnnnnnnnnnnnnnnnnnnnnnnnnnnnnnnnnnnnnnnnnnnnnnnnnnnccacgcgtccgattcaattcgtttaaaaatggagagtcaaaagcaagaagataatgaatacattttccgcagtttgtatccatctgtgcccattcctgacaaacttacactgcctgaatttgtgctccaaggagttgaagaatacacagagaatgtagcgtttgtagaagcggtgaccggaaaagctgtgacgtacggtgatgtagtgagggacacaaagaggctagccaaagcgttgacatctctcggactaaggaaaggtcaagtgatggttgtggtcctaccaaacgtcgccgagtatgggattattgcccttggtattatgtctgccggtggagtcttctccggtgcaaatccgacggctcttgtttccgagatcaagaagcaagttgaagcttccggtgctagaggaatcatcactgatgctactaactatgaaaaggtgaaatcactaggtttaccggtgatagtgttaggtgaagagaagatagaaggagcagtaaactggaaagatcttctagaagcaggagacaaatgcggagataccgacaatgaagagattcttcagaca

SEQ ID NO: 87174 - DNA, 583 bp, Arabidopsis thaliana columbia
gtttatcatcatttcccgtaatcgtaatcggaggtcaggcttcagcattctctcgtcttctctctcgcagccgtagtttttgatcttctcttcaattctctctcctgatggccacgtccgccgtcctctccggtgccagatcgatgcttcgagctgcttcctcacgcagcgccgctgcttctactggccgcttcgcctctcaagcgaaatccgctccaccattgtttagagccactgccagaagaagcccactgctttctcctctccgaaatcctgtggaactgagcttctgtgtggagtcattgttaccatatcactcggctacagcttcagcgctaatgacttcaaagctttctatctctggccaaacctatggctggctctctgacgcttgcaaagaggacttttgatgatgtctacgcgtacccaatgcgagattgttgattgcgagagaaggtttaagagtatttaggcaaagaataattgttgtactgttcaaacacaaatcatctctttgtctttagttttcatatcacacccaaatgtccaatatcccctccatcaaatctctatgatttctatt

SEQ ID NO: 87175 - DNA, 554 bp, Arabidopsis thaliana columbia
cccacgcgtccgcggacaaaacaccaaaacagagttcacagaaacatattcaaagatttttcacaaatattaccattttaaatctataaacaatgacgaactcggtggctaagttggcactactagggttttgcattctgcaagtgacgagcttacttgttccgcaagcaaatgctagggctttccttgtgtttggagattctctcgttgacaatggtaacaatgactttcttgctaccactgctcgtgccgataattacccttatggtatcgatttcccaactcatcgtcctacgggccgtttctccaatggtctaaacattccagatctcatcagtgaacatttgggtcaagagtctccaatgccgtaccttagtccaatgctgaagaaggacaaactcttaaggggagctaacttcgcctccgcgggtattgggatccttaacggcaccggaatccagtttctgaattttattaggatcacaaagcagctagagtacttcgagcagtacaaggttcgagtaagcgggttggtcggagaagaagagatgaat

SEQ ID NO: 87176 - DNA, 582 bp, Arabidopsis thaliana columbia
  unsure (1)..(582): unsure at all n locations
tcnnnnnnnnnnnnnnnnnnnnnnnnnnnnnnnnnnnnnnnnnnnnnnnnnnnnnnnnnnnnnnnnnnnnnnccacgcgtccggaaaatcctgaagcagagaaagagagatttgaaaaggagtgggaaatattggatgagaagcaagcagtatacaataaagagcggataagaatatctgaagaaaaagaaaagttcgagaggtttcaactactggaaggagaaagattgaagaaagaagagagtgctttgagggtgcagataatgcaggaactggatgacattagactgcagagagaatcatttgaagccaatatggaacatgaacgatcagcgttacaggaaaaagtcaaacttgagcaatctaaggtgattgacgatcttgaaatgatgagaaggaatcttgaaattgaacttcaggaaagaaaagaacaagacgagaaagatctactagacagaatggctcagttcgaggacaaaagaatggcagagcttagtgatatcaatcaccagaagcaggctttgaacagggagatggaagaaatgatgtccaaaaggagtgctctccaaaaggaaagtgaag

SEQ ID NO: 87177 - DNA, 601 bp, Arabidopsis thaliana columbia
  unsure (1)..(601): unsure at all n locations
tcgggttcatggctganccccnacaacttcannttcggccctgacccaaaggccntaccattcaatctgcatncgggtgtgtggttcagccagcacagcntatcgtcggnggtttattttggcggacttatagccggtnccctcggatgtgtatatgcaccaccagatccagcaaggctatagctggagcagaccgaaaggatctcatgaggaagttgcctaaattcatatatgacgaggaaaaagctttggagaaaacacgtaaggtactagctgagaaaattgctcagcttaactctgctatcgacgatgtctcctctcagctcaaatcagaagatactccgaatggtgcagctctaagcaccgatgaaatcgaggctacagcctgaaatcatctgtttttaggatttgaaattgaatcatgggagattacttactatgatccccaataattgttttcctttctgtgtaatgttgtacaacttttcgtctactatcttcaaatgactgcttaaaaaaaaaaaaaagggcggccgctctagaggatccaagcttacgtacgcgtgcatgcgacgtcatagtattctatagtgcgcctaaa

SEQ ID NO: 87178 - DNA, 791 bp, Arabidopsis thaliana columbia
  unsure (1)..(791): unsure at all n locations
tcnnnnnnnnnnnnnnnnnnnnnnnnnnnnnnnnnnnnnnnnnnnnnnnnnnnnnnnnnnaaacttgctccaaccacgctatctcaggatctctctcagacacagtttcttccatccatggcgtctctttcttctacctctctctctctccccaagaattctcaccaactccatccttcatctggtttttctctgaatccaaatgctcgttgtgtcagtgtttcatttggactgaatcactccaacaaacttcatatttctgctcctagaaccaaaaggatcctaaccattcaatctgcatacagagatgatgatggttcaggcagcacaggcctattcgtcggagggtttattttgggcggacttatagtcggtgccctcggatgtgtatatgcaccacagatcagcaaggctatagctggagcagaccgaaaggatctcatgaggaagttgcctaaattcatatatgacgaggaaaaagctttggagaaaacacgtaaggtactagctgagaaaattgctcagcttaactctgctatcgacgatgtctcctctcagctcaaatcagaagatactccgaatggtgcagctctaagcaccgatgaaatcgaggctacagcctgaaatcatctgtttttaggatttgaaattgaatcatgggagattacttactatgatcccaataattgttttcctttctgtgtaatgttgcacaacttttcgtctactatcttcaaatgactgcaatacaaccttcttcttttaaaaaaaaaaaaaaaagggcggccgct

SEQ ID NO: 87179 - DNA, 719 bp, Arabidopsis thaliana columbia
  unsure (1)..(719): unsure at all n locations
ccagctacatacgactcacttagggaaagctggtacgcctgcaggtaccggtccggaattcccgggtcgacccacgcgtccgctgatctaaaaaatcaacgaacacaaaactcatcaaagctcctcaaaaccctaaacacagtctctccatcttcttcaatctctctctcgttcggattctcatctcttcttctggtttcagattgagtcttgttactgtgtttcataagactattgaagttaagatgtctggagcattgaatatgactcttgatgagattgttaagaggggtaaaactgcaaggtctgggggaagagggatttctcgtgggcgtggtcgtggacgtggtggtggtggaagaggagctggacctgctagaagaggtcctcttgctgtgaatgctcgtccatcatcttttcaccattaacaagcctgtccgtagggtccaggagctttgccatggcaaaagcgggttttgttttgaagaattgggcctaaagagcttgcccggggcaatcaaggaagttttaagtttggaacccaggtccccattgttacaaaatttggccccaggggtgtgacaaaattgnaggtttaaggggaccnntttttcttnnnatttggggaggtagggcngtaattcnggtcatttttgncaaaaattgggggnccaagtnganaccttagtgggtttccaagaggaggttcatnaagnttc

SEQ ID NO: 87180 - DNA, 1387 bp, Arabidopsis thaliana columbia
  unsure (1)..(1387): unsure at all n locations
cacttggaagagaacaacaacgacaagatcaagaaaagacaaagatttgtaagaaaatgggaagagctccatgctgcgacaaggcaaacgtgaagaaaggaccatggtcaccggaagaagatgtgaagctcaaggattacatcgacaaatatggcactggtggcaactggatcgcactgcctcagaaaattgggctgaagagatgtggtaagagttgcagactgagatggcttaattacttaagaccaaacatcaaacatggtggtttttctgaggaagaagatagaatcatcttgagtctctacattagcattggaagccggtggtccataattgcagctcagcttcctggaaggactgacaatgatatcaagaattattggaacacaaaactgaagaagaaacttctaggaagacagaaacaaatgaatcgtcaagactccataaccgattctactgagaacaacctcagcaacaataacaacaataagagtcctcaaaatctgagcaattcggcactggagaagctccagcttcacatgcagcttcagaatctacagagccctttctctagtttctacaacaaccctatcttgtggcccaagcttcatccattgctccagagcactacaactaatcaaaaccctaagcttgcatctcaagaaagcttccaccctttaggagttaacgttgatcatcagcacaacaataccaagctagctcagataaacaatggagcctcttctctctattcggagaacgtagagcaatcccaaaaccctgctcatgaatttcaacctaatttcggtttttcacaggaccttcgattagataatcataacatggactttatgaacagaggggtttctaaagaactgtttcaagtgggcaacgagtttgagctaacgaacggttcgagttggtggtcagaggaagtggaactagagaggaaaacgacgtcgtcgagttcttgggggtcagcttctgtgcttgatcagacaactgagggaatggttatgcttcaagattacgctcagatgagctaccacagtgtttaataagttatatcatgcatatatataaatgcgtaactatagggatggataatggattattgatggaatatgtattttattacggtcataagcttatagcatgttgatggtgaaaggggctttttcataatttgttttaaaatgtaacgagttgtggataataatgttaatcgttaattcaaaaaaaaaaaaaaaaattttggaaaaaataggagacgtaaataaactttgatcgnnnnnnnnnnnnnnnnnnnnnnnnnnnnnnnnnnnnnnnnnnnnnnnnnnnnnnnnnnnnnnnnnnnnnnnnnnnnnnnnnnnnnnnnnnnnnnnnn

SEQ ID NO: 87181 - DNA, 994 bp, Arabidopsis thaliana columbia
atacattcattcattattgagagactactgatctctctctctctgcatgcatctttctctctattaatctctccagtatttgtcaggatttgggtatttttttaataacgatcagtgtccaatctctcttatcgtcttcataagtttcctattatttcattcttcttcttctttattctcatttctctctctctctctttttactcacagacaaatctttttcacatctctttgcaaattcttgagaattcattcaagttacataaaaagctgagagcaatgaagaaaattgtgttaaagctggatttgcatgacgatagggcaaaacaaaaggcccttaaaacggtttctactctcccaggaatcgattccattgcaatggacatgaaggagaagaaattgacggttattggaaccgtggatccggtaaatgtagtaagtaagctaagaaagtattggccgatgacggatatcgtactagtgggacctgcgaaagagccggaaaaggagaagaaggaggagccgaagaaggaaggtggtggcgagccgccaaagaaagaaggagaagctccaaaagaagaagggaaaaaggaaggagaagcaccgaagaaggaagaagagaagaaagaaggtggcgataagaaggaaggagagaagaaagatcaaccacaagcgcagccgcaaccagttgtgccgccacctgatcatgtgttggaacttgtaaaggcgtataaagcatataatcctcacctaacaacgtattactacgcccaaagcatcgaagaaaaccctaatgcttgcgttatatgttgaaatatttataatgtgatatattttggggaaaagatggaccgatctatatatagtcatgaggatgaagaataagaaacaaaggatatatcttagacttcggatgggatcggatatgtttttgtctcctcgataatgcggggaagttttatttccttaaatcgatttcgatgatatgttttgt

SEQ ID NO: 87182 - DNA, 536 bp, Arabidopsis thaliana columbia
cacctacataatagggagggctgctccgcctgcaggcaccggcccggaattccggggtggacccacgcgtccgttcttagcaacagaccaaatgggaagcatcgatgctgcagtgttgggttcagagaagaaatcaaacccgggaaaagccacaattcttgctctgggaaaagcctttcctcaccagctagtaatgcaagagtacttagtcgatggctacttcaaaaccaccaagtgtgatgaccctgaactcaaacagaaacttactcgtctctgcaagacaacaacggtgaagacagggtatgttgtgatgtcagaggagattctcaagaagtacccagatcttgccattgaaggaggatccacagtgacgcagcgtctagacatctgcaacgatgcagggaccgagatggcagtagaagcctccagagcctgcatcaagaactggggacgttctatttccgacataactcacgttgtctatgtctcctcaagcgaagctggtcttcctggaggggacttgaccttgcccaagg

SEQ ID NO: 87183 - DNA, 547 bp, Arabidopsis thaliana columbia
  unsure (1)..(547): unsure at all n locations
ccgttctggccgtattgaccgtcggctgtatattgggttgcctgatgcaaagcaaagggtgcaaatatttggagttcacagtgctgggaagaaccttgcagaagatatagactttgggaagcttgtttttcgaacggttggcttttccggggcagatatccggaatcttgttaacgaagcggctataatgtcggtaaggaagggacgttcttacatatatcaacaagacattgttgatgtgttagataaacaattgctcgagggtatgggtgtacttcttacagaggaagagcaacagaaatgtgaacaaagtgtatcttacggaaaagaagagacttcttggctgttcatgaggctgggtcatatagtgtttggctcatttggtttcccccgatttgactgggcatgcattttcgcaagctccttcctggtggcaaggaaactgctgtatcggttttctatccacgggaagacatggtagaccaagggtgtttccccggtttggtaaattnaaatccaantnggggganccaatgggtggncnttt

SEQ ID NO: 87184 - DNA, 454 bp, Arabidopsis thaliana columbia
  unsure (1)..(454): unsure at all n locations
ctggcacgcctgcaggtaccggtccgngattcccgggttcgacccacgcgtccgcccacgcgtccgtagagcggcgcagatcgagattgtgaaatcgaagctaagagaaacgggaagaagctggatgccgtataaggagtttgttagcgtttgtggtgaagcttcttcagatccagatctcggatctaaaatcgcgaagatgcttgatgattcagcaaacgtcatcgttttgggagattccgtttgtattagacctgatcaggtactttcttcgttcttcttctctagccttttagcattttgaaatcgtgctttgtctctgagatctctctgagtattgcagctgattgattgggagagataagagagagatttaaaaactctctgaaaaaaacggattatgttctcaaaagtttttgttcgattttgattttggaagctataccgaaaactg

SEQ ID NO: 87185 - DNA, 1596 bp, Arabidopsis thaliana columbia
  unsure (1)..(1596): unsure at all n locations
gtccgaaactagatctctcttctcctctgctcgttcaatgttataacgatctcgagtatcacaaaagaacaagatgtctattcgaagaatctaccgatgtctgaattctttaatcaaaagatcttgtgctcaatctctatgatcatacgccccatttcacactttgtttcacctctcagtttttttttttgtgtttttttgtccctctttgtttcacttgagaacaaccccctttgaactcgatcaagaaagctaagtttgaagaatcaagaatggtgcggacaccgtgttgcaaagccgaactagggttaaagaaaggagcttggactcccgaggaagatcagaagcttctctcttaccttaaccgccacggtgaaggtggatggcgaactctccccgaaaaagctggactcaagagatgcggcaaaagctgcagactgagatgggccaattatcttagacctgacatcaaaagaggagagttcactgaagacgaagaacgttcaatcatctctcttcacgcccttcacggcaacaaatggtctgctatagctcgtggactaccaggaagaaccgataacgagatcaagaactactggaacactcatatcaaaaaacgtttgatcaagaaaggtattgatccagttacacacaagggcataacctccggtaccgacaaatcagaaaacctcccggagaaacaaaatgttaatctgacaactagtgaccatgatcttgataatgacaaggcgaagaagaacaacaagaattttggattatcatcggctagtttcttgaacaaagtagctaataggttcggaaagagaatcaatcagagtgttctgtctgagattatcggaagtggaggcccacttgcttctactagtcacactactaatactacaactacaagtgtttccgttgactctgaatcagttaagtcaacgagttcttccttcgcaccaacctcgaatcttctctgccatgggaccgttgcaacaacaccagtttcatcgaactttgacgttgatggtaacgttaatctgacgtgttcttcgtccacgttctctgattcctccgttaacaatcctctaatgtactgcgataatttcgttggtaataacaacgttgatgatgaggatactatcgggttctccacatttctgaatgatgaagatttcatgatgttggaggagtcttgtgttgaaaacactgcgttcatgaaagaacttacgaggtttcttcacgaggatgaaaacgacgtcgttgatgtgacgccggtctatgaacgtcaagacttgtttgacgaaattgataactattttggatgagtgaaactcataatcgatgaatcccacgtgaccatgtcaatatgatgtctatggatatgttaccttgatgatgttgatggtaataataataaataatagatggtgatgatgaccatgcatgaatcatgaatgtagttcgtgttgtcacatatgcttgtgtttttgtgttttttttttttggtctgaagtgtgttgtttcgttgtaaatggattataaatggtgatgtaataattataatgttnnnnnnnnnnnnnnnnnnnnnnn

SEQ ID NO: 87186 - DNA, 386 bp, Arabidopsis thaliana columbia
tcaattccaaaacactgcgccgggaagacatggacaccgagatggagacagaacaaatataccaggtcgatgtcggaaatctcttggctttcaatcccaatcaccgcttcccatctgctccttcttcaaggggggagcttgtgaaggagatcctaacggagggaacaaaacttgttcaggaaatagccaataaacttttcaactttccttctactgaaacaaatgatggtcctattgtccaattgcctccgcctacaaccaaacttcctagagagaaacatattccaaggcctaagcctcctacgaagtgggaagagtttgcgcttaagaaaggtatacagaagcgcaagaaggaaaaagttgtatgggatgaacaaactaatcag

SEQ ID NO: 87187 - DNA, 532 bp, Arabidopsis thaliana columbia
tgatactccagctctctacgactcactatagggaaagctggcacgcctgcaggtaccggtccggaattcccgggtcgacccacgcgtgcgcggacgcgtgggacttttttctccttctattctcttgtatcttctcattatagtctcgatgaagatgctgagacttagaaagaagcaacatttggtgtttctactatgcgtgtggtgtttggtggtggattggagcaaagcagaaacagaggaaagtgatggaagtcccatggagaaaacagagcaagctgctctatactctaccattcaaggctttgttggtgaatcttggaatggctcttatctttatcctgacccttgtggctggactcctatccagggtgtgacttgtgatatctatgatgagctttggtatgtaactgctctaagctttgggactatgaaagacaactctcttgcttgttctgaaagtccagtgatcagaccacaactctttgagctcaagcacctcaagtctctctctcttttcaactgcttcaca

SEQ ID NO: 87188 - DNA, 559 bp, Arabidopsis thaliana columbia
  unsure (1)..(559): unsure at all n locations
nnnnnnnnnnnnnnnnnnnnnnnnnnnnnnnnnnnnnnnnnnnnnnnnnnnnnnnnnnnnnnnnnnnnnnnnnnnnnnnacacccacgcgtccgctctgccccattcaatacatgaagaagaacacagctgatgaagctacttccactaccctttgattccaattcgaattctcccccattgtaatcatcggatgcagcagaaaaatacctacaaatttcgattcttttcgtaatccattggactctttctgtttctgaaagagagtgtgtgtttttgcggtgatgggtcagcaattgcgtcgagctgttgggaaaatcaaagaagttgagagatcatcaccatcaagagtctccattgatcggagatcgcttcctacggaggagctcagtgccgtgaaatcgtctccgtctactgccgccgttgatggagtttctgataaaggtcgaagaaccagtgaggataatgttttagaggaacgagaccccaagtatggtacattttggaccaaatngttnggggataaaagctnaanctgggggaaanttnnttggggnggg

SEQ ID NO: 87189 - DNA, 609 bp, Arabidopsis thaliana columbia
  unsure (1)..(609): unsure at all n locations
nnnnnnnnnnnnnnnnnnnnnnnnnnnnnnnnnnnnnnnnnnnnnnnnnnnnnnnnnnnnnnnnnnnnnccacgcgtccggatagattcatctttcaatctttttttatcttaaaacaaaactttgtgtgaagagaaagatggagatagaatcaaagttcaagagaatatgtgtgttttgtggaagtagtgctggtaataaagtcagttacaaagatgctgctatcgaactcggaaccgaactggtatcgagaaatatcgatcttgtctatggtggagggagcattggtttaatgggtttgattgctcaagctgctttcaatggagggcgccatgtcattgaggctcgtgtaaacctctctttttttttttttcttaaaatttcaatgttctccagtacttaacaaaaaatggataattttgccatacgtgtagtatttgtgacgattactttttaaccaactttttttgtcttgatactgccttcagggttatccccaagacactaatgccaagagaggttcgttcgaaatataactccagaatagtattcatggactatgtgttttctcttaccactttcataacaacatattctagagtttaaaga

SEQ ID NO: 87190 - DNA, 463 bp, Arabidopsis thaliana columbia
tacgactcactttagggaaagctcgtacgcctgcaggtaccggtccggaattcccgggtcgacccacgcgtccgggtagaactttaggtacaaatgcttcagttacgggatttggcaatgagtatgatgctctagcctctattcaaccccctggatccgggattggttcttctgctgctgaggcattaggaaaaaagagcactggtaaacatcagtcatctcagtggtggatggaagaggatggtttgtttaatctagacgatgaagggagatcagagaaacaaatgtgtgctattgctgcatcgaacgttatccgcaacttctccttcatgcctgataatgaagttgtaatggctcagcatcgccattgcttagaaactgttttccagtgcatacacgatcatatgaccgaggatgaagagctggtcacaaactcgctagagacaattgtaaacctagcgca

SEQ ID NO: 87191 - DNA, 546 bp, Arabidopsis thaliana columbia
  unsure (1)..(546): unsure at all n locations
cnnnnnnnnnnnnnnnnnnnnnnnnnnnnnnnnnnnnnnnnnnnnnnnnnnnnnnnnnnnnnnnnnnnnnnnccacgcgtccgcccacgcgtccggtactgtaatttcatgcatgtgaagcttgtttcgagggaactaaggagaaaactctttgggagatatcggcgatcataccgcagaggaagtagaagcaggagcagaagcaggagtattagccccaggaacaagagagataatgaccgacgtgatccttctcacagggaattcagtcatcgggacagagatcgcgagttttaccgtcatggaagtggaaaaaggagcagtgagaggtcggagaggcaagagagggacggttcaaggggtaggagacaagcaagccctaaacgaggagggagcccgggtggcgggagggaaggaagcgaggagaggagggcaaggattgagcaatggaacagagaacgggaggagaaggaagagggaggagcataaaaacagttgtttactcaaatcacaattgctgctatgtggtttctgcgtctgcttctc

SEQ ID NO: 87192 - DNA, 694 bp, Arabidopsis thaliana columbia
  unsure (1)..(694): unsure at all n locations
aactaggaacccttggnntccccactcccccgngnattacccggccaaccggtttccccngacagngttatcccgcttccttccccgggaatcatcacggacagcgccccgttttccctcatggaagtggaaaaaggaccagtgagaggtcggagaggcaagagagggacggttcaggggtaggagacaagcaagccctaaccgaggagggagcccgggtggcgggagggaaggaagtgaggagaggagggcaaggattgagcaatggaacagagaacgggaggagaaggaagagggaggagcataaaaacagttgtttactcaaatcacaattgctgctatgtggtttctgcgtctgcttctctgcgtttattctgaaatcggtaaaatctggtgatggatttttcatttggctgttctaatttggaacttgaaatgagtggaatcaacttctttagattataaaatgtttggggttactttcttgtagttttgattaggaaaaaccgctctgtccccttgttattgattttcaccagtgttctttagaactttgtactatcttctgttggttaaaacttaaaagagttctagtttaattaaaaaaaaaaaaaaaagggaggccgctctagaggatccaagcttacgtacgcgtgcatgcgacgtcaannnnnnnnnnnnnnnnnnnnnnnnn

SEQ ID NO: 87193 - DNA, 579 bp, Arabidopsis thaliana columbia
  unsure (1)..(579): unsure at all n locations
ttttcggaanggtntggtccncggngatnccngtgcgaagggttaaancgtttacgaaaaaatccaccacttcttccaccaccaccacctgcaaaacaaggaagcgatgcatccgcggttgctacagataagaagccgaaagcgcccaagctaccccttctcatgccggggatgattgctatagtcaagaaccagaacagtccgtatcacatgtattgtggaattgtgcagaggatcactgatggaaaagctggtgtcttgttcgaaggaggaaactgggaccgtctcattactttcaggcttgaagagcttgaacgaagagaaaaaggtccaccgggtaagaatccaaagtcttgtattctcgagcctcttatcgaacagatgcaaaaggaagaggcagcaccataagtgatcttctcttctctgtatgtaagttcctgtgaatgtatatgtaacgtacctttgcgttttaggctacaatatttctgactggttctaaaagagcttcatcatgtgatataaaaaaaagaataaacgatgaatttcccccaaaaaaaaaaaaaaagggcggccaacaaa

SEQ ID NO: 87194 - DNA, 667 bp, Arabidopsis thaliana columbia
  unsure (1)..(667): unsure at all n locations
tcccggccttnacgccaggcttaagnttggcaccggccgggnggggccgttccatacttgtcttttaaagcaccctgagttggtttccagaagaggatgttgggtctcccaggaggatttcccggtggctaaaagggtttaaaaacgtttatcgaaaaaaatccaccacctcctccaccaccaccacctgcaaaacaaggaagcgatgcatccgcggttgctacagataagaagccgaaagcgcccaagctaccccttctcatgccggggatgattgctatagtcaagaaccagaacagtccgtatcacatgtattgtggaattgtgcagaggatcactgatggaaaagctggtgtcttgttcgaaggaggaaactgggaccgtctcattactttcaggcttgaagagcttgaacgaagagaaaaaggtccaccgggtaagaatccaaagtcttgtattctcgagcctcttatcgaacagatgcaaaaggaagaggcagcaccataagtgatcttctcttctctgtatgtaagttcctgtgaatgtatatgtaacgtacctttgcgttttaggctacaatatttctgcctggttcttaaagagccaaaaaaaaaagccgagggcggccgctctacaggatccaagcttacgtacgcgtgcattcaag

SEQ ID NO: 87195 - DNA, 763 bp, Arabidopsis thaliana columbia
ctcacgcgtccggtcgtgtttcggagtttctgaaatttgtaaaaatcgaaagattggcttcgcaatcgagacaaggaacaactctagaacatggatgaaagagatcgagaaattcgtgcttctcatggtgattctaatgctggtaatgtcgttagtcaaagcatagagaatactagagaagaagattctggttcatgtgaaggctttgttgaagagagcaaaagactggaaccggaacaacaaaagcatggtaaatattttttctatgacacaccgctttctgaggaaaccggggtttggatacctgtttcagtcccacccatgttagaacctgatcatgaggaatggtcaagaggtcttagtttcaatggtggttacttccctgaaggagatatgggatgggaccagatatttgatgaagataaggagttaactatgtgggatgtgatagttgatatgttacttgcagcgcgtggtaaagcgagtgctcttagttctggcaacctcgagagatgtggcattaattttttgtcgggacatcttcttgaacaagcttggcaagatatggctcatactcttactgaggctaactttggtaatgcaagagagattctggagactgagccacccaagtggctaccggatagcgctgcttctgcttgtatgctatgtagtgtgaggtttcatccaattatgtgttcccgtcatcactgtcgatattgtggaggaatattcttgtcggattgttctaaaggaaaaagct

SEQ ID NO: 87196 - DNA, 579 bp, Arabidopsis thaliana columbia
  unsure (1)..(579): unsure at all n locations
tcaggtactactctacagacattatgaggaagctcggcacgcctgcgtgtgctgggcatgctatacaggggtcgacccacgcgttcgattttctattgcagagagaaagagagttagagaaagagagagagagagagagagagagagagatgaaacttgtgcaagaagaataccgtaaaggaccgtggacagaacaggaggacatcctcttggtcaactttgtccacttgttcggagatcgaagatgggattttgtagcgaaagtttcaggtttgaaggtggagggagaaacataagaataggtttaaacagaacaggaaagagttgcaggttaaggtgggttaattacctgcatcctggtctcaaacgtggtaagatgactccacaagaagagcgtttagtccttgagcttcacgccaaatggggaaacaggtggtcaaaaattgcccggaaattaccggggagaacagataatggggtaaagaacttctggagggnctcatatnngggagaagggctcaaggggaggnagcggcctttgnctcctacttcctcannttcaaacttnttgctcnntca

SEQ ID NO: 87197 - DNA, 1067 bp, Arabidopsis thaliana columbia
acccacgcgtccggagaagtaaaattttctattgcagagagaaagagagttagagaaagagagagagagatgaaacttgtgcaagaagaataccgtaaaggaccgtggacagaacaggaggacatcctcttggtcaactttgtccacttgttcggagatcgaagatgggattttgtagcgaaagtttcaggtttaaacagaacaggaaagagttgcaggttaaggtgggttaattacctgcatcctggtctcaaacgtggtaagatgactccacaagaagagcgtttagtccttgagcttcacgccaaatggggaaacaggtggtcaaaaattgcccggaaattaccggggagaacagataatgagataaagaactactggaggactcatatgaggaagaaggctcaagagaagaagcgacctatgtctcctacttcctcatcttcaaactgttgctcatcatctatgaccactactactactcaagacactggaggctccaacgggaaaatgaatcaagaaggcgaagacgggtactactccatggatgacatatggagagagattgatcagtctggacacgttattaaaccggtaaaagacaactactactcagagcaaagctgttacttgaatttccctcctctggcttctccaacatgggaaagttccttggaatctatatggaacatggatgcagatgaaagtaagatgtcttcttttgctattgatcagtttcctctaagttttgaacatggtagtggtcgcctttagtctaggatttgattcatttggaatgtttatatgtgcagcatatatatgttatcaaacgacgactgtagtagtttcctatgacttacatcaaaaatcaccacccactgtactaatctcataagtagtcatcatcttatgcctttgtttagtttgtagagtgagtgaaaagatgtgtaatacaagtcagaactctatttccaaaataaatagacttttgaagcttctgtgaaaaaaaaaaaaagggcgaagggtgtacagtatacaagcttacggccgcgcgcatgcgactcaag

SEQ ID NO: 87198 - DNA, 796 bp, Arabidopsis thaliana columbia
  unsure (1)..(796): unsure at all n locations
atgatttttccagctacnnnnnnnnnnnnnnnnnnnnnnnnnnnnnnnnnnnnnnnnnnnnnnnnnnnnnnnnnnnnnnnnnccacgcgtccgtggttgacacaaattttgctctgagtaaaacttgggaatagagagagactctgagtgagagagagattctgagtgagagacggagatggaggcagacgaaagcggcatctctctgccgtcgggacccgacggacgtaagcggcgagtcagttacttctacgagccgacgatcggagactactactacggtcaaggccacccgatgaagcctcaccggatccgtatggctcatagcctaatcattcactatcacctccaccgtcgcttagaaatcagtcgccctagcctcgctgacgcctccgatatcggccgattccattcgccggagtatgttgacttcctcgcttccgtttcgccggaatctatgggcgatccttccgctgcacgaaacctaaggcgattcaatgtcggtgaggattgtcctgtcttcgacggactttttgatttttgccgtgcttccgccggaggttctattggtgctgccgtcaaattaaacagacaggacgctgatatcgctatcaattggggcggtgggcttcaccatgctaagaaaagcgaggcttctgggttttgctatgtaaacgacatcgtgctagggattctggagttgctcaagatgtttaagcgggttctctacataaatattgatgtccaccatggagatggagcggaagaagcgttttacaccactgatagagttatg

SEQ ID NO: 87199 - DNA, 494 bp, Arabidopsis thaliana columbia
  unsure (1)..(494): unsure at all n locations
nnnnnnnnnnnnnnnnnnnnnnnnnnnnnnnnnnnnnnnnnnnnnnnnnnnnnnnnnnnnnnnnnnnnnnnnnnccacgcgtccgcaaaactgattttgcctgtttggttttggatccgagatggttccttcgagcgagacagcgaccgtacgagtcctttgccaaaagctgcttctctcaccgaaccatcctggaactctccaatggctcattggttccccatttttcccgcctttcaccgtcgtctccactttccgatgtatccatcactctcctgatttccagcaagaatctgatgatctccggaagttgttaccaaaaggttttgaagtcattggaggtctgataattggagattctgatgctgagaaaagcgcatttgaggcggctcgagctgctcgtagattgcgaaagcatttatctgaaggtggagagttagatgatgaaaagatagttgggtgctagttgcgatgtaggcactggtaccattcac

SEQ ID NO: 87200 - DNA, 961 bp, Arabidopsis thaliana columbia
gagaggaagagagagagagaaagatgggtaggcctccatgctgtgacaagatagggatcaagaaaggaccatggactcctgaagaagatatcattcttgtttcttacattcaagaacatggtcctggaaactggagatcagttcccaccaacactgggttattgagatgcagcaaaagttgtagactgagatggacaaattatctgagacctggaattaaacgtggaaactttactcctcatgaagaaggaatgatcattcacttgcaagccttattgggtaacaaatgggcgtccatagcttcatacctaccacaaagaacggacaatgatatcaagaactactggaacacacatttaaagaagaagctcaacaagtctgacagtgatgagaggagcagatcagagaacattgcgctgcaaacttcttcgacaagaaacaccattaatcatagatctacctatgcttcaagcacagaaaacatttcccgccttgtggagggttggatgagagcgtctccaaagagtagtacaagtactactttcttggaacacaaaatgcagaaccggacaaacaatttcatcgatcatcacagtgatcagtttccatacgagcagcttcaaggttctagggaagagggtcatagcaaaggaatcaacggggatgatgaccagggtataaagaattcagagaataacaacggtgatgatgttcatcatgaagatggtgatcatgaggatgatgatgatcataatgcaacaccaccattgacatttattgagaaatggcttttggaggaaacaagtactactgggggtcaaatggaagagatgagccacttgatggagctctctaatatgctttaattgtgacattttctcctttattttttctttatccttgtgaatcttataaatgagactactaattttatatacacaaataaagaaaccagaaagac

SEQ ID NO: 87201 - DNA, 438 bp, Arabidopsis thaliana columbia
  unsure (1)..(438): unsure at all n locations
atacgactcatttagggaaagctcgtacgcctgcaggtaccggtccggaattcccgggtcgacccacgcgtccgtgttattctagtattcgtttcacagtacctgcctcatgtgatcaaatcagggaaaaatgtgtttgaccgatttgctgtgatattcgcggtggtgattgtgtggatctatgctcatcttcttacaggtggtggggcctacaatggtgctgcaccagctactcaaacaagttgccggacagatcgtgctggaatcataggtgctgccccatggataagagttccatggcctttccagtggggtgccccatcgtttgatgctggagaagcttttgcaatgatgatggcttcttttgttgctctagttgagtcaaccggtgcttttgtcgcggtgtcaagatacgcaagtgcnacgatgttgccacct

SEQ ID NO: 87202 - DNA, 603 bp, Arabidopsis thaliana columbia
  unsure (1)..(603): unsure at all n locations
cnnnnnnnnnnnnnnnnnnnnnnnnnnnnnnnnnnnnnnnnnnnnnnnnnnnnnnnnnnnnnnnnnnnnnnnccacgcgtccgtttcttctcgctcagtaggtctttagggttttagtttcttctcctcaaaaaatggcgatgtatgttatctacgagtcttcttccggctatggtctcttcgaggttcacggactagatgagatcggacagaacactgaggcggttcggacttctgtctccgacctcagtcgctttggccgtgttgttcagctcacagcgtttcatccctttgagtctgctctcgatgctctcaaccaagtcaacgccgtctctgaaggtgttatgactgatgagcttagaagttttctggagttgaatcttcctaaggtcaaggagggaaagaaacccaagttcagtttaggattggctgagcctaaactcggttcacatatatttgaagctactaaaatcccatgccagagcaatgagtttgttcttgagcttctcagaggtgttcgccagcattttgataggtttatcaaggacttaaagcctggtgatcttganaaatctcagcttggattagctcacagctacagca

SEQ ID NO: 87203 - DNA, 836 bp, Arabidopsis thaliana columbia
  unsure (1)..(836): unsure at all n locations
atgatactccagcactatacgactcacttagggaaagctcggtacgcctgcaggtaccggtccggaattcccgggtcgacccacgcgtccgcccacgcgtccgcccacgcgtccgtatatttgaagctactaaaatcccatgccagagcaatgagtttgttcttgagcttctcagaggtgttcgccagcattttgataggtttatcaaggacttaaagcctggtgatcttgaaaaatctcagcgttggattagctcacagctacagcagagccaaggtgaagttcaatgttaaccgagtggataacatggttattcaagctatcttcatgcttgacacgcttgataaggatatcaattcctgtgccatgagagtcagggaatggtattcgtggcacttccgcgaactagtgaagatagtcaatgacaactatctttacgcccgtgtttcaaagatgattgatgacaagtcagcgttgactgaagatcacatccgcatgcttactgaagtcttaggggatgaagataaggcataggaggtcatcgaagctggataacatccatgggctcggattatcaccgcttgactaatcaacgtacagacctttgctcagaaagttatggacccttgctgactacaggaagaagctctatgattatctagtcactaagatgagcgacattgncnctaatttggctgctatgattggagaaaatggtcggtgcccgtctgatttcacatggctggaagtctgactaaccttgctaatgcccatcttcaccctccagatcttggacgcagatgctctatcagggccttaaacactgaacactccca

SEQ ID NO: 87204 - DNA, 495 bp, Arabidopsis thaliana columbia
cagctacaatacgactcactttagggaaagctcgtacgcctgcaggtaccggtccggaattcccgggtcgacccacgcgtccgagaaaatgagagaaaaatggaaactttgaccgccattgaacactcacgagatctcttcttcttgtatttcttctctctcctctctgtctgatgcgtgttcttgattcatcggctcagatcagtcaccaaatagaataaatagcaaacaagatcctctgtggaatttgatacatagagaaactgtctagtgctgtggtgtcttttgagattttcttgtggttctgtggattgtttgttggttggttgcttcttggataaatggcagaagtccataatcaactagagatcaagtttcggttaaccgatggttcggatatcggtcctaaagcattccctgatgctacaactgtttcggctttgaaggaaactgttatttctgaatggccaagagagaaggagaatgggccgaaaa

SEQ ID NO: 87205 - DNA, 1279 bp, Arabidopsis thaliana columbia
catcaacataagagagagagaagaaaaaaagaattacaattaataagaacaagatcaagaatcaagaatcaagaaaatgggaagagcaccgtgttgtgataaggccaacgtgaagaaagggccttggtctcctgaggaagacgccaaactcaaagattacatcgagaatagtggcacaggaggcaactggattgctttgcctcagaaaattggtttaaggagatgtgggaagagttgcaggctaaggtggctcaactatttgagaccaaacatcaaacatggtggcttctccgaggaagaagacaacatcatttgtaacctctatgttactattggtagcaggtggtctataattgctgcacaattgccgggaagaaccgacaacgatatcaaaaactattggaacacgaggctgaagaagaagcttctgaacaaacaaaggaaagagttccaagaagcgcgaatgaagcaagagatggtgatgatgaaaaggcaacaacaaggacaaggacaaggtcaaagtaatggtagtacggatctttatcttaacaacatgtttggatcatcaccatggccattactaccacaacttcctcctccacatcatcaaatacctcttggaatgatggaaccaacaagctgtaactactaccaaacgacaccgtcttgtaacctagaacaaaagccattgatcacactcaagaacatggtcaagattgaagaagaacaggaaaggacaaaccctgatcatcatcatcaagattctgtcacaaacccttttgatttctctttctctcagcttttgttagatcccaattactatctgggatcaggagggggaggagaaggagattttgctatcatgagcagcagcacaaactcaccattaccaaacacaagtagtgatcaacatccaagtcaacagcaagagattcttcaatggtttgggagcagtaactttcagacagaagcaatcaacgatatgttcataaacaacaacaacaacaacaacatagtgaatcttgagaccatcgagaacacaaaagtctatggagacgcctcagtagccggagccgctgtccgagcagctttggccggagggacaacgagtacatcggcggatcaaagtacaataagttgggaggatataacttctctagttaattccgaagatgcaagttacttcaatgcgccaaatcatgtgtaacattttgtttaaaactttatttgtacttacatacataaagaggggttttctattttgtaaaaaaaaaaaaaa

SEQ ID NO: 87206 - DNA, 454 bp, Arabidopsis thaliana columbia
cacgcgaccgcttaatcatctcttcttaaaccccaaaacaaacaaacaaacaaacaaaaaataccaaaacaaagaagaaaaaaaaaataactatggatcttctctttctctttttctctcttctcctctcttacctctttttcaagatctggaaactcatagactcaaagcaagacaaagattgctacattttagactaccaatgtcataaaccaaccgacgatcgaatggtgagcactcaattcagtggagagatcatttatcgaaaccaaaaccttggtttaaccgaatacaagttccttctcaaagccatagtaagctcagggattggagaacaaacctacgctccaagacttgtctttgaaggtcgagaagagcgtccttcgttacaagatgggatctccgagatggaagagttctacgtggacagcatcggaaaactcctggagagaaa

SEQ ID NO: 87207 - DNA, 720 bp, Arabidopsis thaliana columbia
  unsure (1)..(720): unsure at all n locations
ctctcatacgactcactttagggaaagctggtccgcctgcaggtaccggtccggaattcccgggtcgacccacgcgtccgagggaagctcttcttcttcctcttcctccacctccagcgaccagcccccatctccctcacctccctttgtcgtcaaacctcctgagaagaagcagaggctcccatctgcatacaaccgcttcatgagggatgagatccaacgcatcaaaagtgccaatccggaaataccacaccgtgaagctttcagtgctgctgccaaaaattgggctaagtacatacccaactctcctacttccattacttccggaggccacaacatgatccatggcttgggattcggtgagaagaagtgaacaaaactcaggggaaaagaagcctaaaaataacaaacgcatgcacgtgtgcgagtggctgcgtcgtttttctcatcttgtgttgttcttctgtgtaattatcttatgtatgtcatgttgcagaaaatgagggtgccctagtttttatgactttatatttctgtctgtctttagatttaaagaacagtcacttgctatgtccctttggacgtttatgtctggtctttatttgtcttaatcctatcaaaattattatatgcgaaaaaaaaaaaaaaaggtnnnnnnnnnnnnnnnnnnnnnnnnnnnnnnnnnnnnnnnnnnnnnnnnnnnnnnnnnnnnnnnnnacc

SEQ ID NO: 87208 - DNA, 977 bp, Arabidopsis thaliana columbia
  unsure (1)..(977): unsure at all n locations
gctctctacgactcactatanggaaagctggcacgcctgcaggtaccggtccggaattcccgggtcgtcccacgcgtgcgcccacgcgtccgcccacgcgtccgctcaaaccaacgcaaaagaacaatgtctaacgttgtagtaatcgccgttgttctcatcgtagcatcgctaacaggacatgtgtcagcacaaatggatatgtctccgtcgtcaggaccatcgggtgcaccagactgcatggcgaacctaatgaacatgacaggctgtctctcgtacgttacggtcggagaaggtggtggtgcggccaagccggacaagacgtgttgtccggcgctagcggggctagtggagagctcgccgcaatgcttatgttacctcctctccggtgacatggcggcacaacttggaatcaagattgataaggcaaaggctctcaaacttcccggagtttgcggcgtgatcactcccgatccttcactttgttctctttttggaattcctgttggagcacctgtagctatgggagacgagggagcctccccagcctatgctccaggttcgatgtcaggtgcagaatcaccaggaggatttgggtcgggtccttcggctagtagagggagcgatgcaccaagcagtgcaccttattctctttttctcaatcttataattttcccattagcttttgcattttacatcttttgctgatttcattctcttccaaccattaacaacaccattatttgttatgtattttcttaaaagagtattattgcttttgtaggctatgttcttgaatttattactttgtgtatccacggattatttcttcattcatcttattgaataaagattgtttttttttctaaaaaaaaagcttgatgcatattctagagtgtcacctaaatctgcggccgcagcnnnnnnnnnnnnnnnnnnnnnnnnnnnnnnnnnnnnnnnnnnnnnnnnnataatcg

SEQ ID NO: 87209 - DNA, 585 bp, Arabidopsis thaliana columbia
aggtctctacgactcactatagggaaagctggcacgcctgcaggtaccggtccggaattcccgggtcgacccacgcgtccgtacggctgcgagaagacgacagaagggtacggctgcgagaagacgacagaagggtacggctgcgagaagacgacagaagggtacggctgcgagaagacgacagaagggtacggctgcgagaagacgacagaagggtacggctgcgagaagacgacagaagggtgcggctgcgagaagacgacagatgggtacggctgcgagaagacgacagaagggtacggctgcgagaagacgacagaagggtacggctgcgagaagacgacagaagggggaagagagattcgatttctctggatttttcaaaaatgtttctccaatcgcaaaaactatggacgatgcttctaattctagcgatttggtcaccaatttcacactcgcttcacttcgatctacactcaggtcgcacaaagtgtatcgccgaagacatcaaaagcaattcaatgactgttggtaaatacaacatcgataatcctcacgaaggtcaagctttaccacagactcaca

SEQ ID NO: 87210 - DNA, 738 bp, Arabidopsis thaliana columbia
  unsure (1)..(738): unsure at all n locations
atgattcttccaggtctacatacgactcactatttggaaagctggcacgcctgcaggtaccggtccggaattcccgggtcgtacccacgcgtccgtacggctgcgagaagacgacagaagggggaagagagattcgatttctctggatttttcaaaaatgtttctccaatcgcaaaaactatggacgatgcttctaattctagcgatttggtcaccaatttcacactcgcttcacttcgatctacactcaggtcgcacaaagtgtatcgccgaagacatcaaaagcaattcaatgactgttggtaaatacaacatcgataatcctcacgaaggtcaagctttaccacaaactcacaaaatttccgtcaaggtgacgtctaattccggtaacaattaccatcacgcggaacaagtagattcaggacaattcgcattctcggctgttgaagcaggtgattacatggcttgtttcactgctgttgatcataagcctgaggtttcgttgagtattgactttgagtggaagactggtgttcaatctaaaagctgggctaatgttgctaagaagggtcaagtcggagttatgggatttgaagtaaagagtcttcttgatactgttaacccggttcatgaagggtgtttttctcggggtgggggggagggttcaagcnttgacccggccctacnnaaaaatggggggtngggtcnccgttttcgctcaaagggtcaggtcagttc

SEQ ID NO: 87211 - DNA, 764 bp, Arabidopsis thaliana columbia
  unsure (1)..(764): unsure at all n locations
aatgcttttgaatctgttagctaagtatggtacaacacatcttgttttcaatgacgatattcagggcacagcatcagttgtgcttgctggacttatcgctgctcttagatttgtggggggatccttgtcagaccacagattcctcttccgcggggctggagaggctggcactggaatagctgaactaattgctcttgagatttcaaagaagtcccatattccattggaagaggctcggaagaatatttggctcgtggattcaaagggattgattgtcagttcccggaaagaatccattcaacatttcaaaaagccctgggctcatgaccatgaaccaataagggaacttgttgatgccgtcaaggcaatcaagccgacagttctgatcggaacatcaggtgtaggtcaaacattcactcaagacgtggtggaaaccatggcaaagctaaatgagaaacccatcattctttctctttcgaacccaacttctcagtcagaatgtacggcagaagaggcctatacgtggagtcagggacgggcgatctttgcaagtggaagcccatttgcgccagtagagtatgagggaaagacgtttgtgcctggacaggcacacaacggatacattttcctgggtttngcttcggnttaatatttcagggccgtccntgtccatgatganatnttttggaanttaaaaagntttgctttggnncttntnggggcnctttggnggggtttantcccncctnagggttnanaaatgc

SEQ ID NO: 87212 - DNA, 758 bp, Arabidopsis thaliana columbia
  unsure (1)..(758): unsure at all n locations
atacgactcacattagggaaagctggtacgcctgcaggtaccggtccggaattcccgggtcgacccacgcgttcgcggacgcgtggggaccaaatcccagccgtttaacttgatcatcccaaagatgtttgagattattcaggcggtcttctccgccggggttgcactagctcttttgacattcgccggtataaccctcggcggctcagtggtcgcatgtatcataagcacaccactttttgtcattttcagtcccgttctcgtgccagcgactatagccactacattgctagcttcaggtttcacagcctccggttcctttggtgccacggctttcaccatcctttcgtggctctacaagaaacgtacagggagggacctaccaaaaattccaggattgacgccaccggctccggcgtctaacccagcaggttccggcgtctaatccagcagaatcggggaaatacgattaggcgtttcctaatttgggatgatgtatgaaggaacttgatcatactaaattactggggttccataaataaaaataaaaattgatctatcctctctttaataaaaatactagttacctccgaatatcattccattgatgtatatcgtgtgttacaaaaagtataataaaatgtaatcgtctttattgtatttttttaatgaagtaatatcattgagattgccatnnnnnnnnnnnnnnnnnnnnnnnnnnnnnnnnnnnnnnnnnnnnnnnnnnnnnnnnnacaatc

SEQ ID NO: 87213 - DNA, 517 bp, Arabidopsis thaliana columbia
  unsure (1)..(517): unsure at all n locations
nnnnnnnnnnnnnnnnnnnnnnnnnnnnnnnnnnnnnnnnnnnnnnnnnnnnnnnnnnnnnnnnnnnnnnnccacgcgtccgtacggctgcgagaagacgacagaaggggggagggttcgtccaaagggctgcgaaaaggtgcttggactactgaagaagatagtctcttgagacagtgcattaataagtatggagaaggcaaatggcaccaagttcctgtaagagctgggctaaaccggtgcaggaaaagttgacgttaatcctccatgccttggacttaacatcaataatgtttgtgacaatagtatcatatacaacaaagataagaagaaagaccaactagtgaataatttgattgatggagataatatgtggttagagaaattcctagaggaaagccaagaggtagatattttggttcctgaagcgacgacaacagaaaagggggacaccttggcttttgacgttgatcaactttggagtcttttcgatggagagactgtgaaatttgattag

SEQ ID NO: 87214 - DNA, 1027 bp, Arabidopsis thaliana columbia
  unsure (1)..(1027): unsure at all n locations
ccacgcgtccgtaccttttacaatttgtttatatattttacgtatctatctttgttccatggagggttcgtccaaagggctgcgaaaaggtgcttggactactgaagaagatagtctcttgagacagtgcattaataagtatggagaaggcaaatggcaccaagttcctgtaagagctgggctaaaccggtgcaggaaaagttgtagattaagatggttgaactatttgaagccaagtatcaagagaggaaaacttagctctgatgaagtcgatcttcttcttcgccttcataggcttctagggaataggtggtctttaattgctggaagattacctggtcggaccgcaaatgacgtcaagaattactggaacactcatctgagtaagaaacatgaaccgtgttgtaagataaagatgaaaaagagagacattacgcccattcctacaacaccggcactaaaaaacaatgtttataagcctcgacctcgatccttcacagttaacaacgactgcaaccatctcaatgccccaccaaaagttgacgttaatcctccatgccttggacttaacatcaataatgtttgtgacaatagtatcatatacaacaaagataagaagaaagaccaactagtgaataatttgattgatggagataatatgtggttagagaaattcctagaggaaagccaagaggtagatattttggttcctgaagcgacgacaacagaaaagggggacaccttggcttttgacgttgatcaactttggagtcttttcgatggagagactgtgaaatttgattagtgtttcgaacatttgtttgcgtttgtgtataggtttgctttcaccttttaatttgtgtgttttgataaataagctaatagtttttagcattttaatgaaatatttcaagtttccgtgttacaaaaaaaaaaaaaaaaaaaagggcggccgctctagaggatcccagcttacgtacgcgtgcatgcgacgtcatagctcgtctatnnnnnaacgnnnnnnnnn

SEQ ID NO: 87215 - DNA, 502 bp, Arabidopsis thaliana columbia
  unsure (1)..(502): unsure at all n locations
cccacgcgtccgaacaattcttgatacagtcgaggagctggtcgaagaacagagtttggatcccttgttttctgataagactgatgtaatggcaatagcatatgatcttacaacatctaagaagaacgagatacaaaagttaacagttttgctccaaagggctgaagaacagaatcgccagaaggaagcccggatcagcatgctcaaaaaacaaacacaagatctctcaggcacagcggacagaatcgaaaagctgaatgccggggtctccggctactttgaaggaaaagacaagctacctccaatatagtttcgagaaaattgcaatgaagaagcgtgtcatttccattccctgcatttgtatatacttnatnatagagtcttaacaatctagtcagtagtcacaataacttgcttcatgtgtaaaccactgagaatctgaatgagtttgtactttggtattggtttgacgncaattcatgcaaaatatttnccaagggtt

SEQ ID NO: 87216 - DNA, 480 bp, Arabidopsis thaliana columbia
  unsure (1)..(480): unsure at all n locations
gcgttctctctttctctctctcgccgacgacgaaaacatgggtgccaaggcgaagaaagctttgaagaagaacatgaagaaggttgctgcttcggcttcttcttctcagctacctcttccccagaacccgaaaccttcagctgattttttgccactagaaggaggtccagctcgaaaagctccagttaccaccccacctcttcagaataaagctactgtgctatacatcggtagaatccctcatggcttctatgagactgagattgaagctttcttcttcgcagttttggaaccgtttaagagaagtttgagtccgcccagtaaactaaaagaactggggaattcccaaagccatttttgggtttcattccagttttggaaggacccttgagggttggcgggaaattttcaagcggggtgcaaatnaaattgnnttattttttttgattngggnancatnctttaaaggccntgttnatt

SEQ ID NO: 87217 - DNA, 1005 bp, Arabidopsis thaliana columbia
  unsure (1)..(1005): unsure at all n locations
cnnnnnnnnnnnnnnnnnnnnnnnnnnnnnnnnnnnnnnnnatcctcttccttgcgttctctctttctctctctcgccgacgacgaaaacatgggtgccaaggcgaagaaagctttgaagaagaacatgaagaaggttgctgcttcggcttcttcttctcagctacctcttccccagaacccgaaaccttcagctgattttttgccactagaaggaggtccagctcgaaaagctccagttaccaccccacctcttcagaataaagctactgtgctatacatcggtagaatccctcatggcttctatgagactgagattgaagctttcttctcgcagtttggaacagttaagagagttagagtcgccagaaacaaaaagactgggaaatcaaagcattttgggttcatacagtttgaggaccctgaggtggcggaaattgcagcgggtgcaatgaatgattatttgttgatggagcacatgcttaaagtccatgtcattgaaccagagaatttaaccccaatctgtggagagggtttaaatgtaactccaaaccagtggattcggttcagattgagcgaagacaacttaataaggaaaggacattggaagagcataggaaaatgttgcagaagatagttaaaaagggtcagaaaaggaggaagagaatcgaagccgctggaatagaatacgaatgccctgagcttgttggaaacacacagccagtcccgaagaggatcaagtttagtgaagaagactaaaagctgaagctgaacaacacttttccgataaccttttttgaatagaaatctgttctgttggactcttgatattggatcaataactaaactttaaagtttgcaatgaaaacttctgtttccatgattccaaaaaaaaaaaaaaaaaaaaaaaaaaaaaaaagattaaaaacacaggcgaaccgctctagaggatccaagcttacgtacgcgtgcgtgcgacgtcntagctctnctatagtgtnnnnnn

SEQ ID NO: 87218 - DNA, 643 bp, Arabidopsis thaliana columbia
  unsure (1)..(643): unsure at all n locations
gggacagatcaggagcaaaccaccaatgtcttgactgaagctcggattcatgatcacattaacaaccttcggttcagcatatccccaacagcattttttcaggttaataccgtcaccgcagagaagttatactcaattgctggagactgggctgaccttggtcccgacactttgctcttcgatgtatgctgtggaactggaacaattgggcttacactggcacatcgtgttggcatggtaattggcatagaaatgaatgcttcggctgtagcagatgccgaacggaatgcaacgatcaatggcataagcaactgcaagttcatctgctcaaaggcagaggatgttatgagctctctacttaaacagtacctagatgtggctcaaatggaagaagctaagcctctatgtaatgctaacgatgatctcaacaaacaaattccctcaacagaaggaatgacaaactcggagcatgtagctgatcaaaacctacctncttcaaacactcgagtnggaaggactttcaaggcaattntggcaggagggtttcctcggnccttagganccgggaaaaatnnttcaaaanccncaggtttaaaaaatgtngggttgctttnggggggtncccccttggnnttgggcnttt

SEQ ID NO: 87219 - DNA, 818 bp, Arabidopsis thaliana columbia
ctcaaaggcagatgatgttctgagctctctacttaaacagtacctagatgtggctcaaatggaagaagctaagcctctatgtaatgctaacgatgatctcaacaaacaaattccctcaacagaagaaatgacaaactcggagcatgtagctgatcaaaacctacctccttcaaacactcgagtggaagaacttcaagacaatgagcagaaggattcctcgtccttagaaccggaaaaatctacaaaaccacagttcaaaaatgtggttgctatagtcgatccacctcgctctggacttcatccagctgtaatcaaagctctaagaacccatccccggttaaagagacttgtgtacatttcgtgcaaccctgaaacgctagttgcaaacgcgatagagctttgcacgccatcttttgatgaaccggatagaggaaacaaaaattacagagggcgcaagaaaataggcattgccgctttggctcgacatagagccaagtcaatgccaacttctgaggcttttagacctgtcaaagccatggccgttgaccttttcccccacactgaccactgcgaaatggtaatgctccttgagaggtaagaatacgcaataaactctttaagagaatgatgtagcaccaaaagaacaagcaacaactatttttgttttgcataaacacaatttaaggattatatatatgtttaagaactgaaacaagttttttatatcaaaaaaaaaaaaaaaagggcggccgctctagaggatccaagcttacgtacgcgtgcaggcgacgtcaagactcttctataggtgtacctaa

SEQ ID NO: 87220 - DNA, 683 bp, Arabidopsis thaliana columbia
  unsure (1)..(683): unsure at all n locations
aatggattaagaggtgacaatttccctttgataatagccaatgccacgatttgcaaagagttgaatcgccttgaagaagagtttcatccaaaagacgtgatagaggaacaaatacagaacttagatcgtccaagatcaagagaagaagttctttgcttcttgaatgagcttggttggctatttcagaggaaatggacatccgatattcatggagaacccgactttnctcttcctcgcgtccgaatttttgctcgtatgctctgttgaaagagattactgttctctcataagaaccgtcctggatatgatggtagagagaaatttgggaaaagacggtctgttgaacaaggagtccttagatatgctggctgatattcagctactgaatcgcgctatcaaaaggagaaacacaaaaatggctgaaactctgatccattattccgttaatccctctactagaaacttcatcttcttgcctagtatcgctggacctggcgatatcacacctttgcatttggctgcttccacatctagttctgatgatatgattgatgccctgactaatgatccacaagagattggattatcttgctggaataccctaggcggtgcaaccgggcaaactccctttagctacgctgcaatgagagacaaccacagttacaacaccttggtggctcgta

SEQ ID NO: 87221 - DNA, 401 bp, Arabidopsis thaliana columbia
caggtcccaattccaagtaaattacattgaccgtggggaaaagtaaagaagatccaacacagacaaaaagcatttggtccactaagatctctcgagagccaaaaaaaagttgagaaatttgcagtcagtatgggctgctctgttgttgtctcttctgggccttgaaaggatcttcttcttcccctcaccttcttactataaacccagaatcatcctctgcgtcttttgttcctcaaatcatttttttcctctcgattgggagatcaattattaatattcatctggagaattatgcgtctcttttctccattgctatggctctctcaactactccttctcagatgtccgttgcacttccaactagaattgatgggtcgagccgatctatgattaaggttcaa

SEQ ID NO: 87222 - DNA, 625 bp, Arabidopsis thaliana columbia
  unsure (1)..(625): unsure at all n locations
acgactcactatagggaaagctggcacgcctgcaggtaccggtcncgaattcccgggtcgacccacgcgtggcccgaagtgtgagatcaattattaatattcatctggagaattatcgtctcttttctccattgctatggctctctcaactactccttctcagatgtccgttgcacttccaactagaattgatgggtcgagccgatctatgattaaggttcaaagtataagcttcactgataagtcatggggtcctcctctgctgagactagattcgaaatctagaagcttaggtgtgaaaaaaaggtccacaatatgcatgtcacttcagcaatcaagcaaatccaaagtcttggttactcctctagaacttgaagatcccaaagagactcccttaaacttgtttaggcctaaggagccttatactgcaactattggtttcggttgagagaattgttggtccacaagcacctggagagacttgccacattgttattgatcatgatggtaatgttccttaccttggggagggcaaagcttttggggcattcccccccgggnggnatccccaagaaacctggngnncnnaaaanngttcgccttttnttcgtttnanaacangntc

SEQ ID NO: 87223 - DNA, 1033 bp, Arabidopsis thaliana columbia
  unsure (1)..(1033): unsure at all n locations
gtcgacccacgcgtccgtgggaagccacaataaccccctattcctcggccttttttaaaaaagttttagaataatccgataaaatacttttatattaatttttctttggtccatggagggttcgtccaaagggttgaggaaaggtgcatggactgctgaagaagatagtctcttgaggctatgtattgataagtatggagaaggcaaatggcatcaagttcctttgagagctgggctaaatcgatgcagaaagagttgtagactaagatggttgaactatttgaagccaagtatcaagagaggaagacttagcaatgatgaagttgatcttcttcttcgccttcataagcttctaggaaataggtggtccttgattgctggtcgattgcctggtcggaccgctaatgatgtcaaaaattactggaacacccatctgagtaaaaaacatgagtcttcgtgttgtaagtctaaaatgaaaaagaaaaacattatttcccctcctacaacaccggtccaaaaaatcggtgtttttaagcctcgacctcgatccttctctgttaacaatggttgcagccatctcaatggtctgccagaagttgatttaattccttcatgccttggactcaagaaaaataatgtttgtgaaaatagtatcacatgtaacaaagatgatgagaaagatgattttgtgaataatctaatgaatggagataatatgtggttggagaatttactgggggaaaaccaagaagctgatgcgattgttcctgaagcgacgacagctgaacatggggccactttggcgtttgacgttgagcaactttggagtctgtttgatggagagactgttgaacttgattagtgtttctcaccgtttgtttaagattgtgggtggcttttctttcgtattttagtaatgtatttttctgtatgaagtaaagaatttcagcattttaagaaaaatggttatgtttctacgtaataaaaaaaaacgttatttatnnnnnnnnnnnnnnnnnnnnnnnnnnnnnnn

SEQ ID NO: 87224 - DNA, 548 bp, Arabidopsis thaliana columbia
tctcatcggatttatgttgggggtaataatctgtcatatcctcgatggttcttttccctctctatcctttgagttttcaagatgggtttcgccggatcgttttttgaacttaggatttacataatggtttcaaagaaaatttttctcttttgttgaagggattgaagattcttccgtcgtttatcacgattccttaagccgttatctttaatttggagctttgatgttttcattctggtgcaaaacacaagaatcatctcaccggaatcagctcaacggcgaaggttgttgccggaaaacttttgattattcatccagcgtgtgacgtggtatatcccggctgtcgacatgtgttcatggatggagttccgatagaatttcttctgcagaaggttatctaatgggccttttttgggctttatgtaattccaaagttggagcttttgtttaagctcttgtatgatatgatgatgtttaataaaacttatgagacaaaaaaaaaaacttatgcgcggacgctctagaggatccaagcttacgtacgcgtg

SEQ ID NO: 87225 - DNA, 918 bp, Arabidopsis thaliana columbia
  unsure (1)..(918): unsure at all n locations
cggagtgaaaaaaagtctcgctctcttctctctctaacattcttcagagagggagactttatccttattctgccgttcggacgtggtccgatatcgccgttagtttagccgtgacacggctttccgttgccgcgttctttgtcgtccggtttcatgccggcttatgtaccaaatctccgcgatggtcagctctcgtctagcaccgcttagcttcttcagcaacggtggctagctcttgcccggcacgaccggctattctagcggtcatggccggtttatgttcttctttaatttctgaattttgttttagttttgctaataatctcatcggatttatgttgggggtaataatctgtcatatcctcgatggttcttttccctctctatcctttgagttttcaagatgggtttcgccggatcgttttttgaacttagggtttacataatggtttcaaagaaattttccccttttgttgaaggattgaagattcttccgtcgtttatcacgattccttaagccgttatctttaatttggagctttgatgttttcattctggtgcaaaacacaagaatcatctcaccggaatcagctcaacggcgaaggttgttgccggaaaacttttgattattcatccagcgtgtgacgtggtatatcccggttgtcgacatgtgttcatggatggagttccgatagaatttcttctgcagaaggttatctaatgggccttttttgggctttatgtaattccaaagttggagcttttgtttaagctcttgtatgatatgatgatgtttaataaaacttatgagacaaaccaaccggccggaatncnccggnaaaaatgggganctcngaanctggccangggaaaacattgancccaaaaagcccccaaagggcntggaaccaaacaggc

SEQ ID NO: 87226 - DNA, 472 bp, Arabidopsis thaliana columbia
atacgactcactttagggaaggctcgtacgcctgcaggtaccggtccggaattcccgggtcgacccacgcgtgcgcgccctcttctgccccttctgtaaattcccaatccaacccttctctccttcctcctccgtctttgccccttcccccaatttcttcttcccgattctctcctttccctttttctttttacccgccaaaatcacatccaccttcactaacggctccggccccaatttccatttcccatttcattcatactcgaaaccctagatttctaattcctggatcggtgcttggatcttcttcagttttctcgtgttttgggtgatacccagaatttgattcaactccaaattctccgttttttctcaaagagtaagttgctgtttttcgctgaggaattcactgtccagtgaaattgacgatgcacaagattaagctagacgaccgtactgataatgtgagaga

SEQ ID NO: 87227 - DNA, 460 bp, Arabidopsis thaliana columbia
ccggctcaatcgactcatttagggaaagctcgtacgcctgcaggtaccggtccggaattcccgggtcgacccacgcgtccgctaaaaggagaggagactttgaagaagaaagaaaacattcaaagcttataaaacgcagcgttttaggaaaaaagaggtagagagtgattctggctttcccaacaatggaagctttcagtctccttaactactggaaaaacagtggtggtgctgttactttccttcctcactcctccgaatcttcttcttcttctctttgccgttactccgccggtgaatccatcggaaccaccaccattgtcacctctgttaccgaaactgaggacgaagaagctgatgacaacgacgacgaaggaccgttcttcgaccttgagttcgctcttccagccgaagaagaagacacagacggaggagtcggaagagagggagactccgattg

SEQ ID NO: 87228 - DNA, 1638 bp, Arabidopsis thaliana columbia
  unsure (1)..(1638): unsure at all n locations
tggtacgcctgcaggtaccggtccggaattcccgggtcgacccacgcgtccgggaaagaagcacgtggtgaatggacatgaagagaaaaggatgctaggtttaatataaattggaataagaagcagttagtggttgtgaaggaaggaaggaggcaagcaaccaaatctcagagacaattataacagtatagagaaggaagaaagaaaagaaaaagaaaccgttgttgatttagatacagagaagagaagatcatctaacatgggaagatctcctatctctgatgactctggtctcaagaaaggtccttggactcctgatgaagatgagaaacttgtcaactatgttcaaaaacatggtcatagtagctggagagcccttcccaaactcgctggtcttaacaggtgtgggaagagttgcaggctaagatggacgaactacttgagaccagacatcaagagagggagattctctccggacgaggaacagactatcttgaatcttcattcagttcttggaaacaagtggtcaacgattgcgaatcagttaccagggagaacagataacgagatcaagaatttctggaacactcatttgaagaagaagctgattcagatgggttttgatccaatgactcaccgtccaagaaccgatatcttctccggcttatcccagctcatgtctttgtcttctaacctgagaggctttgttgatctgcaacaacagtttcctattgatcaagaacacactatactcaaactccaaaccgagatggccaaactccaattgttccaataccttcttcaaccgtcttccatgagtaacaatgttaaccctaatgactttgacactctcagtctccttaactctattgcctctttcaaagagaccagtaataataccaccagcaacaatctcgacctcggtttcctcggctcttatcttcaggacttccacagcttaccttccctgaaaaccctaaattccaacatggaaccatcatctgttttcccccagaatcttgatgacaatcacttcaaattctccactcaaagagaaaacctacccgtgtctccaatctggctctcggatccatccagcacaactcctgctcatgtgaatgatgatctgatttttaaccaatacggtattgaagatgtcaatagcaatatcacatcttcaagcggtcaagaatcaggagcttcagcttcagctgcatggcctgatcatctattggatgattctatattttccgacattccttagccttcttttgtctttactttcaggtatgtactttggaggaactcaaatcaaatttactcttggaattgtgcttgttggagatttttatttgcctatctatatatatataaatactgtagagacatcatatatttgtaactcatgttgtagaatgtacagtacagagatttcatactcatatgcatatgttgttgtcaatgttctttagcatatgtctctgtgcccagagtttatatatatataaaatttttgtgggatgggnnnnnnnnnnnnnnnnnnnnnnnnnnnnnnnnnnnnnnnnnnnnnnnnnnnnnnnnnnnnnnnnnnnnnnnnnnnnnnnnnnnnnnnnnnnnnnnnnnnnnnnnnnnnnnnnn

SEQ ID NO: 87229 - DNA, 516 bp, Arabidopsis thaliana columbia
  unsure (1)..(516): unsure at all n locations
cnnnnnnnnnnnnnnnnnnnnnnnnnnnnnnnnnnnnnnnnnnnnnnnnnnnnnnnnnnnnnnnnnnnnnnnccacgcgtccgcccacgcgtacggtgttggttatcgtgcaacagtagacggaaaggagctggtgctaaatctcgggttttcacacccggtgaagatgcagataccggatagtctgaaagtgaaagtggaagagaacacaagaatcactgtgagtggatacgacaagagcgaaatcgggcagtttgctgcaacggttaggaagtggaggccaccagagccatacaaggggaaaggagtcaagtattccgatgagatagttcggaggaaggaaggaaaagctggaaagaagaaatgatcttcatttttcattattatctacttacttatctcttcctttcaatgtttatgtgtatttgctcaaatttgtttagaaatgaagatgtttgtgttgggattcttgagtaagtttttaaaggaaccctataaaaaaaaaaaaaacaaaaa

SEQ ID NO: 87230 - DNA, 1008 bp, Arabidopsis thaliana columbia
  unsure (1)..(1008): unsure at all n locations
nnnnnnnnnnnnnnnnnnnnnnnnnnnnnnnnnnnnnnnnnnnnnnnnnnnnnnnnnnnnnnnnnngcggacgcgtgggcggaccacgcgtccgcgctcttcttcttctcttcatcctccttctggagcagagcttagagctccatcatcaaatcttatcaatggcttcctcactcgtctcatcttttcaacccaggtcagcatttttgggagatagaaatgtgttcaaggtctcaagcacaccttttgctcaagtgggttactccagtaagaccattgagtgcaaagaatcaaggataggaaagcaaccgatcgctgtaccttccaatgtaaccattgcattggaaggtcaagacttgaaagtgaagggtccattaggagagctggctttaacttacccacgcgaagttgagcttacaaaggaagaatccggtttcttaagggtcaaaaaaaccgtcgaaactagaagagccaaccaaatgcacggccttttcaggacgcttaccgataacatggttgtgggagtatcaaagggatttgagaaaaagcttatacttgtgggtgttggttatcgtgcaacagtagacggaaaggagctggtgctaaatctcgggttttcacacccggtgaagatgcagataccggatagtctgaaagtgaaagtggaagagaacacaagaatcactgtgagtggatacgacaagagcgaaatcgggcagtttgctgcaacggttaggaagtggaggcccccagagccatacaaggggaaaggagtcaagtattccgatgagatagttcggaggaaggaaggaaaagctggaaagaagaaatgatcttcatttttcattattatctacttacttatctcttcctttcaatgtttatgtgtatttgcctcaaattttgtttagaaatgaagatgtttgtgttgggaaaaaaaaaaaaaaaaaaaaaaagggcggccgctctagaggatccaagcttacgtacgcgtgcatgcgacgtcag

SEQ ID NO: 87231 - DNA, 637 bp, Arabidopsis thaliana columbia
gttggtttgtttgcctatgacaagaatcttccttggggggttcgtcatcacgtgtaacttcttcgcgaatagagtcgcagaacagtacaacggaaaattgaggagcggaactaaaagttggggacgtgaagcaggttttaggggtgcaaaatttgtctatgtcgacatgtacaacactcttatggatgttattaaaaattatagaagatacggattttctaatgagaaaaatgggtgttgttgtatgattacggctataataccatgccccaacccagataaatacgtcttctacgacttcgttcatccatccgagaaagcttacagaacaatttctaaaaagcttgtccaggatatcaagaatggccttgcctgatttattatatatacaatgctttattttaattttaataacagccatcgttaataatagaaatgagaagacaaaaatcatacatggcgatctctctgtttttcttatgttaaagaatgtataatccagtttatgtattgttcactttatataatcccagaacaacaaaggagtttgtttacaaatgaaaaaaaaaaagggcgcccgctctagaggatccaagcttacgtacgcgtgcgtgcgacgtcataactcttctatagt

SEQ ID NO: 87232 - DNA, 555 bp, Arabidopsis thaliana columbia
tccgactcatttagggaaagctactacgcctgcaggtaccggtccggaattcccgggtcgacccacgcgtccggaatttcattgttgacattcaagacaagaaagggaatgttatcaacactattgctgccaaacttgcatctgatggaagtggcgtttatgagtactacacctgggctagtcttggtgaaaagattagctttgttcctcaagattctaggggtaatgtagagaagaagatgttgttttaccctaaagagattcatgctgtagtgtcaaaagatggatgtcaagcttctgtttctccatttactggtcggcttggtctttacatacaaggatcagtctctcctcctcttcctggtgttaatattaagatttttgcggcaaaggacagccttatttcttcacttaagaagggggaaatagctattgaaacaagcactttatcagctggttcatttgttgctgggcctttgtatgacgatataccatatgccactgaagcttcaaagcctggctaccatattaaaaggttaggaccatattccttct

SEQ ID NO: 87233 - DNA, 390 bp, Arabidopsis thaliana columbia
atcaaccttctcctctttcttacgcaattacaacttcaacgcctctctatctcttcgccgtgaatgtcgagatagtcgtaagctctctgcttttcaaatttctctcaaattgaggtagagagagagggcacagagatagagagagaggggcataggaaacggtgattttcccagttcccggaggaacaatcggctgatttctctgtaatcgaagaatctaaacctcacccactcgaaatcagctcgtgggttttggggggtctctattaatttccaaattctggagaaaaatcttgtatttcttcaagatgtttgggtgtgattgtttttactggagcagaggaatctccgagttggattcggaatcgtccgagccaaagcccttctcac

SEQ ID NO: 87234 - DNA, 902 bp, Arabidopsis thaliana columbia
  unsure (1)..(902): unsure at all n locations
atgatttnnnnnnnnnnnnnnnnnnnnnnnnnnnnnnnnnnnnnnnnnnnnnnnnnnnnnnnnnnnnnnnnnnnnnnnnnnnccacgcgtccggttccgattccggataagaacatctacgcaatcgacaagcacttggcggctgatggtaacgccgagcactgcgcgacgctctacgaggagtgtctaaagaatctggtgaaagaaaagattatcccaatatcgaaaaagacagggtatcctgagtttgatctacaacttctagggatgggtcctgatggccacatggcgtctctcttcccaaaccatccacagatcaatgagaagcagaaatgggtcacttacatcaccgactctccaaaaccaccaccaaagagaatcacattcactttaccggtcatcaactctactttgtacaatcttatggccatttgtgacaaagcaccggccaaatccgtggctgagatcatgaagcacaacaacctctcgttaccttctgctcatcttagtgctcaagtcgaaaatgtttggtaccttgaccaagcagctgcctccgagctctagagaggtagcctaaacacattaatattggtgttttgtttgtagtctctacgttgctttgtgttgaataaccggttaatacatttgcgtacgtttacttcgtacaaaatgtgttgaatattcgagctagttgtttcttgtagttgtgatgtgagtccctggctatgactatatatcattataaaaatatatagtgggcttcatttaatctgtcatttcatgaatggtgtttaattaaacttttcttttagggtttatcattaaggaaaaaaaaaaaagggcgaccgctctagaggatccaagcttacgtacgcgtgcgttcgacctcntagctcttctat

SEQ ID NO: 87235 - DNA, 784 bp, Arabidopsis thaliana columbia
gaagtgcagcaactgccgatagtggagatgctgctggtgccgatagtggaggtgctgctggtgccgatagtggaggtgctgctagtgccgatagtggaggtgctgctgctggtgaaaccgctagtggtggagctgctgccgctgacacttctggtggttcggctgaaaccggtggtgaaagtgctagtggtggagctgcttctggtgctggagctgcttccggtgcctcagctaaaaccggtggtgaaagtggtgaagctgcttctggtggttcagctgaaactggtggtgaaagtgctaccacgcgtccggataccggtggctcagctgaaaccggtggtgaaagcgctagtggtggagctgcatccggtgggagaaaggtgctagtgggtgggagcttgctttccagtgggctcgggttggaaagtgggtgggtgaaaagccactggagctactttccggtggctcagctgaaaccagtgatgaaagcgctagtggtggagctgcatccggtggtgagagtgctagtggtggagctgcttccggtggctcggctgaaaccggcggtgaaagcactagcagtggagttgcttctggtggctcaactggtactgaaagtgctagtgctggagctgcttccggtggctcgactgacgccaatggtggagccgctgccggaggctcaactgaagccggtagtggaactagcaccgaaacgagttcaatgggtggtggaagcgctgctgccggtggcgtgagtgagagttctagtggtggaagcact

SEQ ID NO: 87236 - DNA, 362 bp, Arabidopsis thaliana columbia
cccacgcgtccgcccacgcgtccggaaatcttgcagttgtctgcagattcttattcagtggcgtcatctgatagcacaagcagctgcagtgaagatgataattatgattctgaatctgagtattcaaatcataaagaggggcggttgactgatcttcttaatgtgaatagacttgggaaggagatcctggaatgtacaccgaaaggaacaagatttcttggttctcaaccggagaatggtagcacaataaaaactttgagaacagatgaatcaatgaaggaaactaccactaactttccttctggattgcataatggtaaacatggtgttaaccagacagaccgtttggttgagaaaaggaa

SEQ ID NO: 87237 - DNA, 1505 bp, Arabidopsis thaliana columbia
accacttgtacctctttgtcttaagtactctttaaccctacaatttcctaagctctcaagccacaaaaaaccacaaaccgttcttcaccaatatatatatctgatcatcatcaaagtccttctctctgctcataccacaaaccgttccattcttcccctaatcacaaagtgatatttacatagagaagatagagatgggaagaccaccatgctgtgacaagattggagtgaagaaaggaccatggacaccagaggaagatatcatcttggtttcttacatccaagaacatggtcctgggaactggagatctgtgcctactcacacaggtttgaggagatgtagcaaaagctgtagattgaggtggactaattatcttcgacctgggatcaagcgtggaaatttcaccgagcatgaagagaagatgattctccatcttcaagctcttttgggaaacaggtgggcagctatagcatcatatcttccagaaaggacagacaatgatataaagaactattggaacactcatttgaagaaaaagctcaagaagatgaatgattcttgtgatagtactatcaacaatggccttgataataaagacttctccatatcaaacaaaaacactacctcacatcaaagcagcaactccagtaaaggtcaatgggagagaaggcttcagacagatatcaacatggctaaacaagctctttgtgatgccttgtctattgacaaaccacaaaacccaactaatttttctattcccgatcttggttatggtccatcatcttcttcgtcctctaccaccaccaccaccaccaccaccaccacgagaaacactaatccatacccatctggggtctatgcttcaagtgctgagaacattgctcgtttgcttcagaattttatgaaagacacaccaaagacctcggtgcccttgccggttgcagccaccgagatggctatcaccacggcagcttcgagccctagcacaaccgaaggagacggagaagggattgaccattctttgttcagcttcaactccatagatgaagctgaagagaagcctaaactaatagaccatgacattaatggtctaattacacaaggctctctttctttgttcgagaaatggctctttgatgagcaaagccacgatatgatcatcaataacatgtcactagagggtcaggaagtgttgttctagaaagcattaaagtttgacgatttgcttgaggaaccacgaggcttagttataaacaatttgtataattaagtactctttagttttgttttcaatccttattatgatcatattgcagtaattagggattttagtctttagtagtaactcttaagttttaacacatttttctctatctttttagtagtaactctttattttttccttaaatctttgtcgacgtggagatgatatcttctatgtagtagaaactcaaaagtgtacatcatctttattaatgtaacgtctttttaaaaaaaaaaaaaa

SEQ ID NO: 87238 - DNA, 540 bp, Arabidopsis thaliana columbia
  unsure (1)..(540): unsure at all n locations
atgatactgccnnnnnnnnnnnnnnnnnnnnnnnnnnnnnnnnnnnnnnnnnnnnnnnnnnnnnnnnnnnnnnnnnnnnnnnccacgcgtccgcccacgcgtccgctcttcttctggtgtaaaagcttttcttccacacacatttgagaaagaagacgaagaagaagagagaataactattccttcttcgccaagttctctgagctatagaagaaggagggatttcttcagaccgccattgttgcccaccttctctcctttctatttttcgccgcattttactcgcttactgacaaaagtcttctactcaagtctctctctcgctctctttggaggctcaattagggttttgttgtcgtgagatttgattacacaaattgctgaatttggtttcgattattggtgttattgttttcgaagatttccagtgagtttccgtttatggatctgactggaggatttggagctagatccggcggtgttggaccgtgccgggaaccaataggccttgaatcgctacatctcggtgacgaatttcgg

SEQ ID NO: 87239 - DNA, 632 bp, Arabidopsis thaliana columbia
  unsure (1)..(632): unsure at all n locations
gtccgagaggtttgaagaagcatttgtagaggctcaaagctccnaagcatcggatgcttgataaactcggtggagtctttgcacactttttgtctaactaaccacacaagctaaggacgctcggacgtaatgatctcatcaacaagaactatctagataccgttttcagcttgttcttgacaatactcgttaccagactacgttgtgtttcttatttccgaatacggtaagattctcagaaaactctacgaactgggtgcaagacgagttttggtaactggaactggtgcaatgggatgtgctcccgcggagctggctcagcatagccccaacggccattttttttggggggggggggccccccaccattcccccccctgactacccccccgcccccggcccctcgcctcgccccctcccccgccccccgccccggtccgggtgggcctaccctcggtcgccggccccccccccctgccccgccgccccccccgcgccccctcgctccgcccctcctccctgcacgcccccccgccgtaccccccccctctccggcatcacccctccgtccccggtcctccacccgcccccgggttgcccgcggccccgcccaggccgcccagagccctcgg

SEQ ID NO: 87240 - DNA, 1583 bp, Arabidopsis thaliana columbia
  unsure (1)..(1583): unsure at all n locations
cccacgcgtccgcccacgcgtccgcggacgctaaacgtttcttctcattcgtcatctagtcccattctctgtccataacaatgaatatcaattgttctccattagggtttctaatttcactcttcttcattgttacttttcttgcaccacaagtcaaatctagggctttctttgtctttggtgactctctcgtcgacaatggaaacaacgactacctcgtcaccactgcccgtgccgacaattacccgtatggtatcgactacccgacccgtagacccaccggacgtttctctaacggccttaacattcccgacattatcagtgaggctataggcatgccgtcgactttgccgtaccttagcccgcatctcaccggagaaaatcttctagtcggtgctaattttgcctccgcaggaattggaatcctcaacgacactggaattcaattcgtaaacataattagaatttctaaacagatggaatacttcgaacagtaccagctacgagtgagtgcattgatcggaccagaagctacacaacagctagttaaccaagctcttgtcctaattacacttcggggtaatgatttcgtcaacaattattatctaattccgttttcagctcgttctcgccaatacgcgttaccagactacgttgtgtatctcatttccgaatacggaaagattctcagaaaactctacgaactgggtgcaagacgagttttggtaactggaactggtgcaatgggatgtgctcccgcggagctggctcagcatagccgcaatggcgagtgctatggcgccctccaaacagcagccgctttgttcaatccgcaattagttgatttgatcgcatcagtcaatgctgaaattggtcaagacgtgtttgtagcagccaatgcctatcaaatgaacatggattatctatctaatcctgaacaatttgggtttgtgacatcgaaggtggcatgttgtggacaaggaccgtacaatggcataggactatgcacaccagtctcgaatttgtgtccgaatagagacttatatgcgttttgggatgcgtttcatccgacagagaaagccaataggatcatcgttaatcagatcctgtctggttcctccaagtatatgcaccctatgaatcttagcacggccacgctattggattcttctaaaatctagtttaagtgatttctgtcaactaaatgtcaggtcattccttctgtactttgcattgttgttaatgtgttgattaataagttcaatggctccaattagtttaagcatgcaagagagtttttattgtcggtcgtctagtttgatgtctttgcttgttgtatctggtgattttttttattttataaaagaaccgttgtatcttggttagcttagtttagtcttttttggtttgtatgcccagtatatcatgtaatttttgaaaacttgtagtgattgatatatgattttcttttctaaaaagnaaaaaaaatacacaaaatagtagaacacatagnnnnnnnnnnnnnnnnnnnnnnnnnnnnnnnnnnnnnnnnnnnnnnnnnnnnnnnnnnnnnnnnntgcacc

SEQ ID NO: 87241 - DNA, 1000 bp, Arabidopsis thaliana columbia
  unsure (1)..(1000): unsure at all n locations
atgactcgccggannnnnnnnnnnnnnnnnnnnnnnnnnnnnnnnnnnnnnnnnnnnnnnnnnnnnnnnnnnnnnnnnnnccacgcgtccgcgatctctctctgatcacaacaatcataagcgatgagaggagctagacccgatgaattcaattttagtacgaatccatcaacgccaaacactggtcagccgacaccgacgtaccccgccggtgttggcggcggcggcggtggaaggaaaaaaggcgttggcgtgaggacgtggttggtacttaactcgtcagggcaatcggagccgaaggaagaagggaaacactccatcatgcggcgaacgggattaccggcgcgtgatcttaggattctcgatccactgttgtcgtatccatctactgttttaggtagagagagagcgattgtcatcaatttggagcatatcaaggcaatcatcactgctcaagaagttttgttgcttaattccaaggatccttcggtctcaccctttattgatgagttgcagaggcggattctctgtcaccatcacgccactaaacctcaggaggagcagaactctgggggagagcctcatacgagggtagatcctgcccaaggagaagctggaacggaacaatcttctggggatcaagggagtgaagccaagaaggatgcgaagcaaagtcttgagaatcaagatggatcgaaggttcttccatttgagtttgttgctctggaagcctgtcttgaagctgcatcaagcagtttggaacatgaggccttaagattggagttagaggctcatccagccctggacaagcttacttccaagatcagtacccttaatttggagcgggttcgacagattaaaagcaggctggttgcaataactggacgtgttcagaaggtgagggatgagctagaacatctgcttgacgatgatgaaggtaatggctgagatgtatcttacagagaagttagcttagaaacttgatgattcgtcaaatttc

SEQ ID NO: 87242 - DNA, 573 bp, Arabidopsis thaliana columbia
  unsure (1)..(573): unsure at all n locations
cagctctctacgactcactatagggaaagctggcacgcctgcaggtaccggtccggaattcccgggtcgacccacgcgtccgcccacgcgtccggccttctgcagacgttatttggaccgccttggtgaaacaaaatacttgatggctttaaagaatctttgtgattctggcataattgagccatgtcctccagtgtgtgatgtcaaaggaagctatatttctcagtttgagcatacaatcctgttgcgaccaacttgcaaagagattatttccaaaggagacgattattgaaatagtgattttcacagaacttgaagcagttgttcttcttgagtttgtataatagttttggaaggctttttaagtcttgggctcaaatatttgtatgttcttcgaagatgattctaagtataagagcttaggggatccttcatcaattatagctacatgttagcttattttttattctgttatagaattttggtttttttaaatatgccccccccccagttccccnnnnnnnnnnnnnnnnnnnnnnnnnnnnnnnnnnnnnnnnnnnnnnnnnnnnnnnn

SEQ ID NO: 87243 - DNA, 1051 bp, Arabidopsis thaliana columbia
attgggtacgggcccccctcgaggtcgacccacgcgtccgaagaaagaaaaccctaaaccaccggaaatcgatttctttggaagatggatatcgagcagaagcaagccgagatcattgatcagctcgtgaagcgagcttctacttgcaaatccgaggctctgggcccgctcatcatcgaagccacatcgcatccttctctcttcgccttctccgagattttggctctacccaatgttgcccagcttgaaggaaccacagattctgtgtacctggatctactacgcttgtttgcccatggcacctggggagactacaaatgcaatgccacccgtcttccgcacttgtcccctgaccaaattcttaagcttaagcagctcactgtcctcacccttgctgagtctaacaaggtattgccctatgatacactaatggtcgagttagatgtttccaatgttcgcgaactcgaggactttcttatcaatgaatgcatgtatgcgggtatagttaggggaaaactggatcagttaaaaagatgttttgaggttccgtttgcagctggtagggatctaaggccaggtcaactagggaatatgttacacacattgtccaactggttgaacacgtcagagaatctgctcatttcaattcaagacaagatcaaatgggcggacaatatgagtgagatggacaaaaaacatcgtaaggaagcagaagaaggggtggaagaagtgaagaagtctctgtccatgaagagggaataaggagatgtttggggaaccaagtggagtgatggactacgaagaagatgggatccgaccaaagaggaggaggcatcctgtaacaaggtagaggagcaagagagagcaaatggtcagtgcggattgacattccatttaccgagagtagattatgattatttggttgcggattttcaacttgtataagatcctctgttctctctcacaataaccccttgttatgtttgatttccctcattagcaaatttggtgtctttctgcccattaaaagaaaaatggctttgaatttagt

SEQ ID NO: 87244 - DNA, 917 bp, Arabidopsis thaliana columbia
ttcagctctctacgactcactattgggaaagctggtccgcctgcaggtaccggtccggaattcccgggtcgacccacgcgtccgcccacgcgtccgatgaaatatctcactatctcctctaaatttcatcaatacttcgccattactagttacttatttgaattaatagtatgatacatgttgaaacttcattatctcttatatcattcaaattgttttgtagaaaatgtacgatttgggtgctcgacgtgtccttgtgactggaacaggaccaatgggttgcgtcccggccgagctggcgcaacgtagccgcaacggcgagtgtgctaccgaactccaacgagccgcgtcactattcaacccacaactaattcaaatgataacagacctcaacaacgaagttggatcttcggccttcattgccgctaatactcaacaaatgcacatggacttcattagcgacccacaagcatatggattcgtcacgtcgaaggtggcttgttgtggacaagggccgtacaatgggatagggctatgcactccattatcaaatctttgcccaaacagagatctctttgccttttgggatccttttcacccatcagaaaaagcaagtagaatcatagctcaacaaatcctcaatggctctcctgaatacatgcatcccatgaatcttagcaccatcctcaccgttgattccatgacctaagcttctattcctcatctatcccaaatccactttatgctttgtttttgttttgcctttctcgtttattatatatttttacattggtgctttaattagtttccttgagttatgttgtgagttttgtgttgttcctcaataattagtcaccaattgtgagctgaggagtaatattcaacaatcttacgaatgttcactatcaaaaaaaaaa

SEQ ID NO: 87245 - DNA, 507 bp, Arabidopsis thaliana columbia
aatacgactcactttagggaaagctcgtacgcctgcaggtaccggtccggaattcccgggtcgacccacgcgtccgccgccttattcagaggttaaacttctctcttccttgcaaatttacttcttcgttttctccgcttgtttgtgtctatgatcttgcctatgaaacatctttttatagtacacatatatgttgtcttattggaaatatgatcggctaacatatttgttattgttattaacaaaaaaaataacatttgttattgttcaccggagttgatagtagcaatagtacatattacatggtcatatatgcatatggctacatgtttgagttatattcgattatctggtgaaagatgagattgtgagtttgtaagtttttgacagtgtagaggaggatccaaaagaaaagaggaaaaaatggactatatgtatggaccagggagacaccatctgtttgtaccaggaccagtgaacataccggaaccggtaatccgggcgatg

SEQ ID NO: 87246 - DNA, 873 bp, Arabidopsis thaliana columbia
  unsure (1)..(873): unsure at all n locations
nnnnnnnnnnnnnnnnnnnnnnnnnnnnnnncccacgcgtccggatatattaaagaggtttgtgaagacgaaggagtccaaaacctccctcaggagcttccgccttattcagagtgtagaggaggatccaaaagaaaagaggaaaaaatggactatatgtatggaccagggagacaccatctgtttgtaccaggaccagtgaacataccggaaccggtaatccgggcgatgaaccggaacaacgaggattaccggtcaccagccattccggcgcttacgaaaacattgttggaggatgttaagaagatattcaagaccacatcagggacaccttttctgtttcccacgaccgggactggtgcttgggagagtgccttgaccaacacgttatctcctggagacaggattgtttcgtttctgattggacaatttagcttgctctggattgaccagcagaagaggcttaatttcaatgttgatgtggttgagagtgattggggacaaggtgctaatctccaagtcttggcctcaaagctctcacaagacgagaatcataccatcaaagccatttgcattgtccacaacgagaccgcgaccggagttaccaatgacatctctgctgtccgcacactcctcgatcactacaagcatccggctttgctgctagtggacggtgtttcgtccatctgcgcgcttgatttccaatggatgagtggggagtggacgtggccttgactgggtctcaaaaagccttatctcttccacaagactnggattggctgcgccattctaaagtttggagctccaaaactctaatctctaaagattcttgacggaagacactaagtttacagcagaccattgcatcaacct

SEQ ID NO: 87247 - DNA, 1555 bp, Arabidopsis thaliana columbia
  unsure (1)..(1555): unsure at all n locations
cagagctttccgccccacgcgtccgctcaggagcttccgccttattcagagtgtagaggaggatccaaaagaaaagaggaaaaaatggactatatgtatggaccagggagacaccatctgtttgtaccaggaccagtgaacataccggaaccggtaatccgggcgatgaaccggaacaacgaggattaccggtcaccagccattccggcgcttacgaaaacattgttggaggatgttaagaagatattcaagaccacatcagggacaccttttctgtttcccacgaccgggactggtgcttgggagagtgccttgaccaacacgttatctcctggagacaggattgtttcgtttctgattggacaatttagcttgctctggattgaccagcagaagaggcttaatttcaatgttgatgtggttgagagtgattggggacaaggtgctaatctccaagtcttggcctcaaagctctcacaagacgagaatcataccatcaaagccatttgcattgtccacaacgagaccgcgaccggagttaccaatgacatctctgctgtccgcacactcctcgatcactacaagcatccggctttgctgctagtggacggtgtttcgtccatctgcgcgcttgatttccgaatggatgagtggggagtggacgtggccttgactgggtctcagaaagccttatctcttccaacaggacttggtattgtctgcgccagtcctaaagctttggaagctaccaaaacttctaaatctctcaaagtattctttgactggaatgactaccttaagttttacaagctaggaacctattggccatacacaccttccattcaacttctctacggtcttagagctgctcttgatcttatctttgaggaaggacttgagaacatcatcgcccgccatgctcgtttgggaaaggccaccaggcttgcggtggaagcatgggggctgaaaaactgcacacagaaggaggaatggataagtaacacagtgacagcagttatggtgcctccgcatatagacggttcggagattgtgagaagggcatggcagaggtacaacttaagtcttggtcttggtctcaacaaagtggctggaaaggttttcagaattggacacctaggaaatgtgaatgagttgcaacttctcgggtgtcttgcgggagtggagatgatactgaaggatgttggatacccagttgtaatgggaagtggagttgcagctgcctctacttatcttcagcaccacattcctctcattccctctagaatctaatccatgtggtccttctctttctttctcttcctctcaatgtaaacaaactctcatgttttctcttttcttcatctatatttttactacattatctatgtttttatttgctatctccaacaaacttattgaacaaaagatcaaatatgtttattactcactaaaaaaaaaaaaaaaaannnnnnnnnnnnaaaccgnnnnnnnnnnnnnnnnnnnnnnnnnnnnnnnnnnnnnnnnnnnnnnnnnnnnnnnnnnnnnnnnnnnnnnn

SEQ ID NO: 87248 - DNA, 787 bp, Arabidopsis thaliana columbia
  unsure (1)..(787): unsure at all n locations
nnnnnnnnnnnnnnatacgactcacttagggaaagacggtacgcctgcaggtaccggtccggaattcccgtgtcgacccacgcgtccggctctctcgatttcagccaagagatgtcggcatacgacaatgttattggtgggaagctaaagctaaaagggaaggctttggatgtgaaagcaggtggagtaaagaagaagaagaaacataagagacaggaagaacaagctcttaaaattactgatcatgaactcatagaaggagaaagcactgaagcattgggtaaattgattgaaggagaagaaggagatgaagaaatgaacaggagtgaaaaggcaagcgaggatgcgaagttgcagcagcagctcgatgatgatgatcacttaacgccagcagaaaggcgatacatagagcagaaacaaagattggatgtgcagaagctagctaaggaagcgaacaagtctcaccgtaacaggattgaggatttcaatcagtatctggctaacatgagtgagcactacgatatccctaaagtcggacctggttaatataattctttcttgtctttgttttactctgcttatctattttgcatcgttaaacgactactttggatgtctgttatgtttagtccctttaacttttgaatgatgtgatcgcaaatctgtaatgtcaaaacacattttcttggaaaaaaaaaaaaaagggagggcgtctaaggaccaagctaccacgcgtgatcgacgtatagcttnnnnnnnnnnnnnnnnnnnnnnngtccnnnnnnnn

SEQ ID NO: 87249 - DNA, 409 bp, Arabidopsis thaliana columbia
  unsure (1)..(409): unsure at all n locations
agaaagtactctcaccagcactgagatcgtacgtagagaggctagtgagttaaaagaatctctgagccctggtcagcaacacgtttctcaaaatactgccgtaaaacctgaaggaagacgtagcagatccggtaagaaagccaaaaagagacattcacagcaaaaattacatgcaaaaaacggatggttcctcagggttaaatgaagaaagtacttcacgaagagatgatattgctatgagtgacacagaagaagtattaagttccagttctagatgtgcttctcctgaagattccagaagtaggaaaacacctcttgaagtaatgcaagagtcttccccaaatcagcttgtaatgtcaagtaagaagttcattggaaagtcaagtgagctactganagatggatatgt

SEQ ID NO: 87250 - DNA, 937 bp, Arabidopsis thaliana columbia
  unsure (1)..(937): unsure at all n locations
ggggaaggtggcacgcccggcgggaccgggccggaattcccgggttggcccaagcggtccgagccaccgaaggggggggtagggttggtctccaaattcggagaagaaggagaaggaggccaaggccgttaccattggcggtcttattggaccttccgattggcgatcgccgtggaagctttcttttaattaacaaccttaaccaccgtttttcctggcggaaccttcctaatctcctcatattccctctcattaacccaagaaaaccctaacttggaatccgattccacctccacacgattcgtcaccgtttccacaatccggcgtctaaatcctcatacacgtggttcctttcttcgtaaatcggtggtcacgagaagccacagatccaatcgggtcgttccctccctgtgatctctgataacatcatttcgtttagagatcgaaccagaagatttcttagcggcgtccgtcgcgcctttgttcggtgttggttggggggcttttaccccttgctcctatgtatcttgtttgggctcttgttgtggatcgtcaaagctatgatttttaggaagaagaagatgcttatgagaatgatgagatctgatgctgctagcttgtagaaattggggtatgttaagattccagctccagctcctgctcctgtgaaggaaactgcttgatttgaggttgtgaatttcaggttctgcctattntcctggtttncgctaccccctaaacaaggagatgcggcccagtaaattcgtctctggtatggatttatctaaaccttctatactctaaggatcggtgttttttccatttgtaggttatgtttcttagatataaataagcgcggttatgctgtgtgaccccccataaaaaggaataaaccccccaggcgaacgctttagaggatcccagcttacggacgggg

SEQ ID NO: 87251 - DNA, 802 bp, Arabidopsis thaliana columbia
agacgacagaagggggggttaggtttgtcttcaaaatcgtcagaagaagaagaagaagtcaaagacgataacaatgacgtcatcatcgtacctccgatttgcgatcgccgtcgtagctttcctctcaatcaccaccatcaccaccgcacgtccttgcaaaaccttcctaatctcctcatattccctctcaataaccccagaaaaccctaacctcgaatccgatttcacctccacacgattcgtcaccgttttcacaatccgtcgtctaaatcctcaccacgtggttcctttcttcgtcaatcgtcgtcacgagaagccacagatccaatcggatcgttccctccctttgatctctgataacatcaattcgtttagagatcgaaccagagatattcttagcgtcgtcgtcgcgcttttgttcggtgttggttgtggtgctttaaccgctgctactatgtatcttgtttgggctcttgttgtgaatcgtcaaagctatgattttgaggaagaagaagatgattatgagaatgatgaatctgatgctgctagcttgaagaaattgggttatgttaagattccagctccagctcctgctcctgtgaaggaagctgcttgatttgaggttgtgaatttcagtttctgcatattatcatgatttacgttgttgcttatctatgttgttgcgtacaagtaaattcgtctctgttatggatttatctaaacttactatactctaagtatcggtgtttttacgatttgtagttgatgtttcttagatatatataagtgtgattatgatgtg

SEQ ID NO: 87252 - DNA, 432 bp, Arabidopsis thaliana columbia
  unsure (1)..(432): unsure at all n locations
cccccgttggaggagtcntccnttctgggggagctgntccgnttnangcggnctccgtcggtgattgctcaggttccnatgccttcnccctttcgagaggtctttttactgctgtgagccctatctgcagcccggctggagacggaatggagttggtttagattccatgttgatctccgcaaatcctgagactgagaggcctctttatcttccgtagaataacttcccttttctctttcttttggacaactatggagtatgagacattgtgctattgctctcgcagggaggtctaggcatatcctccctgccttaaagagagcttttatcttagtaatgttgaactttatgtagtacttatgtaggagagactttataattctaatgctttattctggatcttactgctgtcgtatttaggtgatgtttgat

SEQ ID NO: 87253 - DNA, 1143 bp, Arabidopsis thaliana columbia
  unsure (1)..(1143): unsure at all n locations
gagtcggggaacatgaatttcgacgagaccgtgccactgagccaacgattggagtggtcagacgtggtcccattgactcaggacgatggtccgaatccagtggtgccaattgcctacaaggaagagttccgcgagactatggattacttccgtgcgatttacttttccgacgagcgatctcctcgcgcactacgactcacggaagaaaccctcctcttaaactccggcaactacacagtgtggcatttcaggcgcctagtactcgaggcccttaatcacgacttgtttgaagaactcgagttcatcgaacgcattgctgaggataactctaagaactaccaactgtggcatcatcggcgatgggttgcagagaaactgggtcctgatgttgcagggagagaacttgaatttacccgtagagtactttcacttgatgccaaacattatcatgcttggtcacataggcagtggacactacgggcattaggaggatgggaagatgagctcgattactgtcacgagctccttgaagctgacgtctttaacaattccgcctggaatcagaggtattatgtcatcacccaatctcctttgttgggaggcctagaagccatgagagaatctgaagtaagctacacaatcaaagccattttaaccaatcctgcaaacgagagctcatggcgatacctaaaagcgctttacaaagacgacaaagaatcctggattagtgatccaagtgtttcctcagtctgtttgaatgttctatcccgcacagattgcttccatggattcgctctgagcacccttttggatcttctatgtgatggactgagaccaaccaacgagcataaagactcagtgagagctctagctaatgaagaaccagagactaacttggccaatttggtgtgtactattcttggtcgtgtagatcctataagagctaactattgggcatggaggaagagcaagattacagtggcagcaatttgaatatgtgacgccccaaaatcacacttgaaaaagacttgattattagtttttacgtaattaactgcttatttatgaatcacatgttcatgttaacatgtatcaaaacaatcttgatttctcnnnnnnnnnnnnnnnnnnnnnnnnnnnnnn

SEQ ID NO: 87254 - DNA, 659 bp, Arabidopsis thaliana columbia
  unsure (1)..(659): unsure at all n locations
ggtggaggaggtatttggtggtggacatggtggaggtgttggtggtggagttggcggtggacatggcggaggagtcggtggtgggtttggaaaaggtggagggatcggaggtggaattggaaaaggtggaggagttgccggtggcatcggtaaaggcggcggcattggtggtggaataggcaaaggtggaggagttggcggcggtatcggtaaaggtggaggtatcggtggcgaaatcgaggcagcagaggaaccagagaccagtgaggcaactgagacgaaatcaaatgacttggctggtggtctaaacattgaagccgaacccgttgagcaacaagaagagaaccccaaggcggaactgtagatttcacttcggatgtttctcctttgggttcacctctttagtttaaagcagaacatcgtttaactcgaatatcaagattagtttaattaagcagtttttgatggattatgtaaacgcactacttgcattttagagatcaaggaacctaaacttctttttnnnnnnnnnnnnnnnnnnnnnnnnnnnnnnnnnnnnnnnnnnnnnnnnnnnnnnnnnnnnnnnnnnnnnnnnnnnnnnnnnnnnnnnnnnnnnnnnnnnnnnnnnnnnnnnnnnnnnnnnnnnnnnnnnnnnnnnn

SEQ ID NO: 87255 - DNA, 1686 bp, Arabidopsis thaliana columbia
  unsure (1)..(1686): unsure at all n locations
aaccgagattagattacatcttagggatgaagctggcgagtacctagaagaaagtaaacttaaggaattggtgaagagatattctgaattcattaacttccctatctccctctgggctagcaaagaggttgaaaccgaggtcccagttgaggaagatgaatcagctgatgaggaaactgaaaccacctctaccgaggaagaaaaggaagaagatgctgaggaggaagatggtgagaaaaagcagaaaaccaagaaggtgaaagaaacagtttatgaatgggagcttctgaatgatgttaaggctatatggctgagaagtccaaaggaggtgacagaggaagagtacactaaattctaccactctctctcaaaggattttaccgacgagaagccaatggcttggagtcactttaatgctgaaggtgatgttgaattcaaggctgtgttgtatgttcctccgaaagctccccatgatctatacgagagctattacaacagcaacaaggcgaacttgaagctatatgtcaggagggtgttcatctcagatgaatttgatgagcttctgcctaagtatttgagtttcttgaagggtcttgttgactctgacacattgcctctaaatgtatcaagagaaatgcttcaacaacacagcagcttaaagacaattaagaagaagcttatccgaaaggcgcttgatatgatccgcaagcttgctgaagaagatcctgatgaaatccatgatgatgagaaaaaagatgtggagaagtctggtgagaacgatgagaagaagggtcaatacacaaaattctggaacgagtttggcaagtctgtcaaactaggtatcattgaggatgctgctaacaggaaccgcttggcaaaacttcttcgttttgagacaacaaagtccgatggaaaattgacttccctggatcagtacattaagagaatgaaaaagagccaaaaggacatattttacatcacaggaagcagcaaggaacagctagagaaatctccattcctggagaggctcatcaagaagggctatgaggtcatcttcttcacagacccagttgatgaatacttgatgcaatacctgatggattacgaagacaaaaagttccagaatgtgtccaaggaaggactgaaggttgggaaagattcaaaagacaaggagctgaaggaagcattcaaggagctaacaaagtggtggaaaggaaatctcgctagcgaaaacgtagacgatgtcaaaatcagcaaccgtttggctgacactccatgtgtagtcgtaacatccaagtttggatggagtgctaatatggagaggatcatgcagtcccaaactctctcggatgctaataagcaagcttacatgcgcggaaagagagtcctcgagatcaacccacgacaccctatcatcaaagaactcaaggatagaattgcaagtgacccagaggatgagagtgtgaaggcaaccagcacaggtccatgtnnccagacagcttttgatcgagagtngggtccatctcanccggccccaaancntttgctgnccggattttttacncnggccaangcggcttgacatcagncctgattnagatccggcggggaatcggggncccgggnccnggnccagtgggnactnggccnatccatgcttggtggggncaacattnaccgnccggc

SEQ ID NO: 87256 - DNA, 854 bp, Arabidopsis thaliana columbia
gcctgcaggtaccggtctggaattcccgggtcgacccacgcgtccgaggaaatctcgctagcgaaaacgtagacgatgtcaaaatcagcaaccgtttggctgacactccatgtgtagtcgtaacatccaagtttggatggagtgctaatatggagaggatcatgcagtcccaaactctctcggatgctaataagcaagcttacatgcgcggaaagagagtcctcgagatcaacccacgacaccctatcatcaaagaactcaaggatagaattgcaagtgacccagaggatgagagtttgaaggaaacagcacagctcatgtaccagacagctttgatcgagagtggattcatactcaccgacccaaaagactttgctgcccgtatttataactcagtcaagagcggtctgaacatcagccctgatgcagtagccgacgaggaaatcgaggcagcagaggaaccagagaccagtgaggcaactgagacgaaatcagatgacttggctggtggtctaaacattgaagccgaacccgttgagcaacaagaagagaacaccaaggacgaactgtagatttcacttctgatgtttctcctttgtgtttacctctttagtttaaagcagaacatcgttttactcgaatatcaagattagtttaattaagcagtttttgatggattatgtaaacgcactacttgcattctagagatcaaggaacctaaacttcttcttttcaatgtatgagttttttatctttcaagattaataaaaaaagaaaaagggcggcacgctctagaggatccaagcttacgtacgcgtgcatgtgacgtcatagatcttccacaataaatcatt

SEQ ID NO: 87257 - DNA, 994 bp, Arabidopsis thaliana columbia
acaagatgggcggcctgagaggtgggttccaacacaccaaacacccttatggatccaggggggccggaaccccactcacccccaaagcttccaagaagtgccccggtatatacgggtggcaaaattatatctggtcgcaaaaatctcctaacttgaagaatatctgaagcttcccagatagcattgctcgaatcaggttagtcatttcctagtcagacaagccatcttaagatttatcagaggatatgcacaatctccggttgttataatgtaataacgatggaccttatccaagatttccgccagagttgttaaaaaactcagtccgattgttggttatgcagaaacgcaagtatgtatccaccaccaaacttcaagccaatcctgcttgtctagttttttggaatctcccaacctgcattgataaaacagcaagacttattttcaactgttaagcaaagagatacccaataactggcttccagtggcatcctgagaaaaatgcatttgaatggggatcatctgcgattccacactctgaggatgcaatccaggtgacacagcatgctgctagttatttagtcagtgaagctaggaagtcactgaacagaccagagtctcagaaagtgctgagcaatctcatttacaactataagcctacttactgtggatacgcagggaggggttacgacgaggtttacatttttacacaaccaagatcccgtttctaagaactttactcgtcgtcttgtgtgtttgtttggaactcttatttacatttagggagccggattgtcttgcatgatttcccttgttgattttatctctttggaattacatttcaaaagatacaaactgtgtttgattcgtctttctagcaaataacatttgacttttgagattaaaaaaaaaaaaaaaagggcggaagctctagaggatccaagcttacgtacgcgtgcaggcgacgtcatagatcttctatagtgtgtcctaa

SEQ ID NO: 87258 - DNA, 1400 bp, Arabidopsis thaliana columbia
  unsure (1)..(1400): unsure at all n locations
nnnnnnnnnnnnnnnnnnnnnnnnnnnnnnnnnnnnnnnnnnnnnnnnnnnnnnnnnnnnnnnnnnnnnnnnnnncccacgcgccacgcgtccggttcatttctcctccattgatctttctttactcagatctttcctcttcctctgagatgtggagctacgtttggttaccgttggtagctctatctctctttaaggatagcatcataatggccaaggctgcgacgattctcctccctagtcaaaccggatttgatatttctcggagtccggtatgctctgctccggatccgaacctaaattacagaccggttattggtattctgagccatcctggcgacggtgcgtcaggtcgtttgagcaatgctacagacgcgtcctccattgcggcttcgtatgtgaaattagctgagtctggtggagcacgtgtgatcccactcatctttaacgagcctgaagaaattctctttcagaagctagaattggtcaacggtgtgatactaactggtggttgggctaaagaaggattgtattttgaaatcgtcaagaaaatcctcaataaagttttggaaagaaatgatgctggagagcattttcctatatacgctatttgcctcggatttgagctcttgacaatgatcataagccagaacagagacatttttgaaaaaatggatgcaagaaattctgcatcaagtcttcagttcgttgaaaatgttaatatccaaggaaccatattccaaagatttcctccagagctgttgaaaaaactcggtacagattgtctggttatgcagaatcatcggtttggtatctcaccacaaagctttgaaggaaatattgctctgtctaatttctttaaaattgtcacaacatgcgttgatgacaacggcaaggtttatgtttcaacagttcaatcaacaaaatatccagtgaccggcttccagtggcatcctgagaaaaatgcattcgagtggggatcatctaaaattccacactctgaggacgcgatccaggtgagtcagcacgccgcaaatcatctagtcagtgaagctaggaagtcactgaacagaccagagtctaagaaagtgctgagcaatctcatttacaactataagcctacttactgtggatacgcagggattggttacgacgaggtttacatcttcacacaacaacgatcccttctctaataactataacctctcctgtgtatcctctcgtgtgtatagtgaaatatgtaccttcgactctgttattatctgtgaacttgttgtaactttgaacgtcagcctatggcttgtgtttgacattaaactaaataaaaaaaaaaagggcggccgctttagaggatccaagcttacgtacgcgtgcatcaacgtcgtgttagtctaacggaa

SEQ ID NO: 87259 - DNA, 480 bp, Arabidopsis thaliana columbia
  unsure (1)..(480): unsure at all n locations
tgatactctcnnnnnnnnnnnnnnnnnnnnnnnnnnnnnnnnnnnnnnnnnnnnnnnnnnnnnnnnnnnnnnnnnnnnnnnccacgcgtccgggagaagagaacgactgtgtatccttcagagtcagacgagcctatgaatcaacaaatgatcgaaggagccgaagttgttatagatggaaacgtgattacaaagtttggggctcgcaactgttaccaaattttccctggctattgttagcaagctgttcggacatgctagagcaaggagtgtttcagaagggcttgtgcatgagtatccaaggcagtaaccgtttgaaagcatcttgttcaagaaacacagttagaagatgtctcattactgatcttaaacccgagtataacggtccgatggtatcaaaccacctcaactccagagacttttcacaagtatcatctgttcaacgttgatgcaccttatcctgaaacgggatgctatctg

SEQ ID NO: 87260 - DNA, 578 bp, Arabidopsis thaliana columbia
  unsure (1)..(578): unsure at all n locations
ttccagctactnnnnnnnnnnnnnnnnnnnnnnnnnnnnnnnnnnnnnnnnnnnnnnnnnnnnnnnnnnnnnnnnccacgcgtccggcttaaaccccattttatattttagtcggagctccggtgaaataaaatggcggcaaagattattggtggatgctgctcatggcgacgcttttacaggaagagaacatcatctcgatttctgattttctctgttcgagcctctagttccatggatgacatggacaccgtctacaagcaattgggattgttttcactaaagaagaagattaaagatgttgttcttaaggctgagatgtttgcaccggatgctcttgagcttgaagaagagcagtggataaagcaagaagaaacaatgcgttactttgatttatgggatgatcccgctaaatctgatgagattcttctcaaattagctgatcgagctaaagcagtcgattccctcaaagacctcaaatacaaggctgaagaagctaagctgatcatacaattgagtgagatggatgctatagattacagtctctttgagcaagcctatgattcatcactcgatgt

SEQ ID NO: 87261 - DNA, 621 bp, Arabidopsis thaliana columbia
gtccaattgagaaaaacgcgtatcgtcgtcttcttcatcaaaagcgaacaaattctaaaacacacctataggacaaaatccagtcttctctctgtgaaaatctcacagagtagagaaaagctttgtgttttccaattaaagttacattttttgtttgaacaaatcactttctgtgatctacatttgtgtggtcgtgaaatcaatgacggaaccagaaagattaggaggaatctccctgagttttccggtgaatgaagaagatacggtaacgacaacatcaccaaagactcttccacggaggctccgtcgtcgtcttctcgaaccgaagagtcctgtctccgccgcagagatcgattccaaactcagagaagctgatctccgtcgtcagcaatattatgaatcactatcgagtaaggcacgacctaagatgagaagtccgagatcaggaagtatagaggagcttagtcagagacttgaatcaaagcttaatgctgctgaacaaaagaggttaagtattttggagaaggagctggctcgtttggctaagatggatgaagctagacaagctgcgaagaatggacttgagcaacgagttgagaaagagcgtgatgagttagagag

SEQ ID NO: 87262 - DNA, 2564 bp, Arabidopsis thaliana columbia
  unsure (1)..(2564): unsure at all n locations
acgcgcgnnnnnnnnnnnnnnnnnnnnnnnnnnnnnnnnnnnnnnnaacacgcgtccggttaaaaaagtaaaaacctaccccgcggccccgaaaccactcaaccaaaaaactagggttctgtttctcgtctctctctcaaacccacattgcacaatccatttctcgtttctctgatttagatccaaagatggatgggatgaagctttcgttcccaccggaaagtccaccactttcagtcatcgttgctctttctctctcagcttctccggtgacgattgattcttccgccgctgcaacaaccgtcccttcttttgtcttctccgacgggaggaaattgaatggagccaccgttcttcttcgctatgttggtcgatcagcgaaaaagcttcctgatttctatggcaacaatgcttttgattcttctcagattgatgagtgggtagattacgcatctgtcttctcttctggttcagagtttgagaatgcttgtggtcgtgttgataagtatctcgagagtagcacgtttcttgttggccattctctttccattgctgatgtcgctatttggtcagctcttgctggaactggtcaaagatgggaaagtttgaggaaatctaaaaagtatcagagtcttgttagatggttcaattcgatattagacgagtacagtgaggtgcttaacaaggttctagcaacttatgttaagaaaggatcagggaagcctgttgctgcacctaagtctaaagatagccaacaagctgtgaaaggagatggtcaggataaaggtaagcctgaagtggacttgccggaagcggagattggaaaggttaaactccggtttgctccagagccaagtggttatcttcacataggacatgctaaggctgcgttgctgaacaagtatttcgctgagcgttaccaaggggaagtgattgtgcgttttgatgatactaaccctgctaaagaaagcaatgagtttgtggataatcttgtgaaggatattgggaccttggggatcaagtatgagaaagtgacatacacttcggactattttcctgaattgatggatatggcggaaaaactgatgcgtgagggtaaggcatatgttgatgacacaccgagggagcagatgcagaaagagaggatggatgggattgattcgaaatgtaggaatcatagcgtcgaggagaatttgaagctatggaaggaaatgattgcaggaagtgagagaggattacagtgctgtgttcgtgggaaattcaacatgcaagatcccaacaaagccatgcgtgacccggtttattaccgatgcaatcctatgtctcaccaccgtatcggggataagtataagatatatccaacatatgactttgcttgcccgtttgttgattcccttgaaggtataacgcatgctcttcggtctagtgagtatcatgaccgaaatgctcagtactttaaagttctggaggatatgggactgcgacaggttcagctttacgaattcagccggttaaacctagtttttacacttctcagtaagcgcaagcttctctggtttgtccaaactggattggttgacgggtgggatgatccacgtttcccgacagtccaaggaattgttcgtagaggtttgaaaatcgaggctctgattcaattcattctcgagcagggggcttcgaagaatctaaatttgatggaatgggacaaactttggtctataaataagagaataattgatcctgtgtgccctagacacactgctgtggttgcagaacgtcgtgtactatttaccttaacggatggtcctgatgagccgtttgttcgcatgataccaaagcacaagaaattcgaaggtgctggagaaaaagccgaccactttcactaagagcatttggctcgaggaagctgatgcgagtgccatatccgttggtgaggaagtaactttgatggattggggaaatgctatcgtaaaggaaatcacaaaggacgaggagggtcgtgtcactgccttatctggtgtcttgaatctccaaggttctgtaaagactacaaagctgaagctgacatggcttcctgatactaatgaattggtcaatctcacattaacagagtttgattatctaatcaccaagaagaagctggaagatgatgatgaagttgctgattttgtgaatcctaacacaaagaaggaaacattggcacttggtgattcgaatatgaggaatctgaaatgtggagatgtgattcagcttgagaggaaaggctatttcagatgtgatgtgccttttgtcaaatcttcaaagcccattgtcttattctccattccagatggaagagccgctaagtgatcaatgaactatttttgagtttcccattttatgaacattgtgttgagaaatttgctctttaggttttaaaacaatgaaaacaaagctttttatcagttctttagtttcatctcataatagttttaaagttgcaaaaaaaaaaaaaaagnnnnnnnnnnnnnnnnnnnnnnnnnnnnnnnnnnnnnnnnnnnnnnnnnnnnnnnnnnnnnnnngtc

SEQ ID NO: 87263 - DNA, 1493 bp, Arabidopsis thaliana columbia
cccaagcgtccgctttaatctctctatcggagagaacacgagcgttgacggagaaagaatctctcagcttctttttttttttataatctttttccgagtcaaatcattttcagtctccacccaactctcaaatccgcggcaaacgtttaaggcattcgcggccgcggtcatctcaaagttccttgctttttccccggaaactccatcaatgtcgacccttttcgtttctcgctttatctgcttatagagaccaaaaaccctacaaaaatatgattcctacgacggcgacggttgatgatgagccgggacagattaaacgtgctctgattgatgcttctgccggagctatctctggtggtgtttctcgttctgtaacttctcctcttgatgtcattaagattagatttcaggttcagctagaaccgacgacttcatggggtttggttcggggaaacttgtcaaggagcttctaagtatactcggattggtacaggcgactaaaggtatatttagggaaaggaaggcttttcggggggtttttggcggggtaatgtgcccgccttttgcccaatggtcatgccgtatacttcaattcagtttaccagtactacataagctgaaatcttttgcatctggttctactaaaacagaggatcatatacatttgagcccttatctattctttggcaggggagcgttagcaggatgtgctgctactctaggatcttatccttttgatcttttaaggacaatattggcctcacaaggggagcctagggtgtatccaacaatgaggtctgcttttgtcgatattattcagctctcgaggtataagaggattgtataatggattaacaccaactcctggtggagattgtgccttacgctggcctgcaatttggcacatatgatatgtttaagcgttggatgatggactggaatcgatacaaattatcctccaaaatcccgatcaatgtggacaccaacctttctagcttccagcttttcatttgtgggcttggggcgggcactagcgccaagctcgtctgccatccccttgatgtggtcaaaaaacgattccagattgaaggtttacagagacatccaagatatggagcccgagtggagcgacgtgcatacagaaacatgttagacggtcttagacagattatgatatcagaagggtggcatggtctgtacaaaggcattgtgccatcgactgtgaaagctgctcctgctggtgctgtaacctttgtggcctatgagtttacctccgattggttggagtcaatttcttggtagagattttactcttttgatacttatatcttactgtctctagcatttattataggctcatatgaacatcgatcatttttggaatgtaaacgtcaaagtgttgtcggcaactgcagcggccgcaaattcaaacagcccgggggatccactagttctagagcggccgccaccgcggtggagctccagcaaatgtt

SEQ ID NO: 87264 - DNA, 558 bp, Arabidopsis thaliana columbia
  unsure (1)..(558): unsure at all n locations
gggaaagctcgtacgcctgcaggtaccggtccggaattcccgggtcgacccacgcgtgcgggttcctcgcactttcaggctgaacaaagtactgacagatgctaataaatacacggaggaagaatatgctcctttaattattatctgagatttttcaattcaagttcgtgtggattcagaatcaaaatggaagaagatttgttgggcatttgtgggtttgattcgtcgaagaaatatcgattagaagaacttgccaagtatcagtcgggttcatgtattgagtttgaagatgatgatgaaatggcagtggattatccatgcccgttttgctcagatgattatgatttagttgaattgtgtcaccatatcgatgaggagcatcaactagacgccaacaatgggatatgtccggtttgtagcagacgagtgaagatgcatatggttgatcacattgccactcagcatagagatgtcttcaagagactttacaaggatgagtcatattcngcatttcntccagggnctaggnaatacttacagtctctaatcgntgagccg

SEQ ID NO: 87265 - DNA, 575 bp, Arabidopsis thaliana columbia
  unsure (1)..(575): unsure at all n locations
ccgccccccccggttacccccggaaccnccaaggntaggtccctttccccggggaaaagccgaccgggggaggattaaacttgggaccaccggtacccaaactcgctggcagcaaagcctttcccttctgggggtggctggaaaggatcggcattccaataaaatggggatttgaagggctggagccagccttgggattctccggaagctatcttttccacctcttagggactctccttctcatctcctggcttatcttccaaaatctctcacacctttactagaagctaaatccatggacantggcgccatctgacgacactctacattatacttgctgctaaacaaagctagaagtaacagacagagagctgctgagatcgatgccgatgtatggaatctcttcattgtgaaatttctttttgatctgttgtggtcttaggttgttgtgttccttgagactgctattgagaaaactttagggtagcgagcttatgtttgagttaaagagcgagaatctttgttgctttgtagattatattatcgattcatgaaactttttgggatctaatcac

SEQ ID NO: 87266 - DNA, 1600 bp, Arabidopsis thaliana columbia
  unsure (1)..(1600): unsure at all n locations
cggaatcccgggacgacccacgcgtccggtggatcggagtgcaaattttgttattcaagcatgaatctcccatgcaagagaccaagagcagatgggtattatgtgggaagaattagctccaagattcaaggatcttcttgagcaagggaagtcaggtgttgcggcttctctgatagcagttagccaaaggcttcaaagtcatgaaaataagtgtggtgaggcccttgttggtgcagtatgctccacaaaggaatcccgtatctccattcttccacggttgctgtttcttgattactactttggttgtcgagataagtctacatgggagtgggcacctggtgcaaagatgcatgtcatggggtgtttgatacttcaggggatttttaagttttctagtgatcatatacagccatacataacaagcttaacttctatgaaagctgagtatatcactgaaacggcaaaagattccagtggagcacgtgtcatcgaggcctttcttgcctcagatgctgctacaaaacagaaacgtagactaattataaaattacgtggacattttggcgagctctcattacacacgtctggttcatttacagttgagaagtgcttcgatgcatgtaatttgacactaagggaagccatagcatctgaactgttggatgtgaaagttgatctctcgaaaacaaagcaagggccttatctgcttaggaaacttgatatcgatggttatgccagcagacctgatcagtggaaatcaagacaagaagctaagcaatcaacatataacgaattttgctctgcatttgggtccaacaaatcaaattttccaaagaacacctttgtctctgacgcatctgaggatgcagctcaggaaatagaagtaaagaatacaaggaaagagattgaccatcatcctacttccgggtttaagcgtcaccgagaaaaacatgcaaaggataaggatgaaccttttgcaggtgaaaaaagatcgaaacagaagaagaatagatctagtgaagcaacagataaaccaaaactagctggcagcaaaagacctttcctttctggtgagatgactggaaagaatcggcattcaaataaaatgagaatttgaagggctggagccagtccttgggattcttcggaagctatctttttcacctcttagagactctcctttcatctcctggcttatcttcaaatctctcacacctttactagaagctaaatccatggaagctggcgccatctgacgacactctacattatacttgctgctaaacaaagctagaagtaacagacagagagctgctgagatcgatgccgatgtatggaatctcttcattgtgaaatttctttttgatctgttgtggtcttaggttgttgtgttccttgagactgctattgagaaaactttagggtagcgagcttatgtttgagttaaagagcgagaatctttgttgctttgtagattatattatcgattcatgaaactttttgggatctaaaaaaaaaaaaaaaaaaagnnnnnnnnnnnnnnnnnnnnnnnnnnnnnnnnnnnnnnnnnnnnnnnnnnnnnnnnnnnnnnnnnnnnnnn

SEQ ID NO: 87267 - DNA, 635 bp, Arabidopsis thaliana columbia
  unsure (1)..(635): unsure at all n locations
cagctctctacgactcactatagggaaagctggcacgcctgcaggtaccggtccggaattcccgggtcgacccacgcgtgcggcacgaactcatttcagcttcttgcagccggcggaacggaggaacaaaaagcagagaagctaatcaatcatgggaaaggttcacggatctttggctcgtgccggtaaggttagaggacaaactccaaaggttgcgaagcaagataagaaaaagaagcccagaggtcgtgctcacaagcgtctgcagcacaaccgtcgttttgtcaccgcagttgttggtttcggaaagaagagaggacccaactcttctgagaaatagaagaagttagagagaaagatgttgtcgtgaaacttctcaaggtcatttgtaactttttgttttctttggcaccgaactattatgttttgattctatgctatgaaatactgttttttcacttatgattttggtcaattaaacataagatatgatttttgcccatacattacaacaagaccaatgatcaaaaaaaaaaaaaaaaaaaaaaaaagnnnnnnnnnnnnnnnnnnnnnnnnnnnnnnnnnnnnnnnnnnnnnnnnnnnnnnnnnnnnnnnnnnnnnnnnnnntacaatcg

SEQ ID NO: 87268 - DNA, 1215 bp, Arabidopsis thaliana columbia
gccgcgattgtgttcagatcggagctgatttcgaatttggatgtgaaattgagattctagggatttcaaattttgacgatcatggcgacgaggaatcgtacgttgctgtttaggaagtacagaaactctctgagaagcgtcagagctccattgtcgtcatcttcattgacgggaacacgatccggcggcgttggtccggtgatcgagatggcgagtacttcgttattgaatccgaatcgctcttacgctcctattagtaccgaagatcctggaacttctagtaaaggtgcgataacagtgggcttaccaccagcttgggttgatgtctctgaggagatatctgtgaatatacagcgtgcaaggactaaaatggctgagttgggaaaggctcatgccaaggcgttaatgccatcgtttggggatggtaaagaagatcaacataatattgagtctttgacacaggagataacttttctattgaagaagtctgagaagcaacttcagaggctttctgcttcagggccttctgaagattcaaatgttaggaaaaatgtgcagcggtctcttgccactgacctccaacttctttctatggagcttcgcaaaaaacagtcaacatatttgaaacgcttgaggcagcaaaaagaggatgggatggatttagagatgaatctgagcagaaacagatatagacctgaagaggatgactttggcgatatgttaaacgagcatcagatgtcaaagataaaaaagagtgaagaagtatctgtagagagggagaaagagatacaacaggttgtagaatcagtaaacgatcttgctcaaattatgaaggatctttctgcacttgtgatagatcagggtacaatagttgatcggatagactataatatcgaaaacgtcgctactactgttgaagatggtctcaaacaactacagaaggcagagcgaacgcagagacatggaggtatggtgaagtgcgcatccgtgcttgtcatcctctgtttcatcatgctgctactcttaatcctcaaggaaatattcttgtgatcggatactataatccctggttagatcaataagaaaagttcgatccttaactatttcattctttagccccgaacatcgcatgttttcctcgtgcgattgtttctatatcggtagcgaacacattgtgtcagaggatgttattaagaaaagaaagttaaaaaaaaa

SEQ ID NO: 87269 - DNA, 572 bp, Arabidopsis thaliana columbia
atgatacttcaggtctctacgactcactattgggaaagctggtccgcctgcaggtaccggtccggaattcccgggtcgatccacgcgtccggccgttctcctcctcctccactatagctgcctgtattcgtcttctctatcaccctcgttatctggatctgaaatattaggtgatacgaagccatgacagtttcagaagcttatagtccacctctgttcagtatagccccgatgatgggatggacagacaatcattacagaactctagcgcgtcttataacaaaacacgcatggctctacactgaaatgttagctgctgaaaccattgtctatcaagaagataacctggacagctttttggcattctctccagaccaacatcccatcgttcttcaaattggtggaagaaacttggaaaatttggctaaagcaaccagacttgctaatgcttacgcctatgatgaaattaattttaactgtggatgtcctagcccaaaagtaagtggacgaggttgttttggtgctcttcttatgcttgacccgaagtttgttggtgaggctatgtctgtcat

SEQ ID NO: 87270 - DNA, 548 bp, Arabidopsis thaliana columbia
  unsure (1)..(548): unsure at all n locations
nnnnnnnnnnnnnnnnnnnnnnnnnnnnnnnnnnnnnnnnnnnnnnnnnnnnnnnnnnnngggttcgttatcatcgccatctcgaccccccgtccgcataagcgatgttatctccgattgagaatgagagatccgaaattccttcccctgagaagctgaagttagtggaggagccatccgacgatgaatctaagttctctaattatgattcggacgattgggaaactttgtcagatgatcttcgactgttagatgaagagtggggcaagagcgggggttttgatgtggacttctcgaaagtgcgtcacagatttggtcgcggagctgttcatctcgacgacgacaatatggttagcgagcctcatgagaccaacagagatttgctcaacaggttgtccaacatggctatctccttctacaacgacaagacgggggataaaactgggaacttggcaaggttttgaggagcaaatttcacccttttgctggaatcacactctacatcacggtttgaagccattgaccctcccagatgggacccagactaa

SEQ ID NO: 87271 - DNA, 857 bp, Arabidopsis thaliana columbia
  unsure (1)..(857): unsure at all n locations
ttctaacaagaacaacgaaaaaccacaagcgaaacatacaactcaatcagtaaccactccgcctcatacaggatgatatgtgcgagaccacgactgtgctcttccagacgaaaaaaaacatttataactnggtactcatccacaagcatcgtagcatccaaatacataagtggtgacagtcatcgcggctcttaaggaccatattcccaagtgcacaaccagaggctctcgcactgttcaataccatcacatcccaatatggttaggaaccatcatcagacaacacaagattgcccaacaagatgtccaacaaggctatctctatctcaaacgacaagacggggataaaactggaacttggcaagggtttgagagcaaaatttcacccatctgctgcaatcacactctcattcacgtttgaagcccaagacccttcagatggtacccagactaaacggtaccaagcagtggttcgaaacttgtcctttgatatcgaagtttgctcttgcaatcctgaaccatcttcttcttgaattctcttctgaaagttttccaccggcgagtcttatgcatctatctatctatctatctaggggaagcaaaagggcactagcaagtttcaatttgttccttgaacttctctatttgaaattaagttgtatttttatgcccaaatgttggtctctcggtgttttactgttattgcgactaagtcactactctttccattagctacttctattattatatggataatgttgttacaaaaaaaaaaaaaaagggcggccgctatagaggatccaagcttacgtacgcgtgcatgggacgtcatagtaattctatagtgttgcccaaat

SEQ ID NO: 87272 - DNA, 636 bp, Arabidopsis thaliana columbia
  unsure (1)..(636): unsure at all n locations
nnnnnnnnnnnnnnnnnnnnnnnnnnnnnnnnnnnnnnnnnnnnnnnnnnnnnnnnnnnnnnnnnnnnccacgcgtccggtttctcgccatcgacgacgacgacaacaaaatcacatatcttctctatcgatctccaatcatcatcttcttcctaactacaggtgtattgatgttctttgcagagatgtctccagcaacaaagtcaaagtctaaggataaaaaaactggtaaagaagctcaaaaggcatcaccaaagccttcactttcggttaatgggaatagcagcttggcagctagtggttataatcctcttttaggaacatttcaagctcttgattcagtgtcgatagcttctatctcaccattacagtatagtcgtttccggagtatagatgaggcagatgtaaatgggattgagtctgattcagtttcgaataatggtagctgttctggtgagtcagaagatcacaaggagaaaacaacttatcctgcccttaagcaggaggtgataccaggtgccgattatgacaagcgggaaaaagtgtcgtcaaaagaatgaggggatacatcaccgccagaagggggaggnggggctcncggngtttganttnggangtgtagcntnttctttattt

SEQ ID NO: 87273 - DNA, 413 bp, Arabidopsis thaliana columbia
aaaaagagcacaaggaacagttaaaagtcgggatttttgggtatttgagaagcaatcggaacaacaacggcgtttgtaacgcggatttatgtcggctgtgtctgaatcggctgcgatttcgtctctgtttctaatctcctttgcaattcaatcgtcttcttcttcttcctcgtctgtcttgttctttggtctgagtctgacggctgttcttaacgctcttcgcttctgctccgaacagaggcttattcttgaggttccttccatttccatgggcttaagacttaacaggacttgttctggtgttgaagtatttgggggttttcacgaaaagcaaaaaataccctttttcatagttcgctgaaacagagaaatctttttcctgaaaaaaacctcatccgatttagcagtttttt

SEQ ID NO: 87274 - DNA, 679 bp, Arabidopsis thaliana columbia
  unsure (1)..(679): unsure at all n locations
nnnnnnnnnnnnnnnnnnnnnnnnnnnnnnnnnnnnnnnnnngttgaaaccaaaggagttagcttcttcaactttctccactaattcatgccattgtcgttacctttttgtttctcagactgttaccttacctgtaaagaagagagttaaagatctattgcaaaaaaactcaacctttaatctctctgcttcttctaattaagtaatttcaactacccttttggcgaaacctctcgatctattggtttggtactgaagaaaccgacttgagtctgatttgtttttggtgaaagccatggaagctataagaaagcaagctgcgaagctcagagagcaagtcgcgaggcaacagcaagcggttttgaagcatttagggcatgttaatgctgatgctgttgttgttgatgaagaagagcttcattgtcatcagaaacttcaagatctttatagctctactaaagctgctaagcgtttgcaaaggaacattgttcgtggactcgaaggtttcattgcgactggcacaaaggttgttgagatagggttgaagtttgctgaagatttcaagaaatatggagatgagaatcctgatgctaatactcctctatcaagagtcgcacatcactttgggacctcttacaagtcggtggaaggcgagagggaaactctcctcggagttctt

SEQ ID NO: 87275 - DNA, 541 bp, Arabidopsis thaliana columbia
ctctctaaaaccctattaaatcttctctctttcgttcttcttcttcttctcctcctccatcctccaaatctcgatttcccaaaaaaaaaaacctaatctcgccgtactctcctcggttccatctttctctgcggccagtacgtgtgcagatatggctaccgagggagttgttccttcagcgcaggatattgctgctgaatttgtgagacagtactatcatgttttaggacagcttcctcatgaagctcgtaggttatatgttgatgctagtgttgtcagcagacctgatgttactggtactatgatgtcttttacttccgttgaggctatcaacaagcatatcctgtcctgtgactttgagaatactaaatttgaggttctgagtgttgactctcagaattctttggaagatgggatttttattatggtgatcgggttcatgactggaaaagacaaccagaggaggaagttttctcagatgttctatcttgctcgtcaatataccctcgttgttctcaatgacatgttacgatacgttgat

SEQ ID NO: 87276 - DNA, 595 bp, Arabidopsis thaliana columbia
  unsure (1)..(595): unsure at all n locations
nnnnnnnnnnnnnnnnnnnnnnnnnnnnnnnnnnnnnnnnnnnnnnnnnnnnnnnnnnnnnnnnnnnnnnnnnnnccgggcgtgcgcggacgcgtgggttatttccttcctaagaagaattattagatttattttctttgctagtatagattgatgaaagtgaggaaatgggagaagaaatgaagaacacaggatgtgtcttcttcttctaagtcactaacaaaatcaacaggggggagaagccattattatataatagagagattgagagaagagatttatccaaaaaaatattgcaattcttcttggagtgaataatgccagtccctcttgcaccatatccaacacctccggcaccggcactggctccgtcgtacaacactcctcccggcaaatgggaaaatctttcttagatggacaagctatttttaatccaaaaagatcctctgttttcatattcttttacaaaagtttagtttcttataagaatgatttttgggttatttaacaagatggttttggtctgcatacctggaaaaataaatattttagaatcccaattggtttctcttcatgggaaaaattgctcaatatt

SEQ ID NO: 87277 - DNA, 436 bp, Arabidopsis thaliana columbia
  unsure (1)..(436): unsure at all n locations
gatttatattcctcttaaaaaataatttatttccttcctaagaagaattattagatttattttctttgctagtatagattgatgaaagtgaggaaatgggagaagaaatgaagaacacaggatgtgtcttcttcttctaagtcactaacaaaatcaacaaagaggagaagccattattatataatagagagattgagagaagagatttatccaaaaaaatattgcaattcttcttggagtgaataatgccagtccctcttgcaccatatccaacacctccggcaccggcactggctccgtcgtacaacactcctccggcaaatggaagtacaagtgggcagagccagttagtgtgttcaggttgcagaaaccttctgtgtttcccggtnggngaaaccnccntttttnggccgtttaaaaagcngttangggnttt

SEQ ID NO: 87278 - DNA, 546 bp, Arabidopsis thaliana columbia
ggaagaaagaagatagaatcagagatttgtagattttatcgatcgaagatgaatactgacatcactgccttggagaaggcacaatacccagtggttgatcggaatcctgcttttactaaagtcgtcggcaatttcagcactctcgattacctccgtttctctactatcaccggcatctccgtcaccgtcggctatctctctgggattaagcctgggattaagggaccgtcgatggttactggaggattgatcgggctcatgggaggtttcatgtatgcgtaccagaactctgccggtagactcatggggtttttccctaatgatggtgaagttgctagttaccagaagcgtggtggtttctccaaatgaatgactttagtgttttattttctggatctggcttcattttggaatttgaaaccctctctttttctctgtaatttgattgcatttctctgctgtttgaggataatatgtgcctctgtttgtctgttatgacttgatggtgatgatcaataagatttgagacaaggaattgtggtgaaa

SEQ ID NO: 87279 - DNA, 1339 bp, Arabidopsis thaliana columbia
gtcgacccacgcgtccgagaagaaaaccctagatttctccgtctctctaatttcctttctctctcaagcttctcagaaagtctgacactttcgagaatctaatctccaaatttcttgtctttttggagaaggaatcgaattatgtacaaggaacgtagtggaggaggtggtggtgggtcatcgagatcagagatcctcggtggagctattgatcggaaacgaatcaacgatgcactcaataagaaactagagaaatcttcaacttccaccaccacatctagggttttctcttctaaagacaaagatcccttttccttcacatctactaaaactcagcttcctgatgtggaatcggaaactgatagtgaagggtctgatgtgagtggatcggagggtgatgatacgtcgtggatctcttggttttgtaatttgagagggaatgatttcttctgtgaagtcgatgaagattatattcaagatgatttcaatctttgtggtttaagtggtcaagtcccttactatgattatgcacttgatctcattttagatgttgatgcttccaacagtgagatgtttactgatgaacagcatgaaatggtggaatcagctgctgagatgctatatggtcttattcatgttcgttacattttgactactaaaggaatggctgcaatgactgagaagtacaagaactgtgatttcgggagatgcccgagagttttctgttgcggtcagtcttgtcttccagttggacaatccgatatcccgagatcgagtactgtgaagatatactgccctaaatgcgaggatatatcttacccgcgatctaaattccaaggcaatattgatggagcgtactttggaaccacattccctcacttgttcttgatgacttacgggaacttaaagccgcagaagcctactcaaagctatgtcccaaaaatctttggcttcaaggtacacaaaccatgatactagtgctctgcattctcaatggtgatacatttagtggctctgtaattgcatccggatgagcaactgaaacgatagctgcggtgactggagcatacatcaaccattgggttagaggatgagagctgaagttgaaagatggaatcttgaaagaatctcatgaagttccaagaaaacttagaagtgcaacagcctggctcattgggggaaaagaacgacacacttgggtcttgttgttgtctccgaaaagattttccccagttagttggattttgttttgaactgttggattattattcgtttttctaatttcatgtaaaactcataaatttcaactgaagtataacttagatcaatcaatttcatc

SEQ ID NO: 87280 - DNA, 518 bp, Arabidopsis thaliana columbia
  unsure (1)..(518): unsure at all n locations
nnnnnnnnnnnnnnnnnnnnnnnnnnnnnnnnnnnnnnnnnnnnnnnnnnnnnnnnnnnnnnnnnnnnnnnnnnnnnnnnnnccacgcgtccgcggacgcgtgggtcctggtatatcgaaagaggagaaaaggaggctgttacattgtgttgtggttggtggtggaccaactggtgttgagtttagtggtgaactgagtgactttattatgaaagatgttcgtcaacgatatgcccatgttaaggacgacattcatgttactttgatagaggccagggatattctttcatccttcgatgatcgtctcagacgttatgctatcaagcagttaaacaagtctggagtacggtttgtgcgagggattgtgaaagatgtgcagtctcagaagttaatacttgacgatggcacagaggttccctacggactcttagtgtggtccactggtgttggtccttctcctttcgttaggtctcttggtcttccaaaagatcctactggaaggattgtcattgacgaat

SEQ ID NO: 87281 - DNA, 541 bp, Arabidopsis thaliana columbia
actatagggcaagctggcacgcctgcaggtaccggtccggtatcccgggtggcccacgcgtccggtgattttgaaatttcagataacgcagaatttttttattctcgccggagttttctcctcccaccgtctctgattctcgtcgccgccgtacacagttgttgttctctgccgtttctgcaagatgattggatcgtttcttacaagaggattggtgatggtgttgggctatgcttaccctgcgtatgaatgttacaagactgttgaaaagaataggcctgaaatcgagcaacttcgcttttggtgtcagtactggatattggttgcttgcttgacagtttttgagagagttggtgatgcgtttgtttcatgggttccgatgtacagtgaagctaagttggcattcttcatatacctgtggtatcctaaaaccaggggtactacatatgtctacgagtccttctttaggccatatctctcacagcatgagaatgacatagaccatagtttgctcgagctaaggactagagcaggagatatg

SEQ ID NO: 87282 - DNA, 495 bp, Arabidopsis thaliana columbia
ctaattgagagagagcgcgcgacaaaatcgaacctaaccctaattttgcgatttccccctaatttcgacgatctgatggtgagtgacaagcatgtagaatcaaaccaccgcaaacaccgacggtcgttttcgccgtccgacgaggtctttaaatctccgaagcggcacaagtcccgtcatcaccatcgcaggcatggccaccgtcatcatcgtgatgaggaagttcaatataacgatgatgagaatgttaacggtggtgaccttgatatggaagaaggggagatattaggaaaagaagggattggggagacattgaagaagaaattagagtccgtcgacgagtttggggatataaaatgtggtcaattccgggagaataatctggggagaaatcagcggagggaaagagaatgtgagaaaagaaaagagatagagcctgaccgtgaaaggagaaaagagaggggaagcgttgatagagatagcaggggagacagg

SEQ ID NO: 87283 - DNA, 378 bp, Arabidopsis thaliana columbia
ggagtctgtcggcaattctcaggtgctgtcaccacaatgcatgttatgggtcaacatcaagttactgaaaaagaaaagaagaagaagaagcctaaaggtgatctgaaacagaacaaatgtgtctgtttatgttttggagctcgttgttaacaattgtgcaagacaagtagagagagttaaaaaagcttgggagattcacattctgttcttgagccttcttcaataccttttgctcttgttccttgtaattcttttttctgacatgacatgacatgattggctttttgatcgcttgaggtttggtttctattgtatttcggattcgcaacaccgtggaaattattaggtaacaaacaacagataaaaaaaaaagggcgg

SEQ ID NO: 87284 - DNA, 666 bp, Arabidopsis thaliana columbia
  unsure (1)..(666): unsure at all n locations
atgatttttccagctacaatacgactcactttagggaaagctgctacgcctgcaggtaccggtccggaattcccgggtgaccccacgtccggtttcgttttcctgtacctcttttaagaataaaaaaaaaaaaaagaaatgggaaaaatttcattagcgatatgtctaacgttgcttgtcacattaagcactgtttatgaaacacaagggacgttctcattacccctttacttgaaaaatttccccaaactgggcaaagactatgaggctttcgcaaacaaaggtatatcggactttttgggtgacctagagggtatgtgtcctaaaaccgcagagttcaaggatttctttgaaaacttgaaggattacatggccttcttcaattcagcagcacccgggtcaaaagacaaccagttcgagatgttcgtaaaatctgaaaagctgttcaaggctttgtctgctttcaacagtagtaaaggcggaacatcagaggattcgtggaagctggtggatggattgttgtcaatgggtaaaaggttttgttnagatgaagatagnggttcnagggntaccttttaagggngaggggcctaccagtcttggnaatgggtaggnctcggctttctnagngccctnaggtaaggcacnttttnctggatttttggg

SEQ ID NO: 87285 - DNA, 1623 bp, Arabidopsis thaliana columbia
  unsure (1)..(1623): unsure at all n locations
nnnnnnnnnnnnnnnnnnnnnnnnnnnnnnnnnnnnnnnaagctgtggaacgaatcttcgaagtcgaaactgcgtgtctacggattgaatctctgcagcagcttacgaccactgacccttttgcttttgattcaatcgatagacgacggatacaagttctcgctatcgccgagccggagccggagtctgagctgaagccctgtatctgtaactcttccaacagtggacataccttgagagatgaagatcgttcgcagggattttgttcgtaatggacccggaagcgttaagatggtggcagaggactctgatgatctctggtatgcttataacttgattgctgtgggcgatagtgtaatggctgtcactttcagaaaagttcagagagagatacctggtgggggaagagactctgaacgtgttaaactgaagctggaagtacaagttgaggaggtggactatgacaaagacggatctgttttgcgcatacgtggcaaaaatatcctggagaatgagcacgtaaagattggtgcattccatactttggaacttgagctgaaacgaccttttgtgttgagaaaggaaatgtgggactcaatggctcttgatacactcaaacaggcctcagatcccgctgctagtgctgatctagctgtagttctaatgcaagaaggactggcacaaatcttccttgtgggcagaagtgtgacaagtagccgtgcacgaatagaaacatccattcctaggaagcatggacctgcaattgctggttacgagtctgctttgaagaaattttttgagaatgttctgcaggcctttgtgaaacatgttgacttcagtgtcgttcgctgtgcagtagttgcaagtcccggcttcacaaaggatcagtttcatcgccacttattgttggaagcagaaagaagacaactgagacctattattgagaataaatcacgtataatattggtgcacacaaactctggatatagacatagcctgggtgaggttctccatgcccccaacgtgatgaatatgataaaagatacaaaagcagcaaaagaggtcaaagctctcaatgattttcacaacatgctttcaactgaaccagatcgggcatgctatggaccaaaacacgtggaagttgcaaatgaacgaatggcaattcaaacgcttctcataacggacgagcttttcaggaattctgacgtgaaaacaaggaagaagtatgtgaatttggtggagtcggtaaaagattcgggaggagatgcttttatattttcggcgatgcatgtgtcaggagaacaattggcacagctgactggaatagcagctcttctcaggttccctttaccagaactcgaagacattgagatgtaaaaaaatcttcggcttatagaaaacaatacaacaaatcatacacatctctcataatttatagtttatttgtactcagtgtcataaaaagagatttgtaactcattacaaattataagataaccattcgttgctgttttgttgttaagcaatttttctacataaaaaaaaaaaaaaaagggcggccgctctagaggatccaagcttacgtacgcgtgcatgcgacgtcatagtcttgtataggtcact

SEQ ID NO: 87286 - DNA, 639 bp, Arabidopsis thaliana columbia
  unsure (1)..(639): unsure at all n locations
actactatagggaaagctggtacgcctgcaggtaccggtccggaattcccggttcgacccatgcgtccggaaaagcacacgaagttatcgatggttttgctgaacgtgggcttcgttctcttggtgttgctcaacagactgtgcctgagaagactaaggaaagtgatggtagtccatgggagttcgttggtctgttgccactctttgaccccccaagacatgacagtgcggaaactattagacgagcccttgagcttggtgtcaatgttaagatgattaccggtgaccaacttgccatcggtattgagactggtcgtaggcttggcatgggaaccaacatgtacccatccacttcactccttggcaattcaaaggatgaatcattagttggcatccctatcgatgagctcattgagaaagctgatggatttgctggagtcttccctgagcacaagtatgagatcgtaaagaagctacaagagaggaagcacatttgtgggatgactggagatggtgtaaacgatgctccagctntgaagaaagcggatattggaattgcagtggcagatgctactgatgcggcaagaagcgcctcagacattgttctaacagaaccaggactaagcgtgataataagtg

SEQ ID NO: 87287 - DNA, 1626 bp, Arabidopsis thaliana columbia
  unsure (1)..(1626): unsure at all n locations
ggactcatattatagggaaagctggtacgcctgcaggtaccggtccggaattcccgggtcgacccacgcgtctcctttctatttaccgtgttccttcctttgaagtcattcttcaattcatcgctccattgttcttcagatttcaattttgctgggaaattttagagtaggcgactcctttgatcgccttatttcatttcgaaagttgagattttggatacgaccctcttgatctgacaccggaatgttggttagttaaatggagagaaaaaagaacaaaggacagtgaaccaggaccagtccctctgcttgtaccggttgatagatttgggtttctgaaacaggaacatggcagttctcctcaacgtttcaccaagactaaatcatctattaattatgagaaggaggagaagagagtgacaaaatggaggaagatgattggaactgggggtagtgattggaagcattacgttaggagaaaacctcatgttgtcaagaggcggattcgaaaagggatccctgattgcttaaggggtctcgtttggcaattgatctctggaagtcgagaccttttgcttatgaatcccggtgtttatgtgcaactggtgatttatgagacgtcggcatcagaactcgatatcattcgggatatatctcgtactttcccgtcacatgttttcttccagaagagacatggaccaggccaaagatcattatacaatgttctaaaagcatactctgtctatgacagagatgtcggatatgttcagggaatgggtttcatagccggtttgttgcttctttatatgagcgaagaagatgcattctggttattagttgcattactcaaaggagctgtccactccccaatagaaggattgtatcaggcagggcttcctcttgtacagcaatatctgttacagtttgatcagttggtaagagagctaatgcccaaactaggagaacatttcactcaagaaatgatcaatccgagtatgtatgcaagtcaatggttcataaccgtcttttcgtattcacttcctttccattcagcgctacgaatttgggatgtgtttctagctgagggtgttaaaatcgtgttcaaagtcggtttagcattattgaagcattgccatgatgatttgttgaaattgccatttgaggaactcatgcatgctctgaggaatttccctgaagatgccatggatcctgatactttgcttccattggcttattccattaaggtatcaaagcgtttggaagaaatgaaacaggattgtgacaaggccgttgctaaaccgactcaaacggccaaatcggttcgacaatagagtttgatattcttgaaccgaatcaaaccggaaagtggattctcgaagattcttctcattatttgtgcaaatttctatctttctctctttttttacaactcgtgtgaaaacaatagaagaattacttttgtaaaaatatatttcgactcaacaactttagattcttctttctttttggtaatgaaaagtcaaatttgagccttaaaaaaaaaaagggtaagaataaaaaaannggtaannnnnnnnnnnnnnnnnnnnnnnnnnnnnnnnnnnnnnnnnnnnnnnnnnnnnnnnn

SEQ ID NO: 87288 - DNA, 636 bp, Arabidopsis thaliana columbia
  unsure (1)..(636): unsure at all n locations
atgttacttcnnnnnnnnnnnnnnnnnnnnnnnnnnnnnnnnnnnnnnnnnnnnnnnnnnnnnnnnnnnnnnnnnnnnnnnccacgcgtccggtctcacacagcatagaaataatcgaaagatttctttttaaaatctgggatttgttttttttgttcattgatcattttcgattgttagagaagaatcaaatggcgatggctatggatcggatcgtcttctccccttcatcttacgtctatcgtccttgtcaagctaggggatccagatcttccagagtttccatggcttctacgattcgctctgcgactacagaggttacgaatggaaggaaactgtatatccctcccagagaggtgcatgtccaagtcaaacattcaatgccgccacaaaagttagagatctttaagtctttagaaggatgggctgatgaaaccctgttgacttatttaaaacctgttgagaaatcgtggcagcctaccgattttcttcccgaacctgagtcggaaggattctatgaccaagtcaaggagctaagggaaaggtgcaaggaacttcctgatgactattttgtggtgcttgttggggatatgatcactgaagaagcactttctacttaccagaccatgttgaaca

SEQ ID NO: 87289 - DNA, 520 bp, Arabidopsis thaliana columbia
  unsure (1)..(520): unsure at all n locations
cagctannnnnnnnnnnnnnnnnnnnnnnnnnnnnnnnnnnnnnnnnnnnnnnnnnnnnnnnnnnnnnnnnnnccacgcgtccgatcaaatccatcatccatggatttacctgaagaatgttgggaattaatctgcaaagctatcgatgaagacgattatcgattcctggaatctgtttcactcgtatcaaccttgttcctctcaatcaccaatcgcgttcgctctactttcgtcgtcaccgatcgagctgttcctttactcaatcgtcatctccttcgattccgcaacttgaagcgaatcaggttctctgatttcactcaggatctcaattcgattcttctccaggtttctcgttccggtttggatttcgaatcggtagatgtctcgcaaacgcgctatttcccagattttgagatgaagaatgtcaaggaattgaaatgttatggagttggaggttttagtgatagcgatctggtttccatcggagtgaattctccgttgctagagaagctggacatt

SEQ ID NO: 87290 - DNA, 590 bp, Arabidopsis thaliana columbia
tgtaccctcacaactagagctctcaggtctctcagaagcttgcaacaaactgtgggagctcgatttaaaccgccttgttcctggaagggattatcaaatcgactgcggagatgggaaaagggtccatgagagagctgatatggctgaaggactactgttctcttgggtgagcgaggaagtctctagaaaaccgactttcgccagattctgttcattgcttgacaactacaaccccaacgaaggttacaaagaagtggtcacagaagaagagaggcaagagcaagcggctttcattgaagaaattagcagaacctctgtgatcaagtaccttcacaggtaccttgtgctcaaggacgtcgctcctggaagctacttagagttcaagagaatgttgacaagtctctggttcgatctgtatggccgcggaggtacatctggctcatcttctgcgtttgagcatgtctttgtaggtgagatcaaacaatctggtggggaacaagtctctggattccataactggcttcaggtaaaacactttttgtcctccacctaccatgaattcaaatctctagaaagtccgattcaaaaca

SEQ ID NO: 87291 - DNA, 484 bp, Arabidopsis thaliana columbia
gatcttcattgctatgctagacataaaaagcaaacgggttcctagatggatgctatgaaagaagagattcaaagacttaacgaacaagacgagcaggccatgagggaggctcttggcttggcaccaaagtcctctacaaggccacaaggaaatcgccttgataagcaagagtttactgaacttgtgaagaggggttcgacagcagaggacttaggtgcagggaatgctgatcctgtgtgggttcacggtcttggatatgctaaagcaccacgaccttgggaagatccgagcacccttgcatcctctcagaaagaagatgcagattcagcacgcttaccagcagatacatcaggggtcaaaactgttgaacatggaccggatgatgttgagagggaccaaaagaaggataggcgtgaggaaaggaaacctgcaaagagagagaaagaacaaagacatgataggcgtgaaaaacgcgaaaggcatg

SEQ ID NO: 87292 - DNA, 675 bp, Arabidopsis thaliana columbia
  unsure (1)..(675): unsure at all n locations
caaagttctggcttttagcctcctgagtgtaaaatcaaggttgcaactttcagggtttcgaggtatcatccaacgaggggaggtgttcgcggtggtcgagatcaattcagttgggatgaagtcaaggctgataaatatagggagaactatttgggtcacagtatcaaagcccctgttggaagatggcaaaaaggtaaagatcttcattggtatgctagagataaaaagcaaaagggttccgagatggatgctatgaaagaagagattcaaagagttaaggaacaagaggagcaggccatgagggaggctcttggcttggcaccaaagtcctctacaaggccacaaggaaatcgccttgataagcaagagtttactgaacttgtgaagaggggttcgacagcagaggacttaggtgcagggaatgctgatgctgtgtgggttcacggtcttggatatgctaaagcaccacggcctttggaagatcccgagcacccttgcatcctctcagaaagaaggttcaggtttagcacggttnccagcaggtncatncaggggtcaaaacttttttaaggttggcccngnttntttttngggggccccaaanaggntttgcgtntgaaaggaaccttcaaagggggaaggntgaaagcnttttgggttaaaccggaagcttta

SEQ ID NO: 87293 - DNA, 738 bp, Arabidopsis thaliana columbia
  unsure (1)..(738): unsure at all n locations
cggtccgcgccgccaatntggggaggggggggagaatcgccggctcctatacgactcatatagggaaagctggtacgcctgcaggtaccggtccggaattcccgggtcgacccacgcgtccgcccacgcgtccgcggtcttggatatgctaaagcaccacgaccttgggaagatccgagcacccttgcatcctctcagaaagaagatgcagattcagcacgcttaccagcagatacatcaggggtcaaaactgttgaagatggaccggatgatgttgagagggaccaaaagaaggataggcgtgaggaaaggaaacctgcaaagagagagaaggaagaaagacatgataggcgtgaaaaacgcgaaaggcatgagaagcgaagcgctcgtgattcagatgatagaaagaagcacaagaaagagaagaaggagaaaaaaagaaggcatgactctgattctgattgaagcgaattgtcccaggatggaacattttgctcttcagaggaagagtggtcggctaggtaccaaaatccagctaccacttctgcaagatttaaatctgttgcttatttcatttacgaatcgtggagtaaagtgttgttgaacattgttgaaaatgtttgttaaaacacatgaaaaatgtggtttgatattataacaaaccgaaacaaaaaaaagaaaaaaaaagggcggcaactctagaggatccaagcttacgtacgcgtgcatgttacgtca

SEQ ID NO: 87294 - DNA, 734 bp, Arabidopsis thaliana columbia
  unsure (1)..(734): unsure at all n locations
tnnnnnnnnnnnnnnnnnnnnnnnnnnnnnnnnnnnnnnnnnnnnnnnnnnnnnnnnnnnnnnnnnnnnnnnnnnnnnnnnnnnnnccacgcgtccgagggtttaaagggagtttagttgactgggtgagtcagtatttgggtactggtagaagcaaagacgctattgatagaagcatatgtgataaaggacacgatgaggagatattgcagttcctgaaaatcgcatgtagctgtgttgtgtccaggcctaaggaaaggccaacgatgattcaggtgtatgaatctttgaagaacatggcagataaacacggtgtttcggagcattacgatgaatttcctctggtcttcaacaaacaagaagcttgagtatctttaccagaaagtagtcttttttggcagcttaagcgctaagaaggtatgagaaatctacttttgtatcagaagctttttttttttactttatatctcattctttgttccttccctcagtgttgttagtttttaaccgtgtcagtgctcgtgtttgtcttgtatctcccaccgtataattctgtacattcgtttgggtcattaatgtactctttggaatgtaacctcttctgatgaaatgagaagatttcagtcttatttccnnnnnnnnnnnnnnnnnnnnnnnnnnnnnnnnnnnnnnnnnnnnnnnnnnnnnnnnnnnnnnnnnnnnnnnnnnnnnnnnnnnnnnnnnnnnnnnnnnnn

SEQ ID NO: 87295 - DNA, 521 bp, Arabidopsis thaliana columbia
  unsure (1)..(521): unsure at all n locations
nnnnnnnnnnnnnnnnnnnnnnnnnnnnnnnnnnnnnnnnnnnnnnnnnnnnnnnnnnnnnnnnnnnnnnnnnnnnnntnacccacgcgtccgcccacgcgtccgggagagagaaaatccgccgataagattccgtacgactgcacgtctccgatctcgccgtgaatctgtctcgagagtctgttaactcaccggatctccgtcgttgatctgcctctgtttcgatccgtgttaaactcgatttaaaactatggatccgatggatatagttggaaaatcaaaggaagatgcttcgcttccgaaagctaccatgacgaaaattataaaggagatgttacccgcagatgttcgtgttgctagagatgctcaagatctattgattgagtgttgtgtagagttcataaatcttatatcgtcggagtcgaatgaagtgtgtaacaaagaggataaacgaacaatagcccctgagcacgtactcaaagctttacaggttcttggctttggggaatacgtagaagaag

SEQ ID NO: 87296 - DNA, 491 bp, Arabidopsis thaliana columbia
cggacgcgtggctctgaatctgactgacttcaaaggacacagcttttacttctataactgagcgaagcaggtgaaaaaatggcgaatcggaagttagagaagatggcatcgattgatgttcatcttcgtcaactggttcctggcaaagttagtgaagacgacaagcttgttgagtatgatgctttgcttctagatcggtttctcgatatcctccaggatttgcacggtgaagatctccgtgaaactgttcaagagctttatgagcattctgcagaatacgaagggaagcatgaacctaagaagctagaggagctagggagtgtgctaacgagtttagatccaggagattccattgttatcgctaaagctttctctcatatgcttaacttagccaatttggctgaggaagtgcagattgcttatcgccgtaggatcaagaagctgaagaaaggtgattttgttgatgagagctctgctactactgaatctga

SEQ ID NO: 87297 - DNA, 821 bp, Arabidopsis thaliana columbia
atggccgtctgcagtaccggaccggaattcccgggtcgacccacgcgtccgcctggacacattcaaagtcatatctgagctgccttcagattgttttggagcttatattatctctatggcaacttcacctagtgatgtgcttgcggttgagcttttacagcgcgaatgccatgtgaaaaatccacttagagttgttccactctttgagaagctagctgatcttgaagcagctcctgccgctgttgcaagactcttttctatagactggtacaaaaaccgtattaacggtaaacaagaggttatgattggttactcagattcagggaaagatgcagggcgtctctcagctgcttgggagctatacaaagctcaagaagagcttgtgaaggttgctaagaaatatggagtgaagctaactatgttccatggccgtggtggcacagtcggaagaggaggtggtcctactcatcttgctatattgtctcagccaccagatacagttaatggctctcttcgagtcacggttcagggtgaagtcattgagcaatcatttggggaggcacacttatgctttagaacacttcaacgtttcacagcagctactctagagcacggaatgaaccctccgatttcaccaaaacccgagtggcgtgctttgcttgatgaaatggcggttgttgcaactgaggaataccgatctgtcgtttccaagaacctcgattcgtcgagtattttcggctcgctactccggagctggagtatggacgtatgaatattggaagtagaccttcaaggcgaaacccagcgggggggacgaatct

SEQ ID NO: 87298 - DNA, 3368 bp, Arabidopsis thaliana columbia
  unsure (1)..(3368): unsure at all n locations
atcttaaacccttattccctaaacatctaatttggttccacgcgtccgaatccgcagagatttcttcttttcagaagaagtaagagggtggcgaagaagatttgattgatcggcgataatggcgggtcggaacatagagaagatggcatctattgatgctcagcttcggcaactcgttcctgctaaagtcagtgaagacgataagcttgttgagtacgatgctcttctccttgatcgctttctcgacattctccaggatttacacggcgaggatctccgtgaaacggttcaagagttatacgagctttctgctgagtatgaagggaagcgtgagcctagcaagcttgaggagctagggagtgtcctaacgagtttggatcctggtgactcaattgttatctccaaggctttctctcacatgcttaacttagccaatttggctgaggaggtgcagattgctcaccgtcgcaggatcaagaagctgaagaaaggtgatttcgttgatgagagttctgcaactactgaatccgatattgaagagacttttaagaggctcgtttcggatcttggtaagtctcctgaagagatctttgatgccttgaagaatcagactgtggatctggttttgactgctcatcctactcagtctgtgcgtagatcattgcttcagaagcatgggaggataagggactgtcttgctcaactctatgcaaaggacattactcctgatgacaagcaggagctagatgagtctctgcaaagagagattcaagctgcattccgaacagatgagattagaagaacacctccaaccccacaagatgaaatgagagctggaatgagttatttccacgagacaatctggaaaggtgtccccaagttcttgcgccgtgtggacacagctctgaaaaacattgggattgatgaacgtgttccttacaatgccccattgattcaattctcttcgtggatgggcggtgatcgtgatggtaatccgagggtcacacctgaggtcactagagatgtgtgcttgttggctagaatgatggctgccaatctctactataaccaaatcgagaatctgatgtttgagttatctatgtggcgttgcactgatgaattccgtgtgcgggcggatgaactgcacaggaactcaaggaaagatgctgcaaaacattacatagaattctggaagacaattcctccaactgagccataccgtgtgattcttggtgatgtgagggataagctgtatcacacacgtgagcgttcccgccaattgctgagtaatggaatctcggatattcctgaagaagctaccttcactaatgtggaacagttcttggagcctcttgagctctgttaccgatcactatgttcatgtggtgacagcccgatagctgatggaagccttcttgatttcttgaggcaagtctctacctttggactctcccttgtgagacttgacatcaggcaagagtctgaacgccacacagatgtcttggatgctatcaccaagcacttggacatcggttcctcctatagagactggtctgaagaaggccgacaggaatggcttcttgctgaactaagcggcaaacgtccacttttcggacctgatcttcccaaaaccgaagaaatttctgatgtcctggacacattcaaagtcatatctgagctgccttcagattgttttggagcttatattatctctatggcaacttcacctagtgatgtgcttgcggttgagcttttacagcgcgaatgccatgtgaaaaatccacttagagttgttccactctttgagaagctagctgatcttgaagcagctcctgccgctgttgcaagactcttttctatagactggtacaaaaaccgtattaacggtaaacaagaggttatgattggttactcagattcagggaaagatgcagggcgtctctcagctgcttgggagctatacaaagctcaagaagagcttgtgaaggttgctaagaaatatggagtgaagctaactatgttccatggccgtggtggcacagtcggaagaggaggtggtcctactcatcttgctatattgtctcagccaccagatacagttaatggctctcttcgagtcacggttcagggtgaagtcattgagcaatcatttggggaggcacacttatgctttagaacacttcaacgtttcacagcagctactctagagcacggaatgaaccctccgatttcaccaaaacccgagtggcgtgctttgcttgatgaaatggcggttgttgcaactgaggaataccgatctgtcgttttccaagaacctcgattcgtcgagtatttccgcctcgctactccggagctggagtatggacgtatgaatattggaagtagaccttcaaagcgaaaaccaagcggtgggatcgaatctctccgtgcaatcccatggatctttgcttggacgcaaacaagattccatcttcctgtatggttaggtttcggagcagcatttaggtatgcgatcaagaaggatgtgagaaaccttcacatgctgcaagatatgtataaacaatggccctttttccgagtcaccatcgatctaattgaaatggtgttcgccaagggagaccccgggatcgctgctttgtacgacaaacttcttgtctcagaagatttatgggcttttggagagaaactcagagccaactttgatgaaaccaaggacctcgtcctccagactgctggacataaagaccttcttgaaggagatccttacttgaaacagagactaaggctacgtgactcttacattacgaccctcaacgtttgccaagcctacacattgaagaggatccgtgatgcaaactacaatgtgactctgcgaccacacatttctaaagagatcatgcaatcaagcaaatcagcacaagagctcgtcaagcttaaccccacgagtgaatacgcgcctggacttgaggacacacttatcttaaccatgaagggtattgctgcaggattgcaaaacaccggttaagtgagtcagtgaaagaaaacaaaacttcgaatctctcttttttatctaccctttttaataatctctttttttctagaatccaaaataattacggttggattacagtttactttatgtatccaccgttgaaatcttaatcttccattgtatcaaacgtcactgactctgtttctggaagtgtaaacaagaacagagacagtgaatcttaatgttatcttctttgtctaaaaaaaaaaaaaaaaannnnnnnnnnnnnnnnnnnnnnnnnnnnnnnnnnnnnnnnnnnnnnnnnnnnnnnnnnnnnnnnnnnnnnnnnnnnnnnnnnnnnnnnnnnnnnnnnnnn

SEQ ID NO: 87299 - DNA, 542 bp, Arabidopsis thaliana columbia
  unsure (1)..(542): unsure at all n locations
atgatactccnnnnnnnnnnnnnnnnnnnnnnnnnnnnnnnnnnnnnnnnnnnnnnnnnnnnnnnnnnnnnnnnnnnnnccacgccgtccgcccaacctgacccgtctgggctcgccgcctcctatatctcttctctctcgattaatatctccaagagcaagcttcgttttcgtgtggtgtcgtttctaattgtgattttttaatattgcatcaaaatgtcgaagaagaggaaggctcgtagcggctacttgaagaagtcatcacaaggaggagacgaagctgtggtacagcgaagaaaactagttccaaaacctggtaaaattgggaaagagattgatgatatctttgctgggagatctcagaggacgccagaggtccaaaatcccgagtcgagagacacgccagaagcccaagtatccgagtcgagagacactagagctgagatgaatgagctcaatgttggggtcaataacaacactgaaagccgacctaggacgagaattctcagtaacgacacgggaccccgatccaggacgagacg

SEQ ID NO: 87300 - DNA, 599 bp, Arabidopsis thaliana columbia
  unsure (1)..(599): unsure at all n locations
tttnngganncnggcccgggcnaaccnggngnngcccccagacccatttccgggcgnggnccttggctggatgatggcnaatgtgggcaataccaccctgaaacggccttggccgagaattctcagtaccgacacgggcccccgatccaggccgagacgactcctcaggacgagacgaccactcaggacgagaactctccgtaacaacagggaaagccgacccagctcgagtatttttaataacgatacggaagatagccgacccaggaagacaactgaagacgggttacgagtgttcacggaaaatgaaattggtttcaacaggaaagatgctggtggtactcgtttttgtccctttgactgttattgttgcttctaaatcttcttaaaccatttcgttttgaaccttttgttttatggtgccaaaggagatttaactcgttctgctattaatggatgtatgatcttataacttaaaaccatatttttcgttcttgttcataataaaaaaaaaaaaaaattacattttactaaaaaaaaaaaaaaaannnnnnnnnnnnnnnnnnnnnnnnnnnnnnnnnnnnnnnnnnnnnnacatt

SEQ ID NO: 87301 - DNA, 1617 bp, Arabidopsis thaliana columbia
ccagataacgaccatttcttagattctccgtcgccgcctcttctagagatgagacaccaccaatcagcgacggagaacggtggtggttgcggagagattgtggaggtacaaggaggtcacattgttcggtcaacaggaagaaaagacagacatagtaaagtatgtacagcgaaaggaccacgtgaccggcgcgtgagactctcagctccgacggcgattcaattctacgatgttcaagatagacttggttttgatcgaccaagtaaagctgttgattggcttattactaaagctaaatccgccattgatgatcttgctcagcttcctccttggaaccccgccgatactcttcgtcaacacgccgccgctgctgctaacgctaaacccagaaaaaccaaaactttaatttctccgccaccgccacaaccggaagaaacagagcatcatcgaatcggagaagaagaagataacgaatcgagttttcttccggcgtcaatggattctgattcgatagctgacactataaagtcgttttttccggtagcttcaacgcaacagagctatcatcatcagccaccgtcacgaggcaatacacagaaccaagatcttcttcgtctctcgcttcaatctttccaaaatggtccaccttttcctaatcaaacagaacctgctctgttctccggccagagcaataatcagttagcgtttgactcatcgacggcaagctgggaacagagtcatcagtcaccggaatttggaaagatacagagactagtgtcatggaacaacgtcggagcagctgaatccgccggaagtaccggaggatttgtgtttgcttctccgtcgtcgttgcatccagtttatagccaaagtcagcttttatcacagaggggtccccttcagtccattaacacacctatgattcgtgcttggtttgatcctcaccatcatcatcatcatcatcagcagtccatgaccactgacgatctccaccatcatcatccctaccatatccctcccgggattcaccaatctgctattccaggcattgcatttgcttcaagtggtgaattctccggttttcgtataccagcacggtttcaaggcgaacaagaggagcacggcggcgacaacaagccgtcctctgcttcatccgattctcgccattaaacaagttccaaaaacacataagattgtgcaacacaacaggtttcttttcatattccagggcgcttcgaatgcgtggaatagtgaaggcggttttcgttgttgtgtgtttcgaatatccaaatggcctataaatctgatcaacagtttcaggttcttcttaagtctttaaaagcctaggccttggttaatttgaattcatcttgtatcaattagagaacgttctgtaagttcaattctgttttacaatgtttagctctagctacatgagctcacatcttgtttgttgtaacttgttctacaattacttgtcgtttctttatgttcttgtgttggaaacctttaaccccacttgaagctaaagtcttttgtttgccctttaaaaaaaaaaaaaaaaagggcggccgctctagaggatccaagcttacgtacgcgtgcatgcgacgtcat

SEQ ID NO: 87302 - DNA, 803 bp, Arabidopsis thaliana columbia
  unsure (1)..(803): unsure at all n locations
atgatacttccnnnnnnnnnnnnnnnnnnnnnnnnnnnnnnnnnnnnnnnnnnnnnnnnnnnnnnnnnnnnnnnnnnnnnnnccacgcgtccggaccggtttaactcccaagagctacttggagttgtcgtaaacacagagatcacaatcttaccaaattttcacacaccgacatgtctagatccttagctctcgtttacttagccttactttgtcttcaaacccatctctcaatctccgtcacagttccgattccgtcggtaaacggcgaaatcgacgcaatgctgaaccggaacggcgtaatcggagaggaagaaggagaggagatgatgccatcggagataagtcggagagtaatgatgatgcggaaacagtacataagctacgaaactttaaggagagatatggttccttgtcagaaaccaggtgcttcttattacgcttgtcgctctggtcaggctaatgctttcaacagaggatgtaagtgtcattactaggtgtgctagagacactaacgacatcaagacttgaaaacattggggtctttaagtacattttagttttaaactcagatgctctagaggcaagtgaaatcttattattcntgtcttttgttttgtaatgttgttgtttacattagatttcttaattattgatatgtaattttggctattaatgttcaagtaattgatatttatagtcttgaaaaaaaaaaaaaaaaaaaaaaagggcggccgctctagaggatccaagcttacgtacgcgtgcatgcgacgtcatagtattctatagttgtcctaaat

SEQ ID NO: 87303 - DNA, 534 bp, Arabidopsis thaliana columbia
  unsure (1)..(534): unsure at all n locations
tacgactcactttanggagagctagcacgcctgcaggtaccggtccggaattcccgggtcgacccacgcgtccgaaatcataaccggtggaaatggaccagctcttctcataaatggtgtcaaaaggccaatgccacttgttcggattttggaagttgaattgtatcctactttgctttcaaaagcccggagttttggtctgagtgatgaatggatccaagtcctagtcaagaaggatcctgttagacgtcaagttctgcgtgttaaaggttgcctggcaggatcaaaagctgaaaaccttcttgaacaaggcgatatggttctggcagtcaataagatgccagttacatgcttcaatgacatagaagctgcttgccaaacattggataagggtagttacagcgatgaaaatctcaatctaaccatccttagacagggccaagaactggagctcgtagttggaactgataagagagatgggaatgggaccacaagagtgataattggtgcggatgccgttgtcaagaatcttat

SEQ ID NO: 87304 - DNA, 530 bp, Arabidopsis thaliana columbia
  unsure (1)..(530): unsure at all n locations
cccacgcagacactgtgacactctagcaccttcagttccgtacaacaatggctctccaagctgcctattctcttcttccttctaccatttcaatccaaaaagagggcaaattcaatgcttctctaaaggagacgacttttactggttcttcattttcaaaccatcttagagctgaaaagatatccaccctgttgaccatcaaggaacagagaagacagaaaccgcgattttccaccggtattcgtgcacagacagttacagccacgccgccggcaaacgaagcatcgccggagcaaaagaagactgagagaaaaggcactgcagtgatcactggagcttcgtctggtttaggtttagctacggccaaagctttagcagacacagggaaatggcatgtgatcatggcttgcaggaactttctcaaggccgagaaggcagcgagatctgttggaatgtccaaggaagattacacagtgatgatctgctcgtttaacngaanattcgtgaattcggggaaganacnncgtttc

SEQ ID NO: 87305 - DNA, 2497 bp, Arabidopsis thaliana columbia
ccacgcgtccgcccacgcgtccggggtttaatgtcttcttcttcttcttcttcgttatttctattctagaagagagagagagagaaagacaaggacgatcgttaaatctttttctcttaaatcttagaatttcaaagtctctgtaatttttttctcttttcatttgtatagcacaattgttcttaatcagagattcgtgagaggtaaaggtagcgtaattattcagtttgcgtgatctataatttaactggcgccagattgtgatccaggaatcgttggcttgttaggttgttgttttgttatgcataattgagagatggtggtcaaaaggaagttaaattgtggtggctctaatggttttgatttccccaatattcccaaggctcctcgttcaagcaggaggaaggtctcaggtaagagatctgatgatgaaagtgagatctgtgcaattgatttgctagcttctcttgctggaaagttgttggaagaaagtgaaagttcctcaacgtctacctatgcatctgaagctgataatcttgatcatttgggtggactgattaagcaagaacttgaagatggctatactactaagccttgtaaatccgagtttttcgatccaggaaaccctgcttcaaagtctactagtgaaaatactagcgtgacttgtttgccattttcgtctttcgaaaatgattgcattttggagcaaacaccggtttctgattgtaagagggcatctggtttgaagtccctggtagggagcatcactgaggagacatgtgttgttaatgaggatgccggatctgaacaaggtgctaatactttcagcttaaaggatccaagtcaattacattcgcagtctccagaatcggtccttctggatggcgatgtgaaattagcaccatgcacggatcaagtccctaatgattcttttaaaggatataggaatcattctaagttagtttgcagagatgatgacgaaaactattgtaagtattataaatttagtgacaaatgtaagtcatataggcctctctcccgggttggcaatagaagaataatgcagtcggtgagagcaatctccaagttgaagtgttttgaagacactagaacagatggtcgtttgaaggctctctaccgcaagagaaaattatgttatggttacaacccatggaagcgtgagaccattcataggaagagaagattgtctgacaaaggtttggtcgtaaattatgatggtgggctcagtagtgaaagtgtttccaattcacctgaaaagggagaatcagaaaatggtgatttctctgctgcaaaaataggtcttctttcgaaagactcccgtgtaaagttcagcatcaagtcccttaggattccggagcttgtaattgaagttccagaaacagcaacagtaggcttactgaagaggacggtgaaggaggcggttactgctttactcggtggtagaatacgtattggggtgttagtccaagggaaaaaagttagagatgacaacaacactctatcacagactggtctttcgtgtagagaaaatcttggcaaccttggcttcaccttagagcctggtttggaaacactgcctgtacctctttgttctgaaactcctgtcctttctctgccaactgactctacaaagttgtcagaaaggtccgcagcttctccagcgttagagactggaattcctctccctcaccaagatgaagattacttgattaatttgggaaatagtgtggagaacaatgatgaattagtcccacatctgagtgacataccagctgatgaacaaccttcatcagatccaagagcgctggttccagttttggccttggaatccgacgctcttgcacttgttccagttaacgagaaacctaagcgtacagagctttcacaacgcagaaccaggagaccattctctgttacagaggtagaagctctagtaagcgcagttgaagaagttgggactggaagatggcgtgatgtgaagttgcgttcttttgagaatgcaagtcatcgaacctatgtggacttgaaggacaaatggaaaacgttggttcacacagcaagtatatcaccacagcaacgaagaggagaaccagtgcctcaagaactgctagacagagtcttaggagcacataggtactggacacagcaccaaatgaaacagaacgggaaacatcaggtggctacaacaatggtggttgaagcaggttcgtccatgtaaagaaggagaatggtaataacaataactttcacttgacgactaaggaaccaaagtgggcaactgtacaaagggaaacaacaaaatacagaaacatacttaatttctgaaaagaagagtctatatttttattttttttaaatcatagctggtagaaacaagacgttccttgacacttttggttacttttatggtaagtctgttcattccaaatttctaatcgatttgattatgtaatttggtggtaggaccatggaaaaa

SEQ ID NO: 87306 - DNA, 369 bp, Arabidopsis thaliana columbia
gctctccgcaccatgtgaaaggttggtgtagtggcaagaactctttcgaatctgaacgccttaagctctgagagacgagcattttccagaaaattcccattacctaatccccaggattcgatgaacccagaaatgatggttttcgaaaggctctagctttctcaaatccagattttgctgaggagctcgttgaaagaatgcacgctagaccatctctctcttgtcctttgtcgttcagatcgtttctctttcagcgtgatattagagtacaatactagataccgtgaggtcctttgtattattggaccttgagttgtcctgtctaagtgggataacctttctagtgaacattttcttggtcagttcatc

SEQ ID NO: 87307 - DNA, 527 bp, Arabidopsis thaliana columbia
  unsure (1)..(527): unsure at all n locations
atgatactccnnnnnnnnnnnnnnnnnnnnnnnnnnnnnnnnnnnnnnnnnnnnnnnnnnnnnnnnnnnnnnnnnnnnnnccacgcgtgggcccangcgtgcgagatatgacagatcgagcgccccaaaggattgccgtgtatcaggatggctaggtgacatagatatggagactgagacaatgccccttcttacagaattcagttacgacttagacaggtccaatgcacagacattcgacattgcagacgctgctcactcaggacttgtcaacactgtcaggctagacttcaattccaaccatggaagctcttcacacacttgcatctaccgcttcagggttcatggccgtgaactagactcagtctctgttgctcatgcttgatctgaaagtccacgtcaaacttttcttctctttggaacattccctctaatagatatctctcttctttttttggggtagtttatgtgggggggaaagcttttcttagtctgtaatcagaatcatttgggtggattgcggatta

SEQ ID NO: 87308 - DNA, 564 bp, Arabidopsis thaliana columbia
  unsure (1)..(564): unsure at all n locations
tnnnnnnnnnnnnnnnnnnnnnnnnnnnnnnnnnnnnnnnnnnnnnnnnnnnnnnnnnnnnnnnnccacgcgtncgcggacgcgtgggttgagactaccctgtggagaaacttgcttgctacttgtcagacgatggaggagctttgctaacatttgaagccttggctcaaacagctagctttgcaagtacatgggtgccattttgcaggaaacacaatatagagccaaggaaccctgaggcctactttggacagaagcgtaactttctcaagaacaaagtcaggctggattttgtgagggaaaggaggagagtgaagagagaatatgatgagtttaaggtcagaatcaactcattgcctgaagcgataaggagaaggtctgatgcttataacgtgcacgaagagctaagggctaagaagaaacagatggaaatgatgatgggaaacaatccacaagaaactgttatagttccaaaggccacttggatgtcagatggttctcactggccagggacttggtcctctggagaaaacgataactctcgaggagatcatgctggaatca

SEQ ID NO: 87309 - DNA, 470 bp, Arabidopsis thaliana columbia
  unsure (1)..(470): unsure at all n locations
cggacgcgtgggtttagctatttcacctccattttcttcgatcagtgcttgaaccatgagcctacctagctcgcaccttaaggaggtgattcagtttacaagcaaaatggtgaagatttgctgcattggagctggatatgttggtggtccaaccatggctgtcattgctctaaagtgtccatctgttgaagtagctgttgttgatatctctgtgccaaggatcaatgcctggaacagtgatcagttaccgatctatgagcctggtcttgatgatgtcgttaagcagtgccgtggaaagaatctcttcttcagcaccgatgttgagaaacatgtgagagaggctgacattgtttttgtgtctgtcaacacccctactaaagacccggggcttggagctggcaaagctgcggatttgacttactgggagagcgctgctcgtatgatttccgatgttttgggtttccnacaaa

SEQ ID NO: 87310 - DNA, 1508 bp, Arabidopsis thaliana columbia
  unsure (1)..(1508): unsure at all n locations
ttcatagtctcattacatcatcgtgaagagtttcgatcatcaaccgttcgttttcttactatataaaccttgctcgagacctgcgtgtgaagcgtataaagacgacaaagtaaaccaaaaaaaaaaagagttctcctacaattttcctaaattcttggatttgagatttcactttttccgatttgaaacaatgatgataactcgcggtggagccaaggcggcgaaatcgctgttagtggcggctggaccacgtttgttctcgacggtccgtacggtttcgtctcacgaggctttatcagcaagccatattttgaagcctggtgttacatctgcttggatatggactagagctccgacgattggaggtatgagattcgctagcacgatcactctgggagagaaaactccgatgaaggaggaggacgcgaatcagaagaaaacagagaacgaatccaccggtggagacgccgccggaggtaataacaagggagataaaggaatcgcgagctattggggtgttgaacctaataagattactaaagaagatggttctgaatggaagtggaactgtttcaggccatgggaaacgtataaagctgatataacgatagatctgaagaagcatcatgttccaacgacgtttcttgatagaatagcttattggactgttaaatctcttcgttggcctaccgatttgttcttccagaggagatatggatgtcgagctatgatgcttgaaactgtagcagcagtacctggaatggttggaggaatgttactacactgcaaatcgcttcgacgttttgagcaaagtggaggatggattaaggctcttcttgaggaagcagagaatgagagaatgcatcttatgacattcatggaagtcgcgaaaccgaaatggtacgagagagcgctcgtgatcactgtgcaaggagtcttcttcaacgcttatttccttggttacttaatctctcccaagtttgctcatcgtatggttgggtaccttgaagaagaagcgatccattcttatactgagtttctcaaggaacttgacaaaggtaacattgagaatgttcctgctccggctattgctattgattactggaggcttcctgctgatgcgacacttcgtgatgttgtgatggttgttcgtgctgacgaggctcatcaccgtgatgtaaaccattttgcatctgatattcactaccaaggtcgtgaactaaaggaagctccagctccaattgggtatcattgattcgattaaaagaagagctttttctcaagtttaaaactttgttctaaagaatttaagttctttgacttgtatatacatcatcacctctgcttaagccatacttggattcggctttctttgaatgttgctacgaatgttctgatttcttctttacttttcctgtcaatgggcttttgggcttatcttttgctattgtatggccttgcatttagaatgagagtaatagtttgtagaagctgctnnnnnnnnnnnn

SEQ ID NO: 87311 - DNA, 471 bp, Arabidopsis thaliana columbia
agcccacgcgtccgcccacgcgtccgcccacgcgtccgaaaaaaagggttaggtggatctctcatgaaatcggtggagctcccccatatcttttttaaatagctttcttcttttggccccttacccagagatagattcttatatactactgagaatcttcaatttctgcaacttttgtatctcttcctgatggagtcttcaagtccccaccatagtcacattgttgaggttaatgttggaaaatctgatgaagagagaataattgtggcgagtaaagtctgtggagaagcaccatgtgggttttcagattctaagaatgcttccggggatgctcacgaacgctctgcttctatgcggaagctttgtatcgccgtcgtgctgtgtctagtgttcatgagtgttgaagttgttggtgggattaaagccaatagtttagctatattaaccgatgcagctcatttgctctctgac

SEQ ID NO: 87312 - DNA, 1490 bp, Arabidopsis thaliana columbia
aaaaagggttaggtggatctctcatgaaatcggtggagctcccccatatcttttttaaatagctttcttcttttggccccttacccagagatagattcttatatactactgagaatcttcaatttctgcaacttttgtatctcttcctgatcaccaaataagaaaactcttgtggttctattgaattgggtttccactatctttattgtagagatggagtcttcaagtccccaccatagtcacattgttgaggttaatgttggaaaatctgatgaagagagaataattgtggcgagtaaagtctgtggagaagcaccatgtgggttttcagattctaagaatgcttccggggatgctcacgaacgctctgcttctatgcggaagctttgtatcgccgtcgtgctgtgtctagtgttcatgagtgttgaagttgttggtgggattaaagccaatagtttagctatattaaccgatgcagctcatttgctctctgacgttgctgcctttgctatctccctcttctcattgtgggctgctggctgggaagcgactcctaggcagacttacgggttcttcaggattgagattttgggtgctcttgtatctatccagctcatttggttgctcacgggtattctggtttatgaagcgattatcagaattgttacagagaccagtgaggttaatggattcctcatgtttctggttgctgcctttggtctagtggtgaacatcataatggctgttctgctagggcatgatcatggtccacagtcatggacatgggcatggcacggccatgaccatcacaatcatagccatggggtgactgttaccactcatcaccatcatcacgatcatgaacatggccatagtcatggtcatggagaggacaagcatcatgctcatggggatgttactgagcaattgttggacaaatcgaagactcaagtcgcagcaaaagagaaaagaaagagaaacatcaatctccaaggagcttatctgcatgtccttggggattccatccagagtgttggtgttatgattggaggagctatcatttggtacaatccggaatggaagatagtggatctgatctgcacacttgccttttcggttattgtcctaggaacaaccatcaacatgattcgcaacattctagaagtattgatggagagtacacccagagagattgacgccacaaagctcgaaaagggtttgctcgaaatggaagaagtggtggctgttcatgagctccacatatgggctatcacagtgggaaaagtgctattggcttgccatgtcaatatcagaccagaagcagatgcagatatggtgctcaacaaggtaattgattacatccgcagggagtacaacattagtcatgtcacgatacaaatcgagcgctaaaagctaagtaagatctgatgaagggtttttgtatcagcattctcattaacaataaaatcaataaagtttctactcgtgcc

SEQ ID NO: 87313 - DNA, 529 bp, Arabidopsis thaliana columbia
caaagatacaaagcaatagaacaacaagaacaagaaaacagagaaaaaaacaatggctgccttgtcggataagttagcggatgcttaccagaacgcaaggccgagatatccgatcgattggttcacgaaacttgctgctcgaaccggtcagcacaaatcagcttgggatgttggtactggcaacggtcaagcagctattggtcttgcagagtatttcgagaaagttacagcaaccgacataaacgaagcacagttaaaacgagcggtaaaacacgaaagaatcagttaccatcacactcccacaacaatgtccgaagaccaaatggttgctctagtcggcggagataactccgttgatctaatcgtggcagcacaagccgttcactacttcgttcttggcaccattcttcaacgtggcataaccgctgttcttcgcaaagaaggaggattaatcgcagtttttgtctacaacgacataatcatctctcctgaagttgattccatcatgaaacgtcttgtggactccacg

SEQ ID NO: 87314 - DNA, 517 bp, Arabidopsis thaliana columbia
acgactcactattgggaaagctggcacgcctgcaggtaccggtccggaattcccgggtctacccacgcgtgcgcggacgcgtgggcggacgcgtgggccaaattgcacttccttcaaacttattcgacagtagactagctcaagtacctttggatggcgtcgaggcccggagctcttacggagtggccatggagtccccttggtagcttcaagtacctcttggtggccccggtggtgatggcgagcatgcactcgtacgtgacggctgtggatgaggagaaagacctcagcagacttatgatagtcgtgttgatgctgtggagaatagttcacagccagatatggatcagcgtgtctcgccagaggacggctaagggaacgaacaagatcgtggacaagcccattgagtttgagcaagtggaccgagagcgcacttgggacgaccaagtcatcttcaacactctcctcatgtatctcgcaaacatcaagctcccaggcgcctcccaccttcccccat

SEQ ID NO: 87315 - DNA, 531 bp, Arabidopsis thaliana columbia
  unsure (1)..(531): unsure at all n locations
nnnnnnnnnnnnnnnnnnnnnnnnnnnnnnnnnnnnnnnnnnnnnnnnnnnnnnnnnnnnnnnnnnnnnnnnnnnnnnnnnnccacgcgtccgcccacgcgtccggcagaagagatgaatcctgaaggttcacgataccagcttcttctctcatgtccttctggcctctctccgtctcaggtctcagtggatttctcgaaatcgcatgatcggattcctcgtcaagatcctggtctagaagattctatttcacaggtttgggagcagagatcacagggaaattcatcattgttcaatggccaaaaatttaggtatggaggatattgtttagatgatgatgatggtagtaccaatgaagtgccacacgtttgtcttcgtcttggcctgacagattacaggacttttgtaggaacgaatttgagttctctgtgggagaagttccttgttacatcagaagatgactctgttagatgtcgacacacctcaagtccattgggaaatggtgcagttatcgaaacttctgataagaag

SEQ ID NO: 87316 - DNA, 452 bp, Arabidopsis thaliana columbia
  unsure (1)..(452): unsure at all n locations
ctcatataatagagttttctttctattctcctctgcttaatttcccagaaatnactctttctgtgcttatcggattcaatagattcttagtaaatcgtaatggagacaccatcatcgacaagaagagtcacgagatctcagacccgctgtgctatcaataatctcttatcctcaaagaaagcggatgattggtcagataaatgtcaatcgaagtcggtacaaagaaacggtgcaaaagacaggtctgcgttgtttgacataaccaacgactcaccgatcgtaggtctggcgatgcagacaccgtcctcaggagtttgttgggaaggggaacatgagcagaatcaataacactcctgggtctggtgaggctctctttagaggccaagtcaagacctctcttgcagaaggttgaggaagaagcagatctcaccaagatttcgttggaatctcgt

SEQ ID NO: 87317 - DNA, 434 bp, Arabidopsis thaliana columbia
tcccactcactttagggaaggctggtacgcctgcaggtgccgggccggattccgggtcacccagcgtccggggagcggatgattggtcagataaatgtcaatcgaagtcggtacaaagaaacggtgcaaaagacaggtctgcgttgtttgacataaccaacgactcaccgatcgtaggtctggcgatgcagacaccgtcctcaggagttgttgggaagaggaacatgagcagaatcaataacactcctggatctggtgaggctctcttgagaggccaagtcaagactctcttgcagaaggttgaggaagaagcagatctcaccaagatttcgttggaatctcgccctttcatccatctcgttacttctcccatgggtcttctcgccccaactccggccaacaccccccaagttcttggtttctcagacgaagtg

SEQ ID NO: 87318 - DNA, 300 bp, Arabidopsis thaliana columbia
  unsure (1)..(300): unsure at all n locations
gtggggagacaaagaatttgtcttggagatagtagacgaggatacgagcttcttcgagggttagggatgagatttcggatccgatcttctcgattttctccggagcttcgacggcggcgattggaagaagatgggttgcacggtgggtcaatgtggatgatgaaccaccaccgaagcgagaggggaattcgatggtggtggttngggaagggccgtgccggacgttttttatagtcggacgagttgaggaacggattgttgttgagattaagagagtcgtagacgccatttttgtttcac

SEQ ID NO: 87319 - DNA, 846 bp, Arabidopsis thaliana columbia
  unsure (1)..(846): unsure at all n locations
ggataacnnnnnnnnnnnnnnnnnnnnnnnnnnnnnnnnnnnnnnnnnnnnnnnnnnnnnnnnnnnnnnnnnnnnnnnnnnnncttttgggttttttttttttaatttttttttttttttttttttgtttggggaaaccaaatgtgattcaaattacaacaatttcttaacaattccagacgcaaacttttctaaacaacacaaaagaccaatcaaattccaaaaaagataacaacttctttttttttttttataaaaaccttaagcaatggagactttaacaccagcttttttaaaaggctttttagcttcttcagcttcatctttagggaaacctttttttaacctcctttggtgatccttcggattagcctccttagctcccttcaacgccaagctagtcaaagccctaacagctttaattactgctaatacggagaactactcggaactttcattgataaccacatcgaactctgtttgctcctccaactacagcccgccgcgccaccgtcggctggagcaaccaccccccgctgctgcgggggctaaagagagtggggagacaccgaatttgtcttggagatagtcgacgaggatacgagcttcttcgagggttagggatgagatttcggatccgatcttctcgattttctccggagcttcgacggcggcgattggacggagatgggttgcacggtgggtcaatgtggatgatgaaccaccaccgaagcgagaggggaattcgatggtggtggttcgggaagggaagtgattgatggaagcgagagtaggcggccgcgaggtcgatatcaagcttagctataccgtcgaagcctagggggg

SEQ ID NO: 87320 - DNA, 562 bp, Arabidopsis thaliana columbia
  unsure (1)..(562): unsure at all n locations
gaaaccaaattgattcaaagtacaacaatttctcaaaagctgaatcaataactcaaacacaaactatactaaacaacaaaaagactcataaattccgaaaatatcacatttttttttttccgattgttgaagaaacttaagcaatggagactttagcaccagcttcttcaagagtcttcttagcttcttcagcttcatctttagtgataccttctttaaacttctttggtaatccttcgattagctccttagcttccttcaacgccaagctagtcaaagccctaacagctttaattactgcaataccgagaactactcggaacttccattgataaccacatccgaactcctggttggctcctccaactaacagccggcgcggccaccggtcggctgggagctggcaaccggccgctgctgcgggggggtaagggcgaggtgggggnggcacccgggatttgggccttgggggatagcccgacgcggggntacgggggttcttcggggggggaagggggggggtcggtgccggggccccggtttccccgngttgctccggggg

SEQ ID NO: 87321 - DNA, 693 bp, Arabidopsis thaliana columbia
  unsure (1)..(693): unsure at all n locations
gattttttttaaaccttnnaggaatttgccacccctaaagctctnacccttaanttaactttagaacccntttanctnttggaaccctngatngcccctagctccttaaaccncaacctaagtaaaaccctnaaaanctttaattccttnaatccaaaacctacccgggaccttaattataaccacatcgaactctgtttgctcctccacttacagccgccgcgccacccgtcggctggaacaacaaacccccgctgctgcgggggctaaagaagagtggggagacaccgaatttgtcttggagatagtcgacgaggatacgagcttcttcgagggttagggatgagatttcggatccgatcttctcgattttctccggagcttcgacggcggcgattggacggagatgggttgcacggtgggtcaatgtggatgatgaaccaccaccgaagcgagaggggaattcgatggtggtggttcgggaagggaagtgattgatggaagcgagagtaggataagatgaggaacggattgttgttgcgattgagagagtcgtcgacgccatttttgtttcactctttggcttttcttctgagtttttcttctctctgtgtgtttcggacgcgtggnnnnnnnnnnnnnnnnnnnnnnnnnnnnnnnnnnnnnnnnnnnnnnnnnnnnnnnnnnnnnnnn

SEQ ID NO: 87322 - DNA, 893 bp, Arabidopsis thaliana columbia
  unsure (1)..(893): unsure at all n locations
cgattgtnnnnnnnnnnnnnnnnnnnnnnnnnnnnnnnnnnnnnnnnnnnnnnnnnnnnnnnntttttttttttttttttggcttgttgtctttttctgtaatacgaaaccaaattgattcaaagtacaacaatttctcaaaagctgaatcaataactcaaacacaaactatactaaacaacaaaaagactcataaattccgaaaaatatcacatttttttttttccgattgttgaagaaacttaagcaatggagactttagcaccagcttcttcaagagtcttcttagcttcttcagcttcatctttagtgataccttctttaaacttctttggtaatccttcgattagctccttagcttccttcaacgccaagctagtcaaagccctaacagctttaattactgcaatacgagaactactcggaacttcattgataaccacatcgaactctgtttgctcctccactacagccgccgcgccaccgtcggctggagctgcaacggccgctgctgcgggggctaaggagagtggggagacaccgaatttgtcttggagatagtcgacgaggatacgagcttcttcgagggttaaggaggagatttcggatccgattttctcgattttctccggagcttcgacggcggagataggacggaggttgattgcacggtggctagaagaagagctgagacgaaatgggaattcgattgcggtgggtttggaaaggaagtgatgagtggaagcggaagtgagaggagaagaggaacggattgttgttgcgattgagagagtcgtcgacgccattgtttctcactctcttcttcttcttcctctgaagctttgggatttgttttgtgcggacgcgtgggtcgacccgggaattccggaccg

SEQ ID NO: 87323 - DNA, 819 bp, Arabidopsis thaliana columbia
  unsure (1)..(819): unsure at all n locations
acgtcgcatcgcacgcgtacgtaagctcggaattcggctcgagctatattagcaatggcggttgcagctctagttgagattaaacgaaagggagtggctaaagactccggcttgcttgactcgaaagaaaccttacccgtgactttcctatggatcgcacttcagtatcttttcctagggtcagccgatctattcacactagctggactactagagtatttcttcacggaagcaccttcctcaatgagatctctcgcaacatcgctctcgtgggcttctttggctatggggtattacctaagctcagagatcgtgtccatagtaaacagcatcacaggaagctcagggaacacaccttggctcagaggaaaaagcataacccgttacaaactagactacttctattggctaatgtgtgttcttagtgcagctaacttcttgcactacctcttttgggcaatgcgttacaagtatagatcaactggttcaagaagctaaaattggatgggcaacttttgagttttttttttgtttttaattagagcagaaaatgtttttacttgagcggctgttatataacacatgataaatgggggtaagtagtaatgttgtgatcaggtatatattggggtttgaagtttttatcgttggacaagtaatgtacagcgaatgatattaacttgctttaagtctttcttttgttaaaaaaaaaaaaaaaaggnnnnnnnnnnnnnnnnnnnnnnnnnnnnnnnnnnnnnnnnnnnnnnnnnnnnnnnnnnnnnnnnnnnnnnnnnnnnnnnnnnnnnnnnnnnnnnnnng

SEQ ID NO: 87324 - DNA, 638 bp, Arabidopsis thaliana columbia
  unsure (1)..(638): unsure at all n locations
gaanacaagctnctaaaagcttcttactnttaacttaactttaaggaaaacctnctttaacctctttggnacaccctcgaattacccccttaccttccttcaaccccaagccctagttaaacccctaacaaccttttaaccacttggaaatacggggaacttcctgggaaccttctttgattcccnacatcgaacctcttgtttgccccctccaactaaaagcccgccgcgcnacccgtcggctggagcagcaaccggccgctgctgcggggcctaaagaagagtggggagacaccgaatttgtcttggagatagtcgacgaggatacgagcttcttcgagggttagggatgagatttcggatccgatcttctcgattttctccggagcttcgacggcggagataggacggaggttgattgcacggtggctagaagaagagctgagacgaaatgggaattcgattgcggtgggtttggaaaggaagtgatgagtggaagcggaagtgagaggagaagaggaacggattgttgttgcgattgacagagtcgtcgacgccattgtttctccctctcttcttcttggtcgtaaaaagctttggaatttgttttgtgcgaatgtgtggaacgccccgggttt

SEQ ID NO: 87325 - DNA, 972 bp, Arabidopsis thaliana columbia
  unsure (1)..(972): unsure at all n locations
nnnnnnnnnnnnnnnnnnnnnnnnnnnnnnnnnnnnnnnnnnnnnnnnnnnnnnnnnnnnnnnnnnnnacctttctttttttttttttatttttaactctgtttcatgttaagcaactaccgagtgattcgcctcatttaggcatttcaacaaacaatgttatgtgcagctaccaaaaagctcacatcaatggcgaaatcagctaatgggaaaccaaatgtgattcacattactacaatttctcaacaattccagacgcagactatactaaacatcacaaaagaccaatcaaattccagagaagataacaacttcttttttttttttttttataaaaaccttaagcaatggagactctagcaccagcttcttcaagagtcttcttagcttcttcagcttcatctttagagataccttctttaaacttctttggtaatccttcgattagctccttagcttccttcaacgccaagctagtcaaagccctaacagctttaattactgcaatacgagaactactcggaacttcattgatacccacatcgaactctgtttgctcctccactacagccgccgcgccaccgtcggctggagcagcaaccgccgctgctgcgggggctaaagagagtggggagacaccgaatttgtcttggagatagtcgacgaggatacgagcttcttcgagggttagggatgagatttcggatccgatcttctcgattttctccggagcttcgacggcggcgattggacggagatgggttgcacggtgggtcaatgtggatgatgaaccaccaccgaagcgagaggggaattcgatggtggtggttcgggaagggaagtgattgatggaagcgagagtaggataagatgaggaacggattgttgttgcgattgagagagtcgtcgacgccatttttgtttcactctttggcttttcttctgagtttttcttctctctgtgtgttttga

SEQ ID NO: 87326 - DNA, 678 bp, Arabidopsis thaliana columbia
  unsure (1)..(678): unsure at all n locations
ttntacccaaagcctnaatccgaaatccccatttttttnncgattttgaaaactttaccattgngctttncccccanttnttcaagggtnttcttnacttttttcagcttcatctttagtgancccttctttaancttctttggtaanccttcgatnaccnctttacctcctttcaaccnccaagcttattcaancccttaccagctttaattacttgcaatacgagaacttactcggaacttcattgataacccacatcgaactctcgtttgccccctccaactacaagccgccccgccaccgtcggctggagctgcaacccgccgctgctgcggggcctaaggagagtggggagacaccgaatttgtcttggagatagtcgacgaggatacgagcttcttcgagggttagggaggagatttcggatccgatcttctcgattttctccggagcttcgacggcggagataggacggaggttgattgcacggtggctagaagaagagctgagacgaaatgggaattcgattgcggtgggtttggaaaggaagtgatgagtggaagcggaagtgagaggagaagaggaacggattgttgttgcgattganagagtcgtcgacgccattgtttctcactctcttcttcttcttcctctgaagctttgggatttgttttgtg

SEQ ID NO: 87327 - DNA, 2211 bp, Arabidopsis thaliana columbia
  unsure (1)..(2211): unsure at all n locations
nnnnnnnnnnnnnnnnnnnnnnnnnnnnnnnnnnnnnnnnnnnnnnnnnnnnnnnnnnnnnnnnnnnnnnnccacgcgtccgcaaagtttgagagaaagaaagagagagaatggaagtggaagaagaggtctcaagatgggaaggctacgccgattggagaaacagagcagccgtgaaaggccgtcacggtggcatgctcgccgcctctttcgtcttagtggtggagatattagagaatctagcgtatttggcgaatgcgagtaatcttgtgctatacctaagagaatacatgcacatgtctccatcaaaatcggcaaatgacgtcaccaatttcatgggcacagcttttctcctagctctcctcggtggtttcctctccgacgctttcttctccacttttcaaatcttcctcatctcagcttccatcgagtttttgggattgatcatactcacaattcaagctcggacaccatccttaatgcctccatcgtgcgatagtcccacatgtgaagaagtgagtggttcgaaggcagcgatgctattcgtggggttgtaccttgtagctttgggtgtgggagggatcaaaggttcattagcatctcacggagcagaacagtttgatgagagtacacctaaaggtcggaaacaaaggtcaacgttctttaactacttcgtgttttgtcttgcttgtggagcactagttgctgtcacgtttgtagtttggttagaagacaacaaaggatgggaatggggattcggtgtttctaccattgctatcttcgtctctattctcatctttctctctggatcaagattttataggaacaagattccatgtggaagtcctctcaccacaatcttgaaggttcttcttgcggcttcggttaagtgctgctcgagtggaagttcaagcaatgcggttgcgagtatgtccgtgagtccctcaaatcattgcgtatcaaaggggaaaaaagaagttgaatcacaaggagaattggaaaagccacgtcaagaagaagctttgcctcctcgggcacaactaactaacagtttgaaagtattaaatggagctgcggatgaaaaacctgtccatagattgttagaatgcacagtccaacaagtggaagatgtgaagattgtcttgaaaatgcttccgatatttgcttgcactatcatgcttaactgttgcttagctcagctctctacattctccgtccaacaagctgcttccatgaacacaaagataggaagcctaaagatacctccagcttccttaccgatcttacccgtcgttttcataatgatcctcgcacctatctacgaccatctcattatcccattcgctagaaaagctaccaagaccgaaacaggagtcactcatctacaaagaatcggagtaggtttagttctttcgatattagcaatggcggttgcagctctagttgagattaaacgaaagggagtggctaaagactccggcttgcttgactcgaaagaaaccttacccgtgactttcctatggatcgcacttcagtatcttttcctagggtcagccgatctattcacactagctggactactagagtatttcttcacggaagcaccttcctcaatgagatctctcgcaacatcgctctcgtgggcttctttggctatggggtattacctaagctcagtgatcgtgtccatagtaaacagcatcacaggaagctcagggaacacaccttggctcagaggaaaaagcataaaccgttacaaactagactacttctattggctaatgtgtgttcttagtgcagctaacttcttgcactacctcttttgggcaatgcgttacaagtatagatcaactggttcaagaagctaaaattggatgggcaacttttgagttttttttttgtttttaattagagcagaaaatgtttttacttgagcggctgttatataagagatgataaatgggggtaagtagtaatgttgtgatcaggtatatattggggtttgaagtttttatcgttggacaagtaatgtacagcgaatgatattaacttgctttaagtctttcttttgttctgggggggtccgaatttgagtcaaggttttgttccaaaaaaaaaaaaaaaaaaaaaaacaaagnnnnnnnnnnnnnnnnnnnnnnnnnnnnnnnnnnnnnnnnnnnnnnnnnnnnnnnnnnnnnnnnnntgtcctaa

SEQ ID NO: 87328 - DNA, 537 bp, Arabidopsis thaliana columbia
  unsure (1)..(537): unsure at all n locations
tacgactcactttanggaaagctggtacgcctgcaggtaccggtccggaattcccgggtctgacccacgcgtccgcccacgcgtccgcccacgcgacaaggacgaggttccaagagaacttagcttcttgttctacgtacgacaccaaaaattaattcaaaaaagaaaaagaagagagttcaatgagaaaacattctcttgatcgatggcttttaacagctgttcttgtcgttctcctctcgtcttcttcctccttcgcggccaagaaggacgccaagaagaagaagaagagtaataaggaggtgacatatgatggaacctctttgatcatcgatggcaaaagagagcttctttattctggctctattcattacccgagaagcactccggaaatgtggccaagtatcatcaagagagccaagcaaggcggtttgaacacgattcagacatacgttttctggaatgtacatgagcctcaacaaggaaagttcaacttttcgggacgagctgatttggtgaagttcataaagttgattc

SEQ ID NO: 87329 - DNA, 864 bp, Arabidopsis thaliana columbia
  unsure (1)..(864): unsure at all n locations
nnnnnnnnnnnnnnnnnnnnnnnnnnnnnnnnnnnnnnnnnnnnnnnnnnnnnnnnnnnnnnnnnnnnnnnnnnnnnnnnnnccacgcgtccggtaaaatcctaaaccgtcagagaatatctatcctcctcttaaatatcactcttatctttatcctcctaaaatcttcttaattgtatctaatctctttctcaaaaaccaaacactatctctcgattatatcacaaggagatatggggaacagtgaaatgtcagcgagtgaggttgcggcggccaagcagaagaacgtcgacgattggttaccgatcacatcttccagaaacgctaagtggtggtactctgcttttcacaatgtcaccgccatggttggtgctggtgttcttagcttgccctacgctatgtccaatctcggatggggacctggagtgacgattatggtgatgtcatggatcataacgttgtacacactgtggcaaatggtggagatgcatgagattgttccagggaagaggcttgataggtatcacgagctaggtcaacacgcttttggtgaaaagcttggcctatggatcgtcgtgccgcagcagcttatcgtggaggtcggtgttgacatcgtttatatggtcacaggaggagcatccctcaagaaagtccatcaactagtctgtcccgattgcaaagagatcagaactacgttttggatcatgatctttgcttccgtccactttgttatctctcaccttcccaatttcaactctatctccatcatctcacttgccgcggctgttatgtccttaacttactcaactattgcttgggctgcatccgtgcacaaaggggtacatccagatgtggactactctc

SEQ ID NO: 87330 - DNA, 494 bp, Arabidopsis thaliana columbia
aatacgactcactttagggaaagctcgtacgcctgcaggtaccggtccggaattcccgggtcgacccacgcgtccgcatggatcataacgttgtacacactgtggcaaatggtggagatgcatgagattgttccagggaagaggcttgataggtatcacgagctaggtcaacacgcttttggtgaaaagcttggcctatggatcgtcgtgccgcagcagcttatcgtggaggtcggtgttgacatcgtttatatggtcacaggaggagcatccctcaagaaagtccatcaactagtctgtcccgattgcaaagagatcagaactacgttttggatcatgatctttgcttccgtccactttgttatctctcaccttcccaatttcaactctatctccatcatctcacttgccgcggctgttatgtccttaacttactcaactattgcttgggctgcatccgtgcacaaaggggtacatccagatgtggactactc

SEQ ID NO: 87331 - DNA, 632 bp, Arabidopsis thaliana columbia
  unsure (1)..(632): unsure at all n locations
atgnatgggggcgcaggaccnacccaacccggtngaggcccatgnttctgtcctgacagcgcggcggtnccgngatgcccgtaggactnccacttccactgacccgnctnttggcaggcaatgctggtctagtcgcagctcttgtggcattatcgggtgaggaagaagcccaccggtaagatagacaaaaccactattttctcagctgttcctcctttgttccctactccaccacctccaccagcaccatggaaaccttgagaaagctagacttgtgtgattctgtcgctgctgccaaaaaaaatgaatgaggtaagaaggatttgggtgtgagaccagaagattagaagctaaacacaagtcagccataaccaaactactaaggatttcatttggctttactagatacaaacacggggtgggttactttaccacaagcattgtctttcttttctttttttgggttgctgttttgttcttgtgagatatcatatatatctatgcgttttactctgtatatgtttcataccaaacttgtatgcggccgcgaattaaaaaaaaaaaggggatccactagttctagagcggccgccaccgcggtggagctccagctttgttactttaatagggta

SEQ ID NO: 87332 - DNA, 1119 bp, Arabidopsis thaliana columbia
  unsure (1)..(1119): unsure at all n locations
cccccctcgaggtcgacggtatcgataagcttgatatcgaattcgcggccgccaatcatacactaccacatcaacaacttttaatctaagactgttgatgtattagtgtttgatcagctttgaaaataacaaaacataaacgaatactaaaataacaaaagcagaaaacacatcaaaaacagtgtccatctataaagtccatcatgttggtgagtgtgctaagctcaaactcatcctcatgaacccaaagtgaactcaagtagttacttccttgatgatcttcttgaatttcatctccgaggatattattgttatcgacaatattcgagattttcgtttcttctgatgtttcgggtagggattcgggagattgatttgataaacaatatcaccattgctctgtttggttttctgatctttgattccgagtttcttactaagatgcgtgttccaatagttcttcacttgattatccgttcgacccggcactcttttagcaattaaagaccacctattaccaagcaacttgtggagcctaatgataagatcctcttcttgctcggtgaaattgcctcttttcacattagggctgagataattcatccacctcaatctacaactctttccacatctctttaaaccagtctttttggcaatacgattccagtgacctttgccatgagctttgacataatccatgaggattttgtcttcttctactgtccacaaacctttcttgtactcattgtttccttcgtcgaggtaagaaggatttgggtgtgagaccagaagattagaagctaaacacaagtcagccataaccaaactactaaggatttcatttggctttactagatacaaacacggggtgggttactttaccacaagcattgtctttcttttctttttttgggttgctgttttgttcttgtgagatatcatatatatctatgcgttttactctgtatatgtttgataccaaacttgtattctttgataaacaatttaatgaactgtattagcggccgnnnnnnnnnnnnnnnnnnnnnnnnnnnnnnnnnnnnnnnnnnnnnnnnnnnnnnnnnnnnnnnnnnnnnnnnnnnnnnnnnnnnnnnnnnn

SEQ ID NO: 87333 - DNA, 2433 bp, Arabidopsis thaliana columbia
  unsure (1)..(2433): unsure at all n locations
agggaaacctggtacgcctgcaggtaccggtccggaattcccgggtcgacccacgcgtccggcttcacatttcttcacttccacacacttttacttctttctctcttctcttctcttctccagatctgatcccaaacctttgattcattgttgttgttctctgctgctttatcagagagcatcatcatgtacggaagagatccatggggaggtccattggagataaacactgcagattccgccaccgacgatgatcgtagtcggaatttaaacgatttggatcgtgcggctctttcacgtccactagatgagacgcagcagagttggttacttggtccaacggagcagaagaagaagaagtacgtcgatctcggttgtattatcgttagccgcaagatcttcgtctggactgttggtactcttgttgccgccgcgttactcgccggattcattaccttgatcgttaaaactgtgccgcgtcatcatcctaagactccgccgccggataattatactatagctctacacaaagctcttaagttcttcaatgctcagaaatctgggaaattgccaaagcataataacgtgtcatggagaggtaattctgggcttcaagatgggaaaggtgaaacaggaagcttctataaagatttggtgggaggttattatgatgctggtgatgctatcaagttcaatttccccatggcttatgctatgactatgttgagctggagtgttattgaatatagtgctaaatacgaagctgctggtgagctcactcatgttaaggagcttatcaaatggggaactgattactttctcaagactttcaatagtactgctgattccattgatgatcttgtgtcacaggttggatcagggaatactgatgatggaaatacagatcctaatgaccattactgttggatgcgacctgaggatatggactataaaaggcccgtgactacttgtaatggtggatgttcggatctcgctgcagagatggcagctgctctggcttcagcatctattgtattcaaggataacaaggaatattctaaaaagcttgtccatggtgctaaggtggtgtatcagtttggaaggacgaggagagggagatatagtgcaggcactgcggaatctagcaagttctataattcaagtatgtattgggatgagttcatttggggtggtgcttggatgtattatgctaccggaaatgtaacgtatctcaatctaatcacccaacctactatggccaagcatgctggtgccttctggggtggcccttactatggtgtatttagctgggacaacaagcttgctggtgctcagttgctgttgagccggttgaggttgtttctgagtcctggatatccatatgaagaaattctaaggaccttccacaatcagaccagcatagtcatgtgctcatacttgcctattttcaacaaatttaacagaaccaatggaggtttaatagagttgaatcatggagctccacagccgctgcaatattctgtaaatgcagctttcttagcgactctatacagtgattatctggatgctgctgatactcctggatggtactgtggacctaatttctattcgacaagtgtgctacgtgactttgctagatcccagattgattatatactgggtaaaaaccctcggaaaatgagttatgtcgttggttttggcacaaaatacccaagacatgtgcatcacagaggagcttcgatacccaagaacaaagtcaagtataactgcaaaggaggatggaaatggagagacagcaagaaaccaaacccaaacacgattgaaggagccatggttgctggtcctgacaagcgcgacgggtaccgtgatgtccgtatgaactacaactacactgaaccgactcttgcaggcaatgctggtctagtcgcagctcttgtggcattatcgggtgaagaagaagccaccggtaagatagacaaaaacactattttctcagctgttcctcctttgttccctactccaccacctccaccagcaccatggaaaccttgagaaagctagacttgtgtgattctgtcgctgctgccaaaaaaaatgaatgaggtaagaaggatttgggtgtgagaccagaagattagaagctaaacacaagtcagccataaccaaactactaaggatttcatttggctttactagatacaaacacggggtgggttactttaccacaagcattgtctttcttttctttttttgggttgctgttttgttcttgtgagatatcatatatatctatgcgttttactctgtatatgtttgataccaaacttgtattctttgataaacaatttaatgaactgtattaaacttttaactnnnnnnnnnnnnnnnnnnnnnnnnnnnnnnnnnnnnnnnnnnnnnnnnnnnnnnnnnnnn

SEQ ID NO: 87334 - DNA, 486 bp, Arabidopsis thaliana columbia
tctcagagcaaaaaaacataaaaaaagaaaaaaaaaccctatatctaaatctcaccttccacctctgcctttgttttttttgttcttttttttttttttactgcatcttctcttctctttgctctgcaaaaatctcacatccatggatccatctcttggtgatcctcatcatcctcctcagttcaccccttttcctcattttcccacctccaatcatcatcctttaggaccaaatccgtacaataaccatgtcgtcttccaaccgcagccgcaaacgcaaacgcaaatcccgcaaccgcagatgtttcagttatctccacatgtttcaatgccccaccctccttactccggaatgatttgcgctgcgattgcggcgttaaacgaaccggatggttcgagcaagatggcaatttcgagatacatcgagagatgttacaccggtttaacttctgctcatgctgctttgttgactcaccatctcaagac

SEQ ID NO: 87335 - DNA, 1229 bp, Arabidopsis thaliana columbia
  unsure (1)..(1229): unsure at all n locations
atgatatgnccnnnnnnnnnnnnnnnnnnnnnnnnnnnnnnnnnnnnnnnnnnnnnnnnnnnnnnnnnnnnnnnnnnnnnnnccacgcgtccgcttttttttttgttactaattttttttttctgtgtgtagatgatttgcgctgcgattgcggcgttaaacgaaccggatggttcgagcaagatggcaatttcgagatacatcgagagatgttacaccggtttaacttctgctcatgctgctttgttgactcaccatctcaagactttgaagaccagtggtgttctttctatggttaagaaatcttacaaaattgctggttcttctactcctcctgctagtgtagctgttgctgctgctgccgccgctcaaggtctcgatgttcccagatctgagattctccattcaagtaacaacgatcccatggcttctggctctgcttctcagcctctgaaacgaggtcgtggtcgtcctcctaagcctaaacctgaatctcaaccacaaccactacagcaacttccaccgaccaatcaagtccaggctaacggacagccaatctgggaacagcagcaagttcaatcacctgttccggttccgactccggttacagagtcggcgaagagaggacctggtcgtccaaggaagaacggttctgctgctcctgctactgcaccaatcgttcaagcttcggttatggctggaattatgaaacgtagaggtagaccaccgggtcgtcgagctgctgggagacagaggaagcccaaatccgtttcttctactgcctctgtgtatccttatgttgctaatggtgctagacgcagaggaaggcctaggagagttgttgaccctagcagtattgttagtgttgctccagtaggtggtgaaaatgtggcagcggttgcgccagggatgaagcgtggacgtggacgaccacctaagattggtggtgttatcagtaggcttattatgaagcctaagagaggacgaggacgtcctgtaggtagacccngaaagattggaacatcagtcacgactnggacacaagattctngagaactcaagaagaagtttgatatttttcaagagaaagtgaaagaaattgtgaaggtgttgaaggatggagttacaagtnagaatcaagcagtggtncaagccataaaaagatcttgaagcactnaacagtnncggngaccnttgannccacaagtttttggaagangntncaccca

SEQ ID NO: 87336 - DNA, 885 bp, Arabidopsis thaliana columbia
  unsure (1)..(885): unsure at all n locations
gatcctnnnnnnnnnnnnnnnnnnnnnnnnnnnnnnnnnnnnnnnnnnnnnnnnnnnnnnnnnnnnnnnnnnnnnnnnnnnccacgcgtccgtggagaagacgacagaagggagcctaagagaggacgaggacgtcctgtaggtagacccagaaagattggaacatcagtcacgactgggacacaagattctggagaactcaagaagaagtttgatatttttcaagagaaagtgaaagaaattgtgaaggtgttgaaggatggagttacaagtgagaatcaagcagtggtgcaagccataaaagatctggaagcactaacagtgacggagaccgttgagccacaagttatggaagaagtgcagccagaggagactgcagcaccacaggctgaagctcaacaaactgaagctgctgagacacaaggaggacaagaagaaggacaagaaagagaaggagaaacacagacccagacagaagcagaggcaatgcaagaagctctgttctgaagaataataatgatctagaaaacaacctagacataatagccttggtgtttggcgttaggagtgtttttttttagttgttttaggtgttggaatcgcatcttaaattatataaaaatctataaggaattttaatttttctaggttttgttgtctgcagaagaagaaatagtagactcgttaatggtgttgttgtcggtgtgtctttaaccaaaccataagacgtggctgtaaattagcgatgtttctagtcttccatctttaataatctcttattgcgtcaaaaaaaaaaaaaaccccccaaaaagggcgnnnnnnnnnnnnnnnnnnnnnnnnnnnnnnnnnnnnnnnnnnnnnnnntgctcctaatnnnnnnnnnnn

SEQ ID NO: 87337 - DNA, 1418 bp, Arabidopsis thaliana columbia
  unsure (1)..(1418): unsure at all n locations
atgatactgccagctgcaatactgactcactatatggaaagctggtacgcctgcaggtaccggtccggaattcccgggcgacgctctctactaagaaactcaatcttactttctctgtaattcgtagcttccgaaatcttttctcaagaatctcataaccatggcgaatcctgctccgaatctagaatgtcgtatgtacgaatcgagataccctgatgtagacatggcggtgatgattcaggtgaagaccatcgctgacatgggagcttacgtatctctccttgaatacaacaacatcgaaggaatgatcctgttctccgagctctctcgccgtcggattcgtagtatcagtagcttaatcaaggtcggtcgtaccgagcctgttatggtccttcgtgtcgatagagagagaggttacattgatctcagtaaacgtagggttagtgatgaggacaaagaggcttgtgaggagaggtataataagagcaagcttggtcactctatcatgcgtcatgttgctgagactgttggtgtcgatttggaggagctatacgtaaacatcggttggccattgtataagangcatggacatgcttttaaggctttcaaaattnttgtcactgatcctnattcanttttcgatgctcttacccgagaagttaaagaaactggacctgatggtgtggaggtgaccaaagttgtcccggctgtgtctgaagaattgaaagatgcatttttgaaggacattaggaggcgaatgacaccccagcccaatggaagattcgtgctgatattgaattgaagtgttttcagtttgatggagttctccacatcaaggaagccatggaagaaggcagaggctgtagggtacctgattgattgttccagtcaacaatcaacgctccgttgcttccacccacttttatgtgctcacaactcacacccattacaaggaaaaaggaatagtgactctgaataaagcaattgaagcatgcattactgcaattgaggaacacaagggtaaacttgtcgttaaacgaaggtgctcgtgcggtgagtgagcgtgatgacaaattgcttgctgagcacatggctaagcttagaatggataatgaagaaatgagtggtgatgagggaagcgaagatgaagaagacactggaatgggagaagtcgatatcgatggaggtagcgggataattgaatgaacaaaagcaaaagcattgtaactgctgtttctgctttagatcctacaattttgtttccctttgagcaaaaacagtattttttgtttgaccccaaacatggttagtagtacaagcatctcttattccaaaaaaaaaaaaaaaagggcaagggcggccgctgtacaggattcaagatgagggaagcgtgcatcagacgtcatagatagtgtaaa

SEQ ID NO: 87338 - DNA, 554 bp, Arabidopsis thaliana columbia
  unsure (1)..(554): unsure at all n locations
nnnnnnnnnnnnnnnnnnnnnnnnnnnnnnnnnnnnnnnnnnnnnnnnnnnnnnnnnnnnnnnnnnnnnnnnnccacgcgtccgcccacgcgtccgcgagcagcctctgaactacgctagaagctacttagcggatctgctggagccttgtgttaaccgtgtcatatacttggattcggatcttgtcgtcgtcgatgacatcgctaagctttggaaaactagcctaggctcgaggataatcggagctccggagtattgtcacgcgaatttcacgaaatacttcaccggaggattctggtcggaggagagattctccggtacctttagagggaggaagccatgttacttcaacacaggtgtgatggtgatagatcttaagaaatggagaagaggtggttacacgaaacgtatcgagaaatggatggagattcagagaagagagaggatttacgaactaggctcgcttccaccgtttcttctagttttctccggtcacgtggctcccatctctcaccggtggaaccaacatgggccttggggtgataatgttagag

SEQ ID NO: 87339 - DNA, 539 bp, Arabidopsis thaliana columbia
  unsure (1)..(539): unsure at all n locations
tgatactccagctctcnnnnnnnnnnnnnnnnnnnnnnnnnnnnnnnnnnnnnnnnnnnnnnnnnnnnnnnnnnnnnnnccacgcgtgcgcccacgcgtccgctaatcttctcgttgctatggcgtcgcaattaatgggttctgctaattacggtttgaaacgttttagtgatagtttaggttacttgaatagagctaataggattcttgtgaagttagaggcggatggtgattgtgttgtggaagacgttaggcctgttttacacgctgtgcagcttgagcttgctaatgttaagaatgctatgggaaggagagaggaagctattgagaatttgaagaagagtttggagataatcatggagatagcgcgaaagacgaaatgaaagaagcgaaaagacttgtttaggatttgggattgaaggcctccagggagggttcaaccaataagcttgtgataaggctttacgtttggcccaaggcaagccatggatagtaatggagttgtgtgaagcgtcaacccctaaacaacaatggaaaga

SEQ ID NO: 87340 - DNA, 603 bp, Arabidopsis thaliana columbia
  unsure (1)..(603): unsure at all n locations
tgatacttccnnnnnnnnnnnnnnnnnnnnnnnnnnnnnnnnnnnnnnnnnnnnnnnnnnnnnnnnnnnnnnnnnnnnnnnccacgcgtccgagtggatccgccgtagctggaggatccgtcgttacaaaatcatgtcatcttctcccaagctgtttcacgcgcgtccatcattcttcacgcgccgatcgacgcctttgatcgtcttcacctctctcgctatcggtctaaccggtttccttttcggattatcaacgatccttttccctggtctccggttatctggccggtcctgcctcaccaacttgccaccgaagactgttaaaatcgtctgggacgtcgctggtaatagtatcgttaatggcgaagtcaagaggcacaaagtgatgggattcgtcggaatccagaccggattcagatctgctggccggagacgagctctcaggaacacatggatgccgtccgatcccgaaggccttcgaagattggaagaatcaacaggattagccattagatttattataggcaaaaccaaagacgaggccaaaatggttgagctgagaagcgaagttgcaatgtacgatgactttatactgctcgatat

SEQ ID NO: 87341 - DNA, 447 bp, Arabidopsis thaliana columbia
gcgtccggcaacattcaccggtactcatctgaccaagctagggtttcgcagtcatcatcatgtaccgtacggcagcttctcgagccaaggcccttaagggcattctaaaccacaattttcgagcttctcgttatgcaagttctagtgctgttgcaacgagctcttcttcctccagctggctaagtggaggctactctagttcacttccttctatgaacactcccttggctggtgtctctcttccaccaccactctctgaccatgttgagcctagcaaacttaagaccactactcttccaaatggtctgactatagccactgagatgtctccgaatccagcagcttccattggtttatacgttgactgtggttctatttatgagactcctcaattccgtggagcgacgcacttgcttgaaaggatggcattcaagagtacattgaaca

SEQ ID NO: 87342 - DNA, 461 bp, Arabidopsis thaliana columbia
tacgactcactttagggaaagctgctacgcctgcaggtaccggtccggaattcccgggtcgacccacgcgtccgcggacgcgtgggcagaatcgctgcttctgcagcctctcgtctcttttcccattctaaggctgtgcttccttttggatcatctaaacgtcaagacaacgaagaagcttctctactggctactgctgattcggttactgcagtcgtggcagccaaagaggaagttaagcaggccgtcgcagatgatctcaaatcaaaccgttcaccgccttgtgaggggtttgtatgtgatgatgataaaagcggcaccaggttcttctttattcagggatcagattcactggcctcatggcaagctaaccttctgttcgagcctgttccatttgaggaccttgatgtgcttgttcacagaggcatatacgaagctgcaaaaggaatatacgaacagat

SEQ ID NO: 87343 - DNA, 881 bp, Arabidopsis thaliana columbia
  unsure (1)..(881): unsure at all n locations
atgatctccaggtctctacgactcactttgggaaagctgctacgcctgcaggtaccggtccggaattcccgggtcgacccacgcgtgggcgagcacattgttgcgattgtgaagcgacctagcgttaactgctcgaagaagttctcagatcctggtcagctcaactacccaagtttctcggttttgtttgggggtaaaagagttgtgcggtacactcgggaagtaacaaatgttggtgcagcaagctcggtttacaaagtgacggttaatggagctcctagtgtcggaatctctgttaaaccatcgaaactttcgtttaaaagcgtgggagagaagaagaggtacacagtcacgtttgttagcaagaaaggagtgagtatgacgaacaaggctgagtttggttccatcacttggagcaatccgcagcacgaagtgagaagtcccgttgcattctcttggaaccggttttgataaaaaaactaacatccctagtgatgatgttttctatttaagttatcttgattgggtttaggctaaaccaaagcccatcatgagccataagtagtgggaagtgttcttgtgtggtttggtttgagtcattgagtgtgtaggtgaaagcatcccaaaaaaagttagggatgataaaagaaaatgttgtcaggaaaagaacgttgatgtcgtcatatgtagtgcttcaagtttcttcattttaaccatcatactgatgtaatagtatctttcaaataagccaccaaagtaatgtggccaaaaaaaaaaaaaagggcggccgctttaaaggatcccagcttacggacgggtgcatgcgacgttaannnnnnnnnnnnnnnnnnaacgaaagccannnnnnnnnnnnnnnnnnn

SEQ ID NO: 87344 - DNA, 517 bp, Arabidopsis thaliana columbia
atacgactcacgttagggaaagctggtacgcctgcaggtaccggtccggaattcccgggtcgacccacgcgtccgcccacgcgtccgcgtttttgaaaaaactcaaattatcgtcgttttgttctcagatttcttctgctctcttcttcttctccttcttcttcgttccaccgcctctgttgctttatcttcttcttccttccttcgattgttgattacgtcggtggatctttgttctcctctgtgttgttttcattgctagatttcgtcaatgattggcttctcacgattcgatttttccggctcctgttcttaatttcctctgagagaatgatggatgagggatcagtaggggatgtgagtaggattgatgaagctgatgttgctcaccttcaattcaagaatagtgagcagtcgtttaaaccggagaacattgaagtccgggaagtaaaagaagtgcaggttcagagagaagctggttctcctgattgttcttatggcggaatagcagattttt

SEQ ID NO: 87345 - DNA, 545 bp, Arabidopsis thaliana columbia
  unsure (1)..(545): unsure at all n locations
nnnnnnnnnnnnnnnnnatacgactcacttcaggggaaagctgctacgcctgcaggtaccggtccggaattcccgggtcgacccacgccgtccgaaagattcttcaagggaattccatgttgaaaagggaaaagggacacctctcaaagatattcccaatgttgcttacaaggtatcaaggaagaagtctgatgaagttttcaagcagttacacacaattctattcggtgggaagagagtaaaagctactcagctcaaggcacacatattacgcttttctggttacaaatggcaaggagatgaggaaaaggcaaaattgaaagtcaaagaaaagtttgagaaaatcaacaaagaaaaattggctggagttttgcgatttatttgacatatcagttgctaaggctaccacaaagaaggaagatattgtgaccaagctggttgagtttttggagaaacctcatgcaacaactgatgttctagtcaatgagaaagagaagggagtgaagcgcaagacgactgctaagaaaagctcacctggaacttgg

SEQ ID NO: 87346 - DNA, 2494 bp, Arabidopsis thaliana columbia
gcgtacgcaacaaacaaaaaaaacacagctacgtcaggggccaaactaaagattagatttgggaggttgatgatcaattccggacaacggaggaaaccatactgatagattcaacgacggtgattgcggcggaggagtagaaacccgttggaaacatggcgatgagagaccttgttaacggcggagccgcttgtgccgttcctggttcgtcttcttcttctaatcctctcggagctctcaccaacgctttacttggttcgtcttccaaaacccaggaaaggctcaaggagatacctaatgcaaaccggtcaggtcctcggccacaattttactctgaagaccaacagataaggtcacttcctggttctgagttagatcagccacttctgcaaccgggtgctcaggggtcagagttcttccgtggttttcgctctgttgatcagaatggtttgggtgcagcttgggatgaagtacagcaaggtggacctatgcctccaatgggacccatgtttgagccagttcagcctacatttgaaggacccccacagagagttttatcaaactttctgcattcatttgttgagagtagccgtggtggtattccatttcgtccagcacctgttccagttctaggattgtcacaaagtgacaaacaatgtatacgtgatcgtagtagcataatggcccggcatttttttgccgataggggagaggaatttattaattctcaggtaaacgcattattgtcatctttagatattgatgatgggatacaagctcgaggtcatgttcccgggagatttcgggagctagatgattactggaatgagtctcaagctgttgtgaaacctaatttacatcctgctgacaattgggcggctgaatttaaccaacatgggatggatcatggtggtcctgattcatgggtccagtcttttgagcaacaacatggtgtgaatgggtgggctactgagttcgagcagggtcaatctcaattgatgtcaagccaaatgagaagtatggatatgcaaaatatagctgcaatggagcagactcgtaagcttgcccatacactatctcaagatgggaatccgaaatttcagaattcaagattccttcagtttgtttccaagatgagccgtggtgaacttattattgatgagaatcaggtcaagcaagcttcagcccccggggaatgggctactgaatatgaacagcagtatctggggccaccaagttgggctgatcaatttgcaaatgagaaactttcacatggaccagaacagtgggctgatgagtttgcttccgggagaggacagcaagaaacagccgaggaccaatgggttaatgagttttcaaagttgaatgttgatgactggatagatgaatttgctgaaggtcccgtgggtgatagttcagctgatgcatgggcaaatgcttacgatgagtttctgaatgagaaaaatgctggaaaacaaaccagtggtgtctacgtcttctctgacatgaatccttatgtgggtcaccctgaacctatgaaagaagggcaagaattgtttcgaaaaggacttctgagtgaagcagcgcttgctctagaagctgaggttatgaaaaaccctgagaatgctgaaggttggagattacttggggtcacacacgcagagaacgatgatgatcaacaggcaatagctgcaatgatgcgtgcacaggaggctgatcccacaaatctagaggtgcttcttgcgcttggtgtgagtcataccaacgagttagagcaagcaactgctttgaaatatctatatggatggctgcgaaatcacccaaagtatggagcaattgcgcctccggagctagcggattctttgttccatgctgaaattgctagattattcaatgaagcttctcagttgaatcctgaggacgccgatgtgcatatagtgttgggcgtgctctacaatctgtcgagagagttcgatagagcaatcacatccttccaaacagcattacaactaaaaccaaacgattattctctgtggaataagctaggtgcaacgcaagccaacagtgtccagagtgctgatgccatatctgcttatcaacaggctctagatttaaaaccaaattatgttcgtgcttgggcaaacatgggaatcagttacgcaaaccaggggatgtacaaagaatcaatcccgtattatgtccgtgcccttgcgatgaatcctaaagctgataacgcatggcaatacttgagactctcgttaagttgtgcatcaaggcaagacatgatagaagcttgtgagtcaaggaatctcgatctcttgcagaaagaattcccgctgtgagtagacaaagcaggcgattaaaaccctaaatccacatgaaaatcttacaaagacgttacgtctttttgttgtttagttttgtaaaaactacaatttaaaaatcggaactatgggttgaaaattaataaaaatggtattgtttttacccccgt

SEQ ID NO: 87347 - DNA, 558 bp, Arabidopsis thaliana columbia
  unsure (1)..(558): unsure at all n locations
nnnnnnnnnnnnnnnnnnnnnnnnnnnnnnnnnnnnnnnnnnnnnnnnnnnnnnnnnnnnnnnnnnnnnnnnnnnnnnnnccccacgcgtccgcggacgcgtgggttcgtttctgagattcccttcttgttgttgtagccatggacaacgaaggcataggtctttacccgcttcatcgttgcaaaaccattcacctggtgagacatgctcaagggattcataatgtggctggtgaaaaagatcacagtgcttactcttcggaggattactttgatgctcatcttacccctcttggttggcaacaggttgataatctaaggaaccatgttcgtgcagctcaactcttaaacaaggttgaacttgtcattgtttcccctatgcttagaactatacaaacagctgttggtgcttttggaggagaagaagatactaatggagcggatgcaacaccgttaatggtggctaatgctgggagcagcgatcgtcctgcgatttctagcttaaatagtcctcctttccttgctgttgagctttgcagggaaactatngggtgatcat

SEQ ID NO: 87348 - DNA, 543 bp, Arabidopsis thaliana columbia
  unsure (1)..(543): unsure at all n locations
cnnnnnnnnnnnnnnnnnnnnnnnnnnnnnnnnnnnnnnnnnnnnnnnnnnnnnnnnnnnnnnnnnnnnnnnccacgcgtccggatcaagaacatccgggacagtgtgaagcatgtgaaaacgtcagagtcccatgaggagaggtttactgagctcaaggaacagcttcaagttccaagcgagaaggtgctttctcttgatgatcagacgcaatggaacacaacatatatgatgcttgtggctgcttcagaattaaaggaagtgttctcgtgcttagacactgctgatcctgactacaagaaacctccttcagcagaggattggaggcatgtggaggcactttgcacattcctgaagcctcttttcgaagcagtctccactcttcaatctactggaaacccatctgctgttaccttcttccatgaagtgtggaagacacagtcagatttgtctcgggcgatagctggagaggatccttttgtcacaggtattgctaaaaccatgcaagagaaggtagacaagtactggagagactgtagcttg

SEQ ID NO: 87349 - DNA, 974 bp, Arabidopsis thaliana columbia
ttttattttttccttatcaagaatcctctgatcagtcaaatacccatcaatcaatcaaatccccaaacactcccaaaaaaagatcagcttccaatatttttccccttcttacaaaaaagatgtctatgtcgtctatgtcctccccttcctcagctgtttgttcaccggaccacttctctccttccgaccatctctgctatgtccaatgcaacttttgccaaaccatccttgcggttaatgttccttacacaagcttgttcaagaccgtaactgtccgatgtggttgctgtaccaatctcctttcggtgaacatgagatcatatgtcctcccagcttctaaccagctccagctccagctcggtcctcactcttacttcaatccccaggatattctggaggagctgagagatgcaccgtctaacatgaatatgatgatgatgaatcaacatcctactatgaatgacataccatctttcatggatcttcatcaacaacatgagattcctaaagcaccacccgttaaccgccctccagagaaaagacagagagtcccatccgcatataaccgattcatcaaggaggagatccaacgtatcaaagctggtaatcctgatataagccacagagaagcctttagtgctgctgccaagaattgggcccacttcccccacatacacttcgggctcgtgccagacaatcaacccgtgaagaaaaccaacatgccccaacaggagggagaggataacatggtgatgaaagaagggttctacgctcctgcagctgctaacgttggtgtgactccttattaaagagataaatataatcgactaagtatttgaggaattgaaatccaatttcttagggtttatcatgtccaaaagttgtggtttcttttcctttcttgaacttatttatatatattataaatatgcatgtgtctttttctgttgttgtaaaaaaaaaaaaaaaaaatt

SEQ ID NO: 87350 - DNA, 1064 bp, Arabidopsis thaliana columbia
cacgcgtccgctcaaccgtccgatcatccatcttgccatcaccgttcaccaatcttcttcgtctcctctctctttctctctttttgctgtttctagctcctctctctctggatctcgccggcgaaccgtttctcttgggtgtaaacagtagcaatcaagctatagaatctcagatatcgctgaattagctgttggattttatccgccttttcttcgttatccggggctcgggtataaggtttcatcgtcttatttcatctgtaaatgggctgcttccactcaaaggcagcaaaagaatttcgaggacacgaagaccctgttaagcttgcctctgagacagcttttagtgtgagtgaggttgaagcattatttgagctattcaagagcataagcagttcggttgttgatgatggtctgattaacaaggaggagtttcaacttgctttgttcaaaagccggaagagggagaatatatttgctaataggatatttgatatgtttgatgttaaacgaaaaggagtcatcgatttcggggactttgtaagatcactcaatgttttccaccccaatgcttctctagaagacaaaatagattttacgtttaggctttacgacatggactgcacgggttacattgaacgacaagaggtcaagcaaatgttgatcgcgcttctctgcgaatctgaaatgaaactggctgatgaaaccatagagataatactcgataagacatttgaagatgcagacgtgaatcaagatggaaaaattgataaattagagtggagtgatttcgtaaacaaaaatccatcattgcttaagatcatgactcttccatatctcagggatattacgacaacgtttccgagttttgtcttccattcggaggtcgatgagattgccacatgaagaaacaaactggtttaagaccgagtagattgccacgagttggaagaacaagtctgagctaatcggtgtaatcaacatctgtttgtaaacagtagtagagcatattctcttgaaattgtttgggttacttttttcttctcacaacagtttaaaatttt

SEQ ID NO: 87351 - DNA, 430 bp, Arabidopsis thaliana columbia
ggagagccaacgagaagagaaaaagtatcttcctttgagaagtgcaagtccatggcagctctctgttgttgtcccaccaccatcatcgtctccgggaaggtttcttcacggattaaaaccgcaggcccattaccccgaatcaacccttttaagaatcagaaacgattgattacagagagaagaaacttgatcgttaaatcgatcattgaagacagagaagcaatcgatgttaaaaacgacaatttcaacgcagaggaagaactatcagaagataaagtagaagatacagatcggctgatgagtcgaggtatcaacgcagctatagttctcgccgccggtaccgttgcggttactaagcttttaaccattgatcatgactattggcaaggttggactctctacgagatacttaggtatgcacctgaacata

SEQ ID NO: 87352 - DNA, 826 bp, Arabidopsis thaliana columbia
accaagggcttctctctcttaacacacctctatcctttagagagagagggagatttccggttcaccggaattatcgccgccgcttttgttctgtaatatagaagttttccgactgcagtcagattgttgtttttccgcttcgtcggaccaatctccggttaatccggatctaataagatccaatttggttacttaagattggatcaagttttttttgtttcctctttctacaaggctttcaatccattatcctcttgcgatctctggatctcttcctcctaccgtcggcttgcctcctctctttgatcggagtaacatcttcgccgcttcatatgactctgttgtagtcgaggactttcttttggtctcaggcggagcttccaatttaggagattgggttaagggataaagatttcttcaagtcttctttgagcttctttcagacggaaccggtgattgttcatcagatctgcaagacgaaaactgtagaaggagtacggtggtggttgcttgaagccaacggaggtgctgagtcaactcgcagatttgcccggcgccgactgcttctccttctccttcttatgtgttaacacgtggtgttacacgtggtgttacacgtggtggctccttattttcttaatcttttactttatttagtttaagattaagcagttgttaacctaatcaaggatgtatatgttggagaatgggcttatgtaattttcacttctttgtactgcccattgggcttccgttttaatggaatttggccgcctaaaaaaataataaaaaaaaaaaaaaaaaaaaaaaaaaaaagggcggccgc

SEQ ID NO: 87353 - DNA, 1140 bp, Arabidopsis thaliana columbia
  unsure (1)..(1140): unsure at all n locations
tcgtctccgtcttcctcgctcagcttcaacaaccagagccgacttgagattgagaatcaacgtaatcgatactctcgcaaagtctcatcctttctcagcaaaaaacactaggaaatggttgaaaggcatggagagttttgatttgctgcttaagatatatcatgtcgcagtgcgttgacggtatcaagcatttatgcacctctgttttagggtgttttgatcttgatttgtataaacaatctggtggccttggagatcctgaattgcttgcaagagacactgtttttagtgtgagtgaaatagaagctctttatgagctttttaagaaaatcagcagtgccgtgattgatgatgggctaataaacaaggaagagtttcagttggctttgtttaagacaaataaaaaagagagtttgtttgcagatcgggttttcgatttgtttgatacaaagcacaatggaatactggggtttgaggaatttgctcgtgctctctccgtctttcacccaaatgcgcctatagatgacaaaattcacttttcatttcagctatatgatcttaaacagcaagggtttatcgaacggcaagaggtgaaacaaatggttgtcgctacgcttgctgaatctggaatgaatttgaaggatactgtcattgaggatataatcgacaagacgtttgaggaagcagacacaaaacacgatggaaagatcgataaggaagagtggagaagccttgttcttagacatcccagccttctgaagaacatgactcttcaatatctcaaggatatcacgactacgtttccaagctttgtgttccattctcaggttgaagatacctgaaaaagcaaaagcaaaagcaagcagcggcaagacatcattgtattgttgaaggttgttctttcgttatggttctttatttgttacatttctaaatctctgaactcattttattttttattgagctttttttgtgaagcaaaattcttctttttagtttggtttttgtcctttttgatttcgctcggtctatctgtagatacaacttttgcatcttgatgttatggtaatgtaaagtttttcagttnnnnnnnnnnnnnnnnnnnnnnnnnnnnnnnnnnnnnnnnnnnnnnnnnnnnnn

SEQ ID NO: 87354 - DNA, 732 bp, Arabidopsis thaliana columbia
  unsure (1)..(732): unsure at all n locations
aatacgactcactttagggaaagcacgtacgcctgcaggtaccggtccggaattcccgggtcgacccacgcgtccgcgcgcgcgtgggcggacgcgtgggcggacgcgtggggtttctctctcttctcgctctctgaatattttagagagagaatacgctcttcttctcgccgtccggtggttatccggctacatgtccggcgtcttccgtttttctcaacggtgatggccggctttcgtctagcaccgactggcttcctaagtagcggtggctagcttttgcccggcatcgaccggctaacctagcggccatggccggattctgtttttgctttaatttttcaattatgtttttaatttgctaataatctcatcggatctacgattagggatgttgatctgccatatccacggtggttcttctttgtctctgtcctttgagttttactccgatccgaattaagtttcttatctcttcaagataaatttcgggatccttttcttttgtaccctggatttaccagaatgatttcaaaagagattccacccctttggttgacgggaagaaaaatttccctggggcgctaacaagggcccctaaagcggnancttnaaatggnggctccnanggttcnaaancgggngaaaaaaaaangccncggncggncccnaacggggggngttctaccggaacgggccaacgggggggggttnccgnaaaatgggaacngc

SEQ ID NO: 87355 - DNA, 517 bp, Arabidopsis thaliana columbia
  unsure (1)..(517): unsure at all n locations
nnnnnnnnnnnnnnnnnnnnnnnnnnnnnnnnnnnnnnnnnnnnnnnnnnnnnnnnnnnnnnnnnnnnnnnnnnnnnnnnnnnccacgcgtccgaaagatcctcactctccttctctgatctcgccatggaacctgacgtcagtatcgagactgtgtcgatcatgcggatcgccgtccttccgatcggcactattccgccgacgcttctccgggactaccactcgatgctgctccgtcatcacacgatcgcgctctcagctattagctctttctacactgaacatcagaaatctccattcacgaatcagccgtgggattccggctctctccggttcaaatctgtgcttggtggttctcctccgagtccttgggaggattgtcagtctaatcggaagatgctcgccgtgatcggcctttgccactgtccctcgtcccctgatcttgattctgtcactgaaaaattcaatgtcgcttgtaagagtgatccctaggctcttgaccggcgctgcttcgctt

SEQ ID NO: 87356 - DNA, 1106 bp, Arabidopsis thaliana columbia
  unsure (1)..(1106): unsure at all n locations
aaaattttgcaatatattcattctgcttatagattattgtgtcgaccttttttctctcacttacccaataagagcttttttcgcgttttccaccgcaaccaccgtcaccttcaaccgccggagccgccgcaaggaaggctcatcatccgccgtggcaattttttgaggtgtacaaagcattgcctatttgacgaaccaggaaatggttaaaaggcatggagagttttgatttacaagatatatcatgtcgcagtgcatagacggtttcaagcatgtatgctcctcttttttccggtgttttgatatcgatatttacaaacaatctggaggccttggtgaccctgaacttcttgcgagagagacagtttttagcgtgagtgaaatagaggctctctatgagctgtttaagaaaatcagcagtgctgtgattgatgatgggctaataaacaaggaagaatttcagttagccttgttcaagacaaataaaaaagagagcttgtttgcagaccgggtattcgatttgtttgacacaaagcataatggaatactggggtttgaggagtttgcgcgtgctctctctgtctttcatccaaatgctcccatagaagacaagattgacttttcgtttcagctatatgatcttaagcagcaaggtttcatagagaggcaagaggtgaagcaaatggtggtggctactcttgctgagtccggcatgaacctgtcagacgaaatcatagagagtataatcgacaagacatttgaggaagctgatacaaaacatgacgggaggatcgataaggaagagtggagaacccttgttctcaggcatccttcccttctaaagaatatgactctccagtatcttaaggatataacaactacatttccgagctttgtgttccactcgcaggtggaagatacctgagaaaaacaatagcatattagcagaggagacaatttgggaattgtgtttgttttctgattatgtatcatgtctatttgtttcaatctctctgaacattttcaaaattttgttgttacttgtgtgaattaaaagtaaagaaaacaaatctgtttttttgctnnnnnnnnnnnnnnnnnnnnnn

SEQ ID NO: 87357 - DNA, 526 bp, Arabidopsis thaliana columbia
cagctctctacgactcactatagggaaagctggcacgcctgcaggtaccggtccggaattcccgggtcgacccacgcgtgcgcccacgcgtccgctttctctctcgttttctaacgcatacactttgaatggcgcccatgagtttgcctccaggattcaggtttcatcccactgatgaagaactggtggcttactatcttgataggaaggtcaacggccaagccattgagctcgagatcatcccagaagttgatctttataaatgcgagccatgggacttgcctgaaaagtcatttttgccgggaaacgacatggaatggtacttttacagcacaagggataagaagtatccaaatggctctaggacgaaccgtgcgacccgagcgggttactggaaggccacggggaaagatcgtacaggagaatcaaagaagatgaagatgggaatgaagaagacactggtttattatagaggaaggggtccttatgggccttgggactaatgggggcttgcatggatatcggc

SEQ ID NO: 87358 - DNA, 702 bp, Arabidopsis thaliana columbia
  unsure (1)..(702): unsure at all n locations
gcaaagtcttgtggctacagagcttagggtttaaactttcttcacgataattttccgatgggagttccgtcgttctacagatggcttatccagaggtatccattgactatacaagaagttattgaagaagagccactcgaagttaatggcggcggcgtcacgattccaatcgattcaagcaaacctaatcctaatggttacgagtatgacaatctttatctcgacatgaacggattcattcatccatgtttccatcctgaagacaaaccttctccaactacatttacggaagtgtttcaatgtatgttcgattacattgataggctttttggtatgggttcgacctcggaagctcttattcatggctattgatggtggtgctccaagagctaaaatgaatcaacagagagctagaagggttagagctgctaaagatgcagctggagcagcagctgaagaagagcagctgcgggaagagtttgagagagaagggaagaagtgcccccctaggggggcctcgcaagtttttgactctaatgttattactcctggaacagagttcatggctactctgtcctttgcgttgcgatactacattcacgttagactaaattctgatcctgggtggaaaaatattaaggttatactctcggatgctaatgttcctgncgaaggggaacacaagatcatgtcatacatacg

SEQ ID NO: 87359 - DNA, 534 bp, Arabidopsis thaliana columbia
cagctctctacgactcactatagggaaagctggcacgcctgcaggtaccggtccggaattcccgggtcgacccacgcgtccgctaaaaccttagaatagccggagagaagaaggcgagaagaggagcgacaagggcgaagctgcagaattcttcggtaattttcagattcggttgaataatggcggctgcggcttttgggcagttaaatctagaggagcctccaccgatttggggatctcgtagtgtcgattgcttcgagaagcttgaacagattggtgaaggaacttacggccaagtgtacatggctaaagaaattaaaactggtgaaatcgtggctctgaaaaagatccgtatggacaatgaaagagaagggtttccgataaccgctatccgggagatcaaaattctgaagaagctgcatcatgaaaatgtcatccatttgaaagagattgttacttctccaggtcgagatagggatgatcaaggaaagccagataataacaaatacaagggtggaatctacatggtctttg

SEQ ID NO: 87360 - DNA, 786 bp, Arabidopsis thaliana columbia
cgattgcactttcgctccggaattcccgggtcgacccacgcgtccgagatacatatcaagagattaaaccttatccaactaagagaagccatttttttttttttgggtctctgagttgtgtattgagcttcatctccttcaaatggcttccttatcaaccacttccctaagcttcaaagctccgtccaccacaatttcacaggttttaaggaaagcctcaagttctcagtctgtgacctttggtcgtttcacgtcttcaacaaagagccttcgtcttcaaatcagttgtgccgcgaaagcagagacggtgcagaaagtgagtgacattgtaaaagaacaattggctttagctgctgatgttccgctcactgctgaatccaagttctctgctcttggtgccgattctctcgacaccgtggagatagtgatggcgttggaggaaaagtttaacataagtgtggaggaatctgatgctcaaaacattacgaccatccaagaggcggctgatttgatagaggaccttgttcaaaagaaacccgcggcggaaacttcctgaaccggctgtcttttctttcctgacctattcttgccttcagagcgttttattacggtatattagaccgtttgttatttttatttatttcggaagctaagattgggtgttgacaatgagacaactttggtacctttgagattgattctttgtggtgatcggccttatgacgaaattcataatgggtattggtttcccttccaaaaaaaaaaagccgtctctcctccatacac

SEQ ID NO: 87361 - DNA, 423 bp, Arabidopsis thaliana columbia
cccacgcgtccggaaaacgatacctaagctcaattatcttctctgcaacaaactccaaaggatccgagagagagagctctggaacgatattaacatatatcatgaagaaaaagattgaagtattgatatgggaataactaaaacttctcctaatactacaattctcttgaagacttttcacaataattctatgtcccaagattatcatcatcatcatcatcataatcaacaccaaggaggtatcttcaacttctctaatggattcgaccgatcagattctcccaatttaacaactcagcagaagcaagagcatcaaagggtagagatggacgaggaatcttcagtcgccggaggtaggattccggtctacgaatcagccggtatgttatccgaaatgtttaatttccccggaagcagcggtgg

SEQ ID NO: 87362 - DNA, 468 bp, Arabidopsis thaliana columbia
  unsure (1)..(468): unsure at all n locations
attttgccaacgaacgttctttcttcttaatcacagctcagcctgacgcaaccgctcaggctgatctcttccaatttacagccatttcccagctcagatctctgatccggtgagatctctctcaaggaaaaggagttagagcatcatcaagatgaaggcactcattcttgttggaggcttcggcactcgcttgagaccattgactctnagtttcccaaagccccttgttgattttcctaataaacccatgatccttcatcagatagaggctcttaaggcagttggagttgatgaagtgggtttttggccatcaatttatcagccagaggtgatgccttgaactttcttgaaggaccttttaagaccaagctgggaaattcaaaatcaacttgntcaacaaggggcccgggggcacttagggtacccactgggcccctttggttttttggggggggcaaaattttcttt

SEQ ID NO: 87363 - DNA, 1568 bp, Arabidopsis thaliana columbia
  unsure (1)..(1568): unsure at all n locations
nnnnnnnnnnnnnnnnnnnnnnnnnnnnnnnnnnnnnnnnnnnnnnnnnnnnnnnnnnnnnnnnnnnncccacgccgttttgccaacgaacgttctttcttcttaatcacagctcagcctgacgcaaccgctcaggctgatctcttccaatttacagccatttcccagctcagatctctgatccggtgagatctctctcaaggaaaaggagttagagcatcatcaagatgaaggcactcattcttgttggaggcttcggcactcgcttgagaccattgactctcagtttcccaaagccccttgttgattttgctaataaacccatgatccttcatcagatagaggctcttaaggcagttggagttgatgaagtggttttggccatcaattatcagccagaggtgatgctgaacttcttgaaggactttgagaccaagctggaaatcaaaatcacttgctcacaagagaccgagccactaggtaccgctggtcctctggctctagcgagagacaaattgcttgatggatctggagagcccttctttgttcttaacagtgatgtgattagtgagtaccctcttaaagaaatgcttgagtttcacaaatctcacggtggggaagcctccataatggtaacaaaggtggatgaaccgtcgaaatatggagtggttgttatggaagaaagcactggaagagtggagaagtttgtggaaaagccaaaactgtatgtaggtaacaagatcaacgctgggatttatcttctgaacccatctgttcttgataagattgagctaagaccgacttcaatcgaaaaagagactttccctaagattgcagcagcgcaagggctctatgctatggtgctaccagggttttggatggacattgggcaaccccgtgactacataacgggtttgagactctacttagactcccttaggaagaaatctcctgccaaattaaccagtgggccacacatagttgggaatgttcttgttgacgaaaccgctacaattggggaaggatgtttgattggaccagacgttgccattggtccaggctgcattgttgagtcaggagtcagactctcccgatgcacggtcatgcgtggagtccgcatcaagaagcatgcgtgtatctcgagcagtatcatcgggtggcactcaacggttggtcaatgggccaggatcgagaacatgacgatcctcggtgaggatgttcatgtgagcgatgagatctatagcaatggaggagttgttttgccacacaaggagatcaaatcaaacatcttgaagccagagatagtgatgtgaaaatgagatattatatgtgcaacttttttttttttttttttgtgtcctttcttcaactttgaaatcgctttcgtaattcttaatggcttttgaataagcatcaatcaaaacgctgtatatcttgttagggtcgtttgctgttttgtctctttttttgttttgtaatttataaaaaaatttattctcattttatgtgagatacttttgaatattcattaattataaagctttttttttgtgaaaaaaaaaaaaaaa

SEQ ID NO: 87364 - DNA, 527 bp, Arabidopsis thaliana columbia
  unsure (1)..(527): unsure at all n locations
nnnnnnnnnnnnnnnnnnnnnnnnnnnnnnnnnnnnnnnnnnnnnnnnnnnnnnnnnnnnnnnnnnnnnnnnnccacgcgtccgcggacgcgtgggcggacgcgtgggcggacgcgtgggcttttgcaggattggaaaactgagaggtataaagaaatcataaaatcaggaagtgtagaaccaagacctggtgtaataagactaatggatgaagcaaaagctgctgggaaaaaactagctgtttgttctgcagctacaaagagttcagtaatcttatgtctcgagaatctaatcgatatcgtaagttgtttcctttcgccaatctctgatctaccatgcttctttcaagttttttctttatcgattatactttatgtcgtttaggagcggttccaaggacttgattgcttccttgcaggtgatttcatcacattctctctcttcttatacttgcattttatgtgttaaacacttttctaaagtttgaatccatttggttgtatatttggctttgtangggatgatgt

SEQ ID NO: 87365 - DNA, 1293 bp, Arabidopsis thaliana columbia
cgttttctttatttattcgggagaggttaaaagccacagaaacttattggctagaattggttatttataacaacaacacatgagcaaaaagctcaaaacatctacatactctttggaatcctcgattttttgtacgtgtaaagaagtcacacaagaaaatcttgggttgttgtaatcttcatcacactagtatgtcaacgggacaagcgccggagaagtccaatttttctcagagatgtagtctgctcagccggtacttgaaggagaagggaagttttgggaatattaatatggggttggctcgaaaatccgatcttgaactcgccggaaaattcgatctcaaaggacaacaaaatgtgattaagaaggtagagacctcagaaactagaccgttcaagttgattcagaagttttctattggtgaggcctctacttctaccgaagacaaagccatatatattgatctcagtgaaccggcaaaagtagcaccggagtctggaaattcacagttgaccatattctttggaggaaaagttatggttttcaacgagtttcctgaagacaaagctaaggagataatggaagtagctaaagaagcgaatcatgttgctgttgattctaagaacagtcagagtcacatgaatcttgacaaaagcaacgtggtgattcccgatcttaacgagccaacgagttccgggaacaatgaagatcaagaaactgggcagcaacatcaggttgtggaacgcattgcaagaagagcttctcttcatcgattctttgctaaacgaaaagacagggctgtggctagagctccatatcaagtgaaccaacacggtagtcatcttcctcccaagccagagatggttgctccatcgataaagtcaggccaatcgtcgcaacacattgcaactcctccaaaaccaaaggcccataaccatatgccgatggaggtggacaagaaagaaggacaatcttccaaaaaccttgaactcaagctttagggcgtataaaatgcacgatcgagttcacgtttctagttttcacttatttaggatttgaacccaaatacccttttatattttcttccattacttttgaccaatttaagttatttatagtactgtattacgtagctagtatttatatttcaaaacatacatattttgatacttgttttttagattctttaattaaaattgtcatctggattaaaaaaaaaaaaaaaagggcggccgctctagaggatccaagcttacgtacgcgtgcatgtgacgtcatagatcttctatagtt

SEQ ID NO: 87366 - DNA, 1506 bp, Arabidopsis thaliana columbia
gatattttagctgtatggttttggttccgatcacaaagtgcgtcgaatcgagctacttcctccgccggctttgctgtgtgtgtgatcgttcgtttactaaatctgaaacaagtatctaacgccttgccggagatgtcgagctcaggccaaactcagttccgttatacacagacgccgtcgaaggtggttcatctgcggaatcttccatgggaatgcgtcgaagaggagctcatcgacctttgcaaacgattcggcaagatcgtcaataccaagagcaatgtcggcgccaatcgcaatcaagctttcgtcgaatttgctgacttgaatcaagctatatcaatggtttcgtattatgcttcatcttcagagcccgcacagattcgtgggaaaactgtctatattcagtactctaatcgccatgagattgttaacaatcagagtcctggagatgtccctggaaatgtcctcttggttacctttgaaggagtggaatctcacgaagtcagcatcgatgttatccatctggtattttctgcttttggatttgtgcataaaattgccacatttgagaaagctgctggtttccaggcactagttcaatttactgatgtggagactgcatccgcggcaaggagtgcgttggatggcagaagtatacccaggtatctgctttccgcacatgttggttcgtgcagtttgcgaatgtcttattcagctcatactgatctcaacatcaagtttcagtcccaccggagcagagattacacaaatccataccttccagtgaatcagaccgcaatggatgggtctatgcagcctgctttaggtgctgacggcaagaaagttgaatctcagagcaacgtccttctcggtttgattgagaatatgcagtatgctgtcactgtggatgttcttcacacggtgttttctgcatatggaactgtccagaagattgctatatttgagaagaatggttcaacgcaagcattaattcaatactctgatataccaacagcagcaatggccaaagaagcactggaaggacactgcatttatgacggtggctactgtaagcttcgactatcatactctcgtcatactgatctgaatgttaaggcttttagcgacaaaagcagagactatacacttcctgatctaagcctacttgtggcacaaaaaggtcccgcggtgtcgggttctgcaccaccagcaggttggcagaacccgcaagcgcaaagtcaatactcaggttatggcggaagccatatatgtacccatcatctgatcccaacgggcttcaccctcaggtcaacctccttactatggatgagatattgtttactaaaaatttcggattttgctgccactggggagtatttccatgtttaggtttgtttgaggttaaaagtgtgattgttctttcttttttgttgttgacataatttaagtgggaagaccaataataaatcgaatatgttgcgcttgctaaaaaaaaaaaaaaaaaaa

SEQ ID NO: 87367 - DNA, 542 bp, Arabidopsis thaliana columbia
cccttcctcacgctggtctcttcattattcgatatcattcctttttttccattgcccaggccaggagccttccccacccttgatgaacgatgaggacagaagatgatctccaaggggctccaggtctccaataattatgccctatccagtaagagcaaagttctggtagatgtcgaacaaagtgaacccttactacatttcactcatcaacaagtattttccggcgaaactaaaatggtgagataaagctacgagtcaattaattaactatcttttatgaggagaacgagatcgaaggttaacgagtttctattgtatacaacggaagataaatctatctaataaaaaagttggtgtgttcatttgtaatttttttcccccatcagtttaaaagttatgttgtatgaaataagtatttcaataataatataataaaatctaattaaaataaaaaaaaaaaaaaaggggcggccgctatagaggatccaagcttacgtacgcgtgcatgtgacgtcatagtacttctatagtgtctcccaaat

SEQ ID NO: 87368 - DNA, 494 bp, Arabidopsis thaliana columbia
gaaaaagcttcttgtccttgatgattgctttcctcctccaacatcgtcgtcaatggaaacgagaatcctttgatctctcctctcaatcgtctctctctctgtcgccatctccgccgtcgtcaatggaaacgagaagtcgaagcccaccgtgtcgtactctgaaaaatctgagaagtctcttttcgtctttgatcaaaagttgatcgtctctcatctctttgtctggtacatggattctttgattggggtttcttcctcatgttagagttcctcctaggtcgagatcaaaaccttcctaggtgctcttcgctttcactgcccccaatctcttccttctccgcttgtgttctgaaatcatcatcgattggggctgacatagaggatgtgggagaagttattcaaccaatcacgaatcatcattcatcccgcgatcaggcaatcttcgtttttggagcagaagccagattctacaggacttgcctgatacagcacac

SEQ ID NO: 87369 - DNA, 1016 bp, Arabidopsis thaliana columbia
  unsure (1)..(1016): unsure at all n locations
attntcttttcgcacactttctcgacacctcaatataactcagctgagagaaacgcgtctctcagatttcaatccttcactttcccttttctttttttctcgttatcggatcagaacaaaattttgggaaattcgaggtttccctggattgttggattcgattattgttgaaattcgatatgggtgtttgttgtttgtgttaatcgttgtcaaagttttgatttttttcctcgagaaaatttgagattttttcgttcgtctaatcgagagaaaacgcagccattttactacgatcaaattcaaacccctgaatactgaagcgaaattgaggttaatggttagggagcttagggtttatgaatgatcaggtggtatttggtatttgacatgaattacggaacacgagtgatatctctatcttctccagattgtttaagcttggggtttagtttccatagattgaagatttgctatggatacgggtcgcggagagggtaaagaagctaatggatgtgagaataaggctatagttagttgaaatagcagcgaaattgaagatcaaatctttgaggaagaagaaagtgagtcacaatgtttattgcctccaaggaaaggaggcatgtctagaagcactgacaagattaagaggactgtgctgtggaatgacattaaaggagacaatcgtgctgaggttttactttatgaaccaagcgaagttagcggtacagaggccgttgtttcagattcctgcatctgcacaattatgtagtctaccaatccgcaatcaaccaccattaacatggagtttaacaatgagctcgtccttgcaatctgacttcttttcacccatcagtttttgtgaggacagacaaacgagaacctgagcgattgggcattacactcatgttactgtctgatttttatgcctaaagggacttctgaccaagaagcccttccaaacaagggatttagactcataagcctatatcagattggtctcatctctcagggccaag

SEQ ID NO: 87370 - DNA, 938 bp, Arabidopsis thaliana columbia
  unsure (1)..(938): unsure at all n locations
atgatactgccagctannnnnnnnnnnnnnnnnnnnnnnnnnnnnnnnnnnnnnnnnnnnnnnnnnnnnnnnnnnnnnnnnnnccacgcgtccgaaaacgttttatcctgagtttctttcaccatccagcttcatttgtgaaaaatcgtcaatccctctcaaactcttctcaccactaatttcttcctctggaacattctcttctctattattttgattcccttggcctcaacactggtttctcaattgcatgatcttggctcgtcttcagttactttgattcactgagaaaaatggcgactggagtattgccagctccggtttctgggatcaagataccggattcgaaagtcgggtttggtaaaagcatgaatcttgtgagaatttgtgatgttaggagtctaagatctgctaggagaagagtttcggttatccggaattcaaaccaaggctctgatttagctgagcttcaacctgcatccgaaggaagccctctcttagtgccaagacagaaatattgtgaatcattgcataagacggtgagaaggaagactcgtactgttatggttggaaatgtcgcccttggaagcgaacatccgataaggattcaaacgatgactacttcggatacaaaagatattactggaactgttgatgaggttatgagaatagcggataaaggagctgatattgtaaggataactgtccaagggaagaaagaggcggatgcgtgctttgaaataaaagataaactcgttcagcttaattacaatataccgctggttgcagatattcattgtgcccctactgtagccttacgagtcgctgaatgctttgacaagatccgtgtcaacccaggaaattttgcggacaggcgggcccagtttgagacgattgattatacagaagatgaatatcagaaagaactccagcatatc

SEQ ID NO: 87371 - DNA, 609 bp, Arabidopsis thaliana columbia
ctgtcccgctccatcgcacccgctttgcttaccacatccatcattcattcatttcctttctttctttcttcttcttccgtttcttttgcctctttcttttgtcttcttccttctatttttttgtggctttaaatttattgggttttgttcttcttcttcttctatagccgtttcatcttcacaatagcatcttcttctttttttccctgtcaagatcctgaatcatcggatctagaaggaaactagagtttgtgaaatcagattaaatcttgtgagaaatctctgaaaaagctgcaggtttctatacttctgttagtactctaattcaaccgagaaagtcgaatacatacacacattcataacacttttgaggaagatgttaagtggaaacaatggaaacactgcaccaccggttttcatgaacgagaaccagttgcaataccagacaaacctacgatcgaatcagcttcacttgctcggaaacatgggaggtggatgcactgttgatccagtaaactactttgctaacggtaacctcgttccaatgatccgccctaacaaaagaggaagggaagccgtaagcctagtaacaacatccaaagacaacag

SEQ ID NO: 87372 - DNA, 761 bp, Arabidopsis thaliana columbia
ccatttaaggaggccttcaaaagggcccattgccagtttttctttcattaagggtatggtcaaacccgccggtgtgtttcaccagaattttccaagtcttcccagggttgttctttgatgaaaagctttcagtacgtgttgcagacagcggttgggcttatatgttacccccacgcccatcgagtcagatggcgggttatgccgctcctaaggttgagtatggaagctacacttgtcagagcgacgtatttagccttggggttgtaatgtttgaactgccccctgggcgcagcccatttgcccgggcaaggccggggggccatcaaacccttgcccagtgggcgatcccccggcttcatgccatcgatgcgttgacaagaatggttgacccgtcattacacggagcgtatccaatgaaatcattgtcacgttttgcagatatcatatcacgttcactgcagatggaaccaggatttagaccgccgatatcagaaatagtccaagatcttcaacatatgatctaagatacacaaccttggactaagacgcagaagcaatagtttattgtcagattcttgttctttgtcctttgatgaatgaaagtatttcttttgtattataataacactttatgtatgttgttggctgtatgaaatgagctatgggatcatcattatgtaaccccaatcccattaccggctcaaacattattcaccaacctgatgcggccgcgaattcgatatcaagcttatggatacaat

SEQ ID NO: 87373 - DNA, 2037 bp, Arabidopsis thaliana columbia
  unsure (1)..(2037): unsure at all n locations
gaaagagcaatctctctatactacaaacaccaaagtttaaaattaaacaaaatcttcaagaaacactttacgaatttctgcaatggcttcacttcaattttcttctcagtttctgggctcagacactaaaacacacagctctatcatttccatctctcgtagttactctccaactccattcactagattctcccgcaagaagtatgagtcatgttcgatgtctatgaatggttgtgatggagatttcaagacgccacttggtacagtggagacaaggactatgactgctgttttatctccggcagccgccactgaaaggctaatctccgccgtctctgaactcaaatctcaacctccgtcgttttcctccggcgtcgttcggttacaggttccaattgaccagcaaatcggagcaattgattggcttcaagcccagaatgagattcagcctcgctgtttcttctctcgtcgcagtgacgttggtcgtcccgatcttcttctcgatctagctaacgagaacgggaacggaaacggaaacggaacagtgtcatctgatcgtaatctggttagcgttgctggtatcggctctgcagttttcttccgtgaccttgatcctttctctcatgacgattggagatccatcagaaggtttttgtcttcaacgccacctctgattcgtgcctatggtggtatgcgttttgatcctaatggcaagatcgctgttgaatgggaaccttttggtgcattttacttttcagtccctcaggttgagtttaatgagtttggtggaagttcaatgttggctgcaactattgcttgggatgatgaactctcttggactctggaaaatgctattgaagcactccaggagactatgcttcaagtttcttctgttgtaatgaagttgagaaacagatctttaggagtatctgttttaagcaagaatcatgttcctaccaaaggagcttatttccctgctgtagagaaggctttagagatgattaaccagaaaagttcaccccttaacaaggttgttcttgctcgtaacagcaggataattacggataccgacattgatcccattgcttggctagcacagttacagcgcgaagggcatgatgcatatcagttctgtcttcaaccacctggtgcaccagcttttatcggaaacacgcctgaaagactattccaaaggactcgattaggtgtctgcagtgaagctttggctgcaactaggcctagagctgcttctagtgctcgtgatatggagatagagcgtgacttactaaccagtccgaaagacgacctcgagttctctatcgtacgagagaatataagagaaaagttaaacggtatatgtgacagagttgttgtcaagcctcaaaaaactgtgaggaagcttgcaagagtgcaacatctatattctcaattggcagggagacttacgaaggaagatgatgagtataaaatattggctgctctgcatccaactccagctgtttgtgggcttccagcagaagaagcaaggcttttgattaaggagatagaatcattcgatagaggaatgtatgcgggacctattggattttttggtggcgaggagagtgaatttgcagtcgggatcagatcagctctagtcgaaaagggtcttggggcattgatctatgcggggacagggatagtagctggaagtgacccatcttcagagtggaatgagcttgatcttaagatatctcagttcaccaagtcaattgaatatgaagcaacaacatctctacaggcgattaattgaagaaagagtaacatttgtatttgattgttttgtttgtatgggggataaggggttctcccaataagaaagcaatgttgtctctcttgtaaattaaaaaagaaatgctttaatttgttaatgggccgagccttttcgggttgtaactagggcaggcctatcatgaatgttcataggcctagctgttatgattgttaatgagcttctanagtgtttttcttcnnnnnnnnnnnnnnnnnnnnnnnnnn

SEQ ID NO: 87374 - DNA, 469 bp, Arabidopsis thaliana columbia
ataaaactttggttcctccgaatttcgagttcttgttcttcccaaggcccctacttcggccctagcatcaaccattgtcgttttaaagctccaggttttcatggccaagaaagaagtaactatcgttgagatcttctgaaattaatcagtcttgaagtctctggagattgtcttataacatggactccatggatattgatcaaagtaacataggtgaatcgcctcaccttctgctgagaccagtaagtccattggaatctggtgaaggtttaccttatgctcctgagaattggcctaatcctggagatacttggcattggaaggttggaccgagaattagcggtaaaggctacttcgtggatagatacttatatcctcctaagtatcttcccggtttagatactgaaatattgcggaaaaataaggtgtttaagagcaggctctcgctccaacgatatattcgtgtaca

SEQ ID NO: 87375 - DNA, 649 bp, Arabidopsis thaliana columbia
tagctcattcttgcctccaaacaaatattcctgacagaccagaccactcgtaagacagaccaaaccctaaactaaaagcatccacgttctttgtttttgtattgatggtctgatctcatatccatggagatggagaatcaccgccccggcagtttcacctacatgggccgcaaattcagcgatttaagtctcaacgatgactcctctgctttcagcgattgtaacagcgacagatccggcgaattccccactgcttcctccgagagccgtcgtctcctcctctcttgcgcctctgagaattccgatgatctcatcaatcatctcgtgtcgcatcttgattcctcctattcgatcgatgagcagaagcaagctgctatggggatcaggctcttatccaagaacaaacctgagaatcggatcaaaatcgccaaggccggtgcgattaagccgttgatttctctgatctcttcttcggatcttcagcttcaggagtatggtgtcactgcaatcttgaatctatctctctgcgacgagaacaaagagtcgattgcttcttccggtgcgattaagccgcttgtcagggctttgaaaatgggaacaccgactgctaaagagaacgctgcttgtgctctgctccgtctatcgcaga

SEQ ID NO: 87376 - DNA, 555 bp, Arabidopsis thaliana columbia
  unsure (1)..(555): unsure at all n locations
nnnnnnnnnnnnnnnnnnnnnnnnnnnnnnnnnnnnnnnnnnnnnnnnnnnnnnnngaaatcccgggttggaccacgcgtccgcgcacgcgtccgcccacgcgtccggaacaaaagaaagagagatgcctcattcctcccacctgaggagcctatgaacaacaatagcaacgcaaacaaatcagaggatggaaagaatgatataaccgagttaacaaattccttgaagagcaagacgaaggagttgaaaaagcagaaaaagacacacgagagagtgaatgcggaggagtatattgctggtccatcttcttctgctgataaatcttccaagaagtccaaaaagattagagattaattctaaatcctgtttttttttaaaaaaaaaaaagagagaaaagattgaaacttatctatgctcaaaactgtaaaaacaagttaaatctttatttcagccgtcaagttaaaaaaaaaaaaaaagggcggccgctctagaggatccaagcttacgtacgnnnnnnnnnnnnnnnnnnnnnnnnnnnnnnnnnnnnnnnnacaa

SEQ ID NO: 87377 - DNA, 1138 bp, Arabidopsis thaliana columbia
  unsure (1)..(1138): unsure at all n locations
atctttgtntgagcaagancttgttgattgtnacacaagttacaatgatggatgtggtggaggtcttatggattatncttttaagttcattattgaaaacggtggtattgatacagaggaagattatccttatattgcaactnatgttaacgtgtgcaattctgataagaagaacactcgtnttgttaccatcgatggttatgaggatgtncctcaaaacgatgagaagtctttnaagaaggctcttgctaatcaacctattagtgttgccattgaagctggtggcagagcttttccagctttacacatctggtgtgtttacaggaacatgtggaacatctttggaccatggtgttgtagctgtgggatacggttcagaaggtggtcaagactactggattgttcgtaactcatggggatcaactgggggagaaagcggatactttaagctcgaacgtaacatcaaagagtcatcagggaaatgcggtgtggcgatgatggcttcttaccctaccaaatcatcaggctcaaacccaccaaaaccgccagcgccttcaccggttgtttgtgacaagtctaacacttgtccagctaagtccacttgttgttgcctatatgagtacaatggtaaatgctatagctggggatgttgtccgtatgagtcagccacttgttgcgatgatggttctagctgctgcccccagtcataccctgtctgcgatttaaaggccaatacttgtagaatgaagggaaacagtccgttaagcataaaagctttgacacgaggaccagcgattgcgaccacaaagtctacaaacatgctagtgggcagcgcttgaggagagataatacaaacgaagaaccgatttgttttcagcccacgttatcaagattcagtcttttgtctttagacacttccaagttggatcatagtttgattactcttgtcaaatttaatgttatcttggatttgattttacttgatgtaaatgtttaagaagtaatctgatatttgcttccataaaaaaaaaaaaaaagggcggccgctctagaggatccaagcttacgtacgcgtgcatgcgacgtgatagctnnnnnnnnnnnnnnnnnnnnnnnnnnnnnnnnnnnnnnnnnnnnn

SEQ ID NO: 87378 - DNA, 673 bp, Arabidopsis thaliana columbia
ctcaatctagctctcttctctatctttctctaaatcaggggtcttcctgaagatttcatcaccgagcttcagagtccaggttacatattaatgatactttacgtcatcggtttctttagagacatggtcgatgctctttgtccttacattggtctacctagttttctagaccacagcgagacctctggacccgatccgacccgacacgctctctctacgtcagcgagtcttgctaacgagttgatcccggtggttcggttctcggatcttccgaccgatccggaagattgttgtacggtttgtttgtcagattttgagtccgacgataaggttaggcagctacccaagtgtggacacgtgtttcatcatcattgtttagaccgttggatcgttgactacaacaagatgaaatgtccggtttgtcggcaccggttcttaccgaaagaaaagtacacgcaatgtgattggggttctggttcagattggtttagtgatgaagtggaaagtaccaactaattggtagttttaatctatgtcggcagaatgtttgttgtattaattccagtataactctatgtatattagcatagatcatctttttgtgatggaacaacactatatatctttatacaaaaaaaaaacactatatatattatcaaaaaaaaaaaaaaaa

SEQ ID NO: 87379 - DNA, 545 bp, Arabidopsis thaliana columbia
ttagtttcagctagtaaagatgagaaaaaggcagtgttgtctcgcatagaagaggaagcaagtccccttaagggctccaccacgaggtatggaaagctttacttgaaactcgcaaagagctacatagaaaaaggttcagactatgctagcaaagaaacggagaggcttggacgggtgcctgggaagtcgataagtccagtgaaagctgatgaactcactctcaagagaaatatccctacccacgttcgttgtttcttcttaaaagtcatatagcttgaagctaagagaataggagtcgagagagtttataactgatactgttttgagattttatgtttgtcaagatcaagaacgtctgtggttatttctggttagttctgaaactcttttgaacccaagtttatctgtctctggtgaacaagcgaccacgataatcataaacttcattcgcgttagaaaaaaaaaaaaaagcgcggccgctctagaggatccaagcttacgtacgcgtgcatgcgacgtcaagctattctatagttcgcctaaat

SEQ ID NO: 87380 - DNA, 1526 bp, Arabidopsis thaliana columbia
  unsure (1)..(1526): unsure at all n locations
nnnnnnnnnnnnnnnnnnnggaaaggctggcccgcctgcaggtcccggcccggatttcccgggccgcccccccccggccgcacttgttctaaagatcaaagcttaagtgagaagcagaaaaaaaaatggcgaaatctcagatctggtttggttttgcgttactcgcgttgcttctggtttcagccgtagctgacgatgtggttgttttgactgacgatagcttcgaaaaggaagttggtaaagataaaggagctctcgtcgagttttacgctccctggtgtggtcactgcaagaaacttgctccagagtatgaaaagctaggggcaagcttcaagaaggctaagtctgtgttgattgcaaaggttgattgtgatgagcaaaagagtgtctgtactaaatatggtgttagtggatacccaaccattcagtggtttcctaaaggatctcttgaacctcaaaagtatgagggtccacgcaatgctgaagctttggctgaatacgtgaacaaggaaggaggcaccaacgtaaaattagctgcagttccacaaaacgtggttgttttgacacctgacaatttcgatgagattgttctggatcaaaacaaagatgtcctagtcgaattttatgcaccatggtgtggccactgcaaatcactcgctcccacatacgaaaaggtagccacagtgtttaaacaggaagaaggtgtagtcatcgccaatttggatgctgatgcacacaaagcccttggcgagaaatatggagtgagtggattcccaacattgaaattcttcccaaaggacaacaaagctggtcacgattatgacggtggcagggatttagatgactttgtaagcttcatcaacgagaaatctgggaccagcagggacagtaaagggcagcttacttcaaaggctggtatagtcgaaagcttagatgctttggtaaaagagttagttgcagctagtgaagatgagaagaaggcagtgttgtctcgcatagaagaggaagcaagtacccttaagggctccaccacgaggtatggaaagctttacttgaaactcgcaaagagctacatagaaaaaggttcagactatgctagcaaagaaacggagaggcttggacgggtgcttgggaagtcgataagtccagtgaaagctgatgaactcactctcaagagaaatatcctaaccacgttcgttgcttcttcttaaaagtcatatagcttgaagctaagagaataggagtcgagagagtttataactgatactgttttgagattttatgtttgtcaagatcaagaacgtctgtggttatttctggttagttctgaaactctttttgaacccaagtttatctgtctctggtgaccaagcgaccacgataatcataaacttcaatcccggtaaaaaaaaaggtcagaaantggccaggtcngattcattattaatggntnggnngtgtnanaaaaagcctnaatggcatttngggtcaaagggccccnntaataacatttccccnttttaagg

SEQ ID NO: 87381 - DNA, 442 bp, Arabidopsis thaliana columbia
gcgatcgagacaaagaaaaaagttgctggagattttgaagatgaccgaaccaaagaggaatcgtaaaacagatatattttctactacacccattgaaaaaggaaatggaagagggaggtcttattgtgttaatgttcatggattttcatattccagcagaattgtttaactggggcgtgttcaatgggatgaagctaatatagtggagattgaatcgaacaaacctgttaggcagaagattactgaaccaaagacaccataccacccgatgatggatgatgatggttctttgtctcctagaggaagagcgtttgatgaatgtgttgatgatatgcaacgagctgaagaactgaggaatgttctgaatgatgcagcagcttcttccagtagaaatagtagccagggttctggtggtggtggctggagctcgtctgatgaagaa

SEQ ID NO: 87382 - DNA, 595 bp, Arabidopsis thaliana columbia
  unsure (1)..(595): unsure at all n locations
ggcgatcgagacaaagaaaaaagttgctggagattttgaagatgaccgaaccaaagagggggcgtgttcaatgggatgaagctaatatagtggagattgaatcgaacaaacctgttaggcagaagattactgaaccaaagacaccataccacccgatgatggatgatgatggttctttgtctcctagaggaagagcgtttgatgaatgtgttgatgatatgcaacgagctgaagaactgaggaatgttctgaatgatgcagcagcttcttccagtagaaatagtagccagggttctggtggtggtggctggagctcgtctgatgaagaagaagaagaagcagatccaatggatcaagatgaagaaggttctggaagtggtaaaaatgaacgtttcaacgcacacagaaaagcacatttccggcggggtttcggaagggttaaggacctnagatncncagggtcatnctttnaagnagaaggggaagggggnttattgtncaaaaggttgtaaatccggggcaaccaacaaaccttanggcaccccttaangggggaaccaaagggtttgttcacccaaacgggttnagggcgntc

SEQ ID NO: 87383 - DNA, 528 bp, Arabidopsis thaliana columbia
aggtctctacgactcactattgggaaagctggcacgcctgcaggtaccggtccggaattcccgggtcgacccacgcgtgcgcttcaggtaggttcgttgctcactcacgtcacgccggagaagacacatcggagatcgacaaatcgattcagagagagagagagatagcaattttcttctgtagtgttactttctgagagagtctggagagatcggtgttgagatttgggtaaatggaaacgagggagagagatctagaacgattgatcccgatgcataaatccggagcttctcctcgcgacgtcgttttgtctgttccgccgtctcctctcgcttctccgatccacgtcgccggcaaagaggcgatttacaaagtcattagaagctgggcctccaaaaagttcatgaccggatgtgtcattctgctaccaatcgctgtcacattctacttcacgtggtggtttatacatttcgttgatggattcttctccccgatctatactcatctcggaatcaatatgttcggtc

SEQ ID NO: 87384 - DNA, 449 bp, Arabidopsis thaliana columbia
cccacgcgtccgaaagttctaccaagtactccttctgattggcaaaacgaggatgcaaattccatgggaaggagttctatgaatgatgagaattcaacgcagcaagatggcacaaccatgagagaaacccagagcatgctattggaaagaatagctagtgaaatgaatcggctcaagttctatatggctcatgcacagaacctgcctttcattgagaacatggagaagaggattcagagcgctagtgtgttattggatgctagcctaggtcattgcttcattgatgggctaaacaacagcgatacaagtgtcctttacaactgcttacgtgcatatgctgccattgataacaccaacgctgcagaagaaattttccgtacaacgattgtagctccatttattcagaaaattattacacatgaaacaacaacgaatgctgctggaacatc

SEQ ID NO: 87385 - DNA, 825 bp, Arabidopsis thaliana columbia
tgagatacgattacgaattgattgaaactaccttgtcactgtgtacaaaggcaatttacagtaatggcagagactaaaccattgataggtcttacgtgggaaccaaagcttccaggcttatccttagacacgaaaacatgttccacttcaagcaaaagagttgagagtcacgaaagcagttctctctggatgtctaagtcagagcttgttgatggtctttgtcttcctcctaatgatccaaagaagattaataagatgattaggaaacaaatcaaagacacaactggttcaaactggtttgatatgcctgcaccaacaatgactccggagttgaaaagagatcttcagttgcttaagttgagaactgtaatggatcctgctgtacactacaagaaatctgtgtcacggtcaaagctagctgaaaaatatttccagattggtacagtaattgaaccagctgaagagttctatggaagattgactaagaagaatagaaaagcaactcttgctgatgagttggtttcagatcccaaagtttctcagtacaggaagcgtaaagttaaggagattgaggagaagagtagagctgttacaaataagaagtggaagaaaaagggaaaccaaaccacgaacaaaaagcaaagaaggaactgatttacttttgttagaatatgattatagttttgggatacttattttctgttttgattagaatattgatcatagtatcgggacacactttctgttggtgctatagattcaccttaccctgtaatgactcttgttgttttataaaaataaattaaaggatttctgttatcggtt

SEQ ID NO: 87386 - DNA, 526 bp, Arabidopsis thaliana columbia
  unsure (1)..(526): unsure at all n locations
atgatactgccnnnnnnnnnnnnnnnnnnnnnnnnnnnnnnnnnnnnnnnnnnnnnnnnnnnnnnnnnnnnnnnnnnnnnnnccacgcgtccgagaagagacttcaggttcctaccttgttatggctgctcgaatgtcagggatctcaagcaaattttcttaatcgggatatcccagatgcaggtgtagagacggaaaaaaacggtgaccctgtggtttctgtgaggttctggaagctttgtgttgatcctcatttactacacgaagctttcttgttagaaaattttgacatatttgaatggtcaaaatctaaaccattggaagattggagcgatatgtacagagaagtaatcaggaagaatgagctctatgtgccatgcaatcaagatggtcgaagtagtaatgaggtggcttcacttgcaaaccacgcttcaaattcttcaccaaaagctgcggtaactgccaatgaaaactctgcgttccagaaccccaaagaaatccataagaggaccggggagcttataga

SEQ ID NO: 87387 - DNA, 806 bp, Arabidopsis thaliana columbia
ggactgtccactgccgtaccggtccggaattcccgggtcgacccacgcgtccgctctcgtctatatctttctctcacactcatgggtcttcctacagatttcaaagagcttcagattccaggttacgtactaaaaacactttacgtcatcggtttatttagagacatggtcgatgctctttgtccttacatcggtctaccaagttttcttgaccacaacgagacctctcgacccgacccgacccgactcgctctctccacgtcagcaactcttgccaacgagttaatcccggtggttcgtttctccgatctcttgaccgatccggaagattgctgcacggtttgcttatccgattttgtatccgacgataagattagacagctaccgaagtgtggacacgtgtatcatcatcgttgtttagaccgttggatcgatgactgtaataagataacgtgcccgatttgtcggaaccggttcttaccggaggaaaagtccacgccgtttgattgggggacttcagattggtttagagatgaaatgtgaagaaccaactaataatgatggttttacttttacttgttacttttttcacgggaatatttttctactgtataaatcttttttccaaactactggataaatgaaggtataagattatggaattggggatattagcatcaaatatttttttttggtaaagaaccgactggataaaaatcatccaatggaatccggctttttctttttttttggaataaaaaaagtgggacaggattaaacgcgggggaaaaaatcattgggttttt

SEQ ID NO: 87388 - DNA, 539 bp, Arabidopsis thaliana columbia
  unsure (1)..(539): unsure at all n locations
cnnnnnnnnnnnnnnnnnnnnnnnnnnnnnnnnnnnnnnnnnnnnnnnnnnnnnnnnnnnnnnnnnnnnnnnccacgcgtccggttatgggtcaggtagagaaacggccgatttctaccatcgtcttcatcgttgctatgcaaaaggaagctcagcctctgatcaacagattacgcctcgttgaagaagttaatactccgtttccaaaagaggtgacttggattatgtttaagggaatgtataaagacttgaacatcaatatagtgtgtcctggaaaagattcaactcttggggttgagagtgttggcacagttcctgcatcactcgtgacttatgcttccattctagcaattcaaccagacttaatcattaatgcgggaaccgctggtggctttaaggccaaaggagcatgtattagcgatgtttatgttgtctctactgttgctttccatgacagaagaatacctgttcctgtccttgatatatatgngtgttggtatgcggaacaccttccccacacccaaccttataaaggagct

SEQ ID NO: 87389 - DNA, 558 bp, Arabidopsis thaliana columbia
  unsure (1)..(558): unsure at all n locations
tgatacttcnnnnnnnnnnnnnnnnnnnnnnnnnnnnnnnnnnnnnnnnnnnnnnnnnnnnnnnnnnnnnnnnnnnnnnnccacgcgtcccgcttctaacggcgcctcatcggtcgtcaagccttaccttctcatcccagctttgatggcatggcttgggggttctggttctctgattggtatatgggtggcttctttctgcaaaatattctttccgagcaacatctatctccggagctgctattcttgatgatggtaaaacccctcagaagaaaaatgtactgtttgttatcgcacatcctgatgatgaatcgatgttcttttctccaacaataaactacttagcttccaatgcttgcaatcttcacatgttatgcttgtccactggtaacgctgatggtatgggaagcattaggaacaatgagctgcatcgggcatgtgcggtgctcaaggttccgcttcaacagttaaagattctgaaccatcctaatttgcaggatggttttggccaattatggagccacgatttgctaacagagatcatcgaagaagaagtca

SEQ ID NO: 87390 - DNA, 659 bp, Arabidopsis thaliana columbia
  unsure (1)..(659): unsure at all n locations
cnnnnnnnnnnnnnnnnnnnnnnnnnnnnnnnnncgcctgcaggtaccggtccgctatacaggggtcgacccacgcgtccgggcgacggagagaatcggagaagaagatgggaacggcggtgggacagtggctagaggaagcgcttgttgacctctgccgcaaaccagagaccggtttgaatttcgatcgtgatgtcatctccggtttagtctcctattgcgatcttgctcagcctgtcgatgccaaggaatatctcgacaatattattggaaaagaaggcaaaagcatcattgcagaatatctacagcgaagaggatacaaagatccatctaaccatgtagcagccagttcaggtccagaactgcaaatgtatgttaagccaaaagtggataatggtgcttctagtggaaccaagaaaccgtttaaaacaccaaaagagggaacatcttctaatcagcaagctggaactgggaaattaacagctccggcccgcaagttnatccttnggngganaanagttnggaaggtgattttttttnccgaggggttaangttcantnagtgttttgcaagnaaaccgtttnatgccaantcgtggaccccttgtggcactctttngtttgggaattgttcgccaantgtaggcttnntttcgntc

SEQ ID NO: 87391 - DNA, 562 bp, Arabidopsis thaliana columbia
  unsure (1)..(562): unsure at all n locations
atgattatttcccagctctcnnnnnnnnnnnnnnnnnnnnnnnnnnnnnnnnnnnnnnnnnnnnnnnnnnnnnnnnnnnnnnnccacgcggccgcccacgcgtccggcagcggatttggtgttgggtggagatgaaggagatgagtgtactttcccaaagggttacatgaaaaggcaagcaattttctcatgcattacatgtacaccagaggggaatgctggaatttgcactgcttgttgcttatcttgtcatgatggccatgagcttttggagctgtggactaagagaaattttcgatgtgattgcgggaactcaaagtttggaactttggcttgtaagcttctcccgagcaaagatatagaaaactctgaaaattcttacaaccataatttcaaaggcttgtactgcacttgcgaccgaccttaccctgacccaaatgtggaagaacaagtacagatgattcagtgttgtctctgtgaggattggtttcatgaggagcatctcggtctcacaccttcagacagtgttggtagccagattccaagggatgaggaaagtgag

SEQ ID NO: 87392 - DNA, 586 bp, Arabidopsis thaliana columbia
  unsure (1)..(586): unsure at all n locations
accacgcgtccgagcgagatgaggccggagatagttctgttcggcgactcgatcacggcgcagtcttttaggtccggcggttggggatctgctcttgccgacgcttactctcgcaaggctgatgttgtggttcgaggctacggcggctacaacacccgatgggctctcttcttgcttcatcacatcttccctctcggctcttcgtctcctcctgttgctacgacgatattcttcggtgcaaacgatgcagctctcaaaggaagaaccagtgatagacaacatgtgccggtggaagagtacacagataatgtcagaaagattgttcagcatttgaaggaaatgttcacctacaatgctaatttgtgcttataactccaccaccaattgatgaagctggacgtcaaagttatgcaggatcaatctacggtgagaagctntgaaagagcctnaggggncaaacggancaacaggggtttttccaacattgtntncaattgnccnggacnggtttcagtttgtacttatggctaggtcaggaccatntttnagnaagncctagtntggtcnttnggctaggattggtngc

SEQ ID NO: 87393 - DNA, 806 bp, Arabidopsis thaliana columbia
  unsure (1)..(806): unsure at all n locations
gtttttnatgtttgccgaccggaatattttccggtgaatagccgtcccgagtggctcggacttctgcccggtatctttcagctttgatagtggagatagccggtttacgtctggcaaacccagtttctatgaatggttttggccgggtttttatcttttctccccgtcggtcgggttataacccattgcttttcccctttattccaaataatttctccagatctgagttaggaattgatttttaggtactagatcctaaaaattaataattctggcttgtgattttggaaacctcgatttgcaggaaatctatcaagcggttatttcttggttgaaagattgaagaatattccgatgcatattaccattcccttatgttgtgttctttaggagttccgttcagtgttatttaggtggtaaacaaaaaaatttcgtgcgatgtttcgacgatattttcttccccggattctgggcttctcgacggcaaggttgatgtcgttaaatttctgatgatgacttatcggcatgtgttacagttgaattctaaagtcaacacgtgttttcggataagagtccaacgttaagaatctttttgctgtacatgttactctaatgggctattgttgggctccaattttcttgctgcacaatcgttgtaggctttaagtcttgtatcttttgtttaataaaattcactcgggaaaaaaaaaaaaaaaaaaaaaaaaggcgacccgctctagaggatccaagcttacgtacgcgtgcatgcgacgtcannnnnnnnnnnnnnnnnnnnnnngtcattc

SEQ ID NO: 87394 - DNA, 907 bp, Arabidopsis thaliana columbia
  unsure (1)..(907): unsure at all n locations
nnnnnnnnnnnnnnnnnnnnnnnnnnnnnnnnnnnnnnnnnnnnnnnnnnnnnnnnnnnnnnnnnnnnnccacgcgtccgcccacgcgtccgcccacgcgtccgcccacgcgtccgtacggctgcgagaagacgacagaagggggagtgtaagtcactcgcttctcatgtaaactataatatattgaatctcctctctcttctctttttcgcaactttcacagagaggtagtttttgatgtttgccggccggaatattttccggtgaatagccgtcccgagtggctcggacttctgcccggtatctttcagctttgatagtggagatagccggtttacgtctggcaaacccaatttctatgaatggttttggccgggtttttatcttttctcgccgtcgatcggtttataccgattgcttttcacttttatttcaataatttctacagatctgagttaggaattgatttttaggtactagatcctaaaaattaataattctggcttgtgatttgaaacacctcgatttgcgggaaatctatcaagcggttattcttggtcgaaagattgaagaatattccggaggcatataccatgcccctattgtcggggactttaggagttccgttcagcgtcatttctgttgtaaccaaacaatttccggcaagttccgaccatatttctgacccgcatcttgcgcttctgacggcaaggttatggccctaatttctataatgctaatcgcctgtgttcaacttaattctaagccaccccgctttccgatagaccccccgatacgattctgagctgagaagtactaaagcactatgaaggctccatgccctgtccccatctactagcctatccctatgtttcgaaataatgcttgggagaatactaaagaacaa

SEQ ID NO: 87395 - DNA, 563 bp, Arabidopsis thaliana columbia
  unsure (1)..(563): unsure at all n locations
tgatggncctggcctgnactnccngggctacccactnagtcctgagaatgaagaagaatgaatgaaagactggggctacaaggtcaagctaagtgacgtctcttccgattcaatccctcttatgctcctctctctcctcgccgtcttcatcaaccatctccgatctttcctcctccgtctcacctctaaatcaaatcctaatctccccgtagacgatgtctctatagcatcgggactagccaacataatcgttctcgccgatcagcttagtttgaatcggttattctcgtaccggtgcggtgacggagggtgggtggcggctccggattgtgttgtgtgtttgtcgaagttaaagggaagggtgaagaaggtgaaggaagctgggaatggtcganacggggttccacaaggaagtggtttggaaggcatggcctccaatcaaatccaatttccaattggtcccccttttgaaagacacgtccttttgggtttacccgattnanttccggccttaaaaacgnaancgtagngtttgggnagggngtttaaacccngggtttntc

SEQ ID NO: 87396 - DNA, 878 bp, Arabidopsis thaliana columbia
  unsure (1)..(878): unsure at all n locations
gaagaagaaagatggggctacaaggtcagctaagtgacgtctcttccgattcaatccctcttatgctcctctctctcctcgccgtcttcatcaaccatctccgatctttcctcctccgtctcacctctaaatcaaatcctaatctccccgtagacgatgtctctatagcatcgggactagccaacataatcgttctcgccgatcagcttagtttgaatcggttattctcgtaccggtgcggtgacggaggtggtggcggctccgattgtgttgtgtgtttgtcgaagttaaaggaaggtgaagaggtgaggaagctggaatgtcgacacgtgttccacaagaagtgtttggaaggatggcttcatcaattcaatttcacttgtcctctttgtagatctgctttggtttccgatgattgcgtctctaaaacgcagcgtagcgttgggagggatttgatctcgtgtttctctctccactgagtaaaagatcggaagatgaagaagatccgatggtatctgagagatctacggtggctggctggttcggtttgaccacgcgcgtgcgccccttcttttctcggattttttttgaggtctctttcttctgtgagaggagaaccttttgtttgtttggtttttttttttacttttcgatttggaatatgtaaattttgaatatacaaattttcaccgtttgtatctttgttgttccttgctgttgagtatatataaatggagaagatatcaattcccagtataatttgaaaaaaaaaaaaaaaaaaaggnnnnnnnnnnnnnnnnnnnnnnnnnnnnnnnnnnnnnnnnnnnnnnnnnnnnnnnnnnnnnnnnnnnnnnnnnnnnnnnnnnnnnnnnnnnnnn

SEQ ID NO: 87397 - DNA, 422 bp, Arabidopsis thaliana columbia
  unsure (1)..(422): unsure at all n locations
gcaagaacaacaacaagaaccaaagaaacaaaaacaatctctaaaaccatatcaatgggactacaaggtcagctctccgacgtgtcatcagattcgatcccactgatgctactggctctcctcgcaactttcttcagacacgtccggtctcttctcctcttcccttcttctgcccccgttgttgttgttacttcaaacctcagcgtcctcgccgaccagctcaacctaaatcgcctcttctcgtaccgctactccgacaacgcagcctctgactgcatcgtgtgtctgtctaaactcaagaccggagcacagaagtgaggaagctagattgtcaggcacggcctttccattaagcagtgttttggaagggctgggttctaagcattcttcaaacgtcaatttgccccgttcttgaaggnttt

SEQ ID NO: 87398 - DNA, 904 bp, Arabidopsis thaliana columbia
  unsure (1)..(904): unsure at all n locations
ccacttatacatcatataggaagtgtaccctcagaccgtccggattccggtcaccacgcggcggaaccaaagaaacaaaaacaatctctaaaaccatatcaatgggactacaaggtcagctctccgacgtgtcatcagattcgatcccactgatgctactggctctcctcgcaactttcttcagacacgtccggtctcttctcctcttcccttcttctgcccccgttgttgttgttacttcaaacctcagcgtcctcgccgaccagctcaacctaaatcgcctcttctcgtaccgctactccgacaacgcagcctctgactgcatcgtgtgtctgtctaaactccaagaccggagaagaagtgaggaagctagattgcagacacgtcttccataagcagtgtttggaaggctggcttcaacatctcaacttcaattgcccgctctgtagatctccattgctacctcatcatcatcagggacatggcagtgatgcgtcgatctcagccttccctcttcgctctacctctactgcatcatctcattgatttttatgtgaagaaagaagaaagaagtaagcaagagagaagaagatggagggaggatgctttttttatttatcttccttctcctctttcctttttaggagaagattcttatttcttactacagaagattgattcttcttatatatctatatatataaccttctatatttagctatgtttttgaggaatctcagatcggaagagaggtccttttgtttttcagatttccactctgtaaattcttagtatgaaaagaatcaaattaagcttcatgtaaaaaaaaaaaaaaaaagnnnnnnnnnnnnnnnnnnnnnnnnnnnnnnnnnnnnnnnnnnnnnnnnnnnnnnnnnnnnnnnnn

SEQ ID NO: 87399 - DNA, 577 bp, Arabidopsis thaliana columbia
  unsure (1)..(577): unsure at all n locations
cnnnnnnnnnnnnnnnnnnnnnnnnnnnnnnnnnnnnnnnnnnnnnnnnnnnnnnnnnnnnnnnnnnnnnnnccacgcgtccgctcatcttctctggcagaacagaaaacgatgactaacttctcccgatccaaatccaccggaactatcgggttcccggagtttaaacccactcgacccggtccagacaaatacgagaacatccacaacgatgacgacgagtacgaagaaggacatagcactacgagtacagactactacgacgcttcaacgccgttgagctcacacgcgtcaagatccgggaacgggtccggctcgggtcagttaacggtcgtagaccttcttgcggcggttctgaggaagtcgttggtgatgtcgtgtgcgatggagagaggggaagatgacgtggtggcgtctatggatataggttggccgacggaggttaagcacgtgagtcacgtgacttttgatcggttcaatggttttcttggtcttccttctgagctcgaaccggaggttcctcctcgagctcctagcgccagtgtaagtgtatttggagtatcggcgaagtcaatgc

SEQ ID NO: 87400 - DNA, 758 bp, Arabidopsis thaliana columbia
  unsure (1)..(758): unsure at all n locations
atgatacttccnnnnnnnnnnnnnnnnnnnnnnnnnnnnnnnnnnnnnnnnnnnnnnnnnnnnnnnnnnnnnnnnnnnnnnnnccacgcgtccgcggacgcgtgggtttaatcgttgggaaaagtttgatgatacggagtggacaattcttggtgtagaaggagaatctgagagagagagagtcatggaagctctgaaaaccgcaacttttagccctatgtcggtgttatccgagaaaagatcagaaccacgaaagcctttctcgctccctaacctctttccaccaaaatcacagagaccaatctcccaagaaagcttcttgaagagattcaatggtggattggctcttctaacttctgttctaagcagtgcaacagctcctgctaaatccctgacgtacgaggaagctctgcaacaatctatgaccacttcttcatcttttgattcggatggtctgattgaagggatatccaattttgtcacagacaatcctttggttattgccggtggagttgctgcattggctgttccatttgttctgtctcaggttctgaacaagaagcccaaatcatggggagttgagtctgctaagaatgcttataccaagttgggtactggatgataataggctcagttgcttgacataagagctactgctgatttcagacaagtgggcagtcctaatattaagggtttgggtaaaaaagcggtttctactgtttataacggtgaagacaagcctggtttcctgaagaagc

SEQ ID NO: 87401 - DNA, 616 bp, Arabidopsis thaliana columbia
  unsure (1)..(616): unsure at all n locations
nnnnnnnnnnnnnnnnnnnnnnnnnnnnnnnnnnnnnnnnnnnnnnnnnnnnnnnnnnnnnnnnnnnnnnnnnnnnnnnnnnccacgcgtccgcggacgcgtgggagagaagacatttttatacaaaagagtttatcattatataagtttcaaactttgaagatatggcatcggcttttagatcatccacgaggttgattcttgtattaggtatactgattttgtgttcggtttcttctgtccgaagctggagcaaagaaggtcatattcttacttgtagaattgctcagaatcttttagaagccggaccagcacatgtagtagagaatctgttaccggattacgtgaaaggagatttatcagcattgtgtgtgtggcctgaccagatccgacattggtacaagtatcgttggaccagccatctccattacatcgacactcccgaccaagcctgctcttacgaatactctagggattgtcatgatcaacatggattgaaggatatgtgtgtggatggagcaatcccgaatttcacggctttaagtttcagcattntcgggtgganggnccanctngnncgtaggtantanatnnccgaggcccttttnttcttgnc

SEQ ID NO: 87402 - DNA, 444 bp, Arabidopsis thaliana columbia
ggtttattgtttactgaactagaccggccaaatggtcagccttgttttgatacaaaagagttcgatctagtaaggaacatgatgcaagctgttgatgaagaacggtatgatgaagccgctgagtggagagacaagcttggcaagtttcaggcaaaacgcaaattaaggaaatacacatgacagctcgcagacgggagtgtttttaatacataatttatgtaaataataaagaagccattgccatttgccagaagttgtgatcatgaagaaaaatatctctctcgtatgagatatacttttctctatcgacacttgtgcacgtagttgattctcaaggaacggacaaaataaaaatgttattttataattgtagcgtgatggtgatgtgatgtgtacatatacattaatcttctgtaataatatatggtaagcctacgctttctc

SEQ ID NO: 87403 - DNA, 534 bp, Arabidopsis thaliana columbia
tgatactccaggtctctacgactcatatagggaaagctggcacgcctgcaggtaccggtccggaattcccgggtctacccacgcgtgcgggtttattgtttactgaactagaccggccaaatggtcagccttgttttgatacaaaagagttcgatctagtaaggaacatgatgcaagctgttgatgaagaacggtatgatgaagccgctgagtggagagacaagcttggcaagtttcaggcaaaacgcgggggtggggaaatacacatgacagctcgcagacgggagtgtttttaatacataatttatgtaaataataaagaagccattgccatttgccagaagttgtgatcatgaagaaaaatatctctctcggtatgagatatacttttctctatcgacacttgggcacgtagttgattctcaaggaacgggcaaaataaaatgttattttataattgtagggggatggggaatggatctctccataatcttaaatttgttgaataactgagggggagggtacgccttgctc

SEQ ID NO: 87404 - DNA, 977 bp, Arabidopsis thaliana columbia
  unsure (1)..(977): unsure at all n locations
cnnnnnnnnnnnnnnnnnnnnnnnnnnnnnnnnnnnnnnnnnnnnnnnnnnnnnnnnnnnnnnnnnnnnnnccacgcgtccgcggggagaaaagaagggagaagaacctgaacacccggtgaatcgaaattcatgactcggatcttagcccccacgtctccgcggactgtgagctccactcggtcgttcaaggaagcatctctgacgagatcggcggcgtgggcttgcataagattgactctgtcgacggagatggtggcctcaacgttcttcgtactgtgcgcatcctggtagaatccaggcaccgtcgccctccccagtggcatgcctttgtacatgaccgtgaagctggactcaccgtacctgattccgaccttgtttgggttgacggcggtgaagagcatccggatggtgagggagagggaggcggtggttgcatccagaacagcgcttgggttggagatccccatgtacaccactgccacttgctgcagatcgaactgcggcttcttcggcttcaccgccagtattacgatgagcaccaccgccagtaccagcagcgccaggaacgcgaacagcaagaacaagcagcagcagcatcccttcagcgacgccgacgacgacgatgagtagctccggtaatacggctgctggttctgagcagcaatcggatcgccgttgagacctgctctagaactagaaggaggaggaggcatagtaagtgaaagcaggaagctccctctcccttttcactcttcttctgtaatagcggtgttgaaattatacacaacaagagagagagaccctgtttccgtgtctggactctagtattattgacaaattaatgtttcacaattttaaccaccaataaaaatatcaataatgtaaaaaaaaaaaaaaaaagnnnnnnnnnnnnnnnnnnnnnnnnnnnnnnnnnnnnnnnnnnnnnnnnnnnnnnnnnnnnnnnnnnnnnnnnn

SEQ ID NO: 87405 - DNA, 528 bp, Arabidopsis thaliana columbia
ccagctccctacgactcactatagggaaagctggcacgcctgcaggtaccggtccggaattcccgggtcgacccacgcgtgcgtccaagcagcttctctttggccatctcttcttgaagctgctttcttcctcaaattcttttttttccagattcttctcctttcttcttccttcttccttatttcgatttcgaattttgaattttctcaatggctcaatcgtgtcttaaaattgttcgaatcaacaatctaaggaacagagtgaatcgtcggattttgattctccgacgattcacacggttgttatggagtagaatcgttgcttgtactcctggcaaatctcggagatatctcttgctttctcgcgctcttccgtctccgactggttctcgtccttctccttctccgatccccgccgtcgatgtcgtcgtcggtggtggtggtggtggtggtgagtttgttcgtcgttcgtcggttgtttacgataatgataacagtcatcggagatcggattctgatttggtttct

SEQ ID NO: 87406 - DNA, 862 bp, Arabidopsis thaliana columbia
cgtggatcaagattctttcttatcttcatcactccacacattttcttgtcttcaaactcacacaaagaaaagaaaagtctccaaagctcaaaaagcaatgactcgaccgtcaagattacttgagacggcggcgccaccaccacaaccgtcggaggagatgatcgcagcggaatccgacatggtggtgatcttgtcggctcttctttgcgctcttatctgcgttgctggtctcgccgccgtcgtacgatgcgcttggctccggcggtttacagccggaggagattcgccgtcaccgaacaaaggcttgaaaaagaaagctcttcagtctcttccaagatccactttcaccgccgcggaatcaacctccggcgccgccgctgaagagggagactcgacggaatgtgctatttgcctcactgacttcgccgacggtgaagaaataagagtgcttcctctttgtggtcattctttccacgtggagtgtattgacaaatggctagtttctaggtcttcttgtccttcttgtcgcaggattcttacgccggtgagatgtgaccggtgtggtcatgcttctacggcggagatgaaagatcaagctcatcgtcatcaacatcaccaacactcttctactaccattcctacgtttcttccttaattaacactaatttttgttttattatggcaataattaattgcataaaagttatgtaaagtgagtttaattaggattagagagatcttttaaagtttttctctcttttctccttgttgtaatccagtgtatttaatcaaatctcagatggagttcaaaaaaaaaaaaaaaaaaaaatgatgtcatctaacaacaaaaaaaaagaataga

SEQ ID NO: 87407 - DNA, 522 bp, Arabidopsis thaliana columbia
ccagctccctacgactcactatagggaaagctggcacgcctgcaggtaccggtccggaattcccgggtcgacccacgcgtgcgcccacgcgtccgcctccttcttcgtcttgttaataagtccaatttgctcggatttcgcttaactttatcgcatttcctaaattgccctcgtcaccactttcacactctctctctccctatggccaccgtcgcgcttcttaggtctctccgccgccgtgaactccacgcagctcacatctctgcatataaattcagttctgctagcgccggcgggaggacgacggagctccgactacacggagtcaaagatatcatcgccgttgcgtctggtaaaggcggagttggaaagtcttcaacagctgtaaacttagctggtgcattggccaacaaatgtgagctgaagattggattgcttgatgcggatcgctatggcccatccgggcctatcatggatgaaggtctctcaaaagcctcaagttaaccaagatatgaagatgat

SEQ ID NO: 87408 - DNA, 443 bp, Arabidopsis thaliana columbia
tttgcactctttcaagttcacaaggtgaatctgatcttactttctggtccacctctaagcacttttaaatggagaagaaaggccagcatggtacatatgaatcaatgatgactcatcatccgatcctctgtatcattgctttatctgtacttttcatagcaatcgacccctttcacatgagtccaatcgggggtcgtgagttcaaacccgtgaagcatgaggttgctccatataaggaagtcatgggaagctggcctagagacaaccttagtcgactgggtaatcatgggaaactggagttcgtggaccaagtctttggtccagagtcattagagtttgatagtttaggtcgtggtccatacacagggttggctgatggaagagtggttagatggatgggtgaagcaatcggatgggagacattttcggtggtaacatcaaaa

SEQ ID NO: 87409 - DNA, 747 bp, Arabidopsis thaliana columbia
  unsure (1)..(747): unsure at all n locations
gctannnnnnnngctgagagcccacaaaaatctttggatgataatgtcgcgtccggcagaggtttagatgccaaagacagtggtgatattatcttggaacttagaaatgagctgatggaaaagtccaataaactgagtgaaatggagtccaagctaaatggtgctatggaagaggtatccaatttgagcagagagttggaaacgaatcagaagcttctcgaagaatcccagatgaattgtgcgcatttggagaactgcttacatgaagcaagagaagaagcccagacccatctttgtgctgctgatcgtagagcttctcagtatactgcacttcgtgcatcagctgtgaagatgcgaggtctctttgaaagattccggagctctgtctgtgctggtagtgggattgctgattttgctgactccttgcgaactttggctcaagctttagccaactccgttaatgaaaatgaagatgatggtactactgagttccggaaatgcatccgagtcctggcagacaaagttagcttcctctccaaacaccgggaggaattattggagaagtgccaaaatcttgaagccacaagtgaacagacaagacaggatttggaggaaaagaaagagctggtgaaaacattgtacactaaacaccaacttgggaagcaggcaaataaggaaaagatatcattccgtcgtcttgaagtccatgagatagcagcatttgtgctaaacccaagcaggcattac

SEQ ID NO: 87410 - DNA, 553 bp, Arabidopsis thaliana columbia
  unsure (1)..(553): unsure at all n locations
atgannnnnnnnnnnnnnnnnnnnnnnnnnnnnnnnnnnnnnnnnnnnnnnnnnnnnnnnnnnnnnnnnnnnnnnnnnnnnccacgcgtccgaatatctaacccatagtttttctttatatataatgtgaatatggaaaacacaagacttcatcttatattcatcaatcttattcttattttctctctgcagttttcaaaaactttctcactgttatctgcgtctcttttttggatcaatggcaaacgctgaacgtatgataacgcgcgtccacagccaacgtgagcgtttgaacgaaacgcttgtttctgagagaaacgaagtccttgccttgctttccagggttgaagccaaaggtaaaggtattttacaacaaaaccagatcattgctgaattcgaagctttgcctgaacaaacccggaagaaacttgaaggtggtcctttctttgaccttctcaaatccactcaggaagcaattgtgttgccaccatgggttgctctagctgtgaggccaaggcctggtgtttgggaatacttacgagtcaatctccat

SEQ ID NO: 87411 - DNA, 1745 bp, Arabidopsis thaliana columbia
aaaaatgagtctcttgagaaacttgtgatcactggctcacagaatcttatccccatatgtatcttacctacataatagccacatattactttgcttcactttgaaccattggttggttttgatcaaaaccaaaggatgtgtgtatgtatgtatatattctaacgctcaaaactgatcactagcattcctagatttttccttcttgtgatcacttgcagctatggccacacatgcagctctcgccgtctcaagaatcccggtcacacagcgactgcagtctaagagtgccattcactctttccctgctcaatgctcctccaagaggctagaagtcgctgaattctccggtctgcgtatgagtagtatcggtggggaagcatctttcttcgatgctgtagctgcacaaatcatccctaaggctgtgacaacatcaactcctgttagaggagagacagtggcgaaactgaaagttgcgattaacggttttggaaggattggtaggaactttcttaggtgttggcatggtcgtaaagactctcctctcgaagttgttgtacttaacgacagtggtggtgtcaagaatgcatcccacttgcttaagtatgactccatgcttggaaccttcaaggctgaagtgaaaattgtggacaatgaaactattagtgttgatggtaagctcatcaaagttgtctccaacagagaccctcttaagcttccatgggctgagctcggcattgacattgttatcgagggaacaggagtgtttgttgatgggccaggagcagggaagcatatccaagccggagcctcgaaagttatcatcactgcaccagccaaaggtgctgatatccctacctatgttatgggagtcaatgagcaagactatggtcacgatgtcgctaacattattagcaatgcatcttgcaccaccaactgtttggcaccttttgctaaagtcttggatgaagaatttggaattgtcaaggggacaatgacaaccacacactcctacaccggagaccaaaggcttctagatgcatcacacagggacctaaggcgtgcaagagccgcagcactgaacatagtgcctaccagcacaggagcagccaaggcggtgtcattagtgttgccgcagctgaagggtaaacttaacggcattgcactccgtgtgccaacaccaaacgtctcagtggttgaccttgttataaacgttgagaagaaaggtttgacagcagaggatgtgaacgaggcctttagaaaagccgctaatggaccgatgaaaggcattttagacgtttgcgatgcgcctcttgtctctgttgacttcaggtgctctgatgtctctaccaccattgactcgtccctcactatggttatgggtgatgatatggtcaaggtggttgcttggtatgataacgagtggggttacagccaaagagtggtggatttggctcacctagtggctagcaagtggccgggagcggaagctgttggaagtggagatcctttggaggatttctgcaagacaaacccggctgatgaggaatgcaaagtctatgactgaacaactttgatcatttctttctttatttttcaccaaaacaatactttgtatcatgagttacttattcgaaatcgtactatgcatacttgtttttctcataagattttcttgtctgatgaacaactatatgttaagactgagagaattgtatttgagaaataaccattttatgctacatgtt

SEQ ID NO: 87412 - DNA, 864 bp, Arabidopsis thaliana columbia
ttctcctctaaacaacaacaaagtctctcttccttctgtctttcacatttcctcttcccctaaaaacagaactcaaaaccaaaacaaaatgactcgctcctctagattccttggtacggcgtcgcctccaccaccggaagaaatcctcgccgccgaaaccgacatggttgtgattctctcagcacttctctgcgctctcgtatgcgtagccggtttagccgccgtagctcgctgcgcttggctccgccgtctcaccggagttaatcccgccgccgtcggagaagctccaccgcctaacaaaggcctcaagaaaaaagcacttcaagctctccctaaatcaacttacaccgcctctgcctctaccgccgccgccgctgacgatctaccgtgctcttcagtcggagacggagattcatccaccgagtgtgcaatatgcataacggaattttcggagggcgaagaaatcagaatcttaccgctgtgtagtcacgccttccacgtggcgtgtatagacaagtggttgacttcacggtcgtcgtgtccgtcttgtcgtcggatattggtgccggtgaagtgtgataggtgtgggcaccatgcttcgacggcggagactcaggtcaaagatcaacctcctcatcaccaacatccttcacagttcacttccgccattattcctgcttttcttccttgaaatgttttcactttattaaatttttataatttgctaaaaatatcggcatgattaaaagtaaagtattaattaattaggaattagtaatctttagttaagtacttttatatttctcctctgtaatcctctgttctgaattaatcagatgaaatttcgacaaaaaaaaaaaaaaa

SEQ ID NO: 87413 - DNA, 230 bp, Arabidopsis thaliana columbia
tgatcatcttgagatggtgatgaaactcttaagatcctcctcttctgcttctctttttatttgccgtgtcataatgaaaattgcatattcagatgggcctgtgtgttgagtaagtggacctgtgtccagagagttgattgagatgggcttcattttaggcccacatgtttatcgatcaggttcattctcttcattatatgaaagtgtcctatatcgcaacattctcttcc

SEQ ID NO: 87414 - DNA, 506 bp, Arabidopsis thaliana columbia
  unsure (1)..(506): unsure at all n locations
nnnnnnnnnnnnnnnnnnnnnnnnnnnnnnnnnnnnnnnnnnnnnnnnnnnnnnnnnnnnnnnnnnnnnnnnnnnnnnnnnnnccacgcgtccgcggcgatctagtttccggctatcaattcagttttttcagctaaaggtttgatttttcgaaattcgaatttctggggaaagtagaactcgcactcgcacttgctcctggacaacgtgagagatagaatcgaatcgaaaaggacgaaaaaatgtcatatgaaagcaaaggtttttgggttatgaagaataatgagcatacaagtgaggaagattcagtgtatgatcattcaacaagagatgattcaaagcgtcctcatccttggtttgttgattcttctcgttcagagatgttcccaaacaagaaacaagctgtgcaagatcctgttgtaggattaggaaaatcaaatgttggtcttcctttgtgggaaagctcatcggtttttcagtctgtttctaaccagtttatggatcgg

SEQ ID NO: 87415 - DNA, 315 bp, Arabidopsis thaliana columbia
caaagataacgacattaacaacatccttatcttcatcctgataactttatgggctgcagtgatgaggatgaagatgaggatgaggatgatgatgatgatgatgatgatgatgaggaaatgtatgagactgaatcagaggactctcatattgagtcagaccctggatccaaagataacgacattaacaacatccttatcggtccttatggatcccaatatagatacaaggaaatgcggcagatcataactcccgtaggcaggaagcaactggaaccgatgttacaaagctaccgcaaggttgtgggcgctgagctt

SEQ ID NO: 87416 - DNA, 2112 bp, Arabidopsis thaliana columbia
taaaagcttagcaaaattcttctgaatgaataatcggcgattatgtctttgaaaaacgatgcgagtagtagccacgacggtggaagcaacagagaaagcgtaatcgatgatcatggccgccgtaaaagcacttgcggctactgtaaatccccagctcggtccagtatctctcacggtttatcagcacagactcttaccgtttatgactaccaagctcttattgaccgaggctggagaagatctggtacttatctttacaaacatgagatggataaaacgtgttgccctccttatacgatacgtttgaaagcaagtgattttgttcctactaaagagcagcagcgagtttctagaagactagaaaggttcttggatggcaaactagatgtgcagcccagggaacaaagaggtgcttcttcctctggtgatgtttcagatacaaggagaaaaacacttggagctgctaaaagtgaagagaataagaaagttgaagcagttatggatgatttgtctaaaaatattgaccaagctgtgcaattatgcatacggagtggggaattcccgtctaatatgcagataccaaaagcttcagtgaagaaggttttctgtgctagaagaaagaaactagctgaaggaacagaacaaatcttatacaccagcaacattgcttttccaatagcagctgcaataaaacgcatccagacatctgagaaagaggggataaatagtgcagaaggaaatagattatcacctgaaactatttctgagatgttgttgagtgcaatgcataaggtgggggaaactcctgatgtgtctatcaaagtctgtaagggccatatcaatttcctttcatctgccaaagattctttttctgatagagatgttgtacctaatggtaacatctcgagaggagccaattctttagatggaagtgaaacccttcacgctaagaaggattcagaaaaccatcaggcaagaaagcgaaagctggagatacatttgaaaaggtctagttttgatcctgaagaacatgagttatacaaacggtatcagctgaaagtgcacaatgataagccagggcacgttgtagaaagttcatacagaaggtttttggtcgactctcctttaatagatgttcaaccttcaggtgatgaaaaggttccgccttgtggcttcggctctttccaccaacaatatagaattgatggccgcctaattgccgtcggggttgtagacattcttcctaaatgtttgtcaagtgtatacttattctgggatccagactatgcattcttatcgctcggaaaatattctgccattcaagaaattaattgggttatagagaaccaagctcgctgcccttctcttcagtattactatcttggttattatatacattcctgcagcaagatgagatataaagcagcctatcgtccatctgagcttctatgtcctctccgtttccagtgggttccatttgaagtagcaaggccgatgcttgataaaaagccatatgtcatattgtccgatattgctatttcacataatcaatgttctttactagctggtgcttctgaaactctcgtggaaccagcagcaagtgaacatgaagacatggaacaaggggagacgaatgataactttatgggctgcagtgatgaggatgaagatgaggatgatgatgatgatgatgatgatgaggaaatgtatgagactgaatcagaggactctcatattgagtcagaccctggatccaaagataacgacattaacaacatccttatcggtctttatggatcccaatatagatacaaggaaatgcggcagatcataactcccgtaggcaggaagcaactggaaccgatgttacaaagctaccgcaaggttgtgggcgctgagctttcagagagaatggtgtatgaaatcaactgaagcttcaacaataccaagctccattgagctttggtaccattagtcattagataaaactcaaaattgtttgtattcatgtttcagttgttgtatatctatgactatgagacttgtacatggtgtctttctttaagtttgtattttctgattacctttatattgaaaaaatttctgtccaag

SEQ ID NO: 87417 - DNA, 503 bp, Arabidopsis thaliana columbia
  unsure (1)..(503): unsure at all n locations
cgaatcaaaattcaaatggcgggctaaacttcgagtcagtctctctctttctctctttggtgatggtacaaattagcacacatcgctggtggagacacaacgatagagactatggcagtctctgggtctcatctgtgagaaagatattcatgaacagcgtcttaaaatcgattctttcatcgcttctcctttccggagatcgatgaactctttagtggagcgagctcaagccactgctcaaagccaagtggactaatgaatttgaaagcggatctttagnagaggcagaggntgagcctagttaaaagttttggcaagtgaaaancccgtaaaagnggcancgggaaaattgggggtaagnggattnccatttttttgnaacacnaattcttggggntttaaggaccttttgnaggaaattttcaagcttccaggaggccnaangaagggttgntttttttnaggantttttnccccaccanttncaaagnccttttcaaaat

SEQ ID NO: 87418 - DNA, 574 bp, Arabidopsis thaliana columbia
  unsure (1)..(574): unsure at all n locations
atgatatgccnnnnnnnnnnnnnnnnnnnnnnnnnnnnnnnnnnnnnnnnnnnnnnnnnnnnnnnnnnnnnnnnnnnnnnnccacgcgtccgcggacgcgtgggcggaagctgagctctaatcctgatcggagatggcgactagcgattctgaattcaattctgatcttcttctcgctcacaagcttcccgagacgcgttacacctacaatgaaagagatgtagcaatctatgctttgggaatcggcgcttgtggccaagatgctgtggattccgatgagctcaagtttgtgtatcacagaaatgggcaggatttgatccaggtcttaccaacttttgcttcactattcacacttggatctttgacagaaggactggatttgccaggttttaaatatgatcctagtctcttgttgcatgggcagcagtatattgaaatatacaggccattaccttccaaggcttccttaattaacaaagtaagcctcgctggtttgcaagataaaggtaaagcagctatccttgaattaggaaccngaagttacggggaagggtcagggggactgttatgcatg

SEQ ID NO: 87419 - DNA, 1166 bp, Arabidopsis thaliana columbia
  unsure (1)..(1166): unsure at all n locations
nnnnnnnnnnnnnnnnnnnnnnnnnnnnnnnnnnnnnnnnnnnnnnnnnnnnnnnnnnnnnnnnnccacgcgtccgggttattcgactagagaaaaggagctctgtgtgtcgaaaccctccgtcgccagcatttattcttctcacttttcttcaccggagaatcacgacaacatcaaattctccggcgacatctcagtggcagtgcatctgtaaaatgcttcaaggactgttgttcgctactcttgcttaattattactatagctggtgaaaatgggaggttgctgtagttcttcgaggaagtcacatcttgttggaacacctgtttactattattgtccagaatcttttgaagagcttgtcccttcaggaacccgtgctggtgtgggatcagcattcaccacaggcctcttggttgatataggtttggagacatctatacctgacaccttttgtgctcctgctcctcttccatatgatttgcttttggggcgaccacaatgcacagattctgagtccatcaaaggaaggatgagtggaagcagttttgaaacgctagcgacatgtgaagatcttggggaatcagactgtaaaactctagccagctcagtcattctttcaccgaggaaatcagatttctcgaaacatcaaggattgaagatattggttgatgaagaggaggaatgttgtcctatttgctttgaagattatgatgttgagaatccaagactaacgacaaagtgtgagcacgaatttcacctctcttgtcttctggagtggattgaaagaagcgatagatgcccaatatgtgataaggaagttgtgtttgatgatcgcttgaactagcatcattactatcccctggcttgaaagtttgaaggtgtggcgctttgtttggttagtctactacataattagcatacatctattttgtttcttcctcacacactttaagtgttgggtctccacatttccacttagttttgtcgtattggttatgttcgttttgcccttgtgcgatcatatagatatacatacaattgtaaatattacctagcttcttgttcgttcgtttgtgatctccggggtgtgatagagaagaaaggaccaccatttcagtattttgattgtttgcatcttcaannnnnnnnnnnnnnnnnnnnnnnn

SEQ ID NO: 87420 - DNA, 494 bp, Arabidopsis thaliana columbia
  unsure (1)..(494): unsure at all n locations
ttcacattgatcctgtgttttataaaaccgaattttgattcagagatcagctcaaaaatgaagtttgatgaatcgaaaacgctcttaccggtgagaaaactctgtaaatggcaaccgcaaaaccgctgggtacaagctttgggttgtctaatcgctgttctactcttggcctttggttctatgttaaccggttccgtctctctcaaaggaatcggtttgttccattctgctgacggcgttaacgcattctctttcggcgatgatctcgacgttctggaaattgaagagagagagaaagtgttttgacatattttggattttttccttctctcctattgttttatatttctattttttattctaaatttggggggggggggnnnnnnnnnnnnnnnnnnnnnnnnnnnnnnnnnnnnnnnnnnnnnnnnnnnnnnnnnnnnnnnnnnnnnnnnnnnnnnnnnnnnnnnnnnnnnnnnnnnnnnnnnnnnnnnnnn

SEQ ID NO: 87421 - DNA, 751 bp, Arabidopsis thaliana columbia
  unsure (1)..(751): unsure at all n locations
taggtgcactatagaagagtcttgacgtcgcatgcacgcgtacgtaagctcggaattcggaatcgaaaacgctcttaccggtgagaaaacctgtaaatggcaaccgcaaaaccgctggttacaagctttgggttctaatcgctgttctactcttggcctttggttctatgttaaccggttccgtctctctcaaaggaatcggtttgttccattctgctgacggcgttaacgcattctctttcggcgatgatctcgacgttctggaaattgaagagagagagaaagtggtgagacagatgtgggatgtgtacggacgctccggtggcgttaaggttcctcggttctggcgagaagctttcgaagcggcgtatgagtttctcatcagtgattccgccgccgttcgaaatgctgccgtttccgatatcgcaaagttgtctcttgttcgttttgttaagtcagagtctacttcggcccagcccaatcttcattgacttgtgaagcccatgaggatcacataagattttaattgtatataggattaaatattaaataccgaatatgtagccttaataatgtattgagaaaataaagaaatgaaaaagcatgaattgcttcgttcaacataattgacaaccaaagttgtgttctcnnnnnnnnnnnnnnnnnnnnnnnnnnnnnnnnnnnnnnnnnnnnnnnnnnnnnnnnnnnnnnnnnnnnnnnnnnnnnnnnnnnnnnnnnnnnnnnnnnnnnn

SEQ ID NO: 87422 - DNA, 516 bp, Arabidopsis thaliana columbia
acgactcactatagggaaagctggcacgcctgcaggtaccggtccggaattcccgggtcgacccacgcgtgcggaattcttgacgtcttctactccattttccatcaatacccatttcttctatcgctctcgtttccaagaaaaaagagggttttagagagaagcaaaactcaaatggcgacgaacatcggaatgatggatagtgcatacttcgtcggaagaaacgagattctgacttggattaatgatcgtcttcacctcaatctctctcgcgtcgaagaggctgcatctggtgctgtgcaatgtcagatgcttgatatgacatttccaggagttgtgccaatgcacaaggttaactttgatgcaaagaacgagtacgatatgatacaaaactacaaggtcttgcaagatgtgttcaacaagctgaaaattacaaagccattggaaattaacaggcttgtcaaaggccggccactggataacttggagtttctgcaatggctgaaacgtttctgt

SEQ ID NO: 87423 - DNA, 1422 bp, Arabidopsis thaliana columbia
tcctcttcttccccccaaatcctctctcgctagggtttctcattccgatccataattctagatgtcgaggtttttaactgagacctgtcaaataagctaaagcttcttctaagagcttcaaggaaagcattgcattgttgtggtcttgtttgtgtccacagaaggaaagaagagtgagaagctcaggatgtcaagcagtcgaaatacccactggtgtcacagatgtcagcgtgctgtccgccttcacggccaagagcctgtatgcttttattgcggaggtggatttgttgaagaacttgatatggctcaagccagcccctttgatatgtttagatcccacaggggtgttgtagaacgtgatcagacttttgatctcatggatgctttctctgtgtttatgaggaaccgcttagctgaaaggagccacgacagagaaatcagaggaagaaccatcagttcaggtcctgaaaactttcctggtctggcccctttgttgatctttggtggtcaagtcccttatagactaactggcgacaatgcagtcgaagccctcttcaatggcggctcccctggcattggcatcacacgtggtaacaccggcgactacttcttcggtcccggccttgaagaattgttcgagcagctttcagctggcactactcgccgaggcccaccacccgcaccgagatcagcaatagacgcattgccaactatcaagatcgcgcagaggcatcttaggtcatcggactcgaattgtcccgtgtgcaaagacgaattcgaactgggatcagaagcgaaacagatgccgtgtaaccacatctatcattctgactgcattgtcccgtggctggttcagcacaactcttgcccggtctgtcgccaagagctaccatcagctagcggaccttcaagcagtcaaaacagaaccacccctaccagaaactacagaagcagtagtagtagtagtagtagtaacagtcgtgagaacgggaatgaaagaaggaatcctttctcttccttctggccattccgttcgtcaggttcaagctcaagctccactcaaaaccgtggaggcacaagaaactcggatacaagcgatgagaaccataactaccatcaacagcaacatcaacaatcatatatgggttacagtggctggccttttgattactaaaagtctaaaagtgagctaaaacaaatctttggtctcactttggtctctttacttaaatatgcttgtgattctgcatatgccttgtgcttcactctctatctctctcactctcttttatcaacataaataatggagaactgtatttgttactgtagattttctttctctgttaaaaacgagttcatcattttctatatgctttgttaaatatgtcattttagttgggtttttaaaaaaaaaaaaaaaaa

SEQ ID NO: 87424 - DNA, 390 bp, Arabidopsis thaliana columbia
  unsure (1)..(390): unsure at all n locations
aaaaaaaaaaacctctgcatcaatggcgatttccaaactccttctactctgtcttctctcagtctttctctcccttcatcgtcttgttctttccggcaccgatggagaagaagaccttcttcttacagtattcaacaaatacagaacaggactaaacctaaaaaccttaacaaagaacgaaaacgcagaatgtctcgcagacgaagtcgttagaccaactaaagaaccaaccctgcacaaacactaataactcagctccagtccctggaaataacctcctcgctaaatgcagtctcaacacaaccgtagtcagagacggtgtgatcatgcaagtttgtttttcctaagcatggttaagaaccntntnttngggnantttnaaacagnngt

SEQ ID NO: 87425 - DNA, 846 bp, Arabidopsis thaliana columbia
  unsure (1)..(846): unsure at all n locations
nnnnnnnnnnnnnnnnnnnnnnnnnnnnnnnnnnnnnnnnnnnnnnnnnnnnnnnnnnnnnnnnnnnnnnnnnnnnnnnnnnnccacgcgtccggttttgtttttttatgataaccatagatggagaagatgaccttcttcttacagtattcaacaaatacagaacaggactaaacctaaaaaccttaacaaagaacgaaaacgcagaatgtctcgcagacgaagtcgtagaccaactaaagaaccaaccctgcacaaacactaataactcagctccagtccctggaaataacctcctcgctaaatgcagtctcaacacaaccgtagtcagagacggtgtgatcatgcaagtctgttttcctaagcatgataagaaccctgacttgagcaatttcaacagtgtcgtactcaagaacttgaatgattctaagatcactggaattggtattggttctggtgatatttgggttgttgtcatcctcactacaaacacaccggaaggcggctattctcttttaacaactactaactcaggagcttatgcattcggagttaatggccttgtttcttcaagtttcttgtttcttctctttttgtttcttcatgttttgagtccccttttttgggtgttttttatgtcacctcgttgtctttggttcttgaatatgttgtgattatggtgagcaaatcgcctttcttaaagtttcctcttactaattgtgattgagtaaatacgaaaaatccttttataagccccaaaaaaaaaaaaaaagnnnnnnnnnnnnnnnnnnnnnnnnnnnnnnnnnnnnnnnnnnnnnnnnnnnnnnnnnnnnnnnnnnnnnnnnn

SEQ ID NO: 87426 - DNA, 529 bp, Arabidopsis thaliana columbia
  unsure (1)..(529): unsure at all n locations
atgatactgccagctacnnnnnnnnnnnnnnnnnnnnnnnnnnnnnnnnnnnnnnnnnnnnnnnnnnnnnnnnnnnnnnnnnccacgcgtccgtccctcccgagattggggagctgaagagactaacccatttgtacttgagcttcaatagcttcaagggagaaattcccaaggaactagctgctcttcccgagcttcggtatctataccttcaagaaaaccgtctcattggtagaattcctgccgaactggggactctgcaaaaccttcgccacctagatgttggtaacaaccatttggtgggaactatacgggagctcatccgttttgatggaagtttcccagctcttcgcaacttgtacttgaataataactatttgagtggagggattcctgctcagctgtcaaatcttacaaacttagagattgtttacctgtcttacaacaaattttattggaaacattccttttgccattgctcatattcctaaactgacatacctgtaccttgatcacaacccaatttacc

SEQ ID NO: 87427 - DNA, 777 bp, Arabidopsis thaliana columbia
  unsure (1)..(777): unsure at all n locations
aattgatccggcgagaatggcgagcagcaatgagtatgaggaaggtccgggggagagggagagtgggtacgacccaaatatggtgccggattcggtgaagtcgttcgtgtcacacatgtacagacacataagggataagaacgtgtacgagatccaccagatgtgtgagacatcgttccagagcatatcggagcgtctgttcaaggacacgccgtggccaagtgtggaagcgattgctccttacgtagacaacgaccatgtgttctgtcttctgtaccgtgagatgtggtttcgacatttgtatgcgaggttgtctccgacgttgaagcagaggattgattcttatgacaactattgcagcctctttcatgttgtgttgcacggcgtagtgaatatgcagttgccgaaccagtggttgtgggatatggtggatgagtttgtctaccagttccaaagtttctgtcaattcagagcaaagctcaagaacaaaacagaggaggagattgcattgctcagacagcacgataaggcctggaatgtctatggcgtgctcaacttcttgcaagcacttgtggagaagtcttgtatcatccagatccttgagcatgacaaggatggccttgagttcactgagactgatggctacgatttcagcggtggcagcaacgtcttgaaggtcctcggttacttcagcatggtcggtctcttncgtgttcactgcctcctcggtgacttaccacactgctctcaaatggttgcagnccatttnncatcact

SEQ ID NO: 87428 - DNA, 539 bp, Arabidopsis thaliana columbia
  unsure (1)..(539): unsure at all n locations
nnnnnnnnnnnnnnnnnnnnnnnnnnnnnnnnnnnnnnnnnnnnnnnnnnnnnnnnnnnnnnnnnnnnnnccacgcgtccgcccacgcgtccgcttttatgttgcgatggcgattgagctctgtgacgttcatcaactcacgcatttttgttcatcaaatcattccattatattgatggaattcgtttatcatccaccgtcctcaacctttcaaccgccggtggtcaacttgaacgagtttggtgaagcaaatcggaaagtactgtgaaccaaatcagagattggtgtgaagccatggtccaatcgctttctaaaggtatgaatctaaccgtttaattagacatcaccgaagaaactcgtcccctttccgacggtgctcaacatctgcgacttcgatgaactaaatcagagactttgatgaaccaaatcgttttctgaaggtatgatgctatctgtttggtgtgtggttgtttgatttgtttctggagatttaaattctgttgatgtgattgaactttgaaagtcagatgttgttattg

SEQ ID NO: 87429 - DNA, 561 bp, Arabidopsis thaliana columbia
  unsure (1)..(561): unsure at all n locations
atgatatnnnnnnnnnnnnnnnnnnnnnnnnnnnnnnnnnnnnnnnnnnnnnnnnnnnnnnnnnnnnnnnnnnnnnnnnnnnccacgcgtccgagcttatagtgcacaaaagactgatttgaatataagtttgactgccattggcctgttgtggactttgactgatttcgtagcaaaaggactccaccatgggtctctagtggagaaaggatcgggattcaataatgcagattccactccacagcaaacaaatggcgaggacggggaaaagcatatgggtagcaattcgggcaagtcagattatgaagctccaatacaagtggtcaatcatgagaaattactgttcttagtcttttcgttaattcagaaacttgttgatgacgaacgaccagaggtcaggaattcagctgtcaggacattttttcagattttgggaagtcatggaaacaaactttcaaaaagcatgtgggagggattgtctatggaactatatcttcccaatgttggatggcgcctttcacaaggctgcaacatcatcgaaggacgaatggcaagggaaag

SEQ ID NO: 87430 - DNA, 558 bp, Arabidopsis thaliana columbia
  unsure (1)..(558): unsure at all n locations
gataaattcggattctgtagctctttcaatacgactgcggagatcagagccaattatttggttatggcgtctctaatctcagatattgaaccgccgacgagtactacttcaaatctcgttcggagaaagaagagatcctctgcttcatccgccgcatcgtctcgttcaagcgcatcttccgtctccggtgagattcacgcgcgatggcgatcggagaagcaacaacggatctactcagccaaactgttccaagcgctccaacaagtccgcctcaactcttccggctcaacatcatcatctccaacgggctcagaaacgggggaaaggccgtccgtaaagcccgccgatccgagctctttgccgtttcccggtccggggaagaaccacttttggggcaagagcggttcttaggttaatcgggtccaaaacttgaaatttcgtaaaccaggggccggtccctngagcttccggttggcgnttccnggccattgnctttcgggtgggttagttnggagnaggaaccagntntgnggaaaccgggngnntttntggttttta

SEQ ID NO: 87431 - DNA, 852 bp, Arabidopsis thaliana columbia
acgacccacttagggttagctggtccgcctgcagggaccggtctcggaattcccgggtcgacccacgcgtccgcggattctgtagctctttcaatacgactgcggagatcagagccaattatttggttatggcgtctctgatctcagatattgaaccgccgacgagtactacttcagatctcgttcggagaaagaagagatcctctgcttcatccgccgcatcgtctcgttcaagcgcatcttccgtctccggtgagattcacgcgcgatggcgatcggagaagcaacaacggatctactcagccaaactgttccaagcgctccaacaagtccgcctcaactcttccgcctcaacatcatcatctccaacggctcataaacgaggaaaggccgtccgtgaagccgccgatcgagctcttgccgtttccgctcggggaagaacactctggagcagagcgatcttagctaatcggatcaaactgaaatttcgtaaacagagacgtcctcgagctacgatggcgattccggccatgactacggtggttagtagcagcagcaacagatcgagaaaacggagagtgtcggtgttgagattgaataagaagagtataccggatgttaaccggaaagtacgtgttctaggccggttagttcccggttgcggtaaacaatccgtaccggtgattctagaagaagccactgattatattcagggctcttggagatgcaaagtgaggagcccatgaacctcttttagtttcagctttctttttccttcctaacgggttcaagcttcctttcaacccgattttggatgaagggttaaaaaattcgtcctttttttaaatttct

SEQ ID NO: 87432 - DNA, 1764 bp, Arabidopsis thaliana columbia
  unsure (1)..(1764): unsure at all n locations
nnnnnnnnnnnnnnnnctgcagtaccggtccggaattcccgggtcgacccacgcgtccggtcttccttcttcttcctttttctctccccccccattatcttcggcgaatcatgaatctagggttttgttttctcccataaccctagattttcttccatcaatcttatatttttctcatttcttcttctccgttttagctcatctcccgattcatctcgatttccatggagggagcgggagagacgacgacgtcggaggggcatttgacttcggcagcagcttttgtggaagggggaattcaagatgcttgtgatgatgcttgtagcatttgtcttgaatccttctgcgaaagcgatccttctactttgactagttgcaagcatgagtatcatcttcaatgcattcttgagtggtgtcaaagaagctcacagtgccctatgtgttggcaatcaattagtctcaaagaccccacaagtcaggagttgcttgaggctgtggaacaggagaggaatttccgcttcaatccaactagaaatgccaccatatttcgtcatccaactcttggtgattttgaattacaacatcttccagtgggggtggataatgctgagattgaagaacgaatcattcagcacttggctgctgctgctgctatgggacgagcaagacatggggtaagaagggaaggccacagaagcaggtcgtcaagtcaaggacatcaacagttcatggtgttctcttcgcaacctaatgcttcttctcctccacctcatcctcccatgccttcttctccatctcagagagatgagagtgacacagtgtcaaaccttcctcacaatgctttaggggagggttctcatcagtcaaacacgcagccaccaacttcttctcatccccgccaggtttctccctcagcatctgattcaaacagcaggcctcttaatcaatcttccccaagtgaacaagatagagctggaccatcagaactccagtcattttcggaatcacttaagtctcgattaaacgctgtctccacgagatacaaagaatcgatatcaaagaatacaaggaactggaaagatagacttttttctcgcaacacgtccatggcagatcttggctctgaggttaaaagagaggtcagtgccggaatcgccactgtgtcccgcatgatggaacgtttagaaacgagagaaaacagtagacccagcactgcatctgtatcagatgtctctgaaaatcacactcctgaaacaaacaatgagcacaatagagcagcagcgggtgatgaacattctgtgaatgaaagaggtgttaaagaaacatgtgcgactggttctggttcaagctaataagtgagtgccagcatcttgttggcaaagagagaggaagatgttgtccattgtgaaattctgataatatatatatacagagtcagaagtctcaaaagtgtggagcataggaagaaggttattattgataaagaaaaagagttttccgattatcaataaataagaaaagttatatatatgaccaaaaggaggccttaaagacgcctctttctgtgttatgtcaaacaaacaaaaaaaaaactaaagagaaaaattagagtaaaagacctgtgtggggttgttggttatttggtcggtctgttgtaaattcacattgtcgttcacattacggatttctatgaatttctacttatgtatcttcaaaaacttggtctagcaaaaccaatttaatgtaaaaaaaaaaaaaaaaaaa

SEQ ID NO: 87433 - DNA, 565 bp, Arabidopsis thaliana columbia
  unsure (1)..(565): unsure at all n locations
atgannnnnnnnnnnnnnnnnnnnnnnnnnnnnnnnnnnnnnnnnnnnnnnnnnnnnnnnnnnnnnnnnnnnnnggggtggttctttagagagagagagatttataagcttctctttgggcattacaattttttttgtgaacatagaaacactcaaaacttcaaaccaaaaaaaataaatgggagaggaagagaagaaaccagaagcagcagaggaaaagaaaatggaagagaagaaaccagaagagaaaaaagaaggagaagacaagaaagtggatgctgagaaaaaaggagaagattctgacaagaagcctcaagaaggagaatctaacaaagattccaaagaagattctgctccggcggcgcctgaggctccagcaccgcctcctccgccgcaagaggttgttcttaaggtttacatgcactgtgaaggatgtgctagaaaagtccgccgttgtctcaaaggcttcgaaggagtggaagatgtgatgactgattgtaaaacggggaaagtggtggtgaaaggtgagaaagctgatccattgaaagtattagctagagttcag

SEQ ID NO: 87434 - DNA, 523 bp, Arabidopsis thaliana columbia
  unsure (1)..(523): unsure at all n locations
nnnnnnnnnnnnnnnnnnnnnnnnnnnnnnnnnnccctgcaggtacccgtcccgaattccccgggtgggccacgcgtccaccaaaatctctctcatttcgccatagctgagagcttcttctactttcccttagcttcttttttccttcatttttgttctacccttgcgaatctctgaaatgaaccctcaagctaatgaccggaaggagtttcagggagattgttcggcgacgggagatctcacggcaaagcacgattcagctggaggaaacggaggtggaggtgctaggtataagctgatgtcaccggccaagcttccgatctcgaggtcgactgatatcacgattcctcctgggttgagtccgacttcgtttttggaatctcctgttttcatctccaacatcaagccagaaccttcccctactactggttctttgttcaagcctcgaccagtgcacatttctgctagctcaagttcttatacaggcagggggttccatcagaacacctttactgagcagaag

SEQ ID NO: 87435 - DNA, 555 bp, Arabidopsis thaliana columbia
ggctttcatgagctcaattgctctcttaaaatctgtggtaatctctcttccattgctattcttcaagtaaataatgccctttgctcctctctcaacaccatttatcttataaaccctagacactccgccgaatttttacccttctccactggtcatccgcgttttttttccgggtctaaggtcaccggaaaaatggctttccggcgagtgttaaccactgtaatcctcttctgctacttactaatttcatctcaatccattgaattcaaaaactcccagaaaccccacaagatccaaggaccaatcaagactatagtcgttgtagtcatggagaatcgctccttcgatcacatcctcggttggctcaaatcgacccgacccgaaatcgacggattaaccggcaaagagtcaaatcccctcaacgtctccgatccaaattccaaaaagatcttcgtctcagacgacgccgtcttcgtagacatggatccgggtcactcattccaagcgatccgagaacagatattcgggtccaacgatacatccggcgacccgaaa

SEQ ID NO: 87436 - DNA, 1682 bp, Arabidopsis thaliana columbia
  unsure (1)..(1682): unsure at all n locations
atgatactccagctcccatacgactcacttagggaaagctgctacgcctgcaggtaccggtccggaattcccgggtcgacccacgcgtccgctcaaattaaaagtcaatcatatcaaatcccaaatcctcccagatgtttttatcatcttcttcttcctgaagatttgatttcattttcctctctttcagatccctattctcatggcttctggatcttactggtgctatagttgtagccgattcgtttgggtttccgattcaatctcttgccctgattgcgacggtggtttcctcgaactcatccaagagcctctcgatttcacaccttccgattccttcaccaccaccaccaccactcaacatcgcagccccactcgcttccctcctccttcttcttcttcctccaccccatccgcttctatgcacgccgataacagtcccactcctaccatcgttactcgtacacgaagcaatcgatctcctaatccagttattgttctccgtggatctgctgctgctccttcttctgatgttgtttccgaaggtttagatcgatctgcttttcagatgtattacgatgatggtactgattctggtcttagacctttaccaccgagtatgactgagtttttgttaggttctggatttgatcgtttgttagatcagatctctcagatcgagcttaacaccaatcggaatcttcgttcttgtgaacatccaccggcttctaaatcggccattgaagctttgcctctgattgaaatcgatccgactcatctcttatcggattctcaatctcattgcgctgtttgcaaagagaatttcgttttgaaatcatctgctcgcgagatgccttgtaatcacatctatcatcctgattgtattcttccttggcttgcgattcgtaactcttgtccggtttgccgtcatgagctaccggcggaggatctcaccgacggaaccggtgctgctttgactgctgttaccgctactgcagaggaagaggaagactcagctgcggggttaacgatttggaggttaccaggtggaggattcgctgtagggagaatccctggtggttggagaggtggagatagaatgatgccggtggtttacacggaggttgatggtggtagactcggtgatgagagacttccgagaagagtagcttggggttcgagaagaggtggaagagatggtggaggtagtagagagagaggtggtggctttgcgggtcggatcatgaggcttttcggatgttttagtggatcatctggatccattgctgctgctgctgctgcatcatccgggtccgggtccagaattcgggttactcgtagaaccaggtcgttctctatgttcagtacggcgtcgtcttcgtcaaggagacgaaattggctagcgtgattactagaattaccaagctctcttctcaggtgaaaactaaacacgaaagaacacactcttcttctgtttaaatttttcctatgttccttattaagtttttgtctatttcagtgtaatgattatattcattcctaaaatttgaatctatgcgagtaaattgatacaaaaaaaaaaaaaaaaaaannnnnnnnnnnnnnnnnnnnnnnnnnnnnnnnnnnnnnnnnnnnnnnnnnnnnnnnnnnnnnnnnnnnnnnnnnnnnnnnnnnnnnnnnnn

SEQ ID NO: 87437 - DNA, 571 bp, Arabidopsis thaliana columbia
  unsure (1)..(571): unsure at all n locations
ctcttgtacttaagcatggtggttaatcagaagatatccggccttgcatccgctatgaacgccaaaatcatcggttcaggagagagatcgatggtcttggcacacggtttcggaggcgaccagtcggtttgggataaaataataccggtcttgtcccaatccttcaaagttttggtctttgactggcttttctctggagccattaaagatcaaactctctatgacccttcaaagtataactccttagacgtcttctctgacgatctcattgctcttatggaggagttgaagtttggccctgtcgtgttcgtaggccattccatgtcgggggtgatcggttgtgctgcttctattaaaaggcccgacttgtttacaaatcttctccttattgctgcttctccaaggtatataaacactgaggattataaagnagggtttnagtcaaaancattgacacgnccatnncagcaattggtccaacacggagcttggcggtaattcccccatcggggcgnccggancnnttttcggccaaggccnaaagccctaanagtaaccaacannnttnngc

SEQ ID NO: 87438 - DNA, 689 bp, Arabidopsis thaliana columbia
  unsure (1)..(689): unsure at all n locations
acgcaactatcacgagcctctctgcgntattatgactcntcagngnnncncngannngggaaagaatcaaacttttgaatgtgaaggcgcttctttcgnctcaagatctctctttatctctctatctgtttgattggaactcgagcattggttataaacgaaaccatagtctatggcagctcagaagttcatcatttcgtgctaaatctgtgatatttcattgttcatcgtccttaagacagtcaccatctaatgtggaggagatagatgataatccttcggtatcattagaggatgaatcagcacatgcgatgcaagtcaagtggtctgattttaggattcttgatcgtgttagcattggtcatggcggcagggctgatgagcttgtgtttgaagctatagttcaggttccagatagccctttgtttaaccaaggagttgttcttcggaaattgaataccactcgagctcaaatacgaggaagaagagctatagaagtttttaagaagctagttcgtcggagacttctctaccattcttactcaatgcaagttcacggttatatcaccaataacttaagcgatgatcagtactcatttacccttgtacatgggtgccatggaagtttctcgattaggcactggcttcaacaatctgattggattccaacattagaagctactcttgca

SEQ ID NO: 87439 - DNA, 470 bp, Arabidopsis thaliana columbia
  unsure (1)..(470): unsure at all n locations
gtttcccccaagctcttattcgcccccccttaaggaaaaaatggtacgccctccaggttcccgtccgggaatttccccggggcgccccccgcgtccggaaacatcaaacccccctttggttgggatgtatcatgggtttgtttccccttgtgtgtggaaggcattctcccccctccgtcttatggagcgcaggggactaatgtttgttttatcttccaggggtttcggttaaattccccctttgtgcaatgaactgggggggtgtttcttttaagatataaatcattttgccccctggagtggagatcgggaggcatgcattacagagaaaaaacaaaaaaaaaggggcgcccgctctagaggatccaagcttacgtacgcgtgcgtgngacgtcnnnnnnnnnnnnnnnnnnnnnnnnnnnnnnnnnnnnnnnnnnnnnnnnnnnnnnnnnnnnnnnnnnnnnnnnnnn

SEQ ID NO: 87440 - DNA, 508 bp, Arabidopsis thaliana columbia
ttttgatcatcagtgccaacattgtgaaaaggcatccgataaatcattcattagaaaggctgcttgggtacccgtggatagaagagaaagtgcggcaaggttcactgtctctcccatggtggatactataattttgttgattgtacgttcgagaaatggacagtggattatgcagcaagcagaggtaagaagaaggaaggcagtggaatcgctgttaaagaccggtcagtttggtcttgacttacgactatctcaatcttcatagagttttttttcataatttatagagaaacatcaaaccccttttggttgggattatcatgtgtttgttccacttgtgtgttgaagtcattttccttcttctgtcttattgaggcagggactaatgtttgttttatctttcagttgtttcgtttaaattccacatttgtgcaatgaactggttggtgtttctttaagatataatcattttgccactgtagtgagatcggaggcatgcattacagag

SEQ ID NO: 87441 - DNA, 580 bp, Arabidopsis thaliana columbia
ccggctactatacgactcactttagggaaagctcgtacgcctgcaggtaccggtccggaattcccgggtcgacccacgcgtccgggaagatttgatcggacgaggaagctgagaaaaaaacaaaaacgacaagagattcattcaaacttgcacgccaacgccggattattcccggtgtatacgtattttatacggttctatttaggaagaagaagaagaagaagaagaagaagaggaaattttaaggaaagagtttttgtttgaattggaatggagggtgttttcttaaaaatgtcggctggttggagtatctccgatgataccggtgggaccttcttctttcatatgcgccatcggaggctctgttgaggagaaatcaacggctgcttctctgccgcgttgggtttcccttcgtcgtcttcgtccgcttgagtttcttcggatcggtggtaagagagaggaaaagggaacggtaagagacgacgacgccgttttgttggagagaagggaccggaaccgcaacgaaaacgataacggaaactgggttttgaaaattttggaggttggatcaatctggaaa

SEQ ID NO: 87442 - DNA, 595 bp, Arabidopsis thaliana columbia
  unsure (1)..(595): unsure at all n locations
atgatattccnnnnnnnnnnnnnnnnnnnnnnnnnnnnnnnnnnnnnnnnnnnnnnnnnnnnnnnnnnnnnnnnngtcgacccacgcgtccgcttctcgtcgatgccaagtttggcgcagacttcgaagtttatggccgtggttgatactttgtcgacgcattcgccggatgaggagtatattggagagagacaacagccgtcgatttggacaggagatgcggagattgttgaagcgttttatggatttgcggcagagatcggacggatagagaaagagattgagaaaaggaacgctgatcctgaccgtagaaataggtgtggggctggtgttttgccttatgagttgttggttccgagttctgagcctggtgttacgtgtagaggtgtacctaatagtgtatctatataattaagaaggaaattatttataagaagtaaatgtagaaagcacataaataatttcttccaaaccatgatatataatatataaagataattttcgtaaaaaaaaaaaaaaagnnnnnnnnnnnnnnnnnnnnnnnnnnnnnnnnnnnnnnnnnnnnnnnnnnnnnnnnnnnnnnnnnnnnnnnnnn

SEQ ID NO: 87443 - DNA, 723 bp, Arabidopsis thaliana columbia
  unsure (1)..(723): unsure at all n locations
tgattattctcnnnnnnnnnnnnnnnnnnnnnnnnnnnnnnnnnnnnnnnnnnnnnnnnnnnnnnnnnnnnnnnnnnnnnnnccacgcgtccgcccacgcgtccgggcacgattgttcagagttcgatttccattttcgggtcgaaaggttgattttatttggattttggatggtagattcagttcctaaacataggaaacttgaatctcagagtttttcgagttagggataagagaaagaaacacagttggagttatactgatgaatggaggaggctcgagtagtttgcgttcagcattgtcctattgtgtgcagcaagtacgaaactatgactatcatcactacctctgtctccttgaactcccaactgagatgcgtaaagcagcatttgctctccgggcttttaatgtagaaaccgcaagagccatggatgttgcatctgatcccaaaatcggcttgatgcggttactttggtggcaagaagcaattgacaaactctacaccaaaaagcccataaaccatccagctgcacaagctctgtcttgggcaatatcagaacataacatcagtaaaccttggctaaaacgctcagttgacgctagaatccgagatgcccaaagagaagtagacgatataccagagagcatttgcggantaggaggaaatacgcagaaggacacagttttccactcttctgtaccaatacacttccaaggcaggcg

SEQ ID NO: 87444 - DNA, 1134 bp, Arabidopsis thaliana columbia
  unsure (1)..(1134): unsure at all n locations
tgannnnnnnnnnnnnnnnnnnnnnnnnnnnnnnnnnnnnnnnnnnnnnnnnnnnnnnnnnnnnnnnnnnnnnnnnnnnnnccacgcgtccgcttttactcctctttttaagtaatctcacttcatttatctctctctctctctctatttcttttgcttccttttggtatttgctttgtatgtttgttttgagatcaaaatggcttcaagtgcttcaaagttcatcaagtgtgtgactgttggtgatggtgctgttggtaaaacctgtatgctcatctgctacaccagcaataaattccccactgactacataccaacagtttttgacaactttagtgcaaatgttgttgttgaaggcaccactgtcaatttggggctttgggacactgctgggcaagaagactataacagattaaggcctttaagttacaggggagcagatgttttcgtcttgtctttctcattagtcagccgagctagctacgagaatgtttttaaaaagtggatccctgaactccaacactttgctccaggagttccccttgtccttgttggtaccaaattagatcttcgtgaagataagcattatttggctgatcatcctggactatcccctgtaactactgcacagggagaggagttgcgtaagctaattggtgcgacgtattacattgagtgtagttcaaaaactcaacagaatgtgaaagcagtttttgattctgcgataaaggaagtgatcaaacctctggttaaacaaaaggagaagactaagaagaagaagaagcaaaagtcgaatcacggctgtttatcaaatgttctgtgtgggaggatagtgactcggcattgatgacgatgacccaactcagtctgatgattttaaactccacttttgagattgtgtgataaacgagagactttatattatatagattgaatcatgtaagagattattagcctctaatcaatcaatagttaccttgaagagagaaagagggggaggtagagagcttattattaattcaattgtgtttatttgtttcaaacctgttattgcaagatattagncattttgatacnnnnnnnnnnnnnnnnnnnnnnnnnnnnnnnnnnnnnnnnnnnnnnnnnnnnnnnnnn

SEQ ID NO: 87445 - DNA, 650 bp, Arabidopsis thaliana columbia
  unsure (1)..(650): unsure at all n locations
cnnnnnnnnnnnnnnnnnnnnnnnnnnnnnnnnnnnnnnnnnnnnnnnnnnnnnnnnnnnnnnnnnnnnnnnccacgcgtccgctctctctgtgtgtcttctacaaagaccagatctctcatctgtgttttgttggtttatctcgaccaaagcccacacgtcacgttacgttaggttacaaaacaagttttttcccttataaaaaaaacattgataaaatcgaaaaatcaattcctattttgtttccaaagcaaatctatatatctattacccatctcgaattcgaccgaacccatgttctaatctccttcgcaacattggaaatctattttaaaaatccgttgagatatagttatataagtagtttggtgactcaattaggtttacacacaaagacatgggatcggctggtgtagcgagttcttcttctgatgttgcgatctcagctttgcgtgagaagcatgagaaggaagtagagaatctaacattaacgacacaacctttgaatacattgaagttgtttgttgaggctactattcagtacatcaagcgatccatatcgtatctattggctcatggaggttggtttatactgataaccactttgttagtggtatctggtggtttgcttgttactgttgatggacctc

SEQ ID NO: 87446 - DNA, 480 bp, Arabidopsis thaliana columbia
  unsure (1)..(480): unsure at all n locations
tttaacaatgtcattctctctgaagaatgctacttccacacggtaatctgcaacgcacccgagttcagtaacacgacagtcaacggggacttacgatacatgatatgggacagtccaccaaaaatggaaccacattttcttactgtatcggatttcgaccaaatggctcaaagcgganagctttcgctagacaattcaagaaagacgatccagtactcgacatggtcgatagagagatcctgaaacgtggacgttacagagtcactcctggcgcttggtgctngagccacagtagctggtggacagatccttgctcggagtgggatgaagtaaacattnttaaagctggacctcaagctaagaaggctagncgggaacaataacggatttttnttnnntggttttgaattcaacaatcggntncanttnaagangtttttcggccanncgggggtttcnattttttttnaaccctctaaa

SEQ ID NO: 87447 - DNA, 745 bp, Arabidopsis thaliana columbia
  unsure (1)..(745): unsure at all n locations
nnnnnnnnnnnnnnnnnnnnnnnnnnnnnnnnnnnnnnnnnnnnnnnnnnnnnnnnnnnnnnnnnnnnnnnnnnnnnnnnnccacgcgtccgcggacgcgtgggatttccttactatatcggatttcgaccaaatggctcaaagcggagcagctttcgctagacaattcaagaaagatgatccagtactcgacatggtcgatagagagatcctgaaacgtggccgttacagagtcactcctggcgcttggtgctcgagccacagtagctggtggacagatccttgctcggagtgggatgaagtaaaccattgtcaaagctggaccctcaagctaagaagctagacgaaacaataacgaattttcttgatgatttgaattcacaatcgaatcaatgcaagtgattatacgacacacgagactacattgttttcagtctctgtaaggttaaattctttgggcaacaacacagtggctgctgtatttatacgaggagaaggagaaagagaagagaaaggagatatttttattctctttcccagattttgtaattcctttgttaaagccattagagaacttttgttcgcaaatttgataaacctttgttcctctgttgtatcttagttaattgaaagttaaagatctaaaaaaaaaaaaaaaaaacgggcgcnnnnannnnnnnnnnnnnnnnnnnnnnnnnnnnnnnnnnnnnnnnnnnnnnnnnnnnnnnnnnnnnnnnnnnnnnnn

SEQ ID NO: 87448 - DNA, 530 bp, Arabidopsis thaliana columbia
tataacaagtattctggaagaaagaaaagagagagaaaatgtcgtccagtaaaatccaggtacgagggcagccacttcttagggttccggcaagaaaccaccgtatgacacacttggttgtttgcggcgtttccacaaaacgccaccaccgtgaaatcaatgcactcagcagtaatagtggtccatcgttggattcggtcccaacaagaaccgacaagaggcagtttcttcgtggtgacggtaacggtaaattcgggaggttcggtgggaagtttgtaccggagacattgatgtctcgcctgatagaacttgaagacgaatttaactttgttaggtgcgatcacgaatttcaggaggagcttaccacagcgttaagagactacgtaggaagagaaacgcctctctacttcgcccaacgtctaaccgaacactacaagaacatagttccaaccatcgaaggtggaccagagatatacttgaaacgggaagatcttagccactgtgggtctcacaaaatcaataatgctctc

SEQ ID NO: 87449 - DNA, 412 bp, Arabidopsis thaliana columbia
tgtctatccattcatttttttttttcatttcttcctccagagagagagagagaagccacaacaagaagaagaagaagaagaagaagaagaagaagttctggaatagtcatcatcttctctgtttctaggctttgtttatttgtctctaaagtttctggattcaacttctgaagaagatagtagtagtccacaagaaggatcttctttaccagaaagttgatttggtcagagccaaggaagatgggttacatgtgtgacttctgtggtgaacaaagatctatggtgtactgtcgatccgatgcagcttgtttgtgtctctcctgtgaccggagtgttcattccgctaatgcattgtccaaacgacattctcggacacttgtctgcgagagatgcaatgctcagcctgctactg

SEQ ID NO: 87450 - DNA, 441 bp, Arabidopsis thaliana columbia
caacacgtccgcggacgcgtgggcggacgcgtgggcaacaatatccacattcgtcttcttttgagtattacatccaacgaaacgtctctttctttctctctgataggcaacaatggcgcagaggaagatgattgtgtttcccaccaagaatgaattgtccgaagcaatggctgagtacactgccaatctctccgccaagttcatcaaagagaaaggccttttcaccgttgttctctccggcggtgacctaatcgattggctctgcaagttggtgcaacctccttatattgattcaatcgaatggccaaaatggcacgtcttttgggtcgatgagagggtttgtgcatgggaagatccagacagtaactacaaactcgccatggagggttttctctctaaggttccgattccggataagaacatctacgcaatcgacaagca

SEQ ID NO: 87451 - DNA, 481 bp, Arabidopsis thaliana columbia
  unsure (1)..(481): unsure at all n locations
accaaatctaatcgccgacatacattgaactcaaatccgctcagaatctccgacaatcagttccaatccatggctcagaatcaacaacctattttccagaccaaacctccagaacaatttgtgcaaatacctatcaacatcgagcgtgattcttcaaccacacgcatgaaccaaaccggaaacacaatccggaaaccaaaccactggccaaccatcaccatctcaatcatcttcgtcatcatcggtcaatccatagcgaaactcctcgaaaacttctactacgacaaaaccaaccgaagcgaatacaacgaaaaccgtcaaaacgatggcgtttggactcaatctcttctccaaactgttggtttccctctccttcttctcccgttcctcatcttcatcaccaagaacaaacgcaaccaccatcaacaacctccgatcacttncgattcaatccacttaaaaatccttagctgtgatctac

SEQ ID NO: 87452 - DNA, 500 bp, Arabidopsis thaliana columbia
  unsure (1)..(500): unsure at all n locations
cnnnnnnnnnnnnnnnnnnnnnnnnnnnnnnnnnnnnnnnnnnnnnnnnnnnnnnnnnnnnnnnnnnnnnnnccacgcgtccgcacggctatggtgggaaagattattgataggggtataaagactctccagagagaaggggttgttattgaccgagaaaattggatgagtgaggctgaggcatgtgagagagttggatctgtcgctacatgccaggccattattaagaacacaataggtattggagtggaagaagaggatagaaagagaacttgggttgctgatgcagatgagtgcaagaagaggggttccattgagactcgcaagagcaatatacgcccatgctcttagtgtcttcttgaccaagaaaggtatctggcttaaagcggcgcagcttgagaagagccatgggagtcgggagtcccttgatgccttgttgcgtaaggctgtaacatatgtcccgcaagctgaggttctctggctcatgggtgccaaagaga

SEQ ID NO: 87453 - DNA, 514 bp, Arabidopsis thaliana columbia
  unsure (1)..(514): unsure at all n locations
attcccattgttcatcgagcaatcaaagttcatgagagaggagatactaaagcagttgatgttctaacaaaaggtgacaacaatgacattgatgacattggtctctatgctgaaggacagctttggcttcacaggcatcatatcatgggcagagctgttggattcttgccttatgttggatgggttactattatcatgacagaaaagcctatcatcaagtatatactcattggtgcattgggtttgctcgttataacatcgaaagactaagactacataacaagctggtcgttggtaaggaggtagcttctgcaacgctcgggtcatcatctttgtagccatcatctttgaaactgtagaatcatataaacctcaacttataattatagacacttttatctttaaatcagctacgttttgtgacaaaaaaaaaaaaaaagnnnnnnnnnnnnnnnnnnnnnnnnnnnnnnnnnnnnnnnnnnnnnnnnnnnnnnnnnnnnnnnnnnnnnnnnnn

SEQ ID NO: 87454 - DNA, 923 bp, Arabidopsis thaliana columbia
  unsure (1)..(923): unsure at all n locations
atgatcctgccnnnnnnnnnnnnnnnnnnnnnnnnnnnnnnnnnnnnnnnnnnnnnnnnnnnnnnnnnnnnnnnnnnnnnnaccacgcgtccgattctcttctccactgaaacgcgtttgaaggagaagggtcaaagggatctgatcctatcactttcgctgggaaaaacacgaaatcgaaggaagaatcaatcatgggtttcatcggagaaactgtagattccatcaaatctatcaagatccgtcaagttctcactcaggctatcactctcggtatgatcgttacatctgcattgataatttggaaggcattgatatgtgtcactggcagtgaatcaccagtggttgttgttctctctgaaagtatggaacctggctttcagagaggagatatattgttcttgcggatgactgatgagcctattcgagcaggcgagattgttgtgttcagtgttgatggtcgtgaaattcccattgttcatcgagcaatcaaagttcatgagagggaaaatacaggagaagttgatgttctaacgaaaggtgacaataactatggagatgacagacttctgtatgctgaaggacagctttggcttcatcgacatcatataatgggtcgtgctgtcgggttcttgccttatgttggatgggtgactattatcatgacagaaaagcctatcatcaagtatattctcataggtgcattgggtttactcgttataacgtcaaaggattgantcttttggaaaggaggtgggctctgcagagtgcaaacccttaaaggccttgtaatttcaatgggaaaaanggaaaggccaaccaatttaaataccccggtttttgtgggtaaggtaattttaangggnggncctccttncccggcnacctaaattttaacngngggaaggtaattttnggtgngc

SEQ ID NO: 87455 - DNA, 816 bp, Arabidopsis thaliana columbia
  unsure (1)..(816): unsure at all n locations
ggactctgagagaaactcttcttcttcactgcaaacgcttttgagacaaagttcgtcacttcgatctgaattataacacttcgtgcgagaatcgaaataatcgaaggttcaagatgggttggatcggagaaactgtagattctatcaaatctattcagattcgtcagcttttcactcaggccatcagtctagggatgattgtcacatctgctttgatcatatggaaagctttgatgtgtgtcactggaagcgaatctccggtggtggttgttctctctggaagcatggaacccggttttaagaggggggatatattgttcttgcacatgagtaaagacccgattcgagcaggtgaaattgttgttttcaatgttgatggtcgtgatattcccattgtccatcgtgtcattaaggttcacgaaagggaaaatacaggagaagttgatgttctaacgaaaggtgacaataactatggagatgacagacttctgtatgctgaaggacagctttggcttcatcggcatcatataatggggtcgtgctgtcgggttcttgccttatgttggatggggtgcctatttatcatggccagaaaagcctatcatcaaggatattcccatagggggcattgggtttacccggttataaccgggcaaaggggttttaggccttttggggaagggggtggcctcttccaggggtgaaaccccccttaaaggcctttggtttttccaatgggaaaaaaggaaaggcnanccatttaaaacccnggtttttgtgggtaggaaattttaaagggggggccccntttccttc

SEQ ID NO: 87456 - DNA, 555 bp, Arabidopsis thaliana columbia
  unsure (1)..(555): unsure at all n locations
cccacgcgtccgcggacgcgtgggttacagtttccgatctatccaaatcatagattcttttatcttcacaatctgttagtgtctcgtagctctaattaggtaataactaatgggagtgtcaaagaagaaatcaggtgagattagaggagatttaatcccagggttaccagaggaattagcaattgagtgtttggttagagttccttttcagtttcattcttccatcaaatctgtttgccgatcatggaaatgcgttatctccagtcgttcttttatcaaggaacggataggttttggtaaagctgaatctcttctctgccttgttcaacctctgacttcaccaccgtctccggcgatgatggaaggtggtgagatgagtcagaagaagaaagaggaagaagaaggcgagtctcagatgacgcagcagctgctacaaccgcgtattactggaccgccctttacggttaggggttttacgaacgtgggcacgggaccgtgtgggtcctaacggcttcctttttttcgnatcgttcgttaaggcnggggaagtnttta

SEQ ID NO: 87457 - DNA, 547 bp, Arabidopsis thaliana columbia
  unsure (1)..(547): unsure at all n locations
acgaaatcaaaatccaccattcttttctcttccgagattttagaagtttgcgacgatgatcaggctctctaagcgctccgtctctaccctcctacgctccggtaaccaaagcttccgtatcgccgccgcagcttccacctcccgttcttccccatctgccacggatgtcaagagaagtgacactgaatcgagatggtactcatctttaaccaatggacaatctaagaatagtgggtcatttgctcaattgaacatgaaaaccaattggtttatgggataccggaacgaatccagtgcagcagcatcagattcttcctcacaagctcctccaccggctgagaaattcgagtatcaagctgaagttagtcgcctcatggaccttatttgtcaacagcttatacagcaattaaggagggtgtttttnngggggttattagnaatcnaagtaattnatttgggttaagcttcggttattttnggngttaccanccttagttnnnaaaaaatgnctcctgancttngatatnnggnttttttagcaaagggg

SEQ ID NO: 87458 - DNA, 759 bp, Arabidopsis thaliana columbia
atgcctacgcgcgagctctaatacgactttatatagggaacgctggtacgcctgcaggtaccggtccggaatttccgggtcgacccacgcgtccggagaagatcattgtactcctcctcactgttgacgccatagagggagttgatgtgatggttcgaggagcgaagagatcaatggtggatgagctggaagcaatgttagatgtggtagacccgcaaccgcaggggaaatcattgtcgatgagaagaagaacatttgatatgccagacagtttgatccgcaaagaaatcgcagagggagtgactcagattgtgcagatgcttgaaacggaagaagaatgatggaatggagcactgtgtgtttgtgactcaggggctgtttttgttgttgtttgtgactgggaagaactgatcagcctctttagtttgattagtgttctgaatgtttctaattatgcagacaaaattaataatgagagtggcttgaagaagagattggtgtctcgctcgcatcagtctcatctctcaaatcttgtctcttcttagtctgtttctgtttgtcaggttatgtaatccctttgtgttcccaaacttgtagactctgttttgtcaaattgcttatgtttttggttttgcttatttctactccatcatgaattagaaattgattaaaaaaaaaaaaaaagggcggccgctatagaggatccaagcttacgtacgcgtgcatgcgacgtcatagtaatctatagttcatctcaat

SEQ ID NO: 87459 - DNA, 881 bp, Arabidopsis thaliana columbia
  unsure (1)..(881): unsure at all n locations
gccaggcctaattctgactctcttagggaaagctggtacgcctgcaggtaccggtccggaattcccgggtcgacccacgcgtccggctattgctgctgctgaagcggagaagaagaagaataagaataagaagaagagttataattggacgacggaggtgaagagtgagagagagaatggtgaggtttcgcatacttatatcatcaaggctactactggaggagagaaaaagaagaaacatgaggagaaggagaagaaagagaagatagagactaagagcaagaagaaggagaaaactcgtgttgtggtgattgaggaggaggaagaagaagatgatgagtcgtcagaacatggtgctatcgttcttaggaaggcgttttccagaaggaatggagcagttaggaccaagaaggggaagaacaaggaaatgccacctgaatatgcggctgtgatgatccagagggccttcaaagcttatttgattcgtcgctcaaaatcattgcgtgctcttcgtgatcttgctattgcaaagactaaacttaaggagctaagagcttctttccacaacttcagctaccgtcgcctgattgctcgtgatggagaggagcgtcagaaattctcagagaagatcattgtactcctcctcactgttgacggcatagagggagttgatgtgatggttcgaggagcgaagagatcaatggtggnttgagcttgaagaattttaagatgtggtaggcccgnaaccgaaggggaaatcattntncgatnnganganggccatttatatgccaacagtttanccaaagaatccaangggngtacccagatttcaantcttaaacggtgagnttttggattncnctttntttttacnaggt

SEQ ID NO: 87460 - DNA, 991 bp, Arabidopsis thaliana columbia
  unsure (1)..(991): unsure at all n locations
agcagacgaggtttatcaagagaatgtntatgtccctnacaaaaagttccattccttcaagaaagtagcccgctctatgggctacggtgagaaggatctttccttagtctcgtttccaatctgtctccaaagggtactatggagagtgtgggaaaagaggatggttacatggaggttactggattcacttctgatgtaagagagcagatatacaaaatggcttctgtgaatctttgttccaacatctctggtcaaattcttgctagcctcatcatgagcccacccaagcctggtgacgactcctatgaatcatacatagcagagaaggatggaattctctcatctttggcaagacgtgcaaagactcttgaagaggctctgaacaagctagagggagttacttgctatagagcagaaggagctatgtatctattcccttgccttcaccttccacaaaaggcaattgcagctgctgaggcggaaaagacagcaccagacaatttctactgcaaacgccttctaaaagctactggaatagtcgttgtccctggttctggctttagacaggtacctggaacatggcatttcaggtgcactatacttccccaagaggataagattccagcgattgttgatcgtctaactgcgttccaccagagcttcatggacgagttccgcgactaagcattctgttttcaagatccctctatagattatatgagtaataataagaaaaaggtcccatgccgtttctttttcatcgactttgtgtttacagaagctaagatgtgagagcattagttagtgctctctttcttattcactttttgttctgttctctttatagtgaaaacccgtaatataaattgagagagtttcttataaacggttagtcaacacgtaatctcatcaagaaaacacaagattgaaccattgttgaattccatgttcaaagtttcgatttcacagaatcattttcgtttgaaaatat

SEQ ID NO: 87461 - DNA, 1078 bp, Arabidopsis thaliana columbia
  unsure (1)..(1078): unsure at all n locations
nnnnnnnnnnnnnnnnnnnnnnnnnnnnnnnnnnnnnnnnnnnnnnnnnnnnnnnnnnnnnnnnnnnnnnnnnnnnnnnnnnnccacgcgtccgcctctctttcgtcttcttcagattctctctgacggttgttaaaaatccgattataacgacgacgacacccaaatcctcacaaatatataattattaatttaagcttctctgtcaaaataaaaaggagtcatgacgactctttcttctataaatctctctatacctcctcatttgcttcctagcacgactaacacttgttcttcttcctctgcaacctcttgttctcctcccaggtcttcttcttttgttcttcattcccctctttcgtttggtcaccggagattacccattagcaagaaaagcaagctccgcttctgtggagtgattacaaaggaagctgtttctgggtccaacgatatgactattactcaagtcagagaagatgacgaatcggagattgatgcgccgcttctcgatcctgagtcgctctctaagcctaggagaattgctctctttgttgagccttctccctttgcctatgtatccggctacaaaaacagattccagaatttcattagatacctccgtgaaatgggagacgaggttatagccgtgacgacacatgaagggtgtccctgaagagttctatggagccagagtcatttggttcaagaagcctttcccttgcccttatttaccaaaaaggcgccacttctcgctttgcgcttaggtcccaaggatcaatctcttgaaattgcaccgggtttaagccttgccgacattatacacgcttcatctcccggagctatggtctatggtgctctggcaatagcaaaaatgctatctgaaccaatagagaagccttaccacacacacgtccctggatacatcccaagatacacttttagggggggggaaaaccaatgtggtctataataaggcgccctcacagagcggatgaacttaccttaagatccttccggtgcccatgggaaaaggaacctatagcccaccggtgcaaactgcagactaaacaaccctcgc

SEQ ID NO: 87462 - DNA, 471 bp, Arabidopsis thaliana columbia
ccctcgcgtccgcccacgcgtccggcatgagctccggtgaaaaatggaggccaagaacaagaaagcagtagcctcccgtctctgctgcttatgcaacctgagacgtcccgtcctcaaaagacctaaaacccttcaacagatatgcagagagtgcttttatgaggtttttgaggaggagattcatcaagtcattgttcagaatcgtttattcaaatctggtgaacgtgttgctataggtgcctctggtggaaaagattctactgttctggcatatgtgttatcagaactaaacagacgccacaattatgggctagacctctttctcttgtccatagatgaagggattacgggttatcgtgatgattctcttgagactgttaaacggaacgaagtccaatatggtttgcctcttaagattgtttcatataaagatctgtatggatggacaatggatgagattgtgaaaatgat

SEQ ID NO: 87463 - DNA, 352 bp, Arabidopsis thaliana columbia
aaaaaaacaaaaaaaaaaacaagaaccatttaaaaagcttatcaagcacaatggccatcgagaagagaaccatgattgcctccttcatcatcgttctgatgatggtaacgatgatcgcaaccaacgttgaggccccggaatcatgtcaaaatcaagccacccgcaaaccccaagttcttctttttctaaattgatgctcatatgtttacaagaaataaatggtgcttcaacaagggcttcaagccattcattgcattagttaaactaatgtttactttttatatatatatatatatatatatattgcactttcatcctcttggtttgttagctatggggagattatctaaat

SEQ ID NO: 87464 - DNA, 1467 bp, Arabidopsis thaliana columbia
atgtctcagggtgcatgtgagaatcaacttctatccaaattagctttgagtgacaaacatggagaagcttcgccgtacttccatggctggaaagcttacgacaataatccttttcatccaactcataatccacaaggagttattcaaatgggtctcgccgaaaatcaactttgttcagatttgatcaaggaatggataaaggaaaatccacaggcatctatttgtacggcggagggaattgactctttctccgacattgctgtttttcaagattatcacggtctcaaacaatttagacaggcgattgcgacgtttatggagagagcgagaggcgggcgggtgaggtttgaggcggagagggtggtgatgagcggaggagccaccggagcaaatgagacgatcatgttctgtcttgctgatcccggcgacgcttttctcgtccctactccttattatgctgcattcgatagagacttaaggtggagaactggagttagaataatccctgtggagtgtagcagctcaaacaatttccagattacaaaacaagccctagaatcagcgtaccttaaggcccaagaaaccggtatcaagatcaaaggcctgatcatctcaaaccctcttggaacatctctcgatcgagaaactcttgaaagccttgtcagcttcatcaacgacaagcaaattcacttagtatgcgacgaaatatacgcagcaacggtttttgcggaaccgggattcatcagtgttgcagagatcatccaagagatgtattatgttaaccgtgatctgattcatatcgtctacagtctttcaaaggacatgggtcttcccggtttccgggttggagtggtttactcttacaacgatgttgttgtgtcctgcgcaaggaggatgtcgagttttggattggtctcgtcgcagacacaaagttttctagctgctatgttgtctgatcagagttttgtcgataactttcttgttgaggtttcgaaaagagtagcgaagagacaccatatgttcacggaagggcttgaagagatggggatttcttgcttgagaagcaacgcgggtttattcgttttgatggatttgaggcatatgcttaaggatcagacatttgattccgaaatggcgctttggcgagttattatcaataaggtcaagattaatgtctctcctggctcgtcgtttcactgctctgagcctggttggttccgagtctgctttgctaatatggacgaagacacactccaaattgcacttgaacgaatcaaagactttgtggttggagacagagccaacaagaacaagaactgtaactgcatttgcaacaacaaaagggagaacaagaaacgtaagagttttcaaaagaatctcaagctgagtttatcttcgatgaggtacgaggaacatgttaggtcaccaaagttgatgtctcctcattcaccattgcttcgagcttaa

SEQ ID NO: 87465 - DNA, 513 bp, Arabidopsis thaliana columbia
ctttaaatcatttagaggttgtgaaatattatggagagtgaaggaaagattgtgttcacagaagagcaagaggctcttgtagtgaagtcttggagtgtcatgaagaaaaactcagctgaattaggtctcaaactcttcatcaagatctttgagattgcaccaacaacgaagaagatgttctctttcttgagagactcaccaattcctgctgagcaaaatccaaagctcaagcctcacgcaatgtctgtttttgtcatgtgttgtgaatcagcagttcaactgatgaaaacagggaaagttacggtgagggagactactttgaagagacttggagccagccattctaaatacggtgtcgttgacgaacactttgaggtggccaagtatgcattgttggagacgataaaggaggcagtgccggagatgtggtcaccggagatgaaggtggcttggggtcaggcttatgatcaccttgttgctgccattaaagctgaaatgaatctttccaactaa

SEQ ID NO: 87466 - DNA, 1707 bp, Arabidopsis thaliana columbia
ccacgcgtccgcactctcccaaatctctcttctttaacaacaaaaaaaaaatcacagagacatagagagaagaagacggaacagaggctccaaaaaaatgatgatggagactagagatccagctattaagcttttcggtatgaaaatcccttttccgtcggtttttgaatcggcagttacggtggaggatgacgaagaagatgactggagcggcggagatgacaaatcaccagagaaggtaactccagagttatcagataagaacaacaacaactgtaacgacaacagttttaacaattcgaaacccgaaaccttggacaaagaggaagcgacatcaactgatcagatagagagtagtgacacgcctgaggataatcagcagacgacacctgatggtaaaaccctaaagaaaccgactaagattctaccgtgtccgagatgcaaaagcatggagaccaagttctgttattacaacaactacaacataaaccagcctcgtcatttctgcaaggcttgtcagagatattggactgctggagggactatgaggaatgttcctgtgggggcaggacgtcgtaagaacaaaagctcatcttctcattaccgtcacatcactatttccgaggctcttgaggctgcgaggcttgacccgggcttacaggcaaacacaagggtcttgagttttggtctcgaagctcagcagcagcacgttgctgctcccatgacacctgttatgaagctacaagaagatcaaaaggtctcaaacggtgctaggaacaggtttcacgggttagcggatcaacggcttgtagctcgggtagagaatggagatgattgctcaagcggatcctctgtgaccacctctaacaatcactcagtggatgaatcaagagcacaaagcggcagtgttgttgaagcacaaatgaacaacaacaacaacaataacatgaatggttatgcttgcatcccaggtgttccatggccttacacgtggaatccagcgatgcctccaccaggtttttacccgcctccagggtatccaatgccgttttacccttactggaccatcccaatgctaccaccgcatcaatcctcatcgcctataagccaaaagtgttcaaatacaaactctccgactctcggaaagcatccgagagatgaaggatcatcgaaaaaggacaatgagacagagcgaaaacagaaggccgggtgcgttctggtcccgaaaacgttgagaatagatgatcctaacgaagcagcaaagagctcgatatggacaacattgggaatcaagaacgaggcgatgtgcaaagccggtggtatgttcaaagggtttgatcataagacaaagatgtataacaacgacaaagctgagaactcccctgttctttctgctaaccctgctgctctatcaagatcacacaatttccatgaacagatttagagttacatatgtatatgtatatatgtatgattgattgtatgtatagatgatactggagaatgatgagtttttgagaatcaaactcttttcttctttctagtgattgcctttattcctttacatgttttggttctctgtacactatttgatttaccttttttactttctttcttcatttgtcaggaaatgttggaagataacattaatggtaaaaagttggtgtggaccgttgttgcgttggcatttcaaaaaaaaaaaaaaaa

SEQ ID NO: 87467 - DNA, 920 bp, Arabidopsis thaliana columbia
  unsure (1)..(920): unsure at all n locations
nnnnnnnnnnnnnnnnnnnnnnnnnnnnnnnnnnnnnnnnnnnnnnnnnnnnnnnnnnnnnnnnnnnnnnnnccacgcgtgcggcgagagacgacagaagggggtttatcgttgaaacatatagtgatgcttgttgatcttatataaacaatgttggaactaatgtcaggaaaccaacagttgaatactcaagcgaggaatatgccaaaatcatgtcgaccaacttagaatccgctttccatttatctcaaattgctcatcctcttctaaaagcatctggtgtcggaagcattgtgttcatctcctctgtagctggcctggtgcatcttagcagtggatctatctatggtgcaactaaaggagcacttaatcagcttacaagaaatctagcttgcgagtgggcaagcgacaacatcagaaccaattgcgtggcgccatggtacatcaagacctcacttgtggaaatgctacttgagaagaaagaatttgtggaggctgtagtttcaaggaccccacttgggcgcgttggagaaccagaggaggtctcatcgttggttgcctttctctgccttcccgcatcatcttatattaccggacaggtcatatccgtcgatggaggattcactgtcaacggttttagctatgctatgaagccttaatctcgaatcgcaacattactaataaagcaagaatcctcgtgatgtgttggtcttgtttgtctttgtttagtttttgtgacttctttaaacatatagtaatatcaaaacgtttgaatttctaatgtagccgttaaataaatcaaggcacagttgtgccccnnnnnnnnnnnnnnnnnnnnnnnnnnnnnnnnnnnnnnnnnnnnnnnnnnnnnnnnnnnnnnnnnnnnnnnnnnnnnnnnnnnnnnnnnnnnnnnnnnnnnn

SEQ ID NO: 87468 - DNA, 641 bp, Arabidopsis thaliana columbia
  unsure (1)..(641): unsure at all n locations
ggaaaaagcttcgtcctttcgcaaacccagggaaggggaaggtgaataagctctgcaaaatccctcccttcccttcttcttcttctacaagatttcaccatttctccatcctaaaccataacaacagagatatagagaagatgaagcactacagtcacggaattgatggtttacgaagcggtctttcaccttccgctaaacctttcgcaatcggttcttcttcttctcctgccttctctctcaaatctgaacacgaagattctatttggggtgattatactttagacctttcctttttatcctctgatgatcagagaagtggtctcgatgatgatgattcgttatctaacttgtctcgcgatgttgagactaataaagaaggattggttttagaggagaagatagctagttctggaaaggttttggtaaaccctaatccaagtttctcgaaattgcctgaggtattgatgaagtcctcagatgttgttggtgatgcgaagttggggtttgtcccgtgtctctnagaagtnttctacggngtntgacctgattnagtctangnagattcncctttttngaagnattctttccaaaaanggctggttttgaccaaattatactncagggnntactnataccna

SEQ ID NO: 87469 - DNA, 634 bp, Arabidopsis thaliana columbia
  unsure (1)..(634): unsure at all n locations
nnnnnnnnnnnagcgatctctacgactcactttagggaaagctggcacgcctgcaggtaccggtccggaattcccgggtcgacccacgcgtccgcaagattaacgcaaccctagccgctcatcttccctccgcttgtcatatcacggctcctaacatcactgactgtatttcgattctgcatctacctcgtaactcaacattggctaaagagtttgagaacttaggaaggattgaagacaactacaactccacatctcctacacaaattcataaagatgggacaggaggaggaaaagccgaaccagtgaagagtaatggatggaaggagaagagttggttgggtgttgagcttttaatatatttgctagtttctctcatcttcttttaattacttcctttctttaatgttcctttgctttattattacaataacttataagatatctatttatatatgagacacatgcatgtgtttgcgatctatatgcatgtaaatgagtcactggttaatttttaatcacgaagcgtacattttaaaaaaaaaaaaaaagggcggccgctctagaggatccaagcttacgtacgcgtgcatgcgacgtcaaagtcttcctatnagtcgtcctannnnnnntt

SEQ ID NO: 87470 - DNA, 680 bp, Arabidopsis thaliana columbia
  unsure (1)..(680): unsure at all n locations
ccggnattgaatgaccggaccgacgcaacacaacacatcgaaccatggagaaatcaacaagaaccctattcataaccatcgtgataacctccatgttgctagggtttggaaactctgatcttgctcaggacagagaggagtgtacgaaccagctcatagaactatccacgtgtattccgtacgttggaggagacgccaaggctccaacaaaagattgttgtgcagggtttggccaagttataagaaagagtgagaagtgtgtttgcatattggtcagagacaaagatgatcctcaacttggtatcaagattaacgcaaccctagccgctcatcttccctccgcttgtcatatcacggctcctaacatcactgactgtatttcgattctgcatctacctcgtaactcaacattggctaaagagtttgagaacttaggaaggattgaagacaactacaactccacatctcctacacaaattcataaagatgggacaggaggaggaaaagccgaaccagtgaagagtaatgggatggaaggagaagagttggttggggtttgggttttattaatttctaggttcntnactctttaanaccccctcttaaagnccttgtttttttcaaactttaggtttttttaaaaaaaaagggggccctngggcccgttggcggtttggggc

SEQ ID NO: 87471 - DNA, 416 bp, Arabidopsis thaliana columbia
gttttatgcaggaaacaatctgtactagggtttggattcctataccgggaggactagtggagctctttgcgaccagacatgtcgctgaagatcagaacgtggtggattttgtaatgggacattgcaacatgttgatggacgattctgtaacgataaacatgatggtagcagacgaggtcgaatcgaagccgtacgggatgttatccggtgacatccagcaaaagggttccaaagaagaagatatgatgaatctcccttcgtcttacgatatctctgctgatcagatccgactcaatttcttgcctcagatgagtgattacgagacacaacacttgtagatgaagagtgattatcatcatcaagccttggggtatctcccagagaatggtaacaaggaaatgatgggtatgaaccca

SEQ ID NO: 87472 - DNA, 514 bp, Arabidopsis thaliana columbia
  unsure (1)..(514): unsure at all n locations
ccaatggagtccaacgggtcctaacgctagtttctaccctgtccccttctactggggatgcacggttccgatataccctacctcagagacttcatcatgtttaggaaaacggtcaggggatcaaactgaaggaagaatcaatgatactaatacaacagtaactactacaagagcaagattggtctcagaatctcttagaatgaatatcgaagctagtaagagcgctgtgtggtctaagttaccgacaaaacccgagaaaaaaccgcaaggattcagtttgttcaatggatttgacacaaagggaaacagcaacagaagtagcttggtctccgaaacttctcacagtctacaagcaaacccttgtggaagaaggcaaagctgtgtagatagttttgttgtttggaactaagagtagatatagtatttactgttcggacgcgtggnnnnnnnnnnnnnnnnnnnnnnnnnnnnnnnnnnnnnnnnnnnnnnnnnnnnnnnnnnnnnnnnnnnnnnn

SEQ ID NO: 87473 - DNA, 516 bp, Arabidopsis thaliana columbia
  unsure (1)..(516): unsure at all n locations
atgatactgccagctcnnnnnnnnnnnnnnnnnnnnnnnnnnnnnnnnnnnnnnnnnnnnnnnnnnnnnnctcacgggtccacccacgcgtccgaccgactgtttatctcgaaaacaaagaagatgggcagaagatatggcgtggcacccatctgggaacactcttttctctgtgtacactgcagacgatggggattctcagatatcgatcctaaatctgaacaagacacgcgaggttactttcctggaaaataaacctcacgtaaaagggattatcaacaacataaagttcatgccttgggaaaatacatgctttgtcacagggggaagtgatcacgctgttgtactatggaacgagagtgatgatgaagaaaacaaatggaagtcgaaacctttacacagaaatctacattcagctgctgtaatgggagtggatgggatgaaaaacaagaatgttattttatcagtaggagcagacaagagaatatacggatttgatgttcaagttggtagagc

SEQ ID NO: 87474 - DNA, 569 bp, Arabidopsis thaliana columbia
  unsure (1)..(569): unsure at all n locations
nnnnnnnnnnnnnnnnnnnnnnnnnnnnnnnnnnnnnnnnnnnnnnnnnnnnnnnnnnnnnnnnccacgcgtccgccgcgatcgcgtttcacagatcaacatcacccgcgccggagcagaaactcacactcttcgctctccgccttgcaatcatcgagaaaatcgccactaatctcggaaccctaggtttcatttgggccacggtggttcttctcggtggattcgctatcacgctcgaaaaatccgatttttggttcatcaccatcattctcctcatcgaaggcactcgaatcttcagcagaagccacgagctcgagtggcagcaccaggccacgtggactgtatccggcgtcggaatcagtagcttccgcgtgctccaatcaagctcaatttcacttctcagaaatttaaaacgaatcagcgatgggatctttaagccgatcctcgacaatggattgagagaagcgacgacgagaatcggacgacaagagatctttgatcgtcgaacaactctgacatggaagaactcagagttcctcttcttccatatgcgagatggctttacatct

SEQ ID NO: 87475 - DNA, 525 bp, Arabidopsis thaliana columbia
gctacaatacgactcactttagggaaagctcgtacgcctgcaggtaccggtccggaattcccgggtcgacccacgcgtccgtagggcaagatatacttggaatctcactgataatcacggttcttcaaattgtccgcgtaccaaatcttaaggtcgggtttgttcttctcagctgtgccttcatgtatgacatcttctgggtttttgtttcaaaatggtggttccgtgaaagcgtgatgattgtggtagcccgtggtgacagaagcggagaggacggaattccaatgctactaaagatcccacgaatgtttgatccttggggtggctacagcataattggatttggtgacattatcttaccaggactgcttgtaactttcgcactgaggtacgactggctggcgaacaagaggctaaagtcagggtacttccttgggacaatgtctgcttatggtctaggtcttctcataacatacatagctctaaacttgatggacggacatgggcaaccggctctgctttaca

SEQ ID NO: 87476 - DNA, 764 bp, Arabidopsis thaliana columbia
  unsure (1)..(764): unsure at all n locations
angtttccattcccnanttggtcccgtgtacaaaccgngggcggatccaatgctntaanccccnggatnttaaccntggggggctccancanaantggattggngncattactttccaggctgctgnaactttcgcantgaggtncgactggctggcgaacaagnggctaaagtcagggtacttccttgggacaatgtctgcttatggtctaggtcttctcataacatacatagctctaaacttgatggacggacatgggcaaccggctctgctttacatcgtcccattcatactaggtactttgttcgtgttgggtcacaagagaggtgacttgaagacgctgtggacaacaggggaacccgacaggccatgccctcacgttcgtcttcaacctcaatcgtcttaaaacaacctgctatgtatcagatgggaacagataaaaatcagatgatcctctagtttttttttattgttaatacaacacaccccttcttaggtcaatatatatgtctctgtacgctttcacacaactagacaggagagcccataccacatttgccttaaataactcttttaacctctcttgctagtttctctctattattagacatgaaaccatgaatagacttggcttcttttcctgagtcatgatgatcagattttcttctataaaaaaaaaacacacaaagggcgaccgctctagaggatccaagcttacgtacgcgtgcgggcgacgtcataggcttctagtagtgtcacctaa

SEQ ID NO: 87477 - DNA, 505 bp, Arabidopsis thaliana columbia
  unsure (1)..(505): unsure at all n locations
cagctannnnnnnnnnnnnnnnnnnnnnnnnnnnnnnnnnnnnnnnnnnnnnnnnnnnnnnnnnnnnnnnnnnccacgcgtccgcttttgttgtgaacttgcgatacatatatatatagatgcgagtacaccggactgtgaaattttggaacgaattgatttgatttgaatatggcaatcgcgaagaaattggaaaatgagatctcacgctcttctccttcgtcatcatcatcatcgctgaacgaagctctgttaatctctactatgtgtatcatcggcttacaagtccatgtgcatatcaacgatggctctgtgttttctgggatattctacactgtctctcttgagaatgaattcagtattgtgttgaagaatgcaaaacttactaagaagggaagaagtaaatcgaatgtagaaagtgggaagattgtggagacacttgtgattttgtcttccaatattgttcaaattgttgcagagggagtctcgctttcgtccaatgttg

SEQ ID NO: 87478 - DNA, 666 bp, Arabidopsis thaliana columbia
gaatttggtggggttgcattttggtgagtgaagcatctttttcaaacaatgtagaggaaataaagaggatccaaaagaacttgactttcttactcagattaatggacactaagtcatggatccaaagcatatatgagatctctattgtgtgttaacatgtctcttgagtctctaaacttacttttctccaaagattaaagcaaaagcaaagatgggcttcctctgtcactagttttgctaactcatccttttcggatagcgacactcttcgtttcccactcttggtttggtggtttctttaggattctagatttttgttttacttatctttccttgtacaagagactgtttctataggattcttcatttcctgttttatctatcttctctgtgcaacgagagtgtcatggctactctgtctcaaatcgtcgaggaggaacttgaaccatcactaagaagcaagctttcaagaacaagtgaaaccagtctcgcttctgtcgcatcgttatccatgccacttattcaggagattgttctatcagcagacatcagatgtagtgactgccaagagaaagtcgccgacataatggcgaggatgatcgaaacatattcaatattggtgagtgtgttggagaagaaagtgacactaacgtgtacatattccgg

SEQ ID NO: 87479 - DNA, 2730 bp, Arabidopsis thaliana columbia
aagcgaacgttacagagctatacaagaaattatatggagattctgttttctatttccattcttgctcttctcttttccggagtagtagctgctccaagcgacgatgatgttttcgaagaggttagggttggattggtggttgacttgagttctattcaaggcaagattctggaaacttcttttaacttagcgctttcagatttctatggcatcaacaatggataccgaaccagagtctctgttttggtcagagactcccaaggagacccgatcattgctcttgccgccgctactgatcttctcaaaaatgcaaaagcggaagccattgttggtgcacaatcattacaagaggcaaagcttttggcgacgattagcgaaaaagctaaagttccggtcatatctactttcttgccaaacacgttatctttgaagaaatacgataactttattcaatggacgcatgatactacatcagaggctaagggaattacaagtctcatacaagatttcagttgtaaatcggttgtggttatatacgaggatgctgatgattggagtgagagtttgcaaatattggttgagaattttcaagataaaggaatctatatcgctcgttctgcttcttttgcagtctcatcatcaggagaaaatcatatgatgaatcagctaaggaagcttaaggtctcaagagcatcggtttttgtggtgcatatgtccgagattcttgtttctcgtctcttccaatgtgtagagaagttaggtttgatggaagaagcgttcgcttggatcctcactgcaagaaccatgaactacttggaacattttgcaataactaggtcgatgcaaggggtcattggtttcaaatcttacatccctgtatctgaagaagttaagaattttacttcaagattgaggaaacgtatgggagatgatacagaaacagagcattctagtgtaatcatcggtttacgcgcacacgatatcgcttgtattctagcaaatgcagtagagaagttcagtgtaagtggtaaagttgaagcatcttcgaatgtatcagctgatcttctggatacaattagacatagtagattcaagggtttgagtggtgacatccaaatctctgacaacaaatttatctcagagacatttgaaatcgtgaatattggaagagaaaaacagagaaggataggattatggagtggtggtagttttagccaaagaagacagattgtttggcctggcaggtctcgtaagatcccaagacaccgtgttttggcagagaaaggtgaaaagaaggtgcttagggtcttagttaccgcaggaaacaaggtcccgcatctagtgtcggtgcgtcctgatcctgaaacaggtgttaatactgtctctggattctgcgtagaggttttcaagacttgcattgctccttttaactacgagcttgaattcataccttaccgtggaaacaatgacaatcttgcttatctactttctactcagagagacaagtatgatgcagcagttggtgatatcaccatcacttccaacagatctttgtatgttgattttactttgccgtacactgacattggtattggaatcctgacagtaaaaaagaaaagccaagggatgtggactttctttgatccttttgaaaaatccttgtggctagcgagtggagctttcttcgtcttgaccgggattgttgtttggttggttgaacggcccgttaatccggagtttcaaggctcttggggacaacaacttagtatgatgctctggtttggattctctaccattgtgtttgctcacagggagaagctacagaaaatgtcatcaagattcttagtcatagtttgggtttttgtggtgttaatattgacttcaagttacagcgcaaacttgacatcaaccaagaccatttctcgcatgcaattaaatcatcagatggttttcgggggatctacgacgtcaatgactgcgaagctcggatccattaatgcagttgaggcctatgcacaacttttgcgagatggaactcttaatcatgtcatcaatgaaataccttatctcagtatccttatcggaaattatccgaatgatttcgtaatgacagatagagtgactaataccaatggctttggctttatgttccagaaaggttcggatttggttcctaaagtatcgcgagaaatcgcgaagctaagatcattgggaatgttgaaagacatggagaaaaaatggtttcaaaagctggattcactaaatgtacattccaacactgaggaagttgcctctaccaacgacgatgatgaggcatctaagcgattcaccttccgtgagttgcgcggtttgttcatcattgcgggagctgctcatgttctcgtactagccctacatctctttcatacgcgtcaagaggtatcacgactatgcaccaaacttcaaagcttctataagtaaaaagtgatccatcattcataagctctactatagcaattgatggaggactcataagtaacaacaaagtacacttcgaaacaaatgtcacatgtaatacttggttttttttcccgtttaaattcacatgtaataatttaactcacgtaaatactaaagtgattcacccaaaaaaaaaaaaaaaagggcggccgctttaaaggatcccagcttacgtacgcgtgcatgcgacgtcatagctcttctataggtcacgcaatcaaaccggggcgc

SEQ ID NO: 87480 - DNA, 736 bp, Arabidopsis thaliana columbia
  unsure (1)..(736): unsure at all n locations
nnnnnnnnnnnnnnnnnnnnnnnnnnnnnnnnnnnnnnnnnnnnnnnnnnnnnnnnnnnnnnnnnnnnnnnccacgcgtccgcccacgcgtccgcccacgcgtccgcccacgcgtccgcccacgcgtccgtacggctgcgagaagagccttttgcttcattctcacttccttcctcatccaaaaaagctcctccatttcaatggcgacagcatcagctctctcatcactctcttcactctcactccacacccgaacctcttctctcatctcctcttcctccacaaaatccatcgtctctttctcctccttcctcaaccgccgcttctcatctctcactctcgtcaaagcctcatcgaccgataccgaaaccatcttcttcgaagacgaaacaccagaaataaccgcaaatgtcgtcttcgacccaccaattgctcccgaaggattcgtctctcctccgtatttcgacgaaggaagcgacgagacagaggaagagatcgctaccgcttttgaagagctctatggacctgcgtatagtggtgagagtatgcttgggaaagatatttatgtgatggactcaaagcataagaagagttcaggtattggtgggaagccaaagaaagataagattagggtgggtttaagnggngtttcaagtntgggggtcccaaggttttaaggggnagnaatttnagttggntttcgtttttggganaaaggatttggttgttcnagtaa

SEQ ID NO: 87481 - DNA, 492 bp, Arabidopsis thaliana columbia
cggacgcgtgggcggacgcgtggggtactgatgctcttgccaacatccgttccaaggtttatctttctcctaagctttggtacctcagggttaatgtaattgaagctcaagatttgataccaactgataagcaaagatatcccgaggtttatgtgcaggctatagtgggaaaccaggcgttgaggactagagtatcgcagaccaggactattaatcccatgtggaatgacgatttgatgtttgtcgcagcagagccatttggggaacctttgatcctcagcgtggaagatagagttgctccacacaaagatgaagtcttggggagatgtgcgatcccgttgcagtatttggacagaatatttgaccatgaaccggtgaacagcaggtggtacaatcgcgagaagcatattatggtcgatggagagaagaacgagaccaaattcgctaacaggattcacacgagaatatgtttggaacgagggtatcacgttc

SEQ ID NO: 87482 - DNA, 511 bp, Arabidopsis thaliana columbia
  unsure (1)..(511): unsure at all n locations
atgatactgccagctacaatacgactcactttagggaaagctcgtacgcctgcaggtaccggtccggaattccacgggtcgacccacncgggncgcttcgtcagattcatatagctcaagttccgactcagattcagattcggaatcagaagcatattcatcttcctcctatgagtctagttcttccagtgatgggaagcataggaagaggaagtcaacaacaagacacaaaggccgacgcggggaaagaaagagtaaaggacgaagcgggaaaaagaaagctcggccagatagaaaaccaagcacgaatagttcaagtgacacggagagtagcagcagttctgatgatgagaaagtgggccacaaagccataaagtcagtgaaagttgataacgctgatcaacacgccaacttggatgactcagtgaaatcaaagagcaggagcccaattcgtaggagaaaccaaaacagcaggagcaaaagtcctagtaggagccctgtgagagttctt

SEQ ID NO: 87483 - DNA, 484 bp, Arabidopsis thaliana columbia
gtgcgataagagtacaatcatcaaacgtgcttctgttcccgctagggatttgaggatactgggccctgtcttctctcactcctctaacattctcgccagagagaaagctattgttgtgaatttagaggtcataaaggcaatagttactgcagaagaagtgttgttgttggatcctctccgtcctgaagttcttccattcgttgaacgactaaagcaacagtttcctcagaggaatgggaatgaaaatgcactgcaagcttctgcgaatgtacaatctcctcttgatccagaagctgcagagggtttgcagagtgagcttccttttgagtttcaggtcctggagattgcacttgaggtcgtctgctcatttgttgataaaagtgtggctgctcttgagacagaagcttggcctgtccttgatgaactcactaagaatgtcagcactgagaatcttgaatatgtacgaagtttgaaaagtaatctc

SEQ ID NO: 87484 - DNA, 873 bp, Arabidopsis thaliana columbia
  unsure (1)..(873): unsure at all n locations
nnnnnnnnnnnnnnnnnnnnnttccgcgaccggccattcgggtcgacccacgcgtccgatttaatttcccttgtctctctatctctctcaataacctcatctgggtcttcctcgtttgctccgcttaagcaccatgaaggtcaccgtcgtctcccgcagcggcagagaagtcctcaaagctccccttgacctccccgattcggcgactgttgctgatctgcaagaagcgtttcataagagagctaagaagttttacccgtcgaggcaaagactgactcttcccgtgactcctggatcgaaggacaaacctgttgtcctcaatagcaagaaatcactgaaggagtactgtgatggaaacaacaactccttaactgtagtcttcaaagacctgggggcacaagtttcctaccgcacactcttcttcttcgagtatcttggccctctccttatctaccctgtcttttactacttccctgtttacaagtttcttggttatggagaggactgtgtgatccatccggtccagacgtacgctatgtactaactgggtgcctttcactactttaaaacgggatcttagaaacgttttttcgaccactggggtaagccgacggcacccttccccaaattggggaattgtggttcaaggaaactggggccttaatttaactgggaagcttctggggtggctttacaatttggcgtttaatttacggtgcaaacccaatcccgcctttggtacaactctccagagtttaggaggggaccctcttaacaaatggaaagaaatttgggcttcttccggggtgtttgggactttggggtattgggcccagagattcgggacaaacctcttttacctttgggcaacat

SEQ ID NO: 87485 - DNA, 559 bp, Arabidopsis thaliana columbia
ttttagatcaccttataacaaatgctggtaagatggttctcttggataaattgcttcctaagttgaaagaacgtgattcaagggtgctgatattttctcagatgacaagacttttggatattcttgaggactatttaatgtatcgtggttacttgcattgccgtattgatggaaacactggtggtgacgaacgagatgcctccatagaagcctacaacaagccaggaagtgagaaattcgttttcttgttatccactagagctggagggcttggtatcaatcttgctactgcagatgttgtgatcctctacgatagtgactggaaccctcaagtcgacttgcaagctcaggatcgtgcacataggattggtcaaaaaaaagaagttcaagtgttccggttctgcaccgagtctgctattgaggcgaaagtcattgagagagcttacaagaagttggcacttgatgctctggttattcagcaagggagattggcagaacagaaaactgttaataaggatgagttgcttcaaatggtgagatatggtgctgaaatggtgtt

SEQ ID NO: 87486 - DNA, 440 bp, Arabidopsis thaliana columbia
gcataaatttgtcttgagtacttcccttgtagatttttcttatttgcctagcgcttgtttgtttgatgatgcgcacaatatcttttttccaaatttttggttttttctttaacagctttacacaagtttgaaccttcagaaaccatttttgctcaatctcatagacagagagagacaatttacttagctaggttctaatagctcactgtagagttgggttttgactagcagaggaaatttttggtgaagtgtgtggtctcgaaggaaaagctctttatacagatccgaacaagtttgcatttttgtcatctaatcagataatctcgcttatctggaatttgcattattggtgatctgggttttatctgtttagtgttgaagcctgttgtccgagtatttaaggttcaaattatagtacagtgttgagtgatgtgtggttt

SEQ ID NO: 87487 - DNA, 859 bp, Arabidopsis thaliana columbia
  unsure (1)..(859): unsure at all n locations
atgatactctnnnnnnnnnnnnnnnnnnnnnnnnnnnnnnnnnnnnnnnnnnnnnnnnnnnnnnnnnnnnnnnnnnnnnnnnccacgcgtccgtgactgttgaagagagcggaaacgtcgagacctttactgatcttatgaaagaccaagaaaagcacgaggtagctcgggccttctctgcgcttctccagttggtgaacaatggagacgttgatctggaaaaacctgggaactccacaaacgaaccaatgtgttatacagcggttaaaccgttcagtgttcggttgctcaaagttcataacaggaagaatgagaaaagagggatacatttaccccaaaaacgagctaagtccccaataaccaaaggcaaatctcacgagtcaccaccacctaagaagcgaaacacatgttctgtctcaagccagactcggaaagtctcgctaaagatctcaaagatcaacggtgttggtgtaagatgcacaccaaacagtaagaagagacggaaaggtcgatctgacgatgtaactgaggtaactgaagttgcttcaatcgaaaaatctttggggaaattgtgactactcaaattagattgtgtagttaggtatgggattttaatcagtcagttatgaaactctgtaactgtcatttgtgtaagttataatgaaggcattgccagaagaagtagcatatgttgtaataacaatgaaaaattccactttagagggtcttttaacatattagaaagagtgcttgtggaaaaaaaaaaaaaaaaaaagnnnnnnnnnnnnnnnnnnnnnnnnnnnnnnnnnnnnnnnnnnnnnnnnnnnnnnnnnnnnnnnnnnnnnnnnnnnnnnnnncg

SEQ ID NO: 87488 - DNA, 510 bp, Arabidopsis thaliana columbia
  unsure (1)..(510): unsure at all n locations
atgatactgccagctannnnnnnnnnnnnnnnnnnnnnnnnnnnnnnnnnnnnnnnnnnnnnnnnnnnnnnnnnnnnnnnnnnccacgcgtccgcttcaccggtttctttgtttatcagaatccttttaaatccatcgctgatcaaaatgttctttctttccaacctcaaatcgatcctgagtgtgatttgttcaagggacattgggttccagacaaaagaggatctttatacacaaactcgagctgtgctacgattcccgactcgaagaactgcataaaacaagggagacccgacaaagatttcttgttctggagatggaaacccgatggttgcgatcttccgaggtttaatccaaaggcgtttctcagtatggttcgagggaagaagatgaattttattggtgattctgtggctaggaaccatatggaatctcttctttgcttgttgtcaatggaagaaactcctaaggacatctacaaggatggagaagatagaaacaggatttggt

SEQ ID NO: 87489 - DNA, 3194 bp, Arabidopsis thaliana columbia
aaacaccgcaattttctctgcatctcataatttcaccagaatctcagatggcgacgacatcggagatcaacaatgatctttcgttttccgttgtatcgattgttgaagatgttcttcaacaacatagtagccgatcaagcgacgtcggtttggtttccagaaaagttgaagaatcttctttgagaagatatgaagctgctgggtggcttagagatatgatcggagtttccaatggtaaagattttccaggagagccttctgaagaagagtttaggcttggattgcgaagtgggatcgttctttgtaatgttcttaacaaagttaatcctggatcagtctcaaaggtcgttgaagcgccggacgatgttgcagatggagctgcactttcagcttttcaatactttgaaaacataaggaattttttagtagctatagaggaaatggggttgccatcatttgaagcttcagatatggagaagggaggcaagtctataaggatagtgaactgcattcttgcccttaagtcttatagtgagtggaaactgaaaggtgaaaatggtccatggaggtatggatctaacatgaaacataactttggatcgagaaaactatttctgagaaaaagttcagagccatttgttagttctatatcgagaactcagtcgacggatatgttatcaactgatcaacctctgagttctgatggagattctagatccataaatgggcttgttcggtcattcattgcagacagaaagcatgaagatattccaaatgttgtagagtctgtgttgaacaaagttatggaagaagtccagcagcgtttatcaatccacaatgaaatgatgaaatcaagttcaaagcctattccagaagatgattcatcctgtgagacagtggtccggtctcagctgtgtgatgcaagacaacatgaggaagcagaagaaaatagtccgccccaggttgtggaaaaaaagtttcaaaggacaaattttgaacatcacgaagaacaaaagattcttctgaatcaacaaaaacacatccaggagttgaagcaaaccttatacactacaaaagcaggaatgaaattgctgcagatgaagtatcaagaagatttctttcatctaggcaagcatttaaatggtttagcttatgcggctacgggatacaaaagggttcttgaagaaaaccgtaaactgtacaatctagtgcaggatctaaaaggaaacatacgggtgtactgtcgagttaggccgttcttgcctgggcaagaaagtggtggtttgagtgccgtggaagacatagacgaagggaccatcacgatcagagttccatcaaagtatgggaaagcaggacaaaaaccatttatgttcaacaaagtctttggtccttctgcaacacaagaggaagtgttttcagacatgcagcctttggtacggtcggttctcgatggctacaatgtctgcatcttcgcttatggccaaaccgggtcagggaaaacttttaccatgacagggcctaaggaactgactgaagagagcctaggtgtgaactacagggcactggcagatctgtttcttctatcaaatcaaagaaaagacacgaccagctacgaaatctcagttcagatgttggaaatttacaacgagcaagtcagagatctacttgcccaagatggccagactaaaaggttagagatcagaaacaactctcacaatggaatcaatgtaccggaagcaagtctagtgcctgtctcatcgacggatgacgttatacagctaatggatttgggacacatgaatcgtgcagtgagctctacagccatgaatgacagaagtagtcgatctcacagttgtgtaactgttcatgttcaaggcagagacctcacatctggctctatcctccatggttctatgcatctggttgatcttgcaggaagcgagagagtggacaagtctgaggtgactggagacagactgaaggaggctcaacacatcaacaagtccctctcggctcttggagatgtcatctcctcgctttcccagaagacttctcatgtgccttacagaaacagtaaactcactcagctgctgcaggactccctcggaggatcagccaagacacttatgtttgtccacataagtccagaacctgacactctcggagaaactattagtactctgaagtttgctgaacgagtggggagtgttgagctaggcgctgctcgtgtgaacaaagataactcagaggttaaggagcttaaagagcagattgctaatcttaagatggctctagtgaggaaaggaaatggtaatgatgtacaaccaacagctataccaatcaaccgtgagagaatatcgagaagaagatcactcgaaactcctactattcgacccaaattacctaccatgggaaacacatcaaacaacagtaggccccagatcatggatctaagtggaccagaggcttttaacgacagtactgcatcttcaagaagacacagcttagatatccatgagctaatgaaatcttcttctccggcttggccgaggcagccactcaatggaaaagacgaggacagagaatctaagtcgggcgagtggatcgataagcatgaagaattaattcaaaatcagaatccaaattctcccgagcaattctaccagtcaatggtccctcaacaacaatcactatatggtgggaaacaagatttcgaagtgcagagtattacagataacgaatctgatgaagccgcaacaagcgattgctcagattccgtttgctgtggcggattgagcgttcaagtgaatgttcccaaagtttctaatatccaaaactcagcaaaccccaaaccaaagaaaattcagcccagaactgctaaactctcagaaactagaagtttaattccatcgctgatcccagcaccaagcaagagacctcctaacacagtaaattcacagccgcagcgaccaacgagagatggaaaacgcagactgagtttaggcacatgaacacaccagttttgtaaagagtttaaaaaggaaggagacaaatatttgttgttttgtatattgtgagagaaagctttctctgttgtggccgctcttattgtgccattaaggtaaaaatctcaaatttgctgttttgagtgtacaaaaaatgattccttattatacaatcttcttttggattct

SEQ ID NO: 87490 - DNA, 1113 bp, Arabidopsis thaliana columbia
  unsure (1)..(1113): unsure at all n locations
aatacgactcactttagggaaagctcgtacgcctgcaggtaccggtccggaattcccgggtcgacccacgcgtccggtcgttaaacaaatttcgccgacctacgtatgagccgtcgcctccaatataaaccaaagccatccctaatcctcgaattcttcctctctgagtttttattctgagatagagaaagatgtcaggtttagcttgtaattcgtgtaacaaagacttcgaagacgacgctgagcagaagtttcactacaaatccgaatggcaccgttacaatctcaagcgcaagatagctggtgttcctggagtaacagaggcactatttgaagctagacaagctgctatagctcaagagaaggttaaagctgttgaagcaccgatgctttatagttgtggaatctgtaacaaaggttacaggagttccaaggctcatgagcagcatcttaagtcgaagagtcatgttttgaaggcttcgacgagttctggagaggaggataaagcgatcatcaagcagcttccgcctcgtcgtgttgagaagaataacactgctcaatttgcaagggttccgattgaggaggaaggagagttcaagatgaattggattgtagggtgattccgatgagggtttggatgcggaaatgaatgaggatggtgaagaagaagatatggatgaagatggtattgaatttgagttggatccngcttgttgtttgatgtgtgataagaagcataagactatagagaaatgtatggttcatatgcataagtttcatgggttcttcattcctgatattgagtacttnaaggntccnaaaggggttctgacctacctcggtctaaaggtcaagaggagacttccntgtgnctgtactgcaatnaatttgtgccatcccttttagtagnttttgaagctnttccgtaagcatnntttgaccgccaaaaggnnaattcaaagtgcaattnttgnnattggtgggtntttaangaagattncagacctttaagggttcctntgacntcagcngcagctttttcnatttgggccggaaannaaaattggtttttcccctnggcaagtgnccctttagggctttttttgnggctta

SEQ ID NO: 87491 - DNA, 858 bp, Arabidopsis thaliana columbia
  unsure (1)..(858): unsure at all n locations
cnnnnnnnnnnnnnnnnnnnnnnnnnnnnnnnnnnnnnnnnnnnnnnnnnnnnnnnnnnnnnnnnnnnnnnnccacgcgtccgtctcattcttggaactggtaccgctcaatctattgttaagatttgggatgtaaaaagtcaggcaaatgtggcaaagtttggtggacacaatggagaaatcacctctatatcattctctgaaaacggttatttccttgcgactgctgcactggatggtgttaggttgtgggacttgcgcaagttaaagaacttccgaacctttgactttccagatgcaaactcggtggagtttgaccatagcggatcttatcttggcattgctgcttcagatataagagtattccaagcagctagtgtaaaagcagaatggaacccaatcaagactcttcccgatctgtccggtacaggtaaagcaacaagtgttaagtttggactcgactccaaatacatagcagtcggttcaatggaccgtaatctcaggatatttggtttacctgatgatgacaatactgaagattcagcacaagattcatgaagagatatctcaaaagtctcatcatcaagagtagctatatcctcaattctcgcgatttttgttgtatctttacagttctgttggtactttcctgatggcccctctcacaatcacatatacacacctgagctctctccctttctttctcagtcaacaattttcctgtaacaacatcgtaccttaaggatctgcagttgatctttctctcaaaaaaaaaaaaaaaaagaaaggccaacaannnnnnnnnnnnnnnnnnnnnnnnnnnnnnnnnnnnnnnnnnnnnnnnnnnnnnnagtcacc

SEQ ID NO: 87492 - DNA, 3143 bp, Arabidopsis thaliana columbia
  unsure (1)..(3143): unsure at all n locations
nnnnnnnnnnnnnnnnnnnnnnnnnnnnnnnnnnnnnnnnnnnnnnnnnnnnnnnnnnnnnccacgcgtccgacgatccaattgaatcgctatttttcttcgccttcgtatgcctgatccctttgttttctcggtgaaaaattaagtgaaaatctgagaagattgattgcatatgcagcaacttaagaaaacgattggtttattaagcgtcactgttgttggattttgaggaagatgaaagcaagcaatgtctaggctaagtaaagactttgattcagcgtttcaaggtgttggaaccaaaagtggcttggagatttggtgcgtttataataaacagcttatttctatccctaagtcttcttttggaaaatttcactctggaaatgcataccttgttcttagaacgtttttgcggaagatcgaatctccccagtatgacattcactattggctaggaattgatgcaaatgaggtggattcaattttggcatcagacaaagcattagatttagatgccgcacttggatgttgtacggtgcaataccgtgaagttcaaggtcaagagactgagaagtttctctcttacttcaaaccttgtattatacctgttgaaggcaagtattccccaaaaactggaattgctggcgagacataccaagtcaccttgctaaggtgcaagggagatcatgttgttcgtgttaaagaggtgccttttcttcggtcatcactgaaccatgacgatgtcttcattctggatactgcgtcaaaggtttttctttttgctggttgtaactcaagcactcaggaaaaagctaaagcgatggaggttgtggaatatataaaggataacaagcatgacggaagatgtgaggtcgcgactatcgaggatggaaaattttcaggtgattcagatgctggggaattctggtctttctttggtggttatgctcccattcccaagctttcatcttctaccacccaagaacaaactcagactccatgtgcagaattgttctggatagatactaagggaaatctacatccaactggaacaagttctttggacaaggacatgcttgagaagaacaaatgctacatgctggactgtcacagtgaagtatttgtttggatgggaagaaacacatcacttacagaaaggaagacatccatttcttcctcagaagaatttctacgaaaggagggacgctcgacgaccacaagtttagtacttctaacagaaggattagaaaatgccagattcaggtcattttttaacaaatggccttcagaccggtggagtctagccttctacaatgaaggtcgagaaaaagtggctgcgttgttcaaacaaaaaggatatgacgttgaggagcttcctgatgaagaagatgaccctctctacacaaactgccgagacaacctcaaggtttggcgtgtagatggtgatgacgtctcgcttctctctattcctgaccagacaaagctattcaccggcgattgctatcttgtgcagtataaatatacttataaagaaagaaccgaacatcttttatatgtatggatcggttgtgaaagcatacagcaagatagagctgatgccataaccaatgctagtgccattgttggtacaaccaagggtgaatctgtactgtgtcatatatatcagggaaacgaaccttctcggttttttccaatgttccagtcactggttgtttttaagggcggtttgagtagacggtacaaagtgcttctagcagagaaggaaaagataggggaagaatataatgagaacaaggcttctcttttccgtgttgtaggaacaagcccaagaaacatgcaagcaatccaagtgaatctagttgcaacctccttgaactcatcctactcttacattttacaatatggagcttctgccttcacttggattgggaaactttcatcagactctgatcatgaagttcttgacagaatgctatatttccttgatacatcttgtcaacctacatacatcagggaaggaaatgaaacagacacattttggaatttgcttggtggtaagtcagagtacccaaaagaaaaggaaatgagaaaacaaatagaagaaccacatttatttacatgttcatgcagttcagatgtactcaaggtgaaagaaatatacaattttgtgcaagatgatttaactactgaagatgtatttctattggactgccaaagtgaagtatatgtctggattggatcaaactcaaacataaagtcgaaggaagaagctcttactcttggtctgaaattcctagagatggatatactggaagaaggtctaaccatgaggactcctgtatatgttgtcacagaaggccacgagccaccatttttcacccgtttctttgagtgggttcctgaaaaggcaaacatgcatggtaattcatttgaaaggaagcttgctagtttgaaaggaaagaagacaagcactaagagatctagtggaagccagtatagatcacagtcaaaggataatgcatcacgtgatttacaaagtcgatctgtgagctcaaacggatcggagcgaggagtatcaccttgctccagcgaaaagcttttgagtttgagctctgcagaagacatgacaaacagcagtaactcaactccagttgtcaagaagcttttctcagaatctcttgtagtggatcctaatgatggagtggcgagacaagagtcgagttccaagtcggacatttctaaacagaagccacgcgttggaatcaatagcgatcttagtagtctagagtcacttgcatattcatatgaacagctcagagttgattctcagaagccagtgacggatatagatgcaacaagaagagaggcgtacttaacagagaaagagtttgaagagagatttggaatggcgaaatctgagttctatgcacttccaaagtggaaacagaataaactcaaaatatctcttcatcttttctaaaaacctagagtaagatctttgcaacaaagctatttttttgggtcttaccaaatgtaaaaactgtaatgtttttgtttattgcaatgacctccctgatatataagtttaaaaaaaaaaaaaaaaaaaagggcgaccgctctagaggatccaagcttacgtacgc

SEQ ID NO: 87493 - DNA, 404 bp, Arabidopsis thaliana columbia
atcactctaaaatatctcccaccacataccacttaacccgacccgacccgaccggaaaacccgacccgatccatcccaatgtcaggagctaccaccgcttcctccggagaccacaacaacctccgtctcccaactccgacgcttgacgccgaatcgcaaactctgctgcaatcgatttctgctgaagggggttacgcttatgctcgcatggcggtgttagcggtggccggtgaccaaagcgcggcggaggcggcgcgtgatatggcttgggagcaacttcactctggtccgtggcactcggttctccccgtttggcgcgacgcttactcaatggcttgtctccacgtagctaaaatccatttcgccgccggcgagtttggtgatgcgcttggtgcgcttgatat

SEQ ID NO: 87494 - DNA, 904 bp, Arabidopsis thaliana columbia
  unsure (1)..(904): unsure at all n locations
nnnnnnnnnnnnnnnnnnnnnnnnnnnnnnnnnnnnnnnnnnnnnnnnnnnnnnnnnnnnnnnnnnnnnnnnnnnnnntatttccacgcgtccgaaaaatccaatttttctttgtttcagtcctctcttctgctcattgatcttttaattaactttgattctctccgtttatggattaaccatttgatcgagataactctccaagaaatcgactgagttcgtaacttgttgttgtctgatcttttaaagattcaaccttttttggtccgatcatggctgttgctgagaatgctggtgtcaaagtggactcttctggtcagaatttagacaacaacaacactgctgcttcagctaccgagacgacaaagccgccatgtcctgatgatgatcaaagccctaaatctgactcatccactcctcttaccatcgattcgactcctgaaactgacgatcggatcaatgagactgctcaaaaggttcagactttaaatgggtttagtggaaatggtgagagagataacaatggagagatcaaagatttggctgatgcgttttctaagcttaatccgatggctcaggagtttgttcctccttctcttgctcgaagtcaatctggggttttgagaaatggattagggtttactaacaattttgcagccccacctaaacttgctgatgggaatgatcattttcctagaaggagaaggagttttggccaagggaagcgaagaatgaacaaaaggacaagcttggctcagaaggatgatgtaatcaggagaactgtatatgtctctgacatcgaccaacaggttacagaggagaacctcgcaggtgtctttattaactgtggacaggttgttgattgtcgtgtatgcggtgattcaaattctgtccttcgtttcgc

SEQ ID NO: 87495 - DNA, 514 bp, Arabidopsis thaliana columbia
  unsure (1)..(514): unsure at all n locations
nnnnnnnnnnnnnnnnnnnnnnnnnnnnnnnnnnnnnnnnnnnnnnnnnnnnnnnnnnnnnnnnnnnnnnnnnnnnnnnnnccacgcgtccgcccacgcgtccggtttttatattagagtaatgtggtttattcaatctgtgttgcagatgtgtcataagcatggagtaatgcacagagatttaaaacctgagaacttcttgtttgcaaacaagaaggaaactgcatctttgaaggctattgattttggtctctctgttttctttaaaccaggcgagagatttaacgaaattgttgggagtccttactacatggctcctgaggtattaaggaggagttatggacaagaaattgacatttggagcgcaggagtgattctttacatattgctctgtggtgttccacctttttgggcagaaaccgaacatggagtcgcaaaagcaattcttaaatctgtaattgactttaaaagagacccctggcctaaagtttctgataatgcaaaagatctgatc

SEQ ID NO: 87496 - DNA, 616 bp, Arabidopsis thaliana columbia
  unsure (1)..(616): unsure at all n locations
gctcccncggcgctcacccaaccnggacccggccgggatgcctcaacccagngggctccctgccggggtgngtcaagccggttttgggntgggggaaggancatctccaaatgccgggagggaaccagncttactggagaaggaatccaacttatcctaagggatcncccaaaaaaaattagccaggtggaaacaccacaaacanccttagatctcatgaccctccatgtcagatatatactaagagcaacatgccattgtgttatttggttatgtagtgacctcagcgccgcagctatgaagacaatgaacagtttcttgtgttttttcttccttcaattttactcttttattgttttggtttttcaatatatttcttctttctcatgggtgggttttgggtttgattcttcatattcttaaccacaaaatggtgtgttattgtaatgattgtttttttgtcaaacatgcgttcattttttgggtcaggacagttgtgtggtggtgggtagtaaattctttgatctggattgcacattattttgattgtgtaaaagaccagtgtctacatgtaaactcatgaaatttcaatatattggtgttggattcgtttgac

SEQ ID NO: 87497 - DNA, 731 bp, Arabidopsis thaliana columbia
  unsure (1)..(731): unsure at all n locations
ccctccaannaccccttgcccnaccccgngggtgcncccctttgccggacccaaagtttnanaaggccnncaggggncctggccttanaccccnagggaagaaggggaatttcccccctncaccagnttgaaccagacccaaaaccgggnaaccagaagnncaaggtgatcctggaaattccacccnaagtggggncaacttccaccntatggaaccagctggggaccaaaatctggagaccccagtgactgggaancgattncaaacgcagagagncttatctatctgaggaagagttccaaagtgtgtttgggatcgagaaagaagcattcaccaactttcccacgttggaagcaagatctgcttaagaagaagttcgacttgttctagtttggttttatgtgggtcagtcaatttgttgttggtttcaagagtgtgtttttctgcttctcttcttcaattttatttacttggctcatttacatttctctcatgcccccggtttgggtttgattctttatattttctgacagcccaatgaggtttcttgtaatgatgatgatcatagattgtaatgaatgttttacccgagacagatttgtgagtgggtagcaaaattctttgatttgtgatcttccgaaagaaaaaaagaccaaacccatagagcggccgctctagaggatccaagcttacgtacgcgtgcaggcgacgtcataactcttctagtagt

SEQ ID NO: 87498 - DNA, 3791 bp, Arabidopsis thaliana columbia
  unsure (1)..(3791): unsure at all n locations
nnnnnnnnnnnnnnnnnnnnnnnnnnnnnnnnnnnnnnnnnnnnnnnnnnnnnnnnnnnnnnnnnnnnnnnnnnnnnnnnnnnccacgcgtccgcccacgcgtccgctcctctatattcttcgtcttcgacctcgtcgtctggcagtaattcaatctctctctctctctctctactgtaataaatctaaggaaacaaaaaacgttacgaaagaaaaagcattaaaaagaaaagctttagagagaaaaaaaacacagctcacaacctcttttcaattattcaatttagcttttgttcgctcctgcttcttcatccgccctcgtcttctttgccagttcttcttcatctttcgtcgttttcttagtgccacccaaagatcttcgtgcaggttcattggcgtttgtagtacataaattttccctgacacacagaaaaagaggatttgactgttatacaatatgtcaacaaaagtgttggatcctgcatttcaaggagctggccagaaaccagggactgaaatctggagaattgagaattttgaggcagttcctgtaccaaagtctgagcatggaaagttctatatgggagatacttacattgtcttgcagacaacacagaataaagggggtgcttatttgtttgatatacatttctggattggtaaagatacaagccaggatgaggctggaacagcagctgttaaaacagttgaactcgatgcagttcttggaggccgtgctgtccaacaccgggttattcagggtcatgaatctgacaaattcttgtcttacttcaagccatgtattatacccttagagggtggtgttgcgtctggtttcaaaacagttgaagaagaagtgtttgagacccggttatatacttgcaaaggaaaacgtgcaatccgtttgaagcaggttccttttgcccgctcatcactgaatcatgatgatgtatttatcttggacaccgaggaaaagatctatcagttcaatggtgcaaattcaaacattcaggagagagccaaagctttggaagtcgttcagtatttaaaagacaagtatcacgaaggaacttgtgatgttgcgattgttgatgacggaaaattagatacagaatcagattctggtgcattttgggtcctctttggtggttttgctccaatcggaaggaaagttgccaatgatgatgacattgtcccggagtcaactccacctaagctttattgcatcactgatggtaagatggaaccaatagacggtgacctatccaaatctatgctggaaaacactaaatgctacctcttggactgtggcgctgagatatatatctgggttggccgtgtcactcaagtagatgagaggaaagctgctagtcaatctgctgaggaattccttgctagtgaaaataggccaaaggcaacacatgtaactcgtgtaatccaaggttatgagtcccattctttcaagtctaactttgactcttggccatcaggctcggccactcctggtaacgaagaaggacgaggaaaagtcgctgctttactgaagcaacaaggcgttgggctcaagggcattgcaaaaagtgcaccagtgaatgaggatattccacctctgcttgaaagtggtggaaaattggaggtttggtacgttaatggtaaagtcaagactcccttacctaaagaagatattggaaagctctattctggggactgctatttggtcctttatacctatcattctggggaaaggaaagacgaatatttcttgagttgttggtttggaaagaaaagcattccggaggaccaagatacagcaattcgactggcgaatacaatgtcaaactcgttaaaaggaagacctgtgcagggccgtatatacgagggtaaagagcctccacaatttgttgccctttttcaacctatggtggtcttaaagggtggtttgagctctgggtacaaaagcagtatgggagagtcagagtcaacagacgaaacctacacgccagaatcaattgcactagttcaagtatctggaaccggagttcacaataataaggctgtgcaagttgaaacggtggcaacatctttgaactcttatgagtgcttccttctgcaatctggtacttccatgttcctttggcatggaaatcaaagtacgcatgaacagctagaactggccactaaagttgctgaattcttgaagcccgggattactctcaagcatgccaaagaaggaacagagagctcaaccttttggtttgcacttgggggaaaacagaatttcaccagcaagaaggcttcctctgagacgatcagggatcctcacttattctcatttgctttcaacagaggaaagtttcaggttgaggagatttacaactttgctcaagatgacctcttgactgaggatatatatttcctagacacccatgctgaagtttttgtctgggttggtcaatgtgtggagcctaaggaaaagcaaactgtatttgagattggccaaaaatacatagatcttgctggatccttggaaggcttgcatcctaaagtcccaatctacaaaatcaatgaagggaacgaaccatgcttcttcaccacttacttttcttgggatgccactaaagctatcgtacaaggaaattcattccagaaaaaggcatcgttgttatttggcactcaccacgttgtggaggataagtctaacggtgggaaccaaggactaaggcaaagggctgaagcactagctgccttaaattcggcatttaactcttctagtaacaggcctgcctattcgagccaggacagattaaacgaaagtcacgacggcccaagacagagagctgaagctttagccgccttgtcatccgcattcaactcttcttcgtcatcaactaaatcgcctccaccaccaaggccagtggggacgagtcaggcttcacagagagcagcagcagtggctgctctttctcaagttcttgttgcggaaaataagaaatcacctgatacctctcctacaagaagatccactagctccaacccagcagatgacatccctctgacggaagcaaaagatgaagaagaggcttcagaggtagctggtcttgaagccaaggaagaagaggaagtttcacctgcagcagatgaaacagaagcaaagcaggaaacagaagagcaaggtgattctgaaatacaaccaagtggagcaactttcacctatgaacagctgagagctaaatctgagaacccagtgactggaatcgatttcaaacgcagagaggcttatctatctgaggaagagttccaaagtgtgtttgggatcgagaaagaagcattcaacaacttaccacgttggaagcaagatctgcttaagaagaagttcgacttgttctagtttggttttatgtgggtcagtcaatttgttgttggtttgaagagtgtgtttttttgtttctcttcttcaattttatttacttggctcatttatatttctctcatgggttggtttgggtttgattctttatatttttctgacagcacaatgaggttttcttgtaatgatgatggcggtagattgtaatgaatgttttacccgagacagatttgtgagtgggtagcaaaattctttgatttgtgatcttccatctttgtgactactttttttttttttttgttcaaagtggttgagtctcagcgttgtgactattnnnnnnnnnnnnnnnnnnnnnnnnnnnnnnnnnnnnnnnnnnnnnnnnnnnnnnnnnnnnnnnnnnnnnnnnnnnnnnnnnnnnnnnnnn

SEQ ID NO: 87499 - DNA, 3624 bp, Arabidopsis thaliana columbia
  unsure (1)..(3624): unsure at all n locations
nnnnnnnnnnnnnnnnnnnnnnnnnnnnnnnnnnnnnnnnnnnnnnnnnnnnnnnnnnnnnnnnnnnnnnccacgcgtccgcggacgcgtgggcttcttcctcgcctcgtctacgcaataatactactcttatatcacaaaatctccacgaaaggtttgtatagagatgctataacatagcacacatctcctttcaataattcgctttttcctctctctcttctttttcatgttttcttgttcctgatctctctccattacttttttgcccatctctttgtcttcctcagcgctactcgaagatctgtcttttcaggtcgtttatgtattttctcttgaaggaagagattagccactaatacaaaatgtctgggtcaacaaaagtattggatcctgcgtttcaaggagtggggcagaaaccaggtactgaaatctggagaatcgaaaattttgagccagtcccagtaccaaagtctgaacatggaaagttctatatgggagatacctacattgtcttgcagaccacacagaataagggtggcgcttatctatttgatatacatttttggattggtaaagatacaagccaggatgaagctggaacagcagctgtcaagacagttgaacttgatgcagctcttggaggccgagctgtccaatatcgtgaaattcaaggtcatgaatctgacaaattcttgtcttacttcaagccttgcattataccactagagggtggtgttgcgtctggatttaaaaaaccggaggaggaggagtttgaaacccggctgtatacctgcaaaggaaaacgtgctgtccacttgaagcaggttccttttgcacgctcatctctgaatcatgatgatgtgtttatcttggacaccaaggaaaagatttatcagtttaatggtgcaaattcaaatatccaagagagagctaaagcgttggtagtcattcaatatttgaaagacaagtttcatgaaggaacttctgacgttgctattgttgatgatggaaaattagatacagaatcagattctggcgagttctgggtcctctttggggggtttgctccaatagcaaggaaagttgcgagtgaggatgaaattattccggagacaactccgcctaagctttatagtatcgctgatggtcaggtggaatctatagacggcgatttgtccaaatctatgctagaaaacaataaatgctaccttttggactgcggttctgagatctttatctgggttggccgagttactcaagtggaagagagaaaaactgctatccaagctgctgaggattttgttgctagtgaaaataggccaaaggcaacacgcataacccgtgttattcaaggttatgagccccattctttcaagtctaactttgactcttggccatcaggctcggcaactcctgctaatgaagaaggacgaggaaaagtcgctgcattacttaagcaacaaggtgttgggttaaagggcctgtcaaaaagcacaccagtgaatgaggatattccaccattgcttgaaggaggtggaaagttggaggtttggtacattgatgccaactccaagactgttctatccaaagatcatgtcggaaaactttattctggggactgctatctggtcctttatacctaccattctggtgaaaggaaagaagactacttcttgtgctgttggtttggaaagaatagtaatcaggaggatcaagaaacagcagttcgtctagcgagcacaatgacaaattcgttgaagggaagaccagtgcaggcccgtatatttgagggtaaagagcctccacaatttgttgcactttttcaacatatggttgtccttaagggcggtttgagctctggttacaaaaatagtatgacagagaaaggttcgtcaggcgaaacctacacgccggaatcaattgcacttattcaagtatctggaactggagttcacaataataaggctctacaagttgaagcggtggcaacttctttgaactcctatgactgcttccttctgcaatcgggtacttccatgttcctttgggttggaaaccatagtacgcatgagcagcaggaactggctgctaaagttgctgaattcttaaagcctgggactactatcaagcacgcaaaagagggaacagagagctcatccttttggtttgcacttgggggaaaacagaacttcaccagcaagaaagtttcctctgagactgtcagggatcctcacttgttctccttttccttcaacagaggaaagtttcaggttgaagagattcacaactttgatcaagatgacctcttgacggaggaaatgcatttactagatactcatgctgaagtttttgtctgggttggtcaatgtgtggaccctaaggaaaaacaaactgcctttgagattggccaaagatacataaatctggctggttcgctggaaggcttgtctccaaaagttccattatacaaaatcactgagggaaatgaaccgtgcttcttcaccacttatttttcatgggattctactaaagctactgtgcaagggaattcctaccagaagaaggcagcattattacttggtacacaccacgttgtggaggatcagtctagcagtgggaaccaaggaccaaggcaaagggctgctgctttagctgccttgacttctgcctttaattcttcttctgggagaacaagctctccgagccgagacagatcaaatggaagtcaagggggtccaagacaaagggctgaagctttagccgccttaacatccgcattcaattcttcaccatcatcaaagtcacctccccgaagatcaggattgacaagccaggcgtcacaaagagcagcagcagtggctgctctttcccaagttctcactgctgagaagaagaaatcacctgataccagcccttctgctgaagcaaaagatgagaaagctttctcagaagtggaggctaccgaagaagctactgaagccaaggaagaagaggaagtgtcacctgcagcagaagcgagtgctgaggaagcaaaaccaaagcaggatgattctgaagtagaaacaactggagtaactttcacctacgaacgactacaagccaaatctgagaaacccgtgacagggattgacttcaaacgcagagaggcttacctgtctgaggtagagttcaagactgtatttgggatggagaaagaatcattctacaaattgcctggatggaaacaagacttactgaagaagaaattcaacttattctaaggattctccaaaaaaaattagcagtgacctcagcgccgcagctatgaagacaatgaacagtttcttgtgtttttcttccttcaattttactcttttattgtttggtttttcaatatatttcttctttctcatgggtgggttttgggtttgattcttcatattcttaaccacaaaatggtgtgttattgtaatgattgtttttttgtcaaacatgcgttcattttttgggtcaggacagttgtgtggtggtgggtagtaaattctttgatctggattgcacattattttgattgtgtaaaagaacagtgtctacatgtaaactcatgaaatttcaatatattggtgttggattcgtttgacc

SEQ ID NO: 87500 - DNA, 473 bp, Arabidopsis thaliana columbia
  unsure (1)..(473): unsure at all n locations
attcatttgaaaagagataaagatgtgataagttacataagtaatagtcggttttgatacaatggagatgatcaaggtccaaggacatggagctgagcattccatctcgtattggttttggaaattgaagaaatccaagatggtgaaagtaaagtcgaggatggaaacaagggccttgaggatgaaggagaagcccccagtttttgaaaacaagatccttcatttttttttcagagaactcttttaagaaaacttttacaaaaagtaaaacccaaagctctcttgttaattttttgggaatttaatcataaaaaaatggagagagtccttggagaggctctctcccccgggggtgctctgatactcttactatatttaacattcgttnnnnnnnnnnnnnnnnnnnnnnnnnnnnnnnnnnnnnnnnnnnnnnnnnnnnnnnnnnnnnnnnnnnnnnnnnnnnnnnnnnnnnn

SEQ ID NO: 87501 - DNA, 750 bp, Arabidopsis thaliana columbia
  unsure (1)..(750): unsure at all n locations
cgtnnnnnnnnnnnnnnnnnnnnnnnnnnnnnnnnnnnnnnnnnnnnnnnnnnnnnnnnnnnnnnngatcgccacgcgtccgcatctgaagaagaagaagaagaagaaaggagccatgacaatgtttagatctatctccatggtaatgctgctcgtcgcactagttacattcatttctatggtttcttctgctgcttcgtccccagaagccgactttgttaagaagactatctcttcccataagatcgtcattttctccaaatcctactgcccctactgcaagaaagctaaatcagtgttcagagagctggatcaagttccttatgttgtcgagcttgatgaaagagaagatggttggagcatccagactgcacttggagagattgttggaaggcgaacagtaccgcaagtcttcattaacggaaaacatctcggaggatcagatgataccgtagatgcgtatgagagcggtgaactcgccaagcttcttggtgtttccgggaacaaagaagctgaactctaggttatatatagttggaagaattgataacactctctgtgatgcttaggtgtaagcaattcaatttccatttgtattgtgttctgcagcttgatcatgaccttgtgacagcttgatcttgccttttaaacgtatcttatcaaagaccacattctgagttatacaaaaaaaaaaaaaaaaaaagggcggccgcttctaaggaatcccagcttacgttccccgtgcaatgc

SEQ ID NO: 87502 - DNA, 732 bp, Arabidopsis thaliana columbia
gggaaagctcgtacgcctgcaggtaccggtccggaattcccgggtcgacccacgcgtgcgggtagctgtcttctgcaagaatattgcaacaaaagtggagttcttatgccaaaacagaaaacacatgatgaagttgattattcaaatactcttttgaatcttcaatttactcattacattttcacatcaaaccatctgaccacaaacaacactaggaagtgtcactgagagaaacttaccatgtctgaaatatcatcttccatgcctttaacagagagagtttataatcatctttgtctgtccgatgtttctctggccttgttgggactgtttgttttctgttgtgtgcgtgagaaggttactaaaaagctggggccaacgatatggcctgtgttcggaattactccagagttcttctttcacaggaatgatgtttatggttgggctacaagatgtttgaaaaaatgtcgaggtacctttctctataacggaatctggcttggtgggtcgtatggagctgtgacttgtgtccctgcgaacgttgaatacatgctcaagactaacttcaagaacttcccaaaaggtgcgtttttcaaagaacggttcaatgatctgctcgaggatggtatcttcaatgctgatgctgagtcttggaaggagcaacgacggatcatcattaccgaaatgcattcaaccaggttcgtggagcattcctttcagcccacgcgtccg

SEQ ID NO: 87503 - DNA, 653 bp, Arabidopsis thaliana columbia
tacgactcacttagggaaagctggtacgcctgcaggtaccggtccggaattcccgggtcgacccacgcgtccgtatcggtggagcattagtcaggaaacgagtactctcccccttaaatactcttttccctgtcaaattcagaggtgacctgcatgatatcagctgtggtaaccaccaacaaattacttattctggtcagtctaatggattctgcaactctgtcgcacaagatcacataaaggctaatacccctagtaggttacatctctccactactcctacaaccacaagttgctgggagtggaagaatgtctcaaacagtggtagactctcgtctatggtcttcactgatggtccattgcttgactctgtagatctccgccaacccgtcaaaggaggtgaggtttgcttatattccccactatatgaaacgtctagcacacccaataagcccttaccttgtgataaggaaatatctgtctctccgccactttgtctgtcaccacttggtccgaagttttctgagagagtaaaagctgtaagaagttgccaaactgggaaaatactggaagatttaaggaatatcagtgaagaagcagaattaagagttgatcgtagattgtttgatgatgcatatgccattaggagagcg

SEQ ID NO: 87504 - DNA, 1024 bp, Arabidopsis thaliana columbia
  unsure (1)..(1024): unsure at all n locations
tatacgactcacttagggaaagctggtacgcctgcaggtaccggtccggaattcccgggtcgacccacgcgtccgcccacgcgtgcgtacgagctgcgagaagatacagaaggatactgctgcgagaagacgacagaagggtacggctgcgagaagacgacagaaggggaaatattcgtgtttttttcaaactgtgagagaaaaagaaagagagaaagagatgggagagattgggtttacagagaagcaagaagctttggtgaaggaatcgtgggagatactgaaacaagacatccccaaatacagccttcacttcttctcacagatactggagatagcaccagcagcaaaaggcttgttctctttcctaagagactcagatgaagtccctcacaacaatcctaaactcaaagctcatgctgttaaagtcttcaagatgacatgtgaaacagctatacagctgagggaggaaggaaaggtggtagtggctgacacaaccctccaatatttaggctcaattcatctcaaaagcggcgttattgaccctcacttcgaggtggtgaaagaagctttgctaaggacattgaaagaggggttgggggagaaatacaatgaagaagtggaaggtgcttggtctcaagcttatgatcacttggctttagccatcaagaccgagatgaaacaagaagagtcataaaaccctattgatcatttgggtatcgcatacatgaatctattccacatacatgatacacatatacgtgtttctgtgtgtgtactatgttgctctctgactttctacagttcactattttaattataaagaaggatcttgtgctatcattagggagatacgtgatactgtagttcttcttgagattgttattcgtgagaaatatcatggtttgaagtatttattttctaaaaaaaaaaaaaaaaaaaaaaaaaaaannnnnnnnnnnnnnnnnnnnnnnnnnnnnnnnnnnnnnnnnnnnnnnnnnnnnnnnnnnnnnnntgtcctaat

SEQ ID NO: 87505 - DNA, 1844 bp, Arabidopsis thaliana columbia
aaaaatggcactcaaagcgattctctttttgggtttatttctcgtcgtgatagtttctccgatcaccgtctacggtggagctgtgtgtccggcgagttccacgtttggtcgtggaagctttcctgatggtttcttgttcggtgctacaacttctgctttccagcatgaaggtgcagcagaagaaggaggccgaggttccagcatttgggactcattcactcttaaacaacattcagaaagcaacaacaatcttgacggcaggctcggagttgatttctatcatcattacaaggaagatgttcaactattgaaaaaactgaatatggatgcctttaggttctctatatcttggtcaagaatatttccccatgggaaaaaagacaagggagtgagtgaaacaggagttaaattctacaatgatcttatcaacgagctcattgcaaatggtgtaacgcctcttgtcacattgtttcaatgggatgtacctcaggctcttgaagatgaatacggcggtttcttgagtgaccgtattttggaggatttccgtgattttgcacagtttgctttcaataaatatggtgatagagtgaagcattgggttactataaacgaaccttatgaatttagtcgtggtggatacgagactggagagaaagcaccaggaagatgttctaaatatgtcaatgagaaatgtgttgcaggcaagagtggccatgaagtttacactgttagtcacaatctgctgttggctcatgccgaagctgtggaagaattcaggaaatgtggaaagtgcacaggtggaaagatcggaattgttcaaagtccaatgtggtttgagccttatgataagaaatccacctcgagtccttcagaggagatagtgaagagagctatggatttcactctaggctggcatatggagccaataacacatggagattaccctcaggccatgaaagatgttgttggtagtcgattaccatcttttacgcccgagcagaaggagaaactgaagggttcttatgattttgtcggtatcaattacttcacttctacatttgttgctcatacggacaatgttaatccagagaaaccgagttgggaagctgattctcgcttgcagttacattcgaataacgttgatgggttcaagattggttctcagcctgctactgcgaagtatcctgtttgcgctgacgggttaagaaaagttttgaaatacatcaaagagaactacaatgacccagaaatcatagtcactggaaacgggtacaaggagacacttgaagagaaagatgtacttccagatgccctcagcgatagtaacaggaagtattatcatatgagacatctcatggcattacatggagcagtctgcgaggacaaggttaatgttaaaggttactttgtgtcgtcgcttatggatggactagagtgggaagatggatacaagacgaggtctggactgtactatgtagactatggacacaatatgggacggcatgagaaacaatctgccaagtggctctccaagctccttgagaaagtcccggacacgattcagtcgaaggtagattcggattcaaggaaagagttataaatgatcagagatccttttcgcaactctgtttaatcgatcatatgatgttatgtgtgtttttatcttaaaagagtgtaatccacgatctatgtagtttatataataaataaagaagtaacttatatcacaaaaaaaaaaaaaaaaaaaaaaaaaaaaaaaaaaaaaaaaaaaaaaaagggcggccgctctagaggatccaagcttacgtacgcgtgcatgcgacgtcatagctaatctatagttc

SEQ ID NO: 87506 - DNA, 819 bp, Arabidopsis thaliana columbia
  unsure (1)..(819): unsure at all n locations
atgatctgccnnnnnnnnnnnnnnnnnnnnnnnnnnnnnnnnnnnnnnnnnnnnnnnnnnnnnnnnnnnnnnnnnnnnnnnccacgcgtgcgggaaacgcttccaatctatacatacaacgcttctcaatcggaagcgtaagcgatgtcgtacgacgatgttgagatagaggatatggagtggaacgaagagattcaagcgtacacgtatccttgtccttgtggtgatttgttccagattacgaaagaagatctccggctcggcgaagagatcgcgaattgcccaagttgttctctttatatcaccgtcatctacaatatggaagattttcaaaacgatacgaagaagaataacgaacctaaaactcgtcaccctgtggccgttgcctaaggatagtcatggaattgattagaagattgttcaacaaccactgcagaagagatttatctgctgttttggaaagcatatgaaagtgtgttacattaaccacatatagagagagggaaagagagtgttgtgttactgatttattaataccgaattcttgatgttttctagagtaggctctgttttggtcttgaaaaggtttctatggctacaatgcttctttgacaagaagactatcagtgaggctaagagacatttcaaaccctttcaccatcattaaagatcgttccaatgatacgcatagataacaaggaatcaatattatcagatttaacccaaaaaaaaaaaaaacaaaaagggcgaacaannnnnnnnnnnnnnnnnnnnnnnnnnnnnnnnnnnnnnnnnnnnnnnnnnnnnnnnnnnnnnnnn

SEQ ID NO: 87507 - DNA, 460 bp, Arabidopsis thaliana columbia
aggagaccccactccctcctttatcgcaactaaccccaaatcctactcccgccgccgccgtctcttccgctattccggcgccagttaagagcgtagccgttcagcaaccgatcgatggatctccacgcgccgttgctactgataccggaggtattcctgagccacttgcggctgttcccggcgctaagcttcgtcttatgtgcagttttggtggccacatcatgcctcgtccacacgacaaatcgttgacgtactccggcggcgagactcgtattgtggttgttgatcgacgtgcgtcactgtcttcgctccgatctcgtctctctagtatgcttctcaacggccggtcctttactctcaagtaccagctccctagcgaagatctcgattcactcgtcaccatcactaccgatgaagatctggagaacatgatcgaggaatacgatcgcgcggcttcgtc

SEQ ID NO: 87508 - DNA, 742 bp, Arabidopsis thaliana columbia
cctatacgactctcttagggaaacctggtacgcctgcaggtaccggtccggaattcccgggtcgacccacgcgtccgggattttcccgcttcagcgtctctcagtctctctctcggctttatccaaaggttccttcgtttactccgcttctatggaagaagcttgaatccttctctcttcttcttctccttcttcccttgacatttttgttctgagaagcaacatggccctcggtggcttgatttcaaatcggaacttcggttccttcatcggctcaggcaatggttgtcagagacttggaaaaagtggtgcagaggtttccaagctttttccaaatgcattgttgtgccgtaatcatcaacctctgcaagctagtttacatcatgaatcgggacacatgagaagaagttttggatgtttccttcaaccaagaatggacagtgtaattaggtttaggaacagtatcaagatcaacagatctcgggctactacaaatcagagagtcagattcacggaggagtgtgcctcggctgatggtagctgaactatttaattgaggaaatcacagaacgctctccatggtggagcagttcctagacctgggggacgtcttggatgctttcggctttctctttgcataggaccgtggaactgagcttgcattctcccatgccaagaattactggagaggcactgtgggctattcagcctcttctctgggctatactactaaatctggagg

SEQ ID NO: 87509 - DNA, 603 bp, Arabidopsis thaliana columbia
agcaaaaacactcccaaaccaaaaaaagaagaagaagaagctaaattcgaatctctctcttttttgaaatatggctttttccaaatctctagtgtttgttcttctcgctgctcttttgatttcttccgcagtggctcaatctccggctccagctccatctaacgtcggaggtagacggatctcaccggctccttcacctaagaagatgactgctcctgctcctgcacctgaagtttctccttctccttctccggcagccgcattgactccagaatcctctgcttcaccaccatcgccgcctctagctgattctcctaccgctgactccccggctttgtctccatctgcgatctccgattctccgactgaagctcctggtcctgctcagggcggcgccgtttcgaacaaattcgccagtttcggatctgtggcggttatgttaactgctgccgttttggttatctaggttgttccgatcaatgaagcttctttgattttatttatttattttagatatattagagttttgtgagagagatgatgattcattatttttctcttctttctattattttctttgaatactttttctttcttcggctg

SEQ ID NO: 87510 - DNA, 596 bp, Arabidopsis thaliana columbia
tgcgactgccaacgccgcagcaaaaactccaaagactccatcgaacaaaaccttcagagagaatcaaacagcttaagggcagtttcttagttaaaagtaaccaagtttacatggttgagctagacattcagattccatcagcatacgatccatttgcagaagctaaagattcagatgcaccaggagctaaagagaacattcacattcgaatccagcagaggaatgggaaaaagagcttgacgactgttcaagggcttaagaaagagtacagctacgagaggattctcaaggatttgaagaaagatttctgctgcaacggtaacgttgtgcaggacaaagaactaggcaagatcatccagcttcaaggtgatcaaaggaagaaagtgtctcagttcttggtccaaactgggattgctaagaaggatcagatcaagatccacggtttctaaactgaacccgaattggatcgtttgatatatctatactatttatgcgaataattggtgtggtgtggtgtgtttgtgaccattacaagtttttaaagctttggttttgttattgacttttgcaatgataagaaatatttcgattgttct

SEQ ID NO: 87511 - DNA, 942 bp, Arabidopsis thaliana columbia
  unsure (1)..(942): unsure at all n locations
acgcgnnnnnnnnnnnnnnnnnnnnnnnnnnnnnnnnnnnnnnnnnnnnnnnnnnnnnnnnnnnnnnnnnnnnnnnnnccacgcgtccgcccacgcgtccgcccacgcgtccgtacggctgcgaaagacgacagaagggggatccttccaaagaatctccaaaatccctaaacttcgaaaatggcagaaaccgccgagacaatcaacaccacgatctcatcgccgccaccggaatccgaaagctccaccactatttctgcaatgacagatccaacatctcaagaagcagcctcaaaagacacagatctgacgaaagaagccgaatcagagaagaaaccaggaggaatctctctccgaatctggccaccgactcagaaaactcgcgacgccgttctgaatcgcctgatcgagaccttatccaccgaatcaatcctctctaagagatacggtactcttaaatctgacgatgcaaccaccgtcgcgaaacttatcgaagaagaggcttatggtgttgcttcgaatgctgtgtcgagtgatgatgatgggattaagattcttgagctttattctaaagagattagtaagaggatgcttgaatctgttaaggctagatctaatgctagtgttggaaatggaagtgtggaggatgctaatactgatgctagtgaggtttctaaagatgatgctggtcctgcttcagaggaagagaagagtgaggcttgagaaatttggtttacttccttaatataatctcttgtctcttagggttttgctggtcttgtaatgatgatgatgaccttgtggattggtatatgcatatttgaagatgtttcttcttccgccnnnnnnnnnnnnnnnnnnnnnnnnnnnnnnnnnnnnnnnnnnnnnnnnnnnnnnnnnnnnnnnnnnnnnnnnnnnnnnnnnnnnnnnnnnnnnnnnnnn

SEQ ID NO: 87512 - DNA, 515 bp, Arabidopsis thaliana columbia
  unsure (1)..(515): unsure at all n locations
nnnnnnnnnnnnnnnnnnnnnnnnnnnnnnnnnnnnnnnnnnnnnnnnnnnnnnnnnnnnnnnnnnnnnnnnnnnnnnnnnnccacgcgtccgggggaagagttagacggcgctcctgatgatgatgagtatgacactgaagattcatttatagatgatgctgaactggatgagtatttcgaagttgataattcaacagttaaacatgatggattttatgtaaatagaggcaagttggagcggatggaaccttcaacaacatctaaccagcaacccaaaaaacggcgacgaaaagattcagcaaaaccctgtcgtgatgcagttgacgtatccgataaacacaccaagttgtctataacagctaggaaaaaggatcaatcaactgctcctgggtcctggaaaacacaggagtcacctttgccttctggagcgcaagatgcaaatacttcagtacctctggatgatgtgaagcattctgatagagcaaatcatcagtctaggaatgatacaagtca

SEQ ID NO: 87513 - DNA, 540 bp, Arabidopsis thaliana columbia
  unsure (1)..(540): unsure at all n locations
ccnnnnnnnnnnnnnnnnnnnnnnnnnnnnnnnnnnnnnnnnnnnnnnnnnnnnnnnnnnnnnnnnnnnnnnnccacgcgtccgctctgtctctcaaaccctcaggtctcagctcagaacaatggcagctaaacctggagccgcaactccaacgtattcacctaaaatcgtcggaagaagtcggcttcctatattcaaagattccgacctcgattggtctcgtcctgatggccgtggcttccaccaatgccgacccgcattacttcaaactggtgctgtgagttctgcttctggttctgcttatgctgagtttgggaacactaaagttattgtttcagtatttgggccaagggagagtaagaaagcaatggtttatagtgatgtaggtagattgaattgtaatgttagctatacaaattttgcttcccctactcttggccagggaactgatcacaaagaatattcatcaatgcttcacaaagcattggaaggtgtaataatgatggagacgtttccaaaaacaacccntgatgttttgca

SEQ ID NO: 87514 - DNA, 671 bp, Arabidopsis thaliana columbia
aaaataaagaagagtttataacattaaacagagagagtttcaagattcagacaaagaagagataatctaaaaatgaattctaaggcaatgcaagctttgatctttcttggtttcttggccacttcatgtctcgctcaagctcctgcaccagcaccaaccaccgttactcctccaccaacggcgcttcctccagtgacagcagaaacaccttcaccaattgcttcaccgcctgttccagttaacgagccaactccagctcctaccacttctccaacaacatccccggttgcttctcctcctcagaccgatgctcctgctcccggtccttccgctggattaactccaacttcgtctccagctccaggaccagacggtgctgctgatgcaccaagtgccgcatgggctaacaaagctttccttgtgggaacagctgttgccggagctttatacgctgtcgttttggcttagagagcttttgagtttggtggatttggatcctctgctttctattactgttttattttaattacttcttctcgttcatatttgttatttactactattatcattttgacgtggacacttgttgttgttggggatgagatgaacatagagacaatatggtgtaatatctattcttttatataaatcaaaataattcttttatatgt

SEQ ID NO: 87515 - DNA, 474 bp, Arabidopsis thaliana columbia
ggcgttagccaattgtattcatcatcatcatcgtcatcatcgttggggtgagtatacatacgattaaagaaacccaaaaactccggcgtctgtttaccgctatcatcattcttccgggaagaggaaaaggtttcttcgatcgtcgaagagattctttggacaagtcccctccttcctggttcaatcttcgattcagctctcttttaatttttttggttttgggaagctgctatgttatttgagaggcttaccaagaaaccaccttcgcttgttgatctttgcgtaaggaaagcgattgataatgtaaagtacattggatatgttggtggggttgattttcagctccttgagcagattctgcaacactgtacactagaacagctgaagcacatagaggatgctactgacgacacagatcttagtccaatcaccgataagttttggaagggattctataagaagcactatggagaa

SEQ ID NO: 87516 - DNA, 762 bp, Arabidopsis thaliana columbia
tacggctgcgagaagactacagaagggtacggctgcgagaagactacagaagggtacggctgcgagaagacgacagaagggtacggctgcgagaagacgacagaagggtacggctgcgagaagacgacagaagggtacggctgcgagaagacgacagaaggggacttaaccaaacatgtctgaaaaggggttgataaaaaaagaagaccacatgtttcaagaggagaagagaaagacaaactatggagcaattggcttggcttgcttcatttcttgtttctttgcattccaattcatgaaaatcgtaacaacacaaccttcaacaacaacaacatcatccattgccgttatcgatagcccaatgtcctcccataagctatctgataggagagaaatatggagagttatcccaccatctacctattgtctcaaaatcgaatctttcataaaattcgccacttctccaaacgccgagaagtacgaatcccgtccttttgaatccggtggatacaactggacacttattgtctatcctaaaggaaacattaaggaaggagctccacttaattacgtttcaatgtacgtccaaatagacaattcaacactccttaactctccaaaagaagtttacgcagaagtcaaattcttcatttataaccggaaagaggacaagtacttaacatatcaagagacggatgcaaaacgcttttttctgttcaaaccatattggggatatggtaatgttagaccctacaccgacgt

SEQ ID NO: 87517 - DNA, 509 bp, Arabidopsis thaliana columbia
  unsure (1)..(509): unsure at all n locations
atgannnnnnnnnnnnnnnnnnnnnnnnnnnnnnnnnnnnnnnnnnnnnnnnnnnnnnnnnnnnnnnnnnnnnnnnnnnnnnccacgcgtccggtcccactcatggtgacctcgttgaattgggggaagctgtaggtattatcgcgggtcaatcgatcggcgaaccggggactcaactaacattaagaacttttcataccggcggagtatttacaggaggtactgccgaacatgtacgagccccttataatggaaaaatcaaattcaatgaggatttggttcatcctacacgtacacgtcacgggcatcctgcctttctatgttatatagacttgtctgtaattattgagagcgaagatattatacatagcgtgactattccaccaaaaagttttcttttagttcaaaatgatcaatatgtggaatcagaacaagtgattgctgagattcgcgagggaacatacacttttcattttaaagagagggttagaaaatatatttattctgac

SEQ ID NO: 87518 - DNA, 744 bp, Arabidopsis thaliana columbia
tccaaaagacaagagttttctcaggtttctatctctctcgtcaaacacaacgaaagacattgaaactgagagaaatggctcttaagacattgcaagctctgatctttcttggtctatttgccgcctcatgtctagctcaagctccggctccggcacctatcacgtttctccctccggtagagtctccttctccagttgttacaccaactgcagaaccaccggctcccgttgcttcaccccctattccagccaacgaacccactccggttccaacaacttcaccaaccgtctcacccccgaccacgtggcccacaacttccccctgtcgcttctcctcctaaaccatatgctttggcttcaggcccatcaggtccaacaccagcttcggcccccggtcctagagcagacgggccggtaggtgactcagcattgatttacaaagctttccttgttagcacagtcattgccggagccttgtacgccgttttggcttaaagagtgccttgcgtattactctatcattctctctctctcactctcctttgttttttcttatcatgatttgtttgagagatctctctgtttttccctaatacatttcgtcctctttgttgttgttttctttttgggatctttttgatatttgtataactttgattggaccatgggattaaacctgagggaagaagttctgattgtaattttcttcattatttttttaattaataaagtcttgtttaatat

SEQ ID NO: 87519 - DNA, 323 bp, Arabidopsis thaliana columbia
cccacgcgtccgctgtggtggaaaagctcttcgcttgtggaatggaagagctgatggatgatacatgcacaccattgtttggcaaacataaagttcttctcaatggagactgggttggattatgtgcagattctgaatcctttgtcgcggagttaaaaagcaggcggcgccaaagtgaattacctcgtgagatggaaatcaagcgagataaagatgacaatgaggtaagaattttcactgatgctggtagactactccgacctctcttggttgtggaaaatctccaaaagttgaagcaagaaaaaccttcacagtatcctttt

SEQ ID NO: 87520 - DNA, 979 bp, Arabidopsis thaliana columbia
  unsure (1)..(979): unsure at all n locations
nnnnnnnnnnnnnnnnnnnnnnnnnnnnnnnnnnnnnnnnnnnnnnnnnnnnnnnnnnnnnnnnnnnnnnnnnccacgcgtccgcccacgcgtccgaagaatggcgacgaaggtgagtttggaagggaagagagtggttttggtaccgtacatggcggaacatgtaccaaagtaccatcaatggatgcaagattcggctcttcttgaagctacgggatctgagccgttgagtcttgagcaagagtatgagatgcagctttcttggactcaagatcccaataagcggactttcattgtcttggacaaggatttcgttaagggagacctggctcatggccaacctcatgtagaagcaatgacaggtgatgtgaacatttacatgaatgatgtggatgatccaaaggttgcagaagttgaaataatgatagctgagcccagaagccgtggtaaaggactaggaaaggaatctgtgttgataatgatggcttatggtgtcaagaacttggagattcacaagtttacagccaaaattggggaatcaaacacagcttccctcagcttattccgcaaactaggtttcgaggagtcttcttacagcggtatcttcaaagaggttacactcgagtatccggtgactaatctccgtcgagaagagctcttgaagttattggatgaagtcattaggcacactcattcatcgaacaacccatcagactcactgctatcaggagaagctactgcataaagcattttcttcagtgtttattgttatttttctcttcaacttgggaaagaatttgaaatcattgtagcatgtatgagtttataaattatgattactaatatacatggtccattgtttccaaaaaaaaaaaaaaaaaaaaaaaaaacccaaagnnnnnnnnnnnnnnnnnnnnnnnnnnnnnnnnnnnnnnnnnnnnnnnnnnnnnnnnnnnnnnnnnnnnnnnnnntagaatcg

SEQ ID NO: 87521 - DNA, 560 bp, Arabidopsis thaliana columbia
  unsure (1)..(560): unsure at all n locations
nnnnnnnnnnnnnnnnnnnnnnncgactcactatttggaaggctgagaccgcctgcaggtaccggtccggaattcccgggtcgacccacgcgtccgcttagagaaacaatccacttttgtttttaaggttcaatttttgaaattttcaaaaaacaaagcctatttcatacactcaccagtgcttcacaattcatcataattcataagccacgcaaaagaaaataaagtgaaagattccatggcggtaattggtgtggtggctactaacggtggttgtggtggcgtttcactcggcgtcggcggcagtagtagaatcaacgtgggaggttgagtataagtactggtggccggattgtaaagaaggaatcgttatggccatcaacggccagtttccagggccaacgatagacgcagtcgccggagacacggtcattatccacgtcgtcaacaaactctgcaccgaaggtgttgttatccattggcacggcatacgtcagaaagggactccatgggctgatggagcagcaggtgtgacccagtgtcctattaatcctggcgag

SEQ ID NO: 87522 - DNA, 440 bp, Arabidopsis thaliana columbia
accagcgtttatactctgtaatgccagatccgcggtaacgcaagtcagtgacctactccggcgtttatcactgaatccgattatggctagtcttcttcgatccttaatccttttgctaatcgtgcaatcatttttggttgcgatcgctttcgggtcgaaagaagttgaagaattcagcgaggcattgctcttgaagcctttacctgatcgaaaagttttagctcacttccacttcgagaaccgagctcctccgtcaaactcccatggccgccatcaccatctcttcccgaaagctatttctcagttggttcagaagtttcgggtcaaggagatggagttatcttttactcagggtcgatggaaccatgaacattggggaggatttgaccctctatcaagtatgaatgcgaagcctgttggtgtggagctgtgggctgtgt

SEQ ID NO: 87523 - DNA, 638 bp, Arabidopsis thaliana columbia
gatgattaggtgaactatagtagagctatgacgtcgcatgcacgcgtgacgtagctcggaattcagctcgagaacaaactattatcatctctgtctgtgacaggcccacactatccaattcgaaaagtctaaacaaaagtcgccgtcatgaaagtagaacttgtgttcataccatcgccgggcgttggccatatccgagcaacaacggcgttagcaaagcttctcgttgccagcgacaaccgcctctccgtcactctcatcgtcattccttcacgagtctccgacgacgcttcttcccccgtctacacgaactccgaagaccgtctccgctacatcctcctccccgcccgagatcaaactactgatctcgtatcttacatcgacagccagaaaccacaagtaagagccgtcgtgtccaaggtcgctggagatgtttcaacacgttcagactcacggctagctgggattgtcgtagacatgttctgcacgtccatgatagacatcgccgatgagtttaacctctcggcttatatcttctacacgtccaacgcttcttatctcgggctacagttccacgttcaatctctttacgacgagaaagaactcgacgtaagtgagttcaaagatacggagatgaa

SEQ ID NO: 87524 - DNA, 355 bp, Arabidopsis thaliana columbia
cccacgcgtccgcaagatttgggtgatgtctttcatcatagcaggagctattttaggaggaataatccctggagttactacaacaaagacagcgatcgcgtgtcctctctattgcttacaagtagagtacatgacatgtccttcctccggcgctgacaagcttcctccaagatgcaactgttgtcttgctcccaaaaattgtactctccatctctctgattctactactatccattgtagcaaatgatatatatctagtaagaaatacctgatggtatccctccttcgaatcccatccattcctcccactcatcgatttcacccatttctgtaatctccatttcttcttcttctt

SEQ ID NO: 87525 - DNA, 678 bp, Arabidopsis thaliana columbia
  unsure (1)..(678): unsure at all n locations
atctgtttaggtaacnccnatgnttaataaatccatttcaaaaaaaaaaaangggggtcgccgctcgcgntcttagaactagtctacaaggngganacatgacatgtccttccntccggcgctgacaagcttcctccaagatgcaactgttgtcttgctcccaaaaattgtcctctccatctcgctgattctactactatccattgtagcaaatgatatatatctagtaagaaatacctgatggtatccctccttcgaatcccatccattcctcccactcatcgatttcccccatttctgtaatctccatttcttcttcttctttcttaaacttttgcatcaaacactgaaaatgtgattaatacgtaagcggatttgatctccttgaaatctttgtcctgacccttgtgaacatctggatgatactttagagcgagacgtttaaaggcacgtttgacttcggtttgggaagcgagaggagtcaagccaagaaccgtgtaatggctaagatctggtgataaacaacatcttgtcggaaactggattaaccggcggctatcagtttggatggtggaaccagggtgattcgtcggagctttgaaccggaaatttcgtatcatcgtttcttcttcttcttcttcaccaaccaaacattttaggtttataacaaatcttttt

SEQ ID NO: 87526 - DNA, 892 bp, Arabidopsis thaliana columbia
  unsure (1)..(892): unsure at all n locations
cgagctcactagtgaactctgccataatctctctccctcactctaacaccaaaagaagaagaagcattttccaaagagaaagagagagaaatgggttccaagattgtccaagttttcttgatgttggctctattcgccacttcagcactcgctcaagcccctgctcctactcccaccgccactcctcctcccgcaactccccctccagtcgcaactcctcctccagtggctaccccaccacctgctgcaacccctgccccagccacgccaccacctgctgcaaccccagctcctgccactactccaccgtcagttgctccttctcctgctgatgttcccaccgcctctccaccagcaccggaaggtcccaccgtgagcccaagcagtgctcccggaccttcagatgcatcccctgccccaagcgccgcattctccaacaaggctttcttcgccggaaccgccttcgccgctattatgtacgccgccgttttggcttgagaactttttttatataattttttttttatccctcaaattatttcaaatctttggtgttaatgtgagaatttgatttattttcgtatttcgctatttgatcgttaattttttttatcatgatttcgtgtgtcggaatggggaaagtaattattatcttggttgaagctaatggaatgttgacacgtgtaatttaccattggaagggcttcatatggttgtgtagaggaggtggaattaatctgtttatgtaaatccaatgataataaatcaatttcattactttttcccttttagaaaaaattaaaaaccccaaaaccccaagnnnnnnnnnnnnnnnnnnnnnnnnnnnnnnnnnnnnnnnnnnnnnnnnnnnnnnnnnnnnnnnnnnnnnnnn

SEQ ID NO: 87527 - DNA, 472 bp, Arabidopsis thaliana columbia
  unsure (1)..(472): unsure at all n locations
cgnnnnnnnnnnnnnnnnnnnnnnnnnnnnnnnnnnnnnnnnnnnnnnnnnnnnnnnnnnnnnnnnnnnnnnccacgcgtccgcccacgcgtccgggaagctgaaagaactgggtttgttaaaggattcagacaagtttcaaattctgtggtaggaaagtcattacccacaacaaataacacatatggcaagaggacaagcgtgttgcagagaccccatattgattcgaacaggtttgtgccaagcggtttcagtaattcttcagtggaaatgatgaaaggaccttcagggactgctctgacatcaagacagtattgtaattccggacacattgtggaaaatgtttccagcgttttacgaagattcaggtgggggcctgctgctgaagaggcccttcaaaatctaggtttgaggatagacgcataccaagcaaaccaagttcttaagcagatgaatgactatggaaatgctc

SEQ ID NO: 87528 - DNA, 581 bp, Arabidopsis thaliana columbia
  unsure (1)..(581): unsure at all n locations
gctaggcagaagaagcctgaacctgttcataagcgttcttattggacagagagttatgtgcagtggtctccaataggtacataccttgtgacactccacaagcagggggcagctgtttggggtggtgctgatacattcacgcgtctcatgcgttatcagcattctatggtaaaactagttgatttctcgccaggtgagaaatatcttgtaacttaccatagccaagaaccaagcaacccgcgagatgcaagtaaagttgagattaaggtttttgatgtgagaaccgggaggatgatgagagatttcaagggtagtgctgatgagttttcaattggaggacctggtggtgttgctggtgcctcttggcctgttttcagatgggctggtggaaaagatgataaatactttgccaagcttagcaaaaacactatctctgtctatgagactgagactttcagcctattggcaagaatccatgagggtaggtaaatgttgtggtatttctggccccccttntnaatccttcattgttntccntacaaggggnggacaccngcaaggtcctgccaaccggaggtntc

SEQ ID NO: 87529 - DNA, 562 bp, Arabidopsis thaliana columbia
  unsure (1)..(562): unsure at all n locations
nnnnnnnnnnnnnnnnnnnnnnnnnnnnnnnnnnnnnnnnnnnnnnnnnnnnnnnnnnnnnnnnnnnnnnnnnnnnnnnccacgcgtccggcaaaccccatcatctcccttcttcttcttcttcttccacttccctttgtaactttcaatctcagctaatatcaagtaacgtggaaaggatttgttccgtcaaaggttggtgattatacagagactgagttcctgataagttggattgagcttgttttcatttgcggatctttgagaaaaaagtttgcaactttatggctctggaacaacaacatgtttgtgaaaagcggcttcaagccaagaccttttctacccaagagtttcagttgactctcaattgggatgatttaacttgtcccatttgtttggatttccctcacaatggtgtgcttctccagtgttcttcttacggaaacggttgccgtgcttttgtctgcaatactgatcaccttcactctaactgtttggatccgttcattagcgcctgtggtactgaatcacctcctgctcctgatgagcctcgctctaaggt

SEQ ID NO: 87530 - DNA, 595 bp, Arabidopsis thaliana columbia
caacaatacgtaacaatggcctccaaatccgtcgtcgttttcctcttcctcgctctcgtggcttcctctgtcgttgctcaagctcccggaccagctccgaccatatctcccttgccagccactcctacaccgtctcaatcgcctagagccaccgcaccggcaccttcaccatcagccaatcctcctccctcagctcctaccactgctcctccggttagtcagccgcctactgaatctccaccagctcctccgacgtctacttccccatccggagctccgggcacaaatgttccgtctggagaagctggacctgctcagtctcccctaagtggctctccaaacgcagctgcagttagcagagtctccctcgtcggaactttcgccggagtggccgtgatcgccgctttgttgctgtagaggctattgacccatcgaatagattcactaggaattatttttgggttcattgtttgtccttttgttactatttaattatgtagtttatagtgttttatatgatgctttattatcgtgttattgttggtgttatatttgttacaatttttttatagtttccttgattattggcattctt

SEQ ID NO: 87531 - DNA, 574 bp, Arabidopsis thaliana columbia
atgatcctccagctctatacgactcacttagggagaagcacgtacgcctgcaggtaccggtccggaattcccgtgtttcgacccacgcgtccggcaacggtaacaatggttacgccatcgttgagattagtattcgtcaagggtccaagagaaggcgatgctctagattacaagcctggatctacgattcgtgttggtcgaatcgttcgtggtaatgaaatcgcaattaaagacgctggaatctccactaagcatcttcggatcgaatcggattctgggaattgggtaatacaagatcttggatcttccaacggtactttattgaattcgaatgctcttgatccagagacgtcggtaaatctcggagatggcgatgttatcaaactaggtgagtatacatctattttggtgaattttgtgattgatgattttcaggagaagaagcttacgaggaacaataggcgtcaggctaatgcgaggaagcgaattagggttttagaaagtatcaatttgggggatatcactgaggaagaaaagggtttggatgtgaaatttgagaacaagccgagttcta

SEQ ID NO: 87532 - DNA, 812 bp, Arabidopsis thaliana columbia
cccacgcgtccgcggacgcgtgggctcgatcgttcaatctgatagaagaagaatctcaagttttaattcgatggggaaggacgcaaaagctggtgggaagggtaaaggaaagcaagcaagtggtagtgaagaagctccctccaagggtaaaggaaaagcaggaaaagctgcagatggtcttgggacatgcacttatgttaaagcaagacatgttttgtgcgagaagcaaggaaagatcaacgaggcctacaaaaagttgcaggatggttggttgagcaacggagacaaggttcctcctgctgagtttgcaaagattgcagcagagtactctgagtgtccatcagggaaaaaaggaggagatcttggatggttccctcgaggaaagatggcaggtccattccaagatgtcgcctttaatacacctgttggagtcaccagtgcacccttcaaatcaacgcacggataccacattattttatcagagggaaggaagaactgacagatacatctctgctctgctacttttatggaagttgctactgtaaccttaaaaaaaacacagcctttgttgttttggccaaattgctaaaaaaacttgtctcgttttgaataatgaatgcgtaacggccataatatatgccgggtgttgatttctgaagtctgaatattgagacaccatctctattataagctcgtcgcttggtttctttggccttgagacccaaaaaaaaaaaaaaaaaaaaccaaagggcggccgctctagaggatccaagcttacgtacgcgtgcatgcgacgtcatagtcattctata

SEQ ID NO: 87533 - DNA, 397 bp, Arabidopsis thaliana columbia
gacattttggtgatgtttggaagtattggaccgatgatggccttggccactttgagttctttcaaatggcagaagacatcggtgcagccccgatatgggtgtttaacaacgggataagtcacaatgatgaagttgaagctgccagtatcatgccctttgttcaagaagcactcgacggtatcgagtttgcccgaggagatgccaattctacttggggatctgttcgagctaaaatgggacgccaagaaccttttgaacttaaatacgttgctattggaaatgaagattgtgggaaaacttactacagaggaaactacattgtgttctatgatgctatcaagaaagcctatccagatatcaaaatcatctccaactgcgatggatcctctcatccact

SEQ ID NO: 87534 - DNA, 521 bp, Arabidopsis thaliana columbia
cagctacaatacgactcacattagggaaagctagcgtacgcctgcaggtaccggtccggaattcccgggtcgacccacgcgtccgcacaatgatgaagttgaaactgccagtatcatgccctttgttcaagaagcactcgacggtatcgagtttgcccgaggagatgccaattctacttggggatctgttcgagctaaaatgggacgccaagaaccttttgaacttaaatacgttgctattggaaatgaagattgtgggaaaacttactacagaggaaactacattgtgttctatgatgctatcaagaaagcctatccagatatcaaaatcatctccaactgcgatggatcctctcatccactcgaccacccagctgattactatgactatcacatttacacttctgctagcaatttgttttccatgtatcatcaatttgatcgcacttcacgcaaaggtccaaaagcttttgtcagtgaatatgctgttactggaaaagatgctggtacaggaagccttc

SEQ ID NO: 87535 - DNA, 510 bp, Arabidopsis thaliana columbia
atgatctccaagctccatacgactcacattagggaaagctggtacgcctgcaggtaccggtccggaattcccgggtcgacccacgcgtccgcccacgcgtccggaaaatatagagcttgagattgatgctagtgtcaatgttagtgatggagctagtggagtttctaataaaggattagatgagaagggtcgttggacaaggatgcgagttgctaaagttagccttgtgatttgtccgttttggtttttggcgcagcttacatttaatgtctctctcaagtacacaacagttacgtcaaataccatattaagcagtgcatcaagccttttcacctttcttgtttcactaatattcttgggtgagaagttcacatggttgaaactcttcagcgttcttctttgtatgtctgggactataattgtaagtatgggtgactcagagtccaagtcaaatgcagtagctaagaaccctcttttgggagatattctttcgctggtctcagcggcgct

SEQ ID NO: 87536 - DNA, 555 bp, Arabidopsis thaliana columbia
  unsure (1)..(555): unsure at all n locations
caaatttgctcctcccaaaacccctggagttgatgatattactggagagcctctgatccaccgtaaagatgataacgctgatgttctaaagtcgaggcttgcagctttccacagtcaaactcaaccggtgattgattactacgcaaagaaggccgttctcacaaacatccaggccgagaaggctccccaagaagttacatcagaggttaaaaaagcattgtcatgatcaaagactcctcaagcaaatcatctcctctggttagaatccattcttttccttactacaagagagagacacatctatataatccactcatctgcggaatgacagttttttcttttagtccttgcgcttttccttcttcgactaatattcaaaatatggagaagagtttttactcctgaatattatctactgtcgcagtctctttaccaaataagtaacttgtctcatcgtttttttactcgggatctgataataataaggngggtaattttaacnnnnnnnnnnnnnnnnnnnnnnnnnnnnnnnnnnnnnnnnnnnnnnnnnnnnnn

SEQ ID NO: 87537 - DNA, 1134 bp, Arabidopsis thaliana columbia
  unsure (1)..(1134): unsure at all n locations
nnnnnnnnnnnnnnnnnnnnnnnnnnnnnnnnnnnnnnnnnnnnnnnnnnnnnnnnnnnnnnnnnnnnnnccacgcgtccgtgcggctgcgaaaagaacgaagttttctgagctaaactagatcagctatggcgaccggtggtgctgcggcggatttggaagatgttcagacggtggatctcatgtcggagctcctccgccgcctcaagtgttctcagaagcccgacaaacgcctcatcttcattggacctccagggtcagggaaaggtactcaatctccagtagtgaaggatgagtattgcttgtgtcacttatccactggagacatgttaagagctgctgttgcttctaagacccctcttggtgtcaaggctaaagaagctatggaaaaaggagagctcgtctctgatgatttggttgttggtataattgatgaagccatgaacaagccaaaatgtcaaaaaggatttatccttgatgggttccccaggactgttactcaggcagagaagctcgatgagatgcttaagaggcgaggaactgaaattgacaaagtctcaactttgctattgatgacgcaatctttggaggaaagaataaccgggcgatggatccacccatcgagtggcaggagttaccacactaaatttgctcctcccaaaacccctggagttgatgatattactggagagcctctgatccaacgtaaagatgataacgctgatgttctaaagtcgaggcttgcagctttccacagtcaaactcaaccggtgattgattactacgcaaagaaggccgttctcacaaacatccaggccgagaaggctccccaagaagttacatcagaggttaaaaaagcattgtcatgatcaaagactcctcaagcaaatcatctcctctggttagaatccattcttttccttactacaagagagagacacatctatataatccactcatctgcggaatgacagttttttcttttagtccttgcgcttttccttcttcgactaatattcaaaatatggagaagagtttttactcctgaaaaaaaaaaaaaaaaaaagcttntttcccaataaggaacttgcnnacggttttnncnggggtntggtaatataagngggnntttcc

SEQ ID NO: 87538 - DNA, 527 bp, Arabidopsis thaliana columbia
tacgactcactttagggaaagctacgtacgcctgcaggtaccggtccggaattcccgggtcgacccacacgatgcgctggtgccatcattgtaagtgatcaatatcttgacaatgctcagattttcatggcacctgccaccagtgttaatagctccgttggcgatattatctaccgatatatcaactccacaagatcagcgtcggctgtgattcagaaaactcggcaagtgacaatccctgctccatttgttgcttctttttcatcaagaggtcccaatccgggatcaatacgtcttctcaagcctgatatcgctgcacccgggattgatatattggcggccttcactctaaagagatcactgactgggttagatggtgacacccagttctcaaaattcaccatcctgtctggcacctcaatggcctgccctcatgttgctggtgtagctgcgtacgtcaagtcttttcatccggaattggacccctgctgccatcaaatccgccatcattacctgagctaaaccgg

SEQ ID NO: 87539 - DNA, 773 bp, Arabidopsis thaliana columbia
  unsure (1)..(773): unsure at all n locations
tctgattcaagcaaattaagaaaacaaataagccgacaacccgtggaatctactacttctcctggtgggaggcgtagtagacccagggatcagaggagcttgcagcaaaatgatggccaacttagccaaatgagcaataaatctaggactaaaatagaagccaccttgagtatcgaaaatggtggaaagagcccatctgttatagaggcagccaaagctgtagtctctaacttaatacagaataagtccagtccaacgtttagtgaagatggatcatcagaacatccaagtccagtttctgttctcaatgcagaaatctaccgagagatcgaaccatctcctgtgaaaatccaagctagtgaaggcagtgttaatggctctattaactcgggtgttgaacattgcgaggaggaccagtggaatccagcttatagcttctcaaagacaacaacaagcttttcgccagagatgaaccgaaagaagcttcagaatgttgagcatttggttcaaaagctaaaaagactaaactctagccatgacgaaaccagtcaagattacattgcatctttatgcgagaacagtgatcctgacaccgatcacaggtacatttccgagattctttcagcctcgggtcttctcctcagagatcttggctcaggnttaacaacttttcaactgnaccccttnagggcccccanttantccggngggtgntcctttgngattgggaaacctaaaggttcagcanttngggcaatngaaaggtncanccg

SEQ ID NO: 87540 - DNA, 516 bp, Arabidopsis thaliana columbia
atgaactccagctacctacgactcacacttagggaaagctgcgtacgcctgcaggtaccggtccggaattcccgggtcgacccacgcgtccgcccacgcgtccggttgttttgtccaagaacacagcaaggttctcttcctcagagaatctgagccttcttgctgcaagttctgcacctagcccaacggtttctgctggaggaaatggagatgtgatctcctttggagcaatttacaatgcttcacagcatatggcagattatggtcttggtgatatagttttctcatccgaaggagtgatttcgagctatggggatgcgtttcatattcctgacattattgaaagcactgttggtcttttcgcagatgctgatgttacattacatcatcaccaaattggagattcttgtgaagatattttggataacatcttgattcgaaatggagtggctgaagaaatgaatggtgatttgatggaaactagttgccatgacgaagccgagaaagcagaggaag

SEQ ID NO: 87541 - DNA, 850 bp, Arabidopsis thaliana columbia
  unsure (1)..(850): unsure at all n locations
atgatacgctagctctatacgactcactatanggaaagctgcgccgcctgcaggtaccggtccggaattcccgggttgacccacgcgtccgtcgctttctctctctctcaagcaacaatggatgaaggaagagaaggagagatagagaagaagaagaagaaagatgaagaaggagaagtgaaggaaggagtagcatcaatagctttgttaccatgtgggactatctctggtcatttcattcagatgcctagctctatctgttatggcctccatggcactgaactagcttgtgagactgagtgtagccgcggtgaggattatcggttgatcaaactcactatcatagactacaatagaaagaaggaacaaacagttgtagtggagtgcaaaggccatgatgctgctcgaattaatgatgtcgagcatgctcacgggtgggaggaagatgtgataggattagtcgaagaaaaacacgggaagaagaaagtatcggtttcgttcgagtgtgagacattgaaggcagatgaagcagcagaggaccatatcagacagtttatgcccaaattagctggacttgatgctgttattaacattggaccgatgaagatttccgggcttgattttgctgcggtggaagagggacacataaactaagacagcttaactctttctttttgtgtatacatcatatttcaatgctctttgagtctttgtcccatatcgtagaacacaattaacgctttaagctcaaaaaaaaaaaacaaaagnnnnnnnnnnnnnnnnnnnnnnnnnnnnnnnnnnnnnnnnnnnnnnnnnnnnnnnnnnnnnnnnnnnnnnnnnnnnnaaaacg

SEQ ID NO: 87542 - DNA, 516 bp, Arabidopsis thaliana columbia
  unsure (1)..(516): unsure at all n locations
atgannnnnnnnnnnnnnnnnnnnnnnnnnnnnnnnnnnnnnnnnnnnnnnnnnnnnnnnnnnnnnnnnnnnnnnnnnnnnccacgcgtccgaagctgcagttttatcaatgttctccctttcgtttccatcttcttcttctgcccttttaccttctctcgttgctttcgattcttcgcgtcgtctctctttgcaaccaaagaagttaaatcgtcttcaaagtcacttattttcacctcaacatctctcattctctcagtctaatgtctctcgttacagagcgttttgtgtttcttcaagctctcctccagagggaacagtctccgtagtcgatttccatgagaaagattggtcctttctcgaatctatggaaattgactccactgaacatactcagaagattgagaggatcataaaggctggagaattatccgaatcttcgagggttttggtttcaattagctccgaaacattcgttgatcgtttggtagaatcttcaccttctcagcttttgct

SEQ ID NO: 87543 - DNA, 571 bp, Arabidopsis thaliana columbia
  unsure (1)..(571): unsure at all n locations
cagctanncacgactcactatttggaaagctgagaccgcctgcaggtaccggtccggaattcccgggtcgtcccacgcgtccgaaacaaatccactccaaacactccaaattacttgtctctcttctcttccccaccaccactaccttacaaaaaccctaaccctaatttctccacccccaaattcttttcctcaatctctgcgatggaagacgaagaaggcatcgggttaattttagccagagccaccgagctcagactcaagatcagcgattgtatcgataactccagtaccaccgtcagcgacaacggcgatggaaacgaggatctttctcccggagaaggaagaaaaagcgagattattgggaatcaagacaaggattttgactcaatcagctctgaggatgtagatgaagcagaagctgaacggcttttgcgtattcgtgatgctcttgaagctcttgagtctcagcttgcttctttacagaatctaaggcaaagacaacactatgagaagcaactggctctctctgagattgattacagtaggaaaatgttgcttgagaagctta

SEQ ID NO: 87544 - DNA, 1065 bp, Arabidopsis thaliana columbia
  unsure (1)..(1065): unsure at all n locations
agatactccagctccatacgactcacttagggaaagctgctacgcctgcaggtaccggtccggaattcccgggtcgacccacgggtcncggcccaccagctcaacaaggcacgatagatctgcagagtgggattcttcatgctgaagagaaagactacaaaaccggatacagttacttctttgaagcctttgagtccttcaacgctctcggagatccgagagcggttttcagtttgaagtacatggggctgtgcaagatcatggttagccaagctaatgatgttgcaggaataatctcctcaaaggctggactacagtacgttggccctgacctggatgccatgaaagcagtcgctgatgctcactcgaagaggtccttgaaagtgtttgagaaccccccccgtgactaaaaagcacagtttgaaaatgccccnaattggcccaaaggnatctcccttcnccnnaatggcacagcttctggagaaaaatcttgttgccgttttgatcgagcccttctcaaagagttgaagatagccccacattgctgagctcattggattgcccgctcgaccatgtggaaaagaagctatctcagattgatactcgacaagaaatttgcaggtaccttggatcaaggagctggatgcctcatcatcttcgaagacccaaaggcagatgctatctactcggctaccctcgaaaccattgcaaacatggggaaggtcgtcgacagcctttatgtccggtctgccaaaatcatgtcctgagagagtgagtgagttggtcgtatgaatctcattctatcgttctttctttctggttttagatatcgtttggactcaaagaaactgatgtttctcaatggagaaagtaaacttgtctgaattgttcacattactcgttttgcttatgatcttattatgtcatggtttcttaccttttattagtgcttaaaatgtagtttgttttcaaaaaaaaaaaaaaaaaaaaagnnnnnnnnnnnnnnnnnnnnnnnnnnnnnnnnnnnnnnnnnnnnnnnnnnnnnnnnnnnnnnnnnnnnnnnnn

SEQ ID NO: 87545 - DNA, 1544 bp, Arabidopsis thaliana columbia
ttttctttcaagccaaatcgacctccccgaccttcttcttcttatttcttctataccgtcgtcgaaaagctttaccaaaatctcacgcccccgacgattcatcgggatttgagtttgcactaaacccacaatggtttcctatcgtgctaccacagagacgatttccctggctttagaagccaacagctcggaggctattacgatactgtaccaggttttggaagacccttcttcatctcctgaggctatacggatcaaggagcaagcgattacaaacctttgtgatcgattgactgaagagaagagaggtgaggatctccggaaactgttgaccaagttgaggcctttcttttccttaatccccaaggcgaaaactgcgaaaatcgtcagaggaatcattgatgctgtggcaaagattcctggaacaactgatctccagatcactctctgcaaagagatggtcgaatggacccgcgctgagaagcgtactttcctcaggcagcgagtagaggctaggcttgcagctcttttgatggagaacaaggagtatgttgaagctttggcgctgttgagtactttggtaaaagaggttaggagattagatgataagctccttctggtcgacatagacttgctggagagcaaacttcacttctcattgagaaacttacccaaggcaaaagctgcactcactgcagctaggacagctgctaacgctatatatgtcccaccagctcaacaaggcacgatagatctgcagagtgggattcttcacgctgaagagaaggactacaaaaccggatacagttacttctttgaagcctttgaatccttcaacgctctcggagatccaagagccgttttcagtctgaagtacatgttactgtgcaagatcatggttagccaagctgatgatgttgcagggaataatctcctcaaaggctggactacagtcggccctgacctggatgccatgaaagcagtcgctgatgctcactcgaagaggtccttgaagttgtttgagaacgcactccgtgactacaaagcacagcttgaagatgacccaattgtccacaggcatctctcttctctctatgacacgcttctggagcaaaatctgtgtcgtttgatcgagcccttctcaagagttgagatagctcacattgctgagctcattggattgccgctcgaccatgtggaaaagaagctatctcagatgatactcgacaagaaatttgcaggtaccttggatcaaggagctggatgcctcatcatcttcgaagacccaaaggcagatgctatctactcggctaccctcgaaaccattgcaaacatggggaaggtcgtcgacagcctttatgttccggtctgccaaaatcatgttcctgaaaaatgaatctcattctatcgttctttctttctggttttagatatcgtttggactcaaagaaactgatgtttctcaatggagaaagtaaacttgtctgaattgttcacattactcgttttgcttatgatcttattatgtcaaaaaaaaaaaaaaa

SEQ ID NO: 87546 - DNA, 454 bp, Arabidopsis thaliana columbia
aaaattggttatgtttagagtactttccacttgcttctctgttttggtggatgattatccacagaaaaggaggtctagcctctaggtcgtcatgatgttgtttgttggtgaaaatgtagtgagggatgacaacttaatgtgccttattctagctgagtttattgggatataaactttcatgatacaaaactaagcctttgaaacttttgggttttgctttaaaattcttgatttggttggtattagtcttcaaattaacttgttccagtgtagttgtagcaaggttgagttgctctgtttttccttcctgattttatctacttgcttctattatcttatggaatatcaaaggtactcaaaaacatgggggagatattgacagctagtggtgctgattactcctcgctggtgaagacaacaatcatgtaagggatcttgtttttttcaacagtac

SEQ ID NO: 87547 - DNA, 858 bp, Arabidopsis thaliana columbia
cttcttcttcttcacctacctttctctctctctctcgtggtccattcgctattctatacttcttgtcggcgccggagagagtgagatgacttggtcggttttcagatccataaatactccaacactcgacctctccaccgcacttcgctccactcgtaccccattggtcgctgctggtgtcggctgcgcaacattcgctggtgtttctctcttcagaatgtcttctagatctcctcctttcgcttccctctctgtctctgcttcttctgtgaagaaggaagttgtgtctactgagaaagcaccagctgctttgggaccttactctcaggccattaaagccaataatctggtttttctttcaggtgttcttggacttatacctgagactggaaagtttgtttcggagagcgtcgaagatcagactgagcaggtactcaaaaacatgggggagatattgaaagctagtggtgctgattattcctcggtggtgaagacaacaatcatgttggctgatttggctgacttcaagacagtgaacgagatatatgccaaatacttcccagctccttctccagcacgatcgacgtatcaagttgcagctttgcctctaaacgccaagatcgagattgaatgtattgcaacactctagaacactcaaatcaatctctacgaagggtattttggtccggaagatgtcaaaacaaataagagaaacaatggtttttggggcttaacccatatttaacctacttttcattttgctgcactacggaaaatgttgcggattatcaaccattaggttggttacaaatcaaaagcctctaatcaaggataagttatttaggtgtcttgtccacc

SEQ ID NO: 87548 - DNA, 620 bp, Arabidopsis thaliana columbia
  unsure (1)..(620): unsure at all n locations
nnnnnnnnnnnnnnnnnnnnnnnnnnnnnnnnnnnnnnnnnnnnnnnnnnnnnnnnnnnnnnnnnnnnnnnnnaataaattcaccacgcgtccgggaaaaacgaaagggaacaaaaagaaataggggatatggtaggcggacgcggcggagttggcggtggtggtggtaacagagtggaggcggatcagtggcttgtaacatcggagaagcttctagcgtctagtgatcttcaaggagcaaagacatttgcgatccgcgcatgcgaagctgacccgacccgagcagaagctgcagactacatcctcgcaatctgcgacattcttctcgccggagagactcgtttaggtgattccaacttgccagactggtacgccgttctccgactcggtcgtttagctcaaaaccctgaacacgtcgcgactcagtaccgtagactcgctcttctcctcaatccttccgttaatcgtctcccattcgccgatcgagctcttaaaatcgtctccgatgcttggttcgttctctctgatccgttcangaaatcattctacgaccgagaattgcaacttagtcaactcggtcaatctggattccatcctcaaacccaatcgcatcaaaattt

SEQ ID NO: 87549 - DNA, 516 bp, Arabidopsis thaliana columbia
  unsure (1)..(516): unsure at all n locations
tcagctctatacgactcacttagggaagctggtacgcctgcaggtaccggtccgggaattccggggtcgacccacgcgtncgcggacgcgtgggcggacgcgtgggtctctctcttcctcatttctgcgcaagaatctaaaccaaatctctcatcctctcttctatgtcccaaaacaggaacataactactactactaccatgtcttgactctgttgagaatcttaaatcctacctaacctccaatgggtaagaagagcggttcttcttcttcttggctcactgccgtgaaacgagctttccgatctcccaccaagaaagaacacaacaacaatgctcatggtaatgaagtcgacgaagatgaagacaagaagaaagagaagagacgttggttatttagaaaatctacgaatcatgactctccggtgaagacctccggcgtcggaaaagacgctccggcgcagaaatccacagaaacaacgacgatcatcaacccaaccgttttatcctctgttac

SEQ ID NO: 87550 - DNA, 1232 bp, Arabidopsis thaliana columbia
  unsure (1)..(1232): unsure at all n locations
ttcttccggtgttccatgaccgattgaccacgttctcgtcttcccccaaatctaaaaccctaaattctcaatgcgtccgcacacttcgtcactccaccagcgacaatcgccgcagaaacctctacgaaacttgctacaatggagttttcatcacaagacgacgattttggaggagacgattccgctgctaatgccaccagggcttcaggtaatagaagaagcttcggtgatcttgaagacgatgaagatgatattttcggatcaacaacggtagcgcctggtgttagaactgggatgattttgtcactccgaggaagtcttaagaattgtaaagatgatcttgcttcatgtcaaaatgagctcgagtcagcaaaaacagagattcagaagtggaagtcagcgtttcagaatgagtcctttgttcccgctggaaaatctcctgaaccaagatttttgattgattatattcaaaacctaaaatcttctgagaaatctttgaaagaacagttagaaatcgcaaagagaaaagaagcgtcatgcattgtacaatatgcgaaacgggaacaagaaatggcagaattgaagtcagctgttcgcgatttgaaatctcaactcaagccagcgtcaatgcaggcgaggaggttgttactggatccagcaattcatgaagaattttcacgtctgaagaatctagtagaggaaaaagacaagaagatcaaggaactccaggacaacattgcagcagttacttttactcctcaaagcaagaatggaaagatgcttatggcaaagtgcagaaccctgcaagaggaaaatgaggagattgggcaccaagctgccgaaggaaagattcatgaactagcaataaagcttgcaatgcagaagtctcaaaacgcggaacttagaagtcaatttgaaggactgtacaaacacatggaggaattaactaatgatgttgagagatcaaatgaaacggtgataatattgcaagagaaactggaagagaaagagaaggagatagagagagtaaagaaaggactggaaattgtgtctgagctagtaggtgacaagaaagatgaagttgatgaaattgatgaagatgcaaaagaagaaattgctggtggagaataggaattagtagctttcaaaaaatgttttgtacattttgaagttcaaaatcacatttcttcattcnnnnnnnnnnnnnnnnnnnnnnnnnnnnnnnnnnnnnn

SEQ ID NO: 87551 - DNA, 583 bp, Arabidopsis thaliana columbia
gacaacttgtagaagagaagaaaaaagacatgaaggagattgaggagctttgttcagttaagtcagaggaacttaatcagttgatggaagagaaggagaagaatcagcaaaagcattaccgtgagctgaatgctatacaagaaagaacaatgagtcacattcaaaagatagttgatgatcatgagaaattgaagaggctgttggagtcagagaggaagaaactcgaaatcaaatgtaatgagttggcaaagcgcgaagtgcacaatggaaccgagagaatgaaattgtctgaagatcttgaacagaatgcatctaagaatagctctcttgaactagctgccatggaacaacaaaaggcagacgaggaagttaaaaaacttgctgaagaccaaaggaggcaaaaggaggagcttcatgagaaaatcataagactagaaagacagagagatcagaaacaagcgattgagcctgaagttgagcagttgaaaggacagctcaatgtgatgaagcacatggcatcagatggcgatgctgaagttgtgaaagaggtggacatcatcttcaaagatttaggtgagaagga

SEQ ID NO: 87552 - DNA, 390 bp, Arabidopsis thaliana columbia
  unsure (1)..(390): unsure at all n locations
actattcgccgttcgcttttccctcgccgtcgaaatcaacatggcgccgaagaaggataaggttccgccaccgtnatcgaagccggcgaaatccggaggtggaaagcagaagaagaagaagtggagcaagggaaagcaaaaggagaaggtgaacaacatggtgctgtttgatcaagctacttatgacaagcttctnactgaagctcccaagttcaagctcatcaccccttccattctttcttaaccgtatgagggtcaatgggtcccctagcaaggagagcgatttaggggggcttattgggccaaaggtgtgatccaagaatgggtcgcttgctcaacttggaggccagcaagattctttcaatttggtgcccacccaaacaccttaaa

SEQ ID NO: 87553 - DNA, 613 bp, Arabidopsis thaliana columbia
cccacgcgtccgcggacgcgtgggttcacccactactattcgccgttcgcttttccctcgccgtcgaaatcaacatggcgccgaagaaggataaggttccgccaccgtcatcgaagccggcgaaatccggaggtggaaagcagaagaagaagaagtggagcaagggaaagcaaaaggagaaggtgaacaacatggtgctgtttgatcaagctacttatgacaagcttctcactgaagctcccaagttcaagctcatcaccccttccattctctctgaccgtatgaggatcaatgggtcgctagcaaggagagcgattagggagctaatggccaaaggtgtgatcaggatggtcgctgctcactcgagccagcagatctacactcgtgccaccaacacctaagatgtttggtttctttatccacctaagatgtttggcttctttttcttatctcttgttgtttgattcttcaggaacttgttagaatcttttgtttcgtattccgtttttttgagatatatggttatttaaaacgcatcaagacttctaaaattgagtcaatcctttgatatatccgttctagaattcggtaatggagttgttccggtttagtt

SEQ ID NO: 87554 - DNA, 888 bp, Arabidopsis thaliana columbia
  unsure (1)..(888): unsure at all n locations
gcannnnnnnnnnnnnnnnnnnggaaagctggtacgcctgcaggtaccggtccggaattcccgggtcgacccacgcgtccgcttagatcagtctcaaagggggaaaaaaaacttaaaagaaacattaagaggcaacacaaatcacacaaaagatcaaattgaagcctaagaagaaggcaaaaagtgagaagcaatggctaccatgttgaaggtctctcttgtattgtcattgttaggttttctggtgatcgctgtcgtgactccatcggcggcgaacccattcaggaagagcgtagttctcggagggaagtcaggcgttccaaacattcggaccaacagggaaattcaacaacttggaaggtactgcgtggagcaattcaatcaacaagcacagaacgagcaaggaaacataggatccattgcgaaaacagacacggcaatttcgaatccattgcaatttagccgagtagtgtctgctcagaaacaggtcgtcgctggactcaaatactatctaaggattgaagtcactcaacccaatggctctaccaggatgtttgactctgttgtggttattcaaccatggctccattctaagcagttgctcggtttcactcctgttgtcagtcctgtctactaactttatttcttcttattcgacttaaatttccataatatgatcaagaaaagactaaaaggtgtatgatacaaagctattaagaatgggttaatagttggttttcatgatatgtttacgttgttcataaataaaaacaagttgttattaagaatatgcgatgagacttgatgaaatatcagaaccatcaacaaactttggaatgttgtagcattctcttaacaaaaacttaacataagggttcnnnnnnnnnn

SEQ ID NO: 87555 - DNA, 1364 bp, Arabidopsis thaliana columbia
  unsure (1)..(1364): unsure at all n locations
nnnnnnnnnnnnnnnnnnnnnnnnnnnnnnnnnnnnnnnnnnnnnnnnnnnnnnnnnnnnnnnnnnnnnnnnnnnnnccacgcgtccgctcatcttttattttcccggaaaaaaataattaaacttttactctcttccgatctcctttccttgtacatctagatccaagcggtatcgatggctcgacgtggattattgatttcgttcttcgctatcttctccgtcctgcttcaatcttccacttctctgatcagttcttctagcgtcttcgtcaatccttccaaagtcaagcaggtttcatcgaaacccagggcgtttgtgtatgaagggtttctcacggaattggaatgtgatcatatggtctcccttgcaaaagcgagcctgaagagatctgctgttgctgataatgatagtggagagagcaaattcagcgaggttcgaaccagctctggcacccttatctccaaaggaaaggatcccattgtttctggtatagaagataagatctccacttggacatttcttccaaaagaaaacggggaagacattcatgtattgagatacgagcacggccaaaaatacgatgctcactctgattactgtcatgacaaagtcaacattgtccgtggtggacatcgcatggcaacaattcttatgtatctatccaatgtgacgaaagggggagaaactgtattccctgatgcagaaaaaccttctcgccgagcactatctgaaaataaagaagacctttctgattgtccaagagaagaaatgctgtgaaaccaaggaatggggatgctttgtgtcttaaccacctccacccagacgcaatcccggacccattgagccttcacggtggatgtcctgtgatagaaggagagaaatggtcggcaaccaagtggatccacgtagactcatttgataggatcgtgacaccaagcggaaactgcacggatatgaacgagagctgtgagagatgggcagttcttggggaatgcacaaagaatccagagtacatggttggaactacagagcttcctggctattgcaggcgaagctgtaaggcttgctagactttattttacctcttctttgtcttattatgtgcctttactctcaaagttttctgtttttttccgagtttctcttagagttgttgtcgttgatgaaatttgttctaaggggagttctgtaaaactatactgttcctgaaaagaatataatgtaaacacatagattcagtcaaatacttaataggttatataaaaaaaaaaaaaaaaaaagnnnnnnnnnnnnnnnnnnnnnnnnnnnnnnnnnnnnnnnnnnnnnnnnnnnnnnnnnnnnnnnnnnnnnnnnnnnnncaa

SEQ ID NO: 87556 - DNA, 692 bp, Arabidopsis thaliana columbia
cccaccggtcccgagacacaaacaaaaaacaaaacaaaacaaaaaccaaaaaaacaaaaaaataaatggcaagaatttcactagggatatgtctgatgttagtagtagcatcaagtgtgatctatgaagcgcaaggaacgttcttactaaaccattacttgaagaagaattttccaaaaaaatgcaacgagtttacgccttacgctaacaagggtatgataacgttggtgaccgatctcgaaggtagcagtccggccactacagagttcaagactttctttacacagttcaagtcttacatgtctttcatcgagacaacatcggcctcaacaaaaaatgttgatgccgagatgacagctaaatgtgacggtcttttcaaggccatgtctgcattgagtgctagtaaaggcgtcaaatcagcggatgctgggagtatgaagatgaccatgttgtcgatgggaaagactttggttgagcagaagaagaatacaaagataatgacattgaaggaaaagaaagagttggtcatagatatggtgaaatggactaaaatggtcgctacatttgtgaagtcggcctccgagcagaaaggaaagtctatcaatatagcatcttatggtcttgatgtcgatgttaacgatagttctattgtcggtggagctgcaagtagtgaatcatcctccactaaatct

SEQ ID NO: 87557 - DNA, 926 bp, Arabidopsis thaliana columbia
gaagactagttcttgttttctccatattcctcaacaacatcaaaatgttgactcccaccatttctaaatccatctctttagtaaccattctattagttctacaagctttctctaacacaacaaaggctcaaaattgcggttgttcgtcagagctatgttgtagtcagtttggcttttgcggtaacacttcagactattgtggtgtaggttgccaacaaggaccttgttttgctcctccccctgcaaatggtgtctctgtggctgagattgtaacgcaagaattcttcaatggaatcatcagtcaagccgcgtctagttgcgccggcaatagattttacagtcggggagcttttcttgaggccttagactcatattctcgtttcggtagagttggatcgaccgacgactctaggcgtgagattgcagcgttctttgctcatgtcacacatgaaacaggacgtaatttctgctacatagaagagatagacggagcctcaaaggattactgcgacgagaatgcaacacaatatccatgcaatcctaacaaaggctactacggccgcggaccgatccaactctcttggaatttcaactacgggccagccgggacagcaattggtttcgacggcctgaatgcaccggaaacagtagccacggatccagtcatatccttcaaaaccgccttgtggtactggaccaatagggttcagcctgttatctctcaaggttttggtgcaacaatccgtgccattaacggtgctttggagtgtgacggggccaacacagccaccgttcaagctagagttcgttactacacggattattgtcgtcaacttggcgttgatcctggaaacaacctcacttgctaacaaaaacatctatttctctgtatacatatataaaagtaaaaatagacaagctttaag

SEQ ID NO: 87558 - DNA, 1764 bp, Arabidopsis thaliana columbia
tttttcacgcgttcgtccacgagtaatttaggttattttcgaatccactaacgaatcttccacagcaaacacttttgtgttcctctgtaatttctcagtatatatagataccaaaacaagcagtgaaaaatggctatggcgagtttatatcggcgatctcttccttctcctccggccattgacttttcttccgccgaaggcaagctaatcttcaatgaagcgcttcagaaaggaactatggaaggatttttcaggttgatttcgtattttcagacacaatccgaacctgcgtattgtggtttggctagtctctcagtggtgttgaatgctctttctatcgatcctggacgtaaatggaaagggccttggaggtggtttgatgaatcaatgttggattgctgcgaacctctggaagtagtgaaggaaaaaggcatttcatttggaaaagttgtctgtttggctcattgttcaggagcaaaagttgaggctttccgtacaagtcagagcaccattgatgatttccgcaaatttgtcgtcaaatgcacgagttctgagaattgtcatatgatctcaacatatcaccgaagtgtatttaagcagactgggaatggtcacttttcacctattggtggctataatgctgagagagatatggctttgattcttgatgttgctcgtttcaagtatccccctcactgggttcctcttaaacttctttgggaagccatggacagtattgatcagtcaacagggaaacgtagagggttcatgctcatatctagaccacacagagaacccggattgctctatactctgagctgcaaggatgaaagctggatcgaaatagccaagtatttgaaggaagatgttcctcgtcttgtaagttcacagcatgtagattctgtggagaaaatcatatcagttgtgttcaagtcacttccatcaaatttcaaccaattcatcagatgggtggctgagatccgaattacagaggactcaaaccaaaatctcagcgcagaggagaagtctaggctgaaactaaagcaattggtgctgaaggaagtgcacgaaactgaactgttcaaacacatcaataagttcttatccacagtgggttatgaagacagtctgacttatgctgctgcaaaggcttgttgccaaggagctgaaatcttatccggaagcccatcaaaagagttttgttgtcgggaaacttgcgtgaaatgcatcaaaggtcctgatgactctgaaggcacggtggtgactggagttgtggtgcgtgatgggaatgaacaaaaggttgatctgttagtgccatcgacgcaaactgagtgtgaatgtggtcctgaagcaacttatccagcaggaaacgatgtgttcactgcacttctattggctttacctccacagacatggtcagggatcaaagaccaagctcttatgcatgaaatgaagcagctcatttccatggcttccctcccaactttgcttcaagaagaggtattgcatcttcgacggcaacttcagctgctaaaacgatgccaagagaacaaggaagaggatgatctcgctgctcctgcctattagttcattgtcccaaatcctctctcttccccatttgaatcccacgttctctacacttaattgttagaaagtctctttattctctgtacgattcaaactctatttgcaatgagagatatatgtaacttgcattctataaattgttaatcacaataagttaagaatccaaaaaaaaaaaaa

SEQ ID NO: 87559 - DNA, 535 bp, Arabidopsis thaliana columbia
  unsure (1)..(535): unsure at all n locations
cttcttcatcttcttcctcttgggagacttgatttattttgtgatcagtctcggattgtaacatactgcgatcttttttcagcttctctaatggcggatactgttgaagagcctcaattacaaaatggagcggcaccagctgagtccgaaaccgagcaaaatccgattccggaaccacaactccaaactgagcccaaactaaccggagaaattccggaaatagaagcggatttaacgccggaggaagtacaatcggaggtaacggatgcaaagccagaggaagtacaatctgaggtaaagccggaggaagtaaaaactgtggtaaccgatgcgaaaccggaggaagcacaatctgaggtgaagccggaggaggtacaatctgtggtaaccgatacgaaaccggatttaaccgatgtgggtctttntccgggaggttcttaggngatcccgatccggttgacgggggtttancaggatnttctcttntntttnaggaagtttttttgggcaagcatttnccttgggngcnntnggg

SEQ ID NO: 87560 - DNA, 759 bp, Arabidopsis thaliana columbia
  unsure (1)..(759): unsure at all n locations
atgatcctgccagctctaatacgactccttaagggaaagctcgtacgcctgcaggtaccggtccggaattcccgggtcgacccacgcgtccggtagacgttaatgacagctgtcatagctccgttacttctgggttagctccgataacggcgtcaaactacggcgttaatatcctgaacgttaatacacaggggtttgtgccgttttggcctatgggtatgggtactgcgtttgttactggtgggccggatcaaatgggccaaatgtgggctattcctaccgttgctacagctccgtttctgaatgttggtgctagaccggtgtctagttatgtctcaaacgcttcagacgctgaggcggagatggaaacgagcggtggcggaacgacgcaaccgctgagggatttttcgttggagatttatgataagagagagcttcagtttttgggtggctcagggaactcatctccgtcttcatgtcatgagacttaaggaattttaactcttagttctagtttctttttagtttttagtaagtttgattcctgatttaggttaagtaagatttgtaaaagaattgggagcacaatttcaattttatgtttctgtcaaacattttggtaattaatggaactatcctatcatttttaaaaaataaaaaaaaaaaaaaaaacaaaagnnnnnnnnnnnnnnnnnnnnnnnnnnnnnnnnnnnnnnnnnnnnnnnnnnnnnnnnnnnnnnnnnnnnnnnnntagaatcg

SEQ ID NO: 87561 - DNA, 497 bp, Arabidopsis thaliana columbia
tacgactcactttagggagagcacgtacgcctgcaggtaccggtccggaattcccggtgtcgacccacgcgtccggcaattgtagcacttccggacaaccttaagatgcctgaagtactgggctaagaagcgtggggtgtattcaaatgtgactggatttcttggcggtgtaaactgggcacttttggttgctcgtgtctgccagctttatccaaatgcaattcctagtatgctggtttctcgtttttttagagtatatactcaatggcggtggccgaacccagtcatgctttgtgcactagaagaggatgagcttggatttcctgtctgggaccgtcgtaagaatcatcgcgaccgctatcaccttatgccaataataactccagcttacccatgcatgaattctagttacaatgtctctcaaagcactcttcgcgttatgacaaagcagttccagtttggtaacaatatcttgcaggagattgaattaaataaac

SEQ ID NO: 87562 - DNA, 521 bp, Arabidopsis thaliana columbia
aatacgactcactttagggaaagctcgtccgcctgcaggtaccggtccggaattcccgggtcgacccacgcgtccggaagctgtgtataaattggatcctcagatccggtgattacctaaatcgcgtcaattctcaacccagttttcagatttggtttttggaagctaacttattgttggaggtggagagatatggctgactttggtttgttctgtttcccttgtttaatggaagttgtttcatcatcatcatcatctctgtgattgtaattgatctcacaccatgtctgattacaatggtgatgatcttgaagatgaatatatggctgatgagtatgacatggatgatctcgaggatgatatgaatgccgcgtttgatggaagagatatcgatgcttctgattccgaagtcgaagatttcgatcaattgaacaaggctgcagatacttctgctgctcaagcacgggatggggaaggatattcaagggtataccggggggattcttcttactttttactag

SEQ ID NO: 87563 - DNA, 456 bp, Arabidopsis thaliana columbia
  unsure (1)..(456): unsure at all n locations
cccaagcgtccgcccacgcgtccgcccacgcgtccgaaaaaaataaaaaatcgcacgtttcttcttcttcttctctctcgcaacaaatctgtattagggtttttgagaaatcttcatttcgtgattttgaaatttatttgtatttgattttgttgttgctttggaatcatctgcaaccaccatgatttctgattcgatcaccaacgcttctgctacttcagctccaaccgccagggatttcggaaaaaagaaaaggacgaacaggtcggccaaattgaaacagagcaagctaggtcttcgtcgtgaacaatggctttctcaagttgcgatgattaacaaaggggataaggaggaaatggaatccaatcgaagaattgggagtgaaaagccttttccaaggggttttttncccgggccnggtgggggntttttgnggggggtaaacaattnggcccc

SEQ ID NO: 87564 - DNA, 485 bp, Arabidopsis thaliana columbia
gacatctgagagcttttttcgtttcttgtgagatcatctaaaaaatggcttcgactgtttcgctttctttactcagcggcggcagtggagctcttcaggcgcgttgcgcaagaaccgcgcatgttagcccacgagcggcgcattctaacaaacccgcgctttcttcgttctcgctgaccggcgcctctcgcaggaatctgttattttcgttgacggcagcgacggtagtgacgggacttcagcctgcatcaatggcggagaatattccgttatttggtataagaaagaaactgaagaaagcagaagaagaagcggtggagatcgtgaaagaaggctttgagacggcggagaaaggcgttgatgcggcggagaaaggattagaagcggcggagagaggtgtagagacggcagagaaggaaatcgtgacggcggttagctttaatggattgacacaagctggagcccgcgtggccgctgagttcgtc

SEQ ID NO: 87565 - DNA, 497 bp, Arabidopsis thaliana columbia
cgactcaccttaggggaagcacgtacgcctgcaggtaccggtccggaattcccgggtcgacccacgcgtccgcccacgcgtccgcttttgtctttattcgatttaaaagttgatgtactctgcatctgattgttttgctcgtgttttattaccacgttgtggttgaaatttgacggcggaagttcatggtgaaggcaagagattttatgaagaaagatggttgcggcgaaagagaacaagtttctgacagtggcaccttttgagtgtgcttggagtgatgatctgaagttccgggaagcgggaagaggttgtgttgcgtttgatgcgtttgctcacaatgatgtcacggtggtgtttagagagaatgtggggactcaacattaccattataagaaagataatagtcctcactacattgttatcattggtagcaataggaatcgtaggttgaagattcaggtagatggaaaatctgtggtcgatgaggaagcttctga

SEQ ID NO: 87566 - DNA, 706 bp, Arabidopsis thaliana columbia
  unsure (1)..(706): unsure at all n locations
ttatcattgtcttctcaaaacgtatgcgctggtttttcaaaagtgaaggcaagagattttatgaagaaagatggttgcggcgaaagagaacaagtttctgacagtggcaccttttgagtgtgcttggagtgatgatctgaagttccgggaagcgggaagaggttgtgttgcgtttgatgcgtttgctcacaatgatgtcacggtggtgtttagagagaatgtggggactcaacattaccattataagaaagataatagtcctcactacattgttatcattggtagcaataggaatcgtaggttgaagattcaggtagatggaaaatctgtggtcgatgaggaagcttctgatctttgtcgttgttctttggagtttcagagttactggattagtatctatgatgggttgattagcattggtaaaggtcggtatccgtttcagaacctgggatttaaagtggcaagaccccaagcccaattggaaatgttcaagtatgttggcctnagcagctggggtaacatggttggntatagaacgtgagtgtggttcccggtgcacataaacaaancttgnctgtggaaccaagtggnttcccgtaaggtntaagggnatnnnctggtgccnaaaagggtttgnagnanggctggtatggtntgnacaatgggnctttggaannccttggaagntncgaattcctgnnnaagc

SEQ ID NO: 87567 - DNA, 772 bp, Arabidopsis thaliana columbia
tcgaatgtatccataagcttcctatcgaattcgcggccccgcgaaagagaacaagtttctgtctgtggctccttttgagtgtgcttggagtgatgatctgaagttccgggaagcgggaagaggttgtgttgcgtttgatgcgtttgctcacaatgatgtcacggtggtgtttagagagaatgtggggactcaacattaccattataagaaagataatagtcctcactacattgttatcattggtagcaataggaatcgtaggttgaagattcaggtagatggaaaatctgtggtcgatgaggaagcttctgatctttgtcgctgttctttggagtttcagagttactggattagtatctatgatgggttgattagcattggtaaaggtcggtatccgtttcagaacctggtatttaagtggcaagaccccaagcccaattgtaatgttcagtatgttggtctgagcagctgggataaacatgttggatatagaaacgtgagtgtgtttcctgtgacacataatcatatcttgctgtggaagcaagtggattgccgtgaagtttgaggagatgagtctggtgacaagaaagttgtggaggaagggactggttatgattatgaaccatggggacttgggaattttcttgaagaagttggcaattattctgaaccaagtctttcctttgttgggtgaaaaaaggaaaatgggatggtccccttggcttcaccaagggcttatttttaccatagcctttcagggtaatttttttct

SEQ ID NO: 87568 - DNA, 537 bp, Arabidopsis thaliana columbia
gctggtacgcctgcaggtaccggtccggtattcccgggtcgacccacgcgtccgtctctttccccttttacgctcttttctttcttcattttctgtggaaattttcagagcttttctgtgtaaattaaagagttcttttttgaaggaaataggcaatctcatcctgagaatcaaacaaccggaaaattcaataaatgaaacgcctttaattgttttctcttacaaaacttctaagcagattactttggcggagacccatctgattggtatttttgcagatattccgttcttggagtaccaactggcctggagctacattccttagcctggagtaaataataggctgaccctttgaaatcaacatggtttcctcaagaacttaataacttttcgctggtttctgtcctggagcgttgttgtgtgtttggtcagaggtattaataagtccaatgcaaggtccacgaagcactggtgattcatcgactggaataaattatgcagatggagaacccatctgtagcaccaattcagagacta

SEQ ID NO: 87569 - DNA, 867 bp, Arabidopsis thaliana columbia
aaagtgaataattgaagaaaagacgttataccttccccatccacattttcttgcttaactgcagaacaacaccaaattcgaccctatcaagttttgattcgtgtctacatagaaagagtctcaattgttctgtccctggacttttttttgtttcgtttttcttgttaagatcgaaaactctgttttggtagatttttgtgttcttgattttgattcaagatggggaggctgtttgtggtgaatcttgaagggaagatctatagctgcaaacactgtaagactcatcttgctacttatgaagacatcatctccaagtcttttcactgcaagcatgggaaagcttatctcttcaataaggttgccaatgtttccattggagagactgaagaaagactgatgatgactggtaaacatactgtggctgatattttctgtgtctcgtgtggatcaatcgttggctggaaatacgagactgctcatgagaagaaccagaagtacaaagaaggaaaatcagtgcttgaaagatttaagatatcgggtcctgatgggagcaactattgggtgagtagccatggaaggcatataggtggaagtgatgcagatgatgcttgaatcatctctctctctctctattctctgatttgaccatttcatgtaaatgtaaattattcaacctccattccaatttcttgtaataagactaaccaatactctttcttctcttgacttattatgtctcagtaaataaaaaatctgattctgtctaaaaaaaaaaaaaaaaaaaaaaagggcggccgctctagaggatccaagcttacgtacgcgtgcatgcgacgtcagagctgttctaagggaacgccaaccacc

SEQ ID NO: 87570 - DNA, 822 bp, Arabidopsis thaliana columbia
  unsure (1)..(822): unsure at all n locations
nnnnnnnnnnnnnnnnnnnnnnnnnnnnnnnnnnnnnnnnnnnnnnnnnnnnnnnnnnnnnnnnnnnnnnnnnnnnnnnnnnnccacgcgtccgatcgatcaacaaagtgaggttaggttccatctccacctctttctctctcgaatcttctccgattaaaggaacaaggtctggtttacaaaagtctcatagatgtcgagtggaacagtgagaagggtttcacgtcaagatatacaactggttcaaaaccttatagaacgatgccttcaactttacatgaatcagaaagaagttgtggatactttactagagcaggctaaaatcgagcctgggttcacagaactagtttggcagaagcttgaagaagagaatcgggagtttttcaaagcttactatcttaggctaatggttaaacaccagataatggaattcaacaagttgcttgagcagcaggttcaccacatgcgtcagatgcatccactggtggtgcttctgtccaatcacaaatgggtctcatcttcaatcaatgaatcagaaacaattatgctatccctctgagcacactgaccaatctttgaagtctgaaagtgcacatcatncaatggcttctagtctgtctaagcattccttcatggctcttccacactaatacaaacgtgccctcttctataacatatcaacccatgctaggagagttgatgcttctccaatatgctctcatcgcanaccacaaacatgcntatgatgcanggaatgantggaggaatgatcaagcctgagactgctttacaaccctgcttattcatgtatggtggcgaacg

SEQ ID NO: 87571 - DNA, 281 bp, Arabidopsis thaliana columbia
gagattgggaagcaagccagaagaaaatgcaacggaagaagaatcaagctgaaggaaataatactatgattctaagacacacatagactttttaatactagtgaagagagttttattgagagaagctctacttcatgttttgctgcttagacataagcaggctacttacatatacaagcggctaagaatacgagaccttttgctagtaatgtgaaaagaggttgaagattaaaaataacattacgccaagaatgatatcttgagcgttttatttcaatgga

SEQ ID NO: 87572 - DNA, 887 bp, Arabidopsis thaliana columbia
  unsure (1)..(887): unsure at all n locations
nnnnnnnnnnttaggtaccactatagaagagtctatgacgtcgcctgcacgcgtacgtaagctcggcattccgcccgcctttgaggtcacattttctagctgtgttccttttctcagcaactctctcatcttgcctcgtagtctcggcttcgctcgtggaagggaaagtctcttgtttcgactgtcccaatgattatgattattcaggaatcacggtcggagttagctgtagccacacaaacacgcggttcactgtaacaactgacaagaagggtgacttcatatcggaacttccctcaaagatcgaatcaaactgtgaagcagaactccaaggcagcgtcaagcaactttatgcttccaagaataacgttaagtcgaagattgttaagcttggcggtgacaaatatggtctctcttccaagttgttcttcttgaaatcatgtccaagaagcttcggatcttttagttcgtccaagaccgttgatttaccagttcctcccgagtgggggctggctccgaccagttattacgttcctttcttgcccatcatcggtatcccatgatacgcaccgttttaatccttgttttgtgtgttttatgtaatatattcaaattatatatgtgtagaggacatgtaactatcttagctgttcttttcaagttcatgcttgaactgaagtttgtgtgtgaacttagtgtctgaagatggtttatgttgtgacccatttatgaagcataattttaatatgaaatctgttattgtttcctctaaaaaaaaaaaaaaaaaaaaaaaagggcggccgctctagaggatccaagcttacgtacgcgtgcatgtgttcgtcatagctaaggctatagtgnnnnnnnnnnnnnnnnnnnnnnnn

SEQ ID NO: 87573 - DNA, 1314 bp, Arabidopsis thaliana columbia
  unsure (1)..(1314): unsure at all n locations
agaaggggaattgcaaaaagaaaaccaaaacaaagctcaatcatggctagtcggagagaagtacggtgccggtgcggcagacggatgtgggttcaaccagacgcccgtaccgtccaatgctcaacctgccacaccgtcacgcagctctactcgctagtggacatagctcgcggtgcaaaccgcataattcatgggtttcaacagctacttagacaacaccaaccgcaacatcatgaacaacaacaacaacaaatgatggctcaaccgccaccacggctgcttgagcctcttccctcgccgtttgggaagaagagagcagttttatgcggcgtgaactataagggaaaaagttatagcttgaaaggttgcatcagtgatgctaagtccatgagatctttattggttcaacaaatgggtttccctattgactctattctcatgctcacagaagatgaagccagcccgcagagaataccgacgaagagaaacattaggaaggcgatgagatggttagttgaagggaacagagcaagggactcactagtgttccatttctctggtcatggatctcagcagaatgactacaacggagacgagatcgatggtcaagatgaagccttgtgccctttagaccatgaaacagaaggaaaaatcattgatgacgagattaaccggatactcgtgaggcctctcgtccatggagctaagcttcacgctgtcatcgacgcctgtaacagcgggactgtccttgatttacccttcatttgcaggatggagaggaatggttcttatgaatgggaagaccatagatcagtcagagcttacaaaggaacagatggtggagcagctttctgtttcagtgcttgtgacgatgatgaatccagtggttacactcctgtgttcacggggaagaacacaggagccatgacttatagcttcataaaggcggtgaagacagctggaccagcacccacgtatggccacctgcttaaccttatgtgttctgcaatacgagaggcccagtctcgcctcgcctttaacgggactacacaagctctgatgcatccgcggagccactgctaacatcatttgaggaatttgaagtgtacgcgacaaagtttgtactttgaatgctgtacatatgatgctgcaaatagctcggaaacgtttctatgtgtatgtatcatgtaatgattatgttgcatagcctctctcttcttacgagcaataagctatgaaataattgattcgctaagaaatttaaaatgaaatgaaatgtgtggaaagtttcacaggnnnnnnnnnnnnnnnnnn

SEQ ID NO: 87574 - DNA, 781 bp, Arabidopsis thaliana columbia
  unsure (1)..(781): unsure at all n locations
nnatgannnnnnnnnnnnnnnnnnnnnnnnnnnnnnnnnnnnnnnnnnnnnnnnnnnnnnnnnnnnnnnnnnnnnnnnnnnnnccacgcgtccgcttcgtcaatcgctttagggtttgattatatatatatagatgtggttagcaggagcctcccgggctaatctgataactaaggtacttgaagaagtaagccccaaagctcctgctagattatttttagcgtttgtgttgcagatttgccgtattccttaggcttttctgtgtcaaaaaagcgtctatatctctcttttctatgtatgttttgctttgagctgtgtttgttgatggaatcgagttggtatcaacgtttgtttatgtggcaatgattataaacttacccgcgcttctgagattattcaatgaagtagatacgcttgatacgccagttctgcttcagataattcttgatcgaaaaagctgtattcttatccgagcctttcattgctattttgtctttcttctgagttattatttcttgggaatgtcgatgaggatctaatccaatcttacgaggtgcagtggagctgagaccctgttttacagggagaaccccttggcagaagctgtaatttctttgacttcaatggattttactgagactttctcattcatttatcgcttttattgaaatctatttgagtttaaaaaaaaaaaaaaagnnnnnnnnnnnnnnnnnnnnnnnnnnnnnnnnnnnnnnnnnnnnnnnnnnnnnnnnnnnnnnnnnnnnnnnnnnnngaatcg

SEQ ID NO: 87575 - DNA, 491 bp, Arabidopsis thaliana columbia
atacgactcacttagggaaagctggtacgcctgcaggtaccggtccggaattcccgggtcgacccacgcgtgcgcggacgcgtggggtttcttaaatcttatttgtattacaataaccaaaacccaagtttacaaaacaagaagaagaaatgttttgagttgtcatggatgtaatagctactacaactactatagtatccgacttggattcacgacaacccgaaatcgaagctccgatccggatccagcccgcgaagcctatttctttctcaaacggcaaacgctgccaccaccatcatcttgcatctgaagcggttgcggttgcgacttataaagaatgtctaaagaatcacgcagcaggtatcggcggtcacgctttagacggatgcggcgagtttatgccgtcaccgtcgtttaactccaatgaccccgcttcactaacgtgcgctgcttgtggttgccaccgtaacttacaccgccgtgaggaggat

SEQ ID NO: 87576 - DNA, 600 bp, Arabidopsis thaliana columbia
  unsure (1)..(600): unsure at all n locations
accccaaccaaccggtnccactngccgggtccggnacttaaggtnntttgggatcccgcatcactggnaatcaccggtttcancancgnccnagaggtttcngcagccngaaaaaggtgcatatggcaaagctcttgcggaaatgtatcttttgagtttgacagataatcttgtgacaagtgcttggtctacatttggatatgtagctcaaggtcttggaggtttaaagccttggatactctatagacccgaaaaccgtacaactcccgatccttcgtgtggtcgggctatgtcgatggagccttgtttccactcgcctccattctatgattgtaaagcgaaaacgggtattgacacgggaacactagttcctcatgtgagacattgtgaggatatcagctggggacttaagctagtatgattttttgtgtgccttactctgtttttgattatttgatgtatcatgtaacttcttaaattagctttaataaagtcaattttttgtgcttaaaanaaaaaaanaagaaaagggcggcccgctatagaggatccaagcttacgtacgcgtgcatgcgacgtcatagtaagtctatagtgtgt

SEQ ID NO: 87577 - DNA, 569 bp, Arabidopsis thaliana columbia
  unsure (1)..(569): unsure at all n locations
cccaaacgtccgcggacgcgtggggatgttcttctgtgaaggagaccaaacattcatcgggaaagtcccttgggtgattgttaaaacagacaattactttgttccatctctgtggttaataccgggtttcgatgatgaactaaacaagctattcccacagaaagcgactgtctttcatcacttaggtaggtatctttttcacccaactaaccaagtatggggcttagtcactagatactacgaagcttacttatcgcatgcggatgagaagattgggattcaagtaagagttttcgatgaagacccgggtccatttcagcatgtgatggatcagatttcatcttgtactcaaaaagnggaacttctacctgaagtaggcacactagtggagagatctcgncatgttaatacccccaaacacaaagccgtgcttgtcacatcttttgagcgcgggtacggggggaccttaaagggntgtnttnggatntccgcanaactggggatcatcgggttanagcggncagaggttngcgccnaaaagtcctttgaaantttcggatttttttttt

SEQ ID NO: 87578 - DNA, 1861 bp, Arabidopsis thaliana columbia
  unsure (1)..(1861): unsure at all n locations
nnnnnnnnnnnnnnnnnnnnnnnnnnnnnnnnnnnnnnnnnnnnnnnnnnnnnnnnnnnnnncgatagaaatagaaggcgaagagataatttccaaaaacaagaaaaacctctaagctcaaaagatgttgttgagaacgatggcggcgacttccccgcggccaccaccgtcaacatccctaacatctcagcagccaccatcacccccctcacagcttcccctccgtacaatgccgggatcgtacggctggccgttggttggaccattatcggaccgtttagattacttctggttccaaggacccgataagtttttccggacaagagctgagaagtataagagcactgtgttccgtacaaatattcctccgacgtttcctttcttcggcaacgttaaccctaacatcgtcgccgttcttgacgtcaagtcttttagccatctttttgacatggatctagttgataaaagagatgttctcatcggagacttccggcctagccttgggttctacggcggcgtttgtgtgggagttaatctggacactactgagccaaagcacgccaagataaaaggtttcgctatggaaacactaaaacgaagctcaaaagtatggctacaagagcttcgttcaaacctaaacattttctggggaacaatcgaatccgaaatctccaaaaacggtgccgcttcatatatcttccctctccaacgttgcatcttcagtttcctctgcgcctctctcgccggcgttgacgcttccgtatcgccggacatcgctgagaacggttggaaaacaatcaatacttggcttgcgttgcaagttattcccactgctaaacttggcgtagttcctcagcctcttgaagagattttacttcatacttggccttatccttctctcttaatcgccggaaattacaaaaagctttacaatttcatcgacgagaacgccggagattgtctccggttaggtcaagaagaattccggttgacccgagatgaggctattcaaaatcttctctttgttttaggttttaatgcctacgggggcttttccgtcttcttaccttctttgatcgggagaataaccggcgacaattccggtttacaggagaggattagaaccgaagtcaggagagtttgcggatccgggtcggatcttaatttcaagacggttaacgaaatggagctggttaaatccgtggtttacgaaacgctgcgttttaatcctccggttccgctgcaattcgcacgtgcgaggaaagattttcagataagttcacacgatgctgtttttgaggtcaagaaaggtgagcttctttgtggttatcagccgcttgtgatgagagacgctaatgtttttgacgaaccggaggaatttaaaccggaccggtatgtaggtgagaccgggtctgaattgctgaattatctctactggtctaacggtccacaaaccggtaccccgagcgcgtcgaacaaacagtgtgcagctaaggacattgtcactctcacggcttccttgctcgttgccgatttatttctccggtatgatacgattactggtgactccggttcaattaaagctgttgttaaagctaaataagttaaagattgattagtgtttaatgttatgtaatcaatcttcaacggtttcatttgttcggagtgtataaattatatgtaaactaaaataatccgaattgaaactcaaattgttatgttagatggtgttgctatgttagagagattttaactaaaaaaaaaaaaaaaaaannnnnnnnnnnnnnnnnnnnnnnnnnnnnnnnnnnnnnnnnnnnnnnnnnnnnnnnnnnnnnnnnnnnnnnnnnnnnnnnnnnnnnnn

SEQ ID NO: 87579 - DNA, 775 bp, Arabidopsis thaliana columbia
  unsure (1)..(775): unsure at all n locations
atgannnnnnnnnnnnnnnnnnnnnnnnnnnnnnnnnnnnnnnnnnnnnnnnnnnnnnnnnnnnnnnnnnnnnnnnnnnnnnccacgcgtccgctcgaatcgctggaacatttggttacatggctccggagtacgccatgagaggccatttgacagataaagctgacgtttacagctttggtatagtagctctagagattgttcatggaagaagcaataaaatagaacgatccaaaaacaataccttctatcttattgactgggtggaggttttgagagagaagaataatctgttggaactggtggatccaagactaggatcagaatataacagagaagaagcaatgaccatgatccaaattgcgataatgtgtacaagctcagaaccttgtgagagaccgtcaatgtcagaagtggtgaagatgttagaaggtaagaagatggtggaggtggagaaacttgaagaagcttcagtccatagagaaacaaagagacttgaaaacatgaacacgatgaagaagtactacgaaatgatagggcaagagataagtacaagcatgagcatgatcatgagtgatcgtagtgaatcatcagcagatcattagcagttgtgtaaataccatatcaagatggaaaccccacaaactgtctttagcatttcagaagcaatctaagtaaaaaaaaaaaaaaagnnnnnnnnnnnnnnnnnnnnnnnnnnnnnnnnnnnnnnnnnnnnnnnnnnnnnnnnnnnnnnnnnnnnnnnnnnnngaaatcg

SEQ ID NO: 87580 - DNA, 933 bp, Arabidopsis thaliana columbia
  unsure (1)..(933): unsure at all n locations
nnnnnnnnnnnnnnnnnnnnnnnnnnnnnnnnnnnnnnnnnnnnnnnnnnnnnnnnnnnnnnnnnnnnnnnccacgcgtccgtacggctgcgagaagacgacagaagggaacgtgttcaaccattggggctattataatgactcctcttcttactaagcttcttgctggtcagcttgttcccgttgacgctgctggacttgctcttagtacgttccaagtagtgttggttcctaccataattggagttctggcaaatgagttctttcctaaatttacgtctaagatcataacagtgacgcctctaatcggagtcattctgactactctgctctgtgccagccctattggacaagttgcagatgttttgaaaacccaaggagctcaacttatactcccggtggcactccttcatgctgcagcctttgctattggctattggatttcaaagttttctttcggcgagtccacttcgcgtaccatttctatagaatgtggaatgcaaagttcagcgctcgggttcttgcttgcacaaaagcatttcacaaaccctctagttgctgtcccctctgcggtcagtgttgtctgtatggcgcttggcgggagcggccgtggccgtgttctggagaaacctaccgattccggcagatgacaaggatgacttcaaagagtaaatgaagtaggaaaggcggtttgcatcttctccaaacgatgtgattgttttgttggaatgttagtaaacattacaaaatttgtgttgaaaaacatgaaacaaaatgtgtttaagagacatagaaacaagggcgtgcatgatgacaactttgtggtcaaccttttttttatttctcaattaatggacaaatcttttttggcaaaatataaaaataaaaaaaaaaaaaatcccctntttaaaaaaaatatataaatatataaaa

SEQ ID NO: 87581 - DNA, 648 bp, Arabidopsis thaliana columbia
  unsure (1)..(648): unsure at all n locations
ctcactatagggaaagccggtacgcctgcaggtaccggtccggaattcccgggtcgcccacgcgtccgggctactcttttagccactcctatcttctctcctttagcttcttctccagcaaggaaccgtctttcttgctctaagatccgtttcggttccaaaaatgggaaaattctcaattctgatggtgcccagaagttgaatctctcaaaattccgtaaacccgatggccaaagatttctacaaatgggttcttctaaagagatgaactttgagagaaaactctcagtccaagctatggatggtgcaggaacaggaaacacatcaacgatctctcgtaacgtaattgcgataagtcacttgttggtatcacttgggatcattcttgctgcagactatttcttgaagcaggcgtttgtagcagcgtctattaaagttcccaagtgctttggtttgggatgttctgtattttctctgttcttatgatatttgattcggttgttcctgctgctgcanatggtttgatgaatntcttcgagcctgcgtttctgtttatccaaagatggctnnctttgttctatgttccttctcttgggtgtcttcctctttctgttagagatattccggctgcttcaggtgtcaaaatct

SEQ ID NO: 87582 - DNA, 1425 bp, Arabidopsis thaliana columbia
aaatttgatctcatctttaaatttttttgtttcccatttctctcagaaagtgttctgttctttttttcttttgtaatcactaaatgcttcaaaagtttgtccacaattatatttgaaaaaaatgtctgtatctgtagcagcagagcatgattacataggtttgtcagagtttccaaccatggaagcaacaacaatgtctgacaaaaccaaaaccagagacaataacaacggtctcaatttcaaggctaccgagttaagactcggtttacccggttctgagtcgccggagcgagtcgactcaagattcttggctctcaacaagagtagctgtcccgtgtcaggtgccaaaagggtgttctccgacgctattaacgactctaacaaatgggtcttctctcctggatccactactgctactggtgatgtcggctcgggttctggtccccgtacctccgtcgttaaagatggaaagtcgacaactttcactaaaccggctgttccggttaaggagaagaagagctctgctacagctccagcttcaaaagcacaagtggtgggatggccaccaataagatcattcaggaagaactcaatggcttcttctcaatctcagaaacctggtaataactcagagactgaagaagcagaagctaagtctggaccagaacaaccttgcttgtatgtcaaagtgagtatggaaggtgctccttacttgaggaaaatcgatctcaagacttacaaaagctaccttgagctctcttctgctcttgagaagatgttcagttgcttcaccattggtcagtttggttctcatggagggtgtggcagagatgggttaaacgagagtcgcttgactgatctcttgcgtggttctgagtatgttgtaacctatgaagataaagacagtgactggatgctggtcggagatgtcccttgggaaatgtttatatgctcctgcaagaagctgagaatcatgaagagctctgaggctatcggcttagctccaagggtgatggagaagtgcagaagcaggaactaggaaaagcccttttatgtgataatatatgatttgaaaaaatatgtttttaagaaattgaatagccattttgttttgaagtattcttgtgtgtttgtgtgctaggagtgatgtttgatctttcttaaaccagcctctactaagctctaataaggcctcttcctcttacttctttctctaatcaatctaatgaaacatatgggtttgtgtatgtgtgtttgccaaggaagacttcataattcatatgtataaaagttttggtagtgtgtaaaccggatgtggttttcattgttatatatgttttggatgcaaactttactatagaaacacaaccccaaagggcaggccgctctagaggatccaagcttacgtacgcggcgatgcgacgt

SEQ ID NO: 87583 - DNA, 641 bp, Arabidopsis thaliana columbia
acgactacgtttccactgttctgcttcttcttagcctccttatcttcttgagtcagcgtactgattctgcctctatcgtcaagtctcttcctggttttgatggccctcttccctttgaactcgaaaccgggtatattggtgttggtgaggaagaggaagtgcagttgttttactactttatcaagtctgagaggaatccacaagaagatcctcttctactctggttaagtggaggacctggttgctcttctatctctggtcttctttacgagaatgggcctgtgaatgtgaagattgaggtttacaatggaactcttccttccttggtctctactacatattcatggactaaggtttcgagtataatataatttggatcagcctgttggaactggcttctcctactcaagaactaaacttgttaacaaacccagtgattcaggagaagccaagagaatccacgagtttcttcacaagtggctaggcaagcatcaagagttttcctgcaaccctttctatgtcggtggggattcttattgcggtatggtcattccggcactcgttcaagacatctcaaaaggaaactatgtatgctgcaaacctccaataaatcttcagggctatattgttggaaacccatc

SEQ ID NO: 87584 - DNA, 570 bp, Arabidopsis thaliana columbia
atgatactccagctctctacgactcactattgggaaagctggtcacgcctgcaggtaccggtccggaattcccgggtcgatccacgcgtccggttggcctccgacgacggctcaagcctatcttcgtcgccggcttctccgatggttaccaatcgcgtagacgtcttctggcacgaaggaatgctccgacacgacgccgtagaaggcgtcttcgacactggatacgaccctggattcctcgacgtattggagaagcacccggagaacgccgatcgcgtcaggaacatgctttcgattctccgacgcggtcccatcgctcctcatgtcaattggtttaccggtcttccagcaatcgtttcggagcttctaatgtttcacacttcagagtacattgagaagctagtggaggcagataaatcaggagaaaggtgtgaaattgccgcaggtactttcatgagcccaggctcgtgggaagctgctcttcttgcagctggaacaactctttcagcaatgcaacatattcttgattgccatgggaaaattgcatatgctctggtacgcccaccaggt

SEQ ID NO: 87585 - DNA, 1917 bp, Arabidopsis thaliana columbia
agttacagacgatttggtcccctctcttctctctctgcgtccgtcttgtgcgtcgatttgtctccatctccttctctctccgcctactttctcaggactactccaattcgccgactttttctcctctgttctctgcatttggattgatgccactttaatactttgaggatcaagacttcgtaaaagattgtttctgtaaaacgcaacaccatgcctctgtttgagcttttcaggctcaccaaagctaagcttgaatctgctcaagacaggaacccttctccacctgtagatgaagttgtggagctggtgtgggaaaatggtcagatatcaactcaaagtcagtcaagtagatcgaggaacattcctccaccacaagcaaactcttctagagctagagagattggaaatggctcaaagacgactatggtggacgagatccctatgtcagtgccatcactaatgacgggtttgagtcaagacgatgactttgttccatggttgaatcatcatccctcccttgatggatattgctctgatttcttgcgtgatgtgtcgtctcctgttactgtcaacgagcaagagagtgatatggcggtaaaccaaactgctttcccgttgtttcagagaagaaaggatggcaatgaatcagctcctgctgcttcttcgtcgcagtataacggtttccaatcgcattctctgtatggaagtgatagagctagagatcttcctagccaacaaaccaatccggatcggtttactcagacgcaggaaccactaattactagtaacaagcctagtttggtcaacttttcacatttcttacgccctgcaacttttgcgaagactactaataataaccttcatgacactaaagaaaagagtcctcaaagcccgccaaatgtgtttcagaccagagttcttggagctaaagactctgaagataaggttcttaacgagtctgttgcttctgctacgcctaaagataaccaaaaggcttgcctaatatcagaggactcatgtagaaaagaccaagagagtgaaaaagcagttgtatgttcttctgttggctcgggtaatagtctcgatggcccatccgaaagtccttcactttctttaaagagaaagcattcgaatattcaagacattgactgtcatagtgaagatgtggaagaagaatcaggagatggaagaaaggaagcaggtccatctcgaacgggtttgggttcaaagagaagccgccctgcagaagtgcataatctgtctgaaaggagacggcgtgataggatcaacgagaagatgcgtgccctgcaagaactcattccaaactgtaacaaggtggacaaagcttcgatgctagatgaagccatcgagtatctcaagtcactccaacttcaagtgcagatcatgtcaatggcgtctggttactatctgccaccggcggttatgttcccaccgggtatggggcattacccggcagcagctgctgcaatggcaatgggtatgggaatgccttatgcaatgggcttgcctgatttgagccgtggtggttcatcggttaaccacggaccacagttccaagtctcggggatgcaacaacaaccagtggcgatgggtattccacgtgtctctggtggtggtatctttgccggttcttcgacgattggcaatggctcgactagagatttatctggttctaaagatcaaacaacgacgaataacaacagtaacttgaaaccaataaagagaaaacaggggtcttctgatcagttttgtggatcgtcgtgacataaatacaaacttatgaactgatgtattgtttatttgtagcattcaaacaaatctattttataatcctaaacaaaattaatttgtgttcgttataacagtgaagagctttgtgcttattggtgggttctg

SEQ ID NO: 87586 - DNA, 608 bp, Arabidopsis thaliana columbia
gattcgactctcgccgccgacctaggtctccgacttgtccatgtagatacttcacgagccgaggaaatcgcggataccgtcatggcgctcatccttggactccttcgacggacgcatttactctcgcgacacgctctatcggcgtctggttggctcggatcgcttcagcctctttgccggggaatgagacggtgccgtggtatggttttgggtatcgttggcagatctgtatcggctcggtatttagctagtagaagcttggctttcaagatgagtgtgctctacttcgatgtcccagagggagatgaagaacgaatcaggccctcgagattcccacgtgctgctcgaagaatggatacattgaatgatcttctagcagcaagtgatgtcatttcgctacattgtgcattaacaaatgacacggttcagatactcaatgcagagtgtttgcagcatataaaacctggggcttttcttgtaaatactggaagctgccagctgttggatgattgtgctgtgaaacaacttctaattgatggcactatagctggctgcgcccttgacggtgctgaaagtccacaatggatggaagcatgggtgaaggaaat

SEQ ID NO: 87587 - DNA, 642 bp, Arabidopsis thaliana columbia
  unsure (1)..(642): unsure at all n locations
aacaaattgagaaagaaaaaaaggtaaggctgtgtgagagagaacccaccaaagcgtgcacgagagagagaaaaaaaaaagctttgattttgtataaaatcccaccactgctctcttaccataccttcattacacatctctctttctctctctcgctctcagttttgtgggattgtttctttaaaaggggttcttagggttttgtgaagctatagatttcaatttcatacatagttaacgtatagaaggaatcttgggttgatcaatggaaggttgtccaagaaacagagaaatcggtccaaaacttcttgatttgattccacaaggaaggaaatggtaccaagaagacaagaacaacacagatcaggagaagaaacttgagctaaggcttggaccacccggtggtgatgaagaagatcattcagcaatcaagaagaagaacacagagataaggaacatcaagaaggaaacaggaagacaaatcttttccacctgtttttaatgggcaatcaactttctctccttccaaccaaaaaccactttcttgntccctnaacaatcttaacaggaaaagnaccttcttcctgggnccagttggntngggttggccntcccggttncgttcgttccaggaangantnt

SEQ ID NO: 87588 - DNA, 1379 bp, Arabidopsis thaliana columbia
  unsure (1)..(1379): unsure at all n locations
nnnnnnnnnnnnnnnnnnnnnnnnnnnnnnnnnnnnnnnnnnnnnnnnnnnnnacccacgcgtccccacgcgtcctctcgctctcagttttgtgggattgtttctttaaaaggggttcttagggtttagtgaagctatagatttcaatttcatacatagttaacgtatagaaggaatcttgggttgatcaatggaaggttgtccaagaaacagagaaatcggtccaaaacttcttgatttgattccacaaggaaggaaatggtaccaagaagacaagaacaacacagatcaggagaagaaacttgagctaaggcttggaccacccggtggtgatgaagaagatcattcagcaatcaagaagaagaacacagagataagaaacatcaagaaggaaacagaagacaaatctttccactgttttaatggcaatcacttctctccttccaacaaaaccacttctgttcctcacatctcacagaaaagaactgctcctggtccagtggtgggttggcctccggttcgttcgttcagaaagaatctagcgagcacaagctcttcaaagctaggtaacgaatcctctcatggaggtcaaatcaacaagagtgatgatggtgaaaaacaagttgaaaccaagaaggaaggaatgtttgtcaagatcaacatggatggtgttcctattggtcgtaaagttgatctcaatgcttacaacagctacgaacagctctcttttgtcgttgacaaactcttcagaggtctactcgcagctcaaagagatatctctgatggtcaaggagaagagaaacctatcattggattattagatgggaaaggagaatttactttaacctatgaagacaatgaaggggacaagatgcttgttggggatgttccatggcaaatgtttgtttcatctgtgaagagactgcgtgtgattaaaagctctgagatttcatctgccttgacatttggatgcagtaagcaagagaagatgatgcactgaagagtctttttagaaacttttatttcagacagagagtctcaaagctttataaatgtacatctggtttttgttatatataagagttaatcattggttttttactttttttttggtccagagagacatttgatctgatctgatattcccatgtcttcaagacactagacgatgagattacataagcaatctgtgtttataagcattttaattaattaaggagataattagaacatactgtaataattatctcatgcatgtctgcaaaactctttttgaaaaaagaagatgaaatttttattccaaaaaaaaaaaaaagggcggccgctctagaggatcccagcttacgtacgcgtgcaagccacgtcatagaatttttata

SEQ ID NO: 87589 - DNA, 414 bp, Arabidopsis thaliana columbia
gcgtccgtgaaaacacaagtagacgaacctgaagcagtcactcaaactcaagacttctctttaatcgtcgtcacaaaaatctcagagaatcctccttcaattccaattcaaagctccttccttttggcacagctctcttcgtcaaattcaatcatcatgaaggtcgaatctttattcttcagagagcttcaatggcgaccacatcatcaaacccattactactttcttcaaatttcctcggttctcaaattataagctcagctccaacaccacaaaccaccacaaagtctcttcctttctcagtaatctctcgaaaaagataccaaatttctcaatcggagaagctaatgaaatcgttaccatcacaagctgcgttagcagctctgttgttctcaacttcatctccacaagctt

SEQ ID NO: 87590 - DNA, 667 bp, Arabidopsis thaliana columbia
ggacgaacataaaaacaaaaacatataatttgggtttttagagttcgaaacttgaaatcttttttttttggttgctgaggaatcgaagtagaagagtataaatgggtgttagagagaaagatccgttagcccagttgagtttgccaccaggttttagattttatccgacagatgaagagcttcttgttcagtatctatgtcggaaagttgcaggctatcatttctctctccaggtcatcggagacatcgatctctacaagttcgatccttgggatttgccaagtaaggctttgtttggagagaaggaatggtatttctttagcccaagagatcggaaatatccgaacgggtcaagacccaatagagtagccgggtcgggttattggaaagcaacgggtactgacaaaattatcacggcggatggtcgtcgtgtcgggattaaaaaagctctggtcttttacgccggaaaagctcccaaaggcactaaaaccaactggattatgcacgagtatcgcttaatagaacattctcgtagccatggaagctccaagttggatgattgggtgttgtgtcgaatttacaagaaaacatctggatctcagagacaagctgttactcctgttcaagcttgtcgtgaagagcatatcacgaatgggtcgtcatcgtc

SEQ ID NO: 87591 - DNA, 459 bp, Arabidopsis thaliana columbia
  unsure (1)..(459): unsure at all n locations
tcaagatggcnagaccttgtttaatgagctggaagttgttgagggtatgaagattgacaggggatacatctccccgtacttcataactaacccgaaaacacaaaaatgtgaactagaagatcctctcattcttatccacgagaagaaaatttccaatataaacgcaatggtgaaagtattagaactggccctcaagaagcaaaggccgctgctgatcgttgctgaggatgtggagagcgatgctcttgccaccctaattctgaacaaacttcgtgctaatatcaaggtctgtgctgtgaaggcccctggttttggagagaaccgaaaggccaatttacatgatctagctgccctcactggagcccaggtaataacagaagagttgggtatgaatctagacaacattgacctcagtatgtttggaaactgcaagaaggtaacggtatccaaagatgatac

SEQ ID NO: 87592 - DNA, 494 bp, Arabidopsis thaliana columbia
cggacgcgtgggcggacgcgtccgcggacgcgtgggttaaaatagaaccaaagagtaaacacttaagcaaaacaattttgtcctactcttaggttatctccaatgaagaacttaaagatggttttcttcaagatcctctttatctctttaatggcaggattagccatgaaaggatctaagatcaacgtagaagatctccaaaagttctccctccaccatacacagaacaacctccaaaccataagccttctattgtttcttgtcgtttttgtgtggatcctctacatgttaacccgacctaaacccgtttaccttgttgatttctcctgctaccttccaccgtcgcatctcaaggtcagtatccaaaccctaatgggacacgcaagacgtgcaagagaagcaggcatgtgttggaagaacaaagagagcgaccatttagttgacttccaggagaagattcttgaacgttccggtcttggtcaagaaacctacat

SEQ ID NO: 87593 - DNA, 430 bp, Arabidopsis thaliana columbia
gcgtccacaagaacaagaagaagaagaacaagacaagaagaacaaagtacccaagaaaacacacaagaaggaaacacaaagattgatattgatccaaaagcaatggcgtacgagaaagtcaacgagcttaaccttaaggacacagagctatgtcttggattacccggaagaacagagaagatcaaagaagaacaagaggtttcttgcgttaaaagtaacaacaagcgtctatttgaggaaactcgtgatgaagaagaatctacacctcctaccaagtaagtagaagagatctgagtttcaaattggcttctttcaaattattggctcttgaatagttttactaatctttctttcctcaaatttacagaactcaaatcgttggttggccaccagtgagatcttcccgtaagaacaacaacagtgtgagcta

SEQ ID NO: 87594 - DNA, 568 bp, Arabidopsis thaliana columbia
  unsure (1)..(568): unsure at all n locations
caagaacaagaacaagaagaagaagaacaagacaagaagaacaaagtacccaagaaaacacacaagaaggaaacacaaagattgatattgatccaaaagcaatggcgtacgagaaagtcaacgagcttaaccttaaggacacagagctatgtcttggattacccggaagaacagagaagatcaaagaagaacaagaggtttcttgcgttaaaattaacaacaagcgtctatttgaggaaactcgtgatgaagaagaatctacacctcctaccaaaactcaaatcgttggttggccaccagtgagatcttcccgtaaggacaacaaccagtgtgagcttcgtgaaaagtgagtatggacggggctccttacctttcgnaagttcggtctnaacggcattcaaaaactnccccggggtttttaaaagcgtttggggtttttttcaaaggcatggtttggtggatcttttgggggggcgggcttccaagggtctgggtttncccccnatcgggggttaagtggtncctggtttttgttggggtttccctggncantttttttttntttang

SEQ ID NO: 87595 - DNA, 768 bp, Arabidopsis thaliana columbia
  unsure (1)..(768): unsure at all n locations
gaagaatctacacctcctaccaaaactcaaatcgttggttggccaccagtgagatcttcccgtaagaacaacaacagtgtgagctacgtgaaagtgagtatggacggagctccttaccttcgcaagatcgatctcaagacatacaaagactaccccgagcttctcaaagcgttagagaatatgttcaaagtcatgattggtgaatattgtgagagagaaggatacaaaggatctggatttgtaccaacatacgaagataaagatggtgactggatgttggttggtgatgttccatgggacatgttctcttcttcttgtaagagactcagaatcatgaagggatccgacgctcctgctctagactcttccttatgatccagagaagctgagaatcttttgtctaaaaaggagatgatgactatgatcgatgaatgaaaaaccctttttggtttgattcggatcggagtttgactaaagttgaccgtgaaagacgaaacttcggggttttgtccgacgagagatccatctctagtgatgttctttttgtttttgtatttagatttgaagtttgatgtaaagatacatgagattttatgtataatacggacacatacacaatctatagatgtataatgtattaagtagttatgtcctataagatcatcagttttctgttaaaaaaaaaaaaaaaaaaagnnnnnnnnnnnnnnnnnnnnnnnnnnnnnnnnnnnnnnnnnnnnnnnnnnnnnnnnnnnnnnnnnnnaacga

SEQ ID NO: 87596 - DNA, 653 bp, Arabidopsis thaliana columbia
  unsure (1)..(653): unsure at all n locations
caagaacaagaacaagaagaagaagaacaagacaagaagaacaaagtacccaagaaaacacacaagaaggaaacacaaagattgatattgatccaaaagcaatggcgtacgagaaagtcaacgagcttaaccttaaggacacagagctatgtcttggattacccggaagaacagagaagatcaaagaagaacaagaggtttcttgcgttaaaattaacaacaagcgtctatttgaggaaactcgtgatgaagaagaatctacacctcctaccaaaactcaaatcgttggttggccaccagtgagatcttcccgtaagaacaacaacagtgtgagctacgtgaaagtgagtatggacggagctccttaccttcgcaagatcgatctcaagacatacaaaaactaccccgagcttctcaaagcgttagagaatatgttcaaagtcatgattggtgaatattgtgagagagaaggatacaaaggatctggatttgtaccaacatacgaagataaagatggtgactggatgttggttggtgatgttccatgggacatgttctcttcttcttgtaggagactcagaaccatgaagggggcccacgctccggccctaccctccctcttgtcagaananctggaccttttgnctaaaang

SEQ ID NO: 87597 - DNA, 910 bp, Arabidopsis thaliana columbia
  unsure (1)..(910): unsure at all n locations
gtctcctctacagacaagccattgatgtgcaagaacatgtatggaggtcagtttaagcctccacggcggttaaggagcgacgagcttcccgccattgtcaacgactttagaatcgctgcacgaaacgcgatcgaagctggtaagcaaagtcttttcccctttggatgttagatgatcaagacacttgacatatggaccggtgctggcttcgatggagtggaggttcacggcgcacatggttacctgatcgatcagttcctgaaagccaaagtgaatgacagaagtgaccaatatggtgggtcattagagaaccgctgtagatttgctcttgaagtaatcgaagcagtggtgaacgagatcggttcagatcgtgttggaatcagactctcgccatttgcagattacatggagtcaggagactcgaatccagaagcattagggctctacctggtgcaagctatgaacaagcatggcatggagtcgtctacggtcacatggttgaacctagaatgaaaacccttgaaggaatcttcgaatgcacggaatcgcttacgcccatgcgaaaagccttcaaaggtacgttcatagtagcaggaggatattctagagaagacgggaacaaggcggtggaagagggaagaaccgatcttgtggcttatggacggccgttcttggcgaatccggatctgacgaggagattcgaactcaatgagccgttgaataggtacgatagatcaacgttctacacttcagatcctgtagtgggctatacagactaccctttcctcgagaccacagatacaacaactgcttaaggcggccgnnnnnnnnnnnnnnnnnnnnnnnnnnnnnnnnnnnnnnnnnnnnnnnnnnnnnnnnnnnnnnnnnnnnnnnnnnnnnnnnnnnnnnn

SEQ ID NO: 87598 - DNA, 681 bp, Arabidopsis thaliana columbia
  unsure (1)..(681): unsure at all n locations
atgatctccaggnnnnnnnnnnnnnnnnnnnnnnnnnnnnnnnnnnnnnnnnnnnnnnnnnnnnnnnnnnnnnnnnnnnccacgcgtgcgcggacgcgtgggctgagttatgatccttaccctcaccggtctttaactatgcttagaaacaaacctagagcagccgtgacgactaagaaacaaacatctctgttaatggctgatcaacctccacctccaaagcctaacacttgccactgttcaccatgtctctttagctctaccaagtttaggtttttcacttctaagatgatgatgactccctttgactctgatttctcactcgttagccctacgtctatactcgaagctaacccatccatcttctcctccaaaaaccctaaacccgtttcctatttcgagccaactatccctaatccccagcgttttcactctccagacgtctttggcctagccgatctcgtgaaagacggagacagtaacagagaccactctagaaaacctgtcaacaagatggtccttttcgggtcaaagctcagagtccagatcccatcatcagctgattttggaactaaaaccggcatcagatatcctccttgtcaacttagtccttgtgtccaaacgaaggtcttagcagtgagcgagattgaccagacggaggactacacgcgcgtcatctct

SEQ ID NO: 87599 - DNA, 692 bp, Arabidopsis thaliana columbia
  unsure (1)..(692): unsure at all n locations
aaaaagaagagaggaaagagataagtgaaagcaacttttaatctgatttttgcgagtgaggagaggatcatcatttcataggagtgagagaccccattaataccagaagcagtcagagtttctcagtaattgtaccaaattctctctattcttcttctctttcattttagatattttctcttacgcagactcattgctttcctctctccatggaagctactgagttatgatccttaccctcaccggtctttaactatgcttagaaacaaacctagagcagccgtgacgactaagaaacaaacatctctgttaatggctgatcaacctccacctccaaagcctgacacttgccactgctcaccatctctctttagctctcccaagtttaggtttttcacttctaagatgatgatgactccctttgactctgatttctcactcgttagccctacgtctatactcgaagctaacccatccatcttctcctccagaaaaccctgaaacccggtttcctatttcgagccaactatccctaatccccaggggtttcactctccagacgtctttgggcctagccgatctcgtgaaaggagggggaatgaacaaggggccctttttggaaaccttncaaaagggtggccctttnggggaaaaggtangggcccgnncccntnaaagggggtttnggggga

SEQ ID NO: 87600 - DNA, 422 bp, Arabidopsis thaliana columbia
ttcccgggatttgaattaaaactgtttttttactacttgtagtaaaaccatgaagcgatcatccttggtcgattcttgttcatattcgagaatatttcgcagtattttctgtctcttatccttttgtatcttcttcttgacaacgaccaatgctcaggtaatgcatagacggctctggccttggccattgtggccacggccgtatccacagccgtggccaatgaatccaccaacacctgacccatcaccaaagcctgtcgcaccacctggcccatcatcaaaacctgtcgcaccaccaggcccatctccatgcccgtcaccaccaccaaagcctcaacccaagcccccaccagcacctagcccatctccatgcccatcaccaccacctaagcctcaaccaaagccagtgccaccaccagcat

SEQ ID NO: 87601 - DNA, 1681 bp, Arabidopsis thaliana columbia
  unsure (1)..(1681): unsure at all n locations
tgttgttgccgctcagaaatctgaatcttctccaatcagaaactctccacggcattaccaaagccaagctcaagatcctttcttgaaccttcacccggaaatatctatgcttagaggtgaagggactagtacaatagtcaatccaagaaaggaaacgtcttctggacctgttgtcgaggattttgaagagccatctgctccgagtaactacaatgaggcgaggattaaggttattggtgtgggaggtggtggatcaaatgctgtgaatcgtatgatagagagtgaaatgtcaggtgtggagttctggattgtcaacactgatatccaggctatgagaatgtctcctgttttgcctgataataggttacaaattggtaaggagttgactaggggtttaggtgctggaggaaatccagaaatcggtatgaatgctgctagagagagcaaagaagttattgaagaagctctttatggctcagatatggtctttgtcacagctggaatgggcggtggaactggcactggtgcagcccctgtaattgcaggaattgccaaggcgatgggtatattgacagttggtattgccacaacgcctttctcgtttgagggtcgaagaagaactgttcaggctcaagaagggcttgcatctctcagagacaatgttgacactctcatcgtcattccaaatgacaagttgcttacagctgtctctcagtctactccggtaacagaagcatttaatctagctgatgatatactccgtcagggggttcgtgggatatctgatatcattacgattcctggtttggtgaatgtggattttgctgatgtgagagctataatggcaaatgcggggtcttcattgatgggaataggaactgcgacaggaaagagtcgggcaagagatgctgcgctaaatgcaatccaatcccctttgttagatattgggattgagagagccactggaattgtttggaacattactggcggaagtgacttgacattgtttgaggtaaatgctgctgcggaagtaatatatgatcttgtcgatccaactgccaatcttatattcggtgctgttgtagatccagccctcagcggtcaagtaagcataaccctgatagctacgggtttcaaacgacaagaagagggagaaggacgaacagttcagatggtacaagcagatgctgcgtcagttggagctacaagaagaccctcttcttcctttagagaaagcggttcagtggagatcccagagttcttgaagaagaaaggcagctctcgttatccccgagtctaaagcccaatctaatcactaccctgcacactgcagcaataacaaacgtgtgtgtactggtagtctggtactgccttctgggatacagcaagatgtgttgatgtatgatcaagaatctgtgtgggtgtgtatatgttctgtcactgcctctggtcgtgttcttgaataggttgttttagaaatcggagtttctctctatgtcacttccaaaacaaaaaaggagaagaagaatcacacttctcgaaccataaacatacttataagattatgagagttttagcagaaattattgtcaaaaaaaaaaaaagnnnnnnnnnnnnnnnnnnnnnnnnnnnnnnnnnnnnnnnnnnnnnnnnnnnnnnnnnnnnnnnnnnnnnnnnnnnn

SEQ ID NO: 87602 - DNA, 850 bp, Arabidopsis thaliana columbia
  unsure (1)..(850): unsure at all n locations
nnnnnnnnnnnnnnnnnnnnnnnnnnnnnnnnnnnnnnnnnnnnnnnnnnnnnnnnnnnnnnnnnnnnnnnnnnnnnnnnnnnccacgcgtccgcggacgcgtgggttttcgcgggcagctcacatttctctccaccgtctcctcgtcttctctcaccaaagatcagagcaaaagtggaattggacaaggtcatttttactactttctctgggttgggggttctatgatacttgtactggattgataatgagtatcaacagagatgaggctcttagagccaaagatcttgcggagggtttgatgaaaaagaccgattttactgctgctcgtaagcttgcaatgaaggctcaaaaaatggattccagcctggagaacatatctcgtatgataatggtttgtgatgttcactgtgctgcaacggagaagttgtttggaactgagatggattggtatggtattcttcaggttgagcagatcgctaatgatgttatcatcaagaaacagtacaagaggcttgcgcttcttctccaccctgacaaaaataagcctcccggtgctgaatctgcttttaaattgattggtgaagcccagaggattcttttggacagagagaaaaggacgctttcatgatcataaacgcaaacttggagatagcctgcagcaccgccatataaagcccaacagatgccgaattatcacacacaacctcattttcgggcaagcgtcaatacgagaaacatcttcactgagttgagaacccgaatcaggcatcctttncagatagctcaagcccaccagctgcntcactcacctaaacccttggacctcttgtgtctctgccgggtgagg

SEQ ID NO: 87603 - DNA, 1776 bp, Arabidopsis thaliana columbia
cccacgcgtccgccccaatctctcttattttgtgagctttttagatcctcctttcttcatcgtttcttttccgaggtttcaaattcgttcaatttctcgattgaagatacctgaaatcgcgttattctaggtccgccgctgttggatctgcaaattccccttcgaatttgaacatttgtgatttcaaattcttcgagaagatgagcgcgaaaaagcttgaaggttcgtcggctccggcgaatcgacgggatccgtacgaggtcctttgtgtatcaaaggacgctaatgatcaagaaatcaaatccgcttacagaaaattagctctcaagtatcatccggataagaatgcgaacaatcctgatgcttctgagcttttcaaggaagttgcattttcgtatagcattttgtctgatcctgaaaagagaaggcactatgacaatgcaggatttgaggcactcgatgctgatggaatggatatggaaattgacttgtcaaacctcgggaccgtaaataccatgtttgcagcattgttcagcaaactaggtgtgcctatcaagactactgtatctgctaatgttcttgaagaggctatgaatggaactgttacagttaggcctcttcctattggaacatcagttagtgggaaggttgagaagcaatgcgctcatttttttggagttacgataagtgaacaacaagctgaatcaggggttgttgttagagtaacttcaacagcacaaagtaaatttaagttactttattttgagcaagattcaagtggtggctatggattggccttacaggaagagcgtgagaaaacagggaaggtgacatcagctggcatgtatttcttacattttcaagtgtatagaatggatacaactgtcaatgcgttggctgcagccaaggaccctgaatctgctttcttcaagcgattggaaggtcttcaaccttgtgaggtttcggaactgaaagctggcacgcatatatttgcagtttatggtgataatttctttaagactgcatcttacacgattgaagcactctgtgccaagacctatgaggatacaacagagaagttaaaggagattgaagctcaaatcttaagaaagagaaacgaactgcggcagtttgaaacagagtaccgaaaagctttggcgcggtttcaagaagttaccaacagatatacacaggagaaacaaactgtggatgaactgctaaagcaacgggatacaatccattcgaccttctctgttgtgaagacaccaagcggcaacaacttgagcaatggaagtagcagcaaagctcagggagatgaatcaaaaggtgatggggatagtgcgggagaagaaggcggaacagagaatagagacaaatccaagaggaaatggttcaacttgaacctaaaaggatctgataagaagcttggttgatcagaacacggatttgttgcgggtcattggtattttgttcattcgttagacagaactgactcggtgaaggtttgtcatcgggtgctctatgtaggcatatataatcatgggaatggttcgagagattgaagagagagagatgcaaaagctctttaaatggatggaaggatttgtattcataggagtgttttgatatgtatgcttatgcttcattgattcattgtttgttaaacagaattgtcattgtgatggtggattgatgatatattcagattcaaaattataataattaaaaggatataggctggccgctaaagaggatccaagcttacgtacgcgtgca

SEQ ID NO: 87604 - DNA, 819 bp, Arabidopsis thaliana columbia
tacgactcactttagggaaagctcgtacgcctgcaggtaccggtccggaattcccgggtcgacccacgcgtccgaaagaaggatatatggtcatgccactgatgtagagattcgtcccttagatgaggaaaaggctgttcaagctgctgttgacctcattggagagatctttctctttggggtcggtggagctgttgttgtttttgaggtgcagagaagttcgcggtcagaagcaagaaaagaggaagcacgtaagcaagaactagaggagttgagaataaaagatgaagaactagaaaagcaagtggcagatctcaagagcaagctagaggagcttgaacaacttgctaaggcacgaggactgagcggtattttccagttaaaaccacagcctggtactaccgctagtgggaaaccagacaaatccagttgaatcatcatcatcatcatcttattcaatctagaagattcaaaccaaagttaacaatacggtaatgattctttttcacaagagttgaggagtttctgattctctcctctatatacatgtaccatccatcatcaaaaacaatctgcttttaaattatcaaattaggtgacaaataaaaaaagttttgatgttgaggttttgtcttttgcaacatttgttgcttagatttggtcttttgagaccaatggctcgattttaggtaatgttggataatgacgaattcattatgaaagagacattgagatgtaaaaaaaaaaaccaaagggcgaccgctctagaggatccaagcttacgtacgcgtgcgttcgacgtcatagtcttctatagtg

SEQ ID NO: 87605 - DNA, 483 bp, Arabidopsis thaliana columbia
  unsure (1)..(483): unsure at all n locations
tggtcctgtgtccttagtcggatacaaaggagaggaaacagtcgagaaggatctctcgcagcatcaatgggactacaagattggtttgaatggatacaacgacaaacttttcagcataaaatctgttggtcaccaaaaatgggcaaacgaaaagctacctactggtcggatgttgacatggtacaaggcaaagttcaaggctcctcttggtaaggagccagtgattgtggacttaaatggtctcgggaaaggtgaggcttggatcaacggccagagcataggccgttactggccgagctccaacaatatccagggatactctccgatctgcttggcgcatgaggatttctacatccgacgattgtatcatcggattcaggactgttttggacgtcccatttcaagtgcacctgatgctnggattgatgtggttgagagagtctctgacgataacaacaagacgttaaagcgaactacaaagac

SEQ ID NO: 87606 - DNA, 980 bp, Arabidopsis thaliana columbia
  unsure (1)..(980): unsure at all n locations
ggccctcctcgagtcgacagtatcgataagctagatatccaaattcccggccgccaacaacaaacttttcagcataaaatctgttggtcaccaaaaatgggcaaacgaaaagctacctactggtcggatgttgacatggtacaaggcaaagttcaaggctcctcttggtaaggagccagtgattgtggacttaaatggtctcgggaaaggtgaggcttggatcaacggtcagagcattggtcgttactggccgagctttaactctagcgatgatggttgcaaagacgaatgtgactaccgtggggcgtatggtagcgacaaatgcgcttttatgtgcggcaaaccaactcaaagatggtaccatgttccacgatcgttcttgaatgcgagcggacataacactatcacactattcgaagaaatgggcggtaacccgtcaatggtgaacttcaagacagtagtggttggaacagtttgtgccagggctcatgaacacaacaaagtggagttgtcctgccataaccggccgatttcagccgttaaatttgcaagctttggaaatccgttggggcattgtgggtcattcgcggttggtacgtgccaaggagacaaggatgctgcgaagaccgtggctaaagagtgtgttggcaaactcaactgcactgtcaatgtgtcttccgacacgtttggttctactttggactgtggagattcccctaaaaaattgcccgtggaattggagtgctagattagatcttagctctagctagctagtgatcgcaataatttccaccaaataatgtcggccttgtttttgatctatcaggttttttagatgatttggatttaggattgtggaataaatattatgcccgaataaaagtttctcttgtttaaaaaaaccaaaaaagnnnnnnnnnnnnnnnnnnnnnnnnnnnnnnnnnnnnnnnnnnnnnnnnnnnnnnnnnnnnnnnnnnnnn

SEQ ID NO: 87607 - DNA, 672 bp, Arabidopsis thaliana columbia
ctgattcttcgacgaaaggggaagaggttgttgaattcagaaatctctctctcttctctgtcgctctcgcgtgagctagttgcagatttttccagatctcaacattgaaattcaaactcaaagctagagagggagagagatagatagatagagggagaagaagaagacgaacacggagctgaaacaatgattacgatcccataccttaccgctgtatcaacgtatttcagctacggcttgcttttcgcgtttggtcagcttcgcgattactctcgcctaatcttcgattggtggcgcaccaacaatctccagggatacgctccgatctgcttggcgcatgaggatttctacatccgacgattgtatcatcggattcaggactgttttggacgtcccatttcaagtgcacctgatgcttggattgatgtggttgagagagtctctgacgataacaacaagacgttaaagcgaactacaaagactagcaggtgccttaatttgggttcctacaattatcttggatttggttctttcgatgaatattgcacgcctcgtgtcattgagtctctgaagaaattttcagcaagtacatgtagctctcgcgttgatgctggaactacatctgtgcatgcagaacttgaggattgtgttgctaaatatgtcggacaacct

SEQ ID NO: 87608 - DNA, 714 bp, Arabidopsis thaliana columbia
ttagaagaatcatttccacacgattttccctgtgatttcttcatttccggcgacttaaaacggtgtctagcaaaatgagccgaccacaagatccaccccgaggtttcttcccatttggaaatccctttcggatgttatcatcaaagggatcagatttatcgccatggctactttctctattgaacggctttgagctacgtttggaagagagactgaagaaacttatgcctaagaacaaagatgacatcctcactttatcctggatgaagctagctatggagtcactctgcgagactcataagaacattaacactctcattactgatctccagcttcctgtctctgattgggaagagaaatgggttgatgtttacctcaacataagcggtaggttactagatctctgtaatgcctttagctctgagctcacacgtctcaaccagggagatctcttcctcaagtgtgttctgcacaatttacaatcggattctggggaggggtttctccaggctcgatcttcgcttgatagctggaggcaacatgttaatacaaacaaccctagaattgaaaactgccgtgcggttctagacagtcttgttaaatctctgagtctgcctaaagtcaagaactcgcctaaaggaaaggttctgatgcgagctttttatggtgtgaaggttcaaacagtttatatctgcagtgtatttaccgcagcct

SEQ ID NO: 87609 - DNA, 479 bp, Arabidopsis thaliana columbia
cggggcgatcacagagtgtcaaagcaatctgctttttctcctctcagattcaaaggttctctttgaagcttcgtaggtggttatactttgatggcggattatcatttcgtgtataaggacattgaaggagcgtcaactcaatgggatgatatccagcggaaattggggaatctaccggagaaggctccggctttcaaacctccggcgtatactccggcggaagacgagtcttcagctcctaaggatcaggcatggtttgataagaagacagaggaggagcttgaggatcttgaggacgacaaagatctcgacgatgatcgctttctcgaagaatacaggaagaagaggttgtctgagctaagagaggctgctaaagttaaaagactatggaacagtgactcccatctcgggctctgatttcgtgagggaggttacgcaagcttctgctgaagattgggttgttgtatgtctctataaag

SEQ ID NO: 87610 - DNA, 780 bp, Arabidopsis thaliana columbia
aagaaatggaagcatgcttctagcattagctatgctatatcccttagtcacgttaattgcaggagttctgatttgggattacttgtctccaattgatctcataagaaactaccctcacttagttgtgttgggaactggtcttgcatttggattccttgtgggaagaatgattctagctcacttatgtgacgaaccaaaaggattgaaaacaaacatgtgtatgtcactgctttaccttccatttgcactagcaaatgctctaaccgctagactcaacgacggggttcctcttgtggatgagttttgggttcttcttggatattgtatattcacattgtcactatatgcgcattttgcaacttcagtcattcatgagatcacaactgcacttggaatctactgcttcaggattactcggaaagaagcttgaagaaacaaaatgtgattgaaatttttatttataagaaaaagcaaatcttaagggagaaaaaaaatgcaaatcccaacacgaatctgaatattttgttacttggaattaaaaatgattgactgatatgcttttggatgtatactcattaatgtttttgttttagtgttttttttcctggtcggttgacatagggtaagtcatgtagaacccttttgtgtaacgtttctaagaataagaaatatgggattgttctacattattttttttaaaaaaagggcggccgctctagaggatccaagcttacggaagggtgcatgcgacgtcatagtcttctatagtgtcactcaaac

SEQ ID NO: 87611 - DNA, 1536 bp, Arabidopsis thaliana columbia
agctctccttttgcttctggtcctctcgtcccgtttcgccgctctctaaaggggcaagtgagaggttactgtctctttcttctttcagacactcgagacgagaaaggctcgtatctgattttaccgccaccggaccatctgtgatagacaataatgggttacataggagctcatggtgtagcagctcttcataggtacaaatacagtggagtggatcactcttatcttgccaaatacgtcctccaacctttttggactcgatttgtcaaagtcttccctctatggatgccaccaaacatgataacgcttatggggtttatgtttctagtcacttcctccctgctaggctatatatattcacctcagttggattctcctcctccacgatgggttcacttcgcacatggtttacttctcttcttgtatcagacatttgatgcggttgatgggaagcaagcaagaaggacaaattcctctagccccctaggagagctcttcgatcatggttgtgacgcgcttgcttgtgcgtttgaagccatggcatttggaagcactgcaatgtgtggaagagatactttctggttctgggttatttcagctattccattttatggagctacatgggaacactatttcaccaacacacttattcttccggttatcaatgggcctacagaggggcttgcacttatatttgtcagccacttcttcacagccatcgtcggtgctgaatggtgggctcagcagttagggcagtcaataccattgtttagttgggtgccatttgtgaatgagattcaaacttctagagcagtgctatacatgatgatcgcttttgctgttataccaaccgttgcattcaatgtaacaaatgtctacaaagtcgttcgatcaagaaacgggagcatggtgttagcgttagctatgctgtatcccttcgttgtcttacttggaggagttttgatatgggattacttgtctccaatcaatctcatagcaacatatcctcacttagttgtactcggaactggacttgcatttggatttttagtgggaagaatgattcttgctcacttgtgtgatgagcctaaaggactaaaaacaaacatgtgcatgtcactactctatcttccctttgcacttgcaaatgcgctaaccgcaagattgaatgctggggttcctctagtcgacgaattatgggttcttcttggctactgcatattcacagtgtcattatacttgcactttgcaacatcagtcatccatgagatcactgaggcccttggaatctactgctttaggatcacgcgtaaagaagcttgaaaagaaacctttgacactgcgaatggtcgatatggaccagttggatcggtgatgtatttcttcttcttattcattgttgtctgtttgatcaggataggtgaagttatgtagaactttgtataatgttcttgtttttggatttatgcattgggcaaatacgaaaactattcttgaaatgctacgaaaatgattttagaaggagcatttttttaa

SEQ ID NO: 87612 - DNA, 1554 bp, Arabidopsis thaliana columbia
cagatacgcaaagcactccataccataccatgactctcttcgcctcttttagggcgcaaccaagagacagagaagaagagagagactcgtaagcaacaataaccaatagctctctctctctctctctctctctcctctgctgattcttcgctgactcttgcctcctcgacgtcgtcttcggctttgtagcatctcgccgaagcgtcgttgatttgagagagacccaatttggattgttagaaaatgggttacataggagctcatggtgtagctgctcttaagaaacacaaatacagtggtgttgatcactcttatcttgccaaatatgttctccaacctttttggaaccgttttgtcaaaatcttccctctatggatgccccccaacatgataacacttatggggttcatgtttcttctcacatctgctctcttaggctatatatactcacctaagttggattctccacctcctcgatgggtccactttgcacacggcttacttctgtttttatatcagacatttgatgcggttgatgggaagcaagcacgaagaacaaattcatctagcccactaggagagctttttgaccatggttgcgatgcacttggctgtgcgttagaaacaatggcatatgggagtactgctatgtgtggaagagatactttctggttttgggttatttctgctgttccattttttggagcaacatgggaacactattttaccaatacgcttactcttccggtagtcaatggtcctacagaaggtcttgcacttatatactgtggccatttcttcacagccattgttggtgcggagtggtgggctcagccgtttgggaagtcgattcctttgtttagttgggttccgtttttgaacgagatgcaaatgtccagaataatactattctccatgattttctttgctgttataccaacccttgcaatcaacacgtctaatgtttacaaagttgtacattcaagaaatggaagcatgcttctagcattagctatgctatatcccttagtcacgttaattgcaggagttctgatttgggattacttgtctccaattgatctcataagaaactaccctcacttagttgtgttgggaactggtcttgcatttggattccttgtgggaagaatgattctagctcacttatgtgacgaaccaaaaggattgaaaacaaacatgtgtatgtcactgctttaccttccatttgcactagcaaatgctctaaccgctagactcaacgacggggttcctcttgtggatgagttttgggttcttcttggatattgtatattcacattgtcactatatgcgcattttgcaacttcagtcattcatgagatcacaactgcacttggaatctactgcttcaggattactcggaaagaagcttgatttttagttttagtgttttttttttcttgttcggttgaaatagggtaattcatgtagaagcctttttgtgtaacgtttctaagaaaaaaaaatatgggattgttctagattttttttttaatttaaacctcgttattgatc

SEQ ID NO: 87613 - DNA, 493 bp, Arabidopsis thaliana columbia
  unsure (1)..(493): unsure at all n locations
aagctactnnnnnnnnnnnnnnnnnnnnnnnnnnnnnnnnnnnnnnnnnnnnnnnnnnnnnnnnnnnnnnnnccacgcgtccgggcaataatggcatcgttcaagtctttcgcagccgttctcagtgtcctttttcttgccatgactgctatagaaacggtagttcaagcccaagaatgtggcaacgatctagcaaatgtgcaggtatgcgccgccatggtgctgcccggttcaggcagaccaaattcagagtgttgcgccgcacttcaatctactaatagagattgtctatgcaacgctctccgtgcagccacctctcttccttcgctttgtaaccttcctcctgtggattgtggtataaatgcttagttaagctacgagtcaattccaagatgatcaaggaaaacgggaaaataaagaataatgagaaatattccagtcttatgttttttcttctaacttctgctttactataataaagttctagtagttt

SEQ ID NO: 87614 - DNA, 530 bp, Arabidopsis thaliana columbia
  unsure (1)..(530): unsure at all n locations
tccnnnnnnnnnnnnnnnnnnnnnnnnnnnnnnnnnnnnnnnnnnnnnnnnnnnnnnnnnnnnnnnnnnnnnnccacgcgtccgaccatgtttgagtaccggtgcagctccatcgattggaagccatctccggtggtagctctggccaccagcgccgacggttctcaggtcgccgcagctcgtgaggatggttctcttgagctctggctcgtctctcccggtgcttcctcttggcactgtcagctcatcattcatggagatccaaaatcgagaatctcgcaccttgcgtggtttggtactggttctaaaggttcttcttccgctagattgttttcttcgagcattgatggctcaatttcagagtgggatcttttcgacttgaagcagaaggtcgtcctagattcaattgggttttcaatctggcaaatagctctggcccctatctctattgaagcagaaagtaaagaagctaagctgattcagaatggatacttgagtgagaaatcagacgacgaggaagaaagtggagt

SEQ ID NO: 87615 - DNA, 351 bp, Arabidopsis thaliana columbia
tccacgcgtccgcccacgcgtccgaaaggaagctcctttttggtatgtatgcattgcctctgttatctatttgcgaaaatctgaagattggtttctctaccgagtgttttatactttgatacttcatctaaagctctaggcttttcttattttccttgtttggattgtttgttttcgctctagggtacgccaaagaggacgctctctgaaaaaagaagaagtggttcgtaacataatctgaacccgaggacacacacacgatgatgcattcgacggtgcagcatgggggaaacaagagtggcaagtcaaatgtatgggctaatactaacttggcaaagacagtggcagctg

SEQ ID NO: 87616 - DNA, 681 bp, Arabidopsis thaliana columbia
  unsure (1)..(681): unsure at all n locations
nnnnnnnnnnnnnnnnnnnnnnnnnnnnnnnnnnnnnnnnnnnnnnnnnnnnnnnnnnnnnnnnccacgcgttcggccacgcgttcggtttgaaccggagggttcctcccccctttggaaattccatcatcgattgacctatagctaccagatctgcttttcaatttgatgctcttccattaggtagaaaaggtgcttttgatcggagccactatgggggcgtcttttgagaccctcgatatcgcttccagtgctcggagaattggcgtagatatatcggatttctctcaaattttactccaggagccctggttatatcctcaaacaggcccacatatttcgggcagagaagaatgttattgatttatatgtcatgcttctgcggttttcaagcttggctctcgagactataccgtcccatcgagattacagaacatctctaaaaagcgattaagggagtattggagaatgagactactagatgtcttgacggagctggagaagttgataccagttgtacagcaaaggattgatgaactgtatcccaagctcaaacctcgatataacgttcaagctcatccagcaaatggttccctaggctggtcttctgccgtgaaaccgtcatttaatagctatgatcatgcaaaggtaagaaatcctcctggacataattctggctac

SEQ ID NO: 87617 - DNA, 465 bp, Arabidopsis thaliana columbia
aattggaatatgttcttcccttagtcttcgctatcagctgcgatttgaagtttgcagtgatcatggtggtcacatcaaattgtctatgaactgcaaattcttttggatgtctttaacttgatatttagttgttggccttttgtttccttgaaagtgatccctttaagactaaaatcacttggttaaatttcctaatcatctgcataatgttttgtaggccaacatatttcgggcagagaagaatgttattgatttatatgtcatgcttctgcggttttcaaggtcaaaaagctgccaactcaaatactctctgtagagagaattagttagatccttttgctttttctgaaatcagctttgtttttcgttttctctagcttggctctcgagactataccgtcccatcgagattacagaacatctctaaaaagcacgcatgggtcggtcgagccggtccgtcccggt

SEQ ID NO: 87618 - DNA, 533 bp, Arabidopsis thaliana columbia
  unsure (1)..(533): unsure at all n locations
gtcaggnnnnnnnnnnnnnnnnnnnnnnnnnnnnnnnnnnnnnnnnnnnnnnnnnnnnnnnnnnnnnnnnnnnnccacgcgtccgcacaccactcagaggaacagagcttaacggcgactatggaagggattggactgcgaagttgcggagatgatattctccgtctcggattcaagctacgcggtggtaccggtggccggattcagattctccagcgagctatggtgataaaaatgagagaccgtagcaagaacaggaaaccattgcagagaggacgaatgctcagtatcgaagcgattcaagcggttcaagccctgaagcgagccaatccacttcttcctcctcctgccgttccttctactttcacgacttcttcttcctcagctctgcttgatcgtgtaatcatttctaaattccgtcggctcttgaaattcgatatggtcgccggtctcagagaacttctacgccaaaacgagtgctctctagctctcaaggtttttgaagagattagaaaggagtattggtacaagcc

SEQ ID NO: 87619 - DNA, 618 bp, Arabidopsis thaliana columbia
ggagtttctaatcatgtctctctctgttttcttcttattcttctatcaaaccgtcaagttgggaaacaaaacaaaactcgcaagtttaacaacgcgtcttctacctcctcctcatcggactatttatctatagtcttcgttagatcaattcctctgttttactcctacctcgcgtccgccacatttctctttaacctcatctcatctcttagtcgagatcttcactttctgatgacaatagggtcgtttttctcttctctcttattctggcgcaattctcaggaccaggaggcgcagagagggaggatgcaggagatagatcttagtgttcacactataaagtcccatggaggaagagtcgcttctaaacacaagcacgattggatcatactcgtcatcttgattgccatcgagataggcttgaacctcatctctcctttctaccgctacgtgggaaaagacatgatgactgacctcaagtaccctttcaaggacaacaccgtacctatctggtctgtccctgtgtacgctgtgcttcttcccatcatagtgttcgtctgcttctacctgaagaggacatgtgtgtacgatctgcaccacagcatcctcgggctgctt

SEQ ID NO: 87620 - DNA, 706 bp, Arabidopsis thaliana columbia
cgctagtcaggcgtttactctctctctctctcacattttctcattctctcctacaacaagtttccgccgctaagccactcactacgcagccatggcaaatcctgaccatgtttcagatgtgctacataatttgtcgattgatccaacaaccaaggctttagctcctgattctgaaacaaagggggcttatggcggaaacggtaatgacttcttgctcaatgatgagttagtggaggctaccaaaattggtaaacctagtcttttgtctaaagatggaggtgtgaccaaagacaagggatccaaccttaagaaactcgggtaccaaagtgcagcttataacgcaaagggttcatatgggaagggtgcctatgcttatgggtactatcccccagcatatcagtacccaagacatggttacactgggagctatgcttcagggaaaaccaatcttcagtatcagtacctgactcagcagggaagatcagctggtaatggtcaatcttatggaggatacatggacaacatttactccaattatgggatgtgtggaccttacacgaatggctatgggtatggctcttacggttatgactcatggaaatacatgcccaattggtatgcggttaacaatacctacaagccaagaaacgggtatcatggatatggcaaagaaaacattgaggggttaaatgagatgaatagaggt

SEQ ID NO: 87621 - DNA, 518 bp, Arabidopsis thaliana columbia
  unsure (1)..(518): unsure at all n locations
tttcgctctantgatggaccnggcctgaacntccngggcnacccactgngtccngacaataccgtacaagccaagaaacgggtatcatggatatggcaaagaaaacattgaggggttaaatgagatgaatagaggtccacgagctaagggtttcaacagccaagatggttccaaggtgatggctgtgtctttgaaggagcagagagtgactgagactgagaaactcagtgaagatgtgtctcttttagatcccaaggactacaataagatagatttccctgagacctacacagaagcaaagttttatgtaatcaaatcgtacagtgaagatgatattcataaaagtatcaaatacagtgtttggtccagcactcctaatggtaacaagaagctggatgcctcatataacggggcaaaacagaagtcagatggcttgtcccgtgttttccttttctctgtaaacactagtgggcatttttttgggttngccgnnntggtaggccctnttnntttnaata

SEQ ID NO: 87622 - DNA, 617 bp, Arabidopsis thaliana columbia
  unsure (1)..(617): unsure at all n locations
atgattctccnnnnnnnnnnnnnnnnnnnnnnnnnnnnnnnnnnnnnnnnnnnnnnnnnnnnnnnnnnnnnnnnnnnnnnnccacgcgtccggtttaggcctcatagccttatgcaagactatggagaattgcatatggaaaccgaagctatgagaaaaaggttacaggcagtgcgagaaagaaaggcaacactaatggctgaagtcagatttctgcgacggagatacagacatttgagacaagaccagccacaagagattaaaaaggtcagaagatcaaatggtgggaagaagatccgagtggaagtgtctcctagtaacaaaagtgaggcggaaactaagcatgtttcgcttcctgacttaaaccactcggaaaaggctcacgatgaaaccaaaaccagtcctaagagaagagttcctttgtttgatctaaatcagatatctggagaagaagagcaagaaacagaggcagtggacaataatcaagagaacacgagagttgaagaaagtaattcatgtaagagattaatgatcagtagcattgagatgcagcagaaagatgtgaagccatcttcttgcaggaatggcggaaacggatcagataagaggaaaatttc

SEQ ID NO: 87623 - DNA, 678 bp, Arabidopsis thaliana columbia
  unsure (1)..(678): unsure at all n locations
aagcccggcngnttcccggtccccccagtcagcagcccccccgggtgttaaaaggtcagaagatccaatggttgggangaagccccgagtgggagtgtcccctggttccaaaggtggggcggaacctaggcatgtttcgcctcctggccttaaacccccccggaaagggctcccgatgaaaccaaaaccagtcctaagagaagagttcctttgtttgatctaaatcagatatctggagaagaagagcaagaaacagaggcagtggacaataatcaagagaacacgagagttgaaggaaagtaattcatgtaagagattaatgatcagtagcattgagatgcagcagaaagatgtgaagccatcttcttgcaggaatggcggaaacggatcaaataagaggaaaatttcatggcaagatcctgtcgcagctctcagagtctaaaataagaagacggaaccttttgttcctcctcatagatcttgttgtaacatagcttcacatcaaagttagcttgcttatttacttatcttgattgaacaacatatccaattgtgacttgaaaacttaaaaaccttacacaatggtggcttattgcaaaaaaaaaaccacaagggcggccgctctagaggatccaagcttacgtacgcgtgcatgcgacgtcatagatcttnctatag

SEQ ID NO: 87624 - DNA, 449 bp, Arabidopsis thaliana columbia
ctctatcttccttatctctctccgccactctccttctctttctccgaactcttcgatggccggtctactcaaaacgccgtctttacatctcacaccaactcttcttcatgctccttctgtaccctttaagcccttttgcgtatctttcgccggaggaagaaacgttagcgtctcactctctcgccgagcttctctccggtctgtctctagcggctatcctctccgcttactaaacctcgtaccctttgcttcgggagaagctgagacgacggagacggaggtggaatcgaacgaacccgaagttcaggagacggatggtgctgttgatgtcgagaatgaaaatgccagtgctgaggagggtgaagctgctgtagtagtagcaactgttttcactttgtttgtgaattctaatttgtagtttagtttttaactatttggggttgattttt

SEQ ID NO: 87625 - DNA, 439 bp, Arabidopsis thaliana columbia
aaattactcttcctctctagccatggccgtctgtaactgcttcctccaagctccaccactctctcgcatactcctaccggttttatctcgccgagctactactctctctgccggttatggtcggctcaaatccacggtcacgttctgctctactgtgaaccggaccagtcctctgacatcttcggtccgcgcagaagtaaagcgcgtctcgcgtaaagacgataaagtagcttcagctactgatgttcaatttgagacgcctttgaagattgttgagtatccggatcctatactacgggctaagaacaagaggattgatatttttgacgagaatttaaagaacttggttgatgctatgtttgatgttatgtacaaaacggatggcattgggctctcagcaccacaagtaggtctcaatgttcaactcatggtgttaaat

SEQ ID NO: 87626 - DNA, 465 bp, Arabidopsis thaliana columbia
cggacgcgtgggcggacgcgtgggcgagtacattcaccggaaaatggatgccggagctgaaattgatgtggttcggccggtggaggcagattcggcggcggaaattagtccggaacaagaccacgaaggaagatcggagccttcgtcgttgaaccaaggggagattttaaaaacacttgctacggtggagaaggattcgcaggcaatcgcggagagcttttcgtctctctttgtttccctccgatcaactctttctgaggctactggtagctcggttgatcacatggcttgctttggagaggcagcgggacggcttcaggaaaatgctctagatgcagccaccaaagggaaccggtacatcaactcttgcctcagattaaacgaggaaattaaaggcgttgagaatttggcggctcggttaaagcacctgaggaaaaacgtggatgttcttgacacggctgtaaa

SEQ ID NO: 87627 - DNA, 478 bp, Arabidopsis thaliana columbia
  unsure (1)..(478): unsure at all n locations
nnnnnnnnnnnnnnnnnnnnnnnnnnnnnnnnnnnnnnnnnnnnnnnnnnnnnnnnnnnnnnnnnnnnnnccacgcgtccgcggacgcgtgggctcatgtttggggtttccgagacgcctgtgctgaacaccatctgcagaagggacaaggtgttgctgggagggcgtttcagtctggaaatctatgcttctgtagagatgttactcggttctgcaaaaccgactacccattagtacactatgcacggatgttcaagttgacgagctgtttcgcggtctgcttaaagagcacatatacaggggatgatgagtacgttccttgaattctttcttcctccagccatcacagacaagagtgagcaagattgtctattgggttctctgcttcagacaatgaagcagcactattcgagtctcaaggttgtctctgaaactgaactctgtgaaaacaacatgtctcttgaagtcgtggaagctt

SEQ ID NO: 87628 - DNA, 1317 bp, Arabidopsis thaliana columbia
cgataagaagaagactggaatttttttgaggaggactctgctccatcgccgcccgccctgtaacccaccggactcagtaaactagtctgtaacacaatatcttctatttcagataagatttagcttggagaagagcaagttccgaaaatggaggggcgtcgtgtatagatccaccacccacagccctgatggaagcagacaacggaggccccaattctagtcatgcatccaaacaacgtctgcgttggacgcatgagctacatgaacgcttcgttgatgccgttgctcaacttggtggccctgatagagctacacccaaaggcgttcttagagtgatgggtgtacaaggcttaactatatatcatgtcaagagtcacttacaggaatatcgacttgcaaagtatcttccagattcgtcttctgaagggaaaaaaactgataagaaagaatctggagatatgctctctgggttggacggctcgtcgggaatgcagataactgaagccctcaagttgcagatggaagttcagaaacgattgcacgagcaactagaagtgcaaagacagctgcaactacggatagaagcacaaggaaagtacttgaagaagataattgaagagcaacaacgactcagtggagtactcggcgaaccctcagccccagtaacgggcgattcagatcctgcaacccctgccccaacatctgagtctcctcttcaagacaagtcttggcaaggactgtggaccagacaaaagtctctcagttgacgagtctctctcatcttgccgggagcctttaacaccagactcagggtgtaacattgggtctccagatgagagcacaggagaggagagattatcaaagaagcctcgattggtgagaggtgcagctggttatacacctgatattgtagtgggtcacccaatactagaatcaggcttgaacacttcttaccatcagtcagaccatgtcctcgcctttgaccagccatctacatcactgcttggggccgaagaacagttggataaggtttcaggagataatctttgagttgttgagtgtaccacatgtagtgttgtttatcctaatccttattagttaggagtttcctctaataatgtgatcacaagtcgttaattctctaggcactatcacgagcatgaagaatgaatatgtctgtgttgtgctgtaatttggtagacacaaaacaaaattactcttattcccaacaaaaaaaaaaaaaaaagggcggccgctctagaggatcccagcttacgtacgcgtgcatgcgacgtcatagttctctatagtgtcccc

SEQ ID NO: 87629 - DNA, 1322 bp, Arabidopsis thaliana columbia
ccacgcgtccgcggcgagaaacaacagagaatcggggaaaaatggcgtgtttcgcaaccaaacagcctctgttgttgtctctcctccttgccattggcttctttgtggtggctgcatctgccggaaacttctatgagagctttgatatcacttggggtaatggtcgtgccaacatattcgagaatggacagcttctcacttgtactcttgacaaggtctccggctcaggttttcaatccaagaaggagtacttgtttggtaagatcgacatgaagctcaagcttgtcgctggaaactctgctggcaccgtcaccgcctactacctatcgtcaaaaggcacggcatgggatgagattgacttcgagtttttgggaaatcgcacaggacatccttacactatccacaccaatgtgttcaccggaggtaaaggcgaccgtgagatgcagttccgtctctggttcgatcccactgcggatttccacacctacaccgtccactggaaccctgttaacatcatcttccttgtggatgggatcccaattcgggtgttcaagaacaacgagaaaaatggggtggcttaccctaagaaccagccgatgaggatatactcaagcctttgggaagccgatgactgggctacagaaggcggtcgcgtgaagatcgactggagcaacgcaccattcaaggcctcttacagaaacttcaacgaccaaagctcatgcagcaggacatcaagctcaaaatgggtgacttgcgagccaaacagcaactcgtggatgtggacgactctcaatcctgcccagtacggaaaaatgatgtgggtgcaacgagacttcatgatctacaactattgtaccgattttaagagattccctcaaggcctccccaaggagtgtaaactttgattctattatgggaattttcaagcatttttctttccgttttgtttcatcttgtgatgttactttgatttattttgttctttcttttggtgtttctgagatacgatattacatgtatacgtattcttcctgagaaaataagaagttgtattactcgataatacattttatctctcaatgtggtgtgattgtttattgggtttggcgtacaatgaaagctacatcaatgtgctttagaaaaatgcatacgaaaagaaaaacacaacaatcaaaaacccgtgaggtaactaaattatctccatttacaaatatactaacaatactactaatttattgctaagctgtcagctgtcacgaccatgataatgaaaaaaaaatcatctctgtttcttctaaacttagagtttctcgaatttcaca

SEQ ID NO: 87630 - DNA, 807 bp, Arabidopsis thaliana columbia
tgatctccaggtacataccactcacttagggaaagctcctacgcctgcaggtaccggtcccgaattcccgggtcgacccacgcgtccgcggcgaacggaaaagatgggtacttcggtgcaagtgactcctctctgcggagtttacaacgagaatcctctctcctacttagtctccattgatgggttcaacttcctcatcgactgtggttggaacgatctcttcgacacatcgctcctcgaacctctctccagggttgcttctactatagatgcagttttgctttctcatccagatacacttcacattggtgctcttccttatgctatgaagcagcttggactctccgctcctgtttatgctactgagcctgttcatagattaggtctccttacaatgtatgatcagtttttgtccaggaagcaagtatccgactttgatctgtttacactggatgacatagattctgctttccagaatgtgatcagattgacttactctcaaaattaccatctttctggaaagggagagggtattgtaattgctcctcatgttgctggacacatgctgggaggtagcatctggaggataacaaaggatggggaggatgttatatatgctgttgactacaatcatcggaaagaaaggcatttgaatggaactgttttacagtcttttgttcggcctgctgttctgataaccgatgcatatcatgctctttataccaatcaaaccgcaagacagcaaagggacaaagaatttctagataccatttcaaaacatcttgaagttggaggaaatgttctatt

SEQ ID NO: 87631 - DNA, 431 bp, Arabidopsis thaliana columbia
ccacccgtccggaaaagggaaagaaaaatctcacctttgatcctctctccctctatatatgctttatttattctccactcataatagtttcatcatctctttcggtctatgaaaaacattggaaaaaccctaattcctagtgttgcgaatcacttttcattgcagctttgaacttcagtctgtgaatttccaacagcaatgacaactccagcaaaaaaagagactgatgtgggatttcaagagactgcagaaagatcctcctgtgggaataagtggagctccacaagataacaatatcatgcattggaatgctctcatctttggacctgaggaccactccatgggatggaggtcctttcaagttgactcttcacttcaccgaggattatccgaacaaacccccgatggttcggtttgtttcacggatgttt

SEQ ID NO: 87632 - DNA, 746 bp, Arabidopsis thaliana columbia
atacgactcactatttggagagctggcacgcctgcaggtaccggtccggaattcccgggtcgacccacgcgtccgcccacgcgtccgaaaacattggaaaaaccctaattcctagtgttgcgaatcacttttcattgcagctttgaacttcagtctgtgaatttccaacagcaatgacaactccagcaaaaaagagactgatgtgggatttcaagagactgcagaaagatcctcctgtgggaataagtggagctccacaagataacaatatcatgcattggaatgctctcatctttggacctgaggacactccatgggatggaggtactttcaagttgactcttcacttcaccgaggattatccgaacaaacccccgattgttcggtttgtttcacggatgtttcatccaaacatttatgctgatggaagcatttgcttggatatcttgcaaaaccagtggagccccatctacgacgttgctgcagttctcacatcaattcagtctttgctctgtgacccaaaccctgactcaccagcgaacgcagaggctgcaaggttgttcagtgagaataaaagagaatataccaggaaagtaatcgagatcgtggagcagagctatgtataaatatgattcattttgttgtattgactaatgagtaattggatgttgaatagtatttattatctgccttgagtttaatttacatggatgtttaaacttcgccaatgagatttctgctatata

SEQ ID NO: 87633 - DNA, 626 bp, Arabidopsis thaliana columbia
ggtccacacacgcgtccggaataatccataatccgcgaggttggggagttgtgggaatcgggtgtgaaagaagttacgcttttagggcaaaatgtgaacagctataacgatgattcagctgatcgtgagtcaggtgctaactgggaatacagtgagggattctcgagccggtgtaaagttaaaaacatgggtttgcgatttgctgatctcttggaccgactctctgtagagtttccagagatgcggtttaggtttacatcgcctcatcctaaagattaccctgacgagttgctgtatttgatgagagatagacataatatctgcaatctcatccatcttcctgcacaatctggtaatagcagaatactagaacaaatgcgtagaggttacaccagagaagcttatttggatcttgttaaaaagattcggagtattataccagatgtggctataaccagcgactttataactggcttctgtggagaaactgaagaagagcatcaagaaaccctaagcttggtgagagcagttggatacgatatggcgtatatgtttgcatacagcatgagagaaaagacacatgctcatcgcaactacacagacgacgttccagaggatgtgaaaca

SEQ ID NO: 87634 - DNA, 715 bp, Arabidopsis thaliana columbia
ttctagatcgcgagcggccgcccttttttttttttttttttgcaggtcaatatatttttatttcatagaagttcgtatcagtcgatacatatcttaaagtaagacaaccaaaaaaaaaaaagacaacacactgattattgatccgacgtggactcatcatatcaccatgccaagatcatagatgtgttaaaattattctgcgtacttaacttagtgttaagtaaactagttaaaaacatgataagtcaaacccacaatgcaccagcccgcttaagcatgggaatcaaggatccgttaagatgtagactcatgacctcgttggctccaccgaccaactctccaccaatgaaaacgcccggaactgcggggctacacccgagccgcaacaacgcctgctcgatctccctccctctagatatctcatccagctcgtaaaccgctggatttgctccgaaatcgcagagcaaagtcttgatcgtgtgagacatacagcaagagctcttgctgtaaatcaccaccggtctctccatcaccatcttcgttatcatatccattgctattttatatggtatatgatccaacagcttcttaagtcgtttcttaaataggtctatgaatctatatttatgatctcttagtatatagatcgattttttttttgtagagatttaaggaaaagaagtactcttgattctacgtggagaataagggtatt

SEQ ID NO: 87635 - DNA, 571 bp, Arabidopsis thaliana columbia
  unsure (1)..(571): unsure at all n locations
ttccaaagganaaaggnttgnnaaaaannacccccnggncntnacctnaggggtaaaaaaacctnggttaaaacnttnaanaaggtaaaccccaaaattgancnaaacccntttaaagcattgggaaatnaagggacccgttaaaaantggaanacctcaattgaccccccgttggccccaaccgaccaactctccaccaatgaaaacgcccggaactgcggggctacacccgagccgcaacaacgcctgctcgatctccctccctctagatatctcatccagctcgtaaaccgctggatttgctccgaaatcgcagagcaaagtcttgatcgtgtgagacatacagcaagagctcttgctgtaaatcaccaccggtctctccatcaccatcttcgttatcatatccattgctattttatatggtatatgatccaacagcttcttaagtcgtttcttaaataggtctatgaatctatatttatgatctcttagtatatagatcgattttttttttgtagagatttaaggaaaagaagtactcttgattctacgtggagaataagggtattc

SEQ ID NO: 87636 - DNA, 536 bp, Arabidopsis thaliana columbia
  unsure (1)..(536): unsure at all n locations
ccccataacccgcantgttttattgagaatgngggngactccancctttatagaancattctaagccccagancaaagtaaatgngaaaatgaatggtgatgatggtgaaagtgaaagccnttattgggaggttttggttggagttggaggtgggattgtgttggccatngttgttgttattactgggcttagaggaccacaaaaagctatgagctcgacgatcttgttctctggtgttgttcctctgcgtgtgagatcggttttgactccagctaatccggctaccgatagagcttcaatggcgagttcctctggtgctaagtgggctcagaaaaccatcacgcttccaccgctacgtcgtggatgtcatcttattactccaaaggtttcatctttcgtgtgtagatgtttttgtttcaattcgaaacgattcttaattgactcaatttatgagcttttttggctgttcatttgattgggttcgtgaattcgatattgaaacagatattgaaagaaataagggaagacttgtcag

SEQ ID NO: 87637 - DNA, 997 bp, Arabidopsis thaliana columbia
  unsure (1)..(997): unsure at all n locations
tatacgactcatttagggaaagctggtacgcctgcaggtaccggtccggaattcccttgtcgacccacgcgtacgctcggctgcgagaagacgacagaagggtacggctgcgagaagacgacagaagggtacggctgcgagaagacgacagaagggtacggctgcgagaagacgacagaagggtacggctgcgagaagacgacagaagggtacggttgttagaagacgacagaaggatacggctgcgagaagaccacagaagggggccattggtgttgttattattgggcttagaggaacacaaaaagctatgagctccacgttcttgttctctggtgttgttcctctgcgtgtgagatcggttttgactccagctaatccggctaccgatagagcttcaatggcgagttcctctggtgctaagtgggctcagaaaaccatcacgcttccaccgctacgtcgcgggtggcctcttattcctccaaagatattgaaggaattaggggaancctntccngtttcaattgnggtcttgcncatgccttcttaccaccncacaagtgcntctctgacaatcaatggggatttatgannccagatgttcaggctgatactgagactttcttgaaccaggattgtccctgaggggaattcagcgccttggaggcatactatggaaggtccctgatgaccatgccagctcatatcaagtcatcaatgtttggatgtcaactcacaatcccaataacaaaaggaaaactcagcatgggaacttggcagggaatatggctctgtgaacaccgtgatgctccaacagcacgcagagttgtggtcactctcaatggaatctagagatgtctcttcacgttagatggcttgtaacctcgtaatgttttaatagatttttacagtcttgtaatgaaatttgactttctatatgagaccactttgtccacattttggtgtttattgcatcagaaaaatccatatttacagc

SEQ ID NO: 87638 - DNA, 929 bp, Arabidopsis thaliana columbia
  unsure (1)..(929): unsure at all n locations
cnnnnnnnnnnnnnnnnnnntatacgactcatatagggaaagctggtacgcctgcaggtaccggtccggaatccccgcgtcggcccacgcgtccgtacggctgcgagaagcgacagaaggggggagttggaggtgggattgtgttggccattgttgttgttattattgggcttagaggaacacaaaaagctatgagctcgacgttcttgttctctggtgttgttcctctgcgtgtgagatcggttttgactccagctaatccggctaccgatagagcttcaatggcgagttcctctggtgctaagtgggctcagaaaaccatcacgcttccaccgctacgtcgtggatgtcatcttattactccaaagatattgaaagaaataagggaagacttgtcagatttcaattgtggtcttgctcatgtcttcttacaacacacaagtgcttctctgacaatcaatgagaattatgatccagatgttcaggctgatactgagactttcttgaacaggattgttcctgaggggaattcagcgccttggaggcatactatggaaggtcctgatgacatgccagctcattatcaagtcatcaatgtttggatgtcaactcacaatcccaataacaaaaggaaaactcagcatgggaacttgccagggtatatggctctgtgaacaccgtgatgctccaacagcacgcagagttgtggtcgctctcaatggaatctagagatgtctcttcacgttagatggcttgtaacctcgtaatgttttaatagatttttacagtcttgtaatgaaatttgactttctatatgaaaccactttgtcccaaaaaaaaaaaaaaagagaaaaccaaaaagcggccgctctagaggatccaagcttacgtacgcgtgcatgcgacgtcataaaactctataggtgtcc

SEQ ID NO: 87639 - DNA, 2202 bp, Arabidopsis thaliana columbia
  unsure (1)..(2202): unsure at all n locations
atgatcttnnnnnnnnnnnnnnnnnnnnnnnnnnnnnnnnnnnnnnnnnnnnnnnnnnnnnnnnnnnnnnnnnnnnnnnnnnnccacgcgtccgctctaacacaatgtgtgggattctcgctgttcttggttgcatcgacaactctcaagctaaacgttctcgtatcatcgaactctctcgcagattgaggcacagaggtcctgattggagtggactccattgttatgaagattgttatcttgcccatgagcgtttagccatcattgaccctacttcaggagaccaacctctctataacgaagacaagaccgtcgctgtcactgtaaatggagagatatacaaccacaagattttgcgtgaaaagcttaagtctcatcagttccgtactggtagtgactgtgaagtgattgcacatctttacgaagaacatggagaggaatttatcgacatgttggatggaatgttcgcgtttgtccttcttgatactcgcgacaaaagttttattgctgcaagggacgctattggtatcactccactttacattggatggggtcttgatggttctgtctggtttgcttcggagatgaaagcgcttagtgatgattgtgaacagtttatgtcttttcctcctggccacatctactcaagtaaacaaggagggcttaggaggtggtacaatcctccgtggtacaatgagcaggttccttcaaccccatatgatcctttagttctgcgcaatgctttcgagaaggctgtaataaagagacttatgactgatgtgccttttggagttctcctatctggaggattggactcgtctctcgttgctgcagtagcattacgccatttggaaaaatcagaagctgctcgtcaatggggttcacaattgcacacgttttgcatcggtttgcagggatcgccagatcttaaagctggcagagaagttgctgactatcttggaacacgccaccacgagtttcagtttacagttcaggacgggatagacgcgatagaggaagtcatttaccatattgagacttatgacgttactacaataagagctagcaccccaatgtttcttatgtccagaaaaattaaatctttaggtgtaaagatggttctttctggggaaggttctgatgaaatactggggggatacttgtacttccataaggctcccaacaagaaagaatttcatgaagaaacatgccgaaagatcaaagctctccaccaatttgattgtttgagagctaacaaatcaacttctgcgtggggtgtcgaagctcgtgtgcctttcctagataaagaatttttaaatgttgcaatgagcatcgatccagagtggaagttgatcaagcctgatctcggaaggatcgagaagtgggtgctacgcaatgcctttgatgatgaagaacgaccttatctaccaaagcacattctatatagacagaaagaacagtttagtgatggagttgggtatagctggatagatggtctgaaagatcatgcaaataaacatgtctctgatactatgctgtcaaacgcaagctttttcttcccggataacacacctctgacaaaagaagcgtactactacagaaccatcttcgagaagttcttcccgaagagtgctgctagagcgactgtaccaggaggtccaagtatagcttgcagtaccgcgaaagctgtagaatgggatgcaacttggtcaaagaatcttgatccgtcaggccgtgcggctcttggagttcatgttgcagcttatgaagaggataaagcagctgctgctgctaaggctggatcggatttagtagatcctcttcctaagaatggaacataagagaacaacactacaggcattgaggatataagcaaatgttttattcttctacacagagagatcgttatcttctagagggatcaatgaataaaagcttcgtccatttctagctggagattccatggatctccagttagtgcaagtgatacacgttgtctacatttgtacctaagtttctgcattttttgtcgttcttttgtgttagacaagtcttggaccctagatgatacttcagtttcttagacgttaaatttgatgaatccgaacttgtttgaaaaaaacaaaaaaagagggcggccgctctagaggatccaagcttacgtacgcgtgcatgcgacgtcatagtctatctatagtgcnn

SEQ ID NO: 87640 - DNA, 396 bp, Arabidopsis thaliana columbia
attgctcgaattgctctggtgaaacctgagaaagctagaggtgtggaggatgttattttgagggctgctcagatgggacagatagttgagaaggtttctgaggaacggcttataacactgttggaacaaataaacagccaaactaccaagcaaacgaaagtcacggtaagtaccaacggcgccgtggggtggacgacgattaggaaggaagaagaatattatgatgtgctttgtatatctatggagatctcactgttatgttagtgagttcacttaagatctacttaaatgtttctgttcaatatgtttattgtgagtgaatcttgattatcttccaaacacttgggatgagattaaagcaatctgaaactgaagctctacatttttatttttgac

SEQ ID NO: 87641 - DNA, 553 bp, Arabidopsis thaliana columbia
  unsure (1)..(553): unsure at all n locations
gcctgcaggtaccggnccggaattcccgggaatacccacgcgtcctaacatctccccttttagagaagagagctgtgttggtttttgaggtaaaagaagagacccaatttcgatttggaggatagagacgaagaagaagacagctccgatggctgatcctgaactagaagctattagacagaggagaatgcaagagctcatggctcgacaaggcatgcagggtaagcagggcaatcagcagaatccagagcaagagaaacagcaggaagatgctaaaagggaagctgatgaacgtaggcaaatgatgcttagtcaagtattgtcttctcaagcccgagagagaattgctcgaattgctctggtgaaacctgagaaagctagaggtgtggaggatgttattttgagggctgctcagatgggacagatagttgagaaggtttctgaggaacggcttataacactgtttggaccaaataaacagccaaactttcccagaaaaccggaagtcnacgtncccaccggggccnttggggttngccgccggtttnggngg

SEQ ID NO: 87642 - DNA, 511 bp, Arabidopsis thaliana columbia
atgatacttcagctccctacgactcacttagggaaagctgctacgcctgcaggtaccggtccggaattcccgggtcgacccacgcgtccgcccacgcgtccgatcaagcttcacctaattagtgtattcccccaaatttctcaattctcactaatggctttggtcagcttacttgaaatctccattgctttcttttgtttccttatctttcgaattttcctgatcagcaagaaaccacaccgttcatttctcacaaactggccgctcctgggcatgcttccgggtttacttaccgtgctccctcgagtttacgactttataaccgaggttcttgaggacggcaacttaaactatcttttcataggcccttttttagggggcatcgacatgttgttcaccgttgatcctgctaatatccatcacatcatgagctcaaactttgcgaattacccgaaaggaaccgaattcaagaagttatttgacgttttgggagatgggattttcaacgcgg

SEQ ID NO: 87643 - DNA, 580 bp, Arabidopsis thaliana columbia
cgaaaaccctaaaagcgaaaaggaggcgaaaatggtgcagcgtcttgtttaccggtcgcgacacagctacgccaccaaatcgaaccagcaccgtatcgtcaagactccaggaggtaaattggtgtatcaaaccacaaagaagagagctagtggccccaaatgtcctgttactggcaagcgtattcaaggaatccctcacttgaggccctctgagtacaagaggtcaagattatcaagaaacaggaggactgtaaaccgagcatacggtggagtcttgtctggttctgcagtcagggaaaggatcattcgggcattccttgtcgaagagcaaaagattgtgaagaaagtgttgaaactccaaaaggctaaggagaaagtagcccccaaggcttaagcttttatgttttattcttctctgtttttggagttttgggaatatggctatgttcaagtgataggacttggtgcagtcatgtgaggacatctatgttactcggccaatttttaaactttgtattctgttatcagttcttaactttttcgacaattctcgtctcctcagttttgggattgttggatt

SEQ ID NO: 87644 - DNA, 644 bp, Arabidopsis thaliana columbia
gttcaacacttttggtgggaacccggtttgttcagctggtggacttgcggttctaaacgttattgataaggagaaacgccaagaacattgtgctgaagttggttcacaccttatacaacgtttgaaagatgtgcagaaaagacatgatatcattggagacgtgagaggaagagggttaatggttgggattgagcttgtgagtgaccggaaagacaagacaccagccaaggctgaaacatctgtcttgtttgagcaacttagagaacttggcattctcgtcggaaaaggaggacttcatgggaacgttttcaggataaagccaccaatgtgtttcactaaagatgatgcagatttcttggtagatgcattggactattccatctccaggttgtgaacaaggatgaaacaaagccaacgagagtttttaaccatatgaaccgttttaatgtttccgcgtctttgtaacgaaaaccaagccaagtctcatctcctttgatttcagaataaataaataaaatttatttatttctcagtgttgctatgacataatccaaatacattagacaagcccaattatttttgttttctaaaaaaaaaaaaaaccaaggggcaaactctagaggatccaagcttacgtaggcgtg

SEQ ID NO: 87645 - DNA, 688 bp, Arabidopsis thaliana columbia
  unsure (1)..(688): unsure at all n locations
ggaagacgaagaagaagagcaatcgaagaaaagagggatttgtgtttgtttgttgttcttcgattgaaaatggtgaaatcgacgagtaaggatgctcaggatctatttcgatctcttcggtctgcttattctgctactccgactaatcttaagatcatcgacttgtatgtcgttttcgctgtcttcaccgctctgattcaggtggtttatatggctttggtgggatcatttccatttaactcgttcctatctggagttctctcttgtatcgggacagcagttcttgctgtttgcctccggattcaagtgaacaaagaaaacaaggaattcaaggatttagcacctgagagagcttttgctgattttgttctctgcaacttagtcctccatttggtgatcatcaacttcctcggatagaggtttcactctcctgtctacaagttgctttcatgctttaatgtactggagtttttaggtgtcacttggaatcaaaactctagtttgagatatttttgttgttgtcgaagtatcaaacttttattagtgtctctctcactcaataacagagtctcctgcagtaatggcctaatgggaaaaaaaaaaaaaaaaaaagggcggccgctctagaggatccaagcttacgtacgcgtgcatgcgacgtcannnnnnnnnnnnnnnnnnnnnnnnn

SEQ ID NO: 87646 - DNA, 384 bp, Arabidopsis thaliana columbia
atcggattcattgggtacagagaagcaagacctaagaagaggaagctgcagcagcagcagaacttgttcaccagtcgctatcttcttctcaaaacgagaacaatgtcttcaatgaaatccgtctcggctttggacaatgtagtggtgaagtcaccaaacgatcggaggttatacagagtgattgaattggagaatggattgtgtgctctgctcattcacgatccagatatttaccccgaaggctctgttccggatcaaattgatgaagatgacgaggacggtgaagaagaagatagtgacgggagctctgaagatgatgatgatgatgatgaagatgatgaggaagatggggaaggagatgaagaagatgaggatgaggatgaa

SEQ ID NO: 87647 - DNA, 583 bp, Arabidopsis thaliana columbia
cgactcactatatgggaaagctgggtacgcctgcaggtcccggcccggatttcccgggtcgaccaacgcgtccgccaacgcgtccgcccacgcgtccgcccacgcgtccgtacggctgcaagaggacacagaagggctttttagacaaaactagtggcagactgaaaaatgaacgcagcgcttgcaacaaccaccgccacaactcccgtactccgccgtgagacgcctcttcttcattattgttctctcacaacaaaatcgccggtttaccaaatcaacagagttagattcggatcttgcgtgcaaacagtcagcaagaaattcttgaaaatctcggcgagctctcagagcgcttcagcggcggtcaatgtcacggcggatgcttcgattccgaaagagatgaaggcgtgggtgtatagtgactacggcggagttgatgttctgaggctggagagtaacattgttgtgccggagattaaagaagatcaggttttgattaaagttgttgcggcggctcttaatcccgtcgatgctaagagacggcaagggaaatttaaagccactgattcgcctctcccgactg

SEQ ID NO: 87648 - DNA, 1057 bp, Arabidopsis thaliana columbia
atacgattcactatagggcaagctggtacgcctgcaggtaccggtccggaattcccgggtcgacccacgcgtccgcccacgcgtccgcccacgcgtccgcgctttcgatggtcgaaatcagttggtaaagaggaaactctgaaagttgtgttaaaaaaaaaactagaatcatggcggcgtcaatgacgaaacccatctcaataacttctctcggtttctattctgatcgaaagaacattgctttctctgattgcatttcgatttgttctggattcagacattcccgaccatcttgcctcgatttggtcacaaagtcaccgagtaataacagtcgtgttttacctgtcgttagtgcccaaatatcttctgattatattccagactcgaaattttacaaggtggaagcaattgtcagaccatggagaatccagcaagtttcatcggctttactgaaaatcgggattcgaggtgttactgtttctgatgtgagagggtttggtgcacaaggaggttctaccgagagacacggtggctctgagttctcggaagacaaatttgttgctaaagttaagatggaaatcgttgttaagaaagaccaagtggaatctgtaatcaacacaataattgaaggagcaaggacaggagagattggtgatggcaagatttttgttttgcctgtgtcagatgtcataagagttaggacaggtgagcgtggggagaaagcagagaagatgactggtgatatgctttcaccgtcttaggaacaaacagagctcaagaatggtttttttttttttcatttcggtctctagattctgcgaataataatgaatggagtctgtgtttggtttcatgttgaatcgatcaagatgtgtttttaactgtacatgaattatgcagaaacatctgtcctggttctcagacatcgaaactctgttcctaataaaagccgaagtccctgtttttattgtggtaaaaaaaaaaaaaaaaagggcggccgctctagaggatccaagcttacgtacgcgtgcatgcgaggtcatagctctagtatagt

SEQ ID NO: 87649 - DNA, 1183 bp, Arabidopsis thaliana columbia
  unsure (1)..(1183): unsure at all n locations
nnnnnnnnnnnnnnnnnnnnnnnnnnnnnnnnnnnnnnnnnnnnnnnnnnnnnnnnnnnnnnnnnnnccacgcgtccggggaatttcacacttgttgttaagccaccaaaaacaggaggttattctactgcagtcgttgattttagtagtccggaagaagcaaatgaagcatttgaaaatgttgaaggagacgtagctaaggatatatcgggtttgccacaaaaaaaggctgtgttgaagctgagttctggattagcagttagtttattcgttcgtaaaatggttcaagatgattctccgtgtgaaatctctacctccgagagagctcgtgcagaggagaacaatgtgagttctaagagacagaagacggaagatgaaactgaggagaccaaagaagcaactgtaaaccaaagagaggctgataagacaaagcttttccttcataaaatcccacacgatgttccatctcaagagttacatggagttcttaacggggatttcacactcgatgttaagccaccaaaaagaaaaggaggttactacaatgcagtcgttgattttaatagtccagaagaagcaaatgaagcatttgaaaatgtggaaggagacgtagttaaggataagacgggtttgccacaaaaaatggttgtattcaagctgagttctggatcaggagttagtttatatgttcgtaaaatggttcatgatgattctccgggtgaaatctctacaaccaagagagctccgacagaggagagccatatgagttctaagagacagaagacagaagatgaatctgaggagaccaaagaagcaaatgcaaagcaaagagaggctgataagacaaagctcctccttcataaaatccctctcaatgtcccgtctcaagagttaaaagtagttattaccgggcagttcacacttgaagttatgccacccaaaagaaaaggacgttattacaatgcagttgttacttttaatagtccagaagaagcaaataaagcatttgaaaaagttaaaggagaagcagttaaggagaaaggtggtttggcacaaaaaatggttgcgtttaagctgagttcaggatcaggagcttgtttatacgttcgtaaaatggttcaagatgaatctgaggagaccaaagaggcaaatgcaaaccattgtgaggatgatcatttaaaag

SEQ ID NO: 87650 - DNA, 699 bp, Arabidopsis thaliana columbia
tagggaacagctggtcgcctgcaggtaccggtccggaattcccgggtcgacccacgcgtccggagaaacgaacagttttgggtgattggaggtgtttcagctcatctctttgctctcttccaaggtctcctaaaggttttagccggtgttgagacaaacttcacagttacatctaaagcagcagatgatggtgaattctctgagctttacatcttcaaatggacatcactcttgatccctccaaccacactactcatcataaacgtaatcggagtcattgtgggaatatctgatgcgatcagtaacggatatgactcgtggggtcctcttttcggaagattgttctttgccttttgggtcatcctccatctatatcctttccttaaaggtctgcttgggaaacaagacagaatgcctacaatcattcttggctggtcgatccttctcgcctctatccttacgctttttttggggacaaatcaatccgtttgtggcgagaggcggtcctattctcgagattatggggcttggactgcctttgattgacctcaagagttgatatgatacgtaacaaatttttcacagaggtaataaagaggaaagggtccctcacacatttgttcgttactggggtaacaacccttgtagatggacaccaaagaaaagaaggattaaatatttaatggttttctcaaaaaa

SEQ ID NO: 87651 - DNA, 912 bp, Arabidopsis thaliana columbia
ggaagagatttgcagcaacagagcgttataaaaaggcgaagcaagagggaagacaacagataacaaattgtgaagaatgggaagcgaaggaagatcgattgcgaggaagccaaggtttttgtgtctccatggatttcgtacgagcggagagataatgaagatacagcttcataaatggcctaaatctgtaattgatagactcgatctcgtgtttctcgatgcaccttttccttgtcaaggcaaatctgatgtcgaaggcatctttgatcctccttattacgagtggtttcaattcaacaaggaattcaccgagtatacgaatttcgagaaatgtttggagtacctggaggatcgtatgatcaagcttggtcctttcgatggtctcattgggttttcccagggtgcaattttgtctgggggtttaccaggactgcaagctaagggaattgcatttcagaaagtaccaaagattaagtttgttataatcattggaggagctaagctcaaatccgccaaattggccgagaatgcatattcgtcttccttggaaactctctccctccactttttaggagagactgattttctgaaaccttacggaactcagctgatagaatcgtacaagaatccggtggttgtccatcatcccaaaggccatactgtcccgaggcttgatgagaaaagcttggagaaagttaccgcatttatcgataccttagagcatctggtgatggaggaagacaagaatggtgaagaaaatactagtaagccaacaaaatagataagcttaaaatgttatgtataacgaataattctttggataataatcgtgcaatgactgtaaataaatctggcaatgtttgcgaaaaaacaattattacaacacaaacaataatagacgattctttcgtt

SEQ ID NO: 87652 - DNA, 552 bp, Arabidopsis thaliana columbia
  unsure (1)..(552): unsure at all n locations
ctccgcccaagcgtcaacttttacattaagagaaaacacttgcaaaactaagtgctatctctcttcttcttccttctcctaacaacttatataccatgagtctcttcaacactgaaaacacatgggcctttgtctttggcttgctcggcaaccttatctcctttgccgtgttcctatctcctgtgccaacgttctataggatttggaagaagaagacaacagaagggtttcagtctattccttatgttgtggcgctcttcagtgcgacgctttggctttactatgcgacacagaagaaagatgtcttcctcctcgtaaccattaacgcctttggttgcttcatcgaaacccatctacatctctatgttccttgcctacggtcccaagccagctcggatgttgacagtgaagatgctacttcttatgaactttggagggttctgtgcggttctccttctttgccaatccttggtaaaagagccacagtgctaggttntcggggnnttttggttcntgttgggttnggggccccnaganaaaggggaaaaanna

SEQ ID NO: 87653 - DNA, 823 bp, Arabidopsis thaliana columbia
  unsure (1)..(823): unsure at all n locations
nnctactacgattcactatagggcaagctggtacgcctgcaggtaccggtccggaattcccggggggacccacgcgtccggctcttcagtgcgacgctttggctttactatgcgacacagaagaaagatgtcttcctcctcgtaaccattaacgcctttggttgcttcatcgaaaccatctacatctctatgttccttgcctacgctcccaagccagctcggatgttgacagtgaagatgctacttcttatgaactttggaggattctgtgcgattctccttctttgccaattcttggtaaaaggagccacacgtgctaagattatcggaggaatctgtgtcggattctctgtttgtgttttcgctgctcctctaagcataatcaggacggtaataaagacaagaagtgtggagtacatgccctttagcttatccttaacccttaccatcagggctgtcatatggctcctttatgggcttgctctcaaggacatctatgttgctttcccgaatgtgcttggttttgctctcggggcactccaaatgatactctacggttgtctacaaatactgtaaaacggcggcgcatctagggagngnaagaaggccgaagctgctaaggttanccggaggtgagcctcgntaatgttgaagctaaggcacagtttaatcccctgagccaatctcagtgggtnggcaagcgnncaaggtntncctcgggaataatncgaggggctttnggttnaangtggnnaaacccctanacattggaaagnaggccttttcccggngangtncatngattaaaaaccgtaatttggnt

SEQ ID NO: 87654 - DNA, 1333 bp, Arabidopsis thaliana columbia
  unsure (1)..(1333): unsure at all n locations
atnnnnnnnnnnnnnnnnnnnnnnnnnnnnnnnnnnnnnaatacttgaagtcatcagaatgctaaaaagtcgtgccaccacccgtccatttcagaaaaaacacttacaaagctgatatctttcttactacttcgaagaaatcttcttctcccttccaaaaaaacaatccctaaacccggaaccaaagatcgacattcatggctctcttcgacactcataacacatgggcctttgttttcggcttgctcggaaacctcatttcctttgctgttttcctctctcccgtgccaacgttctataggatttgtaagaagaaaaccacagaaggatttcaatctattccctatgtggtggcgctcttcagcgcgatgctttggctctactacgctactcagaagaaagatgtcttccttctcgtcaccatcaacagctttggttgcttcattgaaaccatatacatctccatctttgttgccttcgcatccaagaaagcccgaatgctaacggtgaagctcttgttgctaatgaactttggagggttctgtttgattctcctcctctgccaattcttggcaaaaggaaccacacgtgcgaagatcattggaggtatctgtgtcggattctctgtctgcgtttttgctgcgccgcttagcattatcagaacggtgataaagacgaaaagtgtggagtacatgccgtttagcttatccttgactcttaccatcagtgcggtcatatggctcctttatggtcttgctcttaaggatatctatgttgccttcccaaacgtgattgggtttgttctaggtgcacttcaaatgatactctatgtggtttacaaatactgcaaaacgccgtcggatttggttgagaaagaacttgaggctgcgaaattgccagaagtgagcatcgatatggtgaagttaggtacactcacatctcctgaaccagtagcgatcaccgtcgtccgatcggtgaacacatgtaactgtaacgatcgaaatgctgagattgaaaatggtcagggagttagaaacagtgctgcaactacttgagtttgcccaagaaaccctaataagaaacctatttgttgactattttgactttgtacccttcttgatatacctatcaatcaccattgtccacgtgtactagtttcgttgtagtaattttcaaagtttatcgaagtatgcgtattcgaggattaattaaatcgggaattacattttcctgagttaattttttctctttttcttttacttatgggacaatgtaatgaaactatctgttgcatataaaaaatttccaagttgccaagaaaatgagaattctc

SEQ ID NO: 87655 - DNA, 522 bp, Arabidopsis thaliana columbia
aggtcacatacgactcactatttggaaagctggcacgcctgcaggtaccggtccggaattcccgggtcgacccacgcgtccgcccacgcgtccgctcccgcccttggaaaacaggatccaagtggggttgaattatggaggatgagacgagatcaacgtcatcactttccgatatagctattagtattatcgacgaaggtcctctttctccattaccgacaacgtagtgaaagatgtgttgtatctcatatcaaacgcaacttacagctcatcggggaaaccactgattcttttggaatcagctgggtaggcgtcctgctgcatcttcagaatccctgatagcctcgcagaggtgaatccctaagcctattagccccaagttgtttccattggtccttatcattacggagaaaatcacctcccaatgattcagcagcacaagttccggtttctggagcttttcctagacagggcaacaaagaaaggaatggacgaaaacgtcttgtatgccgcagtaggtgc

SEQ ID NO: 87656 - DNA, 626 bp, Arabidopsis thaliana columbia
  unsure (1)..(626): unsure at all n locations
actctctctctggttcatctacagagttaataatcattaagcgaagaagatccctagaaagattgatcagagaaagtctcagctgaagcacgtttttggaaaacccagatttgacgggtactaagaagctgtggaggatctatatttgaaagaagagaacaaggatgcgtaggtggatctgttgtggggataaaaaaggagattcagatttatcatatgaagaggtgcatttgaaaagtccatggcaaaattctgaggcaaatcacaagaagcaaaaaccacaagctgttgtaaagcctgaggcgcagaaagaagctcttcccatcgaagttcctcccttgtctgtggatgaggttaaagaaaagactgacaattttggntctaagtctctgattggtgagggttcttatggaagggtatattatgcaactctaaatgntgggnaagcagttgctttgaaggaacctcgatgttgcaccctgaagctgaaaccaaacaccggggtttccttaaancagggtttccatgggtttcaaggctaaaaacatgnggctnntgattcacctggttngntatngtgttnntggaaacccccgggttcntgnttaatangtttcaacaatngg

SEQ ID NO: 87657 - DNA, 599 bp, Arabidopsis thaliana columbia
  unsure (1)..(599): unsure at all n locations
nnnnnnnnnnnnnnnnnnnnnnnnnnnnnnnnnnnnnnnnnnnnnnnnnnnnnnnnnnnnnnnnnnnnccacgcgtccgcggacgcgtgggcggacgcgtgggcggcgatggttacatcgctcaggctgaggccaaacttctccgcagccacgtcaccctcctcctcttcttccgccggaaatgtcaagtaccgacccgccgtaattctcccgggtttagggaataatacaggagactacaagaagctggaggtaacattgggtgaatacggtgttcctgctgtggttgcagctgtatcaaggcttgattggtttagaaatgcagccggtttggttgatccagcctactggcgtggcacgctccgccctcgtcctgttcttgattggtacttgaatagaattgatgaatgcagtccgtgaagccaatgagctagctcaaggtcaaggattgtgtttgattggacactcagctggaggatggcttgctcgagtttacatggaagaatacggaaactctgatatctccttgttggtgacacttgggacgcctaacttaccaccaccgagaggacttcccggggttattgatcaaacaaaag

SEQ ID NO: 87658 - DNA, 406 bp, Arabidopsis thaliana columbia
caaagtagaggatttaacaatggcgtctctttctctcagttctgctcatttctcttcaacttcttcttcatctcgctcctctatatccacttcatcgctttctccgtcgtcaacttctctccctctcttacaatcaccgatccgccgccgttaccgctccctccgccgccgtctctccttctccgtcattccccgtcggacttctcgctccttctccacttccaattctcagattaggtgttcgataaatgagccgttgaaggtgatgatttcgggtgcaccggcttcaggaaaaggcactcaatgtgagctcattgttcacaagtttggtttggtgcacatatcaacaggggatctattgagagcagaggtgtcatctgggacagatattggaaagagagcaaaa

SEQ ID NO: 87659 - DNA, 713 bp, Arabidopsis thaliana columbia
  unsure (1)..(713): unsure at all n locations
cacgcgtccgacaaaatcgagtcttatgcaccaagcttgagttatgctccagtgggagcaagaatcccagatagtgaaatcattgtggaaccaaagaaacaagagttgatttccaagttgaaaacaggaaaaacctttcttaggaaccaagaaccagagaaagcttatacagagttcaagatagctttggaacttgcccagagtctcaaagaccccaccgaagaaaagaaggctgcaagaggcctaggcgcctcgctgcagcgccaagggaagtatagggaagccatacagtatcactccatggttctagccatctcaaagagggaaagtgaagattctggaatcactgaagcatatggagctattgcagactgttataccgagctgggagatctcgagaaagctggaaaggttctatgatacgtacattgctcggttagagactgactgatccttccgcaatgttttttttctttgttgtctgtttatggttcatgtaaaatcacatagaatggatatccaaatccccttttattgaatgtaattcgcttgtctttcaatcccatggaaatacatactaaatcatccaactgcnnnnnnnnnnnnnnnnnnnnnnnnnnnnnnnnnnnnnnnnnnnnnnnnnnnnnnnnnnnnnnnnnnnnnnnnnnnnnnnnnnnnnnnnnnnnnnnnnnnnnnnnnnnnnnnnnnnnnnn

SEQ ID NO: 87660 - DNA, 403 bp, Arabidopsis thaliana columbia
cccacgcgtcagcttcttcttcttcttcttcaatggcgttgatacatggttcggttcctggtacgtctgcggttcgattggttttttcaacctcagcgtcaccgtcgagattttgtctcaatgttccggtggtgaagcagggttggaagaattcgtgccggagaagggttttaagagcaatggtgcaggaaacagttcaaggatctcctttggtttacgccagagaaatggagcgcctttctgctaaggaatcgctacttctcgctttgaaggatgctggaggctttgaggctttagttacagggaaaacaactaatatgcaaaggatcgatgttaatgagaggattacgagtctagagcggcttaatccaactccgagaccaaccacgtctccttgtttcga

SEQ ID NO: 87661 - DNA, 525 bp, Arabidopsis thaliana columbia
  unsure (1)..(525): unsure at all n locations
nnnnnnnnnnnnnnnnnnnnnnnnnnnnnnnnnnnnnnnnnnnnnnnnnnnnnnnnnnnnnnnnnnnnnnccacgcgtccgatggtcagctttgatcttctaaattgtttcatctttaccctcatattcctcatctcaactctctttctctttgttttattctataagaaaccaaacgatggatttgatgtacctccaagccctccttctcttcccatcattggtcatcttcatcttctcctctttgcttcaatccacaagtgttttcaaaaaatctcatccaaatacggaccttttctccatcttcgcattttccatgtccccattgttcttgtatcctctgcctcaacggcttacgatatcttcaagacaaacgacattaatgtctcttatcgtggtgatgttgcaatcgatgaatgcattgtgtttggttcttttggatatttccgagctccatgtgaagattactggaaattcatgagaaagctcatcatggccagggcactcggaccccaagcgctagag

SEQ ID NO: 87662 - DNA, 799 bp, Arabidopsis thaliana columbia
  unsure (1)..(799): unsure at all n locations
nnnnnnnnnnnnnnnnnnnnnnnnnnnnnnnnnnnnnnnnnnnnnnnnnnnnnnnnnnnnnnnnnnnnnnnnnnnnnccacgcgtccgggcgaacgaagcggcgattgcaccatgagagccaagtggaagaagaagcgtatgaggagactaaagaggaagcgccgaaagatgagacagcgatccaagtagtccattccataggacgtgtctcaaaatttctatcttatgtaatacctttctagtttcttgacttttaagcagcttcttgaatcagttttgaaccttttgtgttttttgcattttagtcttgaacaatcatctcagtctgtattttgaatttggttcactcctatatccactagatgcagttctggcaaaacagagatttggtttttgaatcttttaacagttaatctannnnaaaaaaaaaaaanaananaaaaaaaaaaaaaaaaaanaaaaaaaaaanaaaaaaaaaaaaaaaanaaaaaaanaaaaaaaaaaaaaaaaaaanaaaaaaaagggggggccgtttttaaggatccaagtttaactaccgcgggctgggaaagataaatttttttattgggggcccctaattaaatttctggggcgggtttttaaacgggnggggggggaaaaccctggggtgtacccatttattggcttgggaaaaacccccttttcgcaggggggtgaaaaaggaaagggcccgcaacatcccccttcccaaagtttgccaccttaatgggaaatgggaccccctcttacggggccattaacggggggtgggggggg

SEQ ID NO: 87663 - DNA, 922 bp, Arabidopsis thaliana columbia
  unsure (1)..(922): unsure at all n locations
gaaaaactggagctccaccgcggtggcggccgctctagaactagtggatcccccgttctgcattatttcgcggccgctggtgttgcaatggcttcactaactgagctatcattcaactggctcggtttcatcagtgctatgatatcaaacatttctttcacttaccgaagcatcttctccaagaaagccatgactgatatggacagtacaaatgtctacgcttacatctccatcatcgcactcttcgtctgcattcctcctgccatcatcgttgaaggtcctaaactacttaaccatggtttcgccgacgcgattgctaaagttggaatgactaaattcatctctgatctcttctgggttggaatgttttcccatctctcacaatcagctggctaccaataccttggagagggttgcaccgctgactcacgcggttggaaacgttctgaaacgtgtgttcgtgatcggtttctccatcgttatcttcggaaacaagatatcgtctcagccaggtataggaacaggaatagccattgctggaagttgcaatgtactctatcattaaggcccagatccgaagaagagaaccggccaaggaaagaaaagctttgaaaggcagctgaagacggcggtcgacagttgcataaacaagttttccgatggatatatatatatttatataataaataaccaaatgccatagtatgttgtattgtccatcaaccattgttttcgagtttttcccttctttgtttttttttgccttttgaaaagttaaatataaattttttattttgcttaaaaaaaaaaaaaaaaaaaaaaaaaaaanaaanannnnaacccaagggcgcgnnnnnnnnnnnnnnnnnnnnnnnnnnnnnnnnnnnnnnnnnnnnnnnnnnnnnnnnnnnnnnnnnnnnnn

SEQ ID NO: 87664 - DNA, 584 bp, Arabidopsis thaliana columbia
  unsure (1)..(584): unsure at all n locations
gacgcctgcaggtaccggtccggaattcccgtgttcgacccacgcgtccgcaaaactctgaatttcgatttcaatggagtcacgcgtgctgttacgcgccaccgcgaatgtcgttggaattccgaaattgagacgaccaatcggagcgatccaccgtcaattcagcactgcatcgtcttcctcgttctcggtcctccctatcggaggaatcggagagggagcgaatctgatctccggtcgtcagcttcgtccaattcttcttctcgattcgtcggcgatcaacggaggagagaaaagagaaattctcaaaccggttaaagccgccgctgctgaaggtggagataccgctggggatgctaaagttggattcctcgccaagtatccatcggctagtcactggattcttcttctttcatgtgggtacttctttgcaattgtgacttttcaaacaatcccttaacaaggaagggtctattaattaactttcccttaatcccccaattttttgtattcgggggataaaattttntttcgttgggnggttgtttnnntnctttnancaannttnggcccntgggggtttc

SEQ ID NO: 87665 - DNA, 931 bp, Arabidopsis thaliana columbia
  unsure (1)..(931): unsure at all n locations
aatcgactcctatagggaaagccggtacgcctgcaggtaccggtccggaattcccgggtcgacccacgcgtccggatgaaattgaccattaaccctaccataactccatacaccgcgagatactggattaaccaaatcgagatcatcgtagccgtccgatcaacaagtaccatctcttgaaatactcgaaatcctcataagtccgtccctctttgctctcactatcaaaactctgaatttcgatttcaatggagtcacgcgtgctgttacgcgccaccgcgaatgtcgttggaattccgaaattgagacgaccaatcggagcgatccaccgtcaattcagcactgcatcgtcttcctcgttctcggttaaaccaatcggaggaatcggagagggagcgaatctgatctccggtcgtcagcttcgtccaattcttcttctcgattcgtcggcgatcaacggaggagagaaaagagaaattctcataccggttaaagccgccgctgctgaaggtggagataccgctggngatgctaaagttggattcctcgccaagtatccatggctagtcactggattcttcttcttcatggtggacttcttgaatgtgattntcaacatccttaacaagaagatctataattacttcccttatccctattntgtatcggtgatacacttgttcgtgggagttggttactgcttgatcagctggtcccgtgggtcttcctaaacgtgccccgattgactcgaacctcctcaaggtattgataccagtcgcagtctgtcacgccttaggccatgtcactagcaatgtctctttcgctgcgggtgctggctcctcactacaccatcaagcacttgagccattcttcatgccgctggttctaattattatggacatccatcccatacactatggtggcttagctc

SEQ ID NO: 87666 - DNA, 1651 bp, Arabidopsis thaliana columbia
tacacgactactatagggaaagtggtacgcctgcccgtaccggtccggaattcccgggtcgacccacgcgtccgcactatcaaaactctgaatttcgatttcaatggagtcacgcgtgctgttacgcgccaccgcgaatgtcgttggaattccgaaattgagacgaccaatcggagcgatccaccgtcaattcagcactgcatcgtcttcctcgttctcggttaaaccaatcggaggaatcggagagggagcgaatctgatctccggtcgtcagcttcgtccaattcttcttctcgattcgtcggcgatcaacggaggagagaaaagagaaattctcaaaccggttaaagccgccgctgctgaaggtggagataccgctggggatgctaaagttggattcctcgccaagtatccatggctagtcactggattcttcttcttcatgtggtacttcttgaatgtgattttcaacatccttaacaagaagatctataattacttcccttatccctattttgtatcggtgatacacttgttcgtgggagttgtttactgcttgatcagctggtccgtgggtcttcctaaacgtgccccgattgactcgaacctcctcaaggtattgataccagtcgcagtctgtcacgccttaggccatgtcactagcaatgtctctttcgctgcggttgctgtctccttcactcacaccatcaaagcacttgagccattcttcaatgcggctgcttctcaattcattatgggacaatccatccccataacactatggttgtctctagctcctgttgttcttggtgttgcaatggcttcactaactgagctatcattcaactggctcggtttcatcagtgctatgatatcaaacatttctttcacttaccgaagcatcttctccaagaaagccatgactgatatggacagtacaaatgtctacgcttacatctccatcatcgcactcttcgtctgcattcctcctgccatcatcgttgaaggtcctaaactacttaaccatggtttcgccgacgcgattgctaaagttggaatgactaaattcatctctgatctcttctgggttggaatgttttaccatctctacaatcagctggctaccaataccttggagagggttgcaccgctgactcacgcggttggaaacgttctgaaacgtgtgttcgtgatcggtttctccatcgttatcttcggaaacaagatatcgacacagacaggtataggaacaggaatagccattgctggagttgcaatgtactctatcattaaggccaagatcgaagaagagaaacggcaaggaaagaaagcatagaaagcagctgaagacggcggtcgacagttgcataaacaagttctccgatggatatatatatatctatataataaataaccaaatgcaatagtatgttgtattgtaccatcaaccattgttttcgagtttttcctttctttgttttttttttgctttctgaaaagttatatataaattttttattctgcttcttctctttttaatggagaacattttcatttccaattaaaaaaattcatgagggcgaccgctctagaggatccaagcttacgtacgcgtgcgtgcgacgtcatagctcttctatagtagttccta

SEQ ID NO: 87667 - DNA, 638 bp, Arabidopsis thaliana columbia
  unsure (1)..(638): unsure at all n locations
nnnnnnnnnnnnnnnnnnnnnnnnnnnnnnnnnnnnnnnnnnnnnnnnnnnnnnnnnnnnnnnnnnnccacgcgtccgaatttgcaacagatatgttgctgactgctgtaaactctgagacaaatctctcacagactgcatcaactgcagaaggaataaaaatggaggcaaaaagccagataactttgacaactgagtctctagggtctggaaactccgacattccctctcagcaggatctacaaacttctcgtgaagtttcagttatatcaatttctgaagctcagagactgatttctctgttctttgctttgtggaaaaagaaacctagtctccttcgacttgtctttgaagtttatgggagagctccaaaaatggtaaaccaggcttttcatcgacatatacctatcctaatacgagaattaggttcatcttatacggaactactccaaataatatccgcccctcctaagggaagggaaaatttattgacatatgtgtggcaatattgacacaaaaatgggcccttcttggatttgatggctactggaaacatcttattgaaacaaagctaaggaggttcaattcttatcccattgtttttcactcactaaaaaaaggtttgccatttttctccc

SEQ ID NO: 87668 - DNA, 519 bp, Arabidopsis thaliana columbia
  unsure (1)..(519): unsure at all n locations
aaccgggggccgggcaagtcgaaagatcattttgccggatttttactttatttttgacaactcaaccacacaccaatcaaagcctttatatatgtttggttatgaagaattgtgagaaatatttgggcaggatggcttcttggtgtcgaaaatgtatttacttgaagcctaagttggagaaattagcggcagaatataataaccggtaagctaacaaaagaatcaacaatttacatggatgttattgcaaaggttgattatattgtgaacaaaaatgatttttcttacaacagagcaaagttttactatgtggatgtaaacaaggtccctcaaaccttggtgaaaccgtggaaacatttcggtaaaatgcttaaacataattttgtccttcttttctgatgtgggatgtgccaaatctgnaccaattacttccatattcgtgtgtatgcagaaatgccnactatcngggatgctnccttcaccaatcaccancggatttgggtcctggacgcattgntc

SEQ ID NO: 87669 - DNA, 669 bp, Arabidopsis thaliana columbia
ctagatcatagatcgcgagcggccgctcgcgatctagacccacgcgtccgcccacgcgtccgcccacgcgtccgaaaaaataatggcagctttggcatcaaacccccaaatgctaactagacaagctcacggtaacaagaaggaacaattgtggaggaaagagagtttaaatttggagaagaagtgtgggttttgtgtgagcgtttacagtaatgaaaagcttgggaggtcacatatggagaaagagtggagactaaaagccttttggtcaaacatagctcagcctacgactttggagatggaacccattaacaacgttgaagaactcgatgctgttctctctcacgcacgccaactctctcagcctatcatcatcgaatggtaaacacaccaaaatcatatcttatccaatctccacaatccaaattagatttggttctctataggaaagctagtccagagcatggtcaacacttacggaaaaattaggttaactaaaaaatcatacaaaaatgcgttcaagttttttttttatcccggctccgattggtttgttgaactctcttttgttataatgatggatatcaaaggagttcaatattttttgtagttttcttgctaggttatatttttctcgcaagtcgcaagatcattttgccggatttttac

SEQ ID NO: 87670 - DNA, 912 bp, Arabidopsis thaliana columbia
  unsure (1)..(912): unsure at all n locations
aaaacttaaaaatatctcgtcacatatcttcatcgacaaaaaatttactgaaagcgaaaaaaataatggcagctttggcatcaaacccccaaatgctaactagacaagctcacggtaacaagaaggaacaattgtggaggaaagagagtttaaatttggagaagaagtgtgggttttgtgtgagcgtttacagtaatgaaaagcttgggaggtcacatatggagaaagagtggagactaaaagccttttggtcaaacatagctcagcctacgactttggagatggaacccattaacaacgttgaagaactcgatgctgttctctctcacgcacgccaagtctctcagcctatcatcatcgaatggatggcttcttggtgtcgaaaatgtatttacttgaagcctaagttggagaaattagcggcagaatataataacccgagcaaagttttacctatgtggatgtaaacaaggtccctcaaaccttggtgaaacgggggaaccatttcgaaaatgcccacttttcaggtatgggttctttccttggaatacatgcaactttattgttttgagtttcttccggtgcatttgacaatagggggtttgtgaaaagagtaaatgtccataataatgagagaaatgagtggtgaatgcagttatggaaggaagatgagatgaaagaggaggtgtttggaggtctcnaaggatggcttgtcatcaaagaagttagagaattgttcaccaaatttgtctaattctctcattttttttcatttccaaccctttttttcttttaaaaaaattaatatgtacagtcagttttcttattttctttctttatacaatttccaacttaaaaaaaaaaaaaaaaaaaaagggcgaacgctctagaggatcccagcttacggacgcg

SEQ ID NO: 87671 - DNA, 776 bp, Arabidopsis thaliana columbia
  unsure (1)..(776): unsure at all n locations
nnnnnnnnnnnnnnnnnnnnnnnnnnnnnnnnnnnnnnnnnnnnnnnnnnnnnnnnnnnnnnnnnnnnccacgcgtccgctagaggctatcaaaagaaaggattcaaggatcgattagacgaagaggttaatgttattctcaaagtagaagacactttgaatttggtgtctgctttgaatgaggaggttgagagtccgtgttttgaggaagattgtgtacaagtaattgaagtggaagaagaaaatcatgaagttgttgtggggagctgttttttgggaaatggagatggagactcagtgttggcatcagagacaatagattctcatgactctagtgtatggaaggtctactgggattcgttctatggacgacgttatttttacaattttaagacacaagagtcaaaatgggagccgccacttgggatggagcatctagcttatagcgatgaaagccacaacttgagtgaattggtcatagagaagcatcatgatgacttgtctggaactgtgcttggcgatgatgttccctttgacaagctgacatcttggtggagtttgtcaaagtcacttgaagcagacccacagaggaagttacagtttgattgtacataccaagaacttcctggggaatcaatctttggatttactagtctggggagagggaaccgtgcatattgtgcaattccgtagaaggctaagaaaagtctagagatctcggccaaaagaattcttatttctacccggactgaatgaaaggggtcctgaaatattct

SEQ ID NO: 87672 - DNA, 443 bp, Arabidopsis thaliana columbia
aaaccacgataaacgtcaaactttttctcattctctctctaaagctaaaatctttttcacactcttcttcatgttcaagcaatgggaaacctctgttctttgtttactccgccaaaacccgtgaagaaaagaaaacccatcacaaaaagacaatcttctatcggagcttcttcttccgggtcgggtcttaatagtaaccgttggaacaaccgggtcagatcatcttcttctagaagagacaacaagttcgaagatgctttgattcaagaacatgctcttgctgctgctgctgttttgttccgacagcaaaacggtggtggaggatcgttgccgtttgatcggtcggcttcacaacgttatcaaggttcttgttcgaagaagaaccagttgcctcgaagctcgagttcgaggtcaaggtcttctacagatcctctgttacaacc

SEQ ID NO: 87673 - DNA, 410 bp, Arabidopsis thaliana columbia
tacgactcactattgggagagctggcacgcctgcaggtaccggtccggaattcccgggtcgtacccacgcgtccggctttgcaaaaaatccagagcgatctttttttgaagtaaccattgaaccctaattttcttctctttcgatctcaccaatcttcgatttcgtgtttagattcctcaatcttggtacctcggagctcaaaaaaccctagagaaaccccatatttggttggcaggggaatggcttctgaacatatatcagggggtggagcttcaaagaccaagaaacattagtggagctcaagccagaaccgacccaaaccaatgggagtttctagaccggaacgatccggtcctcttggatcttcttcgaactcggttgggtcggaagaccatcattacatggtgga

SEQ ID NO: 87674 - DNA, 682 bp, Arabidopsis thaliana columbia
  unsure (1)..(682): unsure at all n locations
nnnnnnnnnnnnnnnnnnnnnnnnnnnnnnnnnnnnnnnnnnnnnnnnnnnnnnnnnnnnnnnnnnnnnnnnnnnnnnnnnnnnnnnnnnnnnnncggccgcggattttggaagcggaaaggagaagagcgaatgcgagattgactcgggtgtttggtgctgctagttctgtgcggagtcaaaaggaagctgagagaaggaaaatgaaggaccgtttagaagagcggcttcaaagggcaaagaagctgaaagcgcaatatatgaggcgaaggagaggtatggatagttgttcatcttcaagatcagaaacaatgcgaaagaaccaagtgcatcttgttaggatgttagtaagatgctggaggagatttgctaaatacaagaaatctacttttgtcgtggctagagcatatcatgagttggggatcaatgaaaaatccattgagtcagtaccatttgagcagtttgccattcaaatgaactcagtttctgtaattcagacggtcaaagcattgcttgatcgcttggagatccgactcactctatctaaggcatccaatgtggagaacattaatcatcttcttaagcacatctttccgcctgttcgaagagggaaatcacccagtcccatgagtaaaggcgagcaaaattcacccaattccaagatgggatatcaaaaacttat

SEQ ID NO: 87675 - DNA, 461 bp, Arabidopsis thaliana columbia
gcgtttcttcaccaaccctacacgaactctgatagatagaaaccttctccttcttctgcttcttttatcatcggagaattcgaatcttcttttcctctttttgagattctctaattatccttttggaagagtttcgtgtgagagagaagcgtaatgggctgctttggttgttgtggtggtggtgaggatttccgtagagtttctgaaactggaccaaagccagtgcataacactggaggttacaatggaggtcaccatcaaagggcagatccacccaaaaaccttccagtcattcagatgcagcctatctctgttgcggccattccagctgatgaattgagggatataacggataactatggttcaaagtccttgattggtgagggttcatatggaagagtcttttatggtattcttaaaagcgagaaagcagctgccattaagaaactggattctagtat

SEQ ID NO: 87676 - DNA, 1606 bp, Arabidopsis thaliana columbia
  unsure (1)..(1606): unsure at all n locations
cacttgacctcctcttggaacgcggctatgtctcttgtgcgtccgatctatcctttcttggccagaagcaagagatggtttccggttcgaaccggattaaaatcggtttgcttaacaacgaccagagccgaaacaagcggtgttgacagagaggagaaagtagtgattgttgggggcgggattggcggacttgccactgccgttgctcttcaccggcttggaatccggtcggtggtgttggagcaggcagagtcgcttcggacaggaggagcatcgctgacgctatccaagaatgggtggcgtgttcttgacgccatctccatcggacctcaactccgaaagcagtttcttgaaatgcaaggggtggtattgaagaaggaagatggaagagagcttcgttctttcaaatttaaagacaatgatcaaagccaagaagttcgggcggtggagaggcgagtactcttggaaacacttgcaagccagcttcctccacagaccattcggttttcttcaaaactggaaagtatacaaagcaatgatgccaatggtgacactctccttcaacttaaagatggaactcggttccttgcaaatattgttataggttgtgatggtatccggtctaaggttgcaacttggatggggttcagtgagccgaaatatgtcggttattgcgctttccgtggccttgggttctttccaaatggacagccatttcagcaaaaggtgaactacatattcggtagagggcttcgagctggatatgtacctgtatctgcaacaaaagtctactggttcatcactttcaacagcccttctctagggcctcaaatgatggatccagctatcctaagaaaagaagccaaggaactggttagtacctggccagacgatctgcaaaacctcattgatctaacacctgatgaagcaatcagtagaactcctcttgcggaccggtggctttggcctggcattgctccttcagcatcaaaaggtagggttgttcttgttggagatgcttggcacccaatgactccaaatcttggacaaggtgcttgctgtgccttggaagattcagttcttctggcaaataaacttgccagagcaataaatggagggaccgaatcagttgaaagggcgatggaatcatataggagtgagagatggtctcaggtattccggttgacagtacttgcaaacctagtcggaaaacttctgcaatcagacaatcctcttgtgtgttccgttagagacaatattgtcagtgcaatgggaaaatcctctcggaccaacgatggaacacacaaactttgagtgtgagcctctctatgtttcaatattgtctatgtaatgagatgtaaaagcatatgctccattggatagaggacttagacaatgtatcatcagaggaataatatcaaagaagataatataaactctgattgaatgtaaaagaataatacaatgtaattcgtttatgctatgaaagggaatgcctctagggctnnnnnnnnnnnnnnnnnnnnnnnnnnnnnnnnnnnnnnnnnnnnnnnnnnnnnnnnnnnnnnnnnnnnnnnnnnnnnnnnnnnnnnnnnnnnnnnnnnnn

SEQ ID NO: 87677 - DNA, 337 bp, Arabidopsis thaliana columbia
cggacgcgtgggttacgatcctcaataccacatagtcagaaatattaaaagaagctaagagatcaacaacaatggctgttggttcgatgaatgtcgaagaaggcactaaagcttttcctgcgaagctgacaggtcaagtctttctttgctgtgtcattgctgctgttggtggtctcatgtttggttacgacatcggaatctcaggaggtgtaacgagtatggacactttcttgttagattttttcccacacgtgtacgagaagaaacacagagtacacgaaaacaactactgcaaattcgatgaccagctcttgcagttgttcacttcctcactcta

SEQ ID NO: 87678 - DNA, 601 bp, Arabidopsis thaliana columbia
  unsure (1)..(601): unsure at all n locations
ccaatttcccggaagaaacccggtccaccgggaanaaccncaaaaattccccgcaacgggttnaaccccgnccgaaattcggtancnaaatggcnaacggatggcccncnaaaaaccccgggntttatgattntnaaatnatccttccccgtangggcctaccaaaaatccccccaaataacccgtgnaagtaataaccactctctagataaactttgccttcccnatttctctctctccgncngccagcagataagccatcgccgattgatcgtcagcttcgaaagcgggtcggtctttaagttcccgggtcaagactttacccgcttcttctcggatcttcccttttgggcccataggagcccaagcgtcaagaagatcaagcgaccactgtgagttcctgagcaagaaacttcccgtgttgagaccaatccaattcttctggtcataaaccatctcgttccaaccatgcatcaccaagttgtaatctttgtacctctcccatggaagctcgaacaccatgtccgtgaacatggcatcactatccatccaccatagaaactcaatctcaagatgtgacaagagtaacttcctaatcaac

SEQ ID NO: 87679 - DNA, 528 bp, Arabidopsis thaliana columbia
  unsure (1)..(528): unsure at all n locations
nnnnnnnnnnnnnnnnnnnnnnnnnnnnnnnnnnnnnnnnnnnnnnnnnnnnnnnnnnnnnnnnnnnnccacgcgtccggtttcagtgctttgtatttggccctaaaaaatctggaaagtctgcactcctcgattctttcttaggaaggaaattttcaaacagctataaggcaacaatgggtgaacgatatgcagcaaatgtcattgatcagcctgggggttctaagaaaaccctcatattgcgggaaataccagaggacagagttaaaaagtttctgacaaacaaggaatcgttggcagcatgtgatgttgctgtggttgtctatgacagttcggacgtatactcatggagaaaggcgagggaaatactgatggaggtagcaaggaggggagaagagagaggttacgggaccccttgtcttctggttgcggccaaagatgatttggatccatatccaatgtcagtgcaagagtctgatagggtttgcatggaattggggatagacatccctgtgtcattaagcatga

SEQ ID NO: 87680 - DNA, 562 bp, Arabidopsis thaliana columbia
agacaaaacaattttgagtctctctattctctattctctctcctctccgcctctctttctctctctctctatctccgtcgtcgcaagagtgcatcatctttaacgccgggaccttcccgctgctctcttctaccaattctctcttagatcttctcatgcgtcttcttcttatatcttaatccttcgtcgtacaagctcgccggattgagttttcgtcttccatggctattcctctcgggaagctcaccatcctcatcggtgcaggtcttgttgggtcagtacttgctaaagaagggagtttaccagatgtctcgagttttgtctccggtgctcttaagatggtatttaggcagctgaagcaagaagaacctgccaaatcagccagcaagccccgcaatgatacactaatggcccaggttaacagtcttaggcatgaattgagcttgctttcttcaaacagacctatcactattgttaccacagcaggatcaggtggtaaaaagtatggttacatcattataattggggtgataggctacggatatgtatggtggaagggctg

SEQ ID NO: 87681 - DNA, 942 bp, Arabidopsis thaliana columbia
  unsure (1)..(942): unsure at all n locations
nnnnnnnnnnnnnnnnnnnnnnnnnnnnnnnnnatgatttnnnnnnnnnnnnnnnnnnnnnnnnnnnnnnnnnnnccacgcgtccgcattttcttttcttaatccaaaaatttacaaatccttaatctttctcttcttcctaaaaacagctttgagctttctctcagataaccacattttacctaacaatggctacaatcatctcctgctccgctctttcctcgatccgagcatcttccgaatcggatccagcccgtaagaaacctgtttcgtcggtttcatggtgggctcctctttttggcatgtcatcggaacctgattacgtcaacaaaaccgtgaatctggaatcagatctggataaagctgaaaagaggtctctgcgatgttgtctcacggaggagaaggctaagcagctgcggaggaaaaccgccgaagcttctacattccacgacgttatgtaccattctgcgatcgcgtcgcgactcgcgtctgacgttcgggtcaagaagtaactggatcgggtcacggatccagaaataatcaataattcgtcgaacttaaaatgtctctcttttatgggatgaagaataactttttgtttacgatgatactcaagaaccgctttattgtgcggcgtcgttttctgtttgtacggtctggatcgtgtatgatgttgctttattgtgaaccgttggatcattagttagtttagctttttatttgttgtcagttgttaatgctttttttttttttcctcagttgttaatgctaactgttggatcggtagatatgttcaacacgtataaagattaaaatgttagtatacaaatataattacgattgcnnnnnnnnnnnnnnnnnnnnnnnnnnnnnnnnnnnnnnnnnnnnnnnnnnnnnnnnnnnnnnnnnnnnnnnnnnnnnnnnnnnnnnnnnnnnnnnnnn

SEQ ID NO: 87682 - DNA, 791 bp, Arabidopsis thaliana columbia
  unsure (1)..(791): unsure at all n locations
tctatacgactcacttagggaaagctggtacgcctgcaggtaccggtccggaattcccgggtcgacccacgcgtccgcttcgtcttctttctcagttctgttgtcaaattagggttttcgtttcaggggaaagagagagagagagagatgtggtttctgtgtgtcgtctatcacaggctattagacttcagaaagccagaagtggaagctttagctgaactcttcggagaagagattgcagagaatgagtctctccaatggcgtctacctgaaaatcaccataacgatactccattccatttcgttcaactttcatctgaagaaatcgctcgtaacattgctaaacgaagcatattggtgaaaggaatgtatgagctttggggtgaaggaacttgctatgaagagcttaaagactcgattcaaagctaccctgattctcgaaagcttccatttctcacttctgattcaacttttaaaatctctgttgaaccttttggaaaggctttaacttttgacgagcaaaaagatcgaatccagtcgtttacttatataccatttgaggggcggggtaacttgaagaacccagatcataacttttttcctatggaaatggttgaatctgaagagaacaagggacttcaacctattctacagagaaggatatttttgggaggaagggggggctccccngcangaccctttacaccacctccagtggactccgccctccctgtggcaccgtcttggtagccgatggggtgcctacggcggtcagccgaaccgcctccgaa

SEQ ID NO: 87683 - DNA, 539 bp, Arabidopsis thaliana columbia
  unsure (1)..(539): unsure at all n locations
acgcgcnnnnnnnnnnnnnnnnnnnnnnnnnnnnnnnnnnnnnnnnnnnnnnnnnnnnnnnnnnnnnnnnnnnnnnnccacgcgtccgcggacgcgtgggttcttctcctaccgaaaccctcataaaccctcctctctccctttctctccagattacaatttccatgacgattcttcgatctcgcgaaatcccatctgtctcacccaggccactccctaaagaatccgacactgagccgtcgactcccgctcgtacactagagcccgaacttcaccgctcgccggatgagaccgctcctgaattgggtcttgttgatgaacccactcacactacccggagacgtagtcttcgtcttgcacaccaatttgacggcgatgattgtgtcactgagaaagaggttagtgtggatgaaaagtttctgagtttgcgttcagggaagagagctgctaagagaggtgtcgattatggaattgaaattgagtctagcaagtttgattccgatttaaagttaggagaaagggcgaggaaaacaaagagg

SEQ ID NO: 87684 - DNA, 458 bp, Arabidopsis thaliana columbia
cggacgcgtggcgccgaaaccctaaatctcgacctcaaaccctgaaccatggctgaaggactcgtgttgaaaggcacaatgtgtgcccacactgatatggtcaccgccattgctacaccggtcgataactccgacgtgattgtaacttcgtcgcgtgacaaatcaatcatcctctggaaactcacaaaggaagacaagtcatacggtgttgctcagcggaggatgactggtcactctcacttcgttcaagacgttgttctctcctccgatggacaattcgctctctccggatcttgggacggtgagcttcgtctctgggatctcgctaccggagaatctactcgtcgtttcgttggtcacacgaaagatgttctctctgttgctttctctaccgataaccgtcagatcgtctctgcttctcgggatcgtacgattaaagcttggaacacgcttggtga

SEQ ID NO: 87685 - DNA, 562 bp, Arabidopsis thaliana columbia
aatccattattgattgaatcttcgagttaccaacaaaaaaaaaactctcctttatttcagttttcttttacaaaccataatcttctctttgattccatcttgtgaaccaccggcataagaaaatatgacaattgctttaacgatcggaggaaacgggttttcgggtctaccaggatcgtcgttttcatcatcatcttcgtcgtttcgattaaaaaacagcagaagaaagaacacgaagatgctcaacagatcaaaagtcgtttgttcttcttcatcttctgtaatggatccgtataagactcttaagatccgacccgattcatctgaatacggggtcaagaaagctttcaggcaactcgcttaaaaaggtttcatccctgatgttttttagggggagcaatttttgggggacagtttcaggcaattttacggggctttccggtattttgtttaaggaaatttaaaatccggttggaggggccgggggcattttagccgttcggtgtttccgccggggggttcccggtttattcccccacttcgcggcacgtggcaagattgg

SEQ ID NO: 87686 - DNA, 982 bp, Arabidopsis thaliana columbia
  unsure (1)..(982): unsure at all n locations
nnnnnnnnnnnnnnnnnnnnnnnnnnnnnnnnnnnnnnnnnnnnnnnnnnnnnnnnnnnnnnnnnnnnnnnnnnccacgcgtgcgcccacgcgtccgcggacgcgtgggtaaaatccattattgattgaatcttcgagttaccaacaaaaaaaaaactctcctttatttcagtcttcttttacaaatcataatcttctctttgattccatcttgtgaaccaccggcataagaaaatatgacaattgctttaacgatcggaggaaacgggttttcgggtctaccaggatcgtcgttttcttcatcatcttcgtcgtttcgattaaaaaacagcagaagaaagaacacgaagatgctcaacagatcaaaagtcgtttgttcttcttcatcttctgtaatggatccgtataagactcttaagatccgacccgattcatctgaatacgaggtcaagaaagctttcagacaactcgctaaaaagtatcatcctgatgtttgtagaggaagcaattgtggggtacagtttcagacaattaacgaagcttacgatattgtgttgaagcaaattaaaaatcagatggaagggacggaggaatttgagccgttcgatgtatacgacgagggattgaacggaatgaatgatccagattgcgacacgtgggaagaatggatgggatgggagggagcaggaacccgtgattactcctctcacgttaatccttacgcttgataaacgaatgatttcactaattaatttcgaaagaaatcatccaaatgtgtataaataacaatcagagagagactaaaagcacaacaatgtaaataagtgaaatttgtctcggataatgattgcttaaatgtgaataaagtaatctctcctttgtgtaaaaaaaaaaaaaaagnnnnnnnnnnnnnnnnnnnnnnnnnnnnnnnnnnnnnnnnnnnnnnnnnnnnnnnnnnnnnnnnnnnnnnnnnnnngaatcg

SEQ ID NO: 87687 - DNA, 455 bp, Arabidopsis thaliana columbia
agttttctttttcttaatcacagattcttcttttttatttttaatccatagaacaaaaaaaatataacctttaaattttctctcatttcttcatcttcctctccacaaaacccattttaatggcggacgttagaaaccctacaaaaaatcatcatggtcatcatcatcttcatgctctcttgatcccatatccatttcaagggcatgtaaacccatttgtacacttagccatcaagctcgcgtcacaggggatcaccgtcactttcgtcaacactcattacatccaccaccagatcacaaacggctccgatggagatattttcgctggagttaggtcagagtctggccttgacataaggtacgcgacggtttccgatggtttaccggtcggatttgaccggtcgttgaaccatgacacgtaccaatcgtcgctgttgcacgtgttctatgcgcat

SEQ ID NO: 87688 - DNA, 351 bp, Arabidopsis thaliana columbia
atataagcagccttgggtcttttccaaggtttttgttttagccatggctaaacctccgtcctttggctgctgcttcttcctcttattcttctccttcttatcttcttcctttgtctcatttgccctaaccgatacagaagctgccttcattgtgcagcgacaacttttaacgttaccagacaacgacgctcgagtctgagttcgatcataaggctcagatctctgaaccggagttagctgcggagcacgaggaagtgaaggagaacaagattactctgctagaggagcttcaagaaaagaccgaggaagatgaggagaacaagcctagtgtcatcgaaaagcttcaccgat

SEQ ID NO: 87689 - DNA, 642 bp, Arabidopsis thaliana columbia
  unsure (1)..(642): unsure at all n locations
ccccccctcgaggtcgactgtatcgataagcttgatatcgaattcgcggccgccaacgttcccgagcacgagacaccaacggtcgcaacagaggaatcaccagcgacgacaacagaggttacggatcgtggattgtttgatttcttggggaagaaggaagaggaagtgaaacctcaagagacaacgacgctcgagtctgagttcgatcataaggctcagatctctgaaccggagttagctgcggagcacgaggaagtgaaggagaacaagattactgctagaggagcttcaagaaaagaccgaggaagatgaggagaacaagcctagtgtcatcgaaaagcttcaccgatccaacagctcttcttcctcttcgagcgatgaagaaaggtgaggaaaagaaggagaagaagaagaagatcgttgaagggagaggnaggttaagaaaggnctagtgggngaagatcnngggagaagctcccaggncaccacggccangccagccngaggatgatgtcccagttccacttccatcccnggtccagtnncgnaaattttggtgggcattgccatnccgggganananaaaggttttttnnaantnttggggacttctggtncccgcgggaancanggttccagttt

SEQ ID NO: 87690 - DNA, 862 bp, Arabidopsis thaliana columbia
  unsure (1)..(862): unsure at all n locations
tttagggttcataaaccatccctgtgnttttcccttccatgtntggaagntgttgtaatactctctaagttcattcgtgtggatctatcaaaacntataaatcatattaacgttatgtntgtttacagtgtgcatccttctgaagctgccaatgagattcttgccactgccctaattggacagggcttttctctcctcggttgatctcacgtatttttcttatattctcttttcaaatcgctgtttctatcacacattgagtcatacatttgtttttctttgaattatgtatcaaagcatcactgttttactaaaaatgtattgaaacttattacaagtactaaaccaagagttgagaacaatgaggagtacaagaacaacgttcccgagcacgagacaccaacggtcgcaacagaggaatcaccagcgacgacaacagaggttacggatcgtggattgtttgatttcttggggaagaaggaagaggaatgtgaaacctcaagagacaacgacgctgaagattgaggcgatggtgaggaaggttatggctgaggacgaaggtgaagagatgagaaggaaagtgaagaagttgagagacacggcggagatgtcacttagtattcacggtggtggttcggcgcatgagtcgctttgcagagtcacgaaggagtgtcaacggtttttggaatgtgtcggggacttgggacgtggtgcttagtaatggttactgttttctagctctttagtggttgaatttacttgtcgtttcttaatgtgtatttttcattgtaatagaataatcgatgttttgtaatatattaatgtatttgatatttctcaactaatttccattgtaatattg

SEQ ID NO: 87691 - DNA, 1105 bp, Arabidopsis thaliana columbia
gggacgaaccggtgtaccacgatttggttcgtcactgtctggcctacccaaaagcggatggattcttggtgaatacatgggaagagatggagcccaaatcattaaaagtcccttcaagaccccgaaaactttttgggccgggtcgctcgtgtaccggttttatcccggtttgggtcccgttatgcagaccgatacaatcatccacgaccgatcacccggtttttgattggttaaacaaacaaccaaacgagtcggttctctacatttccttcgggagtggtggttctctaacggctcaacagttaaccgaattggcgtgggggctcgaggagagccagcaacggtttatatgggtggttcgaccgcccgttgacggctcgtcttgcagtgattatttctcggctaaaggcggtgtaaccaaagacaacacgccagagtatctaccagaaagggttcgtgactcgtactttgcgatagaggtttcatgatcccatcatgggcaccgcaagctgaaatcctagcccatccaggccgttggtgggtttttaacacatttggtggtttggagctccacgttggcaaaccgtccttttgccggcgttcccactgatagccttggccgcttttcgccgagcagaatatgaacgcggcgttgcttagcgatgaactgggaatctctgttagagtggatcctccaaaggaggcgatttctcggtcgaagattgaggcgatggtgaggaaggttatggcctgaggacgaaggtgaagagatgagaaggaaagtgaagaagttgagagacccggcggagatgtcacttagtattcacggtggtggttcggcgcatgagtcgctttgcagagtcacgaaggagtgtcaacggtttttggaatgtgtcggggacttgggacgtggtgcttagtaatggttactgttttctagctctttagtggttgaatttacttgtcgtttcttaatgtgtatttttcattgtaatagaataatcgatgttttgtaataaaaaaaaaaaaaaaaaaagggcggccgctctagaggatccaagcttacgtacgcgtgcatgcgacgtcagagctggtctataacgaa

SEQ ID NO: 87692 - DNA, 742 bp, Arabidopsis thaliana columbia
tcgcagtaccggtccggaattcccgggtcgacccacgcgtccgctctacatttatcaagcaagtgtatgcggttggagcttggaagatcggtgtgacatctctgcctccaacaggatgtcttcccgctgcaagaacccttttcggtttccatgaaaaaggctgtgtttcaagactcaacacagatgctcaaaactttaacaagaagcttaacgctgctgcttcaaagcttcagaagcaatattccgatcttaagattgttgtcttcgacatctactctccactttatgatcttgttcagaacccttccaaatccggattcacggaagcaaccaaaggatgttgtggaacaggaacagtcgagacaacttcactcttgtgcaacccgaaatcgtttgggacatgctccaatgctactcagtatgtgttctgggacagtgtgcatccttctgaagctgccaatgagattcttgccactgccctaattggacagggcttttctctcctcggttgatctcacgtatttttcttatattctcttttcaaatcgctgtttctatcacacattgagtcatacatttgtttttctttgaattatgtatcaaagcatcactgttttactaaaaatgtattgaaacttattacaagtactaaaccaaaaaaaaaaaaaaaaaaaaaaaaaaaaaaaaaaagggcggccgctttaaaggaacccagcttaaggaagggggcaagccacgtcaa

SEQ ID NO: 87693 - DNA, 1196 bp, Arabidopsis thaliana columbia
  unsure (1)..(1196): unsure at all n locations
accacgcgtcaaacattactcattcacaaaaccatcttaaagcaactacacaagtcttgaaattttctcatattttctatttactatataaacttttaatcaaatcaagattaactatggctgaggagtacaagaacaacgttcccgagcacgagacaccaacggtcgcaacagaggaatcaccagcgacgacaacagaggttacggatcgtggattgtttgatttcttggggaagaaggaagaggaagtgaaacctcaagagacaacgacgctcgagtctgagttcgatcataaggctcagatctctgaaccggagttagctgcggagcacgaggaagtgaaggagaacaagattactctgctagaggagcttcaagaaaagaccgaggaagatgaggagaacaagcctagtgtcatcgaaaagcttcaccgatccaacagctcttcttcctcttcgagcgatgaagaaggtgaggaaaagaaggagaagaagaagaagatcgttgaaggagaggaagataagaaaggactagtggagaagatcaaggagaagctcccaggacaccacgacaagacagcagaggatgatgtaccagtttccactaccatcccggtaccagtgtcggagagtgtggtggagcatgaccatcccgaggaagagaagaaaggattagttgagaagatcaaggagaagcttcctggtcaccacgacgagaaagcagaggattcaccagctgtcacgtccacgccgttggttgtaacggagcatccggtggagcctacgacggagcttccagtggaacatccggaggagaagaaggggattttggaaaagatcaaagagaagcttccaggttatcatgccaagaccactgaagaggaagtgaagaaagaaaaagagtctgatgattaagcaaaatggttaaagaatgaataatgatgtgggagtgggacattcgctgtgttttgtgatcattatctttctcttttaagttgttattgtggctttcgttgattgcatttgatcctttattttgtaatttcattctatcttttatataaagtttgcatatggtttatacttaaaaaaaaaaaaaaaaaaaaaaaaaaagcgaccgctctagaggatccaagcttacgtacgcgtgcatgcgacgtcttagtcttctaannnnnnnnnnnnnnnnnnnnncgc

SEQ ID NO: 87694 - DNA, 655 bp, Arabidopsis thaliana columbia
  unsure (1)..(655): unsure at all n locations
tccacccgttgcagactgcttctagcctctccaaagagcaatgtgaagctttgcacacatccatcaaagaggtaagactctaaacaccccaccaaaacagtacctctgtccttttttgttgtatttggaagtcagaaaaatgctcggagggcagcaactactttctctggccagtcttcttgaggcaaatgcccagcaccttcgatgagtcgaagcttaacattttgggggttctgtttctcaaattcctctgctatagactgaggcagatatttatcagctattccccaagccagaagcgtaggtttatcccagctgcctgatgaaaacccatttgcaatttgactcaatgtgtctccaaagttgatcttcttcgcagtctcgagcaaggcaaagccaggccctccgcttgacaaatatggtagacgatacacatcagctttctcattcttcaggacgtaggggctacctccttcaatgaaccgctcggccaagatagcattttggcaggtgaattcaccaaacaggggaatcctcagctgcttaaataatccgggaactgcggatgcaacggtcagcggactattaagcatcgcgagtttctcaaccaaacttgaaaatttcaaagcccaagttaaaccatatgaccctnccg

SEQ ID NO: 87695 - DNA, 1491 bp, Arabidopsis thaliana columbia
ggcgcgaatcgaaggggaaccggagagaccaaaaccctaatttcgccgacgagaaaaaccatgccggagcttccagaggtcgaggcggcgaggagagcaatagaagaaaattgtcttggaaagaagattaagcgagtcattatcgccgacgacaacaaagtgatccatggaatctcgccgtccgatttccagacctcaatcctcggaaaaaccatcatctctgctcgtagaaagggcaaaaacctctggctcgaattagattccccgccatttccttcttttcaattcggtatggctggtgctatttatatcaaaggcgttgcagttactaagtataagaggtctgctgtaaaggactcagaggagtggccatctaagtattcaaagttcttcgtcgagcttgatgatggtctggagctttcatttactgataagaggagatttgccaaagttcgacttctagcaaatcctacttctgtgagtccaatatcagagcttggtcctgatgcattgttggagcctatgacagttgatgaatttgcagaaagcttagctaaaaagaaaataaccataaaacctctcctacttgatcagggatatatttcaggtattgggaattggatcgctgatgaagtgctgtaccaagccagaatccacccgttgcagactgcttctagcctctccaaagagcaatgtgaagctttgcacacatccatcaaagaggtgatagaaaaagctgtggaagttgatgcagacagtagtcagtttcctagtaactggatttttcataatagggaaaagaagccaggaaaggcctttgttgatgggaagaagattgatttcattactgctggtggaaggacaacagcttatgttccagaactgcagaaactttatgggaaagacgcagagaaagcagccaaggttagaccggctaaacgaggtgtgaaacccaaagaagacgatggagatggggaagaagatgaacaagaaactgagaaagaagatgagagtgctaaatcgaagaaaggacagaaacccagaggtggtcgtggtaagaagcctgcatcgaagacaaaaacagaagagagcgacgatgatggagatgatagcgaggctgaagaagaagttgtgaaacccaaaggccgtggtacaaagcctgcaataaagaggaagtctgaagagaaagctactagccaagctggtaagaagccaaaaggaagaaaaagttgagaacctatgtttccaagatgatagtttttgtgggcagctaacagttatcccattttttttgtaagaaagtatgttggaaatgtgggatgcctacaaggctatgtgatattctactattattagttattttggctgttacaaggctttgtgattacctctgtccttttttgttgtatttggaagtcagaaaaatgctcggagggcagcaactactttctctggcctgtatacaaagttcaaaattcagagagtcttata

SEQ ID NO: 87696 - DNA, 461 bp, Arabidopsis thaliana columbia
tcgttacggagaaggagaaggagagagatccaccaccaccacatcaagagattgaagagactactccgttgctcgaaaattctcaaccggaaagtgaattgagatcgacgaccgcggcggcgaaggttcctgaggtggagattcatctgtataagtgtggaaaaggtccgatcgatgtgttcaagtcaaatctcggcggttatgagcaggatcagctcgaggttcgatctattcttgagaaatatggcttgaaagcaatcttcgctttcaacgttgagaaaggtcgtgctgttccgatcagatttcaccctaggaatggtcggtctgtgttgccttatagggatggtgccgtcatttacatcgacggtgaacctcaggattccctgctcaaacccatcaccagaatcattctcgggagttgtgattgttacgctcttaataacatttctattgaaagaccc

SEQ ID NO: 87697 - DNA, 512 bp, Arabidopsis thaliana columbia
ggctgctccccctgcaggtcccggcccggatttcccgggtctgacccacgcgtccgcggccgcttggccagtttcgtacccaaagaaaaacgcaaatcccaaattttccggaaatggaggaatattggaatcttatgttgaaagcgagagagattcttgttagtgaaagccatgaagaagtagcgatggccatcgatcatctctttaagcgtcaggactccgaagagtataaaacatcgcgtgcgctgtacgacatctgcgtttcttgtaacccaggttgcttaaccctaaagcttcttaaagtctatcaatcttcttccagtggcattctcagactccgatcaatctctcaactctcgtgagaccctcacctatctgaaaaatcaaatcgttttttccaaattctctctcgactctctctatgaaatcaaaccccttttgattttatgccttacattgcaagaacccaagaatcttgcttcagatccttaggaaaaacgggcttttggaac

SEQ ID NO: 87698 - DNA, 503 bp, Arabidopsis thaliana columbia
cggtcgcgtggggtccttttacttcctttttcagattctaagcaaacaaattgtgtcactaagcagccatcatggctagagtgatcctgtggtttcttgtttcctcgtatctttgtctcatcggtcatatgattgccgaggctgcaagagaaggtgcctccatgaggaaggaagcacactccagtgggattggaagagaaagtaagctcatgaggaatgaaaaacactccactgagattggaagagaaagtgcgtccatgaggaataaagcacgctcgagtgagattggaagagagagtaagctcatgaggaatgaagcacactccagtgagattggaaagagtatccgacacgtaaccggatttaagggtgaactcacagcatggtggctacggcggtggaggcccgggatatggtggtggtggatacggtccaggtggcggcggaggtggtggtgttgtaatcggttggtggatttggtggaggaccgagtatagttcagg

SEQ ID NO: 87699 - DNA, 3057 bp, Arabidopsis thaliana columbia
  unsure (1)..(3057): unsure at all n locations
agctannnnnnnnnnnnnnnnnnnnnnnnnnnnnnnnnnnnnnnnnnnnnnnnnnnnnnnnnnnnnnnnnnnccacgcgtccgcccacgcgtccgcccacgcgtccggtctgattgcggaaaaagcagagagagagagaaagttcgagcggaagagaagcggaaagctcgaggagtcatcaatggtgacggacgatagcaactcctctggacgaatcaagtctcatgtagatgatgatgatgatggtgaagaagaagaagatagactcgagggtttggaaaacagattaagtgagcttaaaaggaaaattcaaggagaaagagttaggtctattaaagagaaatttgaggctaatagaaagaaagtggatgctcatgtttctcccttttcatctgctgcatcgagccgagctaccgcagaggataatggaaatagcaatatgctttcttcgagaatgagaatgccactctgcaagttaaatggtttttctcatggtgtgggagatagagactatgttcctactaaggatgttatatcagcaagtgtcaagcttcctattgctgagagaataccgccatacactacctggatatttttggacagaaatcaaagaatggctgaagatcagtctgtggttggtcgaagacaaatctactatgaacaacatggtggtgagacgctaatatgcagcgatagtgaggaagaaccagaacctgaggaggaaaaacgtgaattttccgagggtgaagattccattatatggttaattgggcaggagtatggcatgggtgaggaagtgcaggatgccctttgccagttgctaagcgtagatgcttctgatatcctggaaagatacaatgagctcaagttgaaggataagcagaataccgaggaattttctaattccggattcaagctgggaatatctctggaaaagggccttggtgcagctctagattcttttgataatcttttctgccgccgttgcttggtatttgactgtcgtctgcatggatgttctcagcctttgattagtgctagtgaaaaacagccttattggtctgattatgaaggtgataggaaaccctgcagcaaacattgttacctccagctcaaggcggtcagagaagtaccagaaacatgcagtaattttgcatctaaagcagaagagaaagcttcagaagaggaatgcagcaaggctgtctcctctgatgttccccatgctgctgctagtggtgtcagtctgcaagttgagaagactgatattggtatcaagaatgtagattcatcctctggtgtagaacaagagcatggaattagaggaaagcgtgaggtcccaattctaaaagactccaatgatctgcctaatttatcgaacaagaaacagaagaccgcagcctcagatacaaaaatgtcatttgttaattctgtccctagcttagatcaggcattggatagcacaaagggtgatcaaggtggaacaactgacaataaagtaaacagagactcagaagctgatgcaaaagaagtaggtgagcctattccagacaattcggtccatgatggtggttcctcaatttgtcagccacaccatggtagtggaaacggagcaataatcattgcagaaatgtctgagacaagtcgaccatctacagagtggaatcctatcgagaaggatctttacttgaagggagtcgaaatctttggaagaaacagctgtcttattgcaagaaacctgctttctggcttgaagacatgcctagatgtgtccaattacatgcgtgaaaacgaagtttcagtttttcgaagatctagtaccccaaatttgctgttggatgatggcaggactgacccagggaatgataatgatgaggtgcctccaaggacaagattgttccgtagaaaaggcaaaacccggaagctaaaatactctacaaagtctgctggtcatccgtctgtctggaaaagaatagctggtggcaaaaaccagtcctgtaaacaatacacgccgtgtggatgcctgtcaatgtgcggaaaggattgcccttgtctaactaatgaaacttgctgcgagaaatattgcgggtgctcaaaaagctgtaaaaatcgtttccgaggatgtcattgtgcaaagagtcaatgcagaagtaggcagtgtccctgctttgctgctggcagagaatgtgatccagatgtttgcagaaattgctgggttagttgtggagatggttctctcggtgaagcaccaagacgcggagaagggcaatgcggaaacatgagacttctcctgaggcaacaacagaggatcctattgggaaagtctgatgttgctggatggggtgcttttctaaagaactcggtcagcaaaaatgaataccttggagaatacaccggtgaattgatctcacaccatgaggcggataagcgtgggaaaatatatgaccgggcaaattcgtccttcctctttgacttgaatgatcagtacgtcctcgatgctcaacgcaaaggtgacaagctgaaatttgccaatcactcagctaaacccaattgctacgctaaggtgatgtttgtagcaggagatcacagggtcgggatttttgcaaacgaacgaatagaagctagcgaagagcttttctatgactatagatatggaccagaccaagcaccagtgtgggctcgcaaacctgaaggctccaagaaagatgattcagccattactcatcgtagagccagaaagcaccaatctcattgatgattactggctaagagaagtaacttttataaaaataacttatagagttgtgagagatgatatttgaagtttgataacttaagcttgtctttattaattaattattatagagttgagattttattttattttgacatcgagtttggactttgtataggtgataaaacaatttatgaattattggggtcaataagtaaaaatgtatcatttcgaaaaaaaaaaaaaaaagnnnnnnnnnnnnnnnnnnnnnnnnnnnnnnnnnnnnnnnnnnnnnnnnnnnnnnnnnnnnnnnnnnnnnnnnntca

SEQ ID NO: 87700 - DNA, 376 bp, Arabidopsis thaliana columbia
ttcgatctgagtcaggatcaagtaatgcagatgaagtgttggttagcctaactggggatggggaggtagattctgttcaagatcttcaagcgcaggttctgtggttgaaggctgaactctgcaagttgcttgaggagaaacgatcagctctacttagagctgaagaattggagattgctctcatggagatagtaaaggaagacaatcggcgtcaattgagtgccaaggtcgaacagttagagcaagaaatggccgaagttcagagactcctctctgataagcaggaacaagaaggtgcaatgctacaggtcttgatgcgggtggagcaagaacagaaggtaacagaagatgcacgaatatttgctgagcaggatgc

SEQ ID NO: 87701 - DNA, 416 bp, Arabidopsis thaliana columbia
cccacgcgtccgcttcttcttcctctcggagcatcgctcactgtaaatctctttctatctctctcatttctatttattcgcgatcggtggtgatgatgaaaatgatgatcgagttcgttgtaattacagagaggaagattttcttccgatcaaatccgaaatggatttctaagaaacttccgtggattcgccaccgtaacttcgtcggaaccggccttagccaatctggaagcgaaatatgccgtagcgttgccagaatgttcaacagtagaggacgagatcacgaggatccgtcatgaattcgagttagcgaaacagaggtttcttaatatccctgaagctattaatagtatgccgaagatgaatcctcaagggatatatgtgaataagaatctgagattggataatatacaagt

SEQ ID NO: 87702 - DNA, 457 bp, Arabidopsis thaliana columbia
acctggacccctgcaggtaccggtccggaattcccgggtcgacccacgcgtccgatttcaatgacgtcatcatcttcttcatcaaaatccaaattctcaagtccactctcagaaaaaagctgactttctccaccaatcactatgacttcctctcgccggcttcttcttcctctcggagcatcgctcactagaggaagattttcttccgatcaaatccgaaataggatttctaagaaacttccgtggattccccaccgtaacttcgtcggaacccggccttaaccaatctggaagcgaaatatgccgtagcggtgccagaatgttcaacagtggaggacgagaacaccaagatccgtcatgaatttcgatttagcgaaacagaagtttcttaaatcccctggacctattaataggttgcccaaaaataaatccctcaagggatatatgggaaataaaa

SEQ ID NO: 87703 - DNA, 795 bp, Arabidopsis thaliana columbia
  unsure (1)..(795): unsure at all n locations
gcatctgccaaagcacccaactccacctgacttgtctgtgtctgttgcgttcactttcattggaatctcagattttttatttttttgtttgttttggttgttgcgagtttgtgactataaaacctctcccacttggttcttcactctcactgtttctcatctcttcggcttctccgcctccttcaatctcactccgatctctctacgattcattcgttctatggcttccattgctgcttctgcttctatttcccttcaagctcgtcctcgccaactggcgatcgcggctagtcaagttaaaagctttagcaatggaagaagaagcagtctttcttttaatctccgccagcttcctacccgcttgactgtttcctgcgctgcaaaacctgagacagtggacaaggtgtgtgcagttgtcggaaagcaactctcacttaaagaggctgacgaaattacngctgccaccaaatttgctgcacttggtgctgatncccttgatacggtggagattgtgatgggactagaggaagagttcgggattgaaatggcggaggagaaagcacagtcaatcgccacagttgagcaagcagctgcgctcattgaggagctcttgtttgaaaaggncaagtagaatatctttattacatttagcaaaaacggaaaaatccaaanccaaccactatcttattggttcgttanctaangcaatttngcctgttaaanttttangtatttggggaattttcaaggtgaccgnctttacntccccaaanattcttcgcctnacaaccctgc

SEQ ID NO: 87704 - DNA, 630 bp, Arabidopsis thaliana columbia
  unsure (1)..(630): unsure at all n locations
gntnactttggtntcttncncagncgccccgnactgggatgggctaccagttaaanctttgctttggaancagaacaatcttcttttaaacttcgccagctncnnccccggcttgcctgtttactncgctgcaaaccntgagccagtggacaaggtgtgtncagttgccagaaagcaactctcacttcaaagaggctgacgaaattacccctcccaccaaattttgcctccccttggctgctgatccccttgatccggtggagattgtgatgggacctaggggaagagtccgggattgaaatggcggaggagaaagccacagtctatcgcccacagttgagccaagcagctgcgctcattgaggagctcttgttggaaaaggccaagtagaatatctttattacattagcaaaaacgaaaaaaatcaaaacccaaaccactatcttattgtttcgttagctagagagcaattgtgtctgttgaaagattttatgttattttggggaaattattacaaggcttgtatctgacttttatctttcttctaaaacattttactttcagccttcatcaaactctcttacgaaacttatgtagtctcatttcctaaataaagatgtttttcccttt

SEQ ID NO: 87705 - DNA, 814 bp, Arabidopsis thaliana columbia
  unsure (1)..(814): unsure at all n locations
atgannnnnnnnnnnnnnnnnnnnnnnnnnnnnnnnnnnnnnnnnnnnnnnnnntgcactggcccgtctgcaagtaccggtcctttgtcttctccgcctcctccgatctcactccgatctctctacgattcattcttctatggcttccattgctacttctgcttctacttctctccaagctcgtcctcgtcaactggtgattggggctaaacaagttaaaagctttagctatggaagcagaagcaatctttcttttaatcttcgccagcttcctacccgcttgactgtttactgcgctgcaaaacctgagacagtggacaaggtgtgtgcagttgtcagaaagcaactctcactcaaagaggctgacgaaattaccgctgccaccaaatttgctgcacttggtgctgattcccttgatacggtggagatagttatgggattagaggaagagtttgggattgaaatggcggaggagaaagcacagtctatcgccacagttgagcaagcagctgcactcattgaggagctcttgtttgaaaaggccaagtagaaaatcctttactacattagcaaaaacgaaaaaaaccaaaacccaaaccactatcttcttattgtttggttagctagagagcaattgtgtccgttgagattttatgctattttcggataattattacaaggcttgtattttaatatttactttcgtctgaaacattttactttcacctttaaaatattagtactttgctgtcaaactctcttacgaaacttatgtaatatcatttcctaaataaagatgtttttccctnnnnnn

SEQ ID NO: 87706 - DNA, 702 bp, Arabidopsis thaliana columbia
  unsure (1)..(702): unsure at all n locations
ctttatgttgtcgacactctttcagttctctcgacgccgtccatcgccctccgtcatatcgccgccgctaaagtactggcagagagttcacaacaatggagtacgtaaaccctgaaggtcttcgattagatggtcgccgattcaacgagatgaggcaaatcgtagctgaagttggagttgtttctaaggctgacggttctgctgtcttcgagatgggtaataccaaagtaattgcagctgtttatggtccaagagagattcaaaacaagagccagcaaaagaagaacgaccatgcagtggtgttgtgtgagtatagtatggctcagtttagtactggtgatcgtagaagacagaaattcgacaggcgatcaacagagctatctcttgtcatccgtcagacaatggaagcttgcatattaaccgaattgatgcctcactctcagatcgatattttccttcaggttctacaagctgatggaggaacaagatcagcttgtatcaatgccgcgactctagctctagcagatgctggaattccaatgcgtgatctcgctgtttcctgtagtgctgggatatttaaacagtactcctctttcttgatctgaanctatnttgaagncaagtncttgnaggagcttgnttnnaacccgcnggnattnttncccaaanttnggccaaangggtcacnccccttnaaaatgg

SEQ ID NO: 87707 - DNA, 656 bp, Arabidopsis thaliana columbia
  unsure (1)..(656): unsure at all n locations
nnnnnnnnnnnnnnnnnnnnnnnnnnnnnnnnnnnnnnnnnnnnnnnnnnnnnnnnnnnnnnnnnnnnnnnnnnnccacgcgtccgcggacgcgtgggctcgaagacagcagaaccgtcagccttagaaatgggtaataccaaagtaattgcagctgtttatggtccaagagagattcaaaacaagagccagcaaaagaagaacgaccatgcagtggtgttgtgtgagtatagtatggctcagtttagtactggtgatcgtagaagacagaaattcgacaggcgatcaacagagctatctcttgtcatccgtcagacaatggaagcttgcatattaaccgaattgatgcctcactctcagatcgatattttccttcagggtctacaagctgatggaggaacaagatcagcttgtatcaatgccgcgactctagctctagcagatgctggaattccaatgcgtgatctccctgtttcctgtagggctggatattaaaacaggactcctcttcttgatctgaactatgttgaaaaccgggctggaagaactgatggaccccgcggtttccacctaaataaacaaagtgcccctcttaaaaggatgccaagttaccgagggaacatttgagacagggttggctttgcttttgaaggtgg

SEQ ID NO: 87708 - DNA, 846 bp, Arabidopsis thaliana columbia
accaggggaaagcaaaaatagtgaagcagagccgcaaaaacacttttcccaaaatcaacgaagatagattcagatcggaagcgaaagaacgattcggtctcctccacagatcgaacatcgaaggagaagaaagaccatcatcacaacaagcatcgaaagaagagcaagatggcgtcgagagaccaagttaaggcatcgcacattttgattaagcatcaaggttctcggaggaaagcgtcgtggaaggatccagaagggaagattattctgactaccactagagaagccgccgttgagcagcttaaatcgatccgtgaagatattgtctccggcaaggcgaatttcgaagaagtggcgactcgtgtttctgactgtagctctgctaaacgcggcggtgatcttggttcctttggtagaggtcaaatgcagaaaccatttgaggaagcaacttacgcactcaaggttggagatataagcgacattgtcgatacagacagtggagtccacatcattaagagaacagcttgaccttatctgatctgatagaaaatgtattgaaggtgcctgcttcgtttcccttctcttcttgaccagaagaacatagaagaagaagaataagaagaatttaattcaaggttattgttattgtggttttgattctgaatctgtctacgaatttgatacaactcaaacatatgataaaatcagacaagctatctcatttcttcttaaaggcttcataagcactccctgtcgtagacagtgacttgtataatcacatttcagtatctttgtcatggtcttactgcaacattctggcatcttgtgtgttgtaaaattgctctt

SEQ ID NO: 87709 - DNA, 1505 bp, Arabidopsis thaliana columbia
atcgaaaagatttttttttttttttaattacaaattaagaaagcaactccacccaaagttaattgcggataactgatatgacacagagagaggctctatgatataagtaagtaacacaagagagaattatcttcttcttccatttttattggaccaaaaagaagatagataacaaaaatagaaaaatctaaggtgtgggaagctctgcagctcatccatccatggcgacgacgattcccactacagctaccgcaactatgtgtccgtctcctcctgtccctacaatctctcccttactcagaacgactcaccaatgtcaaccatctccttctttatcatccccattttctataaagcttagtacggctctggtttgcggtgacactacagtggatagagtggttgatagctccgtgatgatcaaacctgagaaatggggaattcagtcagaaaagagaaggaagaggagaagaagaagaagagtaggttacgaacgtttggagcctgaagaagaggaaaatgctggcgtagaagcagaagcagagacaattagtgttcctgttgttggagcttcacgatctgggtttttgagtcgtttagaggaggttcagctttgcttgtacctcaaggaaggagcaaaacttgaaaatttgggaacaagtgttgaagagaatgaaatggtatcagttttgttagccagtggcagagggaagaagaagcgtagtgcaaatgaaatactatgccgtagaaaagaagcgagagaaaagattactcgttgttaccgtaggttggttgtttctattgcaacagggtaccaaggcaaaggtttgaatttgcaagaccttattcaggaaggaagcatagggctgcttcgtggagctgagagatttgatcccgaccgaggatacaaactatcaacttatgtctactggtggatcaaacaggccatcttaagggctatagcgcataaatctagacttgtcaaattgccgggaagcatgtgggagttaacggcaaaagttgcagaagctagtaatgtgttgaccagaaaactaagaaggcaaccaagctgtgaagagattgcagagcacctaaacctcaatgtatccgcggttagactagctgtggagcgtagcagatcccctgtttcgttggaccgagtcgcgtctcaaaatggccgcatgacattgcaggaaattgtacggggaccagatgaaacaaggccagaggagatggtgaaaagggaacacatgaagcatgagattgagcaactcttaggaagtcttaccgctagagaatctcgtgtattgggactttactttgggctcaacggagagactcctatgtcgtttgaagagataggtaagtcgctgaagctttcgagagagagggtgagacaaatcaatggcattgctttgaagaagctacggaatgtacataatgtgaatgatttgaaaatatactattcctctagtgaataaaaagcaaataaattggttcttcat

SEQ ID NO: 87710 - DNA, 353 bp, Arabidopsis thaliana columbia
aaggaccaaaacgcagcgttttcttccggagatcagtcggtcggaaagcggctacctttttgtctgcctagagaatttgttcgtttctttcttttactctcttcagacaaaacccacgagatacagaaaaagaggacaagagagaatcgtccatggaagaagacactggtatcgacgaagctaagacatacacggtggagaagagcgagaaagtggagccggagaaggacggactgagtcaattcagagacgaggaagaatcacttggtgcggatatggaagatttacatgatgagactgtgcgagaaaccctaggcaaggatcaggttcaaggtgttcgagaaaattcctct

SEQ ID NO: 87711 - DNA, 617 bp, Arabidopsis thaliana columbia
  unsure (1)..(617): unsure at all n locations
aaccatgagtttactcatgccaatatcacgttagcgcaagcagagctcggttataaacctgcggttgatcttgagacgggtttgaaaaagtttgtgaaatggtatatgggtttttacactggctcgaagaagaagagttcttggtgagctctgtctctctgcttaagtcatggtctctgtttccccttgttgagcttggagttcgctctaggttaagcttttgaaaccgagcacttgcattgccaggaaaaatcacttacgtatctgcattgtttctgtgttgctagattttgcttcatttatttgttagtagattttgagcaatgtacagcttcatcacttagatgtttcaattgtcgaaactcaattgtcttttccatcatgtcggaggaataaagtagcttggattttgatgcatatactctgtagtaattcaatctattgtcccttgtttcttgtgaattcaaacatatatttattcttattctgccccnnnnnnnnnnnnnnnnnnnnnnnnnnnnnnnnnnnnnnnnnnnnnnnnnnnnnnnnnnnnnnnnnnnnnnnnnnnnnnnnnnnnnnnnnnnnnnnnnnnnnnnnnnnnnnnnnnnnnnnnnnnn

SEQ ID NO: 87712 - DNA, 406 bp, Arabidopsis thaliana columbia
acccacacgttctggcacctaatagaaatacacctgaccaactgtcttatcactcgatttttcaagagacaatgcgttggaaggttcaggttgttgacgggggactttcagatatctacaacaacagtgttaatctacatgatcagcacgttaagttctctttggaccatagtacgggattcactatcgattgccgctcgtgctgagaagaaaagtggctatcttgcaattggttttggtaccgaaatgacaaacagttatgcttatattcggttggtttgatacatatggaacagggcatgtaaatacttactggatcgatggagaatccgcttccactgtgcatcctacaaccgaaaatatgacatacgtgagatgcaaatccgaagagggaatcatcacactg

SEQ ID NO: 87713 - DNA, 635 bp, Arabidopsis thaliana columbia
gggctcctcacaacatcaatctcacaggaaggaaagaaagaaagaaagacgagcccttttttctttctaaaaatagaaatatgtctctaaaagccattcatgtctcggaagtgccaagcctcgaccacttccctgagaacccgtcgctcatttgctcctctcgcaaagcgaataacaagtttgtggtggttggccatagaggacacggcatgaacatgtcgcagttgccggatctaaggttctctgctctcaaggagaactccatcctctcctttaatgccgcttcaaaattccctctcgactttatcgaattcgatgttcaggtcaccagagatggctgcccaatcatattccacgacgacttcatctactccgaggaacagggagtggtgtacgagaagagggtcacggaggtttgcttgtcggagttcatgtcctacgggccacagagggatacaggctagacaggaaagcctttgctgagaaagtcaaaggaagggaagatccataagtggagcgtcgcaaccgacgactctttctgtactctccaagagcgcttttgagaaagtagagaatccaaacctcggtttcaacatcgaactcaagcttgacgacaacgtcttctattcctccga

SEQ ID NO: 87714 - DNA, 390 bp, Arabidopsis thaliana columbia
gaccgaagaaaacacacaagactccattattctcctgcttcttcgtctcttcaattattttctctgagactagctttgattcaaccatggctaatgcagcatcaggaatggcagtccatgatgactgcaagctgaaatttatggaattgaagacgaaaaggacacaccgtttcatcatttacaagattgaggagctgcagaaacaagtgattgttgagaaaatcggtgaaccgggtcaaacccatgaggaccttgctgcaagtcttccagctgatgaatgccgctatgccattttcgatttttttcgtggcatggtctccggacacagcaagagtgagaagcaagatgatctatgcgagctccaaggacaggttcaagagagaactagac

SEQ ID NO: 87715 - DNA, 837 bp, Arabidopsis thaliana columbia
gttgaagcaaaaagagccatagtcgtcgataacatcattcactcttctctgcgcctccttctttcacccgaaattgtctctgacaccgttttgattcagccatggctaatgctgcgtcaggaacggcagtccatgatgactgcacgctaagatttctggaactgaaggcgaaaaggacacaccgtgtcattgtctacaagattgaggagaagcagaagcctgtgattgttgagaaagttggcgaacctattctaacttacgaggactttgcagcaagtcttccagctgacgaatgccgatacgccatttatgatttcgactttgtcactgcagagaattgccagaagagcaagattttcttcattgcatggtgtcccgacgtagcaaaggtgagaagcaagatgatctatgcgagctctaaggacaggttcaagcgtgaacttgatggaaggcaagtggagcttcaagcaactgatccaactgagatggatcttgatgttttgaaaagccgcgtcaactaaaagaaactctctttgaataagcttccgattatattcgactattatgaaatggtgttttctattctcttacagtctcttgtgactgttagatacacttgacacccttcattctatctgtctggtctgttctctgtgtctatgttaccttacagtgtctcatctatattcaaaattatcacaaggtttgtgctgtgtttgcttcctttgtttcaactctaccaaagcttaagattaagatttgggtaagatgattcttttaagcttccctttgttctctttgttacagagggtataaaaaatgcaaaaactattcacc

SEQ ID NO: 87716 - DNA, 797 bp, Arabidopsis thaliana columbia
  unsure (1)..(797): unsure at all n locations
cgccaacctctaattcgactcactatagggaaagctggtccgcctgcaggtgccggtccggattcccggggcgcccacgcgtccgtacggctgcnataagacgacagaaggggaggaaaaaaagagagaagacgcacaccgaagaaaacacacaagactccattattctcctgcttcttcgtctcttcaattattttctctgagactagctttgattcaaccatggctaatgcagcatcaggaatgggagtccatgatgactgcaagctgaaatttatggaattgaagacgaaaaggacacaccgtttcatcatttacaagattgaggatttttttcgtgacatggtctccggacacggcaagagtgagaagcaagatgatctatgcgagctccaaggacaggttcaagagagaactagacggaattcaggtcgagcttcaggcaaccgatccaaccgagatggatcttgatgttttcaaaagccgagccaattgatgaaagaaatcccctgaaaatttcggttgaatcaaactttttcgtactattactcagtgatgctttttcctaaagtttgctgtgacggtaccaacctgaacagcttcattttatcagtttggtctttgtctttgtctttggtctcctttttgggtccttatagtgttgtcttaaaacttaaggaatctggcctggggctccttacccttggggaagaaatccaaccccttattaaacaagaatccttttgggnnnnnnnnnnnnnnnnnnnnnnnnnnnnnnnnnnnnnnnnnnnnnnnnn

SEQ ID NO: 87717 - DNA, 900 bp, Arabidopsis thaliana columbia
acggataaaggcggaggaaaaaaaagagagaagacgcacaccgaagaaaacacacaagactccattattctcctgcttcttcgtctcttcaattattttctctgagactagctttgattcaaccatggctaatgcagcatcaggaatggcagtccatgatgactgcaagctgaaatttatggaattgaagacgaaaaggacacaccgtttcatcatttacaagattgaggagctgcagaaacaagtgattgttgagaaaatcggtgaaccgggtcaaacccatgaggaccttgctgcaagtcttccagctgatgaatgccgctatgccattttcgattttgattttgtcagttctgagggtgtcccaaggagcaggatttttttcgtggcatggtctccggacacagcaagagtgagaagcaagatgatctatgcgagctccaaggacaggttcaagagagaactagacggaattcaggtcgagcttcaggcaaccgatccaaccgagatggatcttgatgttttcaaaagccgagccaattgatgaaagaaatcccctgaaaatttcggttgaatcaaactttttcgtactattactcagtgatgctttttcctaaagtttgctgtgacggtaccaacctgaacagcttcattttatcagtttggtctttgtctttgtctttggtctcctttttgggtccttatagtgttgtcttaaaacttaaggaatctggcttgtgctctttaccattgtggaagaaatcgaaccctttattaaacaagaatcctattggcacaaaaaaaaaaaaaaaagaaaaaaaaaaaagcggccgctctagaggatccaagcttacgtacgcgtgcatgcgaggtcatagctcatctatagttcagttaaat

SEQ ID NO: 87718 - DNA, 536 bp, Arabidopsis thaliana columbia
  unsure (1)..(536): unsure at all n locations
nnnnnnnnnnnnnnnnnnnnnnnnnnnnnnnnnnnnnnnnnnnnnnnnnnnnnnnnnnnnnnnccacgcgtccggatatgtggaagattgggcagagaggagttccctatttccagagactcattgctgcgccgttcacgaccttgcggtccttgccaacttctttggtcgagacagggcagaaccgtgtcattgatgcttcgttaactctcatccgtgaaagggcaaaactcaaaggagagttagtgcgactcataggaggagcaaaagctacaacagctcttcttggagtaccacttggtcacaactcttcttttcttgaaggcccagccttggctcctcctcatgtaagggaagctatttggtgtggtagtacaaactccaccactgaagaagggaaggagctaaaagatccacgtgttctaagtgatgttggtgatattccggtacaagagattagagaaatgggggttgatgatgatagacttatgaaagtagtaagtgaatctgtgaagctggtgatggaagaggaacct

SEQ ID NO: 87719 - DNA, 839 bp, Arabidopsis thaliana columbia
  unsure (1)..(839): unsure at all n locations
nnnnnnnnnnnnnnnnnnnnnnnnnnnnnnnnnnnnnnnnnnnnnnnnnnnnnnnnnnnnnnnnnnnnnnnnnnnngccacgcgtccgacactctcaaattggctcatccattccaagcacgctccttcgatcttcctcttggtacgctcgtttctaattaaacatgtctaattcaaaggacgagaaatcacaagatgcagctgatagaatcaaggctgcaacactcgacgtgctgctaaaggtctaagccgtacacaagcggagagagcagcgggctgcagcagcgaagaaacgttaaacgctttatggccaagaaagaaagaagggtccgagtaagatgggcaggaggaaaagagaattaaagaggcagatgtattttgaatgagtactgagaaagctgtcaggcttgggtgaaaggaaagataaaacaatgtcagcttcagcccgtgggaagcagttgcttcgggggcttcacagtgtcaaaaatgttcccaagcgtggcattggacttatgagggtaagaatgaaggggttatatttcgagggcctcagaaacctagcacgttaaaaacctaaactgagaacaacgcctttgtgatgatcttgatgggggggaggatatgatgaaaaaaaaaggcctgatccactaatgggaaagcaaaagttgaaaccatctataaaaagaagcgaagctagggcaaggctgttctaaagggataggaacctttggttaaacacaagggggttattggagagagattaaaaacgtcatgcggctaaaggcaagggggggagaaaagcgcaaaaacaaaaaccacaccagaaaaaggcaaaggca

SEQ ID NO: 87720 - DNA, 876 bp, Arabidopsis thaliana columbia
  unsure (1)..(876): unsure at all n locations
acaagaacgcgatgatgtcagctctggtgtatgacgtggcagaagacagatgggctttcttgccggatatgggccgtgagcgagacgaatgcacagctattttccacgctggcaaattccatgtcatcggtggttactccacggaggaacaagggcaatttagtaaaactgctgaatcgttcgacgtcaccacatggcggtggagtccacaaggagaagagtttctctcttcggagatgactatgtggcctccgatttgtgctgccggtgaaaacggagatttatatgcttgttgtcgccgtgatctgatgatgatgaaagatgacacgtggtataaagttgggaatctacctgctgacgtgtgcaatgtatcttacgtggcgataaggaggtctggaaacctggttgtgatcggttcggctcggtacggcgaaccaagtgtagggtataattgggatatgagcaattctcgatggttaaaactggaaacacatgataaatatgaaggccacgttcaagctggttgcttcttggagatataaaaaaactttagaaaaggttccgaatcttttgtacgtcgtccttgcgaaatgacggtaaatttggtcggttgattttgtcaagtgtgactgtataaatattatattgttatagataaatttgttagcttgattgtaaaaaaattattgtcgagtgattttatagtttttaaacttatttttgaagttgttgtgtgatgttactaaagttagcgttagattttatacttaaaaaatttaatgttagtcctaaaaaaaaaaaaaaagnnnnnnnnnnnnnnnnnnnnnnnnnnnnnnnnnnnnnnnnnnnnnnnnnnnnnnnnnnnnnnnnnnnaac

SEQ ID NO: 87721 - DNA, 530 bp, Arabidopsis thaliana columbia
  unsure (1)..(530): unsure at all n locations
nnnnnnnnnnnnnnnnnnnnnnnnnnnnnnnnnnnnnnnnnnnnnnnnnnnnnnnnnnnnnnnnnnnnnnnnnnnnnnnnnnnccacgcgtgcgattactactcacacgaagcaaagaatcacccaaaccaatccaaatgatcaagacagtacacagagatcgaaacacaaaaccaaaccaatgtctctgcaaaagtttaagcttctcgcaactcattgcagcaccgtcgcagagagtccgacacgtagtccagtcatccacctccgccgtcgtaaaacgctgcgtttgttactcactcgatcatcagaccgatggagattaccggagatccaaaacaacgtagatgaatcgaagaaaacggataagagaggtaagatccgatctagccggaagcttggagatctttttgtttcgtcgccaccgtttgaggaaagtggcggtggcggcggcggagataaggggaccaagatggaggtggagatggagagggatgtaccggttaacggcgttagaataacgcaggttttgg

SEQ ID NO: 87722 - DNA, 519 bp, Arabidopsis thaliana columbia
  unsure (1)..(519): unsure at all n locations
nnnnnnnnnnnnnnnnnnnnnnnnnnnnnnnnnnnnnnnnnnnnnnnnnnnnnnnnnnnnnnnnnnnnnnnnnnnnnnnnnnnccacgcgtccgcccacgcgtccgtgttcatgttgggtcaagtagaagactgcctgcatctgttggtggaaagtaatcgaatacctgaagccgctctgatggcgagatcgtaccttccaagcaaggtctccgaaatagtggcattgtggagaaacgatttgaccaagataagtccaaaggctgctgaatctctggctgatcccgaagagtatcccaatctctttgaggagtggcaagtcgccctgtcccttgaaaatagagctgcagagacgaggggcgtccatcctcctgctggggattattgtagtcatgcagacagagatcatacaactttagtggatgcttttagaattatgcaaatagaggaagagggtcgacttgagcaaggggatgttctcgacgaggttggggaagagggggaagaggaaaggaaagga

SEQ ID NO: 87723 - DNA, 881 bp, Arabidopsis thaliana columbia
  unsure (1)..(881): unsure at all n locations
atacgactcacttagggaaagctggtacgcctgcaggtaccggtccggaattcccgggtcgacccacgcgtccccgaatcttgataatgtaaattcacaacaaatctgtttaaaaacaaccaatcaaaacccaacattgcttctcaacaaaaaagcaaagcaaaagattttgcgagagaaaaaaaagaaaatggatttgttcaagatccttcttcttgtgttcttcgtgaacataagtttctgcttcgctgcagatccatattctttctataacttcgaagtctcttacattactgcttctcctcttggtgtccctcaacaggtcattgctataaatggaaagtttcctggtcctacaatcaatgttacaaccaatgaaaatctggttgttaatgtcagaaacaagttagacgagggacttcttcttcattggaatggaatccaacagagacgtgtgtcatggcaagatggagttttaggaaccaattgtccaatcccaccaaagtggaattggacttatgagtttcaagttaaagaccaaattggtagtttcttctactttccatctctacatttccagagagcttctggtggttttggctcctttgttgtcaatcctagagctattattccagtccctttctctactccagacggtgatattaccgttaccattggtgattggtacataaggaaccacacggntttnaggaagggctttgggatgatggtaaagatctttggaatgcctgatgggagntctcaattaatgggaaaaggacccttacccggtanaaatggccacggntttttttnctgnttgggncccgntttnggnancaattcacagnccatnccngggaaaacctttttnggctnng

SEQ ID NO: 87724 - DNA, 784 bp, Arabidopsis thaliana columbia
  unsure (1)..(784): unsure at all n locations
caannnnnnnnnnnnnnnnnnnnnnnnnnnnnnnnnnnnnnnnnnnnnnnnnnnnnnnnnnnnnntcgacccacgcgtgcgcccacgcgtccgcttttgtctaaaaatggcgatgctaggtttttacgtaacgttcattttctttcttgtatgcctatttacttatttcttcctccaaaagaaacctcaaggtcagcctattctcaagaactggccgttcctcaggatgcttccaggaatgctccaccaaatccctcgtatctacgactggaccgtcgaggtgcttgaggcgaccaatctaactttttatttcaaagggccatggcttagtggaacggacatgttgttcaccgccgatccaaggaatattcatcacatactaagctcaaactttgggaattaccctaaaggacctgagttcaagaagatctttgatgttttgggagaaggaatcttaaccgttgattttgagttgtgggaggagatgaggaagtcaaatcacgccctattccacaatcaagatttcatcgagctctcagtaagtagcaataaaagtaagttaaaagaaggtcttgttccttttcttgataatgctgctcagaaaaacattatcatagaattacaagatgtgttccagagattcatgtttgatacttcttcaattttgatgactggttacgatccaatgtcactatccatcgaaatgctggaagttgagttcggtgaagctgcggatattggcgaagaagcaatctattatagacatttcaaaccggtgatcttg

SEQ ID NO: 87725 - DNA, 475 bp, Arabidopsis thaliana columbia
tacgactcactatttggaaagctggcacgcctgcaggtaccggtccggaattcccgggtcgacccacgcgtccgatttgctacttcggcttcgccttgagggtctcctcctcagctttttggtccccggattgctcatggccgtccccgggttcttctcttccatggcgcttctccggcattgtcctgtatcgaacacagaggacggaggaggaagcttcttccatgtcgctcctcgccgaacttttcgtcctcacctcctcaacactagttctgggtgtggatttcttaagtgttatagtgactatattacaagaaaatacctgcggaggaataggactcaagctatagcagagtatttgggttcagcttcagatcctaagaagccaactgggaagtcaagttatcatccttcagaagatatcagagcatatgtgccagagaagaatcctggagattctaggctttcacctcct

SEQ ID NO: 87726 - DNA, 761 bp, Arabidopsis thaliana columbia
gtaaaagcgttcactaacaacaaagcttcgcatccaaatttatttgtttgatgggggggtatcttcttggactctctaacccaattctgtgttgacagaagaaagcataatcaaatccatgtctttcacaggacttagcaggccaaaagcaatatctggaacgactgttgcagatgagagcaaaaccacatacttagagtctcaaaggaaaaaaacttatacgttatcgcactttaaaaatgaacaaatccaaaaagcagtagttgttgtgaaaactggaaattctacagagagctacctaaatattcttagcctcacttcctgataatgactgctgataccctgttaatgactttgatttcgttacttctaagaattgtcaaaagagcacagtcttcttcttggcttggtctccttcgacctatggaatccgagccaaggtgctttactcgacttctaaagaccagttaagtagggagcttcaagggattcactatgagattcaagctactgatcctactgaggttgatcttgaagtgttacgtgtacgacccacctgagagcaagcaagattgctatgtctattcaaaacttatggtaatgtaatgaataattcgtattctctgtggattgatttgtgtaaacacagtttcatgttctatgtcaaactgtataacctctggtgtttcagattgcacaacctaaaaaaaaaaaaccaaagggcgaccgctctagaggatccaagcttacgtacgcgtgcg

SEQ ID NO: 87727 - DNA, 1113 bp, Arabidopsis thaliana columbia
accgaacacttttttttcttttgcaataaaccaaaaaaagttaaaaattcaaaaacttaattactaagcaaaagtgtgcacgaagaacaaagcgacgcatccgattttatttgtttgataagttcgtgtcgtcttcgtctctctaacccaattctgtggtgtctgaagaaagcagaatcaaatccatgtctttcagaggacttagcaggccaaatgcaatatctggaatgggtgttgcagatgagagcaaaaccacatttctagagcttcaaaggaaaaaaactcatcgctatgtggtcttcaagattgatgaatccaaaaaagaagttgttgttgagaaaactggaaatcctacagagagctacgatgatttcttagcttcacttcctgataatgactgcagatacgctgtttatgactttgatttcgttacttctgagaattgtcaaaagagcaaaatcttcttctttgcttggtctccttcgacctctggaattcgagccaaggtgctttactcgacttctaaagaccagttaagtagggagcttcaagggattcactatgagattcaagctactgatcctactgaggttgatcttgaagtgttacgcgaacgagcgaactgagagcaagcaaggttgctatgtctattcaaaacttatggtaatgtaatgaataattcgtattctctgtggattgatttgtgtaaacacagtttcatgttctatgtcaaactgtataacctctggtgtttcagattgcacaacctaaagcttaggtaaactgaatatggtttaagatcgtaaaaggttgatatattagtaatgttaagagggagaagaaacttctctttagtagataacgagaatgttgatgagcatgatgagagagttcttaaactagtctagcaaattctgtataagctcttgttgtagccatcttgaattcgaatctaatccttgcgaacaatataaaaagtggtagtgtgtaaagtttccctcatcatttgtggtttctttttctcactttcttcggtgtagtaaaatttaagttgtatgtataataattctatcatatacctgctttctaaaaccaaaaaaaaaaaaaaaaaaa

SEQ ID NO: 87728 - DNA, 562 bp, Arabidopsis thaliana columbia
  unsure (1)..(562): unsure at all n locations
atgattcttccagctctcacnnnnnnnnnnnnnnnnnnnnnnnnnnnnnnnnnnnnnnnnnnnnnnnnnnnnnnnnnnnnnnnnccacgcgtccggcagtaatgaagagcaatgatgaagaaagagagggagacgaggagagtggttttgatccagagaagcaccttgacgcttacttgcctgttcgagtcaacgagcagagagttagcaacttgttgcagtcactgcttgtggcaggtgcagtgttggctatgccggccattaagctcataccgacttccattctatggggatactttgcttacatggccatcgacagcctcccgggaaatcaattcttcgaacgcttaacgcttctcttcgttccaacaagccggagattcaaggtcttggagggagcacacgcgtcgttcgtggagaaagttccttacaagtcaatggctgcgttcacactgttgcagatattctactttgggctgtgctatggggtgacgtggattccggtggctgaatcatgtttccggttcctttcttcctcttaatagctatcagacagtacatt

SEQ ID NO: 87729 - DNA, 352 bp, Arabidopsis thaliana columbia
  unsure (1)..(352): unsure at all n locations
ctgttacatactctgttttgatttctctagatttagaattcatttttttccccgaaaagacgcggaatttcgatttgggtgttgaaaacaaaattagggttttgtgtctcaatttctttgattgtgtatattctcagaagcaaagatgaataaaggaagcatctttaagatggacaacgatttcgaaaagaggaaagctgaagctggaaggatcagggagaaatacccctgatccgaattccngtgattgtgggaaaggctgaggaaaaggtgaagtccccaaatattaggcaaggaggagctncccttgtgccatcaaggcccttacagtttggccaatttgtggantttg

SEQ ID NO: 87730 - DNA, 671 bp, Arabidopsis thaliana columbia
cgcgtcagcccacgcgtccgcgaaaagaaaaaggttcctttttttgactttgtatccgtagatcatcttcttcttcttcttccagagttttatccttatccgttccatcaaattctctctctaagcaaagatgaataaaggaagcatctttaagatggacaacgatttcgaaaagagaaaagctgaagctggaaggatcagggagaaataccctgatcgaattcctgtgattgtggaaaaggctgagaaaagtgaagtcccaaatatagacaagaagaagtaccttgtgccatcagacctaacagttggtcaatttgtgtatgtgattcggaagagaatcaaactaagtgcagagaaagctatcttcattttcgtagacaatgttcttcctccaacaggagagctaatgtcaagcgtttacgaggataagaaagacgaagatggcttcctttacatcacttacagtggcgagaacacattcggtgcttcttcaatctaatctctgacctctgagaatccgccacgttttaatgcttcttcccaactttcaatttgtgtgtatagtttgttctcaatatttatcatttctcaaataattgtgattactatcttcttttcacttgttaaaatgtacatagactaatcttataatattatcttcctttggtatt

SEQ ID NO: 87731 - DNA, 881 bp, Arabidopsis thaliana columbia
  unsure (1)..(881): unsure at all n locations
aggtctacatacgactcactattgnggaaagctggtacgcctgcaggtaccggtccggaattcccgggtcgacccacgcgtccgggtgtctcggtgattaggagtggtgagagcatggagaatgcgttacgagcatgttgcaaaggtatcaagatcgggaagatcctaattcacagagaaggtgacaatggtcaacagcttgtttatgacaaattgccaaatgatatctcagagaggcatgtcctattgttggatcctattctcgggacaggaaactcagcggttgaagctatcaacctccttataagcaagggccgtcctgagggaaacatcctatttctaaaccttatctcagcacctcaaggtgttcatgtggtctgcaaaaaattcccaagaataaagatagtgacatctgaaatcgataatgggttaaacgaagagtttcgtgttattcctggtatgggggagtttggggacagatattttggcacagacgatgactaggccactgtgttcctgcagcattagttgtcccatccatgtcctgcatagcagtttactgatgcattcaccatcctattctctacaacggctacacaaactatcaaaggaatcacctttaactttgttggttttcccatttaaaccccctcaaggtgttgggaacagttttgtttacttataaatgcccaagtgaggggttgatcgatcccgggacttgggattcggtgtaccatatataattacccttggaactcttgataattcatctacaactcttgtgtaccatatataaatatccttggaacccgtgatactccataagcataatacatttggcttcgnnnnnnnnnnnnnnnnnnnnnnnnnnnnnnnnnnnn

SEQ ID NO: 87732 - DNA, 444 bp, Arabidopsis thaliana columbia
gtaaaataaaaacccgaaataatttgaaaaaatattgttatatatttttggataaatttttgttgatcggatggggttcctacacaagctgtgggatgaaacggtggccggaccgacgccggacaatggtctcgggaaattgagaaagcacgattcattatccaccgtccgatcttctcctccttctctctcaagcgaccaagtcaccagaagcatcatggttaccaaggggaataacaatgttcgtggtctccgtaaattgaaaatggatccggattctccaacctgttcaagcagcaaccctgggacacctttaacccctgggacaccatgctatgctttgggaccattcactgccggcaaaatcccttcctctggcgaagacgatgcagcaagtctaactacttatgaatggattgtgataaacgcgttggaccgttgaac

SEQ ID NO: 87733 - DNA, 652 bp, Arabidopsis thaliana columbia
aaaaaatattgttatatatttttggataaattttggttgatcggatggggttcctacacaagctgtgggatgaaacggtggccggaccgacgccggaaccaaattgggttcctttccgggaaaatttgagaaagcacgattatccaccgtccgatcttctggtggttctctctcaaggaccaagtcaccagaagcatcatggttaccaaggggaataacaatgttcgtggtctccgtaaattgaaaatccatccggattctccaacctgttcaagcagcaaccctgggacacctttaaccctggacaccatgctatgctttgggaccattcactgccggtaaaattcccttcctctggcgaagacgatgcagcaagtctaactacttatgaatggattgtgataaacggttggaccgttgacagccgagagagaaaatcttacggggtttttgtgtaaatataaataacctacccatgtaattatgtaaatatttcctgataaggtcagtattaaatgtaatgtctcttgaaatcaaatgtaccctattacagggtcttgaaaatattatttgaaccctgcccatttcctctaaaaaaagaaaaaaacaaaagggcgcccgctctagaggatccaagcttacgtacgcgtgc

SEQ ID NO: 87734 - DNA, 524 bp, Arabidopsis thaliana columbia
  unsure (1)..(524): unsure at all n locations
nnnnnnnnnnnnnnnnnnnnnnnnnnnnnnnnnnnnnnnnnnnnnnnnnnnnnnnnnnnnnnnnnnnnnnnnccacgcgtccgatcggctctggttgtcccaagtataaaggctaatcaacaacttgcaaggactttgcaagacaaagaggaacaggcacgtccatcagctctggttttaccaagtactaaagctaatcaaaaccttgtttctgccggtactcttggagaaactcttgatgcaactggtaaatggggaaaaaatctggataacgatgatcatgtggaggaaatgaaacaagaggttgagaaagtgagatctgcaaaacttgtcaggaagttggaaaggaaacttgctttcgctgagaaaaagctgctgaaagctgaacgggctttagctaaggtggaggaatctctgaagccagcagagcagagaacagaccttgagggcataacagaagaagagagatttatgttccaaaagctcggattgaagatgaaagctttcttacttcttgatcgaag

SEQ ID NO: 87735 - DNA, 1000 bp, Arabidopsis thaliana columbia
  unsure (1)..(1000): unsure at all n locations
nnnnnnnnnnnnnnnnnnnnnnnnnnnnnnnnnnnnnnnnnnnnnnnnnnnnnnnnnnnnnnnnnnnnnnnnnnnnnnnnnnccacgcgtccgcctttgtcaatctccgaaatcccttgctccctcttcaccaattcctcagatttagaccaagcttctcttcgaagaaatccttaacctaaccatgagtcatcttcctcttctccattttactctcgttgcaaaccctagccgccgtcaaagcaagcgagacatgtacccactcgatactcatggtccagacaaagatccgtcttagtttgaaagatgccagcgccctcatgttcctctgattcttcctcatcttactcctattccttcagatctataatcaatcaatgtattttcttattttattcaatcgatttatcatctcttttgttggtaaattgatgtctgtgttacagatcaaatgttgtgaactaattagcctaatgattcgattgattttggtgaacccgaggatcgtacaagtatgtagctatggaggaagatggagtctaatgtcatgagattcctgtagacaataaccttcgattggccgtcctaaacgtctcgacaacctcttaggttaaggctttactctgcacctatcaagaaaatcgtgtataaaattaaggaacttggcaagaggatcaacgatttatgtggtgttatgctcgtcttcatggaagggctgtgaactgttaattgtgaactgcaaagaagaagaagaagaagtgtggtcatcgcaaccatgattttttagaagccaaagaagattccaatcatgtttgctttgtattttgttttcctcttgagagatagtttattccttgtttcattgaatttttatgtaaaacatttatatcaataaaaagatttcgatttctaaaaaaaaaacaaaagnnnnnnnnnnnnnnnnnnnnnnnnnnnnnnnnnnnnnnnnnnnnnnnnnnnnnnnnnnnnnnnnnnnnnnnnn

SEQ ID NO: 87736 - DNA, 1022 bp, Arabidopsis thaliana columbia
  unsure (1)..(1022): unsure at all n locations
accacgcgtccgcaaaacgttactcttctctctcattctctttcgcttctcgatagcttctcaaatcatggttcagcaaatatgggagacgttgaaggaaacaatcacagcttacactggactttctccagctgcgtttttcaccgtacttgctctcgctttcgccgtttaccaagtcgtctccggtttcttcgtttctcctgaagttcaccgacctcgttctttggaggttcagcctcaatcggagcctcttccaccgccggttcagctcggagaaatcactgaggaggagcttaagctttatgatggctccgattctaaaaagccccttcttatggcgatcaagggccagatctatgatgtttctcagagcaggatgttttatggaccaggtgggccatatgctctgtttgcagggaaagatgcaagccgagctctggcaaagatgtcatttgaggaccaagacttgactggagacatctcaggtctcggtgcatttgagctagaggcgttacaagactgggagtacaagttcatgagcaagtatgtcatagtcggaaccattcaaaagaaggatgtagaaggcaaagaaagttcagaaccttccgaagcaaagactgcctctgcggaaggtctttctacaaacactggagaagaagcttcagcaattacccatgatgaaacttctagaagcacaggcgagaaaatcgcgccaaccacggagaagaaagatgttgcanctgacgatgatgacctgcaaaggagtaaagtcaatgtaatgatattttttgtttctttttncccnttannnnnnnnnnaaaaatataactattagttgtgtattgcncnnnnnnaatggtgactttgtgtgtactttttggatcttgtataatgacatctaattctggttatggaagcttcaaaatacattaaaaaacccaaaaaagggcggccgctctagaggatccaagcttacgtacgcgtgcatgcgacgtcaaagtcttctatagggcacctaatca

SEQ ID NO: 87737 - DNA, 1350 bp, Arabidopsis thaliana columbia
ccacgcgtccgcaaataatccctgacttcgtcacgtttctttgtatctccaacgtccaataaatgaaagcaactctagcagcaccctcttctctcacaagcctcccttatcgaaccaactcttctttcggctcaaagtcatcgcttctctttcggtctccatcctcctcctcctcagtctctatgacgacaacgcgtggaaacgtggctgtggcggctgctgctacatccactgaggcgctaagaaaaggaatagcggagttctacaatgaaacttcgggtttgtgggaagagatttggggagatcatatgcatcatggcttttatgaccctgattcttctgttcaactttctgattctggtcacaaggaagctcagatccgtatgattgaagagtctctccgtttcgccggtgttactgatgaagaggaggagaaaaagataaagaaagtagtggatgttgggtgtgggattggaggaagctcaagatatcttgcctctaaatttggagctgaatgcattggcattactctcagccctgttcaggccaagagagccaatgatctcgcggctgctcaatcactctctcataaggcttccttccaagttgcggatgcgttggatcagccattcgaagatggaaaattcgatctagtgtggtcgatggagagtggtgagcatatgcctgacaaggccaagtttgtaaaagagttggtacgtgtggcggctccaggaggtaggataataatagtgacatggtgccatagaaatctatctgcgggggaggaagctttgcagccgtgggagcaaaacatcttggacaaaatctgtaagacgttctatctcccggcttggtgctccaccgatgattatgtcaacttgcttcaatcccattctctccaggatattaagtgtgcggattggtcagagaacgtagctcctttctggcctgcggttatacggactgcattaacatggaagggccttgtgtctctgcttcgtagtggtatgaaaagtattaaaggagcattgacaatgccattgatgattgaaggttacaagaaaggtgtcattaagtttggtatcatcacttgccagaagccactctaagtctaaagctatactaggagattcaataagactataagagtagtgtctcatgtgaaagcatgaaattccttaaaaacgtcaatgttaagcctatgcttcgttatttgttttagataagtatcatttcactcttgtctaaggtagtttctataaacaataaataccatgaattagctcatgttatctggtaaattctcggaagtgattgtcatggattaactcaaaaaaaaaaaaaaaaaaa

SEQ ID NO: 87738 - DNA, 376 bp, Arabidopsis thaliana columbia
cacgcgtaagcaaatatctctcagattgttgggagtccgaatcgttgttcgagtttttatcagggaagatgcaaggaggtggtggtagagatccttttggtggtggttttgggggtccttttggtggttttggaggtggctcttttggtggttttggaagaggttcctttggtggatttggtggccctaatggtcctccgagtctcatgtctaattttttcggaggaagagatccatttgacgaccctttcttcactcagccttttggtggtggcatgtttcaatccaacttctttggtcccagcatgaatccttttgcagaaatgcatcgtctgccacagggttttattgagaataatcagcctccaggaccgag

SEQ ID NO: 87739 - DNA, 913 bp, Arabidopsis thaliana columbia
gtcgaaacctgttcatgaaacctacgcttccttgggccttcttcttctggggcttggagcaccggcaagccaatcaagagagcttatgatggattgttgcttgatgctggaggaactcttttgcaattgtcgaaacctgttcatgaaacctacgcggccgggcgcctgggatatggtctcaagacaactccagctgagatcaaggaaggtttcaagagagttttttctgccccttggcctgagaagttacgttaccaggtccctaaatgcatggagatggaagaccattctggaagcttgttgtttcggaagctactggttgttctgataatgactacttcgaagacgtctaccaatattatgcgaatggcgaggcatggcatctcccagaaggagcttatgagacaatgtcactactgaaagatgctggagttaagatggctgttgtgtctaatttcgataccaggctaagaaagctattgaaggatcttaatgtcatagatatgttcgatgctgtgattgtatccgcagaagtcggatacgagaagcctgatgaacgaatcttcaaatctgcgttagaacaaatcagcgtagatgtaaacagagcagtgcatgtcggagatgatgaaggagctgataaaggcggagcaaacgccatcggtattgcttgttggttgtggggagaagatgtgcagacattttcggacatacaaaagcggatcttggtttcagaactctaagcttcaaagattttgttctgcaatatttttcagaccctgtacacacttactcaatcaacactgtaatctgtctctttaaaaatttaattaataatgaaaaagctgcaaaaaaaaaaaccaagggcggccgctctataggatccaagcttacgtacgcgtgcatgtcacgtcat

SEQ ID NO: 87740 - DNA, 560 bp, Arabidopsis thaliana columbia
tacagcaatccggcgggccgcgcgggggcgggggagtatcgccggcaactaaacgactcatatagggaaagccggtacgcctgcaggtaccggtccggaattcccgggtcgacccacgcgtacgcggacgcgtgggcggacgcgtgggcggacgcgtgggatatggtctcaagacaactccagctgagatcaaggaaggtttcaagagagttttttctgccccttggcctggggagttacgttaccagggccctaaatgcatggtgtttggaagaccgggctggaagcttgtctgtttccgaagctacatggttggtctgaataatgactactttcgaaggacgcctacccatattaatgcagaatggcgagggcatgggcttctccccagtagggagcttattgagacaatggctccctacttgaaagatggctggagttaagaatggcttgttgtggcttaatttccgatacccaggctaacacaggcctattgaagcgcatcttaatgtgaatagaatatgtgccggctgcctggccgatgtgtgtcccccagacgg

SEQ ID NO: 87741 - DNA, 769 bp, Arabidopsis thaliana columbia
tacgactcactttagggaaagctcgtacgcctgcaggtaccggtccggaattcccgggtcgacccacgcgtccgtgcagaagacgacagaagggtacggctgcgagaagacgacagaagggtacggctgcgagaagacgacagaagggtacggctgcgagaagacgacagaaggggaagaagaagaagaaaaataaaagcaagaagaagaaggaactccctcaacagactgatccaccttcaattcctgtcgttgagctcttcccatcaggagagtttcctgaaggtgaaatccaagagtataaggatgataatctttggagaacaacatctgaagagaagagagagctggagcgttttgaaaagccaatatataactctgttcgccgagctgcagaagttcatcgccaggttcgtaaatatgtcagaagcatagtgaagcctggaatgttgatgactgatatatgtgagaccctagagaatactgttcgtaagttgatatcagagaatggtcttcaagctggtattgcattccctacaggatgctctttgaattgggtcgctgctcattggacaccaaactctggagataagactgtacttcagtacgacgatgttatgaaattggactttggaacacatattgatgggcatattattgactgtgcatttacagttgccttcaaccctatgttcgatcctctcttagcagcctctcgtgaagctacgtataccggtatcaaggaagctgggatcgatgtccgtctctg

SEQ ID NO: 87742 - DNA, 584 bp, Arabidopsis thaliana columbia
caagggtttgccgtacaaaggtatcggaggagagagtaaagggtaaacaaaagagagactggtttacttcttcttcgtgtgcgagtagctttttcctgcgattctcatcgagttttggttagtgctttgttatcaaggtgaaaatcgatttgaagatggcgagcgaaagtcctgatgttgctgttgtagctccggtggtggagaatggcggcgctgagtcctctaatggtaaagaggaacaattggaatctgagctttcgaagaagcttgagattgcagaagatggtcaagaggagaacgatggagaagaaggaagcaaagctgagacttcaacgaagaagaagaagaagaaaaataaaagcaagaagaagaaggaactccctcaacagactgatccaccttcaattcctgtcgttgagctcttcccatcaggagagtttcctgaaggtgaaatccaagagtatagggatgagtatctgtcgtagcattctattgaccattgtggacagcttttacggaaatctttcatatgttgtagttgactttgtggaagagtccataccacttttatcttctcaactcat

SEQ ID NO: 87743 - DNA, 1136 bp, Arabidopsis thaliana columbia
  unsure (1)..(1136): unsure at all n locations
tctcacatcctccaattcatcgtcctcacgttcccttttgtttattcatcttccttccttcttcacatttctgattttctctatttggggggtttgtttccacattatacatatctagggttttgagatggttaattgaaagataatggtcgaagtttcggaggaattggcttcacattgtgggtgtttctggcttcctcaggtttaaatctgaggttgatctcttttgttttttggtaaattgtgacatattttggctcgaagaagaagaagaagaggcaatgagcgcatcaaggttcataaagtgcgtcaccgttggtgatggagctgttggtaaaacctgtttgctgatttcttataccagcaacacctttcccacggattatgttccgactgttttcgataactttagtgcaaatgtggttgttaatggagccacggtgaatcttggattgtgggatactgcagggcaagaggactataacagattaagacctttgagttaccgtggtgctgatgttttcattcttgccttctctctcattagtaaggctagttatgagaatgtttccaagaagtggattcctgagttgaagcactatgctcctggtgtcccaattgtccttgttggaaccaaactagatcttcgagatgacaaacagtttttcatcgaccatcctggtgctgtccctattaccactgttcagggagaggagctgaagaagctaattggagcgccagcttacatcgagtgcagttcaaaatcacaagagaacgtgaagggcgtgtttgatgcagcgatcagagtggtccttcaacctccaaagcagaagaaaaagaagaacaaagcacaaaaggcctgctccatcttgtaatagcactcatggaagtcaagaagctctttgagatgaggatgacagggtggtttaaaaaagtatcgctttttcatttttgttgttgttttccgttttcatttgtgatctcttagttccgtacaaaacgaattgtgaggttaattcaacttctattttaactgatagaaaaaaaaaaaaagnnnnnnnnnnnnnnnnnnnnnnnnnnnnnnnnnnnnnnnnnnnnnnnnnnnnnnnnnnnnnnnnnnnnnnnnnnnacaatcg

SEQ ID NO: 87744 - DNA, 1238 bp, Arabidopsis thaliana columbia
aaacaatcggagaaagttgatggaggagattgttcgttttgtgaacgcttcaatggcataaatttccggccatcacatttcttctactttctctttctctctcccttgttgttgttctctagaattcgattcatcgttgttaacgtcgtccattcttcttctttgatcccttctttgatctctcacatttccgattccaatttagggtttcctctcttttcacatttctagggtttttcttgttccctttgtaccggagatggtgaattgaaaggaaaaataaaacgcttttgagagcttatatttgaggttgtttcctcaggttttgtagatctgaggttgctatttttgaattagagattcttttttttttttttcaaaattttgtttgttgtgatcatacatagacgtacgtagctccatttctggtggagaaggaagaagaagagaaatgagcgcttcgaggttcataaagtgtgtcaccgttggcgacggagctgttggtaaaacctgtttgctgatttcttacaccagcaacacttttcctacggattatgtaccgactgttttcgataactttagcgcaaatgtggttgttaatggagccactgtgaatcttggcctatgggataccgcagggcaggaggattataacagattaagacctttgagttaccgcggtgctgatgttttcatcttagcattctctcttatcagtaaggctagttatgagaatgtctccaagaagtggatcccagagctgaagcattatgcccctggtgtccctatagttcttgttggaaccaaactagatcttcgggatgacaaacagttcttcattgaccaccctggcgctgtaccaattactactgctcagggagaggaactgaagaaactaattggagctcccgcatacatcgagtgcagttcaaaaacacaagagaacgtgaaaggagtatttgatgcagcgatccgagtggttcttcaacctccaaagcagaagaaaaagaaaagcaaagcacaaaaagcctgctccattttgtaatttctctacgcttctcttacgtatctctctctgtctctctgtctcttccactcttctagtgaaggcttaagaagaaaacacattgggcttaaaaattgttccagagttcgttgtgataagctctcttaatccttaaaaaaacgattatttctgtttattgatgaatagtttccagctttagctgagacctaat

SEQ ID NO: 87745 - DNA, 513 bp, Arabidopsis thaliana columbia
  unsure (1)..(513): unsure at all n locations
ctcacaacctagctagctagtaaacagtattttctatataccaaaaatggcttcaagttccatagctcttttcttggctctcaatcttctctttttcacaacaatctccgcctgtggtagctgtactccgtgcggcggaggttgcccctctcccaagccaaagccaactcctaaaccaaccccaagccctagctctggctcgagcaagtgccctaaagacaccctcaagctcggtgtctgcgctaatgtgctcaacggcctcctgggcttgaccccttggcaagccacccggtcgagccatgctgcaggcttcatccaaggactcggttgatgttgaggcagccgctttgttttttggaaccgttctttaaggttaacaattctttgggattaacttgaacctcccaatttttttagggttccccctaaaggtttaaggaaaaaattccccccggggttctgtaattcctttttgttttaatttaaannnatttngggggnanaaataanctc

SEQ ID NO: 87746 - DNA, 555 bp, Arabidopsis thaliana columbia
  unsure (1)..(555): unsure at all n locations
gctagtgaacagtattttctatataccaaaaatggcttcaagttccatagctcttttcttggctctcaatcttctctttttcacaacaatctccgcctgtggtagctgtactccgtgcggcggaggttgcccctctcccaagccaaagccaactcctaaaccaaccccaagccctagctctggctcgagcaagtgccctaaagacaccctcaagctcggtgtctgcgctaatgtgctcaacggcctcctggacttgacccttggcaagccacccggtcgagccatgctgcagcctcatccaaaggactcgctgaatgtttgaggcagccggtttgttttctgcagcggtcttaagggtaacattcttgggatcaacttgaacctcccaatatctttaaggctactcccttaatgtttgcagcaaaaaatttctccngggttcaatggtnaaaacnttttgnntttaatttaanaccnctttggggggnnaaattaatntctgnttaaaggggcagggggttcnttaanccnnaaatnggntttaaaattggnntc

SEQ ID NO: 87747 - DNA, 792 bp, Arabidopsis thaliana columbia
  unsure (1)..(792): unsure at all n locations
ctccccccaaacccggncggcccggccgtccgaanngggnnccgattnnaatttaaaaaactatgttcattaaacaataaacacacacacccaaggaaaaaattcacgcatcaggaagggaacaataaccacccaattcactcacaacctacctagctagtaaacagtattttctatataccaaaaatggcttcaagttccatagctcttttcttggctctcaatcttctctttttcacaacaatctccgcctgtggtagctgtactccgtgcggcggaggttgcccctctcccaagccaaagccaactcctaaaccaaccccaagccctagctctggctcgagcaagtgccctaaagacaccctcaagctcggtgtctgcgctaatgtgctcaacggcctcctggacttgacccttggcaagccaccggtcgagccatgctgcagcctcatccaaggactcgctgatgttgaggcagccgtttgtctctgcaaccgntcttaaggntaacattcttgggatcaaacttgaaactcccaatatctttaagtctaactcccttcaatggtttgcaggaaacaactttcctcctgggnttccaatgcggaaaaaaccatattggtatataatttaaatcacacttatggggggggattaaattaacctccctgggttttaaagancaggggggtccccaaaaccccaaaatggggggcttaaaaactgtactggggtctcaanntggttgcctggggnaatggggnccgaaaatnngaggtaagtnatattcgc

SEQ ID NO: 87748 - DNA, 771 bp, Arabidopsis thaliana columbia
gctggccgtccgcagtaccggtccggaattcccgggtcgacccacgcgtccgccgtgcggcggaagttgcccctctcccaagccaaagccaactcctaaaccaaccccaagccctagctctggctcgagcaagtgccctaaagacaccctcaagctcggtgtctgcgctaatgtgctcaacggcctcctggacttgacccttggcaagccacccggccggcccatgctgcaccctcacccaagggctccgctgatgttggggcacccgtttggctctggcacccgcccttaaggcctaaccattcttggaatcaacctggaccctcccaatcacctttaagcctacccccttaatggttgccagcaaaccaccttcctcctggcttccaatgctaaaaaacccatattggttatataatttaaatacacttatgtgtgttattaatttatcttctttgtgttttaaagagacagggtgattctctatactcttatattgtgtctttatatatcttgatctgtggtttcttctactctgcttgctctggtgttcattggggtgatccgtaagattcctgaagtttacagtttcattatttcctattatatatactcttaccattgggggtattgttgtattggtttgtattatgattctatgaattaataagaatttaacttttatgttatggattcattattatacggaatattgtgttttatggtttatatatatagactgtatcttctacagttctacccaaatatttt

SEQ ID NO: 87749 - DNA, 852 bp, Arabidopsis thaliana columbia
accggaacttccgggtcgacccacgcgtccccagacgcgtgggtcacaacctagctagctagtaaacagtattttctatataccaaaaatggcttcaagttccatagctcttttcttggctctcaatcttctctttttcacaacaatctccgcctgtggtagctgtactccgtgcggcggaggttgcccctctcccaagccaaagccaactcctaaaccaaccccaagccctagctctggctcgagcaagtgccctaaagacaccctcaagctcggtgtctgcgctaatgtgctcaacggcctcctggacttgacccttggcaagccaccggtcgagccatgctgcagcctcatccaaggactcgctgatgttgaggcagccgtttgtctctgcaccgctcttaaggctaacattcttggaatcaacttgaacctcccaatatctttaagtctactccttaatgtttgcagcaaacaacttcctcctggcttccaatgctaaaaaccatattgatatataatttaaatacacttatgtgtgtattaatttatcttcttgttttaaagagacagggtgattctctatactcttatattgtgtctttatatatcttgatctgtggtttcttctactctgcttgctctggtgttcattggggtgatccgtaagattcctgaagtttacagtttcattatttcctattatatatactcttaccattgggggtattgttgtattggtttgtattatgattctatgaattaataagaatttaacttttatgttcgagccgaattccgagcttacgtacgcgtgcatgcgacgtcatagctcttctatagtgcacctaa

SEQ ID NO: 87750 - DNA, 389 bp, Arabidopsis thaliana columbia
aaaccgtgaagacacacaatctaatatttctcctccacgtagacaaaggactcgtaatgactcgccctctcctgagcctgggcctagacggtcggttgcggatagagttgatacagatatgtcaccaccacgacggagaaaacgtcacaattcgccttcacctgaacctaacagaaaacataccaagcctgttagtttggattcagatatgtcaccacctcgcaaaagaaaagccaggaatgattcgccttcaccagaacctgaagctaaatatctgagtgaagatctatctcctcctcgtaggagacatgttcattctccatcgcgtgaatctagcagaaagcgttcagattctgttgagttggacgatgatttatctccgcctcgca

SEQ ID NO: 87751 - DNA, 434 bp, Arabidopsis thaliana columbia
  unsure (1)..(434): unsure at all n locations
cccgggttcnatatggctcaacttttggaanccggaaccntggggctgcntttagttcttcagatgtattgggctccccaacccagncccacttaaaccagttgttcgacaaagttaaagacttctttggggatgcaaaagagtcattcgggaaagctatcttcgctgaacccggggagtgacgaaaaaactgaagaaacctcggatgagaaagccaaggcctgaggctgaacaattgacccttggttggttgattttgatgtctcaaccgtctcggtatgggctgcagaaggtcactggatatgacgagactaccgctattttgtgcacattttctctatacatctctcacagaaacagcttctgttaaatctcttgtaacacataacttattgtgtattgtagatttgttgtaagaaagagcctttggttac

SEQ ID NO: 87752 - DNA, 779 bp, Arabidopsis thaliana columbia
  unsure (1)..(779): unsure at all n locations
gtctttgaatgcgttaactcggcttcctctgaagaacacaggaagattcgaagaggttggttgagcgagacactctctgattagctgaagaacggcatgccgagagacggcggtacagcagcggcggatggattctgagggggaagacgacgcaaagagacgtcacctgaacctaacagataacataccaagcctgtcatgtgggattcagatatgccaccacctcgcacaagaaaagccaggaatgattcgcctgcaccggaacctgaagctaaatatctgagtgaagatctatctcctcctcgtaggagacatgttcattctccatcgcgtgaatctagcagaaagcgttcagattctgttgagttggacgatgatttatctccgcctcgtaggaaaagagatttacatggttcacctgtctcagatgtaaaaaagaagagcaatgatctatctcctccacggagaagaagatatcattctccatcacctgaaccagctagaaggtcttcaaaatcttttggctcgaatgctgatttatctccacccggccggaatataaatatgaaggattctcaagactcagatctttcgcctcaaagaaaagccgcagatttgcgacggtccttcctgaaaatgtgtccagggagttccaatttttgatcagctcttcccccaaggtggcccacgcagagggttcatcacctcctcaaatttaggaagggcgcaacggaangnccggttttnttanttggaaaanncattggacggtnatttnt

SEQ ID NO: 87753 - DNA, 924 bp, Arabidopsis thaliana columbia
  unsure (1)..(924): unsure at all n locations
atgannnnnnnnnnnnnnnnnnnnnnnnnnnnnnnnnnnnnnnnnnnnnnnnnnaccaaataattctctcgtttctaaacaaactagtggtgagtgaatctcctctggtgagtaatggaagtgagtatgtctttgaatgcgttaactcggcttcctctgaagaacacaggaagattcgaagaggttggtttagcgagacactctctgtttagctcaagaacggcatgccgagagacggcggtacagcagcggcggatggtttttgtggtggaggctaagggaaagaaaggtatggcggcgcgtcagtatcaacgtacacctcctcctatgcctaagattgaagacgatggaaacccaagattcgttatcttcattcgtatggccaatgtgtatctttggtatcctctgagtataatagctggtggtactactgctaagatcatggttgctgcaaaagataacctcttggggaagtatatctacaaagacaccattgcaagaaacattgccgctgttatttacagagatgagaaagagattcaaaagacagcaattaagcagcatcgtgtcttgcgtacagccaccgagtttcgatatggctacaaacttgtagaaaacggaaacatgagagctgcacttagtacttcagatgttattgagctcccaacccaggaccagcttaaaacagtgttcgacaaagttaaagactactttggggatgcaaaagagtcattcggaaagctatcatcgctggacccggggagtgccggaaaaaccttgtggaaacctcgggttgggaaagnccaaggccttnggnttgacccatttgncacttgggttgggttgntttttggtgnntnaacccgtttcgggttggnctnccnnagggncccttggtttttncggggctccccnttttttggt

SEQ ID NO: 87754 - DNA, 729 bp, Arabidopsis thaliana columbia
  unsure (1)..(729): unsure at all n locations
cgggnnnnnncctacgactcactatggggaacagctggtacgcctgcaggtaccggtccggatttcccgggtcgacccacgcgtccgcacagattgatacaattcactcctttctttctgttttttcctttccctttctctcatctctctctttagctacttcctcctcccataaaccctctaccaagtaaactctcagctccaccattaacacatctcggtctcaattccgagctctgtattccaatcctttgttgcatttactttctgggtttttgtttattttgattttcttccatttgggtacccacccaaagagtaaagtttcaagctttcgtggtacttgctatgctttccctcacaaaaccctaatttcatatccttatccaattccatgttttgctctgctcaactctctgtttctacttctgaatcgtcgttttccttcatataaccaaaccaattctgttgaatcatcttggcacattcattggtttgagaaggaacagaaaaagttctgatcttggccctattcgcacatcaatggacgataatagatctactcatagctcaatgttcggggacctatcaacagaagaggtgcacaaggaagatcattctcacaggcatcattggtctattcatggcggttctggtcggccttatcccncatctatacgccaaactctactgggggagaatagatcagctccaacagcgacagcacca

SEQ ID NO: 87755 - DNA, 486 bp, Arabidopsis thaliana columbia
  unsure (1)..(486): unsure at all n locations
aattttagtatgtctcaattgggtcagtcaaagtctccgtttttccaactcttcaagaggaagaaacaaggctctgctggttttgccgatagtatgttgaagcttgttaggactttgcctaaggttttgaagtacttacctagtgacaaggctcaagatgctcgtctctacatcttgagtttacagttttggcttggaggctctcctgataatcttcagaattttgttaagatgatttctggatcttatgttccggctttgaaaggtgtcaaaatcgagtattcggatccggttttgttcttggatactggaatttggcatccacttgctccaaccatgtacgatgatgtgaaggagtactggaactggtatgacactagaagggacaccaatgactcactcaagaggaaagatgcaacggttgtcgggtttagtcttgcanaggagtcacattngtgactnggntgattgataggtcacttatgt

SEQ ID NO: 87756 - DNA, 680 bp, Arabidopsis thaliana columbia
ggtcgaccacgcgtccgcccaagcaacccaaaccctcattccaaaaaatggggtctcgctctcaaaacctctcctttatcgtcctcctcctccttggcttcgttgccgtctcctatgcttgcgactgtacccctcctaaaccatcaccagcacctcacaaaccaccaaaacatccagtcaaaccgcctaaacctcctgccgtcaaaccacctaaaccaccggcagtaaaaccacctactccaaaacctcccaccgtgaaaccccatcctaaaccaccaaccgtcaaaccccatcctaaaccaccaaccgtcaaaccccaccctaagccacccaccgtcaaaccaccccaccctaaaccacccaccaaaactcacccccacccaaaacctcccatcgtaaagccaccaaccaagccttctccgtccacccctaaacctcccaccaaaccttccccgtccacacctaaacctcccacgaccaagcctcctccgtctactccgaaaccaccccaccacaagccttcgtctacaccatgcccaccaccaacaccaacgccgactccaccagttgtaacaccgccaacaccaaccccacccgtcataacttcaccaacaccaaccccatcccgtcgtaacaccgtcaacgccaactgcacccgtcatttcaccaccaacaccaac

SEQ ID NO: 87757 - DNA, 708 bp, Arabidopsis thaliana columbia
  unsure (1)..(708): unsure at all n locations
gtcngaaacncncaanccaacccacccggggaacccgaacggantccccggnattnccccacacaaatcnccggnattcccnccaanaccaacaccnccngnngggcncctcaacaccaacaccacccgngnacnccacccaccaccaantccacctacgcctattccagaggcttccccaacttgccacgctgaagctagccgcttgtgtggacgttcttgggaggtttgattcacatcgggacttggaaaaagccacgccaaggcagaatgttgtccggttttaggaggtttacttgacctagacgcagccgtttgtctatgtaccaccattaagctcaaacttctcaacatcgaccttgttctccccattgctcttgagcttcttctcgactgtggaaaaactccaccatctgacttcaaatgtcccgcttaatcgatgtagaacgttgagagtctctggacggctccaaaagtttcgtttcttcaagaaatttgttagtttcatgatctatttgggaatgggaggttaatctgcatatgtgcgacccttagttacatgtttcatttggtacaataaaaggcggtgtaatttgggtttggcgctttcctttgcggttctcgtaagtgttctttaggggggaaaaactgtaacggtaacttttttaaanggcagttnccgcaanngttnnggcacggggttgggat

SEQ ID NO: 87758 - DNA, 1292 bp, Arabidopsis thaliana columbia
  unsure (1)..(1292): unsure at all n locations
ccaacgcgaaacccaaaccctcattccaaaaaatggggtctcgctctcaaaacctctcctttctcgtcctcctcctccttggcttcgttgccgtctcctatgcttgcgactgtacccctcctaaaccatcaccagcacctcacaaaccaccaaaacatccagtcaaaccgcctaaacctcctgccgtcaaaccacctaaaccaccggcagtaaaaccacctactccaaaacctcccaccgtgaaaccccatcctaaaccacccaccaaacctcacccccacccaaaacctcccatcgtaaagccaccaaccaagcctcctccgtccacccctaaacctcccaccaaaccttccccgtccacacctaaacctcccacgaccaagcctcctccgtctactccgaaaccaccccaccacaagccttccgcctacaccatgcccaccaccaacaccaacgccgactccaccagttgtaacaccgccaacaccaaccccacccgtcataactccaccaacaccaaccccacccgtcgtaacaccgccaacgccaactccacccgtcattacaccaccaacaccaactccacccgtcattacaccaccaacaccaacaccacccgtcgtgacacctccaacaccaacaccacccgtagtaacaccaccaacaccaactcctcctacgcctattccagagacttgcccaattgacacgctgaagctaggcgcttgtgtggacgttcttggaggtttgattcacatcggacttggaaaaagccacgccaaggcagaatgttgtccggttttaggaggtttacttgacctagacgcagccgtttgtctatgtaccaccattaagctcaaacttctcaacatcgaccttgttctccccattgctcttgagcttcttctcgactgtggaaaaactccaccatctgacttcaaatgtcccgcttaatcgatgtagaacgttgagagtctctggacgactccaaaagtttcgtttcttcaagaaatttgttagtttcatgatctatttggtaatgggaggttaatctgcatatgtgcgacctttagttacatgtttcatttgatacaataaaaggcgttgtaatttgggtttgagatttcaatttctttgggctttcttgttatgttgtacttttaagaagaagaaaaaaaaactgttaaacgatataactttttttttaatatgaacaagtttgtatctgtctaatttgtttttatgtacatacgtacgttatggagtnnnnnnnnnnnnnnnnnntttaatcg

SEQ ID NO: 87759 - DNA, 765 bp, Arabidopsis thaliana columbia
  unsure (1)..(765): unsure at all n locations
nnnnnnnnnnnnnnnnnnnnnnnnnnnnnnnnnnnnnnnnnnnnnnnnnnnnnnnnnnnnnnnnccacgcgtccgcggacgcgtgggggtatggctgtgattggtatcgccatcctctattctacattttatgtgtgggtgggcgtgggttcaccaggctcaatgaatgttactgacctacctcttcttcttgtcggatatggttttggtgcttcgtttgttgccttatttgctcagttgggtggtggaatatatactaagggagctgatgttggggcagatctcgttgggaaagttgagcagggaattcccgaggatgatcctcgaaatcctgctgttattgctgatttggttggagacaatgtgggggactgtgctgctagaggtgctgatttatttgaaagtatagctgcagaaatcatcagtgcaatgatactaggtggaacaatggctaagaagtgcaaaattgaagatccatcaggctttatcctttttcctctagttgttcattcttttgacttgattatatcctcaattggtattctatcaatcaagggaacacgtgatgctagtgtgaaatctccggtagaggatccaatggctgtacttcagaaaggatattctctgacaattatattagctggtataacatttgggcgcgtcgtacttcgctggctgctttacactgaacaagctccatctgcatggttcaatttcgccctatgtgggttggttggcatcatcacagcctatatctttgtctgg

SEQ ID NO: 87760 - DNA, 334 bp, Arabidopsis thaliana columbia
  unsure (1)..(334): unsure at all n locations
aaagaattacgctaagttaccaataagaaaggacacgcttgaggttaagaacataccaaatgaggcatctcgagccactacaacaacacatggaaactactacaaagtatctgacctcccaatgaccacaggaccagccagcggctttgcatgggctgtgaaaagacggaaagatcctgataatatctctactcttacctactatcaacccagctcgaagagtcaattgagtggaacaagtgttgcatttgcaaagaacacttttggtttgaacctgaaaccagacaatgactcagtttgggaggttcanggaaacaactatgatgatgttatc

SEQ ID NO: 87761 - DNA, 527 bp, Arabidopsis thaliana columbia
  unsure (1)..(527): unsure at all n locations
atgannnnnccagctctaatacgacctaccttagggaaagctggtacgcctgcaggtaccggtccggaattcccgggtcgacccacgcgtccgattgaatccttctcaaaactgggagattccatatattttcaagaagatggtgcaactccagctctttatgtcacccaatatatatcaagctcacttgattggaaatctgctggtctttcaatatctcagaaagttaatcctgttgtgtcgtgggatccgtacatgcgtgtgacattcactctttcttcttccaaagtgggagtggcgaaggagtcgactttgaatctaagaattcctgtttggactaactctataggtgccaaagtatctttgaatgggcgacccttaaacgtaccaacttcaggtaatttcctatcaatcaaacagaaatggaaatctggtgatcaagtaaccatggagctaccaatgagtatcagaaccgaagctataaaagatgatcggccagagtacgcatctcttcaagccatactctt

SEQ ID NO: 87762 - DNA, 530 bp, Arabidopsis thaliana columbia
agggaaggtggtccccctgcaggtaccggtcccgaattcccgggtcgaccccagccttccaagaagcgatgttcctggtggattggttctatggagttctggcaactctgggactatggcagaaagaagcgaagattctgtttctaggtctcgacaacgccggcaaaaccaccttgcttcacatgttaaaggacgagagactggtccagcatcagccgacacagcatccgacatcggaagagcttagtatcggcaaaatcaagttcaaagccttcgatttgggaggtcatcagattgctcgtagagtctggaaggactattacgctaaggttgatgcagtggtatacctagttgatgcatatgacaaagagaggtttgcagaatcaaagaaagagcttgacgctcttctctctgatgaatccctagcaaatgtccctttcctcatccttggaaacaaaatccacattccgtacgctgcatcagaagacgagctgcgttatcatctaggcctcaccagtttcaccactggg

SEQ ID NO: 87763 - DNA, 1586 bp, Arabidopsis thaliana columbia
  unsure (1)..(1586): unsure at all n locations
nnnnnnnnnnnnnnnnnnnnnnnnnnnnnnnnntgaaatctggattcgtctcctccattaaacatctctcgtctgataacaccgatccatctctttctttctctctccgtcgactctcgttcttaaagatgaaagctttctacgtattcgttgttgctcttcttctcaccttgaattataggggagaagcaagtggttctgttttcttcattgatggatccaacaatcaatatcttcgtccacgatcatccagtgaggcacttcccatgtcgcctgttgaaatatctgcagcagtgtctgccttgttgggttttgcaccttcagcaactttgacagctgatggctcatccaagttgaacaagattctaaaacctaatccatttgagaggcctcgcgctgcttttgtgctagaaatcgctggagctgatgatatgcttttggaaacctcccctagtcattctttcttgggcaatgccataaggagcagtattaagtctgattcgtacaaagctgatactgaacttccagacaatgaagtggttgttgtgtctgtcaatgaaccctcctctgatgtgactgacaaggacattaatgattttgcatcttggttgggtggatcatatgttgctggagctgaaccatcgtctggattgttgagtatccctctggctgggggtgctaatgtggagttcaatttggaaaaggaagcagagaggaaatttgcattgaaccttttgggtctatatcagaatatcagacaggcagtcagcgtttatgacgatttatctcatggtattgacagaactgccgaattaacggttggacgctttggtggtatcgatgctttagcacaggagtatggacaaggtatggctaagcaagggatggatgtattactttccacattatcaaagctattcaatctgttggagacatctcataaaggccaaattgttggggttatcgtccttgatgagagagtaaaccaagaatcagaaaatcttttgaactttgggtcttcccgttcatctgcacgctcaatggtggaagtggagggaattccaagtgcagccattatcgctgaggttatacttgttaggctgactcttgcatggttgactggaatcattcttctcattgcaactatccttggggtatacttccttatgaacatgcctttgacgaaggatactcttctatattcaaatgtaaagctcgactaagaaatgaaacagagcttcaaaacggcaaaaggacactgattttctctacaggtcgttcgtttacatatttttgtgtgtatcaagccgtgtttctcaactggccgcctttgaaaccggtgtcatttgaatgtttaaagagaaggatgaaacttttggtggtcagagcagttgatgtgttatgtgtatattgccatattggttgcattctcgacttataattattttctttcttacatacattttgagtctcagtcctaataataaaagaccactttggacacttgatgtgtatcttctgtctctgtaagagcttttgatcatgaatctgaatatattattgcaactaaaaaaaaaaaaaaaaaa

SEQ ID NO: 87764 - DNA, 521 bp, Arabidopsis thaliana columbia
  unsure (1)..(521): unsure at all n locations
atgannnnnnnnnnnnnnntacgactcactatttggaaagctggtacgcctgcaggtaccggtccggaattcccgggtcgacccacgcgtccgggtcaagtgcctggatggttatggatgctccctgttttgaactacgtgaatctttccaacaacactttcatcggtttcgaaagatcaacgaaacttggactcacctctatccaagaaccaccagctatgaggcaattgttttgctccaacaacaatttcacgggaaacattccatctttcatatgtgagttgccttatctcagcactctcgatttttctaacaacaaattcaatggttcaattcctacttgtatgggaaatattcagtctccatatcttcaagctctaaatcttcgacataattcggatgagtggacttcgtccagagaatatatctgagagtgtaatttgtcttgacgtcggccataaccaactagtgggaaagcttccaagatcgctaaggcatatctgttcccttggacttcgga

SEQ ID NO: 87765 - DNA, 1024 bp, Arabidopsis thaliana columbia
  unsure (1)..(1024): unsure at all n locations
gcgcnnnnnnnnnnnnnnnnnnnnnnnnnnnnnnnnnnnnnnnnnnnnnnnnnnnnnnnnnnnnnnnnnnnnnnnccacgcgtccggagcttgaatccgaggtacaagtgcgaacacctgtggaagaagaaccgattcaagagattgagaccatagttgatttaggaaatccagacaaagtatttgtgagagatcttcttgtggcttctggtttgtatgaaggcgcatcagatatatcattgtctagatgggatccattagcaaagcttataaaaaagtctgttcttgaagaaacaaaagagaatctcaagataagaagcactcagaatcaagaagacgacgacacaggagagactactataagtgaagaaaatcacaacatactgtttgatcttctgaatgaagtacttacggtggtgcttggaccattgacaaagtcaggtttcaagaacaaacttttgagttcatctgtgtctgaatcaacgactatacgaggtaaatttctgttagaatcaacatggaagatcatgtcggagtatttatattctcagccagagagacctttttgttcattggatgggatcattggttgggacatggataggtttccatggagtgctttgattggtgaagaagttaatgtgttggggaaagaagttgaaggtatgatcatggcagatcttgttgaggaacttgttaaggatctaagaagacaaatatgttaagaacttaagataagagttaagatgttgaagcagatctgattggttttggtttggtgaatatgaatggtttttagtgtgtttctgtaaataggtttttttttatggggtgtttttcttgaagaagggagttttcatggtaactgtatatgttttcttacagtataaggaagctagattcttctgatattttcctaatactaaaaagagtttctaaaagaaaaaaaaaacaaaaagggcgaccgctctagaggatccaagcttacgtacgcgtgnnnnnnnnnnnnnnnnnnnnnnnnncg

SEQ ID NO: 87766 - DNA, 368 bp, Arabidopsis thaliana columbia
gaataaacagaaggtgtcccaaccaaatacgccaagaatttcaccggtaaagtaagacggagtttgaacgaaaaagggtcctaagtacttcactctgtcaggtccataccaaagatcatttcccatagtgtacttgggagatccgagagagacaacatcacgaagggggttaaagcttgatggctttagtctggccaaggaatgttgttggggtaagaacactgctctgagctcgtgaatgttcacgccattgtctctctcggcttgagcttttcttttttgctgagtgttgttgttcttcttgttttgcgagtgtacgatttcatttatatatacacttacgtgtgtatgtgatatgacaatacact

SEQ ID NO: 87767 - DNA, 388 bp, Arabidopsis thaliana columbia
  unsure (1)..(388): unsure at all n locations
accaaaaaanccccccaaactttccccaancccccaanggaaaaccctcaaaaaaccccttgtttttggcaaaggccttccagggctctgcggataaaaccgggcggtgtcccaaccataatcgccagggaattctccggtcgaggtaagacggagtttgaacggaaaagggtcctaagtacttcactctgtcaggtccataccaaagatcatttcccatagtgtacttgggagatccgagagagacaacatcacgaagggggttaaagcttgaggctttagtctggccaaggaatgttgttggggtaagaacactgcttgagctcgtgaatgttgatgccattgtctcccccgcctgggcctttccttttttgcttagtgttgttgt

SEQ ID NO: 87768 - DNA, 508 bp, Arabidopsis thaliana columbia
  unsure (1)..(508): unsure at all n locations
tccaaaccacccttcgngaagnttttgnaaaccggcttttaacccagacttggttcctttgaaagcccacacggaccccactttttgaagaacttcaggggtttatgcaacccaaaaagctcccaaccaattgcccatctccccatggatcacctncaaagagctctctgttttttcgcgcaagaaggctttcagggtctgcggataaacccggcggtgtcccaaccataatcgccagggaattctccggtgaggtaagacggagtttgaacggaaaagggtcctaagtacttcactctgtcaggtccataccaaagatcatttcccatagtgtacttgggagatccgagagagacaacatcacgaagggggttaaagcttgaggctttagtctggccaaggaatgttgttggggtaagaacactgcttgagctcgtgaatgttgatgccattgtctctctcggcttgagcttttcttttttgcttagtgttgttgttcttcttgttt

SEQ ID NO: 87769 - DNA, 640 bp, Arabidopsis thaliana columbia
  unsure (1)..(640): unsure at all n locations
gcacccccctcgaggtcgactgtatcgataagcttgatatcgaattcgcggccgccttgaaaatttaagctccaggtgcaaacttagttgcgaaagcccacgcattgttagcaacagggttgtcaagatggtcaaggagattctccaaaggaccttttccagtaacaatggcttgaacaaagaagccaaacatagagaacatagccaatcttccgttcttgatctctttcaccttaagctcagcaaaagtaactggatcatcagcgagacccaacgggtcaaagtattgcccaccggggtacaagtcgttgccttcgccaacaccatcaagaccgttgatgcggaaaccttcaaccaaacccatgaggatgacttggaagccaaggacggctaaaatgctctgagcatggnctagggttggggtgnctaaagtagtccaaaccggctttcggagaagattttgtgaaccggctttgaaccagactnggtcttttgaaggncacacgggcccactttttgaagaacttcagggggtntgaaccaaaagtnccaaaantggccatttcccatgggnacctgnaaatgntggttggtatttccccgggttacattggggggggggttttgggcaccccagggc

SEQ ID NO: 87770 - DNA, 513 bp, Arabidopsis thaliana columbia
  unsure (1)..(513): unsure at all n locations
gcacaatgnacaaggtttggggtncccnaaagnngccaaaacccgncttcggnaaaaaatttgntaaaccgggcttttgaaccangctgggtcctttaaaaggccaacaccggnccccactttttgaaagcaaccttcagggggttatgcaaccaaaaagctcccaacattgcccatctcccatgggatcacctcaagagctccggttttgggcaaaggcttcagggtctgcggataaaccggcggtgtcccaaccataatcgccagggaattctccggtgaggtaagacggagtttgaacggaaaagggtcctaagtacttcactctgtcaggtccataccaaagatcatttcccatagtgtacttgggagatccgagagagacaacatcacgaagggggttaaagcttgaggctttagtctggccaaggaatgttgttggggtaagaacactgcttgagctcgtgaatgttgatgccattgtctctctcggcttgagcttttcttttttgc

SEQ ID NO: 87771 - DNA, 779 bp, Arabidopsis thaliana columbia
  unsure (1)..(779): unsure at all n locations
gaaanaacttnaattacccgggtaacttgtngaaccnccatntngaaaaggtncaaatggnnaggaatnccaaaggcctttcaagnaaatgcttgaaaaagaaccaacattgnggacatancaatcttcggtcttganctctttcaccttaagctcagnaaaagtaactggatcatcagcgagcccaacgggtcaaagtattgcccaccggggtacaagccgttgccttcgccaacaccatcaagaccgttgatgcggaaaccttcaaccaaacccatgaggatgacttggaagccaaggacggctaaaatgctctgagcatggactaggtttgggttgcctaagtagtccaaaccgccttcggagaagatttgtgaaccggctttgaaccagactggttctttgaagtccacacggacccacttttgaagaacttcaggggttatgcaaccaaaagctcccaacattgcccatctcccatggatcacctcaagagctctgtttttggcaaaggcttcagggtctgcggataaaccggcggtgtcccaaccataatcgccagggaattctccggtgaggtaagccggagtttgaacgaaaaagggtcctaagtacttcactctgtcaggtccatnccgnagatcatttaaaaaaaaaaacttgggagatccgagagagacaacatcacgaagggggttaaagcttgaggctttagtctggccaaggaatgttgttggggtaaccaccctgctttagaaagtgaagcttcatgccattgt

SEQ ID NO: 87772 - DNA, 691 bp, Arabidopsis thaliana columbia
caacaccatcaagaccgttgatgcggaaaccttcaaccaaacccatgaggatgacttggaagccaaggacggctaaaatgctctgagcatggactaggtttgggttgcctaagtagtccaaaccgccttcggagaagatttgtgaaccggctttgaaccagactggttctttgaagtccacacggacccacttttgaagaacttcaggggttatgcaaccaaaagctcccaacattgcccatctcccatggatcacctgcaaatgatgattagttatttactctgtttttacattgagttgcccatctcccgggactaccctcaagagctctgtttttggcaaaggcttcagggtctgcggataaaccggcggtgtcccaaccataatcgccagggaattctccggtgaggtaagacggagtttgaacggaaaagggtcctaagtacttcactctgtcaggtccataccaaagatcatttcccatagtgtacttgggagatccgagagagacaacatcacgaagggggttaaagcttgaggctttagtctggccaaggaatgttgttggggtaagaacactgcttgagctcgtgaatgttgatgccattgtctctctcggcttgagcttttcttttttgcttagtgttgttgttcttcttgttttgctgtttggtgaaagtattggtctcc

SEQ ID NO: 87773 - DNA, 473 bp, Arabidopsis thaliana columbia
tccacacggacccacttttgaagaacttcaggggttatgcaaccaaaagctcccaacattgcccatctcccatggatcacctcaagagctctgtttttggcaaaggcttcagggtctgcggataaaccggcggtgtcccaaccataatcgccagggaattctccggtgaggtaagacggagtttgaacggaaaagggtcctaagtacttcactctgtcaggtccataccaaagatcatttcccatagtgtacttgggagatccgagagagacaacatcacgaagggggttaaagcttgaggctttagtctggccaaggaatgttgttggggtaagaaccactgcttgagctcgtgaatgttgatgccattgtctctctcggcttgagcttttcttttttgcttagtgttgttgttcttctcccttccgtcgtttgggtacgactcagtatagaggcttgcgtcgacccacgag

SEQ ID NO: 87774 - DNA, 506 bp, Arabidopsis thaliana columbia
  unsure (1)..(506): unsure at all n locations
cgcattgtgttgattctggaattctttgtgggaacgagaaatttgttcttgggagattcatcatggctgatagttgttgtatcagacttcacttattagcctctgttttcttgctcttattttcatccttcaacttgcagggtattgcagcggaaaatctttccaagcagaaactgacctcactgattcttcagaatgagattgtaaaggaagtcaatgagaatccaaacgctggttggaaagctgctttcaatgatcggtttgcaaatgccaccgttgcagagtttaagcgactcctcggtgttatacaaacaccaaagacggcatacttaggtgtacctattgtaagacatgatttatcgttgaagcttcctaaagaatttgatgctagaaccgcttgggcacattgcaccagtatccgaaggaccttaggccgggttaacccctanntccanaaccccggcannaacccanngntnccgggccccccaaggntnggncaaaaa

SEQ ID NO: 87775 - DNA, 619 bp, Arabidopsis thaliana columbia
  unsure (1)..(619): unsure at all n locations
ttttaagcagtatttgtaagaaaatggcttccaagactttgcttcttttgggtctctttgcatttcttttcatcgtctcagaaatggctgccgcgggcacggtgaagtcagagagtgaggaaactgtgaaacctgaacaacatggtggtggattcggtgacaatggaggaggaagataccaaggaggaggcggccatggtggccacggagggggaggataccaaggaggaggaggacgataccaaggaggcggtgggcgacaaggaggagggggaagttactgccgccacggctgctgctacaaaggttaccatggctgctcaaggtgttgttcatatgccggagaagcggttcagactcagtctggtcactaaatctacataatatatcaaccaccatgagtgtacgatttcatttaatatatacacttacggtgtgtatgtgatattgacaatacacttacgttttgtaaattgaagtgccttaaagtttaagagggggaactttcggaataaagtttcataaatggaatccctttgnggttaatttnaagttgtaatttcccntgnttccaaaaanaanttgttcctagcggccccgatccctgancccgggggnc

SEQ ID NO: 87776 - DNA, 697 bp, Arabidopsis thaliana columbia
  unsure (1)..(697): unsure at all n locations
tgannnnnnnnnnnnnnnnnnnnnnnnnnnnggacaggtggtacgcctgcaggtaccggtcccggaattcccgggtccgcacccacgcgtccgccctgatgacattatggcagaagtttacaaaaatggacctgttgaggttgccttcactgtttacgaggactttgcgcattacaaatctggagtgtacaagcacataacaggtactaacattggaggtcatgctgttaaacttattggctggggaacttctgatgacggtgaagattattggttgcttgcaaatcaatggaaccgaagctggggtgatgatgggtacttcaagatcaggagaggaacaaacgaatgtggcattgaacatggtgttgtagctggtttaccttcagacaggaacgtagttaaaggtattactacttcagatgatcttcttgtttcctcattttaaacaggaatatgtgtctctactctgtaatacataatttcccactgtgttgttgttaccaatgaaataaaacgactttcaacccaaaaagaagtctattgtatataccatttagctttttgttcatattcaatataatgtgttgttgtttccaatgaaagaatcaaaagacattcaactattctacatatcagannnnnnnnnnnnnnnnnnnnnnnnnnnnnnnnnnnnnnnnnnnnnnnnnnnnnnnnnnnn

SEQ ID NO: 87777 - DNA, 732 bp, Arabidopsis thaliana columbia
atacgactttattagggaaacctggtacgcctgcaggtaccggtccggaatttccgggtcgacccacgcgtccgcccacgcgtccgaaactgtgaaacctgaacaacatggtggtggattcggtgacaatggaggaggaagataccaaggaggaggcggccatggtggccacggagggggaggataccaaggaggaggaggacgataccaaggaggcggtgggcgacaaggaggagggggaagttactgccgccacggctgctgctacaaaggttaccatggctgctcaaggtgttgttcatatgccggagaagcggttcagactcagtctggtcactaaatctacataatatatcaaccaccatgagtgtacgatttcatttatatatacacttacgtgtgtatgtgatatgacaatacacttacgtttgtaatgaagtgccttaagtttaagaggagaaactatcggaataaagtttcataatgtaatgcctttgtgtttatttaagttgttatttgcgatgtttgcataataaagttgtttctagttgaagttggcagaaatcgaaaaaaacgggggggccgctttgtattccgcaagcttaccttctctggctcacactttcttttcttgtcattaagatacctatatacacccaccggggatcaggtttaaagggggagaccaggaaatctttaattgtgcactttatcggttcaaatattttgttt

SEQ ID NO: 87778 - DNA, 1056 bp, Arabidopsis thaliana columbia
  unsure (1)..(1056): unsure at all n locations
ggagaaagctggtacgcctgcaggtaccggtccggatataccgggtcgacccacgcgtccggtggttcttgctgggcatttggtgctgaagaatcactatcagatagattctgtatccaatttggcatgaacatttctttatcagtaaatcgatcccctagcttgttgtggattccgttgtggtgatggttgtaacggtggctatccaattcctgcttggcaatacttttcgtatagcggtgttgtcacagaagagtgtgatccatactttgataataccggatgctctcacccgggttgcgaaccggcatatcctacaccgaaatgttcgaggaaatgcgttagcgacaacaaactatggagcgagtcgaagcattacagtgttagtacatacactgtgaaatctaatccacaagatatcatggcagaggtttataagaatggacctgttgaagtctcttttaccgtttatgaggattttgctcattacaaatctggagtctataagcacataacaggttctaacattggaggtcatgctgttaaacttattggttggggaacctagcagtgaaggagaagattattggttgatggcaaatcaatggaacagaggctggggtgatgatggttatttcatgataaggagaggaactaatgaatgtggaattgaagatgaaccagtagctggtttgccttcaagcaagaatgtgtttagggttgataccggttcgaatgatcttccggttgcatcggtttaagatcaaagatggaaatgttgcatcggtttaatatcaaagatgaaaagttgtttgtaagatatatatgttatggttgttgtttccagtaaaagattccggtgactagaaattgttttctggttggctgtgaaaatgttatacaaataaacacttcaacttaagcaatataatatcatttctacttaaaaaaaaaaaaaaaagnnnnnnnnnnnnnnnnnnnnnnnnnnnnnnnnnnnnnnnnnnnnnnnnnnnnnnnnnnnnnnnnnnnnnnnnnnnataatnnnnnnnnnnnnnn

SEQ ID NO: 87779 - DNA, 1323 bp, Arabidopsis thaliana columbia
cttatacaaacagatctttttgaaattggattcatctaagaagcagactctgttttcatggctgtttacaataccaaactctgtttggcctctgttttcttgctcttagggcttctcttggcttttgacttgaagggtatagaagcagaaagtcttaccaaacagaaactggactcgaagatacttcaggatgagattgtgaagaaagtcaacgaaaacccaaacgctggatggaaagctgctataaatgatcgattttcaaacgccactgttgcagagtttaagcgtcttctcggtgttaaaccaacaccaaagaagcatttcttaggtgttcctattgtgagccatgatccatctttgaagctacctaaagcttttgatgctagaactgcttggccacagtgcactagtattgggaacatcttagatcagggacattgtggttcttgctgggcatttggtgctgttgaatcactatcagatagattctgtatccaatttggcatgaatatttctttatcagtaaatgatctcctagcatgttgtggattcctttgcggtcaaggttgtaatggtggatacccaattgctgcgtggcggtactttaagcaccacggtgtagtcacatgaagagtgtgatccatacttcgacaatactggttgctcgcacccgggatgtgaacccgcttaccctacaccaaaatgtgcaaggaaatgtgttagcggaaaccaagctttggcgtgaatcaaaacattatggtgttagtgcgtacaaggtcagatctcaccctgatgacattatggcagaagtttacaaaaatggacctgttgaggttgccttcactgtttacgaggactttgcgcattacaaatctggagtgtacaagcacataacaggtactaacattggaggtcatgctgttaaacttattggcttggggaacttctgattgacggtgaagattattggttgcttgcaaatcaatggaaccgagctggggtgatgatgggtcttcaagatcaggagaggaacaaacgaatgtggcattgaacatggtgttgtagctggtttaccttcagacaagaacgtagttaaaggtattactacttcagatgatcttctggtttcctcagtctaaacaagacgatgtgtccctactctgtaatatatcatttgcaactgtgttgtagtttaatataccattgaaagaatccccttcaatccaaaaaaaaaaaaaaaaaaaaaaaaaagggcggccgctctagaggatccaagcttacgtacgcgtgcatgcgacgtcaagctcgtctatagtgtaacgg

SEQ ID NO: 87780 - DNA, 743 bp, Arabidopsis thaliana columbia
ctctctttctctctttttgctatcgtggggaaaaagattcattctcccaccattgaggtttaacttatacaaacagatctttttgaaattggattcatctaagaagcagactctgttttcatggctgtttacaataccaaactctgtttggcctctgttttcttgctcttagggcttctcttggcttttgacttgaagggtatagaagcagaaagtcttaccaaacagaaactggactcgaagatacttcaggatgagattgtgaagaaagtcaacgaaaacccaaacgctggatggaaagctgctataaatgatcgattttcaaacgccactgttgcagagtttaagcgtcttctcggtgttaaaccaacaccaaagaagcatttcttaggtgttcctattgtgagccatgatccatctttgaagctacctaaagcttttgatgctagaactgcttggccacagtgcactagtattggaaacatcttagggttggtgttatgcttctagctttttcctcacaattttagtgttcaactgcatttccgtattaactcttgggttttggggtgggggggagactgctctatgaaccggacaaggtaaatatccaatctttgtggattcgtgaacctttagaatttgcctaaagaactaatggctttatgagattttggggtttggcttatggaccatgtgggtcttgctgggcaattggtgctggtgaatcccttttaaattaa

SEQ ID NO: 87781 - DNA, 870 bp, Arabidopsis thaliana columbia
  unsure (1)..(870): unsure at all n locations
gagaaaagaaaactttgtaccttttccaaagtctaagcaaatcattgtttttgattactggaactcgttgagggattgagaaaaaaataatcagaagagaaagatccatggctgataattgtatcagacttcttcactcagcctctgttttcttctgtttagggcttctaatttcatccttcaacttgttgcagggtattgcagctgaaaatctttccaagcagaaactgacctcatggattcttcagaatgagattgtaaaggaagtcaatgagaatccaaacgctggatggaaagcttctttcaatgatcggtttgcaaacgccactgttgcagagtttaagcgccttcttggtgttaaaccaacaccaaagacggaatttttgggtgtgcctattgtaagccatgatatatctttgaagcttccaaaagaatttgatgctagaaccgcttggtcacagtgcaccagtattggaaggatcttagatcagggtcattgtggttcttgctgggcatttggtgctgttgaatcactatcagatagattctgtatccaatttggcatgaacatttctttatctgtcaatgatctcttagcatgttgtggattcctttgcggtcaaggttgtaatggtggctacccaattgctgcgtggcggtacctttaagcaccacggtgtagtcacctgaagagtgtgatccatactttgacaatactggttgcttgcacccggggtgcgaacccggttaccctccttcaacngaaattttcgggggaaatcngtnnggcaacaaactttgggggngtcgaggattacagggtnagacanacnctgtgaatctaatccccaagntttcatggggggggta

SEQ ID NO: 87782 - DNA, 936 bp, Arabidopsis thaliana columbia
agacgagctatgacgtcgcatccacctgtttttgagacttcatctgtgcatagcaaatagaagatttgtaatttgagaggaacaagaaaggttatgttcatatcattacaagaatcacatcaagacttgaaaatttaagctccaggtgcaaacttagttgcgaaagcccacgcattgttagcaacagggttgtcaagatggtcaaggagattctccaaaggaccttttccagtaacaatggcttgaacaaagaagccaaacatagagaacatagccaatcttccgttcttgatctctttcaccttaagctcagcaaaagtaactggatcatcagcgagacccaacgggtcaaagtattgcccaccggggtacaagtcgttgccttcgccaacaccatcaagaccgttgatgcggaaaccttcaaccaaacccatgaggatgacttggaagccaaggacggctaaaatgctctgagcatggactaggtttgggttgcctaagtagtccaaaccgccttcggagaagatttgtgaaccggctttgaaccagactggttctttgaagtccacacggacccacttttgaagaacttcaggggttatgcaaccaaaaagctcccaacattgcccatctcccatggatcacctcaagagctctgtttttggcaaaggcttcagggtctgcggataaaccggcggtgtcccaaccataatcgccagggaattctccggtgaggtaagacggagtttgaacggaaaagggtcctaagtacttcactctgtcaggtccataccaaagatcatttcccatagtgtacttgggagatccgagagagacaacatcacgaagggggttaaagcttgaggctttagtctggccaaggaatgttgttggggtaagaacactgcttgagctcgtgaatgttgatgccattgt

SEQ ID NO: 87783 - DNA, 654 bp, Arabidopsis thaliana columbia
  unsure (1)..(654): unsure at all n locations
nnnnnnnnnnnnnnnnnnnnnnnnnnnnnnnnnnnnnnnnnnnnnnnnnnnnnnnnnnnnnnnnnnnnnnnnnnnccacgcgtccgcccacgcgtacgtacactttttattgcagtaactctggctctcgctctctcctcttttcacaagaggccagagagtgatacagattccaccaccacgtccactatagcgcgtctcaatacgccctagctaactacgcctgctcacgtctcccaatgcacactgtcccaccacctgcccccattaccccacctcctgctcccatcgctcccccgcctcctgaacatgaccaccacgaccacgaccctgaccatgaccacgaccaccaccacgacgatgaccacgatgacgaatgatgaccatgaccacgatgatgacgcaccatcacgaccatgacgatgatcacgaccaggaccacgatgacgcgtgaccgcgaccgtgaccgcgaccgctaccggaaccgggaccgcgagcatagaccgngctcagatgaccatgaccatcaccttgaccatgacattgatcccaatgaccacaatctcgaccttaatcatgacgccgaccaacacaacagtggcgactacagccacgatcaaaacacgcggttaaaccaccggcaccagcagcggg

SEQ ID NO: 87784 - DNA, 451 bp, Arabidopsis thaliana columbia
ggctcgaccacgcgtcaggaaaacgacagaagggggagaagaagaagttgaaaaaattgtaaagtcagtctctccgactcttccttccttccgtgttcaccattgctacacgttctccacgaactttccgatgcccagtcgtcggagacatagctacaccgtcggatctcctgcaaccacatcttccaattacagtaacactactttcaccgatcgttccttcccgacaacccctgcccgtacatccaccgacacaaccacctccatcgctcgtcgcatctccggtatcttcatcaactgcttcactcctcccgattccgtttcctccaactacatcgacaattcaaagtcctcttccgacaataatatccgtagtagacgtagctcaacaggaagtagtagtgtacagaggagttatggaaatgcaaacgaaacagagcttacaggattc

SEQ ID NO: 87785 - DNA, 524 bp, Arabidopsis thaliana columbia
aatacgactcacttagggaaagccggtacgcctgcaggtaccggtccggaattcccggttcgacccacgcgtccgcccacgcgtccggtgtttacgaaagttcttgaaatttgaagagatctcacagatgagaagtgctataggaagaagattctcaaaccctaatggcttcaccattgcatccttagtcaaacaaactccatttctcacccaatccacatctcatttctcctcttcctccgactcctccggccgtggtcgtggacgcggttccggtgaagatggaggatttcccgccgctggaagaggacaattcggtgtaaatcgtgaaccggtggttcctggacgtgaaccgtcatctgccggaggttatggtcatggtcgtggtcgtccgatccaatctgattcgatttctcctgcgtttacgtcatttgtcaaatcagattctcctagtattggccgtggaagaggacccgttggatcagacaccgtttcacctttcgctgctgaacctcctcgccaat

SEQ ID NO: 87786 - DNA, 546 bp, Arabidopsis thaliana columbia
  unsure (1)..(546): unsure at all n locations
tacgactcactatttggagagctggcacgcctgcaggtaccggtccggaattcccgggtcgacccacgcgtccggcaattcggtggtcagcatggtggggttccaacttttggaatggctcttccaggttatttccaaccagaacatggtaccggaaatcctgagatgacatgggctgccaattttggctggccctggagcattagggggttcatattggccacctttatactgtccttgatgggtcttaccaagcagacaaaccaggggtaccttcctctgccggatcgtccagccaagagaacagttccaataatcctaatgatgaagagcccatggagagacctgaggttacgaacaatgggaattctcaacggtcaaatagcaaccccaaacaagcagccctcgtagatacttcggagatgagcctttaagcaggtggagtaaagaagagtggaaaggaaagaaggtcatctaatttgactaagttggagtgaaaggaagaaggtgagagaaaaaaaactccttanngaacagcaggccctt

SEQ ID NO: 87787 - DNA, 786 bp, Arabidopsis thaliana columbia
  unsure (1)..(786): unsure at all n locations
tcttacgctatgccataaatggcgtatcgtgcgtgccttcggatactccgctggagcttgcggatcatttcaaaataaaagatgtttttaaagttggaaccatccctgacaagccgagaagaggaggaggaataaggctagacacagcagtgatgggagcacaccacaatgcttttcttgagatcatctttcaaaaccgcgagaagatcgtccaaagttaccacctcgatggatacaacttttgggttgttgggatcaataaaggaatatggtcacgtgcgagcagacgagagtataacctcaaggatgctatatctcgctccactactcaagtatatccaaaatcttggacagctgtatatgtggcattggacaatgtggggatgtggaatctaaggagccagttctgggcgagacaatacttaggtcaacaattctaccttcgagttcattctccaaatcactctcccaaagatgaataccctttgccaaagaatgctttgttgtgtggtcgggcctccaacaaaaacatgtccatcatcactccttagatcctgttggcatgacataaaatatgagactttgtcttccgcacaatccaacacaaagcgcttcaaaatagcttccctctttgcactagtagcgtttaatacttcagccatatatatttgtacatctttgtaaaaaaaaaaaaaaagnnnnnnnnnnnnnnnnnnnnnnnnnnnnnnnnnnnnnnnnnnnnnnnnnnnnnnnnnnnnnnnnnnnnnnnnnnagcaatccgcaagc

SEQ ID NO: 87788 - DNA, 748 bp, Arabidopsis thaliana columbia
  unsure (1)..(748): unsure at all n locations
cgcgnnnnnnnnnnnnnnnnnnnnnnnnnnnnnnnnnnnnnnnnnnnnnnnnnnnnnnnnnnnnnnnnnnnnnnnccacgcgtccgcccacgcgtccggtttttttttatattattcaaattccgcctccaaaatcctctctttctgcgatttctatcacttcacgcgcattgagagcgagagagagagagacccaagcaagagctcaaattagggttatttttccgatttgagagatccattaacaatggcgtggtcgtcggaaacgccgtcgtattgcggctggaatgagcgacatgtgaagaacacgaaagaaaagatggaggttcattattatctcgagaggaaagatggaattgcagatctagctgttattgggaggttgaagaattctaaacgcatgtcttttagatacgctttgaagaagaatcgctctgtcttgaaaaagcttaattctaaagatgatgttgcgccttggctcgattctattgtttctggtgagatacctcatgtagcagatgtaccagctactgttatgactgaaaaagatgctggagggttcaatatgagcacttttatgaataggaaatttcaggagcctattcagcagatcanaacgttctcttggatggggttttcttggacttgcaggaaacggcgtaagcattatcagtcttatctccggatggggtcagatatctgggaatgatttgtgatgtttagcggacaacatagagacttgtgctaa

SEQ ID NO: 87789 - DNA, 507 bp, Arabidopsis thaliana columbia
  unsure (1)..(507): unsure at all n locations
nnnnnnnnnnnnnnnnnnnnnnnnnnnnnnnnnnnnnnnnnnnnnnnnnnnnnnnnnnnnnnnnnnnnnnnnnnnnnnnnnnccacgcgtccgcaacatttgaagctcatcatacttcttgtggctttctctttacacctcttcattgctttcatatctctactttcattcatatccaacaaaaaatatcaatgatgtcttttgtcgcaaacttggccatcaagagatttgaccatgcttccaccgtgtatgttgaagatgtggtagatagttctcgagtggcatatagtgagaatggtggtgatgacgatgacagtggctatgattatgctcctgctgcgtgattgtttcctattagtatatgattgtaatttaggaggaaacaaaaagacagagatgataaggtaatttagatatctagctaggccatgtatgtactaaatagtttggtgagtcttcttatagatgaacaaacatggtttccatagatgtttacttgtggattga

SEQ ID NO: 87790 - DNA, 456 bp, Arabidopsis thaliana columbia
ccgtgcttccgtggtgtatgttgaagatgcctgaagaaagattcaccaaactcatatcaacactaaaacctcatcacacttcttcactcggtgaatctttcttcaggcctcttcataacagaaaaaaaaaatgatgtcttacgttgctaacttggtcatcaagagttttgaccgtgcttccgtggtgtatgttgaagatgtggtggatagctctcgagcgacatgtgttgagaatggtggtgatgacgatgacagtggctatgattatgctcctgctgcgtgattgtctcctattagtataatgtaatttagaagaaaaaaagagagagagagagatgataagataatttagatattagttagaccatttatgtactagattgtgtctcgagttttcttgtcaatgagcaaacatggtttcctagtgtcttagtccttaaccacaatcactttttt

SEQ ID NO: 87791 - DNA, 609 bp, Arabidopsis thaliana columbia
cttgaagattttatgaagatggtggaacacgatgcgtcttcgaaggctggaactccgcatttccgtaaccgtaccaacaagtgggaggatggttcagtgtcagagatatcaggcgtggttgatccagacaggaccagtttcatatcagatgggacgtcaacgcctctgtcgactgcaagagctcatgttaggtctcactctgatgatgatctggaggaggaaatgtcgcccaggcattcaggagatcaatcagaagaatactgcaaagaggtacaatgcattgagatggaagaatcgaccagagacattaataacgacagtgaagaaaggacagacgcagaaacacttttgggacacaatgcagaggcaaacggtgaaacaggtagtgctcaacacaggatcccgtcaagtgttagaagtgtcaggaggaggaagagttggagccgtggagataccatgacaggcacaagcactcctcctgatgccctggagacagactaccgtggaagaccggagggtcatggatttgcgtttcctgatttggagtttggttctggtgggaaattgttgaggaacgattcaatgacttctcgtggaagtgattcaact

SEQ ID NO: 87792 - DNA, 522 bp, Arabidopsis thaliana columbia
  unsure (1)..(522): unsure at all n locations
cnnnnnnnnnnnnnnnnnnnnnnnnnnnnnnnnnnnnnnnnnnnnnnnnnnnnnnnnnnnnnnnnnnnnnnnccacgcgtccggtttgtatgggatgtgaggagtccctatcaaaacacgtcaatggttggaatttgtttccaaatttcaaatcgggaagagtagtaactcaacatcttgtatgcattcagatattaagtctttcttgttcaaagaggaaaactgaaacaacagtatttgtttgatgaaatcgatggtgaagaagttgaagcagagtctgagatctggatcgttagagaaaaggaaggaaaaggaaaaagacattcaggaagaaaagtggttcttagaccacggaagcatcttcttgaaagaacttattgctgattgtaacggtaaatccattcctatacgtaacttttcttctgaccagatcttgaaagctacaagtaacttcggttcccaggtgttttgtaccgcagaggggttttatgtatggtacaaaggtatcatagaagatagatc

SEQ ID NO: 87793 - DNA, 467 bp, Arabidopsis thaliana columbia
tctcaaaggaccctttttttacaattatacccttctccttcccagttctctcatggtccgccgaacattcctgctggagagctgagaaatcaccatgggagtcgctgttcttcatcctcatgattctataatcaatcatttctccacaaacacgtcccctcctctcccgcataaaaaaccgatcaccaatcgccgtcgccggagtccgtcaagtcaccaatcccagatctctcatcctcctccgtctcctcataaccacaccattcatgtacgaattctgaagcgtggcgaagatatcaacgttaagataccgattgaaaaaccagatctgaaatctaatcgtcagatcggatcagatccgatgaaaatttcgccctccgatcagaatttcaaatcggaaatccatgccggcttggttttacgctggtccagtcacatcaacatctccgccgccgagtgaagtccct

SEQ ID NO: 87794 - DNA, 539 bp, Arabidopsis thaliana columbia
  unsure (1)..(539): unsure at all n locations
ctcaaaggaccctttttttacaattatacccttctccttcccagttctctcattatcctcctaacatttcttctctagatctgagaaatcaccatgggagtcgctgttcttcatcctcatgattctataatcaatcatttctccacaaacacgtcccctcctctccgtcataaaaaaccgatcaccaatcgccgtcgccggagtccgtcaagtcaccaatcccagatctctcatcctcctccgtctcctcataaccacaccaatcatgtacgaattctgaagcgtggcgaagatatcaacgttaagataccgattgaaaaaccagatctggaatctaatcgtcagatcgggtcagatccggtggaaatttcgccctccgttcaggattttcaaattggggaatcccgggnggggtttgttttacgggggggcccgggcaaatnaaaatttccgggcgccgggggggagggccctttaccgggttttttgggtaaaaaaaccggggggggtttaaacccgcccggggaacaanggttttt

SEQ ID NO: 87795 - DNA, 698 bp, Arabidopsis thaliana columbia
  unsure (1)..(698): unsure at all n locations
cccttcccccatattcgattgagcnngcgagttcacgttagntccgnttgaaaccngacngaatctatcgtcagacggatcagaccggtgaaattcgactccgatcaggattncaaatcggaaatccatgccggctttgttttacgctggtccagtcacatcaacatctccgccgccgagtgaagtccctttaccggctttcttcgctaataaaaccgtcgccggattcaaaccgaccgatgcaaccaacgatctgatcaaaatcctgcgattagatatcgcatgattcatttctttctccgatcatccaaatccgtcttaaaccggtccgatctcgcattctctccgatcatggggattgaaaagagtgtcttcgttatgaaacgttttcgaattcttctcttattttttcaaggggaagatcgaagaagtaatcttcttaaacaagtcttagttttgcttgtagctaggatcaatgtgtagtatatgtgaataagcttttcgcagttctttgtctatttctaggttctttttgaataaatctaaatggcttgtaagttgtaacgtaagtggtatcgatgcaatttgattagttgggaacaaaaaaaaaaaaaaaagnnnnnnnnnnnnnnnnnnnnnnnnnnnnnnnnnnnnnnnnnnnnnnnnnnnnnnnnnnnnnnnnnnnnnnnnnnnnnnnc

SEQ ID NO: 87796 - DNA, 485 bp, Arabidopsis thaliana columbia
aatacgactcactttagggaaagctcgtacgcctgcaggtaccggtccggaattcccgggtcgacccacgcgtccgggaagaaatagatgataaagtgattaatttggatgaagatgaacctctgtctccaatggtagtagaggaagcatgtgaacttcctgaagggttaccagaagatatttactacccatcaagtgatcaaagtgatgggcgagaccttgttcaagtatctcttaaagatctgaaatgcctttcacctggggaatatcttacatcgccagttataaatttctacatcaggtacgtgcaacatcacgtgttttcagctgataagactgctgctaattgtcatttcttcaatacgtttttctacaagaagctcacagaagctgtttcatacaagggtaatgacagggttctttttttttaaattccaggggggggggaaagggtttaatctttttggaaatttttttttttttcc

SEQ ID NO: 87797 - DNA, 509 bp, Arabidopsis thaliana columbia
  unsure (1)..(509): unsure at all n locations
nnnnnnnnnnnnnnnnnnnnnnnnnnnnnnnnnnnnnnnnnnnnnnnnnnnnnnnnnnnnnnnnnnnnnnnnnnnnnnnnnnnccacgcgtccgcacttttattcaaagaaaatacttaactttcttttcactaaagctattcgaaaatgtcaagcaactcccagaacattagcttccaagctggccaggccaagggccaaactcaggagaaggctagcaccatgatggacaaggctagcaatgctgcccaatctgccaaggagtctctcaaagagaccggccagcagattaaggagaaggcacaaggagctaccgaatcagtgaagaacgccaccggcatgaacaaatgaatacaataatcatatgattcattatgttattttttttacgaataaaaacaataattcattttttgaaacctaaagattaggttcaacggtttgattattcagactgttgtttctttctttcttaatattattacttcttctcttggatttttgtttct

SEQ ID NO: 87798 - DNA, 624 bp, Arabidopsis thaliana columbia
  unsure (1)..(624): unsure at all n locations
tcgtctcacgcgtccgattgaagagaagctctaaagattctttgtctctttctctgtcgcattgatttgtaaaaaagtgtggcagagagaaaccatggctatggcggaaatggcaacgaagtcttcactatctgcaaaactcactcttccttcttcttctactaagaagacactgagtctgagacaagtctctgtttcacttccaacatcaacttcaatctctctgttatctctctttgcatctcctcctcatgaagctaaagctgctgtttccattcccaaggaccaaatcgtctcctctctcactgaagtggagaaaacaatcaaccaagttcaagaaactggttctagtgtatttgatgcaacgcagcgtgtgttccaagtagtaggagatgctcttaaaccagctttggacactgctttacccattgcaaagcaagctggtgaagagctatgaagcttgcttctccctgctttctctgaagnttcaaagnaagctcaaggaggaattcaagngctctcgggttttnatcctggnccggttttaatcctgcaaaggcagtaccagttnngngaaaaagggcccaagggttagagggtttaancggtttnttnttgccangg

SEQ ID NO: 87799 - DNA, 686 bp, Arabidopsis thaliana columbia
tcaaacttcacctctgctttcttcttctcgagtgaaacagacagccaaatcaagatttgacggtgagccaaattccatggcactgtttcaggagaagctttcatcactttcctcaagttattcgtcaattcattctcttccgaggattctcgtgtccaagcctcgtaatagaattgccgtgacaaagtcccgttcgatttgcagagcttcgtggcaagagctcgccggagtgttggttttctcggcgattccattcactgcggttaaagcaattgcaaatagctcaataggagtttctctacggcggagattagaagagaaaaagaaggaagccgtagagaattcttcaagattcaagtctaaagctcaggaagctagaaacgacagcaagtggtatggaaaagaacgtccccgttggtttggtccaatcccatatgattatcctccataccttacaggagaacttccaggggattatggtttcgacattgcaggacttggcaaagatcgtttgacctttgataagtatttcaactttgaaatacttcatgctcgttgggccatgcttgcagcattgggtgctctaatcccggaagtatttgatctcactggaactttccattttgctgaacccgaatggtggcgagtcgggtactccaagcttcagggagagacattggagtacc

SEQ ID NO: 87800 - DNA, 815 bp, Arabidopsis thaliana columbia
  unsure (1)..(815): unsure at all n locations
tatacgactcctatagggaaagctggtacgcctgcaggtaccggtccggaattccctggtcgacccacgcgtccgctcaaagtcaacacatgctaccggaagaagattcgagtctctcggaaatggcatcacacgaccaccatcatcatcatcacgatcattgagcatgaccacgagaaatcagacggcggagaagggaaggcgtcgtgggtggggaaggacgggaaggtgtaccatagccacgatggactcgcacctcactcacacgaacccatctactctcctggctacttcagtcgccgagctcctccgcttcacgaccgtaacttctctgagagagcttttaccgtcggtattggcggtcccgttggcactgggaaaacggcattgatgcttgctctttgtagattcttgagggacaaatatagtcttgctgctgtgacaaatgatatattcacgaaagaggatggtgagtttctggtgaagaatggggctcttcctgaggaaaggattagagctgttgaaacaggtggatgtccacacgctgctatccgtgaagatatcagtatcaatttgggtcctcttgaggagttatctaacttattcaaggctgatttgcttctttgtgaatccggtggagataatttagctgctaatttcagtagagaactagctgactatatcatctacatcatcgatgtatcggctggtgataaaataccccgtaaaggcggcctggatcactcaagctgatcttctggtngataacagactgaccttgcgcagctgttggggctgacttatcggtcatggga

SEQ ID NO: 87801 - DNA, 1155 bp, Arabidopsis thaliana columbia
  unsure (1)..(1155): unsure at all n locations
agtgtgagtaatttaggaagattcgagtctctcggaaatggcatcacacgaccaccctcatcatcatcacgatcatgagcatgaccacgagaaatcagacggcggagaagggaaggcgtcgtgggtggggaaggacgggaaggtgtaccatagccacgatggactcgcacctcactcacacgaacccatctactctcctggctacttcagtcgccgagctcctccgcttcacgaccgtaacgtctcgctcaagccgaattctgagagagcttttaccgtcggtattggcggtcccgttggcactgggaaaacggcattgatgctggctctttgtagattcttgagggacaaatatagtcttgctgctgtgacaaatgatatattcacgaaagaggatggtgagtttctggtgaagaatggggctcttcctgaggaaaggattagagctgttgaaacaggtggatgtccacacgctgctatccgtgaagatatcagtatcaatttgggtcctcttgaggagttatctaacttattcaaggctgatttgcttctttgtgaatccggtggagataatttagctgctaatttcagtagagaactagctgactatatcatctacatcatcgatgtatcggctggtgataaaataccccgtaaaggcggccctggaatcactcaagctgatcttctggtgataaacaagactgaccttgcagcagctgttggggctgacttatcggtcatggaaagggattcactacgcatgcgtgatggagggccatttgtctttgctcaggtgaagcatgggcttggagtcgaggaaatcgtgaaccatgtcatgcactcatgggaacatgcgaccgggaagaagcgccagtgatgatggggttcttaagacccaaaatggataagatatgaaactgaatggaactctttcaatacttatcttgaactcaatttatgcgcaaaagtctatgtaatctgtttgttgtactcaagacataagagaaataaaaggtttgagcatgagactcattacattctaaaaaaaaaaaaaaaaaaagaaaaaaaaaaaaaaaaaaaaaagggcgccagctctagaggatccaagcttacgtacgcgtgcatgcgacgtcatagtaactctantagtgt

SEQ ID NO: 87802 - DNA, 1165 bp, Arabidopsis thaliana columbia
  unsure (1)..(1165): unsure at all n locations
ctacgactcactatanggaaagctggcacgcctgcaggtaccggtccggaattcccgggtcgacccacgcgtccgctccgatgacacaaaacgaggaagattatttgacattttaagtaagaacagctagctttgccatctccctaaaggcaataaatctcggatccactttcacgatattttgatattttttctatttataatctttctgggttttgagtcttttgaaggctgaattgctctgaaatctcaattgtataatcatctcctgggtcgtcgttatcgtgatcatctagaagaaagcatgactacactagatttgaccagagccgagcttgctcttattgttctctatttgaacaaagctgaggctagagataagatatgcagagctatccaatatggttccaaatttttgagcggtggccaacctggtactgctcaaactgtcgacaaaaacaccagcttggcgagaaaagttttccgtcttttcaagtttgtcaatgattttcacggtcttatcagccccgtgcctaaagggactccacttcctcttgtcttactcgggaagtcgaagaatgcgctcttgtctacctttttgtttcttgatcaaatcgtctggcttggtagatccggcatatacaagaacaaagaacgaactgaattgcttggacgtatatcacttttctgctggctgggatcatccgtttgtacaagtgcagtcgagattggtgagcttggaaggctctcttcatctatgaagaagatggaaaaggaactcaaagctgatgatgagctgtatcgtgctaagcttcagaaatcaaacgacagaactctagctttgattaaatcaagcatggacattattgtagccattggtctccttcagttagctccaaagacgattagtcctcgtgtcactggtgctttcgggtttgccaccgcacttatctcttgttatcagttgcttccatcgcgccccaagttgaagacaccttgaagaaggaataagcttgttctctagtactttcagaataattgtttcatattcatcagtaagcctattgtgttcaggtattctaaggagtctatgttcctcctttgaatgaatttgctgctcttataacgcgtttgcaagaataatgataagttttagaataagatt

SEQ ID NO: 87803 - DNA, 397 bp, Arabidopsis thaliana columbia
ttcgttttcccacgcgtccgcccacgcgtccgcagggtacacatcacctaaaagtaaaaatagacaaaagagaccttgtcctcacgcctctctctttttcccggcaacaactaacaacaacacttctttacctttctctctaaggcaaaacccttctcttatgtgaccactcctccatgcatccctcctccgccgccgtctccggcgaactcacaaaaccaccaacagctccactccaaccacttgttgacctaataacaaacgtcctctccctcctcctcctctcttccctcaccgtccggtccttcatcggacggtggcaaatcctccgattcaaactcttcacactaaactcatctctctcttccttatccgaatcacctcactggtcacaaaa

SEQ ID NO: 87804 - DNA, 1883 bp, Arabidopsis thaliana columbia
cgcacgttccacaatcaagtaccctctctctatctctccctccctccctctccaccatggacaccgcaaccaccacatgctctgccgtagatctatctgccctcctatcctcttcttctaactcaacatcttccctcgccgcggcaacctttttatgttcccaaatttcaaacatctccaacaaactctccgacacaacttatgccgtcgacaacacgtatctcctcttctccgcctaccttgtctttgccatgcagctcggtttcgctatgctttgtgctggatcagtccgagccaagaacactatgaacatcatgcttaccaatgtccttgatgctgccgctggagccatctcttactacctcttcggattcgcattcgcctttggtacaccttccaacggattcatcggtcgccaccatagcttcttcgctttaagctcttaccctgaacgccccggctccgacttcagctttttcctctaccaatgggcttttgccatagccgcggccggaatcactagcggttccatcgccgagcgaacgcaattcgttgcttaccttatctactctactttcttgaccggttttgtttacccgacagtctcgcactggttctggtcaagtgatggatgggctagcgcgtcccggtctgacaacaatctcttgtttggctcaggtgctattgatttcgcaggttcaggagttgttcacatggtaggtggaattgccggtttatgtggagcgttagttgaaggaccaagaataggtagatttgaccggtcaggccggtccgtggctttacgtggtcacagtgcatcccttgtcgtgcttggtaccttcttgttgtggtttggatggtatgggtttaaccctggttcctttttaaccattcttaaaggctacgacaagtctcggccatattatggtcaatggagcgctgtaggtcgcaccgcggtcaccacaacgctttctggctgcaccgctgcgttgactactctattcagtaaacggcttttagcaggtcattggaacgttattgacgtatgcaacggacttctaggcggctttgcagctataacctccggatgtgccgtggtggagccgtgggctgctatagtatgtggctttgtggcatcatgggttttaatcggatttaacttgcttgccaagaaacttaaatatgatgacccactcgaggctgctcagctccacggtggatgtggagcatggggattaatctttaccgggctgttcgcaaggaaagaatacgttaacgagatttactccggtgataggccttacggactgttcatgggcgggggaggaaaactgctcgccgcgcagatcgttcagattattgtgatcgttgggtgggtgacggtaactatgggaccgttgttttatgggttacataagatgaatcttttgaggatatcagcagaagatgagatggcaggaatggacatgacacgtcatggaggatttgcttacgcatacaatgacgaagacgacgtgtcgactaaaccatggggtcatttcgctggaagagtggagcctacaagccggagctcgactcctacaccgaccttgactgtttgatactttgattggagaattgagtggtcccaaacgagtcagttttaatgtggtgaagacaagagttcgggcaccaaacatgttggacgcatctttgtgtattattggtcttcttcttcttcttctttttttttctcttggttatcgctctgttgtggacagatagtgtggaactgttaacaataacatgatcagtatgtctttttaattaaagtgaacgtttggtatcaagaaaaaacaaaaagggcgaccgctctagaggatccaagcttacgtacgcgtgcg

SEQ ID NO: 87805 - DNA, 535 bp, Arabidopsis thaliana columbia
  unsure (1)..(535): unsure at all n locations
ccnnnnnnnnatacgactcatttagggagggctggtgcgcctgcaggtaccgggccggaattcccgggtcgacccacgcgtccgcgacggtttaccggccgtatctctatgccgtgaccgctgcagctcactcgaagatacgctccggcgaagctacgccttagccgacgctcactcagcttatctcctttctctgaacaccgtcggtccagctctccatagattcttccaacatgccgtcgagtctccgccggatgttgaatccgaagctgacgaatcaccggagacgtattctccggaatcctgttcctcggctcactcggttaccagttctgattccgatttgcctcccaagttcgattcggattgtgaggaaggtgaaggtacgaattgcgatctcttaagcggttcaaaacctgaatctctaaatcttaatcatgactcgttctactcccggagatacgaatccggcaccataacgccgnctcctccaccgncggctccgagtaattacgcttgggattttatcaatttc

SEQ ID NO: 87806 - DNA, 606 bp, Arabidopsis thaliana columbia
ctctatacgactcctatagggacagctggtacgcctgcaggtaccggtccggaattcccgggtcgacccacgcgtccggtttttctctgtactattttgttttgtgtttagggtttctgaatttggttttctcccttttcttcaatcaatctttgtcgtctcttccgatctgctcaatcacactactagccgttgttttcccgccactttctagcttcaacacgattcgccgcgtatccgaattcctataatcgtctttggatctgctttttgaaatttgaaattttgaaagtttttggtcggagaagtaatggcggaagcgatgaattcgtcggagaagaaagatgagagctcggaggagaagggaggtgagcttttgttctgtggtgctacggcttgggatatcattggaaaacgaaaaggtgcgatggaaggtaacttggtctctcctactcggctaaggccactcgtcggcgttaacattcgattcgtcgccactggttgcgcttcgtttcattgtgtggcattggacgttgaagggtcgttgttacacttggggacgtaatgagaaaggtcaattaggtcatggtgatatgattcaacgtg

SEQ ID NO: 87807 - DNA, 531 bp, Arabidopsis thaliana columbia
  unsure (1)..(531): unsure at all n locations
nnnnnnnnnnnnnnnnnnnnnnnnnnnnnnnnnnnnnnnnnnnnnnnnnnnnnnnnnnnnnnnnnnnnnnccacgcgtccggtctccgacaacgcatcatttctctccttctcctctgttgaaattttcgtggatcgcttgtttctcagttatattcaatctggtgaaaaaaaaacaaaaagcttcaagctcagagacgaagatcctctgtttctgaggacttgcttatcagattcttgtttcctaaaccaaccgatttgaaccaaacggtctattccggttattgcctcttgaagtcaatcacagaatgtcatgttagctttaggttatgccaaggaaatcgctcaaagatttctcagaaatccaaaatggacctctagattcttcttgcttcactatcaatcctctaattactccagttatgtaaagtcaagaccttttctacaagttcaatgtaaatcagcttcttttgatgtttcacaagctcagagatggaatctatttgcgtatgatggtttgtttagtagacgt

SEQ ID NO: 87808 - DNA, 751 bp, Arabidopsis thaliana columbia
cttggaattcatatattcctgttggagaaaacaaaaattttggggaacgggttaatgaggggggccggtttgtaaaaaaccaaattaaaaagtttatttcagcgcttgtggagaaacttgcggaaaatactaggatacaaaatcacatgaagctaaagaccatcatccacgacttatgggaaaccacaccggaaccggatgttagaaacagaatgacgtcattgaaggattttctagacaaaaccatcgatcatctacacggtgttttcttaccagatgtgtttgtagcaatctgcagaagaatctgggaccgaatgggacaggatgtgcttcgtcttttggaagacaggaaagaataatgtgacttggcataaaggcccaagaatcgcagtttctgttttggatgaaatctttgcgacacaaatgcaaagcttgcttggaaacggtttgaagcccgagcacttggagccaccaagatcgatgatggaactcaggtctatgctatgcaaagattctacggattacagagaagggggatacaactactagtaccagagattgtgagccggtgaagaatctggttcttgtttggttcattggtatggtatggccattgccaagtttctattctttgaaccaagcaaatgtagttaaaagaaggcgcgggggtaaacagagagtttaactgtacttgtatgttataaaaaaaggttgaaaaaaatacaagaaaagagactctcgcatttttctc

SEQ ID NO: 87809 - DNA, 670 bp, Arabidopsis thaliana columbia
  unsure (1)..(670): unsure at all n locations
nnnnnnnnnnnnnnnnnnnnnnnnnnnnnnnnnnnnnnnnnnnnnnnnnnnnnnnnnnnnnnnnnnnccacgcgtccgggttaagtgaggtgacagtattgttaagatccaaattcagaagttatatgcaagcgcttgtggagaaacttgcagaaaatacgaggatacaaagtcacatgaagctaaagaccatcatccacgacttaagggaaaccacagcggaaccggatgttagaaacagaatgacgtcattgaaggatttgctagacaaaaccatcgatcatctacacggcgtgttcttaccagaatgtgtttggagccattctgcagaggaatctgggaccgaaggggacatgatgcgcttcgtctttgggaagacaggaaagaatattgggacttggcataaaggcccaagaattcccactttctgtttgggatgaaatctttgccgccacaatgcacagctggcttggaaaccggttcggagacccgagcacttgggagccccaagaaccgagatggaacccaaggcctatgctttgcaagatttttaccggataccaaggagggggggttcccctacttatccccgaagttggggaccgggggaaaacccgggccttggttggatcattggggaggagggcactgcccaattttttttttttac

SEQ ID NO: 87810 - DNA, 1410 bp, Arabidopsis thaliana columbia
  unsure (1)..(1410): unsure at all n locations
attcaaagcggtggacactggaacacaacacaaacacaagatcaacgagaaaccaaacaacaacagcgaccatcgagagaatccactaagaaaacaaaatagattaaaaaggggtttctcaaagtttctcatcatatccattaaagtagcctcctttttgctttctccgtctctctctcttttgtccaatcaaaaagagtttgtgattcttctttatcgtctccttggagagatatgaatggcgatgagcttcctttcgagagtggtttcgaggtttacgctaagggaactcataagtcagagtttgactcgaatttgcttgatcctcgttctgatcctatttgggatgctataagagaagaagctaaacttgaggcagagaaagagcctattttgagtagcttcttgtatgctggtatcttagcacatgattgtttagagcaagctttagggtttgttctagccaaccgtctccaaaacccaaccttgttggcaacacaactcttggatatattttatggtgttatgatgcatgacaaaggtattcagagttcgattcgccatgatctccaggcatttaaagatcgtgatcctgcttgtctgtcgtatagttctgctattttacatctgaagggttatcatgcgttacaagcatatagggttgcgcataaactgtggaatgaagggaggaaactattagctcttgcattgcaaagccgaataagcgaggtttttggcattgacatacatccagcggcaagaattggggagggaatattgttggatcatggaactggagtggtcattggtgagaccgctgtgataggcaacggtgtctcgatcttacatggtgtgactttaggaggaaccggaaaggaaactggcgatcgccacccaaagataggtgaaggtgcattgcttggagcttgtgtgactatacttggtaacataagcataggtgctggagcaatggtagctgcaggttcacttgtgttaaaagacgttccttcgcatagtgtggtggctggaaatcctgcaaaactgatcagggtcatggaagagcaagacccgtctctagcaatgaaacacgatgctactaaagagttctttcgacatgtagctgatggttacaaaggggcacaatctaacggaccatcactttcagcaggagatacagagaaaggacacactaacagcacatcatgagatctttgtatgcaaatttcttaccatcataagctaattcttgtatgctcttgcttatcatcataagctaatctcagcatttcctcaataagttgtctaataaaagattttgttcactggaagttttcagtctcaacgcaaaagtcncagncaaacataaaagtgtaaatgattcttgcttgaaaatgaaatctnttntctcnn

SEQ ID NO: 87811 - DNA, 614 bp, Arabidopsis thaliana columbia
cgcctgcaggtccggccggaatcccgggtctcccacgcgtcgccacgcgtcgaaagtctaatattatcacttacaaataccattttaatcatgaccgttgattcagctctgcgatctccgatgatgcactcaccgtccactaaggacgtgaaggctctaaggttcattgaggagatgacacgtaacgtcgatttcgttcagaagaaagtgattagagagatacttagtcgtaactcggacactgagtacctgaaacggtttggtctcaagggattcactgaccgtaaaacatttaagaccaaagttccggtggttatctacgatgatcttaaaccggagattcaacgtattgccaatggtgaccggtcaatgatcttgtcttcttaccccatcacagagttcctcacaagctctgggacatcagctggtgaaaggaagttgatgccaaccattgatgaagacatggaccgacgtcagcttttatacagtcttctcatgcctgtgatgaatctctacgtgcccggattagacaaaggcaaggctctatattttttgttcgtgaagacggaatcgaagactcccggtggattaccagcacgtccggtgctcacgaa

SEQ ID NO: 87812 - DNA, 582 bp, Arabidopsis thaliana columbia
  unsure (1)..(582): unsure at all n locations
acnacaccaacccnacaccgccaatgtaactnacccagaagccnccaaggcggccaaaagagacggggtggggggactacttcctctcttacctcataatcctccttttggacttttcaataaaaccgcctacttgaatctctcattctctcgcttccgcagcggagaaccatcccctcgccgagacgttgccggcggtggcgacggagttcagatggcgaatcccgcgggatcaaccggtggtgtgaacctcgacaagttcttcgaagatgttgaatctgtgaaagaagagctaaaggagctagatcggctcaacgaaacactctcttcatgtcacgagcagagcaagacgcttcacaatgctaaagccgttaaagatctccggtctaaaatggacggtgacgttggagtcgcgttgaagaaggcgaagattgnttaaagttaaactcgaggcgctagatccgnctgatttcccacttgagagagttnnaganttntttcagaagcaantacaagnnccaagggatgaggaagggtttttagncacccttnaccgggnttnaaagaaggnatntccgggtt

SEQ ID NO: 87813 - DNA, 514 bp, Arabidopsis thaliana columbia
  unsure (1)..(514): unsure at all n locations
nnnnnnnnnnnnnnnnnnnnnnnnnnnnnnnnnnnnnnnnnnnnnnnnnnnnnnnnnnnnnnnnnnctaggttaacgtatgatgaccaattggtttccgaacactgattccaggcttcttagtatacagtgttgtggttgtgaagaacagtaacttcagattttgcgtttagactatgaaaatggatttgtatatcttatgttgtgctagttcctagctgttagagctggaattgatctctggatacttagacatgttgttacatgagtggtggtgcgacattgatactgtttttgttgcaggagagagtgagagattcttgcagaaagcaatacaagaacaaggaagaggaagggtgttagacaccattaacgagattcaagaaaggcatgatgcggttaaagacattgagaagaatctcagggagcttcaccaggtgtttctagacatggccgtgctggtagagcaccagggagctcagcttgatgacatcgagagtcatgtgggtcgagct

SEQ ID NO: 87814 - DNA, 1340 bp, Arabidopsis thaliana columbia
ctacgtcagggattcattccgatctgaaatctctctctagatttctctatttttcgaattttaaatgaacgatttgttttccagctcattctctcgcttccgcagcggagaaccatcccctcgccgagacgttgccggcggtggcgacggagttcagatggcgaatcccgcgggatcaaccggtggtgtgaacctcgacaagttcttcgaagatgttgaatctgtgaaagaagagctaaaggagctagatcggctcaacgaaacactctcttcatgtcacgagcagagcaagacgcttcacaatgctaaagccgttaaagatctccggtctaaaatggacggtgacgttggagtcgcgttgaagaaggcgaagatgattaaagttaaactcgaggcgctagatcgtgccaatgctgctaatcggagtctccctggctgtggacctggttcttcctccgatcgaaccaggacctctgtcctcaatggtctcaggaagaaattgatggactctatggatagtttcaaccgattgagggagcttatctcgtccgagtatagagaaactgtacagaggaggtacttcaccgtcaccggcgagaatccggatgaacgaaccctagatcgactgatttccactggagagagtgagagattcttgcagaaagcaatacaagaacaaggaagaggaagggtgttagacaccattaacgagattcaagaaaggcatgatgcggttaaagacattgagaagaatctcagggagcttcaccaggtgtttctagacatggccgtgctggtagagcaccagggagctcagcttgatgacatcgagagtcatgtgggtcgagctagctcctttatcagaggcggaactgaccagctacaaaccgctcgggtttaccagaagaacacgcgaaaatggacatgtattgccattattattctcatcatcatcataactgttgtggttcttgctgttttaaaaccgtggaacaacagcagtggcggcggcggcggtggtggtggtgggggtaccactggaggaagtcaaccaaattcagggacaccaccaaatcctcctcaggcaaggcgtctattgcgttgaagttgaagttgaagttgagtttcgttatttgcatatatattctttctttgaaaaaccttattatcaaaccagctttgtgttactactttctactgctggtttgttgttaatctcccgtttatttggtttttgtgaaagaatttaaaatgtgggttagatgagaaaattagtacaacattctcttgtatctatgtttgctatatgggttatatttacttgatgtgatttcagggtt

SEQ ID NO: 87815 - DNA, 528 bp, Arabidopsis thaliana columbia
  unsure (1)..(528): unsure at all n locations
ctctatacgactcacttagggaaagctggtacgcctgcaggtaccggtccggaattcccgggtcgacccacggcgtncgtctcaataaacaaacactaacaatggtggtcgaagaagattcacgtctcataaatctccaacacaagtacaacccgacaatgcccgaggtggtggaggagctgaagagaatttgggacataagttttccggtggccgccatgagcatattaaactacctaaagaacatgacatccgtcgtgtgtatgggacgactcggtagccttgagctcgcaggaggagccttagccatcggtttcaccaacatcaccggttactccgtcctctctggtttagccaccggtatggaaccattatgtggtcaagccatcggttctaaaaacccttcactcgcttccttaaccctcaagcgaaccatcttcctccttctcttagcttctcttcccatatcactcctttggctaaacctcgcgcctctaatgctgatgctccgccaacaacatgatatca

SEQ ID NO: 87816 - DNA, 1046 bp, Arabidopsis thaliana columbia
  unsure (1)..(1046): unsure at all n locations
atgatacttcagctctctacgactcactattgggaaagctggtccgcctgcaggtaccggtccggaattcccgggtcgacccacgcgtccggaaagtagaagaagcgtgtggattggacatgggcttaaagacacacaaattctttctacgaattttgttaatttttgttatatttccttcttcactattccgcttagagcacaacaccacgatgacgaccaaggccatggagagaggatttaagctgattctgggttctcaatccatggcgagaaagaggattttggctgaaatgggatatgattacactatcgtgactgcagacattgatgagaaagctattaggacagagaagcctgaagatttggttgtggctcttgctgaagccaaggcaaatgagattatatcgaaattgggaggtgagagccagtttgcaaaagatcctcaaccaactcttttgattactgcagacactgttgttgtgtacaaaggtgttattagagaaaaaccaaccactaaagaagaagctcgtgaatttatcaaaggctattccggttcacacggaggagttgtgggatctgttcttgttagaaacttgaaaactggagttaaaaaaggaggatgggccaaagctgaggtttatttccatgagataccagaacaagtcattgacggtcttattgatgatgcaataacttataaggttgctggaggtttaacactggagcatcccctcatttcaccctttatcgattctgtggtgggaggggttgatacagtcatgggacttcctaaagaactcacagaaaaattcataaacgatgtgttgttgtagctcaagtccctttttgattatgtaggaatacttttgaatctctctaatcaatcatttattttgtaatttggtaaaacacagatttatcgtatcatgtttttaagtagtgatgatgttttcagaaaaaaaaaaaaaaaagnnnnnnnnnnnnnnnnnnnnnnnnnnnnnnnnnnnnnnnnnnnnnnnnnnnnnnnnnnnnnnnnnnnnnnn

SEQ ID NO: 87817 - DNA, 712 bp, Arabidopsis thaliana columbia
ttcagctctctacgactcactatttggaaagctggcacgcctgcaggtaccggtccggaattcccgggtcgacccacgcgtccgcggacgcgtgggcgtcactcgtcacatgagaggaacaacaagaaaagtcaaaacgttgaagctttctcgaataacgccttctttagtttacagtctctcgttgcgggtcttatcttcttcttcttcttccctctttcgtctgctctatattatgaccagattcaaaattgcgtagcgtactaattcaatatagagagaagttagatcaaaagaagaacacgaaactctgactgtgtctctctttctcttcgtgtgtttctatatttatatataaaaagacaagatctctggtctggaattagaagaatcttatttggggttttttcttaggattaagctctaatggcagatcaagtaaaagagcggactttagaggagacctctacgtgggcagttgctgttgtttgctttgtcttactctttatttcgattgtcctcgaacattctattcacaaaattggaacctggtttaaaaagaagcacaagcaggctctttttgaagctcttgaaaaggtcaaagcagagcttatgctgttgggattcatatcactactactcacaattggacaaacaccaatctcaaatatctgcatctcccagaaagttgcgtcaacaatgcacccttgca

SEQ ID NO: 87818 - DNA, 943 bp, Arabidopsis thaliana columbia
cgagaaaaggaaaaaaaaaaatagaaagagaaaacgcttagtatctccggcgacttgaacccaaacctgaggatcaaattagggcacaaagccctctcggagagaagccatgggaagaaaaaaactagaaatcaagcgaattgagaacaaaagtagccgacaagtcaccttctccaaacgtcgcaacggtctcatcgagaaagctcgtcagctttctgttctctgtgacgcatccgtcgctcttctcgtcgtctccgcctccggcaagctctacagcttctcctccggcgataacctggtcaagatccttgatcgatatgggaaacagcatgctgatgatcttaaagccttggatcatcagtcaaaagctctgaactatggttcacactatgagctacttgaacttgtggatagcaagcttgtgggatcaaatgtcaaaaatgtgagtatcgatgctcttgttcaactggaggaacaccttgagactgccctctccgtgactagagccaagaagaccgaactcatgttgaagcttgttgagaatcttaaagaaaaggagaaaatgctgaaagaagagaaccaggttttggctagccagatggagaataatcatcatgtgggagcagaagctgagatggagatgtcacctgctggacaaatctccgacaatcttccggtgactctcccactacttaattagccaccttaaatcggcggttgaaatcaaaatccaaaacatatataattatgaagaaaaaaaaaataagatatgtaattattccgctgataagggcgagcgtttgtatatcttaatactctctctttggccaagagactttgtgtgtgatacttaagtagacggaactaagtcaatactatctgttttaagacaaaaggttgatgaactttgtaccttattcgtgtgagaaaaaaaaaaaaaaaa

SEQ ID NO: 87819 - DNA, 502 bp, Arabidopsis thaliana columbia
  unsure (1)..(502): unsure at all n locations
atgannnnnnnnnnnnnnnatacgactcatttagggaaagctcgtacgcctgcaggtaccggtccggaattcccgggtcgacccacgcgtccgcccagatgctggagcacatagtaaagaggagatggaagctgaaacagaacaggatccaatgaacctagctgatccagacagttgtttctgtgagtttcaaggtgttcatatacaccacaaagtgttagatccacatacactctctgatgatgtttcaaacacaagccctcatgctcaagaaacaccaaaaaccaagtttccgatgattctattgcacggtttcggcgcttctgtgttctcctggaacagagttatgaagccattagctcgtctcgttagttcaaaagttcttgcctttgatagaccagcatttggtttgacttctcggatttttcacccgtttagtggtgctaccaatgatgcaaaaccattgaatccctactccatggtggtttccgggctcacttac

SEQ ID NO: 87820 - DNA, 2027 bp, Arabidopsis thaliana columbia
tcttcctcctgcaacctcttcttccctctctcagtttgatttgaccggagtatatggcggaagtacgatcacgatcacggagaacggagagcaattgggctacaatatgctgctcagctttctcgtgtctccagctctactgggcgcgtattgttctccgtaaatggttcaatgtttctgcttctgaatcagattatagtgctgatagtgacgatgactacgaagatagatcacaagaatttgatccaattagctctggagttaccaatcctcgtgttgatactgacggtgatgtgatatataggcctaagcttagaagacgaaattctgaaactttcaggatgcagtatatagataccaaagcaatcagaatctgtgctgggacatggaatgttggagggagagttccttcatctgacttggatattgatggttggctagacactcttgaacctgctgacatttatgttcttggtcttcaggaaatcgttcccttaaatgctggaaacatttttggtatggaggatgaccagcctgctttggaatgggagaacttgatacgtgatgccttaaaccgagttcaacctagaaagctgaagattaaaagtcacagtgatcccccttctccatcaaagtttaagcaacccgaagaggttccttatagtgtagaagatatgtttgttgaaaccagtcatgatgcttgcgatggaattagttcaatggataacaaactcaactctgttgaaagcacggacgtaccaatcgtaggcgaagattcacttactaatatagacgttttgggttctaccaatgacaatgcgtcttgcttaccaatacaagaatatctacagagacaattttcaacaccaaatacgccagaccgctctctgtcgatgcagattaatagtgattccaaaagggaagaaagatttagttacactgaaagggtaggtttgagctggccagagcctccattaaggctcctaaatcaatatgtttccgaaagacgtggttccttcaagtcagtgaatctgactatcacgaatctgagaaaaccatcgtatgttcggattgtgagcaaacagatggttggagtgtttctcaccatttgggttcggaggaacttgcgcaagcacataagcaacctttgtgtgtctactgttggtgttggtattatgggctacattggtaacaaggggtctgtatctgtgagcatgtcaatctatcaaacaccattttgtttcttgtgcacgcatctgtcatctggagaaaaggatacagatcaagagaaaagaaacgatgatgtacgtgaaatccacagaagaacgcagtttcttcctcattctttaaatgccaatgagcttccaagaagcatctgtaatcatgaaagaataatctggctgggagatctgaactatcggattaacttgtcgtatgagaagacacatgaacttattgcaagaaaggaatggcaaaggttggtaaagtacgaccagctttcaagagaaatgacaaaagggaacctattcgagggatggtcagagggaactttagattttgcaccaacatataaatacgaaatcgattcagaaaattacatcggagatgacccggaatccgggaaacgtagaccggcctggtgtgaccgcatcatttggaacggaaagggaatgaagctcttcaattacagaagaaacgagattaaactatcggatcaccggcctgtcacagccacgttcttggccgaggttgaggttttgtctccacggaaacttcaacatgcgcttacacttacatatgctgagattcaaggccttgacgcctaaacaaccacttccgtcagatcccatttgtgtatagtaatttaacgatttgtatgcccttcatgtataatagtgttcacgtacacagaaatattgtagatagaaatactgactgaaaacaaagaccgtatctttgatgatataaacattggcaattgagttgagatgtaaactatagtgttagtgtaaaaaaaaaaaaaaaaa

SEQ ID NO: 87821 - DNA, 600 bp, Arabidopsis thaliana columbia
cattcgtcgaatccattgcttagggagagaagagtatattgctgagagcttcgctgctctgttctgcggcctcaatcactttcacaccaagtcaactattcaatcccaatagttcccatcgtttcccaagattcgaactatctcgtcctgtctcggctttgtctcgtaccaaatgtcacttgagtctcctgagagctcgtgggaaatccagcttcctcactcgcagcaccgctactgatgaagctgttgaaactagtagtaacagtggattggatttggttgaggttggattcttgtctggtgttcatggccttcaaggcgagatttgcataaaaccaaacactgattttcctgatttacgtttctctaagcctggtagaagatggttaaaacaacaattgttgggacaagataagattgatgaggttgaattagtcgaaggaagacctcatcctgcgcagaagagttggattcttaagtttcgagggttggacgatgttgatcaggtgagacaactcgttggtgcaactctgcttgctgaggacgatgatcgtcctgagcttgatgaaggagaattttaccttcgagatcttgtaggca

SEQ ID NO: 87822 - DNA, 2458 bp, Arabidopsis thaliana columbia
  unsure (1)..(2458): unsure at all n locations
gttggttctttacgggcaacgaaggctgttaaataacagccatagcttttcttcgaaacgaacccaaaaaataatatcagagaattttcatcattacacctttttttttcttttgcctttgcctttgccttcacacgtcttcttgtttgtactctccactttttttttctttgtgtcctttcttcttgttcttgctctagttcgtgtctcttctttaactctctgtcactattataaatatcaaactctgacattttcttctgttcaaattctcctcgaaactcccccaaagaaacaaaatctttttctgagatctaagaagatgaaaacaagacgtgggaaacgtcctgagaggttttggccatcaattgtgatgaataaatggttaaacagaaaacctaaagtttacgattttagcgaagacgaaattgatacagaacctgagagcgaagacgatgtatgttcggtcaaagacgtcccaaatgttcactgtgtaactgatgaagacagccataatggtcgtcgaggtagcgaagctgatcacggcaataatatttcagatggtggtgtgagtgtgaggggtggttaccaaaggaaacaccggcgaggcaaatcggagactttgagagctcaatacattaacacaaaggatatcaaagtgacggtggctacatggaacgtcgccggaaaacgtccctccgatgatctcgagattgaagattggctctctactgataatccttcagatatttacattatcgggtttcaagaagtggttccattaaacgctggaaacgttttcggagcagaagatagaggtccgattccgaaatgggaatcgataattcgtagaacactaaacaaatccaataaagaatcagtttatgatcaatcgccaagctgcaacaacaacgctcttcatagatctcacagcgcgccgtcgtctcctatcttggcacaagaagcaaactccattatctctcatgtcatggtagagaatctagttgcggaccactcgctggatttagctacaaacgagttcatcgatgctgcaaccgctttaccgagccttgaaccacagcggaatccgaacatggactggccggaactagctttagatagcaaccctcagatagttggatcagaggggaagctaaggagggtatttagcagcaacgcgacgctaggatttaagctaccggagaatccatcaggagctagtagatttgcttcggaagcaagacaattgaaacgctcacggagctttgaaactttaaacttgagttggaatgatataaaagaagagattgataataggtcctcctcctcgtccgaagcggaagaagctgcaaaaatcatgcatgatgattcatcagacggagattcgtcttcccaggacgaagaggatggtgacaagatcagaaatagttatggattgccggaagatttggtggaggagtgtcggaaagtgaaagatagtcaaaagtatgtaaggatagtaagtaagcaaatggttgggatctatgtatcggtttggatccgacgacggttaagaagacatgtcaacaacctgaaagtctcaccggtcggagttggcttgatgggctacatgggaaacaagggatcagtgtcgattagcatgacgttgtatcaatcacggatgtgttttgtgtgctcacacttaacttccggccacaaagacggtgctgagcaacgccggaatgctgacgtgtacgaaatcatacgtaggactcgttttgcatcggtttttgacactgatcaaccaaggacgattccatgtcacgatcaagtattttggttcggagatttgaactaccgacttaatatgtcagacggtgaagtaagaaagcttgtctcacaaaaacgatgggatgagctcaagaacagtgatcagttgattagagaattaagaagagggcatgtttttgatggatggagagaaggaccgattaaattccctccaacctataaatacgaattcgattctgatcgttacgccggagaaaacttgagagaaggggagaagaagagagctcctgcttggtgtgataggatattatggttaggaaaaggaataagacaagaatgttataagagatcggagataagaatgtccgatcaccggccggtgacttcgatttttaacgttggagttgaagtgttcgatcaccggaaacttcaaagagctcttcacgttaataacgcagctgcttctgctgttcatcctgaaccttctttttgagtctaataagtgtcttataaaaagaataataatttatacgctaatttctgtaattttttttatacatgggatttgtttgggttttgattttgttattgttttgttccggttaatctataatctaaccaaatttattttttttacttgccaatacgagccttttaatttatctnnnnnnnnnnnnnnnnnnnnnnn

SEQ ID NO: 87823 - DNA, 541 bp, Arabidopsis thaliana columbia
aagtatgtagagaaatgcaagtttcctaaagatggttctcctgcaaagtctctgagatacgtaggaagtatggtagctgatgttcatcgtacactactttatggaggaatcttcttgtacccggctgacaagaaaagccccaatggaaaattgcgtgtcttgtatgaagttttcccgatgtcgtttttgatggagcaagccggaggtcaggcctttacgggaaagaaaaaggcgctagaccttgtcccggagaagatccatgagcgttctccgatatttcttggtagctacgatgatgtagaagagattaaagctctctatgctgaggaggaaaagaagaactaagcttctcattcttcttttattctcttactgtctctgtctctcttatttctatatacagtatcttcttctgatgagaagaacaatataactcatttaccaaaggaagatctttcttttgcctaaaaataaaaaaaaaaaaacccaaaaagcggccgctctagaggatcccagcttacggacgcgtgcatgcgacgtc

SEQ ID NO: 87824 - DNA, 400 bp, Arabidopsis thaliana columbia
  unsure (1)..(400): unsure at all n locations
aggagatggaagcttgatgatagtatgtatctagttgctaggtgtgagttacagagcactgttgatttgaataaccagagatcgtttttaactttgaatnctcttaacgagtttgatcctaagtactctggtgttgattggagacagaagcttgagactcagagaggtgcggttttagctaatgagttgaagaacaatggtaataagttagctaaatggtctgcgcaggctctcttggctaatgcggatatgatgaagattgggtttgtttcgacggttcatcctcgtgatcattttaaccatgttatattatcggttttggggtataagccnnaangatttcgctgggcagtcaatctgaacactaacaatntgttggggaattgtgaagtcgnttgtt

SEQ ID NO: 87825 - DNA, 841 bp, Arabidopsis thaliana columbia
  unsure (1)..(841): unsure at all n locations
gcgcacnnnnnnnnnnnnnnnnnnnnnnnnnnnnnnnnnnnnnnnnnnnnnnnnnnnnnnnnnnnnnnnnnnnnnccacgcgtccgcgtaaatctgggtctccgttttggatgttgtttcatatgtgtcctgtttttgggaaagatgatggtaaagtcaccaattttgtggcggttcaggtcccgatttcgggacgagaacatcatcggaagaagttgagaaatgtcggagatttgtcgtcggatacttctccgacatttggttcttgtcgaagagaggtttgttttggtaatttcgtgtgtcaggatcgagctttaccagtggaatgtgatgatgatgaacaaggattagaggattgggaacagtgtgaagcgagtgagtccgagaagctgaaagctacggaagctattaacaatgtgttatctatcttagtgcattacagcgagttgagtggtagattagtctgcggaaagcggtactgcttgcgaggagtagattgtctaagctcgtcgttagttatttctctcggtagaataaacaaagtttcgtattaaccaatccatgcttaccagacatgcctatcatttatgcgagtgatgcctttntgacactgacccggtacaagagacaggaagtgttgggacaaaactgtagatttctgagggggggtgatactgattccctcatactatacgaggtagagattgcgtgttacttggtattagtatatggcatgatggatattgggaatgtttaatttgttagatgaggaatgctcttaaaggacaatcttcccagtgcaatactaatttccgtacagaaagataaaactcttttggat

SEQ ID NO: 87826 - DNA, 1627 bp, Arabidopsis thaliana columbia
  unsure (1)..(1627): unsure at all n locations
ggccgaataaaaaacatcattcggcaagttcatcgatccacgaaaaaaaagaaacgatgaggcttaatggggattcgggtccgggtcaggatgaacccggttcgagcgggtttcacggcggaatcagacgattcccgttagcagctcagccggagattatgagagctgctgagaaagacgatcaatacgcttctttcatccacgaagcttgccgcgatgccttccgacaccttttcggtacaagaatcgctcttgcttaccagaaggagatgaagctacttggacagatgctttactatgttcttacgacaggttcagggcaacaaactttaggagaggaatattgtgacattatacaggttgcagggccttatggactctctcctacaccagctagacgtgctttgttcatattgtaccagaccgcagttccatatatcgcagagagaattagcactcgagctgctacgcaagcagtcacctttgatgagtctgatgagttttttggtgatagtcatatccactcaccaagaatgatagatcttccatcttcatctcaagttgaaacttcaacttctgtagtatctaggttaaacgatagacttatgagatcgtggcaccgagctattcagcgatggcctgtggttcttcctgttgcccgcgaagtcttacaactggttttgcgtgccaatctgatgctcttctactttgaaggtttttattatcatatatcgaaacgtgcatccggggttcgttatgttttcataggaaagcaactgaatcagagacctagataccaaattcttggggttttccttctaatccaattgtgcatccttgctgctgagggcttgcgtcggagtaatttgtcatctatcactagctccattcagcaggcttctataggatcttatcaaacttcaggagggagaggtttacctgttttaaatgaagaggggaatttgataacttcggaagctgaaaagggaaactggtctacctccgattcaacttcaacggaggcagtagggaaatgcactctctgcttaagcacccgtcagcacccaacggccactccttgtggtcatgtgttttgttggagctgcattatggaatggtgcaacgagaagcaagaatgccctctttgtcgaacgcccaatacccattcaagtttggtttgtttgtatcattctgatttttaggcacaatgggatcaacaaagacaggcactgcagaaaggcaaagcagctaagacagtgacacctaaggacagtgcatctgctacaggaatggaatctgcttcggcttcagactttttgagtaagatcaacaagttatgagagaagacagaataaatatatttctgacatcattctcgatcccatgcctacctttttctctatgatatttagtgcagaaaccacagaggtttgttgttttacatttcattaaaaagagttggagatgttaggtggtctttcacattctatattacatataataatctcaattggagatctattacaagacaaaaaaaaaaaaaaaagganacaataccattttnnnnnnnnnnnnnnnnnnnnnnnnnnnnnnnnnnnnnnnnnnnnnnnnnnnnnnnnnnnnnnnn

SEQ ID NO: 87827 - DNA, 595 bp, Arabidopsis thaliana columbia
gatcgagtcgtcgttcttcttcttcctctgagagagagatctgcggaaaacgaaagcgagatttatcaggttcggtgattctttgtggagaagaagctcgcgataagtcaacatgagcaagccaatggaagaggataccaatggcaagactgaggaagaggaattcaacaccgggccactctctgttcttatgatgagcgtcaagaataacactcaggttttaatcaattgccggaacaacaggaaacttcttgggcgagtgagggcgtttgacagacactgcaacatggttcttgaaaatgtcagagagatgtggactgaggttccgaaaactgggaaaggcaagaagaaagcacttccggtgaacagagatcggttcataagcaagatgtttctacgtggagactcggtcattatcgtcctcaggaatccaaaatgagaggaagagagacttagagacatgttccttgtttgttgtgctaaaactgataaattcttgtaggtagtagcatcttttaaagttattcgtctcattttcgtttatgtccgaattgacaagatcttttaaagatcttttaaagacatgttccttgtt

SEQ ID NO: 87828 - DNA, 741 bp, Arabidopsis thaliana columbia
  unsure (1)..(741): unsure at all n locations
nnnnnnnnnnnnnnnnnnnnnnnnnnnnnnnnnnnnnnnnnnnnnnnnncctcatcattcttcttcgtccgcgcgtccgctttttggaaaacgaaagcgggatttagcgtatagcagcttccaccgtttcgccgaatttcatcgagcttcaagtgaacatgagtaaaccaatggaagaggataccaacggaaagactgaggaggaggagttcaacactggaccactctctgttttgatgatgagtgttaagaataacactcaggtgttgatcaattgccgtaacaacaggaaactccttggccgagttagggcttttgacaggcactgcaacatggttcttgaaaatgtcagagaaatgtggactgaggttccgaaaaccggaaaaggaaagaagaaagctcttcctgttaacagagatcgattcatcagcaagatgttcctgcgtggagactcagtcattatcgtcctcaggaaccccaagtgaaagaagctcttcttatgataattctcgcttcttcttgtcaaatcctatttgttgcatcaacagtgagaacatgttttgattatgagccttaaatctactagggtggccttgtatttttcacttggcttctatctttgccttgaaccgcagccagggaactttgtaatttcaaaagagaattcttctttttttaaagaaaacaccgaaaaaagacgggaatgtaacaaaaacagaaatatcaataacaaaaaaaaca

SEQ ID NO: 87829 - DNA, 535 bp, Arabidopsis thaliana columbia
  unsure (1)..(535): unsure at all n locations
nnnnnnnnnnnnnnnnnnnnnnnnnnnnnnnnnnnnnnnnnnnnnnnnnnnnnnnnnnnnnnnnnnnnnnnnnnnnnnnnnnnccacgcgtccgcggacgcgtgggtcgtgatccgccgctaaatcaaaccagcgagagagatagatccaacgtgaagaagaaatcggtaacgatgacgcttagggagaaaatgccgacgagtcctaaatcgcctctgagaagacgacgttcgagctggaccggttcatggttaaaccatcagacgacgtacgtttaagcaagcagtctccgccgttattcaagctcaatcaccaagatccaggtgtaaatccctatcttctgatttctccgacgtcgatcgaactctttcgttgtcagattctcttcttctcaagatccttgagaagcttcctgaatctcagaacgaagatgttttactcgagtgtaaacggcgggtgagtgttcagggacggcgtttacggagtatgaaggtttttgattgggactatttattgtctgggaggcttgtttaga

SEQ ID NO: 87830 - DNA, 574 bp, Arabidopsis thaliana columbia
cgacgatttcgtggaggttcgcgtcttcgacctctcttctctccattcctcgaacaccaaaaagtgcctttatcttcgccatgaccttctcttcttcttcttcttcttcttcttcttcttcttctgtggaaaaccctaacaaggacgattcctcctcttcgcttgaattggtcctcaagtaccacaaccagacgaagcactccttgaacggttacgcgagaggtcctcgtggtctcgactgggccaatcagcctaatcccttccgccggtacctctctgctcctcttcttcctctccaacaccccaatcacgacatcgacgacgactccgactctcctctctactctactctattcgactcgcttcctccgcccaaacccatctctcttcctacaatctctcaccttttctaccattctctcgctctctccgcctggaagaccaccggatcctccacgtggcccctccgcgtcaaccccagcagcggtaacttgcatcccaccgaggcctatctcattgctcctcccatcccttccctctcccaatccgctttcgtctcccactatgctcccaa

SEQ ID NO: 87831 - DNA, 665 bp, Arabidopsis thaliana columbia
  unsure (1)..(665): unsure at all n locations
nnnnnnnnnnnnnnnnnnnnnnnnnnnnnnnnnnnnnnnnnnnnnnnnnnnnnnnnnnnnnnnnccacgcgtccgcccacgcgtacgcgacgatggcgacgactcttcagaaactctcctctcaaatccaccgactctctccattcaccagatctctaatcgttcgcacatccgcaacgtctgctccttctccgtctctgggatcgaagaaagtctctgaccgaatcgtcaagctttctgcgatcgatcccgatggatacaagcaggacatcattggactctctggccagactctccttcgtgcgctcactcacactggtctgatagatccagcatcgcatagattggatgacatcgaggcttgctcagcggagtgcgaggttcagatccgcagaggaatggctcgagaagctcccgccgcggtacttacgatgaggagtattgtgcttgaagcgtactctctagatcccgtatcttgaaccaagaactcgggtctttcggttccaaagttgtgttaacggaggggcttaaagggatggccgnggttgtccctaagntaagccttnggntttncnnaagttttngnccttnnggcttaaaaatgtnggncggccaaattggtaaaaaatcgnttgaattnggccttaagaanccnttnantnggc

SEQ ID NO: 87832 - DNA, 836 bp, Arabidopsis thaliana columbia
  unsure (1)..(836): unsure at all n locations
ggggcggccgcgcgtacgaaaaaatctgagctccgaccaaaaattggggaacgacgatggcgacgactcttcagaaactctcctctcaaatccaccgactctctccattcaccagatctctaatcgttcgcacatccgcaacgtctgctccttctccgtctctgggatcgaagaaagtctctgaccgaatcgtcaagctttctgcgatcgatcccgatggatacaagcaggacatcattggactctctggccagactctccttcgtgcgctcactcacactggtctgatagatccagcatcgcatagattggatgacatcgaggcttgctcagcggagtgcgaggttcagatcgcagaggaatggctcgagaagctcccgccgcgtacttacgatgaggagtatgtgctgaagcgtagctctagatcccgtatcttgaacaagcactcgcgtcttggttgccaagttgtgttaacgcaggagcttcaaggtatggtcgtcgctgtccctgaagctaagccttgggatattccgtaagtttttgttcttgaggatctcataaatgttgggttcgttctcaatttggctaataaaattcgctttggaaatttcggtactctgaagataactccatttgaatctgtaattttcgtttgcttacatttaaattttgtaatgtggtaaagaactctgcttgtttaaacgattccctgcttcaagtatgggtgaatgttgttttcttgatttcaaaaaaaaaaaaaaaaaaaaagnnnnnnnnnnnnnnnnnnnnnnnnnnnnnnnnnnnnnnnnnnnnnnnnnnnnnnnnnnnnnnnnnnn

SEQ ID NO: 87833 - DNA, 539 bp, Arabidopsis thaliana columbia
tccaattacatattagggaaggctgcacccctggcaggacccggcccgaatttccggggtcaacccacccgtccgcggccccttggaaaatttggaatcttttggtttattggttgcgctctctccattttttaatggaccgggccacctgaaatgagttaagttcgacttatatagaagctatgttctgcaaatccacatggatgatttcaccatttggttattttggatgaggtggatccatcaggacacactttaagacttataatggtgggactggatctgactttctttttgggcactgaccatttatgctgacaattttgtatggatccaatatcatttatggtgtcagatggtgggggtttttctatctctgatgggggttatatgggtggcttctttcttcaaaattttcttccgagctacatctatctccagagccactattcttgatgatgggaagaaaaatgtgatgtttgttatcgcacatcctgatgatgagtcaatgttcttttctccacaataaactacttcat

SEQ ID NO: 87834 - DNA, 461 bp, Arabidopsis thaliana columbia
  unsure (1)..(461): unsure at all n locations
cagcataataaatattttctttgaaatttgaagagcttgaaaatgagtacagccactttcgtagagattattcttgctatcatcttgcctcctctcggcgtctttctcaaatttggttgcaaggttgagttttggatatgtttgattttgacgctgtttggttatcttcccggaatcctttacgctctttatatcatcaccaagtgatttttcctatctcctctgttctttcctcttgctcctcgaagaacagctgtttcgtcgtgctcttctccctttgggactgattcatcatttattttatgttatgagcaattgtattctcattgttgtatttgcattattgtatactttctgctgatatcaagaaaaaatcgttggtttatgtgaggaatttatttatttcgtttaatttgtacaattggtaaaatnttncaatgagcaggtttggattccggacc

SEQ ID NO: 87835 - DNA, 469 bp, Arabidopsis thaliana columbia
gttaaagcataataaatatttcctttgaaatttgaagagcttgaaaatgagtacagccactttcgtagagattattcttgctatcggctggcctcctctcggcgtctttctcaaatttggttgcaaggttgagttttggatatgtttgattttgacgctgtttggttatcttcccggaatcctttacgctctttatatcatcaccaagtgatttttcctatctcctctgttctttcctcttgctcctcgtaagctctctttctccacgatctctccccctcaatgtatattaatctaatcatacaaacatacatgcgtagcttcgatgaatatagaaccagaatttaagatgaaatatctttgattaactatatatgttttccacaaagaaattacgaatatcttcttaataaaattaaataaaaagaaaaataaattaatgttaggtgaaccacatttttagtgagat

SEQ ID NO: 87836 - DNA, 653 bp, Arabidopsis thaliana columbia
  unsure (1)..(653): unsure at all n locations
acggacgcgtgggtgggaacatcatgatggatgaagagaccaaagcaataaccatcattgattatgaatattcatgctataatcctgtggcttatgacattgccaatcacttctgtgagatggctgccgattaccacactgaaacacctcacatcatggattatagtaaataccctggtgtggaggagcgacaaagatttctgaaaacatatatgagttattcagatgaatgaaaccccagcgatactatggtcaaaaacctccttggaggcgttgagaaatatacacttgctagtcatctaatttggggtttatggggaattatatcggaacatgtgaatgaaatcgactttgactacatggagtatgcaagacaaaggttcgagcngtattggttaacaaagccgaggctccttgcagcttccgaacacaagtaaatttctatggacccaacccaagaagagtattttgacggtgttaaagaggtatatacacacaaaaaggtgcctgattacaatggtatttcccagcttcaaaaaataagaaaatgtaacgttttctgttttaccctttttacgaggcaaaatgtaatggtcagtagtttataatcaacagttgaagttgtttcagataaaatgtagttctcacaaatt

SEQ ID NO: 87837 - DNA, 557 bp, Arabidopsis thaliana columbia
  unsure (1)..(557): unsure at all n locations
ctagtcatctaatatggggtttatgcggaattatatcggtgatttctacaatactcttctatcatacttgcattctctgaaccatatataggcttgatcttcattttgtaccacttttcaggaacatgtgaatgcagtcgactttgactacatggagtatgcaagtcaaaggttcgagcagtattggttagcacagccgaggctccttgcagcttccgaacacttagtcaatttctatggtcccaacccaagatgagtattttgacggtgttaaagaggtatatgctcacaaaaaggtgcctgattacgatggtatttcccagcttcaaagaataagaagatgtagcgttttctgttttaccctttttacgaggcaaaatgtaatggtcagtagtttataatcagcagttgaagttgtttcagataaaatgtagttctctcctatttaaatcgtttttatttgtggatacaaaaaaaaaaaaaaagnnnnnnnnnnnnnnnnnnnnnnnnnnnnnnnnnnnnnnnnnnnnnnnnnnnnnnnnnnnnnnnnnnnnnnn

SEQ ID NO: 87838 - DNA, 516 bp, Arabidopsis thaliana columbia
cggacgccggtcaaaattgagacttctctctgtagagtaaagtagtgaggaacatagaatgatcgccgacgacgatgagaagtggcttgccgccgcaatcgccgccgttaagcaaaatgctttctatatgcagcgcgctatcgactccaacaatctcaaagacgctctaaagttttctgctcaaatgctcagcgagcttcgtacttccaagctttctcctcataaatactatgaactctatatgcgagtttttaatgaattggggactttggagatattcttcaaggaagagacgggacgtggttgctccatcgcagagctctacgagttagttcagcatgccggtaacattttgccaagattgtatcttttatgtaccataggatctgtatatatcaaatccaaggatgttactgctacggatatacttaaggatcttgttgaaatgtgtcgagctgttcaacatcccttgcgtggtcttttcttgagaagttatcttgctcaagttactaggga

SEQ ID NO: 87839 - DNA, 497 bp, Arabidopsis thaliana columbia
  unsure (1)..(497): unsure at all n locations
nnnnnnnnnnnnnnnnnnnnnnnnnnnnnnnnnnnnnnnnnnnnnnnnnnnnnnnnnnnnnnnccaagcgtccgggactgctgttcttgcacttggatttgtcttatactctgatccagagcagactccccgtattgtatcccttctttccgagtcgtacaatccacatgtccgctatggcgcagctcttgcagttggcatctcttgtgcaggcactggtctgagtgaggcgatatctttgttggagccacttacatcagatgttgtagactttgttcgtcaaggtgctctgattgccatggccatggtgatggtccaaattagtgaagcaagcgattctcgcgttggagcatttaggcgtcaacttgagaagataatacttgacaagcatgaagatacaatgagcaagatgggagcaattttggcttcaggtattcttgatgctggtggaaggaatgtnacgntaagactnctgtctaaggcaaaacatgtccaag

SEQ ID NO: 87840 - DNA, 798 bp, Arabidopsis thaliana columbia
  unsure (1)..(798): unsure at all n locations
ctaatacgacttactataaggaaagctggtacgcctgcaggtaccggtccggaattcccgggtcggcccacgcgtccgtattgaaatgacattcttcccagtagtaaacgaggcgtgtagggtttttgctgaaggtatcgctgtcaaagcagcagaccttgacattgctggcataaggggaatgggttttccaccttacagatgaggaatcatggggggggctgattccatcggatcgaaatacatatactcgaggctggatgagtggtccaaggcttatggggaattcttcaagccttgggcttttttggctgaaaggggatctaaaggagttcttttgagcgctcccgtgaaacaagccagctcacggttgtaaggtcagcgtttcagtggaaccatttctccatgggggcatcttcggggttttctttaggttcccattttacttaaccgggaagtgggtatcttttggcctcaaaagcttttaaataaagtctcatctcagacatatgaatttgggaggaagtagggattaagttgtagtagcaataaaatttgttttaaggtgggctttgtcaaacaacaaagttgtcaaaaacctttgttgttataaagccaaaaggaggaaggtttaagatttaaagaaaaaggtgtcctttggccaaaannccccaaaaaaaaaaaaaaaaaaaaaaaaaaaaaaaaaaaaaaaaaaaaaagggcggccgcttcaaaagaatccaggctaacgaaggcgtccatgcgacgtcatagttcttctaatagtgtcacctaaat

SEQ ID NO: 87841 - DNA, 2652 bp, Arabidopsis thaliana columbia
  unsure (1)..(2652): unsure at all n locations
cggacgcgtgggaaattttgactcgcaaaatctcaacgaagctcgaaaatggattcacgaaccaaggggaagacggtgatggaagttggtggcgatggcgttgccgtcataacactcatcaatcctcccgtcaattctctatccttcgacgtgctatacaatctcaaaagtaattacgaggaggccttgagcaggaatgatgttaaagctattgttattactggtgcaaaggggaggttctctggtggctttgatatatctggttttggtgaaatgcagaaggggaatgtcaaagagccaaaggctggttacatttcgattgacatcataaccgacttgcttgaagctgctaggaaaccgtctgtcgctgccattgatggacttgccttgggaggaggattagaacttgctatggcttgtcatgctaggatatcagctcctgctgcacagttaggcttgcctgagctgcaacttggtgttattcctggttttggaggaacgcagcgtctcccgcgtcttgttggtctcaccaaagcccttgaaatgattttgacatctaagccagttaaagctgaggaaggtcattctttgggtcttattgatgctgtggtgccacctgcggagttagtaaccactgctcgtcgctgggcccttgacatagtcgggaggagaaaaccatgggtatctagtgtttccaagactgataagttacctcctcttggagaggcaagggagatactgacgtttgccaaggcacagacactcaagcgtgcccccaatatgaaacaccctttaatgtgccttgacgctattgaagtaggtattgtttctggtccaagggctggtttagaaaaggaagctgaagtcgcctcacaagtggtaaaactggataccaccaaaggcttgatccacgtcttcttttctcagcgaggaactgctaaggttcctggagttactgatcgtgggttggtgccaaggaagattaagaaggtagccataattggaggcgggttgatgggatctggaatagctactgcgttgatcctaagtaactatccagtgattctcaaggaggtaaatgagaaattcctggaggctggaattggcagagttaaagctaatctccagagccgtgtaaggaagggaagcatgtctcaggaaaagtttgagaaaaccatgtctctccttaagggttctcttgattatgaaagctttagagatgtggacatggtcattgaggctgttattgagaatatatctttgaagcaacaaatttttgctgatctggagaaatactgtcctcagcattgtatccttgctagcaacacatcgaccattgacttgaacaaaattggggagcggaccaagtctcaggatcgaattgttggagcacattttttcagtccagcacatatcatgccgctacttgaaatagttcggaccaatcatacctctgcccaagtaattgttgacctgttagatgttgggaagaagattaagaaaacaccagttgtggtgggaaactgcacagggtttgcagtgaataggatgttcttcccttacacacaggcagctatgttccttgttgagtgtggagcagatccatatctaatcgacagggcaatcagcaagtttggaatgccaatgggtcccttcagactgtgtgacctggttggatttggtgtggcgattgcaaccgcaacgcagtttatcgagaacttctcagaacggacttacaaatcaatgattattccacttatgcaagaggacaagagagctggtgaagccactcgcaaaggtttctatttgtatgatgataagcgcaaggcgaaacctgatcctgagctaaagaaatatatcgaaaaggcaagaagcatatctggagtaaagcttgaccctaagttggcgaatttgtcggagaaggacattattgaaatgacattcttcccagtagtaaacgaggcgtgtagggtttttgctgaaggtatcgctgtcaaagcagcagaccttgacattgctggcataatgggaatgggttttccaccttacagaggaggaatcatgttctgggctgattccatcggatcgaaatacatttactcgaggctggatgagtggtcgaaggcttatggtgaattcttcaagccttgtgcttttttggctgagaggggatctaaaggagttcttttgagcgctcccgtgaaacaagccagctcacggttgtaaggtcagcgtttcagtggaaccatttctccattggtgcatcttctgtgttttctttatgttcacattttacttagccgggaagtgggtatcttttggcctcagaagcttttaaataaagtctcatctcagacatatgaatctgggaggaagtagggattaagttgtagtagcaataagatttgttttatgttgtgctttgtcatacaacaaagttgtcagatacatttgttgttataaagctatatggagtaagttctatgatttaatgataatgttgtcatttgacaaatcagttaaaaaaaaaaaaaaaaaaaccaaagggcgaccgctctagaggatccaagcttacgtacgcgtgcgtgcgacgtcatagtcttctatagtgcaccnnnnnnnnnnnnnnnnnnnnnnnnnnnnnnnnnnnnn

SEQ ID NO: 87842 - DNA, 511 bp, Arabidopsis thaliana columbia
  unsure (1)..(511): unsure at all n locations
nnnnnnnnnnnnnnnnnnnnnnnnnnnnnnnnnnnnnnnnnnnnnnnnnnnnnnnnnnnnnnnnnnnnnnnnnccacgcgtccgcatcccagaaatttccgattgcactttcacatctccctctctcttacaactctctatccgtagtttcagtttcgtcctagaatttcttttcttgtctgttccagatgaaattgtgagttctccgagttatatgcatccgttagaatcaaagcggtaatcaaaagcagaatttagaggattgaaaaagatggttttggggtgtttccctttgaaaagcaagaagaaacgtggctctgtttctatgaagcggttggatcttgaagaaagcaagccaactgctttacctgagccaccaaagattccaagtcgtaatttacaatcagctcctccgagtttcagaactcgtgtgaagccaattcaatctaaccacgtgggacccgaaagtgaatagccaaccagattatgtctgctcggcaagctccccggg

SEQ ID NO: 87843 - DNA, 467 bp, Arabidopsis thaliana columbia
acgtcgttggttcttcgatctccgatttgcagatttaagcgataatacgagatcccaaggggctcacaagcctttctacgcttaatctgtaactatgccgctcagactcgagatcaagagaaaattagcgcaaaggtctgagagagttaaatctgtggatcttcatcctacagaaccatggattcttgcaagtttgtattctggaaccttgtgtatttggaactaccagacgcaggtgatggcaaaatcctttgaggtgactgaattaccagttcggtcagccaagtttgtagcacgaaagcaatgggttgtcgcaggagctgatgagatgtatatccgtgtatacaattacaacaccatggacaaggttaaagtgtttgaggctcattcagactacattaggtgtgtggctgttcatccaacccttccatatgtgctgtcatcttctgatgatatgctcataaagc

SEQ ID NO: 87844 - DNA, 584 bp, Arabidopsis thaliana columbia
  unsure (1)..(584): unsure at all n locations
nnnnnnnnnnnnnnnnnnnnnnnnnnnnnnnnnnnnnnnnnnnnnnnnnnnnnnnnnnnnnnnnnnnnccacgcgtccgtctctctctttcattcactacataaaaagcttcgagctcccatcactatataccctccaaagatgcaattttcaagaaactcaatccttaggcaactaagccgaaaagaaggttggagatcggcttctaaaaggtggacttccggagatagctcaacagccttcaacgacgacacaagtggtggtggttactcatcaatggagggtctttatggagtttactccggtggagacacggcggcgagaagtaagagagtgatggttgtagttgatgaaagttcgaggtctaagcatgctatgatgtgggctttgactcatttgactaacaaaggagatttagtgactcttcttcatgttgtgtctcctgatgatgaagctactccttctttggctcaatctcttggttctcttttgcaagccttgtaaacccgaggtggatggggaggcattggtgattcaaggacccaagctagcaacagtggtaagccaagtaaagaaacttgaag

SEQ ID NO: 87845 - DNA, 607 bp, Arabidopsis thaliana columbia
aacttatctagggtttgtaccagaagagctgggagatttcaattgggaaatgctgaaactagggtttcggttagcgattggcattcaacatcatcgcctcttccgtattccatgggcgaagagacactctgtacctagaatcttgtgttctgagcagcgggattactgttcatcaggtctgacaaagtatgttcctaagaagtctcggaagattactgaagatttgacatctcagcaatttgatgttactagagtggatcatagtgtgttgggatttcaagttaagggtaacagcaaagaggctagagatggctcatttttggatctgcaagaggaaaatgatactggaagttacacgaatgtgtcttgtgatgactctgatgaaggttttatgagtttggacaagggtatagatgctagtagattggatcatagtgtattggggtctaaagtgaaggctaacatcaaagagactggagaggatactgattttcatctgcgggataaaaatgatgctgatatgtactctgatgtttcttgtgatgactctaatgatgaaagcagcaacgaagttagatctacaggctataagtcgacgagacaacac

SEQ ID NO: 87846 - DNA, 1634 bp, Arabidopsis thaliana columbia
ggctattggttctctaacattgtcgttatgatgtccaacggtggtgattcgtcggaaattgtccgggaactggaagagttaaagctcaagaaggcagaaatagagcaccgtatttcgaccctcgaagctaagctccaggatacggcggcagttgaactgtacgacgccgtatccaacggtgactcttatctgacggcaccggagcttgaacatgggttatctccagatcagatttaccgttatagtcgtcaactgttacttccttcgtttgctgttgaagggcagtcaaatcttttgaagtcttcggtattagttattggagcaggaggactaggttcacctgccttattgtatcttgcagcatgtggtgttggtcagttgggtattatcgatcatgatgttgtagagctcaacaatatgcataggcagattatacacacagaagcatttattggacatcccaaagtgaaatctgctgctgctgcttgtcgctcgataaattcaacgatcaaagttgatgaatatgtggaagctcttcgcacttccaatgctttggaaatcctcagccaatatgatatcatagtcgatgcgactgataatcctccaagccgttacatgatcagtgattgttgtgtcttgttaggaaagcctttggtgtcgggtgctgcgcttggtatggaagggcagcttacggtttataatcataacggaggcccgtgttaccggtgtctttttcccactcctccacctacctcagcgtgccaaagatgttctgatagtggagttcttggagtagtgccaggtgttattggttgtctacaagcgctagagacaattaaactcgcaagcctggtgggagaaccactctctgaacggatgcttctttttgatgctttatcagcaaggatgcgcattgtcaagatcagaggcaggtcatcacagtgcaccgtgtgtggagacaattcatctttcaataagcaaacttttaaagattttgactatgaggacttcactcaatttcctttatttgcgggcccattgaacctgcttcctgcagaatcaagaattagcagcaaggagttcaaagaaattcttcaaaagaaggaacaacatgttctgctcgatgttcgaccttcacatcactataagattgtctctctcccggattcactcaacatccctcttgcaaacttagagactcggttaaacgagcttacttcagctcttaaagaaaagggaaatggccatgcgaacactgaatcttgcacaaatcctagtgtcttcgttgtatgcagacgcgggaatgattcacaaagagctgttcaatatcttcgtgagtcgggttttgattcggctaaggatataattggaggactggaagcttgggcagccaatgtcaaccccaacttccccacctactagagggaaacttttttgaaccaacttggttaaatccatagctcaagatgtttggagcagaaacatgtattattagttatgtcatgtaacaaaaccttatcaaatccatgttgaaacctgtctgaatcagagtgagttttagatgttatgataccatgtactcgtttgattcatatcattcatagattactgaaaaaaaaaaaaaaagcggccgc

SEQ ID NO: 87847 - DNA, 513 bp, Arabidopsis thaliana columbia
ggaaggcgtgccccccggcaggacaccggcccggatttccggggcgacccacaccgtcgcgggtccgtgtggctaaggtccctgcagagattccgaaatcgctacttccaatttctccagaaactttctttctcggcaaaattcccggaaaaagccactcgatcagcagatggtcaggaaggaagatgtggatttctattgcggattttcaaggaaagagcttcagagtttatgcaagaagtataatttgcctgccaatagatcaagttccgatatggctgaatcattggcttcttacttcgagaaaaataatttgaacccggtaagttttggggtccctgggaatcaagatagttcagcgacaacttctagagcaccagcgattagaacatggagtgtgaagagagattcttatggtcacaaattggatgcacctagagaggattatgttcaaggcgcagtggctagagaaccaggcattatccttgggaataatacaccgtatcaggaaag

SEQ ID NO: 87848 - DNA, 455 bp, Arabidopsis thaliana columbia
  unsure (1)..(455): unsure at all n locations
nnnnnnnnnnnnnnnnnnnnnnnnnnnnnnnnnnnnnnnnnnnnnnnnnnnnnnnnnnnnnnnnnnnnnnnnnnnnnnnnnnnccacgcgtccggccggatctgccggagagaaaaatgacgacgagtattcacatcacagctctcgacggaatcgtcaacgtgaactcactcttcacactcgccgtattcatcggattagcttggaaccctaccgatccagacaacagcctcgtaaccgaccctaattgcgtccccacagctcgtatggctgagaatctcgtcgccttccatgtgtactctttcgcatcattcctattctcaagtctcatcgctctaggtctcaaacaagcaatgaggctcaacatagcttcttcgtttcacatctctactcgaatcgatcctgtggtttactatgtgaacaagacggctcttagatttgggatggttacatcc

SEQ ID NO: 87849 - DNA, 798 bp, Arabidopsis thaliana columbia
cgcctgcaggtaccggtccggaattcccgggttgacccacgcgtccgtactgcgagaagacaacagaaggggatctcactttgttcatctaaaaactcctcctttcatttccaaacaaaaacttctttttattctcacatcttaaagatctctctcatggcgatgtctttctcaggagctgttctcactggtatggcttcttctttccacagcggagccaagcagagcagcttcggcgctgtcagagtcggccagaaaactcagttcgtcgtcgtttctcaacgcaagaagtcgttgatctacgccgctaaaggtgacggcaacatcctcgatgacctcaacgaggccacaaagaaagcttcagatttcgtgacggataaaacaaaagaggcattagcagatggtgagaaagcgaaagactacgttgttgaaaaaaacagtgaaaccgcagatacattgggtaaagaagctgagaaagctgcggcgtatgtggaggagaaaggaaaagaagccgcaaacaaggcggcagagttcgcggagggtaaagcaggagaggctaaggatgccacaaagtagggtcttacctaatcagttaatttcaagcacttaaactcgtagatatattgatccatatcctctctcttcatgtttaatagtacttacaataagatgagtctgttgtaatttctattaatttcacatcacaactgaaataagatatggtatccacagtcaccgtcacattctttaatgttttgcaaaatattcaatagacaaattaaataaaaaaaaaaaaaa

SEQ ID NO: 87850 - DNA, 651 bp, Arabidopsis thaliana columbia
  unsure (1)..(651): unsure at all n locations
ttctgattgatgcatgtgcgaggtttgatgtcaaatgccctcctcctcagacaacagctcgtctgtnagataaacttgttggagaatttctggaaccgacatgtgtgaacccaactttcatcatcaaccagcccgagatcatgagtcctttggctaaatggcacagatcgaagagtggattgacagagagattcgagctgttcatcaacaaacatgaactctgcaatgcctacacggagctaaacgatcctgtggtacagcgccacggattttgctgatcagctcaaggatcgacagtctggagacgatgaagcgatggctttagatgaaacattttgtaatgctttagaatatgggttggctcctacaggtggctggggattaggaatagacagactctctatgcttttgaccggctcactgaccatcaaggagggtcttttcttcccggcaatgaggccaccacaggggggggcagcagccgctcaagctccctttaacagaagggggggaattaaggggcctcacaagttttctgccnagctnagccaattcgcaattatgaccctgtcccaagtacttgaattnngcccattttcaaaaaaaaacccctttttttccaaaccttgangcttttgnaatgggggtcct

SEQ ID NO: 87851 - DNA, 2222 bp, Arabidopsis thaliana columbia
  unsure (1)..(2222): unsure at all n locations
agacttaacatttcatatagagaaacttgaaacaacaatctgagcaaagagcgttttatcttgttaattttggaatctccattacgatggaaggtgcggctgatcaaactacgaaagcgttatctgaattagccatggattcttctaccaccttgaatgctgctgagtctagcgctggtgatggagctggacctcggagtaaaaatgctttgaagaaggaacagaaaatgaagcagaaagaggaagagaagagacgaaaggacgaagagaaagctgaaaaggctaaacaagcacctaaagcaagctcccagaaggcagtggcagcagatgatgaagagatggatgcaacgcaatactatgagaacagattgaaatatcttgcggctgagaaggctaaaggggagaatccatatcctcacaagttcgctgtgtcaatgtcgattcctaaatacattgagacgtatggtagtttgaacaatggagatcatgttgaaaacgctgaggagtctttagctgggcggataatgagcaagcgatcttcctcttccaagctcttcttctatgatctacacggtgatgatttcaaggtccaagtcatggctgatgcaagtaagtcaggattggatgaagctgagttcttaaagctccattcgaatgctaagcgtggtgatattgttggagtcattgggtttccaggaaaaactaagaggggagaattgagtatctttccccgatcatttattcttctgtcccattgcctccacatgatgccgagaaaggctgataatgttaatgcaaagaaacctgaaatctgggttccaggtcaaacgagaaatcctgaagcatatgttctgaaagaccaggaatcaagatatcgtcagcgtcatcttgatatgattttgaacgtggaggttcgtcagatattcaggactagagctaaaatcatctcctatgtccgcagattcctcgacaacaaaaatttcttggaggtcgagacacctatgatgaacatgattgctggtggagcagctgctagaccttttgtgacacatcacaatgatctagatatgaggctgtacatgcgaatcgcacctgaactctatctcaagcaacttattgttggtggcttggaacgtgtttacgagataggaaagcaattcagaaacgagggtatagacctgacccacaatccggagttcaccacttgcgagttctatatggcttttgcagactacaatgacctgatggaaatgactgaggttatgttgagtggcatggttaaggaattaacaggtggttataaaatcaagtataatgctaatgggtatgacaaggatccaattgaaatcgactttactccaccattcaggaggattgagatgataggagagttagagaaggttgctaagctcaatataccaaaagacttggctagcgaagaagctaacaagtatctgattgatgcatgtgcgaggtttgatgtcaaatgccctcctcctcagacaacagctcgtctgttagataaacttgttggagaatttctggaaccgacatgtgtgaacccaactttcatcatcaaccagcccgagatcatgagtcctttggctaaatggcacagatcgaagagtggattgacagagagattcgagctgttcatcaacaaacatgaactctgcaatgcctacacggagctaaacgatcctgtggtacagcgccagcgttttgctgatcagctcaaggatcgacagtctggagacgatgaagcgatggctttagatgaaacattttgtaatgctttagaatatgggttggctcctacaggtggctggggattaggaatagacagactctctatgcttttgaccgactcactgaacatcaaggaggttcttttcttcccggcaatgaggccaccacaggaggagtcagcagccgctcaagctcctttaacagaagagaagaaataaggagtctacacaagttttctgactaagcttagtcaattcgctattatgcactctgttctcaagttacttgtaattgcagaccatatttttcaaaaaaaaaataccaattaattattatcaaaaacctttgtaagacttttttgcaattagtagtgatttcacttatattgaagggccttttttaggaaaaannnnnnnnnnnnnnnnnnnnnnnnnnnnnnnnnnnnnnnnnnnnnnnnnnnnnnnnnnnnnnnn

SEQ ID NO: 87852 - DNA, 670 bp, Arabidopsis thaliana columbia
  unsure (1)..(670): unsure at all n locations
cgcgcnnnnnnnnnnnnnnnnnnnnnnnnnnnnnnnnnnnnnnnnnnnnnnnnnnnnnnnnnnnnnnnnnnnnnnnccacgcgtccgagaaaactccatggatgatacacaagttaaagctctagaagagaagctgaagagtcagctaagtcagcttgaactcgagcaagcggtgttcgagagaatggtttacaagaataagaaccagcatcggagatgctcttattttcaataccttctcaaggtgagaagagaattgagacttttacgaacagcaaacatggagggtatgttgagaccttgctttcatgttatatctgggagaataagtaaacagaaaatccatgttttggagagcttgaagttgaaaaaatctgatactgggaaaccaaatatcttggaacggcttcttggagctcttcgtttactctcacagatgactgaacccatcttaaaggcagctagtgggatatctactctactagctcgttcattcttcataggattttctgtgacatttntggcgctgcttgcacgtctccgagtattggtccacaaatattacttgacgctgtttcagttttcaattcggtgacatctacatcactgaagaaacagtctgtcaagatagcacaggacggggttgaggttttccgcgagttctatccaa

SEQ ID NO: 87853 - DNA, 744 bp, Arabidopsis thaliana columbia
  unsure (1)..(744): unsure at all n locations
ctcacnnnnnnnnnnnnnnnnnnnnnnnnnnnnnnnnnnnnnnnnnnnnnnnnnnnnnnnnnnnnnnnnnccacgcgtccgcccacgcgtccgttctcatctccagagattatggacactaaactagagagctacaagggaattggcgactcaaactgtgctctctctcttctgtcaaatccacatcaaccacatgacaacaacaacaacaacaacaacaacaacaacatcaacaacaatacatggcgagcttcttcaggttttggcccgatgacggttacaatggctcaaccaccacctgcacctagccagcatcagtatctgaacccgccttgggtattcaaggacaatgataatgatatgtctcctgttttgaatttaggtcgatacaccgagccagataattgtcagataagtagtggcacggcaatgggtgagttcgagttatctgatcaccatcatcaaagtaggagacagtacatggaagatgagaacaccagggcttatgactcttcttctccacagaacagctggtctctctgacttgtctttgcatcagagaatcttcttacaatgaacgattgggcaatatcttatccttgtgatcaattgatagttgtgtgatatgctagcaataaaccagacaattgtggccagataatggcttttgattttgatttgttgttttatctccatgaaaatccaagttatgagatccnnnnnnnnnnnnnnnnnnnnnnnnnn

SEQ ID NO: 87854 - DNA, 1018 bp, Arabidopsis thaliana columbia
ggaaaaaatggcggagaaaaatgcgagcgcggtggacggtgcaattagggttagtggaatgcagttttcttacgatgttcaagatcctattttcttcgattttaatctcgatcttcccgctggatctcgttgcctcttggttggtgccaatggatctgggaaaactacgttattgaagattcttgctggaaaacatatggttggaggaaagaatgttgtacaagtgcttgatcgctcagcatttcatgatacagagcttgtttgtagtggtgatttgtcttacctaggaggatcatggagtaaaactgctggttctgctggtgatattccactccaaggagacttctcagcagaacatatgatatttggagttgaagggattgatcctttcagaagagagaagttgattgatcttcttgatatcaatcttcaatggcgtatgcataaggtttctgatgggcagagacgtcgagtgcaaatatgtatgggtctattacatccgttcaaggtattactactggatgaagttactgttgacctcgacgttgttgctaggatggatttgttggagttctttaaagaagaatgtgaacagagaggagctacaattgtatatgcaactcatattttcgacgggctcgagacatgggctagtcatttggcttacattaatggaggagagctgaaactctcggccaagttagatgagatcaaggatctcaaaacctcaccaaatctgctatctgttgttgaagcttggctccggtctgaaaccaaagttgagaaaaagacgaagaagaaacctgttgttacctctccatttatgtcgtctagacaaatggcatattaccgatgaatcttaacttgtttatgagatcagtaagaataagagcactgcttctacagatgcctttgttttctatggtacttcattgtttagaatccgataacttttatcacacatgaaagaatttctgtaaaaccacgtttttaattaaattactattttgccaaaaaa

SEQ ID NO: 87855 - DNA, 660 bp, Arabidopsis thaliana columbia
  unsure (1)..(660): unsure at all n locations
nnnnnnnnnnnnnnnnnnnnnnnnnnnnnnnnnnnnnnnnnnnnnnnnnnnnnnnnnnnnnnnnnnnnccacgcgtccggcagaatctgttaatgaaaaactcaaacaagagtttgatcaggcacaagaaaaatctttgcaatcatcatcagagagtgaactactagcagagacaaacaaccaactcaagatcaaaattcaagagcttgaggggttaataggttctggttctgtcgagaaagaaactgcattgaaaaggttagaagaggcaatcgaaaggtttaatcagaaagaaacagaatctagtgacttggttgaaaagttaaaaacacatgaaaaccaaatcgaggagtacaaaaagctggctcatgaagcatcaggagttgcggacactagaaaagttgagcttgaagacgcgctatcaaagttgaagaatcttgaatctactattgaagagctcggggccaaatgccaggggcttgagaaagaaagtggggatttggccgaggtgaatttgaagttgaatctggaactagccaatcatggatctgaggccaacgagttgcagacaaagctctctgccttggaggccgagaaggagcaaacagccaatgagcttgaggcttcaaagacaaccatagaagatctaacaaagcagct

SEQ ID NO: 87856 - DNA, 790 bp, Arabidopsis thaliana columbia
tcgttttttatcaacaaaaaaaaaaaaaaaacatacaaaagaaaaaaagatttgtgttaagaacttaattgaaacattacaatggcaaagaattcttatgcactgtctgggttaattgtggccctagtcatcgcattggtatgcaacattgatgacgctgcagcgagagacgtgaagctagtgaagctccgcgatgtaaaacccgaaactttgaacaagttgaaaggagaaaaagaaagtgaactcatgcaagcagaggagaaaaacaatcttctaaaggaaattgagaaggcaaagaaattgctcggagaattgaaaacgttaaagaagcaatcaactggtgatatgaaaagcgaattgaaatctttggtgaaatctgaatcgttacttaatgaaatttcagattctctgaagaatggaacgtacaaccatattaaagcaaacatttttgttgaaaaagaatcatttttctacagagcatggaaggagaatgcctataattcggtggttccggagaaggagaaagagtatatgtctaccataaaacgcattgtcaagttggtgaagaaaacttagaagaagaatcggttacttcatgatatttaattagtaacctttaaattaacaaaaagatatgatattcaaacgcatgtctatctatataatgtctacgcatgtatcaacggttttattgtgtaacaaatattttgtaattagtatgctttcttctagcatgtccaaattgtatttggtcgaaaatactaaaaataaattgtttcgatattttgtc

SEQ ID NO: 87857 - DNA, 730 bp, Arabidopsis thaliana columbia
  unsure (1)..(730): unsure at all n locations
atgatctccnnnnnnnnnnnnnnnnnnnnnnnnnnnnnnnnnnnnnnnnnnnnnnnnnnnnnnnnnnnnnnnnnnnnnnccacgcgtccggatgaaccaaaccgtcattgaaggaatgggagaacttcatctcgagattatcgttgacagacttaaaagagagttcaaggtggaggctaacgttggtgcaccgcaagtcaactaccgtgagagtatctccaaaatagctgaagtgaaatacacacacaagaagcaatcaggtggacaaggtcagtttgctgatattacagtccggtttgagccattggaagcagggtcaggatacgaattcaagagtgagatcaaaggaggagctgtgccaagagagtatattcctggtgtcatgaaaggacttgaggagtgtatgagcaccggtgtgcttgctggtttcccggttgttgatgtccgtgcttgtctagttgacggatcttaccatgacgtagactcaagcgtgctagctttccagcttgctgcaagaggagctttccgtgaagggatgaggaaagcgggtccgagaatgcttgaacctatcatgagagttgaagttgttacaccaggaagaaatcttnggtgatgccattgggnatcttaaacncccgaaaaggccaatttaaaaccntcggganaaaccccggggggnccaaggggggnnnccccnggggccccttgggnaaaatttnncnnnccnggg

SEQ ID NO: 87858 - DNA, 1438 bp, Arabidopsis thaliana columbia
  unsure (1)..(1438): unsure at all n locations
nnnnnnnnnnnnnnnnnnnnnnnnnnnnnnnnnnnnnnnnnnnnnnnnnnnnnnnnnnnnnnnnnnnncccacgcgtccgcgaggacacttagagacaaagagcagctcgtcagctcacccgtctgaagtatctcgccagccggcccgtctcaagcagctcgtcagatcacccgtctgaagcatctcgtcagccggtccgtctcaagtagctcatcagctcgcccgtctcaagcagctcgtcagctcacccgtccgaagtatctcgccagccggcccgttaaattttcccgatggagattcttccgattccggcggagagtttcaaggtaggattcatcggagctggtaaaatggcggagagtatagctagaggtgtggttgcttccggtgtgcttcctcctaatcgtatatgcaccgccgttcactcaaatctcaatcgccgtgatgtcttcgaatcctttggcgtcaatgtcttctccactagcgaagaagttgttaaagaaagcgatgttgtcatattctctgtgaaacctcaagttgttaagaaggctgtcacagaattaaagtcgaagctttcaaagaataagattctggtttctgttgcagctggaatcaagttgaatgatttacaggaatggtctggtcaagatcgattcataagggtgatgcctaatacacctgccgctgttggtgaggcagcttcagttatgagccttggcacaggagcaacggaagaggatggagcaattgttgctatgttgtttggcgcggtggggaagatattgaaagctgatgagaaaatgtttgatgctgtcactggtctcagtggaagtggaccagcatacatatttttagcaattgaagctttagccgatggaggagtagctgctggtttaccccgagagcttgcattgagtttagcttcacagaccgttcttggagctgcaacgatggttagcaaaactgggaagcatccaggtgtgttgaaagatgatgttacctcacctggcggcactacaatagccggagttcatgaactagagaaaggctctttccgggcaacacttatgaatgcagttgttgctgcagctaaacgaagccgcgagctctcacagagctaaatgatacatatgtagttgctgctattgtttcacctcacagattaatcaaaataagggttatgggccttatggcattgcttgtttttaggcgagagttttatcccacttgtcttcgatggtagaggtgaagattatttatctagactatgatgtattagttcagacagaactcagatacttttctataattcttaatctaataaaaatcactttcagttttaaaaaaaaaaaaagaaaaaaaaaaagnnnnnnnnnnnnnnnnnnnnnnnnnnnnnnnnnnnnnnnnnnnnnnnnnnnnnnnnnnnnnnnnnnnnnn

SEQ ID NO: 87859 - DNA, 565 bp, Arabidopsis thaliana columbia
  unsure (1)..(565): unsure at all n locations
tcgatagacgatgagggagatatgatgcttgtcggtgatgacccatggcctgagttctgcaacatggtgaagagaatattcatatggtcgaaagaggaagtgaagaaaatgacgcctgggaaccaactccggatgctgttaagggaagttgaaacaacactaacaacaacttccaaaacagataatcattccaactaatttttattctattctctatcagtcttcgtctccttcttatttgctttgtctttcggaattatcttgtttgtgtctgtgttttgttgcgcatggcttaaacaagaaactacatcccctgaggcaaaaaaaatggctcgtttttttggagcctcttatggagaaagggggtttatggggagagggttttctacttttaaaataggcttttggaagtttctttttcttctaggaacttgtgtgtaagagaaacaaatatgtaacgcccagaaagnnnnnnnnnnnnnnnnnnaannnaagnnnnnnnnnnnnnnnnnnnnnnnnnnnnnnnnnnnnnnnnnnnnnnnnnnnnnnnnnnnnnnnnnnnnnn

SEQ ID NO: 87860 - DNA, 1217 bp, Arabidopsis thaliana columbia
tctcgaccagataattttgtaacggattggatttttttgtgtcactatccgatttttatttttcctaactccgccgaatccgttcctctgtccttttctttctccactctctgtctctgtctcttcctcttttgattctccgatggaggctaagttactcaaacccgcgttttacaattccccaaacctcaatcttacgaattcttcaagactcatctcgcgattatcaatctggaacgataaatcaaaagttggactatcttctgggtctctcttcctccgtctctccgcagcttctccgatccgatactctagggggctactaagggtagatgagagtgagtatttgaaacttgaaagcattagacactctttgattcgtcaagaggacagtattatctttaatcttcttgaacgagctcagtatcgctacaacgctgatacttatgacgaggatgcctttactatggaagggtttcaaggatctttagttgagtttatggtcagagaaactgaaaagcttcacgcaaaggtggacaggtacaagagtcctgatgagcatccctttttcccacaatgcttgcctgaacctatccttcctcctattcaatacccacaggttttgcatcgttgcgccgaatcgataaacatcaacaagaaggtgtggaatatgtatttcaaacaccttctccccagactggtcaagccaggggatgacggtaattgtggttcagctgctctctgtgacacaatgtgtttgcagatactttcaaagagaattcacttgcgtaaatttgttgctgacgccaagtttcgtgaaaatcctgctgcctatgaaacagctatcaaagaacaagaccggacacagctgatgcaacttctaacgtacgaaacggttgaagaagtagtcaagaagagagttgagatcaaagccagaatttttggtcaagacataacgattaacgacccagaaactgaagctgatccttcctacaaaatacaacctagcttagttgcaaaactctatggagaaaggatcatgcccctcacaaaggaagtccaaattgagtacttgcttagaagactggattaatgttttcaaagaaggaagcataacatttgtattgatcctatttttccgaaaaccataatgttgacataagctgcgcaagctagcaagtcaagttgattttattaaaaaaccctgacgtagctcg

SEQ ID NO: 87861 - DNA, 832 bp, Arabidopsis thaliana columbia
  unsure (1)..(832): unsure at all n locations
tcctggacgcgtgggccgattccgatcgacaaatagggtttagaatccacacacccaaatcggaaggcgaagaaaatggaaggatgggatccgaacacgaagtcgacgttaacgcgaataccgcttctgacgacaaaggcgggtccaagagacggcgcggcatggacgcagaggctgaaagaggagtacaagtctctgattgcgtatacccaaatgaacaagtccaacgacaatgactggttccgtatctccgcttccaatcctgagggcacgcgttggactggcaagtgttggtatgttcacaaccttctcaaatacgaattcgatctccagttcgatatcccgattacctatccagccactgctcctgagcttgagctgcctgagattgacggcaagactcaaaagatgtatcgaggtgggaagatatgtttgactgtgcatttcaagcctctatgggccaaaaactgtcctcggtttggtatagcacatgcactttgtttggggctcgctccgtggttagctgcagagattccaattcttgtggactccggcgcgattaagcacaaagatgacgcagccacatctgcggaatcttaaatctatgtaacctttctatcaatctcagaaatgttgaggtgtttatcagtaatagctgaactcagaaatgactgaggtggatgcgtctaccctataaatacacttacatgaaacccaataaagatttaagctattgcaatgttttaaaaaaaaaaaaaaaaaggacggccgctctagaggatccaagcttacgtacgcgtgcatgcgacgtcatngtcttctantagtgtca

SEQ ID NO: 87862 - DNA, 758 bp, Arabidopsis thaliana columbia
  unsure (1)..(758): unsure at all n locations
tgcttgtcccgaaagtcgcagagcgagctacaagaagaagcgaaacacacccagaagaagaagaagaacaacaacgaagtaaacaatggagtctgagaaaaagatagctcatgagatcggtggtgtcaaaaacgacgctcttcgatttggtcttcacggcgttaagagcaacatcatcggatctcacccactcgaatcgtcatacgaatctgaaaagaaatcgaaagaggcgttgaagaggacggtcattgcgcatgcctacgggactgcacttccgttgaagatggatatggataggcaaattctctcaaggtttcagagacctcctggaccaattccgtcgtcgatgctcggtttagaagtctacacgggagctgtggatgactttggttttgaggattacttgaatgatcctcgtgattccgagacattcaagccggtagacttccaccacgggatggaagttcgtcttggcatctcaaagggaccgatttacccaagtttcatgtaacccttcatgggtggttttttttatcggttgtttttggatcatgactcatcgtgtatgaacttatttcaaccttagacttgtattctctcttgagttaagtttgaaatcagatgaaacaatgatgaatatgattgaacaatcaattctagtaaaaaaaaaaaaaaaaaaaaagnnnnnnnnnnnnnnnnnnnnnnnnnnnnnnnnnnnnnnnnnnnnnnnnnnnnnnnnnnnnnnnnnnnnnnnnnnn

SEQ ID NO: 87863 - DNA, 425 bp, Arabidopsis thaliana columbia
  unsure (1)..(425): unsure at all n locations
ctctgccgaaatccataaatctcttcctctctctctttcttatttaatcgtcacttgaccgccggtaagaaactcgagagtttgaatcgttttttaaccctcgccggtgattattgactggaaaacaccaaacgaatcgaagcagttagtttacaggtagagcagtgacagctgagcaaaaaaaaaggcggcggaaaaaaaaagtagtagtagttgatgatgatgaagatggtgaaacagattcgtatagggttttctaatcggcggtgttcgctgttcgtgaactctttattggagtaagtaaaaagcgccagagagagagatattgtgtatttggcttatttgggtctgtttttggattgggaaaagtggcngtttccgtttncggcggnttccctnttnttccggnnttntncttatttccc

SEQ ID NO: 87864 - DNA, 460 bp, Arabidopsis thaliana columbia
ggcatccattgattctctccaattccattctctctgcaatctccagtcgtcgattggaagagccaagctccagaatccttcaagtttggttattttcagacggagacccgtaaatctgaattgggttcaattcgaaactaaaggaagtttcgtgtgtaaagcgattggtgattcctcgactccagatgaagatattcagaacactcaaagtgatgataatgttgttgttgttactgctacgactcagagtgacattccccatgattccgagtattcaatttcgaggtttcgaagtatggttaccacactccctcctgttgtcttcctgatgaagaagtgctcagtgaacagcatttggattggggtctgcatcacggctactgttttggtcgctgcgattagggcttatgtagtcagaaagtcaagagataatcagcgtgctggctctgttgctgatctt

SEQ ID NO: 87865 - DNA, 1387 bp, Arabidopsis thaliana columbia
gttcgttttgtttgtgttgtaagcatccctgttgtgcatttcgtttatccaggtgaattcttgcaaagccttgagcagctttcagatgataaagactttggtctctccttatagtggatttggatctcagaagttgaagtttgacagatcttctgagaaagtgaagacgagagcagtaagaatggagctcacaatcactcaacctgatgattggcatcttcatctccgtgacggtgatcttcttcatgctgttgttccccacagtgcgagtaattttaagagagcgattgtgatgccgaatctgaagcctcctgtcacctccactgcagctgccattatttaccggaaatttatcatgaaagctttgccatctgagagtagctttgatccacttatgacactttatttgactgacaaaactctacctgaagagatcaggcttgcaagggaaagtggtgtggtttatgcggtgaagctgtaccctgccggagcaacaaccaactctcaagatggtgtcacggatctctttggaaaatgcttaccggtactagaagagatggtcaaacaaaacatgcctttgctggttcatggggaggtcacagatccgagtatcgatgtctttgaccgcgagaaaatcttcattgagacagttctgcagcctctaatccaacgccttccgcagctgaaagtagtgatggaacacatcacaaccatggatgctgtgaattttgttgaatcttgcaaagaagggtctgtgggtgcaacagtcacaccacaacatctccttctcaacaggaacgcccttttccaaggtggattacaacctcacaactactgtcttcccgttctcaaaagagaaatacatagagaagccattgtcaaagctgtaactagtggaagcaagaagttcttcctcggcacagatagtgctccacatgaacggagtagaaaagaatcatcctgcggatgtgctggtatttacagcgctcccattgccttgtccctatacgccaaggtctttgatgaggcgggtgcgctggacaagttggaagctttcaccagtttcaatggacctgatttctatggccttccgagaaactcgtcaaagatcacactgaagaaatctccttggaaggttccagacgttttcaacttcccattcggagagatcgtccctatgtttgctggagaaacccttcaatggcaaccgttgaaataatgtggtgatttgaagttgtcaaattttttctcccaaatcagtgaactcgtgtaccttttggattgaattttcttacggctgagttatgccctgcattttttgaggaataaaagcaagatactgaccaataaaaaaaaaaaaaagtttgaatcagaattgaaacaaaaa

SEQ ID NO: 87866 - DNA, 650 bp, Arabidopsis thaliana columbia
  unsure (1)..(650): unsure at all n locations
ctnnnnnnnnnnnnnnnnnnnnnnnnnnnnnnnnnnnnnnnnnnnnnnnnnnnnnnnnnnnnnnnnccacgcgtccgaagggcttatcgctttgacgagagctagggttctaatcaagtcagacgaagagatattgactgccgccgatgaagttcccaccattgatctcctccgtaagatcggtttctccgaaacgattcttgatcggttcttccgaccattcttcggcggaattttcttcgacagagacctcgagacgacctcgaagctcttcgatttcgttttccggtgtcttgctctcggagaaaacacacttccagccatgggaatcggagaaatctcgaaccagttggcagcgaagttacccgctaagtccgtcttgttgaacacaagggtcgcttctattgagtatccaaatggatcgggttccggatccacctagcgtgaggctccaagacggagcgttttgaaggcagagctaggtgtcataatcgccgtcgagcaaccggaagtgaataagcttctcgatgggatcagagaccccggtataacaaaacccgctcggaggcactatttggctttacttcacaggcggaaccgaacccaatcccggtacaggacccggttttatttctaaacgggtcaaattc

SEQ ID NO: 87867 - DNA, 386 bp, Arabidopsis thaliana columbia
caatggtggattggtctacactaccgaaggatcttttagacctaatttcaaaatctctagaatcttccttcgatctcatccaattccgttccgtttgttcgtcatggcgatccgccgccgagccgaaaagtcctcttccaacacatcatctcccgatcctccccgattacggggggagtcacgtccctgattccgccgttggtttccgtctctcgcagcggagtatcttacttatcaagcctcatgaaccgtgtatcgaagcggattcgtttggatggttgatcaaagtcgaggaagatcataatgttcctcctaaggtgactcatttagatccgtgatgtgatacaagaaactcaattcctgagaatttcactcgtgttctcgat

SEQ ID NO: 87868 - DNA, 540 bp, Arabidopsis thaliana columbia
  unsure (1)..(540): unsure at all n locations
cgttttgggaactctcgtgggacgtgatggagccaatctgtttctatgtcacgtccgtgtactttatggctggttacgcgtttttcctcaggacatcgaaagagccttcttttgaagggttttaccaaagcaggttcgaggcgaaacagagaaagttgatgaatgagtatgagtttgatctggagaggtataatgaactgaacaagctgttttgctctaagccttcggatcatgtttccaagattcttggagctatcaagagttaagattttgattaggggaacaattgcttagattcaatgttgttgtcacaactggtgtctgattttacctaactagagaattctaccccaatgaaaagtaagaaaaaaacgaatgggtactactctcaaatttttcagttttcgnnnnnnnnnnnnnnnnnnnnnnnnnnnnnnnnnnnnnnnnnnnnnnnnnnnnnnnnnnnnnnnnnnnnnnnnnnnnnnnnnnnnnnnnnnnnnnnnnnnnnnnnnnnnnnnnnnnnnnnnnnnnnnnnnnnnn

SEQ ID NO: 87869 - DNA, 768 bp, Arabidopsis thaliana columbia
  unsure (1)..(768): unsure at all n locations
atctcctctttttaagaatcttgttttgaatctttatgaaagctttgctcgttaaaaaatcaacaaactcgttgactctgcaaaaccctcatgtgctaagtttcaagtttatgttcttttgagctcaatggcggatagatatgagaaccaacctcctgagaagcttcaggggaagtatcaagcaatggttgtttgctgtattcttggaattggatctctcgtttcttggaacagtatgctcactatagcagattactactacaaagtttttccggattatcatcctccacgcgtccgcacacttgtataccaaccgtttgcgcttggaacaatcttgattctcgcataccacgaatcgaaaatcaatactcgaaaacgtaacctcattggttacattctattcacaatatccacattcttgctcatagttttggatttggcaacaaaaggacgtggtggaatcggtccttatatcggtttatgcgctgttgttgcttcttttggcctcgcggatgctacagttcaaggaggaatgatcggtgatttatcattgatgtgccctgaactagttcagtcattcatgggaggtttggctgtatctggtgcgctaacatcagcacttcggctaataactaaagcagcctttgagaaaaacatacgacggtccacgaaagggagcaatgatngntcttagctatctccacatgcatagaggtactctgggggtttctatatgctaatgtgttccccgaacttccgattggtaag

SEQ ID NO: 87870 - DNA, 993 bp, Arabidopsis thaliana columbia
  unsure (1)..(993): unsure at all n locations
gctctatacgactcactatagggaaagctggtacgcctgcaggtaccgggtccggaatttccggggtcgaccacgcgtncgattctcttccgtgtttcctttctgttcaagtgatattttaacaaagttcttagtccatgggatctgtggtgcttgtatggaagggggaagaaaccttcaggtatttttggtcttggggggtccaggaaggggaaaagggaccccaaggggcttattttggtggacattattggttccccccttttgattgcctgaaaatcttttaaaagttgaaataaattcaggttctgaaatgggacctttaatccaaattttgattaaagaaggggagaatggtcccttctgaggttcctatcaggcttttacagaaggctattcaggaaaacgggaatgacaagttcctcattgatggtttccctcgtaatgaggaaaaccgagcagcatttgaaaaagttactgagattgaaccaaagtttgtcttattcttcgattgtcctgaggaagagatggagaagcgcctgttgggccgaaaccaggggagagaggatgacaatattgagactataaggaagcgctttaaggtgtttcttgaatctagcttaccagtgattcattactacgaagctaaggggaaagttaggaagattaatgctgcaaagcccattgaagctgttttcgaggaggtgaaggccattttttttccttaaacttagaaggttaaactccaaaggtggggtaatcttttaggaggccaaaaggaaaaaaaaaaatcctaatgacccccttcaatggaaaaggctggaacttaaggctttttccaattttgatccaggaattatggatggtttggtagaattaagaataagccattggcaaccccttggatccaagtctatgtttttcgccaaaaaaaaaaaaaaaggcggcccgctctagaggatccaagcttacgtacgcgtgcatgcgacgtca

SEQ ID NO: 87871 - DNA, 895 bp, Arabidopsis thaliana columbia
  unsure (1)..(895): unsure at all n locations
ccaaattctctccgtgtttccttctgcttcaggtgatattttaacaaagttcttagtacaatgggatctgttgatgctgctaatggaagtgggaagaaacctacagttatatttgttcttggtggtccaggaagtggaaaaggtacccagtgtgcttatattgttgaacattatggttacacacatctgagtgctggagatcttcttagagctgagattaaatcaggttctgaaaatggaactatgatccagaatatgattaaagaggggaagattgtaccttctgaggttactatcaagcttctacagaaagctattcaggaaaacgggaatgacaagttcctcattgatggtttccctcgtaatgaggaaaaccgagcagcatttgaaaaagttactgagattgaaccaaagtttgtcttattcttcgattgtcctgaggaagagatggagaagcgcctgttgggccgaaaccaggggagagaggatgacaatattgagactataaggaagcgctttaaggtgtttcttgaatctagcttaccagtgattcattactacgaagctaaggggaaagttaggaagattaatgctgcaaagcccattgaagctgtcttcgaggaggtgaaggcaattttttctcctgaagctgagaaggttgaagcctaggctgcagcatcgtaaaaagataccgaaaacccgataaattgatcaggtagagttgggtgtgttgcatctttcttacaggaagtctctgcttggccgtatttgtttttttgcttattaaccatatgattgattactgttattattatacacaatttacctattatataatttttgttttgtttcaatttttgtatttgatgggattnnnnnnnnnnnnnnnnnnnnn

SEQ ID NO: 87872 - DNA, 947 bp, Arabidopsis thaliana columbia
  unsure (1)..(947): unsure at all n locations
nnnnnnnnnnnnnnnnnnnnnnnnnnnnnnnnnnnnnnnnnnnnnnnnnnnnnnnnnnnnnnnnnnnnngtattgcagcgctccacgcgtgcggaagaagaaagatgccaggagcaattgtggaggaagagaaatctcagattgaatccatcaaagagcaattgaaactcgagaaggaagatgatgttgttgtggaggatgtgaaagacggagaggaagaagacgatgatgaagacgatgaggacgtcgaagttgaaggggaaggtggaaatgagaatgcaaagcaaagtagaagcgagaagaaaagtcgcaaagctgttctaaagcttggcatgaaacctgtctcagatgtcagcagagtgacaatcaaaagagccaagaatgtgttatttgtcatctcgaagccagatgtttacaagagtcccaatgcagagacttacgtcatttttggagaggccaaggtcgacgatttgagctctcagctacagactcaagctgctcagaggtttaagatgcctgatgtgacatccatgctacctaaacgccggttttgaagttaccatggctcccctaccaaaggaaaaaaccgaaaccgatgtttatgacactggtgttgaagccaaagacattgatcttgtcatgacccaagcaggtgtctccaaggccaaaaccgtcagtgctctaaaggctaatgatggggaaatcgtttcagcccctatggaaccccctacataaagttgagtagtagagccccctaaattgggcttttgcttcattgcttcttgtctcagccaccattttctttgaacattattaattatgtctccccttgccccnnnnnnnnnnnnnnnnnnnnnnnnnnnnnnnnnnnnnnnnnnnnnnnnnnnnnnnnnnnnnnnnnnnnnnnnnnnnnnnnnnnnnnnnnnnnnnnnnnnnnnnnnnnnnnn

SEQ ID NO: 87873 - DNA, 472 bp, Arabidopsis thaliana columbia
  unsure (1)..(472): unsure at all n locations
gatactccaggtcacnnnnnnnnnnnnnnnnnnnnnnnnnnnnnnnnnnnnnnnnnnnnnnnnnnnnnnnnnnnnnnnnccacgcgtccggcaaatctcagagatgaggatggtgcaaaacgagtattctttggcggagaacgctttttagaaggaatttctggccaagcatatatcacgggtcagagaacagcactaaacagtccacttgggcttgaagtccagttgcacattccagaagctggttgtccacccttaagtgaaccacgggtgcgtgctcttctccgctttctaactggaatggacctatgcctaaaccgaggagatgtggatcccaaatctcagcactctgctgaagcacctggaccttctcttggctccgctcttgtggatcatggatttctttgcattaaagatgctgaattccaactggaactgctgatgcaatcactccttttttctcgggcctgtg

SEQ ID NO: 87874 - DNA, 634 bp, Arabidopsis thaliana columbia
ttctatacaactcacttagggaaagctggcacgcctgcaggtaccggtccggaattcccgggtcgacccacgcgtccggtcggacttgaaaccagtttcggtaccggaatttagaaactccgttcaaatccggagccaatctctaaaggataaagcttccaactttatccattaattggagaaaattctcagagagactgaagtcgacaaagtcagagggtttcgttttttggcttctgggttttttatttcaagtgttcaatttccgaattaggtaagaaagttaggttttgagatctgtgcgaattgtgagagatgtccacgccgttgaaggtgtggcaacgttggtctacaccgacgaaagcgacaaatccagattcgaatggctctagtcatggaaccggtttagacatggtgaccccagtttcgggtcgggttagtgagatccagttcgatgacccaagaatattgcctgagaaaatttcagagcttgaaaaagagcttttcgaatatcaacatagtatgggtcttcttctgattgagaaaaaggagtggagttcccagtatgaagcgcttcaacaggcttttgaagaggtgaatgagtgtctaaagcaggaacgtaatgcgcatctga

SEQ ID NO: 87875 - DNA, 776 bp, Arabidopsis thaliana columbia
cttgttcttcttcttcctcttcattttactttctcttcccgatttctctctgtccgattcaccttttcctccgatctcggtctccttagattccggaataatcccctcaaggcttggcttagtaatcgtcgttttctccgccatgagttccaatacggcgtcgtccagcgcgggggcagccggatcgggagattcttccgccgctaggaagaattcaaagcgacccaagtattcgaagttcacacagcacgagcttccagcttgcaagccaattctaacccctggttgggtcatttcgacatttttgatagtcagtgttatctttattccccttggagttatctcccttttcgcttcccaggatgttgtggagatcgttgatcggtatgatactgagtgcattccggcacctgctaggactaacaaggttgcatatatccaaggagatggagataaagtttgtaaccgggatcttaaagtgacaaagcgcatgaagcaacctatctatgtttattaccaacttgagaatttctaccagaaatcaccgaaggtttgtaaaaagtcgaagtgattcacagttgagaagtacaaaatacgggaatcaaataagtgcatgcaagcctgacggatgatgttggtgggcagccgattgtgcccgtgttgggctaattgctttgggggcctttttaacggcacaatacgctgttattcaaggaaacaatgtaagcctagctgtgaacaaaaaaggcattgcatggaagagtgacaaggaacac

SEQ ID NO: 87876 - DNA, 966 bp, Arabidopsis thaliana columbia
ccccaatttggatggccgtctgcaggtaaccgtaccggaattcccgggtcgacctacgcgtccgcagttgagaagtacaaaatacgagaatcaaataagtgcatgcaagcctgaggatgatgttggtgggcagccgattgtgccgtgtggtctaattgcttggagtctttttaacgacacatacgcgttatcaagaaacaatgtaagcctagctgtgaacaaaaaaggcattgcatggaagagtgacaaggaacacaagtttgggaacaaggtcttccccaagaattttcaaaaggggaatatcacaggtggtgctactttagatccaagaataccgcttagtgaacaagaagatctcattgtgtggatgagaaccgcagcattgccaacatttagaaaactttacggaaagatagagtctgacctcgagatgggtgacaccatacacgttaagctgaacaacaactacaacacgtacagcttcaatggaaagaagaagcttgttttgtcaaccactagttggctgggtgggaagaacgatttccttggcattgcttacctgacagttggcgggatctgtttcattttggccctcgcatttaccatcatgtaccttgtgaaacccaggcgtcttggagatccgtcctacttgtcatggaatagaaatcctggaggtcggtaacaagcttggaaagggagagagagagctctaatctgcgtgtgtaaatcttatccatccatgtacacatacaatgtaatttttgcttacatactatgtaatccttgcttgcaaaatggtttcttcggtgagagcttaaatcccacataatactttgttgttgttgttccaaaccagtctaatatattacttttgtccccaaaaaaaaaaaaaaaacagaagggcgaccgctctagaggatccaagcttacgtacgcgtgcaggcgacgtcataactcttctatagt

SEQ ID NO: 87877 - DNA, 392 bp, Arabidopsis thaliana columbia
ttgtttgtaatcagcagcgatcgagattttcgccgctgaaatctggagactgattattacaaacttgttcgtcgtgttcttcatcggagagacactagatcggaaaatttaacctcgatttgattgccgttgccgtaacatttgactgttgttttgtggtggggaattctagggttcttgtttgatgaagaagaactgaagtgaaaatgaccattaaaatctcccatgagatgattgtgtccgttcattcttcgaaatcggacaacggaatcgaatgatcgtcatattctgtaagagagaaggttagatcttcaccgaatctggaactcgagatccatcgttttgttcgattttctattctttcgcacaaggattggtctgagaagaacaag

SEQ ID NO: 87878 - DNA, 610 bp, Arabidopsis thaliana columbia
  unsure (1)..(610): unsure at all n locations
tcgttaatagcacatattcatatcctacaagacattcaaaccatgaaatcatcccatgcatatctcgtctgcatactgttgctctctctattttctctacatcaatgtgtgaggttagaaagatcgaacaaaatcgatatgtctgtatgcgtccatgaaatttgcggtggtgttttcgacggaggctgttattgctgtcccaaaacgccagctctttgctgggcagacatacaattctgcaccacctattgtcaatctcaaacttaaaaccttaaataaactgatctggagctatagttgttccattttaaacctacacctattgtcatttatgtttgcatctgtttgtcaacaagaatactcctaaacgtcttgaggtttaacgaaagtactcctaaacctcttgaggtttaaagatctttttaaagcatgttgaggtggaatcgtaccccttatgtatttccttagtttccaagtaatatcccataatatttgttttgatgtttttctgttgtagaatcggggaatctcataaattcagcccttttgagacatgttttaaccnnnnnnnnnnnnnnnnnnnnnnnnnnnnnnnnnnnnnnnnnnnnnn

SEQ ID NO: 87879 - DNA, 395 bp, Arabidopsis thaliana columbia
tctgatattgttctgaagatctatcgttttgagcttcgttaaccgtgatacagacgacggtatggaactattgaacatgttctgcctcaaggtcagcgtcagtagttcgacaagactaccttgcaacattttaaaagattcttgagctctttgatgtcaccactcaacgtaccgccaataacattcctgcttaaatcaagacgctgaagatttgtcaaggagaacaattcatgaggaattgagccgttaaatctattacaacacatgtcaagagaaatcaagctggtcaagttcacaaacgcatatccaggaatctctccttgtatgttgttaaatgagacatcaagcccaacaagagagtttatacgcagaatcggtctcaaaatgcttgaact

SEQ ID NO: 87880 - DNA, 804 bp, Arabidopsis thaliana columbia
ctactaccattcactatagggcaagctggtacgcctgcaggtaccggtccggaattcccgggtggacccacgcgtccgcaagagtttacctttacaattgagagaggagtcagcacaccaagttgtgtcagtgttaactatgatgatttcgttaatgacgtggaagcgggtgacatgcttcttgttgatggtggtatgatgtcgtttatggtgaagtcaaagaccaaagactctgtcaaatgtgaagttgttgatggtggagaacttaagtcaaggagacacctgaatgtccgaggaaagagtgcaactttaccttcaatcactgagaaggactgggaggatattaaatttggagtggagaacaaagttgacttttatgcagtttcctttgtcaaagatgctcaagttgtacacgagttgaagaaataccttcaaaatagtggtgctgatatacacgtgatagtgaaaattgagagtgcagactccatacctaacttgcactccattatcacagcatcagatggggcaatggttgcaagaggtgatcttggtgcagagcttccaattgaagaagtccccattcttcaggaggagatcattaacctgtgccgtagtatgggaaaagctgttattgttgcgactaacatgcttgagagtatgatagttcatccaactccaacccgggcagaggtctcagacattgctatcgctgttagagaaggtgctgatgcggtaatgctttcaggagaaactgctcacggaaagttcccattgaaagctgctggagtgatgcacactgttgca

SEQ ID NO: 87881 - DNA, 468 bp, Arabidopsis thaliana columbia
aaaagtttgatgttgcaggaagaatttcagctggctttattctgaaataggaaccggaggaatctcttcgctgatcggatatttgatgtatttgatgtgaagcgaaatggagtgatcgagtttggtgaatttgtccggtccttaggtgtcttccatccaagcgcgccggtccatgaaaaagtcaaatgtcattcttctagccccaaaaattgtttcatattcattctatgtgaatttacttgatattcttttcttaattggctaactaacaaagaattttctcatgaatttgcagttgctttcaagcttgtacgggtttacgacaaactggattcatcgagcgagaagaagtgagtccatttacggatactttgttttggtaccctccagattaaacagttttactccactaacgtttatgtgtgttgatctaacatgtatataccataatgaattacattctgatta

SEQ ID NO: 87882 - DNA, 409 bp, Arabidopsis thaliana columbia
gctttgattgttgcattgagtcaaattggctaatcagaagattcttggtaaatgtagggaccataattgggccgtttccaaggttccgtttcccaccttgtgaagaggaagaaatggaattgcaaaacgtatcttcctaatataagcccatgcaaggaaagattaatatacataaagcgaatatttttgtacaagatcttaaaagaggaagatagagatgtaagctaggatttggaaataaaccgatcttgataacgatattggacttgccttgtgtactgtatatatttagttatttacatagcgactctccatctcgcatacataattactaattaaatatttacaaatctagtctattattgcttcattgttgtatatcccaaaatatatgatccaccttttgcgg

SEQ ID NO: 87883 - DNA, 669 bp, Arabidopsis thaliana columbia
ttaggtcaactatagaagagtctatgacgtcgcatgcacgcgtacgtaagctcggaattcggctcgagattaaaaattatgtatgaagaggaacggcgagacgaaacggcggaggaacgtggcggaggaggcagagcagggagaggatccggcgatgtgggagaatcttgaccggaatttcagacaagtgcaatcagttttagacagaaacagatcactgattcaacaagtcaacgacaatcaccaatcgagaatggctgttaacatgtcgaagaacgttgctttgattcaagaactcaacggaaacatttccaaggttgttaacatgtattctgatctcaatactagtttctcgtcgggctttcacggtgggaagaacggtcacgatggtggtggtgctgccggaactagagcttaatgaaccggaatcaaattgtttcttcttagttggaccggccggtttgagaattttgaatctgtccggttcaagctatgatataaagtaaatgtttagtttttgtattgcaatgatgaatgttgttagaataatccgtgggagcaaacccatatctattggggttattttccccccggttttgagtattatgccctccctgtatacagcaatttctataatgtttaaaaaaaaagttgattcagtattagatt

SEQ ID NO: 87884 - DNA, 791 bp, Arabidopsis thaliana columbia
  unsure (1)..(791): unsure at all n locations
aagctggtacgcttgcaggtaccggtccgaattcccgggtcgacccacgcgtccgaaaacacaattaaaaattattatgaagaggaacggcgagacgaaacggcggaggaacgtggcggaggaggcagagcagggagaggatccggcgatgtgggagaatcttgaccggaatttcagacaagtgcaatcagttttagacagaaacagatcactgattcaacaagtcaacgacaatcaccaatcgagaatggctgataacatgtcgaagaacgttgctttgattcaagaactcaacggaaacatttccaaggttgttaacatgtattctgatctcaatactagtttctcgtcgggctttcacggtgggaagaacggtcacgatggtggtggtgctgccggaactagagcttaatgaaccggaatcaaattgtttcttcttagttggaccggccggtttgagaattttgaatctgtccggttcaagctatgatataaagtaaatgtttagtttttgtattgcaatgatgattgtcgttagaataatccgtgggagcaaacccatctctattggggttattttagttatggttttgagtctttttcaatgtgtctctactgcaatctctctaatgattataataataattgatacagtattagattaaaaaaaaaaaaaaagaggtnnnnnnnnnnnnnnnnnnnnnnnnnnnnnnnnnnnnnnnnnnnnnnnnnnnnnnnnnnnnnnnnnngaaatgccaaccaannnnnnnnnnnnnnnnnnnaagtatcat

SEQ ID NO: 87885 - DNA, 509 bp, Arabidopsis thaliana columbia
  unsure (1)..(509): unsure at all n locations
tattgtatctcttgctctcatattattntggccctgcagcaaccaaggttaagcccacaagatacataagttatcgtggtatgaatcatggagatcatgctatacattgtgacaaagcccaccctaacacctgcaagaagcaagtagcaaatccttacaggagaggatgcggaacaatcgaacgttgccgtcgtgatacaggtagaaaatgaatcaaccaacccacccaagagcataaaatattgcatcaacacctttggttaagaatgtgttaacatgtttctcattggaataccttcgttatctgtatacacacttcacatcctcatattcatttgttaatgagattgttttggctttgtaattgattgtaattatattatgttatgatcaatcatatttaaatatattatatccaataaaaaaaaaaaaaaagnnnnnnnnnnnnnnnnnnnnnnnnnnnnnnnnnnnnnnnnnnnnnnnnnnnnnnnnnnnnnnnnnnnnnnnnn

SEQ ID NO: 87886 - DNA, 587 bp, Arabidopsis thaliana columbia
  unsure (1)..(587): unsure at all n locations
atgatactccagctctcnnnnnnnnnnnnnnnnnnnnnnnnnnnnnnnnnnnnnnnnnagatttccgatacaatattagatatataaataacacaaagtgaactcctaatcagggttcattttataaatttattatttagttattgcggataaagaacaataataatatggggatgtctaaaagtatcaaggttatcttatctcttgctctcgtagtgttcttggcccttgctgcaaccaaggttgaggccacaagatacataacttatcctgctatcgatcgtggagatcatgctgtacattgtgacaaagcccaccctaacacctgcaagaagaaagaagcaaatccttaccagagaggatgcgagaagatcaatcgttgccgtggtggataggtggaaaacagtgaattaaccaacccacccaagagcataaaatatacatcaatacattatctatatacacacttttgacatcctcatattcatttttaatgatattatttttagtctattattggctttgtaattgattgtaatcagaatgttatgatcaatcatatatataaatacttcagttattatccg

SEQ ID NO: 87887 - DNA, 473 bp, Arabidopsis thaliana columbia
  unsure (1)..(473): unsure at all n locations
aatgagcaaaaatgactctttcataaccaatctttcttcttcttcttcttcttcttctggctctttccttatctctccatctctgtggagagacacaaaacttccaaaaaggaacattctttcagttctttacttaatctttcacaatgctaaatcattagccgttgataaagtcttaatctttgattcattcaaacgcgtttttgtttagtaatgtcgtcgcgtttttctttgacggtggtgtgtttgattgctctgttaccgtttgttgttggtatacggttgattccggcgaggatcacgagtgtcggtgatggcggcggcggaggaggtaataatgggtttagtaaacttggtccgtttatggaagctccggagtatagaaacggcaaggagtgtgtatcttcatcagtgaacagagagaacctcgngtcgtcttcttctagttctaatgaaccttcgcttgttcacat

SEQ ID NO: 87888 - DNA, 717 bp, Arabidopsis thaliana columbia
  unsure (1)..(717): unsure at all n locations
cccacttcaaatgtcactgcagaatcactggtgttagtggtggtgggttacatagtaagagctctctgctactagtagaagaagaagaagaagattgattataaagacttaagatggctgcggcgcattttagtaaggagagggtcttcagagggtttctggtttggttctgcttttggggactgatgtctctaacatgcgctgggagactcagtgtttcaaggcagaattttgaagtgcacaaacacttgaatcgattgaataaaccagccgttaagagcattcagagtccagatggtgacataatagactgtgttcacatatcgaagcaaccagcttttgatcaccctttcctcaaagatcacaagattcagatgggacctagttacactccagaatcgctgtttggtgagagcaaagtgtctgagaaaccaaaagagagtgtcaatcctattacacagttatggcaccagaacggagtttgttctgaagggacaataccagtgaggaggacaaagaaagaggatgtcttgagggcgagttctgttaaacggtatggtaagaagaagcacctttctgttcctctgcctcgatctgctgatcctgatctcattaaccaaagtggtcatcagcacgctatagcttatgtggaaggaggcaagttttacggggcaaaggcgacaataaatgtatgggaacccanagtgcaaagctcta

SEQ ID NO: 87889 - DNA, 976 bp, Arabidopsis thaliana columbia
  unsure (1)..(976): unsure at all n locations
ccggaatttccgggtcgacccacgcgtccgctcagggttattgctgagcatttatcagatgaagaagcttctggtttaagagaagggttccaaatgatggacacacgcccaagagggaagattaacatcgacgagcttaaaatcgggttgcagaaacttggtcatgccattccgcaagatgatttacaaattttgatggatgctggagacatcgatagacatggatatttggactgtgacgagtttattgccatatcggtacacctaaggaaaatgggcaatgacgagcatctcaagaaagcgtttgcgttctttgatcaaaacaataacggatatatcgaaatagaggagttaagggaagccttgtctgacgaacttggtacaagtgaagaagttgttgatgccattatccgcgatgttgacaccgacaaggatggaagaataagttacgaagagtttgtaacgatgatgaaaacaggaacagattggagaaaagcttcgagacagtactcgagagaacggtttaacagtatcagtctcaaactgatgcaagatgcgtcgttgcaggtcaatggtgatacaagatgagagaggcttaatctgtgtcactcaccagtctggaagattgaatcaaagggatgcaaatctttcttaatttcttaatttttatcttcttgggttgctttttttttatgacaccacgattaaagctttttaggcatataaagttgtaagagttgtgtgtttgatatcctggctaatgagcgagctgagtatggggatcaagagagaaaaaccgtgttggcctttggctgtgtgtagatattttgtataatcttgtgttgataaaagataatatcatcaatttttcttgtgatcaaaaaaaaaaaaaaaagnnnnnnnnnnnnnnnnnnnnnnnnnnnnnnnnnnnnnnnnnnnnnnnnnnnnnnnnnnnnnnnnnnnnnnnnnnnncatt

SEQ ID NO: 87890 - DNA, 725 bp, Arabidopsis thaliana columbia
  unsure (1)..(725): unsure at all n locations
gagggntncccggttctccccttaggaaccccaaataaaatttgggntttttttttaatnccttnccnatttccagggtaaaaaatttnaaatttttaccagtnccatatatccgctttttttttttnctnccatttttgtagttttgttttgccctctcttgtttttttctttacaagggtttttttnccgaggaccacaagaaccacgttgacgagcacaagagtgttgagcacaaagaaggtattgttgacaagatcaaagacaagatccacggtggtgaaggtaaaagccacgacggagaaggcaaaagccacgacggtgagaagaaaaagaagaaggacaagaaggagaagaaacatcatgatgatggtcaccacagcagcagcagtgacagcgacagcgattaaaggtgaggaagtgaggaggatcgcttgaataaaacagatctggttctggctattattaattaatgttgctggatgttcttatcatcttagagagaggttaaagacaggagaaccgtgcatctatctttgtttgttatgtttctgttttcctgtcatgaaaattatgctcatgtatcttatctaaatcaaaaataataatttgatgaatcatgacccgtaagacttgttatttaattttaacctggggtctatgtttctttagaagatccaaacttttatctgttggaaaaaaaaaaaaaaaaaaaaaaaagcgga

SEQ ID NO: 87891 - DNA, 558 bp, Arabidopsis thaliana columbia
  unsure (1)..(558): unsure at all n locations
aacaaaagcaaacgcaatttagcctcttcataagagagaagtcctctcagagaaacggcagccacatcaaagcaaccaaacacataaaagagagatttaatacaaaagaaagagaaaaaagaaagatatggcaggactcatcaacaagatcggagacgcactccacattggaggaggcaacaaggaaggtgagcacaagaaggaagaggaacacaagaaacacgttgacgagcacaagagtggtgagcacaaagaaggtattgttgacaagatcaaagacaagatccacggtggtgaaggtaaaanccacgacggngaaggcaaaagccacgacggagtnagcaagaactacttggcaatcgtatgggncaagccgtggttgaatttcagaatttnactttcttcgngcctgccattattgttggtttccttttaggcttttaccatgttacccgtcntttattaatttggccggacctttaaaancaatggggttttgaataacctttnggccattttttnggttctttttttttntaaaaantaaaatnttttntt

SEQ ID NO: 87892 - DNA, 443 bp, Arabidopsis thaliana columbia
cggacgcgtgggttacaaagcaaaatgactagtaaggtcgtcttccttcttctcctctctctcgtcgtcctcctcctccctctctacgcctctgcggctgcccgtgtcggtggttggagtcccatcagcaacgttacggaccctcaagtcgtagagatcggtgaattcgcggtctccgagtacaacaaacggagcgaatcgggactcaagttcgagacggttgttagcggcgagactcaggtcgtatctggtacaaattaccgtcttaaggtggcggctaatgacggcgacggagtgagcaagaactacttggcaatcgtatgggacaagccgtggatgaaattcagaaatctcacttccttcgagcctgccaataatgggcgcttcctttaagcttttaacatgtaaccgctctttattaatattgcagaaacattaaaaac

SEQ ID NO: 87893 - DNA, 517 bp, Arabidopsis thaliana columbia
gcaggtaccggtctcggattcccggctcgacccacgcgtccgaccaaacacataaaagagagatttaatacaaaagaaagagaaaaaagaaagatatggcaggactcatcaacaagatcggagacgcactccacattggaggaggcaacaaggaaggtgagcacaagaaggaagaggaacacaagaaacacgttgacgagcacaagagtggtgagcacaaagatggtattgttgacaagatcaaagacaagatccacggtggtgaaggtaaaagccacgacggagaaggcaaaagccacgacggagtgagcaagaactacttggcaatcgtatgggacaagccgtggatgaaattcagaaatctcacttccttcgagcctgccaataatggtcgcttcctttaagcttttaacatgtaaccgctctttattaatattgcagaaacattaaaaacaaaggagttgaaataaacataagacaattattgtgtctattttatgtaaaaaaaaaaaaaaaa

SEQ ID NO: 87894 - DNA, 979 bp, Arabidopsis thaliana columbia
  unsure (1)..(979): unsure at all n locations
cctggaatnatccagcagatgcagcatgcatgtaatgaatgcaaagggacaggtgagaccatcaatgatcgggacaggtgtccacaatgcaaaggagacaaggtcattcctgagaagaaggtgcttgaagtgaatgtggagaagggaatgcaacacagtcagaagatcacatttgaaggacaagcagatgaagcgcctgacactgtcactggagatatagtgtttgtccttcagcagaaagagcacccaaagttcaagaggaagggagaagncctctttgtggagcacacactttctctaaccgaagcttttgtgtggcttccaaattttgtcctgacttactttggatggcagaagtnttctccattaaatctaaattcctgggggagggtccgttgnaanccctgntttcatnncaaagggcaattangcggttnaaggggattnccgnttattnccnggggggccatttcattgaagggttaggcctctacatccacttcacagtggagttcccggactcgttgagcccagatcagaccaaagcactggaagctgttctacctaagccgtcaacagctcagttgagtgacatggagatagatgaatgcgaggagaccccgctccacgatgtcaacattgaggatgagatgaggagaaaggcacaagctcaaaaagaggcttatgatgatgccgataaagataatgcccatccgggtggtgctcaaagggtccaatgtgcccaccagtaagtacctccttaaaaagactttgacccacatgggtttgggctccaaccaatttgtctcttgctttttcattctaagtgtattgaagtctttatggaagtttggtccggtttaagaatttgcccacttcggtggaacatcgaaaaaaaaaaaaaaagnnnnnnnnnnnnnnnnnnnnnnnnnnnnnnnnnnnnnnnnnnnnnnnnnnnnnnnnnnnnnnnnnnnnnnnn

SEQ ID NO: 87895 - DNA, 797 bp, Arabidopsis thaliana columbia
  unsure (1)..(797): unsure at all n locations
gctggnacgcctgcaggtaccggtccggttttcccggggggacccacgcgtccgtacggctgcgagaagacgacagaagggtacggctgcgagaagacgacagaagggtacggctgcgagaagacgacagcaaggcaaccaaacacataaaagagagatttaatacaaaagaaagagaaaaaagaaagatatggcaggactcatcaacaagatcggagacgcactccacattggaggaggcaacaaggaaggtgagcacaagaaggaagaggaacacaagaaacacgttgacgagcacaagagtggtgagcacaaagaaggtattgttgacaagatcaaagacaagatccacggtggtgaaggtaaaagccacgacggagaaggcaaaagccacgacggtgagaagaaaaagaagaaggacaagaaggagaagaaacatcatgatgatggtcaccacagcagcagcagtgacagcgacagcgattaaggtgaggaagtgaggaggatcgcttgaataaaacagatctggttctggctattattaattaatgttgctgtatgttcttatcatcttagagagaggttaaagacaggagaaccgtgcatctatctttgtttgtaatgtttctgttttcttgtcatgaaaattatgctcatgtatcttatctaaatcaaaaataataatttgatgaatcataacttgtaagacttgttcttttctttttgtaaaaaaaaaaaaaaaaaaaaacgattctcgcccgctctaaaggatccaagcttacgtacgcgtgcctgcg

SEQ ID NO: 87896 - DNA, 1554 bp, Arabidopsis thaliana columbia
aaagttttcaaaaccaaacaagttagcagccacaacattctccttctccttctcctcgtgaagacttttctctctgtttatttttttttagggttttcgtaagaacagagcaaaaaacatgtttggaagaggaccttcaaggaagagcgataacacaaagttctacgagatccttggtgttcctaagaccgcagcaccagaagatctcaagaaagcttataagaaagccgctatcaaaaaccatcctgataagggtggtgatcccgaaaagtttaaagagttagcacaggcttatgaagttttaagtgatcctgagaagcgtgagatctatgatcaatatggggaagatgcactcaaggaaggaatgggtggtggaggtggtggacacgatccatttgatatcttctcttccttctttggtagtggtggacacccattcggaagtcatagccggggaaggaggcagaggcgtggtgaagatgttgttcatcccttgaaggtttccttagaggatgtttatctcggaacaacaaagaagctctcactttctaggaaggctttgtgctcaaagtgtaacggcaagggttcaaagtctggagcttcaatgaaatgtggtggctgtcaaggttcgggaatgaagatctcgatcaggcagtttggacctggaatgatgcagcaggtgcagcatgcttgtaatgattccaaaggcacaggagagaccatcaatgatcgggacaggtgtccacaatgcaaaggagagaaggttgtctctgagaagaaggtgcttgaagtaaatgtggagaagggaatgcaacacaatcagaagatcacattcagtggacaagccgatgaagcgcctgatactgtcaccggagatatagtgtttgtcattcagcagaaggagcacccaaagttcaaaagaaagggtgaggatctctttgtggagcacaccatctctctaaccgaggccttgtgtggcttccagtttgtcttgacccatttggacaaaagacagcttctcatcaaatccaagcccggagaggtcgtcaaacctgattcatacaaggcgataagtgatgagggaatgccaatataccaaagtccgttcatgaagggtaagctatacattcacttcacggttgaattcccggaatcgctgagcccggatcagacaaaggccattgaagcagttttgccaaagccaaccaaggcagctataagcgatatggaaatagacgactgcgaagagacgactctgcatgatgtgaacattgaggatgagatgaaaaggaaggcgcaagctcaaagagaggcttatgatgacgatgaggaagatcacccaggcggtgctcagcgtgtgcaatgtgcccagcagtgatcaacatgcgcatcttagtgatctccaatatttgcttctgtcttttctccttttcattgtattatttttgggtctttttatagactttgccaattcagtgggaagaacctcgtcctaattcaaatccttgttacaccattttttttggtttgagaaataaacttgtagttcttgag

SEQ ID NO: 87897 - DNA, 1805 bp, Arabidopsis thaliana columbia
  unsure (1)..(1805): unsure at all n locations
cgcgtcagagcaaacgcaatttagcctcttcataagagagaagtcctctcagagaaacggcagccacatcaaccaacccaaacatcgaaagagagacacttttctctctctctttctctatctccttccaatctctctagggttttcgttacaacggcgaaaagatgttcggtagaggaccctcgaagaagagcgacaacactaagttctacgagatcttaggtgttcctaagagcgcttcaccagaagatctcaagaaagcttacaaaaaagccgctatcaagaatcatcctgataagggtggagatcccgagaagtttaaggagttagcacaagcttatgaagtgcttagtgacccggagaagcgtgagatttatgaccagtatggagaggatgcactcaaggaaggaatgggtggtggaggaggtggacatgatccatttgatattttctcatccttctttggtggaggcccctttggaggtaataccagccggcaaaggaggcagaggcgtggtgaggatgttgttcatcccttgaaggtatctcttgaggatgtgtaccttggtacaatgaagaagctttcactttctaggaatgctctctgctctaagtgtaacggaaagggatcaaaatctggagcctccttgaaatgtggagggtgtcagggatctggtatgaaggtgtctattaggcagcttggacctggaatgatccagcagatgcagcatgcatgtaatgaatgcaaagggacaggtgagaccatcaatgatcgggacaggtgtccacaatgcaaaggagacaaggtcattcctgagaagaaggtgcttgaagtgaatgtggagaagggaatgcaacacagtcagaagatcacatttgaaggacaagcagatgaagcgcctgacactgtcactggagatatagtgtttgtccttcagcagaaagagcacccaaagttcaagagaaagggagaagacctctttgtggagcacacactttctctaaccgaagctttgtgtggcttccaatttgttctgactcacttggatggcagaagtcttctcattaaatctaatcctggggaggtcgtgaaacctgattcatacaaggcaataagcgatgaaggaatgccgatataccagaggccattcatgaagggtaagctctacatccacttcacagtggagttcccggactcgttgagcccagatcagaccaaagcactggaagctgttctacctaagccgtcaacagctcagttgagtgacatggagatagatgaatgcgaggagaccacgctccacgatgtcaacattgaggatgagatgaggaggaaggcacaagctcaaagagaggcttatgatgatgacgatgaagatgatgaccatccgggtggtgctcaaagggtgcaatgtgcccagcagtaagtaactccttagagagactttgacccacatgggtttgggctccaaccaatttgtctcttgctttttcattctaagtgtattggagtctttatgggagtttggtacggtttaagaatttgcccacttcggtggaacatcgaaacttgttttctctttttcctctgactttaaaaattaaggccttattacaattttgtgttttttctttatgattaaatttgtagtaatttaatgtctaagaacatatatactgtgtgttttctataaaaaaaaaaaaaaaaaattcaataaaaaaaaaacaaaagnnnnnnnnnnnnnnnnnnnnnnnnnnnnnnnnnnnnnnnnnnnnnnnnnnnnnnnnnnnnnnnnnnnnnnnnn

SEQ ID NO: 87898 - DNA, 987 bp, Arabidopsis thaliana columbia
  unsure (1)..(987): unsure at all n locations
nnccggcgagaggagagagagactattttattagggnctccgntcaaatttcccgcagtgttctctnctgattctctggctagaaatacgaacttcttcttcttcgtccaagcttttgaatcgaaaatcgatggcggatcagagttctaagccgttgcagtttttcgtgagactactcgacggaaaatcattaaccctaagtttctcctctccgttagcttatggcgagcagatcaagcagcggatcttcgagcaaacgaagatcccgacgcatctacagagattgataagcggaggataccaaatctccgatggatccgcgatttctcagcctgacgccaccgtgaatcttgtcctttcactccgtggaggtaaaggaggattcggatcgttacttcgtggtgggggtatgaaagctgggcagaagaagacgaacaacttcgatgcttgtagggatatgagtggacggagattgaggcatgtaaacgcagagaataggcttcaggagtggaaggatggtgaagaagggaggaaccttgagaaaaaggctcttgagtatctgaagaagcaatccaataaagtgaaacaaggtgttggaaatggcgctacgcagaagtatgttaataagtataaggaagaatctgataagtgtattttggctgttgatttggctttgaatgaatctttcaagaatgggaagagaaaagcgaagattggtgctgaatctaagaagaagaagcgtctcaaaatatggaaggggaagagagctgttgaagatagtgacagtaatgatagcgacgacgaggaagatgagaaatctgttgttctaaacaatggtggtcatgatggtgattcatctggtaaatcttcatgcaatagtggttcagaggaagagaacgacgctgtaatgcaccgcagtttcgatgtggttaaggaagtgatcaccggtgttcaagggattattgaagaggagatgaatgatttacc

SEQ ID NO: 87899 - DNA, 1007 bp, Arabidopsis thaliana columbia
  unsure (1)..(1007): unsure at all n locations
gcctcacagacatgcgggagtgtttattgcttagggtaaagaagatgctcttgtcactaagaatttggttcctggtgaagctgtttacaatgagaagagaatctctgttcagaatgaagatggaactaaggttgaatacagagtttggaatccgtttagatctaagttagctgctgcaattcttggtggtgtcgacaacatttggatcaaacctggtgccaaagttctttacttgggtgctgcttctgggaccactgtctctcatgtttctgacctcgttggccctgagggatgtgtttatgctgttgagttttctcatagaagtggtagagatttggtgaacatggccaagaagagaactaacgttattccaatcattgaagatgctagacatccggctaagtacagaatgctcgtgggcatggttgatgtcatattctctgatgttgctcagccagatcaggcaagaatcttggccctgaatgcctcatttttcctcaaaactggtggacactttgttatctcaatcaaggccaactgtatcgactctacagttgcagcagaagcagtcttccagagcgaggtgaagaagctgcaacaagagcagtttaagccagcagaacaggtgactctcgagccgtttgagcgtgaccatgcctgtgttgttggtggttaccgcatgccgaagaaacaaaagaccccagcctcatagaggaactgtggacagtagtgcctgtgtattaagacttatttactgggttttgtttttatctccttgcttgttgtattaagctagagatggataatgcttttatgtctcatttggaaaattttatcctcgttttagaactaatatatattgatgcaacattttcgtccnnnnnnnnnnnnnnnnnnnnnnnnnnnnnnnnnnnnnnnnnnnnnnnnnnnnnnnnnnnnnnnnnnnnnnnnnnnnnnnnnnnnnnnnnnnnnnnnnnnnnnnnnnnnnnnnnnnnnnnnnnnnnnnn

SEQ ID NO: 87900 - DNA, 517 bp, Arabidopsis thaliana columbia
ggtctctcagtctactttatccgatcggcgccggcgagattcaagggtaaagaagaagatgagtggtgaagttgttttagctgctagagtttatcgtgaccttctcaaagcagtggtgaaacatgttggtaaagaagatcacaagtctcatttcttagactttgttaagcaagaatttcgaaagaatgcaaactcagagaaaataaaccttgctcgaaattacacatatcttctcaatagcattcactctcacaaggatctgctgttctcatacaacattgcggttgatagaactgaagaaatgaaacgagtgcttaataaatctgcagccagtgtagggcttcgtcttcctgaagtttacgagccttgatcatgcattcattcctctttgtctttccgggggatgagtcgttatgatttcttcatttctgtggacaggtctttggttaatttttgattatatgagatagtagatgaagccagagagctcttttcctttaagcttttaagtattgac

SEQ ID NO: 87901 - DNA, 2809 bp, Arabidopsis thaliana columbia
  unsure (1)..(2809): unsure at all n locations
gggaaagctactacgcctgcaggtaccggtccggaattcccgggtcgacccacgcgtccgcggccgcgtgggatcctcgtaatcctctcctttctccttcagacccctcctagttgctgtttaaacaaacaaaaaaagactgcttctctttcttatttctctcatcatcatcatcaatggttttatgagatttatatcaaaaaacattgaggagctagagagaaagagagagtgtgtgtgtagaaaaagattgaaacatcatcaagattgatggagcaaggaggaggtggtggtggtaatgaagttgtggaggaagcttcacctattagttcaagacctcctgctaacaacttagaagagcttatgagattctcagccgccgcggatgacggtggattaggaggtggaggtggaggaggaggaggaggaagtgcttcttcttcatcgggaaatcgatggccgagagaagaaactttagttcttcttcggatccgatccgatatggattctacttttcgtgatgctactctcaaagctcctctttgggaacatgtttccaggaagctattggagttaggttacaaacgaagttcaaagaaatgcaaagagaaattcgaaaacgttcagaaatattacaaacgtactaaagaaactcgcggtggtcgtcatgatggtaaagcttacaagttcttctctcagcttgaagctctcaacactactcctccttcatcttccctcgacgttactcctctctccgtcgctaatcccattctcatgccttcttcttcttcttctccatttcccgtattctctcaaccgcaaccgcaaacgcaaacgcaaccgcctcaaacgcataatgtctcttttactcctactccaccacctcttccacttccttcaatgggtccgatatttaccggtgttactttctcgtctcatagctcatcgacggcttcaggaatggggtctgatgatgatgacgacgatatggacgttgatcaggctaacattgcgggttctagtagccgaaaacgcaaacgtggaaaccgcggtggaggcggtaaaatgatggaattgtttgaaggtttggtgagacaagtaatgcaaaagcaagcggctatgcaaaggagtttcttggaagctcttgagaagagagagcaagaacgtcttgatcgtgaagaagcttggaaacgtcaagaaatggctcggttagctcgagaacacgaggtcatgtctcaagaacgagccgcctctgcttctcgtgacgccgcaatcatttcattgattcagaaaattactggccataccattcagttacctccttctttgtcatctcaaccgcctccaccgtatcaaccgccacccgcggtcactaaacgtgtggcggaaccaccattatcaacagctcaatctcaatcacaacaaccaataatggcgattccacaacaacaaattcttcctcctcctcctccttctcatcctcacgctcatcaaccagaacagaaacaacaacaacaaccacaacaagagatggtcatgagctcggaacaatcatcattaccatcatcatcaagatggccaaaggcagagattctagcgcttataaacctgagaagtggaatggaaccaaggtaccaagataatgtacctaaaggacttctatgggaagagatctcaacttcaatgaagagaatgggatacaacagaaacgctaagagatgtaaagagaaatgggaaaacataaacaaatactacaagaaagttaaagaaagcaacaagaaacgtcctcaagatgctaagacttgtccttactttcaccgcctcgatcttctttaccgcaacaaagtactcggtagtggcggtggttctagcacttctggtctacctcaagaccaaaaacagagtccggtcactgcgatgaaaccgccacaagaaggacttgttaatgttcaacaaactcatgggtcagcttcaactgaggaagaagagcctatagaggaaagtccacaaggaacagaaaaggtacaaactttgcttttccttgtcaaaatgtgattggattaatgttatttgataattgaaatatgatatgttggaattgaagccagaagaccttgtgatgagagagctgattcaacaacaacagcaactacaacaacaagaatcaatgataggtgagtatgaaaagattgaagagtctcacaattataataacatggaggaagaggaagatcaggaaatggatgaggaagaactagacgaggatgagaagtccgcggctttcgagattgcgtttcaaagccctgcaaacagaggaggcaatggccatacggaaccacctttcttgacaatggttcagtaaaatcagaatcattgtttcaagaaaatgtacttatgtgtgcatagttttctaaacaaaacacccaaaaacacaaaacacaaacacacacacacacacatctgacaccccaaactgaaatatcaaggtctcatcgatcttcgatttttcagtgaatacaattctttttcccattctttcccttttgttcttttctttctcactgtctcttgtttgtttcttcttgttcattgttttcttcttccaacccccacatgaacaaaaaactctagctaaaaggtcttttagattattttggagttgtaatttcatcagcaagtctcacactttttttttttctcttaaaacatttgttgattggttnnnnnnnnnnnnnnnnnnnnnnnnnnnnnnnnnnnnnnnnnnnnnnnnnnnnnnnnnnnnnnnnnnnnnnnnnnnnnnnnnnnnnnn

SEQ ID NO: 87902 - DNA, 462 bp, Arabidopsis thaliana columbia
cccacgcgtccgcggacgcgtgggcggacgcgtgggcggacgcgcagagagccacaccaccttcatcaaacttcttcataacaaatcacatttctctctcttctctgcttgaatccattacagagggattgtggagtggtttggtttgatttgatttcgatctgtgacaatggtggagactagtatcgacatggaggaaggaactctcgagatcggaatggagtatagaactgtctccggagttgctggacctttggtcatccttgacaaagtgaagggtccaaagtaccaggagattgttaatattcgcttaggagatggatcaacgagacgtggtcaggtcttggaggttgatggggagaaagctgttgtccaggtttttgaaggaacatctgggattgacaacaagtttaccaccgtgcaattcacaggagaggtactgaaaacgcctgtgtcattgga

SEQ ID NO: 87903 - DNA, 493 bp, Arabidopsis thaliana columbia
ctctgcttgaatccattacagaggtacgtgatttcttcatcagatctttcctcacagttcgattacgtcttcttcctcagactttgattgttggatcgaattttcaattgatttttgatatgttcgcgttctgactctttttccagggattgtggagtggtttggtttgatttgatttcgatctgtgacaatggtggagactagtatcgacatggaggaaggaactctcgagatcggaatggagtatagaactgtctccggagttgctggacctttggtcatccttgacaaagtgaagggtccaaagtaccaggagattgttaatattcgcttaggagatggatcaacgagacgtggtcaggtcttggaggttgatggggagaaagctgttgtccaggtttttgaaggaacatctgagattgacatcatgttaccaccgtgcatttaagtagaggactgtattccctttgtattggacattcttgtcatatat

SEQ ID NO: 87904 - DNA, 758 bp, Arabidopsis thaliana columbia
  unsure (1)..(758): unsure at all n locations
ctctccctctctccctctctccctctctctctgctcgaatcgaaccgttcccaggagctgctttgatttggtttatcgttgatctgtgaaaatggggacgaatgatctcgacatcgaagaagggactctggagatcggcatggagtatagaactgtttctggtgttgctggaccattggtcattcttgacaaagtgaagggtccaaagtaccaggagattgttaatattcgcttaggagatggatcaacgagacgtggtcaggttttggaagttgatggcgagaaagcagttgtgcaggtttttgaaggaacatctggaattgacaacaagtttacaaccgtgcaattcacaggagaggttttgaaaacacctgtatcattggacatgcttgggcgcatatttaacggttcaggaaagccgattgataatggccctcctattcttgccagaggcataccttgatatttctggaagttcaatcaaccccagtgaaagaacctacccttgaagaggttgatacagacgggcatttcgacccatttgatgtcaatgaactcccatttnntcgtnggncaagaagnattccncnttttcttttntngctgggcttcccnnataattggggttgctgctcaaatttttcggcaaggctttggcctttttaagggggttggaaaangctttggnnctttttttaggggggtccttgggggggcanttttcaatttttttttnacgctttnggggaaaattnggg

SEQ ID NO: 87905 - DNA, 582 bp, Arabidopsis thaliana columbia
tatacgactttattagggaacgctggtacgcctgcaggtaccggtccggaatccccgggtcgacccacgcgtccggttcaatcaaccccagggaaagaccctaccctgaagagatgatacaaacggggatttctaccattgatgtcatgaactccattgctcgtggacagaagattcctcttttctctgctgctggtctacctcataatgagattgctgctcatttttgtcgtcaggctggacttgtgaagcggttggaaaagactgagaacttaattcaggaggatcatggagaggacaattttgcaattgtttttgcagctatgggtgtaaacatggagacagctcagtttttcaagcgtgattttgaagaaaatggatcgatggaaagggttacccttttcctgaacttggccaatgatccaaccattgagagaattatcactcctcgaattgccctaacaaccgctgaaatatttggcttatgaatgtggaaagcatgtgcttgttatattgacagacatgagttcttatgcagatgctcttcgtgaggtttctgctgctcaagaagaagttcctgga

SEQ ID NO: 87906 - DNA, 822 bp, Arabidopsis thaliana columbia
cacttggccccccctcgtggtcgacggtatcgatacgctagatatcgcattcgcggccgcgatccattacagagggatcgcggagtggtttggtttgatttgatttcgatctgtgacaatggtggagactagtatcgacatggaggaaggaactctcgagatcggaatggagtatagaactgtctccggagttgctggacctttggtcatccttgacaaagtgaagggtccaaagtaccaggagattgttaatattcgcttaggagatggatcaacgagacgtggtcaggtcttggaggttgatggggagaaagctgttgtccaggtttttgaaggaacatctgggattgacaacaagtttaccaccgtgcaattcacaggagatgcactgaaaacgcctgcgtcattggacatgcttgcccgcatatttcacggctcgcgaaagccaatatgataatggccctcctatgctcgccagaggcataccttgatatttctggaagttcaatcactccccagagaaagaacctaccctgaacagatgatactctccgagatctctaccattgatgtgatgaactccatcgctcgcggacagaacatatctctgttctctgacgctggactacctcatgctgagattgctgctcacattagccctcttgctggacttgtgaagcggttggaacacactgatgacttgatttatgaggatcatggaaaggacattatcgccattgtttttgcccctatgggtgtaaacatggagacacctcattttttgaggcgttatttttgatgaacatggtccgatggaaaggg

SEQ ID NO: 87907 - DNA, 1027 bp, Arabidopsis thaliana columbia
  unsure (1)..(1027): unsure at all n locations
ttgacgtcgcttgcacgcgtccgtaagctcggaattcggttcgaggttatatggacggatatgagttcttatgctgatgctcttcgagaggtttccgctgcccgagaagaggttcccggaagacgtggatatccaggttatatgtacactgatcttgcaactatttatgaacgtgctgggcgtatagaaggaagaaaaggttccatcacccaaattccaatcctgactatgcccaatgacgatatcactcaccctactcgggatcttactggttacattactgagggtcagatatatattgataggcaacttcacaacagacagatatacccacccattaacgtgcttccatcactttctcggctgatgaagagtgctattggtgaaggaatgactcgcaaagaccattctgatgtgtccaaccagctatacgcaaattatgcaatcggaaaagatgttcaagccatgaaagctgttgttggagaagaagctctgtcttccgaggatctgctgtatttagagtttctggataaatttgaaaggaagtttgtgatgcaaggcgcatacgatacaaggaacatcttccagtcgcttgacttggcatggacactgctccgtatcttcccacgtgagcttcttcaccgtattcctgccaaaacacttgatcaattctacagccgcgactccacaagctaaaccttttaaaacaagctctatgttgctccattcttatcttatttggaacttaaatcataccgagagaagacaaacaggattggttgcgtgaaaacaaaactcagagaattgtgaagttgggaattttcttttgtttttccatttgtataataaaggtttgtgtagagaaacttcgtacaaaatctatttataaaccacttcagctcctgtcttccaaactggtgaatcatgtcttttttgttgtggtgaaataataatctcttccagcacttttnnnnnnnnnnnnnnnnnnnnnnnnnnnnnnnnnnnnnnnnnnnnnnnnnnnnnnnnn

SEQ ID NO: 87908 - DNA, 1978 bp, Arabidopsis thaliana columbia
  unsure (1)..(1978): unsure at all n locations
cgcccattttcacagatcaacgataaaccaaatcaaagcagctcctgggaacggttcgattcgagcagagagagagggagagagggagagagggagagagagttatggtttatgagtctctctgtgaacatggggacgaatgatctcgacatcgaagaagggactctggagatcggcatggagtatagaactgtttctggtgttgctggaccattggtcattcttgacaaagtgaagggtccaaagtaccaggagattgttaatattcgcttaggagatggatcaacgagacgtggtcaggttttggaagttgatggcgagaaagcagttgtgcaggtttttgaaggaacatctggaattgacaacaagtttacaaccgtgcaattcacaggagaggttttgaaaacacctgtatcattggacatgcttgggcgcatatttaacggttcaggaaagccgattgataatggccctcctattctgccagaagcataccttgatatttcaggaagttcaatcaaccccagtgaaagaacctatcctgaagagatgatacagacaggcatatcgaccatcgatgtcatgaattccattgctcgtggacagaagattccacttttctctgctgctggtcttccacataatgaaatagctgctcagatttgtcgtcaggctggtctagtcaagcgtttggaaaagactgttgatctacttgaggatcatggagaggacaattttgcaattgtgtttgcagctatgggtgtgaacatggagacagctcagttcttcaagcgagattttgaagaaaatggatcaatggagagagttactcttttcctgaacctggccaatgacccaaccattgagagaatcatcactcctcgaattgccctcacaacagctgaatatctggcttatgaatgtgggaaacacgtccttgttatattgacggatatgagttcttatgctgatgctcttcgtgaggtttccgctgcccgagaagaggttcccggaagacgtggatatccggggtatatgtatacagatcttgcaactatttatgaacgcgcgggacgtattgaaggaagaaagggttccattacccaaattcctatcctgactatgcccaatgacgatatcactcaccctactccggatcttactggttacattactgagggtcagatatatattgataggcaacttcacaacagacagatatacccacccattaacgtgcttccatcactttctcggctgatgaagagtgctattggtgaaggaatgactcgcaaagaccattctgatgtgtccaaccagctatacgcaaattatgcaatcggaaaagatgttcaagcgatgaaagctgttgttggagaagaagcactttcttcagaggatttgctttatctagagtttttggataagtttgagaggaagtttgtgatgcaaggagcttatgatacacgcaacatcttccagtcgctggacttagcttggacattgctccgtatcttcccacgggagcttcttcatcgtatccctgcaaagacacttgaccaattctacagccgcgactcaaccagttaaaatgaggtaatggaggttatcttatcgaaactcttttgagagaaaagtgtgaatttttgtgatgtgtattatttggtgcttattataaagaggaaaaacaaagaaaagctatatattctgtgtctccctatctggtgatattttttttggttctgcattgtgttccaaagtggaaataaaaatcgataaacgatgtcgtattgtagtactttccttttctttgtatgaatttgttaagattggtttataaatgggattataataagtatctttaaaaaaaaaaaaaaaaaaaggcgnnnnnnnnnnnnnnnnnnnnnnnnnnnnnnnnnnnnnnnnnnnnnnnnnnnnnnnnnnnnnnnnnnnnnnnnnnnnnnnnnnnnnnnnnnnn

SEQ ID NO: 87909 - DNA, 584 bp, Arabidopsis thaliana columbia
ggcattgaatgagtctcttcaagatttacttgatggtattcaggaggatttctatgctgttgttgactgggcatataaaatagaccccctacggtgtatttcaatgcatggtataactgaacgttatctatctggtcagaaagctggtgctgcaggatttgttcgccttttgcttggagatctggagtccagagtttctatgcaattcagccgttttgtggatgaagcttgtcaccaaattgaaagaaatgaacgtaatgtaagacagatgggtgtcttgccatatattccaagatttgcagcacttgctactcgtatggaacaatacatacaacggcaatctagagatttggttgatcaggcatacacaaaatttgtgagcataatgtttgtgaccctcgagaaaattgcccaacaagatcctaaatatgcagatattctcctgttagaaaactatgctgcttttcagaatagcctgtatgacctggctaatgttgtgccgactttagccaagttttatcaccaggcaagtgaagcatatgaacaagcttgtacgcgccacattagcatgataatttactatc

SEQ ID NO: 87910 - DNA, 577 bp, Arabidopsis thaliana columbia
tacgactcactatttggagagctggcacgcctgcaggtaccggtccggaattcccgggtcgacccacgcgtccgctctttctcttcttctccatccttcttctctcggcgcgcgcttcatccccaccaccttcgaattcgtgccctttgagggaagctgctaggatgggtgtgaagcaggctctaaggagcattgatgcgtttccaagagcagaggatcatttgcttcagaagacacaatctggcgctgttgtatctattgttggacttcttataatggctactttgttcttacacgagctgagttattatcttaacacacttacagtgcaccagatgtcagtggacttaaagcgtggagaaactcttccaattcatgtaaatatgacgtttccatctttaccttgtgatgtactgagcgtagatgctatcgacatgtcagggaagcatgaagtggatcttgatacaaacatttggaagctccgtctcaacagtcatggtcatatcataggcacagaatatatatctgatcttgttgaaaaggggcatgagcatggccactcacctcacaagcatga

SEQ ID NO: 87911 - DNA, 542 bp, Arabidopsis thaliana columbia
tacgactcactatagggaaagctggtccgcctgcaggtaccggtccggaattcccgggtcgacccacgcgtccgctctgtttctttcttctccaacaaatcaccaaaaatggagagattcaatttctttaatctgatgatcatagctttatgtttatcatccttcgttcacagtctcgagatgggagaaacatgtagttcgaccagcgaatgcgacgccggattgagctgtcaaagttgtccggcgaatggaaataccggctctacttgtacccggatccaacctcttaacccgacttcaaaggtgaatggtttgccgtttaacaagtactcgtggctaacaacacacaattcgtacgcaatcacgggggcaaattcggcaactggttcattccttgtctctccaaagaatcaagaggactccatcaccaatcagcttaagaatggtgtgagaggtataatgctagatacatatgattttcaaaccgataatatggttgtgtcatttccactggagggacttgctttaccttcacagccttt

SEQ ID NO: 87912 - DNA, 453 bp, Arabidopsis thaliana columbia
gagaaacctccgataagcttatcggacaacttgagaagtcgacgccgccatggataggcctttgcaacctccttcttctcactcaattgctccctccaaattccattcacgaccatctcccttattactccaccgtctccactcaacgaatcttagtacttttccctcctctcgccgtctcgagtcacgccgaatcagctccatttcctgcttcttccgtcagaatccatcgccggatacatctccaggattgaatcagagtagtaatttcttgattgcttcttctcaaaccgatgcgtcgaaacctaatccaggatttatccaacggatcgtgagcagttttgagcaacgcaagaccatatcggcaggaatggttatattagtctctgctatagctgcgcttttgcttaatcccattcttgtgccgcctgctttcgctagctttcaaacggc

SEQ ID NO: 87913 - DNA, 2056 bp, Arabidopsis thaliana columbia
  unsure (1)..(2056): unsure at all n locations
atgatactgccagctactcnnnnnnnnnnnnnnnnnnnnnnnnnnnnnnnnnnnnnnnnnnnnnnnnnnnnnnnnnnnnnnnnccacgcgtgcgcggacgcgtgggcggacgcgtgggcggacgcgtgggcggacgcgtgggaaaaatcgtctctcgcttgagctgcgaagatgcaagcagtaaaaagatccaggagacatgttgaagaagagccaacaatggtagaacctaaaaccaagtacgatcgtcagctcaggatttggggggaggtaggtcaagcggccttggaagaagcgagtatctgtttactcaattgtggccctactggttccgaggctttgaagaatctcgtacttggtggtgttggtagcatcaccgttgttgatggatctaaggttcaatttggtgaccttgggaacaatttcatggtcgatgcgaagagtgttggccaatcaaaagccaaatctgtttgtgcgtttctccaagagcttaatgattctgttaacgccaagtttattgaggagaatccagacacgttgattactactaacccatctttcttctctcagttcactctcgttatagccactcagctggtggaagattcaatgttgaaacttgatagaatctgtcgagatgcaaacgttaagttggttttggttcgctcttatggccttgctgggtttgttcgcatctctgtaaaggagcaccccataattgactcaaaacctgatcattttcttgacgacctccgcctgaataatccatggcctgaactcaagagttttgtggagaccattgatctgaatgtatcagagccggccgctgcacataagcacataccttacgtcgtcattcttgtaaagatggctgaggagtgggctcaatcccatagtggtaatcttccctcaaccagggaagagaaaaaagagtttaaggatttggttaagtccaagatggtatctacggatgaagataactacaaagaagccattgaagccgctttcaaagtttttgctcctcgaggaatcagctcagaggttcaaaaattaattaatgatagttgtgctgaagtgaattcaaactcctcagctttttgggtgatggtagcggctctgaaggagtttgttttaaatgaaggtggtggagaggcaccccttgaaggttctataccagatatgacctcttcaacagaacactatatcaatttgcagaaaatctatttagccaaagccgagggctgattttcttgtcattgaggaacgagttaaaaacattttaaagaaaatcggtcgagatccgagccagcatcccaaaaccaacaatcaggagcttctgcaagaatgcaaggaaacttaaattgtgcagatatcgtatggtagaggacgagttcagaaatccttctgtaactgaaattcaaaagtatttagcggacgaggattacagtggtgcaatgggattttatattcttcttagagctgcggacagatttgctgccaactataacaagtttcctgggcagtttgatggaggaatggatgaggacatttctcgattaaaaactactgccttgagtcttcttaccgacttgggctgtaacggctcagtactcccagatgaccttatccatgagatgtgtcgctttggtgcctcagagattcatgtggtttctgcctttgttggaggaatcgcatctcaagaagtcatcaagcttgtcacaaagcagtttgttccgatgttggggacttacatcttcaatggcattgatcacaagtctcagttattgaaattgtagaagatctttccttaacacattggcttgaaacagagagaaagagctctatcatatattattcttctgattaaaagataatctttttgctactactgagaaacaaaattttcaatgacagttcagctgagaccatccgactcagaatcttcgaaaaaaaaaaaaaaaggnnnnnnnnnnnnnnnnnnnnnnnnnnnnnnnnnnnnnnnnnnnnnnnnnnnnnnnnnnnnnnnnnnaacgaacgcaaaccaccggccgggggc

SEQ ID NO: 87914 - DNA, 375 bp, Arabidopsis thaliana columbia
ggttgagactgaacctgaagaagcactttctggatttgctgaggttgttcagatggaacctgagaaagctgactggggtttcaaagctcttaagcagactgtgaagatctattatcgtctaggtaaatacaaagaaatgatggaagcctatacagagatgcttacatatatcaagtcagcagtcaccaggaattacagcgaaaaatgtataaacaatatcatggatttcgtctctggatctgctagccagaacactggcctgctgcaagagttctatcagaccactttgaaagcccttgaagaggctaagaatgagagactctggttcaagacaaatcttaaactctgcaacatctggtttgacattggtgaata

SEQ ID NO: 87915 - DNA, 925 bp, Arabidopsis thaliana columbia
  unsure (1)..(925): unsure at all n locations
tgaagaaggaaaaggtctcgcctttactgagtaaaaaacaaaccgctccaaagtcattgcatatctgtatgaatctggatccacgctgcttccgatcctactgctcttccaagcactagaaaatcattgatcatggagcgaatgggagataaagacattgtcaaacgtgcattcaaatcatttcaaaagagtttcgacttcaagtcttctgtcgacgggctaaacacagcagtaaagcagaatcctgcaaagccaacaattattccgtcagtagctactcgtcagaaggaaaatggcaggcctacaaaagcaagtagcatggagaagagaagtggtactaccgcctatcgttctccatctcatggactcaaaagcaatgaaaccgctgagaaacaacaaaaggagatttccaagtctggtgcaagacctttagagaagacacgcttgcagaagaacccaaaggcaggagtgattgatgccaaaacgcggagggactctcttaatccgaaagcaaaacctgtgcagggttctcttccaatgcggaccgtatcgaaaagctctttagacaaagtgttatgatagttatatccatccggtattaatctgatcttctggcaaagatcgccaccaatgttgttccatcagtcttggggtatagagccaatgatcttgtattcttgttgttatatagaaaagtctctagttaccagtatttagtcgtggaaggagtaataagagtaataagagatagttatattttacagtttcctatgtatgtgtatagaacccaatgataatgttgttctgataatagaagtggattgattcaatccnnnnnnnnnnnnnnnnnnnnnnnnnnnnnnnnnnnnnnnnnnnnnnnnnnnnnnnnnnnnnnnnnnnnnnnnnnnnnnnnnnnnnnnnnnnn

SEQ ID NO: 87916 - DNA, 541 bp, Arabidopsis thaliana columbia
  unsure (1)..(541): unsure at all n locations
nnnnnnnnnnnnnnnnnnnnnnnnnnnnnnnnnnnnnnnnnnnnnnnnnnnnnnnnnnnnnnnnnnnnnnnnnnnnnnnnnnccacgcgtccgtccacgcgtccagaaacatttaggcgttctgtcacttatcttcgtcatttgtattcttgtagccgtgttcaaccacaagaatcggaggaattatcaacggacaccaccgtctcctcctggctgtcctatcatcggaaacttgcatcaactcggagaattaccacatcaatctctatggaaactctccaaaaagtatggccctgtgatgcttttaaagcttggaagagtaccaacagtcatagtttcttcctctgaaacagcaaaacaagctttgaaaatccatgacctccattgttgtagtcgtgccaggctttgcaggggcaagagagctctcttacaactatctagacattgctttttctccttatgatgattattggaaagaagtaaggaagctcgctgggcaagaacttttcagtaggcaacaagttcactctatacaaccgat

SEQ ID NO: 87917 - DNA, 762 bp, Arabidopsis thaliana columbia
  unsure (1)..(762): unsure at all n locations
nnnnnnnnnnnnnnnnnnnnnnnnnnnnnnnnnnnnnnnnnnnnnnnnnnnnnnnnnnnnnnnnnnnnnnnnnnnnnnnnnnnccacgcgtccgcttggaagtggacatggaagccacgaagagaagagttttgttttccaaaaacaggttacactaaaagcaggagagaatcatcttgtaatgcttggtgttctcacaggattcccagacagtggatcttacatggagcatagatacaccggtcctcgtggtatttccatcttaggattgacttctggaacacttgatctcactgagagcagcaaatggggaaacaagatcggtatggaaggttgaaaaacttggaatccacactgaggtaaggtttaaagtaaggtcgaatggaaaaaattcacccggaaaagcaccaggacttacatggtaccagacatactttgatgcaccagagagcgtaagcgcagcaacgattcgcatgcatggaatgggaaaagggttgatttgggtgaacggagaaggcgttggaagatattggcaatcgttcttgtctccattaggtcaacctacacaaatagagtatcacatccttagatctttcttaaagcccaagaagaaccttcttgttatctttgaggaagagcctaatgtgaagcctgagcttatggactttgccatcgttaacagagacactgtttgttcttacgttggagaaaaccacactccaagtgttagacactggactaggaagaaagatcaagttcaag

SEQ ID NO: 87918 - DNA, 927 bp, Arabidopsis thaliana columbia
  unsure (1)..(927): unsure at all n locations
nnnnnnnnnnnnnnnnnnnnnnnnnnnnnnnnnnnnnnnnnnnnnnnnnnnnnnnnnnnnnnnnnnnnnnnnnnnnnccacgcgtccgcacagattgtttctcaacacacttcaaggaactttatgaagtctaaaaaggcaaacaagaagtttgatttcaaagttttcacagagacattgcctagtaaactcgaaggtaactcatacatacccgttgagctttatggggtgactaaagacaagacagactatggatggtacacaacaagcttcaaggttcacaagaatcacttacctaccaagaaaggagttaagacttttgtgaggattgctagtcttggacccgcgttgcacgcttggcttaacggagaataccttggaagtggacatggaagccacgaaaagaagagttttgttttccaaaacaggttacactaaaagcaggagagaatcatcttgtaatgccttggtgttctcacaggatttccagacaggggatcttacatggagcatagattcaccggtgcctcgtggtatttccatcttaggataggacttctgagacacttgatctcactgagagcaacaatggggaaacaagatcggtttgaaggggaaaacttggaatcacactgaggaagtttaaagaagggcgattggaaaaattcaccggaaatcaccagaactcatggtgcacaaatacttgatgcccaaaaacgtagcccacacgattccttcgtggatgggaaaggttatttgggtaacgaaaaggcgtgaaatttggaatcgtcttttccttagggaactcacaatgggttccttcctaattttttaaccaaaaaacttttttttttagaaaccatggaaccgttatgatttcctgtaaaaaactttttttctggaaaacctcatgttaacgtaaaaaaa

SEQ ID NO: 87919 - DNA, 432 bp, Arabidopsis thaliana columbia
aggacgcgtgggttcttcgtctctttttctttgctctgccaaaaatggcgagtctactcgattcgttgacaaccagagggttcttcaccatgccctcaatttctaggatttattctcctctagcttcttcaacttcattgacttcttcaccatcttcctcttcttcgattatcccatccttgtcagttctctcttacactcaccaacacccgcattcctctcgcttccctttccttgttgcagcaactctggatggttcctctgctgaggaagagctagatttcgaggaattcgaccaatatgctgaagataacttcgcagatgattattcggatgacgaagacgactccatcgatatctccgttcttgagaaagaagcgagagatatcgtgagagattatgctaccactctgtctcgcgagctcaaaatcg

SEQ ID NO: 87920 - DNA, 690 bp, Arabidopsis thaliana columbia
  unsure (1)..(690): unsure at all n locations
tctatacgattcatatagggaaagctggtacgcctgcaggtaccggtccggaattcccgggtcgacccacgcgtccgcacaattccatggctttcgcttcaaaattcgctcgttctaaaactattctctcttttctccggccttgtcgtcagctccactcgacgcccaagtcaaccggtgacgtgaccgtactttctccggtgaagggacgccggagacttccaacttgctggtcgagctctctgttcccattggcgatagctgcctccgccacttctttcgcttacctgaatctgtcgaatccttctatcagtgaatcatcatcggctttggattcaagagatataactgttggtggaaaagatagcactgaagctgttgttaaaggagaatacaaacaagtccctaaggagcttatttctcaattgaaaactatcctcgaggataacttgacaactgactacgatgagaggtacttccatgggaagccccagaacagttttcacaaggcagtcaacattcctgatgtcgttgtttccctaggtccgaagaagaagtctccaagattcttaaatcctgcaatgaatataaggttcctattggaccctatggtggggcaacatcgatcgagggtcatacccttgctccaaaaggangtgtgggcattgacctgtcattaatgaagaaggg

SEQ ID NO: 87921 - DNA, 421 bp, Arabidopsis thaliana columbia
  unsure (1)..(421): unsure at all n locations
tggagaactctctgcaattcctggagaaatcgaccatcatcatcttagctttgattctctctgtgtttcttcactttcaatttctgttttggtttatcgataagagaaagtaaaattcgtctgtgggggtttaagcttttttggggtgagagatgggtcaaacttttcgcaagcttttcgataccttcttcggcaaccaggagatgagggtcgttatgctgggtctggatgcggctggcaaaacaacgatactatacaagctccacataggagaagttctgtctactgttcccacaatcggtttcaatgttgggaaagttcagtacaagaatgtcatcttcacagtttggggatgttggaggccangagaagnttcaggcccttttggaggattacttcaataataccgatggggcttata

SEQ ID NO: 87922 - DNA, 502 bp, Arabidopsis thaliana columbia
cttatcacttctttcgaaatctctctctatccctctcaaaaatgaagctctctgtgcgttttatctccgctgctcttctcttgttcatggtattcattgccacagggatgggtccagtcaccgtggaggcacgcacgtgtgagtcaaaaagccataggttcaagggtccatgtgtgagcacacacaactgtgcaaacgtgtgccacaacgaaggcttcggcggaggtaaatgccgtggattccgtcgtcgttgctactgcacaagacactgctgatccatccattctcatgactcaaatcttcgatccatcgtcagtgtgttacttctttcttatctaaatcttccgtacggtaccatgtcgtaccgtacatgagtgttttctcgaataagtcattggtttgtgtgtttccggttttaatgtaatgtctacaccaattaatggcttttaatatattgtcattatggatctcaatctaaaagtttttaataaccggagtctgc

SEQ ID NO: 87923 - DNA, 592 bp, Arabidopsis thaliana columbia
  unsure (1)..(592): unsure at all n locations
taaaagttcaattatctcgagcgttcttatacctctccagggtctttagatagtgcccactggctcattagcattctacagtctgcacacttatcacttctttcgaaatctctctctatccctctcaaaaatgaagctctctgtgcgttttatctccgctgctcttctcttgttcatggtattcattgccacagggatgggtccagtcaccgtggaggcacgcacgtgtgagtcaaagagccataggttcaagggtccatgtgtgagcacacacaactgtgcaaacgtgtgccacaacgaaggcttcggcggaggtaaatgccgtggattccgtcgtcgttgctactgcacaagacactgctgatccatccattctcatgactcaaatcttcgatccatcgtcagtgtgttacttctttcttatctaaatcttccgtacggtaccatgtcgtaccgtacatgagtgttttctcgaataaggcagttgggtttgtgtgtttcccggttttaatggnaatggttaaaccaatttaaatggcttttaaaatantngggtttttgggggcttcaaccttaaaaggttttttanttt

SEQ ID NO: 87924 - DNA, 651 bp, Arabidopsis thaliana columbia
  unsure (1)..(651): unsure at all n locations
cgccnnnnnnnnnnnnnnnnnnnnnnnnnnnnnnnnnnnnnnnnnnnnnnnnnnnnnnnnnnnnnnnaccggaccacgcgtccgcccacgcgtccggtcgaagtttttgattctgcagatgactatgttaaactaatgaagtcaatcttcgactttgaatccatcaagaaattgctatcttatccaaaatttactttctgctatgatgcattgcatggagtggctggagcatatgcacatcgcatctttgtcgaagaactaggtgcaccagaaagttcgttgttgaactgcgtacccaaggaggactttggagggggccacccggatcccaatcttacctatgctaacgagctcgtggcacgcatgggattgagtaaaactgatgatgctggtggcgagcctccatagtttggcgccgctgctgatggtgatgcagaccgaaacatgatcctcggtaaaaggtttttcgtaactccttcggattcagttgctataattgctgcaaatgctggtggggccataccatacttcagctctggtttaaaaagggttgctaggagcatgccgacctcaactgcacttgatgtcgttgcaaaaacttggggtttgaagtctttgaaggtccaacaggctggaaattctttggaatct

SEQ ID NO: 87925 - DNA, 721 bp, Arabidopsis thaliana columbia
  unsure (1)..(721): unsure at all n locations
gggaaaccacccgcnccgtaattcccggggcgacccacgcgtccgagcctatgcacatcgcatctttgtcgaagaactcggtgcgcatgaaagcgcattattgaactgcactcccaaggaggactttggaggagggcatccggatcccaatttgacctatgctaaggagcttgtggcacgaatgggattaggtaaatccgacactggaggtgaacctccagagtttggcgccgctgctgatggtgatgcagaccgtaacatgatccttggtaaaaggttctttgtaactccttcggattcagttgccataattgctgcaaatgctattggtgccatcccgtacttcagctctggtttgaaaggtgttgcaaggagcatgccaacctcagctgctcttgatgtcgttgcaaaaagcttgaatttgaagttctttgaggttccaacaggctggaagttttttggtaatctgatggatgctgggatgtgttctgtttgtggagaagaaagttttggaactggctcggatcatatccgttagaatagacggaatttgggcagtttttgcatgggtgtctatacttgctcaccagaacaaaggaaatattgacggtaacgctaaactggtgtaagttgaagacattgtccggcagcatttgggctacctaccggtcggcaatttttacacttcgttaccaactatgaagaatggagaacccagggt

SEQ ID NO: 87926 - DNA, 1059 bp, Arabidopsis thaliana columbia
  unsure (1)..(1059): unsure at all n locations
accactcatattggggaagctggtacccctggcgggaccggtcccgaattcccgggtcgacccaagcccgcggcaaatcacagaacaccaatcggaataatcacacaagaacaaaacttgttaatcaggagaagacgacagagagagagaaggagagagatcttccatggcggattcggaagcagataagccactgagaaaaatctcagccgctttcaaaaaactagcaatcatcgtgaattcaccgaatccggaagttcctgtaacgcaattctctcacgcttgctctctggtctcgcctctctttggttgccttggaatagcttttaagtttgcggaaatggactatgttgccaaggttgatgatcttgtgagggcgtcgagttcgatatcgacattagtggtaatgatggacaaagatattgaggcagattgtgtaaggaaagctggtagtcatacgagaaaccttttgagggttaagcgtggtcttgacatggtcaaagttctctttgaacagatcatagcttccgaggaggataactccttgaaggatccagcaactaagtcttatgctcaagtgtttgctccccaccatggatgggctatacggaaagctgtttctcttgggatgtatgctcttcccacaagggctcacctacttaatatgctcaaagaggatgaggcggcggctaagatacatatgcaaagctatgtcaattcatcggcaccattaatcacgtatcttgataatctattcctctccaagcaactcggtattgattggtgaagagcctgaaaaaaaggcataactattgttactctttaggcaaaataacctatgttctcacatcaagctatgtaatgtcataacaaccagcggcggaattacattgggattaattgagtatgtccttaatctgtcgttttacctcttcttttaataaacacagtttttctccnnnnnnnnnnnnnnnnnnnnnnnnnnnnnnnnnnnnnnnnnnnnnnnnnnnnnnnnnnnnnnnnnnnnnnnnnnnnnnnnnnnnnnnnnnnnnnnnnnnn

SEQ ID NO: 87927 - DNA, 420 bp, Arabidopsis thaliana columbia
attcagtgagtgtcagagctgtctctataggcaaagagacgataactggggaccatatgttcttctttttccagatgaagacgaagccttttagtccacgaagaagacaatgtcttctaagtggtggaacattttcctttcttcgtctttaaatctttctgattgcctcttaaattttctgggtccatggcaagtttgcaccttggaggtgcttcgttgatcaatgaggtcgtttttggctcctccttgattggtttcagaagtaaacggtttaaacgagcttcagagagatgtacgttttgtgttcaacaaatgtcagagaatgaacagagaactaaacacgaactggctcgttctgctaaaagaagcgagtctttgagacgtattttaaagcaatatggagtatctgtagaaaaccct

SEQ ID NO: 87928 - DNA, 902 bp, Arabidopsis thaliana columbia
cacacgcgtccgcccacgcgtccgcccacgcgtccgctctctctctctctcttcttataagataagagctacaaagcttcccttcgttttactacatccatgattctgaattccacacacactgagagagatagagggacacattaaaagctaattcaacttttctgcaatggctgagaaggagaagaagaagcatttacatgagtttcttgaagatgaccaagagccttttcatcttaaccattacatcggcaaccttcgttctcagatgggttgctccgatatgcgtgtcaagaagcgaaagtccgataacgtcgccacgtttcctcctggtttgttctcctgcgagaactcttgtttcttcgcagctcataaatctcctgacccgagaaagtctccactctttgagctccggtcgccgggaaagaagaagatacgtgacggtcgagttttccttcagataccggcgagaaccgccgcaattctcttggacgcagcggcgaggattcagaagcagcagtcagagaaggctaagaccaataaagctcggaccagaggaaacgggtttggtatgttcgggtctgtcttgaagctgctgacataccgtataacaaaaccgcgtttggataacgctgatggaaacgcagtttcgttggaacgcgggtcggaaccgacgagtagtagccggagagagcgtatcgtggagattagtgataaatgcttttgtgaaagcccttttcattttgttctccaaacaactccttcttcctccggtcaccagactcctcactttacatcgacggccacttctccggcgcgacgcagtactgagggttgtctcaatctccggtttttattttattttatcaaaagtctaaattatggacaattatgtactctaa

SEQ ID NO: 87929 - DNA, 561 bp, Arabidopsis thaliana columbia
tatacgactttatatagggaacgctggtacgcctgcaggtaccggtccggaattcccgggtcgacccacgcgtccgaaaaaagaaaaaagtatgtctcttcttccccatctcatcctctacctaacacttttgacggtggttgttactggagaaactctccgaccaagattctacagcgagacatgccctgaagctgaatccatagtaagaagagaaatgaagaaagcaatgatcaaagaagcaagaagcgtcgcttccgtcatgcgtttccaatttcacgactgtttcgtcaatggatgtgacgcatctctgttgcttgacgacacaccaaacatgccttggtgaaaaactatcactttccaacatcgattcactaagatctttcgaagtcgttgacgacattaaagaagctctagagaaagcttgtccagctactggttcttgtgcccatatcgttatcatggccgctcgggacgccgttgctcttggaagtaaaaatcaaattcccccggttaagggaaactccggtttggaattttgggcttttgaaaaaccagacc

SEQ ID NO: 87930 - DNA, 646 bp, Arabidopsis thaliana columbia
  unsure (1)..(646): unsure at all n locations
tcaaccctcataagagggagcaaagcctgctagctccaccgcggtggggactcgctgtatacactacgtggctcccgcgggctgcaggaattcgcggccgcgaaatctacctatttcatgcttgggtttgattagtgtttttccagaatctgggacttcgcaggaattgcgctaattttcaatcgattttgcagaagtttgttgctcctggaatagaaatcgaagatgaagaagtacggattgcaaatcagagctccttcccagaaaaaacaatcatcatctcgacctccacttcgacccgcttcaatatttgatgaagaagaagatcacgacgtcgagaaggagatttctcgtcaagcaacaaaggccaaagctcataaagaaattgaggagcagcataagaaagccttagaggaggatccttctgctttttcatatgattgaggtttatgatgatatgaaacagaaagctgttcttcctcggatgcaagttcgtgaaggccgcacgccaaggtttttccagaatttgttgaacaggcanaccgtggggggaaggcntngngtggttttggggaaactttcgnaanggggggaaaccggccnntttttncgggnanagnaaagttttncttncnctttaaaatta

SEQ ID NO: 87931 - DNA, 786 bp, Arabidopsis thaliana columbia
  unsure (1)..(786): unsure at all n locations
tacgactcactatanggagagctggcacgcctgcaggtaccggtccggaattcccgggtcgacccacgcgtccgcccacgcgtccgggagatttctcgtcaagcaacaaagaccaaagctcataaagaaattgaggagcagcataagaaagccttagaggaggatccttctgctttttcatatgatgaagtttatgatgatatgaaacagaaagctgttcttcctcgaatgcaagatcgtgaagaacgcaagccaaggtatatacagaatttgatgaaacaggcagaacgtagagagaaagaacatgagatagtttatgagagaaagcttgcgaaagagagggagaaagacgaacatcttttttcggataaagaaaagtttgttactggcgcttataaaaggaaacttgaggaacaaaagaaatggctggcagaagaaagattgcgtgaacctcgtgaggaaagagatgatgtttctaagaagaaagatttgagtgatttctacttcaacattggaaaaaatgtcgcttttggagctcgagaagtcgaagctaaagaggcagagaagctcgaggaacaaagaaaggcagagaatctcgtagaacaaagaaaggcagagaagctcgaggagctgagaaaagaagtaccagggtagagaagaaacaaaaatcaccggagaatgaaggatctcctgactcgggagaaattgggatcaaggtcgtagcaaaaggtttggaagccccctagaaagccagaggccaagccagtttttcttgaaaaaaggaag

SEQ ID NO: 87932 - DNA, 442 bp, Arabidopsis thaliana columbia
accacgcgtccggcagcattgagctcgtctctctacatttccccaaagaaaccttcatgtccacaacaatctcaatccacattcttatccacgaaacctaccaccatcaaaaccaatctccatagccatcctctcttcactgtagctgatcagacagtaaccctccagatgaaagagaagatcctctgtctcgagctaatgggaattgactcaggaaaagccctttctctcaacccatgtctctgctcagccccccttgactccatccaatccgtcctccatttccttcaatcaaaaggaatctacccaaatgacctcccaagaatcttggggttgtgtcctaagatcctcacttccgacgtcagaacagaactgtaccctgttttcatgttcctgtcgaatgatctccatgtccctgagaatgcgttcagaagagtgatca

SEQ ID NO: 87933 - DNA, 332 bp, Arabidopsis thaliana columbia
gcgtccgcacacgcgtccgcccacgcgtccgcttttctctccgaacaaagaacacaaccaaaacaaaaatctatgttagatatgtcggaatctgtactcacggcgatgtatagttggttcactccgacagttctcttcgtcttcctcaaccttatgattggtaccatcgccattagctcatctttctcttccaaatccaacgacccaaatcaaactcagatccaacgctctccttccatgattcatcgtctcaaatccataaacttctcttcgttcacttctccagacaagtctcatctcgagtttcctccttcaacacctgaaagacaaca

SEQ ID NO: 87934 - DNA, 567 bp, Arabidopsis thaliana columbia
aaaagatgttgccataactcaacgaaccatcaaagacatcaagagacggtctctttctctctctgtctctagtctctactctcgaacgggctaagctcagatcattacaagattcgcttttgtgctgaacttggtcccattcattagttatttgcttaaagacaacatttttatatgcttccgttagctaaatccatcactccccccttcaatcatttccctgctctgctggccccagaaacagcttgctaggattcactacgacgtcgtttcgggttcgtctccagctgtggataatggctattctctgaaattgattctagtcactattttgttactggggattttctcagcataccaaagcaggatttattttttctggggatttctgagattggtagaaaatgttcagcttttcaaagaggcgcatgagactgggcagagttaagaaggtacagctctcggattctgttcaaggatataagagtcctttacgagtgaccaaacgcgctgatagctctagtaatgaagctgctgttgctgcaactatttattctgatgaacttg

SEQ ID NO: 87935 - DNA, 504 bp, Arabidopsis thaliana columbia
  unsure (1)..(504): unsure at all n locations
nnnnnnnnnnnnnnnnnnnnnnnnnnnnnnnnnnnnnnnnnnnnnnnnnnnnnnnnnnnnnnnccacgcgtccgcggacatctgtatgactacaagggttttggtgttgaagattcagatgctgagtctcctagagatatccattgttcagtcgagagtacagacttttccgctagagtgaaaaaacatattgaagaacctattaaagatatagaagtttctagcgtttcacctactgaaaactgttatcaatcagggagagaggctataccctcagttactcccagtactcctctcacggcccttagatacacaacatcagctgagaaacctgcaagtaaaactactggctcatcaacagtaaattcgaagcgttcttcgtcctggggaagaggcaacggcaagaaaacacctgctaaaggatcatttgattcctcaggaaatgacgagcttcttatacagaggctcgagcacatgaaagatgaactgcgacaacgaatcgct

SEQ ID NO: 87936 - DNA, 4161 bp, Arabidopsis thaliana columbia
gtgaagtattgaatgagaagaggcaattaaaaatctcccgtgactctcgtctccccatctcgctctctccctctgcccaaatttctggggcaaatttgttcatcagatctactacaatctctctttttcttcgggtatggagggccaacgaggcagcaattcttcgttgagctctggcaatggcaccgaagtcgccaccgacgtttcttcttgcttctatgttcccaatccctctggaaccgatttcgatgccgagtcgtcttctcttcctcctctctccccagctcctcaagtggcattgtcaattcctgcggagcttgccgccgccattcccctcatcgatcgcttccaggttgaagcttttctgcggctaatgcagaaacaaatccagtctgctgggaagcgtggcttcttctattccaaaaagtcctctggctccaatgtccgcgagcgcttcacatttgaggatatgctttgctttcaaaagattccaattccaatccccacatctctcctcaagattaacagcgatctcgtcagccgtgctaccaagttgtttcatctcatcttaaaatatatgggtgttgattcatctgatcgatctacgcctcccagtttagatgaacgcattgacctcgttggaaagctcttcaaaaaaactttgaagcgtgttgaactcagggacgaactttttgcccaaatctccaaacagactagacataatcctgacaggcaatacttgatcaaagcttgggaattgatgtacttatgtgcctcctctatgcctcctagcaaagatatcggtggatatctatctgagtatattcataatgtcgcacacgatgcaactattgaaccggatgctcaggttcttgctgttaacactttgaaagctttaaagcgctctatcaaagctggtcctaggcacaccacacctggtcgtgaagaaattgaagcccttttgaccggtagaaagctcacaaccattgtcttctttctcgatgaaacttttgaagaaatttcatatgacatggctaccacagtgtctgatgctgttgaggtagctggaacaattaaactatcagctttctctagctttagtttgtttgaatgtcgtaaagttgtttcaagttctaaatcatctgatcccggaaatgaggaatatataggattggatgataacaagtatattggagatctcctcgcagaatttaaagctattaaagatcgaaataaaggagagatactacactgcaaactggtatttaaaaaaaaattattccgagagtctgatgaagctgtaacagatctgatgtttgtgcaactttcgtatgttcagctgcaacatgactatttgctaggaaactatcctgttgggaggggcgatgctgcacagctttgtgccttgcaaattcttgttgggattgggtttgtcaatagtccagagtcatgcattgattggacatcacttcttgagcggtttttgccaagacaaatagcaataacccgagcaaagcgtgaatgggaattggatatccttgctcgctaccgttcaatggagaacgtgaccaaagatgatgcaagacaacaatttctacggatactgaaggcactgccatacgggaattcagttttttttagcgtacgcaagatagatgatccgatcggtcttttacctgggcgaatcattttgggtatcaacaaacgtggggttcacttttttcgaccggttcctaaagaatatctgcactctgctgaactacgtgacatcatgcaatttggcagcagtaacactgctgtctttttcaaaatgagagtcgctggtgttcttcacatatttcagttcgagacaaaacagggagaagaaatttgtgttgctttgcaaacacatataaatgatgtcatgttgcgtcgttactccaaagctcgatctgctgccaatagcttggttaatggagatatatcttgtagttctaagccgcaaaattttgaagtgtatgaaaaacgtttgcaagatttgtctaaggcttatgaagagtcccaaaagaagattgagaagttgatggatgaacaacaagagaaaaatcagcaagaagttactctgcgtgaagagttagaagctatacacaatggtttggagcttgaaaggagaaaattgttggaggttactttagaccgagataaacttaggtcattgtgtgacgagaagggaacaactattcaatccttgatgtctgaactgcgaggaatggaagcaaggttggcaaagtcgggcaacacaaaatcaagtaaagagacaaaatcagaattagccgaaatgaataatcagatattatacaagatccaaaaggagttagaagttcgaaataaggaattgcatgtcgcagttgataattcaaagaggttgttgagtgaaaacaagatattggagcaaaatctcaatattgaaaagaagaaaaaagaggaggttgaaattcatcaaaagagatatgaacaagaaaaaaaggtgttaaagcttcgagtttctgaacttgaaaataagcttgaagtacttgctcaagacttggatagtgctgagtctacgattgaaagtaagaattctgacatgctgctgttgcaaaataacttgaaagaacttgaggagttaagagaaatgaaagaggacattgacagaaaaaatgagcaaacagctgccattttgaaaatgcaaggagcccaacttgctgagctagaaatactttataaggaagaacaagttttaaggaaaagatactataataccatagaagatatgaaagggaagattagagtttattgtcgaataagacctctaaatgaaaaagagagttcagagagggaaaaacaaatgctgacaactgtggatgagtttactgttgaacatccatggaaagacgacaaaagaaagcaacacatatatgatcgcgtatttgacatgcgtgctagtcaagatgatatctttgaagacacaaagtatttggtacagtcggctgtagatgggtataacgtttgcatctttgcatatggtcaaactggttctggaaaaacttccactatatatgggcatgagagcaatcctggactcacacctcgagctacaaaggaactgttcaacatattaaagcgagatagcaagagattttcattttctctaaaggcatatatggtggaactttatcaagacacacttgttgaccttttgttaccaaaaagtgcaagacgcttgaaactagagattaaaaaagattcaacgggaatggtctttgtagagaatgtgacaactattcctatatcaactttggaggaactgcgaatgattcttgaacggggatcggaacgacgacatgtttctggaacaaatatgaatgaagaaagctcaagatctcacctcatattatcagttgttattgaaagtattgatcttcaaacccagtctgctgcgaggggcaagctgagttttgtggatcttgctggttctgagagagttaaaaagtcgggctcagctggttgtcaactcaaagaagctcaaagtatcaacaaatcactttctgcattaggtgatgttattggtgctttatcttctggcaaccagcatattccttataggaatcacaagctaacgatgttgatgagcgattcattgggcggcaatgccaagacgttaatgtttgttaatgtgtctccagccgaatcaaatttggacgagacgtacaattctcttctatatgcatcgagagtgagaacgatcgtgaatgatcccagcaaacatatatcatccaaagagatggtgcgattgaagaagttggtagcatactggaaagagcaagccggtaaaaaaggtgaggaagaagacttggtggatattgaggaagatcgtacacgaaaagatgaggcagatagttgaagaaagctgacatgaaattcgtctaggtgaaattgagactatagtatcactggttttcaccattctttttgtaggaagttcctgctttatagtagagtttctatcgaagagtagtcctatatgtctcaaactttctctcttttgatgagatcttcattacaagaaatgaaaaaaaaaaaaaaagggcggcccgtttaaaagaatccaggctaaggaaggggggcatgcaaggtcaagtt

SEQ ID NO: 87937 - DNA, 841 bp, Arabidopsis thaliana columbia
acacatacggttttcacgacttgactcaagcctcgacgaccaaaatttttctttctacaaatactttgacttaagagttgcagaaatatcaagttaaaaaataaaacagaaggagaaatggcaataagttttagaactctagctcttttgaccctctcggtgttactaatttccatatctctcggcgtcgtcacagcaacagagtcgcagaggaatgaaggggaggtgcttacaatgtacgagcaatggcttgtagagaatgggaagaactataacggtcttggagagaaggagagacggttcaagatcttcaaagacaacttgaagcgcatcgaagaacacaattcagatccaaaccggagttatgaacgcgggttgaacaagttttcggatctaacggctgatgagtttcaagctagttacttaggtgggaagatggaaaagaaaagcctatcagatgtagcggagaggtatcagtacaaagaaggagatgttttacctgatgaagttgattggagggagagaggagcagttgttccaagagtcaaaagacaaggagagtgtggaagttgttgggcgtttgccgcgactggagcggtggaaggtataaaccagatcacaaccggagaattagtatctttatcggaacaagaactcattgactgcgatagagggaacgacaactttggatgtgctggtggtggagcagtatgggcctttgagttcattaaggagaacggtggtattgtatccgatgaagtttatggttataccggtgaagatactgccgcatgcaaggccattgagatgaaaaccactcgggttgttaccattaatggtc

SEQ ID NO: 87938 - DNA, 738 bp, Arabidopsis thaliana columbia
atgatacttcaggtctctacgactcacttatggaaagctggtccgcctgcaggtaccggtccggaattcccgggtcgacctaattctcgagctcgaagaaagagacgaaaatggcactgagaaatgcaattcttcgtcacctgagggttccggtgcaaaccctaggattgaatcagtctaaaattgggttccttggtacgatccggtcattttcttcgcacgatgatcatcttagcagagaagctgtcgtcgatagagtactcgatgttgtcaagagcttccccaaagtcgatccctctaaggtgactcctgaggttcatttccaaaacgatttgggattagatagtttggacacagtggagatagtgatggctattgaagaggaattcaagctggaaattccagacaaagaagctgacaagatcgattcttgctctctcgccattgaatacgtttacaatcatccaatgtctagctaatcgctgtgtgctctctcatggtttctccttcctttttcttgtatgaggttcttctctctttgataatgccataatgggatttgcaaaaaaatcacttttatttggagagcattgttattgactcttttaacggttccagtttcttaaaaagaaaacctttttgcttgaaaaaaaaaaaaaaaaaagggcgaccgctctagaggatccaagcttacgtacgcgtgcgtgcgacgtcataactcttctatagttgtaccta

SEQ ID NO: 87939 - DNA, 665 bp, Arabidopsis thaliana columbia
  unsure (1)..(665): unsure at all n locations
tctatacgactcacttagggaaagctggtacgcctgcaggtaccggtccggaattcccgggtcgacccacgcgtccggtgatacatcactcgatctcagagctgaacagagtttggagtagacgactataatttctgtttctattgagagctatggcactacgatcagtaagcaggaggctcgggagcagaattttgaatcaacgttcctttgttgcttcgcttcactctcatgccacaagtttcgggtttcaagaagtaaaggaagaagagaaaagcaaattggttggtaatgtattcaccaatgtagcttcgagttatgatattatgaatgatgtgatgagtggtggtttgcataggctatggaaggaaagactcgttgggaagctaagtccatttgcagggatgaagcatcttgatgtggccggaggaacaggtgatgttgcttttaggatctatgatggctgttacagtggcaaacgaagagcattgcagaaagttgatgaggcttctcttgaggaaactcagatatacgtatgtgacattaatcctaacatgtaaacggtgggaaacaacgagctgctgagaagaggctaaaagataacaagtcactcgtatgggtcgaaggaaatgcaaggccttgagttcnatgaccattcaatggat

SEQ ID NO: 87940 - DNA, 643 bp, Arabidopsis thaliana columbia
  unsure (1)..(643): unsure at all n locations
tgcnnnnnnnnnnnnnnnnnnnnnnncactatagggaaagctggtacgcctgcaggtaccggtccggaattccgtttgttctcttgagtggaagaaagttgcagccactaaatcagatccgacaatgccgaagcaaatccatgagatcaaggacttccttttgacggcgagaaggaaggatgcaaggtctgtgaagatcaagagaagcaaggacattgtgaagttcaaggtcaggtgctcaaggtacctctacacactatgtgtcttcgaccaagagaaggccgataagttgaagcagtctcttcctccaggtttgagtgtgcaagacctttgaagatcttatgaaatcaggatctatcatggttttatatacccttgtcttagatgattttgttttttccctttctgctgtcttttgaatgactatgattcagacttccgttgagtttctttcttataacttcaagactaaattatgagttggatttgtatttttttttgctatcaacttggttagtaatatatatggccccaacagtttggagtttaaaaaaaaaaaaaaaaaagggcggccgctctagaggatccaagcttacgtacgcgtgcatgcgacgtcatagcnnnnnnnnnnnncagctcaatc

SEQ ID NO: 87941 - DNA, 521 bp, Arabidopsis thaliana columbia
  unsure (1)..(521): unsure at all n locations
nnnnnnnnnnnnnnnnnnnnnnnnnnnnnnnnnnnnnnnnnnnnnnnnnnnnnnnnnnnnnnnnnnnnnnccacgcgtccgaagaatctgagcacaaaagcattgctggcagagataagagagatctctgaaaagaagcgaggcgaagatgatgcacttcttgctcttgcggctggaaatagacgaactatttcttccaatatgagttttgattatccggatcctgatcttcacgaagatctgtatcagctgatcaagtattcatgtggagaaatgtgttcaacagaacagttagataaggtaatgaaggtatggacagaatttttggaaccaatatttggtgttccttctcgccctcaaggtgccgaagaccgagaagatgctgtcaagtctacaaaccatgaccgagaagaccaagaagatgctgtcagtcctcaaaatggagctagtattgccaactctatgcggtcaaatggccctcgaaaagtcaatgaaagtaatcaagtgcggcaagctagtga

SEQ ID NO: 87942 - DNA, 578 bp, Arabidopsis thaliana columbia
  unsure (1)..(578): unsure at all n locations
agaagacggacgtgtttgatctaccttaccggatggctagaggtcaaatagaagaaagtttgcgtactaagatggcttccataaaggaaagcatggtccagttacaagatgcacctaaaagagcatctgttacatctgaagcaacagagagagagcttgaactcgaagctcagcttgtcgaggcaagaagcataatccaagaacaggagtccataatgtcgaaacatctcccaaaatcagagcagcgaagggaatctgtagcttcgttggcagctgagggagtatgaaaatgtctaggagctcaaaatcagtggatccaagttgctaaaagagacttgtcgcaaaatgtagtcgtagtactgtattcactaccaccaaaactctccttggatatctaagtgatgtatattcaacttttagttgtgacaaatcagagatcttttatccttttggggnnnnnnnnnnnnnnnnnnnnnnnnnnnnnnnnnnnnnnnnnnnnnnnnnnnnnnnnnnnnnnnnnnnnnnnnnnnnnnnnnnnnnnnnnnnnnnnnnnnnnnnnnnnnnnnnnnnnnnnnnnn

SEQ ID NO: 87943 - DNA, 513 bp, Arabidopsis thaliana columbia
ccttcttcaacctctcctccgcacattgcgtcatcaccatctgatccttcaatcctcgtgctgtttttgatccatctgaagcgcttccttgttttgaatctgtttaactgtccaagtttctaatgatggcggagactgagcgatgagtggacgatgatcgagaattgatgacccgtgaaggtggcattgggactaactctccgtgcgtggcaaccacttctcctgttgagactattgacgctcctgtaatgggagctcattcgtggcctgcactcgccgacgctgcccatcaaccgcgtcctaagaatcctccggcgcctgcacctgctccgccgtctaaaaacattccgacgtctatcccaatccctactccgggcgtaactggtcaagcgaaatctaagggtggtggaaaggctaatcctggacacaagaatccatctggccgtcattcaaaaccaggtccgaggagcaaccagaatggtcctcctcctcctccttatctcgtgcatgctg

SEQ ID NO: 87944 - DNA, 566 bp, Arabidopsis thaliana columbia
  unsure (1)..(566): unsure at all n locations
ggcttcgcttccctctctcacatatccacacaacaaaggaaatggctctcaccgtgagcagcggtggcggaggagctagaatccgctgcaacgacctcaccgattcttctcgtaaccctttctccaccttccgactcgtaaacttccctaatccatcaagaaccggtcttcacgttgtctctgccgccaaaaaaccttccacacagaccggtcgtttcgacagcaagaagcgtcggactctcgttcctacaacgactaaggaacagcaggaagagggaaacgaaggttttgacggcgagaacccgccgtctcagatcgttatcaacgacgaagatggagatagaacggtggtgaatactcgattcagaggtgatccgaaagatgcgccgaaatttgccattaaaggatcttcctgggccttgaaccagatccttttgaaggtgagaagtggggtggtttagggttctttcgttcagaacttttggggttttgggatcccttttggggataatctctggtggnctttnggcggggaccgnntnacgaaggtcnncgggttnaaagga

SEQ ID NO: 87945 - DNA, 774 bp, Arabidopsis thaliana columbia
caaaagtctggagctccaccgcggtggcggccgctctagaactagtggatcccccgggctgcatttttctcggccgccaacgacctcaccgattcttctcgtaaccctttctccaccttccgactcgtaaacttccctaatccatcaagaaccggtcttcacgttgtctctgccgccaaaaaaccttccacacagaccggtcgtttcgacagcaagaagcgtcggactctcgttcctacaacgactaaggaacagcaggaagagggaaacgaaggttttgacggcgagaacccgccgtctcagatcgttatcaacgacgaagatggagatagaacggtggtgaatactcgattcagaggtgatccgaaagatgcgccgaaatttgccattaaggatcttcctggacttgaaccagatccttttgaaggtgagaagtgggatggtctaggtttcttcgttcagtacttgtgggctttcggaatccttttcgcgctaatctctggtggacttgcggcggggacgtataacgaaggtgcgacggatttcaaggagacgccagtatattaagaggcgattcaatctcgtgaccttcttgatgaagccgagagttcaaaactctgaagatgtgtttgaggtccaacccaacagaaagggggctccctaatttggaaataggttccagttcaagtggttttagaggaaaagaaattttaaaagaaccgggaaaccttttcttggctatttgggggggtgggtttttaaaaaaaaagcccc

SEQ ID NO: 87946 - DNA, 556 bp, Arabidopsis thaliana columbia
  unsure (1)..(556): unsure at all n locations
atgttgctcgctcatccaaggtttggttgacgtcgacgctgcgatttgtttatgcactgctttgagggctaacgtttttggtatcaaccttaacgttccgatatttttcagggtttttttcaacgtttgtaacagaaagcttccatttggtttccaatggggttgagcaatatccattatgcatacgatgcgatgccagtgcccaatacgcgtcttcgaaatttattatagtttgaataaatgcatgtaagggatagtttatggatcaatcttaatttgttaaagagaaaaaataaaggggtgagatttttatagtttttcattttgtttgtaaacgttgtccccccccttccaagctttgtatgcttcgggagcaatctatttctatttctatttcaacgaaattttaatgaaagaaatttcgtttgcaaaaaaaaaaaaaaaaaannnnnnnnnnnnnnnnnnnnnnnnnnnnnnnnnnnnnnnnnnnnnnnnnnnnnnnnnnnnnnnnnnnnnnnnnnnnnnnnnnnnnnnnnnnnnnnnnnnnnnnnnnnnn

SEQ ID NO: 87947 - DNA, 874 bp, Arabidopsis thaliana columbia
gaagacgacagaaggggattcaataacccttacaacaccgaatataactttgaaaaaaaaaacaaatggcttcaaagaactcagcctctcttgctcttttctttgcgctcaacatcctctttttcaccttaaccgttgcaacaaattgcaactgcaagccaagtcctaaaccaaagccagtcccaagtcctaagcccaagccggtccaatgtcctcctccaccccgtccttcagtcccaagtcctaatcctaggccggtcacacctccacgcacccctggttcatccggaaacagctgtcctattgatgctctcaagctcggtgtatgtgcaaatgtcttaagcagtctactcaacatccagttgggacagccatcctctcaacaatgttgctcgctcatccaaggtttggttgacgtcgacgctgcgatttgtctatgcactgctctgagggctaacgttcttggtatcaaccttaacgttccgatatctctcagcgttcttctcaacgtttgtaacagaaagcttccatctggtttccaatgtgcttgagcaatatccattatgcatacgatgcgatgccagtgcacaatatcgtcttcgaaatttattatagtttgaataaatgcatgtaaggtatagtttatgtatcaatcttaatttgttaaagagaaaaaataaatgtgtgagatttttatagtttttcattttgtttgtaaacgttgtcccccgccttccaagcttttgtatgcttccggtagcaatccatttccatttccatttcaacggaatttaaatggggcggccgctctagaggatcccagcttacgtacgggtgcatgcgacgtcaaagttttctataagtgtcaaaaaaa

SEQ ID NO: 87948 - DNA, 907 bp, Arabidopsis thaliana columbia
  unsure (1)..(907): unsure at all n locations
nnnnnnnnnnnnnnnnnnnnnnnnnnnnnnnnnnnnnnnnnnnnnnnnnnnnnnnnnnnnnnnnnnnnnnnnnccacgcgtccgcggacgcgtgggcaaagacactgaataaatccttaaaacaaacttttgaaagaaaaaaatggcttcaaagaactcagcctctattgctcttttcttcgcccttaacatcatattcttcaccttaaccgctgcaacagattgtggttgcaacccaagtcctaagcacaagcctgtcccaagtcctaaacccaagccggtcccaagtcccaaacccaagccggtcccaagtccttcagtaccaagtccttcggtcccaagtcctaaccctaggccggtcacgcctccgagaacccctggctcatctggaaactgtcctatcgatgctctcagactcggtgtatgtgcgaacgttttaagcagtctactcaacattcaattgggtcagccatcagctcaaccatgttgctcgctcatccaaggtttggttgacctcgacgctgccatttgtctttgcactgcgcttagggctaacgttcttggtatcaaccttaacgtcccgatatctctcagtgttcttctcaacgtttgtaacagaaaggttccgtctggcttccaatgtgcttgaaggatatcagctatgcatacgatgtgatgcccgtgcacaaatatcttcttcgaaattgttacagtatgaataaatgcatgtaagctatagagtttatgttttaaattttgaatttgttaaagtgaaataaccaatgtgtgagagtgagactttcttagtttttttttttccgtcaacgttcctgtattccggtcttgtatgcttttgtagcaatctattactattttcaacccgtttaattaaagagattttgtactc

SEQ ID NO: 87949 - DNA, 416 bp, Arabidopsis thaliana columbia
  unsure (1)..(416): unsure at all n locations
aaattttcgagtttatcgatttagtctcattgattttattgtttgtttatatatatgtattgataatgtgtgtgtatgtntncatgactataggtatgtcttcttgtctgctgcaaccattccatacattggtttgctattcatttgcttgtgcaacgatgttccagtcccgagttatcggctaggagctgagggacggtttgggatctacctagctacaatggttgtcatttattgcatatcctacagcatcgaggactttgatgtgatgatggaagtgtcatttctggtgattatgtctataataggagcggttacaaatcgttcaactttcattctcctgccgaggatttaaattccagccgaaccacattcatactatttctagggacgatgtctgctattctgggttgtgt

SEQ ID NO: 87950 - DNA, 2520 bp, Arabidopsis thaliana columbia
cccacgcgtccggacaagatgagataaatcattcatctcatttcttcaactggctttgcttctttctttcttcttcctcaattataattttttcacaggtttgagatcttatcatagagttttgttttaagtttgtgagatggaattagtgtctggaaaagtagttccaggttgctccaacgcaggcaatcctttccatgagtgtactgctatctgttttgagagagtaaactctccagatgtccacaagaaggagaagaaactctttgggtttggtaagagaactcccagcagggatcagactcctccagctagtccggctcgtggaagcagatcacctctggccagctatttcgccaagaagaaggttgagtcgtcagcagagagttcaccatcctcttatgatcacaccaatggcaacttcttaagtcgcctttccccgctacagggacgcaagatcgagccttcaagcaatgtcgattcgctgccagtttcgccttctctcgctctatactcagggggagactactttgcaaggagggctgatcagcgtggagatgaggatgatgatgtatcaccaaggccttttggaactcagcctaagacccctgaacaccctcttaggacgcctcagcataggccacgcacaccgcaacaccgctctgcacaccaagaggacgctttttcactagaaactaggccgaggactcctgaacgccgatccaatacctctgatactaggccaaggacacccatacatgagtctgcggcaacaggaagaaggcctcaaacaccagaaactagaccaaggactcctgatcaccgatatgccacctatgataataggccgaggacacccatacatgagtctgctgcaacagaaaggaggccccaaacaccagaaactaggccgaggactcctgaacaccgatctgccatccctgacactaggccgaggacacctatacatgagtctgctgcaacaggaaggaggcctcaaacaccagaaactaggccgaggactgcacaacgtagagggaggtcacctgagttcatggaaagatcccccggaccaaggtccaagaccccagagcctcaacctacttacttcgaaccatcctcaaggactccaaaacagcggtccaagacgcctgaacccagccctaggattccccaaactcagcccatgtcccacagatcccttgacaacgctgctcttaaaatgcctcggacagttgaaactaggcctaggacgccagaacaccagccgaggactgtggaaacaaagccaagaatacatgaaagtaggcccaaaactgcagtctatggaggaaggtcacctgatcacagggaaaaaatctcacaagaaatgggtcaaagatcatctcatgcctacaattatcttgggagcaaagctgagtcagtgtacattgagaagaacgaggaatcagttctactctttccagaactgattttgtcacctcaagaaaggccaccctctagacttattacgcttaatcaccgaggatatgaaacacctaacaaacagaaagaacattgtgatgaaatggatgattctgcaagcacagacgacgataaattttcatttgtggatgatcacgacgaacacactgtttcaatttacgctgaaaccacatcgaaatctggaagcagcgaacaagaggaacagcataaagcaaacaacgagccaccggagctgccagatgaatcacagagcttcagtctcgctgagatctctcgtatgaaaggaataattaccaataatgaaataagggacgtgatgcagtctattctatctgagtcttacgtttctgtgggacagtacaaggtcagagctagcgtctcgaccactctacaacacatactccagaagcacggtgacattgcgtctggttccaaactacaatcgcttgctacacgatcctactacctcgacatgcttgcctcggtggtattcgaactccaaacaactcccctgaagtatctcaaggagagccgcgtggtggaaatggtagcgattgttaaagacattgagtccgtgaaaatcaaagcaggttggctcaagcctgtcctggaggagatcgtagaggcggtaaaacactacgatgaacacaagatgagcgtagtggagaaagaggtgtgggagagagatgtgttacttgcgaaacaagaaactgagaaacaggtgaaagaactgggagagaaggagaagaagataaaggagtggagagctaaaatgacggagatggctgcgaagttaggggatcttgatatgaaaagagctcgtctccacaaaagcttcacatttctgagctccaaggtcgaccaagtttccaagggaaaccccttcttcaaggcatcttgtaaccaaccaattagtctggatattcttttgttcatcttgttacccgcaaaataagcgtttgtgaacggtttgctttgggaaagttttatgtattatcaaattttcgtttctaaaaaaactcaagtcttaatatc

SEQ ID NO: 87951 - DNA, 886 bp, Arabidopsis thaliana columbia
  unsure (1)..(886): unsure at all n locations
nnnnnnnnnnnnnnnnnnnnnnnnnnnnnnnnnnnnnnnnnnnnnnnnnnnnnnnnnnnnnnnnnnnnnccacgcgtccgatcaaagccaagtctcctgagcagtttaattacttataggaattgggagaagctggcctactatcctcggcggccaagcacattggacagttggacttgttgctatattgatttctttctgtggtataattgcctcagacacgtttgcttttcttggtggcaaggcatttggtagaactcctcttattagcattagtccaaagaagacatgggaaggagcttttgcaggacttgttggttgtatttccattaccattttactctccaaatcgttgtcctggcctcaatctcttgtcagcaccatagcttttgggagttcttaacttcttcggatcggtctttggtgacttaactgagtcaatgatcaaacgtgatgccgggtgtcaaagactccggctcactcatccctggacacggggggatattggaccgaagtgataagtactttttgactggcgcgataggctacccgctggggagactttgtgggggcggacggtgtcggtgcggggcacggcggggccggcgtagccgacaccgccgggccggttgagccgcgcgtcatctcggcgccccgccgctccgctcgcgggggcgagcgagagcggcggtcgggctgccgcgggcgcgcgctactctaccggctggccgacccccacggccccctgcgcgcgccgagggcgcacggagccgtcggtcgggcggccgctcggcggggggaccccgcggcgcggggccggcgtctggctgggactcgggggtcgtaggcggcgacatgggtcggccggccgcgaggggcggggcgc

SEQ ID NO: 87952 - DNA, 622 bp, Arabidopsis thaliana columbia
  unsure (1)..(622): unsure at all n locations
nnnnnnnnnnnnnnnnnnnnnnnnnnnnnnnnnnnnnnnnnnnnnnnnnnnnnnnnnnnnnnnnnnnnnncccgcgcgtgcgtctttgtggtggttttctgctgtcttcttctccgtcgaacttctccgaccacttcgtatagagagagagagtgacgaagagtttacggaatcgaatccaataatgagtactgcgtcggcttttagttcaatccaaggatgctggttcaagggcgaaaggaaaattcgtgtagcggataagcgagccaagaggcttactttgggatcccatgtggcttcgccatcttcaatgagcttcagagtttcagctagtagttctgttaaacctgaaaaggatattaggattggtcttcttggtgcaagtggctacactggtgctgagatcgttaggcttcttgcaaatcatccgcatttccaggtcactttgatgactgctgatagaaaagctggccagtcaatggaaagcggtttccccacctgagagctaaaaaatacctactttggtttcggaaaaggtgcagattttttaacggggatgctggatctggctgttacctaacggacaccttaggaatcttaaggactgctactgcttaaaatc

SEQ ID NO: 87953 - DNA, 534 bp, Arabidopsis thaliana columbia
  unsure (1)..(534): unsure at all n locations
attagaacgaaaccctaattggtcgacgaaatgaaagggattgcgaggcttgtaacttctctatcgcgaatcggaggtcgcaaggtcgtttctggaacaagtactgtgacttcttcttcgtcttcctctcttctgctatctcgtcgctcgcttttcatctctgccaccaatttacttaattcccggaccaaggattctgctcttccctcgttgaattcttctttacttgctcagaaatggaatttcctcggagggcagagaaggacaatgtttatccaaacccaatcaactccaaatccttcttctctcatgttttatcctggcaaaccagtcatggaaagttggaagtgctgattttcctaatgttcgttctgctctgggttcgccattaggccaaatcttattactccatttnatgggcgtaggtnggagttttcttttgggtcagnattttgtcactgaanctaagtcanntgatggtntnannggggtattnccaaggcntaagtatttccagcanncatggtttntnat

SEQ ID NO: 87954 - DNA, 2431 bp, Arabidopsis thaliana columbia
gatctacaaccctgttaccgcccaatttcgcagtcactggttcattcctttctcttcttcctcttccactctctctctagacccaagttttgaaaccatgaaagaccacgatttcgacggcgacaaagggcttgccaagggatttctagagaatttcgccgacgccaatggcaggtctaagtacatggagattctccaagaggtttcaaatcgtaagattcgagctattcaagtcgatcttgatgacttattcaattataaggatgaaagtgaggagtttcttggacggttgacggaaaacactcgccgatatgtttcgatattctccgctgctgttgacgagttgttacccgaaccaacggaagcgtttccagatgatgatcatgatattctcatgactcagagagcagatgatgggactgataatccagatgtttctgatcctcatcagcagattccttctgagattaaaagatattatgaggtttattttaaagctccttcaaagggaaggccatctaccatcagggaggttaaggcttcacacattgggcaacttgttaggatatctggtattgtgacccgttgttccgatgtcaagccattgatggcggttgctgtttacacatgcgaagattgtggtcatgagatttaccaggaagttacatctagagtcttcatgcctttgtttaagtgtccctctagtcgctgtcgtcttaatagtaaagccgggaatcctattcttcagctcagagcatcaaagtttctaaagtttcaggaggccaagatgcaagagttggctgagcacgttcccaaagggcatattccgaggtctatgactgttcatctaagaggagagttgacaagaaaggtatcaccaggtgatgttgttgaattctcagggatttttcttcccattccttacactgggtttaaggcacttcgagctggcttagtagcagacacctatctggaagcaacgtctgttactcatttcaagaagaaatatgaggaatatgagtttcagaaagatgaggaagaacagattgcacgtttggctgaggatggtgatatatacaataagctgtcgcgatccctggcccctgagatttatggacatgaagatattaagaaagctttgcttctccttcttgtgggtgctcctcacaggcaattaaaggatggaatgaagattagaggagatgtgcatatctgtctgatgggtgatcctggagttgccaaaagtcagcttctcaagcacattataaatgttgctccaaggggagtctacacaacaggcaaaggtagcagtggagttggtctaactgccgctgttatgagagatcaagtaacaaatgagatggttttagaaggaggagcactggtgctggctgacatgggaatctgtgcaattgatgagtttgataagatggatgaatcagatcgtactgctattcatgaagtcatggagcagcaaactgtaagcattgcaaaagctgggattaccacgtctttgaatgctcgaacagctgttcttgccgcagccaatccagcctggggaagatatgatttgcgaagaactccagctgaaaacattaatcttccaccagcccttctttcaagattcgatctgctgtggttgatcttagatcgagctgacatggacagtgaccttgaattggcaaagcatgtgcttcacgtacatcagacagaagaatctcctgcgcttggtttcgagccgctggaacccaatattctccgtgcatacatttcagctgcaaggagattatcaccatacgtcccagcagagttggaggaatatatagcaactgcttattccagcatcaggcaagaagaagcgaaatcaaacactcctcattcttacacaacagtgaggacactgctcagcattctgcgcatatccgctgcattagcaaggttgagattttcagaatcagtggcacagagtgatgtggatgaggcgcttagactaatgcagatgtcgaaaatatcattgtatgctgatgaccgacaaaaggcaggactagatgcaatatcagacacatactcaatcataagagacgaagctgcaagatcaaaaaagacccatgtgagctacgcaaatgccctgaactggatctccagaaagggatacagtgaggctcagctaaaggagtgtttggaggaatatgcagctttgaatgtttggcagattgaacctcacacctttgacatccgttttatctgagtaacaccacccaaaaaaaaaaaaatggaaacaaaccaagtctctcttgttatgttgtgtgctttttctctattatcttatcacatttcttaacgtagagaccttagaagtggaatctgtagaagtgatctcttgattgcagaacaaactttacttttggaaatttagatgtgactttgtact

SEQ ID NO: 87955 - DNA, 471 bp, Arabidopsis thaliana columbia
  unsure (1)..(471): unsure at all n locations
ccnnnnnnnnnnnnnnnnnnnnnnnnnnnnnnnnnnnnnnnnnnnnnnnnnnnnnnnnnnnnnnnnnnnnnnnccacgcgtccggatcatgtgaatccatcgactggtaaagaaagaaagattgctgctttttagatttagattcgagaatgtatggaagatctggtcttgacaggtttaagaagtcccaaacttcggaacccttctctgtatcagcaaatcctcctccggtggtacaacaacatctgtctccggaggcattgtcggggcaaaaaactcagattggagctggtcaatcaaactggcatccccctgattgggcgattgagcctcgtgccggtgtctactctctggaagttgtgaaagacggccagatccttgatcggattcatctagatagacgaaggcatatcttcgggagacaacatcagacttgtgattttgtccttgatcatcagtccgtttcccgcc

SEQ ID NO: 87956 - DNA, 635 bp, Arabidopsis thaliana columbia
  unsure (1)..(635): unsure at all n locations
nnnnnnnnnnnnnnnnnnnnnnnnnnnnnnnnnnnnnnnnnnnnnnnnnnnnnnnnnnnnnnnnnnnnccacgcgtccgctccaatctggcaaataaatctcactctctcaatcaaaaacacacatcaaaatcaaaaccttctcttcttcttcttcttgcgagttgcaccgaaacactcaacaaaaccaaatcatccaaattgggtaaaacaaaagaaactaacaagaagaagatcgaattcaagaagaagagatggagaatggagcaacgacgacgagcacaattaccatcaaagggattctgagtttgctaatggaaagcatcacaacagaggaagatgaaggaggaaagagagtaatatctctgggaatgggagacccaacactctactcgtgttttcgtacaacacaagtctctcttcaagctgtttctgattctcttctctccaacaagttccatggttactctcctaccgtcggtcttccccaagctcgaagggcaatagcagagtatctatcgcgtgatcttccatacaaactttcacaggatgatgtgtttatcacatcgggttgcacgcaagcgatcgatgtagcattgtcgatgttagctcgtcccagggctaatatacttcttc

SEQ ID NO: 87957 - DNA, 552 bp, Arabidopsis thaliana columbia
  unsure (1)..(552): unsure at all n locations
gccgtttctagggctcttttggtgtccctctacctctcgcgcttgaatcctgtaatcgctaacacagttcgtcaaatttcaggttttttgggctcgtaggctttttctgtatctctcagcatttttcaatttcataaaacatggcggagatacagtcaaatggaagggcatatgagtcattattggaaaaggttctttcaatgaacattctttcttctgactattttaaagagctctatggtttaaagacttatcatgaggtaattgatgaaatctacaaccaagttaattcatgtggagccgtggatgggtggggattgccgtggtccttcaacagcgtattgtcttctctacaaattctttaccatgaaacttacagtgaagcagatgcatggactgttaaaagcacacaggattctcccttataataggagcggggttggnttcccnananttaaaganatgtttcagnttcaaaanncggttgtgggcaatgggnttgacccncccntttnaagngtnatnagggggntttccccgggncaaattggc

SEQ ID NO: 87958 - DNA, 1111 bp, Arabidopsis thaliana columbia
cttctttatctcaaactctttcttcttccaaatcataaaccatggcaacatgcatagacacatgccgaaccggtaatacccaagacgatgattcccggttctgttgcatcaagaatttctttcgacccggtttctctgtaaaccggaagattcaccacacccaaatcgaagatgacgatgatgtctggatcaagatgcttgaagaagccaaatccgatgttaaacaagaacccattttatcaaactactactacgcttcgatcacatctcatcgatctttagagtctgctttaggtcacatcctctccgtaaagctcagcaatttaaacctaccaagcaacacactcttcgaactgttcataagcgttttagaagaaagccctgagatcatcgaatccacgaagcaagatcttatagcagtcaaagaaagagacccagcttgtataagctacgttcattgcttcttgggcttcaaaggcttcctcgcttgtcaagctcatcgaatagctcataccctctggaaacagaacagaaaaatcgtagctttattgatccaaaacagagtatcagaatctttcgccgtcgatattcatcccggagcgaagatcggaaaagggattcttttagaccatgcgacgggcgtggttatcggagagacggcggtggttggagacaatgtttcgattctacacggagtgaccttgggaggaacagggaaacagagtggtgatcggcatccgaagattggtgatggtgtgttgattggagctgggagttgtatattggggaatataacaatcggtgagggagctaagattggatcagggtcggtggtggttaaggatgtgccggcgcgtacgacggcggttggaaatccggcgaggttgattggtgggaaagagaatccgagaaaacatgataagattccttgtctgactatggaccagacatcgtatttaaccgagtggtctgattatgtgatttaacacaaatgtgtatttctttctttcttgtaactgatgatgatgaaacaagtcttgtctatttcttaatattttactatgtactaatcaaacaagtcttgaaatcaagctcatcgatctttaagaag

SEQ ID NO: 87959 - DNA, 729 bp, Arabidopsis thaliana columbia
  unsure (1)..(729): unsure at all n locations
attctttattcctgggttgtagctggtttaatggttctgtagacatttgataatgaagtctctcacttcattttgtttgggtgatgtaaaatgttgtcagtggattttaggtgaggcttaatctcatggattattcttttgaaatcccctcaggtgaatcagtgaaaattgagaaagtgatgttcaacttcttatctcttaatccttcatttgctctgtcacacattgaagcctattttcggttgcagtttgttaagttttcatgggaagcgttgtctttggagtgttctgaagttgactttaatcctgaaagaagaaggatatgcttttactgaagttatcatgggaagcactttttgtggagtttacaggagtgtctatgccgttgcagtattcgaggatcgctttgatctgccagtcgttccttgttacctttttcgcttttgcagttctttcttacttgccttgcttttctctcgttcatgtattacttgatgcaagtcttgaaactttcccgatattggaccaaactctttttcattcatgccttttaggactactaagtatgaactcctctgatgtagaaggttcgatatgtgctaatcagtctactggtaatcctagttaaaaaaaaaaaaaaaaaaaaaaaaccccaagnnnnnnnnnnnnnnnnnnnnnnnnnnnnnnnnnnnnnnnnnnnnnnnnnnnnnnnnnnnnnnnngtgcacct

SEQ ID NO: 87960 - DNA, 594 bp, Arabidopsis thaliana columbia
cccacgcgtccgcccacgcgtccgcccacgcgtccgcccacgcgtccgagaagagcaagcagcggcgcagaagttgaacacaagtgaagctcacaatggcgaggattaaggttcacgaattgagggagaagtcgaagagcgatcttcaaaaccagctgaaggaactcaaagctgagctcgctctcctccgtgtcgctaaagtcaccggaggtgctccaaacaagctctctaaaatcaaggtcgtgcgtaaatccatagctcaggttttgacagtgtcttctcagaagcagaagtctgctctaagagaagcatacaagaacaagaagttgcttcctcttgatctccgtcccaagaagacccgtgctattcgtagacgcctcaccaaacaccaggcctcgttgaagacagagcgtgagaagaagaaggagatgtatttcccaataaggaagtacgctatcaaagtttaagttttagctgctagaaacactggttcaactttttggtttgatggaaactctgtcttggtcttcaactgtgggtaaggtcgtaaacagtttcaaatactttggatttttggcttttccgtgtgcacac

SEQ ID NO: 87961 - DNA, 651 bp, Arabidopsis thaliana columbia
  unsure (1)..(651): unsure at all n locations
nnnnnnnnnnnnnnnnnnnnnnnnnnnnnnnnnnnnnnnnnnnnnnnnnnnnnnnnnnnnnnnnnnnnnnnnnnnnnnnnnnnnnnnnnnnnnnnnnnnnnnnnnnnataattataaacccttagtttgatgatgtatgataaaaatgagtttcacaaattacagggattcatcactatacaaaattaacaaatgcaactctatttcaatacacaactttcttattactcaacagaacagttccttaagaatcaaacactatatgaatctcatatgtaagaaaccttcttacaaaagccaaaaccttaatataagaaagcaatgataaagatttagctatacgttgtatgtatgtgtgtgcttaaatattcaagatcaaagaagaagaagacattactctgatcttacattagttcttacgaactctgtccctggctaggtttctgatgccgttcgctttggctttgccgcttactcgcatacgttatagctctatacatatccgaacatgaatacgnaacctcggacattgcctnnaaaagctcggggaggcgagntcgaanactagccagtgacttctctctaanttgatggctttgtctatggtaagcttcttcttcttcttccaacctcttcttaatttgttctaca

SEQ ID NO: 87962 - DNA, 728 bp, Arabidopsis thaliana columbia
  unsure (1)..(728): unsure at all n locations
caaaattcttcctttcatcgtttgaattctttatacgtataataacatcccttgtgatcaaacaagtaaaccattcaaaagatgaaaggaagaattttgattttgagtttgctcataatgagtctggtcatggcacaagttcaagtagaagcaaagatctgctgcccttccaaccaagctagaaatggctatagtgtatgccgtataaggttttccaagggaaggtgtatgcaagtgagtggatgccaaaactctgatacatgccctcgaggttgggtaaacgccattctcgaaaactcagctgatgctaccaatgagcactgcaagttagggtgtgaaacttctgtgtgtggtgccatgaacactctccagaactctgatgcaagtgaaattgtgaatggagcgtcggaacaatgtgccaagggatgttctattttctgtaccaagagctatgtagtcccacctgggccgcctaaactgttgtaatggtcgtatatgtgaaaaaacaaatgctagactcttgctattctggtttgtgtgtgtgtgtgtgcatgtgtcgtagaaggtttgttcgatcactagattgtacatgccctctacttcctataacctaattaaagagttaaacgtacgtgtctttaaaaaaaaaaaaaaaaaaggcagnccgctctagaggatcccangcntacgtacgcgtgcatgcgacgtcatagctctgctatagtgta

SEQ ID NO: 87963 - DNA, 462 bp, Arabidopsis thaliana columbia
ggcaaaaaacaaagaaaccaaagtctctttagtttcttcaaccaccacaacactcttcgtttagacaacaaaaaatgataatgagaagaagtctaagtctgagaagcatcacgatgatgatattaatggctgttttggtctggtcagtgactctagagacctgcattgccagaagaggaagacattggagacatagccaccgaagctcttctgacttgtctgattccttgtcaaacaagaaaccgaagagccatgggaacagtcaccaccacagttctcacaacaacaaccatcaccacaagtctaaacctaaaccgaaaccaaagctgaaaacgccgccaaaagctcacgacaataactctccggtggtttcagggccaccaaaagtccaaccaccgcctcttccgccttaaaagggatctcaagttttcaatgtgatggattttggagccaagggtgatg

SEQ ID NO: 87964 - DNA, 418 bp, Arabidopsis thaliana columbia
gtcttatcttttcctctccttactctccatcaatggcttctcttatctctttttctttgctcccaaaaccaaaagccgtaagaagttcaatttcagctcctcagacacagacaataaatactgaaaagcttgaagataaattcggacgaaaaggcataaaattctcggaatcaaacaacattcctatggtagagcttaaggtcagaaatggaagttcattaaaactgagtctatcagatgctcatgtactttcatataagccaaaggtatactggaaagacgagggattcgaggaagtcctttacacagttgatggtgatgagagcagaggtggggttggtgttgttatcgtaaacggggaagaacctaaaggtgggtcttcagtaatttcacgatgttattggagtgtcaaggatac

SEQ ID NO: 87965 - DNA, 372 bp, Arabidopsis thaliana columbia
tcgttaatatccaagctgatgatgtgacaaaggcggcagcccaaataagaaggaaaagcgagccttctccaagccccttgcgaaaggaaataacatctgcgcaggccgcccataatactttaaaagaagctaaagacttgaaacatacagctgaccgtctcaagaattctgtatcaaaccttgagcacattgagctctacttccaagcttgccttaagtttcttcacggtgcttttcttttggagatgagtagcaaccagagtgctagacaaggagaaacaatggtccaatctatgaagatttatagtagcactgcgaatctttgcggattttgtgcccatgagtatgaagaagtctaaagatatgggagct

SEQ ID NO: 87966 - DNA, 555 bp, Arabidopsis thaliana columbia
  unsure (1)..(555): unsure at all n locations
ccccgggctgcccactgggtccgggtgttttnnccttttggagaggaaaccaagccaatgtaatacganattcccctacacaggtnacttcaagaaccttcttggatgtncgaaagagaaagatggttacttgaagnggtttnctggaaatgtagcttcgggaagtgctgctggagcaacaacttccttgtttctgtaccatttggattatgcgcggacccgtttaggcactgatgcaaaggaatgtcctgttaatggcaagagacagtttaaagggatgatcgatgtgtatcgtaaaactttgtcaagtgacggtattaaaggtctttaccgtggatttggtgtgtcaatagtgggaatcactctttaccgaggaatgtattttgggatgtacgacaccatcaaacccattgtgttagtcggttccttagagggaaacttcttggctagttttctattgggttggagtattactacctctgcaggcgtcattgcttacccttttgacacacttangaggagaatgatgcttacatcaggacaacctgttaaata

SEQ ID NO: 87967 - DNA, 426 bp, Arabidopsis thaliana columbia
ataacataaaaaggtttggctctacggcctttgagaggcgatttttttaggtctagccaccaccaaacttttcttctcaaatttctgacgttacctttctgattatctggtgcccttggccggagtcagagagggtgtgtctgtttgtcttttatttgcttttcctttgttttgggtcttctctggctcctcctatggcggattaaagacgagattctagatggttgtgcttcgattggaaggttggttccgttctagtgatggtgtcgcttggttctccgtgggtggttggtgtttttgtcggagcccgtgtggttcttcactgttacggcagttgtttttggagatggaggtttggtttcttcatcttatacatacctgatctagtggaagctatgtagtctcgattctgtcttaagctaatat

SEQ ID NO: 87968 - DNA, 457 bp, Arabidopsis thaliana columbia
cctggcgggaccgggcccgaatttccgggtcgtcccaagccgtcggtgggttggctataatcttcaactctccttcactaaaccctgtcacaactcaagcgaccttcctttcttcgaatcggattcgttcctctcctcgcgttttcagtggatttcacagcctccgacgtcgcggcttccggcgattctctcaaaatgttatccccgaccggtttaatagcttctcatgtaattgcttatccgccgtatccaccagcactatcgattacgagttcacggatggtggcaaagaggtggaattaagattgaggttaaagacaggtgagatactttctccaaaggatatatctgttgacgcagatggaacatcgttagccgttaaagaaaagcggaatggattgctgattacacttctagagactaaccatctctttgagaagattatgccctctgaaac

SEQ ID NO: 87969 - DNA, 418 bp, Arabidopsis thaliana columbia
  unsure (1)..(418): unsure at all n locations
caagatgaatataacggtttcttgaacaaaacgatcgtagacgatttcaaggattacgcggatctatgcttcgagttatttggtgatagggtaaagaactggatcaccatcaaccagctatacacagtgcctactagaggatatgcattgggaacagatgcacccggtcgatgttctcctaagattgacgttagatgtcccggcggaaattcgtcaacagaaccctatattgttgcacataacccagcttcttgctcatcccggcgccccgttgatgttttccgaggacggaattttaagggtgacccaaaaaggtatnntttggnccnattgntgntaacctaggatnggtttcttnccnttttnatccaaaggnaaggggggcaaaggttcaactnnggcggggttaaaaattttt

SEQ ID NO: 87970 - DNA, 531 bp, Arabidopsis thaliana columbia
  unsure (1)..(531): unsure at all n locations
cctattnagggaccgggaccggaattacccggggnggcccacgggntccaattacaaataaaccatgaaggcttcttatgctcgcctttgtttttctcattagctttggcgacttgtaaaggtgacgagtttgtttgtgaagagaacgagccattcacatgtaaccaaactaaacttttcaacagtggcgaaatttcgaaaaaggcttcatcttcggtgttgcatcttctgcttaccaggtggaaggcggtagaggccgtggacttaacgtttnggatagcttcactnaccgattcccagaggaaaggtggagcctgattttngggaaatgggnggcacttacttgtgactcatataactcttttngcagaaaggttttagacggtggattgncggngctcaaacttttncttggctncaagaattctncccatttgcngtgggtccaaananntcctttcccaaaagggaaagaaggggccaaggggngttnaccccngggggctntttaaggtcttcaaacgggntcca

SEQ ID NO: 87971 - DNA, 1038 bp, Arabidopsis thaliana columbia
  unsure (1)..(1038): unsure at all n locations
tatacgactcatatagggaaagccggtacgcctgcaggtaccggtccggaattcccgtgtcgacccacgcgtccgcccacgcgtccgcttctgcttaccagatcgaaggcggcagaggtcgtggacttaacgtttgggatggcttcactcaccgatacccagagaaaggtggagccgatttgggcaatggagacactacttgtgactcataccggacttggcagaaagatctagacgtgatggaagagcttggagttaaaggctacagattctcctttgcgtggtcaagaatccttccaaaaggaaagaggagtaggggaatcaacgaagatggtattaactactacagcggtctcatagatggcctgatcgcaaggaacataacgcctttcgttacactctttcactgggaccttcctcaatcattgcaagatgaatatgaaggtttcttggacagaacgatcatagacgatttcaaagattacgcggatctatgtttcgagagatttggtgatagagtaaagcactggntcaccatcaaccagcttttcacagtgcctacgagaggctatgtattgggaacagatgcacccggtcgatgttcccaatgggtggataaaagatgttacggtggagattcttccaccgaaccctatatcgttgcgcataaccagcttcttgctcatgccacggtcgttgatctatacaggacgagatataagtaccaaggagggaagattggacctgtgatgataactagatggtttctaccatatgatgacactctagagagcaaacaagcaactttngagggccaaagaatttttctttgggatggttcattggagccgcttaccaaagggtaantnccttttncatcatnggggaacctttttgggnaatcgggttcccaangttnaacaggnnagaggttgccttttaaaagggtccaangatttntttttggcnnaacatttngggnattaanaggccnggccctttccccagncnncggaaaatttttccttgggggttttt

SEQ ID NO: 87972 - DNA, 578 bp, Arabidopsis thaliana columbia
  unsure (1)..(578): unsure at all n locations
ggnnnnnnnnnnnnnnnnnnnnnnnnnnnnnnnnnnnnnnnnnnnnnnnnnnnnnnnnnnnnnnnnnnnnnnnccacgcgtccgtgcacccggtcgatgttcccaatgggtggataaaagatgttacggtggagattcttccaccgaaccctatatcgttgcgcataaccagcttcttgctcatgccacggtcgttgatctatacaggacgagatataagtaccaaggagggaagattggacctgtgatgataactagatggtttctaccatatgatgacactctagagagcaaacaagcaacttggagggccaaagaattcttcttgggatggttcatggagccgctaacaaagggtaaatacccatacatcatgaggaaacttgttggtaatcggcttccaaagttcaacagcacagaagctcgccttttaaagggttcatatgattttcttggtctcaactattacgtcactcaatacgcccacgcccttgacccaagtcctccggaaaaactcactgccatgacggactcactcgcaaaccttacatctcttgatgcaaatggtcaaccccctg

SEQ ID NO: 87973 - DNA, 1084 bp, Arabidopsis thaliana columbia
  unsure (1)..(1084): unsure at all n locations
aataccgactcattatagggaaagctggtacgcctgcaggtaccggtccggaattcccgggtcgacccacgcgtccgcccacgcgtccgccccacgcgtccgaaaccatgaagcttcttatgctcgcctttgtttttctattagctttggcgacctgtaaaggtgaccagtttgtttgtgaagagaacgagccattcacatgtaaccaaactaaacttttcaacagtggcaatttcgaaaaaggcttcatcttcggtgttgcatcttctgcttaccaggtggaaggcggtagaggccgtggacttaacgtttgggatagcttcactcaccgattcccagagaaaggtggagctgatttgggaaatggagacactacttgtgactcatatactctnntgcagaaagatatagacgtgatggacgagctcaactctactggctacagattctccattgcgtggtcaagactccttccaaaaggaaagaggagcaggggagtgaacccaggagctattaagtactacaacggtctcatagatggcctcgatcgcaaggaacatgacgccctttcgttaccctctttcactgggaccttcctcaatcatcgacaagatgaatatgaaggtttcttggacagaacgatcatagacgatttcaaagattacgcggatctatgtttcgagagatttggtgatagagtaaagcactggatcaccatcaaccagcttttcacagtgcctacgagaggctatgnattgggaacagatgcacccggtcgatgttcccaatgggtggataaaagatgttacggtggagattcttccaccgaaccctatatcgttgcgcataaccagctttctttgctcatgccacggtcgttgatcttatacaggacgggatataagtaccaaggaggggnagatttgaccntttgattgatacnngnatggtttctnccatatggttgncaacntttgggggncaaacaaagnaactttgngggccaanaattttttttggggtgggtcaatgggcccctnacnaaagggtaantccccttcaanattgggancttttgnaatgc

SEQ ID NO: 87974 - DNA, 698 bp, Arabidopsis thaliana columbia
  unsure (1)..(698): unsure at all n locations
ctccgcccaaacgtcagagactcttccttcggcgatcgctgctcagaagtttgatttcgatatcaagaatcgtgatagaaaaaatgcgacacaattgttgccatgtctcgttcgcttcgattctcaagatccttaattttctccaagctttcatcggtatatcaatcataatctactcgatttggatgctcgatcaatacaatcatcacgttcccgttgaccctcctccgtctcagcctccggcagcttcatcaccggattcttcttattccttctctaattcaataattgagatcaacagtgtttctgattctttgaagaatccgatcgatttcgtatcgggtatcgttctcgggtctggtggtggagattcgggtttcaatctccgttctttagatcttcctgctccatggtttatctactgtttcatggcgattgggattttggtctgcattgtcactatcattggtttcattgcagctgaagctatcaatggatgttgcttgtgtttctattcaattctcaaaactccttttaatcattatcgaagcagctctagtgggattcaaagtggttgaccgtcactgggagaagggccttccttatngtccaactggggacctcaataggcttcgagttatcgaggaaaaacgaattnaaagggcgnatttttggagnccngncncatnacggntggt

SEQ ID NO: 87975 - DNA, 933 bp, Arabidopsis thaliana columbia
  unsure (1)..(933): unsure at all n locations
tacgacacacttagggaaagctggcacgcctgcaggtaccggtccggaattcccgggtcgacccacgcgtccgcccacgcgtccgacagaagctcgccttttaaagggttcatatgattttcttggtctcaactattacgtcactcaatacgcccacgcccttgacccaagtcctccggaaaaactcactgccatgacggactcactcgcaaaccttacatctcttgatgcaaatggtcaaccccctggtccaccgttctctaaaggcagttattaccacccaagagggatgttaaacgtaatggagcacttcaaaaccaaatacggtgaccctttaatctatgtcaccgagaacggattcagtacctccggtggccccatacccttcaccgaagcatttcacgattacaaccggattgattatctctgcagtcatctatgttttctccgcaaggccatcaaggagaagcgtgtcaacgtgaaaggatactttgtttggtctcttggggataattacgaattctgcaacggctacaccgtcagattcggacttagttacgttgatttcaataatgtcactgctgatagagacctcaaagcttctggcttatggtaccagtcgttcttgagagataccaccaagaaccaagatatcctccgctcaagtctgccctttaagaacggggataggaagagcctcacatgaaagaccaaaaccactttatgcccatcgagatcatcttcatgtctcttctttctacttgctccatagataaaaggagcttctacctactgtattaaataaaagatgatcaaacttaataaatattttgtatactaaaaaaaaaaaagggcggccgctctagaggatccaagcttacgtacgcgtgcatgcgacgtcatagctaatctataggtnnnnnnnnnnnnnnn

SEQ ID NO: 87976 - DNA, 1251 bp, Arabidopsis thaliana columbia
  unsure (1)..(1251): unsure at all n locations
nnatgatttncgactcactatatggaaagctggcacgcctgcaggtaccggtccggaattcccgggtcgacccacgcgtccgcccacgcgtccgcatacatctacatattaaccatgaagcttcttgggttcgccttagctattctattagttgtggcgacttgcaaacctgaagaagagattacttgcgaagagaacgttccattcacatgtagccaaacagatcgtttcaacaaacaagatttcgaaagcgacttcatcttcggtgttgcatcttctgcttaccagatcgaaggcggcagaggtcgtggacttaacgtttgggatggcttcactcaccgatacccagagaaaggtggagccgatttgggcaatggagacactacttgtgactcataccgtgatctgcagaaagatctagacgtgatggaacgagcttgagtctaaaggcctacagattctcctttgccgtggtcaagaatccctcgcgtccgggaaagaggagtaggggaatcaacgaagatggtattaactactacagcggactcatagatggcctgatcgcaaggaacataacgcctttcgttacactctttcactgagaccttcctcaatcatcgcaagatgaatatgaaggtttcttggacagaacgatcatagacgatctcaaagatctacgcggatctatgtttcgagagatctggtgatagagtaaagcactggatcaccatcaaccagcttttcacagtgcctacgagaggctatgcattgagaacagatgcacccggtcgatgttcccaatgggtggataaaagatgttacggtggagattcttccaccgaaccctatatcgttgcgcataaccagcttcttgctcatgccacggccgttgatctatacaggacgagatataagtaccaaggagggaagattgcacctgtgacgataactagatggtttctaccatatgatgacactctagagagcatacaagcaacttggagggccaaagaattcttcttgggatggttcatggagccgctaacaaagggtatatacccatacatcatgaggaaacttgttggctatcggcttcaaagttaacagcacatatgctcgcctttaaagggttcatagattgtcttggtctcactattacgtgactaatacgccacgcncngacccagtnctcggataactactgcatgaggactactcgcaacattactctgttgtgcaatggtcatcccc

SEQ ID NO: 87977 - DNA, 832 bp, Arabidopsis thaliana columbia
  unsure (1)..(832): unsure at all n locations
tacgactcactttagggaaagctgctacgcctgcaggtaccggtccggaattcccgggtcgacccacgcgtccgcgtgtgtttctattcaattctcaaaactcttttaatcattatcgaagcagctctagtgggattcatagtgattgaccgtcactgggagaaggatcttccttatgatccaactggagaactcaatagtcttcgagctttcatcgaagaaaacatcgatatttgcaaatgggtcggaattgttgtggtagcaatgacagtaactggatggctactggctttggttttgagagctatggtttcacctcggcaatcagagcttgatgatgaagatgattttgagaatccgatgagtagagcacgagacaatcttcttggtccacaggcaaaccagacatcttctggatcaagcaatattgacaactggaggtcccgaatcagagagaagtacggattgatcaacagtcagagccacactccatcagcttaactcaaaagactgagttcttgtgtctggaattatcagtactttggtttggttcttctctctgttaactttcgagtgtgcatagatatttacacatttatgttatcgtttgatacttttttcgaaactctgtttagatcgcaacatagctttcattttggtgtacaaaagagttacgagatttgtgtttgaaatgggaacacctgcttattgctctgcttccnnnnnnnnnnnnnnnnnnnnnnnnnnnnnnnnnnnnnnnnnnnnnnnnnnnnnnnnnnnnnnnnnnnnnnnnnnnnnnnnnnnnnnnnnnnnnnnnnnnnnnnnnnnnnnn

SEQ ID NO: 87978 - DNA, 1965 bp, Arabidopsis thaliana columbia
  unsure (1)..(1965): unsure at all n locations
cgcggnnnnnnnnnnnnnnnnnnnnnnnnnnnnnnnnnnnnnnnnnnnnnnnnnnnnnnnnncgggtccgcaacacaaaaacatacacactactaattaaccatgaagcttcttgggttcgccttagctattctattagttgtggcgacttgcaaacctgaagaagagattacttgcgaagagaacgttccattcacatgtagccaaacagatcgtttcaacaaacaagatttcgaaagcgacttcatcttcggtgttgcatcttctgcttaccagatcgaaggcggcagaggtcgtggacttaacgtttgggatggcttcactcaccgatacccagagaaaggtggagccgatttgggcaatggagacactacttgtgactcataccggacttggcagaaagatctagacgtgatggaagagctcgagtctaaaggctacagattctcctttgcgtggtcaagactccttccaaaaggaaagaggagcaggggagtgaacccaggagctattaagtactacaacggtctcatagatggcctcgtcgcaaagaatatgacgccctttgttaccctctttcattgggaccttcctcaaacactacaagatgaatataacggtttcttgaacaaaacgatcgtagacgatttcaaggattacgcggatctatgtttcgagagatttggtgatagagtaaagcactggatcaccatcaaccagcttttcacagtgcctacgagaggctatgcattgggaacagatgcacccggtcgatgttcccaatgggtggataaaagatgttacggtggagattcttccaccgaaccctatatcgttgcgcataaccagcttcttgctcatgccacggtcgttgatctatacaggacgaaatataaggatgaccaaaaaggtatgattggaccagtgatgataactagatggtttcttccatttgatcatagtcaagagagcaaagatgcaactgagcgggctaaaatatttttccatggatggttcatggggcctctaacagaaggtaaatacccagacatcatgagggaatatgttggtgatcggcttccagagttcagtgaaacagaagccgcacttgtaaagggttcatatgattttcttggtctcaactattacgtcactcaatacgcccaaaataatcagacgattgttccttcggacgtacacactgccttgatggactcacgcacaactctcacatctaaaaatgcaactggtcatgctcctggtccaccgttcaatgcagccagttactactacccaaaaggcatttactacgtaatggattacttcaaaaccacttacggtgaccctttaatatatgtcactgagaatggatttagtaccccaggtgatgaggactttgagaaggctactgccgattacaagcggattgattatctctgtagtcatctctgtttcctcagtaaagtcatcaaggagaagaatgtcaacgtgaaaggatattttgcttggtctcttggggataattacgaattctgtaacggatttaccgtcagattcggactaagttacgttgatttcgcaaatatcactggtgatagagacctcaaagcatctggcaaatggttccagaagttcataaacgttaccgacgaagactctacgaaccaagatctactccgctcaagcgtctcctccaagaaccgtgatcggaagagtcttgcagatgcatgaaatatccaatccactatatgtccaccaagatcatcttcatgtttcctctttctacttgctccatagataaggagctttttctaccatatgtattaaaataaaatcctaataaaagatgatcaataataataaagactttgtttaaaaaaaaaaaaaaaagggcggccgctctagaggatccaagcttacgtacgcgtgcaggcgacgtcatagactcttctatagtgctcctaa

SEQ ID NO: 87979 - DNA, 724 bp, Arabidopsis thaliana columbia
  unsure (1)..(724): unsure at all n locations
atacgactcactttagggaaagctcgtacgcctgcaggtaccggtccggaattcccgggtcgacccacgggtacgggggatttcatcaacaattggacaagaatactgaaactgcagatgcatggttgcggtttggatggtccgataccttccagtatttctagcttaacaagcttgaccgacctgagaattagcgacttaggaggcaaaccgtcttccttccccccactgaagaatttggaatctatcaagacgctgatactgagaaaatgcaaaataattggcccaattccaaaatatattggggacttgaagaagctcaaaacacttgacctcagttttaatctcctaagtggtgagattccttcatcgtttgaaaatatgaagaaagccgatttcatttatttgacaggaaacaaattgacaggaggggttccaaactactttgtcgaaagaaataaaaatgtagatgtttcttttaataacttcaccgatgaaagttcaattcctagccatgactgtaaccgagttacttcaaatttggtggaaagcttcgccttggggaacaaatcacacaagggttcaacctgttttcttcaacgatgccttgtgttcatcctaaggggtatcatttatataaattggtacataaattgccgggnggagggtgaaggtaaaagtgggtnaagggattaccatatcaggctgntgacgggccccaagg

SEQ ID NO: 87980 - DNA, 428 bp, Arabidopsis thaliana columbia
attccctttggttctcaaggcatgcaccagagccgcgtgtcgcaagcttgggattgatcttcacccccttgtggtcaaatgtgggtttaatcacgatgtggccgctatgacgagcctgctctctatctactctggatccgggcgtttgaatgatgcccacaaactgttcgacgaaattcctgacagaagcgttgttacttggacggctttgtttagtgggtatactacttcaggaagacacagggaagccattgatttgtttaagaagatggtggagatgggtgtgaaacccgatagctactttattgttcaggttttatctgcttgtgttcatgtaggggatctcgacagtggggagtggatagttaagtacatggaagagatggagatgcagaagaattcctttgtgcggacaacacttgtcaatc

SEQ ID NO: 87981 - DNA, 460 bp, Arabidopsis thaliana columbia
  unsure (1)..(460): unsure at all n locations
cggctctaatcgactcacttagggagagctggtgcgcctgcaggtaccggtccggaattcccgggtcgaccccgggtgcgggtaatccaatccagacaagaaaccggcgttgttttgtctgatcacataacacatttcagtttatagatctgcagaatttgttttttgtatttttgttctgttttcttttgattttcttcttcatcctgtaaaacctagaattttgtttcttcaaccaaaaatgaacagagaagtctctgagagaattcatattttgttcttcccctccatggctcaaggccacatgattccaattttggacatggccaagcttttctcgaggagaggagccaagtcaacccttctcacaaccccaatcaacgctaagatcttcgagaaacctattgaagcattcaaaaatcaaaaccctgatctcganatcggaatcaagatcttcaat

SEQ ID NO: 87982 - DNA, 1681 bp, Arabidopsis thaliana columbia
  unsure (1)..(1681): unsure at all n locations
nnnnnnnnnnnnnnnnnnnnnnnnnnnnnnnnnnnnnnnnnnnnnnnnnnnnnnnnnnnnnnnnnnnnnnnnnnnnnnnnnnnccacgcgtccgcacaagttggtgtcaacgctcagacaagaaaggcgtgtgttcattgttgaatcttcccatttcctcatccaaattccgacataactatcctagccgccatttgttctccacattacaaaaccctcagcagcttcaaaactcttccgatctctccctcacgctcgcaattctctcgtctccattttaatagtttttcttctcggaatcacaaatcttcggcttcttgttccttggcgtgtgtgtgtgttgttgaatggctcttgttcagcggattccaatttcctcctccagtattcggaattggcaacaagcgaggaccaatttgactcctatttgttgtttacattacaatactgcatcttcttcttcttcaccctttacagagaagcactctgtggagagataccaaagggatcaatggctgtacaaagcggttgaaccaacgccaccatcgactccatctccatcgccatttgaagatgaagtctttgttagggaaaacgacattgcatcgcagctgcctgagctgaagaagcttttggcagtgctgaaagagaagagagttaaaggatgcaaaggtggtgattgtggaccaggagatgtgtatcttgttgggacagggccaggagatcctgagcttttgactcttaaagctgtcagagttattcaaagtgccgatcttttgctttacgacaggcttgtctccaatgatgtcttggagttggttgctcctgatgctagacttctttatgtcggcaaaactgctggttatcatagcagaactcaggaagagattcatgaactactcctaaattttgctgaagctggtgccactgttgtcaggcttaaaggtggagatcctctggtctttggacggggcggcgaagaaatggactttctgcaacagcaagggattcgagttcaagttataccagggataactgcggcgtcggggatagcagcagagttggggattccactaacacatcgaggtgttgcaactagtgtaaggtttctcactggtcattcaaggaaaggagggacagaccctctgtttgttgcagagaatgcagctgacccggatacaacacttgtcgtttatatgggtttgggaactttaccttctcttgcacaaaaactaatggaccatggtctcccttctgatacaccagctgttgcggttgaacgtggaaccactcctctacagcgtacagtttttgctgagcttaaagattttgcaactgagattcagtcagctggattggtgtcaccaacactcatcatcatagggaaagtcgttgagctctcacctttatggccacattgcacgaaagaatcctcctgccttgtagagacccggtagatatttcactcttattttacgggcgtgtggcttccatcgacattacggtgaagttttaggagctatggagctatgaaggttgagacttgagagatgtaataaacaaaaaggaaagctgatagtttcttatgacgtgtccttcaattgttttgggacaatggtaatggcaatgttaatgtaataaacaagtttcaatcagtgccactgtgactaatttttccacc

SEQ ID NO: 87983 - DNA, 528 bp, Arabidopsis thaliana columbia
atacaactcaaatagggaagagctggcacgcctgcaggtaccggtccggaattcccgggtcgacccacgcgtccgcccacgcgtccggacgaaaccgagagaaacaatgggagacgctgcgatccgtaccgtcgtcgaagccattcactcatctccgacgcaggccgtcgtctatctttgcggcggtgcctctctggctttaggttggttgatgtcggttcctggagcgtcgaacacgcttctcgagtccgtggttccttattcgagagtatctatggttcaattactcggcagggttccgagccaacactgtagccaagcattggccaaggagatggccttgttagcctacaatcgggcgcttaagctctctaaaccaggatatccggttctcggtgtcgggtttacgggatcattggtaacttctcgtcctaagcgtggagatcacaggttctttttgtctatgagagcatccgaccggattttgaatcttcaggcactctaactaagacttacggagccgagaag

SEQ ID NO: 87984 - DNA, 1054 bp, Arabidopsis thaliana columbia
agaaggggacataaaacaaaaggtatagtatataccataaatctccgagattcttttgatgtatctgtccatttcattattacacaaactaggaaactgatatctctctattcacattcctctgattctatttctctttatatatattcacccattaaccatctcaatcttataaccctcaaaatcacaatcttctcttacaaaaaactttgaaagatgaagattcttctagcatcattgtgtttgatcagtcttctcgtaatcttgccttctgtcttctctgcttcttcttcctctgaagattttgatttcttctacttcgtccaacaatggccaggatcatactgtgacacacagaagaagtgttgttatccaaattcaggcaaaccagctgctgattttggcattcatggtctttggcctaactacaaagatggaacttatccatctaactgtgatgcctctaaaccattcgatagctcaacgatatcagatcttctcacttcaatgaagaagagctggccaacactggcttgcccaagcggttcaggtgaagcgttttgggagcacgaatgggagaagcatggtacttgctctgaatcggttatcgatcaacatgaatatttccaaaccgctcttaaccttaaacagaaaaccaatctccttggagctctaaccaaagccgggattaatccggatggaaaatcttactctttggagagcataagagattcgataaaagagtcaattggtttcactccttgggttgagtgtaacagagatggttctggtaatagccaattgtaccaagtctatctttgtgttgaccggtctggttccggtttaatcgaatgtccggttttcccacatgggaaatgtggagctgagatcgaattcccttctttttagtttccaatttctaaattcagtctcttgaaccggcatcgatcttttgttcatggagattggtttggtcaaaaagaagatttaatgtaataaaaatttatgggatattggataatgatatagttcaatttcaataaaaaaaaaaaaa

SEQ ID NO: 87985 - DNA, 703 bp, Arabidopsis thaliana columbia
ccgaatttcttgggaaaaacaccctcacaagcaaagaaaatggagagcgattcagagatggttccgtttcctcaactaccgatgccaatagaaaacaactacagagcttgcacaattccttacagatttccttctgatgatcccaagaaagccactccaaatgaaatctcgtggatcaacgtcttcgccaattccattccttctttcaagaaacgtgcagagagcgatatcactgttccagatgctcctgctagagctgaaaaatttgcagaaagatatgctgggattcttgaagacttgaagaaagatccagagagtcatggcggaccaccagatggcattcttctatgccgacttcgtgagcaagtactcagagagttaggatttacgggacatattcaagaaagttaaggatgaggagactgcaaaggctatatcactatttcctcaaagtgtcagtctgagtgatgctattgaagaagacggaaaacgggtagagaatttggtgagagggatatttgctggaaacatcattgatcttgggtctgcacaccttgcttgaagtttttttcaagggatgggtatggtctttcttgggctaagctcgcaaaaaactttggtttccaccggacccattggggttcaatttggaattgcaacctctggggataaaaaacctattccccaaaagcccccatctaat

SEQ ID NO: 87986 - DNA, 530 bp, Arabidopsis thaliana columbia
  unsure (1)..(530): unsure at all n locations
gccccnacgcctgcaggnaccggncctttatncccggggggcccgcgcgtccgtacggctgcgagaagacaacagaagggtacggctgcgagaagacgacagaagggtacggctgcgagatgacgacagaagggtacggctgcgagaagacgacagaaggggacggctgcgagccctcctctgaagggggttcttcgtcgttatcaattcggagatgattccgtttcctctgttaccaacgccgattgaaaccaactacagagcttgcaccattccttatagattcccttccgataatcccaagaaagccactcctactgaaatctcctggatcaacgtcttcgccaattccattccttctttcaagaaacgtgcagagagcgataccagtgttccagatgctcctgctagagctaaaatttttgaacaaagatatgcggggattcttggaggcgggaaaaaagaccccagaagaatggggggccacccaatggggtattcccggccgaggtggggggctttactcaaaa

SEQ ID NO: 87987 - DNA, 515 bp, Arabidopsis thaliana columbia
  unsure (1)..(515): unsure at all n locations
nnnnnnnnnnnnnnnnnnnnnnnnnnnnnnnnnnnnnnnnnnnnnnnnnnnnnnnnnnnnnnnnnnnnnnnnnnnnnnnnnnnccacgcgtgcgcccacgcgtacgaaagaaacggcaaaaatttatgctgaaatctttttttcttccttattctcctctttcgcttgatttcgccgtccgattatctctatcgccgataaatatccggcgtcactcagtagatcttgaagctgttgctttcttgctttgctcttcgcgcaagattctctttctctgttttcattgaggattcgaagttgatcgctatttgattcgattggttttgagttttcgatcctcgacggatggagattttgaagtgaatcggaggagcgaataagagaaagtgagagatggatgatagagaaggctcgttcgtagctgttaggcggatttctcagggtctcgaacgaggaagcgtttacaattcatcatctgctgaggctgtgcctggatcagcaacttggttaggcct

SEQ ID NO: 87988 - DNA, 545 bp, Arabidopsis thaliana columbia
  unsure (1)..(545): unsure at all n locations
cagctccnnnnnnnnnnnnnnnnnnnnngttgcgcccccgccaggcaccggcccgaatttccgggttcaacccacccgtccgcggacccctgggccgacccctggggggactgttagagacctcaggcggcggcgtgggaggttccgccgaggaggaaaaagatttgaggatggaggaacccggtgaaggacccgccaccggaggaaaccgggggccaagaccagagactttatctctgtggagaatccgtccagagatggataaaccttttcgggactctcctctcaaagctcccttatgggaagaaatttccaggaaaatgatggaccttggttacaagagaagttcaaagaaatgcaaggagaagttcgagaccgtgtacaagtaccacaaacgtaccaaagaaggtcgtaccgggaaatccgaaggcaaaacttaccggtttttcgaagagttagaacctttcgagactctcagttcctatcaacctgaacctgagtcccaacccgccaaatcttctgcagtgatcacgaacgcccccgca

SEQ ID NO: 87989 - DNA, 2166 bp, Arabidopsis thaliana columbia
aaaagttccccttttaagtcctactcctctttttgttatatagaaagaaaaactatatatatacaaaataaagttatacgaagaaaattgtattatatttataagatctagataaaatggtccatcccacccaattaaatacccctaagataaaatcacaatagacgaaaaaaatttaaaaagaaaagaaaaaggaaattcaaccacaaccttcgtcttctcttgaaactctcctcatctctctcaagaaagattcaagttcgagtcttagctatgtctggaaactcagaaggactgttagagagctcaggcggcggcgtgggaggttccgtcgaggaggaaaaagatatgaagatggaggaaaccggtgaaggagccggcagcggaggaaaccggtggccaagaccagagactttagctctattgagaatacgttcagagatggataaagcttttcgtgactctactctcaaagctcccttatgggaagaaatttccaggaaaatgatggagcttggttacaagagaagttcaaagaaatgcaaggagaagttcgagaacgtgtacaagtaccacaaacgtaccaaagaaggtcgtaccgggaaatccgaaggcaaaacttaccggtttttcgaagagttagaagctttcgagactctcagttcctatcaacctgaacctgagtcgcaacccgcgaaatcttctgcagtgatcacgaacgcgcccgcaacctcttccttgataccatggattagctctagcaatccatcaaccgaaaaaagttcttcaccgttgaaacatcatcatcaggttagtgtacaacccatcaccacaaaccctaccttcctcgccaagcaaccatcttccacgacgccttttcctttttatagcagcaacaatactactactgttagccagccgccaatttcaaatgacttgatgaacaatgtttcatcgctgaatcttttctcgagctcaacttcttcatctactgcatctgacgaggaagaagatcatcatcaggttaagagctcgagaaagaagaggaagtattggaaagggttgtttacgaagttgacaaaagagttaatggagaaacaagagaagatgcaaaaaaggttcttggaaacactggagtatcgtgagaaagagagaatctcaagagaagaagcttggagggtccaagagatagggagaatcaacagagaacacgaaacattaatccatgagaggtccaatgctgcagctaaagacgctgcaatcatatccttcttacacaaaatctcaggaggacaaccacaacacccgcaacaacataatcataaaccatcacaaaggaaacaatatcaaagcgatcattcaataacgtttgagagtaaagagccgagggcggttctattggatacaacaataaagatggggaattacgataacaatcattcggtgtctcctagttcttcaagatggcctaaaaccgaggtcgaggccttgataaggataagaaagaatcttgaagctaactatcaagaaaacggtactaagggaccattatgggaagagatctctgcagggatgagaagattgggatacaatagaagcgcgaaacgctgcaaagagaagtgggaaaacatcaacaagtactttaagaaagtcaaagaaagcaacaagaaacgtccccttgattccaagacttgcccttattttcaccagctcgaagctttgtacaacgagaggaacaaaagtggggcaatgccattgccattgcctctaatggtgactccacagagacagttgcttctctcgcaagaaacccagaccgagtttgagactgatcagagggaaaaagttggtgataaagaagatgaagaagaaggagagagtgaagaagatgaatacgatgaagaagaagagggagaaggagacaatgagacaagtgagttcgagattgtgttgaacaaaacatcttcacctatggacattaacaataatcttttcacctaagtggttttataatcattttattatatacactttcctgtaaaatggggttgaaggaaaaaaaaaaaagcatatacaacaaatgtaagtaaatggcttgattttttagttattagtattccatttcgtgatatatttaataaaataattgattaaaaagaaaaaaaa

SEQ ID NO: 87990 - DNA, 631 bp, Arabidopsis thaliana columbia
ttcttcatcatccggtgatccggatgatttcttcaaccatataaccaccgagaagaaaccttcttcaaactcaccttcccctttcattcaaacatgcgttggggtgtatcaaatgcaaagtggggatcgagcctcaaactcgggaatacaatgaaccacaatgtggaatgattggatgaagggcgtgcgaaacttagaccttctttagtttccttaagccttccccaagatcgcctggaaaagagagcaatgatgattttttctgatgatgatgacgaaaacaacaatgagattggtgtagagctcgatctcgaatcagtaatgtctgacacttttgtctctgtcgggaaataccgagtcagatcgggttcatccactatactaagtgctgtcatcgaaaagcacggagacattgctcaaaactgtaagctggaatcggattcaatgcgatcacgttacctcgagtgtttatgctcactgatgcaggaacttaggtcaaccccggtagggcagttgagcaaagtcaaggtcaaagagatgcttgcggttctcaaagacttggagtctgtgaacattgaagtaccttggctacgttctgttcttgaagagtttgcgcagtctcaagaagatg

SEQ ID NO: 87991 - DNA, 873 bp, Arabidopsis thaliana columbia
  unsure (1)..(873): unsure at all n locations
accnnnnnnnnnnnnnnnnnnnnnnnnnnnnnnnnnnnnnnnnnnnnnnnnnnnnnnnnnnnnnnnnnnnnnnnnnnnnnnnccacgcgtccgcccacgcgtccgacttgattgtacttaaagatgtaatcaacaaagtttataaaaattcttggttacacaagcctatacttgtcgctcctggagggttctatgaacaacaatggtacaccaaacttcttgaaatttccggtcctagtgttgtcgacgttgtgactcatcatatatacaatcttggttcaggaaatgatcccgcgctggtgaagaagataatggatccgagttatttaagccaggtatcaaaaacattcaaggacgtgaaccagacgattcaagaacatggaccgtgggcttctccttgggttggagaatctggtggagcttacaatagtggtggccgtcatgtttctgacacattcatagatagcttctgggatctagatcagcttggaatgtcagcgagacacaacactaaagtttactgcagacagactttgggttggagggttttacggcttgctcgaaaagggaacgtttgttccaaatcctgattactatagcgcgcttgtttggatcgtttataggaaaagggggttcttgcggggcagaaagaagggaccgcacagctaccggtttacgcacacttggtcaaaggaaaagccggcggaaatttctaccgagtaatcaacgcacaatcgggatttacggttatggccacgatgcaacacggcgcgtggcggggggacgggggcgaaaatgggcgctcgagcgtctcgagaccacactgcgtcgaacagagcgaggcgcggagacctgtccgccaacagcgtagcg

SEQ ID NO: 87992 - DNA, 623 bp, Arabidopsis thaliana columbia
ctactacgactttctatagggaacgctggtacgcctgcaggtaccggtccggatttcccgggtcgacccacgcgtccgctgcgttttcgtggagcatcttcttcaacaatggctgcttctccgatctgatcatatcctgatttgaattttgctatctctcatgcctcgaactcgttttgtcgacgtagcatcctagtgactgaggaagaagaagaagatgagcttctttatcctctccgtcgtcgttttcgtttctctcgctttcttctctcttccgcattccgttgattcatctgtttccgcttcacaggatcctctcagactcatattaggttcaccgaattttggaacatggaaaggtggaatctcattagcaccaggacctgaatctgatgatggtgtctctgattacctcctcttagcagctcatagaaccaagagacctgacattcttagagcttttaagccttaccctgggggctggaacatcacccaatatcactattgggcttctggtggattaacaggtgctccctggttcatactagctggtatctggctcttggcttttggctctcttcttggtggttatcattgcttcaaatggagaatatgtgataaag

SEQ ID NO: 87993 - DNA, 578 bp, Arabidopsis thaliana columbia
  unsure (1)..(578): unsure at all n locations
aatngggttacgttnccctnncggctaccngccnttnncggcggccttanaacccnacggnttcggccnaacgttcccatgggcattcctcaaatggtaaagactgaggtagtgaaaagcaatggacaggcattggttgaggcgtatgagtccccagcacatagcagcgttgctcataggtactatttacccagtggccaagtttcactttgagctctcaccgatgcaggttctcataacggaaaactccaagtccttctcacatttcatcaccaacgtatgcgccattattggtggtgtcttcacggtggccggaatcttggattctattctccatcactccatgacactcatgaaaaagatagaacttggtaaaaacttctgaagctccctaagggttttatttcgttttcctctgtaacgagtcagaaatttttgccctagttataccagacgtcacttaaataattcggttatatatattcacaaactgttatccttttgaacatatataagtattacaaaaaggggcgnccgctctagaggatccaagcttacgtacgcgtgcatgcgacgtc

SEQ ID NO: 87994 - DNA, 574 bp, Arabidopsis thaliana columbia
  unsure (1)..(574): unsure at all n locations
gaagaaagaaagatctctcggtgggggtcattcaacattgtaagatcttcgacttggcaaaattgtttcactttcgctctaaaaacttcatcttcactttctctcctcctccatggcggacggtggggctgaacctccagctccaccatcatcgataaacgccggtgaatttctcttgtctattttgcacggaagtccttcgccgtcgtcacaaggtcctcagcatcatcagtcattcgctctcgatccagccatcgcagccattggtcctaccgtcaataatccttttcctccgtcgaattggcaatctaacggtcatcgacccagtaatcataacccnccttcttggccactcgccttttcacctcctcataatctttcccccaatttcttaggggttcctcaatttccggctagcnntttcacgaggaccaattcgacggtaatcaaagagtatctccagaagatgctatagattaggggtcctggaacaanaatccgngatcagtcaagggnaggaaagagnagagagtacgcgngaataganatggagttgtttnggttttcnggnaag

SEQ ID NO: 87995 - DNA, 755 bp, Arabidopsis thaliana columbia
cccacgcgtccggtttcgcctctcaaaacattttcaattcccgccaattttcttctccgagaatacccccaaccttctagaaaccctaatttggtttaatttcattctccactactttctctgaaaccaaactcgagatctctcccccaatcatgcctgcgatacaatccccatcggggaagatcttgcagcttgagatggagaatttcaaatcttacaagggtcatcaattggttggtcctttcaaggatttcactgctattattggtcccaacggttctggcaaatctaacctaatggacgctattagcttcgtcctcggcgttcgtaccggtcaacttcgtggttctcagcttaaggatcttatctacgcttttgatgatcgtgacaaggaacagagaggtcgtaaagcttttgttcgactcgtttatcagatggacgatggagtagagcttcgtttcactcgttctattactagcgctggtgggagtgagtaccgtattgataatagggttgtgaatttggatgagtacaatgggaagctacgatctcttgggatacttgttaaggctcgtaatttcttggtctttcagggtgatgttgaatctattgcttcgaagaatccaaaagaacttactggactcctcgaggagatttctggttccgaggagcttaagaaagagtatgaaggactagaagaaaagaaggccagcgctgaagaaaaagcagctcttatataccagaagaagaaaaca

SEQ ID NO: 87996 - DNA, 539 bp, Arabidopsis thaliana columbia
tacgactcactatttggaaagctggcacgcctgcaggtaccggtccggaattcccgggtcgacccacgcgtccgcggacgcgtgggcggacgcgtgggtgagccgatggctatgggaaaagataagaagaaggtgtgggagaagctgttgaacgcgagagttgtgtacctcggtgaggcggagcaagtgcctaccaaagacgacaaagagcttgaactcgaaatcgttagaaacctgaggaagagatgcgttgagagcgagcgtcaaatctctgtagcactggaagcattccctctcgatttgcaggatcagcttaatcaatacatggataagaggatggacggagagacattgaagtcttatgtgacacattggcctgctcaacggtggcaagaatatgagcctcttttaagttattgccgcgataactctggtagactaattgcttgtggcactcctctcaagggtttaagaactggtcaagcagaaggtatccgtggtctttcaaaatctgagcgtaaatatacacttcccctgtt

SEQ ID NO: 87997 - DNA, 1681 bp, Arabidopsis thaliana columbia
gctctctctctctctttagctctttttttttttttgttttcattaaagtttttattttattttctaccaaccaaaagcttttctctttggtttctcttatttagcttctaaccttgaggagaatataccagaggattgaagtttgaaccttcaaagatcaaaatcaagaaaccaaaaaaaaacaaaaaaaatgtgggatctaaacgacgcaccacaccaaacacaaagagaagaagaatctgaagagttttgttattcttcaccaagtaaacgggttggatctttctctaattcaagctcttcagctgttgttatcgaagatggatccgatgacgatgaacttaaccgggtcagacccaataacccacttgtcacccatcagttcttccctgagatggattctaacggcggtggtgttgcttctggctttcctcgggctcactggtttggtgttaagttttgtcagtcggatctagccaccggatcgtccgcgggtaaagctaccaacgttgccgctgccgtagtggagccggcacagccgttgaaaaagagtcggcgtggaccaagatcaagaagttctcagtatagaggtgttacgttttaccggcgtaccggaagatgggaatctcatatttgggactgtgggaaacaagtttacttaggtggatttgacactgctcatgcagcagctcgagcatatgatagagctgctattaaattccgtggagtagaagcggatatcaatttcaacatcgacgattatgatgatgacttgaaacagatgactaatttaaccaaggaagagttcgtacacgtacttcgccgacaaagcacaggcttccctcgaggaagttcgaagtatagaggtgtcactttgcataagtgtggtcgttgggaagctcgtatgggtcaattcttaggcaaaaagtatgtttatttgggtttgttcgacaccgaggtcgaagctgctagagcttacgataaagctgcaatcaaatgtaacggcaaagacgccgtgaccaactttgatccgagtatttacgatgaggaactcaatgccgagtcatcagggaatcctactactccacaagatcacaacctcgatctgagcttgggaaattcggctaattcgaagcataaaagtcaagatatgcggctcaggatgaaccaacaacaacaagattctctccactctaatgaagttcttggattaggtcaaaccggaatgcttaaccatactcccaattcaaaccaccaatttccgggcagcagcaacattggtagcggaggcggattctcactgtttccggcggctgagaaccaccggtttgatggtcgggcctcgacgaaccaagtgttgacaaatgctgcagcatcatcaggattctctcctcatcatcacaatcagatttttaattctacttctactcctcatcaaaattggctgcagacaaatggcttccaacctcctctcatgagaccttcttgaatcttttatatttttaaggtttattattatataagaaaaacaaaaatgaacctttgaaatccccacatgttcttggtcatttcattaatcatcggcttatattttgcttattttcccctaaatcctcttgttaacttaggcgaacaaaaaaaattaatggaaatctttttccctccatcggttacaaaaata

SEQ ID NO: 87998 - DNA, 562 bp, Arabidopsis thaliana columbia
  unsure (1)..(562): unsure at all n locations
atttactggagaagagatggtgggatcagaggttttggaggaatgtggagaaaaaaataagcaagaaagagtcaaagaagcgagccgctaaactggagaagttgctccgtaaacaggaacgagaagaagccacatcatcatctctttctctggaggaggaggatgaatcgtgttccagcaactacggtgacgtgactactaacgagttgcagtcggctgttgagggaaaagagctcactgatgtgagcaacttggttgaagagattgtggggtcagaggtttcgatcagaggtcgactgcacaagaatcgcttagtcggtaccaaattgtttgtgatcttgagggaaagtggattcacggttcaatgcgtggtggaggagaccagagttggtgcaaacatgattaaatttgtcaagcagctgagtcgtgaatctgttgttgagcttatcggtgtcgtctctcaccctaagaagcctctcacaggnaccacccagcaggttgaaatacatgtnagaaaaatgtactgcctcagcagatccttgccaaatttaccacttgttgt

SEQ ID NO: 87999 - DNA, 529 bp, Arabidopsis thaliana columbia
  unsure (1)..(529): unsure at all n locations
nnnnnnnnnnnnnnnnnnnnnnnnnnnnnnnnnnnnnnnnnnnnnnnnnnnnnnnnnnnnnnnnnnnnnnnnnnnnnnnnnnnccacgcgtccggccgtctctttttctccacccgcgagaagataatgagagtttcgccggcggcaacactctcagtctctttgactactccactacctataactttaaccaaagctcgtttctccggcgaaccattgcgactcaaacaatatgttttgagtaatcagatttgctcccgaccaaaacatctcctctcagagtttaaacccaccagaagatggaccttctcctgcaaatgccgtaacagaggaagaaatggttacgcgaaattcgatgacgaaggagaagatttcattgttgttaacttctatcggtttgtatcaatcggagatcctgaggctgagattgagaagcacctctcattcttaaaggatttgaatatacgaggtcgaatatatctcaaatgaacaagaatcaacgcgcagtacagtggaccatctaaagatg

SEQ ID NO: 88000 - DNA, 477 bp, Arabidopsis thaliana columbia
ctttatcacttcagtctctgtttttagctctgtgatttgagtttttattttgcggtggcgttgtatggctatggcctttcctctttcttatactccgacgattactgttaaaccagtaacgtactctcggagatcgaactttgtagttttctcgtcgagttctaatggacgagatcctttagaggagaattcagtacctaatggtgtgaaaagcttggagaagcttcaagaagagaagcgtcgtgctgagttatctgctaggattgcttctggagctttcactgtacggaaatctagttttccatctacagtgaagaatggtttatctaagattggaataccaagcaatgttcttgatttcatgtttgattggactggttctgaccaagactaccccaaggttcctgaggctaaaggctcgattcaggcggtccggaacgaagctttcttcatccctttgtatgagcttttccttac

SEQ ID NO: 88001 - DNA, 535 bp, Arabidopsis thaliana columbia
  unsure (1)..(535): unsure at all n locations
cnnnnnnnnnnnnnnnnnnnnnnnnnnnnnnnnnnnnnnnnnnnnnnnnnnnnnnnnagctcacaccacgcgtccgcacaattctccgaacatgcgtttgctttctttattctctaataaacctagtaaactcttcttcttcgttactactatataatatagcggagagttttggaaccagagagaggttttacgtttttcttattttatttctctccatggggattctttgggattcgtttctcttgttacttgtgtcaacgtttgctctgttcttagttaggatcctgttattcaaaactggattgatttacatggtcaagttatggcgtaggaagatcatcgactggtttcatgtttaccaattctacaaagtcccagaattcaacgacaacgttcaagagaatcatctctaccaaaaagtctacatgtatctaaattccttaagctcgatcgagaattctgatttcacgaacctcttcaccgggaaaagtccaacgaaatcatcctncggttagatcggaaccagtcgttg

SEQ ID NO: 88002 - DNA, 1841 bp, Arabidopsis thaliana columbia
ctgagagtttcaaagtgtgcttctgttgcagcagaagctttaaggagaaaacgaggcagccaccagtgagcatcaagagactcttcgaagcttactcaagaaacggcaagatgtctttcgatgagcttctaagatttgtgagtgaagtccaaggagaacggcacgcagggttggactacgtgcaagatatcttccacagcgttaaacaccacaacgtttttcatcaccatggacttgttcatctcaacgccttctatcgctacctcttcagcgataccaactctcctcttcccatgtctggccaggtgcatcatgacatgaaggcgccgttatcgcattactttgtgtacacgggacataactcttacttgactgggaaccaagtgaacagcagaagcagcgtagaaccgatcgtgcaggctctcagaaaaggcgtaaaagtgatcgagctcgacttatggcctaatccttcagggaacgctgctgaagttcgtcatggcaggacgcttacttcgcatgaagatttgcagaaatgtctaaccgccattaaggataacgcgtttcatgtgtctgactatccagtcatcatcactctcgaagatcatttgccacccaagcttcaagcgcaagttgctaagatgttaactaaaacatacagagggatgctgtttcgtcgtgtctcagagagttttaagcattttccatcaccagaagaacttaaggggaagatcctgatctctacgaagcctccaaaggagtatcttgagagcaaaactgtacacaccacaagaactccaacggttaaagagacttcgtggaacagagtagcgaacaagattcttgaagaatataaagatatggagagtgaagctgtaggatatagagacttgatagcaatccacgctgcaaactgcaaagatccttcaaaggattgcttgagtgatgatccagagaagcctatacgggtcagcatggacgagcagtggctagacactatggttaggaccagaggaacggatcttgtcaggtttacacagaggaatctggtgaggatatatccaaagggcacaagagtggactcgtcaaactacgatcctcatgttgggtggacacacggtgctcaaatggttgcttttaacatgcaaggacatgggaagcaactatggataatgcaaggaatgttcagggggaatggtggatgtgggtacgttaaaaagcctcgcatcttgctagacgagcacacactcttcgacccttgcaaaaggtttcccattaagaccactcttaaggttaagatttacactggcgaaggatgggatttggatttccatcatacacactttgatcaatactctcctccagatttcttcgtcaagattggaatagcaggagtaccgagagacacggtctcatacagaacggaaacagctgtcgatcagtggtttcctatatggggcaacgacgagttcctgtttcagctgtctgttccagaactggcgcttctgtggttcaaagtccaagactacgacaatgacacccagaatgatttcgcaggacagacatgtcttcctcggccggaactgaagtccggagttagaccgtccggcttcacgatcgaacagcaaggcctacaagaacacgaggcttctcgtcacgttcgccttggatcctccttatacgtttcgttgaatctcgttttctttccgaaataagccacacagtgtgtatctctgtttgcacgtttataaatttataatgtacaattatttgcgccctagctagaacgggataaagtgtgacaacatataaatactattaaagattcgatatttgatgactgt

SEQ ID NO: 88003 - DNA, 694 bp, Arabidopsis thaliana columbia
  unsure (1)..(694): unsure at all n locations
agggaccnggcctgnantncctgggcngcccactgtgccggatttttagacaaagttactctctttctttctcatgttcttttcggacagaacaaaactccctaatccaaatgtcaattcctttggtctctctctgaataatcatctctcttcaaaccctattcaattttaactatcgatcttcggctaagtctccaatggcggcggcgtttgcctctcttcccacatttagtgtcgtcaattcctccagatttcccagaagaagaatcggtttttcttgctccaaaaagcccctcgaagttcgttgttcttccggcaatactcgttacactaagcagagaggggcatttacatcactgaaagaatgtgcgatttcattagctttatcggttggtttaatggtttcagtaccttcgattgctttgcctcccaatgctcacgcagtggcgaatccagtgattccagatgtttcagtgttgatctccggtcctccgattaaagatccggaagctttactaagatatgcattgcctattgacaacaaagccatcagggaagtgcagaagcctcttgaggatatcactgatagcctcaagattgctggcgttaaggctctagattctgttgaacggaatgtgaggcaggcaagttgaacatttgcagcagggaaaagtataattgtggcaggttttgc

SEQ ID NO: 88004 - DNA, 466 bp, Arabidopsis thaliana columbia
ctcttcttcttcttcctcttcctctctactgtgattttctcttcatatttctctctctctctcgctgctatagttggtgaagtttctatctttatctctcttaagatctctttctctcttgggttatctgactctaaccagaattgtgtcgatttcaaggatggatgatactacgtataagccaaagaacattctcattactggagctgctggatttattgcttctcatgttgccaacagattaatccgtaactatcctgattacaagatcgttgttcttgacaagcttgattactgctcagatctgaagaatcttgatccttctttttcttcaccaaatgtcaaggttgtcaaacgagatatcgcgcgtgatgatctcgctaactaccttctcatcactgaaaacattgctacgacaatgcattttgctgctcaaactcatgttgataactcttttggtaatagc

SEQ ID NO: 88005 - DNA, 1573 bp, Arabidopsis thaliana columbia
caaaaacctctccgttttttcctctctgtttagctttgaattcacaagagtcatgcgaagattcaactgggttctgcggcatgtacaagctcgaagaacttttgattccgcgatcggattgcgtcaagggtctcagaagccgttgttcgagcgatacattcacgctacaggtataaacaactccagtgctcgtaattactatgatgttctcggtgtttctcctaaagctacacgggaggagattaaaaaatcatttcatgagcttgcgaaaaaattccaccctgatacaaatagaaataatccgtcagcaaaaaggaagttccaggaaataagagaggcatatgagaccctgggaaattcggaaagaagagaagaatatgataagctgcagtatcggaattcggattatgtaaataatgacggtggtgattcagagaggttcagacgtgcataccagtccaatttctcggatactttccacaagatttttcctgagatatttgagaacaatcagataaaacctgatattcgggtggaactgtcgctttctctttccgaagctgcagaagggtgcacaaaacgtttgtcttttgatgcatatgtcttttgtgattcctgtgatgggcttggccaccctagcgatgctgccatgagcatttgtccaacatgcaggggggtgtggacgagtaactattcctcctctttacagcatcatgaccagacgtgcaaggggacgggacacattattaaggaatactgcatgtcttgtagaggatcagcgatattgtggaaggcacaaagacaagctgaacttgtgatccctggaggggtggagtctgaagctacaatcacaatcgtaggtgctggtaatgtaagttcaagaacaagtcaacctgggaacttgtatatcaaactaaaggttgctaatgattcaactttcactagggatggctcagatatatatgtggatgctaatattagctttacacaagctattttgggggccaaagttgtggtgccaacactttcaggcaagatacagctagatataccaaaggggactcagcctgatcaacttcttgttttaagagccaaaggactaccgaagcaaggctttttttgtagatcatggagatcagtatgttcgcttccgcgttaactttcctactgaagtgaatgaacgtcagcgtgctatactggaagagtttccaaaggaagaaatcaacaatgagttgagcgactctgctgaaggaagttggtggaatctaacgggtcctcagatcatccgcgacttctcgttaatggtgctgctggcgctattgttgagcaggttaatgggatgaagccaccacgagagatgaaagataaaagcattcaacagaagacaaatgaagactaatttcatctattgctggtagaacccaaagctcaccagcataacagagagtgtcattgtttgacctcataattctattacaaactcatttgatgtgaataataagagacatccaacaagttaagctgaaataaagaaaagaaaaaaaaaagtcctttaaaaaaaaaaaaaaagggc

SEQ ID NO: 88006 - DNA, 756 bp, Arabidopsis thaliana columbia
  unsure (1)..(756): unsure at all n locations
nnnnnnnnnnnnnnnnnnnnnnnnnnnnnnnnnnnnnnnnnnnnnnnnnnnnnnnnnnnnnnnncacgccacgcgtccgctcgagagagagaaagagaaaacaaaaaacaactgagaaagaaggaagaagaagaagaagattagtgcttagtctttttgcaattcacacacacatcgaaagagggattataaagtttccaactttttctttcaattcccagaatttcgatcttcaaattttgaaggaagaaaaaaaccaagagcaagagttgaggaatcgaatcccaagaatcgaggtgtgagaagcagtatcagtcactagatgcatgacatttgaaagttggagtggaacttgttcttagcgcgtattgaactgtctggtcgcttgtacataaagcttgtaactaaaaatatctggtctgaggggtaagctaaaggggagagaaatggagactgccaaagcttggctgagtaagttaaaatctaaagacagggtgaaatcttcgaaaaagaaggaagccacaagtaatgtaaaggaaggaccgaaaacagctggaggtgaagaagcactttcaatataactaaagagaaggctgctgctgcaaaactgtatattgaaaaccattacaaaatgcaaatgcagagtctgccggaaagaaaggagcgacgcaaaatgctagagaaaaaattagctgctgcgaaagtctctgaggaagaacaaataacttgctaaagggtttggagatgaaggaactg

SEQ ID NO: 88007 - DNA, 666 bp, Arabidopsis thaliana columbia
  unsure (1)..(666): unsure at all n locations
nnnntctatacgacttacttagggaaagctggtacgcctgcaggtaccggtccggaattcccgggaaaaacgtaagcaaaaaaaaataaaacagagcaaaatggccgtagttttacgtggaggcatcaccggaggatttcttcaccatcgtcgtgacgcttcatccgtcatcacaagaagaatctcatccgtcaaagccgcaggaggaggcatcaacccaacggtggctgttgaacgtgccacgtggctacctggactaaaccctcctccttatcttgatggaaatttagctggagattacgggtttgacccactcgggttaggagaggatccggaaagcttgaagtggtatgttcaagcagagcttgttcactctcgtttcgctatgctcggtgttgcaggaatactcttcactgatctccttcggaccacaagggattcgtaatttaccggtttggtatgaagctggagctgtgaaatttgattttgctagtacaaaaactctcatagttggacaagttcctacttatggggttggttgaaactaaaaggtatatggattttggctctcccgggatcccaacccaaagaaaggtgccgttttcctttgaccttgaaagcncacttcgagggggcccggacctggatttcccgggaggaccgttt

SEQ ID NO: 88008 - DNA, 502 bp, Arabidopsis thaliana columbia
  unsure (1)..(502): unsure at all n locations
nnnnnnnnnnnnnnnnnnnnnnnnnnnnnnnnnnnnnnnnnnnnnnnnnnnnnnnnnnnnnnnnnnnnnnnnnccacgcgtccgctcacttccctcattggacctctctaactctcctctcttaccttctcctgtttaaattcttctcctttctttccacaatttctgtctaaccaattccaacaccaaaaaattccatttcttgacgatgaaacgaagccatcaagaaacgtctgtagaagaagaagctccttcaatggtggagaagttagaaaatggttgtggtggtggtggagacgataacatggacgagtttcttgctgttttgggttacaaggttcgatcttcagacatggcagatgttgcacagaagcttgaacagcttgaaatggtcttgtccaatgatattgcctcttctagtaatgccttcaatgacaccgttcattacaatccttctgatctctccggttgggctcagagcatgctctcggatcttaattac

SEQ ID NO: 88009 - DNA, 581 bp, Arabidopsis thaliana columbia
  unsure (1)..(581): unsure at all n locations
agtgattggtggagatagagagatagggtttgtggctagagttaaggaagtttatggtttgattcaagagaaaggtgtgttttgggcttttnatcagatgattgaaactggagatttgccttatgaggagatcataaagcttcagaattcgaaaaggagaagcttcaaagctatcgagttagggagtgaagaaactnctagagttttaggtcaagtgattgatactttgggtttagctcctgtgcatttggttcttcatgattcagctttagggttagcttcgaattgggtttctgagaattggcaaagtgttcgaagtgtaactcttattgactctagtattagtccagctttgccgttgtgggttttgaatgtaccggggattcgagagattttgttagcgttttcgtttggttttgagaagctagtgagcttccggtgctcaaaggagatgactttatcggatattgatgctcataggatacttttgaagggaagaaatgggagagaagctgttgttgcttcgttaaacaagttaaaccatagctttgacattgcacaatggggtaattcagatggga

SEQ ID NO: 88010 - DNA, 1104 bp, Arabidopsis thaliana columbia
  unsure (1)..(1104): unsure at all n locations
tacgcctgcaggtaccggtccggaattcccgggtcgacccacgcgtccgagtgattggcggagatagagagatagggtttgtggctagagttaaggaagtttatggtttgattcaagagaaaggtgtgttttgggcttttgatcaaatgattgaaatgggagatttgccttatgaggagatcataaagcttcagaattcgaaaaggagaagcttcaaagctatcgagttagggagtgccacgcgtccgagagttttaggtcaagtgattgatactttgggtttagctcctgtgcatttggttcttcatgattcagctttagggttagcttcgaattgggtttctgagaattggcaaagtgttcgaagtgtaactcttattgactctagtattagtccagctttgccgttgtgggttttgaatgtaccggggattcgagagattttgttagcgttctcgattggctttgagaagctagtgagctcccggtgctcaaaggagatgactttatcggatattgaagctcatacgatactttcgagggcaagaaacgggatagaagccggtaatcctccgcaccacccataaaagcatgnctatctcgttgcccccggggcaaactcaaaaaaaacgactcgccttcccactccacccgacagagcgccccgggcccggctcangaaacgcgccgccgcaatcgcactctgcgcctcccccccctccagatacgcacccggccgcggcgctccggccaccgcgcggcgctcccgggcgcggcggggcgcccccgcccgccgcacgcgcggcccccggcgcgcctccgcgctcgcgcgccccggagggcgccgcgtcaccgcctcgcagcgcgcgccgccgccccggcgcccctgcgcgcccgcgccccgcccgccgcccggccgcgccgcggccgcgcgcgcccgctccgcagcccagcgcgcgcgcgatcgacgcgtggccgcgccccccggcggctccgcccccgcccgcccgccgcgccgcgcgggcagcacggccggctacgccggcgccgccactgcatgggaggtctccgcgcgccgcgcgcaccgcccgcgcgcgggccccg

SEQ ID NO: 88011 - DNA, 661 bp, Arabidopsis thaliana columbia
ccccctcgaggtcgacggtatcgataagcttgatatcgaattcgcggccgcgcaaaaccctactgcgatttatcgactactaggagaagaagaagaagaagacgatgcggagattcggggctgggaacagatccgtttccaagctcgtactcaccatttgtgtagctatcctgttcataccatctctatcgtatggagcttcacaagggaaccggaagacggcgaagtcttctgtgttttccttgttcaatcttagggataaaagcagattttggagcgagtctgtttttcgtactgattttgatgatttggagtcttccgttcactcgaattctggtgtgctgaattacactaagtcaggaaatattgcgagttacttagagcttatggaagtcgattctgtctatcttccagtgccagttaattttatcttcatagggtttgaaggaaaagggaaccaagacttcaaactccgtcccgaggaacttgagcgttggtttaataaacttgatcacatgtttgaacatacacgagttccacaaatcaaagaagttctcaatcccttttaccagattaacattgaagaggaggtgcagcaccatcttcctttcatcagtcgcggtgaactacaacttttctgtgcatgctattcaaaagggac

SEQ ID NO: 88012 - DNA, 635 bp, Arabidopsis thaliana columbia
  unsure (1)..(635): unsure at all n locations
tanctnacacctattnagggaccgggccgggaattncccgggtgancccactgcntccgggttaccgggtatggaagttgctganatcgatggtgcaccgagaatggnaccaacttttggtgctatgatgatatcgggacaaaaggcgggacaacttgctcttaaggctttggggctaccgaatgctattgacggaactctcgttggaaacctaagcccggagctggtcttagccgcagcagattcagctgaaaccgtagatgcttaaaatcaaaaggttttaacgttaagaaaagtttcccttgatccttcggatgttgaaggagtgcaataaaaggagtttaggtgtttaatatggtcttgaacttttctggtgtctttgtttctctcttctgaacttctgtgtaaaatatcgtatcccgttcatttcgnaaatgcgtaatgttcctcggtncttctcccntcctttaatgggctcctaggtacaaggcaagctttcntccgtttggccgttgggcaaataccaaaaannctggnctaaaattttganggggttggannttaangtggttggnatggccggnattccttngncnttcaantncctggataccctaaacccttngaaaaaanaa

SEQ ID NO: 88013 - DNA, 1431 bp, Arabidopsis thaliana columbia
  unsure (1)..(1431): unsure at all n locations
atgatcctgccagctcnnnnnnnnnnnnnnnnnnnnnnnnnnnnnnnnnnnnnnnnnnaccacgcgtccgcccacgcgtctaaactcgaaccctaaagaaaaacaaaaatggctgccatagcttctactctctctctttcttcaaccaaacctcagagacttttcgattcttccttccatggctcagccatctccgcagctcctatctccatcggtctcaaaccacgatctttctccgttcgcgccacaaccgctggttacgacttgaacgctttcacgttcgacccgatcaaggaatcgatcgtgtcacgtgagatgacgagaaggtacatgacggatatgatcacttatgctgagactgatgtcgtcgtcgttggtgctggatctgctggtttatctgctgcttatgagatcagtaagaaccctaatgttcaagttgccattattgagcaatctgttagtcctggtggtggtgcttggctcggtggtcagcttttctccgccatgattgttcgcaaaccagctcacttgttccttgacgagattggtgtggcttacgatgagcaagacacctacgttgtggttaagcacgcggctctgttcacatcaaccatcatgagcaagcttttggctcgtcctaatgtgaagctcttcaacgctgtggctgctgaggatttgattgtgaaaggaaacagagttggtggtgtggtgactaactgggctcttgtggctcagaaccaccacacacaatcgtgtatggaccctaatgttatggaagcgaagattgtggttagctcttgtggtcatgatggtccttttggagctactggtgttaagaggttgaagagtattgggatgattgatcatgttcctgggatgaaagctttggacatgaacactgctgaggacgctattgtgaggttgaccagagaggttgttcctggtatgattgttaccggtatggaagttgctgagatcgatggtgcaccgagaatgggaccaacttttggtgctatgatgatatcgggacaaaaggcgggacaacttgctcttaaggctttggggctaccgaatgctattgacggaactctcgttggaaacctaagcccggagctggtcttagccgcagcagattcagctgaaaccgtagatgcttaaaatcaaaaggttttaacgttaagaaaagtttcccttgatccttcggatgttgaaggagtgcaataaaaggagtttaggtgtttaatatgtcttgaacttttctggtgtctttgtttctctcttctgaacttctgtgtaaaatatcgtatccgttcattcgtaatgcgtatgttctcgttaaaaaaaaaccctgacgtagctcgagnnnnnnnnnnnnnnnnnnnnnnnnnnnnnnnnnnnnnnnnnnnnnnnnnnnnnnnnnnnnnnnnnnnn

SEQ ID NO: 88014 - DNA, 628 bp, Arabidopsis thaliana columbia
  unsure (1)..(628): unsure at all n locations
nnnnnnnnnnnnnnnnnnnnnnnnnnnnnnnnnttaggtacacactatagaagagttatgacgtcgcctgcacgcgtacgtaagctcggaattggagtttggattagccacttcgagttttctgggtactcaactaatcccggccactctgtttagcaaacgagctcgagctttgtctctcaccgtcacagcgaccggtggcagcagaaacaataaggtttacacgaggcttgattcttgtctagtgattcctcctcctcctaaattcaagaaaccgcgtgctattgttaaattcttgggaggtgccttcgtcggagctgttcctgaactcacttacagttaccttaaggagctactggcaaaggaagggtatttgatagtatctgtgccgtacaatgttacatttgatcatgaacaagctgctaagcaagtttatgagaggtttaattcatgcttggacacgattgtctcatctggaattccaaattcaaacttgaagcctggagatttagctgaccttcctcttttctcagttggtcacagtaatggtgcactgctccaagttttgaccggaagttattttgctgagaagataccaaaggttaatgccattatttcattcaataac

SEQ ID NO: 88015 - DNA, 549 bp, Arabidopsis thaliana columbia
taggtgcactatagaagagctatgacgtcgcatcgcacgcgtacgtaagctcggaattcggctcgagcggctcgagcggctcgagcggctcgagatttttttaaagaatggcttcaatttctgcaactttgccttcgccattgttactcacacagagaaaatccaatctcacatcgattcaaaaactcccattttctctaactcgaggtacgaatgatctttctccattatctcttactcgagaccctagcagcatcagtctgatggtgaaagctagtggagaaagctcagattcatcgactgatctcgacgttgttagtacgattcagaatgtttgggataagtctgaagataggttaggtcttattggtttgggttttgctggtattgtagctctttgggcatcattgaatctcatcacggccatcgacaaattgcccgttatctcgagcggattcgaactagttggtatcttgttctccacgtgggtcacatatcgatatctcttgttcaaacccgacagacaggagcttttagaaaattgtcaag

SEQ ID NO: 88016 - DNA, 873 bp, Arabidopsis thaliana columbia
  unsure (1)..(873): unsure at all n locations
aattcggttcaggcacgcgtcccagaatctctaaagtttcaatttttttgttctgttctttttatttttttaaagaatggcttcaatttctgcaactttgccttcgccattgttactcacacagagaaaatccaatctcacatcgattcaaaaactcccattttctctaactcgaggtacgaatgatctttctccattatctcttactcgaaaccctagcagcatcagtctgatggtgaaagctagtggagaaagctcagattcatcgactgatctcgacgttgttagtacgattcagaatgtttgggataagtctgaagataggttaggtcttattggtttgggttttgctggtattgtagctctttgggcatcattgaatctcatcacggcaatcgacaaattgcccgttatctcgagcggattcgaactagttggtatcttgttctccacgtggttcacatatcgatatctcttgttcaaaccggacagacaggagctttcgaaaattgtcaagaaatcagtagcggatatacttggccagtgaaccttgtgtgtgtgataatacttcatctttggaagatgatttgtttgcaagtttgtaaaattacatgacagggtggttgttgtttctagtccaataatgtcatgcatttgaaacctgtaaatactttattgttggtttttggttgtgagcaaaatcaatcttttctaatttcaaagattctcttttatgtttaaaaaaaaaaaaaaaaaaaaaaanaaaggnnnnnnnnnnnnnnnnnnnnnnnnnnnnnnnnnnnnnnnnnnnnnnnnnnnnnnnnnnnnnnnnnnnnnnnnnnnnnnnnnnnnnnnnngtagcttggagttcat

SEQ ID NO: 88017 - DNA, 1271 bp, Arabidopsis thaliana columbia
  unsure (1)..(1271): unsure at all n locations
gaaggcgggcccccctgcaggtcccggcccggaattcccgggtcgacccacgcgtccgcccacgcgtccgcccacgcgtccgcggacgcgtgggttttgggattctcaaaaaactcaaaataaactttcctcatttttttttttctttctttggtttggttttctttataaaggagaaagaaagagaaagagagtttccgaaagcttatttgagttgacgagagcaaattctcaggatgggaagaggaaagatagaaataaagaggatagagaactcaacaaatcgacaagtgacgttttgcaaaagaagaaatggacttctgaagaaagcctatgagctttcggtcctttgcgatgcagaagttgcgctcattgttttctccactcgtggccgtctctatgaatacgccaataacaacataagatcaaccattgagaggtacaagaaagcttgttctgatagcaccaacactagcactgtccaagaaatcaatgccgcgtactatcaacaagaatctgctaagctgagacaacagatccaaacgattcaaaactccaacaggaatctgatgggagactctttgagttccttaagtgtcaaggaactaaaacaagttgagaatcgccttgagaaagctatctctaggatcaggtccaagaagcatgagttgcttctagttgaaatcgaaaacgcgcagaaaagggagattgagcttgacaatgagaacatctatctaagaactaaggtagcagaagtggagaggtatcaacaacaccatcatcaaatggttagtggttcagagattaacgcaattgaagctttagcctcacgcaattactttgctcatagcattatgactgctggttctggatctggtaatggaggttcttactctgatcccgacaagaaaattcttcatctcggataatctcgtctgcgaaaaaccgagctgcaataactctctgcatgcatctggggattctttgctcagatttatctctacataaaatatgttttggtgcaaaataattcaaagtacaatgaaggtattggtccttcaagactcattgcaatttgtgttgtgtaatgattaagacatactctagtttttattgcttcgtatcataggatctattctatggtatcttatttagtggnnnnnnnnnnnnnnnnnnnnnnnnnnnnnnnnnnnnnnnnnnnnnnnnnnnnnnnnnnnnnnnnnnnnnnnnnnnnnnnnnnnnnnnnnnnnnnnnnnnnnnnnnnnnnnnnn

SEQ ID NO: 88018 - DNA, 647 bp, Arabidopsis thaliana columbia
  unsure (1)..(647): unsure at all n locations
tacgactcactattaggaaagctggcacgcctgcaggtaccggtccggaattcccgggtcgacccacgcgtccgacactataaactcaaacacatctatcggcaagtcttaacacacgaagatttccaaaatggctaaggccgaagggctttttcttcttgggttagtagttatttcaagtttagttatgttaaccgagagccgactcgcaagaaaagacttggggattgacctaggtgggattggaatcggtttgggcgttggattggggattggtcttggcggcgggtcgggctccggtgctggtgcaggttctggatcaggttcaggttccagatcatcatctagctccagctcatcatcaagttcgagttctagtggttcgggtggttcagctggttcatctgccggttcatttgctggctctagagctggatcaggatctggtaactaaattataataattacttttcgacttaaagtgtgaaacaataagtatgttttatgtttttgggtcgtcgtagttaaatatccgtatgtacggaatggaatgaataatttggtacccgtaaggtatgttttgtttgaagcgagtggtgtgtacctagcttactctccctaaaaaaaaaanannnnnnnnntnngna

SEQ ID NO: 88019 - DNA, 723 bp, Arabidopsis thaliana columbia
  unsure (1)..(723): unsure at all n locations
nnnnntacgactcaccttagggaaagcacgtacgcctgcaggtaccggtccggaattcccggtttcgacccacgcgtccgtccggctgcgagaagacgacagaaggatacggctgcgagaagacgacagaagggtgatgaatctgacaagaccagagaactctgtcggagagagaagattgagaaagttcctcactttagcttttataagagcatggagaaaatacacgaggaagaaggtattgaaccggaccagttaatgggagacgttctatactacggagacaaccactctgcggtggtgcagctgcacggccgacctgacgtggaaaagctgatcgacgagaatcgcactggaggcaagctgatcgtgcttgacgttggtctaaaacattgtggtccttgccgttaaagtgtatccgaccgtgctgaaactgtcccggtcaatgtccgagacagtcgtattcgctagaatggaacggtgacgagaacgatagttgtatcggggtttctcaagggccatgaatttttattcggaaggttccaacttttcttnggtccaattagnanncgggcgganattncgtggcccgtaattnttggntcccggnaaaggggnncctcatttggggnaaantttttcnggacctaagggggttncgggccactttttaaatttgnttnnaaactttnaattttttttnaatccccctttaaaaaagat

SEQ ID NO: 88020 - DNA, 1258 bp, Arabidopsis thaliana columbia
  unsure (1)..(1258): unsure at all n locations
atgtttnnnnnnnnnnnnnnnnnnnnnnnnnnnnnnnnnnnnnnnnnnnnnnnnnnnnnnnnnnnnnnnnnnnnnnnnnnnnccacgcgtccgcattcactgatctctaaccaatcccacacacactaccacaaacaatggccaccgtcgctaacttcttagccaaaccaatctccaccgtagtcccacggccatcctccgccgttgcttcgacctcctccttcgtattctttaaccataaaactaatcctctgttccggaggaaaaacctcccgaaaagattattctccgccgtgaaaataaaggctggagcggcgtctccgggaaaggtgggtacaccaccggcgaatgacgagaaggtacaaaagattcacagcggagaggaattcgacgtagcgttgaaaaatgcgaagagcaaactcgtggttgcagagtttgctacgagtaagagtgatcagagtaataagatatatccgtttatggtggaactgagcaggacctgtaacgacgtcgttttcttgctcgtcatgggtgatgaatctgacaagaccagagaactctgtcggagagagaagattgagaaagttcctcactttagcttttataagagcatggagaaatacacgaggaagaaggtattgaaccggaccagttaatgggagacgttctatactacggagacaaccactctgcggtggtgcagctgcacggccgacctgacgtggaaaagctgatcgacgagaatcgcactggaggcaagctgatcgtgcttgacgttggtctaaaacattgtggtccttgcgttaaagtgtatccgaccgtgctgaaactgtcccggtcaatgtccgagacagtcgtattcgctagaatgaacggtgacgagaacgatagttgtatggagtttctcaaggacatgaatgttatcgaagttccaactttcttgttcattagagacggcgagattcgtggccgttatgttggttccggtaaaggagaactcattggagagattcttcggtactcaggcgttcgtgtcacttattaatttgtatcaaaactttaattttattacatctcacttcaaaaaagaatgagtttttggtctttgtctgtaccatccgaaaccggttgatatgaaagaaaaaaaactcaaaataagtgtgattaaaaaaaaaaaaaaaaaaaaaaaaaaanagcggccgctctagaggatccaagcttacgtacgcgtgcaggcgacgtcataatcttctatagt

SEQ ID NO: 88021 - DNA, 1043 bp, Arabidopsis thaliana columbia
gaagaaacagagaaaccaaagagttaagtggtgaacctcgaagctagttcaaactagtgggaggttgtttcacgtttcaactttcaagtcataaaaccaaatccaactctaaacgtaaacccaaacgtcaaatcatcagatagaaggaaatattctgattgagagatggctcgtggaaagattcagcttaagaggattgagaacccggttcacagacaagtgactttttgcaagaggagaactggtcttctcaagaaggctaaggagctctctgtgctctgtgatgccgagatcggtgttgtgatcttctctcctcagggcaagctctttgagctcgctactaaaggaacaatggagggaatgattgataagtacatgaagtgtactggtggtggtcgtggttcttcttctgctacttttactgctcaagaacaacttcaaccaccaaatcttgatccgaaagatgagatcaacgtgcttaagcaagagattgagatgcttcagaaagggataagctatatgtttggaggaggagatggggctatgaatcttgaagaacttcttttgcttgagaagcatcttgagtattggatttctcagattcgctctgctaagatggatgttatgcttcaagaaattcagtcattgaggaacaaggaaggagtcctcaaaaacaccaacaagtatctcctcgacaagatagaggaaaacaacaatagcatattagatgctaacttcgcagtcatggagacaaactattcctatccgctaacaatgccaagtgaaatatttcagttctagaccatagggtatttgaagactatgtctcacgaatttaaataaccttggtaagtataatatagtgttgttaaatcacacataattaaaataaagcctgtggaacttcgctaggcagttgaaaatctatccgtatgttttatcctcttgttttacatttgttggtgtgaagatgaaatgactgcaagtgtggtgtgtacttataactctttctactttctatctatgttttgaatttatggatt

SEQ ID NO: 88022 - DNA, 838 bp, Arabidopsis thaliana columbia
tctttctcctgaaccatggcggcggcaacaacaacaacaacaacatcttcttcgatctccttctccaccaaaccatctccttcctcctccaaatcaccattaccaatctccagattctccctcccattctccctaaaccccaacaaatcatcctcctcctcccgccgccgcggtatcaaatccagctctccctcctccatctccgccgtgctcaacacaaccaccaatgtcacaaccactccctctccaaccaaacctaccaaacccgaaacattcatctcccgattcgctccagatcaaccccgcaaaggcgctgatatcctcgtcgaagctttagaacgtcaaggcgtagaaaccgtattcgcttaccctggaggtgcatcaatggagattcaccaagccttaacccgctcttcctcaatccgtaacgtccttcctcgtcacgaacaaggaggtgtattcgcagcagaaggatacgctcgatcctcaggtaaaccaggtatctgtatagccacttcaggtcccggagctacaaatctcgttagcggattagccgatgcgttgttagatagtgttcctcttgtagcaatcacaggacaagtccctcgtcgtatgattggtacagatgcgtttcaagagactccgattgttgaggtaacgcgttcgattacgaagcataactatcttgtgatggatgttgaagatatccctaggattattgaggaagctttctttttagctacttctggtagacctggacctgttttggttgatgttcctaaagatattcaacaacagcttgcgattcctaattgggaacaagctatgagattacctg

SEQ ID NO: 88023 - DNA, 410 bp, Arabidopsis thaliana columbia
cggacgcgtgggcggacgcgtgggcggacgcgtgttctttcaaactctctctcacaagccatgcaaggcgcggagagaaccaccggtgatccgttagacagaattgagaaagtgacatggagagatctgcaagacggatctttcaccgcagaactcaagaggcttatctgctttgcggctcctatggctgccgtggttatcattcagttcatgatacagataatctcaatggtgatggtgggtcacctcggtagactctccctcgctagcgcttccttcgcagtctccttctgtatacgtcactggcttcagctgcagtataggattgtcatgtgccttagatactttgagtggtcttgcttatggagctatgctatatcggaaactaggtgttcaagcttacacagcta

SEQ ID NO: 88024 - DNA, 632 bp, Arabidopsis thaliana columbia
atttactactactagtttgacaaacataaacacatttcccttattaacatttcttgttaaccacacaaagttaataagtaacccaagtttatacagttttaaaacattctctctatctccctccggctaggctgtagctgttcgccatgggagacgcagagagcacctccaaaactagcttgctgctcccggtggaaagagttgaaaacgtgacatggagagatctgcgagatggattattcaccgcagaactcaagaggcttatctgctttgccgctcctatggcggctgttgttatcgctcagttcatgttgcagatcatctcaatggtgatggttggtcacctcggaaatctctccctcgctagtgcctctctcgcctcctccttctgcaacgtcaccggcttcagcttcatcgtaggattgtcatgtgccttagatactttgagtggtcaagcttatggagctaagctatatcggaaagtaggagttcagacttacacagcaatgttctgtcttgcattagtgtggctccctctctctctcatttggttcaacatggaaaagcttcttttgatccttggccaagacccttctattgctcacgaagcccggaaatatgccacctggctt

SEQ ID NO: 88025 - DNA, 712 bp, Arabidopsis thaliana columbia
cgccgttgccgacggtgtcgatgtcatctctctctccgttggaggcgtcgtggttccttattacctagacgctatcgctattggagcttttggagctattgacagaggcatattcgtctctgcttccgccggtaacggaggtcccggtgctttaacggtgacaaatgttgctccgtggatgacaacagtcggagctggaacaatcgatagggattttccggccaatgtgaaactcggtaacgggaagatgatttctggtgttagtgtatacggtggaccgggtctggatccgggtcgaatgtacccgcttgtttacggtggtagtttactaggctgcgatggttactcatcgtctctgtgtcttgaacgctcgttggatccgaatttagtgaagggaaagatcgttctttgtgatagaggaatcaattctagagcaaccaaaggtgagatcgtacggaaaaatggaggcttggggatgattatagcgaatggtgtgtttgacggtgaaggtttagtagctgattgccacgtgttaccggcgacatctgttggtgcttctggaggagatgagattcgtaggtatatctctgaatcatccaaatctcgttcatcgaaacatccaacggctacgattgttttcaaaggtacccgacttgggatccgacctgcaccggttgttgcatctttctctgctcgtggtcctaatccagag

SEQ ID NO: 88026 - DNA, 722 bp, Arabidopsis thaliana columbia
  unsure (1)..(722): unsure at all n locations
gcctgcaggtaccggtctcggattcccgggtcgacccacgcgtccgaagggactcgacttgggatccgacctgcaccggttgttgcatctttctctgcacgtggtcctaatccagagacgccggagattcttaaaccggatgtaatcgcacctggtttgaatattctagctgcttggcctgaccggattggtccatctggtgttacttctgataaccggagaactgagttcaacattttatcaggcacttcgatggcgtgccctcatgtttctggtctagctgctttgcttaaggcggctcatccggattggagccccgcggcgataagatcagcattgatgaccacggcttacacggttgataacagcggtgagccgatgatggatgagtccactggcaatacgtcttcggttacggattatggttcgggtcatgttcacccaaccagagctatggatccgggactagtctacgatataacatcttatgattatatcaacttcttgtgtaattctaactacactggaaccaacattgtgacgataacccgtcgccaagcggactgcgacggtgcgaggcgagcgggacacgtcgggaatttgaactacccgtcgttctctgtcgtgtttcagcagtatggagagagtaaaatgtcgacacatttcattaggactgtgacaaatgtangcgattcggattcggtttacgagattaagattag

SEQ ID NO: 88027 - DNA, 752 bp, Arabidopsis thaliana columbia
  unsure (1)..(752): unsure at all n locations
ccttatcttctacgcccgcttcttcagactgggcggccgggtccttcctctatttcttcttcttcttcttcggctcttcttcttctgctatcacttcctcctcttcgtcattagtatctccaccctgctgtagctttttatttttcttcttcttcttcttcggctcttcttctgctaccgcttcgtcctctccatcattaatatctccacgctacttatttttctccttcttcttcttcttcggttcttcggcaattaacgcattgttctctttggcatcaacccccccgtgcggttcttcttccttgcttcttcgagtctcgatctcctctctcaatctcagtcttcagcttccaattgactttcaacatggcagatgatgaagttgttgatccaaagaagtaccttgaggaatcttgcaaccaaaatgtgtgaagccacttctcgaatatcaggcatgtgtcaagagaatccaaggtgatgattctggccacaagcattgcactggccagtattttgactactgggcatgcattgacaaatgtgttgcaccanagctgtttgcgaaactaaaatgaaaagaggtgaagctggagactctattgtcttgagtttgctacatgtggtttaaaattgatgtataaaatgcaggggatgttgacctttttttactgcaaaccagattgcccaatggctctgcttcttaggttttgttttcatcggcaggtttgcgcttactacatttttttgct

SEQ ID NO: 88028 - DNA, 636 bp, Arabidopsis thaliana columbia
tataggaaaagttggtacgcctgcaggttccggtccggaaattccagggtcgacccacgcgtccgtcgagtctcgatctcctctctcaatctcagtcttcagcttccaattgactttcaacatggcagatgatgaagttgttgatccaaagaagtaccttgaggaatcttgcaaaccaaaatgtgtgaagccacttctcgaatatcaggcatgtgtcaagagaatccaaggtgatgattctggccacaagcattgcactggccagtattttgactactggcaatgcattgacaaatgtgttgcaccaaagctgtttgcgaaactaaaatgaaaagaggtgaagctggagactctattgtcttgagtttgctacatgtggtttaaaattgatgtataaaatgcagtggatgttgaacttttttttactgcaaaccagattgccaaatggctctgcttcttggttttgtttccatcgcaagtttgcgcttactacatttttttgctacttgagtaattgcatggcctaataacaagatatgttgtgccgaaaaaaaaaaaaaaaaaaaaagaaaaaaaaaagggggccgcccgctctagaggatccaagcttacgtacgcgtgcatgcgacgtcatag

SEQ ID NO: 88029 - DNA, 424 bp, Arabidopsis thaliana columbia
  unsure (1)..(424): unsure at all n locations
aaactgttggcgaaacttgaagcagagaaagaatctgttgatggaaagtttaaggagactgtgaaaganctttctcatcttctggcngatgcttctnaggcttacgaagagtatcatggcgcggtgaggaaggcgaaagacgagcaagcggctgaggaatttncgaaagaggcgacgcaaagtgcagagatcatttgggttaagtttcttagttctctttagagaccaattgagattcttggttgtgttaagagcaaatctagagctcttgttggttcttgttatgtattttgtgatgatgttctgtttcagagtttgtgtgttggttgtatcaggagaaagaggctgggagatagagagaaacagagtctctgcgaaaactaaccctgtttttccagatatctaaataataagctttttgnat

SEQ ID NO: 88030 - DNA, 843 bp, Arabidopsis thaliana columbia
  unsure (1)..(843): unsure at all n locations
acgcgcnnnnnnnnnnnnnnnnnnnnnnnnnnnnnnnnnnnnnnnnnnnnnnnnnnnnnnnnnnnnnnnnnnnnnnnccacgcgtccgctcattacggctgcgagttttgaagagctaagttcagctccaatcagttacatttctaggttagctaaatacagaaacgtcatcaaagaaggacttgaagcttctgagagagttcacatcgcgcaggtacgagcaaaaatgctcaaagaagttgccacggagaagcaaaccgccgtggacactcatttcgcaaccgctaaaaagcttgctcaagaaggagacgcgttgttcgttaaaatcttcgcaatcaagaaactgttggcgaaacttgaagcagagaaagaatctgttgatggaaagtttaaggagactgtgaaagaactttctcatcttctggctgatgcttctgaggcttacgaagagtatcatgggcgcggtgaggaaggcgaaagacgagcangcggctgaggaatttgcgaaagaggcgacgcaaagtgcagagatcatttgggttaagttcttagctctctttagagaacattggagattttggtgggggtagagcaatccaggagctcttgcgggccctggcaagatgggggggggagcggcccgcccgcggcgccgcggggcgccgggcgcgcgcggccgtcgggcgcgccggccgcgccgncggcggggcggcgggagggcgggggcgcgccgggggcgggaggcgggcgggcgagagcgcggcagggcggggctcccgcgcgcggggggggacggggccctcgcggcgcgcgagggtcgcgtcgcgcgctgcgggggggggt

SEQ ID NO: 88031 - DNA, 621 bp, Arabidopsis thaliana columbia
  unsure (1)..(621): unsure at all n locations
aaccatttgtcatacaaaatcaaacaatttattattctaaagatggatttcacacactcaggagcgatcttttgaggagttgcagtattgatccaaatgctaatgatcttcaagtcgagagtctcgctcgtttcgctgtcgatgagcataacaaagaacgagaacttgactctggagtacaacaggctccttggtgcgaaaacacaggttgtggcaggaacaatgcaccatctaactgtggaggtggctgatggtgagacccataaggtctatgaggccagcgttttggagaaagcttgggagaatctcaagcagttgcagagtttcaaccaccttctcgatgtttggatcccgttgccctgcgctttctctgcggcttgggtgtggtccttgtgtgctctcagaccgcgtgacaaccgttcaaaaaaacaaaagtttcnttctttaataagtgaaatccagtcccacgtgtttgaactggtattgtgagaatctcttgactctcgtttgtgtattgctattagcaaactctcactttttctcttcttgctttgcttttctcgtcttctnncagattaaacccncgtgagcagccgctctagaggtcccagcttcgcacgc

SEQ ID NO: 88032 - DNA, 528 bp, Arabidopsis thaliana columbia
  unsure (1)..(528): unsure at all n locations
aaaacatttgagataaaaatcagaaaagtaaagagacgaaaatggcggatcaacaagcaggaacaatcgtcggaggagttcgcgatattgatgcaaatgctaatgatcttcaagtcgagagtctcgctcgtttcgctgtcgatgagcataacaagaacgagaacttgactctggagtacaagaggctccttggtgcgaaaacacaggttgtggcaggaacaatgcaccatctaactgtggaggtggctgatggtgagaccaataaggtctatgaggccaaggttttggagaaagcttgggagaatctcaagcagttggagagtttcaaccaccttcacgatgtttaatcccgatgccctgagctttctctgcggcttgagtgaggtccttgtgtgctctcagaccacgtgataagagttctgggttaaccaagtaacttctttantaagngaatccngtcccatgtgtttanctggattnngngancnttaaccccgtttngnattncnnttgaaccntcccttttgc

SEQ ID NO: 88033 - DNA, 570 bp, Arabidopsis thaliana columbia
  unsure (1)..(570): unsure at all n locations
gagagacgaatcaaaaacatttgagataaaaatcagaaaagtaaagagacgaaaatggcggatcaacaagcaggaacaatcgtcggaggagttcgcgatattgatgcaaatgctaatgatcttcaagtcgagagtctcgctcgtttcgctgtcgatgagcataacaagaacgagaacttgactctggagtacaagaggctccttggtgcgaaaacacaggttgtggcaggaacaatgcaccatctaactgtggaggtggctgatggtgagaccaataaggtctatgaggccaaggttttggagaaagcttgggagaatctcaagcagttggagagtttcaaccaccttcacgatgtttaatccgatgccctgagcttttcttcttccggctttnaggttagggtcccttgtgtccttttaagaccacggnggttaagagttcttggtttaanccaagttaaacttcctttaaanaagggnaatnccngncccaaggtntttaaccnggganttgggggnanccttttanccnnggtttnggaattnccttttangaaacnnccccttttt

SEQ ID NO: 88034 - DNA, 2079 bp, Arabidopsis thaliana columbia
  unsure (1)..(2079): unsure at all n locations
tatttttctcgctcgcgaattcctctttctcaccttttctcgctcctgggaatctgaagcagttcttctccgacgcctggatcgtgatttgattcgaactttcacataagatggctatggtagatgaaccgttgtatcccattgctgtgcttatagatgagcttaagaatgatgatattcagcttcgtttgaactcgatccgtcgcttatctactatagctcgtgctcttggagaggagcgtacaaggaaggagttaatcccttttttgagtgagaatagtgacgatgacgatgaggtgcttcttgcaatggctgaggagttaggagtttttattccgtttgttggaggaattgagtttgcgcatgttcttcttcctcctttggaatctctatgtactgttgaagagacttgtgtgagagaaaaagctgtggaatcgctttgtaagattggatctcagatgaaagagaatgatcttgttgaatcttttgttcctcttgtgaagaggttagcgggtggtgaatggtttgcagcaagagtttctgcatgtggtatatttcatgttgcataccaaggttgcactgatgtgttgaagactgagttacgggctacttatagccagttgtgcaaagatgatatgccaatggtgcgaagagctgctgcatctaacctggggaaatttgctacaactgtcgagtctacctttttgattgctgagatcatgactatgttcgatgatcttactaaagatgaccaagattctgtgagactattggctgttgaagggtgtgcagctcttggaaagttgttggaacctcaggattgtgttgcacgcattttacctgttattgttaatttctctcaggataaatcttggagggtgcgctacatggttgctaatcagctatatgaactttgtgaggcagtgggtcctgattgcacgaggacggatttggttccagcatatgtgagattgctaagggacaatgaggctgaagtgcgaatagcagcagcgggaaaagtgaccaagttctgtcggcttttgaatccagagcttgcgattcagcacatccttccttgtgtgaaggaattatcatcggattcttctcaacatgtccgctctgctctagcttcagtaataatggggatggctcctatccttgggaaggactcaaccattgagcatctgttaccaatttttctttcccttttgaaagatgaatttcctgatgtgcgccttaacatcataagcaagttagatcaagtcaaccaggttattggaattgatctactatctcaatccttgttaccggccattgtagaacttgctgaggatcggcactggagagtccgacttgcaataatagagtatgttccactgttggccagccagttaggtataggatttttcgatgacaagctcggagccctttgcatgcaatggctgcaagacaaggtctactctatccgcgaagctgcagcaaacaacctaaagcgcctcgcagaggagtttggtcctgaatgggcaatgcagcacttagttccccaggtattggacatggtcaacaatccgcactacctacacaggatgatggttctacgcgcaatatctctcatggcgcctgtaatgggatcagaaatcacatgctctaagtttcttcctgtggttgttgaagcatcaaaagacagagttccaaacatcaagttcaacgttgccaaacttctgcaatccctcatccccatagtcgaccaatcagtggtggacaaaacaatccgtcagtgtttggtggacctgagcgaagaccctgatgttgatgttcgttattttgcaaatcaagcacttaattccatcgatggttccacagcagcacaatcctgaattgtttttttttcatatgtatgatcgttaagttaagtttctattattcgtgttctctgcaatttatttggtttgtttgtgtaaaacgccattttggttgctggctatgaactgcaactatttttgttagtaaaattgtattaccttttttactctgggaggatnnnnnnnnnnnnnnnnnnnnnnnnnnnnnnnnnnnnnn

SEQ ID NO: 88035 - DNA, 955 bp, Arabidopsis thaliana columbia
tgatactccagctctctacgactcacatatatggaaagctggcacgcctgcaggtaccggtccggaattcccgggtcgacccacgcgtgcgggaaaaactaaaattactagagaaaacaagaatggctgcgaatctaaggaacaatgcgttcttgtcttctctcatgtttcttctcttgatcggttcatcatacgcaatcacaagttcagaaatgagcacaatctgtgacaaaaccttaaatccatctttctgtcttaagttcctcaatacgaaattcgcatcgcctaatcttcaagccttggcaaaaaccacacttgattctacacaagcgagagctacacaaacgttaaagaaactccaatctattatcgatggaggagtcgaccctcgatctaagttagcttacaggtcatgcgtagatgaatacgagagcgcgattggaaacctcgaggaagcttttgagcatttagcttcaggagatggtatggggatgaacatgaaagtttctgctgcattggatggagctgatacatgtttagatgatgtgaagagattgagatcagtagattcttcggttgtgaataacagtaaaacaattaagaatctttgtggtattgctcttgttatctctaacatgttaccacgtaattaatttgaaaatcttcatcatgtgtttgctctgattaattgtaattgtttgcaagaagacaaactaaattaatatacttctattataatgaagctttagtttgataatatccaacgtaacccatgccaatacaaaaaggcttcaaaaaatgtaatgattgataattaagtaattttgtttttgtagtattgtatgaaatattgtttaaatctttcaaagaaaaaaaaaaaaaaaggacggccgctctagaggatccaagcttacgtacgcgtgcatgcgacgtcaaagctcttctataagtcccc

SEQ ID NO: 88036 - DNA, 617 bp, Arabidopsis thaliana columbia
  unsure (1)..(617): unsure at all n locations
atgttttaggtgcactatagaagactatgacgtcgcatgcacgcgtacgtaagctcggaattcggctcgagaggactttctgtgtcttctctctctagatcttttagagagaggaagtttctgatgctcaaacttggctccgacaatagccagcttttttagtggtgttggttggcttccttctggcgtcgttagctcctttagcaacgtcggctagcttttctccgacatcggtggtttcttgggcaccgttggtcggcttccttcttcaaatttagtttttgcctttcaaccttgttcgattctattttgcttcggttttaattggttttgatttctctttctcttcatttcgatctaaatttgtaatttttcgatcctcccttctttaagggggcttaatttgttcttcaagcttattgagttttcattttaaaaggtcaattttttaggtacggattgaagtttaatttagggccttttggtttgatttaatgaaattagggctgtngttngcttnctgtgccgntncttttgaancggttngggtaaggtggnttcccntaaatgcagagccgagcggnggttnangcattcttcttaaggttaaatnnctc

SEQ ID NO: 88037 - DNA, 1176 bp, Arabidopsis thaliana columbia
  unsure (1)..(1176): unsure at all n locations
cttatatccttcttaattctacaaaatatatccttctattccaccaccctttaccccattacacccacccattctactactctaccctcttatctacatctcctccattcttacttactcccttcccccaccacatacaaaatgaatttgcgttcgctgtaccgctccggaattcccggctcgaccttctctctctagatcttttagagagaggaagtttctgatgctcaaacttggctccgacaatagccagcttttttagtggtgttggttggcttccttctggcgtcgttagctcctttagcaacgtcggctagcttttctccgacatcggtggtttctttagcaccgttggtcggcttcgttcttcaaatttagtttttgcctttcaaccttgttcgattctattttgcttcggttttaattggttttgatttctctttctcttcatttcgatctaaatttgtaatttttcgatcctcccttctttaaggggcttaatttgttcttcaagcttattgagttttcattttaaaagatcaaatttttagttacggattgaagtttaatttagtgtcttttgtttgatttgatgaaattagagctgttgtttgtctttcttgttgccgatgcttgttgaatcgtttgggtttatgttgtttttcctttaaatggcagaagtcgaagtcgatagtttgtgagctatttctttcttgaaggttttaaattttacagtcattgtcacagaagatttgtcaattgtctcatcggatttgtagctgcttccgatttggcgtttacagcaattccggtgaacgaaagttttttgtggttatgattctccacctgcgacattctgcaactcatcatcttctgtttccacgtgtcctctttaccgtgtctctagtgccatgtgggctttgacttattagcacattagctttctcttcttcagaaggtggtctttgggcttttgtccgtttatggcctgttatatggctttgtaaaatatggcttgttaaaaggctttgtaatataaataataaaacagttgtgacaaaaaaaaaaataaataagggcggccnnnnnnnnnnnnnnnnnnnnnnnnnnnnnnnnnnnnnnnnnnnnnnnnnnnnnnnnnnnnnnnnnnnnnnnnnnnnnnnnnnnnggcagctg

SEQ ID NO: 88038 - DNA, 651 bp, Arabidopsis thaliana columbia
atgatcttttagtttttttttgtttcccccaaatctcactttttctcacttgctctccatctcaaatttcacacaaccgagtaaaccctagaatctccgcttctcattcaattggtttcatcactggtcttaatcattgctagggtttactcggttacctttatcatcatcaattgatccttgttcataattcatcctcttttctttctgtctttggcataaagtttcaatttttcttcttcttctctttctcactcaatcatggcgtatcagcctgttccgggttctgggtttcactacttgaactctcctttcggtgatacaactttcacaaaggtgttcgtcggtggtcttgcttgggaaactcaaagtgaaactcttcgccagcatttcgaacagtacggtgaaatccttgaagctgttgtcattgctgataagaacactggtcgatccaaaggatatggctttgtgacattccgagatccagaagctgctaggagagcttgtgctgaccctacgccgattatagacggtagacgtgcaaactgtaatcttgcttcccttgggagacctcggcctccattgccctatgcagtgatacctaacatgcctggacgcttaagacctgcttccccgtacattggaaatgtg

SEQ ID NO: 88039 - DNA, 563 bp, Arabidopsis thaliana columbia
  unsure (1)..(563): unsure at all n locations
nnnnnnnnnnnnnnnnnnnnnnnnnnnnnnnnnnnnnnnnnnnnnnnnnnnnnnnnnnnnnnnnnnnnnnnnnnnnnnnnnnccacgcgtgcgcgcaaacgattcgattgtgatttcggggaaagaagtagatgacaagatcgtgctggttttactcagcttggtaacggttttggcattggtatatacagatgtgggcgaaaacgttctggtttcgctgatcattggtttgctcatcgtcggagctcacggcgcttttcgtaataccgatgatttgtttcttgatgaagaaagtgctcgccgtggtggcctggtgtctgccggttctggtaaccggccaccgtcgagttataccccaatttgagtaaaccggtttggagaattactcgtaatttcttgggtttttgattgaagaagctaagggaatcaatttagggctttgtattttggatttcccaaagattcttgtatttatattttggcgtgtgtgtttcattttgtttgaatgtatacaaattttgggaaaaaacaaattggtgttatggtattttatagaattgccc

SEQ ID NO: 88040 - DNA, 550 bp, Arabidopsis thaliana columbia
tcagctctaatacgactcactataggaagctggtacgcctgcaggtaccggtccggaattcccgggtcgacccacgcgtcataagagagtctaaacactgtggtagaaaaaaatatagacttttagatatgtgtagtaaaataacattagtgttaactttattttccagttatttcatatcaacagatgctgtgaatggatcatttcctgcgcttttggcttttggagattcaattctcgatactggcaacaacaattttctcctgacttttatgaaaggaaatatctggccatatggaaggagtttcagcatgagaagggcgacaggaagatttggaaatggaagagttttctctgatatagttgctgaaggtttagggatcaagaagattttaccagcttatcgtaagttgttcaattctccaagtgaccttagaactggtgtttgcttcgcatcaggtggtgcaggagttgaccctgttacatccaaattgctgagagttttaacgccaaaggatcaagtaaacgatttcaaagggtacataagaaa

SEQ ID NO: 88041 - DNA, 693 bp, Arabidopsis thaliana columbia
  unsure (1)..(693): unsure at all n locations
agggaacctataaaaaattcttgacgtcgcatgcacccgtacgtaagctcggatttcggctcgagaaccctggaccgcacaacaatggcgagaggctcttcccaatcccaacaatcaacctccaccggttcttcaaccgcccggcccggtctggccgctcctcgtggttccgccgccgctactgccggcatgcgtcgccgcaggctcggtggcggtggtggcgtatcctcaggcggcggatctggagttggatcaggatcgagcaacatgctgagattctacacagatgatgctccggggttgaagatctcaccgacggttgttctgatcatgagtctctgtttcatcggcttcgtcactgctcttcacgtctttggaaaactctacctccacaaatccggatcccaagcttagatccggatcaggacctggatcgtttaatcggtgatcgctgttttttttttttttttttaggatgtttccttgtgttttgtttcccttttttagtcttttcgatgagaaccatgtaaatcgctaagcgttgaataaaatacgtcacctttggaaaaaagaaaaaaaaaaaaaaaanaaaggnnnnnnnnnnnnnnnnnnnnnnnnnnnnnnnnnnnnnnnnnnnnnnnnnnnnnnnnnnnnnnnnnnnnnnnnnnnnnnnnnnnnnnnnnnnnnnnnnnn

SEQ ID NO: 88042 - DNA, 1279 bp, Arabidopsis thaliana columbia
ggaagaactgttgttgttgtgctctttggtttcatcgagagagaacctaaacccgatctgaaccaataacaataagaagacgaatggcgtcttcgtcgttctcagtcacatctccagctgctgctgcttccgtctatgcagtcactcaaacctcctcgcacttcccaatccaaaaccgctctcgcagagtttctttccgtctctctgctaagcccaagcttcgctttctctccaagcctagtcgcagtagctaccctgtggtgaaagcacaatctaacaaggttagtactggtgcatcatcaaatgctgccaaagttgatgggccatcatcagctgaaggaaaggagaaaaactcattgaaggagtcgtctgcttcttctcctgaattagctacagaagagtctatttctgagttccttacccaagtaacaactcttgtcaagcttgtggattcaagagacattgttgagttgcagttgaaacaactcgactgtgaactagtcattcgaaaaaaagaagccttacctcaacctcaagctcctgcatcttatgttatgatgcagcaaccaaatcaaccatcttatgcccagcaaatggctcctcctgctgcacctgctgctgccgcaccagccccttctacgccagcctctctgcctccaccatccccacctactccagccaaatcgtcacttcctactgttaaaagccccatggctggcacattctaccgtagtcctgcacctggtgaaccaccctttattaaggttggagacaaagtgcagaaggggcaagttctatgcattgttgaagccatgaagttaatgaatgaaatagagtctgaccataccggaaccgtagtcgatattgtcgcagaagacggcaagcctgtcagcctcgacactcctctgtttgtggttcaaccgtagaatcggcaccatgagaaatggagaaaagaagctctactaaattcattctctgtgctttggtaatacaaaatttgctgagacttctaaaaacgtttccccttcgcttgtcactgttaaagtctgttaggtttgttagtttggtgaggaagaattgagttttctttagtttctctattcgttaaaaaaaaaaagatgagacatttttttccataagctctgtttttatttctttcctatatacacgaactcttcttgttctgttctatttgcaaattatccaatagaaaaaaaaaaaaaaaaagggcggccgctctagaggatccaagcttacgtacgcgtgcatgcgacgtcaa

SEQ ID NO: 88043 - DNA, 593 bp, Arabidopsis thaliana columbia
  unsure (1)..(593): unsure at all n locations
tctccatcatgagatcggtggtaaagaccaagagtgtagagtttatgcccttctttttgtcactctttgtcttcctctgtgggacttcgtggttcgtctatggtctaatcggtcgtgacccctttgttgcaatcccaaatgggtttggatgtgcattagggaccctgccattgatactatacttcatctactgtgggaacaaaggagagaaatctgcagatgctcagaaagatgagaagtcagtggagatgaaagatgattagaagaacccgaatgtggtttatggaaagccagaccttccagtttaaaagagcttttgaggatgatttggttatgtgatttcgtattaactctgcttaactagaggtttccttttcgtttcgttggaatgtaaaaaaaatgatgctgaaaaatggaacggttcctagtttcggtctgataccctagtgattgatgaagaatgacgatgccctttgtggnnnnnnnnnnnnnnnnnnnnnnnnnnnnnnnnnnnnnnnnnnnnnnnnnnnnnnnnnnnnnnnnnnnnnnnnnnnnnnnnnnnnnnnnnnnnnnnnnnnnnnnnnnnnnnnnnn

SEQ ID NO: 88044 - DNA, 750 bp, Arabidopsis thaliana columbia
cttcttttgattttatctatccgccatgaacgagaaagccaacgtctctaaggagcttaatgcccgccatagaaagattcttgaagggcttcttaaacatccagagaacagagaatgtgctgactgcaaaacaaaaggtccaagatgggctagtgttaatttaggtatctttatctgcatgcaatgttctgggattcacaggagtctcggggtacacatatcgaaggttcgatctgccactctggacacatggctccccgagcaggttgcatttatacagtcaatgggaaatgataaagcaaatagttactgggaagcagagctacccccaaactatgatagagttggaattgagaattttatacgtgcaaagtatgaagagaagagatgggtttctagaggggaaaaggctagatcacctcctagagtcgagcaggaacggcggaaatctgtggagagaagtgggccgggatatgagcatggacatagtagtagtcctgtaaatttgtttgaggagaggaaaactattccagcatctagaacaagaaataatgttgctgcaacgagaataaatcttcccgtgcctccccaaggacccagtcaggttataaagccacagcagaaaatggagtctgcagctactccagtagagagggagaaacaagcagtaaatgttgcaccagcatcagatccttcaaaggtggattttgctactgatctgtttaacatgctatcaatggatgattcgac

SEQ ID NO: 88045 - DNA, 607 bp, Arabidopsis thaliana columbia
cttcgttaatggacaccttgggcaagttaagattggtgacctgggcttagctgcaattcttcgtggatcacagaatgcgcacagcgtcataggaacgcctgaatttatggcaccagagctatatgaagaagattacaacgagcttgtagacatttattcgtttggtatgtgtgtcctagagatgcttaccggtgagtatccttatagtgaatgcaccaaccctgcccaaatatacaagaaagttacatcggggaagttgcctgactcattccatctaatccaacacacggaggcccaacgttttgttggtaaatgcttggaaactgtgtcaagaagattgcctgcaaaggagctcttagcggacccattccttgccgcaactgatgagagagatttggcgcctctttttagattgccgcaacaattggcaatccagaatttggctgcaaatggaacggtggtagagcatctgccgtcaacgactgatccaactagaacaacagatatgtcaataacaggaaagatgaactcagaagaccacaccatcttccttcaagtacagattctagatggcgatggtcacatgaggaacattcagttcccgttc

SEQ ID NO: 88046 - DNA, 872 bp, Arabidopsis thaliana columbia
  unsure (1)..(872): unsure at all n locations
atgatatnnnnnnnnnnnnnnnnnnnnnnnnnnnnnnnnnnnnnnnnnnnnnnnnnnnnnnnnnnnnnnnnnnnnnnnnnnnccacgcgtccgcccacgcgtccgcggacgcgtgggtttacatctgacgactagaaaagtaggtagattatgaatctttctgggtttgtagtgagtttataggaaattcctttgtctagtgttccaaaatttgagtagatcttgaacaactttgcaaatcttgttgatcgatatgtttgggaattgaaaatttactagattttgaatttctgaggttttgtgtaagcagttgaatgaagcagtaggtggttgagtcatgtttggtctgtgatgtcctgtcacacgcatcacatgaaccttggctttggatttaacggccgttgttagtattaggctaattattaacatggcttttgttcattgtagttaattttcacagagtaaagagattttgatacattggacccaaagtgcaattttcaaaaatgtttcgctggaagaattcttctcaaaccgaacaagagcagaaagaggcagctctcagagaggcaaagatgaaagagcttaagactctcataggtcagctttctggaaggaattcactgtattgttcagatgcatgtctgaagagatatctggaagctaggaattggaatgtaggcaaagccaagaagatgctcgaggagacgctcaaatggagatcgagttttaaacccgaggaaatccgatggaatgaagtttcaggtgaaggtgagactggtaaggtttacaaagctggattccatgacaggcatggaagaacggttcttatactgagacccggcttgcagaacacaaaatcggtggagaac

SEQ ID NO: 88047 - DNA, 508 bp, Arabidopsis thaliana columbia
  unsure (1)..(508): unsure at all n locations
anatgccccccccattcaaccccttagggctttngggaaacccggccntcaagcncngcacattgtgaattagtggactcccccccagtggtggctcgactgtgccagaaagagctttgggtccagcttttaagacattcccgaaagagaccagcccaaggttgggagagagtagctgcagctgtccctggtaaaccgatgaaccaatgcaagaagaagtttgcagagcttaaggaaatcattagaaacaagaaaaccggagtatgaggtaaaatcatttcggagtcccatgagaattttgggttttaatcctcttggggcaccgttactttgcgagaagcaagacctaaaacttttttattatttgtaatgattcatttccctttgatgtctctatatattgagagtgctggagccactattatggagtatgtttttcttttacataatcttatgtaacgtttgattagcgtctagtttcaagttgtgaaataaagcgcgtcgctcc

SEQ ID NO: 88048 - DNA, 639 bp, Arabidopsis thaliana columbia
  unsure (1)..(639): unsure at all n locations
aagaggaaaccctctgcttcaatcacatcccctctctccacaagagaggagctcggagaatctctacccacaatgacgaccacaacaaatgcaaagccctctaaagagactgttgtggggaaaagctcgagcagtcaaagctcagacaacaatggtgaagtaggtggaagttcagacgcagatagttggtcgactgtgcaagaaagagctttggttcaagctttaaagacattcccgaaagagacaagccaaagatgggagagagtagctgcagctgtccctggtaaaacgatgaaccaatgcaagaagaagtttgcagagcttaaggaaatcattagaaacaagaaaaccggagtatgaggtaaaatcatttcggagtcccatgagaattttgggttttaatcctcttggggcaccgttactttgcgagaagcaagacctaaaacttttttattatttgtaatgattcatttccctttgatgtctctatatattgagagtgctggaagccactattatggagtatgttgtttttacataatcttatgtaaaaaaaaaaaaaaaaaaaagggcgcgccgctctagaggatccaagcttangacgcgtgcatgcgacgtcatagctcttctatagtgtca

SEQ ID NO: 88049 - DNA, 745 bp, Arabidopsis thaliana columbia
  unsure (1)..(745): unsure at all n locations
gcggtaccggtttgngattcccgggtcgacccacgcgtccgtgcatgtcacttaacaccgagcagttgcagaatctatgtgataaaatgggaaacaaagaaggactagaattggcaaaggtgatcaaagatggatgcaacagtagtagaaatgatgaagccgaatctaaagaaaaagaaagtaagaagaccaacggtggcacagagcctacaacccgagtttcacagttagatagtagcactcagaagaaacaaccatggagcaaggaagagattgatatgctgagaaaaggaatgataaaatatccaaaggggacatcgcggagatgggaagttatttcagagtacattggtacaggaagatctgtagaggaaattctgaaagcaactaaaacagttctcctgcaaaaaccagattcagctaaagcattcgattctttcctcgagaagaggaaaccctctgcttcaatcacatcccctctctccacaagagaggagctcggagaatctctacccacaatgacgaccacaacaaatgcaaagccctctaaagagactgttggggggaaaagcttgagcagtcaaagctcagacaacaatggtgaagtaggtggaaggttcaaacgcagatagttgggtcgactgtgcaaagaaaaaagcttttggttccaagccttttaaaagaacttttccccgaaaggagacacaagccccaaagatgggggagtagaagtaagccttgcaag

SEQ ID NO: 88050 - DNA, 627 bp, Arabidopsis thaliana columbia
  unsure (1)..(627): unsure at all n locations
nnnnnnnnnnnnnnnnnnnnnnnnnnnnnnnnnnnnnnnnnnnnnnnnnnnnnnnnnnnnnnnnnnnnnnccacgcgtccggaatctttagattcgatttctcactcggagctactttgaattggaatctttagattcgtcactctcaatttctgtcctgcgtttttcagatctgggggaatctccgaatttggaattggaaaattcacagatgtcgaaaccttggggtggaatcggcgcatgggctgatgaggctgagcgtgccgatgaagagcaagctgctgaagctacagccacggcggcagattcacagagtttcccgagtctgaaagaggctgcgactgctaagtcttctaagaagaagaagaagatgactttatcggagtttaccaaaggagcatacactgctccgagttctgctggattgacgagagagcagatgcttcagctacctactggtccaagacaacgttctgaggatgaaatgcaacctggtcgtctcgggggtggattctcttcttatggtggaggaaggtctagtggacctccgggaagaatgtcacgagatcgagaggattctgatgggtcttggggcggtggtggtggtgggaagagatcttatggggg

SEQ ID NO: 88051 - DNA, 450 bp, Arabidopsis thaliana columbia
  unsure (1)..(450): unsure at all n locations
nnnnnnnnnnnnnnnnnnnnnnnnnnnnnnnnnnnnnnnnnnnnnnnnnnnnnnnnnnnnnnnnnnnnnnccacgcgtncagccacgcgtccagaatttttaaaattaggactttttgattttcgaaaattttggtgttaatggaaacagatagtatcgattccgtgatcgatgacgatgagatccatcaaaaacaccaattctcatcaaccaagtctcagggaggagccaccgtggtaatctctccggctacaagcgtttacgagctccttgaatgccctgtctgcaccaattcaatgtacccaccaatccatcagtgtcataatggacatactttatgttcaacctgtaaatcaagagtgcataatcgctcttgggaaagtacctgagtcgcttgagttaccgtgcaagtattacaatcttggatgccttggggattttcccttatta

SEQ ID NO: 88052 - DNA, 690 bp, Arabidopsis thaliana columbia
gacgacccacgcgtccgaagaaaagcacaattttggcgaaacccagtgagagagagacagagagaaaggagggaaattccagcttcccttttctctctcgttcttgctcttttgatctgcgtgaaaagaaagaatttttattttcccgacagagaaaagtcccaatttttaaaattaggactttttgattttcgaaaattttggtgttaatggaaacagatagtatcgattccgtgatcgatgacgatgagatccatcaaaaacaccaattctcatcaaccaagtctcagggaggagccaccgtggtaatctctccggctacaagcgtttacgagctccttgaatgccctgtctgcaccaattcaatgtacccaccaatccatcaggggcttcatggtcttgctcaatacttttgtcttcattttgaagcgtttcagctcggtatggctccagtttacatggcgtttctgagattcatgggcgatgaaaatgacgcacgaaactatacatacagtttagaagttggaggcagtgggagaaaacagacatgggaagggacaccaagaagtgtcagagatagtcacaggaaagtcagagaccgtcatgacggtcttataatccaaagaaacatggcactcttcttttccggtggagaaccagaaagaactggaacttagagtcactgggaag

SEQ ID NO: 88053 - DNA, 478 bp, Arabidopsis thaliana columbia
ctggtcagccatctttgtgatccacttgatttgtttgggatttgtgctcgcggtgcttggactcaataggtttagaatatcagataggttaaacatcgataggtacactcaagggttcttggagaatcataaaggtctaacagaggattactggcctctctatgctgttgctggtggcattggagtctttatcagttgggtttggtcattgctgcttggctcttacgccaatgagatgatgaaagtttcggttcacatcttaacaacctatctagctgtagttagtgtactatgtttctggtgcagactgttcttttggggcggtgcattcgctgttggatctctgttgcagttcttgtatgttatttcagttatagacagacttcctttcacaatgctggtcctacggaaagcgctgaaattagtctggggacttcctaaggtgataatggtggcacatgctttcacagtagtcatg

SEQ ID NO: 88054 - DNA, 1929 bp, Arabidopsis thaliana columbia
  unsure (1)..(1929): unsure at all n locations
ccctgacgtagcaaaacacacatcacacaccattttcacaacatcgtacttatcgccttcctctctctctcaatacctctctcaatttctggatccaccatgcaagctcttcaatcttcatctctccgtgcttctcctccaaacccacttcgcttaccatcaaatcgtcaatcacatcagctaattaccaatgcgagacctttgcgaagacaacaacgttccttcatctccgcatcagcatccactgtctccgctcctaaacgcgaaacagatccgaagaaacgagttgtcattactggtatgggtctcgtctctgtgtttggtaacgatgttgatgcttactacgagaaattgttgtctggtgagagtggaatcagtttgattgatcgtttcgatgcttccaagttccctactcgattcggtggtcagatccgtgggtttagctctgaaggttatattgatggcaagaatgagcgtaggcttgatgattgtttgaaatattgcattgttgctggtaaaaaagctcttgaaagtgccaatcttggtggtgataagcttaacacgattgataagaggaaagctggagtactagttgggactggaatgggaggtttaactgtgttttcagaaggtgttcagaatttgattgagaagggtcataggaggattagtccattttttataccttatgctataacaaatatgggttctgctttgttggcgattgatcttggtcttatgggtcctaactattcgatttcaactgcttgtgctacttcgaattactgcttttacgctgctgcgaatcacaatcatcgtggtgaagctgatatgatgattgctggtgggactgaggctgctattattcctattgggttgggaggttttgttgcttgtagggcattgtcccagagaaatgatgaccctcaaactgcttccaggccgtgggataaagcaagagatgggtttgttatgggtgaaggagctggtgttctggtgatggaaagcttggaacatgcaatgaaacgtggtgctccaattgtagcagaatatcttggaggtgctgttaattgtgatgctcaccatatgactgatccaagagctgatggtcttggggtttcttcatgcattgaaagatgcctggaagatgctggtgtatcacctgaggaggtaaattacatcaatgcacatgcaacttccactcttgctggtgatcttgctgagattaatgccattaaaaaggtattcaagagcacttcagggatcaaaatcaacgccaccaagtctatgataggtcactgcctcggtgcagctggaggtctagaagccatcgccaccgtgaaggctatcaacactggatggctgcatccttccatcaaccaatttaacccagaacaagctgtggactttgacacggtcccaaacgagaagaagcaacacgaggttgatgttgccatatcaaactcgttcgggttcggtggacacaactcggtagtcgccttctctgccttcaaaccctgatttcttcataccttttagattctctgccctatcggttactatcatcatccatcatccatcaccaccacttgcagcttcttggttcacaagttggagctcttcctctggccttttgcggttctttcattccccgtttcttacggttgctgagatttcagattttgtttgttctctctcttgtctgcggaatgttgtgtatcttagttcgttccatatttgcgtaatttataaaaacagaaactgagagaatcttgtagtaacggtgttattgtcagaataatccaattaggggattctcatcttttatttctcaaaaaaaaaaaaaaaaaaaaagnnnnnnnnnnnnnnnnnnnnnnnnnnnnnnnnnnnnnnnnnnnnnnnnnnnnnnnnnnnnnnnnnnnnnnnnnn

SEQ ID NO: 88055 - DNA, 555 bp, Arabidopsis thaliana columbia
cggggcgacccacaccttccgcgaccccgtggttttggcttctctcttccaatcatccttcaagctcatctttttcttctacccaataacgaaagtctcctcctttactaatgggttgcttcagcagtaaacaccggaaaactcaaaacgacggcggagaaaaatcaatcccgatcaatccagttcaaacccatgtagtccccgagcatcgtaaacctcaaaccccaacaccaaaacccatgactcacccaatccatcagcagatttcaacaccgtcttcaaatccagtctcagttcgagatccagatacgattttaggtaaacccttcgaagacatcaggaaattttacagcttggggaaagaattaggtcgaggtcaatttgggattacgtatatgtgtaaagagattggtactgggaacacttatgcttgcaaatcgggtcttaagaggaagctaattagtaagcaagataaagaagatgtgaagagagagattcagataatgcagtatttgtctggacaacctaacaatgttgagatcaaaggtgcttatg

SEQ ID NO: 88056 - DNA, 361 bp, Arabidopsis thaliana columbia
tcagcttcaaagccctaactctgaatcgtcgtcctcaaaccaaaatcgcgagtctctgaagtaagaagattgattcatctatggcggatgttgagaatcaacaggattcttcgtttcctgtgaagcgaaaatcggatctgttttgtcaagaccaggataatgtgacaaacaaggctcagaagcttaatccttcattgaattctgctgattctgagtccaaagacggagaaactaatggaagtggccaaatcgagaatctgaattcttccaccgaggaaacgattggagcataatcatcggttttatcggagaaagcatctgaagaggttgagagtggcgtaatcggcgatgttggagctga

SEQ ID NO: 88057 - DNA, 531 bp, Arabidopsis thaliana columbia
  unsure (1)..(531): unsure at all n locations
nnnnnnnnnnnnnnnnnnnnnnnnnnnnnnnnnnnnnnnnnnnnnnnnnnnnnnnnnnnnnnnnnnnnnnnnnnnnnnccacgcgtccgcccacgcgtccgcttagatttcatgggttggtaagaatcaatcaatttgggaggtggagtatagtacaagtacttcaatttgcattgaaccctcacattgaatcatctgatttgcagaaaaaggagatctctttatgtaaaagtctctgagaattttggtttaaagagaggattttacggagatgggtttgttggaatcggtgaaatcaatcaactgggaacatgaatcatctccggtttatcaggattttcgagttcttcctctcttcgctgngttcttcccttcgattgagtttctcctgggtacattgcgggtggacaaattgggggagtattgggtctatcgggagacatggcaggggatgtggggtgagacccagggaggtaacggagggacgccggggaagcggccggatcggcgagtggacggggggaggctggg

SEQ ID NO: 88058 - DNA, 405 bp, Arabidopsis thaliana columbia
gatgatgattttaaatttcccttttcgaatatattcgtttaattgtctctttatataattaacagtttttgttaatgggaatcgcaggtaacgattgagaagaatctctcgtttctccactgagagaatcacattctgagagatcagacaagaagaaacaatggtggaaggaggaattgcgaaagcagacaaaacagagttcacagagtgttggagaacaacatggaagacaccttacatcatgcgacttgctctctccgccggaatcggaggtcttctcttcggttacgataccggagtcatttccggagctcttcttttcatcaaagaagattttgatgaagttgataagaaaacatggcttcagtcaactattgttagtatggcagtggctggagccatcgt

SEQ ID NO: 88059 - DNA, 831 bp, Arabidopsis thaliana columbia
  unsure (1)..(831): unsure at all n locations
nnnnnnnnnnnnnnnnnnnnnnnnnnnnnnnnnnnnnnnnnnnnnnnnnnnnnnnnnnnnnnnnnnnnnnnnnnnnnnnnnnnccacgcgtccgcactaatccgctaaatcattcttcttcatctctctctcattcacaattcccgaaattctctcaaatcacagatccttttagggtttttccactgtttctaggttttttttattgctcaaatctgatcaatggatagttgtctctctaatcaaacggcgcttcagtttctcccgtcgcgttccaggagacagagcggcgatggaggcggtggttttgttattccggcgaagaggaagatccagtatagttcgatggttgtggttgcggcggcgggacagagtcggtgtgagcctggaagcagtctaaacgcgccgcttgagccacgatcggcgcaggggaggtttctgagaagcgtgttgctaaacaaacggcagctatttcattacgccgccgctgatgagctaaagcaactggctgatgatagggaagctgctttagctcgtatgtctctcagctctggttccgatgaggcttctctccacagaaggatagctgaactcaaggaacgctactgttaaactgcagtccaagacataatgtacatgttaatcttttacaatactccgagataagagtccctcttgttccaagctatccagatgcatctataatggaagactcgagatctggccttaanagactgggagttagagtcaatttacagctgcgatcccttgagatcatcaaagaacacgtagcgcagtcatcggattacgggtcaactcatgtgtgactga

SEQ ID NO: 88060 - DNA, 889 bp, Arabidopsis thaliana columbia
  unsure (1)..(889): unsure at all n locations
nnnnnnnnnnnnnnnnnnnnnnnnnnnnnnnnnnnnnnnnnnnnnnnnnnnnnnnnnnnnnnnnnngcgccacgcgtccgcggacgcgtgggcggacgcgtgggcggcgatggaggcggtggttttgttattccggcgaagaggaagatccagtatagttcgatggttgtggttgcggcggcgggacagagtcggtgtgagcctggaagcagtctaaacgcgccgcttgagccacgatcggcgcaggggaggtttctgagaagcgtgttgctaaacaaacggcagctatttcattacgccgccgctgatgagctaaagcaactggctgatgatagggaagctgctttagctcgtatgtctctcagctctggctccgatgaggcttctctccacagaaggatagctgaactcaaggaacgctactgtaaaactgcagtccaagacataatgtacatgttaatcttttacaaatactccgagataagagtccctcttggtccaaagctatccagatgcatctataatggaagactcgagatctggcctttcaaagactgggagttagaggcaatttacagttgcgatacccttgagatcatcaaagaacacgtagcccagtcatcggattacgggtcaactatgggtgactgacaattgggcacaacgcagatcagaaacggatttaagaaagatatgcggcttgattttgacggtacttctgaaaaagctccctaaggccacttgggggtccttaaaatattatggagcggtttcgaaaggccatcttggaggctttccaacggcccggcagattcaacagcggggtggaattacttcaatttgtccggaattggagatggaaaacaggcaggggggggattcttgaaca

SEQ ID NO: 88061 - DNA, 563 bp, Arabidopsis thaliana columbia
  unsure (1)..(563): unsure at all n locations
nnnnnnnnnnnnnnnnnnnnnnnnnnnnnnnnnnnnnnnnnnnnnnnnnnnnnnnnnnnnnnnnccacgcgtccgctctgcgtttctttctcggggaaaaataatatctgagaagaagattcgagagagagagatctgaacggtttttcgcttagtctccaatgggaacgctacagtcatggcgaagagcttacggagccttaaaagacaccaccaaagtcggccttgtccgagtcaatagcgattacgccgaattagatgttgccatagtgaaggctactaaccatgtcgagtgtcctcccaaagatcgtcatctcaggaaaattttcctcgcaacgtcagcgattaggcctcgagcagatgttgcttactgcattcatgctctctcccgacgattacacaaaaccagaaattggacggttgcattaaaagcactgctagttatacaccggcttctgagggatggtgatccgacatttagagaggagctattgaatttttcgcaaaaaggacgcattatgcaaatttctaatttcaaggatgactctagcccagtcgcatgg

SEQ ID NO: 88062 - DNA, 537 bp, Arabidopsis thaliana columbia
  unsure (1)..(537): unsure at all n locations
nnnnnnnnnnnnnnnnnnnnnnnnnnnnnnnnnnnnnnnnnnnnnnnnnnnnnnnnnnnnnnnnnnnnnccacgcgtccgctcattttacttatctgaagttcgtctacgatggaggaagagaaggtgagggttcgtctggtgtttgaagaccgacggattctgagtaagtatcaaaagaagcaaggtttaacacggagctgggttgttctaaatcgtaaatgtcaccgaactatatcagagttttctgatcatatctttcacacatttagcctctgtgaagcgtgtcctcatggcctctctctatctatggaaggtttcgttttgccacctttcgagtccagctgtgtattgaaggataaagatatcgtttgtgttaagaagaagaaagagtctttgttggagattgttggggaagacagtgatgagaatgtttacaacgctattgaggttgaggaaaggcctcagattcgtcctggtgaaatgctgcttgctaatgaggaattccagaaggaaactgnaggatatgaaagtgagt

SEQ ID NO: 88063 - DNA, 1796 bp, Arabidopsis thaliana columbia
  unsure (1)..(1796): unsure at all n locations
cgggcttattaatgtcatcgagacgataatctcttatttgtcatctccttcatctctcaggtaaaaaaactgagtcgagatttggtgacgtgatgaatcatttggtgataatctctgtgttcttgagctcagtattgttgttatatagaggagaatctggaatcacaagtagttttattcgatctgaatggcctgcggttgatataccacttgatcatcatgttttcaaagtcccaaaaggatataatgcaccacaacaagtacacataactcaaggtgattatgatggtaaagctgttatcatctcttgggttacacctgatgaacctggttctagccaagtacattacggtgcggttcaggggaaatatgagtttgttgctcaagggacttaccataactacacgttttacaagtataagtctggctttattcatcactgccttgtctctgaccttgagcatgatacaaaatactattacaagattgaaagcggtgaatcttctcgagagttttggtttgttacaccaccacatgtacatccagatgcttcctacaagtttggtattataggcgatatgggtcagacattcaactcgttatccacgttggaacattacatggagagtggagctcaggctgttttatttcttggagatctttcttatgctgatagatatcagtataatgacgttggtgtgagatgggatagctggggtcgttttgtggagcgtagtaccgcttatcaaccgtggctttggtctgcaggaaatcatgaagtagattacatgccatacatgggggaggtgacacctttcaggaattaccttcagcgttacactacgccttacttagcctcaaaaagtagcagtcctctttggtacgctgttaggcgtgcatctgctcatatcattgtcctctccagctattcgccttttgtgaagtataccccgcaatggcactggcttagtgaagagcttacaagagttgatagggagaaaacaccttggctaattgttttgatgcacgtcccaatatacaacagtaatgaagcacatttcatggagggtgaaagcatgcgagcagcttttgaggagtggtttgtccaacacaaagttgatgtaatctttgctgggcatgttcatgcctacgagagatcgtaccgaatatcaaatgtgcggtataacgtgtcaagcggagatcgttacccagttccagataagtcagcgcctgtttatatcacagttggagacggaggaaatcaagaaggtctggctggaaggtttacggaaccacagccagattattctgcatttcgggaagctagctatggccactctactctggatataaagaaccgaacacacgctatataccactggaaccgcaatgatgatgggaagaaagtggcaacggatgaatttgtattacacaaccagtactggggaaagaacattcgacggagaaagcttaagaagcattatatcaggagtgttgttggtggctggatcgccacttaattcactaagtctgcctcatgctttgtatcaaagtgtgtgaggatattcttttaactcggaacttattacttaatttgatgttaaatctctttcccgcttaagttttcagcaatctggaatatgaagggaattatgtattcttatcagtcttttgatgaagtgaggtctacttctgggaaaaaaaaaaaaaaaagnnnnnnnnnnnnnnnnnnnnnnnnnnnnnnnnnnnnnnnnnnnnnnnnnnnnnnnnnnnnnnnnnnnnnnnnntagaaatcg

SEQ ID NO: 88064 - DNA, 756 bp, Arabidopsis thaliana columbia
  unsure (1)..(756): unsure at all n locations
ccataatttaaattgtggggatggtctaagacctcacgctcccatatgaggcccaccccccaagggctttgaccccctattattgcctcaccgggcttgtaatgtttgtgagggaaatgggaatcgacannnnnnnnnnnnnnnnnnnnnnnnnnnnnnnnnnnnnnnnnnnnnnnnnnnnnnnnnnnnnnnnnnnnnnnnnnnnnnnnnnnnnnnnnnnnnnnnnnnnnnnnnnggcccctttccacgcgtctgaaagagccgaccccccgcttttatcccactggacccgcattgatgatgggaagaaagtggcaacggatgaatttgtattacacaaccagtactggggaaagaacattcgacggagaaagcttaagaagcattatatcaggagtgttgttggtggctggatcgccacttaattcactaagtctgcctcatgctttgtatcaaagtgtgtgaggatattcttttaactcggaacttattacttaatttgatgttaaatctctttcccgcttaagttttcagcaatctggaatatgaagggaattatgtattcttatcagtcttttgatgaagtgaggtctacttctgggattatgcatttggtgaataatgtattccttagacctggtgctaaggaattgtttcacatgggggttgagtaaggaaaaaacgaacgcatagggcggccgctctagaggatcccagcttacgcacgcgtgcatgcgacgtcaagctcgtcttgtc

SEQ ID NO: 88065 - DNA, 405 bp, Arabidopsis thaliana columbia
tagactcgattcgtgcgactcgggaagactaggctcgtttaaaggttcacgcttttgatatttcgagctcctagagacctagactctagtcctgaggctgattggtagaggaaattggaaaagcttggattgaaaactatggaagcgaagaaagtgacagaagaggaagaagagacgtggaggagagagatagtaacaagcgttatgagattagtgagtacgagattgcctcagacagatctaatttctctacttctggttagcccatggctttatcgcaccctcatctcctatccttcaatctggctgaccatcaatttgcgcgagatgaccaatgcaggggatcggcttttagctgctctgtccttgccaagatatcgacaagtgaagcatatcaatcttgaa

SEQ ID NO: 88066 - DNA, 528 bp, Arabidopsis thaliana columbia
  unsure (1)..(528): unsure at all n locations
attacccccgtggggcggaaacttggaccgatcttcagctgttccaagcctaaatacgtcgtcggttttgtctacccatcaccaagagaacatttccacagatttgggagctccgcccggttcgtttcatcatcaatccagtgcaggtacaacgccggcgaacgttggtggtggtagctccgccgtggaattggatagttacccgagcttcccaacactcgaatcatggaaagttatgtgatcgatctgattttaagattagtgtttatgtagagatgtaatcccttttgtttttttcctttgtgtttctcattttgttatgaagaatcttgttttagtccttaagcttatgcagctatggagtctcttgttcatacttttggggaaatcaaatggtttattggaaaaaaaaaaaaaaaaaaaaaaagggcgaacaannnnnnnnnnnnnnnnnnnnnnnnnnnnnnnnnnnnnnnnnnnnnnnnnnnnnnnnnnnnnnnnnnnnnnnnnnnnnnnnnnnnnnnnngg

SEQ ID NO: 88067 - DNA, 598 bp, Arabidopsis thaliana columbia
  unsure (1)..(598): unsure at all n locations
taggtacaactatagaagagttatgacgtcgcctgcacgcgtacgtaagctcggaattcggctcgagcacattcctttactcactctctctctctctctaaaaacagagctcaacaataatgatccactaaaaaagattctcttttctcttcttctccggtgatttacttacttaacaatcatggcgtcgtcggagggattagcaagcgttgatccttggtcattccgtcaaaacttcaacatcgattcgtggctactctctgattccttctcacacgacagtgatatactcgctaaagctcttcacagatccatctccacttccaccgaatcatctcctctttctccttcatctttcttcgactcttcaaccgccgccgtcgatttttctcctcctcaaactctctccaacgtctctttcggctcagatccagaaatccccgccgctagtgctcttggtctcgggaaacgaaaacgtggtcctggtgtttccggtggtaaacaaacgaaacgccgatctcgagtttctaataggagttctcaaaccaggttttaacgggggaggggtaaattccggaanngggtnaaaaggaccggg

SEQ ID NO: 88068 - DNA, 785 bp, Arabidopsis thaliana columbia
  unsure (1)..(785): unsure at all n locations
ccgcatatatctgtaagtctccaatcattcactcacgatattctctttcttatcttttngatctcaacgcgcgtgattttttctcctcaacttctccacgtctctttngctcagatccagaaatccccgccgctagtgctcttggtctcgggaaacgaaaacgtggtcctggtgtttccggtggtaaacaaacgaaacgccgatctcgagtttctaataagaaatctcaaaccacgtttataacggcggacgctgctaatttccggcagatggttcaacaagtcaccggagctaagttcctcggttcttccaacagcattttcgcaccgattgtgaagccggagccacaccgtctcgctagtagattaccaccgtcgtgcggaaacttggaccgatcttcagctgttccaacgctagatacgtcgtcgtttttgtctaaccatcaccaagagaacattatcacagatttgggagctccgaccggttcgtttcatcatcaatccagtgcaggtacaacgacggcgaacgttggtggtggtagctccgccgtggaattggatagttacccgagcttcccaacactcgaatcatggaaagttatgtgatcgatctgattttaagattagtgtttatgtagagatgtaatcccttttgtttttttcctttgtgtttctcattttgttatgaagaatcttgtttaagtcaaaaaaaaaaaaaaaaagggcggccgctctagaggatccaagcttacgtacgcgtgcatcgacgtcatagctgttctatag

SEQ ID NO: 88069 - DNA, 299 bp, Arabidopsis thaliana columbia
gataactaacgaagctgtagctacctcctctctcaacgtatggcccggaagaagatcagagagtatgactcaaagagactggtgaaagaacacttcaaaagactctctggtcaagaactgcctatcagatccgttcagattaacgcaagagactgatctaaatgagctagtagagagagagccttggttctcatctgcagaagcttgtggtgaaacctgatatgttgttcggaaagcgtggcacaagcggtttggttgcaatgaacttagatatcgctgatgttgcaactttcgtgaaa

SEQ ID NO: 88070 - DNA, 1004 bp, Arabidopsis thaliana columbia
  unsure (1)..(1004): unsure at all n locations
agcatcttcagattctttcaccgtaaatctaagaaaggttctgtgtttagggttctggttctgggaagctcgttctcaccggaaaaccgaagaatatgatcggagtcgggaaaatgaaacagtactccaacgtccttgacaagcctctcagcaaaggcaagcaagaggtgagcttgaccgcatttgctttcttattctcggagctcgttcagtacaatcaaacccaggttgacaatatagctgaacttgaaagaagactagaggatgctgggtatgcagttggatctcgagttctagagcttctttgcaaccgggaaaagggaaacagaagagagacacggttactgggaattctgtctttcgttcacagtactgtgtggaaagtgttgtttggaaaggttgctgattcacttgaaaaaggaacagaacatgaagatgagtacatgatcagtgaaaaggagcttcttgttaacaggttcatttcgattccaaaagacatgggaacattcaactgcggagcgtttgttgctggcatagtgaagggagttctggataacgcagggtttcctgctgtggtaacggctcattttgtacccattgaaggacaacaacgtcctcgaactactattttgatcaagtttgctgatgaggtgcttaagagagaggcacggctaagccaatgagagtactatggtcacgagtttccacgatctggaaactattggctttatgtgaactgcttgtgcaaatctgctatctgtttttggatgattatataacattttgaattgagctgcaaagccattgacccgtgcattgatgtaaacaacatacatatcctcttgttacaattgcagcttatgagacaacacttttactaaaaaaaaaaaaaaaaaggnnnnnnnnnnnnnnnnnnnnnnnnnnnnnnnnnnaannnnnnnnnnnnnnnnnnnnnnnnnnnnnnnnnnnnnnnnnnnnnnnnnnnnnngtagctggaatatcat

SEQ ID NO: 88071 - DNA, 613 bp, Arabidopsis thaliana columbia
  unsure (1)..(613): unsure at all n locations
nnnnnnnnnnnnnnnnnnnnnnnnnnnnnnnnnnnnnnnnnnnnnnnnnnnnnnnnnnnnnnnnnnnnnnnnnnnccacgcgtccgtacggaagacgacagaagggtacggctgcgagaagacgacagaagggtcgcgtacacaactgcgaatgttgagatcttggaagcaatagctggggaaaccagagtccacattatcgattttcagattgcacagggatcacaatacatgtttttgattcaggagcttgcgaaacgccctggtgggccgccgttgctgcgtgtgacgggtgtggatgattcacagtccacctatgctcgtgggggaggactcagcttggtaggtgagaggcttgcaactttggcgcagtcatgtggtgtcccgtttgagtttcacgatgccatcatgtctgggtgcaaggtgcagcgggaacatctcgggttggaacctggctttgctgttgttgtgaacttcccatatgtattacaccacatgccagacgagagcctaagtgtttgaaaatcacagagacaggcttctgcatctnatcaanagcctttccccaaactggtactctagtaggcaagattcaacacaacacttgcatcna

SEQ ID NO: 88072 - DNA, 1336 bp, Arabidopsis thaliana columbia
  unsure (1)..(1336): unsure at all n locations
gtcgacccacgcgtccgctcaccatcaaacaactacaacatctgcggttagtatgttgaaagtagagagtaactgggcacaagcctgtgatacatgccgatcagccgcctgcaccgtgtactgccgggctgattctgcctacttgtgctccagttgtgatgctcaagttcatgctgccaatcgtcttgcttcccgccatgaacgtgttcgagtctgtcaatcatgtgagcgagccccggctgcctttttctgcaaggcagatgctgcatctctatgcacaacctgtgattcagagattcattccgcaaacccacttgctagacgccatcaacgagttccaattctgcccatttctgagtactcttacagttccacggccactaaccattcatgtgagacaacagtgacagatccagagaacagacttgtgcttggtcaagaagaagaggatgaagatgaagcagaggcggcttcatggttgttgcctaattcagggaaaaacagtggtaacaacaatggcttctcgattggggatgagtttctgaaccttgttgattatagttcgagtgataagcaattcacagatcaatccaatcagtatcaactagactgcaacgtacctcagaggagctatggggaagatggagttgttccacttcaaattgaagtatcaaagggcatgtaccaagagcaacagaactttcagctgagtatcaactgtggctcctggggagctcttcgaagctccaatggttccctcagtcatatggtgaatgtttcatctatggacctgggagttgtgccggagtcaacaacgagtgacgcaacagtatcaaacccaagatcgcccaaagcggtaacagaccaaccaccttaccctccagctcagatgctcagtccaagggacagagaagctagagtcctgagatacagagagaagaagaagatgaggaaatttgagaagacgataagatatgcttcaaggaaagcgtatgcagagaaaagaccacggatcaagggccggtttgcaaagaagaaagatgtcgatgaagaggcaaaccaagctttctccacaatgataacatttgacaccggatatggaattgttccatcattctgatgctgctatggcaaaactagactgcatgcttgtaaattacttctggtttgaaattcctgcaagttattaccacggttttatgcatatagggtctgtagtttactagttttgcctaactagtacgagttaattagatatacactcatacttagctgctgtaagttaatacaaattttgcccacttggtagnnnnnnnnnnnnnnnnnnnnnnnnnnn

SEQ ID NO: 88073 - DNA, 537 bp, Arabidopsis thaliana columbia
  unsure (1)..(537): unsure at all n locations
aacccnggggccntttnccnccccggggncnttgggnccccccgggaantgggnnggcccccccccaaagggtggngaacccccngaaacccggggntcccgatggcccggggnctatccgggcattnccccccggtccagtgngccgntgaaggngtccattggaaaagngttgnctgggagatgaagtttccaggggagtgttgaagtgatactgtcgaatgatggtccaggtgttggagctgcattacttgctgcttctcactctccagtatctcgaacttgaagatgactctgaaacaagttaattttaaaagccttttttttgtgtttaaccttcttctttgttttgccgttagggtttaaacaaataaaaaaaaagtaagaaggtaaaaatgcccttttgggaaattttatttttgacaattttcaggaacaataaaacctggattcttcatcaaagctctgggaaattcaaacgaccagccaatgttgtagaactatacatatatattcgagttctttctatgaaaaaaa

SEQ ID NO: 88074 - DNA, 1883 bp, Arabidopsis thaliana columbia
cagtgtgagtaatttagatcatctctagcgttcttaaagtttccaactttttttttttattaatttgggccaacttttttgttttattaatttgggccaaccttttttggtttgagaattgggcgagggagaaagatgggtaaagtggcagttgcaacgacggtagtgtgttcggtggcggtatgtgcggcggcggcgttgatagtacggaggagaatgaaaagcgcagggaaatgggcaagagtgatagagatattgaaagcctttgaagaagattgtgcaacgccaattgccaaattgagacaagtggctgatgctatgactgttgagatgcatgctggtcttgcttctgaaggtggcagcaagcttaagatgcttattagctacgttgataatcttccttctggggatgagactggttttttctatgcgttggatctaggcggaacaaacttccgtgttatgcgtgtgcttcttggtgggaagcacgaccgtgttgttaaacgagaattcaaagaagaatctattcctcctcatttgatgaccgggaagtcacatgaattattcgattttatcgttgatgttcttgccaagtttgtcgctacagaaggcgaggactttcatctcccacctggtagacaacgggaactaggtttcactttctcatttccggttaagcagctatctttatcctctggcactctcatcaactggacaaagggcttttccattgacgatacagttgataaagatgttgttggagaacttgttaaagctatggaaagagttgggctggacatgcttgtcgcagcgcttgttaatgataccattggaacacttgcgggtggtagatacactaacccggatgtcgttgtcgcagttattttgggcaccggcacaaatgcagcctatgtcgaacgtgcacatgcaattcccaaatggcatggtttgctacccaaatcaggagaaatggtgatcaacatggaatggggaaacttcaggtcatcacatcttccattgacagagtacgaccactctctagatgtcgatagtttgaatcctggtgaacagattcttgagaaaatcatttccggaatgtatctgggagaaatcttgcgtagagttcttctgaagatggctgaagaagctgccttctttggcgatatcgtcccacctaagctgaaaataccattcatcataaggacccccaacatgtctgctatgcacagtgatacttccccggatttgaaggttgtaggaagcaagttaaaagacatattggaggtccagactagttctctgaagatgaggaaagttgtgatcagcctatgtaacatcattgcaagccgaggagctcgtttatctgctgcggggatctatggaatcctcaagaaaataggaagagacgcaacaaaagatggagaagctcagaaatctgtgatagcgatggacggtgggctattcgagcattacactcagttcagtgagtcgatgaagagttcattgaaagagttgcttggagatgaagtttcagagagtgttgaagtgatactgtcgaatgatggttcaggtgttggagctgcattacttgctgcttctcactctcagtatctcgaacttgaagatgactctgaaacaagttaatttaaagcttttttgtgtttaaccttcttcttgttgcgtaggttaacaataaaagtagaggtaaatgcctttgggaaattttatttttgacaattttcaggaacaataaaacctggattcttcatcaaagctctgggaaattcaaacgaccagccaatgttgtagaactatacatatatattcgagttctttctatgaaaaaaaaaaaaaaaaaaaaaccttaaattactcacactggc

SEQ ID NO: 88075 - DNA, 411 bp, Arabidopsis thaliana columbia
ctgaaactaagaagccatggatgctcaatatcaagatctacctcctctcaaaagattaagactgttgcagagagatctcgaagctgctcaacagcaccagctaccgaaccaaccggagatgaagtcgttgcagttgccggcaaagaagaggaagcagactcgtgttgattatgacgatgacgacgcagagaactccaatcccacctatcattgtcttccggcgaagaaaaggatctgggcgattgatcccgatcttctctccggtggtggtaaccccttttcgccttttgatctaaatgtagagtataagccttatgttgaagagaaatcaattgagaaaaagtcaactctaaatgttgaatctagtctagaggtagaagatgatgatgattaagagaatattgttctctt

SEQ ID NO: 88076 - DNA, 488 bp, Arabidopsis thaliana columbia
ggtaaagcaagatggatcagacgtaacgtgagtacaactacacaaggtagtagaagcaacactaagagcagtgtgttgggaggaacagttcctgtaaccaggattatagatgaagagagtagaaccaaggtacagccttttggtaatcttcagcaacggcttgcgcaagataaagatctgtctaagctcctcacggttatagtctctgatcttgagacaactggtttgcatcggaaaaatgagcggataattgaaattgcagctcaggatatagctggtggtgggtacagcacatttcagactcttgtcaacccgggtgttgttcctataactaacgcacatatccatggaatcaggaatgatatggtctgtcgacccgaggttccaaggatggaagagctgataccgatatttctgcggtatgttgagagtcgacagaagcctggaggttatgtgatgttagttgcacacaacggcaaatcatttga

SEQ ID NO: 88077 - DNA, 681 bp, Arabidopsis thaliana columbia
  unsure (1)..(681): unsure at all n locations
tcaatctcaaatatgctctctccatctctctattaaacagtcgatttcttacaaaaattctcacttccgtgcaagcaaatgcagtcttgtttcgagtttgattcacacaagattggaatagaggagacattgtctctttgattcttgagcttatttgggggagagaaagagagagcgagaggatctgatgtgtatctcaatctcgcaagtctctagattgagaatccattcatttggaagttcttgctgtgagcgtgttcatggatggatcaagaacagctctagcttgaagctgcttgatgttagagcttcttctgttgatggtaaagcaagatggatcagacgtaacgtgagtacaactacacaaggtagtagaagcaacactaagagcagtgtgttgggaggaacagttcctgtaaccagggattatagatgaagagagtagaaccaaggtacagccttttggtaatcttcagcaacggcttgccgcaagttaaagatccttgtctaagcgccccaccgggtataggctctgatctttgaaacaactgggtttgcatcnggaaaaatgagcngataatttgaaatttgccanctccggaatntaacttnggtgggtnggggttcnaccaccattttcaaaanctcnttgttccacccccgggggtgtttngtttcccc

SEQ ID NO: 88078 - DNA, 907 bp, Arabidopsis thaliana columbia
ccgcggacgcgtgggcggacgcgtggggcttcgtcctttgcgtgacagggaatctctccgttggggttttgtggctgcctacgatttctgcaagcaaaaccacagaactcaatctaattaattagccgagtcgactcaatccgagtttctacagccgcacgagggaatcatgaatcggctgagaggccgaggtacaccgattctgggttccgcactcgtgcctcagctgaagaaaaaagccctaaattcattggtcgccgtccaggattcatatctatccaccaaggacttgttcgagaggcacagggtcgtgtttacagttggaacttctatagcatctgttgctacggcttggattggttactcattacggcattacaatgaaactaggaattaatcagaggctggagtccattgacgaatgcgatgaaaaaacaacccaagagttaggaccgggggggaacctgaagaagctccgttgatccagtcggttccaggttcactacaacaattgccacagcgggaaccactttgatcctcgggtaattgggttgggttggccgaggcgggttatgggttgcaaataggaagtttggaagggagcaaatgagattggccgggcagttaaaaccgagagaatggaagttactagggaggataaaacctcgagcttggccaacaacaaagtttctcagacgaccattcccaagacagaacaaaacaacagaaaatgctttgaaggcaccagaatgtggaggttgaaaaattgaagaacaatctaaagaagtagctgatcggaacataaaagtgcacatgggttttgtcttgaagccaaaggctcttctgtctttttactcctttatgaggaaattcagcccacctaattcgaaaatcaaatagatttatg

SEQ ID NO: 88079 - DNA, 602 bp, Arabidopsis thaliana columbia
  unsure (1)..(602): unsure at all n locations
nnnnnnnnnnnnnnnnnnnnnnnnnnnnnnnnnnnnnnnnnnnnnnnnnnnnnnnnnnnnnnnnnnnnnnnnnnnnnnnnnnnccacgcgtcccaaaaagtctccgacactctctagatttcctttgctccttcgttctggccatggcaatggcaaaactcgcaattttcaccactcttatggccatactcgtaatgacatctcaaggaaggattccaacagaaggaggagagaaagaagcagaggctgacagaattacgtcacttccaggtcagcctaacgtcacgttcgagcagttttccggctacgtcaccgtcgataaactctccggaagatcactcttttattggctcactgaagcttctgacctccctctctccaaacctctcgtaatttggctcaacggaggaccgggatgttcgtcggtagcgtacggtgcgtcggaggagattggaccattcaggataagcaaaggtggttccggtttgtatctcaacaagttcgcatggaactcaatctccaatctcttgttcctcgaagctcccgccggcgtcggcttctcttacactaaccgctcctccgatctcttaacaccggtgatc

SEQ ID NO: 88080 - DNA, 387 bp, Arabidopsis thaliana columbia
cccacgcgtccgtcctaagccatgaaatagtcgcaaaggccctttcttcgtcttcgtttctaattgctttcgacgacaatcgatcgtagagaagtctacctcgtagacatctctctcacaaatccaattcaattaccattgtttgttattatctgatgtcgaatatgcaattctctcgtggttttaatccctttgttatcctcttctgtctcgccgtggttgcaccaattatatcggctgatgtcgctatcttgagaacggactattaccaaggaacatgtcctgatttccacagaattgtgcgtgaagccgttacaaccagacaagtccaacaaccaacaactgcggccgggaccctccgtctctttttccatgattgtttccttg

SEQ ID NO: 88081 - DNA, 2726 bp, Arabidopsis thaliana columbia
caaaaactacgtgcggggttccgattcaaaatccgccggggacgcagctactccctccgccaaatagctttcaacggtaaattttcacggcgccggttgtcttccttctttgttcttctcaggaatcgctaattgataacttcaattggaagatacaagacaaaaaaagaagatcaatatgggaaacggtgaaagaggaagacctaacaagaagatgaagtatggtggcaaggatgatcaaaagatgaagaacatccaaaacgctgaagattactatgatgatgctgatgaagactctcgtgatggtgaaggagaggagaagaagagagattttactaaattggagttgaagccagatcatggaaacaggcctttgtgggcttgtgctgatggaaggattttcttggagacattttctcctctctataaacaagcttatgactttcttatcgccattgctgaacccgtttgcaggcctgagtcaatgcacgagtataatttaaccccacactcgttgtatgctgctgtttccgttggtcttgagacagaaactatcatttctgttttgaataaactgtctaagactaagctacccaaggagatgattgagttcatccatgcttctactgctaattatgggaaagtaaagctggttttgaagaagaatcggtattttattgagtccccattcccagaggttttgaaaaggcttctcagcgacgatgttataaaccgagctagattttcttctgagccatattatggcggtgatggattctcggtcggcagaacatgcggtgaacttgaagcaggacccggggagctattgaatgaagcggaatttgcagcagcagcagaagagaaagaaactcactcatttgagattgaccctgcacaggtggagaatgtgaagcagcgttgcttaccaaatgccttgaattaccctatgttagaggaatatgacttcaggaacgacaatgttaatcccgatcttgacatggaactgaagccccatgcacaaccgaggccataccaggaaaaaagtttgagcaaaatgtttgggaacgggcgagcaagatctgggattatagtgttgccttgtggtgctggtaaatctctagttggtgtttctgcagctgctcgtataaagaagagttgtctttgtttggcgacgaatgctgtctcagtggatcagtgggccttccagttcaagttgtggtctactataagagatgaccaaatatgtcgtttcacttctgatagtaaagaacgattccgtggaaatgctggtgttgttgtgacaacctataatatggttgcctttggtggtaaacggtctgaggaatcagagaagattatagaagaaatgagaaacagagagtgggggttactgctcatggatgaggtgcatgtggttccagcccatatgtttaggaaagttatcagtatcacaaaatctcactgcaagctaggacttacagccacccttgtgagagaagacgaaaggattacagatttgaacttcctcattggcccgaaactctatgaagccaattggctagatttagttaaaggaggctttattgcaaatgttcagtgtgctgaagtatggtgtcccatgaccaaagagttttttgcagaatatctaaagaaagagaactccaagaaaaagcaggcactttatgtcatgaaccctaacaagttcagagcctgtgagtttctgattcgtttccatgaacaacaacgtggggataaaatcattgtctttgcagacaatctttttgcgcttacagagtatgcgatgaaactccggaaaccaatgatttatggtgcaaccagtcatatcgaaaggacaaaaattctcgaggcgtttaaaaccagtaaagacgtgaacactgtcttcctgtcaaaggttggtgataactccatagatatccctgaagctaatgtgattatccagatttcgtcacatgctggttctagacgtcaagaggctcagcgtttgggtcgtattcttagggctaagggtaaactcgaagatagaatggccggtggaaaagaagagtacaatgcattcttctactcacttgtttcgacagatacacaggaaatgtattattcgacgaaaagacaacagttcttgatagaccaaggttacagctttaaggttataacaagcctcccacctccggacgcgggttcaagcttgagctaccatagtcaagaagaacagttgtctcttcttggaaaggtgatgaatgctggagacgatctggtcggtttagagcaactcgaagaagacacagacggaatggctctacaaaaggcgagacgaagcatgggatcgatgagcgtaatgtccggttcaaaaggaatggtctacatggaatacaactcaggccgtcacaaatccggtcagcaattcaagaaacctaaagacccaaccaaacgacacaatctcttcaaaaaacgttacgtgtgagagaaacaaagagaagctttcaagagttttcggctgtttgtttcgagttgtatgtaacttttgtgcaaatttgttgaaattaacaaataaattacttaaattaataaaaaaatgtatgatgtatcatgtatgtaagtattttttttatttttattttttgtaagtattatgacattgtttaaatatgtaagtgtatgtttctattcgaggaaaaaaagggcggcccgctctagaggatccaagc

SEQ ID NO: 88082 - DNA, 623 bp, Arabidopsis thaliana columbia
  unsure (1)..(623): unsure at all n locations
tttggtacgcnctgcagggtaccgggtccggaattcccggggtcgacccacgcgtcccgggggtctcgaacctttctcttcggttgcatcagggaagagccagaatggcgggaagagggaactttattggccagaatgatcttattccgtggcgaccaattccttggttatgggttggccaacaggcctgcctttcaaaaattggtgggaaggcctcaaagaagattgaaaaccttttttaattggcttgcaaaaaccaggaaaaaggtccttcaccaaagggagaatttggccagaaccttggagtccccgaaaaacccctgatctttttactgaggattcttaaaacctcagtaaatcacatgggtcagctcaagtagggaggtctgtttatctttgtataaagaatgttaaaaagtaataagcttgtggattaaacaaccagtgatcttttggtgctgtttctcttctcttaaacccaactcttccggagtgactaaccactgtatgaaggaatttctatcgtcttttgcttcctacttatttgtagagcacatttattgattcttttcgttttgggctgtggctttgattttaaatatgtaaattacgggcccgttttg

SEQ ID NO: 88083 - DNA, 751 bp, Arabidopsis thaliana columbia
  unsure (1)..(751): unsure at all n locations
gcgaggtctatataatggacaaatctggtataatgtaaaatagggacttgacgcagatcttgttgggtctcgaaccttcctcttcgtttgcatcaggaaagagcgagaatggcgggaggaggaaactttattgcgagagtgatctcatacgttgcgaacgagttcatagttaatggtttggcaaacagccatgctttccagagatttgctgtgaggacttcaaagagaatagaaaacctctctaaaatggctgcagagaacagggagaaagtcgctcagcaaatggaagaatttgccaagaacattgactccacgaagaaaccctgatcattctagtgtggaatcttaaaacctcagtaaatcacatgggtcagctcaagtagggaggtctgtttatctttgtataaagaatgttaaaaagtaataagcttgtggattaaacaaccagtgatcttttggtgctgtttctcttctcttaaacccaactcttccggagtgactaaccattgtatgaaggaatttctatcgtcttttgcttcctacttatttgtagagtacatttattgaaaaaaaaaaaagaaaaataagggcgtgcgctcttaaggatccaagcttacgtacacgtgcatgctacgttataaactcttctattagtgggacactaaaatttcaattcacgttgggccggcattttttacaaaccgccgggcaactggggaaaaaaccctgggggtgtttcccccaactnnnn

SEQ ID NO: 88084 - DNA, 1407 bp, Arabidopsis thaliana columbia
  unsure (1)..(1407): unsure at all n locations
ctttaagtcttaaacgaaacaatggcccttcaagctgcttctttggtctcctctgctttctctgtccgcaaagatggaaaattaaatgcttcagcatcatcatcattcaaagagtctagtctgttcggtatttcactttcggagcaaagcaaagctgactttgtctcttcctcattgagatgcaagagggaacagagcttgaggaataataaagcgattattcgagctcaagcaatcgcgacttcaactccatcagtcacaaaatcttccttagaccgcaagaaaacacttagaaaaggaaacgtggttgtcacgggagcttcttcagggctaggtttagcaacggcaaaggcattagccgagacaggtaaatggcacgtgataatggcgtgcagagacttcctcaaggctgagagagccgctcaatctgcagggatgcctaaggacagctacactgtgatgcatttggacttggcgtctttggacagcgtgaggcagtttgttgataacttcaggcgagctgagatgcctctcgatgtgttggtctgcaatgccgcagtctatcagccaacggctaatcaacctactttcactgctgaagggtttgagcttagcgttgggataaaccatttgggccactttcttctttcaagattgttgattgatgacttgaagaactccgattatccatcaaaacgtctcatcattgttggatccataaccggaaacactaatacattggctggtaatgtacctccaaaggctaatcttggtgatttgaggggactagcaggcgggttgaacgggctaaacagctcggcgatgatagatggaggagattttgttggcgcaaaggcgtataaagatagcaaagtctgcaacatgttgacaatgcaggagtttcataggcgtttccatgaagacaccggcataacttttgcttccctttaccccggttgtattgcaacgactggtttgttcagagagcatattcctcttttccgtaccctcttccctcctttccagaagtacatcacaaaaggttacgtctccgagtcagaggctgggaaaagacttgctcaggtggtggctgatccaagcttgacgaagtcgggagtgtattggagctggaacaagacctcggcttcatttgagaatcagctgtctcaagaagctagcgatgtcgagaaggctcgtagagtttgggaagtcagcgagaagctcgtgggcttggcctaaaatttgatatgagatttttcctcggtgtttcaacctttggtttggcttaagatgagaaacaaacaaaaaaggagacattaataaagcctgtaacaactttgatttantagttgtgttttggctgattctatctgtaatgaaacaaattaattccacttttcaagtttt

SEQ ID NO: 88085 - DNA, 616 bp, Arabidopsis thaliana columbia
  unsure (1)..(616): unsure at all n locations
tatacgacttactatagggaaagctggtacgcctgcaggtaccggtccggaattcccgggcttaaccacagaaaacagacgatggaagcaagaagcgtatcttatctctacgtttcatattaaagcgcatgaaaacgaacataataaagattctcttttttttttttgaaaaatgctagaaaaataaacatgggtcacttgccacagagcctctactccgccgctggaccaaagtttccatatcctggaagctccggtctaggagtagatcaacggaagctgacgtggagccgcttcccggtgttcctacggtgcgcgtcgacggagtcgttaacgagtttgactcagaataatgcggcggagatagagttgaagtatctggtgagtcaacacgggtgggacgtgaggagattgaatagagaccgccgaggatgagatccaggagagtgtctcttggttcaagcccgaagctttccacatccctctttgctctttttgatgattttttttttcatgtttttttcaggcaagagggttctatcaagcacttttctttacaaacctaaaggatttaccccccccnacatntgcttaatttngtgggggggaaaacaag

SEQ ID NO: 88086 - DNA, 1590 bp, Arabidopsis thaliana columbia
  unsure (1)..(1590): unsure at all n locations
gcagtaccgctccggaattcccgggtcgacccacgcgtccgcccacgcgtccgattcagcaatcacactctctctttgttcgagtaccaacaatggcccttcaagctgcttctttggtctcctctgctttctctgttcgcaaagatgcgaagttgaatgcttcttcatcatctttcaaggactcgagtctttttggtgcctccattaccgaccaaatcaaatccgaacatggatcttcctcgttaagattcaagagagaacagagcttaaggaatctagcaattcgagcccaaaccgctgcgacttcaagccctacagttacaaaatccgtggacggcaagaaaacgttgaggaaaggaaatgtggtggtcactggagcctcgtctgggttaggtctagccacggctaaagctctagctgagacagggaaatggaacgtgataatggcgtgcagagacttccttaaagccgagagagctgctaaatccgtagggatgcctaaagacagctacacagtgatgcatttagacttagcctcgttggacagcgtgagacagtttgttgataatttcaggagaacagagacgcctctcgatgttttggtctgcaatgctgcggtttatttcccgacagctaaagagcctacttacagtgctgaagggtttgagcttagtgttgcgacgaaccatttgggacattttcttctcgcaaggttgttgcttgatgacttgaagaaatctgattacccttcaaagcgtctcatcatcgtcggatccattaccgggaacacgaatacattggcgggtaatgtaccaccgaaggcgaatctcggtgatttgaggggtttagccggcggattaaacggtttaaacagctcagctatgattgatggaggagatttcgacggtgcaaaggcttacaaagacagtaaagtctgcaatatgttgacaatgcaagagtttcacaggcgtttccatgaagaaactggagtcactttcgcttcgctttaccccggttgcatcgcctccacaggtttattccgagagcacattcctctcttccgtgccctcttccctccctttcagaagtacatcactaaaggatatgtctccgaaacagagtcaggcaaaagacttgctcaggtggtgagtgatccaagcttgacgaaatcaggggtttattggagctggaacaatgcttcggcttcttttgagaaccagttatcagaagaagcaagtgacgttgagaaggctcgtaaagtgtgggagatcagtgagaagctcgtgggcttggcctaataaacttgaagtctgttaaatttgatgacacctctcggtaccaatcgaagaaatctagtgaatttccgggatttttagatatctgattctgttgcgaagtttttttatccttattagtgtctgttgagtgtagattgcttggcgagtagcccacaataaagaaataaaaatggcgaatctttagctttaaaaaaaaaaaaaagggaccgaacgcatagnnnnnnnnnnnnnnnnnnnnnnnnnnnnnnnnnnnnnnnnnnnnnnnnnnnnnngtccnnnnnnnnnnnnnnnn

SEQ ID NO: 88087 - DNA, 913 bp, Arabidopsis thaliana columbia
  unsure (1)..(913): unsure at all n locations
nnnnnnnnnnnnnnnnnnnnnnnnnnnnnnnnnnnnnnnnnnnnnnnnnnnnnnnnnnnnnnnnnnnnnnnnnnnnnnnnacgccacgcgtccgcgtctctgagataataaggacttgtgtatttttccatcgttaaaaggcatttcaaagagacaatatgtcaggtgatgaggctgcccctgttgttgttcctccccccgttgctgagccagcggccatcccagaggacatggacttaatgactgcattggagttgactcttaggaaagctcgtgcttatggtggtgttgttcgtggtctccatgagtgtgctaagcttattgagaagcgtgtggctcaactcgttgtcttggctgaagactgcaaccagcctgattatgtcaagcttgtgaaggctctctgtgctgatcacgaagtcaggttgctaacagttccaagtgccaagacccttggcgaatgggctggtctctgcaagattgattctgagggtaatgccaggaaggttgttggatgctcatgtcttgttgtcaaggacttcggcgaggagacaactgccctcagtatcgtcaataagcatattgcttctcaataaaatgccatgaagcatatctaaactcggatttcatatgttttccacccccaatgctgttttctcttgggttttgatatattatctaatatttagcggacagctcttgagatttgtttggaacatgatcaagttttgttgttatctagactttactcttccaaggccaaatttgcttgagatttatttggctccnnnnnnnnnnnnnnnnnnnnnnnnnnnnnnnnnnnnnnnnnnnnnnnnnnnnnnnnnnnnnnnnnnnnnnnnnnnnnnnnnnnnnnnnnnnnnnnnnnnnnnnnnnnnnnnnnnnnnnnnnnnnnnnn

SEQ ID NO: 88088 - DNA, 395 bp, Arabidopsis thaliana columbia
aactcgccaaactaattccaaaacgtttcttcatcagatccaaagatcgttccactgtctctaagtcccccacggctttttccttcggatccgcttcctcatcttccggccaagactgtaaaaactccggtggtgatggcggtggcggttccgttaccccgactagcattctcccggaggttccttctccttattcctacgtcgagattctccaagcgtttaagttgatagacagagacaacgacggagctgtctctagacacgatcttgagtcgttacttagccggctaggtcctgatcctttgacggaggaggagatcaacgttatgcttaaagaggtggactgcgacggcgacggtacgatccgtcttgaagagcttgcgagtcgtgtagtc

SEQ ID NO: 88089 - DNA, 832 bp, Arabidopsis thaliana columbia
  unsure (1)..(832): unsure at all n locations
ggcccttttttaggtttaattaccgccaagcctgggcgaaaaagggggaattgttgttcacaaagccggatttaatgttgnnnnnnnnnnnnnnnnnnnnnnnnnnnnnnnnnnnnnnnnnnnnnnnnntcgaggtcgacggtatcgataagcttgatatcgaattcgcggccgctagctttttcatttcgaaatggccaccgttgaggttgaacaagtcactccaggcggccgcgagaacgttgaggtaccaacaaagacagtgaagaagacagtggtggagacagaggtgacccacaagccgaaagaatccgtccccgccgtgacagaacaaaaatccgaagcaccaattgtagaaacaaacgaagaagtggttgtggaagaggcagagaagaaagatgaagaaaccgagaagaaaacagaggagaaagacgagaagacagaagtgatcacggaaactccggtagttgaggaggaggagaagaaagctgaggaagtgaccgaaactccggcggttgtggaggaggagaagaagacagaggtggttgaggagaaacagactgaggttgcggctgctgaggaagtcgccgttgagaaggccgaggagtaaagaggaaggaagaagctatatatgaccttttttggtctcatatcgttttctgtttattttattttatcaacatttcataagtattttctatgtttgttgggtttgttatgatgaaatcagatgtttggatcttttgcggccacannnnnnnnnnnnnnnnnnnnnnnnnnnnnnnnnnnnnnnnnnnnnnnnnnnnnnnnnnnnnnnnnnnnnnnnnnnnnn

SEQ ID NO: 88090 - DNA, 720 bp, Arabidopsis thaliana columbia
  unsure (1)..(720): unsure at all n locations
ctcatatcgttttctgtttattttattttatcttcatttcatacactatttttttcctctccttattgtctatatatttttcctctttagctttttcatttcgaaatggccaccgttgaggttgaacaagtcactccagtagcagtagagaacgttgaggtaccaacaaagacagtggaggagacagtggtggagacagaggtgacccaacagccggaagaatccgtccccgccgtgacagaacaaaaatccgaagcaccaattgtagaaacaaacgaagaagtggttgtggaagaggcagagaagaaagatgaagaaaccgagaagaaaacagaggagaaagacgagaagacagaagtgatcacggaaactccggtagttgaggaggaggagaagaaagctgaggaagtgaccgaaactccggcggttttggaggaggagaagaaggcagaggtggttgtggggaaacagacttaggttgcggctgctgaggaattcgccgttgagaaggccgaggagtaaagaggaaggaagaagctatatatgaccttttttggtctcatatcgttttctgtttattttattttatcaacatttcataagtattttctatgaaaaaaacgggaaagccaagaaccaagnnnnnnnnnnnnnnnnnnnnnnnnnnnnnnnnnnnnnnnnnnnnnnnnnnnnnnnnnnnnnnnnnnnnnnnnnnnnnnn

SEQ ID NO: 88091 - DNA, 479 bp, Arabidopsis thaliana columbia
atatttctcagcttcactcactctcgagactcgtgtatgttgatttacggtttgttcaagcaaagagaatgatgaatctaggatctctttcgttgagtacgagcaagtcgagtaagccaatggttagcatcagcttttggataccgtatttcactcactggggagagagcctgctggtctgtggctcggctcctggacttggttccgggaatgtgaaaaaaggtttgctgctaaagccatcccagcaagatgatcagctcatctggagtggctctgtctcggttccacctgggtttagctctgactattgttactatgtggtggatgactcgaagagtgtgttaaggtcggagtttgggatgaaacgaaaacttgtggtgcctgagacattgaccggtggagagtctgttcatcttcgtgatctctggcagagttgggatcaagctctttcatttagaagggcatataaagatgtcatc

SEQ ID NO: 88092 - DNA, 532 bp, Arabidopsis thaliana columbia
  unsure (1)..(532): unsure at all n locations
nnnnnnnnnnnnnnnnnnnnnnnnnnnggaaagctgctacgcctgcaggtaccggtccggaattcccgggtctcccccccgcccggggagaagaagaaaacttttgatccatcttccaactctttcctaatttgaaagaagaagaagaagagataccaatgggcggcgtttacagggacaacagacaaatgcaaggcgtgtgacaagacggtatacgttatggacttgatgactttggaaggggggccttatcacaaggcatgcttcaggtgcagccattgcaatggcactctcgtgatatgtaactactcatccatggatggggttttgtattgcaagacccattttgaacagctcttcaaagaatctggaaatttcagcaagaatttccaaacagctggaaagaccgagaaatcgaatgatgcgacgaaggctccaaacaggttatcatccttctttagcggcacacaagacaaatgtgcagcttgtaagaaaacagtttatcctctagagaagatgacaatggaaggag

SEQ ID NO: 88093 - DNA, 492 bp, Arabidopsis thaliana columbia
  unsure (1)..(492): unsure at all n locations
cgcccgcaggaaccggnccggaatacccgggttcgcccacgcgtccaaaacagaagaagaaaactttcgatccatcttccaactctttcgcaatctgaaagaagaagaagaagagacaccaatggcggcgtttacagggacaacagacaaatgcaaggcgtgtgacaagacgggatacgttatggacttgtcgactttggaaggagtgcctcaccacaagccacgctccaggcgcagccattgcaatggcactcgcgcgacaggcaactactcatccagggatggagctccgcatcgcaagacccactttgaacagctcctcaaagaagcgggaaactccaggaagaaatgccaccagccgggaagaccgaaaagcgaatgacgcgaccaaggctccaaacagggaatcaccctgctgaaccggccaacagaacaaggagcacccggaaaaaaacagcacaccctcccgaaaaaacgacaacggaaggaaaa

SEQ ID NO: 88094 - DNA, 1308 bp, Arabidopsis thaliana columbia
  unsure (1)..(1308): unsure at all n locations
gactttctatagggaaacctggtacgcctgcaggtaccggtccaaattaacttttataggtaggaggagatagaaatcgaatcttatcgccgcgttaatatgccaccggccggagaactccgacatcaatctccatcaaaggagaaactatcttccgttacccaatccgatgaagcagaagcagcgtcagcagcgatatctgcggcagctgcagatgcggaagctgccggattatggacacagatcaaggcggaagctcgccgtgatgctgaggcggagccagctttagctagctatctatattcgacgattctttctcattcgtctcttgaacgatctatctcgtttcatctaggaaacaagctttgttcctcaacgcttttatccacacttttatacgatctgttcttaaacactttttcctccgatccttctcttcgtaacgccaccgtcgcagatctacgcgctgctcgtgttcgtgatcctgcttgtatctcgttctctcattgtctcctcaattacaaaggcttcttagctattcaggcgcatcgtgtatcacacaagctatggacacaatcacggaagccattagcattagctctacactcaagaatctccgatgtattcgctgttgatatccatccagcagcgaagatcggaaaagggatacttctagaccacgcaaccggagttgtagtcggagaaacagcggtgattgggaacaatgtttcaatccttcaccatgtgacactaggtggaacaggtaaagcttgtggagatagacatccgaagatcggtgacggttgtttgattggagctggagcgactattcttggaaatgtgaagattggtgcaggtgctaaagtaggagctggttctgttgtgctgattgacgtgccttgtcgaggtactgcggttgggaatccggcgagacttgtcggagggaaagagaagccaacgattcatgatgaggaatgtcctggagaatcgatggatcatacttcattcatctcggaatggtcagattacatcatataaagttgttgttataattgtttctgtggttttgaaagtgaaaaactttctgaccattcgcttatagagaggtgctgaggtaagtgagctttgttgtatttgtaatttacaaaacatcttacgatgttcaatacaagaaatggccttaatttgatgttattattccnaaaaaaaaaaaaaaaaaaaaaaaaaaaaaagggcggccgctctagaggatccaagcttacgtgacgcgtgcatgcgacgtcatagatttttctatagtgtcaccta

SEQ ID NO: 88095 - DNA, 778 bp, Arabidopsis thaliana columbia
  unsure (1)..(778): unsure at all n locations
gcgtccgaccacgcgtccgcccacgcgtccgcggacgcgtgggatctttttcacgcaaatgcaaaccaccaacaaatctatattctagcatgatgatgaagtagctacttgcttcttcttcttcttcttcttaaattttggggtttttactttttggtgaagacagccatgtttcaaagattattactcttccttctcattgctcttctgctccaatcttctttccttttagagatttcctctgctctcaaggaaggaaaaacatgtataacaaacagcaactgtgacgctggattacactgcgaaacatgtatagccaacactgattttagacctagatgctccagaacccaacccatcaaccccatcaccaaggcaaaggggttgccttttaacaagtattcatggttaaccacacacaactcttttgctcgtttgggggaagtatcacggaccggttctgctattttggctcctactaaccagcaagattcaatcacaagccaactcaataatggtgtaagagggggttatgctcggcatgtatgactttccaaaacgggtatcttgggctttgccaattctttcggatgggaacaatgtttcaattttacccgttttaaaccggggttttaanaatttaangggggtttnaaggggttttntgnnaagaccttgggggngttttacngttttcatttgaggtttgngaatcccnnagggctcnaaggnttttgggtggttcgangnaattccggggtngtccccaatgggggta

SEQ ID NO: 88096 - DNA, 609 bp, Arabidopsis thaliana columbia
  unsure (1)..(609): unsure at all n locations
gagagaaggactataagtttccatgagaaagaagaagtaatcacacacttgttcttcgattcgtttctgggaactgagaatatttaagaacacgatggctatggccgctttaaatcagctttttgttgtcctagcctcaaaacccgagcaggagaagatcacgcctgaagagtctagagctattgtctcttgccatttcaaagctttgtggacagctggttttgcgtctggtgtagggggaggtttaacttggcaaggttcgtcgtaattcctccattgactcttcttcttggttcagaaaatttagtcttttttncttttgtgtaacccaaatttgtaatggagatagatagatagcttttaattcctttnctgtggtgtattcttctagtgncaaagaagttgaaaaaagccgaaaggacttnagagggttgcccttgcagcttggagttgcttgcttccgcctntttgtggttgcctngaaattgggcaagtnccaaatattncaggttcaaccccttgaccaaaaccctaggcaaagnnnttccacgnatccagaaaaggnttttaaatnnctttngnagggcccccannggtnanntttggggg

SEQ ID NO: 88097 - DNA, 459 bp, Arabidopsis thaliana columbia
gcagagtgcagacattgttgattgaagaacgctaatcgtttgtttttttaattgtttgcgttaagttaaagctacttgttgggacgtcaaagcaacgcttctttcgattctgactttcatataaatactaaactccaactttttgatttctctgctacttttgttcttctcttttacttccccagatacatcaatcgatcaatttgcaaaacatgtctgttgagttatgttcggtgaggcctttgtttggtggcgctatttccaccgtcttccctcaaagatttcaggatgtgagtaatatccgacaagttccagatcatcaggaagtgtttgtggatccttcaagagatgagagtttgatttttgagttgttggatttcaaggctgaggttggcgacattggcagagcctcttggtttcttaaagatctttgcgagtgagcaagaagcttgaggattt

SEQ ID NO: 88098 - DNA, 781 bp, Arabidopsis thaliana columbia
ctacgactcatatagggaaagctgctacgcctgcaggtaccggtccggaattcccgggtcgacccacgcgtgcgcccacgcgtccgcccacgcgtccgtacggctgcgagaagacgacagaaggggatcttcggaaagtctcatttctcgatccccaattcgtggattagggttaaaagaaccatttttattctcgtcgcgcaacaacaaatccagatcgaaaaaggaagaagagatcgaaatggcgttgagaagggtttacagtgaaatcagagggaagaaggtgacggagcttccaggctatatcaaatcgactttttcaatggagaccgtgaagacctctgtgaagagaggactcgataactacaacgaaaaatacattcagaccagctccgttgatcctatccttcatatctgcttctacggcatggctttctcttaccttgtcgctctccctaatgagcgtcgccatcttgagcatcagcagcatgctaaggagcacggtggtcattgatctcgtgggaatcgtttcgatctcgagatgattttagggggggttgctgtgaaatctttctctgcttgatggtgacgacgactcaagaattgtgtcttattgtttcgttttcttgaattttcctggataatgttgacctaaaggaaaacctttctttcgaattaccccccatgatagtcaataattgaagcatcatgatgatatccatgaataatgaaactttttttttgttccgtgaagttgtgaattcagcaattgttttatcat

SEQ ID NO: 88099 - DNA, 405 bp, Arabidopsis thaliana columbia
gcgtccgcttttcatacatattctcttgacgatcatgagactgatttcgtgaaaatatcgtcattatatcaaattagaagttgatggaaaacatgggggattcgagcatagggccgggccatccgcatctccctcccgggtttcggtttcacccgactgatgaggaactagtagttcattacctcaagaagaaagcagattctgttccacttccagtctcaatcatcgcagagattgatctttacaagtttgatccttgggagcttccaagcaaggcgagttttggagagcacgagtggtacttctttagtcctcgggatcggaagtatccaaatggggttaggccaaaccgggcagcaacttccggttattggaaagcaacgggaaccgataaaccgatattta

SEQ ID NO: 88100 - DNA, 1149 bp, Arabidopsis thaliana columbia
atggagagtggttccaacagcacttcttgtccaatggcttttgccggggataatagtgatggtccgatgtgtcctatgatgatgatgatgccgcccatcatgacatcacatcaacatcatggtcatgatcatcaacatcaacaacaagaacatgatggttatgcatatcagtcacaccaccaacaaagtagttccctttttcttcaatcactagctcctccccaaggaactaagaacaaagttgcttcttcttcttctccttcctcttgtgctcctgcctattctctaatggagatccatcataacgaaatcgttgcaggaggaatcaacccttgctcctctttctcttcttcagcctctgtcaaggccaagatcatggctcatcctcactaccaccgcctcttggccgcttatgtcaattgtcagaaggttggagcaccaccggaggttgtggcgaggctggaggaggcatgctcgtctgccgcagccgcagccgcatctatggggccaacagggtgtcttggtgaagatccagggcttgatcaattcatggaagcttactgtgaaatgctcgttaagtatgagcaagagctctccaaacctttcaaggaagctatggtcttccttcaacgtgtcgagtgtcaattcaaatccctctctctatcctcaccttcctctttctccggttatggagagacagcaattgataggaacaataatgggtcatccgaggaagaagtcgatatgaacaatgaatttgtagatccacaagctgaggatagagagcttaaaggacagctcttgcgcaagtacagtggttacttagggagcctcaagcaagagttcatgaagaagaggaagaaaggaaagctccctaaagaagctcgtcaacaactgcttgattggtggagccgtcactacaaatggccttacccttcggagcaacaaaagctcgcccttgcggaatcaacggggctggaccagaaacagataaacaattggttcataaaccagaggaaacggcattggaagccgtcggaggacatgcagtttgtagtaatggacgcaacacatcctcaccattacttcatggataatgtcttggacaatcctttcccaatggatcacatctcctccaccatgctttga

SEQ ID NO: 88101 - DNA, 408 bp, Arabidopsis thaliana columbia
aaaaaagggtttttgtgttcttcgatattatctcttattactattaggctattatcatcgccttattggggaaaaagcttcaaacttttatataaagtctcttcctttttctttctttctcggtggaatttgcagcaatggaagataaaccattagggattctcagggttcatgtcaaaagagggattaatcttgctattcgtgatgccaccaccagtgatccttatgttgttatcacattggctaatcagaaactgaagacgcgtgtgattaataataactgtaatccagtgtggaacgaacaactgaccctttccatcaaagatgtgaatgatcctatccgtctgacggtgtttgataaagatagattctcgggagatgacaaaatgggtgatgcagaaatagact

SEQ ID NO: 88102 - DNA, 438 bp, Arabidopsis thaliana columbia
ggagcagcgatgaaatcggttgtccgcaaacaacggatagatctgtcgatgtttgtttttggaactccgcgttgaatcagcgtcgatgtttctccaatggaagataaaccattagggattctcagggttcatgtcaaaagagggattaatcttgctattcgtgatgccaccaccagtgatccttatgttgttatcacattggctaatcagaaactgaagacgcgtgtgattaataataactgtaatccagtgtggaacgaacaactgaccctttccatcaaagatgtgaatgatcctatccgtctgacggtgtttggataaagatagattctcgggagatgacaaaatgggtgatgcaggaaatagactttaggccgttcctagaagcgcatcaaatggagttagatttccagaagctccccaatggttgtgcaatca

SEQ ID NO: 88103 - DNA, 540 bp, Arabidopsis thaliana columbia
  unsure (1)..(540): unsure at all n locations
tgannnnnnnnnnnnnnntacgactcactttagggaaagctaccacgcctgcaggtaccggtccggaattcccgggtcgacccacgcgtccgaaaatgctggttgagttggctcattcatcaaatgatggagtcacacggaaccatatcttctccttgttcactgcaattgttaaatttgtccctgataaggttttggaccatattatcagcatacttacacttgttggtgaatccatctgtgacacagattgatagtcactcgaagtctatctttgaggggtttatatcaatggtcattccattttggctgtctaagactaagagtgaggagcagttgttacagatttttgtgaaagtcttacctgatattgttgagcatagaaggcgttcaattgtagcttacttgctgggagttatcggtgaacgaaatggcttgcctgctttgcttgtcctcttatttaagtctttgatttcaagaaaagactcaggcttggcttggtaatgccaacggttctgaaagtttcgctcccattgttaa

SEQ ID NO: 88104 - DNA, 591 bp, Arabidopsis thaliana columbia
tcccaaggaagagtcgatgaagttgaaatcggtgttcgatgcttcggaaatcaaatcggaatttgaatcagcgggaataaaccctaaattcgcgattcaaatctggaagtatgtaattcagaatcctgattgcgtttgggacgagattccttcattgccttccgctgcatactctcttctccattccaagttcaagactcttacttcgtctcttcactcgctatttcattcctccgatggcaccacctcaaagcttctcatcaagctccagaatggagcttttgtggaagctgtggtaatgagatacgatactcggttggggatgttaggagggaaaccacgtcctggaggttggttgtaagatgggttgcacattctgtgctactggtaccatgggatttaaaagcaatttaacatctggagaaattgtggagcagcttgttcacgcctctcgcattgctgatatacgcaacatcgttttcatgggaatgggagaacctttaaataactacaatgctgttgttgaagctgttcgtgtcatgttaaaccaaccatttcagctgtcgcccaaaagaattaccatatcaactg

SEQ ID NO: 88105 - DNA, 572 bp, Arabidopsis thaliana columbia
  unsure (1)..(572): unsure at all n locations
cctctcactttcagttcaattggatagccggaaaggctctcctccaagtggcgtttatatggaggtgacaaatacgagcagcatcatgtggttcttcagggacaaaggtttcgatgatccgagtatcgacaagatgttgagaaaatgcaaacagttggaaaaggctcaaagcgatgtggcatcagaaaactgggactacctgagtaacattgttggtatccaagagagaaaactcccttacatcgtctcccgatgccccaaaatcctgactttacgcctcgatgagagactcatccccatggtcgagtgcctctccagtcttggaaggaatcctcgggaagttgctttccgccattaccaaatttcctccaatactctctcatagcgtggaggagaaactctgtcccctttcttgctttttttcaagcggttgggtgtgcctgagacttaacttgggaaaattgtacctttttaccccggggttttcagggtccaggattggcacgaggttacaggtnttggaagtttttttgtnggcttggcttnntcaggtgggtnttgnaaanttttgg

SEQ ID NO: 88106 - DNA, 576 bp, Arabidopsis thaliana columbia
  unsure (1)..(576): unsure at all n locations
agagttttgattcaacagagtctctctctgtcgcgaaacgttgcttcctgggagaactataaagttaacaaatttctccacgaaaccatagagtcacatcctcatgagtgttttgtgagctgcgatgatcgtgtgattttcaaatccctaacttttcgaaattcccaaaaccctcaaataatctgagtgtgacccattaatccatggcgatgtctctccgttccactccattcatctctctccgtacgagaaaaagctttaacctttctccgagaattctcgcccttaggttatcatgctgctctggtgggtcttctcaaaatcagaacttttctacagattccgagaacaagagatcattcgctgttgccaccggtgagcttttcatcggaatcgcgtcgaggcttttgaagggttctaatcaaaagacgccggccgattgatgatggggatagaatagncnagtgaattgangatnagattgagcagcgatgntatgggnacaaagggtaaagatgttaaccggggaagagagggggcattanagcccngggtaagtcccngcngtggctttgc

SEQ ID NO: 88107 - DNA, 512 bp, Arabidopsis thaliana columbia
  unsure (1)..(512): unsure at all n locations
gaaactagtagtggtgaaggagaaggagaatgggagatctctacgctttggacttcgatggagttctctgtgatagttgtggagaaagctctctatctgctgttaaggcagccaaagtgagatggcctgatttgttcgaaggagttgattccgctttagaggaatggatcgtcgatcaaatgcatattgtgagacctgtggttgaaactggctatgaaaatcttctacttgtgcggctgttattggagaccaagataccgtctattcgaaaatcttcagttgcagaggggttgacggttgatgggatactggagagctgggcaaagtttaagcccgtgatcatggaaagcttgggatgaagatagagatgctttggtagatttgtttggaaaagttagagatgattggatttacaaggggccttgacaaccttggacttggtcccaataggtttctaccccaggggtttcaaatgcccttaaattttcccancccaaggtttnatcggtacc

SEQ ID NO: 88108 - DNA, 740 bp, Arabidopsis thaliana columbia
  unsure (1)..(740): unsure at all n locations
accacgcgtccggatctttcgaatcaaaacgatctgaagaagaagaagaagaagaagaatcaaaatctggatcagaaacaagggaggagaagatgttgcccacaacttccagatctcgttcttcatcttcttcatcccgagctaatccaatgttccttcagtactttcgtcgtatcgttaagtggcagcaaatggatgttgaatatactttctggcaaatgcttaacctttgtacatctccgaaagttgtctatcaacacactaagtatcacaaacaaactaagaaccaatgggcacgtgatgaccctgcgtttattgtgatctgtagcctgcttcttgttgttgcaactgtagcctattgtgtcacgtatgaccatagtagctctcatgccgtcgtcgtagtcgtttcagttttgttcacccatttcttaatcaccggagcagttatagctacatgctgttggggtttgacaaattcttaaccttcggcgaggagactccaaacagtcatgtggggggcancgggcgcggtgaatggctggaaacaatttngatggtcactggaactcggtccttnccaatggttnnggctgcccnanggcggaaattanctccttaacacgggcccgaaaagacacnggntcancccttaanggaaacggaaccgggttcaangggcgggggtngganaccatnactnactnccngnatgngggnccattttgggggaaaaatctgta

SEQ ID NO: 88109 - DNA, 1731 bp, Arabidopsis thaliana columbia
  unsure (1)..(1731): unsure at all n locations
cnnnnnnnnnnnnnnnnnnnnnnnnnnnnnnnnnnnnnnnnnnnnnnnnnnnnnnnnnnnnnnnnnccacgcgtccggtggagagagagcatgtgaataaaaagcgtgaagctttttgatatctctttctcttcctcttcctttctcctccgatagatttcgccggcgatggcggtggactccttagaaacggagattgacacggcggtgcgtgttgtccacctcgcttcttctctctgtgttaaagttcaagagaagcttcatcttcctaacggtggtcacgttaagtctaaagacgatgattcccctgtcaccgtcgctgattttggtgtacaagcaattgtgagctgggttttagctgaagtgtttggtgatcaaaacctttcaattgttgctgaagaagacactgagacactctctgaggctgattctttaggtcttttaggagctgtgtcgaatgcggttaatgaagcattgtccgaagctcagaactacgggcttccgaagccagttaagccattggggtctagtgaaattcttaaggctattagtagatgtaactctgttggaggtcctaaaggaaggcattgggtgcttgatcctgttgatggaacgttagggtttgttcgtggggatcagtatgctgttgctttagctttgatagagaatggtaaagttcttttgggtgttctaggatgtcctaattatccggttaagaaagaatgtttaagtaatggttgtaaccaagctatgaagacgaaagctgttgcggggtcagtatcgaaaggatgtgttatgtatgcaaagagaggtagtggtcaagcgtggatgcaaccgttgatcgttggaggaataccagaatctgcaacacttcttaaggtttcttcagttgatgatccggttttagctacagtttgtgagccagtagagagagcaaactcaaaccacttgttcactgcaggacttgccaatagcatgggagttagaaagcagcctatgcgagtgtatagcatggtgaaatatgcagcgattgcacgtggagacgctgaagtgtttatgaagtttgcacagtcaagttacaaagagaagatatgggatcacgcagctggagttgttattgtggaagaagctggtggtgtggtgactgatgcgggagggagaaacttagacttctcgaaaggtgtttacttggaaggtcttgaccgtggaatcatcgcatgttctggtcaagttttacatgagaagattataggtgctgtttatgctagttgggaatcttccagtctctgaaaaagcttatccacaatccgtagtttggtgcagcatcatcgagccaaagcaaaggaggaacaagggccattacggtttaggatgagcaagggccagtttcaatgaatgtgaatggcggagaagtaaatatagtcgaggaagcagcggtaaaagtaagaatctagtttatttacctatctaagagtaataaagctgctgcatttcacgaacccttatgttctatgatctttaatggatgatatcatttttaatcaaaaaaaaaaaaaaaaacaccttcaaaacgcggattatacatgtcgttttcctgacaaaagacaaaaattagtaaattactgaaaaaaaaaaaaaaaaaaaaaaaaaaaaaaagggcgaccgctctagaggatccaagcttacgtacgcgtgcaggcgacgtcataactcttctatagttgcacctaa

SEQ ID NO: 88110 - DNA, 864 bp, Arabidopsis thaliana columbia
  unsure (1)..(864): unsure at all n locations
gcctgcggtccggnccggatncccgggtgaccccgcgggcgatgcggtaagaagatggagagatgagcctgtgagaaccagaccccgacactgattacatgagggcgcaagaagcacgccgtttcatgatttacgtccacaccaaaatgatgatcgttgacgatgaatacattancantgttgctgctaatttgggggggaggncaanggacggngcaagagacncagagaaagcaccgggaggggaggaaccacagcacccgccccaaagacaaccagcncgnggccagaaccangggnnnncgagggcacncngggacgaacaccngggaaggcncgangaaaccnnncncgaaccaccaagcngggaaggcattgagaaagtaaaccgcatttctgacaagtattgggacttttactcaagtgagtcactcgaacatgaccttcctggtcacttgctcctgctacccgatcggtgtagccagcgaaggagacatccctgagctttcaggatttgaattcctcccggaccccaagggccggatcctcggccccaaatcagaattcccgcctcccatcctttcaacctaatctcccttagcatgtccagtaatggtttctctttccctttttggcttgccggtggtggaaccttggattaaaccttaatggcctcccttaagaattaagaatccaaagggtggtaatattaagccccttctttcccccttgggttttaatattggtccaatgacgtgttaaaaaaaggaagcttgggcatctggtttggtggtggtaaggacccttgggccttatgccgcccgcaaattcttccagcccggggaagcctggtatttctccagc

SEQ ID NO: 88111 - DNA, 2897 bp, Arabidopsis thaliana columbia
  unsure (1)..(2897): unsure at all n locations
cacacgcgtccgggaccagatcccgaattcttcttctgaccaccgaacgattgagtttctccgatcagatctcagtttctgggaataattcgaagtgaaaaaatggcgcagcatctgttgcacgggactttacatgctaccatctatgaagttgatgccctccatggtggtggtgttaggcaaggcttccttggcaagattctggcaaatgtagaagagacgattggtgttggtaaaggagaaacacagttgtatgcgacgattgatctgcaaaaagctagagttgggagaaccaggaagatcaaaaatgaacctaagaacccaaagtggtatgagtcgtttcatatttactgtgctcacttggcttctgatatcatcttcactgttaaagatgataatcccattggagctacccttatcggaagagcttacattcctgttgatcaagtcattaacggcgaggaagtggatcagtgggttgagatcttggataatgacagaaaccctattcagggaggatcaaagattcatgtcaagcttcaatatttccatgttgaggaggatcgtaactggaacatgggtatcaaaagtgccaagttccctggagtgccatacacattcttctcgcagagacaaggctgcaaagtttctctgtaccaagatgcccatattccagacaactttgtccctagaattcctctcgctggagggaagaactatgagcctcaaagatgttgggaggatatttttgatactattagcaatgcaaaacacttgatctacattactggttggtctgtttatgctgagattgctttagtgagggactcgaggaggcctaagcctggaggtgatgtgaccattggtgagctactcaagaagaaggctagtgaaggtgtcagggttcttttgcttgtttgggatgacagaacttctgttgatgtgctgaagaaagatgggctcatggctactcatgatgaagagaccgagaatttcttcagggaacgggatgtccattgtattctgtgccctcgtaacccggatgacggtggtagcatagtccaaagtttgcagatctctactatgttcacgcatcatcagaaaatcgttgttgtggacagcgagatgccaagcagaggaggatcagaaatgaggagaattgtgagttttgttggcggtattgatctttgtgatggaagatacgactactccgttccactccttgttcaggacattggacacagtccaccatgatgacttccatcaacctaacttcactggtgctgctatcactaaaggtggtccaagggagccttggcatgacattcactcccgtcttgaaggtccaattgcttgggatgtcatgtacaacttcgagcagagatggagcaagcagggtggtaaagacattctggttaagttgagagatcttagtgatattattatcaccccttctcctgttatgttccaagaggaccacgatgtgtggaatgtccaattgtttaggtccattgatggaggagctgctgctgggtttcccgagtcgcctgaagctgctgcggaagccgggcttgtaagtgggaaagataacatcattgataggagtatccaagatgcttacattcatgcaatcagacgtgctaaggatttcatctacgttgaaaaccagtacttccttgggagttcttttgcttgggcagccgatggtattactcctgaggacatcaatgccctgcacttaatcccaaaagagttgtcgctgaagatagttagcaagattgagaaaggagagaagttcagggtctatgttgtggttccaatgtggccagaaggtctcccagagagtggatcagtgcaagctatattagactggcagaggaggaccatggagatgatgtacaaggatgtgattcaggctctcagggcccagggtcttgaggaagatccaagaaactatctgacattcttctgtcttggaaaccgtgaggtcaagaaagatggagagtatgagcctgctgagaaaccagaccccgacactgattacatgagggcgcaagaagcacgccgtttcatgatttacgtccacaccaaaatgatgatcgttgacgatgaatacattatcattgggtctgctaacatcaaccagaggtcaatggacggtgcaagagactctgagatagcaatgggaggttatcaaccacatcacttgtcccatagacaaccagctcgtggccagatccatgggtttcgtatgtcactctggtacgaacacctgggaatgctcgatgaaaccttcctcgatccaaagctttcggaatcgattgagaaagttaaccgcatttctgacaagtattgggacttttactcaagtgagtcactcgaacatgaccttcctggtcacttgctccgctacccgatcggtgtagccagcgaaggcgacatcactgagcttccaggatttgaattcttcccggacacaaaggcccgtatcctcggcaccaaatcagactacctgcctccaatccttacaacctaatctcactaagcatgtcaagtaatgatctctctctccctctctgctttgctgctgttgtagctttgaataaaacttgagtgtctacctttagaattaagaagtcaaatggttgttatgatgatgcacttctttacccctttggtttttatattcgtacaatgacgtggtgagagaatgtagctttgtgatcttgttttgttgttgttatgtacctttggacttatgaatcttatatctgatccttttctttttatttagtgtgtttcacatccaaaaaaagnnnnnnnnnnnnnnnnnnnnnnnnnnnnnnnnnnnnnnnnnnnnnnnnnnnnnnnnnnnnnnnnnnnnnnnnnnnnnnncg

SEQ ID NO: 88112 - DNA, 654 bp, Arabidopsis thaliana columbia
  unsure (1)..(654): unsure at all n locations
atacngactcactatagggaaagctggtacgcctgcaggtaccggtccggaattcccgggtcgacccacgcgtacgcaccctagtaccctttttctctcttattcttctatcttcctcctcctctatctttcgctcgagccattgagcaattatgtcgattccttgtctaaccgaagagacagccaaaactgttcttcgccaggtggagttctatttcagtgatagtaatctacccattgatgatttcctcaagaagactgttacagagagcgaagatggcttggtgagtttggcgttgatttgctcctttagtaagatgagaggatatttgaagttgggtgattctaaaggagatgatattcctgaagataccatcaaagctgttgctgatactcttcgaacctcttctgctctcaagatttctgacgatgggaaaaaggttggtacgagtactgaattgttgaagctggaagatttgattgagcaacttaatgctagaacagtagctgcgtcacctttctcctatgatgttaaaagggaagacgtggaatcctttntcagtcagtatggaaaggttaatagtgtgaggatgcctcgtcatgttgcagagtcgaggatattntctggtgttgccttggttgagttccctacag

SEQ ID NO: 88113 - DNA, 306 bp, Arabidopsis thaliana columbia
  unsure (1)..(306): unsure at all n locations
cnnnnnnnnnnnnnnnnnnnnnnnnnacgcctgcaggtaccggtccggaattcccggttcgaccccccccgcccgcgcacgcgtggggctttacagaggaagcatgatcgagtgtgaggataattggaactgtcagctcgagaacatcacctatacggccaaggatggtaaggtatcacagcttgagcatgtcttcattcgaggcagcttagccaggtcttctgtcataccagacatgttaaagaatgctccaatgttcaaggatgttaggggcaagggaaagagcgcttcactaggtgtaggcag

SEQ ID NO: 88114 - DNA, 885 bp, Arabidopsis thaliana columbia
  unsure (1)..(885): unsure at all n locations
tacgcctgcagtaccggtccggaattcccggttcgagcgacgcgtaagcctggctgcgaggacgacagaagggggtcgctcttctttccttccgccatttttttctttctaggttgcagagttaaaggagaaggttttcaattagggttttgtagggagaaagatgagccgaagtttgggaataccggtgaagcttcttcacgaggcctcaggtcatatcgtgacggtggagctaaagagcggcgagctttacagaggaagtatgattgagtgtgaggataactggaactgtcagctcgaggatattacttataccgccaaggatggtaaggtatcacagcttgagcatgtcttcattcgaggcagtaaagtcaggtttatggtcataccagacattctcaaacatgctccaatgttcaagaggttagatgctagaatcaagggaaagagctcatcactgggtgttggcagaggtagaggtgcaatgcgagggaaaccggctgccgggcccgggcgtggaactggaggaaggggagcggtaccacctgtgaagagatgattgattttacgctcaacatgtaagctttgattctgggatagtctttctgtgatatccaggtgaaagccgcctttcttggttctgtcattaatgctttagagaaccctgtaaaaccaaacaagagagagagatatccagatgccctactagttctgtattttgggttaccaagatgtttgaatcattgacaagttttcgttgtgatctattttcttctttgcgccnnnnnnnnnnnnnnnnnnnnnnnnnnnnnnnnnnnnnnnnnnnnnnnnnnnnnnnnnnnnnnnnnnnnnnnnnnnnnnnnnnnnnnnnnnnnnnnnnnnnnn

SEQ ID NO: 88115 - DNA, 833 bp, Arabidopsis thaliana columbia
  unsure (1)..(833): unsure at all n locations
cccacgcgtccgcccacgcgtccggacgaagatgagtcggagtttggggattccggtgaagcttcttcacgaatcgtccggtcatatcgtgagtgtagagatgaagagcggtgagctttacagaggaagcatgatcgagtgtgaggataattggaactgtcagctcgagaacatcacctatacggccaaggatggtaaggtatcacagcttgagcatgtcttcattcgaggcagcttagtcaggtttttagtcataccagacatgttaaagaatgctccaatgttcaaggatgttaggggcaagggaaagagcgcttcactaggtgtaggcagaggtagaggtgctgcaatgcgagccaaaggtactgggcgtggaacaggaggaggaagaggggctgtgccacctgtgaggagatagtttagttaaccctcgtaatgtagcttcggctcgtgagacattctctgcagtatccatgagaatccgccatcttcagctcgtcacttatgcatttaaggtacacagcaagtaaaatctttaagacatggagggaagagagaaagaggaactagttctgtgttttgggttactaagatgtttgaaaaaatgacatgttttgttaatgtggtcattgagaggcttccccacatcttatgtataatatagcacgaatcaaaattctataatgaatgattcgtctttttaatcttggtagaaatcaggaatcattaaattgtgggttttctaaaaaaaaaaaaaaaaaaggcggcccgctctagaggatcccnagcttacgtacgcgtgcatgcgacgtcatagtcttnctatagtgtca

SEQ ID NO: 88116 - DNA, 544 bp, Arabidopsis thaliana columbia
  unsure (1)..(544): unsure at all n locations
ccggnccggaattccttgttttacccacgggtgcgtgcgggcgtacactatccttccgccattttttgctttctaggttgcagagttaaaggagaaggttttcaattagggttttgtagagagaaagatgagccgaagtttgggaataccggtgaagcttcttcacgaggcctcaggtcatatcgtgacggtggagctaaagagcggcgagctttacagaggaagtatgattgagtgtgaggataactggaactgtcagttcgaggatttacttataccgcctaggatggtaagggattacagctttggcattgttttatttcgaggcttgttaagttagtgttatttggtcattacctatactattttaatacttgctttcaatggtttaattcattttttattgtcttctaatgctaggttaagatgctttttttcttggttttctattttttatttatcttttttaatgtatgttttcttcttttgttgttgttattcatcttttttttttaattttttgttattacatttcattcttttg

SEQ ID NO: 88117 - DNA, 593 bp, Arabidopsis thaliana columbia
  unsure (1)..(593): unsure at all n locations
gaancccggggcggacccacgcgtccgcaccgatacatacaccgacacatatgcatgtgtgtaagtatacgctcaagtgggggagcgttctcagatccctccaggaaagcaacgctttataagatgactcattttctgaaacgaactcaactccaagtgtgacacattctcaacgagagatcgtgatcgtacttatatacacacacgcacacttgcaaagcttgggaggaagaagtgatggacaagtatgaggttgtgaaggatttgggagctggaaattttggtgtggctcgtcttcttagacacaaagagaccaaagagctcgttgctatgaaatacattgagagaggtcgcaagattgatgagaatgtggcaagagagattatcaatcatagatcacttaggcatcctaatatcatcagattcaaggaggtgattctgactccaactcatcttgcaattgtaatggagtatgcttctggaggagagctctttgaaagaatctgtaatgctggtagattcagtgaagctgaggctagatacttctttcagcagctgatttgtggcgtggattactgtcattcactgcaaat

SEQ ID NO: 88118 - DNA, 1320 bp, Arabidopsis thaliana columbia
gactcatattaggaaatctggtacgcctaaatgtaccggtccggaattcccgggtcgacccacgcgtgcgtctcgtcttcaagtgaacagattcgcatcaaaccctaagaaactgaagatgaggccgatcctgatgaagggacatgaacgtccattgacgtttctgaggtacaacagagaaggagatctgcttttctcctgcgccaaggaccacacacccaccctctggtttgccgataacggcgagcgccttggaacttaccgtggtcacaacggtgctgtttggtgctgtgatgtctcccgagactcgtcaagattgatcactggtagtgctgatcagactgcaaagctgtgggatgtaaaatctggaaaagaattgttcactttcaagtttaatgcccctacgaggtctgtggatttcgctgttggagatcgtcttgcagtgattaccactgatcacttcgtggaccgtaccgctgctattcatgtgaagcgtattgcggaagatcctgaggaacaggatgctgagtctgtgcttgtccttcattgtcctgatggaaagaagaggatcaatagagctgtttggggtcccctgaaccaaactattgttagttgtggtgaagataaagttatcagaatctgggatgccgagacgggaaaattgctcaagcaatcagatgaggaagtgggtcacaagaaggacattacatcgctctgcaaagcagctgatgactctcacttccttacaggttcacttgacaaaactgcaaagctttgggacatgagaacgctgactcttcttaagacttacaccactgtggtgcccgtaaatgctgtctccctgtctccacttctcaaccatgttgtacttggaggtggtgaagatgcatcagctgtgactaccactgatcatcgtgctggaaagtttgaagctaagttttgcgacaagattctgcaagaggaaattggtggtgtgaaaggtcattttggacctataaatgctttggcattcaatcctgatgggaagagtttctctagtggaggtgaaggcggttacgtgaggctgcatcattttgactccgactacttcaacatcaagatttagattccgactacttgaacgtcaaccttttagaatctttgaaaaagtctcccattccggattttgttttctctctcttttaacattttcatgtttttatttactaccaatacaaataccttgatgataaagcttttgaattttgacagaaaaaaaaaaaaaaaaagggcggccgctttaaaggatacccagcttacggacgggggccagccacgtta

SEQ ID NO: 88119 - DNA, 338 bp, Arabidopsis thaliana columbia
tgggcggacgcgtgggccaatttcgacgttgaacacaaacccttgcttctctcttctctgtttctctctcgcagcgaaaaatcatggcgattagctccttcaagcatgaacatcctcttgaaaagagacaagctgaagcagcacgtatcagggagaagtatccagacagaataccagtcattgtcgaaagagccgagaagagtgatgtcccggatattgataggaaaaagtacttggtcccagctgatttgactgttggccactttgtttatgttgtacggaagcggatcaagctcagtcccgagaaagccatcttcatttttgtcaagaacattcta

SEQ ID NO: 88120 - DNA, 531 bp, Arabidopsis thaliana columbia
ccacgcgtccgcacacacgtccgaccgatctatcaagcaagtggttcctctctctctctacctctcgtttttggccaacgtcgtcgtcttcacgatccacgacgattcagttcttgagttccggcgattatcggtctctcacttctggttccgttgaacccctcatttctcttctcgcccgtgctctcaaattccgatatttgcccctgtgattcgaaaccctaatttcgcctatcaatctggaaaatctctcaattcgaagactttagcagcgcaaagatactctatccgggtaataagatcgaagaaaccatcaatttcttaccaaagtcgtgattcttggatctcgtctttgtttgatggacacaattagggtttccaaggaggttcctggatcttcgaaatcgaccgcacagtcgctcacggagtcgacctctcgcacggaaaccatcaatggctcccacgaattcaagatcagcggctactctttggtcaaaggcatggggattggcaaatacgttgcctcggata

SEQ ID NO: 88121 - DNA, 1964 bp, Arabidopsis thaliana columbia
  unsure (1)..(1964): unsure at all n locations
nnnnnnnnnnnnnnnnnnnnnnnnnnnnnnnnnnnnnnnnnnnnnnnnnnnnnnnnnnnnnnnnnnnnnnnnnnnnnnnngacccacgcgtccgaggagaagaaggataaggatgataacggtaagcgaagtttcctcttactcttcttcttcttcaaacttcgcgtctctgtctcgtctcaatcacaaatcatcttcgagattgcgaagctcttctctttacaaaggaagcttcttctctgtttcgacaaagaccaggaggaacacttgtaaagccaaatcatggaatctcggtcttgttatcaactctagaagctctgaggcttcggtttttgatccgttggggatcaatccagatgaaacttctggtttaagtagcatttgggaaagctttgtgagtcttttgtcaccatcatttgaaagctcttccggtaacaggcgagataagccgtcttctggtagaggcgtggcagctgctattgaggacagttccattgattttggagatttcttcaaagggccattgccagggaagtttctgaagcttcttgggtttttagctctctctcggcttggaatttacataccactcggcggggttaatcgagaagcttttgttggaaatttggatcagaatagcattttgagcactttggatacattttctggtggaggcataggtagacttggtatatgttctctcgggattgttcctttcatcaacgctcagattgtgtttcagcttcttgctcaagtctatccaaagttgcaagatcttcagaaaaaagaaggtgaagctggtagaaaaaagattcttcagtatactagatatgcttcagttggttttgcgatagtacaagcaatcggacaagtgttttaccttcgtccttacgttaatgacttcagcacggaatgggttgtttcttctgttacgttgttaacgcttggttctcttctcactacatatattggagagagaatctctgatctgaaacttggaaatggcacttccctattgattttcacaagtatcatctcttacttgcctgcatcattcggtagaacaacagcagaggccttacaggaaggaaactatactggtcttggaaccatcgttgtttcatttctcctcttggtactcgggatagtatatgttcaggaagcagagaggaaaattccgctcaattatgcctcgcgatacaccagcaaagctggtgggcttcagaaatctgcttatcttccattcaaggtcaatagtgctggagtaatgcctatcatattctccacatcatctcttgctcttcctgctactttagcacgatttaccggcatatctgctttgaagaatgttgcttttgctttaacccctggaggttctttctatcttccaaccaatatacttctcatagctttcttcaactactactacactttcttgcaacttgacccggacgacgtgagtgaacaattaaaacgccaaggtgcatcaatccctctagtccgacctggtaaaagcactgctctcttcatcaaaaccgtccttggccggatatcggttcttggttctgcatttctggctgttctagctgctggtcctgctgtagtcgaacagatcactcacttgacagcattcagaggatttgcaggcacttctgttctgatccttgtcgggtgtgcgacagatactgcaagaaaggttcaagcagagataatctcgcaaaagtacaagaacattgagttttacgagcttgacaagtatgatccatgaactggaccttctgttttacatataatacccatcaaaccaagttactgtgttctcttgtcatagattgtaacaaatgttttaaactttgattagtatataatgcacttttgtcatgagcttgccaaaaagggcgccagctctagaggatccaagcttacgtacgcgtgcatgcgacgtcatagatcttctataggtc

SEQ ID NO: 88122 - DNA, 578 bp, Arabidopsis thaliana columbia
  unsure (1)..(578): unsure at all n locations
cagtcacttaaaaccctaaattatgacgatcgcaccggcattgcagacgacgttcgtgtcatcaaccaacttcctgaaacattcttcttcgtggggatcaccatcaccgaacaatgtgattcttcccaaaaacaagagatcttcttcctccgtagttgtcgccgccgtcggtgatgtctcttctgacggaacaatctacttaatcggcggtcacatccgccgttgcactcgtcggaactgcattcccgatcctcttcaaacgcaaagacacgtgtccggaatgtgacggagcaggatttgtgaggaaaggaggagtgactctnagagccaacggcgcacggaaggatcttcctcagatccgtttgtgctaacttgcaatggactccgggaagctttacccagattgataaatcataaggctttcttcatatatatgtaaaaaggtccatttctcattccccttctttttacaatataccccttagggagaggtaggttcgattgccatgggtctttggggtgggggggtttttttcttnttttttaacaggnngttttttgggaagtttttnttttgc

SEQ ID NO: 88123 - DNA, 710 bp, Arabidopsis thaliana columbia
  unsure (1)..(710): unsure at all n locations
acgtcacgnagcaaatccaaattcaaaacctttccataaaaatcaaatcacttcttcttattacttcccccaaatcgaaatcagtcacttaaaaccctaaattatgacgatcgcaccggcattgcagacgacgttcgtgtcatcaaccaacttcctgaaacattcttcttcgtggggatcaccatcaccgaacaatgtgattcttcccaaaaacaagagatcttcttcctccgtagttgtcgccgccgtcggtgatgtctcttctgacggaacaatctacttaatcggcggagccatccgccgttgcactcgtcggaactgcattcccgatcctcttcaaacgcaaaggcacgtgtccggaatgtgacggagcaggatttgtgaggaaaggaggagtgactctgagagccaacgccgcacggaaggatcttcctcagatcgtttgtgctaactgcaatgggctcggaaagcttaaccagattgataattcataggtcttcttcatatatatgtgaaaagccccttttctcattcctcttcttatctacaatatacctctgtaagagtagatagcttcgaatgatcaatggttgcttggagatggatggatatatatatacaattgcttttttaaaaaaaaaaaaaaaaaaaaaaaaagggcggccgctctagaggatccaagcttacgtacgcgtgcatgcgacgtcagg

SEQ ID NO: 88124 - DNA, 832 bp, Arabidopsis thaliana columbia
  unsure (1)..(832): unsure at all n locations
cnnnnnnnnnnnnnnntcacgttaggggagctactacgcctgcaggtaccggtccggaattcccggttcgacccacgcgtgcgcccacgcgtccagtcacttaaaaccctaaattatgacgatcgcaccggcattgcagacgacgttcgtgtcatcaaccaacttcctgaaacattcttcttcgtggggatcaccatcaccgaacaatgtgattcttcccaaaaacaagagatcttcttcctccgtagttgtcgccgccgtcggtgatgtctcttctgacggaacaatctacttaatcggcggagccatcgccgttgcactcgtcggaactgcattcccgatcctcttcaaacgcaaagacacgtgtccggaatgtgacggagcaggatttgtgaggaaaggaggagtgactctgagagccaacgccgcacggaaggatcttcctcagatcgtttgtgctaactgcaatggactcggaaagcttaaccagattgataaatcataagtcttcttcatatatatgtaaaaagctccatttctcattcctcttcttctctacaatatacctctgcaaaagtagatagcttggaatgatcaatggttgcttggagatgggtggatatatatatatatatatatatatacaattgcttttttatgtgtaagtttctttgctttcttgttctgtaagaaattgtctgagtattattgtaagtttttaagcagttatagaaaaaaaaaaaaaaaaaagggcggccggtctagaggatccaagcttacgtacgcgtgcnnnnnnnnnnnnnnnnnnnnnnnnnnnnnnnnnnnnnnnncc

SEQ ID NO: 88125 - DNA, 673 bp, Arabidopsis thaliana columbia
  unsure (1)..(673): unsure at all n locations
tccccnggnnngntttccntgttcccaaccttatcggcccnnttgggaagctggtcccctncngtccgnccggattccggntnccccagaacgaaaaataaaaaagaagaaactaacaaaacaaaaaaaaaaatggaggccgggaaaacaccaccgacgacgacaacaacgacggagaagaaaacggagcaagtgaaagacaacgacttgccgaccgatagcccttacatggcgacgggtactttggaagattacaaattgaaagcttatggagccgaaggtcaccaagagcctactcctggtcttggaggtggctccaccgatgctcctactccttctggcgacgcacccgccgccactaccaccgatgcgaaagctccgtgaaaaaaaagaaagactataataatgaacgggttttgtggatcgtcggaaaacaaacccataattgtagtatgttcaataactgatccagcttcgtttcttaacgtttttatggtttaattaaaaatgtatttgcgtctaatgctgaatgctaaagttcgagtttcgtatcaaatgaagttgtaacgatttaataattaatgtgaagcttatttctttttgataatgaccaatgttatctagttttatcgccgtcgatcatataacttaatttatnaatttaggattcanc

SEQ ID NO: 88126 - DNA, 649 bp, Arabidopsis thaliana columbia
  unsure (1)..(649): unsure at all n locations
gcctgcaggtaccggtctggaattcccgggtcgacccacgcgtccgcgaaattggacgtcttgaagttctgaggatccatacaaagaacatgaagctggctgaagatgtggatctcgaaaggatctcaaaggacacacacggttacgtcggtgctgatcttgcagctttgtgcacagaggccgccctgcaatgcatcagggagaagatggatgtgattgatctggaagatgactccatagacgctgaaatcctcaattccatggcagtcactaatgaacatttccacactgctctcgggaacagcaacccatctgcacttcgtgaaacttgttgtggaggttcccaacggtctcttggaatgatattggaggtcttgagaatgtcaagagagagctccaggagactgttcaataccccagtcgaggcacccagagaaggttgtaagaaattcggggttgtcttccatcaaaagggagtccttttcttacgggcctccctggatgtggggaaacccttttggccaagntntttncaacgggtgccaaggttatttnacnagtntaaggggcccgnggtttttcaaatnggttttgggnggtaggaattttcggaattttgaaagcngnaacggcnnggttttttttnnng

SEQ ID NO: 88127 - DNA, 533 bp, Arabidopsis thaliana columbia
ctggacgcctgcaggtaccggtccggatttcccggggcgacccacgcgtccgcccacgggtcccgacggctgcgagaagacgacagaagggtacggctgcgagaagacgacagaaggggacggctgcgagaagacgacagaaggggatgtgattgatctggaagatgactccatcccccctgaaagccgcgggtccatggcagtcactaatgaacatttccacaccgctctcgggaacagcaacccatccgcacttcgtgaaactgggtgtggagggtcccaacgtcccttggaatgatattggaggccttgagaatgtcaagagagagctccaggagactgttcaatacccaggcgagcacccagagaaggttgagaaattcgggatgcccccatcaaagggaggccctttctacgggcctccgggatgggggaacgccccttggccaaggtattggcaaccagggccaagcaaattcatcagtggcaaggggcccgagccccgacaaagggggtggagagagagagcaaag

SEQ ID NO: 88128 - DNA, 2818 bp, Arabidopsis thaliana columbia
  unsure (1)..(2818): unsure at all n locations
ctgngctctttcagatcccattatcacaaacacttcgctctctctctctcagagaagaaaccaaagaagaagaaaaagctctcaactttcttcgatttctcagggaactctttcgttaatctcaaactcaatcatgtctaccccagctgaatcttcagactcgaaatcgaagaaagatttcagtactgctattctcgagaggaagaagtctccgaaccgtctcgtcgtcgatgaggctatcaacgatgataactccgtcgtctctcttcaccctgcaaccatggagaagcttcagctcttccgtggtgataccattctcatcaagggtaagaagaggaaggacactgtctgcattgctcttgctgatgagacatgtgaggagccaaagatcagaatgaataaagtagtcagatctaacttgagggttagactgggagatgttatatctgttcaccaatgcccagacgtcaagtacggaaagcgtgttcacatcctgcctgttgatgatactgttgaaggagtgactggaaacctatttgatgcttacctgaaaccttatttccttgaggcataccgtccagtgaggaagggtgatctcttcctagtcagaggaggaatgaggagtgtggagttcaaagttatagagacagatcctgctgagtactgcgtggttgctccagacacagagattttctgtgagggtgagcctgtgaagagagaggatgaagaaaggctagatgatgtaggttatgatgatgttggtggtgtcaggaaacagatggctcagattagggaacttgttgaacttcccttgaggcatccacagctattcaagtcgattggtgttaagccaccgaagggaattcttctttatggaccacctgggtctggaaagactttgatcgctcgtgctgtggctaatgaaacgggtgcctttttcttctgtatcaacggacctgagatcatgtccaaattggctggtgagagtgagagcaacctcaggaaagcattcgaggaggctgagaaaaatgcgccttcaatcatattcattgatgagatcgactctattgcaccgaaaagagagaagactaatggagaggttgagaggaggattgtctctcagctccttacgctaatggatggactgaaatctcgtgctcatgttatcgtcatgggagcaaccaatcgccccaacagtatcgacccagctttgagaaggtttggaagatttgacagggagatcgatattggagttcctgacgaaattggacgtcttgaagttctgaggatccatacaaagaacatgaagctggctgaagatgtggatctcgaaaggatctcaaaggacacacacggttacgtcggtgctgatcttgcagctttgtgcacagaggccgccctgcaatgcatcagggagaagatggatgtgattgatctggaagatgactccatagacgctgaaatcctcaattccatggcagtcactaatgaacatttccacactgctctcgggaacagcaacccatctgcacttcgtgaaactgttgtggaggttcccaacgtctcttggaatgatattggaggtcttgagaatgtcaagagagagctccaggagactgttcaatacccagtcgagcacccagagaagtttgagaaattcgggatgtctccatcaaagggagtccttttctacggtcctcctggatgtgggaaaacccttttggccaaagctattgccaacgagtgccaagctaatttcatcagtgtcaagggtcccgagcttctgacaatgtggtttggagagagtgaagcaaatgttcgtgaaatcttcgacaaggcccgtcaatccgctccatgtgttcttttctttgatgagctcgactccattgcaactcagagaggaggtggaagtggtggcgatggaggtggtgctgcggacagagtcttgaaccagcttttgactgagatggacggaatgaatgccaagaaaaccgtcttcatcatcggagctaccaacagacctgacattatcgattcagctcttctccgtcctggaaggcttgaccagctcatttacattccactaccagatgaggattcccgtctcaatatcttcaaggccgccttgaggaaatctcctattgctaaagatgtagacatcggtgcacttgctaaatacactcagggtttcagtggtgctgatatcactgagatttgccagagagcttgcaagtacgccatcagagaaaacattgagaaggacattgaaaaggagaagaggaggagcgagaacccagaggcaatggaggaagatggagtggatgaagtatcagagatcaaagctgcacactttgaggagtcgatgaagtatgcgcgtaggagtgtgagtgatgcagacatcaggaagtaccaagcctttgctcagacgttgcagcagtctagagggttcggttctgagttcaggttcgagaattctgctggttcaggtgccaccactggagtcgcagatccgtttgccacgtctgcagccgctgctggggacgatgatgatctctacaattagtgataacttctttatcctttttttttttaagttttaaaactcgaattctctacttttggattactggggaaagtgatactgattctttcctcgtgtttttaagttatccgaatctcttgtgtttgggtttttaatcaatgttcttaattttcgtttcaaaaaaaaaaagatcataaaaaagggcggcccctctacgagggtccaagcttacgtaccgccggcgtgcatgcgacgtcaagatcttctatagggtac

SEQ ID NO: 88129 - DNA, 500 bp, Arabidopsis thaliana columbia
  unsure (1)..(500): unsure at all n locations
agaagaaacccaaaagcagaagaagatggtggcgatatctatgtacagaggcaaccttcacaaagttcccgacgtacctcgccggtggataatgcctgaccgtaatctctctttcaaggatttcaaatctcttcttcatcgccgtaaaaaagccctttctcgtctcccccttaaccctaatttgaaccttagcgtcaagactgagttggttactgatcaggagaatccaattcttccatctgaagcgaacggttcttctgggaagcagaagctatttgaggtaaagagagaggagatttgtgggaatcgggttaagggagatgagaacaacgacagaggttttgaaggagctcgatcagacggtggagatcgtcccgggagagtgacggaatcaaaggaaaccgataatgtgccacacaagtatgcggccaaggangaggagacgantgaagcagctgaaaaagtaccaagcgagacagagttaaaacggnaagaagtgg

SEQ ID NO: 88130 - DNA, 835 bp, Arabidopsis thaliana columbia
  unsure (1)..(835): unsure at all n locations
cacacgcgtccgaagaaactccggagcagtggattccggtcctgaggaagatctgctggttcttggtcttggcacctcatgacccaatgcaatcaagcttgctcaatgcaactctggaagacaagaatttatcagaaatccctgatttcaagatgcttctaaaacaggtagtggcaatggaggttattcaatggtcatctctgtggaacaaatccaaggatgagttcgagaaagagaaaagcatgattggaggttctttgggtgacaaagctggtgaagatctgaaactgagaatcatcgaacataatatcctcgttgtctcaaagtactacgcaaggataaccttaaagagacttgccgagcttttatgcctgagcatggaggaggcggagaagcatctatcggagatggtagtgtcaaaagcactgattgcaaaaatagacagaccatctggaattgtgtgcttccagatcgcaaaggacagcaacgagattctaaactcgtgggcagggaatttggagaagcttctagatcttgtggaaaagagttgccaccaaattcacaaggaaaccatggttcacaaagccgctctcagaccttgaaaacatgcggtcttcttcatgaaaacttttcaggatcttcttcgttgagttattagcatctttatgtggtaaaaactcgaatcagtgtttccttttaaaaattgtactatggatctgtacactaacgaagtgttttgccacttattgggtaaaaaaaaaggttggtaaaaaaaagggcggccgcttctagaggatccaagcttacgtacgcgtgcatgcgacgtcagagnnnn

SEQ ID NO: 88131 - DNA, 447 bp, Arabidopsis thaliana columbia
cctcattcttcttaattccgatttttgagtgatggctatggcctctgcttctggttctgctctttgcttcactgatgcttctagctctcttgctttaagacgcgattgtggagctctttgcttgcctcctaggacagttacgtttggatttgtcgataaacctcttgtcaatctcgagcgattaagattatccactttgaagattagagcatcaaatgctactgctgtggagaatggaaagcaagaaggaagtgctgctgattctgataaagttccaactccagttgttataatcgaccaagattctgaccctgatgcaaccgttcttgaagttacattcggagatcgtcttggagctttacttgacactatgaatgcgctcaaaaacttgttactcactttgtgctagctctgcataatcgaccaacattcacaaaagcttcttac

SEQ ID NO: 88132 - DNA, 2940 bp, Arabidopsis thaliana columbia
gttttttcttctgaagagtgatatatattctacctttctctggttaaagaaactccctgaatccaccggttatgtcttgaccggctttaagcctataaactgatgccctaagacacctttttaggtttctcaataattctccgcatctatcttttcttctccacaagtaagggaaccagaaaaccagggaagaatccgagcaagctagggtttcattgtgtgcacaaaatgggatatacaggcagaagaaaatcgagataaatcaactaaatgatttggataatcatcttgaagatttgaaggatttcgagactaagtccggcgcagaagtcaccatggagaatcctttagaagaagagcttcaagatcctaatcagcgtcccaacaaaaagaagcgttaccaccgtcacacacaacgccagattcaagagctagagtcgttcttcaaggaatgtcctcatccagacgataagcaaagaaaggagctgagtcgcgagctaagcttagaacctcttcaagtcaagttctggttccaaaacaaacgcactcaaatgaaggcacaacatgagaggcacgagaaccagatactgaagtcagaaaatgacaagctccgagcagagaacaataggtacaaggatgctctaagcaacgcaacatgcccaaactgtggtggtccggcagctataggagaaatgtccttcgacgaacagcatttaaggatcgaaaatgctcgtttacgcgaagagattgacagaatctctgccatagctgctaaatacgtagggaagcctttaatggctaattcctcttctttccctcagctctcttcttcacaccacattccctcgcgctcgcttgatcttgaagttgggaactttgggaacaataacaatagccacactggtttcgttggggaaatgtttggaagcagcgacattttgaggtcggtttcgataccttctgaggctgataagcctatgattgttgagttagctgttgcagcaatggaagagcttgtgagaatggctcaaactggtgatcccttatgggtttcaagcgataattctgttgagattctcaatgaagaagagtattttaggacgtttcctagaggaattggaccgaaacctatcggtttgagatcagaagcttcaagagagtctactgttgttatcatgaatcatatcaatctcattgagattctaatggatgtgaatcaatggtctagtgtgttctgcgggattgtatcaagagcattgactctagaagttctctcaactggcgtacgagggaactacaatggggcattgcaagtgatgacagcagagttccaagtcccatcgccgcttgtccctactcgtgagaactactttgtaaggtactgtaaacagcacagtgacggtatttgggcggttgtggatgtctctttggacagcctaagaccaagtccgatcactagaagcagaagaagaccctctggttgtctgattcaagaattgcagaatggttactccaaggtgacatgggtagagcatattgaggtggatgatagatcggttcacaacatgtataaaccgttggttaataccggtttagctttcggtgcaaaacgttgggtggctacacttgaccgccaatgtgagcggctcgccagttccatggccagcaacattccggcttgtgatctttccgtgataacgagtcctgaggggagaaagagcatgctgaaactagcggagagaatggtgatgagcttctgtaccggagtcggcgcgtcaaccgccgatgcctggactacattgtcgaccacaggatccgacgacgttcgggtcatgacccgaaagagcatggatgatccgggaagacctccaggcatcgttctcagcgccgctacttctttctggatccctgtagctccaaaacgagtgttcgattttctcagagatgaaaactcaagaagcgagtgggatatactttccaatggaggcttggttcaagaaatggctcatatcgcaaatggtcgtgatcctgggaatagtgtctccttgcttcgagtcaatagtgggaactcagggcagagcaacatgttgatcttacaagaaagttgtacggacgcatcagggtcctatgtgatatacgcaccagttgatataatagctatgaacgttgtcctgagtggtggtgatccggattatgtcgctttgttaccatccggattcgctattttgccggatggctctgctagaggaggaggaggtagtgctaatgccagtgctggagccggagttgaaggaggaggagaggggaataatcttgaagtggttactactactgggagttgtggcggttcactactcacagttgcgtttcagatacttgttgactctgttcctaccgctaaactctctctcggttcagttgctacagtcaatagtctgatcaaatgcactgtcgagcggattaaagccgctctggcctgcgacggagcctaatcgatgttttcggaaggtaagagtgaaaggggaggtttagggagtttatgataatgtttgtgttcttttggtttttaaagtcttttgagattctccaaaggaagtcaagaacgctcctttttgcgtttaatctcatttccgcgtttgttagcggacgggccaaagaaagaggcttgagaaagaaaaggtaaagaggttcgggtattgacttctgctggaaccaaaaaaaaaggaatcgggtttgttgtgtttcggcggtttagcattttgcgttttctttgttattatttatcattgactagtgaacagtttagcgttctgcttttcgcgtctactgtgaaactccttgttattaagccactctagtggtactgtcattatatattatgaatctatgaaactgtgtttattagtttgtttctttaatccaaacttgagattctcttct

SEQ ID NO: 88133 - DNA, 2012 bp, Arabidopsis thaliana columbia
  unsure (1)..(2012): unsure at all n locations
atattacatgactttagcctaagaaaaacttaagtcagttgtaaaacaatatcgatgtgtgattaagaagagatccaatttaacattacccacacaatcatttgattatttcctcctctccgtatctgtgtctctcttctcttgatcttttagtgttcttgctttgtcgcttcaacgcttaagtttggatttgtgtgagtctgcataatcatggcgaggaagatgcttgttgatggtgagattgataaggtggcggctgatgaagccaacgcgacgcactatgattttgatttgtttgtcatcggtgccgggagtggcggtgttcgtgctgctaggttttcggctaatcatggcgctaaggttggtatttgtgagcttccatttcaccctattagctctgaggagattggaggcgttggtggaacctgtgttatccgtggttgtgttcctaaaaagattctcgtctatggagctacttacggtggtgaacttgaggatgctaaaaattatgggtgggaaataaatgagaaagtcgacttcacatggaagaagcttttgcaaaagaagactgatgagatactaagactgaataatatctacaagcggttattggcaaatgctgcggtgaaattgtatgaaggtgaaggaagagtagttggtcccaacgaagtggaggtgagacaaatagatggcacaaaaataagttataccgcaaagcacatattgattgccactggcagtcgggcgcaaaagcctaatattcctggacatgagctggctattacatctgatgaagctttgagcttggaagaatttcccaagcgtgctatagtgcttggaggagggtatattgctgtggagtttgcatcaatatggcgtggaatgggtgctactgtagatttattcttcaggaaggaacttccgctaaggggttttgatgacgaaatgagggcactagttgctagaaatcttgaaggaaggggcgttaatctgcatccacaaacaagtttgactcagttgacaaaaacagaccaggggatcaaagtcatatcgtcccatggggaggaattcgtggcagatgtcgtcctatttgctactggcagaagtcctaataccaaaagattgaatttagaagctgttggtgttgaacttgatcaggctggagctgtgaaggttgacgagtattcacgaactaatatacctagcatatgggctgtaggagatgccacaaaccgaattaaccttacacctgttgcgttaatggaggccacctgttttgcgaacactgcttttggtggaaagcctactaaagcagaatacagcaatgtcgcctgtgctgtattttgcataccaccactagctgtagtgggtctcagcgaagaagaagcagtagaacaagcaaccggtgatattctggtcttcacctcaggctttaatccaatgaagaacaccatttctggacgccaggaaaagacattgatgaagctaatagttgatgagaagagtgataaggttattggagcatccatgtgcggtcctgatgcagctgagatcatgcaggggattgcaattgcgctcaagtgtggagcaaccaaagcacaatttgatagcacggttgggatacatccatcttctgcagaggaatttgtgacaatgcgcagtgtgaccagacgcattgcccacaaacccaaacctaagacaaatctatgaaccgcaaaatataaagagctatatagcatgaaaactcggtacacttagtttgatcaaagagtcagacaacgatgagtttaatcatactcgtgtcccaataaaggatttgtaatttttgtttgtttgtatgatgcttctcttcttacttacttgagaaaacatcaaggtttcttctcttattgcttagtggaactttattacaaagaattattctctgaaaaaaaaaaaaaaagnnnnnnnnnnnnnnnnnnnnnnnnnnnnnnnnnnnnnnnnnnnnnnnnnnnnnnnnnnnnnnnngtaac

SEQ ID NO: 88134 - DNA, 536 bp, Arabidopsis thaliana columbia
  unsure (1)..(536): unsure at all n locations
nnnnnnnnnnnnnnnnnnnnnnnnnnnnnnnnnnnnnnnnnnnnnnnnnnnnnnnnnnnnnnnnnnnnnnnnnnnnnnnnnnnccacgcgtgcgagcgaattaggtcaaaaaaacaaatcccaaatcttcatcatcttcaacgtttatggatttgagtcgttctcaaacaaattttcaattagggtttggttgttcacacgcatcaatgactccaacaccaacaccaagagctccaatcgcagacgattcgattaatctacaagtcgatcaaagtttccgatcattaccaacaactttctctccgattccgttacaattactcgaacaaaaagccgagaagaccaccaccgttgatgagccaaagaaagatggaggaggaggaggagatcaaaaggaagacgagcatttcagaatcttaggtcaccatatgtgtctcaaaaggcaaagagattgtccacttttgttaacgcaatcaaagcatccgaagagaagttccatcggtgattcagatctggaatcgcgacgtgctgctgta

SEQ ID NO: 88135 - DNA, 479 bp, Arabidopsis thaliana columbia
cccacgcgtccgcccacgcgtccgcccacgcgtccgcggacgcgtgggcgaaaaatcaggaagaagaagaagaagattgacaaacaaaaaggattcacctttagtgactgagtgagagaaagagattgaaggaaaaaaaaaaaaaaaagggtgaagctttggagagaggataaccacgtagaggattctaatccgtggttgcaaacgaaggacccagaatttctggaatctcttgcttcgatcgaatcactctcatgtctaacgaagactctcttccgcctttcactttgtttggtttggctgatgtcgagaattacggtctggtcactgacgcagacaattcgttaccttgagatatatacaatcaggtttttcaacatgtgtagaagggaaagtagtcaatcaaagagtctcgctttgaataagctattatcagttactcagtcgccaattctactacacctcatgaccctaatgtt

SEQ ID NO: 88136 - DNA, 936 bp, Arabidopsis thaliana columbia
  unsure (1)..(936): unsure at all n locations
aaaaaaaaaaacagaacaatttcttcttcctctgggatccataagttttgagattttggtggtcagtgtctgatggagtgtaatgcaaagccaccgtttcaatgggaattggaaaacttgatatcttttggcacttctacagctgaagttcctagaaagctaaaaccaatggagtgggaaattgatggatttgattgcacctctctgtattcttcaagctttgcctatgctggtagttcaggttctgatatagctcatgctttctctaaaagctcaaagtcaacttccattagctcttcatcagctgaagtaagaacacacaattttacatccgaaactggtgaaagtcttcctggagaatttgcaaaggggattgatacttctccaactcttgaactttcttttggctctggtgatccggttctcggtttaaagcttggtaaacgaacgtactttgaagacttttgggaagtggagaatgctaaaggtttgggacttcccgtgagccttgcttcgtcttctgtttctccggtgaagaaatcgaaatccattcctcagaggttacaaactcctcactgtcaagttgaaggctgtaatcttgatctttcatcagctaaagactatcatcggaaacataggatttgtgaaaaccattcaaagtttcctaaagtcgttgtgagtggcgtagagccgtcgggttctgccaacaatgtagcaaggttccactgtctctccgaggtttgatgaggagaaacggagctgtcgccgacggctctcagatcacaatgcaagacggcgcaagccaaatcctggagggacatatgatgggaaaccacaggtggtttttgtttgacaagtttactntcccncaggagtgggaaagtttttgcccttaagctnnccnagggtnttccggctaaaccgntccaaanttgc

SEQ ID NO: 88137 - DNA, 351 bp, Arabidopsis thaliana columbia
accacgcgtccgtttgtttttcttgatgcgagaatgaatctgagttcaagtgggttacaaggaccaatagccttttcctttagagatctctccctcctcgagttatcgtaagtgtacaaatgcaagccatacaaacacacactttccaagagctttcttcagttgaaatggaacttagtgacaaacggtgtgaagatgaaggattgtttggctgcagagaaaatcagtcagtagccaacaaagaaataactttgtgtgaatctgctgatgtatctattaaggagttgataaagagacttaatgaaggtaagcttttgtaacgaattggtaagagacaactgaaattttcct

SEQ ID NO: 88138 - DNA, 545 bp, Arabidopsis thaliana columbia
  unsure (1)..(545): unsure at all n locations
atgannnnnnnnnnnnnnnnnnnnnnnnnnnnnnnnnnnnnnnnnnnnnnnnnnnnnnnnnnnnnnnnnnnnnnnnnnnnnnccacgcgtgcgcgtgtcgcaagtatcaccgggaattgcaaagaagcagaggaccatgtacggagacgctacaaactggaatgaagatgagtatagagaatcaattttgaaggagcgagagatagagacacgcaccgtcttcagaaccgcctgggctcctccggcgagaatctctaatccagacgcatttgttgtagcctccagcgatggaactttagctttccattcactgaactcgcttgtgtctcaatcggcgagttttggctactcgaaaggtcaagatgttatggtggctgaacctgagagagtggttagggcacacgaaggtcctgcttatgatgttaagttctatggggaagacgaagatgctttggtacttaatttgggggatgatggganaagtagggggatggaaatggaaagaatttntcttaatcaaaaggtgtctcttcattttgaaagag

SEQ ID NO: 88139 - DNA, 410 bp, Arabidopsis thaliana columbia
cccacgcgtccggtttcttactaaggttgaatccatggtttccgaaacaaccaaatcttctccacttcactttgttctcttccctttcatggctcaaggccacatgattcccatggttgatattgcaaggctcttggctcagcgtggtgtgatcataacaattgtcacgacgcctcacaatgcagcgaggttcaagaatgtcctaaaccgtgccattgagtctggcttgcccatcaacttagtgcaagtcaagtttccatatctagaagctggtttgcaagaaggacaagagaatatcgattctcttgacacaatggagcggatgatacctttctttaaagcggttaactttctcgaagaaccagtccagaagctcattgaagagatgaaccctcgaccaagctgtctaa

SEQ ID NO: 88140 - DNA, 459 bp, Arabidopsis thaliana columbia
acaagcttagatctctccacagttctttcgttatcttccttccacattgacacttgccttaagaagaggccccgggcgcggggctggaattctttcttcttcaagatttgtaaatgggtgttagttcttcaaagatctaaaatatcaagatcaggaagaaatgggaggtgacttgaaaagccagctatctagagagagccatgtgtttggacttaaggtgtgggaagtaattggtatagctgttgcattgctcatcatagctatcctctctgttctttcgtgttgtcttacttcgaaaaagaaatcaagaagatcgaaaaccggtcttccggttatccaaactcctccggtggtctccaaagagatcagagaagtgagagttgagcatgtctcagctagtaactttgctcctggtgaaggcattcttctaacaattcaggacaaaaataacaaagactc

SEQ ID NO: 88141 - DNA, 656 bp, Arabidopsis thaliana columbia
  unsure (1)..(656): unsure at all n locations
cnnnnnnnnnnnnnnnnnnnnnnnnnnnngcggggacgcctgcaggtaccggtcccgtatacccggggcgacccccgcgtccgtacggccgcgagaagacgacaggaggggatgtttggaacttcttgaggactatggatgttccggctaacacattgcatgcggcagggtatatatcgattggatgtgagccttgcacgaatgcgcctttaccggggcggcacgagagagaagggagatggtggtgggaagacgcccaagccaaggaaggtggactccacaaagggaatggcaaagaaaactccgatgatgctaaagtgaagggggaatcgaaatccgccggggcagatatctcgaagagtgagaatcctgggactttgagcaggcaggggattgagaattcgatgaaggtggagaaccgtaaagagccttggatcgggcgtgccttaggcgccggggggccccctttggcaagccatggaaagcatcgtatgatgaacgggcggataaacgggccggaagtgggattaaggctgccaaacccagagcagatggtgaccagaaggagtttgctaagcaggaattgcagctcggtagcttccctaccattctggttttccctaagaacccatcgagaccgatcaagtattcgtctg

SEQ ID NO: 88142 - DNA, 1771 bp, Arabidopsis thaliana columbia
  unsure (1)..(1771): unsure at all n locations
accacgcgtccgaaaaaacgaagggaattcacaaatcttagagaaaacaaaaatccaatttttgctgtgaagatggcaatgtctgtaaatgtttcttcttcttcgtcttctgggatcataaactctcgtttcggtgtttcattggagccaaaagtttcgcaaattggttcgttgaggttattggatcgtgttcatgttgctcctgtgtctctgaatctatctgggaagcgatcatcatctgttaaacctttaaacgctgaaccaaagacaaaggattcaatgattcctcttgcggcaacaatggtagcagaaattgcagaggaagttgaagtggttgagattgaggattttgaagagcttgctaagaagttagagaatgcttcacctcttgagattatggacaaagctcttgagaaatacgggaacgatatcgccattgcatttagtggtgcagaagatgttgctcttattgagtacgctcatttgactgggaggccatttagagtatttagtttggatacagggaggttgaatcctgagacgtatcggtttttcgatgcggtggagaagcactatgggattaggattgagtatatgtttcctgattctgttgaggttcaaggtttggttaggagcaagggattgttctctttttatgaggatggtcatcaggagtgttgccgtgttcgaaaggtgagacctttgaggcgtgctctcaagggtttaaaggcttggattactggtcagaggaaagatcaatctccggggacaaggtctgagattccggttgttcaggttgatccggtgtttgaaggtttggatggtggagttggtagtttggtgaagtggaatccggttgcgaatgttgaagggaatgatgtttggaacttcttgaggactatggatgttccggttaacacattgcatgcggcagggtatatatcgattggatgtgagccttgcacgaaagcggttttaccgggtcagcacgagagagaagggagatggtggtgggaagatgctaaagccaaggaatgtggacttcacaaagggaatgtcaaagaaaactccgatgatgctaaagtgaacggggaatcgaaatccgctgttgcagatatctttaagagtgagaatcttgtgactttgagcaggcaggggattgagaatttgatgaagttggagaaccgtaaagagccttggatcgtcgtgctttatgctccgtggtgccccttttgtcaagccatggaagcatcgtatgatgaactggcggataaattggctggaagtgggattaaggttgccaaattcagagcagatggtgaccagaaggagtttgctaagcaggaattgcagctcggtagcttccctaccattctggttttccctaagaactcatcgagaccgatcaagtatccgtctgagaagagagatgttgagtctttgacttcgttcttgaatcttgtccgataagtaaaccacaaaaccagtcgacatttctatgaggaataagaattatatcttcgtctcgttccagattgctagaacagatgaagttggtgtttggagaatcaattcaaagctttggatcacaaagtcagagataagctctgctacaaagcttgagtaattgcagtattgtaagatttataaagttgcgatagtgttgattcttcatgtaaatgtgtggtgtctattaaaatcaagcctctgtttcttctttgcaaannnnnnnnnnnnnnnnnnnnnnnnnnnnnnnnnnnnnnnnnnnnnn

SEQ ID NO: 88143 - DNA, 5484 bp, Arabidopsis thaliana columbia
acaaccaaataagcgacggcgattagagagtcctgcgtagtcgtgctcactgatcactcttagctcgtgccgtgatctgagactgagaaaacatcaccggttgggttttctctacgattccggtgcaccgtacacttcaccgcagtggataaatctctgcttccattttgactttttgaaaaataaaaactacaacagtcgcagagagattaaacttcgaaatccgatcgatcgctttctccctcggcgtttcttctcaggagcttcattccatggctctacagtctcccggagctaccggagcttcatcttccgtttcccggcttctctcttccgcgaaattaagctctactaagactatcttctctgttgacttcgtcagatcctactgtatttctaaaggaaccaaacggcgtaacgaactctccggctttcgcggctacagtccactgctcaagtcctcgctgaggtctccgttttcggtgaaagcgatccttaattctgaccgagccgctggtgatgcatcgccctccttttctgatctgaaacctcaggtggcttatttggaagatataatatcggaaaggggagcatgtggtgttgggtttattgcaaacttggagaataaggctacacataagattgtaaatgatgctcttatagcacttggttgtatggaacacaggggaggttgtggttctgataatacttctggtgatggttctggtttgatgacttccattccttgggatctatttaacgaatgggctgagaagcaaggaatcgcctcttttgataggacgcatacgggtgttggaatgctgtttctaccgagagatgacaacattaggaaagaagccaagaaagtgattacaagtatttttgagaaagagggcctggaggtgcttggatggagagatgttcccgtggaagcgtccattgttggccataatgcaaaacagacgatgccaaacacggaacaggtctttgttagaattgtcaaagacgataaagtagacgacgttgaacgagaactttacatttgcaggaagctgatcgaaagagcagttgcttctgaaagttgggcctctgagctctactttagctccttgtccaatcagaccattgtttacaagggaatgcttcgttctgaagttcttgggttattttaccccgaccttcaaaatgatctttataaatctcctttcgccatctatcatcgaagatttagcacaaatactagtcccagatggcatcttgctcagcccatgaggtttcttgggcacaatggggagatcaataccatacaggggaacctaaactggatgacgtctcgagaagcatctctaagatcacctgtctggcatggacgtgaaaatgacattcgtccaattagcaatccaaaggcttcagactctgctaaccttgacagtgcggcggagctattgataagaagtggccggactccagaggaatctcttatgattcttgtcccagaggcgtataaaaatcacccgactttaatgattaaataccctgaggctgtagacttctatgactattacaaggggcagatggagccctgggatggacctgctttggtattgttcagtgatggaaagactgttggagcttgccttgaccgcaatggacttcgaccagctagatattggcggacaagtgataatgttgtctatgtagcctctgaggtcggagttcttccaatggatgaatcgaaagtcaccatgaagggtcgtctaggacctggtatgatgatatctgttgacttagagaatggacaggtatatgagaacacagaagtgaagaagcgggttgcatcatataacccatatggaaagtgggttagtgaaaacctgcgaaacctgaagccttctaattatctctcgtcagcgatcctggagactgatgagaccttaagacgccaacaggcgtttggctactcgagtgaagatgttcaaatggtaattgagtcgatggctgcacaaggaaaagaaccaacgttttgcatgggggatgatactccagtggcagtattgtctcaaaagccacatatgctttatgattatttcaagcagcggtttgctcaggttacaaatccagctattgaccctctccgggaaggattagtcatgtcccttgaagttaatattggaaagcgtggaaatatattggaggttgggcctcagaatgtttcacaggttgttttgtctggtcctgtgctaaatgaacgggagcttgagggtttgcttggtgatccactgttaaaatctcaaatcttgcccacattttttgacattcgtagaggaattgaaggatctttgaagaagggtcttctaaaactttgtgaagctgcagatgaagctgttcgtaatggttcccaagtacttgttctctcagacagatctgataatccggaaccaactcgacctgcaattccaatgttgttggctgtgggtgctgttcaccaacatctgatccagaacggtcttcggatgtcagcttcgataattgcagatacagctcagtgctttagtacacatcactttgcctgtttgattggatatggagcaagtgctatatgcccgcacctagcactggagacgtgtagacagtggcgtctgagcaacaagaccgtgaacatgatgagaaacggaaaaatgcctactgtaactatggaacaggctcagaagaattaccgcaaggctgttaacactggtcttcttaaggttctctctaagatgggcatctcgttattctctagttattgtggagcacaaatatttgaaatttatggattgggaaatgaggttgtggaattttcgttccgtggtagtgcatctcaaattggtggattaactttagatgagctggctagggagacgttaactttctgggtgagggcattttctgaggatacagccaaacggctagagaacttcggtttcattcagtttaggcctggaggtgaatatcatggaaacaacccagaaatgtctaaattacttcataaagccgtccgcgaaaagagtgagacagcctatgcagtctatcagcagcatttagccaaccgtcctattacggttttccgcgatcttcttgagttcaaaagtgaccgtaaccctatccctgttgggaaggttgagcctgcttcctctatcgtggaacggttttgtacaggtggaatgtctcttggagcaatctcaagagaaactcatgagacaattgctattgcaatgaacagattaggaggaaaatccaactcaggggaaggaggcgaggatccgatccgctggaagccgctaacagatgttgttgatgggtattcttcaactctgccacatcttaaaggtcttcgaaatggggatacggctacaagtgctattaagcaggttgcctcagggcgttttggtgtcactccgacgtttttggttaatgcggaccagttggaaattaaagttgctcaaggggcgaagccaggtgaaggtggccaacttcctgggaaaaaagtcagcgcatatattgctagacttagaaattctaaaccaggagttccgcttatttctccacctccacatcatgatatttattccatagaggatctggcacagttgatctttgatctccatcaggtcaaccccaaggcaaaagtgtcagtcaagcttgtatcagaaactggaataggaacagttgcctccggagtagcgaaggctaatgccgatatcatacagatatcaggatatgatggtggaactggagccagccctataagttccattaagcatgctggtggcccgtgggagctgggactagctgaaacccagaagactctcattggaaatggactaagggaaagagttattatcagggttgatggcggattcaaaagtggtgtggatgtgttgatagctgcagctatgggcgctgatgagtatggttttggtactctggcaatgattgccacaggatgtatcatggctcgcatttgccacactaataactgccccgttggtgttgccagtcagagagaggaactgcgtgcacgtttccccggtcttcctggtgatcttgtcaacttcttcttgtatattgcagaggaggtgaggggcatattagctcagctgggatatgaaaagttggatgatataattgggcggacagatttgctaaaggctagggatatctcgctcgtgaaaactcatctcgacctcagttatctcttatcttctgttgggctaccaaaacgaagcagtacttccattaggaagcaggaggttcattcaaatggtcctgttcttgatgatactctacttcaggatccagagataatggatgcaattgagaatgaaaagacggttcacaaaaccatgagtatatacaatgtagatcgttctgtttgcggtcggattgctggggtgattgcgaagaaatacggagacactggttttgctggacaactgaacctaacgttcactggaagtgctggccaatcttttgcatgtttcctaactcctggaatgaatatacgtcttgtgggtgaagccaacgactatgtgggaaagggaatggcgggaggtgaagttgtgatattaccagtggaatcgactggttttcgtcccgaagacgcaactattgtaggaaacacttgtctgtatggtgcaactggtggtttattatttgtcagaggcaaagcaggggagagatttgcggttagaaactctctagctcaagctgttgttgaaggcactggagatcattgctgtgaatatatgactggtggttgtgtcgttatacttgggaaagttggtagaaatgtagccgctgggatgacaggtggattggcatatatccttgacgaagacaacactctcctccctaagatgaacaaagagatagtgaagatccaaagagtgacttcaccagtgggacaaacacagcttaaaagcctgatccaggctcatgtggagaaaacgggaagcagcaaaggggcaatgattgtggaagagtgggataagtatctagcaatgttctggcaacttgtacctccgagtgaagaagacacacctgaggctaactcagaccacatcctgaaaacaaccacaggagatgaagaacaggtttcaagcacattagcagagaagtaaaacctacacatttgatcgtggtttcctctttgtacagtcaaagtcgtggtggaggagataagtaagtctctcagttgctgagaacataacaatttcaaagttcaccacttgattttgatgtggttttaattcgttctggactcgcttatcttttggtttacttcgtcccagtcacgttagtaataaaacgaaatccagcatgcttgtactttgtatggaaacatcattagtcttccgattcccgattattaagaaagggttttcgattttaggaaaaaaaaaaaagggcgaccgctctagaggatccaagcttacgtacgcg

SEQ ID NO: 88144 - DNA, 589 bp, Arabidopsis thaliana columbia
  unsure (1)..(589): unsure at all n locations
atgattcttccnnnnnnnnnnnnnnnnnnnnnnnnnnnnnnnnnnnnnnnnnnnnnnnnnnnnnnnnnnnnnnnnnnnnnngccacgcgtccgcccacgcgtccggtgccttcagaaaagttgaagctagaatcgtcgagaagagaagaaaaggcttacactgagggactgtctattgcggttgaaagacttgaagcaggaaggaaaagaagaggtaacacatctggagatgagactagcgaaccaagcaataacaaaaagaggaaacatgatgttacccaaaaatattctgatgaagctgatacccagagtgtcatatcaagcccgcaaaatgtgcctgaggacaaacatgaactaccatcaagccaaacccagacgccaagtggtatggtagtcatcagtgaaaccgttaagatcacaagagtaacgtgtgagacagaggtgaccaacaaagtcacaacccttgactgctcagaaaggtccttcggaacgcggggagaaagatgggagaggagaccgaagatggggatgccaatcaactgggataaccccctttgaacaaggattcttaatgaacctgccacaaaaa

SEQ ID NO: 88145 - DNA, 648 bp, Arabidopsis thaliana columbia
  unsure (1)..(648): unsure at all n locations
gctcnnnnnnnnnnnnnnnnnnnnnnnnnnnnnnnnnnnnnnnnnnnnnnnnnnnnnnnnnnnnnnngtccacgcggtgcggattaaaccagtagagagcatcaattttgttttgttagaaaattaagttttagttaatatttattcccatgaaaatgtccgctactactaaagaaagaatcgtaacagacggatcacaaacagtcacagatccgagccctgttttgagtttacgagaagaatattaaaattctcatctttaaccattttatccgatcatgaatgtgagagacgagggaaaaactacggcggagaaacacggcggaggagaggagaataaatcaccggagaacaaatggcgatttaattctcctctagctcaagtgagcttaatgggattcgtttgtttctgttgtccaggaatgttcaacgctctctccggcatgggaggcggtgggtcaaggagatccaccgcggtgctaacaacgctaacaccgccgtttacaccgctttcaccgttttcggccttttaggcggcgggttttacaacgtcctcggtccacggctcacgttagccgctggatgttcgacttacgtactctacgccggatctttcctctactacaaccatcaccaccaccaagcctt

SEQ ID NO: 88146 - DNA, 382 bp, Arabidopsis thaliana columbia
caacgtactatgcttgcatatcagggaacatcctctgtcgttaattatgattcttgtttggctactttgatagccaagacaaatgtctttgttgtggaaggctatttgtttgagcttcctgatactataagaaccataacaaaagcctgcgaagaagcccacagaaacggggcacttgttgctgtgacagcatcacatgtgtcctgcatagagaggcattatgatgatttctgggacattgtggggaactatgcggatattgtatttgcaaatagcgatgaagcaagagcgttttgtcacttttccgcagaggaaagtccaatttcagcgacaagatacatgagccactttgttccgtttgtttctgttaccgatggaatca

SEQ ID NO: 88147 - DNA, 432 bp, Arabidopsis thaliana columbia
ccaaatacaaaggagagagagagagaagaggcgcttcgctacgagatttgcgggaccaaatcaatgcccattggtccctcctccttcacactgagagagccattggccaatttccagatatagacgacgacgacgacgaagcagcagcatgatgatggagtaactagacgaagacgaagaagattagaggagcttctgaagaatcactttgaggaagaagacaacatatctcacaagtgagcaatgggagcgattgctggagaagagctgaagaaaatggagaagacacaggtgcatgttgcccgggaagagaagatattggttctggtgagactgagacctctgaacgagaaagagatcttggctaatgaagctgcggactgggaatgcatcaacgacaccaccgtattgtacagaaacacgttgcgtgag

SEQ ID NO: 88148 - DNA, 522 bp, Arabidopsis thaliana columbia
  unsure (1)..(522): unsure at all n locations
ggttaggatcttgcacgaatttttgtacggctgacctagtaaagcatccactctcgggggcctttattccccaagaggtgtgttccaaaacaagccttgttgtcaccttcctgtggggaacccatgcagctggcaagtcgaaggcatcaaaggttggattcaagccacttgtaatgtaccacttcccgttaaagtccgagatgttgaagttctgtacaagaacagaagggtctggggcaggaaattctccgagatcagattttctaggaacacacttttttctcgacacagcacactcgttgaactcatcaacaacactgttctcaaacagatccccacatttaatctggcactcggtttcatctggacggttattgcaggtctgaaggcacgcgacattggctgcacaggcagggttggcaatgcaccgtgcgcgtgcgcggacgcgtggtaattggnnnnnnnnnnnnnnnnnnnnnnnnnnnnnnnnnnnnnnnnnnnnnnnnnnnnnnnnnnnnnnng

SEQ ID NO: 88149 - DNA, 1187 bp, Arabidopsis thaliana columbia
acaaatcgctaatcaaattctatagtaagctttacttcacactactctctcactttctgggcagaaactttgtggatctagaagaacacactaatcagaagagtgaaaaagatgaacgacttgatgacgaaatcgtttatgagttacgttgacttgaaaaaagcagcgatgaaggatatggaagcaggacctgactttgatcttgagatggcttctacgaaagcagacaagatggatgagaatctgtcatctttcttagaagaagcagagtatgtgaaagcagagatgggtttgattagtgagacgctggctcggatcgaacagtaccatgaagagagtaaaggtgttcacaaggcagagtctgtgaagtctcttcgtaacaagatctctaacgagattgtgtctggtttgaggaaggcgaaatcgattaagtcgaagctggaagagatggataaagccaacaaggagattaaaaggctctctgggactccggtttataggagcagaaccgctgtgactaatgggctgaggaagaaacttaaggaagtgatgatggagtttcaggggctgaggcaaaagatgatgagtgagtacaaggagactgttgagagaaggtacttcactgtcactggagaacatgctaatgatgagatgattgagaagatcatcactgataacgctggaggtgaagagtttctcacgcgagcaattcaggaacatggtaaaggaaaggtcttggaaactgtggttgagattcaagacaggtatgatgcagcaaaggagattgagaagagtctgttggagcttcaccaagtgtttcttgatatggctgtgatggttgaatcgcaaggtgaacagatggacgagatcgagcatcatgtgattaatgcgagccattacgtggctgatggagctaatgagctgaagactgcaaagagtcatcagagaaacagcagaaaatggatgtgcattggtatcattgtgctgcttttgatcattctcattgttgtcatccccatcattaccagtttcagctcttcttgagatactggctatgttcactccttttgttttgtttcgctcttctttgtaccaatggatgtcttaatccttttgtgttcttcaaggatgtcttaatcctttcgtgtcttgtatccaatttcaatgaaatggtgaatgtttacaaa

SEQ ID NO: 88150 - DNA, 1555 bp, Arabidopsis thaliana columbia
ttttttttttttttttatccaattgttatggaatgatgatgactgtgtacaaaaatattactttatatgaaccgaacacagtatgtataatatagtttgtacaacaatggtggttcttgtttctacctgaccttcctgattggcaaagctttcccaaacaatttttcaacctcacttgcttccattttgatctcatccaaaaactccatctcttctttacttaactctctcacgaaattctcctcgtcttgcttcagttcattaaatccttcagccaatctctggaacaaggtcatctcagtcctaccgaccttctccacttccttctctacctcttcttctatctcttcaacctcttttacgattatcctttcaccttcttccactgtcttctcaattctctccacgagcgcaggttcaggaccacatgtgttatccgttctaatgaatgtgctgaagtctctgcctatgctttttgctgctttttcgagttctggtataatgctattgggtaatacagaacttctcgtgtatacaactgcaccaccatatccatcccaagcatcgtttcgcccacggtagtatacaaatatatagtcttcaggtttattctctatctttgatgacaggatataccagtcatcttgatagtgaaggtactcgttgtcatgattgtagagaacaccaggttggttaggatcttgcacgaatttttgtacggctgacctagtaaagaatccactgtctagggtctttattctccaagagatgtttccaacaagcttgttgtcaccttctgtgtggaactcatgcagctggcagtcgaaggcatcaaaggttggattcaagccacttgtaatgtaccacttcccgttaaagtccgagatgttgaagttctgtacaagaacagaagggtctggggcaggaaattctccgagatcagattttctaggaacacacttttttctcgacacagcacactcgttgaactcatcaacaacactgttctcaaacagatccccacatttaatctggcactcggtttcatctggacggttattgcaggtctgaaggcacgcgacattggctgcacaggcagggttggcaatgcactttgcgagttctatcctgcatcccttcaataagcatgcacaagttttaagtgcatcaactgcatctgcagatggaacaataaggaacgcgcaagctaaaacacccacgagttttagcaacagcggagcggtcagctctttcagctcattctttgatggtaatggcacaatgtcaaatatccccttagagaatcctgacctgaatgcagataaaggacgtgaggatctcccaccagttgttctgagatcagcactttggattggaggtaaaatcttgagcaagaaagtgccattgatcctctttcttgtaatgccaagcctaccaataccatcatcacttgagaaaaatcgaatacggtcatgacaaggtgaagtgaaacaatgtgtagctactgccattcttcacactatctaatcttccccacaccaagccggacgcgtgg

SEQ ID NO: 88151 - DNA, 2884 bp, Arabidopsis thaliana columbia
gtcgacaaaagcgatgtcatacacataattacaatttagtccctatattttcttctcagtttcgatatctttaaagctgtctcaatcacacacgtcggcactaaaacatacatctaattacaatttagtccctatattattttaaagtttcgaaagaaattcacatgaatttaaaaatagatttgaagaaacagaaacagatagacaaatggacgacaacggatacatcgccaaaatatagccgttggggcgaagaaatcacagtaacggctaatttctcctttttcttatattagaaagaaagctttctctcatctcacaaatcgctaatcaaattctatagtaagctttacttcacactactctctcactttctgggcagaaactttgtggatctagaagaacacactaatcagaagagtatgttgtattttctttgattttctcttgtttgattctgttacaatcactgcgattctctctgattcttgtaaaattgttgactttcaggtgaaaaagatgaacgacttgatgacgaaatcgtttatgagttacgttgacttgaaaaaagcagcgatgaaggatatggaagcaggacctgactttgatcttgagatggcttctacgaaagcagacaagatggatgagaatctgtcatctttcttagaagaagcagagtatgtgaaagcagagatgggtttgattagtgagacgctggctcggatcgaacagtaccatgaagagagtaaaggtgttcacaaggcagagtctgtgaagtctcttcgtaacaagatctctaacgagattgtgtctggtttgaggaaggcgaaatcgattaagtcgaagctggaagagatggataaagccaacaaggagattaaaaggctctctgggactccggtttataggagcagaaccgctgtgactaatgggctgaggaagaaacttaaggaagtgatgatggagtttcaggggctgaggcaaaagatgatgagtgagtacaaggagactgttgagagaaggtacttcactgtcactggagaacatgctaatgatgagatgattgagaagatcatcactgataacgctggaggtgaagagtttctcacgcgagcaattcaggaacatggtaaaggaaaggtcttggaaactgtggttgagattcaagacaggtatgatgcagcaaaggagattgagaagagtctgttggagcttcaccaagtgtttcttgatatggctgtgatggttgaatcgcaaggtgaacagatggacgagatcgagcatcatgtgattaatgcgagccattacgtggctgatggagctaatgagctgaagactgcaaagagtctggggagaaacagcagaaaatggatgtgcattggtatcattgtgctgcttttgatcattctcattgttgtcatccccatcattaccagtttcagctcttcttgagatactggctatgttcactccttttgttttgtttcgctcttctttgtaccaatggatgtcttaatccttttgtgttcttcaaggatgtcttaatcctttcgtgtcttgtatccaatttcaatgaaatggtgaatgtttacaaagatacccagttgacttaatcctcttgatcattctaaatgttgtcatccccattgttaacactttcagctcttcttgaggtactatgtttaccaatcgttgtttgtttcgctcaaaggatgtttaatccttgtgttttctgtatccaattgttatggaatgatgatgactgtgtacaaaaatattactttatatgaaccgaacacagtatgtataatatagtttgtacaacaatggtggttcttgtttctacctgaccttcctgattggcaaagctttcccaaacaatttttcaacctcacttgcttccattttgatctcatccaaaaactccatctcttctttacttaactctctcacgaaattctcctcgtcttgcttcagttcattaaatccttcagccaatctctggaacaaggtcatctcagtcctaccgaccttctccacttccttctctacctcttcttctatctcttcaacctcttttacgattatcctttcaccttcttccactgtcttctcaattctctccacgagcgcaggttcaggaccacatgtgttatccgttctaatgaatgtgctgaagtctctgcctatgctttttgctgctttttcgagttctggtataatgctattgggtaatacagaacttctcgtgtatacaactgcaccaccatatccatcccaagcatcgtttcgcccacggtagtatacaaatatatagtcttcaggtttattctctatctttgatgacaggatatacctgcaaaaatcatatgaaagcttgttaggccaaagaagaatagcagcactatcaagactctccctcgtgggtggatacaagatgttattaccagtcatcttgatagtgaaggtactcgttgtcatgattgtagagaacaccaggttggttaggatcttgcacgaatttttgtacggctgacctagtaaagaatccactgtctagggtctttattctccaagagatgtttccaacaagcttgttgtcaccttctgtgtggaactcatgcagctggcagtcgaaggcatcaaaggttggattcaagccacttgtaatgtaccacttcccgttaaagtccgagatgttgaagttctgtacaagaacagaagggtctggggcaggaaattctccgagatcagattttctaggaacacactttttgctcgacacagcacactcgttgaactcatcaacaacactgttctcaaacagatccccacatttaatctgatataatataagccacataattataaccaaaatcattgg

SEQ ID NO: 88152 - DNA, 538 bp, Arabidopsis thaliana columbia
attttaaaagtttcaatctttttaaaattattttttattttttggtaatcgtttctaagaaatctctcctcccgttgcctgtggactgcctgaatcaaaagacaatggcaacatgttcttcaagcttattggtgttaccaaatttgagattgagttctaaccaaagacgcaatttcaaggtaagagctcaaatctctggtgaaaacaagaaggcgacatcattggaaccagtgaacaacaacggttcggtctctttgtctactactgttcaaaaccaaaaaggggcaaatgaagtgaatgggaaagggaaatccaagagaaagatagtgagtgatgaaattgagttgttatgggatgatgggtatggctccaaatctgttaaagattactttgctgcggctaaagagattttgaaggctgatggtggtcctccacggtggtttagtcccgttgattgtggtcgacctgttgaagatgctcctacgttactcttcttacctgggatggatggcacagggatgggccttgttccacatca

SEQ ID NO: 88153 - DNA, 409 bp, Arabidopsis thaliana columbia
ctcttgcgtgttcactgcctcctcggtgactaccacactgctctcaaatggttgcagcccattgacatcactcagccaggtgtttacaccagtgtcattggttgccatatcgctactatctaccactatggatttgccacccttatgttgcggaggtatgtcgatgctgttcgtgagttcaacaagattctcctctacattttcaagactaagcagtaccatcaaaagtcacctcagtacgagcaattactcaagaagaatgagcagatgtacgctttgcttgctctctccctctccctctgccctcaaactaaactcgttgacgagtctgtcaactctcagctgcgagacaagtatggtgaaaagatgatgaggatgctgaggtctgacgacgaggcctttggtattt

SEQ ID NO: 88154 - DNA, 542 bp, Arabidopsis thaliana columbia
tatacgacttacttagggaacgctggtacgcctgcaggtaccggtccggaattcccgggtcgacccacgcgtccgcccacgcgtccgaagaacacataactgggcggttgcactgaaaactcttattgttattcaccgtgccttgagagaagtggaccagacatttcatgaagaagttattaattatagcagaagcagaagtcatatgctgaatatgtctcattttaaagatgattctggtccaaatgcttgggcttattctgcttgggtccgtttctatgctctattcttagaggagcgattagagtgcttccgtgttttgaagtccgatgttgaggttgaccccccaagaaccaaagatttggacactcctgatttgctcgagcaacttcctgctctgcaagaacttcttttccgggttctggactggcaacctgaggggcagctggtcaaaaccacattttccatgcgccctctcattggttatttctgagagcactaacatttatcaagcactgacagatgggcttagacaatttggg

SEQ ID NO: 88155 - DNA, 825 bp, Arabidopsis thaliana columbia
aaggtgtcagagattgtaggttcccacttctgaaggatgaccatccattgatcatagtggtaaggcttattgtctagtactttttgcatgtcttcttcaaagtcaaaacaaaactggaagcagcctcttcccagatctgaacccgtagcttttcctttcagattccaccggtttgagaggaaaggaaagagagaccataatcgttggatagatgggtttgtgaggcgatccattagagttagggaattagcttcgatgaggtctgaagtgtccagttctggtgcacgaattcttcttcgaattggtggggatagttctctctctattcatttacctttgagatggtaggggattcttgaactcatgattacagagggcgtaaggtttgaagcggagaggcatcagggataaagtagagattcaaacagtttcagggtttcaaacaggataacagggatacacatgattaaaagtttgaaaagggttacaaaacagaattagagagtaaaagcagagacactaccgggatgcatagagaagatacctccacttctcggtgaggtgaaaacagttgaaaacgccggaaaaaggtcactggaactccatctttgcccgttgtgtaaagccatttttggaaggaactgttggataattctgttttagtaaaaagaggtagctgagatctggtttttcaaaagtttccaactgctaatagactgcattggagaaagtgcctgggagaaaactcaacgctctttttaaccttcagtcaataccctctgaattcttttcctctgtttatttctcatttcgcgaattctctct

SEQ ID NO: 88156 - DNA, 415 bp, Arabidopsis thaliana columbia
atcatttgtgacacaagcagcagtatcatcgtcgtcatcactcactagcaaagctcgacctgcttccgtcttcttcaatggtcgctctcttccttctctgaacccgatctctccgtttctgttcctccccacaagtagatccttcgctctcgtcgtcaagagcactctcggtacaaccaccttgcatgcagaaggaatggagacaaatctttacttaggatgactttaagtggggatagctcggaaactgtagagatgacttcaactgatatgattttcgagcccgattttggagcatggagtttccggtttgattgttctgttgaccataggaaggctgcttttcctagtgtttcatttaagaacagcaaagacccggaagttcctattgtgagtcacattgttccagcatata

SEQ ID NO: 88157 - DNA, 392 bp, Arabidopsis thaliana columbia
  unsure (1)..(392): unsure at all n locations
acccatgaaccccagcacgtcctttggaccagctgttgctgccggagacttctctggtcactgggtctactgggttggaccactcancggtggtggacttgccggacttatctacggaaatgtcttcatgggtccttccgaacatgttcctcttgcttctgctgatttctaaggaaacaagtgatgattcttgattcatgtttctgtgtttggttactttgcctcgatctttcttgttttgtttggagtttggtccggtttcgttgtaatttttatccaatttgtatgaatattatttaatggatggctgttttggttataaaaaaaaacccggggtaaatatttgtccagtgtaaactaaaattcataatctgacctcagaattccttagc

SEQ ID NO: 88158 - DNA, 749 bp, Arabidopsis thaliana columbia
  unsure (1)..(749): unsure at all n locations
ttaaaagtgaagttatagaatattgtagggttttttctatttcaagctagcattttatactgtaggtttcatttcgcactagtaggcaaattctggaggcattttaattaataaaaactaatgaacgagcgctaaaactattgaaaacgcaggcggttccaacccacagcgttgcggctggactaggatcgatagaaggagtagtgatggggatcatcatcaccttcgctttggtctacactgtctacgccaccgccgctgatcccaagaagggttctctcggaaccatcgctcctctcgccattggtcttatcgttggtgccaacatcctcgccgccgggtccattctcccggtggatccatgaacccagcacgttcctttggaccaagctgttgctgccggagacttctctggtcactggggtctactgggtgtggaccacccatcggtggtggacttgcccggacttatctacggaaatgccttcatggggtcttccgcacatgtccctcttggttctgctgattcctagggaaacaagtgatgattcttgattcacgattctgtgtttggttactttgcctcgatctttcttgttttgtttggagtttggtccggtttcgttgtaatttttatcccatttgtatgaatattatttaatgaaaaaaaccaaaaaagnnnnnnnnnnnnnnnnnnnnnnnnnnnnnnnnnnnnnnnnnnnnnnnnnnnnnnnnnnnnnnnnnnnnnn

SEQ ID NO: 88159 - DNA, 603 bp, Arabidopsis thaliana columbia
  unsure (1)..(603): unsure at all n locations
ctcaaacaaaaaaaaacccttcaaaacatttccttattctttcttcttcatctacaacaatggctggagttgcctttggttcctttgatgattcattcagcttggcttctctaagagcttacctcgctgagttcatctccactttactctttgttttcgctggtgttggctctgccattgcctacgcaaagctgacgtcggacgctgctcttgatacaccgggactagtggccatcgcggtttgtaatggttttgctctcttcgtggccgttgcaatcggagccaacatctccggtggccatgtgaacccagccgtcacttttggtcttgctgtcggtggtcaaatcacagtcatcaccggagttttctacctgggttcggtcagccttctcggtcttcaacgccgnttgtttcctccttaaataacggaaaccggtggatttggcgggtccaacccacacaggggtttcggcttgactaggntcggttagaaggagtagttgttggggtcataattaccttcggtttggcctaaattttttgggaccgcggtgtccaaanaagggtttttggaccaatgtnctttgcattggntntggtggg

SEQ ID NO: 88160 - DNA, 747 bp, Arabidopsis thaliana columbia
  unsure (1)..(747): unsure at all n locations
cagctctactacgactcactatttggaaagctggtccgcctgcaggtaccggtccggaattcccgggtcgacccacgcgtgcgcctatatgaagagaacagcattcaaaaggtcttatcatcttcttcactaaacaaaaaaaaacccttcaaaacatttccttattctttcttcttcatctacaacaatggctggagttgcctttggttcctttgatgattcattcagcttggcttctctaagagcttacctcgctgagttcatctccactttactctttgttttcgctggtgttggctctgccattgcctacgcaaagctgacgtcggacgctgctcttgatacaccgggactagtggccatcgcggtttgtcatggttttgctctcttcgtggccgttgcaatcggagccaacatctccggtggccatgtgaacccagccgtcacttttgggtcttgctgtcggtggtcaaatcacagtcatcacccggagttttctactggatcgctcaggcttctcgggtccaaccggcggttgtttcccccttaaaaaacgcaacccggtggagttgggggggtccaacccacaaaggggttggggttggacaagggtccaaaaaggggaagttatgggggtcaacaacaacctcgggtttgggcaaaatggttaggcaacnccgtgatcccaaaagggtccccggaaaatggccccccgcaatggttcatggtggggaaaacccacggggt

SEQ ID NO: 88161 - DNA, 1261 bp, Arabidopsis thaliana columbia
  unsure (1)..(1261): unsure at all n locations
gaacttatgtagcaaaatgtaaacacatgaaatcatttattaattcgggtcctacgtgacccaccacaccacagaaactcattaaatagtattttttttataaaacttaagttatatgcatggatacatgaacgatactcctatataaagagaacagcattcaaaaggtcttatcatcttcttcactaaacaaaaaaaaacccttcaaaacatttccttattctttcttcttcatctacaacaatggctggagttgcctttggttcctttgatgattcattcagcttggcttctctaagagcttacctcgctgagttcatctccactttactctttgttttcgctggtgttggctctgccattgcctacgcaaagctgacgtcggacgctgctcttgatacaccgggactagtggccatcgcggtttgtcatggttttgctctcttcgtggccgttgcaatcggagccaacatctccggtggccatgtgaacccagccgtcacttttggtcttgctgtcggtggtcaaatcacagtcatcaccggagttttctactggatcgctcagcttctcggctccaccgccgcttgtttcctccttaaatacgtcaccggtggattggcggttccaacccacagcgttgcggctggactaggatcgatagaaggagtagtgatggagatcatcatcaccttcgctttggtctacactgtctacgccaccgccgctgatcccaagaagggttctctcggaaccatcgctcctctcgccattggtcttatcgttggtgccaacatcctcgccgccggtccattctccggtggatccatgaacccagcacgttcctttggaccagctgttgctgccggagacttctctggtcactgggtctactgggttggaccactcatcggtggtggacttgccggacttatctacggaaatgtcttcatgggttcttccgaacatgttcctcttgcttctgctgatttctaaggaaacaagtgatgattcttgattcatgtttctgtgtttggttactttgcctcgatctttcttgttttgtttggagtttggtccggtttcgttgtaatttttatccaatttgtatgaatattatttaatggatggctgttttggttataaactaaataactcacactggaatatatagtttcacctaaaaaaaaaaaaaaannnnnnnnnnnnnnnnnnnnnnnnnnnnnnnnnnnnnnnnnnnnnnnnnnnnnnnnnngagagc

SEQ ID NO: 88162 - DNA, 433 bp, Arabidopsis thaliana columbia
cccacgcgtccgagaccatcaaaaattgcagaaaataggcttaatctgaatctcttctcctccgtcgaagttttgaattctctctggttctccaattctcctctcgagctgccttaagcttcgcatttacgtttacgttatgcacgaatgagatcatcgtagatcgtgattgaagaagcgagagataaattaggagagcgaagatgagcgagggccagaagttccagttgggaacaatcggcgctttgagtttgtccgttgtgtcatctgtcccgattgtgatctgtaacaaagcgcttattagcacccttggcttcacattcgcgactactttgacaagttggcatcttttggtcacattttgttcccttcatgtggcattatggatgaagatgttcgaacacaagccttttgatgcacgagctgtgatggg

SEQ ID NO: 88163 - DNA, 408 bp, Arabidopsis thaliana columbia
acaccaaagacactaatctcacttcttgtcctttccattatcttcctctcttctctcttcttcttcttctctaactctctcgctgatctcggtaatctcccggagaagccataagaacattgttaggctacttaaaggtaagccctttaggaaaccagatatctccgcaacgattcaggaggtattggatagtatgagagctagtggtaaaaatgggattgttgttgatgttggagctaatgttggtatggctagctttgctgctgcggttatggggtttaaagttcttgcctttgagcctgtttttgagaatttacagaggatttgtgatgggatttggtttaatagagttgcttctttggttactgtgtttgaagctgctgcttctgacagaacaggggaatatta

SEQ ID NO: 88164 - DNA, 870 bp, Arabidopsis thaliana columbia
  unsure (1)..(870): unsure at all n locations
catcttttcccacccaagatctctccttcttgtttccccagatctgaaatttcaaaagctacccaattttaactcaagactctgaacaacacatctagatccatttccatggcgagcgcctggaaaaaagacaagaaccaaaaacttttatcaccaaagacactaatctcacttcttgtcctttccattatcttcctctcttctctcttcttcttcttctctaactcctctctccaatactccaatccaaatctctccatcaattccccataccctatccctccttttgattgcttcaaatgtccacaatcaaaacccataatcgcaaacgtcgtcgagaatctcaagtacccttttgtttactctctcgctgatctcggtaatctcccggagaaaccacataagaacattgttaggctacttaaaggtaagccctttaggaaaccagatatctccgcaacgattcaggaggtattggatagtatgagagctagtggtaaaaatgggattgtngttgatgttggagctaatgttggtatggctagctttgctgctgcgggttatggggtttaaagttcttgcctttgagcctgtttttgagaatttacagagggtttgtgatgggggtttgggttaatagagtttctcctttggttactgtgtttgaaggctgctgcttcttgacagaacaggggntnattancctnccataagttggtaggaccggctttacaatagccncggtttccggagggtngggtgcaaagncttncatttcaagtcccccaaaaggggntagcagttcaaggcaaaatccattacccnctngnnaaactaatttccncctnnttaancntgtcnntctntcaa

SEQ ID NO: 88165 - DNA, 1398 bp, Arabidopsis thaliana columbia
  unsure (1)..(1398): unsure at all n locations
tgannnnnnnnnnnnnnnnnnnnnnnnnnnnnnnnnnnnnnnnnnnnnnnnnnnnnnnnnnnnnnngggtcgacccacgcgtccgacaatttctcttcttctaaatccatggagtgatgatgatgatagatagattgaatccaaacacaaaccggatccgagattaaaaacaatccggattgtttatatttactttagatcggagaaagatgccgccggcgaccggagatatcgatcgtcagatcgagcagcttatggagtgtaaagcgttatctgaaacggaggtgaagatgttgtgtgagcacgcaaagacgattcttgtggaagagtataatgttcaaccggttaaatgtccggttaccgtctgcggtgatatccacggccaattttacgatctaatcgagctttttcgtatcggtggttcttctcctgatactaattatcttttcatgggtgattatgttgatcgagggtattattctgtggagacagtctcacttttggtagcactgaaagttcgttacagagatagacttactatcctaagagggaatcatgaaagccgtcaaattactcaagtgtatgggttttatgatgaatgtttgaggaaatatggaaatgctaatgtatggaagcacttcactgatctttttgattatcttccacttacagctcttattgagagtcaggttttctgtttacatggaggactttcaccttctttagatacacttgacaacatccgatctttagatcgaattcaagaggttccacatgaaggaccaatgtgtgatctcttatggtctgatccagatgaccgatgcggttggggaatatctcctcgtggtgcaggctacacttttggacaagatatcgctactcagtttaaccacaccaatggactctctctgatttcaagagcacatcaacttgtcatggaaggttttaattggtgccaagaaaagaacgttgtgactgtatttagtgccccaaactattgctaccgttgtggcaacatggctgcgattctagagatcggtgagaacatggaccagaatttccttcagtttgatccagctccacgtcaagtcgaacccgaaaccactcgcaagactccagattattttttgtaagtaccaaaagaactaaagctgcaattccacacactagctcttcgtctcttttgcttctattcttaaccactttttgtaatttcatattccttacgtctatttctgtttgttaaactctccattgtcttttaaaatccgtaaacttttgtgtgcaaagattctggtacaagtaaaaaaacccaaagnnnnnnnnnnnnnnnnnnnnnnnnnnnnnnnnnnnnnnnnnnnnnnnnnnnnnnnnnnnnnnnnnnnnnnnnnnnnnnnn

SEQ ID NO: 88166 - DNA, 1689 bp, Arabidopsis thaliana columbia
  unsure (1)..(1689): unsure at all n locations
ccggcannnnnnnnnnnnnnnnnnngcgtccgttatatatttagcataatatctttcagaagtgtgaggccttgttaattaagctcttcttctctatctctctctctccctctcaacctctcaccatggtagctcaagctcctcatgatgatcatcaggatgatgagaaattagcagcagcgagacaaaaagagatcgaagattggttaccaattacttcatcaagaaatgcaaagtggtggtactctgcttttcacaatgtcaccgccatggtcggtgccggagttcttggactcccttacgccatgtctcagctcggatggggaccgggaattgcagtgttggttttgtcatgggtcataacactatacacattatggcaaatggtggaaatgcatgaaatggttcctggaaagcgttttgatcgttaccatgagctcggacaacacgcgtttggagaaaaactcggtctttatatcgttgtgccgcaacaattgatcgttgaaatcggtgtttgcatcgtttatatggtcactggaggcaaatctttaaagaaatttcatgagcttgtttgtgatgattgtaaaccaatcaagcttacttatttcatcatgatctttgcttcggttcacttcgtcctctctcatcttcctaatttcaattccatctccggcagtttctcttgctgctgccgttatgtctctcagctactcaacaatcgcatgggcatcatcagcaagcaaaggtgttcaagaagacgttcaatacggttacaaagcgaaaacaacagccggtacgttttcaatttcttcagcggtttaggtgatgtggcatttgcttacgcgggtcataatgtggtccttgagatccaagcaactatcccttcaacgcctgagaaaccctcaaaaggtcccatgtggagaggagtcatcgttgcttacatcgtcgtagcgctctgttatttccccgtggctctcgttggatactacattttcgggaacggagtcgaagataatattctcatgtcacttaagaaaccggcgtggttaatcgccacggcgaacatcttcgtcgtgatccatgtcattggtagttaccagatatatgcaatgccggtatttgatatgatggagactttattggtcaagaagctaaatttcagaccaaccacaactcttcggttctttgtccgtaatttctacgttgctgcaactatgtttgttggtatgacgtttccgttcttcggtgggcttttggcgttctttggtggattcgcgtttgccccaaccacatacttcctcccttgcgtcatttggttagccatctacaaacccaagaaatacagcttgtcttggtgggccaactgggtatgcatcgtgtttggtcttttcttgatggtcctatcgccaattggagggctaaggacaatcgttattcaagcaaaaggatacaagttttactcataaacgctatgtaattccactaattaagaaacatatctttatattaatatatgtgtgaagaagtttttaagagatcaacacgagacatttatagaagaatcaatggtctggtctgaatctaaatgtagcttttagggtttgtattttcgtgtgtgttatatatattatataaaacaataatattttgctcaaaaaaatttaaaaaaaaaaaaaaaagggcggccgc

SEQ ID NO: 88167 - DNA, 393 bp, Arabidopsis thaliana columbia
cgcggacgctttcaactcaaaatctttttcatttctctgtatcctcctcatatttttattcttttgtaatgacaggttgctttagcttgtctgaagcattagaacgaacttacaaatccgggttcaaaagatccggtctacgacccgtaaccatcgacttgaaagatggaaccgtagtcaacttttgggtatccaaaaccaaacccgaatccaaacccaaacctaatctcctcctcatccacggcctcggagctactgccatctggcaatggtacgacgtagctcgccgtctctcacgttatttcaacctctacatccccgacctagtcttcttcggcggatcttccacgacccgacccgaaagatccgatattttccaagcccaaacactca

SEQ ID NO: 88168 - DNA, 573 bp, Arabidopsis thaliana columbia
  unsure (1)..(573): unsure at all n locations
ccnnnnnnnnnnnnnnnnnnnnnnnnnnnnnnnnnnnnnnnnnnnnnnnnnnnnnnnnnnnnnnnnnncgacccacgcgtccgagacgacagaagggaacccaaaaaaaacgattttgagaaaaccatctcactgattagcaagatgtcgtcggctcgttctgcgatcacaaagctaaagctggctcgatcctttggggagaggcagattggtgcatcgcgttcggtggtatcgactcgaggaccggcgattcggtacttcagtgacgataaaggtcgtgtgctcagcgaagaggaacgcgcgaaagagagcatgtatatccagaaaatggagagggagagactggagaagaaggagaaactcgagcaagataagctagatggtgagaaaggaagtgccaacaagaaacctgagacaaacaagccatgagtttatcactcacagtatacagaatccggtcataaggcaagcagtagtgaaaaacaataatgcctttgacctctgtcctctcttggtatgagaggccttgtacttgtacagggttcttaccttctgagggggnntttttntttt

SEQ ID NO: 88169 - DNA, 731 bp, Arabidopsis thaliana columbia
tcgccaagctttaattcgcctccttataggaaaagctggtacgcctcaaggtaccggtccggaattcccgggtcgacccaggcgtccgctcactgattagccaagatgtcgtcggctcgttctgcgatcacaaagctaaagctggctcgatcctttggggagagtcagattggtgcatcgcgttcggtggtatcgactcgaggaccggcgattcggtacttcagtgacgataaaggtcgtgtgctcagcgaagaggaacgcgcgaaagagagcatgtatatccagaaaatggagagggaaagactggagaagaagaagaaactcgagcaagataagctagatggtgagaaaggaagtgccaacaagaaacctgagacaagcaagccatgagtttatcactcacagtatacagaatccggtcataaggcaagcagtagtgaaaaacaataatgcctttgacctatgttctctcttggtatgagagatcttgtacttgtacagagatctttaaccttctgatgtgtgtgtttgtatgttctaagaaatcaagtttaaaataatcgagaaaaacaaccatatgcgttgattcaaaataccaaaatggttaccaaacatatttgtgtttacaaaaagcttccctatacattaaaaaaaaaaaaaaaaaaaaaaaaaaaaaaaagggcggccgctctagaggatccaagcttacgtacgcgtgcatgcgacgtgat

SEQ ID NO: 88170 - DNA, 1636 bp, Arabidopsis thaliana columbia
cccgggtcgacccacgcgtccgcaatcgtgaaatcgaaacaaacaaaataattaaaaaaagaaataagaggaggcgatggcgatcaaagacctgacggcgacgaccggtgattcatctcttcctttaataaaatctccgccgtctgaaacaaccggcggtgacagaacctctgctcttcaaacgctcggtaacattatcgtctccatcgtcggtacaggcgtccttggtcttccttacgcattccgcatcgccggttggttagccggatctctcggtgtcattatcgtcggattcgccacctattactgcatgctcctcctcattcagtgcagagataagctagaatcggaagaaggagaagaagaatcgaaaacttatggtgatttaggtttcaaatgtatgggaacaaaaggtcgatacttaaccgaattcctcattttcactgctcaatgtggtggatcagtagcgtatttagtgttcataggtcgaaacttgtcatccatatttagttcgtatgggttaagtatggtttctttcatattgattctggttccaatcgaagttggattgtcgtggatcacttctttatcagctctctcgcctttcagtatctttgctgatatatgcaacatcatagcaatgtgttttgttgtcaaagaaaatgtggaaatggtgattgaaggagacttctcgtttagtgatagaactgctatttcgtctaccattggtagtttaccttttgctggaggagttgcggtgttctgttttgagggttttgcaatgacgttggctttggagagttctataagggaaagagaagctttccctaaattgttagctaagtgcttgccgggattacgtttgtctatgtgttgttcgggttttgtgctgatatggcattatggtgatcaaacaaagaatatcatcactcttaacctcccaaataattggtctgccattgctgttcagattgggttatgtgtgggattgacgtttacatttccgatcatggtacatccgcttaacgagatcatagagcagaaactgaagaggatagactggcttcaaaagcatcataatgggtacagcaacgaaacaggttcagtctcaaaatttgcaatctttacaacgaggacacttttggtggtaggacttgcagcaatcgcgagtttagtcccagggtttggtacatttgcatctcttgttggaagtactttgtgcgcactcatctcctttgtgttgccggcttcttatcacctcacgctgctcggtccatcactaaatgtatggaacaaatccatcgacgtattcattgtgatttgcgggttgatctttgctgtttatggtacgtacaacacaatcgtcggagtgtgaaaagggatagcatgtgatctgtgtaaagcaacgaatataactacaagaagtttggtaagacagacaagaaaaaatgtatagatcttttacatgaatctgaaatagaaagatggtgagaaagttgagattgttgtatgatcatttaatggtgtcaggatgcagagtcttaaacaattaacacaccgattttcttttttagtcttcctaattcaattttccaaaaaaaaaaaaaaaaagggcggccgctctagaggatccaag

SEQ ID NO: 88171 - DNA, 808 bp, Arabidopsis thaliana columbia
aatttgttgagcggggaataacaaattttccaccccaggaacccagctattgcccaatgatttacgcccaagcttcttaataggactcaactatagggaaaagctggtacgccctgcaggtaccggtccggaattcacggggtcgacccacgcgtcggggcatctgaagagttaagaggaagaagaagaacgatggcatggagaggaagcatatcgaagtctatgaaagagcttaggattcttctttgtcaatcttctccagctagtgctcccaccagaacgtttgttgagaagaattacaaagatttgaagtctctaaaccctaaattaccaatcttgatccgtgaatgtagtggagtccagcctcagatgtgggcaagatatgatatgggtgtggagaggtgtgtaaacttggatggtctgacagagccacagattctaaaggcccttgaaaaccttgtgaaatccggagctacaaaggcctaagtttgtttgtttgtttgtttttctctatatgatcccgaataagattaaaccgcaaaacaatcatttgacatttcctgtcattctactactttgtaactccgtggtgtcatatcgccttgcatttgagttggtttttttgtgtaatccttgaacttggaattaaaccattccgtataattgaaatcacagaaaggagaaaaataaaccatctctgtttaataaaaaaaaaaaaaaaaaaaaaaaaaaaagggcggccgctctagaggatccaagcttacgtacgcgtgcatgcgacgtcatagtgttctatagtgtaaggaat

SEQ ID NO: 88172 - DNA, 416 bp, Arabidopsis thaliana columbia
acgcgtccgaatagattagacactaaactaagcaaaaacacagagataagttaaaacagaaacaatgtccattttcatcatcttcctccttcttctctctacttctgtatccgtctccggccaaaaaaagcgaagtgtctaccaggttctcgaaaactacaccttaccacgaggaatattaccagaaggtgtccacgactacgacctaaaccgaagaactggcgttttcaaagtccgtttcaacaccacgtgtcagttctccatagactcgtacaaggtcaaatacaaacccgtaatctccggcatcataacatgaggacgggtcataaggttgataggcgtaagcgtcaaagttcctttcctttggatcaacatctccgagggtgtctcgtgacggcgacgacgtcgagttcttc

SEQ ID NO: 88173 - DNA, 2586 bp, Arabidopsis thaliana columbia
  unsure (1)..(2586): unsure at all n locations
ttaggtgcaactatagaagagctatgacgtcgcatgcacgcgtacgtaagctcggaattcggctcgaggaaaaaagttataattccacttttgtccttttagagagagaaaaaggccaaggcgtttttcttctctcgttcctccattttctacagagagatatatcaaaaattccattttctacagagagagagagagagagagagagagagagagggacgaaatattaatcatcgatcaagttgcttcaatcgcgaaaaaatccatgaataaaactatggaatggaatgtgaatcaaaggatttggttatggtgatgacgcgatcttcgattcgattcggtgattaaaagatttggaagctcagatctcaagctcggatttctaatttttgttggattatctaacccaaaagccaaaaaaaaaaaatgaacggtggtgacgatgccgctactagtggtcctcctccgtctttagagtggagattctctcaggtcttcggtgagcgaaccgccggagaagaagttcaggaagttgacatcatttcagccatcgaatttgataaaagtggagaccatctcgcaactggtgaccgtgggggccgagtagttctttttgaaaggacagatactaaagatcatggagggtccaggaaggatcttgagcagacggattacccagttaggcatcctgagtttcgatataaaacagaatttcagagtcatgaaccagagtttgactatctcaagagtttggagatagaggagaaaatcaacaaaatcagatggtgtcagccagctaatggtgcattgtttctgctttctacaaacgataaaaccatcaaatattggaaggtacaagagaagaagatcaagaaaattagtgaaatgaatattgatccgtcagaaagttcaaatatccctcctcaattagttactaatggattacctgctgataaagggcatgactacctgagcaaggacttttctttcccgccaggaggcattccatctctgcgtttgcctgtggtagttaccagccaggagactaaccttgtggctagatgccgaagagtgtatgcccatgctcatgattaccatattaattcaatctccaatagcagtgacggagaaacctttatttcggctgatgatctgcgagtaaatctctggaatttggaaattagcaaccagagtttcaatattgttgatgttaagcccacaaacatggaggacttaactgaggttattacatcagctgagtttcatcctatccattgtaatatgctcgcatatagtagttcaaaaggctccattcgtttgattgatatgcgtcaatcagctctgtgtgattctcatacgaaattatttgaagaaccggaagcacctggttcaagatcatttttcacagagataattgcctcaatttcagatattaaattctcaaaggatgggagatacatacttagtcgcgattacatgacgctcaagctgtgggacataaacatggattctggtccggtcgcatcttaccaggttcatgaacatctgagacccaggctatgcgatctatatgaaaatgactccatctttgataaatttgagtgttgtctgagtggcgatggattgagggtagcaacaggttcttacagcaatctattccgcgtatttggagcgtctcaaggaagtactgaagctgcgactttggaagctagcaaaaacccgatgaggaggcaaatccagacacctgcaagaccatccagatctataggcagtatgacacgcgtggttagacgaggatcagagagtcccggaacagaggcaaatgggaacgcctacgatttcacaacaaagttgctgcatatggcttggcacccaacagagaactcaattgcttgtgcagcagcaaacagcttgtacatgtactatgcatgagttgggaagagagagagaagacataaacatggaatcagcttgctccaatttaactttccctttcttcttttcccgggtctctctctcactctctttctctctttcttttaacaaccaaagtcatgatgtaaccagaaaaggtgtagtagtaacagagtaatgctgtgaccaagaccaaagcctgaccagtcaccgcgacgagtcaacggaagaagcagcaacagtaatctttcaggagttagtaaggtaaaaagtgttgggttgggaaagaaaacaagaagaggccttttgtttacctgaagaagggtaatgtcttaaatatccgaaccacccctcctacttaggttgtcttttttttgggttgctgcactaaggataaattttattttattttttttagtatcgattctattaccttttttttttcaattaagaaacaaattatggtgtgtgggattttttagtatgagacgattgggagggatgtgcttcaaaatttgtttattgattcttttgtcataaaaaaaaaaaaaaaaaaaaaaaaggnnnnnnnnnnnnnnnnnnnnnnnnnnnnnnnnnnnnnnnnnnnnnnnnnnnnnnnnnnnnnnnnnnnnnnnnnnnnnnnnnnnnnnnnnnnntagctggcagtatcat

SEQ ID NO: 88174 - DNA, 511 bp, Arabidopsis thaliana columbia
  unsure (1)..(511): unsure at all n locations
tccnnnnnnnnnnnnnnnnnnnnnnnnnnnnnnnnnnnnnnnnnnnnnnnnnnnnnnnnnnnnnnnnnnnnnnccacgggtccgcgcacgcgtacgggctgcaagaaaaccacagaaggggacagactctggactctgaagaagcaaatggctgggatcaccagcaccgttggattcaacgccattctcgccggagccaccaaaacggtgtcgcatcctgttaaatctaagctctttggtcttcgactctgtgtacccgaattctcaattgtttctctttccccttatcatcatcgccgttgtcccgccatcacttgccgttacggaggcggtggtggcggaggctctagatttcccggcgataggagaggtaggcagaaagaatccgaggatgatgattcgcttaatatctcagctattaggtcagccactgttaggcttattgatgatcagcagaacatgattggtttagtttccanagaagaagctgttcgaagagctgaagatgctg

SEQ ID NO: 88175 - DNA, 706 bp, Arabidopsis thaliana columbia
  unsure (1)..(706): unsure at all n locations
cccaatcaaggcattcagccaagcccaattgccttaacatgcagcccacagattgatgccaagaggacgagggtaccggtacccttctggtggtagaaacatgcctgacggtccaatgccaggagaaatggttccagttgcttatgacatgaatgtaatgccgtatagtcagcctatgtccgctggtcaattggctacttcccttgctaatgctacacctgctcaacagagaacacttcttggtgagagtctatatccattagtggaccagatagagagtgagcacgctgcgaaagtgactggtatgcttctggaaatggatcagaccgaggttttgcatctgctcgagtcaccagaggctctaaatgccaaagtttcagaggcattagatgtgttgagaaacgtgaatcagccatcttcacagggaagtgaaggcaacaaaagtggaagtccaagtgatctcttggcttcactttccatcaatgatcatttatgagaagcttttgttcgagtttttttttttactttgactctcttcctctctatctctctctctgattgacaaatttttgcgggaatctatttgctgttttagactttttttgctcgatatgattgtttctgtttgcccttcttacttttttgggttgacttaaaaaaggatggttttatttaaaaaaaaaaaaaaaaaannnnnnnnaaagtt

SEQ ID NO: 88176 - DNA, 361 bp, Arabidopsis thaliana columbia
aatagtttctctctctctcttttcctttgtctccagagccgatgataaacgacggcggttttcaccggaactgagggaaattaagctggtaaacatggcgggtgaagatgtttcaagcaatttccgagctttggtggagaacgcagaccggaaattcgcaagagttcgcgatcttccggcgtttggaagagcacagagtcattacttccaaaaggtgttcaaagcttatatgaaactatggaactatcagcaatctcataggtcaaagctggtcgagtccggtttaaaccgatgggaaatcggcgagatcgcgagccggattggtcagctttactttagtcaatacatgaggactagtgaa

SEQ ID NO: 88177 - DNA, 1480 bp, Arabidopsis thaliana columbia
tgaatcgggaatctgattcatatgtttggggtttaatagtctcagctcaaataaatctaggttaaactgtgtggatcgattcatatatcctccgtcaaaaccaaaaccaaaccgatttgtcataattttttcttatcatccactttcattggctagagggacattgtaacggtgtcgtcgtcgccaaacgatttgcctcttcctaaaggagattctttcctacataggaattgagtttaaggtggaattcttctgttattttgttgttgcacgaaaatggaggacattgagaacatagaagaagatgagtatgggttttcaagaaactacttcttggcaaaagaattgggtggggcgagtaagcgttctgcccacaagctctctgatatacatattgttgatgagcaggagcttagagaaacggcttctacaattgaaatgaagcactcgaaagagatatctgagcttatgagtgattacaagactatgtactcaaagtgggtctttgagctcaggtgtggctttggccttctaatgtatggctttggatctaagaaagctttagttgaagattttgcttctgcttctttgactgactattctgttgtggtcatcaatggctacctcccttccgtaaatctaaagcaggttcttttggcattagctgaacttctatccgagcttttgaaatgtaaaagaaagagttccgggagtttgtctaaaggtcaagaaacatttccttcacgctccatggatgatattctttcctttctacatggtccacagtctggagataaagactgcttcatatgcgttgttgttcataacattgacggccctgctctaagagatcccgaatcacaacaaactcttgcccggctttcttcttgttcacacatacgcttggttgcctctattgaccatgtcaacgctccattattgtgggacaagaaaatggtgcacaaacagtttaactggctatggcaccatgttccaacatttgcaccatacaatgtcgaaggtgtattcttcccgttggttcttgcacagggaagcacagcccaaaccgccaaaacagcagccattgttttacagagtttaacaccaaacggtcagaatgtcttcaagattcttgctgagtaccaactttcacacccagatgaagatgggatgcccactgatgatctgtattcagcgtctcgggaacgcttctttgtgagcagtcaagtgactttaaactctcatctcacggaatttaaagaccacgaactggttaagaccaagagaaactccgatggtcaagagtgtttgaatataccgctcacttcggatgcaattcgacagcttttgcttgatctcaatcagtagcctgaaattgtatttctgatatgattcatttttattgcttgaacgagttattatagttcacacagtttacatgtttaattgaatgttatagtcagcactcacagctcttatt

SEQ ID NO: 88178 - DNA, 3824 bp, Arabidopsis thaliana columbia
  unsure (1)..(3824): unsure at all n locations
acaaagccgacacaggcaagacttagaggaagaagaagaagaagaagcaaaaatgagaaaccattgcttagaactctcttccaattgttcctccattttcgcttcttccaaatccaatcctcgtttctctccttccaagctctcctattccactttcttctctcgctctgccatctattacagatcaaaaccaaaacaagcctcgtcttcttcttccttctccactttccccccatgtctcaatcggaaaagctccctcacgcatgttctcaaacccgtctcagagctcgccgacaccactaccaagcctttttctccggagatcgtcggcaagagaaccgatctgaagaagattatgattctcggcgctggtccgattgtcattggacaagcttgtgagtttgattactctggtactcaagcttgtaaagccttaagagaagagggctatgaggttatcctgatcaattcgaatcctgccactatcatgactgatccggaaactgctaatcggacttatatcgctccgatgactcctgagcttgtcgagcaggttattgagaaagagaggcctgacgctttgttaccaaccatgggtggtcaaaccgcattgaacctcgcggttgctcttgctgagagtggtgctttggagaaatacggtgttgaattgataggagctaagcttggtgcgattaagaaagctgaagatcgtgagttgttcaaggatgcgatgaagaacattgggctaaagactccaccttcagggattgggaccactcttgatgagtgttttgacattgctgagaaaattggtgagttccctttgattatccgtcctgcgtttactttaggtggtactggtggtggaattgcgtataacaaagaggagtttgagtctatatgtaaatcgggtttggctgcgagtgcgacaagtcaagttcttgtggagaaatccttgttgggttggaaagaatatgagcttgaggtgatgagagacttagctgacaatgttgtcattatctgttccattgagaatattgatcctatgggtgtgcacactggtgattccatcactgtggcacctgcacagactctaacggatagagagtaccagcggcttagggattattccattgcgattatacgggagattggtgttgagtgtggtggatctaatgtgcagtttgctgtcaacccggttgatggtgaagttatgatcatagagatgaaccctagggtctcaagatcttctgctcttgcttccaaggctacagggtttcccattgctaaaatggctgccaagttgtctgttggctataccttggatcagattcctaatgatatcacgaggaaaacaccggctagcttcgagccctccatcgattatgtggtgactaagattcctcgatttgcatttgaaaagtttccaggatctcagccattgctaacgacccagatgaaatctgttggggaatctatggctctcggccgtacattccaagaatctttccagaaagctctgaggtctctggagtgtggattctcgggttggggttgtgcaaaaattaaagagctagattgggactgggatcagctgaaatacagcctaagagtcccaaatcctgacaggatccatgcgatatatgctgccatgaaaaagggtatgaaaattgatgaaatctacgagttgagcatggtggacaagtggttcctaacccagcttaaagagctcgtggacgtcgaacagtatcttatgtccggaaccttgtcagagattacaaaagaagacctttacgaagtcaaaaagcggggatttagtgacaagcaaatcgcttttgctacaaagacaaccgaggaagaagtccgtaccaagcggatttctctaggagttgttccatcttacaagagagtggatacatgtgctgcagagttcgaagcgcatacaccatacatgtactcttcatatgatgttgaatgtgaatcagctccaaacaacaagaagaaggttttgattttgggtggagggccaaaccgcattggtcaagggattgaatttgattactgttgttgccacacatctttcgccttacaggatgctggatatgagaccataatgttgaactcaaatcctgaaacagtatccacagattatgatacaagcgataggctctattttgaacctctcacaatcgaggatgttctcaatgttatcgaccttgagaaacctgatggcataatagtgcaatttggtggtcaaactcctctgaaacttgctctgccgatcaaacattatttggataagcacatgcccatgagcttgagcggagcgggacctgttcgcatctggggtacatcacctgactccattgacgctgctgaagacagagagaggttcaatgcaattctcgacgagctgaagattgagcagcccaagggaggcattgcaaagagcgaagctgatgcattagccatagcaaaggaggtagggtacccagttgtggtaagaccttcttatgttctaggtggacgagcaatggagatcgtttatgatgacagtagactaataacctatttggaaaatgcggtacaagttgacccagagagacctgttttggtagataaatatctttctgatgccattgagatcgacgttgatacccttactgattcctatggaaatgtggtgattggtggaataatggagcatatcgaacaagctggtgtgcattctggtgactcagcttgtatgcttccaacacaaaccatcccagcttcttgtttgcaaactattcgaacatggaccactaagctggcgaagaagctaaatgtatgtgggctgatgaactgtcagtacgcaatcacaacatctggggatgtttttttgctggaagccaatccccgagcttcccgtactgtcccttttgtgtcaaaagccattggacaccctcttgccaagtatgcagcgctggtcatgtcgggcaaatctctcaaagatcttaactttgaaaaagaagttatccctaaacatgtctctgtgaaagaagctgttttcccgtttgagaagttccaaggatgcgatgtgatactcgggccagagatgagaagcacaggagaagtgatgagcatcagttctgaattctcaagtgcgtttgcaatggctcagatcgctgcaggtcaaaagctacctctatcaggcacagtcttcctcagcttaaacgatatgaccaaaccgcacctggagaaaatcgcggtgtccttcctcgagcttgggttcaaaatagttgccacctcgggaacagctcatttcctggaactgaaaggcattccagtggagagagtgttgaagttgcatgaaggaagaccacatgctgctgatatggtggcgaatggtcagatccatttgatgttgatcacaagctcgggtgatgctcttgatcagaaagatgggagacagctcagacaaatggctctagcatacaaggtacctgttataaccactgttgctggtgcattggccactgctgagggaatcaagagcttgaagtcaagtgccattaaaatgaccgctcttcaggacttctttgaggtaaagaatgtatcttctttgctcgtctgagttagtttttttgttgtgtgttgatcgtttgtgtggaacttttttacgataaattttaacggattttgttacccataagcatttctatgaataatcttcgaaaatgcagcgcgcccgtgatttatcaatcggctttgttcctttaattcagatatacacaagcctttgattgtatcatgtcatgttacgcttggcttaaacnnnnntt

SEQ ID NO: 88179 - DNA, 413 bp, Arabidopsis thaliana columbia
atacccagaaattatcatcatccacagagaaacccaaaagagattgaagaagatgcattacatgggtttgtttagtagagctggaaacatatttaggcagcctagagcgttgcaggcctcaaacgctatgttacagggcaatctttcattaactccatccaaaatctttgttggaggtctctcaccatctactgatgtggagctcttgaaagaagcttttggcagttttggaaaatttgttgatgcggtagtggttttggaccgtgaaagtggtttatcaaggggctttggtttcgtaacatatgattcgatcgaagttgctaataacgcaatgcaagctatgcaaaataaggagcttgatgggcgaataattggagtgcatccagctgattcaggaggtggtgggggtggtg

SEQ ID NO: 88180 - DNA, 468 bp, Arabidopsis thaliana columbia
gggtcggccacgcgtccgacctagcagagaatgtattcccggaaagaccaggccaacctgaatgccaattctacatgaagacaggagattgcaaatttggaacagtctgcagatttcatcatcctagagacaggcaaacccctcctcctgattgtgtcttaagctcggttggccttcctttacgcccgggagaaccactgtgcgtgttctattctcggtatgggatctgcaagtttggtccaagctgtaaatttgatcacccgatgcgagtcttcacttacaacaacaatactgcatcgccttctccttcatcatctctgcatcaagagactgcaatcaccacagagctcaggaatctcctagtctcttcttctgtggaagcaaaacccacatcactccctgaaacaacctctgctaaagacaccattgttgatgcacagcactgaaaccctgtgttttgtctatctt

SEQ ID NO: 88181 - DNA, 1793 bp, Arabidopsis thaliana columbia
  unsure (1)..(1793): unsure at all n locations
nnnnnnnnnnnnnnnnnnnnnnnnnnnngccggnacgcctgcaggtaccggnccctgcaggaattcctcgagctacgtcacggcaaatccaaaccaaagttctccattttcgtagcttctttaagctttttcagtatcatagagacacttttttttttttgattagaaatggctttagctgttacttcttcttcaactgcaatctctggatcgagtttctctcgttctggagcttcttctgaatctaaagctcttcaaatatgttcgattaggttatctgatcgaacccatttgtctcagagacgttactctatgaaacctttaaacgctgagtcacattcacgaagcgaatcttgggttactcgtgcttcaactctaattgctcctgaagttgaagagaaaggaggagaagttgaagactttgagcaacttgctaaaaagcttgaagatgcttctccacttgaaatcatggataaagctcttgagagattcggagaccaaatcgcaattgcttttagtggagctgaagatgttgcattgattgaatatgcacgtttaactggaaagccatttagggtttttagtttagatacagggagattaaaccctgaaacgtacaggctctttgacgcagtcgagaagcagtacgggattcgaattgagtacatgtttcctgatgcagttgaggttcaagctttagtgaggaacaagggtttgttctcattctatgaagatggtcatcaagagtgttgccgtgtgaggaaagttagacctttgcgtcgtgctcttaagggtcttaaagcttggattacaggacagaggaaagaccaatctccgggtacgagatctgagatccctattgttcaggttgatccagtgtttgaagggttagatggcggtgttggaagtcttgtgaagtggaatcctttggctaatgttgaaggagctgatgtgtggaactttctgagaactatggatgttccggtgaatgcattgcacgcacaagggtatgtgtcaatcgggtgtgagccgtgtactaggccggtgcttccaggccaacatgagagagaaggaaggtggtggtgggaagatgctaaagctaaagaatgtggtctacacaaagggaacatcaaggaggaagatggtgctgcagactcaaagcctgctgctgtgcaagagatatttgaaagcaacaatgtggttgcattgagcaaaggaggggttgagaatcttttgaagctagagaaccgtaaagaggcgtggttggtcgtactttacgctccttggtgccctttctgccaggcgatggaagcatcgtacatcgaattggctgagaaacttgcgggaaaaggagttaaagtggcgaaattccgagctgacggtgagcagaaggagtttgctaagcaagagcttcagttagggagcttcccgacgatacttctctttccgaaaagagctccacgggctattaagtacccttcagagcatagagatgttgattcactcatgtcgtttgtgaatcttcttcggtgagttatgagatagaaaataaaaagagggtgatgaagaatgaaagagaattgagatgaaggagtgatttcatcttggttataatattgtggaggtcagagaataaacaagagttattactcttctacatgactttgtatatttgtattgtaggggtttttatagactctttttgttacctctatgtatcttttttggtctacttttgagttctactattgtttataacgtttttctccttgtttatcaaaaaaaaaaaaaaa

SEQ ID NO: 88182 - DNA, 1174 bp, Arabidopsis thaliana columbia
  unsure (1)..(1174): unsure at all n locations
nnnnnnnnnnnnnnnnnnnnnnnnnnnnnnnnnnnnnnnnnnnnnnnnnnnnnnnnnnnnnnnnnnnnnnnnnnnaaacctacccacgcgtccggcttcagctccccttttcttatccggaaaccaaaaacttccggtgataaaacctccttcgtcatctctctacttcttggataaaatggcgtcaactttcactgccacatcttctattggttcaatggttgctccgaatggtcacaaatctgataagaaacttatcagcaagttgtcttcaagctcatttggaaggagacaaagtgtgtgtcctagacccagaagatccagttctgcaattgtgtgcgcagcaaaggaattacatttcaacaaagatgggactaccattaggagacttcaagctggtgtcaacaagctcgcagatcttgttggtgttacacttggacccaaaggacgaaatgttgttcttgagagcaagtatggatcaccacgaattgttaatgatggtgtgactgttgcaagagaggttgagttggaagacccggttgagaacattggtgcaaagcttgtaaggcaagcagctgcaaagaccaatgacttggctggtgacggtacaacaacatctgttgttcttgcacaaggttttatcgctgagggtgtcaaggtggtggctgctggtgcgaaccctgttttgatcaccagggggattgagaacactgcaaaggctttggttaccgagctcaagaaaatgtctaaggaggttgaagacagtgaacttgcagatgttgcagctgttagtgcgggtaacaacgacgaaattggaaatatgattgctgaagcaatgagcaaagtgggcaggaaaggtgtggtgacccttgaggagggtaaaagtgccgagaacaacctctacgtcgtagaaggaatgcaatttgaccgtggttatatctctccttactttgtgacagacagcgagaaaatgtccgtcgagttcgacaattgcaagttacttctcgttgacaagaaaattaccaatgcaagggatcttgttggtgttttggaggatgcaattagaggcggatacccaatattaattattgctgaagacattgaacaagaagctttagcgactcttgttgtaaacaagcttagaggtacactgaagatagcagctctcagagct

SEQ ID NO: 88183 - DNA, 861 bp, Arabidopsis thaliana columbia
gctggtacgcctgcaggtaccggtccggaattcccgggtcgacccacgcgtccgtacggctgcgagagggcgacagtacgggaaggagaaactcaatgagagaattgcaaagctctctggtggagttgctgtgattcaggttggagcacaaactgagacagaactcaaagagaagaagttgagagttgaagatgctcttaatgcaacaaaggccgctgtcgaggaaggtattgttgttggtggtggttgcactctgcttcgtcttgcttccaaggttgatgccattaaagccacgcttgataatgatgaagaaaaggttggagcggatatagttaaaagagcactaagttaccccctaaaactaatcgccaagaatgctggtgttaatggaagtgtagttagcgagaaggtgctttccaacgataacgtgaaattcggttacaatgctgcaaccggcaagtacgaggatttgatggctgcaggaatcatcgatccaacaaaggttgtgagatgttgcttggaacacgcagcttcggttgcaaagactttcttgatgtcggactgcgttgttgttgagatcaaggaacctgaaccagttcccgtcggcaacccaatggacaactcaggatatggatactaagaggagataggctaatattgaaacggattactttagcttgcgagtgtaatgattttgaacaagagaatgtgtaatgtgaaactgaaattttgaattaatcatcatatgaataaatcatgattccctccaaaaaaaaaaagaaaaaaaaaagggcgagcggccgctctagaggatccaagcttacgtacgcgtgcatgcgacgtcatagatcttctatagtg

SEQ ID NO: 88184 - DNA, 774 bp, Arabidopsis thaliana columbia
gaacacccggccgcgcgagcgcctaatcttcttctccaatcaatctcagagaaaaaaagaaatggcaacaaaccctaaagtctacttcgacatgaccgtcggtggcaaatccgccggtcgtatcgtgatggagctttacgccgacacaacaccagaaaccgccgagaatttcagagcactctgtaccggagagagaggaatcggtaaacaaggtaagccattacactacaaaggatcaagctttcaccgagtgattccgaaattcatgtgtcaaggaggtgatttcacagccgggaatggtaccggaggtgaatctatctatggatcgaagttcaaagacgagaactttatcaagaaacatacaggaccaggtattttgtctatggctaacgctggtgcgaacacgaatggatctcagttttttatttgtactgagaagacttcgtggctcgatgggaaacatgttgtgtttggtcaagttgttgagggattgaatgttgttagagatattgagaaggttggatctgactctggaagaacttctaagcctgttgtcattgctgattgtggtcagatttcttagatctgtctgagattgttgatgatgatgatgatgatcttgaggatccaatggtagctttgtgttgtttctctttgatgttttctggtttatgtttttggattttgatgtttattgctgttgtgaaactttgagtttggctaccattgaataagaagaatgagaataaaatcttgagatccaaatttttgttt

SEQ ID NO: 88185 - DNA, 668 bp, Arabidopsis thaliana columbia
  unsure (1)..(668): unsure at all n locations
acccacgcgtccgggagaagaaacaaagccgtacaacgagggctcttcctgggcaacaaaaccaccattttcgttttatctcaatcttcgtctctttcgaaagatctaaccacaacaactccttaagatggataagtatcaacgagtggtgaagccgaaagcggatacgccgattgatgcgaatgagattcgtatcactagtcaaggcagggcacgaaactacatcacctatgcgatgactcttcttcaggataaagggtcaactgaagttgtattcaaggcaatgggaagagctatcaacaagactgtgaccattgtagagctgattaagagaaggatccctgatcttcatcagaacacatctattggatccacagacatcacagacacatgggaaccaacagaggaaggccttctacctttggagactacaaggcatgtgtcaatgataaccattaccctatccaagattgagcttaatacctcctctgttgggtaccagtgcccaattcctattgagttggtgaagccaatgggcgatattgattatgaaggacgagagggttcacctggtggcagagggaggggaagaggaagaggaaggggaagaggaagngggcgaggtngcagagggaaatgcttatttgaaccgttngagcatnaagatt

SEQ ID NO: 88186 - DNA, 889 bp, Arabidopsis thaliana columbia
  unsure (1)..(889): unsure at all n locations
atgttnnnnnnnnnnnnnnnnnnnnnnnnnnnnnnnnnnnnnnnnnnnnnnnnnnnnnnnnnnnnnnnnnnnnnnntatacgactcacttagggaaagccggtacgcctgcaggtaccggtccggaattcccgggtcgacccacgcgtccgagccaccgtttcctccgcaatcttcataacctaaacaacactcatcccctggtacttaaacaatgggaaagaggaaatcaagagcaaagcctgctcctacgaagcgaatggataagcttgacacaatctttagttgtcctttctgcaatcacgggtctagtgtcgaatgcatcattgatatgaagcatctgattggtaaagcagcttgtagaatctgtgaagaaagctttagtactactatcacagctttgactgaagctatagacatttatagcgaatggatcgatgagtgcgagagggttaataccgcggaagatgatgttgtgcaagaagaggaagaagaagtagaagaggaagaagaagaggaagaagaggaggatgatgaagatgaccatgtctctgtcaaaaggaagtataacttctgagacgagtgttttatcgaaaatcatgtaagtcgtcgtcttagagttatctgctttatgttgtaatatctatctgatgaaatcacaagaacaatctttagtgttttctcagtgtctgatagagaaacatacatttaagtgaacaatctttaatcacaataacagtgtatgattatgatttgtaagtggatttaaggctttgcttaattggttccaatccatacaaaaaaaaaaaaaaagnnnnnnnnnnnnnnnnnnnnnnnnnnnnnnnnnnnnnnnnnnnnnnnnnnnnnnnnnnnnnnnnnnnnnnnnnnnn

SEQ ID NO: 88187 - DNA, 591 bp, Arabidopsis thaliana columbia
  unsure (1)..(591): unsure at all n locations
actctatccaccaagagagggaaaacgaaataaaaatagcacaggggagagacaaaatgagataaggatttgaagcctctcaccactctcctcgttttcgcttcgtgcttatttgtcaaacgcgaacatttcaccgaaacttagcgacttttctcgctttactctttctgggagcaatttctcagagcataggcgagcttaaaggtgacagttcttagctatggctacgattacaccttcttctattagcaatgcctggctcattcctggagcttcttttactgtaaagaagagtgattgttccatcaaatgtagcttttcgcgtaaagctgggaaacagattctatcatcaacgcagagacttgtgttacctttgtcgacttcacttagattgtttcctacacatggaaggcagtttgtgttgcatcctcatcgtagagctactgggactgatgttgtggcggctgtagaggnacaagattctactcccggtggtgcggagggtnaagaaaccgtggcaagtganagcagatgccctgnccaannntcagcaangggggcagcaancctggagganatnaatcctcgggc

SEQ ID NO: 88188 - DNA, 1505 bp, Arabidopsis thaliana columbia
tatacgactcacttaagggaaagacggtacgcctgcaggtaccggtccggaattcccgtttcgtccctcgcgtccggcgaaggctccgcttcaatcatttgtagcagtaagaacgaattcgagacctagaaattcatcgaaccgtctcgtttctgtattcggacgcaagtcttcttctccttcatttgttactctcagagttgtttcatcgatggcttacgagaaagagcttgatgctgctaagaaagctgcttcactcgctgctcgtctctgtcagaaagttcaaaaggctttgttgcaatcagatgtgcaatcaaaatctgataaaagtccagtgaccgttgctgattatggttcacaagcagttgttagtttagtcttagaaaaagagctcagttctgaacccttttcattggtggctgaagaggactcaggcgatctacgcaaggatggttctcaggatactctggagcgcatcacaaaactcgtgaacgacactttggctaccgaggaatcgtttaatggctctactttgtctactgatgatctacttagagccattgactgtggaacatctgaaggtggtccaaatggtcgacactgggtcttggatccaattgatggcactaaaggatttctgaggggagatcaatacgcagtagcactaggattgctcgaggaagggaaagtagttttaggtgtgcttgcttgtccaaacttgccgttagcatccatagcaggaaacaacaagaacaaatcttcgtcagacgaaattggatgcctcttctttgctacaattggttcagggacatatatgcagctcctagattcaaaatcttctcctgtaaaagtgcaagtctctagtgttgagaatcctgaagaggcatcgttcttcgagtcattcgaaggagctcactctctacatgacttatccagctccattgccaataaactcggtgtcaaagctccaccagtccgtattgatagccaagcaaagtatggagctttatcaagaggagatggagctatatacttacggtttcctcataaaggataccgcgaaaagatttgggaccatgtcgctggtgctatagttgttacagaggcgggtggaatagtgacagatgcagcaggaaagccactggatttctcgaaagggaagtatcttgatttggacacaggcattatcgttgctaacgagaagctaatgcctctgcttttgaaagcagttcgtgactccatagctgagcaagagaaagcttcagctctttgatttgtttttttctctcgtacgttctttgtttctctgtaactgttgtttcattttctttcaccgaatttcaccagtgagaatttcttccattttcgaaaaagaaataaaaatgaaattctgttttgggctaaaaaaaaaaaaaaaaaaaaaaaactcgagtctagaggatccaagcttacgtacgcgtgcaggcgacgtcataactcttctatagttgctacctaatacaatt

SEQ ID NO: 88189 - DNA, 420 bp, Arabidopsis thaliana columbia
cccacgcgtccgcaaaatagtagaagaagaactttttttgatctccgattcttacctctgcaatcttcagattctagctgattcaaggatcttgtttgtgatagaaattggaggagatgggagcattcatgtcgaggttttggttcatgatgtttcctgcaaaagagtataagattgttgttgttggtttggataatgctggtaaaacgacgacgctttataaacttcatttgggtgaagttgttactactcatcctactgttggtagcaatgttgaagagcttgtctacaagaatattcgctttgaggtatgggatcttggtgggcaagataggctaagaacttcatgggcaacatactatcgtggaacacatgctgtgattgtggttatagatagcacagacagagccagaatctctt

SEQ ID NO: 88190 - DNA, 561 bp, Arabidopsis thaliana columbia
aattgtttgacagcatctgtcagtgaaatcgaggaagtcagatcaaatgtaacgtcagttatcaatatggagcatacaaggctatgtggttttggtggatggttccatgttcagttctcggggagaaaagaagaccccgctcagcaagaaatcgagttgaccacagctccaagtgagcagcactgcacgcactggggacaacaggttttcattatgtcgaatcctataaatgttgaggaaggtgataatctgaatcttggtttgttaatgagccggtccaaggaaaatcaccgactaatggagattgagcttaactgtgaaataaaagaagcatctggtaaccccaaagaatctttcaagaagacttacttcatagagtgattgattgattatagagaagctttccttggggcttgctggttcttgtatcccatgtatgaaccccaaatgtaatgttttattgcttcttgccttttttttctatgtaaacgagattgttataccaattttcaatagatttttatatgggtgatataaaaaagggaggaaaaaaaaaaagga

SEQ ID NO: 88191 - DNA, 495 bp, Arabidopsis thaliana columbia
aaggataagccatgaaagaggcgaaggagaagaagaatccagaaatctccgtttgtatcacgatatcaacttggggggcttttgctgtttatgtgattactgggttatttctgatcttcggatttcacgtggtccgtaacaaatactctgtcgatctcatttctgatccaactctcactctgcgtctcctatggattattgagttcccgatcgtggtaatcatctacagcttgttccgacgaaacccagagaaatgctcgtactttagagctgttggccgaagcttagtcggactaattgccggttagtatttctgtttttcagcttattatagctcactaatttttcaaagaagttgatttgctcaatgaggtcacctggcaaattctagatgttaagctaaacctgaagatgtgagtgagtctgagcttcttatgctttcatcttgtgcttttgctgattcagtatcccttgattgtgtctactatatctata

SEQ ID NO: 88192 - DNA, 405 bp, Arabidopsis thaliana columbia
cgaagacgagaaaggaaaagccatgaaagaggcgaaggagaagaagaatccagaaatctccgttagtatcacgatatcaacttggggggcttttgctgtttatgtgattactgggttatttctgatcttcggatttcacgtggtccgtaacaaatactctgtcgatctcatttctgatccaactctcactctgcgtctcctatggattattgagttcccgatcgtggtaatcatctacagcttgttccgacgaaacccagagaaatgctcgtactttagagctgttggccgaagcttagtcggactaattgccggtgctcttataaatgctttgggagctgtttctttgggtgcacctattggaatgcaatctctatcaaaaacaattcactggtcctttctaat

SEQ ID NO: 88193 - DNA, 520 bp, Arabidopsis thaliana columbia
  unsure (1)..(520): unsure at all n locations
aatgannnnnnnnnnnnnnnnnnnnnnnnnnnnnnnnnnnnnnnnnnnnnnnnnnnnnnnnnnnnnnnnnnnnnnnnnnnnnnccacgcgtccgggcagatgttcttggaagtggtcctctggggcctgttacttctgcagttaatcaagctaaagctgggttggatattgatgccgtagatggtgaagtcgccaagctttcatcggcagttggggaatcacctgcacagcttgtaatttcagactcagataggacactagcttccacagggcttggggaaggcagcccaaaggataaaatatcagatgacatgttcactgatgatatctttggggagtctccagctgatagtcagaaaatgggctatctgcgagggaaagggaatggcattcctattgtaaggagtggactcgacgataattgggatgatgcagaaggttattacagttatcaattaggggaactacttgatgatagatatgaaatcatggctactcatggaaaaggtgtcttctctac

SEQ ID NO: 88194 - DNA, 679 bp, Arabidopsis thaliana columbia
atgatactccagctacatcgactacgatagggaaagctggtacgcctgcaggtaccggtccggaattcccgggtcgacccacgcgtccgcgacgatcgattcttcttaatctgtaaaggtcaggaacgattccgagtcaccgatctcgtccgtacgaaaccttacctcgtcgcgaaagtgacgtggcttgaagatcgaccgtccggtgaagagaatctggacgaattggcgaatgaagttgaggttctgatgaaagaagtgattcgattgtcgaatagattgaatgggaaaccagataaggaatctcaggatctgaggaagaatcagtttccgactccgttctcgttcttcgtcggaagcacgtttgaaggagctccgatggagcagcaagcgttactggagcttgaagatacggcggctaggttaaagagagagagggagacgctgaggaatacactcaattatttgacggcagcttctgctgtgaaagatgtgttcccatcgcagccatagtttaatcggtatttagatatttcttctggtctccgtttcggtgttttcagttattattggatacattatatttgatcaatgtgtaaagtttcagacaccttaggtaatagatagtggagatgtgtttcataggatcgtttggattgatcaagaaatgggtttttac

SEQ ID NO: 88195 - DNA, 674 bp, Arabidopsis thaliana columbia
tttggtttaccttaacatccttcgtcgccggaatttgacgactaatatcagacttcatcagcttacgtcgatctacgtacgacggctatgacgatgacgtcgatcatcagatccagtcctactctcgctttcatcgtcttacagatttgcttcatcttctttgcttccactttcccttgctcttctgggtctgaggatagttacaccattactggtagagtcaagattccaccaagcaacgtgattggtcacatagcaaagttctcaaatgtcaaagttatactcaatggtggacagaagattacgtttctcaggcctgatggatactttacttttcatgaagtgcctgctgggactcatttgattgaagtatcagcaatgggttacttcttttctccggtacgagtagatgttagtgctcggcatcgtggcaaggttcaagcaacactaacagaaaccaggaggagtcttactgagctggttttggagccattgaaggaagagcaatattatgagattcgagagcctttcaacattatgtcgatcgtgaaaagtccaatgggtctcatggtgggattcatggtcgttagtgtgttcctaatgcccaaatttatggaaaacatagatccagaggagatgaagcaagcacatgaggaaatgaggagacaaggcgt

SEQ ID NO: 88196 - DNA, 366 bp, Arabidopsis thaliana columbia
caaaacttccgatttcaaaaaaacaatttgaaatttgtcaaaaggaatattctgacgatcgattcttgattcgttttctcgcgtatagagagaaaaatggcgcttaatttatcgcatcagctaggagtactcgccggaactccgatcaaatccggtgaaatgacagattcatcgttgttatcaatttcaccaccatcggcgagaatgatgacacctaaagcaatgaatcgaaactacaaggctcacggaacagatccatcaccgccgatgagtccaattttaggtgcgacacgtgcggatctgtccgtggcgtgtaaagctttcgcggtggagaatggaatcgggaccattgaagaacagagaacg

SEQ ID NO: 88197 - DNA, 416 bp, Arabidopsis thaliana columbia
atttaatatatactatttgttgggatgctattttgtggtttactcgtagtcatgttttcaaaattttcattgttgaaactagtctcatttgtggcaattttgttgcagagacgcagatatggattcgacctgaaatcaatggcgtaccgccctgcccgagggacagtcatagctgtacaacagttggtgataacctttttgtgtttggtggtactgatgggaccaaatatctcaacgatgtgcacatccttgatacttattcacacacttggatacgtccggatattagaggggaaggaccaagggttagagaggctcatagtgcagcgcttgttgacaaacgtcttttcatatttggcggctgtgggaaatcttctgattcggatgatgaagtattctataatgacctttacata

SEQ ID NO: 88198 - DNA, 609 bp, Arabidopsis thaliana columbia
  unsure (1)..(609): unsure at all n locations
gaattgatttattgtgacactatagaagagctatgacgtcgcatgcacgcgtacgtaagctcggaattcgggtcgacccacccgaaccaaagaagatctaaagagataaagagaatgatgaagaagcaagtgacgatagtggcggctcttctgattatgatggctttatgttccagcttgaatatggtggccgaggctcaattaggccccggagactgctacgacggttgctccaccgcctgcgtccaacgtgacccgagaaagacgtcccgatgcgatcgcaagtgttccattcgttgtggtccagatgctgccagggcaagtgggagtggtgtttaaactttatattttaccaagatccatgcatttggatttaattatgttgtaatcttatttaataatcgtatctctggaaaacatattctgtaatttttatgtagttattggaaccaataaataataacagctacaatggtggaattaagtacactagtgctggtttgtaatcaaaaaaaaaaaaaaaagnnnnnnnnnnnnnnnnnnnnnnnnnnnnnnnnnnnnnnnnnnnnnnnnnnnnnnnnnnnnnnnnnnnnnnnnnnnaacaatccg

SEQ ID NO: 88199 - DNA, 537 bp, Arabidopsis thaliana columbia
tacgactcacttagggaaagctggtacgcctgcaggtaccggtccggaattcccgggtcgacccacgcgtccggcacgtccaaaaaacaaaaccaaaaaaaaaaaaaaaaaaagacaaaaaaaaattgaacactccaataaaactcgcctttctcattctctgcattgccctaaccgcaaccgcatttatagtcccagcaaaacgtgacgccgtttcaccacaccaccaaaaagccgtcgatggaatctgcagcgttgtgcaagacaaacgtctatgcagcattaccttaagaaacgtcccaagcgatgatcccgccgttttggttcgttacttagccacggcagcagaagcgtccgttaaaaagggtttgaagttcctctccggaatcaaaccaaaatacaaaggaaacgccttcgccacaacatgcatcaccggctgcgagaaacagctacacaacgccttggacgactttgcagatttctggaaagccgcaggaaaaaatctaacgagcatggctgagaattacttcacatgta

SEQ ID NO: 88200 - DNA, 378 bp, Arabidopsis thaliana columbia
cggtctcgtgggcctctcgctgccgtccggtggttggtccgacgacgaactatgacgattcacgctgcagtaatccagaagcttctgaacaccggagcacatctcggccgtcgtgccgccgagcaccatttcaagcaatacgcttacgggacgcgtaacggaatgacaattatcgactccgacaaaaccctaatttgcctccgtagcgccgctcatttcggcgctaacctcgcccacatgagaggtaacatcttcttcgtcaacacgaatcctctcttcgacgaaatcattgagctcacttctcgtcggatccaaggagattcgtatttatcacaaccgtgcgatgaatctgaggaagatgggagggtttttgactaa

SEQ ID NO: 88201 - DNA, 987 bp, Arabidopsis thaliana columbia
  unsure (1)..(987): unsure at all n locations
aggacgcgtgggcctctcgctgccgtccggtggtttttccgacgacgaactatgacgattcacgctgcagtaatccagaagcttctgaacaccggagcacatctcggccgtcgtgccgccgagcaccatttcaagcaatacgcttacgggacgcgtaacggaatgacaattatcgactccgacaaaaccctaatttgcctccgtagcgccgctcatttcgtcgctaacctcgcccacatgagaggtaacatcttcttcgtcaacacgaatcctctcttcgaccacgcctccgcccacgcgtccggtcggatccaaggagattcgtataatcacaaccgtgcgatgaatctgtggaagatgggagggtttttgactaacagctacagtcctaagaagtttcgatctaggcataaaaagctttgctttggtccaactactatgcctgattgtgtcgttgtgtttgattctgagaggaagagctctgtgatacttgaggcatcgaagcttcagattccggttgttgcaattgtggacccgaatgtgccattggagttctttgagaagattacgtatcctgtgccagctcgtgattcggtcaagtttgtgtatttgttctgtaatgtgatcaccaagtgctttgtggcagaacagatgaagttggggatcaaagaagggagcaatgaagatttgatgaaggatttagctgcttgattttgatatttgcaacaaaagtatgaaacttcacagttgtttttctgagtctggaataattgttcttcagaattgtggttacttcaactttgaaattctgggagttttttacacatggatgattttgtttctctgatggatatttctgtataagattgttgagttctagtgttctacatcttgataaaaaaaaaaaaagggcgaccgctctagaggatccaagcttacgtacgcgtgcaggcgacgtcataactcttctatagtnnnnnnnnnnnn

SEQ ID NO: 88202 - DNA, 673 bp, Arabidopsis thaliana columbia
gttggtcaaggtgatttcccaaaagatggtcagcaggtgacttttcactacattggctacaatgagtctggaaggcgaatagatagtacttacatacaaggttctcctgctagaatccgcatgggaaccaatgcacttgttccaggatttgaaatgggaattcgtgacatgaagcccggtgggcgaagaaggattataatccctccagaattgggacctccggtgggaccttcgaccttcttcagctcgaagcaatttgaagttttcgacgtggagttgctcagtatccagaattgtgagaggaggactataataggtttctactcagatgtcacatgcagttaacttccaaatgatggtcatcactaagcttcaatgaacctgcattcttcaatcttcaatactctaaatctgcacggcagatgagaactacaaagaaacaaaaagaacaattattctttgcttaggcatttatcttgtgggtttcatgtagagatgcacaattacatagagagacagataaagatcatgtaaagtctcgacctttttcataatcgtagtttacttttgttgctttgttaaaaaaaaaaaaacccaaagggcggccgctctagaggatccaagcttacgtacgcgtgcgtgcgacgtcataactcttctatagttgtaccta

SEQ ID NO: 88203 - DNA, 521 bp, Arabidopsis thaliana columbia
  unsure (1)..(521): unsure at all n locations
nnnnnnnnnnnnnnnnnnnnnnnnnnnnnnnnnnnnnnnnnnnnnnnnnnnnnnnnnnnnnnnnnngaaaaagagaaatagaattttgcgtttcaagtactccatctccgtctcttttcctccgcatctaaaaccatctgagaaatatctccgacgaaggagaagaaacgaaaatgacggagactggagtaatcggatgtggctgtcgcggagtcaccggcggcaatttcttccatcccggaggattttctttgaaatcttgtttcctcgagcagagtacaaagcgtaatcgtaactttttccgaagcgtttctatgattcctcctttcaaacgcggtcgtttcatcactaagttgcgttccgtcgccgggaacagccgaatctttagcatggatgctcgagagaaatcacgatcgtttgtgttggtatcatcaaggcacaagagagttccagtttttgtgatgatgccgattgatacatttggaattgatgcttctgggtgtccaaagattaaaaggctc

SEQ ID NO: 88204 - DNA, 520 bp, Arabidopsis thaliana columbia
  unsure (1)..(520): unsure at all n locations
nnnnnnnnnnnnnnnnnnnnnnnnnnnnnnnnnnnnnnnnnnnnnnnnnnnnnnnnnnnnnnnnnnnnnnnnnccacgcgtccgtgatgaggtcacaaacgttgcctgtggggctgacttcacagtgtggttatcgtctactgaaggagcctctatactgactgccggtctcccacagtatggtcaacttggtcatggaactgataatgagttcaatatgaaggatagttcagttagactcgcctacgaagctcagccacgtcctaaagccatcgcctctcttgcaggggaaaccattgtcaaagttgcatgtggaacaaatcatactgtggccgtagataagaatggatatgtttacacgtggggatttggtggatatggaaggcttggacatagggagcagaaagatgagtgggctccacgccgtattgatgtgtttcagaggaataatgttttgcctcctaatgccattctttctgctggttctgcaaactccgcttgtacagctggtggtggacaa

SEQ ID NO: 88205 - DNA, 580 bp, Arabidopsis thaliana columbia
ccgcaagattcattttctcttttatcactcccctcggcgatctctcttcttgctccggcagggtttttctgctgctccttgcttgtccggactctagcttgcctgtaactgttaagagattacaatgggggactccgataatgctataccattttccagaaagagaactgctctgaaagagctgtctcgggacaatcctggtcttgatgatgatgatgaagacacttctgcactcgagagtggtaccttcaacactgctagtaaggaggtgttggcaagcagaagaattatcagagttaggcgcacagatcgatctgctactgcaccaccagcttctaatccatttactggaattcgtttggttccttttactgctcctgctccttctactgctgctgcagaaacgactaaacctctgtctgcgggaaaacaagagacactggctgatggaaggtctgatcgcccccaaggaaactgatggtgacagtaaagaaaagagtgacgcaattgatgctgtaggaaaacaagagacacagggtgatgaaatatatgctaagaccaaggatattattgatggtgg

SEQ ID NO: 88206 - DNA, 367 bp, Arabidopsis thaliana columbia
tgcggttgtttgggcttcggagaagaagcaagttgagacctatgtttgggcaaacaaggatgatcctaatttgtatggagaatgggattttgaggtttgaaaccttacttcttgaatgttgtgttgctttaatggggttttagtgaaatgtgtgtgtggattttggtaggaatggagacggcttcacatggataaattcatcgaggcgtcgacgaaattcatcgagtggaagaagaatccggatgggagaagtagggaagagtttgagaagtttgtattcgatgatcctcccactgcggcttgaagaagttgtcaagatatgtcttcttcttttatatcaagattttgaaaagatcactctctttta

SEQ ID NO: 88207 - DNA, 509 bp, Arabidopsis thaliana columbia
  unsure (1)..(509): unsure at all n locations
ggaagactgttgaagttgttttgactgatacttcggagaagaagcaagttgagacctatgtatgggcaaacaaggatgatcctaatttgtatggagaatgggattttgaggaatggagacggcttcacatggataatttcatcgagncttcgacnaaattcatcgagtggaagaagaatncggatgggagaagtagggaagagtttgagaagtttgtatccgatgatcctcccactgcggcttgaagaagttgtcaagatatgtcttcttcttttatatcaagatttgtaaaagatcactctcttttactgcgaataaaatggtcttaatcttcgaagacaataagaggctttgtgagttggggtccctaagcctcttgttgtatctatattgtttgtgagcattgtggtgtatgtgaatgttgtttcatcatttttagtgtatttgagttaaaagcaaatctgtgttttaagggcggctcactnnnnnnnnnnnnnnnnnnnnnnnnn

SEQ ID NO: 88208 - DNA, 661 bp, Arabidopsis thaliana columbia
  unsure (1)..(661): unsure at all n locations
agctctctacgactcactatttggaaagctggtccgcctgcaggtaccggtccggaattcccgggtcgacccacgcgtgcgccacgcgtccgcaatgacaagctccgatcaatctccgtcgcacgacgtcttcgtctacggcagtttccaagaaccagccgtcgtcaatctgatcctcgaatgtgctccggtcatggttcccgctcaactccacggctatcacgtgtatagactcaaagggcgcttgcatccatgtatctctccttccgacaatggactaatcaacggcaagatacttaactggattaacagattctcagttagagagtttagatatgattgaaggaacctgaatatgtgaggaagactgttgaagttgttttgactgatactttggaggagaggcaagttgagacctttgtatgggcaaacaaggatgatcctaaatttgtattggagaatgggnttttttagggattgggaccggcttcacatgggtaaaatttatccgaggcggncgacggnaaattcatccgggtggaagaaggatnccngnttgggggaattagggaagggntttaggaggtttttttcggtgacccccccnntnctgtttnaatnncccttnaaanaagccttttaaannccccntttttccccg

SEQ ID NO: 88209 - DNA, 770 bp, Arabidopsis thaliana columbia
acccacgcgtccgaaatacatcacatttttcagacaaaactccaatttcacagtgaactcaaaaacaatgacaagctccgataaatctctgtcgcacgacgttttcgtctacggcagtttccaagaaccatccgtcgtcaatctgatcctcgaatgttctccggtcatggttcccgctcaactccacggctatcacgtatatagactcaaaggtcgcttacatgcatgtatctctccttctgagaatggactaatcaacggcaagatactaactgggttaacagattctcagttagagaatttagatatgattgaaggaagtgaatatgtgaggaagactgttgaagttgttttgactgatactttggagaagaagcaagttgagacctatgtatgggcaaacaaggatgatcctaatttgtatggagaatgggattttgaggaatggagacggcttcacatggataaatttatcgaggcgtcgacgaaattcatcgagtggaagaagaatccggatgggagaagttgggaagagtttgagaagtttgtatccgatgatcctccggcttcggcttgaagaagttgtttgcgttttatctatcttttatgtcttcgtgtttcatatatcaaggtgctgcataataaaagggtctttcctttcgggggcataataggaaaggctttgtttttgagtatttgagaataatgcattttatgtttggtgcattttgtcttcttaagaacaagtttgattttagtccaaaaaaaaa

SEQ ID NO: 88210 - DNA, 557 bp, Arabidopsis thaliana columbia
  unsure (1)..(557): unsure at all n locations
nnnnnnnnnnnnnnnnnnnnnnnnnnnnnnnnnnnnnnnnnnnnnnnnnnnnnnnnnnnnnnnnnnnnnnnnnnnnnnnnnnnccacgcgtccgcgcacgcgtccggaacagctagggaatgttttagatgttgtacatggagatcttcttccagaagataagtccagaatcatacaagagtttaagaaagagggaccaaccgcaatggtaggggacggtgtgaatgatgcaccagctttagctacagctggtgttggtatctccatgggaatttctggctctgctcttgcaacacaaactggtaatattattctgatgtctaatgatataagaaggataccacaagcggtgaagctagcgagaagagcacgatgcaaagttgttgaaaacgtgtgtctatcgatcattttaaaagcaggaatactcgctttggcatttgctggtcatcctttgatttgggctgcggttcttgttgatgtaaggacttgtctgcttgtgattttcaataatatgttgctgcttcgagagaagaaaaagattgggaacaaaaagtgtt

SEQ ID NO: 88211 - DNA, 433 bp, Arabidopsis thaliana columbia
aacccaagctcaaagctgccgtcttgacctctccaacgagctattcggtggcgtcaacgaagcttgcggaagaaaccttgaccggagtcgatgttgccctgttttagccgcttggctcttcgcagctcacgctcgctctgctctccagttaccagctcctgctccaacgccggaatcttctgatcccgacgaacccatgaagcctgacgactctcagaagtgcgtcaacacattgcaaagtgcgcttttgactaaacaaatcaagatccctcagcctaattctagctgtgacgcaatcttgtgcttctgtggtattcgtctccaccagattagctcactctcttgtcccgccgctttcaatgtctcctccggcttcaaaaacgcaactccgaccgccgccgtgaagaatcttgaaaaagaatgccggaactct

SEQ ID NO: 88212 - DNA, 946 bp, Arabidopsis thaliana columbia
  unsure (1)..(946): unsure at all n locations
nnnnnnnnnnnnnnnnnnnnnnnnnnnnnnnnnnnnnnnnnnnnnnnnnnnnnnnnnnnnnnnnnnnnnnnccacgcgtgcgctgtgaatggcatctagaacatggtttgcttaccactgagaatgtggttgatgtgttccagcttgcgctgctgtgtgatttccctcggcttagcctcatatctcaccgtatgatcatgaaacactttaacgaactctctgcgacagaagcatggacgagctatgaagaaaagccatccctttcttgagaaagaagttagagactcagtaatcatcgaagcaaatacgcggaaagagaggatgagaaaacgcaatgatcagaggatatattcgcagctatacgaagcaatggaagcacttgttcatatatgcagagatggatgtaaaacaatagggccacacgataaagatttcaaaccgaaccatgcaacgtgtaactatgaagcttgcaagggattagaatcactgatccggcatttcgcaggctgtaagctaagagttccaggaggttgcgtgcattgcaagagaatgtggcaactccttgaactgcattcacgtgtttgcgcaggttctgatcaatgtcgagtccctctatgcagaaaccttaaggagaagatggagaaacagagcaagaaagatgagtcgagatggaaacttctggtgaagaatgtattggggagtaagaaaatcggaggctctcctttctttttaccggtgacaaactgttaaaaaacattttgtcaatctcaagaagggcgagttttaagcgtttcttgtgatcctatctttaaaacaagtgtaacataatgagtttgaataaatgacacatattttggtcgaccaaaaaaaaaaaaaaagnnnnnnnnnnnnnnnnnnnnnnnnnnnnnnnnnnnnnnnnnnnnnnnnnnnnnnnnnnnnnnnnnnn

SEQ ID NO: 88213 - DNA, 571 bp, Arabidopsis thaliana columbia
  unsure (1)..(571): unsure at all n locations
atcctacatgaatgtctttgatacattaaaaacatgttgaaagattcatggaatctggaatgtttgttttccaagttgtatatgacttgtaattcttgattttaggctagacaaaacagttatatatgttccataggtacacaaaaacatacgagtctatctttgagatttcgatgtcttatctttacatattatgttcgtagaacaaatgtttgacatggagtgtgacgttgtaatgatcctctacacgtgtatatatcaacagtttgtatcacctatccatgtgaaagcagtgtctccttctcttagcctctgcttgcagcaaaattatctttaagcccttatgtatcatcagcttgatcattgaagaactgtctcattgcttgtatgnaaatatctgtgaaaagacgncccgatggtgccaaaggtccaaccttnganaaattaagcagnggggggctacttgcccgacnaattganatngaaggggtgttgtantggaannagggccacttgcnggggtangcccgaagncnnctggaacccaatgccaaccngagccgagggaaga

SEQ ID NO: 88214 - DNA, 447 bp, Arabidopsis thaliana columbia
  unsure (1)..(447): unsure at all n locations
aacttagctcagtgaaaagaagaagaaaaacaagaagctaaaaatgtctatcctttcgtttcctcacactttctttaacatctctccttcactcttctacactatccttatatccagtttagttctactgatcctcacgcgccggagtgctaaatcaaagatcgtgaagcttcctccaggtcctccggggtggccggtggttggaaacctcttccaattcgcgcgctccgggaagcagttttacgagtacgttgacgatgtaaggaaaaaatacggtcctatctacacgttgaggatgggaagtcgaacaatgatcataatctctgattcagctctcgtccacgacgttctgattcaacgtggaccaatgttcgcaacccgacccaccgagaattcgacccggaccatcttcagctncaacactttcacccgtaaacgcttcagcgt

SEQ ID NO: 88215 - DNA, 541 bp, Arabidopsis thaliana columbia
  unsure (1)..(541): unsure at all n locations
nnnnnnnnnnnnnnnnnnnnnnnnnnnnnnnnnnnnnnnnnnnnnnnnnnnnnnnnnnnnnnnnnnnnnnnnnnnnnnnnnnccacgcgtccgaacaaattcacggcggcgattcgaattccggcggcggaggaggaggaagtagccggaacgatgagatttctgtgacgagagcgtcgcgtttcgatgcattgccggaagattgtatctcgaaggtgatttcacatacgagtcctcgggacgcttgtgttgtggcttcggtttcgaaatcggtgaaatctgcggcgcaatcggatttggtttgggagatgtttcttccgtcggagtactcgtctcttgttcttcaatcagcgaatcatttatcgaaaaaggagatctttttatctctcgctgataactctgttttggttgaaaatggcaaaaagagcttttgggtggagaaagctagtgggaagaagtgttatatgttatcagcgatggaattgacgatcatttggggagattctcctgcttattggaaatggattacagttcctgaatc

SEQ ID NO: 88216 - DNA, 624 bp, Arabidopsis thaliana columbia
  unsure (1)..(624): unsure at all n locations
gacctacgcgttcgaaaagtcaacgatttgattcgatcttcttcacttatgctttaaaaccggtcctgtaataaactgtgaagattgtaagaagattaacacgaatcaagaacatcgaactgttgactttagacagagagagacggagatggagtttagtgagttaaaggaagcaatagagaagatagagctcgttgatgctcacgcacacaacattgtctctcttgactcatcttttccgttcatcggaactttctccgaggctgccggcgacgctttaaccttcgctcctcattctctctccttcaagaggaacttgagggagattgctcaactttatggcactgaagtatctttagaagcggttgaggaacatcgtaaaacctcgggtttggattcttttacttccaagtgttttaaagaagctcgaatctctgctctcctcattgatgatggattaaagctagacaagaaacatgatattgaatggcatagaaactttgttccattcgttggtagagtgttgcgtatcgaaactcttgccgagcaaatcctcgaagaggagtgtcctggtggttatttctatggttctgagagtactganaccgcctgttgggatttaga

SEQ ID NO: 88217 - DNA, 1517 bp, Arabidopsis thaliana columbia
ttaggtaccactatagaagactatgacgtcgcacgcacgcgtacgtaactttatacgaatagcagcaagatgattgatttggctactttatagtttaatggaagcagttcgttcaacaacaaccttatctaattttcatctactgaatattttagtcctgcgttctctcaagcctctgcatcgtctatctttctctttctctgcctcagcaatggagagtgatgcatcttgtagcttagttttgtgtgggaaatcctctgtggaaactgaggtagcaaagggtttgaagaacaagaactctcttaaactcccagataataccaaagtttcactcattttagaatctgaggctaagaatttggttaaagatgatgataattccttcaatctttcactctttatgaactcgattataactcatcggtttggacggtttctcatttggtctccgcgtttgtcttccactcacgatgttgtttctcataacttctctgagcttccagttggttcagtttgtgtcactgatatccagtttaagggtcgaggcagaacaaagaatgtatgggaatctccaaagggttgtcttatgtattcttttactctagaaatggaagatggtcgagtcgtgcctttgatacagtatgtggtatctcttgctgtaactgaggcagtgaaagatgtttgtgacaagaagggtttgccgtacattgatgttaaaataaagtggccaaatgatctgtacgtgaatggtcttaaggttggaggcattttgtgtacctctacgtatagatcaaagaagttcaatgtcagtgttggtgtggggttgaatgtggacaacgggcaaccgaccacgtgcttaaatgcagtactaaaaggcatggctcctgaatcaaacctacttaaaagagaggaaatccttggtgccttctttcataaatttgaaaaattcttcgatctattcatggaccaaggttttaaatctctcgaagagctttactacaggacatggctacacagcgagcaaagagtgattgttgaagacaaagtagaggaccaagttgttcaaaatgttgtgactatccagggtttgacttcttctggatatttgctggctgttggagatgacaatcaaatgtatgagcttcaccctgatggcaatagttttgactttttcaaaggtctggttcgaagaaaaatatgatccaaagattttcttgctggtgaaagtagatgttgtgcgttgttttagtaccatggacacaactattatcagttccaatttttcaatgtactgtggatagtcctttattccccttgtatccaatttctggtcattttaacccgataagaggttcttgaggctacacgtacaagagattactagatgggacatcttaagtttcaactttattttgctttacctctatgtaacaacacagtactttgttgcataatctctgacgtgttaactcttgaagtgaaacatacgacatctgattatctaaagagtttcgaga

SEQ ID NO: 88218 - DNA, 477 bp, Arabidopsis thaliana columbia
ggtcctttcaacaattcaatggcagacccaagagttgcagttgttactggttccaacaaagggattgggtttgagatttgcaggcaactagctaacaatgggataactgtggttttaactgcgagagatgaaaacaagggtcttgctgctgtccaaaagctcaagactgagaatggtttttctgatcaagccatctcctttcaccctcttgatgtctccaacccagacaccatcgcttctcttgctgcttttgtcaagacccgcttcggcaaactcgatattctggttaataatgccggagttggaggggcgaatgttaatgttgatgttctcaaagctcagattgctgaggctggtgcgccaactgatatttccaagataatgagtgatacatatgagatagtcgaggagtgtgttaaaacaaactactacggcgttaagcgaatgtgcgaggccatgattccctctcttcaatct

SEQ ID NO: 88219 - DNA, 230 bp, Arabidopsis thaliana columbia
atgctgtgttcttcaattgctttagtattagcttgttcttagtgttcatagaatttagggttattagaatggcttcatcagatagtcgatgtggatttgtccgttcccagatgattcgttcccttgaagcaatattaatcgtgttgctctcgttctctaaattgctctctaatcatgagagtaatcatacggttaattcgagtatgataccgattagtgagcataacttg

SEQ ID NO: 88220 - DNA, 513 bp, Arabidopsis thaliana columbia
  unsure (1)..(513): unsure at all n locations
ccacgcgttcgaatcagaatacctctggaggcagttgagataacttttggacctggagcaccattttcgaaagagtctcgggctgaagctaagataaaattagaagccttggacaagaaagatagggaaagaagaagaacggctgagttaaaaaacaaccttgaatcttatatatatgctaccaaagagaagctggaaacacccgagtttgaaaagatatccacccaagaagagcgcaaggcgtttgttgaaaagcttgatgaggtgcaagattggctttacatggatggagaagatgctaatgccacagagtttgagaagcggcttgactcacttaaagccatcggcagtcccatatctttccgatcagaggagcttacagcacgaccagtagcaattgaatatgctaggaaatacctaactgaactcaaagagatcataaaagaatgggaagcgaacanaacttggcttccaaaagaaaaaatcgacgaggtctcaaaggaagcagagaaa

SEQ ID NO: 88221 - DNA, 561 bp, Arabidopsis thaliana columbia
ccgatctcatcatctccttcctcccttgcgagatctgatcgtatcaatggagatcttctacttcgtggtgttcggtggcctggctgcgatcgtcgccggcttggagctgagcaaatcaaagagataacgcattaacacctcctccgccttcaactccttcaagaagaactatctcctcgtctactctctcatgatggctggggactggttgcagggtccgtatgtgtacgatctctacagcacttatggctttgggaagggagagatcggtcagcgctttattgctggttttggatcttccatgttgtttggcaccattgttggatctcttgccgacaaacagggtcgcaagagagcttctatcacctactgtatcacctacattctcagctgtatcaccaaacattctccccagtacaaagttttgatggtcggtcgtgttctttggggatcgcttcttctcttcttttctctgccttagaatcctggctcgtcgctgatgcacatcaagagaggcttctggctgctaatgctttttgttacttctcttcaaggctattt

SEQ ID NO: 88222 - DNA, 528 bp, Arabidopsis thaliana columbia
  unsure (1)..(528): unsure at all n locations
atgatactccnnnnnnnnnnnnnnnnnnnnnnnnnnnnnnnnnnnnnnnnnnnnnnnnnnnnnnnnnnnnnnnnnnnnnnccacgcgtgcgctctcgtgataatgaaaccggcggtgaactcttgatttccgattagttgacgccgtgattgtgtgtaattgtgttatctgaggcttctagacgccggattcatcagaacgaaagacggtgaagaccatcggcggaagagaaacccaatcggagaatggcagatctgatttggagagtaatcgttgccgaagtctccaaattaggtatgaatcaagccattcttgcttgtatatcgtgattacatgttgtagttgggggtttaatctttcaattcaacataagataaaaatgcaggtaaaacaattgtaaaaccaatgttgaatattgaatttaagattgatgaatactggttttgactctacctggtttgttttttccgaacttggttttgcggatctgactttccccggagggttttgttcaggtgaacaaaaagg

SEQ ID NO: 88223 - DNA, 616 bp, Arabidopsis thaliana columbia
  unsure (1)..(616): unsure at all n locations
ggatactccnnnnnnnnnnnnnnnnnnnnnnnnnnnnnnnnnnnnnnnnnnnnnnnnnnnnnnnnnnnnnnnnnnnnnngccacgcgtccgatcaatcatcttcaaaagtcaatttcagttctagggttttaatttgatacgaggtcagcgaatccggcgacgaatatccgccactagtaactctagctcaggtaaggatttgtgtccatggcagctttgcaaacgcttcgtgaatggatcggtatccagcagttcccacctgctactcaatctaaattgctcgagatccttgggaagtataaagaagaggatgtgagctcgctaacggtccttgtaatggggaaaggtggtgttggaaagtcatcaactgtgaattcagttataggcgagaaagctgctgcagttagtactttccagtctgaaggactgaggcctaccttggtctctcgcacaagatcgggatttacattgaatatcatcgacactcctggtcttattgagggaggatatgtgaatgatcaagccatcaacattataaaacgatttgctctcacatgactatagatgtgctactatacgtagacccgttggatgtgtaccgggtggatgaccttg

SEQ ID NO: 88224 - DNA, 1315 bp, Arabidopsis thaliana columbia
  unsure (1)..(1315): unsure at all n locations
ttcagttctagggttttaatttgatacgaggtcagcgaatccggcgacgataaggggttttgttcttagtaaaaaaaagtaaggatttgtgtccatggcagctttgcaaacgcttcgtgaatggatcggtatccagcagttcccacctgctactcaatctaaattgctcgagatccttgggaagtataaagaagaggatgtgagctcgctaacggtccttgtaatggggaaaggtggtgttggaaagtcatcaactgtgaattcagttataggcgagaaagctgctgcagttagtactttccagtctgaaggactgaggcctaccttggtctctcgcacaagatcgggatttacattgaatatcatcgacactcctggtcttattgagggaggatatgtgaatgatcaagccatcaacattataaaacgatttctcctcaacatgactatagatgtgctactatacgtagaccgtttggatgtgtaccgggtggatgaccttgataggcaagttgtcggtgctataactgatgcatttggtaaagagatatggaagaagtctgctcttgttctcacccatgctcagttctctccaccagacgggttaaattataaccactttgtctccaaaagatctaatgctcttctaaaagttatccagacaggcgctcaactgaagaaacaggatttgcagggtttttctattcctgtcattcttgttgagaacagcggaagatgccataagaacgaaagcgatgaaaagattcttccatgcgggactagttggattcccaatctgttcaacaaaatcacagagatctcttttaatggcaacaaggcgattcatgttgacaagaaactggtcgaagggccaaacccaaacgaaagaggaaaaaaactgattcctttaatgtttgcattccaatacttgctggtgatgaagccattggttcgagcaatcaagtccgatgtttcgagagagagtaaactggcgtgggagctgcgagactccggtttagcaagtcgaaggtcttgagttgtggacacgagttttgtttggtttgtttgtctatctgagagattgttctgtagttgaaattgtgatacaactcgagaaatgtggttcacagataattactgtcgcaaagttctctcatcttaattacatcttctttagcctctcgttaaagataatgataattttcaatgtaatattaaaaaaaaaaaaaaaaaaagggcggccgctttaaaggatcccagcttacggacgggggcaatccacgnnnnnnnnnnnnnnnnnnnnnnnnnnnnnnnn

SEQ ID NO: 88225 - DNA, 529 bp, Arabidopsis thaliana columbia
  unsure (1)..(529): unsure at all n locations
nnnnnnnnnnnnnnnnnnnnnnnnnnnnnnnnnnnnnnnnnnnnnnnnnnnnnnnnnnnnnnnnnnnnnnnnnnnnnnnnnnccacgcgtccgcaagaataaaaaccagaagaatccgtataaattatcctaacagtttcttccaatatccaacaaatttcagatttttgtttttgttttcttcttctctacttgagtaatcatcaacgattatggcgtcaagtcagtggacgaggtcggaggataagatgtttgagcaagctttggttctttttcctgaaggatctcctaatcggtgggagagaatcgctgatcagcttcataaatctgctggtgaagttagggagcattacgaggtcttggttcatgatgttttcgagattgattctggtcgagttgatgtccctgattacatggatgactcggcggctgcggcggcgggttgggattccgctggtcagatctcttttgggtctaaacatggcgagagtgaacgcaaaagaggaactccttggacagagaacgaaca

SEQ ID NO: 88226 - DNA, 1763 bp, Arabidopsis thaliana columbia
  unsure (1)..(1763): unsure at all n locations
cctcgagctacgtcagggaaaaaacacaacacaaaaataaaaaaaacttaagaacattgtttcgagagatttggtttggagtgaaaatggcactagcaatcaacgtttcttcatcttcttcttctgcgatctcaagctctagcttcccttcttcagatctcaaagtaacaaaaatcggatcattgaggttattgaatcgtaccaatgtctctgcggcttctctgagtttgtccgggaagagatcctccgtgaaagctcttaatgtgcaatcaattacaaaggaatccattgttgcttctgaggttacagagaagctagatgtggtggaagttgaagactttgaggaactagcaaagagattagagaatgcttctcctcttgagatcatggataaagctcttgagaagtttgggaatgacattgctattgcctttagtggagctgaagatgttgctctgattgagtatgctcatttaactggaagaccttatagggtattcagtttggatacagggagattgaatccagaaacatatagactcttcgataccgtggagaaacattacggtattcggattgagtatatgtttcctgatgctgttgaggttcaagctttagttaggaacaagggtttgttctctttctatgaagatggtcaccaggagtgttgccgtattagaaaggtgagacctttgaggcgtgcgttgaagggtttacgtgcttggatcactggtcagaggaaagatcaatcacccgggacaagatcggagattcctgttgttcaggttgatccagtgtttgaaggattagatggtggagttggtagtttggtgaagtggaatccggttgctaatgttgaagggaatgatgtttggaatttcttgaggacgatggatgttcctgtcaacacgcttcacgctgcgggttatgtttcaatcggatgtgagccatgcacgagagcggttttgccgggtcagcatgagagagaagggagatggtggtgggaagatgctaaggctaaagagtgtggccttcacaaagggaatatcaaggagaataccaatggaaacgcaaccgctaatgtcaacgggacagcctcagtcgcggatatcttcaatagcgagaatgttgtgaacttgagcaggcaagggattgagaatttgatgaagttagagaaccggaaagaggcttggatcgttgtgctttatccaccgtggtgcccgttttgtcaggcaatggaagcttcattcgatgaattggcggataagctgggaggaagtggtgtgaaggttgctaagtttagagctgatggtgaccagaaggactttgccaaaaaggagttgcagcttggaagctttccaacaatacttgtgttcccaaagaactcttcaagaccaatcaagtatccatcagagaagagagatgttgattctttgacatctttcttgaatcttgttcggtaaatccgcaataaaatccgccgactctacgatgacgaagagatcaataatagaccatccagtctcgttccagattgctagaacagatgaagaaggtgaagatgagaatctctatttggagctttagccttttgtatagctgtggttaaaaataattacgccaaggttttgccttttgtgagtttatttttaccaattttcagtgtattactccttttttgcctttgtgatggatatgaacaagtttgatatgaaagtgactcattactcattagccccnnnnnnnnnnnnnnnnnnnnnnnn

SEQ ID NO: 88227 - DNA, 757 bp, Arabidopsis thaliana columbia
  unsure (1)..(757): unsure at all n locations
nnnnnnnnnnnnnnnnnnnnnnnnnnnnnnnnnnnnnnnnnnnnnnnnnnnnnnnnnnnnnnnnnnnnnnnnnnnnnnnnnnccacgcgtccgcggcccgatcacggagctcacctttcatcgtcaatctccggcggacgaatttctcttcgtagccgttacttctcattatttctttgaaactttcttagaaaattctctgttttggttaggacaatacaaacagaggatgttgatgacactagcggcgacgacctccgtttcatttaactcgaagcttctcctatttcgaatacgttgctcggattctaaccctaagcgtggcttcggctcaaaaaaggaagagaaagacccggcattgcagcaaaggaaatcatcttctaaacagtctgtttctgtacccagaaaggcacctggtctgaatactcagtttgaaggaaaatctggtcgatcttttgatatagacttcgatgaacggctggaaaacatcagaaggtcagctcttgagcagaaaaagacagaagtagttaaagaatttggtccaattgactatgatgcaccagtcaagtctgaccagaaaacaattggtcttggtactaaggttggagttggcatagctgttgttgtatttggtttggtttttgctcttggtgactttcttcccacgggaagtgatagtccaactaagaacacaacagtagttaaaaatcaaatttcagaagaagagaaagccacgcttcagcaaaggctcaaagag

SEQ ID NO: 88228 - DNA, 535 bp, Arabidopsis thaliana columbia
  unsure (1)..(535): unsure at all n locations
nnnnnnnnntacgaccacttagggagagctggtacgcctgcaggtaccggtccggaattcccgggtcgacccacgcgtccgcccacgcgtccgcccacgcgtccggtttagaaaaaaaatgttggcgttagcattattttccatttacttcttatcaatagaagctgtccggaatgaatcatttcctgcgctattagcttttggagattcaatggtcgatactggtttcatcaattacctcctgactctaatgaaaggaaattactggccatatgggtggaatttcgactcaaaaatacccaccggaagatttggaaacggaagagttttctccgatgtacttgctgaagggttggggatcaaaagaattgtaccaccttatccgaagttatacattgctccaagcgacctttaaacggggggttcttttgcatcaggtggtgcaggagtcgaccctgttacatccaaattgctgggaggtttatcgccagctgccccactcaaaaatttcaaaggctccacaagaaagctaaaa

SEQ ID NO: 88229 - DNA, 523 bp, Arabidopsis thaliana columbia
aatacgactcactttagggaaagctcgtacgcctgcaggtaccggtccggaattcccgggtcgacccacgcgtccgccggtttagaaaaaaaatgttggtgttagcattattttccatttacttcttatcaatagaagctgtccggaatgaatcatttcctgcgctattagcttttggagattcaatggtcgatactggtaacaacaattacctcctgactctaatgaaaggaaattactggccatatgggtggaatttcgactcaaaaataccgaccggaagatttggaaacggaagagttttctccgatgtagttgctgaaggtttggggatcaaaagaattgtaccagcttatcgtaagttatacattgctccaagcgaccttaaaacgggtgtttcttttgcatcaggtggtgcaggagtcgaccctgttacatccaaattgctgagagttttatcgccagctgaccaagtaaaagatttcaaaggctacaaaagaaagctaaaaggtgtagtaggcag

SEQ ID NO: 88230 - DNA, 463 bp, Arabidopsis thaliana columbia
  unsure (1)..(463): unsure at all n locations
caatggcgttgttctccccgccaatctcttcttcatctcttcaaaatcccaatttcatccccaaattttcattctccctcctctccagtaaccgcttctctctcctctccgtcactcgagcttcctccgacagtggatcaacctctcccaccgccgccgtctccgtggaggctcctgagcccgtggaagtgatagttaaagagcctccccaatcaacaccagctgttaaaaaggaagaaaccgccaccgctaaaaatgttgccgtcgaaggtgaagagatgaaaacaacggagagtgttatcaaattccaagatgcggaggtggattaatgggactttgggatctgaaacaattcgagaaagatgggaaaaaccgattgggattctgtaatcgttgctgaggcaaaggggaggaaatggncttgaaggggatccngnaacaacgggtaacggcngggccagtc

SEQ ID NO: 88231 - DNA, 589 bp, Arabidopsis thaliana columbia
  unsure (1)..(589): unsure at all n locations
atgattctgnnnnnnnnnnnnnnnnnnnnnnnnnnnnnnnnnnnnnnnnnnnnnnnnnnnnnnnnnnnnnnnnnnnnnnncccacgcgttcggttcgaacggaaatgttcactccgcaaaggaatcgttggccggagacagaccggaagggaaaggccatagctttttccgacgaaatcattacacctcctccacaaagggtgcttctccgagaggatgatgattggcagaagttcaaagaggttggcttgcttgatgaagcttctctagaaagaaaagatcgtgatgctcttatagagaaaatcttgaagcttgaaaaagagttgtttgattaccaacataatatggggctattgcttattgagaagaagcagtggacttcaacaaataacgaacttcaacaagcttatgatgaagctatggagatgcttaaacgtgagaagacgtcaaatgcaattactgtaaatgaagctgacaaaagagaagagaatcttagaaaagctttgattgatgagaagcantntgctgctgagcttgagaatgatttgaagtattgggcacgagacactctgtggtgagtctacttctg

SEQ ID NO: 88232 - DNA, 422 bp, Arabidopsis thaliana columbia
tgatgatatcagttgcacacacataataagctattccgaagatatcaaacggaattcagcggccacgatgtcttgggatgacggaaaacacacgaaggtgaagagagttcagcttacgttcgatgatgtcatccgatctatcgaggtcgaatacgacggaacctcccttaagtcccagccacgtggcaccgctggcaccaaaattgacggatttacactgagctctgatgagtatataacggaggtgaatggttactacaaaactacgttttcgggagaagtcataacgtcgttgacgttcaagacgaacacaaggacatatgggacttacggaaataaaaccagtagctacttttctgttgccgcacccaaagataaccagattgtcggttttcttggaagtagcagccatgctctcaact

SEQ ID NO: 88233 - DNA, 540 bp, Arabidopsis thaliana columbia
  unsure (1)..(540): unsure at all n locations
atgatacgtcnnnctctcctacgactcacttagggaaagctcgtacgcctgcaggtaccggtccggaattcccgggtcgacccacgcgtccgggaaggattgggtcgaaagtgacattggaccagatgtttaagccttcttttatttttaatctgccaccgatttcttggtacgttcgtcggataaccatcaagaccatgaaaactctgatcgaagatcttcaaattacaagtgccatgatccgaggtatttgaaacgtcccaaatccgctacaaattgatagaacatcaaataaagttataaaatcactttttataaatttaaatagcagaatattacatatgactttagaagtgtatgttcttatggtcactttataacatcaaattaaatgtatagaaaatgtttctacccccnncaaaagaaaatatcatcactntttttctctttaaaaggggcgggccgttctaaaggaacccaagcttaactaccgccggcatgggaaggaataagttttttattggggcaccttaaattaaa

SEQ ID NO: 88234 - DNA, 649 bp, Arabidopsis thaliana columbia
tttcctttgcggtaccggtccggaattcccgggtcgacccacgcgtccgctatgcaggaaacaatgagggaggaagagcagcgttggactgggaaacaaggttaaggatctgtttggaagctgcgaggggaatttctcacatccattctgcatctggtgctaaactcctccatggaaacatcaaatcaccaaatgtcctcttaacccaagaacttcatgtctgtgtctctgatttcggtatagctccattgatgagccatcacaccttgatcccatcaagaagcttaggttacagagcacccgaggccatagaaacacggaaacatacccagaagtccgacgtttacagctttggtgtactgttgctagaaatgctgactgggaaagcagcagggaagactactgggcatgaagaagtggtggatctgccaaagtgggtgcaatcagtggtgagagaggagtggactggagaagtgtttgacgtagagctgatcaagcagcaacacaacgtagaggaagaaatggtgcagatgttgcagatagcaatggcatgtgtgtctaagcatccagattctaagccctctatggaggaagtggtctacatgacggaggagattccaccttcaggctccagtcctggtactggtaa

SEQ ID NO: 88235 - DNA, 513 bp, Arabidopsis thaliana columbia
  unsure (1)..(513): unsure at all n locations
nnnnnnnnnnnnnnnnnnnnnnnnnnnnnnnnnnnnnnnnnnnnnnnnnnnnnnnnnnnnnnnnnnnnnnnccacgcgtccgggaggagcacgggtggctcttcgtcggaatatacgacggattcaacggtccagatgcgccggattatcttctctctcatctctatcctgtcgttcatcgagagctcaaaggattgttatgggacgattcaaatgtcgaatccaaatctcaggatttagaaaggtctaacggagacgaatcttgttcaaatcaggaaaaggatgagacttgtgagcgatggtggagatgtgaatgggatcgtgaaagtcaagatcttgaccgtcgattaaaggaacagattagtcggagaagtgggtcggatcggttaacgaatcattcggaagtattagaggctctgtcacaagctctgaggaaaacagaggaagcgtatttagatactgcagataagatgctcgacgaaatcctgaactagctntgatggggtcttgtgt

SEQ ID NO: 88236 - DNA, 481 bp, Arabidopsis thaliana columbia
  unsure (1)..(481): unsure at all n locations
gacggcnggnggttcccgcnccccgtnttggaggatccccggncnngcnnggntatgccnnttntgaggtgggaaaattntccggccgggaagaagtnaaggnaggagggccnggggaaacccgtatgaccggatgctaaagnccaaccaagtaagaaccaaatttggcttgcagaaacctcagattagctctacttatggccacttctactaaactcccttaagcctcgcactctctctcgaaattcatctacttaacatataatcccaatgtttagaaagagagagtgtgtgatgtgtttgtttgtgtgtgttgaacaaacgaacgtgcgtggttgtctttggtgagttggtctcatctttgttgatttttgaatgcgcatgtatttttttcttctttttcatgacgggcaaagtgttatgaagaacaatgcaattgtctaaaacaggataagtcaatggttcgtgtgtgccataaagt

SEQ ID NO: 88237 - DNA, 552 bp, Arabidopsis thaliana columbia
  unsure (1)..(552): unsure at all n locations
nnnnnnnnnnnnnnnnnnnnnnnnnnnnnnnnnnnnnnnnnnnnnnnnnnnnnnnnnctttcctttctcaattctctccttcgaagcttttttcttgtgaggtcagaaaagaaaatgggaagtcaacaagtagcgatttcgtttctgacgaacttggcgaaggcggcgtttgggttaggtgtggcggcgacggcactaaactcgtcgctctacactgttgatggtggcgagagagctgttttgttcgatcgattcaggggagtgttggatcagaccgtcggcgaagggactcatttcttgatcccgtatctccagacgccgcacatatacgatattcgtacgaaacctcacactttctcctccaaatctggtactaaggatcttcagatggttaatctcacccttcgtgttctctttcgccctgaggtttcgcgtctcccgtacattttccaaacattgggtcttgaatacgatgagaaggttcttccatcgattggaaatgaggtcttgaaagctgtggttgctaatttcaatgctgatcagctcctcact

SEQ ID NO: 88238 - DNA, 500 bp, Arabidopsis thaliana columbia
tctcgacttacttagggaacgctggtacgcctgcaggtaccggtccggaattcccgggtcgacccacgcgtccggtgatgtgcaatggatgatgaatgctgactcatcaagtgcagtttatctaggggcttacgacgaagaagaagcagcagcacgtgcctacgacttagcagcattgaagtactggggacgagacacactcttgaacttccctttgccgagttatgacgaagacgtcaaagaaatggaaggccaatccaaggaagagtatattggatcattgagaagaaaaagtagtggattttctcgcggtgtatcaaaatacagaggcgttgcaaggcatcaccataatgggagatgggaagctagaattggaagggtgtttggtataaatatctatatcttggaacatacgccacgcaagaagaagcagcaatcgcctacgacctcgcggcaatagagtaccgtggacttaacgccgttaccaatttcgacgtcag

SEQ ID NO: 88239 - DNA, 900 bp, Arabidopsis thaliana columbia
  unsure (1)..(900): unsure at all n locations
ctcctccaaacaagtcttcctctaccgtcttcaaccacaaaccaaccgtagattcaacagcgctgcatcacttgcgcacaagaaaccatcgtgatcggactagctgctgactctggctgcggcaaaagtacctttatgcggaggctcaccagcgtctttggtggcgctgctaagccaccaaaaggcgggaaccctgattccaacacactcatcagcgacacgaccactgtgatctgtcttgatgattaccattctttggataggtacggtaggaaagagcagaaagtcaccgctttggacccacgcgccaatgactttgatctcatgtatgagcaagtcaaagctcttaagaatggtatagccgtcgagaaaccgatttataaccatgtcactggacttcttgaccctccggagcttattcagcctcctaagattcttgtcatcgaaggtcttcacccaatgtttgatgagcgagtaagagacttactagacttcagtatctacttggacattagcaacgaagtcaaattcgcttggaaaattcagagggacatggctgaaagaggtcacagtttggagagcatcaaagcgagtatcgaagcccgaaagcccgacttcgatgcattcatcgacccgcaaaagcagtacgcggatgcggtcatagaagtgcttcctacgactctgatcccagatgacaacgaagggaaagtgttgagagtgagattgataatgaaggaaggtgttaagtacttcagcccggtttacctgttcgatgaaggttcaaccatctcgtggattccttgccgccccgctcttgaaggttccaagctttacgtacgnttncatgcaangnnatagctnttctnagtgtacctaaattaattnantgggccttggttt

SEQ ID NO: 88240 - DNA, 647 bp, Arabidopsis thaliana columbia
  unsure (1)..(647): unsure at all n locations
ctatcctaaatcctcatcactcaacctgagctcacaaagctaaacaaaaaaaaaagagcttaggcggagaagaagaggagaccaaaacaccaaacaaacaacaatggctgtctcaactatctactcaacacaagctctcaattcaactcatttcttaacctcttcttcctcctccaaacaagtcttcctctaccgtcgtcaaccacaaaccaaccgtagattcaacacactcatcacttgcgcacaagaaaccatcgtgatcggactagctgctgactctggctgcggcaaaagtacctttatgcggaggctcaccagcgtctttggtggcgctgctaagccaccaaaaggcgggaaccctgattccaacacactcatcagcggcacggcccactgtgatctgtcttgatggattaccattctttgggtaggtacggtaggaaagagcaggaagtcaccgtttttgggccacggggcaatggctttggtctcatggtttggcaagtaaaggccctttagaatggttgccgcgggaaccggttttacctgtactggtttttgccccgggtttttaagcccaaggtttggtggggggttccccaattttttttgggggnaagngnttttnggnttantttttttggnta

SEQ ID NO: 88241 - DNA, 549 bp, Arabidopsis thaliana columbia
  unsure (1)..(549): unsure at all n locations
ctcatcactcaacctgagctcacaaagctaaacaaaaaaaaaagagcttaggcggagaagaagaggagaccaaaacaccaaacaaacaacaatggctgtctcaactatctactcaacacaagctctcaattcaactcatttcttaacctcttcttcctcctccaaacaagtcttcctctaccgtcgtcaaccacaaaccaaccgtagattcaacacactcatcacttgcgcacaagaaaccatcgtgatcggactagctgctgactctggctgcggcaaaagtacctttatgcggaggctcaccagcgtctttggtggcgctgctaagccaccaaaaggcgggaacccctgattccaacacactcatcagcggcacggccactgtgatctggcttgatgattaccattctttggataggtacggtggaaagagcaggaagtaccgctttgggccacgggccatgactttgntctcatgttgggaggtaagcnttaaggtggatancggggacaccgttttacntggactggcttttaccccgggtttgc

SEQ ID NO: 88242 - DNA, 759 bp, Arabidopsis thaliana columbia
  unsure (1)..(759): unsure at all n locations
acccattgtcctcctctcatttctctctttccccatttgggtcggattttctaaaaaaaagggggtcacatctctatatcaccacacaaaaaaccataaaatcaaaaatcgctacccacatttctttcattctatcctaaatcctcatcactcaacctgagctcacaaagctaaacaaaaaaaaaagagcttaggcggagaagaagaggagaccaaaacaccaaacaaacaacaatggctgtctcaactatctactcaacacaagctctcaattcaactcatttcttaacctcttcttcctcctccaaacaagtcttcctctaccgtcgtcaaccacaaaccaaccgtagattcaacacactcatcacttgcgcacaagaaaccatcgtgatcggactagctgctgactctggctgcggcaaaagtacctttatgcggaggctcaccagcgtctttggtggcgctgctaagccaccaaaaggcgggaaccctgattccaacacactcatcagcggcacggccactgtgatctgtcttgatgattaccattcttttggataggtacggtagggaagagcagaaagtcaccgttttgggcccacggggcaatgactttgttctcatgtttgggcaagtcaaagcccttgaatatgggatagccggggggaacccggtttttaccatggccctggnttnttnncccncggggttntnagccccaaagttttgtaannagggttncccatggttttgnnggta

SEQ ID NO: 88243 - DNA, 521 bp, Arabidopsis thaliana columbia
  unsure (1)..(521): unsure at all n locations
nnnnnnnnnnnnnnnnnnnnnnnnnnnnnnnnnnnnnnnnnnnnnnnnnnnnnnnnnnnnnnnnnnnnnnnnnnnnnnccacgcgtccggcgagttgtggaatcaaaagctcttcgggagagagttttctatggaggcattgagcaccagttgcgtagagaggtatggccctttctcttgggatattatgcatatgactcgacatatgcagagagagaatatcttcgatctgtcaaacggatggaatatgcaacattgaaacagcagtggcagagcatttcccctgaacaagcaaaaaggttcacaaaatatcgggagagaaaaggattgatagataaagatgtggtaagaactgatagggcatttgaatactatgaaggggatgacaatctacatgtcaatagcatgcgtgatattctgttgacctactccttctacaattttgacctgggttactgccagggaatgagtgattatctgtctcctatcttgttcgtgatggaaggataatcaaaaatctt

SEQ ID NO: 88244 - DNA, 457 bp, Arabidopsis thaliana columbia
atcagattctacgctgtagagatgtcgctaccatgtttatgtccatgcccatcatcgccgatttctctttcattgtgttctccgagattcaatcttcttaacacaacaagcaggagactaggtttgtctagaaactgtagaactctgcgaatcagttgttcatcttcatctactgtcactgaccaaactcaacaatcgtcttttaatgatgctgagttgaaactcattgacgctttgatcggaattcaaggccgtggcaaatctgcttctcctaaacagctcaatgatgttgaatctgctgtgaaagttcttgaaggtttagaaggcattcaaaatcctacagattctgacctaatcgaaggtcgttggcgattgatgttcaccacaagacctggaactgcatctccaatccaaagaacatttacaggagttgatgtgttcactgtgtttcaagatg

SEQ ID NO: 88245 - DNA, 397 bp, Arabidopsis thaliana columbia
catttcttctacagaaccctaatttcatgttctaggtgtctctcgaatggttctcatctcattgattactcaatctctagggtttagtggttcatccaaattcgtaccctaatgggtgccgtagcgatcaatcgtaaacgcagcgacgaatccttcaatttcattaatcaacaatcaaccaaccctttacgaaattcaccgtatttccaagcttccaagaaacgaagattctcattcgctatgtctgaagattctggtaagccagcgtcttcaaacccaacaatttcgaggatttcaaggtaccctgatgctaaagctcctcttagacgagagattcatgctcctagtagaggaattcttagatatggaaaggcaaaatctaatgattactgcgaaa

SEQ ID NO: 88246 - DNA, 569 bp, Arabidopsis thaliana columbia
  unsure (1)..(569): unsure at all n locations
aacggagggggaaaaaaagngggggagccttttggtgtcactctnanaagagctatgacgtcgcatgcacgcgtacgtaagcttggatcctctaaagcggccgctcccgagggagagcggacatgttgctctttgctttcattcaaatatgcatttgtttggggggaaaggaggcatcagtcttccactctggatccgagagattggagacgtcaataaggacatatactatagagataaaagcggattttccaacaatgactatctcacacttggagtcgatcaacttcctttgttcggtggccgtactgctgttcaatgctatgaagattttatgctcagtttttcaacaaaatttgagccatatcttgggaatgtgattgaagaaataagtataggtcttggtccttcgggggagcttagatatcctgcacatccttctggagatgggaggtggaaatttcctggaattggtggaattcccatggccttgaccaggtccttgatggaacaactctgatgggcctggggctcccccaagaaggcgaatcccttattgggggaagcag

SEQ ID NO: 88247 - DNA, 1362 bp, Arabidopsis thaliana columbia
  unsure (1)..(1362): unsure at all n locations
tgatgtgttgatgaaaaatggaaccacaattctttttctctatctctcactcttcattctctccctaaacttcttcttcacgaatcttaaaccaaggctagtccgcctcttccagccttctttagaatctcgtgtcaagaccgctcttttatcccgaaaggaagtagccgcgtttcttgattctcccattgtcgaagacgaagaaggcgaagaaagagaagaggaagaagaaggaggtatcgtttcaaatgccaactttacgtttgagtttgatccatacatgatgagcaaagccgaatcagtgaacaaagctctagaagaagcaattccagtcggagagccactcaagattcatgaagccatgcgatacgcgattcttgcggctggaaaacgtgttaggccaatactctgccttgcttcttgcgagctagtaggtggccaagaaaatgcgacaatacccgccgcttgtgcggttgagatgatccacacgatgtctctaatcaaagacgatttgccttgtatggacaacgacgatttgcgtcgtggaaagcccacgaccgacaaagtctacggcgaaggagttgccattctctctggtggggctctcttgtctcttgcctttgagcacatgaccaccgcggaaatatcctcggagagaatggtttgggcggtgagagaattggctaggtctattgggacaagaggtttagtcgcgggacaagcgatggatataagcagtgaaggtttggacttaaacgaggtcggattagagcatttggagtttatccatgttcataaaaccgcggttttgttggaaactgccgcggttcttggcgccataattggtggtggatctgatgaagagattgaaagtgtgagaaagtttgcaaggtgcattggattgttgtttcaggtggtggatgatattttggacgagacgaagtcgtcggaggaattgggaaaaaccgccgggaaagatcagctcgccggaaagctaacgtatccaaagttgatagggttggagaaatcgaaagaatttgttaagagattgacgaaagatgcacggcaacatcttcaagggtttagttctgaaaaggttgctcctttagtagctcttactacttttattgctaatagaaataagtgattatatatttgccctgtttgtgtgtgttgggtttatgtatacatgctaaagtagtgtgttcccttatttttaagtgtaaccacattttaagatgtttattaatgaatatttaaaaatgtaaaaaaaaaaaaaaagnnnnnnnnnnnnnnnnnnnnnnnnnnnnnnnnnnnnnnnnnnnnnnnnnnnnnnnnnnnnnnnnnnnnnnnnnttcattc

SEQ ID NO: 88248 - DNA, 521 bp, Arabidopsis thaliana columbia
ggcggcagaatctgagatcggatctttagagagagagagaaagatgcagagggacgtgtcgagctgcaacacttacaactatggagacgctctctattgggacgctcgttacgtgcaagacgcgctttctttcgactggtaccaatgttactcttctctccgcccttttgtccgcagcttcgtctctacttcttcacgagtcctcatggttggctgtggcaactccctgatgtcagaggatatggtgaaggatgggtatgaggacatcatgaatgttgatatctcttcagtggctattgagatgatgcaaaccaaatatgcatctgttcctcagctcaaatatatgcaaatggatgttagagatatgagttactttgaagacgattcctttgacactattattgataaaggaacccttgattcattgatggctgattaaacctggagggacctactttttgataacctacggtgatccgaaagtgagaatgcctcatttgactcgttctgcgtacaactgg

SEQ ID NO: 88249 - DNA, 821 bp, Arabidopsis thaliana columbia
cccacgcgtccgttcctttctagttttatatttcaagttcttttttttttaaccttgccatcaatacaaccatggcaaggatttctctgttgttctctttagccttagttctagccatcgggtccgtcttggctcacccacctacccacaagaaattacaaaagaccttgtgtccatctactttgtccaaagttcaagctttcccttaccttgaagtctctagcttcgtcgagaagaaggttcagttcgcaccaaaaaccattgcgttcaagtctttgttctccatctgcaagagctacatcgactttcttgggggcgttaagttttctgcctccagagatgtgtttcacgtcgttcatgtcaaattcactttgatgaccaaggcgatggttattgcacaagcacacattggagttgaaggagacctcgctgttaagttgggcaaaagctacaccgtgatggctgaaaggtttgtcaaccttttggagatgatgtctacggtctcggccaagtataagttcgatgctaatgctaagataagcgctagtgagagtgctgagattgaaaaatgtgtgatgaagttgaagagtgccattaggtcttacgtgaaggtgatctctcagtgcagcacgaaattctctgctggaaagagtattggtttccccacttaccccgttggtttcattggaggtatagctaaacaaggtgtgggatatgcgggtaaaattgttggagctcatggccaagttggagccggattcgaaatcggagctaaagctaaggttggagttcagagtgcacaattcttgtaagttctacca

SEQ ID NO: 88250 - DNA, 808 bp, Arabidopsis thaliana columbia
  unsure (1)..(808): unsure at all n locations
ccaagcctcttaaaaggaaccgnttgttttccctggggccttaagnccgcgncnttncgatttnctgnacaaaaatctgggatcttgcaagctaagtggatgcccgatccaagagtatgtagaccaaccatggaacaagaagaacgagatgttcaagttcatggctaacatttgccaaaagaagtgtgaggaagaatacttgggattcgccattgtgccaactaccacatcatctggtaaagagagctttatctactgcaatgcggatcatgccaagcgccttaaagtatcgcgtgaccaagcctctgcttctctctgaaaacattctcatctgattctgtttgatctcggcatgtgtgtgtccagtgtgtacaaaacaggaaactttcttctatattattccgattctacaaaattgcgtctaaatatttaagtttataccatctctatgagccactgtaaaacttgccatcgacttctagtctatttccagtgatggtttgattctcccaacgcttacgtgctttttaaagatatgaggcttaagagtgttaccatacacttggtttattcttccaaaatatcttctcgtaaccggttttaagttctcagctgtatcgtctcttgaccatttactacactggtaaatggtgtgaatccaagaaagtgttaatgccattaaaaaggttcacattaaaaaaaaaaaaaaaaaaaaagggcggcaacannnnnnnnnnnnnnnnnnnnnnnnnnnnnnnnnnnnnnnnnnnnnnnnnnnnnnnnnnnnnnnnnnnnnnnnnnnnnnnnn

SEQ ID NO: 88251 - DNA, 363 bp, Arabidopsis thaliana columbia
cttctttcaatttgccattccttctgcaatgatgtgttgccttgagtggttagctttcgaggtcattactttgctgtctggtcttctacccaactcaaagctcgaaacatcggttatttcgatttgcctcacgacctcttcattgcattacaatctagtaaatggaattggtgatgcagcaagcaccaatgtggctaatgagctaggagctgggaatccgcgaggggctcgtgattctgctgcggctgcaatcataattgcagctgttgagtcagttattgtgagctctagtctgttcttgtctcgcagtgtgtggccttatgcatatagcaatgtggaggaagtaattagttatgtgactga

SEQ ID NO: 88252 - DNA, 485 bp, Arabidopsis thaliana columbia
ccaatctccctcaaaactcataaacatattgctctcctttgttcatttctgggtttacgcttctttcgactttatgggtttcggagcttagttttactacaatttcgtttggaaaagagctcttatttgatgttcatggcgtctctctccttcacccaattcttatcattccccagatgcaatgcagatgttccttgtctgctccagtcgcatggttttgtgaagtttagaggtgaaagatggaatgggaaacaaagcttttctatggctgctggtaggagaaagttatcagagtcagcacctcttgaagaagaaggtaatgatggaaacggtgcggttgtgggaaagaaaccatctaaaagtgttaagagaacaacgaagaagaaggttgtggttaaggatgaaccattagaagaaatttctgaatttttgggtgataatgatgatgttttagacaaggaaagcattgtctcagcttttgaacc

SEQ ID NO: 88253 - DNA, 536 bp, Arabidopsis thaliana columbia
cgccgacattggccgacagagttttggcttctcacgctttagaaagaagatgaaggagacgagaaagctgaagaagagtaatctccctaaagaagaaactgtggggaaaaaatttcagaggaagaagaatgagaaagtgagcgatgtcgaattaagcgaggatcctcaggctgcacagcttcaagctaaatcaagtgagaaacccaatagaaagaagattcagaagggtaaggaaataaaaagctctccagctgatggtaagctgagtgggaagatgaagaagagaaaagagaaagtaggcaatgttgatataagcgaaccgattctggaagctatttcaactgagaaagtaaaagaaaagaagggcaaaatgaacaagactaagaagaaaaggaaggccgaggaaataactagatcttcagtcgaagatctgaaaagagaaagcaagtttaagaaatcaaataagaagaaaaagatggacatgacctctaagaaagagaacaaaattgaagaggaggaagatgtttatcaaattt

SEQ ID NO: 88254 - DNA, 693 bp, Arabidopsis thaliana columbia
  unsure (1)..(693): unsure at all n locations
nnnnnnnnnnnnnnnnnnnnnnnnnnnnnnnnnnnnnnnnnnnnnnnnnnnnnnnnnnnnnnnnnnnnnnnnnnnnnnnnnnnccacgcgtccgcttacgcgtcttcataatcttcctctttttttctttgtctttgatattcaaagtttttgtttattttttctttgcttaacccggagagacaccctctccataaatttagttttgatccctctgggttccttgaagaaaaaaacaccaattccattcatattcttcttcatacgttcaataattcttacgaggacgagatcttcctaacgtctttgatcttcttcattaggagataagtctaaactggtcgaagatgttgggagatttcatcatcagactccttgtattgatattagggtacacatacccagcattcgaatgctttaaaacggtggagaagaacaaagttgatatcgaggaactcagattttggtgccaatactggatacttttggcgctaatttcatcattcgagagggttggcgatttttttatctcatggttaccgttatacggagagatgaaagtagtcttcttcgtatatctctggtaccctaaaacaaagggaacgagacatgtgtatgaaacattgttgaagccatacatggctcaacacgagacagagattgacagaaagatcatggagttgcgagctcgag

SEQ ID NO: 88255 - DNA, 416 bp, Arabidopsis thaliana columbia
gcctgaccgaactcctcatccagcactccatgaggttaagcattgttaccaaccaatcaaggtttcattgacggatggcatgataaaggttgcaaacacttactttttcaacacaacagaagaattggagtttagctggacaattcatggggatggtcttgaacttggatctgggactctctctattcctgtgataaagccacaaaatagttttgagatggagtggaagtcaggtccatggttttctttctggaatgactcaaatgctggagaattgtttctgacaataaatgccaagcttttaaatcttactcgttcgcttgaagccggtcatcttttgtcttcaacgcagattcctttaccagcaaagggacaaataataccgcaggcgataaaaaagacagacactagtatca

SEQ ID NO: 88256 - DNA, 543 bp, Arabidopsis thaliana columbia
  unsure (1)..(543): unsure at all n locations
aatgannnnnnnnnnnnnnnnnnnnnnnnnnnnnnnnncggacgcgtgggttctcctacgaatgaaattgaaattaatttgagccacgcgtccgggatcgggtcggatcttttgaagttcttcaatggcgcagatactttcccctgtttgtacggatcttttgaagttccagaactcagctcttagctccagatcaggtgcgtcgccgcggttctcggcgaagaccaccggtgcttcttcatcttggtacttacctcggtacgcaggaaagaggcgaaccgattcaatcggaagattgagagttgcaactgaggatgcttcttctctttccaccggtgatgtcgccgatgattactatgccgttctcggactccttccagatgctacgcaggaggagattaagaaagcttactataactgtatgaaatcgtgccatccagacttgagtggcaatgaccccgaaaccacaaatttctgcatgttcattaacgatatctatgagattctcagtgaccctgtacagcgtatggtttacgatgaaat

SEQ ID NO: 88257 - DNA, 1405 bp, Arabidopsis thaliana columbia
  unsure (1)..(1405): unsure at all n locations
nnnnnnnnnnnnnnnnnnnnnnnnnnnnnnnnnnnnnnnnnnnngatttttgtatactacgtgtctgtgtatgacaccatcatataaaaacgagcggccatggaaatcgcttcttgttcaattcttaacaatcttcaaatttcttgtacaaagacttctattttcactcagtatttgagcgagcgttcttcacacgacactggaagacgcaatttcttgcctttttcaaatttccctggaaaatctcagattctcggaaaatgcttgcgattgcagagattctcttcgatttgcttatcagctagcagagaagacgtaaacccatctgaagaattcgctgtgatacttgaggttgatagggttatgattgatacatggtcaagtaatcgccaagcgttcaatgtagcttttcaaaagcttgggctagattgtgcaaattggcctgaaccagtttattcagacttgttgagaaaaggtgctgctgatgaagagaaaatgttgcttttgtatttcaaccagattggttggccttcgtcgttgccaaccagtgagaaagcaagttttgtaaagagtgtattgcgagaaaagaaaaatgcaatggatgagtttctcatatcgaaaagcttacctctgagatctggagtgcaagaatttatcgataatgcatacgcggagaaagtaccggttgctatcgtaacagcctactgcaagagtggagacaaagtagccctatccattgtcgagatgcttgggcaagaaagacttccaaatgtgaaggttatcggagacaatgaggtagaacagagtatgtatggacaacttgttcttgggaaaggagtttcttcaagtctagaggagcaactagtgaaggaagtaaaaaaagcagcgtccgctgagaaacagaggatagcagaagaagttgcatcaatgctaaagcttaagtgttgaatattgacacaccctccacctgagagattggaaaaagattgcttgttgcattcccgtgctgctgcggcaacaccataggattacctgtcaaataactgtgtacttgttgctggtagtcaacctggagtttctgctgcaaagatgataggcatgccgtgtgtagtcatgcgaagcagtttaacggcaagaggtgagtttccatcggccaaaggtgtaatggatgggtttggaggtgcagacctaacaatcccaaaacttaggaacaagatcaagtcttgaagaaacaattcaagaaagttgtctaaaaatcagaatctggaaatactgtcgagttattgttcacttctcgaagttcttgtgaagttttcgacttgatatatattaactatagctacgtgttgtgcggccgcgaattcgatatcaagcttatcgataccgtcgacctcgagggggggcc

SEQ ID NO: 88258 - DNA, 560 bp, Arabidopsis thaliana columbia
ctcgatcgtcacgttttccagaaatctctcactatcgccatcgattttagcagacattgaagaagatgggagtattcacattcgtatgcaagaatggaggcggcgcgtggagcgcgaagcaacacgaaggagaacttgaatcttcagcttcttctacctacgagctccagcgtaagctcgttcaggtatctctctccgctgattcctccggtggcgttcagtcttcgttttctcttgtctcccctacctccgccgtattccaggtaattgttggtggtggtggtggtggaggattctctgctggaggagctgcctcaagtggaggtggtgcgggtgaagctgcagctgcccctaaggaagatgagaagaagaaagaagaatcagaagaggaacaaggagacttcggattcgatctctttggttaagattgaaatagtattttgcaggtgttggtttgagctttccatttttgtgtggggtgtttcttccattgtcaagtgtgatatggtacactgctttcaattatatttcgtgagtaatgacaagtttctctttcgatc

SEQ ID NO: 88259 - DNA, 533 bp, Arabidopsis thaliana columbia
  unsure (1)..(533): unsure at all n locations
nnnnnnnnnnnnnnnnnnnnnnnnnnnnnnnnnnnnnnnnnnnnnnnnnnnnnnnnnnnnnnaaccccaaaagaaaaaacatcttcgcgtcaccaaaaatggcttcgtcttccaaagcactgatcgaatccataggctctcttgacaaagactcatacgtttctctcttatcaaaactcataggcgaatctaaattcgtccagaacaatccgccggagctcatccctcaagaggacctaatcgtcaaacacgtccttgactctctccgtccttatagcacagaaactggtggtggtcctctggtgatcaatcatgtcgcgtatcattcaggtagaggtaatctcatcgttgagtacccaggatctgttcccggaaagatcttgtctttcgtcggaatgcatatggacgtcgtcactgcgaatcctgatgattgggaatttgatcctttctcgctaagcatagatggtgataagcttcgtggtcgtgggacaacagattgtcttggtcacgttgctcttgtcactgaactcatg

SEQ ID NO: 88260 - DNA, 474 bp, Arabidopsis thaliana columbia
gtaccggtccggaattcccgggtctacccacgcgtcccgggcacgcgtacgtttgatccagttattatggattatatacgcttgaaactcattttaagccattgttattgaacgtttatcaaatacttaaactgataaacgcaaagtcctcgcaagtacctcttcatttccacacaaaggcaacacacttgcttagcacacaccattcatcttcttctgaccctggacaagttaaagaaatgcatccattcaatggtatggtttaccccgaagatgaggaaagaagagggagtgcccattttgcactaactccaaaccaaaatcctcataccggaattgtaacatttaaacagcctgtagtttccatttcttctgctgtgaaagacactgattatatagacgacgaaccctcatgttcttgcccaaggaacgcctccctgccccgctaaaacaaaaattaaaaacaccagtggg

SEQ ID NO: 88261 - DNA, 485 bp, Arabidopsis thaliana columbia
  unsure (1)..(485): unsure at all n locations
aataataatattatattattattgatattcgaatgagtcaaattcatcagcgatacataatagagagataagagacatcaaacataaccaacatgaaatcaactagaactcaaaacaagaccagacttaaacatcatcaattagttgattttactttaaattcatttaaacataaaaagcaaagaagaaacttcttaaaagaagaatccaaaggccatcaccgctacggaggcgaagaaagtagggataaatgaggaagcatcggaggtagggctaggcgcgggagcgtcaaccgctgcaaccgtctggtgaactgtagagaacgctatcactgccaccaaaaccgccacgaaaagcttcatcttcattgcctccattgttagtaaatgaagagaagaaaagaggttttggtgcttactgttgtgttgttggtcgacncngggncgccgggatccgnccggactgagggncagttnccanagggg

SEQ ID NO: 88262 - DNA, 479 bp, Arabidopsis thaliana columbia
tgccttttaataataatattatattattattgattatattattattgatattcgaatgagtcaaattcaacagcgatacataatagagagataaaagacatcaaacataaccaacatgaaatcaactagaactcaaaacaagaccagacttaaacatcatcaattagttgattttactttaaattcatttaaacataaaaagcaaagaagaaacttcttaaaagaagaatccaaaggccatcaccgctacggaggcgaagaaagtagggataaatgaggaagcatcggaggtagggctaggcgcgggagcgtcaaccgctgcaaccgtctggtgaactgtagagaacgctatcactgccaccaaaaccaccacgtaaagcttcatcttcattgcctccattgttagtatttttcgatttgagactcaaatgaagagaagaaaagaggttttggtgctcattgttgtgttgttgtttttg

SEQ ID NO: 88263 - DNA, 1754 bp, Arabidopsis thaliana columbia
  unsure (1)..(1754): unsure at all n locations
gtcgacggacgcgtcaaaccacgcatccgcgcatcttcctcctcagattctctttcactaaacagaaacaaagatggttttgacaaaaaccgcaacgaatgatgaatctgtctgcaccatgttcggatctcgctatgttcgcactacacttcccaagtatgagattggtgagaattcgataccgaaagacgctgcgtatcagatcataaaagatgagctgatgcttgatggtaacccaaggcttaacctagcttcttttgtgactacatggatggaaccagagtgtgacaaactcatcatggactctatcaataagaactacgttgatatggatgagtaccctgtcacaactgagctccagaaccgatgtgtaaacattatagctcgactgttcaatgcgccactcgaggaatctgagacggcggtgggagtagggacagttggttcttcagaagccatcatgttagccggattggccttcaaaagaaaatggcagaacaaacgcaaggctgagggtaaaccctatgacaaacccaacattgtcactggagccaatgttcaagtttgctgggagaaattcgctcggtacttcgaggtggagctaaaggaagtaaacctaagtgaaggttactacgtgatggatccagacaaagcagcagaaatggtagacgagaacacaatctgtgtcgcagccatattgggatccacactcaacggtgagttcgaagacgtgaaacgtctcaatgacttgctagtcaagaaaaacgaggagactggttggaacacaccgatccacgtggatgcagcaagtggagggttcatagctccgtttatctatcctgaattagaatgggactttagacttcctttggttaagagtatcaacgtgagtggtcacaagtatggactggtctatgctggtattggttgggtcgtgtggagggcagcagaggatttgcctgaagagcttatctttcatattaattatcttggtgctgatcaacccactttcactctcaatttctccaagggatcgagccaaattattgctcaatactaccagctcattcgtcttggattcgaggggtacaaaaatgtgatggagaattgcatagagaacatggtggttctcaaagaagggatagagaaaacagagcgtttcaacatagtctcaaaggaccaaggagtgccagtcgtagccttctctctcaaggaccatagtttccacaacgagttcgagatctctgagatgctacgtcgttttggctggatcgtcccagcttacactatgcctgccgatgcacagcacatcacggttctgcgtgttgtcatcagggaagatttctcaagaacactcgcggagagacttgttgctgatatttcgaaggtgcttcatgagctagataccttgccttccaagatatctaagaagatgggaatagaagggatcgcggaaaatgtaaaggagaagaagatggagaaggagattctgatggaagttattgttggatggaggaagtttgtgaaggagaggaagaagatgaatggtgtgtgctaagcaagtgtgttgcctttgtgtggaaatgaagaggtacttgcgaggactttgcgtttatcagtttatgtgtttgtatatctatttgatccagttattatggattatatacgcttgaaactcattttaagccattgttattgaacgtttatcaaatactttattatgccccaaaaaannnnnnnnnnnnnnnnnnnnn

SEQ ID NO: 88264 - DNA, 446 bp, Arabidopsis thaliana columbia
cttgaacaaaaaaagacttctataggccaaatgctgaaaaaacttgcgaggaatgcgcgtaaagcttgtccaaatgggaattcacttccacaatgggtccttacatcgagagacagaggtggtcttgcatgcaacctcgagggcattatagaatcaccgattacaaatggctacaggaacaagtgtgagttctcggttggattatctcttcaggggaagccaactgttggattcagtctaggaagtttttgtgcgggtgtgacagcagtcgaggagcctgtggattgccccaacgtctccaaaattgcttctcaatatgcttcaatatttcagaagtttatagaaaattcaaaattccaagtttggaataggtttcaacatagtgggttctggcggcaattgacggttcgagaggggagaaaacccggcgtgttttcaaatgatga

SEQ ID NO: 88265 - DNA, 3299 bp, Arabidopsis thaliana columbia
  unsure (1)..(3299): unsure at all n locations
cttcttcttctctatcctctgtttcttcttcatggagacttgaaagcttttaaagtatatctaaaaacgcagtcgttttaagactgtgtgtgagaaatggctctgtttagagatattgttcttcttgggtttctcttctgcttgagcttagtagctactgtgacttcagaggagggagcaacgttgctggagattaagaagtcattcaaagatgtgaacaatgttctttatgactggacaacttcaccttcttcggattattgtgtctggagaggtgtgtcttgtgaaaatgtcaccttcaatgttgttgctcttaatttgtcagatttgaatcttgatggagaaatctcacctgctattggagatctcaagagtctcttgtcaattgatctgcgaggtaatcgcttgtctggacaaatccctgatgagattggtgactgttcttctttgcaaaacttagacttatccttcaatgaattaagtggtgacataccgttttcgatttcgaagttgaagcaacttgagcagctgattctgaagaataaccaattgataggaccgatcccttcaacactttcacagattccaaacctgaaaattctggacttggcacagaataaactcagtggtgagataccaagacttatttactggaatgaagttcttcagtatcttgggttgcgaggaaacaacttagtcggtaacatttctccagatttgtgtcaactgactggtctttggtattttgacgtaagaaacaacagtttgactggtagtatacctgagacgataggaaattgcactgccttccaggttttggacttgtcctacaatcagctaactggtgagatcccttttgacatcggcttcctgcaagttgcaacattatcattgcaaggcaatcaactctctgggaagattccatcagtgattggtctcatgcaagcccttgcagtcttagatctaagtggcaacttgttgagtggatctattcctccgattctcggaaatcttactttcaccgagaaattgtatttgcacagtaacaagctgactggttcaattccacctgagcttggaaacatgtcaaaactccattacctggaactcaatgataatcatctcacgggtcatataccaccagagcttgggaagcttactgacttgtttgatctgaatgtggccaacaatgatctggaaggacctatacctgatcatctgagctcttgcacaaatctaaacagcttaaatgttcatgggaacaagtttagtggcactataccccgagcatttcaaaagctagaaagtatgacttaccttaatctgtccagcaacaatatcaaaggtccaatcccggttgagctatctcgtatcggtaacttagatacattggatctttccaacaacaagataaatggaatcattccttcttcccttggtgatttggagcatcttctcaagatgaacttgagtagaaatcatataactggtgtagttccaggcgactttggaaatctaagaagcatcatggaaatagatctttcaaataatgatatctctggcccaattccagaagagcttaaccaattacagaacataattttgctgagactggaaaataataacctgactggtaatgttggttcattagccaactgtctcagtctcactgtattgaatgtatctcataacaacctcgtaggtgatatccctaagaacaataacttctcaagattttcaccagacagcttcattggcaatcctggtctttgcggtagttggctaaactcaccgtgtcatgattctcgtcgaactgtacgagtgtcaatctctagagcagctattcttggaatagctattgggggacttgtgatccttctcatggtcttaatagcagcttgccgaccgcataatcctcctccttttcttgatggatcacttgacaaaccagtaacttattcgacaccgaagctcgtcatccttcatatgaacatggcactccacgtttacgaggatatcatgagaatgacagagaatctaagtgagaagtatatcattgggcacggagcatcaagcactgtatacaaatgtgttttgaagaattgtaaaccggttgcgattaagcggctttactctcacaacccacagtcaatgaaacagtttgaaacagaactcgagatgctaagtagcatcaagcacagaaatcttgtgagcctacaagcttattccctctctcacttggggagtcttctgttctatgactatttggaaaatggtagcctctgggatcttcttcatggccctacgaagaaaaagactcttgattgggacacacggcttaagatagcatatggtgcagcacaaggtttagcttatctacaccatgactgtagtccaaggatcattcacagagacgtgaagtcgtccaacattctcttggacaaagacttagaggctcgtttgacagattttggaatagcgaaaagcttgtgtgtgtcaaagtcacatacttcaacttacgtgatgggcacgataggttacatagaccccgagtatgctcgcacttcacggctcactgagaaatccgatgtctacagttatggaatagtccttcttgagttgttaacccgaaggaaagccgttgatgacgaatccaatctccaccatctgataatgtcaaagacggggaacaatgaagtgatggaaatggcagatccagacatcacatcgacgtgtaaagatctcggtgtggtgaagaaagttttccaactggcactcctatgcaccaaaagacagccgaatgatcgacccacaatgcaccaggtgactcgtgttctcggcagttttatgctatcggaacaaccacctgctgcgactgacacgtcagcgacgctggctggttcgtgctacgtcgatgagtatgcaaatctcaagactcctcattctgtcaattgctcttccatgagtgcttctgatgctcaactgtttcttcggtttggacaagttatttctcagaacagtgagtagtttttcgttaggaggagaatctttaaaacggtatcttttcgttgcgttaagctgttagaaaaattaatgtctcatgtaaagtattatgcactgccttattattattagacaagtgtgtggtgtgaatatgtcttcagactggcacttagacttcctataagttcttgcctatctaagtttttctaaaaaaaaaaaaaaaaaaaagnnnnnnnnnnnnnnnnnnnnnnnnnnnnnnnnnnnnnnnnnnnnnnnnnnnnnnnnnnnnnnnnnnn

SEQ ID NO: 88266 - DNA, 378 bp, Arabidopsis thaliana columbia
tttttccaaatctgccagagtccgtaccatgtccaccatgcctccacaatttcccttggagatccgctcagctcttcgccgggcttcctccaccgtctatctccaccgttccatcagcaccgtcactactactccttcgtttcgtcaccgaacgacgttgttacgaccgagagctttctcttcttcctctgttaagctccccacgaaaccttctctttgcaccgccgacgagctttcattacgtctccgttcctaacaccgattggcgtctcgctctctggcgctacttgcctccctcctcaggctccgacgaggaatcatccattgttactgttgtctggagtaggaactaatgccatcggataaggatttatcttc

SEQ ID NO: 88267 - DNA, 458 bp, Arabidopsis thaliana columbia
  unsure (1)..(458): unsure at all n locations
aacctatagaaagttctcatctctcaaataaacatgtcttttttcggaaaactcgcagacactgtggtatcttttgcaaacgattctgcgaaatctgttgtagaagaagtggtaaatccaacggtgtcttttgcaaacaattctgcaagaactgttgtagaagaagtggtaaatccgacggtctcttttgcaaacgactctgcgagaactgttgtagaaaaagtgctaaatccaacggtatcgttcatcgatagccagctccagcggccacgggacgtccttgtgcaacaacaaatcctagacaatctccaagaatcgaatggttcgaatttccctggggatgactaccactcgcctgaccggaagaactggatggcccatctctctgtggataaactaacccttaacaagatncgtgtggccaggaactcacgactcagccaccaacggaattgggg

SEQ ID NO: 88268 - DNA, 906 bp, Arabidopsis thaliana columbia
  unsure (1)..(906): unsure at all n locations
atgatactnnnnnnnnnnnnnnnnnnnnnnnnnnnnnnnnnnnnnnnnnnnnnnnnnnnnnnnnnnnnnnnnnnnnnnnnnngccacgcgtccgagaaaatggagattttgagatttttgctttctctctttatatattttcttttgttgaatctttctctttcacattttccttcgatttcagctcaaaggactaaccatgaaaacttcctcaagtgtctctctcaccgaatcaacgaggacgactcaagaatcatacacacatcaaaagatccttcgtatttctcaatcttgaattcttccatacaaaatccaagattctttgttctcgaaacacctaaaccggtttcaatcatcactccggttcaagccaccgatgttcaatctacgattaaatgcgcacggcttcacggtatacacatcaggactaggagtggtggtcatgactacgaaggtttatcttacatgggtaaaagcagaccgttcgttgtcattgatttgagaaatctccggtctattacattagatgttgataaccggaccggttgggttcaatccggagctacaattggggaattgtactatgagattggaaaattaagcaaatctttggcctttccggccggtctttatccaaccgttggcatcggagggcaattcgggggtggtgggtacggtacgttgatgagaaaatacggcttatcggcggacaatgtaattgatgcacatattgttgaccccaatggaagcttttttgacccgaaaggcctgggtggaagatttcttttggggcttattccgtggagggcggagggaatcaagccttctcctggttggtcctgcccatgggaaagaatttagaatttggctttgatggatttcccgtcgcggaaagtaaaccggatt

SEQ ID NO: 88269 - DNA, 1541 bp, Arabidopsis thaliana columbia
ttcttcttcttcttattaatgttcaacaaaattcgacatttttgggtctaatccagctcaaaagtttacgtttttatttgtgtgtgtcggtctgtaagagttagttcgatttcttatccaagtaaaggggtttcattggctaaaattgacaatcggggcgggccctagaagaaaatatgaactgtcaattgtagcagacggttcgtgattcatcgttttcatggccgattcgattccgatttccccatgagggtttgtcgttgatattaacgcctcccctgggatttccataatttgccttgtttagttcgtgttatgatggatctttgaaagctattcccttttttttgggtgtcgaaatcgagaatctgagagttgttgtcacttgaagaatctggattctggaaggctgttgttggtgtgataaatgttgattggaagatgaatccaggccgtagctaggacacgaagggtttgttgtatatttgcgtttgaaaaatctcggtttttgttgctttagagattgttggagaaaatatggatcttgtgattggtggaaaatttaagcttgggaggaaaattggtagtggttcctttggagagctttatctaggtataaatgttcaaaccggagaagaagttgctgtcaagctggaatctgtgaaaactaagcatccccaactccactatgagtcgaagttgtatatgctgcttcaaggaggaactggtgttcctaacctcaagtggtatggagttgaaggggattacaatgtaatggttattgaccttctaggtcctagtcttgaagacttgtttaactactgtaatagaaaactctctttaaaaaccgttctcatgcttgcggaccagctgattaacagagtcgagtttatgcatactagaggttttcttcaccgtgatattaaacctgacaacttcttaatgggccttggtcgcaaagcaaatcaggtttatatcattgattttggattggggaagaaatacagagaccttcagactcacaggcacataccgtacagagaaaacaaaaacctcactggaacagctcggtatgcaagtgtgaacactcaccttggagtcgaacaaagtcgaagagatgatttggaagcacttggttatgtgctgatgtatttcctcaaagggagcttaccctggcagggattaaaagctgggacaaagaagcagaagtatgacagaattagtgagaaaaaagtagcaactcctatagaggtcttgtgtaaaaatcaaccgtctgagtttgtttcgtactttcgttactgccggtctctacggtttgatgacaaacctgattactcttaccttaagaggctattccgcgacttgtttattcgagaaggttatcagtttgattatgtatttgactggacagttctgaagtatcctcagattggttccagctctggttctagttcacggacacgggtagtttatgctgctttctcttttggttcttaagtttctctctattcaagcctaaaaatgtgtaaaacacttttttg

SEQ ID NO: 88270 - DNA, 538 bp, Arabidopsis thaliana columbia
  unsure (1)..(538): unsure at all n locations
aggnnnnnnnnnnnnnnnnnnnnnnnnnnnnnnnnnnnnnnnnnnnnnnnnnnnnnnnnnnnnnnnnnnnnccacgcgtccgcccacgcgtccgcccacgcgtccgtctgcctctgcctcagcctcctctcagtcgccggagacggcaatgattaggtcgtattcagacaaaaggtctacttcgaggtctttttcttgcaggacaagtaacgagtggtggttcgacgatatgtcaattctcgggccaaaaatcattgaaaagctgataaatacacttggtgcgcatgataagaacaatgacagcttggtcctcacaaaatttcttctccattacctcaagacaaaggtcccaaacaagtcaaccaacaagctcgagtattcaggtttagctgatacagcggttcaaggagtggttttcgcagcgaaaaccgcgttttcatgcagaaaaatgttctgggttctgcgagttttatcgggatttagcataagtaaagaatcaagaattggtttagagagggttataggagaaatgctggat

SEQ ID NO: 88271 - DNA, 1428 bp, Arabidopsis thaliana columbia
cagctctcaacgactcactattgggaaagctggcacgcctgcaggtaccggtccggaattcccgggtcgacccacgcgcacgcgttcagacgatggcggctgcaatggcttctcatgtttcgacggctcgatcaccggctctttccttctcttcttcgtcttcctccttcttccccggtactactcttcggagattctccgccgtttcactcccttctcctgctctccctcgccttcgtgtttcatgtcaagcctcctccgtcacttcgccttcttctccttccgatgtcaaaggaaaatctgacctgaaagactttctggcaatagatgattttgacacagccaccattaaaacgattttagacaaggcttcagaggttaaggccttgctgaaatcaggggagagaaattatctaccttttaaagggaagtctatgtctatgatctttgcaaaaccttccatgaggactcgggtttcgtttgagactggttttttcttgctcggtggccatgcgttatatctaggtcccaatgacattcagatgggtaagcgggaggaaactcctgatgttgctcgtgttctttcacgctataatgacatcattatggctcgtgtatttgctcatcaggacattcttgatttggctaactactcgagtgttccagttgtcaatggtctgactgatcataaccatccttgccaaatcatggccgatgccctcacaatgataaaacacattggtcaatttgaaaggaaaaaggttgtgtatgttggagatgggaacaacatggttcactcttggttagaattggcatccgttattccattccactttgtctgcgcttgcccaaaagggtatgaaccagacaaagaaagagtttcaaaggcaaagcaagctggattaagtaagatagagatcaccaatgatcctaaagaagctgttattggagcagatgttgtgtactcagacgtatgggccagtatgggtcaaaaggatgaagccgaagctcgccggaaagcattccaaggattccaggtggatgaagctctgatgaagttggcgggtcaaaaagcctatttcatgcattgtttgcctgcagagagaggagttgaggtgaccaatggagtcgtagaggctccttattccattgtctttccacaggcggagaatcgcatgcatgctcaatatgctataatgcttcacttgctcggcttttaaacctctttgttatcttagctctcgcatgcggttggttcgtgtaccacattgacttaataatgtactatttattaaccttagtttgagaacccgtatgattaataagatttgtggctgattcagctgggaatatgaatgagctacttttctaaaaaaaaacaaaaaaaagtcaataaaaaaataaaaaaaggaaaaaagggcgaccgct

SEQ ID NO: 88272 - DNA, 675 bp, Arabidopsis thaliana columbia
cggatcagattatgttccaacatatgaagataaagatggcgactggatgcttgtaggagacgtaccgtgggagtgagtatttttatatctttaaatttatatatgaattattattataaatacgtctatacaaaatatttatttacatgttgtttggactattttaggatgtttgttgattcatgcaaacgtatacgaataatgaagggatcagaagcaatcggacttgctccaagggcattagaaaagtgcaagaacagaagttgagttctcgacgacatttcgtgttcttacctaaaaaaggaagaaagcctgtttcgatcggttggatatctcgaaccgagaaagctaaaccggctcgaaactattgttccgagcaaggagtttgcttataatattaattaataataatattaatattgtggtgtattacattttaaaaaattaaatcgtttttgttatatgtattatatacatatattaatatgtatatttaattaggttgcatctatttccgttaaaaccaacttttgtttttacgcattatcgtgttgtctatatggtctgtgtccgtaaggcatcttaatgtgttactttgacgtaccaaattattacttacattatttcatttctcaacagtctttttttatccaacattttcaaccaccttaaatt

SEQ ID NO: 88273 - DNA, 1367 bp, Arabidopsis thaliana columbia
gcgcggagctgtatactgactcacttagggacagctggcacgcctgcaggtaccgggccggtaattcccgggtcgacccacgcgtccgcacacatctcacatccccctatctctctctctcttcaaacgttttagttccccaaaaaaatatcaaaagaactaaaagaaaaaccctagaagccgaagaatctcctactcgttgtcgatcggatcacctaactaattactcgttgataatcattatatcgagaaatatgattaattttgaggccacggagctgagattagggctaccgggtgggaatcacggaggagaaatggctggaaaaaataatggtaaaagaggattttctgagactgttgatctcaaactgaatctttcatcgacggctatggattcagtttccaaagtcgatttagagaatatgaaggagaaggtcgtaaaaccaccagccaaggcacaagttgtgggatggccaccggtacgatctttccgcaagaacgtcatgtccggccaaaaaccgaccaccggagatgccaccgaaggaaacgataagacttctggcagcagtggagccacctcatccgcctccgcatgtgccaccgtggcttatgtgaaggttagcatggacggtgcaccgtacctacggaaaattgacttgaaactctacaaaacttaccaagatctctccaacgccttaagcaaaatgtttagctcttttaccataggcaactatggaccacaaggaatgaaagatttcatgaatgagagtaaattgatcgatcttctaaacggatcagattatgttccaacatatgaagataaagatggcgactggatgcttgtaggagacgtaccgtgggagatgtttgttgattcatgcaaacgtatacgaataatgaagggatcagaagcaatcggacttgctccaagggcattagaaaagtgcaagaacagaagttgagttctcgacgacatttcgtgttcttacctaaaaaaggaagaaagcctgtttcgatcggttggatatctcgaaccgagaaagctaaaccggctcgaaactattgttccgagcaaggagtttgcttataatattaattaataataatattaatattgtggtgtattacattttaaaaaattaaatcgtttttgttatatgtattatatacatatattaatatgtatatttaattaggttgcatctatttccgttaaaaccaacttttgtttttacgcaaaaaaaaagagttcacatggtctgtgtccgtaaggcatcttaatgtgttactttgacgtaccaaattaatacttgcggccgcgaattcgatatccagcttattgataccctcgacaaccagggggg

SEQ ID NO: 88274 - DNA, 511 bp, Arabidopsis thaliana columbia
tcctacgcactcactatagggaaagctgctacgcctgcaggtaccggtccggaattcccgggtcgacccacgcgtccgattttgttctccgcaatgcgtgttgttgatcatgccgtctcacctgatacctctgtgctaagtgttgtactcaaggcttgtggtcaaagctccaatattgcatatggagaatctttgcatgcttatgcggtgaaaacttcgcttctcagctctgtatatgtgggaagttctttactggatatgtataagagagttggaaagattgataagagttgcagagtctttagcgaaatgccttttagaaatgctgtaacatggacagcgattattacggggttggttcacgctggtcggtacaaggaaggtcttacgtacttttctgaaatgtcgagatcggaagaactatctgatacttatacatttgctattgccttgaaggcttgtgctggtttacgtcaagttaaatatgggaaaggcgattcatactcatgtg

SEQ ID NO: 88275 - DNA, 302 bp, Arabidopsis thaliana columbia
cgcgtcagccgagtctctcgttccttctctggtggcgttttcaccatgccgaagcattacagaccaacggggaaaaacaaggaaggaaatgcggctaggtatatgaccaggtcgcaagctcttaaacatcttcaagttaacttgaatctattcaggaggactatgtattgtcaaaggtatatttccccgagaaccagagaagaagattaagggaaaccatcacacttactaccatgtcaaggacattgctttcctcatgcacgagcctcgtcttgagaagtttagggaaatcaaaacatacc

SEQ ID NO: 88276 - DNA, 385 bp, Arabidopsis thaliana columbia
  unsure (1)..(385): unsure at all n locations
tcgtcggcgaatctgagaactaagcatcaacaacaagaacaatgagagcgaagtggaagaagaagcgcatgaggagattaaagaggaagcgtcgaaagatgagacagcgatccaagtagactccaagttcctcccccaaataactatcggctctctgtgattctctttttagttttgtcttgaaactttttctttcttctagcaaaccttttttattttgattatggaagttttgaacattctgtgatgtatgtaaaacttgctcttgtgctcttatctatctaatcacagatcctttatctannnnnnnnnnnnnnnnnnnnnnnnnnnnnnnnnnnnnnnnnnnnnnnnnnnnnnnnnnnnnnnnnnnnnnnnnnnnnnnnnn

SEQ ID NO: 88277 - DNA, 476 bp, Arabidopsis thaliana columbia
cacagagaagaagcacaatcggaagaaaggagaagacgaagatgtcgttggtatggttggaagcgatgttgcctctcggaatcatcggtgggatgctctgtatcatgggcaattctcagtactacatccacaaagcttatcatggccgtcctaagcacatcggccacgatgaatgggatgttgctatggaaagacgcgacaagaaagtcgtcgagaaagctgcagctccttcctcatgattcgctttatctcttttgtgttcctcaggggcttaaggtgaccacttgtggtgacaaataaagtgcattccagaagaagaagaagctgggggatctagtactttcattcccatttgattttccttggacatattaaagctttcagaaatcagacctcaataacatttggtttatcaatatttctctattcgtgatattttgtatgcttttaagttgcatgatacactgaactactct

SEQ ID NO: 88278 - DNA, 609 bp, Arabidopsis thaliana columbia
  unsure (1)..(609): unsure at all n locations
ccaggctctaatacgactcactttagggaaaggtggtacgcctgcagggaccgggccggaattcccgggtcgacccacgcgttcggaccaatggctggttgttctttaattaatctcccattggttcggcttagaactttcggtctttcggactctttttcttctttcccatttgcccatcggcctctggcatcgatttcaccgagaaaggtacccgaatttccgggctttctctggcaccgctttgaacagatcctaaggaggctggtatgggtggctggtcagagaacgtctcatgtttgaggatgaatgcattcttggtgatgaaactgatcgtgttgtggggcatgacagcacgtataattgtcatctgatgggaaatattgaagccaagaatttgctgcacagggcttttagtgtatttttattcaactcgaagtatgagttgcttctccagcaaaggtcaaacacaaaggttacgttccctctagtgtggacctaacacttgttgcagccatcctctttaccgtgaatcaaaggcttttccagggcaatnnnnctagggtnttangganttnttgcnncaaggaaaggttttnggatgggctt

SEQ ID NO: 88279 - DNA, 500 bp, Arabidopsis thaliana columbia
cttcatttcatctcagatccctccttccttctctctcttcttcttcttcttcttcctcttcccgatttgcccctccccgtctttctccgatccgatctccggcgccgaggactcagctgtctgttcgcgctttctcagccgtcaccatgaccgattctaacgatgctggaatggatgctgttcagagacgactcatgtttgaagacgaatgcattctcgttgatgaaaatgatcgtgtggtgggacatgacactaagtataactgtcatctgatggaaaagattgaagctgagaatttacttcacagagctttcagtgtgtttttattcaactccaagtatgagttgcttctccagcaacggtcaaaaacaaaggttactttcccacttgtgtggacaaacacttgttgcagccatcctctttaccgtgaatccgagcttattgaagagaatgtgcttggtgtaagaaatgccgcacaaaggaagcttttcgatgagctc

SEQ ID NO: 88280 - DNA, 1069 bp, Arabidopsis thaliana columbia
  unsure (1)..(1069): unsure at all n locations
ggaaatttccgggtcgacccacgcgtccggtcttctttttcttctttccgatttgcccatcgtcctctgtcatcgatttcaccgagaaagttaccgaattttcgtgctttctctggtaccgctatgacagatactaaagatgctggtatggatgctgttcagagacgtctcatgtttgaggatgaatgcattcttgttgatgaaactgatcgtgttgtggggcatgacagcaagtataattgtcatctgatggaaaatattgaagccaagaatttgctgcacagggcttttagtgtatttttattcaactcgaagtatgagttgcttctccagcaaaggtcaaacacaaaggttacgttccctctagtgtggactaacacttgttgcagccatcctctttaccgtgaatcagagcttatccaggacaatgcactaggtgtgaggaatgctgcacaaagaaagcttctcgatgagcttggtattgtagctgaagatgtaccagtcgatgagttcactcccttgggacgtatgctgtacaaggctccttctgatggcaaatggggagagcacgaacttgactacctgctcttcatcgtgcgggacgtgaagcttcaaccaaacccagatgaagtggctgagatcaagtacgtgagccgggaagagctgaaggagctggtgaagaaagcagatgctggcgaggaagctgtgaaactatctccatggttcagattggtggtggataatttcttgatgaagtggtgggatcatgttgagaaaggaactatcactgaagctgcagacatgaaaaccattcacaagctctgaactttccataagttttggatcttccccttcccataataaaattaagagatgagacttttattgattacagacaaaactggcaacaaaatctattcctaggatttttttttgctttttatttacttttgattcatctctagtttagttttcatcaaaaaaaaaaaaaaaaaaagnnnnnnnnnnnnnnnnnnnnnnnnnnnnnnnnnnnnnnnnnnnnnnnnnnnnnnnnnnnnnnnnnnnnnnn

SEQ ID NO: 88281 - DNA, 1186 bp, Arabidopsis thaliana columbia
tgctacgccggctctatacgacttacttagggaaagctggtacgcctgcaggtaccggtccggaattcccgggtcgacccacgcgtccggcgacacaccaacaccaatgtctgcttcttctttatttaatctcccattgattcgcctcagatctctcgctctttcgtcttctttttcttctttccgatttgcccatcgtcctctgtcatcgatttcaccgagaaagttaccgaattttcgtgctttctctggtaccgctatgacagatactaaagatgctggtatggatgctgttcagagacgtctcatgtttgaggatgaatgcattcttgttgatgaaactgatcgtgttgtggggcatgacagcaagtataattgtcatctgatggaaaatattgaagccaagaatttgctgcacagggcttttagtgtatttttattcaactcgaagtatgagttgcttctccagcaaaggtcaaacacaaaggttacgttccctctagtgtggactaacacttgttgcagccatcctctttaccgtgaatcagagcttatccaggacaatgcactaggtgtgaggaatgctgcacaaagaaagcttctcgatgagcttggtattgtagctgaagatgtaccagtcgatgagttcactcccttgggacgtatgctgtacaaggctccttctgatggcaaatggggagagcatgaacttgattacttgctcttcatcgtgcgagacgtgaaggttcaaccaaacccagatgaagtagctgagatcaagtatgtgagccgggaagagctgaaggagctggtgaagaaagcagatgcaggtgaggaaggtttgaaactgtcaccatggttcagattggtggtggacaatttcttgatgaagtggtgggatcatgttgagaaaggaactttggttgaagctatagacatgaaaaccatccacaaactctgaacatctttttttaaagtttttaaatcaatcaactttctcttcatcatttttatcttttcgatgataataatttgggatatgtgagacacttacaaaacttccaagcacctcaggcaataataaagttttcgtttttatcttaaaaaaaaaaaaaaaaaaaaaaaaaaaagctacgtcagggaggatccaagcttacgtacgcgtgcatgcgacgtcatagccccc

SEQ ID NO: 88282 - DNA, 1581 bp, Arabidopsis thaliana columbia
cgttaacttcgcgtgtgagtatgattagtcaacacagatcagaatctgaggctttggccgagacgagagaagcagaagaagaaaatggcggagactgtacattctccgatcgttacttacgcatcgatgttatcgcttctcgccttctgtccacctttcgtcattctcctatggtacacaatggttcatcaggatggttctgttactcagacctttggcttcttttgggagaatggagttcaaggacttatcaacatatggccaagacccactttgattgcttggaaaattatattttgctatggagcatttgaagctattcttcagctgcttctgcctggtaaaagagttgagggtccaatatctccagccggaaaccgaccagtttacaaggccaatggtctggctgcttactttgtgacactagcaacccatcttggtctttggtggtttggaatcttcaaccctgcaattgtctatgatcacttgggtgaaatattttcggcactaatattcggaagcttcatattttgtgttttgttgtacataaaaggccatgttgcaccttcatcaagtgactctggttcatgtggtaacctaataattgacttctattggggcatggagttgtaccctcgaattggtaagagctttgacatcaaggtgtttactaattgcagattcggaatgatgtcttgggcagttcttgcagtcacgtactgcataaaacagtatgaaataaatggcaaagtatctgattcaatgctggtgaacaccatcctgatgctggtgtatgtcacaaaattcttctggtgggaagctggttattggaacaccatggacattgcacatgaccgagctggattctatatatgctggggttgtctagtgtgggtgccttctgtctacacttctccaggcatgtaccttgtgaaccaccccgtcgaactcggaactcagttggcaatatacattctcgttgcaggaattctgtgcatttacataaactatgactgtgatagacaaaggcaagagttcaggaggacaaacgggaaatgtttggtttggggaagagccccgtcaaagattgtggcgtcgtatactacaacatctggtgaaactaaaactagtcttctcttaacgtctggatggtggggattggctcgtcatttccattatgttcctgagatcttaagtgctttcttctggaccgtaccggctctcttcgataacttcttggcatacttctacgtcatatttctcacccttcttctctttgatcgagccaagagagacgatgaccgatgccgatcaaagtatgggaaatattggaagctgtattgtgagaaagtcaaatacaggatcattccgggaatttattgattgtaacgaagtctgttgttctcattttctacttattacgttaattcgaacgttggaatcatcaaaagaccgagccaaaacaaaaatgcaaattgatgcgatagacattcttttgctgaaaaaaaaaaaataggttttcaaatctctagctacacttatgcctttccctagattatcaaagttagcctgccgtttaat

SEQ ID NO: 88283 - DNA, 521 bp, Arabidopsis thaliana columbia
  unsure (1)..(521): unsure at all n locations
cnnnnnnnnnnnnnnnnnnnnnnnnnnnnnnnnnnnnnnnnnnnnnnnnnnnnnnnnnnnnnnnnnnnnnnnccacagatgcgctcaatcgctagaaaccttactcacgattccttctctccgtttcttaactgtatccacaacactgactcttccgttaaatctccgatggtttcaactgttattcgccgtctccgagatccggattcctccgttcgctctgcttgcgccgtcgcgacggctgatatgtcggctcatgttacgaggcagccttttgcttccgtcgcgaagccgttgattgagactttgattcaggaaggtgattcgaatctgcagatcggagcggcgttgtgtttagcggcgtctgttgatgcggcgacggatccggaatcggagcaattgagaaaatcgttgcctaagattgggaaattgcttaagagtgatggttttaaggctaaaagctgcgttgttgagcgcccccgggagtataattaccggcgggggggcgggaactaaaccgg

SEQ ID NO: 88284 - DNA, 435 bp, Arabidopsis thaliana columbia
acattctgcctccatatccaaagcagtttccacacatttaatgtgaacacgttttctcactaccaacaaaaaaaaaaaactcaaatcggaaaaaaaaatgtcggttcacggacgatttccggcgagtccaccgatttcattatctccgtcgtcttcttccacatctccgtcttcacagtcaccgtcaacaccacctgatctaaagcaacgagtcatcgcttgtctcaacaagctcgctgatcgtgacactttagctctcgcttccgctgagcttgactcaatcgctagaaaccttactcacgattccttctctccgtttcttaactgtatccacaacactgactcttccgttaaatctccggtgaggaaacagtgcgttgctcttttatcggttctttctcggtaccacggagattctctaacacctcaccttgc

SEQ ID NO: 88285 - DNA, 2050 bp, Arabidopsis thaliana columbia
cgcctgcaggtaccggtccggaattcccgggttgacccacgcgtccgcgtctaaatctcaccaatccatttcttctcttcttctttgcgttttttgtttggaactgaatcgaaaaagatggatgctaatttcgagatgcctccagtcggtggaatgaacgacgacgacgacatggatttcggtgacggcgcctcgtttcttaaagtcggtgaagagaaagagatccaacaaggtttgaagaagaagcttcttaaagaaggtgaaggatatgaaactcctgagaatggcgatgaagttgaagtgcattacactggaactttgcttgatgggacgaagtttgattcgagtcgtgatagagcaacgcctttcaaattcactcttggacaaggtcaagttattaaaggatgggatattggtattaagacgatgaagaaaggtgaaaacgctgttttcactatacctgcggagctagcatatggggaatctggttccccgccaactattcctgcgaatgctacgcttcagtttgatgtggagttgcttaaatgggacagtgtgaaggatatatgtaaagatggtggtgtgtttaagaagattcttgctgttggagagaagtgggagaatccaaaggaccttgatgaagttcttgttaagtttgaggcgaaacttgaggatggtactgttgttgggaaatctgatggtgtggagttcactgttaaagatggtcatttctgccctgcacttactaaggctgtgaaaactatgaaaaagggtgaaaaggtccttctgacagttaaaccacaatatggttttggggagaagggcaagccagcctctgctggtgaaggcgcggttcctcctaatgcgacgctcgagatcaatttggagttagtttcgtggaaaacagtgtcagaagtaactgatgataacaaggttgtgaagaaagtcttgaaggaaggggatggatatgagcgtcctaacgagggggcagttgtgaaagtgaaattgatagggaaacttcaagatggtactgtatttttgaagaaaggtcatggtgagaatgaggaaccgtttgagttcaaaacagatgaagagcaagttgtcgatggacttgatagagctgtcatgaagatgaaaaagggtgaagtggcattggtgaccatagaccctgagtatgcctttggttctaatgagtcacaacaggaattggctgtggtgccgccaaactcaactgttacttatgaggttgacctattgactttcgacaaggaaagggaatcgtgggacatgaacactgaggagaagattgaagctgctagtaagaagaaggaagaaggaaattccaagtttaaaggaggcaaatattccctggcttccaagagatatgagaaggctgtcaaattcgttgaatacgacacatccttcagtgaggaagagaagaagcaagcaaaagcattgaaggtggcatgcaatctaaacgatgcagcctgcaaactcaaattgaaagattacaagcaggccgaaaaactatgcacaaaggtgttagagctagaaagcaccaatgtgaaggccttataccggagagcgcaagcgtacatggagttgtctgatttagacttggccgagtttgatgtcaagaaggcccttgaaatcgatcccaacaacagggaagtgaagctagagcagaaaaggttgaaggagaaaatgaaggaattcaataaaaaggaagccaaattttatggaaacatgtttgcgaaactaagtaaggaataatcaaaagatggagaggcaatgagcacctgaggtcttgaaaacgttgcaagaactctgcatttttcattttctactcttttggtttgttgcaatgttttctagtttttcaacctgagcgttagtgagacactaagacttataaaacagtgagagattatcccaatgtgttgcttttttcgtctgattgttggtagaaacttggagctattgatagcaaaaaaaacctaactttccagattaatttgagttcttcatatgatatcgagaaaaaaaaaaa

SEQ ID NO: 88286 - DNA, 2598 bp, Arabidopsis thaliana columbia
  unsure (1)..(2598): unsure at all n locations
nntttcttctttatgtctaatctcatcggacgaaggtagttggcacacccacacttctctaacttgcagtcgatcaatttttttatttttattcagggtcatcgtacgtcgtcatgtggaagttgaagataggaaagggaaatggagaagatccgcatttattcagcagcaataacttcgtcggacgtcaaacatggaagtttgatcacaaagccggctcaccggaggaacgagctgccgtcgaagaagctcgccggggtttcttggataaccgttttcgtgttaaaggttgcagtgatctattgtggcgaatgcaatttctaagagagaagaaattcgaacaaggcataccacaactaaaagctactaacatagaagaaataacgtatgaaacaacgacaaatgcattacgaagaggcgttcgttacttcacggctttgcaagcctccgacggccattggccgggagaaatcaccggtccgcttttcttccttcctcctctcatattttgtttgtacattaccggacatctggaggaagtattcgatgctgaacatcgcaaagagatgctaagacatatctattgtcaccagaacgaagatggtggatggggattacacatcgaaagcaagagtgttatgttctgcaccgtgttgaattacatatgtttacgtatgcttggagaaaatcctgaacaagacgcatgcaaacgagctagacaatggattcttgaccgcggtggagtgatctttattccttcttgggggaaattttggctctcgatacttggagtctatgattggtctggaactaatccgacgccaccagaactcttgatgctgccttcttttcttccaatacatccagggaaaattttgtgttatagccggatggttagtatacctatgtcgtatctatatgggaagaggtttgttggtccaattacacctcttattttactcttgcgcgaagaactttacttggaaccttatgaagaaatcaattggaaaaaaagtcgacgtctatatgcaaaagaagacatgtattatgctcatcctttggttcaagatttgttatctgacactcttcaaaactttgtggagcctttacttacacgttggccattgaacaagcttgtgagggaaaaagctcttcagcttactatgaaacacatacactatgaagacgaaaatagccattacataaccattggatgtgttgaaaaggtactgtgcatgctagcttgttgggttgaaaatccgaatggagattatttcaagaagcatctggctagaattccagattatatgtgggtcgctgaagatggaatgaaaatgcagagctttggatgtcaactgtgggataccggatttgctattcaagctttgcttgcaagtaatctccctgatgaaactgatgatgcactaaagagaggacataattacataaaggcatctcaggttagagaaaacccttcaggtgattttaggagcatgtaccgccacatttcgaaaggagcatggacattttctgatcgagatcatggatggcaagtttcagattgtacagctgaagctttaaagtgttgcctgctgctttccatgatgtcagctgatatcggcggccagaaaatagatgatgaacaattatatgactctgttaacctcttgctgtctttacagagcggaaatggaggtgtcaatgcgtgggagccatcccgtgcatataaatggttggaactgctcaatcctacagaattcatggctaataccatggtcgagcgggagtttgtggaatgcacctcatctgttatacaagcacttgatctatttagaaaattgtatccagatcacaggaagaaagagatcaacaggtccatcgaaaaagctgtgcaatttatacaagacaatcaaacaccagacggttcatggtacggaaattggggtgtttgcttcatttacgctacttggtttgctcttggaggcctagcagcagctggtgaaacttacaacgattgtttagctatgcgcaatggtgtccactttttgctcacgacacaaagagatgatggaggttggggtgaaagctatttatcatgctccgaacagagatatataccatcagaaggagaaagatcaaaccttgtgcaaacatcatgggctatgatggctctaattcatacgggacaggctgagagagatttgattcctcttcatcgtgctgccaaacttatcatcaattcacaacttgaaaacggcgattttcctcaacaggaaatagtaggagcgttcatgaatacatgcatgctacactatgctacatacagaaacaccttcccattatgggcactcgcagaataccgaaaagttgtgtttatcgttaattaatcatttacttatttatgtaatttttttctttttaaatgagatgaatgtttttccagcgacggaatacaccgaatattaaaagatgaacacaaaaatatttgaatgaataaataatgatttagtcttctaaaaaaaaaaaaaagnnnnnnnnnnnnnnnnnnnnnnnnnnnnnnnnnnnnnnnnnnnnnnnnnnnnnnnnnnnnnnnnnnna

SEQ ID NO: 88287 - DNA, 389 bp, Arabidopsis thaliana columbia
agagatcttgtgtacatacattcaaatgataaaagttcttcttcacgagacattgttgtgtatactgattcagattccgacaaggaaaacctcatgaaggaggcaaaggacgaacgcaagagattggcagaaagaaaaatacaatctgcaatcgggttccgtcaagtgattgatctgcttgcttcagagaaaaagctgatcgttggtcacaattgtttcctcgatattgcacatgtatacagcaaatttgtgggtcctcttccttcaacagctgagaaattcgtggcctccattaacagtcactttccttatattgttgacaccaaaatactcttaaacgtgaatccaatgttgcatcagcggatgaaaaagtccactacatcactgtc

SEQ ID NO: 88288 - DNA, 198 bp, Arabidopsis thaliana columbia
cggacgcgtgggcggacgcgtgggcggacgcgtgggcggacgcgtgggcggacgcatgggaaaagatccttgggttctgtggttcataatcagaattggctaacacaggggaaagcttgtgagacaaacctatatggagtcttgtaggcatgaccgctcttgtcacctggtggctcaaaaggcatcggataagctgtg

SEQ ID NO: 88289 - DNA, 417 bp, Arabidopsis thaliana columbia
cccacgcgtccgcggacgcgtgggatcactttataacaaattaaagtctacgttgagatatggctttaaaaacatggaagccattcataactgttgtttctctacaatttggatatgctggattgtcgatcatagcgaaattcgcactgaaccaaggcatgagtcctcacgttctagcgtcgtatcgccatatcgtcgctacaattttcattgctccatttgcctatttcttggatagaaaaatacggccgaagatgacgctatccatcttcttcaagatattgttgcttgggttattggaaccaacaattgatcagaacttatactacactggtatgaagtacacttccgccactttcacagctgcaatgacaaatgttcttcctgcctttgcctttattatggcatggatcctta

SEQ ID NO: 88290 - DNA, 583 bp, Arabidopsis thaliana columbia
  unsure (1)..(583): unsure at all n locations
acgcgtccgaggaaacgtccgcccacgcgtccgataaaaccgtctctgcccactgaaatatcaacttagctcataagcatatctaatcggagctcggagaaatttcggttgtgaagagaagaaagatggggaatttgttttgttgtgtgcaagtggatcaatcaacggtagcgataaaggaaacattcgggaaattcgaagatgttcttgagcctggttgccattttcttccatggtgtcttggtagtcaagttgctggttacctctctctaagggttcagcaattggacgttcgttgcgagacaaagactaaggacaatgtgtttgttaatgttgttgcatcgattcagtaccgtgctttagctaataaggcaaatgatgcgtactacaagctcagtaacacaaggggtcagattcaagcttatgtgtttgatgttattagagcgagtgtccccgaaggttgcttccttgatgatgtcttttgagccagaaggaatgatatttcccaaaccntttttaagggggcnctcagaaggcaaatttcgggcttncgggtttnnagttttccaaccnnccattttga

SEQ ID NO: 88291 - DNA, 530 bp, Arabidopsis thaliana columbia
gccgagcactaatacgactcacttagggaaagccggtacgcctgcaggtaccggtccggaattcccggttcgacccacgcgtccgggtcaccggccgtactatgagagattcaccgtgaagtcgaatattaagtgagagaagctccgattgatttcactttctgccgccaatttttgttttttcttcggtgagacgaagaagataccatgggtcgacctcccagtaatggcggtccggcgtttcgatttatcctgcctgaggtaacggagatggaagcaattttgctacagcataatacagcaatgccaggtcgacatattcttgaagctcttgctgataagtttagtgaatcacctgagcggaaggggaaagttgttgtgcagttcaagcaaatctggaactggtttcaaaataggcgatatgctttacgagcaaggggaaacaaagctcctgggaagctaaatgtatcttccatgccgcgtatggatttaccaaatcagatgagaagtgtgattcaaccattatcagt

SEQ ID NO: 88292 - DNA, 660 bp, Arabidopsis thaliana columbia
  unsure (1)..(660): unsure at all n locations
ggggtcaaaaagaacaaaaaatcaaattttgggggggcgacaccataaaataaagagaaaaagcagagtccataatccgttgcctccccccctccggcaactggaaaacacaaaaacagacgccacgatggatgaatgatttcgcaaatcgtcgagattttggaattcgatgaagagcgtatcaacctgggctttgtctttcttctccgacgaactttctcggcgagctgtttccgattgttatttatggaccaccgcgatttcgcttctcttaatccttctccttcatatcttcttttccactaaatttcgcttcttcacttctgctccttcttcttcttcttcttcttcttcttcttcctctccctctacagaatcagttcccgcgaactctcaatcaaggatatccaaactagtctctgatgaagatttgaaatttctgatcgagaatttggaggaggaaacaaatgattccacggagatatgggaacatgttattcacaaaagcaacgatcgcatttcatactctgctaaacgctgcnaacccaaagatggcggtnggtcctatgaaagacctaagtgtcacggtcttcgagggtgtctctgcagagattgtgagggacttttacatggaccatgattataggaaactatgggata

SEQ ID NO: 88293 - DNA, 912 bp, Arabidopsis thaliana columbia
  unsure (1)..(912): unsure at all n locations
atacgactcactttagggaaagctcgtacgcctgcaggtaccggtccggaattcccgggtcgacccacgggtccgcggacgcgtgggcggacgcctgggaaagaagagaaagcaaatcaccaagtcatcggagcgatcacagagaagaagaaaaccatggcggaagaagagaaaagcgtgatgaagcaagtgatggtggcgattgatgaaagcgaatgtagtaaacgcgctcttcaatggacgctcgtgtatctcaaagatagcctcgccgattccgacatcatcctcttcactgctcaacctcatcttgatctcagctgcgtctatgcttcctcttatggcgccgctccgattgagcttataaactcattgcaagagagtcataagaacgctggattgaatcgtcttgatgaaggaaccaaaatttgtgctgagactggggttactccaagaaaggtgttggaatttggaaatcctaaagaagcgatatgtgaagctgctgagaagcttggtgttgatatgcttgtggttggaagccatggtaaaggagcattacaaaggactttccttggaagtgttagcaattactgtgttaacaatgctaagtgcccagttcttgtggtgagaacaaaagcttgaagacctcttctcatgaaagagttcgaccaccctggcttgatgtgtgtgtgttgtaaacatattgataataatgctctgcttggttactattgtttgaagaaactttgtgagtaaacaccccttattttgtttgataatgacccagcattgccgtgttcggggcttgtgattgctgaaaaaaaaaaaacccaaagnnnnnnnnnnnnnnnnnnnnnnnnnnnnnnnnnnnnnnnnnnnnnnnnnnnnnnnnnnnnnnnnnnnnnnnnnnnncaa

SEQ ID NO: 88294 - DNA, 810 bp, Arabidopsis thaliana columbia
ccgtctgcaagtaccggtccggaattcccgggtcgacccacgcgtccgcggagcgatcacagagaacaagaaagccatggcggaagaagagaaaagcgtgatgaagcaagtgatggtggcgattgatgaaagcgaatgtagtaaacgcgctcttcaatggacgctcgtgtatctcaaagatagcctcgccgattccgacatcatcctcttcactgctcaacctcatcttgatctcagctgcgtctatgcttcctcttatggcgccgctccgattgagcttataaactcattgcaagagagtcataagaacgctggattgaatcgtcttgatgaaggaaccaaaatttgtgctgagactggggttactccaagaaaggtgttggaatttggaaatcctaaagaagcgatatgtgaagctgctgagaagcttggtgttgatatgcttgtggttggaagccatggtaaaggagcattacataggactttccttggaagtgtaaccaattactgggttaacaatgctaagtgcccaattattgtggtgagaacaaaggtttgaacacctattttcatgaaagaggtcaagaaccctggctagatatgagtgggttgtaaacatatcgataataatgccctggttggttactattgaacgaagaaactttgggagtaaacatgctttgattttggttggataaggaaagaacatttgccgtgtttcgggggtttgtggatttggcttaacccagagcactttaccacgatggcggccttctcggccatcaataaagaatatggggccgggccccc

SEQ ID NO: 88295 - DNA, 857 bp, Arabidopsis thaliana columbia
  unsure (1)..(857): unsure at all n locations
aaacgatgtcgtctctatctcgcgttctccgtggcaccttcaacacttgcccgatccgccggttttcctccgccgccaccggagtctccgagcccaccgcagtcactgccgcaatctcgcctccgcaaaagtcactaaccagtctcgtgaatggcgaacgaaaccccaaacggatcgtggagaaattcaagaaggcatgtgagtcggagcggttccggaccaacatagccgtgtacgatagaaccgtgcgccgtctcgtagccgcaaagagattacactatgtcgaagagattttggaggagcagaagaagtaccgcgacatgtcaaaagagggattcgcggcgaggatcatttctctgtatggaaaagccggcatgtttgaaaatgcacagaaggtgttcgaagaaatgccaaacagagactgcaagaggtcagtgttgtccttcaatgccttgcttagtgcatatagactttccaagaaattcgatgtggttggagaacttttcaatgagttacctggaaagttatcaatcaaaccagatattgtatcttacaatactttgattaaggcattgtgtgagaaggattctttacctgaagctgttgcattgcttgatcgagatttgggaacaagggactaaaacctgatatagttacattcaacacacttttactgtcttcggatctaaaggggccagtttnagctagggggaggggttttggccttaaaatgggtggggangnatttngccattggcatcngggctttccaatctaggcnncnttggtttngcccattggggggaatcnaaagnctngaaannnttttggggccctnagggcntngggccaaaccc

SEQ ID NO: 88296 - DNA, 537 bp, Arabidopsis thaliana columbia
  unsure (1)..(537): unsure at all n locations
nnnnnnnnnnnnnnnnnnnnnnnnnnnnnnnnnnnnnnnnnnnnnnnnnnnnnnnnnnnnnnnccacgcgtccggcggtggtgaaaatggctcgaaacgactcgcgatctacgtcgccgtctcaccgccgacggtactctcgctcgcctgtgactcatcgtagcagccgtcgtaccaggcgcgaccgcagccgctcaccctacacatcaaggcataagaagagcagatctcctgcaccaaggcaacaccaaagggatagaagtagttcattgtctccttccgagcatagaattgcgattgaagtgaagaaagaacaggaagacaaggcaagattgcagcatgaggcggagctcaagcgactagaagaagagactgcacagcggattgaggaagcagtaaggaaaaatgtagaggaaaggatgaaaaccgaagaagttaaagaagaaattgaaagacggacaaaggaagcttatgagaagatgtttcttgacgtggaaatacagctgaagaaagaaaaagaagctgctctaaacgagg

SEQ ID NO: 88297 - DNA, 930 bp, Arabidopsis thaliana columbia
  unsure (1)..(930): unsure at all n locations
acgatctttttgggtaatagggtttctaatctctgggacaaactccaatcgtttcgaatccgcaatgcccagatggtcgatcaatagacgcgtcgagaaactccaattccaaaggctaaatctttgagatctttttttttataaatttctctgaaattaataaactttgaggggaaatgagcgcttcgaggttcgtaaagtgcgtgacggttggtgatggagctgtcggaaaaacttgtttgttgatttcttacacaagcaacactttccctacggattatgtgcctaccgttttcgataatttcagtgccaatgttgtggttaatggaagcactgtgaatcttggattgtgggacactgcagggcaagaggattacaatagattaagaccactgagttaccgtggagcagatgttttcattttggccttctctcttatcagtaaagccagttatgaaaacgtctccaaaaagtggatcccggagttgaaacattacgcgcctggtgtccccatcgtccttgttggaacaaagcttgatcttcgagatgataaacagttctttatcgaccatcctggtgctgttccgattactactgctcagggagaggagctgaggaagcaaataggagcacctacttacatcgaatgcagttccaaaactcaagagaatgtgaaggcggtgtttgacgcagccatccgagtggtgttgcaaccgccaaagcagaagaagaagaagagcaaagcgcagaaggcatgctccattctatgatgattggaaatctctgtttttatgtatttggttttggtatattaatcttatatcaatgaatgaattaatgtgttaatggacagacacccaagtttgactggtcctttttgttcttaatattaatggagtttgtcggnnnnnnnnnnnnnnnnnnnnnnnn

SEQ ID NO: 88298 - DNA, 549 bp, Arabidopsis thaliana columbia
  unsure (1)..(549): unsure at all n locations
caaccacttcaaatcaaggtctcttcttcagaattatcagttctcgttgaagaaaaagaagaagaagtagttaaaggagaagcagaacccaataaagatagtgtcgtctccaaagcagaaccagtaaagaaaccgagaccttgcgagctctacgtgtgtaatatccctagaagctacgacattgctcagcttcttgacatgtttcagccttttggaactgtaatctctgtagaggtatcgcgaaatcctcagacgggagagagccgtggaagcgggtacgtgacaatgggttctataaactctgcccaaaatcgccattgcttcttcttgatgggacagaagtaggtggtcggggaatgcggggttagggacctctgtttgacaattgattcccggggccaaggaggaaccccctgaaggctttgacctcaacttcccaaggaagattcttcgttttccggaagcccacacaaagggnttttttgggaaantccccttggtttccnaaaaccttntngtttttnnaaacccccttttgaaggtttttgc

SEQ ID NO: 88299 - DNA, 859 bp, Arabidopsis thaliana columbia
tacgactcactatagggagagctgctacgcctgcaggtaccggtccggaattcccgggtcgacccacgcgtgcgggagaagcagaacccaataaagatagtgtcgtctccaaagcagaaccagtaaagaaaccgagaccttgcgagctctacgtgtgtaatatccctagaagctacgacattgctcagcttcttgacatgtttcagccttttggaactgtaatctctgtagaggtatcgcgaaatcctcagacgggagagagccgtggaagcgggtacgtgacaatgggttctataaactctgccaaaatcgccattgcttctcttgatggaacagaagtaggtggtcgggaaatgcgggttaggtactctgttgacatgaatccaggaacaagaagaaaccctgaagtcttgaactcaactccaaagaagattctgatgtacgaaagccaacacaaggtctatgtcggaaatctcccttggttcacacagcctgatggtttgagaaaccactttagcaagtttggcacaatcgtaagcacgagagtgttacatggtcgtaagaccgggagaaacagagtctttgcctttctttcttttacaagcggtgaagaacgtgatgcggctttatcattcaatggaacacaatatgaaggtcgcagaatcatcgtcagagaaggtatcgagaagagtgagtcgtaaaccaactgttctgcttttgctgcaaagacatctcttggacacaaacaatgtgtaatgaatgtcttctgatttcttcgacaagtaacctttacatattatatccttctcgattttgtttatcacccattatatctacctgtataattctcttttcgatc

SEQ ID NO: 88300 - DNA, 1017 bp, Arabidopsis thaliana columbia
  unsure (1)..(1017): unsure at all n locations
ttttttttttttanatgtntgaataattttttattttttgatttataactntgggccttttgtttatttcatgaaaaacaaaacctgctacgcgaaagagagtgtctcatctgacgtagcgaataccgagcagggattgtaacgggttaaatgacccgacccgatttgttctattaatttctatttcatttcttttttttttaatcattcttctcaaataatttactttctggtccttcgataatggcggcctcctgcttcgcaattcccttatcttcttcttctcgatcgtctcacaatgcaattcccaaatacaaaaccctaatctcttcttcttcttactcttacttagaatctctgaaacttcaattctcttcttccaattcttttcatcactcttctctttctcgtccctttgtagctcaaccacttcaaatcagggtctcttcttcagaaattatcagttctcgatgaaagaaaaagaagaagatgttgttaaagggagaacaaaacccaataaagattgtgtcgtctccaaagcagaaaccagtaaagaaaccgagaaccttgcgagctctacgtgtgtatatccctaaaagctacaacattgctcaccttcttnacntnttcacctttnggaactgtanctctgtanangtggtactctnncaaattgatngatcctacantgcctttataaaattcaaattttactcttncacttactttgaaaatcaaaatcccccattntntttgaaaatcttacttganttcnncaaaaaaacaacntgnggtnaccttgnatttngganatnacattttttgaangntctgcnggaatnattgcggttccaatcccnaaggaaaaaccngaacggtcttanntgntcaaaccccnaaacccttgtcttgagaanntaaccngaacaaanctccctccccggtnattaataatcngggttgtcnaaaagnatnngggganggttgtcntnanaaccaaaaaaaacctttntncct

SEQ ID NO: 88301 - DNA, 363 bp, Arabidopsis thaliana columbia
ctttcttctctctctctctcgtttggatctggccggtgattttctcccgacggcgataagtttgttgcatgaacgccggtgatggcttctgtttgcgtcaacaatgttactgtttctcaggattttcctacttacggatgtttcaatccacgagcttctttcagccgtgacgacggtggtcggagttctggatccgtcgcatcggagattccgaaggaggaaacagcagtcggagctggtgatttcgagtttaggttagaggaggatccagtcggaatgctcccagccgatgagcttttctccgacggtaaactcgtgacgaagcagcaacaacaacagacgacgggagatcggcgggaaatg

SEQ ID NO: 88302 - DNA, 909 bp, Arabidopsis thaliana columbia
  unsure (1)..(909): unsure at all n locations
nnnnnnnnnnnnnnnnnnnnnnnnnnnnnnnnnnnnnnnnnnnnnnnnnnnnnnnnnnnnnnnnnnnnnnnnnnggggatcgttttgttaccaactacagaaagatggcaagcaagatcaagcgacaagggtttatccagaatgtgtcaactccaccaagaaacatgcctccggtgacagaaatgggaagtgctgagaagagagggaggaaaggaggggaagcaggagaagaggatgtagacattggagaagatataccagttgaggattatccatcagtggagattgaaagggatggtacagctgccgctgctagtggtggctctagttcttctggcagcttcagttcgagtggcagttcttcttctagtgattcagagtcagggagttcatcaggaagtgattcggatgcggatagtgtgcagtctccatttgtggaagcaaaagaagccccgtaataattgttgaccgtacgttgaaatatgcttaacaactccaggagactagaatcggagaatttgggtggaggtggaacctttgtgtaaatggaagggaaaggaaggaagggaaactcgaaagaaaagattttgagtgttagggaaacagtagatagaggaaaacatgtaaagggtagttagtgaatttctaggttgagcaaagaggtggaagttttctgtcctcttcctctttcagattaaggttctttagattattggtgaccccatgaacagagtgacttagtaagaaaagatcgagaggatctaagaaaaatgtagtggagaatgtgaaaatggttcgaagaaaaatattatctctgttcgtttcgtttaagaaccaaaacacaaagggaggccgctctagaggatccaagcttacgtacgcgtggatgcgacgtcntagctcttctag

SEQ ID NO: 88303 - DNA, 706 bp, Arabidopsis thaliana columbia
ctctatacgactcactatatggaagctggtacgcctgcaggtaccggtccggatttcccgggtcgacccacgcgtccgtacggctgcgagagacgacagaaggggagaagaagaaaaatcgatggcggggatactagtgaacaatatcctccctcaacctccgattctccgatcgctttcttcttcttcgcgaagaagttcaattcgaaccctagttatggtcaaagcttcttcctctgaaccttccgagtctgtttcagtctccacgaagaccagtgacgacactggagctgttgttgtgttcactgctcctcctggtttcaagccaccggagccaaaacggttcgccgtcaaatccggaaaactcttcgatgtcttgggtgcagcaattggattgtttttccgattcggcactggtgttttcgtttctgggtactctgcatcttttgtgtctaaggaagagattccagctgatcagtatgcgttgcgtttaggcgggatcacggtaaaggaaactgctaaggtcgggcctcgtcctgagaaacccattgagatatactagtttgaaggctgtcccttctgccggaacgtcagggaaatggttgcagtgttggctcttgaaagtctctaccacccttgtccaagagggagtccaaaattccgcccgaacgctaaacacatgggcgggaaacatcagtttccgtac

SEQ ID NO: 88304 - DNA, 598 bp, Arabidopsis thaliana columbia
ttaggtgccactatagaagactatgacgtcgcacgcacgcgtacgtaagctcggaattcggctcgaggtaaaaaggagagaggagagaagaaagaaaaggaaaagacccaaactttgagaaacaccttcattctcttccttccttcatcaaagcttaaccttttttaatttttatcctcgttttttcaattcgcgtgaagagacagagagagagaaagataaagctagaagagaatcgacattacgaatcttttgttccagatcgtgagagaggaggagttggaagaatgaagatgactattgggtctttgttccaaccctaattttgcagattaatttcgtttttgttgatttctgttttgggtttgcgttgctgattccggtggattaaagggttctttttggagagcacaaatttgttgggtttttttttggggaaagagaattaaaattttctcctttagagtcggcgtttgggttgagagagattattatagtttttagggttttggatttctgaattggtgattatcgatggagcctcgtgtgggaaacaaatatcgtctcggccggaaaattggaagcggttcatttggag

SEQ ID NO: 88305 - DNA, 527 bp, Arabidopsis thaliana columbia
  unsure (1)..(527): unsure at all n locations
cannnnnnnnnnnnnnnnnnnnnnnnnnnnnnnnnnnnnnnnnnnnnnnnnnnnnnnnnnnnnnnnnnnccacgcgtccgacttagtccgccacactcgataatgatccatcaagctttagctctccctcgtcctattctcaccagaggatttgtgtctaatggtggcggtatgtttgtccatcaatgtcgaacaaaaacccctagggttacattttgcgctgctgatgatcagatagccagttccaagtcgaacaagacaaggaaagtagtggagcatgtgtgtttactcaaagcaaaagagggtttatctgaggaagtagaaaaagatatgcttgactatctttacacaactcaataccaaatgagaggcattgttgctatatctgttggttgtatcggtgatagaaacaatgaatatttcacgcacgctctctacatgcgattccaaaagaaggaagaccttgacaagttctatgagaaccctttcttcttgaaagttctcaatgaatatgttacaccattctg

SEQ ID NO: 88306 - DNA, 1860 bp, Arabidopsis thaliana columbia
acaaaaggaaataattagattcctctttctgcttgctataccttgatagaacaatataacaatggtgtaagtcttctcgctgtattcgaaattatttggaggaggaaaatggagtgtgttggggctaggaatttcgcagcaatggcggtttcaacatttccgtcatggagttgtcgaaggaaatttccagtggttaagagatacagctataggaatattcgtttcggtttgtgtagtgtcagagctagcggcggcggaagttccggtagtgagagttgtgtagcggtgagagaagatttcgctgacgaagaagattttgtgaaagctggtggttctgagattctatttgttcaaatgcagcagaacaaagatatggatgaacagtctaagcttgttgataagttgcctcctatatcaattggtgatggtgctttggatcatgtggttattggttgtggtcctgctggtttagccttggctgcagaatcagctaagcttggattaaaagttggactcattggtccagatcttccttttactaacaattacggtgtttgggaagatgaattcaatgatcttgggctgcaaaaatgtattgagcatgtttggagagagactattgtgtatctggatgatgacaagcctattaccattggccgtgcttatggaagagttagtcgacgtttgctccatgaggagcttttgaggaggtgtgtcgagtcaggtgtctcgtaccttagctcgaaagttgacagcataacagaagcttctgatggccttagacttgttgcttgtgacgacaataacgtcattccctgcaggcttgccactgttgcttctggagcagcttcgggaaagctcttgcaatacgaagttggtggacctagagtctgtgtgcaaactgcatacggcgtggaggttgaggtggaaaatagtccatatgatccagatcaaatggttttcatggattacagagattatactaacgagaaagttcggagcttagaagctgagtatccaacgtttctgtacgccatgcctatgacaaagtcaagactcttcttcgaggagacatgtttggcctcaaaagatgtcatgccctttgatttgctaaaaacgaagctcatgttaagattagatacactcggaattcgaattctaaagacttacgaagaggagtggtcctatatcccagttggtggttccttgccaaacaccgaacaaaagaatctcgcctttggtgctgccgctagcatggtacatcccgcaacaggctattcagttgtgagatctttgtctgaagctccaaaatatgcatcagtcatcgcagagatactaagagaagagactaccaaacagatcaacagtaatatttcaagacaagcttgggatactttatggccaccagaaaggaaaagacagagagcattctttctctttggtcttgcactcatagttcaattcgataccgaaggcattagaagcttcttccgtactttcttccgccttccaaaatggatgtggcaagggtttctaggatcaacattaacatcaggagatctcgttctctttgctttatacatgttcgtcatttcaccaaacaatttgagaaaaggtctcatcaatcatctcatctctgatccaaccggagcaaccatgataaaaacctatctcaaagtatgatttacttatcaactcttaggtttgtgtatatatatgttgatttatctgaataatcgatcaaagaatggtatgtgggttactaggaagttggaaacaaacatgtatagaatctaaggagtgatcgaaatggagatggaaacgaaaagaaaaaaatcagtctttgttttgtggttagtg

SEQ ID NO: 88307 - DNA, 525 bp, Arabidopsis thaliana columbia
  unsure (1)..(525): unsure at all n locations
nnnnnnnnnnnnnnnnnnnnnnnnnnnnnnnnnnnnnnnnnnnnnnnnnnnnnnnnnnnnnnnnnnnnnnnnnnnnnnnnnccacgcgtccgcatttcttttccatgactttcctcttatcaagaacatttatttctctcactctcagaccttcttgttcgatttccatggcgaatttaacgacgaacgctaaaactcgcctgagaggtgttgtattcgatatggacggaaccctgactgttccggtcatcgatttcgccgcaatgtatagagctgttcttggtgaagatgcttacaagcgaatcaaagcagagagccctagtgggattgatattctgcatcatattgagtcgtggagtcctgataaacagcagaaggcgtatgaaatcattgctgattatgagaaacaaggaatagataagcttcaaatcatgcctggtactgctgaactatgtggcttccttgattccaaaaagataaagagggggctaattacacgcaatgttcaaaaggcaatcgacatct

SEQ ID NO: 88308 - DNA, 504 bp, Arabidopsis thaliana columbia
acttttcaggggaatgctgatgcactgtcccaacctcacggcttctctaacaatcccttcatatttaccattttgccactacactagacaatttcgtccttctcatttccgatcatctgataaaaacccgaatctcgtttctatcatccgagcaaaacccagaatttctcattcgcttaggtgctttgtatcatcttcaatggcgactcctcctccgacgcagagcagcgaaaccaaaccttactctgttctttttgtctgtctcggaaacatttgtcgcagcccagcggctgaaggtgtctttagagatatcgtgaagaagagaggtctcgattccaaattcaacattgattccgctggaacaattgattatcacgaggggaatatggcggatccaagaatgagaagtgctgcgaaacgtcgcgggattgagataacatcactatccagaccgatcaaggcatctgatttcagagaatttgatctcattcttgcaatggatga

SEQ ID NO: 88309 - DNA, 513 bp, Arabidopsis thaliana columbia
  unsure (1)..(513): unsure at all n locations
ctnnnnnnnnnnnnnnnnnnnnnnnnnnnnnnnnnnnnnnnnnnnnnnnnnnnnnnnnnnnnnnnnnnnnnnnccacgcgtccgcaaggtgatcattttttttattatctcattcaaatcttgcacatgcatatttattatagtactagtataatataaatatggaaatttgttgtatacatattaaatgcgtgagtcagtgttgaagaatacgcatacatattgtaatttttgtttttgagaacaaaccagagtattcgcttcatagttctgtttttcgaggtgaccaaattttttttcattatctaattaaaatcttgcacatattgacatgcatatgcatatatatactcctttgaccaaaaatgattacaatctctttatttgttttaaatttgtaaagtggtgaattgtgatcctgctatatacacagaatttatttttgaataaaatagaggagaataaacatatttgcgtgtttaaatacattaaaaaattatcattagggttttt

SEQ ID NO: 88310 - DNA, 1212 bp, Arabidopsis thaliana columbia
  unsure (1)..(1212): unsure at all n locations
annnnnnnnnnnnnnnnnnnnnnnnnnnnnnnnnnnnnnnnnnnnnnnnnnnnnnnnnnnnnnnnnnnnnnnnnnnnnnnnttggccgcgcaaacttgaaagttgaaacaaggatattgttgaatcaataagagagaacagatgatattactacacaataccagaaataaaagagaaaaactcagcaaagaagtcaaaatagtccaacttgtataaaataccaaaaatcctgcaaacttcttgactagtagttgaaacttgtcccacgcttttcttttgaacaacgcttttaggatggagggcagacacttgtgctggtcacaaagatggcagttgggctgcctggagatggaggattctgcgtcagcagcgaagcatgtggaccagctattgaaacatcatcagggtcacttgcagaatatattttaacctcttcaagaccaagttgccgcctgatcaagtccttgttactctgaaggacttcgatctctccaaaaggtaacctcaagttcagagcctgagtgccaatagatattgcctcgtccttcttgaatttaaggaaaggcatgcaaaccttttgaatggctttcaagttttttccctcctgcaacaatgttgcacttagttctgcaagcatctctgtatccggtgggaaactacaggtttgctggtcaaatctactgcggccgcgaattcgcggacgcgaggaagtgttgggtcttttggataacaataatccaaactgaaaatggctaagtcatatggagctatcttcctcttgaccctcattgtcctcttcatgcttcaaaccatggttatggcctcaagtggatctaatgtgaagtggagccagaaacgttatggaccaggaagcctgaaacgtacccaatgcccatcggaatgtgataggaggtgtaaaaagacacagtaccacaaggcttgcattacgttctgcaacaaatgctgcaggaagtgtctctgtgtgcctccgggttactatgggaacaaacaagtttgctcctgctacaacaactggaaaactcaagagggtggnccaaaatgcccttgnaaaaatctccctttcgttcccttttttntaattaaaaaatttttcaacttttacctaaaatttccnttgggtcaantggttttatctaccttttattcccaaatggtngnaaatgggtntgggcanccccntttnggggtttt

SEQ ID NO: 88311 - DNA, 663 bp, Arabidopsis thaliana columbia
  unsure (1)..(663): unsure at all n locations
cganatntgcttgtttnaacgtnnttnnccggggggactcnggttgctggnaaatttacnnnccggnggatcccgnccncggggttttggttctttgggaaccattccccaaactggaaatggctaagncattggggncttnttccctcttggccctcattgnccctctttaatgcttcaaacccatggtnatggccntcaagtgggatctaatgtgaaattggaccccaggaaccgttatggncccagggaancctgaaacgtaccccaatgcccatcggaatgtgataggaggtgtaaaaagacacagtaccacaaggcttgcattacgttctgcaacaaatgctgcaggaagtgtctctgtgtgcctccgggttactatgggaacaaacaagtttgctcctgctacaacaactggaaaactcaagagggtggaccaaaatgcccttgaaaaaatctcccttcgttccctttttataataaaaattttcaactataactaaatttcctttgatcaatgttttatctactttattcctaatgttgtaatgttatgtcactccttttccgggattttgttctaaatcataaaaaaaatgagagtggccgcggccgcgaattcgatatcaagcttatcgatacagtcgacccgagggggggccc

SEQ ID NO: 88312 - DNA, 712 bp, Arabidopsis thaliana columbia
  unsure (1)..(712): unsure at all n locations
gcccnttagactggggcccccgggttcaggattccggccccctttcaatcccccaggggctaaacctcgtttggggggtttgggggggtgttgggttctttggataccaatnccccaaccctggaaatggctaggccatatggggctatctccctcttgcccctcattgccctcttcatgcttccaaacccatggttatggcctccaagtggatctaatgtgaagtggagccagaaacggttatggaccaggaagcctgaaacgtacccaatgcccatcggaatgtgataggaggtgtaaaaagacacagtaccacaaggcttgcattacgttctgcaacaaatgctgcaggaagtgtctctgtgtgcctccgggttactatgggaacaaacaagtttgctcctgctacaacaactggaaaactcaagagggtggaccaaaatgcccttgaaaaaatctcccttcgttccctttttataataaaaattttcaactataactaaatttcctttgatcaatgttttatctactttattcctaatgttgtaatgttatgtcactccttttcggattttgttctaaatcctaaaaaaaatgagagtggccctatgaatgatatttttcatgaaaaaaaaaaaaaaaaaagggcggccgctctagaggatccaagcttacgtacgcgtgcatgcggcgtcatagttatactatagtg

SEQ ID NO: 88313 - DNA, 624 bp, Arabidopsis thaliana columbia
  unsure (1)..(624): unsure at all n locations
gaattcggcgccacgcgtccgttagacctttttatcctaatttcataactagtttgaggagatttagaggagtgggtggttctttggataacaatatcccaaactgaaaatggctaagtcatatggagctatcttcctcttgaccctcattgtcctcttcatgcttcaaaccatggttatggcctcaagtggatctaatgtgaagtggagccagaaacgttatggaccaggaagcctgaaacgtacccaatgcccatcggaatgtgataggaggtgtaaaaagacacagtaccacaaggcttgcattacgttctgcaacaaatgctgcaggaagtgtctctgtgtgcctccgggttactatgggaacaaacaagtttgctcctgctacaacaactgggaaactcaagagggtggaccaaaatgcccttgaaaaaatctcccttcgttccctttttataataaaattttcaacataccaaattncnttgntcaatggttaaccnacttatccaatgtgaatggatgcacncccttcgggttggncaanccaaaaaatggggggccntgatgtcggcggatccgaccnggggcccngnttangggcgaccgggggnccagttttnc

SEQ ID NO: 88314 - DNA, 779 bp, Arabidopsis thaliana columbia
  unsure (1)..(779): unsure at all n locations
nnnnnnnnnnnnnnnnnnnnnnnnnnnnnnnnnnnnnnnnnnnnnnnnnnnnnnnnnnnnnnnnnnnnccacgcgtccgcggacgcgtgggcgcgtgggcggacgcgtgggcggacgcgtggctctctcagtacacttcttttcatacctcaagagactaaaactagtttgaggagatttagaggagtgtttggttctttggataacaatatcccaaactgaaaatggctaagtcatatggagctatcttcctcttgaccctcattgtcctcttcatgcttcaaaccatggttatggcctcaagtggatctaatgtgaagtggagccagaaacgttatggaccaggaagcctgaaacgtacccaatgcccatcggaatgtgataggaggtgtaaaaagacacagtaccacaaggcttgcattacgttctgcaacaaatgctgcaggaagtgtctctgtgtgcctccgggttactatgggaacaaacaagtttgctcctgctacaacaactggaaaactcaagagggtggaccaaaatgcccttgaaaaaatctcccttcgttccctttttataataaaaattttcaactataactaaatttcctttgatcaatgttttatctactttattcctaatgttgtaatgttatgtcactccttttcggattttgttctaaatcctaaaaaaaatgagagtggccctatgaatgaattttttacctagcttacgggccggnaatttgggggggnggnntttccccaaaanggncaanggttngg

SEQ ID NO: 88315 - DNA, 718 bp, Arabidopsis thaliana columbia
gcgataaagagatgggtggagaagagagatcaggagatggagaaaaaagaggggaagaagtagttgatgctggttctctcttcgtccttaaatccaaagggacatggtggcactgcggattccacttgacgacgtctatagtggcgcctgcgctactgagtctaccgtacgccttcaagttcttaggatgggctgccgggatatcttgtctggtcggaggagcagccgttactttctactcgtacactcttctttctcttactctcgaacaccacgcttctctcggcaaccgttacctccgcttccgtgacatggctcatcacatcctcagtccgaaatggggaaggtactacgttggaccaatacaaatggcggtgtgctatggtgtggttattgccaatgcgctcttgggagggcaatgcctaaaggcaatgtacttggtagtgcagccaaatggggaaatgaaactctttgagtttgtgattatttttggatgcttacttttggttttggcacaattcccatcctttcactctctacgatacatcaactcactgtctctcctcctctgcctcctctacagtgcttctgccgctgctgcatccatctacattggaaaagaaccaaatgcaccagagaaggactatactatagttggtgatccagaaactagagtgtttggaatctttaatgctatggctattattgctactacata

SEQ ID NO: 88316 - DNA, 729 bp, Arabidopsis thaliana columbia
tgatacttcagctctacacgactcactattgggaaagctggcacgcctgcaggtaccggtccggaattcccgggtcgacccacgcgtgcgcgaaaagacagagaaacaaatagaggcagagagcagaagaaagacgaaacagaggattttcatagagaatcctctttcttcctcctttcttcgccttcttctgttcttcttcttctcctgggtcttgaagatacatgaaacaacatctcattgttatgaatgttgatgcattcttttatgtaaacttaactttttacaggtgacctctctgaaagattgtaaggttccttacaaaaatttgatttcgtttggtgaatgaaatagttagaaattctccaaaacaaaatatgggtggctgtgtttcttctcagagaaaactcagtaacaagcttcaacagaagaagcagaaacgcggcagatctggcaaatgtcggtccaaaatatcggcttctatgcccgatgttcctatgaaacgcatgagtaatgcgagtgttagggattttgcggtgagcgaatatgttcatcttgatttcgacaattgtgcagccaagatgatgtgtaagagagctgagatgtctaatgctaacttccatttaactcagcttcaatggaactgcagccaaatcgatggaaaccgaatttcacatgaggaggcttggtatgattcctttagctacatcgattctgattctgatgatg

SEQ ID NO: 88317 - DNA, 735 bp, Arabidopsis thaliana columbia
agaaaagagtaattgaacaaaagaaagaaaaactgataatgaagggtcttcatctccacctcgtcctagtcaccatgacgatcgttgcctccatcgccgccgctgcaccggctgctcccggaggagctctggctgatgaatgcaaccaggattttcaaaaggtgactttgtgtttggactttgcgaccgggaaggcaacaattccgtctaagaagtgttgtgacgctgttgaagatatcaaagaaagagatccaaagtgtttgtgtttcgttatacaacaagcgaagacaggaggacaagccttgaaggatcttggtgttcaagaagacaaactcattcaactcccaacttcttgtcagctccacaacgctagcattaccaactgtccaaagcttctagggatttcacctagctcgccagacgcagccgtattcacaaacaatgccacaacaacaccggtggcaccagcaggaaagtctccggcaactccagctacgtccacggataagggaggatcagcttcagcaaaggatggtcacgcagtcgttgctctagccgtcgctttgatggccgtctcctttgtcttgaccttgcctagacatgtcacattagggatgtaatcttttcttatgaagttggttggtgcttttgtttttgtcccttttgtttcaaaacttatctttcaagtgtgtttctttgttcggacatttgttgtaatgagtcaacttcccactc

SEQ ID NO: 88318 - DNA, 862 bp, Arabidopsis thaliana columbia
  unsure (1)..(862): unsure at all n locations
nnnnnnnnnnnnnnnnnnnnnnnnnnnnnnnnnnnnnnnnnnnnnnnnnnnnnnnnnnnnnnnnnnnnnnnnnnnnnnnnnnnccacgcgtccgcccacgcgtccgtacggctgcgagaagacgacagaagggggacgtatagatcgaagacgatgatgagctctgcatccgccatgaaagctggtggatttttgcttctgcttaccattctaacattagcttatgcgaagaagtcaggtgatgtgacggagttgcagattggtgttaagtacaagcctcagaaatgtgatctccaggctcacaaaggggataagatcacggttcactatcggggaaagttaactgatggaactgtctttgattcaagttttgagagaggtgaccctattgagtttgagcttggaactggtcaagtcatcccaggatgggaccagggtttattgggagcttgtgtaggtgagaagagaaagttgaaaatcccatccaagcttggttatggtgataacggctcaccaccaaaaatcccgggtggggcgacactgatattcgacaccgagcttgttgctgtgaacggagaaccatccagcgaagcgaaatcaaagaatgagctttgattacaccataattgtttttcatttaaaaggaaaccttgagtagtcatcgatgttggcatttgaatcttaaacagcctagaatcatttactttgctagttgaagacaataattatattttggtcataacattagttatgttggcagttctaaaaaaaaaaaaaaaaaaaagggcggccgctctagaggatccaagcttacgtacgcgtgcatgcgacgtcaaagtcttctatannnnnnnnnnnnnna

SEQ ID NO: 88319 - DNA, 705 bp, Arabidopsis thaliana columbia
tatacgactcactttagggaaagctcgtacgcctgcaggtaccggtccggaatttctttcgtataatcagtgacgtagagatcgaagacgatgatgagctctgcatccgccatgaaagctgttggatttttgcttctgcttaccattctaacattagcttatgcgaagaagtcaggtgatgtgacagagttgcagattggtgttaagtacaagcctcagaaatgtgatctccaggctcacaaaggggataagatcaaggttcactatcggggaaagttaactgatggaactgtctttgattcaagttttgagagaggtgaccctattgagtttgagcttggaactggtcaagtcatcccaggatgggaccagggtttattgggagcttgtgtaggtgagaagagaaagttgaaaatcccatccaagcttggttatggtgataacggctcaccaccaaaaatcccgggtggggcgacactgatattcgacaccgagcttgttgctgtgaacggagaaccatccagcgaagcgaaatcaaagaatgagctttgattacaccataattgtttttcatttaaaaggaaaccttgagtagtcatcgatgttggcatttgaatcttaaacagcctagaatcatttactttgctagtcttaaacagcctagaatcatttactttgctagttgaagacaataattatattttg

SEQ ID NO: 88320 - DNA, 550 bp, Arabidopsis thaliana columbia
cagctacaataccactcactctagggaaagctgctacgcctgcaggtaccggtccggaatttccgggtctacccacaggtgcggatcattccattagatcttcttgatccctaagcaagtctcttcgttaacttttgtctttctccttaaaatggctacagaggagatagacatgagttattgggacgtgtcatggggagaattcaatgaagacaagaactcgtctatcttctgcgagtcacaccctcacatagtaaattcgcacgggatatgggaggttatgactttcaagagagggatgaacttctgggaatatccgctcccgaatctcgagatcttaatcttttcttactttttttatatggggggctttctccacatctccattcaacaaaattgggctcccgggatgcctaagatccacattatgtaaggatgcccgggggttaattgtgaagcgcaacccttcccgtttgaagcaaccagcgttgggaactcctgagcttttgttttccctgggtaatacccggcccgaaggggggcgccacaa

SEQ ID NO: 88321 - DNA, 513 bp, Arabidopsis thaliana columbia
atgatacttcagctctctacgactcatatagggaaagctggtacgcctgcaggtaccggtccggaattcccgggtcgacccacgcgtgcgctcttgctggctttaatcacaaattgaggatcttgctggaagctgtcattcaaaagatagcaaaattcgaagttaaacctgacaggttttccgttatcaaggaaacagtcacaaaggcataccaaaataacaaattccaacaaccacatgaacaaggggcgaattactgctcactagtattacaagatcagatttggccttggacagaggaactagatgctctttctcatttggaagctgaagacttggctaatttcgttccgatgctattatcaaggacatttgttgagtgctatatagcagggaatgttgagaaggacgaacctgagtcaatggtcaagcatattgaagatgttctttttaccgactcaaaacctatttggtcgtccgttattttcatcccagttcctgaaaaaaagggta

SEQ ID NO: 88322 - DNA, 431 bp, Arabidopsis thaliana columbia
gacaaataaagttttgagttttagctctcattcggtagatttagtgatttacgcgttgttggtgtctatgcttcttcgcatagcttagattttgttattttcgtaattcgtttaatgtttttgaggaaagcgatgatatgaaattgtcgccccaggcttaatctgcatccattacgatggttgtaacatggtgattgactatttttgtctgattctctcaaatcgtttattatgattctgttatactggttgcgtatggatatgatgaaatggcaataatgctttgtgacacccagtctgatcttcgtgattgatttgccatattttctgatcctaattcttcttcagttttgtgaattttgatccacagttttgatctttgaaagggaggaatgaggatataattccatacgtctgcaaatctgaaacac

SEQ ID NO: 88323 - DNA, 876 bp, Arabidopsis thaliana columbia
  unsure (1)..(876): unsure at all n locations
nnnnnnnnnnnnnnnnnnnnnnnnnnnnnnnnnnnnnnnnnnnnnnnnnnnnnnnnnnnnnnnnnnnnnnnnnnnnnnnnnnnccacgcgtccgagcgattatggcgagcaagatgagtctccgttactctctctttttgatcttcttctctctcatttcactccaaggttttgccaagaagaccggagatgtgtcggaattgcagatcggtgtcaagtttaagccaaaaacatgtgaagttcaggctcacaaaggtgatacgatcaaggtgcactatagggggaaacttactgatggaactgtattcgattcgagttttgaaaggggtgatccgtttgagtttaaattaggaagtggtcaggttatcaaaggttgggatcaaggtttgctaggagcgtgtgtaggtgagaagaggaagttaaagatacctgctaaacttggatatggagaacaaggctctccacctactatccccggtggtgcaacactgatctttgacacagagcttattgcggtaaatgaaaaaccagctggtggtgaagaatacggaggggatgaagatgatgagggatatggaaatgacgagctatgatccggtctccgttctttaacgattttgcttcaagagttctctggataatacaaagaaaccatctatgggagggttttttctagtcttttggcttttaggcgtaaagactgcagatgattgttatggtgatatttaacattttcttttcttaaaaaaaaaaaaaaaaaaaaaaaaaaaaaaaaaaaaaaaaaaaaaaaaaaaaaaaaaagggcggccgctctagaggatccaagcttacgtacgcgtgcatgcgacgtcaagactcttctataggtgcacctaa

SEQ ID NO: 88324 - DNA, 377 bp, Arabidopsis thaliana columbia
cgattctcggccgtagttagttatcctccgaatagatttccgattctctgtttcttctagattgaatttaaaaaccctacttttgaattttcacatgggagaacaatcaccttctcaaccatcgactcaatgccaaagtcatccacaatcacccaaacccgatactcataacctaatcccaccggaatccaccgatgaatgtctcgattcagctggagtttcaggctcaatcgtctcatctaccacaatcgacgctcgacggatcactgaactaggcaatgtatcgtctccgccgtccaaaatccctctccgccctcggaaaatccggaaactcacactcgacggagacgtctccggtgaagattataaggcggagg

SEQ ID NO: 88325 - DNA, 406 bp, Arabidopsis thaliana columbia
accacgcgtccgacgggatctagtagatccgagtctgataacttttgagagtagatccggaacgatggggaaaagaggaagggcttgtgtagtggtacttggagatcttggtcgaagtcctcggatgcaatatcacgctctttctcttgctcgtcaggcatcatttcaagtggacattgttgcatatggaggttctataccccatgaagctgttctaaatcacccatcaatccacatccataccatggcgcagcctcgattcattcagtactttccaaagatactttatcctgtaactctcttgctcaaggcatttattcagtttacaatgcttctctggtttcttttcgttaaagtaccagcgcctgacattttcttggtccagaatcctccttccgtcccaact

SEQ ID NO: 88326 - DNA, 528 bp, Arabidopsis thaliana columbia
agctacaatacgactcactttagggaaagctcgtacgcctgcaggtaccggtccggaattcccgggtcgacccacagatccgcggacgcgtacgcccacgcgtccgcccacgcgtccgcggacgcgtgggttccttctgcgcttgaaaagtaatgtcgaattctaggatgaatggtgttgagaagctaagcagcaaatccacaaggcgtgtcgcaaatgccggaaaggcaacactgcttgctcttggcaaagccttcccaagccaagtcgttcctcaggagaatctagtggaaggatttctacgagacaccaaatgtgatgacgcgtttatcaaagaaaagctggaacacttgtgcaaaacgacaaccgtgaagacgcgatacactgtgttgacgcgagagatactggctaaataccctgagctaacaacagagggttcaccaacaatcaagcaaagacttgaaattgcaaacgaggcggttgtggaaatggattggaagccagtttatggtgcatcaaagaatgggg

SEQ ID NO: 88327 - DNA, 314 bp, Arabidopsis thaliana columbia
accacgcgtccgcttgatcactatatcttgaaggaatgaagaagatgaatggtgaggcacggtcaagagtagtcgaccaagaagctggctcaactccatctactttgagagatgaagatcatccctcgagacaaaggcttttcggatgtctcccttatgatatagatctcaatcccctacgcattgtaatggcggaattggtggggacattcattctaatgttcagtgtgtgtgggggcataagcagtacccaattatccggcggccacgtgggattgctagagtacgccgtcaccgctggattatctgtggtg

SEQ ID NO: 88328 - DNA, 413 bp, Arabidopsis thaliana columbia
tattgccatcaaaaatatatccatagaagcttcatcgaaatggcgaatcaagcagcggctgcagcattcttccttttcgctttagccgtcttctccaacttggagctctcagcttcttcacttgtcagtggcaagatctcttgccttgactgccaccgcgatttcgacttctcaggtctactcttttaactagtttcatcacttggattttagtgtatgtcatggaagtttctaacttatgaatttcattttgcaaatcaatcacaccactaatcacatttttatgtagctttatttaaaaagggttataacaaagggagaaatgatatctagttagactatagttttcttgatatctaagacattagtattgcacaatttatttttcaggcattaaggtcctccttaaatgc

SEQ ID NO: 88329 - DNA, 869 bp, Arabidopsis thaliana columbia
agctctctacgactcactattgggaaagctggcacgcctgcaggtaccggtccggaattcccgggtcgacccacgcatctaaagccatcaaaaatatatccatagaagcttcatcgaaatggcgaatcaagcagctgctgcagcattcttccttttcgctttagccgtcttctccaacttggagctctcagcttcttcacttgtcagtggcaagatctcttgccttgactgccaccgcgatttcgacttctcaggcattaaggtcctccttaaatgcgacggagagaagaaacaaataaccgcggtggcagctgcagacggatctttccggtcagtgcttccaacggctgacaaaaaaggctccataaattgtcttgcaaagctcttgggaggccctgagcaactctatgctcacaaacacaacttggtctctgaattggtcaaatctaaacacgattccaaagttttaactacctcaaacccacttgccttctctctctcctgccccaaaccatcccgagatgatatcggaagtatgatcggagattccaagactattaattttccgggggcaggaggttttggattcccacctgccagcttctttcccttcttaccaatcattggtatcccatgatttaaataagtgttacttttaagtccttaaagacatatgtatacatatgttttgttgtttacgtgaatgaagccagccaagacaagacacaaatatttagcaaattacattactttgtttagtgagatataaggtttgtttatgtgctaagaaaatgttatttattggctttatttagtttaaatcagttgcttttgtatcaagtttgtaataagaaggttgggttaatccc

SEQ ID NO: 88330 - DNA, 317 bp, Arabidopsis thaliana columbia
ctcctctctctctctctcacacaacacaaacaactcttgagagagagaaacaaatctttcacttgacacttctctccaaatcctcatctcattcttcatcctaaacatttgctcattctcacgatgagccataagcaaaaccaacctcaccggccagtcccggtccatgtcacaaacgccgagccaaaccctaacccaaacaacctcccaaactttctattatccgtccgtctcaaatacgtaaaactcggttaccactacctaatctccaacgctctctacatcctcctccttcatctcctcgccgcaacaatcgc

SEQ ID NO: 88331 - DNA, 471 bp, Arabidopsis thaliana columbia
  unsure (1)..(471): unsure at all n locations
nnnnnnnnnnnnnnnnnnnnnnnnnnnnnnnnnnnnnnnnnnnnnnnnnnnnnnnnnnnnnnnnnnnnnnccacgcgtgcgcccacgcgtccgggccatttcagtccaattacatcgtccctaaaaccaccgtcacgccaccggcgattcctacaccacaatttgtcccccaaaacaccccttcaatcttctcttatcaaattcggcgccgaaaactccgaacctcatcctccacggccgttgccggaaactgattgtcccgttccgccggagcagcagccaatcaacgagtatcaatctctctccacctctttccctttctcctgggcttcaggagatctaatcgagtactctaccagacttttcttaaccggcgcttctttcgcatttttccggcgggttacccggttcctggttcggatccatcggacccgaatatgaacctgttaagaggattctcgccgccagctc

SEQ ID NO: 88332 - DNA, 661 bp, Arabidopsis thaliana columbia
  unsure (1)..(661): unsure at all n locations
agttgagattgagaaagcagcaagggaagttcttgatgtacttggtttactcactacactgagctatgccgagattttgaaagaaatgaaactaaaaacactaataagagcagaaattggagaagaaggtatttcgcagttaatagaagaaaggataacagccaggaagaataaagatttcgcgaaaagtgatgagattagagagaaactgacaagaaaaggaatagcgttaatggacattggcaaagaaactgtatggagaccatgcttcccttctcaggctgattccagcacttgagcttagagcagagtcatggagatagttaacggtttcttcatttctctaactcttcttctttagccttttgtttgaggctctttctttataactctgtttttggaattgtgcaatgacttcaaacacaaacacatgttgctgtttgttgtattcttcccattcacaatgacattgtaacaatattgttactttggatattggttctatagccaaacttgatctatacgcttttggatatttgttcttaaaaacatcccaaaaaaatttataaataaaaaccaaacccaaagnnnnnnnnnnnnnnnnnnnnnnnnnnnnnnnnnnnnnnnnnnnnnnnnnnnnnnnnnnnnnnnnnnnnnnnnn

SEQ ID NO: 88333 - DNA, 507 bp, Arabidopsis thaliana columbia
atgatactccagctctctacgactcacttagggaaagctgctacgcctgcaggtaccggtccggaattcccgggtcgacccacgcgtgcgcaaatattattcagtgccgagtcaaaattagtgttgagaatttgctgcttctgatcagtgagtgaagaaagtttgaagctttgagtaactttgaaacaatggaggtatttggaaaatctcatgtggttgttggctctgctaatgttatttacttatctgctatattgggtcacgaaggacccaatcacaaatgtgattggaaatgcgagaatgagaatgtgtgtgggaatatgtaccgttgcaaactaactgggttgactcatgtttgtgacaagaactgcaaccaaaggattttgtatgataatcataactctttgtgtcgagctagtggtcggattttcccgctttctttggttgaggaacaggcggttaaaggagtgaggaggaagcttgatgatgagagtaaacaacaccctt

SEQ ID NO: 88334 - DNA, 554 bp, Arabidopsis thaliana columbia
  unsure (1)..(554): unsure at all n locations
ctaagccagaagttgaattaccttcgcagaaaagggaaagaattcataaattgcgactggagaaaggtgttgaaaaggctgctgaggacttaaagaaatatgaccccaataatgatccaaatgctactggagatccatacaagacattgttcgtttcaagacttaactacgaatcctcagagagtaagattaaaagggagtttgaatcttatggaccaattaaacgggttcatttggtgactgatcagctgaccaataaacccaaaggatatgctttcattgagtacatgcacacccgtgacatgaaagctgcatataagcaacctgatggacaaaagattgacggcagaagagttttggttgatgtggagagaggtagaaccgtcccaaactggcgtccacgcaggcttggtggtggacttnggacctcaagantgggtggtggtnaagnaatttttggggaacaacaaccgcaaggaagaaccttccagtcaanagggncccttnntggccncggggagancnttntaaaattttgggggaaaaggggtaaa

SEQ ID NO: 88335 - DNA, 2758 bp, Arabidopsis thaliana columbia
  unsure (1)..(2758): unsure at all n locations
taaaatatttaaaatttagaagcctgttattgtaaaaataaataaaattggaatctattttaattatgttttttgttaatggattttagaaaaatatgggagccaangatcaacgaatgcctacaaaaccaataatttgacatgttaacaaaaaattgtaaaatccaaaaanaaaggtaattgaagctgataaccctcttgttcagcgagtgggttanagtgtgaccgagatatacgagcacggcatcgttttacgtatcgtgatctgttggatctcaactcggttttcttaataatcagaatccggttagagattgaatttgggttttgttagttttgcttcttctctctgcaaaaatcctccatccgcttcctcacgaaaaaccctagcacagctccgagatcccttttgtcgccatgggagactccggcgatcctttcttgcgtaatccaaacgccgctgttcaagctcgcgctaaagttcagaacagagccaatgttcttcagcttaagctgatgggtcagagccaccctactggcttaacaaacaatctcttgaagctttttgagccacgtccgccattggagtacaaaccaccaccagagaagagaaagtgcccgccttatacaggtatggctcagtttgtaagtaactttgctgagcctggggatccagaatacgctccacctaagccagaagttgaattaccttcgcagaaaagggaaagaattcataaattgcgactggagaaaggtgttgaaaaggctgctgaggacttaaagaaatatgaccccaataatgatccaaatgctactggagatccatacaagacattgttcgtttcaagacttaactacgaatcctcagagagtaagattaaaagggagtttgaatcttatggaccaattaaacgggtaggttattctgagcattcccttgctggttcggtaagaatttgtgtaatggcttccctctctagagctctttgctcaatttgttttattttatctacaaaagtcttccaaggttagaatttttcagtcccttataaatttgcatcttttctgctagaccaaaaggccattctacatttgctttgttttgcatgccttctttagactgtgtaaagccatcaagtctcttagacctttctcaataactgaatatatagatgcataagtgcttctcatataatgacacagctcctctctccatggtgtttgtttgagatgttttcggtaaatttggcctggtatttttatttccttgtcccttcagagagcaaatacttttacaatgatatatcatatagagtggttataggcacacggtttacctaatcaattagttgttttctgaatctataatgagctcaactcatcctgctgtaagcaacttataaaatattatctgcccatatcccaaagccattcaaatgctttattttcaagcaaccaaggttggattatcgaaaacccttctctcttttcctatcttaacatctatatatattcagtatctgggacttgggctactatgaaggtgatctggttcactttttaatacatttttagttatctaagtttctataccctggtaaggggtggtttattagactcttcaaaaatggtaattttgctgcaatacatccatttttctgccaattcttgatgtgggtggtgacattctcggatttggacacaacataaaggttgcctgccttatagagctgcatgtttgtttgatatgaaacacttttatcttgaatctgattttgttctcacagatttgatttgttaattgtcttcttctgaaacttctcaggttcatttggtgactgatcagctgaccaataaacccaaaggatatgctttcattgagtacatgcacacccgtgacatgaaagctgcatataagcaagctgatggacaaaagattgacggcagaagagttttggttgatgtggagagaggtagaaccgtcccaaactggcgtccacgcaggcttggtggtggacttgggacctcaagagtgggtggtggtgaagaaattgttggggaacaacaaccgcaaggaagaacctcccagtcagaggagccatcgagaccacgggaagagcgtgagaaatctcgggaaaagggaaaagaaagggaaaggtctcgtgagctgtctcacgaacaacctcgagagaggtctcgtgacagaccgagagaggataagcaccacagagaccgagaccaaggaggcagagacagggatagggacagcagacgtgatcgtgaccggacccgtgacagaggagacagagaccgccgtgaccgtgacaggggacgggatcgtacttcaagggatcatgaccgagaccgcagtagaaagaaggagcgggattatgaaggaggtgaatatgagcatgagggtggtggtcggtcccgtgagagagatgcagagtaccgtggcgagccagaagaaactcgtggctactatgaagacgatcaaggggacacagaccggtacagtcatcgctacgataaaatggaggaagatgacttcagatatgaacgtgagtacaagcggtctaagagatcagaatcgcgagagtatgttcgttgatgtttcattcggctgtttaaaactctaaaaacttaagaatcctttttgtttattctaaatcaaaacttgatgcaattctgtttgttacctctgaacttgattgctattttttctcttttgaagtttgtcatattattaatcaaaatc

SEQ ID NO: 88336 - DNA, 647 bp, Arabidopsis thaliana columbia
  unsure (1)..(647): unsure at all n locations
atctttgtagattctgcaacatatcttgcttgatattccaagtcttgctttcttcaccacctatgctcttctggttcttttctgggctgaaatttattatcaggcgcgtgcagtatcgactgatggactcaggccaagcttcttcacaattaatgcagttgtatatgtagttcagattgctctatggttggttttgtggtggaagcctgttcgagttatggtaatcctatctaagatgttctttgcaggtgtttcattgttcgctgcccttggatttttactttatggtggaaggcttttcctaatgttgcaacggtttccagtagaatctaaagggcggcgcaaaaagctgcaagaggttggttacgtgacaaccatatgctttacgtgtttcctcatcagatgtatcatgatgtgctttgctgctttcgatgagggggcaaacccttgatgtgttagatctccccttccttaacttcatatattacctgttggtagagatattaccctcctctctggtcctcttcatcttgagaaagctaccaccaaaacgaggcattacacaataccatcagattcgctgaaatgtaaaggcacgtcaactaatgntcagatgnagaagncaaggctatggttgtttatgcttt

SEQ ID NO: 88337 - DNA, 521 bp, Arabidopsis thaliana columbia
actcaccttagggaaagctgcgtacgcctgcaggtaccggtccggaattcccgggtcgacccacgcgtccggagattctctctgcgtttcttagatcgagcgagcgaagcgagagatcatggaaggtggagctgctctctacaatcctcgaactgtcgaagaagttttcaaggatttcaaaggtcgtcgtactgccattgtcaaagctctcaccaccgatgttcaagagttttaccaacaatgtgaccctgagaaggagaatctttgcttgtatgggttaccgaatgaagaatgggaagtgaatttaccagctgaagaagtgcctcctgagttaccagagccagctcttggtattaactttgctagggatgggctctctgaaaaggaatggctttcgcttgttgctattcacagtgacgcttggttactgtctgtctcgttttactttggctcaaggttttctttccacaaggaagagaggaagcgtttgttcaacatgatcaatgatgttcctactatat

SEQ ID NO: 88338 - DNA, 522 bp, Arabidopsis thaliana columbia
  unsure (1)..(522): unsure at all n locations
aatacgactcactttagggaaagctcgtacgcctgcaggtaccggtccggaattcccgggtcgacccacncgctncgtgaaaccagatttcgcttcattcgcgtgactacgtttctcaaacgcactaattactacgacaagttgtcttccaagaaatatgcaatcagagtttcttgaattgcgtcaacggattaaggaatcgattaggacgaagatgcaaagcggagatactattattgctccaacctcacagacacagttacatcagagcaaaagtaatcttccgtacgactttggttccttttttggtccttctcagactgttattgcttcaagagtcttacaagaaagcaagcctcttttagaaaacgagacatcagcagctaaaatgttaaactctattcaaaacaagaaaagttctgttctaatgaatgatgcttcagggactaagaatgcgaatgagggcaaacgaaaagctgaaaaacttaagggggggaagagactacccattgcttttctctg

SEQ ID NO: 88339 - DNA, 1068 bp, Arabidopsis thaliana columbia
agtaaacaatcagacccaaaaaatagaaaattccaattaatgttctccaattggagttgattctgcccttattagagagatctgatctttccccaattccataacccgaaaaatggaagaaatcgccgataaaaccttcttccgatactgtctcctcactcttattttcgccggcccaccaaccgccgtccttctgaaattcctccaagctccttacggtaaacacaaccgtaccggatggggtcccaccgtatctccaccgattgcttggttcgtcatggagagcccaaccttgtggctcactctcctcctcttcccctttggtcgtcacgctctcaaccctaaatctctacttctattctctccttatctcattcattacttccaccgcaccatcatttaccctcttcgcctcttccgcagctccttccccgccggtaaaaacggatttccgatcaccatcgccgccttggctttcacctttaatctcctcaatggttatatccaggcgaggtgggtttcgcattacaaggatgactacgaagacggaaactggttctggtggcggtttgttatcggtatggtggttttcataaccggcatgtatataaatatcacgtcggaccgcactttggtacgattgaagaaagagaaccggggaggttatgtgataccgagaggaggctggttcgagttggtaagccgtccgaattattttggagaggcgattgagtggttgggctgggctgttatgacttggtcttgggccggtattggattttttctgtacacgtgttccaatttgtttccgcgtgcacgtgcgagtcacaagtggtacattgccaagttcaaggaagagtatcccaagactcgtaaagctgttattccttttgtgtactgagaattgagaaagttgaaaactagtttatcatatgttatgtgtcaatttgtttccaaactacctttgtcaaaatttccagtaaccggtttaattccaacacggtttagatcttatgttggtatcttcaacaatgcacaacaaactgtgtattctttagacaaatttta

SEQ ID NO: 88340 - DNA, 408 bp, Arabidopsis thaliana columbia
  unsure (1)..(408): unsure at all n locations
acgcatctcaagtaccagctgaatggcacgggtggcttcatntcatcactgatcacactggcgatgagctcttgagtttgaaaccaaaaaggtatgggcttgagcataaagagaacttctctggagaaggtgatgcatacatctaccattcgaagggacataccttgaacccgggacaaaagaactggactcggtaccaatcatgggtacccaccaagactcagtaagaagatgatattttggttttacgctctgcgagactttctctcgagtgatttgttgttttgtttctgtgtcattttaataaaaagctgtcttggatctaaagctggacaattgggtttcggatctggaattgtaattgttactgtgtaataatttgctgattattaggtttcttggttcttc

SEQ ID NO: 88341 - DNA, 562 bp, Arabidopsis thaliana columbia
  unsure (1)..(562): unsure at all n locations
cggacgcgtgggcgacaacgaaatcaaatcccgattccgagagagagagagcgatagcggaagacgatggctttgacggtggcgaagagtgcgttggaggcgattagagagaaaggtctcggcggtttcatgaggatgatccgagaagaaggcttcatgagatgcctaccagatgggaacctcttgcaaactaaaatacataacataggagcgacacttgttggtgttgacaagttcggtaacaaatactaccagaagctaggcgatactcaatacggtaggcacagatgggtagagtatgcttcaaaggatcgttacaacgcatctcaagtaccagctgaatggcacgggtggcttcatttcatcactgatcacacttggcgatgagctcttgagtttgaaaccaaaaaaggtatgggcttgagcataaagagaacttcttttgagaaggtgttgcatacactcttccattcggagggggccattcctttgacccccggggccaaaaagaaccttggcctccgggtcccaatctatggggacccnccaaaggcttgtagta

SEQ ID NO: 88342 - DNA, 640 bp, Arabidopsis thaliana columbia
  unsure (1)..(640): unsure at all n locations
nnnnnnnnnnnnnnnnnnnnnnnnnnnnnnnnnnnnnnnnnnnnnnnnnnnnnnnnnnnnnnnnnnnnnnnnnnncacgcgtccggcgagaagacgacagaaggggaacaatgataatgagaagcgcgtcttcactggaccttaacctacgcgccgcccagaaaccgtctgttccaagggtggtaaccacggctcgaaccgtctctgctgctactcctcgtgttgctaaaccgattacaagagcttcttcagatggaaacctctacaagattcagtcgccggagagcataacgaaaaccatcagcgtatatcacgaagaaacggcgtctttgagggttttggaaggatctcgactcccccaaggaggttccaacggtggatttggtggtagaggcggagatggtgccggaggtggcggtggaggtggaggtgggagcgtagatggttattacgaagagatgatccaacgttatcccggagacactctccttctctctaactacgctcgtttcctcaaagaggtgaaaggagatgggagaaaagcggaggagtactgtgagagagcgatgttgtctgagagtggaagagatggagagttactgtctatgtatggagatttgatatggaaaaatcatggaga

SEQ ID NO: 88343 - DNA, 107 bp, Arabidopsis thaliana columbia
gaaaaaggtccttcattgatgaagagaatccaagatgcaatattcttcaaagccacattcaatgttcataaaacccaatctgagattggataatagaaagtataatt

SEQ ID NO: 88344 - DNA, 526 bp, Arabidopsis thaliana columbia
  unsure (1)..(526): unsure at all n locations
gtttgtttttacatgtactggcagcataattggaaaagaacggctgttcgaattctcgaggaatttaggctagcacatccagatgtcacagttcttgatcctccagatgcaatactacatctccgtaatcgtcagtcaatgcttcagtgtgttgcggacatgaatctgtctgatagtaatggacgcgttggtgtgcccaagcaattggtaattaaaaaggatgcatcttcaattccggaggctgtcaataatgctggtctgagactacctcttgttgcaaagccattggttgctgatggaagtgcaaagtcacatgagctttcggctggcttacggtccaacactccccttcttgaagctccgagcctcctcttcgttcttcagggagtttgttaacccatggcaggtgttccttttcaaggtttacattgttgggggnggctntttagnggtntcccggggttttnccnaccntnatgtctnttggcgggactccccaaanagntggngnttcccgttcccaggg

SEQ ID NO: 88345 - DNA, 496 bp, Arabidopsis thaliana columbia
ttaaagaaacacaaaacaaaatcgtcgatggctgttacaaaaaggcttttgtgagtgtcccaattccattcacaaagttttagtgtttaataatatctgacactctctttctttgaccgtcgccgccgcaatgaccgtcggagttttagctttgcaaggttctttcaatgagcacatcgcggctctgcggcggctcggtgtccaaggcgtcgagattaggaaggctgaccagcttctcaccgtttcttctcttatcattcctggcggcgagagcaccaccatggccaaactcgccgagtatcataacttgtttccggctctacgtgagtttgttaagatggggaaacctgtttgggggacatgcgcaggtcttatattcttggcagacagagcagttggtcagaaagagggaggtcaggaattagttggtggccttgattgcaccgtacataggaacttcttcggtagccagattcaaagttttgaagctgatatc

SEQ ID NO: 88346 - DNA, 619 bp, Arabidopsis thaliana columbia
  unsure (1)..(619): unsure at all n locations
aaatcgcaaaattagggttagggttttcaattccccaaccttgcgaatttctcatttctcgtagccgccgcagcaatcaacgatgacaggcaaagcaaagccaaagaagcacacagcgaaggagctccaagctaaagccgatgcagcgttgaccaatcgcggtggaggaaaggcagggctcgccgatagaaccggtaaggagaaaggtggtcacgcaaagtacgagtgtcctcactgcaagatcactgtaccggatctaaagacgatgcagatccatcatgaatcgaagcatccaaagctgacttatgaagagccgaggaatcttcatgaggctttagctgctcctgctgaatcatctaagcctaagcctgggaatcagagggagcctttaagaagtgaagttgaagatggtttgggcattgtacccgaatttccgatttgaaatttggggcctttttaaaggggtgtttcgatgtgggaatataaacttgccgttgataacccccatggcccccgatttttgggggccggaatcctgaaaccgggggccctagtctaaanggcgcaccgggngggnccantttgncctagnggggattcggcttgggnacnnggnntc

SEQ ID NO: 88347 - DNA, 756 bp, Arabidopsis thaliana columbia
  unsure (1)..(756): unsure at all n locations
gggggaatnnnnnnnnnnnnnnnnnnnnnnnnnnnnnnnnnnnnnnnnnnnnnnnnnnnnnnnnnnnnnnnnnnnnnnnnnnnnnnnnnnnnnnnnnaattgggtaccgggccccccctcgaggtcgacggtatcgataagcttgatatcgaattcgcggccgcgttagggttttcaattccccaaccttgcgaatttctcatttctcgtagccgccgcagcaatcaacgatgacaggcaaagcaaagccaaagaagcacacagcgaaggagctccaagctaaagccgatgcagcgttgaccaatcgcggtggaggaaaggcagggctcgccgatagaaccggtaaggagaaaggtggtcacgcaaagtacgagtgtcctcactgcaagatcactgtaccggatctaaagacgatgcagatccatcatgaatcgaagcatccaaagctgacttatgaagagccgaggaatcttcatgaggctttagctgctcctgctgaatcatctaagcctaagcctggaatcagaggaagccttaagaagtgaagtgaagatggtttgggattgtatcgaatttcgatttgaaatttgtggtctttttaatggtgttttgatgtgagaatataaacttgcgttgatgatgctctatgtcttcgtatttttgcggccgcgaattcctgcagcccgggggatccactagttctagaacggccgccaccgcggtggagctccaaactttgttaggtttannnnnnnn

SEQ ID NO: 88348 - DNA, 742 bp, Arabidopsis thaliana columbia
  unsure (1)..(742): unsure at all n locations
nnnnnnnnnnnnnnnnntatagggaagctggtcgcctgcaggaacggtcgggatttccaccccgagccacgcttcctcaaatcgcaaaattagggttagggttttcaattccccaaccttgcgaatttctcatttctcgtagccgccgcagcaatcaacgatgacaggcaaagcaaagccaaagaagcacacagcgaaggagctccaagctaaagccgatgcagcgttgaccaatcgcggtggaggaaaggcagggctcgccgatagaaccggtaaggagaaaggtggtcacgcaaagtacgagtgtcctcactgcaagatcactgtaccggatctaaagacgatgcagatccatcatgaatcgaagcatccaaagctgacttatgaagagccgaggaatcttcatgaggctttagctgctcctgctgaatcatctaagcctaagcctggaatcagaggaagccttaagaagtgaagtgaagatggtttgggattgtatcgaatttccgatttgaaatttgtggtctttttaatggtgtttttgatgtgagaatataaacttgcgttgatgatgctctatgtcttcgtatttttatggtatgatcatataaaaaagtaactgatattttcttattaaatggtttgtttctttctaaaaaaaaaaaaaaaaaaagnnnnnnnnnnnnnnnnnnnnnnnnnnnnnnnnnnnnnnnnnnnnnnnnnnnnnnnnnnnnnnnnnnnn

SEQ ID NO: 88349 - DNA, 507 bp, Arabidopsis thaliana columbia
atcacacacaaactaaaccggaatggccaccgccgacgaattctccgacgaagatacatcaccgattgaagaagtccgtttaacggtaacaaacaccgacgatccaacactaccggtttggacattcaggatgtggttcttgggtctaatctcatgttctctcctctctttccttaaccaattcttctcgttccgaaccgaaccgctcgtaatcactcaaatcacggttcacgtggctacactacctatcggtcatttcttggccaaggtgcttcccaaaacccggtttggcttacccggttgtggatcggcccggttctcgctgaacccgggtccgtttaacatgaaagagcatgttttgatatcgatatttgtgaatgcgggtagtgctttcggatccgggtcggcttatgcggtggtatcatcacaaatattaaagctttttatggccggagtatctctttttattgccggttggttcctcatcaacaatacacaggtatttgg

SEQ ID NO: 88350 - DNA, 1259 bp, Arabidopsis thaliana columbia
gtacagagtcaattgaagaaaccgagagagagagtgagcggaatcatgacttctccgggaaaatctccgagatccgaccggaaatcaccgacggttgtcaccgtccagccgtcttctcccagattcccgatcagcacacctactgctggagctcaacgtaagatcgggatcgctgtcgatctaagcgacgagagtgcgtacgcagttcaatgggctgttcagaactatctccgatcaggtgacgccgttgttctccttcatgttcaaccgacgagtgtactttacggcgccgattggggcgctatggatttgtcgccgcagtgggatccaaataacgaagagtcgcagaggaagcttgaggacgatttcgacattgtcactaataagaaagcgagcgacgttgctcagcctttggttgaggcggatattccgtttaagagccagatcgtcaaggatcacgatatgaaggagaggctttgtttggaggtggagaggttagggctaagtactttgattatgggtagtagaggatttggtgctacgaagaggagtagtaaagggagattagggagtgtcagtgattactcagttcaccattgtgcttgtccggtggttgttgttagatttcctgatgataaggatggagaagatgagaaatccggcgacagtggtggggagaatctgatggacagtgataatcttcatacagtgcctgaggtggctgtagaagagggagataaggatgagtaccatgatgcttcggataagcagtagcagcaaggttgcctttgaatgcatgtcagtttcaatttacttaggaatattatatacaatcagtaatactctgctcggatcaagctttgacgtttagaatgattggatattaggaagatccactaagatgctattttattcctgatgcttgaggctttcatgttgcagaaggagacctccctaaggagacttagaaagaaaagaaagcgttcctttgcccttggtttgtgttcttgagtgtgcttaattgtgttgtttttggggtttggggtattctagatctcttttgtaagtattctcttgtttcttggttttgttttaaactctatggaatttgggatgagtggattcgatgtcttttgtttgtctttgaaaaagcagtgaaaagaatttcagtggtcttgtatatctctgcagttgaatagttggtacaaaataacatctttgacggttccaaataatatatcttgtcagtaatgaccatt

SEQ ID NO: 88351 - DNA, 621 bp, Arabidopsis thaliana columbia
  unsure (1)..(621): unsure at all n locations
aaggtnggctagccttgatngggtntngggattggcccccgagggggttttaagggngttaggggttccagtgattccccagtcccaccactgggcctgccccggtggttgttgttagatttcctgatgataaggatggggaagatgggcaatcccgccgaccgtggtggggagaatctgatggaccagtgataacctccataccagtgccctgaggtggctgaagaagagggagataaggatgagtcccatgatgcttcggataagccagtagccagcaaggctttcatgttgccagaaggagacctccctaaggaggaccttagaaagaaaagaaagcgttcctttgcccttggtttgtgttcttgagtgtgcttaattgtgttgtttttggggtttggggtattctagatctcttttgtaagtattctcttgtttcttggttttgttttaaactctatggaatttgggatgagtggattcgatgtcttttgtttgtctttgaaaaagcagtgaaaagaatttcagtggtcttgtatatctctgcagttgaatagttggtacaaaataacatctttgacggttccaaataatatatcttgtcagtaatgaccattaaat

SEQ ID NO: 88352 - DNA, 543 bp, Arabidopsis thaliana columbia
  unsure (1)..(543): unsure at all n locations
cnnnnnnnnnnnnnnnnnnnnnnnnnnnnnnnnnnnnnnnnnnnnnnnnnnnnnnnnnnnnnnnnnnnnnnnccacgcgtccgctttcaacaaactcaagctcaggtttcacatgtttcaccggcccactcgcaatctacttcctttggtggtggtagcaagtggtcacccgaagaagctgcttctcttgctagtagcctatctgggtttgctcagctgggtaatggtcatgtaatgaggaatgagatgcaaggaaatcatggagtttcctattaccctgcacactcattacccgtccaccagtcttacaatggcaatggtatgggtggtatgccatattctcagtcaagaacacctgaagctgtattcccacccaaaattgatccctgttttatcatccggagttgttgctgatggcctgggcgtccaatcttcattagcaaagaaaaatccaatcagtagagccttcaggcatcttggcccttcggctgggtttaactctgtcccagctaagctgcaaaaggagccagcacctgggttcga

SEQ ID NO: 88353 - DNA, 626 bp, Arabidopsis thaliana columbia
  unsure (1)..(626): unsure at all n locations
ccacgcgtccgtcccagtctcaagctatgtatatgcaacaatgttcagacccaggttcaagtacctgcatctggtggtgctaaccttctgggactccttctgacatcaacccagtctcaagctatgcatatgcaacaagttcagacgcaggcagtgaatcctcagccagcccaatcactagctgcttctcgacttcagccaatacaatcacaggtcgcacaaccactgccatcacgggttgtgcactttcaacaaactcaagctcaggtttcacatgtttcaccggcccactcgcaatctaattcctttggtggtggtagcaagtggtcacctgaagaagctgcttctcttgctagtagcctatctgggtttcgctcaagctgggtaaatggtcatgtaatgagggattgagatgcaaggaaatcatgggggtttcccattaccctgcacactcattcacccgtccaccaggtttacaatggcaatgggattgggtggtatgccatattctcagtcaagaacacccgaagctgtttccccccaaatggncccgtttttaancggggttttctgtgccngggcnattttttgggggaatccnngnggnttggattgnccccngggta

SEQ ID NO: 88354 - DNA, 515 bp, Arabidopsis thaliana columbia
  unsure (1)..(515): unsure at all n locations
cagctctcatacgactcacttagggaaagctgctacgcctgcaggtaccggtccggaattcccgggtctacccacgggtcncggcttggaggggttcttctttctgtaacaggtactgaagccatgtttgcaaatcttggccatttcacctcggtctcaatcagagttgctttcgccggtgtcgtgtacccctgtctggtggtacaatacatcgggcgcaggcgagctttctctgtcagagggccgtcgggtctattcctaacagtttttacgattcagtcccagatcctgttttctggcctgtctttgtcattgccacacttgccgccattggtggcagtcaggctgggataaccactacgttctcaataatcaaacaatgccatgccctagggggcttcccacgcatcaaagtagtccatacttcgaaacatatatatgggcagatctatttccccgagatcatcaggatccttgtgatccttaccttttgcatgggttatagggtttcgaga

SEQ ID NO: 88355 - DNA, 1423 bp, Arabidopsis thaliana columbia
gcctcgcgaagaagcaaactctcaagctccgtcgggaaaaaaaggaaaaccagatcggaaagttcacgtttttcaaatcttctccggagaaatcagattacttgattcttcaaacaatggatgtgattaagacgcaacagatttcagcaaggacgatcgagaaagtggttgttcatccactagtcttgcttagtatcgtcgaccattacaatcgcgtcgctaaggattcaagcaagcgtgtcgtcggtgttcttctggggagcagctctcgtggtgttgttgatgtcaccaacagctatgcagtgccctttgaggaggatgacaaagacccaagcatctggtttcttgatcacaactaccatgagtcaatgttccacatgttcaagagaattaatgccaaggagcatgttgtaggttggtacagcacaggccctaaacttcgagagaatgatttggacgtccatgcgttgttcaatggctatgttccaaatccagtgttggtcattattgatgtccaacctaaagaacttggaatccccacaaaagcttactatgcagtggaggaggtcaaggagaatgctactcagaaaagccagaaagttttcgttcacgtgtctacagaaattgctgctcatgaagtcgaggaaatcggcgtggagcatttgctcagggatgtgaaagatacaacaatcagtaccctagcgactgaggtcactgcaaaacttactgctttgaaggggttggatgcacgtcttcgggagatccggagttatcttgaccttgtaatcgaaggaaagctccctctaaaccatgagattttataccatctacaggacgttttcaacttgcttcctaacctgaatgtgaacgagttggtcaaggccttctcagtgaaaacaaatgacatgatgctcgttatctatctatcatccctcatccggagtgtaattgcgctccacaacttgatcaacaacaagttactgaacaaggaacatgaaaaagcagaggactcaaagcctgtggccatacctgccaccagctagatcaggttttctcgtgacttactgtagtcatcattgcccgcgatgaaggcagctattgtgtgttctcttccccaaaacaaaggtcaagtcagggtgggggaacgaacgagtttagtttgatatcgacattgttgatttctctcagttgttctgattcagaatgtatcaaagagtcttttttcattttatctttcaagttcgttaggcttaggcctctttttgagggggttttaagatacaaaagttcacgtcaatgtgtcgaaatctcttcagagatggtcttaacctattgaaattaagatattttttttcacattaaaaaaaaaagggcggccgctctagaggatccaagcttacgtacgcgtgcatgcgacgtcaaa

SEQ ID NO: 88356 - DNA, 603 bp, Arabidopsis thaliana columbia
  unsure (1)..(603): unsure at all n locations
aggatagagatagattcttctgagttcttgcatggttcaggcttattaattctctgcagataactgcagaagaaagaagaaagaagaagaagaagagattagagcttgagccataatatataatcccttgatcattagtctaaagaaccacataaaaagatgggattctggtcgttgttggaggtggcttctatgccggttattcaagttcttttcatgagtcttgtgggagctttcatggcctctgatcgttgcaagctcttccctgttgaagcccgtaattccatgaacaaggtggtgtttgtactatttgcaccggctctcatgtttgccaatctagctcagacggttacacttgaagacatcatctcatggtggtttatgccggtgaacatgggacttacactttctaaatcgggggnctttcttggggtgggtgggtggtaagnatttgaaaaccaacctccttaatcttgaagggcctaatgnttgnaacttnttcttcaggaaaaaatgggggacctaccaataaaaactngtcccangaattttcggtntgggccaaaaatcccttttnggaacccnaaggntttttttggaccc

SEQ ID NO: 88357 - DNA, 559 bp, Arabidopsis thaliana columbia
acgcctgctctatacgactcactatatggaaagctggcacgcctgcaggtaccggtccggaattcccgggtcgacccccgcctccggcctccctcatctttctctctctgtcggcgatgcagaggatatcgttagactcatcagcttcgaagctccatagctatggaggacgaaaggacgatacctacgatattgatgacttgaaaccagcttcctcttctccttcttcgtcgtcatccgcagtagattacgacgatcacgagctcaaagactttaagccgcgacggttatcatcgttgcaatctccttttgttacgacgaatcagaaacaagagaagcttgttcacttcattccgattctcactctcatctgctttatcatcctttacctcacttcttacgctccgtctcaatcagatttggctcagtttaatggattcatgcgtccttcgaaacatctagaatcatccgacgaaaatggcgacgaaatttctggatttatcagagccgatactctatccatccgtagtagtgtacgaaacctacaagagacggaaag

SEQ ID NO: 88358 - DNA, 784 bp, Arabidopsis thaliana columbia
  unsure (1)..(784): unsure at all n locations
atacgactcactttagggaaagctcgtacgcctgcaggtaccggtccggaattcccgggtcgacccacgggtgncggtgtctcagacaaagcagttatatcccggaacttctactggctgcatctgcctggaaaaaattacacacttcttggagccgtacaggaagaagcaaatccctctcaagatcacttgcaatgcagttatggtgggttcaagatatgagctggaggtcggggttcataacacatctagagctaacttagccaaaaacgttgtccaggaagacgaaaaacgtgatctggggttgctccagaaactctttagtagatgtgttgtttctgcagatagcaacccgtggtttgaaagtagtggaaatgaagggatcggattcaggagttgctttcttccttcgtttctcagttcacaatgcagagacagagaaacaagatacgaggattctaccagtacactactcagacaactatttctcactagttccaggtgaatcaatgtcttttaagatctcatttgcagctcctacaggcatgaagaagtctcctcgtgttatgcttcagggctggaactaccctgataggtttagtgtttttggttgagactattcatgtttcatgtttgttacataactgcctgtaatctcgaacctttcaataaatgaaacttgcacaaaaaaaaaaacccaaagnnnnnnnnnnnnnnnnnnnnnnnnnnnnnnnnnnnnnnnnnnnnnnnnnnnnnnnnnnnnnnnnnnnnnnnngtgaaatcg

SEQ ID NO: 88359 - DNA, 878 bp, Arabidopsis thaliana columbia
ctcaacttcaatgtatggcatccacattgtttacttgaggtacaagcaaaacgtctaagctcgtcgacctcctcttaatggcttcaagttcaacttcattcccgttaaccaccgcgccaccgcagggtgtcaggtttaaccggagaaaaccgaggttaaccgtgtgggctaagcaaacggcgtttcaactcgggaaaacgaagggtgatgatgactcggaggggaaacaaaaagggaagaacccgttccagtttgatttcggtaagttaccggacatgaagtcactgataccggttgtgacgaatccttctaccggtttagtgtttggtaataacagaaagaaagatcctggtactatttttgtggctggtgctacgggacaagctggtatacgcatagctcaaacgctcttacaacgaggattcagtgttcgagccggtgttcctgaccttggagctgcccaggacctagctcgtgtcgcggctacttacaagattttatcaaatgatgaagtcaagaggctaaacgcagttcaatcccccttccaagacgctgaatcaatagcaaaagcgattggaaacgcgaccaaagttgttgttacggtcggggcaacagagaatggtccggacgcccaagtttcgacctcagacgcattgctcgtggtccaagcagctgagctagccggcgtaagccacgtggcgatagtctacgacggcaccatcagcgggtccacatacaacgtgctcgacgggattacttcgtttttcggcaatcttttcgcaaaatctaagccattgactatctctgacctcatcgagaaagttgcttaaaccgacgtggcctacacacttataaagacgagtttgacggaagatatc

SEQ ID NO: 88360 - DNA, 797 bp, Arabidopsis thaliana columbia
  unsure (1)..(797): unsure at all n locations
nnnnnnnnnnnnnnnnnnnnnnnnnnnnnnnnnnnnnnnnnnnnnnnnnnnnnnnnnnnnnnnnnnnnnnnnnncacaaaaacccacgcatcgtcctctctcgcttgacctacaacacccgattctctaatcgaaaccgtttctctctttttgatcagatctcagatctttccctctttgattcttcttccttagatcgattctctctagaaacaacaatggcgtctgggcgtgaagagttcgtatacatggctaagctcgcggagcaagcggagaggtacgaagagatggtagagtttatggagaaagtctccgccgccgttgatggcgatgaactcaccgtagaagagcgaaatcttctctccgtcgcttataagaatgtgattggtgctcgccgtgcctcgtggcgtatcatttcatcgatcgagcagaaggaagagagccgtggtaacgatgaccacgtcacggcgatccgtgaatataggtctaagatcgagacggaactctccggaatctgcgacggaatccttaagttgcttgactttaggctcatccctcccgtgcttctggtgattccaaggtcttttaccttaagatgaagggagattatcacaggtacttggctgagtttaagactggtcaagagaggaaagacgccgccgaacatacactcgccgcttacattgctccaacacacccaattcgtcttggtcttgcattgaacttctctgtgttctattacgagatcctcaattctcctgatcgtgcctgtaacctcgcaaacaggcctttgatga

SEQ ID NO: 88361 - DNA, 1321 bp, Arabidopsis thaliana columbia
  unsure (1)..(1321): unsure at all n locations
caaaaacaaaaatccacggagccgataaaaaaaaaaaaaaaaactctctcagatctgagaatcatttcttcttcttcttcctcactttgttcatcatcttcttctccgatctaaacaacaatggcgacaccaggagcttcctcagcaagagatgaattcgtatacatggcgaaactcgccgaacaagcagagcgttacgaagaaatggttgaattcatggagaaagtcgcgaaagctgttgacaaagacgaactcaccgtcgaagaacgtaatctcctctccgtcgcttacaaaaacgtcatcggagctcgtcgtgcttcgtggagaatcatttcatcgatcgaacaaaaggaggagtctcgcggtaacgatgaccacgtttcgttgatccgtgactacagaagcaaaatcgaaacggaactttctgatatctgtgacggaatccttaagcttctcgatacgattctcgttcccgctgctgcttctggagattcgaaggtgttttatctgaagatgaaaggtgattatcataggtacttggctgagttcaaatctggtcaagagaggaaagatgctgctgaacatactcttactgcttacaaagctgctcaggatattgctaattctgaattggctccaacgcatccgattcgtcttggtcttgcgttgaacttctctgtgttttactatgagattctcaattctccagatcgtgcttgtaatctcgctaagcaggcgtttgatgaagcaattgctgaattggatactcttggtgaagagtcatacaaggacagtactttgattatgcagcttcttcgtgataacctcactctctggacttctgatatgcaggacgatgttgctgatgacatcaaagaagcagcaccagcagcagcaaaacccgctgacgagcaacaatcctaagtcgtcttaccgcaactttgttgtcatttcagtatctaaaacctctccattaatatgtttttctcttggaggtgtttctctgttggtttcttatttccttttatccccaagctctctaaggcagtctaattcttgtccttttttgctgcttttctcaaccgtggatacgaaaactcgattcctattatttttcgtttatctgtttccattttatcgtgatttgactcctatcttctgtgtctttgtttgtaatggattcaacttctctttttgtttcaatgtcaagaaaaatctttggtttaaaaaaaaacaaaaaaagggcgggccgctctacgaggatccaagcgttcgtacgtccggaggggcattcagtcggcanangctnttnttttagggg

SEQ ID NO: 88362 - DNA, 1286 bp, Arabidopsis thaliana columbia
  unsure (1)..(1286): unsure at all n locations
cannnnnnnnnnnnnnnnnnnnnnnnnnnnnnnnnnnnnnnnnnaccggtccgcaattcccgggtcgacccacgcgtccgaaaaaaaaaatctctctcaatctctctcagatctgaatccatccatcaccgatctctaatggcggcaccaccagcatcatcctcggcgagggaagagttcgtgtacctcgcaaagctcgcagagcaagcggaacgttacgaagaaatggttgaattcatggaaaaagtcgctgaagccgttgacaaagacgaactcaccgtcgaagaacgtaatctcctctccgtcgcttacaaaaacgtaatcggcgctcgtcgtgcttcctggagaatcatctcttccattgaacaaaaagaagagagtcgtggtaacgatgaccatgtgaccacgatccgtgattacagaagcaagatcgaatctgagttatcgaaaatctgtgacggtattcttaagcttcttgatactagacttgttcctgcttctgctaatggagattctaaggttttttaccttaagatgaagggagattatcataggtatttggctgagtttaagactggtcaagagaggaaagatgctgctgaacatactctcaccgcttacaaagctgctcaggatattgctaatgctgaattggctccaacgcatccgattcgtcttggtttggctttgaatttctctgtgttttactatgagattcttaattctccagatcgtgcttgtaatctcgctaagcaggcgtttgatgaagccattgctgagttagatactcttggagaggagtcatacaaggatagtaccttgatcatgcagcttcttcgtgacaatcttactctctggacttctgacatgcaggacgaaagtccggaggagattaaagaagcagcagcaccaaagcctgctgaagaacagaaggagatctaagtttgtggtttcttttttcagtattcttaagttatgcaattataattatgtttctgcttggtgtttattttctaatctttcctttgctatccccgaagcttctaaggccgtctaattcttgtcctttgtttgcttttctcaatcgtggatgctactggatttctgttttgttttacttcttctcttgattgattgcatttcccggcttatgccttgtacttgaaactcagttttctctcttattaatgatttgccattcaccaaaaaaaaaaaaaaaaaaaaaaaaanaaagggcggccgctctagaggatccaagcttacgtacgcgtgcatgcgacgtcatg

SEQ ID NO: 88363 - DNA, 1287 bp, Arabidopsis thaliana columbia
cgaccgacttgcggtacgctgggccgcctcgcggtaccggtccggaattcccgggtcgacccacgcgtccgctcgcttgacctacaacacccgattctctaatcgattccgtttctctctttttgggcagatctcagatctttccctctttgattcttcttccttagatcgattctctctagaaacaacaatggcgacaccaggagcttcctcagcgagggaagagttcgtatacatggcgaagctcgccgagcaagcggagcgttacgaagaaatggttgaattcatggagaaagtcgcggaagccgttgacaaagacgaactcaccgtcgaagaacgtaatctcctctccgtcgcttacaaaaacgtcatcggagctcgtcgtgcttcgtggagaatcatttcatcgatcgaacaaaaggaagagagtcgtggtaacgatgaccacgttacgtcgatccgtgactacagaagcaagatcgaaacggaactttctgaaatctgtgacggaatccttaagcttcttgatactagactcgttcctgctgctgcttctggagattcgaaggtgttttaccttaagatgaagggagattatcataggtacttggctgagtttaagactggtcaagagaggaaagatgctgctgaacatactctcaccgcttacaaagctgctcaggatattgctaatgctgaattggctccaacgcatccgattcgtcttggtcttgcgttgaacttctctgtgttttactatgagattctcaattctccagatcgtgcttgtaatctcgctaagcaggcgtttgatgaagcgattgctgagttggatactcttggtgaagagtcatacaaggacagtaccttgatcatgcagcttcttcgtgacaatctcactctctggacatctgatatgcaggatgatgctgcggatgagatcaaggaagcagcagcgccaaaaccgaccgaggaacagcagtgatcttttgagtgaaactgctagttttcttctagggtttggaatttcttctctttctcgtccatatgtttttcttaatccatctaagaggtcgctcttgccatttcgctcatcttcaaaagcttattcattcatcatatttgtggcaagtctgaaccatcaatcatctttttatctctttttaatttattttctcttttcttatttctttgttgttatcgatttcaatgtctgtgtaatcgaaacttgctttcttttctcatcaatttgaagatcataaaaaaaaaaaactcttaaaaaaaaaa

SEQ ID NO: 88364 - DNA, 1317 bp, Arabidopsis thaliana columbia
  unsure (1)..(1317): unsure at all n locations
nnnnnnnnnnnnnnnnnnnnnnnnnnnnnnnnnnnnnnnnnnnnnnnnnnnnnnnnnnnnnnnnnnnnnnnnnnnnnnnnnnnccacgcgtccgcccacgcgtccgtacggctgcgagaagacgacagaaggggaacatcaaaaactaacacagaaagaaaaaaaacagttcctgttctattagattgttttctaaattgtctgaaaatcatggaagtaacttcccaatctaccctccctccagggttcagatttcatcctaccgacgaagaactcatcgtttactatcttcgaaaccagaccatgtctaaaccatgccctgtctccatcatcccagaagttgatatctacaaattcgacccatggcaattacccgagaaaacagagtttggagaaaatgagtggtatttcttcagccctagagaaagaaaatatccaaacggagtcagaccaaaccgggcagctgtttccggttattggaaagcaaccggtacagacaaagccattcacagcggttcaagtaacgtaggtgtcaagaaagccctagtcttctacaaaggtagacctcctaaaggaatcaaaactgactggatcatgcatgagtatcgtctccatgattcacgtaaagcatcaacgaaacgtaacggttccatgaggttagatgaatgggtactgtgtaggatatacaagaagagaggagcaagtaagcttctgaatgagcaagagggtttcatggacgaagtactaatggaggatgagacaaaagttgtagttaacgaagcagagagaagaactgaagaagagataatgatgatgacgtcgatgaaacttccaaggacgtgttcgctggctcatttgttggaaatggattacatgggacccgtctctcacattgataattttagtcagttcgatcatcttcatcaacctgattcggagtctagttggttcggggaccttcagtttaaccaagacgagatcttaaaccatcatcgtcaagcgatgtttaagttttagtgatggggtcagtaaaaaagaagaagaaacaagaaaagatgtgcttgaaaagttactttggtagatatttggttagtttggggacatgaatgaaaattgtaaaatattataactaaaacccaatgggattttatatttctcccatatgaatgtgaaatgaaaaacaatgtttaattaaaaattaagttgtttcagccaaaaaaaaaaaaaaaaagggcggccgctctagaggatccaagcttacgtacgcgtgcatgcgacgtcatagnnnnnnnnnnnnnnnnnnnnnnnnnnnnnnnn

SEQ ID NO: 88365 - DNA, 557 bp, Arabidopsis thaliana columbia
atgatcctgccagctactaatacgactcaccttagggaaagctgctacgcctgcaggtaccggtccggaattcccgggtcgacccacgcgtccgaaggaatggagttaacaatggagaggctgttaactctaatcaacgatgtctacaaatatgttgacagtgtcgtgggaggtcaaatagctccagacaacaacattggacgattcattgcagatgcagtagcctcccttcccaaggtacctccacaaggcgttcgattacctcgtgaatgatagtctccaggaccaattgcttctggtgtacctatcaagccttacaaggacccaggtgaagtctgccggagaagcttaacacagctgctcaaatgctttattaagcctggaaccccaaggttttgcttaaaatggggaatgctgcttttttggtttccaattttcttttaacaagtttatgtaagaatcaccttcttgttggagggttcctaaattgccagtttaagaaagacccaatgctctgtttcgggaattaaggctttaaaaaggatttttaagttggg

SEQ ID NO: 88366 - DNA, 1309 bp, Arabidopsis thaliana columbia
  unsure (1)..(1309): unsure at all n locations
ctcctacctgtcgacccacgcgtccgcggaaaccctaaatctccactctctcgcgccttttaccccttctcagaatcttaaccatggcggcgacgagcgagcacaccatcttgcaatttgtgtctccgtcatcaacggcgtccgctacaacctctgtactcacggcgaggatccaccctctcgttatctttaacgtctgtgattgcttcgtgagacgtcctgactcagctgaacgagtcatcggaactctcctcggatctatcttacctgacggaaccgtcgatatccgcaattcatacgccgtccctcacaatgaatcatccgatcaggttgctgtggatattgattaccaccacaatatgttagcttcacaccttaaggtgaattcaaaggaaactattgtcggctggtattcaactggtgctggggttaatggcggtagttcgctgattcatgatttctatgctagagaagtacccaacccaattcacctaactgtggatactgggtttactaatggtgagggtactatcaaagcttttgtctcttcaaacctctcactcggtgatcgacaactcgttgcacattttcaagagattcctgttgatctccgcatggttgatgctgagagagtcggattcgatgtacttaaggcaacatctgttgacaaactcccaaatgacttggaaggaatggagttaacaatggagaggctgttaactctaatcaacgatgtctacaaatatgttgacagtgtcgtgggaggtcaaatagctccagacaacaacattggacgattcattgcagatgcagtagcctcccttcccaagttacctccacaagtcttcgataacctcgtgaatgatagtctccaggaccaattgcttctgttgtacctatcaagcataacaaggacacagttgagtctagcggagaagctaaacacagctgctcaaatgctataataagcttggaaacacaaggttttgctaaaaatggggaatgctgcttttttggtttcgaattttcttttaacaagtttatgtaagaatcagcttcttgttgtagtgttcctaaattgcaagtttaagaaagacaaaatgctctgtttcgtgaattaaggtctttaaaagggatttttagttggtgtgcctaattttaaacaatatacatataaatgagctttgttcttttnnnnnnnnnnnnnnnnnnnnnnnnnnnnnnnnnnnnnnnnnnnnnnnnnnnnnnnnnnnnnnnnnnnnnnnnnnnnnnnnnnnnnnnnnnnnnnnnnnnnnnnnnnnnnnnnnnn

SEQ ID NO: 88367 - DNA, 531 bp, Arabidopsis thaliana columbia
  unsure (1)..(531): unsure at all n locations
nnnnnnnnnnnacgactcactttanggaaagctggtacgcctgcaggtaccggtccggaattcccgggtcgacccacgcgtccggcagaatttgaaggctttcaagcaaggtgctggttctagttctacagagccacttctcaaggattcgactggagccatttccactgatatggaagatgacatagacgtgcaagaggaaagagacagggtgatttcggggttgtcagacaacacgatgctctacttacagaacctgaggaaggtctatcctggtgacaaacatcacggcccaaaagtagctgtacagtctttgactttctcagtccaagcaggagaatgttttggctttctagggacgaatggagctgggaagactactaccttgtctatgttatctggagaagaaactccaactagtggaactgccttcatctttggcaaagacatagtagcgagtcccaaagctattcgtcagcatattggctactgcccccagttcgatgctttattcgagtatttgactgtgaa

SEQ ID NO: 88368 - DNA, 448 bp, Arabidopsis thaliana columbia
atgtttctagcccctcaaagattgatcttaatcagataccaaggccaggttcaagctccagtccaattgtgtatgaaactcgtgtggaaaataaggctaatcctccaccacctactactgttgattatataactagagacactggaaattccagcccgcgttacatgcgatgcacaatcaatcagatcccatgcactgttgatcttctatctacatctggtatgcaactggcactaatagtccaaccaatggcgctttctcatccatctgaagagcctatccaagttgtggactttggtgagagtggccctgttagatgttcacgttgtaagggctacgtgaatcctttcatgaagttcattgaccaaggaaggaagttcatatgtaacttgtgtggatacactgatgagactcctcgtgactaccagtgtaatctgggtccagatgg

SEQ ID NO: 88369 - DNA, 491 bp, Arabidopsis thaliana columbia
gtcgcatccacgcgtacgtaagctcggaattcggctcgagcattgacaaagggtaagagaacctaaaagagagcaaattcagaagctgagaatatgaagacggagcttgaagaagaagaagaagaagaatggagatccgttcacgaggttttattaatcgttcttccttatcttcattctctgttcgagcttctctctatgattcgcgtttcgcgatctctcagagacgcgatcagagacgaaaccgcgttatggacaaaactcgttattgaaccaccgttgagctctcgtctaaccgatgatattctatcggagttcagttccaaatccgccggaaagctgaaaactctgattctccggcaatgtcttatggtcaccaacaagggactccgtcgtgttgtggatgctaatcctctcatcactaagataattgtgcctggatgctctggattgactcctgaaggatcatggaatggttgaaagcttgtcta

SEQ ID NO: 88370 - DNA, 475 bp, Arabidopsis thaliana columbia
gtcgagaagagaatgaacaatgaagtgaactaataaaacttccatttgcaatttcacgacctccattttcgtgctgagattctctaagctcgatggatctaacgacgacgcgtcagaggcgtccacttagatctgactcttcttcttcgtcttcgacgaaatcttactcgaagaccgataaacctggccgatctaatggcggtgatgcggaggatggtggtctccgatggttcttgccgtttatagcgctttgttatcttcgttacatgagcgcgacttctaatatcattcatgactgcgatgaagtgttcaattactgggagcctcttcattatattctctacaagtccggatttcagacctgggaatacagttccaactttgctcttcggtcgtacttatacattctattccatgaattggctggacggcctgcttcttgtggtttgtgatgacaggttagagttttctatgc

SEQ ID NO: 88371 - DNA, 412 bp, Arabidopsis thaliana columbia
aaaccacaacagtgcctcgcctacaatgcctaacaatggcgacttcactaattctgctgcttcaagctctgagtttagtgagctcaactattctgtcccgggccgatcggatcacccgtttacccggtcaaccccgagtcgggtttcagcactactcacgttatgtcactattgacgagaacaaacagagagctctgttttactacttggctgaagcagaaaccaaacccatctctaaacctctcgttctctggctcaatggaggacctggatgttcatcattaggtgttggtgcattctctgagaatggacctttttagaccaaagggatcaatcttggtgagaaatcaacacagctggaatcaagaggctaatatgttgtatctggagacacctgttggagttggatttt

SEQ ID NO: 88372 - DNA, 463 bp, Arabidopsis thaliana columbia
  unsure (1)..(463): unsure at all n locations
tnnnnnnnnnnnnnnnnnnnnnnnnnnnnnnnnnnnnnnnnnnnnnnnnnnnnnnnnnnnnnnnnnnnnccacgcgtccgatttttatcgattctacaacatattttgtttaccagatttgatagattttggaagatgacattagggttgttattcgggattggaagaacattccgaagaaagagagcttcttcgcttgatattctctctcccaaacgagctcccagagacttttacaagggaaaaaactgtaaacctcctggtttccacactcgtaaagctgaaaccatatgtatctcagtgccctttagacgtcaacaaaacaaacgagtcaactgaagcttccaagtgacgaagttagaagaaacatgtttttaactttgaagtcttcattagcttaaagttaaggactgtgttattctatcatccttagatatcttttgttcctcanaanaaaaaaaaa

SEQ ID NO: 88373 - DNA, 826 bp, Arabidopsis thaliana columbia
  unsure (1)..(826): unsure at all n locations
ccggcacgcctgcaggtaccggtccggaattcccggggcgacccacgcgtccgcccacgcgtccgcccacgcgtgcggacggctgcgagaagacgacagaaggggatctcgcgagagacagaaagggacgattattggttggtgaaatttagagcatttttgggaattgggtaaacttttcgatggcgacttcgaagcttcaagctatttggaatcaccctgccggacctaaaaccattcatttctgggcaccaacgttcaagtggggtattagcattgccaacattgcagactttgccaaacctccagagaaactttcctatcctcaacaaatcgcggttacatgcactggtgttatttggtctcgttacagcatggtaatcaatccgaaaaactggaacctcttcagtgttaatgttgctatggcagggacaggcatataccagcttgctcgtaaaataaaacacgattatgcaaccgaagctgagcctgccgttgcgagcgaatgattatgatgacgaagctgagatttctaaaggaaactggaaatcatcttgcctctgtttgaaaatctagtctcaagaaatttgattttctttaaattccaagattttttgatcggatcacgattatcatttccaaggttttttaagtattcctgtttgacatttgttcaaatgataaaggaggtcaaaaagttcccttccaaaaaaaaaaaaaaaaaaaaaaaaaaaaaaaaaaaaaaaaagcaagggcggccgctctagaggatccaagcttacggacgcgtgcaagtgaagttannnnnnnnnnnnnnnnnnnnnnn

SEQ ID NO: 88374 - DNA, 640 bp, Arabidopsis thaliana columbia
  unsure (1)..(640): unsure at all n locations
accngtgccttcanganncctacccgccgntctttcacgntaatccactacaaatcagagcnaatcgtcccggagaaaaggttcaattgaactcagaaggaggagtccttaaagttagccctgatggtggtttgcagcaaagctcaactgtagcagattcgatatctttcaagttcgctgatggtgttaccaaatctatcccttgttcatacattgagtttgctgaacgccttgtacttccgcagtaccaaaatatacccgaaagcgagatacaagagtctcatcgacgtgatggatttgaggtcggaaatgctgacaagatcttcgagagcacatttcaggagcagctttcccgacgaaccgggtgatagcaaatagtagccacggctttggatatatgtcaatcatgcctcgtacatgtgtaacgagtaaaaagctcaaaactgcttgtaatcttgatcagtaaagatgctaatccaagaactcttaatcaaatatatttatgtgtaaaaaagggcggccgctctagaggatccaagcttacgtacgcgtgcgtgcgacgtcataatcttctatagnnnnnnnnnnnnnnnnnnnnnnnnnnnnnnnnnnnnnnnnnnnnnnnnnnnnnnnnnnnnnn

SEQ ID NO: 88375 - DNA, 560 bp, Arabidopsis thaliana columbia
gatctccagctcaatacgactcaccttagggaaagctgctacgcctgcaggtaccggtccggaattcccgggtcgacccacagctgcgggaattttcatggcggcgaggtcaccggacgttatataatttgtatcccaaatcaaaattctgagaaggaagagaaagcaatggaggacgaattggaaggtctacgagctcattttcctgtttcgttcggtaagacatcgaaggtttcggcgtcaactgaagccattcacagcgcaactcgccgcaccgatgtagccaacgacgccggagtttcgtcggatatcaccacgaagaaacctgattccgataaatctggattcccgtctctatcttcctcatctcaaacctggctccgaagtgttcgcggtccgaatcgtaaccctaacagctccggtgatgtagcaatgggtccgccaccgccaccgtcatctaaacggacgcaagaggaagaggaggaggatgaagaacttatgatgggaccaccgccaccgcctaagggactcgggaacattaatgattctgatgatgaggg

SEQ ID NO: 88376 - DNA, 528 bp, Arabidopsis thaliana columbia
  unsure (1)..(528): unsure at all n locations
annnnnnnnnnnnnnnnnnnnnnnnnnnnnnnnnnnnnnnnnnnnnnnnnnnnnnnnnnnnnnnnnnnnnnnnnnnnnnnnnnnccacgcgtccgatttcgacttggaagactttctatccaaggattatggttttactgtcagcccatgatgggatccatgcgcgcattggctgcagtaattcagcaggcttcaacgaagcagtttgtgggttctggtgttcttaatctcttgcaaagtcaggctaaagcgagggctggtgataattcagtgaggtcattgttagagaaaatgacggagtgtgcaagcaacgcatacctaagcatattggaaaggtgggtctatgaagggatcattgatgatccgtatggggaatttttcattgccgagaacaggtctctcaaaaaggagagcctcagtcaggactctacagctaaatattggagccaaagatacagccttaaggatactattcctgggcttcctagcaaacattggttgcaccattatttggccacaggggaaata

SEQ ID NO: 88377 - DNA, 688 bp, Arabidopsis thaliana columbia
  unsure (1)..(688): unsure at all n locations
agaacacgtggtggtcaacattcctgagtttccgttacaccagaagactatgcacgtttacgaggtcacttctcgtatatgcatctggtgcaagggaaaatcagtcggaaacgattcgccacagaacacgtggtggtgaacattcctgagtctttcaacattgagcacaaacacgacaagacgagtccaatggattcttcaggcttggagataacacagattaacccaatgtaagctctgtgatcacaaacgtgtgtttgtcacaacgcaccacaagtctgttgcctacaggccagcaatgctttcgatggtagcgatagcagcggtttgcgtttgtgtcgctcttttgttcaagagttgcccggaagtgctatatgtctttcagccattcaggtgggaattacttgagtatggaacaagctagtaaaacttccctataccagacattgaaaaagaatcttctcaatagaagatgtgttggtgtgaaatctgcgagtgtaattttatgtaacgtttaattatttttactagaatatgtatcattcagctttacatggtttttatgtaatgtagctttatctgaaaaaaaaaaaaaaaaggnnnnnnnnnnnnnnnnnnnnnnnnnnnnnnnnnnnnnnnnnnnnnnnnnnnnnnnnnnnnnnnnnnnnnnnnnnnnnnnnnnnnnnnn

SEQ ID NO: 88378 - DNA, 407 bp, Arabidopsis thaliana columbia
ccgtccgcgcgtccgagcagtcctacaaaggcttactccactccaaatattctctcatatgatgcgccaatctataaaaaggggaaattttcaatctgccgttggtaagattaaaagtggcaaagttgagattttgatcgtcttcttcctctggaaatttcaatcgaaactatatcttcagagatgcagaatctgtgaaattgtagaaacgaatttcacatttttttttgaagaaacagacgacgcacatatctcagttgccggtaaagtactgtgcttcgagtttttcttccaccgcccaacggaattacggtgcttcgtcttcgccgtctcctattgtaatttgtgagagtaatggaatttccgatggtctttgggtgaagcggaggaagaacaatcggagattt

SEQ ID NO: 88379 - DNA, 494 bp, Arabidopsis thaliana columbia
  unsure (1)..(494): unsure at all n locations
nnnnnnnnnnnnnnnnnnnnnnnnnnnnnnnnnnnnnnnnnnnnnnnnnnnnnnnnnnnnnnnnnnnnnnccacgcgtccgcccacgcgtccgcttgatcggcgcaatgtctacaatggctcttgcattcatcgtgatctttgttttcctatggatttggatgctctcaaagaaggaaagaaaagtaaagaagtacacagaagtcaagaaacaaaaggatccatccgaaacaagtaaaaagctgattactttccatggtgatcttccatactcttcaactgagctgattgagaagctagagtctcttgacgaggaagacattgtgggttcgggaggatttggcacggtttatcgaatggttatgaacgatcttggaacctttgcggttaaaaagatagataggagtcgacaaggatcagaccgagtttttgagcgagaagtagagattttaggtagtgtcaaacacatcaatctagtgaaccctactggatact

SEQ ID NO: 88380 - DNA, 333 bp, Arabidopsis thaliana columbia
aacgaacaacagagttccgtaggctttgtgaaattataagaaatcatttggcaaacctgaacaagtacagagaccaaagggaccgacctgacttatcagcccctgagagcttgcagctgtatctggacacaaggtttgatcagttgaaagttgctactgagcttggactttggcaggaagcttttcgctctgttgaagatatctatggattaatgtgcatggtcaaagaaacgcccaagtcatctttattgatggtttattattccaaattgactgagatcttctggatttcttatagccatctttatcatgcttatgcatggtttaagctgt

SEQ ID NO: 88381 - DNA, 779 bp, Arabidopsis thaliana columbia
  unsure (1)..(779): unsure at all n locations
actcactatagggaaagctggcccgcctgcaggtaccggtccggaattcccgggtcgacccacgcgggcgagagaagaagaagatgaacgatgcggatgtgtcaaagcagatacagcagatggtccggttcatccggcaagaagcagaagagaaagcaaacgagatctccatctccgccgaggaggaattcaacatagaaagacttcagcttctcgagtctgccaagcgtaagctccgtcaagactatgaccgcaagctcaagcaggttgatatccgcaagcgaatcgactactccacacaactgaatgcacgtaggattaagtaccttcaagctcaagatgacgttgtcactgccatgaaagactccgcagctaaggatcttcttcgtgtctccaacgacaagaacaattacaagaagctttttaagagtctcatcattgagagtttgctgcgcctgaaagagccatcagtgctgctgagatgcagagaaatggacaagaaggttgttgaatcggtcattgaagatgctaaaagacagtacncggaaaaagccaaagtcgggtctcctaagatcaccatcgacgaaaaggtcttcctccctccacctcctaatccgaagctccctgattcccacgaccctcactgctcgggtggggtggtgctggcctctcaagacggcaagattgtctgcgagaacactttagacgcacgccttgacgtcgccttcagacagaagcttccccagatccggacgcgcctcgttggagctcctgaaacc

SEQ ID NO: 88382 - DNA, 403 bp, Arabidopsis thaliana columbia
gggagaattgtactggaatgagcataagctctctatttacagcaaagtgtgcacaacggtctagaaatcagactcaatcattgtcacctcctgatgtttctcgagttggttatcaagcacccatggggggccatggagcgccagatagcggctccaatgatcaagataaatcaactgaagattcttcagcggataagtcagatggagaatctcaatcaagtttggaaaagggttgtgataatgatcttggtcatcctctagaagatcaagacgcaccgtcatcttcctcatgcaatggaagtaaaggtttcctgtctcaccaaattgacaccaaagacctgaaggacaacgacgcgtacaacttttatcagtctgttgatggtcagcacattatccttcacac

SEQ ID NO: 88383 - DNA, 692 bp, Arabidopsis thaliana columbia
  unsure (1)..(692): unsure at all n locations
aggacgcgtgggcggttgctaaagtttggaagaaaaagccgcggaccggaaagcttgatgatggattgggtatctgtaacgacttctgaaggagatgatcaggttgaagatacgagacactttgcggatagatcatcagaggatttaagaaagtcgagaatgggatctctacaaaatcatctctctgaggatggattcaatgagagtgagttccctgaacaagcttctaacaccgagctgaaagatgatcatcaaatgtctggaagcaactttaaagcgcaaaagtcattcttctcgctctccacattccgcggcaaaggaaatgattcgaagccaagatagagagccatcaaagaaagaagaaacttggatgtggatcaagttgcgtgagtaaagagagaaaagagacagattctatcgcagactcaggcagacttcaaagacggtattttttcccgatgaactggctggtaacttcttcgatggtgtgtgtacattttgtttagtgaacaagaattgattaatccgattttctgtaactacattgtgattttggcaattttgaaaaatcctatttgttttaaaaaaaaaaaaaaaaaaaaaaaaaaccaaaaaaagggcggccgctctagaggatccaagcttacgtacgcggtcatgcgcacgtcaaagctctnctatnnnnnnnnnnn

SEQ ID NO: 88384 - DNA, 1486 bp, Arabidopsis thaliana columbia
  unsure (1)..(1486): unsure at all n locations
nnnnnnnnnnnnnnnnnnnnnnnnnnnnnnnnnnnnnnnnnnnnnnnnnnnnnnnnnnnnnnnnnnnnnnnnnnnnnnnngacccacgcgtccgttctttcctttgtataccaaaaaatataaaataaaaaacactatggcggaaaactacgaccgtgccagtgagttaaaagcattcgacgagatgaagattggcgtgaaaggactcgtcgacgccggagtcacaaaagtcccgcgcattttccataacccgcatgttaacgtagcaaaccctaagcctacatcgacggtggtgatgattccaacaatcgatctaggtggcgtgttcgaatccacggtcgtgcgagagagtgtagttgcgaaggttaaagacgcaatggagaagtttggatttttccaggcgattaaccatggggttccacttgatgtgatggagaagatgataaatggtattcgtcggtttcacgaccaagatccagaagtgaggaaaatgttctatacccgagacaaaaccaaaaagcttaaatatcactctaatgctgatctctatgagtctcctgctgcgagttggagagataccttaagttgtgtcatggctcctgatgttccaaaagcacaggacttacctgaggtttgtggggagatcatgttggagtactcaaaggaagtgatgaagttagcggagttaatgtttgaaattttatcagaagctttagggttgagtcctaaccacctcaaagaaatggattgcgcaaaaggtttatggatgctctgtcattgttttccaccctgtcctgagccaaaccgaacattcggcggcgctcagcacacagacagatctttccttactattcttcttaacgacaacaatggaggacttcaagttctctacgatggatactggatcgatgttcctcctaatcccgaagcacttatctttaacgtaggagatttcctccagcttatctcgaatgacaagtttgtaagcatggagcatagaattttggcaaatggaggtgaagagccgcgcatttcggtcgcttgtttctttgtgcatacttttacttcaccaagttcgagagtatatggacccattaaagagcttctgtctgagctaaaccctccaaaatacagagacaccacctcggaatcctccaatcactatgtggctagaaaacctaatgggaattcttcgttggaccatttaaggatctgaaacttgaacctatatctcagaggttttcttgagtttccaataaaatttggtgcacgctgtgacgtaccatgttcaagaccttgaacgtatcattcaataattcttccgttgtgagtttcggctgcatgtttgacccaaaccagagggagtatggatcaatcaaggagagtgaacctaaaaataaaaaaaaaaaaaaaaaaaagggcggccgctctagaggatccaagcttacgtacgcgtgcatgcggcgtcatagctctatctatagtg

SEQ ID NO: 88385 - DNA, 654 bp, Arabidopsis thaliana columbia
gttagatcagacaatgcaccagaattgaagtttgtgaagttgtttaaagaaaagggcatcattcattatttctcttgtccagaaacaccagaacaaaactcggtggtggaaaggaaacatcaacacatattgaatgttgctcgttctcttatgtttcaagctcaagtgcctgtggaatattggggagagtgtgtgttaactgcagtcctcccctccgatcgattgcctacaccattgcttcatgacaaatctccttttgaagtgcttactaacaaaatgcctgattttaatggtcttcgtgtgtttggctgtctttgttacagttctacatcaaccaaaaatcgagataagtttcaaccaagagctaaggcgtgtgtgtttcttggttatccaccaggtgttaagggttatcgacttttggatttggaaaccaatatcatatacgtctcacgcaatgttgtttttcatgaagacatttttccatttgctaaaagtggatctactgttcttcctgagtattttgctactgaaacatctaatgttgatgcatcttctactgaagcatctacttctgaagcacctgcagttgtgaatgattctgtcactccatctaatatcaatcctgtagttggggagtgattctcctacggatac

SEQ ID NO: 88386 - DNA, 396 bp, Arabidopsis thaliana columbia
attatcaccggttttttgggctctggcaagacaacattgctgaatcatatactgaccagagatcatgggaagcgaatagccgtgattgagaatgagtttggtgaagttgacattgatgggtcacttgttgcttctaaatctattggagctgaggatattgtgatgctcaacaatggctgcctttgttgcactgttaggggtgatcttgtcaggatgattggagaattagtcaataccaagaaaggaaagttcgatcatatagtcatagagactacaggattggcaaacccggcaccgattatccaaaccttttatgccgaggaagaaattttcaatgatgtcaaactggacggtgttgttactctagttgatgctaagcatgctcgtttgcatcta

SEQ ID NO: 88387 - DNA, 479 bp, Arabidopsis thaliana columbia
  unsure (1)..(479): unsure at all n locations
nnnnnnnnnnnnnnnnnnnnnnnnnnnnnnnnnnnnnnnnnnnnnnnnnnnnnnnnnnnnnnnnnnnccacgcgtgcgagctaatccaatgggttatgtaatctacatatcgttcccggcgattcttctccttctgatcgtcgctatcgccttttatctcatcggacgaaaaatcggccggagagaagggattcaatcaacgtcgcagttacactacggaccgccgttggctgggggtccggcacctgcgccaccgcataaagctatggagaagccaccggggccggtttagtggatgtatgatgacgtaataatacttacgtattacgtaaaccgtctatatatggaggttggggtgttaaataagatggaattgggccgaggctgaaaccaattttaaaacaactctttatgggccctggggttaaaggaacacttcgggccgttaaattccggactccctaaggcaccctaaaact

SEQ ID NO: 88388 - DNA, 486 bp, Arabidopsis thaliana columbia
  unsure (1)..(486): unsure at all n locations
nnnnnnnnnnnnnnnnnnnnnnnnnnnnnnnnnnnnnnnnnnnnnnnnnnnnnnnnnnnnnnnnnnnnnccacgcgtgcgctcgacgagtcaattttaaccagatttagaggatttgtggatgtgatttcttcttttggtgagttttctcctctttttttattgtttctttcattctctttggatcttcatagtttcagaagcttcgagtgttttttaaaggtagttcctttgtcgctgaagaaacatagtttcaattttagagcttcttgaaacttattttcttatctggctcaatcttgagagttttgagattctgtgggagagacaatcttagggtttctgcatctagcaaaagtttgaatctttaaatatcttttagcgtttgcgattgtggtattgcctctggtctgtgttcaatgggaatcttcccttttgggacagaatgattctctcttctcgttttagattcctcggttcatgtcct

SEQ ID NO: 88389 - DNA, 1024 bp, Arabidopsis thaliana columbia
  unsure (1)..(1024): unsure at all n locations
atgatcttnnnnnnnnnnnnnnnnnnnnnnnnnnnnnnnnnnnnnnnnnnnnnnnnnnnnnnnnnnnnnnnnnnnnncggaatccacgcgtccgcccacgcgtccgctcttttagtaacaatggtttcttcttctttaaccaagcttgtgttctttggttgtctcctcctgctcacattcacggacaaccttgtggctggaaaatctggcaaagtgaagctcaatctttactacgaatcactttgtcccggttgtcaggaattcatcgtcgatgacctaggtaaaatctttgactacgatctctacacaatcactgatctcaagctgtttccatttggtaatgccgaactctccgataatctgactgtcacttgccagcatggtgaagaggaatgcaaactaaacgcccttgaagcttgcgcattaagaacttggcccgatcagaaatcacaatactcgttcatacggtgcgtcgaaagcgatacgaaaggctgggaatcatgtgttaaaaactctggacgtgagaaagcaatcaatgattgttacaatggtgatctttctagaaagctgatacttgggtacgcaaccaaaaccaagaatttgaagccgccacatgaatacgtaccatgggtcacactcaacggcaagccactcgatgacagcgtacaaagtacggatgatctcgtagctcaaatctgcaatgcatacaaaggaaagactactctcccaaaagtttgcaattcatccgcctcaatgtctaagtcgcctgagaggaaatggaagcttcaagtctcttatgccaataaagctaccaattattaagttaactatcaaacttcgtattgaactaagatggatttaagctttatgttataagtggaatgatgaataaaggcctgttctaaactaaaaaaaaaaaaaaaaagggcggccgctctagaggatccaagcttacgtacgcgtgcatgcgacgtcatggcttgtttataaannnnnnnnnnnnnnnnnnnnnnnnnnnnnnnnn

SEQ ID NO: 88390 - DNA, 481 bp, Arabidopsis thaliana columbia
ggaaagctgctacgcctgcaggtaccggtccggaattcccgggtcgacccacgcgtccgtctctgtccgtacgacgtcgaatatctagattgttcgacggcgatgggagctgggagagaagtcagcgtatcgctagatggagtcagagacaaaaacttgatgcagcttaagatactcaacacggttttgttcccggttcgttacaacgacaagtactacgccgatgcaatcgctgccggcgaattcaccaagcttgcatattacaatgacatatgtgttggagctatcgcctgtcggctggagaagaaagaaagtggggccatgcgagtttatataatgacgcttggtgttcttgcaccctaccgtgggattggcattggctcaaatctattgaatcatgttcttgacatgtgctccaagcaaaacatgtgtgagatatacttgcattgtgcaggccaaacaccgaagacgcattccaagt

SEQ ID NO: 88391 - DNA, 455 bp, Arabidopsis thaliana columbia
  unsure (1)..(455): unsure at all n locations
ggtcgaccacgcgtccgaggaagcgtgggttctagatcgcgagcggccgccctttttttttttttttaaaatagaacattttattatcattgcttacattaattaaccacaaaataaacccaaaccaaatagataaaatacacacaattggtaaaaaaaaaaaatagaggataaaatacacacaagaaagatcaccttactaaagtgtaccgaaatcaaaccgaagttgataagtcttacttaagcaatttcctgttttattattatattatcaaattaaaccaaaccaaaccgaagtgcttcgttttgttggcaaaaaccgttttattcttttactgttttatcatatttccttgtgaagcagtaagangcttctccctgaataaccttccacggctccttaacgtgcttctcctccgtcaatggcgctccaattgcgcaacgtgtacgggttt

SEQ ID NO: 88392 - DNA, 502 bp, Arabidopsis thaliana columbia
  unsure (1)..(502): unsure at all n locations
atgannnnnnnnnnnnnnnnnnnnnnnnnnnnnnnnnnnnnnnnnnnnnnnnnnnnnnnnnnnnnnnnnnnnnnnnnnnnngccaggcgtccgcccacgcgtccgatggcataattgtgaactctctccgagctaggagtatgtttacttgcttcatgcaagaaccttttcaaatctttgcctcttatttgggtcatcaatgaagaaactcttgctgttcggtctagacagtacaactcaacagggcagactgaactcctcactgactggaaaaagattttcagccgggcatcggttgtagtcttccataattatctccttccgatactctacaccgagtttgatgctggcaacttctatgtgattcccggatctcctgaagaagtatgtaaagcaaagaatctagagtttcctccacagaaagatgatgtggtcatttccattgtgggaagtcagttcttgtacaagggtcaatggctggaacatgccctgcttctgcaag

SEQ ID NO: 88393 - DNA, 514 bp, Arabidopsis thaliana columbia
  unsure (1)..(514): unsure at all n locations
gattnnnnnnnnnnnnnnnnnnnnnnnnnnnnnnnnnnnnnnnnnnnnnnnnnnnnnnnnnnnnnnnnnnnnnnnnnnnccacgcgtccgattgcagaaacagaagattgcattggcgaagcagttgaatcttcgtcctcgtcaggttgaagtctggtttcaaaacagacgagccaggttagcttatatcattaattatttatcttcattttcttcctgtgtaaacggtttattttcttcattggaagtatatttttttgctatgattaatttctgaaaagagggatgaggacgaaaaatgcatcacgagtaataataacaaattgtcgcatgtctatccttgtcatttttcgtgcaaaagtagtatatcacttccgctcatcatttccatatataattgcttatagtgacttattcacaaaaagaaaaaaattcataatccttctttatataatttgaacccaaaataaaaacgtcttctttaatctttacaaaaacaaagtcttatattgtt

SEQ ID NO: 88394 - DNA, 426 bp, Arabidopsis thaliana columbia
cccccgccttccgggtctgacacgtgtccggttgttttaacgaagcagcgttcggtgagtgagaaatcagccgggtcgtcgtcgtcttcttcatcaaatttttcgagaatgagtttagattcgggtcgggttcacgggtcgagtacaccgagatgggttgagttttggagtgacgcggcggttgatcgtcggaggagaaactctgcttcttctatgtcgtcgtcacactcttcatcgccggagagatatttagatttaccaagatccgagacaccgaaatgggtcgacgattacgtgaaccggatcgggtcggttttaagaggaggcgggtggagcgaatccgacgttgatgatattgtacacgtgtcagcatctggtttttttgagggtgaaatggtaattttggataatcaagccgttcttgag

SEQ ID NO: 88395 - DNA, 470 bp, Arabidopsis thaliana columbia
cgcgtccgaccaagcgtccggaaagagcgagagatgggagggaaaggaaaaaagaggagagagaaaaattacctagctgctcacggcggaccggcgagacttccgccgccgcctgatcgttcgaagcaagatgatgttccttctacgctccgtatcctcatgaactacacttctccttctccccatgattctactaaacaagtcgtagagaagaaggaaaagcttaagaaagctgaagtagttgttcctgcaacggagagtgatggagatgatagtgtggtggagaagaagaagaaaaagaggaagagaaatcaaatgacggatcttcgttttgaaaacgaacttgcagagattgatggccggtctaaaaggaaagaacgcaagaagaagtattgggaggccaagaagcaaaagatggtttaagggaagactgaagataccctccgtgaaaacttccccaagcatgaaca

SEQ ID NO: 88396 - DNA, 547 bp, Arabidopsis thaliana columbia
  unsure (1)..(547): unsure at all n locations
cgacccacgcgtccgggaaccaatggcgtttaagccagagaggtttatggaagaagcggtggacataaccggaagcagagggataaagatgatgccgttcggagcgggtagaaggatttgtccagggattgggctagcgatgctgcatctggagtactatgtggcgaatatggtgagggagtttgactggaaggaggtccaaggtcatgaagtggacttgacggagaagctcgagtttaccgtagtcatgaagcatccgcttaaggcccttgctgttcctaggagaagtcactagttgtctacttcttaaacttcagtttagtattcaccaaagactaggtgatgtatgaagaattgaagttatgggcattttgttagctgaagtcaactatggaactatcttttttattaaagtacattttgtaccttggaataaatgatagaaacaacaatccttttaaaaaaaaaaaaaaaagnnnnnnnnnnnnnnnnnnnnnnnnnnnnnnnnnnnnnnnnnnnnnnnnnnnnnnnnnnnnnnnnnnnnnnn

SEQ ID NO: 88397 - DNA, 532 bp, Arabidopsis thaliana columbia
  unsure (1)..(532): unsure at all n locations
nnnnnnnnnnnnnnnnnnnnnnnnnnnnnnnnnnnnnnnnnnnnnnnnnnnnnnnnnnnnnnnnnnnnnnnnnnnnnnnnnnccacgcgtccggttttggagacgcatcaactcatgatcaagacgtgtttagtttctatccagagggaagattctgtaatggatttgaggaagtattggctcgttatagagaaattgtacctcagcttaagctcgcaggaccaacttcttttgccccgatcattgaaatggcaatgacagtggttgagcagagtagtggccaatatcatgtgttagtgattatagctgatggccaggtcacaagaagtgtcgataccgaacacgggcggctaagtccgcaagaacagaagacagtagatgcaattgtgaaagcaagtacccttcctttgtcaatagtcttagttggggtcggggatggaccatgggacatgatgcaggaatttgatgataacatacctgcccgagctttcgataacctccagtttgtgaacttacagagatcatgtcaaag

SEQ ID NO: 88398 - DNA, 725 bp, Arabidopsis thaliana columbia
tccaccagccaatccccggaggttcttttcaagttacataaggaccaatggaaatatatcaaaggttccccctagtagctggatgggatttttctttggttctacaccaccagacagtcatggccctaggctttcgaaattgagttcatctccacaatgtacactttctggaagcagtccacctgtgggctctttgccaaaatcatttccaccttttcaacatccgagccaccaactgttggaagagaatgggtttaaacaagaaaagtacttgaagtatcgcaagcgctgcttaaacgaaagaaagaagctaggtagcggatgcagtgaggaaatgaaccatttgtaccgattttggtcgtatttcctcagagacacatttgttctctctatgtatgatgactttcagaagtttgctcttgaggatgcagctggcaattacgattatgggctggagtgtctctttaggttttatagttatggtctggagaagcactttgatgaggacctttacaaggactttgagaagctatcgcttgacttctaccacaagggaaatctgtatggcttggagaaatattgggcattccaccattatcgaggcaaagaagaaccgataacaaagcaccctgagctagagaaactactgaaggaagaattccgtagcatagacgatttccgagcaaaggaaacaatcaccaaccaaaaagaaaacaagtctcact

SEQ ID NO: 88399 - DNA, 1275 bp, Arabidopsis thaliana columbia
  unsure (1)..(1275): unsure at all n locations
gtcttaaaacaagtagagtattatttcagtgatgaaaaccttgagaatgatcattacctcatttctttgatggatgaagaaggatgggttcccacaaaaattatagctggcttcaaaagggttaaagcaatgactatggatgttgattttatagtctatgcgttggggttttctaattctgttgaagtgcagggtgaccagatacgcaagcgtgacaagtggtctgactggattcctgcatctaaaaagtcaacctctgcggagacaattggagacggtgacaaagattccccaaaaagtataacaagcggggataattttggaaacccttcaaagggttcttcaaagcctaccgtgtccgatttctcttcagagggagctcagtcatcaagaaccaataattataaaagtggtaacctggaatcatcagcagacgaaaaaagaaatgtggaggacttgtcaaacgatttttcaaacactttcttgcttgacgaggaactagatctggagcacagaagccccacgcggccgggactgtccatgtccaaaagcattgagtatgaagacgatgatatggctgttgatgatcaagatattcagaaacttgtaattgttacccagaatagtggtaaaagtgatggcgctggaatcggtgggacggaagcaaaaaatattcctaaggagcttgcctccacaatcaacgatggtctttactactttgagcaggagcttaaaaaaaaacgatctggccgtaggaagaacaactcccatttggataccaaagatgggaaaatcaaatctggggaaggattgaacactaagttgggcgaaaattccgcagcaaatgatggaggggaagagcatggaatcattacttcacggaggaagcaaaataagggaacgcacaaacatcatacagcccatgcacggaggttcttctcgagtaacataaggaacaatggaaatatatcagaaagtccgcctagtagctccattggattttcctttggttctacaccaccagacagtcatggccctaggctttcggaattgagttcatctncacaatgtacacttttcttggaagcagtccacctgtggggctctttnnccaaaatcattttccacctttttcaaacatncggggccacccaactnttttggaagnggaattgggntttaaacaaggnaagttcctttagggttntgaaaagcnctttttaaccgggannaaanaagctttgttgngggttnnntttgggaattacccttttt

SEQ ID NO: 88400 - DNA, 2024 bp, Arabidopsis thaliana columbia
atttccttcggagcctggccggcgaatccgacaggtcgtttcagctgtgtccgaaggaaagttccaatttttatctgtttttcttcacggaaatccagttaaggtttccacattgcacagctgtaccatttgtcgagatcacaacacgcaagtctcttagatttagcaagcttatggcttcattgcagttgtacggagttaaaactccagggcttgctttaagttcaaagaggcttgagtttgcttcaaagggggcatgtttttcagttacgttgccctcaagtagtgctgtctttagagacgtagagcattcttgtaggaatataggtttgagagttagttgtgaagctctaagagtcgatttgcttcaaagaaaagagcctgagacgtgcgattcaagcggaactggcaaagagttgacatgtgtaatgaaatttggcggttcatcagtgggatcagcagagaggatgaaagaagttgccaatcttatattcagctttccagatgagaggcccgtcattgtgctatcagcaatgggaaagacgattaataagcttttgaaggctggagagaaggctgttacttgcggtgtcactaacgtaggaagtattgaagaattgagctttataaaggaactccatttaagaactgctcatgagcttggagtggaaacaacggttattgaaaaacacctagaaggactacaccagcttctcaaaggcatatcaatgatgaaagagctaaccttacgcacaagggactacttggtttcatttggagagtgcatgtccacaaggcttttctctgcgtatctcaataaaattggccacaaagcgcgtcaatatgatgcatttgagatcggatttatcaccacagacgactttactaatgctgatatacttgaagcaacataccctgccgtctcaaaaacacttgttggcgactggagcaaggaaaatgcagtccctgttgttactggctacctcggaaagggatggaggtcttgtgctatcactacgctgggtaggggtggcagtgatttgacagctacaacgattgggaaagcgctaggactgcgggaaattcaggtttggaaagatgtggatggagttttgacttgtgatcctaacatatatcctggagctcaatctgttccgtacttaacgttcgatgaggcagctgagcttgcttactttggtgcccaggtgttgcatccactgtctatgaggccagcaagagatggcgacattcctgtgagggttaagaactcgtacaaccccactgctccaggaactgtcatcaccagatcaagagacatgagtaaggctgtgctaaccagcattgttctgaaacgtaatgtgaccatgttggacatagcaagcacccgtatgcttggccaatatggtttccttgccaaggtgtttaccacatttgaagatttaggtatatcggttgatgttgtggcaacaagtgaagttagtatatcattgacattggatccagcaaagctctggggtagagagttaattcagcgagtaaatgaactggataatttggtggaagagctagagaagattgctgttgtgaaactacttcaacgcagatcaatcatctctctcataggaaatgttcagaaatcctcactcatattagagaaggtgttccaagtatttagaagcaatggagtgaatgtgcagatgatctcgcagggcgcatctaaggtaaacatctcattgatagtgaatgatgaagaggcagagcaatgtgtgagggctctccactccgccttctttgagaccgatccttagtgcaacacagagcacccatctctctccttcaactctgcttctgtgcgtagtttaatgctaagaatgtgtcaagacttggaactatttcaaattcttgtccattgttgttgttgttgttgttgttgttgttgtgatacaatacatcataatttgagccaaaaaaaaaaaaaaagcctataatcttttaatttaaagagtacatagacaagctcaaag

SEQ ID NO: 88401 - DNA, 766 bp, Arabidopsis thaliana columbia
  unsure (1)..(766): unsure at all n locations
taggtgcaactatagcaagagctatgacgtcgcatgcacgcgtacgtaagctcggaattcggctcgaggaggaaaacaaagctgcgaaaacaaaaataaaaaaaacatcgcacaagaaaataaaagatttgtagaatcaactaagaaaatggctagcactatgatgactacattgcctcagttcaatggtcttcgagccaccaaaatctctgcagctcctgtacaaggcctggcaagtgttcagcccatgagacgcaagggaaatggacctttgggtgcaaagtgtgccttcatcggttcatcaacaaatctgattaatggtaacgcccccgcccctcattgttgttcccggggagattcggacttgcgccatcagccaataggaaggcgacagctggacttaggttggaggcacgtgactcaggtctacaaacgggtgacccggccgggttcacgcttgcggacactttggcttgtggcaccgttggtcatatcatcggtgtaggagttgtccttggccttaaaaacattggcgctatttgaagttcctaaagctcttttatttgtatttgtaaaatttgtagatttttataacaatattctcatgcacctgaacgagatctaatggattttacaagtctttatgtttatcttataatgttgtatcgaaaaaggtccccctttaaatnnnnnnnnnnnnnnnnnnnnnnnnnnnnnnnnnnnnnnnnnnnnnnnnnnnnnnnnnnnnnnnnnnnnnnnnnnnnnn

SEQ ID NO: 88402 - DNA, 839 bp, Arabidopsis thaliana columbia
  unsure (1)..(839): unsure at all n locations
ctaaacgactcactatagggaaagctggtacgcctggcagtaccgcacgtgaattgccgggacgacccacaaaaaacatcgcacaagaaaataaaagatttgtagaatcaactaagaaaatggctagcactatgatgactacattgcctcagttcaatggtcttcgagccaccaaaatctctgcagctcctgtacaaggcctggcaagtgttcagcccatgagacgcaagggaaatggagctttgggtgcaaagtgtgacttcatcggttcatcaacaaatctgataatggtaacgtcgacgaccctgatgttgttcgcggggagattcggacttgcgccatcagccaataggaaggcgacagctggacttaggttggaggcacgtgactcaggtctacaaacgggtgacccggccgggttcacgcttgcggacactttggcttgtggcaccgttggtcatatcatcggtgtaggagttgtccttggccttaaaaacattggtgctatttgaagttcctaaagctcttttatttgtatttgaaaatttggagatttttataacaatattatcatgcacctgaacgagatctaatggatcttacaactctcaggaacgaaaataaatatagnnnnnnnnnnnnnnnnnnnnnnnnnnnnnnnnnnnnnnnnnnnnnnnnnnnnnnnnnnnnnnnnnnnnnnnnnnnnnnnnnnnnnnnnnnnnnnnnnnnnnnnnnnnnnnnnnnnnnnnnnnnnnnnnnnnnnnnnnnnnnnnnnnnnnnnnnnnnttnnnnnnnnnnnnnnnnnnnnnnnnnnnnnnnnnnnnnnnnnnnnnnnnnnn

SEQ ID NO: 88403 - DNA, 565 bp, Arabidopsis thaliana columbia
  unsure (1)..(565): unsure at all n locations
cntttccacccccctgagttctagcaatntcnggcccaagngcccnaccccnttngaggtgcgggagaggtgncctncccntttctgtgtcnccggcntttagacangatccttagaccgngcgcagctaccaggncntagatgctccagaggaagaagtgnccgttattgattacaggagcttgtagacaagacagggctagagagatcccgagtttactggttcgggttgggttaaagggcatcagtattagaaggcaaagctagcagattgtggcattttcttacccttttgatgtattatgtcttgttcctcccaattttcactcactaaagcgtaaaatacgcactccatacatttccttattgtttttcaaaattttcatgtgctttcttactaattctgttcgacgatgattacataaatagcatgagaatttcttgtattgaataatgcgttttatccacattgtttgttatcaatacttaaaaaaaaaaaaaaaaaaagggcggccgctctagaggatccaagcttacgtacgcgtgcatgcgagctcaagctttt

SEQ ID NO: 88404 - DNA, 1099 bp, Arabidopsis thaliana columbia
  unsure (1)..(1099): unsure at all n locations
gccaagggctgcacgaagctgtttcatgctgctgaatttgtgtacaagcatctcaagctgaaacacactgagcttgtcacagagctgactaccaaagttcgggaagaactgtattttcagaactatatgaatgatcctaatgctccaggaggacaaccagccacgcagcaatctggcccgagagatagacctataagacgtaaacccagcatggagaacagactgagggatgatagaggtggacgcagagagcgtgatggacgtgctaatggaaatgacagaaatgatcggtcagaagatcaacagagaggggataatgatggtggaaatcctggggaagttgggtatgatgcatttggtggacaaggtggtgttcatgttcctcccttcttatcggatataaacccaccaccaatgctgatgcctgttcctggtgctgggccactgggaccatttgtaccagcaccaccttgaagttgctatgcagatgttcagggacccaagtggacccaacccctccttttgaaggtagcgggagaggtggacctgccccttttctgttgtctccggcctttagacaagatccttagaccggctgcgcagctaccccaagacccctagattgctccagagggagaagtgaccgttattgattacaggagcttgtagacaagacagggctagagagatcccgagtttactggttcgggttgggttaaagggcatcagtattagaaggcaaagctagcagattgtggcattttcttacccttttgatgtattatgtcttgttcctcccaattttcactcactaaagcgtaaaatacgcactccatacatttccttattgtttttcaaaatttttcatgtgctttcttactaattctgttcgacgatgattacataaatagcatgagaatttcttgtattgaataatgcgttttatccacattgtttgttatcaatacttaagtctccatggcagtcttaaatctccatggccattaaaaaaaaaaaaaaagnnnnnnnnnnnnnnnnnnnnnnnnnnnnnnnnnnnnnnnnnnnnnnnnnnnnnnnnnnnnnnnnnnnnnnnnnnnnn

SEQ ID NO: 88405 - DNA, 1668 bp, Arabidopsis thaliana columbia
caagattttctctcaggtgactgaacaacagagaaaaacatggcgaaaaaaggaaaagaagtgttgaacgctttggacgcagccaaaacgcagatgtaccatttcacagcgattgtaatcgcgggtatgggttttttcactgatgcttacgatctatttagcatctccctcgtcacgaagctcctaggccgcatatactaccacgttgatagctccaagaagcctggaacgctccctcctaatgttgctgccgctgttaatggtgtggccttctgcggtaccttagcaggccagctcttcttcggttggctcggtgacaagctcggccgcaagaaagtttacggtattaccttgatgctcatggtactatgttctctcgggtctggtctatcatttggtcactcagctaacggagtaatggccacactttgtttcttccggttctggctcggtttcggcataggcggcgactaccctctctcagccaccatcatgtcggaatacgccaacaagaaaacacgtggcgccttcatagcagccgtcttcgctatgcaaggcttcggaatcttagccggaggaatcgtgtctctcatcgtctcgagtacatttgaccatgccttcaaagcgcccacctacgaggttgatcctgttggctccactgttcctcaagcggattacgtgtggcggattgtgctcatgtttggagctatcccagctttacttacttattattggcggatgaaaatgccggaaactgctcggtataccgctcttgtagctcggaataccaaacaagccgcctccgatatgtctaaggtgcttcaagtggatctaattgcagaagaagaagcacaatcaaattcaaattcatcaaaccctaatttcaccttcggtttattcaccagagaattcgctcgccgtcacggtctccaccttctcggcacaaccaccacatggttcctcctagacatcgcctattacagcagcaacctcttccaaaaagacatctacacagcaatcggatggattcccgccgccgaaacaatgaacgcaatccacgaagtcttcaccgtctcaaaagctcaaaccctaatcgctctctgcggcaccgtccctggttactggttcaccgtcgcattcatcgatatactcggtcgattcttcatccagttgatgggatttatcttcatgacgatctttatgttcgctttagcgattccttatgatcattggagacatagagagaatcgaattggttttttgattatgtattcgttgactatgttcttcgctaattttggacctaatgcgacgacgtttgttgttcctgctgagatatttccggcgaggttgagatcgacttgtcatgggatatcggcggcgagtggtaaggcgggagcgattgttggagcgtttgggtttctttacgcggcgcagagttcggattcggagaagactgatgctggttatcctcctgggattggtgttaggaattcgttgttgatgcttgcttgtgttaatttcttggggattgtttttactctgttggttccggagtctaaagggaagtctttggaagagatttcgagagaagatgaggaacaaagcggcggagatacggtggtggagatgactgtggcaaattccggtagaaaagtcccggtttga

SEQ ID NO: 88406 - DNA, 3476 bp, Arabidopsis thaliana columbia
ggagagctaatctgagtcgttgcctctgtccactggctcggaccgacctcgtacctctttcatttgtcctcgagcttataatagacgtacgccgtcgccgccacctccgctccatccattcacggccaagcgacgactccaccgcttaggcttggcgtctgaggtatactgatcaacgctttctgttttcggaggagcgaggcgagatcagcttctcttatgtctactcaaacatatcattcttctttagccactcgatttcttctctagcggctccagaggtttcgtcgctacagagtcaagttcctcttttcaggttttgtggtgaacaagattttagttacaaaaaaatggtgggactggaagatgatactgagagagagaggtcaccagtcgtagagaatggtttttccaatgggtctcggtcttcttcttctagcgcaggtgttttgtctccatcacgaaaggtcactcaggggaacgatacactttcttatgccaatattcttcgggcaagaaacaagtttgctgatgcgcttgctctctatgaggctatgctggagaaagatagcaagaatgttgaagctcacattggaaaagggatatgcttgcagacgcagaacaaagggaatctagctttcgattgtttttctgaagcgatcaggttggatccgcataatgcttgtgcccttacacactgtggtatacttcataaagaagaaggacgcctcgtagaagctgctgagtcctaccagaaagcattgatggcagatgcatcatacaagccagcagcagagtgtttagccattgttttgaccgaccttggaactagcctgaagctggctgggaatactcaggaaggaattcaaaagtattacgaagcccttaagattgacccacactatgctcctgcatattacaacttaggtgttgtatactccgaaatgatgcaatatgacaatgccttgagctgctacgagaaggctgcacttgagaggcctatgtatgctgaagcatattgtaacatgggtgtcatttataagaaccgtggtgacttggagatggcaatcacttgttatgagagatgtctagctgtgtctccaaactttgagattgcgaagaacaatatggccatagctctgacagatttaggaacaaaggttaaacttgaaggcgatgtaacccaaggagtggcatattacaagaaggctctctattataactggcactatgcagatgctatgtacaatcttggggtggcttatggagaaatgctaaagttcgacatggcgattgtcttctatgagcttgctttccactttaatccacattgtgctgaggcttgcaacaatttgggagtactttacaaagaccgtgacaaccttgataaagctgtggagtgttatcagatggctctatcaatcaaaccaaattttgcacagtcgcttaataaccttggtgtcgtctatacagtccaggggaaaatggatgctgctgccagcatgattgagaaggctatacttgctaatcccacatatgcagaagcttttaacaacctaggtgttctttacagagatgctggaaatataactatggctatcgatgcttatgaggaatgccttaagatagatccagattctcgcaatgctggccagaaccgattgcttgccatgaattacataaatgaaggactcgatgacaaactatttgaggctcacagagactggggttggcgcttcacaagattacaccctcaatacacttcatgggataatctgaaagatccagagcgacctatcaccattggatatatctcaccagatttcttcactcattcagtatcttatttcattgaagctccccttacgcatcatgattatacaaagtacaaagtggtggtttattcagcggtagttaaggcagatgcaaaaacatacaggtttagggataaagtgttgaagaaaggtggagtttggaaggatatatacgggatagatgagaaaaagatagcaagtatggtcagagaggacaaaatcgacattttggtagaactcactggtcatacggcaaacaacaagttgggaacaatggcctgcagaccagcaccggttcaggttacttggatcggctatccaaatactacgggtttgcccactgttgattacagaattacagattcgttggctgatccaccagataccaaacaaaagcaggtcgaggagctggttaggcttccggactgttttctttgttatacaccttccccagaggctggtcctgtttgtccaacacctgcgctttctaatggctttgtcacatttggtagtttcaacaacctcgcaaagataactcctaaggtgctgcaagtgtgggctaggatactgtgtgcagttcccaattctcgtctagtggtaaaatgcaaacctttctgctgcgatagcattaggcagaggtttctcaccacgctggagcagcttgggttagaatcaaagcgtgttgatctcttgcctttgattcttttcaatcacgaccatatgcaagcctattccttgatggatattagtttggacacattcccttatgctggaactaccactacctgtgagtctctctacatgggagttccatgtgttacaatggctggctcagtacatgctcataatgttggtgtcagtcttctcactaaagttggattaggacacctggttgccaaaaatgaggatgagtatgttcagctatctgttgatctagcctctgatgtcacagctctttctaaattgagaatgagtctccgggatctaatggctggatctcctgtttgtaatggtccttcctttgctgttggtcttgaatccgcatatcggaatatgtggaaaaagtactgcaaaggtgaagtgccgtccttaaggcgaatggaaatgctgcaaaaagaggtccatgatgatcccttaatctcaaaagacttgggaccatcaagagtcagcgttactggagaagccactccgtctctcaaggccaatggttctgctcctgtaccttcctctttaccaacccaatccccgcagctctcaaagagaatggactccactagctagataaccagcaaatcgacgtgctgcgaaatgccggcagagagtcttgacccatctggaaaaggtgtgaaagaaagagtcgatgagcttttcctgctatttacttccaagacaataggaactagactttagattactgcttgtgtagtaaaaagaatagtaaaaccagctctttcttttgttgtatctctttctactcttagtttagctttacatgattcttgggaagtcgttaggtggtagtggatttggagtttttcttctcatttgagagatcaagttgttgtgtatcgattagggttttaaggctttttaggatgttttcatgtgttggattttgactcatatgatagtaaatatagttatagaaagcttttcggtgcc

SEQ ID NO: 88407 - DNA, 917 bp, Arabidopsis thaliana columbia
  unsure (1)..(917): unsure at all n locations
nnnnnannnnnnnnnnnatacgactcactttagggaaagctgcgtacgcctgcaggtaccggtccggaattcccgggtcgacccacgcgtccgcttcaacaaagattgtctagttcggatcttgaaacgagcgatgatgagtgtgttgtaacgtatgggtttggttatgatgaatctgaagatgactataaagtggttgcgttgttgcaacaaagacaccaagtgaagatagagacaaagatctactcaacgagacaaaagctatggagaagcaacacaagtttcccatctggagttgttgttgctgacaaatcaagatccggaatctacatcaacgggacactaaactgggcagccacttcctcatcatcgtcatggacgatcatatcgtatgatatgtcacgcgatgagttcaaggagcttccagggccagtttgttgtggcagaggatgttttacaatgacgcttggagatttaagaggatgtctttcgatggtgtgttattgcaaaggagctaatgcagatgtttgggtgatgaaggagtttggagaagtatattcttggtctaaactcttgagcattcctggtttgaccgactttgttcgaccgctttggatctcagacggtttagtggttttattggagtttagatccggtttagctctctataactgttccaatggaaggtttcattacccagtttcaaacagcataagtggttgtcgtgacgccaaagtttatctcaagacaatggtttctccaaatgatctttgagatataaaaaattgttcctaatgtttctatccaagattttatttaaaaaaaaaaaaaaaaagggcggccgctctagaggatcccagcctacggacgcgggcctgcgacgtcctaagttctcctatagtgtcacctaaatcaat

SEQ ID NO: 88408 - DNA, 429 bp, Arabidopsis thaliana columbia
acgcgtccgagacctcaaccgtcttctgctcctccgccccgccacagtttcttagggttcttccgcattgtttctccgaattgcaatcccctcattctccacaataaacagatagctaatataattgagtttggatactcgcaagtgaaaatatgtcggtcacagcgggagtgagtgaatctgcaattgctgtaagggagaaactaaaaggtggtattggacagactaaagtgcgaaggtattggccaggaaaagctccggagtgggctgaggaagctgaagaagatgatgatgttaggatgcagaaggtttctgttttggatagagcttttccaaagaatgatgatttgggtgttgctaggaaggatgatccaaggctgcgccgtttagctaagactaaagttgaaaaccgtgacgaagttagagctg

SEQ ID NO: 88409 - DNA, 506 bp, Arabidopsis thaliana columbia
acgcctgcaggtaccggtccggaattcccgggttgacccacgcgggcggagacctcaaccgtcttctgctccgccgccccgccacaggttcttagggttcttccgcatcggttctccgaattgcaatcccctcattctccacaataaacagatagctaatataattgagtttggatactcgcaagtgaaaatttcctccgtcacagcgggagtgagtgaatctgcaattgctgtaagggagaaactaaaaggtggttttggacagactaaagcgcgaatggtatgggccaggaaaagccccggagggggctgaggaagctgaagaaaatgataattgctggatgcaaaagggttctgttttggataaacttttccaaaaaagaaatatgggtgcggctagaaagatatcccagggtgcgcccggtaggctaaacttagggtggaaaaccgggccaaagtagagctgatcttcgggggataaaaaggctggaattatttttacggga

SEQ ID NO: 88410 - DNA, 508 bp, Arabidopsis thaliana columbia
  unsure (1)..(508): unsure at all n locations
nnnnnnnnnnnnnnnnnnnnnnnnnnnnnnnnnnnnnnnnnnnnnnnnnnnnnnnnnnnnnnnnnnnnnnnnnnnnnnnnnnnnccacgcgtccgcggacgcgtgggccagaatctgccgtcaccttttttcggtttttgcgtcttcctcaaaaattcgataacaatggtgaaacggaatcgagttccgccggcagaacaagcattacccatcgaagaagattgcaaatcgttgataaaaaatgcttgctgcggggtaagcaatcaatccgcgacagatccttgcgaactgttcttcgtacttggctcccagaacaaactgaaatctccgatgaagatatgaagaagctatggcaaggaatcttctattgggtctggcacgctgataagtctctttaccaatcagaacttattgatcggctctcttctgctcttcaatcacttcctcttcctttgtctatccattacttcaccgtcttcttgttcaccatgcgtcgtgagtggtctcg

SEQ ID NO: 88411 - DNA, 715 bp, Arabidopsis thaliana columbia
atacgactcacctttagagaaagcacgtacgcctgcaggtaccggtccggaattcccggttcgacccacgcgtccggacacgattcaacatcaaatctagctgaattattgtttcgcgttgattgattgatccggagaaaggcgatgacatcgcctggatcgaagaaagttgttaccaccgacgacggatcggagaagaaagtttccggcaatctcggaaaagtaagtttttccggagatcttaatcatagtggaagccatagtggaagccatagtcgtagcagcagcagcgccggaggtggtgaaggaggaacgtttgagtatttcggatgggtttatcatttgggtgtgaataagatcggtcatgagtactgtaatcttcgtttccttttcattagaggcaaatatgttgagatgtataaaagagatcctcatgagaacccagacattaaacctataaggcgtggtgtcatagggccgacaatggtgattgaagagctaggacgtcgaaaagttaatcatggggatgtctacgttataaggttctataaccggttggacgagtcaaggaaaggagaaattgcttgtgctactgctggagaagccctgaaatgggttgaggcttttgaggaagcaaagcagcaggctgaatatgcactatcgagaggcggaagtacaagaacaaagttaagcatggaggccaacatcgatctgg

SEQ ID NO: 88412 - DNA, 982 bp, Arabidopsis thaliana columbia
  unsure (1)..(982): unsure at all n locations
cccacattatagagcaaaaagctttttcccggaaagttgttctcatcttggaaaatcaaatctcggaaacgcagtcttcagctaaatcatgagcaacgagtacgattatctgttcaagcttttgttgatcggtgactcctctgttggaaaatcgtgtcttcttctccgattcgctgatgatgcttacattgacagctacataagcaccattggtgttgacttcaaaattaggacgattgagcaggatgggaagacgattaagctgcaaatttgggatactgctggacaggagcgtttcaggaccatcactagcagctattacagaggagctcatggaatcattattgtttatgactgtactgagatggaaagcttcaacaatgtgaagcagtggttgagtgagatcgatagatatgccaatgagagtgtttgcaagcttttaatcggtaacaagaatgatatggttgaaagcaaagttgtttccaccgaaactggaagggccttagcagatgagcttggaattccctttcttgagaccagtgccaaggattctattaacgttgaacaggcattcttaactattgctggcgagataaaaaagaaaatgggaagccaaacgaatgcaaacaagacatctggtcctggaactgtccaaatgaaaggtcagccaatccaacagaacaatggcggttgctgcggtcagtagtttaaaaaatgttttaatcaaaactatctgagactctttttttacttcctttttaactaagtgttgtgaaaaccaatggctgtttaaaacaactaagaaatgtaatattccatgtcgctgtgtcttgaataagctatggtgttagttgcaagacacttctctttaatatagttcagtcttgactttgaccnnnnnnnnnnnnnnnnnnnnnnnnnnnnnnnnnnnnnnnnnnnnnnnnnnnnnnnnnnnnnnnnnnnnnnnnnnnnnnnnnnnnnn

SEQ ID NO: 88413 - DNA, 544 bp, Arabidopsis thaliana columbia
gcattttccgttaagaacaacgacgtcgtttctctctttgggtacgagactcttcatcatcacttccaaatccctcttgtgcacgttgaccaaaagtccgttcttcatgaacaaagtcaacgacatcttctgctccaccttgtgtcccggcgccaccgttagtctatgcctgagtaaaaccgccgccgcgatcgtcttcatctgcagatacgctagatcttttcctagacagatcctaggtccggcgttaaacgccacgaatcggtactgatcgtgattcacgaattttccatcgtccggcgagatccacctctccggtttgaattccaagcaatcctctccccacgtgctcttcatcctccccgccgcgtagatcgaataagtcaccgacgatcccgccggtacgaaagttccgtccggtaagatatcgtcgttcacgacgtgctttgaatcttccggcaccgacgggtaaagcctcaacgtctcagagagcgcggccttcaggtaaaccaaccggtgccggtaagatatcgtcgttcacgac

SEQ ID NO: 88414 - DNA, 801 bp, Arabidopsis thaliana columbia
atcacttagcatgtacgcgtacgtaagcttggatcctctagagcggccgacctttttttttttttttaaaatctttctttcttttttactttaggaagaagagtatttgcttacaaagtttacatagcacaacgaaatcattttttttactgttttacacaacaatcacaaaacccaaaggtaaatgtatgtattaattactataaaaatgttatcaacccgagaagctgcattacacggcaaccgccacagccgcattaacggcgacgccttcaccgataccgccgttgcattttccgttaagaacaacgacgtcgtttctttctttgggtacgagactcttcatcatcacttccaaatccctcttgagcacgttgaccaaaagtccgttcttgatgaacaaagtaaacgacatcttttgttccaccttgtgtcccggcgccaccgatagtttatgcctgagtaaaaccgccgccgggatcgtattcatctggagatacgctagatcttttcctagacaggaggctgggccggagttaaacgcctcaaattggtcctgatcgagattcacgaattttccatcttccggggagaaccaccttttcggtttgaatttctaagtaaatcttttttccaacggtgctttttaatacctctcccgccggggtgagattcgaaataagttaaatcggacgaatcttcgcccagtttcacaaaaattttttcctcccgggaaaagaaaaatcgttaaggtatcaacagaacaggagctctttgtaaatctttgtcacgtcaccccga

SEQ ID NO: 88415 - DNA, 454 bp, Arabidopsis thaliana columbia
accacgcgtccgatctgaagcagccatggagatagccgccgttagcactgtctccgtcgcgccacaatcgcgcagagtgtcgaatgcgttctccaggaatctaggatccgtatcttctctttcgtttggtttctttgagaaagaatattgctttaagagccctagccttcgtgtgtctgcagcagcttccatggacgccgtcacagctgagaaattttctccggcgagttttctagacaaaaaagaaaccggagttcttcactttgtgaaataccatggcctcggcaatgacttcattttggtcgataacagagactcatcggaacctaagattactcaagaacaggcggcgaagctgtgtgatcgaaacttcggtgttggtgccgatggagtgatttttgcaatgccaggagtcaatggtactgattacgcaatgcggattttcaattcagat

SEQ ID NO: 88416 - DNA, 513 bp, Arabidopsis thaliana columbia
  unsure (1)..(513): unsure at all n locations
cnnnnnnnnnnnnnnnnnnnnnnnnnnnnnnnnnnnnnnnnnnnnnnnnnnnnnnnnnnnnnnnnnnnnnnnccacgcgtccggtcactgccaccggaaaaacgccatgaaacctcgttttcctcaaaatgtctattttttggctcgctattcatatctccgccgctttcagcatagtcaacgtcgaaccttcagctctttcctcaacaatatccgttcgaattattccggtgctcgtgcttcgcctctcggcggcagcagcggagccggagccggagccggaggaggtggaaccggagattccaaaggcaatgcttttcttgtgcccggagcaacaatggctactatccttatgcttggagctcttcatgctcgccgcctctatgaagacaagaagatcgaagagaaacgggagaagggaatcgaacttgagttccacccagatatcaaagcctcgttccttggagttctgcctctgcgatcaatctcaagagcttggggctcctttatgag

SEQ ID NO: 88417 - DNA, 656 bp, Arabidopsis thaliana columbia
  unsure (1)..(656): unsure at all n locations
nnnnnnnnnnnnnnnnnnnnnnnnnnnnnnnnnnnnnnnnnnnnnnnnnnnnnnnnnnnnnnnnnnnnnnnnnnnnnnnnnnccacgcgtccgcgaagaagaagagaggaaggatgaagaagatcccggtgcttctcatgggctgcggaggcgttggccgccaccttcttcaacacatcgtctcttgccgatcgcttcacgccaaaatgggagttcatatacgggtgattggagtatgtgatagtaaatccttagttgctccaatggatgtgctcaaagaggaactgaatgatgaactcttgtcagaagtttgccttatcaaatcaactggttctgcattatcgaagttgggtgctttgggtggatatcgagtcgtccatgattccgagttaagcacggaaacagaagagattgcaaaacttcttggtaaatctacaggcttagctgtggtggattgctcagccagcatggagacgattgaaatatttgatgaaggcagttgccttgggttctgtattgtccttgcaaataagnagcctgttactcaacgntngaccattacggcaaatttgctttcatccgggttatccccatgatctcttttggntggctccngcangatccttaccanaattggtgggnccnntcaaaggttc

SEQ ID NO: 88418 - DNA, 428 bp, Arabidopsis thaliana columbia
  unsure (1)..(428): unsure at all n locations
ctcattctctccatctctctcatggcgccggcgaccattgtaatccgacgatctctctctttcttgttcttctccatcgtgatattcatctctctctctctctttcttgttcttctccatcatgatatttatctctcgcttctgccggcaaaatctctccaacatttcatccttcgaattgagagagttgcaagtcataattacctgtttgagccgctattatcatcatctgcatgataaatggttaaatggagaagtggatacagttgctagaatgattgatgtctgttgtgtaagaattggatacaattaccgaatggaaggctcatanaagctagactaaaggatggattacaagaacacacaaagacatggcttcttttatggctgaactgctttaacactggtaagaaactatctctcaatat

SEQ ID NO: 88419 - DNA, 1018 bp, Arabidopsis thaliana columbia
cgaccggacgcgtgtggttttgcctttagcatctccgagtaaggaatccaggtccaaagcctcttctcttcctcctcctcgcttccttctcacgcaaccttggatccaccgcagctatgaagatcaccgccttgctcgttctcaagtgcgctcccgaagcttctgatcccgtcatcctctccaacgcttcggacgtctctcacttcggttatttccagcgatctagcgtcaaggagttcgtcgtctttgtcggtcgcactgtcgctagccgaacccctccttcccaacgccagtctgttcaacacgaagagtacaaggttcacgcttacaatagaaatggcctttgcgcggtgggtttcatggacgatcattaccctgttcgaagtgctttctctcttctcaatcaggtcctagatgagtaccagaagagttttggtgagtcatggaggtctgcaaaagaagactccaatcagccttggccatacttaaccgaagctttaaacaaatttcaggacccagcagaggctgataagctgttgaaaatccagagggagttggatgagacaaagattatccttcataaaaccattgatagtgttctagcccgtggtgagaagctggacagcctagtggagaagagctcagatttgagcatggcatcacagatgttttacaagcaagcgaagaaaacaaattcatgctgtactattctgtgagctggaagtcctgctgggtatatagtcaaccaaacttttgctggggggagactgttttttctatcgtcttatctatacatataattccgtctgtagtttgcatgcattattttgattccataagtctcgagtcgtgtggtgtgtttatccaaatacataatgtcaacttctgcaagatttgaattgtctttcccagatttggtctgaaaaaaaaaaaaaaaaaaaaaaaaaaaaaaagcggccgctctagaggatccaagcttacgtacgcgtgcatgggacgtcatagtacttctatagtg

SEQ ID NO: 88420 - DNA, 500 bp, Arabidopsis thaliana columbia
  unsure (1)..(500): unsure at all n locations
ccnnnnnnnnnnnnnnnnnnnnnnnnnnnnnnnnnnnnnnnnnnnnnnnnnnnnnnnnnnnnnnnnnnnnnnnccacgcgtccgttcaactttgtcttctcagaatcaaacctctgaagacttttcaccaaaatgacattactttcctctctcggaagagcctctcgatctgctccacttgcctctaagctcctcctcctcggcactctcagcggtggaagtatagtggcatacgctgatgctaacgaagaagctaacaaaaaggaggagcataagaagaagaaagtagttgtgcttgggactggttgggctggtataagtttccttaaagatctcgacataacttcctacgatgttcaggttgtgtctccccagaactactttgcctttacgccattgttacctagcgtcacttgtggaactgttgaagctagaagcattgtggagtctgtccgtaatataaccaagaagaaaaatggggaaattgaattgtgggaagc

SEQ ID NO: 88421 - DNA, 156 bp, Arabidopsis thaliana columbia
accatagataaataaatttagagaaatatctaagtttggttcttccctgtgtctacccaccgtgatcatcataaaatggattgtgatttctgatttgtgagtctatctttctctactccattagcttcctctcccttggatggttacgtcactttc

SEQ ID NO: 88422 - DNA, 541 bp, Arabidopsis thaliana columbia
acagcactttgtcggtttagcaggccttatattattattgatgaaccacatccaatcacgaacgaggaattagtggttgctaaaaccatgacactttttatcaccaattatcggcttattatcactgcgaccccccccccgggtacggcacgcgtacggtgggctcttctaaattttcttctgcctgagatttttagttcagcagagacttttgatgaatggtttcaaatttctggtgagaatgaccagcaagaagttgtgcaacaactgcacaaggttcttcgaccatttcttcttcgaagactaaagtcagatgttgagaaaggtttgccaccgaagaaggagaccatacttaaagttggtatgtctcagatgcaaaagcaatactacaagggctttactgcagaaggatcttgaagcggttaatgctggtggagaacgcatacgtctgctaaacattgcaatgcaactgcgtaaatgctgccatcacccctatctcttccagggtgcagaacctggtcccccaataccacaggagatc

SEQ ID NO: 88423 - DNA, 499 bp, Arabidopsis thaliana columbia
actcactatagggaaagctgctacgcctgcaggtaccggtccggaattcccgggctttcttctctgactcttactctgtctttcttcatcagaccaaaaacaaaccctaatttctcagctcgatttctctcttactccatttctcaatccttcacaaaatgcaccaacttccatttccgagatcgtaaaaaagcttgtggtactttctgataatagagagggaaaaaacgagagagagagaaaacacaaaatgctggaagctccggtgaacaagtcaagcatcctcaatggaggaggaggaggattctctcagctacagagttgcttcggcgattgcagtagcgaagaagaattgtcagtgttgccacgtcataccaaagttgtcgttactggaaacaaccgtaccaaatctgttctcgtcggtcttcaaggcgtcgttaagaaagccgtcggacttcgggggctggcattggcttgggttgactatgggaattgaagg

SEQ ID NO: 88424 - DNA, 872 bp, Arabidopsis thaliana columbia
  unsure (1)..(872): unsure at all n locations
cagctctcctacgactcactttgggaaagctggtacgcctgcaggtaccggtccggaattcccgggtcgacccacgcgtccggcgaaaacttctcttttgtctctcaagtcagactcaattcccatggacttctccgtcaaaccttccggcggctcaccttctccgtcatcttccacctcttcttctacgcctcatcgtttcaaatccgttaccacaccaaccgcgactgccgctgccgtctcaggattctccccctccgccgccgctgatcgagatccgatgcattcctggtgggaatcagtctcaaagcaacgttctcgcatcctctctctttcatctcttctctccggcgattctcactttgaagacggtgacgtaactccgatctcctctcttgcagattccgatcggccggcgttatcgttactctcttctcgtgctgcttactctttgatatcgaattctctttgcaatccagcttctggttctggatctgatccgctttgtcaatggctatacgaaacttatctctcctctgatccaccacttcgtctcgttgtcctctcgttctttccgttactcgtcggaatgtacttgtctcgaattcattcctcggattcgacatctcttccttctctatccggattcgaagctgtgcttctcgcaatctacggcgctgaggttaaagctcgcgcaggtaaacctatantcgtacacattccagatctntntnaggcatctctttaccacanaacggngaacggcgttgacaaaancgcgngattccaatccaaccgcttcgtcggngcntnntntccgaagntnagctaaaatcgngggtaagtaaatnagggngccanaatngttgggg

SEQ ID NO: 88425 - DNA, 1311 bp, Arabidopsis thaliana columbia
  unsure (1)..(1311): unsure at all n locations
gagattaatctcgctaagctgtctgttgttccagtgaggagaggttactggggtaacaagattgggaagccacatacggttccttgtaaggtgactgggaagtgtggatctgtgacagtgaggatggttccagctcctagaggggatccaccaaaactcttggaaacttcgtcaaggctacattcgattgccttcagaagacttacggattccttaccccagagttctggaaggagacaagattctctagatcaccataccaagagcacactgatttcctggcgtccaaggctctttcgaccagcaaacccgacccagtggttgaagaccaagcctaaacaatgcttccaccttgtgttctttttggattataatccttcatgagttaattttggttgaacctttggtagtatatgttgctggattgtgcaccttctgttttcatctcctcttccaaactactttatttttgcttatggnncttaatgttctagcatttatcgatttattataaatacaattgaagtttttaaaaaaagtttccaaccannnancagtaattgtnctttctattgcatttctcagctaaaattttgccgaatttttcaaaatttaaaatataaaantacaaagatagagaagaataaaataaagaaaatttcaattttccttcccttcgtcaccgccttcttccaagtactctttcttcctcctctcagcattagataacagacaaatcaaaaggaaacacgtggcatacacaccgtgtatcttccagttcgtcttcggaggctgacgaagcaccaccctatgaaacaccgccacgtaataatgcagacctacagcaaagcccacaaaggtctgcgccaagcccaataccttaaggcccaaacacaatccgtggagaagacgagaacgaggtacatgagaagaagcnagaggtagaagacgtagcctagggtttgcaggatctgcaagcaaacgtatgttgagctcgatgttgcgtagagaaacttgagtggttccattccggtgccgagcgatgagaggcataggattgagaagtagatcgagaggtagatttggatgaagattaggatcttctggagtgagaaataagctttgaatctgttgaaaatgagtgagactaagagtagagggacgaggatgaagacgaaagagtctacggaagctatggttggtgagatatgatacaaaatagggtttaagtttttgggaccctcttgtggctatgtactctaccatttgtatgttttagattggaataaaatgattagggattttgaatct

SEQ ID NO: 88426 - DNA, 577 bp, Arabidopsis thaliana columbia
  unsure (1)..(577): unsure at all n locations
gaaaaccggncttgaaagnnactggaagttnggacctntacagttaggatggtccaacccccnaanggnnctggnattgtggctgctaaaggtccntaagagggtccttnaaatcgctnggaattgatgatgttttncacttccnccaaggggatccaccaaaaacctccttggaaaacntccgtnaaggcntanantcggatttgcctttcaagaagactttacgggattccntacccccaagaggttctggaaaggagacaagattctctagatcaccataccaagagcacactgatttcctggcgtccaaggctctttcgaccagcaaacccgacccagtggttgaagaccaagcctaaacaatgcttccaccttgtgttctttttggattataatccttcatgagttaattttggttgaacctttggtagtatatgttgctggattgtgcaccttctgttttcatctcctcttccaaactactttatttttgcttatggatcttaatgttctagttttgctttttctacttttgttgagaaaagttaatccagtggtgccaattttaattttc

SEQ ID NO: 88427 - DNA, 1001 bp, Arabidopsis thaliana columbia
  unsure (1)..(1001): unsure at all n locations
cagctctcctacgactcactatanggaaagctggcacgcctgcaggtaccggtccggaattcccgggtctacccacgcgtgcgcccacgcgtccggctttatgcctgcttgtgtgacaatctttgacaagaattgtaaaccattgatggaacttggcgaaggtccttataacactcttcgatggaacccaaaagggagagttttatgtgtggctggattcggtaacttgcctggtgatatggccttctgggatgttgtaaataagaagcagctaggaagtaataaagccgagtggtctgtgacaagtgaatggtctccagacgggcgttatttcttgactgcctcaacagcaccaagacgtcaaattgacaatgggatgaaaatcttcaactacgacggaaagcgttattataagaagatgtttgagaggctgtatcaggctgaatggaaaccagagtctccagagaggttcggtgacatcagtgaacttatcaagtcagttgaatcattgaaactcggcgagggcaaatcgcaaggacaaggatcagctcagaagaaaactattgcccccaatcctattgcacagaaaccggccgcatatcgacctccgcatgctaagcatgcagctgctgttcaagccgagttacttggaataagcacaacaggagagatgagcaagaacgctcttaaaaacaagaagaagagggagaataagaaagcggctgcggctgcggctgctgcttctggatctaacaacgcctgattgaagaaatcacactccgatatcaaattcaatggagatcacagttttgaaattcatttgatggtaataaagattctatagaagacagaaaacattatgtaaacagttgttttttttttgtcaaacatttttgttgtcagttacccgccaaaaaaaaaaaaaaaagnnnnnnnnnnnnnnnnnnnnnnnnnnnnnnnnnnnnnnnnnnnnnnnnnnnnnnnnnnnnnnnnnnnnnnnn

SEQ ID NO: 88428 - DNA, 537 bp, Arabidopsis thaliana columbia
gccaataaagtaagcagactccctcaataggcacccccaggctgaactctttacgctccggctccataaattgtgccaaaatggagcccaaacacatttcacacaggaaccacttatacccagaattcgcctaagctgtaatacaactccacatagggaaagctggttcgcctcaaggaaccgggccgagattccggggtcgacccacgggtccgcccacgggtccggaaaacggctgcggccccggctgctgcttctggatctaacaacgcctgattgaagaaatcacactccgatatcaaattcaatggagatcacagttttgaaattcatttgatggtaataaagattctatagaagacagaaaacattatgtaaacagttgttttttttttgtcaaacatttttgttgtcagttaccccccaaaaaaaaaaaaaaaaaaaaaaaaaaaaaaccccccaaagggcgagccgctctagaggatccaagcttacgtacgcgtgcgtgcgacgtcatagctctctatagtgtcacta

SEQ ID NO: 88429 - DNA, 523 bp, Arabidopsis thaliana columbia
cttccaaactcccgaagaagaagaaaataactacaatgagtcaacaacctcctgctgttggtgttcctccttctcatgcttatccggcggaaggaccacccaaggacgcttatccacctccgggacaaccctatcctcagcaaggatatcctcctccgcagggatatcctcaacaaggttatcctcctcaaggttatcctccgcaggggtaccctgaacaaggatatcctcaacaaggttacccacctcagcaacaacagcaacagaaacacagtcctggtatgcttgaaggatgtattgctgctctgtgctgttactgtgtcttggacgcttgcttctgagtggaggtctccgcttgaagctgcaaaattggtttataccgatgatctcatctcattctctttcgtttctctacagacttgactctcttctaagcattttatcttagttactattagattatttggattttgccaaatgggaatgtaaatggttgggtgacccaattcatgttgcacattat

SEQ ID NO: 88430 - DNA, 408 bp, Arabidopsis thaliana columbia
ttgtctgaaggaaccgctattgaagaccttttcatgcctgaccgtgtcctcatcggtggtcgtgaaacagctgaaggctttgcagccgtcaaagccttgaaagacatttaggcccagtgggtccctgaagagagaatcctcaccaccaatctatggtctgccgagctttccaagcttgcagctaatgccttcctagcccagagaatctcatcagtcaatgcaatgtccgctctctgtgaggcaactggcgccaatgtctcagaggtctcttatgctgtgggcagagactctcgtattggtcccaagttcttgaactctagtgttgggttcggaggatcttgtttccagaaagatattctcaacttagtctacatctgcgaatgcaacggcttacccgaagttgctgag

SEQ ID NO: 88431 - DNA, 1053 bp, Arabidopsis thaliana columbia
atacgactcactttagggaaagctcctacgcctgcaggtaccggtccggaattcccgggtcgacccacgcgtccgtacggctgcgagaagacgacagaaggggacgacgaaaagaaaggggaaaaaaaaaaggaaggaaaaaagtgaaaaccgtcggcttgagaaggaactttgatatttggtgactcttgaaaaaagcaagctctttcttcttccttctttcgcttttttcacacctcaaaatcaaagatccgaaacacgatttcggaggaagcttcgattctacctattttcagatctgaaatagttgtgtttgagaagcgggattggtgatcggagctggaatttggttggtaatcggaggtcagagagaagtcaacggatatgccggaggaagaatcgatagatatcaaattcaggttgtacgatggctccgatatcgggccttttcggtattctgcggcttctactgttgactttttgaagcagagggtcgtctctgattggcccaaaggcaaaacagttgttccaaaggggataaacgaagtgaagctgataagctcgggtaagatcttggagaacaacaagactgttgggcagtgtaagacaccatttggagatattgctggtggagtcattgtgatgcatgttgttgtacagccttctctagctaaatccaaaacagagaagaaggttgataaagcaccaaaggcagtaatctgcacatgcaccattttgtgaagggaggaagaccaatgtatctatcatacacatcgtttcaattcttccggtacagaagaaaacaaaatcaaaaaaagaaagctaaaagtaaagtaaagcttccctttaagctgtggagttatttatcatctttgaatgtgtagaaaatgaactataaattcttttcaagtaactctttgtcccttatttgttttttcttcttactttcccaatgtatggaagctgtataggttactaggtccattacgttacgtgtgatgaagataattatatatctatctatttttaaaaaagattgtgcctttgtgtttt

SEQ ID NO: 88432 - DNA, 716 bp, Arabidopsis thaliana columbia
  unsure (1)..(716): unsure at all n locations
atgatacgtcnnnnctactacgactcactatagggaaagctgccacgcctgcaggtaccggtccggaattcccgggtcgacccacgcgtgcgggttgataaaggggctgatattcatgacgtttatcgcaattattgtgatattgatcacactggctcacatgacgatacaagacataattgtgtgtatccttgcctttatgcccacaggttgggggatgctcttgattgcgcaagcgtgtaagcgggtggttcatagagcaggattctggggatcagtgaggaccctagctcgtggatacgagatagtaatgggactgttgctgttcacgccagtggcgttcttggcatggtttccatttgtgtcagagttccaaacgcgtatgctctttaatcaagctttcagtagaggtcttcagatctctcgtatccttggaggtcatcgtaaggatcgctcttctcgaaacaaggaatgattcatctcttcattgtaatgacagggaagggatcttaatttatcccttttttatcttcatggatgattagggttaatgtaatttagttttcaatatatcgcttaggtaaaaacattgtagtattcatctataaattagacgttatctatcaaaaaaaaaaaaaaaaaagnnnnnnnnnnnnnnnnnnnnnnnnnnnnnnnnnnnnnnnnnnnnnnnnnnnnnnnnnnnnnnnnnnnnnnnn

SEQ ID NO: 88433 - DNA, 414 bp, Arabidopsis thaliana columbia
  unsure (1)..(414): unsure at all n locations
ggnnactttaaatacggttcgatcaatgtaaccgatgtctacgttctaaggaacatgccgcctgtgacgattagtgggaagagaagaacaacgcgtaatggcatatcgttcaagaatccttcagcacctattggactagctgataagcttaaagttaaagatgtgtataagcttgatttccctaagagacctttaactggaccagctaaagtggcgacttccattatcaatggtacttatcgtggattcatggaagtcgttcttcagaacaatgacactaagatgcaaagctatcacatgagtggctacgcttctttgtcgtcggtatggattatggagagtgggacagagaacagtaggagggaacattacaacaaatggggatggtatcgcgcgttccactattcaggtgta

SEQ ID NO: 88434 - DNA, 560 bp, Arabidopsis thaliana columbia
  unsure (1)..(560): unsure at all n locations
tangggggacccnncccccagggaagaccctnnncccaggggncccccccttggncaacccgggntncctccaggggggctttgttgcccacggcgttccccggtgtggtccattgggagaaggggcccctggggggttatggctatgtcccccgggggttgaatagagccgccggataggtctcaaggggcattccctacctcaaccgggttagtgtaagaacccccccggtgtctttacgtttttgccgttagttctttgagaatctgtaggcacctatctcgaggtttgtggacggatctcagatagttgagctcgtggcaacaacgatgaggattccaatacttcggtattgtggcaatcacgcaaatttccaagtttcgcggacttgaaatcggtgtttcccttcgcaacttagtcataattactcagctgcaatccgaagttttttgagtagtaatgttgtttttaattttctgtagtgtgctttaatccgttcttgtattttctgtaacttctgtcaaaaatcttaaaatggtataaaatttaactttttacc

SEQ ID NO: 88435 - DNA, 1419 bp, Arabidopsis thaliana columbia
  unsure (1)..(1419): unsure at all n locations
nnnnnnnnnnnnnnnnnnnnnnnnnnnnnnnnnnnnnnnnnnnnnnnnnnnnnnnnnnnnnnnnnnnnnnnnnnnnnnnnacgccacgcgtccggtttgcttaacgcggaacatatatacactcaagtatttaaagaagatcacgcgcggcgattgattaagcgagaacgacgctacagtaaaccaaaaccaaatctagatctgtgcctctccggtcacggtgcttctcaccggtggccggagagggcttctccctcttctcctttcctctctcttatctcctctgcctctcctttgaagctccggtggtgttcaaatctggcttgctcttcgtctcttgttggtggtatgcggcgagtggtcacgcacggagcaaaggacgtgcggcgtgtctctctccgtttaaggcagtggctttgatgagacgactgtagcggttgtgcggctcctatcgacgggaccatcttccagatctgataaattggtggtgcatcgccatgtttcttcagacatcgtcgttcttctttgatttgggcacaacggtgagttttcggtgtggcagatcttctcttctcgggtctctctacctgttttttctccagctctggtgatggtgtgattgatccgacgggcttctcttgtggaggcaatccaaggagtcgtttggctcttgtggattgttcgtggtggttagtggcgttgtgggttttgtttggtggtcgacgtctctcctccattggtgggcagttgagggtggtagcctcttcggccatgggtatggattctctgtgtccattgggtttcgtcccttttgcttcatctctggtttgctttcaggtggagttttgttgttcatggtgttgtcggtgttggttcatttggtgaaggtgagcctttgggtgttatggctatgttcaccgagggttgaatagaggcggcggataggtctaagtggcatcactaactcaacgagttagtgtagaagtccgcggttgtctttacgtttttgcgttagttctttgagaatctgtaggcacctatctcgaggtttgtggacggatctcagatagttgagctcgtggcaacaacgatgaggattccaatacttcggtattgtggcaatcacgcaaatttccaagtttcgcggacttgaaatcggtgtttcccttcgcaacttagtcataattactcagctgcaatccgaagttttttgagtagtaatgttgtttttaattttctgtagtgtgctttaatccgttcttgtattttctgtaacttctgtcaaaaatcttaaaatggtataaaatttaactttttaccaaaaaaaaaaaaaaaaaaaaaaaaagnnnnnnnnnnnnnnnnnnnnnnnnnnnnnnnnnnnnnnnnnnnnnnnnnnnnnnnnnnnnnnnnntgtcctaa

SEQ ID NO: 88436 - DNA, 676 bp, Arabidopsis thaliana columbia
atcctaaagaggatgaagcacctccaaaagaaagattcaatacagcccgcattgggaaatgcatcggtgattatatgctgtattggtgctagcgagaaagagatctccgatattaccggtccttacaggatcgattacctagccaccaaaaaccttgttgatgctgcaacatcagcaaaagttaataacttcattttggtgacatccttggggacaaataaatttggatttcccgctgcgattctcaacctattctggggagttctttgctggaagagaaaagctgaagaagcattgattgaaagcggtcttaattacgcaatagttagacctggaggaatggagagaccgactgatgcatacaaagaaactcatgatctcactcttgctctagacgatacattgtttggtggtcaggtctcaaatctccaggttgcagagttgcttgcttgcatggcaaagaatcctcaactttctttctctaagaattgtggaagtggggtgctgaaccacctgcacctttaactccaattgaaaagcttcttgaaaagattccttccaaacggccttatgtccctccaccgaaggcatcagttgcaaccaaagaggtcaaaccagtccctactaagcctgtcactcaagaaccaacagctcctaaagaggatgaagcgcctcc

SEQ ID NO: 88437 - DNA, 444 bp, Arabidopsis thaliana columbia
  unsure (1)..(444): unsure at all n locations
aggtaccggnccggaatacccgggtttacccacgcgggcgtggacttcagatcaagttaaagaatggcggcaacatcactattgtacaatcagctcaaggctgctgaaccattcttcttgttggctggtccaaatgtgattgaatccgaggaacatattcttcgaatggcaaagcacattaaagacatttccacaaaagttgggctgcccctggttttcaagtcaagttttgataaagctaacagaacttcttcaaagtcatttcgtggtcctggcatggccgagggtctgaagattcttgagaaggtgaaggtagcatatgatctaccaatagtaactgatgttcatgaatcaagccaggtataaatgaacgtaatcacataaaagattgagatttagcaagtctttagtaccttctaatgtgtgattttattttccttagtg

SEQ ID NO: 88438 - DNA, 656 bp, Arabidopsis thaliana columbia
  unsure (1)..(656): unsure at all n locations
accacgcgtccgcccacgcgtccgcccacgcgtccgccctgatcagagctttaaagaaaaagatggaattcaccgcagagcagctaagccaatacaacggcaccgacgaatcaaagccgatctacgtcgcaatcaaaggccgtgtgttcgatgtcaccaccggaaaatccttctacggctccggaggcgattactcgatgttcgccggaaaagacgcgagcagagctttgggtaagatgagtaagaacgaagaagatgtgtctccttctcttgaaggtctcactgagaaagagatcaatactcttaatgattgggagaccaaatttgaagctaagtatcctgtcgttggccgtgttgtctcttaggtctctcttctgagattgcactatgttatgtaactattgtgtgtgaggatctttgtgttgtgtgttttctgatttcgtgtttggatctgatcgttttgatacaattaccataagtaccaaattatctatgaaataaatcggggatttcgtgttctcagtggtcttcatattctgatcttaaggttactttgttgtgcttaccaaaaaaaaaaaaaaagnnnnnnnnnnnnnnnnnnnnnnnnnnnnnnnnnnnnnnnnnnnnnnnnnnnnnnnnnnnnnnnnnnnnnnnnn

SEQ ID NO: 88439 - DNA, 458 bp, Arabidopsis thaliana columbia
gaccacgcgtccggatttagtaaatttggaggtcccggagctagaaactgaattcgtttttcaccaagagcttgacgacgggaagatttgcatcgtcttcttcgacggagaacaaggattttggaaatgtcgccactgcgattggacctacaaagagggatctttgttatgcaaaggttctgagtcagctggtgccatacctgatgctcatgaggagtctcaaactgctgacttgaatggggagcatacgcagttagaacctgaaaacggttcaacttctgaggataacgaaagatctcgtgaaattgaagaagtactagatggtgatgtctctaaagacttggatgctgttgatccactcgctggtgaggtgatagaggaggaggtggacttcgaagatgttgaatatcatgatgtggagaatatgatggataagcaagagacacatgatttgtact

SEQ ID NO: 88440 - DNA, 451 bp, Arabidopsis thaliana columbia
gtcccggagctagaaactgaaatcgtatttcaccaagagcatgacgacgggaagaattgcatcgtcttcttcgacggagaacaaggttctgagtcagctggtgccatacctgatgctcatgaggagtctcaaactgctgacttgaatggggagcaaacgcagttagaacctgaaaacggttcaacttctgaggataacgaaagatctcgtgaaattgaagaagtactagatggtgatgtctctaaagacttggatgctgttgatccactcgctggtgaggtgatagaggaggaggtggacttcgaagatgttgaatatcacgatgtggagaatatgatggataagcaagagacacatgatttgtactgtccaaactgcgattcttgcatcaccaaaaaggttatcctcaaaagaaggaaacggaagatccgccgtcatgagctgggagatt

SEQ ID NO: 88441 - DNA, 2443 bp, Arabidopsis thaliana columbia
accacgaatccgcgtcaatcagatcaaaacttctccaactctttcaatatctatctacgtgcatccacctctctcttcttcttcttgtgaccactcttcctgtctgttcactggaggtgaattttgatttttttggccgatcggatttgagtttttgaatctctgattgctgagaaaatgccggcgttttacggaggaaagcttacgaccttcgaggacgatgagaaggagagcgagtatggttacgttcgtaaggtttcaggtcctgttgttgttgccgatggtatggccggtgctgctatgtatgagttagtgcgtgttggtcatgataatttgattggtgaaatcatccgtcttgaaggagattctgccaccatccaagtttacgaggaaacagctggattgacagttaatgatcccgttcttcgaacacacaagccactttctgtggagctcgggccaggaatattgggaaatatctttgatggaattcagaggcctttgaagactattgcaagaatatccggtgatgtgtacattcctcggggtgtgtctgttccagctcttgacaaagattgtctttgggagttccagcccaataaatttgtcgagggagacacaataactggtggtgacttgtatgctactgtctttgagaacactttgatgaatcacctcgttgcccttccgccggatgccatggggaagatcacttacattgctccagctggtcaatattcgcttaaggataccgtgatagagcttgaattccaggggatcaagaaatcttacaccatgcttcagagctggcctgtacgtacgcctaggccagttgcatcaaagcttgctgccgatactcctctacttacggggcagcgtgttcttgatgcccttttcccttctgttcttggtggaacctgtgccattcctggtgcttttggctgtgggaaaactgttatcagtcaggcactttccaagtactccaactctgatgctgttgtgtatgttggttgtggagagagaggaaatgaaatggctgaggttcttatggacttcccacaattgacaatgacgttgcctgatggccgtgaggaatctgtcatgaaacgtaccacacttgttgctaacacctctaacatgcctgtggctgctcgtgaagcctcaatttacacaggaatcacaatcgctgaatattttagagatatgggctacaatgttagtatgatggcagactcaacttcccgttgggcagaagcattaagagaaatttcaggacggctggctgaaatgcctgctgacagtggatatccagcctatctagcagcacgtttagcatctttctatgaacgtgctggtaaagtaaaatgtcttggtggaccagaacgtaacggaagtgttacaattgttggtgcagtttcgcctcctggaggagacttttcagatcctgtgacttcagcaacccttagtattgtgcaggtcttctggggtttggacaaaaagcttgcccagagaaaacattttccctctgttaattggttgatttcttactcaaagtattcaacggcactggaatctttctatgagaagttcgatccagatttcatcaacatcaggacaaaggccagagaggtgttgcagagggaagacgatcttaatgaaattgtccagcttgtaggaaaagatgcgctagcagaaggggacaaaatcacattggaaacagctaagctattgagggaagattaccttgctcaaaacgcgtttacaccatatgacaaattctgtcctttctacaagtccgtgtggatgatgcgtaacattatccatttctacaacctagccaaccaggcggttgagagagcagctggaatggacggtcaaaagattacctacactcttatcaagcatcgcttaggagatcttttctaccgtttagtgtctcagaagttcgaagacccagcagaaggggaggatacactggtggaaaaattcaagaaattgtacgacgatctcaatgctggattccgtgctttggaagatgaaactcggtaagctgtcgagtctccaccgcaagtaaaaaaaatccacagaattgggttgtttttggagaaagagggtttcattcatggtctctttcttgtgtttttgaaccaacaactatcatagtggtcggtattttatttatcggtttggtcgatcgattgagttttagctctgtgagcgtcatgattctccggctgtgctgtgctgtgtaatatgtttgattcgttgttttcatgtttttatttcggtggtaataaggtacagccaatgtgagtcatatatttgatttgatgtaccctctcaattcaataagttaattttatgtccaaaaacatattggggataccgttatttttctcataataaataccatcattttgtaaaaaaaaaaaaaaaaaataat

SEQ ID NO: 88442 - DNA, 402 bp, Arabidopsis thaliana columbia
acataaaccaaactgtttaggtttcgtcgtcgacgcgctctcatcaacaaagtcccatacgaaatttaaccaaaactatatatcgagggacgaagcgcgtgacgttagatcggagatctcaccgagatcgccggtgaattagggtttctacttcctttgttcttgttaacgttatatgaaagtttggaagtgatgctcaacctgtagtaaatacggtccagtctgagcttgctacctcaattgctgcttcggctgcagcagctgctgctgcagaattaccttgtactgtcaaactcagaatgtggtcgcatgacatcaaagacccatatgcacaactgaaatccgacagatgtctatttacaataccgcatgccgtcctttgcagtgaaatgggagctcatt

SEQ ID NO: 88443 - DNA, 1107 bp, Arabidopsis thaliana columbia
gcgaaaaaacgaaaatggcggcgaacggagtagcgacggcgggacgtcaggtatcagagaaagaagctgatatccagatgatgttatcagccgatgttcaccttggtaccaaaaactgcaactatcagatggagcgttatgtcttcaaaagacgcgacgacggtatttacataatcaatcttggaaagacatgggacaagcttcagatggctgctagggttattgtagcaatcgaaaacccaaaagacataattgttcaatcagccaggccttatggacaaagagctgtcttgaagtttgctcagtacactggtgttaatgcgattgctggaagacacactcctggtactttcactaaccaaatgcagacttctttcagtgagcctaggttgttgattctcaccgacccaagaaccgaccatcagccaatcaaggaaggtgctttgggaaacattccaactattgccttctgtgacacggattctccaatgggatttgtcgacattggtattcctgctaacaacaagggaaaacacagcattggttgcttgttctggcttttggctcgtatggttctccaaatgcgtggaaccattctcgcagctcagaaatgggatgtcatggtggatctgtttttctacagggagcccgaagaagcaaagcaagagggtgatgaagaagctgaagtacaggccgattatggaatggttggtggtgaccagtggaccactgctcaaatatctgatgctgcatggtctggtgaagtcgaacagccaatttctgctgcacctgcagttggcgttaccgttgctgctggatgggaggctgcttctgttccagctgctggttgggagtaaaagctctcttattagtttagctcgaactcggttagatgtagacctgatttttttgttttcgagatttggagaggattaggaccatattagcttgctttacttcttgtctcttgagaattgcgaccatgagattaggtgcatttttgccggtatttccaagtttcaaccatataacggtattttatcgttgattctttcattgaattgaacattggtcttctatttaagtcatattattcattgatattgc

SEQ ID NO: 88444 - DNA, 475 bp, Arabidopsis thaliana columbia
ctttgattctggaatctaggtttaaagtttagacctttgagatcacactatatcaaaaatggagctcaatttctcttcaatggctataacacaccccaaaatcccttctttcggttttacacccaccggaatattcctaaacccatcaaaatcagtgtgtttggcttcacatcatcggcttccgagagtttcatgctctgtttctactactactgattctcccaagctagtgacttcaacaaaggtgacggcaatggatggagtgagctctagagacttggagatgtcgaatttaacggcgttatcgcctttggatggacgttattggagtaaagttaaggacttggcttcttctttgagcgagtttggattgatctatttccgagtttttgtcgagatcaaatggcttcttaagctttcgaatattcctgaagtcactgaagttccaagctttagcaaagaagctcagagtttc

SEQ ID NO: 88445 - DNA, 626 bp, Arabidopsis thaliana columbia
agagaattcgcaaactcgtttctccattcgtcttcgtctttcgccatggctgctctacaatacttggaatctctgaaaaatacgcatccagagctcggcgaatggtacaattcccttgcagatctgtatcagaaaaagctctggcatcaactcacccttaagctcgaacagttcatcgctctcgctgtctttcaggctggtgatgctttgattcagttctatcacaatttcatcactgactttgagacgaagatcaatcttctgaagcttgcgcattttgctgtggtggtctctcgacagtactctgagaaagaagctgcagttagctatcttgaaagcgtgattgagaaacttagagctactaaagagcctaggattactgaaccaatcatttatattgaaacacaaaaagctttattcaagcttgagcaaggtgatcagaacgagggcaaaaaaatcttggacgatggaaagagctctcttgatagtatgactgacattgatccatcagtctatgccaacttctattgggtgtcttctcagtaccataagtgccgtcaagaattttctgatttctacaaaagtgctctgctttatcttgcatacacgtctgtggaggacctttc

SEQ ID NO: 88446 - DNA, 634 bp, Arabidopsis thaliana columbia
  unsure (1)..(634): unsure at all n locations
ccgtattnagggaccgggccngaattccctgggcggcccactgnntccgggttatccaccatcgtactccatcaccagagcttcaacagcctactattggcgtctctaactaatgactcaccgtctccacttccttcttcttcaccgtcgaagcttccctctcctacttctccgtcaaagaaaccgttaaaactaagacaagtgagcaaacaaatgggaagtcaaaaccagcaacgacgaggcaacaagccttcgatagcacagattgagagagcttttggctctggttcatatcgtgattccgaagggaaatggatatgaatacggtattcgatgagcttctattaggccatgctaataaattcgaaagtaagatcgagaagaagctacgggagaattggcggaaatctttgtagctncgaacagagcctaagcttcgttcctncgggggaaccagtttttggatgtttaaattcaatggatnctccaatatggataangcnccggccgngcttgtggggtataaaancccctttnggatcccttcctgatgacttggcangggtntcanacagtaancctgaccttccaattcgaaaaaacttttgggnaaaaaaaanggggncgctttntc

SEQ ID NO: 88447 - DNA, 1108 bp, Arabidopsis thaliana columbia
  unsure (1)..(1108): unsure at all n locations
tttgctttcgcggacgcgtgggatcctctttgactaaaatattttaaaccacacaagagaaggaggaggcaatggcggtgttatccaccatctactccatcaccagagcttcaacgcctactatggcgtctctaactaatgactcaccgtctccacttccttcttcttcaccgtcgaagcttccctctcctacttctccgtcaaagaaaccgttaaaactaagacaagtgagcaaacaaatgggaagtcaaaaccagcaacgacgaggcaacaagccttcgatagcacagattgagagagcttttggctctggatcatatcgtgattccgaaggggaaatggatatgaatacggtattcgatgagcttctattaggccatgctaataaattcgaaagtaagatcgagaaggaagcttccgggaggtttggcggaaatctttgtagctcggaacagagcctaagcttcgttcctcgggggaaaccagtttttgatgtttacaattcaatggattcttccaatatggattttgcccctgctcgtggcttgtggagttatcaaactcccttttagcatccctttccttgatgacttgatcatgtgattcttctacacagttaatacacatgtactcttaccatatttcgttaataatacttttagtgtattagtgtaataccatacctcaaacaaactcatcacagataagtctctagggaaagaatgcttgttattggtgagataaacttttcagctcacggtgcactcnatatggaaggaacggaatggtcgtcgacatggagaagtacctattcatatctcccagttaactcgcgaactcgacaagcaaacccgaaacagaatcttttctattcgagagctaggtgatagaagatatgaagattctatggcaatctggtttggttcaaaataatctagacatcttcttaattcttgctcaaacacaagctgcacttgatgtaaaacagttttttttttccgaatgatttttcataaaaaaaaaaaaaaaaaaaaaagnnnnnnnnnnnnnnnnnnnnnnnnnnnnnnnnnnnnnnnnnnnnnnnnnnnnnnnnnnnnnnnnnnnaacg

SEQ ID NO: 88448 - DNA, 387 bp, Arabidopsis thaliana columbia
  unsure (1)..(387): unsure at all n locations
cgcttncgatgggctggaagagatggggaagaggaatccaaggacgcacctgcggaatctgatgctgaagccgacccagaggatgatgaaggaggagatgattccgattctgaatctaaggccgaggagcccaaatcagtagatagcgaggaaacctctgagaaagacgcccccgctcatgatgagctataggtgaaaggttgaagatttgaagaccaaagttttcagtctctttattgttttatcgttttcttttgaagtattttagcatctagtttgtcggagatagaaacaagttttagcaaaactaaaagggggatacaatgtctgtcagatgctcattttagactttaaaaaaccatgaagaagttttgcagttgcttccct

SEQ ID NO: 88449 - DNA, 795 bp, Arabidopsis thaliana columbia
  unsure (1)..(795): unsure at all n locations
tccgggtctttcgacgcgtacggacacctgacggttacgatgatatccctaaagagatcccagacaccgactcttttaagcctgaggactgggatgaagaataagatggtgagtggactgccccaacaatccccaaccctgagtacatgggtgaatggaagcctaagcaaatcaagaaccccaactacaagggcaagtgggaggctccattgattgacaaccctgacttcaaggatgacccagagctctacgtcttccccaagctgaaatatgttggactcgaattgtggcaggtgaaatcaggatcattgttcgacaatgtcttgatctgcgatgacccagactatgccaagaagttggcagatgaaacatggggaaagctcaaggatgcggagaaagcagctttcgatgaggctgagaagaagaatgaggaagaggaatccaaggacgcacctgcggaatctgatgctgaagacgaaccagaggatgatgaaggaggagttgtttccgattctgaatctaaggccgttggagaccaaatcagtagaatagcgaggataacctctgagaaagacgccaccgctcatgatgagctataggtgaaaggtggaagatttgaaaccccgaagtttttcaggcctcttttattagttttattcgctcctctttttggaaagtattttttagcaatcctagcttttgttccggcaagataggaaaaacaaaggtttttttaaggcaaaaaacctaaaaaggggggggggatnnnnnnnnnnnnnnnnnnnnnnnnnnnnn

SEQ ID NO: 88450 - DNA, 1375 bp, Arabidopsis thaliana columbia
  unsure (1)..(1375): unsure at all n locations
aattaagggccgaccacgcgtccgggaagctccgatctgagttttttttagcaatggcgacaatgattcctagcctcgtctctctaattcttatcggtcttgttgcgatcgcctccgccgcagttattttcgaggagcgctttgatgatggctgggagaacagatgggttaaatctgagtggaagaaggatgataacactgctggggagtggaagcacactgcgggaaattggtctggtgacgctaacgataaaggtatccagaccagtgaagactacagattctacgccatttcagctgagttccctgaattcagtaacaaggacaagaccttagtcttccaattctcagtcaagcacgagcaaaagcttgactgcggtggtggctacatgaagctactaagtggtgatgttgaccaaaagaaatttggtggagacacaccatacagtatcatgtttggtcctgatatctgtggctacagcacaaagaaagtgcatgctatccttacctataatgaagccaaccacctgatcaagaaagatgttccatgtgaaactgaccagctcacccatgtgtacacatttatcctccgcccagatgctacttacagcattctcatcgacaatgttgagaaacaaactggtagcctttactctgactgggatcttctcccacccaagaagatcaaggaccccagcgccaagaagcctgaggactgggacgaacaagaatacatttctgaccctgaagacaagaaacctgacggttacgatgatatccctaaggagatcccagacaccgactcaaagaagcctgaggactgggatgatgaagaagatggtgagtggactgccccaacaatccccaaccctgagtacatgggtgaatggaagcctaagcaaatcaagaaccccaactacaagggcaagtgggaggctccattgattgacaaccctgacttcaaggatgacccagagctctacgtcttccccaagctgaaatatgttggactcgaattgtggcaggtgaaatcaggatcattgttcgacaatgtcttgatctgcgggtgacccaggctttgccaagaagttgccagattgaaacatgggggaagctcaaggttgccggagaaagcagctttcgatgaggctgagaagaagaatgaggaaganggatccaagncgnacctgcggaatctgatgctgaagncgaccagaggtnnttnaggagngntgatcccgntctggatctaaggccnggnggccaatcagtgantcnggnacccctngaaancgcnccgnccatgtggcntggtaaggttantttagcaagtttgccctatgttacggtnctttagantttnccagttccggga

SEQ ID NO: 88451 - DNA, 1512 bp, Arabidopsis thaliana columbia
aaaccggggccggcccaccctacgcgtgctccgatctgagttttttttagcaatggcgaaactaaaccctaaattcatctctttgattcttttcgctctcgtggtgatcgtctctgctgaagttatcttcgaggagaaattcgaagatggatgggagaagagatgggtaaaatctgactggaagaaagatgataatactgctggggaatggaaacacacagctggaaattggtctggtgatgctaacgataaaggtatccaaactagcgaggactacagattctacgctatatcagctgaattccctgagtttagcaacaaggataagaccttagtcttccaattctctgtcaagcatgagcagaagcttgactgtggtggtggctacatgaagttgctaagtgatgatgttgaccagacgaaattcggaggagacactccttacagcattatgtttgggccagatatttgtggctacagcactaagaaagtacatgctatccttacttacaatggaaccaaccatttgatcaagaaggaggtcccatgtgagactgatcagcttactcacgtgtacaccttcgtcctccgtccagatgctacttacagtattttgattgataatgttgagaagcaaactggtagcctttactctgactgggatcttctcccagcaaagaagattaaggatccaagtgctaagaagcctgaggactgggatgacaaagagtacattccagatccagaagacactaagccagcgggatatgatgacatcccaaaggagattccagacactgacgcaaagaagcctgaggactgggatgatgaagaagatggtgagtggactgcccctaccattcccaaccccgagtacaatggtgaatggaagcccaagaaaattaagaaccccgcttacaagggcaagtggaaggctccaatgatcgacaaccctgaattcaaggatgacccagaactctatgtcttccccaaattgaagtatgttggagttgagttgtggcaggtgaaatctggttccttgttcgacaatgtcttggtcagcgatgacccagagtacgctaagaagttggccgaggaaacctggggaaagcacaaggatgcggagaaagcagcatttgacgaagctgagaagaagagagaggaagaggaatcaaaggatgctcctgctgaatccgacgctgaggaagaagcagaagatgatgacaatgaaggagatgactcagacaatgaatcaaagtctgaggaaaccaaggaggccgaggaaaccaaggaagccgaggaaaccgatgccgcccatgacgagctctaagcaaaggtggaggattaaaaagttttcagagtcttaattgttcttttaaacttttcttttaaaaggaattctttagctctagtttggttggaatgtagaactttttagctattattatggtgaaatggttgtggtaactttgttttagactttgagaaaatcctgactttctccttctcttt

SEQ ID NO: 88452 - DNA, 403 bp, Arabidopsis thaliana columbia
ccttcacttgctcacttccttttactccactatccaaatcccttaaacccattcgttccccaattctacgctcagactatggaaccagcagaagctttgttataagatccatgacggttcaagaagatgacaagagaacaagcgatgaatcaatgagtattgacaatttacgaggattcgtcgatcttaatgtcggaaaatggactggctcctttcatcaatttgatggtaatgggaatttgttacataagattgatacacgtctttcagctagttcttatggagaagatgagctccttagtcttaatcaatcgttatatataaagcagcctacatcagctactttagtttccgaagaggaggaagaggaaccggaatgggtagagtacaaaattaaagaaac

SEQ ID NO: 88453 - DNA, 411 bp, Arabidopsis thaliana columbia
  unsure (1)..(411): unsure at all n locations
nnnnnnnnnnnnnnnnnnnnnnnnnnnnnnnnnnnnnnnnnnnnnnnnnnnnnnnnnnnnnncttcactgtgagagggggggcttctcaacaatgttcttctctcatagggagaacacggtgagttcactggggagggttgtgctgatcatttggttattcgtggttctgatcatcaactcgagctacacggccagtctcacttcgatcctaaccattccacagctgacatctcgggggtgaaggaatagatagcttggtaacgagcaatgaaccaattggagttcaagaccgtacctttgctcggaactatctaatcaacgagcttaacatactaccttcaaggattgttcctctgaaagacgaagaacagtacctttctgctctgcaacgcggtcccaacgctggcggt

SEQ ID NO: 88454 - DNA, 408 bp, Arabidopsis thaliana columbia
gtctatcagaggttagtgactaagaggatgggaacacatgtggcaccatggaagcagcttctctttggcgccattgaagccaattctcatctaagccactcttcttatgttcagctcgcaacgattggtttaaatggacggccttcgaatcgtaccgtcgtattcaggggatttgaagagaacagtgacaggattcaaatcaacaccgatcttcgcagtcgtaagattgaagagcttaagcattgtcctttttctgagatgtgttggtatttctcggatacttgggagcacttccggatcaatggaagaattgaggtcattgatgcgtccaatcctgaccagaccaagcttcaggttttatgtacattattacaatttaatattagtattttggaaacgaagaaacac

SEQ ID NO: 88455 - DNA, 562 bp, Arabidopsis thaliana columbia
  unsure (1)..(562): unsure at all n locations
aaaggtcaaagctatggaactaatcgatgagctagagccaacgaggcgtggaccatacagtggcggttttggtggagtctccttcactggtgacatggacattgctttatcccttaggaccaatcgtttttccgacagcatgtcaatacaattcaatgtactcttccaaggatgctaacaaacggcgtgagtgggtggcttatcttcaagctggagctggtgtagtagctgatagtgacccgcaagacgaacactgtgagtgccagaacaaagccgctggtcttgctcgagccatcgacttggctgaatctgcatttgtgaaaaaatgattgtgcccaagaacagaggctggctttctttgaactccgagttcatgtgtataaaacagttacaagcagaacaaagttttttctttttcttgattttgtgagaattgcaattagactccattaatgaagctctgaaaaatgttacaatagaaaccatggtcaataatattcagctattctcccaaaaaaaaaannnnnnnnnnnnnnnnnnnnnnnnnnnnnnnnnnnnncac

SEQ ID NO: 88456 - DNA, 1251 bp, Arabidopsis thaliana columbia
ccacgcgtccgaccacgcgtccgcttcgttgtgataggtcaggtcagggaacaacaatggcttcttctgcaacagcaccaaattcgctatctttcttctcatcttctctctttttatcctcctctcaccaaatccctaaaacctacatttccgtttcaaaactcggctccggcagagtctcgaagccgctttctgtctcttcccagctagcgactctaccgattctatcattcgaaggagagaaggtcggagagacgtatctagacctcaaagcggcgccggaggataccgcgcgtgccgttgtgcaccgagccatcgtgacggacctgaataacaagcggcgaggtactgcttccacactgactcgcggtgaagttcgtggtggtggaattaaaccttactcacagaagaaaactggccacgcgaggcgtggatctcagagaacaccgttacgtcccggtggaggtgtggtgtttgggccaagacctaaggattggtcaattaaaatcaataggaaggagaagaagctagcgatatctacggcgttatcgagtgcggcatctgcggaaggtggtgcgatagtggtggaggaatttggggagaagtttgagaagcccaagactaaagatttgttagctgcgatgcaaaggtggggattggatcccaaggagaaagctatgttcttgatgattgatgtggatgagaatgtggcgaaatcgagtaggaacattggaaccttgaggatgttgacgcctaggacactgaatctgtttgatattttgaacgctgataagcttgttctgactcctgcggctgtggagttcttgaatgcgaggtacggtgttgatgcggtggaggaagaagatgacgatgaagatgagacggaagggtcagaggaagcttaagaatgagtagcacccgtagttccaattgcttcaagtgtggcttaattatgagtttaatcttgagtacatcttctcactctccttgatgaggtcttctctttcctttttgtgtcacaacaagagaaatgtgtatttacttttagagtttttcttaagagatcatcctcaatttcttgtcatactgattttgtgtccaactctcaatgaaggagtaaggagtgaaattagatatcatgagtaacgttgattgtgtgtgtatcagttaagattgagccgaattcaagcagcccgggggatccactagttctagagcggccgccaccgcggtggagctccagcaaatgtt

SEQ ID NO: 88457 - DNA, 1577 bp, Arabidopsis thaliana columbia
  unsure (1)..(1577): unsure at all n locations
ttgacgtcgcatgcacccgtacgtaagcccacgcgtccgaattctgaaaaatgggattacctcaaaataagctcagttttttctgcttcttcttcctcgtctctgtactaactcttgccccattggctttctccgagatcttcttagaggagcatttcgaaggtggatggaaaagtaggtgggtcttgtctgattggaaaagaaacgaaggcaaagctggaacctttaagcacactgccggtaaatggcccggcgatcctgacaataaaggtattcagacttataatgatgccaagcattatgcgatttctgcaaagattcctgagtttagcaacaaaaaccggactcttgttgtccagtactcagtcaagattgaacaagacattgaatgtggtggtgcttacattaagctcctgtctggctatgttaaccagaagcagtttggtggtgatactccatacagtctaatgtttggaccagatatatgcggaacacagacgaagaagcttcatgttatagtttcatatcagggacagaattatccaatcaaaaaggatttgcaatgtgaaacagacaaattaaatcatttctacacatttattctgcgtcctgacgcttcttacagcgttctggtggataataaagagagagaatttggcagtatgtacacagactgggacatccttcctccaaggaagatcaaggtcaagaatgcaaagaagccagaggactgggatgatagagagtacatcgatgaccccaacgatgtcaaacccgagggttttgattctattccacgtgaaattccagatcgtaaagctaaagagcccgaggactgggacgaggaagaaaatggtttgtgggaacctccaaagatcccaaattttgcgtacaaaggtccttggaaagcaaagagaatcaagaacccgaactacaagggaaaatggaagaacccatggatagataatccagaatttgaagatgatccagatctttacgttctgaagtctatcaaatatgcaggcattgaagtatggcaggtgaaggctggctcaatctttgacaatatattgatctgcgatgacccggcatatgcaagaagcatcgtggatgactattttgcccaacacagggagtctgagaaggagttatttgcggaagcagagaaagaaagaaaagctagagaagatgaggaagctcggatagcacgggaagaaggtgaacgcaggcggaaagaaagggaccaccggtatggagacaggaggaggcgttacaaacggccgaatccacgtgattatatggatgattaccatgacgagctatgaggcgcagagtggtgggcatttggcaaagcattgggggaaattatctatattttgctttgaatgtgtgtttgtaatttcataatttgtaaccttttgtattcatattcttataatgtattttggcatgaaaacttgacttgttaaaaaaaaaaaaaaaaaaaaaggnnnnnnnnnnnnnnnnnnnnnnnnnnnnnnnnnnnnnnnnnnnnnnnnnnnnnnnnnnnnnnnnnnnnnnnnnnnnnntgagttgta

SEQ ID NO: 88458 - DNA, 557 bp, Arabidopsis thaliana columbia
  unsure (1)..(557): unsure at all n locations
ttctaacaagaagaagaatttaaacacaattatatatttaacgcgccaaaatcgcgtgtgaagtctctctattagtcaacgctatatcttgaaagggtctcgagactctccagccattttattctgccttcctctctatatttagaagaacaaaaattgaaaaaaaaatccttagagagaggaaaaaaatttagaggaaaatcttctaatttggttttaattcttcgtgattatccgctaatccagagtgattaagaaattaaaaccccttgaggaacagagaagacctttgggtgaaattaaaagcgcgacgacgaggacaatgccgagcaagcttaaaaaagcgattggtgcggttaaagatcagacaagcatttagcctcgccaaagttgctaacggagccaccggatgcggcgatctcacgnctctcggagttgcgtcttgnaagnttcgngccccggcgnggnagncccatcggngtcgctcggtacngatccccgggtncttnccccagnatntcagcgcnttggcgcnggtggnccggttgggtncggac

SEQ ID NO: 88459 - DNA, 597 bp, Arabidopsis thaliana columbia
  unsure (1)..(597): unsure at all n locations
agctacaatacgactcactttagggaaagctcgtacgcctgcaggtaccggtccggaattcccgggtcgacccacaagctccgcccacgcgtacgaaattgacaagtgcaaaaatggcgacggattgcaatagagtcaacgatttcttgttttctcagcagcaagagtctacttctggtgcaaataaatacggaggacttgtgccaaagaaaaagcctctcatctctaaggattccaaacgtgctttctttgattcagcagattgggctttactcaagcaagaagcaagtatagatcagagaacaatagcggcaatagaaaaactaagacccaaattgcagagaacgcctcgcaagcaactttctcctaggagacccacatgtgcgacgggaaatgagaatctgacagagtcgagcttttagggtacaataaaaagggtttgcaccgggaaagggaacgtgacttggtttggtaccctacccacgtgtttcatgtttccatttaaaaacttgtactgcagttattgacagttgttcggttattttcactattgggtcctaaaatgcttgncgtttcaataagttgcgcagacaaaaa

SEQ ID NO: 88460 - DNA, 490 bp, Arabidopsis thaliana columbia
gcctgcaggtaccggtccggaattcccgggtttacccacgcgtgcgatctcgcctctgctcaatctcaatctccctcttcgcgtccggagaacactggagaaatcgtggttgtgaaacagagaagcaaagcttttgcaagtatattttcttcgagtcgtgatcaacagacaacttctgttgcttcccctagtgtgcttgtgccccaccatcttcatcaaccataggatcaccacttttctggattggtgttggtgttggtctatcagctttgttctcatatgtaacttcaaatttaaagaaatatgcaatgcaaccagctttgaagaccatgttgtaaccaattgattccccaaaatagccggggtattaattctggattcccgatcaggatcaccttttccgtttccatttcctcctcatacaagtcctgcttcctcgccattccaatctcaatcccagtcttcaggtgctaccgttgatgtgacagcg

SEQ ID NO: 88461 - DNA, 1030 bp, Arabidopsis thaliana columbia
cggacgcgtgggctttcatcttctccaccagaatttgttttaggctctccttcttctgtttctttttctcccaaagaaacaattagatatggagaaccttaccctagtttcttgctcagcttcttctccaaagctgttaattggatgcaatttcacttcctcgctgaaaaaccctactgggttttctcgtcggactcctaatattgtcctccggtgttccaaaatatctgcctctgctcaatctcaatctccctcttcgcgtccggagaacactggagaaatcgtggttgtgaaacagagaagcaaagcttttgcaagtatattttcttcgagtcgtgatcaacagacaacttctgttgcttcccctagtgtgcctgtgccaccaccatctttcatcaaccataggatcaaccacttttctgggattgggtgttgggtgttgggctatcaagctttggtcctcataatgtaacttcaaatttaaaggaatatgcaatgcaaacagctttgaggccggtggtggaccaaatgattacgcaaaatagccagtttaataattctggattcccatcaggatcaccttttccgtttccatttcctcctcaaacaagtcctgcttcctcgccattccaatctcaatcccagtcttcaggtgctaccgttgatgtgacagcgacaaaagtagagacacctccttcaactaaaccgaaacctacacctgcaaaggatatagaggtggataagccaagtgttgtcttagaggcaagcaaagagaagaaagaagaaaagaactatgcctttgaagacatttcacccgaggaaaccacaaaagaaagcccatttagcaactatgcagaagtctctgaaactaattcccccaaagaaactcgcttgtttgagaatgtaagtttcgttttcttttgtatttccacagcacaccaagtggtgatttaaaaacgtgacatagttttgctaaccttctatgctctcttattgatctctgggtgaaggtcttgcaaaatggagctgg

SEQ ID NO: 88462 - DNA, 428 bp, Arabidopsis thaliana columbia
aaattggattgccttgaaatccgtggagggattgaccagaacaaaagaactccaacatttttgcaattcataaaggcggaaaccggtattttgttgtgtactaatgtcgctgcccgaggtcttgattttcctcacgtggactggattgtgcagtatgatcctcctgataacccaacggattatattcatcgagttggtagaacagctcgtggtgaaggagcaaaaggaaaggctctgcttgtcctaactccacaggagttgaagtttatacagtatctcaaggcggcgaaaattcctgttgaggaacatgaatttgaagaaaagaaattgctcgatgtgaaaccttttgtggagaatttgatatctgaaaactatgcattgaaggagtcagcaaaagaagcatacaggacatacatttcaggatatga

SEQ ID NO: 88463 - DNA, 2375 bp, Arabidopsis thaliana columbia
  unsure (1)..(2375): unsure at all n locations
gctttagcttgcatctgtagtcatttgtcaaagataattgaacagagagtaatttagttcgtggtcaagggtttaggagattctgggttttggcgtgattttgaggggaaagattgaaactttccccgtgaatggtaagacagtgagagatgtctgggtacgtgggtgttgtcgtttctgatccatggctacagagccagttcactcaagtcgaacttcggactctcaattccaagtatgtgtcggtgaagaatcagaatggaaaggtcactattgaagatctccctcctctatttgcaaagctgaaggcacttagtgcaacatttaaggaagacgaaatcaagggtatgctaggggaattgggttctgatacaagcactgatgtgagttttgaagagtttctcaagatatatctcaacttactaagtaaagcagctgagaaatctggtggtcatcataagaactcatcctcgtttctgaaagcttgtacaacgacacttcttcacgctatatatcagtcggagaaaggtccttttgttcagcacatcaatagatatctaggggatgacccctttttgaagcagttccttcctcttgaccctcattctaatcaattgtatgaacttgtgaaagatggtgtccttctatgtaagcttataaatgtagctgttcccgggacaattgatgaacgagcgatcaacactaagagggtacttaatccgtgggagagaaatgagaatcacacgctttgtctcaactctgctaaagctgttggatgctctgttgttaatattggcacacaagacctggccgaaggacggcctcacctggtgctcggattgatttcacaactcataaagattcaagtacttgctgatctcaatttaaagaagacgcctcagcttgttgagttgcttgaggacagcgatgatgtcgaggagttgctgagattaccccctgagaaagtcttactgaaatggatgaacttccatcttaagaaagggggttacaagaaaaccgtctcaaacttttccgcagatttgaaggatgcacaagcgtatgcctttctgctcaatgttctcgcacctgaacactgtgacccggctacactagatgcaaaggatcctcttgaaagagctgaattggttctcagtcatgcagagagaatgaactgcaagcgatacttgactgcagaggagatcgttgaaggatcttcaactttgaatcttgcctttgtggcacaaatcttccatgaaaggaatggtctaaacaaggatggtaagtatgcatttgcggagatgatgaccgaagacgtagagacttgtagagatgaacgatgctaccggctatggatcaacagcctcgggattgacagttatgtcaataatgtatttgaagatgttagaaatggatggattcttcttgaggttcttgacaaggtctctcccagttcagtcaactggaagcatgcttccaaaccaccgattaagatgccgtttagaaaagtagagaactgcaatcaagtcataaagatcgggaaacagctaaaattctcacttgtaaatgtagctggaaatgacatagttcaagggaataagaagctcattcttggtctcttatggcagttgatgagattccatatgctccaacttctcaagagtctcagatctcggacactaggtaaagagatgactgatgcagatatcctcagctgggccaacaggaaagtaagaacaatgggacgaaaattgcaaatcgagagtttcaaggacaagagtctatcgagtgggttattcttcctcaaccttctatgggcggttgaaccaagagttgtgaactggaatcttgtcaccaagggtgaaacagatgatgagaagaggttgaatgctacatacatagttagtgtcgcaagaaagctcggttgttcggttttcttgttacctgaagatatcgtggaggtgaatcagaagatgatcctaattttaacggcaagtataatgtactggagtcttcagagacattcacgggagagttcagattcgtcgtcaactcagagcaccacaacgacgtgcaccagcacagcctcgtcccctgccccatctgtcacagaagaggaggaagtctcctcattgagcggtgaagtcacgagcttggccgttggtgatgcggtttctgaaatcaccacggtctcagaggaagcatccatcgaatagagagagcgagatcacatatatactgatatacatctcttgctatagcaaagtagctgttataatagtgacttctctgtaatcttttgtttttttgtttcatcaactaaaattaccaaaaataataacaatgttacaaacactcaaannnnnnnnnnnnnnnnn

SEQ ID NO: 88464 - DNA, 651 bp, Arabidopsis thaliana columbia
agagaaatcaggaaaatcctaactctaagagccgcaaacttccccattgcactggatgatgtgtccatcacaggcttgacattcggaaaggagttcacgccagccatagaaggaaagcaggtcgctgctcaagaggccgaacgggctaagttcattgtcgagaaagctgaacaggacaagagaagtgctgttatccgcgccgagggagaagccaagagtgctcagctcattggtcaagcaatcgcaaacaaccaagcgttcttaacactgaggaagatcgaagcagctagagagatcgcacagaccatctctaggtcggcgaacaaggtttacttgagctctaacgatctgttgcttaacctacaggctatgggccttgatgtgaagccgaagaagtagagaatgatatgattaaaccacaccagagctcttcttccataatcgtattttcaattcgcggattcttagaccaaaagctatgagttctatcttgtgaatttcagacactatcgtgcgtttgtagtctttcttttgtgagatcaagaagaaaagaaaagatttatgtttttaaaaaaaaaaaaaaagggcggccgctctagaggatccaagcttacgtacgcgtgcatgcgacgtcaagactcttctatagtg

SEQ ID NO: 88465 - DNA, 1175 bp, Arabidopsis thaliana columbia
ctaaacccctttctccacgatcttccttttcctctctctgcgacttgaagcaaagtttccagaaaaagagatgaacaacgtcaaagttccaaagataccaggtggtggtgccatttcgacgttgcttaaggttgggattattggtgggcttggcctctatggtgctacgcacagtctctacaatgttgaaggaggacatcgagccatcatgttcaatcgtttagtcggtattaaagataaggtttaccctgagggtacacaccttatgattccttggtttgaaaggccggtcatctatgacgttcgtgctcgaccttaccttgttgagagtacatccggaagccgtgatcttcagatggtgaaaattgggcttagggttctcacacgtcccatggcagaccagttacctgaaatctacagaagccttggtgagaactacagcgagagagttctaccttctataatcaacgagactttgaaagctgtggttgctcagtacaatgcaagccagcttattactcagagagaggcggtcagtagggagatcaggaagattctgactgaacgagcagcaaacttcaatgttgcgcttgacgatgtgtccatcacaaacctgacattcgggaaggagttcacagctgccattgaagcaaagcaggtggcggctcaagaggctgagcgggctaagttcattgttgagaaggccgaacaagacaagagaagtgctgttatccgcgcccagggagaagccaagagtgctcagctcattggtcaagcaattgcaaacaaccaagcgtttatcacgctcaggaagatcgaggctgcaagagagattgcacaggccatagcaaactcggcgaacaaggtttacttgagctcagacgatcttttgcttaacctacaagggatgaatttggatgttgatgcaaagaactagagaggtttcttaagtaaaactgcatgtgggtcattttgtcttttaagttcctagaatccgttggaacaaaagcttgatttgtactactaaatactacttttaaaattcttgggatcagtctatctcaaggtgaaagttgaaaaagaagatactgtcttgctgaatgagttaattgtaataaacttgtcgtttgggggagaaaaacacttgcatttggattaaaaaaaaaaaaaaaaaa

SEQ ID NO: 88466 - DNA, 420 bp, Arabidopsis thaliana columbia
gagagaaaaaacactaaacaaatagaaaataaaaaaacaactcataaaattttccattttctcacgattttcctcgtcttaaaaaaaatttctgagaaagaaaaaaaaattcaattttgtcgttttatttattttcctggtttcagaccaaaccagttagaaacaaactcgtttttttttcacaaatttggattttattgttccactgtgaatgaaaggaaaccaaaaagactcatcggagaaacccatatgggatcggagctcatcgggtatatccatgacccgacccggccgattaataatctggctcatcctcttcatctccgtcacttacatcatctacactctcaagatcgtctccactacacacccttgcgaagatctaacctccgagtcaattctccaacaaagaccggagaa

SEQ ID NO: 88467 - DNA, 654 bp, Arabidopsis thaliana columbia
cggtcgcgtgggcggacgcgtggggcaaaaatgacagaactcaaatggatatgtatttcattctcactaacactcttgctaagcttagcagttgaaggagcctttaacataaaccagaaatggtctggtggaagtcattttggttacgagggcgggttctgttttcccggtctctgcattggaggatctggtggtagtagagtccattatggcagggaccattacggtggtggaagtcaatatagaggtggtattggttacagagagaccatgtactgcaaaccgttgacttgttatggtggctcatgtgatgcactccatttgcatttagacaaagggttatatgaatctctcatacgcaatactaagacagcgaaacaatcgtcgactgttgatttcaacatgccagagactttgaaacacaatgtcatcaacaataactatgagtttaagatggcgaaagaagctgcaatggcaccacagtctaactagctagctaatgaagttgagtctttattgtatagtatgtatcaataaacgtaacggcctacgaatctcatcagactgagatggtatcacaagattatagttataaacttaattataatgtagaaaaggaaatcaaagcagtaatatatatgcttgttcaatagc

SEQ ID NO: 88468 - DNA, 1250 bp, Arabidopsis thaliana columbia
gtacttgttaaacttgaatcccgtgttcgcgactttgcgatagattctctcaaatccaattccaatggcggatccatcttctcaaaaccctaacctcgccactccccctcctccttcttctccttcaccaacccatcaaattcaatctggaacctcggaattatcgccaccgtctcgaccgccttgctctaccttgtcctttctcaagactgctaaccgaccaaaactccgtgtgacatctgaattcgacagcgatagtctccttttcttaaacaaagtgtcttgtaagctcttcgataaccttgccaagcttaaactctcgtttcagaacaattcccagcgcgagatttcacagcctcaggtctcttttacttccaaacaccgtccggttctctatgatgtcgaagagaagaatactttcattaagagcactctcgatgttcacccgcgtcttcagctccgagctcttcataatgttaaggcacaacaaggagaagttgctatggaggcaaatctgactgaacctggctactctctggagctttcatcacctgtgcctattggttacccaagagcaactcttaaattcccacttggcgaaatttcgttacaagaaaaagatgaggaggaggaggagaagcagaaaagaactttatctgttaatgggtccctcaaacgtcaagttatgaatggtgtttgtacccgcttctatacacaggttgaaggagttgaggcctgagatattgcttataaggatgatgcattgtctttcatcccaagtatttcccttccttccaatgctgcatcatttgcattcaaacggcggtttagcccttcagataagttgagctattggtacaactttgattcaaacatgtggagtgctgtgtacaaacgcacatatggtaaagactacaaattaaaagctggctatgattctgatgttcgccttggctgggcatctctctgggttggtgatgaagctggaaaagtgaaaacgacaccaatgaagatgaaagtccagttcatgcttcaagttccacaagatgacatcaaatcatcagtcttgatgttccgagtcaagaaaagatgggacatttgatgaaatctttgaataaatcatctcttagtttcactttctttaatctctctataaaacccataaaagttgtttgtttctccaaccatacccaatcttttgcaaagtagatacaaaaacatgaggtgaataattgcaattgtaattctgt

SEQ ID NO: 88469 - DNA, 1253 bp, Arabidopsis thaliana columbia
attcacgcgtccgaaaaccctaagcttcgccggcagctccgatcgtgatctttcataaatcctaccatcgccgtcgattaagagctgagctcaggaaatgagtttcaacaaagttcccaacattcctggagctcctgctctctctgcccttcttaaggtcagcgttattggtgggctcggtgtctatgcccttactaatagtctctacaatgtcgatggaggacaccgtgctgtcatgttcaaccgattaactggtatcaaggaaaaggtgtacccagaaggcacacattttatggtgccatggtttgaaaggccaatcatctatgacgttcgtgcacgaccttaccttgtagagagcaccactggtagtcatgatcttcagatggtgaaaattggattaagggttctcacacgtcccatgggtgaccgtttgcctcagatttaccgaacccttggcgagaactacagcgaaagggttcttccttccatcatccatgaaaccctaaaagcagtggtagctcagtacaatgcaagccagctcattacccagagagaagctgtgagcagagagatacgcaagattctgacagagcgggcttctaactttgacattgctcttgatgatgtctccatcacgactctgacattcggcaaagagttcaccgcagctatcgaggcaaaacaagttgctgctcaggaagctgaacgggctaagttcattgtggagaaagccgaacaagacaggagaagtgcggttatccgtgcgcagggagaagctaaaagtgctcagcttatcggacaagcaattgcgaacaatcaggcattcatcactctgagaaagattgaagctgcgagagagattgcacagaccattgcacaatctgctaacaaggtttacctgagctccaacgatctgttgcttaaccttcaagaaatgaacttggagcctaagaagtaaaagagaaggaacgagtaagtttcttcatttcatattcatttcatttaaaacctctctccgccttggaagtaaaggatgggttggtgtttgaccaaatgaccctttctcgtgactgattctgaaaatagtctttaagaggacatattgagagagacgcagattggctttggtcagtattattcatcattttcaatgaaactttttgttgatattttcctgtgtttccccggacaattgatgaagttgaatttaaaactcaataatattcatatgatctgatcaaaaaaaaaaaaaa

SEQ ID NO: 88470 - DNA, 504 bp, Arabidopsis thaliana columbia
  unsure (1)..(504): unsure at all n locations
cacacgcgtccgcaacaaacaacacgttctctctcattttctttcttctccgatcaatctagggtttactctcaccggcgacgaacaatgatccacctcctttacacagtgatcttcgccgaaatggcactgatccttctcctcctcttcaaaactcctctccgaaagctaatcatcctcaccttcgatcgaatcaaacgtggccgtggtcccgtcgtcgtgaaaaccatcggaaccactgtattcgtcgttctcttgtcgagtatctacagtttggttaatatccaacgccgatctgaagatggtgctgttcttaatccctacccgatcaagtccttgcggctaaggaatcttctcgaaggttctcttatgggggtttgtgnttgtttccnctcgnttatggattgaaaaggctacanccattncattaggngnggtttcggttttttgngggaggcaaangggggcttcaaaagnagggngncaaagnggntttttnggggt

SEQ ID NO: 88471 - DNA, 554 bp, Arabidopsis thaliana columbia
tatagatatgaatggttttaaagtggaaatggagaatcaaagacgtcaatctcaagctgctcacaatgttgtaaatctgacagttgaagacgatgctgacatgacgaaaaatattgcagacgactgaggtccttggatatgacagtctctctgctcgtcctgttgtgaaaagtcttttggtgaatgggaagcctgtgataagggtttctgaaggcagtgaagtagaggttctgctggacagaactccgttctatgctgaatcaggaggtcaaattgcagatcatggttttctttatgttagcagtgatgggaaccaagagaaagctgttgttgaggtaagtgatgtgcagaagtctcttaaaatttttgttcacaagggcactgtaaaaagtggagctctagaagttggcaaggaggtggaagcagcagtagatgcagacttgaggcaacgagcgaaggttcaccataccgccactcatttgctccaatcggcacttaaaaaagtagtaggacaagaaacatcacaggctggttcattagtagcttttgaccgc

SEQ ID NO: 88472 - DNA, 518 bp, Arabidopsis thaliana columbia
ctgaagtaaataagcaattgaacgatgagaaacaatctatgatcaaggagctcaattcttacgttgctctaagaaaaacgtatatgagtacccttggcaacaagaaagttgagctttttgatatgggagctggagttagtggcgaacctacagctgaggaaaatgttcaagtggcttcatctatgtcaaaccaggagcttgttgatgctggaatgaaaagaatggatgagactgatcaggccattgagcgctcaaaacaggttgtagaacaaacactcgaagttggaactcaaactgcagctaatttaaagggacagacggatcaaatgggacgcgtagttaaccacttggacactattcaattctcaatcaagaaggcctcccagctggtgaaagagatagggagacaggtggctaccgataaatgcataatggggttcctgtttctcattgtatgcggtgtagtagccataatcatagtgaagatcgtgaatccgaataacaaagacattagggac

SEQ ID NO: 88473 - DNA, 550 bp, Arabidopsis thaliana columbia
  unsure (1)..(550): unsure at all n locations
ggattgatttaggtgacctatagaagagctatgacgtcgcatgcacgcgtacgtaagctcggaattcggctcgaggattgaagcttcaagggagattgcgtctacacttgctaggtctcctaatgtggcctacttacccggtggccagagcatgctctttgccctgaaccgttgatcttgatcagatatgatggttgtttgggagcattttgcgatattttaatgatcaagttgtgaatctgattgaatcaaagaggtgaaatgctcttttgttttgatgaactctgaagaagaaaaagaaactagttgtttgagttgtcattattgtgttctgaatctcggcaaaatttactctacctgaagaatctttgttttcagcatcatgtttatctaattctcccccnntnnnnnnnnnnnnnnnnnnnnnnnnnnnnnnnnnnnnnnnnnnnnnnnnnnnnnnnnnnnnnnnnnnnnnnnnnnnnnnnnnnnnnnnnnnnnnnnnnnnnnnnnnnnnnnnnnnnnnnnnnnnnnnnnnnnnnnnnnnnnnnnn

SEQ ID NO: 88474 - DNA, 552 bp, Arabidopsis thaliana columbia
  unsure (1)..(552): unsure at all n locations
cagcaggaagccgaaaggtcacagtttgtggtgatgaaggctgatcaagagaggagagctgcggttataagagcagaaggtgagagtgaagctgctcagttgatatcagatgcaacagctaaagcaggaatgggactaattgagcttaggaggattgaagcttcaagggaggttgcggctactctggctaggtctccgaacgtggcttacttacctggtggacaaagcatgctctttaatctgaaccctggtcgttgagctataacattggtgggaagaggagcttcagtggagacaaaacgacggagctgtgaagtttattaacgttgatgctcttttatttctgatgaacacgatgtgaaaaaagataattgttttgagccgttctatcttttctgactctagaagtaaagactatgccattgttgtcgaaacccgatcattccaatgaaaggcttcaccaaaaaaaaaacaaaaagggcggccgctctagaggatccaagcttacgtacgcgtgcgatgcgacgtcnnnnnnnnnnnnnnnnnnnnnnn

SEQ ID NO: 88475 - DNA, 1336 bp, Arabidopsis thaliana columbia
  unsure (1)..(1336): unsure at all n locations
nnnnnnnnnnnnnnnnnntccagctctctacgactcactatagggaaagctggtacgcctgcagggtaccgctccggtgttctcaaatcccttcttccttcttcttctctctcgattcaagataatccacacgcaaaaatgggaagccaacaagcggctgtttcgttcctttccaatttggcgaaggctgctttcggtcttggaacggcggcgacggtgctgaatacatcgcttttcaccgttgacggcggagaaagagctgttatcttcgatcgattcaggggagtgatggatcagactgtgggtgaagggactcatttcttgatcccgattcttcagaggcctcacatcttcgatatccgcacgaagcctcacacgttctcttcaatctctggtactaaggatctccagatggttaatctcactcttcgtgttctctctcgtcctgaggtgtcgcgtctcccgtacatcttccaaactttgggtctagagtatgacgagaaggttcttccttcgattggaaatgaggttttgaaagctgtggttgcacagttcaacgctgaccagcttctcactgagcgtcctcacgtctcagcacttgttcgggagtcactaatcacccgtgcgaaggacttcaacattgtgcttgatgatgtagctatcacgcatttgtcctatggtgtggagttttcaagggctgttgagcagaaacaagtggctcagcaagaggcagagaggtctaagtttgttgtgatgaaggctgatcaagagaggagagctgcggttataagagctgaaggtgaaagtgaagctgctcagttgatttctgatgctacggctaaagctggtatgggacttatcgagcttaggaggattgaagcttcaagggagattgcgtctacacttgctaggtctcctaatgtggcctacttacccggtggccagagcatgctctttgccctgaaccgttgatcttgatcagatatgatggttgtttgggagcattttgcgatattttaatgatcaagttgtgaatctgattgaatcaaaaaggtgaaatgctcttttgttttgatgaactctgaagaagaaaaagaaactagttgtttgagttgtcattattgtgttctgaatctcggcaaaatttactctacctgaagaatctttgttttcagcatcatgtttatctaattctcaacaaataaatgattttggctgaaaaaaaaaaaaaaaaaaaaaaaaaaaacaaaacacnaagggcggccgctctagaggatccaagcttacgtacgcgtgcatgagacgtcaagctcttgtaagagtcacctaatacaat

SEQ ID NO: 88476 - DNA, 702 bp, Arabidopsis thaliana columbia
  unsure (1)..(702): unsure at all n locations
nnnnnnnnnnnnnnnnnnnnnnnnnnnnnnnnnnnnnnnnnnnnnnnnnnnnnnnnnnnnnnnnnnnnnnnnnccacgcgtccgtcaaactctgctagcgaagtcacaatatcactcgaagatggctaatcacaacagtagtaggcacacaatcatcttgttgcagaattctccgagcagagctacgaggactttcatggactatgactctataggccaagctatggatggtatttgcggcttatatgaaaggaagttgaaggaaattaacccttctctcagaaatattagctatgacattgctgacctttacaattttattgatggtcttgctgacttgagcgctttggtctatgaccactcgataagtgcatatctgccatatgacaggcaatggattaagcagaaggcatttcaccatctgaagagaattgccaatggaggcagatgaagaagaagcatcatatgaaattgtcttacctgaagaaacatatgttgagagaggccatttaaagcatcatcactcgttattatatatatttgccaatgtaacattaattaatatgcatagaaagagttgtggttctcttggatgtgttagcccctaaaagtatttttgctatcccaaaaaaaaaaaaaaaaaaaaaagggcggccgctttaaaggattccagcttacgtacgcgtgcatgcgacgtcgtag

SEQ ID NO: 88477 - DNA, 784 bp, Arabidopsis thaliana columbia
  unsure (1)..(784): unsure at all n locations
gatactccagctctctacgactcactataagggaagcttgttcgcctgccaggacccgtcccgaatttccgggtccacccaagccttccgggcctttattggttggacccaacttggattggttggtccaccgccccaggtgataaacccggccattggaccaggcctggacagctttattggccttctcagggagctggtttggcttttattccgccatttggccaggctttgttgggttccttggggacagctgctggtgtaaacccagggaatggagttggaatgccaactggttacggtactcaagctatggcaccggggacaatgcctgggtacggtacacaacctgggttgcaaggcggttatcagactccgcaacctggtcaaggcggtacaagtagagggcaacatggtgtcgggccatacggtactccttacatgggtcactaaatgtatcatgtatccatccactcagatatcagaaatcagtgttttaattttggcctggtgattcttctcaagtttataaggagctgatgctaaatgaagtctttatgaaatgttactctttggtcactcctaaggccaaactcataaaaaaccttttaaggagttttagttttcatctacttgtttttcccaaactctctttatgaaattcctaaaaaaaactttgtactactaaaaaaaaaaaaaaaaaaagnnnnnnnnnnnnnnnnnnnnnnnnnnnnnnnnnnnnnnnnnnnnnnnnnnnnnnnnnnnnnnnnnnnnnnnnnngcat

SEQ ID NO: 88478 - DNA, 449 bp, Arabidopsis thaliana columbia
gggtgcttggtgcacaggctaagtttgatgagaagaatgggacctcgcttgtgaatggggctcatgacacttccaaacttgcaggattattggagaactttattaagaagtatgttcagtgttatggatgtgggaatcctgaaactgagatacttatcactaagacgcagatgcttcagctgaaatgtgcggcttgtgggtttctctcggatgttgatatgagggacaagctaacgtcgtttattttgaagaatcctccagagcagaagaagtcgtctaaggacaagaagtcgatgaggagagctgagaaggaaagactcagagaaggtgaagcagctgatgaagagatgaggaagctcaagaaggaggctgctagtaagaagaaagcagcgaccacgggtacttcgaaagacaaagtgtcgaaaaagaaagatcattctccacctcga

SEQ ID NO: 88479 - DNA, 525 bp, Arabidopsis thaliana columbia
  unsure (1)..(525): unsure at all n locations
nnnnnnnnnnnnnnnnnnnnnnnnnnnnnnnnnnnnnnnnnnnnnnnnnnnnnnnnnnnnnnnccacgcgtccgcggacgcgtccgcccacgcgtccgcccacgcgtccgctttgagtgaagatgatgaatgttgcagtgacagccactccctcgtctctcttgtactctcctctgcttcttccttctcaagggccaaaccggcgaatgcaatggaaaagaaacggaaagagacggttagggacaaaggtggctgtttccggtgttatcacagctggatttgagctgaagccacctccatatcctcttgatgctctggaaccgcatatgagccgggaaaccttggattatcactggggcaaacatcacaaaacttatgtagagaacctgaacaagcaaatcttaggcacggatctagatgcattatccttggaagaagttgtgcttctttcatacaacaaaggcaatatgcttcctggtttcaacaacgctgcacaggcttggaaccacgagttcttctgggagt

SEQ ID NO: 88480 - DNA, 525 bp, Arabidopsis thaliana columbia
  unsure (1)..(525): unsure at all n locations
nnnnnnnnnnnnnnnnnnnnnnnnnnnnnnnnnnnnnnnnnnnnnnnnnnnnnnnnnnnnnnnnccacgcgtccggtttggaggttcttgcaaagttcaaatgggtcggatgtattggctacaaagcaggccttgcttttcattgttttggtccagtatataccgcgattcctacgtgtcttacccttgacgtcagaattgaaaaggacagcaggtgtctctgctgaaacggctggggctggtgccgcttattatctgcttttatatatgcttgcaagtcatatagttggagctttttggtaccttttagccttagaacgtaacgacgcctgctggcaggaggcctgtatagatgcagggaattgcagcacagatttcttgtactgtggcaatcaaaacatggacggctatgctgtttggaacagagccaaggaatctgttcttaagtccaagtgccgagctgacctcgatgataataatcctccatttgactttgggatttatacacaggctttatcgtctgga

SEQ ID NO: 88481 - DNA, 391 bp, Arabidopsis thaliana columbia
gtagaggagggttgtgggaagcagcaaggaatctgtttgatgagatgacgaatagaatgattgagcaagatgttttttcttataatacgcttttggatgcaatttgcaaaagtgggcagatggaccttgctttcgaaatccttgctcagatgccagttaagagaatcatgcctaatgttgtaagttatagcaccgttattgatgggtttgcaaaagccggaagatttgatgaagctcttaacttgtttggtgaaatgagatatcttggtattgcattagatagagtttcttacaatacattgctttcaatctacactaaagttggtagatctgaagaagctttggatattctgtgagaaatggcatctgttgggattaaaaaggatgtggt

SEQ ID NO: 88482 - DNA, 563 bp, Arabidopsis thaliana columbia
  unsure (1)..(563): unsure at all n locations
ggaatcagaaagagcgatcagatcacggagaaagagatgggtcacggagaagaagataaaagcaaaggatttgcttcggaagaaggtaaccagcatcatcaatacggtacctttcaaggtgtttccaattaccctccgccgcagaattctgctccggtcactgggtttcctcaaccttctgcgccacctggcgtttacgattctggagctccttattacgctcatggatatcaaactgttccagtccatggtggtgttgctgaaggaagacctgtcagacaacgtcgccttccttgctgtggaattggtcttggatggttcctgttcattgttggatttttccttggagcaatcccttggtatgtcggattgttcatcatgatgtttggaaggagaatcgattacagggggaaaccagggtacattgcctccactttcgggggtattttagaaacaatcgttgtgatctgggggtnttaaaagggcancggcttgtgatgggcaaanaanttttgggggancctaaaannntttannggtttttaccggggtgnntanccngc

SEQ ID NO: 88483 - DNA, 644 bp, Arabidopsis thaliana columbia
  unsure (1)..(644): unsure at all n locations
tcnaaatnnccgccacggtcccaacccttctgcgccacctggcgtttacgatcctggagctccttattacgctcagggatatcaaactgttccagtccatggtggtgttgctgaaggaagacctgtcagacaacgtcgccttccttgctgtggaattggtcttggatggttcctgttcattgttggatttttccttggagcaatcccttggtatgtcggattgttcatcatgatgtttggaaggagaatcgattacagggagaaaccaggatacattgcctgcactatcgctgctattctagcaacaatcgctgtgattctgggtgtatctaaaggagcagacgactggtgatggatcaatcatcttgtggggttactctaaaaatgtttgtataggtttctttatcgtgtgttgtattatctacttccttttttacttactctatgaagaaacaagaaaaaaaaaagtgtaaacttcacaagaattatttgagttttgttatctaaataagaagaagtcaaagatatgaaatttaagcccaaaaaaaaaaaaaaaaaaaaaaaaaaaaagcggccgctctagaggatccaagcttacgtacgcgtgcatggtacgtcaagctacttnctatagtgagacctaa

SEQ ID NO: 88484 - DNA, 437 bp, Arabidopsis thaliana columbia
  unsure (1)..(437): unsure at all n locations
tacggctgcgagaagacgacagaagggtacggctgcgagaagacgacagaagggtacggctgcgagaagacgacagaagggtacggctgcgagaagacgacagaaggggcacatccatcacttataactaaaaacacaaatcaagataaaatggcggaaaagcaagcagcgacggcaatgggaacatcggcggtggagaagcagccagagacgacgacagaggctgaagcaccaagtttgacgacgaagaggatggtggttgcgattgataagagcgtttcttgggagcgttagcgattactgcgctcatcacgccaactgccccatccttattgtcaagccacctaaggagatgactaagtaatatggagctgtttacatgtttgggttattagtacgaattttataatgagtgtaccataatttacctaanaagg

SEQ ID NO: 88485 - DNA, 567 bp, Arabidopsis thaliana columbia
  unsure (1)..(567): unsure at all n locations
cttataactaaaaacacaaatcaagataaaatggcggaagagcaagcagcgacggcaatggaaacatcggcggtggagaagcagccagagacgacgacagaggctgaagcaccaagtttgacgacgaagaggatggtggttgcgattgatgagagcgactcgagcttctacgctctccaatgggtcattgaccatttctctaatcttttattgaccacagcggcagctaagggccggaaagtggaatgctcacggtgattcatgtgcagtcccctttcaatcactttcctgcctttccggctggacccgggcggcgcacaagcagtgtacgcatcttcatcaattgatagagtcagtttaaaaaaggcacacccatgtgacctctgcttgccctttttttttcgggggtttccaattattccgcgccgccaaagctacgtactgaaactctngtnntaaaggcgaggcgaaggaaattatttttnaggcggtgggaaatcncgtgatttctcgttttggaagnnnggcttgaantnaaaanngtttttttggggtaagttnactttg

SEQ ID NO: 88486 - DNA, 1029 bp, Arabidopsis thaliana columbia
accggtccggtacttcccgggtggccccacgcgtccgccaacgcgtccgcggacgcgtggggaagacgacagaagggggatcacatccatcacttataactaaaaacacaaatcaagataaaatggcggaagagcaagcagcgacggcaatggaaacatcggcggtggagaagcagccagagacgacgacagaggctgaagcaccaagtttgacgacgaagaggatggtggttgcgattgatgagagcgactcgagcttctacgctctccaatgggtcattgaccatttctctaatcttttattgaccacagcggcagctgaggcggaaagtggaatgctcacggtgattcatgtgcagtcccctttcaatcactttgctgcctttccggctggaccgggcggcgccacagcagtgtacgcatcttcatcaatgatagagtcagtgaaaaaggcacaacaagagacctctgctgcccttctctctcgcgctctccaaatgtgccgagccaagcagatacgtactgaaactctagtgctagaaggcgaggcgaaggagatgatttgtgaggcggtggagaaaatgcacgttgatcttctcgttgtgggtagtcgtggccttggcaagatcaaaagagcgtttcttgggagcgttagcgattactgcgctcatcacgccaactgccccatccttattgtcaagccacctaaggagatgactaagtaatatggagctgtttacatgtttgggttattagtacgaattttataatgagtgtgccataatttacctaaaaaagaaaaaaaagaaaaaaagagtgttgtatgtacgtgtgtttgacttggataattagtgacattttaagcaaatgtgtatttggaaaagtgatgtcaatgaaatatgaatatgggtcgaataaagaagcgaagatctgtagactgttgcttctctgcatctgttgttgtattcccgatcatattgttgtatgtttataatttattaaaagcaaattgtcttcctaaaaaacaaa

SEQ ID NO: 88487 - DNA, 549 bp, Arabidopsis thaliana columbia
actcactttaggggaagcacgtacgcctgcaggtaccggtccggaattcccgggtcgacccacgcgtccgtacggctgcgagaagagacagaagggtacggctgcgagaagacgacagaagggtacggctgcgagaagacgacagaagggtacggctgcgagaagacgacagaagggtacggctgcgagaagacgacagaaggggcacatccatctcttataacggggaacacaaatcaagataaaatggcggaaaagcaagcagcgacggcaatgggaacatcggcggtggagaaagcagccagagacgacgacagaggctgaagcaccaagtttgacgacgaagaggttggttggttgcgattgttgagagcgtttcttgggagcgttaccttggctgcggacgcctgttgtttagtgtgcttttctccctatgtgcgcttcttctttgtgggcaccagcgttcgtctcctgtgttcagtttcgccgttctgttttcacgtccgttgcgtttgctggcatttcgtatccttaactgtccccccgttt

SEQ ID NO: 88488 - DNA, 483 bp, Arabidopsis thaliana columbia
  unsure (1)..(483): unsure at all n locations
aaaataaaaaaaaagaggaagcaattactataggggaaaaaaaaatctgaacaaaatgatgaaactcctcttggtggtggcaacttctgttgcccttatctttagcgtcactgatttatccggtgagggaccaaaacatggaggagaatccatgttgacagtccaaatccctgatttccgtctgattcctaccaccggagctttgggaccggagagttttgtctttgattttttcggcgatggtccttacaccggtttatctgacggtcgaattgttaagtggctagctaatgagagccgttggatcgatttcgccgtcaccacctccgcaagagaaggttgtgagggcccgcacgagcaccaacggacagaacacgtgtgtggacgaccattgggcctttcctttgacaaatccactggtgaccttnatatagccgntgtnannatgggcntnttaaanttggccannagntggtntncnnt

SEQ ID NO: 88489 - DNA, 463 bp, Arabidopsis thaliana columbia
  unsure (1)..(463): unsure at all n locations
nnnnnnnnnnnnnnnnnnnnnnnnnnnnnnnnnnnnnnnnnnnnnnnnnnnnnnnnnnnnnnnnnnnnnnnnnnnnnnccacgcgtccggtcgccgagagttcctttcttgtccgacaaactacttcttctccttcgataagccaattctgcgccatagatttttgaaatctactgccggaaaggctgcatgcgatttcaactcccttttcccgggacaattcgcagcttgtgaagaagatcaagaggtgaactctgagtgatgagtgagccaaaggtcaggcgttgggttggcaaatatgaggttggaagattgatcggtgaatgtaattttgggaaactgcggagtgctgttgacacagagacaggagaccctgtggctttgatgatccttgataaagacaaggttctgaagcataagatggctgaacaataaagagagaatttctattatgaagctgatc

SEQ ID NO: 88490 - DNA, 519 bp, Arabidopsis thaliana columbia
  unsure (1)..(519): unsure at all n locations
nnnnnnnnnnnnnnnnnnnnnnnnnnnnnnnnnnnnnnnnnnnnnnnnnnnnnnnnnnnnnnnnnnnnnccacgcgtccggtttagggtttcttggtcgacgtgatgagtcatcggcgagattacggcagtgatgcagttcacgtgagaatcacccacgaccctccgcctgagaattgttttccaaattccggcgacagttccgtctgggccactgaggatgattacagccgtgtctgggccataaactctgatggcgcagagtctccgagcaagaagacacgatcttcctcctcctccgagatcgggaaatcgttcttcaagacgaagctttgcttcaaattccgcgccggaacttgtccctactccgcgagctcttgccactttgctcacagcgcggaggagctccgtcttcctccgccgccgccgcccaattggcaggagacggtgacagaggcttcaagaaacagagaaagctttgcggttagtttaggccctcgtggcaatgttgctcagactc

SEQ ID NO: 88491 - DNA, 466 bp, Arabidopsis thaliana columbia
cgttttaattttaaaccttaactctcttttctctctactctttctttggacgaatctgtctattgtttgtaagttttcaaggaaggtaaagaaacagagagatctaacttcgtctgcagggtttaagcagaggttggtttgtggattcttcgatttcttcttcagatttagtctacaatgaagtgagaatttctaaagataaacaaagaaaaacttgagactttagcaagatggagactgtgagaccaatggttgttgctcctaagggtaacaaactcagacgcaagtttgctaaagttcttaacattcataagctaacgggtgttgctccagaaggagaaatgaagaagataaagttcgattccaaaaccgctaagttgtctgagtcgttctacaagcttgaggaagagtatgagagaagtcagggattggaagctcttcttgcgaagctttttgctacggtttc

SEQ ID NO: 88492 - DNA, 481 bp, Arabidopsis thaliana columbia
ctttctcgtgggcggacgcgtgggaaaaagtttggatcttttgttcatctattttttctttgagtttttttttctgtgttcatcctctgttctattttttttttcttctcattcttgggttgatttttgacttctgtttgggtcgatttagtctgcagggtttaagcagaggttggtttgtggattcttcgatttcttcttcagatttagtctacaatgaagtgagaatttctaaagataaacaaagaaaaacttgagactttagcaagatggagactgtgagaccaatggttgttgctcctaagggtaacaaactcagacgcaagtttgctaaagttcttaacattcataagctaacgggtgttgctccagaaggagaaatgaagaagataaagttcgattccaaaaccgctaagttgtctgagtcgttctacaagtttgaggaaaagaagcttccaattcaccacattcctggcccgga

SEQ ID NO: 88493 - DNA, 436 bp, Arabidopsis thaliana columbia
cggccgcgtgggcggacgcgtgggctgactcactactctcactctccggcgctttaaacttacgttctccgtcgtttactctgttgtaaaaatgagttctagggctggtccaatgtctaaggaaaagaacgttcagggtggttataggcctgaggttgaacagttggttcaaggtttggcagggacgagactggcttcttcacaagatgatggaggagagtgggaggtcatttccaagaagaacaagaacaaaccaggaaacacttctggaaaaacttgggtttctcagaattcgaatcctcctagagcttggggtggtcagcagcaagggagaggtagcaacgtatctgggagaggaaacaatgtatccgggagaggtaacggcaatggtcggggcattcaagctaacatatctggtcggggacgagcgttgagc

SEQ ID NO: 88494 - DNA, 844 bp, Arabidopsis thaliana columbia
  unsure (1)..(844): unsure at all n locations
aggtctctacgactcactattgggaaagctggtccgcctgcaggtaccggtccggaattcccgggtcgtcccacgcgtccgaaaaaaaaaagcaaatcttcaaagaaaaaaactccgtgtataaacttttctcgatcatttttgcagtctctctcccaaccaatcccattctgctcgactctcattgttgcagaggtttaggaagaaaggaatggttcgatcgtgactttgaattgggatattgtgtgtaaaatgtgggtgcctacattgagctcaagctcatgttcaagtgatgagagggatgagagcagtggagaagccgcgcttacgccggtttatctcaatgtctatgatctaacgcctgtcaacaattacctttattggtttgggattggcattttccattctggtattgaggctcataatttggaatattgctatggagctcacgagtatccaacaagtggggtatatgaggtggaacctaggaactgtccagggttcatctttagacggtcggttttactgggaactaccagcatgtcccgttcagatttccgctcatacatggagaagctttcaagaaagtacccttggtgacacttaccatctgattgccaagaactgtaaccatttcactgaagaaggatgcttgcagctaacaggaaagcctattccagggtggattaatcggctggcccgagttccttctgtaattggctttctgccagaaagnattcagntttacaagctgttagggntttttcccgganngctttgaatttttccngtgggggtngnttcaaacncangggggntnttttttnttcaaattaangnnggc

SEQ ID NO: 88495 - DNA, 331 bp, Arabidopsis thaliana columbia
cggccgcgtgggcggacacgtgggttgaaaactccatctacctttttctccctcctcttctctctcccattcccaaattcgaacgaacctgcaatccctaaacccccaatttagaccatctccaaattcgtcgtccttttctctgtgtagtcgaattatatattacaagtagatgaattggttacctgaagctgaagctgaggagcacttgaaaggtattctctctggtgatttctttgatggtctcaccaatcaccttgattgcccacttgaagacatcgattccaccaatggtgagggagattgggtcgccaggtttcaagaccttgag

SEQ ID NO: 88496 - DNA, 438 bp, Arabidopsis thaliana columbia
cttctccagaaaaaaacaaaacttttttctttgctctctcaacttgcagaagaagcgatttacacaaggttttgcgattcttctcacttatatataatcttctgtatgcttggaattggtatcaaaatcgattcttttaatctgtcattgaaggaactgggtttatacatttatctctcaagtcatagaatctgcatttgtcccaagttaagaagagaatcttgtactgctccttatctatgttttgctctctttaccaattgtttcaatgttatgaacaaaacccatatctctaaatagcaacaatagtgatttcatttaataatggattttgcctctgttccctatttatatagtaaccatggagcggctgatttctcatcctcctctcatgatcgtctcagaccttgatcacaccatggttgatcatcaagatca

SEQ ID NO: 88497 - DNA, 2186 bp, Arabidopsis thaliana columbia
cccacgcgtccgcggacgcgtgggaaaaaaaagagtcatggcattttcatcttcgtgttcgtccgtcaaagccgtcaactcacggtggacgtctccgtctccgtcaccgtcttctagattcgccgtcctccctgctttccttcaccgccgttacgcaacaagcgtcaaactaacggccataagcgccgccttaaaaaccgtcgagcaaacgacgttaacagaggataacagattctcaaccgtcggatctgactctgatgaatacaatccaactcttccaaagccgaggatcctcgtcaccgagaaactgggagaagccggcgtgaatctcctcagggaattcggcgacgttgactgctcttacgatctttcgccggaagatctgaagaagaaagtggcggagagtgacgctctgatcgtgagaagcggaactaaagtgacgagggaagtgtttgaggcggcgaaggggaggttgaaagtggtcggaagagccggagttgggattgacaatgttgatctgcaggcggcgacggagcacgggtgtttggtggttaatgctccaacggctaatacggtggctgctgccgaacatggaattgctttgcttgcttctatggcacgtaacgttgctcaggccgacgcttctattaaagccggaaaatgggagaggagcaagtacgtcggtgtatctctcgtcggaaaaaccttggccgtgatgggtttcgggaaagttgggacggaggtggcgagaagagccaaaggtctaggcatgaccgttatctcccacgacccttacgcgccagctgacagagccagagctctcggtgtcgatcttgtttcattcgatcaagctatctccaccgccgatttcgtctccctgcacatgcctttaactccggccaccaaaaaggtcttcaacgacgaaactttctctaagatgaagaaaggtgtgcgtctcattaatgtcgctagaggtggcgtcatcgacgaggatgcactcgttagagctctcgatgccggaatcgttgctcaggcagcattagatgtgttctgtgaggaaccaccatcgaaagatagcagactaattcagcatgaaaatgttactgtgacacctcatcttggagctagcacaaaagaagctcaggaaggtgtagccattgagatagcagaggctgtagcaggggcattgaaaggagagttatcagctactgccgtcaatgctccaatggtggctcctgaggtcttgtctgagttgactccttatattgtcttagctgagaagcttgggaggttagctgtgcagttagcatctggaggtaaaggagtacagtccattagggtggtctatcggtcagctcgtgaccgagatgatttggatactagactacttcgtgcaatgatcacaaagggaatcattgaaccgatctcagattcatatgtcaacttggtgaatgctgatttcatagctaaacaaaagggtcttcgtattagtgaggaacgaatggttgttgattcatcaccagagtaccctgttgattccatccaagttcagattttgaatgtggagtcaaatttcgctggtgctgtctctgatgctggtgatataagtattgaagggaaggtgaagtacggagttccgcatttaacttgtgtcggatcatttggtgtggatgtgagccttgaagggaatctgatactgtgcaggcaagtggatcaaccagggatgattggacaggttggtaacatacttggagaacaaaacgtgaatgtgaatttcatgagtgttggaagaacagtgttgaggaaacaagcgataatggcgattggagttgatgaagaaccagacaacaaaacacttgagaggattgggggtgtttctgcgattgaagagtttgtgtttcttaaactataaagtttgagatggagttgcattgtggtgtatggagaataaaactgtgacccggattaaggtgttttatccagtggttgttaagctgtagagaatctgtggtgttgcgagcgagtgtgtgtatcttggtattattacattgttcttgttttgctttcttatggtatgtaatgcctttggttaatgtcatgtttctcttgtaaaatgcttttgcttatattttacgatgaaccgttggactcaaaaaaaaaaaaaagggcgcgccgcgtctatagag

SEQ ID NO: 88498 - DNA, 543 bp, Arabidopsis thaliana columbia
  unsure (1)..(543): unsure at all n locations
agctgccacgcctgcaggtaccggnccggaattcccgggtcgacccacgcgtccgctttattgcagagcaggttacctggataaagccagagatatattccatacaataccttacgagccatcaagtgctatgtgtgctactctactgaaagcgtgcctcatccacgggaacacaaacattggggagtgggctgcagataagttactactagaaacaaagccagaacacttaggtcactatatgttgcttgcagatatgtatgcagtaactggttcttggagcaagcttgtaacggtgaagactttactgagtgacttgggcgtgcaaaaggctcatgagtttgctttgatggaaacagattcggagttagatggagagaataataagccgatgaacgatgattctgtcatcaatcaggagcaaagttcagatgaagaacgtcttgtagaagtaggataaagaatcaaattctgatagaaatattttatcaaactggagaatcaatttgtacataaatcttatatacaacaagttttaattgc

SEQ ID NO: 88499 - DNA, 596 bp, Arabidopsis thaliana columbia
gtcgacccaggcgtccgctgaaagaaaacaacagaagggggactttgatgcatccgtacgaaaatggagctctgcaccaggtctaccacagtcatcactcatctccctgcgagcttcaacggccatggatatctagcgggaaaatctgttgatagaatctcacttcctctccagcgaaacgttgcgtctctcgttcttcaatcccgcacgttgcgttgtagtagaaagtttccaggagaaacagttactgaagaaacatcaacaggagtcaatgagtttggtgtggaggatcgtgatggagtagttgttgcagccgaagagaaaaactcgaatagtgaagctcctcaagctgaagatgaggaaactcaagccctagagtttttgaacgataattaacctggactcagacaagacatattcaatcctgctctatgggagtggtgcgatagttgctctctacttaacgtctgcaatcgtcagttcactcgaagcaatccctctgtttcctaagctaatggaagtagttggtctcggatacacactctggttcactacccgttatctgctatttaagaggaacagagaagaactcaaga

SEQ ID NO: 88500 - DNA, 728 bp, Arabidopsis thaliana columbia
cagctccctacgactcactatagggaaagctggcacgcctgcaggtaccggtccggaattcccgggtcgacccacgcgtgcggactgaggcaaatgcattggttagaagtgttgaagaaaaatctcttgaagttgaggcaaagctgcgtgctgttgatgcaaaacttgctgaagttagtagaaagagttcagatgtggagaggaaggcaaaggaagtggaagctcgggaaagttctcttcaaagggagcggttttcctacattgctgaacgagaagcagacgaggcaactttgtcaaagcagagggaggacttgcgtgaatgggaaagaaagttgcaagaaggagaagaaagagttgctaaatctcaaatgattgtaaaacagagagaagatagggcaaatgaaagcgataagattatcaagcaaaagggaaaagaactggaagaggcacaaaagaagattgatgctgctaacctcgctgtgaagaaactagaagacgatgtcagttcgaggataaaagatcttgctttaagggaacaagaaactgatgtgttgaagaaatccatagagacaaaagcgcgtgagctacaagctctgcaagagaaactggaagccagagaaaagatggcagttcagcaactagttgatgaacaccaagctaaattggattcaacacagcgtgagtttgagttggaaatggagcagaaaagaaaatctattgatgacagc

SEQ ID NO: 88501 - DNA, 978 bp, Arabidopsis thaliana columbia
  unsure (1)..(978): unsure at all n locations
acccaaaaaacagaccaatctctttatttttcagaaacctcactaaaagggttgggtgttatatacacagggaacggcggtgcaagttaccaacgaccaaactgtcctcttcgacatgcaactagccagtgctttcgttcttacgatggctttaaaatccgtcttagagcttgaccttcttgagattatggccatgaatggttctcccatgtctcctaccgagatcgcttctaaactttccgaccaaaaatcctgaatgctccggtcatgctcgaccgtatcctccgtcttcttacgtcttactccgtcttaacctgctccaaccgtaaactttccggtgatggcgttgaacggatttacgggcttggtccggtttgcaagtatttgaccaagaacgaagatggtgtttccattgctgnncnttgtcttatgaaccaagacaaggttctcatggaaagctggtaaaggtgagagagaggcacaaagtgtcaaaggacaattcaggacaaattacaggacaatacgacacgtaaccatttgaaggatgcaattcttgatggtgggattccattcaacaaggcttatggaatgagcgcgtgcgagtaccacgggactgaccctagattcaacaaggtctttaacaatggaatgtctaaccattccacaatcaccatgaagaagattcttgagacctataagggttttgaaggattgacttctttggttgatgttggtggtggcattggtgctacactcaaaatgattgtctccaagtaccctaatcttaaaggcatcaactttgatctcccacatgtcatcgaagatgctccttctcatcctggtatattaacattttcctaacatttcgcaaaatgagattttcttggaagattatgtcatcttatgactaaattaatgtaggtattgagcatgttggaggagatatgttttgaagtgtcccttaaggtgatgccatat

SEQ ID NO: 88502 - DNA, 634 bp, Arabidopsis thaliana columbia
tctctacgactcactattgggaaagctggtccgcctgcaggtaccggtccggaattcccgggtcgacccacgcgtgcgatcgaagatgctccttctcatcctggtattgagcatgttggaggagatatgtttgtaagtgtccctaaaggtgatgccatattcatgaagtggatatgtcatgactggagtgacgaacattgcgtgaaattcttgaagaactgctacgagtcacttccagaggatggaaaagtgatattagcagagtgtatacttccagagacaccagactcaagcctctcaaccaaacaagtagtccatgtcgattgcattatgttggctcacaatcccggaggcaaagaacgaaccgagaaagagtttgaggcattagccaaagcatcaggcttcaagggcatcaaagttgtctgcgacgcttttggtgttaaccttattgagttactcaagaagctctaaaaacaaacaatgttcctatgaagatgatttatatgtaaacattatctcatatctccttccacggttccaaaactatgctgtttaataatggcttttacatgatgaagatcccatccgtttgccaagaacagcgattatagactttggtggggaaaggaaacaa

SEQ ID NO: 88503 - DNA, 495 bp, Arabidopsis thaliana columbia
  unsure (1)..(495): unsure at all n locations
caaaacagagtaacccaaaaaacagagcaatctctaaaaaatctcaagaaacctcactaaaatgggttcaacggcggagacacaattaactccggtgcaagtcaccgacgacgaagctgccctcttcgccatgcaactagccagtgcttccgttcttccgatggctttaaaatccgccttagagcttgaccttcttgagattatggccaagaatggttctcccatgtctcctaccgagatcgcttctaaacttccgaccaaaaacccctgaagctccggtcatgctcgacccgtatcctcccgtcttcttacgggtcttacttccggttttaaacctggttccaaccggtaaaacttttccgggtgaatgggggttgaaccgggggttttaggggggtttggtcccggttttcaaaggtttttnccccaaaggaccggaagattggggtttccaattggngggcntttggttttttnnacccaaggcaaagggtt

SEQ ID NO: 88504 - DNA, 1086 bp, Arabidopsis thaliana columbia
  unsure (1)..(1086): unsure at all n locations
nnnnnnnnnnnnnnnnnnnnnnnnnnnnnnnnnnnnnnnnnnnnnnnnnnnnnnnnnnnnnnnnnnnnnnnnnccacgcgtgcgcggcgcgtccgcggactcgtgggatgctggactacaaaatggaatggttttgatatttgacatgcgtcaaaccacgggacctttcgcatcgatgacaggcttaacaaccaatccagttcatactgtccatcatctctctggcaattccactccagctgcgtgatgtccgtaccctcttatctgcttcttccatcgggctgtgtcagtggaacattagtggtagcgagggaagcccatcattagtttcggaaacgggaaacccaggtgtatgcatatcctcctcgtactgtccccgcagcaatcatatagtagcttcttatagaccaagagttggatcatctgatgatacagtcccgactcagccctcattgactcaaacaggagtcagtaatagtaatagtaatggtgtagatggatttcatgtttgtcacaagagaagaggtgttgattcgtattaccagaaactatcctccacacaagctattgtagatcccatccgtttgccaagaacagcgattatagactttggtggggaaaggaaacaactttttgcatcttgtgacgagtccactcgggagctcatcttgcaagatccttcgacttttactatttctcaacggttgccattgtcaagtcatcttccgcttcaagatgtgaaatactgtcacgtcaatggttcggatctgctcggtctcttaacggatgatagattgcagattcttaggaacgaatctccatgaagattaaaaaagattgatagtcttgcaaggatggtgtttgttgaagagaaaacatgtatgtaaagcggctaactagtctatctatcttttgtaatctggagatgctatagagtagcgagccatcacttaaatattattatcttagttatgaacctattgctgcaatgcagcctgctcaaaaaaaaaaaaaaagnnnnnnnnnnnnnnnnnnnnnnnnnnnnnnnnnnnnnnnnnnnnnnnnnnnnnnnnnnnnnnnnnncac

SEQ ID NO: 88505 - DNA, 1368 bp, Arabidopsis thaliana columbia
ccgtggacccatcacacaatcctcaaaacagagtaacccaaaaaacagagcaatctctaaaaaatctcaagaaacctcactaaaatgggttcaacggcagagacacaattaactccggtgcaagtcaccgacgacgaagctgccctcttcgccatgcaactagccagtgcttccgttcttccgatggctttaaaatccgccttagagcttgaccttcttgagattatggccaagaatggttctcccatgtctcctaccgagatcgcttctaaacttccgaccaaaaatcctgaagctccggtcatgctcgaccgtatcctccgtcttcttacgtcttactccgtcttaacctgctccaaccgtaaactttccggtgatggcgttgaacggatttacgggcttggtccggtttgcaagtatttgaccaagaacgaagatggtgtttccattgctgctctttgtcttatgaaccaagacaaggttctcatggaaagctggtaccatttgaaggatgcaattcttgatggtgggattccattcaacaaggcttatggaatgagcgcgttcgagtaccacgggactgaccctagattcaacaaggtctttaacaatggaatgtctaaccattccacaatcaccatgaagaagattcttgagacctataagggttttgaaggattgacttctttggttgatgttggtggtggcattggtgctacactcaaaatgattgtctccaagtaccctaatcttaaaggcatcaactttgatctcccacatgtcatcgaagatgctccttctcatcctggtattgagcatgttggaggagatatgtttgtaagtgtccctaaaggtgatgccatattcatgaagtggatatgtcatgactggagtgacgaacattgcgtgaaattcttgaagaactgctacgagtcacttccagaggatggaaaagtgatattagcagagtgtatacttccagagacaccagactcaagcctctcaaccaaacaagtagtccatgtcgattgcattatgttggctcacaatcccggaggcaaagaacgaaccgagaaagagtttgaggcattagccaaagcatcaggcttcaagggcatcaaagttgtctgcgacgcttttggtgttaaccttattgagttactcaagaagctctaaaaacaaacaatgttcctatgaagatgatttatatgtaaacattatctcatatctccttccacggttccaaaactatgctgtttaataatggtttttacaagaatttgattatgagtttgtatttttgtttgtttggaacaaaattatgtgattatagggaaaaataaaatgagctattattgaagaaaaaaa

SEQ ID NO: 88506 - DNA, 639 bp, Arabidopsis thaliana columbia
  unsure (1)..(639): unsure at all n locations
ggaaantgggtcccngccactgcggccccttcccgganggttcccttgcgggacccggatctgagggtgngagggggttggggggaggagaaagtccccggacggnttattccgaggggaatttcaaggcacctgccaaaatgggtggccgtgaaatccacctaaatccggtactctccctgttctaaggggggaaccggctatcaccgactcgggaccgcattgaaggtacttgatgacttgatcccaaaacgagaacgagactgcgaataagaaactctacgaacttaaactggatttgctggaggaaataggttggagccatttggttacgtatgagaagcaatggatgcaggttcgtttccctaaaagcctacccctcttttagtagttgttgctaccttcttgttcaataaaagcttatccagaacatatagttgcaagttcttgttcaataaaagcttgtccagaacaaatagttcgttgtttttcgaaacccaaactactgtcttattttctgtccgtataaactgtatgttcttagtctctttgtattgacaatttnttcgcggccgcagaacttcngatatcaacnnttantcgataccagtngccatcngcggggggnncttgccaaaa

SEQ ID NO: 88507 - DNA, 1108 bp, Arabidopsis thaliana columbia
  unsure (1)..(1108): unsure at all n locations
ccctttgcggtaccggtccggaattcccgggtcgacccacgcgtccgatccaaaggataatccggtatcttatccgatatcatatgtggttccaccaaataagcctgaggaagataagaaggcagcttctgcccctacttgctctaaatcagtatcagaacgcttggaacaagaggttcgcgacacaaagatcaaatttcttgggaatctaaaacaagaaactgaggaagagcgttcagagtggagaaagttgtgtacctgtctcaagtctgaatacccagactatactccattactagctaagatcctggaaggtttactgtctcggtctgatgctggggacaaaatcagccatcacgaagagattatagaagctgcaaacgaagtagtacgcagtgttgacgtagatgagctagcaagattcttgctagacaaaactgaaccagaagatgatgaagcagagaaattgaagaaaaaaatggaggtgacacgtgatcaactggcggatgcactataccagaaagggttagccatggcgggaatcgagaatctgaagggtgagaaggaaggtgaaggagaagaagaaagtagccagaaggataaattcgaagagaatttcaaagaactgacaaaatgggtagacgtgaaatcatctaaatacggtactctcactgttctaagagagaaacggctatcacgactcgggaccgcattgaaggtacttgatgacttgatccaaaacgagaacgagactgcgaataagaaactctacgaacttaaactggatttgctggaggaaataggttggagccatttggttacgtatgagaagcaatggatgcaggttcgtttccctaaaagcctacccctcttttagtagttgttgctaccttcttgttcaataaaagcttatccagaacatatagttgcaagttcttgttcaataaaagcttgtccagaacaaatagttcgttgtttttcgaaacccaaactactgtcttattttctgtccgtataaactgtatggtcttagtctctttggattgaccagccgcaccgcgaattacgatgatccaagacttnatgcgatgaccgttcgtaccttcgt

SEQ ID NO: 88508 - DNA, 840 bp, Arabidopsis thaliana columbia
taagtatagaggcttaaagccaagaattttctgtgcttatagaccaaaaaagcgttgaaaccccagagaatgatttatttgaaacccaagaaagaaatacttggaaaagaaaaacaaatatgggagggggtcgaccacggttggattcaaacctggggggggggtggccccttatacccaagaaaaagggggttatgccatgggcgaaaattcggaaatttttgaaagggttaaaagcaaggttgaagtacaacaagaaagtagccagaaggataaattcgaagagattttcaaaaaactgccaaaatgggtagacgtcaaatcatctaaatacggtactctccctgttctaagaaagaaacggctatcacgactcgggcccgcattgaaggtacttgatgacttgatccaaaacgagaacgagactgcgaataagaaactctacgaacttaaactggatttgctggaggaaataggttggagccatttggttacgtatgagaagcaatggatgcaggttcgtttccctaaaagcctacccctcttttagtagttgttgctaccttcttgttcaataaaagcttatccagaacatatagttgcaagttcttgttcaataaaagcttgtccagaacaaatagttcgttgtttttcgaaacccaaactactgtcttattttctgtccgtataaactgtatgttcttagtctctttgtattgacatttttcagttgtggaatcaataaaattgtcgctcaaaaaagtaaaaaaaaaatacaaaaacgaagggcggccgctctagaggatccaagcttaggtacgcgtgcatcatacgtgatag

SEQ ID NO: 88509 - DNA, 525 bp, Arabidopsis thaliana columbia
acgactcactattgggaaagctggcacgcctgcaggtaccggtccggaattcccgggtcgacccacgcgggcgcggacgcgtgggttgatgtactgtggtcacaagaagaaccatcgaaggaacattttgggattcttagctcttgaagttattttggtggtggctatcattcttattacgctctttgcgcttaagggtgattttgttaagcaaacatttgttggtgtgatttgcgatgtcttcaacattgctatgtatggagctccttcattggccattattaaagtggtaaaaacaaagagtgttgaatacatgccattcttgttgtctttggtctgtttcgttaatgctggaatttggactacttactccctcatcttcaagatcgattactacgtcctcgcaaggaatggggattggacccttttgggcactttctcaggtgatagtgtacttcatggactataagccaaccccaaaggagaaagacggtgaagccctcagaaggtgagatttctcctacg

SEQ ID NO: 88510 - DNA, 273 bp, Arabidopsis thaliana columbia
gaagatttctgctacttcatctcattaacgccccaccaccgtcacatattcactgtttctcgttaagttcggttacagaagatgccagacgttcaatcaacggtggtggaatttgtgaacaagctcagaaagcgtcagattgagggctcacaggctacagccaactacaccgtagagctacttaagtcactactttcgcatcagcgggtgcctcacgctaaccaagctgccgctcttatcgatgctgtgaaagctgttggtgagcaattgatc

SEQ ID NO: 88511 - DNA, 459 bp, Arabidopsis thaliana columbia
agggaaacctggtacgcctgcaggtaccggtccggaattcccgggtcgacccacgcgtccgcggacgcgtgggcggacgcgtgggcggacgcgtgggttccgtttctctctcgccggaagatttttgctacttcatctccttatcgccccaccaccgtcacatattcactggtttcgcattttctcaagtttctcgttaatttcggttaaagaagatgccagacgttcaatcaacggtggtggaatttgttaacaagctcagaaagcgtaagattgagggctcacaggctacagccaaatacaccgtagagctacttaggtcagtaatttcgcatcagcggggtgcctcacgctaaccaagctgccgctcttatcgatgctgtgaaagctgttggtgagcaattgatcgctgctaattcctgtgagcttgcggtgggaaatgtagttagacgggttttg

SEQ ID NO: 88512 - DNA, 476 bp, Arabidopsis thaliana columbia
tgctcctttccctcttcttcaccttcatcacatacgtatggcattacggcagcagaaagaagtacctatgcgaccagcacaacaaggtccctatgaaatcaatactaagccttggcccgagcctcgggatcatcaaagtccccgggatgggtcttatctacacagagctcgccagcggtgttcctgccacatttaagcactttctaacaaacttaccggcgttctaccaagttgtcgtctttgtctgctgcaaaactgtccctatcccgtatgtgccgcagaaagaacggtaccttatcggccggattggaccaaaaacatacaggatgtaccgatgcattatccgagctggctacaaagacgtgaacaaagacggagacgactttgaagacgagctggtgatgagcatcgccgagtttatccagctagaatccgaaggctatggtggctcagacactgaccgttcgattgacggt

SEQ ID NO: 88513 - DNA, 409 bp, Arabidopsis thaliana columbia
cggaaaaagagaaaatctttggtccaaaccaaaagaaacgttccctttttttaatttgtctctttgctttaataatttccttctcaccgaaacacacaccacaaccaattctcttctccttcttcctctttcacaaattcgtcatctgggtattcttaaatttctcacaaattcatttacttttttgttctgttccgagatttcaaggttcactatcgattctgaaactcttggaacaatccagattcttggttagcaggtggggaagcattaatcatgtatttatgatacactgctccattattattacgagagagttgaaagtttcctttttgactcgtttttaaaggcaaggaagaagaaaggactttgttttccattattattacgagagagttgaaagtttcct

SEQ ID NO: 88514 - DNA, 793 bp, Arabidopsis thaliana columbia
ctctcgcgtccggacgaaaatggctccgagatcagattcacaaaccctagccaccggctccgacgaaaatgaatcctcaatcgatccgatcttccacattctccgtatcatccctttctccttcctccgaccaccacgtcttcgtctcaagctcccttccttcactctcccatctccaatgactgtcttctcactgattctcctcacttacttcctcgtcgtctccggtttcgtctacgacgtgattgtcgagcctccaggtatcggatcgacacaggatccaatcaccgggtcagtaagacccgtcgtgtttatgtcgggtcgggtcaatggtcaatacatcattgaaggtctttcttccgggattcaatgttcgtactcggtgggattggaatcataatgttggatctggcattggataagaatcgagctaagagtgttaaagcatcttatgcaacagctggagtctcccccattgtagattgcttaatggtaatgaggatgctcttcattcgcattaagggcccctgggtatccccgttaggggggtagaccacttttggcttcaattctgtaattggatctttagtataagatcgatcattagaaaaaatgtgactttttgttttgtttgtttgctaaagcttatgtgtttcttgtttgataatgagaatttagctttgaatgttagtatctgcacttgcattattgttgaattttgcgttgaagaagataatgggaaattttctgtaacagttatatgacaacacaaacaataaagtagagatttttg

SEQ ID NO: 88515 - DNA, 408 bp, Arabidopsis thaliana columbia
ggggaagattttgggagattgaaatgtgagaatggtagattggtgaaggagaggaagaagagagaggaggtgattgagaggggtaatagggagaggagtgaattggtggagagccttgaggagaaggttagggagattgatgttttgaagagagaaattgaaggagttgtgaaagagaagatggaggttgagatggtgagacgtgatcagagggagatgattgtggagttggagaaaaagctgggagatatgaatgagattgtggagagtttgactaaggaaagggaggggttacgtggtcaggttgttgggttggagaagagtcttgatgaggttacggaggaagcgaaagcgagagctgagcagatcaatgaacttgtgaaagagaaaactgttaaggaatctgag

SEQ ID NO: 88516 - DNA, 1313 bp, Arabidopsis thaliana columbia
  unsure (1)..(1313): unsure at all n locations
acttaacgtctctctctattcctctgcttctctctttctccctgtgaaaaaatggactcggtggctctctactgcaccgctggtctcattgccggcgccgtctactggttcatatgcgtcctaggtccagcagaacgaaaaggcaaacgagcctctgatctctccggcggctcaatctccgcagaaaaagtcaaagacaactataaccaatactggtctttcttccgcaaaccaaaagagatcgaatcagccgagaaagtacctgacttcgtcgacacgttctacaatcttgtcactgatatctacgagtggggatggggacaatctttccatttctctcctcatgtccctggaaaatccgacaaagacgccacaagaatccacgaagaaatggccgtcgatctcatcaaagtgaaaccgggacaaaagattcttgacgctggttgcggcgtgggtgggccgatgagagccatcgcggcccattccaaggcccaagtcactggaatcactatcaacgagtaccaagtgcaacgagccaagcttcacaacaagaaagctggacttgattctctctgcaacgtcgtttgtggtaactttttaaagatgccgttcgatgaaaacacgtttgacggagcttactcgatcgaagctacgtgtcacgctcctaagctcgaagaagtatactcggagatcttcagagtgatgaaaccaggatctttgttcgtgtcctacgaatgggtcaccactgaaaaatacagagacgatgacgaagaacacaaggacgtgattcaagggatcgagagaggagacgcacttcctggactaagaagctacgctgatatagccgtgacggcgaagaaagttgggtttgaggtagtgaaggagaaagatttggctaaaccaccgtctaaaccgtggtggaaccggttaaagatgggaaggattgcttattggagaaaccatgttgtggttgtgattctttctgctattggggttgctcctaaaggaactgttgatgttcataagatgttgtttaagactgctgattatttgaccagaggtggtgagactggaatcttctctccgatgcatatgattctctgtagaaaaccagagaaagcttctgaatgaatgattgagaatacttcttccttgttctcgttttcttcttctttctttctaagttcatgtttttccccttaagaatctctttgtccgtcgtattaatgttatcactttgttgtttattgtatttttttttttcaatttgctaaattactcctgatgatggggcncctggnaaaaaaaaaaaa

SEQ ID NO: 88517 - DNA, 704 bp, Arabidopsis thaliana columbia
  unsure (1)..(704): unsure at all n locations
gaannttaaaaaaaaaggnacctttgacccccnnaaagaanggcntccnaagngcccgccccccctttcccncccaatttgggcccaaagctccccaaccaaaaccaaccccaacttccacatggcgggtcatgtccccaacttgcgggacccggcccaccctcccttctggtcccccctcttgccatttaaggtgagtatgccccgtagaggaggaaacagagcagcatcagtttccataagaagtgagcaaagtacagaaggaagcagtggtttggatatatggcttggtcgtggcgccatggttggttttgcagttgccattactgttgagatttccactggaaaaggacttcttgagaattttggagtagcaagtccattgcctacggttgctttagctgttacagcattggttggtgttctagctgcggttttcatcttccaatcttcttctaaaaactgatcaacaagaatcttgtttgtgatgctgccgaggatcattttcttgtattaagaatcttgtattatatatcactgtaacttctacatccatcagtggaaaatcttacattcttagttttttttggcaacatacatgatctatacatgtcttttggccaaatcttatttttacctttttaatacatgatctataacatgtattaagtttgaaaacnnnnnnnnnnnnnnnagagtatcat

SEQ ID NO: 88518 - DNA, 657 bp, Arabidopsis thaliana columbia
  unsure (1)..(657): unsure at all n locations
taggtgacactatagaagagtctatgacgtcgcatgcacgcgtacgtaagctcggaattcggctttctgcgactcttgagaaaggaagacgaaggaaggagaatagtagaagaagaagaaagggagagtcttgtgatatctacgtagaaggaagatggccttatctcaagtgtctgcgtctctcgccttttctcttcccaattctggtgccctaaagctagccacaatcacaaacccaacttctacatgtcgggttcatgttccgcaacttgctggaatccgatccaccttcgcttctggttctcctctcttgccattgaagttgagtatgacccgtagaggaggaaacagagcagcatcagtttccataagaagtgagcaaagtacagaaggaagcagtggtttggatatatggcttggtcgtggcgccatgggttggtttttgcagttgccattactgttgagatttcccctgggaaaaggacttcttgagaatttttggagtagcaaagtccattgcctaagggttgctttaactggtaanaccattnggtgggggtncaactngggtttaaacctnccaatctnctncaaaaatggtcaaaaanatcctggttgganncnncggggaaattctganaannccttganaaaacc

SEQ ID NO: 88519 - DNA, 529 bp, Arabidopsis thaliana columbia
  unsure (1)..(529): unsure at all n locations
cggggggacccacgcgttcgatagaaccccctcccgtgtttaaaccctccggcgacaaagctcagatagagaaccgctccacccttgtcgttcgctgcagccatgtacggcggagatgaagtgtcagctattgtggttgacttgggttcgcacacttgcaaggctggttacgccggtgaagatgctcccaaggccgttttcccttccgttattggggcagtagatggtgtagaggcaatggatgtggatgttgattctacaaagactaattcgaactctgaggattcgaagaccgagtctgaaaaggaaaagagcaaacgcaagctctatgtaggatctcaagccatgagctaccgcagagatcatatggaggttttgtcacctataaaagatggcatcgtttctgactgggatttggtggacaatatatgggaacatgctttcaagagttgtctgatgattcgatcctacggggcatcccaatggctncttagctggagcccnccttttaancncttcaaccagcnag

SEQ ID NO: 88520 - DNA, 386 bp, Arabidopsis thaliana columbia
gcgtccgcacacacgtccgcccacgcgtccgctctcgctttctctctcacacacaaaattgcagaagaggaagagtcatgaatggtgaggaaagctttgtacaagattgctctgtttttgttgagattgatccttctggaagatatggaagatacgatgaaatacttggcaaaggagcttcaaagacagtatacagagcatttgatgagtatgaaggtatagaagtagcatggaaccaagtaaagcttcgaaatttcacaaggaatcctgaggaattagagaagtttttcagagagattcatcttctcaagactttgaatcatcaaaacattatgaaattctacacttcttgggttgataccaacaatttatcaatcaattttgtc

SEQ ID NO: 88521 - DNA, 392 bp, Arabidopsis thaliana columbia
accacgcgtccgcccacgcgtccgcgaattctaaatcggagactaaacctgactccgatgagcctaaaggatctggtttcgatcctgagtcattggaaagaggtgctaaagctcttcgtgaaatcaatagctctcctcattccaaacaggtgtttgatctaatgcgaaagcaggagaagactcgattagctgaattagcggctgagaaagaacataatgaagctattcaagctagcaaggacattgaaagacagcggaaattggcagaggatcagagaaatttagtgcagcaacaggcccaagcgaaagcgcaaaatcttagatatgaggatgagttggccaggaagagaatgcagacagataatgaagctcagagacggcataatgctgaa

SEQ ID NO: 88522 - DNA, 457 bp, Arabidopsis thaliana columbia
  unsure (1)..(457): unsure at all n locations
tgatactgccnnnnnnnnnnnnnnnnnnnnnnnnnnnnnnnnnnnnnnnnnnnnnnnnnnnnnnnnnnnnnnnnnnnnnnnccacgcgtccgcggacgcgtgggatcaaatctgatctaatctccgtaaattaatggcgagtagttgcgagctttgctgcgagatcttcatcgcaattcttcttcctcctgtcggagtttgtctcaggcatggctgttgcactgttgagttcttcatttgtttgatactgacttgcttaggctacttaccaggaataatatacgcaatttacgcaatttgtttcttgcaccgcgatgagtattttgatgaatacagacgcccaatctactatgttgcttgacctcttgattgattcttgctcttgagcacacatattgtactttaaagtgtaatttacttgtatcctggagataataataccatttttttttaagaa

SEQ ID NO: 88523 - DNA, 431 bp, Arabidopsis thaliana columbia
cgaaggaggattctgctgaatcaagctggcgatgtgtggagcaatcagggagcttgattttgggtctgtgattcgattttgtttctccagtcatgtttgattgggaagaagaagagcttactaatatgatatggggtgatgatgctgagacaggcgaccatattgtgccttttaaagtcagaagtgaacaacttaacaaaaaggaacagattgaggaatctaagacagctgagcaaaagataactgggactaaaattgacctccatgataaaaatttggggagcagttcgagccataatgttgatgaggggcttcctcagccagatttctgtatgagctcatggcctgacacgtcgctaactaatgctacaaaggttgatcaagatttgagtgcgactgaactttcaaaatgcttagctgagccagtcaga

SEQ ID NO: 88524 - DNA, 528 bp, Arabidopsis thaliana columbia
  unsure (1)..(528): unsure at all n locations
nnnnnnnnnnnnnnnnnnnnnnnnnnnnnnnnnnnnnnnnnnnnnnnnnnnnnnnnnnnnnnnnnnnnnnnnnnnnnnnnnnnccaccccgccgtctctttgtcccaccattttcaccgcttctcctccaatcactcagatctacagattcctttaaaacaacaatggttggatctttggaatctgatcaaactctttcaatggccaccttaatcgaaaaactcgacatcttatctgacgacttcgatccaaccgccgtagtcaccgaaccgttacctcctccggtaactaatggaatcggagctgataaaggaggaggaggaggagaaagagagatggttctcggtaggaatatacacacaacgtcactcgctgtaacggaaccggaggttaacgatgaattcaccggagataaagaagcttatatggctagtgttcttgctcgttaccggaaaactttggttgaacgaaccaaaaaccatttaggttatccttataacttggatttcgactatggtgcgcttggta

SEQ ID NO: 88525 - DNA, 651 bp, Arabidopsis thaliana columbia
cgattgtatccgataagctcgatatcgaattcgcggccgcgagctacagatgctttaaaacaacaatggttggatctttggaatctgatcaaactctttcaatggccaccttaatcgaaaaactcgacatcttatctgacgacttcgatccaaccgccgtagtcaccgaaccgttacctcctccggtaactaatggaatcggagctgataaaggaggaggaggaggagaaagagagatggttctcggtaggaatatacacacaacgtcactcgctgtaacggaaccggaggttaacgatgaattcaccggagataaagaagcttatatggctagtgttcttgctcgttaccggaaaactttggttgaacgaaccaaaaaccatttaggttatccttataacttggatttcgactatggtgcgcttggtcagttacaacatttttcgattaaaattcttggagacccgcctattgaaggtacctttggagcacaccccagaccttttgaaggtgggggggtggattgagaagctcggctctgggagaaagagagagatgattatttgtggcttccattaccccaattggtggtaacctgaaagggctaaaccttgcaaggggccacttgtcaaacttcgagggagcgggaat

SEQ ID NO: 88526 - DNA, 407 bp, Arabidopsis thaliana columbia
agaaattatccatatacctgaaaagccttcattgtcacctgaccatcagcccactgtgaaggtatatgctagcctaatcaaacccagatttgccaatacgatagtgaggcatttatgtaagattgctcctctagaagatcttcgtcatgttaaaagggtgaagaagaagattctgccagattgcggtatcccattgtgaaactcagttgactgtcatcttatgtctagcacctgagcacaacgatcagttgagtgacatgccacctgatgtgcagagactcgttgatccctatgagttgagtccttttattacacaaagtatgcaaatatgctgcggtatccaaagaagagtgggaagaacaaagtaagatatggcctacttcatttcatccaccaacctacaatat

SEQ ID NO: 88527 - DNA, 494 bp, Arabidopsis thaliana columbia
  unsure (1)..(494): unsure at all n locations
cggaattttngtacgncgaatnaaaatccaccgaacaaaccggaaggctaggatgctcaagctttacggattganttagagagagatcgatttgaactgtgtnattttaagcatggtttctagaagaggctccgagacaaaagcgattgtctgtgtcctcacggatagaattaggatctctaatcaatgggtttcgcatttgtctttcgctggtctacttggtgttgctggtttcgtatttgcccaacagcacggtctattccgcaacttaaacaacttaaaactcttctccggtagagaaaaagactccggagacgattcttttctcgtacctggccttcaaaatctcggaaataactgcttcctcaacgtcatcctccaggctctagcgagctgcaaagattttaggagttttcttcaatgggttctagaggatgcgagaggttcgttagcaggagaacaagaggaacagcttcctcttacttttgctttgt

SEQ ID NO: 88528 - DNA, 455 bp, Arabidopsis thaliana columbia
aatccgaccacgcgtccgcgcatcggaagtacgaagaaggatctttgttttcttcctcttctccttcttctactttcgaacactcgtgaatctgattctactctagtctaattgggtgctttcgatttctgaataaaaattcgattttggtctgacgattaagaaagcgaaagtgatggccgccgtaaatggatatcagggaaatactccggcagatcctccggcgtctaatggatcaaaacaacctgcggctccgaccaagactgttgacagccaatctgttctcaaaagactgcaatctgaattgatgggcttgatgatgggcggtggtccaggaatatcggctttccctgaggaagacaacatattctgctggaaagggacaataacaggaagcaaagatactgtgtttgaaggaactgagtacagactctcactctctttctccaatgact

SEQ ID NO: 88529 - DNA, 190 bp, Arabidopsis thaliana columbia
caacggaccggcggagttcaagttctgtgatttgctagcctgttgtgaaatcgccggtgagattagcgagacgaaacaagcaacggctaggattagaagagaaggagaagaagaagccatggctgagttctgttctggtgtggtttggtgtttgataagaggtccgttcgatagttgcgaagaccttccg

SEQ ID NO: 88530 - DNA, 759 bp, Arabidopsis thaliana columbia
  unsure (1)..(759): unsure at all n locations
gttnnnnnnnnnnnnnnnnnnnnnnnnnnnnnnnnnnnnnnnnnnnnnnnnnnnnnnnnnnnnnnnnnnncttttttttttttttttaagaagataagatgatctcaatctcatgatagtaatggtccatacaatccaataactctaagtaatgtggtgaaacaaagtaaatggccctaagactaaaacagtacaaaagtatggggctccattattgttcgaacaaaccaaaaaaaaaaaaaaaatagagagagcctcaagaagagaagagagactagagagagatccccattcagaaaataaaaatagaacccaacaaaaccaaaattcccaaattgaccccaaaatttacgttcctcgtcaatgaccccgcgttccctggacctcccgccgctgttcctggggtagtcgagccactggtgcccggcgccggagcagatcccggcgaaggagcagatcccggcgaaggagcagagcccggtgctgcatcttctgtgaaactcaacacacggtgggagcccaaattatcaggaccgaaaggatgtacaccgggacgaccgttggtaacattgccgccgatctgccatacctgattcacactatcagctcccgccggaaccttaaccgtcgtgaaaatggcgatcctaccgccgcttaacgactcggcgcgtcggacgcgtggnnnnnnnnnnnnnnnnnnnnnnnnnnnnnnnnnnnnnnnnnnnnnnnnnnnnnnnnnnnnnnnnnnnnnnnnnnnnn

SEQ ID NO: 88531 - DNA, 1918 bp, Arabidopsis thaliana columbia
  unsure (1)..(1918): unsure at all n locations
gttgttcgaacaaacaaaaaaagaaatagagagagactcaagaagagaagagagactagagagagatccccattcagaaaataaaaatagaacccaacaaaaccaaaattcccaaattgaccccaaaatttacgttcctcgtcaatgaccccgcgttccctggacctcccgccgctgttcctggggtagtcgagccactggtgcccggcgccggagcagatcccggcgaaggagcagagcccggtgctgcatcttctgtgaaactcaacacacggtgggagcccaaattatcaggaccgaaaggatgtacaccgggacgaccgttggtaacattgccgccgatctgccatacctgattcacactatcagctcccgccggaaccttaaccgtcgtgaaaatggcgatcctaccgccgcttaacgactcggcgcgtagattccaaaaatcaaaagcaagtttaccttcgacgagactgctgtagctgctaatgttgtacgtcttcacgaccggagccgcaccaccgccggatctgtaagcgaggaaggcttgagaaccagccatcttagtccccgtagggttaatagcccaagcgacccagccaccgttggcttgagatggagtggcgacgaaagcgacggagagagatgaatttgaggaattgtaggtgtaatggaggtaggaattgagtaccggaaggtcttcgcaactatcgaacggaccggcggagttcaagttctgtgatttgcaagcctgttgtgaaatcgccggtgagattagcgagacgaaacaagcaacggctaggattagaagagaagaagaagaagaagccatggctgagttctgttctgaaaaaacgacggtggatccacttctgagagatttggatgagaagaaagagagtttccggcgaaacgtggtgtctctggctacggagctgaagcaagtgaggggccgtttggtttctcaagaacaatcttttcttaaagagaccattactagaaaagaagcagagaaaaggggaaagaatatggaaatggagatttgtaaattgcagaagagattggaagaaaggaattgtcagcttgaagcttctgcatctgctgctgataagtttatcaaagagttggaggaatttagattaaagcttgatacaaccaagcaaaccgcagaggcaagtgctgattctgctcaatctacaaagatccaatgctcaatgctaaagcaacaacttgacgacaaaacacgttctctcagagaacaagaagaccgtatgactcagcttggtcatcagcttgatgatctacagagaggtctgagcttgagagagtgctcagaaaagcagcttagagaagaagttaggagaatcgagcgtgaggttactgaggccattgcaaaagcgggaataggtggcatggacagcgagctccagaaacttctagaagatgtgtctccaatgaaatttgagaggatgaataggctagttgaagtaaaagacgaagagattacaaaactgaaagatgagataaggttaatgtcaggtcaatggaaacataagactaaggaactcgaatctcagctggagaaacagagaagaactgatcaagatttgaagaagaaggtattgaagctagagttctgtttacaagaagctcgaagccagacaagaaagctgcagaggaaaggggaaagaagggacatggagatcaaagagataagagatcttatatcggagaagcaaaaccttaacaatgagtcttgggataaacagaagttctgggacaattcagggttcaagattgttgtatcaatgtctatgttgatgttagtggtagtctccaagagatgatgaattttgtaatgtataaatttagttgcagatagttgatgaggatnnnnnnnnnnnnnnnnnnnnnnnnn

SEQ ID NO: 88532 - DNA, 353 bp, Arabidopsis thaliana columbia
gatgggaaagaatacgttgctggcaacagatgatgagagaggaatgtttccgggaagtagctccggcaacaaaataccggagactctcccgctgctcaattagccaccatcatcaacggctgagttttcaccttaaactcaaagcctgattcataattaagagaataaatttgtatattataaaaagctgtgtaatctcaaaccttttatcttcctctagtgtggaatttaaggtcaaaaagaaaacgagaaagtatggatcagtgttgtacctccttcggagacaagatcagagtttgtgtgtttgtgtctgaatgtacggattggatttttaaagttgtgctttctttctt

SEQ ID NO: 88533 - DNA, 1427 bp, Arabidopsis thaliana columbia
  unsure (1)..(1427): unsure at all n locations
ccccttttcgggttgacccacgcgtccgcgtttctttccttcaaaccataacaatctcaatcccttattcccagggcaacgaaagattcaagtaagttgcggtggtaagagtgaggtgttgaagagtgatacaatggaacctcatgaagcagaaacgtttgtgaacaagagaaccctttatgctcccattgagccatatagcagtggaaatttaaaggtttcagatgttcacactctctactgggagcaatcaggcaaacccgatggacacccggttgtttttcttcacggcgggccgggaggagggacggctcctagtaataggagattcttcgatccggagttttatcggattgttctgtttgatcagagaggtgcggggaagagtacaccgcatgcttgtttggaggaaaacaccacatgggaccttgtgaatgatattgaaaaactaagagaacatttgaaaatacctgaatggctggtttttggaggatcatggggaagcactctagctcttgcatacagtcagtctcaccctgacaaggttactggtttggtccttagagggatctttttgttgcgtaaaaaggagattgattggttttacgagggcggtgctgctgctatttaccctgatgcttgggaggagttcagagatcttattccagaaaacgagagaggtagtagccttgtggacgcgtatcacaaaagattgaattctgatgatctggaaattcaatacgcagctgcaagagcttggactaaatgggaaatgatgactgcttatcttcgtccaaatcttgaaaacgttcaaaaggcagaggatgataaattttcattggcgtttgcaaggattgaaaatcactactttgttaacaaaggtttcttcccgtcggactcacacttgctagacaatgttgataaaatacgacatatcaagaccaccattgttcagggaaggtatgacgtatgctgtcctatgatgtctgcttgggatctgcacaaagcatgcccagaggcagaactcaagattgtttatgatgctgggcactcggcaaatgagccaggaatatcagcggaactcgtggttgccaatgaaaagatgaaagcacttatgggatgaagtatttgatggaatgaaagctgctcattttgttcatttctttgggacctttgttcatattttcaagtttgttgctgcaaagtaaacatcacattcagagtttgttgttaacgcgaaaccgaatgttatttccatggacgtttatacccaaatgaaaaagacaatgacataggtgcagtgttttaaacccggactataagcaccaatgtaaccaatgaaaaaaaaaaaaaaaggannnnnnnnnnnnnnnnnnnnnnnnnnnnnnnnnnnnnnnnnnnnnnnnnnnnnnnnnnnnnnnnnnnnn

SEQ ID NO: 88534 - DNA, 380 bp, Arabidopsis thaliana columbia
caacgagtccgcggacgcgtgggcggacgcgtgggctggaactaaaggatatatatggctggtcttatgaagttaggatgcttggtctttgtcttcgtgattgcggccggtccaatcacagcaaaggcggctctgagctgtggcgaagttaacagcaatttgaaaccgtgcactggctacttgaccaatggtggtatcactagcccaggcccacagtgctgcaatggtgttagaaagcttaacggcatggtccttacaaccctagaccgtcggcaagcatgtcgttgcattaaaaatgccgctagaaacgtcggccctggtctcaacgctgaccgtgctgctgggattcctaggagatgcggaatcaaaataccttacag

SEQ ID NO: 88535 - DNA, 512 bp, Arabidopsis thaliana columbia
agtcgaggcctgcgcgactgcgtttgccacgtctccgccgcctcctccgattcttttaccctaactaaatttgccgatgttgtcactcatcaccgaagaatggccgccgaaactagcatcaggaagctcccatctctctccggcctccgtcaccgacgtaatccactggaagataatccctacttccacccctccaatggcttctacatcactccttctgacgtcatcctcgcccaggtcgcctacgacctctccgcccaatcccaatcacgcgtggcctaccacagggctgggcctcgccgtgagatcatgtacgagccatcggctgtgaaggcggcgatcgtaacgtgcggtgggctgtgccctggcatgaacacagtcataagagaactcgtggtgggtctttgggagctgtacggtgtgagagagatatatgggataccagctggttacagaggcttttattccatggaagccgtcaagttagatcccaaggcggttcatgattggca

SEQ ID NO: 88536 - DNA, 486 bp, Arabidopsis thaliana columbia
gagtcttattgtgggccccatgggaagagtcctttatgtcatctgttaaagacttgcccatccccaagtttcccctaccgccaatagacccagaggctgtgaaaagggtgcagaaagggctgagccaagtggaaatgaacaacaacgaggcggcgtatcaggcgtggttgggttccgaccaatctcagcagaggattgcaacagaccccccccgactggtggacctggccaatgagtttagccccagcatgggacttgacagccccccagctctccccccccatgttcttggcaagttgggtctcaaaaacgttcctggtcttagaaccaagtagattttcttttttcctagtgatctgctttggttttaaaactttaatgttttgtaagtgtagacgtgtagtctcttgtccttaaaaaaaaaaaaaaaaaaacaaacccaaagggcggccgctctagaggatccaagcttacgtacgcgtgcag

SEQ ID NO: 88537 - DNA, 557 bp, Arabidopsis thaliana columbia
cccacgcgtccgaaacataaaaaatattaaacaaaaagaacaaaaaaaatggcaaaactttcattagcattaggtctattgctactattagcattaagtgaggtctacgaagtgcaagggtcgttcttattgaggcattacatgaggaaatttcccagaaggtccagagactttcggccattcgcttgcagaggtatgttgaagttcgtggacgttttggagcttaagtgtccattaaagccacaatacaagagcttcttcggaaacctaaggtcttacatgaacttcataaactcggcatccgggtcgaaaaactttgatgccgagctaaaagggaaagcccagggcctcttctcagctatgtctgcaatgagtggcaaaggcgccgcatcggctgattctagcaaggttatggatacattgctgtcaatgggaaagacattgggcacccaacagcagatcggttcatcggtaatgtcgcttggacaaaggaaagatatgatcatgtctatggcgaattgggcacaaacgattggtcaacttgttgtgagtgctgc

SEQ ID NO: 88538 - DNA, 1633 bp, Arabidopsis thaliana columbia
  unsure (1)..(1633): unsure at all n locations
aaaaaacctttgacgccgttttcttcttcgatcttcttcttcctccagagaaaacaacatggccatggcaacaaggactctaggctttgttttgcctacgagcttatcttcccagccttccttcgaccgtcgcggcggtggatttagggtttctgtcatccgttgctccacttctccactcacttttcccacttctggtgttgtggagaaaccttggacttcgtacaatgctaggcttgtgttagaagatggttctatctggcctgctaagtcttttggtgctcctggaacccgtattgctgaattggtgtttaacacttccttgacagggtatcaagaaattttaactgatcctagttatgctgggcagtttgtgctaatgacaaacccacaaattggtaatactggtgtcaatcctgatgatgaagaatctgggcaatgctttcttactggtttggtgataagaaacctaagcattagtacctcaaactggagatgcacgaagacacttgctgattatctaaccgaaagggacatcatgggagtttatgatcttgacactcgagcaataacccgtcggttaagagaagatggtagtcttatcggggtgttgagcacagaacagtccaaaacagatgatgaacttctgcaaatgtctcgttcatgggatatcgtaggtattgatctaataagtgatgtttcatgtaaatctccctatgaatgggttgacaaaacaaacgctgaatgggatttcaacacgaattcacgagatgggaaatcctacaaagttattgcttacgattttggaatcaagcaaaacatcctaagacgcctttcatcttacggatgtcaaatcactgttgttccgtccacatttccagctgccgaggcgctgaaaatgaatccagatgggattttgttcagcaacggtcctggagacccttctgctgtgccatatgctgttgagacagttaaagagcttctcggtaaagtccctgtttacggaatctgtatgggccatcagttgcttggtcaagctttggggggtaaaaccttcaagatgaagtttggtcatcatggaggaaaccacccagttcgtaacaacagaactggtcaggtggagatcagtgctcagaatcacaactatgcggttgatccagcttcacttcccggaggcgtagaagtaacacatgtcaatctcaatgatggaagctgtgcgggtctatctttcccggaaatgaatgttatgtcactccagtaccaccctgaagcctcccctggacctcacgactctgataacgcatttagagagttcatagagcttatgaagagatcgaaacaaagctcctgatcaatgagaagtactctttgtttttgtacgttgctgtttttaatcatggcacttaaattaaaaccaactgttttgttagtgataatggattggcattattgtttctttgctttgactgtattgagcaaccatccaacctataaaataagtaagattttgtaaaagtaataaagagataaagagatgtgagagtttgtgtcttttgatataaaaaaaaaaaaaaaagggcggccgctnnnnnnnnnnnnnnnnnnnnnnnnnnnnnnnnnnnnnnnnnnctat

SEQ ID NO: 88539 - DNA, 549 bp, Arabidopsis thaliana columbia
ttaggtgcactatagaagagctatgacgtcgcatgcacgcgtacgtaagctcggaattcggctcgagaaaaactccaaaacctctctctctttcttcctcacacgcttttttcatttctcaactgtaaaaaatctgatccaatggagaaagacgatgcaacggcgtcgttttcacctagcttcagtacttattccggcgatagactcgtcgaaatcgccgaacgagtctgttacaaagagaaatcagacgccgaattcgagttttcgacggcggcgacttcttcttccggtgacggtggactagttttccctgtatttaacaagaatctaatctccggagatgtttctccggagaaagtaattccgttgaaggatctattcctccgtgaacgtaacgatcaacaaccaccgcaacaaacatactcatcgtcttccgacgaagaagaagaagacgacgagtttgattcgatcccgagcgagatctattgtcccatgacaccagcgagatctacggcggatatgtcacccagtggaggatgtagaaaaaga

SEQ ID NO: 88540 - DNA, 532 bp, Arabidopsis thaliana columbia
  unsure (1)..(532): unsure at all n locations
cnnnnnnnnnnnnnnnnnnnnnnnnnnnnnnnnnnnnnnnnnnnnnnnnnnnnnnnnnnnnnatcaaagatgccacgcgtcagaatctttagtgtttttgtagtaacgttatggatcataagggttgatgctagggttttcggaggacgaggaatcgaaaaatttgtaactttcggtcagaattatattgttacgtggggacaaagtcatgtttctacactccattctggcgaagaagttgatctttacatggatcaatcttcaggtggtgggttcgaatccaaggacgcctacggatcaggtctctttgaaatgagaatcaaagtgccttcaggaaatactggcggcatcgtcaccgctttttacttgacgtcgaaaggaggtggtcacgacgagattgacttcgagtttctagggaacaacaacggaaaaccggtaacgttacagacaaatctgtttctaaatggagaaggaaacagagaagagaggtttttgctttggttcaatccaaccaaacactaccacacttatg

SEQ ID NO: 88541 - DNA, 661 bp, Arabidopsis thaliana columbia
  unsure (1)..(661): unsure at all n locations
aacgacccactatggggttagctggtacgcctgcaggtaccggtccggaattcccgggtcgacccacgcgtccggaagaatattaagaaggatcagcaagtgcaattacaggttcgagaagtttcgatcttcccgatgaacttcttcaagttctaccgtccgatccattcgagcagctagatgtagctcgcaaaatcacatccattgctctctcgacacgtgtctcagctctcgaatcagagtcgtcggatctccgggaacttctcgccgagaaagaaaaagaatttgaagaactccagtctcacgttgagtctctcgaggcttctctttccgatgcgtttcataagctttctctcgctgatggtgaaaaggagaatctgataagagaaaatgcttctttgtctaatactgtcaagagacttcagagagatgtctccaagcttgagggttttaggaagacgcttattgatgtctcttccaagatgatggcccaatattgcaggaaccaaccgcaaattcaatcgcctgagccccgacaccccaaacggttgattaattactccnatttttaaaccttcaaaggcaatttnattcaattccaatcttaaacaaaggtttttnangncatttnacccannnttnnaacttncaaccggaaccc

SEQ ID NO: 88542 - DNA, 1385 bp, Arabidopsis thaliana columbia
atgactcgccggcactaatacgactcatatagggaaagccggtacgcctgcaggtaccggtccggaattcccgtgtcgacccacgcgtccgcgcacgcgtgggcagagatagaagaagaagaagaagaaggatcagcaagtgcaattacaggttcgagaagtttcgatcttcccgatgaacttcttcaagttctaccgtccgatccattcgagcagctagatgtagctcgcaaaatcacatccattgctctctcgacacgtgtctcagctctcgaatcagagtcgtcggatctccgggaacttctcgccgagaaagaaaaagaatttgaagaactccagtctcacgttgagtctctcgaggcttctctttccgatgcgtttcataagctttctctcgctgatggtgaaaaggagaatctgataagagaaaatgcttctttgtctaatactgtcaagagacttcagagagatgtctcaaagcttgagggttttaggaagacgcttatgatgtctcttcaaagatgatgaccaaaatgcaggaacaacggaaatcatcgctaagccggcaccaaacgatgatgatactccatttcaaccttcaagacattcatcaatccaatctcaacaagcttctgaagccattgaaccaagctgcaacttgacaacggtaaacggatcgctcctaaaccaagtttatcagctagtcttccgttagtatcacaaactactacgccgcggcttactcctgctggttctcccaccaatcttatctgcttctggtccaccgaaaacaacttcgagacctatctctcctcgacgccattctgtatcgttcgctaccactagaggcatgtttgatgatactagatcttctatttcaatctcagagcctggttcacaaactgcgagaactcgggttgatggaaaaagagttctttcgacaagtcaggagccgattatcttacgagcaatttggtgcatttcttggaaatgtgaaggatcttaacgcccacaagcaaacaagagaagaaacacttaggaaagctgaagagatatttggaggcgataacagagatctctacgtcatattcgagggcttgatcacacgcaacgctcactaagagtttggcttcttcagttacacaaagaacttatatactcggaaactcaggattcatcagtctgcaacattcaatttcttttgtttccttggctgtcaagtaagaccaagtaaaactgacaatttgattgtatcatttgtgctctctcgtgtatctatcgatctctctcttcgtgaataaattacatttcatcatcaaaaaaaaaaaaaaagggcggccgctctagaggatccaagcttacgtacgcgtgcatgcgacgtcatg

SEQ ID NO: 88543 - DNA, 513 bp, Arabidopsis thaliana columbia
  unsure (1)..(513): unsure at all n locations
gaagcaagacagcagtgaatcacaatcagctctaataaaccagtcttggtctcctgatggtttatacatcacctctggctcagttgatccggtgatccatgtttttgacatcaggtacaatgctcgtaagccgacacaatcaataaaagcgcatcagaaacgagtgtttaaagcggaatggcattactctcaaccacttctcatctccatatcttctgatctcaacattggtctgcacaagatctcatgaaacttttgaagctctcacatgtctttgttcctcatttcttattatctgaggatacaggttcaggtggcgaatatttatcagccatcataccaattcttagttttaggtataaacatcattcccatgtattaaactctcaatttttataaaggattcgttaattaaaaaaaaaaaaaaaaaagggcggccgctctnnnnnnnnnnnnnnnnnnnnnnnnnnnnnnnnnnnnnnnnnnnnnnnnnnnnnnnnnnnnnnnnnnncg

SEQ ID NO: 88544 - DNA, 2163 bp, Arabidopsis thaliana columbia
  unsure (1)..(2163): unsure at all n locations
gccacgcgtccgcccacgcgtccgcgcaagcgtccggagattttggataacagaagaaatttaatatcgttaccttgtaattttatattttctgtttccattttaatttgaagatccttccctttctttctttctctctctctctcgctcgccgggaaaaaatcgctgtccaaatctccggtcatttctccgaggatctcttctatcaatccaacggttttgttttcatcttctcagatctcacagaacaatagtcaaagactgatgcagaagaagcgttagtacaaggtttttgttggaaagcaattgaatctgaattcatctttcattttcacgctttgatccaatttgagttctctcttccactgaatccctcatacgtaaaacctagggtttctaaattagggttctcctgaggtctgtttatagtgcgtaaagccatgtttaagaagatcatgaaaggggcaaatcgaaaagcctctaaagctgaggcgaatgattcgtctatgtatgggtttgatccaccaggtaggtcaggtcctggatccaatatgattgtaaatcacgcatctcgtggttcgcttgttccttcttctccaaattcaatggcggcggccaccacacaaccgcctcctatgtattcagtcgagcctcttcccttgttcagagacgtctctgtctccgagcgtcaatccttgttcttgaggaaactccagatttgttgttttcaatttgattttacggatacgttgaagaatgcgagagagaaggagattaagaggcaaacgttattggagctagttgattttatacagtctggagcagggaagctcactgaagtttgtcaagaagaaatggtaaagatgatttcggttaatatattccggtgtcttcctccggcttcacacgagaatacaggtcaagagcctgctgatcttgaggaagaggagccttatttggaaccatcttggcctcatttacagctaatttatgagttgctgctgagatacattgttccttctgacacagatacaaaagttgcaaaacggtatattgatcattcttttgtgttgaggttgcttgaattgtttgaaactgaagatcctagagaaagggagtacttgaaaacgattcttcataggatttatggcaagtttatggttcacaggccctttattaggaaagcaatgaaccatattttctataggtttatttatgagacagagagacatagtgggattggggagcttttggagattctcggtagtattattaatgggtttgccttgccaatgaaggaggagcacaagctctttttgattagggcgttgataccgctgcataagccaaaaccaatcgctatgtatcaccaacaattgtcttactgcatcgttcagtttgtggagaaagattataagcttgcggatacggtgatcaggggcttgttaaagttttggcctgtgacaaattgtacaaaagaggttctctttcttggtgaacttgaagaggttcttgaggcaacacaaactgttgagttccaacgctgtatggtccctctgttccaacagattgctcgatgcctcagtagctctaattttcaggttgcagaacgagctctgttcttgtggaacaacgagcatgtggtgggtctaatagctcagaaccgaggagtgatccttcccatcatatttgcatccctggagaaaaacatagagtctcattggaaccaagcggtacacggtctaagtgcgaatataaagagaatgttcatggagatggaccctgagctctttgaagaatgtcagcaacagtacgaagaaaaacaagccaaatctaaacaagtggaagagcaacgccaaaataggtggaggagattagatgaagcagtggaggaacgagaaagagaagatcctatgatcacttcttagaaaaaaatatatcaaatcatcaaagtaataatattctctctcacttcttctcattttctctaatcgttgcaaattattatattttatttatttattttgaggtctggaaaaaaaaaagtcgcggccgcgaattcnnnnnnnnnnnnnnnnnnnnnnnnnnnnnnnnnnnnnnnnnnnnnnnnnnnnnnnnnnnnnnnnnnnnnnnnnnnnnnnnnnnnnnnnnnnnnnnnnnnnn

SEQ ID NO: 88545 - DNA, 2295 bp, Arabidopsis thaliana columbia
  unsure (1)..(2295): unsure at all n locations
nnnnnnnnnnnnnnnnnnnnnnnnnnnnnnnnnnnnnnnnnnnnnnnnnnnnnnnnnnnnnnnnnnnnccacgcgtccgcccacgcgtgaattcgcggcggaaaatcttagccgtccgatcaaccaccgtgtactccgagaagatctcttcgattacttcaacgttcttctgattttcaccagctcagatctccgacaacattccggtatcatttctcgcttttttttcctccaaatccttatccgccagattacgaaaatgaggagcttgatccgagagaggcatagtgaaagcttatctgtgaattcttaggatttgaatctgaatactcaggctttttgattccttctccgttacatgctgattcaattttgagctcccctgctagtgtaaatctcctcagctcggaaacttagggtttagtttggggtcctttgctcttcgttgcgtaagccatgtttaagaaaatcatgaaaggtgggcatcgaaagccctctaaatccgaagctaatgaaccgtctagttatgggattggtctacctgataataggtcaggtcctggctccaatgtggtcgttagtcacgcttctcgtggtgcattggttaattcttctccgtcgccagtgactgcaactccacctcctccgcctttgggctcggtggagccactcccgttgtttagagatgtgccggtttcagagaggcaaactttgttcttgaggaaacttcagaattgctgtttccttttcgatttcactgacacgattaagaatgctagagacaaggagattaagaggcaaacgttgttggagctggtggattttatacagtctggatctagtaagatctcagagtcgtgtcaggaagaaatgattaagatgatttctgttaatattttccggtctctcccaccagcatcacacgagaatacgggtcaagagcctgcagatcctgaggaagaagaaccttatttggaaccttcttggcctcacttacagctagtttacgagttgctcctgagatatgttgtttcgactgacactgatacaaaggtggccaaacggtatatcgaccattcttttgtgttaaagttgctcgatttgtttgattctgaggacccaagagagagggagtatttgaaaacgattcttcataggatatatgggaagtttatggtccacagaccctttattaggaaagcaatcaacaacatattctataggtttatttatgagacagagagacacagtgggattggggaactcttggagattctaggcagtatcataaacgggtttgcattgcctatgaaggaggaacacaagctattcttaatcagggtgttgataccattgcataagccaaaaccaatcgttgtatatcatcagcagttatcttattgcatcgttcagtttgtggaaaaagattataagcttgcggatacagtaatcaggggattgttaaagtattggcccgtgacaaactgctcaaaggagaatctcttccttggagaacttgaagaagttcttgaggcaacacagcctgtcgagttccagcgttgcatggttccattattccaacaaattggtcgctgtctcactagctcccactttcaggttgcagaacgagcactgttcttgtggaacaacgagcacattgtgggtctaatcgcgcaaaaccgaagcgtgatccttccaatcatatatcccacactggagaagaacatccagtctcactggaaccaagcagttcatggtctaaccacaaatatcaagaaaatgttcatggaaatggatcctgaactgtttgaagaatgtcagagacagtatgaagagaaacaagcgaaatccaaagaagtagaagaacaacggcaatatacatggaagagattagcagaagcagcggcggagcgagatggaggaggaggagaagaagatcatatgatcacttcctagatcgatcaaaaagggtataattctttcacttttttttttgtttgttctcattttatcaaatgagttactatattaattttcttatcaaacttggatttgtttgttgttttgagaatcatgggttcaaaatctgattgctcagagaagtagagagagagaagtgagccattactatcagagaatatgtctttagtactaagaaatgtgtttgtgatcttctgtctaattttgttcgtggaaaggcactttaaaattttgtaaaattttaattatatatactgtggatggatgtttgtagcttgtgttattagccatctcaaaatccgcggccgcgaattc

SEQ ID NO: 88546 - DNA, 569 bp, Arabidopsis thaliana columbia
  unsure (1)..(569): unsure at all n locations
aatgtcccctttggacatgctgcgatcgagctagttgcaggcaaagaaagtgccattgcccaagtcattagaccctctcctggtcaaacttacaccctctccttcgtcgttggagatgctaagaatgactgccatggttccatgatggttgaagcttttgcagccagagatacactcaaagtaccacacacttccgttggtggaggtcatgtcaagaccgcgagtttcaagttcaaggcggttgaggcaagaactagaattactttcttcagtggtttttaccataccaagaagactgatactgtatctttatgtggtcctgtcattgacgagattgtggtttctcatgtcgcttagattaagtttactctttatgacaactgcacttgtgttcttagactggtcatggacttggtgccttgctttgtatgtcttggctccttttggaattgagttattgtcatcaagttaaaatgaatgatataaaaacccaaagtnaaaaaannnnnnnnnnnnnnnnnnnnnnnnnnnnnnnnnnnnnnnnnnnnnnnnnnnnnnnnnnnnnnnnn

SEQ ID NO: 88547 - DNA, 511 bp, Arabidopsis thaliana columbia
tgccttagagacttgcgtgctgccgcgtcgtagctggaattcggttggggttttgggttagatttgggaactcgtgcgcggctgtggcagaggccaaacccacccgtgtactccatccgtcggatccaccaaaccaatattctttcatctctctctctctctctctctctcttcttcttcgtcttcttctctttttattctttcttcaggaacaaattcctctgctttgggcattttagggtttctcaaatttttgacgctttctcttaaaagggttgacgaaataaccctttaagggaaaaaacaaaggttgaggaagaccaccaaggtgaaaaaagaaagaagaattcgaacaacagcagcaacaagataaagttacgaatttttcctcttttgtaacctttgtttctcttcttcctcttcctccatttttttccattaaagattctgcctttgggttccaatttcgtctttcctttttcgattttgccgcgtttaacatgacattcgc

SEQ ID NO: 88548 - DNA, 607 bp, Arabidopsis thaliana columbia
cggtcgcgtgggtccaaatcagggttttatcactcaactttcagaccaaatatcaacactgaacgagaggatggatgaattcacatcccgcattgaagagttgaattccaagatcccgaacaggatagctccttcaggtagtcaacataacttggctttaccaatcgaaaacggcaatgggtctgtcttatcattctccgcatccgcatctcagctcgtaagggaatctcctctgatggaagacgtcgtactggttgctcgtggacagcgtcagataatgcatcaaatggacaccctgagtaatcttcttcgggagtatgttggagaaaagactcgcatagagagactcgccagcagcagaacaaacagtgcaacccaaaacctcgaatcctctactgtaccgattcttcttggtttggccattggctgtgtgggcatctttgcctacagtcgtctgaaatagttgctctaactgtggaaacccaggcttcgtgaaatagtggcaatgatgtaaataacatggtttgggatacaccctggacaaattcagtcttgacaatgtaacatgtgccaagaataaaagactgattcgtttcttaccccttcc

SEQ ID NO: 88549 - DNA, 2274 bp, Arabidopsis thaliana columbia
  unsure (1)..(2274): unsure at all n locations
ggagaaaaagtagctgtttttacagggtttatcacaaagatccttccttttttacttgaagctcgccattttcttagggtttctcttgatttcattcatctccagtgcccagatctctctctctactcatctgccatttgtaagctcctcttcttcctcctctctccaaagtttacattttgttgttttctctggatcttcttaagctaatctttgattctgtttatgagattgtgtttccgattatgaatttaggctttgtctacatgcagggctgtgttcaatgattagggttttgatttagaaccaaagcttttgggttttactggtttagtttaggcttgttgcgaagtagagaaaaaaagggaagggttttggcccttttgtggggagataatttagggtttctgtaattatgatcaaacagatatttgggaaattgcccagaaaaccttcaaaatcttcgcataatgactcgaatccaaacggagaaggtggggttaattcatattacattcccaattcgggtattagtagtatctcgaagccttcttcgaaatcatccgcatcgaattcgaatggagcaaatggaactgttattgctccttcttcaacgagctctaacagaaccaatcaagtcaatggagtttatgaagcattgccaagctttagagatgttcctacctcggagaaacctaatctgtttatcaagaagttgagtatgtgttgcgttgtgttcgacttcaatgatccgtcgaagaatctgagagagaaagagataaagagacagactttgcttgagcttgttgattatattgcaacggtttctacaaagttgagtgatgctgcaatgcaagagattgcgaaagtggctgttgttaatcttttcaggacgtttccttctgcgaatcacgagagtaagattctcgaaacgcttgatgtggatgatgaggaacctgctttagagccggcttggcctcatcttcaagttgtctatgagcttcttcttagatttgtggcctcgcctatgactgatgcaaagcttgcaaagagatatattgaccattcatttgtcttgaagctcttggatttgtttgactctgaagaccagagagagagggaatatctaaagaccattcttcatcggatatacgggaaattcatggtgcaccgaccctttatcagaaaggcgatcaacaatatcttctacagattcatttttgaaaccgaaaagcataacggtattgcagagttgcttgagatactaggaagtataatcaacggtttcgctttaccgttaaaagaagagcataagctcttcctaatccgggcattgattccactccacagacctaaatgtgcatctgcttatcatcaacagctttcttattgcattgttcagtttgtagagaaagacttcaagcttgctgatacggtcattagaggacttctaaagtattggcctgtgactaatagttcaaaggaagttatgtttcttggagagttggaagaagttttggaagcaactcaagcagctgagtttcagcgatgtatggttcctttatttcgtcaaatcgctagatgcctcaacagttcacattttcaggtggctgaaagggctctatttctatggaacaacgatcacataagaaacctgattactcaaaaccataaagtgataatgcccattgtgttcccggctatggagagaaacacacgggggcattggaaccaagcagttcagagtctgactttgaatgtgagaaaggtaatggcagagacagaccaaattctgtttgatgaatgcttagccaagttccaagaagatgaagcgaatgaaaccgaggttgtagccaaacgagaagcaacatggaagcttttggaagagttagcagcttcgaaatccgtaagcaacgaggcagtgctcgtcccccgattttcatcttcagttactcttgcaaccggtaaaacttcgggtagttgaacactttctgctctctatcaccgagacatactttcaaacaatccagcagaattgtatcgatccgttcgagcatcaggatcagtccttgaagaagattaagcacgatgattaagaagggcaatatcatcagtgaatacttaattataacatttttttcaggtttatggaatcatgggttcaattgtttgttgcttctgatcctttttttttcgcttactcagctcttagttgaataacaatctgaggtgtaagaaatatggcttatagatatagtncttgagaggacgact

SEQ ID NO: 88550 - DNA, 649 bp, Arabidopsis thaliana columbia
atgattccccgagacctaatacgactctcttagggaaagctggtacgcctgcaggtaccggtccggaattctcgggtcgacccacgcgtccgcaattttcttcacgcttctcccataccctcttacctatcttcttattcttcttagatttctccatcgatctcgaacaaaggattcacctttgcattcatattctttatcttgacttcaaagtcaaacctccgattcgataaacaaattggggaatggatgcttgctttcgtctttctcaccagatctgaagcacccaagttccaaattcatattcgattcaccggcggctaggtatttctcaaatcggtcagatttctgagatttatttatgagaacaatggtgacgaccaaattgggaatgctccattatgtaattgaccatatatatggagcgtttatgcaccgcaccaagatgaccccacccttcttctctcgaggttggggtggtcccaatctcgaattgctcgagcgtatggttcaacgcctcttccctcttgaggttcaaggtcagaattggccaccgcctctggttcgtccagtctggagaactgtttgggagacaaagaccgctactttgagagaaggtgttttccagactccttgtgccgatgagctt

SEQ ID NO: 88551 - DNA, 522 bp, Arabidopsis thaliana columbia
  unsure (1)..(522): unsure at all n locations
ctctcatacgactcactttagggaaagctcggacgcctgcaggtaccggtccggaattcccgggtcgacccacggcgtncgggcaaaagaagaaagattttacaacaaatgaaaagtgatgcagctttgcttaacctggaataggagaactgccttcttccaggttaagactcaagattagcatctctcatttctctggatggcattttgaagcaagtcaaggaaatcacaagacaagcctctgtccatgttttgagtaaaagcaagaagaaagcattacttgagtcccttgatgaactcactgagcggatgccttctcttcttgatatcgaccatccatgcgcacaaagagaaattgctacagcacaccagttggtcgagacgattcctgaacaagaggacactaatattctggaacaatcacacgaccggagaccctcattagaatcaatatcctcaggtgaaactgatgtatctcagtggaacgttctgcaattcaacacaggctcttcagccccattc

SEQ ID NO: 88552 - DNA, 405 bp, Arabidopsis thaliana columbia
tatgctttcgcagagagtcacaggacactgggatgggtgtgtgactctagagggtgttcctcttttgttggagcaacacattaacaaaggcgaaattgtagaccggctttggaggggtgaaatgggtctgccagaagaagatcagaagaaaactcaagaacaaaggttacaattaaacagcgaaaagatcagcaacagagaggtgactcaagaatcagttaataatagtatctgttgccagtctcgagctgtcccagagctgaacggtagtggttgccaacaaaatgggaactcctcttactgtctggaggagattcacacagagaaaaatacctcggagagagtaacctctgtaaaaaatgcatctcttcggataggaagcagcgagaatggatcttctggtgg

SEQ ID NO: 88553 - DNA, 466 bp, Arabidopsis thaliana columbia
ccgagagaggaatggcgccagttcttcagagctcacagccatgggttgagaaataccggccgaagcaggttaaggacgtggctcaccaggaagaggtggttcgtgtcctcaccaacactctccagactgctgactgcccgcacatgctcttctatggaccaccaggcactggaaaaaccactactgctcttgccatcgctcaccagctctttggacctgaactatacaagtctagggtgttggagcttaatgcaagtgatgacagaggtattaatgttgttcggactaagatcaaggattttgctgctgttgctgttgggtctaatcatcgtcaaagtggttatccttgcccatcgtttaagatcatcatcctagatgaggctgattcgatgacagaagatgctcagaatgccttgaggcgcacaatggaaacttactccaaagtcaccagattctttttcatatg

SEQ ID NO: 88554 - DNA, 666 bp, Arabidopsis thaliana columbia
  unsure (1)..(666): unsure at all n locations
cnnnnnnnnnnnnnnnnnnnnnnnnnnnnnnnnnnnnnnnnnnnnnnnnnnnnnnnnnnnnnnnnnnnnnnnnccacgcgtccgcaaatatttctttaactccaacacagaagtgcacatagcattaggttattcctaagatttctgggcttctggtcctaaaatcccattcactactgacgtagcgacaagaactccgacgtcctcaccaaatcttcccccaaacctctaagatctccctccgctgctcccaccaccactacgaccgcacctcctatctctacagctccgaggattccttcaaatcaagccatctctgatccagatccgagtcagatctctcttcgtcccttaggtcatacaggatctagttcctcgctttcttttccaattcggactcctgaaatcaacaaggctccggaggtaaatgctccaactccggtttcattgtccccgaaacctgatcggttcgtgccgccgcatcttaggccaggttttgttcggaaagacgagaaacctggactcaantcttctcgagttagagatccgaatccgaatctgaatcagagattgcctaaccaggggcagacacggcaggaatatttcggttatggacagaccggacgggccaaatngggcgggtatgngagngatcccctacgggtc

SEQ ID NO: 88555 - DNA, 625 bp, Arabidopsis thaliana columbia
tgcggtaccggtccggaattcccgggtcgacccacgcgtccgccgacggctttgctggcgtttttcctgagcataaatatgagatagttaagcgactacaagcgaggaagcatatctgtggaatgacaggtgatggagtaaatgatgcgcctgctcttaaaaaggctgatattggcattgcagttgctgatgcaactgatgcagcacgtagtgcttcagatatcgttcttactgaacctggtcttagtgttatcatcagcgctgtcttaaccagccgtgctatcttccagagaatgaaaaattatacaatctatgcggtttccatcactatccgtattgttcttggcttcatgctgctagctcttatatggaagtttgactttccacccttcatggttcttatcattgccattctgaatgatggcacaattatgacaatatcaaaagacagagtgaaaccttcccctcttccaggtagctgggaactctcaggggtttttgcaactggcggttgtgtttgggagctacatggcgatgatgacagttatatttttctgggctgcatataaaaccgacttcttcccgcgaacatttggagtttcaaccctggagaaaacagcacatg

SEQ ID NO: 88556 - DNA, 448 bp, Arabidopsis thaliana columbia
cggtggtaggttctttaaaagggaacccttttcaccactagttcttgaatccacatacaagccgaggcgtttcaatattaaatgtaaattttacccttaaaaccatttgatttctccttcaaaattcctgcaacgacattaatttgaaaaaaaaaaaacagagacgtaagatcaaagatgaggagcaagagcggttttagtttcttctctaaaatgacttcttcaaggaagaggccttctctctcactacctagcaagagtcacgagtccacggatgttaacaagaccatcgacaatgcagccgagattatcgagaaatggaacacagagtatgtttccgataagaaattttattctctgttttgcgagagcaagcgagacgcgaagaaatttgttaaacgcgtaaaggaacctgcaaaacccccttggattttgttaatttaaaaaa

SEQ ID NO: 88557 - DNA, 938 bp, Arabidopsis thaliana columbia
gcaataacaagccgagaaggttgaatagagaagatccaaggggaaagagaaattaaattatttatttatttctgtcatcttctccttttctatttcaaaatcccaaatctaaagcactcctcgagaaaagtgtaacaatggcgagaagaccggacgaagaatacgactacttgtttaaagtggttttgatcggagactccggtgtcggcaagtctaatctcctctctagattcactcgcaacgagttctgcttagaatccaaatccaccattggtgtcgaattcgctactcgtactctccaagtggaaggaaggactgtgaaagctcagatatgggacacggctgggcaagaacgatacagagccataactagcgcctattacagaggtgcacttggagctcttttggtctatgatgtcaccaagccaacaacgtttgagaatgtaagcaggtggttaaaagaactaagagaccatgcagattccaatatagtgatcatgttgattgggaacaagacagatctgaagcatctcagagcagttgccacagaggatgctcagagctatgcagagaaagaaggcttatctttcatcgagacatcggctctcgaggcattaaacgtagaaaaggcttttcagacgattctctcggaggtttataggatcatcagcaagaagtcgatatcttcagaccagacaactgcaaatgccaacatcaaggaaggccaaacaattgatgtggctgctacttctgaatcaaacgctaagaagccttgttgctcatcgtcttgaaaggctttgtttgtgttgcacttaaaaaaagccaaatatctatgagactttatttcaaggcttgcgttgtatttgttttctttcttttttctgttgttgataatataactcaaagataattttttatatcaattgtggagttcggaa

SEQ ID NO: 88558 - DNA, 906 bp, Arabidopsis thaliana columbia
aaaactttgaagatagcgaagagcaaaaagataatctctggctcgatttttgttggagtccttgattcgagcaagtttaaagactcgagggttttcttctggataacgtaattagatactcgtgttttctgaaagggtcatcactgctattgtcatagcttgagaaaggatctatttttaatatcagtgatattggtatctatgagatttggagtagttgtttggaggaacgtgtcctcttgcttgatgtgaagattgcttcttgttgtttgctgtttcttaatggagtggaggggaatcctctgctcgttgctttttattgtttccgtgggagagtcgtcaagtagatttgggataatgtggcatcctaatcttggtgttgattctggacaatacttgacttgggcaatcttaagtgctagtgtattcgtggttattgccatcctcctccccatgtatcttatctttgagcacttagcttcttataatctaccagaggaacagaagtttcttattggacttatgctgatggttcctgtggaggccgtggaatcgtttttgtctttggtgaattcagaagcagctttcaactgcgaggtgattagagattgttatgaagcttttgcactctattgtttcgagagatatttgatagcttgcctagatggagaagaacgtacaattgaattcatggaacaacagacagttatcacccagagtactcctcttctagaaagcacatgttcttatggggttgtggagcgtggctgtccaatgaactgtttcttaaaagattgcagtctttgtcctcagttttattatgcttgtgtaaaatggcatcgttcaatatatgatactgaaaattatttgtgctctgtttgcatttatcctctaaatctttttttt

SEQ ID NO: 88559 - DNA, 791 bp, Arabidopsis thaliana columbia
gctcttttaagatctttccttcttatgttttgtctctttgtaatcccatctctctcatctgattctgatcctttacaagacttctgcgttggcgatctcaaagcttctgcttccatcaatggctttccatgcaaatcagccgtttctgcttctgacttcttctactcccggtttaggtggccccttaggccacgtcaaaccctaacgggagtaaccgttgctcccgccaacgtcttaaccttcccgggtctaaacactttaggaatctcgatgaataacgttgagctagctccaggaggtgtaaatccgcctcacttgcacccgcgtgcaaccgaagtaggaactgtgatcgaaggctcggtgtttgtcggattcttgagtaccaacaacactttgttctcaaaagttttgaatgcaggagaggcgtttgttatccctagaggattggttcatttccaatggaacgttggccaagtgaaagcgcgaatgataaccgcttttaacagccagctcccaggagcagttgttttgcctagtactctgttcggctcgaaacctgagattccaaacgcagtcctgaccagagcgtttaggactgatgatacaactgtgcagaatctcaagtccaagtttgctgtttgaatctttttatttatgttttctaaaataatctttcacaataagctttatagcaatattggtatacacttgtctctgtaataatcggtatgaatattcgaaacaaaacaataataagattgatctctttctctctcaaaaaaaaaaaaaaa

SEQ ID NO: 88560 - DNA, 423 bp, Arabidopsis thaliana columbia
tccttttcgtccgctttcacgccaaatgaaaggtggcaacctttgaattgtttattgaaagtttacatttttctgttgaatccaactatgtttagattgagaagtctcttgtcgctgaagagttcttcgattgtagaattgtcatcacataacgtcacagaagcaattcgtttcgctccatttcattcgacaagtgttctgtctgaaaaatcgaggagtagatttggttctgctagagattccgaacgcgaacgatcttcaaagaactcctccataagatttacatgtaccgtaaaggagaagggtcgtaccagtgctaagaagactgtggataaactccttttccacaggggaattaatgatccgcttcagaatgagtggcatttcgggccaagtccgcttatccgggataggcatatgaag

SEQ ID NO: 88561 - DNA, 416 bp, Arabidopsis thaliana columbia
gcgttcattacgtgcttcctcaatggcggcacgatccctatggagaacccgtacgaagctcctcgttgttggtaccgccttatgcggtggttccggcgccgccttcattgcttcctccgatgacccatcaacaaccctcaagctttgcacctccatccccgttcgtctctaccgcaataccgttaccgccgcctctattgctttcgattatgagtactcgttgttgggtttggctgagggaagcagtgagagagctaaggtcaaacatgaagtccacctaaggtcagctcaaaagcttcaagagctctgttttaaaaatggaggaatctatatcaaactcggccaacatataggacaactagaatatcttgtgcctgaagagtatgttcgtactatgagggagtccatgttgaaca

SEQ ID NO: 88562 - DNA, 513 bp, Arabidopsis thaliana columbia
  unsure (1)..(513): unsure at all n locations
cagctcctcatnnnnnnnnnnnnnnnnnnnnnnnnnnnnnnnnnnnnnnnnnnnnnnnnnnnnnnnnnnnnnccacgcgtccgactgaatcaaatataattattggatcacatctgatttaattggttcaaacactgcgagggatttgctaggcgctctcgcagttccctcgccatgtaagcagcattttgattgttttaaaagaccggtcctcgcaatttcctagtttggtttgcgagtgatttgcgaggaaatatattcttatatatacccgataacctagtttgagcggagctcaaacctgccgcatcaaaccctatacctaatttttttcttcgattctcttcttctccgatctattttcctcgtcgccggcttctcttcttctccgatctattttctttcgccgccgcctctcttcttcttcgatctgattacgtcgccgcctctcttcttcttctccgccgcgtctcttattctccagcagccgccgcaactcttcttctccagctt

SEQ ID NO: 88563 - DNA, 495 bp, Arabidopsis thaliana columbia
ccatgagattcttagaaggttggcggagagacgacggagaaaacgacttaacgatcgtctttgtatgctccgatccatcggcccaaaaatcagtaagatggacaggacatcgatattaggagatgccatagattacatgaaagagcttttagacaaaatcaacaaattacaagatgaggaacaagaacttggaaatagcaacaattcacatcactctaagctcttcggtgatctcaaggatcttaatgcgaacgaacctctggtcagaaactcaccaaagtttgaaatagatcgtagagacgaggatactcgagttgatatatgctgctcgccaaaaccgggattgctactatctactgtgaatacattagagactctaggcttggagattgaacaatgtgttataagctgctttagtgatttctctttgcaggcttcttgttctgagggagctgagcagagagatttcataacatcagaagatataaaacaagc

SEQ ID NO: 88564 - DNA, 830 bp, Arabidopsis thaliana columbia
  unsure (1)..(830): unsure at all n locations
cctctccaccgttctttctcttccttctctctctggacttcaacttttggagaagtacaagacatttataaagtgctgctcatcacccaacactaaacacaattgtcaaaagggtgtggtggaaggagaatctacttctatctgaacatcgatcagtcatatcttttcaatcaaatcaaagccctcctctctctcttactccttttttgttttaaatcaagaaaaagactccatgtcgagcatgtccatgtcgtcctcctcatctccagcttttccaccggaccacttctcatctacggaccagctctgttacgtccattgcagcttctgcgacactgtccttgctgtgagtgttcctccgagtagtttgttcaagacggtgacggtcagatgcggccactgttcgaaccttttgtcggtgaccgtgagcatgagagctcttctttcttccatccgtttccaaccttggccattcctttttacctccccctcctcctcctcctcctccaaatcttttggagggaatgcgaagcggagggcagggggtaaacatgaacatgatgatgagccatcacgcttcagctcaccacccgaacgagcatttggttatggcgactcgcaacggaagatcagtggatcatctacaagagatgcctcggccaccaccagccaatagacccccagagaagcgacaaagagtaccatctgcatacaaccgattcatcaaaaaagagatccaacgtataaaagcaggcaaccctgatatcaggcacagagaagccttcantgctgctgccaaaaactgggctcatttccctcacatacacttt

SEQ ID NO: 88565 - DNA, 402 bp, Arabidopsis thaliana columbia
tgattttttgttgtagtatttaaagcatcttgcttacgacactgcacaaacaggttggaatgttgttagtagcaaccatagaggattgggaggagtttctgttacttcagattgcttctataatgctggatggacagatgatataagggtagttcttgattatcttcaacacaaatacccgagggctcctcgctttgctattggcactagcattggagcaaatgttctggtaaaataccttggggaagacggtgaaaagactcctctgagaggtgctgttgctatctgctctccatgggacctcttgattggtgacaggtttatctgtccgactttgaaacaaaagctctatgacaaagctctcaccatcggactccagggttatgcccaattgtatgtcca

SEQ ID NO: 88566 - DNA, 574 bp, Arabidopsis thaliana columbia
cgagtttaacagttacttccagagactacgcctttatacacgaattctctccagttcagtgatggcgactccggaagaagtagcgtatgagaagttcctagagagagttcgtcgcactgtctacgtagacgaactcacgcctcttgccacagctcctgttatttcatctgctttcaatcagtccgggactgtcaagaaagtcagcttcatacctaactacttgggtccaaaggagcttcctatgggtgttcttgttgagatggagaatgaagagatgacacaggctgttatctctactgtctcacagttacctttcatggttgctggtatgccaaggcctgtgagagcttgtgctgctgagcctaatatgtttgttgataaaccgaagaagcctggtagaacggtccgttttcgctggattaagcctaacgatcctgatttcgacaaggccaggagagtcaagcggcttgctcgtaagcatagtgctgaaaattcgttcatgctcaagcttgaggaggcacagaagctgtcgatacagcaagctgagacggcggtaacacatcacaagaagttt

SEQ ID NO: 88567 - DNA, 577 bp, Arabidopsis thaliana columbia
  unsure (1)..(577): unsure at all n locations
nnnnnnnnnnnnnnnnnnnnnnnnnnnnnnnnnnnnnnnnnnnnnnnnnnnnnnnnnnnnnnnnnnnnnnnnnnnnnnnnnnccacgcgtccgcccacgcgtccgtacggtgcgagaagacgacagaaggggcactagaaaaatggacaaaagattatggagtcttcaaggtatgactgctcttgtgaccggtgcagccagtggaatcggttatgccatagtagaagagttagctggttttggagctagaatccatatatgtgacatctctgaaactctgctcaatcaaagtttaagcgaatgggaaaagaaagggtttcaagtgagtggttcagtctgtgatgtagcctctcgtcccgagagagaaaaactgatgcaaaccgtctcctcgctgttcgatggcaaactcaacattcttgtaaacaatgtgggggtacttcgcggaaagccaacaacagaatatgtggcagacgatttcacttttcatatatcaactaacttggaagctgcttaccattttagccagctttcacatcttcttttaaaggcttcaggatttggaagcatcgtctttatg

SEQ ID NO: 88568 - DNA, 395 bp, Arabidopsis thaliana columbia
ataaaaaccctaaacctaaagtcaccaattccttcctcctccggtattcacgattcgggttgtcttttcttttgcagtgagatttcgactgtggaattgggagatctttccattatgggttctgagcaaaacgacagcacaagcttctctccttcagagccaaagctctgcgtcaaaggatgtggcttctttggatctccatcgaacatgaacctctgctctaaatgctacagagacatccgagccacggaggaacaaaccgcttccgctaaagccgccgtcgagaaatctctaaaccttaataaacccaaaactcaaccacaacagagccaagaaatcactcatggcgtcctcggatctggatcgtcttcctcatcaacgagaggtggtgattc

SEQ ID NO: 88569 - DNA, 517 bp, Arabidopsis thaliana columbia
  unsure (1)..(517): unsure at all n locations
ctgctgctccgttggatccaccgaaatcgacggctacgagatgcttgagctgtaacaagatagttggcgtgacgggtttcaagtgtaggtgtggaagcactttctgtggaactcatagatatccagagagtcacgagtgccaattcgatttcaaaggagttgcgagagaagctattgctaaagctaatcctgtggtgaaggctgataaggttgataggatatgaattggtgaagaaactgttgtgttctcttttgtttttttattttcaagtctcgtgatgttggtggtttggctctctgttttctgctcttattatggttttatttgcttttagggtttcttaggaaaggccttagattctgctattatgtggtttcatgttttgcaacattggatttgttgttctgtaataaagtgttggttatattaaaaaaaaaaaaaaaagnnnnnnnnnnnnnnnnnnnnnnnnnnnnnnnnnnnnnnnnnnnnnnnnnnnnnnnnnnnnnnnnnnnnnnn

SEQ ID NO: 88570 - DNA, 973 bp, Arabidopsis thaliana columbia
  unsure (1)..(973): unsure at all n locations
accacgcgtccgcacaaacaccataaaaagttgataaccccacccattttatatccactttatctcatcaaaaaacttccaatcaccaccgttggattagtaaacaatggcgtcatcactctccgattgtttcatcgaacgaatattatcagggatgtattaaatcttccgtgcgccttaccgcatatgaataaaccatttgaccacaaagacaaatgcaaaagaactaaaagagtctggtttctgttctgtcctaatttctctctggcgaaagctaagaggtttcggttacggtctccatctccgatcaaatcacgaagtttctatcggaaattttcagtgatacataccgtcagagattttctttacgagagaattgtcgccgacatactaaagcagagttttgggtgggaattagtaagatttcgactttggaattgggagatctttccattatgggttctgagctgtaacaaaaaagttggcgtgacgggtttcaagtgtaggtgtggaagcactttctgtggaactcataagatatccagagagtcacgagtgccaattcgatttcaaaggagttgcgagagaagctattgctaaagctaatcctgtggtgaaggctgataaggttgataggatatgaattggtgaagaaactgttgtgttctcttttgtttttttattttcaagtctcgtgatgttggtggtttggctctctgttttctgctcttattatggttttatttgcttttagggtttcttaggaaaggccttagattctgctattatgtggtttcatgttttgcaacattggatttgttgttctgtaataaagtgttggttttttttnnnnnnnnnnnnnnnnnnnnnnnnnnnnnnnnnnnnnnnnnnnnnnnnnnnnnnnnnnnnnnnnnnnnnnnnnnnnnnnnnnnnnnnnnnnnnnnnnnnnnnnnnnnnnnnnnnnnnnnnnnnn

SEQ ID NO: 88571 - DNA, 864 bp, Arabidopsis thaliana columbia
  unsure (1)..(864): unsure at all n locations
cagctgctatactgactcactatagggaaagctggtacgcctgcaggtaccggtccggaattcccgggtcgacccacgcgtccgcccacgcgtccgccctcgcggccgctggtttctgttctgtcctaatttctctctggcgaaagctaagaggtttcggttacggtctccatctccgatcaaatcacgaagtttctatcggaaattttcagtgatacataccgtcagagattttctttacgagagaattgtcgccgacatactaaagcagagttttgggtgggaattagtaagatttcgactttggaattgggagatctttccattatgggttctgagcaaaacgacagcacaagcttctctccttcagagccaaagctctgcgtcaaaggatgtggcttcttcggatctccatcgaacatgaacctctgctctaaatgctacagagacatccgagccacggaggaacaaaccgcttccgctaaagccgccgtcgagaaatctctaaaccctaataaacccaaaactcaaccacaacagagccaagaaatcactcaaggcgtcctcggatctggatcgtcttcctcatcaacgagagggggtgattcggcttgctgctcccgtggatccaccgaaatcgacgggctacgagattgcttaagctgtaacaaggnaagttggcgtgacgggttttaaagtntaggtnttggaagcactttctgttgggacctcattaggttatccngggnagtcacggnggtgnccaatttcgggttttcaaaaggngttttccgnaganaaagctnttttcttaaaaggtaaatccctttnggtaaaagcntnnaaaaggtttntnagggatat

SEQ ID NO: 88572 - DNA, 548 bp, Arabidopsis thaliana columbia
aggtgacacttagaagagctatgacgtcgcatcgcacgcgtacgtaagctcggaattcggctcgagtagaaaacccgagaggagaaaagcaaaaaaagccagatcacaatctcaaactcgcttcttcttcttcctcactctcttattaggttcagttccttttcgattcttcgtgtggatcgctgtcggtagatttccgatttctttaggttctgctcgaaatcgtggtttagtgtttattatcatcgattcagaaaacggtgggtaaacttgtagcggaagatgaggcggtggccggtggatcaccggcggcgaggtagaaggagattgtcgagttggatatggtttctccttggttctttctctgtcgctggtttagttctcttcatcgttcagcattatcaccatcaacaagatccatcccagcttttacttgagagagacacgagaaccgaaatggtatctcctccccatttaaacttcacggaagaggtcacaagtgcttcctccttctctaggcagttagcagagcaaatgacacttgccaa

SEQ ID NO: 88573 - DNA, 415 bp, Arabidopsis thaliana columbia
ccctcgcgtccgcccacgcgtccggtcacggtcgacataaaaacatcttttccatccaatatttaccggtttcgtttcaccggatttgggctctccggcgacggagaatagccaccatctccgtagaaaacagtatacttgatagctgaggaacaagagaagtgacaagggtgattgaaaagttgaaggactcagatgggaagcagaagcggagaacaaggaaagcgaatggcggaactgagcaaaaatcttaaagaaggtgagaggattctggagcccacacgtagacctgatggtactctccggaaacccattcggattcgacctggatatactccagaagatgaagttgtcaaatatcagtccaaaggttctctgatgaagaaggagatggcctcacaagggcctccaggtt

SEQ ID NO: 88574 - DNA, 460 bp, Arabidopsis thaliana columbia
ctgcaggtaccgggccggaattcccggggtgacccacgcgtccgcggcgcgtgggtttagctcgagagctggaaatcagaacgactcggaggagagaagacaaagaaagcaattctttttactaagggtcttgcttcgattccacagaacccaaaacctctatttctctatcttcatccacaaaaatgccagcttctgaagatagaagagggaaatggaaaaggaagaagagaggggggttatcggcggcgaggaaaccgaaacaagaggaggaagatatggaggaagaagacgaagagaataacaacaacaacaacgaagaaatggatgacgttgaaaatgccgatgagcttcagcaaaacggcggcgcaactcccgatccgggacttgggttttgccaggtagttgaagattcttgtttcccccatctttatttccccgcagggttaaacctttttgt

SEQ ID NO: 88575 - DNA, 1109 bp, Arabidopsis thaliana columbia
actatagcatgagctatgacgccgcatgcacgcgtacgtaagcttggatcctctagagcggccgcccttttttttttttccgtttttttttttttaaacaataaacatgcatatataggttattgtttctgtagcacggcatacatcaatagaatgacgattgagaaatttagtttcatcagtacgtaataattagtacttagcaaaaaaaaagaagtggataaatatctttaatttatggaatttcaatggttgtagagcaaatttttccatatcgtcatgcatccttgtctatgtccttgactaattttcacgcgcccggtttagctgctggtttagctgctggtttagcggcaggtgcagcaggggcaggggcagcgggagcggctggggcagctccacctgctgcggcagcacctggaattttaattggaaagtctctacccgtatatttcttgtagagccacattaagatggtgagacccgacacaccagaggtgcctccggccattaaacctgaagcaagaatagtggtggcaatacccgcgggtacaagaacggggctaaaaacgaggaatagcggcatggacgcgaatagtgccacggctgtgccggttagagatataccggccagcaacaagaggcatattgcagcttcagtggcaaaaaaagccgtcataacacccttgagcgtcggcttttgtcttcgtatctcgtcgtcgcgacgacgttttttctttccaaaaatcaaagagagtggaaagggcgccatagcttgtttcgcaagtggtgtacaagtcaaaggttaggaatagccttgtgaagaaagggtacaacatcgttgggaatattggagaccaatgggctgatttggttgaggatactcctggaagggtttttaagctcccaaatccactctactacgtaccttcttaattaagcatctatcttcatggcattgtccccttgtatccatttcatatctatgtcgtgaagatagatgcttaattaagaaggtacggacgcgtgggtcgacccgggaattccggaccggtacctgcaggcggaccagctttcccaatagtgagtcgtagagacctgaagtatca

SEQ ID NO: 88576 - DNA, 1115 bp, Arabidopsis thaliana columbia
  unsure (1)..(1115): unsure at all n locations
atgatactccaggtctctacgactcactattgggaaagctggtccgcctgcaggtaccggtccggaattcccgggtcgacccacgccgtgcgaccataccataaaaaacatgaaaatcctctcactttcacttctcttgctcttggccgctacggtctcggcatccgttccagggctcatcgaactcgtcgattcgaaaaccatctttgggaacgtagccgaactcttagagaaagagaaactttccatcaactacgccaactgcagaagctggcaccttggtgttgagacctctaacatcatagacttcgacacggtgcccgcaaattgcaaagactatgttgaagactacttgatcacttccaaacagtaccaatacgactccaaaaccgtgtgcaaagaggcttatttctatgccaaaggacttgccctaaagaacgacaccgtcaatgtttggatctttgacctagatgataccctcctctctagtattccctactacgcaaaatatggatacggaacagagaagaccgacccgggggcgtactggttgtggttagggaccggagcatcaacccctggactcccggagggcttgtatctttaccaaaacatcatagagctcgggattgaacccatcatactcagtgaccgttggaagttgtggaagaatgtcactctcgacaatctcgaagctgctggcgtgacctactggaagcatctcatattgaagcctaatggttcgaacttgaggcaagtggtgtacaagtcaaaggtgaggaagagtctcgtgaagaaaggatacaacatcgttggcaatatcggagatcaatgggctgatttggttgaggatacccctgggagggtttttaagctcccaaatccactctactacgtaccttcttaagaatctatcttcatcgcattgtccccttgtatacacttcatatctatgtcgtttcgtttatctttgtagccgttgtggcaccgctgcataaataaaatgtctatcctatcgtaacttaataagtacaaaaaaaaaaaaaaaaagnnnnnnnnnnnnnnnnnnnnnnnnnnnnnnnnnnnnnnnnnnnnnnnnnnnnnnnnnnnnnnnn

SEQ ID NO: 88577 - DNA, 1086 bp, Arabidopsis thaliana columbia
  unsure (1)..(1086): unsure at all n locations
cctttgtgtcacacaaataaacaccataaactaaacaataaaccatacaaaaaaatatgaaaatcctctcactttcactactcttgctcttggccgctacggtctcccacgtccagtcttcggcatccgttccagggctcatcgaactcctcgaatcgaacaccatctttgggaacgaagccgaactcttagagaaagagggactgtccatcaactaccccaactgcagaagctggcaccttggtgttgagacctctaacatcataaacttcgacacggtgcccgcaaattgcaaagcctatgttgaagactacttgatcacttccaaacagtaccaatacgactccaaaactgtaaacaaagaggcatatttttacgccaaaggacttgccctaaagaacgataccgtcaatgtttggatctttgacctagacgacactctcctctctagtattccctactacgctaaatatggatatgggaccgagaacacagccccgggggcgtactggtcgtggttagagtccggagaatcaactccaggactcccggagaccttgcatctatacgaaaacctcttggaactcgggattgaacccatcataatctctgaccgatggaaaaaattgtcagaagtcactgtcgagaatctcaaggctgttggtgtgacaaaatggaagcatctcatactcaagccaaacggatcgaagttgacgcaagtggtgtacaagtcaaaggtgaggaatagccttgtgaagaaaggatacaacatcgttggcaatattggagaccaatgggctgatttggttgaggatactcctggaagggtttttaagctcccaaatccactctactacgtaccttcttaattaagcatctatcttcatggcattgtccccttgtatccatttcatatctatgtcgtttcgtttatctttgtagccgttttggcaccactgcttaaataaaatgccaatcctatcgtaacttaataagtacaaaaaaccaaaaaaagnnnnnnnnnnnnnnnnnnnnnnnnnnnnnnnnnnnnnnnnnnnnnnnnnnnnnnnnnnnnnnnnnnnnnnn

SEQ ID NO: 88578 - DNA, 1016 bp, Arabidopsis thaliana columbia
  unsure (1)..(1016): unsure at all n locations
cgtccgtctgccgtaccggtccggaattcccgggtcgacccacgcgtccggagagtcccaccaccaccactaccacaatcccaatggcttcaccaactcttactctcctcctcctcctcaccaccgtctccttcttcatctcctcctccgcagatcctgacatgcttcaagatctctgcgtcgctgatcttccctctggaatcaaaatcaatggcttcccttgcaaagacgcagctacagtcacatcagccgatttcttctcacaaggattagctaaaccaggtcttaccaacaacacattcggtgccttagtcacaggagctaacgttatgacaatcccaggactcaacacacttggtgtctccctctctcgtatcgactacgcaccaggaggcttaaacccacctcacacccacccacgtgccactgaggtcgttttcgtcctcgaaggaacacttgacgttgggtttctcactactgccaataagctaatctctcaatctctcaagaaaggagatgtctttgctttccccaaaggacttgtccatttccagaagaacaatggtgatgtccctgcttctgttattgcagctttcaatagtcagcttcctggaactcaatctcttggtgctactttgtttggtttactcctcctgttcctgacaacatttggctcaagcctttcagacttctccaggaactgttaaacacatcaaatccaagttccaacccaagaaatgatcatcacccttcctttatattcattactacagttctgtttttttctaaagggaagatctttttatcttctttgatttgtcttctgtaataaaaaaggaacaataactgatgatcttcagtgtgcatttgagctccatagtctcatgtattcgtcttcttgtataatccatattatttttggttcaaagttgactaaagacaggtaagaagtcgaggttgatcttnnnnnnnnnnnnnnnnnnnnnnnnnnnnnnnnnnnnnnnnnnnnnnnnnnn

SEQ ID NO: 88579 - DNA, 589 bp, Arabidopsis thaliana columbia
  unsure (1)..(589): unsure at all n locations
gctgggccgttcttttcgtccgcccacgcgtcctcagagtttgagaacaaaaaaaacgatgccgttttgcgaggtcgtgaaagaagatgtcggcccagagacgacgcttaacaatgccgcaatcaaaatcttctacagaacgtacggtcatggtcctatcaaagctcttctcatcataggtttagccggaacgcatgagtcatggggtcctcaaatcatgggattgacgggaacggataaacccaacgacgatgatgacgacgacggaggtattgtttccgatgattccggcatcgaggtttgcgctttcgataatcgtggtatgggtcgaagctctgtgcctacccacaaatctgagtacacaacaacggtaatggcaaatgattcaattagtttgttggatcatttgggttggaaaaaagctcatataattgggcaattctatgggggcttttgatagcttgcaagttagcttcggttggtcccaaaccggggtctttctttggggtacttatatttacaggtggggtttttaatgtttccaaggttcccggaatggttccattgggnnggttttaagaaacccntc

SEQ ID NO: 88580 - DNA, 414 bp, Arabidopsis thaliana columbia
cggacgcgtggggttcgggcgtacaagcatatactgcaggctgttgtagcagctgttgaaaacaccgctgatgtggccacctcaatagcaacatgcttaaatgtcctattggggacaccgtctgacactgagagtgtatacgatgaaaagattaagtggacctgggtggaaacgttcatttccaagaggtttgggtgggattggaagcatgaaggctgccaggaactgagaaaattttccattcttagaggactgtcacacaaggttggactggagcttgttcctaaagactatgagatggacacgtcttatccttttaagaagtttgatattatcagtatggttcctgtgtataagcacgtagcatgttcatccgcagatgggcgcactttgttgggatcatccaaaacctcc

SEQ ID NO: 88581 - DNA, 542 bp, Arabidopsis thaliana columbia
  unsure (1)..(542): unsure at all n locations
ggnnnnnnnnnnnnnnnnnnnnnnnnnnnnnnnnnnnnnnnnnnnnnnnnnnnnnnnnnnnnnnnnnnnnccacgcgtccgtagagatcgatgaaggattaaagacgatcaataacggagatagagatcgattacaataatggatgaagagtatgatgtgattgtccttgggactggtcttaaggagtgtatccttagtggcctcctctctgtcgatggcctcaaggtactacatatggatagaaacgactactatggaggagaatcatcctctcttaacctcactcagctatggaagcgttttaggggaagtgacactcctgaagaaaatcttggagcaagcagagaatcaatgtcgatatgatcccaaagtttataatggctaatggactccttgttcaaaccctaatccacaccgatgttaccaagtatcttaactttaaggccgttgatggtagctttgtctacaagaaaggcaagatctacaaagtcccagccactgatgtggaagccctgaaatcgccattgatgggtcttttcaa

SEQ ID NO: 88582 - DNA, 1066 bp, Arabidopsis thaliana columbia
ctcaagagagtggcaaggacatttcatcaaatcatgaccaaatatggagtggtaagacattgaatatcttgcattgccgagaaatttgatggaacgaatcaagtatatgattgacctgagaggaaaaactttgatgaatacaagaacttatatataagcgaaaaaggctgcacaaggggaggcaacgagagcttgacttgcattacggttcctaatcaacaagagaaccaaggtccaacgaataatagtaagagagaaagggaagatgggtttcttcttcacagagttagcttctcagagtttgttacttatactatcaactcatcaggagaagtcattgacacaaaattagttaagcagaaaggcaaagagaccatctaaggtttcattactccattgctgtgaagcgcacaaacattttgtattcttcgcttaatgaccgaaataccctttgagtggtctgagtctcagttgaattgtcagagggtaaaactggaaatttgattctataagtttcacccaaaaaaaaggaatgacctttagggttttgccttggatttggtctctctcatcattagtttaagtatgaggttctgctcccggaggattttttcttccggtggaagcggagccgatgatttcaaatctctcttgacgaaccactttttaaagtggtgatgaatcatccaatcatctcctccgtcaccaccactgccactactactgagcttcctcgattaaagattctactttacttggatctctatcttcttcttcttctttgtttttcggttaagctctcttcttcttcttcttcttcttcttattgggagacaatgatgattcttaagaagtcaataaaccagacattgtgggaacactcttctttcatggcggggctataaggaaaaaagagacctcctttttttctttgtaagcagccatggctgaagagttaatcctctaatttgtctgagaaaaggcgaatctgagtcctttttgctaaaaaagaatggattaaaaaaaaaaggcgagccgctctagaggatccaagcttacgtacgcg

SEQ ID NO: 88583 - DNA, 706 bp, Arabidopsis thaliana columbia
  unsure (1)..(706): unsure at all n locations
atgattggtccggcactaatacgactcactttagggaaagcccgtacgcctgcaggtaccggtccggaattcccgggtcgacccacgcgtccgcccacgcgtccgtctaaaacaacacaaatatcataatttctccacgaactgactaagagaggtaccaagaagaaaaccagagaagaatcttctttagagagatgggtgtggtagaagaagctcacaacgtgaaggtgattggttcaggagaagccacgatcgtgttaggtcacgggttcggcacggaccagtcagtatggaaacacttggttccacatctggtcgacgattaccgcgtcgtcctctacgacaacatgggagccggtacgaccaaccctgactatttcgacttcgatcgttactcaaatctcgaaggctactctttcgatttgattgcaatcttggaagatctcaagattgagtcttgtatctttgttggccactctgtttctgccatgattggtgtcttggcttctcttaaccgtcctgatctcttttccaaaatcgtcatgatcctctgcttctccgaggtcacggaaaacggttgttgtttaccaaggggggttcgaccaaggagggtttaacccacttttttgnngccttccggggaacttnaaaggggggctnaggtttgnccnctnccnnggggggantggccctccngtnaaaattt

SEQ ID NO: 88584 - DNA, 533 bp, Arabidopsis thaliana columbia
  unsure (1)..(533): unsure at all n locations
tcaccnnnnnnnnnnnnnnnnnnnnnnnnnnnnnnnnnnnnnnnnnnnnnnnnnnnnnnnnnnnnnnnnccacgcgtccgcttttttttgtgtgtggttaaggtctcatcgatcaacggataagatgaagcgtgaaggcaaacaacacggtatggtgaggacttaccggattctgcctccgtcgctgaatccaaggccggaatcgaagttggtcaaccctttgacttcacggccaaccgctggattatttaccaaagtgacatcaaagccgaccaatcactcgaaattcaccgggaaatgtggtcaagcaaggtgccttgactgccatatgcacccggtcaccaaatctaaagccaagactaaaggctcttcaaaggtgagaacaaatgatgtcacctataagatgctgacttggcaggtcgctgccggtgggcctagacccggtttgaagctttccgggttctcggctaccggaatacttgatcttatgtctgatgattatgggtatgatcatgattatgattatgatgaag

SEQ ID NO: 88585 - DNA, 695 bp, Arabidopsis thaliana columbia
aaaaggcggaacaacaaaagaaaccctagcttccctttgtacctctctctgttccaaaccatgtcgaagagaaagaccaaagagccaaaggttgagaatgtgactcttggaccagctgttcgtgaaggagagcaagtctttggagttgttcacgtctttgcttcattcaacgacactttcattcacgtgactgatttgtctggacgggaaacacttgttcgcatcactggtggaatgaaggtgaaagccgacagagatgagtcctcaccttatgctgctatgcttgcggcacaagatgttgctcagcgatgcaaggaacttggaatcactgccatacatgtgaaactccgtgccactggtggtaacaagaccaagacccctggacctggtgctcagtctgctctaagagcccttgcccgttctggcatgaaaattggtcgcattgaggatgtgactccaatcccaaccgacagtacccgcagaaagggtggaagaagaggaaggaggctctgagttatttggcctctcgttggatctccttatgtagctttctcaatgtttcattttgttttttcttagtttgaaaagagttttggaattactatgctttgttatagtctcaactctgaacagctttggatctttttctgtatgaccataagatattcaaaaattggtagtcattttatctcaca

SEQ ID NO: 88586 - DNA, 417 bp, Arabidopsis thaliana columbia
tgagcgtttcttttttctcggaaaaagattattagtattttataactaatgttttgcttttcaattgctaaagattggttattatctggttgctgttgagaatgattcaggaactgttggtttttcttccaagaatcactctcttgaatcttgatggctcctgtgttgaacatgcagatcaggatatgctctgttttgtgttagaaggaagtctctgaagaacaaggtacatattatataacagggttccaacggagaaccgtgcagataacttatttgggacagcttctacaaaaaaacatattccggcaaaagaaaacaatgcaactacctacacatggcttattaaaggcaaacaacacgattggtagacttgtttagaaccattcttcctagctgcatgtgtgttgatgtgct

SEQ ID NO: 88587 - DNA, 908 bp, Arabidopsis thaliana columbia
cacacacatataaaagtctttgaaaagcattagcatatccctttgtttcaaaatgagggtttccaagtctctcatcctgattaccttatcggctttggtcatttcctttgctgaagcttatgatccaagtccacttcaagatttctgtgtggccattgatgacctcaaaaatggtgtttttgtgaatggaaagttctgtaaggatcccaagcaagcgaaggcagaagatttcttcttctcaggcctcaaccaggcaggaagcactaataataaagtcagatccaacgtgacaacagtcaatgtcgaccagattccagggttaaacactatgggaatatccttggtccgcatagactatgcaccatatggacaaaacccgcctcacacgcaccctcgtgctactgagatccttgtccttatcgagggaacgttatatgttggttttgtctcttccaatcaagacaataaccgtctattcgccaaagttctgtacccgggtgacgtgtttgtgtttcccataggaatgatccattttcaagtgaatatcgggaaaacgcctgcggtggccttcgctggattgagtagtcagaatgctggtgttatcacgatcgctgatactgtgtttgggtcaacgcctccgattaatccagatattttagctcaagcatttcaattagatgtcaatattgtcaaggatcttgaggccaagtttagaaactaaatctagtcaccacaatacgagtgtttatggttgtaacacttaagtaatgatgtaacaagagttaaagatttatgctcaatataataaagaaaggtgttgttcacctaatttgataaaaaaaaaaaaaaaagggcggccgctctagaggatccaagcttacgtacgcgtgcatgcgaagtcatagctg

SEQ ID NO: 88588 - DNA, 468 bp, Arabidopsis thaliana columbia
  unsure (1)..(468): unsure at all n locations
cctgcaggtaccggtccggaattcccgggtcgacccacgcggtncgagaacaaactctcacttctcgcatcgttgattctccaaaaccagttttcactctctattgccgattctcgtttcgtttgatatcttaggaatctataaacaaaggttgaacaatgtttctcaaagtccaattaccatggaacgtgatgattccagctgaaaacatggatgccaaagggctgatgttgaagagagctatactagtagagttactagaggcgtttgcttccaagaaagcaaccaaggagcttggctactacgtggcagtcacaactttggacaagattggagaaggcaaaatcagggagcacaccggtgaagttttgttcccggtaatgttcagcggaatgactttcaagatcttcaaaggagagataattcacggtgtggtgcacaaggtgttgaagcacggtgtcttcatga

SEQ ID NO: 88589 - DNA, 595 bp, Arabidopsis thaliana columbia
  unsure (1)..(595): unsure at all n locations
gaactacaaaagctaagagaaaagaaaatatcggaacttgaagaggaaatggaagaaactcaagaagattgcaagaagatcaaagcgcggttacaggaagtagagtgtctggttaatgaacacaagaaactcttttggntcaccaatgataagtatctagaagacattgaaaagaaagctatttcgcctttagatcatctgaaagacaccgatgcaactccaatatcatctgataaactagtcaaaataaggaagagttctggttttgtcccacgtttcatgacttcaactgttgctagtcgccaaaggcaaacaatgtcagagaaggaaatcaatgcaaaggctcagagcatacgatcagtggctaaaaatcttactcagttctccacttctcagtcgcttagtctctctgactcacgaagcaaagctctcctaagaagatcatacacaaaaccgcttcaagctgcagctaacagtggaacaccaccagaaacgcctaaaagacatatcaaagataattcttttacagagaaagaatatgaatgatacttcttcaccaaggagcaagatggttacttcatcggatccaaatgtg

SEQ ID NO: 88590 - DNA, 360 bp, Arabidopsis thaliana columbia
agctggtgcaactgcagctaatcaacttcgactttggaataagggtgtcgattcagaaagcttcaatccccgtttccgttctcaagaaatgcgtataagactgagtaatggcgaaccagaaaagccactagtgattcatgtaggtcgcattggcgtagaaaagagtttggagcttttaaagagtgtaatggacaaattacctgaagctcggattgctttcattggagatggaccatacaaagaggatcttgagaagttgtttaccggaatgccagcggttttcactggaacgttacaaggcgatgaactctcacaagcttacgcaagtggagatgtgtttgtgatgccatcagagtcgga

SEQ ID NO: 88591 - DNA, 686 bp, Arabidopsis thaliana columbia
gttttgcaaagtaacagtgatggaagagacgcgtttgttttcttgaataatagtaatgacaagactcggactcggtcttcttcgtcgtcgtcgtctacggcggcggaggagaatgataagaaggtaataacagagaagaaaaaggggaaggagaaaacttcgacgtcgtcggagacgaagaagaagacgacgacgactaaatcggcgcatgagaagctatacatgagaaacagagcgatgaaggaagaagtgaaacacagatcgtatcttccgtacaaacaagtcgggttcttcactaatgtgaatggtcttagcagaaatattcatcctttctgacaaaaataaaaattaagtttggtttttgggtgatttttttttgttttttggttatgtaaaaaaaaaatttaatttagtactcttctttggggtcacttctgcttggtagattgaaattttaaatgattgcagaaaggtgtactgttttttttccctattttctggtgttattgtgaagagtttggcttgtgtactaaaccattttgtaagtaaaaaaatatataaaatagttcgatttgcttaaagaaaaaaaaaaaaaaaaaaaaaaaaaaagaaaaacccaagggcggccgctctagaggatccaagcttacgtacgcgtgcatgtgacgtcatagatcttctatagg

SEQ ID NO: 88592 - DNA, 604 bp, Arabidopsis thaliana columbia
atctgatctatctctctcttccagctgtttcatgatcgatttactcttaacttacagctgattacaattcactgtaatctctcaagaaccctagattcttttttttcttttcaattgtgatccgtcaggtatgtgaattcgattactttctatatcaattcaacgaattccaaaagtcatgttcgcgtataagcaatttaaccttgtcgatttctttatattttctctgtatgtgtagcagcaatgcttgatctttaaatttactgatatctgaagatcgaattagggttctgatctacttgatatttatttgtttgggcttttattcagcagctcgatcttgggctgaagctatggctcagagtaattggggaagctgacaagatgcttgatggttacattataaagaatcagaacacttggattgggggatgcgggtcagaattgcaatgggattagcatattgccttgaccatatgcaccaactcaatccacctatagctcacaccagtctcgtctcatcatctcttcagctcacagaggattatgctgtcaagtatcagatttcagttcggttcatctgagacagaacaacatcaacaca

SEQ ID NO: 88593 - DNA, 447 bp, Arabidopsis thaliana columbia
cccacgcgtccgcccacgcgtccgcccacgcgtccgcccacgcgtccggatttactcttaacttacagctgattacaattcactgtaatctctcaagaaccctagattcttttttttccttttcaattgtgatccgtcagcaatgcttgatctttaaatttactgatatctgaagatcgaattagggttctgatctacttgatatttatttgtttgggcttttattcagcagctcgatcttgggctgaagctatggctcagagtaattgggaagctgacaagatgcttgatgtttacatatatgattatttggtgaagaagaaacttcataatactgctaagtcgtttatgactgaagggaaggtttctcctgatccagttgcaattgatgcacctggagggttttctttttgagtggtggtctgtgttttgggacattttcattgg

SEQ ID NO: 88594 - DNA, 932 bp, Arabidopsis thaliana columbia
  unsure (1)..(932): unsure at all n locations
tgatactccagctctatacgactcactatagggaaagctgggtacgcctgcagggaccgggccggtataccggggcgaccacgcgttccgccacgcgttcggccaccgcgtcggccaagcggtcggccaacgcgtccgaattaattttaagttaccggtggataccatttactggtattttttcagaacccttagatcttttttttccttttcaattggtgatccgccagcatggttggacctttaaattactggaatttgagaacggattaagggtccggaccaactgagtattaattggttggggttttaatccagaagttcaatcttggcctgaggctttggctcaaagtattggggaagctgacagaatgctcgaggtttccatatatagatatttggtgaagaggaaacttcttaatattgctaagccgttaatgattgaagggaaggttcctcctgatccagttgcaatggatgcacctggagggtttctttttgagtggtgggctgtgttttgggacattttcattgcaaggacgaatgagaagcattcagaggctgctgcagcttatatagaggcacatcagggtaaagcgaaggagcagcaaatgcaaatacagcaactgcagatgatgcgccaagctcaaatgcagcgtagggaccctaatcatccttctcttggcggtccaatgaatgctattggttctgaagggatgattgggcagtctaatgctagtgctttggctgctaaaatgtaccgaggaacgcatgnagcagcctaatccctatgaattcctgagacatcccaacctncatcttgatgcaaggntgggccttcttaaaatcagncacaaaccatcatgggcagattgtncaaggnaaccaccaaggnggngttncgnancnntnnaannaantcaatnccgnac

SEQ ID NO: 88595 - DNA, 866 bp, Arabidopsis thaliana columbia
  unsure (1)..(866): unsure at all n locations
cgactcacttagggaaagccggtacgcctgcaggtaccggtccggaattcccggttcgacccacgcgtgcggcgccaagctcaaatgcagcgtagggaccctaatcatccttctcttggcggtccaatgaatgctattggttctgaagggatgattgggcagtctaatgctagtgctttggctgctaaaatgtacgaggaacgcatgaagcagcctaatcctatgaattctgagacatcccaacctcatcttgatgcaaggatggcccttcttaaatcagcaacaaaccatcatggtcagattgtccaaggaaaccatcaaggaggtgtttcggcagcgctgcagcaaattcaatcacgaactcagcagcccactgaaatcaaaactgaagttaatttgggtacatctccaagacaactgccagtggatccttctacagtttatggccagggaattctgcaatcaaagcctgggatggggagtgcaggattaacccctggggtgagtggtcttcctttaaagggatggccattaccgggcatcgagcagatgcgaccaggtttaggaggccctcaggttcagaaatcttttctacaaaatcaaagtcaatttcagctctcgccgcagtagcaacaaccatcaggatgtttgctcaggttcaagcgcaagggaaattatgcctaatttaccccttgtattggtgggtgncaatgggcccctcggangatttttcaagggtttnccttgggggaaacntttaatcccgaaaggttggccaccaaaattgcaaattatgggcntttnngggnccccnatgngnaagntttnaaagtnttnagnntccccataacanaanctnttttngg

SEQ ID NO: 88596 - DNA, 521 bp, Arabidopsis thaliana columbia
  unsure (1)..(521): unsure at all n locations
acgcttttatttcgaagagagagagagaagaagacggaagctagaagaaatcgtttttgatcggagatagtgtatgagctagttgtttgtaatttgacggctctcgggaactgatctatctccggtgtctctgctttgtcggtagctacaggagtgaagagagtttctacaagggttttaatggaagatgatgactctccttcttctcgggatttggatgcacagaacccttatgatcgattgcttgctctagatacaagtaccgtagatccaaattgtaacttggattcggtttctgccatttatctagcgatgaagagctctaagctggaatgtgttgacgagcgtggtcaagattcccttattacttcggtatgcatggaggatgaagaggatgaggagctcgatgagtttgatcccttatctgnttatcaaagaacttgcccgaacctgncttcctgttgccccaacttttaaaggccggnnttgntncctaaanaaaacccgnaggtgncccccca

SEQ ID NO: 88597 - DNA, 407 bp, Arabidopsis thaliana columbia
cacaaacacacacagatctcttcttcatcacattacttctggctttacatcttttttcttctccatgaggaaagggagaggctcttccgtcgttggacccgcccttccagtaaccgccggtggatctgtgaaggagccgaggtatagaggcgttaggaagagaccttggggtcgattcgcagctgagatccgtgatccattaaaaaaatctcgtgtctggctcggtactttcgattccgccgtagatgctgcacgcgcttacgataccgccgcacgtaacctccgtggtccaaaggccaagaccaatttcccgatcgattgttctccttcttctcctctccaacctctcacctaccttcacaatcaaaacctttggtcttcttccggtgattcagaaccagatcgat

SEQ ID NO: 88598 - DNA, 737 bp, Arabidopsis thaliana columbia
aacgacccactatagggtaagctgggacgcctccaggtaccggtccggaattcccgggtcgacccacgcggtctgtgtgtgtgtgtcaatggcggctttaagcatctcactagctttctctgttgattctctcaaaccaacccaatcaacgaagtttggcttctcgtcttcttcacatagatatccattactctactcgtgtaaatctcaccgctccaatctcagattcgctttccctccttcttcagtttcgacagctacagaaactggagaagaaaactctaaatcgaccgggaattacgcgtttctagaggaatcgtttcgtaccgggaggtttttgagtaacgatgagttagagaagcttaaaactcttgaaggatttgcgtattttcaagagcttgaatctggatcgatgtgggttcgagttatgagacatgaagagatggattcaacggtgcatctattggctgagtcatttggtgaatcgatgttattaccttctggtaatcagtctgtgttacggtttttgagtaagcagtactttgtttgagagaagggaagtgttgccacacgcagtcactttggttgggttctttaggaaaaaagttgatgagttttactgatgatgggataggaaggacgctgttgatggcctggaaccttgttgaaggtttggtttaggaagaaaaccaacgccgcttaaatggctttcctccctcgcttttttccaaacctcc

SEQ ID NO: 88599 - DNA, 745 bp, Arabidopsis thaliana columbia
  unsure (1)..(745): unsure at all n locations
actcactatanggaaagctgctacgcctgcaggtaccggtccggaattcccgggtctacccacgcgtgcgaggaaaatttgagattaattcgttcatcactgtcggaggctgttgaatcctgtattgatgccgctggacatgaatttgatgtaactcgtcagagggctctgttacgagcggcaagttatggacaagctttctgcagcaattttcagcgtgaacgtgtccaagagacttgtagaacgttacgggttttaaatgcggctcgtgatcctgctattggcatacctcttagcattcagcagtacaagttactgacaccagtggttttgattagtcgccttattaatgctaattgtcaccttcttgctctgcggatatctgagtacttagatatgaataaagaagtggtgataatgcattgggcatgtgcaaagataactgcttcaccatcaactccagattctcatcttcttgaaattttacttgataagctccaactatgcaaaggaatatcgtatgctgcagtggccactcatgctgataactgtggccgtcgaaagttagctgcaatgctagttgaacatgaaccacgctccacgaaacaggtacctcttttattaagcattggggaggaagacactgctttagtgaaagcaactgagagtggtgacactgacctggtttatctggtcatatttcatatatggcaaaagaggcctcctttggaattctttgcgatga

SEQ ID NO: 88600 - DNA, 840 bp, Arabidopsis thaliana columbia
  unsure (1)..(840): unsure at all n locations
tcccgggtcgacgcacgcgtctgaaacagacgtctgtaaggctgcgaagacgacagaagggggaaacagatcggaaaatcgtcgagagagagagagagagagagaatgtcgtatcttcttccacatctgcactccggttgggctgttgatcagtcgattctggccgaggaagagcgtctcgtcgtcattcgtttcggccatgactgggatgagacctgtatgcagatggatgaggtgcttgcgtctgttgctgagacgattaagaactttgcagtcatttatctggtggacatcactgaggttccagacttcaacaccatgtacgagctgtacgatccttctacggtcatgttcttcttcaggaacaagcacatcatgatcgatcttggaactggtaacaacaacaagatcaactgggctctcaaggacaagcaggagttcattgatatcattgagactgtctacccgtggtgcaaggaagggtcgtgggttggtgattgctccaaaagattactccaccaaataccgttactaatcgggcttcccaacactatctagtttgttaaaaccattgagtctagtgattctggtcacctgaaatatcccgtgaacgggtttcatttcatatatgctttgatgatgattgtgattctggtttttgcttactgtttcggttgttccccatttatgtaggtaactccttgcttcgaacatgattcagtgaaatgaaatttggaagccgttgggtttnnnnnnnnnnnnnnnnnnnnnnnnnnnnnnnnnnnnnnnnnnnnnnnnnnnnnnnnnnnnnnnnnnnnnnnnnnnnnnnnnnnnnnnnnn

SEQ ID NO: 88601 - DNA, 1158 bp, Arabidopsis thaliana columbia
  unsure (1)..(1158): unsure at all n locations
ggaaaaatagcttcatatagagatattttcaacaacttgtccctctctaaactcatccaccttccaaaacagagaaggggaaaatatgacaccggctattttttctccgacgactcttcctccatcaactgctacatggccatgttcaacatctcagaagctcatcaccgttagatcaccactcaagttcaagtgtagagcaacttcatcatcatcgtctatcactgactttgatctttatgacctcttgggtattgatcgaagttctgataagtctcagatcaaatcagcctatcgtgcgttgcagaaacgatgtcatccagatatcgcaggagatcccggtcatgatatggccatcattcttaacgaggcttaccagcttctctctgatccgatctcgcgccaagcctatgacaaggagcaagcaaaactagaagaactcagaggctatacagggaaaccgatatactcggtttggtgtggaccagaaacagagcaacgagctgcgtttgtggacgaggttaagtgtgttgggtgtttgaagtgtgctttgtgtgcagagaaaacatttgctattgaaactgcttacgggagagcgagggttgttgctcaatgggctgatcctgaatccaaaatcaaagaagccatcgaagcttgccctgtagactgcatttcaatggtggagagatctgaccttgctccattggagttccttatgtcaaagcaaccacgaggcaacgtgaggatcggggttggaaacacggttggtgagcgtgtctccaatgtatttgttgatgtcaagaagttccaagaaagatacgctaaagctatgagcagaaccacaaaagagacctcccagagagaagtacaaataagtgcagtagaggcgattacgtccatttccaattggctatactggagattcatcaccgtacacaaaaccactgagtccagattcaaacatgagtctaacttttatcaaaagaaagaaagcggttgatccagatatcagaaagcttcaagatgttgtggcagcgatgaaacaagcagaacaaagcggaaaacccnaagagaaaggatcagcttacttgcttgggagaagattattggagtccatcaaacgcagctcttccctcatctggaaacaacaacggttcc

SEQ ID NO: 88602 - DNA, 367 bp, Arabidopsis thaliana columbia
cttgacttaaaaattaaaataaaacgaaaagggaaagcgaaattgttccttcctttttagccttttaggtcttcgaattctcaattttcttcggtgatttctaaaatctgctttggatttggagaaacaactctgtctatgtatgaatctcgtttcgaatctccggagtttgctcaatgttgcttctcttggcgtgaagtttgttagatgacggatgatgatttctgagaaaccattgggagtggaggagtctatacggcaggatctggaggttttaaccgtgtcaaggaggcttgtgaaaagtgttagccagaagttgaagaaaaagattcataaaactgaggtggtggaagatgaagagattgca

SEQ ID NO: 88603 - DNA, 459 bp, Arabidopsis thaliana columbia
ttcgtccgccctcgcgtccgcagatttcgtgagcttattcttacctttctctcgaaggaagctctcatcttttcactcagatcacgttccctgggcttattcgcttgtatctgttgatatacaagatggcatctgcgactctgagaaggcggcttcatcacggtgatgtagatgggaggaagtatgaacgctatgatgcaacagactctgaaactttaagtgaacccttgttaggaagtagtagtactgataatagtagaaatgagtacattgaggagcgtactctggaggatatttgggaagaagaacggaagagacagcaagttcactggacgttaatcttttctcagttgattgcacagtgggctcagtggatagccaaaatagtctttggatctggctcacttgttgggaggtttctttctctgcctacatttggtcaaataggtactggtggga

SEQ ID NO: 88604 - DNA, 479 bp, Arabidopsis thaliana columbia
ctcgttttaaccccaaaccagaagaagaaacaaaaatcgaaattctcatcaatagcaaaaaaaaaattactcttagattttcctcaaaaaccttaatcaatcgccgggaaaatgaatattccggtgactatttcctccattactgtttctaataacgctgtttccgacaatcgtcgtcatgtttcccgtgaaaatcgtcagcgttaagaaaaccgtcacttatatttttttttcttttcttcttcgtttttgtgaagatgatgatccactgatttgagagtagtagcttgagaggtttttagtagatttcgattttgcgattatttttgtttcctggagagatctcatttttttgccacttccgatgatgaagatccagccgattaacaacgatttgccggcgaatagagtggaatcatcaaccaaaccagtgcttaagtctcgtctcaagcgtttattagatcgaccgttcacgagaa

SEQ ID NO: 88605 - DNA, 690 bp, Arabidopsis thaliana columbia
  unsure (1)..(690): unsure at all n locations
atgatacgccagctctatacgactttcttagggaaagctggtacgcctgcaggtaccggtccggaatttccgggtcgacccacgcgtccgccacgcgtccgtctcgatcaattatccattttgcccagattttttccagaagctcatcgaattcatcgaatcacaatgtttgaaatttggtttcactgttgctgagtgtgtttggaggagaagcttgattggttcggtgtttcactgtttgaagattataagagttatggagaatggtggtcagtatgataatgcgcggttcaagcccgattacttcaaaggtgcacaatctatgtggaatatgattccccagcatcagattaaggaacaacataatgcgttggtgatgaataagaagatcatgtccatccttgctgagagagacgctgctgtacatgaaagaaatcaagctgtctctgctaaaaaggaagctgtccgctgctcgggacgaagcgcttcagcaacgtgacaaagctttttctgagagagataaagctttgatagagaggggtaatgcttattgctggctctttcaacaccatgaaaatagtctcaacctttgcttttgtctggtgggaagtgtgtttgattgggggtgtattgttttggtattnggggncccccccaaacttnaagncttccnnnngtcaacctaattcc

SEQ ID NO: 88606 - DNA, 381 bp, Arabidopsis thaliana columbia
atgttcaatgatgatgtccagggaactgctggtgttgcactggctggactattgggaactgtaagagctcaaggtcggccgatatccgactttgtgaaccaaaagattgttgtggtgggagctggaagtgctgggcttggtgtaactaagatggcagtacaggcagttgccagaatggcaggtatcagcgagagtgaagcaacaaaaaacttttacctgatagataaagatggtcttgtcaccacggagaggacaaaacttgacccaggagctgtactttttgccaaaaatccagctgagatacgcgagggagcaagtatcgttgaagtggtgaaaaagtgaggccacatgttcttcttggtttatctggagttggtggta

SEQ ID NO: 88607 - DNA, 420 bp, Arabidopsis thaliana columbia
cccacgcgtccgaattcaccggcgagagagaatgaatacgccgatgtcactctcggcggcgcgtggccgtatgctaccttttttagagaaggagaaatcagaagaagagtctgaaactctggaatcgagtctcttacagctaatcgacgacaatcgtcgatcatcgttacagctccgggaaaaaaccgagagatcgagaaaggaagcaatcaggcacgcggcgagaacggcggatctgctagtgaaggcggtgaacggaggagtagaggaatgtttcgttaacgagaaacggattgagtcggagattaggaatcttgccattacggtggcgaaattcggcaaacaaacggatcagtggcttgccgtcactcacgccgttaatagcgccgtaaaggaaattggagattttgagaattggat

SEQ ID NO: 88608 - DNA, 407 bp, Arabidopsis thaliana columbia
gaaccacggcttgtgttgtggcttaaacacagaaatggcttctttaccgttcggagtttcgaatctatgcagaaatcaggaggttctgtctgcgtctgtaaggcttcttccggttgggcgacaaaccacaggattcggagctgcgaagaaagtcttatatagattcgagggacatagattgtcatcatcagtagaaaagggagagaaacagagaatgagatgtagagttagctcaaactctactgaaactgaagacgattctgctacaaaaaccaagacgacgccgtttggttacacgaggaaggatgttatattgataggagtgggagtgactgcacttggtatcgggctagagagtggacttgagtatgtgggagttgatccgttgcaagcggggaatgcagtag

SEQ ID NO: 88609 - DNA, 407 bp, Arabidopsis thaliana columbia
ttcccgggcctcttctaccttgggtaactccgtctctccgttactttcttcctccgatcggtggttcagttctccaaagtatctaatctactcctgttgtttcagttctgagagaagatataagttgaatcgcgtgaccggagacatggagactcaaaacaaattgatgaatgaaactaaaagacatgttaaatccagattgtgcagagtttctggttcgatgacggagatgatggaaattcaagctgagaatcccacattccatgtattgtttattccgggaaatccaggagttgtgtcattttacaaggactttttggaatctttatacgagtttcttggtggaaatgcttctgtaattgctattgggcaaatatctcacacgagcaaggactgggagtctggga

SEQ ID NO: 88610 - DNA, 457 bp, Arabidopsis thaliana columbia
tttcgctggagaaatttctaatcaacttaacttttaatttgtgtgggtttgttcccttaacattgttatagattagaattcatcctttgctttgtttatttgggtgtttatctatcgcaggaattagggtttttggtctgcttcgatggatatggatcaagagataggtcaaaattctcctggatttgatggtgaatcagtagtgtcaatgagtaatagaagcaaggagactgaaccagtcccggttgagaatgactattatcgggaaaacggattcaacagtgatggtgatggtgatgatgtgaaggttaatggtgacagaagctccttcactgatttgaatcaactcccggcgattccgccagcttctagtggtcaaggtttgccgtttgcacctgtcgatttcccgagccccggcgatgtttggacttggagagttgggaggagagtgaataat

SEQ ID NO: 88611 - DNA, 720 bp, Arabidopsis thaliana columbia
aaccgtttatgatcaacgtcactgtgaccacaaccgccaacctcccaggtctaaacacagtgggccttacaatggccaggctagacttcggaggctctggtgttgtcccaccgcacgtgcacccacgcgcctccgaagtgacagtctgcctcgacggtgtccttctcgtcgggttcgtggatacgtcgggtcgggtctttacgcaggagcttcatccgggtgagacattcgtgtttcccaaaggtttgatccattttctatataacattgatacggtgagctcagctttggcagtctctgggctgagtagtcagaatcctgggactcagattgtatctttgtcgtctttcatttcaaagcctccgtttctggtagaggttttgaagagtgcttatgatatcaacggccaggatgttgctaggatccgcaaaagtcttgaaggctaaaaatgctaaaagcctaaaactatatataactacatggccaaccaataactatatacaaatgtatatgactaactcaaaactatattatgacaacaacaaaaaaaaacgtataaacaataaaatgtcactaaaaaaggctatacactcaattccgaattgagtttttctgcaattctttagctatcttgttaactatgaatgtttttggaatgtgaacgatttatgatccatagaactatgtaaagagcattaaattaaaaaaaaaaaaaaaaaa

SEQ ID NO: 88612 - DNA, 583 bp, Arabidopsis thaliana columbia
ctaactgagtccatgttgaatagattctcctatagatgtaaggaaatactcggcttctacatcttaattaagcattacttcctatttctaaatagataggaacctcccggcccttctctcccagacgtgatttttgagacagccttttcatcaattttttctggcaccggtagagcgttagctcgtcggtgccaggagctagcttcttctcaccggtttcctcccataagctctctcatcggtttctctgttttttgtttcgtgttgtttcgtctcttttccctcctattagatccataaagcttcattaccgcacaaccttcgaaactactcccatctggtattagctcttctcttaccttgttcgcgattctcgtggatccctctcctcggctttccttaaagtcaagatcagcaactctttggtcctcaatggatgagagctcggcctcgacgtggaaactgtggaggcttcaaatcacaaaagaatcttcttctgcagaccgagattcatcactcgcacctctcgatgtggtcgttttagtcttagaagccctcaattcggtcaccagaatgttgcatt

SEQ ID NO: 88613 - DNA, 446 bp, Arabidopsis thaliana columbia
taaaggacaaacatataataacaacaacttctcttctttactcgtttctctctctctcttttcttttcttttcttcaagcgcttctttaatggcggctgttcaatgtctcactttcctcttcttgtttcttctccaaaacgcgacgtcagcttcacctctccctctcttccggcggccgatccaaagcaaccacagcaacttcgtgaagcatcctcgccgaagtcaggtggttttcccggtgaatcatagtagttgtgatctgttcgccggcgagtgggtgcgggatgagacttacccactttaccggtctaaagaatgcggccgaggaatcatagatccgggattcgactgccagacttacggcagacctgactccgactatctcaagttccggtggaaacctttcaactgcaatgtccctagattcaatggagtgaagtttcta

SEQ ID NO: 88614 - DNA, 404 bp, Arabidopsis thaliana columbia
ttcgtccgctggctcattattgaagcagcagttggaattgcagttatagtgcgtgtatttgttaataagcagaccatggaaactgaaattgtcaatagacttggaaatagtttctctcgtgcacctttggcggcagttgttggtctttgcactgctgttgccattttcgcatgttttccactgggtgaacttctctttttccacatgcttctcattaaaaagggaattacaacatatgagtatgttgtggcaatgagagccatgagcgaggcgccagatggagcatctgttgacgaggaaattcagaatgtgctctattctcccactgggtctgctacaaccggctttagtggtggaagctctctcggtttaccatacaggggggtctggtgcactccacctag

SEQ ID NO: 88615 - DNA, 526 bp, Arabidopsis thaliana columbia
  unsure (1)..(526): unsure at all n locations
acatggagtctccaaaccaaatcaacgacaattgaatccacaccttcacgaaaccccccaaagtttttgtctttttcggtttcggattacatcatctccaagacaagcaccagcatcagattttctgcatccttaaagatctcgttgcggtttttgtcggaattgtttcgatttgttgtggttctcaataagctctcgcttgtcagagaaacaccggcaacgccgttgaaatagtcaccggagaccattttgcatcgtagagttcgccttttatggcgttcacgtggggatctgctctccggatttctgttctccttatccttgtagctgcaattgtcttagcttgttattttctccctgttgagaagctattgaaggattttttgttatgggttgaacaagatcttagggccttggggaccttttgccctagctgttgcgtacattcctctaacagttttggctggtcctgcctgggttaaggtcggtgggggtacnttttggggtgcaantggtttttnggggg

SEQ ID NO: 88616 - DNA, 392 bp, Arabidopsis thaliana columbia
agaccacgcgtccgctgaagcttctactggggaatcgatgaagctcttgcatctgatattcttattagctttgactactggaatctctgctgttctaatctacattatcggcgtctctaatctctacgagtctaatcgttttaccaatgaagatttagaggcgttgcagtctttgcagaacggattccagaagtgcgtaagtgcaaatggtttgggactacaagctgctatgggtagagattattgcaaagtttctataaacttccctaaggatactgtccccaaatggaaagatcccaagtctggagagcttgaaggattgtcatatgagtttgacctgtgtgaagcagtaactacatgggaacaagtcaggaatagctctacaatactca

SEQ ID NO: 88617 - DNA, 262 bp, Arabidopsis thaliana columbia
gagatagaccaccgggtagaaagactagagtatgcaggagttatggaactcgcatctgacgtgcagttaatgctaaggggagcaatgcaattctatgggttttcacatgaggtgagatctgaagcaaagaacgttcacaatctgttctttgatcgattaaagatgtctttcccagacacagatttccgggaaccaacgaatgccctttccgtttctggctcagccccaactttggtgtctacaccaaccccaagaggaccag

SEQ ID NO: 88618 - DNA, 962 bp, Arabidopsis thaliana columbia
  unsure (1)..(962): unsure at all n locations
tctctacgactcactattgggaaagctggtccgcctgcaggtaccggtccggaattcccgggtcgacccacgcgtgcgcggacgcgtgggttgtccggtaaggctcggaggaaaacctaattcgtccggagaatctccacctcactctcgccaaacgcatctctgttgtagcttgtgatggatccaacacagaacacaagtgcagggattggtgggagcaatggtacaatcagatatcaaaccaatgatgggacttcaactgtgaccgttgctgatgattcaaaggagaatctttcccaagtcataaactctattgagaaaactttaggagtccttcatcagttacaccttaccgtcacttctttcacacccgcgtctcaactccatctcctccagcgccttaactctcttgtgatggagctagataacatgactaagttgtctgagaaatgcaacattcaaatccccatggaggttcttaacttgattgatgatgggaagaacccggatgagtttacgaaagatgttcttaatagctgcatagctagaaatcaagttactaagggcaagactgatgcttttaaggatttgagaaaacatattctggaggagcttgaacagaatttccctgatgaagtcgatatgtatagagaaatccgtgctagttctgctgctgaagcgaaacggttggcgcaatcgcaaagtgtgttaccaaatggggatgcaaaggtcaagaatgagctataagagcccaaaggatcctttttatgtttaccttgtactcttgtagaatataatgactgagtcgatgaatgtgatgtaacacgaacaatcccaagtggaatttctaataatatctgttggttctcttcaaaaacaccaaaaaagagnnnnnnnnnnnnnnnnnnnnnnnnnnnnnnnnnnnnnnnnnnnnnnnnnnnnnnnnnnnnnnnnnnnnnnnn

SEQ ID NO: 88619 - DNA, 423 bp, Arabidopsis thaliana columbia
ggcatgtcactctgttgataaacaagactgatctggataatgctccacctggtccaaaggttgttcttgcttccatggctagtctcgaagccggttttgctcgagagatattcgtggagtgggcaaatgatcccacaaatttagtcctctttactgaaacaggccagtttggcactttagctcgtatgcttcagtcagccccacctccaaaatttgttaaagtcaccatgtctaagagggttcctttggctggggaagagttaattgcatatgaggaagagcaaaacagactgaaaagggaagaagctttgcgagctagcctcgttaaagaggaggaaacaaaagcttcccatggatccgatgataattcaagtgaacctatgatcatagataccaagactactcacgatgttattggttctc

SEQ ID NO: 88620 - DNA, 315 bp, Arabidopsis thaliana columbia
cccacgcatccgtccacattgcataatcagcctttattaccctatcaggaatgggacattgacttctcagagctgactgttggaactcgggtggggattggtttttttggtgaagtttttcgtggagtatggaatgggacagatgttgcaatcaaattgtttctggagcaagatcttactgccgagaacatggaagatttctgcagtgagatatcaattctcagccgtgttcgccacccaaatgttgtactacttttgggtgcatgcacaaaaggtccacgcttagccatgatcacggagtacatggatctggga

SEQ ID NO: 88621 - DNA, 484 bp, Arabidopsis thaliana columbia
cggacgcgtgggtgctgatggaaattcttgtacatgtgctgaggatgaaagtggcgtctcgaaacgccagcaaattaggactgaagttgtacagactggtaaaagagcatctaatttagcagctggactagctggaagtatattaccagtagaggctggtaaaccgctggtggtcccaaagacggttgagcatttcacccggccatcgcttcttccgcaacatgtttcctctcctgctttgccagggaaagcagattctgtaaatcatgcttctgctattattaaagaagacgtgggggtacctattggtgatcagatattcaaggctggtgtaaagtcttcaaatgtgaaagtcatcagaagagagcaccttgctaaagtctatcctaggtccgctgaccgagttcctataaacagctctccaggtactaagcaagcttcaaatgacgttgctgggaagtcgtttgaagctcatgatttactc

SEQ ID NO: 88622 - DNA, 580 bp, Arabidopsis thaliana columbia
gcttaagggatacaaaagtttcagacagtgtgctatgtgaattccccggctctaccttggaagcacttgatatttcaaataccacggtcagtcattcattcgttagttatagtattatatatcttacttccacaggacatagccacattcatgtgatgctctgattcagtagtccatagcacgcgtccggccccactgcttggagatttttacagatatcttggatggctcttgctcgtgtaattagcagaaatcctaatctaaaaaccctcaaagccaggggatgtaaaaatctactccaattagaagttgacggcagaactgacaatttctctccgttggtttctggtcaagaggtgtttaaatgtttaagcaaggggagtggattggaggagcttgagattggttgggggttttcttatttctcttttgagtctttgagacctgcagcttcgttcctacgagttataagtgtgggtttgggtgcttccttaggtgaagatgttttaaagcttctaccttcaacttgtcctttgctagagtctatcgtcctccattttcaggaaatatctgattctgc

SEQ ID NO: 88623 - DNA, 438 bp, Arabidopsis thaliana columbia
gcgtgggcggacgcgtgggcaaaccgtcttctcatctctgcctctggatttaactctcccttcacagttgcatagaatcttctgtcgccggcgaattgttcaaatcgtcggagtcgaagaaactgctccctcttttagtcaattctcgcttcactccctcaatataatgcgatttctcaaccggaatatctgaatctctcggtggttacctctgatatatcgccaggaactgaactcctactcgatctctatcaacaatgccgtccttgtagaactttggatccaactctctgattccgtcaatttccattaatatcagctcagcgaaggaactttgagtagaagaagataatgtcacattcatgggatggtcttggggagattgcgtcagtggctcagctgactggtttagatgcggtcaagttgattggtctcata

SEQ ID NO: 88624 - DNA, 951 bp, Arabidopsis thaliana columbia
  unsure (1)..(951): unsure at all n locations
nnnnnnnnnnnnnnnnnnnnnnnnnnnnnnnnnnnnnnnnnnnnnnnnnnnnnnnnnnnnnnnnnnnnnnnnnnnnnnnataacatcttacaaacaacaacaatcaacaatggcaacttccatgatccctatattcgtcaccttcatgctcgtggccgcccacatggccctcgccgatacaaatatgcttcaagacttttgtgttgctgatctctccaacggtttgaaagtcaacggatacccttgcaaagacccagcaaaagtaacaccagaagacttctacttcataggcttagccactgctgcagccacagccaactcttcaatgggctcagctgttacaggagccaacgttgagaaagtgcctggcctcaacactctgggagtctccatctctcggatcgactacgcacctggcggacttaacccaccacatcttcacccaagagcctctgaagccatcttcgtccttgaaggccgtctcttcgtcggtttcttaaccactaccgggaaactcatctccaaacacgtcaacaaaggagacgttttcgttttccccaaagctctcctccatttccagcagaaccctaacaaagctcctgcttccgtcctcgctgctttcgatagccagcttcccgggactcaagttgttggaccatctctgtttggttctaacccaccgattcctgatgacctgcttgccaaggcgttcggggctgcagcaccagagattcagaagattaagggaaaattcccaccaaagaaataaataagtttcagaccagagcactaatctaataatgatatacaatgatgaacataaaaatgtaaacttctaagcaaaagcttgtaactttttttcattcttttctttattattgtagatactcttttgactatatttggcccattgattacgatgagaccagttttcacaaaaaaaaaaaaaaa

SEQ ID NO: 88625 - DNA, 687 bp, Arabidopsis thaliana columbia
  unsure (1)..(687): unsure at all n locations
cttcacaccgaacttgaatctactccaccgagttcttcaagcttgcatccgttaacaccgactccacaaacgctgtcttaccgtgttaaggaagagttgtgtccatcttcctccttgccaagtcctaaaggccaacaaccaagagttgaggttagattaagagaaggaaaggcagtgaacatacacatgttctgtggacgtagaccaggtcttttactttccaccatgagagctttggataacttaggattggatgttcaacaagcggtgattagctgtttcaatggttttgctttggatgttttccgcgctgagcaatgtcaagaagaccatgacgtgttacctgaacaaatcaaagcagtgcttttagatacagcaggttacgctggtttggtttgattgcgaagcagaaggaagcatctgtgtggaacagagctagatctaagtccttgttctgttttagtcagcaattttcttacttagtttcatcaatttcaatcatgtatggaagatgataactgttttattttagctatgagaacatgtgtttggggaacaatagttgcaacctttgagcaaaatgccattgtttctcaataaaaaaaaaaaaaaagnnnnnnnnnnnnnnnnnnnnnnnnnnnnnnnnnnnnnnnnnnnnnnnnnnnnnnnnnnnnnnnnntgtaccta

SEQ ID NO: 88626 - DNA, 1444 bp, Arabidopsis thaliana columbia
cacaaagagaaaacaaaaaaaaagtaaagaaaatgaaaattgtgaagcggtgaaaacaagagttccaaaaaggtggctcctttttgtttctggagatgcgttattgtgacccttctttgaaatttagggttcattttctcagatttcgagttcgttgtgtttgaatctctattgggtttactttcttattcgatttgggggaaatggctgattggtatcagcttgcacagtctataatctttggtttgatcttcgcttaccttctcgctaagctaatctctatcctcctcgcttttaaagacgagaatctctcactcactcgtaaccacacgactcaatcggagtatgagaacttgcgaaaggtcgaaactttaattgggattagcggcgagactgattctcttatagctgagcaaggtagcttgagaggtgatgaagatgaatcagatgatgatgattgggaaggtgtcgaaagtacagaacttgatgaggcatttagtgctgctacggcttttgttgctgctgctgcatcggataggctttcgcagaaagtttctaatgagttgcaacttcagctttatggattgtataaaattgctactgaaggaccttgtactgctcctcaaccatcagctcttaaaatgactgctcgtgccaagtggcaagcatggcagaaattgggtgctatgcctcctgaggaagcgatggagaagtatatcgaccttgttactcagctttacccagcttgggttgaaggtggctcgaaacgaagaaatcggagtggtgaggctgcaggcccatgggaccggtttttagctcattggtgtacgaagaggaatctgacaatgagttgaagattgacgccatacacgcctttgctagagaaggagaagtcgagaatctattgaaatgcatagaaaatggcatacccgtaaatgcaagagatagtgaaggtcgaacaccactgcattgggctatagaccgtggccatcttaacgttgctgaagctctggttgataagaacgcagatgtgaatgctaaagacaatgaaggccaaacctctctacactatgctgttgtgtgcgaaagagaagcactcgccgagtttctggtgaagcagaaagctgatacaaccattaaagacgaagacggaaactcgcctcttgatctctgtgaatcagaatggtcttggatgcgagagaagaaggattccaattagtgttttttaagtctttaaaattgtgtgtcaaagctagatgcttgtgtttttcttacatttcctctgagcctctttgcttcctcttaagcttatgttttaacatacaacaacacaagttacatatgatatagtagctctagtttttattggttactatattgaacccagagagatcatcatcatcaatcatcataactcaataatagttttttttttgttaaaaaa

SEQ ID NO: 88627 - DNA, 512 bp, Arabidopsis thaliana columbia
agaaatgattgtagttttattgttggaaagccagtcgaacactcgggagttttggcatcttcttcaggactctttccacgcccttggtcaggtacatcaactacgtcagatgtgctgcagaaatttgtcctcttggggacagtggtagcaaaggctttacaagatggacgagtcttagaccttccactttccaaagccttctacaaattaattctcggacaggagttgagttcatttgacatccacttcgttgaccctgaactttgtaaaacactggtggaattgcaagctctggtacgtaggaaaaagcttttcgctgaagcacatggtgattccggagcagccaagtgtgatttaagtttccatggaacaaagattgaggacctttgtcttgaatttgcattgcctggctacacggattatgatctcgctccctattctgcaaatgatatggtaaatttggataacctcgaggaatatatcaagggtattgtcaatgccacagtatgtaa

SEQ ID NO: 88628 - DNA, 323 bp, Arabidopsis thaliana columbia
tccgaagaacttcaacggcgagctcgggaaattaatactctccgacgatttgattcgttaaccaggctttgtataattaagggttagtttccaatcttgcaatggtgtctagtagtgaagttcttagcctatgtcgtgccttgcttcgagcgggacgtcaattccctgattacaacattagggagtacagtaagcgaaggaccttggatggcttccgcatgaacaagaatctcactgacccatcgaacgtgactgacgcttatgctgaagctaaaagacagctttttgttgctgagagagtgctcaaggtttacttggcatat

SEQ ID NO: 88629 - DNA, 323 bp, Arabidopsis thaliana columbia
cggacgcgtgggacgatgaacagggtgctcgcaaggaatcttaggacaagtgtctgtggaacaaggattttgcagaggacttgttcgactgttgtgacacatgatgtttctacttcttgttccaatgagagcaatgcattaaataattccactgacgatggtccacaacatgacattgctattgttggtggtggaatggttggaatcgctttagctgcttcattggccagcaagccattgacaaagcacttgaatgtcgctattattgacaataatcctcttttggggagaagaaatatcatagagaaagggcatcaacctga

SEQ ID NO: 88630 - DNA, 447 bp, Arabidopsis thaliana columbia
gggaaggtccaaagcagtttggttctttagcggagtacacggccgtggaagagaagttattagctttaaaacctaaaaacatcgattttgcgcaagctgcagggcttccgttggcgatagaaaccgctgatgaaggtttagttaggactgaattctcagccggaaagtcaattcttgttcttaatggtgccggaggagtagggagtcttgtgattcagttggcgaagcacgtgtatggagcttcaaaagtagctgcaactgcgagtacagaaaagctagagctagtgagaagcttaggtgctgatttagctattgattacacaaaggagaatatagaagacttgcctgacaagtacgatgttgtctttgacgccattgggatgtgtgataaggccgtgaacgtgattaaggaaggagggaaagttgtggcattgactggagctgtca

SEQ ID NO: 88631 - DNA, 562 bp, Arabidopsis thaliana columbia
  unsure (1)..(562): unsure at all n locations
ggacctgnccttttnaaaccctaggcccgattccctttagttccctcaaggagaatatagaagacttgcctgacaagtgcgatgttgtctttgacgccattgggatgtgtgataaggcagtgaaggtgattaaggaaggagggaaagttgtggcattgactggagctgtcacgcctcctggttttcgattcgttgttacatctaatggcgatgttttgaagaaacttaacccatatattgagagtgggaaggtgaagcctgtggttgatcccaaaggaccgttcccattctcacgcgttgctgatgctttttcatacttagaaacgaaccatgccacagggaaggtcgttgtttatcccattccttaaggggctggcttgagtgtagtagcctttatctatctatgtgtataagcatagcaagtgttatcttctctttgtattaatgagggtggaaataaaagtaaatgctctttaaagcttgaaaacgtggacgaacgcatggatcggccgctctagaggatcccaggttacgtacgcgtgcatagcactgtcataaattt

SEQ ID NO: 88632 - DNA, 520 bp, Arabidopsis thaliana columbia
  unsure (1)..(520): unsure at all n locations
atgtcagtgagctcaatgcttatgatgtgaggagtctcactcattaggctccggagggtatgctgtgtatgattgtggctggatatcatgtgtgcacatgtgagcggatatcactatgactcaggcaagatctaataccattatttatacgagatgttagtacgctccatataggggtacctggtatgcctggaggaaccggtcgtcaattcacgggtcggcccacgcgtccgcttgagatgactgaaaaggaagtagaaattttcttctaggagagacattgaagtgaagaagactttgtcactctgtaattttgcaccattagttgttgtttcattatttatgacgttgaaatgattcaagcgagagataaaacatttgttgttccttacggtgagatttaattttaattcaaggaagttttcatgaaaaaaaaaaaaaaaaaaaagnnnnnnnnnnnnnnnnnnnnnnnnnnnnnnnnnnnnnnnnnnnnnnnnnnnnnnnnnnnnnnnnnnnnnnn

SEQ ID NO: 88633 - DNA, 879 bp, Arabidopsis thaliana columbia
tttcctctgttcgtgtcattcttctcgtatatctcgagagagagccttaaggaaattaaaaaaggttggattttgatcgatgggttcttcgtcaggacaacccgaatttgattacttgtttaaggttttattgatcggagattctggtgttggaaagagctctcttttgttgagtttcacatctaatacctttgatgatctttctccaacgattggtgtggattttaaggttaagtatctgacaattggagaaaagaaactcaagcttgcgatttgggatacagctgggcaagagagatttaggacgctaacaagttcgtattacagaggagctcagggtataattatggtatatgatgtgacacgaagagacacgttcacaaacctatcagacatatgggctaaggaaatcgacctctattcgactaatcaggattgcattaagatgcttgtcgggaataaagttgataaggagagtgaaagagctgtttctaaaaaagaaggcatagactttgctcgggagtacggatgtttgtttctggagtgtagtgcaaagactcgagtcaacgttgagcaatgttttgaagagcttgttcttaagatattggaaacgccgagtcttactgctgaaggttcgtctggcggaaagaagaacatcttcaaacaaaaccccgcacagaccaccagtacctcgtcgagctactgctgctcgtcttagacatggttttacagtttatgacaaattacactcttgctcatcatcttgttcttgattgtctctttgttttcctaaaccgcagcatcttggatgtaaatctcaaccctgatttgaaagttgtgttcactagtttcgaatctcggatttttctctgttctttg

SEQ ID NO: 88634 - DNA, 536 bp, Arabidopsis thaliana columbia
  unsure (1)..(536): unsure at all n locations
cnnnnnnnnnnnnnnnnnnnnnnnnnnnnnnnnnnnnnnnnnnnnnnnnnnnnnnnnnnnnnnnnnnnnnnnnccacgcgtccgatcagtggtataaatttgatgatgaacgagtaaccaaggaagatttgaaaagggctttggaggagcaatatggtggtgaagaagagctaccacagactaatcctggtttcaataataaccctcctttcaaattcacaaagtactcgattgcttacatgcttgtatatatccgagaaagtgacaaagataaaataatctgcaacgttgatgagaaagacatagcagaacatttaagggtgaggctaaagaaagagcaagaagaaaaggaagataaaagaagatacaaggcacaagctcacttatataccataattaaggttgcaagagatgaagaccttaaggaacaaattgggaaggatatatattttgatcttgtggatcatgacaaagttcgcagtttccgtatccagaaacagacaccatttcaacagtttaaggaggaggtagcaaaa

SEQ ID NO: 88635 - DNA, 517 bp, Arabidopsis thaliana columbia
tagggcacactataaaaaactatgacgtcgcatgcacccgtccgtaagctcggatttcggctcgagcaagtctctctaactgggagaggagatagaagacatctcatcatcaatctccggatccaatccaattctgcatcgactcttcagagttttattgggtcattggagatttttttcggttgaggatggctaacaatgaggagcatcctcctcgagggaatgaatgggaagtcgtctcgctcacttcatcagcttatgctgctgctcctggtccgtataacgttgaatcaagagatgtgcgcaagtatgatgcttactatggagcggaaacttcacgtgatctgtacatgtctgaacactttgtattcccacctagtgagcatgagaatttacccattgatgaatctttattcgtggcggagcaaagaaaggatggccgagacttgatgctggaaggtcagggattgtctgatcagtttcattatgaagctggaaacaaccaacagagtatcta

SEQ ID NO: 88636 - DNA, 917 bp, Arabidopsis thaliana columbia
ttttcccccaaaaagaaaaaggatataagaagataatggcatctagagaaatgctgatcataatctcggtcctcgctactacactcattggtttaacagtagctactgaccataccattggtggtcctagtggttggactgtaggagctagtcttcgaacttgggctgcaggacaaacatttgctgttggagacaatcttgttttctcctaccctgctgcgttccacgacgtcgttgaagtcacaaaacccgaattcgatagctgtcaagcggttaaaccgcttataacgtttgctaatggaaactccttggttcctcttactactcctggaaaaaggtacttcatttgtggaatgccgggacattgtagccaagggatgaaacttgaagtaaacgttgttccaaccgcaaccgtagcaccaaccgcaccgcttccaaacaccgtcccatctctaaacgcgccttcaccttcttctgttctacctattcaacctcttttacctcttaaccctgtcccagttctctctccatcttcttctactccacttccttcctcctctctgcctctcattcctccactttctccggcactatctccggctactgcagcggggacttctctgccgttattcccaggctcaccaggtagctctagcagcacaacatccaccaaaaccgtcgggaccttcccttctagtactaccggtacaacggccgatcttgctggcgcagactctcctccggctgactcctcctctgccgcgaaaacacttgttttaggatttggattcatggttgctatgatgcttcatttgttctaagtgttctttttttaagtggagagaaatttgtttgtagagggaaatgttgtttgtgtttacttgggtgctttcttgtgaaatttaccactatctccg

SEQ ID NO: 88637 - DNA, 1395 bp, Arabidopsis thaliana columbia
cgagctctaatacgactcactatatggaaagctggtgcgcctgcaggtaccgggccggaattcccgggtggggccggcgcgtgcaattctaataagaaacagagaatcatcaaatcaaatccctaaaaattgatttttgaaatggagaagaacgcatcgacttcgtcgttgaaggacttgggtccgagtggtctagatctaaccagcgcctttttcaaaccgatccacaactccgatccttctctcccttcaaaccgacgtaccaaagtctccgtcgtcggagtcggaaacgtcggaatggccatagctcaaaccatcctcactcaagatctcgcagacgagatcgctctcgttgacgccaaacccgataagcttcgtggcgaaatgcttgatctccaacacgccgctgctttcctccctcgaactaagatcaccgcttctgttgattacgaagtcaccgctggatctgatctttgtatcgtcactgctggtgctagacagaatccaggcgagtctagactcaatttgcttcagagaaacgtcgctctcttccgtcatatcattcctccactcgctaaagcttctcctgattctatattgatcgttgtttctaatcctgttgatgttttgacttacgttgcttggaaactctctggctttccggtgaatcgggtgcttggatctggtactaatctcgattcttctcggttccggttcttaatcgcagatcatctcgatgttaatgctcaggatgtacaggcatttattgtgggagagcatggagacagctcagtggcattgtggtcaagcattagtgttggaggcattcctgtcttaagctttttggagaagaaccagatagcttacgagaaacaaactcttgaggacatccaccaagctgttgttggtagtgcctatgaagtgattggactcaagggttacacttcttgggccattggctactcagttgctaatctggctcgtaccatcctccgtgaccagcggaagatccacccggttactgttcttgctcgtggattttatggtgttgatggtggtgatgttttcctcagtctgccggctttgcttggaaggaatggtgtagttgctgtgaccaatgtgcatatgactgatgaagaggctgagaagctgcagaaatcggcaaagactatattggagatgcagagccaattgggactttgaatatccacatctatatatgcatcaatttcaattttataactagtatcccacgggtgatagtgtcgatgttgatcactatatgttatgtaaatgcttgttcatgcagagtaatcccaactttgagttctattttgaaaaaaaaaaaaaaaagggcggacgctctagaggatccaagcttacgtacgcgtgcgt

SEQ ID NO: 88638 - DNA, 512 bp, Arabidopsis thaliana columbia
actatagggacagctggtacgcctgcaggtaccggtccggaattcccgggtggagccgcgcgtgcgatctctatattcttcttcgatctaaccaccgccgatgaatcgccgatgattttccctcttagctactcttccttaccaccgcgaccgcgagtcgaggattttcgccgccggcgccttcatcaatctcagctccctggcgcgcacatgaaactctacgatgacctcctctccaacggctactacactacacgattatggattggaacaccaccacaagagtttgctttgattggtgatactggaagtactgttacttacgttccttgctctacttgtaaacagtggggggaagcatcaggatccaaagtttcaaccagagttatctactagttaccaagccttgaagtggaatcctgattgtaattgggatgatggggggaaattatgtgtctaccaaagaaggggtgcggaaatgagttccagtagcgggggttttgagggagggt

SEQ ID NO: 88639 - DNA, 915 bp, Arabidopsis thaliana columbia
aacgaatcacaatttataatcaagaaaaacggacaagagagtaagaagaattatgtcgccttcttgttcatcttgtgtcaatgtgttactcatcatgtgccttatgcttctgagtttatcagctgatgcgtacaagaactacactgtgggagagtccacgggatggttcgatattcaagagagaccctctgctaattatcagaaatgggccgattccaaatccttttctttgggtgatttcctcatattcaacacagatagcaaccattcggtggttcagacatatgatttcaaaacatacaaagattgtgattacgacaacaatgaaaacaatgatacaacagagtggtcggctgcaaatccttcagcaacatctcctgttcccgtctcaataagtgttcctcttgttaaagaaggttccaattatttcttctcgggaaactatgatggcgaacaatgtaaattcggtcagcattttatgatcaatgtaacacatggtcagggcttaccagattcatcatcaccagatgatgctgctgcacctggacctagcgaatcctctcagtccggtgatgatgaagttgctcctgataccatcgtcccggccaatttcgatcatcctaaagatattgaaagtgctgatgatgataaagaggttcatagtaaaaaaagttcttcttccacaacaaaaactagtttgttttgttttgtctttatggggctctttgcatcattttaatcaaatattctttcatatttgtatgtatatgcattctgttttcttctttttcataactaggataataataatcaaagaaacaaaagagtattagtggaaattttaaagcagtgagggaataaagaaaaaaagagtaaagatcatgagttatcctttttttaaaaaaaaaaaaaaaa

SEQ ID NO: 88640 - DNA, 1716 bp, Arabidopsis thaliana columbia
  unsure (1)..(1716): unsure at all n locations
nnnnnnnnnnnnnnnnnnnnnnnnnnnnnnnnnnnnnnnnnnnnnnnnnnnnnnnnnnnnnnnnnnnnnnccacgcgtccggaaaaagtttaatagtaaaataatcgatcctcttctcttctcttctctgaggctcgttggaaatctgaattctccgatcgaatcgaaccaatcgcagaggctaagaagaggacctttgagagaatctccgagtcaggatcagaaaaaacggtgatacggaagctagttctagggctaatgggcgccgcgggctccaaactcgagaaagctctcggcgaccagttccccgaaggtgaacgctactttggattcgagaatttcggcaacacttgctactgtaacagcgttttgcaggctctttatttctgtgttcctttccgtgaacaactgctcgaatactataccagtaataaaagcgtggccgatgctgaagagaatcttatgacctgcctggcagacttgttttcgcagataagttcccagaagaagaaaacaggtgttattgcgcctaagcgatttgtacagaggttgaagaaacaaaatgagctgtttcggagttatatgcaccaggatgcacatgaattcctgaattatttgctgaatgaagttgttgacatactggagaaagaggcaaaagctacaaaaactgaacatgaaacctcgtcatcatcatctcccgagaagatagcaaatggactgaaagttcctcaggcaaatggtgttgtgcacaaggagcctattgttacatgggtgcacaatatttttcagggcatacttaccaacgagacaaggtgtctgcgatgtgaaacagtgacagcaagagacgaaacattcctagacctaagccttgatatcgaacagaacagttcgataactagctgtttgaaaaacttcagctccacagagacgcttcacgctgaagacaaattcttttgtgacaaatgctgcagcttacaagaagcacaaaagcggatgaagatcaagaagccaccacacatcctagtgattcatctaaaacgattcaaatacattgaacagctaggccgctacaagaagctctcctatagagttgtcttccctttggagctaaaactgagcaacacagtggaaccatacgcagacgtggagtactctctgtttgcagtggtggttcatgtgggaagtggacccaaccatggtcattacgtaagccttgtgaaaagccataaccattggctcttctttgatgatgagaatgttgagatgattgaagaatcagctgttcaaacattctttggatcgtctcaggagtattcgagcaatactgaccatggttacatcctgttctatgagagccttggaccgaccaagtgaaagctgagaaagcagaaagaaggactttcttcgttttttttctcttaactattattagtaatggtatatgtttgtcttaaaagtcaaactcaattgacagtaactttttttttttttggtttttgttctttctctgtgtctctctcccaaagatatttggtgagttttaaaattggaagttttaactggaatttgtatactttgaaaaaggccatgtacagtttatggcaaataactccttgtctttgtatctttagcaaaggaagaaggttacaatnnnnnnnnnnnnnnnnnnnnnnnnnnnnnnnnnnnnnnnnnnnnnnnnnnnnnnnnnnnnnnnnn

SEQ ID NO: 88641 - DNA, 544 bp, Arabidopsis thaliana columbia
  unsure (1)..(544): unsure at all n locations
nnaccactcacctgaggggaagctactacgcctgcaggtaccggtccggaattcccgggtcgacccacgcgtccgcccacgcgtccggcgaagttggagaagattgatggaaagccgaccgggagttttggtcgtcggatcctctggcgtcggcaagcgcaccctcctctctcgattgctctctgtggaatttgaggattcatcggagtcatcatctcatacagaagttcatggctggacgattaacactaagtattacactgcggatgtttctgtatgtatatcacatatttgcgatgaatactctctacccaatctccctaactcacatccactggtggcgttagttatggtcttcgacttgagtgagctgtcaacccttgttgctcttcaagactgggtttctcatactgacatcaacagttttgatatattgttgtgcattggtaacaaagtagatcgtgtccctcatcaccttgctcatgatgaatatagacggcgccttttgaaggcatcagacccctctagagatctgtattcggac

SEQ ID NO: 88642 - DNA, 449 bp, Arabidopsis thaliana columbia
gaattattaaaaaaaaaaaaaaaaacacattgtcatatctctggtcccatatgtgatatgtcaccgtccttctccatcgccaccaccgtctcaccggcttctctagccgggactctggcctcgaactcaaagaatgttttgtgtagtttacattcaaagaacaatgatattaccaagacaaataggaatctgaagtttagagcttgttctgtttctggagggtataacaacaatacatctgtggacaatgtaccttttcctcgtgattacgtcgagctcattaatcaggccaaagaagcagtggaaatggctttgaaggatgagaaacagttaatggtgagttttgttgcaatggtctgttttaaaatggatgtacgaaaacacgttatttttcgtgatccaaaggaacccttttacaggaaattgagttcccaacatctggtctagca

SEQ ID NO: 88643 - DNA, 422 bp, Arabidopsis thaliana columbia
aagaagaagaaaaaaaaaaaaaaaacgaactacgtaagatgacgaagacgaagaaacaaagataaaggctttagatttagctgcaggggaggtggcggaacaaaaccctaatcctaattttccccgaatatgccatttttgaggattgtgagacttctcttacctggaatcagggttttgattagaagatctctaatttggttgttgtagatgcatctccgtgaaatcattccctcttggatctaccagttatttggttgcatgggaggttgttttggatgctgcaataaaccaccgcttatagttgcagtggatgagccgtctaaagggttaaggattcaaggtcgtttagtgaagaagcccagcgtatcagagggacttctggagcacaagcacctgcgagatggataatagtacacttc

SEQ ID NO: 88644 - DNA, 2285 bp, Arabidopsis thaliana columbia
gttgttgttggttgagctacccagccagtatcaagagaggaaggtagagaggagtgagagagagctttgggttcgatttcatgtcgtagatctttcactctgggtttgcgttccacaaaatcctaattcgcggaactctggatttgatcggcgatggcggtaggcgatcagacggagcagaattacttgccgaagaagaagaaatccgaaacggaagatgataagaggaggaagaaaattgttcccgggagcttgttgaaagctgtggtgcgacctggaggaggtgattcgagccccgttgatggtgatcaggttaataattttggttttgtttttgcttctcgtggtcaattttggttgtttatgagtgttttttcgtcaggttatttatcactgcactgtacggacactggatggtgtagttgtggaatctacgaggtcagaatctggagggagaggtgtaccgatcagagatgtcttgggaaagagcaaaatgattcttggattgctcgaaggaattcccacgatgcacaagggtgaaattgcaatgttcaagatgaaacctgaaatgcactatgcagagattgattgtccagtctcagctccagaaaattttccaaaagatgatgagcttcattttgagattgagttgttggatttttctaaagccaagattgcaagtgatgatctgggggtcatcaagaagattctaaatgaaggtgagggctgggaatctcccagagaaccctatgaagtgaaagccagaatatctgctaaatccggtgatggacacgtgatcttctctcacacagaagaaccttatttcttcacatttggaaaatctgaggtgcctaaaggtcttgaaatcggaattggaaccatggctcggaaggagaaggcagtgatatatgttcgcaagcagtacttgactgaatctcctttgttgcatatagatcaagaccttgaggaagttcattttgaggttgaactggtacatttcattcaggtgcgggacatgcttggagatggacgtctcataaaacgtcgaattcgagatggaagaggcgagtttccaatggattgtcctctccaagatagtcgtttaagcgttcactacaagggcatgcttctcaatgaagagaagactgtcttctatgatagcaagattgacaataatgatcaaccgttggagttcagttcaggagaaggactggtccctgaagggtttgagatgtgtactcgtttgatgctacctggggagattgctcttgttacatgcccccctgattatgcatatgacaaatttccgagaccacctggcgtgtctgaaggtgcacatgttcagtgggagattgaactccttggtttcgaaacgccaagagactggactggcttgaacttccagagcatcatggacgaggcagataaaatcagaagcacgggtaataggcttttcaaagaaggaaaatttgagctcgcaaaagcaaagtacgaaaaggtgctccgggaatttaatcatgttaacccacaagatgaagatgaaggaaaaatatttggtgacacaaggaatatgttacatctgaatgttgcggcttgcttgcttaaaatgggagagtggaggaagtctatagagacatgcaataaggtcctagaagcaaagcctggtcatgtgaaaggtctataccgccgcggaatggcttacattgcaggtggagagtatgatgacgctagaaatgacttcaatatgatgatcaaagtggataaatcatcagaagctgatgcgaccgctgctctattgaaactgaagcagaaggaacaggaagcggagagcaaggctagaaaacagttcaaaggattattcgacaagagaccgggggagataaccgaagttggttcagaaataagagaggagtctaaaactatagaagaagtagatgagacaaaggataatgatgatgatgaaacactggaagaaggagctacgacagtgagcacggaaaggaagaggaaatggtcggagaaagcctggccgtttctgaagaacgtgatgctccaaatcggaatccagcttggtgttgttctgatagggattttgattttccagtttgtgagcgccaaatttacatgagagagatatgaatgaataaacaaaccaacggcactgtagactcagaaaatataaaactaatggattaaacgttaagcttaaaaaaaaaaaaaatggtttagttaaaaaaaaaaaaaaaagggcgaccgctctagaggatccaagcttacgtacgcgg

SEQ ID NO: 88645 - DNA, 436 bp, Arabidopsis thaliana columbia
tctctaagtctctctatactttcatttctcgtttcataatattaggaaacttgttagtgtttaaggaaacaaaaggaagaagatgaagtatgtggttgtttcaggaggagtagtgagtggactcggcaaaggagtcacggcaagtagcatcggactcatcctcaaatcctgtggcttccgagtcaccgccattaaaatcgatccttacttaaacattgatgctgggaccatgtcacctattgaacatggtgaagtttacgtcttggatgatggtggcgaggttgatctggatcttgggaactatgagaggttcatggatattaagctgactagtgaaaacaacatagctactggaaaagtttataagcatgtgcttgagaaagagaggagaggagattatcttgggaagactgttcaggttgttcctcatattact

SEQ ID NO: 88646 - DNA, 529 bp, Arabidopsis thaliana columbia
  unsure (1)..(529): unsure at all n locations
gaaagctggcacgcctgcaggtaccggnccggaattcccgggttgacccacgcgtgcgggcacgcgtacgcgaaaaaacaatggagacgccacttcttgtgggactcgaactacgttgtcctcctcatctcttcaacactcactctcgtccctcttcatctctctccattcccgccttatccttacgaatcctcacgccgacggcggcaacgacatcttccgctgttattgaattaccggcgaacgtagcagaagctcctcgttccaaacgccattccaattcatacctggcgagaaaatccgccatttctgaagttcaacgctcctcggattttctctcttctctgcagagattagcaacagttttgaaggtacaagatttgaatgtaattttgcgtgattttggaatctctggaagatggcaggatcttatacagctctttgaatggatgcaacaacatggaaagattagtgtttcaacttacagtacctgcataaagtttgttggtgccaaaaatgtcttcaaggc

SEQ ID NO: 88647 - DNA, 975 bp, Arabidopsis thaliana columbia
  unsure (1)..(975): unsure at all n locations
ttcctcacacgatcaaaaagatagttcaaatttttctttaaagcttaagaaaccactcagtggaaaccaagactaattaaggctaatggtttctcgacaagaaggaaccctctactctagaaagagggatttcacagtctgtggagaagagtttcacaattcattcaagaagagcaaacaagaagatcaatcacagagcactctgttcaatgaacgaccaaaatcggagagtatgagatcaattacctttgattttgaacttcatctccacactcctctaccatcagattggcaaactaagggatattcaagaacatctgatgagcatagggcatatcccaaagatccagtgatttttggacaacctaagatgagcctagaccttgagctgaacctttcaccttcaggttcaccttcacgaaccacaacgaagaaatatgaatcctcctcaattcacaatgaaacagtatcatcatcaaagattaaagttttgacgaacacaagtaagaagagcataattgggacaggactaagtcgatcaccatcctggctagcgtttgaaggtggtgatgataacgatgttgatcacaaggggcaagagatggtaacaacagtttgcatgaaatgccacatgctggttatgttgtgtacatcaactcctgtttgtcccaactgcaagttcatgcacccacacgatcacagctctacaaaactgtttaaaccatcaaatttgcttaggcttctatgctaggctctttcaaggttactgaatctataaaatttgtacggcagataataagccaagagactagatatggacaaagttatgtatatactaaaagtaccagaaagtttgtattaattctctgcttctatgaacggcatgcttaggnnccaaccatancnggatttggaccggcgggatcccggccaaaggtgggggngcctngaaccnangcccccanggtccatncc

SEQ ID NO: 88648 - DNA, 396 bp, Arabidopsis thaliana columbia
gtcgaaaatcaccaacccgattataccatctcttttagtctctcatctctacttctctaagctaaccgaaaccttttggtgggaatcgtcgaaagttttcaagacacctgaattgcatgtatgttgagacaaattccaacctgcaaaggtgggcgctttacacgagttttgcaatctatcggatcagttattagagaattttcagcatctgcaaatgctttgcaagactgttggaaaaatgggaatgaaagtaaagagattgatgatgttcacacacttttcagatattgcactaatttgcaatcagccaaatgtctccacgcacgtctcgttgtctccaaacaaatccaaaatgtttgtatctctgctaaacttgttaatctctattgttacctt

SEQ ID NO: 88649 - DNA, 644 bp, Arabidopsis thaliana columbia
  unsure (1)..(644): unsure at all n locations
nnnnnnngttctagatcgcgagcggccgcccgcgatctaggacaaaaaaaatgcagatcttcgtcaaaaccctcaccggaaaaaccataaccctagaggtcgaaagcagcgacaccatcgacaatgtcaaagccaaaattcaggacaaagagggaataccacctgatcaacagaggttgatatttgctggtaagcagcttgaagatggtagaacattagcggattacaacattcagaaagaatcgactcttcacttggtattgaggcttaggggtgggactatgattaaggtgaagactctcacagggaaggaaattgagattgatatcgaaccaaccgatactattgatcggattaaggaacgtgttgaggagaaagaaggtatccctcctgttcaacaaaggctaatctacgccggaaaacagctagctgatgacaaaacggcaaaggactacaacatagagggaggctctgttcttcatcttgttcttgccttaggggtggttttggtcttctctgagaagtaactctttgtatggcttgttggagttcatgggaaaaaagtgattgcaatttggatatgatactttgaatattatgctgtttcactgggtttggatcattttaccaataatctgttaaat

SEQ ID NO: 88650 - DNA, 547 bp, Arabidopsis thaliana columbia
  unsure (1)..(547): unsure at all n locations
gccaaaagaagacgagagaaggagaagagtcgaaatcgccattgaaatggctctcaaagcttcacctgttaccggattattccctcctctccgtcctactgcttcttcttccccttcgacttcttctaatcgcccttgttccctcaggattctccctctcagaacatctttcttcggtaactcaagtggagcgctgagagtgaatgtgttgagattagcttgtgataatagactcaggtgcaatggtcatggtgctactatgaatctttttgaacgattttctagagtggtcaagtcatatgcaaatgcgctcataagctcttttgaagacccggagaaaatcctggagcaaactgtcattgaaatgaatagtgatttgacaaagatgcgtcaagccactgcacaggttttagcatcacaaaagcagttacagaacaaatataaagctgcacagcagtcttctgatgattggcacaaagggccaattggtcttcaaaggggttggggntttcccgnngggccttaaagngaaantttggtgaaagga

SEQ ID NO: 88651 - DNA, 585 bp, Arabidopsis thaliana columbia
  unsure (1)..(585): unsure at all n locations
nnnnnnnnnnnnnnnncagctctctacgactcactattgggaaagctggcacgcctgcaggtaccggtccggaatccccgcgtccgcccacgcgtccccttcaaatcttcatctctctctccatctctcttctccacaagaagctgagtatggatctcctcacaccactcatcttcctcctcctcctcctctcaccattttcactctcagatgctggttccatcggagtaaactacggccgaatctccgacgaactcccctccgcattcaaagtagtccaactactaaaatcccaaggaatcacgcgagtcaaaatcttcgacgcagacccatcagttctcaaagcattatccggatctggaatcaaagtcaccgtagatctccccaacgagttactcttctccgccgccaaaagaacttccttcgccgtctcatgggtcaaacgcaacgtagcagcttatcatccttcaacacagatcgaatcaatagctgttggtaacgaagtcttcgttgatacacacaacactacaagcttcttgatccctgcaatgagaaacattcacaaagctcttatgagtttcaatc

SEQ ID NO: 88652 - DNA, 852 bp, Arabidopsis thaliana columbia
aaaccacgcaccaaccccccgcacaaccaacacctccacccaagccaagacaaaaatttgatggaacatccgtaaacaaccaccggaccggaaaacccgggacgacccacgcgtccgaccaaggacgacaaagcctacggtgtagctcagaggcgtctctctggtcactctcacttcgttgaggatgttgttctctcctccgatggacaattcgcgctttccggcagctgggacggcgagctccgtcatttgggatcttgctgctggtgtctccactcgtagattcgttggacacaccaaggacgtgctctccgtcgccttctcactcgacaaccgtcagatcgtctctgcatctcgtgaccgtacgatcaagctgtggaacactcttggtgagtgcacgtacaccatttcagaaggtggtgagggacaccgcgattgggttagctgcgtcagattcagccctaacacgcttcacccgtccattgcatctgcttcgtgggacaagaccctgaaagtgtggaacctttcgaactgccagctcagatcgactcttgctggtcacaccggccacgtgagcactggggctgcatcacccgagggctctctttgtgccagcggaggccaagcaccggggttgttctgctggggggacataggctcgaggggaagaaaaactttaccttctcttgaaaaactaacttcttgtgagacccatgcccctttgggcttttaaatcccccaacacaaggaacctggggccttttgtttctttgtagaccctgggacccctgggtgtttttaaaaaaatttggggggcccccttgagaaaaacaaacaacccctttttttttg

SEQ ID NO: 88653 - DNA, 1279 bp, Arabidopsis thaliana columbia
tgaataccgggccgaccgacgcgtccgccccgagaaaacgaaaaccctagtttcagaggcatctccagacaccgaaaatggcggaaggactcgttttgaagggcaccatgcgtgcacacactgacatggtgacggcaatcgccaccccaatcgataacgcagacatcatcgtctcagcttcccgcgacaaatccatcattttgtggaaactcaccaaggacgacaaagcctacggtgtagctcagaggcgtctcactggtcactctcacttcgttgaggatgttgttctctcctccgatggacaattcgcgctttccggcagctgggacggcgagctccgtctttgggatcttgctgctggtgtctccactcgtagattcgttggacacaccaaggacgtgctctccgtcgccttctcactcgacaaccgtcagatcgtctctgcatctcgtgaccgtacgatcaagctgtggaacactcttggtgagtgcaagtacaccatttcagaaggtggtgagggacaccgtgattgggttagctgcgtcagattcagccctaacacgcttcagccgacgattgtatctgcttcgtgggacaagaccgtgaaagtgtggaacctttcgaactgcaagctcagatcgactcttgctggtcacaccggttacgtgagcactgtggctgtatcacctgatggttctctttgtgcaagtggaggcaaagacggtgttgttttgctgtgggatttggctgaggggaagaagctttactctcttgaagctaactctgtgatccatgctctttgcttcagtcccaacaggtactggctctgtgctgcaactgaacatggtattaagatttgggaccttgagagcaagagcattgttgaggatttgaaggttgatctcaaggctgaggctgaaaaggctgacaacagtggtcctgctgccaccaagaggaaggttatttactgcacaagccttaactggagcgctgatggaagcaccctcttcagtggttacaccgatggagtcattagagtttggggtattggtcgttactagtaatctcatcacttgtgctgtcgttgctctctgctatctgcttgttggttttatctatcacttatgtttttatcgacaactcatgaagtaccttgaggtttttggaaggatgtttgttttcttgtccatctagggtttcgctcaaacccatagggcgaccgctctagaggatccaagcttacgtacgcgtgcgtgcgacgtcatagctcttctatagt

SEQ ID NO: 88654 - DNA, 527 bp, Arabidopsis thaliana columbia
gttttaatctctttttaagacaacatataatgtcaattgtatgtacgtttttcttgtttctcttaaacacttcttttgcgtttgcatttgcgattcctaaaccgccaatagtaaggagactatcaacgacagtgacatcaaattcaacagcgtcttcttgctcagccaatggaaatccaatcgatgagtgttggagatgcgacgaaaactggaaggacaaccgcaaaaacctcgcggattgcgcggttggattcggacgcgactcaattggcggtagagccggggagttctacacggtgactgattcaggagacgacaatcctctaaatccaactccaggtacattacggtacgctgcgacacaagatcaacctctatggatcatttttgatcgagacatggtaatacaactaaaacaagatctttaagtagcttcatacaaaaccattgatggtagaggaaataacgtacaaatagcttatggaccgtgtttaactttatataaagttagtaacattattataaac

SEQ ID NO: 88655 - DNA, 534 bp, Arabidopsis thaliana columbia
cccacgcgtccgaaaattaaaagcaccttacttaattacatatcgttcgtgtttttttcttcaaaaaatggcgtcaaagcaactgagcagagaagagcttgatgagaaggcgaagcaaggagagaccgtcgtcccaggtggcaccggtggccacagcctcgaagctcaagagcatcttgctgaaggaaggagcaagggagggcagacgaggaaggagcagctaggacatgaaggttatcaggagatcggtcacaaaggtggagaggcgaggaaggagcagttagggcacgagggttatcaggagatgggtcacaaaggtggagaggcgaggaaggagcagctagggcacgagggttatcaggagatgggacacaaaggaggagaggcgaggaaggagcagctagggcacgagggttataaggagatgggacgtaaaggaggactcagtacgatggaaaaatctggtggagagcgtgcggaggaagaagggattgtgatcgatgagtcaaagttcatcaacaagtgattagtgtt

SEQ ID NO: 88656 - DNA, 483 bp, Arabidopsis thaliana columbia
  unsure (1)..(483): unsure at all n locations
ctatgaaaaanttactgctccaggtgggatcagttttgaggatgggattgagaacattgacattggtggccctgctatgattagagcagctgctaagaaccacaaagacgttctcattgttgtcgattcaggagattatcaagctgttttggagtatctcaaaggaggacagagcgaccaacaattccgcagaaaacttgcgtggaaggcctttcagcatgttgctgcatatgattctgcggtttcagaatggctatggaagcagactgaaggaaaagagaagttccctcccagctttacagttccgcttgtacttaagagttctcttcgttacggtgaaaatcctcatcaaaaagctgcattttatgttgataagagccttgctgaagtgaatgccggtggtatcgcaacagcgattcagcatcatggaaaggaaatgtcatacaacaactatcttgatgctgacgctgcatggaactgtgt

SEQ ID NO: 88657 - DNA, 434 bp, Arabidopsis thaliana columbia
gttggttttgagctaattgaagaccctatttgatcttaagaagcaatcagcttttagtttaagcatctagaaacttgaattttgcgaacctttttggacgcacacaagaacttaattcgattcagagagataatggattttaaaggtataaaatgggttgggaatgtttatcagaagtttgaagcaatgtgcttagaggttgaagaaattatcgtgcaggacacagcaaaatatgttgagaatcaagttcagacggttggtaacagtgtcaagaaattctgttcagatgtggttcacgacttgctgcctgatgaatctgtagattcgggaaaacctttgcccgtttctatgttacatgaatacgcccctgtttattctttcaaaaaaaaaaaagatagtatgaaccggaaaactaaagatgtgacacaagagca

SEQ ID NO: 88658 - DNA, 382 bp, Arabidopsis thaliana columbia
ggctgaattaagcggaactcgatgccattttgctgtgaaagtcatggataaagcgtctcttgaggaccggaagaagttgaatcgagctcagaccgagagggatattctacaactattggatcatccgtttctaccgacattgtacactcattttgagactgacagattctcgtgtttggtcatggaatactgtcctggaggtgatctgcacactctaaggcaacgtcaacccgggaagcatttctcggagtacgctgctcgattttacgctgcagaggtgttgctagcactagagtatctccacatgctcggtgttgtttacagagacttgaagcctgagaatgttctggttcgagatgatggtcacataatgctttcagac

SEQ ID NO: 88659 - DNA, 1490 bp, Arabidopsis thaliana columbia
agagttttaccatagacgaacgccttttattcgtcgtggcgaacgaaaccctaatcatcacttctccacttttgttcgtcatcctcttcaaaatttcttcaatttgattctgcaatttccttaatctctctctggttaagtttcagtttcttcttagcccgccatggatgctcagcgagctctgttggacgaactaatgggcgcagctcgtaatctgacagacgaagagagaagaggattcaaggaggttaagtgggacgatagagaagtatgtgcattctatatggttcgattttgtcctcatgacctctttgttaacacgaaaagcgatcttggagcatgctcgagaattcatgatccaaagttgaaagaaagcttcgagaactctccgaggcatgattcctatgtgcctaaattcgaggctgagcttgcacagttttgcgagaagttggtgaatgatcttgataggaaagttaggcgtgggcgagaacgtcttgcacaagaagttgaaccggttccaccaccttctctatcagcagagaaagctgaacaattgtctgttttggaggagaaagttaagaaccttttggaacaagtggaagcacttggtgaagaaggcaaagtggatgaagctgaagcgctaatgaggaaggtggaagggctaaatgctgagaagacggtgttgttacaacgaccaactgacaaggtactcgcgatggctcaggagaagaagatggcattgtgtgaggtttgtggttcatttcttgtggctaatgatgcagtagaaagaacgcagtctcatgtcactggaaagcaacatgttggctatggcttggttcgggattttattgctgaacaaaaagctgctaaagataaaggaaaggaagaagaaagactagtaagaggaaaagaagcagatgataagaggaaaccaagggagaaggaaagcgagagtaagaggagtggttctagtgatagagaaagatatcgtgatcgagaccgaaacagagatggtgacagacacagagaccgtggtagagattatagaaagccttatgacaggagatcgaggagtgggagagaggaccgagatcgaagcaggtcacgatctcctcatggaaggtctggtcacagaagggtgtcgagaagccccattcgccaatactagtttgagaccctcgtggaaggtctggtcacgaaagggtgttgagaagcaccatttgccagtactagtttgagataaggtgttgtcactatgtcttggggccaggaactttgcaaattaatgaggtagacaatgtgataccccctttggtttcataagcatgtgttgtcttttggaacttccttgttaaaatttatggataaaatttgtctttctaccggatgacagctattctaagagtttgagaccttaccgattctccttcatcggttatttgttaagaggtcaaaagcgttgaggtaggtattacgcgtaaaacttttac

SEQ ID NO: 88660 - DNA, 484 bp, Arabidopsis thaliana columbia
cccacgcgtccgcccacgcgtccgcttttaaagaagcaatattttttgtgttttgttttaagttttaacacacaaacacattacctcgaattcgatacgtcatagtaattagcaactatggaacgatgtcgttctggtcatcatcgcatcatttcttattatctctcttcttcgttgatactattttggtgtattttcgttctcgtgctgttatctacgacaagtactacaaatgctttagtgaaaatcccgaaaaacacgaccgttccggcggtaatagtgttcggtgattcaattgtcgatgccgggaataacgacgacatgataacagaagctagatgcgattatgctccctacggcattgattttgacggtggagttgctacgggaagattctctaatggcaaagtccctggtgatattgtagcggaagagctagggattaaacccaatataccggcatatcgaaatccgaatttaaaac

SEQ ID NO: 88661 - DNA, 454 bp, Arabidopsis thaliana columbia
aggtgcgattgtgatggcatttgctccggctccttgggttatcatcgttggaagaatctttgttgggtttggtgttggtatggcttcgatgacgtctccgttgtatatctctgaagcttctccggcgaggattagaggtgcacttgttagtaccaatggtcttctcatcactggtggacaattcttctcgtacctcatcaatcttgcttttgtccatactccgggaacatggagatggatgttgggtgttgcgggagttccagctattgttcagtttgtgcttacgttgtcgctacctgagtctccaaggtggttatatagaacggacaggattgcggaatccacagcgattcttgagacgatttacccggctgacgaagtggaggcggagatggaacctttgaaactgtcagtggaggcagagaaagcagacgaggcaatcattggggatagc

SEQ ID NO: 88662 - DNA, 1197 bp, Arabidopsis thaliana columbia
  unsure (1)..(1197): unsure at all n locations
atgatttnnnnnnnnnnnnnnnnnnnnnnnnnnnnnnnnnnnnnnnnnnnnnnnnnnnnnnnnnnnnnnnnnnnnnnnnnnccacgcgtccgtacggtgcgagcccttcaataagtttcaatgtcataaaaccaaaaaaaaaaaaaatagtgaagacgacgaacctttgaggacactcttcggtttctccaatccttcatatgatgtcggacggaggagcaccgtcgagatacgtgaagttgacgaaggaacaagctccggtcgatgagattcatcccggtgaactcaatcagcccattgaagtttctcatctagctgttcacaaatgcaatgagtgtggccaacctttgcctgagaattttgaagctcctgctgatgagccctggactaccggaatattcggctgcactgaggacatgaatagtttttggctgggacttttctgcccaagtgttctatttggacgtgtctatgaaactctgagtgatgaggaaacctcgtggaagaaagcatgtatttgccattccattgtagtagaaggcggtcttactgctgcatcgatgcttgcttgtgttcccggtattgatccgcatacttctttacttatatgggaaggtttgttgtttgtttggtggatgtgtgggatatacactggaaatgtccgtcaaactctacaaaggaaatatcatcttcagaatgctccatgtgatccatgtatggtgcattgttgccttcacttttgtgcggtttgtcaagagcaccgtgagatgaagaatcgtctttcggataactttgtgatgcctatgactgttatcaacccaccaccggttcaagagatgagtgcttctggtgacagagaccaacaccaccacaactctgttccggtttcacaccatagctctgatcttgagatgaggccattgtagtcctcaatggttccccatcagattcaaggttttgttttgcctgaatctaactttatatatgtaaaccgatttggtttgtttcaaactcatatagatagattcggattctggttttccttgtgtaatcatgatttatcattatctcaaaattaagattttctatgcctgnnnnnnnnnnnnnnnnnnnnnnnnnnnnnnnnnnnnnnnnnnnnnnnnnnnnnnnnnnnnnnnnnnnnnnnnnnnnnnnnnnnnnnnnnnnnnnnnnnnnnnn

SEQ ID NO: 88663 - DNA, 683 bp, Arabidopsis thaliana columbia
  unsure (1)..(683): unsure at all n locations
gagcctcatagtttaagcaacactntttggttaaagaataaagattagatcggtccaattnatatatttacatgtnccgccattatcatcttctaatttgaaaactcttcatcattccctaccaccggattcaatggcggcgaaaattcccggagtgatcgctttgttcgacgtcgacggtactctcacagctccaaggaaggaagctactccagaattgctcgattttatccgagaattgcgaaaggtcgtcactattggagtcgtcggtggatctgatctaagtaagatatctgagcagcttggcaaaacagtcacaaacgactatgattattgtttctctgagaatggtcttgtcgcccataaagatgggaaatccattggaattcagagcctgaagctgcaccttggagacgataaactcaaggagttgataaatttcacgctgcactacattgcagacctgggtattccaattaagagggggacatttattgaatttccggaatgggattgcccatggttcacccattgggcggaactgagccaaggaggaaggggttgaattttgggggttttgntanggtcaaanntccggcccaaggttggngnttacctttgggggngggtttanatntaccctnnttnnaaattggggcananaggtngttgntncctatttc

SEQ ID NO: 88664 - DNA, 866 bp, Arabidopsis thaliana columbia
  unsure (1)..(866): unsure at all n locations
gcgtccgaaaagaggcaaatgacaaaacagcgagtgcttcagagaacgagctcaagctggaggaaaaacaaaacatgcgaaccgaattggaaatcgctgctgcttcagaaaagttggccgagtgtcaagagacgattctaaacctgggaaagcagctcaaggcattgactaactcaaaggaaacagctttactttcagaaacactcatgtacgacgttacagacaaatcgaacaacctacctgatgcacaaccttcacatgagactactaaaccagagaagagattgaccagccagagatcatctcttttggatcagatgaaggcagaagatcacaacaccggggaatccaaggatcagaaaccgcaagcagcagataaaaacggaaagggaggaaacagctctgtttccaatgaaaccattgaggcactagaacagattcttctctcagacaaaagcaaaggctccgactcaaactgctttgccattgttcctcagaaaaagaccggcggagttaagagcctctggagaaagctgttggggagaaataagaaaggtaagagcaagaaggtccctaatccatttgccaactaagaagatggtggcatctgtcatctagactataatctaataccttaatcctgtttctttatatggtcccaaagacccaaactatgcaaactaaactgtcattttctagatttttttggcagtatatatataatctccacgtagagtattactctataagatgatcattctgcttaaaaaaaaaaaaaaaaaaaaagnnnnnnnnnnnnnnnnnnnnnnnnnnnnnnnnnnnnnnnnnnnnnnnnnnnnnnnnnnnnnnnnnnnnnnnnnnnnnnn

SEQ ID NO: 88665 - DNA, 465 bp, Arabidopsis thaliana columbia
  unsure (1)..(465): unsure at all n locations
tgtttncccctggnacccctggggttttatcacttggtcaagaaagctgttgctatccgcaagcatcttgagaggaacaggaaagataaggattccaaattcaggctgattcttgtagagagcagaatccatcgtcttgctcgttactacaagaagaccaagaagctcccacccgtctggaagtacgagtctacaactgcaagcactcttgtggcttgagaagaatagagttgatcatgtccttcaagaaggaccatttcattgtctgcattgcaactcaaagctcttcttcttttgaacctatgtatctgttttcgctagttttgatgggttacaacttgctatgagattttgattttagggaacgaatttgtttatgcgaatctttccattatcgttacagcttatctttcaattaacgttaataaaaggtttcagagaatttttccaaaaaaaaaaaaaaga

SEQ ID NO: 88666 - DNA, 780 bp, Arabidopsis thaliana columbia
tctgcggtaccggtccggaattcccgggtcgacccacgcgtccgaagaaaccgaggaagaacgatctcagtgagaggacgatcacttcgccgtcgcagtcatgggtcgaatgcatagtagaggtaagggtatctcggcatctgctttgccgtacaagcgttcatctccgagctggctcaagacaacccctcaagatgttgatgagtccatctgcaaatttgcgaagaagggtttgaccccatcgcagattggtgtcattcttcgtgactctcacggaattccacaggtgaaaagtgttactggaagcaagattctcagaattttgaaagctcatggtcttgcacctgagatccctgaggatctgtatcacttgatcaagaaagctgttgctatccgcaagcatcttgagaggaacaggaaagataaggattccaaattcaggctgattcttgtagagagcagaatccatcgtcttgctcgttactacaagaagaccaagaagctcccacccgtctggaagtacgagtctacaactgcaagcactcttgtggcttgagaagaatagagttgatcatgtccttcaagaaggaccatttcattgtctgcattgcaactcaaagctcttcttcttttgaacctatgtatctgttttcgctagttttgatgggttacaacttgctatgagattttgattttagggaacgaatttgtttatgcgaaaaataaaaaaccctatttattaaagggcggccgctctaaaggatccaagcttacgtacgc

SEQ ID NO: 88667 - DNA, 551 bp, Arabidopsis thaliana columbia
tgatctccagctctcatacgactcacttaggaaactggtcgcctgcagtaccgccggaattccgtcacccacgggggcgggcgcgtaaatcagtttgtcctccttgaatcaaacacgacgttcactggcttgcctaagcctcttgtctttgctgctcaccgagatgagttcaagtttattgagtcacgcttgacttatggtactgttggtggaagatttgtcaaagggcagaatccgttttacgaagaggcgtatcagcgggtagctcttgatcagcttctgagaatcgctgggattactgatgatgacttgttgttaatgtctgatgtcgatgagattccaagtagacacaccattaaccttttgagatggtgcgatgagatcccgaagatacttcatctgcgcctcaagaactatctttactcgtttgaattccttgttgataacaaaagctggagagcttccatccacagatatgagacgggtaagacacggtatgctcattatcgacagtctgatgaaatcttggcggatgcaggatggcattgtag

SEQ ID NO: 88668 - DNA, 308 bp, Arabidopsis thaliana columbia
ggaggaaatattttttatatttccattttcagatgatgaagaaaatggacccgtatctgggcgctcactgaagttttcgattaaaggtttggtggaaaaatccccaaagaaaagcatggagttctgggaaacactcttcaagtaaaaagcatgctagtaaaaaaggtagtcacactacgttggagcctgaagttcatcaggagattggatctgagagacgccgactaggtggtgttagaattgataatgtgggttttcagataaacgaagaatcggacgttaattcttctgtaactggaatttgctca

SEQ ID NO: 88669 - DNA, 764 bp, Arabidopsis thaliana columbia
  unsure (1)..(764): unsure at all n locations
caaccggaaagtattgtccaagacattgataatatggtccggtcttatgttgaaaggccgaattgcatcatattgggtagttctccancaaatcaagatattgctacctcagatgctataaaacttgctagagaagttgatcctacaggcgaaaggacttttggtgttgcaaccaagcttgatatcatggataaaggaacagattgtctagatgttcttgagggaaggtcataccgtttgcaacatccctgggttggaattgtgaatcgttcacaagctgatattaataagagagtcgatatgattgctgcacgtagaaaagagcaagaatattttgaaacaagccctgaatacgggcacttagccagtagaatgggatcagaatatctagcaaaactcttgtctcagcacttagagactgttatcaggcagaaaatccccagtattgttgctttgatcaacaaaagcatcgatgagataaatgcagaacttgataggattgggagacccattgcagtagattcaggagcccaactttacacaattttggaactctgccgggcatttgatcgtgtctttaaggagcacttggatggaggacgacctggtggagaccgaatttatggagttttcgaccatcaattaccagcagccttaaagaaacttccctttgatcgacatctgtctaccaaaaatgttcagaaggttgtttcagaagcagatggttatcagccgcatcttattgctcctgaacaaggatacag

SEQ ID NO: 88670 - DNA, 258 bp, Arabidopsis thaliana columbia
aagtgtctagaaatttaaaattttatttttattataattattctattttaaaatttaacagagaaattaatgaaaatcaaaaatattttaaattggccggtaaacaatttgcgttcgaatttaaatctttcacgaatcaaactatttttgacaaaatctcaatccgaatcttagcgtctttttcaatattgacggttactttttcacatttcaaaatctcaatattaacggtccttatagacttttaccaaatccacc

SEQ ID NO: 88671 - DNA, 538 bp, Arabidopsis thaliana columbia
gatactccagctctcatacgactcactattagggaagctggtacgcctgcaggtaccggtccggaattccccgcgtccgcccacgcgtccgattagagtggagtggagctttgaattggatgatcattatccatgtcgattctacttaggccgtcgtcctctccttcactctgttcttctctcaagcttttccgattatcctctccggattctttaatcgacgcagctgtcctcaggaacaggacaaagccgtcgcagtcgtttcgaatggaggtcgtttcgagtaattccacgtgtctttctagtattagcgtcggtgaagattttccatcagaatatgagcagtggctaccggttccggatccagagagcaggagaagagctggcgttttgctacacccgacgtcgttttcgtggtcctcatggcattggtgatctcggagaagaagccttccggttcatcgattggcttcattctactggttgctccgtttggcaggttcttcctcttgttcctccagacgaaggaggatctcct

SEQ ID NO: 88672 - DNA, 920 bp, Arabidopsis thaliana columbia
  unsure (1)..(920): unsure at all n locations
nnnnnnnnnnnnnnnnnnnnnnnnnnnnnnnnnnnnnnnnnnnnnnnnnnnnnnnnnnnnnnnnnagagagaagaaaagtttctctctttggggttctcggccgcccaaaatcgagatcgcatcataatcttaaatctctcttctttctacgaattttcatgtttatgttccctctctcttgattctccaccatttcactattcacatattttttttttattgataaagttttctcctttttttgagttttacgagaggatttttcaaaggtctaaactttcttgggatctatcagattgtcttgaaactaatgcttacgggttttaacaggttgattgattgatcataccaccatggatatgcatcatctctgaaccaatggggaaacatttctgacatttaatggatcctcaagctttcattcgtctttcggttggctctcttgctttgagaattcccaaggtccttttaaactctacttcaaaatctaatgagaagaagaacttttcttctcaatgctcttgcgaaataaaactacgaggctttcctgttcaaacaacatctatccctttgatgccgtcccttgatgcagctcctgaccatcacagtatttccactagcttttatcttgaagaatctgatttaagagctcttttgacacctggatgcttctatagtcctcatgctcacttggaaatctcggttttcacgggtaaaaagagtttgaattgcggtgttggtggtaaaagccagcagattgggatgtttaagttgggggtaggtcctgaatggggggaaggaaaaccaatgattcttttcaatggtgggatcagtattgggaagaccaagcgggattgtcctcaagggttcattnaaagggaggttnncccancccgnnttttcaggttgggggtncnnc

SEQ ID NO: 88673 - DNA, 277 bp, Arabidopsis thaliana columbia
ctccgcggacgcgtcagtgttcttcttcatttgctctcttcttcatcaatctctctctttttgtaaacggcgattttaaaatggttgatgcaaaacaagttcgtttcatcatcggagttatcggaaatgttatctcctttggtctctttgccgcaccagcgaagactttctggaggatcttcaagaagaaatcagtggaagagttttcgtatgtgccgtacgtagcaacggtggatgaattgtatgttgtgggtgttttacggtctccctgtggttc

SEQ ID NO: 88674 - DNA, 609 bp, Arabidopsis thaliana columbia
  unsure (1)..(609): unsure at all n locations
nnnnnnnnnnnnnnnnnnnnnnnnnnnnnnnnnnnnnnnnnnnnnnnnnnnnnnnnnnnnnnnnnnnnnnnnnnnnnnnnnnnccacgcgtgcgcccacgcgtccgtacggctgcgagaagacgacagaagggggatcaacaaacaaacacatcacaattctcgaacttcgccggagaatgatggaaacagctctgctccggtactgcgtcaacttttccggtcacaagaaaatctctgctcatcaaagaagtaatagtgagattccgaaaacgagtccgggaggatgcgaagacgagtggtgtgctagggttttgagtagaagatcggtaatggcgtcagggttggtctcctcgacgacggctttagcatttccaagggaaggattggctgtcgttaaacaaggtcttctcgctgggagagttcctggtctgtccgaacctgatgaagaaggttggagaacataccgtagaccagacgagaagtcaggagggcatggtgttggttggagtcctattatccctttacgccttttcggttcctcaagattggaatgaggtacctgtatcgatcgctgatcttggtggcaccgagattgacttgagatttg

SEQ ID NO: 88675 - DNA, 655 bp, Arabidopsis thaliana columbia
tttttggtggccatatgtgcattctttggacgacttcttaatggttctcgcccgtcttgctccatttgagaggggaatatacgaggattacgtggcaaatttctggtgcactacttccatactcataaaatggaaaaatctgttcacaacacaatccctcaagtctatcagcttagctgcaactatattggcttctcttccttcaatggttcaacaaatcttgtcaccaagcaatgaaggtttcctatatggcttgctcaacagttcaatggctttctaggggttttccttccaagtgcatgagaaatcaatcctgatgccttttctctccgcaacactattagctctcaaactacctgaccatttcagtcatttaacctattacgctctcttctcgatgttccctcttctttgccgtgacaaactcttgatcccttacttaacactatcttttctcttcaccgtcatctatcattcacccgggaatcaccatgcgatacagaaaaccgacgtttcatttttctcctttaaaaacttcccgggttatgttttcttactacgaacccatttcttcagctccgtagttcttcatgtcctctatcttaccattaaacctcctcagaagtaccctttcctattcgaagcactgatcatg

SEQ ID NO: 88676 - DNA, 473 bp, Arabidopsis thaliana columbia
  unsure (1)..(473): unsure at all n locations
ctgcggtaccggtcccgaattcccgggtcnacccacggtccggagatcagtctgatccgagtgagacagactctgaggagctattgcagttagatggaaagagtatatctgagtgggtgagtgaaatagatgcaatttccaaagaagtagaggcagagttagtctcacgagatatcggctgtcacttggttcaagttcttgaagctgtaaatacagttctcttcgatctgagaggcttcaagaggacatctattactttagacccggagaattcctaccttcactctgtacttaactgtagatgcagcactgcgtttctgattagtgtaatatacattgaagtttgtaagcgcctgaatgtaccaattgttggatctccagttggggaagattttctgatttggcctaaaacggagtatcctgaggaactctttaaagcaacttcaggccagagcttgtcctctattgttaat

SEQ ID NO: 88677 - DNA, 561 bp, Arabidopsis thaliana columbia
  unsure (1)..(561): unsure at all n locations
ccgcgaggccgcggctcccccgcccctngggggggtagtatcgccgggcatctatacgactcatatagggaaagctggtacgcctgcaggtcccggtccggaattcccgggtcgacccaggcgtccgtatggcttcttcaccagtgtccagatttgttggatttggtcatcatactattctcaggtatgataatgatcaacgtcttcgtcgtggttgttcttggactggaattgaaaagaagatcccttttcctcggtagaggcagagttagtctcacgagatatcggctgtcacttggttcaagttcttgaagctgtaaatacagttctcttcgatctgagaggcttcaagaggacatctattactttagacccggagaattcctaccttcactctgtacttaactgtagatgcagcactgcgtttctgattagtcgaatatacattgaagtttgtaagcgcctgaatgtaccaattgtgggatctccagttgggggaagattttctggatttggcctaaaacggagtatcctagaggaacttctttaaaggcaccttcg

SEQ ID NO: 88678 - DNA, 320 bp, Arabidopsis thaliana columbia
aaccacagtgaatataaatggagttttcccgtcaacatatcattgtgtgacacctgatactgcaagtgtgctggatgttacatccgaacaactagtgcctaacggtatagctattcaagctgatgttttccaatctgatcaacaccctgagacgatgggtagacgccacaaagcgtcaaacaagttggttgatggaaaatatcacgtcacactttctgatagcgacgatagtagatctcagaggtcacgcaccgacagtgagagacattctgaaactctacgtaccaatggagatgcgggacctatgacattaagacaat

SEQ ID NO: 88679 - DNA, 740 bp, Arabidopsis thaliana columbia
cccacgcgtccgctcgcatagctgaatcagcaaaacatgaccgtaatgcaattctgcgagcaagatgttgtgaatatgcattgttaacacttgaacattggcctgatgctccagaaattcaacgatcagttgatttatatgaagatctgattagatgctgtgttgcagatgctatgagtgaggtgcgggcaactgctagaatgtgctacagaatgtttgcaaaaacttggccggatcgttctcgccggttgttttcgtcctttgaccctgtcattcaaaggctaataaatgaagaagatggtggaattcataggagacacgcctcaccatctgtccgtgagagacattcccagccttcattttctcagacgtctgctccttctaacctacctggctatggaacatcagctatagtcgctatggatagaagttcaaatttatcatctggaggatctctttcttctgggttactcctttcgcaatcaaaggatgtcaataaaggttctgaacgtagtctggaaagtgtgttacaatcaagcaagcagaaggtcagtgcaattgaaagtatgctccgaggactgcatatatctgatagacaaaatcctgcagcccttcgttcaagtagtttggatctaggagttgaccctccatcgtctcgtgatcctcctttccatgctgttgctccagcatccaatagtcacacaagtagcgcagctgctgaatcaacacatagtatcaac

SEQ ID NO: 88680 - DNA, 2486 bp, Arabidopsis thaliana columbia
  unsure (1)..(2486): unsure at all n locations
tgatactccagctctcnnnnnnnnnnnnnnnnnnnnnnnnnnnnnnnnnnnnnnnnnnnnnnnnnnnnnnnnnnnnnnnccacgcgtgcgggaaaacactccaactacgaatctaccccacgcgtccgcatacaaagaggaagatttcaaatccaatcatcaatcatctcttttgaatgatccgattccatctacttgctctttaaatttattgttgatcctttgaatttggtgcggagatctcgaagatgaagcagcttctgtgttatcttccatggctgcttcttctctctcttgtggtttccccttttagcgaggctagattcgttgtgagtaatgagaagaatagtttgtcggtgacgtcgccggagagtataaaaggaacacatgatagtgcaattggtaacttcgggattcctcaatacggtggaagtatggctggtacggtggtttatccgaaagagaatcagaaatcgtgtaaggaatttagcgatttctcgatttcgttcaagtctcagcctggtgctttacctactttcctcttagttgatcgtggagattgtttcttcgctttgaaggtatggaacgcacagaaagcaggtgcttctgctgttcttgtggctgataatgttgatgagcctttgattacaatggatacacctgaagaagatgtttcttctgcaaagtatatcgagaatattactataccttctgctcttgttactaaaggttttggtgaaaagctgaagcaagctattagtggaggtgatatggttaacttgaatcttgactggagagaggctgttccacatcctgatgaccgtgttgagtatgagttgtggactaatagtaatgatgaatgtggggttaagtgtgatatgttgatggagtttgtgaaggattttaagggagcggcgcagattcttgagaaaggcggttttacgcagtttaggcctcattatattacttggtattgtcctcatgctttcacgttgagtcgacagtgtaagtctcagtgtatcaataaaggaaggtactgtgctcctgatccagagcaggactttagctcgggatacgatggaaaagacgtggttgtggaaaatttgagacagctttgtgtttacaaggtggcgaatgaaaccggcaaaccttgggtctggtgggattatgttactgatttccagatcagatgtccaatgaaggagaaaaaatacaacaaagattgtgctgagtctgtaatcaaatctcttggaatcgatagcagaaaaattgacaagtgtatgggagaccctgatgctgacttggacaatccagttttaaaggaagaacaagatgctcaagttggcaagggtacaaggggtgatgttaccatattgcctaccttagttgtcaacaacagacagtaccgaggcaagttggagaagagtgcagtactcaaggctctatgctctggttttgaggagtcaactgaaccagctatatgcctcagcacagatatggagacaaacgagtgcttagataacaatggcggttgttggcaagataaatcagccaacataactgcttgcaaggatacgtttcgtggaaaagtatgcgtgtgtcctatagttgatggtgtgcgattcaaaggagatggttacagccactgtgagccaagcgggccagggagatgtacaatcaacaatggaggttgttggcatgaagagagagatggacatgcgttctctgcttgtgtggacaaggacagtgtgaaatgcgagtgtcctccaggatttaaaggagacggtgttaagaaatgtgaagacatcaatgagtgcaaagagaagaaagcatgtcagtgcccggaatgtagctgtaagaacacctggggaagctatgagtgctcttgtagcggggaccttctctacatgagagaccatgacacttgcatcagcaagacgggttcacaagtgaaatcagcgtgggcgggcgtttggcttataatgttatcattgggacttgcagctgctggtgcatacctcgtttacaaatatagattgaggcaatacatggactcagagatcagagccataatggcacagtacatgccactggacagccaacccgaggtcccgaaccacacgaatgatgaacgtgcctaagagaacgaaatggtccaactatttattcccccggaaaggaatcaatgcgaagcgttcttttaattgatgtggcccttgatgccggtgttctttttcgcatctgtatctctgtaactctttgtaccaaacagtgtatcctatgttcttgtcaattgtgtccatgtgacttctgtaatagggaaacttcgatgtagcttcggagaactggacaagctagtcaatagaatcaaaacatcaaagtgttaaagttaaaaaaaaaaaaaaaggacaagttagacgactctctctttgtagtttacacataatgtcttaagatttatggtaaattaagacaacatcagatcg

SEQ ID NO: 88681 - DNA, 467 bp, Arabidopsis thaliana columbia
ctgcagggaccgggcccgaattcccgggttgacccacgggtccgggaaggagtaatcctgttgctgcaacagctatttcaaccattcagtcgatgccactctcgggatttggaaacagcaatgtttcttcgttttctagctatgatgatgggttttcttcgcagaagtctgctgagtctgcacccctaaactaccagctctacagttgggaaaattttgagccagtaggtggtatgctacctcagccagaatggacggcatgggaccaaacagttgaatactgtgcttttgcttatcaacaatacatggtcatatcgtccttgcgccctcagtatagatatcttggtgatgttgccattgcacatgcttctggaggctgtttggcatcccagaccagctgtttggggctcccccaacccccattggatgtggtttttgggatgccggaagtttcccaaatttttttt

SEQ ID NO: 88682 - DNA, 582 bp, Arabidopsis thaliana columbia
  unsure (1)..(582): unsure at all n locations
ctgnctttttcgcagcntnagggaccnggcctgaatcccgggctgcccactgcgtccggaatgggcaagaggntgtttctacatggctttatcaagctccttaccaagtctgactctgtcgttagtacctaccgtgaccatgtccatgccctcagcaaaggtgtctctgctcgtnctgttatgagcgagctcttcggcaaggttactggatgctgcagaggccaaggtggatccatgcacatgttctccaaagaacacaacatgcttggtggctttgcttttattggtgaaggcattcctgtcgccactggtgctgcctttaagctccaaagtacagggagggaagtcttgaaacaggaattgtaatgatgtcactgtcggcttttttcggagatggaaccttgtaacaaacggncaagttctttcgaggtgtctcaacaatggttgtcctctataaactgcccataaaccttttgtggccggggaaaacctttttgggccaattgggcatgnctcactttagggccattttttcaccccgggggttttgaagaaaggccccnnatttggngtccctggggg

SEQ ID NO: 88683 - DNA, 721 bp, Arabidopsis thaliana columbia
  unsure (1)..(721): unsure at all n locations
atgatactccagctctcnnnnnnnnnnnnnnnnnnnnnnnnnnnnnnnnnnnnnnnnnnnnnnnnnnnnnnnnnnnnnnnccacgcgtccgcttgttctctccgcccatctctgctctcttttattttcccagaaagttttttttttttttccgaattccgttaatctcattggggtttccattgatagcaatggcgacggctttcgctcccactaagctcactgccacggttcctctgcatggatcccatgagaatcgtctcttgctcccgatccgattggctcctccttcttctttcctcggatccacccgttccctctcccttcgcagactcaatcactccaacgccacccgtcgatctcccgtcgtctctgtccaggaagttgtcaaggagaagcaatccaccaataataccaaccttggttgaatgtgagacttatagattcagaggacactccttggctgatcccgatgagctccgtgatgctgctgagaaagccaaatacgcggctagagacccaatcgcagcattgaagaagtattcgatagagaacatgcttgcaaaggtagctagagctaaagtcaatgtgttaaagtattgacgtgttggtaataggaagagtttgtcacttttttcacttttttttattatttttatcatttttaaattttaatatcttatttcattatttttatcttttttttaataattttttaatt

SEQ ID NO: 88684 - DNA, 1690 bp, Arabidopsis thaliana columbia
  unsure (1)..(1690): unsure at all n locations
ccacgcgtccgcatctcttgttctctccgcccatctctgctctcttttattttcccagaaagttttttttttttttttccgaattccgttaatctcattggggtttccattgatagcaatggcgacggctttcgctcccactaagctcactgccacggttcctctgcatggatcccatgagaatcgtctcttgctcccgatccgattggctcctccttcttctttcctcggatccacccgttccctctcccttcgcagactcaatcactccaacgccacccgtcgatctcccgtcgtctctgtccaggaagttgtcaaggagaagcaatccaccaataataccagcctgttgataaccaaagaggaaggattggagttgtatgaagatatgatactaggtagatctttcgaagacatgtgtgctcaaatgtattaccgaggcaagatgtttggttttgttcacttgtacaatggccaagaggctgtttctactggctttatcaagctccttaccaagtctgactctgtcgttagtacctaccgtgaccatgtccatgccctcagcaaaggtgtctctgctcgtgctgttatgagcgagctcttcggcaaggttactggatgctgcagaggccaaggtggatccatgcacatgttctccaaagaacacaacatgcttggtggctttgcttttattggtgaaggcattcctgtcgccactggtgctgcctttagctccaagtacaggagggaagtcttgaaacaggattgtgatgatgtcactgtcgcctttttcggagatggaacttgtaacaacggacagttcttcgagtgtctcaacatggctgctctctataaactgcctattatctttgttgtcgagaataacttgtgggccattgggatgtctcacttgagagccacttctgaccccgagatttggaagaaaggtcctgcatttgggatgcctggtgttcatgttgacggtatggatgtcttgaaggtcagggaagtcgctaaagaagctgtcactagagctagaagaggagaaggtccaaccttggttgaatgtgagacttatagattcagaggacactccttggctgatcccgatgagctccgtgatgctgctgagaaagccaaatacgcggctagagacccaatcgcagcattgaagaagtatttgatagagaacaagcttgcaaaggaagcagagctaaagtcaatagagaaaaagatagacgagttggtggaggaagcggttgagtttgcagacgctagtccacagcccggtcgcagtcagttgctagagaatgtgtttgctgatccaaaaggatttggaattggacctgatggacggtacagatgtgaggaccccaagtttaccgaaggcacagctcaagtctgagaagacaagtttaaccataagctgtctactgtctcttcgatgtttctatatatcttattaagttaaatgctacagagaatcagtttgaatcatttgcactttttgctttttgtttggtgttactaaattatcacaaggttcttcttgtagatcgttgggttttcattggttaccacttcccagagnnnnnnnnnnnnnnnnnnnnnnnnnnnnnnnnnnnnnnnnnnnnnnnnnnnnnnnnnnnnnnnnnnnnnnnnnnnnnnnnnnnnnnnnnnnnnnnnnnnn

SEQ ID NO: 88685 - DNA, 267 bp, Arabidopsis thaliana columbia
cttcttcataaattgtttcattgtttgctctgtcttgttgcgttctaggttttgtttgttctgtctacctctgtaatttctctgttttgctctctagggtctttttaatttgatgctaattacattatttttgcttctaagtggatgcaattagattattattttcatagaatgtaatgatttcttcggagtaacagcttgtttagttgaacaaatggttttgtggaataagtatttgattctttggccttaaagttaatctctttt

SEQ ID NO: 88686 - DNA, 533 bp, Arabidopsis thaliana columbia
  unsure (1)..(533): unsure at all n locations
nnnnnnnnnnnnnnnnnnnnnnnnnnnnnnnnnnnnnnnnnnnnnnnnnnnnnnnnnnnnnnnnnnnnnnccacgcgtccgcccacgcgtccgaagattttgatgtggttgatcttgacccatatggtgcgccgtctattttccttgactcagctgttcaatcagttgccgatggtggtttgctgatgtgtacagcaactgacatggcagtgttatgtggagctaacggcgaggtctgctattccaaatatggctcttatccactgaaagggaaatattgtcatgagatggctttgaggatcctcctcgccagcatcgagagccatgcaaatcgctacaagcggtatattgttcctgttctatcggtccaaatggatttctacgttcgtgtttttgtccgcgtctacaacttcggcgagtgcaatgaagaatactccactaaagctctcatatgtctaccaatgcattggttgtgattcctttcatcttcagtctgttggaagatctctccctaagaataacagtgtgagata

SEQ ID NO: 88687 - DNA, 604 bp, Arabidopsis thaliana columbia
ctcttgtttccatcactacaaaaaaaaaaaaaaaaacgaacgatctctctgaaactatctctttctctctagatatgttgtcgagactctgatttgaaatcccagagaaaagcatttggatcctctctagaaatctgcattttgaagctacttttttgtttgcatctgagtgtgtatagatcctgaggaattttgatgtgttgttgaatcggaaggaatttagatcggagtagtcggagatgtctgacgtttcggctgacggtggttttttgtcggcggagcaagctacaacgcctgttgcgattccgacgccgtatccgtcattgacggtgtcggcgtcctataaggagaaaagttctgggaggaggagaccggttaggcctagttttgatgcagctgctgatcatgagttcattactttgcttcatggctcggatccagtgaaagttgagcttaatcggcttgagaatgaaggtagagataaggatcgagaattaagtgaagctaatgctgagatcaaagcgttgaggttatctgagagacaaagagagaaagcttgtgaagagcttactgatgagctagctaagttggatgggaagctcaa

SEQ ID NO: 88688 - DNA, 502 bp, Arabidopsis thaliana columbia
  unsure (1)..(502): unsure at all n locations
nnnnnnnnnnnnnnnnnnnnnnnnnnnnnnnnnnnnnnnnnnnnnnnnnnnnnnnnnnnnnnnnnnnnnnccacgcgtccgcaatctctctctctggcattaggatttggaagtgctttttgtatatatatccaacaaaggaatcagatcggagatgtcggatgtttccggtgacggagatttatcggcgacggttactgaacatgaagtaactccacaaccgccggtttcttcggcgacgtatccgtcattaacggtgtcggcgtcttacaaagagagcagcggaggtaaaagctcgtcgaagaggagaccaataaggccgagtttcgacgctgcggctgataatgagtttattactttgcttcatggctcggatccagtgaaagtggagcttaatcgactagagaatgaagttagagataaggatcgggagttaggagaagcaaacgctgagatcaaagcgcttaggttgtctgagagacaaagagagaaagctgttgaa

SEQ ID NO: 88689 - DNA, 864 bp, Arabidopsis thaliana columbia
  unsure (1)..(864): unsure at all n locations
gagggccgacccacgacccacgcgtacgtgagaatcataagacgagatcctggtgagtcgtacttcctagttttgcgacgatgaattccggggttcccaagaaactcgtcgttgctccttctcgcacaaatctttcagtgaggagccagagatatataggggctggatctgatgcgagtaagaagagctttggttctggacttagagttcgtccctctcagaaattgattccaaatgctgttgcgacgaaggaggcggatacgtctgcgagcactggacatgaactattgcttttcgaggctcttcaggaaggtctggaagaagagatggacagagatccacatgtatgtgttatgggtgaagatgttggccattacggaggttcctacaaggtaaccaaaggccttgctgataaatttggtgacctcagggttctcgacactcctatttgtgaaaatgcattcaccggtatgggcattggagctgccatgactggtctaaggcccgttatttgaagggtttgaaccatggggtttcctcctcctcgccttcaaccaattctccaacaacttgtgggatgcttcactcacacatccggtgggcagatttacggtccccggttgtcaattccggggcccttgggggggtgggcccgcatctttggtgctgagcattcacagggggttagaatnttactttaagnccatcctgggntncaaatggttgctttctcaanctcctttcaacgccaagggttnttgaaaccgaataagagngganccnttngttttttngaanaagggtggtttaaatttaggggaatccggtnagttcattnaccttanngntantggaaccctgggg

SEQ ID NO: 88690 - DNA, 667 bp, Arabidopsis thaliana columbia
  unsure (1)..(667): unsure at all n locations
ccgctcttctccactcttcttctctgttctatcgcagacatttttgtttatatgcatacataataataatacactcttgtcaggatttttgattctctctttggttttctcggaaaaatgtctgcgatactccaaggagctggagctgcaacggctctctcgccgtttaattctatcgattccaacaaactcgttgctccttctcgctcttctctttcagtgaggagcaagagatacattgttgccggatctgatagtaaaagctttggttctagcctcgtagctcgtcgctctgagccgttgataccaaatgctgttacgacgaaggcggacactgctgcgagctctacttcatcaaagcctggacatgagctattacttttcgaggctcttcaagaaggtctagaagaagagatggacagagatccacatgtatgtgtcatgggtgaagatgtaggccattacggaggctcatacaaagtaactaaaggcctagctgataagtttggcgatctcagggttctggacactccaatctgtgaaaacgccttcaccggtatgggcatttgtgccgccatgcaggcttaagccccggcatcgcaggtttgccatggggtttnctttagctttacccaacttcnccanctnnggttgttccttaaacccg

SEQ ID NO: 88691 - DNA, 1709 bp, Arabidopsis thaliana columbia
  unsure (1)..(1709): unsure at all n locations
nnnnnnnnnnnnnnnnnnnnnnnnnnnnnnnnnnnnnnnnnnnnnnnngtccgccgcatgtcactgtttcgtatcgccattttctgtttgcatacacttgtatatatttatattaacagtccaaaattcttcgaaattgtcccgagctttgagcatataaaaaatgtcttcgataatccatggagctggagctgctacgacgacgttatcgacgtttaattccgtcgattccaagaaactcttcgttgctccttctcgcacaaatctttcagtgaggagccagagatatatagtggctggatctgatgcgagtaagaagagctttggttctggacttagagttcgtcactctcagaaattgattccaaatgctgttgcgacgaaggaggcggatacgtctgcgagcactggacatgaactattgcttttcgaggctcttcaggaaggtctggaagaagagatggacagagatccacatgtatgtgttatgggtgaagatgttggccattacggaggttcctacaaggtaaccaaaggccttgctgataaatttggtgacctcagggttctcgacactcctatttgtgaaaatgcattcaccggtatgggcattggagctgccatgactggtctaagacccgttattgaaggtatgaacatgggtttcctcctcctcgccttcaaccaaatctccaacaactgtggaatgcttcactacacatccggtggtcagtttacgatcccggttgtcatccgtggacctggtggagtgggacgccagcttggtgctgagcattcacagaggttagaatcttactttcagtccatccctgggatccagatggttgcttgctcaactccttacaacgccaaagggttgatgaaagccgcaataagaagcgagaaccctgtgattctgttcgaacacgtgctgctttacaatctcaaggagaaaatcccggatgaagattacatctgtaaccttgaagaagctgagatggtcagacctggcgagcacattaccatcctcacttactcgcgaatgaggtaccatgtgatgcaggcagcaaaaactctggtgaacaaagggtatgaccccgaggttatcgacatcaggtcactgaaaccgttcgaccttcacacaattggaaactcggtgaagaaaacacatcgggttttgatcgtggaggagtgtatgagaaccggtgggattggggcaagtcttacagctgccatcaacgagaactttcatgactacttagatgctccggtgatgtgtttatcttctcaagacgttcctacaccttacgctggtacactggaggagtggaccgtggttcaaccggctcagatcgtgaccgctgtcgagcagctttgccagtaaattcatatttatccgatgaaccattatttatcatttacctctccatttcctttctctgtagcttagttcttaaagaatttgtctaagatggtttgtttttgttaaagtttgtctcctttgttgtgtcttttaatatggtttgtaactcagaatgtttgtttgttaattttatctcccactttctttttnnnnnnnnnnnnnnnnnnnnnnnnnnnnnnnnnnnnnnnnnnnnnnnnnnnnnnnnnnnnnnnnnnnnnnnnnnnnnnnnnnnnnnnnnnnnnnnnnnnnnnnnnnnnnnnnnnnnnnnnnnnnnnnnnnnnnnnnn

SEQ ID NO: 88692 - DNA, 282 bp, Arabidopsis thaliana columbia
ctcatttatacagtcttccaaaggctcagtatatctctgtttgcaaggatgggaagccatttacattttctagcagatccgggaattctcaaggtcaatcagcgacaaaggatctgttgccgggagcaggcgaggctgttgatactaaatgtactgcacgatcagctaataacgacttgaaggatggaatggttactacaccacacgaaaaggctacagattccaagaaaagtggtaccgagtcaaactctcagccaattgtaggagactcaagctatgaaa

SEQ ID NO: 88693 - DNA, 404 bp, Arabidopsis thaliana columbia
aacataaatgctgaatgtacttcgaaattctaacctgacccttgccgttttgatttgctttgtcttgatagcttcaaagctatgttccgtcgattcctctgtgtatgacccacacaaaaccctgaagcagcggttcgagaagtggcttaaaacccacagcaaattatatggaggaagggatgagtggatgctacggtttgggatatatcagtctaacgtccagttgattgactacatcaactccctccacttgccctttaagctaacggataatagatttgcagatatgaccaattctgagtttaaggcccattttctcgggttgaacacgtcttccttgaggttacacaagaagcagagaccagtttgtgacccagcaggcaatgtcccggacgctgtggact

SEQ ID NO: 88694 - DNA, 351 bp, Arabidopsis thaliana columbia
accagtgaagactacaatgtggcgccggagcttcagtacattaccgaagaagaaatgggacgcggtggtgatcggaggtggccacaacggattaacagccgcagcttacctagcacgcggaggtctctccgtcgctgttctcgagcgccgtcatgtcatcggtggcgcggcagtgacggaggagatcgttcctggattcaaattctcacgctgcagttaccttcagggcttacttcgtccttgtatcattagagaattggagttaggtagacatggacttaagcttttgaagagaagtccttcatcgtttacaccttgtttagatggacgttatcatctgcttggacctga

SEQ ID NO: 88695 - DNA, 2196 bp, Arabidopsis thaliana columbia
  unsure (1)..(2196): unsure at all n locations
cnnnnnnnnnnnnnnnnnnnnnnnnnnnnnnnnnnnnnnnnnnnnnnnnnnnnnnnnnnnnnnnnnnnnnnnccacgcgtccgcggacgcgtgggtagaatcaagaaaagtaaaaccagaaaaagccattttaaataaatagtatcgtgtttgattttaatttcatcaacataattattatataaacacccactcttcacgagtacattcatcatcactcactagtgtcgaacaatggcaccatcaatgaaagaaattttttctaaagataatttcaagaaaaacaagaaacttgttttgctatccgccgccgtagctttgctcttcgtagccgccgtcgccggaatctctgccggagcttcaaaagccaacgaaaaacgaactctatccccgtcgtctcacgccgtgctaagatcctcatgcagctccacgcgttaccctgagctctgtatctctgccgtggtaactgccggcggcgtcgagctaacgtcgcaaaaagatgtcatcgaggcatcggtgaacctaacaataaccgccgtggagcacaattacttcaccgtgaagaagctgatcaagaagaggaaaggactgacgccgcgcgagaagacggcgcttcatgactgtttggagactattgatgagacgctggacgagctccatgaaacggtggaagatctccatttgtatccaaccaaaaaaactctccgggaacacgccggagatctcaaaacactaattagctccgccattaccaaccaggagacttgtctcgacggcttctctcatgacgacgccgataagcaagttcgtaaagccttgttgaaggggcagatacacgtagagcacatgtgcagcaacgctctagcaatgatcaagaacatgactgatactgacatagccaacttcgagcaaaaagctaaaataacctcaaacaaccgtaagctcaaggaggagaatcaggaaactacggtggctgtagatatcgccggagccggagaactagactcggagggatggccaacttggttatccgctggagataggaggcttcttcagggttcaggtgtgaaacgtgacgccaccgtggcagctgacggtagcggtacatttaaaactgtggctgctgcggttgccgcggcccctgaaaatagtaataagaggtatgtgatacatataaaagccggagtttacagagagaatgtggaggttgctaagaagaaaaagaatataatgtttatgggagatggtcggacgagaactattatcaccggaagtcgaaacgttgtagacggtagcaccactttccactccgccaccgttgctgctgtcggcgagagattcttagctcgtgacatcactttccaaaacacggcgggtccgtcgaagcaccaagcggtggctctccgtgtgggttctgatttctccgccttctacaattgcgacatgttagcttatcaagacactctatacgtccactctaaccgtcaattcttcgtcaaatgtctcatcgccggaaccgttgacttcatcttcggaaacgccgccgtcgtgctccaagactgtgacatccacgctcgccgccctaattccggtcagaaaaacatggtcacagctcagggaagaacggatcctaaccagaacacagggatcgttatccagaaatgtaggatcggtgccacgtcggatttacagtcggtgaaaggtagttttccgacgtacttgggtcggccatggaaggaatattcacaaacggtgataatgcagtcggctatctccgacgtgatccgacccgaagggtggtccgagtggaccgggacttttgcgttgaacactctgacttacagagagtattcgaacacaggagcaggggctggaactgcaaatagagtgaagtggaggggctttaaggtaattacggctgctgctgaagctcaaaaatatacggctggtcagtttattggtggtggaggctggttatcgtcgaccggtttccccttctcgctcggtctttgagagattgttgtgtaatgtgttcctacgtattgttggctacaaaaattattgattaatattgtatgaagcaaatcgtgttgtcctctttgttttgtttgggttgtgtactttctctagattatcgtagtattagaaacgagatgaaataatgcgggtttttgcgccttgagaatatggatttga

SEQ ID NO: 88696 - DNA, 1067 bp, Arabidopsis thaliana columbia
  unsure (1)..(1067): unsure at all n locations
gctttgacacgggcctcctcaaacaaaaacaaaaaaacctagcttctctcacaaaacgcatgcaacaacatcgaaattaagaatcaatcaaagcttcttcgttcgatcacactagaaagaaagatggcaacgtctggtgcgatttcaggagctactgtctcttccttcttcaccaaaactactactacttcaaacccatctcccaaactccattcctctgcttctcttttatcacagaaaactgtgtttcaaggagtttcgttggaagattcgaagaagagtgtatcagagatcttcgctgtctccgagagaaagatcggagggttaaatgggttgagaagattcgaaatcaaagcgagagcagcagcttctaagacaatagaggttgaagtagataagcctttgggtctgactctaggacagaagcaaggcggtggagttgtcatcaccggtgtggacggaggagggaacgcagcataagcagggcttaaatctggagatcaagttgtgtacacaagcagtttctttggagatgagctttggcctgcagataagcttggctttactaaaactgcaattcaggcaaaacctgattctgtctactttgttgttagcagaggtgcagaagttgatgttaagaaactaaataagcgtccggctcctccacggtttggaaggaagttaactgagactcagaaggcaagagctactcacatttgtcttgattgtggattcatatacactttacccaaatcttttgacgaacagccggatacatacgtatgtcctcaatgtatagcaccaaagaagaggtttgcaaagtatgacgtgaacacaggaaaggccataggaggaggattgcctccaattggtgtcattgttggcttattggccggtcttggagctgttggagctttgcttgtctatggtcttcaataaatttttcttaaaacntttataatcgctataaaacaagtccgctttgtaatngcaaaccaagaatgnatgttgatgacatcaacttgagagttaaattatgtaaagcattttccgatnccccccctcct

SEQ ID NO: 88697 - DNA, 618 bp, Arabidopsis thaliana columbia
  unsure (1)..(618): unsure at all n locations
atactgataaggagacagacgacgtttttgcttgtaaatcgattttgaagaagaagctgaggacagctgttgatattgaagatgttaggagagaggttgagattatgaggcatatgcctgagcatcctaatgttgttactttgaaggagacttatgaggatgagcatgctgttcatttggttatggagctttgtgaaggtggtgaattgtttgataggattgttgctagagggcattatactgagagagctgctgctgctgtcactaagaccatcatggaagttgttcaggtgtgtcataagcatggggtaatgcacagggacctgaaacctgagaacttcttgtttggaaacaagaaggagactgcacctcttaaggcgattgattttggtctctctgttttctttaaaccaggcgagaggtttaacgaaatcgttggtagtccgtactacatggctcccgaggtgctaaaaccggnaattatggtccagaaggttcatattttggagttcanggtgtaattcttttncaaactncnaatgggggngtccccncttttntggggnanaancttnacaaagggggnttcncaaagcaaattattcgatcntttncnng

SEQ ID NO: 88698 - DNA, 651 bp, Arabidopsis thaliana columbia
  unsure (1)..(651): unsure at all n locations
cccacgcgtccggggttatggcctgagattgctcgaggatgtacgagaggggcaattcctaattgaatatgttggagaggtgcttgatatgcaatcctatgagactcgccaaaaagaatatgctttcaagggtcagaaacatttctatttcatgacactaaatgggaatgaggtaatagatgctggtgcaaagggaaacctagggcgtttcattaaccatagctgtgaaccaaactgccgtactgaaaagtggatggtgaatggtgaaatttgcgttggaatattctccatgcaagaccttaagaagggtcaagagttgacatttgactacaactatgtgagggtttttggtgctgccgccaaaaagtgctattgtggatcatcacattgcagagggtatattgggggagatcctctgaatggtgatgtaattattcaaagtgattcagatgaagagtatcctgaacttgtgatccttgatgatgatgaaagtggagaaggaatcttaggtgcaacatctaggaccttcactgatgacgctgacgagcaaatgccacagagctttgaaaaggttaatggttacaaggaccttgctcctgataatacccaaacacagagctcagtatctgtaaaacttncagagagagaaat

SEQ ID NO: 88699 - DNA, 653 bp, Arabidopsis thaliana columbia
tacgactcacctgaaggagagctgctacgcctgcaggtaccggtccggaattcccgggtcgacccacgcgtccggccacaaaaccctaaaaaatgggtggaagaacggacgaaagtggcggaggaggtaaagagaaagaggaagagcaagatggtttgtccgtacactctccctgtaaagctttaccttcctccgcctcctctctctccaaggagcagtcacaggttgaattagagctaaggttattagaagcccttgaaatctatcctcctgttaaactccgagggatacatcgccactttgttctttatggtctgatggagtatctcggaagaagctttgaccgaccgttcactgcggatgaggttctgcagctactcgatcgtttttacaacattgagatgctgaaatcagatgatgaggacatagacattctgaatcacgaggaagactttaccttgccgcagagtttctttgataaggaagaagaatgacagaggaagaagaaaagatgttttcttttcattcatcttctcccatctttttgtatatggttaggttttgtcttcagctcttatgataagcttttttctatatattctgaagttttaatgtcaataaaaccatcaggatcaatgaataatctttttgtt

SEQ ID NO: 88700 - DNA, 1714 bp, Arabidopsis thaliana columbia
  unsure (1)..(1714): unsure at all n locations
agctctcttcggccctcaattatagggaaagctggtccgcctgcaggtaccggtccggatttcccgggtcgacccacgcgccccctctgatgtgaagaagccatggaagagaagaagaaggagcttgaagagttgaagtatcaatcaggttttggtaaccacttctcatcggaagcaatcgccggagctttaccgttagatcagaacagtcctcttctttgtccttacggtctttacgccgaacagatctccggtacttctttcacttctcctcgcaagctcaatcaaagaagttggttgtaccgggttaaaccatcggttacacatgaaccgttcaagcctcgtgtaccagctcataagaagcttgtgagtgagtttgatgcatcaaatagtcgtacgaatccgactcagcttcggtggagacctgaggatattcctgattcggagattgatttcgttgatgggttatttaccatttgtggagctggaagctcgtttcttcgccatggcttcgctattcacatgtatgtggctaacacaggaatgaaagactccgcattttgcaacgctgatggtgacttcttgttagttcctcaaacaggaaggctatggattgaaactgagtgtggaaggcttttggtaactcctggtgagattgctgttataccacaaggtttccgtttctccatagatttaccggatgggaagtctcgtggttatgttgctgaaatctatggggctcattttcagcttcctgatcttggaccaataggtgctaatggtcttgctgcatcaagagattttcttgcaccaacagcatggtttgaggatggattgcggcctgaatacacaattgttcagaagtttggcggtgaactctttactgctaaacaagatttctctccattcaatgtggttgcctggcatggcaattacgtgccttataagtatgacctgaagaagttctgtccatacaacactgtgcttttagatcatggagatccatctataaatacagtccttacagcaccaactgataaacctggtgtggccttgcttgattttgtcatatttcctcctcgatggttggttgctgagcatacttttcgacctccttactatcatcgtaactgcatgagtgaatttatgggcttaatctacggtgcatacgaggcgaaagctgatggatttctccctggcggtgcaagtcttcatagctgtatgacacctcatggtccagatactaccacgtacgaggcgacaattgctcgagtaaatgcaatggctccttctaaactcacaggtacgatggctttcatgttcgaatcagcattgatccctagagtctgtcattgggctctggagtctcctttcctggatcacgactactaccagtgttggattggcctcaagtctcatttctcgcgcataagcttggacaagacaaatgttgaatcaacagagaaagaaccaggagcttcggagtaaagaacacataattcacctgcaccactttcaatacccaagctgtacagacttttcaccatatacttgtataagaaagaagcatataacaagtacatatgtaataataagtaggtaatgtttcttcatgtcactttaaatacactatttgtactctgaagctaatataacggtgttggtttggatnnnnnnnnnnnnnnnnnnnnnnnnnnnnnnnnnnnnnnnnnnc

SEQ ID NO: 88701 - DNA, 469 bp, Arabidopsis thaliana columbia
cttaatttctgctcaccatcaaggcaagtttccttcttttgatcctcaacaatttccattgctactaaaaatatcttctttccaaaacaattcacgcatttacgtttttctcaatctttacatatatggtaaccaactcttattccattcctctgtaactcacacaaattcctgtccaaaaattagttttttcttttcatgtgatgtgagaatttgggttacgagaaagatgaagactattagtggattaggtattgggttaagtttaatgtttgggtttcttctattagcacttgttggagaagtctactatcttctaagatgtaagaagcacaagaagagagtcataagccaagagagtgaagaagagaaagaagaagaacaacaacaaaacggatacgctaaagaactaatccagctcttctgcttcaaaaaacctcaatctctgcagcaaaacaatggaggaaga

SEQ ID NO: 88702 - DNA, 228 bp, Arabidopsis thaliana columbia
gatgtgtgggagagaggctgagacatttctggggattgatggagatgaaaggagataaagagagttttcagatgtaattaagagaaaacagatcttttggattttagggtttatatccaacaaaagctaaccagagactaataattcaagattggtgcttcggaagaagacgcagaagtgtattttcttgcagttgcaaaactgttacgaaatttttaaagttttcct

SEQ ID NO: 88703 - DNA, 287 bp, Arabidopsis thaliana columbia
gaagacagatatggctgatatggttccaatcgccgccatgaacgaagaccttctccacaacattctcttgagattgccggcaaaatcgtttgctttcgcttcatgtgttaaccgattctggagcagcgtctgcaatcgaattctctctcgccccagaatgatatctgctttctctcgtagtcctgatcaacttagagctggagaagaagtacttgataaggttttgtctgagccaattcgaccacagtttgtgatcgcaaacattacatgtgggaacatggaagaaa

SEQ ID NO: 88704 - DNA, 565 bp, Arabidopsis thaliana columbia
gggactttcactctttctctctctctgctacataagaagaaatggaggtagcagcagcgactgcgacgagcttcacaacgcttcgagctcgtacgtcagcgattatcccgtcttctacacgtaatctgagatctaaaccgagattttcttcatcttcatctctcagagcttctctttcgaatggctttctttcgccgtataccggaggaagcatctctagtgacttatgcggcgctaagcttcgtgcggaatcgcttaatccgttaaatttttccagttccaagcctaaacgcggagttgtcactatggttatacctttctcaaagggaagtgcacacggacaacctcctccctgatttggcatcatatttgttcaaggacccgaattgtatattttggggatgtctctcgtacctccagttactgagttgatacttgcggggtttctttaccttcagtatgaggacggggaaaagcctatttacctttacataaactcgactgggacaaccaagaatggtgaaaggttgggctgggcctctgaggcttttgcaatctatgatgt

SEQ ID NO: 88705 - DNA, 674 bp, Arabidopsis thaliana columbia
  unsure (1)..(674): unsure at all n locations
taatacgactcactttagggaaagctcggtacgcctgcaggtaccggtccggaattcccgggtcgacccacgaatggaggtagcagcagcgactgcgacgagcttcacaacgcttcgagctcgtacgtcagcgattatcccgtcttctacacgtaatctgagatctaaaccgagattttcttcatcttcatctctcagagcttctctttcgaatggctttctttcgccgtataccggaggaagcatctctagtgacttatgcggcgctaagcttcgtgcggaatcgcttaatccgttaaatttttccagttccaagcctaaacgcggagttgtcactatggttatacctttctcaaagggaagtgcacacgaacaacctcctcctgatttggcatcatatttgttcaagaaccgaattgtatatttgggaatgtctctcgtaccttcagttactgagttgatacttgcggagtttctttaccttcagtatgaagacgaggaaaagcctatttacctttacataaactcgactgggacaaccaagaatggtgaaaagttgggctatgatactgaggcttttgcaatctatgatgtcatggggtatgtcaaaccaccaatctttactctntgcgtcgggaatgcttggggtgaagctgctttgcttctgactgctg

SEQ ID NO: 88706 - DNA, 2592 bp, Arabidopsis thaliana columbia
  unsure (1)..(2592): unsure at all n locations
cccaagccttcggttccgcgccaattactctctaatcggaaaagagccccgacgacaacgaccaccgtccctccgtcatgccggagatagacgcgttgtttgaatcgatcaatgttcgggaccttctcgccggacacgatctaaacgatcccacaactccgttatctgcaccggatctccgtctcctcataaaccgcttagagtctcattctctgcggatcaagtccaaagttcagtcttatctcgtcgctcatcactctgatttctcggagctattttctctttgtcaagacaccgtctcgaggactcgtctgatctccgatgacgtctccgatgtcctacaattggtttctgaccgtccgattgatgttgagatacgcagtgtggtagatgagataacggaaaagactaaggaagtgaaattgaaaagagaatctcttgatctagtgaatgcgatcgtgggaatttgtgaggcattgcaggaaacgaaggaagctttgaaaaatggacgtttcagattcgccgctgagagaatcagagaacttaaagttgtattgagaattggtgaagaggaagatggagaacctgtggcttacgctttacttaggaaggaatggtctaattgctttgacgagattcaagaggtgcttgcaaagttcatggagaatgcagtgcgttttgagctagactcgagtagaatccggattaagtatcagctaagcgttggtgagactgctggaatcgctcttagtactgttctagaggcaatggaggtgattggaatattagactatgggcttgcgaaagcagctgactcaatctttaagcatgtcatcactccagctgtaactcatgcatctacctttgccgctgtggaagatttatgtaaatccgcaggggaagtcaccgaagcgacactaaggctagagcaatcctcagatcataagtttgaagatgtggatggagatgcaatgtattctggaattcttaaggttgttaagttcatttgcagttccttgtgctttggaaacgttacatggatccattcttttgggaggttgacatggccgaggatatcagagttaattatatctaaatttctttcaaaggttgtcccagaagatgcttcaaaacttgctgactttcagaaaattatcgagcggacctctcaattcgaagccgctctaaaggaactgaattttgtttcatcatctgacgcagagagtaggctcagcaaatatgctgaagatgtggaggttcattttgcatctagaaagaagatagaaatcctagcaaaagcaagaaatttgctgttgcagtgtaactttacgattccccaggatattgctatgaggaatgccaagcacatcgtctgcttacttttctcctctgaaaggtgtgtggtatctgaagctgcatctcaacttatgaatttggtgcataagacgctcgaggatgtctgtgtttcttctgcaagggttgcttcagagttctacaacgctgctagagattctatccttctatatgaagctgttgttcctgtcaagctagagaaacaactcgatggcctcaatgaagctgctgttcttctgcacaacgattgtctatatttgttcgaagagatacttggccttgcttttgagtatcgtgctagcttccctagctccatcaaggagtatgcagtctttgctgacatagccccaagatttaaactgatggccgaagaagttttgcaaaaacaagttcatctagtaatttcaagtctgcgagaggctatagatagtgcagatggatttcagaatactcatcaaattaaacagtttaaatctgcagaatttagcattgatcaggttgtctttagtctaaagaatgtgcatatgatatgggagccagtcttacggcccaaaacttacaagcaaagcatgtgcgcagttttggagtctgtatttcgcagaatagctagagatattcttcttctagacgacatggctgctgacgaaactttcgagctacaaaaactgatttatctcatgttgaagaatctatcttctgtactcgattccgtgagatctgcagatgagacttctcgtcctcttgatgatatcataccatctttgcgcaaaacccgtaaactagcagaactattggatatgcctctcatgtctataacttcagcttgggaaagcggggagttatttagatgcaatttcacaagaacagaggtacaagatttcatcaaagctatatttacagattcgccgctgagaaaagaatgcttatggaggatagacgaggttaaccagtagattggaaatgataaaacttaaaaaaaaaactcaagacttgtgagaagaagcaagtgaaagcctattttggcaaaagagccatgaggtattttaatgtcagcagcttgtaacatcgacgacgcactcttgtgtaagaatatatatgtaaagagagttttagctgatgagtttaaaactttaggtttaaaagcgtgttccagattttgttgtacatttgggctttagattcaacaagtaaaacgctctgggtaacaacnnnnnnnnnnnnnnnnnnnnnnnnnnnnnn

SEQ ID NO: 88707 - DNA, 459 bp, Arabidopsis thaliana columbia
ttcgtccgcggtcgcgtgggctgaagtgttggctcatctctttccagattccggcttcgaaatttgggagataagcgatggcaaacgccaatggaaaagctgcgactagtttaccggagaaaatctcggctaaggcgaatccggaggccgatgatgctacggagatcgctgggaatatcgtctaccacgccaagtacagtccacatttctctccattgaagttcgggcctgagcaagctctctacgctaccgcagagagtcttcgcgatcgtctcattcagctgtggaatgagacttatgttcattttaacaaagttgatccaaaacaaacttattacttgtcaatggagtatctccaaggtcgtgctttgaccaatgccattgggaatttgaaccttcaaggtccatatgctgatgcactgcgtacgctgggttatgagcttgaggagatagctgagc

SEQ ID NO: 88708 - DNA, 856 bp, Arabidopsis thaliana columbia
  unsure (1)..(856): unsure at all n locations
gaagagctttgacgtcacctgcacgcgtacgtaagcttggatcctctagagcggtcgcccttttttttttttttttttttggttttttttttttttttttttggatagggtcaagattttcataactttaccgtagttaatatttgacccaaccatggttaaaataaagcagtttatatcacagacacacacctctctctcttctagactcactaaacaaaaatgatgatcggcgaaaataaaaaccggccacatccaacgatccatatccctcaatgggatcaaatcaacgatccaacggccacaatctcttcaccattctcttccgtcaaccttaacagcgttaacgactacccacactctccgtcaccgtatctcgactccttcgcttctctcttccgttacctcccgtcaaacgagttaacaaacgattcagactcatcaagtggcgacgagtcatcaccactcaccgactcattctcctccgacgagtttcgcatctacgagttcaaaatccggcgatgcgctcgaggtcgatctcatgattggacgggagtgtcccgttcgnacattccccggaggaaaagcttcgacggccgtgatcccgnggaaggtttcattacctccgggaaccggtttgtccctgaggtttcggtaaagggaagttttaaggaagagggtgattccgtggtaaggttccctcaatgggngttttcggggtttttgggtccatcctttttgggtaaccggaattagcccgtttnaaggcgganctttgttccgggggagattttttttttgggtaaaaaggggggatttagggtttacccttttcgaaaagccnaanttgggtggc

SEQ ID NO: 88709 - DNA, 1413 bp, Arabidopsis thaliana columbia
gaacattgactggccgtctgcggtaccggtccggaattcccgggtcgacccacgcgtcccaaaaatgatgatcggcgaaaataaaaaccggccacatccaacgatccatatccctcaatgggatcaaatcaacgatccaacggccacaatctcttcaccattctcttccgtcaaccttaacagcgttaacgactacccacactctccgtcaccgtatctcgactccttcgcttctctcttccgttacctcccgtcaaacgagttaacaaacgattcagactcatcaagtggcgacgagtcatcaccactcaccgactcattctcctccgacgagtttcgcatctacgagttcaaaatccggcgatgcgctcgaggtcgatctcatgattggacggagtgtccgttcgcacatcccggagaaaaagctcgacgacgtgatccgagaaagtttcattactccggcaccgcttgtcctgagtttcgtaaaggaagttgtagaagaggtgattcgtgtgagttctctcatggagttttcgagtgttggctccatccttctcgttaccgtactcagccgtgtaaagacggaactagctgccggagaagaatctgtttcttcgctcatacgacggagcagttacgtgtattaccttgttcgttagatccagatcttggattcttctcaggattagctacttctccgacttcgattcttgtttctccttcgttttcaccaccgtcggaatctccgccgctttctccgagtaccggtgaacttattgcgtcgatgaggaaaatgcaattgaacggaggtggttgttcgtggagttctccgatgagatctgcagttaggttacctttttcgtcgtctctgcgtccgattcaggcggcaacgtggccgaggataagagagtttgagatcgaagaagctccggcgatggaatttgtggaatctgggaaagagctgagagcggagatgtatgcaagactcagtagagagaactcactcggttgagtcgacttggatcgagtctttgatgacgtggcgactcgatctgattttgtgaatattttagagatttttaaggtgttgtggataaatgacgtggcgggtcgatcttagtgacggtacaatcggacgatgaagaaaaaagcgttaagagtaacaaaaaaaggaagaatttgtaaagagatgataatgagagaatttgagagctattcttctggcttttttctctgcagttttttttattgttttcgttattttcttgtttttattttggttttcggctttattttgtttgttgtttattaatgttatatcattttgtaattagttctcaaatgtatttggataacatcttagtttgagactttagaaaagaacatttcatttaaaaaaaaaaaaaaaaaagg

SEQ ID NO: 88710 - DNA, 886 bp, Arabidopsis thaliana columbia
  unsure (1)..(886): unsure at all n locations
gaacaggaagaagatagagaacagagctcttcgatcttttttcctccaaggaagaagtagaaagatgggatttcatgttcttagacctcccatagctttacgcagctctctcctcggcttcttatccaaatcacacaatcctcttctccccgggagatgggttcaagctggagaatgcagtaccatgagatgttttgcttctgctactcgtggcaaaaacaaaaaacagagactagatgaggcatgtgttgaaaggtttaacgaatacagtcgcacactaatacaatcgtggattatgcaaggcaaagttcttgtggatgggagaagagttattaaagctggaatgcctgtatctactactgcagctataaagatcacagctgaggttccaaaatttgtatgtagaggtggactcaagctggaagctgcacttgagaagctagatgttgatgtttctgagaaagtagttcttgatgcaggactttctactggagggtttacggattgtttgctacgttatggtgctgctcatgtttatggcgtagatgttggttacggtcaggtagctgacaaaattcgcaatgataagaaagtgactgttatagaaaggacaaatctgagatacctcccaggactcccacaaaaagtcgatgtagtgacgcttgacccctctttcatttcccattcttaagggtgatgccagctatttatgaatgtaatgaaagaagatgcggctttagttacccttgttaaacccccaattttgaagctccgaaggcaaccaggtcggggaagggtcgcatagtgtgggancccccgtcatccggggtgttgggttctttgagaaggtgattaaccgggtttttagcnccttttgggttttncc

SEQ ID NO: 88711 - DNA, 1597 bp, Arabidopsis thaliana columbia
cccacgcaacaacaccaaccaataattaaacaaatggccaacaacaattccaactctcccaccggtccacactttctattcgtaacatttccagcccaaggtcacatcaacccatctctcgagctagccaaacgcctcgccggaacaatctctggtgctcgagtcaccttcgccgcctcaatctctgcctacaaccgccgcatgttctctacagaaaacgtccccgaaaccctaatcttcgctacctactccgatggccacgacgacggtttcaaatcctctgcttactccgacaaatctcgtcaagacgccactggaaacttcatgtctgagatgagacgacgtggcaaagagacactaaccgaactaatcgaagataaccggaaacaaaacaggccttttacttgcgtggtttacacgattctcctcacttgggtcgctgagctagcgcgtgagtttcatcttccttctgctcttctttgggtccaaccagtaacagtcttctccattttttaccattacttcaatggctacgaagatgcaatctcagagatggctaataccccctctagttctattaaattaccttctctgccactgcttactgtccgtgatattccttctttcattgtctcttccaatgtctacgcgtttcttctacccgcgtttcgagaacagattgattcactgaaggaagaaataaaccctaagatcctcatcaacactttccaagagcttgagccagaagccatgagctcggttccagataatttcaagattgtccctgtcggtccgttactaacgttgagaacggatttttcgagtcgcggtgaatacatagagtggttggatactaaagcggattcgtctgtgctttatgtttcgttcgggacgcttgccgtgttgagcaagaaacagcttgtggagctttgtaaagcgttgatacaaagtcggagaccattcttgtgggtgattacggataagtcgtacagaaataaagaagatgagcaagagaaggaagaagattgcataagtagttcagagaagagcttcgatgagataggaatggtggtttcatggtgtgatcagtttagggttttgaatcatagatcgataggttgtttcgtgacgcattgcgggtggaactctacgctggagagcttggtttcaggagttccggtggtggcgtttccgcaatggaatgatcagatgacgaacgcgaagcttttagaagattgttggaaaacaggtgtaagagtgatggagaagaaggaagaagaaggagttgtggtggtggatagtgaggagatacggcggtgcattgaggaagttatggaagacaaggcggaggagtttagaggaaatgccacgaggtggaaggatttagcggcggaggctgtgagagaaggaggctcttcctttaatcatctcaaagcttttgtcgatgagcacatgtgatttgggtatcagaaattataacaacactccgcttttctgttcttccttgctctgtttcaatgtttacacaatacagtagacagtattttggatgttgattggttagttttgaagatgatgaaatgtaatttattcaaga
